United States Patent Application Publication US 2012/0157512 A1 - sequence listing, part 4

SEQ ID NO: 97595 - DNA, 20 bp, Artificial sequence
  SiRNA target sequence
gagtcgaacatacaaatata

SEQ ID NO: 97596 - DNA, 20 bp, Artificial sequence
  SiRNA target sequence
agtcgaacatacaaatataa

SEQ ID NO: 97597 - DNA, 20 bp, Artificial sequence
  SiRNA target sequence
gtcgaacatacaaatataat

SEQ ID NO: 97598 - DNA, 20 bp, Artificial sequence
  SiRNA target sequence
tcgaacatacaaatataatc

SEQ ID NO: 97599 - DNA, 20 bp, Artificial sequence
  SiRNA target sequence
cgaacatacaaatataatca

SEQ ID NO: 97600 - DNA, 20 bp, Artificial sequence
  SiRNA target sequence
gaacatacaaatataatcat

SEQ ID NO: 97601 - DNA, 20 bp, Artificial sequence
  SiRNA target sequence
aacatacaaatataatcata

SEQ ID NO: 97602 - DNA, 20 bp, Artificial sequence
  SiRNA target sequence
acatacaaatataatcatat

SEQ ID NO: 97603 - DNA, 20 bp, Artificial sequence
  SiRNA target sequence
catacaaatataatcatatc

SEQ ID NO: 97604 - DNA, 20 bp, Artificial sequence
  SiRNA target sequence
atacaaatataatcatatca

SEQ ID NO: 97605 - DNA, 20 bp, Artificial sequence
  SiRNA target sequence
tacaaatataatcatatcaa

SEQ ID NO: 97606 - DNA, 20 bp, Artificial sequence
  SiRNA target sequence
acaaatataatcatatcaat

SEQ ID NO: 97607 - DNA, 20 bp, Artificial sequence
  SiRNA target sequence
caaatataatcatatcaata

SEQ ID NO: 97608 - DNA, 20 bp, Artificial sequence
  SiRNA target sequence
aaatataatcatatcaatat

SEQ ID NO: 97609 - DNA, 20 bp, Artificial sequence
  SiRNA target sequence
aatataatcatatcaatatc

SEQ ID NO: 97610 - DNA, 20 bp, Artificial sequence
  SiRNA target sequence
atataatcatatcaatatct

SEQ ID NO: 97611 - DNA, 20 bp, Artificial sequence
  SiRNA target sequence
tataatcatatcaatatcta

SEQ ID NO: 97612 - DNA, 20 bp, Artificial sequence
  SiRNA target sequence
ataatcatatcaatatctaa

SEQ ID NO: 97613 - DNA, 20 bp, Artificial sequence
  SiRNA target sequence
taatcatatcaatatctaat

SEQ ID NO: 97614 - DNA, 20 bp, Artificial sequence
  SiRNA target sequence
aatcatatcaatatctaata

SEQ ID NO: 97615 - DNA, 20 bp, Artificial sequence
  SiRNA target sequence
atcatatcaatatctaatat

SEQ ID NO: 97616 - DNA, 20 bp, Artificial sequence
  SiRNA target sequence
tcatatcaatatctaatatt

SEQ ID NO: 97617 - DNA, 20 bp, Artificial sequence
  SiRNA target sequence
catatcaatatctaatattt

SEQ ID NO: 97618 - DNA, 20 bp, Artificial sequence
  SiRNA target sequence
atatcaatatctaatatttt

SEQ ID NO: 97619 - DNA, 20 bp, Artificial sequence
  SiRNA target sequence
tatcaatatctaatattttt

SEQ ID NO: 97620 - DNA, 20 bp, Artificial sequence
  SiRNA target sequence
atcaatatctaatatttttt

SEQ ID NO: 97621 - DNA, 20 bp, Artificial sequence
  SiRNA target sequence
tcaatatctaatattttttc

SEQ ID NO: 97622 - DNA, 20 bp, Artificial sequence
  SiRNA target sequence
caatatctaatattttttcg

SEQ ID NO: 97623 - DNA, 20 bp, Artificial sequence
  SiRNA target sequence
aatatctaatattttttcga

SEQ ID NO: 97624 - DNA, 20 bp, Artificial sequence
  SiRNA target sequence
atatctaatattttttcgaa

SEQ ID NO: 97625 - DNA, 20 bp, Artificial sequence
  SiRNA target sequence
tatctaatattttttcgaaa

SEQ ID NO: 97626 - DNA, 20 bp, Artificial sequence
  SiRNA target sequence
atctaatattttttcgaaat

SEQ ID NO: 97627 - DNA, 20 bp, Artificial sequence
  SiRNA target sequence
tctaatattttttcgaaatc

SEQ ID NO: 97628 - DNA, 20 bp, Artificial sequence
  SiRNA target sequence
ctaatattttttcgaaatca

SEQ ID NO: 97629 - DNA, 20 bp, Artificial sequence
  SiRNA target sequence
taatattttttcgaaatcaa

SEQ ID NO: 97630 - DNA, 20 bp, Artificial sequence
  SiRNA target sequence
aatattttttcgaaatcaaa

SEQ ID NO: 97631 - DNA, 20 bp, Artificial sequence
  SiRNA target sequence
atattttttcgaaatcaaaa

SEQ ID NO: 97632 - DNA, 20 bp, Artificial sequence
  SiRNA target sequence
tattttttcgaaatcaaaac

SEQ ID NO: 97633 - DNA, 20 bp, Artificial sequence
  SiRNA target sequence
attttttcgaaatcaaaact

SEQ ID NO: 97634 - DNA, 20 bp, Artificial sequence
  SiRNA target sequence
ttttttcgaaatcaaaactg

SEQ ID NO: 97635 - DNA, 20 bp, Artificial sequence
  SiRNA target sequence
tttttcgaaatcaaaactgt

SEQ ID NO: 97636 - DNA, 20 bp, Artificial sequence
  SiRNA target sequence
ttttcgaaatcaaaactgtc

SEQ ID NO: 97637 - DNA, 20 bp, Artificial sequence
  SiRNA target sequence
tttcgaaatcaaaactgtcc

SEQ ID NO: 97638 - DNA, 20 bp, Artificial sequence
  SiRNA target sequence
ttcgaaatcaaaactgtcca

SEQ ID NO: 97639 - DNA, 20 bp, Artificial sequence
  SiRNA target sequence
tcgaaatcaaaactgtccat

SEQ ID NO: 97640 - DNA, 20 bp, Artificial sequence
  SiRNA target sequence
cgaaatcaaaactgtccata

SEQ ID NO: 97641 - DNA, 20 bp, Artificial sequence
  SiRNA target sequence
gaaatcaaaactgtccatat

SEQ ID NO: 97642 - DNA, 20 bp, Artificial sequence
  SiRNA target sequence
aaatcaaaactgtccatatc

SEQ ID NO: 97643 - DNA, 20 bp, Artificial sequence
  SiRNA target sequence
aatcaaaactgtccatatct

SEQ ID NO: 97644 - DNA, 20 bp, Artificial sequence
  SiRNA target sequence
atcaaaactgtccatatcta

SEQ ID NO: 97645 - DNA, 20 bp, Artificial sequence
  SiRNA target sequence
tcaaaactgtccatatctaa

SEQ ID NO: 97646 - DNA, 20 bp, Artificial sequence
  SiRNA target sequence
caaaactgtccatatctaaa

SEQ ID NO: 97647 - DNA, 20 bp, Artificial sequence
  SiRNA target sequence
aaaactgtccatatctaaag

SEQ ID NO: 97648 - DNA, 20 bp, Artificial sequence
  SiRNA target sequence
aaactgtccatatctaaagt

SEQ ID NO: 97649 - DNA, 20 bp, Artificial sequence
  SiRNA target sequence
aactgtccatatctaaagta

SEQ ID NO: 97650 - DNA, 20 bp, Artificial sequence
  SiRNA target sequence
actgtccatatctaaagtaa

SEQ ID NO: 97651 - DNA, 20 bp, Artificial sequence
  SiRNA target sequence
ctgtccatatctaaagtaaa

SEQ ID NO: 97652 - DNA, 20 bp, Artificial sequence
  SiRNA target sequence
tgtccatatctaaagtaaaa

SEQ ID NO: 97653 - DNA, 20 bp, Artificial sequence
  SiRNA target sequence
gtccatatctaaagtaaaat

SEQ ID NO: 97654 - DNA, 20 bp, Artificial sequence
  SiRNA target sequence
tccatatctaaagtaaaatc

SEQ ID NO: 97655 - DNA, 20 bp, Artificial sequence
  SiRNA target sequence
ccatatctaaagtaaaatct

SEQ ID NO: 97656 - DNA, 20 bp, Artificial sequence
  SiRNA target sequence
catatctaaagtaaaatctg

SEQ ID NO: 97657 - DNA, 20 bp, Artificial sequence
  SiRNA target sequence
atatctaaagtaaaatctgt

SEQ ID NO: 97658 - DNA, 20 bp, Artificial sequence
  SiRNA target sequence
tatctaaagtaaaatctgtt

SEQ ID NO: 97659 - DNA, 20 bp, Artificial sequence
  SiRNA target sequence
atctaaagtaaaatctgttg

SEQ ID NO: 97660 - DNA, 20 bp, Artificial sequence
  SiRNA target sequence
tctaaagtaaaatctgttgg

SEQ ID NO: 97661 - DNA, 20 bp, Artificial sequence
  SiRNA target sequence
ctaaagtaaaatctgttgga

SEQ ID NO: 97662 - DNA, 20 bp, Artificial sequence
  SiRNA target sequence
taaagtaaaatctgttggaa

SEQ ID NO: 97663 - DNA, 20 bp, Artificial sequence
  SiRNA target sequence
aaagtaaaatctgttggaag

SEQ ID NO: 97664 - DNA, 20 bp, Artificial sequence
  SiRNA target sequence
aagtaaaatctgttggaagc

SEQ ID NO: 97665 - DNA, 20 bp, Artificial sequence
  SiRNA target sequence
agtaaaatctgttggaagca

SEQ ID NO: 97666 - DNA, 20 bp, Artificial sequence
  SiRNA target sequence
gtaaaatctgttggaagcaa

SEQ ID NO: 97667 - DNA, 20 bp, Artificial sequence
  SiRNA target sequence
taaaatctgttggaagcaat

SEQ ID NO: 97668 - DNA, 20 bp, Artificial sequence
  SiRNA target sequence
aaaatctgttggaagcaatt

SEQ ID NO: 97669 - DNA, 20 bp, Artificial sequence
  SiRNA target sequence
aaatctgttggaagcaattc

SEQ ID NO: 97670 - DNA, 20 bp, Artificial sequence
  SiRNA target sequence
aatctgttggaagcaattct

SEQ ID NO: 97671 - DNA, 20 bp, Artificial sequence
  SiRNA target sequence
atctgttggaagcaattctt

SEQ ID NO: 97672 - DNA, 20 bp, Artificial sequence
  SiRNA target sequence
tctgttggaagcaattcttt

SEQ ID NO: 97673 - DNA, 20 bp, Artificial sequence
  SiRNA target sequence
ctgttggaagcaattcttta

SEQ ID NO: 97674 - DNA, 20 bp, Artificial sequence
  SiRNA target sequence
tgttggaagcaattctttat

SEQ ID NO: 97675 - DNA, 20 bp, Artificial sequence
  SiRNA target sequence
gttggaagcaattctttatc

SEQ ID NO: 97676 - DNA, 20 bp, Artificial sequence
  SiRNA target sequence
ttggaagcaattctttatca

SEQ ID NO: 97677 - DNA, 20 bp, Artificial sequence
  SiRNA target sequence
tggaagcaattctttatcaa

SEQ ID NO: 97678 - DNA, 20 bp, Artificial sequence
  SiRNA target sequence
ggaagcaattctttatcaac

SEQ ID NO: 97679 - DNA, 20 bp, Artificial sequence
  SiRNA target sequence
gaagcaattctttatcaacg

SEQ ID NO: 97680 - DNA, 20 bp, Artificial sequence
  SiRNA target sequence
aagcaattctttatcaacgt

SEQ ID NO: 97681 - DNA, 20 bp, Artificial sequence
  SiRNA target sequence
agcaattctttatcaacgtt

SEQ ID NO: 97682 - DNA, 20 bp, Artificial sequence
  SiRNA target sequence
gcaattctttatcaacgtta

SEQ ID NO: 97683 - DNA, 20 bp, Artificial sequence
  SiRNA target sequence
caattctttatcaacgttat

SEQ ID NO: 97684 - DNA, 20 bp, Artificial sequence
  SiRNA target sequence
aattctttatcaacgttata

SEQ ID NO: 97685 - DNA, 20 bp, Artificial sequence
  SiRNA target sequence
attctttatcaacgttataa

SEQ ID NO: 97686 - DNA, 20 bp, Artificial sequence
  SiRNA target sequence
ttctttatcaacgttataaa

SEQ ID NO: 97687 - DNA, 20 bp, Artificial sequence
  SiRNA target sequence
tctttatcaacgttataaat

SEQ ID NO: 97688 - DNA, 20 bp, Artificial sequence
  SiRNA target sequence
ctttatcaacgttataaatc

SEQ ID NO: 97689 - DNA, 20 bp, Artificial sequence
  SiRNA target sequence
tttatcaacgttataaatca

SEQ ID NO: 97690 - DNA, 20 bp, Artificial sequence
  SiRNA target sequence
ttatcaacgttataaatcaa

SEQ ID NO: 97691 - DNA, 20 bp, Artificial sequence
  SiRNA target sequence
tatcaacgttataaatcaaa

SEQ ID NO: 97692 - DNA, 20 bp, Artificial sequence
  SiRNA target sequence
atcaacgttataaatcaaat

SEQ ID NO: 97693 - DNA, 20 bp, Artificial sequence
  SiRNA target sequence
tcaacgttataaatcaaatc

SEQ ID NO: 97694 - DNA, 20 bp, Artificial sequence
  SiRNA target sequence
caacgttataaatcaaatct

SEQ ID NO: 97695 - DNA, 20 bp, Artificial sequence
  SiRNA target sequence
aacgttataaatcaaatctt

SEQ ID NO: 97696 - DNA, 20 bp, Artificial sequence
  SiRNA target sequence
acgttataaatcaaatcttt

SEQ ID NO: 97697 - DNA, 20 bp, Artificial sequence
  SiRNA target sequence
cgttataaatcaaatcttta

SEQ ID NO: 97698 - DNA, 20 bp, Artificial sequence
  SiRNA target sequence
gttataaatcaaatctttat

SEQ ID NO: 97699 - DNA, 20 bp, Artificial sequence
  SiRNA target sequence
ttataaatcaaatctttatt

SEQ ID NO: 97700 - DNA, 20 bp, Artificial sequence
  SiRNA target sequence
tataaatcaaatctttattg

SEQ ID NO: 97701 - DNA, 20 bp, Artificial sequence
  SiRNA target sequence
ataaatcaaatctttattgt

SEQ ID NO: 97702 - DNA, 20 bp, Artificial sequence
  SiRNA target sequence
taaatcaaatctttattgta

SEQ ID NO: 97703 - DNA, 20 bp, Artificial sequence
  SiRNA target sequence
aaatcaaatctttattgtat

SEQ ID NO: 97704 - DNA, 20 bp, Artificial sequence
  SiRNA target sequence
aatcaaatctttattgtatc

SEQ ID NO: 97705 - DNA, 20 bp, Artificial sequence
  SiRNA target sequence
atcaaatctttattgtatcc

SEQ ID NO: 97706 - DNA, 20 bp, Artificial sequence
  SiRNA target sequence
tcaaatctttattgtatccg

SEQ ID NO: 97707 - DNA, 20 bp, Artificial sequence
  SiRNA target sequence
caaatctttattgtatccgt

SEQ ID NO: 97708 - DNA, 20 bp, Artificial sequence
  SiRNA target sequence
aaatctttattgtatccgta

SEQ ID NO: 97709 - DNA, 20 bp, Artificial sequence
  SiRNA target sequence
aatctttattgtatccgtat

SEQ ID NO: 97710 - DNA, 20 bp, Artificial sequence
  SiRNA target sequence
atctttattgtatccgtata

SEQ ID NO: 97711 - DNA, 20 bp, Artificial sequence
  SiRNA target sequence
tctttattgtatccgtatag

SEQ ID NO: 97712 - DNA, 20 bp, Artificial sequence
  SiRNA target sequence
ctttattgtatccgtatagt

SEQ ID NO: 97713 - DNA, 20 bp, Artificial sequence
  SiRNA target sequence
tttattgtatccgtatagta

SEQ ID NO: 97714 - DNA, 20 bp, Artificial sequence
  SiRNA target sequence
ttattgtatccgtatagtat

SEQ ID NO: 97715 - DNA, 20 bp, Artificial sequence
  SiRNA target sequence
tattgtatccgtatagtata

SEQ ID NO: 97716 - DNA, 20 bp, Artificial sequence
  SiRNA target sequence
attgtatccgtatagtataa

SEQ ID NO: 97717 - DNA, 20 bp, Artificial sequence
  SiRNA target sequence
ttgtatccgtatagtataac

SEQ ID NO: 97718 - DNA, 20 bp, Artificial sequence
  SiRNA target sequence
tgtatccgtatagtataaca

SEQ ID NO: 97719 - DNA, 20 bp, Artificial sequence
  SiRNA target sequence
gtatccgtatagtataacat

SEQ ID NO: 97720 - DNA, 20 bp, Artificial sequence
  SiRNA target sequence
tatccgtatagtataacatt

SEQ ID NO: 97721 - DNA, 20 bp, Artificial sequence
  SiRNA target sequence
atccgtatagtataacattt

SEQ ID NO: 97722 - DNA, 20 bp, Artificial sequence
  SiRNA target sequence
tccgtatagtataacatttt

SEQ ID NO: 97723 - DNA, 20 bp, Artificial sequence
  SiRNA target sequence
ccgtatagtataacattttg

SEQ ID NO: 97724 - DNA, 20 bp, Artificial sequence
  SiRNA target sequence
cgtatagtataacattttga

SEQ ID NO: 97725 - DNA, 20 bp, Artificial sequence
  SiRNA target sequence
gtatagtataacattttgaa

SEQ ID NO: 97726 - DNA, 20 bp, Artificial sequence
  SiRNA target sequence
tatagtataacattttgaat

SEQ ID NO: 97727 - DNA, 20 bp, Artificial sequence
  SiRNA target sequence
atagtataacattttgaata

SEQ ID NO: 97728 - DNA, 20 bp, Artificial sequence
  SiRNA target sequence
tagtataacattttgaataa

SEQ ID NO: 97729 - DNA, 20 bp, Artificial sequence
  SiRNA target sequence
agtataacattttgaataag

SEQ ID NO: 97730 - DNA, 20 bp, Artificial sequence
  SiRNA target sequence
gtataacattttgaataagt

SEQ ID NO: 97731 - DNA, 20 bp, Artificial sequence
  SiRNA target sequence
tataacattttgaataagtt

SEQ ID NO: 97732 - DNA, 20 bp, Artificial sequence
  SiRNA target sequence
ataacattttgaataagttt

SEQ ID NO: 97733 - DNA, 20 bp, Artificial sequence
  SiRNA target sequence
taacattttgaataagttta

SEQ ID NO: 97734 - DNA, 20 bp, Artificial sequence
  SiRNA target sequence
aacattttgaataagtttag

SEQ ID NO: 97735 - DNA, 20 bp, Artificial sequence
  SiRNA target sequence
acattttgaataagtttagc

SEQ ID NO: 97736 - DNA, 20 bp, Artificial sequence
  SiRNA target sequence
cattttgaataagtttagca

SEQ ID NO: 97737 - DNA, 20 bp, Artificial sequence
  SiRNA target sequence
attttgaataagtttagcaa

SEQ ID NO: 97738 - DNA, 20 bp, Artificial sequence
  SiRNA target sequence
ttttgaataagtttagcaat

SEQ ID NO: 97739 - DNA, 20 bp, Artificial sequence
  SiRNA target sequence
tttgaataagtttagcaata

SEQ ID NO: 97740 - DNA, 20 bp, Artificial sequence
  SiRNA target sequence
ttgaataagtttagcaatat

SEQ ID NO: 97741 - DNA, 20 bp, Artificial sequence
  SiRNA target sequence
tgaataagtttagcaatatg

SEQ ID NO: 97742 - DNA, 20 bp, Artificial sequence
  SiRNA target sequence
gaataagtttagcaatatgt

SEQ ID NO: 97743 - DNA, 20 bp, Artificial sequence
  SiRNA target sequence
aataagtttagcaatatgta

SEQ ID NO: 97744 - DNA, 20 bp, Artificial sequence
  SiRNA target sequence
ataagtttagcaatatgtat

SEQ ID NO: 97745 - DNA, 20 bp, Artificial sequence
  SiRNA target sequence
taagtttagcaatatgtata

SEQ ID NO: 97746 - DNA, 20 bp, Artificial sequence
  SiRNA target sequence
aagtttagcaatatgtatag

SEQ ID NO: 97747 - DNA, 20 bp, Artificial sequence
  SiRNA target sequence
agtttagcaatatgtataga

SEQ ID NO: 97748 - DNA, 20 bp, Artificial sequence
  SiRNA target sequence
gtttagcaatatgtatagaa

SEQ ID NO: 97749 - DNA, 20 bp, Artificial sequence
  SiRNA target sequence
tttagcaatatgtatagaat

SEQ ID NO: 97750 - DNA, 20 bp, Artificial sequence
  SiRNA target sequence
ttagcaatatgtatagaatt

SEQ ID NO: 97751 - DNA, 20 bp, Artificial sequence
  SiRNA target sequence
tagcaatatgtatagaattt

SEQ ID NO: 97752 - DNA, 20 bp, Artificial sequence
  SiRNA target sequence
agcaatatgtatagaatttc

SEQ ID NO: 97753 - DNA, 20 bp, Artificial sequence
  SiRNA target sequence
gcaatatgtatagaatttcc

SEQ ID NO: 97754 - DNA, 20 bp, Artificial sequence
  SiRNA target sequence
caatatgtatagaatttcct

SEQ ID NO: 97755 - DNA, 20 bp, Artificial sequence
  SiRNA target sequence
aatatgtatagaatttcctg

SEQ ID NO: 97756 - DNA, 20 bp, Artificial sequence
  SiRNA target sequence
atatgtatagaatttcctgt

SEQ ID NO: 97757 - DNA, 20 bp, Artificial sequence
  SiRNA target sequence
tatgtatagaatttcctgtt

SEQ ID NO: 97758 - DNA, 20 bp, Artificial sequence
  SiRNA target sequence
atgtatagaatttcctgttt

SEQ ID NO: 97759 - DNA, 20 bp, Artificial sequence
  SiRNA target sequence
tgtatagaatttcctgtttg

SEQ ID NO: 97760 - DNA, 20 bp, Artificial sequence
  SiRNA target sequence
gtatagaatttcctgtttgg

SEQ ID NO: 97761 - DNA, 20 bp, Artificial sequence
  SiRNA target sequence
tatagaatttcctgtttggg

SEQ ID NO: 97762 - DNA, 20 bp, Artificial sequence
  SiRNA target sequence
atagaatttcctgtttggga

SEQ ID NO: 97763 - DNA, 20 bp, Artificial sequence
  SiRNA target sequence
tagaatttcctgtttgggag

SEQ ID NO: 97764 - DNA, 20 bp, Artificial sequence
  SiRNA target sequence
agaatttcctgtttgggagc

SEQ ID NO: 97765 - DNA, 20 bp, Artificial sequence
  SiRNA target sequence
gaatttcctgtttgggagcc

SEQ ID NO: 97766 - DNA, 20 bp, Artificial sequence
  SiRNA target sequence
aatttcctgtttgggagcca

SEQ ID NO: 97767 - DNA, 20 bp, Artificial sequence
  SiRNA target sequence
atttcctgtttgggagccat

SEQ ID NO: 97768 - DNA, 20 bp, Artificial sequence
  SiRNA target sequence
tttcctgtttgggagccata

SEQ ID NO: 97769 - DNA, 20 bp, Artificial sequence
  SiRNA target sequence
ttcctgtttgggagccatat

SEQ ID NO: 97770 - DNA, 20 bp, Artificial sequence
  SiRNA target sequence
tcctgtttgggagccatata

SEQ ID NO: 97771 - DNA, 20 bp, Artificial sequence
  SiRNA target sequence
cctgtttgggagccatataa

SEQ ID NO: 97772 - DNA, 20 bp, Artificial sequence
  SiRNA target sequence
ctgtttgggagccatataag

SEQ ID NO: 97773 - DNA, 20 bp, Artificial sequence
  SiRNA target sequence
tgtttgggagccatataaga

SEQ ID NO: 97774 - DNA, 20 bp, Artificial sequence
  SiRNA target sequence
gtttgggagccatataagat

SEQ ID NO: 97775 - DNA, 20 bp, Artificial sequence
  SiRNA target sequence
tttgggagccatataagatt

SEQ ID NO: 97776 - DNA, 20 bp, Artificial sequence
  SiRNA target sequence
ttgggagccatataagatta

SEQ ID NO: 97777 - DNA, 20 bp, Artificial sequence
  SiRNA target sequence
tgggagccatataagattat

SEQ ID NO: 97778 - DNA, 20 bp, Artificial sequence
  SiRNA target sequence
gggagccatataagattatc

SEQ ID NO: 97779 - DNA, 20 bp, Artificial sequence
  SiRNA target sequence
ggagccatataagattatca

SEQ ID NO: 97780 - DNA, 20 bp, Artificial sequence
  SiRNA target sequence
gagccatataagattatcat

SEQ ID NO: 97781 - DNA, 21 bp, Artificial sequence
  SiRNA target sequence
ttaccaagtttctgcctgaaa

SEQ ID NO: 97782 - DNA, 21 bp, Artificial sequence
  SiRNA target sequence
taccaagtttctgcctgaaaa

SEQ ID NO: 97783 - DNA, 21 bp, Artificial sequence
  SiRNA target sequence
accaagtttctgcctgaaaat

SEQ ID NO: 97784 - DNA, 21 bp, Artificial sequence
  SiRNA target sequence
ccaagtttctgcctgaaaata

SEQ ID NO: 97785 - DNA, 21 bp, Artificial sequence
  SiRNA target sequence
caagtttctgcctgaaaatat

SEQ ID NO: 97786 - DNA, 21 bp, Artificial sequence
  SiRNA target sequence
aagtttctgcctgaaaatata

SEQ ID NO: 97787 - DNA, 21 bp, Artificial sequence
  SiRNA target sequence
agtttctgcctgaaaatatat

SEQ ID NO: 97788 - DNA, 21 bp, Artificial sequence
  SiRNA target sequence
gtttctgcctgaaaatatatt

SEQ ID NO: 97789 - DNA, 21 bp, Artificial sequence
  SiRNA target sequence
tttctgcctgaaaatatattt

SEQ ID NO: 97790 - DNA, 21 bp, Artificial sequence
  SiRNA target sequence
ttctgcctgaaaatatatttt

SEQ ID NO: 97791 - DNA, 21 bp, Artificial sequence
  SiRNA target sequence
tctgcctgaaaatatattttc

SEQ ID NO: 97792 - DNA, 21 bp, Artificial sequence
  SiRNA target sequence
ctgcctgaaaatatattttct

SEQ ID NO: 97793 - DNA, 21 bp, Artificial sequence
  SiRNA target sequence
tgcctgaaaatatattttctt

SEQ ID NO: 97794 - DNA, 21 bp, Artificial sequence
  SiRNA target sequence
gcctgaaaatatattttcttt

SEQ ID NO: 97795 - DNA, 21 bp, Artificial sequence
  SiRNA target sequence
cctgaaaatatattttctttt

SEQ ID NO: 97796 - DNA, 21 bp, Artificial sequence
  SiRNA target sequence
ctgaaaatatattttcttttt

SEQ ID NO: 97797 - DNA, 21 bp, Artificial sequence
  SiRNA target sequence
tgaaaatatattttcttttta

SEQ ID NO: 97798 - DNA, 21 bp, Artificial sequence
  SiRNA target sequence
gaaaatatattttctttttat

SEQ ID NO: 97799 - DNA, 21 bp, Artificial sequence
  SiRNA target sequence
aaaatatattttctttttata

SEQ ID NO: 97800 - DNA, 21 bp, Artificial sequence
  SiRNA target sequence
aaatatattttctttttataa

SEQ ID NO: 97801 - DNA, 21 bp, Artificial sequence
  SiRNA target sequence
aatatattttctttttataaa

SEQ ID NO: 97802 - DNA, 21 bp, Artificial sequence
  SiRNA target sequence
atatattttctttttataaat

SEQ ID NO: 97803 - DNA, 21 bp, Artificial sequence
  SiRNA target sequence
tatattttctttttataaata

SEQ ID NO: 97804 - DNA, 21 bp, Artificial sequence
  SiRNA target sequence
atattttctttttataaatat

SEQ ID NO: 97805 - DNA, 21 bp, Artificial sequence
  SiRNA target sequence
tattttctttttataaatatc

SEQ ID NO: 97806 - DNA, 21 bp, Artificial sequence
  SiRNA target sequence
attttctttttataaatatct

SEQ ID NO: 97807 - DNA, 21 bp, Artificial sequence
  SiRNA target sequence
ttttctttttataaatatcta

SEQ ID NO: 97808 - DNA, 21 bp, Artificial sequence
  SiRNA target sequence
tttctttttataaatatctaa

SEQ ID NO: 97809 - DNA, 21 bp, Artificial sequence
  SiRNA target sequence
ttctttttataaatatctaat

SEQ ID NO: 97810 - DNA, 21 bp, Artificial sequence
  SiRNA target sequence
tctttttataaatatctaata

SEQ ID NO: 97811 - DNA, 21 bp, Artificial sequence
  SiRNA target sequence
ctttttataaatatctaataa

SEQ ID NO: 97812 - DNA, 21 bp, Artificial sequence
  SiRNA target sequence
tttttataaatatctaataac

SEQ ID NO: 97813 - DNA, 21 bp, Artificial sequence
  SiRNA target sequence
ttttataaatatctaataaca

SEQ ID NO: 97814 - DNA, 21 bp, Artificial sequence
  SiRNA target sequence
tttataaatatctaataacat

SEQ ID NO: 97815 - DNA, 21 bp, Artificial sequence
  SiRNA target sequence
ttataaatatctaataacatt

SEQ ID NO: 97816 - DNA, 21 bp, Artificial sequence
  SiRNA target sequence
tataaatatctaataacattt

SEQ ID NO: 97817 - DNA, 21 bp, Artificial sequence
  SiRNA target sequence
ataaatatctaataacatttt

SEQ ID NO: 97818 - DNA, 21 bp, Artificial sequence
  SiRNA target sequence
taaatatctaataacattttt

SEQ ID NO: 97819 - DNA, 21 bp, Artificial sequence
  SiRNA target sequence
aaatatctaataacatttttt

SEQ ID NO: 97820 - DNA, 21 bp, Artificial sequence
  SiRNA target sequence
aatatctaataacattttttc

SEQ ID NO: 97821 - DNA, 21 bp, Artificial sequence
  SiRNA target sequence
atatctaataacattttttca

SEQ ID NO: 97822 - DNA, 21 bp, Artificial sequence
  SiRNA target sequence
tatctaataacattttttcaa

SEQ ID NO: 97823 - DNA, 21 bp, Artificial sequence
  SiRNA target sequence
atctaataacattttttcaat

SEQ ID NO: 97824 - DNA, 21 bp, Artificial sequence
  SiRNA target sequence
tctaataacattttttcaata

SEQ ID NO: 97825 - DNA, 21 bp, Artificial sequence
  SiRNA target sequence
ctaataacattttttcaataa

SEQ ID NO: 97826 - DNA, 21 bp, Artificial sequence
  SiRNA target sequence
taataacattttttcaataat

SEQ ID NO: 97827 - DNA, 21 bp, Artificial sequence
  SiRNA target sequence
aataacattttttcaataata

SEQ ID NO: 97828 - DNA, 21 bp, Artificial sequence
  SiRNA target sequence
ataacattttttcaataatat

SEQ ID NO: 97829 - DNA, 21 bp, Artificial sequence
  SiRNA target sequence
taacattttttcaataatatt

SEQ ID NO: 97830 - DNA, 21 bp, Artificial sequence
  SiRNA target sequence
aacattttttcaataatatta

SEQ ID NO: 97831 - DNA, 21 bp, Artificial sequence
  SiRNA target sequence
acattttttcaataatattat

SEQ ID NO: 97832 - DNA, 21 bp, Artificial sequence
  SiRNA target sequence
cattttttcaataatattatt

SEQ ID NO: 97833 - DNA, 21 bp, Artificial sequence
  SiRNA target sequence
attttttcaataatattatta

SEQ ID NO: 97834 - DNA, 21 bp, Artificial sequence
  SiRNA target sequence
ttttttcaataatattattaa

SEQ ID NO: 97835 - DNA, 21 bp, Artificial sequence
  SiRNA target sequence
tttttcaataatattattaag

SEQ ID NO: 97836 - DNA, 21 bp, Artificial sequence
  SiRNA target sequence
ttttcaataatattattaagt

SEQ ID NO: 97837 - DNA, 21 bp, Artificial sequence
  SiRNA target sequence
tttcaataatattattaagtc

SEQ ID NO: 97838 - DNA, 21 bp, Artificial sequence
  SiRNA target sequence
ttcaataatattattaagtct

SEQ ID NO: 97839 - DNA, 21 bp, Artificial sequence
  SiRNA target sequence
tcaataatattattaagtcta

SEQ ID NO: 97840 - DNA, 21 bp, Artificial sequence
  SiRNA target sequence
caataatattattaagtctag

SEQ ID NO: 97841 - DNA, 21 bp, Artificial sequence
  SiRNA target sequence
aataatattattaagtctaga

SEQ ID NO: 97842 - DNA, 21 bp, Artificial sequence
  SiRNA target sequence
ataatattattaagtctagaa

SEQ ID NO: 97843 - DNA, 21 bp, Artificial sequence
  SiRNA target sequence
taatattattaagtctagaat

SEQ ID NO: 97844 - DNA, 21 bp, Artificial sequence
  SiRNA target sequence
aatattattaagtctagaatt

SEQ ID NO: 97845 - DNA, 21 bp, Artificial sequence
  SiRNA target sequence
atattattaagtctagaattt

SEQ ID NO: 97846 - DNA, 21 bp, Artificial sequence
  SiRNA target sequence
tattattaagtctagaatttc

SEQ ID NO: 97847 - DNA, 21 bp, Artificial sequence
  SiRNA target sequence
attattaagtctagaatttcc

SEQ ID NO: 97848 - DNA, 21 bp, Artificial sequence
  SiRNA target sequence
ttattaagtctagaatttcca

SEQ ID NO: 97849 - DNA, 21 bp, Artificial sequence
  SiRNA target sequence
tattaagtctagaatttccac

SEQ ID NO: 97850 - DNA, 21 bp, Artificial sequence
  SiRNA target sequence
attaagtctagaatttccact

SEQ ID NO: 97851 - DNA, 21 bp, Artificial sequence
  SiRNA target sequence
ttaagtctagaatttccactt

SEQ ID NO: 97852 - DNA, 21 bp, Artificial sequence
  SiRNA target sequence
taagtctagaatttccactta

SEQ ID NO: 97853 - DNA, 21 bp, Artificial sequence
  SiRNA target sequence
aagtctagaatttccacttac

SEQ ID NO: 97854 - DNA, 21 bp, Artificial sequence
  SiRNA target sequence
agtctagaatttccacttaca

SEQ ID NO: 97855 - DNA, 21 bp, Artificial sequence
  SiRNA target sequence
gtctagaatttccacttacaa

SEQ ID NO: 97856 - DNA, 21 bp, Artificial sequence
  SiRNA target sequence
tctagaatttccacttacaaa

SEQ ID NO: 97857 - DNA, 21 bp, Artificial sequence
  SiRNA target sequence
ctagaatttccacttacaaat

SEQ ID NO: 97858 - DNA, 21 bp, Artificial sequence
  SiRNA target sequence
tagaatttccacttacaaata

SEQ ID NO: 97859 - DNA, 21 bp, Artificial sequence
  SiRNA target sequence
agaatttccacttacaaatat

SEQ ID NO: 97860 - DNA, 21 bp, Artificial sequence
  SiRNA target sequence
gaatttccacttacaaatatt

SEQ ID NO: 97861 - DNA, 21 bp, Artificial sequence
  SiRNA target sequence
aatttccacttacaaatatta

SEQ ID NO: 97862 - DNA, 21 bp, Artificial sequence
  SiRNA target sequence
atttccacttacaaatattaa

SEQ ID NO: 97863 - DNA, 21 bp, Artificial sequence
  SiRNA target sequence
tttccacttacaaatattaac

SEQ ID NO: 97864 - DNA, 21 bp, Artificial sequence
  SiRNA target sequence
ttccacttacaaatattaacc

SEQ ID NO: 97865 - DNA, 21 bp, Artificial sequence
  SiRNA target sequence
tccacttacaaatattaacca

SEQ ID NO: 97866 - DNA, 21 bp, Artificial sequence
  SiRNA target sequence
ccacttacaaatattaaccaa

SEQ ID NO: 97867 - DNA, 21 bp, Artificial sequence
  SiRNA target sequence
cacttacaaatattaaccaat

SEQ ID NO: 97868 - DNA, 21 bp, Artificial sequence
  SiRNA target sequence
acttacaaatattaaccaatc

SEQ ID NO: 97869 - DNA, 21 bp, Artificial sequence
  SiRNA target sequence
cttacaaatattaaccaatca

SEQ ID NO: 97870 - DNA, 21 bp, Artificial sequence
  SiRNA target sequence
ttacaaatattaaccaatcat

SEQ ID NO: 97871 - DNA, 21 bp, Artificial sequence
  SiRNA target sequence
tacaaatattaaccaatcatc

SEQ ID NO: 97872 - DNA, 21 bp, Artificial sequence
  SiRNA target sequence
acaaatattaaccaatcatca

SEQ ID NO: 97873 - DNA, 21 bp, Artificial sequence
  SiRNA target sequence
caaatattaaccaatcatcaa

SEQ ID NO: 97874 - DNA, 21 bp, Artificial sequence
  SiRNA target sequence
aaatattaaccaatcatcaat

SEQ ID NO: 97875 - DNA, 21 bp, Artificial sequence
  SiRNA target sequence
aatattaaccaatcatcaata

SEQ ID NO: 97876 - DNA, 21 bp, Artificial sequence
  SiRNA target sequence
atattaaccaatcatcaatat

SEQ ID NO: 97877 - DNA, 21 bp, Artificial sequence
  SiRNA target sequence
tattaaccaatcatcaatatt

SEQ ID NO: 97878 - DNA, 21 bp, Artificial sequence
  SiRNA target sequence
attaaccaatcatcaatattt

SEQ ID NO: 97879 - DNA, 21 bp, Artificial sequence
  SiRNA target sequence
ttaaccaatcatcaatatttt

SEQ ID NO: 97880 - DNA, 21 bp, Artificial sequence
  SiRNA target sequence
taaccaatcatcaatattttc

SEQ ID NO: 97881 - DNA, 21 bp, Artificial sequence
  SiRNA target sequence
aaccaatcatcaatattttct

SEQ ID NO: 97882 - DNA, 21 bp, Artificial sequence
  SiRNA target sequence
accaatcatcaatattttcta

SEQ ID NO: 97883 - DNA, 21 bp, Artificial sequence
  SiRNA target sequence
ccaatcatcaatattttctag

SEQ ID NO: 97884 - DNA, 21 bp, Artificial sequence
  SiRNA target sequence
caatcatcaatattttctagc

SEQ ID NO: 97885 - DNA, 21 bp, Artificial sequence
  SiRNA target sequence
aatcatcaatattttctagcc

SEQ ID NO: 97886 - DNA, 21 bp, Artificial sequence
  SiRNA target sequence
atcatcaatattttctagccc

SEQ ID NO: 97887 - DNA, 21 bp, Artificial sequence
  SiRNA target sequence
tcatcaatattttctagccct

SEQ ID NO: 97888 - DNA, 21 bp, Artificial sequence
  SiRNA target sequence
catcaatattttctagccctt

SEQ ID NO: 97889 - DNA, 21 bp, Artificial sequence
  SiRNA target sequence
atcaatattttctagcccttt

SEQ ID NO: 97890 - DNA, 21 bp, Artificial sequence
  SiRNA target sequence
tcaatattttctagccctttt

SEQ ID NO: 97891 - DNA, 21 bp, Artificial sequence
  SiRNA target sequence
caatattttctagccctttta

SEQ ID NO: 97892 - DNA, 21 bp, Artificial sequence
  SiRNA target sequence
aatattttctagcccttttat

SEQ ID NO: 97893 - DNA, 21 bp, Artificial sequence
  SiRNA target sequence
atattttctagcccttttata

SEQ ID NO: 97894 - DNA, 21 bp, Artificial sequence
  SiRNA target sequence
tattttctagcccttttatag

SEQ ID NO: 97895 - DNA, 21 bp, Artificial sequence
  SiRNA target sequence
attttctagcccttttatagt

SEQ ID NO: 97896 - DNA, 21 bp, Artificial sequence
  SiRNA target sequence
ttttctagcccttttatagtc

SEQ ID NO: 97897 - DNA, 21 bp, Artificial sequence
  SiRNA target sequence
tttctagcccttttatagtct

SEQ ID NO: 97898 - DNA, 21 bp, Artificial sequence
  SiRNA target sequence
ttctagcccttttatagtctt

SEQ ID NO: 97899 - DNA, 21 bp, Artificial sequence
  SiRNA target sequence
tctagcccttttatagtctta

SEQ ID NO: 97900 - DNA, 21 bp, Artificial sequence
  SiRNA target sequence
ctagcccttttatagtcttat

SEQ ID NO: 97901 - DNA, 21 bp, Artificial sequence
  SiRNA target sequence
tagcccttttatagtcttata

SEQ ID NO: 97902 - DNA, 21 bp, Artificial sequence
  SiRNA target sequence
agcccttttatagtcttataa

SEQ ID NO: 97903 - DNA, 21 bp, Artificial sequence
  SiRNA target sequence
gcccttttatagtcttataaa

SEQ ID NO: 97904 - DNA, 21 bp, Artificial sequence
  SiRNA target sequence
cccttttatagtcttataaat

SEQ ID NO: 97905 - DNA, 21 bp, Artificial sequence
  SiRNA target sequence
ccttttatagtcttataaata

SEQ ID NO: 97906 - DNA, 21 bp, Artificial sequence
  SiRNA target sequence
cttttatagtcttataaatat

SEQ ID NO: 97907 - DNA, 21 bp, Artificial sequence
  SiRNA target sequence
ttttatagtcttataaatatc

SEQ ID NO: 97908 - DNA, 21 bp, Artificial sequence
  SiRNA target sequence
tttatagtcttataaatatct

SEQ ID NO: 97909 - DNA, 21 bp, Artificial sequence
  SiRNA target sequence
ttatagtcttataaatatctt

SEQ ID NO: 97910 - DNA, 21 bp, Artificial sequence
  SiRNA target sequence
tatagtcttataaatatcttg

SEQ ID NO: 97911 - DNA, 21 bp, Artificial sequence
  SiRNA target sequence
atagtcttataaatatcttgt

SEQ ID NO: 97912 - DNA, 21 bp, Artificial sequence
  SiRNA target sequence
tagtcttataaatatcttgta

SEQ ID NO: 97913 - DNA, 21 bp, Artificial sequence
  SiRNA target sequence
agtcttataaatatcttgtat

SEQ ID NO: 97914 - DNA, 21 bp, Artificial sequence
  SiRNA target sequence
gtcttataaatatcttgtatg

SEQ ID NO: 97915 - DNA, 21 bp, Artificial sequence
  SiRNA target sequence
tcttataaatatcttgtatgt

SEQ ID NO: 97916 - DNA, 21 bp, Artificial sequence
  SiRNA target sequence
cttataaatatcttgtatgta

SEQ ID NO: 97917 - DNA, 21 bp, Artificial sequence
  SiRNA target sequence
ttataaatatcttgtatgtat

SEQ ID NO: 97918 - DNA, 21 bp, Artificial sequence
  SiRNA target sequence
tataaatatcttgtatgtatt

SEQ ID NO: 97919 - DNA, 21 bp, Artificial sequence
  SiRNA target sequence
ataaatatcttgtatgtattt

SEQ ID NO: 97920 - DNA, 21 bp, Artificial sequence
  SiRNA target sequence
taaatatcttgtatgtattta

SEQ ID NO: 97921 - DNA, 21 bp, Artificial sequence
  SiRNA target sequence
aaatatcttgtatgtatttat

SEQ ID NO: 97922 - DNA, 21 bp, Artificial sequence
  SiRNA target sequence
aatatcttgtatgtatttatt

SEQ ID NO: 97923 - DNA, 21 bp, Artificial sequence
  SiRNA target sequence
atatcttgtatgtatttatta

SEQ ID NO: 97924 - DNA, 21 bp, Artificial sequence
  SiRNA target sequence
tatcttgtatgtatttattat

SEQ ID NO: 97925 - DNA, 21 bp, Artificial sequence
  SiRNA target sequence
atcttgtatgtatttattatc

SEQ ID NO: 97926 - DNA, 21 bp, Artificial sequence
  SiRNA target sequence
tcttgtatgtatttattatct

SEQ ID NO: 97927 - DNA, 21 bp, Artificial sequence
  SiRNA target sequence
cttgtatgtatttattatctt

SEQ ID NO: 97928 - DNA, 21 bp, Artificial sequence
  SiRNA target sequence
ttgtatgtatttattatcttc

SEQ ID NO: 97929 - DNA, 21 bp, Artificial sequence
  SiRNA target sequence
tgtatgtatttattatcttcc

SEQ ID NO: 97930 - DNA, 21 bp, Artificial sequence
  SiRNA target sequence
gtatgtatttattatcttccc

SEQ ID NO: 97931 - DNA, 21 bp, Artificial sequence
  SiRNA target sequence
tatgtatttattatcttccct

SEQ ID NO: 97932 - DNA, 21 bp, Artificial sequence
  SiRNA target sequence
atgtatttattatcttccctt

SEQ ID NO: 97933 - DNA, 21 bp, Artificial sequence
  SiRNA target sequence
tgtatttattatcttcccttg

SEQ ID NO: 97934 - DNA, 21 bp, Artificial sequence
  SiRNA target sequence
gtatttattatcttcccttga

SEQ ID NO: 97935 - DNA, 21 bp, Artificial sequence
  SiRNA target sequence
tatttattatcttcccttgaa

SEQ ID NO: 97936 - DNA, 21 bp, Artificial sequence
  SiRNA target sequence
atttattatcttcccttgaaa

SEQ ID NO: 97937 - DNA, 21 bp, Artificial sequence
  SiRNA target sequence
tttattatcttcccttgaaac

SEQ ID NO: 97938 - DNA, 21 bp, Artificial sequence
  SiRNA target sequence
ttattatcttcccttgaaaca

SEQ ID NO: 97939 - DNA, 21 bp, Artificial sequence
  SiRNA target sequence
tattatcttcccttgaaacag

SEQ ID NO: 97940 - DNA, 21 bp, Artificial sequence
  SiRNA target sequence
attatcttcccttgaaacagc

SEQ ID NO: 97941 - DNA, 21 bp, Artificial sequence
  SiRNA target sequence
ttatcttcccttgaaacagcg

SEQ ID NO: 97942 - DNA, 21 bp, Artificial sequence
  SiRNA target sequence
tatcttcccttgaaacagcgg

SEQ ID NO: 97943 - DNA, 21 bp, Artificial sequence
  SiRNA target sequence
atcttcccttgaaacagcggg

SEQ ID NO: 97944 - DNA, 21 bp, Artificial sequence
  SiRNA target sequence
tcttcccttgaaacagcgggg

SEQ ID NO: 97945 - DNA, 21 bp, Artificial sequence
  SiRNA target sequence
cttcccttgaaacagcggggt

SEQ ID NO: 97946 - DNA, 21 bp, Artificial sequence
  SiRNA target sequence
ttcccttgaaacagcggggta

SEQ ID NO: 97947 - DNA, 21 bp, Artificial sequence
  SiRNA target sequence
tcccttgaaacagcggggtaa

SEQ ID NO: 97948 - DNA, 21 bp, Artificial sequence
  SiRNA target sequence
cccttgaaacagcggggtaaa

SEQ ID NO: 97949 - DNA, 21 bp, Artificial sequence
  SiRNA target sequence
ccttgaaacagcggggtaaat

SEQ ID NO: 97950 - DNA, 21 bp, Artificial sequence
  SiRNA target sequence
cttgaaacagcggggtaaatt

SEQ ID NO: 97951 - DNA, 21 bp, Artificial sequence
  SiRNA target sequence
ttgaaacagcggggtaaattt

SEQ ID NO: 97952 - DNA, 21 bp, Artificial sequence
  SiRNA target sequence
tgaaacagcggggtaaatttc

SEQ ID NO: 97953 - DNA, 21 bp, Artificial sequence
  SiRNA target sequence
gaaacagcggggtaaatttca

SEQ ID NO: 97954 - DNA, 21 bp, Artificial sequence
  SiRNA target sequence
aaacagcggggtaaatttcaa

SEQ ID NO: 97955 - DNA, 21 bp, Artificial sequence
  SiRNA target sequence
aacagcggggtaaatttcaat

SEQ ID NO: 97956 - DNA, 21 bp, Artificial sequence
  SiRNA target sequence
acagcggggtaaatttcaatg

SEQ ID NO: 97957 - DNA, 21 bp, Artificial sequence
  SiRNA target sequence
cagcggggtaaatttcaatgc

SEQ ID NO: 97958 - DNA, 21 bp, Artificial sequence
  SiRNA target sequence
agcggggtaaatttcaatgcc

SEQ ID NO: 97959 - DNA, 21 bp, Artificial sequence
  SiRNA target sequence
gcggggtaaatttcaatgcct

SEQ ID NO: 97960 - DNA, 21 bp, Artificial sequence
  SiRNA target sequence
cggggtaaatttcaatgcctt

SEQ ID NO: 97961 - DNA, 21 bp, Artificial sequence
  SiRNA target sequence
ggggtaaatttcaatgccttt

SEQ ID NO: 97962 - DNA, 21 bp, Artificial sequence
  SiRNA target sequence
gggtaaatttcaatgccttta

SEQ ID NO: 97963 - DNA, 21 bp, Artificial sequence
  SiRNA target sequence
ggtaaatttcaatgcctttat

SEQ ID NO: 97964 - DNA, 21 bp, Artificial sequence
  SiRNA target sequence
gtaaatttcaatgcctttatt

SEQ ID NO: 97965 - DNA, 21 bp, Artificial sequence
  SiRNA target sequence
taaatttcaatgcctttattt

SEQ ID NO: 97966 - DNA, 21 bp, Artificial sequence
  SiRNA target sequence
aaatttcaatgcctttatttt

SEQ ID NO: 97967 - DNA, 21 bp, Artificial sequence
  SiRNA target sequence
aatttcaatgcctttattttc

SEQ ID NO: 97968 - DNA, 21 bp, Artificial sequence
  SiRNA target sequence
atttcaatgcctttattttca

SEQ ID NO: 97969 - DNA, 21 bp, Artificial sequence
  SiRNA target sequence
tttcaatgcctttattttcaa

SEQ ID NO: 97970 - DNA, 21 bp, Artificial sequence
  SiRNA target sequence
ttcaatgcctttattttcaaa

SEQ ID NO: 97971 - DNA, 21 bp, Artificial sequence
  SiRNA target sequence
tcaatgcctttattttcaaac

SEQ ID NO: 97972 - DNA, 21 bp, Artificial sequence
  SiRNA target sequence
caatgcctttattttcaaact

SEQ ID NO: 97973 - DNA, 21 bp, Artificial sequence
  SiRNA target sequence
aatgcctttattttcaaactc

SEQ ID NO: 97974 - DNA, 21 bp, Artificial sequence
  SiRNA target sequence
atgcctttattttcaaactct

SEQ ID NO: 97975 - DNA, 21 bp, Artificial sequence
  SiRNA target sequence
tgcctttattttcaaactctt

SEQ ID NO: 97976 - DNA, 21 bp, Artificial sequence
  SiRNA target sequence
gcctttattttcaaactcttc

SEQ ID NO: 97977 - DNA, 21 bp, Artificial sequence
  SiRNA target sequence
cctttattttcaaactcttct

SEQ ID NO: 97978 - DNA, 21 bp, Artificial sequence
  SiRNA target sequence
ctttattttcaaactcttctt

SEQ ID NO: 97979 - DNA, 21 bp, Artificial sequence
  SiRNA target sequence
tttattttcaaactcttcttt

SEQ ID NO: 97980 - DNA, 21 bp, Artificial sequence
  SiRNA target sequence
ttattttcaaactcttcttta

SEQ ID NO: 97981 - DNA, 21 bp, Artificial sequence
  SiRNA target sequence
tattttcaaactcttctttat

SEQ ID NO: 97982 - DNA, 21 bp, Artificial sequence
  SiRNA target sequence
attttcaaactcttctttata

SEQ ID NO: 97983 - DNA, 21 bp, Artificial sequence
  SiRNA target sequence
ttttcaaactcttctttatat

SEQ ID NO: 97984 - DNA, 21 bp, Artificial sequence
  SiRNA target sequence
tttcaaactcttctttatata

SEQ ID NO: 97985 - DNA, 21 bp, Artificial sequence
  SiRNA target sequence
ttcaaactcttctttatataa

SEQ ID NO: 97986 - DNA, 21 bp, Artificial sequence
  SiRNA target sequence
tcaaactcttctttatataaa

SEQ ID NO: 97987 - DNA, 21 bp, Artificial sequence
  SiRNA target sequence
caaactcttctttatataaaa

SEQ ID NO: 97988 - DNA, 21 bp, Artificial sequence
  SiRNA target sequence
aaactcttctttatataaaaa

SEQ ID NO: 97989 - DNA, 21 bp, Artificial sequence
  SiRNA target sequence
aactcttctttatataaaaaa

SEQ ID NO: 97990 - DNA, 21 bp, Artificial sequence
  SiRNA target sequence
actcttctttatataaaaaat

SEQ ID NO: 97991 - DNA, 21 bp, Artificial sequence
  SiRNA target sequence
ctcttctttatataaaaaatc

SEQ ID NO: 97992 - DNA, 21 bp, Artificial sequence
  SiRNA target sequence
tcttctttatataaaaaatct

SEQ ID NO: 97993 - DNA, 21 bp, Artificial sequence
  SiRNA target sequence
cttctttatataaaaaatcta

SEQ ID NO: 97994 - DNA, 21 bp, Artificial sequence
  SiRNA target sequence
ttctttatataaaaaatctac

SEQ ID NO: 97995 - DNA, 21 bp, Artificial sequence
  SiRNA target sequence
tctttatataaaaaatctaca

SEQ ID NO: 97996 - DNA, 21 bp, Artificial sequence
  SiRNA target sequence
ctttatataaaaaatctacat

SEQ ID NO: 97997 - DNA, 21 bp, Artificial sequence
  SiRNA target sequence
tttatataaaaaatctacatc

SEQ ID NO: 97998 - DNA, 21 bp, Artificial sequence
  SiRNA target sequence
ttatataaaaaatctacatct

SEQ ID NO: 97999 - DNA, 21 bp, Artificial sequence
  SiRNA target sequence
tatataaaaaatctacatctc

SEQ ID NO: 98000 - DNA, 21 bp, Artificial sequence
  SiRNA target sequence
atataaaaaatctacatctct

SEQ ID NO: 98001 - DNA, 21 bp, Artificial sequence
  SiRNA target sequence
tataaaaaatctacatctcta

SEQ ID NO: 98002 - DNA, 21 bp, Artificial sequence
  SiRNA target sequence
ataaaaaatctacatctctaa

SEQ ID NO: 98003 - DNA, 21 bp, Artificial sequence
  SiRNA target sequence
taaaaaatctacatctctaaa

SEQ ID NO: 98004 - DNA, 21 bp, Artificial sequence
  SiRNA target sequence
aaaaaatctacatctctaaat

SEQ ID NO: 98005 - DNA, 21 bp, Artificial sequence
  SiRNA target sequence
aaaaatctacatctctaaatc

SEQ ID NO: 98006 - DNA, 21 bp, Artificial sequence
  SiRNA target sequence
aaaatctacatctctaaatct

SEQ ID NO: 98007 - DNA, 21 bp, Artificial sequence
  SiRNA target sequence
aaatctacatctctaaatcta

SEQ ID NO: 98008 - DNA, 21 bp, Artificial sequence
  SiRNA target sequence
aatctacatctctaaatctaa

SEQ ID NO: 98009 - DNA, 21 bp, Artificial sequence
  SiRNA target sequence
atctacatctctaaatctaaa

SEQ ID NO: 98010 - DNA, 21 bp, Artificial sequence
  SiRNA target sequence
tctacatctctaaatctaaaa

SEQ ID NO: 98011 - DNA, 21 bp, Artificial sequence
  SiRNA target sequence
ctacatctctaaatctaaaac

SEQ ID NO: 98012 - DNA, 21 bp, Artificial sequence
  SiRNA target sequence
tacatctctaaatctaaaacc

SEQ ID NO: 98013 - DNA, 21 bp, Artificial sequence
  SiRNA target sequence
acatctctaaatctaaaacca

SEQ ID NO: 98014 - DNA, 21 bp, Artificial sequence
  SiRNA target sequence
catctctaaatctaaaaccat

SEQ ID NO: 98015 - DNA, 21 bp, Artificial sequence
  SiRNA target sequence
atctctaaatctaaaaccata

SEQ ID NO: 98016 - DNA, 21 bp, Artificial sequence
  SiRNA target sequence
tctctaaatctaaaaccatat

SEQ ID NO: 98017 - DNA, 21 bp, Artificial sequence
  SiRNA target sequence
ctctaaatctaaaaccatata

SEQ ID NO: 98018 - DNA, 21 bp, Artificial sequence
  SiRNA target sequence
tctaaatctaaaaccatataa

SEQ ID NO: 98019 - DNA, 21 bp, Artificial sequence
  SiRNA target sequence
ctaaatctaaaaccatataat

SEQ ID NO: 98020 - DNA, 21 bp, Artificial sequence
  SiRNA target sequence
taaatctaaaaccatataata

SEQ ID NO: 98021 - DNA, 21 bp, Artificial sequence
  SiRNA target sequence
aaatctaaaaccatataataa

SEQ ID NO: 98022 - DNA, 21 bp, Artificial sequence
  SiRNA target sequence
aatctaaaaccatataataaa

SEQ ID NO: 98023 - DNA, 21 bp, Artificial sequence
  SiRNA target sequence
atctaaaaccatataataaaa

SEQ ID NO: 98024 - DNA, 21 bp, Artificial sequence
  SiRNA target sequence
tctaaaaccatataataaaat

SEQ ID NO: 98025 - DNA, 21 bp, Artificial sequence
  SiRNA target sequence
ctaaaaccatataataaaata

SEQ ID NO: 98026 - DNA, 21 bp, Artificial sequence
  SiRNA target sequence
taaaaccatataataaaataa

SEQ ID NO: 98027 - DNA, 21 bp, Artificial sequence
  SiRNA target sequence
aaaaccatataataaaataac

SEQ ID NO: 98028 - DNA, 21 bp, Artificial sequence
  SiRNA target sequence
aaaccatataataaaataact

SEQ ID NO: 98029 - DNA, 21 bp, Artificial sequence
  SiRNA target sequence
aaccatataataaaataactt

SEQ ID NO: 98030 - DNA, 21 bp, Artificial sequence
  SiRNA target sequence
accatataataaaataacttt

SEQ ID NO: 98031 - DNA, 21 bp, Artificial sequence
  SiRNA target sequence
ccatataataaaataactttt

SEQ ID NO: 98032 - DNA, 21 bp, Artificial sequence
  SiRNA target sequence
catataataaaataacttttt

SEQ ID NO: 98033 - DNA, 21 bp, Artificial sequence
  SiRNA target sequence
atataataaaataactttttt

SEQ ID NO: 98034 - DNA, 21 bp, Artificial sequence
  SiRNA target sequence
tataataaaataactttttta

SEQ ID NO: 98035 - DNA, 21 bp, Artificial sequence
  SiRNA target sequence
ataataaaataacttttttaa

SEQ ID NO: 98036 - DNA, 21 bp, Artificial sequence
  SiRNA target sequence
taataaaataacttttttaaa

SEQ ID NO: 98037 - DNA, 21 bp, Artificial sequence
  SiRNA target sequence
aataaaataacttttttaaaa

SEQ ID NO: 98038 - DNA, 21 bp, Artificial sequence
  SiRNA target sequence
ataaaataacttttttaaaaa

SEQ ID NO: 98039 - DNA, 21 bp, Artificial sequence
  SiRNA target sequence
taaaataacttttttaaaaaa

SEQ ID NO: 98040 - DNA, 21 bp, Artificial sequence
  SiRNA target sequence
aaaataacttttttaaaaaaa

SEQ ID NO: 98041 - DNA, 21 bp, Artificial sequence
  SiRNA target sequence
aaataacttttttaaaaaaat

SEQ ID NO: 98042 - DNA, 21 bp, Artificial sequence
  SiRNA target sequence
aataacttttttaaaaaaatt

SEQ ID NO: 98043 - DNA, 21 bp, Artificial sequence
  SiRNA target sequence
ataacttttttaaaaaaattt

SEQ ID NO: 98044 - DNA, 21 bp, Artificial sequence
  SiRNA target sequence
taacttttttaaaaaaattta

SEQ ID NO: 98045 - DNA, 21 bp, Artificial sequence
  SiRNA target sequence
aacttttttaaaaaaatttaa

SEQ ID NO: 98046 - DNA, 21 bp, Artificial sequence
  SiRNA target sequence
acttttttaaaaaaatttaaa

SEQ ID NO: 98047 - DNA, 21 bp, Artificial sequence
  SiRNA target sequence
cttttttaaaaaaatttaaat

SEQ ID NO: 98048 - DNA, 21 bp, Artificial sequence
  SiRNA target sequence
ttttttaaaaaaatttaaatc

SEQ ID NO: 98049 - DNA, 21 bp, Artificial sequence
  SiRNA target sequence
tttttaaaaaaatttaaatca

SEQ ID NO: 98050 - DNA, 21 bp, Artificial sequence
  SiRNA target sequence
ttttaaaaaaatttaaatcag

SEQ ID NO: 98051 - DNA, 21 bp, Artificial sequence
  SiRNA target sequence
tttaaaaaaatttaaatcaga

SEQ ID NO: 98052 - DNA, 21 bp, Artificial sequence
  SiRNA target sequence
ttaaaaaaatttaaatcagaa

SEQ ID NO: 98053 - DNA, 21 bp, Artificial sequence
  SiRNA target sequence
taaaaaaatttaaatcagaat

SEQ ID NO: 98054 - DNA, 21 bp, Artificial sequence
  SiRNA target sequence
aaaaaaatttaaatcagaata

SEQ ID NO: 98055 - DNA, 21 bp, Artificial sequence
  SiRNA target sequence
aaaaaatttaaatcagaatag

SEQ ID NO: 98056 - DNA, 21 bp, Artificial sequence
  SiRNA target sequence
aaaaatttaaatcagaatagt

SEQ ID NO: 98057 - DNA, 21 bp, Artificial sequence
  SiRNA target sequence
aaaatttaaatcagaatagta

SEQ ID NO: 98058 - DNA, 21 bp, Artificial sequence
  SiRNA target sequence
aaatttaaatcagaatagtaa

SEQ ID NO: 98059 - DNA, 21 bp, Artificial sequence
  SiRNA target sequence
aatttaaatcagaatagtaat

SEQ ID NO: 98060 - DNA, 21 bp, Artificial sequence
  SiRNA target sequence
atttaaatcagaatagtaatt

SEQ ID NO: 98061 - DNA, 21 bp, Artificial sequence
  SiRNA target sequence
tttaaatcagaatagtaatta

SEQ ID NO: 98062 - DNA, 21 bp, Artificial sequence
  SiRNA target sequence
ttaaatcagaatagtaattaa

SEQ ID NO: 98063 - DNA, 21 bp, Artificial sequence
  SiRNA target sequence
taaatcagaatagtaattaac

SEQ ID NO: 98064 - DNA, 21 bp, Artificial sequence
  SiRNA target sequence
aaatcagaatagtaattaaca

SEQ ID NO: 98065 - DNA, 21 bp, Artificial sequence
  SiRNA target sequence
aatcagaatagtaattaacaa

SEQ ID NO: 98066 - DNA, 21 bp, Artificial sequence
  SiRNA target sequence
atcagaatagtaattaacaaa

SEQ ID NO: 98067 - DNA, 21 bp, Artificial sequence
  SiRNA target sequence
tcagaatagtaattaacaaat

SEQ ID NO: 98068 - DNA, 21 bp, Artificial sequence
  SiRNA target sequence
cagaatagtaattaacaaatg

SEQ ID NO: 98069 - DNA, 21 bp, Artificial sequence
  SiRNA target sequence
agaatagtaattaacaaatgc

SEQ ID NO: 98070 - DNA, 21 bp, Artificial sequence
  SiRNA target sequence
gaatagtaattaacaaatgcc

SEQ ID NO: 98071 - DNA, 21 bp, Artificial sequence
  SiRNA target sequence
aatagtaattaacaaatgccc

SEQ ID NO: 98072 - DNA, 21 bp, Artificial sequence
  SiRNA target sequence
atagtaattaacaaatgccct

SEQ ID NO: 98073 - DNA, 21 bp, Artificial sequence
  SiRNA target sequence
tagtaattaacaaatgccctg

SEQ ID NO: 98074 - DNA, 21 bp, Artificial sequence
  SiRNA target sequence
agtaattaacaaatgccctgg

SEQ ID NO: 98075 - DNA, 21 bp, Artificial sequence
  SiRNA target sequence
gtaattaacaaatgccctggg

SEQ ID NO: 98076 - DNA, 21 bp, Artificial sequence
  SiRNA target sequence
taattaacaaatgccctggga

SEQ ID NO: 98077 - DNA, 21 bp, Artificial sequence
  SiRNA target sequence
aattaacaaatgccctgggaa

SEQ ID NO: 98078 - DNA, 21 bp, Artificial sequence
  SiRNA target sequence
attaacaaatgccctgggaag

SEQ ID NO: 98079 - DNA, 21 bp, Artificial sequence
  SiRNA target sequence
ttaacaaatgccctgggaagt

SEQ ID NO: 98080 - DNA, 21 bp, Artificial sequence
  SiRNA target sequence
taacaaatgccctgggaagtg

SEQ ID NO: 98081 - DNA, 21 bp, Artificial sequence
  SiRNA target sequence
aacaaatgccctgggaagtgt

SEQ ID NO: 98082 - DNA, 21 bp, Artificial sequence
  SiRNA target sequence
acaaatgccctgggaagtgta

SEQ ID NO: 98083 - DNA, 21 bp, Artificial sequence
  SiRNA target sequence
caaatgccctgggaagtgtaa

SEQ ID NO: 98084 - DNA, 21 bp, Artificial sequence
  SiRNA target sequence
aaatgccctgggaagtgtaat

SEQ ID NO: 98085 - DNA, 21 bp, Artificial sequence
  SiRNA target sequence
aatgccctgggaagtgtaata

SEQ ID NO: 98086 - DNA, 21 bp, Artificial sequence
  SiRNA target sequence
atgccctgggaagtgtaatac

SEQ ID NO: 98087 - DNA, 21 bp, Artificial sequence
  SiRNA target sequence
tgccctgggaagtgtaatacc

SEQ ID NO: 98088 - DNA, 21 bp, Artificial sequence
  SiRNA target sequence
gccctgggaagtgtaatacca

SEQ ID NO: 98089 - DNA, 21 bp, Artificial sequence
  SiRNA target sequence
ccctgggaagtgtaataccag

SEQ ID NO: 98090 - DNA, 21 bp, Artificial sequence
  SiRNA target sequence
cctgggaagtgtaataccagt

SEQ ID NO: 98091 - DNA, 21 bp, Artificial sequence
  SiRNA target sequence
ctgggaagtgtaataccagta

SEQ ID NO: 98092 - DNA, 21 bp, Artificial sequence
  SiRNA target sequence
tgggaagtgtaataccagtac

SEQ ID NO: 98093 - DNA, 21 bp, Artificial sequence
  SiRNA target sequence
gggaagtgtaataccagtacc

SEQ ID NO: 98094 - DNA, 21 bp, Artificial sequence
  SiRNA target sequence
ggaagtgtaataccagtacca

SEQ ID NO: 98095 - DNA, 21 bp, Artificial sequence
  SiRNA target sequence
gaagtgtaataccagtaccag

SEQ ID NO: 98096 - DNA, 21 bp, Artificial sequence
  SiRNA target sequence
aagtgtaataccagtaccagt

SEQ ID NO: 98097 - DNA, 21 bp, Artificial sequence
  SiRNA target sequence
agtgtaataccagtaccagtg

SEQ ID NO: 98098 - DNA, 21 bp, Artificial sequence
  SiRNA target sequence
gtgtaataccagtaccagtgc

SEQ ID NO: 98099 - DNA, 21 bp, Artificial sequence
  SiRNA target sequence
tgtaataccagtaccagtgca

SEQ ID NO: 98100 - DNA, 21 bp, Artificial sequence
  SiRNA target sequence
gtaataccagtaccagtgcac

SEQ ID NO: 98101 - DNA, 21 bp, Artificial sequence
  SiRNA target sequence
taataccagtaccagtgcaca

SEQ ID NO: 98102 - DNA, 21 bp, Artificial sequence
  SiRNA target sequence
aataccagtaccagtgcacat

SEQ ID NO: 98103 - DNA, 21 bp, Artificial sequence
  SiRNA target sequence
ataccagtaccagtgcacata

SEQ ID NO: 98104 - DNA, 21 bp, Artificial sequence
  SiRNA target sequence
taccagtaccagtgcacataa

SEQ ID NO: 98105 - DNA, 21 bp, Artificial sequence
  SiRNA target sequence
accagtaccagtgcacataaa

SEQ ID NO: 98106 - DNA, 21 bp, Artificial sequence
  SiRNA target sequence
ccagtaccagtgcacataaac

SEQ ID NO: 98107 - DNA, 21 bp, Artificial sequence
  SiRNA target sequence
cagtaccagtgcacataaaca

SEQ ID NO: 98108 - DNA, 21 bp, Artificial sequence
  SiRNA target sequence
agtaccagtgcacataaacaa

SEQ ID NO: 98109 - DNA, 21 bp, Artificial sequence
  SiRNA target sequence
gtaccagtgcacataaacaaa

SEQ ID NO: 98110 - DNA, 21 bp, Artificial sequence
  SiRNA target sequence
taccagtgcacataaacaaaa

SEQ ID NO: 98111 - DNA, 21 bp, Artificial sequence
  SiRNA target sequence
accagtgcacataaacaaaat

SEQ ID NO: 98112 - DNA, 21 bp, Artificial sequence
  SiRNA target sequence
ccagtgcacataaacaaaatc

SEQ ID NO: 98113 - DNA, 21 bp, Artificial sequence
  SiRNA target sequence
cagtgcacataaacaaaatct

SEQ ID NO: 98114 - DNA, 21 bp, Artificial sequence
  SiRNA target sequence
agtgcacataaacaaaatctt

SEQ ID NO: 98115 - DNA, 21 bp, Artificial sequence
  SiRNA target sequence
gtgcacataaacaaaatcttt

SEQ ID NO: 98116 - DNA, 21 bp, Artificial sequence
  SiRNA target sequence
tgcacataaacaaaatctttt

SEQ ID NO: 98117 - DNA, 21 bp, Artificial sequence
  SiRNA target sequence
gcacataaacaaaatcttttt

SEQ ID NO: 98118 - DNA, 21 bp, Artificial sequence
  SiRNA target sequence
cacataaacaaaatcttttta

SEQ ID NO: 98119 - DNA, 21 bp, Artificial sequence
  SiRNA target sequence
acataaacaaaatctttttac

SEQ ID NO: 98120 - DNA, 21 bp, Artificial sequence
  SiRNA target sequence
cataaacaaaatctttttacc

SEQ ID NO: 98121 - DNA, 21 bp, Artificial sequence
  SiRNA target sequence
ataaacaaaatctttttacca

SEQ ID NO: 98122 - DNA, 21 bp, Artificial sequence
  SiRNA target sequence
taaacaaaatctttttaccac

SEQ ID NO: 98123 - DNA, 21 bp, Artificial sequence
  SiRNA target sequence
aaacaaaatctttttaccact

SEQ ID NO: 98124 - DNA, 21 bp, Artificial sequence
  SiRNA target sequence
aacaaaatctttttaccacta

SEQ ID NO: 98125 - DNA, 21 bp, Artificial sequence
  SiRNA target sequence
acaaaatctttttaccactaa

SEQ ID NO: 98126 - DNA, 21 bp, Artificial sequence
  SiRNA target sequence
caaaatctttttaccactaaa

SEQ ID NO: 98127 - DNA, 21 bp, Artificial sequence
  SiRNA target sequence
aaaatctttttaccactaaaa

SEQ ID NO: 98128 - DNA, 21 bp, Artificial sequence
  SiRNA target sequence
aaatctttttaccactaaaat

SEQ ID NO: 98129 - DNA, 21 bp, Artificial sequence
  SiRNA target sequence
aatctttttaccactaaaatt

SEQ ID NO: 98130 - DNA, 21 bp, Artificial sequence
  SiRNA target sequence
atctttttaccactaaaatta

SEQ ID NO: 98131 - DNA, 21 bp, Artificial sequence
  SiRNA target sequence
tctttttaccactaaaattaa

SEQ ID NO: 98132 - DNA, 21 bp, Artificial sequence
  SiRNA target sequence
ctttttaccactaaaattaag

SEQ ID NO: 98133 - DNA, 21 bp, Artificial sequence
  SiRNA target sequence
tttttaccactaaaattaagt

SEQ ID NO: 98134 - DNA, 21 bp, Artificial sequence
  SiRNA target sequence
ttttaccactaaaattaagtc

SEQ ID NO: 98135 - DNA, 21 bp, Artificial sequence
  SiRNA target sequence
tttaccactaaaattaagtct

SEQ ID NO: 98136 - DNA, 21 bp, Artificial sequence
  SiRNA target sequence
ttaccactaaaattaagtcta

SEQ ID NO: 98137 - DNA, 21 bp, Artificial sequence
  SiRNA target sequence
taccactaaaattaagtctat

SEQ ID NO: 98138 - DNA, 21 bp, Artificial sequence
  SiRNA target sequence
accactaaaattaagtctatt

SEQ ID NO: 98139 - DNA, 21 bp, Artificial sequence
  SiRNA target sequence
ccactaaaattaagtctattt

SEQ ID NO: 98140 - DNA, 21 bp, Artificial sequence
  SiRNA target sequence
cactaaaattaagtctatttt

SEQ ID NO: 98141 - DNA, 21 bp, Artificial sequence
  SiRNA target sequence
actaaaattaagtctattttg

SEQ ID NO: 98142 - DNA, 21 bp, Artificial sequence
  SiRNA target sequence
ctaaaattaagtctattttgt

SEQ ID NO: 98143 - DNA, 21 bp, Artificial sequence
  SiRNA target sequence
taaaattaagtctattttgta

SEQ ID NO: 98144 - DNA, 21 bp, Artificial sequence
  SiRNA target sequence
aaaattaagtctattttgtac

SEQ ID NO: 98145 - DNA, 21 bp, Artificial sequence
  SiRNA target sequence
aaattaagtctattttgtact

SEQ ID NO: 98146 - DNA, 21 bp, Artificial sequence
  SiRNA target sequence
aattaagtctattttgtacta

SEQ ID NO: 98147 - DNA, 21 bp, Artificial sequence
  SiRNA target sequence
attaagtctattttgtactat

SEQ ID NO: 98148 - DNA, 21 bp, Artificial sequence
  SiRNA target sequence
ttaagtctattttgtactatg

SEQ ID NO: 98149 - DNA, 21 bp, Artificial sequence
  SiRNA target sequence
taagtctattttgtactatgt

SEQ ID NO: 98150 - DNA, 21 bp, Artificial sequence
  SiRNA target sequence
aagtctattttgtactatgtt

SEQ ID NO: 98151 - DNA, 21 bp, Artificial sequence
  SiRNA target sequence
agtctattttgtactatgtta

SEQ ID NO: 98152 - DNA, 21 bp, Artificial sequence
  SiRNA target sequence
gtctattttgtactatgttaa

SEQ ID NO: 98153 - DNA, 21 bp, Artificial sequence
  SiRNA target sequence
tctattttgtactatgttaac

SEQ ID NO: 98154 - DNA, 21 bp, Artificial sequence
  SiRNA target sequence
ctattttgtactatgttaaca

SEQ ID NO: 98155 - DNA, 21 bp, Artificial sequence
  SiRNA target sequence
tattttgtactatgttaacat

SEQ ID NO: 98156 - DNA, 21 bp, Artificial sequence
  SiRNA target sequence
attttgtactatgttaacatg

SEQ ID NO: 98157 - DNA, 21 bp, Artificial sequence
  SiRNA target sequence
ttttgtactatgttaacatga

SEQ ID NO: 98158 - DNA, 21 bp, Artificial sequence
  SiRNA target sequence
tttgtactatgttaacatgaa

SEQ ID NO: 98159 - DNA, 21 bp, Artificial sequence
  SiRNA target sequence
ttgtactatgttaacatgaat

SEQ ID NO: 98160 - DNA, 21 bp, Artificial sequence
  SiRNA target sequence
tgtactatgttaacatgaata

SEQ ID NO: 98161 - DNA, 21 bp, Artificial sequence
  SiRNA target sequence
gtactatgttaacatgaatag

SEQ ID NO: 98162 - DNA, 21 bp, Artificial sequence
  SiRNA target sequence
tactatgttaacatgaatagt

SEQ ID NO: 98163 - DNA, 21 bp, Artificial sequence
  SiRNA target sequence
actatgttaacatgaatagta

SEQ ID NO: 98164 - DNA, 21 bp, Artificial sequence
  SiRNA target sequence
ctatgttaacatgaatagtag

SEQ ID NO: 98165 - DNA, 21 bp, Artificial sequence
  SiRNA target sequence
tatgttaacatgaatagtaga

SEQ ID NO: 98166 - DNA, 21 bp, Artificial sequence
  SiRNA target sequence
atgttaacatgaatagtagac

SEQ ID NO: 98167 - DNA, 21 bp, Artificial sequence
  SiRNA target sequence
tgttaacatgaatagtagacc

SEQ ID NO: 98168 - DNA, 21 bp, Artificial sequence
  SiRNA target sequence
gttaacatgaatagtagaccc

SEQ ID NO: 98169 - DNA, 21 bp, Artificial sequence
  SiRNA target sequence
ttaacatgaatagtagaccct

SEQ ID NO: 98170 - DNA, 21 bp, Artificial sequence
  SiRNA target sequence
taacatgaatagtagaccctt

SEQ ID NO: 98171 - DNA, 21 bp, Artificial sequence
  SiRNA target sequence
aacatgaatagtagacccttt

SEQ ID NO: 98172 - DNA, 21 bp, Artificial sequence
  SiRNA target sequence
acatgaatagtagacccttta

SEQ ID NO: 98173 - DNA, 21 bp, Artificial sequence
  SiRNA target sequence
catgaatagtagaccctttag

SEQ ID NO: 98174 - DNA, 21 bp, Artificial sequence
  SiRNA target sequence
atgaatagtagaccctttagt

SEQ ID NO: 98175 - DNA, 21 bp, Artificial sequence
  SiRNA target sequence
tgaatagtagaccctttagta

SEQ ID NO: 98176 - DNA, 21 bp, Artificial sequence
  SiRNA target sequence
gaatagtagaccctttagtaa

SEQ ID NO: 98177 - DNA, 21 bp, Artificial sequence
  SiRNA target sequence
aatagtagaccctttagtaag

SEQ ID NO: 98178 - DNA, 21 bp, Artificial sequence
  SiRNA target sequence
atagtagaccctttagtaagt

SEQ ID NO: 98179 - DNA, 21 bp, Artificial sequence
  SiRNA target sequence
tagtagaccctttagtaagta

SEQ ID NO: 98180 - DNA, 21 bp, Artificial sequence
  SiRNA target sequence
agtagaccctttagtaagtaa

SEQ ID NO: 98181 - DNA, 21 bp, Artificial sequence
  SiRNA target sequence
gtagaccctttagtaagtaat

SEQ ID NO: 98182 - DNA, 21 bp, Artificial sequence
  SiRNA target sequence
tagaccctttagtaagtaatt

SEQ ID NO: 98183 - DNA, 21 bp, Artificial sequence
  SiRNA target sequence
agaccctttagtaagtaattt

SEQ ID NO: 98184 - DNA, 21 bp, Artificial sequence
  SiRNA target sequence
gaccctttagtaagtaatttt

SEQ ID NO: 98185 - DNA, 21 bp, Artificial sequence
  SiRNA target sequence
accctttagtaagtaatttta

SEQ ID NO: 98186 - DNA, 21 bp, Artificial sequence
  SiRNA target sequence
ccctttagtaagtaattttaa

SEQ ID NO: 98187 - DNA, 21 bp, Artificial sequence
  SiRNA target sequence
cctttagtaagtaattttaaa

SEQ ID NO: 98188 - DNA, 21 bp, Artificial sequence
  SiRNA target sequence
ctttagtaagtaattttaaat

SEQ ID NO: 98189 - DNA, 21 bp, Artificial sequence
  SiRNA target sequence
tttagtaagtaattttaaata

SEQ ID NO: 98190 - DNA, 21 bp, Artificial sequence
  SiRNA target sequence
ttagtaagtaattttaaatac

SEQ ID NO: 98191 - DNA, 21 bp, Artificial sequence
  SiRNA target sequence
tagtaagtaattttaaatact

SEQ ID NO: 98192 - DNA, 21 bp, Artificial sequence
  SiRNA target sequence
agtaagtaattttaaatactc

SEQ ID NO: 98193 - DNA, 21 bp, Artificial sequence
  SiRNA target sequence
gtaagtaattttaaatactct

SEQ ID NO: 98194 - DNA, 21 bp, Artificial sequence
  SiRNA target sequence
taagtaattttaaatactctg

SEQ ID NO: 98195 - DNA, 21 bp, Artificial sequence
  SiRNA target sequence
aagtaattttaaatactctga

SEQ ID NO: 98196 - DNA, 21 bp, Artificial sequence
  SiRNA target sequence
agtaattttaaatactctgaa

SEQ ID NO: 98197 - DNA, 21 bp, Artificial sequence
  SiRNA target sequence
gtaattttaaatactctgaac

SEQ ID NO: 98198 - DNA, 21 bp, Artificial sequence
  SiRNA target sequence
taattttaaatactctgaaca

SEQ ID NO: 98199 - DNA, 21 bp, Artificial sequence
  SiRNA target sequence
aattttaaatactctgaacaa

SEQ ID NO: 98200 - DNA, 21 bp, Artificial sequence
  SiRNA target sequence
attttaaatactctgaacaaa

SEQ ID NO: 98201 - DNA, 21 bp, Artificial sequence
  SiRNA target sequence
ttttaaatactctgaacaaag

SEQ ID NO: 98202 - DNA, 21 bp, Artificial sequence
  SiRNA target sequence
tttaaatactctgaacaaaga

SEQ ID NO: 98203 - DNA, 21 bp, Artificial sequence
  SiRNA target sequence
ttaaatactctgaacaaagac

SEQ ID NO: 98204 - DNA, 21 bp, Artificial sequence
  SiRNA target sequence
taaatactctgaacaaagacc

SEQ ID NO: 98205 - DNA, 21 bp, Artificial sequence
  SiRNA target sequence
aaatactctgaacaaagacct

SEQ ID NO: 98206 - DNA, 21 bp, Artificial sequence
  SiRNA target sequence
aatactctgaacaaagacctt

SEQ ID NO: 98207 - DNA, 21 bp, Artificial sequence
  SiRNA target sequence
atactctgaacaaagaccttt

SEQ ID NO: 98208 - DNA, 21 bp, Artificial sequence
  SiRNA target sequence
tactctgaacaaagacctttt

SEQ ID NO: 98209 - DNA, 21 bp, Artificial sequence
  SiRNA target sequence
actctgaacaaagaccttttc

SEQ ID NO: 98210 - DNA, 21 bp, Artificial sequence
  SiRNA target sequence
ctctgaacaaagaccttttcg

SEQ ID NO: 98211 - DNA, 21 bp, Artificial sequence
  SiRNA target sequence
tctgaacaaagaccttttcgt

SEQ ID NO: 98212 - DNA, 21 bp, Artificial sequence
  SiRNA target sequence
ctgaacaaagaccttttcgtt

SEQ ID NO: 98213 - DNA, 21 bp, Artificial sequence
  SiRNA target sequence
tgaacaaagaccttttcgttc

SEQ ID NO: 98214 - DNA, 21 bp, Artificial sequence
  SiRNA target sequence
gaacaaagaccttttcgttct

SEQ ID NO: 98215 - DNA, 21 bp, Artificial sequence
  SiRNA target sequence
aacaaagaccttttcgttctt

SEQ ID NO: 98216 - DNA, 21 bp, Artificial sequence
  SiRNA target sequence
acaaagaccttttcgttcttc

SEQ ID NO: 98217 - DNA, 21 bp, Artificial sequence
  SiRNA target sequence
caaagaccttttcgttcttct

SEQ ID NO: 98218 - DNA, 21 bp, Artificial sequence
  SiRNA target sequence
aaagaccttttcgttcttctt

SEQ ID NO: 98219 - DNA, 21 bp, Artificial sequence
  SiRNA target sequence
aagaccttttcgttcttcttt

SEQ ID NO: 98220 - DNA, 21 bp, Artificial sequence
  SiRNA target sequence
agaccttttcgttcttctttt

SEQ ID NO: 98221 - DNA, 21 bp, Artificial sequence
  SiRNA target sequence
gaccttttcgttcttctttta

SEQ ID NO: 98222 - DNA, 21 bp, Artificial sequence
  SiRNA target sequence
accttttcgttcttcttttaa

SEQ ID NO: 98223 - DNA, 21 bp, Artificial sequence
  SiRNA target sequence
ccttttcgttcttcttttaaa

SEQ ID NO: 98224 - DNA, 21 bp, Artificial sequence
  SiRNA target sequence
cttttcgttcttcttttaaac

SEQ ID NO: 98225 - DNA, 21 bp, Artificial sequence
  SiRNA target sequence
ttttcgttcttcttttaaact

SEQ ID NO: 98226 - DNA, 21 bp, Artificial sequence
  SiRNA target sequence
tttcgttcttcttttaaactt

SEQ ID NO: 98227 - DNA, 21 bp, Artificial sequence
  SiRNA target sequence
ttcgttcttcttttaaacttg

SEQ ID NO: 98228 - DNA, 21 bp, Artificial sequence
  SiRNA target sequence
tcgttcttcttttaaacttgt

SEQ ID NO: 98229 - DNA, 21 bp, Artificial sequence
  SiRNA target sequence
cgttcttcttttaaacttgtt

SEQ ID NO: 98230 - DNA, 21 bp, Artificial sequence
  SiRNA target sequence
gttcttcttttaaacttgttt

SEQ ID NO: 98231 - DNA, 21 bp, Artificial sequence
  SiRNA target sequence
ttcttcttttaaacttgtttt

SEQ ID NO: 98232 - DNA, 21 bp, Artificial sequence
  SiRNA target sequence
tcttcttttaaacttgtttta

SEQ ID NO: 98233 - DNA, 21 bp, Artificial sequence
  SiRNA target sequence
cttcttttaaacttgttttaa

SEQ ID NO: 98234 - DNA, 21 bp, Artificial sequence
  SiRNA target sequence
ttcttttaaacttgttttaaa

SEQ ID NO: 98235 - DNA, 21 bp, Artificial sequence
  SiRNA target sequence
tcttttaaacttgttttaaaa

SEQ ID NO: 98236 - DNA, 21 bp, Artificial sequence
  SiRNA target sequence
cttttaaacttgttttaaaag

SEQ ID NO: 98237 - DNA, 21 bp, Artificial sequence
  SiRNA target sequence
ttttaaacttgttttaaaaga

SEQ ID NO: 98238 - DNA, 21 bp, Artificial sequence
  SiRNA target sequence
tttaaacttgttttaaaagaa

SEQ ID NO: 98239 - DNA, 21 bp, Artificial sequence
  SiRNA target sequence
ttaaacttgttttaaaagaaa

SEQ ID NO: 98240 - DNA, 21 bp, Artificial sequence
  SiRNA target sequence
taaacttgttttaaaagaaac

SEQ ID NO: 98241 - DNA, 21 bp, Artificial sequence
  SiRNA target sequence
aaacttgttttaaaagaaaca

SEQ ID NO: 98242 - DNA, 21 bp, Artificial sequence
  SiRNA target sequence
aacttgttttaaaagaaacaa

SEQ ID NO: 98243 - DNA, 21 bp, Artificial sequence
  SiRNA target sequence
acttgttttaaaagaaacaag

SEQ ID NO: 98244 - DNA, 21 bp, Artificial sequence
  SiRNA target sequence
cttgttttaaaagaaacaaga

SEQ ID NO: 98245 - DNA, 21 bp, Artificial sequence
  SiRNA target sequence
ttgttttaaaagaaacaagag

SEQ ID NO: 98246 - DNA, 21 bp, Artificial sequence
  SiRNA target sequence
tgttttaaaagaaacaagaga

SEQ ID NO: 98247 - DNA, 21 bp, Artificial sequence
  SiRNA target sequence
gttttaaaagaaacaagagag

SEQ ID NO: 98248 - DNA, 21 bp, Artificial sequence
  SiRNA target sequence
ttttaaaagaaacaagagaga

SEQ ID NO: 98249 - DNA, 21 bp, Artificial sequence
  SiRNA target sequence
tttaaaagaaacaagagagac

SEQ ID NO: 98250 - DNA, 21 bp, Artificial sequence
  SiRNA target sequence
ttaaaagaaacaagagagacg

SEQ ID NO: 98251 - DNA, 21 bp, Artificial sequence
  SiRNA target sequence
taaaagaaacaagagagacgg

SEQ ID NO: 98252 - DNA, 21 bp, Artificial sequence
  SiRNA target sequence
aaaagaaacaagagagacggt

SEQ ID NO: 98253 - DNA, 21 bp, Artificial sequence
  SiRNA target sequence
aaagaaacaagagagacggtg

SEQ ID NO: 98254 - DNA, 21 bp, Artificial sequence
  SiRNA target sequence
aagaaacaagagagacggtga

SEQ ID NO: 98255 - DNA, 21 bp, Artificial sequence
  SiRNA target sequence
agaaacaagagagacggtgac

SEQ ID NO: 98256 - DNA, 21 bp, Artificial sequence
  SiRNA target sequence
gaaacaagagagacggtgaca

SEQ ID NO: 98257 - DNA, 21 bp, Artificial sequence
  SiRNA target sequence
aaacaagagagacggtgacaa

SEQ ID NO: 98258 - DNA, 21 bp, Artificial sequence
  SiRNA target sequence
aacaagagagacggtgacaaa

SEQ ID NO: 98259 - DNA, 21 bp, Artificial sequence
  SiRNA target sequence
acaagagagacggtgacaaag

SEQ ID NO: 98260 - DNA, 21 bp, Artificial sequence
  SiRNA target sequence
caagagagacggtgacaaagt

SEQ ID NO: 98261 - DNA, 21 bp, Artificial sequence
  SiRNA target sequence
aagagagacggtgacaaagta

SEQ ID NO: 98262 - DNA, 21 bp, Artificial sequence
  SiRNA target sequence
agagagacggtgacaaagtaa

SEQ ID NO: 98263 - DNA, 21 bp, Artificial sequence
  SiRNA target sequence
gagagacggtgacaaagtaac

SEQ ID NO: 98264 - DNA, 21 bp, Artificial sequence
  SiRNA target sequence
agagacggtgacaaagtaaca

SEQ ID NO: 98265 - DNA, 21 bp, Artificial sequence
  SiRNA target sequence
gagacggtgacaaagtaacaa

SEQ ID NO: 98266 - DNA, 21 bp, Artificial sequence
  SiRNA target sequence
agacggtgacaaagtaacaaa

SEQ ID NO: 98267 - DNA, 21 bp, Artificial sequence
  SiRNA target sequence
gacggtgacaaagtaacaaaa

SEQ ID NO: 98268 - DNA, 21 bp, Artificial sequence
  SiRNA target sequence
acggtgacaaagtaacaaaaa

SEQ ID NO: 98269 - DNA, 21 bp, Artificial sequence
  SiRNA target sequence
cggtgacaaagtaacaaaaat

SEQ ID NO: 98270 - DNA, 21 bp, Artificial sequence
  SiRNA target sequence
ggtgacaaagtaacaaaaatc

SEQ ID NO: 98271 - DNA, 21 bp, Artificial sequence
  SiRNA target sequence
gtgacaaagtaacaaaaatct

SEQ ID NO: 98272 - DNA, 21 bp, Artificial sequence
  SiRNA target sequence
tgacaaagtaacaaaaatctt

SEQ ID NO: 98273 - DNA, 21 bp, Artificial sequence
  SiRNA target sequence
gacaaagtaacaaaaatcttt

SEQ ID NO: 98274 - DNA, 21 bp, Artificial sequence
  SiRNA target sequence
acaaagtaacaaaaatctttt

SEQ ID NO: 98275 - DNA, 21 bp, Artificial sequence
  SiRNA target sequence
caaagtaacaaaaatcttttt

SEQ ID NO: 98276 - DNA, 21 bp, Artificial sequence
  SiRNA target sequence
aaagtaacaaaaatctttttt

SEQ ID NO: 98277 - DNA, 21 bp, Artificial sequence
  SiRNA target sequence
aagtaacaaaaatcttttttc

SEQ ID NO: 98278 - DNA, 21 bp, Artificial sequence
  SiRNA target sequence
agtaacaaaaatcttttttcg

SEQ ID NO: 98279 - DNA, 21 bp, Artificial sequence
  SiRNA target sequence
gtaacaaaaatcttttttcgt

SEQ ID NO: 98280 - DNA, 21 bp, Artificial sequence
  SiRNA target sequence
taacaaaaatcttttttcgtt

SEQ ID NO: 98281 - DNA, 21 bp, Artificial sequence
  SiRNA target sequence
aacaaaaatcttttttcgtta

SEQ ID NO: 98282 - DNA, 21 bp, Artificial sequence
  SiRNA target sequence
acaaaaatcttttttcgttaa

SEQ ID NO: 98283 - DNA, 21 bp, Artificial sequence
  SiRNA target sequence
caaaaatcttttttcgttaat

SEQ ID NO: 98284 - DNA, 21 bp, Artificial sequence
  SiRNA target sequence
aaaaatcttttttcgttaatg

SEQ ID NO: 98285 - DNA, 21 bp, Artificial sequence
  SiRNA target sequence
aaaatcttttttcgttaatgt

SEQ ID NO: 98286 - DNA, 21 bp, Artificial sequence
  SiRNA target sequence
aaatcttttttcgttaatgta

SEQ ID NO: 98287 - DNA, 21 bp, Artificial sequence
  SiRNA target sequence
aatcttttttcgttaatgtaa

SEQ ID NO: 98288 - DNA, 21 bp, Artificial sequence
  SiRNA target sequence
atcttttttcgttaatgtaaa

SEQ ID NO: 98289 - DNA, 21 bp, Artificial sequence
  SiRNA target sequence
tcttttttcgttaatgtaaaa

SEQ ID NO: 98290 - DNA, 21 bp, Artificial sequence
  SiRNA target sequence
cttttttcgttaatgtaaaat

SEQ ID NO: 98291 - DNA, 21 bp, Artificial sequence
  SiRNA target sequence
ttttttcgttaatgtaaaata

SEQ ID NO: 98292 - DNA, 21 bp, Artificial sequence
  SiRNA target sequence
tttttcgttaatgtaaaatat

SEQ ID NO: 98293 - DNA, 21 bp, Artificial sequence
  SiRNA target sequence
ttttcgttaatgtaaaatatc

SEQ ID NO: 98294 - DNA, 21 bp, Artificial sequence
  SiRNA target sequence
tttcgttaatgtaaaatatct

SEQ ID NO: 98295 - DNA, 21 bp, Artificial sequence
  SiRNA target sequence
ttcgttaatgtaaaatatctt

SEQ ID NO: 98296 - DNA, 21 bp, Artificial sequence
  SiRNA target sequence
tcgttaatgtaaaatatcttg

SEQ ID NO: 98297 - DNA, 21 bp, Artificial sequence
  SiRNA target sequence
cgttaatgtaaaatatcttgg

SEQ ID NO: 98298 - DNA, 21 bp, Artificial sequence
  SiRNA target sequence
gttaatgtaaaatatcttgga

SEQ ID NO: 98299 - DNA, 21 bp, Artificial sequence
  SiRNA target sequence
ttaatgtaaaatatcttggat

SEQ ID NO: 98300 - DNA, 21 bp, Artificial sequence
  SiRNA target sequence
taatgtaaaatatcttggatt

SEQ ID NO: 98301 - DNA, 21 bp, Artificial sequence
  SiRNA target sequence
aatgtaaaatatcttggatta

SEQ ID NO: 98302 - DNA, 21 bp, Artificial sequence
  SiRNA target sequence
atgtaaaatatcttggattaa

SEQ ID NO: 98303 - DNA, 21 bp, Artificial sequence
  SiRNA target sequence
tgtaaaatatcttggattaat

SEQ ID NO: 98304 - DNA, 21 bp, Artificial sequence
  SiRNA target sequence
gtaaaatatcttggattaatt

SEQ ID NO: 98305 - DNA, 21 bp, Artificial sequence
  SiRNA target sequence
taaaatatcttggattaatta

SEQ ID NO: 98306 - DNA, 21 bp, Artificial sequence
  SiRNA target sequence
aaaatatcttggattaattac

SEQ ID NO: 98307 - DNA, 21 bp, Artificial sequence
  SiRNA target sequence
aaatatcttggattaattaca

SEQ ID NO: 98308 - DNA, 21 bp, Artificial sequence
  SiRNA target sequence
aatatcttggattaattacag

SEQ ID NO: 98309 - DNA, 21 bp, Artificial sequence
  SiRNA target sequence
atatcttggattaattacagg

SEQ ID NO: 98310 - DNA, 21 bp, Artificial sequence
  SiRNA target sequence
tatcttggattaattacaggg

SEQ ID NO: 98311 - DNA, 21 bp, Artificial sequence
  SiRNA target sequence
atcttggattaattacaggga

SEQ ID NO: 98312 - DNA, 21 bp, Artificial sequence
  SiRNA target sequence
tcttggattaattacagggat

SEQ ID NO: 98313 - DNA, 21 bp, Artificial sequence
  SiRNA target sequence
cttggattaattacagggata

SEQ ID NO: 98314 - DNA, 21 bp, Artificial sequence
  SiRNA target sequence
ttggattaattacagggatat

SEQ ID NO: 98315 - DNA, 21 bp, Artificial sequence
  SiRNA target sequence
tggattaattacagggatata

SEQ ID NO: 98316 - DNA, 21 bp, Artificial sequence
  SiRNA target sequence
ggattaattacagggatatac

SEQ ID NO: 98317 - DNA, 21 bp, Artificial sequence
  SiRNA target sequence
gattaattacagggatatact

SEQ ID NO: 98318 - DNA, 21 bp, Artificial sequence
  SiRNA target sequence
attaattacagggatatactt

SEQ ID NO: 98319 - DNA, 21 bp, Artificial sequence
  SiRNA target sequence
ttaattacagggatatacttg

SEQ ID NO: 98320 - DNA, 21 bp, Artificial sequence
  SiRNA target sequence
taattacagggatatacttgt

SEQ ID NO: 98321 - DNA, 21 bp, Artificial sequence
  SiRNA target sequence
aattacagggatatacttgta

SEQ ID NO: 98322 - DNA, 21 bp, Artificial sequence
  SiRNA target sequence
attacagggatatacttgtac

SEQ ID NO: 98323 - DNA, 21 bp, Artificial sequence
  SiRNA target sequence
ttacagggatatacttgtaca

SEQ ID NO: 98324 - DNA, 21 bp, Artificial sequence
  SiRNA target sequence
tacagggatatacttgtacat

SEQ ID NO: 98325 - DNA, 21 bp, Artificial sequence
  SiRNA target sequence
acagggatatacttgtacata

SEQ ID NO: 98326 - DNA, 21 bp, Artificial sequence
  SiRNA target sequence
cagggatatacttgtacataa

SEQ ID NO: 98327 - DNA, 21 bp, Artificial sequence
  SiRNA target sequence
agggatatacttgtacataaa

SEQ ID NO: 98328 - DNA, 21 bp, Artificial sequence
  SiRNA target sequence
gggatatacttgtacataaaa

SEQ ID NO: 98329 - DNA, 21 bp, Artificial sequence
  SiRNA target sequence
ggatatacttgtacataaaat

SEQ ID NO: 98330 - DNA, 21 bp, Artificial sequence
  SiRNA target sequence
gatatacttgtacataaaatt

SEQ ID NO: 98331 - DNA, 21 bp, Artificial sequence
  SiRNA target sequence
atatacttgtacataaaattt

SEQ ID NO: 98332 - DNA, 21 bp, Artificial sequence
  SiRNA target sequence
tatacttgtacataaaatttg

SEQ ID NO: 98333 - DNA, 21 bp, Artificial sequence
  SiRNA target sequence
atacttgtacataaaatttga

SEQ ID NO: 98334 - DNA, 21 bp, Artificial sequence
  SiRNA target sequence
tacttgtacataaaatttgag

SEQ ID NO: 98335 - DNA, 21 bp, Artificial sequence
  SiRNA target sequence
acttgtacataaaatttgagg

SEQ ID NO: 98336 - DNA, 21 bp, Artificial sequence
  SiRNA target sequence
cttgtacataaaatttgaggt

SEQ ID NO: 98337 - DNA, 21 bp, Artificial sequence
  SiRNA target sequence
ttgtacataaaatttgaggta

SEQ ID NO: 98338 - DNA, 21 bp, Artificial sequence
  SiRNA target sequence
tgtacataaaatttgaggtaa

SEQ ID NO: 98339 - DNA, 21 bp, Artificial sequence
  SiRNA target sequence
gtacataaaatttgaggtaag

SEQ ID NO: 98340 - DNA, 21 bp, Artificial sequence
  SiRNA target sequence
tacataaaatttgaggtaagt

SEQ ID NO: 98341 - DNA, 21 bp, Artificial sequence
  SiRNA target sequence
acataaaatttgaggtaagtt

SEQ ID NO: 98342 - DNA, 21 bp, Artificial sequence
  SiRNA target sequence
cataaaatttgaggtaagttt

SEQ ID NO: 98343 - DNA, 21 bp, Artificial sequence
  SiRNA target sequence
ataaaatttgaggtaagtttt

SEQ ID NO: 98344 - DNA, 21 bp, Artificial sequence
  SiRNA target sequence
taaaatttgaggtaagtttta

SEQ ID NO: 98345 - DNA, 21 bp, Artificial sequence
  SiRNA target sequence
aaaatttgaggtaagttttat

SEQ ID NO: 98346 - DNA, 21 bp, Artificial sequence
  SiRNA target sequence
aaatttgaggtaagttttatc

SEQ ID NO: 98347 - DNA, 21 bp, Artificial sequence
  SiRNA target sequence
aatttgaggtaagttttatct

SEQ ID NO: 98348 - DNA, 21 bp, Artificial sequence
  SiRNA target sequence
atttgaggtaagttttatctt

SEQ ID NO: 98349 - DNA, 21 bp, Artificial sequence
  SiRNA target sequence
tttgaggtaagttttatctta

SEQ ID NO: 98350 - DNA, 21 bp, Artificial sequence
  SiRNA target sequence
ttgaggtaagttttatcttaa

SEQ ID NO: 98351 - DNA, 21 bp, Artificial sequence
  SiRNA target sequence
tgaggtaagttttatcttaaa

SEQ ID NO: 98352 - DNA, 21 bp, Artificial sequence
  SiRNA target sequence
gaggtaagttttatcttaaaa

SEQ ID NO: 98353 - DNA, 21 bp, Artificial sequence
  SiRNA target sequence
aggtaagttttatcttaaaat

SEQ ID NO: 98354 - DNA, 21 bp, Artificial sequence
  SiRNA target sequence
ggtaagttttatcttaaaatc

SEQ ID NO: 98355 - DNA, 21 bp, Artificial sequence
  SiRNA target sequence
gtaagttttatcttaaaatct

SEQ ID NO: 98356 - DNA, 21 bp, Artificial sequence
  SiRNA target sequence
taagttttatcttaaaatctt

SEQ ID NO: 98357 - DNA, 21 bp, Artificial sequence
  SiRNA target sequence
aagttttatcttaaaatcttt

SEQ ID NO: 98358 - DNA, 21 bp, Artificial sequence
  SiRNA target sequence
agttttatcttaaaatctttt

SEQ ID NO: 98359 - DNA, 21 bp, Artificial sequence
  SiRNA target sequence
gttttatcttaaaatctttta

SEQ ID NO: 98360 - DNA, 21 bp, Artificial sequence
  SiRNA target sequence
ttttatcttaaaatcttttag

SEQ ID NO: 98361 - DNA, 21 bp, Artificial sequence
  SiRNA target sequence
tttatcttaaaatcttttaga

SEQ ID NO: 98362 - DNA, 21 bp, Artificial sequence
  SiRNA target sequence
ttatcttaaaatcttttagaa

SEQ ID NO: 98363 - DNA, 21 bp, Artificial sequence
  SiRNA target sequence
tatcttaaaatcttttagaac

SEQ ID NO: 98364 - DNA, 21 bp, Artificial sequence
  SiRNA target sequence
atcttaaaatcttttagaacc

SEQ ID NO: 98365 - DNA, 21 bp, Artificial sequence
  SiRNA target sequence
tcttaaaatcttttagaacct

SEQ ID NO: 98366 - DNA, 21 bp, Artificial sequence
  SiRNA target sequence
cttaaaatcttttagaacctc

SEQ ID NO: 98367 - DNA, 21 bp, Artificial sequence
  SiRNA target sequence
ttaaaatcttttagaacctca

SEQ ID NO: 98368 - DNA, 21 bp, Artificial sequence
  SiRNA target sequence
taaaatcttttagaacctcaa

SEQ ID NO: 98369 - DNA, 21 bp, Artificial sequence
  SiRNA target sequence
aaaatcttttagaacctcaaa

SEQ ID NO: 98370 - DNA, 21 bp, Artificial sequence
  SiRNA target sequence
aaatcttttagaacctcaaaa

SEQ ID NO: 98371 - DNA, 21 bp, Artificial sequence
  SiRNA target sequence
aatcttttagaacctcaaaaa

SEQ ID NO: 98372 - DNA, 21 bp, Artificial sequence
  SiRNA target sequence
atcttttagaacctcaaaaat

SEQ ID NO: 98373 - DNA, 21 bp, Artificial sequence
  SiRNA target sequence
tcttttagaacctcaaaaata

SEQ ID NO: 98374 - DNA, 21 bp, Artificial sequence
  SiRNA target sequence
cttttagaacctcaaaaatag

SEQ ID NO: 98375 - DNA, 21 bp, Artificial sequence
  SiRNA target sequence
ttttagaacctcaaaaatagt

SEQ ID NO: 98376 - DNA, 21 bp, Artificial sequence
  SiRNA target sequence
tttagaacctcaaaaatagtg

SEQ ID NO: 98377 - DNA, 21 bp, Artificial sequence
  SiRNA target sequence
ttagaacctcaaaaatagtgc

SEQ ID NO: 98378 - DNA, 21 bp, Artificial sequence
  SiRNA target sequence
tagaacctcaaaaatagtgcg

SEQ ID NO: 98379 - DNA, 21 bp, Artificial sequence
  SiRNA target sequence
agaacctcaaaaatagtgcgc

SEQ ID NO: 98380 - DNA, 21 bp, Artificial sequence
  SiRNA target sequence
gaacctcaaaaatagtgcgct

SEQ ID NO: 98381 - DNA, 21 bp, Artificial sequence
  SiRNA target sequence
aacctcaaaaatagtgcgctt

SEQ ID NO: 98382 - DNA, 21 bp, Artificial sequence
  SiRNA target sequence
acctcaaaaatagtgcgcttc

SEQ ID NO: 98383 - DNA, 21 bp, Artificial sequence
  SiRNA target sequence
cctcaaaaatagtgcgcttcg

SEQ ID NO: 98384 - DNA, 21 bp, Artificial sequence
  SiRNA target sequence
ctcaaaaatagtgcgcttcgg

SEQ ID NO: 98385 - DNA, 21 bp, Artificial sequence
  SiRNA target sequence
tcaaaaatagtgcgcttcggt

SEQ ID NO: 98386 - DNA, 21 bp, Artificial sequence
  SiRNA target sequence
caaaaatagtgcgcttcggta

SEQ ID NO: 98387 - DNA, 21 bp, Artificial sequence
  SiRNA target sequence
aaaaatagtgcgcttcggtag

SEQ ID NO: 98388 - DNA, 21 bp, Artificial sequence
  SiRNA target sequence
aaaatagtgcgcttcggtagt

SEQ ID NO: 98389 - DNA, 21 bp, Artificial sequence
  SiRNA target sequence
aaatagtgcgcttcggtagta

SEQ ID NO: 98390 - DNA, 21 bp, Artificial sequence
  SiRNA target sequence
aatagtgcgcttcggtagtaa

SEQ ID NO: 98391 - DNA, 21 bp, Artificial sequence
  SiRNA target sequence
atagtgcgcttcggtagtaaa

SEQ ID NO: 98392 - DNA, 21 bp, Artificial sequence
  SiRNA target sequence
tagtgcgcttcggtagtaaaa

SEQ ID NO: 98393 - DNA, 21 bp, Artificial sequence
  SiRNA target sequence
agtgcgcttcggtagtaaaat

SEQ ID NO: 98394 - DNA, 21 bp, Artificial sequence
  SiRNA target sequence
gtgcgcttcggtagtaaaatg

SEQ ID NO: 98395 - DNA, 21 bp, Artificial sequence
  SiRNA target sequence
tgcgcttcggtagtaaaatgt

SEQ ID NO: 98396 - DNA, 21 bp, Artificial sequence
  SiRNA target sequence
gcgcttcggtagtaaaatgta

SEQ ID NO: 98397 - DNA, 21 bp, Artificial sequence
  SiRNA target sequence
cgcttcggtagtaaaatgtaa

SEQ ID NO: 98398 - DNA, 21 bp, Artificial sequence
  SiRNA target sequence
gcttcggtagtaaaatgtaat

SEQ ID NO: 98399 - DNA, 21 bp, Artificial sequence
  SiRNA target sequence
cttcggtagtaaaatgtaatc

SEQ ID NO: 98400 - DNA, 21 bp, Artificial sequence
  SiRNA target sequence
ttcggtagtaaaatgtaatca

SEQ ID NO: 98401 - DNA, 21 bp, Artificial sequence
  SiRNA target sequence
tcggtagtaaaatgtaatcat

SEQ ID NO: 98402 - DNA, 21 bp, Artificial sequence
  SiRNA target sequence
cggtagtaaaatgtaatcata

SEQ ID NO: 98403 - DNA, 21 bp, Artificial sequence
  SiRNA target sequence
ggtagtaaaatgtaatcatag

SEQ ID NO: 98404 - DNA, 21 bp, Artificial sequence
  SiRNA target sequence
gtagtaaaatgtaatcatagt

SEQ ID NO: 98405 - DNA, 21 bp, Artificial sequence
  SiRNA target sequence
tagtaaaatgtaatcatagta

SEQ ID NO: 98406 - DNA, 21 bp, Artificial sequence
  SiRNA target sequence
agtaaaatgtaatcatagtac

SEQ ID NO: 98407 - DNA, 21 bp, Artificial sequence
  SiRNA target sequence
gtaaaatgtaatcatagtaca

SEQ ID NO: 98408 - DNA, 21 bp, Artificial sequence
  SiRNA target sequence
taaaatgtaatcatagtacag

SEQ ID NO: 98409 - DNA, 21 bp, Artificial sequence
  SiRNA target sequence
aaaatgtaatcatagtacaga

SEQ ID NO: 98410 - DNA, 21 bp, Artificial sequence
  SiRNA target sequence
aaatgtaatcatagtacagat

SEQ ID NO: 98411 - DNA, 21 bp, Artificial sequence
  SiRNA target sequence
aatgtaatcatagtacagatc

SEQ ID NO: 98412 - DNA, 21 bp, Artificial sequence
  SiRNA target sequence
atgtaatcatagtacagatcg

SEQ ID NO: 98413 - DNA, 21 bp, Artificial sequence
  SiRNA target sequence
tgtaatcatagtacagatcgt

SEQ ID NO: 98414 - DNA, 21 bp, Artificial sequence
  SiRNA target sequence
gtaatcatagtacagatcgta

SEQ ID NO: 98415 - DNA, 21 bp, Artificial sequence
  SiRNA target sequence
taatcatagtacagatcgtaa

SEQ ID NO: 98416 - DNA, 21 bp, Artificial sequence
  SiRNA target sequence
aatcatagtacagatcgtaat

SEQ ID NO: 98417 - DNA, 21 bp, Artificial sequence
  SiRNA target sequence
atcatagtacagatcgtaatt

SEQ ID NO: 98418 - DNA, 21 bp, Artificial sequence
  SiRNA target sequence
tcatagtacagatcgtaattt

SEQ ID NO: 98419 - DNA, 21 bp, Artificial sequence
  SiRNA target sequence
catagtacagatcgtaattta

SEQ ID NO: 98420 - DNA, 21 bp, Artificial sequence
  SiRNA target sequence
atagtacagatcgtaatttag

SEQ ID NO: 98421 - DNA, 21 bp, Artificial sequence
  SiRNA target sequence
tagtacagatcgtaatttaga

SEQ ID NO: 98422 - DNA, 21 bp, Artificial sequence
  SiRNA target sequence
agtacagatcgtaatttagat

SEQ ID NO: 98423 - DNA, 21 bp, Artificial sequence
  SiRNA target sequence
gtacagatcgtaatttagata

SEQ ID NO: 98424 - DNA, 21 bp, Artificial sequence
  SiRNA target sequence
tacagatcgtaatttagataa

SEQ ID NO: 98425 - DNA, 21 bp, Artificial sequence
  SiRNA target sequence
acagatcgtaatttagataaa

SEQ ID NO: 98426 - DNA, 21 bp, Artificial sequence
  SiRNA target sequence
cagatcgtaatttagataaat

SEQ ID NO: 98427 - DNA, 21 bp, Artificial sequence
  SiRNA target sequence
agatcgtaatttagataaatt

SEQ ID NO: 98428 - DNA, 21 bp, Artificial sequence
  SiRNA target sequence
gatcgtaatttagataaattt

SEQ ID NO: 98429 - DNA, 21 bp, Artificial sequence
  SiRNA target sequence
atcgtaatttagataaatttc

SEQ ID NO: 98430 - DNA, 21 bp, Artificial sequence
  SiRNA target sequence
tcgtaatttagataaatttct

SEQ ID NO: 98431 - DNA, 21 bp, Artificial sequence
  SiRNA target sequence
cgtaatttagataaatttctt

SEQ ID NO: 98432 - DNA, 21 bp, Artificial sequence
  SiRNA target sequence
gtaatttagataaatttcttt

SEQ ID NO: 98433 - DNA, 21 bp, Artificial sequence
  SiRNA target sequence
taatttagataaatttcttta

SEQ ID NO: 98434 - DNA, 21 bp, Artificial sequence
  SiRNA target sequence
aatttagataaatttctttac

SEQ ID NO: 98435 - DNA, 21 bp, Artificial sequence
  SiRNA target sequence
atttagataaatttctttaca

SEQ ID NO: 98436 - DNA, 21 bp, Artificial sequence
  SiRNA target sequence
tttagataaatttctttacat

SEQ ID NO: 98437 - DNA, 21 bp, Artificial sequence
  SiRNA target sequence
ttagataaatttctttacatt

SEQ ID NO: 98438 - DNA, 21 bp, Artificial sequence
  SiRNA target sequence
tagataaatttctttacattt

SEQ ID NO: 98439 - DNA, 21 bp, Artificial sequence
  SiRNA target sequence
agataaatttctttacatttc

SEQ ID NO: 98440 - DNA, 21 bp, Artificial sequence
  SiRNA target sequence
gataaatttctttacatttct

SEQ ID NO: 98441 - DNA, 21 bp, Artificial sequence
  SiRNA target sequence
ataaatttctttacatttctc

SEQ ID NO: 98442 - DNA, 21 bp, Artificial sequence
  SiRNA target sequence
taaatttctttacatttctca

SEQ ID NO: 98443 - DNA, 21 bp, Artificial sequence
  SiRNA target sequence
aaatttctttacatttctcac

SEQ ID NO: 98444 - DNA, 21 bp, Artificial sequence
  SiRNA target sequence
aatttctttacatttctcacg

SEQ ID NO: 98445 - DNA, 21 bp, Artificial sequence
  SiRNA target sequence
atttctttacatttctcacga

SEQ ID NO: 98446 - DNA, 21 bp, Artificial sequence
  SiRNA target sequence
tttctttacatttctcacgat

SEQ ID NO: 98447 - DNA, 21 bp, Artificial sequence
  SiRNA target sequence
ttctttacatttctcacgata

SEQ ID NO: 98448 - DNA, 21 bp, Artificial sequence
  SiRNA target sequence
tctttacatttctcacgatat

SEQ ID NO: 98449 - DNA, 21 bp, Artificial sequence
  SiRNA target sequence
ctttacatttctcacgatatt

SEQ ID NO: 98450 - DNA, 21 bp, Artificial sequence
  SiRNA target sequence
tttacatttctcacgatattc

SEQ ID NO: 98451 - DNA, 21 bp, Artificial sequence
  SiRNA target sequence
ttacatttctcacgatattcc

SEQ ID NO: 98452 - DNA, 21 bp, Artificial sequence
  SiRNA target sequence
tacatttctcacgatattcct

SEQ ID NO: 98453 - DNA, 21 bp, Artificial sequence
  SiRNA target sequence
acatttctcacgatattcctc

SEQ ID NO: 98454 - DNA, 21 bp, Artificial sequence
  SiRNA target sequence
catttctcacgatattcctca

SEQ ID NO: 98455 - DNA, 21 bp, Artificial sequence
  SiRNA target sequence
atttctcacgatattcctcag

SEQ ID NO: 98456 - DNA, 21 bp, Artificial sequence
  SiRNA target sequence
tttctcacgatattcctcagc

SEQ ID NO: 98457 - DNA, 21 bp, Artificial sequence
  SiRNA target sequence
ttctcacgatattcctcagca

SEQ ID NO: 98458 - DNA, 21 bp, Artificial sequence
  SiRNA target sequence
tctcacgatattcctcagcaa

SEQ ID NO: 98459 - DNA, 21 bp, Artificial sequence
  SiRNA target sequence
ctcacgatattcctcagcaat

SEQ ID NO: 98460 - DNA, 21 bp, Artificial sequence
  SiRNA target sequence
tcacgatattcctcagcaatg

SEQ ID NO: 98461 - DNA, 21 bp, Artificial sequence
  SiRNA target sequence
cacgatattcctcagcaatgg

SEQ ID NO: 98462 - DNA, 21 bp, Artificial sequence
  SiRNA target sequence
acgatattcctcagcaatggt

SEQ ID NO: 98463 - DNA, 21 bp, Artificial sequence
  SiRNA target sequence
cgatattcctcagcaatggta

SEQ ID NO: 98464 - DNA, 21 bp, Artificial sequence
  SiRNA target sequence
gatattcctcagcaatggtat

SEQ ID NO: 98465 - DNA, 21 bp, Artificial sequence
  SiRNA target sequence
atattcctcagcaatggtatc

SEQ ID NO: 98466 - DNA, 21 bp, Artificial sequence
  SiRNA target sequence
tattcctcagcaatggtatct

SEQ ID NO: 98467 - DNA, 21 bp, Artificial sequence
  SiRNA target sequence
attcctcagcaatggtatctg

SEQ ID NO: 98468 - DNA, 21 bp, Artificial sequence
  SiRNA target sequence
ttcctcagcaatggtatctgt

SEQ ID NO: 98469 - DNA, 21 bp, Artificial sequence
  SiRNA target sequence
tcctcagcaatggtatctgtg

SEQ ID NO: 98470 - DNA, 21 bp, Artificial sequence
  SiRNA target sequence
cctcagcaatggtatctgtga

SEQ ID NO: 98471 - DNA, 21 bp, Artificial sequence
  SiRNA target sequence
ctcagcaatggtatctgtgat

SEQ ID NO: 98472 - DNA, 21 bp, Artificial sequence
  SiRNA target sequence
tcagcaatggtatctgtgata

SEQ ID NO: 98473 - DNA, 21 bp, Artificial sequence
  SiRNA target sequence
cagcaatggtatctgtgataa

SEQ ID NO: 98474 - DNA, 21 bp, Artificial sequence
  SiRNA target sequence
agcaatggtatctgtgataag

SEQ ID NO: 98475 - DNA, 21 bp, Artificial sequence
  SiRNA target sequence
gcaatggtatctgtgataagc

SEQ ID NO: 98476 - DNA, 21 bp, Artificial sequence
  SiRNA target sequence
caatggtatctgtgataagcg

SEQ ID NO: 98477 - DNA, 21 bp, Artificial sequence
  SiRNA target sequence
aatggtatctgtgataagcga

SEQ ID NO: 98478 - DNA, 21 bp, Artificial sequence
  SiRNA target sequence
atggtatctgtgataagcgaa

SEQ ID NO: 98479 - DNA, 21 bp, Artificial sequence
  SiRNA target sequence
tggtatctgtgataagcgaaa

SEQ ID NO: 98480 - DNA, 21 bp, Artificial sequence
  SiRNA target sequence
ggtatctgtgataagcgaaag

SEQ ID NO: 98481 - DNA, 21 bp, Artificial sequence
  SiRNA target sequence
gtatctgtgataagcgaaagt

SEQ ID NO: 98482 - DNA, 21 bp, Artificial sequence
  SiRNA target sequence
tatctgtgataagcgaaagtt

SEQ ID NO: 98483 - DNA, 21 bp, Artificial sequence
  SiRNA target sequence
atctgtgataagcgaaagttg

SEQ ID NO: 98484 - DNA, 21 bp, Artificial sequence
  SiRNA target sequence
tctgtgataagcgaaagttgt

SEQ ID NO: 98485 - DNA, 21 bp, Artificial sequence
  SiRNA target sequence
ctgtgataagcgaaagttgta

SEQ ID NO: 98486 - DNA, 21 bp, Artificial sequence
  SiRNA target sequence
tgtgataagcgaaagttgtag

SEQ ID NO: 98487 - DNA, 21 bp, Artificial sequence
  SiRNA target sequence
gtgataagcgaaagttgtaga

SEQ ID NO: 98488 - DNA, 21 bp, Artificial sequence
  SiRNA target sequence
tgataagcgaaagttgtagaa

SEQ ID NO: 98489 - DNA, 21 bp, Artificial sequence
  SiRNA target sequence
gataagcgaaagttgtagaaa

SEQ ID NO: 98490 - DNA, 21 bp, Artificial sequence
  SiRNA target sequence
ataagcgaaagttgtagaaaa

SEQ ID NO: 98491 - DNA, 21 bp, Artificial sequence
  SiRNA target sequence
taagcgaaagttgtagaaaaa

SEQ ID NO: 98492 - DNA, 21 bp, Artificial sequence
  SiRNA target sequence
aagcgaaagttgtagaaaaaa

SEQ ID NO: 98493 - DNA, 21 bp, Artificial sequence
  SiRNA target sequence
agcgaaagttgtagaaaaaaa

SEQ ID NO: 98494 - DNA, 21 bp, Artificial sequence
  SiRNA target sequence
gcgaaagttgtagaaaaaaat

SEQ ID NO: 98495 - DNA, 21 bp, Artificial sequence
  SiRNA target sequence
cgaaagttgtagaaaaaaata

SEQ ID NO: 98496 - DNA, 21 bp, Artificial sequence
  SiRNA target sequence
gaaagttgtagaaaaaaatag

SEQ ID NO: 98497 - DNA, 21 bp, Artificial sequence
  SiRNA target sequence
aaagttgtagaaaaaaataga

SEQ ID NO: 98498 - DNA, 21 bp, Artificial sequence
  SiRNA target sequence
aagttgtagaaaaaaatagat

SEQ ID NO: 98499 - DNA, 21 bp, Artificial sequence
  SiRNA target sequence
agttgtagaaaaaaatagatt

SEQ ID NO: 98500 - DNA, 21 bp, Artificial sequence
  SiRNA target sequence
gttgtagaaaaaaatagattt

SEQ ID NO: 98501 - DNA, 21 bp, Artificial sequence
  SiRNA target sequence
ttgtagaaaaaaatagatttg

SEQ ID NO: 98502 - DNA, 21 bp, Artificial sequence
  SiRNA target sequence
tgtagaaaaaaatagatttga

SEQ ID NO: 98503 - DNA, 21 bp, Artificial sequence
  SiRNA target sequence
gtagaaaaaaatagatttgag

SEQ ID NO: 98504 - DNA, 21 bp, Artificial sequence
  SiRNA target sequence
tagaaaaaaatagatttgagg

SEQ ID NO: 98505 - DNA, 21 bp, Artificial sequence
  SiRNA target sequence
agaaaaaaatagatttgagga

SEQ ID NO: 98506 - DNA, 21 bp, Artificial sequence
  SiRNA target sequence
gaaaaaaatagatttgaggaa

SEQ ID NO: 98507 - DNA, 21 bp, Artificial sequence
  SiRNA target sequence
aaaaaaatagatttgaggaat

SEQ ID NO: 98508 - DNA, 21 bp, Artificial sequence
  SiRNA target sequence
aaaaaatagatttgaggaata

SEQ ID NO: 98509 - DNA, 21 bp, Artificial sequence
  SiRNA target sequence
aaaaatagatttgaggaatag

SEQ ID NO: 98510 - DNA, 21 bp, Artificial sequence
  SiRNA target sequence
aaaatagatttgaggaataga

SEQ ID NO: 98511 - DNA, 21 bp, Artificial sequence
  SiRNA target sequence
aaatagatttgaggaatagaa

SEQ ID NO: 98512 - DNA, 21 bp, Artificial sequence
  SiRNA target sequence
aatagatttgaggaatagaat

SEQ ID NO: 98513 - DNA, 21 bp, Artificial sequence
  SiRNA target sequence
atagatttgaggaatagaatt

SEQ ID NO: 98514 - DNA, 21 bp, Artificial sequence
  SiRNA target sequence
tagatttgaggaatagaatta

SEQ ID NO: 98515 - DNA, 21 bp, Artificial sequence
  SiRNA target sequence
agatttgaggaatagaattaa

SEQ ID NO: 98516 - DNA, 21 bp, Artificial sequence
  SiRNA target sequence
gatttgaggaatagaattaaa

SEQ ID NO: 98517 - DNA, 21 bp, Artificial sequence
  SiRNA target sequence
atttgaggaatagaattaaaa

SEQ ID NO: 98518 - DNA, 21 bp, Artificial sequence
  SiRNA target sequence
tttgaggaatagaattaaaat

SEQ ID NO: 98519 - DNA, 21 bp, Artificial sequence
  SiRNA target sequence
ttgaggaatagaattaaaatc

SEQ ID NO: 98520 - DNA, 21 bp, Artificial sequence
  SiRNA target sequence
tgaggaatagaattaaaatca

SEQ ID NO: 98521 - DNA, 21 bp, Artificial sequence
  SiRNA target sequence
gaggaatagaattaaaatcac

SEQ ID NO: 98522 - DNA, 21 bp, Artificial sequence
  SiRNA target sequence
aggaatagaattaaaatcaca

SEQ ID NO: 98523 - DNA, 21 bp, Artificial sequence
  SiRNA target sequence
ggaatagaattaaaatcacaa

SEQ ID NO: 98524 - DNA, 21 bp, Artificial sequence
  SiRNA target sequence
gaatagaattaaaatcacaat

SEQ ID NO: 98525 - DNA, 21 bp, Artificial sequence
  SiRNA target sequence
aatagaattaaaatcacaata

SEQ ID NO: 98526 - DNA, 21 bp, Artificial sequence
  SiRNA target sequence
atagaattaaaatcacaatat

SEQ ID NO: 98527 - DNA, 21 bp, Artificial sequence
  SiRNA target sequence
tagaattaaaatcacaatatt

SEQ ID NO: 98528 - DNA, 21 bp, Artificial sequence
  SiRNA target sequence
agaattaaaatcacaatattt

SEQ ID NO: 98529 - DNA, 21 bp, Artificial sequence
  SiRNA target sequence
gaattaaaatcacaatatttt

SEQ ID NO: 98530 - DNA, 21 bp, Artificial sequence
  SiRNA target sequence
aattaaaatcacaatattttt

SEQ ID NO: 98531 - DNA, 21 bp, Artificial sequence
  SiRNA target sequence
attaaaatcacaatatttttt

SEQ ID NO: 98532 - DNA, 21 bp, Artificial sequence
  SiRNA target sequence
ttaaaatcacaatatttttta

SEQ ID NO: 98533 - DNA, 21 bp, Artificial sequence
  SiRNA target sequence
taaaatcacaatattttttaa

SEQ ID NO: 98534 - DNA, 21 bp, Artificial sequence
  SiRNA target sequence
aaaatcacaatattttttaat

SEQ ID NO: 98535 - DNA, 21 bp, Artificial sequence
  SiRNA target sequence
aaatcacaatattttttaata

SEQ ID NO: 98536 - DNA, 21 bp, Artificial sequence
  SiRNA target sequence
aatcacaatattttttaatat

SEQ ID NO: 98537 - DNA, 21 bp, Artificial sequence
  SiRNA target sequence
atcacaatattttttaatata

SEQ ID NO: 98538 - DNA, 21 bp, Artificial sequence
  SiRNA target sequence
tcacaatattttttaatatat

SEQ ID NO: 98539 - DNA, 21 bp, Artificial sequence
  SiRNA target sequence
cacaatattttttaatatatt

SEQ ID NO: 98540 - DNA, 21 bp, Artificial sequence
  SiRNA target sequence
acaatattttttaatatattt

SEQ ID NO: 98541 - DNA, 21 bp, Artificial sequence
  SiRNA target sequence
caatattttttaatatattta

SEQ ID NO: 98542 - DNA, 21 bp, Artificial sequence
  SiRNA target sequence
aatattttttaatatatttaa

SEQ ID NO: 98543 - DNA, 21 bp, Artificial sequence
  SiRNA target sequence
atattttttaatatatttaac

SEQ ID NO: 98544 - DNA, 21 bp, Artificial sequence
  SiRNA target sequence
tattttttaatatatttaacc

SEQ ID NO: 98545 - DNA, 21 bp, Artificial sequence
  SiRNA target sequence
attttttaatatatttaacca

SEQ ID NO: 98546 - DNA, 21 bp, Artificial sequence
  SiRNA target sequence
ttttttaatatatttaaccaa

SEQ ID NO: 98547 - DNA, 21 bp, Artificial sequence
  SiRNA target sequence
tttttaatatatttaaccaag

SEQ ID NO: 98548 - DNA, 21 bp, Artificial sequence
  SiRNA target sequence
ttttaatatatttaaccaagg

SEQ ID NO: 98549 - DNA, 21 bp, Artificial sequence
  SiRNA target sequence
tttaatatatttaaccaaggt

SEQ ID NO: 98550 - DNA, 21 bp, Artificial sequence
  SiRNA target sequence
ttaatatatttaaccaaggta

SEQ ID NO: 98551 - DNA, 21 bp, Artificial sequence
  SiRNA target sequence
taatatatttaaccaaggtat

SEQ ID NO: 98552 - DNA, 21 bp, Artificial sequence
  SiRNA target sequence
aatatatttaaccaaggtatt

SEQ ID NO: 98553 - DNA, 21 bp, Artificial sequence
  SiRNA target sequence
atatatttaaccaaggtattg

SEQ ID NO: 98554 - DNA, 21 bp, Artificial sequence
  SiRNA target sequence
tatatttaaccaaggtattgt

SEQ ID NO: 98555 - DNA, 21 bp, Artificial sequence
  SiRNA target sequence
atatttaaccaaggtattgtc

SEQ ID NO: 98556 - DNA, 21 bp, Artificial sequence
  SiRNA target sequence
tatttaaccaaggtattgtcc

SEQ ID NO: 98557 - DNA, 21 bp, Artificial sequence
  SiRNA target sequence
atttaaccaaggtattgtcct

SEQ ID NO: 98558 - DNA, 21 bp, Artificial sequence
  SiRNA target sequence
tttaaccaaggtattgtcctt

SEQ ID NO: 98559 - DNA, 21 bp, Artificial sequence
  SiRNA target sequence
ttaaccaaggtattgtccttt

SEQ ID NO: 98560 - DNA, 21 bp, Artificial sequence
  SiRNA target sequence
taaccaaggtattgtccttta

SEQ ID NO: 98561 - DNA, 21 bp, Artificial sequence
  SiRNA target sequence
aaccaaggtattgtcctttat

SEQ ID NO: 98562 - DNA, 21 bp, Artificial sequence
  SiRNA target sequence
accaaggtattgtcctttatg

SEQ ID NO: 98563 - DNA, 21 bp, Artificial sequence
  SiRNA target sequence
ccaaggtattgtcctttatgt

SEQ ID NO: 98564 - DNA, 21 bp, Artificial sequence
  SiRNA target sequence
caaggtattgtcctttatgtt

SEQ ID NO: 98565 - DNA, 21 bp, Artificial sequence
  SiRNA target sequence
aaggtattgtcctttatgtta

SEQ ID NO: 98566 - DNA, 21 bp, Artificial sequence
  SiRNA target sequence
aggtattgtcctttatgttat

SEQ ID NO: 98567 - DNA, 21 bp, Artificial sequence
  SiRNA target sequence
ggtattgtcctttatgttatt

SEQ ID NO: 98568 - DNA, 21 bp, Artificial sequence
  SiRNA target sequence
gtattgtcctttatgttatta

SEQ ID NO: 98569 - DNA, 21 bp, Artificial sequence
  SiRNA target sequence
tattgtcctttatgttattat

SEQ ID NO: 98570 - DNA, 21 bp, Artificial sequence
  SiRNA target sequence
attgtcctttatgttattata

SEQ ID NO: 98571 - DNA, 21 bp, Artificial sequence
  SiRNA target sequence
ttgtcctttatgttattatat

SEQ ID NO: 98572 - DNA, 21 bp, Artificial sequence
  SiRNA target sequence
tgtcctttatgttattatatc

SEQ ID NO: 98573 - DNA, 21 bp, Artificial sequence
  SiRNA target sequence
gtcctttatgttattatatct

SEQ ID NO: 98574 - DNA, 21 bp, Artificial sequence
  SiRNA target sequence
tcctttatgttattatatctt

SEQ ID NO: 98575 - DNA, 21 bp, Artificial sequence
  SiRNA target sequence
cctttatgttattatatctta

SEQ ID NO: 98576 - DNA, 21 bp, Artificial sequence
  SiRNA target sequence
ctttatgttattatatcttac

SEQ ID NO: 98577 - DNA, 21 bp, Artificial sequence
  SiRNA target sequence
tttatgttattatatcttaca

SEQ ID NO: 98578 - DNA, 21 bp, Artificial sequence
  SiRNA target sequence
ttatgttattatatcttacaa

SEQ ID NO: 98579 - DNA, 21 bp, Artificial sequence
  SiRNA target sequence
tatgttattatatcttacaaa

SEQ ID NO: 98580 - DNA, 21 bp, Artificial sequence
  SiRNA target sequence
atgttattatatcttacaaac

SEQ ID NO: 98581 - DNA, 21 bp, Artificial sequence
  SiRNA target sequence
tgttattatatcttacaaact

SEQ ID NO: 98582 - DNA, 21 bp, Artificial sequence
  SiRNA target sequence
gttattatatcttacaaactc

SEQ ID NO: 98583 - DNA, 21 bp, Artificial sequence
  SiRNA target sequence
ttattatatcttacaaactcc

SEQ ID NO: 98584 - DNA, 21 bp, Artificial sequence
  SiRNA target sequence
tattatatcttacaaactcct

SEQ ID NO: 98585 - DNA, 21 bp, Artificial sequence
  SiRNA target sequence
attatatcttacaaactcctc

SEQ ID NO: 98586 - DNA, 21 bp, Artificial sequence
  SiRNA target sequence
ttatatcttacaaactcctcg

SEQ ID NO: 98587 - DNA, 21 bp, Artificial sequence
  SiRNA target sequence
tatatcttacaaactcctcgt

SEQ ID NO: 98588 - DNA, 21 bp, Artificial sequence
  SiRNA target sequence
atatcttacaaactcctcgta

SEQ ID NO: 98589 - DNA, 21 bp, Artificial sequence
  SiRNA target sequence
tatcttacaaactcctcgtaa

SEQ ID NO: 98590 - DNA, 21 bp, Artificial sequence
  SiRNA target sequence
atcttacaaactcctcgtaat

SEQ ID NO: 98591 - DNA, 21 bp, Artificial sequence
  SiRNA target sequence
tcttacaaactcctcgtaatt

SEQ ID NO: 98592 - DNA, 21 bp, Artificial sequence
  SiRNA target sequence
cttacaaactcctcgtaatta

SEQ ID NO: 98593 - DNA, 21 bp, Artificial sequence
  SiRNA target sequence
ttacaaactcctcgtaattat

SEQ ID NO: 98594 - DNA, 21 bp, Artificial sequence
  SiRNA target sequence
tacaaactcctcgtaattata

SEQ ID NO: 98595 - DNA, 21 bp, Artificial sequence
  SiRNA target sequence
acaaactcctcgtaattataa

SEQ ID NO: 98596 - DNA, 21 bp, Artificial sequence
  SiRNA target sequence
caaactcctcgtaattataat

SEQ ID NO: 98597 - DNA, 21 bp, Artificial sequence
  SiRNA target sequence
aaactcctcgtaattataatt

SEQ ID NO: 98598 - DNA, 21 bp, Artificial sequence
  SiRNA target sequence
aactcctcgtaattataattt

SEQ ID NO: 98599 - DNA, 21 bp, Artificial sequence
  SiRNA target sequence
actcctcgtaattataatttt

SEQ ID NO: 98600 - DNA, 21 bp, Artificial sequence
  SiRNA target sequence
ctcctcgtaattataattttc

SEQ ID NO: 98601 - DNA, 21 bp, Artificial sequence
  SiRNA target sequence
tcctcgtaattataattttca

SEQ ID NO: 98602 - DNA, 21 bp, Artificial sequence
  SiRNA target sequence
cctcgtaattataattttcag

SEQ ID NO: 98603 - DNA, 21 bp, Artificial sequence
  SiRNA target sequence
ctcgtaattataattttcagg

SEQ ID NO: 98604 - DNA, 21 bp, Artificial sequence
  SiRNA target sequence
tcgtaattataattttcagga

SEQ ID NO: 98605 - DNA, 21 bp, Artificial sequence
  SiRNA target sequence
cgtaattataattttcaggat

SEQ ID NO: 98606 - DNA, 21 bp, Artificial sequence
  SiRNA target sequence
gtaattataattttcaggata

SEQ ID NO: 98607 - DNA, 21 bp, Artificial sequence
  SiRNA target sequence
taattataattttcaggataa

SEQ ID NO: 98608 - DNA, 21 bp, Artificial sequence
  SiRNA target sequence
aattataattttcaggataaa

SEQ ID NO: 98609 - DNA, 21 bp, Artificial sequence
  SiRNA target sequence
attataattttcaggataaac

SEQ ID NO: 98610 - DNA, 21 bp, Artificial sequence
  SiRNA target sequence
ttataattttcaggataaacc

SEQ ID NO: 98611 - DNA, 21 bp, Artificial sequence
  SiRNA target sequence
tataattttcaggataaaccg

SEQ ID NO: 98612 - DNA, 21 bp, Artificial sequence
  SiRNA target sequence
ataattttcaggataaaccgc

SEQ ID NO: 98613 - DNA, 21 bp, Artificial sequence
  SiRNA target sequence
taattttcaggataaaccgct

SEQ ID NO: 98614 - DNA, 21 bp, Artificial sequence
  SiRNA target sequence
aattttcaggataaaccgcta

SEQ ID NO: 98615 - DNA, 21 bp, Artificial sequence
  SiRNA target sequence
attttcaggataaaccgctag

SEQ ID NO: 98616 - DNA, 21 bp, Artificial sequence
  SiRNA target sequence
ttttcaggataaaccgctaga

SEQ ID NO: 98617 - DNA, 21 bp, Artificial sequence
  SiRNA target sequence
tttcaggataaaccgctagac

SEQ ID NO: 98618 - DNA, 21 bp, Artificial sequence
  SiRNA target sequence
ttcaggataaaccgctagaca

SEQ ID NO: 98619 - DNA, 21 bp, Artificial sequence
  SiRNA target sequence
tcaggataaaccgctagacaa

SEQ ID NO: 98620 - DNA, 21 bp, Artificial sequence
  SiRNA target sequence
caggataaaccgctagacaat

SEQ ID NO: 98621 - DNA, 21 bp, Artificial sequence
  SiRNA target sequence
aggataaaccgctagacaatc

SEQ ID NO: 98622 - DNA, 21 bp, Artificial sequence
  SiRNA target sequence
ggataaaccgctagacaatca

SEQ ID NO: 98623 - DNA, 21 bp, Artificial sequence
  SiRNA target sequence
gataaaccgctagacaatcac

SEQ ID NO: 98624 - DNA, 21 bp, Artificial sequence
  SiRNA target sequence
ataaaccgctagacaatcacc

SEQ ID NO: 98625 - DNA, 21 bp, Artificial sequence
  SiRNA target sequence
taaaccgctagacaatcaccg

SEQ ID NO: 98626 - DNA, 21 bp, Artificial sequence
  SiRNA target sequence
aaaccgctagacaatcaccga

SEQ ID NO: 98627 - DNA, 21 bp, Artificial sequence
  SiRNA target sequence
aaccgctagacaatcaccgat

SEQ ID NO: 98628 - DNA, 21 bp, Artificial sequence
  SiRNA target sequence
accgctagacaatcaccgatt

SEQ ID NO: 98629 - DNA, 21 bp, Artificial sequence
  SiRNA target sequence
ccgctagacaatcaccgattt

SEQ ID NO: 98630 - DNA, 21 bp, Artificial sequence
  SiRNA target sequence
cgctagacaatcaccgatttc

SEQ ID NO: 98631 - DNA, 21 bp, Artificial sequence
  SiRNA target sequence
gctagacaatcaccgatttca

SEQ ID NO: 98632 - DNA, 21 bp, Artificial sequence
  SiRNA target sequence
ctagacaatcaccgatttcaa

SEQ ID NO: 98633 - DNA, 21 bp, Artificial sequence
  SiRNA target sequence
tagacaatcaccgatttcaaa

SEQ ID NO: 98634 - DNA, 21 bp, Artificial sequence
  SiRNA target sequence
agacaatcaccgatttcaaaa

SEQ ID NO: 98635 - DNA, 21 bp, Artificial sequence
  SiRNA target sequence
gacaatcaccgatttcaaaat

SEQ ID NO: 98636 - DNA, 21 bp, Artificial sequence
  SiRNA target sequence
acaatcaccgatttcaaaatt

SEQ ID NO: 98637 - DNA, 21 bp, Artificial sequence
  SiRNA target sequence
caatcaccgatttcaaaattt

SEQ ID NO: 98638 - DNA, 21 bp, Artificial sequence
  SiRNA target sequence
aatcaccgatttcaaaatttt

SEQ ID NO: 98639 - DNA, 21 bp, Artificial sequence
  SiRNA target sequence
atcaccgatttcaaaattttc

SEQ ID NO: 98640 - DNA, 21 bp, Artificial sequence
  SiRNA target sequence
tcaccgatttcaaaattttct

SEQ ID NO: 98641 - DNA, 21 bp, Artificial sequence
  SiRNA target sequence
caccgatttcaaaattttcta

SEQ ID NO: 98642 - DNA, 21 bp, Artificial sequence
  SiRNA target sequence
accgatttcaaaattttctat

SEQ ID NO: 98643 - DNA, 21 bp, Artificial sequence
  SiRNA target sequence
ccgatttcaaaattttctata

SEQ ID NO: 98644 - DNA, 21 bp, Artificial sequence
  SiRNA target sequence
cgatttcaaaattttctatat

SEQ ID NO: 98645 - DNA, 21 bp, Artificial sequence
  SiRNA target sequence
gatttcaaaattttctatatc

SEQ ID NO: 98646 - DNA, 21 bp, Artificial sequence
  SiRNA target sequence
atttcaaaattttctatatct

SEQ ID NO: 98647 - DNA, 21 bp, Artificial sequence
  SiRNA target sequence
tttcaaaattttctatatcta

SEQ ID NO: 98648 - DNA, 21 bp, Artificial sequence
  SiRNA target sequence
ttcaaaattttctatatctat

SEQ ID NO: 98649 - DNA, 21 bp, Artificial sequence
  SiRNA target sequence
tcaaaattttctatatctata

SEQ ID NO: 98650 - DNA, 21 bp, Artificial sequence
  SiRNA target sequence
caaaattttctatatctatat

SEQ ID NO: 98651 - DNA, 21 bp, Artificial sequence
  SiRNA target sequence
aaaattttctatatctatatc

SEQ ID NO: 98652 - DNA, 21 bp, Artificial sequence
  SiRNA target sequence
aaattttctatatctatatca

SEQ ID NO: 98653 - DNA, 21 bp, Artificial sequence
  SiRNA target sequence
aattttctatatctatatcaa

SEQ ID NO: 98654 - DNA, 21 bp, Artificial sequence
  SiRNA target sequence
attttctatatctatatcaaa

SEQ ID NO: 98655 - DNA, 21 bp, Artificial sequence
  SiRNA target sequence
ttttctatatctatatcaaat

SEQ ID NO: 98656 - DNA, 21 bp, Artificial sequence
  SiRNA target sequence
tttctatatctatatcaaatt

SEQ ID NO: 98657 - DNA, 21 bp, Artificial sequence
  SiRNA target sequence
ttctatatctatatcaaattt

SEQ ID NO: 98658 - DNA, 21 bp, Artificial sequence
  SiRNA target sequence
tctatatctatatcaaatttt

SEQ ID NO: 98659 - DNA, 21 bp, Artificial sequence
  SiRNA target sequence
ctatatctatatcaaatttta

SEQ ID NO: 98660 - DNA, 21 bp, Artificial sequence
  SiRNA target sequence
tatatctatatcaaattttat

SEQ ID NO: 98661 - DNA, 21 bp, Artificial sequence
  SiRNA target sequence
atatctatatcaaattttatt

SEQ ID NO: 98662 - DNA, 21 bp, Artificial sequence
  SiRNA target sequence
tatctatatcaaattttattt

SEQ ID NO: 98663 - DNA, 21 bp, Artificial sequence
  SiRNA target sequence
atctatatcaaattttatttc

SEQ ID NO: 98664 - DNA, 21 bp, Artificial sequence
  SiRNA target sequence
tctatatcaaattttatttct

SEQ ID NO: 98665 - DNA, 21 bp, Artificial sequence
  SiRNA target sequence
ctatatcaaattttatttcta

SEQ ID NO: 98666 - DNA, 21 bp, Artificial sequence
  SiRNA target sequence
tatatcaaattttatttctaa

SEQ ID NO: 98667 - DNA, 21 bp, Artificial sequence
  SiRNA target sequence
atatcaaattttatttctaaa

SEQ ID NO: 98668 - DNA, 21 bp, Artificial sequence
  SiRNA target sequence
tatcaaattttatttctaaaa

SEQ ID NO: 98669 - DNA, 21 bp, Artificial sequence
  SiRNA target sequence
atcaaattttatttctaaaat

SEQ ID NO: 98670 - DNA, 21 bp, Artificial sequence
  SiRNA target sequence
tcaaattttatttctaaaata

SEQ ID NO: 98671 - DNA, 21 bp, Artificial sequence
  SiRNA target sequence
caaattttatttctaaaatag

SEQ ID NO: 98672 - DNA, 21 bp, Artificial sequence
  SiRNA target sequence
aaattttatttctaaaatagg

SEQ ID NO: 98673 - DNA, 21 bp, Artificial sequence
  SiRNA target sequence
aattttatttctaaaatagga

SEQ ID NO: 98674 - DNA, 21 bp, Artificial sequence
  SiRNA target sequence
attttatttctaaaataggat

SEQ ID NO: 98675 - DNA, 21 bp, Artificial sequence
  SiRNA target sequence
ttttatttctaaaataggata

SEQ ID NO: 98676 - DNA, 21 bp, Artificial sequence
  SiRNA target sequence
tttatttctaaaataggataa

SEQ ID NO: 98677 - DNA, 21 bp, Artificial sequence
  SiRNA target sequence
ttatttctaaaataggataaa

SEQ ID NO: 98678 - DNA, 21 bp, Artificial sequence
  SiRNA target sequence
tatttctaaaataggataaat

SEQ ID NO: 98679 - DNA, 21 bp, Artificial sequence
  SiRNA target sequence
atttctaaaataggataaatg

SEQ ID NO: 98680 - DNA, 21 bp, Artificial sequence
  SiRNA target sequence
tttctaaaataggataaatgt

SEQ ID NO: 98681 - DNA, 21 bp, Artificial sequence
  SiRNA target sequence
ttctaaaataggataaatgta

SEQ ID NO: 98682 - DNA, 21 bp, Artificial sequence
  SiRNA target sequence
tctaaaataggataaatgtaa

SEQ ID NO: 98683 - DNA, 21 bp, Artificial sequence
  SiRNA target sequence
ctaaaataggataaatgtaat

SEQ ID NO: 98684 - DNA, 21 bp, Artificial sequence
  SiRNA target sequence
taaaataggataaatgtaatt

SEQ ID NO: 98685 - DNA, 21 bp, Artificial sequence
  SiRNA target sequence
aaaataggataaatgtaattg

SEQ ID NO: 98686 - DNA, 21 bp, Artificial sequence
  SiRNA target sequence
aaataggataaatgtaattgt

SEQ ID NO: 98687 - DNA, 21 bp, Artificial sequence
  SiRNA target sequence
aataggataaatgtaattgta

SEQ ID NO: 98688 - DNA, 21 bp, Artificial sequence
  SiRNA target sequence
ataggataaatgtaattgtaa

SEQ ID NO: 98689 - DNA, 21 bp, Artificial sequence
  SiRNA target sequence
taggataaatgtaattgtaag

SEQ ID NO: 98690 - DNA, 21 bp, Artificial sequence
  SiRNA target sequence
aggataaatgtaattgtaagg

SEQ ID NO: 98691 - DNA, 21 bp, Artificial sequence
  SiRNA target sequence
ggataaatgtaattgtaaggt

SEQ ID NO: 98692 - DNA, 21 bp, Artificial sequence
  SiRNA target sequence
gataaatgtaattgtaaggtg

SEQ ID NO: 98693 - DNA, 21 bp, Artificial sequence
  SiRNA target sequence
ataaatgtaattgtaaggtgt

SEQ ID NO: 98694 - DNA, 21 bp, Artificial sequence
  SiRNA target sequence
taaatgtaattgtaaggtgtt

SEQ ID NO: 98695 - DNA, 21 bp, Artificial sequence
  SiRNA target sequence
aaatgtaattgtaaggtgtta

SEQ ID NO: 98696 - DNA, 21 bp, Artificial sequence
  SiRNA target sequence
aatgtaattgtaaggtgttaa

SEQ ID NO: 98697 - DNA, 21 bp, Artificial sequence
  SiRNA target sequence
atgtaattgtaaggtgttaat

SEQ ID NO: 98698 - DNA, 21 bp, Artificial sequence
  SiRNA target sequence
tgtaattgtaaggtgttaata

SEQ ID NO: 98699 - DNA, 21 bp, Artificial sequence
  SiRNA target sequence
gtaattgtaaggtgttaatat

SEQ ID NO: 98700 - DNA, 21 bp, Artificial sequence
  SiRNA target sequence
taattgtaaggtgttaatatc

SEQ ID NO: 98701 - DNA, 21 bp, Artificial sequence
  SiRNA target sequence
aattgtaaggtgttaatatct

SEQ ID NO: 98702 - DNA, 21 bp, Artificial sequence
  SiRNA target sequence
attgtaaggtgttaatatctt

SEQ ID NO: 98703 - DNA, 21 bp, Artificial sequence
  SiRNA target sequence
ttgtaaggtgttaatatctta

SEQ ID NO: 98704 - DNA, 21 bp, Artificial sequence
  SiRNA target sequence
tgtaaggtgttaatatcttaa

SEQ ID NO: 98705 - DNA, 21 bp, Artificial sequence
  SiRNA target sequence
gtaaggtgttaatatcttaat

SEQ ID NO: 98706 - DNA, 21 bp, Artificial sequence
  SiRNA target sequence
taaggtgttaatatcttaata

SEQ ID NO: 98707 - DNA, 21 bp, Artificial sequence
  SiRNA target sequence
aaggtgttaatatcttaatat

SEQ ID NO: 98708 - DNA, 21 bp, Artificial sequence
  SiRNA target sequence
aggtgttaatatcttaatatc

SEQ ID NO: 98709 - DNA, 21 bp, Artificial sequence
  SiRNA target sequence
ggtgttaatatcttaatatca

SEQ ID NO: 98710 - DNA, 21 bp, Artificial sequence
  SiRNA target sequence
gtgttaatatcttaatatcat

SEQ ID NO: 98711 - DNA, 21 bp, Artificial sequence
  SiRNA target sequence
tgttaatatcttaatatcatt

SEQ ID NO: 98712 - DNA, 21 bp, Artificial sequence
  SiRNA target sequence
gttaatatcttaatatcattt

SEQ ID NO: 98713 - DNA, 21 bp, Artificial sequence
  SiRNA target sequence
ttaatatcttaatatcattta

SEQ ID NO: 98714 - DNA, 21 bp, Artificial sequence
  SiRNA target sequence
taatatcttaatatcatttat

SEQ ID NO: 98715 - DNA, 21 bp, Artificial sequence
  SiRNA target sequence
aatatcttaatatcatttatt

SEQ ID NO: 98716 - DNA, 21 bp, Artificial sequence
  SiRNA target sequence
atatcttaatatcatttattg

SEQ ID NO: 98717 - DNA, 21 bp, Artificial sequence
  SiRNA target sequence
tatcttaatatcatttattga

SEQ ID NO: 98718 - DNA, 21 bp, Artificial sequence
  SiRNA target sequence
atcttaatatcatttattgac

SEQ ID NO: 98719 - DNA, 21 bp, Artificial sequence
  SiRNA target sequence
tcttaatatcatttattgacg

SEQ ID NO: 98720 - DNA, 21 bp, Artificial sequence
  SiRNA target sequence
cttaatatcatttattgacgc

SEQ ID NO: 98721 - DNA, 21 bp, Artificial sequence
  SiRNA target sequence
ttaatatcatttattgacgca

SEQ ID NO: 98722 - DNA, 21 bp, Artificial sequence
  SiRNA target sequence
taatatcatttattgacgcac

SEQ ID NO: 98723 - DNA, 21 bp, Artificial sequence
  SiRNA target sequence
aatatcatttattgacgcact

SEQ ID NO: 98724 - DNA, 21 bp, Artificial sequence
  SiRNA target sequence
atatcatttattgacgcactg

SEQ ID NO: 98725 - DNA, 21 bp, Artificial sequence
  SiRNA target sequence
tatcatttattgacgcactgt

SEQ ID NO: 98726 - DNA, 21 bp, Artificial sequence
  SiRNA target sequence
atcatttattgacgcactgta

SEQ ID NO: 98727 - DNA, 21 bp, Artificial sequence
  SiRNA target sequence
tcatttattgacgcactgtat

SEQ ID NO: 98728 - DNA, 21 bp, Artificial sequence
  SiRNA target sequence
catttattgacgcactgtata

SEQ ID NO: 98729 - DNA, 21 bp, Artificial sequence
  SiRNA target sequence
atttattgacgcactgtataa

SEQ ID NO: 98730 - DNA, 21 bp, Artificial sequence
  SiRNA target sequence
tttattgacgcactgtataaa

SEQ ID NO: 98731 - DNA, 21 bp, Artificial sequence
  SiRNA target sequence
ttattgacgcactgtataaat

SEQ ID NO: 98732 - DNA, 21 bp, Artificial sequence
  SiRNA target sequence
tattgacgcactgtataaatc

SEQ ID NO: 98733 - DNA, 21 bp, Artificial sequence
  SiRNA target sequence
attgacgcactgtataaatca

SEQ ID NO: 98734 - DNA, 21 bp, Artificial sequence
  SiRNA target sequence
ttgacgcactgtataaatcat

SEQ ID NO: 98735 - DNA, 21 bp, Artificial sequence
  SiRNA target sequence
tgacgcactgtataaatcatt

SEQ ID NO: 98736 - DNA, 21 bp, Artificial sequence
  SiRNA target sequence
gacgcactgtataaatcattt

SEQ ID NO: 98737 - DNA, 21 bp, Artificial sequence
  SiRNA target sequence
acgcactgtataaatcatttt

SEQ ID NO: 98738 - DNA, 21 bp, Artificial sequence
  SiRNA target sequence
cgcactgtataaatcattttt

SEQ ID NO: 98739 - DNA, 21 bp, Artificial sequence
  SiRNA target sequence
gcactgtataaatcattttta

SEQ ID NO: 98740 - DNA, 21 bp, Artificial sequence
  SiRNA target sequence
cactgtataaatcatttttac

SEQ ID NO: 98741 - DNA, 21 bp, Artificial sequence
  SiRNA target sequence
actgtataaatcatttttaca

SEQ ID NO: 98742 - DNA, 21 bp, Artificial sequence
  SiRNA target sequence
ctgtataaatcatttttacaa

SEQ ID NO: 98743 - DNA, 21 bp, Artificial sequence
  SiRNA target sequence
tgtataaatcatttttacaac

SEQ ID NO: 98744 - DNA, 21 bp, Artificial sequence
  SiRNA target sequence
gtataaatcatttttacaact

SEQ ID NO: 98745 - DNA, 21 bp, Artificial sequence
  SiRNA target sequence
tataaatcatttttacaactt

SEQ ID NO: 98746 - DNA, 21 bp, Artificial sequence
  SiRNA target sequence
ataaatcatttttacaacttg

SEQ ID NO: 98747 - DNA, 21 bp, Artificial sequence
  SiRNA target sequence
taaatcatttttacaacttgc

SEQ ID NO: 98748 - DNA, 21 bp, Artificial sequence
  SiRNA target sequence
aaatcatttttacaacttgca

SEQ ID NO: 98749 - DNA, 21 bp, Artificial sequence
  SiRNA target sequence
aatcatttttacaacttgcaa

SEQ ID NO: 98750 - DNA, 21 bp, Artificial sequence
  SiRNA target sequence
atcatttttacaacttgcaaa

SEQ ID NO: 98751 - DNA, 21 bp, Artificial sequence
  SiRNA target sequence
tcatttttacaacttgcaaaa

SEQ ID NO: 98752 - DNA, 21 bp, Artificial sequence
  SiRNA target sequence
catttttacaacttgcaaaat

SEQ ID NO: 98753 - DNA, 21 bp, Artificial sequence
  SiRNA target sequence
atttttacaacttgcaaaatt

SEQ ID NO: 98754 - DNA, 21 bp, Artificial sequence
  SiRNA target sequence
tttttacaacttgcaaaattt

SEQ ID NO: 98755 - DNA, 21 bp, Artificial sequence
  SiRNA target sequence
ttttacaacttgcaaaatttt

SEQ ID NO: 98756 - DNA, 21 bp, Artificial sequence
  SiRNA target sequence
tttacaacttgcaaaattttt

SEQ ID NO: 98757 - DNA, 21 bp, Artificial sequence
  SiRNA target sequence
ttacaacttgcaaaattttta

SEQ ID NO: 98758 - DNA, 21 bp, Artificial sequence
  SiRNA target sequence
tacaacttgcaaaatttttag

SEQ ID NO: 98759 - DNA, 21 bp, Artificial sequence
  SiRNA target sequence
acaacttgcaaaatttttagc

SEQ ID NO: 98760 - DNA, 21 bp, Artificial sequence
  SiRNA target sequence
caacttgcaaaatttttagca

SEQ ID NO: 98761 - DNA, 21 bp, Artificial sequence
  SiRNA target sequence
aacttgcaaaatttttagcat

SEQ ID NO: 98762 - DNA, 21 bp, Artificial sequence
  SiRNA target sequence
acttgcaaaatttttagcatt

SEQ ID NO: 98763 - DNA, 21 bp, Artificial sequence
  SiRNA target sequence
cttgcaaaatttttagcattt

SEQ ID NO: 98764 - DNA, 21 bp, Artificial sequence
  SiRNA target sequence
ttgcaaaatttttagcatttt

SEQ ID NO: 98765 - DNA, 21 bp, Artificial sequence
  SiRNA target sequence
tgcaaaatttttagcattttg

SEQ ID NO: 98766 - DNA, 21 bp, Artificial sequence
  SiRNA target sequence
gcaaaatttttagcattttgt

SEQ ID NO: 98767 - DNA, 21 bp, Artificial sequence
  SiRNA target sequence
caaaatttttagcattttgta

SEQ ID NO: 98768 - DNA, 21 bp, Artificial sequence
  SiRNA target sequence
aaaatttttagcattttgtag

SEQ ID NO: 98769 - DNA, 21 bp, Artificial sequence
  SiRNA target sequence
aaatttttagcattttgtagt

SEQ ID NO: 98770 - DNA, 21 bp, Artificial sequence
  SiRNA target sequence
aatttttagcattttgtagtt

SEQ ID NO: 98771 - DNA, 21 bp, Artificial sequence
  SiRNA target sequence
atttttagcattttgtagttt

SEQ ID NO: 98772 - DNA, 21 bp, Artificial sequence
  SiRNA target sequence
tttttagcattttgtagtttg

SEQ ID NO: 98773 - DNA, 21 bp, Artificial sequence
  SiRNA target sequence
ttttagcattttgtagtttgt

SEQ ID NO: 98774 - DNA, 21 bp, Artificial sequence
  SiRNA target sequence
tttagcattttgtagtttgta

SEQ ID NO: 98775 - DNA, 21 bp, Artificial sequence
  SiRNA target sequence
ttagcattttgtagtttgtaa

SEQ ID NO: 98776 - DNA, 21 bp, Artificial sequence
  SiRNA target sequence
tagcattttgtagtttgtaat

SEQ ID NO: 98777 - DNA, 21 bp, Artificial sequence
  SiRNA target sequence
agcattttgtagtttgtaatg

SEQ ID NO: 98778 - DNA, 21 bp, Artificial sequence
  SiRNA target sequence
gcattttgtagtttgtaatgc

SEQ ID NO: 98779 - DNA, 21 bp, Artificial sequence
  SiRNA target sequence
cattttgtagtttgtaatgcg

SEQ ID NO: 98780 - DNA, 21 bp, Artificial sequence
  SiRNA target sequence
attttgtagtttgtaatgcgg

SEQ ID NO: 98781 - DNA, 21 bp, Artificial sequence
  SiRNA target sequence
ttttgtagtttgtaatgcggt

SEQ ID NO: 98782 - DNA, 21 bp, Artificial sequence
  SiRNA target sequence
tttgtagtttgtaatgcggta

SEQ ID NO: 98783 - DNA, 21 bp, Artificial sequence
  SiRNA target sequence
ttgtagtttgtaatgcggtaa

SEQ ID NO: 98784 - DNA, 21 bp, Artificial sequence
  SiRNA target sequence
tgtagtttgtaatgcggtaat

SEQ ID NO: 98785 - DNA, 21 bp, Artificial sequence
  SiRNA target sequence
gtagtttgtaatgcggtaata

SEQ ID NO: 98786 - DNA, 21 bp, Artificial sequence
  SiRNA target sequence
tagtttgtaatgcggtaatat

SEQ ID NO: 98787 - DNA, 21 bp, Artificial sequence
  SiRNA target sequence
agtttgtaatgcggtaatata

SEQ ID NO: 98788 - DNA, 21 bp, Artificial sequence
  SiRNA target sequence
gtttgtaatgcggtaatatat

SEQ ID NO: 98789 - DNA, 21 bp, Artificial sequence
  SiRNA target sequence
tttgtaatgcggtaatatata

SEQ ID NO: 98790 - DNA, 21 bp, Artificial sequence
  SiRNA target sequence
ttgtaatgcggtaatatataa

SEQ ID NO: 98791 - DNA, 21 bp, Artificial sequence
  SiRNA target sequence
tgtaatgcggtaatatataat

SEQ ID NO: 98792 - DNA, 21 bp, Artificial sequence
  SiRNA target sequence
gtaatgcggtaatatataata

SEQ ID NO: 98793 - DNA, 21 bp, Artificial sequence
  SiRNA target sequence
taatgcggtaatatataatat

SEQ ID NO: 98794 - DNA, 21 bp, Artificial sequence
  SiRNA target sequence
aatgcggtaatatataatata

SEQ ID NO: 98795 - DNA, 21 bp, Artificial sequence
  SiRNA target sequence
atgcggtaatatataatatag

SEQ ID NO: 98796 - DNA, 21 bp, Artificial sequence
  SiRNA target sequence
tgcggtaatatataatataga

SEQ ID NO: 98797 - DNA, 21 bp, Artificial sequence
  SiRNA target sequence
gcggtaatatataatatagat

SEQ ID NO: 98798 - DNA, 21 bp, Artificial sequence
  SiRNA target sequence
cggtaatatataatatagatc

SEQ ID NO: 98799 - DNA, 21 bp, Artificial sequence
  SiRNA target sequence
ggtaatatataatatagatct

SEQ ID NO: 98800 - DNA, 21 bp, Artificial sequence
  SiRNA target sequence
gtaatatataatatagatctt

SEQ ID NO: 98801 - DNA, 21 bp, Artificial sequence
  SiRNA target sequence
taatatataatatagatcttt

SEQ ID NO: 98802 - DNA, 21 bp, Artificial sequence
  SiRNA target sequence
aatatataatatagatctttt

SEQ ID NO: 98803 - DNA, 21 bp, Artificial sequence
  SiRNA target sequence
atatataatatagatctttta

SEQ ID NO: 98804 - DNA, 21 bp, Artificial sequence
  SiRNA target sequence
tatataatatagatcttttat

SEQ ID NO: 98805 - DNA, 21 bp, Artificial sequence
  SiRNA target sequence
atataatatagatcttttatc

SEQ ID NO: 98806 - DNA, 21 bp, Artificial sequence
  SiRNA target sequence
tataatatagatcttttatcc

SEQ ID NO: 98807 - DNA, 21 bp, Artificial sequence
  SiRNA target sequence
ataatatagatcttttatcca

SEQ ID NO: 98808 - DNA, 21 bp, Artificial sequence
  SiRNA target sequence
taatatagatcttttatccat

SEQ ID NO: 98809 - DNA, 21 bp, Artificial sequence
  SiRNA target sequence
aatatagatcttttatccatg

SEQ ID NO: 98810 - DNA, 21 bp, Artificial sequence
  SiRNA target sequence
atatagatcttttatccatgt

SEQ ID NO: 98811 - DNA, 21 bp, Artificial sequence
  SiRNA target sequence
tatagatcttttatccatgtc

SEQ ID NO: 98812 - DNA, 21 bp, Artificial sequence
  SiRNA target sequence
atagatcttttatccatgtct

SEQ ID NO: 98813 - DNA, 21 bp, Artificial sequence
  SiRNA target sequence
tagatcttttatccatgtctt

SEQ ID NO: 98814 - DNA, 21 bp, Artificial sequence
  SiRNA target sequence
agatcttttatccatgtctta

SEQ ID NO: 98815 - DNA, 21 bp, Artificial sequence
  SiRNA target sequence
gatcttttatccatgtcttaa

SEQ ID NO: 98816 - DNA, 21 bp, Artificial sequence
  SiRNA target sequence
atcttttatccatgtcttaaa

SEQ ID NO: 98817 - DNA, 21 bp, Artificial sequence
  SiRNA target sequence
tcttttatccatgtcttaaat

SEQ ID NO: 98818 - DNA, 21 bp, Artificial sequence
  SiRNA target sequence
cttttatccatgtcttaaatt

SEQ ID NO: 98819 - DNA, 21 bp, Artificial sequence
  SiRNA target sequence
ttttatccatgtcttaaattc

SEQ ID NO: 98820 - DNA, 21 bp, Artificial sequence
  SiRNA target sequence
tttatccatgtcttaaattcg

SEQ ID NO: 98821 - DNA, 21 bp, Artificial sequence
  SiRNA target sequence
ttatccatgtcttaaattcgc

SEQ ID NO: 98822 - DNA, 21 bp, Artificial sequence
  SiRNA target sequence
tatccatgtcttaaattcgcc

SEQ ID NO: 98823 - DNA, 21 bp, Artificial sequence
  SiRNA target sequence
atccatgtcttaaattcgccc

SEQ ID NO: 98824 - DNA, 21 bp, Artificial sequence
  SiRNA target sequence
tccatgtcttaaattcgccca

SEQ ID NO: 98825 - DNA, 21 bp, Artificial sequence
  SiRNA target sequence
ccatgtcttaaattcgcccat

SEQ ID NO: 98826 - DNA, 21 bp, Artificial sequence
  SiRNA target sequence
catgtcttaaattcgcccata

SEQ ID NO: 98827 - DNA, 21 bp, Artificial sequence
  SiRNA target sequence
atgtcttaaattcgcccataa

SEQ ID NO: 98828 - DNA, 21 bp, Artificial sequence
  SiRNA target sequence
tgtcttaaattcgcccataaa

SEQ ID NO: 98829 - DNA, 21 bp, Artificial sequence
  SiRNA target sequence
gtcttaaattcgcccataaat

SEQ ID NO: 98830 - DNA, 21 bp, Artificial sequence
  SiRNA target sequence
tcttaaattcgcccataaatc

SEQ ID NO: 98831 - DNA, 21 bp, Artificial sequence
  SiRNA target sequence
cttaaattcgcccataaatcc

SEQ ID NO: 98832 - DNA, 21 bp, Artificial sequence
  SiRNA target sequence
ttaaattcgcccataaatcct

SEQ ID NO: 98833 - DNA, 21 bp, Artificial sequence
  SiRNA target sequence
taaattcgcccataaatcctt

SEQ ID NO: 98834 - DNA, 21 bp, Artificial sequence
  SiRNA target sequence
aaattcgcccataaatccttc

SEQ ID NO: 98835 - DNA, 21 bp, Artificial sequence
  SiRNA target sequence
aattcgcccataaatccttct

SEQ ID NO: 98836 - DNA, 21 bp, Artificial sequence
  SiRNA target sequence
attcgcccataaatccttctt

SEQ ID NO: 98837 - DNA, 21 bp, Artificial sequence
  SiRNA target sequence
ttcgcccataaatccttcttt

SEQ ID NO: 98838 - DNA, 21 bp, Artificial sequence
  SiRNA target sequence
tcgcccataaatccttctttg

SEQ ID NO: 98839 - DNA, 21 bp, Artificial sequence
  SiRNA target sequence
cgcccataaatccttctttgt

SEQ ID NO: 98840 - DNA, 21 bp, Artificial sequence
  SiRNA target sequence
gcccataaatccttctttgtc

SEQ ID NO: 98841 - DNA, 21 bp, Artificial sequence
  SiRNA target sequence
cccataaatccttctttgtct

SEQ ID NO: 98842 - DNA, 21 bp, Artificial sequence
  SiRNA target sequence
ccataaatccttctttgtctt

SEQ ID NO: 98843 - DNA, 21 bp, Artificial sequence
  SiRNA target sequence
cataaatccttctttgtcttg

SEQ ID NO: 98844 - DNA, 21 bp, Artificial sequence
  SiRNA target sequence
ataaatccttctttgtcttgg

SEQ ID NO: 98845 - DNA, 21 bp, Artificial sequence
  SiRNA target sequence
taaatccttctttgtcttggc

SEQ ID NO: 98846 - DNA, 21 bp, Artificial sequence
  SiRNA target sequence
aaatccttctttgtcttggct

SEQ ID NO: 98847 - DNA, 21 bp, Artificial sequence
  SiRNA target sequence
aatccttctttgtcttggcta

SEQ ID NO: 98848 - DNA, 21 bp, Artificial sequence
  SiRNA target sequence
atccttctttgtcttggctat

SEQ ID NO: 98849 - DNA, 21 bp, Artificial sequence
  SiRNA target sequence
tccttctttgtcttggctatc

SEQ ID NO: 98850 - DNA, 21 bp, Artificial sequence
  SiRNA target sequence
ccttctttgtcttggctatct

SEQ ID NO: 98851 - DNA, 21 bp, Artificial sequence
  SiRNA target sequence
cttctttgtcttggctatctc

SEQ ID NO: 98852 - DNA, 21 bp, Artificial sequence
  SiRNA target sequence
ttctttgtcttggctatctcc

SEQ ID NO: 98853 - DNA, 21 bp, Artificial sequence
  SiRNA target sequence
tctttgtcttggctatctcca

SEQ ID NO: 98854 - DNA, 21 bp, Artificial sequence
  SiRNA target sequence
ctttgtcttggctatctccat

SEQ ID NO: 98855 - DNA, 21 bp, Artificial sequence
  SiRNA target sequence
tttgtcttggctatctccatt

SEQ ID NO: 98856 - DNA, 21 bp, Artificial sequence
  SiRNA target sequence
ttgtcttggctatctccatta

SEQ ID NO: 98857 - DNA, 21 bp, Artificial sequence
  SiRNA target sequence
tgtcttggctatctccattac

SEQ ID NO: 98858 - DNA, 21 bp, Artificial sequence
  SiRNA target sequence
gtcttggctatctccattacc

SEQ ID NO: 98859 - DNA, 21 bp, Artificial sequence
  SiRNA target sequence
tcttggctatctccattaccc

SEQ ID NO: 98860 - DNA, 21 bp, Artificial sequence
  SiRNA target sequence
cttggctatctccattaccct

SEQ ID NO: 98861 - DNA, 21 bp, Artificial sequence
  SiRNA target sequence
ttggctatctccattaccctt

SEQ ID NO: 98862 - DNA, 21 bp, Artificial sequence
  SiRNA target sequence
tggctatctccattacccttt

SEQ ID NO: 98863 - DNA, 21 bp, Artificial sequence
  SiRNA target sequence
ggctatctccattaccctttc

SEQ ID NO: 98864 - DNA, 21 bp, Artificial sequence
  SiRNA target sequence
gctatctccattaccctttct

SEQ ID NO: 98865 - DNA, 21 bp, Artificial sequence
  SiRNA target sequence
ctatctccattaccctttctt

SEQ ID NO: 98866 - DNA, 21 bp, Artificial sequence
  SiRNA target sequence
tatctccattaccctttctta

SEQ ID NO: 98867 - DNA, 21 bp, Artificial sequence
  SiRNA target sequence
atctccattaccctttcttat

SEQ ID NO: 98868 - DNA, 21 bp, Artificial sequence
  SiRNA target sequence
tctccattaccctttcttatc

SEQ ID NO: 98869 - DNA, 21 bp, Artificial sequence
  SiRNA target sequence
ctccattaccctttcttatca

SEQ ID NO: 98870 - DNA, 21 bp, Artificial sequence
  SiRNA target sequence
tccattaccctttcttatcag

SEQ ID NO: 98871 - DNA, 21 bp, Artificial sequence
  SiRNA target sequence
ccattaccctttcttatcaga

SEQ ID NO: 98872 - DNA, 21 bp, Artificial sequence
  SiRNA target sequence
cattaccctttcttatcagag

SEQ ID NO: 98873 - DNA, 21 bp, Artificial sequence
  SiRNA target sequence
attaccctttcttatcagagg

SEQ ID NO: 98874 - DNA, 21 bp, Artificial sequence
  SiRNA target sequence
ttaccctttcttatcagaggt

SEQ ID NO: 98875 - DNA, 21 bp, Artificial sequence
  SiRNA target sequence
taccctttcttatcagaggtt

SEQ ID NO: 98876 - DNA, 21 bp, Artificial sequence
  SiRNA target sequence
accctttcttatcagaggttt

SEQ ID NO: 98877 - DNA, 21 bp, Artificial sequence
  SiRNA target sequence
ccctttcttatcagaggttta

SEQ ID NO: 98878 - DNA, 21 bp, Artificial sequence
  SiRNA target sequence
cctttcttatcagaggtttag

SEQ ID NO: 98879 - DNA, 21 bp, Artificial sequence
  SiRNA target sequence
ctttcttatcagaggtttagc

SEQ ID NO: 98880 - DNA, 21 bp, Artificial sequence
  SiRNA target sequence
tttcttatcagaggtttagct

SEQ ID NO: 98881 - DNA, 21 bp, Artificial sequence
  SiRNA target sequence
ttcttatcagaggtttagctc

SEQ ID NO: 98882 - DNA, 21 bp, Artificial sequence
  SiRNA target sequence
tcttatcagaggtttagctcc

SEQ ID NO: 98883 - DNA, 21 bp, Artificial sequence
  SiRNA target sequence
cttatcagaggtttagctccg

SEQ ID NO: 98884 - DNA, 21 bp, Artificial sequence
  SiRNA target sequence
ttatcagaggtttagctccgt

SEQ ID NO: 98885 - DNA, 21 bp, Artificial sequence
  SiRNA target sequence
tatcagaggtttagctccgtg

SEQ ID NO: 98886 - DNA, 21 bp, Artificial sequence
  SiRNA target sequence
atcagaggtttagctccgtgt

SEQ ID NO: 98887 - DNA, 21 bp, Artificial sequence
  SiRNA target sequence
tcagaggtttagctccgtgtt

SEQ ID NO: 98888 - DNA, 21 bp, Artificial sequence
  SiRNA target sequence
cagaggtttagctccgtgttt

SEQ ID NO: 98889 - DNA, 21 bp, Artificial sequence
  SiRNA target sequence
agaggtttagctccgtgtttt

SEQ ID NO: 98890 - DNA, 21 bp, Artificial sequence
  SiRNA target sequence
gaggtttagctccgtgtttta

SEQ ID NO: 98891 - DNA, 21 bp, Artificial sequence
  SiRNA target sequence
aggtttagctccgtgttttaa

SEQ ID NO: 98892 - DNA, 21 bp, Artificial sequence
  SiRNA target sequence
ggtttagctccgtgttttaaa

SEQ ID NO: 98893 - DNA, 21 bp, Artificial sequence
  SiRNA target sequence
gtttagctccgtgttttaaaa

SEQ ID NO: 98894 - DNA, 21 bp, Artificial sequence
  SiRNA target sequence
tttagctccgtgttttaaaag

SEQ ID NO: 98895 - DNA, 21 bp, Artificial sequence
  SiRNA target sequence
ttagctccgtgttttaaaagg

SEQ ID NO: 98896 - DNA, 21 bp, Artificial sequence
  SiRNA target sequence
tagctccgtgttttaaaaggc

SEQ ID NO: 98897 - DNA, 21 bp, Artificial sequence
  SiRNA target sequence
agctccgtgttttaaaaggca

SEQ ID NO: 98898 - DNA, 21 bp, Artificial sequence
  SiRNA target sequence
gctccgtgttttaaaaggcaa

SEQ ID NO: 98899 - DNA, 21 bp, Artificial sequence
  SiRNA target sequence
ctccgtgttttaaaaggcaat

SEQ ID NO: 98900 - DNA, 21 bp, Artificial sequence
  SiRNA target sequence
tccgtgttttaaaaggcaatt

SEQ ID NO: 98901 - DNA, 21 bp, Artificial sequence
  SiRNA target sequence
ccgtgttttaaaaggcaatta

SEQ ID NO: 98902 - DNA, 21 bp, Artificial sequence
  SiRNA target sequence
cgtgttttaaaaggcaattat

SEQ ID NO: 98903 - DNA, 21 bp, Artificial sequence
  SiRNA target sequence
gtgttttaaaaggcaattata

SEQ ID NO: 98904 - DNA, 21 bp, Artificial sequence
  SiRNA target sequence
tgttttaaaaggcaattatac

SEQ ID NO: 98905 - DNA, 21 bp, Artificial sequence
  SiRNA target sequence
gttttaaaaggcaattataca

SEQ ID NO: 98906 - DNA, 21 bp, Artificial sequence
  SiRNA target sequence
ttttaaaaggcaattatacaa

SEQ ID NO: 98907 - DNA, 21 bp, Artificial sequence
  SiRNA target sequence
tttaaaaggcaattatacaac

SEQ ID NO: 98908 - DNA, 21 bp, Artificial sequence
  SiRNA target sequence
ttaaaaggcaattatacaact

SEQ ID NO: 98909 - DNA, 21 bp, Artificial sequence
  SiRNA target sequence
taaaaggcaattatacaactt

SEQ ID NO: 98910 - DNA, 21 bp, Artificial sequence
  SiRNA target sequence
aaaaggcaattatacaacttt

SEQ ID NO: 98911 - DNA, 21 bp, Artificial sequence
  SiRNA target sequence
aaaggcaattatacaactttt

SEQ ID NO: 98912 - DNA, 21 bp, Artificial sequence
  SiRNA target sequence
aaggcaattatacaacttttt

SEQ ID NO: 98913 - DNA, 21 bp, Artificial sequence
  SiRNA target sequence
aggcaattatacaacttttta

SEQ ID NO: 98914 - DNA, 21 bp, Artificial sequence
  SiRNA target sequence
ggcaattatacaactttttag

SEQ ID NO: 98915 - DNA, 21 bp, Artificial sequence
  SiRNA target sequence
gcaattatacaactttttaga

SEQ ID NO: 98916 - DNA, 21 bp, Artificial sequence
  SiRNA target sequence
caattatacaactttttagaa

SEQ ID NO: 98917 - DNA, 21 bp, Artificial sequence
  SiRNA target sequence
aattatacaactttttagaac

SEQ ID NO: 98918 - DNA, 21 bp, Artificial sequence
  SiRNA target sequence
attatacaactttttagaaca

SEQ ID NO: 98919 - DNA, 21 bp, Artificial sequence
  SiRNA target sequence
ttatacaactttttagaacaa

SEQ ID NO: 98920 - DNA, 21 bp, Artificial sequence
  SiRNA target sequence
tatacaactttttagaacaaa

SEQ ID NO: 98921 - DNA, 21 bp, Artificial sequence
  SiRNA target sequence
atacaactttttagaacaaaa

SEQ ID NO: 98922 - DNA, 21 bp, Artificial sequence
  SiRNA target sequence
tacaactttttagaacaaaaa

SEQ ID NO: 98923 - DNA, 21 bp, Artificial sequence
  SiRNA target sequence
acaactttttagaacaaaaat

SEQ ID NO: 98924 - DNA, 21 bp, Artificial sequence
  SiRNA target sequence
caactttttagaacaaaaatt

SEQ ID NO: 98925 - DNA, 21 bp, Artificial sequence
  SiRNA target sequence
aactttttagaacaaaaatta

SEQ ID NO: 98926 - DNA, 21 bp, Artificial sequence
  SiRNA target sequence
actttttagaacaaaaattaa

SEQ ID NO: 98927 - DNA, 21 bp, Artificial sequence
  SiRNA target sequence
ctttttagaacaaaaattaaa

SEQ ID NO: 98928 - DNA, 21 bp, Artificial sequence
  SiRNA target sequence
tttttagaacaaaaattaaaa

SEQ ID NO: 98929 - DNA, 21 bp, Artificial sequence
  SiRNA target sequence
ttttagaacaaaaattaaaag

SEQ ID NO: 98930 - DNA, 21 bp, Artificial sequence
  SiRNA target sequence
tttagaacaaaaattaaaaga

SEQ ID NO: 98931 - DNA, 21 bp, Artificial sequence
  SiRNA target sequence
ttagaacaaaaattaaaagat

SEQ ID NO: 98932 - DNA, 21 bp, Artificial sequence
  SiRNA target sequence
tagaacaaaaattaaaagatt

SEQ ID NO: 98933 - DNA, 21 bp, Artificial sequence
  SiRNA target sequence
agaacaaaaattaaaagattt

SEQ ID NO: 98934 - DNA, 21 bp, Artificial sequence
  SiRNA target sequence
gaacaaaaattaaaagattta

SEQ ID NO: 98935 - DNA, 21 bp, Artificial sequence
  SiRNA target sequence
aacaaaaattaaaagatttat

SEQ ID NO: 98936 - DNA, 21 bp, Artificial sequence
  SiRNA target sequence
acaaaaattaaaagatttata

SEQ ID NO: 98937 - DNA, 21 bp, Artificial sequence
  SiRNA target sequence
caaaaattaaaagatttataa

SEQ ID NO: 98938 - DNA, 21 bp, Artificial sequence
  SiRNA target sequence
aaaaattaaaagatttataag

SEQ ID NO: 98939 - DNA, 21 bp, Artificial sequence
  SiRNA target sequence
aaaattaaaagatttataaga

SEQ ID NO: 98940 - DNA, 21 bp, Artificial sequence
  SiRNA target sequence
aaattaaaagatttataagac

SEQ ID NO: 98941 - DNA, 21 bp, Artificial sequence
  SiRNA target sequence
aattaaaagatttataagacg

SEQ ID NO: 98942 - DNA, 21 bp, Artificial sequence
  SiRNA target sequence
attaaaagatttataagacga

SEQ ID NO: 98943 - DNA, 21 bp, Artificial sequence
  SiRNA target sequence
ttaaaagatttataagacgaa

SEQ ID NO: 98944 - DNA, 21 bp, Artificial sequence
  SiRNA target sequence
taaaagatttataagacgaat

SEQ ID NO: 98945 - DNA, 21 bp, Artificial sequence
  SiRNA target sequence
aaaagatttataagacgaatc

SEQ ID NO: 98946 - DNA, 21 bp, Artificial sequence
  SiRNA target sequence
aaagatttataagacgaatcc

SEQ ID NO: 98947 - DNA, 21 bp, Artificial sequence
  SiRNA target sequence
aagatttataagacgaatccc

SEQ ID NO: 98948 - DNA, 21 bp, Artificial sequence
  SiRNA target sequence
agatttataagacgaatcccc

SEQ ID NO: 98949 - DNA, 21 bp, Artificial sequence
  SiRNA target sequence
gatttataagacgaatcccca

SEQ ID NO: 98950 - DNA, 21 bp, Artificial sequence
  SiRNA target sequence
atttataagacgaatccccaa

SEQ ID NO: 98951 - DNA, 21 bp, Artificial sequence
  SiRNA target sequence
tttataagacgaatccccaag

SEQ ID NO: 98952 - DNA, 21 bp, Artificial sequence
  SiRNA target sequence
ttataagacgaatccccaagg

SEQ ID NO: 98953 - DNA, 21 bp, Artificial sequence
  SiRNA target sequence
tataagacgaatccccaaggc

SEQ ID NO: 98954 - DNA, 21 bp, Artificial sequence
  SiRNA target sequence
ataagacgaatccccaaggcc

SEQ ID NO: 98955 - DNA, 21 bp, Artificial sequence
  SiRNA target sequence
taagacgaatccccaaggcca

SEQ ID NO: 98956 - DNA, 21 bp, Artificial sequence
  SiRNA target sequence
aagacgaatccccaaggccaa

SEQ ID NO: 98957 - DNA, 21 bp, Artificial sequence
  SiRNA target sequence
agacgaatccccaaggccaaa

SEQ ID NO: 98958 - DNA, 21 bp, Artificial sequence
  SiRNA target sequence
gacgaatccccaaggccaaat

SEQ ID NO: 98959 - DNA, 21 bp, Artificial sequence
  SiRNA target sequence
acgaatccccaaggccaaata

SEQ ID NO: 98960 - DNA, 21 bp, Artificial sequence
  SiRNA target sequence
cgaatccccaaggccaaatac

SEQ ID NO: 98961 - DNA, 21 bp, Artificial sequence
  SiRNA target sequence
gaatccccaaggccaaataca

SEQ ID NO: 98962 - DNA, 21 bp, Artificial sequence
  SiRNA target sequence
aatccccaaggccaaatacag

SEQ ID NO: 98963 - DNA, 21 bp, Artificial sequence
  SiRNA target sequence
atccccaaggccaaatacagc

SEQ ID NO: 98964 - DNA, 21 bp, Artificial sequence
  SiRNA target sequence
tccccaaggccaaatacagca

SEQ ID NO: 98965 - DNA, 21 bp, Artificial sequence
  SiRNA target sequence
ccccaaggccaaatacagcaa

SEQ ID NO: 98966 - DNA, 21 bp, Artificial sequence
  SiRNA target sequence
cccaaggccaaatacagcaaa

SEQ ID NO: 98967 - DNA, 21 bp, Artificial sequence
  SiRNA target sequence
ccaaggccaaatacagcaaaa

SEQ ID NO: 98968 - DNA, 21 bp, Artificial sequence
  SiRNA target sequence
caaggccaaatacagcaaaat

SEQ ID NO: 98969 - DNA, 21 bp, Artificial sequence
  SiRNA target sequence
aaggccaaatacagcaaaatt

SEQ ID NO: 98970 - DNA, 21 bp, Artificial sequence
  SiRNA target sequence
aggccaaatacagcaaaattt

SEQ ID NO: 98971 - DNA, 21 bp, Artificial sequence
  SiRNA target sequence
ggccaaatacagcaaaattta

SEQ ID NO: 98972 - DNA, 21 bp, Artificial sequence
  SiRNA target sequence
gccaaatacagcaaaatttaa

SEQ ID NO: 98973 - DNA, 21 bp, Artificial sequence
  SiRNA target sequence
ccaaatacagcaaaatttaag

SEQ ID NO: 98974 - DNA, 21 bp, Artificial sequence
  SiRNA target sequence
caaatacagcaaaatttaagt

SEQ ID NO: 98975 - DNA, 21 bp, Artificial sequence
  SiRNA target sequence
aaatacagcaaaatttaagtg

SEQ ID NO: 98976 - DNA, 21 bp, Artificial sequence
  SiRNA target sequence
aatacagcaaaatttaagtgt

SEQ ID NO: 98977 - DNA, 21 bp, Artificial sequence
  SiRNA target sequence
atacagcaaaatttaagtgtt

SEQ ID NO: 98978 - DNA, 21 bp, Artificial sequence
  SiRNA target sequence
tacagcaaaatttaagtgttg

SEQ ID NO: 98979 - DNA, 21 bp, Artificial sequence
  SiRNA target sequence
acagcaaaatttaagtgttgt

SEQ ID NO: 98980 - DNA, 21 bp, Artificial sequence
  SiRNA target sequence
cagcaaaatttaagtgttgta

SEQ ID NO: 98981 - DNA, 21 bp, Artificial sequence
  SiRNA target sequence
agcaaaatttaagtgttgtaa

SEQ ID NO: 98982 - DNA, 21 bp, Artificial sequence
  SiRNA target sequence
gcaaaatttaagtgttgtaaa

SEQ ID NO: 98983 - DNA, 21 bp, Artificial sequence
  SiRNA target sequence
caaaatttaagtgttgtaaaa

SEQ ID NO: 98984 - DNA, 21 bp, Artificial sequence
  SiRNA target sequence
aaaatttaagtgttgtaaaaa

SEQ ID NO: 98985 - DNA, 21 bp, Artificial sequence
  SiRNA target sequence
aaatttaagtgttgtaaaaaa

SEQ ID NO: 98986 - DNA, 21 bp, Artificial sequence
  SiRNA target sequence
aatttaagtgttgtaaaaaat

SEQ ID NO: 98987 - DNA, 21 bp, Artificial sequence
  SiRNA target sequence
atttaagtgttgtaaaaaatt

SEQ ID NO: 98988 - DNA, 21 bp, Artificial sequence
  SiRNA target sequence
tttaagtgttgtaaaaaattt

SEQ ID NO: 98989 - DNA, 21 bp, Artificial sequence
  SiRNA target sequence
ttaagtgttgtaaaaaatttg

SEQ ID NO: 98990 - DNA, 21 bp, Artificial sequence
  SiRNA target sequence
taagtgttgtaaaaaatttgt

SEQ ID NO: 98991 - DNA, 21 bp, Artificial sequence
  SiRNA target sequence
aagtgttgtaaaaaatttgta

SEQ ID NO: 98992 - DNA, 21 bp, Artificial sequence
  SiRNA target sequence
agtgttgtaaaaaatttgtag

SEQ ID NO: 98993 - DNA, 21 bp, Artificial sequence
  SiRNA target sequence
gtgttgtaaaaaatttgtagg

SEQ ID NO: 98994 - DNA, 21 bp, Artificial sequence
  SiRNA target sequence
tgttgtaaaaaatttgtaggc

SEQ ID NO: 98995 - DNA, 21 bp, Artificial sequence
  SiRNA target sequence
gttgtaaaaaatttgtaggca

SEQ ID NO: 98996 - DNA, 21 bp, Artificial sequence
  SiRNA target sequence
ttgtaaaaaatttgtaggcag

SEQ ID NO: 98997 - DNA, 21 bp, Artificial sequence
  SiRNA target sequence
tgtaaaaaatttgtaggcaga

SEQ ID NO: 98998 - DNA, 21 bp, Artificial sequence
  SiRNA target sequence
gtaaaaaatttgtaggcagat

SEQ ID NO: 98999 - DNA, 21 bp, Artificial sequence
  SiRNA target sequence
taaaaaatttgtaggcagatt

SEQ ID NO: 99000 - DNA, 21 bp, Artificial sequence
  SiRNA target sequence
aaaaaatttgtaggcagattt

SEQ ID NO: 99001 - DNA, 21 bp, Artificial sequence
  SiRNA target sequence
aaaaatttgtaggcagatttt

SEQ ID NO: 99002 - DNA, 21 bp, Artificial sequence
  SiRNA target sequence
aaaatttgtaggcagattttt

SEQ ID NO: 99003 - DNA, 21 bp, Artificial sequence
  SiRNA target sequence
aaatttgtaggcagatttttt

SEQ ID NO: 99004 - DNA, 21 bp, Artificial sequence
  SiRNA target sequence
aatttgtaggcagattttttt

SEQ ID NO: 99005 - DNA, 21 bp, Artificial sequence
  SiRNA target sequence
atttgtaggcagatttttttt

SEQ ID NO: 99006 - DNA, 21 bp, Artificial sequence
  SiRNA target sequence
tttgtaggcagattttttttg

SEQ ID NO: 99007 - DNA, 21 bp, Artificial sequence
  SiRNA target sequence
ttgtaggcagattttttttgc

SEQ ID NO: 99008 - DNA, 21 bp, Artificial sequence
  SiRNA target sequence
tgtaggcagattttttttgcg

SEQ ID NO: 99009 - DNA, 21 bp, Artificial sequence
  SiRNA target sequence
gtaggcagattttttttgcgc

SEQ ID NO: 99010 - DNA, 21 bp, Artificial sequence
  SiRNA target sequence
taggcagattttttttgcgca

SEQ ID NO: 99011 - DNA, 21 bp, Artificial sequence
  SiRNA target sequence
aggcagattttttttgcgcaa

SEQ ID NO: 99012 - DNA, 21 bp, Artificial sequence
  SiRNA target sequence
ggcagattttttttgcgcaaa

SEQ ID NO: 99013 - DNA, 21 bp, Artificial sequence
  SiRNA target sequence
gcagattttttttgcgcaaaa

SEQ ID NO: 99014 - DNA, 21 bp, Artificial sequence
  SiRNA target sequence
cagattttttttgcgcaaaaa

SEQ ID NO: 99015 - DNA, 21 bp, Artificial sequence
  SiRNA target sequence
agattttttttgcgcaaaaat

SEQ ID NO: 99016 - DNA, 21 bp, Artificial sequence
  SiRNA target sequence
gattttttttgcgcaaaaatt

SEQ ID NO: 99017 - DNA, 21 bp, Artificial sequence
  SiRNA target sequence
attttttttgcgcaaaaattt

SEQ ID NO: 99018 - DNA, 21 bp, Artificial sequence
  SiRNA target sequence
ttttttttgcgcaaaaatttc

SEQ ID NO: 99019 - DNA, 21 bp, Artificial sequence
  SiRNA target sequence
tttttttgcgcaaaaatttcc

SEQ ID NO: 99020 - DNA, 21 bp, Artificial sequence
  SiRNA target sequence
ttttttgcgcaaaaatttcca

SEQ ID NO: 99021 - DNA, 21 bp, Artificial sequence
  SiRNA target sequence
tttttgcgcaaaaatttccaa

SEQ ID NO: 99022 - DNA, 21 bp, Artificial sequence
  SiRNA target sequence
ttttgcgcaaaaatttccaaa

SEQ ID NO: 99023 - DNA, 21 bp, Artificial sequence
  SiRNA target sequence
tttgcgcaaaaatttccaaaa

SEQ ID NO: 99024 - DNA, 21 bp, Artificial sequence
  SiRNA target sequence
ttgcgcaaaaatttccaaaat

SEQ ID NO: 99025 - DNA, 21 bp, Artificial sequence
  SiRNA target sequence
tgcgcaaaaatttccaaaatt

SEQ ID NO: 99026 - DNA, 21 bp, Artificial sequence
  SiRNA target sequence
gcgcaaaaatttccaaaattt

SEQ ID NO: 99027 - DNA, 21 bp, Artificial sequence
  SiRNA target sequence
cgcaaaaatttccaaaattta

SEQ ID NO: 99028 - DNA, 21 bp, Artificial sequence
  SiRNA target sequence
gcaaaaatttccaaaatttag

SEQ ID NO: 99029 - DNA, 21 bp, Artificial sequence
  SiRNA target sequence
caaaaatttccaaaatttagt

SEQ ID NO: 99030 - DNA, 21 bp, Artificial sequence
  SiRNA target sequence
aaaaatttccaaaatttagtc

SEQ ID NO: 99031 - DNA, 21 bp, Artificial sequence
  SiRNA target sequence
aaaatttccaaaatttagtca

SEQ ID NO: 99032 - DNA, 21 bp, Artificial sequence
  SiRNA target sequence
aaatttccaaaatttagtcat

SEQ ID NO: 99033 - DNA, 21 bp, Artificial sequence
  SiRNA target sequence
aatttccaaaatttagtcatg

SEQ ID NO: 99034 - DNA, 21 bp, Artificial sequence
  SiRNA target sequence
atttccaaaatttagtcatgt

SEQ ID NO: 99035 - DNA, 21 bp, Artificial sequence
  SiRNA target sequence
tttccaaaatttagtcatgtt

SEQ ID NO: 99036 - DNA, 21 bp, Artificial sequence
  SiRNA target sequence
ttccaaaatttagtcatgtta

SEQ ID NO: 99037 - DNA, 21 bp, Artificial sequence
  SiRNA target sequence
tccaaaatttagtcatgttaa

SEQ ID NO: 99038 - DNA, 21 bp, Artificial sequence
  SiRNA target sequence
ccaaaatttagtcatgttaaa

SEQ ID NO: 99039 - DNA, 21 bp, Artificial sequence
  SiRNA target sequence
caaaatttagtcatgttaaaa

SEQ ID NO: 99040 - DNA, 21 bp, Artificial sequence
  SiRNA target sequence
aaaatttagtcatgttaaaag

SEQ ID NO: 99041 - DNA, 21 bp, Artificial sequence
  SiRNA target sequence
aaatttagtcatgttaaaagg

SEQ ID NO: 99042 - DNA, 21 bp, Artificial sequence
  SiRNA target sequence
aatttagtcatgttaaaaggt

SEQ ID NO: 99043 - DNA, 21 bp, Artificial sequence
  SiRNA target sequence
atttagtcatgttaaaaggtt

SEQ ID NO: 99044 - DNA, 21 bp, Artificial sequence
  SiRNA target sequence
tttagtcatgttaaaaggttc

SEQ ID NO: 99045 - DNA, 21 bp, Artificial sequence
  SiRNA target sequence
ttagtcatgttaaaaggttca

SEQ ID NO: 99046 - DNA, 21 bp, Artificial sequence
  SiRNA target sequence
tagtcatgttaaaaggttcag

SEQ ID NO: 99047 - DNA, 21 bp, Artificial sequence
  SiRNA target sequence
agtcatgttaaaaggttcaga

SEQ ID NO: 99048 - DNA, 21 bp, Artificial sequence
  SiRNA target sequence
gtcatgttaaaaggttcagaa

SEQ ID NO: 99049 - DNA, 21 bp, Artificial sequence
  SiRNA target sequence
tcatgttaaaaggttcagaac

SEQ ID NO: 99050 - DNA, 21 bp, Artificial sequence
  SiRNA target sequence
catgttaaaaggttcagaacc

SEQ ID NO: 99051 - DNA, 21 bp, Artificial sequence
  SiRNA target sequence
atgttaaaaggttcagaacca

SEQ ID NO: 99052 - DNA, 21 bp, Artificial sequence
  SiRNA target sequence
tgttaaaaggttcagaaccat

SEQ ID NO: 99053 - DNA, 21 bp, Artificial sequence
  SiRNA target sequence
gttaaaaggttcagaaccatt

SEQ ID NO: 99054 - DNA, 21 bp, Artificial sequence
  SiRNA target sequence
ttaaaaggttcagaaccattc

SEQ ID NO: 99055 - DNA, 21 bp, Artificial sequence
  SiRNA target sequence
taaaaggttcagaaccattcc

SEQ ID NO: 99056 - DNA, 21 bp, Artificial sequence
  SiRNA target sequence
aaaaggttcagaaccattccc

SEQ ID NO: 99057 - DNA, 21 bp, Artificial sequence
  SiRNA target sequence
aaaggttcagaaccattccca

SEQ ID NO: 99058 - DNA, 21 bp, Artificial sequence
  SiRNA target sequence
aaggttcagaaccattcccat

SEQ ID NO: 99059 - DNA, 21 bp, Artificial sequence
  SiRNA target sequence
aggttcagaaccattcccatg

SEQ ID NO: 99060 - DNA, 21 bp, Artificial sequence
  SiRNA target sequence
ggttcagaaccattcccatga

SEQ ID NO: 99061 - DNA, 21 bp, Artificial sequence
  SiRNA target sequence
gttcagaaccattcccatgag

SEQ ID NO: 99062 - DNA, 21 bp, Artificial sequence
  SiRNA target sequence
ttcagaaccattcccatgagt

SEQ ID NO: 99063 - DNA, 21 bp, Artificial sequence
  SiRNA target sequence
tcagaaccattcccatgagtc

SEQ ID NO: 99064 - DNA, 21 bp, Artificial sequence
  SiRNA target sequence
cagaaccattcccatgagtcg

SEQ ID NO: 99065 - DNA, 21 bp, Artificial sequence
  SiRNA target sequence
agaaccattcccatgagtcga

SEQ ID NO: 99066 - DNA, 21 bp, Artificial sequence
  SiRNA target sequence
gaaccattcccatgagtcgaa

SEQ ID NO: 99067 - DNA, 21 bp, Artificial sequence
  SiRNA target sequence
aaccattcccatgagtcgaac

SEQ ID NO: 99068 - DNA, 21 bp, Artificial sequence
  SiRNA target sequence
accattcccatgagtcgaaca

SEQ ID NO: 99069 - DNA, 21 bp, Artificial sequence
  SiRNA target sequence
ccattcccatgagtcgaacat

SEQ ID NO: 99070 - DNA, 21 bp, Artificial sequence
  SiRNA target sequence
cattcccatgagtcgaacata

SEQ ID NO: 99071 - DNA, 21 bp, Artificial sequence
  SiRNA target sequence
attcccatgagtcgaacatac

SEQ ID NO: 99072 - DNA, 21 bp, Artificial sequence
  SiRNA target sequence
ttcccatgagtcgaacataca

SEQ ID NO: 99073 - DNA, 21 bp, Artificial sequence
  SiRNA target sequence
tcccatgagtcgaacatacaa

SEQ ID NO: 99074 - DNA, 21 bp, Artificial sequence
  SiRNA target sequence
cccatgagtcgaacatacaaa

SEQ ID NO: 99075 - DNA, 21 bp, Artificial sequence
  SiRNA target sequence
ccatgagtcgaacatacaaat

SEQ ID NO: 99076 - DNA, 21 bp, Artificial sequence
  SiRNA target sequence
catgagtcgaacatacaaata

SEQ ID NO: 99077 - DNA, 21 bp, Artificial sequence
  SiRNA target sequence
atgagtcgaacatacaaatat

SEQ ID NO: 99078 - DNA, 21 bp, Artificial sequence
  SiRNA target sequence
tgagtcgaacatacaaatata

SEQ ID NO: 99079 - DNA, 21 bp, Artificial sequence
  SiRNA target sequence
gagtcgaacatacaaatataa

SEQ ID NO: 99080 - DNA, 21 bp, Artificial sequence
  SiRNA target sequence
agtcgaacatacaaatataat

SEQ ID NO: 99081 - DNA, 21 bp, Artificial sequence
  SiRNA target sequence
gtcgaacatacaaatataatc

SEQ ID NO: 99082 - DNA, 21 bp, Artificial sequence
  SiRNA target sequence
tcgaacatacaaatataatca

SEQ ID NO: 99083 - DNA, 21 bp, Artificial sequence
  SiRNA target sequence
cgaacatacaaatataatcat

SEQ ID NO: 99084 - DNA, 21 bp, Artificial sequence
  SiRNA target sequence
gaacatacaaatataatcata

SEQ ID NO: 99085 - DNA, 21 bp, Artificial sequence
  SiRNA target sequence
aacatacaaatataatcatat

SEQ ID NO: 99086 - DNA, 21 bp, Artificial sequence
  SiRNA target sequence
acatacaaatataatcatatc

SEQ ID NO: 99087 - DNA, 21 bp, Artificial sequence
  SiRNA target sequence
catacaaatataatcatatca

SEQ ID NO: 99088 - DNA, 21 bp, Artificial sequence
  SiRNA target sequence
atacaaatataatcatatcaa

SEQ ID NO: 99089 - DNA, 21 bp, Artificial sequence
  SiRNA target sequence
tacaaatataatcatatcaat

SEQ ID NO: 99090 - DNA, 21 bp, Artificial sequence
  SiRNA target sequence
acaaatataatcatatcaata

SEQ ID NO: 99091 - DNA, 21 bp, Artificial sequence
  SiRNA target sequence
caaatataatcatatcaatat

SEQ ID NO: 99092 - DNA, 21 bp, Artificial sequence
  SiRNA target sequence
aaatataatcatatcaatatc

SEQ ID NO: 99093 - DNA, 21 bp, Artificial sequence
  SiRNA target sequence
aatataatcatatcaatatct

SEQ ID NO: 99094 - DNA, 21 bp, Artificial sequence
  SiRNA target sequence
atataatcatatcaatatcta

SEQ ID NO: 99095 - DNA, 21 bp, Artificial sequence
  SiRNA target sequence
tataatcatatcaatatctaa

SEQ ID NO: 99096 - DNA, 21 bp, Artificial sequence
  SiRNA target sequence
ataatcatatcaatatctaat

SEQ ID NO: 99097 - DNA, 21 bp, Artificial sequence
  SiRNA target sequence
taatcatatcaatatctaata

SEQ ID NO: 99098 - DNA, 21 bp, Artificial sequence
  SiRNA target sequence
aatcatatcaatatctaatat

SEQ ID NO: 99099 - DNA, 21 bp, Artificial sequence
  SiRNA target sequence
atcatatcaatatctaatatt

SEQ ID NO: 99100 - DNA, 21 bp, Artificial sequence
  SiRNA target sequence
tcatatcaatatctaatattt

SEQ ID NO: 99101 - DNA, 21 bp, Artificial sequence
  SiRNA target sequence
catatcaatatctaatatttt

SEQ ID NO: 99102 - DNA, 21 bp, Artificial sequence
  SiRNA target sequence
atatcaatatctaatattttt

SEQ ID NO: 99103 - DNA, 21 bp, Artificial sequence
  SiRNA target sequence
tatcaatatctaatatttttt

SEQ ID NO: 99104 - DNA, 21 bp, Artificial sequence
  SiRNA target sequence
atcaatatctaatattttttc

SEQ ID NO: 99105 - DNA, 21 bp, Artificial sequence
  SiRNA target sequence
tcaatatctaatattttttcg

SEQ ID NO: 99106 - DNA, 21 bp, Artificial sequence
  SiRNA target sequence
caatatctaatattttttcga

SEQ ID NO: 99107 - DNA, 21 bp, Artificial sequence
  SiRNA target sequence
aatatctaatattttttcgaa

SEQ ID NO: 99108 - DNA, 21 bp, Artificial sequence
  SiRNA target sequence
atatctaatattttttcgaaa

SEQ ID NO: 99109 - DNA, 21 bp, Artificial sequence
  SiRNA target sequence
tatctaatattttttcgaaat

SEQ ID NO: 99110 - DNA, 21 bp, Artificial sequence
  SiRNA target sequence
atctaatattttttcgaaatc

SEQ ID NO: 99111 - DNA, 21 bp, Artificial sequence
  SiRNA target sequence
tctaatattttttcgaaatca

SEQ ID NO: 99112 - DNA, 21 bp, Artificial sequence
  SiRNA target sequence
ctaatattttttcgaaatcaa

SEQ ID NO: 99113 - DNA, 21 bp, Artificial sequence
  SiRNA target sequence
taatattttttcgaaatcaaa

SEQ ID NO: 99114 - DNA, 21 bp, Artificial sequence
  SiRNA target sequence
aatattttttcgaaatcaaaa

SEQ ID NO: 99115 - DNA, 21 bp, Artificial sequence
  SiRNA target sequence
atattttttcgaaatcaaaac

SEQ ID NO: 99116 - DNA, 21 bp, Artificial sequence
  SiRNA target sequence
tattttttcgaaatcaaaact

SEQ ID NO: 99117 - DNA, 21 bp, Artificial sequence
  SiRNA target sequence
attttttcgaaatcaaaactg

SEQ ID NO: 99118 - DNA, 21 bp, Artificial sequence
  SiRNA target sequence
ttttttcgaaatcaaaactgt

SEQ ID NO: 99119 - DNA, 21 bp, Artificial sequence
  SiRNA target sequence
tttttcgaaatcaaaactgtc

SEQ ID NO: 99120 - DNA, 21 bp, Artificial sequence
  SiRNA target sequence
ttttcgaaatcaaaactgtcc

SEQ ID NO: 99121 - DNA, 21 bp, Artificial sequence
  SiRNA target sequence
tttcgaaatcaaaactgtcca

SEQ ID NO: 99122 - DNA, 21 bp, Artificial sequence
  SiRNA target sequence
ttcgaaatcaaaactgtccat

SEQ ID NO: 99123 - DNA, 21 bp, Artificial sequence
  SiRNA target sequence
tcgaaatcaaaactgtccata

SEQ ID NO: 99124 - DNA, 21 bp, Artificial sequence
  SiRNA target sequence
cgaaatcaaaactgtccatat

SEQ ID NO: 99125 - DNA, 21 bp, Artificial sequence
  SiRNA target sequence
gaaatcaaaactgtccatatc

SEQ ID NO: 99126 - DNA, 21 bp, Artificial sequence
  SiRNA target sequence
aaatcaaaactgtccatatct

SEQ ID NO: 99127 - DNA, 21 bp, Artificial sequence
  SiRNA target sequence
aatcaaaactgtccatatcta

SEQ ID NO: 99128 - DNA, 21 bp, Artificial sequence
  SiRNA target sequence
atcaaaactgtccatatctaa

SEQ ID NO: 99129 - DNA, 21 bp, Artificial sequence
  SiRNA target sequence
tcaaaactgtccatatctaaa

SEQ ID NO: 99130 - DNA, 21 bp, Artificial sequence
  SiRNA target sequence
caaaactgtccatatctaaag

SEQ ID NO: 99131 - DNA, 21 bp, Artificial sequence
  SiRNA target sequence
aaaactgtccatatctaaagt

SEQ ID NO: 99132 - DNA, 21 bp, Artificial sequence
  SiRNA target sequence
aaactgtccatatctaaagta

SEQ ID NO: 99133 - DNA, 21 bp, Artificial sequence
  SiRNA target sequence
aactgtccatatctaaagtaa

SEQ ID NO: 99134 - DNA, 21 bp, Artificial sequence
  SiRNA target sequence
actgtccatatctaaagtaaa

SEQ ID NO: 99135 - DNA, 21 bp, Artificial sequence
  SiRNA target sequence
ctgtccatatctaaagtaaaa

SEQ ID NO: 99136 - DNA, 21 bp, Artificial sequence
  SiRNA target sequence
tgtccatatctaaagtaaaat

SEQ ID NO: 99137 - DNA, 21 bp, Artificial sequence
  SiRNA target sequence
gtccatatctaaagtaaaatc

SEQ ID NO: 99138 - DNA, 21 bp, Artificial sequence
  SiRNA target sequence
tccatatctaaagtaaaatct

SEQ ID NO: 99139 - DNA, 21 bp, Artificial sequence
  SiRNA target sequence
ccatatctaaagtaaaatctg

SEQ ID NO: 99140 - DNA, 21 bp, Artificial sequence
  SiRNA target sequence
catatctaaagtaaaatctgt

SEQ ID NO: 99141 - DNA, 21 bp, Artificial sequence
  SiRNA target sequence
atatctaaagtaaaatctgtt

SEQ ID NO: 99142 - DNA, 21 bp, Artificial sequence
  SiRNA target sequence
tatctaaagtaaaatctgttg

SEQ ID NO: 99143 - DNA, 21 bp, Artificial sequence
  SiRNA target sequence
atctaaagtaaaatctgttgg

SEQ ID NO: 99144 - DNA, 21 bp, Artificial sequence
  SiRNA target sequence
tctaaagtaaaatctgttgga

SEQ ID NO: 99145 - DNA, 21 bp, Artificial sequence
  SiRNA target sequence
ctaaagtaaaatctgttggaa

SEQ ID NO: 99146 - DNA, 21 bp, Artificial sequence
  SiRNA target sequence
taaagtaaaatctgttggaag

SEQ ID NO: 99147 - DNA, 21 bp, Artificial sequence
  SiRNA target sequence
aaagtaaaatctgttggaagc

SEQ ID NO: 99148 - DNA, 21 bp, Artificial sequence
  SiRNA target sequence
aagtaaaatctgttggaagca

SEQ ID NO: 99149 - DNA, 21 bp, Artificial sequence
  SiRNA target sequence
agtaaaatctgttggaagcaa

SEQ ID NO: 99150 - DNA, 21 bp, Artificial sequence
  SiRNA target sequence
gtaaaatctgttggaagcaat

SEQ ID NO: 99151 - DNA, 21 bp, Artificial sequence
  SiRNA target sequence
taaaatctgttggaagcaatt

SEQ ID NO: 99152 - DNA, 21 bp, Artificial sequence
  SiRNA target sequence
aaaatctgttggaagcaattc

SEQ ID NO: 99153 - DNA, 21 bp, Artificial sequence
  SiRNA target sequence
aaatctgttggaagcaattct

SEQ ID NO: 99154 - DNA, 21 bp, Artificial sequence
  SiRNA target sequence
aatctgttggaagcaattctt

SEQ ID NO: 99155 - DNA, 21 bp, Artificial sequence
  SiRNA target sequence
atctgttggaagcaattcttt

SEQ ID NO: 99156 - DNA, 21 bp, Artificial sequence
  SiRNA target sequence
tctgttggaagcaattcttta

SEQ ID NO: 99157 - DNA, 21 bp, Artificial sequence
  SiRNA target sequence
ctgttggaagcaattctttat

SEQ ID NO: 99158 - DNA, 21 bp, Artificial sequence
  SiRNA target sequence
tgttggaagcaattctttatc

SEQ ID NO: 99159 - DNA, 21 bp, Artificial sequence
  SiRNA target sequence
gttggaagcaattctttatca

SEQ ID NO: 99160 - DNA, 21 bp, Artificial sequence
  SiRNA target sequence
ttggaagcaattctttatcaa

SEQ ID NO: 99161 - DNA, 21 bp, Artificial sequence
  SiRNA target sequence
tggaagcaattctttatcaac

SEQ ID NO: 99162 - DNA, 21 bp, Artificial sequence
  SiRNA target sequence
ggaagcaattctttatcaacg

SEQ ID NO: 99163 - DNA, 21 bp, Artificial sequence
  SiRNA target sequence
gaagcaattctttatcaacgt

SEQ ID NO: 99164 - DNA, 21 bp, Artificial sequence
  SiRNA target sequence
aagcaattctttatcaacgtt

SEQ ID NO: 99165 - DNA, 21 bp, Artificial sequence
  SiRNA target sequence
agcaattctttatcaacgtta

SEQ ID NO: 99166 - DNA, 21 bp, Artificial sequence
  SiRNA target sequence
gcaattctttatcaacgttat

SEQ ID NO: 99167 - DNA, 21 bp, Artificial sequence
  SiRNA target sequence
caattctttatcaacgttata

SEQ ID NO: 99168 - DNA, 21 bp, Artificial sequence
  SiRNA target sequence
aattctttatcaacgttataa

SEQ ID NO: 99169 - DNA, 21 bp, Artificial sequence
  SiRNA target sequence
attctttatcaacgttataaa

SEQ ID NO: 99170 - DNA, 21 bp, Artificial sequence
  SiRNA target sequence
ttctttatcaacgttataaat

SEQ ID NO: 99171 - DNA, 21 bp, Artificial sequence
  SiRNA target sequence
tctttatcaacgttataaatc

SEQ ID NO: 99172 - DNA, 21 bp, Artificial sequence
  SiRNA target sequence
ctttatcaacgttataaatca

SEQ ID NO: 99173 - DNA, 21 bp, Artificial sequence
  SiRNA target sequence
tttatcaacgttataaatcaa

SEQ ID NO: 99174 - DNA, 21 bp, Artificial sequence
  SiRNA target sequence
ttatcaacgttataaatcaaa

SEQ ID NO: 99175 - DNA, 21 bp, Artificial sequence
  SiRNA target sequence
tatcaacgttataaatcaaat

SEQ ID NO: 99176 - DNA, 21 bp, Artificial sequence
  SiRNA target sequence
atcaacgttataaatcaaatc

SEQ ID NO: 99177 - DNA, 21 bp, Artificial sequence
  SiRNA target sequence
tcaacgttataaatcaaatct

SEQ ID NO: 99178 - DNA, 21 bp, Artificial sequence
  SiRNA target sequence
caacgttataaatcaaatctt

SEQ ID NO: 99179 - DNA, 21 bp, Artificial sequence
  SiRNA target sequence
aacgttataaatcaaatcttt

SEQ ID NO: 99180 - DNA, 21 bp, Artificial sequence
  SiRNA target sequence
acgttataaatcaaatcttta

SEQ ID NO: 99181 - DNA, 21 bp, Artificial sequence
  SiRNA target sequence
cgttataaatcaaatctttat

SEQ ID NO: 99182 - DNA, 21 bp, Artificial sequence
  SiRNA target sequence
gttataaatcaaatctttatt

SEQ ID NO: 99183 - DNA, 21 bp, Artificial sequence
  SiRNA target sequence
ttataaatcaaatctttattg

SEQ ID NO: 99184 - DNA, 21 bp, Artificial sequence
  SiRNA target sequence
tataaatcaaatctttattgt

SEQ ID NO: 99185 - DNA, 21 bp, Artificial sequence
  SiRNA target sequence
ataaatcaaatctttattgta

SEQ ID NO: 99186 - DNA, 21 bp, Artificial sequence
  SiRNA target sequence
taaatcaaatctttattgtat

SEQ ID NO: 99187 - DNA, 21 bp, Artificial sequence
  SiRNA target sequence
aaatcaaatctttattgtatc

SEQ ID NO: 99188 - DNA, 21 bp, Artificial sequence
  SiRNA target sequence
aatcaaatctttattgtatcc

SEQ ID NO: 99189 - DNA, 21 bp, Artificial sequence
  SiRNA target sequence
atcaaatctttattgtatccg

SEQ ID NO: 99190 - DNA, 21 bp, Artificial sequence
  SiRNA target sequence
tcaaatctttattgtatccgt

SEQ ID NO: 99191 - DNA, 21 bp, Artificial sequence
  SiRNA target sequence
caaatctttattgtatccgta

SEQ ID NO: 99192 - DNA, 21 bp, Artificial sequence
  SiRNA target sequence
aaatctttattgtatccgtat

SEQ ID NO: 99193 - DNA, 21 bp, Artificial sequence
  SiRNA target sequence
aatctttattgtatccgtata

SEQ ID NO: 99194 - DNA, 21 bp, Artificial sequence
  SiRNA target sequence
atctttattgtatccgtatag

SEQ ID NO: 99195 - DNA, 21 bp, Artificial sequence
  SiRNA target sequence
tctttattgtatccgtatagt

SEQ ID NO: 99196 - DNA, 21 bp, Artificial sequence
  SiRNA target sequence
ctttattgtatccgtatagta

SEQ ID NO: 99197 - DNA, 21 bp, Artificial sequence
  SiRNA target sequence
tttattgtatccgtatagtat

SEQ ID NO: 99198 - DNA, 21 bp, Artificial sequence
  SiRNA target sequence
ttattgtatccgtatagtata

SEQ ID NO: 99199 - DNA, 21 bp, Artificial sequence
  SiRNA target sequence
tattgtatccgtatagtataa

SEQ ID NO: 99200 - DNA, 21 bp, Artificial sequence
  SiRNA target sequence
attgtatccgtatagtataac

SEQ ID NO: 99201 - DNA, 21 bp, Artificial sequence
  SiRNA target sequence
ttgtatccgtatagtataaca

SEQ ID NO: 99202 - DNA, 21 bp, Artificial sequence
  SiRNA target sequence
tgtatccgtatagtataacat

SEQ ID NO: 99203 - DNA, 21 bp, Artificial sequence
  SiRNA target sequence
gtatccgtatagtataacatt

SEQ ID NO: 99204 - DNA, 21 bp, Artificial sequence
  SiRNA target sequence
tatccgtatagtataacattt

SEQ ID NO: 99205 - DNA, 21 bp, Artificial sequence
  SiRNA target sequence
atccgtatagtataacatttt

SEQ ID NO: 99206 - DNA, 21 bp, Artificial sequence
  SiRNA target sequence
tccgtatagtataacattttg

SEQ ID NO: 99207 - DNA, 21 bp, Artificial sequence
  SiRNA target sequence
ccgtatagtataacattttga

SEQ ID NO: 99208 - DNA, 21 bp, Artificial sequence
  SiRNA target sequence
cgtatagtataacattttgaa

SEQ ID NO: 99209 - DNA, 21 bp, Artificial sequence
  SiRNA target sequence
gtatagtataacattttgaat

SEQ ID NO: 99210 - DNA, 21 bp, Artificial sequence
  SiRNA target sequence
tatagtataacattttgaata

SEQ ID NO: 99211 - DNA, 21 bp, Artificial sequence
  SiRNA target sequence
atagtataacattttgaataa

SEQ ID NO: 99212 - DNA, 21 bp, Artificial sequence
  SiRNA target sequence
tagtataacattttgaataag

SEQ ID NO: 99213 - DNA, 21 bp, Artificial sequence
  SiRNA target sequence
agtataacattttgaataagt

SEQ ID NO: 99214 - DNA, 21 bp, Artificial sequence
  SiRNA target sequence
gtataacattttgaataagtt

SEQ ID NO: 99215 - DNA, 21 bp, Artificial sequence
  SiRNA target sequence
tataacattttgaataagttt

SEQ ID NO: 99216 - DNA, 21 bp, Artificial sequence
  SiRNA target sequence
ataacattttgaataagttta

SEQ ID NO: 99217 - DNA, 21 bp, Artificial sequence
  SiRNA target sequence
taacattttgaataagtttag

SEQ ID NO: 99218 - DNA, 21 bp, Artificial sequence
  SiRNA target sequence
aacattttgaataagtttagc

SEQ ID NO: 99219 - DNA, 21 bp, Artificial sequence
  SiRNA target sequence
acattttgaataagtttagca

SEQ ID NO: 99220 - DNA, 21 bp, Artificial sequence
  SiRNA target sequence
cattttgaataagtttagcaa

SEQ ID NO: 99221 - DNA, 21 bp, Artificial sequence
  SiRNA target sequence
attttgaataagtttagcaat

SEQ ID NO: 99222 - DNA, 21 bp, Artificial sequence
  SiRNA target sequence
ttttgaataagtttagcaata

SEQ ID NO: 99223 - DNA, 21 bp, Artificial sequence
  SiRNA target sequence
tttgaataagtttagcaatat

SEQ ID NO: 99224 - DNA, 21 bp, Artificial sequence
  SiRNA target sequence
ttgaataagtttagcaatatg

SEQ ID NO: 99225 - DNA, 21 bp, Artificial sequence
  SiRNA target sequence
tgaataagtttagcaatatgt

SEQ ID NO: 99226 - DNA, 21 bp, Artificial sequence
  SiRNA target sequence
gaataagtttagcaatatgta

SEQ ID NO: 99227 - DNA, 21 bp, Artificial sequence
  SiRNA target sequence
aataagtttagcaatatgtat

SEQ ID NO: 99228 - DNA, 21 bp, Artificial sequence
  SiRNA target sequence
ataagtttagcaatatgtata

SEQ ID NO: 99229 - DNA, 21 bp, Artificial sequence
  SiRNA target sequence
taagtttagcaatatgtatag

SEQ ID NO: 99230 - DNA, 21 bp, Artificial sequence
  SiRNA target sequence
aagtttagcaatatgtataga

SEQ ID NO: 99231 - DNA, 21 bp, Artificial sequence
  SiRNA target sequence
agtttagcaatatgtatagaa

SEQ ID NO: 99232 - DNA, 21 bp, Artificial sequence
  SiRNA target sequence
gtttagcaatatgtatagaat

SEQ ID NO: 99233 - DNA, 21 bp, Artificial sequence
  SiRNA target sequence
tttagcaatatgtatagaatt

SEQ ID NO: 99234 - DNA, 21 bp, Artificial sequence
  SiRNA target sequence
ttagcaatatgtatagaattt

SEQ ID NO: 99235 - DNA, 21 bp, Artificial sequence
  SiRNA target sequence
tagcaatatgtatagaatttc

SEQ ID NO: 99236 - DNA, 21 bp, Artificial sequence
  SiRNA target sequence
agcaatatgtatagaatttcc

SEQ ID NO: 99237 - DNA, 21 bp, Artificial sequence
  SiRNA target sequence
gcaatatgtatagaatttcct

SEQ ID NO: 99238 - DNA, 21 bp, Artificial sequence
  SiRNA target sequence
caatatgtatagaatttcctg

SEQ ID NO: 99239 - DNA, 21 bp, Artificial sequence
  SiRNA target sequence
aatatgtatagaatttcctgt

SEQ ID NO: 99240 - DNA, 21 bp, Artificial sequence
  SiRNA target sequence
atatgtatagaatttcctgtt

SEQ ID NO: 99241 - DNA, 21 bp, Artificial sequence
  SiRNA target sequence
tatgtatagaatttcctgttt

SEQ ID NO: 99242 - DNA, 21 bp, Artificial sequence
  SiRNA target sequence
atgtatagaatttcctgtttg

SEQ ID NO: 99243 - DNA, 21 bp, Artificial sequence
  SiRNA target sequence
tgtatagaatttcctgtttgg

SEQ ID NO: 99244 - DNA, 21 bp, Artificial sequence
  SiRNA target sequence
gtatagaatttcctgtttggg

SEQ ID NO: 99245 - DNA, 21 bp, Artificial sequence
  SiRNA target sequence
tatagaatttcctgtttggga

SEQ ID NO: 99246 - DNA, 21 bp, Artificial sequence
  SiRNA target sequence
atagaatttcctgtttgggag

SEQ ID NO: 99247 - DNA, 21 bp, Artificial sequence
  SiRNA target sequence
tagaatttcctgtttgggagc

SEQ ID NO: 99248 - DNA, 21 bp, Artificial sequence
  SiRNA target sequence
agaatttcctgtttgggagcc

SEQ ID NO: 99249 - DNA, 21 bp, Artificial sequence
  SiRNA target sequence
gaatttcctgtttgggagcca

SEQ ID NO: 99250 - DNA, 21 bp, Artificial sequence
  SiRNA target sequence
aatttcctgtttgggagccat

SEQ ID NO: 99251 - DNA, 21 bp, Artificial sequence
  SiRNA target sequence
atttcctgtttgggagccata

SEQ ID NO: 99252 - DNA, 21 bp, Artificial sequence
  SiRNA target sequence
tttcctgtttgggagccatat

SEQ ID NO: 99253 - DNA, 21 bp, Artificial sequence
  SiRNA target sequence
ttcctgtttgggagccatata

SEQ ID NO: 99254 - DNA, 21 bp, Artificial sequence
  SiRNA target sequence
tcctgtttgggagccatataa

SEQ ID NO: 99255 - DNA, 21 bp, Artificial sequence
  SiRNA target sequence
cctgtttgggagccatataag

SEQ ID NO: 99256 - DNA, 21 bp, Artificial sequence
  SiRNA target sequence
ctgtttgggagccatataaga

SEQ ID NO: 99257 - DNA, 21 bp, Artificial sequence
  SiRNA target sequence
tgtttgggagccatataagat

SEQ ID NO: 99258 - DNA, 21 bp, Artificial sequence
  SiRNA target sequence
gtttgggagccatataagatt

SEQ ID NO: 99259 - DNA, 21 bp, Artificial sequence
  SiRNA target sequence
tttgggagccatataagatta

SEQ ID NO: 99260 - DNA, 21 bp, Artificial sequence
  SiRNA target sequence
ttgggagccatataagattat

SEQ ID NO: 99261 - DNA, 21 bp, Artificial sequence
  SiRNA target sequence
tgggagccatataagattatc

SEQ ID NO: 99262 - DNA, 21 bp, Artificial sequence
  SiRNA target sequence
gggagccatataagattatca

SEQ ID NO: 99263 - DNA, 21 bp, Artificial sequence
  SiRNA target sequence
ggagccatataagattatcat

SEQ ID NO: 99264 - DNA, 22 bp, Artificial sequence
  SiRNA target sequence
ttaccaagtttctgcctgaaaa

SEQ ID NO: 99265 - DNA, 22 bp, Artificial sequence
  SiRNA target sequence
taccaagtttctgcctgaaaat

SEQ ID NO: 99266 - DNA, 22 bp, Artificial sequence
  SiRNA target sequence
accaagtttctgcctgaaaata

SEQ ID NO: 99267 - DNA, 22 bp, Artificial sequence
  SiRNA target sequence
ccaagtttctgcctgaaaatat

SEQ ID NO: 99268 - DNA, 22 bp, Artificial sequence
  SiRNA target sequence
caagtttctgcctgaaaatata

SEQ ID NO: 99269 - DNA, 22 bp, Artificial sequence
  SiRNA target sequence
aagtttctgcctgaaaatatat

SEQ ID NO: 99270 - DNA, 22 bp, Artificial sequence
  SiRNA target sequence
agtttctgcctgaaaatatatt

SEQ ID NO: 99271 - DNA, 22 bp, Artificial sequence
  SiRNA target sequence
gtttctgcctgaaaatatattt

SEQ ID NO: 99272 - DNA, 22 bp, Artificial sequence
  SiRNA target sequence
tttctgcctgaaaatatatttt

SEQ ID NO: 99273 - DNA, 22 bp, Artificial sequence
  SiRNA target sequence
ttctgcctgaaaatatattttc

SEQ ID NO: 99274 - DNA, 22 bp, Artificial sequence
  SiRNA target sequence
tctgcctgaaaatatattttct

SEQ ID NO: 99275 - DNA, 22 bp, Artificial sequence
  SiRNA target sequence
ctgcctgaaaatatattttctt

SEQ ID NO: 99276 - DNA, 22 bp, Artificial sequence
  SiRNA target sequence
tgcctgaaaatatattttcttt

SEQ ID NO: 99277 - DNA, 22 bp, Artificial sequence
  SiRNA target sequence
gcctgaaaatatattttctttt

SEQ ID NO: 99278 - DNA, 22 bp, Artificial sequence
  SiRNA target sequence
cctgaaaatatattttcttttt

SEQ ID NO: 99279 - DNA, 22 bp, Artificial sequence
  SiRNA target sequence
ctgaaaatatattttcttttta

SEQ ID NO: 99280 - DNA, 22 bp, Artificial sequence
  SiRNA target sequence
tgaaaatatattttctttttat

SEQ ID NO: 99281 - DNA, 22 bp, Artificial sequence
  SiRNA target sequence
gaaaatatattttctttttata

SEQ ID NO: 99282 - DNA, 22 bp, Artificial sequence
  SiRNA target sequence
aaaatatattttctttttataa

SEQ ID NO: 99283 - DNA, 22 bp, Artificial sequence
  SiRNA target sequence
aaatatattttctttttataaa

SEQ ID NO: 99284 - DNA, 22 bp, Artificial sequence
  SiRNA target sequence
aatatattttctttttataaat

SEQ ID NO: 99285 - DNA, 22 bp, Artificial sequence
  SiRNA target sequence
atatattttctttttataaata

SEQ ID NO: 99286 - DNA, 22 bp, Artificial sequence
  SiRNA target sequence
tatattttctttttataaatat

SEQ ID NO: 99287 - DNA, 22 bp, Artificial sequence
  SiRNA target sequence
atattttctttttataaatatc

SEQ ID NO: 99288 - DNA, 22 bp, Artificial sequence
  SiRNA target sequence
tattttctttttataaatatct

SEQ ID NO: 99289 - DNA, 22 bp, Artificial sequence
  SiRNA target sequence
attttctttttataaatatcta

SEQ ID NO: 99290 - DNA, 22 bp, Artificial sequence
  SiRNA target sequence
ttttctttttataaatatctaa

SEQ ID NO: 99291 - DNA, 22 bp, Artificial sequence
  SiRNA target sequence
tttctttttataaatatctaat

SEQ ID NO: 99292 - DNA, 22 bp, Artificial sequence
  SiRNA target sequence
ttctttttataaatatctaata

SEQ ID NO: 99293 - DNA, 22 bp, Artificial sequence
  SiRNA target sequence
tctttttataaatatctaataa

SEQ ID NO: 99294 - DNA, 22 bp, Artificial sequence
  SiRNA target sequence
ctttttataaatatctaataac

SEQ ID NO: 99295 - DNA, 22 bp, Artificial sequence
  SiRNA target sequence
tttttataaatatctaataaca

SEQ ID NO: 99296 - DNA, 22 bp, Artificial sequence
  SiRNA target sequence
ttttataaatatctaataacat

SEQ ID NO: 99297 - DNA, 22 bp, Artificial sequence
  SiRNA target sequence
tttataaatatctaataacatt

SEQ ID NO: 99298 - DNA, 22 bp, Artificial sequence
  SiRNA target sequence
ttataaatatctaataacattt

SEQ ID NO: 99299 - DNA, 22 bp, Artificial sequence
  SiRNA target sequence
tataaatatctaataacatttt

SEQ ID NO: 99300 - DNA, 22 bp, Artificial sequence
  SiRNA target sequence
ataaatatctaataacattttt

SEQ ID NO: 99301 - DNA, 22 bp, Artificial sequence
  SiRNA target sequence
taaatatctaataacatttttt

SEQ ID NO: 99302 - DNA, 22 bp, Artificial sequence
  SiRNA target sequence
aaatatctaataacattttttc

SEQ ID NO: 99303 - DNA, 22 bp, Artificial sequence
  SiRNA target sequence
aatatctaataacattttttca

SEQ ID NO: 99304 - DNA, 22 bp, Artificial sequence
  SiRNA target sequence
atatctaataacattttttcaa

SEQ ID NO: 99305 - DNA, 22 bp, Artificial sequence
  SiRNA target sequence
tatctaataacattttttcaat

SEQ ID NO: 99306 - DNA, 22 bp, Artificial sequence
  SiRNA target sequence
atctaataacattttttcaata

SEQ ID NO: 99307 - DNA, 22 bp, Artificial sequence
  SiRNA target sequence
tctaataacattttttcaataa

SEQ ID NO: 99308 - DNA, 22 bp, Artificial sequence
  SiRNA target sequence
ctaataacattttttcaataat

SEQ ID NO: 99309 - DNA, 22 bp, Artificial sequence
  SiRNA target sequence
taataacattttttcaataata

SEQ ID NO: 99310 - DNA, 22 bp, Artificial sequence
  SiRNA target sequence
aataacattttttcaataatat

SEQ ID NO: 99311 - DNA, 22 bp, Artificial sequence
  SiRNA target sequence
ataacattttttcaataatatt

SEQ ID NO: 99312 - DNA, 22 bp, Artificial sequence
  SiRNA target sequence
taacattttttcaataatatta

SEQ ID NO: 99313 - DNA, 22 bp, Artificial sequence
  SiRNA target sequence
aacattttttcaataatattat

SEQ ID NO: 99314 - DNA, 22 bp, Artificial sequence
  SiRNA target sequence
acattttttcaataatattatt

SEQ ID NO: 99315 - DNA, 22 bp, Artificial sequence
  SiRNA target sequence
cattttttcaataatattatta

SEQ ID NO: 99316 - DNA, 22 bp, Artificial sequence
  SiRNA target sequence
attttttcaataatattattaa

SEQ ID NO: 99317 - DNA, 22 bp, Artificial sequence
  SiRNA target sequence
ttttttcaataatattattaag

SEQ ID NO: 99318 - DNA, 22 bp, Artificial sequence
  SiRNA target sequence
tttttcaataatattattaagt

SEQ ID NO: 99319 - DNA, 22 bp, Artificial sequence
  SiRNA target sequence
ttttcaataatattattaagtc

SEQ ID NO: 99320 - DNA, 22 bp, Artificial sequence
  SiRNA target sequence
tttcaataatattattaagtct

SEQ ID NO: 99321 - DNA, 22 bp, Artificial sequence
  SiRNA target sequence
ttcaataatattattaagtcta

SEQ ID NO: 99322 - DNA, 22 bp, Artificial sequence
  SiRNA target sequence
tcaataatattattaagtctag

SEQ ID NO: 99323 - DNA, 22 bp, Artificial sequence
  SiRNA target sequence
caataatattattaagtctaga

SEQ ID NO: 99324 - DNA, 22 bp, Artificial sequence
  SiRNA target sequence
aataatattattaagtctagaa

SEQ ID NO: 99325 - DNA, 22 bp, Artificial sequence
  SiRNA target sequence
ataatattattaagtctagaat

SEQ ID NO: 99326 - DNA, 22 bp, Artificial sequence
  SiRNA target sequence
taatattattaagtctagaatt

SEQ ID NO: 99327 - DNA, 22 bp, Artificial sequence
  SiRNA target sequence
aatattattaagtctagaattt

SEQ ID NO: 99328 - DNA, 22 bp, Artificial sequence
  SiRNA target sequence
atattattaagtctagaatttc

SEQ ID NO: 99329 - DNA, 22 bp, Artificial sequence
  SiRNA target sequence
tattattaagtctagaatttcc

SEQ ID NO: 99330 - DNA, 22 bp, Artificial sequence
  SiRNA target sequence
attattaagtctagaatttcca

SEQ ID NO: 99331 - DNA, 22 bp, Artificial sequence
  SiRNA target sequence
ttattaagtctagaatttccac

SEQ ID NO: 99332 - DNA, 22 bp, Artificial sequence
  SiRNA target sequence
tattaagtctagaatttccact

SEQ ID NO: 99333 - DNA, 22 bp, Artificial sequence
  SiRNA target sequence
attaagtctagaatttccactt

SEQ ID NO: 99334 - DNA, 22 bp, Artificial sequence
  SiRNA target sequence
ttaagtctagaatttccactta

SEQ ID NO: 99335 - DNA, 22 bp, Artificial sequence
  SiRNA target sequence
taagtctagaatttccacttac

SEQ ID NO: 99336 - DNA, 22 bp, Artificial sequence
  SiRNA target sequence
aagtctagaatttccacttaca

SEQ ID NO: 99337 - DNA, 22 bp, Artificial sequence
  SiRNA target sequence
agtctagaatttccacttacaa

SEQ ID NO: 99338 - DNA, 22 bp, Artificial sequence
  SiRNA target sequence
gtctagaatttccacttacaaa

SEQ ID NO: 99339 - DNA, 22 bp, Artificial sequence
  SiRNA target sequence
tctagaatttccacttacaaat

SEQ ID NO: 99340 - DNA, 22 bp, Artificial sequence
  SiRNA target sequence
ctagaatttccacttacaaata

SEQ ID NO: 99341 - DNA, 22 bp, Artificial sequence
  SiRNA target sequence
tagaatttccacttacaaatat

SEQ ID NO: 99342 - DNA, 22 bp, Artificial sequence
  SiRNA target sequence
agaatttccacttacaaatatt

SEQ ID NO: 99343 - DNA, 22 bp, Artificial sequence
  SiRNA target sequence
gaatttccacttacaaatatta

SEQ ID NO: 99344 - DNA, 22 bp, Artificial sequence
  SiRNA target sequence
aatttccacttacaaatattaa

SEQ ID NO: 99345 - DNA, 22 bp, Artificial sequence
  SiRNA target sequence
atttccacttacaaatattaac

SEQ ID NO: 99346 - DNA, 22 bp, Artificial sequence
  SiRNA target sequence
tttccacttacaaatattaacc

SEQ ID NO: 99347 - DNA, 22 bp, Artificial sequence
  SiRNA target sequence
ttccacttacaaatattaacca

SEQ ID NO: 99348 - DNA, 22 bp, Artificial sequence
  SiRNA target sequence
tccacttacaaatattaaccaa

SEQ ID NO: 99349 - DNA, 22 bp, Artificial sequence
  SiRNA target sequence
ccacttacaaatattaaccaat

SEQ ID NO: 99350 - DNA, 22 bp, Artificial sequence
  SiRNA target sequence
cacttacaaatattaaccaatc

SEQ ID NO: 99351 - DNA, 22 bp, Artificial sequence
  SiRNA target sequence
acttacaaatattaaccaatca

SEQ ID NO: 99352 - DNA, 22 bp, Artificial sequence
  SiRNA target sequence
cttacaaatattaaccaatcat

SEQ ID NO: 99353 - DNA, 22 bp, Artificial sequence
  SiRNA target sequence
ttacaaatattaaccaatcatc

SEQ ID NO: 99354 - DNA, 22 bp, Artificial sequence
  SiRNA target sequence
tacaaatattaaccaatcatca

SEQ ID NO: 99355 - DNA, 22 bp, Artificial sequence
  SiRNA target sequence
acaaatattaaccaatcatcaa

SEQ ID NO: 99356 - DNA, 22 bp, Artificial sequence
  SiRNA target sequence
caaatattaaccaatcatcaat

SEQ ID NO: 99357 - DNA, 22 bp, Artificial sequence
  SiRNA target sequence
aaatattaaccaatcatcaata

SEQ ID NO: 99358 - DNA, 22 bp, Artificial sequence
  SiRNA target sequence
aatattaaccaatcatcaatat

SEQ ID NO: 99359 - DNA, 22 bp, Artificial sequence
  SiRNA target sequence
atattaaccaatcatcaatatt

SEQ ID NO: 99360 - DNA, 22 bp, Artificial sequence
  SiRNA target sequence
tattaaccaatcatcaatattt

SEQ ID NO: 99361 - DNA, 22 bp, Artificial sequence
  SiRNA target sequence
attaaccaatcatcaatatttt

SEQ ID NO: 99362 - DNA, 22 bp, Artificial sequence
  SiRNA target sequence
ttaaccaatcatcaatattttc

SEQ ID NO: 99363 - DNA, 22 bp, Artificial sequence
  SiRNA target sequence
taaccaatcatcaatattttct

SEQ ID NO: 99364 - DNA, 22 bp, Artificial sequence
  SiRNA target sequence
aaccaatcatcaatattttcta

SEQ ID NO: 99365 - DNA, 22 bp, Artificial sequence
  SiRNA target sequence
accaatcatcaatattttctag

SEQ ID NO: 99366 - DNA, 22 bp, Artificial sequence
  SiRNA target sequence
ccaatcatcaatattttctagc

SEQ ID NO: 99367 - DNA, 22 bp, Artificial sequence
  SiRNA target sequence
caatcatcaatattttctagcc

SEQ ID NO: 99368 - DNA, 22 bp, Artificial sequence
  SiRNA target sequence
aatcatcaatattttctagccc

SEQ ID NO: 99369 - DNA, 22 bp, Artificial sequence
  SiRNA target sequence
atcatcaatattttctagccct

SEQ ID NO: 99370 - DNA, 22 bp, Artificial sequence
  SiRNA target sequence
tcatcaatattttctagccctt

SEQ ID NO: 99371 - DNA, 22 bp, Artificial sequence
  SiRNA target sequence
catcaatattttctagcccttt

SEQ ID NO: 99372 - DNA, 22 bp, Artificial sequence
  SiRNA target sequence
atcaatattttctagccctttt

SEQ ID NO: 99373 - DNA, 22 bp, Artificial sequence
  SiRNA target sequence
tcaatattttctagccctttta

SEQ ID NO: 99374 - DNA, 22 bp, Artificial sequence
  SiRNA target sequence
caatattttctagcccttttat

SEQ ID NO: 99375 - DNA, 22 bp, Artificial sequence
  SiRNA target sequence
aatattttctagcccttttata

SEQ ID NO: 99376 - DNA, 22 bp, Artificial sequence
  SiRNA target sequence
atattttctagcccttttatag

SEQ ID NO: 99377 - DNA, 22 bp, Artificial sequence
  SiRNA target sequence
tattttctagcccttttatagt

SEQ ID NO: 99378 - DNA, 22 bp, Artificial sequence
  SiRNA target sequence
attttctagcccttttatagtc

SEQ ID NO: 99379 - DNA, 22 bp, Artificial sequence
  SiRNA target sequence
ttttctagcccttttatagtct

SEQ ID NO: 99380 - DNA, 22 bp, Artificial sequence
  SiRNA target sequence
tttctagcccttttatagtctt

SEQ ID NO: 99381 - DNA, 22 bp, Artificial sequence
  SiRNA target sequence
ttctagcccttttatagtctta

SEQ ID NO: 99382 - DNA, 22 bp, Artificial sequence
  SiRNA target sequence
tctagcccttttatagtcttat

SEQ ID NO: 99383 - DNA, 22 bp, Artificial sequence
  SiRNA target sequence
ctagcccttttatagtcttata

SEQ ID NO: 99384 - DNA, 22 bp, Artificial sequence
  SiRNA target sequence
tagcccttttatagtcttataa

SEQ ID NO: 99385 - DNA, 22 bp, Artificial sequence
  SiRNA target sequence
agcccttttatagtcttataaa

SEQ ID NO: 99386 - DNA, 22 bp, Artificial sequence
  SiRNA target sequence
gcccttttatagtcttataaat

SEQ ID NO: 99387 - DNA, 22 bp, Artificial sequence
  SiRNA target sequence
cccttttatagtcttataaata

SEQ ID NO: 99388 - DNA, 22 bp, Artificial sequence
  SiRNA target sequence
ccttttatagtcttataaatat

SEQ ID NO: 99389 - DNA, 22 bp, Artificial sequence
  SiRNA target sequence
cttttatagtcttataaatatc

SEQ ID NO: 99390 - DNA, 22 bp, Artificial sequence
  SiRNA target sequence
ttttatagtcttataaatatct

SEQ ID NO: 99391 - DNA, 22 bp, Artificial sequence
  SiRNA target sequence
tttatagtcttataaatatctt

SEQ ID NO: 99392 - DNA, 22 bp, Artificial sequence
  SiRNA target sequence
ttatagtcttataaatatcttg

SEQ ID NO: 99393 - DNA, 22 bp, Artificial sequence
  SiRNA target sequence
tatagtcttataaatatcttgt

SEQ ID NO: 99394 - DNA, 22 bp, Artificial sequence
  SiRNA target sequence
atagtcttataaatatcttgta

SEQ ID NO: 99395 - DNA, 22 bp, Artificial sequence
  SiRNA target sequence
tagtcttataaatatcttgtat

SEQ ID NO: 99396 - DNA, 22 bp, Artificial sequence
  SiRNA target sequence
agtcttataaatatcttgtatg

SEQ ID NO: 99397 - DNA, 22 bp, Artificial sequence
  SiRNA target sequence
gtcttataaatatcttgtatgt

SEQ ID NO: 99398 - DNA, 22 bp, Artificial sequence
  SiRNA target sequence
tcttataaatatcttgtatgta

SEQ ID NO: 99399 - DNA, 22 bp, Artificial sequence
  SiRNA target sequence
cttataaatatcttgtatgtat

SEQ ID NO: 99400 - DNA, 22 bp, Artificial sequence
  SiRNA target sequence
ttataaatatcttgtatgtatt

SEQ ID NO: 99401 - DNA, 22 bp, Artificial sequence
  SiRNA target sequence
tataaatatcttgtatgtattt

SEQ ID NO: 99402 - DNA, 22 bp, Artificial sequence
  SiRNA target sequence
ataaatatcttgtatgtattta

SEQ ID NO: 99403 - DNA, 22 bp, Artificial sequence
  SiRNA target sequence
taaatatcttgtatgtatttat

SEQ ID NO: 99404 - DNA, 22 bp, Artificial sequence
  SiRNA target sequence
aaatatcttgtatgtatttatt

SEQ ID NO: 99405 - DNA, 22 bp, Artificial sequence
  SiRNA target sequence
aatatcttgtatgtatttatta

SEQ ID NO: 99406 - DNA, 22 bp, Artificial sequence
  SiRNA target sequence
atatcttgtatgtatttattat

SEQ ID NO: 99407 - DNA, 22 bp, Artificial sequence
  SiRNA target sequence
tatcttgtatgtatttattatc

SEQ ID NO: 99408 - DNA, 22 bp, Artificial sequence
  SiRNA target sequence
atcttgtatgtatttattatct

SEQ ID NO: 99409 - DNA, 22 bp, Artificial sequence
  SiRNA target sequence
tcttgtatgtatttattatctt

SEQ ID NO: 99410 - DNA, 22 bp, Artificial sequence
  SiRNA target sequence
cttgtatgtatttattatcttc

SEQ ID NO: 99411 - DNA, 22 bp, Artificial sequence
  SiRNA target sequence
ttgtatgtatttattatcttcc

SEQ ID NO: 99412 - DNA, 22 bp, Artificial sequence
  SiRNA target sequence
tgtatgtatttattatcttccc

SEQ ID NO: 99413 - DNA, 22 bp, Artificial sequence
  SiRNA target sequence
gtatgtatttattatcttccct

SEQ ID NO: 99414 - DNA, 22 bp, Artificial sequence
  SiRNA target sequence
tatgtatttattatcttccctt

SEQ ID NO: 99415 - DNA, 22 bp, Artificial sequence
  SiRNA target sequence
atgtatttattatcttcccttg

SEQ ID NO: 99416 - DNA, 22 bp, Artificial sequence
  SiRNA target sequence
tgtatttattatcttcccttga

SEQ ID NO: 99417 - DNA, 22 bp, Artificial sequence
  SiRNA target sequence
gtatttattatcttcccttgaa

SEQ ID NO: 99418 - DNA, 22 bp, Artificial sequence
  SiRNA target sequence
tatttattatcttcccttgaaa

SEQ ID NO: 99419 - DNA, 22 bp, Artificial sequence
  SiRNA target sequence
atttattatcttcccttgaaac

SEQ ID NO: 99420 - DNA, 22 bp, Artificial sequence
  SiRNA target sequence
tttattatcttcccttgaaaca

SEQ ID NO: 99421 - DNA, 22 bp, Artificial sequence
  SiRNA target sequence
ttattatcttcccttgaaacag

SEQ ID NO: 99422 - DNA, 22 bp, Artificial sequence
  SiRNA target sequence
tattatcttcccttgaaacagc

SEQ ID NO: 99423 - DNA, 22 bp, Artificial sequence
  SiRNA target sequence
attatcttcccttgaaacagcg

SEQ ID NO: 99424 - DNA, 22 bp, Artificial sequence
  SiRNA target sequence
ttatcttcccttgaaacagcgg

SEQ ID NO: 99425 - DNA, 22 bp, Artificial sequence
  SiRNA target sequence
tatcttcccttgaaacagcggg

SEQ ID NO: 99426 - DNA, 22 bp, Artificial sequence
  SiRNA target sequence
atcttcccttgaaacagcgggg

SEQ ID NO: 99427 - DNA, 22 bp, Artificial sequence
  SiRNA target sequence
tcttcccttgaaacagcggggt

SEQ ID NO: 99428 - DNA, 22 bp, Artificial sequence
  SiRNA target sequence
cttcccttgaaacagcggggta

SEQ ID NO: 99429 - DNA, 22 bp, Artificial sequence
  SiRNA target sequence
ttcccttgaaacagcggggtaa

SEQ ID NO: 99430 - DNA, 22 bp, Artificial sequence
  SiRNA target sequence
tcccttgaaacagcggggtaaa

SEQ ID NO: 99431 - DNA, 22 bp, Artificial sequence
  SiRNA target sequence
cccttgaaacagcggggtaaat

SEQ ID NO: 99432 - DNA, 22 bp, Artificial sequence
  SiRNA target sequence
ccttgaaacagcggggtaaatt

SEQ ID NO: 99433 - DNA, 22 bp, Artificial sequence
  SiRNA target sequence
cttgaaacagcggggtaaattt

SEQ ID NO: 99434 - DNA, 22 bp, Artificial sequence
  SiRNA target sequence
ttgaaacagcggggtaaatttc

SEQ ID NO: 99435 - DNA, 22 bp, Artificial sequence
  SiRNA target sequence
tgaaacagcggggtaaatttca

SEQ ID NO: 99436 - DNA, 22 bp, Artificial sequence
  SiRNA target sequence
gaaacagcggggtaaatttcaa

SEQ ID NO: 99437 - DNA, 22 bp, Artificial sequence
  SiRNA target sequence
aaacagcggggtaaatttcaat

SEQ ID NO: 99438 - DNA, 22 bp, Artificial sequence
  SiRNA target sequence
aacagcggggtaaatttcaatg

SEQ ID NO: 99439 - DNA, 22 bp, Artificial sequence
  SiRNA target sequence
acagcggggtaaatttcaatgc

SEQ ID NO: 99440 - DNA, 22 bp, Artificial sequence
  SiRNA target sequence
cagcggggtaaatttcaatgcc

SEQ ID NO: 99441 - DNA, 22 bp, Artificial sequence
  SiRNA target sequence
agcggggtaaatttcaatgcct

SEQ ID NO: 99442 - DNA, 22 bp, Artificial sequence
  SiRNA target sequence
gcggggtaaatttcaatgcctt

SEQ ID NO: 99443 - DNA, 22 bp, Artificial sequence
  SiRNA target sequence
cggggtaaatttcaatgccttt

SEQ ID NO: 99444 - DNA, 22 bp, Artificial sequence
  SiRNA target sequence
ggggtaaatttcaatgccttta

SEQ ID NO: 99445 - DNA, 22 bp, Artificial sequence
  SiRNA target sequence
gggtaaatttcaatgcctttat

SEQ ID NO: 99446 - DNA, 22 bp, Artificial sequence
  SiRNA target sequence
ggtaaatttcaatgcctttatt

SEQ ID NO: 99447 - DNA, 22 bp, Artificial sequence
  SiRNA target sequence
gtaaatttcaatgcctttattt

SEQ ID NO: 99448 - DNA, 22 bp, Artificial sequence
  SiRNA target sequence
taaatttcaatgcctttatttt

SEQ ID NO: 99449 - DNA, 22 bp, Artificial sequence
  SiRNA target sequence
aaatttcaatgcctttattttc

SEQ ID NO: 99450 - DNA, 22 bp, Artificial sequence
  SiRNA target sequence
aatttcaatgcctttattttca

SEQ ID NO: 99451 - DNA, 22 bp, Artificial sequence
  SiRNA target sequence
atttcaatgcctttattttcaa

SEQ ID NO: 99452 - DNA, 22 bp, Artificial sequence
  SiRNA target sequence
tttcaatgcctttattttcaaa

SEQ ID NO: 99453 - DNA, 22 bp, Artificial sequence
  SiRNA target sequence
ttcaatgcctttattttcaaac

SEQ ID NO: 99454 - DNA, 22 bp, Artificial sequence
  SiRNA target sequence
tcaatgcctttattttcaaact

SEQ ID NO: 99455 - DNA, 22 bp, Artificial sequence
  SiRNA target sequence
caatgcctttattttcaaactc

SEQ ID NO: 99456 - DNA, 22 bp, Artificial sequence
  SiRNA target sequence
aatgcctttattttcaaactct

SEQ ID NO: 99457 - DNA, 22 bp, Artificial sequence
  SiRNA target sequence
atgcctttattttcaaactctt

SEQ ID NO: 99458 - DNA, 22 bp, Artificial sequence
  SiRNA target sequence
tgcctttattttcaaactcttc

SEQ ID NO: 99459 - DNA, 22 bp, Artificial sequence
  SiRNA target sequence
gcctttattttcaaactcttct

SEQ ID NO: 99460 - DNA, 22 bp, Artificial sequence
  SiRNA target sequence
cctttattttcaaactcttctt

SEQ ID NO: 99461 - DNA, 22 bp, Artificial sequence
  SiRNA target sequence
ctttattttcaaactcttcttt

SEQ ID NO: 99462 - DNA, 22 bp, Artificial sequence
  SiRNA target sequence
tttattttcaaactcttcttta

SEQ ID NO: 99463 - DNA, 22 bp, Artificial sequence
  SiRNA target sequence
ttattttcaaactcttctttat

SEQ ID NO: 99464 - DNA, 22 bp, Artificial sequence
  SiRNA target sequence
tattttcaaactcttctttata

SEQ ID NO: 99465 - DNA, 22 bp, Artificial sequence
  SiRNA target sequence
attttcaaactcttctttatat

SEQ ID NO: 99466 - DNA, 22 bp, Artificial sequence
  SiRNA target sequence
ttttcaaactcttctttatata

SEQ ID NO: 99467 - DNA, 22 bp, Artificial sequence
  SiRNA target sequence
tttcaaactcttctttatataa

SEQ ID NO: 99468 - DNA, 22 bp, Artificial sequence
  SiRNA target sequence
ttcaaactcttctttatataaa

SEQ ID NO: 99469 - DNA, 22 bp, Artificial sequence
  SiRNA target sequence
tcaaactcttctttatataaaa

SEQ ID NO: 99470 - DNA, 22 bp, Artificial sequence
  SiRNA target sequence
caaactcttctttatataaaaa

SEQ ID NO: 99471 - DNA, 22 bp, Artificial sequence
  SiRNA target sequence
aaactcttctttatataaaaaa

SEQ ID NO: 99472 - DNA, 22 bp, Artificial sequence
  SiRNA target sequence
aactcttctttatataaaaaat

SEQ ID NO: 99473 - DNA, 22 bp, Artificial sequence
  SiRNA target sequence
actcttctttatataaaaaatc

SEQ ID NO: 99474 - DNA, 22 bp, Artificial sequence
  SiRNA target sequence
ctcttctttatataaaaaatct

SEQ ID NO: 99475 - DNA, 22 bp, Artificial sequence
  SiRNA target sequence
tcttctttatataaaaaatcta

SEQ ID NO: 99476 - DNA, 22 bp, Artificial sequence
  SiRNA target sequence
cttctttatataaaaaatctac

SEQ ID NO: 99477 - DNA, 22 bp, Artificial sequence
  SiRNA target sequence
ttctttatataaaaaatctaca

SEQ ID NO: 99478 - DNA, 22 bp, Artificial sequence
  SiRNA target sequence
tctttatataaaaaatctacat

SEQ ID NO: 99479 - DNA, 22 bp, Artificial sequence
  SiRNA target sequence
ctttatataaaaaatctacatc

SEQ ID NO: 99480 - DNA, 22 bp, Artificial sequence
  SiRNA target sequence
tttatataaaaaatctacatct

SEQ ID NO: 99481 - DNA, 22 bp, Artificial sequence
  SiRNA target sequence
ttatataaaaaatctacatctc

SEQ ID NO: 99482 - DNA, 22 bp, Artificial sequence
  SiRNA target sequence
tatataaaaaatctacatctct

SEQ ID NO: 99483 - DNA, 22 bp, Artificial sequence
  SiRNA target sequence
atataaaaaatctacatctcta

SEQ ID NO: 99484 - DNA, 22 bp, Artificial sequence
  SiRNA target sequence
tataaaaaatctacatctctaa

SEQ ID NO: 99485 - DNA, 22 bp, Artificial sequence
  SiRNA target sequence
ataaaaaatctacatctctaaa

SEQ ID NO: 99486 - DNA, 22 bp, Artificial sequence
  SiRNA target sequence
taaaaaatctacatctctaaat

SEQ ID NO: 99487 - DNA, 22 bp, Artificial sequence
  SiRNA target sequence
aaaaaatctacatctctaaatc

SEQ ID NO: 99488 - DNA, 22 bp, Artificial sequence
  SiRNA target sequence
aaaaatctacatctctaaatct

SEQ ID NO: 99489 - DNA, 22 bp, Artificial sequence
  SiRNA target sequence
aaaatctacatctctaaatcta

SEQ ID NO: 99490 - DNA, 22 bp, Artificial sequence
  SiRNA target sequence
aaatctacatctctaaatctaa

SEQ ID NO: 99491 - DNA, 22 bp, Artificial sequence
  SiRNA target sequence
aatctacatctctaaatctaaa

SEQ ID NO: 99492 - DNA, 22 bp, Artificial sequence
  SiRNA target sequence
atctacatctctaaatctaaaa

SEQ ID NO: 99493 - DNA, 22 bp, Artificial sequence
  SiRNA target sequence
tctacatctctaaatctaaaac

SEQ ID NO: 99494 - DNA, 22 bp, Artificial sequence
  SiRNA target sequence
ctacatctctaaatctaaaacc

SEQ ID NO: 99495 - DNA, 22 bp, Artificial sequence
  SiRNA target sequence
tacatctctaaatctaaaacca

SEQ ID NO: 99496 - DNA, 22 bp, Artificial sequence
  SiRNA target sequence
acatctctaaatctaaaaccat

SEQ ID NO: 99497 - DNA, 22 bp, Artificial sequence
  SiRNA target sequence
catctctaaatctaaaaccata

SEQ ID NO: 99498 - DNA, 22 bp, Artificial sequence
  SiRNA target sequence
atctctaaatctaaaaccatat

SEQ ID NO: 99499 - DNA, 22 bp, Artificial sequence
  SiRNA target sequence
tctctaaatctaaaaccatata

SEQ ID NO: 99500 - DNA, 22 bp, Artificial sequence
  SiRNA target sequence
ctctaaatctaaaaccatataa

SEQ ID NO: 99501 - DNA, 22 bp, Artificial sequence
  SiRNA target sequence
tctaaatctaaaaccatataat

SEQ ID NO: 99502 - DNA, 22 bp, Artificial sequence
  SiRNA target sequence
ctaaatctaaaaccatataata

SEQ ID NO: 99503 - DNA, 22 bp, Artificial sequence
  SiRNA target sequence
taaatctaaaaccatataataa

SEQ ID NO: 99504 - DNA, 22 bp, Artificial sequence
  SiRNA target sequence
aaatctaaaaccatataataaa

SEQ ID NO: 99505 - DNA, 22 bp, Artificial sequence
  SiRNA target sequence
aatctaaaaccatataataaaa

SEQ ID NO: 99506 - DNA, 22 bp, Artificial sequence
  SiRNA target sequence
atctaaaaccatataataaaat

SEQ ID NO: 99507 - DNA, 22 bp, Artificial sequence
  SiRNA target sequence
tctaaaaccatataataaaata

SEQ ID NO: 99508 - DNA, 22 bp, Artificial sequence
  SiRNA target sequence
ctaaaaccatataataaaataa

SEQ ID NO: 99509 - DNA, 22 bp, Artificial sequence
  SiRNA target sequence
taaaaccatataataaaataac

SEQ ID NO: 99510 - DNA, 22 bp, Artificial sequence
  SiRNA target sequence
aaaaccatataataaaataact

SEQ ID NO: 99511 - DNA, 22 bp, Artificial sequence
  SiRNA target sequence
aaaccatataataaaataactt

SEQ ID NO: 99512 - DNA, 22 bp, Artificial sequence
  SiRNA target sequence
aaccatataataaaataacttt

SEQ ID NO: 99513 - DNA, 22 bp, Artificial sequence
  SiRNA target sequence
accatataataaaataactttt

SEQ ID NO: 99514 - DNA, 22 bp, Artificial sequence
  SiRNA target sequence
ccatataataaaataacttttt

SEQ ID NO: 99515 - DNA, 22 bp, Artificial sequence
  SiRNA target sequence
catataataaaataactttttt

SEQ ID NO: 99516 - DNA, 22 bp, Artificial sequence
  SiRNA target sequence
atataataaaataactttttta

SEQ ID NO: 99517 - DNA, 22 bp, Artificial sequence
  SiRNA target sequence
tataataaaataacttttttaa

SEQ ID NO: 99518 - DNA, 22 bp, Artificial sequence
  SiRNA target sequence
ataataaaataacttttttaaa

SEQ ID NO: 99519 - DNA, 22 bp, Artificial sequence
  SiRNA target sequence
taataaaataacttttttaaaa

SEQ ID NO: 99520 - DNA, 22 bp, Artificial sequence
  SiRNA target sequence
aataaaataacttttttaaaaa

SEQ ID NO: 99521 - DNA, 22 bp, Artificial sequence
  SiRNA target sequence
ataaaataacttttttaaaaaa

SEQ ID NO: 99522 - DNA, 22 bp, Artificial sequence
  SiRNA target sequence
taaaataacttttttaaaaaaa

SEQ ID NO: 99523 - DNA, 22 bp, Artificial sequence
  SiRNA target sequence
aaaataacttttttaaaaaaat

SEQ ID NO: 99524 - DNA, 22 bp, Artificial sequence
  SiRNA target sequence
aaataacttttttaaaaaaatt

SEQ ID NO: 99525 - DNA, 22 bp, Artificial sequence
  SiRNA target sequence
aataacttttttaaaaaaattt

SEQ ID NO: 99526 - DNA, 22 bp, Artificial sequence
  SiRNA target sequence
ataacttttttaaaaaaattta

SEQ ID NO: 99527 - DNA, 22 bp, Artificial sequence
  SiRNA target sequence
taacttttttaaaaaaatttaa

SEQ ID NO: 99528 - DNA, 22 bp, Artificial sequence
  SiRNA target sequence
aacttttttaaaaaaatttaaa

SEQ ID NO: 99529 - DNA, 22 bp, Artificial sequence
  SiRNA target sequence
acttttttaaaaaaatttaaat

SEQ ID NO: 99530 - DNA, 22 bp, Artificial sequence
  SiRNA target sequence
cttttttaaaaaaatttaaatc

SEQ ID NO: 99531 - DNA, 22 bp, Artificial sequence
  SiRNA target sequence
ttttttaaaaaaatttaaatca

SEQ ID NO: 99532 - DNA, 22 bp, Artificial sequence
  SiRNA target sequence
tttttaaaaaaatttaaatcag

SEQ ID NO: 99533 - DNA, 22 bp, Artificial sequence
  SiRNA target sequence
ttttaaaaaaatttaaatcaga

SEQ ID NO: 99534 - DNA, 22 bp, Artificial sequence
  SiRNA target sequence
tttaaaaaaatttaaatcagaa

SEQ ID NO: 99535 - DNA, 22 bp, Artificial sequence
  SiRNA target sequence
ttaaaaaaatttaaatcagaat

SEQ ID NO: 99536 - DNA, 22 bp, Artificial sequence
  SiRNA target sequence
taaaaaaatttaaatcagaata

SEQ ID NO: 99537 - DNA, 22 bp, Artificial sequence
  SiRNA target sequence
aaaaaaatttaaatcagaatag

SEQ ID NO: 99538 - DNA, 22 bp, Artificial sequence
  SiRNA target sequence
aaaaaatttaaatcagaatagt

SEQ ID NO: 99539 - DNA, 22 bp, Artificial sequence
  SiRNA target sequence
aaaaatttaaatcagaatagta

SEQ ID NO: 99540 - DNA, 22 bp, Artificial sequence
  SiRNA target sequence
aaaatttaaatcagaatagtaa

SEQ ID NO: 99541 - DNA, 22 bp, Artificial sequence
  SiRNA target sequence
aaatttaaatcagaatagtaat

SEQ ID NO: 99542 - DNA, 22 bp, Artificial sequence
  SiRNA target sequence
aatttaaatcagaatagtaatt

SEQ ID NO: 99543 - DNA, 22 bp, Artificial sequence
  SiRNA target sequence
atttaaatcagaatagtaatta

SEQ ID NO: 99544 - DNA, 22 bp, Artificial sequence
  SiRNA target sequence
tttaaatcagaatagtaattaa

SEQ ID NO: 99545 - DNA, 22 bp, Artificial sequence
  SiRNA target sequence
ttaaatcagaatagtaattaac

SEQ ID NO: 99546 - DNA, 22 bp, Artificial sequence
  SiRNA target sequence
taaatcagaatagtaattaaca

SEQ ID NO: 99547 - DNA, 22 bp, Artificial sequence
  SiRNA target sequence
aaatcagaatagtaattaacaa

SEQ ID NO: 99548 - DNA, 22 bp, Artificial sequence
  SiRNA target sequence
aatcagaatagtaattaacaaa

SEQ ID NO: 99549 - DNA, 22 bp, Artificial sequence
  SiRNA target sequence
atcagaatagtaattaacaaat

SEQ ID NO: 99550 - DNA, 22 bp, Artificial sequence
  SiRNA target sequence
tcagaatagtaattaacaaatg

SEQ ID NO: 99551 - DNA, 22 bp, Artificial sequence
  SiRNA target sequence
cagaatagtaattaacaaatgc

SEQ ID NO: 99552 - DNA, 22 bp, Artificial sequence
  SiRNA target sequence
agaatagtaattaacaaatgcc

SEQ ID NO: 99553 - DNA, 22 bp, Artificial sequence
  SiRNA target sequence
gaatagtaattaacaaatgccc

SEQ ID NO: 99554 - DNA, 22 bp, Artificial sequence
  SiRNA target sequence
aatagtaattaacaaatgccct

SEQ ID NO: 99555 - DNA, 22 bp, Artificial sequence
  SiRNA target sequence
atagtaattaacaaatgccctg

SEQ ID NO: 99556 - DNA, 22 bp, Artificial sequence
  SiRNA target sequence
tagtaattaacaaatgccctgg

SEQ ID NO: 99557 - DNA, 22 bp, Artificial sequence
  SiRNA target sequence
agtaattaacaaatgccctggg

SEQ ID NO: 99558 - DNA, 22 bp, Artificial sequence
  SiRNA target sequence
gtaattaacaaatgccctggga

SEQ ID NO: 99559 - DNA, 22 bp, Artificial sequence
  SiRNA target sequence
taattaacaaatgccctgggaa

SEQ ID NO: 99560 - DNA, 22 bp, Artificial sequence
  SiRNA target sequence
aattaacaaatgccctgggaag

SEQ ID NO: 99561 - DNA, 22 bp, Artificial sequence
  SiRNA target sequence
attaacaaatgccctgggaagt

SEQ ID NO: 99562 - DNA, 22 bp, Artificial sequence
  SiRNA target sequence
ttaacaaatgccctgggaagtg

SEQ ID NO: 99563 - DNA, 22 bp, Artificial sequence
  SiRNA target sequence
taacaaatgccctgggaagtgt

SEQ ID NO: 99564 - DNA, 22 bp, Artificial sequence
  SiRNA target sequence
aacaaatgccctgggaagtgta

SEQ ID NO: 99565 - DNA, 22 bp, Artificial sequence
  SiRNA target sequence
acaaatgccctgggaagtgtaa

SEQ ID NO: 99566 - DNA, 22 bp, Artificial sequence
  SiRNA target sequence
caaatgccctgggaagtgtaat

SEQ ID NO: 99567 - DNA, 22 bp, Artificial sequence
  SiRNA target sequence
aaatgccctgggaagtgtaata

SEQ ID NO: 99568 - DNA, 22 bp, Artificial sequence
  SiRNA target sequence
aatgccctgggaagtgtaatac

SEQ ID NO: 99569 - DNA, 22 bp, Artificial sequence
  SiRNA target sequence
atgccctgggaagtgtaatacc

SEQ ID NO: 99570 - DNA, 22 bp, Artificial sequence
  SiRNA target sequence
tgccctgggaagtgtaatacca

SEQ ID NO: 99571 - DNA, 22 bp, Artificial sequence
  SiRNA target sequence
gccctgggaagtgtaataccag

SEQ ID NO: 99572 - DNA, 22 bp, Artificial sequence
  SiRNA target sequence
ccctgggaagtgtaataccagt

SEQ ID NO: 99573 - DNA, 22 bp, Artificial sequence
  SiRNA target sequence
cctgggaagtgtaataccagta

SEQ ID NO: 99574 - DNA, 22 bp, Artificial sequence
  SiRNA target sequence
ctgggaagtgtaataccagtac

SEQ ID NO: 99575 - DNA, 22 bp, Artificial sequence
  SiRNA target sequence
tgggaagtgtaataccagtacc

SEQ ID NO: 99576 - DNA, 22 bp, Artificial sequence
  SiRNA target sequence
gggaagtgtaataccagtacca

SEQ ID NO: 99577 - DNA, 22 bp, Artificial sequence
  SiRNA target sequence
ggaagtgtaataccagtaccag

SEQ ID NO: 99578 - DNA, 22 bp, Artificial sequence
  SiRNA target sequence
gaagtgtaataccagtaccagt

SEQ ID NO: 99579 - DNA, 22 bp, Artificial sequence
  SiRNA target sequence
aagtgtaataccagtaccagtg

SEQ ID NO: 99580 - DNA, 22 bp, Artificial sequence
  SiRNA target sequence
agtgtaataccagtaccagtgc

SEQ ID NO: 99581 - DNA, 22 bp, Artificial sequence
  SiRNA target sequence
gtgtaataccagtaccagtgca

SEQ ID NO: 99582 - DNA, 22 bp, Artificial sequence
  SiRNA target sequence
tgtaataccagtaccagtgcac

SEQ ID NO: 99583 - DNA, 22 bp, Artificial sequence
  SiRNA target sequence
gtaataccagtaccagtgcaca

SEQ ID NO: 99584 - DNA, 22 bp, Artificial sequence
  SiRNA target sequence
taataccagtaccagtgcacat

SEQ ID NO: 99585 - DNA, 22 bp, Artificial sequence
  SiRNA target sequence
aataccagtaccagtgcacata

SEQ ID NO: 99586 - DNA, 22 bp, Artificial sequence
  SiRNA target sequence
ataccagtaccagtgcacataa

SEQ ID NO: 99587 - DNA, 22 bp, Artificial sequence
  SiRNA target sequence
taccagtaccagtgcacataaa

SEQ ID NO: 99588 - DNA, 22 bp, Artificial sequence
  SiRNA target sequence
accagtaccagtgcacataaac

SEQ ID NO: 99589 - DNA, 22 bp, Artificial sequence
  SiRNA target sequence
ccagtaccagtgcacataaaca

SEQ ID NO: 99590 - DNA, 22 bp, Artificial sequence
  SiRNA target sequence
cagtaccagtgcacataaacaa

SEQ ID NO: 99591 - DNA, 22 bp, Artificial sequence
  SiRNA target sequence
agtaccagtgcacataaacaaa

SEQ ID NO: 99592 - DNA, 22 bp, Artificial sequence
  SiRNA target sequence
gtaccagtgcacataaacaaaa

SEQ ID NO: 99593 - DNA, 22 bp, Artificial sequence
  SiRNA target sequence
taccagtgcacataaacaaaat

SEQ ID NO: 99594 - DNA, 22 bp, Artificial sequence
  SiRNA target sequence
accagtgcacataaacaaaatc

SEQ ID NO: 99595 - DNA, 22 bp, Artificial sequence
  SiRNA target sequence
ccagtgcacataaacaaaatct

SEQ ID NO: 99596 - DNA, 22 bp, Artificial sequence
  SiRNA target sequence
cagtgcacataaacaaaatctt

SEQ ID NO: 99597 - DNA, 22 bp, Artificial sequence
  SiRNA target sequence
agtgcacataaacaaaatcttt

SEQ ID NO: 99598 - DNA, 22 bp, Artificial sequence
  SiRNA target sequence
gtgcacataaacaaaatctttt

SEQ ID NO: 99599 - DNA, 22 bp, Artificial sequence
  SiRNA target sequence
tgcacataaacaaaatcttttt

SEQ ID NO: 99600 - DNA, 22 bp, Artificial sequence
  SiRNA target sequence
gcacataaacaaaatcttttta

SEQ ID NO: 99601 - DNA, 22 bp, Artificial sequence
  SiRNA target sequence
cacataaacaaaatctttttac

SEQ ID NO: 99602 - DNA, 22 bp, Artificial sequence
  SiRNA target sequence
acataaacaaaatctttttacc

SEQ ID NO: 99603 - DNA, 22 bp, Artificial sequence
  SiRNA target sequence
cataaacaaaatctttttacca

SEQ ID NO: 99604 - DNA, 22 bp, Artificial sequence
  SiRNA target sequence
ataaacaaaatctttttaccac

SEQ ID NO: 99605 - DNA, 22 bp, Artificial sequence
  SiRNA target sequence
taaacaaaatctttttaccact

SEQ ID NO: 99606 - DNA, 22 bp, Artificial sequence
  SiRNA target sequence
aaacaaaatctttttaccacta

SEQ ID NO: 99607 - DNA, 22 bp, Artificial sequence
  SiRNA target sequence
aacaaaatctttttaccactaa

SEQ ID NO: 99608 - DNA, 22 bp, Artificial sequence
  SiRNA target sequence
acaaaatctttttaccactaaa

SEQ ID NO: 99609 - DNA, 22 bp, Artificial sequence
  SiRNA target sequence
caaaatctttttaccactaaaa

SEQ ID NO: 99610 - DNA, 22 bp, Artificial sequence
  SiRNA target sequence
aaaatctttttaccactaaaat

SEQ ID NO: 99611 - DNA, 22 bp, Artificial sequence
  SiRNA target sequence
aaatctttttaccactaaaatt

SEQ ID NO: 99612 - DNA, 22 bp, Artificial sequence
  SiRNA target sequence
aatctttttaccactaaaatta

SEQ ID NO: 99613 - DNA, 22 bp, Artificial sequence
  SiRNA target sequence
atctttttaccactaaaattaa

SEQ ID NO: 99614 - DNA, 22 bp, Artificial sequence
  SiRNA target sequence
tctttttaccactaaaattaag

SEQ ID NO: 99615 - DNA, 22 bp, Artificial sequence
  SiRNA target sequence
ctttttaccactaaaattaagt

SEQ ID NO: 99616 - DNA, 22 bp, Artificial sequence
  SiRNA target sequence
tttttaccactaaaattaagtc

SEQ ID NO: 99617 - DNA, 22 bp, Artificial sequence
  SiRNA target sequence
ttttaccactaaaattaagtct

SEQ ID NO: 99618 - DNA, 22 bp, Artificial sequence
  SiRNA target sequence
tttaccactaaaattaagtcta

SEQ ID NO: 99619 - DNA, 22 bp, Artificial sequence
  SiRNA target sequence
ttaccactaaaattaagtctat

SEQ ID NO: 99620 - DNA, 22 bp, Artificial sequence
  SiRNA target sequence
taccactaaaattaagtctatt

SEQ ID NO: 99621 - DNA, 22 bp, Artificial sequence
  SiRNA target sequence
accactaaaattaagtctattt

SEQ ID NO: 99622 - DNA, 22 bp, Artificial sequence
  SiRNA target sequence
ccactaaaattaagtctatttt

SEQ ID NO: 99623 - DNA, 22 bp, Artificial sequence
  SiRNA target sequence
cactaaaattaagtctattttg

SEQ ID NO: 99624 - DNA, 22 bp, Artificial sequence
  SiRNA target sequence
actaaaattaagtctattttgt

SEQ ID NO: 99625 - DNA, 22 bp, Artificial sequence
  SiRNA target sequence
ctaaaattaagtctattttgta

SEQ ID NO: 99626 - DNA, 22 bp, Artificial sequence
  SiRNA target sequence
taaaattaagtctattttgtac

SEQ ID NO: 99627 - DNA, 22 bp, Artificial sequence
  SiRNA target sequence
aaaattaagtctattttgtact

SEQ ID NO: 99628 - DNA, 22 bp, Artificial sequence
  SiRNA target sequence
aaattaagtctattttgtacta

SEQ ID NO: 99629 - DNA, 22 bp, Artificial sequence
  SiRNA target sequence
aattaagtctattttgtactat

SEQ ID NO: 99630 - DNA, 22 bp, Artificial sequence
  SiRNA target sequence
attaagtctattttgtactatg

SEQ ID NO: 99631 - DNA, 22 bp, Artificial sequence
  SiRNA target sequence
ttaagtctattttgtactatgt

SEQ ID NO: 99632 - DNA, 22 bp, Artificial sequence
  SiRNA target sequence
taagtctattttgtactatgtt

SEQ ID NO: 99633 - DNA, 22 bp, Artificial sequence
  SiRNA target sequence
aagtctattttgtactatgtta

SEQ ID NO: 99634 - DNA, 22 bp, Artificial sequence
  SiRNA target sequence
agtctattttgtactatgttaa

SEQ ID NO: 99635 - DNA, 22 bp, Artificial sequence
  SiRNA target sequence
gtctattttgtactatgttaac

SEQ ID NO: 99636 - DNA, 22 bp, Artificial sequence
  SiRNA target sequence
tctattttgtactatgttaaca

SEQ ID NO: 99637 - DNA, 22 bp, Artificial sequence
  SiRNA target sequence
ctattttgtactatgttaacat

SEQ ID NO: 99638 - DNA, 22 bp, Artificial sequence
  SiRNA target sequence
tattttgtactatgttaacatg

SEQ ID NO: 99639 - DNA, 22 bp, Artificial sequence
  SiRNA target sequence
attttgtactatgttaacatga

SEQ ID NO: 99640 - DNA, 22 bp, Artificial sequence
  SiRNA target sequence
ttttgtactatgttaacatgaa

SEQ ID NO: 99641 - DNA, 22 bp, Artificial sequence
  SiRNA target sequence
tttgtactatgttaacatgaat

SEQ ID NO: 99642 - DNA, 22 bp, Artificial sequence
  SiRNA target sequence
ttgtactatgttaacatgaata

SEQ ID NO: 99643 - DNA, 22 bp, Artificial sequence
  SiRNA target sequence
tgtactatgttaacatgaatag

SEQ ID NO: 99644 - DNA, 22 bp, Artificial sequence
  SiRNA target sequence
gtactatgttaacatgaatagt

SEQ ID NO: 99645 - DNA, 22 bp, Artificial sequence
  SiRNA target sequence
tactatgttaacatgaatagta

SEQ ID NO: 99646 - DNA, 22 bp, Artificial sequence
  SiRNA target sequence
actatgttaacatgaatagtag

SEQ ID NO: 99647 - DNA, 22 bp, Artificial sequence
  SiRNA target sequence
ctatgttaacatgaatagtaga

SEQ ID NO: 99648 - DNA, 22 bp, Artificial sequence
  SiRNA target sequence
tatgttaacatgaatagtagac

SEQ ID NO: 99649 - DNA, 22 bp, Artificial sequence
  SiRNA target sequence
atgttaacatgaatagtagacc

SEQ ID NO: 99650 - DNA, 22 bp, Artificial sequence
  SiRNA target sequence
tgttaacatgaatagtagaccc

SEQ ID NO: 99651 - DNA, 22 bp, Artificial sequence
  SiRNA target sequence
gttaacatgaatagtagaccct

SEQ ID NO: 99652 - DNA, 22 bp, Artificial sequence
  SiRNA target sequence
ttaacatgaatagtagaccctt

SEQ ID NO: 99653 - DNA, 22 bp, Artificial sequence
  SiRNA target sequence
taacatgaatagtagacccttt

SEQ ID NO: 99654 - DNA, 22 bp, Artificial sequence
  SiRNA target sequence
aacatgaatagtagacccttta

SEQ ID NO: 99655 - DNA, 22 bp, Artificial sequence
  SiRNA target sequence
acatgaatagtagaccctttag

SEQ ID NO: 99656 - DNA, 22 bp, Artificial sequence
  SiRNA target sequence
catgaatagtagaccctttagt

SEQ ID NO: 99657 - DNA, 22 bp, Artificial sequence
  SiRNA target sequence
atgaatagtagaccctttagta

SEQ ID NO: 99658 - DNA, 22 bp, Artificial sequence
  SiRNA target sequence
tgaatagtagaccctttagtaa

SEQ ID NO: 99659 - DNA, 22 bp, Artificial sequence
  SiRNA target sequence
gaatagtagaccctttagtaag

SEQ ID NO: 99660 - DNA, 22 bp, Artificial sequence
  SiRNA target sequence
aatagtagaccctttagtaagt

SEQ ID NO: 99661 - DNA, 22 bp, Artificial sequence
  SiRNA target sequence
atagtagaccctttagtaagta

SEQ ID NO: 99662 - DNA, 22 bp, Artificial sequence
  SiRNA target sequence
tagtagaccctttagtaagtaa

SEQ ID NO: 99663 - DNA, 22 bp, Artificial sequence
  SiRNA target sequence
agtagaccctttagtaagtaat

SEQ ID NO: 99664 - DNA, 22 bp, Artificial sequence
  SiRNA target sequence
gtagaccctttagtaagtaatt

SEQ ID NO: 99665 - DNA, 22 bp, Artificial sequence
  SiRNA target sequence
tagaccctttagtaagtaattt

SEQ ID NO: 99666 - DNA, 22 bp, Artificial sequence
  SiRNA target sequence
agaccctttagtaagtaatttt

SEQ ID NO: 99667 - DNA, 22 bp, Artificial sequence
  SiRNA target sequence
gaccctttagtaagtaatttta

SEQ ID NO: 99668 - DNA, 22 bp, Artificial sequence
  SiRNA target sequence
accctttagtaagtaattttaa

SEQ ID NO: 99669 - DNA, 22 bp, Artificial sequence
  SiRNA target sequence
ccctttagtaagtaattttaaa

SEQ ID NO: 99670 - DNA, 22 bp, Artificial sequence
  SiRNA target sequence
cctttagtaagtaattttaaat

SEQ ID NO: 99671 - DNA, 22 bp, Artificial sequence
  SiRNA target sequence
ctttagtaagtaattttaaata

SEQ ID NO: 99672 - DNA, 22 bp, Artificial sequence
  SiRNA target sequence
tttagtaagtaattttaaatac

SEQ ID NO: 99673 - DNA, 22 bp, Artificial sequence
  SiRNA target sequence
ttagtaagtaattttaaatact

SEQ ID NO: 99674 - DNA, 22 bp, Artificial sequence
  SiRNA target sequence
tagtaagtaattttaaatactc

SEQ ID NO: 99675 - DNA, 22 bp, Artificial sequence
  SiRNA target sequence
agtaagtaattttaaatactct

SEQ ID NO: 99676 - DNA, 22 bp, Artificial sequence
  SiRNA target sequence
gtaagtaattttaaatactctg

SEQ ID NO: 99677 - DNA, 22 bp, Artificial sequence
  SiRNA target sequence
taagtaattttaaatactctga

SEQ ID NO: 99678 - DNA, 22 bp, Artificial sequence
  SiRNA target sequence
aagtaattttaaatactctgaa

SEQ ID NO: 99679 - DNA, 22 bp, Artificial sequence
  SiRNA target sequence
agtaattttaaatactctgaac

SEQ ID NO: 99680 - DNA, 22 bp, Artificial sequence
  SiRNA target sequence
gtaattttaaatactctgaaca

SEQ ID NO: 99681 - DNA, 22 bp, Artificial sequence
  SiRNA target sequence
taattttaaatactctgaacaa

SEQ ID NO: 99682 - DNA, 22 bp, Artificial sequence
  SiRNA target sequence
aattttaaatactctgaacaaa

SEQ ID NO: 99683 - DNA, 22 bp, Artificial sequence
  SiRNA target sequence
attttaaatactctgaacaaag

SEQ ID NO: 99684 - DNA, 22 bp, Artificial sequence
  SiRNA target sequence
ttttaaatactctgaacaaaga

SEQ ID NO: 99685 - DNA, 22 bp, Artificial sequence
  SiRNA target sequence
tttaaatactctgaacaaagac

SEQ ID NO: 99686 - DNA, 22 bp, Artificial sequence
  SiRNA target sequence
ttaaatactctgaacaaagacc

SEQ ID NO: 99687 - DNA, 22 bp, Artificial sequence
  SiRNA target sequence
taaatactctgaacaaagacct

SEQ ID NO: 99688 - DNA, 22 bp, Artificial sequence
  SiRNA target sequence
aaatactctgaacaaagacctt

SEQ ID NO: 99689 - DNA, 22 bp, Artificial sequence
  SiRNA target sequence
aatactctgaacaaagaccttt

SEQ ID NO: 99690 - DNA, 22 bp, Artificial sequence
  SiRNA target sequence
atactctgaacaaagacctttt

SEQ ID NO: 99691 - DNA, 22 bp, Artificial sequence
  SiRNA target sequence
tactctgaacaaagaccttttc

SEQ ID NO: 99692 - DNA, 22 bp, Artificial sequence
  SiRNA target sequence
actctgaacaaagaccttttcg

SEQ ID NO: 99693 - DNA, 22 bp, Artificial sequence
  SiRNA target sequence
ctctgaacaaagaccttttcgt

SEQ ID NO: 99694 - DNA, 22 bp, Artificial sequence
  SiRNA target sequence
tctgaacaaagaccttttcgtt

SEQ ID NO: 99695 - DNA, 22 bp, Artificial sequence
  SiRNA target sequence
ctgaacaaagaccttttcgttc

SEQ ID NO: 99696 - DNA, 22 bp, Artificial sequence
  SiRNA target sequence
tgaacaaagaccttttcgttct

SEQ ID NO: 99697 - DNA, 22 bp, Artificial sequence
  SiRNA target sequence
gaacaaagaccttttcgttctt

SEQ ID NO: 99698 - DNA, 22 bp, Artificial sequence
  SiRNA target sequence
aacaaagaccttttcgttcttc

SEQ ID NO: 99699 - DNA, 22 bp, Artificial sequence
  SiRNA target sequence
acaaagaccttttcgttcttct

SEQ ID NO: 99700 - DNA, 22 bp, Artificial sequence
  SiRNA target sequence
caaagaccttttcgttcttctt

SEQ ID NO: 99701 - DNA, 22 bp, Artificial sequence
  SiRNA target sequence
aaagaccttttcgttcttcttt

SEQ ID NO: 99702 - DNA, 22 bp, Artificial sequence
  SiRNA target sequence
aagaccttttcgttcttctttt

SEQ ID NO: 99703 - DNA, 22 bp, Artificial sequence
  SiRNA target sequence
agaccttttcgttcttctttta

SEQ ID NO: 99704 - DNA, 22 bp, Artificial sequence
  SiRNA target sequence
gaccttttcgttcttcttttaa

SEQ ID NO: 99705 - DNA, 22 bp, Artificial sequence
  SiRNA target sequence
accttttcgttcttcttttaaa

SEQ ID NO: 99706 - DNA, 22 bp, Artificial sequence
  SiRNA target sequence
ccttttcgttcttcttttaaac

SEQ ID NO: 99707 - DNA, 22 bp, Artificial sequence
  SiRNA target sequence
cttttcgttcttcttttaaact

SEQ ID NO: 99708 - DNA, 22 bp, Artificial sequence
  SiRNA target sequence
ttttcgttcttcttttaaactt

SEQ ID NO: 99709 - DNA, 22 bp, Artificial sequence
  SiRNA target sequence
tttcgttcttcttttaaacttg

SEQ ID NO: 99710 - DNA, 22 bp, Artificial sequence
  SiRNA target sequence
ttcgttcttcttttaaacttgt

SEQ ID NO: 99711 - DNA, 22 bp, Artificial sequence
  SiRNA target sequence
tcgttcttcttttaaacttgtt

SEQ ID NO: 99712 - DNA, 22 bp, Artificial sequence
  SiRNA target sequence
cgttcttcttttaaacttgttt

SEQ ID NO: 99713 - DNA, 22 bp, Artificial sequence
  SiRNA target sequence
gttcttcttttaaacttgtttt

SEQ ID NO: 99714 - DNA, 22 bp, Artificial sequence
  SiRNA target sequence
ttcttcttttaaacttgtttta

SEQ ID NO: 99715 - DNA, 22 bp, Artificial sequence
  SiRNA target sequence
tcttcttttaaacttgttttaa

SEQ ID NO: 99716 - DNA, 22 bp, Artificial sequence
  SiRNA target sequence
cttcttttaaacttgttttaaa

SEQ ID NO: 99717 - DNA, 22 bp, Artificial sequence
  SiRNA target sequence
ttcttttaaacttgttttaaaa

SEQ ID NO: 99718 - DNA, 22 bp, Artificial sequence
  SiRNA target sequence
tcttttaaacttgttttaaaag

SEQ ID NO: 99719 - DNA, 22 bp, Artificial sequence
  SiRNA target sequence
cttttaaacttgttttaaaaga

SEQ ID NO: 99720 - DNA, 22 bp, Artificial sequence
  SiRNA target sequence
ttttaaacttgttttaaaagaa

SEQ ID NO: 99721 - DNA, 22 bp, Artificial sequence
  SiRNA target sequence
tttaaacttgttttaaaagaaa

SEQ ID NO: 99722 - DNA, 22 bp, Artificial sequence
  SiRNA target sequence
ttaaacttgttttaaaagaaac

SEQ ID NO: 99723 - DNA, 22 bp, Artificial sequence
  SiRNA target sequence
taaacttgttttaaaagaaaca

SEQ ID NO: 99724 - DNA, 22 bp, Artificial sequence
  SiRNA target sequence
aaacttgttttaaaagaaacaa

SEQ ID NO: 99725 - DNA, 22 bp, Artificial sequence
  SiRNA target sequence
aacttgttttaaaagaaacaag

SEQ ID NO: 99726 - DNA, 22 bp, Artificial sequence
  SiRNA target sequence
acttgttttaaaagaaacaaga

SEQ ID NO: 99727 - DNA, 22 bp, Artificial sequence
  SiRNA target sequence
cttgttttaaaagaaacaagag

SEQ ID NO: 99728 - DNA, 22 bp, Artificial sequence
  SiRNA target sequence
ttgttttaaaagaaacaagaga

SEQ ID NO: 99729 - DNA, 22 bp, Artificial sequence
  SiRNA target sequence
tgttttaaaagaaacaagagag

SEQ ID NO: 99730 - DNA, 22 bp, Artificial sequence
  SiRNA target sequence
gttttaaaagaaacaagagaga

SEQ ID NO: 99731 - DNA, 22 bp, Artificial sequence
  SiRNA target sequence
ttttaaaagaaacaagagagac

SEQ ID NO: 99732 - DNA, 22 bp, Artificial sequence
  SiRNA target sequence
tttaaaagaaacaagagagacg

SEQ ID NO: 99733 - DNA, 22 bp, Artificial sequence
  SiRNA target sequence
ttaaaagaaacaagagagacgg

SEQ ID NO: 99734 - DNA, 22 bp, Artificial sequence
  SiRNA target sequence
taaaagaaacaagagagacggt

SEQ ID NO: 99735 - DNA, 22 bp, Artificial sequence
  SiRNA target sequence
aaaagaaacaagagagacggtg

SEQ ID NO: 99736 - DNA, 22 bp, Artificial sequence
  SiRNA target sequence
aaagaaacaagagagacggtga

SEQ ID NO: 99737 - DNA, 22 bp, Artificial sequence
  SiRNA target sequence
aagaaacaagagagacggtgac

SEQ ID NO: 99738 - DNA, 22 bp, Artificial sequence
  SiRNA target sequence
agaaacaagagagacggtgaca

SEQ ID NO: 99739 - DNA, 22 bp, Artificial sequence
  SiRNA target sequence
gaaacaagagagacggtgacaa

SEQ ID NO: 99740 - DNA, 22 bp, Artificial sequence
  SiRNA target sequence
aaacaagagagacggtgacaaa

SEQ ID NO: 99741 - DNA, 22 bp, Artificial sequence
  SiRNA target sequence
aacaagagagacggtgacaaag

SEQ ID NO: 99742 - DNA, 22 bp, Artificial sequence
  SiRNA target sequence
acaagagagacggtgacaaagt

SEQ ID NO: 99743 - DNA, 22 bp, Artificial sequence
  SiRNA target sequence
caagagagacggtgacaaagta

SEQ ID NO: 99744 - DNA, 22 bp, Artificial sequence
  SiRNA target sequence
aagagagacggtgacaaagtaa

SEQ ID NO: 99745 - DNA, 22 bp, Artificial sequence
  SiRNA target sequence
agagagacggtgacaaagtaac

SEQ ID NO: 99746 - DNA, 22 bp, Artificial sequence
  SiRNA target sequence
gagagacggtgacaaagtaaca

SEQ ID NO: 99747 - DNA, 22 bp, Artificial sequence
  SiRNA target sequence
agagacggtgacaaagtaacaa

SEQ ID NO: 99748 - DNA, 22 bp, Artificial sequence
  SiRNA target sequence
gagacggtgacaaagtaacaaa

SEQ ID NO: 99749 - DNA, 22 bp, Artificial sequence
  SiRNA target sequence
agacggtgacaaagtaacaaaa

SEQ ID NO: 99750 - DNA, 22 bp, Artificial sequence
  SiRNA target sequence
gacggtgacaaagtaacaaaaa

SEQ ID NO: 99751 - DNA, 22 bp, Artificial sequence
  SiRNA target sequence
acggtgacaaagtaacaaaaat

SEQ ID NO: 99752 - DNA, 22 bp, Artificial sequence
  SiRNA target sequence
cggtgacaaagtaacaaaaatc

SEQ ID NO: 99753 - DNA, 22 bp, Artificial sequence
  SiRNA target sequence
ggtgacaaagtaacaaaaatct

SEQ ID NO: 99754 - DNA, 22 bp, Artificial sequence
  SiRNA target sequence
gtgacaaagtaacaaaaatctt

SEQ ID NO: 99755 - DNA, 22 bp, Artificial sequence
  SiRNA target sequence
tgacaaagtaacaaaaatcttt

SEQ ID NO: 99756 - DNA, 22 bp, Artificial sequence
  SiRNA target sequence
gacaaagtaacaaaaatctttt

SEQ ID NO: 99757 - DNA, 22 bp, Artificial sequence
  SiRNA target sequence
acaaagtaacaaaaatcttttt

SEQ ID NO: 99758 - DNA, 22 bp, Artificial sequence
  SiRNA target sequence
caaagtaacaaaaatctttttt

SEQ ID NO: 99759 - DNA, 22 bp, Artificial sequence
  SiRNA target sequence
aaagtaacaaaaatcttttttc

SEQ ID NO: 99760 - DNA, 22 bp, Artificial sequence
  SiRNA target sequence
aagtaacaaaaatcttttttcg

SEQ ID NO: 99761 - DNA, 22 bp, Artificial sequence
  SiRNA target sequence
agtaacaaaaatcttttttcgt

SEQ ID NO: 99762 - DNA, 22 bp, Artificial sequence
  SiRNA target sequence
gtaacaaaaatcttttttcgtt

SEQ ID NO: 99763 - DNA, 22 bp, Artificial sequence
  SiRNA target sequence
taacaaaaatcttttttcgtta

SEQ ID NO: 99764 - DNA, 22 bp, Artificial sequence
  SiRNA target sequence
aacaaaaatcttttttcgttaa

SEQ ID NO: 99765 - DNA, 22 bp, Artificial sequence
  SiRNA target sequence
acaaaaatcttttttcgttaat

SEQ ID NO: 99766 - DNA, 22 bp, Artificial sequence
  SiRNA target sequence
caaaaatcttttttcgttaatg

SEQ ID NO: 99767 - DNA, 22 bp, Artificial sequence
  SiRNA target sequence
aaaaatcttttttcgttaatgt

SEQ ID NO: 99768 - DNA, 22 bp, Artificial sequence
  SiRNA target sequence
aaaatcttttttcgttaatgta

SEQ ID NO: 99769 - DNA, 22 bp, Artificial sequence
  SiRNA target sequence
aaatcttttttcgttaatgtaa

SEQ ID NO: 99770 - DNA, 22 bp, Artificial sequence
  SiRNA target sequence
aatcttttttcgttaatgtaaa

SEQ ID NO: 99771 - DNA, 22 bp, Artificial sequence
  SiRNA target sequence
atcttttttcgttaatgtaaaa

SEQ ID NO: 99772 - DNA, 22 bp, Artificial sequence
  SiRNA target sequence
tcttttttcgttaatgtaaaat

SEQ ID NO: 99773 - DNA, 22 bp, Artificial sequence
  SiRNA target sequence
cttttttcgttaatgtaaaata

SEQ ID NO: 99774 - DNA, 22 bp, Artificial sequence
  SiRNA target sequence
ttttttcgttaatgtaaaatat

SEQ ID NO: 99775 - DNA, 22 bp, Artificial sequence
  SiRNA target sequence
tttttcgttaatgtaaaatatc

SEQ ID NO: 99776 - DNA, 22 bp, Artificial sequence
  SiRNA target sequence
ttttcgttaatgtaaaatatct

SEQ ID NO: 99777 - DNA, 22 bp, Artificial sequence
  SiRNA target sequence
tttcgttaatgtaaaatatctt

SEQ ID NO: 99778 - DNA, 22 bp, Artificial sequence
  SiRNA target sequence
ttcgttaatgtaaaatatcttg

SEQ ID NO: 99779 - DNA, 22 bp, Artificial sequence
  SiRNA target sequence
tcgttaatgtaaaatatcttgg

SEQ ID NO: 99780 - DNA, 22 bp, Artificial sequence
  SiRNA target sequence
cgttaatgtaaaatatcttgga

SEQ ID NO: 99781 - DNA, 22 bp, Artificial sequence
  SiRNA target sequence
gttaatgtaaaatatcttggat

SEQ ID NO: 99782 - DNA, 22 bp, Artificial sequence
  SiRNA target sequence
ttaatgtaaaatatcttggatt

SEQ ID NO: 99783 - DNA, 22 bp, Artificial sequence
  SiRNA target sequence
taatgtaaaatatcttggatta

SEQ ID NO: 99784 - DNA, 22 bp, Artificial sequence
  SiRNA target sequence
aatgtaaaatatcttggattaa

SEQ ID NO: 99785 - DNA, 22 bp, Artificial sequence
  SiRNA target sequence
atgtaaaatatcttggattaat

SEQ ID NO: 99786 - DNA, 22 bp, Artificial sequence
  SiRNA target sequence
tgtaaaatatcttggattaatt

SEQ ID NO: 99787 - DNA, 22 bp, Artificial sequence
  SiRNA target sequence
gtaaaatatcttggattaatta

SEQ ID NO: 99788 - DNA, 22 bp, Artificial sequence
  SiRNA target sequence
taaaatatcttggattaattac

SEQ ID NO: 99789 - DNA, 22 bp, Artificial sequence
  SiRNA target sequence
aaaatatcttggattaattaca

SEQ ID NO: 99790 - DNA, 22 bp, Artificial sequence
  SiRNA target sequence
aaatatcttggattaattacag

SEQ ID NO: 99791 - DNA, 22 bp, Artificial sequence
  SiRNA target sequence
aatatcttggattaattacagg

SEQ ID NO: 99792 - DNA, 22 bp, Artificial sequence
  SiRNA target sequence
atatcttggattaattacaggg

SEQ ID NO: 99793 - DNA, 22 bp, Artificial sequence
  SiRNA target sequence
tatcttggattaattacaggga

SEQ ID NO: 99794 - DNA, 22 bp, Artificial sequence
  SiRNA target sequence
atcttggattaattacagggat

SEQ ID NO: 99795 - DNA, 22 bp, Artificial sequence
  SiRNA target sequence
tcttggattaattacagggata

SEQ ID NO: 99796 - DNA, 22 bp, Artificial sequence
  SiRNA target sequence
cttggattaattacagggatat

SEQ ID NO: 99797 - DNA, 22 bp, Artificial sequence
  SiRNA target sequence
ttggattaattacagggatata

SEQ ID NO: 99798 - DNA, 22 bp, Artificial sequence
  SiRNA target sequence
tggattaattacagggatatac

SEQ ID NO: 99799 - DNA, 22 bp, Artificial sequence
  SiRNA target sequence
ggattaattacagggatatact

SEQ ID NO: 99800 - DNA, 22 bp, Artificial sequence
  SiRNA target sequence
gattaattacagggatatactt

SEQ ID NO: 99801 - DNA, 22 bp, Artificial sequence
  SiRNA target sequence
attaattacagggatatacttg

SEQ ID NO: 99802 - DNA, 22 bp, Artificial sequence
  SiRNA target sequence
ttaattacagggatatacttgt

SEQ ID NO: 99803 - DNA, 22 bp, Artificial sequence
  SiRNA target sequence
taattacagggatatacttgta

SEQ ID NO: 99804 - DNA, 22 bp, Artificial sequence
  SiRNA target sequence
aattacagggatatacttgtac

SEQ ID NO: 99805 - DNA, 22 bp, Artificial sequence
  SiRNA target sequence
attacagggatatacttgtaca

SEQ ID NO: 99806 - DNA, 22 bp, Artificial sequence
  SiRNA target sequence
ttacagggatatacttgtacat

SEQ ID NO: 99807 - DNA, 22 bp, Artificial sequence
  SiRNA target sequence
tacagggatatacttgtacata

SEQ ID NO: 99808 - DNA, 22 bp, Artificial sequence
  SiRNA target sequence
acagggatatacttgtacataa

SEQ ID NO: 99809 - DNA, 22 bp, Artificial sequence
  SiRNA target sequence
cagggatatacttgtacataaa

SEQ ID NO: 99810 - DNA, 22 bp, Artificial sequence
  SiRNA target sequence
agggatatacttgtacataaaa

SEQ ID NO: 99811 - DNA, 22 bp, Artificial sequence
  SiRNA target sequence
gggatatacttgtacataaaat

SEQ ID NO: 99812 - DNA, 22 bp, Artificial sequence
  SiRNA target sequence
ggatatacttgtacataaaatt

SEQ ID NO: 99813 - DNA, 22 bp, Artificial sequence
  SiRNA target sequence
gatatacttgtacataaaattt

SEQ ID NO: 99814 - DNA, 22 bp, Artificial sequence
  SiRNA target sequence
atatacttgtacataaaatttg

SEQ ID NO: 99815 - DNA, 22 bp, Artificial sequence
  SiRNA target sequence
tatacttgtacataaaatttga

SEQ ID NO: 99816 - DNA, 22 bp, Artificial sequence
  SiRNA target sequence
atacttgtacataaaatttgag

SEQ ID NO: 99817 - DNA, 22 bp, Artificial sequence
  SiRNA target sequence
tacttgtacataaaatttgagg

SEQ ID NO: 99818 - DNA, 22 bp, Artificial sequence
  SiRNA target sequence
acttgtacataaaatttgaggt

SEQ ID NO: 99819 - DNA, 22 bp, Artificial sequence
  SiRNA target sequence
cttgtacataaaatttgaggta

SEQ ID NO: 99820 - DNA, 22 bp, Artificial sequence
  SiRNA target sequence
ttgtacataaaatttgaggtaa

SEQ ID NO: 99821 - DNA, 22 bp, Artificial sequence
  SiRNA target sequence
tgtacataaaatttgaggtaag

SEQ ID NO: 99822 - DNA, 22 bp, Artificial sequence
  SiRNA target sequence
gtacataaaatttgaggtaagt

SEQ ID NO: 99823 - DNA, 22 bp, Artificial sequence
  SiRNA target sequence
tacataaaatttgaggtaagtt

SEQ ID NO: 99824 - DNA, 22 bp, Artificial sequence
  SiRNA target sequence
acataaaatttgaggtaagttt

SEQ ID NO: 99825 - DNA, 22 bp, Artificial sequence
  SiRNA target sequence
cataaaatttgaggtaagtttt

SEQ ID NO: 99826 - DNA, 22 bp, Artificial sequence
  SiRNA target sequence
ataaaatttgaggtaagtttta

SEQ ID NO: 99827 - DNA, 22 bp, Artificial sequence
  SiRNA target sequence
taaaatttgaggtaagttttat

SEQ ID NO: 99828 - DNA, 22 bp, Artificial sequence
  SiRNA target sequence
aaaatttgaggtaagttttatc

SEQ ID NO: 99829 - DNA, 22 bp, Artificial sequence
  SiRNA target sequence
aaatttgaggtaagttttatct

SEQ ID NO: 99830 - DNA, 22 bp, Artificial sequence
  SiRNA target sequence
aatttgaggtaagttttatctt

SEQ ID NO: 99831 - DNA, 22 bp, Artificial sequence
  SiRNA target sequence
atttgaggtaagttttatctta

SEQ ID NO: 99832 - DNA, 22 bp, Artificial sequence
  SiRNA target sequence
tttgaggtaagttttatcttaa

SEQ ID NO: 99833 - DNA, 22 bp, Artificial sequence
  SiRNA target sequence
ttgaggtaagttttatcttaaa

SEQ ID NO: 99834 - DNA, 22 bp, Artificial sequence
  SiRNA target sequence
tgaggtaagttttatcttaaaa

SEQ ID NO: 99835 - DNA, 22 bp, Artificial sequence
  SiRNA target sequence
gaggtaagttttatcttaaaat

SEQ ID NO: 99836 - DNA, 22 bp, Artificial sequence
  SiRNA target sequence
aggtaagttttatcttaaaatc

SEQ ID NO: 99837 - DNA, 22 bp, Artificial sequence
  SiRNA target sequence
ggtaagttttatcttaaaatct

SEQ ID NO: 99838 - DNA, 22 bp, Artificial sequence
  SiRNA target sequence
gtaagttttatcttaaaatctt

SEQ ID NO: 99839 - DNA, 22 bp, Artificial sequence
  SiRNA target sequence
taagttttatcttaaaatcttt

SEQ ID NO: 99840 - DNA, 22 bp, Artificial sequence
  SiRNA target sequence
aagttttatcttaaaatctttt

SEQ ID NO: 99841 - DNA, 22 bp, Artificial sequence
  SiRNA target sequence
agttttatcttaaaatctttta

SEQ ID NO: 99842 - DNA, 22 bp, Artificial sequence
  SiRNA target sequence
gttttatcttaaaatcttttag

SEQ ID NO: 99843 - DNA, 22 bp, Artificial sequence
  SiRNA target sequence
ttttatcttaaaatcttttaga

SEQ ID NO: 99844 - DNA, 22 bp, Artificial sequence
  SiRNA target sequence
tttatcttaaaatcttttagaa

SEQ ID NO: 99845 - DNA, 22 bp, Artificial sequence
  SiRNA target sequence
ttatcttaaaatcttttagaac

SEQ ID NO: 99846 - DNA, 22 bp, Artificial sequence
  SiRNA target sequence
tatcttaaaatcttttagaacc

SEQ ID NO: 99847 - DNA, 22 bp, Artificial sequence
  SiRNA target sequence
atcttaaaatcttttagaacct

SEQ ID NO: 99848 - DNA, 22 bp, Artificial sequence
  SiRNA target sequence
tcttaaaatcttttagaacctc

SEQ ID NO: 99849 - DNA, 22 bp, Artificial sequence
  SiRNA target sequence
cttaaaatcttttagaacctca

SEQ ID NO: 99850 - DNA, 22 bp, Artificial sequence
  SiRNA target sequence
ttaaaatcttttagaacctcaa

SEQ ID NO: 99851 - DNA, 22 bp, Artificial sequence
  SiRNA target sequence
taaaatcttttagaacctcaaa

SEQ ID NO: 99852 - DNA, 22 bp, Artificial sequence
  SiRNA target sequence
aaaatcttttagaacctcaaaa

SEQ ID NO: 99853 - DNA, 22 bp, Artificial sequence
  SiRNA target sequence
aaatcttttagaacctcaaaaa

SEQ ID NO: 99854 - DNA, 22 bp, Artificial sequence
  SiRNA target sequence
aatcttttagaacctcaaaaat

SEQ ID NO: 99855 - DNA, 22 bp, Artificial sequence
  SiRNA target sequence
atcttttagaacctcaaaaata

SEQ ID NO: 99856 - DNA, 22 bp, Artificial sequence
  SiRNA target sequence
tcttttagaacctcaaaaatag

SEQ ID NO: 99857 - DNA, 22 bp, Artificial sequence
  SiRNA target sequence
cttttagaacctcaaaaatagt

SEQ ID NO: 99858 - DNA, 22 bp, Artificial sequence
  SiRNA target sequence
ttttagaacctcaaaaatagtg

SEQ ID NO: 99859 - DNA, 22 bp, Artificial sequence
  SiRNA target sequence
tttagaacctcaaaaatagtgc

SEQ ID NO: 99860 - DNA, 22 bp, Artificial sequence
  SiRNA target sequence
ttagaacctcaaaaatagtgcg

SEQ ID NO: 99861 - DNA, 22 bp, Artificial sequence
  SiRNA target sequence
tagaacctcaaaaatagtgcgc

SEQ ID NO: 99862 - DNA, 22 bp, Artificial sequence
  SiRNA target sequence
agaacctcaaaaatagtgcgct

SEQ ID NO: 99863 - DNA, 22 bp, Artificial sequence
  SiRNA target sequence
gaacctcaaaaatagtgcgctt

SEQ ID NO: 99864 - DNA, 22 bp, Artificial sequence
  SiRNA target sequence
aacctcaaaaatagtgcgcttc

SEQ ID NO: 99865 - DNA, 22 bp, Artificial sequence
  SiRNA target sequence
acctcaaaaatagtgcgcttcg

SEQ ID NO: 99866 - DNA, 22 bp, Artificial sequence
  SiRNA target sequence
cctcaaaaatagtgcgcttcgg

SEQ ID NO: 99867 - DNA, 22 bp, Artificial sequence
  SiRNA target sequence
ctcaaaaatagtgcgcttcggt

SEQ ID NO: 99868 - DNA, 22 bp, Artificial sequence
  SiRNA target sequence
tcaaaaatagtgcgcttcggta

SEQ ID NO: 99869 - DNA, 22 bp, Artificial sequence
  SiRNA target sequence
caaaaatagtgcgcttcggtag

SEQ ID NO: 99870 - DNA, 22 bp, Artificial sequence
  SiRNA target sequence
aaaaatagtgcgcttcggtagt

SEQ ID NO: 99871 - DNA, 22 bp, Artificial sequence
  SiRNA target sequence
aaaatagtgcgcttcggtagta

SEQ ID NO: 99872 - DNA, 22 bp, Artificial sequence
  SiRNA target sequence
aaatagtgcgcttcggtagtaa

SEQ ID NO: 99873 - DNA, 22 bp, Artificial sequence
  SiRNA target sequence
aatagtgcgcttcggtagtaaa

SEQ ID NO: 99874 - DNA, 22 bp, Artificial sequence
  SiRNA target sequence
atagtgcgcttcggtagtaaaa

SEQ ID NO: 99875 - DNA, 22 bp, Artificial sequence
  SiRNA target sequence
tagtgcgcttcggtagtaaaat

SEQ ID NO: 99876 - DNA, 22 bp, Artificial sequence
  SiRNA target sequence
agtgcgcttcggtagtaaaatg

SEQ ID NO: 99877 - DNA, 22 bp, Artificial sequence
  SiRNA target sequence
gtgcgcttcggtagtaaaatgt

SEQ ID NO: 99878 - DNA, 22 bp, Artificial sequence
  SiRNA target sequence
tgcgcttcggtagtaaaatgta

SEQ ID NO: 99879 - DNA, 22 bp, Artificial sequence
  SiRNA target sequence
gcgcttcggtagtaaaatgtaa

SEQ ID NO: 99880 - DNA, 22 bp, Artificial sequence
  SiRNA target sequence
cgcttcggtagtaaaatgtaat

SEQ ID NO: 99881 - DNA, 22 bp, Artificial sequence
  SiRNA target sequence
gcttcggtagtaaaatgtaatc

SEQ ID NO: 99882 - DNA, 22 bp, Artificial sequence
  SiRNA target sequence
cttcggtagtaaaatgtaatca

SEQ ID NO: 99883 - DNA, 22 bp, Artificial sequence
  SiRNA target sequence
ttcggtagtaaaatgtaatcat

SEQ ID NO: 99884 - DNA, 22 bp, Artificial sequence
  SiRNA target sequence
tcggtagtaaaatgtaatcata

SEQ ID NO: 99885 - DNA, 22 bp, Artificial sequence
  SiRNA target sequence
cggtagtaaaatgtaatcatag

SEQ ID NO: 99886 - DNA, 22 bp, Artificial sequence
  SiRNA target sequence
ggtagtaaaatgtaatcatagt

SEQ ID NO: 99887 - DNA, 22 bp, Artificial sequence
  SiRNA target sequence
gtagtaaaatgtaatcatagta

SEQ ID NO: 99888 - DNA, 22 bp, Artificial sequence
  SiRNA target sequence
tagtaaaatgtaatcatagtac

SEQ ID NO: 99889 - DNA, 22 bp, Artificial sequence
  SiRNA target sequence
agtaaaatgtaatcatagtaca

SEQ ID NO: 99890 - DNA, 22 bp, Artificial sequence
  SiRNA target sequence
gtaaaatgtaatcatagtacag

SEQ ID NO: 99891 - DNA, 22 bp, Artificial sequence
  SiRNA target sequence
taaaatgtaatcatagtacaga

SEQ ID NO: 99892 - DNA, 22 bp, Artificial sequence
  SiRNA target sequence
aaaatgtaatcatagtacagat

SEQ ID NO: 99893 - DNA, 22 bp, Artificial sequence
  SiRNA target sequence
aaatgtaatcatagtacagatc

SEQ ID NO: 99894 - DNA, 22 bp, Artificial sequence
  SiRNA target sequence
aatgtaatcatagtacagatcg

SEQ ID NO: 99895 - DNA, 22 bp, Artificial sequence
  SiRNA target sequence
atgtaatcatagtacagatcgt

SEQ ID NO: 99896 - DNA, 22 bp, Artificial sequence
  SiRNA target sequence
tgtaatcatagtacagatcgta

SEQ ID NO: 99897 - DNA, 22 bp, Artificial sequence
  SiRNA target sequence
gtaatcatagtacagatcgtaa

SEQ ID NO: 99898 - DNA, 22 bp, Artificial sequence
  SiRNA target sequence
taatcatagtacagatcgtaat

SEQ ID NO: 99899 - DNA, 22 bp, Artificial sequence
  SiRNA target sequence
aatcatagtacagatcgtaatt

SEQ ID NO: 99900 - DNA, 22 bp, Artificial sequence
  SiRNA target sequence
atcatagtacagatcgtaattt

SEQ ID NO: 99901 - DNA, 22 bp, Artificial sequence
  SiRNA target sequence
tcatagtacagatcgtaattta

SEQ ID NO: 99902 - DNA, 22 bp, Artificial sequence
  SiRNA target sequence
catagtacagatcgtaatttag

SEQ ID NO: 99903 - DNA, 22 bp, Artificial sequence
  SiRNA target sequence
atagtacagatcgtaatttaga

SEQ ID NO: 99904 - DNA, 22 bp, Artificial sequence
  SiRNA target sequence
tagtacagatcgtaatttagat

SEQ ID NO: 99905 - DNA, 22 bp, Artificial sequence
  SiRNA target sequence
agtacagatcgtaatttagata

SEQ ID NO: 99906 - DNA, 22 bp, Artificial sequence
  SiRNA target sequence
gtacagatcgtaatttagataa

SEQ ID NO: 99907 - DNA, 22 bp, Artificial sequence
  SiRNA target sequence
tacagatcgtaatttagataaa

SEQ ID NO: 99908 - DNA, 22 bp, Artificial sequence
  SiRNA target sequence
acagatcgtaatttagataaat

SEQ ID NO: 99909 - DNA, 22 bp, Artificial sequence
  SiRNA target sequence
cagatcgtaatttagataaatt

SEQ ID NO: 99910 - DNA, 22 bp, Artificial sequence
  SiRNA target sequence
agatcgtaatttagataaattt

SEQ ID NO: 99911 - DNA, 22 bp, Artificial sequence
  SiRNA target sequence
gatcgtaatttagataaatttc

SEQ ID NO: 99912 - DNA, 22 bp, Artificial sequence
  SiRNA target sequence
atcgtaatttagataaatttct

SEQ ID NO: 99913 - DNA, 22 bp, Artificial sequence
  SiRNA target sequence
tcgtaatttagataaatttctt

SEQ ID NO: 99914 - DNA, 22 bp, Artificial sequence
  SiRNA target sequence
cgtaatttagataaatttcttt

SEQ ID NO: 99915 - DNA, 22 bp, Artificial sequence
  SiRNA target sequence
gtaatttagataaatttcttta

SEQ ID NO: 99916 - DNA, 22 bp, Artificial sequence
  SiRNA target sequence
taatttagataaatttctttac

SEQ ID NO: 99917 - DNA, 22 bp, Artificial sequence
  SiRNA target sequence
aatttagataaatttctttaca

SEQ ID NO: 99918 - DNA, 22 bp, Artificial sequence
  SiRNA target sequence
atttagataaatttctttacat

SEQ ID NO: 99919 - DNA, 22 bp, Artificial sequence
  SiRNA target sequence
tttagataaatttctttacatt

SEQ ID NO: 99920 - DNA, 22 bp, Artificial sequence
  SiRNA target sequence
ttagataaatttctttacattt

SEQ ID NO: 99921 - DNA, 22 bp, Artificial sequence
  SiRNA target sequence
tagataaatttctttacatttc

SEQ ID NO: 99922 - DNA, 22 bp, Artificial sequence
  SiRNA target sequence
agataaatttctttacatttct

SEQ ID NO: 99923 - DNA, 22 bp, Artificial sequence
  SiRNA target sequence
gataaatttctttacatttctc

SEQ ID NO: 99924 - DNA, 22 bp, Artificial sequence
  SiRNA target sequence
ataaatttctttacatttctca

SEQ ID NO: 99925 - DNA, 22 bp, Artificial sequence
  SiRNA target sequence
taaatttctttacatttctcac

SEQ ID NO: 99926 - DNA, 22 bp, Artificial sequence
  SiRNA target sequence
aaatttctttacatttctcacg

SEQ ID NO: 99927 - DNA, 22 bp, Artificial sequence
  SiRNA target sequence
aatttctttacatttctcacga

SEQ ID NO: 99928 - DNA, 22 bp, Artificial sequence
  SiRNA target sequence
atttctttacatttctcacgat

SEQ ID NO: 99929 - DNA, 22 bp, Artificial sequence
  SiRNA target sequence
tttctttacatttctcacgata

SEQ ID NO: 99930 - DNA, 22 bp, Artificial sequence
  SiRNA target sequence
ttctttacatttctcacgatat

SEQ ID NO: 99931 - DNA, 22 bp, Artificial sequence
  SiRNA target sequence
tctttacatttctcacgatatt

SEQ ID NO: 99932 - DNA, 22 bp, Artificial sequence
  SiRNA target sequence
ctttacatttctcacgatattc

SEQ ID NO: 99933 - DNA, 22 bp, Artificial sequence
  SiRNA target sequence
tttacatttctcacgatattcc

SEQ ID NO: 99934 - DNA, 22 bp, Artificial sequence
  SiRNA target sequence
ttacatttctcacgatattcct

SEQ ID NO: 99935 - DNA, 22 bp, Artificial sequence
  SiRNA target sequence
tacatttctcacgatattcctc

SEQ ID NO: 99936 - DNA, 22 bp, Artificial sequence
  SiRNA target sequence
acatttctcacgatattcctca

SEQ ID NO: 99937 - DNA, 22 bp, Artificial sequence
  SiRNA target sequence
catttctcacgatattcctcag

SEQ ID NO: 99938 - DNA, 22 bp, Artificial sequence
  SiRNA target sequence
atttctcacgatattcctcagc

SEQ ID NO: 99939 - DNA, 22 bp, Artificial sequence
  SiRNA target sequence
tttctcacgatattcctcagca

SEQ ID NO: 99940 - DNA, 22 bp, Artificial sequence
  SiRNA target sequence
ttctcacgatattcctcagcaa

SEQ ID NO: 99941 - DNA, 22 bp, Artificial sequence
  SiRNA target sequence
tctcacgatattcctcagcaat

SEQ ID NO: 99942 - DNA, 22 bp, Artificial sequence
  SiRNA target sequence
ctcacgatattcctcagcaatg

SEQ ID NO: 99943 - DNA, 22 bp, Artificial sequence
  SiRNA target sequence
tcacgatattcctcagcaatgg

SEQ ID NO: 99944 - DNA, 22 bp, Artificial sequence
  SiRNA target sequence
cacgatattcctcagcaatggt

SEQ ID NO: 99945 - DNA, 22 bp, Artificial sequence
  SiRNA target sequence
acgatattcctcagcaatggta

SEQ ID NO: 99946 - DNA, 22 bp, Artificial sequence
  SiRNA target sequence
cgatattcctcagcaatggtat

SEQ ID NO: 99947 - DNA, 22 bp, Artificial sequence
  SiRNA target sequence
gatattcctcagcaatggtatc

SEQ ID NO: 99948 - DNA, 22 bp, Artificial sequence
  SiRNA target sequence
atattcctcagcaatggtatct

SEQ ID NO: 99949 - DNA, 22 bp, Artificial sequence
  SiRNA target sequence
tattcctcagcaatggtatctg

SEQ ID NO: 99950 - DNA, 22 bp, Artificial sequence
  SiRNA target sequence
attcctcagcaatggtatctgt

SEQ ID NO: 99951 - DNA, 22 bp, Artificial sequence
  SiRNA target sequence
ttcctcagcaatggtatctgtg

SEQ ID NO: 99952 - DNA, 22 bp, Artificial sequence
  SiRNA target sequence
tcctcagcaatggtatctgtga

SEQ ID NO: 99953 - DNA, 22 bp, Artificial sequence
  SiRNA target sequence
cctcagcaatggtatctgtgat

SEQ ID NO: 99954 - DNA, 22 bp, Artificial sequence
  SiRNA target sequence
ctcagcaatggtatctgtgata

SEQ ID NO: 99955 - DNA, 22 bp, Artificial sequence
  SiRNA target sequence
tcagcaatggtatctgtgataa

SEQ ID NO: 99956 - DNA, 22 bp, Artificial sequence
  SiRNA target sequence
cagcaatggtatctgtgataag

SEQ ID NO: 99957 - DNA, 22 bp, Artificial sequence
  SiRNA target sequence
agcaatggtatctgtgataagc

SEQ ID NO: 99958 - DNA, 22 bp, Artificial sequence
  SiRNA target sequence
gcaatggtatctgtgataagcg

SEQ ID NO: 99959 - DNA, 22 bp, Artificial sequence
  SiRNA target sequence
caatggtatctgtgataagcga

SEQ ID NO: 99960 - DNA, 22 bp, Artificial sequence
  SiRNA target sequence
aatggtatctgtgataagcgaa

SEQ ID NO: 99961 - DNA, 22 bp, Artificial sequence
  SiRNA target sequence
atggtatctgtgataagcgaaa

SEQ ID NO: 99962 - DNA, 22 bp, Artificial sequence
  SiRNA target sequence
tggtatctgtgataagcgaaag

SEQ ID NO: 99963 - DNA, 22 bp, Artificial sequence
  SiRNA target sequence
ggtatctgtgataagcgaaagt

SEQ ID NO: 99964 - DNA, 22 bp, Artificial sequence
  SiRNA target sequence
gtatctgtgataagcgaaagtt

SEQ ID NO: 99965 - DNA, 22 bp, Artificial sequence
  SiRNA target sequence
tatctgtgataagcgaaagttg

SEQ ID NO: 99966 - DNA, 22 bp, Artificial sequence
  SiRNA target sequence
atctgtgataagcgaaagttgt

SEQ ID NO: 99967 - DNA, 22 bp, Artificial sequence
  SiRNA target sequence
tctgtgataagcgaaagttgta

SEQ ID NO: 99968 - DNA, 22 bp, Artificial sequence
  SiRNA target sequence
ctgtgataagcgaaagttgtag

SEQ ID NO: 99969 - DNA, 22 bp, Artificial sequence
  SiRNA target sequence
tgtgataagcgaaagttgtaga

SEQ ID NO: 99970 - DNA, 22 bp, Artificial sequence
  SiRNA target sequence
gtgataagcgaaagttgtagaa

SEQ ID NO: 99971 - DNA, 22 bp, Artificial sequence
  SiRNA target sequence
tgataagcgaaagttgtagaaa

SEQ ID NO: 99972 - DNA, 22 bp, Artificial sequence
  SiRNA target sequence
gataagcgaaagttgtagaaaa

SEQ ID NO: 99973 - DNA, 22 bp, Artificial sequence
  SiRNA target sequence
ataagcgaaagttgtagaaaaa

SEQ ID NO: 99974 - DNA, 22 bp, Artificial sequence
  SiRNA target sequence
taagcgaaagttgtagaaaaaa

SEQ ID NO: 99975 - DNA, 22 bp, Artificial sequence
  SiRNA target sequence
aagcgaaagttgtagaaaaaaa

SEQ ID NO: 99976 - DNA, 22 bp, Artificial sequence
  SiRNA target sequence
agcgaaagttgtagaaaaaaat

SEQ ID NO: 99977 - DNA, 22 bp, Artificial sequence
  SiRNA target sequence
gcgaaagttgtagaaaaaaata

SEQ ID NO: 99978 - DNA, 22 bp, Artificial sequence
  SiRNA target sequence
cgaaagttgtagaaaaaaatag

SEQ ID NO: 99979 - DNA, 22 bp, Artificial sequence
  SiRNA target sequence
gaaagttgtagaaaaaaataga

SEQ ID NO: 99980 - DNA, 22 bp, Artificial sequence
  SiRNA target sequence
aaagttgtagaaaaaaatagat

SEQ ID NO: 99981 - DNA, 22 bp, Artificial sequence
  SiRNA target sequence
aagttgtagaaaaaaatagatt

SEQ ID NO: 99982 - DNA, 22 bp, Artificial sequence
  SiRNA target sequence
agttgtagaaaaaaatagattt

SEQ ID NO: 99983 - DNA, 22 bp, Artificial sequence
  SiRNA target sequence
gttgtagaaaaaaatagatttg

SEQ ID NO: 99984 - DNA, 22 bp, Artificial sequence
  SiRNA target sequence
ttgtagaaaaaaatagatttga

SEQ ID NO: 99985 - DNA, 22 bp, Artificial sequence
  SiRNA target sequence
tgtagaaaaaaatagatttgag

SEQ ID NO: 99986 - DNA, 22 bp, Artificial sequence
  SiRNA target sequence
gtagaaaaaaatagatttgagg

SEQ ID NO: 99987 - DNA, 22 bp, Artificial sequence
  SiRNA target sequence
tagaaaaaaatagatttgagga

SEQ ID NO: 99988 - DNA, 22 bp, Artificial sequence
  SiRNA target sequence
agaaaaaaatagatttgaggaa

SEQ ID NO: 99989 - DNA, 22 bp, Artificial sequence
  SiRNA target sequence
gaaaaaaatagatttgaggaat

SEQ ID NO: 99990 - DNA, 22 bp, Artificial sequence
  SiRNA target sequence
aaaaaaatagatttgaggaata

SEQ ID NO: 99991 - DNA, 22 bp, Artificial sequence
  SiRNA target sequence
aaaaaatagatttgaggaatag

SEQ ID NO: 99992 - DNA, 22 bp, Artificial sequence
  SiRNA target sequence
aaaaatagatttgaggaataga

SEQ ID NO: 99993 - DNA, 22 bp, Artificial sequence
  SiRNA target sequence
aaaatagatttgaggaatagaa

SEQ ID NO: 99994 - DNA, 22 bp, Artificial sequence
  SiRNA target sequence
aaatagatttgaggaatagaat

SEQ ID NO: 99995 - DNA, 22 bp, Artificial sequence
  SiRNA target sequence
aatagatttgaggaatagaatt

SEQ ID NO: 99996 - DNA, 22 bp, Artificial sequence
  SiRNA target sequence
atagatttgaggaatagaatta

SEQ ID NO: 99997 - DNA, 22 bp, Artificial sequence
  SiRNA target sequence
tagatttgaggaatagaattaa

SEQ ID NO: 99998 - DNA, 22 bp, Artificial sequence
  SiRNA target sequence
agatttgaggaatagaattaaa

SEQ ID NO: 99999 - DNA, 22 bp, Artificial sequence
  SiRNA target sequence
gatttgaggaatagaattaaaa

SEQ ID NO: 100000 - DNA, 22 bp, Artificial sequence
  SiRNA target sequence
atttgaggaatagaattaaaat

SEQ ID NO: 100001 - DNA, 22 bp, Artificial sequence
  SiRNA target sequence
tttgaggaatagaattaaaatc

SEQ ID NO: 100002 - DNA, 22 bp, Artificial sequence
  SiRNA target sequence
ttgaggaatagaattaaaatca

SEQ ID NO: 100003 - DNA, 22 bp, Artificial sequence
  SiRNA target sequence
tgaggaatagaattaaaatcac

SEQ ID NO: 100004 - DNA, 22 bp, Artificial sequence
  SiRNA target sequence
gaggaatagaattaaaatcaca

SEQ ID NO: 100005 - DNA, 22 bp, Artificial sequence
  SiRNA target sequence
aggaatagaattaaaatcacaa

SEQ ID NO: 100006 - DNA, 22 bp, Artificial sequence
  SiRNA target sequence
ggaatagaattaaaatcacaat

SEQ ID NO: 100007 - DNA, 22 bp, Artificial sequence
  SiRNA target sequence
gaatagaattaaaatcacaata

SEQ ID NO: 100008 - DNA, 22 bp, Artificial sequence
  SiRNA target sequence
aatagaattaaaatcacaatat

SEQ ID NO: 100009 - DNA, 22 bp, Artificial sequence
  SiRNA target sequence
atagaattaaaatcacaatatt

SEQ ID NO: 100010 - DNA, 22 bp, Artificial sequence
  SiRNA target sequence
tagaattaaaatcacaatattt

SEQ ID NO: 100011 - DNA, 22 bp, Artificial sequence
  SiRNA target sequence
agaattaaaatcacaatatttt

SEQ ID NO: 100012 - DNA, 22 bp, Artificial sequence
  SiRNA target sequence
gaattaaaatcacaatattttt

SEQ ID NO: 100013 - DNA, 22 bp, Artificial sequence
  SiRNA target sequence
aattaaaatcacaatatttttt

SEQ ID NO: 100014 - DNA, 22 bp, Artificial sequence
  SiRNA target sequence
attaaaatcacaatatttttta

SEQ ID NO: 100015 - DNA, 22 bp, Artificial sequence
  SiRNA target sequence
ttaaaatcacaatattttttaa

SEQ ID NO: 100016 - DNA, 22 bp, Artificial sequence
  SiRNA target sequence
taaaatcacaatattttttaat

SEQ ID NO: 100017 - DNA, 22 bp, Artificial sequence
  SiRNA target sequence
aaaatcacaatattttttaata

SEQ ID NO: 100018 - DNA, 22 bp, Artificial sequence
  SiRNA target sequence
aaatcacaatattttttaatat

SEQ ID NO: 100019 - DNA, 22 bp, Artificial sequence
  SiRNA target sequence
aatcacaatattttttaatata

SEQ ID NO: 100020 - DNA, 22 bp, Artificial sequence
  SiRNA target sequence
atcacaatattttttaatatat

SEQ ID NO: 100021 - DNA, 22 bp, Artificial sequence
  SiRNA target sequence
tcacaatattttttaatatatt

SEQ ID NO: 100022 - DNA, 22 bp, Artificial sequence
  SiRNA target sequence
cacaatattttttaatatattt

SEQ ID NO: 100023 - DNA, 22 bp, Artificial sequence
  SiRNA target sequence
acaatattttttaatatattta

SEQ ID NO: 100024 - DNA, 22 bp, Artificial sequence
  SiRNA target sequence
caatattttttaatatatttaa

SEQ ID NO: 100025 - DNA, 22 bp, Artificial sequence
  SiRNA target sequence
aatattttttaatatatttaac

SEQ ID NO: 100026 - DNA, 22 bp, Artificial sequence
  SiRNA target sequence
atattttttaatatatttaacc

SEQ ID NO: 100027 - DNA, 22 bp, Artificial sequence
  SiRNA target sequence
tattttttaatatatttaacca

SEQ ID NO: 100028 - DNA, 22 bp, Artificial sequence
  SiRNA target sequence
attttttaatatatttaaccaa

SEQ ID NO: 100029 - DNA, 22 bp, Artificial sequence
  SiRNA target sequence
ttttttaatatatttaaccaag

SEQ ID NO: 100030 - DNA, 22 bp, Artificial sequence
  SiRNA target sequence
tttttaatatatttaaccaagg

SEQ ID NO: 100031 - DNA, 22 bp, Artificial sequence
  SiRNA target sequence
ttttaatatatttaaccaaggt

SEQ ID NO: 100032 - DNA, 22 bp, Artificial sequence
  SiRNA target sequence
tttaatatatttaaccaaggta

SEQ ID NO: 100033 - DNA, 22 bp, Artificial sequence
  SiRNA target sequence
ttaatatatttaaccaaggtat

SEQ ID NO: 100034 - DNA, 22 bp, Artificial sequence
  SiRNA target sequence
taatatatttaaccaaggtatt

SEQ ID NO: 100035 - DNA, 22 bp, Artificial sequence
  SiRNA target sequence
aatatatttaaccaaggtattg

SEQ ID NO: 100036 - DNA, 22 bp, Artificial sequence
  SiRNA target sequence
atatatttaaccaaggtattgt

SEQ ID NO: 100037 - DNA, 22 bp, Artificial sequence
  SiRNA target sequence
tatatttaaccaaggtattgtc

SEQ ID NO: 100038 - DNA, 22 bp, Artificial sequence
  SiRNA target sequence
atatttaaccaaggtattgtcc

SEQ ID NO: 100039 - DNA, 22 bp, Artificial sequence
  SiRNA target sequence
tatttaaccaaggtattgtcct

SEQ ID NO: 100040 - DNA, 22 bp, Artificial sequence
  SiRNA target sequence
atttaaccaaggtattgtcctt

SEQ ID NO: 100041 - DNA, 22 bp, Artificial sequence
  SiRNA target sequence
tttaaccaaggtattgtccttt

SEQ ID NO: 100042 - DNA, 22 bp, Artificial sequence
  SiRNA target sequence
ttaaccaaggtattgtccttta

SEQ ID NO: 100043 - DNA, 22 bp, Artificial sequence
  SiRNA target sequence
taaccaaggtattgtcctttat

SEQ ID NO: 100044 - DNA, 22 bp, Artificial sequence
  SiRNA target sequence
aaccaaggtattgtcctttatg

SEQ ID NO: 100045 - DNA, 22 bp, Artificial sequence
  SiRNA target sequence
accaaggtattgtcctttatgt

SEQ ID NO: 100046 - DNA, 22 bp, Artificial sequence
  SiRNA target sequence
ccaaggtattgtcctttatgtt

SEQ ID NO: 100047 - DNA, 22 bp, Artificial sequence
  SiRNA target sequence
caaggtattgtcctttatgtta

SEQ ID NO: 100048 - DNA, 22 bp, Artificial sequence
  SiRNA target sequence
aaggtattgtcctttatgttat

SEQ ID NO: 100049 - DNA, 22 bp, Artificial sequence
  SiRNA target sequence
aggtattgtcctttatgttatt

SEQ ID NO: 100050 - DNA, 22 bp, Artificial sequence
  SiRNA target sequence
ggtattgtcctttatgttatta

SEQ ID NO: 100051 - DNA, 22 bp, Artificial sequence
  SiRNA target sequence
gtattgtcctttatgttattat

SEQ ID NO: 100052 - DNA, 22 bp, Artificial sequence
  SiRNA target sequence
tattgtcctttatgttattata

SEQ ID NO: 100053 - DNA, 22 bp, Artificial sequence
  SiRNA target sequence
attgtcctttatgttattatat

SEQ ID NO: 100054 - DNA, 22 bp, Artificial sequence
  SiRNA target sequence
ttgtcctttatgttattatatc

SEQ ID NO: 100055 - DNA, 22 bp, Artificial sequence
  SiRNA target sequence
tgtcctttatgttattatatct

SEQ ID NO: 100056 - DNA, 22 bp, Artificial sequence
  SiRNA target sequence
gtcctttatgttattatatctt

SEQ ID NO: 100057 - DNA, 22 bp, Artificial sequence
  SiRNA target sequence
tcctttatgttattatatctta

SEQ ID NO: 100058 - DNA, 22 bp, Artificial sequence
  SiRNA target sequence
cctttatgttattatatcttac

SEQ ID NO: 100059 - DNA, 22 bp, Artificial sequence
  SiRNA target sequence
ctttatgttattatatcttaca

SEQ ID NO: 100060 - DNA, 22 bp, Artificial sequence
  SiRNA target sequence
tttatgttattatatcttacaa

SEQ ID NO: 100061 - DNA, 22 bp, Artificial sequence
  SiRNA target sequence
ttatgttattatatcttacaaa

SEQ ID NO: 100062 - DNA, 22 bp, Artificial sequence
  SiRNA target sequence
tatgttattatatcttacaaac

SEQ ID NO: 100063 - DNA, 22 bp, Artificial sequence
  SiRNA target sequence
atgttattatatcttacaaact

SEQ ID NO: 100064 - DNA, 22 bp, Artificial sequence
  SiRNA target sequence
tgttattatatcttacaaactc

SEQ ID NO: 100065 - DNA, 22 bp, Artificial sequence
  SiRNA target sequence
gttattatatcttacaaactcc

SEQ ID NO: 100066 - DNA, 22 bp, Artificial sequence
  SiRNA target sequence
ttattatatcttacaaactcct

SEQ ID NO: 100067 - DNA, 22 bp, Artificial sequence
  SiRNA target sequence
tattatatcttacaaactcctc

SEQ ID NO: 100068 - DNA, 22 bp, Artificial sequence
  SiRNA target sequence
attatatcttacaaactcctcg

SEQ ID NO: 100069 - DNA, 22 bp, Artificial sequence
  SiRNA target sequence
ttatatcttacaaactcctcgt

SEQ ID NO: 100070 - DNA, 22 bp, Artificial sequence
  SiRNA target sequence
tatatcttacaaactcctcgta

SEQ ID NO: 100071 - DNA, 22 bp, Artificial sequence
  SiRNA target sequence
atatcttacaaactcctcgtaa

SEQ ID NO: 100072 - DNA, 22 bp, Artificial sequence
  SiRNA target sequence
tatcttacaaactcctcgtaat

SEQ ID NO: 100073 - DNA, 22 bp, Artificial sequence
  SiRNA target sequence
atcttacaaactcctcgtaatt

SEQ ID NO: 100074 - DNA, 22 bp, Artificial sequence
  SiRNA target sequence
tcttacaaactcctcgtaatta

SEQ ID NO: 100075 - DNA, 22 bp, Artificial sequence
  SiRNA target sequence
cttacaaactcctcgtaattat

SEQ ID NO: 100076 - DNA, 22 bp, Artificial sequence
  SiRNA target sequence
ttacaaactcctcgtaattata

SEQ ID NO: 100077 - DNA, 22 bp, Artificial sequence
  SiRNA target sequence
tacaaactcctcgtaattataa

SEQ ID NO: 100078 - DNA, 22 bp, Artificial sequence
  SiRNA target sequence
acaaactcctcgtaattataat

SEQ ID NO: 100079 - DNA, 22 bp, Artificial sequence
  SiRNA target sequence
caaactcctcgtaattataatt

SEQ ID NO: 100080 - DNA, 22 bp, Artificial sequence
  SiRNA target sequence
aaactcctcgtaattataattt

SEQ ID NO: 100081 - DNA, 22 bp, Artificial sequence
  SiRNA target sequence
aactcctcgtaattataatttt

SEQ ID NO: 100082 - DNA, 22 bp, Artificial sequence
  SiRNA target sequence
actcctcgtaattataattttc

SEQ ID NO: 100083 - DNA, 22 bp, Artificial sequence
  SiRNA target sequence
ctcctcgtaattataattttca

SEQ ID NO: 100084 - DNA, 22 bp, Artificial sequence
  SiRNA target sequence
tcctcgtaattataattttcag

SEQ ID NO: 100085 - DNA, 22 bp, Artificial sequence
  SiRNA target sequence
cctcgtaattataattttcagg

SEQ ID NO: 100086 - DNA, 22 bp, Artificial sequence
  SiRNA target sequence
ctcgtaattataattttcagga

SEQ ID NO: 100087 - DNA, 22 bp, Artificial sequence
  SiRNA target sequence
tcgtaattataattttcaggat

SEQ ID NO: 100088 - DNA, 22 bp, Artificial sequence
  SiRNA target sequence
cgtaattataattttcaggata

SEQ ID NO: 100089 - DNA, 22 bp, Artificial sequence
  SiRNA target sequence
gtaattataattttcaggataa

SEQ ID NO: 100090 - DNA, 22 bp, Artificial sequence
  SiRNA target sequence
taattataattttcaggataaa

SEQ ID NO: 100091 - DNA, 22 bp, Artificial sequence
  SiRNA target sequence
aattataattttcaggataaac

SEQ ID NO: 100092 - DNA, 22 bp, Artificial sequence
  SiRNA target sequence
attataattttcaggataaacc

SEQ ID NO: 100093 - DNA, 22 bp, Artificial sequence
  SiRNA target sequence
ttataattttcaggataaaccg

SEQ ID NO: 100094 - DNA, 22 bp, Artificial sequence
  SiRNA target sequence
tataattttcaggataaaccgc

SEQ ID NO: 100095 - DNA, 22 bp, Artificial sequence
  SiRNA target sequence
ataattttcaggataaaccgct

SEQ ID NO: 100096 - DNA, 22 bp, Artificial sequence
  SiRNA target sequence
taattttcaggataaaccgcta

SEQ ID NO: 100097 - DNA, 22 bp, Artificial sequence
  SiRNA target sequence
aattttcaggataaaccgctag

SEQ ID NO: 100098 - DNA, 22 bp, Artificial sequence
  SiRNA target sequence
attttcaggataaaccgctaga

SEQ ID NO: 100099 - DNA, 22 bp, Artificial sequence
  SiRNA target sequence
ttttcaggataaaccgctagac

SEQ ID NO: 100100 - DNA, 22 bp, Artificial sequence
  SiRNA target sequence
tttcaggataaaccgctagaca

SEQ ID NO: 100101 - DNA, 22 bp, Artificial sequence
  SiRNA target sequence
ttcaggataaaccgctagacaa

SEQ ID NO: 100102 - DNA, 22 bp, Artificial sequence
  SiRNA target sequence
tcaggataaaccgctagacaat

SEQ ID NO: 100103 - DNA, 22 bp, Artificial sequence
  SiRNA target sequence
caggataaaccgctagacaatc

SEQ ID NO: 100104 - DNA, 22 bp, Artificial sequence
  SiRNA target sequence
aggataaaccgctagacaatca

SEQ ID NO: 100105 - DNA, 22 bp, Artificial sequence
  SiRNA target sequence
ggataaaccgctagacaatcac

SEQ ID NO: 100106 - DNA, 22 bp, Artificial sequence
  SiRNA target sequence
gataaaccgctagacaatcacc

SEQ ID NO: 100107 - DNA, 22 bp, Artificial sequence
  SiRNA target sequence
ataaaccgctagacaatcaccg

SEQ ID NO: 100108 - DNA, 22 bp, Artificial sequence
  SiRNA target sequence
taaaccgctagacaatcaccga

SEQ ID NO: 100109 - DNA, 22 bp, Artificial sequence
  SiRNA target sequence
aaaccgctagacaatcaccgat

SEQ ID NO: 100110 - DNA, 22 bp, Artificial sequence
  SiRNA target sequence
aaccgctagacaatcaccgatt

SEQ ID NO: 100111 - DNA, 22 bp, Artificial sequence
  SiRNA target sequence
accgctagacaatcaccgattt

SEQ ID NO: 100112 - DNA, 22 bp, Artificial sequence
  SiRNA target sequence
ccgctagacaatcaccgatttc

SEQ ID NO: 100113 - DNA, 22 bp, Artificial sequence
  SiRNA target sequence
cgctagacaatcaccgatttca

SEQ ID NO: 100114 - DNA, 22 bp, Artificial sequence
  SiRNA target sequence
gctagacaatcaccgatttcaa

SEQ ID NO: 100115 - DNA, 22 bp, Artificial sequence
  SiRNA target sequence
ctagacaatcaccgatttcaaa

SEQ ID NO: 100116 - DNA, 22 bp, Artificial sequence
  SiRNA target sequence
tagacaatcaccgatttcaaaa

SEQ ID NO: 100117 - DNA, 22 bp, Artificial sequence
  SiRNA target sequence
agacaatcaccgatttcaaaat

SEQ ID NO: 100118 - DNA, 22 bp, Artificial sequence
  SiRNA target sequence
gacaatcaccgatttcaaaatt

SEQ ID NO: 100119 - DNA, 22 bp, Artificial sequence
  SiRNA target sequence
acaatcaccgatttcaaaattt

SEQ ID NO: 100120 - DNA, 22 bp, Artificial sequence
  SiRNA target sequence
caatcaccgatttcaaaatttt

SEQ ID NO: 100121 - DNA, 22 bp, Artificial sequence
  SiRNA target sequence
aatcaccgatttcaaaattttc

SEQ ID NO: 100122 - DNA, 22 bp, Artificial sequence
  SiRNA target sequence
atcaccgatttcaaaattttct

SEQ ID NO: 100123 - DNA, 22 bp, Artificial sequence
  SiRNA target sequence
tcaccgatttcaaaattttcta

SEQ ID NO: 100124 - DNA, 22 bp, Artificial sequence
  SiRNA target sequence
caccgatttcaaaattttctat

SEQ ID NO: 100125 - DNA, 22 bp, Artificial sequence
  SiRNA target sequence
accgatttcaaaattttctata

SEQ ID NO: 100126 - DNA, 22 bp, Artificial sequence
  SiRNA target sequence
ccgatttcaaaattttctatat

SEQ ID NO: 100127 - DNA, 22 bp, Artificial sequence
  SiRNA target sequence
cgatttcaaaattttctatatc

SEQ ID NO: 100128 - DNA, 22 bp, Artificial sequence
  SiRNA target sequence
gatttcaaaattttctatatct

SEQ ID NO: 100129 - DNA, 22 bp, Artificial sequence
  SiRNA target sequence
atttcaaaattttctatatcta

SEQ ID NO: 100130 - DNA, 22 bp, Artificial sequence
  SiRNA target sequence
tttcaaaattttctatatctat

SEQ ID NO: 100131 - DNA, 22 bp, Artificial sequence
  SiRNA target sequence
ttcaaaattttctatatctata

SEQ ID NO: 100132 - DNA, 22 bp, Artificial sequence
  SiRNA target sequence
tcaaaattttctatatctatat

SEQ ID NO: 100133 - DNA, 22 bp, Artificial sequence
  SiRNA target sequence
caaaattttctatatctatatc

SEQ ID NO: 100134 - DNA, 22 bp, Artificial sequence
  SiRNA target sequence
aaaattttctatatctatatca

SEQ ID NO: 100135 - DNA, 22 bp, Artificial sequence
  SiRNA target sequence
aaattttctatatctatatcaa

SEQ ID NO: 100136 - DNA, 22 bp, Artificial sequence
  SiRNA target sequence
aattttctatatctatatcaaa

SEQ ID NO: 100137 - DNA, 22 bp, Artificial sequence
  SiRNA target sequence
attttctatatctatatcaaat

SEQ ID NO: 100138 - DNA, 22 bp, Artificial sequence
  SiRNA target sequence
ttttctatatctatatcaaatt

SEQ ID NO: 100139 - DNA, 22 bp, Artificial sequence
  SiRNA target sequence
tttctatatctatatcaaattt

SEQ ID NO: 100140 - DNA, 22 bp, Artificial sequence
  SiRNA target sequence
ttctatatctatatcaaatttt

SEQ ID NO: 100141 - DNA, 22 bp, Artificial sequence
  SiRNA target sequence
tctatatctatatcaaatttta

SEQ ID NO: 100142 - DNA, 22 bp, Artificial sequence
  SiRNA target sequence
ctatatctatatcaaattttat

SEQ ID NO: 100143 - DNA, 22 bp, Artificial sequence
  SiRNA target sequence
tatatctatatcaaattttatt

SEQ ID NO: 100144 - DNA, 22 bp, Artificial sequence
  SiRNA target sequence
atatctatatcaaattttattt

SEQ ID NO: 100145 - DNA, 22 bp, Artificial sequence
  SiRNA target sequence
tatctatatcaaattttatttc

SEQ ID NO: 100146 - DNA, 22 bp, Artificial sequence
  SiRNA target sequence
atctatatcaaattttatttct

SEQ ID NO: 100147 - DNA, 22 bp, Artificial sequence
  SiRNA target sequence
tctatatcaaattttatttcta

SEQ ID NO: 100148 - DNA, 22 bp, Artificial sequence
  SiRNA target sequence
ctatatcaaattttatttctaa

SEQ ID NO: 100149 - DNA, 22 bp, Artificial sequence
  SiRNA target sequence
tatatcaaattttatttctaaa

SEQ ID NO: 100150 - DNA, 22 bp, Artificial sequence
  SiRNA target sequence
atatcaaattttatttctaaaa

SEQ ID NO: 100151 - DNA, 22 bp, Artificial sequence
  SiRNA target sequence
tatcaaattttatttctaaaat

SEQ ID NO: 100152 - DNA, 22 bp, Artificial sequence
  SiRNA target sequence
atcaaattttatttctaaaata

SEQ ID NO: 100153 - DNA, 22 bp, Artificial sequence
  SiRNA target sequence
tcaaattttatttctaaaatag

SEQ ID NO: 100154 - DNA, 22 bp, Artificial sequence
  SiRNA target sequence
caaattttatttctaaaatagg

SEQ ID NO: 100155 - DNA, 22 bp, Artificial sequence
  SiRNA target sequence
aaattttatttctaaaatagga

SEQ ID NO: 100156 - DNA, 22 bp, Artificial sequence
  SiRNA target sequence
aattttatttctaaaataggat

SEQ ID NO: 100157 - DNA, 22 bp, Artificial sequence
  SiRNA target sequence
attttatttctaaaataggata

SEQ ID NO: 100158 - DNA, 22 bp, Artificial sequence
  SiRNA target sequence
ttttatttctaaaataggataa

SEQ ID NO: 100159 - DNA, 22 bp, Artificial sequence
  SiRNA target sequence
tttatttctaaaataggataaa

SEQ ID NO: 100160 - DNA, 22 bp, Artificial sequence
  SiRNA target sequence
ttatttctaaaataggataaat

SEQ ID NO: 100161 - DNA, 22 bp, Artificial sequence
  SiRNA target sequence
tatttctaaaataggataaatg

SEQ ID NO: 100162 - DNA, 22 bp, Artificial sequence
  SiRNA target sequence
atttctaaaataggataaatgt

SEQ ID NO: 100163 - DNA, 22 bp, Artificial sequence
  SiRNA target sequence
tttctaaaataggataaatgta

SEQ ID NO: 100164 - DNA, 22 bp, Artificial sequence
  SiRNA target sequence
ttctaaaataggataaatgtaa

SEQ ID NO: 100165 - DNA, 22 bp, Artificial sequence
  SiRNA target sequence
tctaaaataggataaatgtaat

SEQ ID NO: 100166 - DNA, 22 bp, Artificial sequence
  SiRNA target sequence
ctaaaataggataaatgtaatt

SEQ ID NO: 100167 - DNA, 22 bp, Artificial sequence
  SiRNA target sequence
taaaataggataaatgtaattg

SEQ ID NO: 100168 - DNA, 22 bp, Artificial sequence
  SiRNA target sequence
aaaataggataaatgtaattgt

SEQ ID NO: 100169 - DNA, 22 bp, Artificial sequence
  SiRNA target sequence
aaataggataaatgtaattgta

SEQ ID NO: 100170 - DNA, 22 bp, Artificial sequence
  SiRNA target sequence
aataggataaatgtaattgtaa

SEQ ID NO: 100171 - DNA, 22 bp, Artificial sequence
  SiRNA target sequence
ataggataaatgtaattgtaag

SEQ ID NO: 100172 - DNA, 22 bp, Artificial sequence
  SiRNA target sequence
taggataaatgtaattgtaagg

SEQ ID NO: 100173 - DNA, 22 bp, Artificial sequence
  SiRNA target sequence
aggataaatgtaattgtaaggt

SEQ ID NO: 100174 - DNA, 22 bp, Artificial sequence
  SiRNA target sequence
ggataaatgtaattgtaaggtg

SEQ ID NO: 100175 - DNA, 22 bp, Artificial sequence
  SiRNA target sequence
gataaatgtaattgtaaggtgt

SEQ ID NO: 100176 - DNA, 22 bp, Artificial sequence
  SiRNA target sequence
ataaatgtaattgtaaggtgtt

SEQ ID NO: 100177 - DNA, 22 bp, Artificial sequence
  SiRNA target sequence
taaatgtaattgtaaggtgtta

SEQ ID NO: 100178 - DNA, 22 bp, Artificial sequence
  SiRNA target sequence
aaatgtaattgtaaggtgttaa

SEQ ID NO: 100179 - DNA, 22 bp, Artificial sequence
  SiRNA target sequence
aatgtaattgtaaggtgttaat

SEQ ID NO: 100180 - DNA, 22 bp, Artificial sequence
  SiRNA target sequence
atgtaattgtaaggtgttaata

SEQ ID NO: 100181 - DNA, 22 bp, Artificial sequence
  SiRNA target sequence
tgtaattgtaaggtgttaatat

SEQ ID NO: 100182 - DNA, 22 bp, Artificial sequence
  SiRNA target sequence
gtaattgtaaggtgttaatatc

SEQ ID NO: 100183 - DNA, 22 bp, Artificial sequence
  SiRNA target sequence
taattgtaaggtgttaatatct

SEQ ID NO: 100184 - DNA, 22 bp, Artificial sequence
  SiRNA target sequence
aattgtaaggtgttaatatctt

SEQ ID NO: 100185 - DNA, 22 bp, Artificial sequence
  SiRNA target sequence
attgtaaggtgttaatatctta

SEQ ID NO: 100186 - DNA, 22 bp, Artificial sequence
  SiRNA target sequence
ttgtaaggtgttaatatcttaa

SEQ ID NO: 100187 - DNA, 22 bp, Artificial sequence
  SiRNA target sequence
tgtaaggtgttaatatcttaat

SEQ ID NO: 100188 - DNA, 22 bp, Artificial sequence
  SiRNA target sequence
gtaaggtgttaatatcttaata

SEQ ID NO: 100189 - DNA, 22 bp, Artificial sequence
  SiRNA target sequence
taaggtgttaatatcttaatat

SEQ ID NO: 100190 - DNA, 22 bp, Artificial sequence
  SiRNA target sequence
aaggtgttaatatcttaatatc

SEQ ID NO: 100191 - DNA, 22 bp, Artificial sequence
  SiRNA target sequence
aggtgttaatatcttaatatca

SEQ ID NO: 100192 - DNA, 22 bp, Artificial sequence
  SiRNA target sequence
ggtgttaatatcttaatatcat

SEQ ID NO: 100193 - DNA, 22 bp, Artificial sequence
  SiRNA target sequence
gtgttaatatcttaatatcatt

SEQ ID NO: 100194 - DNA, 22 bp, Artificial sequence
  SiRNA target sequence
tgttaatatcttaatatcattt

SEQ ID NO: 100195 - DNA, 22 bp, Artificial sequence
  SiRNA target sequence
gttaatatcttaatatcattta

SEQ ID NO: 100196 - DNA, 22 bp, Artificial sequence
  SiRNA target sequence
ttaatatcttaatatcatttat

SEQ ID NO: 100197 - DNA, 22 bp, Artificial sequence
  SiRNA target sequence
taatatcttaatatcatttatt

SEQ ID NO: 100198 - DNA, 22 bp, Artificial sequence
  SiRNA target sequence
aatatcttaatatcatttattg

SEQ ID NO: 100199 - DNA, 22 bp, Artificial sequence
  SiRNA target sequence
atatcttaatatcatttattga

SEQ ID NO: 100200 - DNA, 22 bp, Artificial sequence
  SiRNA target sequence
tatcttaatatcatttattgac

SEQ ID NO: 100201 - DNA, 22 bp, Artificial sequence
  SiRNA target sequence
atcttaatatcatttattgacg

SEQ ID NO: 100202 - DNA, 22 bp, Artificial sequence
  SiRNA target sequence
tcttaatatcatttattgacgc

SEQ ID NO: 100203 - DNA, 22 bp, Artificial sequence
  SiRNA target sequence
cttaatatcatttattgacgca

SEQ ID NO: 100204 - DNA, 22 bp, Artificial sequence
  SiRNA target sequence
ttaatatcatttattgacgcac

SEQ ID NO: 100205 - DNA, 22 bp, Artificial sequence
  SiRNA target sequence
taatatcatttattgacgcact

SEQ ID NO: 100206 - DNA, 22 bp, Artificial sequence
  SiRNA target sequence
aatatcatttattgacgcactg

SEQ ID NO: 100207 - DNA, 22 bp, Artificial sequence
  SiRNA target sequence
atatcatttattgacgcactgt

SEQ ID NO: 100208 - DNA, 22 bp, Artificial sequence
  SiRNA target sequence
tatcatttattgacgcactgta

SEQ ID NO: 100209 - DNA, 22 bp, Artificial sequence
  SiRNA target sequence
atcatttattgacgcactgtat

SEQ ID NO: 100210 - DNA, 22 bp, Artificial sequence
  SiRNA target sequence
tcatttattgacgcactgtata

SEQ ID NO: 100211 - DNA, 22 bp, Artificial sequence
  SiRNA target sequence
catttattgacgcactgtataa

SEQ ID NO: 100212 - DNA, 22 bp, Artificial sequence
  SiRNA target sequence
atttattgacgcactgtataaa

SEQ ID NO: 100213 - DNA, 22 bp, Artificial sequence
  SiRNA target sequence
tttattgacgcactgtataaat

SEQ ID NO: 100214 - DNA, 22 bp, Artificial sequence
  SiRNA target sequence
ttattgacgcactgtataaatc

SEQ ID NO: 100215 - DNA, 22 bp, Artificial sequence
  SiRNA target sequence
tattgacgcactgtataaatca

SEQ ID NO: 100216 - DNA, 22 bp, Artificial sequence
  SiRNA target sequence
attgacgcactgtataaatcat

SEQ ID NO: 100217 - DNA, 22 bp, Artificial sequence
  SiRNA target sequence
ttgacgcactgtataaatcatt

SEQ ID NO: 100218 - DNA, 22 bp, Artificial sequence
  SiRNA target sequence
tgacgcactgtataaatcattt

SEQ ID NO: 100219 - DNA, 22 bp, Artificial sequence
  SiRNA target sequence
gacgcactgtataaatcatttt

SEQ ID NO: 100220 - DNA, 22 bp, Artificial sequence
  SiRNA target sequence
acgcactgtataaatcattttt

SEQ ID NO: 100221 - DNA, 22 bp, Artificial sequence
  SiRNA target sequence
cgcactgtataaatcattttta

SEQ ID NO: 100222 - DNA, 22 bp, Artificial sequence
  SiRNA target sequence
gcactgtataaatcatttttac

SEQ ID NO: 100223 - DNA, 22 bp, Artificial sequence
  SiRNA target sequence
cactgtataaatcatttttaca

SEQ ID NO: 100224 - DNA, 22 bp, Artificial sequence
  SiRNA target sequence
actgtataaatcatttttacaa

SEQ ID NO: 100225 - DNA, 22 bp, Artificial sequence
  SiRNA target sequence
ctgtataaatcatttttacaac

SEQ ID NO: 100226 - DNA, 22 bp, Artificial sequence
  SiRNA target sequence
tgtataaatcatttttacaact

SEQ ID NO: 100227 - DNA, 22 bp, Artificial sequence
  SiRNA target sequence
gtataaatcatttttacaactt

SEQ ID NO: 100228 - DNA, 22 bp, Artificial sequence
  SiRNA target sequence
tataaatcatttttacaacttg

SEQ ID NO: 100229 - DNA, 22 bp, Artificial sequence
  SiRNA target sequence
ataaatcatttttacaacttgc

SEQ ID NO: 100230 - DNA, 22 bp, Artificial sequence
  SiRNA target sequence
taaatcatttttacaacttgca

SEQ ID NO: 100231 - DNA, 22 bp, Artificial sequence
  SiRNA target sequence
aaatcatttttacaacttgcaa

SEQ ID NO: 100232 - DNA, 22 bp, Artificial sequence
  SiRNA target sequence
aatcatttttacaacttgcaaa

SEQ ID NO: 100233 - DNA, 22 bp, Artificial sequence
  SiRNA target sequence
atcatttttacaacttgcaaaa

SEQ ID NO: 100234 - DNA, 22 bp, Artificial sequence
  SiRNA target sequence
tcatttttacaacttgcaaaat

SEQ ID NO: 100235 - DNA, 22 bp, Artificial sequence
  SiRNA target sequence
catttttacaacttgcaaaatt

SEQ ID NO: 100236 - DNA, 22 bp, Artificial sequence
  SiRNA target sequence
atttttacaacttgcaaaattt

SEQ ID NO: 100237 - DNA, 22 bp, Artificial sequence
  SiRNA target sequence
tttttacaacttgcaaaatttt

SEQ ID NO: 100238 - DNA, 22 bp, Artificial sequence
  SiRNA target sequence
ttttacaacttgcaaaattttt

SEQ ID NO: 100239 - DNA, 22 bp, Artificial sequence
  SiRNA target sequence
tttacaacttgcaaaattttta

SEQ ID NO: 100240 - DNA, 22 bp, Artificial sequence
  SiRNA target sequence
ttacaacttgcaaaatttttag

SEQ ID NO: 100241 - DNA, 22 bp, Artificial sequence
  SiRNA target sequence
tacaacttgcaaaatttttagc

SEQ ID NO: 100242 - DNA, 22 bp, Artificial sequence
  SiRNA target sequence
acaacttgcaaaatttttagca

SEQ ID NO: 100243 - DNA, 22 bp, Artificial sequence
  SiRNA target sequence
caacttgcaaaatttttagcat

SEQ ID NO: 100244 - DNA, 22 bp, Artificial sequence
  SiRNA target sequence
aacttgcaaaatttttagcatt

SEQ ID NO: 100245 - DNA, 22 bp, Artificial sequence
  SiRNA target sequence
acttgcaaaatttttagcattt

SEQ ID NO: 100246 - DNA, 22 bp, Artificial sequence
  SiRNA target sequence
cttgcaaaatttttagcatttt

SEQ ID NO: 100247 - DNA, 22 bp, Artificial sequence
  SiRNA target sequence
ttgcaaaatttttagcattttg

SEQ ID NO: 100248 - DNA, 22 bp, Artificial sequence
  SiRNA target sequence
tgcaaaatttttagcattttgt

SEQ ID NO: 100249 - DNA, 22 bp, Artificial sequence
  SiRNA target sequence
gcaaaatttttagcattttgta

SEQ ID NO: 100250 - DNA, 22 bp, Artificial sequence
  SiRNA target sequence
caaaatttttagcattttgtag

SEQ ID NO: 100251 - DNA, 22 bp, Artificial sequence
  SiRNA target sequence
aaaatttttagcattttgtagt

SEQ ID NO: 100252 - DNA, 22 bp, Artificial sequence
  SiRNA target sequence
aaatttttagcattttgtagtt

SEQ ID NO: 100253 - DNA, 22 bp, Artificial sequence
  SiRNA target sequence
aatttttagcattttgtagttt

SEQ ID NO: 100254 - DNA, 22 bp, Artificial sequence
  SiRNA target sequence
atttttagcattttgtagtttg

SEQ ID NO: 100255 - DNA, 22 bp, Artificial sequence
  SiRNA target sequence
tttttagcattttgtagtttgt

SEQ ID NO: 100256 - DNA, 22 bp, Artificial sequence
  SiRNA target sequence
ttttagcattttgtagtttgta

SEQ ID NO: 100257 - DNA, 22 bp, Artificial sequence
  SiRNA target sequence
tttagcattttgtagtttgtaa

SEQ ID NO: 100258 - DNA, 22 bp, Artificial sequence
  SiRNA target sequence
ttagcattttgtagtttgtaat

SEQ ID NO: 100259 - DNA, 22 bp, Artificial sequence
  SiRNA target sequence
tagcattttgtagtttgtaatg

SEQ ID NO: 100260 - DNA, 22 bp, Artificial sequence
  SiRNA target sequence
agcattttgtagtttgtaatgc

SEQ ID NO: 100261 - DNA, 22 bp, Artificial sequence
  SiRNA target sequence
gcattttgtagtttgtaatgcg

SEQ ID NO: 100262 - DNA, 22 bp, Artificial sequence
  SiRNA target sequence
cattttgtagtttgtaatgcgg

SEQ ID NO: 100263 - DNA, 22 bp, Artificial sequence
  SiRNA target sequence
attttgtagtttgtaatgcggt

SEQ ID NO: 100264 - DNA, 22 bp, Artificial sequence
  SiRNA target sequence
ttttgtagtttgtaatgcggta

SEQ ID NO: 100265 - DNA, 22 bp, Artificial sequence
  SiRNA target sequence
tttgtagtttgtaatgcggtaa

SEQ ID NO: 100266 - DNA, 22 bp, Artificial sequence
  SiRNA target sequence
ttgtagtttgtaatgcggtaat

SEQ ID NO: 100267 - DNA, 22 bp, Artificial sequence
  SiRNA target sequence
tgtagtttgtaatgcggtaata

SEQ ID NO: 100268 - DNA, 22 bp, Artificial sequence
  SiRNA target sequence
gtagtttgtaatgcggtaatat

SEQ ID NO: 100269 - DNA, 22 bp, Artificial sequence
  SiRNA target sequence
tagtttgtaatgcggtaatata

SEQ ID NO: 100270 - DNA, 22 bp, Artificial sequence
  SiRNA target sequence
agtttgtaatgcggtaatatat

SEQ ID NO: 100271 - DNA, 22 bp, Artificial sequence
  SiRNA target sequence
gtttgtaatgcggtaatatata

SEQ ID NO: 100272 - DNA, 22 bp, Artificial sequence
  SiRNA target sequence
tttgtaatgcggtaatatataa

SEQ ID NO: 100273 - DNA, 22 bp, Artificial sequence
  SiRNA target sequence
ttgtaatgcggtaatatataat

SEQ ID NO: 100274 - DNA, 22 bp, Artificial sequence
  SiRNA target sequence
tgtaatgcggtaatatataata

SEQ ID NO: 100275 - DNA, 22 bp, Artificial sequence
  SiRNA target sequence
gtaatgcggtaatatataatat

SEQ ID NO: 100276 - DNA, 22 bp, Artificial sequence
  SiRNA target sequence
taatgcggtaatatataatata

SEQ ID NO: 100277 - DNA, 22 bp, Artificial sequence
  SiRNA target sequence
aatgcggtaatatataatatag

SEQ ID NO: 100278 - DNA, 22 bp, Artificial sequence
  SiRNA target sequence
atgcggtaatatataatataga

SEQ ID NO: 100279 - DNA, 22 bp, Artificial sequence
  SiRNA target sequence
tgcggtaatatataatatagat

SEQ ID NO: 100280 - DNA, 22 bp, Artificial sequence
  SiRNA target sequence
gcggtaatatataatatagatc

SEQ ID NO: 100281 - DNA, 22 bp, Artificial sequence
  SiRNA target sequence
cggtaatatataatatagatct

SEQ ID NO: 100282 - DNA, 22 bp, Artificial sequence
  SiRNA target sequence
ggtaatatataatatagatctt

SEQ ID NO: 100283 - DNA, 22 bp, Artificial sequence
  SiRNA target sequence
gtaatatataatatagatcttt

SEQ ID NO: 100284 - DNA, 22 bp, Artificial sequence
  SiRNA target sequence
taatatataatatagatctttt

SEQ ID NO: 100285 - DNA, 22 bp, Artificial sequence
  SiRNA target sequence
aatatataatatagatctttta

SEQ ID NO: 100286 - DNA, 22 bp, Artificial sequence
  SiRNA target sequence
atatataatatagatcttttat

SEQ ID NO: 100287 - DNA, 22 bp, Artificial sequence
  SiRNA target sequence
tatataatatagatcttttatc

SEQ ID NO: 100288 - DNA, 22 bp, Artificial sequence
  SiRNA target sequence
atataatatagatcttttatcc

SEQ ID NO: 100289 - DNA, 22 bp, Artificial sequence
  SiRNA target sequence
tataatatagatcttttatcca

SEQ ID NO: 100290 - DNA, 22 bp, Artificial sequence
  SiRNA target sequence
ataatatagatcttttatccat

SEQ ID NO: 100291 - DNA, 22 bp, Artificial sequence
  SiRNA target sequence
taatatagatcttttatccatg

SEQ ID NO: 100292 - DNA, 22 bp, Artificial sequence
  SiRNA target sequence
aatatagatcttttatccatgt

SEQ ID NO: 100293 - DNA, 22 bp, Artificial sequence
  SiRNA target sequence
atatagatcttttatccatgtc

SEQ ID NO: 100294 - DNA, 22 bp, Artificial sequence
  SiRNA target sequence
tatagatcttttatccatgtct

SEQ ID NO: 100295 - DNA, 22 bp, Artificial sequence
  SiRNA target sequence
atagatcttttatccatgtctt

SEQ ID NO: 100296 - DNA, 22 bp, Artificial sequence
  SiRNA target sequence
tagatcttttatccatgtctta

SEQ ID NO: 100297 - DNA, 22 bp, Artificial sequence
  SiRNA target sequence
agatcttttatccatgtcttaa

SEQ ID NO: 100298 - DNA, 22 bp, Artificial sequence
  SiRNA target sequence
gatcttttatccatgtcttaaa

SEQ ID NO: 100299 - DNA, 22 bp, Artificial sequence
  SiRNA target sequence
atcttttatccatgtcttaaat

SEQ ID NO: 100300 - DNA, 22 bp, Artificial sequence
  SiRNA target sequence
tcttttatccatgtcttaaatt

SEQ ID NO: 100301 - DNA, 22 bp, Artificial sequence
  SiRNA target sequence
cttttatccatgtcttaaattc

SEQ ID NO: 100302 - DNA, 22 bp, Artificial sequence
  SiRNA target sequence
ttttatccatgtcttaaattcg

SEQ ID NO: 100303 - DNA, 22 bp, Artificial sequence
  SiRNA target sequence
tttatccatgtcttaaattcgc

SEQ ID NO: 100304 - DNA, 22 bp, Artificial sequence
  SiRNA target sequence
ttatccatgtcttaaattcgcc

SEQ ID NO: 100305 - DNA, 22 bp, Artificial sequence
  SiRNA target sequence
tatccatgtcttaaattcgccc

SEQ ID NO: 100306 - DNA, 22 bp, Artificial sequence
  SiRNA target sequence
atccatgtcttaaattcgccca

SEQ ID NO: 100307 - DNA, 22 bp, Artificial sequence
  SiRNA target sequence
tccatgtcttaaattcgcccat

SEQ ID NO: 100308 - DNA, 22 bp, Artificial sequence
  SiRNA target sequence
ccatgtcttaaattcgcccata

SEQ ID NO: 100309 - DNA, 22 bp, Artificial sequence
  SiRNA target sequence
catgtcttaaattcgcccataa

SEQ ID NO: 100310 - DNA, 22 bp, Artificial sequence
  SiRNA target sequence
atgtcttaaattcgcccataaa

SEQ ID NO: 100311 - DNA, 22 bp, Artificial sequence
  SiRNA target sequence
tgtcttaaattcgcccataaat

SEQ ID NO: 100312 - DNA, 22 bp, Artificial sequence
  SiRNA target sequence
gtcttaaattcgcccataaatc

SEQ ID NO: 100313 - DNA, 22 bp, Artificial sequence
  SiRNA target sequence
tcttaaattcgcccataaatcc

SEQ ID NO: 100314 - DNA, 22 bp, Artificial sequence
  SiRNA target sequence
cttaaattcgcccataaatcct

SEQ ID NO: 100315 - DNA, 22 bp, Artificial sequence
  SiRNA target sequence
ttaaattcgcccataaatcctt

SEQ ID NO: 100316 - DNA, 22 bp, Artificial sequence
  SiRNA target sequence
taaattcgcccataaatccttc

SEQ ID NO: 100317 - DNA, 22 bp, Artificial sequence
  SiRNA target sequence
aaattcgcccataaatccttct

SEQ ID NO: 100318 - DNA, 22 bp, Artificial sequence
  SiRNA target sequence
aattcgcccataaatccttctt

SEQ ID NO: 100319 - DNA, 22 bp, Artificial sequence
  SiRNA target sequence
attcgcccataaatccttcttt

SEQ ID NO: 100320 - DNA, 22 bp, Artificial sequence
  SiRNA target sequence
ttcgcccataaatccttctttg

SEQ ID NO: 100321 - DNA, 22 bp, Artificial sequence
  SiRNA target sequence
tcgcccataaatccttctttgt

SEQ ID NO: 100322 - DNA, 22 bp, Artificial sequence
  SiRNA target sequence
cgcccataaatccttctttgtc

SEQ ID NO: 100323 - DNA, 22 bp, Artificial sequence
  SiRNA target sequence
gcccataaatccttctttgtct

SEQ ID NO: 100324 - DNA, 22 bp, Artificial sequence
  SiRNA target sequence
cccataaatccttctttgtctt

SEQ ID NO: 100325 - DNA, 22 bp, Artificial sequence
  SiRNA target sequence
ccataaatccttctttgtcttg

SEQ ID NO: 100326 - DNA, 22 bp, Artificial sequence
  SiRNA target sequence
cataaatccttctttgtcttgg

SEQ ID NO: 100327 - DNA, 22 bp, Artificial sequence
  SiRNA target sequence
ataaatccttctttgtcttggc

SEQ ID NO: 100328 - DNA, 22 bp, Artificial sequence
  SiRNA target sequence
taaatccttctttgtcttggct

SEQ ID NO: 100329 - DNA, 22 bp, Artificial sequence
  SiRNA target sequence
aaatccttctttgtcttggcta

SEQ ID NO: 100330 - DNA, 22 bp, Artificial sequence
  SiRNA target sequence
aatccttctttgtcttggctat

SEQ ID NO: 100331 - DNA, 22 bp, Artificial sequence
  SiRNA target sequence
atccttctttgtcttggctatc

SEQ ID NO: 100332 - DNA, 22 bp, Artificial sequence
  SiRNA target sequence
tccttctttgtcttggctatct

SEQ ID NO: 100333 - DNA, 22 bp, Artificial sequence
  SiRNA target sequence
ccttctttgtcttggctatctc

SEQ ID NO: 100334 - DNA, 22 bp, Artificial sequence
  SiRNA target sequence
cttctttgtcttggctatctcc

SEQ ID NO: 100335 - DNA, 22 bp, Artificial sequence
  SiRNA target sequence
ttctttgtcttggctatctcca

SEQ ID NO: 100336 - DNA, 22 bp, Artificial sequence
  SiRNA target sequence
tctttgtcttggctatctccat

SEQ ID NO: 100337 - DNA, 22 bp, Artificial sequence
  SiRNA target sequence
ctttgtcttggctatctccatt

SEQ ID NO: 100338 - DNA, 22 bp, Artificial sequence
  SiRNA target sequence
tttgtcttggctatctccatta

SEQ ID NO: 100339 - DNA, 22 bp, Artificial sequence
  SiRNA target sequence
ttgtcttggctatctccattac

SEQ ID NO: 100340 - DNA, 22 bp, Artificial sequence
  SiRNA target sequence
tgtcttggctatctccattacc

SEQ ID NO: 100341 - DNA, 22 bp, Artificial sequence
  SiRNA target sequence
gtcttggctatctccattaccc

SEQ ID NO: 100342 - DNA, 22 bp, Artificial sequence
  SiRNA target sequence
tcttggctatctccattaccct

SEQ ID NO: 100343 - DNA, 22 bp, Artificial sequence
  SiRNA target sequence
cttggctatctccattaccctt

SEQ ID NO: 100344 - DNA, 22 bp, Artificial sequence
  SiRNA target sequence
ttggctatctccattacccttt

SEQ ID NO: 100345 - DNA, 22 bp, Artificial sequence
  SiRNA target sequence
tggctatctccattaccctttc

SEQ ID NO: 100346 - DNA, 22 bp, Artificial sequence
  SiRNA target sequence
ggctatctccattaccctttct

SEQ ID NO: 100347 - DNA, 22 bp, Artificial sequence
  SiRNA target sequence
gctatctccattaccctttctt

SEQ ID NO: 100348 - DNA, 22 bp, Artificial sequence
  SiRNA target sequence
ctatctccattaccctttctta

SEQ ID NO: 100349 - DNA, 22 bp, Artificial sequence
  SiRNA target sequence
tatctccattaccctttcttat

SEQ ID NO: 100350 - DNA, 22 bp, Artificial sequence
  SiRNA target sequence
atctccattaccctttcttatc

SEQ ID NO: 100351 - DNA, 22 bp, Artificial sequence
  SiRNA target sequence
tctccattaccctttcttatca

SEQ ID NO: 100352 - DNA, 22 bp, Artificial sequence
  SiRNA target sequence
ctccattaccctttcttatcag

SEQ ID NO: 100353 - DNA, 22 bp, Artificial sequence
  SiRNA target sequence
tccattaccctttcttatcaga

SEQ ID NO: 100354 - DNA, 22 bp, Artificial sequence
  SiRNA target sequence
ccattaccctttcttatcagag

SEQ ID NO: 100355 - DNA, 22 bp, Artificial sequence
  SiRNA target sequence
cattaccctttcttatcagagg

SEQ ID NO: 100356 - DNA, 22 bp, Artificial sequence
  SiRNA target sequence
attaccctttcttatcagaggt

SEQ ID NO: 100357 - DNA, 22 bp, Artificial sequence
  SiRNA target sequence
ttaccctttcttatcagaggtt

SEQ ID NO: 100358 - DNA, 22 bp, Artificial sequence
  SiRNA target sequence
taccctttcttatcagaggttt

SEQ ID NO: 100359 - DNA, 22 bp, Artificial sequence
  SiRNA target sequence
accctttcttatcagaggttta

SEQ ID NO: 100360 - DNA, 22 bp, Artificial sequence
  SiRNA target sequence
ccctttcttatcagaggtttag

SEQ ID NO: 100361 - DNA, 22 bp, Artificial sequence
  SiRNA target sequence
cctttcttatcagaggtttagc

SEQ ID NO: 100362 - DNA, 22 bp, Artificial sequence
  SiRNA target sequence
ctttcttatcagaggtttagct

SEQ ID NO: 100363 - DNA, 22 bp, Artificial sequence
  SiRNA target sequence
tttcttatcagaggtttagctc

SEQ ID NO: 100364 - DNA, 22 bp, Artificial sequence
  SiRNA target sequence
ttcttatcagaggtttagctcc

SEQ ID NO: 100365 - DNA, 22 bp, Artificial sequence
  SiRNA target sequence
tcttatcagaggtttagctccg

SEQ ID NO: 100366 - DNA, 22 bp, Artificial sequence
  SiRNA target sequence
cttatcagaggtttagctccgt

SEQ ID NO: 100367 - DNA, 22 bp, Artificial sequence
  SiRNA target sequence
ttatcagaggtttagctccgtg

SEQ ID NO: 100368 - DNA, 22 bp, Artificial sequence
  SiRNA target sequence
tatcagaggtttagctccgtgt

SEQ ID NO: 100369 - DNA, 22 bp, Artificial sequence
  SiRNA target sequence
atcagaggtttagctccgtgtt

SEQ ID NO: 100370 - DNA, 22 bp, Artificial sequence
  SiRNA target sequence
tcagaggtttagctccgtgttt

SEQ ID NO: 100371 - DNA, 22 bp, Artificial sequence
  SiRNA target sequence
cagaggtttagctccgtgtttt

SEQ ID NO: 100372 - DNA, 22 bp, Artificial sequence
  SiRNA target sequence
agaggtttagctccgtgtttta

SEQ ID NO: 100373 - DNA, 22 bp, Artificial sequence
  SiRNA target sequence
gaggtttagctccgtgttttaa

SEQ ID NO: 100374 - DNA, 22 bp, Artificial sequence
  SiRNA target sequence
aggtttagctccgtgttttaaa

SEQ ID NO: 100375 - DNA, 22 bp, Artificial sequence
  SiRNA target sequence
ggtttagctccgtgttttaaaa

SEQ ID NO: 100376 - DNA, 22 bp, Artificial sequence
  SiRNA target sequence
gtttagctccgtgttttaaaag

SEQ ID NO: 100377 - DNA, 22 bp, Artificial sequence
  SiRNA target sequence
tttagctccgtgttttaaaagg

SEQ ID NO: 100378 - DNA, 22 bp, Artificial sequence
  SiRNA target sequence
ttagctccgtgttttaaaaggc

SEQ ID NO: 100379 - DNA, 22 bp, Artificial sequence
  SiRNA target sequence
tagctccgtgttttaaaaggca

SEQ ID NO: 100380 - DNA, 22 bp, Artificial sequence
  SiRNA target sequence
agctccgtgttttaaaaggcaa

SEQ ID NO: 100381 - DNA, 22 bp, Artificial sequence
  SiRNA target sequence
gctccgtgttttaaaaggcaat

SEQ ID NO: 100382 - DNA, 22 bp, Artificial sequence
  SiRNA target sequence
ctccgtgttttaaaaggcaatt

SEQ ID NO: 100383 - DNA, 22 bp, Artificial sequence
  SiRNA target sequence
tccgtgttttaaaaggcaatta

SEQ ID NO: 100384 - DNA, 22 bp, Artificial sequence
  SiRNA target sequence
ccgtgttttaaaaggcaattat

SEQ ID NO: 100385 - DNA, 22 bp, Artificial sequence
  SiRNA target sequence
cgtgttttaaaaggcaattata

SEQ ID NO: 100386 - DNA, 22 bp, Artificial sequence
  SiRNA target sequence
gtgttttaaaaggcaattatac

SEQ ID NO: 100387 - DNA, 22 bp, Artificial sequence
  SiRNA target sequence
tgttttaaaaggcaattataca

SEQ ID NO: 100388 - DNA, 22 bp, Artificial sequence
  SiRNA target sequence
gttttaaaaggcaattatacaa

SEQ ID NO: 100389 - DNA, 22 bp, Artificial sequence
  SiRNA target sequence
ttttaaaaggcaattatacaac

SEQ ID NO: 100390 - DNA, 22 bp, Artificial sequence
  SiRNA target sequence
tttaaaaggcaattatacaact

SEQ ID NO: 100391 - DNA, 22 bp, Artificial sequence
  SiRNA target sequence
ttaaaaggcaattatacaactt

SEQ ID NO: 100392 - DNA, 22 bp, Artificial sequence
  SiRNA target sequence
taaaaggcaattatacaacttt

SEQ ID NO: 100393 - DNA, 22 bp, Artificial sequence
  SiRNA target sequence
aaaaggcaattatacaactttt

SEQ ID NO: 100394 - DNA, 22 bp, Artificial sequence
  SiRNA target sequence
aaaggcaattatacaacttttt

SEQ ID NO: 100395 - DNA, 22 bp, Artificial sequence
  SiRNA target sequence
aaggcaattatacaacttttta

SEQ ID NO: 100396 - DNA, 22 bp, Artificial sequence
  SiRNA target sequence
aggcaattatacaactttttag

SEQ ID NO: 100397 - DNA, 22 bp, Artificial sequence
  SiRNA target sequence
ggcaattatacaactttttaga

SEQ ID NO: 100398 - DNA, 22 bp, Artificial sequence
  SiRNA target sequence
gcaattatacaactttttagaa

SEQ ID NO: 100399 - DNA, 22 bp, Artificial sequence
  SiRNA target sequence
caattatacaactttttagaac

SEQ ID NO: 100400 - DNA, 22 bp, Artificial sequence
  SiRNA target sequence
aattatacaactttttagaaca

SEQ ID NO: 100401 - DNA, 22 bp, Artificial sequence
  SiRNA target sequence
attatacaactttttagaacaa

SEQ ID NO: 100402 - DNA, 22 bp, Artificial sequence
  SiRNA target sequence
ttatacaactttttagaacaaa

SEQ ID NO: 100403 - DNA, 22 bp, Artificial sequence
  SiRNA target sequence
tatacaactttttagaacaaaa

SEQ ID NO: 100404 - DNA, 22 bp, Artificial sequence
  SiRNA target sequence
atacaactttttagaacaaaaa

SEQ ID NO: 100405 - DNA, 22 bp, Artificial sequence
  SiRNA target sequence
tacaactttttagaacaaaaat

SEQ ID NO: 100406 - DNA, 22 bp, Artificial sequence
  SiRNA target sequence
acaactttttagaacaaaaatt

SEQ ID NO: 100407 - DNA, 22 bp, Artificial sequence
  SiRNA target sequence
caactttttagaacaaaaatta

SEQ ID NO: 100408 - DNA, 22 bp, Artificial sequence
  SiRNA target sequence
aactttttagaacaaaaattaa

SEQ ID NO: 100409 - DNA, 22 bp, Artificial sequence
  SiRNA target sequence
actttttagaacaaaaattaaa

SEQ ID NO: 100410 - DNA, 22 bp, Artificial sequence
  SiRNA target sequence
ctttttagaacaaaaattaaaa

SEQ ID NO: 100411 - DNA, 22 bp, Artificial sequence
  SiRNA target sequence
tttttagaacaaaaattaaaag

SEQ ID NO: 100412 - DNA, 22 bp, Artificial sequence
  SiRNA target sequence
ttttagaacaaaaattaaaaga

SEQ ID NO: 100413 - DNA, 22 bp, Artificial sequence
  SiRNA target sequence
tttagaacaaaaattaaaagat

SEQ ID NO: 100414 - DNA, 22 bp, Artificial sequence
  SiRNA target sequence
ttagaacaaaaattaaaagatt

SEQ ID NO: 100415 - DNA, 22 bp, Artificial sequence
  SiRNA target sequence
tagaacaaaaattaaaagattt

SEQ ID NO: 100416 - DNA, 22 bp, Artificial sequence
  SiRNA target sequence
agaacaaaaattaaaagattta

SEQ ID NO: 100417 - DNA, 22 bp, Artificial sequence
  SiRNA target sequence
gaacaaaaattaaaagatttat

SEQ ID NO: 100418 - DNA, 22 bp, Artificial sequence
  SiRNA target sequence
aacaaaaattaaaagatttata

SEQ ID NO: 100419 - DNA, 22 bp, Artificial sequence
  SiRNA target sequence
acaaaaattaaaagatttataa

SEQ ID NO: 100420 - DNA, 22 bp, Artificial sequence
  SiRNA target sequence
caaaaattaaaagatttataag

SEQ ID NO: 100421 - DNA, 22 bp, Artificial sequence
  SiRNA target sequence
aaaaattaaaagatttataaga

SEQ ID NO: 100422 - DNA, 22 bp, Artificial sequence
  SiRNA target sequence
aaaattaaaagatttataagac

SEQ ID NO: 100423 - DNA, 22 bp, Artificial sequence
  SiRNA target sequence
aaattaaaagatttataagacg

SEQ ID NO: 100424 - DNA, 22 bp, Artificial sequence
  SiRNA target sequence
aattaaaagatttataagacga

SEQ ID NO: 100425 - DNA, 22 bp, Artificial sequence
  SiRNA target sequence
attaaaagatttataagacgaa

SEQ ID NO: 100426 - DNA, 22 bp, Artificial sequence
  SiRNA target sequence
ttaaaagatttataagacgaat

SEQ ID NO: 100427 - DNA, 22 bp, Artificial sequence
  SiRNA target sequence
taaaagatttataagacgaatc

SEQ ID NO: 100428 - DNA, 22 bp, Artificial sequence
  SiRNA target sequence
aaaagatttataagacgaatcc

SEQ ID NO: 100429 - DNA, 22 bp, Artificial sequence
  SiRNA target sequence
aaagatttataagacgaatccc

SEQ ID NO: 100430 - DNA, 22 bp, Artificial sequence
  SiRNA target sequence
aagatttataagacgaatcccc

SEQ ID NO: 100431 - DNA, 22 bp, Artificial sequence
  SiRNA target sequence
agatttataagacgaatcccca

SEQ ID NO: 100432 - DNA, 22 bp, Artificial sequence
  SiRNA target sequence
gatttataagacgaatccccaa

SEQ ID NO: 100433 - DNA, 22 bp, Artificial sequence
  SiRNA target sequence
atttataagacgaatccccaag

SEQ ID NO: 100434 - DNA, 22 bp, Artificial sequence
  SiRNA target sequence
tttataagacgaatccccaagg

SEQ ID NO: 100435 - DNA, 22 bp, Artificial sequence
  SiRNA target sequence
ttataagacgaatccccaaggc

SEQ ID NO: 100436 - DNA, 22 bp, Artificial sequence
  SiRNA target sequence
tataagacgaatccccaaggcc

SEQ ID NO: 100437 - DNA, 22 bp, Artificial sequence
  SiRNA target sequence
ataagacgaatccccaaggcca

SEQ ID NO: 100438 - DNA, 22 bp, Artificial sequence
  SiRNA target sequence
taagacgaatccccaaggccaa

SEQ ID NO: 100439 - DNA, 22 bp, Artificial sequence
  SiRNA target sequence
aagacgaatccccaaggccaaa

SEQ ID NO: 100440 - DNA, 22 bp, Artificial sequence
  SiRNA target sequence
agacgaatccccaaggccaaat

SEQ ID NO: 100441 - DNA, 22 bp, Artificial sequence
  SiRNA target sequence
gacgaatccccaaggccaaata

SEQ ID NO: 100442 - DNA, 22 bp, Artificial sequence
  SiRNA target sequence
acgaatccccaaggccaaatac

SEQ ID NO: 100443 - DNA, 22 bp, Artificial sequence
  SiRNA target sequence
cgaatccccaaggccaaataca

SEQ ID NO: 100444 - DNA, 22 bp, Artificial sequence
  SiRNA target sequence
gaatccccaaggccaaatacag

SEQ ID NO: 100445 - DNA, 22 bp, Artificial sequence
  SiRNA target sequence
aatccccaaggccaaatacagc

SEQ ID NO: 100446 - DNA, 22 bp, Artificial sequence
  SiRNA target sequence
atccccaaggccaaatacagca

SEQ ID NO: 100447 - DNA, 22 bp, Artificial sequence
  SiRNA target sequence
tccccaaggccaaatacagcaa

SEQ ID NO: 100448 - DNA, 22 bp, Artificial sequence
  SiRNA target sequence
ccccaaggccaaatacagcaaa

SEQ ID NO: 100449 - DNA, 22 bp, Artificial sequence
  SiRNA target sequence
cccaaggccaaatacagcaaaa

SEQ ID NO: 100450 - DNA, 22 bp, Artificial sequence
  SiRNA target sequence
ccaaggccaaatacagcaaaat

SEQ ID NO: 100451 - DNA, 22 bp, Artificial sequence
  SiRNA target sequence
caaggccaaatacagcaaaatt

SEQ ID NO: 100452 - DNA, 22 bp, Artificial sequence
  SiRNA target sequence
aaggccaaatacagcaaaattt

SEQ ID NO: 100453 - DNA, 22 bp, Artificial sequence
  SiRNA target sequence
aggccaaatacagcaaaattta

SEQ ID NO: 100454 - DNA, 22 bp, Artificial sequence
  SiRNA target sequence
ggccaaatacagcaaaatttaa

SEQ ID NO: 100455 - DNA, 22 bp, Artificial sequence
  SiRNA target sequence
gccaaatacagcaaaatttaag

SEQ ID NO: 100456 - DNA, 22 bp, Artificial sequence
  SiRNA target sequence
ccaaatacagcaaaatttaagt

SEQ ID NO: 100457 - DNA, 22 bp, Artificial sequence
  SiRNA target sequence
caaatacagcaaaatttaagtg

SEQ ID NO: 100458 - DNA, 22 bp, Artificial sequence
  SiRNA target sequence
aaatacagcaaaatttaagtgt

SEQ ID NO: 100459 - DNA, 22 bp, Artificial sequence
  SiRNA target sequence
aatacagcaaaatttaagtgtt

SEQ ID NO: 100460 - DNA, 22 bp, Artificial sequence
  SiRNA target sequence
atacagcaaaatttaagtgttg

SEQ ID NO: 100461 - DNA, 22 bp, Artificial sequence
  SiRNA target sequence
tacagcaaaatttaagtgttgt

SEQ ID NO: 100462 - DNA, 22 bp, Artificial sequence
  SiRNA target sequence
acagcaaaatttaagtgttgta

SEQ ID NO: 100463 - DNA, 22 bp, Artificial sequence
  SiRNA target sequence
cagcaaaatttaagtgttgtaa

SEQ ID NO: 100464 - DNA, 22 bp, Artificial sequence
  SiRNA target sequence
agcaaaatttaagtgttgtaaa

SEQ ID NO: 100465 - DNA, 22 bp, Artificial sequence
  SiRNA target sequence
gcaaaatttaagtgttgtaaaa

SEQ ID NO: 100466 - DNA, 22 bp, Artificial sequence
  SiRNA target sequence
caaaatttaagtgttgtaaaaa

SEQ ID NO: 100467 - DNA, 22 bp, Artificial sequence
  SiRNA target sequence
aaaatttaagtgttgtaaaaaa

SEQ ID NO: 100468 - DNA, 22 bp, Artificial sequence
  SiRNA target sequence
aaatttaagtgttgtaaaaaat

SEQ ID NO: 100469 - DNA, 22 bp, Artificial sequence
  SiRNA target sequence
aatttaagtgttgtaaaaaatt

SEQ ID NO: 100470 - DNA, 22 bp, Artificial sequence
  SiRNA target sequence
atttaagtgttgtaaaaaattt

SEQ ID NO: 100471 - DNA, 22 bp, Artificial sequence
  SiRNA target sequence
tttaagtgttgtaaaaaatttg

SEQ ID NO: 100472 - DNA, 22 bp, Artificial sequence
  SiRNA target sequence
ttaagtgttgtaaaaaatttgt

SEQ ID NO: 100473 - DNA, 22 bp, Artificial sequence
  SiRNA target sequence
taagtgttgtaaaaaatttgta

SEQ ID NO: 100474 - DNA, 22 bp, Artificial sequence
  SiRNA target sequence
aagtgttgtaaaaaatttgtag

SEQ ID NO: 100475 - DNA, 22 bp, Artificial sequence
  SiRNA target sequence
agtgttgtaaaaaatttgtagg

SEQ ID NO: 100476 - DNA, 22 bp, Artificial sequence
  SiRNA target sequence
gtgttgtaaaaaatttgtaggc

SEQ ID NO: 100477 - DNA, 22 bp, Artificial sequence
  SiRNA target sequence
tgttgtaaaaaatttgtaggca

SEQ ID NO: 100478 - DNA, 22 bp, Artificial sequence
  SiRNA target sequence
gttgtaaaaaatttgtaggcag

SEQ ID NO: 100479 - DNA, 22 bp, Artificial sequence
  SiRNA target sequence
ttgtaaaaaatttgtaggcaga

SEQ ID NO: 100480 - DNA, 22 bp, Artificial sequence
  SiRNA target sequence
tgtaaaaaatttgtaggcagat

SEQ ID NO: 100481 - DNA, 22 bp, Artificial sequence
  SiRNA target sequence
gtaaaaaatttgtaggcagatt

SEQ ID NO: 100482 - DNA, 22 bp, Artificial sequence
  SiRNA target sequence
taaaaaatttgtaggcagattt

SEQ ID NO: 100483 - DNA, 22 bp, Artificial sequence
  SiRNA target sequence
aaaaaatttgtaggcagatttt

SEQ ID NO: 100484 - DNA, 22 bp, Artificial sequence
  SiRNA target sequence
aaaaatttgtaggcagattttt

SEQ ID NO: 100485 - DNA, 22 bp, Artificial sequence
  SiRNA target sequence
aaaatttgtaggcagatttttt

SEQ ID NO: 100486 - DNA, 22 bp, Artificial sequence
  SiRNA target sequence
aaatttgtaggcagattttttt

SEQ ID NO: 100487 - DNA, 22 bp, Artificial sequence
  SiRNA target sequence
aatttgtaggcagatttttttt

SEQ ID NO: 100488 - DNA, 22 bp, Artificial sequence
  SiRNA target sequence
atttgtaggcagattttttttg

SEQ ID NO: 100489 - DNA, 22 bp, Artificial sequence
  SiRNA target sequence
tttgtaggcagattttttttgc

SEQ ID NO: 100490 - DNA, 22 bp, Artificial sequence
  SiRNA target sequence
ttgtaggcagattttttttgcg

SEQ ID NO: 100491 - DNA, 22 bp, Artificial sequence
  SiRNA target sequence
tgtaggcagattttttttgcgc

SEQ ID NO: 100492 - DNA, 22 bp, Artificial sequence
  SiRNA target sequence
gtaggcagattttttttgcgca

SEQ ID NO: 100493 - DNA, 22 bp, Artificial sequence
  SiRNA target sequence
taggcagattttttttgcgcaa

SEQ ID NO: 100494 - DNA, 22 bp, Artificial sequence
  SiRNA target sequence
aggcagattttttttgcgcaaa

SEQ ID NO: 100495 - DNA, 22 bp, Artificial sequence
  SiRNA target sequence
ggcagattttttttgcgcaaaa

SEQ ID NO: 100496 - DNA, 22 bp, Artificial sequence
  SiRNA target sequence
gcagattttttttgcgcaaaaa

SEQ ID NO: 100497 - DNA, 22 bp, Artificial sequence
  SiRNA target sequence
cagattttttttgcgcaaaaat

SEQ ID NO: 100498 - DNA, 22 bp, Artificial sequence
  SiRNA target sequence
agattttttttgcgcaaaaatt

SEQ ID NO: 100499 - DNA, 22 bp, Artificial sequence
  SiRNA target sequence
gattttttttgcgcaaaaattt

SEQ ID NO: 100500 - DNA, 22 bp, Artificial sequence
  SiRNA target sequence
attttttttgcgcaaaaatttc

SEQ ID NO: 100501 - DNA, 22 bp, Artificial sequence
  SiRNA target sequence
ttttttttgcgcaaaaatttcc

SEQ ID NO: 100502 - DNA, 22 bp, Artificial sequence
  SiRNA target sequence
tttttttgcgcaaaaatttcca

SEQ ID NO: 100503 - DNA, 22 bp, Artificial sequence
  SiRNA target sequence
ttttttgcgcaaaaatttccaa

SEQ ID NO: 100504 - DNA, 22 bp, Artificial sequence
  SiRNA target sequence
tttttgcgcaaaaatttccaaa

SEQ ID NO: 100505 - DNA, 22 bp, Artificial sequence
  SiRNA target sequence
ttttgcgcaaaaatttccaaaa

SEQ ID NO: 100506 - DNA, 22 bp, Artificial sequence
  SiRNA target sequence
tttgcgcaaaaatttccaaaat

SEQ ID NO: 100507 - DNA, 22 bp, Artificial sequence
  SiRNA target sequence
ttgcgcaaaaatttccaaaatt

SEQ ID NO: 100508 - DNA, 22 bp, Artificial sequence
  SiRNA target sequence
tgcgcaaaaatttccaaaattt

SEQ ID NO: 100509 - DNA, 22 bp, Artificial sequence
  SiRNA target sequence
gcgcaaaaatttccaaaattta

SEQ ID NO: 100510 - DNA, 22 bp, Artificial sequence
  SiRNA target sequence
cgcaaaaatttccaaaatttag

SEQ ID NO: 100511 - DNA, 22 bp, Artificial sequence
  SiRNA target sequence
gcaaaaatttccaaaatttagt

SEQ ID NO: 100512 - DNA, 22 bp, Artificial sequence
  SiRNA target sequence
caaaaatttccaaaatttagtc

SEQ ID NO: 100513 - DNA, 22 bp, Artificial sequence
  SiRNA target sequence
aaaaatttccaaaatttagtca

SEQ ID NO: 100514 - DNA, 22 bp, Artificial sequence
  SiRNA target sequence
aaaatttccaaaatttagtcat

SEQ ID NO: 100515 - DNA, 22 bp, Artificial sequence
  SiRNA target sequence
aaatttccaaaatttagtcatg

SEQ ID NO: 100516 - DNA, 22 bp, Artificial sequence
  SiRNA target sequence
aatttccaaaatttagtcatgt

SEQ ID NO: 100517 - DNA, 22 bp, Artificial sequence
  SiRNA target sequence
atttccaaaatttagtcatgtt

SEQ ID NO: 100518 - DNA, 22 bp, Artificial sequence
  SiRNA target sequence
tttccaaaatttagtcatgtta

SEQ ID NO: 100519 - DNA, 22 bp, Artificial sequence
  SiRNA target sequence
ttccaaaatttagtcatgttaa

SEQ ID NO: 100520 - DNA, 22 bp, Artificial sequence
  SiRNA target sequence
tccaaaatttagtcatgttaaa

SEQ ID NO: 100521 - DNA, 22 bp, Artificial sequence
  SiRNA target sequence
ccaaaatttagtcatgttaaaa

SEQ ID NO: 100522 - DNA, 22 bp, Artificial sequence
  SiRNA target sequence
caaaatttagtcatgttaaaag

SEQ ID NO: 100523 - DNA, 22 bp, Artificial sequence
  SiRNA target sequence
aaaatttagtcatgttaaaagg

SEQ ID NO: 100524 - DNA, 22 bp, Artificial sequence
  SiRNA target sequence
aaatttagtcatgttaaaaggt

SEQ ID NO: 100525 - DNA, 22 bp, Artificial sequence
  SiRNA target sequence
aatttagtcatgttaaaaggtt

SEQ ID NO: 100526 - DNA, 22 bp, Artificial sequence
  SiRNA target sequence
atttagtcatgttaaaaggttc

SEQ ID NO: 100527 - DNA, 22 bp, Artificial sequence
  SiRNA target sequence
tttagtcatgttaaaaggttca

SEQ ID NO: 100528 - DNA, 22 bp, Artificial sequence
  SiRNA target sequence
ttagtcatgttaaaaggttcag

SEQ ID NO: 100529 - DNA, 22 bp, Artificial sequence
  SiRNA target sequence
tagtcatgttaaaaggttcaga

SEQ ID NO: 100530 - DNA, 22 bp, Artificial sequence
  SiRNA target sequence
agtcatgttaaaaggttcagaa

SEQ ID NO: 100531 - DNA, 22 bp, Artificial sequence
  SiRNA target sequence
gtcatgttaaaaggttcagaac

SEQ ID NO: 100532 - DNA, 22 bp, Artificial sequence
  SiRNA target sequence
tcatgttaaaaggttcagaacc

SEQ ID NO: 100533 - DNA, 22 bp, Artificial sequence
  SiRNA target sequence
catgttaaaaggttcagaacca

SEQ ID NO: 100534 - DNA, 22 bp, Artificial sequence
  SiRNA target sequence
atgttaaaaggttcagaaccat

SEQ ID NO: 100535 - DNA, 22 bp, Artificial sequence
  SiRNA target sequence
tgttaaaaggttcagaaccatt

SEQ ID NO: 100536 - DNA, 22 bp, Artificial sequence
  SiRNA target sequence
gttaaaaggttcagaaccattc

SEQ ID NO: 100537 - DNA, 22 bp, Artificial sequence
  SiRNA target sequence
ttaaaaggttcagaaccattcc

SEQ ID NO: 100538 - DNA, 22 bp, Artificial sequence
  SiRNA target sequence
taaaaggttcagaaccattccc

SEQ ID NO: 100539 - DNA, 22 bp, Artificial sequence
  SiRNA target sequence
aaaaggttcagaaccattccca

SEQ ID NO: 100540 - DNA, 22 bp, Artificial sequence
  SiRNA target sequence
aaaggttcagaaccattcccat

SEQ ID NO: 100541 - DNA, 22 bp, Artificial sequence
  SiRNA target sequence
aaggttcagaaccattcccatg

SEQ ID NO: 100542 - DNA, 22 bp, Artificial sequence
  SiRNA target sequence
aggttcagaaccattcccatga

SEQ ID NO: 100543 - DNA, 22 bp, Artificial sequence
  SiRNA target sequence
ggttcagaaccattcccatgag

SEQ ID NO: 100544 - DNA, 22 bp, Artificial sequence
  SiRNA target sequence
gttcagaaccattcccatgagt

SEQ ID NO: 100545 - DNA, 22 bp, Artificial sequence
  SiRNA target sequence
ttcagaaccattcccatgagtc

SEQ ID NO: 100546 - DNA, 22 bp, Artificial sequence
  SiRNA target sequence
tcagaaccattcccatgagtcg

SEQ ID NO: 100547 - DNA, 22 bp, Artificial sequence
  SiRNA target sequence
cagaaccattcccatgagtcga

SEQ ID NO: 100548 - DNA, 22 bp, Artificial sequence
  SiRNA target sequence
agaaccattcccatgagtcgaa

SEQ ID NO: 100549 - DNA, 22 bp, Artificial sequence
  SiRNA target sequence
gaaccattcccatgagtcgaac

SEQ ID NO: 100550 - DNA, 22 bp, Artificial sequence
  SiRNA target sequence
aaccattcccatgagtcgaaca

SEQ ID NO: 100551 - DNA, 22 bp, Artificial sequence
  SiRNA target sequence
accattcccatgagtcgaacat

SEQ ID NO: 100552 - DNA, 22 bp, Artificial sequence
  SiRNA target sequence
ccattcccatgagtcgaacata

SEQ ID NO: 100553 - DNA, 22 bp, Artificial sequence
  SiRNA target sequence
cattcccatgagtcgaacatac

SEQ ID NO: 100554 - DNA, 22 bp, Artificial sequence
  SiRNA target sequence
attcccatgagtcgaacataca

SEQ ID NO: 100555 - DNA, 22 bp, Artificial sequence
  SiRNA target sequence
ttcccatgagtcgaacatacaa

SEQ ID NO: 100556 - DNA, 22 bp, Artificial sequence
  SiRNA target sequence
tcccatgagtcgaacatacaaa

SEQ ID NO: 100557 - DNA, 22 bp, Artificial sequence
  SiRNA target sequence
cccatgagtcgaacatacaaat

SEQ ID NO: 100558 - DNA, 22 bp, Artificial sequence
  SiRNA target sequence
ccatgagtcgaacatacaaata

SEQ ID NO: 100559 - DNA, 22 bp, Artificial sequence
  SiRNA target sequence
catgagtcgaacatacaaatat

SEQ ID NO: 100560 - DNA, 22 bp, Artificial sequence
  SiRNA target sequence
atgagtcgaacatacaaatata

SEQ ID NO: 100561 - DNA, 22 bp, Artificial sequence
  SiRNA target sequence
tgagtcgaacatacaaatataa

SEQ ID NO: 100562 - DNA, 22 bp, Artificial sequence
  SiRNA target sequence
gagtcgaacatacaaatataat

SEQ ID NO: 100563 - DNA, 22 bp, Artificial sequence
  SiRNA target sequence
agtcgaacatacaaatataatc

SEQ ID NO: 100564 - DNA, 22 bp, Artificial sequence
  SiRNA target sequence
gtcgaacatacaaatataatca

SEQ ID NO: 100565 - DNA, 22 bp, Artificial sequence
  SiRNA target sequence
tcgaacatacaaatataatcat

SEQ ID NO: 100566 - DNA, 22 bp, Artificial sequence
  SiRNA target sequence
cgaacatacaaatataatcata

SEQ ID NO: 100567 - DNA, 22 bp, Artificial sequence
  SiRNA target sequence
gaacatacaaatataatcatat

SEQ ID NO: 100568 - DNA, 22 bp, Artificial sequence
  SiRNA target sequence
aacatacaaatataatcatatc

SEQ ID NO: 100569 - DNA, 22 bp, Artificial sequence
  SiRNA target sequence
acatacaaatataatcatatca

SEQ ID NO: 100570 - DNA, 22 bp, Artificial sequence
  SiRNA target sequence
catacaaatataatcatatcaa

SEQ ID NO: 100571 - DNA, 22 bp, Artificial sequence
  SiRNA target sequence
atacaaatataatcatatcaat

SEQ ID NO: 100572 - DNA, 22 bp, Artificial sequence
  SiRNA target sequence
tacaaatataatcatatcaata

SEQ ID NO: 100573 - DNA, 22 bp, Artificial sequence
  SiRNA target sequence
acaaatataatcatatcaatat

SEQ ID NO: 100574 - DNA, 22 bp, Artificial sequence
  SiRNA target sequence
caaatataatcatatcaatatc

SEQ ID NO: 100575 - DNA, 22 bp, Artificial sequence
  SiRNA target sequence
aaatataatcatatcaatatct

SEQ ID NO: 100576 - DNA, 22 bp, Artificial sequence
  SiRNA target sequence
aatataatcatatcaatatcta

SEQ ID NO: 100577 - DNA, 22 bp, Artificial sequence
  SiRNA target sequence
atataatcatatcaatatctaa

SEQ ID NO: 100578 - DNA, 22 bp, Artificial sequence
  SiRNA target sequence
tataatcatatcaatatctaat

SEQ ID NO: 100579 - DNA, 22 bp, Artificial sequence
  SiRNA target sequence
ataatcatatcaatatctaata

SEQ ID NO: 100580 - DNA, 22 bp, Artificial sequence
  SiRNA target sequence
taatcatatcaatatctaatat

SEQ ID NO: 100581 - DNA, 22 bp, Artificial sequence
  SiRNA target sequence
aatcatatcaatatctaatatt

SEQ ID NO: 100582 - DNA, 22 bp, Artificial sequence
  SiRNA target sequence
atcatatcaatatctaatattt

SEQ ID NO: 100583 - DNA, 22 bp, Artificial sequence
  SiRNA target sequence
tcatatcaatatctaatatttt

SEQ ID NO: 100584 - DNA, 22 bp, Artificial sequence
  SiRNA target sequence
catatcaatatctaatattttt

SEQ ID NO: 100585 - DNA, 22 bp, Artificial sequence
  SiRNA target sequence
atatcaatatctaatatttttt

SEQ ID NO: 100586 - DNA, 22 bp, Artificial sequence
  SiRNA target sequence
tatcaatatctaatattttttc

SEQ ID NO: 100587 - DNA, 22 bp, Artificial sequence
  SiRNA target sequence
atcaatatctaatattttttcg

SEQ ID NO: 100588 - DNA, 22 bp, Artificial sequence
  SiRNA target sequence
tcaatatctaatattttttcga

SEQ ID NO: 100589 - DNA, 22 bp, Artificial sequence
  SiRNA target sequence
caatatctaatattttttcgaa

SEQ ID NO: 100590 - DNA, 22 bp, Artificial sequence
  SiRNA target sequence
aatatctaatattttttcgaaa

SEQ ID NO: 100591 - DNA, 22 bp, Artificial sequence
  SiRNA target sequence
atatctaatattttttcgaaat

SEQ ID NO: 100592 - DNA, 22 bp, Artificial sequence
  SiRNA target sequence
tatctaatattttttcgaaatc

SEQ ID NO: 100593 - DNA, 22 bp, Artificial sequence
  SiRNA target sequence
atctaatattttttcgaaatca

SEQ ID NO: 100594 - DNA, 22 bp, Artificial sequence
  SiRNA target sequence
tctaatattttttcgaaatcaa

SEQ ID NO: 100595 - DNA, 22 bp, Artificial sequence
  SiRNA target sequence
ctaatattttttcgaaatcaaa

SEQ ID NO: 100596 - DNA, 22 bp, Artificial sequence
  SiRNA target sequence
taatattttttcgaaatcaaaa

SEQ ID NO: 100597 - DNA, 22 bp, Artificial sequence
  SiRNA target sequence
aatattttttcgaaatcaaaac

SEQ ID NO: 100598 - DNA, 22 bp, Artificial sequence
  SiRNA target sequence
atattttttcgaaatcaaaact

SEQ ID NO: 100599 - DNA, 22 bp, Artificial sequence
  SiRNA target sequence
tattttttcgaaatcaaaactg

SEQ ID NO: 100600 - DNA, 22 bp, Artificial sequence
  SiRNA target sequence
attttttcgaaatcaaaactgt

SEQ ID NO: 100601 - DNA, 22 bp, Artificial sequence
  SiRNA target sequence
ttttttcgaaatcaaaactgtc

SEQ ID NO: 100602 - DNA, 22 bp, Artificial sequence
  SiRNA target sequence
tttttcgaaatcaaaactgtcc

SEQ ID NO: 100603 - DNA, 22 bp, Artificial sequence
  SiRNA target sequence
ttttcgaaatcaaaactgtcca

SEQ ID NO: 100604 - DNA, 22 bp, Artificial sequence
  SiRNA target sequence
tttcgaaatcaaaactgtccat

SEQ ID NO: 100605 - DNA, 22 bp, Artificial sequence
  SiRNA target sequence
ttcgaaatcaaaactgtccata

SEQ ID NO: 100606 - DNA, 22 bp, Artificial sequence
  SiRNA target sequence
tcgaaatcaaaactgtccatat

SEQ ID NO: 100607 - DNA, 22 bp, Artificial sequence
  SiRNA target sequence
cgaaatcaaaactgtccatatc

SEQ ID NO: 100608 - DNA, 22 bp, Artificial sequence
  SiRNA target sequence
gaaatcaaaactgtccatatct

SEQ ID NO: 100609 - DNA, 22 bp, Artificial sequence
  SiRNA target sequence
aaatcaaaactgtccatatcta

SEQ ID NO: 100610 - DNA, 22 bp, Artificial sequence
  SiRNA target sequence
aatcaaaactgtccatatctaa

SEQ ID NO: 100611 - DNA, 22 bp, Artificial sequence
  SiRNA target sequence
atcaaaactgtccatatctaaa

SEQ ID NO: 100612 - DNA, 22 bp, Artificial sequence
  SiRNA target sequence
tcaaaactgtccatatctaaag

SEQ ID NO: 100613 - DNA, 22 bp, Artificial sequence
  SiRNA target sequence
caaaactgtccatatctaaagt

SEQ ID NO: 100614 - DNA, 22 bp, Artificial sequence
  SiRNA target sequence
aaaactgtccatatctaaagta

SEQ ID NO: 100615 - DNA, 22 bp, Artificial sequence
  SiRNA target sequence
aaactgtccatatctaaagtaa

SEQ ID NO: 100616 - DNA, 22 bp, Artificial sequence
  SiRNA target sequence
aactgtccatatctaaagtaaa

SEQ ID NO: 100617 - DNA, 22 bp, Artificial sequence
  SiRNA target sequence
actgtccatatctaaagtaaaa

SEQ ID NO: 100618 - DNA, 22 bp, Artificial sequence
  SiRNA target sequence
ctgtccatatctaaagtaaaat

SEQ ID NO: 100619 - DNA, 22 bp, Artificial sequence
  SiRNA target sequence
tgtccatatctaaagtaaaatc

SEQ ID NO: 100620 - DNA, 22 bp, Artificial sequence
  SiRNA target sequence
gtccatatctaaagtaaaatct

SEQ ID NO: 100621 - DNA, 22 bp, Artificial sequence
  SiRNA target sequence
tccatatctaaagtaaaatctg

SEQ ID NO: 100622 - DNA, 22 bp, Artificial sequence
  SiRNA target sequence
ccatatctaaagtaaaatctgt

SEQ ID NO: 100623 - DNA, 22 bp, Artificial sequence
  SiRNA target sequence
catatctaaagtaaaatctgtt

SEQ ID NO: 100624 - DNA, 22 bp, Artificial sequence
  SiRNA target sequence
atatctaaagtaaaatctgttg

SEQ ID NO: 100625 - DNA, 22 bp, Artificial sequence
  SiRNA target sequence
tatctaaagtaaaatctgttgg

SEQ ID NO: 100626 - DNA, 22 bp, Artificial sequence
  SiRNA target sequence
atctaaagtaaaatctgttgga

SEQ ID NO: 100627 - DNA, 22 bp, Artificial sequence
  SiRNA target sequence
tctaaagtaaaatctgttggaa

SEQ ID NO: 100628 - DNA, 22 bp, Artificial sequence
  SiRNA target sequence
ctaaagtaaaatctgttggaag

SEQ ID NO: 100629 - DNA, 22 bp, Artificial sequence
  SiRNA target sequence
taaagtaaaatctgttggaagc

SEQ ID NO: 100630 - DNA, 22 bp, Artificial sequence
  SiRNA target sequence
aaagtaaaatctgttggaagca

SEQ ID NO: 100631 - DNA, 22 bp, Artificial sequence
  SiRNA target sequence
aagtaaaatctgttggaagcaa

SEQ ID NO: 100632 - DNA, 22 bp, Artificial sequence
  SiRNA target sequence
agtaaaatctgttggaagcaat

SEQ ID NO: 100633 - DNA, 22 bp, Artificial sequence
  SiRNA target sequence
gtaaaatctgttggaagcaatt

SEQ ID NO: 100634 - DNA, 22 bp, Artificial sequence
  SiRNA target sequence
taaaatctgttggaagcaattc

SEQ ID NO: 100635 - DNA, 22 bp, Artificial sequence
  SiRNA target sequence
aaaatctgttggaagcaattct

SEQ ID NO: 100636 - DNA, 22 bp, Artificial sequence
  SiRNA target sequence
aaatctgttggaagcaattctt

SEQ ID NO: 100637 - DNA, 22 bp, Artificial sequence
  SiRNA target sequence
aatctgttggaagcaattcttt

SEQ ID NO: 100638 - DNA, 22 bp, Artificial sequence
  SiRNA target sequence
atctgttggaagcaattcttta

SEQ ID NO: 100639 - DNA, 22 bp, Artificial sequence
  SiRNA target sequence
tctgttggaagcaattctttat

SEQ ID NO: 100640 - DNA, 22 bp, Artificial sequence
  SiRNA target sequence
ctgttggaagcaattctttatc

SEQ ID NO: 100641 - DNA, 22 bp, Artificial sequence
  SiRNA target sequence
tgttggaagcaattctttatca

SEQ ID NO: 100642 - DNA, 22 bp, Artificial sequence
  SiRNA target sequence
gttggaagcaattctttatcaa

SEQ ID NO: 100643 - DNA, 22 bp, Artificial sequence
  SiRNA target sequence
ttggaagcaattctttatcaac

SEQ ID NO: 100644 - DNA, 22 bp, Artificial sequence
  SiRNA target sequence
tggaagcaattctttatcaacg

SEQ ID NO: 100645 - DNA, 22 bp, Artificial sequence
  SiRNA target sequence
ggaagcaattctttatcaacgt

SEQ ID NO: 100646 - DNA, 22 bp, Artificial sequence
  SiRNA target sequence
gaagcaattctttatcaacgtt

SEQ ID NO: 100647 - DNA, 22 bp, Artificial sequence
  SiRNA target sequence
aagcaattctttatcaacgtta

SEQ ID NO: 100648 - DNA, 22 bp, Artificial sequence
  SiRNA target sequence
agcaattctttatcaacgttat

SEQ ID NO: 100649 - DNA, 22 bp, Artificial sequence
  SiRNA target sequence
gcaattctttatcaacgttata

SEQ ID NO: 100650 - DNA, 22 bp, Artificial sequence
  SiRNA target sequence
caattctttatcaacgttataa

SEQ ID NO: 100651 - DNA, 22 bp, Artificial sequence
  SiRNA target sequence
aattctttatcaacgttataaa

SEQ ID NO: 100652 - DNA, 22 bp, Artificial sequence
  SiRNA target sequence
attctttatcaacgttataaat

SEQ ID NO: 100653 - DNA, 22 bp, Artificial sequence
  SiRNA target sequence
ttctttatcaacgttataaatc

SEQ ID NO: 100654 - DNA, 22 bp, Artificial sequence
  SiRNA target sequence
tctttatcaacgttataaatca

SEQ ID NO: 100655 - DNA, 22 bp, Artificial sequence
  SiRNA target sequence
ctttatcaacgttataaatcaa

SEQ ID NO: 100656 - DNA, 22 bp, Artificial sequence
  SiRNA target sequence
tttatcaacgttataaatcaaa

SEQ ID NO: 100657 - DNA, 22 bp, Artificial sequence
  SiRNA target sequence
ttatcaacgttataaatcaaat

SEQ ID NO: 100658 - DNA, 22 bp, Artificial sequence
  SiRNA target sequence
tatcaacgttataaatcaaatc

SEQ ID NO: 100659 - DNA, 22 bp, Artificial sequence
  SiRNA target sequence
atcaacgttataaatcaaatct

SEQ ID NO: 100660 - DNA, 22 bp, Artificial sequence
  SiRNA target sequence
tcaacgttataaatcaaatctt

SEQ ID NO: 100661 - DNA, 22 bp, Artificial sequence
  SiRNA target sequence
caacgttataaatcaaatcttt

SEQ ID NO: 100662 - DNA, 22 bp, Artificial sequence
  SiRNA target sequence
aacgttataaatcaaatcttta

SEQ ID NO: 100663 - DNA, 22 bp, Artificial sequence
  SiRNA target sequence
acgttataaatcaaatctttat

SEQ ID NO: 100664 - DNA, 22 bp, Artificial sequence
  SiRNA target sequence
cgttataaatcaaatctttatt

SEQ ID NO: 100665 - DNA, 22 bp, Artificial sequence
  SiRNA target sequence
gttataaatcaaatctttattg

SEQ ID NO: 100666 - DNA, 22 bp, Artificial sequence
  SiRNA target sequence
ttataaatcaaatctttattgt

SEQ ID NO: 100667 - DNA, 22 bp, Artificial sequence
  SiRNA target sequence
tataaatcaaatctttattgta

SEQ ID NO: 100668 - DNA, 22 bp, Artificial sequence
  SiRNA target sequence
ataaatcaaatctttattgtat

SEQ ID NO: 100669 - DNA, 22 bp, Artificial sequence
  SiRNA target sequence
taaatcaaatctttattgtatc

SEQ ID NO: 100670 - DNA, 22 bp, Artificial sequence
  SiRNA target sequence
aaatcaaatctttattgtatcc

SEQ ID NO: 100671 - DNA, 22 bp, Artificial sequence
  SiRNA target sequence
aatcaaatctttattgtatccg

SEQ ID NO: 100672 - DNA, 22 bp, Artificial sequence
  SiRNA target sequence
atcaaatctttattgtatccgt

SEQ ID NO: 100673 - DNA, 22 bp, Artificial sequence
  SiRNA target sequence
tcaaatctttattgtatccgta

SEQ ID NO: 100674 - DNA, 22 bp, Artificial sequence
  SiRNA target sequence
caaatctttattgtatccgtat

SEQ ID NO: 100675 - DNA, 22 bp, Artificial sequence
  SiRNA target sequence
aaatctttattgtatccgtata

SEQ ID NO: 100676 - DNA, 22 bp, Artificial sequence
  SiRNA target sequence
aatctttattgtatccgtatag

SEQ ID NO: 100677 - DNA, 22 bp, Artificial sequence
  SiRNA target sequence
atctttattgtatccgtatagt

SEQ ID NO: 100678 - DNA, 22 bp, Artificial sequence
  SiRNA target sequence
tctttattgtatccgtatagta

SEQ ID NO: 100679 - DNA, 22 bp, Artificial sequence
  SiRNA target sequence
ctttattgtatccgtatagtat

SEQ ID NO: 100680 - DNA, 22 bp, Artificial sequence
  SiRNA target sequence
tttattgtatccgtatagtata

SEQ ID NO: 100681 - DNA, 22 bp, Artificial sequence
  SiRNA target sequence
ttattgtatccgtatagtataa

SEQ ID NO: 100682 - DNA, 22 bp, Artificial sequence
  SiRNA target sequence
tattgtatccgtatagtataac

SEQ ID NO: 100683 - DNA, 22 bp, Artificial sequence
  SiRNA target sequence
attgtatccgtatagtataaca

SEQ ID NO: 100684 - DNA, 22 bp, Artificial sequence
  SiRNA target sequence
ttgtatccgtatagtataacat

SEQ ID NO: 100685 - DNA, 22 bp, Artificial sequence
  SiRNA target sequence
tgtatccgtatagtataacatt

SEQ ID NO: 100686 - DNA, 22 bp, Artificial sequence
  SiRNA target sequence
gtatccgtatagtataacattt

SEQ ID NO: 100687 - DNA, 22 bp, Artificial sequence
  SiRNA target sequence
tatccgtatagtataacatttt

SEQ ID NO: 100688 - DNA, 22 bp, Artificial sequence
  SiRNA target sequence
atccgtatagtataacattttg

SEQ ID NO: 100689 - DNA, 22 bp, Artificial sequence
  SiRNA target sequence
tccgtatagtataacattttga

SEQ ID NO: 100690 - DNA, 22 bp, Artificial sequence
  SiRNA target sequence
ccgtatagtataacattttgaa

SEQ ID NO: 100691 - DNA, 22 bp, Artificial sequence
  SiRNA target sequence
cgtatagtataacattttgaat

SEQ ID NO: 100692 - DNA, 22 bp, Artificial sequence
  SiRNA target sequence
gtatagtataacattttgaata

SEQ ID NO: 100693 - DNA, 22 bp, Artificial sequence
  SiRNA target sequence
tatagtataacattttgaataa

SEQ ID NO: 100694 - DNA, 22 bp, Artificial sequence
  SiRNA target sequence
atagtataacattttgaataag

SEQ ID NO: 100695 - DNA, 22 bp, Artificial sequence
  SiRNA target sequence
tagtataacattttgaataagt

SEQ ID NO: 100696 - DNA, 22 bp, Artificial sequence
  SiRNA target sequence
agtataacattttgaataagtt

SEQ ID NO: 100697 - DNA, 22 bp, Artificial sequence
  SiRNA target sequence
gtataacattttgaataagttt

SEQ ID NO: 100698 - DNA, 22 bp, Artificial sequence
  SiRNA target sequence
tataacattttgaataagttta

SEQ ID NO: 100699 - DNA, 22 bp, Artificial sequence
  SiRNA target sequence
ataacattttgaataagtttag

SEQ ID NO: 100700 - DNA, 22 bp, Artificial sequence
  SiRNA target sequence
taacattttgaataagtttagc

SEQ ID NO: 100701 - DNA, 22 bp, Artificial sequence
  SiRNA target sequence
aacattttgaataagtttagca

SEQ ID NO: 100702 - DNA, 22 bp, Artificial sequence
  SiRNA target sequence
acattttgaataagtttagcaa

SEQ ID NO: 100703 - DNA, 22 bp, Artificial sequence
  SiRNA target sequence
cattttgaataagtttagcaat

SEQ ID NO: 100704 - DNA, 22 bp, Artificial sequence
  SiRNA target sequence
attttgaataagtttagcaata

SEQ ID NO: 100705 - DNA, 22 bp, Artificial sequence
  SiRNA target sequence
ttttgaataagtttagcaatat

SEQ ID NO: 100706 - DNA, 22 bp, Artificial sequence
  SiRNA target sequence
tttgaataagtttagcaatatg

SEQ ID NO: 100707 - DNA, 22 bp, Artificial sequence
  SiRNA target sequence
ttgaataagtttagcaatatgt

SEQ ID NO: 100708 - DNA, 22 bp, Artificial sequence
  SiRNA target sequence
tgaataagtttagcaatatgta

SEQ ID NO: 100709 - DNA, 22 bp, Artificial sequence
  SiRNA target sequence
gaataagtttagcaatatgtat

SEQ ID NO: 100710 - DNA, 22 bp, Artificial sequence
  SiRNA target sequence
aataagtttagcaatatgtata

SEQ ID NO: 100711 - DNA, 22 bp, Artificial sequence
  SiRNA target sequence
ataagtttagcaatatgtatag

SEQ ID NO: 100712 - DNA, 22 bp, Artificial sequence
  SiRNA target sequence
taagtttagcaatatgtataga

SEQ ID NO: 100713 - DNA, 22 bp, Artificial sequence
  SiRNA target sequence
aagtttagcaatatgtatagaa

SEQ ID NO: 100714 - DNA, 22 bp, Artificial sequence
  SiRNA target sequence
agtttagcaatatgtatagaat

SEQ ID NO: 100715 - DNA, 22 bp, Artificial sequence
  SiRNA target sequence
gtttagcaatatgtatagaatt

SEQ ID NO: 100716 - DNA, 22 bp, Artificial sequence
  SiRNA target sequence
tttagcaatatgtatagaattt

SEQ ID NO: 100717 - DNA, 22 bp, Artificial sequence
  SiRNA target sequence
ttagcaatatgtatagaatttc

SEQ ID NO: 100718 - DNA, 22 bp, Artificial sequence
  SiRNA target sequence
tagcaatatgtatagaatttcc

SEQ ID NO: 100719 - DNA, 22 bp, Artificial sequence
  SiRNA target sequence
agcaatatgtatagaatttcct

SEQ ID NO: 100720 - DNA, 22 bp, Artificial sequence
  SiRNA target sequence
gcaatatgtatagaatttcctg

SEQ ID NO: 100721 - DNA, 22 bp, Artificial sequence
  SiRNA target sequence
caatatgtatagaatttcctgt

SEQ ID NO: 100722 - DNA, 22 bp, Artificial sequence
  SiRNA target sequence
aatatgtatagaatttcctgtt

SEQ ID NO: 100723 - DNA, 22 bp, Artificial sequence
  SiRNA target sequence
atatgtatagaatttcctgttt

SEQ ID NO: 100724 - DNA, 22 bp, Artificial sequence
  SiRNA target sequence
tatgtatagaatttcctgtttg

SEQ ID NO: 100725 - DNA, 22 bp, Artificial sequence
  SiRNA target sequence
atgtatagaatttcctgtttgg

SEQ ID NO: 100726 - DNA, 22 bp, Artificial sequence
  SiRNA target sequence
tgtatagaatttcctgtttggg

SEQ ID NO: 100727 - DNA, 22 bp, Artificial sequence
  SiRNA target sequence
gtatagaatttcctgtttggga

SEQ ID NO: 100728 - DNA, 22 bp, Artificial sequence
  SiRNA target sequence
tatagaatttcctgtttgggag

SEQ ID NO: 100729 - DNA, 22 bp, Artificial sequence
  SiRNA target sequence
atagaatttcctgtttgggagc

SEQ ID NO: 100730 - DNA, 22 bp, Artificial sequence
  SiRNA target sequence
tagaatttcctgtttgggagcc

SEQ ID NO: 100731 - DNA, 22 bp, Artificial sequence
  SiRNA target sequence
agaatttcctgtttgggagcca

SEQ ID NO: 100732 - DNA, 22 bp, Artificial sequence
  SiRNA target sequence
gaatttcctgtttgggagccat

SEQ ID NO: 100733 - DNA, 22 bp, Artificial sequence
  SiRNA target sequence
aatttcctgtttgggagccata

SEQ ID NO: 100734 - DNA, 22 bp, Artificial sequence
  SiRNA target sequence
atttcctgtttgggagccatat

SEQ ID NO: 100735 - DNA, 22 bp, Artificial sequence
  SiRNA target sequence
tttcctgtttgggagccatata

SEQ ID NO: 100736 - DNA, 22 bp, Artificial sequence
  SiRNA target sequence
ttcctgtttgggagccatataa

SEQ ID NO: 100737 - DNA, 22 bp, Artificial sequence
  SiRNA target sequence
tcctgtttgggagccatataag

SEQ ID NO: 100738 - DNA, 22 bp, Artificial sequence
  SiRNA target sequence
cctgtttgggagccatataaga

SEQ ID NO: 100739 - DNA, 22 bp, Artificial sequence
  SiRNA target sequence
ctgtttgggagccatataagat

SEQ ID NO: 100740 - DNA, 22 bp, Artificial sequence
  SiRNA target sequence
tgtttgggagccatataagatt

SEQ ID NO: 100741 - DNA, 22 bp, Artificial sequence
  SiRNA target sequence
gtttgggagccatataagatta

SEQ ID NO: 100742 - DNA, 22 bp, Artificial sequence
  SiRNA target sequence
tttgggagccatataagattat

SEQ ID NO: 100743 - DNA, 22 bp, Artificial sequence
  SiRNA target sequence
ttgggagccatataagattatc

SEQ ID NO: 100744 - DNA, 22 bp, Artificial sequence
  SiRNA target sequence
tgggagccatataagattatca

SEQ ID NO: 100745 - DNA, 22 bp, Artificial sequence
  SiRNA target sequence
gggagccatataagattatcat

SEQ ID NO: 100746 - DNA, 23 bp, Artificial sequence
  SiRNA target sequence
ttaccaagtttctgcctgaaaat

SEQ ID NO: 100747 - DNA, 23 bp, Artificial sequence
  SiRNA target sequence
taccaagtttctgcctgaaaata

SEQ ID NO: 100748 - DNA, 23 bp, Artificial sequence
  SiRNA target sequence
accaagtttctgcctgaaaatat

SEQ ID NO: 100749 - DNA, 23 bp, Artificial sequence
  SiRNA target sequence
ccaagtttctgcctgaaaatata

SEQ ID NO: 100750 - DNA, 23 bp, Artificial sequence
  SiRNA target sequence
caagtttctgcctgaaaatatat

SEQ ID NO: 100751 - DNA, 23 bp, Artificial sequence
  SiRNA target sequence
aagtttctgcctgaaaatatatt

SEQ ID NO: 100752 - DNA, 23 bp, Artificial sequence
  SiRNA target sequence
agtttctgcctgaaaatatattt

SEQ ID NO: 100753 - DNA, 23 bp, Artificial sequence
  SiRNA target sequence
gtttctgcctgaaaatatatttt

SEQ ID NO: 100754 - DNA, 23 bp, Artificial sequence
  SiRNA target sequence
tttctgcctgaaaatatattttc

SEQ ID NO: 100755 - DNA, 23 bp, Artificial sequence
  SiRNA target sequence
ttctgcctgaaaatatattttct

SEQ ID NO: 100756 - DNA, 23 bp, Artificial sequence
  SiRNA target sequence
tctgcctgaaaatatattttctt

SEQ ID NO: 100757 - DNA, 23 bp, Artificial sequence
  SiRNA target sequence
ctgcctgaaaatatattttcttt

SEQ ID NO: 100758 - DNA, 23 bp, Artificial sequence
  SiRNA target sequence
tgcctgaaaatatattttctttt

SEQ ID NO: 100759 - DNA, 23 bp, Artificial sequence
  SiRNA target sequence
gcctgaaaatatattttcttttt

SEQ ID NO: 100760 - DNA, 23 bp, Artificial sequence
  SiRNA target sequence
cctgaaaatatattttcttttta

SEQ ID NO: 100761 - DNA, 23 bp, Artificial sequence
  SiRNA target sequence
ctgaaaatatattttctttttat

SEQ ID NO: 100762 - DNA, 23 bp, Artificial sequence
  SiRNA target sequence
tgaaaatatattttctttttata

SEQ ID NO: 100763 - DNA, 23 bp, Artificial sequence
  SiRNA target sequence
gaaaatatattttctttttataa

SEQ ID NO: 100764 - DNA, 23 bp, Artificial sequence
  SiRNA target sequence
aaaatatattttctttttataaa

SEQ ID NO: 100765 - DNA, 23 bp, Artificial sequence
  SiRNA target sequence
aaatatattttctttttataaat

SEQ ID NO: 100766 - DNA, 23 bp, Artificial sequence
  SiRNA target sequence
aatatattttctttttataaata

SEQ ID NO: 100767 - DNA, 23 bp, Artificial sequence
  SiRNA target sequence
atatattttctttttataaatat

SEQ ID NO: 100768 - DNA, 23 bp, Artificial sequence
  SiRNA target sequence
tatattttctttttataaatatc

SEQ ID NO: 100769 - DNA, 23 bp, Artificial sequence
  SiRNA target sequence
atattttctttttataaatatct

SEQ ID NO: 100770 - DNA, 23 bp, Artificial sequence
  SiRNA target sequence
tattttctttttataaatatcta

SEQ ID NO: 100771 - DNA, 23 bp, Artificial sequence
  SiRNA target sequence
attttctttttataaatatctaa

SEQ ID NO: 100772 - DNA, 23 bp, Artificial sequence
  SiRNA target sequence
ttttctttttataaatatctaat

SEQ ID NO: 100773 - DNA, 23 bp, Artificial sequence
  SiRNA target sequence
tttctttttataaatatctaata

SEQ ID NO: 100774 - DNA, 23 bp, Artificial sequence
  SiRNA target sequence
ttctttttataaatatctaataa

SEQ ID NO: 100775 - DNA, 23 bp, Artificial sequence
  SiRNA target sequence
tctttttataaatatctaataac

SEQ ID NO: 100776 - DNA, 23 bp, Artificial sequence
  SiRNA target sequence
ctttttataaatatctaataaca

SEQ ID NO: 100777 - DNA, 23 bp, Artificial sequence
  SiRNA target sequence
tttttataaatatctaataacat

SEQ ID NO: 100778 - DNA, 23 bp, Artificial sequence
  SiRNA target sequence
ttttataaatatctaataacatt

SEQ ID NO: 100779 - DNA, 23 bp, Artificial sequence
  SiRNA target sequence
tttataaatatctaataacattt

SEQ ID NO: 100780 - DNA, 23 bp, Artificial sequence
  SiRNA target sequence
ttataaatatctaataacatttt

SEQ ID NO: 100781 - DNA, 23 bp, Artificial sequence
  SiRNA target sequence
tataaatatctaataacattttt

SEQ ID NO: 100782 - DNA, 23 bp, Artificial sequence
  SiRNA target sequence
ataaatatctaataacatttttt

SEQ ID NO: 100783 - DNA, 23 bp, Artificial sequence
  SiRNA target sequence
taaatatctaataacattttttc

SEQ ID NO: 100784 - DNA, 23 bp, Artificial sequence
  SiRNA target sequence
aaatatctaataacattttttca

SEQ ID NO: 100785 - DNA, 23 bp, Artificial sequence
  SiRNA target sequence
aatatctaataacattttttcaa

SEQ ID NO: 100786 - DNA, 23 bp, Artificial sequence
  SiRNA target sequence
atatctaataacattttttcaat

SEQ ID NO: 100787 - DNA, 23 bp, Artificial sequence
  SiRNA target sequence
tatctaataacattttttcaata

SEQ ID NO: 100788 - DNA, 23 bp, Artificial sequence
  SiRNA target sequence
atctaataacattttttcaataa

SEQ ID NO: 100789 - DNA, 23 bp, Artificial sequence
  SiRNA target sequence
tctaataacattttttcaataat

SEQ ID NO: 100790 - DNA, 23 bp, Artificial sequence
  SiRNA target sequence
ctaataacattttttcaataata

SEQ ID NO: 100791 - DNA, 23 bp, Artificial sequence
  SiRNA target sequence
taataacattttttcaataatat

SEQ ID NO: 100792 - DNA, 23 bp, Artificial sequence
  SiRNA target sequence
aataacattttttcaataatatt

SEQ ID NO: 100793 - DNA, 23 bp, Artificial sequence
  SiRNA target sequence
ataacattttttcaataatatta

SEQ ID NO: 100794 - DNA, 23 bp, Artificial sequence
  SiRNA target sequence
taacattttttcaataatattat

SEQ ID NO: 100795 - DNA, 23 bp, Artificial sequence
  SiRNA target sequence
aacattttttcaataatattatt

SEQ ID NO: 100796 - DNA, 23 bp, Artificial sequence
  SiRNA target sequence
acattttttcaataatattatta

SEQ ID NO: 100797 - DNA, 23 bp, Artificial sequence
  SiRNA target sequence
cattttttcaataatattattaa

SEQ ID NO: 100798 - DNA, 23 bp, Artificial sequence
  SiRNA target sequence
attttttcaataatattattaag

SEQ ID NO: 100799 - DNA, 23 bp, Artificial sequence
  SiRNA target sequence
ttttttcaataatattattaagt

SEQ ID NO: 100800 - DNA, 23 bp, Artificial sequence
  SiRNA target sequence
tttttcaataatattattaagtc

SEQ ID NO: 100801 - DNA, 23 bp, Artificial sequence
  SiRNA target sequence
ttttcaataatattattaagtct

SEQ ID NO: 100802 - DNA, 23 bp, Artificial sequence
  SiRNA target sequence
tttcaataatattattaagtcta

SEQ ID NO: 100803 - DNA, 23 bp, Artificial sequence
  SiRNA target sequence
ttcaataatattattaagtctag

SEQ ID NO: 100804 - DNA, 23 bp, Artificial sequence
  SiRNA target sequence
tcaataatattattaagtctaga

SEQ ID NO: 100805 - DNA, 23 bp, Artificial sequence
  SiRNA target sequence
caataatattattaagtctagaa

SEQ ID NO: 100806 - DNA, 23 bp, Artificial sequence
  SiRNA target sequence
aataatattattaagtctagaat

SEQ ID NO: 100807 - DNA, 23 bp, Artificial sequence
  SiRNA target sequence
ataatattattaagtctagaatt

SEQ ID NO: 100808 - DNA, 23 bp, Artificial sequence
  SiRNA target sequence
taatattattaagtctagaattt

SEQ ID NO: 100809 - DNA, 23 bp, Artificial sequence
  SiRNA target sequence
aatattattaagtctagaatttc

SEQ ID NO: 100810 - DNA, 23 bp, Artificial sequence
  SiRNA target sequence
atattattaagtctagaatttcc

SEQ ID NO: 100811 - DNA, 23 bp, Artificial sequence
  SiRNA target sequence
tattattaagtctagaatttcca

SEQ ID NO: 100812 - DNA, 23 bp, Artificial sequence
  SiRNA target sequence
attattaagtctagaatttccac

SEQ ID NO: 100813 - DNA, 23 bp, Artificial sequence
  SiRNA target sequence
ttattaagtctagaatttccact

SEQ ID NO: 100814 - DNA, 23 bp, Artificial sequence
  SiRNA target sequence
tattaagtctagaatttccactt

SEQ ID NO: 100815 - DNA, 23 bp, Artificial sequence
  SiRNA target sequence
attaagtctagaatttccactta

SEQ ID NO: 100816 - DNA, 23 bp, Artificial sequence
  SiRNA target sequence
ttaagtctagaatttccacttac

SEQ ID NO: 100817 - DNA, 23 bp, Artificial sequence
  SiRNA target sequence
taagtctagaatttccacttaca

SEQ ID NO: 100818 - DNA, 23 bp, Artificial sequence
  SiRNA target sequence
aagtctagaatttccacttacaa

SEQ ID NO: 100819 - DNA, 23 bp, Artificial sequence
  SiRNA target sequence
agtctagaatttccacttacaaa

SEQ ID NO: 100820 - DNA, 23 bp, Artificial sequence
  SiRNA target sequence
gtctagaatttccacttacaaat

SEQ ID NO: 100821 - DNA, 23 bp, Artificial sequence
  SiRNA target sequence
tctagaatttccacttacaaata

SEQ ID NO: 100822 - DNA, 23 bp, Artificial sequence
  SiRNA target sequence
ctagaatttccacttacaaatat

SEQ ID NO: 100823 - DNA, 23 bp, Artificial sequence
  SiRNA target sequence
tagaatttccacttacaaatatt

SEQ ID NO: 100824 - DNA, 23 bp, Artificial sequence
  SiRNA target sequence
agaatttccacttacaaatatta

SEQ ID NO: 100825 - DNA, 23 bp, Artificial sequence
  SiRNA target sequence
gaatttccacttacaaatattaa

SEQ ID NO: 100826 - DNA, 23 bp, Artificial sequence
  SiRNA target sequence
aatttccacttacaaatattaac

SEQ ID NO: 100827 - DNA, 23 bp, Artificial sequence
  SiRNA target sequence
atttccacttacaaatattaacc

SEQ ID NO: 100828 - DNA, 23 bp, Artificial sequence
  SiRNA target sequence
tttccacttacaaatattaacca

SEQ ID NO: 100829 - DNA, 23 bp, Artificial sequence
  SiRNA target sequence
ttccacttacaaatattaaccaa

SEQ ID NO: 100830 - DNA, 23 bp, Artificial sequence
  SiRNA target sequence
tccacttacaaatattaaccaat

SEQ ID NO: 100831 - DNA, 23 bp, Artificial sequence
  SiRNA target sequence
ccacttacaaatattaaccaatc

SEQ ID NO: 100832 - DNA, 23 bp, Artificial sequence
  SiRNA target sequence
cacttacaaatattaaccaatca

SEQ ID NO: 100833 - DNA, 23 bp, Artificial sequence
  SiRNA target sequence
acttacaaatattaaccaatcat

SEQ ID NO: 100834 - DNA, 23 bp, Artificial sequence
  SiRNA target sequence
cttacaaatattaaccaatcatc

SEQ ID NO: 100835 - DNA, 23 bp, Artificial sequence
  SiRNA target sequence
ttacaaatattaaccaatcatca

SEQ ID NO: 100836 - DNA, 23 bp, Artificial sequence
  SiRNA target sequence
tacaaatattaaccaatcatcaa

SEQ ID NO: 100837 - DNA, 23 bp, Artificial sequence
  SiRNA target sequence
acaaatattaaccaatcatcaat

SEQ ID NO: 100838 - DNA, 23 bp, Artificial sequence
  SiRNA target sequence
caaatattaaccaatcatcaata

SEQ ID NO: 100839 - DNA, 23 bp, Artificial sequence
  SiRNA target sequence
aaatattaaccaatcatcaatat

SEQ ID NO: 100840 - DNA, 23 bp, Artificial sequence
  SiRNA target sequence
aatattaaccaatcatcaatatt

SEQ ID NO: 100841 - DNA, 23 bp, Artificial sequence
  SiRNA target sequence
atattaaccaatcatcaatattt

SEQ ID NO: 100842 - DNA, 23 bp, Artificial sequence
  SiRNA target sequence
tattaaccaatcatcaatatttt

SEQ ID NO: 100843 - DNA, 23 bp, Artificial sequence
  SiRNA target sequence
attaaccaatcatcaatattttc

SEQ ID NO: 100844 - DNA, 23 bp, Artificial sequence
  SiRNA target sequence
ttaaccaatcatcaatattttct

SEQ ID NO: 100845 - DNA, 23 bp, Artificial sequence
  SiRNA target sequence
taaccaatcatcaatattttcta

SEQ ID NO: 100846 - DNA, 23 bp, Artificial sequence
  SiRNA target sequence
aaccaatcatcaatattttctag

SEQ ID NO: 100847 - DNA, 23 bp, Artificial sequence
  SiRNA target sequence
accaatcatcaatattttctagc

SEQ ID NO: 100848 - DNA, 23 bp, Artificial sequence
  SiRNA target sequence
ccaatcatcaatattttctagcc

SEQ ID NO: 100849 - DNA, 23 bp, Artificial sequence
  SiRNA target sequence
caatcatcaatattttctagccc

SEQ ID NO: 100850 - DNA, 23 bp, Artificial sequence
  SiRNA target sequence
aatcatcaatattttctagccct

SEQ ID NO: 100851 - DNA, 23 bp, Artificial sequence
  SiRNA target sequence
atcatcaatattttctagccctt

SEQ ID NO: 100852 - DNA, 23 bp, Artificial sequence
  SiRNA target sequence
tcatcaatattttctagcccttt

SEQ ID NO: 100853 - DNA, 23 bp, Artificial sequence
  SiRNA target sequence
catcaatattttctagccctttt

SEQ ID NO: 100854 - DNA, 23 bp, Artificial sequence
  SiRNA target sequence
atcaatattttctagccctttta

SEQ ID NO: 100855 - DNA, 23 bp, Artificial sequence
  SiRNA target sequence
tcaatattttctagcccttttat

SEQ ID NO: 100856 - DNA, 23 bp, Artificial sequence
  SiRNA target sequence
caatattttctagcccttttata

SEQ ID NO: 100857 - DNA, 23 bp, Artificial sequence
  SiRNA target sequence
aatattttctagcccttttatag

SEQ ID NO: 100858 - DNA, 23 bp, Artificial sequence
  SiRNA target sequence
atattttctagcccttttatagt

SEQ ID NO: 100859 - DNA, 23 bp, Artificial sequence
  SiRNA target sequence
tattttctagcccttttatagtc

SEQ ID NO: 100860 - DNA, 23 bp, Artificial sequence
  SiRNA target sequence
attttctagcccttttatagtct

SEQ ID NO: 100861 - DNA, 23 bp, Artificial sequence
  SiRNA target sequence
ttttctagcccttttatagtctt

SEQ ID NO: 100862 - DNA, 23 bp, Artificial sequence
  SiRNA target sequence
tttctagcccttttatagtctta

SEQ ID NO: 100863 - DNA, 23 bp, Artificial sequence
  SiRNA target sequence
ttctagcccttttatagtcttat

SEQ ID NO: 100864 - DNA, 23 bp, Artificial sequence
  SiRNA target sequence
tctagcccttttatagtcttata

SEQ ID NO: 100865 - DNA, 23 bp, Artificial sequence
  SiRNA target sequence
ctagcccttttatagtcttataa

SEQ ID NO: 100866 - DNA, 23 bp, Artificial sequence
  SiRNA target sequence
tagcccttttatagtcttataaa

SEQ ID NO: 100867 - DNA, 23 bp, Artificial sequence
  SiRNA target sequence
agcccttttatagtcttataaat

SEQ ID NO: 100868 - DNA, 23 bp, Artificial sequence
  SiRNA target sequence
gcccttttatagtcttataaata

SEQ ID NO: 100869 - DNA, 23 bp, Artificial sequence
  SiRNA target sequence
cccttttatagtcttataaatat

SEQ ID NO: 100870 - DNA, 23 bp, Artificial sequence
  SiRNA target sequence
ccttttatagtcttataaatatc

SEQ ID NO: 100871 - DNA, 23 bp, Artificial sequence
  SiRNA target sequence
cttttatagtcttataaatatct

SEQ ID NO: 100872 - DNA, 23 bp, Artificial sequence
  SiRNA target sequence
ttttatagtcttataaatatctt

SEQ ID NO: 100873 - DNA, 23 bp, Artificial sequence
  SiRNA target sequence
tttatagtcttataaatatcttg

SEQ ID NO: 100874 - DNA, 23 bp, Artificial sequence
  SiRNA target sequence
ttatagtcttataaatatcttgt

SEQ ID NO: 100875 - DNA, 23 bp, Artificial sequence
  SiRNA target sequence
tatagtcttataaatatcttgta

SEQ ID NO: 100876 - DNA, 23 bp, Artificial sequence
  SiRNA target sequence
atagtcttataaatatcttgtat

SEQ ID NO: 100877 - DNA, 23 bp, Artificial sequence
  SiRNA target sequence
tagtcttataaatatcttgtatg

SEQ ID NO: 100878 - DNA, 23 bp, Artificial sequence
  SiRNA target sequence
agtcttataaatatcttgtatgt

SEQ ID NO: 100879 - DNA, 23 bp, Artificial sequence
  SiRNA target sequence
gtcttataaatatcttgtatgta

SEQ ID NO: 100880 - DNA, 23 bp, Artificial sequence
  SiRNA target sequence
tcttataaatatcttgtatgtat

SEQ ID NO: 100881 - DNA, 23 bp, Artificial sequence
  SiRNA target sequence
cttataaatatcttgtatgtatt

SEQ ID NO: 100882 - DNA, 23 bp, Artificial sequence
  SiRNA target sequence
ttataaatatcttgtatgtattt

SEQ ID NO: 100883 - DNA, 23 bp, Artificial sequence
  SiRNA target sequence
tataaatatcttgtatgtattta

SEQ ID NO: 100884 - DNA, 23 bp, Artificial sequence
  SiRNA target sequence
ataaatatcttgtatgtatttat

SEQ ID NO: 100885 - DNA, 23 bp, Artificial sequence
  SiRNA target sequence
taaatatcttgtatgtatttatt

SEQ ID NO: 100886 - DNA, 23 bp, Artificial sequence
  SiRNA target sequence
aaatatcttgtatgtatttatta

SEQ ID NO: 100887 - DNA, 23 bp, Artificial sequence
  SiRNA target sequence
aatatcttgtatgtatttattat

SEQ ID NO: 100888 - DNA, 23 bp, Artificial sequence
  SiRNA target sequence
atatcttgtatgtatttattatc

SEQ ID NO: 100889 - DNA, 23 bp, Artificial sequence
  SiRNA target sequence
tatcttgtatgtatttattatct

SEQ ID NO: 100890 - DNA, 23 bp, Artificial sequence
  SiRNA target sequence
atcttgtatgtatttattatctt

SEQ ID NO: 100891 - DNA, 23 bp, Artificial sequence
  SiRNA target sequence
tcttgtatgtatttattatcttc

SEQ ID NO: 100892 - DNA, 23 bp, Artificial sequence
  SiRNA target sequence
cttgtatgtatttattatcttcc

SEQ ID NO: 100893 - DNA, 23 bp, Artificial sequence
  SiRNA target sequence
ttgtatgtatttattatcttccc

SEQ ID NO: 100894 - DNA, 23 bp, Artificial sequence
  SiRNA target sequence
tgtatgtatttattatcttccct

SEQ ID NO: 100895 - DNA, 23 bp, Artificial sequence
  SiRNA target sequence
gtatgtatttattatcttccctt

SEQ ID NO: 100896 - DNA, 23 bp, Artificial sequence
  SiRNA target sequence
tatgtatttattatcttcccttg

SEQ ID NO: 100897 - DNA, 23 bp, Artificial sequence
  SiRNA target sequence
atgtatttattatcttcccttga

SEQ ID NO: 100898 - DNA, 23 bp, Artificial sequence
  SiRNA target sequence
tgtatttattatcttcccttgaa

SEQ ID NO: 100899 - DNA, 23 bp, Artificial sequence
  SiRNA target sequence
gtatttattatcttcccttgaaa

SEQ ID NO: 100900 - DNA, 23 bp, Artificial sequence
  SiRNA target sequence
tatttattatcttcccttgaaac

SEQ ID NO: 100901 - DNA, 23 bp, Artificial sequence
  SiRNA target sequence
atttattatcttcccttgaaaca

SEQ ID NO: 100902 - DNA, 23 bp, Artificial sequence
  SiRNA target sequence
tttattatcttcccttgaaacag

SEQ ID NO: 100903 - DNA, 23 bp, Artificial sequence
  SiRNA target sequence
ttattatcttcccttgaaacagc

SEQ ID NO: 100904 - DNA, 23 bp, Artificial sequence
  SiRNA target sequence
tattatcttcccttgaaacagcg

SEQ ID NO: 100905 - DNA, 23 bp, Artificial sequence
  SiRNA target sequence
attatcttcccttgaaacagcgg

SEQ ID NO: 100906 - DNA, 23 bp, Artificial sequence
  SiRNA target sequence
ttatcttcccttgaaacagcggg

SEQ ID NO: 100907 - DNA, 23 bp, Artificial sequence
  SiRNA target sequence
tatcttcccttgaaacagcgggg

SEQ ID NO: 100908 - DNA, 23 bp, Artificial sequence
  SiRNA target sequence
atcttcccttgaaacagcggggt

SEQ ID NO: 100909 - DNA, 23 bp, Artificial sequence
  SiRNA target sequence
tcttcccttgaaacagcggggta

SEQ ID NO: 100910 - DNA, 23 bp, Artificial sequence
  SiRNA target sequence
cttcccttgaaacagcggggtaa

SEQ ID NO: 100911 - DNA, 23 bp, Artificial sequence
  SiRNA target sequence
ttcccttgaaacagcggggtaaa

SEQ ID NO: 100912 - DNA, 23 bp, Artificial sequence
  SiRNA target sequence
tcccttgaaacagcggggtaaat

SEQ ID NO: 100913 - DNA, 23 bp, Artificial sequence
  SiRNA target sequence
cccttgaaacagcggggtaaatt

SEQ ID NO: 100914 - DNA, 23 bp, Artificial sequence
  SiRNA target sequence
ccttgaaacagcggggtaaattt

SEQ ID NO: 100915 - DNA, 23 bp, Artificial sequence
  SiRNA target sequence
cttgaaacagcggggtaaatttc

SEQ ID NO: 100916 - DNA, 23 bp, Artificial sequence
  SiRNA target sequence
ttgaaacagcggggtaaatttca

SEQ ID NO: 100917 - DNA, 23 bp, Artificial sequence
  SiRNA target sequence
tgaaacagcggggtaaatttcaa

SEQ ID NO: 100918 - DNA, 23 bp, Artificial sequence
  SiRNA target sequence
gaaacagcggggtaaatttcaat

SEQ ID NO: 100919 - DNA, 23 bp, Artificial sequence
  SiRNA target sequence
aaacagcggggtaaatttcaatg

SEQ ID NO: 100920 - DNA, 23 bp, Artificial sequence
  SiRNA target sequence
aacagcggggtaaatttcaatgc

SEQ ID NO: 100921 - DNA, 23 bp, Artificial sequence
  SiRNA target sequence
acagcggggtaaatttcaatgcc

SEQ ID NO: 100922 - DNA, 23 bp, Artificial sequence
  SiRNA target sequence
cagcggggtaaatttcaatgcct

SEQ ID NO: 100923 - DNA, 23 bp, Artificial sequence
  SiRNA target sequence
agcggggtaaatttcaatgcctt

SEQ ID NO: 100924 - DNA, 23 bp, Artificial sequence
  SiRNA target sequence
gcggggtaaatttcaatgccttt

SEQ ID NO: 100925 - DNA, 23 bp, Artificial sequence
  SiRNA target sequence
cggggtaaatttcaatgccttta

SEQ ID NO: 100926 - DNA, 23 bp, Artificial sequence
  SiRNA target sequence
ggggtaaatttcaatgcctttat

SEQ ID NO: 100927 - DNA, 23 bp, Artificial sequence
  SiRNA target sequence
gggtaaatttcaatgcctttatt

SEQ ID NO: 100928 - DNA, 23 bp, Artificial sequence
  SiRNA target sequence
ggtaaatttcaatgcctttattt

SEQ ID NO: 100929 - DNA, 23 bp, Artificial sequence
  SiRNA target sequence
gtaaatttcaatgcctttatttt

SEQ ID NO: 100930 - DNA, 23 bp, Artificial sequence
  SiRNA target sequence
taaatttcaatgcctttattttc

SEQ ID NO: 100931 - DNA, 23 bp, Artificial sequence
  SiRNA target sequence
aaatttcaatgcctttattttca

SEQ ID NO: 100932 - DNA, 23 bp, Artificial sequence
  SiRNA target sequence
aatttcaatgcctttattttcaa

SEQ ID NO: 100933 - DNA, 23 bp, Artificial sequence
  SiRNA target sequence
atttcaatgcctttattttcaaa

SEQ ID NO: 100934 - DNA, 23 bp, Artificial sequence
  SiRNA target sequence
tttcaatgcctttattttcaaac

SEQ ID NO: 100935 - DNA, 23 bp, Artificial sequence
  SiRNA target sequence
ttcaatgcctttattttcaaact

SEQ ID NO: 100936 - DNA, 23 bp, Artificial sequence
  SiRNA target sequence
tcaatgcctttattttcaaactc

SEQ ID NO: 100937 - DNA, 23 bp, Artificial sequence
  SiRNA target sequence
caatgcctttattttcaaactct

SEQ ID NO: 100938 - DNA, 23 bp, Artificial sequence
  SiRNA target sequence
aatgcctttattttcaaactctt

SEQ ID NO: 100939 - DNA, 23 bp, Artificial sequence
  SiRNA target sequence
atgcctttattttcaaactcttc

SEQ ID NO: 100940 - DNA, 23 bp, Artificial sequence
  SiRNA target sequence
tgcctttattttcaaactcttct

SEQ ID NO: 100941 - DNA, 23 bp, Artificial sequence
  SiRNA target sequence
gcctttattttcaaactcttctt

SEQ ID NO: 100942 - DNA, 23 bp, Artificial sequence
  SiRNA target sequence
cctttattttcaaactcttcttt

SEQ ID NO: 100943 - DNA, 23 bp, Artificial sequence
  SiRNA target sequence
ctttattttcaaactcttcttta

SEQ ID NO: 100944 - DNA, 23 bp, Artificial sequence
  SiRNA target sequence
tttattttcaaactcttctttat

SEQ ID NO: 100945 - DNA, 23 bp, Artificial sequence
  SiRNA target sequence
ttattttcaaactcttctttata

SEQ ID NO: 100946 - DNA, 23 bp, Artificial sequence
  SiRNA target sequence
tattttcaaactcttctttatat

SEQ ID NO: 100947 - DNA, 23 bp, Artificial sequence
  SiRNA target sequence
attttcaaactcttctttatata

SEQ ID NO: 100948 - DNA, 23 bp, Artificial sequence
  SiRNA target sequence
ttttcaaactcttctttatataa

SEQ ID NO: 100949 - DNA, 23 bp, Artificial sequence
  SiRNA target sequence
tttcaaactcttctttatataaa

SEQ ID NO: 100950 - DNA, 23 bp, Artificial sequence
  SiRNA target sequence
ttcaaactcttctttatataaaa

SEQ ID NO: 100951 - DNA, 23 bp, Artificial sequence
  SiRNA target sequence
tcaaactcttctttatataaaaa

SEQ ID NO: 100952 - DNA, 23 bp, Artificial sequence
  SiRNA target sequence
caaactcttctttatataaaaaa

SEQ ID NO: 100953 - DNA, 23 bp, Artificial sequence
  SiRNA target sequence
aaactcttctttatataaaaaat

SEQ ID NO: 100954 - DNA, 23 bp, Artificial sequence
  SiRNA target sequence
aactcttctttatataaaaaatc

SEQ ID NO: 100955 - DNA, 23 bp, Artificial sequence
  SiRNA target sequence
actcttctttatataaaaaatct

SEQ ID NO: 100956 - DNA, 23 bp, Artificial sequence
  SiRNA target sequence
ctcttctttatataaaaaatcta

SEQ ID NO: 100957 - DNA, 23 bp, Artificial sequence
  SiRNA target sequence
tcttctttatataaaaaatctac

SEQ ID NO: 100958 - DNA, 23 bp, Artificial sequence
  SiRNA target sequence
cttctttatataaaaaatctaca

SEQ ID NO: 100959 - DNA, 23 bp, Artificial sequence
  SiRNA target sequence
ttctttatataaaaaatctacat

SEQ ID NO: 100960 - DNA, 23 bp, Artificial sequence
  SiRNA target sequence
tctttatataaaaaatctacatc

SEQ ID NO: 100961 - DNA, 23 bp, Artificial sequence
  SiRNA target sequence
ctttatataaaaaatctacatct

SEQ ID NO: 100962 - DNA, 23 bp, Artificial sequence
  SiRNA target sequence
tttatataaaaaatctacatctc

SEQ ID NO: 100963 - DNA, 23 bp, Artificial sequence
  SiRNA target sequence
ttatataaaaaatctacatctct

SEQ ID NO: 100964 - DNA, 23 bp, Artificial sequence
  SiRNA target sequence
tatataaaaaatctacatctcta

SEQ ID NO: 100965 - DNA, 23 bp, Artificial sequence
  SiRNA target sequence
atataaaaaatctacatctctaa

SEQ ID NO: 100966 - DNA, 23 bp, Artificial sequence
  SiRNA target sequence
tataaaaaatctacatctctaaa

SEQ ID NO: 100967 - DNA, 23 bp, Artificial sequence
  SiRNA target sequence
ataaaaaatctacatctctaaat

SEQ ID NO: 100968 - DNA, 23 bp, Artificial sequence
  SiRNA target sequence
taaaaaatctacatctctaaatc

SEQ ID NO: 100969 - DNA, 23 bp, Artificial sequence
  SiRNA target sequence
aaaaaatctacatctctaaatct

SEQ ID NO: 100970 - DNA, 23 bp, Artificial sequence
  SiRNA target sequence
aaaaatctacatctctaaatcta

SEQ ID NO: 100971 - DNA, 23 bp, Artificial sequence
  SiRNA target sequence
aaaatctacatctctaaatctaa

SEQ ID NO: 100972 - DNA, 23 bp, Artificial sequence
  SiRNA target sequence
aaatctacatctctaaatctaaa

SEQ ID NO: 100973 - DNA, 23 bp, Artificial sequence
  SiRNA target sequence
aatctacatctctaaatctaaaa

SEQ ID NO: 100974 - DNA, 23 bp, Artificial sequence
  SiRNA target sequence
atctacatctctaaatctaaaac

SEQ ID NO: 100975 - DNA, 23 bp, Artificial sequence
  SiRNA target sequence
tctacatctctaaatctaaaacc

SEQ ID NO: 100976 - DNA, 23 bp, Artificial sequence
  SiRNA target sequence
ctacatctctaaatctaaaacca

SEQ ID NO: 100977 - DNA, 23 bp, Artificial sequence
  SiRNA target sequence
tacatctctaaatctaaaaccat

SEQ ID NO: 100978 - DNA, 23 bp, Artificial sequence
  SiRNA target sequence
acatctctaaatctaaaaccata

SEQ ID NO: 100979 - DNA, 23 bp, Artificial sequence
  SiRNA target sequence
catctctaaatctaaaaccatat

SEQ ID NO: 100980 - DNA, 23 bp, Artificial sequence
  SiRNA target sequence
atctctaaatctaaaaccatata

SEQ ID NO: 100981 - DNA, 23 bp, Artificial sequence
  SiRNA target sequence
tctctaaatctaaaaccatataa

SEQ ID NO: 100982 - DNA, 23 bp, Artificial sequence
  SiRNA target sequence
ctctaaatctaaaaccatataat

SEQ ID NO: 100983 - DNA, 23 bp, Artificial sequence
  SiRNA target sequence
tctaaatctaaaaccatataata

SEQ ID NO: 100984 - DNA, 23 bp, Artificial sequence
  SiRNA target sequence
ctaaatctaaaaccatataataa

SEQ ID NO: 100985 - DNA, 23 bp, Artificial sequence
  SiRNA target sequence
taaatctaaaaccatataataaa

SEQ ID NO: 100986 - DNA, 23 bp, Artificial sequence
  SiRNA target sequence
aaatctaaaaccatataataaaa

SEQ ID NO: 100987 - DNA, 23 bp, Artificial sequence
  SiRNA target sequence
aatctaaaaccatataataaaat

SEQ ID NO: 100988 - DNA, 23 bp, Artificial sequence
  SiRNA target sequence
atctaaaaccatataataaaata

SEQ ID NO: 100989 - DNA, 23 bp, Artificial sequence
  SiRNA target sequence
tctaaaaccatataataaaataa

SEQ ID NO: 100990 - DNA, 23 bp, Artificial sequence
  SiRNA target sequence
ctaaaaccatataataaaataac

SEQ ID NO: 100991 - DNA, 23 bp, Artificial sequence
  SiRNA target sequence
taaaaccatataataaaataact

SEQ ID NO: 100992 - DNA, 23 bp, Artificial sequence
  SiRNA target sequence
aaaaccatataataaaataactt

SEQ ID NO: 100993 - DNA, 23 bp, Artificial sequence
  SiRNA target sequence
aaaccatataataaaataacttt

SEQ ID NO: 100994 - DNA, 23 bp, Artificial sequence
  SiRNA target sequence
aaccatataataaaataactttt

SEQ ID NO: 100995 - DNA, 23 bp, Artificial sequence
  SiRNA target sequence
accatataataaaataacttttt

SEQ ID NO: 100996 - DNA, 23 bp, Artificial sequence
  SiRNA target sequence
ccatataataaaataactttttt

SEQ ID NO: 100997 - DNA, 23 bp, Artificial sequence
  SiRNA target sequence
catataataaaataactttttta

SEQ ID NO: 100998 - DNA, 23 bp, Artificial sequence
  SiRNA target sequence
atataataaaataacttttttaa

SEQ ID NO: 100999 - DNA, 23 bp, Artificial sequence
  SiRNA target sequence
tataataaaataacttttttaaa

SEQ ID NO: 101000 - DNA, 23 bp, Artificial sequence
  SiRNA target sequence
ataataaaataacttttttaaaa

SEQ ID NO: 101001 - DNA, 23 bp, Artificial sequence
  SiRNA target sequence
taataaaataacttttttaaaaa

SEQ ID NO: 101002 - DNA, 23 bp, Artificial sequence
  SiRNA target sequence
aataaaataacttttttaaaaaa

SEQ ID NO: 101003 - DNA, 23 bp, Artificial sequence
  SiRNA target sequence
ataaaataacttttttaaaaaaa

SEQ ID NO: 101004 - DNA, 23 bp, Artificial sequence
  SiRNA target sequence
taaaataacttttttaaaaaaat

SEQ ID NO: 101005 - DNA, 23 bp, Artificial sequence
  SiRNA target sequence
aaaataacttttttaaaaaaatt

SEQ ID NO: 101006 - DNA, 23 bp, Artificial sequence
  SiRNA target sequence
aaataacttttttaaaaaaattt

SEQ ID NO: 101007 - DNA, 23 bp, Artificial sequence
  SiRNA target sequence
aataacttttttaaaaaaattta

SEQ ID NO: 101008 - DNA, 23 bp, Artificial sequence
  SiRNA target sequence
ataacttttttaaaaaaatttaa

SEQ ID NO: 101009 - DNA, 23 bp, Artificial sequence
  SiRNA target sequence
taacttttttaaaaaaatttaaa

SEQ ID NO: 101010 - DNA, 23 bp, Artificial sequence
  SiRNA target sequence
aacttttttaaaaaaatttaaat

SEQ ID NO: 101011 - DNA, 23 bp, Artificial sequence
  SiRNA target sequence
acttttttaaaaaaatttaaatc

SEQ ID NO: 101012 - DNA, 23 bp, Artificial sequence
  SiRNA target sequence
cttttttaaaaaaatttaaatca

SEQ ID NO: 101013 - DNA, 23 bp, Artificial sequence
  SiRNA target sequence
ttttttaaaaaaatttaaatcag

SEQ ID NO: 101014 - DNA, 23 bp, Artificial sequence
  SiRNA target sequence
tttttaaaaaaatttaaatcaga

SEQ ID NO: 101015 - DNA, 23 bp, Artificial sequence
  SiRNA target sequence
ttttaaaaaaatttaaatcagaa

SEQ ID NO: 101016 - DNA, 23 bp, Artificial sequence
  SiRNA target sequence
tttaaaaaaatttaaatcagaat

SEQ ID NO: 101017 - DNA, 23 bp, Artificial sequence
  SiRNA target sequence
ttaaaaaaatttaaatcagaata

SEQ ID NO: 101018 - DNA, 23 bp, Artificial sequence
  SiRNA target sequence
taaaaaaatttaaatcagaatag

SEQ ID NO: 101019 - DNA, 23 bp, Artificial sequence
  SiRNA target sequence
aaaaaaatttaaatcagaatagt

SEQ ID NO: 101020 - DNA, 23 bp, Artificial sequence
  SiRNA target sequence
aaaaaatttaaatcagaatagta

SEQ ID NO: 101021 - DNA, 23 bp, Artificial sequence
  SiRNA target sequence
aaaaatttaaatcagaatagtaa

SEQ ID NO: 101022 - DNA, 23 bp, Artificial sequence
  SiRNA target sequence
aaaatttaaatcagaatagtaat

SEQ ID NO: 101023 - DNA, 23 bp, Artificial sequence
  SiRNA target sequence
aaatttaaatcagaatagtaatt

SEQ ID NO: 101024 - DNA, 23 bp, Artificial sequence
  SiRNA target sequence
aatttaaatcagaatagtaatta

SEQ ID NO: 101025 - DNA, 23 bp, Artificial sequence
  SiRNA target sequence
atttaaatcagaatagtaattaa

SEQ ID NO: 101026 - DNA, 23 bp, Artificial sequence
  SiRNA target sequence
tttaaatcagaatagtaattaac

SEQ ID NO: 101027 - DNA, 23 bp, Artificial sequence
  SiRNA target sequence
ttaaatcagaatagtaattaaca

SEQ ID NO: 101028 - DNA, 23 bp, Artificial sequence
  SiRNA target sequence
taaatcagaatagtaattaacaa

SEQ ID NO: 101029 - DNA, 23 bp, Artificial sequence
  SiRNA target sequence
aaatcagaatagtaattaacaaa

SEQ ID NO: 101030 - DNA, 23 bp, Artificial sequence
  SiRNA target sequence
aatcagaatagtaattaacaaat

SEQ ID NO: 101031 - DNA, 23 bp, Artificial sequence
  SiRNA target sequence
atcagaatagtaattaacaaatg

SEQ ID NO: 101032 - DNA, 23 bp, Artificial sequence
  SiRNA target sequence
tcagaatagtaattaacaaatgc

SEQ ID NO: 101033 - DNA, 23 bp, Artificial sequence
  SiRNA target sequence
cagaatagtaattaacaaatgcc

SEQ ID NO: 101034 - DNA, 23 bp, Artificial sequence
  SiRNA target sequence
agaatagtaattaacaaatgccc

SEQ ID NO: 101035 - DNA, 23 bp, Artificial sequence
  SiRNA target sequence
gaatagtaattaacaaatgccct

SEQ ID NO: 101036 - DNA, 23 bp, Artificial sequence
  SiRNA target sequence
aatagtaattaacaaatgccctg

SEQ ID NO: 101037 - DNA, 23 bp, Artificial sequence
  SiRNA target sequence
atagtaattaacaaatgccctgg

SEQ ID NO: 101038 - DNA, 23 bp, Artificial sequence
  SiRNA target sequence
tagtaattaacaaatgccctggg

SEQ ID NO: 101039 - DNA, 23 bp, Artificial sequence
  SiRNA target sequence
agtaattaacaaatgccctggga

SEQ ID NO: 101040 - DNA, 23 bp, Artificial sequence
  SiRNA target sequence
gtaattaacaaatgccctgggaa

SEQ ID NO: 101041 - DNA, 23 bp, Artificial sequence
  SiRNA target sequence
taattaacaaatgccctgggaag

SEQ ID NO: 101042 - DNA, 23 bp, Artificial sequence
  SiRNA target sequence
aattaacaaatgccctgggaagt

SEQ ID NO: 101043 - DNA, 23 bp, Artificial sequence
  SiRNA target sequence
attaacaaatgccctgggaagtg

SEQ ID NO: 101044 - DNA, 23 bp, Artificial sequence
  SiRNA target sequence
ttaacaaatgccctgggaagtgt

SEQ ID NO: 101045 - DNA, 23 bp, Artificial sequence
  SiRNA target sequence
taacaaatgccctgggaagtgta

SEQ ID NO: 101046 - DNA, 23 bp, Artificial sequence
  SiRNA target sequence
aacaaatgccctgggaagtgtaa

SEQ ID NO: 101047 - DNA, 23 bp, Artificial sequence
  SiRNA target sequence
acaaatgccctgggaagtgtaat

SEQ ID NO: 101048 - DNA, 23 bp, Artificial sequence
  SiRNA target sequence
caaatgccctgggaagtgtaata

SEQ ID NO: 101049 - DNA, 23 bp, Artificial sequence
  SiRNA target sequence
aaatgccctgggaagtgtaatac

SEQ ID NO: 101050 - DNA, 23 bp, Artificial sequence
  SiRNA target sequence
aatgccctgggaagtgtaatacc

SEQ ID NO: 101051 - DNA, 23 bp, Artificial sequence
  SiRNA target sequence
atgccctgggaagtgtaatacca

SEQ ID NO: 101052 - DNA, 23 bp, Artificial sequence
  SiRNA target sequence
tgccctgggaagtgtaataccag

SEQ ID NO: 101053 - DNA, 23 bp, Artificial sequence
  SiRNA target sequence
gccctgggaagtgtaataccagt

SEQ ID NO: 101054 - DNA, 23 bp, Artificial sequence
  SiRNA target sequence
ccctgggaagtgtaataccagta

SEQ ID NO: 101055 - DNA, 23 bp, Artificial sequence
  SiRNA target sequence
cctgggaagtgtaataccagtac

SEQ ID NO: 101056 - DNA, 23 bp, Artificial sequence
  SiRNA target sequence
ctgggaagtgtaataccagtacc

SEQ ID NO: 101057 - DNA, 23 bp, Artificial sequence
  SiRNA target sequence
tgggaagtgtaataccagtacca

SEQ ID NO: 101058 - DNA, 23 bp, Artificial sequence
  SiRNA target sequence
gggaagtgtaataccagtaccag

SEQ ID NO: 101059 - DNA, 23 bp, Artificial sequence
  SiRNA target sequence
ggaagtgtaataccagtaccagt

SEQ ID NO: 101060 - DNA, 23 bp, Artificial sequence
  SiRNA target sequence
gaagtgtaataccagtaccagtg

SEQ ID NO: 101061 - DNA, 23 bp, Artificial sequence
  SiRNA target sequence
aagtgtaataccagtaccagtgc

SEQ ID NO: 101062 - DNA, 23 bp, Artificial sequence
  SiRNA target sequence
agtgtaataccagtaccagtgca

SEQ ID NO: 101063 - DNA, 23 bp, Artificial sequence
  SiRNA target sequence
gtgtaataccagtaccagtgcac

SEQ ID NO: 101064 - DNA, 23 bp, Artificial sequence
  SiRNA target sequence
tgtaataccagtaccagtgcaca

SEQ ID NO: 101065 - DNA, 23 bp, Artificial sequence
  SiRNA target sequence
gtaataccagtaccagtgcacat

SEQ ID NO: 101066 - DNA, 23 bp, Artificial sequence
  SiRNA target sequence
taataccagtaccagtgcacata

SEQ ID NO: 101067 - DNA, 23 bp, Artificial sequence
  SiRNA target sequence
aataccagtaccagtgcacataa

SEQ ID NO: 101068 - DNA, 23 bp, Artificial sequence
  SiRNA target sequence
ataccagtaccagtgcacataaa

SEQ ID NO: 101069 - DNA, 23 bp, Artificial sequence
  SiRNA target sequence
taccagtaccagtgcacataaac

SEQ ID NO: 101070 - DNA, 23 bp, Artificial sequence
  SiRNA target sequence
accagtaccagtgcacataaaca

SEQ ID NO: 101071 - DNA, 23 bp, Artificial sequence
  SiRNA target sequence
ccagtaccagtgcacataaacaa

SEQ ID NO: 101072 - DNA, 23 bp, Artificial sequence
  SiRNA target sequence
cagtaccagtgcacataaacaaa

SEQ ID NO: 101073 - DNA, 23 bp, Artificial sequence
  SiRNA target sequence
agtaccagtgcacataaacaaaa

SEQ ID NO: 101074 - DNA, 23 bp, Artificial sequence
  SiRNA target sequence
gtaccagtgcacataaacaaaat

SEQ ID NO: 101075 - DNA, 23 bp, Artificial sequence
  SiRNA target sequence
taccagtgcacataaacaaaatc

SEQ ID NO: 101076 - DNA, 23 bp, Artificial sequence
  SiRNA target sequence
accagtgcacataaacaaaatct

SEQ ID NO: 101077 - DNA, 23 bp, Artificial sequence
  SiRNA target sequence
ccagtgcacataaacaaaatctt

SEQ ID NO: 101078 - DNA, 23 bp, Artificial sequence
  SiRNA target sequence
cagtgcacataaacaaaatcttt

SEQ ID NO: 101079 - DNA, 23 bp, Artificial sequence
  SiRNA target sequence
agtgcacataaacaaaatctttt

SEQ ID NO: 101080 - DNA, 23 bp, Artificial sequence
  SiRNA target sequence
gtgcacataaacaaaatcttttt

SEQ ID NO: 101081 - DNA, 23 bp, Artificial sequence
  SiRNA target sequence
tgcacataaacaaaatcttttta

SEQ ID NO: 101082 - DNA, 23 bp, Artificial sequence
  SiRNA target sequence
gcacataaacaaaatctttttac

SEQ ID NO: 101083 - DNA, 23 bp, Artificial sequence
  SiRNA target sequence
cacataaacaaaatctttttacc

SEQ ID NO: 101084 - DNA, 23 bp, Artificial sequence
  SiRNA target sequence
acataaacaaaatctttttacca

SEQ ID NO: 101085 - DNA, 23 bp, Artificial sequence
  SiRNA target sequence
cataaacaaaatctttttaccac

SEQ ID NO: 101086 - DNA, 23 bp, Artificial sequence
  SiRNA target sequence
ataaacaaaatctttttaccact

SEQ ID NO: 101087 - DNA, 23 bp, Artificial sequence
  SiRNA target sequence
taaacaaaatctttttaccacta

SEQ ID NO: 101088 - DNA, 23 bp, Artificial sequence
  SiRNA target sequence
aaacaaaatctttttaccactaa

SEQ ID NO: 101089 - DNA, 23 bp, Artificial sequence
  SiRNA target sequence
aacaaaatctttttaccactaaa

SEQ ID NO: 101090 - DNA, 23 bp, Artificial sequence
  SiRNA target sequence
acaaaatctttttaccactaaaa

SEQ ID NO: 101091 - DNA, 23 bp, Artificial sequence
  SiRNA target sequence
caaaatctttttaccactaaaat

SEQ ID NO: 101092 - DNA, 23 bp, Artificial sequence
  SiRNA target sequence
aaaatctttttaccactaaaatt

SEQ ID NO: 101093 - DNA, 23 bp, Artificial sequence
  SiRNA target sequence
aaatctttttaccactaaaatta

SEQ ID NO: 101094 - DNA, 23 bp, Artificial sequence
  SiRNA target sequence
aatctttttaccactaaaattaa

SEQ ID NO: 101095 - DNA, 23 bp, Artificial sequence
  SiRNA target sequence
atctttttaccactaaaattaag

SEQ ID NO: 101096 - DNA, 23 bp, Artificial sequence
  SiRNA target sequence
tctttttaccactaaaattaagt

SEQ ID NO: 101097 - DNA, 23 bp, Artificial sequence
  SiRNA target sequence
ctttttaccactaaaattaagtc

SEQ ID NO: 101098 - DNA, 23 bp, Artificial sequence
  SiRNA target sequence
tttttaccactaaaattaagtct

SEQ ID NO: 101099 - DNA, 23 bp, Artificial sequence
  SiRNA target sequence
ttttaccactaaaattaagtcta

SEQ ID NO: 101100 - DNA, 23 bp, Artificial sequence
  SiRNA target sequence
tttaccactaaaattaagtctat

SEQ ID NO: 101101 - DNA, 23 bp, Artificial sequence
  SiRNA target sequence
ttaccactaaaattaagtctatt

SEQ ID NO: 101102 - DNA, 23 bp, Artificial sequence
  SiRNA target sequence
taccactaaaattaagtctattt

SEQ ID NO: 101103 - DNA, 23 bp, Artificial sequence
  SiRNA target sequence
accactaaaattaagtctatttt

SEQ ID NO: 101104 - DNA, 23 bp, Artificial sequence
  SiRNA target sequence
ccactaaaattaagtctattttg

SEQ ID NO: 101105 - DNA, 23 bp, Artificial sequence
  SiRNA target sequence
cactaaaattaagtctattttgt

SEQ ID NO: 101106 - DNA, 23 bp, Artificial sequence
  SiRNA target sequence
actaaaattaagtctattttgta

SEQ ID NO: 101107 - DNA, 23 bp, Artificial sequence
  SiRNA target sequence
ctaaaattaagtctattttgtac

SEQ ID NO: 101108 - DNA, 23 bp, Artificial sequence
  SiRNA target sequence
taaaattaagtctattttgtact

SEQ ID NO: 101109 - DNA, 23 bp, Artificial sequence
  SiRNA target sequence
aaaattaagtctattttgtacta

SEQ ID NO: 101110 - DNA, 23 bp, Artificial sequence
  SiRNA target sequence
aaattaagtctattttgtactat

SEQ ID NO: 101111 - DNA, 23 bp, Artificial sequence
  SiRNA target sequence
aattaagtctattttgtactatg

SEQ ID NO: 101112 - DNA, 23 bp, Artificial sequence
  SiRNA target sequence
attaagtctattttgtactatgt

SEQ ID NO: 101113 - DNA, 23 bp, Artificial sequence
  SiRNA target sequence
ttaagtctattttgtactatgtt

SEQ ID NO: 101114 - DNA, 23 bp, Artificial sequence
  SiRNA target sequence
taagtctattttgtactatgtta

SEQ ID NO: 101115 - DNA, 23 bp, Artificial sequence
  SiRNA target sequence
aagtctattttgtactatgttaa

SEQ ID NO: 101116 - DNA, 23 bp, Artificial sequence
  SiRNA target sequence
agtctattttgtactatgttaac

SEQ ID NO: 101117 - DNA, 23 bp, Artificial sequence
  SiRNA target sequence
gtctattttgtactatgttaaca

SEQ ID NO: 101118 - DNA, 23 bp, Artificial sequence
  SiRNA target sequence
tctattttgtactatgttaacat

SEQ ID NO: 101119 - DNA, 23 bp, Artificial sequence
  SiRNA target sequence
ctattttgtactatgttaacatg

SEQ ID NO: 101120 - DNA, 23 bp, Artificial sequence
  SiRNA target sequence
tattttgtactatgttaacatga

SEQ ID NO: 101121 - DNA, 23 bp, Artificial sequence
  SiRNA target sequence
attttgtactatgttaacatgaa

SEQ ID NO: 101122 - DNA, 23 bp, Artificial sequence
  SiRNA target sequence
ttttgtactatgttaacatgaat

SEQ ID NO: 101123 - DNA, 23 bp, Artificial sequence
  SiRNA target sequence
tttgtactatgttaacatgaata

SEQ ID NO: 101124 - DNA, 23 bp, Artificial sequence
  SiRNA target sequence
ttgtactatgttaacatgaatag

SEQ ID NO: 101125 - DNA, 23 bp, Artificial sequence
  SiRNA target sequence
tgtactatgttaacatgaatagt

SEQ ID NO: 101126 - DNA, 23 bp, Artificial sequence
  SiRNA target sequence
gtactatgttaacatgaatagta

SEQ ID NO: 101127 - DNA, 23 bp, Artificial sequence
  SiRNA target sequence
tactatgttaacatgaatagtag

SEQ ID NO: 101128 - DNA, 23 bp, Artificial sequence
  SiRNA target sequence
actatgttaacatgaatagtaga

SEQ ID NO: 101129 - DNA, 23 bp, Artificial sequence
  SiRNA target sequence
ctatgttaacatgaatagtagac

SEQ ID NO: 101130 - DNA, 23 bp, Artificial sequence
  SiRNA target sequence
tatgttaacatgaatagtagacc

SEQ ID NO: 101131 - DNA, 23 bp, Artificial sequence
  SiRNA target sequence
atgttaacatgaatagtagaccc

SEQ ID NO: 101132 - DNA, 23 bp, Artificial sequence
  SiRNA target sequence
tgttaacatgaatagtagaccct

SEQ ID NO: 101133 - DNA, 23 bp, Artificial sequence
  SiRNA target sequence
gttaacatgaatagtagaccctt

SEQ ID NO: 101134 - DNA, 23 bp, Artificial sequence
  SiRNA target sequence
ttaacatgaatagtagacccttt

SEQ ID NO: 101135 - DNA, 23 bp, Artificial sequence
  SiRNA target sequence
taacatgaatagtagacccttta

SEQ ID NO: 101136 - DNA, 23 bp, Artificial sequence
  SiRNA target sequence
aacatgaatagtagaccctttag

SEQ ID NO: 101137 - DNA, 23 bp, Artificial sequence
  SiRNA target sequence
acatgaatagtagaccctttagt

SEQ ID NO: 101138 - DNA, 23 bp, Artificial sequence
  SiRNA target sequence
catgaatagtagaccctttagta

SEQ ID NO: 101139 - DNA, 23 bp, Artificial sequence
  SiRNA target sequence
atgaatagtagaccctttagtaa

SEQ ID NO: 101140 - DNA, 23 bp, Artificial sequence
  SiRNA target sequence
tgaatagtagaccctttagtaag

SEQ ID NO: 101141 - DNA, 23 bp, Artificial sequence
  SiRNA target sequence
gaatagtagaccctttagtaagt

SEQ ID NO: 101142 - DNA, 23 bp, Artificial sequence
  SiRNA target sequence
aatagtagaccctttagtaagta

SEQ ID NO: 101143 - DNA, 23 bp, Artificial sequence
  SiRNA target sequence
atagtagaccctttagtaagtaa

SEQ ID NO: 101144 - DNA, 23 bp, Artificial sequence
  SiRNA target sequence
tagtagaccctttagtaagtaat

SEQ ID NO: 101145 - DNA, 23 bp, Artificial sequence
  SiRNA target sequence
agtagaccctttagtaagtaatt

SEQ ID NO: 101146 - DNA, 23 bp, Artificial sequence
  SiRNA target sequence
gtagaccctttagtaagtaattt

SEQ ID NO: 101147 - DNA, 23 bp, Artificial sequence
  SiRNA target sequence
tagaccctttagtaagtaatttt

SEQ ID NO: 101148 - DNA, 23 bp, Artificial sequence
  SiRNA target sequence
agaccctttagtaagtaatttta

SEQ ID NO: 101149 - DNA, 23 bp, Artificial sequence
  SiRNA target sequence
gaccctttagtaagtaattttaa

SEQ ID NO: 101150 - DNA, 23 bp, Artificial sequence
  SiRNA target sequence
accctttagtaagtaattttaaa

SEQ ID NO: 101151 - DNA, 23 bp, Artificial sequence
  SiRNA target sequence
ccctttagtaagtaattttaaat

SEQ ID NO: 101152 - DNA, 23 bp, Artificial sequence
  SiRNA target sequence
cctttagtaagtaattttaaata

SEQ ID NO: 101153 - DNA, 23 bp, Artificial sequence
  SiRNA target sequence
ctttagtaagtaattttaaatac

SEQ ID NO: 101154 - DNA, 23 bp, Artificial sequence
  SiRNA target sequence
tttagtaagtaattttaaatact

SEQ ID NO: 101155 - DNA, 23 bp, Artificial sequence
  SiRNA target sequence
ttagtaagtaattttaaatactc

SEQ ID NO: 101156 - DNA, 23 bp, Artificial sequence
  SiRNA target sequence
tagtaagtaattttaaatactct

SEQ ID NO: 101157 - DNA, 23 bp, Artificial sequence
  SiRNA target sequence
agtaagtaattttaaatactctg

SEQ ID NO: 101158 - DNA, 23 bp, Artificial sequence
  SiRNA target sequence
gtaagtaattttaaatactctga

SEQ ID NO: 101159 - DNA, 23 bp, Artificial sequence
  SiRNA target sequence
taagtaattttaaatactctgaa

SEQ ID NO: 101160 - DNA, 23 bp, Artificial sequence
  SiRNA target sequence
aagtaattttaaatactctgaac

SEQ ID NO: 101161 - DNA, 23 bp, Artificial sequence
  SiRNA target sequence
agtaattttaaatactctgaaca

SEQ ID NO: 101162 - DNA, 23 bp, Artificial sequence
  SiRNA target sequence
gtaattttaaatactctgaacaa

SEQ ID NO: 101163 - DNA, 23 bp, Artificial sequence
  SiRNA target sequence
taattttaaatactctgaacaaa

SEQ ID NO: 101164 - DNA, 23 bp, Artificial sequence
  SiRNA target sequence
aattttaaatactctgaacaaag

SEQ ID NO: 101165 - DNA, 23 bp, Artificial sequence
  SiRNA target sequence
attttaaatactctgaacaaaga

SEQ ID NO: 101166 - DNA, 23 bp, Artificial sequence
  SiRNA target sequence
ttttaaatactctgaacaaagac

SEQ ID NO: 101167 - DNA, 23 bp, Artificial sequence
  SiRNA target sequence
tttaaatactctgaacaaagacc

SEQ ID NO: 101168 - DNA, 23 bp, Artificial sequence
  SiRNA target sequence
ttaaatactctgaacaaagacct

SEQ ID NO: 101169 - DNA, 23 bp, Artificial sequence
  SiRNA target sequence
taaatactctgaacaaagacctt

SEQ ID NO: 101170 - DNA, 23 bp, Artificial sequence
  SiRNA target sequence
aaatactctgaacaaagaccttt

SEQ ID NO: 101171 - DNA, 23 bp, Artificial sequence
  SiRNA target sequence
aatactctgaacaaagacctttt

SEQ ID NO: 101172 - DNA, 23 bp, Artificial sequence
  SiRNA target sequence
atactctgaacaaagaccttttc

SEQ ID NO: 101173 - DNA, 23 bp, Artificial sequence
  SiRNA target sequence
tactctgaacaaagaccttttcg

SEQ ID NO: 101174 - DNA, 23 bp, Artificial sequence
  SiRNA target sequence
actctgaacaaagaccttttcgt

SEQ ID NO: 101175 - DNA, 23 bp, Artificial sequence
  SiRNA target sequence
ctctgaacaaagaccttttcgtt

SEQ ID NO: 101176 - DNA, 23 bp, Artificial sequence
  SiRNA target sequence
tctgaacaaagaccttttcgttc

SEQ ID NO: 101177 - DNA, 23 bp, Artificial sequence
  SiRNA target sequence
ctgaacaaagaccttttcgttct

SEQ ID NO: 101178 - DNA, 23 bp, Artificial sequence
  SiRNA target sequence
tgaacaaagaccttttcgttctt

SEQ ID NO: 101179 - DNA, 23 bp, Artificial sequence
  SiRNA target sequence
gaacaaagaccttttcgttcttc

SEQ ID NO: 101180 - DNA, 23 bp, Artificial sequence
  SiRNA target sequence
aacaaagaccttttcgttcttct

SEQ ID NO: 101181 - DNA, 23 bp, Artificial sequence
  SiRNA target sequence
acaaagaccttttcgttcttctt

SEQ ID NO: 101182 - DNA, 23 bp, Artificial sequence
  SiRNA target sequence
caaagaccttttcgttcttcttt

SEQ ID NO: 101183 - DNA, 23 bp, Artificial sequence
  SiRNA target sequence
aaagaccttttcgttcttctttt

SEQ ID NO: 101184 - DNA, 23 bp, Artificial sequence
  SiRNA target sequence
aagaccttttcgttcttctttta

SEQ ID NO: 101185 - DNA, 23 bp, Artificial sequence
  SiRNA target sequence
agaccttttcgttcttcttttaa

SEQ ID NO: 101186 - DNA, 23 bp, Artificial sequence
  SiRNA target sequence
gaccttttcgttcttcttttaaa

SEQ ID NO: 101187 - DNA, 23 bp, Artificial sequence
  SiRNA target sequence
accttttcgttcttcttttaaac

SEQ ID NO: 101188 - DNA, 23 bp, Artificial sequence
  SiRNA target sequence
ccttttcgttcttcttttaaact

SEQ ID NO: 101189 - DNA, 23 bp, Artificial sequence
  SiRNA target sequence
cttttcgttcttcttttaaactt

SEQ ID NO: 101190 - DNA, 23 bp, Artificial sequence
  SiRNA target sequence
ttttcgttcttcttttaaacttg

SEQ ID NO: 101191 - DNA, 23 bp, Artificial sequence
  SiRNA target sequence
tttcgttcttcttttaaacttgt

SEQ ID NO: 101192 - DNA, 23 bp, Artificial sequence
  SiRNA target sequence
ttcgttcttcttttaaacttgtt

SEQ ID NO: 101193 - DNA, 23 bp, Artificial sequence
  SiRNA target sequence
tcgttcttcttttaaacttgttt

SEQ ID NO: 101194 - DNA, 23 bp, Artificial sequence
  SiRNA target sequence
cgttcttcttttaaacttgtttt

SEQ ID NO: 101195 - DNA, 23 bp, Artificial sequence
  SiRNA target sequence
gttcttcttttaaacttgtttta

SEQ ID NO: 101196 - DNA, 23 bp, Artificial sequence
  SiRNA target sequence
ttcttcttttaaacttgttttaa

SEQ ID NO: 101197 - DNA, 23 bp, Artificial sequence
  SiRNA target sequence
tcttcttttaaacttgttttaaa

SEQ ID NO: 101198 - DNA, 23 bp, Artificial sequence
  SiRNA target sequence
cttcttttaaacttgttttaaaa

SEQ ID NO: 101199 - DNA, 23 bp, Artificial sequence
  SiRNA target sequence
ttcttttaaacttgttttaaaag

SEQ ID NO: 101200 - DNA, 23 bp, Artificial sequence
  SiRNA target sequence
tcttttaaacttgttttaaaaga

SEQ ID NO: 101201 - DNA, 23 bp, Artificial sequence
  SiRNA target sequence
cttttaaacttgttttaaaagaa

SEQ ID NO: 101202 - DNA, 23 bp, Artificial sequence
  SiRNA target sequence
ttttaaacttgttttaaaagaaa

SEQ ID NO: 101203 - DNA, 23 bp, Artificial sequence
  SiRNA target sequence
tttaaacttgttttaaaagaaac

SEQ ID NO: 101204 - DNA, 23 bp, Artificial sequence
  SiRNA target sequence
ttaaacttgttttaaaagaaaca

SEQ ID NO: 101205 - DNA, 23 bp, Artificial sequence
  SiRNA target sequence
taaacttgttttaaaagaaacaa

SEQ ID NO: 101206 - DNA, 23 bp, Artificial sequence
  SiRNA target sequence
aaacttgttttaaaagaaacaag

SEQ ID NO: 101207 - DNA, 23 bp, Artificial sequence
  SiRNA target sequence
aacttgttttaaaagaaacaaga

SEQ ID NO: 101208 - DNA, 23 bp, Artificial sequence
  SiRNA target sequence
acttgttttaaaagaaacaagag

SEQ ID NO: 101209 - DNA, 23 bp, Artificial sequence
  SiRNA target sequence
cttgttttaaaagaaacaagaga

SEQ ID NO: 101210 - DNA, 23 bp, Artificial sequence
  SiRNA target sequence
ttgttttaaaagaaacaagagag

SEQ ID NO: 101211 - DNA, 23 bp, Artificial sequence
  SiRNA target sequence
tgttttaaaagaaacaagagaga

SEQ ID NO: 101212 - DNA, 23 bp, Artificial sequence
  SiRNA target sequence
gttttaaaagaaacaagagagac

SEQ ID NO: 101213 - DNA, 23 bp, Artificial sequence
  SiRNA target sequence
ttttaaaagaaacaagagagacg

SEQ ID NO: 101214 - DNA, 23 bp, Artificial sequence
  SiRNA target sequence
tttaaaagaaacaagagagacgg

SEQ ID NO: 101215 - DNA, 23 bp, Artificial sequence
  SiRNA target sequence
ttaaaagaaacaagagagacggt

SEQ ID NO: 101216 - DNA, 23 bp, Artificial sequence
  SiRNA target sequence
taaaagaaacaagagagacggtg

SEQ ID NO: 101217 - DNA, 23 bp, Artificial sequence
  SiRNA target sequence
aaaagaaacaagagagacggtga

SEQ ID NO: 101218 - DNA, 23 bp, Artificial sequence
  SiRNA target sequence
aaagaaacaagagagacggtgac

SEQ ID NO: 101219 - DNA, 23 bp, Artificial sequence
  SiRNA target sequence
aagaaacaagagagacggtgaca

SEQ ID NO: 101220 - DNA, 23 bp, Artificial sequence
  SiRNA target sequence
agaaacaagagagacggtgacaa

SEQ ID NO: 101221 - DNA, 23 bp, Artificial sequence
  SiRNA target sequence
gaaacaagagagacggtgacaaa

SEQ ID NO: 101222 - DNA, 23 bp, Artificial sequence
  SiRNA target sequence
aaacaagagagacggtgacaaag

SEQ ID NO: 101223 - DNA, 23 bp, Artificial sequence
  SiRNA target sequence
aacaagagagacggtgacaaagt

SEQ ID NO: 101224 - DNA, 23 bp, Artificial sequence
  SiRNA target sequence
acaagagagacggtgacaaagta

SEQ ID NO: 101225 - DNA, 23 bp, Artificial sequence
  SiRNA target sequence
caagagagacggtgacaaagtaa

SEQ ID NO: 101226 - DNA, 23 bp, Artificial sequence
  SiRNA target sequence
aagagagacggtgacaaagtaac

SEQ ID NO: 101227 - DNA, 23 bp, Artificial sequence
  SiRNA target sequence
agagagacggtgacaaagtaaca

SEQ ID NO: 101228 - DNA, 23 bp, Artificial sequence
  SiRNA target sequence
gagagacggtgacaaagtaacaa

SEQ ID NO: 101229 - DNA, 23 bp, Artificial sequence
  SiRNA target sequence
agagacggtgacaaagtaacaaa

SEQ ID NO: 101230 - DNA, 23 bp, Artificial sequence
  SiRNA target sequence
gagacggtgacaaagtaacaaaa

SEQ ID NO: 101231 - DNA, 23 bp, Artificial sequence
  SiRNA target sequence
agacggtgacaaagtaacaaaaa

SEQ ID NO: 101232 - DNA, 23 bp, Artificial sequence
  SiRNA target sequence
gacggtgacaaagtaacaaaaat

SEQ ID NO: 101233 - DNA, 23 bp, Artificial sequence
  SiRNA target sequence
acggtgacaaagtaacaaaaatc

SEQ ID NO: 101234 - DNA, 23 bp, Artificial sequence
  SiRNA target sequence
cggtgacaaagtaacaaaaatct

SEQ ID NO: 101235 - DNA, 23 bp, Artificial sequence
  SiRNA target sequence
ggtgacaaagtaacaaaaatctt

SEQ ID NO: 101236 - DNA, 23 bp, Artificial sequence
  SiRNA target sequence
gtgacaaagtaacaaaaatcttt

SEQ ID NO: 101237 - DNA, 23 bp, Artificial sequence
  SiRNA target sequence
tgacaaagtaacaaaaatctttt

SEQ ID NO: 101238 - DNA, 23 bp, Artificial sequence
  SiRNA target sequence
gacaaagtaacaaaaatcttttt

SEQ ID NO: 101239 - DNA, 23 bp, Artificial sequence
  SiRNA target sequence
acaaagtaacaaaaatctttttt

SEQ ID NO: 101240 - DNA, 23 bp, Artificial sequence
  SiRNA target sequence
caaagtaacaaaaatcttttttc

SEQ ID NO: 101241 - DNA, 23 bp, Artificial sequence
  SiRNA target sequence
aaagtaacaaaaatcttttttcg

SEQ ID NO: 101242 - DNA, 23 bp, Artificial sequence
  SiRNA target sequence
aagtaacaaaaatcttttttcgt

SEQ ID NO: 101243 - DNA, 23 bp, Artificial sequence
  SiRNA target sequence
agtaacaaaaatcttttttcgtt

SEQ ID NO: 101244 - DNA, 23 bp, Artificial sequence
  SiRNA target sequence
gtaacaaaaatcttttttcgtta

SEQ ID NO: 101245 - DNA, 23 bp, Artificial sequence
  SiRNA target sequence
taacaaaaatcttttttcgttaa

SEQ ID NO: 101246 - DNA, 23 bp, Artificial sequence
  SiRNA target sequence
aacaaaaatcttttttcgttaat

SEQ ID NO: 101247 - DNA, 23 bp, Artificial sequence
  SiRNA target sequence
acaaaaatcttttttcgttaatg

SEQ ID NO: 101248 - DNA, 23 bp, Artificial sequence
  SiRNA target sequence
caaaaatcttttttcgttaatgt

SEQ ID NO: 101249 - DNA, 23 bp, Artificial sequence
  SiRNA target sequence
aaaaatcttttttcgttaatgta

SEQ ID NO: 101250 - DNA, 23 bp, Artificial sequence
  SiRNA target sequence
aaaatcttttttcgttaatgtaa

SEQ ID NO: 101251 - DNA, 23 bp, Artificial sequence
  SiRNA target sequence
aaatcttttttcgttaatgtaaa

SEQ ID NO: 101252 - DNA, 23 bp, Artificial sequence
  SiRNA target sequence
aatcttttttcgttaatgtaaaa

SEQ ID NO: 101253 - DNA, 23 bp, Artificial sequence
  SiRNA target sequence
atcttttttcgttaatgtaaaat

SEQ ID NO: 101254 - DNA, 23 bp, Artificial sequence
  SiRNA target sequence
tcttttttcgttaatgtaaaata

SEQ ID NO: 101255 - DNA, 23 bp, Artificial sequence
  SiRNA target sequence
cttttttcgttaatgtaaaatat

SEQ ID NO: 101256 - DNA, 23 bp, Artificial sequence
  SiRNA target sequence
ttttttcgttaatgtaaaatatc

SEQ ID NO: 101257 - DNA, 23 bp, Artificial sequence
  SiRNA target sequence
tttttcgttaatgtaaaatatct

SEQ ID NO: 101258 - DNA, 23 bp, Artificial sequence
  SiRNA target sequence
ttttcgttaatgtaaaatatctt

SEQ ID NO: 101259 - DNA, 23 bp, Artificial sequence
  SiRNA target sequence
tttcgttaatgtaaaatatcttg

SEQ ID NO: 101260 - DNA, 23 bp, Artificial sequence
  SiRNA target sequence
ttcgttaatgtaaaatatcttgg

SEQ ID NO: 101261 - DNA, 23 bp, Artificial sequence
  SiRNA target sequence
tcgttaatgtaaaatatcttgga

SEQ ID NO: 101262 - DNA, 23 bp, Artificial sequence
  SiRNA target sequence
cgttaatgtaaaatatcttggat

SEQ ID NO: 101263 - DNA, 23 bp, Artificial sequence
  SiRNA target sequence
gttaatgtaaaatatcttggatt

SEQ ID NO: 101264 - DNA, 23 bp, Artificial sequence
  SiRNA target sequence
ttaatgtaaaatatcttggatta

SEQ ID NO: 101265 - DNA, 23 bp, Artificial sequence
  SiRNA target sequence
taatgtaaaatatcttggattaa

SEQ ID NO: 101266 - DNA, 23 bp, Artificial sequence
  SiRNA target sequence
aatgtaaaatatcttggattaat

SEQ ID NO: 101267 - DNA, 23 bp, Artificial sequence
  SiRNA target sequence
atgtaaaatatcttggattaatt

SEQ ID NO: 101268 - DNA, 23 bp, Artificial sequence
  SiRNA target sequence
tgtaaaatatcttggattaatta

SEQ ID NO: 101269 - DNA, 23 bp, Artificial sequence
  SiRNA target sequence
gtaaaatatcttggattaattac

SEQ ID NO: 101270 - DNA, 23 bp, Artificial sequence
  SiRNA target sequence
taaaatatcttggattaattaca

SEQ ID NO: 101271 - DNA, 23 bp, Artificial sequence
  SiRNA target sequence
aaaatatcttggattaattacag

SEQ ID NO: 101272 - DNA, 23 bp, Artificial sequence
  SiRNA target sequence
aaatatcttggattaattacagg

SEQ ID NO: 101273 - DNA, 23 bp, Artificial sequence
  SiRNA target sequence
aatatcttggattaattacaggg

SEQ ID NO: 101274 - DNA, 23 bp, Artificial sequence
  SiRNA target sequence
atatcttggattaattacaggga

SEQ ID NO: 101275 - DNA, 23 bp, Artificial sequence
  SiRNA target sequence
tatcttggattaattacagggat

SEQ ID NO: 101276 - DNA, 23 bp, Artificial sequence
  SiRNA target sequence
atcttggattaattacagggata

SEQ ID NO: 101277 - DNA, 23 bp, Artificial sequence
  SiRNA target sequence
tcttggattaattacagggatat

SEQ ID NO: 101278 - DNA, 23 bp, Artificial sequence
  SiRNA target sequence
cttggattaattacagggatata

SEQ ID NO: 101279 - DNA, 23 bp, Artificial sequence
  SiRNA target sequence
ttggattaattacagggatatac

SEQ ID NO: 101280 - DNA, 23 bp, Artificial sequence
  SiRNA target sequence
tggattaattacagggatatact

SEQ ID NO: 101281 - DNA, 23 bp, Artificial sequence
  SiRNA target sequence
ggattaattacagggatatactt

SEQ ID NO: 101282 - DNA, 23 bp, Artificial sequence
  SiRNA target sequence
gattaattacagggatatacttg

SEQ ID NO: 101283 - DNA, 23 bp, Artificial sequence
  SiRNA target sequence
attaattacagggatatacttgt

SEQ ID NO: 101284 - DNA, 23 bp, Artificial sequence
  SiRNA target sequence
ttaattacagggatatacttgta

SEQ ID NO: 101285 - DNA, 23 bp, Artificial sequence
  SiRNA target sequence
taattacagggatatacttgtac

SEQ ID NO: 101286 - DNA, 23 bp, Artificial sequence
  SiRNA target sequence
aattacagggatatacttgtaca

SEQ ID NO: 101287 - DNA, 23 bp, Artificial sequence
  SiRNA target sequence
attacagggatatacttgtacat

SEQ ID NO: 101288 - DNA, 23 bp, Artificial sequence
  SiRNA target sequence
ttacagggatatacttgtacata

SEQ ID NO: 101289 - DNA, 23 bp, Artificial sequence
  SiRNA target sequence
tacagggatatacttgtacataa

SEQ ID NO: 101290 - DNA, 23 bp, Artificial sequence
  SiRNA target sequence
acagggatatacttgtacataaa

SEQ ID NO: 101291 - DNA, 23 bp, Artificial sequence
  SiRNA target sequence
cagggatatacttgtacataaaa

SEQ ID NO: 101292 - DNA, 23 bp, Artificial sequence
  SiRNA target sequence
agggatatacttgtacataaaat

SEQ ID NO: 101293 - DNA, 23 bp, Artificial sequence
  SiRNA target sequence
gggatatacttgtacataaaatt

SEQ ID NO: 101294 - DNA, 23 bp, Artificial sequence
  SiRNA target sequence
ggatatacttgtacataaaattt

SEQ ID NO: 101295 - DNA, 23 bp, Artificial sequence
  SiRNA target sequence
gatatacttgtacataaaatttg

SEQ ID NO: 101296 - DNA, 23 bp, Artificial sequence
  SiRNA target sequence
atatacttgtacataaaatttga

SEQ ID NO: 101297 - DNA, 23 bp, Artificial sequence
  SiRNA target sequence
tatacttgtacataaaatttgag

SEQ ID NO: 101298 - DNA, 23 bp, Artificial sequence
  SiRNA target sequence
atacttgtacataaaatttgagg

SEQ ID NO: 101299 - DNA, 23 bp, Artificial sequence
  SiRNA target sequence
tacttgtacataaaatttgaggt

SEQ ID NO: 101300 - DNA, 23 bp, Artificial sequence
  SiRNA target sequence
acttgtacataaaatttgaggta

SEQ ID NO: 101301 - DNA, 23 bp, Artificial sequence
  SiRNA target sequence
cttgtacataaaatttgaggtaa

SEQ ID NO: 101302 - DNA, 23 bp, Artificial sequence
  SiRNA target sequence
ttgtacataaaatttgaggtaag

SEQ ID NO: 101303 - DNA, 23 bp, Artificial sequence
  SiRNA target sequence
tgtacataaaatttgaggtaagt

SEQ ID NO: 101304 - DNA, 23 bp, Artificial sequence
  SiRNA target sequence
gtacataaaatttgaggtaagtt

SEQ ID NO: 101305 - DNA, 23 bp, Artificial sequence
  SiRNA target sequence
tacataaaatttgaggtaagttt

SEQ ID NO: 101306 - DNA, 23 bp, Artificial sequence
  SiRNA target sequence
acataaaatttgaggtaagtttt

SEQ ID NO: 101307 - DNA, 23 bp, Artificial sequence
  SiRNA target sequence
cataaaatttgaggtaagtttta

SEQ ID NO: 101308 - DNA, 23 bp, Artificial sequence
  SiRNA target sequence
ataaaatttgaggtaagttttat

SEQ ID NO: 101309 - DNA, 23 bp, Artificial sequence
  SiRNA target sequence
taaaatttgaggtaagttttatc

SEQ ID NO: 101310 - DNA, 23 bp, Artificial sequence
  SiRNA target sequence
aaaatttgaggtaagttttatct

SEQ ID NO: 101311 - DNA, 23 bp, Artificial sequence
  SiRNA target sequence
aaatttgaggtaagttttatctt

SEQ ID NO: 101312 - DNA, 23 bp, Artificial sequence
  SiRNA target sequence
aatttgaggtaagttttatctta

SEQ ID NO: 101313 - DNA, 23 bp, Artificial sequence
  SiRNA target sequence
atttgaggtaagttttatcttaa

SEQ ID NO: 101314 - DNA, 23 bp, Artificial sequence
  SiRNA target sequence
tttgaggtaagttttatcttaaa

SEQ ID NO: 101315 - DNA, 23 bp, Artificial sequence
  SiRNA target sequence
ttgaggtaagttttatcttaaaa

SEQ ID NO: 101316 - DNA, 23 bp, Artificial sequence
  SiRNA target sequence
tgaggtaagttttatcttaaaat

SEQ ID NO: 101317 - DNA, 23 bp, Artificial sequence
  SiRNA target sequence
gaggtaagttttatcttaaaatc

SEQ ID NO: 101318 - DNA, 23 bp, Artificial sequence
  SiRNA target sequence
aggtaagttttatcttaaaatct

SEQ ID NO: 101319 - DNA, 23 bp, Artificial sequence
  SiRNA target sequence
ggtaagttttatcttaaaatctt

SEQ ID NO: 101320 - DNA, 23 bp, Artificial sequence
  SiRNA target sequence
gtaagttttatcttaaaatcttt

SEQ ID NO: 101321 - DNA, 23 bp, Artificial sequence
  SiRNA target sequence
taagttttatcttaaaatctttt

SEQ ID NO: 101322 - DNA, 23 bp, Artificial sequence
  SiRNA target sequence
aagttttatcttaaaatctttta

SEQ ID NO: 101323 - DNA, 23 bp, Artificial sequence
  SiRNA target sequence
agttttatcttaaaatcttttag

SEQ ID NO: 101324 - DNA, 23 bp, Artificial sequence
  SiRNA target sequence
gttttatcttaaaatcttttaga

SEQ ID NO: 101325 - DNA, 23 bp, Artificial sequence
  SiRNA target sequence
ttttatcttaaaatcttttagaa

SEQ ID NO: 101326 - DNA, 23 bp, Artificial sequence
  SiRNA target sequence
tttatcttaaaatcttttagaac

SEQ ID NO: 101327 - DNA, 23 bp, Artificial sequence
  SiRNA target sequence
ttatcttaaaatcttttagaacc

SEQ ID NO: 101328 - DNA, 23 bp, Artificial sequence
  SiRNA target sequence
tatcttaaaatcttttagaacct

SEQ ID NO: 101329 - DNA, 23 bp, Artificial sequence
  SiRNA target sequence
atcttaaaatcttttagaacctc

SEQ ID NO: 101330 - DNA, 23 bp, Artificial sequence
  SiRNA target sequence
tcttaaaatcttttagaacctca

SEQ ID NO: 101331 - DNA, 23 bp, Artificial sequence
  SiRNA target sequence
cttaaaatcttttagaacctcaa

SEQ ID NO: 101332 - DNA, 23 bp, Artificial sequence
  SiRNA target sequence
ttaaaatcttttagaacctcaaa

SEQ ID NO: 101333 - DNA, 23 bp, Artificial sequence
  SiRNA target sequence
taaaatcttttagaacctcaaaa

SEQ ID NO: 101334 - DNA, 23 bp, Artificial sequence
  SiRNA target sequence
aaaatcttttagaacctcaaaaa

SEQ ID NO: 101335 - DNA, 23 bp, Artificial sequence
  SiRNA target sequence
aaatcttttagaacctcaaaaat

SEQ ID NO: 101336 - DNA, 23 bp, Artificial sequence
  SiRNA target sequence
aatcttttagaacctcaaaaata

SEQ ID NO: 101337 - DNA, 23 bp, Artificial sequence
  SiRNA target sequence
atcttttagaacctcaaaaatag

SEQ ID NO: 101338 - DNA, 23 bp, Artificial sequence
  SiRNA target sequence
tcttttagaacctcaaaaatagt

SEQ ID NO: 101339 - DNA, 23 bp, Artificial sequence
  SiRNA target sequence
cttttagaacctcaaaaatagtg

SEQ ID NO: 101340 - DNA, 23 bp, Artificial sequence
  SiRNA target sequence
ttttagaacctcaaaaatagtgc

SEQ ID NO: 101341 - DNA, 23 bp, Artificial sequence
  SiRNA target sequence
tttagaacctcaaaaatagtgcg

SEQ ID NO: 101342 - DNA, 23 bp, Artificial sequence
  SiRNA target sequence
ttagaacctcaaaaatagtgcgc

SEQ ID NO: 101343 - DNA, 23 bp, Artificial sequence
  SiRNA target sequence
tagaacctcaaaaatagtgcgct

SEQ ID NO: 101344 - DNA, 23 bp, Artificial sequence
  SiRNA target sequence
agaacctcaaaaatagtgcgctt

SEQ ID NO: 101345 - DNA, 23 bp, Artificial sequence
  SiRNA target sequence
gaacctcaaaaatagtgcgcttc

SEQ ID NO: 101346 - DNA, 23 bp, Artificial sequence
  SiRNA target sequence
aacctcaaaaatagtgcgcttcg

SEQ ID NO: 101347 - DNA, 23 bp, Artificial sequence
  SiRNA target sequence
acctcaaaaatagtgcgcttcgg

SEQ ID NO: 101348 - DNA, 23 bp, Artificial sequence
  SiRNA target sequence
cctcaaaaatagtgcgcttcggt

SEQ ID NO: 101349 - DNA, 23 bp, Artificial sequence
  SiRNA target sequence
ctcaaaaatagtgcgcttcggta

SEQ ID NO: 101350 - DNA, 23 bp, Artificial sequence
  SiRNA target sequence
tcaaaaatagtgcgcttcggtag

SEQ ID NO: 101351 - DNA, 23 bp, Artificial sequence
  SiRNA target sequence
caaaaatagtgcgcttcggtagt

SEQ ID NO: 101352 - DNA, 23 bp, Artificial sequence
  SiRNA target sequence
aaaaatagtgcgcttcggtagta

SEQ ID NO: 101353 - DNA, 23 bp, Artificial sequence
  SiRNA target sequence
aaaatagtgcgcttcggtagtaa

SEQ ID NO: 101354 - DNA, 23 bp, Artificial sequence
  SiRNA target sequence
aaatagtgcgcttcggtagtaaa

SEQ ID NO: 101355 - DNA, 23 bp, Artificial sequence
  SiRNA target sequence
aatagtgcgcttcggtagtaaaa

SEQ ID NO: 101356 - DNA, 23 bp, Artificial sequence
  SiRNA target sequence
atagtgcgcttcggtagtaaaat

SEQ ID NO: 101357 - DNA, 23 bp, Artificial sequence
  SiRNA target sequence
tagtgcgcttcggtagtaaaatg

SEQ ID NO: 101358 - DNA, 23 bp, Artificial sequence
  SiRNA target sequence
agtgcgcttcggtagtaaaatgt

SEQ ID NO: 101359 - DNA, 23 bp, Artificial sequence
  SiRNA target sequence
gtgcgcttcggtagtaaaatgta

SEQ ID NO: 101360 - DNA, 23 bp, Artificial sequence
  SiRNA target sequence
tgcgcttcggtagtaaaatgtaa

SEQ ID NO: 101361 - DNA, 23 bp, Artificial sequence
  SiRNA target sequence
gcgcttcggtagtaaaatgtaat

SEQ ID NO: 101362 - DNA, 23 bp, Artificial sequence
  SiRNA target sequence
cgcttcggtagtaaaatgtaatc

SEQ ID NO: 101363 - DNA, 23 bp, Artificial sequence
  SiRNA target sequence
gcttcggtagtaaaatgtaatca

SEQ ID NO: 101364 - DNA, 23 bp, Artificial sequence
  SiRNA target sequence
cttcggtagtaaaatgtaatcat

SEQ ID NO: 101365 - DNA, 23 bp, Artificial sequence
  SiRNA target sequence
ttcggtagtaaaatgtaatcata

SEQ ID NO: 101366 - DNA, 23 bp, Artificial sequence
  SiRNA target sequence
tcggtagtaaaatgtaatcatag

SEQ ID NO: 101367 - DNA, 23 bp, Artificial sequence
  SiRNA target sequence
cggtagtaaaatgtaatcatagt

SEQ ID NO: 101368 - DNA, 23 bp, Artificial sequence
  SiRNA target sequence
ggtagtaaaatgtaatcatagta

SEQ ID NO: 101369 - DNA, 23 bp, Artificial sequence
  SiRNA target sequence
gtagtaaaatgtaatcatagtac

SEQ ID NO: 101370 - DNA, 23 bp, Artificial sequence
  SiRNA target sequence
tagtaaaatgtaatcatagtaca

SEQ ID NO: 101371 - DNA, 23 bp, Artificial sequence
  SiRNA target sequence
agtaaaatgtaatcatagtacag

SEQ ID NO: 101372 - DNA, 23 bp, Artificial sequence
  SiRNA target sequence
gtaaaatgtaatcatagtacaga

SEQ ID NO: 101373 - DNA, 23 bp, Artificial sequence
  SiRNA target sequence
taaaatgtaatcatagtacagat

SEQ ID NO: 101374 - DNA, 23 bp, Artificial sequence
  SiRNA target sequence
aaaatgtaatcatagtacagatc

SEQ ID NO: 101375 - DNA, 23 bp, Artificial sequence
  SiRNA target sequence
aaatgtaatcatagtacagatcg

SEQ ID NO: 101376 - DNA, 23 bp, Artificial sequence
  SiRNA target sequence
aatgtaatcatagtacagatcgt

SEQ ID NO: 101377 - DNA, 23 bp, Artificial sequence
  SiRNA target sequence
atgtaatcatagtacagatcgta

SEQ ID NO: 101378 - DNA, 23 bp, Artificial sequence
  SiRNA target sequence
tgtaatcatagtacagatcgtaa

SEQ ID NO: 101379 - DNA, 23 bp, Artificial sequence
  SiRNA target sequence
gtaatcatagtacagatcgtaat

SEQ ID NO: 101380 - DNA, 23 bp, Artificial sequence
  SiRNA target sequence
taatcatagtacagatcgtaatt

SEQ ID NO: 101381 - DNA, 23 bp, Artificial sequence
  SiRNA target sequence
aatcatagtacagatcgtaattt

SEQ ID NO: 101382 - DNA, 23 bp, Artificial sequence
  SiRNA target sequence
atcatagtacagatcgtaattta

SEQ ID NO: 101383 - DNA, 23 bp, Artificial sequence
  SiRNA target sequence
tcatagtacagatcgtaatttag

SEQ ID NO: 101384 - DNA, 23 bp, Artificial sequence
  SiRNA target sequence
catagtacagatcgtaatttaga

SEQ ID NO: 101385 - DNA, 23 bp, Artificial sequence
  SiRNA target sequence
atagtacagatcgtaatttagat

SEQ ID NO: 101386 - DNA, 23 bp, Artificial sequence
  SiRNA target sequence
tagtacagatcgtaatttagata

SEQ ID NO: 101387 - DNA, 23 bp, Artificial sequence
  SiRNA target sequence
agtacagatcgtaatttagataa

SEQ ID NO: 101388 - DNA, 23 bp, Artificial sequence
  SiRNA target sequence
gtacagatcgtaatttagataaa

SEQ ID NO: 101389 - DNA, 23 bp, Artificial sequence
  SiRNA target sequence
tacagatcgtaatttagataaat

SEQ ID NO: 101390 - DNA, 23 bp, Artificial sequence
  SiRNA target sequence
acagatcgtaatttagataaatt

SEQ ID NO: 101391 - DNA, 23 bp, Artificial sequence
  SiRNA target sequence
cagatcgtaatttagataaattt

SEQ ID NO: 101392 - DNA, 23 bp, Artificial sequence
  SiRNA target sequence
agatcgtaatttagataaatttc

SEQ ID NO: 101393 - DNA, 23 bp, Artificial sequence
  SiRNA target sequence
gatcgtaatttagataaatttct

SEQ ID NO: 101394 - DNA, 23 bp, Artificial sequence
  SiRNA target sequence
atcgtaatttagataaatttctt

SEQ ID NO: 101395 - DNA, 23 bp, Artificial sequence
  SiRNA target sequence
tcgtaatttagataaatttcttt

SEQ ID NO: 101396 - DNA, 23 bp, Artificial sequence
  SiRNA target sequence
cgtaatttagataaatttcttta

SEQ ID NO: 101397 - DNA, 23 bp, Artificial sequence
  SiRNA target sequence
gtaatttagataaatttctttac

SEQ ID NO: 101398 - DNA, 23 bp, Artificial sequence
  SiRNA target sequence
taatttagataaatttctttaca

SEQ ID NO: 101399 - DNA, 23 bp, Artificial sequence
  SiRNA target sequence
aatttagataaatttctttacat

SEQ ID NO: 101400 - DNA, 23 bp, Artificial sequence
  SiRNA target sequence
atttagataaatttctttacatt

SEQ ID NO: 101401 - DNA, 23 bp, Artificial sequence
  SiRNA target sequence
tttagataaatttctttacattt

SEQ ID NO: 101402 - DNA, 23 bp, Artificial sequence
  SiRNA target sequence
ttagataaatttctttacatttc

SEQ ID NO: 101403 - DNA, 23 bp, Artificial sequence
  SiRNA target sequence
tagataaatttctttacatttct

SEQ ID NO: 101404 - DNA, 23 bp, Artificial sequence
  SiRNA target sequence
agataaatttctttacatttctc

SEQ ID NO: 101405 - DNA, 23 bp, Artificial sequence
  SiRNA target sequence
gataaatttctttacatttctca

SEQ ID NO: 101406 - DNA, 23 bp, Artificial sequence
  SiRNA target sequence
ataaatttctttacatttctcac

SEQ ID NO: 101407 - DNA, 23 bp, Artificial sequence
  SiRNA target sequence
taaatttctttacatttctcacg

SEQ ID NO: 101408 - DNA, 23 bp, Artificial sequence
  SiRNA target sequence
aaatttctttacatttctcacga

SEQ ID NO: 101409 - DNA, 23 bp, Artificial sequence
  SiRNA target sequence
aatttctttacatttctcacgat

SEQ ID NO: 101410 - DNA, 23 bp, Artificial sequence
  SiRNA target sequence
atttctttacatttctcacgata

SEQ ID NO: 101411 - DNA, 23 bp, Artificial sequence
  SiRNA target sequence
tttctttacatttctcacgatat

SEQ ID NO: 101412 - DNA, 23 bp, Artificial sequence
  SiRNA target sequence
ttctttacatttctcacgatatt

SEQ ID NO: 101413 - DNA, 23 bp, Artificial sequence
  SiRNA target sequence
tctttacatttctcacgatattc

SEQ ID NO: 101414 - DNA, 23 bp, Artificial sequence
  SiRNA target sequence
ctttacatttctcacgatattcc

SEQ ID NO: 101415 - DNA, 23 bp, Artificial sequence
  SiRNA target sequence
tttacatttctcacgatattcct

SEQ ID NO: 101416 - DNA, 23 bp, Artificial sequence
  SiRNA target sequence
ttacatttctcacgatattcctc

SEQ ID NO: 101417 - DNA, 23 bp, Artificial sequence
  SiRNA target sequence
tacatttctcacgatattcctca

SEQ ID NO: 101418 - DNA, 23 bp, Artificial sequence
  SiRNA target sequence
acatttctcacgatattcctcag

SEQ ID NO: 101419 - DNA, 23 bp, Artificial sequence
  SiRNA target sequence
catttctcacgatattcctcagc

SEQ ID NO: 101420 - DNA, 23 bp, Artificial sequence
  SiRNA target sequence
atttctcacgatattcctcagca

SEQ ID NO: 101421 - DNA, 23 bp, Artificial sequence
  SiRNA target sequence
tttctcacgatattcctcagcaa

SEQ ID NO: 101422 - DNA, 23 bp, Artificial sequence
  SiRNA target sequence
ttctcacgatattcctcagcaat

SEQ ID NO: 101423 - DNA, 23 bp, Artificial sequence
  SiRNA target sequence
tctcacgatattcctcagcaatg

SEQ ID NO: 101424 - DNA, 23 bp, Artificial sequence
  SiRNA target sequence
ctcacgatattcctcagcaatgg

SEQ ID NO: 101425 - DNA, 23 bp, Artificial sequence
  SiRNA target sequence
tcacgatattcctcagcaatggt

SEQ ID NO: 101426 - DNA, 23 bp, Artificial sequence
  SiRNA target sequence
cacgatattcctcagcaatggta

SEQ ID NO: 101427 - DNA, 23 bp, Artificial sequence
  SiRNA target sequence
acgatattcctcagcaatggtat

SEQ ID NO: 101428 - DNA, 23 bp, Artificial sequence
  SiRNA target sequence
cgatattcctcagcaatggtatc

SEQ ID NO: 101429 - DNA, 23 bp, Artificial sequence
  SiRNA target sequence
gatattcctcagcaatggtatct

SEQ ID NO: 101430 - DNA, 23 bp, Artificial sequence
  SiRNA target sequence
atattcctcagcaatggtatctg

SEQ ID NO: 101431 - DNA, 23 bp, Artificial sequence
  SiRNA target sequence
tattcctcagcaatggtatctgt

SEQ ID NO: 101432 - DNA, 23 bp, Artificial sequence
  SiRNA target sequence
attcctcagcaatggtatctgtg

SEQ ID NO: 101433 - DNA, 23 bp, Artificial sequence
  SiRNA target sequence
ttcctcagcaatggtatctgtga

SEQ ID NO: 101434 - DNA, 23 bp, Artificial sequence
  SiRNA target sequence
tcctcagcaatggtatctgtgat

SEQ ID NO: 101435 - DNA, 23 bp, Artificial sequence
  SiRNA target sequence
cctcagcaatggtatctgtgata

SEQ ID NO: 101436 - DNA, 23 bp, Artificial sequence
  SiRNA target sequence
ctcagcaatggtatctgtgataa

SEQ ID NO: 101437 - DNA, 23 bp, Artificial sequence
  SiRNA target sequence
tcagcaatggtatctgtgataag

SEQ ID NO: 101438 - DNA, 23 bp, Artificial sequence
  SiRNA target sequence
cagcaatggtatctgtgataagc

SEQ ID NO: 101439 - DNA, 23 bp, Artificial sequence
  SiRNA target sequence
agcaatggtatctgtgataagcg

SEQ ID NO: 101440 - DNA, 23 bp, Artificial sequence
  SiRNA target sequence
gcaatggtatctgtgataagcga

SEQ ID NO: 101441 - DNA, 23 bp, Artificial sequence
  SiRNA target sequence
caatggtatctgtgataagcgaa

SEQ ID NO: 101442 - DNA, 23 bp, Artificial sequence
  SiRNA target sequence
aatggtatctgtgataagcgaaa

SEQ ID NO: 101443 - DNA, 23 bp, Artificial sequence
  SiRNA target sequence
atggtatctgtgataagcgaaag

SEQ ID NO: 101444 - DNA, 23 bp, Artificial sequence
  SiRNA target sequence
tggtatctgtgataagcgaaagt

SEQ ID NO: 101445 - DNA, 23 bp, Artificial sequence
  SiRNA target sequence
ggtatctgtgataagcgaaagtt

SEQ ID NO: 101446 - DNA, 23 bp, Artificial sequence
  SiRNA target sequence
gtatctgtgataagcgaaagttg

SEQ ID NO: 101447 - DNA, 23 bp, Artificial sequence
  SiRNA target sequence
tatctgtgataagcgaaagttgt

SEQ ID NO: 101448 - DNA, 23 bp, Artificial sequence
  SiRNA target sequence
atctgtgataagcgaaagttgta

SEQ ID NO: 101449 - DNA, 23 bp, Artificial sequence
  SiRNA target sequence
tctgtgataagcgaaagttgtag

SEQ ID NO: 101450 - DNA, 23 bp, Artificial sequence
  SiRNA target sequence
ctgtgataagcgaaagttgtaga

SEQ ID NO: 101451 - DNA, 23 bp, Artificial sequence
  SiRNA target sequence
tgtgataagcgaaagttgtagaa

SEQ ID NO: 101452 - DNA, 23 bp, Artificial sequence
  SiRNA target sequence
gtgataagcgaaagttgtagaaa

SEQ ID NO: 101453 - DNA, 23 bp, Artificial sequence
  SiRNA target sequence
tgataagcgaaagttgtagaaaa

SEQ ID NO: 101454 - DNA, 23 bp, Artificial sequence
  SiRNA target sequence
gataagcgaaagttgtagaaaaa

SEQ ID NO: 101455 - DNA, 23 bp, Artificial sequence
  SiRNA target sequence
ataagcgaaagttgtagaaaaaa

SEQ ID NO: 101456 - DNA, 23 bp, Artificial sequence
  SiRNA target sequence
taagcgaaagttgtagaaaaaaa

SEQ ID NO: 101457 - DNA, 23 bp, Artificial sequence
  SiRNA target sequence
aagcgaaagttgtagaaaaaaat

SEQ ID NO: 101458 - DNA, 23 bp, Artificial sequence
  SiRNA target sequence
agcgaaagttgtagaaaaaaata

SEQ ID NO: 101459 - DNA, 23 bp, Artificial sequence
  SiRNA target sequence
gcgaaagttgtagaaaaaaatag

SEQ ID NO: 101460 - DNA, 23 bp, Artificial sequence
  SiRNA target sequence
cgaaagttgtagaaaaaaataga

SEQ ID NO: 101461 - DNA, 23 bp, Artificial sequence
  SiRNA target sequence
gaaagttgtagaaaaaaatagat

SEQ ID NO: 101462 - DNA, 23 bp, Artificial sequence
  SiRNA target sequence
aaagttgtagaaaaaaatagatt

SEQ ID NO: 101463 - DNA, 23 bp, Artificial sequence
  SiRNA target sequence
aagttgtagaaaaaaatagattt

SEQ ID NO: 101464 - DNA, 23 bp, Artificial sequence
  SiRNA target sequence
agttgtagaaaaaaatagatttg

SEQ ID NO: 101465 - DNA, 23 bp, Artificial sequence
  SiRNA target sequence
gttgtagaaaaaaatagatttga

SEQ ID NO: 101466 - DNA, 23 bp, Artificial sequence
  SiRNA target sequence
ttgtagaaaaaaatagatttgag

SEQ ID NO: 101467 - DNA, 23 bp, Artificial sequence
  SiRNA target sequence
tgtagaaaaaaatagatttgagg

SEQ ID NO: 101468 - DNA, 23 bp, Artificial sequence
  SiRNA target sequence
gtagaaaaaaatagatttgagga

SEQ ID NO: 101469 - DNA, 23 bp, Artificial sequence
  SiRNA target sequence
tagaaaaaaatagatttgaggaa

SEQ ID NO: 101470 - DNA, 23 bp, Artificial sequence
  SiRNA target sequence
agaaaaaaatagatttgaggaat

SEQ ID NO: 101471 - DNA, 23 bp, Artificial sequence
  SiRNA target sequence
gaaaaaaatagatttgaggaata

SEQ ID NO: 101472 - DNA, 23 bp, Artificial sequence
  SiRNA target sequence
aaaaaaatagatttgaggaatag

SEQ ID NO: 101473 - DNA, 23 bp, Artificial sequence
  SiRNA target sequence
aaaaaatagatttgaggaataga

SEQ ID NO: 101474 - DNA, 23 bp, Artificial sequence
  SiRNA target sequence
aaaaatagatttgaggaatagaa

SEQ ID NO: 101475 - DNA, 23 bp, Artificial sequence
  SiRNA target sequence
aaaatagatttgaggaatagaat

SEQ ID NO: 101476 - DNA, 23 bp, Artificial sequence
  SiRNA target sequence
aaatagatttgaggaatagaatt

SEQ ID NO: 101477 - DNA, 23 bp, Artificial sequence
  SiRNA target sequence
aatagatttgaggaatagaatta

SEQ ID NO: 101478 - DNA, 23 bp, Artificial sequence
  SiRNA target sequence
atagatttgaggaatagaattaa

SEQ ID NO: 101479 - DNA, 23 bp, Artificial sequence
  SiRNA target sequence
tagatttgaggaatagaattaaa

SEQ ID NO: 101480 - DNA, 23 bp, Artificial sequence
  SiRNA target sequence
agatttgaggaatagaattaaaa

SEQ ID NO: 101481 - DNA, 23 bp, Artificial sequence
  SiRNA target sequence
gatttgaggaatagaattaaaat

SEQ ID NO: 101482 - DNA, 23 bp, Artificial sequence
  SiRNA target sequence
atttgaggaatagaattaaaatc

SEQ ID NO: 101483 - DNA, 23 bp, Artificial sequence
  SiRNA target sequence
tttgaggaatagaattaaaatca

SEQ ID NO: 101484 - DNA, 23 bp, Artificial sequence
  SiRNA target sequence
ttgaggaatagaattaaaatcac

SEQ ID NO: 101485 - DNA, 23 bp, Artificial sequence
  SiRNA target sequence
tgaggaatagaattaaaatcaca

SEQ ID NO: 101486 - DNA, 23 bp, Artificial sequence
  SiRNA target sequence
gaggaatagaattaaaatcacaa

SEQ ID NO: 101487 - DNA, 23 bp, Artificial sequence
  SiRNA target sequence
aggaatagaattaaaatcacaat

SEQ ID NO: 101488 - DNA, 23 bp, Artificial sequence
  SiRNA target sequence
ggaatagaattaaaatcacaata

SEQ ID NO: 101489 - DNA, 23 bp, Artificial sequence
  SiRNA target sequence
gaatagaattaaaatcacaatat

SEQ ID NO: 101490 - DNA, 23 bp, Artificial sequence
  SiRNA target sequence
aatagaattaaaatcacaatatt

SEQ ID NO: 101491 - DNA, 23 bp, Artificial sequence
  SiRNA target sequence
atagaattaaaatcacaatattt

SEQ ID NO: 101492 - DNA, 23 bp, Artificial sequence
  SiRNA target sequence
tagaattaaaatcacaatatttt

SEQ ID NO: 101493 - DNA, 23 bp, Artificial sequence
  SiRNA target sequence
agaattaaaatcacaatattttt

SEQ ID NO: 101494 - DNA, 23 bp, Artificial sequence
  SiRNA target sequence
gaattaaaatcacaatatttttt

SEQ ID NO: 101495 - DNA, 23 bp, Artificial sequence
  SiRNA target sequence
aattaaaatcacaatatttttta

SEQ ID NO: 101496 - DNA, 23 bp, Artificial sequence
  SiRNA target sequence
attaaaatcacaatattttttaa

SEQ ID NO: 101497 - DNA, 23 bp, Artificial sequence
  SiRNA target sequence
ttaaaatcacaatattttttaat

SEQ ID NO: 101498 - DNA, 23 bp, Artificial sequence
  SiRNA target sequence
taaaatcacaatattttttaata

SEQ ID NO: 101499 - DNA, 23 bp, Artificial sequence
  SiRNA target sequence
aaaatcacaatattttttaatat

SEQ ID NO: 101500 - DNA, 23 bp, Artificial sequence
  SiRNA target sequence
aaatcacaatattttttaatata

SEQ ID NO: 101501 - DNA, 23 bp, Artificial sequence
  SiRNA target sequence
aatcacaatattttttaatatat

SEQ ID NO: 101502 - DNA, 23 bp, Artificial sequence
  SiRNA target sequence
atcacaatattttttaatatatt

SEQ ID NO: 101503 - DNA, 23 bp, Artificial sequence
  SiRNA target sequence
tcacaatattttttaatatattt

SEQ ID NO: 101504 - DNA, 23 bp, Artificial sequence
  SiRNA target sequence
cacaatattttttaatatattta

SEQ ID NO: 101505 - DNA, 23 bp, Artificial sequence
  SiRNA target sequence
acaatattttttaatatatttaa

SEQ ID NO: 101506 - DNA, 23 bp, Artificial sequence
  SiRNA target sequence
caatattttttaatatatttaac

SEQ ID NO: 101507 - DNA, 23 bp, Artificial sequence
  SiRNA target sequence
aatattttttaatatatttaacc

SEQ ID NO: 101508 - DNA, 23 bp, Artificial sequence
  SiRNA target sequence
atattttttaatatatttaacca

SEQ ID NO: 101509 - DNA, 23 bp, Artificial sequence
  SiRNA target sequence
tattttttaatatatttaaccaa

SEQ ID NO: 101510 - DNA, 23 bp, Artificial sequence
  SiRNA target sequence
attttttaatatatttaaccaag

SEQ ID NO: 101511 - DNA, 23 bp, Artificial sequence
  SiRNA target sequence
ttttttaatatatttaaccaagg

SEQ ID NO: 101512 - DNA, 23 bp, Artificial sequence
  SiRNA target sequence
tttttaatatatttaaccaaggt

SEQ ID NO: 101513 - DNA, 23 bp, Artificial sequence
  SiRNA target sequence
ttttaatatatttaaccaaggta

SEQ ID NO: 101514 - DNA, 23 bp, Artificial sequence
  SiRNA target sequence
tttaatatatttaaccaaggtat

SEQ ID NO: 101515 - DNA, 23 bp, Artificial sequence
  SiRNA target sequence
ttaatatatttaaccaaggtatt

SEQ ID NO: 101516 - DNA, 23 bp, Artificial sequence
  SiRNA target sequence
taatatatttaaccaaggtattg

SEQ ID NO: 101517 - DNA, 23 bp, Artificial sequence
  SiRNA target sequence
aatatatttaaccaaggtattgt

SEQ ID NO: 101518 - DNA, 23 bp, Artificial sequence
  SiRNA target sequence
atatatttaaccaaggtattgtc

SEQ ID NO: 101519 - DNA, 23 bp, Artificial sequence
  SiRNA target sequence
tatatttaaccaaggtattgtcc

SEQ ID NO: 101520 - DNA, 23 bp, Artificial sequence
  SiRNA target sequence
atatttaaccaaggtattgtcct

SEQ ID NO: 101521 - DNA, 23 bp, Artificial sequence
  SiRNA target sequence
tatttaaccaaggtattgtcctt

SEQ ID NO: 101522 - DNA, 23 bp, Artificial sequence
  SiRNA target sequence
atttaaccaaggtattgtccttt

SEQ ID NO: 101523 - DNA, 23 bp, Artificial sequence
  SiRNA target sequence
tttaaccaaggtattgtccttta

SEQ ID NO: 101524 - DNA, 23 bp, Artificial sequence
  SiRNA target sequence
ttaaccaaggtattgtcctttat

SEQ ID NO: 101525 - DNA, 23 bp, Artificial sequence
  SiRNA target sequence
taaccaaggtattgtcctttatg

SEQ ID NO: 101526 - DNA, 23 bp, Artificial sequence
  SiRNA target sequence
aaccaaggtattgtcctttatgt

SEQ ID NO: 101527 - DNA, 23 bp, Artificial sequence
  SiRNA target sequence
accaaggtattgtcctttatgtt

SEQ ID NO: 101528 - DNA, 23 bp, Artificial sequence
  SiRNA target sequence
ccaaggtattgtcctttatgtta

SEQ ID NO: 101529 - DNA, 23 bp, Artificial sequence
  SiRNA target sequence
caaggtattgtcctttatgttat

SEQ ID NO: 101530 - DNA, 23 bp, Artificial sequence
  SiRNA target sequence
aaggtattgtcctttatgttatt

SEQ ID NO: 101531 - DNA, 23 bp, Artificial sequence
  SiRNA target sequence
aggtattgtcctttatgttatta

SEQ ID NO: 101532 - DNA, 23 bp, Artificial sequence
  SiRNA target sequence
ggtattgtcctttatgttattat

SEQ ID NO: 101533 - DNA, 23 bp, Artificial sequence
  SiRNA target sequence
gtattgtcctttatgttattata

SEQ ID NO: 101534 - DNA, 23 bp, Artificial sequence
  SiRNA target sequence
tattgtcctttatgttattatat

SEQ ID NO: 101535 - DNA, 23 bp, Artificial sequence
  SiRNA target sequence
attgtcctttatgttattatatc

SEQ ID NO: 101536 - DNA, 23 bp, Artificial sequence
  SiRNA target sequence
ttgtcctttatgttattatatct

SEQ ID NO: 101537 - DNA, 23 bp, Artificial sequence
  SiRNA target sequence
tgtcctttatgttattatatctt

SEQ ID NO: 101538 - DNA, 23 bp, Artificial sequence
  SiRNA target sequence
gtcctttatgttattatatctta

SEQ ID NO: 101539 - DNA, 23 bp, Artificial sequence
  SiRNA target sequence
tcctttatgttattatatcttac

SEQ ID NO: 101540 - DNA, 23 bp, Artificial sequence
  SiRNA target sequence
cctttatgttattatatcttaca

SEQ ID NO: 101541 - DNA, 23 bp, Artificial sequence
  SiRNA target sequence
ctttatgttattatatcttacaa

SEQ ID NO: 101542 - DNA, 23 bp, Artificial sequence
  SiRNA target sequence
tttatgttattatatcttacaaa

SEQ ID NO: 101543 - DNA, 23 bp, Artificial sequence
  SiRNA target sequence
ttatgttattatatcttacaaac

SEQ ID NO: 101544 - DNA, 23 bp, Artificial sequence
  SiRNA target sequence
tatgttattatatcttacaaact

SEQ ID NO: 101545 - DNA, 23 bp, Artificial sequence
  SiRNA target sequence
atgttattatatcttacaaactc

SEQ ID NO: 101546 - DNA, 23 bp, Artificial sequence
  SiRNA target sequence
tgttattatatcttacaaactcc

SEQ ID NO: 101547 - DNA, 23 bp, Artificial sequence
  SiRNA target sequence
gttattatatcttacaaactcct

SEQ ID NO: 101548 - DNA, 23 bp, Artificial sequence
  SiRNA target sequence
ttattatatcttacaaactcctc

SEQ ID NO: 101549 - DNA, 23 bp, Artificial sequence
  SiRNA target sequence
tattatatcttacaaactcctcg

SEQ ID NO: 101550 - DNA, 23 bp, Artificial sequence
  SiRNA target sequence
attatatcttacaaactcctcgt

SEQ ID NO: 101551 - DNA, 23 bp, Artificial sequence
  SiRNA target sequence
ttatatcttacaaactcctcgta

SEQ ID NO: 101552 - DNA, 23 bp, Artificial sequence
  SiRNA target sequence
tatatcttacaaactcctcgtaa

SEQ ID NO: 101553 - DNA, 23 bp, Artificial sequence
  SiRNA target sequence
atatcttacaaactcctcgtaat

SEQ ID NO: 101554 - DNA, 23 bp, Artificial sequence
  SiRNA target sequence
tatcttacaaactcctcgtaatt

SEQ ID NO: 101555 - DNA, 23 bp, Artificial sequence
  SiRNA target sequence
atcttacaaactcctcgtaatta

SEQ ID NO: 101556 - DNA, 23 bp, Artificial sequence
  SiRNA target sequence
tcttacaaactcctcgtaattat

SEQ ID NO: 101557 - DNA, 23 bp, Artificial sequence
  SiRNA target sequence
cttacaaactcctcgtaattata

SEQ ID NO: 101558 - DNA, 23 bp, Artificial sequence
  SiRNA target sequence
ttacaaactcctcgtaattataa

SEQ ID NO: 101559 - DNA, 23 bp, Artificial sequence
  SiRNA target sequence
tacaaactcctcgtaattataat

SEQ ID NO: 101560 - DNA, 23 bp, Artificial sequence
  SiRNA target sequence
acaaactcctcgtaattataatt

SEQ ID NO: 101561 - DNA, 23 bp, Artificial sequence
  SiRNA target sequence
caaactcctcgtaattataattt

SEQ ID NO: 101562 - DNA, 23 bp, Artificial sequence
  SiRNA target sequence
aaactcctcgtaattataatttt

SEQ ID NO: 101563 - DNA, 23 bp, Artificial sequence
  SiRNA target sequence
aactcctcgtaattataattttc

SEQ ID NO: 101564 - DNA, 23 bp, Artificial sequence
  SiRNA target sequence
actcctcgtaattataattttca

SEQ ID NO: 101565 - DNA, 23 bp, Artificial sequence
  SiRNA target sequence
ctcctcgtaattataattttcag

SEQ ID NO: 101566 - DNA, 23 bp, Artificial sequence
  SiRNA target sequence
tcctcgtaattataattttcagg

SEQ ID NO: 101567 - DNA, 23 bp, Artificial sequence
  SiRNA target sequence
cctcgtaattataattttcagga

SEQ ID NO: 101568 - DNA, 23 bp, Artificial sequence
  SiRNA target sequence
ctcgtaattataattttcaggat

SEQ ID NO: 101569 - DNA, 23 bp, Artificial sequence
  SiRNA target sequence
tcgtaattataattttcaggata

SEQ ID NO: 101570 - DNA, 23 bp, Artificial sequence
  SiRNA target sequence
cgtaattataattttcaggataa

SEQ ID NO: 101571 - DNA, 23 bp, Artificial sequence
  SiRNA target sequence
gtaattataattttcaggataaa

SEQ ID NO: 101572 - DNA, 23 bp, Artificial sequence
  SiRNA target sequence
taattataattttcaggataaac

SEQ ID NO: 101573 - DNA, 23 bp, Artificial sequence
  SiRNA target sequence
aattataattttcaggataaacc

SEQ ID NO: 101574 - DNA, 23 bp, Artificial sequence
  SiRNA target sequence
attataattttcaggataaaccg

SEQ ID NO: 101575 - DNA, 23 bp, Artificial sequence
  SiRNA target sequence
ttataattttcaggataaaccgc

SEQ ID NO: 101576 - DNA, 23 bp, Artificial sequence
  SiRNA target sequence
tataattttcaggataaaccgct

SEQ ID NO: 101577 - DNA, 23 bp, Artificial sequence
  SiRNA target sequence
ataattttcaggataaaccgcta

SEQ ID NO: 101578 - DNA, 23 bp, Artificial sequence
  SiRNA target sequence
taattttcaggataaaccgctag

SEQ ID NO: 101579 - DNA, 23 bp, Artificial sequence
  SiRNA target sequence
aattttcaggataaaccgctaga

SEQ ID NO: 101580 - DNA, 23 bp, Artificial sequence
  SiRNA target sequence
attttcaggataaaccgctagac

SEQ ID NO: 101581 - DNA, 23 bp, Artificial sequence
  SiRNA target sequence
ttttcaggataaaccgctagaca

SEQ ID NO: 101582 - DNA, 23 bp, Artificial sequence
  SiRNA target sequence
tttcaggataaaccgctagacaa

SEQ ID NO: 101583 - DNA, 23 bp, Artificial sequence
  SiRNA target sequence
ttcaggataaaccgctagacaat

SEQ ID NO: 101584 - DNA, 23 bp, Artificial sequence
  SiRNA target sequence
tcaggataaaccgctagacaatc

SEQ ID NO: 101585 - DNA, 23 bp, Artificial sequence
  SiRNA target sequence
caggataaaccgctagacaatca

SEQ ID NO: 101586 - DNA, 23 bp, Artificial sequence
  SiRNA target sequence
aggataaaccgctagacaatcac

SEQ ID NO: 101587 - DNA, 23 bp, Artificial sequence
  SiRNA target sequence
ggataaaccgctagacaatcacc

SEQ ID NO: 101588 - DNA, 23 bp, Artificial sequence
  SiRNA target sequence
gataaaccgctagacaatcaccg

SEQ ID NO: 101589 - DNA, 23 bp, Artificial sequence
  SiRNA target sequence
ataaaccgctagacaatcaccga

SEQ ID NO: 101590 - DNA, 23 bp, Artificial sequence
  SiRNA target sequence
taaaccgctagacaatcaccgat

SEQ ID NO: 101591 - DNA, 23 bp, Artificial sequence
  SiRNA target sequence
aaaccgctagacaatcaccgatt

SEQ ID NO: 101592 - DNA, 23 bp, Artificial sequence
  SiRNA target sequence
aaccgctagacaatcaccgattt

SEQ ID NO: 101593 - DNA, 23 bp, Artificial sequence
  SiRNA target sequence
accgctagacaatcaccgatttc

SEQ ID NO: 101594 - DNA, 23 bp, Artificial sequence
  SiRNA target sequence
ccgctagacaatcaccgatttca

SEQ ID NO: 101595 - DNA, 23 bp, Artificial sequence
  SiRNA target sequence
cgctagacaatcaccgatttcaa

SEQ ID NO: 101596 - DNA, 23 bp, Artificial sequence
  SiRNA target sequence
gctagacaatcaccgatttcaaa

SEQ ID NO: 101597 - DNA, 23 bp, Artificial sequence
  SiRNA target sequence
ctagacaatcaccgatttcaaaa

SEQ ID NO: 101598 - DNA, 23 bp, Artificial sequence
  SiRNA target sequence
tagacaatcaccgatttcaaaat

SEQ ID NO: 101599 - DNA, 23 bp, Artificial sequence
  SiRNA target sequence
agacaatcaccgatttcaaaatt

SEQ ID NO: 101600 - DNA, 23 bp, Artificial sequence
  SiRNA target sequence
gacaatcaccgatttcaaaattt

SEQ ID NO: 101601 - DNA, 23 bp, Artificial sequence
  SiRNA target sequence
acaatcaccgatttcaaaatttt

SEQ ID NO: 101602 - DNA, 23 bp, Artificial sequence
  SiRNA target sequence
caatcaccgatttcaaaattttc

SEQ ID NO: 101603 - DNA, 23 bp, Artificial sequence
  SiRNA target sequence
aatcaccgatttcaaaattttct

SEQ ID NO: 101604 - DNA, 23 bp, Artificial sequence
  SiRNA target sequence
atcaccgatttcaaaattttcta

SEQ ID NO: 101605 - DNA, 23 bp, Artificial sequence
  SiRNA target sequence
tcaccgatttcaaaattttctat

SEQ ID NO: 101606 - DNA, 23 bp, Artificial sequence
  SiRNA target sequence
caccgatttcaaaattttctata

SEQ ID NO: 101607 - DNA, 23 bp, Artificial sequence
  SiRNA target sequence
accgatttcaaaattttctatat

SEQ ID NO: 101608 - DNA, 23 bp, Artificial sequence
  SiRNA target sequence
ccgatttcaaaattttctatatc

SEQ ID NO: 101609 - DNA, 23 bp, Artificial sequence
  SiRNA target sequence
cgatttcaaaattttctatatct

SEQ ID NO: 101610 - DNA, 23 bp, Artificial sequence
  SiRNA target sequence
gatttcaaaattttctatatcta

SEQ ID NO: 101611 - DNA, 23 bp, Artificial sequence
  SiRNA target sequence
atttcaaaattttctatatctat

SEQ ID NO: 101612 - DNA, 23 bp, Artificial sequence
  SiRNA target sequence
tttcaaaattttctatatctata

SEQ ID NO: 101613 - DNA, 23 bp, Artificial sequence
  SiRNA target sequence
ttcaaaattttctatatctatat

SEQ ID NO: 101614 - DNA, 23 bp, Artificial sequence
  SiRNA target sequence
tcaaaattttctatatctatatc

SEQ ID NO: 101615 - DNA, 23 bp, Artificial sequence
  SiRNA target sequence
caaaattttctatatctatatca

SEQ ID NO: 101616 - DNA, 23 bp, Artificial sequence
  SiRNA target sequence
aaaattttctatatctatatcaa

SEQ ID NO: 101617 - DNA, 23 bp, Artificial sequence
  SiRNA target sequence
aaattttctatatctatatcaaa

SEQ ID NO: 101618 - DNA, 23 bp, Artificial sequence
  SiRNA target sequence
aattttctatatctatatcaaat

SEQ ID NO: 101619 - DNA, 23 bp, Artificial sequence
  SiRNA target sequence
attttctatatctatatcaaatt

SEQ ID NO: 101620 - DNA, 23 bp, Artificial sequence
  SiRNA target sequence
ttttctatatctatatcaaattt

SEQ ID NO: 101621 - DNA, 23 bp, Artificial sequence
  SiRNA target sequence
tttctatatctatatcaaatttt

SEQ ID NO: 101622 - DNA, 23 bp, Artificial sequence
  SiRNA target sequence
ttctatatctatatcaaatttta

SEQ ID NO: 101623 - DNA, 23 bp, Artificial sequence
  SiRNA target sequence
tctatatctatatcaaattttat

SEQ ID NO: 101624 - DNA, 23 bp, Artificial sequence
  SiRNA target sequence
ctatatctatatcaaattttatt

SEQ ID NO: 101625 - DNA, 23 bp, Artificial sequence
  SiRNA target sequence
tatatctatatcaaattttattt

SEQ ID NO: 101626 - DNA, 23 bp, Artificial sequence
  SiRNA target sequence
atatctatatcaaattttatttc

SEQ ID NO: 101627 - DNA, 23 bp, Artificial sequence
  SiRNA target sequence
tatctatatcaaattttatttct

SEQ ID NO: 101628 - DNA, 23 bp, Artificial sequence
  SiRNA target sequence
atctatatcaaattttatttcta

SEQ ID NO: 101629 - DNA, 23 bp, Artificial sequence
  SiRNA target sequence
tctatatcaaattttatttctaa

SEQ ID NO: 101630 - DNA, 23 bp, Artificial sequence
  SiRNA target sequence
ctatatcaaattttatttctaaa

SEQ ID NO: 101631 - DNA, 23 bp, Artificial sequence
  SiRNA target sequence
tatatcaaattttatttctaaaa

SEQ ID NO: 101632 - DNA, 23 bp, Artificial sequence
  SiRNA target sequence
atatcaaattttatttctaaaat

SEQ ID NO: 101633 - DNA, 23 bp, Artificial sequence
  SiRNA target sequence
tatcaaattttatttctaaaata

SEQ ID NO: 101634 - DNA, 23 bp, Artificial sequence
  SiRNA target sequence
atcaaattttatttctaaaatag

SEQ ID NO: 101635 - DNA, 23 bp, Artificial sequence
  SiRNA target sequence
tcaaattttatttctaaaatagg

SEQ ID NO: 101636 - DNA, 23 bp, Artificial sequence
  SiRNA target sequence
caaattttatttctaaaatagga

SEQ ID NO: 101637 - DNA, 23 bp, Artificial sequence
  SiRNA target sequence
aaattttatttctaaaataggat

SEQ ID NO: 101638 - DNA, 23 bp, Artificial sequence
  SiRNA target sequence
aattttatttctaaaataggata

SEQ ID NO: 101639 - DNA, 23 bp, Artificial sequence
  SiRNA target sequence
attttatttctaaaataggataa

SEQ ID NO: 101640 - DNA, 23 bp, Artificial sequence
  SiRNA target sequence
ttttatttctaaaataggataaa

SEQ ID NO: 101641 - DNA, 23 bp, Artificial sequence
  SiRNA target sequence
tttatttctaaaataggataaat

SEQ ID NO: 101642 - DNA, 23 bp, Artificial sequence
  SiRNA target sequence
ttatttctaaaataggataaatg

SEQ ID NO: 101643 - DNA, 23 bp, Artificial sequence
  SiRNA target sequence
tatttctaaaataggataaatgt

SEQ ID NO: 101644 - DNA, 23 bp, Artificial sequence
  SiRNA target sequence
atttctaaaataggataaatgta

SEQ ID NO: 101645 - DNA, 23 bp, Artificial sequence
  SiRNA target sequence
tttctaaaataggataaatgtaa

SEQ ID NO: 101646 - DNA, 23 bp, Artificial sequence
  SiRNA target sequence
ttctaaaataggataaatgtaat

SEQ ID NO: 101647 - DNA, 23 bp, Artificial sequence
  SiRNA target sequence
tctaaaataggataaatgtaatt

SEQ ID NO: 101648 - DNA, 23 bp, Artificial sequence
  SiRNA target sequence
ctaaaataggataaatgtaattg

SEQ ID NO: 101649 - DNA, 23 bp, Artificial sequence
  SiRNA target sequence
taaaataggataaatgtaattgt

SEQ ID NO: 101650 - DNA, 23 bp, Artificial sequence
  SiRNA target sequence
aaaataggataaatgtaattgta

SEQ ID NO: 101651 - DNA, 23 bp, Artificial sequence
  SiRNA target sequence
aaataggataaatgtaattgtaa

SEQ ID NO: 101652 - DNA, 23 bp, Artificial sequence
  SiRNA target sequence
aataggataaatgtaattgtaag

SEQ ID NO: 101653 - DNA, 23 bp, Artificial sequence
  SiRNA target sequence
ataggataaatgtaattgtaagg

SEQ ID NO: 101654 - DNA, 23 bp, Artificial sequence
  SiRNA target sequence
taggataaatgtaattgtaaggt

SEQ ID NO: 101655 - DNA, 23 bp, Artificial sequence
  SiRNA target sequence
aggataaatgtaattgtaaggtg

SEQ ID NO: 101656 - DNA, 23 bp, Artificial sequence
  SiRNA target sequence
ggataaatgtaattgtaaggtgt

SEQ ID NO: 101657 - DNA, 23 bp, Artificial sequence
  SiRNA target sequence
gataaatgtaattgtaaggtgtt

SEQ ID NO: 101658 - DNA, 23 bp, Artificial sequence
  SiRNA target sequence
ataaatgtaattgtaaggtgtta

SEQ ID NO: 101659 - DNA, 23 bp, Artificial sequence
  SiRNA target sequence
taaatgtaattgtaaggtgttaa

SEQ ID NO: 101660 - DNA, 23 bp, Artificial sequence
  SiRNA target sequence
aaatgtaattgtaaggtgttaat

SEQ ID NO: 101661 - DNA, 23 bp, Artificial sequence
  SiRNA target sequence
aatgtaattgtaaggtgttaata

SEQ ID NO: 101662 - DNA, 23 bp, Artificial sequence
  SiRNA target sequence
atgtaattgtaaggtgttaatat

SEQ ID NO: 101663 - DNA, 23 bp, Artificial sequence
  SiRNA target sequence
tgtaattgtaaggtgttaatatc

SEQ ID NO: 101664 - DNA, 23 bp, Artificial sequence
  SiRNA target sequence
gtaattgtaaggtgttaatatct

SEQ ID NO: 101665 - DNA, 23 bp, Artificial sequence
  SiRNA target sequence
taattgtaaggtgttaatatctt

SEQ ID NO: 101666 - DNA, 23 bp, Artificial sequence
  SiRNA target sequence
aattgtaaggtgttaatatctta

SEQ ID NO: 101667 - DNA, 23 bp, Artificial sequence
  SiRNA target sequence
attgtaaggtgttaatatcttaa

SEQ ID NO: 101668 - DNA, 23 bp, Artificial sequence
  SiRNA target sequence
ttgtaaggtgttaatatcttaat

SEQ ID NO: 101669 - DNA, 23 bp, Artificial sequence
  SiRNA target sequence
tgtaaggtgttaatatcttaata

SEQ ID NO: 101670 - DNA, 23 bp, Artificial sequence
  SiRNA target sequence
gtaaggtgttaatatcttaatat

SEQ ID NO: 101671 - DNA, 23 bp, Artificial sequence
  SiRNA target sequence
taaggtgttaatatcttaatatc

SEQ ID NO: 101672 - DNA, 23 bp, Artificial sequence
  SiRNA target sequence
aaggtgttaatatcttaatatca

SEQ ID NO: 101673 - DNA, 23 bp, Artificial sequence
  SiRNA target sequence
aggtgttaatatcttaatatcat

SEQ ID NO: 101674 - DNA, 23 bp, Artificial sequence
  SiRNA target sequence
ggtgttaatatcttaatatcatt

SEQ ID NO: 101675 - DNA, 23 bp, Artificial sequence
  SiRNA target sequence
gtgttaatatcttaatatcattt

SEQ ID NO: 101676 - DNA, 23 bp, Artificial sequence
  SiRNA target sequence
tgttaatatcttaatatcattta

SEQ ID NO: 101677 - DNA, 23 bp, Artificial sequence
  SiRNA target sequence
gttaatatcttaatatcatttat

SEQ ID NO: 101678 - DNA, 23 bp, Artificial sequence
  SiRNA target sequence
ttaatatcttaatatcatttatt

SEQ ID NO: 101679 - DNA, 23 bp, Artificial sequence
  SiRNA target sequence
taatatcttaatatcatttattg

SEQ ID NO: 101680 - DNA, 23 bp, Artificial sequence
  SiRNA target sequence
aatatcttaatatcatttattga

SEQ ID NO: 101681 - DNA, 23 bp, Artificial sequence
  SiRNA target sequence
atatcttaatatcatttattgac

SEQ ID NO: 101682 - DNA, 23 bp, Artificial sequence
  SiRNA target sequence
tatcttaatatcatttattgacg

SEQ ID NO: 101683 - DNA, 23 bp, Artificial sequence
  SiRNA target sequence
atcttaatatcatttattgacgc

SEQ ID NO: 101684 - DNA, 23 bp, Artificial sequence
  SiRNA target sequence
tcttaatatcatttattgacgca

SEQ ID NO: 101685 - DNA, 23 bp, Artificial sequence
  SiRNA target sequence
cttaatatcatttattgacgcac

SEQ ID NO: 101686 - DNA, 23 bp, Artificial sequence
  SiRNA target sequence
ttaatatcatttattgacgcact

SEQ ID NO: 101687 - DNA, 23 bp, Artificial sequence
  SiRNA target sequence
taatatcatttattgacgcactg

SEQ ID NO: 101688 - DNA, 23 bp, Artificial sequence
  SiRNA target sequence
aatatcatttattgacgcactgt

SEQ ID NO: 101689 - DNA, 23 bp, Artificial sequence
  SiRNA target sequence
atatcatttattgacgcactgta

SEQ ID NO: 101690 - DNA, 23 bp, Artificial sequence
  SiRNA target sequence
tatcatttattgacgcactgtat

SEQ ID NO: 101691 - DNA, 23 bp, Artificial sequence
  SiRNA target sequence
atcatttattgacgcactgtata

SEQ ID NO: 101692 - DNA, 23 bp, Artificial sequence
  SiRNA target sequence
tcatttattgacgcactgtataa

SEQ ID NO: 101693 - DNA, 23 bp, Artificial sequence
  SiRNA target sequence
catttattgacgcactgtataaa

SEQ ID NO: 101694 - DNA, 23 bp, Artificial sequence
  SiRNA target sequence
atttattgacgcactgtataaat

SEQ ID NO: 101695 - DNA, 23 bp, Artificial sequence
  SiRNA target sequence
tttattgacgcactgtataaatc

SEQ ID NO: 101696 - DNA, 23 bp, Artificial sequence
  SiRNA target sequence
ttattgacgcactgtataaatca

SEQ ID NO: 101697 - DNA, 23 bp, Artificial sequence
  SiRNA target sequence
tattgacgcactgtataaatcat

SEQ ID NO: 101698 - DNA, 23 bp, Artificial sequence
  SiRNA target sequence
attgacgcactgtataaatcatt

SEQ ID NO: 101699 - DNA, 23 bp, Artificial sequence
  SiRNA target sequence
ttgacgcactgtataaatcattt

SEQ ID NO: 101700 - DNA, 23 bp, Artificial sequence
  SiRNA target sequence
tgacgcactgtataaatcatttt

SEQ ID NO: 101701 - DNA, 23 bp, Artificial sequence
  SiRNA target sequence
gacgcactgtataaatcattttt

SEQ ID NO: 101702 - DNA, 23 bp, Artificial sequence
  SiRNA target sequence
acgcactgtataaatcattttta

SEQ ID NO: 101703 - DNA, 23 bp, Artificial sequence
  SiRNA target sequence
cgcactgtataaatcatttttac

SEQ ID NO: 101704 - DNA, 23 bp, Artificial sequence
  SiRNA target sequence
gcactgtataaatcatttttaca

SEQ ID NO: 101705 - DNA, 23 bp, Artificial sequence
  SiRNA target sequence
cactgtataaatcatttttacaa

SEQ ID NO: 101706 - DNA, 23 bp, Artificial sequence
  SiRNA target sequence
actgtataaatcatttttacaac

SEQ ID NO: 101707 - DNA, 23 bp, Artificial sequence
  SiRNA target sequence
ctgtataaatcatttttacaact

SEQ ID NO: 101708 - DNA, 23 bp, Artificial sequence
  SiRNA target sequence
tgtataaatcatttttacaactt

SEQ ID NO: 101709 - DNA, 23 bp, Artificial sequence
  SiRNA target sequence
gtataaatcatttttacaacttg

SEQ ID NO: 101710 - DNA, 23 bp, Artificial sequence
  SiRNA target sequence
tataaatcatttttacaacttgc

SEQ ID NO: 101711 - DNA, 23 bp, Artificial sequence
  SiRNA target sequence
ataaatcatttttacaacttgca

SEQ ID NO: 101712 - DNA, 23 bp, Artificial sequence
  SiRNA target sequence
taaatcatttttacaacttgcaa

SEQ ID NO: 101713 - DNA, 23 bp, Artificial sequence
  SiRNA target sequence
aaatcatttttacaacttgcaaa

SEQ ID NO: 101714 - DNA, 23 bp, Artificial sequence
  SiRNA target sequence
aatcatttttacaacttgcaaaa

SEQ ID NO: 101715 - DNA, 23 bp, Artificial sequence
  SiRNA target sequence
atcatttttacaacttgcaaaat

SEQ ID NO: 101716 - DNA, 23 bp, Artificial sequence
  SiRNA target sequence
tcatttttacaacttgcaaaatt

SEQ ID NO: 101717 - DNA, 23 bp, Artificial sequence
  SiRNA target sequence
catttttacaacttgcaaaattt

SEQ ID NO: 101718 - DNA, 23 bp, Artificial sequence
  SiRNA target sequence
atttttacaacttgcaaaatttt

SEQ ID NO: 101719 - DNA, 23 bp, Artificial sequence
  SiRNA target sequence
tttttacaacttgcaaaattttt

SEQ ID NO: 101720 - DNA, 23 bp, Artificial sequence
  SiRNA target sequence
ttttacaacttgcaaaattttta

SEQ ID NO: 101721 - DNA, 23 bp, Artificial sequence
  SiRNA target sequence
tttacaacttgcaaaatttttag

SEQ ID NO: 101722 - DNA, 23 bp, Artificial sequence
  SiRNA target sequence
ttacaacttgcaaaatttttagc

SEQ ID NO: 101723 - DNA, 23 bp, Artificial sequence
  SiRNA target sequence
tacaacttgcaaaatttttagca

SEQ ID NO: 101724 - DNA, 23 bp, Artificial sequence
  SiRNA target sequence
acaacttgcaaaatttttagcat

SEQ ID NO: 101725 - DNA, 23 bp, Artificial sequence
  SiRNA target sequence
caacttgcaaaatttttagcatt

SEQ ID NO: 101726 - DNA, 23 bp, Artificial sequence
  SiRNA target sequence
aacttgcaaaatttttagcattt

SEQ ID NO: 101727 - DNA, 23 bp, Artificial sequence
  SiRNA target sequence
acttgcaaaatttttagcatttt

SEQ ID NO: 101728 - DNA, 23 bp, Artificial sequence
  SiRNA target sequence
cttgcaaaatttttagcattttg

SEQ ID NO: 101729 - DNA, 23 bp, Artificial sequence
  SiRNA target sequence
ttgcaaaatttttagcattttgt

SEQ ID NO: 101730 - DNA, 23 bp, Artificial sequence
  SiRNA target sequence
tgcaaaatttttagcattttgta

SEQ ID NO: 101731 - DNA, 23 bp, Artificial sequence
  SiRNA target sequence
gcaaaatttttagcattttgtag

SEQ ID NO: 101732 - DNA, 23 bp, Artificial sequence
  SiRNA target sequence
caaaatttttagcattttgtagt

SEQ ID NO: 101733 - DNA, 23 bp, Artificial sequence
  SiRNA target sequence
aaaatttttagcattttgtagtt

SEQ ID NO: 101734 - DNA, 23 bp, Artificial sequence
  SiRNA target sequence
aaatttttagcattttgtagttt

SEQ ID NO: 101735 - DNA, 23 bp, Artificial sequence
  SiRNA target sequence
aatttttagcattttgtagtttg

SEQ ID NO: 101736 - DNA, 23 bp, Artificial sequence
  SiRNA target sequence
atttttagcattttgtagtttgt

SEQ ID NO: 101737 - DNA, 23 bp, Artificial sequence
  SiRNA target sequence
tttttagcattttgtagtttgta

SEQ ID NO: 101738 - DNA, 23 bp, Artificial sequence
  SiRNA target sequence
ttttagcattttgtagtttgtaa

SEQ ID NO: 101739 - DNA, 23 bp, Artificial sequence
  SiRNA target sequence
tttagcattttgtagtttgtaat

SEQ ID NO: 101740 - DNA, 23 bp, Artificial sequence
  SiRNA target sequence
ttagcattttgtagtttgtaatg

SEQ ID NO: 101741 - DNA, 23 bp, Artificial sequence
  SiRNA target sequence
tagcattttgtagtttgtaatgc

SEQ ID NO: 101742 - DNA, 23 bp, Artificial sequence
  SiRNA target sequence
agcattttgtagtttgtaatgcg

SEQ ID NO: 101743 - DNA, 23 bp, Artificial sequence
  SiRNA target sequence
gcattttgtagtttgtaatgcgg

SEQ ID NO: 101744 - DNA, 23 bp, Artificial sequence
  SiRNA target sequence
cattttgtagtttgtaatgcggt

SEQ ID NO: 101745 - DNA, 23 bp, Artificial sequence
  SiRNA target sequence
attttgtagtttgtaatgcggta

SEQ ID NO: 101746 - DNA, 23 bp, Artificial sequence
  SiRNA target sequence
ttttgtagtttgtaatgcggtaa

SEQ ID NO: 101747 - DNA, 23 bp, Artificial sequence
  SiRNA target sequence
tttgtagtttgtaatgcggtaat

SEQ ID NO: 101748 - DNA, 23 bp, Artificial sequence
  SiRNA target sequence
ttgtagtttgtaatgcggtaata

SEQ ID NO: 101749 - DNA, 23 bp, Artificial sequence
  SiRNA target sequence
tgtagtttgtaatgcggtaatat

SEQ ID NO: 101750 - DNA, 23 bp, Artificial sequence
  SiRNA target sequence
gtagtttgtaatgcggtaatata

SEQ ID NO: 101751 - DNA, 23 bp, Artificial sequence
  SiRNA target sequence
tagtttgtaatgcggtaatatat

SEQ ID NO: 101752 - DNA, 23 bp, Artificial sequence
  SiRNA target sequence
agtttgtaatgcggtaatatata

SEQ ID NO: 101753 - DNA, 23 bp, Artificial sequence
  SiRNA target sequence
gtttgtaatgcggtaatatataa

SEQ ID NO: 101754 - DNA, 23 bp, Artificial sequence
  SiRNA target sequence
tttgtaatgcggtaatatataat

SEQ ID NO: 101755 - DNA, 23 bp, Artificial sequence
  SiRNA target sequence
ttgtaatgcggtaatatataata

SEQ ID NO: 101756 - DNA, 23 bp, Artificial sequence
  SiRNA target sequence
tgtaatgcggtaatatataatat

SEQ ID NO: 101757 - DNA, 23 bp, Artificial sequence
  SiRNA target sequence
gtaatgcggtaatatataatata

SEQ ID NO: 101758 - DNA, 23 bp, Artificial sequence
  SiRNA target sequence
taatgcggtaatatataatatag

SEQ ID NO: 101759 - DNA, 23 bp, Artificial sequence
  SiRNA target sequence
aatgcggtaatatataatataga

SEQ ID NO: 101760 - DNA, 23 bp, Artificial sequence
  SiRNA target sequence
atgcggtaatatataatatagat

SEQ ID NO: 101761 - DNA, 23 bp, Artificial sequence
  SiRNA target sequence
tgcggtaatatataatatagatc

SEQ ID NO: 101762 - DNA, 23 bp, Artificial sequence
  SiRNA target sequence
gcggtaatatataatatagatct

SEQ ID NO: 101763 - DNA, 23 bp, Artificial sequence
  SiRNA target sequence
cggtaatatataatatagatctt

SEQ ID NO: 101764 - DNA, 23 bp, Artificial sequence
  SiRNA target sequence
ggtaatatataatatagatcttt

SEQ ID NO: 101765 - DNA, 23 bp, Artificial sequence
  SiRNA target sequence
gtaatatataatatagatctttt

SEQ ID NO: 101766 - DNA, 23 bp, Artificial sequence
  SiRNA target sequence
taatatataatatagatctttta

SEQ ID NO: 101767 - DNA, 23 bp, Artificial sequence
  SiRNA target sequence
aatatataatatagatcttttat

SEQ ID NO: 101768 - DNA, 23 bp, Artificial sequence
  SiRNA target sequence
atatataatatagatcttttatc

SEQ ID NO: 101769 - DNA, 23 bp, Artificial sequence
  SiRNA target sequence
tatataatatagatcttttatcc

SEQ ID NO: 101770 - DNA, 23 bp, Artificial sequence
  SiRNA target sequence
atataatatagatcttttatcca

SEQ ID NO: 101771 - DNA, 23 bp, Artificial sequence
  SiRNA target sequence
tataatatagatcttttatccat

SEQ ID NO: 101772 - DNA, 23 bp, Artificial sequence
  SiRNA target sequence
ataatatagatcttttatccatg

SEQ ID NO: 101773 - DNA, 23 bp, Artificial sequence
  SiRNA target sequence
taatatagatcttttatccatgt

SEQ ID NO: 101774 - DNA, 23 bp, Artificial sequence
  SiRNA target sequence
aatatagatcttttatccatgtc

SEQ ID NO: 101775 - DNA, 23 bp, Artificial sequence
  SiRNA target sequence
atatagatcttttatccatgtct

SEQ ID NO: 101776 - DNA, 23 bp, Artificial sequence
  SiRNA target sequence
tatagatcttttatccatgtctt

SEQ ID NO: 101777 - DNA, 23 bp, Artificial sequence
  SiRNA target sequence
atagatcttttatccatgtctta

SEQ ID NO: 101778 - DNA, 23 bp, Artificial sequence
  SiRNA target sequence
tagatcttttatccatgtcttaa

SEQ ID NO: 101779 - DNA, 23 bp, Artificial sequence
  SiRNA target sequence
agatcttttatccatgtcttaaa

SEQ ID NO: 101780 - DNA, 23 bp, Artificial sequence
  SiRNA target sequence
gatcttttatccatgtcttaaat

SEQ ID NO: 101781 - DNA, 23 bp, Artificial sequence
  SiRNA target sequence
atcttttatccatgtcttaaatt

SEQ ID NO: 101782 - DNA, 23 bp, Artificial sequence
  SiRNA target sequence
tcttttatccatgtcttaaattc

SEQ ID NO: 101783 - DNA, 23 bp, Artificial sequence
  SiRNA target sequence
cttttatccatgtcttaaattcg

SEQ ID NO: 101784 - DNA, 23 bp, Artificial sequence
  SiRNA target sequence
ttttatccatgtcttaaattcgc

SEQ ID NO: 101785 - DNA, 23 bp, Artificial sequence
  SiRNA target sequence
tttatccatgtcttaaattcgcc

SEQ ID NO: 101786 - DNA, 23 bp, Artificial sequence
  SiRNA target sequence
ttatccatgtcttaaattcgccc

SEQ ID NO: 101787 - DNA, 23 bp, Artificial sequence
  SiRNA target sequence
tatccatgtcttaaattcgccca

SEQ ID NO: 101788 - DNA, 23 bp, Artificial sequence
  SiRNA target sequence
atccatgtcttaaattcgcccat

SEQ ID NO: 101789 - DNA, 23 bp, Artificial sequence
  SiRNA target sequence
tccatgtcttaaattcgcccata

SEQ ID NO: 101790 - DNA, 23 bp, Artificial sequence
  SiRNA target sequence
ccatgtcttaaattcgcccataa

SEQ ID NO: 101791 - DNA, 23 bp, Artificial sequence
  SiRNA target sequence
catgtcttaaattcgcccataaa

SEQ ID NO: 101792 - DNA, 23 bp, Artificial sequence
  SiRNA target sequence
atgtcttaaattcgcccataaat

SEQ ID NO: 101793 - DNA, 23 bp, Artificial sequence
  SiRNA target sequence
tgtcttaaattcgcccataaatc

SEQ ID NO: 101794 - DNA, 23 bp, Artificial sequence
  SiRNA target sequence
gtcttaaattcgcccataaatcc

SEQ ID NO: 101795 - DNA, 23 bp, Artificial sequence
  SiRNA target sequence
tcttaaattcgcccataaatcct

SEQ ID NO: 101796 - DNA, 23 bp, Artificial sequence
  SiRNA target sequence
cttaaattcgcccataaatcctt

SEQ ID NO: 101797 - DNA, 23 bp, Artificial sequence
  SiRNA target sequence
ttaaattcgcccataaatccttc

SEQ ID NO: 101798 - DNA, 23 bp, Artificial sequence
  SiRNA target sequence
taaattcgcccataaatccttct

SEQ ID NO: 101799 - DNA, 23 bp, Artificial sequence
  SiRNA target sequence
aaattcgcccataaatccttctt

SEQ ID NO: 101800 - DNA, 23 bp, Artificial sequence
  SiRNA target sequence
aattcgcccataaatccttcttt

SEQ ID NO: 101801 - DNA, 23 bp, Artificial sequence
  SiRNA target sequence
attcgcccataaatccttctttg

SEQ ID NO: 101802 - DNA, 23 bp, Artificial sequence
  SiRNA target sequence
ttcgcccataaatccttctttgt

SEQ ID NO: 101803 - DNA, 23 bp, Artificial sequence
  SiRNA target sequence
tcgcccataaatccttctttgtc

SEQ ID NO: 101804 - DNA, 23 bp, Artificial sequence
  SiRNA target sequence
cgcccataaatccttctttgtct

SEQ ID NO: 101805 - DNA, 23 bp, Artificial sequence
  SiRNA target sequence
gcccataaatccttctttgtctt

SEQ ID NO: 101806 - DNA, 23 bp, Artificial sequence
  SiRNA target sequence
cccataaatccttctttgtcttg

SEQ ID NO: 101807 - DNA, 23 bp, Artificial sequence
  SiRNA target sequence
ccataaatccttctttgtcttgg

SEQ ID NO: 101808 - DNA, 23 bp, Artificial sequence
  SiRNA target sequence
cataaatccttctttgtcttggc

SEQ ID NO: 101809 - DNA, 23 bp, Artificial sequence
  SiRNA target sequence
ataaatccttctttgtcttggct

SEQ ID NO: 101810 - DNA, 23 bp, Artificial sequence
  SiRNA target sequence
taaatccttctttgtcttggcta

SEQ ID NO: 101811 - DNA, 23 bp, Artificial sequence
  SiRNA target sequence
aaatccttctttgtcttggctat

SEQ ID NO: 101812 - DNA, 23 bp, Artificial sequence
  SiRNA target sequence
aatccttctttgtcttggctatc

SEQ ID NO: 101813 - DNA, 23 bp, Artificial sequence
  SiRNA target sequence
atccttctttgtcttggctatct

SEQ ID NO: 101814 - DNA, 23 bp, Artificial sequence
  SiRNA target sequence
tccttctttgtcttggctatctc

SEQ ID NO: 101815 - DNA, 23 bp, Artificial sequence
  SiRNA target sequence
ccttctttgtcttggctatctcc

SEQ ID NO: 101816 - DNA, 23 bp, Artificial sequence
  SiRNA target sequence
cttctttgtcttggctatctcca

SEQ ID NO: 101817 - DNA, 23 bp, Artificial sequence
  SiRNA target sequence
ttctttgtcttggctatctccat

SEQ ID NO: 101818 - DNA, 23 bp, Artificial sequence
  SiRNA target sequence
tctttgtcttggctatctccatt

SEQ ID NO: 101819 - DNA, 23 bp, Artificial sequence
  SiRNA target sequence
ctttgtcttggctatctccatta

SEQ ID NO: 101820 - DNA, 23 bp, Artificial sequence
  SiRNA target sequence
tttgtcttggctatctccattac

SEQ ID NO: 101821 - DNA, 23 bp, Artificial sequence
  SiRNA target sequence
ttgtcttggctatctccattacc

SEQ ID NO: 101822 - DNA, 23 bp, Artificial sequence
  SiRNA target sequence
tgtcttggctatctccattaccc

SEQ ID NO: 101823 - DNA, 23 bp, Artificial sequence
  SiRNA target sequence
gtcttggctatctccattaccct

SEQ ID NO: 101824 - DNA, 23 bp, Artificial sequence
  SiRNA target sequence
tcttggctatctccattaccctt

SEQ ID NO: 101825 - DNA, 23 bp, Artificial sequence
  SiRNA target sequence
cttggctatctccattacccttt

SEQ ID NO: 101826 - DNA, 23 bp, Artificial sequence
  SiRNA target sequence
ttggctatctccattaccctttc

SEQ ID NO: 101827 - DNA, 23 bp, Artificial sequence
  SiRNA target sequence
tggctatctccattaccctttct

SEQ ID NO: 101828 - DNA, 23 bp, Artificial sequence
  SiRNA target sequence
ggctatctccattaccctttctt

SEQ ID NO: 101829 - DNA, 23 bp, Artificial sequence
  SiRNA target sequence
gctatctccattaccctttctta

SEQ ID NO: 101830 - DNA, 23 bp, Artificial sequence
  SiRNA target sequence
ctatctccattaccctttcttat

SEQ ID NO: 101831 - DNA, 23 bp, Artificial sequence
  SiRNA target sequence
tatctccattaccctttcttatc

SEQ ID NO: 101832 - DNA, 23 bp, Artificial sequence
  SiRNA target sequence
atctccattaccctttcttatca

SEQ ID NO: 101833 - DNA, 23 bp, Artificial sequence
  SiRNA target sequence
tctccattaccctttcttatcag

SEQ ID NO: 101834 - DNA, 23 bp, Artificial sequence
  SiRNA target sequence
ctccattaccctttcttatcaga

SEQ ID NO: 101835 - DNA, 23 bp, Artificial sequence
  SiRNA target sequence
tccattaccctttcttatcagag

SEQ ID NO: 101836 - DNA, 23 bp, Artificial sequence
  SiRNA target sequence
ccattaccctttcttatcagagg

SEQ ID NO: 101837 - DNA, 23 bp, Artificial sequence
  SiRNA target sequence
cattaccctttcttatcagaggt

SEQ ID NO: 101838 - DNA, 23 bp, Artificial sequence
  SiRNA target sequence
attaccctttcttatcagaggtt

SEQ ID NO: 101839 - DNA, 23 bp, Artificial sequence
  SiRNA target sequence
ttaccctttcttatcagaggttt

SEQ ID NO: 101840 - DNA, 23 bp, Artificial sequence
  SiRNA target sequence
taccctttcttatcagaggttta

SEQ ID NO: 101841 - DNA, 23 bp, Artificial sequence
  SiRNA target sequence
accctttcttatcagaggtttag

SEQ ID NO: 101842 - DNA, 23 bp, Artificial sequence
  SiRNA target sequence
ccctttcttatcagaggtttagc

SEQ ID NO: 101843 - DNA, 23 bp, Artificial sequence
  SiRNA target sequence
cctttcttatcagaggtttagct

SEQ ID NO: 101844 - DNA, 23 bp, Artificial sequence
  SiRNA target sequence
ctttcttatcagaggtttagctc

SEQ ID NO: 101845 - DNA, 23 bp, Artificial sequence
  SiRNA target sequence
tttcttatcagaggtttagctcc

SEQ ID NO: 101846 - DNA, 23 bp, Artificial sequence
  SiRNA target sequence
ttcttatcagaggtttagctccg

SEQ ID NO: 101847 - DNA, 23 bp, Artificial sequence
  SiRNA target sequence
tcttatcagaggtttagctccgt

SEQ ID NO: 101848 - DNA, 23 bp, Artificial sequence
  SiRNA target sequence
cttatcagaggtttagctccgtg

SEQ ID NO: 101849 - DNA, 23 bp, Artificial sequence
  SiRNA target sequence
ttatcagaggtttagctccgtgt

SEQ ID NO: 101850 - DNA, 23 bp, Artificial sequence
  SiRNA target sequence
tatcagaggtttagctccgtgtt

SEQ ID NO: 101851 - DNA, 23 bp, Artificial sequence
  SiRNA target sequence
atcagaggtttagctccgtgttt

SEQ ID NO: 101852 - DNA, 23 bp, Artificial sequence
  SiRNA target sequence
tcagaggtttagctccgtgtttt

SEQ ID NO: 101853 - DNA, 23 bp, Artificial sequence
  SiRNA target sequence
cagaggtttagctccgtgtttta

SEQ ID NO: 101854 - DNA, 23 bp, Artificial sequence
  SiRNA target sequence
agaggtttagctccgtgttttaa

SEQ ID NO: 101855 - DNA, 23 bp, Artificial sequence
  SiRNA target sequence
gaggtttagctccgtgttttaaa

SEQ ID NO: 101856 - DNA, 23 bp, Artificial sequence
  SiRNA target sequence
aggtttagctccgtgttttaaaa

SEQ ID NO: 101857 - DNA, 23 bp, Artificial sequence
  SiRNA target sequence
ggtttagctccgtgttttaaaag

SEQ ID NO: 101858 - DNA, 23 bp, Artificial sequence
  SiRNA target sequence
gtttagctccgtgttttaaaagg

SEQ ID NO: 101859 - DNA, 23 bp, Artificial sequence
  SiRNA target sequence
tttagctccgtgttttaaaaggc

SEQ ID NO: 101860 - DNA, 23 bp, Artificial sequence
  SiRNA target sequence
ttagctccgtgttttaaaaggca

SEQ ID NO: 101861 - DNA, 23 bp, Artificial sequence
  SiRNA target sequence
tagctccgtgttttaaaaggcaa

SEQ ID NO: 101862 - DNA, 23 bp, Artificial sequence
  SiRNA target sequence
agctccgtgttttaaaaggcaat

SEQ ID NO: 101863 - DNA, 23 bp, Artificial sequence
  SiRNA target sequence
gctccgtgttttaaaaggcaatt

SEQ ID NO: 101864 - DNA, 23 bp, Artificial sequence
  SiRNA target sequence
ctccgtgttttaaaaggcaatta

SEQ ID NO: 101865 - DNA, 23 bp, Artificial sequence
  SiRNA target sequence
tccgtgttttaaaaggcaattat

SEQ ID NO: 101866 - DNA, 23 bp, Artificial sequence
  SiRNA target sequence
ccgtgttttaaaaggcaattata

SEQ ID NO: 101867 - DNA, 23 bp, Artificial sequence
  SiRNA target sequence
cgtgttttaaaaggcaattatac

SEQ ID NO: 101868 - DNA, 23 bp, Artificial sequence
  SiRNA target sequence
gtgttttaaaaggcaattataca

SEQ ID NO: 101869 - DNA, 23 bp, Artificial sequence
  SiRNA target sequence
tgttttaaaaggcaattatacaa

SEQ ID NO: 101870 - DNA, 23 bp, Artificial sequence
  SiRNA target sequence
gttttaaaaggcaattatacaac

SEQ ID NO: 101871 - DNA, 23 bp, Artificial sequence
  SiRNA target sequence
ttttaaaaggcaattatacaact

SEQ ID NO: 101872 - DNA, 23 bp, Artificial sequence
  SiRNA target sequence
tttaaaaggcaattatacaactt

SEQ ID NO: 101873 - DNA, 23 bp, Artificial sequence
  SiRNA target sequence
ttaaaaggcaattatacaacttt

SEQ ID NO: 101874 - DNA, 23 bp, Artificial sequence
  SiRNA target sequence
taaaaggcaattatacaactttt

SEQ ID NO: 101875 - DNA, 23 bp, Artificial sequence
  SiRNA target sequence
aaaaggcaattatacaacttttt

SEQ ID NO: 101876 - DNA, 23 bp, Artificial sequence
  SiRNA target sequence
aaaggcaattatacaacttttta

SEQ ID NO: 101877 - DNA, 23 bp, Artificial sequence
  SiRNA target sequence
aaggcaattatacaactttttag

SEQ ID NO: 101878 - DNA, 23 bp, Artificial sequence
  SiRNA target sequence
aggcaattatacaactttttaga

SEQ ID NO: 101879 - DNA, 23 bp, Artificial sequence
  SiRNA target sequence
ggcaattatacaactttttagaa

SEQ ID NO: 101880 - DNA, 23 bp, Artificial sequence
  SiRNA target sequence
gcaattatacaactttttagaac

SEQ ID NO: 101881 - DNA, 23 bp, Artificial sequence
  SiRNA target sequence
caattatacaactttttagaaca

SEQ ID NO: 101882 - DNA, 23 bp, Artificial sequence
  SiRNA target sequence
aattatacaactttttagaacaa

SEQ ID NO: 101883 - DNA, 23 bp, Artificial sequence
  SiRNA target sequence
attatacaactttttagaacaaa

SEQ ID NO: 101884 - DNA, 23 bp, Artificial sequence
  SiRNA target sequence
ttatacaactttttagaacaaaa

SEQ ID NO: 101885 - DNA, 23 bp, Artificial sequence
  SiRNA target sequence
tatacaactttttagaacaaaaa

SEQ ID NO: 101886 - DNA, 23 bp, Artificial sequence
  SiRNA target sequence
atacaactttttagaacaaaaat

SEQ ID NO: 101887 - DNA, 23 bp, Artificial sequence
  SiRNA target sequence
tacaactttttagaacaaaaatt

SEQ ID NO: 101888 - DNA, 23 bp, Artificial sequence
  SiRNA target sequence
acaactttttagaacaaaaatta

SEQ ID NO: 101889 - DNA, 23 bp, Artificial sequence
  SiRNA target sequence
caactttttagaacaaaaattaa

SEQ ID NO: 101890 - DNA, 23 bp, Artificial sequence
  SiRNA target sequence
aactttttagaacaaaaattaaa

SEQ ID NO: 101891 - DNA, 23 bp, Artificial sequence
  SiRNA target sequence
actttttagaacaaaaattaaaa

SEQ ID NO: 101892 - DNA, 23 bp, Artificial sequence
  SiRNA target sequence
ctttttagaacaaaaattaaaag

SEQ ID NO: 101893 - DNA, 23 bp, Artificial sequence
  SiRNA target sequence
tttttagaacaaaaattaaaaga

SEQ ID NO: 101894 - DNA, 23 bp, Artificial sequence
  SiRNA target sequence
ttttagaacaaaaattaaaagat

SEQ ID NO: 101895 - DNA, 23 bp, Artificial sequence
  SiRNA target sequence
tttagaacaaaaattaaaagatt

SEQ ID NO: 101896 - DNA, 23 bp, Artificial sequence
  SiRNA target sequence
ttagaacaaaaattaaaagattt

SEQ ID NO: 101897 - DNA, 23 bp, Artificial sequence
  SiRNA target sequence
tagaacaaaaattaaaagattta

SEQ ID NO: 101898 - DNA, 23 bp, Artificial sequence
  SiRNA target sequence
agaacaaaaattaaaagatttat

SEQ ID NO: 101899 - DNA, 23 bp, Artificial sequence
  SiRNA target sequence
gaacaaaaattaaaagatttata

SEQ ID NO: 101900 - DNA, 23 bp, Artificial sequence
  SiRNA target sequence
aacaaaaattaaaagatttataa

SEQ ID NO: 101901 - DNA, 23 bp, Artificial sequence
  SiRNA target sequence
acaaaaattaaaagatttataag

SEQ ID NO: 101902 - DNA, 23 bp, Artificial sequence
  SiRNA target sequence
caaaaattaaaagatttataaga

SEQ ID NO: 101903 - DNA, 23 bp, Artificial sequence
  SiRNA target sequence
aaaaattaaaagatttataagac

SEQ ID NO: 101904 - DNA, 23 bp, Artificial sequence
  SiRNA target sequence
aaaattaaaagatttataagacg

SEQ ID NO: 101905 - DNA, 23 bp, Artificial sequence
  SiRNA target sequence
aaattaaaagatttataagacga

SEQ ID NO: 101906 - DNA, 23 bp, Artificial sequence
  SiRNA target sequence
aattaaaagatttataagacgaa

SEQ ID NO: 101907 - DNA, 23 bp, Artificial sequence
  SiRNA target sequence
attaaaagatttataagacgaat

SEQ ID NO: 101908 - DNA, 23 bp, Artificial sequence
  SiRNA target sequence
ttaaaagatttataagacgaatc

SEQ ID NO: 101909 - DNA, 23 bp, Artificial sequence
  SiRNA target sequence
taaaagatttataagacgaatcc

SEQ ID NO: 101910 - DNA, 23 bp, Artificial sequence
  SiRNA target sequence
aaaagatttataagacgaatccc

SEQ ID NO: 101911 - DNA, 23 bp, Artificial sequence
  SiRNA target sequence
aaagatttataagacgaatcccc

SEQ ID NO: 101912 - DNA, 23 bp, Artificial sequence
  SiRNA target sequence
aagatttataagacgaatcccca

SEQ ID NO: 101913 - DNA, 23 bp, Artificial sequence
  SiRNA target sequence
agatttataagacgaatccccaa

SEQ ID NO: 101914 - DNA, 23 bp, Artificial sequence
  SiRNA target sequence
gatttataagacgaatccccaag

SEQ ID NO: 101915 - DNA, 23 bp, Artificial sequence
  SiRNA target sequence
atttataagacgaatccccaagg

SEQ ID NO: 101916 - DNA, 23 bp, Artificial sequence
  SiRNA target sequence
tttataagacgaatccccaaggc

SEQ ID NO: 101917 - DNA, 23 bp, Artificial sequence
  SiRNA target sequence
ttataagacgaatccccaaggcc

SEQ ID NO: 101918 - DNA, 23 bp, Artificial sequence
  SiRNA target sequence
tataagacgaatccccaaggcca

SEQ ID NO: 101919 - DNA, 23 bp, Artificial sequence
  SiRNA target sequence
ataagacgaatccccaaggccaa

SEQ ID NO: 101920 - DNA, 23 bp, Artificial sequence
  SiRNA target sequence
taagacgaatccccaaggccaaa

SEQ ID NO: 101921 - DNA, 23 bp, Artificial sequence
  SiRNA target sequence
aagacgaatccccaaggccaaat

SEQ ID NO: 101922 - DNA, 23 bp, Artificial sequence
  SiRNA target sequence
agacgaatccccaaggccaaata

SEQ ID NO: 101923 - DNA, 23 bp, Artificial sequence
  SiRNA target sequence
gacgaatccccaaggccaaatac

SEQ ID NO: 101924 - DNA, 23 bp, Artificial sequence
  SiRNA target sequence
acgaatccccaaggccaaataca

SEQ ID NO: 101925 - DNA, 23 bp, Artificial sequence
  SiRNA target sequence
cgaatccccaaggccaaatacag

SEQ ID NO: 101926 - DNA, 23 bp, Artificial sequence
  SiRNA target sequence
gaatccccaaggccaaatacagc

SEQ ID NO: 101927 - DNA, 23 bp, Artificial sequence
  SiRNA target sequence
aatccccaaggccaaatacagca

SEQ ID NO: 101928 - DNA, 23 bp, Artificial sequence
  SiRNA target sequence
atccccaaggccaaatacagcaa

SEQ ID NO: 101929 - DNA, 23 bp, Artificial sequence
  SiRNA target sequence
tccccaaggccaaatacagcaaa

SEQ ID NO: 101930 - DNA, 23 bp, Artificial sequence
  SiRNA target sequence
ccccaaggccaaatacagcaaaa

SEQ ID NO: 101931 - DNA, 23 bp, Artificial sequence
  SiRNA target sequence
cccaaggccaaatacagcaaaat

SEQ ID NO: 101932 - DNA, 23 bp, Artificial sequence
  SiRNA target sequence
ccaaggccaaatacagcaaaatt

SEQ ID NO: 101933 - DNA, 23 bp, Artificial sequence
  SiRNA target sequence
caaggccaaatacagcaaaattt

SEQ ID NO: 101934 - DNA, 23 bp, Artificial sequence
  SiRNA target sequence
aaggccaaatacagcaaaattta

SEQ ID NO: 101935 - DNA, 23 bp, Artificial sequence
  SiRNA target sequence
aggccaaatacagcaaaatttaa

SEQ ID NO: 101936 - DNA, 23 bp, Artificial sequence
  SiRNA target sequence
ggccaaatacagcaaaatttaag

SEQ ID NO: 101937 - DNA, 23 bp, Artificial sequence
  SiRNA target sequence
gccaaatacagcaaaatttaagt

SEQ ID NO: 101938 - DNA, 23 bp, Artificial sequence
  SiRNA target sequence
ccaaatacagcaaaatttaagtg

SEQ ID NO: 101939 - DNA, 23 bp, Artificial sequence
  SiRNA target sequence
caaatacagcaaaatttaagtgt

SEQ ID NO: 101940 - DNA, 23 bp, Artificial sequence
  SiRNA target sequence
aaatacagcaaaatttaagtgtt

SEQ ID NO: 101941 - DNA, 23 bp, Artificial sequence
  SiRNA target sequence
aatacagcaaaatttaagtgttg

SEQ ID NO: 101942 - DNA, 23 bp, Artificial sequence
  SiRNA target sequence
atacagcaaaatttaagtgttgt

SEQ ID NO: 101943 - DNA, 23 bp, Artificial sequence
  SiRNA target sequence
tacagcaaaatttaagtgttgta

SEQ ID NO: 101944 - DNA, 23 bp, Artificial sequence
  SiRNA target sequence
acagcaaaatttaagtgttgtaa

SEQ ID NO: 101945 - DNA, 23 bp, Artificial sequence
  SiRNA target sequence
cagcaaaatttaagtgttgtaaa

SEQ ID NO: 101946 - DNA, 23 bp, Artificial sequence
  SiRNA target sequence
agcaaaatttaagtgttgtaaaa

SEQ ID NO: 101947 - DNA, 23 bp, Artificial sequence
  SiRNA target sequence
gcaaaatttaagtgttgtaaaaa

SEQ ID NO: 101948 - DNA, 23 bp, Artificial sequence
  SiRNA target sequence
caaaatttaagtgttgtaaaaaa

SEQ ID NO: 101949 - DNA, 23 bp, Artificial sequence
  SiRNA target sequence
aaaatttaagtgttgtaaaaaat

SEQ ID NO: 101950 - DNA, 23 bp, Artificial sequence
  SiRNA target sequence
aaatttaagtgttgtaaaaaatt

SEQ ID NO: 101951 - DNA, 23 bp, Artificial sequence
  SiRNA target sequence
aatttaagtgttgtaaaaaattt

SEQ ID NO: 101952 - DNA, 23 bp, Artificial sequence
  SiRNA target sequence
atttaagtgttgtaaaaaatttg

SEQ ID NO: 101953 - DNA, 23 bp, Artificial sequence
  SiRNA target sequence
tttaagtgttgtaaaaaatttgt

SEQ ID NO: 101954 - DNA, 23 bp, Artificial sequence
  SiRNA target sequence
ttaagtgttgtaaaaaatttgta

SEQ ID NO: 101955 - DNA, 23 bp, Artificial sequence
  SiRNA target sequence
taagtgttgtaaaaaatttgtag

SEQ ID NO: 101956 - DNA, 23 bp, Artificial sequence
  SiRNA target sequence
aagtgttgtaaaaaatttgtagg

SEQ ID NO: 101957 - DNA, 23 bp, Artificial sequence
  SiRNA target sequence
agtgttgtaaaaaatttgtaggc

SEQ ID NO: 101958 - DNA, 23 bp, Artificial sequence
  SiRNA target sequence
gtgttgtaaaaaatttgtaggca

SEQ ID NO: 101959 - DNA, 23 bp, Artificial sequence
  SiRNA target sequence
tgttgtaaaaaatttgtaggcag

SEQ ID NO: 101960 - DNA, 23 bp, Artificial sequence
  SiRNA target sequence
gttgtaaaaaatttgtaggcaga

SEQ ID NO: 101961 - DNA, 23 bp, Artificial sequence
  SiRNA target sequence
ttgtaaaaaatttgtaggcagat

SEQ ID NO: 101962 - DNA, 23 bp, Artificial sequence
  SiRNA target sequence
tgtaaaaaatttgtaggcagatt

SEQ ID NO: 101963 - DNA, 23 bp, Artificial sequence
  SiRNA target sequence
gtaaaaaatttgtaggcagattt

SEQ ID NO: 101964 - DNA, 23 bp, Artificial sequence
  SiRNA target sequence
taaaaaatttgtaggcagatttt

SEQ ID NO: 101965 - DNA, 23 bp, Artificial sequence
  SiRNA target sequence
aaaaaatttgtaggcagattttt

SEQ ID NO: 101966 - DNA, 23 bp, Artificial sequence
  SiRNA target sequence
aaaaatttgtaggcagatttttt

SEQ ID NO: 101967 - DNA, 23 bp, Artificial sequence
  SiRNA target sequence
aaaatttgtaggcagattttttt

SEQ ID NO: 101968 - DNA, 23 bp, Artificial sequence
  SiRNA target sequence
aaatttgtaggcagatttttttt

SEQ ID NO: 101969 - DNA, 23 bp, Artificial sequence
  SiRNA target sequence
aatttgtaggcagattttttttg

SEQ ID NO: 101970 - DNA, 23 bp, Artificial sequence
  SiRNA target sequence
atttgtaggcagattttttttgc

SEQ ID NO: 101971 - DNA, 23 bp, Artificial sequence
  SiRNA target sequence
tttgtaggcagattttttttgcg

SEQ ID NO: 101972 - DNA, 23 bp, Artificial sequence
  SiRNA target sequence
ttgtaggcagattttttttgcgc

SEQ ID NO: 101973 - DNA, 23 bp, Artificial sequence
  SiRNA target sequence
tgtaggcagattttttttgcgca

SEQ ID NO: 101974 - DNA, 23 bp, Artificial sequence
  SiRNA target sequence
gtaggcagattttttttgcgcaa

SEQ ID NO: 101975 - DNA, 23 bp, Artificial sequence
  SiRNA target sequence
taggcagattttttttgcgcaaa

SEQ ID NO: 101976 - DNA, 23 bp, Artificial sequence
  SiRNA target sequence
aggcagattttttttgcgcaaaa

SEQ ID NO: 101977 - DNA, 23 bp, Artificial sequence
  SiRNA target sequence
ggcagattttttttgcgcaaaaa

SEQ ID NO: 101978 - DNA, 23 bp, Artificial sequence
  SiRNA target sequence
gcagattttttttgcgcaaaaat

SEQ ID NO: 101979 - DNA, 23 bp, Artificial sequence
  SiRNA target sequence
cagattttttttgcgcaaaaatt

SEQ ID NO: 101980 - DNA, 23 bp, Artificial sequence
  SiRNA target sequence
agattttttttgcgcaaaaattt

SEQ ID NO: 101981 - DNA, 23 bp, Artificial sequence
  SiRNA target sequence
gattttttttgcgcaaaaatttc

SEQ ID NO: 101982 - DNA, 23 bp, Artificial sequence
  SiRNA target sequence
attttttttgcgcaaaaatttcc

SEQ ID NO: 101983 - DNA, 23 bp, Artificial sequence
  SiRNA target sequence
ttttttttgcgcaaaaatttcca

SEQ ID NO: 101984 - DNA, 23 bp, Artificial sequence
  SiRNA target sequence
tttttttgcgcaaaaatttccaa

SEQ ID NO: 101985 - DNA, 23 bp, Artificial sequence
  SiRNA target sequence
ttttttgcgcaaaaatttccaaa

SEQ ID NO: 101986 - DNA, 23 bp, Artificial sequence
  SiRNA target sequence
tttttgcgcaaaaatttccaaaa

SEQ ID NO: 101987 - DNA, 23 bp, Artificial sequence
  SiRNA target sequence
ttttgcgcaaaaatttccaaaat

SEQ ID NO: 101988 - DNA, 23 bp, Artificial sequence
  SiRNA target sequence
tttgcgcaaaaatttccaaaatt

SEQ ID NO: 101989 - DNA, 23 bp, Artificial sequence
  SiRNA target sequence
ttgcgcaaaaatttccaaaattt

SEQ ID NO: 101990 - DNA, 23 bp, Artificial sequence
  SiRNA target sequence
tgcgcaaaaatttccaaaattta

SEQ ID NO: 101991 - DNA, 23 bp, Artificial sequence
  SiRNA target sequence
gcgcaaaaatttccaaaatttag

SEQ ID NO: 101992 - DNA, 23 bp, Artificial sequence
  SiRNA target sequence
cgcaaaaatttccaaaatttagt

SEQ ID NO: 101993 - DNA, 23 bp, Artificial sequence
  SiRNA target sequence
gcaaaaatttccaaaatttagtc

SEQ ID NO: 101994 - DNA, 23 bp, Artificial sequence
  SiRNA target sequence
caaaaatttccaaaatttagtca

SEQ ID NO: 101995 - DNA, 23 bp, Artificial sequence
  SiRNA target sequence
aaaaatttccaaaatttagtcat

SEQ ID NO: 101996 - DNA, 23 bp, Artificial sequence
  SiRNA target sequence
aaaatttccaaaatttagtcatg

SEQ ID NO: 101997 - DNA, 23 bp, Artificial sequence
  SiRNA target sequence
aaatttccaaaatttagtcatgt

SEQ ID NO: 101998 - DNA, 23 bp, Artificial sequence
  SiRNA target sequence
aatttccaaaatttagtcatgtt

SEQ ID NO: 101999 - DNA, 23 bp, Artificial sequence
  SiRNA target sequence
atttccaaaatttagtcatgtta

SEQ ID NO: 102000 - DNA, 23 bp, Artificial sequence
  SiRNA target sequence
tttccaaaatttagtcatgttaa

SEQ ID NO: 102001 - DNA, 23 bp, Artificial sequence
  SiRNA target sequence
ttccaaaatttagtcatgttaaa

SEQ ID NO: 102002 - DNA, 23 bp, Artificial sequence
  SiRNA target sequence
tccaaaatttagtcatgttaaaa

SEQ ID NO: 102003 - DNA, 23 bp, Artificial sequence
  SiRNA target sequence
ccaaaatttagtcatgttaaaag

SEQ ID NO: 102004 - DNA, 23 bp, Artificial sequence
  SiRNA target sequence
caaaatttagtcatgttaaaagg

SEQ ID NO: 102005 - DNA, 23 bp, Artificial sequence
  SiRNA target sequence
aaaatttagtcatgttaaaaggt

SEQ ID NO: 102006 - DNA, 23 bp, Artificial sequence
  SiRNA target sequence
aaatttagtcatgttaaaaggtt

SEQ ID NO: 102007 - DNA, 23 bp, Artificial sequence
  SiRNA target sequence
aatttagtcatgttaaaaggttc

SEQ ID NO: 102008 - DNA, 23 bp, Artificial sequence
  SiRNA target sequence
atttagtcatgttaaaaggttca

SEQ ID NO: 102009 - DNA, 23 bp, Artificial sequence
  SiRNA target sequence
tttagtcatgttaaaaggttcag

SEQ ID NO: 102010 - DNA, 23 bp, Artificial sequence
  SiRNA target sequence
ttagtcatgttaaaaggttcaga

SEQ ID NO: 102011 - DNA, 23 bp, Artificial sequence
  SiRNA target sequence
tagtcatgttaaaaggttcagaa

SEQ ID NO: 102012 - DNA, 23 bp, Artificial sequence
  SiRNA target sequence
agtcatgttaaaaggttcagaac

SEQ ID NO: 102013 - DNA, 23 bp, Artificial sequence
  SiRNA target sequence
gtcatgttaaaaggttcagaacc

SEQ ID NO: 102014 - DNA, 23 bp, Artificial sequence
  SiRNA target sequence
tcatgttaaaaggttcagaacca

SEQ ID NO: 102015 - DNA, 23 bp, Artificial sequence
  SiRNA target sequence
catgttaaaaggttcagaaccat

SEQ ID NO: 102016 - DNA, 23 bp, Artificial sequence
  SiRNA target sequence
atgttaaaaggttcagaaccatt

SEQ ID NO: 102017 - DNA, 23 bp, Artificial sequence
  SiRNA target sequence
tgttaaaaggttcagaaccattc

SEQ ID NO: 102018 - DNA, 23 bp, Artificial sequence
  SiRNA target sequence
gttaaaaggttcagaaccattcc

SEQ ID NO: 102019 - DNA, 23 bp, Artificial sequence
  SiRNA target sequence
ttaaaaggttcagaaccattccc

SEQ ID NO: 102020 - DNA, 23 bp, Artificial sequence
  SiRNA target sequence
taaaaggttcagaaccattccca

SEQ ID NO: 102021 - DNA, 23 bp, Artificial sequence
  SiRNA target sequence
aaaaggttcagaaccattcccat

SEQ ID NO: 102022 - DNA, 23 bp, Artificial sequence
  SiRNA target sequence
aaaggttcagaaccattcccatg

SEQ ID NO: 102023 - DNA, 23 bp, Artificial sequence
  SiRNA target sequence
aaggttcagaaccattcccatga

SEQ ID NO: 102024 - DNA, 23 bp, Artificial sequence
  SiRNA target sequence
aggttcagaaccattcccatgag

SEQ ID NO: 102025 - DNA, 23 bp, Artificial sequence
  SiRNA target sequence
ggttcagaaccattcccatgagt

SEQ ID NO: 102026 - DNA, 23 bp, Artificial sequence
  SiRNA target sequence
gttcagaaccattcccatgagtc

SEQ ID NO: 102027 - DNA, 23 bp, Artificial sequence
  SiRNA target sequence
ttcagaaccattcccatgagtcg

SEQ ID NO: 102028 - DNA, 23 bp, Artificial sequence
  SiRNA target sequence
tcagaaccattcccatgagtcga

SEQ ID NO: 102029 - DNA, 23 bp, Artificial sequence
  SiRNA target sequence
cagaaccattcccatgagtcgaa

SEQ ID NO: 102030 - DNA, 23 bp, Artificial sequence
  SiRNA target sequence
agaaccattcccatgagtcgaac

SEQ ID NO: 102031 - DNA, 23 bp, Artificial sequence
  SiRNA target sequence
gaaccattcccatgagtcgaaca

SEQ ID NO: 102032 - DNA, 23 bp, Artificial sequence
  SiRNA target sequence
aaccattcccatgagtcgaacat

SEQ ID NO: 102033 - DNA, 23 bp, Artificial sequence
  SiRNA target sequence
accattcccatgagtcgaacata

SEQ ID NO: 102034 - DNA, 23 bp, Artificial sequence
  SiRNA target sequence
ccattcccatgagtcgaacatac

SEQ ID NO: 102035 - DNA, 23 bp, Artificial sequence
  SiRNA target sequence
cattcccatgagtcgaacataca

SEQ ID NO: 102036 - DNA, 23 bp, Artificial sequence
  SiRNA target sequence
attcccatgagtcgaacatacaa

SEQ ID NO: 102037 - DNA, 23 bp, Artificial sequence
  SiRNA target sequence
ttcccatgagtcgaacatacaaa

SEQ ID NO: 102038 - DNA, 23 bp, Artificial sequence
  SiRNA target sequence
tcccatgagtcgaacatacaaat

SEQ ID NO: 102039 - DNA, 23 bp, Artificial sequence
  SiRNA target sequence
cccatgagtcgaacatacaaata

SEQ ID NO: 102040 - DNA, 23 bp, Artificial sequence
  SiRNA target sequence
ccatgagtcgaacatacaaatat

SEQ ID NO: 102041 - DNA, 23 bp, Artificial sequence
  SiRNA target sequence
catgagtcgaacatacaaatata

SEQ ID NO: 102042 - DNA, 23 bp, Artificial sequence
  SiRNA target sequence
atgagtcgaacatacaaatataa

SEQ ID NO: 102043 - DNA, 23 bp, Artificial sequence
  SiRNA target sequence
tgagtcgaacatacaaatataat

SEQ ID NO: 102044 - DNA, 23 bp, Artificial sequence
  SiRNA target sequence
gagtcgaacatacaaatataatc

SEQ ID NO: 102045 - DNA, 23 bp, Artificial sequence
  SiRNA target sequence
agtcgaacatacaaatataatca

SEQ ID NO: 102046 - DNA, 23 bp, Artificial sequence
  SiRNA target sequence
gtcgaacatacaaatataatcat

SEQ ID NO: 102047 - DNA, 23 bp, Artificial sequence
  SiRNA target sequence
tcgaacatacaaatataatcata

SEQ ID NO: 102048 - DNA, 23 bp, Artificial sequence
  SiRNA target sequence
cgaacatacaaatataatcatat

SEQ ID NO: 102049 - DNA, 23 bp, Artificial sequence
  SiRNA target sequence
gaacatacaaatataatcatatc

SEQ ID NO: 102050 - DNA, 23 bp, Artificial sequence
  SiRNA target sequence
aacatacaaatataatcatatca

SEQ ID NO: 102051 - DNA, 23 bp, Artificial sequence
  SiRNA target sequence
acatacaaatataatcatatcaa

SEQ ID NO: 102052 - DNA, 23 bp, Artificial sequence
  SiRNA target sequence
catacaaatataatcatatcaat

SEQ ID NO: 102053 - DNA, 23 bp, Artificial sequence
  SiRNA target sequence
atacaaatataatcatatcaata

SEQ ID NO: 102054 - DNA, 23 bp, Artificial sequence
  SiRNA target sequence
tacaaatataatcatatcaatat

SEQ ID NO: 102055 - DNA, 23 bp, Artificial sequence
  SiRNA target sequence
acaaatataatcatatcaatatc

SEQ ID NO: 102056 - DNA, 23 bp, Artificial sequence
  SiRNA target sequence
caaatataatcatatcaatatct

SEQ ID NO: 102057 - DNA, 23 bp, Artificial sequence
  SiRNA target sequence
aaatataatcatatcaatatcta

SEQ ID NO: 102058 - DNA, 23 bp, Artificial sequence
  SiRNA target sequence
aatataatcatatcaatatctaa

SEQ ID NO: 102059 - DNA, 23 bp, Artificial sequence
  SiRNA target sequence
atataatcatatcaatatctaat

SEQ ID NO: 102060 - DNA, 23 bp, Artificial sequence
  SiRNA target sequence
tataatcatatcaatatctaata

SEQ ID NO: 102061 - DNA, 23 bp, Artificial sequence
  SiRNA target sequence
ataatcatatcaatatctaatat

SEQ ID NO: 102062 - DNA, 23 bp, Artificial sequence
  SiRNA target sequence
taatcatatcaatatctaatatt

SEQ ID NO: 102063 - DNA, 23 bp, Artificial sequence
  SiRNA target sequence
aatcatatcaatatctaatattt

SEQ ID NO: 102064 - DNA, 23 bp, Artificial sequence
  SiRNA target sequence
atcatatcaatatctaatatttt

SEQ ID NO: 102065 - DNA, 23 bp, Artificial sequence
  SiRNA target sequence
tcatatcaatatctaatattttt

SEQ ID NO: 102066 - DNA, 23 bp, Artificial sequence
  SiRNA target sequence
catatcaatatctaatatttttt

SEQ ID NO: 102067 - DNA, 23 bp, Artificial sequence
  SiRNA target sequence
atatcaatatctaatattttttc

SEQ ID NO: 102068 - DNA, 23 bp, Artificial sequence
  SiRNA target sequence
tatcaatatctaatattttttcg

SEQ ID NO: 102069 - DNA, 23 bp, Artificial sequence
  SiRNA target sequence
atcaatatctaatattttttcga

SEQ ID NO: 102070 - DNA, 23 bp, Artificial sequence
  SiRNA target sequence
tcaatatctaatattttttcgaa

SEQ ID NO: 102071 - DNA, 23 bp, Artificial sequence
  SiRNA target sequence
caatatctaatattttttcgaaa

SEQ ID NO: 102072 - DNA, 23 bp, Artificial sequence
  SiRNA target sequence
aatatctaatattttttcgaaat

SEQ ID NO: 102073 - DNA, 23 bp, Artificial sequence
  SiRNA target sequence
atatctaatattttttcgaaatc

SEQ ID NO: 102074 - DNA, 23 bp, Artificial sequence
  SiRNA target sequence
tatctaatattttttcgaaatca

SEQ ID NO: 102075 - DNA, 23 bp, Artificial sequence
  SiRNA target sequence
atctaatattttttcgaaatcaa

SEQ ID NO: 102076 - DNA, 23 bp, Artificial sequence
  SiRNA target sequence
tctaatattttttcgaaatcaaa

SEQ ID NO: 102077 - DNA, 23 bp, Artificial sequence
  SiRNA target sequence
ctaatattttttcgaaatcaaaa

SEQ ID NO: 102078 - DNA, 23 bp, Artificial sequence
  SiRNA target sequence
taatattttttcgaaatcaaaac

SEQ ID NO: 102079 - DNA, 23 bp, Artificial sequence
  SiRNA target sequence
aatattttttcgaaatcaaaact

SEQ ID NO: 102080 - DNA, 23 bp, Artificial sequence
  SiRNA target sequence
atattttttcgaaatcaaaactg

SEQ ID NO: 102081 - DNA, 23 bp, Artificial sequence
  SiRNA target sequence
tattttttcgaaatcaaaactgt

SEQ ID NO: 102082 - DNA, 23 bp, Artificial sequence
  SiRNA target sequence
attttttcgaaatcaaaactgtc

SEQ ID NO: 102083 - DNA, 23 bp, Artificial sequence
  SiRNA target sequence
ttttttcgaaatcaaaactgtcc

SEQ ID NO: 102084 - DNA, 23 bp, Artificial sequence
  SiRNA target sequence
tttttcgaaatcaaaactgtcca

SEQ ID NO: 102085 - DNA, 23 bp, Artificial sequence
  SiRNA target sequence
ttttcgaaatcaaaactgtccat

SEQ ID NO: 102086 - DNA, 23 bp, Artificial sequence
  SiRNA target sequence
tttcgaaatcaaaactgtccata

SEQ ID NO: 102087 - DNA, 23 bp, Artificial sequence
  SiRNA target sequence
ttcgaaatcaaaactgtccatat

SEQ ID NO: 102088 - DNA, 23 bp, Artificial sequence
  SiRNA target sequence
tcgaaatcaaaactgtccatatc

SEQ ID NO: 102089 - DNA, 23 bp, Artificial sequence
  SiRNA target sequence
cgaaatcaaaactgtccatatct

SEQ ID NO: 102090 - DNA, 23 bp, Artificial sequence
  SiRNA target sequence
gaaatcaaaactgtccatatcta

SEQ ID NO: 102091 - DNA, 23 bp, Artificial sequence
  SiRNA target sequence
aaatcaaaactgtccatatctaa

SEQ ID NO: 102092 - DNA, 23 bp, Artificial sequence
  SiRNA target sequence
aatcaaaactgtccatatctaaa

SEQ ID NO: 102093 - DNA, 23 bp, Artificial sequence
  SiRNA target sequence
atcaaaactgtccatatctaaag

SEQ ID NO: 102094 - DNA, 23 bp, Artificial sequence
  SiRNA target sequence
tcaaaactgtccatatctaaagt

SEQ ID NO: 102095 - DNA, 23 bp, Artificial sequence
  SiRNA target sequence
caaaactgtccatatctaaagta

SEQ ID NO: 102096 - DNA, 23 bp, Artificial sequence
  SiRNA target sequence
aaaactgtccatatctaaagtaa

SEQ ID NO: 102097 - DNA, 23 bp, Artificial sequence
  SiRNA target sequence
aaactgtccatatctaaagtaaa

SEQ ID NO: 102098 - DNA, 23 bp, Artificial sequence
  SiRNA target sequence
aactgtccatatctaaagtaaaa

SEQ ID NO: 102099 - DNA, 23 bp, Artificial sequence
  SiRNA target sequence
actgtccatatctaaagtaaaat

SEQ ID NO: 102100 - DNA, 23 bp, Artificial sequence
  SiRNA target sequence
ctgtccatatctaaagtaaaatc

SEQ ID NO: 102101 - DNA, 23 bp, Artificial sequence
  SiRNA target sequence
tgtccatatctaaagtaaaatct

SEQ ID NO: 102102 - DNA, 23 bp, Artificial sequence
  SiRNA target sequence
gtccatatctaaagtaaaatctg

SEQ ID NO: 102103 - DNA, 23 bp, Artificial sequence
  SiRNA target sequence
tccatatctaaagtaaaatctgt

SEQ ID NO: 102104 - DNA, 23 bp, Artificial sequence
  SiRNA target sequence
ccatatctaaagtaaaatctgtt

SEQ ID NO: 102105 - DNA, 23 bp, Artificial sequence
  SiRNA target sequence
catatctaaagtaaaatctgttg

SEQ ID NO: 102106 - DNA, 23 bp, Artificial sequence
  SiRNA target sequence
atatctaaagtaaaatctgttgg

SEQ ID NO: 102107 - DNA, 23 bp, Artificial sequence
  SiRNA target sequence
tatctaaagtaaaatctgttgga

SEQ ID NO: 102108 - DNA, 23 bp, Artificial sequence
  SiRNA target sequence
atctaaagtaaaatctgttggaa

SEQ ID NO: 102109 - DNA, 23 bp, Artificial sequence
  SiRNA target sequence
tctaaagtaaaatctgttggaag

SEQ ID NO: 102110 - DNA, 23 bp, Artificial sequence
  SiRNA target sequence
ctaaagtaaaatctgttggaagc

SEQ ID NO: 102111 - DNA, 23 bp, Artificial sequence
  SiRNA target sequence
taaagtaaaatctgttggaagca

SEQ ID NO: 102112 - DNA, 23 bp, Artificial sequence
  SiRNA target sequence
aaagtaaaatctgttggaagcaa

SEQ ID NO: 102113 - DNA, 23 bp, Artificial sequence
  SiRNA target sequence
aagtaaaatctgttggaagcaat

SEQ ID NO: 102114 - DNA, 23 bp, Artificial sequence
  SiRNA target sequence
agtaaaatctgttggaagcaatt

SEQ ID NO: 102115 - DNA, 23 bp, Artificial sequence
  SiRNA target sequence
gtaaaatctgttggaagcaattc

SEQ ID NO: 102116 - DNA, 23 bp, Artificial sequence
  SiRNA target sequence
taaaatctgttggaagcaattct

SEQ ID NO: 102117 - DNA, 23 bp, Artificial sequence
  SiRNA target sequence
aaaatctgttggaagcaattctt

SEQ ID NO: 102118 - DNA, 23 bp, Artificial sequence
  SiRNA target sequence
aaatctgttggaagcaattcttt

SEQ ID NO: 102119 - DNA, 23 bp, Artificial sequence
  SiRNA target sequence
aatctgttggaagcaattcttta

SEQ ID NO: 102120 - DNA, 23 bp, Artificial sequence
  SiRNA target sequence
atctgttggaagcaattctttat

SEQ ID NO: 102121 - DNA, 23 bp, Artificial sequence
  SiRNA target sequence
tctgttggaagcaattctttatc

SEQ ID NO: 102122 - DNA, 23 bp, Artificial sequence
  SiRNA target sequence
ctgttggaagcaattctttatca

SEQ ID NO: 102123 - DNA, 23 bp, Artificial sequence
  SiRNA target sequence
tgttggaagcaattctttatcaa

SEQ ID NO: 102124 - DNA, 23 bp, Artificial sequence
  SiRNA target sequence
gttggaagcaattctttatcaac

SEQ ID NO: 102125 - DNA, 23 bp, Artificial sequence
  SiRNA target sequence
ttggaagcaattctttatcaacg

SEQ ID NO: 102126 - DNA, 23 bp, Artificial sequence
  SiRNA target sequence
tggaagcaattctttatcaacgt

SEQ ID NO: 102127 - DNA, 23 bp, Artificial sequence
  SiRNA target sequence
ggaagcaattctttatcaacgtt

SEQ ID NO: 102128 - DNA, 23 bp, Artificial sequence
  SiRNA target sequence
gaagcaattctttatcaacgtta

SEQ ID NO: 102129 - DNA, 23 bp, Artificial sequence
  SiRNA target sequence
aagcaattctttatcaacgttat

SEQ ID NO: 102130 - DNA, 23 bp, Artificial sequence
  SiRNA target sequence
agcaattctttatcaacgttata

SEQ ID NO: 102131 - DNA, 23 bp, Artificial sequence
  SiRNA target sequence
gcaattctttatcaacgttataa

SEQ ID NO: 102132 - DNA, 23 bp, Artificial sequence
  SiRNA target sequence
caattctttatcaacgttataaa

SEQ ID NO: 102133 - DNA, 23 bp, Artificial sequence
  SiRNA target sequence
aattctttatcaacgttataaat

SEQ ID NO: 102134 - DNA, 23 bp, Artificial sequence
  SiRNA target sequence
attctttatcaacgttataaatc

SEQ ID NO: 102135 - DNA, 23 bp, Artificial sequence
  SiRNA target sequence
ttctttatcaacgttataaatca

SEQ ID NO: 102136 - DNA, 23 bp, Artificial sequence
  SiRNA target sequence
tctttatcaacgttataaatcaa

SEQ ID NO: 102137 - DNA, 23 bp, Artificial sequence
  SiRNA target sequence
ctttatcaacgttataaatcaaa

SEQ ID NO: 102138 - DNA, 23 bp, Artificial sequence
  SiRNA target sequence
tttatcaacgttataaatcaaat

SEQ ID NO: 102139 - DNA, 23 bp, Artificial sequence
  SiRNA target sequence
ttatcaacgttataaatcaaatc

SEQ ID NO: 102140 - DNA, 23 bp, Artificial sequence
  SiRNA target sequence
tatcaacgttataaatcaaatct

SEQ ID NO: 102141 - DNA, 23 bp, Artificial sequence
  SiRNA target sequence
atcaacgttataaatcaaatctt

SEQ ID NO: 102142 - DNA, 23 bp, Artificial sequence
  SiRNA target sequence
tcaacgttataaatcaaatcttt

SEQ ID NO: 102143 - DNA, 23 bp, Artificial sequence
  SiRNA target sequence
caacgttataaatcaaatcttta

SEQ ID NO: 102144 - DNA, 23 bp, Artificial sequence
  SiRNA target sequence
aacgttataaatcaaatctttat

SEQ ID NO: 102145 - DNA, 23 bp, Artificial sequence
  SiRNA target sequence
acgttataaatcaaatctttatt

SEQ ID NO: 102146 - DNA, 23 bp, Artificial sequence
  SiRNA target sequence
cgttataaatcaaatctttattg

SEQ ID NO: 102147 - DNA, 23 bp, Artificial sequence
  SiRNA target sequence
gttataaatcaaatctttattgt

SEQ ID NO: 102148 - DNA, 23 bp, Artificial sequence
  SiRNA target sequence
ttataaatcaaatctttattgta

SEQ ID NO: 102149 - DNA, 23 bp, Artificial sequence
  SiRNA target sequence
tataaatcaaatctttattgtat

SEQ ID NO: 102150 - DNA, 23 bp, Artificial sequence
  SiRNA target sequence
ataaatcaaatctttattgtatc

SEQ ID NO: 102151 - DNA, 23 bp, Artificial sequence
  SiRNA target sequence
taaatcaaatctttattgtatcc

SEQ ID NO: 102152 - DNA, 23 bp, Artificial sequence
  SiRNA target sequence
aaatcaaatctttattgtatccg

SEQ ID NO: 102153 - DNA, 23 bp, Artificial sequence
  SiRNA target sequence
aatcaaatctttattgtatccgt

SEQ ID NO: 102154 - DNA, 23 bp, Artificial sequence
  SiRNA target sequence
atcaaatctttattgtatccgta

SEQ ID NO: 102155 - DNA, 23 bp, Artificial sequence
  SiRNA target sequence
tcaaatctttattgtatccgtat

SEQ ID NO: 102156 - DNA, 23 bp, Artificial sequence
  SiRNA target sequence
caaatctttattgtatccgtata

SEQ ID NO: 102157 - DNA, 23 bp, Artificial sequence
  SiRNA target sequence
aaatctttattgtatccgtatag

SEQ ID NO: 102158 - DNA, 23 bp, Artificial sequence
  SiRNA target sequence
aatctttattgtatccgtatagt

SEQ ID NO: 102159 - DNA, 23 bp, Artificial sequence
  SiRNA target sequence
atctttattgtatccgtatagta

SEQ ID NO: 102160 - DNA, 23 bp, Artificial sequence
  SiRNA target sequence
tctttattgtatccgtatagtat

SEQ ID NO: 102161 - DNA, 23 bp, Artificial sequence
  SiRNA target sequence
ctttattgtatccgtatagtata

SEQ ID NO: 102162 - DNA, 23 bp, Artificial sequence
  SiRNA target sequence
tttattgtatccgtatagtataa

SEQ ID NO: 102163 - DNA, 23 bp, Artificial sequence
  SiRNA target sequence
ttattgtatccgtatagtataac

SEQ ID NO: 102164 - DNA, 23 bp, Artificial sequence
  SiRNA target sequence
tattgtatccgtatagtataaca

SEQ ID NO: 102165 - DNA, 23 bp, Artificial sequence
  SiRNA target sequence
attgtatccgtatagtataacat

SEQ ID NO: 102166 - DNA, 23 bp, Artificial sequence
  SiRNA target sequence
ttgtatccgtatagtataacatt

SEQ ID NO: 102167 - DNA, 23 bp, Artificial sequence
  SiRNA target sequence
tgtatccgtatagtataacattt

SEQ ID NO: 102168 - DNA, 23 bp, Artificial sequence
  SiRNA target sequence
gtatccgtatagtataacatttt

SEQ ID NO: 102169 - DNA, 23 bp, Artificial sequence
  SiRNA target sequence
tatccgtatagtataacattttg

SEQ ID NO: 102170 - DNA, 23 bp, Artificial sequence
  SiRNA target sequence
atccgtatagtataacattttga

SEQ ID NO: 102171 - DNA, 23 bp, Artificial sequence
  SiRNA target sequence
tccgtatagtataacattttgaa

SEQ ID NO: 102172 - DNA, 23 bp, Artificial sequence
  SiRNA target sequence
ccgtatagtataacattttgaat

SEQ ID NO: 102173 - DNA, 23 bp, Artificial sequence
  SiRNA target sequence
cgtatagtataacattttgaata

SEQ ID NO: 102174 - DNA, 23 bp, Artificial sequence
  SiRNA target sequence
gtatagtataacattttgaataa

SEQ ID NO: 102175 - DNA, 23 bp, Artificial sequence
  SiRNA target sequence
tatagtataacattttgaataag

SEQ ID NO: 102176 - DNA, 23 bp, Artificial sequence
  SiRNA target sequence
atagtataacattttgaataagt

SEQ ID NO: 102177 - DNA, 23 bp, Artificial sequence
  SiRNA target sequence
tagtataacattttgaataagtt

SEQ ID NO: 102178 - DNA, 23 bp, Artificial sequence
  SiRNA target sequence
agtataacattttgaataagttt

SEQ ID NO: 102179 - DNA, 23 bp, Artificial sequence
  SiRNA target sequence
gtataacattttgaataagttta

SEQ ID NO: 102180 - DNA, 23 bp, Artificial sequence
  SiRNA target sequence
tataacattttgaataagtttag

SEQ ID NO: 102181 - DNA, 23 bp, Artificial sequence
  SiRNA target sequence
ataacattttgaataagtttagc

SEQ ID NO: 102182 - DNA, 23 bp, Artificial sequence
  SiRNA target sequence
taacattttgaataagtttagca

SEQ ID NO: 102183 - DNA, 23 bp, Artificial sequence
  SiRNA target sequence
aacattttgaataagtttagcaa

SEQ ID NO: 102184 - DNA, 23 bp, Artificial sequence
  SiRNA target sequence
acattttgaataagtttagcaat

SEQ ID NO: 102185 - DNA, 23 bp, Artificial sequence
  SiRNA target sequence
cattttgaataagtttagcaata

SEQ ID NO: 102186 - DNA, 23 bp, Artificial sequence
  SiRNA target sequence
attttgaataagtttagcaatat

SEQ ID NO: 102187 - DNA, 23 bp, Artificial sequence
  SiRNA target sequence
ttttgaataagtttagcaatatg

SEQ ID NO: 102188 - DNA, 23 bp, Artificial sequence
  SiRNA target sequence
tttgaataagtttagcaatatgt

SEQ ID NO: 102189 - DNA, 23 bp, Artificial sequence
  SiRNA target sequence
ttgaataagtttagcaatatgta

SEQ ID NO: 102190 - DNA, 23 bp, Artificial sequence
  SiRNA target sequence
tgaataagtttagcaatatgtat

SEQ ID NO: 102191 - DNA, 23 bp, Artificial sequence
  SiRNA target sequence
gaataagtttagcaatatgtata

SEQ ID NO: 102192 - DNA, 23 bp, Artificial sequence
  SiRNA target sequence
aataagtttagcaatatgtatag

SEQ ID NO: 102193 - DNA, 23 bp, Artificial sequence
  SiRNA target sequence
ataagtttagcaatatgtataga

SEQ ID NO: 102194 - DNA, 23 bp, Artificial sequence
  SiRNA target sequence
taagtttagcaatatgtatagaa

SEQ ID NO: 102195 - DNA, 23 bp, Artificial sequence
  SiRNA target sequence
aagtttagcaatatgtatagaat

SEQ ID NO: 102196 - DNA, 23 bp, Artificial sequence
  SiRNA target sequence
agtttagcaatatgtatagaatt

SEQ ID NO: 102197 - DNA, 23 bp, Artificial sequence
  SiRNA target sequence
gtttagcaatatgtatagaattt

SEQ ID NO: 102198 - DNA, 23 bp, Artificial sequence
  SiRNA target sequence
tttagcaatatgtatagaatttc

SEQ ID NO: 102199 - DNA, 23 bp, Artificial sequence
  SiRNA target sequence
ttagcaatatgtatagaatttcc

SEQ ID NO: 102200 - DNA, 23 bp, Artificial sequence
  SiRNA target sequence
tagcaatatgtatagaatttcct

SEQ ID NO: 102201 - DNA, 23 bp, Artificial sequence
  SiRNA target sequence
agcaatatgtatagaatttcctg

SEQ ID NO: 102202 - DNA, 23 bp, Artificial sequence
  SiRNA target sequence
gcaatatgtatagaatttcctgt

SEQ ID NO: 102203 - DNA, 23 bp, Artificial sequence
  SiRNA target sequence
caatatgtatagaatttcctgtt

SEQ ID NO: 102204 - DNA, 23 bp, Artificial sequence
  SiRNA target sequence
aatatgtatagaatttcctgttt

SEQ ID NO: 102205 - DNA, 23 bp, Artificial sequence
  SiRNA target sequence
atatgtatagaatttcctgtttg

SEQ ID NO: 102206 - DNA, 23 bp, Artificial sequence
  SiRNA target sequence
tatgtatagaatttcctgtttgg

SEQ ID NO: 102207 - DNA, 23 bp, Artificial sequence
  SiRNA target sequence
atgtatagaatttcctgtttggg

SEQ ID NO: 102208 - DNA, 23 bp, Artificial sequence
  SiRNA target sequence
tgtatagaatttcctgtttggga

SEQ ID NO: 102209 - DNA, 23 bp, Artificial sequence
  SiRNA target sequence
gtatagaatttcctgtttgggag

SEQ ID NO: 102210 - DNA, 23 bp, Artificial sequence
  SiRNA target sequence
tatagaatttcctgtttgggagc

SEQ ID NO: 102211 - DNA, 23 bp, Artificial sequence
  SiRNA target sequence
atagaatttcctgtttgggagcc

SEQ ID NO: 102212 - DNA, 23 bp, Artificial sequence
  SiRNA target sequence
tagaatttcctgtttgggagcca

SEQ ID NO: 102213 - DNA, 23 bp, Artificial sequence
  SiRNA target sequence
agaatttcctgtttgggagccat

SEQ ID NO: 102214 - DNA, 23 bp, Artificial sequence
  SiRNA target sequence
gaatttcctgtttgggagccata

SEQ ID NO: 102215 - DNA, 23 bp, Artificial sequence
  SiRNA target sequence
aatttcctgtttgggagccatat

SEQ ID NO: 102216 - DNA, 23 bp, Artificial sequence
  SiRNA target sequence
atttcctgtttgggagccatata

SEQ ID NO: 102217 - DNA, 23 bp, Artificial sequence
  SiRNA target sequence
tttcctgtttgggagccatataa

SEQ ID NO: 102218 - DNA, 23 bp, Artificial sequence
  SiRNA target sequence
ttcctgtttgggagccatataag

SEQ ID NO: 102219 - DNA, 23 bp, Artificial sequence
  SiRNA target sequence
tcctgtttgggagccatataaga

SEQ ID NO: 102220 - DNA, 23 bp, Artificial sequence
  SiRNA target sequence
cctgtttgggagccatataagat

SEQ ID NO: 102221 - DNA, 23 bp, Artificial sequence
  SiRNA target sequence
ctgtttgggagccatataagatt

SEQ ID NO: 102222 - DNA, 23 bp, Artificial sequence
  SiRNA target sequence
tgtttgggagccatataagatta

SEQ ID NO: 102223 - DNA, 23 bp, Artificial sequence
  SiRNA target sequence
gtttgggagccatataagattat

SEQ ID NO: 102224 - DNA, 23 bp, Artificial sequence
  SiRNA target sequence
tttgggagccatataagattatc

SEQ ID NO: 102225 - DNA, 23 bp, Artificial sequence
  SiRNA target sequence
ttgggagccatataagattatca

SEQ ID NO: 102226 - DNA, 23 bp, Artificial sequence
  SiRNA target sequence
tgggagccatataagattatcat

SEQ ID NO: 102227 - DNA, 24 bp, Artificial sequence
  SiRNA target sequence
ttaccaagtttctgcctgaaaata

SEQ ID NO: 102228 - DNA, 24 bp, Artificial sequence
  SiRNA target sequence
taccaagtttctgcctgaaaatat

SEQ ID NO: 102229 - DNA, 24 bp, Artificial sequence
  SiRNA target sequence
accaagtttctgcctgaaaatata

SEQ ID NO: 102230 - DNA, 24 bp, Artificial sequence
  SiRNA target sequence
ccaagtttctgcctgaaaatatat

SEQ ID NO: 102231 - DNA, 24 bp, Artificial sequence
  SiRNA target sequence
caagtttctgcctgaaaatatatt

SEQ ID NO: 102232 - DNA, 24 bp, Artificial sequence
  SiRNA target sequence
aagtttctgcctgaaaatatattt

SEQ ID NO: 102233 - DNA, 24 bp, Artificial sequence
  SiRNA target sequence
agtttctgcctgaaaatatatttt

SEQ ID NO: 102234 - DNA, 24 bp, Artificial sequence
  SiRNA target sequence
gtttctgcctgaaaatatattttc

SEQ ID NO: 102235 - DNA, 24 bp, Artificial sequence
  SiRNA target sequence
tttctgcctgaaaatatattttct

SEQ ID NO: 102236 - DNA, 24 bp, Artificial sequence
  SiRNA target sequence
ttctgcctgaaaatatattttctt

SEQ ID NO: 102237 - DNA, 24 bp, Artificial sequence
  SiRNA target sequence
tctgcctgaaaatatattttcttt

SEQ ID NO: 102238 - DNA, 24 bp, Artificial sequence
  SiRNA target sequence
ctgcctgaaaatatattttctttt

SEQ ID NO: 102239 - DNA, 24 bp, Artificial sequence
  SiRNA target sequence
tgcctgaaaatatattttcttttt

SEQ ID NO: 102240 - DNA, 24 bp, Artificial sequence
  SiRNA target sequence
gcctgaaaatatattttcttttta

SEQ ID NO: 102241 - DNA, 24 bp, Artificial sequence
  SiRNA target sequence
cctgaaaatatattttctttttat

SEQ ID NO: 102242 - DNA, 24 bp, Artificial sequence
  SiRNA target sequence
ctgaaaatatattttctttttata

SEQ ID NO: 102243 - DNA, 24 bp, Artificial sequence
  SiRNA target sequence
tgaaaatatattttctttttataa

SEQ ID NO: 102244 - DNA, 24 bp, Artificial sequence
  SiRNA target sequence
gaaaatatattttctttttataaa

SEQ ID NO: 102245 - DNA, 24 bp, Artificial sequence
  SiRNA target sequence
aaaatatattttctttttataaat

SEQ ID NO: 102246 - DNA, 24 bp, Artificial sequence
  SiRNA target sequence
aaatatattttctttttataaata

SEQ ID NO: 102247 - DNA, 24 bp, Artificial sequence
  SiRNA target sequence
aatatattttctttttataaatat

SEQ ID NO: 102248 - DNA, 24 bp, Artificial sequence
  SiRNA target sequence
atatattttctttttataaatatc

SEQ ID NO: 102249 - DNA, 24 bp, Artificial sequence
  SiRNA target sequence
tatattttctttttataaatatct

SEQ ID NO: 102250 - DNA, 24 bp, Artificial sequence
  SiRNA target sequence
atattttctttttataaatatcta

SEQ ID NO: 102251 - DNA, 24 bp, Artificial sequence
  SiRNA target sequence
tattttctttttataaatatctaa

SEQ ID NO: 102252 - DNA, 24 bp, Artificial sequence
  SiRNA target sequence
attttctttttataaatatctaat

SEQ ID NO: 102253 - DNA, 24 bp, Artificial sequence
  SiRNA target sequence
ttttctttttataaatatctaata

SEQ ID NO: 102254 - DNA, 24 bp, Artificial sequence
  SiRNA target sequence
tttctttttataaatatctaataa

SEQ ID NO: 102255 - DNA, 24 bp, Artificial sequence
  SiRNA target sequence
ttctttttataaatatctaataac

SEQ ID NO: 102256 - DNA, 24 bp, Artificial sequence
  SiRNA target sequence
tctttttataaatatctaataaca

SEQ ID NO: 102257 - DNA, 24 bp, Artificial sequence
  SiRNA target sequence
ctttttataaatatctaataacat

SEQ ID NO: 102258 - DNA, 24 bp, Artificial sequence
  SiRNA target sequence
tttttataaatatctaataacatt

SEQ ID NO: 102259 - DNA, 24 bp, Artificial sequence
  SiRNA target sequence
ttttataaatatctaataacattt

SEQ ID NO: 102260 - DNA, 24 bp, Artificial sequence
  SiRNA target sequence
tttataaatatctaataacatttt

SEQ ID NO: 102261 - DNA, 24 bp, Artificial sequence
  SiRNA target sequence
ttataaatatctaataacattttt

SEQ ID NO: 102262 - DNA, 24 bp, Artificial sequence
  SiRNA target sequence
tataaatatctaataacatttttt

SEQ ID NO: 102263 - DNA, 24 bp, Artificial sequence
  SiRNA target sequence
ataaatatctaataacattttttc

SEQ ID NO: 102264 - DNA, 24 bp, Artificial sequence
  SiRNA target sequence
taaatatctaataacattttttca

SEQ ID NO: 102265 - DNA, 24 bp, Artificial sequence
  SiRNA target sequence
aaatatctaataacattttttcaa

SEQ ID NO: 102266 - DNA, 24 bp, Artificial sequence
  SiRNA target sequence
aatatctaataacattttttcaat

SEQ ID NO: 102267 - DNA, 24 bp, Artificial sequence
  SiRNA target sequence
atatctaataacattttttcaata

SEQ ID NO: 102268 - DNA, 24 bp, Artificial sequence
  SiRNA target sequence
tatctaataacattttttcaataa

SEQ ID NO: 102269 - DNA, 24 bp, Artificial sequence
  SiRNA target sequence
atctaataacattttttcaataat

SEQ ID NO: 102270 - DNA, 24 bp, Artificial sequence
  SiRNA target sequence
tctaataacattttttcaataata

SEQ ID NO: 102271 - DNA, 24 bp, Artificial sequence
  SiRNA target sequence
ctaataacattttttcaataatat

SEQ ID NO: 102272 - DNA, 24 bp, Artificial sequence
  SiRNA target sequence
taataacattttttcaataatatt

SEQ ID NO: 102273 - DNA, 24 bp, Artificial sequence
  SiRNA target sequence
aataacattttttcaataatatta

SEQ ID NO: 102274 - DNA, 24 bp, Artificial sequence
  SiRNA target sequence
ataacattttttcaataatattat

SEQ ID NO: 102275 - DNA, 24 bp, Artificial sequence
  SiRNA target sequence
taacattttttcaataatattatt

SEQ ID NO: 102276 - DNA, 24 bp, Artificial sequence
  SiRNA target sequence
aacattttttcaataatattatta

SEQ ID NO: 102277 - DNA, 24 bp, Artificial sequence
  SiRNA target sequence
acattttttcaataatattattaa

SEQ ID NO: 102278 - DNA, 24 bp, Artificial sequence
  SiRNA target sequence
cattttttcaataatattattaag

SEQ ID NO: 102279 - DNA, 24 bp, Artificial sequence
  SiRNA target sequence
attttttcaataatattattaagt

SEQ ID NO: 102280 - DNA, 24 bp, Artificial sequence
  SiRNA target sequence
ttttttcaataatattattaagtc

SEQ ID NO: 102281 - DNA, 24 bp, Artificial sequence
  SiRNA target sequence
tttttcaataatattattaagtct

SEQ ID NO: 102282 - DNA, 24 bp, Artificial sequence
  SiRNA target sequence
ttttcaataatattattaagtcta

SEQ ID NO: 102283 - DNA, 24 bp, Artificial sequence
  SiRNA target sequence
tttcaataatattattaagtctag

SEQ ID NO: 102284 - DNA, 24 bp, Artificial sequence
  SiRNA target sequence
ttcaataatattattaagtctaga

SEQ ID NO: 102285 - DNA, 24 bp, Artificial sequence
  SiRNA target sequence
tcaataatattattaagtctagaa

SEQ ID NO: 102286 - DNA, 24 bp, Artificial sequence
  SiRNA target sequence
caataatattattaagtctagaat

SEQ ID NO: 102287 - DNA, 24 bp, Artificial sequence
  SiRNA target sequence
aataatattattaagtctagaatt

SEQ ID NO: 102288 - DNA, 24 bp, Artificial sequence
  SiRNA target sequence
ataatattattaagtctagaattt

SEQ ID NO: 102289 - DNA, 24 bp, Artificial sequence
  SiRNA target sequence
taatattattaagtctagaatttc

SEQ ID NO: 102290 - DNA, 24 bp, Artificial sequence
  SiRNA target sequence
aatattattaagtctagaatttcc

SEQ ID NO: 102291 - DNA, 24 bp, Artificial sequence
  SiRNA target sequence
atattattaagtctagaatttcca

SEQ ID NO: 102292 - DNA, 24 bp, Artificial sequence
  SiRNA target sequence
tattattaagtctagaatttccac

SEQ ID NO: 102293 - DNA, 24 bp, Artificial sequence
  SiRNA target sequence
attattaagtctagaatttccact

SEQ ID NO: 102294 - DNA, 24 bp, Artificial sequence
  SiRNA target sequence
ttattaagtctagaatttccactt

SEQ ID NO: 102295 - DNA, 24 bp, Artificial sequence
  SiRNA target sequence
tattaagtctagaatttccactta

SEQ ID NO: 102296 - DNA, 24 bp, Artificial sequence
  SiRNA target sequence
attaagtctagaatttccacttac

SEQ ID NO: 102297 - DNA, 24 bp, Artificial sequence
  SiRNA target sequence
ttaagtctagaatttccacttaca

SEQ ID NO: 102298 - DNA, 24 bp, Artificial sequence
  SiRNA target sequence
taagtctagaatttccacttacaa

SEQ ID NO: 102299 - DNA, 24 bp, Artificial sequence
  SiRNA target sequence
aagtctagaatttccacttacaaa

SEQ ID NO: 102300 - DNA, 24 bp, Artificial sequence
  SiRNA target sequence
agtctagaatttccacttacaaat

SEQ ID NO: 102301 - DNA, 24 bp, Artificial sequence
  SiRNA target sequence
gtctagaatttccacttacaaata

SEQ ID NO: 102302 - DNA, 24 bp, Artificial sequence
  SiRNA target sequence
tctagaatttccacttacaaatat

SEQ ID NO: 102303 - DNA, 24 bp, Artificial sequence
  SiRNA target sequence
ctagaatttccacttacaaatatt

SEQ ID NO: 102304 - DNA, 24 bp, Artificial sequence
  SiRNA target sequence
tagaatttccacttacaaatatta

SEQ ID NO: 102305 - DNA, 24 bp, Artificial sequence
  SiRNA target sequence
agaatttccacttacaaatattaa

SEQ ID NO: 102306 - DNA, 24 bp, Artificial sequence
  SiRNA target sequence
gaatttccacttacaaatattaac

SEQ ID NO: 102307 - DNA, 24 bp, Artificial sequence
  SiRNA target sequence
aatttccacttacaaatattaacc

SEQ ID NO: 102308 - DNA, 24 bp, Artificial sequence
  SiRNA target sequence
atttccacttacaaatattaacca

SEQ ID NO: 102309 - DNA, 24 bp, Artificial sequence
  SiRNA target sequence
tttccacttacaaatattaaccaa

SEQ ID NO: 102310 - DNA, 24 bp, Artificial sequence
  SiRNA target sequence
ttccacttacaaatattaaccaat

SEQ ID NO: 102311 - DNA, 24 bp, Artificial sequence
  SiRNA target sequence
tccacttacaaatattaaccaatc

SEQ ID NO: 102312 - DNA, 24 bp, Artificial sequence
  SiRNA target sequence
ccacttacaaatattaaccaatca

SEQ ID NO: 102313 - DNA, 24 bp, Artificial sequence
  SiRNA target sequence
cacttacaaatattaaccaatcat

SEQ ID NO: 102314 - DNA, 24 bp, Artificial sequence
  SiRNA target sequence
acttacaaatattaaccaatcatc

SEQ ID NO: 102315 - DNA, 24 bp, Artificial sequence
  SiRNA target sequence
cttacaaatattaaccaatcatca

SEQ ID NO: 102316 - DNA, 24 bp, Artificial sequence
  SiRNA target sequence
ttacaaatattaaccaatcatcaa

SEQ ID NO: 102317 - DNA, 24 bp, Artificial sequence
  SiRNA target sequence
tacaaatattaaccaatcatcaat

SEQ ID NO: 102318 - DNA, 24 bp, Artificial sequence
  SiRNA target sequence
acaaatattaaccaatcatcaata

SEQ ID NO: 102319 - DNA, 24 bp, Artificial sequence
  SiRNA target sequence
caaatattaaccaatcatcaatat

SEQ ID NO: 102320 - DNA, 24 bp, Artificial sequence
  SiRNA target sequence
aaatattaaccaatcatcaatatt

SEQ ID NO: 102321 - DNA, 24 bp, Artificial sequence
  SiRNA target sequence
aatattaaccaatcatcaatattt

SEQ ID NO: 102322 - DNA, 24 bp, Artificial sequence
  SiRNA target sequence
atattaaccaatcatcaatatttt

SEQ ID NO: 102323 - DNA, 24 bp, Artificial sequence
  SiRNA target sequence
tattaaccaatcatcaatattttc

SEQ ID NO: 102324 - DNA, 24 bp, Artificial sequence
  SiRNA target sequence
attaaccaatcatcaatattttct

SEQ ID NO: 102325 - DNA, 24 bp, Artificial sequence
  SiRNA target sequence
ttaaccaatcatcaatattttcta

SEQ ID NO: 102326 - DNA, 24 bp, Artificial sequence
  SiRNA target sequence
taaccaatcatcaatattttctag

SEQ ID NO: 102327 - DNA, 24 bp, Artificial sequence
  SiRNA target sequence
aaccaatcatcaatattttctagc

SEQ ID NO: 102328 - DNA, 24 bp, Artificial sequence
  SiRNA target sequence
accaatcatcaatattttctagcc

SEQ ID NO: 102329 - DNA, 24 bp, Artificial sequence
  SiRNA target sequence
ccaatcatcaatattttctagccc

SEQ ID NO: 102330 - DNA, 24 bp, Artificial sequence
  SiRNA target sequence
caatcatcaatattttctagccct

SEQ ID NO: 102331 - DNA, 24 bp, Artificial sequence
  SiRNA target sequence
aatcatcaatattttctagccctt

SEQ ID NO: 102332 - DNA, 24 bp, Artificial sequence
  SiRNA target sequence
atcatcaatattttctagcccttt

SEQ ID NO: 102333 - DNA, 24 bp, Artificial sequence
  SiRNA target sequence
tcatcaatattttctagccctttt

SEQ ID NO: 102334 - DNA, 24 bp, Artificial sequence
  SiRNA target sequence
catcaatattttctagccctttta

SEQ ID NO: 102335 - DNA, 24 bp, Artificial sequence
  SiRNA target sequence
atcaatattttctagcccttttat

SEQ ID NO: 102336 - DNA, 24 bp, Artificial sequence
  SiRNA target sequence
tcaatattttctagcccttttata

SEQ ID NO: 102337 - DNA, 24 bp, Artificial sequence
  SiRNA target sequence
caatattttctagcccttttatag

SEQ ID NO: 102338 - DNA, 24 bp, Artificial sequence
  SiRNA target sequence
aatattttctagcccttttatagt

SEQ ID NO: 102339 - DNA, 24 bp, Artificial sequence
  SiRNA target sequence
atattttctagcccttttatagtc

SEQ ID NO: 102340 - DNA, 24 bp, Artificial sequence
  SiRNA target sequence
tattttctagcccttttatagtct

SEQ ID NO: 102341 - DNA, 24 bp, Artificial sequence
  SiRNA target sequence
attttctagcccttttatagtctt

SEQ ID NO: 102342 - DNA, 24 bp, Artificial sequence
  SiRNA target sequence
ttttctagcccttttatagtctta

SEQ ID NO: 102343 - DNA, 24 bp, Artificial sequence
  SiRNA target sequence
tttctagcccttttatagtcttat

SEQ ID NO: 102344 - DNA, 24 bp, Artificial sequence
  SiRNA target sequence
ttctagcccttttatagtcttata

SEQ ID NO: 102345 - DNA, 24 bp, Artificial sequence
  SiRNA target sequence
tctagcccttttatagtcttataa

SEQ ID NO: 102346 - DNA, 24 bp, Artificial sequence
  SiRNA target sequence
ctagcccttttatagtcttataaa

SEQ ID NO: 102347 - DNA, 24 bp, Artificial sequence
  SiRNA target sequence
tagcccttttatagtcttataaat

SEQ ID NO: 102348 - DNA, 24 bp, Artificial sequence
  SiRNA target sequence
agcccttttatagtcttataaata

SEQ ID NO: 102349 - DNA, 24 bp, Artificial sequence
  SiRNA target sequence
gcccttttatagtcttataaatat

SEQ ID NO: 102350 - DNA, 24 bp, Artificial sequence
  SiRNA target sequence
cccttttatagtcttataaatatc

SEQ ID NO: 102351 - DNA, 24 bp, Artificial sequence
  SiRNA target sequence
ccttttatagtcttataaatatct

SEQ ID NO: 102352 - DNA, 24 bp, Artificial sequence
  SiRNA target sequence
cttttatagtcttataaatatctt

SEQ ID NO: 102353 - DNA, 24 bp, Artificial sequence
  SiRNA target sequence
ttttatagtcttataaatatcttg

SEQ ID NO: 102354 - DNA, 24 bp, Artificial sequence
  SiRNA target sequence
tttatagtcttataaatatcttgt

SEQ ID NO: 102355 - DNA, 24 bp, Artificial sequence
  SiRNA target sequence
ttatagtcttataaatatcttgta

SEQ ID NO: 102356 - DNA, 24 bp, Artificial sequence
  SiRNA target sequence
tatagtcttataaatatcttgtat

SEQ ID NO: 102357 - DNA, 24 bp, Artificial sequence
  SiRNA target sequence
atagtcttataaatatcttgtatg

SEQ ID NO: 102358 - DNA, 24 bp, Artificial sequence
  SiRNA target sequence
tagtcttataaatatcttgtatgt

SEQ ID NO: 102359 - DNA, 24 bp, Artificial sequence
  SiRNA target sequence
agtcttataaatatcttgtatgta

SEQ ID NO: 102360 - DNA, 24 bp, Artificial sequence
  SiRNA target sequence
gtcttataaatatcttgtatgtat

SEQ ID NO: 102361 - DNA, 24 bp, Artificial sequence
  SiRNA target sequence
tcttataaatatcttgtatgtatt

SEQ ID NO: 102362 - DNA, 24 bp, Artificial sequence
  SiRNA target sequence
cttataaatatcttgtatgtattt

SEQ ID NO: 102363 - DNA, 24 bp, Artificial sequence
  SiRNA target sequence
ttataaatatcttgtatgtattta

SEQ ID NO: 102364 - DNA, 24 bp, Artificial sequence
  SiRNA target sequence
tataaatatcttgtatgtatttat

SEQ ID NO: 102365 - DNA, 24 bp, Artificial sequence
  SiRNA target sequence
ataaatatcttgtatgtatttatt

SEQ ID NO: 102366 - DNA, 24 bp, Artificial sequence
  SiRNA target sequence
taaatatcttgtatgtatttatta

SEQ ID NO: 102367 - DNA, 24 bp, Artificial sequence
  SiRNA target sequence
aaatatcttgtatgtatttattat

SEQ ID NO: 102368 - DNA, 24 bp, Artificial sequence
  SiRNA target sequence
aatatcttgtatgtatttattatc

SEQ ID NO: 102369 - DNA, 24 bp, Artificial sequence
  SiRNA target sequence
atatcttgtatgtatttattatct

SEQ ID NO: 102370 - DNA, 24 bp, Artificial sequence
  SiRNA target sequence
tatcttgtatgtatttattatctt

SEQ ID NO: 102371 - DNA, 24 bp, Artificial sequence
  SiRNA target sequence
atcttgtatgtatttattatcttc

SEQ ID NO: 102372 - DNA, 24 bp, Artificial sequence
  SiRNA target sequence
tcttgtatgtatttattatcttcc

SEQ ID NO: 102373 - DNA, 24 bp, Artificial sequence
  SiRNA target sequence
cttgtatgtatttattatcttccc

SEQ ID NO: 102374 - DNA, 24 bp, Artificial sequence
  SiRNA target sequence
ttgtatgtatttattatcttccct

SEQ ID NO: 102375 - DNA, 24 bp, Artificial sequence
  SiRNA target sequence
tgtatgtatttattatcttccctt

SEQ ID NO: 102376 - DNA, 24 bp, Artificial sequence
  SiRNA target sequence
gtatgtatttattatcttcccttg

SEQ ID NO: 102377 - DNA, 24 bp, Artificial sequence
  SiRNA target sequence
tatgtatttattatcttcccttga

SEQ ID NO: 102378 - DNA, 24 bp, Artificial sequence
  SiRNA target sequence
atgtatttattatcttcccttgaa

SEQ ID NO: 102379 - DNA, 24 bp, Artificial sequence
  SiRNA target sequence
tgtatttattatcttcccttgaaa

SEQ ID NO: 102380 - DNA, 24 bp, Artificial sequence
  SiRNA target sequence
gtatttattatcttcccttgaaac

SEQ ID NO: 102381 - DNA, 24 bp, Artificial sequence
  SiRNA target sequence
tatttattatcttcccttgaaaca

SEQ ID NO: 102382 - DNA, 24 bp, Artificial sequence
  SiRNA target sequence
atttattatcttcccttgaaacag

SEQ ID NO: 102383 - DNA, 24 bp, Artificial sequence
  SiRNA target sequence
tttattatcttcccttgaaacagc

SEQ ID NO: 102384 - DNA, 24 bp, Artificial sequence
  SiRNA target sequence
ttattatcttcccttgaaacagcg

SEQ ID NO: 102385 - DNA, 24 bp, Artificial sequence
  SiRNA target sequence
tattatcttcccttgaaacagcgg

SEQ ID NO: 102386 - DNA, 24 bp, Artificial sequence
  SiRNA target sequence
attatcttcccttgaaacagcggg

SEQ ID NO: 102387 - DNA, 24 bp, Artificial sequence
  SiRNA target sequence
ttatcttcccttgaaacagcgggg

SEQ ID NO: 102388 - DNA, 24 bp, Artificial sequence
  SiRNA target sequence
tatcttcccttgaaacagcggggt

SEQ ID NO: 102389 - DNA, 24 bp, Artificial sequence
  SiRNA target sequence
atcttcccttgaaacagcggggta

SEQ ID NO: 102390 - DNA, 24 bp, Artificial sequence
  SiRNA target sequence
tcttcccttgaaacagcggggtaa

SEQ ID NO: 102391 - DNA, 24 bp, Artificial sequence
  SiRNA target sequence
cttcccttgaaacagcggggtaaa

SEQ ID NO: 102392 - DNA, 24 bp, Artificial sequence
  SiRNA target sequence
ttcccttgaaacagcggggtaaat

SEQ ID NO: 102393 - DNA, 24 bp, Artificial sequence
  SiRNA target sequence
tcccttgaaacagcggggtaaatt

SEQ ID NO: 102394 - DNA, 24 bp, Artificial sequence
  SiRNA target sequence
cccttgaaacagcggggtaaattt

SEQ ID NO: 102395 - DNA, 24 bp, Artificial sequence
  SiRNA target sequence
ccttgaaacagcggggtaaatttc

SEQ ID NO: 102396 - DNA, 24 bp, Artificial sequence
  SiRNA target sequence
cttgaaacagcggggtaaatttca

SEQ ID NO: 102397 - DNA, 24 bp, Artificial sequence
  SiRNA target sequence
ttgaaacagcggggtaaatttcaa

SEQ ID NO: 102398 - DNA, 24 bp, Artificial sequence
  SiRNA target sequence
tgaaacagcggggtaaatttcaat

SEQ ID NO: 102399 - DNA, 24 bp, Artificial sequence
  SiRNA target sequence
gaaacagcggggtaaatttcaatg

SEQ ID NO: 102400 - DNA, 24 bp, Artificial sequence
  SiRNA target sequence
aaacagcggggtaaatttcaatgc

SEQ ID NO: 102401 - DNA, 24 bp, Artificial sequence
  SiRNA target sequence
aacagcggggtaaatttcaatgcc

SEQ ID NO: 102402 - DNA, 24 bp, Artificial sequence
  SiRNA target sequence
acagcggggtaaatttcaatgcct

SEQ ID NO: 102403 - DNA, 24 bp, Artificial sequence
  SiRNA target sequence
cagcggggtaaatttcaatgcctt

SEQ ID NO: 102404 - DNA, 24 bp, Artificial sequence
  SiRNA target sequence
agcggggtaaatttcaatgccttt

SEQ ID NO: 102405 - DNA, 24 bp, Artificial sequence
  SiRNA target sequence
gcggggtaaatttcaatgccttta

SEQ ID NO: 102406 - DNA, 24 bp, Artificial sequence
  SiRNA target sequence
cggggtaaatttcaatgcctttat

SEQ ID NO: 102407 - DNA, 24 bp, Artificial sequence
  SiRNA target sequence
ggggtaaatttcaatgcctttatt

SEQ ID NO: 102408 - DNA, 24 bp, Artificial sequence
  SiRNA target sequence
gggtaaatttcaatgcctttattt

SEQ ID NO: 102409 - DNA, 24 bp, Artificial sequence
  SiRNA target sequence
ggtaaatttcaatgcctttatttt

SEQ ID NO: 102410 - DNA, 24 bp, Artificial sequence
  SiRNA target sequence
gtaaatttcaatgcctttattttc

SEQ ID NO: 102411 - DNA, 24 bp, Artificial sequence
  SiRNA target sequence
taaatttcaatgcctttattttca

SEQ ID NO: 102412 - DNA, 24 bp, Artificial sequence
  SiRNA target sequence
aaatttcaatgcctttattttcaa

SEQ ID NO: 102413 - DNA, 24 bp, Artificial sequence
  SiRNA target sequence
aatttcaatgcctttattttcaaa

SEQ ID NO: 102414 - DNA, 24 bp, Artificial sequence
  SiRNA target sequence
atttcaatgcctttattttcaaac

SEQ ID NO: 102415 - DNA, 24 bp, Artificial sequence
  SiRNA target sequence
tttcaatgcctttattttcaaact

SEQ ID NO: 102416 - DNA, 24 bp, Artificial sequence
  SiRNA target sequence
ttcaatgcctttattttcaaactc

SEQ ID NO: 102417 - DNA, 24 bp, Artificial sequence
  SiRNA target sequence
tcaatgcctttattttcaaactct

SEQ ID NO: 102418 - DNA, 24 bp, Artificial sequence
  SiRNA target sequence
caatgcctttattttcaaactctt

SEQ ID NO: 102419 - DNA, 24 bp, Artificial sequence
  SiRNA target sequence
aatgcctttattttcaaactcttc

SEQ ID NO: 102420 - DNA, 24 bp, Artificial sequence
  SiRNA target sequence
atgcctttattttcaaactcttct

SEQ ID NO: 102421 - DNA, 24 bp, Artificial sequence
  SiRNA target sequence
tgcctttattttcaaactcttctt

SEQ ID NO: 102422 - DNA, 24 bp, Artificial sequence
  SiRNA target sequence
gcctttattttcaaactcttcttt

SEQ ID NO: 102423 - DNA, 24 bp, Artificial sequence
  SiRNA target sequence
cctttattttcaaactcttcttta

SEQ ID NO: 102424 - DNA, 24 bp, Artificial sequence
  SiRNA target sequence
ctttattttcaaactcttctttat

SEQ ID NO: 102425 - DNA, 24 bp, Artificial sequence
  SiRNA target sequence
tttattttcaaactcttctttata

SEQ ID NO: 102426 - DNA, 24 bp, Artificial sequence
  SiRNA target sequence
ttattttcaaactcttctttatat

SEQ ID NO: 102427 - DNA, 24 bp, Artificial sequence
  SiRNA target sequence
tattttcaaactcttctttatata

SEQ ID NO: 102428 - DNA, 24 bp, Artificial sequence
  SiRNA target sequence
attttcaaactcttctttatataa

SEQ ID NO: 102429 - DNA, 24 bp, Artificial sequence
  SiRNA target sequence
ttttcaaactcttctttatataaa

SEQ ID NO: 102430 - DNA, 24 bp, Artificial sequence
  SiRNA target sequence
tttcaaactcttctttatataaaa

SEQ ID NO: 102431 - DNA, 24 bp, Artificial sequence
  SiRNA target sequence
ttcaaactcttctttatataaaaa

SEQ ID NO: 102432 - DNA, 24 bp, Artificial sequence
  SiRNA target sequence
tcaaactcttctttatataaaaaa

SEQ ID NO: 102433 - DNA, 24 bp, Artificial sequence
  SiRNA target sequence
caaactcttctttatataaaaaat

SEQ ID NO: 102434 - DNA, 24 bp, Artificial sequence
  SiRNA target sequence
aaactcttctttatataaaaaatc

SEQ ID NO: 102435 - DNA, 24 bp, Artificial sequence
  SiRNA target sequence
aactcttctttatataaaaaatct

SEQ ID NO: 102436 - DNA, 24 bp, Artificial sequence
  SiRNA target sequence
actcttctttatataaaaaatcta

SEQ ID NO: 102437 - DNA, 24 bp, Artificial sequence
  SiRNA target sequence
ctcttctttatataaaaaatctac

SEQ ID NO: 102438 - DNA, 24 bp, Artificial sequence
  SiRNA target sequence
tcttctttatataaaaaatctaca

SEQ ID NO: 102439 - DNA, 24 bp, Artificial sequence
  SiRNA target sequence
cttctttatataaaaaatctacat

SEQ ID NO: 102440 - DNA, 24 bp, Artificial sequence
  SiRNA target sequence
ttctttatataaaaaatctacatc

SEQ ID NO: 102441 - DNA, 24 bp, Artificial sequence
  SiRNA target sequence
tctttatataaaaaatctacatct

SEQ ID NO: 102442 - DNA, 24 bp, Artificial sequence
  SiRNA target sequence
ctttatataaaaaatctacatctc

SEQ ID NO: 102443 - DNA, 24 bp, Artificial sequence
  SiRNA target sequence
tttatataaaaaatctacatctct

SEQ ID NO: 102444 - DNA, 24 bp, Artificial sequence
  SiRNA target sequence
ttatataaaaaatctacatctcta

SEQ ID NO: 102445 - DNA, 24 bp, Artificial sequence
  SiRNA target sequence
tatataaaaaatctacatctctaa

SEQ ID NO: 102446 - DNA, 24 bp, Artificial sequence
  SiRNA target sequence
atataaaaaatctacatctctaaa

SEQ ID NO: 102447 - DNA, 24 bp, Artificial sequence
  SiRNA target sequence
tataaaaaatctacatctctaaat

SEQ ID NO: 102448 - DNA, 24 bp, Artificial sequence
  SiRNA target sequence
ataaaaaatctacatctctaaatc

SEQ ID NO: 102449 - DNA, 24 bp, Artificial sequence
  SiRNA target sequence
taaaaaatctacatctctaaatct

SEQ ID NO: 102450 - DNA, 24 bp, Artificial sequence
  SiRNA target sequence
aaaaaatctacatctctaaatcta

SEQ ID NO: 102451 - DNA, 24 bp, Artificial sequence
  SiRNA target sequence
aaaaatctacatctctaaatctaa

SEQ ID NO: 102452 - DNA, 24 bp, Artificial sequence
  SiRNA target sequence
aaaatctacatctctaaatctaaa

SEQ ID NO: 102453 - DNA, 24 bp, Artificial sequence
  SiRNA target sequence
aaatctacatctctaaatctaaaa

SEQ ID NO: 102454 - DNA, 24 bp, Artificial sequence
  SiRNA target sequence
aatctacatctctaaatctaaaac

SEQ ID NO: 102455 - DNA, 24 bp, Artificial sequence
  SiRNA target sequence
atctacatctctaaatctaaaacc

SEQ ID NO: 102456 - DNA, 24 bp, Artificial sequence
  SiRNA target sequence
tctacatctctaaatctaaaacca

SEQ ID NO: 102457 - DNA, 24 bp, Artificial sequence
  SiRNA target sequence
ctacatctctaaatctaaaaccat

SEQ ID NO: 102458 - DNA, 24 bp, Artificial sequence
  SiRNA target sequence
tacatctctaaatctaaaaccata

SEQ ID NO: 102459 - DNA, 24 bp, Artificial sequence
  SiRNA target sequence
acatctctaaatctaaaaccatat

SEQ ID NO: 102460 - DNA, 24 bp, Artificial sequence
  SiRNA target sequence
catctctaaatctaaaaccatata

SEQ ID NO: 102461 - DNA, 24 bp, Artificial sequence
  SiRNA target sequence
atctctaaatctaaaaccatataa

SEQ ID NO: 102462 - DNA, 24 bp, Artificial sequence
  SiRNA target sequence
tctctaaatctaaaaccatataat

SEQ ID NO: 102463 - DNA, 24 bp, Artificial sequence
  SiRNA target sequence
ctctaaatctaaaaccatataata

SEQ ID NO: 102464 - DNA, 24 bp, Artificial sequence
  SiRNA target sequence
tctaaatctaaaaccatataataa

SEQ ID NO: 102465 - DNA, 24 bp, Artificial sequence
  SiRNA target sequence
ctaaatctaaaaccatataataaa

SEQ ID NO: 102466 - DNA, 24 bp, Artificial sequence
  SiRNA target sequence
taaatctaaaaccatataataaaa

SEQ ID NO: 102467 - DNA, 24 bp, Artificial sequence
  SiRNA target sequence
aaatctaaaaccatataataaaat

SEQ ID NO: 102468 - DNA, 24 bp, Artificial sequence
  SiRNA target sequence
aatctaaaaccatataataaaata

SEQ ID NO: 102469 - DNA, 24 bp, Artificial sequence
  SiRNA target sequence
atctaaaaccatataataaaataa

SEQ ID NO: 102470 - DNA, 24 bp, Artificial sequence
  SiRNA target sequence
tctaaaaccatataataaaataac

SEQ ID NO: 102471 - DNA, 24 bp, Artificial sequence
  SiRNA target sequence
ctaaaaccatataataaaataact

SEQ ID NO: 102472 - DNA, 24 bp, Artificial sequence
  SiRNA target sequence
taaaaccatataataaaataactt

SEQ ID NO: 102473 - DNA, 24 bp, Artificial sequence
  SiRNA target sequence
aaaaccatataataaaataacttt

SEQ ID NO: 102474 - DNA, 24 bp, Artificial sequence
  SiRNA target sequence
aaaccatataataaaataactttt

SEQ ID NO: 102475 - DNA, 24 bp, Artificial sequence
  SiRNA target sequence
aaccatataataaaataacttttt

SEQ ID NO: 102476 - DNA, 24 bp, Artificial sequence
  SiRNA target sequence
accatataataaaataactttttt

SEQ ID NO: 102477 - DNA, 24 bp, Artificial sequence
  SiRNA target sequence
ccatataataaaataactttttta

SEQ ID NO: 102478 - DNA, 24 bp, Artificial sequence
  SiRNA target sequence
catataataaaataacttttttaa

SEQ ID NO: 102479 - DNA, 24 bp, Artificial sequence
  SiRNA target sequence
atataataaaataacttttttaaa

SEQ ID NO: 102480 - DNA, 24 bp, Artificial sequence
  SiRNA target sequence
tataataaaataacttttttaaaa

SEQ ID NO: 102481 - DNA, 24 bp, Artificial sequence
  SiRNA target sequence
ataataaaataacttttttaaaaa

SEQ ID NO: 102482 - DNA, 24 bp, Artificial sequence
  SiRNA target sequence
taataaaataacttttttaaaaaa

SEQ ID NO: 102483 - DNA, 24 bp, Artificial sequence
  SiRNA target sequence
aataaaataacttttttaaaaaaa

SEQ ID NO: 102484 - DNA, 24 bp, Artificial sequence
  SiRNA target sequence
ataaaataacttttttaaaaaaat

SEQ ID NO: 102485 - DNA, 24 bp, Artificial sequence
  SiRNA target sequence
taaaataacttttttaaaaaaatt

SEQ ID NO: 102486 - DNA, 24 bp, Artificial sequence
  SiRNA target sequence
aaaataacttttttaaaaaaattt

SEQ ID NO: 102487 - DNA, 24 bp, Artificial sequence
  SiRNA target sequence
aaataacttttttaaaaaaattta

SEQ ID NO: 102488 - DNA, 24 bp, Artificial sequence
  SiRNA target sequence
aataacttttttaaaaaaatttaa

SEQ ID NO: 102489 - DNA, 24 bp, Artificial sequence
  SiRNA target sequence
ataacttttttaaaaaaatttaaa

SEQ ID NO: 102490 - DNA, 24 bp, Artificial sequence
  SiRNA target sequence
taacttttttaaaaaaatttaaat

SEQ ID NO: 102491 - DNA, 24 bp, Artificial sequence
  SiRNA target sequence
aacttttttaaaaaaatttaaatc

SEQ ID NO: 102492 - DNA, 24 bp, Artificial sequence
  SiRNA target sequence
acttttttaaaaaaatttaaatca

SEQ ID NO: 102493 - DNA, 24 bp, Artificial sequence
  SiRNA target sequence
cttttttaaaaaaatttaaatcag

SEQ ID NO: 102494 - DNA, 24 bp, Artificial sequence
  SiRNA target sequence
ttttttaaaaaaatttaaatcaga

SEQ ID NO: 102495 - DNA, 24 bp, Artificial sequence
  SiRNA target sequence
tttttaaaaaaatttaaatcagaa

SEQ ID NO: 102496 - DNA, 24 bp, Artificial sequence
  SiRNA target sequence
ttttaaaaaaatttaaatcagaat

SEQ ID NO: 102497 - DNA, 24 bp, Artificial sequence
  SiRNA target sequence
tttaaaaaaatttaaatcagaata

SEQ ID NO: 102498 - DNA, 24 bp, Artificial sequence
  SiRNA target sequence
ttaaaaaaatttaaatcagaatag

SEQ ID NO: 102499 - DNA, 24 bp, Artificial sequence
  SiRNA target sequence
taaaaaaatttaaatcagaatagt

SEQ ID NO: 102500 - DNA, 24 bp, Artificial sequence
  SiRNA target sequence
aaaaaaatttaaatcagaatagta

SEQ ID NO: 102501 - DNA, 24 bp, Artificial sequence
  SiRNA target sequence
aaaaaatttaaatcagaatagtaa

SEQ ID NO: 102502 - DNA, 24 bp, Artificial sequence
  SiRNA target sequence
aaaaatttaaatcagaatagtaat

SEQ ID NO: 102503 - DNA, 24 bp, Artificial sequence
  SiRNA target sequence
aaaatttaaatcagaatagtaatt

SEQ ID NO: 102504 - DNA, 24 bp, Artificial sequence
  SiRNA target sequence
aaatttaaatcagaatagtaatta

SEQ ID NO: 102505 - DNA, 24 bp, Artificial sequence
  SiRNA target sequence
aatttaaatcagaatagtaattaa

SEQ ID NO: 102506 - DNA, 24 bp, Artificial sequence
  SiRNA target sequence
atttaaatcagaatagtaattaac

SEQ ID NO: 102507 - DNA, 24 bp, Artificial sequence
  SiRNA target sequence
tttaaatcagaatagtaattaaca

SEQ ID NO: 102508 - DNA, 24 bp, Artificial sequence
  SiRNA target sequence
ttaaatcagaatagtaattaacaa

SEQ ID NO: 102509 - DNA, 24 bp, Artificial sequence
  SiRNA target sequence
taaatcagaatagtaattaacaaa

SEQ ID NO: 102510 - DNA, 24 bp, Artificial sequence
  SiRNA target sequence
aaatcagaatagtaattaacaaat

SEQ ID NO: 102511 - DNA, 24 bp, Artificial sequence
  SiRNA target sequence
aatcagaatagtaattaacaaatg

SEQ ID NO: 102512 - DNA, 24 bp, Artificial sequence
  SiRNA target sequence
atcagaatagtaattaacaaatgc

SEQ ID NO: 102513 - DNA, 24 bp, Artificial sequence
  SiRNA target sequence
tcagaatagtaattaacaaatgcc

SEQ ID NO: 102514 - DNA, 24 bp, Artificial sequence
  SiRNA target sequence
cagaatagtaattaacaaatgccc

SEQ ID NO: 102515 - DNA, 24 bp, Artificial sequence
  SiRNA target sequence
agaatagtaattaacaaatgccct

SEQ ID NO: 102516 - DNA, 24 bp, Artificial sequence
  SiRNA target sequence
gaatagtaattaacaaatgccctg

SEQ ID NO: 102517 - DNA, 24 bp, Artificial sequence
  SiRNA target sequence
aatagtaattaacaaatgccctgg

SEQ ID NO: 102518 - DNA, 24 bp, Artificial sequence
  SiRNA target sequence
atagtaattaacaaatgccctggg

SEQ ID NO: 102519 - DNA, 24 bp, Artificial sequence
  SiRNA target sequence
tagtaattaacaaatgccctggga

SEQ ID NO: 102520 - DNA, 24 bp, Artificial sequence
  SiRNA target sequence
agtaattaacaaatgccctgggaa

SEQ ID NO: 102521 - DNA, 24 bp, Artificial sequence
  SiRNA target sequence
gtaattaacaaatgccctgggaag

SEQ ID NO: 102522 - DNA, 24 bp, Artificial sequence
  SiRNA target sequence
taattaacaaatgccctgggaagt

SEQ ID NO: 102523 - DNA, 24 bp, Artificial sequence
  SiRNA target sequence
aattaacaaatgccctgggaagtg

SEQ ID NO: 102524 - DNA, 24 bp, Artificial sequence
  SiRNA target sequence
attaacaaatgccctgggaagtgt

SEQ ID NO: 102525 - DNA, 24 bp, Artificial sequence
  SiRNA target sequence
ttaacaaatgccctgggaagtgta

SEQ ID NO: 102526 - DNA, 24 bp, Artificial sequence
  SiRNA target sequence
taacaaatgccctgggaagtgtaa

SEQ ID NO: 102527 - DNA, 24 bp, Artificial sequence
  SiRNA target sequence
aacaaatgccctgggaagtgtaat

SEQ ID NO: 102528 - DNA, 24 bp, Artificial sequence
  SiRNA target sequence
acaaatgccctgggaagtgtaata

SEQ ID NO: 102529 - DNA, 24 bp, Artificial sequence
  SiRNA target sequence
caaatgccctgggaagtgtaatac

SEQ ID NO: 102530 - DNA, 24 bp, Artificial sequence
  SiRNA target sequence
aaatgccctgggaagtgtaatacc

SEQ ID NO: 102531 - DNA, 24 bp, Artificial sequence
  SiRNA target sequence
aatgccctgggaagtgtaatacca

SEQ ID NO: 102532 - DNA, 24 bp, Artificial sequence
  SiRNA target sequence
atgccctgggaagtgtaataccag

SEQ ID NO: 102533 - DNA, 24 bp, Artificial sequence
  SiRNA target sequence
tgccctgggaagtgtaataccagt

SEQ ID NO: 102534 - DNA, 24 bp, Artificial sequence
  SiRNA target sequence
gccctgggaagtgtaataccagta

SEQ ID NO: 102535 - DNA, 24 bp, Artificial sequence
  SiRNA target sequence
ccctgggaagtgtaataccagtac

SEQ ID NO: 102536 - DNA, 24 bp, Artificial sequence
  SiRNA target sequence
cctgggaagtgtaataccagtacc

SEQ ID NO: 102537 - DNA, 24 bp, Artificial sequence
  SiRNA target sequence
ctgggaagtgtaataccagtacca

SEQ ID NO: 102538 - DNA, 24 bp, Artificial sequence
  SiRNA target sequence
tgggaagtgtaataccagtaccag

SEQ ID NO: 102539 - DNA, 24 bp, Artificial sequence
  SiRNA target sequence
gggaagtgtaataccagtaccagt

SEQ ID NO: 102540 - DNA, 24 bp, Artificial sequence
  SiRNA target sequence
ggaagtgtaataccagtaccagtg

SEQ ID NO: 102541 - DNA, 24 bp, Artificial sequence
  SiRNA target sequence
gaagtgtaataccagtaccagtgc

SEQ ID NO: 102542 - DNA, 24 bp, Artificial sequence
  SiRNA target sequence
aagtgtaataccagtaccagtgca

SEQ ID NO: 102543 - DNA, 24 bp, Artificial sequence
  SiRNA target sequence
agtgtaataccagtaccagtgcac

SEQ ID NO: 102544 - DNA, 24 bp, Artificial sequence
  SiRNA target sequence
gtgtaataccagtaccagtgcaca

SEQ ID NO: 102545 - DNA, 24 bp, Artificial sequence
  SiRNA target sequence
tgtaataccagtaccagtgcacat

SEQ ID NO: 102546 - DNA, 24 bp, Artificial sequence
  SiRNA target sequence
gtaataccagtaccagtgcacata

SEQ ID NO: 102547 - DNA, 24 bp, Artificial sequence
  SiRNA target sequence
taataccagtaccagtgcacataa

SEQ ID NO: 102548 - DNA, 24 bp, Artificial sequence
  SiRNA target sequence
aataccagtaccagtgcacataaa

SEQ ID NO: 102549 - DNA, 24 bp, Artificial sequence
  SiRNA target sequence
ataccagtaccagtgcacataaac

SEQ ID NO: 102550 - DNA, 24 bp, Artificial sequence
  SiRNA target sequence
taccagtaccagtgcacataaaca

SEQ ID NO: 102551 - DNA, 24 bp, Artificial sequence
  SiRNA target sequence
accagtaccagtgcacataaacaa

SEQ ID NO: 102552 - DNA, 24 bp, Artificial sequence
  SiRNA target sequence
ccagtaccagtgcacataaacaaa

SEQ ID NO: 102553 - DNA, 24 bp, Artificial sequence
  SiRNA target sequence
cagtaccagtgcacataaacaaaa

SEQ ID NO: 102554 - DNA, 24 bp, Artificial sequence
  SiRNA target sequence
agtaccagtgcacataaacaaaat

SEQ ID NO: 102555 - DNA, 24 bp, Artificial sequence
  SiRNA target sequence
gtaccagtgcacataaacaaaatc

SEQ ID NO: 102556 - DNA, 24 bp, Artificial sequence
  SiRNA target sequence
taccagtgcacataaacaaaatct

SEQ ID NO: 102557 - DNA, 24 bp, Artificial sequence
  SiRNA target sequence
accagtgcacataaacaaaatctt

SEQ ID NO: 102558 - DNA, 24 bp, Artificial sequence
  SiRNA target sequence
ccagtgcacataaacaaaatcttt

SEQ ID NO: 102559 - DNA, 24 bp, Artificial sequence
  SiRNA target sequence
cagtgcacataaacaaaatctttt

SEQ ID NO: 102560 - DNA, 24 bp, Artificial sequence
  SiRNA target sequence
agtgcacataaacaaaatcttttt

SEQ ID NO: 102561 - DNA, 24 bp, Artificial sequence
  SiRNA target sequence
gtgcacataaacaaaatcttttta

SEQ ID NO: 102562 - DNA, 24 bp, Artificial sequence
  SiRNA target sequence
tgcacataaacaaaatctttttac

SEQ ID NO: 102563 - DNA, 24 bp, Artificial sequence
  SiRNA target sequence
gcacataaacaaaatctttttacc

SEQ ID NO: 102564 - DNA, 24 bp, Artificial sequence
  SiRNA target sequence
cacataaacaaaatctttttacca

SEQ ID NO: 102565 - DNA, 24 bp, Artificial sequence
  SiRNA target sequence
acataaacaaaatctttttaccac

SEQ ID NO: 102566 - DNA, 24 bp, Artificial sequence
  SiRNA target sequence
cataaacaaaatctttttaccact

SEQ ID NO: 102567 - DNA, 24 bp, Artificial sequence
  SiRNA target sequence
ataaacaaaatctttttaccacta

SEQ ID NO: 102568 - DNA, 24 bp, Artificial sequence
  SiRNA target sequence
taaacaaaatctttttaccactaa

SEQ ID NO: 102569 - DNA, 24 bp, Artificial sequence
  SiRNA target sequence
aaacaaaatctttttaccactaaa

SEQ ID NO: 102570 - DNA, 24 bp, Artificial sequence
  SiRNA target sequence
aacaaaatctttttaccactaaaa

SEQ ID NO: 102571 - DNA, 24 bp, Artificial sequence
  SiRNA target sequence
acaaaatctttttaccactaaaat

SEQ ID NO: 102572 - DNA, 24 bp, Artificial sequence
  SiRNA target sequence
caaaatctttttaccactaaaatt

SEQ ID NO: 102573 - DNA, 24 bp, Artificial sequence
  SiRNA target sequence
aaaatctttttaccactaaaatta

SEQ ID NO: 102574 - DNA, 24 bp, Artificial sequence
  SiRNA target sequence
aaatctttttaccactaaaattaa

SEQ ID NO: 102575 - DNA, 24 bp, Artificial sequence
  SiRNA target sequence
aatctttttaccactaaaattaag

SEQ ID NO: 102576 - DNA, 24 bp, Artificial sequence
  SiRNA target sequence
atctttttaccactaaaattaagt

SEQ ID NO: 102577 - DNA, 24 bp, Artificial sequence
  SiRNA target sequence
tctttttaccactaaaattaagtc

SEQ ID NO: 102578 - DNA, 24 bp, Artificial sequence
  SiRNA target sequence
ctttttaccactaaaattaagtct

SEQ ID NO: 102579 - DNA, 24 bp, Artificial sequence
  SiRNA target sequence
tttttaccactaaaattaagtcta

SEQ ID NO: 102580 - DNA, 24 bp, Artificial sequence
  SiRNA target sequence
ttttaccactaaaattaagtctat

SEQ ID NO: 102581 - DNA, 24 bp, Artificial sequence
  SiRNA target sequence
tttaccactaaaattaagtctatt

SEQ ID NO: 102582 - DNA, 24 bp, Artificial sequence
  SiRNA target sequence
ttaccactaaaattaagtctattt

SEQ ID NO: 102583 - DNA, 24 bp, Artificial sequence
  SiRNA target sequence
taccactaaaattaagtctatttt

SEQ ID NO: 102584 - DNA, 24 bp, Artificial sequence
  SiRNA target sequence
accactaaaattaagtctattttg

SEQ ID NO: 102585 - DNA, 24 bp, Artificial sequence
  SiRNA target sequence
ccactaaaattaagtctattttgt

SEQ ID NO: 102586 - DNA, 24 bp, Artificial sequence
  SiRNA target sequence
cactaaaattaagtctattttgta

SEQ ID NO: 102587 - DNA, 24 bp, Artificial sequence
  SiRNA target sequence
actaaaattaagtctattttgtac

SEQ ID NO: 102588 - DNA, 24 bp, Artificial sequence
  SiRNA target sequence
ctaaaattaagtctattttgtact

SEQ ID NO: 102589 - DNA, 24 bp, Artificial sequence
  SiRNA target sequence
taaaattaagtctattttgtacta

SEQ ID NO: 102590 - DNA, 24 bp, Artificial sequence
  SiRNA target sequence
aaaattaagtctattttgtactat

SEQ ID NO: 102591 - DNA, 24 bp, Artificial sequence
  SiRNA target sequence
aaattaagtctattttgtactatg

SEQ ID NO: 102592 - DNA, 24 bp, Artificial sequence
  SiRNA target sequence
aattaagtctattttgtactatgt

SEQ ID NO: 102593 - DNA, 24 bp, Artificial sequence
  SiRNA target sequence
attaagtctattttgtactatgtt

SEQ ID NO: 102594 - DNA, 24 bp, Artificial sequence
  SiRNA target sequence
ttaagtctattttgtactatgtta

SEQ ID NO: 102595 - DNA, 24 bp, Artificial sequence
  SiRNA target sequence
taagtctattttgtactatgttaa

SEQ ID NO: 102596 - DNA, 24 bp, Artificial sequence
  SiRNA target sequence
aagtctattttgtactatgttaac

SEQ ID NO: 102597 - DNA, 24 bp, Artificial sequence
  SiRNA target sequence
agtctattttgtactatgttaaca

SEQ ID NO: 102598 - DNA, 24 bp, Artificial sequence
  SiRNA target sequence
gtctattttgtactatgttaacat

SEQ ID NO: 102599 - DNA, 24 bp, Artificial sequence
  SiRNA target sequence
tctattttgtactatgttaacatg

SEQ ID NO: 102600 - DNA, 24 bp, Artificial sequence
  SiRNA target sequence
ctattttgtactatgttaacatga

SEQ ID NO: 102601 - DNA, 24 bp, Artificial sequence
  SiRNA target sequence
tattttgtactatgttaacatgaa

SEQ ID NO: 102602 - DNA, 24 bp, Artificial sequence
  SiRNA target sequence
attttgtactatgttaacatgaat

SEQ ID NO: 102603 - DNA, 24 bp, Artificial sequence
  SiRNA target sequence
ttttgtactatgttaacatgaata

SEQ ID NO: 102604 - DNA, 24 bp, Artificial sequence
  SiRNA target sequence
tttgtactatgttaacatgaatag

SEQ ID NO: 102605 - DNA, 24 bp, Artificial sequence
  SiRNA target sequence
ttgtactatgttaacatgaatagt

SEQ ID NO: 102606 - DNA, 24 bp, Artificial sequence
  SiRNA target sequence
tgtactatgttaacatgaatagta

SEQ ID NO: 102607 - DNA, 24 bp, Artificial sequence
  SiRNA target sequence
gtactatgttaacatgaatagtag

SEQ ID NO: 102608 - DNA, 24 bp, Artificial sequence
  SiRNA target sequence
tactatgttaacatgaatagtaga

SEQ ID NO: 102609 - DNA, 24 bp, Artificial sequence
  SiRNA target sequence
actatgttaacatgaatagtagac

SEQ ID NO: 102610 - DNA, 24 bp, Artificial sequence
  SiRNA target sequence
ctatgttaacatgaatagtagacc

SEQ ID NO: 102611 - DNA, 24 bp, Artificial sequence
  SiRNA target sequence
tatgttaacatgaatagtagaccc

SEQ ID NO: 102612 - DNA, 24 bp, Artificial sequence
  SiRNA target sequence
atgttaacatgaatagtagaccct

SEQ ID NO: 102613 - DNA, 24 bp, Artificial sequence
  SiRNA target sequence
tgttaacatgaatagtagaccctt

SEQ ID NO: 102614 - DNA, 24 bp, Artificial sequence
  SiRNA target sequence
gttaacatgaatagtagacccttt

SEQ ID NO: 102615 - DNA, 24 bp, Artificial sequence
  SiRNA target sequence
ttaacatgaatagtagacccttta

SEQ ID NO: 102616 - DNA, 24 bp, Artificial sequence
  SiRNA target sequence
taacatgaatagtagaccctttag

SEQ ID NO: 102617 - DNA, 24 bp, Artificial sequence
  SiRNA target sequence
aacatgaatagtagaccctttagt

SEQ ID NO: 102618 - DNA, 24 bp, Artificial sequence
  SiRNA target sequence
acatgaatagtagaccctttagta

SEQ ID NO: 102619 - DNA, 24 bp, Artificial sequence
  SiRNA target sequence
catgaatagtagaccctttagtaa

SEQ ID NO: 102620 - DNA, 24 bp, Artificial sequence
  SiRNA target sequence
atgaatagtagaccctttagtaag

SEQ ID NO: 102621 - DNA, 24 bp, Artificial sequence
  SiRNA target sequence
tgaatagtagaccctttagtaagt

SEQ ID NO: 102622 - DNA, 24 bp, Artificial sequence
  SiRNA target sequence
gaatagtagaccctttagtaagta

SEQ ID NO: 102623 - DNA, 24 bp, Artificial sequence
  SiRNA target sequence
aatagtagaccctttagtaagtaa

SEQ ID NO: 102624 - DNA, 24 bp, Artificial sequence
  SiRNA target sequence
atagtagaccctttagtaagtaat

SEQ ID NO: 102625 - DNA, 24 bp, Artificial sequence
  SiRNA target sequence
tagtagaccctttagtaagtaatt

SEQ ID NO: 102626 - DNA, 24 bp, Artificial sequence
  SiRNA target sequence
agtagaccctttagtaagtaattt

SEQ ID NO: 102627 - DNA, 24 bp, Artificial sequence
  SiRNA target sequence
gtagaccctttagtaagtaatttt

SEQ ID NO: 102628 - DNA, 24 bp, Artificial sequence
  SiRNA target sequence
tagaccctttagtaagtaatttta

SEQ ID NO: 102629 - DNA, 24 bp, Artificial sequence
  SiRNA target sequence
agaccctttagtaagtaattttaa

SEQ ID NO: 102630 - DNA, 24 bp, Artificial sequence
  SiRNA target sequence
gaccctttagtaagtaattttaaa

SEQ ID NO: 102631 - DNA, 24 bp, Artificial sequence
  SiRNA target sequence
accctttagtaagtaattttaaat

SEQ ID NO: 102632 - DNA, 24 bp, Artificial sequence
  SiRNA target sequence
ccctttagtaagtaattttaaata

SEQ ID NO: 102633 - DNA, 24 bp, Artificial sequence
  SiRNA target sequence
cctttagtaagtaattttaaatac

SEQ ID NO: 102634 - DNA, 24 bp, Artificial sequence
  SiRNA target sequence
ctttagtaagtaattttaaatact

SEQ ID NO: 102635 - DNA, 24 bp, Artificial sequence
  SiRNA target sequence
tttagtaagtaattttaaatactc

SEQ ID NO: 102636 - DNA, 24 bp, Artificial sequence
  SiRNA target sequence
ttagtaagtaattttaaatactct

SEQ ID NO: 102637 - DNA, 24 bp, Artificial sequence
  SiRNA target sequence
tagtaagtaattttaaatactctg

SEQ ID NO: 102638 - DNA, 24 bp, Artificial sequence
  SiRNA target sequence
agtaagtaattttaaatactctga

SEQ ID NO: 102639 - DNA, 24 bp, Artificial sequence
  SiRNA target sequence
gtaagtaattttaaatactctgaa

SEQ ID NO: 102640 - DNA, 24 bp, Artificial sequence
  SiRNA target sequence
taagtaattttaaatactctgaac

SEQ ID NO: 102641 - DNA, 24 bp, Artificial sequence
  SiRNA target sequence
aagtaattttaaatactctgaaca

SEQ ID NO: 102642 - DNA, 24 bp, Artificial sequence
  SiRNA target sequence
agtaattttaaatactctgaacaa

SEQ ID NO: 102643 - DNA, 24 bp, Artificial sequence
  SiRNA target sequence
gtaattttaaatactctgaacaaa

SEQ ID NO: 102644 - DNA, 24 bp, Artificial sequence
  SiRNA target sequence
taattttaaatactctgaacaaag

SEQ ID NO: 102645 - DNA, 24 bp, Artificial sequence
  SiRNA target sequence
aattttaaatactctgaacaaaga

SEQ ID NO: 102646 - DNA, 24 bp, Artificial sequence
  SiRNA target sequence
attttaaatactctgaacaaagac

SEQ ID NO: 102647 - DNA, 24 bp, Artificial sequence
  SiRNA target sequence
ttttaaatactctgaacaaagacc

SEQ ID NO: 102648 - DNA, 24 bp, Artificial sequence
  SiRNA target sequence
tttaaatactctgaacaaagacct

SEQ ID NO: 102649 - DNA, 24 bp, Artificial sequence
  SiRNA target sequence
ttaaatactctgaacaaagacctt

SEQ ID NO: 102650 - DNA, 24 bp, Artificial sequence
  SiRNA target sequence
taaatactctgaacaaagaccttt

SEQ ID NO: 102651 - DNA, 24 bp, Artificial sequence
  SiRNA target sequence
aaatactctgaacaaagacctttt

SEQ ID NO: 102652 - DNA, 24 bp, Artificial sequence
  SiRNA target sequence
aatactctgaacaaagaccttttc

SEQ ID NO: 102653 - DNA, 24 bp, Artificial sequence
  SiRNA target sequence
atactctgaacaaagaccttttcg

SEQ ID NO: 102654 - DNA, 24 bp, Artificial sequence
  SiRNA target sequence
tactctgaacaaagaccttttcgt

SEQ ID NO: 102655 - DNA, 24 bp, Artificial sequence
  SiRNA target sequence
actctgaacaaagaccttttcgtt

SEQ ID NO: 102656 - DNA, 24 bp, Artificial sequence
  SiRNA target sequence
ctctgaacaaagaccttttcgttc

SEQ ID NO: 102657 - DNA, 24 bp, Artificial sequence
  SiRNA target sequence
tctgaacaaagaccttttcgttct

SEQ ID NO: 102658 - DNA, 24 bp, Artificial sequence
  SiRNA target sequence
ctgaacaaagaccttttcgttctt

SEQ ID NO: 102659 - DNA, 24 bp, Artificial sequence
  SiRNA target sequence
tgaacaaagaccttttcgttcttc

SEQ ID NO: 102660 - DNA, 24 bp, Artificial sequence
  SiRNA target sequence
gaacaaagaccttttcgttcttct

SEQ ID NO: 102661 - DNA, 24 bp, Artificial sequence
  SiRNA target sequence
aacaaagaccttttcgttcttctt

SEQ ID NO: 102662 - DNA, 24 bp, Artificial sequence
  SiRNA target sequence
acaaagaccttttcgttcttcttt

SEQ ID NO: 102663 - DNA, 24 bp, Artificial sequence
  SiRNA target sequence
caaagaccttttcgttcttctttt

SEQ ID NO: 102664 - DNA, 24 bp, Artificial sequence
  SiRNA target sequence
aaagaccttttcgttcttctttta

SEQ ID NO: 102665 - DNA, 24 bp, Artificial sequence
  SiRNA target sequence
aagaccttttcgttcttcttttaa

SEQ ID NO: 102666 - DNA, 24 bp, Artificial sequence
  SiRNA target sequence
agaccttttcgttcttcttttaaa

SEQ ID NO: 102667 - DNA, 24 bp, Artificial sequence
  SiRNA target sequence
gaccttttcgttcttcttttaaac

SEQ ID NO: 102668 - DNA, 24 bp, Artificial sequence
  SiRNA target sequence
accttttcgttcttcttttaaact

SEQ ID NO: 102669 - DNA, 24 bp, Artificial sequence
  SiRNA target sequence
ccttttcgttcttcttttaaactt

SEQ ID NO: 102670 - DNA, 24 bp, Artificial sequence
  SiRNA target sequence
cttttcgttcttcttttaaacttg

SEQ ID NO: 102671 - DNA, 24 bp, Artificial sequence
  SiRNA target sequence
ttttcgttcttcttttaaacttgt

SEQ ID NO: 102672 - DNA, 24 bp, Artificial sequence
  SiRNA target sequence
tttcgttcttcttttaaacttgtt

SEQ ID NO: 102673 - DNA, 24 bp, Artificial sequence
  SiRNA target sequence
ttcgttcttcttttaaacttgttt

SEQ ID NO: 102674 - DNA, 24 bp, Artificial sequence
  SiRNA target sequence
tcgttcttcttttaaacttgtttt

SEQ ID NO: 102675 - DNA, 24 bp, Artificial sequence
  SiRNA target sequence
cgttcttcttttaaacttgtttta

SEQ ID NO: 102676 - DNA, 24 bp, Artificial sequence
  SiRNA target sequence
gttcttcttttaaacttgttttaa

SEQ ID NO: 102677 - DNA, 24 bp, Artificial sequence
  SiRNA target sequence
ttcttcttttaaacttgttttaaa

SEQ ID NO: 102678 - DNA, 24 bp, Artificial sequence
  SiRNA target sequence
tcttcttttaaacttgttttaaaa

SEQ ID NO: 102679 - DNA, 24 bp, Artificial sequence
  SiRNA target sequence
cttcttttaaacttgttttaaaag

SEQ ID NO: 102680 - DNA, 24 bp, Artificial sequence
  SiRNA target sequence
ttcttttaaacttgttttaaaaga

SEQ ID NO: 102681 - DNA, 24 bp, Artificial sequence
  SiRNA target sequence
tcttttaaacttgttttaaaagaa

SEQ ID NO: 102682 - DNA, 24 bp, Artificial sequence
  SiRNA target sequence
cttttaaacttgttttaaaagaaa

SEQ ID NO: 102683 - DNA, 24 bp, Artificial sequence
  SiRNA target sequence
ttttaaacttgttttaaaagaaac

SEQ ID NO: 102684 - DNA, 24 bp, Artificial sequence
  SiRNA target sequence
tttaaacttgttttaaaagaaaca

SEQ ID NO: 102685 - DNA, 24 bp, Artificial sequence
  SiRNA target sequence
ttaaacttgttttaaaagaaacaa

SEQ ID NO: 102686 - DNA, 24 bp, Artificial sequence
  SiRNA target sequence
taaacttgttttaaaagaaacaag

SEQ ID NO: 102687 - DNA, 24 bp, Artificial sequence
  SiRNA target sequence
aaacttgttttaaaagaaacaaga

SEQ ID NO: 102688 - DNA, 24 bp, Artificial sequence
  SiRNA target sequence
aacttgttttaaaagaaacaagag

SEQ ID NO: 102689 - DNA, 24 bp, Artificial sequence
  SiRNA target sequence
acttgttttaaaagaaacaagaga

SEQ ID NO: 102690 - DNA, 24 bp, Artificial sequence
  SiRNA target sequence
cttgttttaaaagaaacaagagag

SEQ ID NO: 102691 - DNA, 24 bp, Artificial sequence
  SiRNA target sequence
ttgttttaaaagaaacaagagaga

SEQ ID NO: 102692 - DNA, 24 bp, Artificial sequence
  SiRNA target sequence
tgttttaaaagaaacaagagagac

SEQ ID NO: 102693 - DNA, 24 bp, Artificial sequence
  SiRNA target sequence
gttttaaaagaaacaagagagacg

SEQ ID NO: 102694 - DNA, 24 bp, Artificial sequence
  SiRNA target sequence
ttttaaaagaaacaagagagacgg

SEQ ID NO: 102695 - DNA, 24 bp, Artificial sequence
  SiRNA target sequence
tttaaaagaaacaagagagacggt

SEQ ID NO: 102696 - DNA, 24 bp, Artificial sequence
  SiRNA target sequence
ttaaaagaaacaagagagacggtg

SEQ ID NO: 102697 - DNA, 24 bp, Artificial sequence
  SiRNA target sequence
taaaagaaacaagagagacggtga

SEQ ID NO: 102698 - DNA, 24 bp, Artificial sequence
  SiRNA target sequence
aaaagaaacaagagagacggtgac

SEQ ID NO: 102699 - DNA, 24 bp, Artificial sequence
  SiRNA target sequence
aaagaaacaagagagacggtgaca

SEQ ID NO: 102700 - DNA, 24 bp, Artificial sequence
  SiRNA target sequence
aagaaacaagagagacggtgacaa

SEQ ID NO: 102701 - DNA, 24 bp, Artificial sequence
  SiRNA target sequence
agaaacaagagagacggtgacaaa

SEQ ID NO: 102702 - DNA, 24 bp, Artificial sequence
  SiRNA target sequence
gaaacaagagagacggtgacaaag

SEQ ID NO: 102703 - DNA, 24 bp, Artificial sequence
  SiRNA target sequence
aaacaagagagacggtgacaaagt

SEQ ID NO: 102704 - DNA, 24 bp, Artificial sequence
  SiRNA target sequence
aacaagagagacggtgacaaagta

SEQ ID NO: 102705 - DNA, 24 bp, Artificial sequence
  SiRNA target sequence
acaagagagacggtgacaaagtaa

SEQ ID NO: 102706 - DNA, 24 bp, Artificial sequence
  SiRNA target sequence
caagagagacggtgacaaagtaac

SEQ ID NO: 102707 - DNA, 24 bp, Artificial sequence
  SiRNA target sequence
aagagagacggtgacaaagtaaca

SEQ ID NO: 102708 - DNA, 24 bp, Artificial sequence
  SiRNA target sequence
agagagacggtgacaaagtaacaa

SEQ ID NO: 102709 - DNA, 24 bp, Artificial sequence
  SiRNA target sequence
gagagacggtgacaaagtaacaaa

SEQ ID NO: 102710 - DNA, 24 bp, Artificial sequence
  SiRNA target sequence
agagacggtgacaaagtaacaaaa

SEQ ID NO: 102711 - DNA, 24 bp, Artificial sequence
  SiRNA target sequence
gagacggtgacaaagtaacaaaaa

SEQ ID NO: 102712 - DNA, 24 bp, Artificial sequence
  SiRNA target sequence
agacggtgacaaagtaacaaaaat

SEQ ID NO: 102713 - DNA, 24 bp, Artificial sequence
  SiRNA target sequence
gacggtgacaaagtaacaaaaatc

SEQ ID NO: 102714 - DNA, 24 bp, Artificial sequence
  SiRNA target sequence
acggtgacaaagtaacaaaaatct

SEQ ID NO: 102715 - DNA, 24 bp, Artificial sequence
  SiRNA target sequence
cggtgacaaagtaacaaaaatctt

SEQ ID NO: 102716 - DNA, 24 bp, Artificial sequence
  SiRNA target sequence
ggtgacaaagtaacaaaaatcttt

SEQ ID NO: 102717 - DNA, 24 bp, Artificial sequence
  SiRNA target sequence
gtgacaaagtaacaaaaatctttt

SEQ ID NO: 102718 - DNA, 24 bp, Artificial sequence
  SiRNA target sequence
tgacaaagtaacaaaaatcttttt

SEQ ID NO: 102719 - DNA, 24 bp, Artificial sequence
  SiRNA target sequence
gacaaagtaacaaaaatctttttt

SEQ ID NO: 102720 - DNA, 24 bp, Artificial sequence
  SiRNA target sequence
acaaagtaacaaaaatcttttttc

SEQ ID NO: 102721 - DNA, 24 bp, Artificial sequence
  SiRNA target sequence
caaagtaacaaaaatcttttttcg

SEQ ID NO: 102722 - DNA, 24 bp, Artificial sequence
  SiRNA target sequence
aaagtaacaaaaatcttttttcgt

SEQ ID NO: 102723 - DNA, 24 bp, Artificial sequence
  SiRNA target sequence
aagtaacaaaaatcttttttcgtt

SEQ ID NO: 102724 - DNA, 24 bp, Artificial sequence
  SiRNA target sequence
agtaacaaaaatcttttttcgtta

SEQ ID NO: 102725 - DNA, 24 bp, Artificial sequence
  SiRNA target sequence
gtaacaaaaatcttttttcgttaa

SEQ ID NO: 102726 - DNA, 24 bp, Artificial sequence
  SiRNA target sequence
taacaaaaatcttttttcgttaat

SEQ ID NO: 102727 - DNA, 24 bp, Artificial sequence
  SiRNA target sequence
aacaaaaatcttttttcgttaatg

SEQ ID NO: 102728 - DNA, 24 bp, Artificial sequence
  SiRNA target sequence
acaaaaatcttttttcgttaatgt

SEQ ID NO: 102729 - DNA, 24 bp, Artificial sequence
  SiRNA target sequence
caaaaatcttttttcgttaatgta

SEQ ID NO: 102730 - DNA, 24 bp, Artificial sequence
  SiRNA target sequence
aaaaatcttttttcgttaatgtaa

SEQ ID NO: 102731 - DNA, 24 bp, Artificial sequence
  SiRNA target sequence
aaaatcttttttcgttaatgtaaa

SEQ ID NO: 102732 - DNA, 24 bp, Artificial sequence
  SiRNA target sequence
aaatcttttttcgttaatgtaaaa

SEQ ID NO: 102733 - DNA, 24 bp, Artificial sequence
  SiRNA target sequence
aatcttttttcgttaatgtaaaat

SEQ ID NO: 102734 - DNA, 24 bp, Artificial sequence
  SiRNA target sequence
atcttttttcgttaatgtaaaata

SEQ ID NO: 102735 - DNA, 24 bp, Artificial sequence
  SiRNA target sequence
tcttttttcgttaatgtaaaatat

SEQ ID NO: 102736 - DNA, 24 bp, Artificial sequence
  SiRNA target sequence
cttttttcgttaatgtaaaatatc

SEQ ID NO: 102737 - DNA, 24 bp, Artificial sequence
  SiRNA target sequence
ttttttcgttaatgtaaaatatct

SEQ ID NO: 102738 - DNA, 24 bp, Artificial sequence
  SiRNA target sequence
tttttcgttaatgtaaaatatctt

SEQ ID NO: 102739 - DNA, 24 bp, Artificial sequence
  SiRNA target sequence
ttttcgttaatgtaaaatatcttg

SEQ ID NO: 102740 - DNA, 24 bp, Artificial sequence
  SiRNA target sequence
tttcgttaatgtaaaatatcttgg

SEQ ID NO: 102741 - DNA, 24 bp, Artificial sequence
  SiRNA target sequence
ttcgttaatgtaaaatatcttgga

SEQ ID NO: 102742 - DNA, 24 bp, Artificial sequence
  SiRNA target sequence
tcgttaatgtaaaatatcttggat

SEQ ID NO: 102743 - DNA, 24 bp, Artificial sequence
  SiRNA target sequence
cgttaatgtaaaatatcttggatt

SEQ ID NO: 102744 - DNA, 24 bp, Artificial sequence
  SiRNA target sequence
gttaatgtaaaatatcttggatta

SEQ ID NO: 102745 - DNA, 24 bp, Artificial sequence
  SiRNA target sequence
ttaatgtaaaatatcttggattaa

SEQ ID NO: 102746 - DNA, 24 bp, Artificial sequence
  SiRNA target sequence
taatgtaaaatatcttggattaat

SEQ ID NO: 102747 - DNA, 24 bp, Artificial sequence
  SiRNA target sequence
aatgtaaaatatcttggattaatt

SEQ ID NO: 102748 - DNA, 24 bp, Artificial sequence
  SiRNA target sequence
atgtaaaatatcttggattaatta

SEQ ID NO: 102749 - DNA, 24 bp, Artificial sequence
  SiRNA target sequence
tgtaaaatatcttggattaattac

SEQ ID NO: 102750 - DNA, 24 bp, Artificial sequence
  SiRNA target sequence
gtaaaatatcttggattaattaca

SEQ ID NO: 102751 - DNA, 24 bp, Artificial sequence
  SiRNA target sequence
taaaatatcttggattaattacag

SEQ ID NO: 102752 - DNA, 24 bp, Artificial sequence
  SiRNA target sequence
aaaatatcttggattaattacagg

SEQ ID NO: 102753 - DNA, 24 bp, Artificial sequence
  SiRNA target sequence
aaatatcttggattaattacaggg

SEQ ID NO: 102754 - DNA, 24 bp, Artificial sequence
  SiRNA target sequence
aatatcttggattaattacaggga

SEQ ID NO: 102755 - DNA, 24 bp, Artificial sequence
  SiRNA target sequence
atatcttggattaattacagggat

SEQ ID NO: 102756 - DNA, 24 bp, Artificial sequence
  SiRNA target sequence
tatcttggattaattacagggata

SEQ ID NO: 102757 - DNA, 24 bp, Artificial sequence
  SiRNA target sequence
atcttggattaattacagggatat

SEQ ID NO: 102758 - DNA, 24 bp, Artificial sequence
  SiRNA target sequence
tcttggattaattacagggatata

SEQ ID NO: 102759 - DNA, 24 bp, Artificial sequence
  SiRNA target sequence
cttggattaattacagggatatac

SEQ ID NO: 102760 - DNA, 24 bp, Artificial sequence
  SiRNA target sequence
ttggattaattacagggatatact

SEQ ID NO: 102761 - DNA, 24 bp, Artificial sequence
  SiRNA target sequence
tggattaattacagggatatactt

SEQ ID NO: 102762 - DNA, 24 bp, Artificial sequence
  SiRNA target sequence
ggattaattacagggatatacttg

SEQ ID NO: 102763 - DNA, 24 bp, Artificial sequence
  SiRNA target sequence
gattaattacagggatatacttgt

SEQ ID NO: 102764 - DNA, 24 bp, Artificial sequence
  SiRNA target sequence
attaattacagggatatacttgta

SEQ ID NO: 102765 - DNA, 24 bp, Artificial sequence
  SiRNA target sequence
ttaattacagggatatacttgtac

SEQ ID NO: 102766 - DNA, 24 bp, Artificial sequence
  SiRNA target sequence
taattacagggatatacttgtaca

SEQ ID NO: 102767 - DNA, 24 bp, Artificial sequence
  SiRNA target sequence
aattacagggatatacttgtacat

SEQ ID NO: 102768 - DNA, 24 bp, Artificial sequence
  SiRNA target sequence
attacagggatatacttgtacata

SEQ ID NO: 102769 - DNA, 24 bp, Artificial sequence
  SiRNA target sequence
ttacagggatatacttgtacataa

SEQ ID NO: 102770 - DNA, 24 bp, Artificial sequence
  SiRNA target sequence
tacagggatatacttgtacataaa

SEQ ID NO: 102771 - DNA, 24 bp, Artificial sequence
  SiRNA target sequence
acagggatatacttgtacataaaa

SEQ ID NO: 102772 - DNA, 24 bp, Artificial sequence
  SiRNA target sequence
cagggatatacttgtacataaaat

SEQ ID NO: 102773 - DNA, 24 bp, Artificial sequence
  SiRNA target sequence
agggatatacttgtacataaaatt

SEQ ID NO: 102774 - DNA, 24 bp, Artificial sequence
  SiRNA target sequence
gggatatacttgtacataaaattt

SEQ ID NO: 102775 - DNA, 24 bp, Artificial sequence
  SiRNA target sequence
ggatatacttgtacataaaatttg

SEQ ID NO: 102776 - DNA, 24 bp, Artificial sequence
  SiRNA target sequence
gatatacttgtacataaaatttga

SEQ ID NO: 102777 - DNA, 24 bp, Artificial sequence
  SiRNA target sequence
atatacttgtacataaaatttgag

SEQ ID NO: 102778 - DNA, 24 bp, Artificial sequence
  SiRNA target sequence
tatacttgtacataaaatttgagg

SEQ ID NO: 102779 - DNA, 24 bp, Artificial sequence
  SiRNA target sequence
atacttgtacataaaatttgaggt

SEQ ID NO: 102780 - DNA, 24 bp, Artificial sequence
  SiRNA target sequence
tacttgtacataaaatttgaggta

SEQ ID NO: 102781 - DNA, 24 bp, Artificial sequence
  SiRNA target sequence
acttgtacataaaatttgaggtaa

SEQ ID NO: 102782 - DNA, 24 bp, Artificial sequence
  SiRNA target sequence
cttgtacataaaatttgaggtaag

SEQ ID NO: 102783 - DNA, 24 bp, Artificial sequence
  SiRNA target sequence
ttgtacataaaatttgaggtaagt

SEQ ID NO: 102784 - DNA, 24 bp, Artificial sequence
  SiRNA target sequence
tgtacataaaatttgaggtaagtt

SEQ ID NO: 102785 - DNA, 24 bp, Artificial sequence
  SiRNA target sequence
gtacataaaatttgaggtaagttt

SEQ ID NO: 102786 - DNA, 24 bp, Artificial sequence
  SiRNA target sequence
tacataaaatttgaggtaagtttt

SEQ ID NO: 102787 - DNA, 24 bp, Artificial sequence
  SiRNA target sequence
acataaaatttgaggtaagtttta

SEQ ID NO: 102788 - DNA, 24 bp, Artificial sequence
  SiRNA target sequence
cataaaatttgaggtaagttttat

SEQ ID NO: 102789 - DNA, 24 bp, Artificial sequence
  SiRNA target sequence
ataaaatttgaggtaagttttatc

SEQ ID NO: 102790 - DNA, 24 bp, Artificial sequence
  SiRNA target sequence
taaaatttgaggtaagttttatct

SEQ ID NO: 102791 - DNA, 24 bp, Artificial sequence
  SiRNA target sequence
aaaatttgaggtaagttttatctt

SEQ ID NO: 102792 - DNA, 24 bp, Artificial sequence
  SiRNA target sequence
aaatttgaggtaagttttatctta

SEQ ID NO: 102793 - DNA, 24 bp, Artificial sequence
  SiRNA target sequence
aatttgaggtaagttttatcttaa

SEQ ID NO: 102794 - DNA, 24 bp, Artificial sequence
  SiRNA target sequence
atttgaggtaagttttatcttaaa

SEQ ID NO: 102795 - DNA, 24 bp, Artificial sequence
  SiRNA target sequence
tttgaggtaagttttatcttaaaa

SEQ ID NO: 102796 - DNA, 24 bp, Artificial sequence
  SiRNA target sequence
ttgaggtaagttttatcttaaaat

SEQ ID NO: 102797 - DNA, 24 bp, Artificial sequence
  SiRNA target sequence
tgaggtaagttttatcttaaaatc

SEQ ID NO: 102798 - DNA, 24 bp, Artificial sequence
  SiRNA target sequence
gaggtaagttttatcttaaaatct

SEQ ID NO: 102799 - DNA, 24 bp, Artificial sequence
  SiRNA target sequence
aggtaagttttatcttaaaatctt

SEQ ID NO: 102800 - DNA, 24 bp, Artificial sequence
  SiRNA target sequence
ggtaagttttatcttaaaatcttt

SEQ ID NO: 102801 - DNA, 24 bp, Artificial sequence
  SiRNA target sequence
gtaagttttatcttaaaatctttt

SEQ ID NO: 102802 - DNA, 24 bp, Artificial sequence
  SiRNA target sequence
taagttttatcttaaaatctttta

SEQ ID NO: 102803 - DNA, 24 bp, Artificial sequence
  SiRNA target sequence
aagttttatcttaaaatcttttag

SEQ ID NO: 102804 - DNA, 24 bp, Artificial sequence
  SiRNA target sequence
agttttatcttaaaatcttttaga

SEQ ID NO: 102805 - DNA, 24 bp, Artificial sequence
  SiRNA target sequence
gttttatcttaaaatcttttagaa

SEQ ID NO: 102806 - DNA, 24 bp, Artificial sequence
  SiRNA target sequence
ttttatcttaaaatcttttagaac

SEQ ID NO: 102807 - DNA, 24 bp, Artificial sequence
  SiRNA target sequence
tttatcttaaaatcttttagaacc

SEQ ID NO: 102808 - DNA, 24 bp, Artificial sequence
  SiRNA target sequence
ttatcttaaaatcttttagaacct

SEQ ID NO: 102809 - DNA, 24 bp, Artificial sequence
  SiRNA target sequence
tatcttaaaatcttttagaacctc

SEQ ID NO: 102810 - DNA, 24 bp, Artificial sequence
  SiRNA target sequence
atcttaaaatcttttagaacctca

SEQ ID NO: 102811 - DNA, 24 bp, Artificial sequence
  SiRNA target sequence
tcttaaaatcttttagaacctcaa

SEQ ID NO: 102812 - DNA, 24 bp, Artificial sequence
  SiRNA target sequence
cttaaaatcttttagaacctcaaa

SEQ ID NO: 102813 - DNA, 24 bp, Artificial sequence
  SiRNA target sequence
ttaaaatcttttagaacctcaaaa

SEQ ID NO: 102814 - DNA, 24 bp, Artificial sequence
  SiRNA target sequence
taaaatcttttagaacctcaaaaa

SEQ ID NO: 102815 - DNA, 24 bp, Artificial sequence
  SiRNA target sequence
aaaatcttttagaacctcaaaaat

SEQ ID NO: 102816 - DNA, 24 bp, Artificial sequence
  SiRNA target sequence
aaatcttttagaacctcaaaaata

SEQ ID NO: 102817 - DNA, 24 bp, Artificial sequence
  SiRNA target sequence
aatcttttagaacctcaaaaatag

SEQ ID NO: 102818 - DNA, 24 bp, Artificial sequence
  SiRNA target sequence
atcttttagaacctcaaaaatagt

SEQ ID NO: 102819 - DNA, 24 bp, Artificial sequence
  SiRNA target sequence
tcttttagaacctcaaaaatagtg

SEQ ID NO: 102820 - DNA, 24 bp, Artificial sequence
  SiRNA target sequence
cttttagaacctcaaaaatagtgc

SEQ ID NO: 102821 - DNA, 24 bp, Artificial sequence
  SiRNA target sequence
ttttagaacctcaaaaatagtgcg

SEQ ID NO: 102822 - DNA, 24 bp, Artificial sequence
  SiRNA target sequence
tttagaacctcaaaaatagtgcgc

SEQ ID NO: 102823 - DNA, 24 bp, Artificial sequence
  SiRNA target sequence
ttagaacctcaaaaatagtgcgct

SEQ ID NO: 102824 - DNA, 24 bp, Artificial sequence
  SiRNA target sequence
tagaacctcaaaaatagtgcgctt

SEQ ID NO: 102825 - DNA, 24 bp, Artificial sequence
  SiRNA target sequence
agaacctcaaaaatagtgcgcttc

SEQ ID NO: 102826 - DNA, 24 bp, Artificial sequence
  SiRNA target sequence
gaacctcaaaaatagtgcgcttcg

SEQ ID NO: 102827 - DNA, 24 bp, Artificial sequence
  SiRNA target sequence
aacctcaaaaatagtgcgcttcgg

SEQ ID NO: 102828 - DNA, 24 bp, Artificial sequence
  SiRNA target sequence
acctcaaaaatagtgcgcttcggt

SEQ ID NO: 102829 - DNA, 24 bp, Artificial sequence
  SiRNA target sequence
cctcaaaaatagtgcgcttcggta

SEQ ID NO: 102830 - DNA, 24 bp, Artificial sequence
  SiRNA target sequence
ctcaaaaatagtgcgcttcggtag

SEQ ID NO: 102831 - DNA, 24 bp, Artificial sequence
  SiRNA target sequence
tcaaaaatagtgcgcttcggtagt

SEQ ID NO: 102832 - DNA, 24 bp, Artificial sequence
  SiRNA target sequence
caaaaatagtgcgcttcggtagta

SEQ ID NO: 102833 - DNA, 24 bp, Artificial sequence
  SiRNA target sequence
aaaaatagtgcgcttcggtagtaa

SEQ ID NO: 102834 - DNA, 24 bp, Artificial sequence
  SiRNA target sequence
aaaatagtgcgcttcggtagtaaa

SEQ ID NO: 102835 - DNA, 24 bp, Artificial sequence
  SiRNA target sequence
aaatagtgcgcttcggtagtaaaa

SEQ ID NO: 102836 - DNA, 24 bp, Artificial sequence
  SiRNA target sequence
aatagtgcgcttcggtagtaaaat

SEQ ID NO: 102837 - DNA, 24 bp, Artificial sequence
  SiRNA target sequence
atagtgcgcttcggtagtaaaatg

SEQ ID NO: 102838 - DNA, 24 bp, Artificial sequence
  SiRNA target sequence
tagtgcgcttcggtagtaaaatgt

SEQ ID NO: 102839 - DNA, 24 bp, Artificial sequence
  SiRNA target sequence
agtgcgcttcggtagtaaaatgta

SEQ ID NO: 102840 - DNA, 24 bp, Artificial sequence
  SiRNA target sequence
gtgcgcttcggtagtaaaatgtaa

SEQ ID NO: 102841 - DNA, 24 bp, Artificial sequence
  SiRNA target sequence
tgcgcttcggtagtaaaatgtaat

SEQ ID NO: 102842 - DNA, 24 bp, Artificial sequence
  SiRNA target sequence
gcgcttcggtagtaaaatgtaatc

SEQ ID NO: 102843 - DNA, 24 bp, Artificial sequence
  SiRNA target sequence
cgcttcggtagtaaaatgtaatca

SEQ ID NO: 102844 - DNA, 24 bp, Artificial sequence
  SiRNA target sequence
gcttcggtagtaaaatgtaatcat

SEQ ID NO: 102845 - DNA, 24 bp, Artificial sequence
  SiRNA target sequence
cttcggtagtaaaatgtaatcata

SEQ ID NO: 102846 - DNA, 24 bp, Artificial sequence
  SiRNA target sequence
ttcggtagtaaaatgtaatcatag

SEQ ID NO: 102847 - DNA, 24 bp, Artificial sequence
  SiRNA target sequence
tcggtagtaaaatgtaatcatagt

SEQ ID NO: 102848 - DNA, 24 bp, Artificial sequence
  SiRNA target sequence
cggtagtaaaatgtaatcatagta

SEQ ID NO: 102849 - DNA, 24 bp, Artificial sequence
  SiRNA target sequence
ggtagtaaaatgtaatcatagtac

SEQ ID NO: 102850 - DNA, 24 bp, Artificial sequence
  SiRNA target sequence
gtagtaaaatgtaatcatagtaca

SEQ ID NO: 102851 - DNA, 24 bp, Artificial sequence
  SiRNA target sequence
tagtaaaatgtaatcatagtacag

SEQ ID NO: 102852 - DNA, 24 bp, Artificial sequence
  SiRNA target sequence
agtaaaatgtaatcatagtacaga

SEQ ID NO: 102853 - DNA, 24 bp, Artificial sequence
  SiRNA target sequence
gtaaaatgtaatcatagtacagat

SEQ ID NO: 102854 - DNA, 24 bp, Artificial sequence
  SiRNA target sequence
taaaatgtaatcatagtacagatc

SEQ ID NO: 102855 - DNA, 24 bp, Artificial sequence
  SiRNA target sequence
aaaatgtaatcatagtacagatcg

SEQ ID NO: 102856 - DNA, 24 bp, Artificial sequence
  SiRNA target sequence
aaatgtaatcatagtacagatcgt

SEQ ID NO: 102857 - DNA, 24 bp, Artificial sequence
  SiRNA target sequence
aatgtaatcatagtacagatcgta

SEQ ID NO: 102858 - DNA, 24 bp, Artificial sequence
  SiRNA target sequence
atgtaatcatagtacagatcgtaa

SEQ ID NO: 102859 - DNA, 24 bp, Artificial sequence
  SiRNA target sequence
tgtaatcatagtacagatcgtaat

SEQ ID NO: 102860 - DNA, 24 bp, Artificial sequence
  SiRNA target sequence
gtaatcatagtacagatcgtaatt

SEQ ID NO: 102861 - DNA, 24 bp, Artificial sequence
  SiRNA target sequence
taatcatagtacagatcgtaattt

SEQ ID NO: 102862 - DNA, 24 bp, Artificial sequence
  SiRNA target sequence
aatcatagtacagatcgtaattta

SEQ ID NO: 102863 - DNA, 24 bp, Artificial sequence
  SiRNA target sequence
atcatagtacagatcgtaatttag

SEQ ID NO: 102864 - DNA, 24 bp, Artificial sequence
  SiRNA target sequence
tcatagtacagatcgtaatttaga

SEQ ID NO: 102865 - DNA, 24 bp, Artificial sequence
  SiRNA target sequence
catagtacagatcgtaatttagat

SEQ ID NO: 102866 - DNA, 24 bp, Artificial sequence
  SiRNA target sequence
atagtacagatcgtaatttagata

SEQ ID NO: 102867 - DNA, 24 bp, Artificial sequence
  SiRNA target sequence
tagtacagatcgtaatttagataa

SEQ ID NO: 102868 - DNA, 24 bp, Artificial sequence
  SiRNA target sequence
agtacagatcgtaatttagataaa

SEQ ID NO: 102869 - DNA, 24 bp, Artificial sequence
  SiRNA target sequence
gtacagatcgtaatttagataaat

SEQ ID NO: 102870 - DNA, 24 bp, Artificial sequence
  SiRNA target sequence
tacagatcgtaatttagataaatt

SEQ ID NO: 102871 - DNA, 24 bp, Artificial sequence
  SiRNA target sequence
acagatcgtaatttagataaattt

SEQ ID NO: 102872 - DNA, 24 bp, Artificial sequence
  SiRNA target sequence
cagatcgtaatttagataaatttc

SEQ ID NO: 102873 - DNA, 24 bp, Artificial sequence
  SiRNA target sequence
agatcgtaatttagataaatttct

SEQ ID NO: 102874 - DNA, 24 bp, Artificial sequence
  SiRNA target sequence
gatcgtaatttagataaatttctt

SEQ ID NO: 102875 - DNA, 24 bp, Artificial sequence
  SiRNA target sequence
atcgtaatttagataaatttcttt

SEQ ID NO: 102876 - DNA, 24 bp, Artificial sequence
  SiRNA target sequence
tcgtaatttagataaatttcttta

SEQ ID NO: 102877 - DNA, 24 bp, Artificial sequence
  SiRNA target sequence
cgtaatttagataaatttctttac

SEQ ID NO: 102878 - DNA, 24 bp, Artificial sequence
  SiRNA target sequence
gtaatttagataaatttctttaca

SEQ ID NO: 102879 - DNA, 24 bp, Artificial sequence
  SiRNA target sequence
taatttagataaatttctttacat

SEQ ID NO: 102880 - DNA, 24 bp, Artificial sequence
  SiRNA target sequence
aatttagataaatttctttacatt

SEQ ID NO: 102881 - DNA, 24 bp, Artificial sequence
  SiRNA target sequence
atttagataaatttctttacattt

SEQ ID NO: 102882 - DNA, 24 bp, Artificial sequence
  SiRNA target sequence
tttagataaatttctttacatttc

SEQ ID NO: 102883 - DNA, 24 bp, Artificial sequence
  SiRNA target sequence
ttagataaatttctttacatttct

SEQ ID NO: 102884 - DNA, 24 bp, Artificial sequence
  SiRNA target sequence
tagataaatttctttacatttctc

SEQ ID NO: 102885 - DNA, 24 bp, Artificial sequence
  SiRNA target sequence
agataaatttctttacatttctca

SEQ ID NO: 102886 - DNA, 24 bp, Artificial sequence
  SiRNA target sequence
gataaatttctttacatttctcac

SEQ ID NO: 102887 - DNA, 24 bp, Artificial sequence
  SiRNA target sequence
ataaatttctttacatttctcacg

SEQ ID NO: 102888 - DNA, 24 bp, Artificial sequence
  SiRNA target sequence
taaatttctttacatttctcacga

SEQ ID NO: 102889 - DNA, 24 bp, Artificial sequence
  SiRNA target sequence
aaatttctttacatttctcacgat

SEQ ID NO: 102890 - DNA, 24 bp, Artificial sequence
  SiRNA target sequence
aatttctttacatttctcacgata

SEQ ID NO: 102891 - DNA, 24 bp, Artificial sequence
  SiRNA target sequence
atttctttacatttctcacgatat

SEQ ID NO: 102892 - DNA, 24 bp, Artificial sequence
  SiRNA target sequence
tttctttacatttctcacgatatt

SEQ ID NO: 102893 - DNA, 24 bp, Artificial sequence
  SiRNA target sequence
ttctttacatttctcacgatattc

SEQ ID NO: 102894 - DNA, 24 bp, Artificial sequence
  SiRNA target sequence
tctttacatttctcacgatattcc

SEQ ID NO: 102895 - DNA, 24 bp, Artificial sequence
  SiRNA target sequence
ctttacatttctcacgatattcct

SEQ ID NO: 102896 - DNA, 24 bp, Artificial sequence
  SiRNA target sequence
tttacatttctcacgatattcctc

SEQ ID NO: 102897 - DNA, 24 bp, Artificial sequence
  SiRNA target sequence
ttacatttctcacgatattcctca

SEQ ID NO: 102898 - DNA, 24 bp, Artificial sequence
  SiRNA target sequence
tacatttctcacgatattcctcag

SEQ ID NO: 102899 - DNA, 24 bp, Artificial sequence
  SiRNA target sequence
acatttctcacgatattcctcagc

SEQ ID NO: 102900 - DNA, 24 bp, Artificial sequence
  SiRNA target sequence
catttctcacgatattcctcagca

SEQ ID NO: 102901 - DNA, 24 bp, Artificial sequence
  SiRNA target sequence
atttctcacgatattcctcagcaa

SEQ ID NO: 102902 - DNA, 24 bp, Artificial sequence
  SiRNA target sequence
tttctcacgatattcctcagcaat

SEQ ID NO: 102903 - DNA, 24 bp, Artificial sequence
  SiRNA target sequence
ttctcacgatattcctcagcaatg

SEQ ID NO: 102904 - DNA, 24 bp, Artificial sequence
  SiRNA target sequence
tctcacgatattcctcagcaatgg

SEQ ID NO: 102905 - DNA, 24 bp, Artificial sequence
  SiRNA target sequence
ctcacgatattcctcagcaatggt

SEQ ID NO: 102906 - DNA, 24 bp, Artificial sequence
  SiRNA target sequence
tcacgatattcctcagcaatggta

SEQ ID NO: 102907 - DNA, 24 bp, Artificial sequence
  SiRNA target sequence
cacgatattcctcagcaatggtat

SEQ ID NO: 102908 - DNA, 24 bp, Artificial sequence
  SiRNA target sequence
acgatattcctcagcaatggtatc

SEQ ID NO: 102909 - DNA, 24 bp, Artificial sequence
  SiRNA target sequence
cgatattcctcagcaatggtatct

SEQ ID NO: 102910 - DNA, 24 bp, Artificial sequence
  SiRNA target sequence
gatattcctcagcaatggtatctg

SEQ ID NO: 102911 - DNA, 24 bp, Artificial sequence
  SiRNA target sequence
atattcctcagcaatggtatctgt

SEQ ID NO: 102912 - DNA, 24 bp, Artificial sequence
  SiRNA target sequence
tattcctcagcaatggtatctgtg

SEQ ID NO: 102913 - DNA, 24 bp, Artificial sequence
  SiRNA target sequence
attcctcagcaatggtatctgtga

SEQ ID NO: 102914 - DNA, 24 bp, Artificial sequence
  SiRNA target sequence
ttcctcagcaatggtatctgtgat

SEQ ID NO: 102915 - DNA, 24 bp, Artificial sequence
  SiRNA target sequence
tcctcagcaatggtatctgtgata

SEQ ID NO: 102916 - DNA, 24 bp, Artificial sequence
  SiRNA target sequence
cctcagcaatggtatctgtgataa

SEQ ID NO: 102917 - DNA, 24 bp, Artificial sequence
  SiRNA target sequence
ctcagcaatggtatctgtgataag

SEQ ID NO: 102918 - DNA, 24 bp, Artificial sequence
  SiRNA target sequence
tcagcaatggtatctgtgataagc

SEQ ID NO: 102919 - DNA, 24 bp, Artificial sequence
  SiRNA target sequence
cagcaatggtatctgtgataagcg

SEQ ID NO: 102920 - DNA, 24 bp, Artificial sequence
  SiRNA target sequence
agcaatggtatctgtgataagcga

SEQ ID NO: 102921 - DNA, 24 bp, Artificial sequence
  SiRNA target sequence
gcaatggtatctgtgataagcgaa

SEQ ID NO: 102922 - DNA, 24 bp, Artificial sequence
  SiRNA target sequence
caatggtatctgtgataagcgaaa

SEQ ID NO: 102923 - DNA, 24 bp, Artificial sequence
  SiRNA target sequence
aatggtatctgtgataagcgaaag

SEQ ID NO: 102924 - DNA, 24 bp, Artificial sequence
  SiRNA target sequence
atggtatctgtgataagcgaaagt

SEQ ID NO: 102925 - DNA, 24 bp, Artificial sequence
  SiRNA target sequence
tggtatctgtgataagcgaaagtt

SEQ ID NO: 102926 - DNA, 24 bp, Artificial sequence
  SiRNA target sequence
ggtatctgtgataagcgaaagttg

SEQ ID NO: 102927 - DNA, 24 bp, Artificial sequence
  SiRNA target sequence
gtatctgtgataagcgaaagttgt

SEQ ID NO: 102928 - DNA, 24 bp, Artificial sequence
  SiRNA target sequence
tatctgtgataagcgaaagttgta

SEQ ID NO: 102929 - DNA, 24 bp, Artificial sequence
  SiRNA target sequence
atctgtgataagcgaaagttgtag

SEQ ID NO: 102930 - DNA, 24 bp, Artificial sequence
  SiRNA target sequence
tctgtgataagcgaaagttgtaga

SEQ ID NO: 102931 - DNA, 24 bp, Artificial sequence
  SiRNA target sequence
ctgtgataagcgaaagttgtagaa

SEQ ID NO: 102932 - DNA, 24 bp, Artificial sequence
  SiRNA target sequence
tgtgataagcgaaagttgtagaaa

SEQ ID NO: 102933 - DNA, 24 bp, Artificial sequence
  SiRNA target sequence
gtgataagcgaaagttgtagaaaa

SEQ ID NO: 102934 - DNA, 24 bp, Artificial sequence
  SiRNA target sequence
tgataagcgaaagttgtagaaaaa

SEQ ID NO: 102935 - DNA, 24 bp, Artificial sequence
  SiRNA target sequence
gataagcgaaagttgtagaaaaaa

SEQ ID NO: 102936 - DNA, 24 bp, Artificial sequence
  SiRNA target sequence
ataagcgaaagttgtagaaaaaaa

SEQ ID NO: 102937 - DNA, 24 bp, Artificial sequence
  SiRNA target sequence
taagcgaaagttgtagaaaaaaat

SEQ ID NO: 102938 - DNA, 24 bp, Artificial sequence
  SiRNA target sequence
aagcgaaagttgtagaaaaaaata

SEQ ID NO: 102939 - DNA, 24 bp, Artificial sequence
  SiRNA target sequence
agcgaaagttgtagaaaaaaatag

SEQ ID NO: 102940 - DNA, 24 bp, Artificial sequence
  SiRNA target sequence
gcgaaagttgtagaaaaaaataga

SEQ ID NO: 102941 - DNA, 24 bp, Artificial sequence
  SiRNA target sequence
cgaaagttgtagaaaaaaatagat

SEQ ID NO: 102942 - DNA, 24 bp, Artificial sequence
  SiRNA target sequence
gaaagttgtagaaaaaaatagatt

SEQ ID NO: 102943 - DNA, 24 bp, Artificial sequence
  SiRNA target sequence
aaagttgtagaaaaaaatagattt

SEQ ID NO: 102944 - DNA, 24 bp, Artificial sequence
  SiRNA target sequence
aagttgtagaaaaaaatagatttg

SEQ ID NO: 102945 - DNA, 24 bp, Artificial sequence
  SiRNA target sequence
agttgtagaaaaaaatagatttga

SEQ ID NO: 102946 - DNA, 24 bp, Artificial sequence
  SiRNA target sequence
gttgtagaaaaaaatagatttgag

SEQ ID NO: 102947 - DNA, 24 bp, Artificial sequence
  SiRNA target sequence
ttgtagaaaaaaatagatttgagg

SEQ ID NO: 102948 - DNA, 24 bp, Artificial sequence
  SiRNA target sequence
tgtagaaaaaaatagatttgagga

SEQ ID NO: 102949 - DNA, 24 bp, Artificial sequence
  SiRNA target sequence
gtagaaaaaaatagatttgaggaa

SEQ ID NO: 102950 - DNA, 24 bp, Artificial sequence
  SiRNA target sequence
tagaaaaaaatagatttgaggaat

SEQ ID NO: 102951 - DNA, 24 bp, Artificial sequence
  SiRNA target sequence
agaaaaaaatagatttgaggaata

SEQ ID NO: 102952 - DNA, 24 bp, Artificial sequence
  SiRNA target sequence
gaaaaaaatagatttgaggaatag

SEQ ID NO: 102953 - DNA, 24 bp, Artificial sequence
  SiRNA target sequence
aaaaaaatagatttgaggaataga

SEQ ID NO: 102954 - DNA, 24 bp, Artificial sequence
  SiRNA target sequence
aaaaaatagatttgaggaatagaa

SEQ ID NO: 102955 - DNA, 24 bp, Artificial sequence
  SiRNA target sequence
aaaaatagatttgaggaatagaat

SEQ ID NO: 102956 - DNA, 24 bp, Artificial sequence
  SiRNA target sequence
aaaatagatttgaggaatagaatt

SEQ ID NO: 102957 - DNA, 24 bp, Artificial sequence
  SiRNA target sequence
aaatagatttgaggaatagaatta

SEQ ID NO: 102958 - DNA, 24 bp, Artificial sequence
  SiRNA target sequence
aatagatttgaggaatagaattaa

SEQ ID NO: 102959 - DNA, 24 bp, Artificial sequence
  SiRNA target sequence
atagatttgaggaatagaattaaa

SEQ ID NO: 102960 - DNA, 24 bp, Artificial sequence
  SiRNA target sequence
tagatttgaggaatagaattaaaa

SEQ ID NO: 102961 - DNA, 24 bp, Artificial sequence
  SiRNA target sequence
agatttgaggaatagaattaaaat

SEQ ID NO: 102962 - DNA, 24 bp, Artificial sequence
  SiRNA target sequence
gatttgaggaatagaattaaaatc

SEQ ID NO: 102963 - DNA, 24 bp, Artificial sequence
  SiRNA target sequence
atttgaggaatagaattaaaatca

SEQ ID NO: 102964 - DNA, 24 bp, Artificial sequence
  SiRNA target sequence
tttgaggaatagaattaaaatcac

SEQ ID NO: 102965 - DNA, 24 bp, Artificial sequence
  SiRNA target sequence
ttgaggaatagaattaaaatcaca

SEQ ID NO: 102966 - DNA, 24 bp, Artificial sequence
  SiRNA target sequence
tgaggaatagaattaaaatcacaa

SEQ ID NO: 102967 - DNA, 24 bp, Artificial sequence
  SiRNA target sequence
gaggaatagaattaaaatcacaat

SEQ ID NO: 102968 - DNA, 24 bp, Artificial sequence
  SiRNA target sequence
aggaatagaattaaaatcacaata

SEQ ID NO: 102969 - DNA, 24 bp, Artificial sequence
  SiRNA target sequence
ggaatagaattaaaatcacaatat

SEQ ID NO: 102970 - DNA, 24 bp, Artificial sequence
  SiRNA target sequence
gaatagaattaaaatcacaatatt

SEQ ID NO: 102971 - DNA, 24 bp, Artificial sequence
  SiRNA target sequence
aatagaattaaaatcacaatattt

SEQ ID NO: 102972 - DNA, 24 bp, Artificial sequence
  SiRNA target sequence
atagaattaaaatcacaatatttt

SEQ ID NO: 102973 - DNA, 24 bp, Artificial sequence
  SiRNA target sequence
tagaattaaaatcacaatattttt

SEQ ID NO: 102974 - DNA, 24 bp, Artificial sequence
  SiRNA target sequence
agaattaaaatcacaatatttttt

SEQ ID NO: 102975 - DNA, 24 bp, Artificial sequence
  SiRNA target sequence
gaattaaaatcacaatatttttta

SEQ ID NO: 102976 - DNA, 24 bp, Artificial sequence
  SiRNA target sequence
aattaaaatcacaatattttttaa

SEQ ID NO: 102977 - DNA, 24 bp, Artificial sequence
  SiRNA target sequence
attaaaatcacaatattttttaat

SEQ ID NO: 102978 - DNA, 24 bp, Artificial sequence
  SiRNA target sequence
ttaaaatcacaatattttttaata

SEQ ID NO: 102979 - DNA, 24 bp, Artificial sequence
  SiRNA target sequence
taaaatcacaatattttttaatat

SEQ ID NO: 102980 - DNA, 24 bp, Artificial sequence
  SiRNA target sequence
aaaatcacaatattttttaatata

SEQ ID NO: 102981 - DNA, 24 bp, Artificial sequence
  SiRNA target sequence
aaatcacaatattttttaatatat

SEQ ID NO: 102982 - DNA, 24 bp, Artificial sequence
  SiRNA target sequence
aatcacaatattttttaatatatt

SEQ ID NO: 102983 - DNA, 24 bp, Artificial sequence
  SiRNA target sequence
atcacaatattttttaatatattt

SEQ ID NO: 102984 - DNA, 24 bp, Artificial sequence
  SiRNA target sequence
tcacaatattttttaatatattta

SEQ ID NO: 102985 - DNA, 24 bp, Artificial sequence
  SiRNA target sequence
cacaatattttttaatatatttaa

SEQ ID NO: 102986 - DNA, 24 bp, Artificial sequence
  SiRNA target sequence
acaatattttttaatatatttaac

SEQ ID NO: 102987 - DNA, 24 bp, Artificial sequence
  SiRNA target sequence
caatattttttaatatatttaacc

SEQ ID NO: 102988 - DNA, 24 bp, Artificial sequence
  SiRNA target sequence
aatattttttaatatatttaacca

SEQ ID NO: 102989 - DNA, 24 bp, Artificial sequence
  SiRNA target sequence
atattttttaatatatttaaccaa

SEQ ID NO: 102990 - DNA, 24 bp, Artificial sequence
  SiRNA target sequence
tattttttaatatatttaaccaag

SEQ ID NO: 102991 - DNA, 24 bp, Artificial sequence
  SiRNA target sequence
attttttaatatatttaaccaagg

SEQ ID NO: 102992 - DNA, 24 bp, Artificial sequence
  SiRNA target sequence
ttttttaatatatttaaccaaggt

SEQ ID NO: 102993 - DNA, 24 bp, Artificial sequence
  SiRNA target sequence
tttttaatatatttaaccaaggta

SEQ ID NO: 102994 - DNA, 24 bp, Artificial sequence
  SiRNA target sequence
ttttaatatatttaaccaaggtat

SEQ ID NO: 102995 - DNA, 24 bp, Artificial sequence
  SiRNA target sequence
tttaatatatttaaccaaggtatt

SEQ ID NO: 102996 - DNA, 24 bp, Artificial sequence
  SiRNA target sequence
ttaatatatttaaccaaggtattg

SEQ ID NO: 102997 - DNA, 24 bp, Artificial sequence
  SiRNA target sequence
taatatatttaaccaaggtattgt

SEQ ID NO: 102998 - DNA, 24 bp, Artificial sequence
  SiRNA target sequence
aatatatttaaccaaggtattgtc

SEQ ID NO: 102999 - DNA, 24 bp, Artificial sequence
  SiRNA target sequence
atatatttaaccaaggtattgtcc

SEQ ID NO: 103000 - DNA, 24 bp, Artificial sequence
  SiRNA target sequence
tatatttaaccaaggtattgtcct

SEQ ID NO: 103001 - DNA, 24 bp, Artificial sequence
  SiRNA target sequence
atatttaaccaaggtattgtcctt

SEQ ID NO: 103002 - DNA, 24 bp, Artificial sequence
  SiRNA target sequence
tatttaaccaaggtattgtccttt

SEQ ID NO: 103003 - DNA, 24 bp, Artificial sequence
  SiRNA target sequence
atttaaccaaggtattgtccttta

SEQ ID NO: 103004 - DNA, 24 bp, Artificial sequence
  SiRNA target sequence
tttaaccaaggtattgtcctttat

SEQ ID NO: 103005 - DNA, 24 bp, Artificial sequence
  SiRNA target sequence
ttaaccaaggtattgtcctttatg

SEQ ID NO: 103006 - DNA, 24 bp, Artificial sequence
  SiRNA target sequence
taaccaaggtattgtcctttatgt

SEQ ID NO: 103007 - DNA, 24 bp, Artificial sequence
  SiRNA target sequence
aaccaaggtattgtcctttatgtt

SEQ ID NO: 103008 - DNA, 24 bp, Artificial sequence
  SiRNA target sequence
accaaggtattgtcctttatgtta

SEQ ID NO: 103009 - DNA, 24 bp, Artificial sequence
  SiRNA target sequence
ccaaggtattgtcctttatgttat

SEQ ID NO: 103010 - DNA, 24 bp, Artificial sequence
  SiRNA target sequence
caaggtattgtcctttatgttatt

SEQ ID NO: 103011 - DNA, 24 bp, Artificial sequence
  SiRNA target sequence
aaggtattgtcctttatgttatta

SEQ ID NO: 103012 - DNA, 24 bp, Artificial sequence
  SiRNA target sequence
aggtattgtcctttatgttattat

SEQ ID NO: 103013 - DNA, 24 bp, Artificial sequence
  SiRNA target sequence
ggtattgtcctttatgttattata

SEQ ID NO: 103014 - DNA, 24 bp, Artificial sequence
  SiRNA target sequence
gtattgtcctttatgttattatat

SEQ ID NO: 103015 - DNA, 24 bp, Artificial sequence
  SiRNA target sequence
tattgtcctttatgttattatatc

SEQ ID NO: 103016 - DNA, 24 bp, Artificial sequence
  SiRNA target sequence
attgtcctttatgttattatatct

SEQ ID NO: 103017 - DNA, 24 bp, Artificial sequence
  SiRNA target sequence
ttgtcctttatgttattatatctt

SEQ ID NO: 103018 - DNA, 24 bp, Artificial sequence
  SiRNA target sequence
tgtcctttatgttattatatctta

SEQ ID NO: 103019 - DNA, 24 bp, Artificial sequence
  SiRNA target sequence
gtcctttatgttattatatcttac

SEQ ID NO: 103020 - DNA, 24 bp, Artificial sequence
  SiRNA target sequence
tcctttatgttattatatcttaca

SEQ ID NO: 103021 - DNA, 24 bp, Artificial sequence
  SiRNA target sequence
cctttatgttattatatcttacaa

SEQ ID NO: 103022 - DNA, 24 bp, Artificial sequence
  SiRNA target sequence
ctttatgttattatatcttacaaa

SEQ ID NO: 103023 - DNA, 24 bp, Artificial sequence
  SiRNA target sequence
tttatgttattatatcttacaaac

SEQ ID NO: 103024 - DNA, 24 bp, Artificial sequence
  SiRNA target sequence
ttatgttattatatcttacaaact

SEQ ID NO: 103025 - DNA, 24 bp, Artificial sequence
  SiRNA target sequence
tatgttattatatcttacaaactc

SEQ ID NO: 103026 - DNA, 24 bp, Artificial sequence
  SiRNA target sequence
atgttattatatcttacaaactcc

SEQ ID NO: 103027 - DNA, 24 bp, Artificial sequence
  SiRNA target sequence
tgttattatatcttacaaactcct

SEQ ID NO: 103028 - DNA, 24 bp, Artificial sequence
  SiRNA target sequence
gttattatatcttacaaactcctc

SEQ ID NO: 103029 - DNA, 24 bp, Artificial sequence
  SiRNA target sequence
ttattatatcttacaaactcctcg

SEQ ID NO: 103030 - DNA, 24 bp, Artificial sequence
  SiRNA target sequence
tattatatcttacaaactcctcgt

SEQ ID NO: 103031 - DNA, 24 bp, Artificial sequence
  SiRNA target sequence
attatatcttacaaactcctcgta

SEQ ID NO: 103032 - DNA, 24 bp, Artificial sequence
  SiRNA target sequence
ttatatcttacaaactcctcgtaa

SEQ ID NO: 103033 - DNA, 24 bp, Artificial sequence
  SiRNA target sequence
tatatcttacaaactcctcgtaat

SEQ ID NO: 103034 - DNA, 24 bp, Artificial sequence
  SiRNA target sequence
atatcttacaaactcctcgtaatt

SEQ ID NO: 103035 - DNA, 24 bp, Artificial sequence
  SiRNA target sequence
tatcttacaaactcctcgtaatta

SEQ ID NO: 103036 - DNA, 24 bp, Artificial sequence
  SiRNA target sequence
atcttacaaactcctcgtaattat

SEQ ID NO: 103037 - DNA, 24 bp, Artificial sequence
  SiRNA target sequence
tcttacaaactcctcgtaattata

SEQ ID NO: 103038 - DNA, 24 bp, Artificial sequence
  SiRNA target sequence
cttacaaactcctcgtaattataa

SEQ ID NO: 103039 - DNA, 24 bp, Artificial sequence
  SiRNA target sequence
ttacaaactcctcgtaattataat

SEQ ID NO: 103040 - DNA, 24 bp, Artificial sequence
  SiRNA target sequence
tacaaactcctcgtaattataatt

SEQ ID NO: 103041 - DNA, 24 bp, Artificial sequence
  SiRNA target sequence
acaaactcctcgtaattataattt

SEQ ID NO: 103042 - DNA, 24 bp, Artificial sequence
  SiRNA target sequence
caaactcctcgtaattataatttt

SEQ ID NO: 103043 - DNA, 24 bp, Artificial sequence
  SiRNA target sequence
aaactcctcgtaattataattttc

SEQ ID NO: 103044 - DNA, 24 bp, Artificial sequence
  SiRNA target sequence
aactcctcgtaattataattttca

SEQ ID NO: 103045 - DNA, 24 bp, Artificial sequence
  SiRNA target sequence
actcctcgtaattataattttcag

SEQ ID NO: 103046 - DNA, 24 bp, Artificial sequence
  SiRNA target sequence
ctcctcgtaattataattttcagg

SEQ ID NO: 103047 - DNA, 24 bp, Artificial sequence
  SiRNA target sequence
tcctcgtaattataattttcagga

SEQ ID NO: 103048 - DNA, 24 bp, Artificial sequence
  SiRNA target sequence
cctcgtaattataattttcaggat

SEQ ID NO: 103049 - DNA, 24 bp, Artificial sequence
  SiRNA target sequence
ctcgtaattataattttcaggata

SEQ ID NO: 103050 - DNA, 24 bp, Artificial sequence
  SiRNA target sequence
tcgtaattataattttcaggataa

SEQ ID NO: 103051 - DNA, 24 bp, Artificial sequence
  SiRNA target sequence
cgtaattataattttcaggataaa

SEQ ID NO: 103052 - DNA, 24 bp, Artificial sequence
  SiRNA target sequence
gtaattataattttcaggataaac

SEQ ID NO: 103053 - DNA, 24 bp, Artificial sequence
  SiRNA target sequence
taattataattttcaggataaacc

SEQ ID NO: 103054 - DNA, 24 bp, Artificial sequence
  SiRNA target sequence
aattataattttcaggataaaccg

SEQ ID NO: 103055 - DNA, 24 bp, Artificial sequence
  SiRNA target sequence
attataattttcaggataaaccgc

SEQ ID NO: 103056 - DNA, 24 bp, Artificial sequence
  SiRNA target sequence
ttataattttcaggataaaccgct

SEQ ID NO: 103057 - DNA, 24 bp, Artificial sequence
  SiRNA target sequence
tataattttcaggataaaccgcta

SEQ ID NO: 103058 - DNA, 24 bp, Artificial sequence
  SiRNA target sequence
ataattttcaggataaaccgctag

SEQ ID NO: 103059 - DNA, 24 bp, Artificial sequence
  SiRNA target sequence
taattttcaggataaaccgctaga

SEQ ID NO: 103060 - DNA, 24 bp, Artificial sequence
  SiRNA target sequence
aattttcaggataaaccgctagac

SEQ ID NO: 103061 - DNA, 24 bp, Artificial sequence
  SiRNA target sequence
attttcaggataaaccgctagaca

SEQ ID NO: 103062 - DNA, 24 bp, Artificial sequence
  SiRNA target sequence
ttttcaggataaaccgctagacaa

SEQ ID NO: 103063 - DNA, 24 bp, Artificial sequence
  SiRNA target sequence
tttcaggataaaccgctagacaat

SEQ ID NO: 103064 - DNA, 24 bp, Artificial sequence
  SiRNA target sequence
ttcaggataaaccgctagacaatc

SEQ ID NO: 103065 - DNA, 24 bp, Artificial sequence
  SiRNA target sequence
tcaggataaaccgctagacaatca

SEQ ID NO: 103066 - DNA, 24 bp, Artificial sequence
  SiRNA target sequence
caggataaaccgctagacaatcac

SEQ ID NO: 103067 - DNA, 24 bp, Artificial sequence
  SiRNA target sequence
aggataaaccgctagacaatcacc

SEQ ID NO: 103068 - DNA, 24 bp, Artificial sequence
  SiRNA target sequence
ggataaaccgctagacaatcaccg

SEQ ID NO: 103069 - DNA, 24 bp, Artificial sequence
  SiRNA target sequence
gataaaccgctagacaatcaccga

SEQ ID NO: 103070 - DNA, 24 bp, Artificial sequence
  SiRNA target sequence
ataaaccgctagacaatcaccgat

SEQ ID NO: 103071 - DNA, 24 bp, Artificial sequence
  SiRNA target sequence
taaaccgctagacaatcaccgatt

SEQ ID NO: 103072 - DNA, 24 bp, Artificial sequence
  SiRNA target sequence
aaaccgctagacaatcaccgattt

SEQ ID NO: 103073 - DNA, 24 bp, Artificial sequence
  SiRNA target sequence
aaccgctagacaatcaccgatttc

SEQ ID NO: 103074 - DNA, 24 bp, Artificial sequence
  SiRNA target sequence
accgctagacaatcaccgatttca

SEQ ID NO: 103075 - DNA, 24 bp, Artificial sequence
  SiRNA target sequence
ccgctagacaatcaccgatttcaa

SEQ ID NO: 103076 - DNA, 24 bp, Artificial sequence
  SiRNA target sequence
cgctagacaatcaccgatttcaaa

SEQ ID NO: 103077 - DNA, 24 bp, Artificial sequence
  SiRNA target sequence
gctagacaatcaccgatttcaaaa

SEQ ID NO: 103078 - DNA, 24 bp, Artificial sequence
  SiRNA target sequence
ctagacaatcaccgatttcaaaat

SEQ ID NO: 103079 - DNA, 24 bp, Artificial sequence
  SiRNA target sequence
tagacaatcaccgatttcaaaatt

SEQ ID NO: 103080 - DNA, 24 bp, Artificial sequence
  SiRNA target sequence
agacaatcaccgatttcaaaattt

SEQ ID NO: 103081 - DNA, 24 bp, Artificial sequence
  SiRNA target sequence
gacaatcaccgatttcaaaatttt

SEQ ID NO: 103082 - DNA, 24 bp, Artificial sequence
  SiRNA target sequence
acaatcaccgatttcaaaattttc

SEQ ID NO: 103083 - DNA, 24 bp, Artificial sequence
  SiRNA target sequence
caatcaccgatttcaaaattttct

SEQ ID NO: 103084 - DNA, 24 bp, Artificial sequence
  SiRNA target sequence
aatcaccgatttcaaaattttcta

SEQ ID NO: 103085 - DNA, 24 bp, Artificial sequence
  SiRNA target sequence
atcaccgatttcaaaattttctat

SEQ ID NO: 103086 - DNA, 24 bp, Artificial sequence
  SiRNA target sequence
tcaccgatttcaaaattttctata

SEQ ID NO: 103087 - DNA, 24 bp, Artificial sequence
  SiRNA target sequence
caccgatttcaaaattttctatat

SEQ ID NO: 103088 - DNA, 24 bp, Artificial sequence
  SiRNA target sequence
accgatttcaaaattttctatatc

SEQ ID NO: 103089 - DNA, 24 bp, Artificial sequence
  SiRNA target sequence
ccgatttcaaaattttctatatct

SEQ ID NO: 103090 - DNA, 24 bp, Artificial sequence
  SiRNA target sequence
cgatttcaaaattttctatatcta

SEQ ID NO: 103091 - DNA, 24 bp, Artificial sequence
  SiRNA target sequence
gatttcaaaattttctatatctat

SEQ ID NO: 103092 - DNA, 24 bp, Artificial sequence
  SiRNA target sequence
atttcaaaattttctatatctata

SEQ ID NO: 103093 - DNA, 24 bp, Artificial sequence
  SiRNA target sequence
tttcaaaattttctatatctatat

SEQ ID NO: 103094 - DNA, 24 bp, Artificial sequence
  SiRNA target sequence
ttcaaaattttctatatctatatc

SEQ ID NO: 103095 - DNA, 24 bp, Artificial sequence
  SiRNA target sequence
tcaaaattttctatatctatatca

SEQ ID NO: 103096 - DNA, 24 bp, Artificial sequence
  SiRNA target sequence
caaaattttctatatctatatcaa

SEQ ID NO: 103097 - DNA, 24 bp, Artificial sequence
  SiRNA target sequence
aaaattttctatatctatatcaaa

SEQ ID NO: 103098 - DNA, 24 bp, Artificial sequence
  SiRNA target sequence
aaattttctatatctatatcaaat

SEQ ID NO: 103099 - DNA, 24 bp, Artificial sequence
  SiRNA target sequence
aattttctatatctatatcaaatt

SEQ ID NO: 103100 - DNA, 24 bp, Artificial sequence
  SiRNA target sequence
attttctatatctatatcaaattt

SEQ ID NO: 103101 - DNA, 24 bp, Artificial sequence
  SiRNA target sequence
ttttctatatctatatcaaatttt

SEQ ID NO: 103102 - DNA, 24 bp, Artificial sequence
  SiRNA target sequence
tttctatatctatatcaaatttta

SEQ ID NO: 103103 - DNA, 24 bp, Artificial sequence
  SiRNA target sequence
ttctatatctatatcaaattttat

SEQ ID NO: 103104 - DNA, 24 bp, Artificial sequence
  SiRNA target sequence
tctatatctatatcaaattttatt

SEQ ID NO: 103105 - DNA, 24 bp, Artificial sequence
  SiRNA target sequence
ctatatctatatcaaattttattt

SEQ ID NO: 103106 - DNA, 24 bp, Artificial sequence
  SiRNA target sequence
tatatctatatcaaattttatttc

SEQ ID NO: 103107 - DNA, 24 bp, Artificial sequence
  SiRNA target sequence
atatctatatcaaattttatttct

SEQ ID NO: 103108 - DNA, 24 bp, Artificial sequence
  SiRNA target sequence
tatctatatcaaattttatttcta

SEQ ID NO: 103109 - DNA, 24 bp, Artificial sequence
  SiRNA target sequence
atctatatcaaattttatttctaa

SEQ ID NO: 103110 - DNA, 24 bp, Artificial sequence
  SiRNA target sequence
tctatatcaaattttatttctaaa

SEQ ID NO: 103111 - DNA, 24 bp, Artificial sequence
  SiRNA target sequence
ctatatcaaattttatttctaaaa

SEQ ID NO: 103112 - DNA, 24 bp, Artificial sequence
  SiRNA target sequence
tatatcaaattttatttctaaaat

SEQ ID NO: 103113 - DNA, 24 bp, Artificial sequence
  SiRNA target sequence
atatcaaattttatttctaaaata

SEQ ID NO: 103114 - DNA, 24 bp, Artificial sequence
  SiRNA target sequence
tatcaaattttatttctaaaatag

SEQ ID NO: 103115 - DNA, 24 bp, Artificial sequence
  SiRNA target sequence
atcaaattttatttctaaaatagg

SEQ ID NO: 103116 - DNA, 24 bp, Artificial sequence
  SiRNA target sequence
tcaaattttatttctaaaatagga

SEQ ID NO: 103117 - DNA, 24 bp, Artificial sequence
  SiRNA target sequence
caaattttatttctaaaataggat

SEQ ID NO: 103118 - DNA, 24 bp, Artificial sequence
  SiRNA target sequence
aaattttatttctaaaataggata

SEQ ID NO: 103119 - DNA, 24 bp, Artificial sequence
  SiRNA target sequence
aattttatttctaaaataggataa

SEQ ID NO: 103120 - DNA, 24 bp, Artificial sequence
  SiRNA target sequence
attttatttctaaaataggataaa

SEQ ID NO: 103121 - DNA, 24 bp, Artificial sequence
  SiRNA target sequence
ttttatttctaaaataggataaat

SEQ ID NO: 103122 - DNA, 24 bp, Artificial sequence
  SiRNA target sequence
tttatttctaaaataggataaatg

SEQ ID NO: 103123 - DNA, 24 bp, Artificial sequence
  SiRNA target sequence
ttatttctaaaataggataaatgt

SEQ ID NO: 103124 - DNA, 24 bp, Artificial sequence
  SiRNA target sequence
tatttctaaaataggataaatgta

SEQ ID NO: 103125 - DNA, 24 bp, Artificial sequence
  SiRNA target sequence
atttctaaaataggataaatgtaa

SEQ ID NO: 103126 - DNA, 24 bp, Artificial sequence
  SiRNA target sequence
tttctaaaataggataaatgtaat

SEQ ID NO: 103127 - DNA, 24 bp, Artificial sequence
  SiRNA target sequence
ttctaaaataggataaatgtaatt

SEQ ID NO: 103128 - DNA, 24 bp, Artificial sequence
  SiRNA target sequence
tctaaaataggataaatgtaattg

SEQ ID NO: 103129 - DNA, 24 bp, Artificial sequence
  SiRNA target sequence
ctaaaataggataaatgtaattgt

SEQ ID NO: 103130 - DNA, 24 bp, Artificial sequence
  SiRNA target sequence
taaaataggataaatgtaattgta

SEQ ID NO: 103131 - DNA, 24 bp, Artificial sequence
  SiRNA target sequence
aaaataggataaatgtaattgtaa

SEQ ID NO: 103132 - DNA, 24 bp, Artificial sequence
  SiRNA target sequence
aaataggataaatgtaattgtaag

SEQ ID NO: 103133 - DNA, 24 bp, Artificial sequence
  SiRNA target sequence
aataggataaatgtaattgtaagg

SEQ ID NO: 103134 - DNA, 24 bp, Artificial sequence
  SiRNA target sequence
ataggataaatgtaattgtaaggt

SEQ ID NO: 103135 - DNA, 24 bp, Artificial sequence
  SiRNA target sequence
taggataaatgtaattgtaaggtg

SEQ ID NO: 103136 - DNA, 24 bp, Artificial sequence
  SiRNA target sequence
aggataaatgtaattgtaaggtgt

SEQ ID NO: 103137 - DNA, 24 bp, Artificial sequence
  SiRNA target sequence
ggataaatgtaattgtaaggtgtt

SEQ ID NO: 103138 - DNA, 24 bp, Artificial sequence
  SiRNA target sequence
gataaatgtaattgtaaggtgtta

SEQ ID NO: 103139 - DNA, 24 bp, Artificial sequence
  SiRNA target sequence
ataaatgtaattgtaaggtgttaa

SEQ ID NO: 103140 - DNA, 24 bp, Artificial sequence
  SiRNA target sequence
taaatgtaattgtaaggtgttaat

SEQ ID NO: 103141 - DNA, 24 bp, Artificial sequence
  SiRNA target sequence
aaatgtaattgtaaggtgttaata

SEQ ID NO: 103142 - DNA, 24 bp, Artificial sequence
  SiRNA target sequence
aatgtaattgtaaggtgttaatat

SEQ ID NO: 103143 - DNA, 24 bp, Artificial sequence
  SiRNA target sequence
atgtaattgtaaggtgttaatatc

SEQ ID NO: 103144 - DNA, 24 bp, Artificial sequence
  SiRNA target sequence
tgtaattgtaaggtgttaatatct

SEQ ID NO: 103145 - DNA, 24 bp, Artificial sequence
  SiRNA target sequence
gtaattgtaaggtgttaatatctt

SEQ ID NO: 103146 - DNA, 24 bp, Artificial sequence
  SiRNA target sequence
taattgtaaggtgttaatatctta

SEQ ID NO: 103147 - DNA, 24 bp, Artificial sequence
  SiRNA target sequence
aattgtaaggtgttaatatcttaa

SEQ ID NO: 103148 - DNA, 24 bp, Artificial sequence
  SiRNA target sequence
attgtaaggtgttaatatcttaat

SEQ ID NO: 103149 - DNA, 24 bp, Artificial sequence
  SiRNA target sequence
ttgtaaggtgttaatatcttaata

SEQ ID NO: 103150 - DNA, 24 bp, Artificial sequence
  SiRNA target sequence
tgtaaggtgttaatatcttaatat

SEQ ID NO: 103151 - DNA, 24 bp, Artificial sequence
  SiRNA target sequence
gtaaggtgttaatatcttaatatc

SEQ ID NO: 103152 - DNA, 24 bp, Artificial sequence
  SiRNA target sequence
taaggtgttaatatcttaatatca

SEQ ID NO: 103153 - DNA, 24 bp, Artificial sequence
  SiRNA target sequence
aaggtgttaatatcttaatatcat

SEQ ID NO: 103154 - DNA, 24 bp, Artificial sequence
  SiRNA target sequence
aggtgttaatatcttaatatcatt

SEQ ID NO: 103155 - DNA, 24 bp, Artificial sequence
  SiRNA target sequence
ggtgttaatatcttaatatcattt

SEQ ID NO: 103156 - DNA, 24 bp, Artificial sequence
  SiRNA target sequence
gtgttaatatcttaatatcattta

SEQ ID NO: 103157 - DNA, 24 bp, Artificial sequence
  SiRNA target sequence
tgttaatatcttaatatcatttat

SEQ ID NO: 103158 - DNA, 24 bp, Artificial sequence
  SiRNA target sequence
gttaatatcttaatatcatttatt

SEQ ID NO: 103159 - DNA, 24 bp, Artificial sequence
  SiRNA target sequence
ttaatatcttaatatcatttattg

SEQ ID NO: 103160 - DNA, 24 bp, Artificial sequence
  SiRNA target sequence
taatatcttaatatcatttattga

SEQ ID NO: 103161 - DNA, 24 bp, Artificial sequence
  SiRNA target sequence
aatatcttaatatcatttattgac

SEQ ID NO: 103162 - DNA, 24 bp, Artificial sequence
  SiRNA target sequence
atatcttaatatcatttattgacg

SEQ ID NO: 103163 - DNA, 24 bp, Artificial sequence
  SiRNA target sequence
tatcttaatatcatttattgacgc

SEQ ID NO: 103164 - DNA, 24 bp, Artificial sequence
  SiRNA target sequence
atcttaatatcatttattgacgca

SEQ ID NO: 103165 - DNA, 24 bp, Artificial sequence
  SiRNA target sequence
tcttaatatcatttattgacgcac

SEQ ID NO: 103166 - DNA, 24 bp, Artificial sequence
  SiRNA target sequence
cttaatatcatttattgacgcact

SEQ ID NO: 103167 - DNA, 24 bp, Artificial sequence
  SiRNA target sequence
ttaatatcatttattgacgcactg

SEQ ID NO: 103168 - DNA, 24 bp, Artificial sequence
  SiRNA target sequence
taatatcatttattgacgcactgt

SEQ ID NO: 103169 - DNA, 24 bp, Artificial sequence
  SiRNA target sequence
aatatcatttattgacgcactgta

SEQ ID NO: 103170 - DNA, 24 bp, Artificial sequence
  SiRNA target sequence
atatcatttattgacgcactgtat

SEQ ID NO: 103171 - DNA, 24 bp, Artificial sequence
  SiRNA target sequence
tatcatttattgacgcactgtata

SEQ ID NO: 103172 - DNA, 24 bp, Artificial sequence
  SiRNA target sequence
atcatttattgacgcactgtataa

SEQ ID NO: 103173 - DNA, 24 bp, Artificial sequence
  SiRNA target sequence
tcatttattgacgcactgtataaa

SEQ ID NO: 103174 - DNA, 24 bp, Artificial sequence
  SiRNA target sequence
catttattgacgcactgtataaat

SEQ ID NO: 103175 - DNA, 24 bp, Artificial sequence
  SiRNA target sequence
atttattgacgcactgtataaatc

SEQ ID NO: 103176 - DNA, 24 bp, Artificial sequence
  SiRNA target sequence
tttattgacgcactgtataaatca

SEQ ID NO: 103177 - DNA, 24 bp, Artificial sequence
  SiRNA target sequence
ttattgacgcactgtataaatcat

SEQ ID NO: 103178 - DNA, 24 bp, Artificial sequence
  SiRNA target sequence
tattgacgcactgtataaatcatt

SEQ ID NO: 103179 - DNA, 24 bp, Artificial sequence
  SiRNA target sequence
attgacgcactgtataaatcattt

SEQ ID NO: 103180 - DNA, 24 bp, Artificial sequence
  SiRNA target sequence
ttgacgcactgtataaatcatttt

SEQ ID NO: 103181 - DNA, 24 bp, Artificial sequence
  SiRNA target sequence
tgacgcactgtataaatcattttt

SEQ ID NO: 103182 - DNA, 24 bp, Artificial sequence
  SiRNA target sequence
gacgcactgtataaatcattttta

SEQ ID NO: 103183 - DNA, 24 bp, Artificial sequence
  SiRNA target sequence
acgcactgtataaatcatttttac

SEQ ID NO: 103184 - DNA, 24 bp, Artificial sequence
  SiRNA target sequence
cgcactgtataaatcatttttaca

SEQ ID NO: 103185 - DNA, 24 bp, Artificial sequence
  SiRNA target sequence
gcactgtataaatcatttttacaa

SEQ ID NO: 103186 - DNA, 24 bp, Artificial sequence
  SiRNA target sequence
cactgtataaatcatttttacaac

SEQ ID NO: 103187 - DNA, 24 bp, Artificial sequence
  SiRNA target sequence
actgtataaatcatttttacaact

SEQ ID NO: 103188 - DNA, 24 bp, Artificial sequence
  SiRNA target sequence
ctgtataaatcatttttacaactt

SEQ ID NO: 103189 - DNA, 24 bp, Artificial sequence
  SiRNA target sequence
tgtataaatcatttttacaacttg

SEQ ID NO: 103190 - DNA, 24 bp, Artificial sequence
  SiRNA target sequence
gtataaatcatttttacaacttgc

SEQ ID NO: 103191 - DNA, 24 bp, Artificial sequence
  SiRNA target sequence
tataaatcatttttacaacttgca

SEQ ID NO: 103192 - DNA, 24 bp, Artificial sequence
  SiRNA target sequence
ataaatcatttttacaacttgcaa

SEQ ID NO: 103193 - DNA, 24 bp, Artificial sequence
  SiRNA target sequence
taaatcatttttacaacttgcaaa

SEQ ID NO: 103194 - DNA, 24 bp, Artificial sequence
  SiRNA target sequence
aaatcatttttacaacttgcaaaa

SEQ ID NO: 103195 - DNA, 24 bp, Artificial sequence
  SiRNA target sequence
aatcatttttacaacttgcaaaat

SEQ ID NO: 103196 - DNA, 24 bp, Artificial sequence
  SiRNA target sequence
atcatttttacaacttgcaaaatt

SEQ ID NO: 103197 - DNA, 24 bp, Artificial sequence
  SiRNA target sequence
tcatttttacaacttgcaaaattt

SEQ ID NO: 103198 - DNA, 24 bp, Artificial sequence
  SiRNA target sequence
catttttacaacttgcaaaatttt

SEQ ID NO: 103199 - DNA, 24 bp, Artificial sequence
  SiRNA target sequence
atttttacaacttgcaaaattttt

SEQ ID NO: 103200 - DNA, 24 bp, Artificial sequence
  SiRNA target sequence
tttttacaacttgcaaaattttta

SEQ ID NO: 103201 - DNA, 24 bp, Artificial sequence
  SiRNA target sequence
ttttacaacttgcaaaatttttag

SEQ ID NO: 103202 - DNA, 24 bp, Artificial sequence
  SiRNA target sequence
tttacaacttgcaaaatttttagc

SEQ ID NO: 103203 - DNA, 24 bp, Artificial sequence
  SiRNA target sequence
ttacaacttgcaaaatttttagca

SEQ ID NO: 103204 - DNA, 24 bp, Artificial sequence
  SiRNA target sequence
tacaacttgcaaaatttttagcat

SEQ ID NO: 103205 - DNA, 24 bp, Artificial sequence
  SiRNA target sequence
acaacttgcaaaatttttagcatt

SEQ ID NO: 103206 - DNA, 24 bp, Artificial sequence
  SiRNA target sequence
caacttgcaaaatttttagcattt

SEQ ID NO: 103207 - DNA, 24 bp, Artificial sequence
  SiRNA target sequence
aacttgcaaaatttttagcatttt

SEQ ID NO: 103208 - DNA, 24 bp, Artificial sequence
  SiRNA target sequence
acttgcaaaatttttagcattttg

SEQ ID NO: 103209 - DNA, 24 bp, Artificial sequence
  SiRNA target sequence
cttgcaaaatttttagcattttgt

SEQ ID NO: 103210 - DNA, 24 bp, Artificial sequence
  SiRNA target sequence
ttgcaaaatttttagcattttgta

SEQ ID NO: 103211 - DNA, 24 bp, Artificial sequence
  SiRNA target sequence
tgcaaaatttttagcattttgtag

SEQ ID NO: 103212 - DNA, 24 bp, Artificial sequence
  SiRNA target sequence
gcaaaatttttagcattttgtagt

SEQ ID NO: 103213 - DNA, 24 bp, Artificial sequence
  SiRNA target sequence
caaaatttttagcattttgtagtt

SEQ ID NO: 103214 - DNA, 24 bp, Artificial sequence
  SiRNA target sequence
aaaatttttagcattttgtagttt

SEQ ID NO: 103215 - DNA, 24 bp, Artificial sequence
  SiRNA target sequence
aaatttttagcattttgtagtttg

SEQ ID NO: 103216 - DNA, 24 bp, Artificial sequence
  SiRNA target sequence
aatttttagcattttgtagtttgt

SEQ ID NO: 103217 - DNA, 24 bp, Artificial sequence
  SiRNA target sequence
atttttagcattttgtagtttgta

SEQ ID NO: 103218 - DNA, 24 bp, Artificial sequence
  SiRNA target sequence
tttttagcattttgtagtttgtaa

SEQ ID NO: 103219 - DNA, 24 bp, Artificial sequence
  SiRNA target sequence
ttttagcattttgtagtttgtaat

SEQ ID NO: 103220 - DNA, 24 bp, Artificial sequence
  SiRNA target sequence
tttagcattttgtagtttgtaatg

SEQ ID NO: 103221 - DNA, 24 bp, Artificial sequence
  SiRNA target sequence
ttagcattttgtagtttgtaatgc

SEQ ID NO: 103222 - DNA, 24 bp, Artificial sequence
  SiRNA target sequence
tagcattttgtagtttgtaatgcg

SEQ ID NO: 103223 - DNA, 24 bp, Artificial sequence
  SiRNA target sequence
agcattttgtagtttgtaatgcgg

SEQ ID NO: 103224 - DNA, 24 bp, Artificial sequence
  SiRNA target sequence
gcattttgtagtttgtaatgcggt

SEQ ID NO: 103225 - DNA, 24 bp, Artificial sequence
  SiRNA target sequence
cattttgtagtttgtaatgcggta

SEQ ID NO: 103226 - DNA, 24 bp, Artificial sequence
  SiRNA target sequence
attttgtagtttgtaatgcggtaa

SEQ ID NO: 103227 - DNA, 24 bp, Artificial sequence
  SiRNA target sequence
ttttgtagtttgtaatgcggtaat

SEQ ID NO: 103228 - DNA, 24 bp, Artificial sequence
  SiRNA target sequence
tttgtagtttgtaatgcggtaata

SEQ ID NO: 103229 - DNA, 24 bp, Artificial sequence
  SiRNA target sequence
ttgtagtttgtaatgcggtaatat

SEQ ID NO: 103230 - DNA, 24 bp, Artificial sequence
  SiRNA target sequence
tgtagtttgtaatgcggtaatata

SEQ ID NO: 103231 - DNA, 24 bp, Artificial sequence
  SiRNA target sequence
gtagtttgtaatgcggtaatatat

SEQ ID NO: 103232 - DNA, 24 bp, Artificial sequence
  SiRNA target sequence
tagtttgtaatgcggtaatatata

SEQ ID NO: 103233 - DNA, 24 bp, Artificial sequence
  SiRNA target sequence
agtttgtaatgcggtaatatataa

SEQ ID NO: 103234 - DNA, 24 bp, Artificial sequence
  SiRNA target sequence
gtttgtaatgcggtaatatataat

SEQ ID NO: 103235 - DNA, 24 bp, Artificial sequence
  SiRNA target sequence
tttgtaatgcggtaatatataata

SEQ ID NO: 103236 - DNA, 24 bp, Artificial sequence
  SiRNA target sequence
ttgtaatgcggtaatatataatat

SEQ ID NO: 103237 - DNA, 24 bp, Artificial sequence
  SiRNA target sequence
tgtaatgcggtaatatataatata

SEQ ID NO: 103238 - DNA, 24 bp, Artificial sequence
  SiRNA target sequence
gtaatgcggtaatatataatatag

SEQ ID NO: 103239 - DNA, 24 bp, Artificial sequence
  SiRNA target sequence
taatgcggtaatatataatataga

SEQ ID NO: 103240 - DNA, 24 bp, Artificial sequence
  SiRNA target sequence
aatgcggtaatatataatatagat

SEQ ID NO: 103241 - DNA, 24 bp, Artificial sequence
  SiRNA target sequence
atgcggtaatatataatatagatc

SEQ ID NO: 103242 - DNA, 24 bp, Artificial sequence
  SiRNA target sequence
tgcggtaatatataatatagatct

SEQ ID NO: 103243 - DNA, 24 bp, Artificial sequence
  SiRNA target sequence
gcggtaatatataatatagatctt

SEQ ID NO: 103244 - DNA, 24 bp, Artificial sequence
  SiRNA target sequence
cggtaatatataatatagatcttt

SEQ ID NO: 103245 - DNA, 24 bp, Artificial sequence
  SiRNA target sequence
ggtaatatataatatagatctttt

SEQ ID NO: 103246 - DNA, 24 bp, Artificial sequence
  SiRNA target sequence
gtaatatataatatagatctttta

SEQ ID NO: 103247 - DNA, 24 bp, Artificial sequence
  SiRNA target sequence
taatatataatatagatcttttat

SEQ ID NO: 103248 - DNA, 24 bp, Artificial sequence
  SiRNA target sequence
aatatataatatagatcttttatc

SEQ ID NO: 103249 - DNA, 24 bp, Artificial sequence
  SiRNA target sequence
atatataatatagatcttttatcc

SEQ ID NO: 103250 - DNA, 24 bp, Artificial sequence
  SiRNA target sequence
tatataatatagatcttttatcca

SEQ ID NO: 103251 - DNA, 24 bp, Artificial sequence
  SiRNA target sequence
atataatatagatcttttatccat

SEQ ID NO: 103252 - DNA, 24 bp, Artificial sequence
  SiRNA target sequence
tataatatagatcttttatccatg

SEQ ID NO: 103253 - DNA, 24 bp, Artificial sequence
  SiRNA target sequence
ataatatagatcttttatccatgt

SEQ ID NO: 103254 - DNA, 24 bp, Artificial sequence
  SiRNA target sequence
taatatagatcttttatccatgtc

SEQ ID NO: 103255 - DNA, 24 bp, Artificial sequence
  SiRNA target sequence
aatatagatcttttatccatgtct

SEQ ID NO: 103256 - DNA, 24 bp, Artificial sequence
  SiRNA target sequence
atatagatcttttatccatgtctt

SEQ ID NO: 103257 - DNA, 24 bp, Artificial sequence
  SiRNA target sequence
tatagatcttttatccatgtctta

SEQ ID NO: 103258 - DNA, 24 bp, Artificial sequence
  SiRNA target sequence
atagatcttttatccatgtcttaa

SEQ ID NO: 103259 - DNA, 24 bp, Artificial sequence
  SiRNA target sequence
tagatcttttatccatgtcttaaa

SEQ ID NO: 103260 - DNA, 24 bp, Artificial sequence
  SiRNA target sequence
agatcttttatccatgtcttaaat

SEQ ID NO: 103261 - DNA, 24 bp, Artificial sequence
  SiRNA target sequence
gatcttttatccatgtcttaaatt

SEQ ID NO: 103262 - DNA, 24 bp, Artificial sequence
  SiRNA target sequence
atcttttatccatgtcttaaattc

SEQ ID NO: 103263 - DNA, 24 bp, Artificial sequence
  SiRNA target sequence
tcttttatccatgtcttaaattcg

SEQ ID NO: 103264 - DNA, 24 bp, Artificial sequence
  SiRNA target sequence
cttttatccatgtcttaaattcgc

SEQ ID NO: 103265 - DNA, 24 bp, Artificial sequence
  SiRNA target sequence
ttttatccatgtcttaaattcgcc

SEQ ID NO: 103266 - DNA, 24 bp, Artificial sequence
  SiRNA target sequence
tttatccatgtcttaaattcgccc

SEQ ID NO: 103267 - DNA, 24 bp, Artificial sequence
  SiRNA target sequence
ttatccatgtcttaaattcgccca

SEQ ID NO: 103268 - DNA, 24 bp, Artificial sequence
  SiRNA target sequence
tatccatgtcttaaattcgcccat

SEQ ID NO: 103269 - DNA, 24 bp, Artificial sequence
  SiRNA target sequence
atccatgtcttaaattcgcccata

SEQ ID NO: 103270 - DNA, 24 bp, Artificial sequence
  SiRNA target sequence
tccatgtcttaaattcgcccataa

SEQ ID NO: 103271 - DNA, 24 bp, Artificial sequence
  SiRNA target sequence
ccatgtcttaaattcgcccataaa

SEQ ID NO: 103272 - DNA, 24 bp, Artificial sequence
  SiRNA target sequence
catgtcttaaattcgcccataaat

SEQ ID NO: 103273 - DNA, 24 bp, Artificial sequence
  SiRNA target sequence
atgtcttaaattcgcccataaatc

SEQ ID NO: 103274 - DNA, 24 bp, Artificial sequence
  SiRNA target sequence
tgtcttaaattcgcccataaatcc

SEQ ID NO: 103275 - DNA, 24 bp, Artificial sequence
  SiRNA target sequence
gtcttaaattcgcccataaatcct

SEQ ID NO: 103276 - DNA, 24 bp, Artificial sequence
  SiRNA target sequence
tcttaaattcgcccataaatcctt

SEQ ID NO: 103277 - DNA, 24 bp, Artificial sequence
  SiRNA target sequence
cttaaattcgcccataaatccttc

SEQ ID NO: 103278 - DNA, 24 bp, Artificial sequence
  SiRNA target sequence
ttaaattcgcccataaatccttct

SEQ ID NO: 103279 - DNA, 24 bp, Artificial sequence
  SiRNA target sequence
taaattcgcccataaatccttctt

SEQ ID NO: 103280 - DNA, 24 bp, Artificial sequence
  SiRNA target sequence
aaattcgcccataaatccttcttt

SEQ ID NO: 103281 - DNA, 24 bp, Artificial sequence
  SiRNA target sequence
aattcgcccataaatccttctttg

SEQ ID NO: 103282 - DNA, 24 bp, Artificial sequence
  SiRNA target sequence
attcgcccataaatccttctttgt

SEQ ID NO: 103283 - DNA, 24 bp, Artificial sequence
  SiRNA target sequence
ttcgcccataaatccttctttgtc

SEQ ID NO: 103284 - DNA, 24 bp, Artificial sequence
  SiRNA target sequence
tcgcccataaatccttctttgtct

SEQ ID NO: 103285 - DNA, 24 bp, Artificial sequence
  SiRNA target sequence
cgcccataaatccttctttgtctt

SEQ ID NO: 103286 - DNA, 24 bp, Artificial sequence
  SiRNA target sequence
gcccataaatccttctttgtcttg

SEQ ID NO: 103287 - DNA, 24 bp, Artificial sequence
  SiRNA target sequence
cccataaatccttctttgtcttgg

SEQ ID NO: 103288 - DNA, 24 bp, Artificial sequence
  SiRNA target sequence
ccataaatccttctttgtcttggc

SEQ ID NO: 103289 - DNA, 24 bp, Artificial sequence
  SiRNA target sequence
cataaatccttctttgtcttggct

SEQ ID NO: 103290 - DNA, 24 bp, Artificial sequence
  SiRNA target sequence
ataaatccttctttgtcttggcta

SEQ ID NO: 103291 - DNA, 24 bp, Artificial sequence
  SiRNA target sequence
taaatccttctttgtcttggctat

SEQ ID NO: 103292 - DNA, 24 bp, Artificial sequence
  SiRNA target sequence
aaatccttctttgtcttggctatc

SEQ ID NO: 103293 - DNA, 24 bp, Artificial sequence
  SiRNA target sequence
aatccttctttgtcttggctatct

SEQ ID NO: 103294 - DNA, 24 bp, Artificial sequence
  SiRNA target sequence
atccttctttgtcttggctatctc

SEQ ID NO: 103295 - DNA, 24 bp, Artificial sequence
  SiRNA target sequence
tccttctttgtcttggctatctcc

SEQ ID NO: 103296 - DNA, 24 bp, Artificial sequence
  SiRNA target sequence
ccttctttgtcttggctatctcca

SEQ ID NO: 103297 - DNA, 24 bp, Artificial sequence
  SiRNA target sequence
cttctttgtcttggctatctccat

SEQ ID NO: 103298 - DNA, 24 bp, Artificial sequence
  SiRNA target sequence
ttctttgtcttggctatctccatt

SEQ ID NO: 103299 - DNA, 24 bp, Artificial sequence
  SiRNA target sequence
tctttgtcttggctatctccatta

SEQ ID NO: 103300 - DNA, 24 bp, Artificial sequence
  SiRNA target sequence
ctttgtcttggctatctccattac

SEQ ID NO: 103301 - DNA, 24 bp, Artificial sequence
  SiRNA target sequence
tttgtcttggctatctccattacc

SEQ ID NO: 103302 - DNA, 24 bp, Artificial sequence
  SiRNA target sequence
ttgtcttggctatctccattaccc

SEQ ID NO: 103303 - DNA, 24 bp, Artificial sequence
  SiRNA target sequence
tgtcttggctatctccattaccct

SEQ ID NO: 103304 - DNA, 24 bp, Artificial sequence
  SiRNA target sequence
gtcttggctatctccattaccctt

SEQ ID NO: 103305 - DNA, 24 bp, Artificial sequence
  SiRNA target sequence
tcttggctatctccattacccttt

SEQ ID NO: 103306 - DNA, 24 bp, Artificial sequence
  SiRNA target sequence
cttggctatctccattaccctttc

SEQ ID NO: 103307 - DNA, 24 bp, Artificial sequence
  SiRNA target sequence
ttggctatctccattaccctttct

SEQ ID NO: 103308 - DNA, 24 bp, Artificial sequence
  SiRNA target sequence
tggctatctccattaccctttctt

SEQ ID NO: 103309 - DNA, 24 bp, Artificial sequence
  SiRNA target sequence
ggctatctccattaccctttctta

SEQ ID NO: 103310 - DNA, 24 bp, Artificial sequence
  SiRNA target sequence
gctatctccattaccctttcttat

SEQ ID NO: 103311 - DNA, 24 bp, Artificial sequence
  SiRNA target sequence
ctatctccattaccctttcttatc

SEQ ID NO: 103312 - DNA, 24 bp, Artificial sequence
  SiRNA target sequence
tatctccattaccctttcttatca

SEQ ID NO: 103313 - DNA, 24 bp, Artificial sequence
  SiRNA target sequence
atctccattaccctttcttatcag

SEQ ID NO: 103314 - DNA, 24 bp, Artificial sequence
  SiRNA target sequence
tctccattaccctttcttatcaga

SEQ ID NO: 103315 - DNA, 24 bp, Artificial sequence
  SiRNA target sequence
ctccattaccctttcttatcagag

SEQ ID NO: 103316 - DNA, 24 bp, Artificial sequence
  SiRNA target sequence
tccattaccctttcttatcagagg

SEQ ID NO: 103317 - DNA, 24 bp, Artificial sequence
  SiRNA target sequence
ccattaccctttcttatcagaggt

SEQ ID NO: 103318 - DNA, 24 bp, Artificial sequence
  SiRNA target sequence
cattaccctttcttatcagaggtt

SEQ ID NO: 103319 - DNA, 24 bp, Artificial sequence
  SiRNA target sequence
attaccctttcttatcagaggttt

SEQ ID NO: 103320 - DNA, 24 bp, Artificial sequence
  SiRNA target sequence
ttaccctttcttatcagaggttta

SEQ ID NO: 103321 - DNA, 24 bp, Artificial sequence
  SiRNA target sequence
taccctttcttatcagaggtttag

SEQ ID NO: 103322 - DNA, 24 bp, Artificial sequence
  SiRNA target sequence
accctttcttatcagaggtttagc

SEQ ID NO: 103323 - DNA, 24 bp, Artificial sequence
  SiRNA target sequence
ccctttcttatcagaggtttagct

SEQ ID NO: 103324 - DNA, 24 bp, Artificial sequence
  SiRNA target sequence
cctttcttatcagaggtttagctc

SEQ ID NO: 103325 - DNA, 24 bp, Artificial sequence
  SiRNA target sequence
ctttcttatcagaggtttagctcc

SEQ ID NO: 103326 - DNA, 24 bp, Artificial sequence
  SiRNA target sequence
tttcttatcagaggtttagctccg

SEQ ID NO: 103327 - DNA, 24 bp, Artificial sequence
  SiRNA target sequence
ttcttatcagaggtttagctccgt

SEQ ID NO: 103328 - DNA, 24 bp, Artificial sequence
  SiRNA target sequence
tcttatcagaggtttagctccgtg

SEQ ID NO: 103329 - DNA, 24 bp, Artificial sequence
  SiRNA target sequence
cttatcagaggtttagctccgtgt

SEQ ID NO: 103330 - DNA, 24 bp, Artificial sequence
  SiRNA target sequence
ttatcagaggtttagctccgtgtt

SEQ ID NO: 103331 - DNA, 24 bp, Artificial sequence
  SiRNA target sequence
tatcagaggtttagctccgtgttt

SEQ ID NO: 103332 - DNA, 24 bp, Artificial sequence
  SiRNA target sequence
atcagaggtttagctccgtgtttt

SEQ ID NO: 103333 - DNA, 24 bp, Artificial sequence
  SiRNA target sequence
tcagaggtttagctccgtgtttta

SEQ ID NO: 103334 - DNA, 24 bp, Artificial sequence
  SiRNA target sequence
cagaggtttagctccgtgttttaa

SEQ ID NO: 103335 - DNA, 24 bp, Artificial sequence
  SiRNA target sequence
agaggtttagctccgtgttttaaa

SEQ ID NO: 103336 - DNA, 24 bp, Artificial sequence
  SiRNA target sequence
gaggtttagctccgtgttttaaaa

SEQ ID NO: 103337 - DNA, 24 bp, Artificial sequence
  SiRNA target sequence
aggtttagctccgtgttttaaaag

SEQ ID NO: 103338 - DNA, 24 bp, Artificial sequence
  SiRNA target sequence
ggtttagctccgtgttttaaaagg

SEQ ID NO: 103339 - DNA, 24 bp, Artificial sequence
  SiRNA target sequence
gtttagctccgtgttttaaaaggc

SEQ ID NO: 103340 - DNA, 24 bp, Artificial sequence
  SiRNA target sequence
tttagctccgtgttttaaaaggca

SEQ ID NO: 103341 - DNA, 24 bp, Artificial sequence
  SiRNA target sequence
ttagctccgtgttttaaaaggcaa

SEQ ID NO: 103342 - DNA, 24 bp, Artificial sequence
  SiRNA target sequence
tagctccgtgttttaaaaggcaat

SEQ ID NO: 103343 - DNA, 24 bp, Artificial sequence
  SiRNA target sequence
agctccgtgttttaaaaggcaatt

SEQ ID NO: 103344 - DNA, 24 bp, Artificial sequence
  SiRNA target sequence
gctccgtgttttaaaaggcaatta

SEQ ID NO: 103345 - DNA, 24 bp, Artificial sequence
  SiRNA target sequence
ctccgtgttttaaaaggcaattat

SEQ ID NO: 103346 - DNA, 24 bp, Artificial sequence
  SiRNA target sequence
tccgtgttttaaaaggcaattata

SEQ ID NO: 103347 - DNA, 24 bp, Artificial sequence
  SiRNA target sequence
ccgtgttttaaaaggcaattatac

SEQ ID NO: 103348 - DNA, 24 bp, Artificial sequence
  SiRNA target sequence
cgtgttttaaaaggcaattataca

SEQ ID NO: 103349 - DNA, 24 bp, Artificial sequence
  SiRNA target sequence
gtgttttaaaaggcaattatacaa

SEQ ID NO: 103350 - DNA, 24 bp, Artificial sequence
  SiRNA target sequence
tgttttaaaaggcaattatacaac

SEQ ID NO: 103351 - DNA, 24 bp, Artificial sequence
  SiRNA target sequence
gttttaaaaggcaattatacaact

SEQ ID NO: 103352 - DNA, 24 bp, Artificial sequence
  SiRNA target sequence
ttttaaaaggcaattatacaactt

SEQ ID NO: 103353 - DNA, 24 bp, Artificial sequence
  SiRNA target sequence
tttaaaaggcaattatacaacttt

SEQ ID NO: 103354 - DNA, 24 bp, Artificial sequence
  SiRNA target sequence
ttaaaaggcaattatacaactttt

SEQ ID NO: 103355 - DNA, 24 bp, Artificial sequence
  SiRNA target sequence
taaaaggcaattatacaacttttt

SEQ ID NO: 103356 - DNA, 24 bp, Artificial sequence
  SiRNA target sequence
aaaaggcaattatacaacttttta

SEQ ID NO: 103357 - DNA, 24 bp, Artificial sequence
  SiRNA target sequence
aaaggcaattatacaactttttag

SEQ ID NO: 103358 - DNA, 24 bp, Artificial sequence
  SiRNA target sequence
aaggcaattatacaactttttaga

SEQ ID NO: 103359 - DNA, 24 bp, Artificial sequence
  SiRNA target sequence
aggcaattatacaactttttagaa

SEQ ID NO: 103360 - DNA, 24 bp, Artificial sequence
  SiRNA target sequence
ggcaattatacaactttttagaac

SEQ ID NO: 103361 - DNA, 24 bp, Artificial sequence
  SiRNA target sequence
gcaattatacaactttttagaaca

SEQ ID NO: 103362 - DNA, 24 bp, Artificial sequence
  SiRNA target sequence
caattatacaactttttagaacaa

SEQ ID NO: 103363 - DNA, 24 bp, Artificial sequence
  SiRNA target sequence
aattatacaactttttagaacaaa

SEQ ID NO: 103364 - DNA, 24 bp, Artificial sequence
  SiRNA target sequence
attatacaactttttagaacaaaa

SEQ ID NO: 103365 - DNA, 24 bp, Artificial sequence
  SiRNA target sequence
ttatacaactttttagaacaaaaa

SEQ ID NO: 103366 - DNA, 24 bp, Artificial sequence
  SiRNA target sequence
tatacaactttttagaacaaaaat

SEQ ID NO: 103367 - DNA, 24 bp, Artificial sequence
  SiRNA target sequence
atacaactttttagaacaaaaatt

SEQ ID NO: 103368 - DNA, 24 bp, Artificial sequence
  SiRNA target sequence
tacaactttttagaacaaaaatta

SEQ ID NO: 103369 - DNA, 24 bp, Artificial sequence
  SiRNA target sequence
acaactttttagaacaaaaattaa

SEQ ID NO: 103370 - DNA, 24 bp, Artificial sequence
  SiRNA target sequence
caactttttagaacaaaaattaaa

SEQ ID NO: 103371 - DNA, 24 bp, Artificial sequence
  SiRNA target sequence
aactttttagaacaaaaattaaaa

SEQ ID NO: 103372 - DNA, 24 bp, Artificial sequence
  SiRNA target sequence
actttttagaacaaaaattaaaag

SEQ ID NO: 103373 - DNA, 24 bp, Artificial sequence
  SiRNA target sequence
ctttttagaacaaaaattaaaaga

SEQ ID NO: 103374 - DNA, 24 bp, Artificial sequence
  SiRNA target sequence
tttttagaacaaaaattaaaagat

SEQ ID NO: 103375 - DNA, 24 bp, Artificial sequence
  SiRNA target sequence
ttttagaacaaaaattaaaagatt

SEQ ID NO: 103376 - DNA, 24 bp, Artificial sequence
  SiRNA target sequence
tttagaacaaaaattaaaagattt

SEQ ID NO: 103377 - DNA, 24 bp, Artificial sequence
  SiRNA target sequence
ttagaacaaaaattaaaagattta

SEQ ID NO: 103378 - DNA, 24 bp, Artificial sequence
  SiRNA target sequence
tagaacaaaaattaaaagatttat

SEQ ID NO: 103379 - DNA, 24 bp, Artificial sequence
  SiRNA target sequence
agaacaaaaattaaaagatttata

SEQ ID NO: 103380 - DNA, 24 bp, Artificial sequence
  SiRNA target sequence
gaacaaaaattaaaagatttataa

SEQ ID NO: 103381 - DNA, 24 bp, Artificial sequence
  SiRNA target sequence
aacaaaaattaaaagatttataag

SEQ ID NO: 103382 - DNA, 24 bp, Artificial sequence
  SiRNA target sequence
acaaaaattaaaagatttataaga

SEQ ID NO: 103383 - DNA, 24 bp, Artificial sequence
  SiRNA target sequence
caaaaattaaaagatttataagac

SEQ ID NO: 103384 - DNA, 24 bp, Artificial sequence
  SiRNA target sequence
aaaaattaaaagatttataagacg

SEQ ID NO: 103385 - DNA, 24 bp, Artificial sequence
  SiRNA target sequence
aaaattaaaagatttataagacga

SEQ ID NO: 103386 - DNA, 24 bp, Artificial sequence
  SiRNA target sequence
aaattaaaagatttataagacgaa

SEQ ID NO: 103387 - DNA, 24 bp, Artificial sequence
  SiRNA target sequence
aattaaaagatttataagacgaat

SEQ ID NO: 103388 - DNA, 24 bp, Artificial sequence
  SiRNA target sequence
attaaaagatttataagacgaatc

SEQ ID NO: 103389 - DNA, 24 bp, Artificial sequence
  SiRNA target sequence
ttaaaagatttataagacgaatcc

SEQ ID NO: 103390 - DNA, 24 bp, Artificial sequence
  SiRNA target sequence
taaaagatttataagacgaatccc

SEQ ID NO: 103391 - DNA, 24 bp, Artificial sequence
  SiRNA target sequence
aaaagatttataagacgaatcccc

SEQ ID NO: 103392 - DNA, 24 bp, Artificial sequence
  SiRNA target sequence
aaagatttataagacgaatcccca

SEQ ID NO: 103393 - DNA, 24 bp, Artificial sequence
  SiRNA target sequence
aagatttataagacgaatccccaa

SEQ ID NO: 103394 - DNA, 24 bp, Artificial sequence
  SiRNA target sequence
agatttataagacgaatccccaag

SEQ ID NO: 103395 - DNA, 24 bp, Artificial sequence
  SiRNA target sequence
gatttataagacgaatccccaagg

SEQ ID NO: 103396 - DNA, 24 bp, Artificial sequence
  SiRNA target sequence
atttataagacgaatccccaaggc

SEQ ID NO: 103397 - DNA, 24 bp, Artificial sequence
  SiRNA target sequence
tttataagacgaatccccaaggcc

SEQ ID NO: 103398 - DNA, 24 bp, Artificial sequence
  SiRNA target sequence
ttataagacgaatccccaaggcca

SEQ ID NO: 103399 - DNA, 24 bp, Artificial sequence
  SiRNA target sequence
tataagacgaatccccaaggccaa

SEQ ID NO: 103400 - DNA, 24 bp, Artificial sequence
  SiRNA target sequence
ataagacgaatccccaaggccaaa

SEQ ID NO: 103401 - DNA, 24 bp, Artificial sequence
  SiRNA target sequence
taagacgaatccccaaggccaaat

SEQ ID NO: 103402 - DNA, 24 bp, Artificial sequence
  SiRNA target sequence
aagacgaatccccaaggccaaata

SEQ ID NO: 103403 - DNA, 24 bp, Artificial sequence
  SiRNA target sequence
agacgaatccccaaggccaaatac

SEQ ID NO: 103404 - DNA, 24 bp, Artificial sequence
  SiRNA target sequence
gacgaatccccaaggccaaataca

SEQ ID NO: 103405 - DNA, 24 bp, Artificial sequence
  SiRNA target sequence
acgaatccccaaggccaaatacag

SEQ ID NO: 103406 - DNA, 24 bp, Artificial sequence
  SiRNA target sequence
cgaatccccaaggccaaatacagc

SEQ ID NO: 103407 - DNA, 24 bp, Artificial sequence
  SiRNA target sequence
gaatccccaaggccaaatacagca

SEQ ID NO: 103408 - DNA, 24 bp, Artificial sequence
  SiRNA target sequence
aatccccaaggccaaatacagcaa

SEQ ID NO: 103409 - DNA, 24 bp, Artificial sequence
  SiRNA target sequence
atccccaaggccaaatacagcaaa

SEQ ID NO: 103410 - DNA, 24 bp, Artificial sequence
  SiRNA target sequence
tccccaaggccaaatacagcaaaa

SEQ ID NO: 103411 - DNA, 24 bp, Artificial sequence
  SiRNA target sequence
ccccaaggccaaatacagcaaaat

SEQ ID NO: 103412 - DNA, 24 bp, Artificial sequence
  SiRNA target sequence
cccaaggccaaatacagcaaaatt

SEQ ID NO: 103413 - DNA, 24 bp, Artificial sequence
  SiRNA target sequence
ccaaggccaaatacagcaaaattt

SEQ ID NO: 103414 - DNA, 24 bp, Artificial sequence
  SiRNA target sequence
caaggccaaatacagcaaaattta

SEQ ID NO: 103415 - DNA, 24 bp, Artificial sequence
  SiRNA target sequence
aaggccaaatacagcaaaatttaa

SEQ ID NO: 103416 - DNA, 24 bp, Artificial sequence
  SiRNA target sequence
aggccaaatacagcaaaatttaag

SEQ ID NO: 103417 - DNA, 24 bp, Artificial sequence
  SiRNA target sequence
ggccaaatacagcaaaatttaagt

SEQ ID NO: 103418 - DNA, 24 bp, Artificial sequence
  SiRNA target sequence
gccaaatacagcaaaatttaagtg

SEQ ID NO: 103419 - DNA, 24 bp, Artificial sequence
  SiRNA target sequence
ccaaatacagcaaaatttaagtgt

SEQ ID NO: 103420 - DNA, 24 bp, Artificial sequence
  SiRNA target sequence
caaatacagcaaaatttaagtgtt

SEQ ID NO: 103421 - DNA, 24 bp, Artificial sequence
  SiRNA target sequence
aaatacagcaaaatttaagtgttg

SEQ ID NO: 103422 - DNA, 24 bp, Artificial sequence
  SiRNA target sequence
aatacagcaaaatttaagtgttgt

SEQ ID NO: 103423 - DNA, 24 bp, Artificial sequence
  SiRNA target sequence
atacagcaaaatttaagtgttgta

SEQ ID NO: 103424 - DNA, 24 bp, Artificial sequence
  SiRNA target sequence
tacagcaaaatttaagtgttgtaa

SEQ ID NO: 103425 - DNA, 24 bp, Artificial sequence
  SiRNA target sequence
acagcaaaatttaagtgttgtaaa

SEQ ID NO: 103426 - DNA, 24 bp, Artificial sequence
  SiRNA target sequence
cagcaaaatttaagtgttgtaaaa

SEQ ID NO: 103427 - DNA, 24 bp, Artificial sequence
  SiRNA target sequence
agcaaaatttaagtgttgtaaaaa

SEQ ID NO: 103428 - DNA, 24 bp, Artificial sequence
  SiRNA target sequence
gcaaaatttaagtgttgtaaaaaa

SEQ ID NO: 103429 - DNA, 24 bp, Artificial sequence
  SiRNA target sequence
caaaatttaagtgttgtaaaaaat

SEQ ID NO: 103430 - DNA, 24 bp, Artificial sequence
  SiRNA target sequence
aaaatttaagtgttgtaaaaaatt

SEQ ID NO: 103431 - DNA, 24 bp, Artificial sequence
  SiRNA target sequence
aaatttaagtgttgtaaaaaattt

SEQ ID NO: 103432 - DNA, 24 bp, Artificial sequence
  SiRNA target sequence
aatttaagtgttgtaaaaaatttg

SEQ ID NO: 103433 - DNA, 24 bp, Artificial sequence
  SiRNA target sequence
atttaagtgttgtaaaaaatttgt

SEQ ID NO: 103434 - DNA, 24 bp, Artificial sequence
  SiRNA target sequence
tttaagtgttgtaaaaaatttgta

SEQ ID NO: 103435 - DNA, 24 bp, Artificial sequence
  SiRNA target sequence
ttaagtgttgtaaaaaatttgtag

SEQ ID NO: 103436 - DNA, 24 bp, Artificial sequence
  SiRNA target sequence
taagtgttgtaaaaaatttgtagg

SEQ ID NO: 103437 - DNA, 24 bp, Artificial sequence
  SiRNA target sequence
aagtgttgtaaaaaatttgtaggc

SEQ ID NO: 103438 - DNA, 24 bp, Artificial sequence
  SiRNA target sequence
agtgttgtaaaaaatttgtaggca

SEQ ID NO: 103439 - DNA, 24 bp, Artificial sequence
  SiRNA target sequence
gtgttgtaaaaaatttgtaggcag

SEQ ID NO: 103440 - DNA, 24 bp, Artificial sequence
  SiRNA target sequence
tgttgtaaaaaatttgtaggcaga

SEQ ID NO: 103441 - DNA, 24 bp, Artificial sequence
  SiRNA target sequence
gttgtaaaaaatttgtaggcagat

SEQ ID NO: 103442 - DNA, 24 bp, Artificial sequence
  SiRNA target sequence
ttgtaaaaaatttgtaggcagatt

SEQ ID NO: 103443 - DNA, 24 bp, Artificial sequence
  SiRNA target sequence
tgtaaaaaatttgtaggcagattt

SEQ ID NO: 103444 - DNA, 24 bp, Artificial sequence
  SiRNA target sequence
gtaaaaaatttgtaggcagatttt

SEQ ID NO: 103445 - DNA, 24 bp, Artificial sequence
  SiRNA target sequence
taaaaaatttgtaggcagattttt

SEQ ID NO: 103446 - DNA, 24 bp, Artificial sequence
  SiRNA target sequence
aaaaaatttgtaggcagatttttt

SEQ ID NO: 103447 - DNA, 24 bp, Artificial sequence
  SiRNA target sequence
aaaaatttgtaggcagattttttt

SEQ ID NO: 103448 - DNA, 24 bp, Artificial sequence
  SiRNA target sequence
aaaatttgtaggcagatttttttt

SEQ ID NO: 103449 - DNA, 24 bp, Artificial sequence
  SiRNA target sequence
aaatttgtaggcagattttttttg

SEQ ID NO: 103450 - DNA, 24 bp, Artificial sequence
  SiRNA target sequence
aatttgtaggcagattttttttgc

SEQ ID NO: 103451 - DNA, 24 bp, Artificial sequence
  SiRNA target sequence
atttgtaggcagattttttttgcg

SEQ ID NO: 103452 - DNA, 24 bp, Artificial sequence
  SiRNA target sequence
tttgtaggcagattttttttgcgc

SEQ ID NO: 103453 - DNA, 24 bp, Artificial sequence
  SiRNA target sequence
ttgtaggcagattttttttgcgca

SEQ ID NO: 103454 - DNA, 24 bp, Artificial sequence
  SiRNA target sequence
tgtaggcagattttttttgcgcaa

SEQ ID NO: 103455 - DNA, 24 bp, Artificial sequence
  SiRNA target sequence
gtaggcagattttttttgcgcaaa

SEQ ID NO: 103456 - DNA, 24 bp, Artificial sequence
  SiRNA target sequence
taggcagattttttttgcgcaaaa

SEQ ID NO: 103457 - DNA, 24 bp, Artificial sequence
  SiRNA target sequence
aggcagattttttttgcgcaaaaa

SEQ ID NO: 103458 - DNA, 24 bp, Artificial sequence
  SiRNA target sequence
ggcagattttttttgcgcaaaaat

SEQ ID NO: 103459 - DNA, 24 bp, Artificial sequence
  SiRNA target sequence
gcagattttttttgcgcaaaaatt

SEQ ID NO: 103460 - DNA, 24 bp, Artificial sequence
  SiRNA target sequence
cagattttttttgcgcaaaaattt

SEQ ID NO: 103461 - DNA, 24 bp, Artificial sequence
  SiRNA target sequence
agattttttttgcgcaaaaatttc

SEQ ID NO: 103462 - DNA, 24 bp, Artificial sequence
  SiRNA target sequence
gattttttttgcgcaaaaatttcc

SEQ ID NO: 103463 - DNA, 24 bp, Artificial sequence
  SiRNA target sequence
attttttttgcgcaaaaatttcca

SEQ ID NO: 103464 - DNA, 24 bp, Artificial sequence
  SiRNA target sequence
ttttttttgcgcaaaaatttccaa

SEQ ID NO: 103465 - DNA, 24 bp, Artificial sequence
  SiRNA target sequence
tttttttgcgcaaaaatttccaaa

SEQ ID NO: 103466 - DNA, 24 bp, Artificial sequence
  SiRNA target sequence
ttttttgcgcaaaaatttccaaaa

SEQ ID NO: 103467 - DNA, 24 bp, Artificial sequence
  SiRNA target sequence
tttttgcgcaaaaatttccaaaat

SEQ ID NO: 103468 - DNA, 24 bp, Artificial sequence
  SiRNA target sequence
ttttgcgcaaaaatttccaaaatt

SEQ ID NO: 103469 - DNA, 24 bp, Artificial sequence
  SiRNA target sequence
tttgcgcaaaaatttccaaaattt

SEQ ID NO: 103470 - DNA, 24 bp, Artificial sequence
  SiRNA target sequence
ttgcgcaaaaatttccaaaattta

SEQ ID NO: 103471 - DNA, 24 bp, Artificial sequence
  SiRNA target sequence
tgcgcaaaaatttccaaaatttag

SEQ ID NO: 103472 - DNA, 24 bp, Artificial sequence
  SiRNA target sequence
gcgcaaaaatttccaaaatttagt

SEQ ID NO: 103473 - DNA, 24 bp, Artificial sequence
  SiRNA target sequence
cgcaaaaatttccaaaatttagtc

SEQ ID NO: 103474 - DNA, 24 bp, Artificial sequence
  SiRNA target sequence
gcaaaaatttccaaaatttagtca

SEQ ID NO: 103475 - DNA, 24 bp, Artificial sequence
  SiRNA target sequence
caaaaatttccaaaatttagtcat

SEQ ID NO: 103476 - DNA, 24 bp, Artificial sequence
  SiRNA target sequence
aaaaatttccaaaatttagtcatg

SEQ ID NO: 103477 - DNA, 24 bp, Artificial sequence
  SiRNA target sequence
aaaatttccaaaatttagtcatgt

SEQ ID NO: 103478 - DNA, 24 bp, Artificial sequence
  SiRNA target sequence
aaatttccaaaatttagtcatgtt

SEQ ID NO: 103479 - DNA, 24 bp, Artificial sequence
  SiRNA target sequence
aatttccaaaatttagtcatgtta

SEQ ID NO: 103480 - DNA, 24 bp, Artificial sequence
  SiRNA target sequence
atttccaaaatttagtcatgttaa

SEQ ID NO: 103481 - DNA, 24 bp, Artificial sequence
  SiRNA target sequence
tttccaaaatttagtcatgttaaa

SEQ ID NO: 103482 - DNA, 24 bp, Artificial sequence
  SiRNA target sequence
ttccaaaatttagtcatgttaaaa

SEQ ID NO: 103483 - DNA, 24 bp, Artificial sequence
  SiRNA target sequence
tccaaaatttagtcatgttaaaag

SEQ ID NO: 103484 - DNA, 24 bp, Artificial sequence
  SiRNA target sequence
ccaaaatttagtcatgttaaaagg

SEQ ID NO: 103485 - DNA, 24 bp, Artificial sequence
  SiRNA target sequence
caaaatttagtcatgttaaaaggt

SEQ ID NO: 103486 - DNA, 24 bp, Artificial sequence
  SiRNA target sequence
aaaatttagtcatgttaaaaggtt

SEQ ID NO: 103487 - DNA, 24 bp, Artificial sequence
  SiRNA target sequence
aaatttagtcatgttaaaaggttc

SEQ ID NO: 103488 - DNA, 24 bp, Artificial sequence
  SiRNA target sequence
aatttagtcatgttaaaaggttca

SEQ ID NO: 103489 - DNA, 24 bp, Artificial sequence
  SiRNA target sequence
atttagtcatgttaaaaggttcag

SEQ ID NO: 103490 - DNA, 24 bp, Artificial sequence
  SiRNA target sequence
tttagtcatgttaaaaggttcaga

SEQ ID NO: 103491 - DNA, 24 bp, Artificial sequence
  SiRNA target sequence
ttagtcatgttaaaaggttcagaa

SEQ ID NO: 103492 - DNA, 24 bp, Artificial sequence
  SiRNA target sequence
tagtcatgttaaaaggttcagaac

SEQ ID NO: 103493 - DNA, 24 bp, Artificial sequence
  SiRNA target sequence
agtcatgttaaaaggttcagaacc

SEQ ID NO: 103494 - DNA, 24 bp, Artificial sequence
  SiRNA target sequence
gtcatgttaaaaggttcagaacca

SEQ ID NO: 103495 - DNA, 24 bp, Artificial sequence
  SiRNA target sequence
tcatgttaaaaggttcagaaccat

SEQ ID NO: 103496 - DNA, 24 bp, Artificial sequence
  SiRNA target sequence
catgttaaaaggttcagaaccatt

SEQ ID NO: 103497 - DNA, 24 bp, Artificial sequence
  SiRNA target sequence
atgttaaaaggttcagaaccattc

SEQ ID NO: 103498 - DNA, 24 bp, Artificial sequence
  SiRNA target sequence
tgttaaaaggttcagaaccattcc

SEQ ID NO: 103499 - DNA, 24 bp, Artificial sequence
  SiRNA target sequence
gttaaaaggttcagaaccattccc

SEQ ID NO: 103500 - DNA, 24 bp, Artificial sequence
  SiRNA target sequence
ttaaaaggttcagaaccattccca

SEQ ID NO: 103501 - DNA, 24 bp, Artificial sequence
  SiRNA target sequence
taaaaggttcagaaccattcccat

SEQ ID NO: 103502 - DNA, 24 bp, Artificial sequence
  SiRNA target sequence
aaaaggttcagaaccattcccatg

SEQ ID NO: 103503 - DNA, 24 bp, Artificial sequence
  SiRNA target sequence
aaaggttcagaaccattcccatga

SEQ ID NO: 103504 - DNA, 24 bp, Artificial sequence
  SiRNA target sequence
aaggttcagaaccattcccatgag

SEQ ID NO: 103505 - DNA, 24 bp, Artificial sequence
  SiRNA target sequence
aggttcagaaccattcccatgagt

SEQ ID NO: 103506 - DNA, 24 bp, Artificial sequence
  SiRNA target sequence
ggttcagaaccattcccatgagtc

SEQ ID NO: 103507 - DNA, 24 bp, Artificial sequence
  SiRNA target sequence
gttcagaaccattcccatgagtcg

SEQ ID NO: 103508 - DNA, 24 bp, Artificial sequence
  SiRNA target sequence
ttcagaaccattcccatgagtcga

SEQ ID NO: 103509 - DNA, 24 bp, Artificial sequence
  SiRNA target sequence
tcagaaccattcccatgagtcgaa

SEQ ID NO: 103510 - DNA, 24 bp, Artificial sequence
  SiRNA target sequence
cagaaccattcccatgagtcgaac

SEQ ID NO: 103511 - DNA, 24 bp, Artificial sequence
  SiRNA target sequence
agaaccattcccatgagtcgaaca

SEQ ID NO: 103512 - DNA, 24 bp, Artificial sequence
  SiRNA target sequence
gaaccattcccatgagtcgaacat

SEQ ID NO: 103513 - DNA, 24 bp, Artificial sequence
  SiRNA target sequence
aaccattcccatgagtcgaacata

SEQ ID NO: 103514 - DNA, 24 bp, Artificial sequence
  SiRNA target sequence
accattcccatgagtcgaacatac

SEQ ID NO: 103515 - DNA, 24 bp, Artificial sequence
  SiRNA target sequence
ccattcccatgagtcgaacataca

SEQ ID NO: 103516 - DNA, 24 bp, Artificial sequence
  SiRNA target sequence
cattcccatgagtcgaacatacaa

SEQ ID NO: 103517 - DNA, 24 bp, Artificial sequence
  SiRNA target sequence
attcccatgagtcgaacatacaaa

SEQ ID NO: 103518 - DNA, 24 bp, Artificial sequence
  SiRNA target sequence
ttcccatgagtcgaacatacaaat

SEQ ID NO: 103519 - DNA, 24 bp, Artificial sequence
  SiRNA target sequence
tcccatgagtcgaacatacaaata

SEQ ID NO: 103520 - DNA, 24 bp, Artificial sequence
  SiRNA target sequence
cccatgagtcgaacatacaaatat

SEQ ID NO: 103521 - DNA, 24 bp, Artificial sequence
  SiRNA target sequence
ccatgagtcgaacatacaaatata

SEQ ID NO: 103522 - DNA, 24 bp, Artificial sequence
  SiRNA target sequence
catgagtcgaacatacaaatataa

SEQ ID NO: 103523 - DNA, 24 bp, Artificial sequence
  SiRNA target sequence
atgagtcgaacatacaaatataat

SEQ ID NO: 103524 - DNA, 24 bp, Artificial sequence
  SiRNA target sequence
tgagtcgaacatacaaatataatc

SEQ ID NO: 103525 - DNA, 24 bp, Artificial sequence
  SiRNA target sequence
gagtcgaacatacaaatataatca

SEQ ID NO: 103526 - DNA, 24 bp, Artificial sequence
  SiRNA target sequence
agtcgaacatacaaatataatcat

SEQ ID NO: 103527 - DNA, 24 bp, Artificial sequence
  SiRNA target sequence
gtcgaacatacaaatataatcata

SEQ ID NO: 103528 - DNA, 24 bp, Artificial sequence
  SiRNA target sequence
tcgaacatacaaatataatcatat

SEQ ID NO: 103529 - DNA, 24 bp, Artificial sequence
  SiRNA target sequence
cgaacatacaaatataatcatatc

SEQ ID NO: 103530 - DNA, 24 bp, Artificial sequence
  SiRNA target sequence
gaacatacaaatataatcatatca

SEQ ID NO: 103531 - DNA, 24 bp, Artificial sequence
  SiRNA target sequence
aacatacaaatataatcatatcaa

SEQ ID NO: 103532 - DNA, 24 bp, Artificial sequence
  SiRNA target sequence
acatacaaatataatcatatcaat

SEQ ID NO: 103533 - DNA, 24 bp, Artificial sequence
  SiRNA target sequence
catacaaatataatcatatcaata

SEQ ID NO: 103534 - DNA, 24 bp, Artificial sequence
  SiRNA target sequence
atacaaatataatcatatcaatat

SEQ ID NO: 103535 - DNA, 24 bp, Artificial sequence
  SiRNA target sequence
tacaaatataatcatatcaatatc

SEQ ID NO: 103536 - DNA, 24 bp, Artificial sequence
  SiRNA target sequence
acaaatataatcatatcaatatct

SEQ ID NO: 103537 - DNA, 24 bp, Artificial sequence
  SiRNA target sequence
caaatataatcatatcaatatcta

SEQ ID NO: 103538 - DNA, 24 bp, Artificial sequence
  SiRNA target sequence
aaatataatcatatcaatatctaa

SEQ ID NO: 103539 - DNA, 24 bp, Artificial sequence
  SiRNA target sequence
aatataatcatatcaatatctaat

SEQ ID NO: 103540 - DNA, 24 bp, Artificial sequence
  SiRNA target sequence
atataatcatatcaatatctaata

SEQ ID NO: 103541 - DNA, 24 bp, Artificial sequence
  SiRNA target sequence
tataatcatatcaatatctaatat

SEQ ID NO: 103542 - DNA, 24 bp, Artificial sequence
  SiRNA target sequence
ataatcatatcaatatctaatatt

SEQ ID NO: 103543 - DNA, 24 bp, Artificial sequence
  SiRNA target sequence
taatcatatcaatatctaatattt

SEQ ID NO: 103544 - DNA, 24 bp, Artificial sequence
  SiRNA target sequence
aatcatatcaatatctaatatttt

SEQ ID NO: 103545 - DNA, 24 bp, Artificial sequence
  SiRNA target sequence
atcatatcaatatctaatattttt

SEQ ID NO: 103546 - DNA, 24 bp, Artificial sequence
  SiRNA target sequence
tcatatcaatatctaatatttttt

SEQ ID NO: 103547 - DNA, 24 bp, Artificial sequence
  SiRNA target sequence
catatcaatatctaatattttttc

SEQ ID NO: 103548 - DNA, 24 bp, Artificial sequence
  SiRNA target sequence
atatcaatatctaatattttttcg

SEQ ID NO: 103549 - DNA, 24 bp, Artificial sequence
  SiRNA target sequence
tatcaatatctaatattttttcga

SEQ ID NO: 103550 - DNA, 24 bp, Artificial sequence
  SiRNA target sequence
atcaatatctaatattttttcgaa

SEQ ID NO: 103551 - DNA, 24 bp, Artificial sequence
  SiRNA target sequence
tcaatatctaatattttttcgaaa

SEQ ID NO: 103552 - DNA, 24 bp, Artificial sequence
  SiRNA target sequence
caatatctaatattttttcgaaat

SEQ ID NO: 103553 - DNA, 24 bp, Artificial sequence
  SiRNA target sequence
aatatctaatattttttcgaaatc

SEQ ID NO: 103554 - DNA, 24 bp, Artificial sequence
  SiRNA target sequence
atatctaatattttttcgaaatca

SEQ ID NO: 103555 - DNA, 24 bp, Artificial sequence
  SiRNA target sequence
tatctaatattttttcgaaatcaa

SEQ ID NO: 103556 - DNA, 24 bp, Artificial sequence
  SiRNA target sequence
atctaatattttttcgaaatcaaa

SEQ ID NO: 103557 - DNA, 24 bp, Artificial sequence
  SiRNA target sequence
tctaatattttttcgaaatcaaaa

SEQ ID NO: 103558 - DNA, 24 bp, Artificial sequence
  SiRNA target sequence
ctaatattttttcgaaatcaaaac

SEQ ID NO: 103559 - DNA, 24 bp, Artificial sequence
  SiRNA target sequence
taatattttttcgaaatcaaaact

SEQ ID NO: 103560 - DNA, 24 bp, Artificial sequence
  SiRNA target sequence
aatattttttcgaaatcaaaactg

SEQ ID NO: 103561 - DNA, 24 bp, Artificial sequence
  SiRNA target sequence
atattttttcgaaatcaaaactgt

SEQ ID NO: 103562 - DNA, 24 bp, Artificial sequence
  SiRNA target sequence
tattttttcgaaatcaaaactgtc

SEQ ID NO: 103563 - DNA, 24 bp, Artificial sequence
  SiRNA target sequence
attttttcgaaatcaaaactgtcc

SEQ ID NO: 103564 - DNA, 24 bp, Artificial sequence
  SiRNA target sequence
ttttttcgaaatcaaaactgtcca

SEQ ID NO: 103565 - DNA, 24 bp, Artificial sequence
  SiRNA target sequence
tttttcgaaatcaaaactgtccat

SEQ ID NO: 103566 - DNA, 24 bp, Artificial sequence
  SiRNA target sequence
ttttcgaaatcaaaactgtccata

SEQ ID NO: 103567 - DNA, 24 bp, Artificial sequence
  SiRNA target sequence
tttcgaaatcaaaactgtccatat

SEQ ID NO: 103568 - DNA, 24 bp, Artificial sequence
  SiRNA target sequence
ttcgaaatcaaaactgtccatatc

SEQ ID NO: 103569 - DNA, 24 bp, Artificial sequence
  SiRNA target sequence
tcgaaatcaaaactgtccatatct

SEQ ID NO: 103570 - DNA, 24 bp, Artificial sequence
  SiRNA target sequence
cgaaatcaaaactgtccatatcta

SEQ ID NO: 103571 - DNA, 24 bp, Artificial sequence
  SiRNA target sequence
gaaatcaaaactgtccatatctaa

SEQ ID NO: 103572 - DNA, 24 bp, Artificial sequence
  SiRNA target sequence
aaatcaaaactgtccatatctaaa

SEQ ID NO: 103573 - DNA, 24 bp, Artificial sequence
  SiRNA target sequence
aatcaaaactgtccatatctaaag

SEQ ID NO: 103574 - DNA, 24 bp, Artificial sequence
  SiRNA target sequence
atcaaaactgtccatatctaaagt

SEQ ID NO: 103575 - DNA, 24 bp, Artificial sequence
  SiRNA target sequence
tcaaaactgtccatatctaaagta

SEQ ID NO: 103576 - DNA, 24 bp, Artificial sequence
  SiRNA target sequence
caaaactgtccatatctaaagtaa

SEQ ID NO: 103577 - DNA, 24 bp, Artificial sequence
  SiRNA target sequence
aaaactgtccatatctaaagtaaa

SEQ ID NO: 103578 - DNA, 24 bp, Artificial sequence
  SiRNA target sequence
aaactgtccatatctaaagtaaaa

SEQ ID NO: 103579 - DNA, 24 bp, Artificial sequence
  SiRNA target sequence
aactgtccatatctaaagtaaaat

SEQ ID NO: 103580 - DNA, 24 bp, Artificial sequence
  SiRNA target sequence
actgtccatatctaaagtaaaatc

SEQ ID NO: 103581 - DNA, 24 bp, Artificial sequence
  SiRNA target sequence
ctgtccatatctaaagtaaaatct

SEQ ID NO: 103582 - DNA, 24 bp, Artificial sequence
  SiRNA target sequence
tgtccatatctaaagtaaaatctg

SEQ ID NO: 103583 - DNA, 24 bp, Artificial sequence
  SiRNA target sequence
gtccatatctaaagtaaaatctgt

SEQ ID NO: 103584 - DNA, 24 bp, Artificial sequence
  SiRNA target sequence
tccatatctaaagtaaaatctgtt

SEQ ID NO: 103585 - DNA, 24 bp, Artificial sequence
  SiRNA target sequence
ccatatctaaagtaaaatctgttg

SEQ ID NO: 103586 - DNA, 24 bp, Artificial sequence
  SiRNA target sequence
catatctaaagtaaaatctgttgg

SEQ ID NO: 103587 - DNA, 24 bp, Artificial sequence
  SiRNA target sequence
atatctaaagtaaaatctgttgga

SEQ ID NO: 103588 - DNA, 24 bp, Artificial sequence
  SiRNA target sequence
tatctaaagtaaaatctgttggaa

SEQ ID NO: 103589 - DNA, 24 bp, Artificial sequence
  SiRNA target sequence
atctaaagtaaaatctgttggaag

SEQ ID NO: 103590 - DNA, 24 bp, Artificial sequence
  SiRNA target sequence
tctaaagtaaaatctgttggaagc

SEQ ID NO: 103591 - DNA, 24 bp, Artificial sequence
  SiRNA target sequence
ctaaagtaaaatctgttggaagca

SEQ ID NO: 103592 - DNA, 24 bp, Artificial sequence
  SiRNA target sequence
taaagtaaaatctgttggaagcaa

SEQ ID NO: 103593 - DNA, 24 bp, Artificial sequence
  SiRNA target sequence
aaagtaaaatctgttggaagcaat

SEQ ID NO: 103594 - DNA, 24 bp, Artificial sequence
  SiRNA target sequence
aagtaaaatctgttggaagcaatt

SEQ ID NO: 103595 - DNA, 24 bp, Artificial sequence
  SiRNA target sequence
agtaaaatctgttggaagcaattc

SEQ ID NO: 103596 - DNA, 24 bp, Artificial sequence
  SiRNA target sequence
gtaaaatctgttggaagcaattct

SEQ ID NO: 103597 - DNA, 24 bp, Artificial sequence
  SiRNA target sequence
taaaatctgttggaagcaattctt

SEQ ID NO: 103598 - DNA, 24 bp, Artificial sequence
  SiRNA target sequence
aaaatctgttggaagcaattcttt

SEQ ID NO: 103599 - DNA, 24 bp, Artificial sequence
  SiRNA target sequence
aaatctgttggaagcaattcttta

SEQ ID NO: 103600 - DNA, 24 bp, Artificial sequence
  SiRNA target sequence
aatctgttggaagcaattctttat

SEQ ID NO: 103601 - DNA, 24 bp, Artificial sequence
  SiRNA target sequence
atctgttggaagcaattctttatc

SEQ ID NO: 103602 - DNA, 24 bp, Artificial sequence
  SiRNA target sequence
tctgttggaagcaattctttatca

SEQ ID NO: 103603 - DNA, 24 bp, Artificial sequence
  SiRNA target sequence
ctgttggaagcaattctttatcaa

SEQ ID NO: 103604 - DNA, 24 bp, Artificial sequence
  SiRNA target sequence
tgttggaagcaattctttatcaac

SEQ ID NO: 103605 - DNA, 24 bp, Artificial sequence
  SiRNA target sequence
gttggaagcaattctttatcaacg

SEQ ID NO: 103606 - DNA, 24 bp, Artificial sequence
  SiRNA target sequence
ttggaagcaattctttatcaacgt

SEQ ID NO: 103607 - DNA, 24 bp, Artificial sequence
  SiRNA target sequence
tggaagcaattctttatcaacgtt

SEQ ID NO: 103608 - DNA, 24 bp, Artificial sequence
  SiRNA target sequence
ggaagcaattctttatcaacgtta

SEQ ID NO: 103609 - DNA, 24 bp, Artificial sequence
  SiRNA target sequence
gaagcaattctttatcaacgttat

SEQ ID NO: 103610 - DNA, 24 bp, Artificial sequence
  SiRNA target sequence
aagcaattctttatcaacgttata

SEQ ID NO: 103611 - DNA, 24 bp, Artificial sequence
  SiRNA target sequence
agcaattctttatcaacgttataa

SEQ ID NO: 103612 - DNA, 24 bp, Artificial sequence
  SiRNA target sequence
gcaattctttatcaacgttataaa

SEQ ID NO: 103613 - DNA, 24 bp, Artificial sequence
  SiRNA target sequence
caattctttatcaacgttataaat

SEQ ID NO: 103614 - DNA, 24 bp, Artificial sequence
  SiRNA target sequence
aattctttatcaacgttataaatc

SEQ ID NO: 103615 - DNA, 24 bp, Artificial sequence
  SiRNA target sequence
attctttatcaacgttataaatca

SEQ ID NO: 103616 - DNA, 24 bp, Artificial sequence
  SiRNA target sequence
ttctttatcaacgttataaatcaa

SEQ ID NO: 103617 - DNA, 24 bp, Artificial sequence
  SiRNA target sequence
tctttatcaacgttataaatcaaa

SEQ ID NO: 103618 - DNA, 24 bp, Artificial sequence
  SiRNA target sequence
ctttatcaacgttataaatcaaat

SEQ ID NO: 103619 - DNA, 24 bp, Artificial sequence
  SiRNA target sequence
tttatcaacgttataaatcaaatc

SEQ ID NO: 103620 - DNA, 24 bp, Artificial sequence
  SiRNA target sequence
ttatcaacgttataaatcaaatct

SEQ ID NO: 103621 - DNA, 24 bp, Artificial sequence
  SiRNA target sequence
tatcaacgttataaatcaaatctt

SEQ ID NO: 103622 - DNA, 24 bp, Artificial sequence
  SiRNA target sequence
atcaacgttataaatcaaatcttt

SEQ ID NO: 103623 - DNA, 24 bp, Artificial sequence
  SiRNA target sequence
tcaacgttataaatcaaatcttta

SEQ ID NO: 103624 - DNA, 24 bp, Artificial sequence
  SiRNA target sequence
caacgttataaatcaaatctttat

SEQ ID NO: 103625 - DNA, 24 bp, Artificial sequence
  SiRNA target sequence
aacgttataaatcaaatctttatt

SEQ ID NO: 103626 - DNA, 24 bp, Artificial sequence
  SiRNA target sequence
acgttataaatcaaatctttattg

SEQ ID NO: 103627 - DNA, 24 bp, Artificial sequence
  SiRNA target sequence
cgttataaatcaaatctttattgt

SEQ ID NO: 103628 - DNA, 24 bp, Artificial sequence
  SiRNA target sequence
gttataaatcaaatctttattgta

SEQ ID NO: 103629 - DNA, 24 bp, Artificial sequence
  SiRNA target sequence
ttataaatcaaatctttattgtat

SEQ ID NO: 103630 - DNA, 24 bp, Artificial sequence
  SiRNA target sequence
tataaatcaaatctttattgtatc

SEQ ID NO: 103631 - DNA, 24 bp, Artificial sequence
  SiRNA target sequence
ataaatcaaatctttattgtatcc

SEQ ID NO: 103632 - DNA, 24 bp, Artificial sequence
  SiRNA target sequence
taaatcaaatctttattgtatccg

SEQ ID NO: 103633 - DNA, 24 bp, Artificial sequence
  SiRNA target sequence
aaatcaaatctttattgtatccgt

SEQ ID NO: 103634 - DNA, 24 bp, Artificial sequence
  SiRNA target sequence
aatcaaatctttattgtatccgta

SEQ ID NO: 103635 - DNA, 24 bp, Artificial sequence
  SiRNA target sequence
atcaaatctttattgtatccgtat

SEQ ID NO: 103636 - DNA, 24 bp, Artificial sequence
  SiRNA target sequence
tcaaatctttattgtatccgtata

SEQ ID NO: 103637 - DNA, 24 bp, Artificial sequence
  SiRNA target sequence
caaatctttattgtatccgtatag

SEQ ID NO: 103638 - DNA, 24 bp, Artificial sequence
  SiRNA target sequence
aaatctttattgtatccgtatagt

SEQ ID NO: 103639 - DNA, 24 bp, Artificial sequence
  SiRNA target sequence
aatctttattgtatccgtatagta

SEQ ID NO: 103640 - DNA, 24 bp, Artificial sequence
  SiRNA target sequence
atctttattgtatccgtatagtat

SEQ ID NO: 103641 - DNA, 24 bp, Artificial sequence
  SiRNA target sequence
tctttattgtatccgtatagtata

SEQ ID NO: 103642 - DNA, 24 bp, Artificial sequence
  SiRNA target sequence
ctttattgtatccgtatagtataa

SEQ ID NO: 103643 - DNA, 24 bp, Artificial sequence
  SiRNA target sequence
tttattgtatccgtatagtataac

SEQ ID NO: 103644 - DNA, 24 bp, Artificial sequence
  SiRNA target sequence
ttattgtatccgtatagtataaca

SEQ ID NO: 103645 - DNA, 24 bp, Artificial sequence
  SiRNA target sequence
tattgtatccgtatagtataacat

SEQ ID NO: 103646 - DNA, 24 bp, Artificial sequence
  SiRNA target sequence
attgtatccgtatagtataacatt

SEQ ID NO: 103647 - DNA, 24 bp, Artificial sequence
  SiRNA target sequence
ttgtatccgtatagtataacattt

SEQ ID NO: 103648 - DNA, 24 bp, Artificial sequence
  SiRNA target sequence
tgtatccgtatagtataacatttt

SEQ ID NO: 103649 - DNA, 24 bp, Artificial sequence
  SiRNA target sequence
gtatccgtatagtataacattttg

SEQ ID NO: 103650 - DNA, 24 bp, Artificial sequence
  SiRNA target sequence
tatccgtatagtataacattttga

SEQ ID NO: 103651 - DNA, 24 bp, Artificial sequence
  SiRNA target sequence
atccgtatagtataacattttgaa

SEQ ID NO: 103652 - DNA, 24 bp, Artificial sequence
  SiRNA target sequence
tccgtatagtataacattttgaat

SEQ ID NO: 103653 - DNA, 24 bp, Artificial sequence
  SiRNA target sequence
ccgtatagtataacattttgaata

SEQ ID NO: 103654 - DNA, 24 bp, Artificial sequence
  SiRNA target sequence
cgtatagtataacattttgaataa

SEQ ID NO: 103655 - DNA, 24 bp, Artificial sequence
  SiRNA target sequence
gtatagtataacattttgaataag

SEQ ID NO: 103656 - DNA, 24 bp, Artificial sequence
  SiRNA target sequence
tatagtataacattttgaataagt

SEQ ID NO: 103657 - DNA, 24 bp, Artificial sequence
  SiRNA target sequence
atagtataacattttgaataagtt

SEQ ID NO: 103658 - DNA, 24 bp, Artificial sequence
  SiRNA target sequence
tagtataacattttgaataagttt

SEQ ID NO: 103659 - DNA, 24 bp, Artificial sequence
  SiRNA target sequence
agtataacattttgaataagttta

SEQ ID NO: 103660 - DNA, 24 bp, Artificial sequence
  SiRNA target sequence
gtataacattttgaataagtttag

SEQ ID NO: 103661 - DNA, 24 bp, Artificial sequence
  SiRNA target sequence
tataacattttgaataagtttagc

SEQ ID NO: 103662 - DNA, 24 bp, Artificial sequence
  SiRNA target sequence
ataacattttgaataagtttagca

SEQ ID NO: 103663 - DNA, 24 bp, Artificial sequence
  SiRNA target sequence
taacattttgaataagtttagcaa

SEQ ID NO: 103664 - DNA, 24 bp, Artificial sequence
  SiRNA target sequence
aacattttgaataagtttagcaat

SEQ ID NO: 103665 - DNA, 24 bp, Artificial sequence
  SiRNA target sequence
acattttgaataagtttagcaata

SEQ ID NO: 103666 - DNA, 24 bp, Artificial sequence
  SiRNA target sequence
cattttgaataagtttagcaatat

SEQ ID NO: 103667 - DNA, 24 bp, Artificial sequence
  SiRNA target sequence
attttgaataagtttagcaatatg

SEQ ID NO: 103668 - DNA, 24 bp, Artificial sequence
  SiRNA target sequence
ttttgaataagtttagcaatatgt

SEQ ID NO: 103669 - DNA, 24 bp, Artificial sequence
  SiRNA target sequence
tttgaataagtttagcaatatgta

SEQ ID NO: 103670 - DNA, 24 bp, Artificial sequence
  SiRNA target sequence
ttgaataagtttagcaatatgtat

SEQ ID NO: 103671 - DNA, 24 bp, Artificial sequence
  SiRNA target sequence
tgaataagtttagcaatatgtata

SEQ ID NO: 103672 - DNA, 24 bp, Artificial sequence
  SiRNA target sequence
gaataagtttagcaatatgtatag

SEQ ID NO: 103673 - DNA, 24 bp, Artificial sequence
  SiRNA target sequence
aataagtttagcaatatgtataga

SEQ ID NO: 103674 - DNA, 24 bp, Artificial sequence
  SiRNA target sequence
ataagtttagcaatatgtatagaa

SEQ ID NO: 103675 - DNA, 24 bp, Artificial sequence
  SiRNA target sequence
taagtttagcaatatgtatagaat

SEQ ID NO: 103676 - DNA, 24 bp, Artificial sequence
  SiRNA target sequence
aagtttagcaatatgtatagaatt

SEQ ID NO: 103677 - DNA, 24 bp, Artificial sequence
  SiRNA target sequence
agtttagcaatatgtatagaattt

SEQ ID NO: 103678 - DNA, 24 bp, Artificial sequence
  SiRNA target sequence
gtttagcaatatgtatagaatttc

SEQ ID NO: 103679 - DNA, 24 bp, Artificial sequence
  SiRNA target sequence
tttagcaatatgtatagaatttcc

SEQ ID NO: 103680 - DNA, 24 bp, Artificial sequence
  SiRNA target sequence
ttagcaatatgtatagaatttcct

SEQ ID NO: 103681 - DNA, 24 bp, Artificial sequence
  SiRNA target sequence
tagcaatatgtatagaatttcctg

SEQ ID NO: 103682 - DNA, 24 bp, Artificial sequence
  SiRNA target sequence
agcaatatgtatagaatttcctgt

SEQ ID NO: 103683 - DNA, 24 bp, Artificial sequence
  SiRNA target sequence
gcaatatgtatagaatttcctgtt

SEQ ID NO: 103684 - DNA, 24 bp, Artificial sequence
  SiRNA target sequence
caatatgtatagaatttcctgttt

SEQ ID NO: 103685 - DNA, 24 bp, Artificial sequence
  SiRNA target sequence
aatatgtatagaatttcctgtttg

SEQ ID NO: 103686 - DNA, 24 bp, Artificial sequence
  SiRNA target sequence
atatgtatagaatttcctgtttgg

SEQ ID NO: 103687 - DNA, 24 bp, Artificial sequence
  SiRNA target sequence
tatgtatagaatttcctgtttggg

SEQ ID NO: 103688 - DNA, 24 bp, Artificial sequence
  SiRNA target sequence
atgtatagaatttcctgtttggga

SEQ ID NO: 103689 - DNA, 24 bp, Artificial sequence
  SiRNA target sequence
tgtatagaatttcctgtttgggag

SEQ ID NO: 103690 - DNA, 24 bp, Artificial sequence
  SiRNA target sequence
gtatagaatttcctgtttgggagc

SEQ ID NO: 103691 - DNA, 24 bp, Artificial sequence
  SiRNA target sequence
tatagaatttcctgtttgggagcc

SEQ ID NO: 103692 - DNA, 24 bp, Artificial sequence
  SiRNA target sequence
atagaatttcctgtttgggagcca

SEQ ID NO: 103693 - DNA, 24 bp, Artificial sequence
  SiRNA target sequence
tagaatttcctgtttgggagccat

SEQ ID NO: 103694 - DNA, 24 bp, Artificial sequence
  SiRNA target sequence
agaatttcctgtttgggagccata

SEQ ID NO: 103695 - DNA, 24 bp, Artificial sequence
  SiRNA target sequence
gaatttcctgtttgggagccatat

SEQ ID NO: 103696 - DNA, 24 bp, Artificial sequence
  SiRNA target sequence
aatttcctgtttgggagccatata

SEQ ID NO: 103697 - DNA, 24 bp, Artificial sequence
  SiRNA target sequence
atttcctgtttgggagccatataa

SEQ ID NO: 103698 - DNA, 24 bp, Artificial sequence
  SiRNA target sequence
tttcctgtttgggagccatataag

SEQ ID NO: 103699 - DNA, 24 bp, Artificial sequence
  SiRNA target sequence
ttcctgtttgggagccatataaga

SEQ ID NO: 103700 - DNA, 24 bp, Artificial sequence
  SiRNA target sequence
tcctgtttgggagccatataagat

SEQ ID NO: 103701 - DNA, 24 bp, Artificial sequence
  SiRNA target sequence
cctgtttgggagccatataagatt

SEQ ID NO: 103702 - DNA, 24 bp, Artificial sequence
  SiRNA target sequence
ctgtttgggagccatataagatta

SEQ ID NO: 103703 - DNA, 24 bp, Artificial sequence
  SiRNA target sequence
tgtttgggagccatataagattat

SEQ ID NO: 103704 - DNA, 24 bp, Artificial sequence
  SiRNA target sequence
gtttgggagccatataagattatc

SEQ ID NO: 103705 - DNA, 24 bp, Artificial sequence
  SiRNA target sequence
tttgggagccatataagattatca

SEQ ID NO: 103706 - DNA, 24 bp, Artificial sequence
  SiRNA target sequence
ttgggagccatataagattatcat

SEQ ID NO: 103707 - DNA, 25 bp, Artificial sequence
  SiRNA target sequence
ttaccaagtttctgcctgaaaatat

SEQ ID NO: 103708 - DNA, 25 bp, Artificial sequence
  SiRNA target sequence
taccaagtttctgcctgaaaatata

SEQ ID NO: 103709 - DNA, 25 bp, Artificial sequence
  SiRNA target sequence
accaagtttctgcctgaaaatatat

SEQ ID NO: 103710 - DNA, 25 bp, Artificial sequence
  SiRNA target sequence
ccaagtttctgcctgaaaatatatt

SEQ ID NO: 103711 - DNA, 25 bp, Artificial sequence
  SiRNA target sequence
caagtttctgcctgaaaatatattt

SEQ ID NO: 103712 - DNA, 25 bp, Artificial sequence
  SiRNA target sequence
aagtttctgcctgaaaatatatttt

SEQ ID NO: 103713 - DNA, 25 bp, Artificial sequence
  SiRNA target sequence
agtttctgcctgaaaatatattttc

SEQ ID NO: 103714 - DNA, 25 bp, Artificial sequence
  SiRNA target sequence
gtttctgcctgaaaatatattttct

SEQ ID NO: 103715 - DNA, 25 bp, Artificial sequence
  SiRNA target sequence
tttctgcctgaaaatatattttctt

SEQ ID NO: 103716 - DNA, 25 bp, Artificial sequence
  SiRNA target sequence
ttctgcctgaaaatatattttcttt

SEQ ID NO: 103717 - DNA, 25 bp, Artificial sequence
  SiRNA target sequence
tctgcctgaaaatatattttctttt

SEQ ID NO: 103718 - DNA, 25 bp, Artificial sequence
  SiRNA target sequence
ctgcctgaaaatatattttcttttt

SEQ ID NO: 103719 - DNA, 25 bp, Artificial sequence
  SiRNA target sequence
tgcctgaaaatatattttcttttta

SEQ ID NO: 103720 - DNA, 25 bp, Artificial sequence
  SiRNA target sequence
gcctgaaaatatattttctttttat

SEQ ID NO: 103721 - DNA, 25 bp, Artificial sequence
  SiRNA target sequence
cctgaaaatatattttctttttata

SEQ ID NO: 103722 - DNA, 25 bp, Artificial sequence
  SiRNA target sequence
ctgaaaatatattttctttttataa

SEQ ID NO: 103723 - DNA, 25 bp, Artificial sequence
  SiRNA target sequence
tgaaaatatattttctttttataaa

SEQ ID NO: 103724 - DNA, 25 bp, Artificial sequence
  SiRNA target sequence
gaaaatatattttctttttataaat

SEQ ID NO: 103725 - DNA, 25 bp, Artificial sequence
  SiRNA target sequence
aaaatatattttctttttataaata

SEQ ID NO: 103726 - DNA, 25 bp, Artificial sequence
  SiRNA target sequence
aaatatattttctttttataaatat

SEQ ID NO: 103727 - DNA, 25 bp, Artificial sequence
  SiRNA target sequence
aatatattttctttttataaatatc

SEQ ID NO: 103728 - DNA, 25 bp, Artificial sequence
  SiRNA target sequence
atatattttctttttataaatatct

SEQ ID NO: 103729 - DNA, 25 bp, Artificial sequence
  SiRNA target sequence
tatattttctttttataaatatcta

SEQ ID NO: 103730 - DNA, 25 bp, Artificial sequence
  SiRNA target sequence
atattttctttttataaatatctaa

SEQ ID NO: 103731 - DNA, 25 bp, Artificial sequence
  SiRNA target sequence
tattttctttttataaatatctaat

SEQ ID NO: 103732 - DNA, 25 bp, Artificial sequence
  SiRNA target sequence
attttctttttataaatatctaata

SEQ ID NO: 103733 - DNA, 25 bp, Artificial sequence
  SiRNA target sequence
ttttctttttataaatatctaataa

SEQ ID NO: 103734 - DNA, 25 bp, Artificial sequence
  SiRNA target sequence
tttctttttataaatatctaataac

SEQ ID NO: 103735 - DNA, 25 bp, Artificial sequence
  SiRNA target sequence
ttctttttataaatatctaataaca

SEQ ID NO: 103736 - DNA, 25 bp, Artificial sequence
  SiRNA target sequence
tctttttataaatatctaataacat

SEQ ID NO: 103737 - DNA, 25 bp, Artificial sequence
  SiRNA target sequence
ctttttataaatatctaataacatt

SEQ ID NO: 103738 - DNA, 25 bp, Artificial sequence
  SiRNA target sequence
tttttataaatatctaataacattt

SEQ ID NO: 103739 - DNA, 25 bp, Artificial sequence
  SiRNA target sequence
ttttataaatatctaataacatttt

SEQ ID NO: 103740 - DNA, 25 bp, Artificial sequence
  SiRNA target sequence
tttataaatatctaataacattttt

SEQ ID NO: 103741 - DNA, 25 bp, Artificial sequence
  SiRNA target sequence
ttataaatatctaataacatttttt

SEQ ID NO: 103742 - DNA, 25 bp, Artificial sequence
  SiRNA target sequence
tataaatatctaataacattttttc

SEQ ID NO: 103743 - DNA, 25 bp, Artificial sequence
  SiRNA target sequence
ataaatatctaataacattttttca

SEQ ID NO: 103744 - DNA, 25 bp, Artificial sequence
  SiRNA target sequence
taaatatctaataacattttttcaa

SEQ ID NO: 103745 - DNA, 25 bp, Artificial sequence
  SiRNA target sequence
aaatatctaataacattttttcaat

SEQ ID NO: 103746 - DNA, 25 bp, Artificial sequence
  SiRNA target sequence
aatatctaataacattttttcaata

SEQ ID NO: 103747 - DNA, 25 bp, Artificial sequence
  SiRNA target sequence
atatctaataacattttttcaataa

SEQ ID NO: 103748 - DNA, 25 bp, Artificial sequence
  SiRNA target sequence
tatctaataacattttttcaataat

SEQ ID NO: 103749 - DNA, 25 bp, Artificial sequence
  SiRNA target sequence
atctaataacattttttcaataata

SEQ ID NO: 103750 - DNA, 25 bp, Artificial sequence
  SiRNA target sequence
tctaataacattttttcaataatat

SEQ ID NO: 103751 - DNA, 25 bp, Artificial sequence
  SiRNA target sequence
ctaataacattttttcaataatatt

SEQ ID NO: 103752 - DNA, 25 bp, Artificial sequence
  SiRNA target sequence
taataacattttttcaataatatta

SEQ ID NO: 103753 - DNA, 25 bp, Artificial sequence
  SiRNA target sequence
aataacattttttcaataatattat

SEQ ID NO: 103754 - DNA, 25 bp, Artificial sequence
  SiRNA target sequence
ataacattttttcaataatattatt

SEQ ID NO: 103755 - DNA, 25 bp, Artificial sequence
  SiRNA target sequence
taacattttttcaataatattatta

SEQ ID NO: 103756 - DNA, 25 bp, Artificial sequence
  SiRNA target sequence
aacattttttcaataatattattaa

SEQ ID NO: 103757 - DNA, 25 bp, Artificial sequence
  SiRNA target sequence
acattttttcaataatattattaag

SEQ ID NO: 103758 - DNA, 25 bp, Artificial sequence
  SiRNA target sequence
cattttttcaataatattattaagt

SEQ ID NO: 103759 - DNA, 25 bp, Artificial sequence
  SiRNA target sequence
attttttcaataatattattaagtc

SEQ ID NO: 103760 - DNA, 25 bp, Artificial sequence
  SiRNA target sequence
ttttttcaataatattattaagtct

SEQ ID NO: 103761 - DNA, 25 bp, Artificial sequence
  SiRNA target sequence
tttttcaataatattattaagtcta

SEQ ID NO: 103762 - DNA, 25 bp, Artificial sequence
  SiRNA target sequence
ttttcaataatattattaagtctag

SEQ ID NO: 103763 - DNA, 25 bp, Artificial sequence
  SiRNA target sequence
tttcaataatattattaagtctaga

SEQ ID NO: 103764 - DNA, 25 bp, Artificial sequence
  SiRNA target sequence
ttcaataatattattaagtctagaa

SEQ ID NO: 103765 - DNA, 25 bp, Artificial sequence
  SiRNA target sequence
tcaataatattattaagtctagaat

SEQ ID NO: 103766 - DNA, 25 bp, Artificial sequence
  SiRNA target sequence
caataatattattaagtctagaatt

SEQ ID NO: 103767 - DNA, 25 bp, Artificial sequence
  SiRNA target sequence
aataatattattaagtctagaattt

SEQ ID NO: 103768 - DNA, 25 bp, Artificial sequence
  SiRNA target sequence
ataatattattaagtctagaatttc

SEQ ID NO: 103769 - DNA, 25 bp, Artificial sequence
  SiRNA target sequence
taatattattaagtctagaatttcc

SEQ ID NO: 103770 - DNA, 25 bp, Artificial sequence
  SiRNA target sequence
aatattattaagtctagaatttcca

SEQ ID NO: 103771 - DNA, 25 bp, Artificial sequence
  SiRNA target sequence
atattattaagtctagaatttccac

SEQ ID NO: 103772 - DNA, 25 bp, Artificial sequence
  SiRNA target sequence
tattattaagtctagaatttccact

SEQ ID NO: 103773 - DNA, 25 bp, Artificial sequence
  SiRNA target sequence
attattaagtctagaatttccactt

SEQ ID NO: 103774 - DNA, 25 bp, Artificial sequence
  SiRNA target sequence
ttattaagtctagaatttccactta

SEQ ID NO: 103775 - DNA, 25 bp, Artificial sequence
  SiRNA target sequence
tattaagtctagaatttccacttac

SEQ ID NO: 103776 - DNA, 25 bp, Artificial sequence
  SiRNA target sequence
attaagtctagaatttccacttaca

SEQ ID NO: 103777 - DNA, 25 bp, Artificial sequence
  SiRNA target sequence
ttaagtctagaatttccacttacaa

SEQ ID NO: 103778 - DNA, 25 bp, Artificial sequence
  SiRNA target sequence
taagtctagaatttccacttacaaa

SEQ ID NO: 103779 - DNA, 25 bp, Artificial sequence
  SiRNA target sequence
aagtctagaatttccacttacaaat

SEQ ID NO: 103780 - DNA, 25 bp, Artificial sequence
  SiRNA target sequence
agtctagaatttccacttacaaata

SEQ ID NO: 103781 - DNA, 25 bp, Artificial sequence
  SiRNA target sequence
gtctagaatttccacttacaaatat

SEQ ID NO: 103782 - DNA, 25 bp, Artificial sequence
  SiRNA target sequence
tctagaatttccacttacaaatatt

SEQ ID NO: 103783 - DNA, 25 bp, Artificial sequence
  SiRNA target sequence
ctagaatttccacttacaaatatta

SEQ ID NO: 103784 - DNA, 25 bp, Artificial sequence
  SiRNA target sequence
tagaatttccacttacaaatattaa

SEQ ID NO: 103785 - DNA, 25 bp, Artificial sequence
  SiRNA target sequence
agaatttccacttacaaatattaac

SEQ ID NO: 103786 - DNA, 25 bp, Artificial sequence
  SiRNA target sequence
gaatttccacttacaaatattaacc

SEQ ID NO: 103787 - DNA, 25 bp, Artificial sequence
  SiRNA target sequence
aatttccacttacaaatattaacca

SEQ ID NO: 103788 - DNA, 25 bp, Artificial sequence
  SiRNA target sequence
atttccacttacaaatattaaccaa

SEQ ID NO: 103789 - DNA, 25 bp, Artificial sequence
  SiRNA target sequence
tttccacttacaaatattaaccaat

SEQ ID NO: 103790 - DNA, 25 bp, Artificial sequence
  SiRNA target sequence
ttccacttacaaatattaaccaatc

SEQ ID NO: 103791 - DNA, 25 bp, Artificial sequence
  SiRNA target sequence
tccacttacaaatattaaccaatca

SEQ ID NO: 103792 - DNA, 25 bp, Artificial sequence
  SiRNA target sequence
ccacttacaaatattaaccaatcat

SEQ ID NO: 103793 - DNA, 25 bp, Artificial sequence
  SiRNA target sequence
cacttacaaatattaaccaatcatc

SEQ ID NO: 103794 - DNA, 25 bp, Artificial sequence
  SiRNA target sequence
acttacaaatattaaccaatcatca

SEQ ID NO: 103795 - DNA, 25 bp, Artificial sequence
  SiRNA target sequence
cttacaaatattaaccaatcatcaa

SEQ ID NO: 103796 - DNA, 25 bp, Artificial sequence
  SiRNA target sequence
ttacaaatattaaccaatcatcaat

SEQ ID NO: 103797 - DNA, 25 bp, Artificial sequence
  SiRNA target sequence
tacaaatattaaccaatcatcaata

SEQ ID NO: 103798 - DNA, 25 bp, Artificial sequence
  SiRNA target sequence
acaaatattaaccaatcatcaatat

SEQ ID NO: 103799 - DNA, 25 bp, Artificial sequence
  SiRNA target sequence
caaatattaaccaatcatcaatatt

SEQ ID NO: 103800 - DNA, 25 bp, Artificial sequence
  SiRNA target sequence
aaatattaaccaatcatcaatattt

SEQ ID NO: 103801 - DNA, 25 bp, Artificial sequence
  SiRNA target sequence
aatattaaccaatcatcaatatttt

SEQ ID NO: 103802 - DNA, 25 bp, Artificial sequence
  SiRNA target sequence
atattaaccaatcatcaatattttc

SEQ ID NO: 103803 - DNA, 25 bp, Artificial sequence
  SiRNA target sequence
tattaaccaatcatcaatattttct

SEQ ID NO: 103804 - DNA, 25 bp, Artificial sequence
  SiRNA target sequence
attaaccaatcatcaatattttcta

SEQ ID NO: 103805 - DNA, 25 bp, Artificial sequence
  SiRNA target sequence
ttaaccaatcatcaatattttctag

SEQ ID NO: 103806 - DNA, 25 bp, Artificial sequence
  SiRNA target sequence
taaccaatcatcaatattttctagc

SEQ ID NO: 103807 - DNA, 25 bp, Artificial sequence
  SiRNA target sequence
aaccaatcatcaatattttctagcc

SEQ ID NO: 103808 - DNA, 25 bp, Artificial sequence
  SiRNA target sequence
accaatcatcaatattttctagccc

SEQ ID NO: 103809 - DNA, 25 bp, Artificial sequence
  SiRNA target sequence
ccaatcatcaatattttctagccct

SEQ ID NO: 103810 - DNA, 25 bp, Artificial sequence
  SiRNA target sequence
caatcatcaatattttctagccctt

SEQ ID NO: 103811 - DNA, 25 bp, Artificial sequence
  SiRNA target sequence
aatcatcaatattttctagcccttt

SEQ ID NO: 103812 - DNA, 25 bp, Artificial sequence
  SiRNA target sequence
atcatcaatattttctagccctttt

SEQ ID NO: 103813 - DNA, 25 bp, Artificial sequence
  SiRNA target sequence
tcatcaatattttctagccctttta

SEQ ID NO: 103814 - DNA, 25 bp, Artificial sequence
  SiRNA target sequence
catcaatattttctagcccttttat

SEQ ID NO: 103815 - DNA, 25 bp, Artificial sequence
  SiRNA target sequence
atcaatattttctagcccttttata

SEQ ID NO: 103816 - DNA, 25 bp, Artificial sequence
  SiRNA target sequence
tcaatattttctagcccttttatag

SEQ ID NO: 103817 - DNA, 25 bp, Artificial sequence
  SiRNA target sequence
caatattttctagcccttttatagt

SEQ ID NO: 103818 - DNA, 25 bp, Artificial sequence
  SiRNA target sequence
aatattttctagcccttttatagtc

SEQ ID NO: 103819 - DNA, 25 bp, Artificial sequence
  SiRNA target sequence
atattttctagcccttttatagtct

SEQ ID NO: 103820 - DNA, 25 bp, Artificial sequence
  SiRNA target sequence
tattttctagcccttttatagtctt

SEQ ID NO: 103821 - DNA, 25 bp, Artificial sequence
  SiRNA target sequence
attttctagcccttttatagtctta

SEQ ID NO: 103822 - DNA, 25 bp, Artificial sequence
  SiRNA target sequence
ttttctagcccttttatagtcttat

SEQ ID NO: 103823 - DNA, 25 bp, Artificial sequence
  SiRNA target sequence
tttctagcccttttatagtcttata

SEQ ID NO: 103824 - DNA, 25 bp, Artificial sequence
  SiRNA target sequence
ttctagcccttttatagtcttataa

SEQ ID NO: 103825 - DNA, 25 bp, Artificial sequence
  SiRNA target sequence
tctagcccttttatagtcttataaa

SEQ ID NO: 103826 - DNA, 25 bp, Artificial sequence
  SiRNA target sequence
ctagcccttttatagtcttataaat

SEQ ID NO: 103827 - DNA, 25 bp, Artificial sequence
  SiRNA target sequence
tagcccttttatagtcttataaata

SEQ ID NO: 103828 - DNA, 25 bp, Artificial sequence
  SiRNA target sequence
agcccttttatagtcttataaatat

SEQ ID NO: 103829 - DNA, 25 bp, Artificial sequence
  SiRNA target sequence
gcccttttatagtcttataaatatc

SEQ ID NO: 103830 - DNA, 25 bp, Artificial sequence
  SiRNA target sequence
cccttttatagtcttataaatatct

SEQ ID NO: 103831 - DNA, 25 bp, Artificial sequence
  SiRNA target sequence
ccttttatagtcttataaatatctt

SEQ ID NO: 103832 - DNA, 25 bp, Artificial sequence
  SiRNA target sequence
cttttatagtcttataaatatcttg

SEQ ID NO: 103833 - DNA, 25 bp, Artificial sequence
  SiRNA target sequence
ttttatagtcttataaatatcttgt

SEQ ID NO: 103834 - DNA, 25 bp, Artificial sequence
  SiRNA target sequence
tttatagtcttataaatatcttgta

SEQ ID NO: 103835 - DNA, 25 bp, Artificial sequence
  SiRNA target sequence
ttatagtcttataaatatcttgtat

SEQ ID NO: 103836 - DNA, 25 bp, Artificial sequence
  SiRNA target sequence
tatagtcttataaatatcttgtatg

SEQ ID NO: 103837 - DNA, 25 bp, Artificial sequence
  SiRNA target sequence
atagtcttataaatatcttgtatgt

SEQ ID NO: 103838 - DNA, 25 bp, Artificial sequence
  SiRNA target sequence
tagtcttataaatatcttgtatgta

SEQ ID NO: 103839 - DNA, 25 bp, Artificial sequence
  SiRNA target sequence
agtcttataaatatcttgtatgtat

SEQ ID NO: 103840 - DNA, 25 bp, Artificial sequence
  SiRNA target sequence
gtcttataaatatcttgtatgtatt

SEQ ID NO: 103841 - DNA, 25 bp, Artificial sequence
  SiRNA target sequence
tcttataaatatcttgtatgtattt

SEQ ID NO: 103842 - DNA, 25 bp, Artificial sequence
  SiRNA target sequence
cttataaatatcttgtatgtattta

SEQ ID NO: 103843 - DNA, 25 bp, Artificial sequence
  SiRNA target sequence
ttataaatatcttgtatgtatttat

SEQ ID NO: 103844 - DNA, 25 bp, Artificial sequence
  SiRNA target sequence
tataaatatcttgtatgtatttatt

SEQ ID NO: 103845 - DNA, 25 bp, Artificial sequence
  SiRNA target sequence
ataaatatcttgtatgtatttatta

SEQ ID NO: 103846 - DNA, 25 bp, Artificial sequence
  SiRNA target sequence
taaatatcttgtatgtatttattat

SEQ ID NO: 103847 - DNA, 25 bp, Artificial sequence
  SiRNA target sequence
aaatatcttgtatgtatttattatc

SEQ ID NO: 103848 - DNA, 25 bp, Artificial sequence
  SiRNA target sequence
aatatcttgtatgtatttattatct

SEQ ID NO: 103849 - DNA, 25 bp, Artificial sequence
  SiRNA target sequence
atatcttgtatgtatttattatctt

SEQ ID NO: 103850 - DNA, 25 bp, Artificial sequence
  SiRNA target sequence
tatcttgtatgtatttattatcttc

SEQ ID NO: 103851 - DNA, 25 bp, Artificial sequence
  SiRNA target sequence
atcttgtatgtatttattatcttcc

SEQ ID NO: 103852 - DNA, 25 bp, Artificial sequence
  SiRNA target sequence
tcttgtatgtatttattatcttccc

SEQ ID NO: 103853 - DNA, 25 bp, Artificial sequence
  SiRNA target sequence
cttgtatgtatttattatcttccct

SEQ ID NO: 103854 - DNA, 25 bp, Artificial sequence
  SiRNA target sequence
ttgtatgtatttattatcttccctt

SEQ ID NO: 103855 - DNA, 25 bp, Artificial sequence
  SiRNA target sequence
tgtatgtatttattatcttcccttg

SEQ ID NO: 103856 - DNA, 25 bp, Artificial sequence
  SiRNA target sequence
gtatgtatttattatcttcccttga

SEQ ID NO: 103857 - DNA, 25 bp, Artificial sequence
  SiRNA target sequence
tatgtatttattatcttcccttgaa

SEQ ID NO: 103858 - DNA, 25 bp, Artificial sequence
  SiRNA target sequence
atgtatttattatcttcccttgaaa

SEQ ID NO: 103859 - DNA, 25 bp, Artificial sequence
  SiRNA target sequence
tgtatttattatcttcccttgaaac

SEQ ID NO: 103860 - DNA, 25 bp, Artificial sequence
  SiRNA target sequence
gtatttattatcttcccttgaaaca

SEQ ID NO: 103861 - DNA, 25 bp, Artificial sequence
  SiRNA target sequence
tatttattatcttcccttgaaacag

SEQ ID NO: 103862 - DNA, 25 bp, Artificial sequence
  SiRNA target sequence
atttattatcttcccttgaaacagc

SEQ ID NO: 103863 - DNA, 25 bp, Artificial sequence
  SiRNA target sequence
tttattatcttcccttgaaacagcg

SEQ ID NO: 103864 - DNA, 25 bp, Artificial sequence
  SiRNA target sequence
ttattatcttcccttgaaacagcgg

SEQ ID NO: 103865 - DNA, 25 bp, Artificial sequence
  SiRNA target sequence
tattatcttcccttgaaacagcggg

SEQ ID NO: 103866 - DNA, 25 bp, Artificial sequence
  SiRNA target sequence
attatcttcccttgaaacagcgggg

SEQ ID NO: 103867 - DNA, 25 bp, Artificial sequence
  SiRNA target sequence
ttatcttcccttgaaacagcggggt

SEQ ID NO: 103868 - DNA, 25 bp, Artificial sequence
  SiRNA target sequence
tatcttcccttgaaacagcggggta

SEQ ID NO: 103869 - DNA, 25 bp, Artificial sequence
  SiRNA target sequence
atcttcccttgaaacagcggggtaa

SEQ ID NO: 103870 - DNA, 25 bp, Artificial sequence
  SiRNA target sequence
tcttcccttgaaacagcggggtaaa

SEQ ID NO: 103871 - DNA, 25 bp, Artificial sequence
  SiRNA target sequence
cttcccttgaaacagcggggtaaat

SEQ ID NO: 103872 - DNA, 25 bp, Artificial sequence
  SiRNA target sequence
ttcccttgaaacagcggggtaaatt

SEQ ID NO: 103873 - DNA, 25 bp, Artificial sequence
  SiRNA target sequence
tcccttgaaacagcggggtaaattt

SEQ ID NO: 103874 - DNA, 25 bp, Artificial sequence
  SiRNA target sequence
cccttgaaacagcggggtaaatttc

SEQ ID NO: 103875 - DNA, 25 bp, Artificial sequence
  SiRNA target sequence
ccttgaaacagcggggtaaatttca

SEQ ID NO: 103876 - DNA, 25 bp, Artificial sequence
  SiRNA target sequence
cttgaaacagcggggtaaatttcaa

SEQ ID NO: 103877 - DNA, 25 bp, Artificial sequence
  SiRNA target sequence
ttgaaacagcggggtaaatttcaat

SEQ ID NO: 103878 - DNA, 25 bp, Artificial sequence
  SiRNA target sequence
tgaaacagcggggtaaatttcaatg

SEQ ID NO: 103879 - DNA, 25 bp, Artificial sequence
  SiRNA target sequence
gaaacagcggggtaaatttcaatgc

SEQ ID NO: 103880 - DNA, 25 bp, Artificial sequence
  SiRNA target sequence
aaacagcggggtaaatttcaatgcc

SEQ ID NO: 103881 - DNA, 25 bp, Artificial sequence
  SiRNA target sequence
aacagcggggtaaatttcaatgcct

SEQ ID NO: 103882 - DNA, 25 bp, Artificial sequence
  SiRNA target sequence
acagcggggtaaatttcaatgcctt

SEQ ID NO: 103883 - DNA, 25 bp, Artificial sequence
  SiRNA target sequence
cagcggggtaaatttcaatgccttt

SEQ ID NO: 103884 - DNA, 25 bp, Artificial sequence
  SiRNA target sequence
agcggggtaaatttcaatgccttta

SEQ ID NO: 103885 - DNA, 25 bp, Artificial sequence
  SiRNA target sequence
gcggggtaaatttcaatgcctttat

SEQ ID NO: 103886 - DNA, 25 bp, Artificial sequence
  SiRNA target sequence
cggggtaaatttcaatgcctttatt

SEQ ID NO: 103887 - DNA, 25 bp, Artificial sequence
  SiRNA target sequence
ggggtaaatttcaatgcctttattt

SEQ ID NO: 103888 - DNA, 25 bp, Artificial sequence
  SiRNA target sequence
gggtaaatttcaatgcctttatttt

SEQ ID NO: 103889 - DNA, 25 bp, Artificial sequence
  SiRNA target sequence
ggtaaatttcaatgcctttattttc

SEQ ID NO: 103890 - DNA, 25 bp, Artificial sequence
  SiRNA target sequence
gtaaatttcaatgcctttattttca

SEQ ID NO: 103891 - DNA, 25 bp, Artificial sequence
  SiRNA target sequence
taaatttcaatgcctttattttcaa

SEQ ID NO: 103892 - DNA, 25 bp, Artificial sequence
  SiRNA target sequence
aaatttcaatgcctttattttcaaa

SEQ ID NO: 103893 - DNA, 25 bp, Artificial sequence
  SiRNA target sequence
aatttcaatgcctttattttcaaac

SEQ ID NO: 103894 - DNA, 25 bp, Artificial sequence
  SiRNA target sequence
atttcaatgcctttattttcaaact

SEQ ID NO: 103895 - DNA, 25 bp, Artificial sequence
  SiRNA target sequence
tttcaatgcctttattttcaaactc

SEQ ID NO: 103896 - DNA, 25 bp, Artificial sequence
  SiRNA target sequence
ttcaatgcctttattttcaaactct

SEQ ID NO: 103897 - DNA, 25 bp, Artificial sequence
  SiRNA target sequence
tcaatgcctttattttcaaactctt

SEQ ID NO: 103898 - DNA, 25 bp, Artificial sequence
  SiRNA target sequence
caatgcctttattttcaaactcttc

SEQ ID NO: 103899 - DNA, 25 bp, Artificial sequence
  SiRNA target sequence
aatgcctttattttcaaactcttct

SEQ ID NO: 103900 - DNA, 25 bp, Artificial sequence
  SiRNA target sequence
atgcctttattttcaaactcttctt

SEQ ID NO: 103901 - DNA, 25 bp, Artificial sequence
  SiRNA target sequence
tgcctttattttcaaactcttcttt

SEQ ID NO: 103902 - DNA, 25 bp, Artificial sequence
  SiRNA target sequence
gcctttattttcaaactcttcttta

SEQ ID NO: 103903 - DNA, 25 bp, Artificial sequence
  SiRNA target sequence
cctttattttcaaactcttctttat

SEQ ID NO: 103904 - DNA, 25 bp, Artificial sequence
  SiRNA target sequence
ctttattttcaaactcttctttata

SEQ ID NO: 103905 - DNA, 25 bp, Artificial sequence
  SiRNA target sequence
tttattttcaaactcttctttatat

SEQ ID NO: 103906 - DNA, 25 bp, Artificial sequence
  SiRNA target sequence
ttattttcaaactcttctttatata

SEQ ID NO: 103907 - DNA, 25 bp, Artificial sequence
  SiRNA target sequence
tattttcaaactcttctttatataa

SEQ ID NO: 103908 - DNA, 25 bp, Artificial sequence
  SiRNA target sequence
attttcaaactcttctttatataaa

SEQ ID NO: 103909 - DNA, 25 bp, Artificial sequence
  SiRNA target sequence
ttttcaaactcttctttatataaaa

SEQ ID NO: 103910 - DNA, 25 bp, Artificial sequence
  SiRNA target sequence
tttcaaactcttctttatataaaaa

SEQ ID NO: 103911 - DNA, 25 bp, Artificial sequence
  SiRNA target sequence
ttcaaactcttctttatataaaaaa

SEQ ID NO: 103912 - DNA, 25 bp, Artificial sequence
  SiRNA target sequence
tcaaactcttctttatataaaaaat

SEQ ID NO: 103913 - DNA, 25 bp, Artificial sequence
  SiRNA target sequence
caaactcttctttatataaaaaatc

SEQ ID NO: 103914 - DNA, 25 bp, Artificial sequence
  SiRNA target sequence
aaactcttctttatataaaaaatct

SEQ ID NO: 103915 - DNA, 25 bp, Artificial sequence
  SiRNA target sequence
aactcttctttatataaaaaatcta

SEQ ID NO: 103916 - DNA, 25 bp, Artificial sequence
  SiRNA target sequence
actcttctttatataaaaaatctac

SEQ ID NO: 103917 - DNA, 25 bp, Artificial sequence
  SiRNA target sequence
ctcttctttatataaaaaatctaca

SEQ ID NO: 103918 - DNA, 25 bp, Artificial sequence
  SiRNA target sequence
tcttctttatataaaaaatctacat

SEQ ID NO: 103919 - DNA, 25 bp, Artificial sequence
  SiRNA target sequence
cttctttatataaaaaatctacatc

SEQ ID NO: 103920 - DNA, 25 bp, Artificial sequence
  SiRNA target sequence
ttctttatataaaaaatctacatct

SEQ ID NO: 103921 - DNA, 25 bp, Artificial sequence
  SiRNA target sequence
tctttatataaaaaatctacatctc

SEQ ID NO: 103922 - DNA, 25 bp, Artificial sequence
  SiRNA target sequence
ctttatataaaaaatctacatctct

SEQ ID NO: 103923 - DNA, 25 bp, Artificial sequence
  SiRNA target sequence
tttatataaaaaatctacatctcta

SEQ ID NO: 103924 - DNA, 25 bp, Artificial sequence
  SiRNA target sequence
ttatataaaaaatctacatctctaa

SEQ ID NO: 103925 - DNA, 25 bp, Artificial sequence
  SiRNA target sequence
tatataaaaaatctacatctctaaa

SEQ ID NO: 103926 - DNA, 25 bp, Artificial sequence
  SiRNA target sequence
atataaaaaatctacatctctaaat

SEQ ID NO: 103927 - DNA, 25 bp, Artificial sequence
  SiRNA target sequence
tataaaaaatctacatctctaaatc

SEQ ID NO: 103928 - DNA, 25 bp, Artificial sequence
  SiRNA target sequence
ataaaaaatctacatctctaaatct

SEQ ID NO: 103929 - DNA, 25 bp, Artificial sequence
  SiRNA target sequence
taaaaaatctacatctctaaatcta

SEQ ID NO: 103930 - DNA, 25 bp, Artificial sequence
  SiRNA target sequence
aaaaaatctacatctctaaatctaa

SEQ ID NO: 103931 - DNA, 25 bp, Artificial sequence
  SiRNA target sequence
aaaaatctacatctctaaatctaaa

SEQ ID NO: 103932 - DNA, 25 bp, Artificial sequence
  SiRNA target sequence
aaaatctacatctctaaatctaaaa

SEQ ID NO: 103933 - DNA, 25 bp, Artificial sequence
  SiRNA target sequence
aaatctacatctctaaatctaaaac

SEQ ID NO: 103934 - DNA, 25 bp, Artificial sequence
  SiRNA target sequence
aatctacatctctaaatctaaaacc

SEQ ID NO: 103935 - DNA, 25 bp, Artificial sequence
  SiRNA target sequence
atctacatctctaaatctaaaacca

SEQ ID NO: 103936 - DNA, 25 bp, Artificial sequence
  SiRNA target sequence
tctacatctctaaatctaaaaccat

SEQ ID NO: 103937 - DNA, 25 bp, Artificial sequence
  SiRNA target sequence
ctacatctctaaatctaaaaccata

SEQ ID NO: 103938 - DNA, 25 bp, Artificial sequence
  SiRNA target sequence
tacatctctaaatctaaaaccatat

SEQ ID NO: 103939 - DNA, 25 bp, Artificial sequence
  SiRNA target sequence
acatctctaaatctaaaaccatata

SEQ ID NO: 103940 - DNA, 25 bp, Artificial sequence
  SiRNA target sequence
catctctaaatctaaaaccatataa

SEQ ID NO: 103941 - DNA, 25 bp, Artificial sequence
  SiRNA target sequence
atctctaaatctaaaaccatataat

SEQ ID NO: 103942 - DNA, 25 bp, Artificial sequence
  SiRNA target sequence
tctctaaatctaaaaccatataata

SEQ ID NO: 103943 - DNA, 25 bp, Artificial sequence
  SiRNA target sequence
ctctaaatctaaaaccatataataa

SEQ ID NO: 103944 - DNA, 25 bp, Artificial sequence
  SiRNA target sequence
tctaaatctaaaaccatataataaa

SEQ ID NO: 103945 - DNA, 25 bp, Artificial sequence
  SiRNA target sequence
ctaaatctaaaaccatataataaaa

SEQ ID NO: 103946 - DNA, 25 bp, Artificial sequence
  SiRNA target sequence
taaatctaaaaccatataataaaat

SEQ ID NO: 103947 - DNA, 25 bp, Artificial sequence
  SiRNA target sequence
aaatctaaaaccatataataaaata

SEQ ID NO: 103948 - DNA, 25 bp, Artificial sequence
  SiRNA target sequence
aatctaaaaccatataataaaataa

SEQ ID NO: 103949 - DNA, 25 bp, Artificial sequence
  SiRNA target sequence
atctaaaaccatataataaaataac

SEQ ID NO: 103950 - DNA, 25 bp, Artificial sequence
  SiRNA target sequence
tctaaaaccatataataaaataact

SEQ ID NO: 103951 - DNA, 25 bp, Artificial sequence
  SiRNA target sequence
ctaaaaccatataataaaataactt

SEQ ID NO: 103952 - DNA, 25 bp, Artificial sequence
  SiRNA target sequence
taaaaccatataataaaataacttt

SEQ ID NO: 103953 - DNA, 25 bp, Artificial sequence
  SiRNA target sequence
aaaaccatataataaaataactttt

SEQ ID NO: 103954 - DNA, 25 bp, Artificial sequence
  SiRNA target sequence
aaaccatataataaaataacttttt

SEQ ID NO: 103955 - DNA, 25 bp, Artificial sequence
  SiRNA target sequence
aaccatataataaaataactttttt

SEQ ID NO: 103956 - DNA, 25 bp, Artificial sequence
  SiRNA target sequence
accatataataaaataactttttta

SEQ ID NO: 103957 - DNA, 25 bp, Artificial sequence
  SiRNA target sequence
ccatataataaaataacttttttaa

SEQ ID NO: 103958 - DNA, 25 bp, Artificial sequence
  SiRNA target sequence
catataataaaataacttttttaaa

SEQ ID NO: 103959 - DNA, 25 bp, Artificial sequence
  SiRNA target sequence
atataataaaataacttttttaaaa

SEQ ID NO: 103960 - DNA, 25 bp, Artificial sequence
  SiRNA target sequence
tataataaaataacttttttaaaaa

SEQ ID NO: 103961 - DNA, 25 bp, Artificial sequence
  SiRNA target sequence
ataataaaataacttttttaaaaaa

SEQ ID NO: 103962 - DNA, 25 bp, Artificial sequence
  SiRNA target sequence
taataaaataacttttttaaaaaaa

SEQ ID NO: 103963 - DNA, 25 bp, Artificial sequence
  SiRNA target sequence
aataaaataacttttttaaaaaaat

SEQ ID NO: 103964 - DNA, 25 bp, Artificial sequence
  SiRNA target sequence
ataaaataacttttttaaaaaaatt

SEQ ID NO: 103965 - DNA, 25 bp, Artificial sequence
  SiRNA target sequence
taaaataacttttttaaaaaaattt

SEQ ID NO: 103966 - DNA, 25 bp, Artificial sequence
  SiRNA target sequence
aaaataacttttttaaaaaaattta

SEQ ID NO: 103967 - DNA, 25 bp, Artificial sequence
  SiRNA target sequence
aaataacttttttaaaaaaatttaa

SEQ ID NO: 103968 - DNA, 25 bp, Artificial sequence
  SiRNA target sequence
aataacttttttaaaaaaatttaaa

SEQ ID NO: 103969 - DNA, 25 bp, Artificial sequence
  SiRNA target sequence
ataacttttttaaaaaaatttaaat

SEQ ID NO: 103970 - DNA, 25 bp, Artificial sequence
  SiRNA target sequence
taacttttttaaaaaaatttaaatc

SEQ ID NO: 103971 - DNA, 25 bp, Artificial sequence
  SiRNA target sequence
aacttttttaaaaaaatttaaatca

SEQ ID NO: 103972 - DNA, 25 bp, Artificial sequence
  SiRNA target sequence
acttttttaaaaaaatttaaatcag

SEQ ID NO: 103973 - DNA, 25 bp, Artificial sequence
  SiRNA target sequence
cttttttaaaaaaatttaaatcaga

SEQ ID NO: 103974 - DNA, 25 bp, Artificial sequence
  SiRNA target sequence
ttttttaaaaaaatttaaatcagaa

SEQ ID NO: 103975 - DNA, 25 bp, Artificial sequence
  SiRNA target sequence
tttttaaaaaaatttaaatcagaat

SEQ ID NO: 103976 - DNA, 25 bp, Artificial sequence
  SiRNA target sequence
ttttaaaaaaatttaaatcagaata

SEQ ID NO: 103977 - DNA, 25 bp, Artificial sequence
  SiRNA target sequence
tttaaaaaaatttaaatcagaatag

SEQ ID NO: 103978 - DNA, 25 bp, Artificial sequence
  SiRNA target sequence
ttaaaaaaatttaaatcagaatagt

SEQ ID NO: 103979 - DNA, 25 bp, Artificial sequence
  SiRNA target sequence
taaaaaaatttaaatcagaatagta

SEQ ID NO: 103980 - DNA, 25 bp, Artificial sequence
  SiRNA target sequence
aaaaaaatttaaatcagaatagtaa

SEQ ID NO: 103981 - DNA, 25 bp, Artificial sequence
  SiRNA target sequence
aaaaaatttaaatcagaatagtaat

SEQ ID NO: 103982 - DNA, 25 bp, Artificial sequence
  SiRNA target sequence
aaaaatttaaatcagaatagtaatt

SEQ ID NO: 103983 - DNA, 25 bp, Artificial sequence
  SiRNA target sequence
aaaatttaaatcagaatagtaatta

SEQ ID NO: 103984 - DNA, 25 bp, Artificial sequence
  SiRNA target sequence
aaatttaaatcagaatagtaattaa

SEQ ID NO: 103985 - DNA, 25 bp, Artificial sequence
  SiRNA target sequence
aatttaaatcagaatagtaattaac

SEQ ID NO: 103986 - DNA, 25 bp, Artificial sequence
  SiRNA target sequence
atttaaatcagaatagtaattaaca

SEQ ID NO: 103987 - DNA, 25 bp, Artificial sequence
  SiRNA target sequence
tttaaatcagaatagtaattaacaa

SEQ ID NO: 103988 - DNA, 25 bp, Artificial sequence
  SiRNA target sequence
ttaaatcagaatagtaattaacaaa

SEQ ID NO: 103989 - DNA, 25 bp, Artificial sequence
  SiRNA target sequence
taaatcagaatagtaattaacaaat

SEQ ID NO: 103990 - DNA, 25 bp, Artificial sequence
  SiRNA target sequence
aaatcagaatagtaattaacaaatg

SEQ ID NO: 103991 - DNA, 25 bp, Artificial sequence
  SiRNA target sequence
aatcagaatagtaattaacaaatgc

SEQ ID NO: 103992 - DNA, 25 bp, Artificial sequence
  SiRNA target sequence
atcagaatagtaattaacaaatgcc

SEQ ID NO: 103993 - DNA, 25 bp, Artificial sequence
  SiRNA target sequence
tcagaatagtaattaacaaatgccc

SEQ ID NO: 103994 - DNA, 25 bp, Artificial sequence
  SiRNA target sequence
cagaatagtaattaacaaatgccct

SEQ ID NO: 103995 - DNA, 25 bp, Artificial sequence
  SiRNA target sequence
agaatagtaattaacaaatgccctg

SEQ ID NO: 103996 - DNA, 25 bp, Artificial sequence
  SiRNA target sequence
gaatagtaattaacaaatgccctgg

SEQ ID NO: 103997 - DNA, 25 bp, Artificial sequence
  SiRNA target sequence
aatagtaattaacaaatgccctggg

SEQ ID NO: 103998 - DNA, 25 bp, Artificial sequence
  SiRNA target sequence
atagtaattaacaaatgccctggga

SEQ ID NO: 103999 - DNA, 25 bp, Artificial sequence
  SiRNA target sequence
tagtaattaacaaatgccctgggaa

SEQ ID NO: 104000 - DNA, 25 bp, Artificial sequence
  SiRNA target sequence
agtaattaacaaatgccctgggaag

SEQ ID NO: 104001 - DNA, 25 bp, Artificial sequence
  SiRNA target sequence
gtaattaacaaatgccctgggaagt

SEQ ID NO: 104002 - DNA, 25 bp, Artificial sequence
  SiRNA target sequence
taattaacaaatgccctgggaagtg

SEQ ID NO: 104003 - DNA, 25 bp, Artificial sequence
  SiRNA target sequence
aattaacaaatgccctgggaagtgt

SEQ ID NO: 104004 - DNA, 25 bp, Artificial sequence
  SiRNA target sequence
attaacaaatgccctgggaagtgta

SEQ ID NO: 104005 - DNA, 25 bp, Artificial sequence
  SiRNA target sequence
ttaacaaatgccctgggaagtgtaa

SEQ ID NO: 104006 - DNA, 25 bp, Artificial sequence
  SiRNA target sequence
taacaaatgccctgggaagtgtaat

SEQ ID NO: 104007 - DNA, 25 bp, Artificial sequence
  SiRNA target sequence
aacaaatgccctgggaagtgtaata

SEQ ID NO: 104008 - DNA, 25 bp, Artificial sequence
  SiRNA target sequence
acaaatgccctgggaagtgtaatac

SEQ ID NO: 104009 - DNA, 25 bp, Artificial sequence
  SiRNA target sequence
caaatgccctgggaagtgtaatacc

SEQ ID NO: 104010 - DNA, 25 bp, Artificial sequence
  SiRNA target sequence
aaatgccctgggaagtgtaatacca

SEQ ID NO: 104011 - DNA, 25 bp, Artificial sequence
  SiRNA target sequence
aatgccctgggaagtgtaataccag

SEQ ID NO: 104012 - DNA, 25 bp, Artificial sequence
  SiRNA target sequence
atgccctgggaagtgtaataccagt

SEQ ID NO: 104013 - DNA, 25 bp, Artificial sequence
  SiRNA target sequence
tgccctgggaagtgtaataccagta

SEQ ID NO: 104014 - DNA, 25 bp, Artificial sequence
  SiRNA target sequence
gccctgggaagtgtaataccagtac

SEQ ID NO: 104015 - DNA, 25 bp, Artificial sequence
  SiRNA target sequence
ccctgggaagtgtaataccagtacc

SEQ ID NO: 104016 - DNA, 25 bp, Artificial sequence
  SiRNA target sequence
cctgggaagtgtaataccagtacca

SEQ ID NO: 104017 - DNA, 25 bp, Artificial sequence
  SiRNA target sequence
ctgggaagtgtaataccagtaccag

SEQ ID NO: 104018 - DNA, 25 bp, Artificial sequence
  SiRNA target sequence
tgggaagtgtaataccagtaccagt

SEQ ID NO: 104019 - DNA, 25 bp, Artificial sequence
  SiRNA target sequence
gggaagtgtaataccagtaccagtg

SEQ ID NO: 104020 - DNA, 25 bp, Artificial sequence
  SiRNA target sequence
ggaagtgtaataccagtaccagtgc

SEQ ID NO: 104021 - DNA, 25 bp, Artificial sequence
  SiRNA target sequence
gaagtgtaataccagtaccagtgca

SEQ ID NO: 104022 - DNA, 25 bp, Artificial sequence
  SiRNA target sequence
aagtgtaataccagtaccagtgcac

SEQ ID NO: 104023 - DNA, 25 bp, Artificial sequence
  SiRNA target sequence
agtgtaataccagtaccagtgcaca

SEQ ID NO: 104024 - DNA, 25 bp, Artificial sequence
  SiRNA target sequence
gtgtaataccagtaccagtgcacat

SEQ ID NO: 104025 - DNA, 25 bp, Artificial sequence
  SiRNA target sequence
tgtaataccagtaccagtgcacata

SEQ ID NO: 104026 - DNA, 25 bp, Artificial sequence
  SiRNA target sequence
gtaataccagtaccagtgcacataa

SEQ ID NO: 104027 - DNA, 25 bp, Artificial sequence
  SiRNA target sequence
taataccagtaccagtgcacataaa

SEQ ID NO: 104028 - DNA, 25 bp, Artificial sequence
  SiRNA target sequence
aataccagtaccagtgcacataaac

SEQ ID NO: 104029 - DNA, 25 bp, Artificial sequence
  SiRNA target sequence
ataccagtaccagtgcacataaaca

SEQ ID NO: 104030 - DNA, 25 bp, Artificial sequence
  SiRNA target sequence
taccagtaccagtgcacataaacaa

SEQ ID NO: 104031 - DNA, 25 bp, Artificial sequence
  SiRNA target sequence
accagtaccagtgcacataaacaaa

SEQ ID NO: 104032 - DNA, 25 bp, Artificial sequence
  SiRNA target sequence
ccagtaccagtgcacataaacaaaa

SEQ ID NO: 104033 - DNA, 25 bp, Artificial sequence
  SiRNA target sequence
cagtaccagtgcacataaacaaaat

SEQ ID NO: 104034 - DNA, 25 bp, Artificial sequence
  SiRNA target sequence
agtaccagtgcacataaacaaaatc

SEQ ID NO: 104035 - DNA, 25 bp, Artificial sequence
  SiRNA target sequence
gtaccagtgcacataaacaaaatct

SEQ ID NO: 104036 - DNA, 25 bp, Artificial sequence
  SiRNA target sequence
taccagtgcacataaacaaaatctt

SEQ ID NO: 104037 - DNA, 25 bp, Artificial sequence
  SiRNA target sequence
accagtgcacataaacaaaatcttt

SEQ ID NO: 104038 - DNA, 25 bp, Artificial sequence
  SiRNA target sequence
ccagtgcacataaacaaaatctttt

SEQ ID NO: 104039 - DNA, 25 bp, Artificial sequence
  SiRNA target sequence
cagtgcacataaacaaaatcttttt

SEQ ID NO: 104040 - DNA, 25 bp, Artificial sequence
  SiRNA target sequence
agtgcacataaacaaaatcttttta

SEQ ID NO: 104041 - DNA, 25 bp, Artificial sequence
  SiRNA target sequence
gtgcacataaacaaaatctttttac

SEQ ID NO: 104042 - DNA, 25 bp, Artificial sequence
  SiRNA target sequence
tgcacataaacaaaatctttttacc

SEQ ID NO: 104043 - DNA, 25 bp, Artificial sequence
  SiRNA target sequence
gcacataaacaaaatctttttacca

SEQ ID NO: 104044 - DNA, 25 bp, Artificial sequence
  SiRNA target sequence
cacataaacaaaatctttttaccac

SEQ ID NO: 104045 - DNA, 25 bp, Artificial sequence
  SiRNA target sequence
acataaacaaaatctttttaccact

SEQ ID NO: 104046 - DNA, 25 bp, Artificial sequence
  SiRNA target sequence
cataaacaaaatctttttaccacta

SEQ ID NO: 104047 - DNA, 25 bp, Artificial sequence
  SiRNA target sequence
ataaacaaaatctttttaccactaa

SEQ ID NO: 104048 - DNA, 25 bp, Artificial sequence
  SiRNA target sequence
taaacaaaatctttttaccactaaa

SEQ ID NO: 104049 - DNA, 25 bp, Artificial sequence
  SiRNA target sequence
aaacaaaatctttttaccactaaaa

SEQ ID NO: 104050 - DNA, 25 bp, Artificial sequence
  SiRNA target sequence
aacaaaatctttttaccactaaaat

SEQ ID NO: 104051 - DNA, 25 bp, Artificial sequence
  SiRNA target sequence
acaaaatctttttaccactaaaatt

SEQ ID NO: 104052 - DNA, 25 bp, Artificial sequence
  SiRNA target sequence
caaaatctttttaccactaaaatta

SEQ ID NO: 104053 - DNA, 25 bp, Artificial sequence
  SiRNA target sequence
aaaatctttttaccactaaaattaa

SEQ ID NO: 104054 - DNA, 25 bp, Artificial sequence
  SiRNA target sequence
aaatctttttaccactaaaattaag

SEQ ID NO: 104055 - DNA, 25 bp, Artificial sequence
  SiRNA target sequence
aatctttttaccactaaaattaagt

SEQ ID NO: 104056 - DNA, 25 bp, Artificial sequence
  SiRNA target sequence
atctttttaccactaaaattaagtc

SEQ ID NO: 104057 - DNA, 25 bp, Artificial sequence
  SiRNA target sequence
tctttttaccactaaaattaagtct

SEQ ID NO: 104058 - DNA, 25 bp, Artificial sequence
  SiRNA target sequence
ctttttaccactaaaattaagtcta

SEQ ID NO: 104059 - DNA, 25 bp, Artificial sequence
  SiRNA target sequence
tttttaccactaaaattaagtctat

SEQ ID NO: 104060 - DNA, 25 bp, Artificial sequence
  SiRNA target sequence
ttttaccactaaaattaagtctatt

SEQ ID NO: 104061 - DNA, 25 bp, Artificial sequence
  SiRNA target sequence
tttaccactaaaattaagtctattt

SEQ ID NO: 104062 - DNA, 25 bp, Artificial sequence
  SiRNA target sequence
ttaccactaaaattaagtctatttt

SEQ ID NO: 104063 - DNA, 25 bp, Artificial sequence
  SiRNA target sequence
taccactaaaattaagtctattttg

SEQ ID NO: 104064 - DNA, 25 bp, Artificial sequence
  SiRNA target sequence
accactaaaattaagtctattttgt

SEQ ID NO: 104065 - DNA, 25 bp, Artificial sequence
  SiRNA target sequence
ccactaaaattaagtctattttgta

SEQ ID NO: 104066 - DNA, 25 bp, Artificial sequence
  SiRNA target sequence
cactaaaattaagtctattttgtac

SEQ ID NO: 104067 - DNA, 25 bp, Artificial sequence
  SiRNA target sequence
actaaaattaagtctattttgtact

SEQ ID NO: 104068 - DNA, 25 bp, Artificial sequence
  SiRNA target sequence
ctaaaattaagtctattttgtacta

SEQ ID NO: 104069 - DNA, 25 bp, Artificial sequence
  SiRNA target sequence
taaaattaagtctattttgtactat

SEQ ID NO: 104070 - DNA, 25 bp, Artificial sequence
  SiRNA target sequence
aaaattaagtctattttgtactatg

SEQ ID NO: 104071 - DNA, 25 bp, Artificial sequence
  SiRNA target sequence
aaattaagtctattttgtactatgt

SEQ ID NO: 104072 - DNA, 25 bp, Artificial sequence
  SiRNA target sequence
aattaagtctattttgtactatgtt

SEQ ID NO: 104073 - DNA, 25 bp, Artificial sequence
  SiRNA target sequence
attaagtctattttgtactatgtta

SEQ ID NO: 104074 - DNA, 25 bp, Artificial sequence
  SiRNA target sequence
ttaagtctattttgtactatgttaa

SEQ ID NO: 104075 - DNA, 25 bp, Artificial sequence
  SiRNA target sequence
taagtctattttgtactatgttaac

SEQ ID NO: 104076 - DNA, 25 bp, Artificial sequence
  SiRNA target sequence
aagtctattttgtactatgttaaca

SEQ ID NO: 104077 - DNA, 25 bp, Artificial sequence
  SiRNA target sequence
agtctattttgtactatgttaacat

SEQ ID NO: 104078 - DNA, 25 bp, Artificial sequence
  SiRNA target sequence
gtctattttgtactatgttaacatg

SEQ ID NO: 104079 - DNA, 25 bp, Artificial sequence
  SiRNA target sequence
tctattttgtactatgttaacatga

SEQ ID NO: 104080 - DNA, 25 bp, Artificial sequence
  SiRNA target sequence
ctattttgtactatgttaacatgaa

SEQ ID NO: 104081 - DNA, 25 bp, Artificial sequence
  SiRNA target sequence
tattttgtactatgttaacatgaat

SEQ ID NO: 104082 - DNA, 25 bp, Artificial sequence
  SiRNA target sequence
attttgtactatgttaacatgaata

SEQ ID NO: 104083 - DNA, 25 bp, Artificial sequence
  SiRNA target sequence
ttttgtactatgttaacatgaatag

SEQ ID NO: 104084 - DNA, 25 bp, Artificial sequence
  SiRNA target sequence
tttgtactatgttaacatgaatagt

SEQ ID NO: 104085 - DNA, 25 bp, Artificial sequence
  SiRNA target sequence
ttgtactatgttaacatgaatagta

SEQ ID NO: 104086 - DNA, 25 bp, Artificial sequence
  SiRNA target sequence
tgtactatgttaacatgaatagtag

SEQ ID NO: 104087 - DNA, 25 bp, Artificial sequence
  SiRNA target sequence
gtactatgttaacatgaatagtaga

SEQ ID NO: 104088 - DNA, 25 bp, Artificial sequence
  SiRNA target sequence
tactatgttaacatgaatagtagac

SEQ ID NO: 104089 - DNA, 25 bp, Artificial sequence
  SiRNA target sequence
actatgttaacatgaatagtagacc

SEQ ID NO: 104090 - DNA, 25 bp, Artificial sequence
  SiRNA target sequence
ctatgttaacatgaatagtagaccc

SEQ ID NO: 104091 - DNA, 25 bp, Artificial sequence
  SiRNA target sequence
tatgttaacatgaatagtagaccct

SEQ ID NO: 104092 - DNA, 25 bp, Artificial sequence
  SiRNA target sequence
atgttaacatgaatagtagaccctt

SEQ ID NO: 104093 - DNA, 25 bp, Artificial sequence
  SiRNA target sequence
tgttaacatgaatagtagacccttt

SEQ ID NO: 104094 - DNA, 25 bp, Artificial sequence
  SiRNA target sequence
gttaacatgaatagtagacccttta

SEQ ID NO: 104095 - DNA, 25 bp, Artificial sequence
  SiRNA target sequence
ttaacatgaatagtagaccctttag

SEQ ID NO: 104096 - DNA, 25 bp, Artificial sequence
  SiRNA target sequence
taacatgaatagtagaccctttagt

SEQ ID NO: 104097 - DNA, 25 bp, Artificial sequence
  SiRNA target sequence
aacatgaatagtagaccctttagta

SEQ ID NO: 104098 - DNA, 25 bp, Artificial sequence
  SiRNA target sequence
acatgaatagtagaccctttagtaa

SEQ ID NO: 104099 - DNA, 25 bp, Artificial sequence
  SiRNA target sequence
catgaatagtagaccctttagtaag

SEQ ID NO: 104100 - DNA, 25 bp, Artificial sequence
  SiRNA target sequence
atgaatagtagaccctttagtaagt

SEQ ID NO: 104101 - DNA, 25 bp, Artificial sequence
  SiRNA target sequence
tgaatagtagaccctttagtaagta

SEQ ID NO: 104102 - DNA, 25 bp, Artificial sequence
  SiRNA target sequence
gaatagtagaccctttagtaagtaa

SEQ ID NO: 104103 - DNA, 25 bp, Artificial sequence
  SiRNA target sequence
aatagtagaccctttagtaagtaat

SEQ ID NO: 104104 - DNA, 25 bp, Artificial sequence
  SiRNA target sequence
atagtagaccctttagtaagtaatt

SEQ ID NO: 104105 - DNA, 25 bp, Artificial sequence
  SiRNA target sequence
tagtagaccctttagtaagtaattt

SEQ ID NO: 104106 - DNA, 25 bp, Artificial sequence
  SiRNA target sequence
agtagaccctttagtaagtaatttt

SEQ ID NO: 104107 - DNA, 25 bp, Artificial sequence
  SiRNA target sequence
gtagaccctttagtaagtaatttta

SEQ ID NO: 104108 - DNA, 25 bp, Artificial sequence
  SiRNA target sequence
tagaccctttagtaagtaattttaa

SEQ ID NO: 104109 - DNA, 25 bp, Artificial sequence
  SiRNA target sequence
agaccctttagtaagtaattttaaa

SEQ ID NO: 104110 - DNA, 25 bp, Artificial sequence
  SiRNA target sequence
gaccctttagtaagtaattttaaat

SEQ ID NO: 104111 - DNA, 25 bp, Artificial sequence
  SiRNA target sequence
accctttagtaagtaattttaaata

SEQ ID NO: 104112 - DNA, 25 bp, Artificial sequence
  SiRNA target sequence
ccctttagtaagtaattttaaatac

SEQ ID NO: 104113 - DNA, 25 bp, Artificial sequence
  SiRNA target sequence
cctttagtaagtaattttaaatact

SEQ ID NO: 104114 - DNA, 25 bp, Artificial sequence
  SiRNA target sequence
ctttagtaagtaattttaaatactc

SEQ ID NO: 104115 - DNA, 25 bp, Artificial sequence
  SiRNA target sequence
tttagtaagtaattttaaatactct

SEQ ID NO: 104116 - DNA, 25 bp, Artificial sequence
  SiRNA target sequence
ttagtaagtaattttaaatactctg

SEQ ID NO: 104117 - DNA, 25 bp, Artificial sequence
  SiRNA target sequence
tagtaagtaattttaaatactctga

SEQ ID NO: 104118 - DNA, 25 bp, Artificial sequence
  SiRNA target sequence
agtaagtaattttaaatactctgaa

SEQ ID NO: 104119 - DNA, 25 bp, Artificial sequence
  SiRNA target sequence
gtaagtaattttaaatactctgaac

SEQ ID NO: 104120 - DNA, 25 bp, Artificial sequence
  SiRNA target sequence
taagtaattttaaatactctgaaca

SEQ ID NO: 104121 - DNA, 25 bp, Artificial sequence
  SiRNA target sequence
aagtaattttaaatactctgaacaa

SEQ ID NO: 104122 - DNA, 25 bp, Artificial sequence
  SiRNA target sequence
agtaattttaaatactctgaacaaa

SEQ ID NO: 104123 - DNA, 25 bp, Artificial sequence
  SiRNA target sequence
gtaattttaaatactctgaacaaag

SEQ ID NO: 104124 - DNA, 25 bp, Artificial sequence
  SiRNA target sequence
taattttaaatactctgaacaaaga

SEQ ID NO: 104125 - DNA, 25 bp, Artificial sequence
  SiRNA target sequence
aattttaaatactctgaacaaagac

SEQ ID NO: 104126 - DNA, 25 bp, Artificial sequence
  SiRNA target sequence
attttaaatactctgaacaaagacc

SEQ ID NO: 104127 - DNA, 25 bp, Artificial sequence
  SiRNA target sequence
ttttaaatactctgaacaaagacct

SEQ ID NO: 104128 - DNA, 25 bp, Artificial sequence
  SiRNA target sequence
tttaaatactctgaacaaagacctt

SEQ ID NO: 104129 - DNA, 25 bp, Artificial sequence
  SiRNA target sequence
ttaaatactctgaacaaagaccttt

SEQ ID NO: 104130 - DNA, 25 bp, Artificial sequence
  SiRNA target sequence
taaatactctgaacaaagacctttt

SEQ ID NO: 104131 - DNA, 25 bp, Artificial sequence
  SiRNA target sequence
aaatactctgaacaaagaccttttc

SEQ ID NO: 104132 - DNA, 25 bp, Artificial sequence
  SiRNA target sequence
aatactctgaacaaagaccttttcg

SEQ ID NO: 104133 - DNA, 25 bp, Artificial sequence
  SiRNA target sequence
atactctgaacaaagaccttttcgt

SEQ ID NO: 104134 - DNA, 25 bp, Artificial sequence
  SiRNA target sequence
tactctgaacaaagaccttttcgtt

SEQ ID NO: 104135 - DNA, 25 bp, Artificial sequence
  SiRNA target sequence
actctgaacaaagaccttttcgttc

SEQ ID NO: 104136 - DNA, 25 bp, Artificial sequence
  SiRNA target sequence
ctctgaacaaagaccttttcgttct

SEQ ID NO: 104137 - DNA, 25 bp, Artificial sequence
  SiRNA target sequence
tctgaacaaagaccttttcgttctt

SEQ ID NO: 104138 - DNA, 25 bp, Artificial sequence
  SiRNA target sequence
ctgaacaaagaccttttcgttcttc

SEQ ID NO: 104139 - DNA, 25 bp, Artificial sequence
  SiRNA target sequence
tgaacaaagaccttttcgttcttct

SEQ ID NO: 104140 - DNA, 25 bp, Artificial sequence
  SiRNA target sequence
gaacaaagaccttttcgttcttctt

SEQ ID NO: 104141 - DNA, 25 bp, Artificial sequence
  SiRNA target sequence
aacaaagaccttttcgttcttcttt

SEQ ID NO: 104142 - DNA, 25 bp, Artificial sequence
  SiRNA target sequence
acaaagaccttttcgttcttctttt

SEQ ID NO: 104143 - DNA, 25 bp, Artificial sequence
  SiRNA target sequence
caaagaccttttcgttcttctttta

SEQ ID NO: 104144 - DNA, 25 bp, Artificial sequence
  SiRNA target sequence
aaagaccttttcgttcttcttttaa

SEQ ID NO: 104145 - DNA, 25 bp, Artificial sequence
  SiRNA target sequence
aagaccttttcgttcttcttttaaa

SEQ ID NO: 104146 - DNA, 25 bp, Artificial sequence
  SiRNA target sequence
agaccttttcgttcttcttttaaac

SEQ ID NO: 104147 - DNA, 25 bp, Artificial sequence
  SiRNA target sequence
gaccttttcgttcttcttttaaact

SEQ ID NO: 104148 - DNA, 25 bp, Artificial sequence
  SiRNA target sequence
accttttcgttcttcttttaaactt

SEQ ID NO: 104149 - DNA, 25 bp, Artificial sequence
  SiRNA target sequence
ccttttcgttcttcttttaaacttg

SEQ ID NO: 104150 - DNA, 25 bp, Artificial sequence
  SiRNA target sequence
cttttcgttcttcttttaaacttgt

SEQ ID NO: 104151 - DNA, 25 bp, Artificial sequence
  SiRNA target sequence
ttttcgttcttcttttaaacttgtt

SEQ ID NO: 104152 - DNA, 25 bp, Artificial sequence
  SiRNA target sequence
tttcgttcttcttttaaacttgttt

SEQ ID NO: 104153 - DNA, 25 bp, Artificial sequence
  SiRNA target sequence
ttcgttcttcttttaaacttgtttt

SEQ ID NO: 104154 - DNA, 25 bp, Artificial sequence
  SiRNA target sequence
tcgttcttcttttaaacttgtttta

SEQ ID NO: 104155 - DNA, 25 bp, Artificial sequence
  SiRNA target sequence
cgttcttcttttaaacttgttttaa

SEQ ID NO: 104156 - DNA, 25 bp, Artificial sequence
  SiRNA target sequence
gttcttcttttaaacttgttttaaa

SEQ ID NO: 104157 - DNA, 25 bp, Artificial sequence
  SiRNA target sequence
ttcttcttttaaacttgttttaaaa

SEQ ID NO: 104158 - DNA, 25 bp, Artificial sequence
  SiRNA target sequence
tcttcttttaaacttgttttaaaag

SEQ ID NO: 104159 - DNA, 25 bp, Artificial sequence
  SiRNA target sequence
cttcttttaaacttgttttaaaaga

SEQ ID NO: 104160 - DNA, 25 bp, Artificial sequence
  SiRNA target sequence
ttcttttaaacttgttttaaaagaa

SEQ ID NO: 104161 - DNA, 25 bp, Artificial sequence
  SiRNA target sequence
tcttttaaacttgttttaaaagaaa

SEQ ID NO: 104162 - DNA, 25 bp, Artificial sequence
  SiRNA target sequence
cttttaaacttgttttaaaagaaac

SEQ ID NO: 104163 - DNA, 25 bp, Artificial sequence
  SiRNA target sequence
ttttaaacttgttttaaaagaaaca

SEQ ID NO: 104164 - DNA, 25 bp, Artificial sequence
  SiRNA target sequence
tttaaacttgttttaaaagaaacaa

SEQ ID NO: 104165 - DNA, 25 bp, Artificial sequence
  SiRNA target sequence
ttaaacttgttttaaaagaaacaag

SEQ ID NO: 104166 - DNA, 25 bp, Artificial sequence
  SiRNA target sequence
taaacttgttttaaaagaaacaaga

SEQ ID NO: 104167 - DNA, 25 bp, Artificial sequence
  SiRNA target sequence
aaacttgttttaaaagaaacaagag

SEQ ID NO: 104168 - DNA, 25 bp, Artificial sequence
  SiRNA target sequence
aacttgttttaaaagaaacaagaga

SEQ ID NO: 104169 - DNA, 25 bp, Artificial sequence
  SiRNA target sequence
acttgttttaaaagaaacaagagag

SEQ ID NO: 104170 - DNA, 25 bp, Artificial sequence
  SiRNA target sequence
cttgttttaaaagaaacaagagaga

SEQ ID NO: 104171 - DNA, 25 bp, Artificial sequence
  SiRNA target sequence
ttgttttaaaagaaacaagagagac

SEQ ID NO: 104172 - DNA, 25 bp, Artificial sequence
  SiRNA target sequence
tgttttaaaagaaacaagagagacg

SEQ ID NO: 104173 - DNA, 25 bp, Artificial sequence
  SiRNA target sequence
gttttaaaagaaacaagagagacgg

SEQ ID NO: 104174 - DNA, 25 bp, Artificial sequence
  SiRNA target sequence
ttttaaaagaaacaagagagacggt

SEQ ID NO: 104175 - DNA, 25 bp, Artificial sequence
  SiRNA target sequence
tttaaaagaaacaagagagacggtg

SEQ ID NO: 104176 - DNA, 25 bp, Artificial sequence
  SiRNA target sequence
ttaaaagaaacaagagagacggtga

SEQ ID NO: 104177 - DNA, 25 bp, Artificial sequence
  SiRNA target sequence
taaaagaaacaagagagacggtgac

SEQ ID NO: 104178 - DNA, 25 bp, Artificial sequence
  SiRNA target sequence
aaaagaaacaagagagacggtgaca

SEQ ID NO: 104179 - DNA, 25 bp, Artificial sequence
  SiRNA target sequence
aaagaaacaagagagacggtgacaa

SEQ ID NO: 104180 - DNA, 25 bp, Artificial sequence
  SiRNA target sequence
aagaaacaagagagacggtgacaaa

SEQ ID NO: 104181 - DNA, 25 bp, Artificial sequence
  SiRNA target sequence
agaaacaagagagacggtgacaaag

SEQ ID NO: 104182 - DNA, 25 bp, Artificial sequence
  SiRNA target sequence
gaaacaagagagacggtgacaaagt

SEQ ID NO: 104183 - DNA, 25 bp, Artificial sequence
  SiRNA target sequence
aaacaagagagacggtgacaaagta

SEQ ID NO: 104184 - DNA, 25 bp, Artificial sequence
  SiRNA target sequence
aacaagagagacggtgacaaagtaa

SEQ ID NO: 104185 - DNA, 25 bp, Artificial sequence
  SiRNA target sequence
acaagagagacggtgacaaagtaac

SEQ ID NO: 104186 - DNA, 25 bp, Artificial sequence
  SiRNA target sequence
caagagagacggtgacaaagtaaca

SEQ ID NO: 104187 - DNA, 25 bp, Artificial sequence
  SiRNA target sequence
aagagagacggtgacaaagtaacaa

SEQ ID NO: 104188 - DNA, 25 bp, Artificial sequence
  SiRNA target sequence
agagagacggtgacaaagtaacaaa

SEQ ID NO: 104189 - DNA, 25 bp, Artificial sequence
  SiRNA target sequence
gagagacggtgacaaagtaacaaaa

SEQ ID NO: 104190 - DNA, 25 bp, Artificial sequence
  SiRNA target sequence
agagacggtgacaaagtaacaaaaa

SEQ ID NO: 104191 - DNA, 25 bp, Artificial sequence
  SiRNA target sequence
gagacggtgacaaagtaacaaaaat

SEQ ID NO: 104192 - DNA, 25 bp, Artificial sequence
  SiRNA target sequence
agacggtgacaaagtaacaaaaatc

SEQ ID NO: 104193 - DNA, 25 bp, Artificial sequence
  SiRNA target sequence
gacggtgacaaagtaacaaaaatct

SEQ ID NO: 104194 - DNA, 25 bp, Artificial sequence
  SiRNA target sequence
acggtgacaaagtaacaaaaatctt

SEQ ID NO: 104195 - DNA, 25 bp, Artificial sequence
  SiRNA target sequence
cggtgacaaagtaacaaaaatcttt

SEQ ID NO: 104196 - DNA, 25 bp, Artificial sequence
  SiRNA target sequence
ggtgacaaagtaacaaaaatctttt

SEQ ID NO: 104197 - DNA, 25 bp, Artificial sequence
  SiRNA target sequence
gtgacaaagtaacaaaaatcttttt

SEQ ID NO: 104198 - DNA, 25 bp, Artificial sequence
  SiRNA target sequence
tgacaaagtaacaaaaatctttttt

SEQ ID NO: 104199 - DNA, 25 bp, Artificial sequence
  SiRNA target sequence
gacaaagtaacaaaaatcttttttc

SEQ ID NO: 104200 - DNA, 25 bp, Artificial sequence
  SiRNA target sequence
acaaagtaacaaaaatcttttttcg

SEQ ID NO: 104201 - DNA, 25 bp, Artificial sequence
  SiRNA target sequence
caaagtaacaaaaatcttttttcgt

SEQ ID NO: 104202 - DNA, 25 bp, Artificial sequence
  SiRNA target sequence
aaagtaacaaaaatcttttttcgtt

SEQ ID NO: 104203 - DNA, 25 bp, Artificial sequence
  SiRNA target sequence
aagtaacaaaaatcttttttcgtta

SEQ ID NO: 104204 - DNA, 25 bp, Artificial sequence
  SiRNA target sequence
agtaacaaaaatcttttttcgttaa

SEQ ID NO: 104205 - DNA, 25 bp, Artificial sequence
  SiRNA target sequence
gtaacaaaaatcttttttcgttaat

SEQ ID NO: 104206 - DNA, 25 bp, Artificial sequence
  SiRNA target sequence
taacaaaaatcttttttcgttaatg

SEQ ID NO: 104207 - DNA, 25 bp, Artificial sequence
  SiRNA target sequence
aacaaaaatcttttttcgttaatgt

SEQ ID NO: 104208 - DNA, 25 bp, Artificial sequence
  SiRNA target sequence
acaaaaatcttttttcgttaatgta

SEQ ID NO: 104209 - DNA, 25 bp, Artificial sequence
  SiRNA target sequence
caaaaatcttttttcgttaatgtaa

SEQ ID NO: 104210 - DNA, 25 bp, Artificial sequence
  SiRNA target sequence
aaaaatcttttttcgttaatgtaaa

SEQ ID NO: 104211 - DNA, 25 bp, Artificial sequence
  SiRNA target sequence
aaaatcttttttcgttaatgtaaaa

SEQ ID NO: 104212 - DNA, 25 bp, Artificial sequence
  SiRNA target sequence
aaatcttttttcgttaatgtaaaat

SEQ ID NO: 104213 - DNA, 25 bp, Artificial sequence
  SiRNA target sequence
aatcttttttcgttaatgtaaaata

SEQ ID NO: 104214 - DNA, 25 bp, Artificial sequence
  SiRNA target sequence
atcttttttcgttaatgtaaaatat

SEQ ID NO: 104215 - DNA, 25 bp, Artificial sequence
  SiRNA target sequence
tcttttttcgttaatgtaaaatatc

SEQ ID NO: 104216 - DNA, 25 bp, Artificial sequence
  SiRNA target sequence
cttttttcgttaatgtaaaatatct

SEQ ID NO: 104217 - DNA, 25 bp, Artificial sequence
  SiRNA target sequence
ttttttcgttaatgtaaaatatctt

SEQ ID NO: 104218 - DNA, 25 bp, Artificial sequence
  SiRNA target sequence
tttttcgttaatgtaaaatatcttg

SEQ ID NO: 104219 - DNA, 25 bp, Artificial sequence
  SiRNA target sequence
ttttcgttaatgtaaaatatcttgg

SEQ ID NO: 104220 - DNA, 25 bp, Artificial sequence
  SiRNA target sequence
tttcgttaatgtaaaatatcttgga

SEQ ID NO: 104221 - DNA, 25 bp, Artificial sequence
  SiRNA target sequence
ttcgttaatgtaaaatatcttggat

SEQ ID NO: 104222 - DNA, 25 bp, Artificial sequence
  SiRNA target sequence
tcgttaatgtaaaatatcttggatt

SEQ ID NO: 104223 - DNA, 25 bp, Artificial sequence
  SiRNA target sequence
cgttaatgtaaaatatcttggatta

SEQ ID NO: 104224 - DNA, 25 bp, Artificial sequence
  SiRNA target sequence
gttaatgtaaaatatcttggattaa

SEQ ID NO: 104225 - DNA, 25 bp, Artificial sequence
  SiRNA target sequence
ttaatgtaaaatatcttggattaat

SEQ ID NO: 104226 - DNA, 25 bp, Artificial sequence
  SiRNA target sequence
taatgtaaaatatcttggattaatt

SEQ ID NO: 104227 - DNA, 25 bp, Artificial sequence
  SiRNA target sequence
aatgtaaaatatcttggattaatta

SEQ ID NO: 104228 - DNA, 25 bp, Artificial sequence
  SiRNA target sequence
atgtaaaatatcttggattaattac

SEQ ID NO: 104229 - DNA, 25 bp, Artificial sequence
  SiRNA target sequence
tgtaaaatatcttggattaattaca

SEQ ID NO: 104230 - DNA, 25 bp, Artificial sequence
  SiRNA target sequence
gtaaaatatcttggattaattacag

SEQ ID NO: 104231 - DNA, 25 bp, Artificial sequence
  SiRNA target sequence
taaaatatcttggattaattacagg

SEQ ID NO: 104232 - DNA, 25 bp, Artificial sequence
  SiRNA target sequence
aaaatatcttggattaattacaggg

SEQ ID NO: 104233 - DNA, 25 bp, Artificial sequence
  SiRNA target sequence
aaatatcttggattaattacaggga

SEQ ID NO: 104234 - DNA, 25 bp, Artificial sequence
  SiRNA target sequence
aatatcttggattaattacagggat

SEQ ID NO: 104235 - DNA, 25 bp, Artificial sequence
  SiRNA target sequence
atatcttggattaattacagggata

SEQ ID NO: 104236 - DNA, 25 bp, Artificial sequence
  SiRNA target sequence
tatcttggattaattacagggatat

SEQ ID NO: 104237 - DNA, 25 bp, Artificial sequence
  SiRNA target sequence
atcttggattaattacagggatata

SEQ ID NO: 104238 - DNA, 25 bp, Artificial sequence
  SiRNA target sequence
tcttggattaattacagggatatac

SEQ ID NO: 104239 - DNA, 25 bp, Artificial sequence
  SiRNA target sequence
cttggattaattacagggatatact

SEQ ID NO: 104240 - DNA, 25 bp, Artificial sequence
  SiRNA target sequence
ttggattaattacagggatatactt

SEQ ID NO: 104241 - DNA, 25 bp, Artificial sequence
  SiRNA target sequence
tggattaattacagggatatacttg

SEQ ID NO: 104242 - DNA, 25 bp, Artificial sequence
  SiRNA target sequence
ggattaattacagggatatacttgt

SEQ ID NO: 104243 - DNA, 25 bp, Artificial sequence
  SiRNA target sequence
gattaattacagggatatacttgta

SEQ ID NO: 104244 - DNA, 25 bp, Artificial sequence
  SiRNA target sequence
attaattacagggatatacttgtac

SEQ ID NO: 104245 - DNA, 25 bp, Artificial sequence
  SiRNA target sequence
ttaattacagggatatacttgtaca

SEQ ID NO: 104246 - DNA, 25 bp, Artificial sequence
  SiRNA target sequence
taattacagggatatacttgtacat

SEQ ID NO: 104247 - DNA, 25 bp, Artificial sequence
  SiRNA target sequence
aattacagggatatacttgtacata

SEQ ID NO: 104248 - DNA, 25 bp, Artificial sequence
  SiRNA target sequence
attacagggatatacttgtacataa

SEQ ID NO: 104249 - DNA, 25 bp, Artificial sequence
  SiRNA target sequence
ttacagggatatacttgtacataaa

SEQ ID NO: 104250 - DNA, 25 bp, Artificial sequence
  SiRNA target sequence
tacagggatatacttgtacataaaa

SEQ ID NO: 104251 - DNA, 25 bp, Artificial sequence
  SiRNA target sequence
acagggatatacttgtacataaaat

SEQ ID NO: 104252 - DNA, 25 bp, Artificial sequence
  SiRNA target sequence
cagggatatacttgtacataaaatt

SEQ ID NO: 104253 - DNA, 25 bp, Artificial sequence
  SiRNA target sequence
agggatatacttgtacataaaattt

SEQ ID NO: 104254 - DNA, 25 bp, Artificial sequence
  SiRNA target sequence
gggatatacttgtacataaaatttg

SEQ ID NO: 104255 - DNA, 25 bp, Artificial sequence
  SiRNA target sequence
ggatatacttgtacataaaatttga

SEQ ID NO: 104256 - DNA, 25 bp, Artificial sequence
  SiRNA target sequence
gatatacttgtacataaaatttgag

SEQ ID NO: 104257 - DNA, 25 bp, Artificial sequence
  SiRNA target sequence
atatacttgtacataaaatttgagg

SEQ ID NO: 104258 - DNA, 25 bp, Artificial sequence
  SiRNA target sequence
tatacttgtacataaaatttgaggt

SEQ ID NO: 104259 - DNA, 25 bp, Artificial sequence
  SiRNA target sequence
atacttgtacataaaatttgaggta

SEQ ID NO: 104260 - DNA, 25 bp, Artificial sequence
  SiRNA target sequence
tacttgtacataaaatttgaggtaa

SEQ ID NO: 104261 - DNA, 25 bp, Artificial sequence
  SiRNA target sequence
acttgtacataaaatttgaggtaag

SEQ ID NO: 104262 - DNA, 25 bp, Artificial sequence
  SiRNA target sequence
cttgtacataaaatttgaggtaagt

SEQ ID NO: 104263 - DNA, 25 bp, Artificial sequence
  SiRNA target sequence
ttgtacataaaatttgaggtaagtt

SEQ ID NO: 104264 - DNA, 25 bp, Artificial sequence
  SiRNA target sequence
tgtacataaaatttgaggtaagttt

SEQ ID NO: 104265 - DNA, 25 bp, Artificial sequence
  SiRNA target sequence
gtacataaaatttgaggtaagtttt

SEQ ID NO: 104266 - DNA, 25 bp, Artificial sequence
  SiRNA target sequence
tacataaaatttgaggtaagtttta

SEQ ID NO: 104267 - DNA, 25 bp, Artificial sequence
  SiRNA target sequence
acataaaatttgaggtaagttttat

SEQ ID NO: 104268 - DNA, 25 bp, Artificial sequence
  SiRNA target sequence
cataaaatttgaggtaagttttatc

SEQ ID NO: 104269 - DNA, 25 bp, Artificial sequence
  SiRNA target sequence
ataaaatttgaggtaagttttatct

SEQ ID NO: 104270 - DNA, 25 bp, Artificial sequence
  SiRNA target sequence
taaaatttgaggtaagttttatctt

SEQ ID NO: 104271 - DNA, 25 bp, Artificial sequence
  SiRNA target sequence
aaaatttgaggtaagttttatctta

SEQ ID NO: 104272 - DNA, 25 bp, Artificial sequence
  SiRNA target sequence
aaatttgaggtaagttttatcttaa

SEQ ID NO: 104273 - DNA, 25 bp, Artificial sequence
  SiRNA target sequence
aatttgaggtaagttttatcttaaa

SEQ ID NO: 104274 - DNA, 25 bp, Artificial sequence
  SiRNA target sequence
atttgaggtaagttttatcttaaaa

SEQ ID NO: 104275 - DNA, 25 bp, Artificial sequence
  SiRNA target sequence
tttgaggtaagttttatcttaaaat

SEQ ID NO: 104276 - DNA, 25 bp, Artificial sequence
  SiRNA target sequence
ttgaggtaagttttatcttaaaatc

SEQ ID NO: 104277 - DNA, 25 bp, Artificial sequence
  SiRNA target sequence
tgaggtaagttttatcttaaaatct

SEQ ID NO: 104278 - DNA, 25 bp, Artificial sequence
  SiRNA target sequence
gaggtaagttttatcttaaaatctt

SEQ ID NO: 104279 - DNA, 25 bp, Artificial sequence
  SiRNA target sequence
aggtaagttttatcttaaaatcttt

SEQ ID NO: 104280 - DNA, 25 bp, Artificial sequence
  SiRNA target sequence
ggtaagttttatcttaaaatctttt

SEQ ID NO: 104281 - DNA, 25 bp, Artificial sequence
  SiRNA target sequence
gtaagttttatcttaaaatctttta

SEQ ID NO: 104282 - DNA, 25 bp, Artificial sequence
  SiRNA target sequence
taagttttatcttaaaatcttttag

SEQ ID NO: 104283 - DNA, 25 bp, Artificial sequence
  SiRNA target sequence
aagttttatcttaaaatcttttaga

SEQ ID NO: 104284 - DNA, 25 bp, Artificial sequence
  SiRNA target sequence
agttttatcttaaaatcttttagaa

SEQ ID NO: 104285 - DNA, 25 bp, Artificial sequence
  SiRNA target sequence
gttttatcttaaaatcttttagaac

SEQ ID NO: 104286 - DNA, 25 bp, Artificial sequence
  SiRNA target sequence
ttttatcttaaaatcttttagaacc

SEQ ID NO: 104287 - DNA, 25 bp, Artificial sequence
  SiRNA target sequence
tttatcttaaaatcttttagaacct

SEQ ID NO: 104288 - DNA, 25 bp, Artificial sequence
  SiRNA target sequence
ttatcttaaaatcttttagaacctc

SEQ ID NO: 104289 - DNA, 25 bp, Artificial sequence
  SiRNA target sequence
tatcttaaaatcttttagaacctca

SEQ ID NO: 104290 - DNA, 25 bp, Artificial sequence
  SiRNA target sequence
atcttaaaatcttttagaacctcaa

SEQ ID NO: 104291 - DNA, 25 bp, Artificial sequence
  SiRNA target sequence
tcttaaaatcttttagaacctcaaa

SEQ ID NO: 104292 - DNA, 25 bp, Artificial sequence
  SiRNA target sequence
cttaaaatcttttagaacctcaaaa

SEQ ID NO: 104293 - DNA, 25 bp, Artificial sequence
  SiRNA target sequence
ttaaaatcttttagaacctcaaaaa

SEQ ID NO: 104294 - DNA, 25 bp, Artificial sequence
  SiRNA target sequence
taaaatcttttagaacctcaaaaat

SEQ ID NO: 104295 - DNA, 25 bp, Artificial sequence
  SiRNA target sequence
aaaatcttttagaacctcaaaaata

SEQ ID NO: 104296 - DNA, 25 bp, Artificial sequence
  SiRNA target sequence
aaatcttttagaacctcaaaaatag

SEQ ID NO: 104297 - DNA, 25 bp, Artificial sequence
  SiRNA target sequence
aatcttttagaacctcaaaaatagt

SEQ ID NO: 104298 - DNA, 25 bp, Artificial sequence
  SiRNA target sequence
atcttttagaacctcaaaaatagtg

SEQ ID NO: 104299 - DNA, 25 bp, Artificial sequence
  SiRNA target sequence
tcttttagaacctcaaaaatagtgc

SEQ ID NO: 104300 - DNA, 25 bp, Artificial sequence
  SiRNA target sequence
cttttagaacctcaaaaatagtgcg

SEQ ID NO: 104301 - DNA, 25 bp, Artificial sequence
  SiRNA target sequence
ttttagaacctcaaaaatagtgcgc

SEQ ID NO: 104302 - DNA, 25 bp, Artificial sequence
  SiRNA target sequence
tttagaacctcaaaaatagtgcgct

SEQ ID NO: 104303 - DNA, 25 bp, Artificial sequence
  SiRNA target sequence
ttagaacctcaaaaatagtgcgctt

SEQ ID NO: 104304 - DNA, 25 bp, Artificial sequence
  SiRNA target sequence
tagaacctcaaaaatagtgcgcttc

SEQ ID NO: 104305 - DNA, 25 bp, Artificial sequence
  SiRNA target sequence
agaacctcaaaaatagtgcgcttcg

SEQ ID NO: 104306 - DNA, 25 bp, Artificial sequence
  SiRNA target sequence
gaacctcaaaaatagtgcgcttcgg

SEQ ID NO: 104307 - DNA, 25 bp, Artificial sequence
  SiRNA target sequence
aacctcaaaaatagtgcgcttcggt

SEQ ID NO: 104308 - DNA, 25 bp, Artificial sequence
  SiRNA target sequence
acctcaaaaatagtgcgcttcggta

SEQ ID NO: 104309 - DNA, 25 bp, Artificial sequence
  SiRNA target sequence
cctcaaaaatagtgcgcttcggtag

SEQ ID NO: 104310 - DNA, 25 bp, Artificial sequence
  SiRNA target sequence
ctcaaaaatagtgcgcttcggtagt

SEQ ID NO: 104311 - DNA, 25 bp, Artificial sequence
  SiRNA target sequence
tcaaaaatagtgcgcttcggtagta

SEQ ID NO: 104312 - DNA, 25 bp, Artificial sequence
  SiRNA target sequence
caaaaatagtgcgcttcggtagtaa

SEQ ID NO: 104313 - DNA, 25 bp, Artificial sequence
  SiRNA target sequence
aaaaatagtgcgcttcggtagtaaa

SEQ ID NO: 104314 - DNA, 25 bp, Artificial sequence
  SiRNA target sequence
aaaatagtgcgcttcggtagtaaaa

SEQ ID NO: 104315 - DNA, 25 bp, Artificial sequence
  SiRNA target sequence
aaatagtgcgcttcggtagtaaaat

SEQ ID NO: 104316 - DNA, 25 bp, Artificial sequence
  SiRNA target sequence
aatagtgcgcttcggtagtaaaatg

SEQ ID NO: 104317 - DNA, 25 bp, Artificial sequence
  SiRNA target sequence
atagtgcgcttcggtagtaaaatgt

SEQ ID NO: 104318 - DNA, 25 bp, Artificial sequence
  SiRNA target sequence
tagtgcgcttcggtagtaaaatgta

SEQ ID NO: 104319 - DNA, 25 bp, Artificial sequence
  SiRNA target sequence
agtgcgcttcggtagtaaaatgtaa

SEQ ID NO: 104320 - DNA, 25 bp, Artificial sequence
  SiRNA target sequence
gtgcgcttcggtagtaaaatgtaat

SEQ ID NO: 104321 - DNA, 25 bp, Artificial sequence
  SiRNA target sequence
tgcgcttcggtagtaaaatgtaatc

SEQ ID NO: 104322 - DNA, 25 bp, Artificial sequence
  SiRNA target sequence
gcgcttcggtagtaaaatgtaatca

SEQ ID NO: 104323 - DNA, 25 bp, Artificial sequence
  SiRNA target sequence
cgcttcggtagtaaaatgtaatcat

SEQ ID NO: 104324 - DNA, 25 bp, Artificial sequence
  SiRNA target sequence
gcttcggtagtaaaatgtaatcata

SEQ ID NO: 104325 - DNA, 25 bp, Artificial sequence
  SiRNA target sequence
cttcggtagtaaaatgtaatcatag

SEQ ID NO: 104326 - DNA, 25 bp, Artificial sequence
  SiRNA target sequence
ttcggtagtaaaatgtaatcatagt

SEQ ID NO: 104327 - DNA, 25 bp, Artificial sequence
  SiRNA target sequence
tcggtagtaaaatgtaatcatagta

SEQ ID NO: 104328 - DNA, 25 bp, Artificial sequence
  SiRNA target sequence
cggtagtaaaatgtaatcatagtac

SEQ ID NO: 104329 - DNA, 25 bp, Artificial sequence
  SiRNA target sequence
ggtagtaaaatgtaatcatagtaca

SEQ ID NO: 104330 - DNA, 25 bp, Artificial sequence
  SiRNA target sequence
gtagtaaaatgtaatcatagtacag

SEQ ID NO: 104331 - DNA, 25 bp, Artificial sequence
  SiRNA target sequence
tagtaaaatgtaatcatagtacaga

SEQ ID NO: 104332 - DNA, 25 bp, Artificial sequence
  SiRNA target sequence
agtaaaatgtaatcatagtacagat

SEQ ID NO: 104333 - DNA, 25 bp, Artificial sequence
  SiRNA target sequence
gtaaaatgtaatcatagtacagatc

SEQ ID NO: 104334 - DNA, 25 bp, Artificial sequence
  SiRNA target sequence
taaaatgtaatcatagtacagatcg

SEQ ID NO: 104335 - DNA, 25 bp, Artificial sequence
  SiRNA target sequence
aaaatgtaatcatagtacagatcgt

SEQ ID NO: 104336 - DNA, 25 bp, Artificial sequence
  SiRNA target sequence
aaatgtaatcatagtacagatcgta

SEQ ID NO: 104337 - DNA, 25 bp, Artificial sequence
  SiRNA target sequence
aatgtaatcatagtacagatcgtaa

SEQ ID NO: 104338 - DNA, 25 bp, Artificial sequence
  SiRNA target sequence
atgtaatcatagtacagatcgtaat

SEQ ID NO: 104339 - DNA, 25 bp, Artificial sequence
  SiRNA target sequence
tgtaatcatagtacagatcgtaatt

SEQ ID NO: 104340 - DNA, 25 bp, Artificial sequence
  SiRNA target sequence
gtaatcatagtacagatcgtaattt

SEQ ID NO: 104341 - DNA, 25 bp, Artificial sequence
  SiRNA target sequence
taatcatagtacagatcgtaattta

SEQ ID NO: 104342 - DNA, 25 bp, Artificial sequence
  SiRNA target sequence
aatcatagtacagatcgtaatttag

SEQ ID NO: 104343 - DNA, 25 bp, Artificial sequence
  SiRNA target sequence
atcatagtacagatcgtaatttaga

SEQ ID NO: 104344 - DNA, 25 bp, Artificial sequence
  SiRNA target sequence
tcatagtacagatcgtaatttagat

SEQ ID NO: 104345 - DNA, 25 bp, Artificial sequence
  SiRNA target sequence
catagtacagatcgtaatttagata

SEQ ID NO: 104346 - DNA, 25 bp, Artificial sequence
  SiRNA target sequence
atagtacagatcgtaatttagataa

SEQ ID NO: 104347 - DNA, 25 bp, Artificial sequence
  SiRNA target sequence
tagtacagatcgtaatttagataaa

SEQ ID NO: 104348 - DNA, 25 bp, Artificial sequence
  SiRNA target sequence
agtacagatcgtaatttagataaat

SEQ ID NO: 104349 - DNA, 25 bp, Artificial sequence
  SiRNA target sequence
gtacagatcgtaatttagataaatt

SEQ ID NO: 104350 - DNA, 25 bp, Artificial sequence
  SiRNA target sequence
tacagatcgtaatttagataaattt

SEQ ID NO: 104351 - DNA, 25 bp, Artificial sequence
  SiRNA target sequence
acagatcgtaatttagataaatttc

SEQ ID NO: 104352 - DNA, 25 bp, Artificial sequence
  SiRNA target sequence
cagatcgtaatttagataaatttct

SEQ ID NO: 104353 - DNA, 25 bp, Artificial sequence
  SiRNA target sequence
agatcgtaatttagataaatttctt

SEQ ID NO: 104354 - DNA, 25 bp, Artificial sequence
  SiRNA target sequence
gatcgtaatttagataaatttcttt

SEQ ID NO: 104355 - DNA, 25 bp, Artificial sequence
  SiRNA target sequence
atcgtaatttagataaatttcttta

SEQ ID NO: 104356 - DNA, 25 bp, Artificial sequence
  SiRNA target sequence
tcgtaatttagataaatttctttac

SEQ ID NO: 104357 - DNA, 25 bp, Artificial sequence
  SiRNA target sequence
cgtaatttagataaatttctttaca

SEQ ID NO: 104358 - DNA, 25 bp, Artificial sequence
  SiRNA target sequence
gtaatttagataaatttctttacat

SEQ ID NO: 104359 - DNA, 25 bp, Artificial sequence
  SiRNA target sequence
taatttagataaatttctttacatt

SEQ ID NO: 104360 - DNA, 25 bp, Artificial sequence
  SiRNA target sequence
aatttagataaatttctttacattt

SEQ ID NO: 104361 - DNA, 25 bp, Artificial sequence
  SiRNA target sequence
atttagataaatttctttacatttc

SEQ ID NO: 104362 - DNA, 25 bp, Artificial sequence
  SiRNA target sequence
tttagataaatttctttacatttct

SEQ ID NO: 104363 - DNA, 25 bp, Artificial sequence
  SiRNA target sequence
ttagataaatttctttacatttctc

SEQ ID NO: 104364 - DNA, 25 bp, Artificial sequence
  SiRNA target sequence
tagataaatttctttacatttctca

SEQ ID NO: 104365 - DNA, 25 bp, Artificial sequence
  SiRNA target sequence
agataaatttctttacatttctcac

SEQ ID NO: 104366 - DNA, 25 bp, Artificial sequence
  SiRNA target sequence
gataaatttctttacatttctcacg

SEQ ID NO: 104367 - DNA, 25 bp, Artificial sequence
  SiRNA target sequence
ataaatttctttacatttctcacga

SEQ ID NO: 104368 - DNA, 25 bp, Artificial sequence
  SiRNA target sequence
taaatttctttacatttctcacgat

SEQ ID NO: 104369 - DNA, 25 bp, Artificial sequence
  SiRNA target sequence
aaatttctttacatttctcacgata

SEQ ID NO: 104370 - DNA, 25 bp, Artificial sequence
  SiRNA target sequence
aatttctttacatttctcacgatat

SEQ ID NO: 104371 - DNA, 25 bp, Artificial sequence
  SiRNA target sequence
atttctttacatttctcacgatatt

SEQ ID NO: 104372 - DNA, 25 bp, Artificial sequence
  SiRNA target sequence
tttctttacatttctcacgatattc

SEQ ID NO: 104373 - DNA, 25 bp, Artificial sequence
  SiRNA target sequence
ttctttacatttctcacgatattcc

SEQ ID NO: 104374 - DNA, 25 bp, Artificial sequence
  SiRNA target sequence
tctttacatttctcacgatattcct

SEQ ID NO: 104375 - DNA, 25 bp, Artificial sequence
  SiRNA target sequence
ctttacatttctcacgatattcctc

SEQ ID NO: 104376 - DNA, 25 bp, Artificial sequence
  SiRNA target sequence
tttacatttctcacgatattcctca

SEQ ID NO: 104377 - DNA, 25 bp, Artificial sequence
  SiRNA target sequence
ttacatttctcacgatattcctcag

SEQ ID NO: 104378 - DNA, 25 bp, Artificial sequence
  SiRNA target sequence
tacatttctcacgatattcctcagc

SEQ ID NO: 104379 - DNA, 25 bp, Artificial sequence
  SiRNA target sequence
acatttctcacgatattcctcagca

SEQ ID NO: 104380 - DNA, 25 bp, Artificial sequence
  SiRNA target sequence
catttctcacgatattcctcagcaa

SEQ ID NO: 104381 - DNA, 25 bp, Artificial sequence
  SiRNA target sequence
atttctcacgatattcctcagcaat

SEQ ID NO: 104382 - DNA, 25 bp, Artificial sequence
  SiRNA target sequence
tttctcacgatattcctcagcaatg

SEQ ID NO: 104383 - DNA, 25 bp, Artificial sequence
  SiRNA target sequence
ttctcacgatattcctcagcaatgg

SEQ ID NO: 104384 - DNA, 25 bp, Artificial sequence
  SiRNA target sequence
tctcacgatattcctcagcaatggt

SEQ ID NO: 104385 - DNA, 25 bp, Artificial sequence
  SiRNA target sequence
ctcacgatattcctcagcaatggta

SEQ ID NO: 104386 - DNA, 25 bp, Artificial sequence
  SiRNA target sequence
tcacgatattcctcagcaatggtat

SEQ ID NO: 104387 - DNA, 25 bp, Artificial sequence
  SiRNA target sequence
cacgatattcctcagcaatggtatc

SEQ ID NO: 104388 - DNA, 25 bp, Artificial sequence
  SiRNA target sequence
acgatattcctcagcaatggtatct

SEQ ID NO: 104389 - DNA, 25 bp, Artificial sequence
  SiRNA target sequence
cgatattcctcagcaatggtatctg

SEQ ID NO: 104390 - DNA, 25 bp, Artificial sequence
  SiRNA target sequence
gatattcctcagcaatggtatctgt

SEQ ID NO: 104391 - DNA, 25 bp, Artificial sequence
  SiRNA target sequence
atattcctcagcaatggtatctgtg

SEQ ID NO: 104392 - DNA, 25 bp, Artificial sequence
  SiRNA target sequence
tattcctcagcaatggtatctgtga

SEQ ID NO: 104393 - DNA, 25 bp, Artificial sequence
  SiRNA target sequence
attcctcagcaatggtatctgtgat

SEQ ID NO: 104394 - DNA, 25 bp, Artificial sequence
  SiRNA target sequence
ttcctcagcaatggtatctgtgata

SEQ ID NO: 104395 - DNA, 25 bp, Artificial sequence
  SiRNA target sequence
tcctcagcaatggtatctgtgataa

SEQ ID NO: 104396 - DNA, 25 bp, Artificial sequence
  SiRNA target sequence
cctcagcaatggtatctgtgataag

SEQ ID NO: 104397 - DNA, 25 bp, Artificial sequence
  SiRNA target sequence
ctcagcaatggtatctgtgataagc

SEQ ID NO: 104398 - DNA, 25 bp, Artificial sequence
  SiRNA target sequence
tcagcaatggtatctgtgataagcg

SEQ ID NO: 104399 - DNA, 25 bp, Artificial sequence
  SiRNA target sequence
cagcaatggtatctgtgataagcga

SEQ ID NO: 104400 - DNA, 25 bp, Artificial sequence
  SiRNA target sequence
agcaatggtatctgtgataagcgaa

SEQ ID NO: 104401 - DNA, 25 bp, Artificial sequence
  SiRNA target sequence
gcaatggtatctgtgataagcgaaa

SEQ ID NO: 104402 - DNA, 25 bp, Artificial sequence
  SiRNA target sequence
caatggtatctgtgataagcgaaag

SEQ ID NO: 104403 - DNA, 25 bp, Artificial sequence
  SiRNA target sequence
aatggtatctgtgataagcgaaagt

SEQ ID NO: 104404 - DNA, 25 bp, Artificial sequence
  SiRNA target sequence
atggtatctgtgataagcgaaagtt

SEQ ID NO: 104405 - DNA, 25 bp, Artificial sequence
  SiRNA target sequence
tggtatctgtgataagcgaaagttg

SEQ ID NO: 104406 - DNA, 25 bp, Artificial sequence
  SiRNA target sequence
ggtatctgtgataagcgaaagttgt

SEQ ID NO: 104407 - DNA, 25 bp, Artificial sequence
  SiRNA target sequence
gtatctgtgataagcgaaagttgta

SEQ ID NO: 104408 - DNA, 25 bp, Artificial sequence
  SiRNA target sequence
tatctgtgataagcgaaagttgtag

SEQ ID NO: 104409 - DNA, 25 bp, Artificial sequence
  SiRNA target sequence
atctgtgataagcgaaagttgtaga

SEQ ID NO: 104410 - DNA, 25 bp, Artificial sequence
  SiRNA target sequence
tctgtgataagcgaaagttgtagaa

SEQ ID NO: 104411 - DNA, 25 bp, Artificial sequence
  SiRNA target sequence
ctgtgataagcgaaagttgtagaaa

SEQ ID NO: 104412 - DNA, 25 bp, Artificial sequence
  SiRNA target sequence
tgtgataagcgaaagttgtagaaaa

SEQ ID NO: 104413 - DNA, 25 bp, Artificial sequence
  SiRNA target sequence
gtgataagcgaaagttgtagaaaaa

SEQ ID NO: 104414 - DNA, 25 bp, Artificial sequence
  SiRNA target sequence
tgataagcgaaagttgtagaaaaaa

SEQ ID NO: 104415 - DNA, 25 bp, Artificial sequence
  SiRNA target sequence
gataagcgaaagttgtagaaaaaaa

SEQ ID NO: 104416 - DNA, 25 bp, Artificial sequence
  SiRNA target sequence
ataagcgaaagttgtagaaaaaaat

SEQ ID NO: 104417 - DNA, 25 bp, Artificial sequence
  SiRNA target sequence
taagcgaaagttgtagaaaaaaata

SEQ ID NO: 104418 - DNA, 25 bp, Artificial sequence
  SiRNA target sequence
aagcgaaagttgtagaaaaaaatag

SEQ ID NO: 104419 - DNA, 25 bp, Artificial sequence
  SiRNA target sequence
agcgaaagttgtagaaaaaaataga

SEQ ID NO: 104420 - DNA, 25 bp, Artificial sequence
  SiRNA target sequence
gcgaaagttgtagaaaaaaatagat

SEQ ID NO: 104421 - DNA, 25 bp, Artificial sequence
  SiRNA target sequence
cgaaagttgtagaaaaaaatagatt

SEQ ID NO: 104422 - DNA, 25 bp, Artificial sequence
  SiRNA target sequence
gaaagttgtagaaaaaaatagattt

SEQ ID NO: 104423 - DNA, 25 bp, Artificial sequence
  SiRNA target sequence
aaagttgtagaaaaaaatagatttg

SEQ ID NO: 104424 - DNA, 25 bp, Artificial sequence
  SiRNA target sequence
aagttgtagaaaaaaatagatttga

SEQ ID NO: 104425 - DNA, 25 bp, Artificial sequence
  SiRNA target sequence
agttgtagaaaaaaatagatttgag

SEQ ID NO: 104426 - DNA, 25 bp, Artificial sequence
  SiRNA target sequence
gttgtagaaaaaaatagatttgagg

SEQ ID NO: 104427 - DNA, 25 bp, Artificial sequence
  SiRNA target sequence
ttgtagaaaaaaatagatttgagga

SEQ ID NO: 104428 - DNA, 25 bp, Artificial sequence
  SiRNA target sequence
tgtagaaaaaaatagatttgaggaa

SEQ ID NO: 104429 - DNA, 25 bp, Artificial sequence
  SiRNA target sequence
gtagaaaaaaatagatttgaggaat

SEQ ID NO: 104430 - DNA, 25 bp, Artificial sequence
  SiRNA target sequence
tagaaaaaaatagatttgaggaata

SEQ ID NO: 104431 - DNA, 25 bp, Artificial sequence
  SiRNA target sequence
agaaaaaaatagatttgaggaatag

SEQ ID NO: 104432 - DNA, 25 bp, Artificial sequence
  SiRNA target sequence
gaaaaaaatagatttgaggaataga

SEQ ID NO: 104433 - DNA, 25 bp, Artificial sequence
  SiRNA target sequence
aaaaaaatagatttgaggaatagaa

SEQ ID NO: 104434 - DNA, 25 bp, Artificial sequence
  SiRNA target sequence
aaaaaatagatttgaggaatagaat

SEQ ID NO: 104435 - DNA, 25 bp, Artificial sequence
  SiRNA target sequence
aaaaatagatttgaggaatagaatt

SEQ ID NO: 104436 - DNA, 25 bp, Artificial sequence
  SiRNA target sequence
aaaatagatttgaggaatagaatta

SEQ ID NO: 104437 - DNA, 25 bp, Artificial sequence
  SiRNA target sequence
aaatagatttgaggaatagaattaa

SEQ ID NO: 104438 - DNA, 25 bp, Artificial sequence
  SiRNA target sequence
aatagatttgaggaatagaattaaa

SEQ ID NO: 104439 - DNA, 25 bp, Artificial sequence
  SiRNA target sequence
atagatttgaggaatagaattaaaa

SEQ ID NO: 104440 - DNA, 25 bp, Artificial sequence
  SiRNA target sequence
tagatttgaggaatagaattaaaat

SEQ ID NO: 104441 - DNA, 25 bp, Artificial sequence
  SiRNA target sequence
agatttgaggaatagaattaaaatc

SEQ ID NO: 104442 - DNA, 25 bp, Artificial sequence
  SiRNA target sequence
gatttgaggaatagaattaaaatca

SEQ ID NO: 104443 - DNA, 25 bp, Artificial sequence
  SiRNA target sequence
atttgaggaatagaattaaaatcac

SEQ ID NO: 104444 - DNA, 25 bp, Artificial sequence
  SiRNA target sequence
tttgaggaatagaattaaaatcaca

SEQ ID NO: 104445 - DNA, 25 bp, Artificial sequence
  SiRNA target sequence
ttgaggaatagaattaaaatcacaa

SEQ ID NO: 104446 - DNA, 25 bp, Artificial sequence
  SiRNA target sequence
tgaggaatagaattaaaatcacaat

SEQ ID NO: 104447 - DNA, 25 bp, Artificial sequence
  SiRNA target sequence
gaggaatagaattaaaatcacaata

SEQ ID NO: 104448 - DNA, 25 bp, Artificial sequence
  SiRNA target sequence
aggaatagaattaaaatcacaatat

SEQ ID NO: 104449 - DNA, 25 bp, Artificial sequence
  SiRNA target sequence
ggaatagaattaaaatcacaatatt

SEQ ID NO: 104450 - DNA, 25 bp, Artificial sequence
  SiRNA target sequence
gaatagaattaaaatcacaatattt

SEQ ID NO: 104451 - DNA, 25 bp, Artificial sequence
  SiRNA target sequence
aatagaattaaaatcacaatatttt

SEQ ID NO: 104452 - DNA, 25 bp, Artificial sequence
  SiRNA target sequence
atagaattaaaatcacaatattttt

SEQ ID NO: 104453 - DNA, 25 bp, Artificial sequence
  SiRNA target sequence
tagaattaaaatcacaatatttttt

SEQ ID NO: 104454 - DNA, 25 bp, Artificial sequence
  SiRNA target sequence
agaattaaaatcacaatatttttta

SEQ ID NO: 104455 - DNA, 25 bp, Artificial sequence
  SiRNA target sequence
gaattaaaatcacaatattttttaa

SEQ ID NO: 104456 - DNA, 25 bp, Artificial sequence
  SiRNA target sequence
aattaaaatcacaatattttttaat

SEQ ID NO: 104457 - DNA, 25 bp, Artificial sequence
  SiRNA target sequence
attaaaatcacaatattttttaata

SEQ ID NO: 104458 - DNA, 25 bp, Artificial sequence
  SiRNA target sequence
ttaaaatcacaatattttttaatat

SEQ ID NO: 104459 - DNA, 25 bp, Artificial sequence
  SiRNA target sequence
taaaatcacaatattttttaatata

SEQ ID NO: 104460 - DNA, 25 bp, Artificial sequence
  SiRNA target sequence
aaaatcacaatattttttaatatat

SEQ ID NO: 104461 - DNA, 25 bp, Artificial sequence
  SiRNA target sequence
aaatcacaatattttttaatatatt

SEQ ID NO: 104462 - DNA, 25 bp, Artificial sequence
  SiRNA target sequence
aatcacaatattttttaatatattt

SEQ ID NO: 104463 - DNA, 25 bp, Artificial sequence
  SiRNA target sequence
atcacaatattttttaatatattta

SEQ ID NO: 104464 - DNA, 25 bp, Artificial sequence
  SiRNA target sequence
tcacaatattttttaatatatttaa

SEQ ID NO: 104465 - DNA, 25 bp, Artificial sequence
  SiRNA target sequence
cacaatattttttaatatatttaac

SEQ ID NO: 104466 - DNA, 25 bp, Artificial sequence
  SiRNA target sequence
acaatattttttaatatatttaacc

SEQ ID NO: 104467 - DNA, 25 bp, Artificial sequence
  SiRNA target sequence
caatattttttaatatatttaacca

SEQ ID NO: 104468 - DNA, 25 bp, Artificial sequence
  SiRNA target sequence
aatattttttaatatatttaaccaa

SEQ ID NO: 104469 - DNA, 25 bp, Artificial sequence
  SiRNA target sequence
atattttttaatatatttaaccaag

SEQ ID NO: 104470 - DNA, 25 bp, Artificial sequence
  SiRNA target sequence
tattttttaatatatttaaccaagg

SEQ ID NO: 104471 - DNA, 25 bp, Artificial sequence
  SiRNA target sequence
attttttaatatatttaaccaaggt

SEQ ID NO: 104472 - DNA, 25 bp, Artificial sequence
  SiRNA target sequence
ttttttaatatatttaaccaaggta

SEQ ID NO: 104473 - DNA, 25 bp, Artificial sequence
  SiRNA target sequence
tttttaatatatttaaccaaggtat

SEQ ID NO: 104474 - DNA, 25 bp, Artificial sequence
  SiRNA target sequence
ttttaatatatttaaccaaggtatt

SEQ ID NO: 104475 - DNA, 25 bp, Artificial sequence
  SiRNA target sequence
tttaatatatttaaccaaggtattg

SEQ ID NO: 104476 - DNA, 25 bp, Artificial sequence
  SiRNA target sequence
ttaatatatttaaccaaggtattgt

SEQ ID NO: 104477 - DNA, 25 bp, Artificial sequence
  SiRNA target sequence
taatatatttaaccaaggtattgtc

SEQ ID NO: 104478 - DNA, 25 bp, Artificial sequence
  SiRNA target sequence
aatatatttaaccaaggtattgtcc

SEQ ID NO: 104479 - DNA, 25 bp, Artificial sequence
  SiRNA target sequence
atatatttaaccaaggtattgtcct

SEQ ID NO: 104480 - DNA, 25 bp, Artificial sequence
  SiRNA target sequence
tatatttaaccaaggtattgtcctt

SEQ ID NO: 104481 - DNA, 25 bp, Artificial sequence
  SiRNA target sequence
atatttaaccaaggtattgtccttt

SEQ ID NO: 104482 - DNA, 25 bp, Artificial sequence
  SiRNA target sequence
tatttaaccaaggtattgtccttta

SEQ ID NO: 104483 - DNA, 25 bp, Artificial sequence
  SiRNA target sequence
atttaaccaaggtattgtcctttat

SEQ ID NO: 104484 - DNA, 25 bp, Artificial sequence
  SiRNA target sequence
tttaaccaaggtattgtcctttatg

SEQ ID NO: 104485 - DNA, 25 bp, Artificial sequence
  SiRNA target sequence
ttaaccaaggtattgtcctttatgt

SEQ ID NO: 104486 - DNA, 25 bp, Artificial sequence
  SiRNA target sequence
taaccaaggtattgtcctttatgtt

SEQ ID NO: 104487 - DNA, 25 bp, Artificial sequence
  SiRNA target sequence
aaccaaggtattgtcctttatgtta

SEQ ID NO: 104488 - DNA, 25 bp, Artificial sequence
  SiRNA target sequence
accaaggtattgtcctttatgttat

SEQ ID NO: 104489 - DNA, 25 bp, Artificial sequence
  SiRNA target sequence
ccaaggtattgtcctttatgttatt

SEQ ID NO: 104490 - DNA, 25 bp, Artificial sequence
  SiRNA target sequence
caaggtattgtcctttatgttatta

SEQ ID NO: 104491 - DNA, 25 bp, Artificial sequence
  SiRNA target sequence
aaggtattgtcctttatgttattat

SEQ ID NO: 104492 - DNA, 25 bp, Artificial sequence
  SiRNA target sequence
aggtattgtcctttatgttattata

SEQ ID NO: 104493 - DNA, 25 bp, Artificial sequence
  SiRNA target sequence
ggtattgtcctttatgttattatat

SEQ ID NO: 104494 - DNA, 25 bp, Artificial sequence
  SiRNA target sequence
gtattgtcctttatgttattatatc

SEQ ID NO: 104495 - DNA, 25 bp, Artificial sequence
  SiRNA target sequence
tattgtcctttatgttattatatct

SEQ ID NO: 104496 - DNA, 25 bp, Artificial sequence
  SiRNA target sequence
attgtcctttatgttattatatctt

SEQ ID NO: 104497 - DNA, 25 bp, Artificial sequence
  SiRNA target sequence
ttgtcctttatgttattatatctta

SEQ ID NO: 104498 - DNA, 25 bp, Artificial sequence
  SiRNA target sequence
tgtcctttatgttattatatcttac

SEQ ID NO: 104499 - DNA, 25 bp, Artificial sequence
  SiRNA target sequence
gtcctttatgttattatatcttaca

SEQ ID NO: 104500 - DNA, 25 bp, Artificial sequence
  SiRNA target sequence
tcctttatgttattatatcttacaa

SEQ ID NO: 104501 - DNA, 25 bp, Artificial sequence
  SiRNA target sequence
cctttatgttattatatcttacaaa

SEQ ID NO: 104502 - DNA, 25 bp, Artificial sequence
  SiRNA target sequence
ctttatgttattatatcttacaaac

SEQ ID NO: 104503 - DNA, 25 bp, Artificial sequence
  SiRNA target sequence
tttatgttattatatcttacaaact

SEQ ID NO: 104504 - DNA, 25 bp, Artificial sequence
  SiRNA target sequence
ttatgttattatatcttacaaactc

SEQ ID NO: 104505 - DNA, 25 bp, Artificial sequence
  SiRNA target sequence
tatgttattatatcttacaaactcc

SEQ ID NO: 104506 - DNA, 25 bp, Artificial sequence
  SiRNA target sequence
atgttattatatcttacaaactcct

SEQ ID NO: 104507 - DNA, 25 bp, Artificial sequence
  SiRNA target sequence
tgttattatatcttacaaactcctc

SEQ ID NO: 104508 - DNA, 25 bp, Artificial sequence
  SiRNA target sequence
gttattatatcttacaaactcctcg

SEQ ID NO: 104509 - DNA, 25 bp, Artificial sequence
  SiRNA target sequence
ttattatatcttacaaactcctcgt

SEQ ID NO: 104510 - DNA, 25 bp, Artificial sequence
  SiRNA target sequence
tattatatcttacaaactcctcgta

SEQ ID NO: 104511 - DNA, 25 bp, Artificial sequence
  SiRNA target sequence
attatatcttacaaactcctcgtaa

SEQ ID NO: 104512 - DNA, 25 bp, Artificial sequence
  SiRNA target sequence
ttatatcttacaaactcctcgtaat

SEQ ID NO: 104513 - DNA, 25 bp, Artificial sequence
  SiRNA target sequence
tatatcttacaaactcctcgtaatt

SEQ ID NO: 104514 - DNA, 25 bp, Artificial sequence
  SiRNA target sequence
atatcttacaaactcctcgtaatta

SEQ ID NO: 104515 - DNA, 25 bp, Artificial sequence
  SiRNA target sequence
tatcttacaaactcctcgtaattat

SEQ ID NO: 104516 - DNA, 25 bp, Artificial sequence
  SiRNA target sequence
atcttacaaactcctcgtaattata

SEQ ID NO: 104517 - DNA, 25 bp, Artificial sequence
  SiRNA target sequence
tcttacaaactcctcgtaattataa

SEQ ID NO: 104518 - DNA, 25 bp, Artificial sequence
  SiRNA target sequence
cttacaaactcctcgtaattataat

SEQ ID NO: 104519 - DNA, 25 bp, Artificial sequence
  SiRNA target sequence
ttacaaactcctcgtaattataatt

SEQ ID NO: 104520 - DNA, 25 bp, Artificial sequence
  SiRNA target sequence
tacaaactcctcgtaattataattt

SEQ ID NO: 104521 - DNA, 25 bp, Artificial sequence
  SiRNA target sequence
acaaactcctcgtaattataatttt

SEQ ID NO: 104522 - DNA, 25 bp, Artificial sequence
  SiRNA target sequence
caaactcctcgtaattataattttc

SEQ ID NO: 104523 - DNA, 25 bp, Artificial sequence
  SiRNA target sequence
aaactcctcgtaattataattttca

SEQ ID NO: 104524 - DNA, 25 bp, Artificial sequence
  SiRNA target sequence
aactcctcgtaattataattttcag

SEQ ID NO: 104525 - DNA, 25 bp, Artificial sequence
  SiRNA target sequence
actcctcgtaattataattttcagg

SEQ ID NO: 104526 - DNA, 25 bp, Artificial sequence
  SiRNA target sequence
ctcctcgtaattataattttcagga

SEQ ID NO: 104527 - DNA, 25 bp, Artificial sequence
  SiRNA target sequence
tcctcgtaattataattttcaggat

SEQ ID NO: 104528 - DNA, 25 bp, Artificial sequence
  SiRNA target sequence
cctcgtaattataattttcaggata

SEQ ID NO: 104529 - DNA, 25 bp, Artificial sequence
  SiRNA target sequence
ctcgtaattataattttcaggataa

SEQ ID NO: 104530 - DNA, 25 bp, Artificial sequence
  SiRNA target sequence
tcgtaattataattttcaggataaa

SEQ ID NO: 104531 - DNA, 25 bp, Artificial sequence
  SiRNA target sequence
cgtaattataattttcaggataaac

SEQ ID NO: 104532 - DNA, 25 bp, Artificial sequence
  SiRNA target sequence
gtaattataattttcaggataaacc

SEQ ID NO: 104533 - DNA, 25 bp, Artificial sequence
  SiRNA target sequence
taattataattttcaggataaaccg

SEQ ID NO: 104534 - DNA, 25 bp, Artificial sequence
  SiRNA target sequence
aattataattttcaggataaaccgc

SEQ ID NO: 104535 - DNA, 25 bp, Artificial sequence
  SiRNA target sequence
attataattttcaggataaaccgct

SEQ ID NO: 104536 - DNA, 25 bp, Artificial sequence
  SiRNA target sequence
ttataattttcaggataaaccgcta

SEQ ID NO: 104537 - DNA, 25 bp, Artificial sequence
  SiRNA target sequence
tataattttcaggataaaccgctag

SEQ ID NO: 104538 - DNA, 25 bp, Artificial sequence
  SiRNA target sequence
ataattttcaggataaaccgctaga

SEQ ID NO: 104539 - DNA, 25 bp, Artificial sequence
  SiRNA target sequence
taattttcaggataaaccgctagac

SEQ ID NO: 104540 - DNA, 25 bp, Artificial sequence
  SiRNA target sequence
aattttcaggataaaccgctagaca

SEQ ID NO: 104541 - DNA, 25 bp, Artificial sequence
  SiRNA target sequence
attttcaggataaaccgctagacaa

SEQ ID NO: 104542 - DNA, 25 bp, Artificial sequence
  SiRNA target sequence
ttttcaggataaaccgctagacaat

SEQ ID NO: 104543 - DNA, 25 bp, Artificial sequence
  SiRNA target sequence
tttcaggataaaccgctagacaatc

SEQ ID NO: 104544 - DNA, 25 bp, Artificial sequence
  SiRNA target sequence
ttcaggataaaccgctagacaatca

SEQ ID NO: 104545 - DNA, 25 bp, Artificial sequence
  SiRNA target sequence
tcaggataaaccgctagacaatcac

SEQ ID NO: 104546 - DNA, 25 bp, Artificial sequence
  SiRNA target sequence
caggataaaccgctagacaatcacc

SEQ ID NO: 104547 - DNA, 25 bp, Artificial sequence
  SiRNA target sequence
aggataaaccgctagacaatcaccg

SEQ ID NO: 104548 - DNA, 25 bp, Artificial sequence
  SiRNA target sequence
ggataaaccgctagacaatcaccga

SEQ ID NO: 104549 - DNA, 25 bp, Artificial sequence
  SiRNA target sequence
gataaaccgctagacaatcaccgat

SEQ ID NO: 104550 - DNA, 25 bp, Artificial sequence
  SiRNA target sequence
ataaaccgctagacaatcaccgatt

SEQ ID NO: 104551 - DNA, 25 bp, Artificial sequence
  SiRNA target sequence
taaaccgctagacaatcaccgattt

SEQ ID NO: 104552 - DNA, 25 bp, Artificial sequence
  SiRNA target sequence
aaaccgctagacaatcaccgatttc

SEQ ID NO: 104553 - DNA, 25 bp, Artificial sequence
  SiRNA target sequence
aaccgctagacaatcaccgatttca

SEQ ID NO: 104554 - DNA, 25 bp, Artificial sequence
  SiRNA target sequence
accgctagacaatcaccgatttcaa

SEQ ID NO: 104555 - DNA, 25 bp, Artificial sequence
  SiRNA target sequence
ccgctagacaatcaccgatttcaaa

SEQ ID NO: 104556 - DNA, 25 bp, Artificial sequence
  SiRNA target sequence
cgctagacaatcaccgatttcaaaa

SEQ ID NO: 104557 - DNA, 25 bp, Artificial sequence
  SiRNA target sequence
gctagacaatcaccgatttcaaaat

SEQ ID NO: 104558 - DNA, 25 bp, Artificial sequence
  SiRNA target sequence
ctagacaatcaccgatttcaaaatt

SEQ ID NO: 104559 - DNA, 25 bp, Artificial sequence
  SiRNA target sequence
tagacaatcaccgatttcaaaattt

SEQ ID NO: 104560 - DNA, 25 bp, Artificial sequence
  SiRNA target sequence
agacaatcaccgatttcaaaatttt

SEQ ID NO: 104561 - DNA, 25 bp, Artificial sequence
  SiRNA target sequence
gacaatcaccgatttcaaaattttc

SEQ ID NO: 104562 - DNA, 25 bp, Artificial sequence
  SiRNA target sequence
acaatcaccgatttcaaaattttct

SEQ ID NO: 104563 - DNA, 25 bp, Artificial sequence
  SiRNA target sequence
caatcaccgatttcaaaattttcta

SEQ ID NO: 104564 - DNA, 25 bp, Artificial sequence
  SiRNA target sequence
aatcaccgatttcaaaattttctat

SEQ ID NO: 104565 - DNA, 25 bp, Artificial sequence
  SiRNA target sequence
atcaccgatttcaaaattttctata

SEQ ID NO: 104566 - DNA, 25 bp, Artificial sequence
  SiRNA target sequence
tcaccgatttcaaaattttctatat

SEQ ID NO: 104567 - DNA, 25 bp, Artificial sequence
  SiRNA target sequence
caccgatttcaaaattttctatatc

SEQ ID NO: 104568 - DNA, 25 bp, Artificial sequence
  SiRNA target sequence
accgatttcaaaattttctatatct

SEQ ID NO: 104569 - DNA, 25 bp, Artificial sequence
  SiRNA target sequence
ccgatttcaaaattttctatatcta

SEQ ID NO: 104570 - DNA, 25 bp, Artificial sequence
  SiRNA target sequence
cgatttcaaaattttctatatctat

SEQ ID NO: 104571 - DNA, 25 bp, Artificial sequence
  SiRNA target sequence
gatttcaaaattttctatatctata

SEQ ID NO: 104572 - DNA, 25 bp, Artificial sequence
  SiRNA target sequence
atttcaaaattttctatatctatat

SEQ ID NO: 104573 - DNA, 25 bp, Artificial sequence
  SiRNA target sequence
tttcaaaattttctatatctatatc

SEQ ID NO: 104574 - DNA, 25 bp, Artificial sequence
  SiRNA target sequence
ttcaaaattttctatatctatatca

SEQ ID NO: 104575 - DNA, 25 bp, Artificial sequence
  SiRNA target sequence
tcaaaattttctatatctatatcaa

SEQ ID NO: 104576 - DNA, 25 bp, Artificial sequence
  SiRNA target sequence
caaaattttctatatctatatcaaa

SEQ ID NO: 104577 - DNA, 25 bp, Artificial sequence
  SiRNA target sequence
aaaattttctatatctatatcaaat

SEQ ID NO: 104578 - DNA, 25 bp, Artificial sequence
  SiRNA target sequence
aaattttctatatctatatcaaatt

SEQ ID NO: 104579 - DNA, 25 bp, Artificial sequence
  SiRNA target sequence
aattttctatatctatatcaaattt

SEQ ID NO: 104580 - DNA, 25 bp, Artificial sequence
  SiRNA target sequence
attttctatatctatatcaaatttt

SEQ ID NO: 104581 - DNA, 25 bp, Artificial sequence
  SiRNA target sequence
ttttctatatctatatcaaatttta

SEQ ID NO: 104582 - DNA, 25 bp, Artificial sequence
  SiRNA target sequence
tttctatatctatatcaaattttat

SEQ ID NO: 104583 - DNA, 25 bp, Artificial sequence
  SiRNA target sequence
ttctatatctatatcaaattttatt

SEQ ID NO: 104584 - DNA, 25 bp, Artificial sequence
  SiRNA target sequence
tctatatctatatcaaattttattt

SEQ ID NO: 104585 - DNA, 25 bp, Artificial sequence
  SiRNA target sequence
ctatatctatatcaaattttatttc

SEQ ID NO: 104586 - DNA, 25 bp, Artificial sequence
  SiRNA target sequence
tatatctatatcaaattttatttct

SEQ ID NO: 104587 - DNA, 25 bp, Artificial sequence
  SiRNA target sequence
atatctatatcaaattttatttcta

SEQ ID NO: 104588 - DNA, 25 bp, Artificial sequence
  SiRNA target sequence
tatctatatcaaattttatttctaa

SEQ ID NO: 104589 - DNA, 25 bp, Artificial sequence
  SiRNA target sequence
atctatatcaaattttatttctaaa

SEQ ID NO: 104590 - DNA, 25 bp, Artificial sequence
  SiRNA target sequence
tctatatcaaattttatttctaaaa

SEQ ID NO: 104591 - DNA, 25 bp, Artificial sequence
  SiRNA target sequence
ctatatcaaattttatttctaaaat

SEQ ID NO: 104592 - DNA, 25 bp, Artificial sequence
  SiRNA target sequence
tatatcaaattttatttctaaaata

SEQ ID NO: 104593 - DNA, 25 bp, Artificial sequence
  SiRNA target sequence
atatcaaattttatttctaaaatag

SEQ ID NO: 104594 - DNA, 25 bp, Artificial sequence
  SiRNA target sequence
tatcaaattttatttctaaaatagg

SEQ ID NO: 104595 - DNA, 25 bp, Artificial sequence
  SiRNA target sequence
atcaaattttatttctaaaatagga

SEQ ID NO: 104596 - DNA, 25 bp, Artificial sequence
  SiRNA target sequence
tcaaattttatttctaaaataggat

SEQ ID NO: 104597 - DNA, 25 bp, Artificial sequence
  SiRNA target sequence
caaattttatttctaaaataggata

SEQ ID NO: 104598 - DNA, 25 bp, Artificial sequence
  SiRNA target sequence
aaattttatttctaaaataggataa

SEQ ID NO: 104599 - DNA, 25 bp, Artificial sequence
  SiRNA target sequence
aattttatttctaaaataggataaa

SEQ ID NO: 104600 - DNA, 25 bp, Artificial sequence
  SiRNA target sequence
attttatttctaaaataggataaat

SEQ ID NO: 104601 - DNA, 25 bp, Artificial sequence
  SiRNA target sequence
ttttatttctaaaataggataaatg

SEQ ID NO: 104602 - DNA, 25 bp, Artificial sequence
  SiRNA target sequence
tttatttctaaaataggataaatgt

SEQ ID NO: 104603 - DNA, 25 bp, Artificial sequence
  SiRNA target sequence
ttatttctaaaataggataaatgta

SEQ ID NO: 104604 - DNA, 25 bp, Artificial sequence
  SiRNA target sequence
tatttctaaaataggataaatgtaa

SEQ ID NO: 104605 - DNA, 25 bp, Artificial sequence
  SiRNA target sequence
atttctaaaataggataaatgtaat

SEQ ID NO: 104606 - DNA, 25 bp, Artificial sequence
  SiRNA target sequence
tttctaaaataggataaatgtaatt

SEQ ID NO: 104607 - DNA, 25 bp, Artificial sequence
  SiRNA target sequence
ttctaaaataggataaatgtaattg

SEQ ID NO: 104608 - DNA, 25 bp, Artificial sequence
  SiRNA target sequence
tctaaaataggataaatgtaattgt

SEQ ID NO: 104609 - DNA, 25 bp, Artificial sequence
  SiRNA target sequence
ctaaaataggataaatgtaattgta

SEQ ID NO: 104610 - DNA, 25 bp, Artificial sequence
  SiRNA target sequence
taaaataggataaatgtaattgtaa

SEQ ID NO: 104611 - DNA, 25 bp, Artificial sequence
  SiRNA target sequence
aaaataggataaatgtaattgtaag

SEQ ID NO: 104612 - DNA, 25 bp, Artificial sequence
  SiRNA target sequence
aaataggataaatgtaattgtaagg

SEQ ID NO: 104613 - DNA, 25 bp, Artificial sequence
  SiRNA target sequence
aataggataaatgtaattgtaaggt

SEQ ID NO: 104614 - DNA, 25 bp, Artificial sequence
  SiRNA target sequence
ataggataaatgtaattgtaaggtg

SEQ ID NO: 104615 - DNA, 25 bp, Artificial sequence
  SiRNA target sequence
taggataaatgtaattgtaaggtgt

SEQ ID NO: 104616 - DNA, 25 bp, Artificial sequence
  SiRNA target sequence
aggataaatgtaattgtaaggtgtt

SEQ ID NO: 104617 - DNA, 25 bp, Artificial sequence
  SiRNA target sequence
ggataaatgtaattgtaaggtgtta

SEQ ID NO: 104618 - DNA, 25 bp, Artificial sequence
  SiRNA target sequence
gataaatgtaattgtaaggtgttaa

SEQ ID NO: 104619 - DNA, 25 bp, Artificial sequence
  SiRNA target sequence
ataaatgtaattgtaaggtgttaat

SEQ ID NO: 104620 - DNA, 25 bp, Artificial sequence
  SiRNA target sequence
taaatgtaattgtaaggtgttaata

SEQ ID NO: 104621 - DNA, 25 bp, Artificial sequence
  SiRNA target sequence
aaatgtaattgtaaggtgttaatat

SEQ ID NO: 104622 - DNA, 25 bp, Artificial sequence
  SiRNA target sequence
aatgtaattgtaaggtgttaatatc

SEQ ID NO: 104623 - DNA, 25 bp, Artificial sequence
  SiRNA target sequence
atgtaattgtaaggtgttaatatct

SEQ ID NO: 104624 - DNA, 25 bp, Artificial sequence
  SiRNA target sequence
tgtaattgtaaggtgttaatatctt

SEQ ID NO: 104625 - DNA, 25 bp, Artificial sequence
  SiRNA target sequence
gtaattgtaaggtgttaatatctta

SEQ ID NO: 104626 - DNA, 25 bp, Artificial sequence
  SiRNA target sequence
taattgtaaggtgttaatatcttaa

SEQ ID NO: 104627 - DNA, 25 bp, Artificial sequence
  SiRNA target sequence
aattgtaaggtgttaatatcttaat

SEQ ID NO: 104628 - DNA, 25 bp, Artificial sequence
  SiRNA target sequence
attgtaaggtgttaatatcttaata

SEQ ID NO: 104629 - DNA, 25 bp, Artificial sequence
  SiRNA target sequence
ttgtaaggtgttaatatcttaatat

SEQ ID NO: 104630 - DNA, 25 bp, Artificial sequence
  SiRNA target sequence
tgtaaggtgttaatatcttaatatc

SEQ ID NO: 104631 - DNA, 25 bp, Artificial sequence
  SiRNA target sequence
gtaaggtgttaatatcttaatatca

SEQ ID NO: 104632 - DNA, 25 bp, Artificial sequence
  SiRNA target sequence
taaggtgttaatatcttaatatcat

SEQ ID NO: 104633 - DNA, 25 bp, Artificial sequence
  SiRNA target sequence
aaggtgttaatatcttaatatcatt

SEQ ID NO: 104634 - DNA, 25 bp, Artificial sequence
  SiRNA target sequence
aggtgttaatatcttaatatcattt

SEQ ID NO: 104635 - DNA, 25 bp, Artificial sequence
  SiRNA target sequence
ggtgttaatatcttaatatcattta

SEQ ID NO: 104636 - DNA, 25 bp, Artificial sequence
  SiRNA target sequence
gtgttaatatcttaatatcatttat

SEQ ID NO: 104637 - DNA, 25 bp, Artificial sequence
  SiRNA target sequence
tgttaatatcttaatatcatttatt

SEQ ID NO: 104638 - DNA, 25 bp, Artificial sequence
  SiRNA target sequence
gttaatatcttaatatcatttattg

SEQ ID NO: 104639 - DNA, 25 bp, Artificial sequence
  SiRNA target sequence
ttaatatcttaatatcatttattga

SEQ ID NO: 104640 - DNA, 25 bp, Artificial sequence
  SiRNA target sequence
taatatcttaatatcatttattgac

SEQ ID NO: 104641 - DNA, 25 bp, Artificial sequence
  SiRNA target sequence
aatatcttaatatcatttattgacg

SEQ ID NO: 104642 - DNA, 25 bp, Artificial sequence
  SiRNA target sequence
atatcttaatatcatttattgacgc

SEQ ID NO: 104643 - DNA, 25 bp, Artificial sequence
  SiRNA target sequence
tatcttaatatcatttattgacgca

SEQ ID NO: 104644 - DNA, 25 bp, Artificial sequence
  SiRNA target sequence
atcttaatatcatttattgacgcac

SEQ ID NO: 104645 - DNA, 25 bp, Artificial sequence
  SiRNA target sequence
tcttaatatcatttattgacgcact

SEQ ID NO: 104646 - DNA, 25 bp, Artificial sequence
  SiRNA target sequence
cttaatatcatttattgacgcactg

SEQ ID NO: 104647 - DNA, 25 bp, Artificial sequence
  SiRNA target sequence
ttaatatcatttattgacgcactgt

SEQ ID NO: 104648 - DNA, 25 bp, Artificial sequence
  SiRNA target sequence
taatatcatttattgacgcactgta

SEQ ID NO: 104649 - DNA, 25 bp, Artificial sequence
  SiRNA target sequence
aatatcatttattgacgcactgtat

SEQ ID NO: 104650 - DNA, 25 bp, Artificial sequence
  SiRNA target sequence
atatcatttattgacgcactgtata

SEQ ID NO: 104651 - DNA, 25 bp, Artificial sequence
  SiRNA target sequence
tatcatttattgacgcactgtataa

SEQ ID NO: 104652 - DNA, 25 bp, Artificial sequence
  SiRNA target sequence
atcatttattgacgcactgtataaa

SEQ ID NO: 104653 - DNA, 25 bp, Artificial sequence
  SiRNA target sequence
tcatttattgacgcactgtataaat

SEQ ID NO: 104654 - DNA, 25 bp, Artificial sequence
  SiRNA target sequence
catttattgacgcactgtataaatc

SEQ ID NO: 104655 - DNA, 25 bp, Artificial sequence
  SiRNA target sequence
atttattgacgcactgtataaatca

SEQ ID NO: 104656 - DNA, 25 bp, Artificial sequence
  SiRNA target sequence
tttattgacgcactgtataaatcat

SEQ ID NO: 104657 - DNA, 25 bp, Artificial sequence
  SiRNA target sequence
ttattgacgcactgtataaatcatt

SEQ ID NO: 104658 - DNA, 25 bp, Artificial sequence
  SiRNA target sequence
tattgacgcactgtataaatcattt

SEQ ID NO: 104659 - DNA, 25 bp, Artificial sequence
  SiRNA target sequence
attgacgcactgtataaatcatttt

SEQ ID NO: 104660 - DNA, 25 bp, Artificial sequence
  SiRNA target sequence
ttgacgcactgtataaatcattttt

SEQ ID NO: 104661 - DNA, 25 bp, Artificial sequence
  SiRNA target sequence
tgacgcactgtataaatcattttta

SEQ ID NO: 104662 - DNA, 25 bp, Artificial sequence
  SiRNA target sequence
gacgcactgtataaatcatttttac

SEQ ID NO: 104663 - DNA, 25 bp, Artificial sequence
  SiRNA target sequence
acgcactgtataaatcatttttaca

SEQ ID NO: 104664 - DNA, 25 bp, Artificial sequence
  SiRNA target sequence
cgcactgtataaatcatttttacaa

SEQ ID NO: 104665 - DNA, 25 bp, Artificial sequence
  SiRNA target sequence
gcactgtataaatcatttttacaac

SEQ ID NO: 104666 - DNA, 25 bp, Artificial sequence
  SiRNA target sequence
cactgtataaatcatttttacaact

SEQ ID NO: 104667 - DNA, 25 bp, Artificial sequence
  SiRNA target sequence
actgtataaatcatttttacaactt

SEQ ID NO: 104668 - DNA, 25 bp, Artificial sequence
  SiRNA target sequence
ctgtataaatcatttttacaacttg

SEQ ID NO: 104669 - DNA, 25 bp, Artificial sequence
  SiRNA target sequence
tgtataaatcatttttacaacttgc

SEQ ID NO: 104670 - DNA, 25 bp, Artificial sequence
  SiRNA target sequence
gtataaatcatttttacaacttgca

SEQ ID NO: 104671 - DNA, 25 bp, Artificial sequence
  SiRNA target sequence
tataaatcatttttacaacttgcaa

SEQ ID NO: 104672 - DNA, 25 bp, Artificial sequence
  SiRNA target sequence
ataaatcatttttacaacttgcaaa

SEQ ID NO: 104673 - DNA, 25 bp, Artificial sequence
  SiRNA target sequence
taaatcatttttacaacttgcaaaa

SEQ ID NO: 104674 - DNA, 25 bp, Artificial sequence
  SiRNA target sequence
aaatcatttttacaacttgcaaaat

SEQ ID NO: 104675 - DNA, 25 bp, Artificial sequence
  SiRNA target sequence
aatcatttttacaacttgcaaaatt

SEQ ID NO: 104676 - DNA, 25 bp, Artificial sequence
  SiRNA target sequence
atcatttttacaacttgcaaaattt

SEQ ID NO: 104677 - DNA, 25 bp, Artificial sequence
  SiRNA target sequence
tcatttttacaacttgcaaaatttt

SEQ ID NO: 104678 - DNA, 25 bp, Artificial sequence
  SiRNA target sequence
catttttacaacttgcaaaattttt

SEQ ID NO: 104679 - DNA, 25 bp, Artificial sequence
  SiRNA target sequence
atttttacaacttgcaaaattttta

SEQ ID NO: 104680 - DNA, 25 bp, Artificial sequence
  SiRNA target sequence
tttttacaacttgcaaaatttttag

SEQ ID NO: 104681 - DNA, 25 bp, Artificial sequence
  SiRNA target sequence
ttttacaacttgcaaaatttttagc

SEQ ID NO: 104682 - DNA, 25 bp, Artificial sequence
  SiRNA target sequence
tttacaacttgcaaaatttttagca

SEQ ID NO: 104683 - DNA, 25 bp, Artificial sequence
  SiRNA target sequence
ttacaacttgcaaaatttttagcat

SEQ ID NO: 104684 - DNA, 25 bp, Artificial sequence
  SiRNA target sequence
tacaacttgcaaaatttttagcatt

SEQ ID NO: 104685 - DNA, 25 bp, Artificial sequence
  SiRNA target sequence
acaacttgcaaaatttttagcattt

SEQ ID NO: 104686 - DNA, 25 bp, Artificial sequence
  SiRNA target sequence
caacttgcaaaatttttagcatttt

SEQ ID NO: 104687 - DNA, 25 bp, Artificial sequence
  SiRNA target sequence
aacttgcaaaatttttagcattttg

SEQ ID NO: 104688 - DNA, 25 bp, Artificial sequence
  SiRNA target sequence
acttgcaaaatttttagcattttgt

SEQ ID NO: 104689 - DNA, 25 bp, Artificial sequence
  SiRNA target sequence
cttgcaaaatttttagcattttgta

SEQ ID NO: 104690 - DNA, 25 bp, Artificial sequence
  SiRNA target sequence
ttgcaaaatttttagcattttgtag

SEQ ID NO: 104691 - DNA, 25 bp, Artificial sequence
  SiRNA target sequence
tgcaaaatttttagcattttgtagt

SEQ ID NO: 104692 - DNA, 25 bp, Artificial sequence
  SiRNA target sequence
gcaaaatttttagcattttgtagtt

SEQ ID NO: 104693 - DNA, 25 bp, Artificial sequence
  SiRNA target sequence
caaaatttttagcattttgtagttt

SEQ ID NO: 104694 - DNA, 25 bp, Artificial sequence
  SiRNA target sequence
aaaatttttagcattttgtagtttg

SEQ ID NO: 104695 - DNA, 25 bp, Artificial sequence
  SiRNA target sequence
aaatttttagcattttgtagtttgt

SEQ ID NO: 104696 - DNA, 25 bp, Artificial sequence
  SiRNA target sequence
aatttttagcattttgtagtttgta

SEQ ID NO: 104697 - DNA, 25 bp, Artificial sequence
  SiRNA target sequence
atttttagcattttgtagtttgtaa

SEQ ID NO: 104698 - DNA, 25 bp, Artificial sequence
  SiRNA target sequence
tttttagcattttgtagtttgtaat

SEQ ID NO: 104699 - DNA, 25 bp, Artificial sequence
  SiRNA target sequence
ttttagcattttgtagtttgtaatg

SEQ ID NO: 104700 - DNA, 25 bp, Artificial sequence
  SiRNA target sequence
tttagcattttgtagtttgtaatgc

SEQ ID NO: 104701 - DNA, 25 bp, Artificial sequence
  SiRNA target sequence
ttagcattttgtagtttgtaatgcg

SEQ ID NO: 104702 - DNA, 25 bp, Artificial sequence
  SiRNA target sequence
tagcattttgtagtttgtaatgcgg

SEQ ID NO: 104703 - DNA, 25 bp, Artificial sequence
  SiRNA target sequence
agcattttgtagtttgtaatgcggt

SEQ ID NO: 104704 - DNA, 25 bp, Artificial sequence
  SiRNA target sequence
gcattttgtagtttgtaatgcggta

SEQ ID NO: 104705 - DNA, 25 bp, Artificial sequence
  SiRNA target sequence
cattttgtagtttgtaatgcggtaa

SEQ ID NO: 104706 - DNA, 25 bp, Artificial sequence
  SiRNA target sequence
attttgtagtttgtaatgcggtaat

SEQ ID NO: 104707 - DNA, 25 bp, Artificial sequence
  SiRNA target sequence
ttttgtagtttgtaatgcggtaata

SEQ ID NO: 104708 - DNA, 25 bp, Artificial sequence
  SiRNA target sequence
tttgtagtttgtaatgcggtaatat

SEQ ID NO: 104709 - DNA, 25 bp, Artificial sequence
  SiRNA target sequence
ttgtagtttgtaatgcggtaatata

SEQ ID NO: 104710 - DNA, 25 bp, Artificial sequence
  SiRNA target sequence
tgtagtttgtaatgcggtaatatat

SEQ ID NO: 104711 - DNA, 25 bp, Artificial sequence
  SiRNA target sequence
gtagtttgtaatgcggtaatatata

SEQ ID NO: 104712 - DNA, 25 bp, Artificial sequence
  SiRNA target sequence
tagtttgtaatgcggtaatatataa

SEQ ID NO: 104713 - DNA, 25 bp, Artificial sequence
  SiRNA target sequence
agtttgtaatgcggtaatatataat

SEQ ID NO: 104714 - DNA, 25 bp, Artificial sequence
  SiRNA target sequence
gtttgtaatgcggtaatatataata

SEQ ID NO: 104715 - DNA, 25 bp, Artificial sequence
  SiRNA target sequence
tttgtaatgcggtaatatataatat

SEQ ID NO: 104716 - DNA, 25 bp, Artificial sequence
  SiRNA target sequence
ttgtaatgcggtaatatataatata

SEQ ID NO: 104717 - DNA, 25 bp, Artificial sequence
  SiRNA target sequence
tgtaatgcggtaatatataatatag

SEQ ID NO: 104718 - DNA, 25 bp, Artificial sequence
  SiRNA target sequence
gtaatgcggtaatatataatataga

SEQ ID NO: 104719 - DNA, 25 bp, Artificial sequence
  SiRNA target sequence
taatgcggtaatatataatatagat

SEQ ID NO: 104720 - DNA, 25 bp, Artificial sequence
  SiRNA target sequence
aatgcggtaatatataatatagatc

SEQ ID NO: 104721 - DNA, 25 bp, Artificial sequence
  SiRNA target sequence
atgcggtaatatataatatagatct

SEQ ID NO: 104722 - DNA, 25 bp, Artificial sequence
  SiRNA target sequence
tgcggtaatatataatatagatctt

SEQ ID NO: 104723 - DNA, 25 bp, Artificial sequence
  SiRNA target sequence
gcggtaatatataatatagatcttt

SEQ ID NO: 104724 - DNA, 25 bp, Artificial sequence
  SiRNA target sequence
cggtaatatataatatagatctttt

SEQ ID NO: 104725 - DNA, 25 bp, Artificial sequence
  SiRNA target sequence
ggtaatatataatatagatctttta

SEQ ID NO: 104726 - DNA, 25 bp, Artificial sequence
  SiRNA target sequence
gtaatatataatatagatcttttat

SEQ ID NO: 104727 - DNA, 25 bp, Artificial sequence
  SiRNA target sequence
taatatataatatagatcttttatc

SEQ ID NO: 104728 - DNA, 25 bp, Artificial sequence
  SiRNA target sequence
aatatataatatagatcttttatcc

SEQ ID NO: 104729 - DNA, 25 bp, Artificial sequence
  SiRNA target sequence
atatataatatagatcttttatcca

SEQ ID NO: 104730 - DNA, 25 bp, Artificial sequence
  SiRNA target sequence
tatataatatagatcttttatccat

SEQ ID NO: 104731 - DNA, 25 bp, Artificial sequence
  SiRNA target sequence
atataatatagatcttttatccatg

SEQ ID NO: 104732 - DNA, 25 bp, Artificial sequence
  SiRNA target sequence
tataatatagatcttttatccatgt

SEQ ID NO: 104733 - DNA, 25 bp, Artificial sequence
  SiRNA target sequence
ataatatagatcttttatccatgtc

SEQ ID NO: 104734 - DNA, 25 bp, Artificial sequence
  SiRNA target sequence
taatatagatcttttatccatgtct

SEQ ID NO: 104735 - DNA, 25 bp, Artificial sequence
  SiRNA target sequence
aatatagatcttttatccatgtctt

SEQ ID NO: 104736 - DNA, 25 bp, Artificial sequence
  SiRNA target sequence
atatagatcttttatccatgtctta

SEQ ID NO: 104737 - DNA, 25 bp, Artificial sequence
  SiRNA target sequence
tatagatcttttatccatgtcttaa

SEQ ID NO: 104738 - DNA, 25 bp, Artificial sequence
  SiRNA target sequence
atagatcttttatccatgtcttaaa

SEQ ID NO: 104739 - DNA, 25 bp, Artificial sequence
  SiRNA target sequence
tagatcttttatccatgtcttaaat

SEQ ID NO: 104740 - DNA, 25 bp, Artificial sequence
  SiRNA target sequence
agatcttttatccatgtcttaaatt

SEQ ID NO: 104741 - DNA, 25 bp, Artificial sequence
  SiRNA target sequence
gatcttttatccatgtcttaaattc

SEQ ID NO: 104742 - DNA, 25 bp, Artificial sequence
  SiRNA target sequence
atcttttatccatgtcttaaattcg

SEQ ID NO: 104743 - DNA, 25 bp, Artificial sequence
  SiRNA target sequence
tcttttatccatgtcttaaattcgc

SEQ ID NO: 104744 - DNA, 25 bp, Artificial sequence
  SiRNA target sequence
cttttatccatgtcttaaattcgcc

SEQ ID NO: 104745 - DNA, 25 bp, Artificial sequence
  SiRNA target sequence
ttttatccatgtcttaaattcgccc

SEQ ID NO: 104746 - DNA, 25 bp, Artificial sequence
  SiRNA target sequence
tttatccatgtcttaaattcgccca

SEQ ID NO: 104747 - DNA, 25 bp, Artificial sequence
  SiRNA target sequence
ttatccatgtcttaaattcgcccat

SEQ ID NO: 104748 - DNA, 25 bp, Artificial sequence
  SiRNA target sequence
tatccatgtcttaaattcgcccata

SEQ ID NO: 104749 - DNA, 25 bp, Artificial sequence
  SiRNA target sequence
atccatgtcttaaattcgcccataa

SEQ ID NO: 104750 - DNA, 25 bp, Artificial sequence
  SiRNA target sequence
tccatgtcttaaattcgcccataaa

SEQ ID NO: 104751 - DNA, 25 bp, Artificial sequence
  SiRNA target sequence
ccatgtcttaaattcgcccataaat

SEQ ID NO: 104752 - DNA, 25 bp, Artificial sequence
  SiRNA target sequence
catgtcttaaattcgcccataaatc

SEQ ID NO: 104753 - DNA, 25 bp, Artificial sequence
  SiRNA target sequence
atgtcttaaattcgcccataaatcc

SEQ ID NO: 104754 - DNA, 25 bp, Artificial sequence
  SiRNA target sequence
tgtcttaaattcgcccataaatcct

SEQ ID NO: 104755 - DNA, 25 bp, Artificial sequence
  SiRNA target sequence
gtcttaaattcgcccataaatcctt

SEQ ID NO: 104756 - DNA, 25 bp, Artificial sequence
  SiRNA target sequence
tcttaaattcgcccataaatccttc

SEQ ID NO: 104757 - DNA, 25 bp, Artificial sequence
  SiRNA target sequence
cttaaattcgcccataaatccttct

SEQ ID NO: 104758 - DNA, 25 bp, Artificial sequence
  SiRNA target sequence
ttaaattcgcccataaatccttctt

SEQ ID NO: 104759 - DNA, 25 bp, Artificial sequence
  SiRNA target sequence
taaattcgcccataaatccttcttt

SEQ ID NO: 104760 - DNA, 25 bp, Artificial sequence
  SiRNA target sequence
aaattcgcccataaatccttctttg

SEQ ID NO: 104761 - DNA, 25 bp, Artificial sequence
  SiRNA target sequence
aattcgcccataaatccttctttgt

SEQ ID NO: 104762 - DNA, 25 bp, Artificial sequence
  SiRNA target sequence
attcgcccataaatccttctttgtc

SEQ ID NO: 104763 - DNA, 25 bp, Artificial sequence
  SiRNA target sequence
ttcgcccataaatccttctttgtct

SEQ ID NO: 104764 - DNA, 25 bp, Artificial sequence
  SiRNA target sequence
tcgcccataaatccttctttgtctt

SEQ ID NO: 104765 - DNA, 25 bp, Artificial sequence
  SiRNA target sequence
cgcccataaatccttctttgtcttg

SEQ ID NO: 104766 - DNA, 25 bp, Artificial sequence
  SiRNA target sequence
gcccataaatccttctttgtcttgg

SEQ ID NO: 104767 - DNA, 25 bp, Artificial sequence
  SiRNA target sequence
cccataaatccttctttgtcttggc

SEQ ID NO: 104768 - DNA, 25 bp, Artificial sequence
  SiRNA target sequence
ccataaatccttctttgtcttggct

SEQ ID NO: 104769 - DNA, 25 bp, Artificial sequence
  SiRNA target sequence
cataaatccttctttgtcttggcta

SEQ ID NO: 104770 - DNA, 25 bp, Artificial sequence
  SiRNA target sequence
ataaatccttctttgtcttggctat

SEQ ID NO: 104771 - DNA, 25 bp, Artificial sequence
  SiRNA target sequence
taaatccttctttgtcttggctatc

SEQ ID NO: 104772 - DNA, 25 bp, Artificial sequence
  SiRNA target sequence
aaatccttctttgtcttggctatct

SEQ ID NO: 104773 - DNA, 25 bp, Artificial sequence
  SiRNA target sequence
aatccttctttgtcttggctatctc

SEQ ID NO: 104774 - DNA, 25 bp, Artificial sequence
  SiRNA target sequence
atccttctttgtcttggctatctcc

SEQ ID NO: 104775 - DNA, 25 bp, Artificial sequence
  SiRNA target sequence
tccttctttgtcttggctatctcca

SEQ ID NO: 104776 - DNA, 25 bp, Artificial sequence
  SiRNA target sequence
ccttctttgtcttggctatctccat

SEQ ID NO: 104777 - DNA, 25 bp, Artificial sequence
  SiRNA target sequence
cttctttgtcttggctatctccatt

SEQ ID NO: 104778 - DNA, 25 bp, Artificial sequence
  SiRNA target sequence
ttctttgtcttggctatctccatta

SEQ ID NO: 104779 - DNA, 25 bp, Artificial sequence
  SiRNA target sequence
tctttgtcttggctatctccattac

SEQ ID NO: 104780 - DNA, 25 bp, Artificial sequence
  SiRNA target sequence
ctttgtcttggctatctccattacc

SEQ ID NO: 104781 - DNA, 25 bp, Artificial sequence
  SiRNA target sequence
tttgtcttggctatctccattaccc

SEQ ID NO: 104782 - DNA, 25 bp, Artificial sequence
  SiRNA target sequence
ttgtcttggctatctccattaccct

SEQ ID NO: 104783 - DNA, 25 bp, Artificial sequence
  SiRNA target sequence
tgtcttggctatctccattaccctt

SEQ ID NO: 104784 - DNA, 25 bp, Artificial sequence
  SiRNA target sequence
gtcttggctatctccattacccttt

SEQ ID NO: 104785 - DNA, 25 bp, Artificial sequence
  SiRNA target sequence
tcttggctatctccattaccctttc

SEQ ID NO: 104786 - DNA, 25 bp, Artificial sequence
  SiRNA target sequence
cttggctatctccattaccctttct

SEQ ID NO: 104787 - DNA, 25 bp, Artificial sequence
  SiRNA target sequence
ttggctatctccattaccctttctt

SEQ ID NO: 104788 - DNA, 25 bp, Artificial sequence
  SiRNA target sequence
tggctatctccattaccctttctta

SEQ ID NO: 104789 - DNA, 25 bp, Artificial sequence
  SiRNA target sequence
ggctatctccattaccctttcttat

SEQ ID NO: 104790 - DNA, 25 bp, Artificial sequence
  SiRNA target sequence
gctatctccattaccctttcttatc

SEQ ID NO: 104791 - DNA, 25 bp, Artificial sequence
  SiRNA target sequence
ctatctccattaccctttcttatca

SEQ ID NO: 104792 - DNA, 25 bp, Artificial sequence
  SiRNA target sequence
tatctccattaccctttcttatcag

SEQ ID NO: 104793 - DNA, 25 bp, Artificial sequence
  SiRNA target sequence
atctccattaccctttcttatcaga

SEQ ID NO: 104794 - DNA, 25 bp, Artificial sequence
  SiRNA target sequence
tctccattaccctttcttatcagag

SEQ ID NO: 104795 - DNA, 25 bp, Artificial sequence
  SiRNA target sequence
ctccattaccctttcttatcagagg

SEQ ID NO: 104796 - DNA, 25 bp, Artificial sequence
  SiRNA target sequence
tccattaccctttcttatcagaggt

SEQ ID NO: 104797 - DNA, 25 bp, Artificial sequence
  SiRNA target sequence
ccattaccctttcttatcagaggtt

SEQ ID NO: 104798 - DNA, 25 bp, Artificial sequence
  SiRNA target sequence
cattaccctttcttatcagaggttt

SEQ ID NO: 104799 - DNA, 25 bp, Artificial sequence
  SiRNA target sequence
attaccctttcttatcagaggttta

SEQ ID NO: 104800 - DNA, 25 bp, Artificial sequence
  SiRNA target sequence
ttaccctttcttatcagaggtttag

SEQ ID NO: 104801 - DNA, 25 bp, Artificial sequence
  SiRNA target sequence
taccctttcttatcagaggtttagc

SEQ ID NO: 104802 - DNA, 25 bp, Artificial sequence
  SiRNA target sequence
accctttcttatcagaggtttagct

SEQ ID NO: 104803 - DNA, 25 bp, Artificial sequence
  SiRNA target sequence
ccctttcttatcagaggtttagctc

SEQ ID NO: 104804 - DNA, 25 bp, Artificial sequence
  SiRNA target sequence
cctttcttatcagaggtttagctcc

SEQ ID NO: 104805 - DNA, 25 bp, Artificial sequence
  SiRNA target sequence
ctttcttatcagaggtttagctccg

SEQ ID NO: 104806 - DNA, 25 bp, Artificial sequence
  SiRNA target sequence
tttcttatcagaggtttagctccgt

SEQ ID NO: 104807 - DNA, 25 bp, Artificial sequence
  SiRNA target sequence
ttcttatcagaggtttagctccgtg

SEQ ID NO: 104808 - DNA, 25 bp, Artificial sequence
  SiRNA target sequence
tcttatcagaggtttagctccgtgt

SEQ ID NO: 104809 - DNA, 25 bp, Artificial sequence
  SiRNA target sequence
cttatcagaggtttagctccgtgtt

SEQ ID NO: 104810 - DNA, 25 bp, Artificial sequence
  SiRNA target sequence
ttatcagaggtttagctccgtgttt

SEQ ID NO: 104811 - DNA, 25 bp, Artificial sequence
  SiRNA target sequence
tatcagaggtttagctccgtgtttt

SEQ ID NO: 104812 - DNA, 25 bp, Artificial sequence
  SiRNA target sequence
atcagaggtttagctccgtgtttta

SEQ ID NO: 104813 - DNA, 25 bp, Artificial sequence
  SiRNA target sequence
tcagaggtttagctccgtgttttaa

SEQ ID NO: 104814 - DNA, 25 bp, Artificial sequence
  SiRNA target sequence
cagaggtttagctccgtgttttaaa

SEQ ID NO: 104815 - DNA, 25 bp, Artificial sequence
  SiRNA target sequence
agaggtttagctccgtgttttaaaa

SEQ ID NO: 104816 - DNA, 25 bp, Artificial sequence
  SiRNA target sequence
gaggtttagctccgtgttttaaaag

SEQ ID NO: 104817 - DNA, 25 bp, Artificial sequence
  SiRNA target sequence
aggtttagctccgtgttttaaaagg

SEQ ID NO: 104818 - DNA, 25 bp, Artificial sequence
  SiRNA target sequence
ggtttagctccgtgttttaaaaggc

SEQ ID NO: 104819 - DNA, 25 bp, Artificial sequence
  SiRNA target sequence
gtttagctccgtgttttaaaaggca

SEQ ID NO: 104820 - DNA, 25 bp, Artificial sequence
  SiRNA target sequence
tttagctccgtgttttaaaaggcaa

SEQ ID NO: 104821 - DNA, 25 bp, Artificial sequence
  SiRNA target sequence
ttagctccgtgttttaaaaggcaat

SEQ ID NO: 104822 - DNA, 25 bp, Artificial sequence
  SiRNA target sequence
tagctccgtgttttaaaaggcaatt

SEQ ID NO: 104823 - DNA, 25 bp, Artificial sequence
  SiRNA target sequence
agctccgtgttttaaaaggcaatta

SEQ ID NO: 104824 - DNA, 25 bp, Artificial sequence
  SiRNA target sequence
gctccgtgttttaaaaggcaattat

SEQ ID NO: 104825 - DNA, 25 bp, Artificial sequence
  SiRNA target sequence
ctccgtgttttaaaaggcaattata

SEQ ID NO: 104826 - DNA, 25 bp, Artificial sequence
  SiRNA target sequence
tccgtgttttaaaaggcaattatac

SEQ ID NO: 104827 - DNA, 25 bp, Artificial sequence
  SiRNA target sequence
ccgtgttttaaaaggcaattataca

SEQ ID NO: 104828 - DNA, 25 bp, Artificial sequence
  SiRNA target sequence
cgtgttttaaaaggcaattatacaa

SEQ ID NO: 104829 - DNA, 25 bp, Artificial sequence
  SiRNA target sequence
gtgttttaaaaggcaattatacaac

SEQ ID NO: 104830 - DNA, 25 bp, Artificial sequence
  SiRNA target sequence
tgttttaaaaggcaattatacaact

SEQ ID NO: 104831 - DNA, 25 bp, Artificial sequence
  SiRNA target sequence
gttttaaaaggcaattatacaactt

SEQ ID NO: 104832 - DNA, 25 bp, Artificial sequence
  SiRNA target sequence
ttttaaaaggcaattatacaacttt

SEQ ID NO: 104833 - DNA, 25 bp, Artificial sequence
  SiRNA target sequence
tttaaaaggcaattatacaactttt

SEQ ID NO: 104834 - DNA, 25 bp, Artificial sequence
  SiRNA target sequence
ttaaaaggcaattatacaacttttt

SEQ ID NO: 104835 - DNA, 25 bp, Artificial sequence
  SiRNA target sequence
taaaaggcaattatacaacttttta

SEQ ID NO: 104836 - DNA, 25 bp, Artificial sequence
  SiRNA target sequence
aaaaggcaattatacaactttttag

SEQ ID NO: 104837 - DNA, 25 bp, Artificial sequence
  SiRNA target sequence
aaaggcaattatacaactttttaga

SEQ ID NO: 104838 - DNA, 25 bp, Artificial sequence
  SiRNA target sequence
aaggcaattatacaactttttagaa

SEQ ID NO: 104839 - DNA, 25 bp, Artificial sequence
  SiRNA target sequence
aggcaattatacaactttttagaac

SEQ ID NO: 104840 - DNA, 25 bp, Artificial sequence
  SiRNA target sequence
ggcaattatacaactttttagaaca

SEQ ID NO: 104841 - DNA, 25 bp, Artificial sequence
  SiRNA target sequence
gcaattatacaactttttagaacaa

SEQ ID NO: 104842 - DNA, 25 bp, Artificial sequence
  SiRNA target sequence
caattatacaactttttagaacaaa

SEQ ID NO: 104843 - DNA, 25 bp, Artificial sequence
  SiRNA target sequence
aattatacaactttttagaacaaaa

SEQ ID NO: 104844 - DNA, 25 bp, Artificial sequence
  SiRNA target sequence
attatacaactttttagaacaaaaa

SEQ ID NO: 104845 - DNA, 25 bp, Artificial sequence
  SiRNA target sequence
ttatacaactttttagaacaaaaat

SEQ ID NO: 104846 - DNA, 25 bp, Artificial sequence
  SiRNA target sequence
tatacaactttttagaacaaaaatt

SEQ ID NO: 104847 - DNA, 25 bp, Artificial sequence
  SiRNA target sequence
atacaactttttagaacaaaaatta

SEQ ID NO: 104848 - DNA, 25 bp, Artificial sequence
  SiRNA target sequence
tacaactttttagaacaaaaattaa

SEQ ID NO: 104849 - DNA, 25 bp, Artificial sequence
  SiRNA target sequence
acaactttttagaacaaaaattaaa

SEQ ID NO: 104850 - DNA, 25 bp, Artificial sequence
  SiRNA target sequence
caactttttagaacaaaaattaaaa

SEQ ID NO: 104851 - DNA, 25 bp, Artificial sequence
  SiRNA target sequence
aactttttagaacaaaaattaaaag

SEQ ID NO: 104852 - DNA, 25 bp, Artificial sequence
  SiRNA target sequence
actttttagaacaaaaattaaaaga

SEQ ID NO: 104853 - DNA, 25 bp, Artificial sequence
  SiRNA target sequence
ctttttagaacaaaaattaaaagat

SEQ ID NO: 104854 - DNA, 25 bp, Artificial sequence
  SiRNA target sequence
tttttagaacaaaaattaaaagatt

SEQ ID NO: 104855 - DNA, 25 bp, Artificial sequence
  SiRNA target sequence
ttttagaacaaaaattaaaagattt

SEQ ID NO: 104856 - DNA, 25 bp, Artificial sequence
  SiRNA target sequence
tttagaacaaaaattaaaagattta

SEQ ID NO: 104857 - DNA, 25 bp, Artificial sequence
  SiRNA target sequence
ttagaacaaaaattaaaagatttat

SEQ ID NO: 104858 - DNA, 25 bp, Artificial sequence
  SiRNA target sequence
tagaacaaaaattaaaagatttata

SEQ ID NO: 104859 - DNA, 25 bp, Artificial sequence
  SiRNA target sequence
agaacaaaaattaaaagatttataa

SEQ ID NO: 104860 - DNA, 25 bp, Artificial sequence
  SiRNA target sequence
gaacaaaaattaaaagatttataag

SEQ ID NO: 104861 - DNA, 25 bp, Artificial sequence
  SiRNA target sequence
aacaaaaattaaaagatttataaga

SEQ ID NO: 104862 - DNA, 25 bp, Artificial sequence
  SiRNA target sequence
acaaaaattaaaagatttataagac

SEQ ID NO: 104863 - DNA, 25 bp, Artificial sequence
  SiRNA target sequence
caaaaattaaaagatttataagacg

SEQ ID NO: 104864 - DNA, 25 bp, Artificial sequence
  SiRNA target sequence
aaaaattaaaagatttataagacga

SEQ ID NO: 104865 - DNA, 25 bp, Artificial sequence
  SiRNA target sequence
aaaattaaaagatttataagacgaa

SEQ ID NO: 104866 - DNA, 25 bp, Artificial sequence
  SiRNA target sequence
aaattaaaagatttataagacgaat

SEQ ID NO: 104867 - DNA, 25 bp, Artificial sequence
  SiRNA target sequence
aattaaaagatttataagacgaatc

SEQ ID NO: 104868 - DNA, 25 bp, Artificial sequence
  SiRNA target sequence
attaaaagatttataagacgaatcc

SEQ ID NO: 104869 - DNA, 25 bp, Artificial sequence
  SiRNA target sequence
ttaaaagatttataagacgaatccc

SEQ ID NO: 104870 - DNA, 25 bp, Artificial sequence
  SiRNA target sequence
taaaagatttataagacgaatcccc

SEQ ID NO: 104871 - DNA, 25 bp, Artificial sequence
  SiRNA target sequence
aaaagatttataagacgaatcccca

SEQ ID NO: 104872 - DNA, 25 bp, Artificial sequence
  SiRNA target sequence
aaagatttataagacgaatccccaa

SEQ ID NO: 104873 - DNA, 25 bp, Artificial sequence
  SiRNA target sequence
aagatttataagacgaatccccaag

SEQ ID NO: 104874 - DNA, 25 bp, Artificial sequence
  SiRNA target sequence
agatttataagacgaatccccaagg

SEQ ID NO: 104875 - DNA, 25 bp, Artificial sequence
  SiRNA target sequence
gatttataagacgaatccccaaggc

SEQ ID NO: 104876 - DNA, 25 bp, Artificial sequence
  SiRNA target sequence
atttataagacgaatccccaaggcc

SEQ ID NO: 104877 - DNA, 25 bp, Artificial sequence
  SiRNA target sequence
tttataagacgaatccccaaggcca

SEQ ID NO: 104878 - DNA, 25 bp, Artificial sequence
  SiRNA target sequence
ttataagacgaatccccaaggccaa

SEQ ID NO: 104879 - DNA, 25 bp, Artificial sequence
  SiRNA target sequence
tataagacgaatccccaaggccaaa

SEQ ID NO: 104880 - DNA, 25 bp, Artificial sequence
  SiRNA target sequence
ataagacgaatccccaaggccaaat

SEQ ID NO: 104881 - DNA, 25 bp, Artificial sequence
  SiRNA target sequence
taagacgaatccccaaggccaaata

SEQ ID NO: 104882 - DNA, 25 bp, Artificial sequence
  SiRNA target sequence
aagacgaatccccaaggccaaatac

SEQ ID NO: 104883 - DNA, 25 bp, Artificial sequence
  SiRNA target sequence
agacgaatccccaaggccaaataca

SEQ ID NO: 104884 - DNA, 25 bp, Artificial sequence
  SiRNA target sequence
gacgaatccccaaggccaaatacag

SEQ ID NO: 104885 - DNA, 25 bp, Artificial sequence
  SiRNA target sequence
acgaatccccaaggccaaatacagc

SEQ ID NO: 104886 - DNA, 25 bp, Artificial sequence
  SiRNA target sequence
cgaatccccaaggccaaatacagca

SEQ ID NO: 104887 - DNA, 25 bp, Artificial sequence
  SiRNA target sequence
gaatccccaaggccaaatacagcaa

SEQ ID NO: 104888 - DNA, 25 bp, Artificial sequence
  SiRNA target sequence
aatccccaaggccaaatacagcaaa

SEQ ID NO: 104889 - DNA, 25 bp, Artificial sequence
  SiRNA target sequence
atccccaaggccaaatacagcaaaa

SEQ ID NO: 104890 - DNA, 25 bp, Artificial sequence
  SiRNA target sequence
tccccaaggccaaatacagcaaaat

SEQ ID NO: 104891 - DNA, 25 bp, Artificial sequence
  SiRNA target sequence
ccccaaggccaaatacagcaaaatt

SEQ ID NO: 104892 - DNA, 25 bp, Artificial sequence
  SiRNA target sequence
cccaaggccaaatacagcaaaattt

SEQ ID NO: 104893 - DNA, 25 bp, Artificial sequence
  SiRNA target sequence
ccaaggccaaatacagcaaaattta

SEQ ID NO: 104894 - DNA, 25 bp, Artificial sequence
  SiRNA target sequence
caaggccaaatacagcaaaatttaa

SEQ ID NO: 104895 - DNA, 25 bp, Artificial sequence
  SiRNA target sequence
aaggccaaatacagcaaaatttaag

SEQ ID NO: 104896 - DNA, 25 bp, Artificial sequence
  SiRNA target sequence
aggccaaatacagcaaaatttaagt

SEQ ID NO: 104897 - DNA, 25 bp, Artificial sequence
  SiRNA target sequence
ggccaaatacagcaaaatttaagtg

SEQ ID NO: 104898 - DNA, 25 bp, Artificial sequence
  SiRNA target sequence
gccaaatacagcaaaatttaagtgt

SEQ ID NO: 104899 - DNA, 25 bp, Artificial sequence
  SiRNA target sequence
ccaaatacagcaaaatttaagtgtt

SEQ ID NO: 104900 - DNA, 25 bp, Artificial sequence
  SiRNA target sequence
caaatacagcaaaatttaagtgttg

SEQ ID NO: 104901 - DNA, 25 bp, Artificial sequence
  SiRNA target sequence
aaatacagcaaaatttaagtgttgt

SEQ ID NO: 104902 - DNA, 25 bp, Artificial sequence
  SiRNA target sequence
aatacagcaaaatttaagtgttgta

SEQ ID NO: 104903 - DNA, 25 bp, Artificial sequence
  SiRNA target sequence
atacagcaaaatttaagtgttgtaa

SEQ ID NO: 104904 - DNA, 25 bp, Artificial sequence
  SiRNA target sequence
tacagcaaaatttaagtgttgtaaa

SEQ ID NO: 104905 - DNA, 25 bp, Artificial sequence
  SiRNA target sequence
acagcaaaatttaagtgttgtaaaa

SEQ ID NO: 104906 - DNA, 25 bp, Artificial sequence
  SiRNA target sequence
cagcaaaatttaagtgttgtaaaaa

SEQ ID NO: 104907 - DNA, 25 bp, Artificial sequence
  SiRNA target sequence
agcaaaatttaagtgttgtaaaaaa

SEQ ID NO: 104908 - DNA, 25 bp, Artificial sequence
  SiRNA target sequence
gcaaaatttaagtgttgtaaaaaat

SEQ ID NO: 104909 - DNA, 25 bp, Artificial sequence
  SiRNA target sequence
caaaatttaagtgttgtaaaaaatt

SEQ ID NO: 104910 - DNA, 25 bp, Artificial sequence
  SiRNA target sequence
aaaatttaagtgttgtaaaaaattt

SEQ ID NO: 104911 - DNA, 25 bp, Artificial sequence
  SiRNA target sequence
aaatttaagtgttgtaaaaaatttg

SEQ ID NO: 104912 - DNA, 25 bp, Artificial sequence
  SiRNA target sequence
aatttaagtgttgtaaaaaatttgt

SEQ ID NO: 104913 - DNA, 25 bp, Artificial sequence
  SiRNA target sequence
atttaagtgttgtaaaaaatttgta

SEQ ID NO: 104914 - DNA, 25 bp, Artificial sequence
  SiRNA target sequence
tttaagtgttgtaaaaaatttgtag

SEQ ID NO: 104915 - DNA, 25 bp, Artificial sequence
  SiRNA target sequence
ttaagtgttgtaaaaaatttgtagg

SEQ ID NO: 104916 - DNA, 25 bp, Artificial sequence
  SiRNA target sequence
taagtgttgtaaaaaatttgtaggc

SEQ ID NO: 104917 - DNA, 25 bp, Artificial sequence
  SiRNA target sequence
aagtgttgtaaaaaatttgtaggca

SEQ ID NO: 104918 - DNA, 25 bp, Artificial sequence
  SiRNA target sequence
agtgttgtaaaaaatttgtaggcag

SEQ ID NO: 104919 - DNA, 25 bp, Artificial sequence
  SiRNA target sequence
gtgttgtaaaaaatttgtaggcaga

SEQ ID NO: 104920 - DNA, 25 bp, Artificial sequence
  SiRNA target sequence
tgttgtaaaaaatttgtaggcagat

SEQ ID NO: 104921 - DNA, 25 bp, Artificial sequence
  SiRNA target sequence
gttgtaaaaaatttgtaggcagatt

SEQ ID NO: 104922 - DNA, 25 bp, Artificial sequence
  SiRNA target sequence
ttgtaaaaaatttgtaggcagattt

SEQ ID NO: 104923 - DNA, 25 bp, Artificial sequence
  SiRNA target sequence
tgtaaaaaatttgtaggcagatttt

SEQ ID NO: 104924 - DNA, 25 bp, Artificial sequence
  SiRNA target sequence
gtaaaaaatttgtaggcagattttt

SEQ ID NO: 104925 - DNA, 25 bp, Artificial sequence
  SiRNA target sequence
taaaaaatttgtaggcagatttttt

SEQ ID NO: 104926 - DNA, 25 bp, Artificial sequence
  SiRNA target sequence
aaaaaatttgtaggcagattttttt

SEQ ID NO: 104927 - DNA, 25 bp, Artificial sequence
  SiRNA target sequence
aaaaatttgtaggcagatttttttt

SEQ ID NO: 104928 - DNA, 25 bp, Artificial sequence
  SiRNA target sequence
aaaatttgtaggcagattttttttg

SEQ ID NO: 104929 - DNA, 25 bp, Artificial sequence
  SiRNA target sequence
aaatttgtaggcagattttttttgc

SEQ ID NO: 104930 - DNA, 25 bp, Artificial sequence
  SiRNA target sequence
aatttgtaggcagattttttttgcg

SEQ ID NO: 104931 - DNA, 25 bp, Artificial sequence
  SiRNA target sequence
atttgtaggcagattttttttgcgc

SEQ ID NO: 104932 - DNA, 25 bp, Artificial sequence
  SiRNA target sequence
tttgtaggcagattttttttgcgca

SEQ ID NO: 104933 - DNA, 25 bp, Artificial sequence
  SiRNA target sequence
ttgtaggcagattttttttgcgcaa

SEQ ID NO: 104934 - DNA, 25 bp, Artificial sequence
  SiRNA target sequence
tgtaggcagattttttttgcgcaaa

SEQ ID NO: 104935 - DNA, 25 bp, Artificial sequence
  SiRNA target sequence
gtaggcagattttttttgcgcaaaa

SEQ ID NO: 104936 - DNA, 25 bp, Artificial sequence
  SiRNA target sequence
taggcagattttttttgcgcaaaaa

SEQ ID NO: 104937 - DNA, 25 bp, Artificial sequence
  SiRNA target sequence
aggcagattttttttgcgcaaaaat

SEQ ID NO: 104938 - DNA, 25 bp, Artificial sequence
  SiRNA target sequence
ggcagattttttttgcgcaaaaatt

SEQ ID NO: 104939 - DNA, 25 bp, Artificial sequence
  SiRNA target sequence
gcagattttttttgcgcaaaaattt

SEQ ID NO: 104940 - DNA, 25 bp, Artificial sequence
  SiRNA target sequence
cagattttttttgcgcaaaaatttc

SEQ ID NO: 104941 - DNA, 25 bp, Artificial sequence
  SiRNA target sequence
agattttttttgcgcaaaaatttcc

SEQ ID NO: 104942 - DNA, 25 bp, Artificial sequence
  SiRNA target sequence
gattttttttgcgcaaaaatttcca

SEQ ID NO: 104943 - DNA, 25 bp, Artificial sequence
  SiRNA target sequence
attttttttgcgcaaaaatttccaa

SEQ ID NO: 104944 - DNA, 25 bp, Artificial sequence
  SiRNA target sequence
ttttttttgcgcaaaaatttccaaa

SEQ ID NO: 104945 - DNA, 25 bp, Artificial sequence
  SiRNA target sequence
tttttttgcgcaaaaatttccaaaa

SEQ ID NO: 104946 - DNA, 25 bp, Artificial sequence
  SiRNA target sequence
ttttttgcgcaaaaatttccaaaat

SEQ ID NO: 104947 - DNA, 25 bp, Artificial sequence
  SiRNA target sequence
tttttgcgcaaaaatttccaaaatt

SEQ ID NO: 104948 - DNA, 25 bp, Artificial sequence
  SiRNA target sequence
ttttgcgcaaaaatttccaaaattt

SEQ ID NO: 104949 - DNA, 25 bp, Artificial sequence
  SiRNA target sequence
tttgcgcaaaaatttccaaaattta

SEQ ID NO: 104950 - DNA, 25 bp, Artificial sequence
  SiRNA target sequence
ttgcgcaaaaatttccaaaatttag

SEQ ID NO: 104951 - DNA, 25 bp, Artificial sequence
  SiRNA target sequence
tgcgcaaaaatttccaaaatttagt

SEQ ID NO: 104952 - DNA, 25 bp, Artificial sequence
  SiRNA target sequence
gcgcaaaaatttccaaaatttagtc

SEQ ID NO: 104953 - DNA, 25 bp, Artificial sequence
  SiRNA target sequence
cgcaaaaatttccaaaatttagtca

SEQ ID NO: 104954 - DNA, 25 bp, Artificial sequence
  SiRNA target sequence
gcaaaaatttccaaaatttagtcat

SEQ ID NO: 104955 - DNA, 25 bp, Artificial sequence
  SiRNA target sequence
caaaaatttccaaaatttagtcatg

SEQ ID NO: 104956 - DNA, 25 bp, Artificial sequence
  SiRNA target sequence
aaaaatttccaaaatttagtcatgt

SEQ ID NO: 104957 - DNA, 25 bp, Artificial sequence
  SiRNA target sequence
aaaatttccaaaatttagtcatgtt

SEQ ID NO: 104958 - DNA, 25 bp, Artificial sequence
  SiRNA target sequence
aaatttccaaaatttagtcatgtta

SEQ ID NO: 104959 - DNA, 25 bp, Artificial sequence
  SiRNA target sequence
aatttccaaaatttagtcatgttaa

SEQ ID NO: 104960 - DNA, 25 bp, Artificial sequence
  SiRNA target sequence
atttccaaaatttagtcatgttaaa

SEQ ID NO: 104961 - DNA, 25 bp, Artificial sequence
  SiRNA target sequence
tttccaaaatttagtcatgttaaaa

SEQ ID NO: 104962 - DNA, 25 bp, Artificial sequence
  SiRNA target sequence
ttccaaaatttagtcatgttaaaag

SEQ ID NO: 104963 - DNA, 25 bp, Artificial sequence
  SiRNA target sequence
tccaaaatttagtcatgttaaaagg

SEQ ID NO: 104964 - DNA, 25 bp, Artificial sequence
  SiRNA target sequence
ccaaaatttagtcatgttaaaaggt

SEQ ID NO: 104965 - DNA, 25 bp, Artificial sequence
  SiRNA target sequence
caaaatttagtcatgttaaaaggtt

SEQ ID NO: 104966 - DNA, 25 bp, Artificial sequence
  SiRNA target sequence
aaaatttagtcatgttaaaaggttc

SEQ ID NO: 104967 - DNA, 25 bp, Artificial sequence
  SiRNA target sequence
aaatttagtcatgttaaaaggttca

SEQ ID NO: 104968 - DNA, 25 bp, Artificial sequence
  SiRNA target sequence
aatttagtcatgttaaaaggttcag

SEQ ID NO: 104969 - DNA, 25 bp, Artificial sequence
  SiRNA target sequence
atttagtcatgttaaaaggttcaga

SEQ ID NO: 104970 - DNA, 25 bp, Artificial sequence
  SiRNA target sequence
tttagtcatgttaaaaggttcagaa

SEQ ID NO: 104971 - DNA, 25 bp, Artificial sequence
  SiRNA target sequence
ttagtcatgttaaaaggttcagaac

SEQ ID NO: 104972 - DNA, 25 bp, Artificial sequence
  SiRNA target sequence
tagtcatgttaaaaggttcagaacc

SEQ ID NO: 104973 - DNA, 25 bp, Artificial sequence
  SiRNA target sequence
agtcatgttaaaaggttcagaacca

SEQ ID NO: 104974 - DNA, 25 bp, Artificial sequence
  SiRNA target sequence
gtcatgttaaaaggttcagaaccat

SEQ ID NO: 104975 - DNA, 25 bp, Artificial sequence
  SiRNA target sequence
tcatgttaaaaggttcagaaccatt

SEQ ID NO: 104976 - DNA, 25 bp, Artificial sequence
  SiRNA target sequence
catgttaaaaggttcagaaccattc

SEQ ID NO: 104977 - DNA, 25 bp, Artificial sequence
  SiRNA target sequence
atgttaaaaggttcagaaccattcc

SEQ ID NO: 104978 - DNA, 25 bp, Artificial sequence
  SiRNA target sequence
tgttaaaaggttcagaaccattccc

SEQ ID NO: 104979 - DNA, 25 bp, Artificial sequence
  SiRNA target sequence
gttaaaaggttcagaaccattccca

SEQ ID NO: 104980 - DNA, 25 bp, Artificial sequence
  SiRNA target sequence
ttaaaaggttcagaaccattcccat

SEQ ID NO: 104981 - DNA, 25 bp, Artificial sequence
  SiRNA target sequence
taaaaggttcagaaccattcccatg

SEQ ID NO: 104982 - DNA, 25 bp, Artificial sequence
  SiRNA target sequence
aaaaggttcagaaccattcccatga

SEQ ID NO: 104983 - DNA, 25 bp, Artificial sequence
  SiRNA target sequence
aaaggttcagaaccattcccatgag

SEQ ID NO: 104984 - DNA, 25 bp, Artificial sequence
  SiRNA target sequence
aaggttcagaaccattcccatgagt

SEQ ID NO: 104985 - DNA, 25 bp, Artificial sequence
  SiRNA target sequence
aggttcagaaccattcccatgagtc

SEQ ID NO: 104986 - DNA, 25 bp, Artificial sequence
  SiRNA target sequence
ggttcagaaccattcccatgagtcg

SEQ ID NO: 104987 - DNA, 25 bp, Artificial sequence
  SiRNA target sequence
gttcagaaccattcccatgagtcga

SEQ ID NO: 104988 - DNA, 25 bp, Artificial sequence
  SiRNA target sequence
ttcagaaccattcccatgagtcgaa

SEQ ID NO: 104989 - DNA, 25 bp, Artificial sequence
  SiRNA target sequence
tcagaaccattcccatgagtcgaac

SEQ ID NO: 104990 - DNA, 25 bp, Artificial sequence
  SiRNA target sequence
cagaaccattcccatgagtcgaaca

SEQ ID NO: 104991 - DNA, 25 bp, Artificial sequence
  SiRNA target sequence
agaaccattcccatgagtcgaacat

SEQ ID NO: 104992 - DNA, 25 bp, Artificial sequence
  SiRNA target sequence
gaaccattcccatgagtcgaacata

SEQ ID NO: 104993 - DNA, 25 bp, Artificial sequence
  SiRNA target sequence
aaccattcccatgagtcgaacatac

SEQ ID NO: 104994 - DNA, 25 bp, Artificial sequence
  SiRNA target sequence
accattcccatgagtcgaacataca

SEQ ID NO: 104995 - DNA, 25 bp, Artificial sequence
  SiRNA target sequence
ccattcccatgagtcgaacatacaa

SEQ ID NO: 104996 - DNA, 25 bp, Artificial sequence
  SiRNA target sequence
cattcccatgagtcgaacatacaaa

SEQ ID NO: 104997 - DNA, 25 bp, Artificial sequence
  SiRNA target sequence
attcccatgagtcgaacatacaaat

SEQ ID NO: 104998 - DNA, 25 bp, Artificial sequence
  SiRNA target sequence
ttcccatgagtcgaacatacaaata

SEQ ID NO: 104999 - DNA, 25 bp, Artificial sequence
  SiRNA target sequence
tcccatgagtcgaacatacaaatat

SEQ ID NO: 105000 - DNA, 25 bp, Artificial sequence
  SiRNA target sequence
cccatgagtcgaacatacaaatata

SEQ ID NO: 105001 - DNA, 25 bp, Artificial sequence
  SiRNA target sequence
ccatgagtcgaacatacaaatataa

SEQ ID NO: 105002 - DNA, 25 bp, Artificial sequence
  SiRNA target sequence
catgagtcgaacatacaaatataat

SEQ ID NO: 105003 - DNA, 25 bp, Artificial sequence
  SiRNA target sequence
atgagtcgaacatacaaatataatc

SEQ ID NO: 105004 - DNA, 25 bp, Artificial sequence
  SiRNA target sequence
tgagtcgaacatacaaatataatca

SEQ ID NO: 105005 - DNA, 25 bp, Artificial sequence
  SiRNA target sequence
gagtcgaacatacaaatataatcat

SEQ ID NO: 105006 - DNA, 25 bp, Artificial sequence
  SiRNA target sequence
agtcgaacatacaaatataatcata

SEQ ID NO: 105007 - DNA, 25 bp, Artificial sequence
  SiRNA target sequence
gtcgaacatacaaatataatcatat

SEQ ID NO: 105008 - DNA, 25 bp, Artificial sequence
  SiRNA target sequence
tcgaacatacaaatataatcatatc

SEQ ID NO: 105009 - DNA, 25 bp, Artificial sequence
  SiRNA target sequence
cgaacatacaaatataatcatatca

SEQ ID NO: 105010 - DNA, 25 bp, Artificial sequence
  SiRNA target sequence
gaacatacaaatataatcatatcaa

SEQ ID NO: 105011 - DNA, 25 bp, Artificial sequence
  SiRNA target sequence
aacatacaaatataatcatatcaat

SEQ ID NO: 105012 - DNA, 25 bp, Artificial sequence
  SiRNA target sequence
acatacaaatataatcatatcaata

SEQ ID NO: 105013 - DNA, 25 bp, Artificial sequence
  SiRNA target sequence
catacaaatataatcatatcaatat

SEQ ID NO: 105014 - DNA, 25 bp, Artificial sequence
  SiRNA target sequence
atacaaatataatcatatcaatatc

SEQ ID NO: 105015 - DNA, 25 bp, Artificial sequence
  SiRNA target sequence
tacaaatataatcatatcaatatct

SEQ ID NO: 105016 - DNA, 25 bp, Artificial sequence
  SiRNA target sequence
acaaatataatcatatcaatatcta

SEQ ID NO: 105017 - DNA, 25 bp, Artificial sequence
  SiRNA target sequence
caaatataatcatatcaatatctaa

SEQ ID NO: 105018 - DNA, 25 bp, Artificial sequence
  SiRNA target sequence
aaatataatcatatcaatatctaat

SEQ ID NO: 105019 - DNA, 25 bp, Artificial sequence
  SiRNA target sequence
aatataatcatatcaatatctaata

SEQ ID NO: 105020 - DNA, 25 bp, Artificial sequence
  SiRNA target sequence
atataatcatatcaatatctaatat

SEQ ID NO: 105021 - DNA, 25 bp, Artificial sequence
  SiRNA target sequence
tataatcatatcaatatctaatatt

SEQ ID NO: 105022 - DNA, 25 bp, Artificial sequence
  SiRNA target sequence
ataatcatatcaatatctaatattt

SEQ ID NO: 105023 - DNA, 25 bp, Artificial sequence
  SiRNA target sequence
taatcatatcaatatctaatatttt

SEQ ID NO: 105024 - DNA, 25 bp, Artificial sequence
  SiRNA target sequence
aatcatatcaatatctaatattttt

SEQ ID NO: 105025 - DNA, 25 bp, Artificial sequence
  SiRNA target sequence
atcatatcaatatctaatatttttt

SEQ ID NO: 105026 - DNA, 25 bp, Artificial sequence
  SiRNA target sequence
tcatatcaatatctaatattttttc

SEQ ID NO: 105027 - DNA, 25 bp, Artificial sequence
  SiRNA target sequence
catatcaatatctaatattttttcg

SEQ ID NO: 105028 - DNA, 25 bp, Artificial sequence
  SiRNA target sequence
atatcaatatctaatattttttcga

SEQ ID NO: 105029 - DNA, 25 bp, Artificial sequence
  SiRNA target sequence
tatcaatatctaatattttttcgaa

SEQ ID NO: 105030 - DNA, 25 bp, Artificial sequence
  SiRNA target sequence
atcaatatctaatattttttcgaaa

SEQ ID NO: 105031 - DNA, 25 bp, Artificial sequence
  SiRNA target sequence
tcaatatctaatattttttcgaaat

SEQ ID NO: 105032 - DNA, 25 bp, Artificial sequence
  SiRNA target sequence
caatatctaatattttttcgaaatc

SEQ ID NO: 105033 - DNA, 25 bp, Artificial sequence
  SiRNA target sequence
aatatctaatattttttcgaaatca

SEQ ID NO: 105034 - DNA, 25 bp, Artificial sequence
  SiRNA target sequence
atatctaatattttttcgaaatcaa

SEQ ID NO: 105035 - DNA, 25 bp, Artificial sequence
  SiRNA target sequence
tatctaatattttttcgaaatcaaa

SEQ ID NO: 105036 - DNA, 25 bp, Artificial sequence
  SiRNA target sequence
atctaatattttttcgaaatcaaaa

SEQ ID NO: 105037 - DNA, 25 bp, Artificial sequence
  SiRNA target sequence
tctaatattttttcgaaatcaaaac

SEQ ID NO: 105038 - DNA, 25 bp, Artificial sequence
  SiRNA target sequence
ctaatattttttcgaaatcaaaact

SEQ ID NO: 105039 - DNA, 25 bp, Artificial sequence
  SiRNA target sequence
taatattttttcgaaatcaaaactg

SEQ ID NO: 105040 - DNA, 25 bp, Artificial sequence
  SiRNA target sequence
aatattttttcgaaatcaaaactgt

SEQ ID NO: 105041 - DNA, 25 bp, Artificial sequence
  SiRNA target sequence
atattttttcgaaatcaaaactgtc

SEQ ID NO: 105042 - DNA, 25 bp, Artificial sequence
  SiRNA target sequence
tattttttcgaaatcaaaactgtcc

SEQ ID NO: 105043 - DNA, 25 bp, Artificial sequence
  SiRNA target sequence
attttttcgaaatcaaaactgtcca

SEQ ID NO: 105044 - DNA, 25 bp, Artificial sequence
  SiRNA target sequence
ttttttcgaaatcaaaactgtccat

SEQ ID NO: 105045 - DNA, 25 bp, Artificial sequence
  SiRNA target sequence
tttttcgaaatcaaaactgtccata

SEQ ID NO: 105046 - DNA, 25 bp, Artificial sequence
  SiRNA target sequence
ttttcgaaatcaaaactgtccatat

SEQ ID NO: 105047 - DNA, 25 bp, Artificial sequence
  SiRNA target sequence
tttcgaaatcaaaactgtccatatc

SEQ ID NO: 105048 - DNA, 25 bp, Artificial sequence
  SiRNA target sequence
ttcgaaatcaaaactgtccatatct

SEQ ID NO: 105049 - DNA, 25 bp, Artificial sequence
  SiRNA target sequence
tcgaaatcaaaactgtccatatcta

SEQ ID NO: 105050 - DNA, 25 bp, Artificial sequence
  SiRNA target sequence
cgaaatcaaaactgtccatatctaa

SEQ ID NO: 105051 - DNA, 25 bp, Artificial sequence
  SiRNA target sequence
gaaatcaaaactgtccatatctaaa

SEQ ID NO: 105052 - DNA, 25 bp, Artificial sequence
  SiRNA target sequence
aaatcaaaactgtccatatctaaag

SEQ ID NO: 105053 - DNA, 25 bp, Artificial sequence
  SiRNA target sequence
aatcaaaactgtccatatctaaagt

SEQ ID NO: 105054 - DNA, 25 bp, Artificial sequence
  SiRNA target sequence
atcaaaactgtccatatctaaagta

SEQ ID NO: 105055 - DNA, 25 bp, Artificial sequence
  SiRNA target sequence
tcaaaactgtccatatctaaagtaa

SEQ ID NO: 105056 - DNA, 25 bp, Artificial sequence
  SiRNA target sequence
caaaactgtccatatctaaagtaaa

SEQ ID NO: 105057 - DNA, 25 bp, Artificial sequence
  SiRNA target sequence
aaaactgtccatatctaaagtaaaa

SEQ ID NO: 105058 - DNA, 25 bp, Artificial sequence
  SiRNA target sequence
aaactgtccatatctaaagtaaaat

SEQ ID NO: 105059 - DNA, 25 bp, Artificial sequence
  SiRNA target sequence
aactgtccatatctaaagtaaaatc

SEQ ID NO: 105060 - DNA, 25 bp, Artificial sequence
  SiRNA target sequence
actgtccatatctaaagtaaaatct

SEQ ID NO: 105061 - DNA, 25 bp, Artificial sequence
  SiRNA target sequence
ctgtccatatctaaagtaaaatctg

SEQ ID NO: 105062 - DNA, 25 bp, Artificial sequence
  SiRNA target sequence
tgtccatatctaaagtaaaatctgt

SEQ ID NO: 105063 - DNA, 25 bp, Artificial sequence
  SiRNA target sequence
gtccatatctaaagtaaaatctgtt

SEQ ID NO: 105064 - DNA, 25 bp, Artificial sequence
  SiRNA target sequence
tccatatctaaagtaaaatctgttg

SEQ ID NO: 105065 - DNA, 25 bp, Artificial sequence
  SiRNA target sequence
ccatatctaaagtaaaatctgttgg

SEQ ID NO: 105066 - DNA, 25 bp, Artificial sequence
  SiRNA target sequence
catatctaaagtaaaatctgttgga

SEQ ID NO: 105067 - DNA, 25 bp, Artificial sequence
  SiRNA target sequence
atatctaaagtaaaatctgttggaa

SEQ ID NO: 105068 - DNA, 25 bp, Artificial sequence
  SiRNA target sequence
tatctaaagtaaaatctgttggaag

SEQ ID NO: 105069 - DNA, 25 bp, Artificial sequence
  SiRNA target sequence
atctaaagtaaaatctgttggaagc

SEQ ID NO: 105070 - DNA, 25 bp, Artificial sequence
  SiRNA target sequence
tctaaagtaaaatctgttggaagca

SEQ ID NO: 105071 - DNA, 25 bp, Artificial sequence
  SiRNA target sequence
ctaaagtaaaatctgttggaagcaa

SEQ ID NO: 105072 - DNA, 25 bp, Artificial sequence
  SiRNA target sequence
taaagtaaaatctgttggaagcaat

SEQ ID NO: 105073 - DNA, 25 bp, Artificial sequence
  SiRNA target sequence
aaagtaaaatctgttggaagcaatt

SEQ ID NO: 105074 - DNA, 25 bp, Artificial sequence
  SiRNA target sequence
aagtaaaatctgttggaagcaattc

SEQ ID NO: 105075 - DNA, 25 bp, Artificial sequence
  SiRNA target sequence
agtaaaatctgttggaagcaattct

SEQ ID NO: 105076 - DNA, 25 bp, Artificial sequence
  SiRNA target sequence
gtaaaatctgttggaagcaattctt

SEQ ID NO: 105077 - DNA, 25 bp, Artificial sequence
  SiRNA target sequence
taaaatctgttggaagcaattcttt

SEQ ID NO: 105078 - DNA, 25 bp, Artificial sequence
  SiRNA target sequence
aaaatctgttggaagcaattcttta

SEQ ID NO: 105079 - DNA, 25 bp, Artificial sequence
  SiRNA target sequence
aaatctgttggaagcaattctttat

SEQ ID NO: 105080 - DNA, 25 bp, Artificial sequence
  SiRNA target sequence
aatctgttggaagcaattctttatc

SEQ ID NO: 105081 - DNA, 25 bp, Artificial sequence
  SiRNA target sequence
atctgttggaagcaattctttatca

SEQ ID NO: 105082 - DNA, 25 bp, Artificial sequence
  SiRNA target sequence
tctgttggaagcaattctttatcaa

SEQ ID NO: 105083 - DNA, 25 bp, Artificial sequence
  SiRNA target sequence
ctgttggaagcaattctttatcaac

SEQ ID NO: 105084 - DNA, 25 bp, Artificial sequence
  SiRNA target sequence
tgttggaagcaattctttatcaacg

SEQ ID NO: 105085 - DNA, 25 bp, Artificial sequence
  SiRNA target sequence
gttggaagcaattctttatcaacgt

SEQ ID NO: 105086 - DNA, 25 bp, Artificial sequence
  SiRNA target sequence
ttggaagcaattctttatcaacgtt

SEQ ID NO: 105087 - DNA, 25 bp, Artificial sequence
  SiRNA target sequence
tggaagcaattctttatcaacgtta

SEQ ID NO: 105088 - DNA, 25 bp, Artificial sequence
  SiRNA target sequence
ggaagcaattctttatcaacgttat

SEQ ID NO: 105089 - DNA, 25 bp, Artificial sequence
  SiRNA target sequence
gaagcaattctttatcaacgttata

SEQ ID NO: 105090 - DNA, 25 bp, Artificial sequence
  SiRNA target sequence
aagcaattctttatcaacgttataa

SEQ ID NO: 105091 - DNA, 25 bp, Artificial sequence
  SiRNA target sequence
agcaattctttatcaacgttataaa

SEQ ID NO: 105092 - DNA, 25 bp, Artificial sequence
  SiRNA target sequence
gcaattctttatcaacgttataaat

SEQ ID NO: 105093 - DNA, 25 bp, Artificial sequence
  SiRNA target sequence
caattctttatcaacgttataaatc

SEQ ID NO: 105094 - DNA, 25 bp, Artificial sequence
  SiRNA target sequence
aattctttatcaacgttataaatca

SEQ ID NO: 105095 - DNA, 25 bp, Artificial sequence
  SiRNA target sequence
attctttatcaacgttataaatcaa

SEQ ID NO: 105096 - DNA, 25 bp, Artificial sequence
  SiRNA target sequence
ttctttatcaacgttataaatcaaa

SEQ ID NO: 105097 - DNA, 25 bp, Artificial sequence
  SiRNA target sequence
tctttatcaacgttataaatcaaat

SEQ ID NO: 105098 - DNA, 25 bp, Artificial sequence
  SiRNA target sequence
ctttatcaacgttataaatcaaatc

SEQ ID NO: 105099 - DNA, 25 bp, Artificial sequence
  SiRNA target sequence
tttatcaacgttataaatcaaatct

SEQ ID NO: 105100 - DNA, 25 bp, Artificial sequence
  SiRNA target sequence
ttatcaacgttataaatcaaatctt

SEQ ID NO: 105101 - DNA, 25 bp, Artificial sequence
  SiRNA target sequence
tatcaacgttataaatcaaatcttt

SEQ ID NO: 105102 - DNA, 25 bp, Artificial sequence
  SiRNA target sequence
atcaacgttataaatcaaatcttta

SEQ ID NO: 105103 - DNA, 25 bp, Artificial sequence
  SiRNA target sequence
tcaacgttataaatcaaatctttat

SEQ ID NO: 105104 - DNA, 25 bp, Artificial sequence
  SiRNA target sequence
caacgttataaatcaaatctttatt

SEQ ID NO: 105105 - DNA, 25 bp, Artificial sequence
  SiRNA target sequence
aacgttataaatcaaatctttattg

SEQ ID NO: 105106 - DNA, 25 bp, Artificial sequence
  SiRNA target sequence
acgttataaatcaaatctttattgt

SEQ ID NO: 105107 - DNA, 25 bp, Artificial sequence
  SiRNA target sequence
cgttataaatcaaatctttattgta

SEQ ID NO: 105108 - DNA, 25 bp, Artificial sequence
  SiRNA target sequence
gttataaatcaaatctttattgtat

SEQ ID NO: 105109 - DNA, 25 bp, Artificial sequence
  SiRNA target sequence
ttataaatcaaatctttattgtatc

SEQ ID NO: 105110 - DNA, 25 bp, Artificial sequence
  SiRNA target sequence
tataaatcaaatctttattgtatcc

SEQ ID NO: 105111 - DNA, 25 bp, Artificial sequence
  SiRNA target sequence
ataaatcaaatctttattgtatccg

SEQ ID NO: 105112 - DNA, 25 bp, Artificial sequence
  SiRNA target sequence
taaatcaaatctttattgtatccgt

SEQ ID NO: 105113 - DNA, 25 bp, Artificial sequence
  SiRNA target sequence
aaatcaaatctttattgtatccgta

SEQ ID NO: 105114 - DNA, 25 bp, Artificial sequence
  SiRNA target sequence
aatcaaatctttattgtatccgtat

SEQ ID NO: 105115 - DNA, 25 bp, Artificial sequence
  SiRNA target sequence
atcaaatctttattgtatccgtata

SEQ ID NO: 105116 - DNA, 25 bp, Artificial sequence
  SiRNA target sequence
tcaaatctttattgtatccgtatag

SEQ ID NO: 105117 - DNA, 25 bp, Artificial sequence
  SiRNA target sequence
caaatctttattgtatccgtatagt

SEQ ID NO: 105118 - DNA, 25 bp, Artificial sequence
  SiRNA target sequence
aaatctttattgtatccgtatagta

SEQ ID NO: 105119 - DNA, 25 bp, Artificial sequence
  SiRNA target sequence
aatctttattgtatccgtatagtat

SEQ ID NO: 105120 - DNA, 25 bp, Artificial sequence
  SiRNA target sequence
atctttattgtatccgtatagtata

SEQ ID NO: 105121 - DNA, 25 bp, Artificial sequence
  SiRNA target sequence
tctttattgtatccgtatagtataa

SEQ ID NO: 105122 - DNA, 25 bp, Artificial sequence
  SiRNA target sequence
ctttattgtatccgtatagtataac

SEQ ID NO: 105123 - DNA, 25 bp, Artificial sequence
  SiRNA target sequence
tttattgtatccgtatagtataaca

SEQ ID NO: 105124 - DNA, 25 bp, Artificial sequence
  SiRNA target sequence
ttattgtatccgtatagtataacat

SEQ ID NO: 105125 - DNA, 25 bp, Artificial sequence
  SiRNA target sequence
tattgtatccgtatagtataacatt

SEQ ID NO: 105126 - DNA, 25 bp, Artificial sequence
  SiRNA target sequence
attgtatccgtatagtataacattt

SEQ ID NO: 105127 - DNA, 25 bp, Artificial sequence
  SiRNA target sequence
ttgtatccgtatagtataacatttt

SEQ ID NO: 105128 - DNA, 25 bp, Artificial sequence
  SiRNA target sequence
tgtatccgtatagtataacattttg

SEQ ID NO: 105129 - DNA, 25 bp, Artificial sequence
  SiRNA target sequence
gtatccgtatagtataacattttga

SEQ ID NO: 105130 - DNA, 25 bp, Artificial sequence
  SiRNA target sequence
tatccgtatagtataacattttgaa

SEQ ID NO: 105131 - DNA, 25 bp, Artificial sequence
  SiRNA target sequence
atccgtatagtataacattttgaat

SEQ ID NO: 105132 - DNA, 25 bp, Artificial sequence
  SiRNA target sequence
tccgtatagtataacattttgaata

SEQ ID NO: 105133 - DNA, 25 bp, Artificial sequence
  SiRNA target sequence
ccgtatagtataacattttgaataa

SEQ ID NO: 105134 - DNA, 25 bp, Artificial sequence
  SiRNA target sequence
cgtatagtataacattttgaataag

SEQ ID NO: 105135 - DNA, 25 bp, Artificial sequence
  SiRNA target sequence
gtatagtataacattttgaataagt

SEQ ID NO: 105136 - DNA, 25 bp, Artificial sequence
  SiRNA target sequence
tatagtataacattttgaataagtt

SEQ ID NO: 105137 - DNA, 25 bp, Artificial sequence
  SiRNA target sequence
atagtataacattttgaataagttt

SEQ ID NO: 105138 - DNA, 25 bp, Artificial sequence
  SiRNA target sequence
tagtataacattttgaataagttta

SEQ ID NO: 105139 - DNA, 25 bp, Artificial sequence
  SiRNA target sequence
agtataacattttgaataagtttag

SEQ ID NO: 105140 - DNA, 25 bp, Artificial sequence
  SiRNA target sequence
gtataacattttgaataagtttagc

SEQ ID NO: 105141 - DNA, 25 bp, Artificial sequence
  SiRNA target sequence
tataacattttgaataagtttagca

SEQ ID NO: 105142 - DNA, 25 bp, Artificial sequence
  SiRNA target sequence
ataacattttgaataagtttagcaa

SEQ ID NO: 105143 - DNA, 25 bp, Artificial sequence
  SiRNA target sequence
taacattttgaataagtttagcaat

SEQ ID NO: 105144 - DNA, 25 bp, Artificial sequence
  SiRNA target sequence
aacattttgaataagtttagcaata

SEQ ID NO: 105145 - DNA, 25 bp, Artificial sequence
  SiRNA target sequence
acattttgaataagtttagcaatat

SEQ ID NO: 105146 - DNA, 25 bp, Artificial sequence
  SiRNA target sequence
cattttgaataagtttagcaatatg

SEQ ID NO: 105147 - DNA, 25 bp, Artificial sequence
  SiRNA target sequence
attttgaataagtttagcaatatgt

SEQ ID NO: 105148 - DNA, 25 bp, Artificial sequence
  SiRNA target sequence
ttttgaataagtttagcaatatgta

SEQ ID NO: 105149 - DNA, 25 bp, Artificial sequence
  SiRNA target sequence
tttgaataagtttagcaatatgtat

SEQ ID NO: 105150 - DNA, 25 bp, Artificial sequence
  SiRNA target sequence
ttgaataagtttagcaatatgtata

SEQ ID NO: 105151 - DNA, 25 bp, Artificial sequence
  SiRNA target sequence
tgaataagtttagcaatatgtatag

SEQ ID NO: 105152 - DNA, 25 bp, Artificial sequence
  SiRNA target sequence
gaataagtttagcaatatgtataga

SEQ ID NO: 105153 - DNA, 25 bp, Artificial sequence
  SiRNA target sequence
aataagtttagcaatatgtatagaa

SEQ ID NO: 105154 - DNA, 25 bp, Artificial sequence
  SiRNA target sequence
ataagtttagcaatatgtatagaat

SEQ ID NO: 105155 - DNA, 25 bp, Artificial sequence
  SiRNA target sequence
taagtttagcaatatgtatagaatt

SEQ ID NO: 105156 - DNA, 25 bp, Artificial sequence
  SiRNA target sequence
aagtttagcaatatgtatagaattt

SEQ ID NO: 105157 - DNA, 25 bp, Artificial sequence
  SiRNA target sequence
agtttagcaatatgtatagaatttc

SEQ ID NO: 105158 - DNA, 25 bp, Artificial sequence
  SiRNA target sequence
gtttagcaatatgtatagaatttcc

SEQ ID NO: 105159 - DNA, 25 bp, Artificial sequence
  SiRNA target sequence
tttagcaatatgtatagaatttcct

SEQ ID NO: 105160 - DNA, 25 bp, Artificial sequence
  SiRNA target sequence
ttagcaatatgtatagaatttcctg

SEQ ID NO: 105161 - DNA, 25 bp, Artificial sequence
  SiRNA target sequence
tagcaatatgtatagaatttcctgt

SEQ ID NO: 105162 - DNA, 25 bp, Artificial sequence
  SiRNA target sequence
agcaatatgtatagaatttcctgtt

SEQ ID NO: 105163 - DNA, 25 bp, Artificial sequence
  SiRNA target sequence
gcaatatgtatagaatttcctgttt

SEQ ID NO: 105164 - DNA, 25 bp, Artificial sequence
  SiRNA target sequence
caatatgtatagaatttcctgtttg

SEQ ID NO: 105165 - DNA, 25 bp, Artificial sequence
  SiRNA target sequence
aatatgtatagaatttcctgtttgg

SEQ ID NO: 105166 - DNA, 25 bp, Artificial sequence
  SiRNA target sequence
atatgtatagaatttcctgtttggg

SEQ ID NO: 105167 - DNA, 25 bp, Artificial sequence
  SiRNA target sequence
tatgtatagaatttcctgtttggga

SEQ ID NO: 105168 - DNA, 25 bp, Artificial sequence
  SiRNA target sequence
atgtatagaatttcctgtttgggag

SEQ ID NO: 105169 - DNA, 25 bp, Artificial sequence
  SiRNA target sequence
tgtatagaatttcctgtttgggagc

SEQ ID NO: 105170 - DNA, 25 bp, Artificial sequence
  SiRNA target sequence
gtatagaatttcctgtttgggagcc

SEQ ID NO: 105171 - DNA, 25 bp, Artificial sequence
  SiRNA target sequence
tatagaatttcctgtttgggagcca

SEQ ID NO: 105172 - DNA, 25 bp, Artificial sequence
  SiRNA target sequence
atagaatttcctgtttgggagccat

SEQ ID NO: 105173 - DNA, 25 bp, Artificial sequence
  SiRNA target sequence
tagaatttcctgtttgggagccata

SEQ ID NO: 105174 - DNA, 25 bp, Artificial sequence
  SiRNA target sequence
agaatttcctgtttgggagccatat

SEQ ID NO: 105175 - DNA, 25 bp, Artificial sequence
  SiRNA target sequence
gaatttcctgtttgggagccatata

SEQ ID NO: 105176 - DNA, 25 bp, Artificial sequence
  SiRNA target sequence
aatttcctgtttgggagccatataa

SEQ ID NO: 105177 - DNA, 25 bp, Artificial sequence
  SiRNA target sequence
atttcctgtttgggagccatataag

SEQ ID NO: 105178 - DNA, 25 bp, Artificial sequence
  SiRNA target sequence
tttcctgtttgggagccatataaga

SEQ ID NO: 105179 - DNA, 25 bp, Artificial sequence
  SiRNA target sequence
ttcctgtttgggagccatataagat

SEQ ID NO: 105180 - DNA, 25 bp, Artificial sequence
  SiRNA target sequence
tcctgtttgggagccatataagatt

SEQ ID NO: 105181 - DNA, 25 bp, Artificial sequence
  SiRNA target sequence
cctgtttgggagccatataagatta

SEQ ID NO: 105182 - DNA, 25 bp, Artificial sequence
  SiRNA target sequence
ctgtttgggagccatataagattat

SEQ ID NO: 105183 - DNA, 25 bp, Artificial sequence
  SiRNA target sequence
tgtttgggagccatataagattatc

SEQ ID NO: 105184 - DNA, 25 bp, Artificial sequence
  SiRNA target sequence
gtttgggagccatataagattatca

SEQ ID NO: 105185 - DNA, 25 bp, Artificial sequence
  SiRNA target sequence
tttgggagccatataagattatcat

SEQ ID NO: 105186 - DNA, 26 bp, Artificial sequence
  SiRNA target sequence
ttaccaagtttctgcctgaaaatata

SEQ ID NO: 105187 - DNA, 26 bp, Artificial sequence
  SiRNA target sequence
taccaagtttctgcctgaaaatatat

SEQ ID NO: 105188 - DNA, 26 bp, Artificial sequence
  SiRNA target sequence
accaagtttctgcctgaaaatatatt

SEQ ID NO: 105189 - DNA, 26 bp, Artificial sequence
  SiRNA target sequence
ccaagtttctgcctgaaaatatattt

SEQ ID NO: 105190 - DNA, 26 bp, Artificial sequence
  SiRNA target sequence
caagtttctgcctgaaaatatatttt

SEQ ID NO: 105191 - DNA, 26 bp, Artificial sequence
  SiRNA target sequence
aagtttctgcctgaaaatatattttc

SEQ ID NO: 105192 - DNA, 26 bp, Artificial sequence
  SiRNA target sequence
agtttctgcctgaaaatatattttct

SEQ ID NO: 105193 - DNA, 26 bp, Artificial sequence
  SiRNA target sequence
gtttctgcctgaaaatatattttctt

SEQ ID NO: 105194 - DNA, 26 bp, Artificial sequence
  SiRNA target sequence
tttctgcctgaaaatatattttcttt

SEQ ID NO: 105195 - DNA, 26 bp, Artificial sequence
  SiRNA target sequence
ttctgcctgaaaatatattttctttt

SEQ ID NO: 105196 - DNA, 26 bp, Artificial sequence
  SiRNA target sequence
tctgcctgaaaatatattttcttttt

SEQ ID NO: 105197 - DNA, 26 bp, Artificial sequence
  SiRNA target sequence
ctgcctgaaaatatattttcttttta

SEQ ID NO: 105198 - DNA, 26 bp, Artificial sequence
  SiRNA target sequence
tgcctgaaaatatattttctttttat

SEQ ID NO: 105199 - DNA, 26 bp, Artificial sequence
  SiRNA target sequence
gcctgaaaatatattttctttttata

SEQ ID NO: 105200 - DNA, 26 bp, Artificial sequence
  SiRNA target sequence
cctgaaaatatattttctttttataa

SEQ ID NO: 105201 - DNA, 26 bp, Artificial sequence
  SiRNA target sequence
ctgaaaatatattttctttttataaa

SEQ ID NO: 105202 - DNA, 26 bp, Artificial sequence
  SiRNA target sequence
tgaaaatatattttctttttataaat

SEQ ID NO: 105203 - DNA, 26 bp, Artificial sequence
  SiRNA target sequence
gaaaatatattttctttttataaata

SEQ ID NO: 105204 - DNA, 26 bp, Artificial sequence
  SiRNA target sequence
aaaatatattttctttttataaatat

SEQ ID NO: 105205 - DNA, 26 bp, Artificial sequence
  SiRNA target sequence
aaatatattttctttttataaatatc

SEQ ID NO: 105206 - DNA, 26 bp, Artificial sequence
  SiRNA target sequence
aatatattttctttttataaatatct

SEQ ID NO: 105207 - DNA, 26 bp, Artificial sequence
  SiRNA target sequence
atatattttctttttataaatatcta

SEQ ID NO: 105208 - DNA, 26 bp, Artificial sequence
  SiRNA target sequence
tatattttctttttataaatatctaa

SEQ ID NO: 105209 - DNA, 26 bp, Artificial sequence
  SiRNA target sequence
atattttctttttataaatatctaat

SEQ ID NO: 105210 - DNA, 26 bp, Artificial sequence
  SiRNA target sequence
tattttctttttataaatatctaata

SEQ ID NO: 105211 - DNA, 26 bp, Artificial sequence
  SiRNA target sequence
attttctttttataaatatctaataa

SEQ ID NO: 105212 - DNA, 26 bp, Artificial sequence
  SiRNA target sequence
ttttctttttataaatatctaataac

SEQ ID NO: 105213 - DNA, 26 bp, Artificial sequence
  SiRNA target sequence
tttctttttataaatatctaataaca

SEQ ID NO: 105214 - DNA, 26 bp, Artificial sequence
  SiRNA target sequence
ttctttttataaatatctaataacat

SEQ ID NO: 105215 - DNA, 26 bp, Artificial sequence
  SiRNA target sequence
tctttttataaatatctaataacatt

SEQ ID NO: 105216 - DNA, 26 bp, Artificial sequence
  SiRNA target sequence
ctttttataaatatctaataacattt

SEQ ID NO: 105217 - DNA, 26 bp, Artificial sequence
  SiRNA target sequence
tttttataaatatctaataacatttt

SEQ ID NO: 105218 - DNA, 26 bp, Artificial sequence
  SiRNA target sequence
ttttataaatatctaataacattttt

SEQ ID NO: 105219 - DNA, 26 bp, Artificial sequence
  SiRNA target sequence
tttataaatatctaataacatttttt

SEQ ID NO: 105220 - DNA, 26 bp, Artificial sequence
  SiRNA target sequence
ttataaatatctaataacattttttc

SEQ ID NO: 105221 - DNA, 26 bp, Artificial sequence
  SiRNA target sequence
tataaatatctaataacattttttca

SEQ ID NO: 105222 - DNA, 26 bp, Artificial sequence
  SiRNA target sequence
ataaatatctaataacattttttcaa

SEQ ID NO: 105223 - DNA, 26 bp, Artificial sequence
  SiRNA target sequence
taaatatctaataacattttttcaat

SEQ ID NO: 105224 - DNA, 26 bp, Artificial sequence
  SiRNA target sequence
aaatatctaataacattttttcaata

SEQ ID NO: 105225 - DNA, 26 bp, Artificial sequence
  SiRNA target sequence
aatatctaataacattttttcaataa

SEQ ID NO: 105226 - DNA, 26 bp, Artificial sequence
  SiRNA target sequence
atatctaataacattttttcaataat

SEQ ID NO: 105227 - DNA, 26 bp, Artificial sequence
  SiRNA target sequence
tatctaataacattttttcaataata

SEQ ID NO: 105228 - DNA, 26 bp, Artificial sequence
  SiRNA target sequence
atctaataacattttttcaataatat

SEQ ID NO: 105229 - DNA, 26 bp, Artificial sequence
  SiRNA target sequence
tctaataacattttttcaataatatt

SEQ ID NO: 105230 - DNA, 26 bp, Artificial sequence
  SiRNA target sequence
ctaataacattttttcaataatatta

SEQ ID NO: 105231 - DNA, 26 bp, Artificial sequence
  SiRNA target sequence
taataacattttttcaataatattat

SEQ ID NO: 105232 - DNA, 26 bp, Artificial sequence
  SiRNA target sequence
aataacattttttcaataatattatt

SEQ ID NO: 105233 - DNA, 26 bp, Artificial sequence
  SiRNA target sequence
ataacattttttcaataatattatta

SEQ ID NO: 105234 - DNA, 26 bp, Artificial sequence
  SiRNA target sequence
taacattttttcaataatattattaa

SEQ ID NO: 105235 - DNA, 26 bp, Artificial sequence
  SiRNA target sequence
aacattttttcaataatattattaag

SEQ ID NO: 105236 - DNA, 26 bp, Artificial sequence
  SiRNA target sequence
acattttttcaataatattattaagt

SEQ ID NO: 105237 - DNA, 26 bp, Artificial sequence
  SiRNA target sequence
cattttttcaataatattattaagtc

SEQ ID NO: 105238 - DNA, 26 bp, Artificial sequence
  SiRNA target sequence
attttttcaataatattattaagtct

SEQ ID NO: 105239 - DNA, 26 bp, Artificial sequence
  SiRNA target sequence
ttttttcaataatattattaagtcta

SEQ ID NO: 105240 - DNA, 26 bp, Artificial sequence
  SiRNA target sequence
tttttcaataatattattaagtctag

SEQ ID NO: 105241 - DNA, 26 bp, Artificial sequence
  SiRNA target sequence
ttttcaataatattattaagtctaga

SEQ ID NO: 105242 - DNA, 26 bp, Artificial sequence
  SiRNA target sequence
tttcaataatattattaagtctagaa

SEQ ID NO: 105243 - DNA, 26 bp, Artificial sequence
  SiRNA target sequence
ttcaataatattattaagtctagaat

SEQ ID NO: 105244 - DNA, 26 bp, Artificial sequence
  SiRNA target sequence
tcaataatattattaagtctagaatt

SEQ ID NO: 105245 - DNA, 26 bp, Artificial sequence
  SiRNA target sequence
caataatattattaagtctagaattt

SEQ ID NO: 105246 - DNA, 26 bp, Artificial sequence
  SiRNA target sequence
aataatattattaagtctagaatttc

SEQ ID NO: 105247 - DNA, 26 bp, Artificial sequence
  SiRNA target sequence
ataatattattaagtctagaatttcc

SEQ ID NO: 105248 - DNA, 26 bp, Artificial sequence
  SiRNA target sequence
taatattattaagtctagaatttcca

SEQ ID NO: 105249 - DNA, 26 bp, Artificial sequence
  SiRNA target sequence
aatattattaagtctagaatttccac

SEQ ID NO: 105250 - DNA, 26 bp, Artificial sequence
  SiRNA target sequence
atattattaagtctagaatttccact

SEQ ID NO: 105251 - DNA, 26 bp, Artificial sequence
  SiRNA target sequence
tattattaagtctagaatttccactt

SEQ ID NO: 105252 - DNA, 26 bp, Artificial sequence
  SiRNA target sequence
attattaagtctagaatttccactta

SEQ ID NO: 105253 - DNA, 26 bp, Artificial sequence
  SiRNA target sequence
ttattaagtctagaatttccacttac

SEQ ID NO: 105254 - DNA, 26 bp, Artificial sequence
  SiRNA target sequence
tattaagtctagaatttccacttaca

SEQ ID NO: 105255 - DNA, 26 bp, Artificial sequence
  SiRNA target sequence
attaagtctagaatttccacttacaa

SEQ ID NO: 105256 - DNA, 26 bp, Artificial sequence
  SiRNA target sequence
ttaagtctagaatttccacttacaaa

SEQ ID NO: 105257 - DNA, 26 bp, Artificial sequence
  SiRNA target sequence
taagtctagaatttccacttacaaat

SEQ ID NO: 105258 - DNA, 26 bp, Artificial sequence
  SiRNA target sequence
aagtctagaatttccacttacaaata

SEQ ID NO: 105259 - DNA, 26 bp, Artificial sequence
  SiRNA target sequence
agtctagaatttccacttacaaatat

SEQ ID NO: 105260 - DNA, 26 bp, Artificial sequence
  SiRNA target sequence
gtctagaatttccacttacaaatatt

SEQ ID NO: 105261 - DNA, 26 bp, Artificial sequence
  SiRNA target sequence
tctagaatttccacttacaaatatta

SEQ ID NO: 105262 - DNA, 26 bp, Artificial sequence
  SiRNA target sequence
ctagaatttccacttacaaatattaa

SEQ ID NO: 105263 - DNA, 26 bp, Artificial sequence
  SiRNA target sequence
tagaatttccacttacaaatattaac

SEQ ID NO: 105264 - DNA, 26 bp, Artificial sequence
  SiRNA target sequence
agaatttccacttacaaatattaacc

SEQ ID NO: 105265 - DNA, 26 bp, Artificial sequence
  SiRNA target sequence
gaatttccacttacaaatattaacca

SEQ ID NO: 105266 - DNA, 26 bp, Artificial sequence
  SiRNA target sequence
aatttccacttacaaatattaaccaa

SEQ ID NO: 105267 - DNA, 26 bp, Artificial sequence
  SiRNA target sequence
atttccacttacaaatattaaccaat

SEQ ID NO: 105268 - DNA, 26 bp, Artificial sequence
  SiRNA target sequence
tttccacttacaaatattaaccaatc

SEQ ID NO: 105269 - DNA, 26 bp, Artificial sequence
  SiRNA target sequence
ttccacttacaaatattaaccaatca

SEQ ID NO: 105270 - DNA, 26 bp, Artificial sequence
  SiRNA target sequence
tccacttacaaatattaaccaatcat

SEQ ID NO: 105271 - DNA, 26 bp, Artificial sequence
  SiRNA target sequence
ccacttacaaatattaaccaatcatc

SEQ ID NO: 105272 - DNA, 26 bp, Artificial sequence
  SiRNA target sequence
cacttacaaatattaaccaatcatca

SEQ ID NO: 105273 - DNA, 26 bp, Artificial sequence
  SiRNA target sequence
acttacaaatattaaccaatcatcaa

SEQ ID NO: 105274 - DNA, 26 bp, Artificial sequence
  SiRNA target sequence
cttacaaatattaaccaatcatcaat

SEQ ID NO: 105275 - DNA, 26 bp, Artificial sequence
  SiRNA target sequence
ttacaaatattaaccaatcatcaata

SEQ ID NO: 105276 - DNA, 26 bp, Artificial sequence
  SiRNA target sequence
tacaaatattaaccaatcatcaatat

SEQ ID NO: 105277 - DNA, 26 bp, Artificial sequence
  SiRNA target sequence
acaaatattaaccaatcatcaatatt

SEQ ID NO: 105278 - DNA, 26 bp, Artificial sequence
  SiRNA target sequence
caaatattaaccaatcatcaatattt

SEQ ID NO: 105279 - DNA, 26 bp, Artificial sequence
  SiRNA target sequence
aaatattaaccaatcatcaatatttt

SEQ ID NO: 105280 - DNA, 26 bp, Artificial sequence
  SiRNA target sequence
aatattaaccaatcatcaatattttc

SEQ ID NO: 105281 - DNA, 26 bp, Artificial sequence
  SiRNA target sequence
atattaaccaatcatcaatattttct

SEQ ID NO: 105282 - DNA, 26 bp, Artificial sequence
  SiRNA target sequence
tattaaccaatcatcaatattttcta

SEQ ID NO: 105283 - DNA, 26 bp, Artificial sequence
  SiRNA target sequence
attaaccaatcatcaatattttctag

SEQ ID NO: 105284 - DNA, 26 bp, Artificial sequence
  SiRNA target sequence
ttaaccaatcatcaatattttctagc

SEQ ID NO: 105285 - DNA, 26 bp, Artificial sequence
  SiRNA target sequence
taaccaatcatcaatattttctagcc

SEQ ID NO: 105286 - DNA, 26 bp, Artificial sequence
  SiRNA target sequence
aaccaatcatcaatattttctagccc

SEQ ID NO: 105287 - DNA, 26 bp, Artificial sequence
  SiRNA target sequence
accaatcatcaatattttctagccct

SEQ ID NO: 105288 - DNA, 26 bp, Artificial sequence
  SiRNA target sequence
ccaatcatcaatattttctagccctt

SEQ ID NO: 105289 - DNA, 26 bp, Artificial sequence
  SiRNA target sequence
caatcatcaatattttctagcccttt

SEQ ID NO: 105290 - DNA, 26 bp, Artificial sequence
  SiRNA target sequence
aatcatcaatattttctagccctttt

SEQ ID NO: 105291 - DNA, 26 bp, Artificial sequence
  SiRNA target sequence
atcatcaatattttctagccctttta

SEQ ID NO: 105292 - DNA, 26 bp, Artificial sequence
  SiRNA target sequence
tcatcaatattttctagcccttttat

SEQ ID NO: 105293 - DNA, 26 bp, Artificial sequence
  SiRNA target sequence
catcaatattttctagcccttttata

SEQ ID NO: 105294 - DNA, 26 bp, Artificial sequence
  SiRNA target sequence
atcaatattttctagcccttttatag

SEQ ID NO: 105295 - DNA, 26 bp, Artificial sequence
  SiRNA target sequence
tcaatattttctagcccttttatagt

SEQ ID NO: 105296 - DNA, 26 bp, Artificial sequence
  SiRNA target sequence
caatattttctagcccttttatagtc

SEQ ID NO: 105297 - DNA, 26 bp, Artificial sequence
  SiRNA target sequence
aatattttctagcccttttatagtct

SEQ ID NO: 105298 - DNA, 26 bp, Artificial sequence
  SiRNA target sequence
atattttctagcccttttatagtctt

SEQ ID NO: 105299 - DNA, 26 bp, Artificial sequence
  SiRNA target sequence
tattttctagcccttttatagtctta

SEQ ID NO: 105300 - DNA, 26 bp, Artificial sequence
  SiRNA target sequence
attttctagcccttttatagtcttat

SEQ ID NO: 105301 - DNA, 26 bp, Artificial sequence
  SiRNA target sequence
ttttctagcccttttatagtcttata

SEQ ID NO: 105302 - DNA, 26 bp, Artificial sequence
  SiRNA target sequence
tttctagcccttttatagtcttataa

SEQ ID NO: 105303 - DNA, 26 bp, Artificial sequence
  SiRNA target sequence
ttctagcccttttatagtcttataaa

SEQ ID NO: 105304 - DNA, 26 bp, Artificial sequence
  SiRNA target sequence
tctagcccttttatagtcttataaat

SEQ ID NO: 105305 - DNA, 26 bp, Artificial sequence
  SiRNA target sequence
ctagcccttttatagtcttataaata

SEQ ID NO: 105306 - DNA, 26 bp, Artificial sequence
  SiRNA target sequence
tagcccttttatagtcttataaatat

SEQ ID NO: 105307 - DNA, 26 bp, Artificial sequence
  SiRNA target sequence
agcccttttatagtcttataaatatc

SEQ ID NO: 105308 - DNA, 26 bp, Artificial sequence
  SiRNA target sequence
gcccttttatagtcttataaatatct

SEQ ID NO: 105309 - DNA, 26 bp, Artificial sequence
  SiRNA target sequence
cccttttatagtcttataaatatctt

SEQ ID NO: 105310 - DNA, 26 bp, Artificial sequence
  SiRNA target sequence
ccttttatagtcttataaatatcttg

SEQ ID NO: 105311 - DNA, 26 bp, Artificial sequence
  SiRNA target sequence
cttttatagtcttataaatatcttgt

SEQ ID NO: 105312 - DNA, 26 bp, Artificial sequence
  SiRNA target sequence
ttttatagtcttataaatatcttgta

SEQ ID NO: 105313 - DNA, 26 bp, Artificial sequence
  SiRNA target sequence
tttatagtcttataaatatcttgtat

SEQ ID NO: 105314 - DNA, 26 bp, Artificial sequence
  SiRNA target sequence
ttatagtcttataaatatcttgtatg

SEQ ID NO: 105315 - DNA, 26 bp, Artificial sequence
  SiRNA target sequence
tatagtcttataaatatcttgtatgt

SEQ ID NO: 105316 - DNA, 26 bp, Artificial sequence
  SiRNA target sequence
atagtcttataaatatcttgtatgta

SEQ ID NO: 105317 - DNA, 26 bp, Artificial sequence
  SiRNA target sequence
tagtcttataaatatcttgtatgtat

SEQ ID NO: 105318 - DNA, 26 bp, Artificial sequence
  SiRNA target sequence
agtcttataaatatcttgtatgtatt

SEQ ID NO: 105319 - DNA, 26 bp, Artificial sequence
  SiRNA target sequence
gtcttataaatatcttgtatgtattt

SEQ ID NO: 105320 - DNA, 26 bp, Artificial sequence
  SiRNA target sequence
tcttataaatatcttgtatgtattta

SEQ ID NO: 105321 - DNA, 26 bp, Artificial sequence
  SiRNA target sequence
cttataaatatcttgtatgtatttat

SEQ ID NO: 105322 - DNA, 26 bp, Artificial sequence
  SiRNA target sequence
ttataaatatcttgtatgtatttatt

SEQ ID NO: 105323 - DNA, 26 bp, Artificial sequence
  SiRNA target sequence
tataaatatcttgtatgtatttatta

SEQ ID NO: 105324 - DNA, 26 bp, Artificial sequence
  SiRNA target sequence
ataaatatcttgtatgtatttattat

SEQ ID NO: 105325 - DNA, 26 bp, Artificial sequence
  SiRNA target sequence
taaatatcttgtatgtatttattatc

SEQ ID NO: 105326 - DNA, 26 bp, Artificial sequence
  SiRNA target sequence
aaatatcttgtatgtatttattatct

SEQ ID NO: 105327 - DNA, 26 bp, Artificial sequence
  SiRNA target sequence
aatatcttgtatgtatttattatctt

SEQ ID NO: 105328 - DNA, 26 bp, Artificial sequence
  SiRNA target sequence
atatcttgtatgtatttattatcttc

SEQ ID NO: 105329 - DNA, 26 bp, Artificial sequence
  SiRNA target sequence
tatcttgtatgtatttattatcttcc

SEQ ID NO: 105330 - DNA, 26 bp, Artificial sequence
  SiRNA target sequence
atcttgtatgtatttattatcttccc

SEQ ID NO: 105331 - DNA, 26 bp, Artificial sequence
  SiRNA target sequence
tcttgtatgtatttattatcttccct

SEQ ID NO: 105332 - DNA, 26 bp, Artificial sequence
  SiRNA target sequence
cttgtatgtatttattatcttccctt

SEQ ID NO: 105333 - DNA, 26 bp, Artificial sequence
  SiRNA target sequence
ttgtatgtatttattatcttcccttg

SEQ ID NO: 105334 - DNA, 26 bp, Artificial sequence
  SiRNA target sequence
tgtatgtatttattatcttcccttga

SEQ ID NO: 105335 - DNA, 26 bp, Artificial sequence
  SiRNA target sequence
gtatgtatttattatcttcccttgaa

SEQ ID NO: 105336 - DNA, 26 bp, Artificial sequence
  SiRNA target sequence
tatgtatttattatcttcccttgaaa

SEQ ID NO: 105337 - DNA, 26 bp, Artificial sequence
  SiRNA target sequence
atgtatttattatcttcccttgaaac

SEQ ID NO: 105338 - DNA, 26 bp, Artificial sequence
  SiRNA target sequence
tgtatttattatcttcccttgaaaca

SEQ ID NO: 105339 - DNA, 26 bp, Artificial sequence
  SiRNA target sequence
gtatttattatcttcccttgaaacag

SEQ ID NO: 105340 - DNA, 26 bp, Artificial sequence
  SiRNA target sequence
tatttattatcttcccttgaaacagc

SEQ ID NO: 105341 - DNA, 26 bp, Artificial sequence
  SiRNA target sequence
atttattatcttcccttgaaacagcg

SEQ ID NO: 105342 - DNA, 26 bp, Artificial sequence
  SiRNA target sequence
tttattatcttcccttgaaacagcgg

SEQ ID NO: 105343 - DNA, 26 bp, Artificial sequence
  SiRNA target sequence
ttattatcttcccttgaaacagcggg

SEQ ID NO: 105344 - DNA, 26 bp, Artificial sequence
  SiRNA target sequence
tattatcttcccttgaaacagcgggg

SEQ ID NO: 105345 - DNA, 26 bp, Artificial sequence
  SiRNA target sequence
attatcttcccttgaaacagcggggt

SEQ ID NO: 105346 - DNA, 26 bp, Artificial sequence
  SiRNA target sequence
ttatcttcccttgaaacagcggggta

SEQ ID NO: 105347 - DNA, 26 bp, Artificial sequence
  SiRNA target sequence
tatcttcccttgaaacagcggggtaa

SEQ ID NO: 105348 - DNA, 26 bp, Artificial sequence
  SiRNA target sequence
atcttcccttgaaacagcggggtaaa

SEQ ID NO: 105349 - DNA, 26 bp, Artificial sequence
  SiRNA target sequence
tcttcccttgaaacagcggggtaaat

SEQ ID NO: 105350 - DNA, 26 bp, Artificial sequence
  SiRNA target sequence
cttcccttgaaacagcggggtaaatt

SEQ ID NO: 105351 - DNA, 26 bp, Artificial sequence
  SiRNA target sequence
ttcccttgaaacagcggggtaaattt

SEQ ID NO: 105352 - DNA, 26 bp, Artificial sequence
  SiRNA target sequence
tcccttgaaacagcggggtaaatttc

SEQ ID NO: 105353 - DNA, 26 bp, Artificial sequence
  SiRNA target sequence
cccttgaaacagcggggtaaatttca

SEQ ID NO: 105354 - DNA, 26 bp, Artificial sequence
  SiRNA target sequence
ccttgaaacagcggggtaaatttcaa

SEQ ID NO: 105355 - DNA, 26 bp, Artificial sequence
  SiRNA target sequence
cttgaaacagcggggtaaatttcaat

SEQ ID NO: 105356 - DNA, 26 bp, Artificial sequence
  SiRNA target sequence
ttgaaacagcggggtaaatttcaatg

SEQ ID NO: 105357 - DNA, 26 bp, Artificial sequence
  SiRNA target sequence
tgaaacagcggggtaaatttcaatgc

SEQ ID NO: 105358 - DNA, 26 bp, Artificial sequence
  SiRNA target sequence
gaaacagcggggtaaatttcaatgcc

SEQ ID NO: 105359 - DNA, 26 bp, Artificial sequence
  SiRNA target sequence
aaacagcggggtaaatttcaatgcct

SEQ ID NO: 105360 - DNA, 26 bp, Artificial sequence
  SiRNA target sequence
aacagcggggtaaatttcaatgcctt

SEQ ID NO: 105361 - DNA, 26 bp, Artificial sequence
  SiRNA target sequence
acagcggggtaaatttcaatgccttt

SEQ ID NO: 105362 - DNA, 26 bp, Artificial sequence
  SiRNA target sequence
cagcggggtaaatttcaatgccttta

SEQ ID NO: 105363 - DNA, 26 bp, Artificial sequence
  SiRNA target sequence
agcggggtaaatttcaatgcctttat

SEQ ID NO: 105364 - DNA, 26 bp, Artificial sequence
  SiRNA target sequence
gcggggtaaatttcaatgcctttatt

SEQ ID NO: 105365 - DNA, 26 bp, Artificial sequence
  SiRNA target sequence
cggggtaaatttcaatgcctttattt

SEQ ID NO: 105366 - DNA, 26 bp, Artificial sequence
  SiRNA target sequence
ggggtaaatttcaatgcctttatttt

SEQ ID NO: 105367 - DNA, 26 bp, Artificial sequence
  SiRNA target sequence
gggtaaatttcaatgcctttattttc

SEQ ID NO: 105368 - DNA, 26 bp, Artificial sequence
  SiRNA target sequence
ggtaaatttcaatgcctttattttca

SEQ ID NO: 105369 - DNA, 26 bp, Artificial sequence
  SiRNA target sequence
gtaaatttcaatgcctttattttcaa

SEQ ID NO: 105370 - DNA, 26 bp, Artificial sequence
  SiRNA target sequence
taaatttcaatgcctttattttcaaa

SEQ ID NO: 105371 - DNA, 26 bp, Artificial sequence
  SiRNA target sequence
aaatttcaatgcctttattttcaaac

SEQ ID NO: 105372 - DNA, 26 bp, Artificial sequence
  SiRNA target sequence
aatttcaatgcctttattttcaaact

SEQ ID NO: 105373 - DNA, 26 bp, Artificial sequence
  SiRNA target sequence
atttcaatgcctttattttcaaactc

SEQ ID NO: 105374 - DNA, 26 bp, Artificial sequence
  SiRNA target sequence
tttcaatgcctttattttcaaactct

SEQ ID NO: 105375 - DNA, 26 bp, Artificial sequence
  SiRNA target sequence
ttcaatgcctttattttcaaactctt

SEQ ID NO: 105376 - DNA, 26 bp, Artificial sequence
  SiRNA target sequence
tcaatgcctttattttcaaactcttc

SEQ ID NO: 105377 - DNA, 26 bp, Artificial sequence
  SiRNA target sequence
caatgcctttattttcaaactcttct

SEQ ID NO: 105378 - DNA, 26 bp, Artificial sequence
  SiRNA target sequence
aatgcctttattttcaaactcttctt

SEQ ID NO: 105379 - DNA, 26 bp, Artificial sequence
  SiRNA target sequence
atgcctttattttcaaactcttcttt

SEQ ID NO: 105380 - DNA, 26 bp, Artificial sequence
  SiRNA target sequence
tgcctttattttcaaactcttcttta

SEQ ID NO: 105381 - DNA, 26 bp, Artificial sequence
  SiRNA target sequence
gcctttattttcaaactcttctttat

SEQ ID NO: 105382 - DNA, 26 bp, Artificial sequence
  SiRNA target sequence
cctttattttcaaactcttctttata

SEQ ID NO: 105383 - DNA, 26 bp, Artificial sequence
  SiRNA target sequence
ctttattttcaaactcttctttatat

SEQ ID NO: 105384 - DNA, 26 bp, Artificial sequence
  SiRNA target sequence
tttattttcaaactcttctttatata

SEQ ID NO: 105385 - DNA, 26 bp, Artificial sequence
  SiRNA target sequence
ttattttcaaactcttctttatataa

SEQ ID NO: 105386 - DNA, 26 bp, Artificial sequence
  SiRNA target sequence
tattttcaaactcttctttatataaa

SEQ ID NO: 105387 - DNA, 26 bp, Artificial sequence
  SiRNA target sequence
attttcaaactcttctttatataaaa

SEQ ID NO: 105388 - DNA, 26 bp, Artificial sequence
  SiRNA target sequence
ttttcaaactcttctttatataaaaa

SEQ ID NO: 105389 - DNA, 26 bp, Artificial sequence
  SiRNA target sequence
tttcaaactcttctttatataaaaaa

SEQ ID NO: 105390 - DNA, 26 bp, Artificial sequence
  SiRNA target sequence
ttcaaactcttctttatataaaaaat

SEQ ID NO: 105391 - DNA, 26 bp, Artificial sequence
  SiRNA target sequence
tcaaactcttctttatataaaaaatc

SEQ ID NO: 105392 - DNA, 26 bp, Artificial sequence
  SiRNA target sequence
caaactcttctttatataaaaaatct

SEQ ID NO: 105393 - DNA, 26 bp, Artificial sequence
  SiRNA target sequence
aaactcttctttatataaaaaatcta

SEQ ID NO: 105394 - DNA, 26 bp, Artificial sequence
  SiRNA target sequence
aactcttctttatataaaaaatctac

SEQ ID NO: 105395 - DNA, 26 bp, Artificial sequence
  SiRNA target sequence
actcttctttatataaaaaatctaca

SEQ ID NO: 105396 - DNA, 26 bp, Artificial sequence
  SiRNA target sequence
ctcttctttatataaaaaatctacat

SEQ ID NO: 105397 - DNA, 26 bp, Artificial sequence
  SiRNA target sequence
tcttctttatataaaaaatctacatc

SEQ ID NO: 105398 - DNA, 26 bp, Artificial sequence
  SiRNA target sequence
cttctttatataaaaaatctacatct

SEQ ID NO: 105399 - DNA, 26 bp, Artificial sequence
  SiRNA target sequence
ttctttatataaaaaatctacatctc

SEQ ID NO: 105400 - DNA, 26 bp, Artificial sequence
  SiRNA target sequence
tctttatataaaaaatctacatctct

SEQ ID NO: 105401 - DNA, 26 bp, Artificial sequence
  SiRNA target sequence
ctttatataaaaaatctacatctcta

SEQ ID NO: 105402 - DNA, 26 bp, Artificial sequence
  SiRNA target sequence
tttatataaaaaatctacatctctaa

SEQ ID NO: 105403 - DNA, 26 bp, Artificial sequence
  SiRNA target sequence
ttatataaaaaatctacatctctaaa

SEQ ID NO: 105404 - DNA, 26 bp, Artificial sequence
  SiRNA target sequence
tatataaaaaatctacatctctaaat

SEQ ID NO: 105405 - DNA, 26 bp, Artificial sequence
  SiRNA target sequence
atataaaaaatctacatctctaaatc

SEQ ID NO: 105406 - DNA, 26 bp, Artificial sequence
  SiRNA target sequence
tataaaaaatctacatctctaaatct

SEQ ID NO: 105407 - DNA, 26 bp, Artificial sequence
  SiRNA target sequence
ataaaaaatctacatctctaaatcta

SEQ ID NO: 105408 - DNA, 26 bp, Artificial sequence
  SiRNA target sequence
taaaaaatctacatctctaaatctaa

SEQ ID NO: 105409 - DNA, 26 bp, Artificial sequence
  SiRNA target sequence
aaaaaatctacatctctaaatctaaa

SEQ ID NO: 105410 - DNA, 26 bp, Artificial sequence
  SiRNA target sequence
aaaaatctacatctctaaatctaaaa

SEQ ID NO: 105411 - DNA, 26 bp, Artificial sequence
  SiRNA target sequence
aaaatctacatctctaaatctaaaac

SEQ ID NO: 105412 - DNA, 26 bp, Artificial sequence
  SiRNA target sequence
aaatctacatctctaaatctaaaacc

SEQ ID NO: 105413 - DNA, 26 bp, Artificial sequence
  SiRNA target sequence
aatctacatctctaaatctaaaacca

SEQ ID NO: 105414 - DNA, 26 bp, Artificial sequence
  SiRNA target sequence
atctacatctctaaatctaaaaccat

SEQ ID NO: 105415 - DNA, 26 bp, Artificial sequence
  SiRNA target sequence
tctacatctctaaatctaaaaccata

SEQ ID NO: 105416 - DNA, 26 bp, Artificial sequence
  SiRNA target sequence
ctacatctctaaatctaaaaccatat

SEQ ID NO: 105417 - DNA, 26 bp, Artificial sequence
  SiRNA target sequence
tacatctctaaatctaaaaccatata

SEQ ID NO: 105418 - DNA, 26 bp, Artificial sequence
  SiRNA target sequence
acatctctaaatctaaaaccatataa

SEQ ID NO: 105419 - DNA, 26 bp, Artificial sequence
  SiRNA target sequence
catctctaaatctaaaaccatataat

SEQ ID NO: 105420 - DNA, 26 bp, Artificial sequence
  SiRNA target sequence
atctctaaatctaaaaccatataata

SEQ ID NO: 105421 - DNA, 26 bp, Artificial sequence
  SiRNA target sequence
tctctaaatctaaaaccatataataa

SEQ ID NO: 105422 - DNA, 26 bp, Artificial sequence
  SiRNA target sequence
ctctaaatctaaaaccatataataaa

SEQ ID NO: 105423 - DNA, 26 bp, Artificial sequence
  SiRNA target sequence
tctaaatctaaaaccatataataaaa

SEQ ID NO: 105424 - DNA, 26 bp, Artificial sequence
  SiRNA target sequence
ctaaatctaaaaccatataataaaat

SEQ ID NO: 105425 - DNA, 26 bp, Artificial sequence
  SiRNA target sequence
taaatctaaaaccatataataaaata

SEQ ID NO: 105426 - DNA, 26 bp, Artificial sequence
  SiRNA target sequence
aaatctaaaaccatataataaaataa

SEQ ID NO: 105427 - DNA, 26 bp, Artificial sequence
  SiRNA target sequence
aatctaaaaccatataataaaataac

SEQ ID NO: 105428 - DNA, 26 bp, Artificial sequence
  SiRNA target sequence
atctaaaaccatataataaaataact

SEQ ID NO: 105429 - DNA, 26 bp, Artificial sequence
  SiRNA target sequence
tctaaaaccatataataaaataactt

SEQ ID NO: 105430 - DNA, 26 bp, Artificial sequence
  SiRNA target sequence
ctaaaaccatataataaaataacttt

SEQ ID NO: 105431 - DNA, 26 bp, Artificial sequence
  SiRNA target sequence
taaaaccatataataaaataactttt

SEQ ID NO: 105432 - DNA, 26 bp, Artificial sequence
  SiRNA target sequence
aaaaccatataataaaataacttttt

SEQ ID NO: 105433 - DNA, 26 bp, Artificial sequence
  SiRNA target sequence
aaaccatataataaaataactttttt

SEQ ID NO: 105434 - DNA, 26 bp, Artificial sequence
  SiRNA target sequence
aaccatataataaaataactttttta

SEQ ID NO: 105435 - DNA, 26 bp, Artificial sequence
  SiRNA target sequence
accatataataaaataacttttttaa

SEQ ID NO: 105436 - DNA, 26 bp, Artificial sequence
  SiRNA target sequence
ccatataataaaataacttttttaaa

SEQ ID NO: 105437 - DNA, 26 bp, Artificial sequence
  SiRNA target sequence
catataataaaataacttttttaaaa

SEQ ID NO: 105438 - DNA, 26 bp, Artificial sequence
  SiRNA target sequence
atataataaaataacttttttaaaaa

SEQ ID NO: 105439 - DNA, 26 bp, Artificial sequence
  SiRNA target sequence
tataataaaataacttttttaaaaaa

SEQ ID NO: 105440 - DNA, 26 bp, Artificial sequence
  SiRNA target sequence
ataataaaataacttttttaaaaaaa

SEQ ID NO: 105441 - DNA, 26 bp, Artificial sequence
  SiRNA target sequence
taataaaataacttttttaaaaaaat

SEQ ID NO: 105442 - DNA, 26 bp, Artificial sequence
  SiRNA target sequence
aataaaataacttttttaaaaaaatt

SEQ ID NO: 105443 - DNA, 26 bp, Artificial sequence
  SiRNA target sequence
ataaaataacttttttaaaaaaattt

SEQ ID NO: 105444 - DNA, 26 bp, Artificial sequence
  SiRNA target sequence
taaaataacttttttaaaaaaattta

SEQ ID NO: 105445 - DNA, 26 bp, Artificial sequence
  SiRNA target sequence
aaaataacttttttaaaaaaatttaa

SEQ ID NO: 105446 - DNA, 26 bp, Artificial sequence
  SiRNA target sequence
aaataacttttttaaaaaaatttaaa

SEQ ID NO: 105447 - DNA, 26 bp, Artificial sequence
  SiRNA target sequence
aataacttttttaaaaaaatttaaat

SEQ ID NO: 105448 - DNA, 26 bp, Artificial sequence
  SiRNA target sequence
ataacttttttaaaaaaatttaaatc

SEQ ID NO: 105449 - DNA, 26 bp, Artificial sequence
  SiRNA target sequence
taacttttttaaaaaaatttaaatca

SEQ ID NO: 105450 - DNA, 26 bp, Artificial sequence
  SiRNA target sequence
aacttttttaaaaaaatttaaatcag

SEQ ID NO: 105451 - DNA, 26 bp, Artificial sequence
  SiRNA target sequence
acttttttaaaaaaatttaaatcaga

SEQ ID NO: 105452 - DNA, 26 bp, Artificial sequence
  SiRNA target sequence
cttttttaaaaaaatttaaatcagaa

SEQ ID NO: 105453 - DNA, 26 bp, Artificial sequence
  SiRNA target sequence
ttttttaaaaaaatttaaatcagaat

SEQ ID NO: 105454 - DNA, 26 bp, Artificial sequence
  SiRNA target sequence
tttttaaaaaaatttaaatcagaata

SEQ ID NO: 105455 - DNA, 26 bp, Artificial sequence
  SiRNA target sequence
ttttaaaaaaatttaaatcagaatag

SEQ ID NO: 105456 - DNA, 26 bp, Artificial sequence
  SiRNA target sequence
tttaaaaaaatttaaatcagaatagt

SEQ ID NO: 105457 - DNA, 26 bp, Artificial sequence
  SiRNA target sequence
ttaaaaaaatttaaatcagaatagta

SEQ ID NO: 105458 - DNA, 26 bp, Artificial sequence
  SiRNA target sequence
taaaaaaatttaaatcagaatagtaa

SEQ ID NO: 105459 - DNA, 26 bp, Artificial sequence
  SiRNA target sequence
aaaaaaatttaaatcagaatagtaat

SEQ ID NO: 105460 - DNA, 26 bp, Artificial sequence
  SiRNA target sequence
aaaaaatttaaatcagaatagtaatt

SEQ ID NO: 105461 - DNA, 26 bp, Artificial sequence
  SiRNA target sequence
aaaaatttaaatcagaatagtaatta

SEQ ID NO: 105462 - DNA, 26 bp, Artificial sequence
  SiRNA target sequence
aaaatttaaatcagaatagtaattaa

SEQ ID NO: 105463 - DNA, 26 bp, Artificial sequence
  SiRNA target sequence
aaatttaaatcagaatagtaattaac

SEQ ID NO: 105464 - DNA, 26 bp, Artificial sequence
  SiRNA target sequence
aatttaaatcagaatagtaattaaca

SEQ ID NO: 105465 - DNA, 26 bp, Artificial sequence
  SiRNA target sequence
atttaaatcagaatagtaattaacaa

SEQ ID NO: 105466 - DNA, 26 bp, Artificial sequence
  SiRNA target sequence
tttaaatcagaatagtaattaacaaa

SEQ ID NO: 105467 - DNA, 26 bp, Artificial sequence
  SiRNA target sequence
ttaaatcagaatagtaattaacaaat

SEQ ID NO: 105468 - DNA, 26 bp, Artificial sequence
  SiRNA target sequence
taaatcagaatagtaattaacaaatg

SEQ ID NO: 105469 - DNA, 26 bp, Artificial sequence
  SiRNA target sequence
aaatcagaatagtaattaacaaatgc

SEQ ID NO: 105470 - DNA, 26 bp, Artificial sequence
  SiRNA target sequence
aatcagaatagtaattaacaaatgcc

SEQ ID NO: 105471 - DNA, 26 bp, Artificial sequence
  SiRNA target sequence
atcagaatagtaattaacaaatgccc

SEQ ID NO: 105472 - DNA, 26 bp, Artificial sequence
  SiRNA target sequence
tcagaatagtaattaacaaatgccct

SEQ ID NO: 105473 - DNA, 26 bp, Artificial sequence
  SiRNA target sequence
cagaatagtaattaacaaatgccctg

SEQ ID NO: 105474 - DNA, 26 bp, Artificial sequence
  SiRNA target sequence
agaatagtaattaacaaatgccctgg

SEQ ID NO: 105475 - DNA, 26 bp, Artificial sequence
  SiRNA target sequence
gaatagtaattaacaaatgccctggg

SEQ ID NO: 105476 - DNA, 26 bp, Artificial sequence
  SiRNA target sequence
aatagtaattaacaaatgccctggga

SEQ ID NO: 105477 - DNA, 26 bp, Artificial sequence
  SiRNA target sequence
atagtaattaacaaatgccctgggaa

SEQ ID NO: 105478 - DNA, 26 bp, Artificial sequence
  SiRNA target sequence
tagtaattaacaaatgccctgggaag

SEQ ID NO: 105479 - DNA, 26 bp, Artificial sequence
  SiRNA target sequence
agtaattaacaaatgccctgggaagt

SEQ ID NO: 105480 - DNA, 26 bp, Artificial sequence
  SiRNA target sequence
gtaattaacaaatgccctgggaagtg

SEQ ID NO: 105481 - DNA, 26 bp, Artificial sequence
  SiRNA target sequence
taattaacaaatgccctgggaagtgt

SEQ ID NO: 105482 - DNA, 26 bp, Artificial sequence
  SiRNA target sequence
aattaacaaatgccctgggaagtgta

SEQ ID NO: 105483 - DNA, 26 bp, Artificial sequence
  SiRNA target sequence
attaacaaatgccctgggaagtgtaa

SEQ ID NO: 105484 - DNA, 26 bp, Artificial sequence
  SiRNA target sequence
ttaacaaatgccctgggaagtgtaat

SEQ ID NO: 105485 - DNA, 26 bp, Artificial sequence
  SiRNA target sequence
taacaaatgccctgggaagtgtaata

SEQ ID NO: 105486 - DNA, 26 bp, Artificial sequence
  SiRNA target sequence
aacaaatgccctgggaagtgtaatac

SEQ ID NO: 105487 - DNA, 26 bp, Artificial sequence
  SiRNA target sequence
acaaatgccctgggaagtgtaatacc

SEQ ID NO: 105488 - DNA, 26 bp, Artificial sequence
  SiRNA target sequence
caaatgccctgggaagtgtaatacca

SEQ ID NO: 105489 - DNA, 26 bp, Artificial sequence
  SiRNA target sequence
aaatgccctgggaagtgtaataccag

SEQ ID NO: 105490 - DNA, 26 bp, Artificial sequence
  SiRNA target sequence
aatgccctgggaagtgtaataccagt

SEQ ID NO: 105491 - DNA, 26 bp, Artificial sequence
  SiRNA target sequence
atgccctgggaagtgtaataccagta

SEQ ID NO: 105492 - DNA, 26 bp, Artificial sequence
  SiRNA target sequence
tgccctgggaagtgtaataccagtac

SEQ ID NO: 105493 - DNA, 26 bp, Artificial sequence
  SiRNA target sequence
gccctgggaagtgtaataccagtacc

SEQ ID NO: 105494 - DNA, 26 bp, Artificial sequence
  SiRNA target sequence
ccctgggaagtgtaataccagtacca

SEQ ID NO: 105495 - DNA, 26 bp, Artificial sequence
  SiRNA target sequence
cctgggaagtgtaataccagtaccag

SEQ ID NO: 105496 - DNA, 26 bp, Artificial sequence
  SiRNA target sequence
ctgggaagtgtaataccagtaccagt

SEQ ID NO: 105497 - DNA, 26 bp, Artificial sequence
  SiRNA target sequence
tgggaagtgtaataccagtaccagtg

SEQ ID NO: 105498 - DNA, 26 bp, Artificial sequence
  SiRNA target sequence
gggaagtgtaataccagtaccagtgc

SEQ ID NO: 105499 - DNA, 26 bp, Artificial sequence
  SiRNA target sequence
ggaagtgtaataccagtaccagtgca

SEQ ID NO: 105500 - DNA, 26 bp, Artificial sequence
  SiRNA target sequence
gaagtgtaataccagtaccagtgcac

SEQ ID NO: 105501 - DNA, 26 bp, Artificial sequence
  SiRNA target sequence
aagtgtaataccagtaccagtgcaca

SEQ ID NO: 105502 - DNA, 26 bp, Artificial sequence
  SiRNA target sequence
agtgtaataccagtaccagtgcacat

SEQ ID NO: 105503 - DNA, 26 bp, Artificial sequence
  SiRNA target sequence
gtgtaataccagtaccagtgcacata

SEQ ID NO: 105504 - DNA, 26 bp, Artificial sequence
  SiRNA target sequence
tgtaataccagtaccagtgcacataa

SEQ ID NO: 105505 - DNA, 26 bp, Artificial sequence
  SiRNA target sequence
gtaataccagtaccagtgcacataaa

SEQ ID NO: 105506 - DNA, 26 bp, Artificial sequence
  SiRNA target sequence
taataccagtaccagtgcacataaac

SEQ ID NO: 105507 - DNA, 26 bp, Artificial sequence
  SiRNA target sequence
aataccagtaccagtgcacataaaca

SEQ ID NO: 105508 - DNA, 26 bp, Artificial sequence
  SiRNA target sequence
ataccagtaccagtgcacataaacaa

SEQ ID NO: 105509 - DNA, 26 bp, Artificial sequence
  SiRNA target sequence
taccagtaccagtgcacataaacaaa

SEQ ID NO: 105510 - DNA, 26 bp, Artificial sequence
  SiRNA target sequence
accagtaccagtgcacataaacaaaa

SEQ ID NO: 105511 - DNA, 26 bp, Artificial sequence
  SiRNA target sequence
ccagtaccagtgcacataaacaaaat

SEQ ID NO: 105512 - DNA, 26 bp, Artificial sequence
  SiRNA target sequence
cagtaccagtgcacataaacaaaatc

SEQ ID NO: 105513 - DNA, 26 bp, Artificial sequence
  SiRNA target sequence
agtaccagtgcacataaacaaaatct

SEQ ID NO: 105514 - DNA, 26 bp, Artificial sequence
  SiRNA target sequence
gtaccagtgcacataaacaaaatctt

SEQ ID NO: 105515 - DNA, 26 bp, Artificial sequence
  SiRNA target sequence
taccagtgcacataaacaaaatcttt

SEQ ID NO: 105516 - DNA, 26 bp, Artificial sequence
  SiRNA target sequence
accagtgcacataaacaaaatctttt

SEQ ID NO: 105517 - DNA, 26 bp, Artificial sequence
  SiRNA target sequence
ccagtgcacataaacaaaatcttttt

SEQ ID NO: 105518 - DNA, 26 bp, Artificial sequence
  SiRNA target sequence
cagtgcacataaacaaaatcttttta

SEQ ID NO: 105519 - DNA, 26 bp, Artificial sequence
  SiRNA target sequence
agtgcacataaacaaaatctttttac

SEQ ID NO: 105520 - DNA, 26 bp, Artificial sequence
  SiRNA target sequence
gtgcacataaacaaaatctttttacc

SEQ ID NO: 105521 - DNA, 26 bp, Artificial sequence
  SiRNA target sequence
tgcacataaacaaaatctttttacca

SEQ ID NO: 105522 - DNA, 26 bp, Artificial sequence
  SiRNA target sequence
gcacataaacaaaatctttttaccac

SEQ ID NO: 105523 - DNA, 26 bp, Artificial sequence
  SiRNA target sequence
cacataaacaaaatctttttaccact

SEQ ID NO: 105524 - DNA, 26 bp, Artificial sequence
  SiRNA target sequence
acataaacaaaatctttttaccacta

SEQ ID NO: 105525 - DNA, 26 bp, Artificial sequence
  SiRNA target sequence
cataaacaaaatctttttaccactaa

SEQ ID NO: 105526 - DNA, 26 bp, Artificial sequence
  SiRNA target sequence
ataaacaaaatctttttaccactaaa

SEQ ID NO: 105527 - DNA, 26 bp, Artificial sequence
  SiRNA target sequence
taaacaaaatctttttaccactaaaa

SEQ ID NO: 105528 - DNA, 26 bp, Artificial sequence
  SiRNA target sequence
aaacaaaatctttttaccactaaaat

SEQ ID NO: 105529 - DNA, 26 bp, Artificial sequence
  SiRNA target sequence
aacaaaatctttttaccactaaaatt

SEQ ID NO: 105530 - DNA, 26 bp, Artificial sequence
  SiRNA target sequence
acaaaatctttttaccactaaaatta

SEQ ID NO: 105531 - DNA, 26 bp, Artificial sequence
  SiRNA target sequence
caaaatctttttaccactaaaattaa

SEQ ID NO: 105532 - DNA, 26 bp, Artificial sequence
  SiRNA target sequence
aaaatctttttaccactaaaattaag

SEQ ID NO: 105533 - DNA, 26 bp, Artificial sequence
  SiRNA target sequence
aaatctttttaccactaaaattaagt

SEQ ID NO: 105534 - DNA, 26 bp, Artificial sequence
  SiRNA target sequence
aatctttttaccactaaaattaagtc

SEQ ID NO: 105535 - DNA, 26 bp, Artificial sequence
  SiRNA target sequence
atctttttaccactaaaattaagtct

SEQ ID NO: 105536 - DNA, 26 bp, Artificial sequence
  SiRNA target sequence
tctttttaccactaaaattaagtcta

SEQ ID NO: 105537 - DNA, 26 bp, Artificial sequence
  SiRNA target sequence
ctttttaccactaaaattaagtctat

SEQ ID NO: 105538 - DNA, 26 bp, Artificial sequence
  SiRNA target sequence
tttttaccactaaaattaagtctatt

SEQ ID NO: 105539 - DNA, 26 bp, Artificial sequence
  SiRNA target sequence
ttttaccactaaaattaagtctattt

SEQ ID NO: 105540 - DNA, 26 bp, Artificial sequence
  SiRNA target sequence
tttaccactaaaattaagtctatttt

SEQ ID NO: 105541 - DNA, 26 bp, Artificial sequence
  SiRNA target sequence
ttaccactaaaattaagtctattttg

SEQ ID NO: 105542 - DNA, 26 bp, Artificial sequence
  SiRNA target sequence
taccactaaaattaagtctattttgt

SEQ ID NO: 105543 - DNA, 26 bp, Artificial sequence
  SiRNA target sequence
accactaaaattaagtctattttgta

SEQ ID NO: 105544 - DNA, 26 bp, Artificial sequence
  SiRNA target sequence
ccactaaaattaagtctattttgtac

SEQ ID NO: 105545 - DNA, 26 bp, Artificial sequence
  SiRNA target sequence
cactaaaattaagtctattttgtact

SEQ ID NO: 105546 - DNA, 26 bp, Artificial sequence
  SiRNA target sequence
actaaaattaagtctattttgtacta

SEQ ID NO: 105547 - DNA, 26 bp, Artificial sequence
  SiRNA target sequence
ctaaaattaagtctattttgtactat

SEQ ID NO: 105548 - DNA, 26 bp, Artificial sequence
  SiRNA target sequence
taaaattaagtctattttgtactatg

SEQ ID NO: 105549 - DNA, 26 bp, Artificial sequence
  SiRNA target sequence
aaaattaagtctattttgtactatgt

SEQ ID NO: 105550 - DNA, 26 bp, Artificial sequence
  SiRNA target sequence
aaattaagtctattttgtactatgtt

SEQ ID NO: 105551 - DNA, 26 bp, Artificial sequence
  SiRNA target sequence
aattaagtctattttgtactatgtta

SEQ ID NO: 105552 - DNA, 26 bp, Artificial sequence
  SiRNA target sequence
attaagtctattttgtactatgttaa

SEQ ID NO: 105553 - DNA, 26 bp, Artificial sequence
  SiRNA target sequence
ttaagtctattttgtactatgttaac

SEQ ID NO: 105554 - DNA, 26 bp, Artificial sequence
  SiRNA target sequence
taagtctattttgtactatgttaaca

SEQ ID NO: 105555 - DNA, 26 bp, Artificial sequence
  SiRNA target sequence
aagtctattttgtactatgttaacat

SEQ ID NO: 105556 - DNA, 26 bp, Artificial sequence
  SiRNA target sequence
agtctattttgtactatgttaacatg

SEQ ID NO: 105557 - DNA, 26 bp, Artificial sequence
  SiRNA target sequence
gtctattttgtactatgttaacatga

SEQ ID NO: 105558 - DNA, 26 bp, Artificial sequence
  SiRNA target sequence
tctattttgtactatgttaacatgaa

SEQ ID NO: 105559 - DNA, 26 bp, Artificial sequence
  SiRNA target sequence
ctattttgtactatgttaacatgaat

SEQ ID NO: 105560 - DNA, 26 bp, Artificial sequence
  SiRNA target sequence
tattttgtactatgttaacatgaata

SEQ ID NO: 105561 - DNA, 26 bp, Artificial sequence
  SiRNA target sequence
attttgtactatgttaacatgaatag

SEQ ID NO: 105562 - DNA, 26 bp, Artificial sequence
  SiRNA target sequence
ttttgtactatgttaacatgaatagt

SEQ ID NO: 105563 - DNA, 26 bp, Artificial sequence
  SiRNA target sequence
tttgtactatgttaacatgaatagta

SEQ ID NO: 105564 - DNA, 26 bp, Artificial sequence
  SiRNA target sequence
ttgtactatgttaacatgaatagtag

SEQ ID NO: 105565 - DNA, 26 bp, Artificial sequence
  SiRNA target sequence
tgtactatgttaacatgaatagtaga

SEQ ID NO: 105566 - DNA, 26 bp, Artificial sequence
  SiRNA target sequence
gtactatgttaacatgaatagtagac

SEQ ID NO: 105567 - DNA, 26 bp, Artificial sequence
  SiRNA target sequence
tactatgttaacatgaatagtagacc

SEQ ID NO: 105568 - DNA, 26 bp, Artificial sequence
  SiRNA target sequence
actatgttaacatgaatagtagaccc

SEQ ID NO: 105569 - DNA, 26 bp, Artificial sequence
  SiRNA target sequence
ctatgttaacatgaatagtagaccct

SEQ ID NO: 105570 - DNA, 26 bp, Artificial sequence
  SiRNA target sequence
tatgttaacatgaatagtagaccctt

SEQ ID NO: 105571 - DNA, 26 bp, Artificial sequence
  SiRNA target sequence
atgttaacatgaatagtagacccttt

SEQ ID NO: 105572 - DNA, 26 bp, Artificial sequence
  SiRNA target sequence
tgttaacatgaatagtagacccttta

SEQ ID NO: 105573 - DNA, 26 bp, Artificial sequence
  SiRNA target sequence
gttaacatgaatagtagaccctttag

SEQ ID NO: 105574 - DNA, 26 bp, Artificial sequence
  SiRNA target sequence
ttaacatgaatagtagaccctttagt

SEQ ID NO: 105575 - DNA, 26 bp, Artificial sequence
  SiRNA target sequence
taacatgaatagtagaccctttagta

SEQ ID NO: 105576 - DNA, 26 bp, Artificial sequence
  SiRNA target sequence
aacatgaatagtagaccctttagtaa

SEQ ID NO: 105577 - DNA, 26 bp, Artificial sequence
  SiRNA target sequence
acatgaatagtagaccctttagtaag

SEQ ID NO: 105578 - DNA, 26 bp, Artificial sequence
  SiRNA target sequence
catgaatagtagaccctttagtaagt

SEQ ID NO: 105579 - DNA, 26 bp, Artificial sequence
  SiRNA target sequence
atgaatagtagaccctttagtaagta

SEQ ID NO: 105580 - DNA, 26 bp, Artificial sequence
  SiRNA target sequence
tgaatagtagaccctttagtaagtaa

SEQ ID NO: 105581 - DNA, 26 bp, Artificial sequence
  SiRNA target sequence
gaatagtagaccctttagtaagtaat

SEQ ID NO: 105582 - DNA, 26 bp, Artificial sequence
  SiRNA target sequence
aatagtagaccctttagtaagtaatt

SEQ ID NO: 105583 - DNA, 26 bp, Artificial sequence
  SiRNA target sequence
atagtagaccctttagtaagtaattt

SEQ ID NO: 105584 - DNA, 26 bp, Artificial sequence
  SiRNA target sequence
tagtagaccctttagtaagtaatttt

SEQ ID NO: 105585 - DNA, 26 bp, Artificial sequence
  SiRNA target sequence
agtagaccctttagtaagtaatttta

SEQ ID NO: 105586 - DNA, 26 bp, Artificial sequence
  SiRNA target sequence
gtagaccctttagtaagtaattttaa

SEQ ID NO: 105587 - DNA, 26 bp, Artificial sequence
  SiRNA target sequence
tagaccctttagtaagtaattttaaa

SEQ ID NO: 105588 - DNA, 26 bp, Artificial sequence
  SiRNA target sequence
agaccctttagtaagtaattttaaat

SEQ ID NO: 105589 - DNA, 26 bp, Artificial sequence
  SiRNA target sequence
gaccctttagtaagtaattttaaata

SEQ ID NO: 105590 - DNA, 26 bp, Artificial sequence
  SiRNA target sequence
accctttagtaagtaattttaaatac

SEQ ID NO: 105591 - DNA, 26 bp, Artificial sequence
  SiRNA target sequence
ccctttagtaagtaattttaaatact

SEQ ID NO: 105592 - DNA, 26 bp, Artificial sequence
  SiRNA target sequence
cctttagtaagtaattttaaatactc

SEQ ID NO: 105593 - DNA, 26 bp, Artificial sequence
  SiRNA target sequence
ctttagtaagtaattttaaatactct

SEQ ID NO: 105594 - DNA, 26 bp, Artificial sequence
  SiRNA target sequence
tttagtaagtaattttaaatactctg

SEQ ID NO: 105595 - DNA, 26 bp, Artificial sequence
  SiRNA target sequence
ttagtaagtaattttaaatactctga

SEQ ID NO: 105596 - DNA, 26 bp, Artificial sequence
  SiRNA target sequence
tagtaagtaattttaaatactctgaa

SEQ ID NO: 105597 - DNA, 26 bp, Artificial sequence
  SiRNA target sequence
agtaagtaattttaaatactctgaac

SEQ ID NO: 105598 - DNA, 26 bp, Artificial sequence
  SiRNA target sequence
gtaagtaattttaaatactctgaaca

SEQ ID NO: 105599 - DNA, 26 bp, Artificial sequence
  SiRNA target sequence
taagtaattttaaatactctgaacaa

SEQ ID NO: 105600 - DNA, 26 bp, Artificial sequence
  SiRNA target sequence
aagtaattttaaatactctgaacaaa

SEQ ID NO: 105601 - DNA, 26 bp, Artificial sequence
  SiRNA target sequence
agtaattttaaatactctgaacaaag

SEQ ID NO: 105602 - DNA, 26 bp, Artificial sequence
  SiRNA target sequence
gtaattttaaatactctgaacaaaga

SEQ ID NO: 105603 - DNA, 26 bp, Artificial sequence
  SiRNA target sequence
taattttaaatactctgaacaaagac

SEQ ID NO: 105604 - DNA, 26 bp, Artificial sequence
  SiRNA target sequence
aattttaaatactctgaacaaagacc

SEQ ID NO: 105605 - DNA, 26 bp, Artificial sequence
  SiRNA target sequence
attttaaatactctgaacaaagacct

SEQ ID NO: 105606 - DNA, 26 bp, Artificial sequence
  SiRNA target sequence
ttttaaatactctgaacaaagacctt

SEQ ID NO: 105607 - DNA, 26 bp, Artificial sequence
  SiRNA target sequence
tttaaatactctgaacaaagaccttt

SEQ ID NO: 105608 - DNA, 26 bp, Artificial sequence
  SiRNA target sequence
ttaaatactctgaacaaagacctttt

SEQ ID NO: 105609 - DNA, 26 bp, Artificial sequence
  SiRNA target sequence
taaatactctgaacaaagaccttttc

SEQ ID NO: 105610 - DNA, 26 bp, Artificial sequence
  SiRNA target sequence
aaatactctgaacaaagaccttttcg

SEQ ID NO: 105611 - DNA, 26 bp, Artificial sequence
  SiRNA target sequence
aatactctgaacaaagaccttttcgt

SEQ ID NO: 105612 - DNA, 26 bp, Artificial sequence
  SiRNA target sequence
atactctgaacaaagaccttttcgtt

SEQ ID NO: 105613 - DNA, 26 bp, Artificial sequence
  SiRNA target sequence
tactctgaacaaagaccttttcgttc

SEQ ID NO: 105614 - DNA, 26 bp, Artificial sequence
  SiRNA target sequence
actctgaacaaagaccttttcgttct

SEQ ID NO: 105615 - DNA, 26 bp, Artificial sequence
  SiRNA target sequence
ctctgaacaaagaccttttcgttctt

SEQ ID NO: 105616 - DNA, 26 bp, Artificial sequence
  SiRNA target sequence
tctgaacaaagaccttttcgttcttc

SEQ ID NO: 105617 - DNA, 26 bp, Artificial sequence
  SiRNA target sequence
ctgaacaaagaccttttcgttcttct

SEQ ID NO: 105618 - DNA, 26 bp, Artificial sequence
  SiRNA target sequence
tgaacaaagaccttttcgttcttctt

SEQ ID NO: 105619 - DNA, 26 bp, Artificial sequence
  SiRNA target sequence
gaacaaagaccttttcgttcttcttt

SEQ ID NO: 105620 - DNA, 26 bp, Artificial sequence
  SiRNA target sequence
aacaaagaccttttcgttcttctttt

SEQ ID NO: 105621 - DNA, 26 bp, Artificial sequence
  SiRNA target sequence
acaaagaccttttcgttcttctttta

SEQ ID NO: 105622 - DNA, 26 bp, Artificial sequence
  SiRNA target sequence
caaagaccttttcgttcttcttttaa

SEQ ID NO: 105623 - DNA, 26 bp, Artificial sequence
  SiRNA target sequence
aaagaccttttcgttcttcttttaaa

SEQ ID NO: 105624 - DNA, 26 bp, Artificial sequence
  SiRNA target sequence
aagaccttttcgttcttcttttaaac

SEQ ID NO: 105625 - DNA, 26 bp, Artificial sequence
  SiRNA target sequence
agaccttttcgttcttcttttaaact

SEQ ID NO: 105626 - DNA, 26 bp, Artificial sequence
  SiRNA target sequence
gaccttttcgttcttcttttaaactt

SEQ ID NO: 105627 - DNA, 26 bp, Artificial sequence
  SiRNA target sequence
accttttcgttcttcttttaaacttg

SEQ ID NO: 105628 - DNA, 26 bp, Artificial sequence
  SiRNA target sequence
ccttttcgttcttcttttaaacttgt

SEQ ID NO: 105629 - DNA, 26 bp, Artificial sequence
  SiRNA target sequence
cttttcgttcttcttttaaacttgtt

SEQ ID NO: 105630 - DNA, 26 bp, Artificial sequence
  SiRNA target sequence
ttttcgttcttcttttaaacttgttt

SEQ ID NO: 105631 - DNA, 26 bp, Artificial sequence
  SiRNA target sequence
tttcgttcttcttttaaacttgtttt

SEQ ID NO: 105632 - DNA, 26 bp, Artificial sequence
  SiRNA target sequence
ttcgttcttcttttaaacttgtttta

SEQ ID NO: 105633 - DNA, 26 bp, Artificial sequence
  SiRNA target sequence
tcgttcttcttttaaacttgttttaa

SEQ ID NO: 105634 - DNA, 26 bp, Artificial sequence
  SiRNA target sequence
cgttcttcttttaaacttgttttaaa

SEQ ID NO: 105635 - DNA, 26 bp, Artificial sequence
  SiRNA target sequence
gttcttcttttaaacttgttttaaaa

SEQ ID NO: 105636 - DNA, 26 bp, Artificial sequence
  SiRNA target sequence
ttcttcttttaaacttgttttaaaag

SEQ ID NO: 105637 - DNA, 26 bp, Artificial sequence
  SiRNA target sequence
tcttcttttaaacttgttttaaaaga

SEQ ID NO: 105638 - DNA, 26 bp, Artificial sequence
  SiRNA target sequence
cttcttttaaacttgttttaaaagaa

SEQ ID NO: 105639 - DNA, 26 bp, Artificial sequence
  SiRNA target sequence
ttcttttaaacttgttttaaaagaaa

SEQ ID NO: 105640 - DNA, 26 bp, Artificial sequence
  SiRNA target sequence
tcttttaaacttgttttaaaagaaac

SEQ ID NO: 105641 - DNA, 26 bp, Artificial sequence
  SiRNA target sequence
cttttaaacttgttttaaaagaaaca

SEQ ID NO: 105642 - DNA, 26 bp, Artificial sequence
  SiRNA target sequence
ttttaaacttgttttaaaagaaacaa

SEQ ID NO: 105643 - DNA, 26 bp, Artificial sequence
  SiRNA target sequence
tttaaacttgttttaaaagaaacaag

SEQ ID NO: 105644 - DNA, 26 bp, Artificial sequence
  SiRNA target sequence
ttaaacttgttttaaaagaaacaaga

SEQ ID NO: 105645 - DNA, 26 bp, Artificial sequence
  SiRNA target sequence
taaacttgttttaaaagaaacaagag

SEQ ID NO: 105646 - DNA, 26 bp, Artificial sequence
  SiRNA target sequence
aaacttgttttaaaagaaacaagaga

SEQ ID NO: 105647 - DNA, 26 bp, Artificial sequence
  SiRNA target sequence
aacttgttttaaaagaaacaagagag

SEQ ID NO: 105648 - DNA, 26 bp, Artificial sequence
  SiRNA target sequence
acttgttttaaaagaaacaagagaga

SEQ ID NO: 105649 - DNA, 26 bp, Artificial sequence
  SiRNA target sequence
cttgttttaaaagaaacaagagagac

SEQ ID NO: 105650 - DNA, 26 bp, Artificial sequence
  SiRNA target sequence
ttgttttaaaagaaacaagagagacg

SEQ ID NO: 105651 - DNA, 26 bp, Artificial sequence
  SiRNA target sequence
tgttttaaaagaaacaagagagacgg

SEQ ID NO: 105652 - DNA, 26 bp, Artificial sequence
  SiRNA target sequence
gttttaaaagaaacaagagagacggt

SEQ ID NO: 105653 - DNA, 26 bp, Artificial sequence
  SiRNA target sequence
ttttaaaagaaacaagagagacggtg

SEQ ID NO: 105654 - DNA, 26 bp, Artificial sequence
  SiRNA target sequence
tttaaaagaaacaagagagacggtga

SEQ ID NO: 105655 - DNA, 26 bp, Artificial sequence
  SiRNA target sequence
ttaaaagaaacaagagagacggtgac

SEQ ID NO: 105656 - DNA, 26 bp, Artificial sequence
  SiRNA target sequence
taaaagaaacaagagagacggtgaca

SEQ ID NO: 105657 - DNA, 26 bp, Artificial sequence
  SiRNA target sequence
aaaagaaacaagagagacggtgacaa

SEQ ID NO: 105658 - DNA, 26 bp, Artificial sequence
  SiRNA target sequence
aaagaaacaagagagacggtgacaaa

SEQ ID NO: 105659 - DNA, 26 bp, Artificial sequence
  SiRNA target sequence
aagaaacaagagagacggtgacaaag

SEQ ID NO: 105660 - DNA, 26 bp, Artificial sequence
  SiRNA target sequence
agaaacaagagagacggtgacaaagt

SEQ ID NO: 105661 - DNA, 26 bp, Artificial sequence
  SiRNA target sequence
gaaacaagagagacggtgacaaagta

SEQ ID NO: 105662 - DNA, 26 bp, Artificial sequence
  SiRNA target sequence
aaacaagagagacggtgacaaagtaa

SEQ ID NO: 105663 - DNA, 26 bp, Artificial sequence
  SiRNA target sequence
aacaagagagacggtgacaaagtaac

SEQ ID NO: 105664 - DNA, 26 bp, Artificial sequence
  SiRNA target sequence
acaagagagacggtgacaaagtaaca

SEQ ID NO: 105665 - DNA, 26 bp, Artificial sequence
  SiRNA target sequence
caagagagacggtgacaaagtaacaa

SEQ ID NO: 105666 - DNA, 26 bp, Artificial sequence
  SiRNA target sequence
aagagagacggtgacaaagtaacaaa

SEQ ID NO: 105667 - DNA, 26 bp, Artificial sequence
  SiRNA target sequence
agagagacggtgacaaagtaacaaaa

SEQ ID NO: 105668 - DNA, 26 bp, Artificial sequence
  SiRNA target sequence
gagagacggtgacaaagtaacaaaaa

SEQ ID NO: 105669 - DNA, 26 bp, Artificial sequence
  SiRNA target sequence
agagacggtgacaaagtaacaaaaat

SEQ ID NO: 105670 - DNA, 26 bp, Artificial sequence
  SiRNA target sequence
gagacggtgacaaagtaacaaaaatc

SEQ ID NO: 105671 - DNA, 26 bp, Artificial sequence
  SiRNA target sequence
agacggtgacaaagtaacaaaaatct

SEQ ID NO: 105672 - DNA, 26 bp, Artificial sequence
  SiRNA target sequence
gacggtgacaaagtaacaaaaatctt

SEQ ID NO: 105673 - DNA, 26 bp, Artificial sequence
  SiRNA target sequence
acggtgacaaagtaacaaaaatcttt

SEQ ID NO: 105674 - DNA, 26 bp, Artificial sequence
  SiRNA target sequence
cggtgacaaagtaacaaaaatctttt

SEQ ID NO: 105675 - DNA, 26 bp, Artificial sequence
  SiRNA target sequence
ggtgacaaagtaacaaaaatcttttt

SEQ ID NO: 105676 - DNA, 26 bp, Artificial sequence
  SiRNA target sequence
gtgacaaagtaacaaaaatctttttt

SEQ ID NO: 105677 - DNA, 26 bp, Artificial sequence
  SiRNA target sequence
tgacaaagtaacaaaaatcttttttc

SEQ ID NO: 105678 - DNA, 26 bp, Artificial sequence
  SiRNA target sequence
gacaaagtaacaaaaatcttttttcg

SEQ ID NO: 105679 - DNA, 26 bp, Artificial sequence
  SiRNA target sequence
acaaagtaacaaaaatcttttttcgt

SEQ ID NO: 105680 - DNA, 26 bp, Artificial sequence
  SiRNA target sequence
caaagtaacaaaaatcttttttcgtt

SEQ ID NO: 105681 - DNA, 26 bp, Artificial sequence
  SiRNA target sequence
aaagtaacaaaaatcttttttcgtta

SEQ ID NO: 105682 - DNA, 26 bp, Artificial sequence
  SiRNA target sequence
aagtaacaaaaatcttttttcgttaa

SEQ ID NO: 105683 - DNA, 26 bp, Artificial sequence
  SiRNA target sequence
agtaacaaaaatcttttttcgttaat

SEQ ID NO: 105684 - DNA, 26 bp, Artificial sequence
  SiRNA target sequence
gtaacaaaaatcttttttcgttaatg

SEQ ID NO: 105685 - DNA, 26 bp, Artificial sequence
  SiRNA target sequence
taacaaaaatcttttttcgttaatgt

SEQ ID NO: 105686 - DNA, 26 bp, Artificial sequence
  SiRNA target sequence
aacaaaaatcttttttcgttaatgta

SEQ ID NO: 105687 - DNA, 26 bp, Artificial sequence
  SiRNA target sequence
acaaaaatcttttttcgttaatgtaa

SEQ ID NO: 105688 - DNA, 26 bp, Artificial sequence
  SiRNA target sequence
caaaaatcttttttcgttaatgtaaa

SEQ ID NO: 105689 - DNA, 26 bp, Artificial sequence
  SiRNA target sequence
aaaaatcttttttcgttaatgtaaaa

SEQ ID NO: 105690 - DNA, 26 bp, Artificial sequence
  SiRNA target sequence
aaaatcttttttcgttaatgtaaaat

SEQ ID NO: 105691 - DNA, 26 bp, Artificial sequence
  SiRNA target sequence
aaatcttttttcgttaatgtaaaata

SEQ ID NO: 105692 - DNA, 26 bp, Artificial sequence
  SiRNA target sequence
aatcttttttcgttaatgtaaaatat

SEQ ID NO: 105693 - DNA, 26 bp, Artificial sequence
  SiRNA target sequence
atcttttttcgttaatgtaaaatatc

SEQ ID NO: 105694 - DNA, 26 bp, Artificial sequence
  SiRNA target sequence
tcttttttcgttaatgtaaaatatct

SEQ ID NO: 105695 - DNA, 26 bp, Artificial sequence
  SiRNA target sequence
cttttttcgttaatgtaaaatatctt

SEQ ID NO: 105696 - DNA, 26 bp, Artificial sequence
  SiRNA target sequence
ttttttcgttaatgtaaaatatcttg

SEQ ID NO: 105697 - DNA, 26 bp, Artificial sequence
  SiRNA target sequence
tttttcgttaatgtaaaatatcttgg

SEQ ID NO: 105698 - DNA, 26 bp, Artificial sequence
  SiRNA target sequence
ttttcgttaatgtaaaatatcttgga

SEQ ID NO: 105699 - DNA, 26 bp, Artificial sequence
  SiRNA target sequence
tttcgttaatgtaaaatatcttggat

SEQ ID NO: 105700 - DNA, 26 bp, Artificial sequence
  SiRNA target sequence
ttcgttaatgtaaaatatcttggatt

SEQ ID NO: 105701 - DNA, 26 bp, Artificial sequence
  SiRNA target sequence
tcgttaatgtaaaatatcttggatta

SEQ ID NO: 105702 - DNA, 26 bp, Artificial sequence
  SiRNA target sequence
cgttaatgtaaaatatcttggattaa

SEQ ID NO: 105703 - DNA, 26 bp, Artificial sequence
  SiRNA target sequence
gttaatgtaaaatatcttggattaat

SEQ ID NO: 105704 - DNA, 26 bp, Artificial sequence
  SiRNA target sequence
ttaatgtaaaatatcttggattaatt

SEQ ID NO: 105705 - DNA, 26 bp, Artificial sequence
  SiRNA target sequence
taatgtaaaatatcttggattaatta

SEQ ID NO: 105706 - DNA, 26 bp, Artificial sequence
  SiRNA target sequence
aatgtaaaatatcttggattaattac

SEQ ID NO: 105707 - DNA, 26 bp, Artificial sequence
  SiRNA target sequence
atgtaaaatatcttggattaattaca

SEQ ID NO: 105708 - DNA, 26 bp, Artificial sequence
  SiRNA target sequence
tgtaaaatatcttggattaattacag

SEQ ID NO: 105709 - DNA, 26 bp, Artificial sequence
  SiRNA target sequence
gtaaaatatcttggattaattacagg

SEQ ID NO: 105710 - DNA, 26 bp, Artificial sequence
  SiRNA target sequence
taaaatatcttggattaattacaggg

SEQ ID NO: 105711 - DNA, 26 bp, Artificial sequence
  SiRNA target sequence
aaaatatcttggattaattacaggga

SEQ ID NO: 105712 - DNA, 26 bp, Artificial sequence
  SiRNA target sequence
aaatatcttggattaattacagggat

SEQ ID NO: 105713 - DNA, 26 bp, Artificial sequence
  SiRNA target sequence
aatatcttggattaattacagggata

SEQ ID NO: 105714 - DNA, 26 bp, Artificial sequence
  SiRNA target sequence
atatcttggattaattacagggatat

SEQ ID NO: 105715 - DNA, 26 bp, Artificial sequence
  SiRNA target sequence
tatcttggattaattacagggatata

SEQ ID NO: 105716 - DNA, 26 bp, Artificial sequence
  SiRNA target sequence
atcttggattaattacagggatatac

SEQ ID NO: 105717 - DNA, 26 bp, Artificial sequence
  SiRNA target sequence
tcttggattaattacagggatatact

SEQ ID NO: 105718 - DNA, 26 bp, Artificial sequence
  SiRNA target sequence
cttggattaattacagggatatactt

SEQ ID NO: 105719 - DNA, 26 bp, Artificial sequence
  SiRNA target sequence
ttggattaattacagggatatacttg

SEQ ID NO: 105720 - DNA, 26 bp, Artificial sequence
  SiRNA target sequence
tggattaattacagggatatacttgt

SEQ ID NO: 105721 - DNA, 26 bp, Artificial sequence
  SiRNA target sequence
ggattaattacagggatatacttgta

SEQ ID NO: 105722 - DNA, 26 bp, Artificial sequence
  SiRNA target sequence
gattaattacagggatatacttgtac

SEQ ID NO: 105723 - DNA, 26 bp, Artificial sequence
  SiRNA target sequence
attaattacagggatatacttgtaca

SEQ ID NO: 105724 - DNA, 26 bp, Artificial sequence
  SiRNA target sequence
ttaattacagggatatacttgtacat

SEQ ID NO: 105725 - DNA, 26 bp, Artificial sequence
  SiRNA target sequence
taattacagggatatacttgtacata

SEQ ID NO: 105726 - DNA, 26 bp, Artificial sequence
  SiRNA target sequence
aattacagggatatacttgtacataa

SEQ ID NO: 105727 - DNA, 26 bp, Artificial sequence
  SiRNA target sequence
attacagggatatacttgtacataaa

SEQ ID NO: 105728 - DNA, 26 bp, Artificial sequence
  SiRNA target sequence
ttacagggatatacttgtacataaaa

SEQ ID NO: 105729 - DNA, 26 bp, Artificial sequence
  SiRNA target sequence
tacagggatatacttgtacataaaat

SEQ ID NO: 105730 - DNA, 26 bp, Artificial sequence
  SiRNA target sequence
acagggatatacttgtacataaaatt

SEQ ID NO: 105731 - DNA, 26 bp, Artificial sequence
  SiRNA target sequence
cagggatatacttgtacataaaattt

SEQ ID NO: 105732 - DNA, 26 bp, Artificial sequence
  SiRNA target sequence
agggatatacttgtacataaaatttg

SEQ ID NO: 105733 - DNA, 26 bp, Artificial sequence
  SiRNA target sequence
gggatatacttgtacataaaatttga

SEQ ID NO: 105734 - DNA, 26 bp, Artificial sequence
  SiRNA target sequence
ggatatacttgtacataaaatttgag

SEQ ID NO: 105735 - DNA, 26 bp, Artificial sequence
  SiRNA target sequence
gatatacttgtacataaaatttgagg

SEQ ID NO: 105736 - DNA, 26 bp, Artificial sequence
  SiRNA target sequence
atatacttgtacataaaatttgaggt

SEQ ID NO: 105737 - DNA, 26 bp, Artificial sequence
  SiRNA target sequence
tatacttgtacataaaatttgaggta

SEQ ID NO: 105738 - DNA, 26 bp, Artificial sequence
  SiRNA target sequence
atacttgtacataaaatttgaggtaa

SEQ ID NO: 105739 - DNA, 26 bp, Artificial sequence
  SiRNA target sequence
tacttgtacataaaatttgaggtaag

SEQ ID NO: 105740 - DNA, 26 bp, Artificial sequence
  SiRNA target sequence
acttgtacataaaatttgaggtaagt

SEQ ID NO: 105741 - DNA, 26 bp, Artificial sequence
  SiRNA target sequence
cttgtacataaaatttgaggtaagtt

SEQ ID NO: 105742 - DNA, 26 bp, Artificial sequence
  SiRNA target sequence
ttgtacataaaatttgaggtaagttt

SEQ ID NO: 105743 - DNA, 26 bp, Artificial sequence
  SiRNA target sequence
tgtacataaaatttgaggtaagtttt

SEQ ID NO: 105744 - DNA, 26 bp, Artificial sequence
  SiRNA target sequence
gtacataaaatttgaggtaagtttta

SEQ ID NO: 105745 - DNA, 26 bp, Artificial sequence
  SiRNA target sequence
tacataaaatttgaggtaagttttat

SEQ ID NO: 105746 - DNA, 26 bp, Artificial sequence
  SiRNA target sequence
acataaaatttgaggtaagttttatc

SEQ ID NO: 105747 - DNA, 26 bp, Artificial sequence
  SiRNA target sequence
cataaaatttgaggtaagttttatct

SEQ ID NO: 105748 - DNA, 26 bp, Artificial sequence
  SiRNA target sequence
ataaaatttgaggtaagttttatctt

SEQ ID NO: 105749 - DNA, 26 bp, Artificial sequence
  SiRNA target sequence
taaaatttgaggtaagttttatctta

SEQ ID NO: 105750 - DNA, 26 bp, Artificial sequence
  SiRNA target sequence
aaaatttgaggtaagttttatcttaa

SEQ ID NO: 105751 - DNA, 26 bp, Artificial sequence
  SiRNA target sequence
aaatttgaggtaagttttatcttaaa

SEQ ID NO: 105752 - DNA, 26 bp, Artificial sequence
  SiRNA target sequence
aatttgaggtaagttttatcttaaaa

SEQ ID NO: 105753 - DNA, 26 bp, Artificial sequence
  SiRNA target sequence
atttgaggtaagttttatcttaaaat

SEQ ID NO: 105754 - DNA, 26 bp, Artificial sequence
  SiRNA target sequence
tttgaggtaagttttatcttaaaatc

SEQ ID NO: 105755 - DNA, 26 bp, Artificial sequence
  SiRNA target sequence
ttgaggtaagttttatcttaaaatct

SEQ ID NO: 105756 - DNA, 26 bp, Artificial sequence
  SiRNA target sequence
tgaggtaagttttatcttaaaatctt

SEQ ID NO: 105757 - DNA, 26 bp, Artificial sequence
  SiRNA target sequence
gaggtaagttttatcttaaaatcttt

SEQ ID NO: 105758 - DNA, 26 bp, Artificial sequence
  SiRNA target sequence
aggtaagttttatcttaaaatctttt

SEQ ID NO: 105759 - DNA, 26 bp, Artificial sequence
  SiRNA target sequence
ggtaagttttatcttaaaatctttta

SEQ ID NO: 105760 - DNA, 26 bp, Artificial sequence
  SiRNA target sequence
gtaagttttatcttaaaatcttttag

SEQ ID NO: 105761 - DNA, 26 bp, Artificial sequence
  SiRNA target sequence
taagttttatcttaaaatcttttaga

SEQ ID NO: 105762 - DNA, 26 bp, Artificial sequence
  SiRNA target sequence
aagttttatcttaaaatcttttagaa

SEQ ID NO: 105763 - DNA, 26 bp, Artificial sequence
  SiRNA target sequence
agttttatcttaaaatcttttagaac

SEQ ID NO: 105764 - DNA, 26 bp, Artificial sequence
  SiRNA target sequence
gttttatcttaaaatcttttagaacc

SEQ ID NO: 105765 - DNA, 26 bp, Artificial sequence
  SiRNA target sequence
ttttatcttaaaatcttttagaacct

SEQ ID NO: 105766 - DNA, 26 bp, Artificial sequence
  SiRNA target sequence
tttatcttaaaatcttttagaacctc

SEQ ID NO: 105767 - DNA, 26 bp, Artificial sequence
  SiRNA target sequence
ttatcttaaaatcttttagaacctca

SEQ ID NO: 105768 - DNA, 26 bp, Artificial sequence
  SiRNA target sequence
tatcttaaaatcttttagaacctcaa

SEQ ID NO: 105769 - DNA, 26 bp, Artificial sequence
  SiRNA target sequence
atcttaaaatcttttagaacctcaaa

SEQ ID NO: 105770 - DNA, 26 bp, Artificial sequence
  SiRNA target sequence
tcttaaaatcttttagaacctcaaaa

SEQ ID NO: 105771 - DNA, 26 bp, Artificial sequence
  SiRNA target sequence
cttaaaatcttttagaacctcaaaaa

SEQ ID NO: 105772 - DNA, 26 bp, Artificial sequence
  SiRNA target sequence
ttaaaatcttttagaacctcaaaaat

SEQ ID NO: 105773 - DNA, 26 bp, Artificial sequence
  SiRNA target sequence
taaaatcttttagaacctcaaaaata

SEQ ID NO: 105774 - DNA, 26 bp, Artificial sequence
  SiRNA target sequence
aaaatcttttagaacctcaaaaatag

SEQ ID NO: 105775 - DNA, 26 bp, Artificial sequence
  SiRNA target sequence
aaatcttttagaacctcaaaaatagt

SEQ ID NO: 105776 - DNA, 26 bp, Artificial sequence
  SiRNA target sequence
aatcttttagaacctcaaaaatagtg

SEQ ID NO: 105777 - DNA, 26 bp, Artificial sequence
  SiRNA target sequence
atcttttagaacctcaaaaatagtgc

SEQ ID NO: 105778 - DNA, 26 bp, Artificial sequence
  SiRNA target sequence
tcttttagaacctcaaaaatagtgcg

SEQ ID NO: 105779 - DNA, 26 bp, Artificial sequence
  SiRNA target sequence
cttttagaacctcaaaaatagtgcgc

SEQ ID NO: 105780 - DNA, 26 bp, Artificial sequence
  SiRNA target sequence
ttttagaacctcaaaaatagtgcgct

SEQ ID NO: 105781 - DNA, 26 bp, Artificial sequence
  SiRNA target sequence
tttagaacctcaaaaatagtgcgctt

SEQ ID NO: 105782 - DNA, 26 bp, Artificial sequence
  SiRNA target sequence
ttagaacctcaaaaatagtgcgcttc

SEQ ID NO: 105783 - DNA, 26 bp, Artificial sequence
  SiRNA target sequence
tagaacctcaaaaatagtgcgcttcg

SEQ ID NO: 105784 - DNA, 26 bp, Artificial sequence
  SiRNA target sequence
agaacctcaaaaatagtgcgcttcgg

SEQ ID NO: 105785 - DNA, 26 bp, Artificial sequence
  SiRNA target sequence
gaacctcaaaaatagtgcgcttcggt

SEQ ID NO: 105786 - DNA, 26 bp, Artificial sequence
  SiRNA target sequence
aacctcaaaaatagtgcgcttcggta

SEQ ID NO: 105787 - DNA, 26 bp, Artificial sequence
  SiRNA target sequence
acctcaaaaatagtgcgcttcggtag

SEQ ID NO: 105788 - DNA, 26 bp, Artificial sequence
  SiRNA target sequence
cctcaaaaatagtgcgcttcggtagt

SEQ ID NO: 105789 - DNA, 26 bp, Artificial sequence
  SiRNA target sequence
ctcaaaaatagtgcgcttcggtagta

SEQ ID NO: 105790 - DNA, 26 bp, Artificial sequence
  SiRNA target sequence
tcaaaaatagtgcgcttcggtagtaa

SEQ ID NO: 105791 - DNA, 26 bp, Artificial sequence
  SiRNA target sequence
caaaaatagtgcgcttcggtagtaaa

SEQ ID NO: 105792 - DNA, 26 bp, Artificial sequence
  SiRNA target sequence
aaaaatagtgcgcttcggtagtaaaa

SEQ ID NO: 105793 - DNA, 26 bp, Artificial sequence
  SiRNA target sequence
aaaatagtgcgcttcggtagtaaaat

SEQ ID NO: 105794 - DNA, 26 bp, Artificial sequence
  SiRNA target sequence
aaatagtgcgcttcggtagtaaaatg

SEQ ID NO: 105795 - DNA, 26 bp, Artificial sequence
  SiRNA target sequence
aatagtgcgcttcggtagtaaaatgt

SEQ ID NO: 105796 - DNA, 26 bp, Artificial sequence
  SiRNA target sequence
atagtgcgcttcggtagtaaaatgta

SEQ ID NO: 105797 - DNA, 26 bp, Artificial sequence
  SiRNA target sequence
tagtgcgcttcggtagtaaaatgtaa

SEQ ID NO: 105798 - DNA, 26 bp, Artificial sequence
  SiRNA target sequence
agtgcgcttcggtagtaaaatgtaat

SEQ ID NO: 105799 - DNA, 26 bp, Artificial sequence
  SiRNA target sequence
gtgcgcttcggtagtaaaatgtaatc

SEQ ID NO: 105800 - DNA, 26 bp, Artificial sequence
  SiRNA target sequence
tgcgcttcggtagtaaaatgtaatca

SEQ ID NO: 105801 - DNA, 26 bp, Artificial sequence
  SiRNA target sequence
gcgcttcggtagtaaaatgtaatcat

SEQ ID NO: 105802 - DNA, 26 bp, Artificial sequence
  SiRNA target sequence
cgcttcggtagtaaaatgtaatcata

SEQ ID NO: 105803 - DNA, 26 bp, Artificial sequence
  SiRNA target sequence
gcttcggtagtaaaatgtaatcatag

SEQ ID NO: 105804 - DNA, 26 bp, Artificial sequence
  SiRNA target sequence
cttcggtagtaaaatgtaatcatagt

SEQ ID NO: 105805 - DNA, 26 bp, Artificial sequence
  SiRNA target sequence
ttcggtagtaaaatgtaatcatagta

SEQ ID NO: 105806 - DNA, 26 bp, Artificial sequence
  SiRNA target sequence
tcggtagtaaaatgtaatcatagtac

SEQ ID NO: 105807 - DNA, 26 bp, Artificial sequence
  SiRNA target sequence
cggtagtaaaatgtaatcatagtaca

SEQ ID NO: 105808 - DNA, 26 bp, Artificial sequence
  SiRNA target sequence
ggtagtaaaatgtaatcatagtacag

SEQ ID NO: 105809 - DNA, 26 bp, Artificial sequence
  SiRNA target sequence
gtagtaaaatgtaatcatagtacaga

SEQ ID NO: 105810 - DNA, 26 bp, Artificial sequence
  SiRNA target sequence
tagtaaaatgtaatcatagtacagat

SEQ ID NO: 105811 - DNA, 26 bp, Artificial sequence
  SiRNA target sequence
agtaaaatgtaatcatagtacagatc

SEQ ID NO: 105812 - DNA, 26 bp, Artificial sequence
  SiRNA target sequence
gtaaaatgtaatcatagtacagatcg

SEQ ID NO: 105813 - DNA, 26 bp, Artificial sequence
  SiRNA target sequence
taaaatgtaatcatagtacagatcgt

SEQ ID NO: 105814 - DNA, 26 bp, Artificial sequence
  SiRNA target sequence
aaaatgtaatcatagtacagatcgta

SEQ ID NO: 105815 - DNA, 26 bp, Artificial sequence
  SiRNA target sequence
aaatgtaatcatagtacagatcgtaa

SEQ ID NO: 105816 - DNA, 26 bp, Artificial sequence
  SiRNA target sequence
aatgtaatcatagtacagatcgtaat

SEQ ID NO: 105817 - DNA, 26 bp, Artificial sequence
  SiRNA target sequence
atgtaatcatagtacagatcgtaatt

SEQ ID NO: 105818 - DNA, 26 bp, Artificial sequence
  SiRNA target sequence
tgtaatcatagtacagatcgtaattt

SEQ ID NO: 105819 - DNA, 26 bp, Artificial sequence
  SiRNA target sequence
gtaatcatagtacagatcgtaattta

SEQ ID NO: 105820 - DNA, 26 bp, Artificial sequence
  SiRNA target sequence
taatcatagtacagatcgtaatttag

SEQ ID NO: 105821 - DNA, 26 bp, Artificial sequence
  SiRNA target sequence
aatcatagtacagatcgtaatttaga

SEQ ID NO: 105822 - DNA, 26 bp, Artificial sequence
  SiRNA target sequence
atcatagtacagatcgtaatttagat

SEQ ID NO: 105823 - DNA, 26 bp, Artificial sequence
  SiRNA target sequence
tcatagtacagatcgtaatttagata

SEQ ID NO: 105824 - DNA, 26 bp, Artificial sequence
  SiRNA target sequence
catagtacagatcgtaatttagataa

SEQ ID NO: 105825 - DNA, 26 bp, Artificial sequence
  SiRNA target sequence
atagtacagatcgtaatttagataaa

SEQ ID NO: 105826 - DNA, 26 bp, Artificial sequence
  SiRNA target sequence
tagtacagatcgtaatttagataaat

SEQ ID NO: 105827 - DNA, 26 bp, Artificial sequence
  SiRNA target sequence
agtacagatcgtaatttagataaatt

SEQ ID NO: 105828 - DNA, 26 bp, Artificial sequence
  SiRNA target sequence
gtacagatcgtaatttagataaattt

SEQ ID NO: 105829 - DNA, 26 bp, Artificial sequence
  SiRNA target sequence
tacagatcgtaatttagataaatttc

SEQ ID NO: 105830 - DNA, 26 bp, Artificial sequence
  SiRNA target sequence
acagatcgtaatttagataaatttct

SEQ ID NO: 105831 - DNA, 26 bp, Artificial sequence
  SiRNA target sequence
cagatcgtaatttagataaatttctt

SEQ ID NO: 105832 - DNA, 26 bp, Artificial sequence
  SiRNA target sequence
agatcgtaatttagataaatttcttt

SEQ ID NO: 105833 - DNA, 26 bp, Artificial sequence
  SiRNA target sequence
gatcgtaatttagataaatttcttta

SEQ ID NO: 105834 - DNA, 26 bp, Artificial sequence
  SiRNA target sequence
atcgtaatttagataaatttctttac

SEQ ID NO: 105835 - DNA, 26 bp, Artificial sequence
  SiRNA target sequence
tcgtaatttagataaatttctttaca

SEQ ID NO: 105836 - DNA, 26 bp, Artificial sequence
  SiRNA target sequence
cgtaatttagataaatttctttacat

SEQ ID NO: 105837 - DNA, 26 bp, Artificial sequence
  SiRNA target sequence
gtaatttagataaatttctttacatt

SEQ ID NO: 105838 - DNA, 26 bp, Artificial sequence
  SiRNA target sequence
taatttagataaatttctttacattt

SEQ ID NO: 105839 - DNA, 26 bp, Artificial sequence
  SiRNA target sequence
aatttagataaatttctttacatttc

SEQ ID NO: 105840 - DNA, 26 bp, Artificial sequence
  SiRNA target sequence
atttagataaatttctttacatttct

SEQ ID NO: 105841 - DNA, 26 bp, Artificial sequence
  SiRNA target sequence
tttagataaatttctttacatttctc

SEQ ID NO: 105842 - DNA, 26 bp, Artificial sequence
  SiRNA target sequence
ttagataaatttctttacatttctca

SEQ ID NO: 105843 - DNA, 26 bp, Artificial sequence
  SiRNA target sequence
tagataaatttctttacatttctcac

SEQ ID NO: 105844 - DNA, 26 bp, Artificial sequence
  SiRNA target sequence
agataaatttctttacatttctcacg

SEQ ID NO: 105845 - DNA, 26 bp, Artificial sequence
  SiRNA target sequence
gataaatttctttacatttctcacga

SEQ ID NO: 105846 - DNA, 26 bp, Artificial sequence
  SiRNA target sequence
ataaatttctttacatttctcacgat

SEQ ID NO: 105847 - DNA, 26 bp, Artificial sequence
  SiRNA target sequence
taaatttctttacatttctcacgata

SEQ ID NO: 105848 - DNA, 26 bp, Artificial sequence
  SiRNA target sequence
aaatttctttacatttctcacgatat

SEQ ID NO: 105849 - DNA, 26 bp, Artificial sequence
  SiRNA target sequence
aatttctttacatttctcacgatatt

SEQ ID NO: 105850 - DNA, 26 bp, Artificial sequence
  SiRNA target sequence
atttctttacatttctcacgatattc

SEQ ID NO: 105851 - DNA, 26 bp, Artificial sequence
  SiRNA target sequence
tttctttacatttctcacgatattcc

SEQ ID NO: 105852 - DNA, 26 bp, Artificial sequence
  SiRNA target sequence
ttctttacatttctcacgatattcct

SEQ ID NO: 105853 - DNA, 26 bp, Artificial sequence
  SiRNA target sequence
tctttacatttctcacgatattcctc

SEQ ID NO: 105854 - DNA, 26 bp, Artificial sequence
  SiRNA target sequence
ctttacatttctcacgatattcctca

SEQ ID NO: 105855 - DNA, 26 bp, Artificial sequence
  SiRNA target sequence
tttacatttctcacgatattcctcag

SEQ ID NO: 105856 - DNA, 26 bp, Artificial sequence
  SiRNA target sequence
ttacatttctcacgatattcctcagc

SEQ ID NO: 105857 - DNA, 26 bp, Artificial sequence
  SiRNA target sequence
tacatttctcacgatattcctcagca

SEQ ID NO: 105858 - DNA, 26 bp, Artificial sequence
  SiRNA target sequence
acatttctcacgatattcctcagcaa

SEQ ID NO: 105859 - DNA, 26 bp, Artificial sequence
  SiRNA target sequence
catttctcacgatattcctcagcaat

SEQ ID NO: 105860 - DNA, 26 bp, Artificial sequence
  SiRNA target sequence
atttctcacgatattcctcagcaatg

SEQ ID NO: 105861 - DNA, 26 bp, Artificial sequence
  SiRNA target sequence
tttctcacgatattcctcagcaatgg

SEQ ID NO: 105862 - DNA, 26 bp, Artificial sequence
  SiRNA target sequence
ttctcacgatattcctcagcaatggt

SEQ ID NO: 105863 - DNA, 26 bp, Artificial sequence
  SiRNA target sequence
tctcacgatattcctcagcaatggta

SEQ ID NO: 105864 - DNA, 26 bp, Artificial sequence
  SiRNA target sequence
ctcacgatattcctcagcaatggtat

SEQ ID NO: 105865 - DNA, 26 bp, Artificial sequence
  SiRNA target sequence
tcacgatattcctcagcaatggtatc

SEQ ID NO: 105866 - DNA, 26 bp, Artificial sequence
  SiRNA target sequence
cacgatattcctcagcaatggtatct

SEQ ID NO: 105867 - DNA, 26 bp, Artificial sequence
  SiRNA target sequence
acgatattcctcagcaatggtatctg

SEQ ID NO: 105868 - DNA, 26 bp, Artificial sequence
  SiRNA target sequence
cgatattcctcagcaatggtatctgt

SEQ ID NO: 105869 - DNA, 26 bp, Artificial sequence
  SiRNA target sequence
gatattcctcagcaatggtatctgtg

SEQ ID NO: 105870 - DNA, 26 bp, Artificial sequence
  SiRNA target sequence
atattcctcagcaatggtatctgtga

SEQ ID NO: 105871 - DNA, 26 bp, Artificial sequence
  SiRNA target sequence
tattcctcagcaatggtatctgtgat

SEQ ID NO: 105872 - DNA, 26 bp, Artificial sequence
  SiRNA target sequence
attcctcagcaatggtatctgtgata

SEQ ID NO: 105873 - DNA, 26 bp, Artificial sequence
  SiRNA target sequence
ttcctcagcaatggtatctgtgataa

SEQ ID NO: 105874 - DNA, 26 bp, Artificial sequence
  SiRNA target sequence
tcctcagcaatggtatctgtgataag

SEQ ID NO: 105875 - DNA, 26 bp, Artificial sequence
  SiRNA target sequence
cctcagcaatggtatctgtgataagc

SEQ ID NO: 105876 - DNA, 26 bp, Artificial sequence
  SiRNA target sequence
ctcagcaatggtatctgtgataagcg

SEQ ID NO: 105877 - DNA, 26 bp, Artificial sequence
  SiRNA target sequence
tcagcaatggtatctgtgataagcga

SEQ ID NO: 105878 - DNA, 26 bp, Artificial sequence
  SiRNA target sequence
cagcaatggtatctgtgataagcgaa

SEQ ID NO: 105879 - DNA, 26 bp, Artificial sequence
  SiRNA target sequence
agcaatggtatctgtgataagcgaaa

SEQ ID NO: 105880 - DNA, 26 bp, Artificial sequence
  SiRNA target sequence
gcaatggtatctgtgataagcgaaag

SEQ ID NO: 105881 - DNA, 26 bp, Artificial sequence
  SiRNA target sequence
caatggtatctgtgataagcgaaagt

SEQ ID NO: 105882 - DNA, 26 bp, Artificial sequence
  SiRNA target sequence
aatggtatctgtgataagcgaaagtt

SEQ ID NO: 105883 - DNA, 26 bp, Artificial sequence
  SiRNA target sequence
atggtatctgtgataagcgaaagttg

SEQ ID NO: 105884 - DNA, 26 bp, Artificial sequence
  SiRNA target sequence
tggtatctgtgataagcgaaagttgt

SEQ ID NO: 105885 - DNA, 26 bp, Artificial sequence
  SiRNA target sequence
ggtatctgtgataagcgaaagttgta

SEQ ID NO: 105886 - DNA, 26 bp, Artificial sequence
  SiRNA target sequence
gtatctgtgataagcgaaagttgtag

SEQ ID NO: 105887 - DNA, 26 bp, Artificial sequence
  SiRNA target sequence
tatctgtgataagcgaaagttgtaga

SEQ ID NO: 105888 - DNA, 26 bp, Artificial sequence
  SiRNA target sequence
atctgtgataagcgaaagttgtagaa

SEQ ID NO: 105889 - DNA, 26 bp, Artificial sequence
  SiRNA target sequence
tctgtgataagcgaaagttgtagaaa

SEQ ID NO: 105890 - DNA, 26 bp, Artificial sequence
  SiRNA target sequence
ctgtgataagcgaaagttgtagaaaa

SEQ ID NO: 105891 - DNA, 26 bp, Artificial sequence
  SiRNA target sequence
tgtgataagcgaaagttgtagaaaaa

SEQ ID NO: 105892 - DNA, 26 bp, Artificial sequence
  SiRNA target sequence
gtgataagcgaaagttgtagaaaaaa

SEQ ID NO: 105893 - DNA, 26 bp, Artificial sequence
  SiRNA target sequence
tgataagcgaaagttgtagaaaaaaa

SEQ ID NO: 105894 - DNA, 26 bp, Artificial sequence
  SiRNA target sequence
gataagcgaaagttgtagaaaaaaat

SEQ ID NO: 105895 - DNA, 26 bp, Artificial sequence
  SiRNA target sequence
ataagcgaaagttgtagaaaaaaata

SEQ ID NO: 105896 - DNA, 26 bp, Artificial sequence
  SiRNA target sequence
taagcgaaagttgtagaaaaaaatag

SEQ ID NO: 105897 - DNA, 26 bp, Artificial sequence
  SiRNA target sequence
aagcgaaagttgtagaaaaaaataga

SEQ ID NO: 105898 - DNA, 26 bp, Artificial sequence
  SiRNA target sequence
agcgaaagttgtagaaaaaaatagat

SEQ ID NO: 105899 - DNA, 26 bp, Artificial sequence
  SiRNA target sequence
gcgaaagttgtagaaaaaaatagatt

SEQ ID NO: 105900 - DNA, 26 bp, Artificial sequence
  SiRNA target sequence
cgaaagttgtagaaaaaaatagattt

SEQ ID NO: 105901 - DNA, 26 bp, Artificial sequence
  SiRNA target sequence
gaaagttgtagaaaaaaatagatttg

SEQ ID NO: 105902 - DNA, 26 bp, Artificial sequence
  SiRNA target sequence
aaagttgtagaaaaaaatagatttga

SEQ ID NO: 105903 - DNA, 26 bp, Artificial sequence
  SiRNA target sequence
aagttgtagaaaaaaatagatttgag

SEQ ID NO: 105904 - DNA, 26 bp, Artificial sequence
  SiRNA target sequence
agttgtagaaaaaaatagatttgagg

SEQ ID NO: 105905 - DNA, 26 bp, Artificial sequence
  SiRNA target sequence
gttgtagaaaaaaatagatttgagga

SEQ ID NO: 105906 - DNA, 26 bp, Artificial sequence
  SiRNA target sequence
ttgtagaaaaaaatagatttgaggaa

SEQ ID NO: 105907 - DNA, 26 bp, Artificial sequence
  SiRNA target sequence
tgtagaaaaaaatagatttgaggaat

SEQ ID NO: 105908 - DNA, 26 bp, Artificial sequence
  SiRNA target sequence
gtagaaaaaaatagatttgaggaata

SEQ ID NO: 105909 - DNA, 26 bp, Artificial sequence
  SiRNA target sequence
tagaaaaaaatagatttgaggaatag

SEQ ID NO: 105910 - DNA, 26 bp, Artificial sequence
  SiRNA target sequence
agaaaaaaatagatttgaggaataga

SEQ ID NO: 105911 - DNA, 26 bp, Artificial sequence
  SiRNA target sequence
gaaaaaaatagatttgaggaatagaa

SEQ ID NO: 105912 - DNA, 26 bp, Artificial sequence
  SiRNA target sequence
aaaaaaatagatttgaggaatagaat

SEQ ID NO: 105913 - DNA, 26 bp, Artificial sequence
  SiRNA target sequence
aaaaaatagatttgaggaatagaatt

SEQ ID NO: 105914 - DNA, 26 bp, Artificial sequence
  SiRNA target sequence
aaaaatagatttgaggaatagaatta

SEQ ID NO: 105915 - DNA, 26 bp, Artificial sequence
  SiRNA target sequence
aaaatagatttgaggaatagaattaa

SEQ ID NO: 105916 - DNA, 26 bp, Artificial sequence
  SiRNA target sequence
aaatagatttgaggaatagaattaaa

SEQ ID NO: 105917 - DNA, 26 bp, Artificial sequence
  SiRNA target sequence
aatagatttgaggaatagaattaaaa

SEQ ID NO: 105918 - DNA, 26 bp, Artificial sequence
  SiRNA target sequence
atagatttgaggaatagaattaaaat

SEQ ID NO: 105919 - DNA, 26 bp, Artificial sequence
  SiRNA target sequence
tagatttgaggaatagaattaaaatc

SEQ ID NO: 105920 - DNA, 26 bp, Artificial sequence
  SiRNA target sequence
agatttgaggaatagaattaaaatca

SEQ ID NO: 105921 - DNA, 26 bp, Artificial sequence
  SiRNA target sequence
gatttgaggaatagaattaaaatcac

SEQ ID NO: 105922 - DNA, 26 bp, Artificial sequence
  SiRNA target sequence
atttgaggaatagaattaaaatcaca

SEQ ID NO: 105923 - DNA, 26 bp, Artificial sequence
  SiRNA target sequence
tttgaggaatagaattaaaatcacaa

SEQ ID NO: 105924 - DNA, 26 bp, Artificial sequence
  SiRNA target sequence
ttgaggaatagaattaaaatcacaat

SEQ ID NO: 105925 - DNA, 26 bp, Artificial sequence
  SiRNA target sequence
tgaggaatagaattaaaatcacaata

SEQ ID NO: 105926 - DNA, 26 bp, Artificial sequence
  SiRNA target sequence
gaggaatagaattaaaatcacaatat

SEQ ID NO: 105927 - DNA, 26 bp, Artificial sequence
  SiRNA target sequence
aggaatagaattaaaatcacaatatt

SEQ ID NO: 105928 - DNA, 26 bp, Artificial sequence
  SiRNA target sequence
ggaatagaattaaaatcacaatattt

SEQ ID NO: 105929 - DNA, 26 bp, Artificial sequence
  SiRNA target sequence
gaatagaattaaaatcacaatatttt

SEQ ID NO: 105930 - DNA, 26 bp, Artificial sequence
  SiRNA target sequence
aatagaattaaaatcacaatattttt

SEQ ID NO: 105931 - DNA, 26 bp, Artificial sequence
  SiRNA target sequence
atagaattaaaatcacaatatttttt

SEQ ID NO: 105932 - DNA, 26 bp, Artificial sequence
  SiRNA target sequence
tagaattaaaatcacaatatttttta

SEQ ID NO: 105933 - DNA, 26 bp, Artificial sequence
  SiRNA target sequence
agaattaaaatcacaatattttttaa

SEQ ID NO: 105934 - DNA, 26 bp, Artificial sequence
  SiRNA target sequence
gaattaaaatcacaatattttttaat

SEQ ID NO: 105935 - DNA, 26 bp, Artificial sequence
  SiRNA target sequence
aattaaaatcacaatattttttaata

SEQ ID NO: 105936 - DNA, 26 bp, Artificial sequence
  SiRNA target sequence
attaaaatcacaatattttttaatat

SEQ ID NO: 105937 - DNA, 26 bp, Artificial sequence
  SiRNA target sequence
ttaaaatcacaatattttttaatata

SEQ ID NO: 105938 - DNA, 26 bp, Artificial sequence
  SiRNA target sequence
taaaatcacaatattttttaatatat

SEQ ID NO: 105939 - DNA, 26 bp, Artificial sequence
  SiRNA target sequence
aaaatcacaatattttttaatatatt

SEQ ID NO: 105940 - DNA, 26 bp, Artificial sequence
  SiRNA target sequence
aaatcacaatattttttaatatattt

SEQ ID NO: 105941 - DNA, 26 bp, Artificial sequence
  SiRNA target sequence
aatcacaatattttttaatatattta

SEQ ID NO: 105942 - DNA, 26 bp, Artificial sequence
  SiRNA target sequence
atcacaatattttttaatatatttaa

SEQ ID NO: 105943 - DNA, 26 bp, Artificial sequence
  SiRNA target sequence
tcacaatattttttaatatatttaac

SEQ ID NO: 105944 - DNA, 26 bp, Artificial sequence
  SiRNA target sequence
cacaatattttttaatatatttaacc

SEQ ID NO: 105945 - DNA, 26 bp, Artificial sequence
  SiRNA target sequence
acaatattttttaatatatttaacca

SEQ ID NO: 105946 - DNA, 26 bp, Artificial sequence
  SiRNA target sequence
caatattttttaatatatttaaccaa

SEQ ID NO: 105947 - DNA, 26 bp, Artificial sequence
  SiRNA target sequence
aatattttttaatatatttaaccaag

SEQ ID NO: 105948 - DNA, 26 bp, Artificial sequence
  SiRNA target sequence
atattttttaatatatttaaccaagg

SEQ ID NO: 105949 - DNA, 26 bp, Artificial sequence
  SiRNA target sequence
tattttttaatatatttaaccaaggt

SEQ ID NO: 105950 - DNA, 26 bp, Artificial sequence
  SiRNA target sequence
attttttaatatatttaaccaaggta

SEQ ID NO: 105951 - DNA, 26 bp, Artificial sequence
  SiRNA target sequence
ttttttaatatatttaaccaaggtat

SEQ ID NO: 105952 - DNA, 26 bp, Artificial sequence
  SiRNA target sequence
tttttaatatatttaaccaaggtatt

SEQ ID NO: 105953 - DNA, 26 bp, Artificial sequence
  SiRNA target sequence
ttttaatatatttaaccaaggtattg

SEQ ID NO: 105954 - DNA, 26 bp, Artificial sequence
  SiRNA target sequence
tttaatatatttaaccaaggtattgt

SEQ ID NO: 105955 - DNA, 26 bp, Artificial sequence
  SiRNA target sequence
ttaatatatttaaccaaggtattgtc

SEQ ID NO: 105956 - DNA, 26 bp, Artificial sequence
  SiRNA target sequence
taatatatttaaccaaggtattgtcc

SEQ ID NO: 105957 - DNA, 26 bp, Artificial sequence
  SiRNA target sequence
aatatatttaaccaaggtattgtcct

SEQ ID NO: 105958 - DNA, 26 bp, Artificial sequence
  SiRNA target sequence
atatatttaaccaaggtattgtcctt

SEQ ID NO: 105959 - DNA, 26 bp, Artificial sequence
  SiRNA target sequence
tatatttaaccaaggtattgtccttt

SEQ ID NO: 105960 - DNA, 26 bp, Artificial sequence
  SiRNA target sequence
atatttaaccaaggtattgtccttta

SEQ ID NO: 105961 - DNA, 26 bp, Artificial sequence
  SiRNA target sequence
tatttaaccaaggtattgtcctttat

SEQ ID NO: 105962 - DNA, 26 bp, Artificial sequence
  SiRNA target sequence
atttaaccaaggtattgtcctttatg

SEQ ID NO: 105963 - DNA, 26 bp, Artificial sequence
  SiRNA target sequence
tttaaccaaggtattgtcctttatgt

SEQ ID NO: 105964 - DNA, 26 bp, Artificial sequence
  SiRNA target sequence
ttaaccaaggtattgtcctttatgtt

SEQ ID NO: 105965 - DNA, 26 bp, Artificial sequence
  SiRNA target sequence
taaccaaggtattgtcctttatgtta

SEQ ID NO: 105966 - DNA, 26 bp, Artificial sequence
  SiRNA target sequence
aaccaaggtattgtcctttatgttat

SEQ ID NO: 105967 - DNA, 26 bp, Artificial sequence
  SiRNA target sequence
accaaggtattgtcctttatgttatt

SEQ ID NO: 105968 - DNA, 26 bp, Artificial sequence
  SiRNA target sequence
ccaaggtattgtcctttatgttatta

SEQ ID NO: 105969 - DNA, 26 bp, Artificial sequence
  SiRNA target sequence
caaggtattgtcctttatgttattat

SEQ ID NO: 105970 - DNA, 26 bp, Artificial sequence
  SiRNA target sequence
aaggtattgtcctttatgttattata

SEQ ID NO: 105971 - DNA, 26 bp, Artificial sequence
  SiRNA target sequence
aggtattgtcctttatgttattatat

SEQ ID NO: 105972 - DNA, 26 bp, Artificial sequence
  SiRNA target sequence
ggtattgtcctttatgttattatatc

SEQ ID NO: 105973 - DNA, 26 bp, Artificial sequence
  SiRNA target sequence
gtattgtcctttatgttattatatct

SEQ ID NO: 105974 - DNA, 26 bp, Artificial sequence
  SiRNA target sequence
tattgtcctttatgttattatatctt

SEQ ID NO: 105975 - DNA, 26 bp, Artificial sequence
  SiRNA target sequence
attgtcctttatgttattatatctta

SEQ ID NO: 105976 - DNA, 26 bp, Artificial sequence
  SiRNA target sequence
ttgtcctttatgttattatatcttac

SEQ ID NO: 105977 - DNA, 26 bp, Artificial sequence
  SiRNA target sequence
tgtcctttatgttattatatcttaca

SEQ ID NO: 105978 - DNA, 26 bp, Artificial sequence
  SiRNA target sequence
gtcctttatgttattatatcttacaa

SEQ ID NO: 105979 - DNA, 26 bp, Artificial sequence
  SiRNA target sequence
tcctttatgttattatatcttacaaa

SEQ ID NO: 105980 - DNA, 26 bp, Artificial sequence
  SiRNA target sequence
cctttatgttattatatcttacaaac

SEQ ID NO: 105981 - DNA, 26 bp, Artificial sequence
  SiRNA target sequence
ctttatgttattatatcttacaaact

SEQ ID NO: 105982 - DNA, 26 bp, Artificial sequence
  SiRNA target sequence
tttatgttattatatcttacaaactc

SEQ ID NO: 105983 - DNA, 26 bp, Artificial sequence
  SiRNA target sequence
ttatgttattatatcttacaaactcc

SEQ ID NO: 105984 - DNA, 26 bp, Artificial sequence
  SiRNA target sequence
tatgttattatatcttacaaactcct

SEQ ID NO: 105985 - DNA, 26 bp, Artificial sequence
  SiRNA target sequence
atgttattatatcttacaaactcctc

SEQ ID NO: 105986 - DNA, 26 bp, Artificial sequence
  SiRNA target sequence
tgttattatatcttacaaactcctcg

SEQ ID NO: 105987 - DNA, 26 bp, Artificial sequence
  SiRNA target sequence
gttattatatcttacaaactcctcgt

SEQ ID NO: 105988 - DNA, 26 bp, Artificial sequence
  SiRNA target sequence
ttattatatcttacaaactcctcgta

SEQ ID NO: 105989 - DNA, 26 bp, Artificial sequence
  SiRNA target sequence
tattatatcttacaaactcctcgtaa

SEQ ID NO: 105990 - DNA, 26 bp, Artificial sequence
  SiRNA target sequence
attatatcttacaaactcctcgtaat

SEQ ID NO: 105991 - DNA, 26 bp, Artificial sequence
  SiRNA target sequence
ttatatcttacaaactcctcgtaatt

SEQ ID NO: 105992 - DNA, 26 bp, Artificial sequence
  SiRNA target sequence
tatatcttacaaactcctcgtaatta

SEQ ID NO: 105993 - DNA, 26 bp, Artificial sequence
  SiRNA target sequence
atatcttacaaactcctcgtaattat

SEQ ID NO: 105994 - DNA, 26 bp, Artificial sequence
  SiRNA target sequence
tatcttacaaactcctcgtaattata

SEQ ID NO: 105995 - DNA, 26 bp, Artificial sequence
  SiRNA target sequence
atcttacaaactcctcgtaattataa

SEQ ID NO: 105996 - DNA, 26 bp, Artificial sequence
  SiRNA target sequence
tcttacaaactcctcgtaattataat

SEQ ID NO: 105997 - DNA, 26 bp, Artificial sequence
  SiRNA target sequence
cttacaaactcctcgtaattataatt

SEQ ID NO: 105998 - DNA, 26 bp, Artificial sequence
  SiRNA target sequence
ttacaaactcctcgtaattataattt

SEQ ID NO: 105999 - DNA, 26 bp, Artificial sequence
  SiRNA target sequence
tacaaactcctcgtaattataatttt

SEQ ID NO: 106000 - DNA, 26 bp, Artificial sequence
  SiRNA target sequence
acaaactcctcgtaattataattttc

SEQ ID NO: 106001 - DNA, 26 bp, Artificial sequence
  SiRNA target sequence
caaactcctcgtaattataattttca

SEQ ID NO: 106002 - DNA, 26 bp, Artificial sequence
  SiRNA target sequence
aaactcctcgtaattataattttcag

SEQ ID NO: 106003 - DNA, 26 bp, Artificial sequence
  SiRNA target sequence
aactcctcgtaattataattttcagg

SEQ ID NO: 106004 - DNA, 26 bp, Artificial sequence
  SiRNA target sequence
actcctcgtaattataattttcagga

SEQ ID NO: 106005 - DNA, 26 bp, Artificial sequence
  SiRNA target sequence
ctcctcgtaattataattttcaggat

SEQ ID NO: 106006 - DNA, 26 bp, Artificial sequence
  SiRNA target sequence
tcctcgtaattataattttcaggata

SEQ ID NO: 106007 - DNA, 26 bp, Artificial sequence
  SiRNA target sequence
cctcgtaattataattttcaggataa

SEQ ID NO: 106008 - DNA, 26 bp, Artificial sequence
  SiRNA target sequence
ctcgtaattataattttcaggataaa

SEQ ID NO: 106009 - DNA, 26 bp, Artificial sequence
  SiRNA target sequence
tcgtaattataattttcaggataaac

SEQ ID NO: 106010 - DNA, 26 bp, Artificial sequence
  SiRNA target sequence
cgtaattataattttcaggataaacc

SEQ ID NO: 106011 - DNA, 26 bp, Artificial sequence
  SiRNA target sequence
gtaattataattttcaggataaaccg

SEQ ID NO: 106012 - DNA, 26 bp, Artificial sequence
  SiRNA target sequence
taattataattttcaggataaaccgc

SEQ ID NO: 106013 - DNA, 26 bp, Artificial sequence
  SiRNA target sequence
aattataattttcaggataaaccgct

SEQ ID NO: 106014 - DNA, 26 bp, Artificial sequence
  SiRNA target sequence
attataattttcaggataaaccgcta

SEQ ID NO: 106015 - DNA, 26 bp, Artificial sequence
  SiRNA target sequence
ttataattttcaggataaaccgctag

SEQ ID NO: 106016 - DNA, 26 bp, Artificial sequence
  SiRNA target sequence
tataattttcaggataaaccgctaga

SEQ ID NO: 106017 - DNA, 26 bp, Artificial sequence
  SiRNA target sequence
ataattttcaggataaaccgctagac

SEQ ID NO: 106018 - DNA, 26 bp, Artificial sequence
  SiRNA target sequence
taattttcaggataaaccgctagaca

SEQ ID NO: 106019 - DNA, 26 bp, Artificial sequence
  SiRNA target sequence
aattttcaggataaaccgctagacaa

SEQ ID NO: 106020 - DNA, 26 bp, Artificial sequence
  SiRNA target sequence
attttcaggataaaccgctagacaat

SEQ ID NO: 106021 - DNA, 26 bp, Artificial sequence
  SiRNA target sequence
ttttcaggataaaccgctagacaatc

SEQ ID NO: 106022 - DNA, 26 bp, Artificial sequence
  SiRNA target sequence
tttcaggataaaccgctagacaatca

SEQ ID NO: 106023 - DNA, 26 bp, Artificial sequence
  SiRNA target sequence
ttcaggataaaccgctagacaatcac

SEQ ID NO: 106024 - DNA, 26 bp, Artificial sequence
  SiRNA target sequence
tcaggataaaccgctagacaatcacc

SEQ ID NO: 106025 - DNA, 26 bp, Artificial sequence
  SiRNA target sequence
caggataaaccgctagacaatcaccg

SEQ ID NO: 106026 - DNA, 26 bp, Artificial sequence
  SiRNA target sequence
aggataaaccgctagacaatcaccga

SEQ ID NO: 106027 - DNA, 26 bp, Artificial sequence
  SiRNA target sequence
ggataaaccgctagacaatcaccgat

SEQ ID NO: 106028 - DNA, 26 bp, Artificial sequence
  SiRNA target sequence
gataaaccgctagacaatcaccgatt

SEQ ID NO: 106029 - DNA, 26 bp, Artificial sequence
  SiRNA target sequence
ataaaccgctagacaatcaccgattt

SEQ ID NO: 106030 - DNA, 26 bp, Artificial sequence
  SiRNA target sequence
taaaccgctagacaatcaccgatttc

SEQ ID NO: 106031 - DNA, 26 bp, Artificial sequence
  SiRNA target sequence
aaaccgctagacaatcaccgatttca

SEQ ID NO: 106032 - DNA, 26 bp, Artificial sequence
  SiRNA target sequence
aaccgctagacaatcaccgatttcaa

SEQ ID NO: 106033 - DNA, 26 bp, Artificial sequence
  SiRNA target sequence
accgctagacaatcaccgatttcaaa

SEQ ID NO: 106034 - DNA, 26 bp, Artificial sequence
  SiRNA target sequence
ccgctagacaatcaccgatttcaaaa

SEQ ID NO: 106035 - DNA, 26 bp, Artificial sequence
  SiRNA target sequence
cgctagacaatcaccgatttcaaaat

SEQ ID NO: 106036 - DNA, 26 bp, Artificial sequence
  SiRNA target sequence
gctagacaatcaccgatttcaaaatt

SEQ ID NO: 106037 - DNA, 26 bp, Artificial sequence
  SiRNA target sequence
ctagacaatcaccgatttcaaaattt

SEQ ID NO: 106038 - DNA, 26 bp, Artificial sequence
  SiRNA target sequence
tagacaatcaccgatttcaaaatttt

SEQ ID NO: 106039 - DNA, 26 bp, Artificial sequence
  SiRNA target sequence
agacaatcaccgatttcaaaattttc

SEQ ID NO: 106040 - DNA, 26 bp, Artificial sequence
  SiRNA target sequence
gacaatcaccgatttcaaaattttct

SEQ ID NO: 106041 - DNA, 26 bp, Artificial sequence
  SiRNA target sequence
acaatcaccgatttcaaaattttcta

SEQ ID NO: 106042 - DNA, 26 bp, Artificial sequence
  SiRNA target sequence
caatcaccgatttcaaaattttctat

SEQ ID NO: 106043 - DNA, 26 bp, Artificial sequence
  SiRNA target sequence
aatcaccgatttcaaaattttctata

SEQ ID NO: 106044 - DNA, 26 bp, Artificial sequence
  SiRNA target sequence
atcaccgatttcaaaattttctatat

SEQ ID NO: 106045 - DNA, 26 bp, Artificial sequence
  SiRNA target sequence
tcaccgatttcaaaattttctatatc

SEQ ID NO: 106046 - DNA, 26 bp, Artificial sequence
  SiRNA target sequence
caccgatttcaaaattttctatatct

SEQ ID NO: 106047 - DNA, 26 bp, Artificial sequence
  SiRNA target sequence
accgatttcaaaattttctatatcta

SEQ ID NO: 106048 - DNA, 26 bp, Artificial sequence
  SiRNA target sequence
ccgatttcaaaattttctatatctat

SEQ ID NO: 106049 - DNA, 26 bp, Artificial sequence
  SiRNA target sequence
cgatttcaaaattttctatatctata

SEQ ID NO: 106050 - DNA, 26 bp, Artificial sequence
  SiRNA target sequence
gatttcaaaattttctatatctatat

SEQ ID NO: 106051 - DNA, 26 bp, Artificial sequence
  SiRNA target sequence
atttcaaaattttctatatctatatc

SEQ ID NO: 106052 - DNA, 26 bp, Artificial sequence
  SiRNA target sequence
tttcaaaattttctatatctatatca

SEQ ID NO: 106053 - DNA, 26 bp, Artificial sequence
  SiRNA target sequence
ttcaaaattttctatatctatatcaa

SEQ ID NO: 106054 - DNA, 26 bp, Artificial sequence
  SiRNA target sequence
tcaaaattttctatatctatatcaaa

SEQ ID NO: 106055 - DNA, 26 bp, Artificial sequence
  SiRNA target sequence
caaaattttctatatctatatcaaat

SEQ ID NO: 106056 - DNA, 26 bp, Artificial sequence
  SiRNA target sequence
aaaattttctatatctatatcaaatt

SEQ ID NO: 106057 - DNA, 26 bp, Artificial sequence
  SiRNA target sequence
aaattttctatatctatatcaaattt

SEQ ID NO: 106058 - DNA, 26 bp, Artificial sequence
  SiRNA target sequence
aattttctatatctatatcaaatttt

SEQ ID NO: 106059 - DNA, 26 bp, Artificial sequence
  SiRNA target sequence
attttctatatctatatcaaatttta

SEQ ID NO: 106060 - DNA, 26 bp, Artificial sequence
  SiRNA target sequence
ttttctatatctatatcaaattttat

SEQ ID NO: 106061 - DNA, 26 bp, Artificial sequence
  SiRNA target sequence
tttctatatctatatcaaattttatt

SEQ ID NO: 106062 - DNA, 26 bp, Artificial sequence
  SiRNA target sequence
ttctatatctatatcaaattttattt

SEQ ID NO: 106063 - DNA, 26 bp, Artificial sequence
  SiRNA target sequence
tctatatctatatcaaattttatttc

SEQ ID NO: 106064 - DNA, 26 bp, Artificial sequence
  SiRNA target sequence
ctatatctatatcaaattttatttct

SEQ ID NO: 106065 - DNA, 26 bp, Artificial sequence
  SiRNA target sequence
tatatctatatcaaattttatttcta

SEQ ID NO: 106066 - DNA, 26 bp, Artificial sequence
  SiRNA target sequence
atatctatatcaaattttatttctaa

SEQ ID NO: 106067 - DNA, 26 bp, Artificial sequence
  SiRNA target sequence
tatctatatcaaattttatttctaaa

SEQ ID NO: 106068 - DNA, 26 bp, Artificial sequence
  SiRNA target sequence
atctatatcaaattttatttctaaaa

SEQ ID NO: 106069 - DNA, 26 bp, Artificial sequence
  SiRNA target sequence
tctatatcaaattttatttctaaaat

SEQ ID NO: 106070 - DNA, 26 bp, Artificial sequence
  SiRNA target sequence
ctatatcaaattttatttctaaaata

SEQ ID NO: 106071 - DNA, 26 bp, Artificial sequence
  SiRNA target sequence
tatatcaaattttatttctaaaatag

SEQ ID NO: 106072 - DNA, 26 bp, Artificial sequence
  SiRNA target sequence
atatcaaattttatttctaaaatagg

SEQ ID NO: 106073 - DNA, 26 bp, Artificial sequence
  SiRNA target sequence
tatcaaattttatttctaaaatagga

SEQ ID NO: 106074 - DNA, 26 bp, Artificial sequence
  SiRNA target sequence
atcaaattttatttctaaaataggat

SEQ ID NO: 106075 - DNA, 26 bp, Artificial sequence
  SiRNA target sequence
tcaaattttatttctaaaataggata

SEQ ID NO: 106076 - DNA, 26 bp, Artificial sequence
  SiRNA target sequence
caaattttatttctaaaataggataa

SEQ ID NO: 106077 - DNA, 26 bp, Artificial sequence
  SiRNA target sequence
aaattttatttctaaaataggataaa

SEQ ID NO: 106078 - DNA, 26 bp, Artificial sequence
  SiRNA target sequence
aattttatttctaaaataggataaat

SEQ ID NO: 106079 - DNA, 26 bp, Artificial sequence
  SiRNA target sequence
attttatttctaaaataggataaatg

SEQ ID NO: 106080 - DNA, 26 bp, Artificial sequence
  SiRNA target sequence
ttttatttctaaaataggataaatgt

SEQ ID NO: 106081 - DNA, 26 bp, Artificial sequence
  SiRNA target sequence
tttatttctaaaataggataaatgta

SEQ ID NO: 106082 - DNA, 26 bp, Artificial sequence
  SiRNA target sequence
ttatttctaaaataggataaatgtaa

SEQ ID NO: 106083 - DNA, 26 bp, Artificial sequence
  SiRNA target sequence
tatttctaaaataggataaatgtaat

SEQ ID NO: 106084 - DNA, 26 bp, Artificial sequence
  SiRNA target sequence
atttctaaaataggataaatgtaatt

SEQ ID NO: 106085 - DNA, 26 bp, Artificial sequence
  SiRNA target sequence
tttctaaaataggataaatgtaattg

SEQ ID NO: 106086 - DNA, 26 bp, Artificial sequence
  SiRNA target sequence
ttctaaaataggataaatgtaattgt

SEQ ID NO: 106087 - DNA, 26 bp, Artificial sequence
  SiRNA target sequence
tctaaaataggataaatgtaattgta

SEQ ID NO: 106088 - DNA, 26 bp, Artificial sequence
  SiRNA target sequence
ctaaaataggataaatgtaattgtaa

SEQ ID NO: 106089 - DNA, 26 bp, Artificial sequence
  SiRNA target sequence
taaaataggataaatgtaattgtaag

SEQ ID NO: 106090 - DNA, 26 bp, Artificial sequence
  SiRNA target sequence
aaaataggataaatgtaattgtaagg

SEQ ID NO: 106091 - DNA, 26 bp, Artificial sequence
  SiRNA target sequence
aaataggataaatgtaattgtaaggt

SEQ ID NO: 106092 - DNA, 26 bp, Artificial sequence
  SiRNA target sequence
aataggataaatgtaattgtaaggtg

SEQ ID NO: 106093 - DNA, 26 bp, Artificial sequence
  SiRNA target sequence
ataggataaatgtaattgtaaggtgt

SEQ ID NO: 106094 - DNA, 26 bp, Artificial sequence
  SiRNA target sequence
taggataaatgtaattgtaaggtgtt

SEQ ID NO: 106095 - DNA, 26 bp, Artificial sequence
  SiRNA target sequence
aggataaatgtaattgtaaggtgtta

SEQ ID NO: 106096 - DNA, 26 bp, Artificial sequence
  SiRNA target sequence
ggataaatgtaattgtaaggtgttaa

SEQ ID NO: 106097 - DNA, 26 bp, Artificial sequence
  SiRNA target sequence
gataaatgtaattgtaaggtgttaat

SEQ ID NO: 106098 - DNA, 26 bp, Artificial sequence
  SiRNA target sequence
ataaatgtaattgtaaggtgttaata

SEQ ID NO: 106099 - DNA, 26 bp, Artificial sequence
  SiRNA target sequence
taaatgtaattgtaaggtgttaatat

SEQ ID NO: 106100 - DNA, 26 bp, Artificial sequence
  SiRNA target sequence
aaatgtaattgtaaggtgttaatatc

SEQ ID NO: 106101 - DNA, 26 bp, Artificial sequence
  SiRNA target sequence
aatgtaattgtaaggtgttaatatct

SEQ ID NO: 106102 - DNA, 26 bp, Artificial sequence
  SiRNA target sequence
atgtaattgtaaggtgttaatatctt

SEQ ID NO: 106103 - DNA, 26 bp, Artificial sequence
  SiRNA target sequence
tgtaattgtaaggtgttaatatctta

SEQ ID NO: 106104 - DNA, 26 bp, Artificial sequence
  SiRNA target sequence
gtaattgtaaggtgttaatatcttaa

SEQ ID NO: 106105 - DNA, 26 bp, Artificial sequence
  SiRNA target sequence
taattgtaaggtgttaatatcttaat

SEQ ID NO: 106106 - DNA, 26 bp, Artificial sequence
  SiRNA target sequence
aattgtaaggtgttaatatcttaata

SEQ ID NO: 106107 - DNA, 26 bp, Artificial sequence
  SiRNA target sequence
attgtaaggtgttaatatcttaatat

SEQ ID NO: 106108 - DNA, 26 bp, Artificial sequence
  SiRNA target sequence
ttgtaaggtgttaatatcttaatatc

SEQ ID NO: 106109 - DNA, 26 bp, Artificial sequence
  SiRNA target sequence
tgtaaggtgttaatatcttaatatca

SEQ ID NO: 106110 - DNA, 26 bp, Artificial sequence
  SiRNA target sequence
gtaaggtgttaatatcttaatatcat

SEQ ID NO: 106111 - DNA, 26 bp, Artificial sequence
  SiRNA target sequence
taaggtgttaatatcttaatatcatt

SEQ ID NO: 106112 - DNA, 26 bp, Artificial sequence
  SiRNA target sequence
aaggtgttaatatcttaatatcattt

SEQ ID NO: 106113 - DNA, 26 bp, Artificial sequence
  SiRNA target sequence
aggtgttaatatcttaatatcattta

SEQ ID NO: 106114 - DNA, 26 bp, Artificial sequence
  SiRNA target sequence
ggtgttaatatcttaatatcatttat

SEQ ID NO: 106115 - DNA, 26 bp, Artificial sequence
  SiRNA target sequence
gtgttaatatcttaatatcatttatt

SEQ ID NO: 106116 - DNA, 26 bp, Artificial sequence
  SiRNA target sequence
tgttaatatcttaatatcatttattg

SEQ ID NO: 106117 - DNA, 26 bp, Artificial sequence
  SiRNA target sequence
gttaatatcttaatatcatttattga

SEQ ID NO: 106118 - DNA, 26 bp, Artificial sequence
  SiRNA target sequence
ttaatatcttaatatcatttattgac

SEQ ID NO: 106119 - DNA, 26 bp, Artificial sequence
  SiRNA target sequence
taatatcttaatatcatttattgacg

SEQ ID NO: 106120 - DNA, 26 bp, Artificial sequence
  SiRNA target sequence
aatatcttaatatcatttattgacgc

SEQ ID NO: 106121 - DNA, 26 bp, Artificial sequence
  SiRNA target sequence
atatcttaatatcatttattgacgca

SEQ ID NO: 106122 - DNA, 26 bp, Artificial sequence
  SiRNA target sequence
tatcttaatatcatttattgacgcac

SEQ ID NO: 106123 - DNA, 26 bp, Artificial sequence
  SiRNA target sequence
atcttaatatcatttattgacgcact

SEQ ID NO: 106124 - DNA, 26 bp, Artificial sequence
  SiRNA target sequence
tcttaatatcatttattgacgcactg

SEQ ID NO: 106125 - DNA, 26 bp, Artificial sequence
  SiRNA target sequence
cttaatatcatttattgacgcactgt

SEQ ID NO: 106126 - DNA, 26 bp, Artificial sequence
  SiRNA target sequence
ttaatatcatttattgacgcactgta

SEQ ID NO: 106127 - DNA, 26 bp, Artificial sequence
  SiRNA target sequence
taatatcatttattgacgcactgtat

SEQ ID NO: 106128 - DNA, 26 bp, Artificial sequence
  SiRNA target sequence
aatatcatttattgacgcactgtata

SEQ ID NO: 106129 - DNA, 26 bp, Artificial sequence
  SiRNA target sequence
atatcatttattgacgcactgtataa

SEQ ID NO: 106130 - DNA, 26 bp, Artificial sequence
  SiRNA target sequence
tatcatttattgacgcactgtataaa

SEQ ID NO: 106131 - DNA, 26 bp, Artificial sequence
  SiRNA target sequence
atcatttattgacgcactgtataaat

SEQ ID NO: 106132 - DNA, 26 bp, Artificial sequence
  SiRNA target sequence
tcatttattgacgcactgtataaatc

SEQ ID NO: 106133 - DNA, 26 bp, Artificial sequence
  SiRNA target sequence
catttattgacgcactgtataaatca

SEQ ID NO: 106134 - DNA, 26 bp, Artificial sequence
  SiRNA target sequence
atttattgacgcactgtataaatcat

SEQ ID NO: 106135 - DNA, 26 bp, Artificial sequence
  SiRNA target sequence
tttattgacgcactgtataaatcatt

SEQ ID NO: 106136 - DNA, 26 bp, Artificial sequence
  SiRNA target sequence
ttattgacgcactgtataaatcattt

SEQ ID NO: 106137 - DNA, 26 bp, Artificial sequence
  SiRNA target sequence
tattgacgcactgtataaatcatttt

SEQ ID NO: 106138 - DNA, 26 bp, Artificial sequence
  SiRNA target sequence
attgacgcactgtataaatcattttt

SEQ ID NO: 106139 - DNA, 26 bp, Artificial sequence
  SiRNA target sequence
ttgacgcactgtataaatcattttta

SEQ ID NO: 106140 - DNA, 26 bp, Artificial sequence
  SiRNA target sequence
tgacgcactgtataaatcatttttac

SEQ ID NO: 106141 - DNA, 26 bp, Artificial sequence
  SiRNA target sequence
gacgcactgtataaatcatttttaca

SEQ ID NO: 106142 - DNA, 26 bp, Artificial sequence
  SiRNA target sequence
acgcactgtataaatcatttttacaa

SEQ ID NO: 106143 - DNA, 26 bp, Artificial sequence
  SiRNA target sequence
cgcactgtataaatcatttttacaac

SEQ ID NO: 106144 - DNA, 26 bp, Artificial sequence
  SiRNA target sequence
gcactgtataaatcatttttacaact

SEQ ID NO: 106145 - DNA, 26 bp, Artificial sequence
  SiRNA target sequence
cactgtataaatcatttttacaactt

SEQ ID NO: 106146 - DNA, 26 bp, Artificial sequence
  SiRNA target sequence
actgtataaatcatttttacaacttg

SEQ ID NO: 106147 - DNA, 26 bp, Artificial sequence
  SiRNA target sequence
ctgtataaatcatttttacaacttgc

SEQ ID NO: 106148 - DNA, 26 bp, Artificial sequence
  SiRNA target sequence
tgtataaatcatttttacaacttgca

SEQ ID NO: 106149 - DNA, 26 bp, Artificial sequence
  SiRNA target sequence
gtataaatcatttttacaacttgcaa

SEQ ID NO: 106150 - DNA, 26 bp, Artificial sequence
  SiRNA target sequence
tataaatcatttttacaacttgcaaa

SEQ ID NO: 106151 - DNA, 26 bp, Artificial sequence
  SiRNA target sequence
ataaatcatttttacaacttgcaaaa

SEQ ID NO: 106152 - DNA, 26 bp, Artificial sequence
  SiRNA target sequence
taaatcatttttacaacttgcaaaat

SEQ ID NO: 106153 - DNA, 26 bp, Artificial sequence
  SiRNA target sequence
aaatcatttttacaacttgcaaaatt

SEQ ID NO: 106154 - DNA, 26 bp, Artificial sequence
  SiRNA target sequence
aatcatttttacaacttgcaaaattt

SEQ ID NO: 106155 - DNA, 26 bp, Artificial sequence
  SiRNA target sequence
atcatttttacaacttgcaaaatttt

SEQ ID NO: 106156 - DNA, 26 bp, Artificial sequence
  SiRNA target sequence
tcatttttacaacttgcaaaattttt

SEQ ID NO: 106157 - DNA, 26 bp, Artificial sequence
  SiRNA target sequence
catttttacaacttgcaaaattttta

SEQ ID NO: 106158 - DNA, 26 bp, Artificial sequence
  SiRNA target sequence
atttttacaacttgcaaaatttttag

SEQ ID NO: 106159 - DNA, 26 bp, Artificial sequence
  SiRNA target sequence
tttttacaacttgcaaaatttttagc

SEQ ID NO: 106160 - DNA, 26 bp, Artificial sequence
  SiRNA target sequence
ttttacaacttgcaaaatttttagca

SEQ ID NO: 106161 - DNA, 26 bp, Artificial sequence
  SiRNA target sequence
tttacaacttgcaaaatttttagcat

SEQ ID NO: 106162 - DNA, 26 bp, Artificial sequence
  SiRNA target sequence
ttacaacttgcaaaatttttagcatt

SEQ ID NO: 106163 - DNA, 26 bp, Artificial sequence
  SiRNA target sequence
tacaacttgcaaaatttttagcattt

SEQ ID NO: 106164 - DNA, 26 bp, Artificial sequence
  SiRNA target sequence
acaacttgcaaaatttttagcatttt

SEQ ID NO: 106165 - DNA, 26 bp, Artificial sequence
  SiRNA target sequence
caacttgcaaaatttttagcattttg

SEQ ID NO: 106166 - DNA, 26 bp, Artificial sequence
  SiRNA target sequence
aacttgcaaaatttttagcattttgt

SEQ ID NO: 106167 - DNA, 26 bp, Artificial sequence
  SiRNA target sequence
acttgcaaaatttttagcattttgta

SEQ ID NO: 106168 - DNA, 26 bp, Artificial sequence
  SiRNA target sequence
cttgcaaaatttttagcattttgtag

SEQ ID NO: 106169 - DNA, 26 bp, Artificial sequence
  SiRNA target sequence
ttgcaaaatttttagcattttgtagt

SEQ ID NO: 106170 - DNA, 26 bp, Artificial sequence
  SiRNA target sequence
tgcaaaatttttagcattttgtagtt

SEQ ID NO: 106171 - DNA, 26 bp, Artificial sequence
  SiRNA target sequence
gcaaaatttttagcattttgtagttt

SEQ ID NO: 106172 - DNA, 26 bp, Artificial sequence
  SiRNA target sequence
caaaatttttagcattttgtagtttg

SEQ ID NO: 106173 - DNA, 26 bp, Artificial sequence
  SiRNA target sequence
aaaatttttagcattttgtagtttgt

SEQ ID NO: 106174 - DNA, 26 bp, Artificial sequence
  SiRNA target sequence
aaatttttagcattttgtagtttgta

SEQ ID NO: 106175 - DNA, 26 bp, Artificial sequence
  SiRNA target sequence
aatttttagcattttgtagtttgtaa

SEQ ID NO: 106176 - DNA, 26 bp, Artificial sequence
  SiRNA target sequence
atttttagcattttgtagtttgtaat

SEQ ID NO: 106177 - DNA, 26 bp, Artificial sequence
  SiRNA target sequence
tttttagcattttgtagtttgtaatg

SEQ ID NO: 106178 - DNA, 26 bp, Artificial sequence
  SiRNA target sequence
ttttagcattttgtagtttgtaatgc

SEQ ID NO: 106179 - DNA, 26 bp, Artificial sequence
  SiRNA target sequence
tttagcattttgtagtttgtaatgcg

SEQ ID NO: 106180 - DNA, 26 bp, Artificial sequence
  SiRNA target sequence
ttagcattttgtagtttgtaatgcgg

SEQ ID NO: 106181 - DNA, 26 bp, Artificial sequence
  SiRNA target sequence
tagcattttgtagtttgtaatgcggt

SEQ ID NO: 106182 - DNA, 26 bp, Artificial sequence
  SiRNA target sequence
agcattttgtagtttgtaatgcggta

SEQ ID NO: 106183 - DNA, 26 bp, Artificial sequence
  SiRNA target sequence
gcattttgtagtttgtaatgcggtaa

SEQ ID NO: 106184 - DNA, 26 bp, Artificial sequence
  SiRNA target sequence
cattttgtagtttgtaatgcggtaat

SEQ ID NO: 106185 - DNA, 26 bp, Artificial sequence
  SiRNA target sequence
attttgtagtttgtaatgcggtaata

SEQ ID NO: 106186 - DNA, 26 bp, Artificial sequence
  SiRNA target sequence
ttttgtagtttgtaatgcggtaatat

SEQ ID NO: 106187 - DNA, 26 bp, Artificial sequence
  SiRNA target sequence
tttgtagtttgtaatgcggtaatata

SEQ ID NO: 106188 - DNA, 26 bp, Artificial sequence
  SiRNA target sequence
ttgtagtttgtaatgcggtaatatat

SEQ ID NO: 106189 - DNA, 26 bp, Artificial sequence
  SiRNA target sequence
tgtagtttgtaatgcggtaatatata

SEQ ID NO: 106190 - DNA, 26 bp, Artificial sequence
  SiRNA target sequence
gtagtttgtaatgcggtaatatataa

SEQ ID NO: 106191 - DNA, 26 bp, Artificial sequence
  SiRNA target sequence
tagtttgtaatgcggtaatatataat

SEQ ID NO: 106192 - DNA, 26 bp, Artificial sequence
  SiRNA target sequence
agtttgtaatgcggtaatatataata

SEQ ID NO: 106193 - DNA, 26 bp, Artificial sequence
  SiRNA target sequence
gtttgtaatgcggtaatatataatat

SEQ ID NO: 106194 - DNA, 26 bp, Artificial sequence
  SiRNA target sequence
tttgtaatgcggtaatatataatata

SEQ ID NO: 106195 - DNA, 26 bp, Artificial sequence
  SiRNA target sequence
ttgtaatgcggtaatatataatatag

SEQ ID NO: 106196 - DNA, 26 bp, Artificial sequence
  SiRNA target sequence
tgtaatgcggtaatatataatataga

SEQ ID NO: 106197 - DNA, 26 bp, Artificial sequence
  SiRNA target sequence
gtaatgcggtaatatataatatagat

SEQ ID NO: 106198 - DNA, 26 bp, Artificial sequence
  SiRNA target sequence
taatgcggtaatatataatatagatc

SEQ ID NO: 106199 - DNA, 26 bp, Artificial sequence
  SiRNA target sequence
aatgcggtaatatataatatagatct

SEQ ID NO: 106200 - DNA, 26 bp, Artificial sequence
  SiRNA target sequence
atgcggtaatatataatatagatctt

SEQ ID NO: 106201 - DNA, 26 bp, Artificial sequence
  SiRNA target sequence
tgcggtaatatataatatagatcttt

SEQ ID NO: 106202 - DNA, 26 bp, Artificial sequence
  SiRNA target sequence
gcggtaatatataatatagatctttt

SEQ ID NO: 106203 - DNA, 26 bp, Artificial sequence
  SiRNA target sequence
cggtaatatataatatagatctttta

SEQ ID NO: 106204 - DNA, 26 bp, Artificial sequence
  SiRNA target sequence
ggtaatatataatatagatcttttat

SEQ ID NO: 106205 - DNA, 26 bp, Artificial sequence
  SiRNA target sequence
gtaatatataatatagatcttttatc

SEQ ID NO: 106206 - DNA, 26 bp, Artificial sequence
  SiRNA target sequence
taatatataatatagatcttttatcc

SEQ ID NO: 106207 - DNA, 26 bp, Artificial sequence
  SiRNA target sequence
aatatataatatagatcttttatcca

SEQ ID NO: 106208 - DNA, 26 bp, Artificial sequence
  SiRNA target sequence
atatataatatagatcttttatccat

SEQ ID NO: 106209 - DNA, 26 bp, Artificial sequence
  SiRNA target sequence
tatataatatagatcttttatccatg

SEQ ID NO: 106210 - DNA, 26 bp, Artificial sequence
  SiRNA target sequence
atataatatagatcttttatccatgt

SEQ ID NO: 106211 - DNA, 26 bp, Artificial sequence
  SiRNA target sequence
tataatatagatcttttatccatgtc

SEQ ID NO: 106212 - DNA, 26 bp, Artificial sequence
  SiRNA target sequence
ataatatagatcttttatccatgtct

SEQ ID NO: 106213 - DNA, 26 bp, Artificial sequence
  SiRNA target sequence
taatatagatcttttatccatgtctt

SEQ ID NO: 106214 - DNA, 26 bp, Artificial sequence
  SiRNA target sequence
aatatagatcttttatccatgtctta

SEQ ID NO: 106215 - DNA, 26 bp, Artificial sequence
  SiRNA target sequence
atatagatcttttatccatgtcttaa

SEQ ID NO: 106216 - DNA, 26 bp, Artificial sequence
  SiRNA target sequence
tatagatcttttatccatgtcttaaa

SEQ ID NO: 106217 - DNA, 26 bp, Artificial sequence
  SiRNA target sequence
atagatcttttatccatgtcttaaat

SEQ ID NO: 106218 - DNA, 26 bp, Artificial sequence
  SiRNA target sequence
tagatcttttatccatgtcttaaatt

SEQ ID NO: 106219 - DNA, 26 bp, Artificial sequence
  SiRNA target sequence
agatcttttatccatgtcttaaattc

SEQ ID NO: 106220 - DNA, 26 bp, Artificial sequence
  SiRNA target sequence
gatcttttatccatgtcttaaattcg

SEQ ID NO: 106221 - DNA, 26 bp, Artificial sequence
  SiRNA target sequence
atcttttatccatgtcttaaattcgc

SEQ ID NO: 106222 - DNA, 26 bp, Artificial sequence
  SiRNA target sequence
tcttttatccatgtcttaaattcgcc

SEQ ID NO: 106223 - DNA, 26 bp, Artificial sequence
  SiRNA target sequence
cttttatccatgtcttaaattcgccc

SEQ ID NO: 106224 - DNA, 26 bp, Artificial sequence
  SiRNA target sequence
ttttatccatgtcttaaattcgccca

SEQ ID NO: 106225 - DNA, 26 bp, Artificial sequence
  SiRNA target sequence
tttatccatgtcttaaattcgcccat

SEQ ID NO: 106226 - DNA, 26 bp, Artificial sequence
  SiRNA target sequence
ttatccatgtcttaaattcgcccata

SEQ ID NO: 106227 - DNA, 26 bp, Artificial sequence
  SiRNA target sequence
tatccatgtcttaaattcgcccataa

SEQ ID NO: 106228 - DNA, 26 bp, Artificial sequence
  SiRNA target sequence
atccatgtcttaaattcgcccataaa

SEQ ID NO: 106229 - DNA, 26 bp, Artificial sequence
  SiRNA target sequence
tccatgtcttaaattcgcccataaat

SEQ ID NO: 106230 - DNA, 26 bp, Artificial sequence
  SiRNA target sequence
ccatgtcttaaattcgcccataaatc

SEQ ID NO: 106231 - DNA, 26 bp, Artificial sequence
  SiRNA target sequence
catgtcttaaattcgcccataaatcc

SEQ ID NO: 106232 - DNA, 26 bp, Artificial sequence
  SiRNA target sequence
atgtcttaaattcgcccataaatcct

SEQ ID NO: 106233 - DNA, 26 bp, Artificial sequence
  SiRNA target sequence
tgtcttaaattcgcccataaatcctt

SEQ ID NO: 106234 - DNA, 26 bp, Artificial sequence
  SiRNA target sequence
gtcttaaattcgcccataaatccttc

SEQ ID NO: 106235 - DNA, 26 bp, Artificial sequence
  SiRNA target sequence
tcttaaattcgcccataaatccttct

SEQ ID NO: 106236 - DNA, 26 bp, Artificial sequence
  SiRNA target sequence
cttaaattcgcccataaatccttctt

SEQ ID NO: 106237 - DNA, 26 bp, Artificial sequence
  SiRNA target sequence
ttaaattcgcccataaatccttcttt

SEQ ID NO: 106238 - DNA, 26 bp, Artificial sequence
  SiRNA target sequence
taaattcgcccataaatccttctttg

SEQ ID NO: 106239 - DNA, 26 bp, Artificial sequence
  SiRNA target sequence
aaattcgcccataaatccttctttgt

SEQ ID NO: 106240 - DNA, 26 bp, Artificial sequence
  SiRNA target sequence
aattcgcccataaatccttctttgtc

SEQ ID NO: 106241 - DNA, 26 bp, Artificial sequence
  SiRNA target sequence
attcgcccataaatccttctttgtct

SEQ ID NO: 106242 - DNA, 26 bp, Artificial sequence
  SiRNA target sequence
ttcgcccataaatccttctttgtctt

SEQ ID NO: 106243 - DNA, 26 bp, Artificial sequence
  SiRNA target sequence
tcgcccataaatccttctttgtcttg

SEQ ID NO: 106244 - DNA, 26 bp, Artificial sequence
  SiRNA target sequence
cgcccataaatccttctttgtcttgg

SEQ ID NO: 106245 - DNA, 26 bp, Artificial sequence
  SiRNA target sequence
gcccataaatccttctttgtcttggc

SEQ ID NO: 106246 - DNA, 26 bp, Artificial sequence
  SiRNA target sequence
cccataaatccttctttgtcttggct

SEQ ID NO: 106247 - DNA, 26 bp, Artificial sequence
  SiRNA target sequence
ccataaatccttctttgtcttggcta

SEQ ID NO: 106248 - DNA, 26 bp, Artificial sequence
  SiRNA target sequence
cataaatccttctttgtcttggctat

SEQ ID NO: 106249 - DNA, 26 bp, Artificial sequence
  SiRNA target sequence
ataaatccttctttgtcttggctatc

SEQ ID NO: 106250 - DNA, 26 bp, Artificial sequence
  SiRNA target sequence
taaatccttctttgtcttggctatct

SEQ ID NO: 106251 - DNA, 26 bp, Artificial sequence
  SiRNA target sequence
aaatccttctttgtcttggctatctc

SEQ ID NO: 106252 - DNA, 26 bp, Artificial sequence
  SiRNA target sequence
aatccttctttgtcttggctatctcc

SEQ ID NO: 106253 - DNA, 26 bp, Artificial sequence
  SiRNA target sequence
atccttctttgtcttggctatctcca

SEQ ID NO: 106254 - DNA, 26 bp, Artificial sequence
  SiRNA target sequence
tccttctttgtcttggctatctccat

SEQ ID NO: 106255 - DNA, 26 bp, Artificial sequence
  SiRNA target sequence
ccttctttgtcttggctatctccatt

SEQ ID NO: 106256 - DNA, 26 bp, Artificial sequence
  SiRNA target sequence
cttctttgtcttggctatctccatta

SEQ ID NO: 106257 - DNA, 26 bp, Artificial sequence
  SiRNA target sequence
ttctttgtcttggctatctccattac

SEQ ID NO: 106258 - DNA, 26 bp, Artificial sequence
  SiRNA target sequence
tctttgtcttggctatctccattacc

SEQ ID NO: 106259 - DNA, 26 bp, Artificial sequence
  SiRNA target sequence
ctttgtcttggctatctccattaccc

SEQ ID NO: 106260 - DNA, 26 bp, Artificial sequence
  SiRNA target sequence
tttgtcttggctatctccattaccct

SEQ ID NO: 106261 - DNA, 26 bp, Artificial sequence
  SiRNA target sequence
ttgtcttggctatctccattaccctt

SEQ ID NO: 106262 - DNA, 26 bp, Artificial sequence
  SiRNA target sequence
tgtcttggctatctccattacccttt

SEQ ID NO: 106263 - DNA, 26 bp, Artificial sequence
  SiRNA target sequence
gtcttggctatctccattaccctttc

SEQ ID NO: 106264 - DNA, 26 bp, Artificial sequence
  SiRNA target sequence
tcttggctatctccattaccctttct

SEQ ID NO: 106265 - DNA, 26 bp, Artificial sequence
  SiRNA target sequence
cttggctatctccattaccctttctt

SEQ ID NO: 106266 - DNA, 26 bp, Artificial sequence
  SiRNA target sequence
ttggctatctccattaccctttctta

SEQ ID NO: 106267 - DNA, 26 bp, Artificial sequence
  SiRNA target sequence
tggctatctccattaccctttcttat

SEQ ID NO: 106268 - DNA, 26 bp, Artificial sequence
  SiRNA target sequence
ggctatctccattaccctttcttatc

SEQ ID NO: 106269 - DNA, 26 bp, Artificial sequence
  SiRNA target sequence
gctatctccattaccctttcttatca

SEQ ID NO: 106270 - DNA, 26 bp, Artificial sequence
  SiRNA target sequence
ctatctccattaccctttcttatcag

SEQ ID NO: 106271 - DNA, 26 bp, Artificial sequence
  SiRNA target sequence
tatctccattaccctttcttatcaga

SEQ ID NO: 106272 - DNA, 26 bp, Artificial sequence
  SiRNA target sequence
atctccattaccctttcttatcagag

SEQ ID NO: 106273 - DNA, 26 bp, Artificial sequence
  SiRNA target sequence
tctccattaccctttcttatcagagg

SEQ ID NO: 106274 - DNA, 26 bp, Artificial sequence
  SiRNA target sequence
ctccattaccctttcttatcagaggt

SEQ ID NO: 106275 - DNA, 26 bp, Artificial sequence
  SiRNA target sequence
tccattaccctttcttatcagaggtt

SEQ ID NO: 106276 - DNA, 26 bp, Artificial sequence
  SiRNA target sequence
ccattaccctttcttatcagaggttt

SEQ ID NO: 106277 - DNA, 26 bp, Artificial sequence
  SiRNA target sequence
cattaccctttcttatcagaggttta

SEQ ID NO: 106278 - DNA, 26 bp, Artificial sequence
  SiRNA target sequence
attaccctttcttatcagaggtttag

SEQ ID NO: 106279 - DNA, 26 bp, Artificial sequence
  SiRNA target sequence
ttaccctttcttatcagaggtttagc

SEQ ID NO: 106280 - DNA, 26 bp, Artificial sequence
  SiRNA target sequence
taccctttcttatcagaggtttagct

SEQ ID NO: 106281 - DNA, 26 bp, Artificial sequence
  SiRNA target sequence
accctttcttatcagaggtttagctc

SEQ ID NO: 106282 - DNA, 26 bp, Artificial sequence
  SiRNA target sequence
ccctttcttatcagaggtttagctcc

SEQ ID NO: 106283 - DNA, 26 bp, Artificial sequence
  SiRNA target sequence
cctttcttatcagaggtttagctccg

SEQ ID NO: 106284 - DNA, 26 bp, Artificial sequence
  SiRNA target sequence
ctttcttatcagaggtttagctccgt

SEQ ID NO: 106285 - DNA, 26 bp, Artificial sequence
  SiRNA target sequence
tttcttatcagaggtttagctccgtg

SEQ ID NO: 106286 - DNA, 26 bp, Artificial sequence
  SiRNA target sequence
ttcttatcagaggtttagctccgtgt

SEQ ID NO: 106287 - DNA, 26 bp, Artificial sequence
  SiRNA target sequence
tcttatcagaggtttagctccgtgtt

SEQ ID NO: 106288 - DNA, 26 bp, Artificial sequence
  SiRNA target sequence
cttatcagaggtttagctccgtgttt

SEQ ID NO: 106289 - DNA, 26 bp, Artificial sequence
  SiRNA target sequence
ttatcagaggtttagctccgtgtttt

SEQ ID NO: 106290 - DNA, 26 bp, Artificial sequence
  SiRNA target sequence
tatcagaggtttagctccgtgtttta

SEQ ID NO: 106291 - DNA, 26 bp, Artificial sequence
  SiRNA target sequence
atcagaggtttagctccgtgttttaa

SEQ ID NO: 106292 - DNA, 26 bp, Artificial sequence
  SiRNA target sequence
tcagaggtttagctccgtgttttaaa

SEQ ID NO: 106293 - DNA, 26 bp, Artificial sequence
  SiRNA target sequence
cagaggtttagctccgtgttttaaaa

SEQ ID NO: 106294 - DNA, 26 bp, Artificial sequence
  SiRNA target sequence
agaggtttagctccgtgttttaaaag

SEQ ID NO: 106295 - DNA, 26 bp, Artificial sequence
  SiRNA target sequence
gaggtttagctccgtgttttaaaagg

SEQ ID NO: 106296 - DNA, 26 bp, Artificial sequence
  SiRNA target sequence
aggtttagctccgtgttttaaaaggc

SEQ ID NO: 106297 - DNA, 26 bp, Artificial sequence
  SiRNA target sequence
ggtttagctccgtgttttaaaaggca

SEQ ID NO: 106298 - DNA, 26 bp, Artificial sequence
  SiRNA target sequence
gtttagctccgtgttttaaaaggcaa

SEQ ID NO: 106299 - DNA, 26 bp, Artificial sequence
  SiRNA target sequence
tttagctccgtgttttaaaaggcaat

SEQ ID NO: 106300 - DNA, 26 bp, Artificial sequence
  SiRNA target sequence
ttagctccgtgttttaaaaggcaatt

SEQ ID NO: 106301 - DNA, 26 bp, Artificial sequence
  SiRNA target sequence
tagctccgtgttttaaaaggcaatta

SEQ ID NO: 106302 - DNA, 26 bp, Artificial sequence
  SiRNA target sequence
agctccgtgttttaaaaggcaattat

SEQ ID NO: 106303 - DNA, 26 bp, Artificial sequence
  SiRNA target sequence
gctccgtgttttaaaaggcaattata

SEQ ID NO: 106304 - DNA, 26 bp, Artificial sequence
  SiRNA target sequence
ctccgtgttttaaaaggcaattatac

SEQ ID NO: 106305 - DNA, 26 bp, Artificial sequence
  SiRNA target sequence
tccgtgttttaaaaggcaattataca

SEQ ID NO: 106306 - DNA, 26 bp, Artificial sequence
  SiRNA target sequence
ccgtgttttaaaaggcaattatacaa

SEQ ID NO: 106307 - DNA, 26 bp, Artificial sequence
  SiRNA target sequence
cgtgttttaaaaggcaattatacaac

SEQ ID NO: 106308 - DNA, 26 bp, Artificial sequence
  SiRNA target sequence
gtgttttaaaaggcaattatacaact

SEQ ID NO: 106309 - DNA, 26 bp, Artificial sequence
  SiRNA target sequence
tgttttaaaaggcaattatacaactt

SEQ ID NO: 106310 - DNA, 26 bp, Artificial sequence
  SiRNA target sequence
gttttaaaaggcaattatacaacttt

SEQ ID NO: 106311 - DNA, 26 bp, Artificial sequence
  SiRNA target sequence
ttttaaaaggcaattatacaactttt

SEQ ID NO: 106312 - DNA, 26 bp, Artificial sequence
  SiRNA target sequence
tttaaaaggcaattatacaacttttt

SEQ ID NO: 106313 - DNA, 26 bp, Artificial sequence
  SiRNA target sequence
ttaaaaggcaattatacaacttttta

SEQ ID NO: 106314 - DNA, 26 bp, Artificial sequence
  SiRNA target sequence
taaaaggcaattatacaactttttag

SEQ ID NO: 106315 - DNA, 26 bp, Artificial sequence
  SiRNA target sequence
aaaaggcaattatacaactttttaga

SEQ ID NO: 106316 - DNA, 26 bp, Artificial sequence
  SiRNA target sequence
aaaggcaattatacaactttttagaa

SEQ ID NO: 106317 - DNA, 26 bp, Artificial sequence
  SiRNA target sequence
aaggcaattatacaactttttagaac

SEQ ID NO: 106318 - DNA, 26 bp, Artificial sequence
  SiRNA target sequence
aggcaattatacaactttttagaaca

SEQ ID NO: 106319 - DNA, 26 bp, Artificial sequence
  SiRNA target sequence
ggcaattatacaactttttagaacaa

SEQ ID NO: 106320 - DNA, 26 bp, Artificial sequence
  SiRNA target sequence
gcaattatacaactttttagaacaaa

SEQ ID NO: 106321 - DNA, 26 bp, Artificial sequence
  SiRNA target sequence
caattatacaactttttagaacaaaa

SEQ ID NO: 106322 - DNA, 26 bp, Artificial sequence
  SiRNA target sequence
aattatacaactttttagaacaaaaa

SEQ ID NO: 106323 - DNA, 26 bp, Artificial sequence
  SiRNA target sequence
attatacaactttttagaacaaaaat

SEQ ID NO: 106324 - DNA, 26 bp, Artificial sequence
  SiRNA target sequence
ttatacaactttttagaacaaaaatt

SEQ ID NO: 106325 - DNA, 26 bp, Artificial sequence
  SiRNA target sequence
tatacaactttttagaacaaaaatta

SEQ ID NO: 106326 - DNA, 26 bp, Artificial sequence
  SiRNA target sequence
atacaactttttagaacaaaaattaa

SEQ ID NO: 106327 - DNA, 26 bp, Artificial sequence
  SiRNA target sequence
tacaactttttagaacaaaaattaaa

SEQ ID NO: 106328 - DNA, 26 bp, Artificial sequence
  SiRNA target sequence
acaactttttagaacaaaaattaaaa

SEQ ID NO: 106329 - DNA, 26 bp, Artificial sequence
  SiRNA target sequence
caactttttagaacaaaaattaaaag

SEQ ID NO: 106330 - DNA, 26 bp, Artificial sequence
  SiRNA target sequence
aactttttagaacaaaaattaaaaga

SEQ ID NO: 106331 - DNA, 26 bp, Artificial sequence
  SiRNA target sequence
actttttagaacaaaaattaaaagat

SEQ ID NO: 106332 - DNA, 26 bp, Artificial sequence
  SiRNA target sequence
ctttttagaacaaaaattaaaagatt

SEQ ID NO: 106333 - DNA, 26 bp, Artificial sequence
  SiRNA target sequence
tttttagaacaaaaattaaaagattt

SEQ ID NO: 106334 - DNA, 26 bp, Artificial sequence
  SiRNA target sequence
ttttagaacaaaaattaaaagattta

SEQ ID NO: 106335 - DNA, 26 bp, Artificial sequence
  SiRNA target sequence
tttagaacaaaaattaaaagatttat

SEQ ID NO: 106336 - DNA, 26 bp, Artificial sequence
  SiRNA target sequence
ttagaacaaaaattaaaagatttata

SEQ ID NO: 106337 - DNA, 26 bp, Artificial sequence
  SiRNA target sequence
tagaacaaaaattaaaagatttataa

SEQ ID NO: 106338 - DNA, 26 bp, Artificial sequence
  SiRNA target sequence
agaacaaaaattaaaagatttataag

SEQ ID NO: 106339 - DNA, 26 bp, Artificial sequence
  SiRNA target sequence
gaacaaaaattaaaagatttataaga

SEQ ID NO: 106340 - DNA, 26 bp, Artificial sequence
  SiRNA target sequence
aacaaaaattaaaagatttataagac

SEQ ID NO: 106341 - DNA, 26 bp, Artificial sequence
  SiRNA target sequence
acaaaaattaaaagatttataagacg

SEQ ID NO: 106342 - DNA, 26 bp, Artificial sequence
  SiRNA target sequence
caaaaattaaaagatttataagacga

SEQ ID NO: 106343 - DNA, 26 bp, Artificial sequence
  SiRNA target sequence
aaaaattaaaagatttataagacgaa

SEQ ID NO: 106344 - DNA, 26 bp, Artificial sequence
  SiRNA target sequence
aaaattaaaagatttataagacgaat

SEQ ID NO: 106345 - DNA, 26 bp, Artificial sequence
  SiRNA target sequence
aaattaaaagatttataagacgaatc

SEQ ID NO: 106346 - DNA, 26 bp, Artificial sequence
  SiRNA target sequence
aattaaaagatttataagacgaatcc

SEQ ID NO: 106347 - DNA, 26 bp, Artificial sequence
  SiRNA target sequence
attaaaagatttataagacgaatccc

SEQ ID NO: 106348 - DNA, 26 bp, Artificial sequence
  SiRNA target sequence
ttaaaagatttataagacgaatcccc

SEQ ID NO: 106349 - DNA, 26 bp, Artificial sequence
  SiRNA target sequence
taaaagatttataagacgaatcccca

SEQ ID NO: 106350 - DNA, 26 bp, Artificial sequence
  SiRNA target sequence
aaaagatttataagacgaatccccaa

SEQ ID NO: 106351 - DNA, 26 bp, Artificial sequence
  SiRNA target sequence
aaagatttataagacgaatccccaag

SEQ ID NO: 106352 - DNA, 26 bp, Artificial sequence
  SiRNA target sequence
aagatttataagacgaatccccaagg

SEQ ID NO: 106353 - DNA, 26 bp, Artificial sequence
  SiRNA target sequence
agatttataagacgaatccccaaggc

SEQ ID NO: 106354 - DNA, 26 bp, Artificial sequence
  SiRNA target sequence
gatttataagacgaatccccaaggcc

SEQ ID NO: 106355 - DNA, 26 bp, Artificial sequence
  SiRNA target sequence
atttataagacgaatccccaaggcca

SEQ ID NO: 106356 - DNA, 26 bp, Artificial sequence
  SiRNA target sequence
tttataagacgaatccccaaggccaa

SEQ ID NO: 106357 - DNA, 26 bp, Artificial sequence
  SiRNA target sequence
ttataagacgaatccccaaggccaaa

SEQ ID NO: 106358 - DNA, 26 bp, Artificial sequence
  SiRNA target sequence
tataagacgaatccccaaggccaaat

SEQ ID NO: 106359 - DNA, 26 bp, Artificial sequence
  SiRNA target sequence
ataagacgaatccccaaggccaaata

SEQ ID NO: 106360 - DNA, 26 bp, Artificial sequence
  SiRNA target sequence
taagacgaatccccaaggccaaatac

SEQ ID NO: 106361 - DNA, 26 bp, Artificial sequence
  SiRNA target sequence
aagacgaatccccaaggccaaataca

SEQ ID NO: 106362 - DNA, 26 bp, Artificial sequence
  SiRNA target sequence
agacgaatccccaaggccaaatacag

SEQ ID NO: 106363 - DNA, 26 bp, Artificial sequence
  SiRNA target sequence
gacgaatccccaaggccaaatacagc

SEQ ID NO: 106364 - DNA, 26 bp, Artificial sequence
  SiRNA target sequence
acgaatccccaaggccaaatacagca

SEQ ID NO: 106365 - DNA, 26 bp, Artificial sequence
  SiRNA target sequence
cgaatccccaaggccaaatacagcaa

SEQ ID NO: 106366 - DNA, 26 bp, Artificial sequence
  SiRNA target sequence
gaatccccaaggccaaatacagcaaa

SEQ ID NO: 106367 - DNA, 26 bp, Artificial sequence
  SiRNA target sequence
aatccccaaggccaaatacagcaaaa

SEQ ID NO: 106368 - DNA, 26 bp, Artificial sequence
  SiRNA target sequence
atccccaaggccaaatacagcaaaat

SEQ ID NO: 106369 - DNA, 26 bp, Artificial sequence
  SiRNA target sequence
tccccaaggccaaatacagcaaaatt

SEQ ID NO: 106370 - DNA, 26 bp, Artificial sequence
  SiRNA target sequence
ccccaaggccaaatacagcaaaattt

SEQ ID NO: 106371 - DNA, 26 bp, Artificial sequence
  SiRNA target sequence
cccaaggccaaatacagcaaaattta

SEQ ID NO: 106372 - DNA, 26 bp, Artificial sequence
  SiRNA target sequence
ccaaggccaaatacagcaaaatttaa

SEQ ID NO: 106373 - DNA, 26 bp, Artificial sequence
  SiRNA target sequence
caaggccaaatacagcaaaatttaag

SEQ ID NO: 106374 - DNA, 26 bp, Artificial sequence
  SiRNA target sequence
aaggccaaatacagcaaaatttaagt

SEQ ID NO: 106375 - DNA, 26 bp, Artificial sequence
  SiRNA target sequence
aggccaaatacagcaaaatttaagtg

SEQ ID NO: 106376 - DNA, 26 bp, Artificial sequence
  SiRNA target sequence
ggccaaatacagcaaaatttaagtgt

SEQ ID NO: 106377 - DNA, 26 bp, Artificial sequence
  SiRNA target sequence
gccaaatacagcaaaatttaagtgtt

SEQ ID NO: 106378 - DNA, 26 bp, Artificial sequence
  SiRNA target sequence
ccaaatacagcaaaatttaagtgttg

SEQ ID NO: 106379 - DNA, 26 bp, Artificial sequence
  SiRNA target sequence
caaatacagcaaaatttaagtgttgt

SEQ ID NO: 106380 - DNA, 26 bp, Artificial sequence
  SiRNA target sequence
aaatacagcaaaatttaagtgttgta

SEQ ID NO: 106381 - DNA, 26 bp, Artificial sequence
  SiRNA target sequence
aatacagcaaaatttaagtgttgtaa

SEQ ID NO: 106382 - DNA, 26 bp, Artificial sequence
  SiRNA target sequence
atacagcaaaatttaagtgttgtaaa

SEQ ID NO: 106383 - DNA, 26 bp, Artificial sequence
  SiRNA target sequence
tacagcaaaatttaagtgttgtaaaa

SEQ ID NO: 106384 - DNA, 26 bp, Artificial sequence
  SiRNA target sequence
acagcaaaatttaagtgttgtaaaaa

SEQ ID NO: 106385 - DNA, 26 bp, Artificial sequence
  SiRNA target sequence
cagcaaaatttaagtgttgtaaaaaa

SEQ ID NO: 106386 - DNA, 26 bp, Artificial sequence
  SiRNA target sequence
agcaaaatttaagtgttgtaaaaaat

SEQ ID NO: 106387 - DNA, 26 bp, Artificial sequence
  SiRNA target sequence
gcaaaatttaagtgttgtaaaaaatt

SEQ ID NO: 106388 - DNA, 26 bp, Artificial sequence
  SiRNA target sequence
caaaatttaagtgttgtaaaaaattt

SEQ ID NO: 106389 - DNA, 26 bp, Artificial sequence
  SiRNA target sequence
aaaatttaagtgttgtaaaaaatttg

SEQ ID NO: 106390 - DNA, 26 bp, Artificial sequence
  SiRNA target sequence
aaatttaagtgttgtaaaaaatttgt

SEQ ID NO: 106391 - DNA, 26 bp, Artificial sequence
  SiRNA target sequence
aatttaagtgttgtaaaaaatttgta

SEQ ID NO: 106392 - DNA, 26 bp, Artificial sequence
  SiRNA target sequence
atttaagtgttgtaaaaaatttgtag

SEQ ID NO: 106393 - DNA, 26 bp, Artificial sequence
  SiRNA target sequence
tttaagtgttgtaaaaaatttgtagg

SEQ ID NO: 106394 - DNA, 26 bp, Artificial sequence
  SiRNA target sequence
ttaagtgttgtaaaaaatttgtaggc

SEQ ID NO: 106395 - DNA, 26 bp, Artificial sequence
  SiRNA target sequence
taagtgttgtaaaaaatttgtaggca

SEQ ID NO: 106396 - DNA, 26 bp, Artificial sequence
  SiRNA target sequence
aagtgttgtaaaaaatttgtaggcag

SEQ ID NO: 106397 - DNA, 26 bp, Artificial sequence
  SiRNA target sequence
agtgttgtaaaaaatttgtaggcaga

SEQ ID NO: 106398 - DNA, 26 bp, Artificial sequence
  SiRNA target sequence
gtgttgtaaaaaatttgtaggcagat

SEQ ID NO: 106399 - DNA, 26 bp, Artificial sequence
  SiRNA target sequence
tgttgtaaaaaatttgtaggcagatt

SEQ ID NO: 106400 - DNA, 26 bp, Artificial sequence
  SiRNA target sequence
gttgtaaaaaatttgtaggcagattt

SEQ ID NO: 106401 - DNA, 26 bp, Artificial sequence
  SiRNA target sequence
ttgtaaaaaatttgtaggcagatttt

SEQ ID NO: 106402 - DNA, 26 bp, Artificial sequence
  SiRNA target sequence
tgtaaaaaatttgtaggcagattttt

SEQ ID NO: 106403 - DNA, 26 bp, Artificial sequence
  SiRNA target sequence
gtaaaaaatttgtaggcagatttttt

SEQ ID NO: 106404 - DNA, 26 bp, Artificial sequence
  SiRNA target sequence
taaaaaatttgtaggcagattttttt

SEQ ID NO: 106405 - DNA, 26 bp, Artificial sequence
  SiRNA target sequence
aaaaaatttgtaggcagatttttttt

SEQ ID NO: 106406 - DNA, 26 bp, Artificial sequence
  SiRNA target sequence
aaaaatttgtaggcagattttttttg

SEQ ID NO: 106407 - DNA, 26 bp, Artificial sequence
  SiRNA target sequence
aaaatttgtaggcagattttttttgc

SEQ ID NO: 106408 - DNA, 26 bp, Artificial sequence
  SiRNA target sequence
aaatttgtaggcagattttttttgcg

SEQ ID NO: 106409 - DNA, 26 bp, Artificial sequence
  SiRNA target sequence
aatttgtaggcagattttttttgcgc

SEQ ID NO: 106410 - DNA, 26 bp, Artificial sequence
  SiRNA target sequence
atttgtaggcagattttttttgcgca

SEQ ID NO: 106411 - DNA, 26 bp, Artificial sequence
  SiRNA target sequence
tttgtaggcagattttttttgcgcaa

SEQ ID NO: 106412 - DNA, 26 bp, Artificial sequence
  SiRNA target sequence
ttgtaggcagattttttttgcgcaaa

SEQ ID NO: 106413 - DNA, 26 bp, Artificial sequence
  SiRNA target sequence
tgtaggcagattttttttgcgcaaaa

SEQ ID NO: 106414 - DNA, 26 bp, Artificial sequence
  SiRNA target sequence
gtaggcagattttttttgcgcaaaaa

SEQ ID NO: 106415 - DNA, 26 bp, Artificial sequence
  SiRNA target sequence
taggcagattttttttgcgcaaaaat

SEQ ID NO: 106416 - DNA, 26 bp, Artificial sequence
  SiRNA target sequence
aggcagattttttttgcgcaaaaatt

SEQ ID NO: 106417 - DNA, 26 bp, Artificial sequence
  SiRNA target sequence
ggcagattttttttgcgcaaaaattt

SEQ ID NO: 106418 - DNA, 26 bp, Artificial sequence
  SiRNA target sequence
gcagattttttttgcgcaaaaatttc

SEQ ID NO: 106419 - DNA, 26 bp, Artificial sequence
  SiRNA target sequence
cagattttttttgcgcaaaaatttcc

SEQ ID NO: 106420 - DNA, 26 bp, Artificial sequence
  SiRNA target sequence
agattttttttgcgcaaaaatttcca

SEQ ID NO: 106421 - DNA, 26 bp, Artificial sequence
  SiRNA target sequence
gattttttttgcgcaaaaatttccaa

SEQ ID NO: 106422 - DNA, 26 bp, Artificial sequence
  SiRNA target sequence
attttttttgcgcaaaaatttccaaa

SEQ ID NO: 106423 - DNA, 26 bp, Artificial sequence
  SiRNA target sequence
ttttttttgcgcaaaaatttccaaaa

SEQ ID NO: 106424 - DNA, 26 bp, Artificial sequence
  SiRNA target sequence
tttttttgcgcaaaaatttccaaaat

SEQ ID NO: 106425 - DNA, 26 bp, Artificial sequence
  SiRNA target sequence
ttttttgcgcaaaaatttccaaaatt

SEQ ID NO: 106426 - DNA, 26 bp, Artificial sequence
  SiRNA target sequence
tttttgcgcaaaaatttccaaaattt

SEQ ID NO: 106427 - DNA, 26 bp, Artificial sequence
  SiRNA target sequence
ttttgcgcaaaaatttccaaaattta

SEQ ID NO: 106428 - DNA, 26 bp, Artificial sequence
  SiRNA target sequence
tttgcgcaaaaatttccaaaatttag

SEQ ID NO: 106429 - DNA, 26 bp, Artificial sequence
  SiRNA target sequence
ttgcgcaaaaatttccaaaatttagt

SEQ ID NO: 106430 - DNA, 26 bp, Artificial sequence
  SiRNA target sequence
tgcgcaaaaatttccaaaatttagtc

SEQ ID NO: 106431 - DNA, 26 bp, Artificial sequence
  SiRNA target sequence
gcgcaaaaatttccaaaatttagtca

SEQ ID NO: 106432 - DNA, 26 bp, Artificial sequence
  SiRNA target sequence
cgcaaaaatttccaaaatttagtcat

SEQ ID NO: 106433 - DNA, 26 bp, Artificial sequence
  SiRNA target sequence
gcaaaaatttccaaaatttagtcatg

SEQ ID NO: 106434 - DNA, 26 bp, Artificial sequence
  SiRNA target sequence
caaaaatttccaaaatttagtcatgt

SEQ ID NO: 106435 - DNA, 26 bp, Artificial sequence
  SiRNA target sequence
aaaaatttccaaaatttagtcatgtt

SEQ ID NO: 106436 - DNA, 26 bp, Artificial sequence
  SiRNA target sequence
aaaatttccaaaatttagtcatgtta

SEQ ID NO: 106437 - DNA, 26 bp, Artificial sequence
  SiRNA target sequence
aaatttccaaaatttagtcatgttaa

SEQ ID NO: 106438 - DNA, 26 bp, Artificial sequence
  SiRNA target sequence
aatttccaaaatttagtcatgttaaa

SEQ ID NO: 106439 - DNA, 26 bp, Artificial sequence
  SiRNA target sequence
atttccaaaatttagtcatgttaaaa

SEQ ID NO: 106440 - DNA, 26 bp, Artificial sequence
  SiRNA target sequence
tttccaaaatttagtcatgttaaaag

SEQ ID NO: 106441 - DNA, 26 bp, Artificial sequence
  SiRNA target sequence
ttccaaaatttagtcatgttaaaagg

SEQ ID NO: 106442 - DNA, 26 bp, Artificial sequence
  SiRNA target sequence
tccaaaatttagtcatgttaaaaggt

SEQ ID NO: 106443 - DNA, 26 bp, Artificial sequence
  SiRNA target sequence
ccaaaatttagtcatgttaaaaggtt

SEQ ID NO: 106444 - DNA, 26 bp, Artificial sequence
  SiRNA target sequence
caaaatttagtcatgttaaaaggttc

SEQ ID NO: 106445 - DNA, 26 bp, Artificial sequence
  SiRNA target sequence
aaaatttagtcatgttaaaaggttca

SEQ ID NO: 106446 - DNA, 26 bp, Artificial sequence
  SiRNA target sequence
aaatttagtcatgttaaaaggttcag

SEQ ID NO: 106447 - DNA, 26 bp, Artificial sequence
  SiRNA target sequence
aatttagtcatgttaaaaggttcaga

SEQ ID NO: 106448 - DNA, 26 bp, Artificial sequence
  SiRNA target sequence
atttagtcatgttaaaaggttcagaa

SEQ ID NO: 106449 - DNA, 26 bp, Artificial sequence
  SiRNA target sequence
tttagtcatgttaaaaggttcagaac

SEQ ID NO: 106450 - DNA, 26 bp, Artificial sequence
  SiRNA target sequence
ttagtcatgttaaaaggttcagaacc

SEQ ID NO: 106451 - DNA, 26 bp, Artificial sequence
  SiRNA target sequence
tagtcatgttaaaaggttcagaacca

SEQ ID NO: 106452 - DNA, 26 bp, Artificial sequence
  SiRNA target sequence
agtcatgttaaaaggttcagaaccat

SEQ ID NO: 106453 - DNA, 26 bp, Artificial sequence
  SiRNA target sequence
gtcatgttaaaaggttcagaaccatt

SEQ ID NO: 106454 - DNA, 26 bp, Artificial sequence
  SiRNA target sequence
tcatgttaaaaggttcagaaccattc

SEQ ID NO: 106455 - DNA, 26 bp, Artificial sequence
  SiRNA target sequence
catgttaaaaggttcagaaccattcc

SEQ ID NO: 106456 - DNA, 26 bp, Artificial sequence
  SiRNA target sequence
atgttaaaaggttcagaaccattccc

SEQ ID NO: 106457 - DNA, 26 bp, Artificial sequence
  SiRNA target sequence
tgttaaaaggttcagaaccattccca

SEQ ID NO: 106458 - DNA, 26 bp, Artificial sequence
  SiRNA target sequence
gttaaaaggttcagaaccattcccat

SEQ ID NO: 106459 - DNA, 26 bp, Artificial sequence
  SiRNA target sequence
ttaaaaggttcagaaccattcccatg

SEQ ID NO: 106460 - DNA, 26 bp, Artificial sequence
  SiRNA target sequence
taaaaggttcagaaccattcccatga

SEQ ID NO: 106461 - DNA, 26 bp, Artificial sequence
  SiRNA target sequence
aaaaggttcagaaccattcccatgag

SEQ ID NO: 106462 - DNA, 26 bp, Artificial sequence
  SiRNA target sequence
aaaggttcagaaccattcccatgagt

SEQ ID NO: 106463 - DNA, 26 bp, Artificial sequence
  SiRNA target sequence
aaggttcagaaccattcccatgagtc

SEQ ID NO: 106464 - DNA, 26 bp, Artificial sequence
  SiRNA target sequence
aggttcagaaccattcccatgagtcg

SEQ ID NO: 106465 - DNA, 26 bp, Artificial sequence
  SiRNA target sequence
ggttcagaaccattcccatgagtcga

SEQ ID NO: 106466 - DNA, 26 bp, Artificial sequence
  SiRNA target sequence
gttcagaaccattcccatgagtcgaa

SEQ ID NO: 106467 - DNA, 26 bp, Artificial sequence
  SiRNA target sequence
ttcagaaccattcccatgagtcgaac

SEQ ID NO: 106468 - DNA, 26 bp, Artificial sequence
  SiRNA target sequence
tcagaaccattcccatgagtcgaaca

SEQ ID NO: 106469 - DNA, 26 bp, Artificial sequence
  SiRNA target sequence
cagaaccattcccatgagtcgaacat

SEQ ID NO: 106470 - DNA, 26 bp, Artificial sequence
  SiRNA target sequence
agaaccattcccatgagtcgaacata

SEQ ID NO: 106471 - DNA, 26 bp, Artificial sequence
  SiRNA target sequence
gaaccattcccatgagtcgaacatac

SEQ ID NO: 106472 - DNA, 26 bp, Artificial sequence
  SiRNA target sequence
aaccattcccatgagtcgaacataca

SEQ ID NO: 106473 - DNA, 26 bp, Artificial sequence
  SiRNA target sequence
accattcccatgagtcgaacatacaa

SEQ ID NO: 106474 - DNA, 26 bp, Artificial sequence
  SiRNA target sequence
ccattcccatgagtcgaacatacaaa

SEQ ID NO: 106475 - DNA, 26 bp, Artificial sequence
  SiRNA target sequence
cattcccatgagtcgaacatacaaat

SEQ ID NO: 106476 - DNA, 26 bp, Artificial sequence
  SiRNA target sequence
attcccatgagtcgaacatacaaata

SEQ ID NO: 106477 - DNA, 26 bp, Artificial sequence
  SiRNA target sequence
ttcccatgagtcgaacatacaaatat

SEQ ID NO: 106478 - DNA, 26 bp, Artificial sequence
  SiRNA target sequence
tcccatgagtcgaacatacaaatata

SEQ ID NO: 106479 - DNA, 26 bp, Artificial sequence
  SiRNA target sequence
cccatgagtcgaacatacaaatataa

SEQ ID NO: 106480 - DNA, 26 bp, Artificial sequence
  SiRNA target sequence
ccatgagtcgaacatacaaatataat

SEQ ID NO: 106481 - DNA, 26 bp, Artificial sequence
  SiRNA target sequence
catgagtcgaacatacaaatataatc

SEQ ID NO: 106482 - DNA, 26 bp, Artificial sequence
  SiRNA target sequence
atgagtcgaacatacaaatataatca

SEQ ID NO: 106483 - DNA, 26 bp, Artificial sequence
  SiRNA target sequence
tgagtcgaacatacaaatataatcat

SEQ ID NO: 106484 - DNA, 26 bp, Artificial sequence
  SiRNA target sequence
gagtcgaacatacaaatataatcata

SEQ ID NO: 106485 - DNA, 26 bp, Artificial sequence
  SiRNA target sequence
agtcgaacatacaaatataatcatat

SEQ ID NO: 106486 - DNA, 26 bp, Artificial sequence
  SiRNA target sequence
gtcgaacatacaaatataatcatatc

SEQ ID NO: 106487 - DNA, 26 bp, Artificial sequence
  SiRNA target sequence
tcgaacatacaaatataatcatatca

SEQ ID NO: 106488 - DNA, 26 bp, Artificial sequence
  SiRNA target sequence
cgaacatacaaatataatcatatcaa

SEQ ID NO: 106489 - DNA, 26 bp, Artificial sequence
  SiRNA target sequence
gaacatacaaatataatcatatcaat

SEQ ID NO: 106490 - DNA, 26 bp, Artificial sequence
  SiRNA target sequence
aacatacaaatataatcatatcaata

SEQ ID NO: 106491 - DNA, 26 bp, Artificial sequence
  SiRNA target sequence
acatacaaatataatcatatcaatat

SEQ ID NO: 106492 - DNA, 26 bp, Artificial sequence
  SiRNA target sequence
catacaaatataatcatatcaatatc

SEQ ID NO: 106493 - DNA, 26 bp, Artificial sequence
  SiRNA target sequence
atacaaatataatcatatcaatatct

SEQ ID NO: 106494 - DNA, 26 bp, Artificial sequence
  SiRNA target sequence
tacaaatataatcatatcaatatcta

SEQ ID NO: 106495 - DNA, 26 bp, Artificial sequence
  SiRNA target sequence
acaaatataatcatatcaatatctaa

SEQ ID NO: 106496 - DNA, 26 bp, Artificial sequence
  SiRNA target sequence
caaatataatcatatcaatatctaat

SEQ ID NO: 106497 - DNA, 26 bp, Artificial sequence
  SiRNA target sequence
aaatataatcatatcaatatctaata

SEQ ID NO: 106498 - DNA, 26 bp, Artificial sequence
  SiRNA target sequence
aatataatcatatcaatatctaatat

SEQ ID NO: 106499 - DNA, 26 bp, Artificial sequence
  SiRNA target sequence
atataatcatatcaatatctaatatt

SEQ ID NO: 106500 - DNA, 26 bp, Artificial sequence
  SiRNA target sequence
tataatcatatcaatatctaatattt

SEQ ID NO: 106501 - DNA, 26 bp, Artificial sequence
  SiRNA target sequence
ataatcatatcaatatctaatatttt

SEQ ID NO: 106502 - DNA, 26 bp, Artificial sequence
  SiRNA target sequence
taatcatatcaatatctaatattttt

SEQ ID NO: 106503 - DNA, 26 bp, Artificial sequence
  SiRNA target sequence
aatcatatcaatatctaatatttttt

SEQ ID NO: 106504 - DNA, 26 bp, Artificial sequence
  SiRNA target sequence
atcatatcaatatctaatattttttc

SEQ ID NO: 106505 - DNA, 26 bp, Artificial sequence
  SiRNA target sequence
tcatatcaatatctaatattttttcg

SEQ ID NO: 106506 - DNA, 26 bp, Artificial sequence
  SiRNA target sequence
catatcaatatctaatattttttcga

SEQ ID NO: 106507 - DNA, 26 bp, Artificial sequence
  SiRNA target sequence
atatcaatatctaatattttttcgaa

SEQ ID NO: 106508 - DNA, 26 bp, Artificial sequence
  SiRNA target sequence
tatcaatatctaatattttttcgaaa

SEQ ID NO: 106509 - DNA, 26 bp, Artificial sequence
  SiRNA target sequence
atcaatatctaatattttttcgaaat

SEQ ID NO: 106510 - DNA, 26 bp, Artificial sequence
  SiRNA target sequence
tcaatatctaatattttttcgaaatc

SEQ ID NO: 106511 - DNA, 26 bp, Artificial sequence
  SiRNA target sequence
caatatctaatattttttcgaaatca

SEQ ID NO: 106512 - DNA, 26 bp, Artificial sequence
  SiRNA target sequence
aatatctaatattttttcgaaatcaa

SEQ ID NO: 106513 - DNA, 26 bp, Artificial sequence
  SiRNA target sequence
atatctaatattttttcgaaatcaaa

SEQ ID NO: 106514 - DNA, 26 bp, Artificial sequence
  SiRNA target sequence
tatctaatattttttcgaaatcaaaa

SEQ ID NO: 106515 - DNA, 26 bp, Artificial sequence
  SiRNA target sequence
atctaatattttttcgaaatcaaaac

SEQ ID NO: 106516 - DNA, 26 bp, Artificial sequence
  SiRNA target sequence
tctaatattttttcgaaatcaaaact

SEQ ID NO: 106517 - DNA, 26 bp, Artificial sequence
  SiRNA target sequence
ctaatattttttcgaaatcaaaactg

SEQ ID NO: 106518 - DNA, 26 bp, Artificial sequence
  SiRNA target sequence
taatattttttcgaaatcaaaactgt

SEQ ID NO: 106519 - DNA, 26 bp, Artificial sequence
  SiRNA target sequence
aatattttttcgaaatcaaaactgtc

SEQ ID NO: 106520 - DNA, 26 bp, Artificial sequence
  SiRNA target sequence
atattttttcgaaatcaaaactgtcc

SEQ ID NO: 106521 - DNA, 26 bp, Artificial sequence
  SiRNA target sequence
tattttttcgaaatcaaaactgtcca

SEQ ID NO: 106522 - DNA, 26 bp, Artificial sequence
  SiRNA target sequence
attttttcgaaatcaaaactgtccat

SEQ ID NO: 106523 - DNA, 26 bp, Artificial sequence
  SiRNA target sequence
ttttttcgaaatcaaaactgtccata

SEQ ID NO: 106524 - DNA, 26 bp, Artificial sequence
  SiRNA target sequence
tttttcgaaatcaaaactgtccatat

SEQ ID NO: 106525 - DNA, 26 bp, Artificial sequence
  SiRNA target sequence
ttttcgaaatcaaaactgtccatatc

SEQ ID NO: 106526 - DNA, 26 bp, Artificial sequence
  SiRNA target sequence
tttcgaaatcaaaactgtccatatct

SEQ ID NO: 106527 - DNA, 26 bp, Artificial sequence
  SiRNA target sequence
ttcgaaatcaaaactgtccatatcta

SEQ ID NO: 106528 - DNA, 26 bp, Artificial sequence
  SiRNA target sequence
tcgaaatcaaaactgtccatatctaa

SEQ ID NO: 106529 - DNA, 26 bp, Artificial sequence
  SiRNA target sequence
cgaaatcaaaactgtccatatctaaa

SEQ ID NO: 106530 - DNA, 26 bp, Artificial sequence
  SiRNA target sequence
gaaatcaaaactgtccatatctaaag

SEQ ID NO: 106531 - DNA, 26 bp, Artificial sequence
  SiRNA target sequence
aaatcaaaactgtccatatctaaagt

SEQ ID NO: 106532 - DNA, 26 bp, Artificial sequence
  SiRNA target sequence
aatcaaaactgtccatatctaaagta

SEQ ID NO: 106533 - DNA, 26 bp, Artificial sequence
  SiRNA target sequence
atcaaaactgtccatatctaaagtaa

SEQ ID NO: 106534 - DNA, 26 bp, Artificial sequence
  SiRNA target sequence
tcaaaactgtccatatctaaagtaaa

SEQ ID NO: 106535 - DNA, 26 bp, Artificial sequence
  SiRNA target sequence
caaaactgtccatatctaaagtaaaa

SEQ ID NO: 106536 - DNA, 26 bp, Artificial sequence
  SiRNA target sequence
aaaactgtccatatctaaagtaaaat

SEQ ID NO: 106537 - DNA, 26 bp, Artificial sequence
  SiRNA target sequence
aaactgtccatatctaaagtaaaatc

SEQ ID NO: 106538 - DNA, 26 bp, Artificial sequence
  SiRNA target sequence
aactgtccatatctaaagtaaaatct

SEQ ID NO: 106539 - DNA, 26 bp, Artificial sequence
  SiRNA target sequence
actgtccatatctaaagtaaaatctg

SEQ ID NO: 106540 - DNA, 26 bp, Artificial sequence
  SiRNA target sequence
ctgtccatatctaaagtaaaatctgt

SEQ ID NO: 106541 - DNA, 26 bp, Artificial sequence
  SiRNA target sequence
tgtccatatctaaagtaaaatctgtt

SEQ ID NO: 106542 - DNA, 26 bp, Artificial sequence
  SiRNA target sequence
gtccatatctaaagtaaaatctgttg

SEQ ID NO: 106543 - DNA, 26 bp, Artificial sequence
  SiRNA target sequence
tccatatctaaagtaaaatctgttgg

SEQ ID NO: 106544 - DNA, 26 bp, Artificial sequence
  SiRNA target sequence
ccatatctaaagtaaaatctgttgga

SEQ ID NO: 106545 - DNA, 26 bp, Artificial sequence
  SiRNA target sequence
catatctaaagtaaaatctgttggaa

SEQ ID NO: 106546 - DNA, 26 bp, Artificial sequence
  SiRNA target sequence
atatctaaagtaaaatctgttggaag

SEQ ID NO: 106547 - DNA, 26 bp, Artificial sequence
  SiRNA target sequence
tatctaaagtaaaatctgttggaagc

SEQ ID NO: 106548 - DNA, 26 bp, Artificial sequence
  SiRNA target sequence
atctaaagtaaaatctgttggaagca

SEQ ID NO: 106549 - DNA, 26 bp, Artificial sequence
  SiRNA target sequence
tctaaagtaaaatctgttggaagcaa

SEQ ID NO: 106550 - DNA, 26 bp, Artificial sequence
  SiRNA target sequence
ctaaagtaaaatctgttggaagcaat

SEQ ID NO: 106551 - DNA, 26 bp, Artificial sequence
  SiRNA target sequence
taaagtaaaatctgttggaagcaatt

SEQ ID NO: 106552 - DNA, 26 bp, Artificial sequence
  SiRNA target sequence
aaagtaaaatctgttggaagcaattc

SEQ ID NO: 106553 - DNA, 26 bp, Artificial sequence
  SiRNA target sequence
aagtaaaatctgttggaagcaattct

SEQ ID NO: 106554 - DNA, 26 bp, Artificial sequence
  SiRNA target sequence
agtaaaatctgttggaagcaattctt

SEQ ID NO: 106555 - DNA, 26 bp, Artificial sequence
  SiRNA target sequence
gtaaaatctgttggaagcaattcttt

SEQ ID NO: 106556 - DNA, 26 bp, Artificial sequence
  SiRNA target sequence
taaaatctgttggaagcaattcttta

SEQ ID NO: 106557 - DNA, 26 bp, Artificial sequence
  SiRNA target sequence
aaaatctgttggaagcaattctttat

SEQ ID NO: 106558 - DNA, 26 bp, Artificial sequence
  SiRNA target sequence
aaatctgttggaagcaattctttatc

SEQ ID NO: 106559 - DNA, 26 bp, Artificial sequence
  SiRNA target sequence
aatctgttggaagcaattctttatca

SEQ ID NO: 106560 - DNA, 26 bp, Artificial sequence
  SiRNA target sequence
atctgttggaagcaattctttatcaa

SEQ ID NO: 106561 - DNA, 26 bp, Artificial sequence
  SiRNA target sequence
tctgttggaagcaattctttatcaac

SEQ ID NO: 106562 - DNA, 26 bp, Artificial sequence
  SiRNA target sequence
ctgttggaagcaattctttatcaacg

SEQ ID NO: 106563 - DNA, 26 bp, Artificial sequence
  SiRNA target sequence
tgttggaagcaattctttatcaacgt

SEQ ID NO: 106564 - DNA, 26 bp, Artificial sequence
  SiRNA target sequence
gttggaagcaattctttatcaacgtt

SEQ ID NO: 106565 - DNA, 26 bp, Artificial sequence
  SiRNA target sequence
ttggaagcaattctttatcaacgtta

SEQ ID NO: 106566 - DNA, 26 bp, Artificial sequence
  SiRNA target sequence
tggaagcaattctttatcaacgttat

SEQ ID NO: 106567 - DNA, 26 bp, Artificial sequence
  SiRNA target sequence
ggaagcaattctttatcaacgttata

SEQ ID NO: 106568 - DNA, 26 bp, Artificial sequence
  SiRNA target sequence
gaagcaattctttatcaacgttataa

SEQ ID NO: 106569 - DNA, 26 bp, Artificial sequence
  SiRNA target sequence
aagcaattctttatcaacgttataaa

SEQ ID NO: 106570 - DNA, 26 bp, Artificial sequence
  SiRNA target sequence
agcaattctttatcaacgttataaat

SEQ ID NO: 106571 - DNA, 26 bp, Artificial sequence
  SiRNA target sequence
gcaattctttatcaacgttataaatc

SEQ ID NO: 106572 - DNA, 26 bp, Artificial sequence
  SiRNA target sequence
caattctttatcaacgttataaatca

SEQ ID NO: 106573 - DNA, 26 bp, Artificial sequence
  SiRNA target sequence
aattctttatcaacgttataaatcaa

SEQ ID NO: 106574 - DNA, 26 bp, Artificial sequence
  SiRNA target sequence
attctttatcaacgttataaatcaaa

SEQ ID NO: 106575 - DNA, 26 bp, Artificial sequence
  SiRNA target sequence
ttctttatcaacgttataaatcaaat

SEQ ID NO: 106576 - DNA, 26 bp, Artificial sequence
  SiRNA target sequence
tctttatcaacgttataaatcaaatc

SEQ ID NO: 106577 - DNA, 26 bp, Artificial sequence
  SiRNA target sequence
ctttatcaacgttataaatcaaatct

SEQ ID NO: 106578 - DNA, 26 bp, Artificial sequence
  SiRNA target sequence
tttatcaacgttataaatcaaatctt

SEQ ID NO: 106579 - DNA, 26 bp, Artificial sequence
  SiRNA target sequence
ttatcaacgttataaatcaaatcttt

SEQ ID NO: 106580 - DNA, 26 bp, Artificial sequence
  SiRNA target sequence
tatcaacgttataaatcaaatcttta

SEQ ID NO: 106581 - DNA, 26 bp, Artificial sequence
  SiRNA target sequence
atcaacgttataaatcaaatctttat

SEQ ID NO: 106582 - DNA, 26 bp, Artificial sequence
  SiRNA target sequence
tcaacgttataaatcaaatctttatt

SEQ ID NO: 106583 - DNA, 26 bp, Artificial sequence
  SiRNA target sequence
caacgttataaatcaaatctttattg

SEQ ID NO: 106584 - DNA, 26 bp, Artificial sequence
  SiRNA target sequence
aacgttataaatcaaatctttattgt

SEQ ID NO: 106585 - DNA, 26 bp, Artificial sequence
  SiRNA target sequence
acgttataaatcaaatctttattgta

SEQ ID NO: 106586 - DNA, 26 bp, Artificial sequence
  SiRNA target sequence
cgttataaatcaaatctttattgtat

SEQ ID NO: 106587 - DNA, 26 bp, Artificial sequence
  SiRNA target sequence
gttataaatcaaatctttattgtatc

SEQ ID NO: 106588 - DNA, 26 bp, Artificial sequence
  SiRNA target sequence
ttataaatcaaatctttattgtatcc

SEQ ID NO: 106589 - DNA, 26 bp, Artificial sequence
  SiRNA target sequence
tataaatcaaatctttattgtatccg

SEQ ID NO: 106590 - DNA, 26 bp, Artificial sequence
  SiRNA target sequence
ataaatcaaatctttattgtatccgt

SEQ ID NO: 106591 - DNA, 26 bp, Artificial sequence
  SiRNA target sequence
taaatcaaatctttattgtatccgta

SEQ ID NO: 106592 - DNA, 26 bp, Artificial sequence
  SiRNA target sequence
aaatcaaatctttattgtatccgtat

SEQ ID NO: 106593 - DNA, 26 bp, Artificial sequence
  SiRNA target sequence
aatcaaatctttattgtatccgtata

SEQ ID NO: 106594 - DNA, 26 bp, Artificial sequence
  SiRNA target sequence
atcaaatctttattgtatccgtatag

SEQ ID NO: 106595 - DNA, 26 bp, Artificial sequence
  SiRNA target sequence
tcaaatctttattgtatccgtatagt

SEQ ID NO: 106596 - DNA, 26 bp, Artificial sequence
  SiRNA target sequence
caaatctttattgtatccgtatagta

SEQ ID NO: 106597 - DNA, 26 bp, Artificial sequence
  SiRNA target sequence
aaatctttattgtatccgtatagtat

SEQ ID NO: 106598 - DNA, 26 bp, Artificial sequence
  SiRNA target sequence
aatctttattgtatccgtatagtata

SEQ ID NO: 106599 - DNA, 26 bp, Artificial sequence
  SiRNA target sequence
atctttattgtatccgtatagtataa

SEQ ID NO: 106600 - DNA, 26 bp, Artificial sequence
  SiRNA target sequence
tctttattgtatccgtatagtataac

SEQ ID NO: 106601 - DNA, 26 bp, Artificial sequence
  SiRNA target sequence
ctttattgtatccgtatagtataaca

SEQ ID NO: 106602 - DNA, 26 bp, Artificial sequence
  SiRNA target sequence
tttattgtatccgtatagtataacat

SEQ ID NO: 106603 - DNA, 26 bp, Artificial sequence
  SiRNA target sequence
ttattgtatccgtatagtataacatt

SEQ ID NO: 106604 - DNA, 26 bp, Artificial sequence
  SiRNA target sequence
tattgtatccgtatagtataacattt

SEQ ID NO: 106605 - DNA, 26 bp, Artificial sequence
  SiRNA target sequence
attgtatccgtatagtataacatttt

SEQ ID NO: 106606 - DNA, 26 bp, Artificial sequence
  SiRNA target sequence
ttgtatccgtatagtataacattttg

SEQ ID NO: 106607 - DNA, 26 bp, Artificial sequence
  SiRNA target sequence
tgtatccgtatagtataacattttga

SEQ ID NO: 106608 - DNA, 26 bp, Artificial sequence
  SiRNA target sequence
gtatccgtatagtataacattttgaa

SEQ ID NO: 106609 - DNA, 26 bp, Artificial sequence
  SiRNA target sequence
tatccgtatagtataacattttgaat

SEQ ID NO: 106610 - DNA, 26 bp, Artificial sequence
  SiRNA target sequence
atccgtatagtataacattttgaata

SEQ ID NO: 106611 - DNA, 26 bp, Artificial sequence
  SiRNA target sequence
tccgtatagtataacattttgaataa

SEQ ID NO: 106612 - DNA, 26 bp, Artificial sequence
  SiRNA target sequence
ccgtatagtataacattttgaataag

SEQ ID NO: 106613 - DNA, 26 bp, Artificial sequence
  SiRNA target sequence
cgtatagtataacattttgaataagt

SEQ ID NO: 106614 - DNA, 26 bp, Artificial sequence
  SiRNA target sequence
gtatagtataacattttgaataagtt

SEQ ID NO: 106615 - DNA, 26 bp, Artificial sequence
  SiRNA target sequence
tatagtataacattttgaataagttt

SEQ ID NO: 106616 - DNA, 26 bp, Artificial sequence
  SiRNA target sequence
atagtataacattttgaataagttta

SEQ ID NO: 106617 - DNA, 26 bp, Artificial sequence
  SiRNA target sequence
tagtataacattttgaataagtttag

SEQ ID NO: 106618 - DNA, 26 bp, Artificial sequence
  SiRNA target sequence
agtataacattttgaataagtttagc

SEQ ID NO: 106619 - DNA, 26 bp, Artificial sequence
  SiRNA target sequence
gtataacattttgaataagtttagca

SEQ ID NO: 106620 - DNA, 26 bp, Artificial sequence
  SiRNA target sequence
tataacattttgaataagtttagcaa

SEQ ID NO: 106621 - DNA, 26 bp, Artificial sequence
  SiRNA target sequence
ataacattttgaataagtttagcaat

SEQ ID NO: 106622 - DNA, 26 bp, Artificial sequence
  SiRNA target sequence
taacattttgaataagtttagcaata

SEQ ID NO: 106623 - DNA, 26 bp, Artificial sequence
  SiRNA target sequence
aacattttgaataagtttagcaatat

SEQ ID NO: 106624 - DNA, 26 bp, Artificial sequence
  SiRNA target sequence
acattttgaataagtttagcaatatg

SEQ ID NO: 106625 - DNA, 26 bp, Artificial sequence
  SiRNA target sequence
cattttgaataagtttagcaatatgt

SEQ ID NO: 106626 - DNA, 26 bp, Artificial sequence
  SiRNA target sequence
attttgaataagtttagcaatatgta

SEQ ID NO: 106627 - DNA, 26 bp, Artificial sequence
  SiRNA target sequence
ttttgaataagtttagcaatatgtat

SEQ ID NO: 106628 - DNA, 26 bp, Artificial sequence
  SiRNA target sequence
tttgaataagtttagcaatatgtata

SEQ ID NO: 106629 - DNA, 26 bp, Artificial sequence
  SiRNA target sequence
ttgaataagtttagcaatatgtatag

SEQ ID NO: 106630 - DNA, 26 bp, Artificial sequence
  SiRNA target sequence
tgaataagtttagcaatatgtataga

SEQ ID NO: 106631 - DNA, 26 bp, Artificial sequence
  SiRNA target sequence
gaataagtttagcaatatgtatagaa

SEQ ID NO: 106632 - DNA, 26 bp, Artificial sequence
  SiRNA target sequence
aataagtttagcaatatgtatagaat

SEQ ID NO: 106633 - DNA, 26 bp, Artificial sequence
  SiRNA target sequence
ataagtttagcaatatgtatagaatt

SEQ ID NO: 106634 - DNA, 26 bp, Artificial sequence
  SiRNA target sequence
taagtttagcaatatgtatagaattt

SEQ ID NO: 106635 - DNA, 26 bp, Artificial sequence
  SiRNA target sequence
aagtttagcaatatgtatagaatttc

SEQ ID NO: 106636 - DNA, 26 bp, Artificial sequence
  SiRNA target sequence
agtttagcaatatgtatagaatttcc

SEQ ID NO: 106637 - DNA, 26 bp, Artificial sequence
  SiRNA target sequence
gtttagcaatatgtatagaatttcct

SEQ ID NO: 106638 - DNA, 26 bp, Artificial sequence
  SiRNA target sequence
tttagcaatatgtatagaatttcctg

SEQ ID NO: 106639 - DNA, 26 bp, Artificial sequence
  SiRNA target sequence
ttagcaatatgtatagaatttcctgt

SEQ ID NO: 106640 - DNA, 26 bp, Artificial sequence
  SiRNA target sequence
tagcaatatgtatagaatttcctgtt

SEQ ID NO: 106641 - DNA, 26 bp, Artificial sequence
  SiRNA target sequence
agcaatatgtatagaatttcctgttt

SEQ ID NO: 106642 - DNA, 26 bp, Artificial sequence
  SiRNA target sequence
gcaatatgtatagaatttcctgtttg

SEQ ID NO: 106643 - DNA, 26 bp, Artificial sequence
  SiRNA target sequence
caatatgtatagaatttcctgtttgg

SEQ ID NO: 106644 - DNA, 26 bp, Artificial sequence
  SiRNA target sequence
aatatgtatagaatttcctgtttggg

SEQ ID NO: 106645 - DNA, 26 bp, Artificial sequence
  SiRNA target sequence
atatgtatagaatttcctgtttggga

SEQ ID NO: 106646 - DNA, 26 bp, Artificial sequence
  SiRNA target sequence
tatgtatagaatttcctgtttgggag

SEQ ID NO: 106647 - DNA, 26 bp, Artificial sequence
  SiRNA target sequence
atgtatagaatttcctgtttgggagc

SEQ ID NO: 106648 - DNA, 26 bp, Artificial sequence
  SiRNA target sequence
tgtatagaatttcctgtttgggagcc

SEQ ID NO: 106649 - DNA, 26 bp, Artificial sequence
  SiRNA target sequence
gtatagaatttcctgtttgggagcca

SEQ ID NO: 106650 - DNA, 26 bp, Artificial sequence
  SiRNA target sequence
tatagaatttcctgtttgggagccat

SEQ ID NO: 106651 - DNA, 26 bp, Artificial sequence
  SiRNA target sequence
atagaatttcctgtttgggagccata

SEQ ID NO: 106652 - DNA, 26 bp, Artificial sequence
  SiRNA target sequence
tagaatttcctgtttgggagccatat

SEQ ID NO: 106653 - DNA, 26 bp, Artificial sequence
  SiRNA target sequence
agaatttcctgtttgggagccatata

SEQ ID NO: 106654 - DNA, 26 bp, Artificial sequence
  SiRNA target sequence
gaatttcctgtttgggagccatataa

SEQ ID NO: 106655 - DNA, 26 bp, Artificial sequence
  SiRNA target sequence
aatttcctgtttgggagccatataag

SEQ ID NO: 106656 - DNA, 26 bp, Artificial sequence
  SiRNA target sequence
atttcctgtttgggagccatataaga

SEQ ID NO: 106657 - DNA, 26 bp, Artificial sequence
  SiRNA target sequence
tttcctgtttgggagccatataagat

SEQ ID NO: 106658 - DNA, 26 bp, Artificial sequence
  SiRNA target sequence
ttcctgtttgggagccatataagatt

SEQ ID NO: 106659 - DNA, 26 bp, Artificial sequence
  SiRNA target sequence
tcctgtttgggagccatataagatta

SEQ ID NO: 106660 - DNA, 26 bp, Artificial sequence
  SiRNA target sequence
cctgtttgggagccatataagattat

SEQ ID NO: 106661 - DNA, 26 bp, Artificial sequence
  SiRNA target sequence
ctgtttgggagccatataagattatc

SEQ ID NO: 106662 - DNA, 26 bp, Artificial sequence
  SiRNA target sequence
tgtttgggagccatataagattatca

SEQ ID NO: 106663 - DNA, 26 bp, Artificial sequence
  SiRNA target sequence
gtttgggagccatataagattatcat

SEQ ID NO: 106664 - DNA, 27 bp, Artificial sequence
  SiRNA target sequence
ttaccaagtttctgcctgaaaatatat

SEQ ID NO: 106665 - DNA, 27 bp, Artificial sequence
  SiRNA target sequence
taccaagtttctgcctgaaaatatatt

SEQ ID NO: 106666 - DNA, 27 bp, Artificial sequence
  SiRNA target sequence
accaagtttctgcctgaaaatatattt

SEQ ID NO: 106667 - DNA, 27 bp, Artificial sequence
  SiRNA target sequence
ccaagtttctgcctgaaaatatatttt

SEQ ID NO: 106668 - DNA, 27 bp, Artificial sequence
  SiRNA target sequence
caagtttctgcctgaaaatatattttc

SEQ ID NO: 106669 - DNA, 27 bp, Artificial sequence
  SiRNA target sequence
aagtttctgcctgaaaatatattttct

SEQ ID NO: 106670 - DNA, 27 bp, Artificial sequence
  SiRNA target sequence
agtttctgcctgaaaatatattttctt

SEQ ID NO: 106671 - DNA, 27 bp, Artificial sequence
  SiRNA target sequence
gtttctgcctgaaaatatattttcttt

SEQ ID NO: 106672 - DNA, 27 bp, Artificial sequence
  SiRNA target sequence
tttctgcctgaaaatatattttctttt

SEQ ID NO: 106673 - DNA, 27 bp, Artificial sequence
  SiRNA target sequence
ttctgcctgaaaatatattttcttttt

SEQ ID NO: 106674 - DNA, 27 bp, Artificial sequence
  SiRNA target sequence
tctgcctgaaaatatattttcttttta

SEQ ID NO: 106675 - DNA, 27 bp, Artificial sequence
  SiRNA target sequence
ctgcctgaaaatatattttctttttat

SEQ ID NO: 106676 - DNA, 27 bp, Artificial sequence
  SiRNA target sequence
tgcctgaaaatatattttctttttata

SEQ ID NO: 106677 - DNA, 27 bp, Artificial sequence
  SiRNA target sequence
gcctgaaaatatattttctttttataa

SEQ ID NO: 106678 - DNA, 27 bp, Artificial sequence
  SiRNA target sequence
cctgaaaatatattttctttttataaa

SEQ ID NO: 106679 - DNA, 27 bp, Artificial sequence
  SiRNA target sequence
ctgaaaatatattttctttttataaat

SEQ ID NO: 106680 - DNA, 27 bp, Artificial sequence
  SiRNA target sequence
tgaaaatatattttctttttataaata

SEQ ID NO: 106681 - DNA, 27 bp, Artificial sequence
  SiRNA target sequence
gaaaatatattttctttttataaatat

SEQ ID NO: 106682 - DNA, 27 bp, Artificial sequence
  SiRNA target sequence
aaaatatattttctttttataaatatc

SEQ ID NO: 106683 - DNA, 27 bp, Artificial sequence
  SiRNA target sequence
aaatatattttctttttataaatatct

SEQ ID NO: 106684 - DNA, 27 bp, Artificial sequence
  SiRNA target sequence
aatatattttctttttataaatatcta

SEQ ID NO: 106685 - DNA, 27 bp, Artificial sequence
  SiRNA target sequence
atatattttctttttataaatatctaa

SEQ ID NO: 106686 - DNA, 27 bp, Artificial sequence
  SiRNA target sequence
tatattttctttttataaatatctaat

SEQ ID NO: 106687 - DNA, 27 bp, Artificial sequence
  SiRNA target sequence
atattttctttttataaatatctaata

SEQ ID NO: 106688 - DNA, 27 bp, Artificial sequence
  SiRNA target sequence
tattttctttttataaatatctaataa

SEQ ID NO: 106689 - DNA, 27 bp, Artificial sequence
  SiRNA target sequence
attttctttttataaatatctaataac

SEQ ID NO: 106690 - DNA, 27 bp, Artificial sequence
  SiRNA target sequence
ttttctttttataaatatctaataaca

SEQ ID NO: 106691 - DNA, 27 bp, Artificial sequence
  SiRNA target sequence
tttctttttataaatatctaataacat

SEQ ID NO: 106692 - DNA, 27 bp, Artificial sequence
  SiRNA target sequence
ttctttttataaatatctaataacatt

SEQ ID NO: 106693 - DNA, 27 bp, Artificial sequence
  SiRNA target sequence
tctttttataaatatctaataacattt

SEQ ID NO: 106694 - DNA, 27 bp, Artificial sequence
  SiRNA target sequence
ctttttataaatatctaataacatttt

SEQ ID NO: 106695 - DNA, 27 bp, Artificial sequence
  SiRNA target sequence
tttttataaatatctaataacattttt

SEQ ID NO: 106696 - DNA, 27 bp, Artificial sequence
  SiRNA target sequence
ttttataaatatctaataacatttttt

SEQ ID NO: 106697 - DNA, 27 bp, Artificial sequence
  SiRNA target sequence
tttataaatatctaataacattttttc

SEQ ID NO: 106698 - DNA, 27 bp, Artificial sequence
  SiRNA target sequence
ttataaatatctaataacattttttca

SEQ ID NO: 106699 - DNA, 27 bp, Artificial sequence
  SiRNA target sequence
tataaatatctaataacattttttcaa

SEQ ID NO: 106700 - DNA, 27 bp, Artificial sequence
  SiRNA target sequence
ataaatatctaataacattttttcaat

SEQ ID NO: 106701 - DNA, 27 bp, Artificial sequence
  SiRNA target sequence
taaatatctaataacattttttcaata

SEQ ID NO: 106702 - DNA, 27 bp, Artificial sequence
  SiRNA target sequence
aaatatctaataacattttttcaataa

SEQ ID NO: 106703 - DNA, 27 bp, Artificial sequence
  SiRNA target sequence
aatatctaataacattttttcaataat

SEQ ID NO: 106704 - DNA, 27 bp, Artificial sequence
  SiRNA target sequence
atatctaataacattttttcaataata

SEQ ID NO: 106705 - DNA, 27 bp, Artificial sequence
  SiRNA target sequence
tatctaataacattttttcaataatat

SEQ ID NO: 106706 - DNA, 27 bp, Artificial sequence
  SiRNA target sequence
atctaataacattttttcaataatatt

SEQ ID NO: 106707 - DNA, 27 bp, Artificial sequence
  SiRNA target sequence
tctaataacattttttcaataatatta

SEQ ID NO: 106708 - DNA, 27 bp, Artificial sequence
  SiRNA target sequence
ctaataacattttttcaataatattat

SEQ ID NO: 106709 - DNA, 27 bp, Artificial sequence
  SiRNA target sequence
taataacattttttcaataatattatt

SEQ ID NO: 106710 - DNA, 27 bp, Artificial sequence
  SiRNA target sequence
aataacattttttcaataatattatta

SEQ ID NO: 106711 - DNA, 27 bp, Artificial sequence
  SiRNA target sequence
ataacattttttcaataatattattaa

SEQ ID NO: 106712 - DNA, 27 bp, Artificial sequence
  SiRNA target sequence
taacattttttcaataatattattaag

SEQ ID NO: 106713 - DNA, 27 bp, Artificial sequence
  SiRNA target sequence
aacattttttcaataatattattaagt

SEQ ID NO: 106714 - DNA, 27 bp, Artificial sequence
  SiRNA target sequence
acattttttcaataatattattaagtc

SEQ ID NO: 106715 - DNA, 27 bp, Artificial sequence
  SiRNA target sequence
cattttttcaataatattattaagtct

SEQ ID NO: 106716 - DNA, 27 bp, Artificial sequence
  SiRNA target sequence
attttttcaataatattattaagtcta

SEQ ID NO: 106717 - DNA, 27 bp, Artificial sequence
  SiRNA target sequence
ttttttcaataatattattaagtctag

SEQ ID NO: 106718 - DNA, 27 bp, Artificial sequence
  SiRNA target sequence
tttttcaataatattattaagtctaga

SEQ ID NO: 106719 - DNA, 27 bp, Artificial sequence
  SiRNA target sequence
ttttcaataatattattaagtctagaa

SEQ ID NO: 106720 - DNA, 27 bp, Artificial sequence
  SiRNA target sequence
tttcaataatattattaagtctagaat

SEQ ID NO: 106721 - DNA, 27 bp, Artificial sequence
  SiRNA target sequence
ttcaataatattattaagtctagaatt

SEQ ID NO: 106722 - DNA, 27 bp, Artificial sequence
  SiRNA target sequence
tcaataatattattaagtctagaattt

SEQ ID NO: 106723 - DNA, 27 bp, Artificial sequence
  SiRNA target sequence
caataatattattaagtctagaatttc

SEQ ID NO: 106724 - DNA, 27 bp, Artificial sequence
  SiRNA target sequence
aataatattattaagtctagaatttcc

SEQ ID NO: 106725 - DNA, 27 bp, Artificial sequence
  SiRNA target sequence
ataatattattaagtctagaatttcca

SEQ ID NO: 106726 - DNA, 27 bp, Artificial sequence
  SiRNA target sequence
taatattattaagtctagaatttccac

SEQ ID NO: 106727 - DNA, 27 bp, Artificial sequence
  SiRNA target sequence
aatattattaagtctagaatttccact

SEQ ID NO: 106728 - DNA, 27 bp, Artificial sequence
  SiRNA target sequence
atattattaagtctagaatttccactt

SEQ ID NO: 106729 - DNA, 27 bp, Artificial sequence
  SiRNA target sequence
tattattaagtctagaatttccactta

SEQ ID NO: 106730 - DNA, 27 bp, Artificial sequence
  SiRNA target sequence
attattaagtctagaatttccacttac

SEQ ID NO: 106731 - DNA, 27 bp, Artificial sequence
  SiRNA target sequence
ttattaagtctagaatttccacttaca

SEQ ID NO: 106732 - DNA, 27 bp, Artificial sequence
  SiRNA target sequence
tattaagtctagaatttccacttacaa

SEQ ID NO: 106733 - DNA, 27 bp, Artificial sequence
  SiRNA target sequence
attaagtctagaatttccacttacaaa

SEQ ID NO: 106734 - DNA, 27 bp, Artificial sequence
  SiRNA target sequence
ttaagtctagaatttccacttacaaat

SEQ ID NO: 106735 - DNA, 27 bp, Artificial sequence
  SiRNA target sequence
taagtctagaatttccacttacaaata

SEQ ID NO: 106736 - DNA, 27 bp, Artificial sequence
  SiRNA target sequence
aagtctagaatttccacttacaaatat

SEQ ID NO: 106737 - DNA, 27 bp, Artificial sequence
  SiRNA target sequence
agtctagaatttccacttacaaatatt

SEQ ID NO: 106738 - DNA, 27 bp, Artificial sequence
  SiRNA target sequence
gtctagaatttccacttacaaatatta

SEQ ID NO: 106739 - DNA, 27 bp, Artificial sequence
  SiRNA target sequence
tctagaatttccacttacaaatattaa

SEQ ID NO: 106740 - DNA, 27 bp, Artificial sequence
  SiRNA target sequence
ctagaatttccacttacaaatattaac

SEQ ID NO: 106741 - DNA, 27 bp, Artificial sequence
  SiRNA target sequence
tagaatttccacttacaaatattaacc

SEQ ID NO: 106742 - DNA, 27 bp, Artificial sequence
  SiRNA target sequence
agaatttccacttacaaatattaacca

SEQ ID NO: 106743 - DNA, 27 bp, Artificial sequence
  SiRNA target sequence
gaatttccacttacaaatattaaccaa

SEQ ID NO: 106744 - DNA, 27 bp, Artificial sequence
  SiRNA target sequence
aatttccacttacaaatattaaccaat

SEQ ID NO: 106745 - DNA, 27 bp, Artificial sequence
  SiRNA target sequence
atttccacttacaaatattaaccaatc

SEQ ID NO: 106746 - DNA, 27 bp, Artificial sequence
  SiRNA target sequence
tttccacttacaaatattaaccaatca

SEQ ID NO: 106747 - DNA, 27 bp, Artificial sequence
  SiRNA target sequence
ttccacttacaaatattaaccaatcat

SEQ ID NO: 106748 - DNA, 27 bp, Artificial sequence
  SiRNA target sequence
tccacttacaaatattaaccaatcatc

SEQ ID NO: 106749 - DNA, 27 bp, Artificial sequence
  SiRNA target sequence
ccacttacaaatattaaccaatcatca

SEQ ID NO: 106750 - DNA, 27 bp, Artificial sequence
  SiRNA target sequence
cacttacaaatattaaccaatcatcaa

SEQ ID NO: 106751 - DNA, 27 bp, Artificial sequence
  SiRNA target sequence
acttacaaatattaaccaatcatcaat

SEQ ID NO: 106752 - DNA, 27 bp, Artificial sequence
  SiRNA target sequence
cttacaaatattaaccaatcatcaata

SEQ ID NO: 106753 - DNA, 27 bp, Artificial sequence
  SiRNA target sequence
ttacaaatattaaccaatcatcaatat

SEQ ID NO: 106754 - DNA, 27 bp, Artificial sequence
  SiRNA target sequence
tacaaatattaaccaatcatcaatatt

SEQ ID NO: 106755 - DNA, 27 bp, Artificial sequence
  SiRNA target sequence
acaaatattaaccaatcatcaatattt

SEQ ID NO: 106756 - DNA, 27 bp, Artificial sequence
  SiRNA target sequence
caaatattaaccaatcatcaatatttt

SEQ ID NO: 106757 - DNA, 27 bp, Artificial sequence
  SiRNA target sequence
aaatattaaccaatcatcaatattttc

SEQ ID NO: 106758 - DNA, 27 bp, Artificial sequence
  SiRNA target sequence
aatattaaccaatcatcaatattttct

SEQ ID NO: 106759 - DNA, 27 bp, Artificial sequence
  SiRNA target sequence
atattaaccaatcatcaatattttcta

SEQ ID NO: 106760 - DNA, 27 bp, Artificial sequence
  SiRNA target sequence
tattaaccaatcatcaatattttctag

SEQ ID NO: 106761 - DNA, 27 bp, Artificial sequence
  SiRNA target sequence
attaaccaatcatcaatattttctagc

SEQ ID NO: 106762 - DNA, 27 bp, Artificial sequence
  SiRNA target sequence
ttaaccaatcatcaatattttctagcc

SEQ ID NO: 106763 - DNA, 27 bp, Artificial sequence
  SiRNA target sequence
taaccaatcatcaatattttctagccc

SEQ ID NO: 106764 - DNA, 27 bp, Artificial sequence
  SiRNA target sequence
aaccaatcatcaatattttctagccct

SEQ ID NO: 106765 - DNA, 27 bp, Artificial sequence
  SiRNA target sequence
accaatcatcaatattttctagccctt

SEQ ID NO: 106766 - DNA, 27 bp, Artificial sequence
  SiRNA target sequence
ccaatcatcaatattttctagcccttt

SEQ ID NO: 106767 - DNA, 27 bp, Artificial sequence
  SiRNA target sequence
caatcatcaatattttctagccctttt

SEQ ID NO: 106768 - DNA, 27 bp, Artificial sequence
  SiRNA target sequence
aatcatcaatattttctagccctttta

SEQ ID NO: 106769 - DNA, 27 bp, Artificial sequence
  SiRNA target sequence
atcatcaatattttctagcccttttat

SEQ ID NO: 106770 - DNA, 27 bp, Artificial sequence
  SiRNA target sequence
tcatcaatattttctagcccttttata

SEQ ID NO: 106771 - DNA, 27 bp, Artificial sequence
  SiRNA target sequence
catcaatattttctagcccttttatag

SEQ ID NO: 106772 - DNA, 27 bp, Artificial sequence
  SiRNA target sequence
atcaatattttctagcccttttatagt

SEQ ID NO: 106773 - DNA, 27 bp, Artificial sequence
  SiRNA target sequence
tcaatattttctagcccttttatagtc

SEQ ID NO: 106774 - DNA, 27 bp, Artificial sequence
  SiRNA target sequence
caatattttctagcccttttatagtct

SEQ ID NO: 106775 - DNA, 27 bp, Artificial sequence
  SiRNA target sequence
aatattttctagcccttttatagtctt

SEQ ID NO: 106776 - DNA, 27 bp, Artificial sequence
  SiRNA target sequence
atattttctagcccttttatagtctta

SEQ ID NO: 106777 - DNA, 27 bp, Artificial sequence
  SiRNA target sequence
tattttctagcccttttatagtcttat

SEQ ID NO: 106778 - DNA, 27 bp, Artificial sequence
  SiRNA target sequence
attttctagcccttttatagtcttata

SEQ ID NO: 106779 - DNA, 27 bp, Artificial sequence
  SiRNA target sequence
ttttctagcccttttatagtcttataa

SEQ ID NO: 106780 - DNA, 27 bp, Artificial sequence
  SiRNA target sequence
tttctagcccttttatagtcttataaa

SEQ ID NO: 106781 - DNA, 27 bp, Artificial sequence
  SiRNA target sequence
ttctagcccttttatagtcttataaat

SEQ ID NO: 106782 - DNA, 27 bp, Artificial sequence
  SiRNA target sequence
tctagcccttttatagtcttataaata

SEQ ID NO: 106783 - DNA, 27 bp, Artificial sequence
  SiRNA target sequence
ctagcccttttatagtcttataaatat

SEQ ID NO: 106784 - DNA, 27 bp, Artificial sequence
  SiRNA target sequence
tagcccttttatagtcttataaatatc

SEQ ID NO: 106785 - DNA, 27 bp, Artificial sequence
  SiRNA target sequence
agcccttttatagtcttataaatatct

SEQ ID NO: 106786 - DNA, 27 bp, Artificial sequence
  SiRNA target sequence
gcccttttatagtcttataaatatctt

SEQ ID NO: 106787 - DNA, 27 bp, Artificial sequence
  SiRNA target sequence
cccttttatagtcttataaatatcttg

SEQ ID NO: 106788 - DNA, 27 bp, Artificial sequence
  SiRNA target sequence
ccttttatagtcttataaatatcttgt

SEQ ID NO: 106789 - DNA, 27 bp, Artificial sequence
  SiRNA target sequence
cttttatagtcttataaatatcttgta

SEQ ID NO: 106790 - DNA, 27 bp, Artificial sequence
  SiRNA target sequence
ttttatagtcttataaatatcttgtat

SEQ ID NO: 106791 - DNA, 27 bp, Artificial sequence
  SiRNA target sequence
tttatagtcttataaatatcttgtatg

SEQ ID NO: 106792 - DNA, 27 bp, Artificial sequence
  SiRNA target sequence
ttatagtcttataaatatcttgtatgt

SEQ ID NO: 106793 - DNA, 27 bp, Artificial sequence
  SiRNA target sequence
tatagtcttataaatatcttgtatgta

SEQ ID NO: 106794 - DNA, 27 bp, Artificial sequence
  SiRNA target sequence
atagtcttataaatatcttgtatgtat

SEQ ID NO: 106795 - DNA, 27 bp, Artificial sequence
  SiRNA target sequence
tagtcttataaatatcttgtatgtatt

SEQ ID NO: 106796 - DNA, 27 bp, Artificial sequence
  SiRNA target sequence
agtcttataaatatcttgtatgtattt

SEQ ID NO: 106797 - DNA, 27 bp, Artificial sequence
  SiRNA target sequence
gtcttataaatatcttgtatgtattta

SEQ ID NO: 106798 - DNA, 27 bp, Artificial sequence
  SiRNA target sequence
tcttataaatatcttgtatgtatttat

SEQ ID NO: 106799 - DNA, 27 bp, Artificial sequence
  SiRNA target sequence
cttataaatatcttgtatgtatttatt

SEQ ID NO: 106800 - DNA, 27 bp, Artificial sequence
  SiRNA target sequence
ttataaatatcttgtatgtatttatta

SEQ ID NO: 106801 - DNA, 27 bp, Artificial sequence
  SiRNA target sequence
tataaatatcttgtatgtatttattat

SEQ ID NO: 106802 - DNA, 27 bp, Artificial sequence
  SiRNA target sequence
ataaatatcttgtatgtatttattatc

SEQ ID NO: 106803 - DNA, 27 bp, Artificial sequence
  SiRNA target sequence
taaatatcttgtatgtatttattatct

SEQ ID NO: 106804 - DNA, 27 bp, Artificial sequence
  SiRNA target sequence
aaatatcttgtatgtatttattatctt

SEQ ID NO: 106805 - DNA, 27 bp, Artificial sequence
  SiRNA target sequence
aatatcttgtatgtatttattatcttc

SEQ ID NO: 106806 - DNA, 27 bp, Artificial sequence
  SiRNA target sequence
atatcttgtatgtatttattatcttcc

SEQ ID NO: 106807 - DNA, 27 bp, Artificial sequence
  SiRNA target sequence
tatcttgtatgtatttattatcttccc

SEQ ID NO: 106808 - DNA, 27 bp, Artificial sequence
  SiRNA target sequence
atcttgtatgtatttattatcttccct

SEQ ID NO: 106809 - DNA, 27 bp, Artificial sequence
  SiRNA target sequence
tcttgtatgtatttattatcttccctt

SEQ ID NO: 106810 - DNA, 27 bp, Artificial sequence
  SiRNA target sequence
cttgtatgtatttattatcttcccttg

SEQ ID NO: 106811 - DNA, 27 bp, Artificial sequence
  SiRNA target sequence
ttgtatgtatttattatcttcccttga

SEQ ID NO: 106812 - DNA, 27 bp, Artificial sequence
  SiRNA target sequence
tgtatgtatttattatcttcccttgaa

SEQ ID NO: 106813 - DNA, 27 bp, Artificial sequence
  SiRNA target sequence
gtatgtatttattatcttcccttgaaa

SEQ ID NO: 106814 - DNA, 27 bp, Artificial sequence
  SiRNA target sequence
tatgtatttattatcttcccttgaaac

SEQ ID NO: 106815 - DNA, 27 bp, Artificial sequence
  SiRNA target sequence
atgtatttattatcttcccttgaaaca

SEQ ID NO: 106816 - DNA, 27 bp, Artificial sequence
  SiRNA target sequence
tgtatttattatcttcccttgaaacag

SEQ ID NO: 106817 - DNA, 27 bp, Artificial sequence
  SiRNA target sequence
gtatttattatcttcccttgaaacagc

SEQ ID NO: 106818 - DNA, 27 bp, Artificial sequence
  SiRNA target sequence
tatttattatcttcccttgaaacagcg

SEQ ID NO: 106819 - DNA, 27 bp, Artificial sequence
  SiRNA target sequence
atttattatcttcccttgaaacagcgg

SEQ ID NO: 106820 - DNA, 27 bp, Artificial sequence
  SiRNA target sequence
tttattatcttcccttgaaacagcggg

SEQ ID NO: 106821 - DNA, 27 bp, Artificial sequence
  SiRNA target sequence
ttattatcttcccttgaaacagcgggg

SEQ ID NO: 106822 - DNA, 27 bp, Artificial sequence
  SiRNA target sequence
tattatcttcccttgaaacagcggggt

SEQ ID NO: 106823 - DNA, 27 bp, Artificial sequence
  SiRNA target sequence
attatcttcccttgaaacagcggggta

SEQ ID NO: 106824 - DNA, 27 bp, Artificial sequence
  SiRNA target sequence
ttatcttcccttgaaacagcggggtaa

SEQ ID NO: 106825 - DNA, 27 bp, Artificial sequence
  SiRNA target sequence
tatcttcccttgaaacagcggggtaaa

SEQ ID NO: 106826 - DNA, 27 bp, Artificial sequence
  SiRNA target sequence
atcttcccttgaaacagcggggtaaat

SEQ ID NO: 106827 - DNA, 27 bp, Artificial sequence
  SiRNA target sequence
tcttcccttgaaacagcggggtaaatt

SEQ ID NO: 106828 - DNA, 27 bp, Artificial sequence
  SiRNA target sequence
cttcccttgaaacagcggggtaaattt

SEQ ID NO: 106829 - DNA, 27 bp, Artificial sequence
  SiRNA target sequence
ttcccttgaaacagcggggtaaatttc

SEQ ID NO: 106830 - DNA, 27 bp, Artificial sequence
  SiRNA target sequence
tcccttgaaacagcggggtaaatttca

SEQ ID NO: 106831 - DNA, 27 bp, Artificial sequence
  SiRNA target sequence
cccttgaaacagcggggtaaatttcaa

SEQ ID NO: 106832 - DNA, 27 bp, Artificial sequence
  SiRNA target sequence
ccttgaaacagcggggtaaatttcaat

SEQ ID NO: 106833 - DNA, 27 bp, Artificial sequence
  SiRNA target sequence
cttgaaacagcggggtaaatttcaatg

SEQ ID NO: 106834 - DNA, 27 bp, Artificial sequence
  SiRNA target sequence
ttgaaacagcggggtaaatttcaatgc

SEQ ID NO: 106835 - DNA, 27 bp, Artificial sequence
  SiRNA target sequence
tgaaacagcggggtaaatttcaatgcc

SEQ ID NO: 106836 - DNA, 27 bp, Artificial sequence
  SiRNA target sequence
gaaacagcggggtaaatttcaatgcct

SEQ ID NO: 106837 - DNA, 27 bp, Artificial sequence
  SiRNA target sequence
aaacagcggggtaaatttcaatgcctt

SEQ ID NO: 106838 - DNA, 27 bp, Artificial sequence
  SiRNA target sequence
aacagcggggtaaatttcaatgccttt

SEQ ID NO: 106839 - DNA, 27 bp, Artificial sequence
  SiRNA target sequence
acagcggggtaaatttcaatgccttta

SEQ ID NO: 106840 - DNA, 27 bp, Artificial sequence
  SiRNA target sequence
cagcggggtaaatttcaatgcctttat

SEQ ID NO: 106841 - DNA, 27 bp, Artificial sequence
  SiRNA target sequence
agcggggtaaatttcaatgcctttatt

SEQ ID NO: 106842 - DNA, 27 bp, Artificial sequence
  SiRNA target sequence
gcggggtaaatttcaatgcctttattt

SEQ ID NO: 106843 - DNA, 27 bp, Artificial sequence
  SiRNA target sequence
cggggtaaatttcaatgcctttatttt

SEQ ID NO: 106844 - DNA, 27 bp, Artificial sequence
  SiRNA target sequence
ggggtaaatttcaatgcctttattttc

SEQ ID NO: 106845 - DNA, 27 bp, Artificial sequence
  SiRNA target sequence
gggtaaatttcaatgcctttattttca

SEQ ID NO: 106846 - DNA, 27 bp, Artificial sequence
  SiRNA target sequence
ggtaaatttcaatgcctttattttcaa

SEQ ID NO: 106847 - DNA, 27 bp, Artificial sequence
  SiRNA target sequence
gtaaatttcaatgcctttattttcaaa

SEQ ID NO: 106848 - DNA, 27 bp, Artificial sequence
  SiRNA target sequence
taaatttcaatgcctttattttcaaac

SEQ ID NO: 106849 - DNA, 27 bp, Artificial sequence
  SiRNA target sequence
aaatttcaatgcctttattttcaaact

SEQ ID NO: 106850 - DNA, 27 bp, Artificial sequence
  SiRNA target sequence
aatttcaatgcctttattttcaaactc

SEQ ID NO: 106851 - DNA, 27 bp, Artificial sequence
  SiRNA target sequence
atttcaatgcctttattttcaaactct

SEQ ID NO: 106852 - DNA, 27 bp, Artificial sequence
  SiRNA target sequence
tttcaatgcctttattttcaaactctt

SEQ ID NO: 106853 - DNA, 27 bp, Artificial sequence
  SiRNA target sequence
ttcaatgcctttattttcaaactcttc

SEQ ID NO: 106854 - DNA, 27 bp, Artificial sequence
  SiRNA target sequence
tcaatgcctttattttcaaactcttct

SEQ ID NO: 106855 - DNA, 27 bp, Artificial sequence
  SiRNA target sequence
caatgcctttattttcaaactcttctt

SEQ ID NO: 106856 - DNA, 27 bp, Artificial sequence
  SiRNA target sequence
aatgcctttattttcaaactcttcttt

SEQ ID NO: 106857 - DNA, 27 bp, Artificial sequence
  SiRNA target sequence
atgcctttattttcaaactcttcttta

SEQ ID NO: 106858 - DNA, 27 bp, Artificial sequence
  SiRNA target sequence
tgcctttattttcaaactcttctttat

SEQ ID NO: 106859 - DNA, 27 bp, Artificial sequence
  SiRNA target sequence
gcctttattttcaaactcttctttata

SEQ ID NO: 106860 - DNA, 27 bp, Artificial sequence
  SiRNA target sequence
cctttattttcaaactcttctttatat

SEQ ID NO: 106861 - DNA, 27 bp, Artificial sequence
  SiRNA target sequence
ctttattttcaaactcttctttatata

SEQ ID NO: 106862 - DNA, 27 bp, Artificial sequence
  SiRNA target sequence
tttattttcaaactcttctttatataa

SEQ ID NO: 106863 - DNA, 27 bp, Artificial sequence
  SiRNA target sequence
ttattttcaaactcttctttatataaa

SEQ ID NO: 106864 - DNA, 27 bp, Artificial sequence
  SiRNA target sequence
tattttcaaactcttctttatataaaa

SEQ ID NO: 106865 - DNA, 27 bp, Artificial sequence
  SiRNA target sequence
attttcaaactcttctttatataaaaa

SEQ ID NO: 106866 - DNA, 27 bp, Artificial sequence
  SiRNA target sequence
ttttcaaactcttctttatataaaaaa

SEQ ID NO: 106867 - DNA, 27 bp, Artificial sequence
  SiRNA target sequence
tttcaaactcttctttatataaaaaat

SEQ ID NO: 106868 - DNA, 27 bp, Artificial sequence
  SiRNA target sequence
ttcaaactcttctttatataaaaaatc

SEQ ID NO: 106869 - DNA, 27 bp, Artificial sequence
  SiRNA target sequence
tcaaactcttctttatataaaaaatct

SEQ ID NO: 106870 - DNA, 27 bp, Artificial sequence
  SiRNA target sequence
caaactcttctttatataaaaaatcta

SEQ ID NO: 106871 - DNA, 27 bp, Artificial sequence
  SiRNA target sequence
aaactcttctttatataaaaaatctac

SEQ ID NO: 106872 - DNA, 27 bp, Artificial sequence
  SiRNA target sequence
aactcttctttatataaaaaatctaca

SEQ ID NO: 106873 - DNA, 27 bp, Artificial sequence
  SiRNA target sequence
actcttctttatataaaaaatctacat

SEQ ID NO: 106874 - DNA, 27 bp, Artificial sequence
  SiRNA target sequence
ctcttctttatataaaaaatctacatc

SEQ ID NO: 106875 - DNA, 27 bp, Artificial sequence
  SiRNA target sequence
tcttctttatataaaaaatctacatct

SEQ ID NO: 106876 - DNA, 27 bp, Artificial sequence
  SiRNA target sequence
cttctttatataaaaaatctacatctc

SEQ ID NO: 106877 - DNA, 27 bp, Artificial sequence
  SiRNA target sequence
ttctttatataaaaaatctacatctct

SEQ ID NO: 106878 - DNA, 27 bp, Artificial sequence
  SiRNA target sequence
tctttatataaaaaatctacatctcta

SEQ ID NO: 106879 - DNA, 27 bp, Artificial sequence
  SiRNA target sequence
ctttatataaaaaatctacatctctaa

SEQ ID NO: 106880 - DNA, 27 bp, Artificial sequence
  SiRNA target sequence
tttatataaaaaatctacatctctaaa

SEQ ID NO: 106881 - DNA, 27 bp, Artificial sequence
  SiRNA target sequence
ttatataaaaaatctacatctctaaat

SEQ ID NO: 106882 - DNA, 27 bp, Artificial sequence
  SiRNA target sequence
tatataaaaaatctacatctctaaatc

SEQ ID NO: 106883 - DNA, 27 bp, Artificial sequence
  SiRNA target sequence
atataaaaaatctacatctctaaatct

SEQ ID NO: 106884 - DNA, 27 bp, Artificial sequence
  SiRNA target sequence
tataaaaaatctacatctctaaatcta

SEQ ID NO: 106885 - DNA, 27 bp, Artificial sequence
  SiRNA target sequence
ataaaaaatctacatctctaaatctaa

SEQ ID NO: 106886 - DNA, 27 bp, Artificial sequence
  SiRNA target sequence
taaaaaatctacatctctaaatctaaa

SEQ ID NO: 106887 - DNA, 27 bp, Artificial sequence
  SiRNA target sequence
aaaaaatctacatctctaaatctaaaa

SEQ ID NO: 106888 - DNA, 27 bp, Artificial sequence
  SiRNA target sequence
aaaaatctacatctctaaatctaaaac

SEQ ID NO: 106889 - DNA, 27 bp, Artificial sequence
  SiRNA target sequence
aaaatctacatctctaaatctaaaacc

SEQ ID NO: 106890 - DNA, 27 bp, Artificial sequence
  SiRNA target sequence
aaatctacatctctaaatctaaaacca

SEQ ID NO: 106891 - DNA, 27 bp, Artificial sequence
  SiRNA target sequence
aatctacatctctaaatctaaaaccat

SEQ ID NO: 106892 - DNA, 27 bp, Artificial sequence
  SiRNA target sequence
atctacatctctaaatctaaaaccata

SEQ ID NO: 106893 - DNA, 27 bp, Artificial sequence
  SiRNA target sequence
tctacatctctaaatctaaaaccatat

SEQ ID NO: 106894 - DNA, 27 bp, Artificial sequence
  SiRNA target sequence
ctacatctctaaatctaaaaccatata

SEQ ID NO: 106895 - DNA, 27 bp, Artificial sequence
  SiRNA target sequence
tacatctctaaatctaaaaccatataa

SEQ ID NO: 106896 - DNA, 27 bp, Artificial sequence
  SiRNA target sequence
acatctctaaatctaaaaccatataat

SEQ ID NO: 106897 - DNA, 27 bp, Artificial sequence
  SiRNA target sequence
catctctaaatctaaaaccatataata

SEQ ID NO: 106898 - DNA, 27 bp, Artificial sequence
  SiRNA target sequence
atctctaaatctaaaaccatataataa

SEQ ID NO: 106899 - DNA, 27 bp, Artificial sequence
  SiRNA target sequence
tctctaaatctaaaaccatataataaa

SEQ ID NO: 106900 - DNA, 27 bp, Artificial sequence
  SiRNA target sequence
ctctaaatctaaaaccatataataaaa

SEQ ID NO: 106901 - DNA, 27 bp, Artificial sequence
  SiRNA target sequence
tctaaatctaaaaccatataataaaat

SEQ ID NO: 106902 - DNA, 27 bp, Artificial sequence
  SiRNA target sequence
ctaaatctaaaaccatataataaaata

SEQ ID NO: 106903 - DNA, 27 bp, Artificial sequence
  SiRNA target sequence
taaatctaaaaccatataataaaataa

SEQ ID NO: 106904 - DNA, 27 bp, Artificial sequence
  SiRNA target sequence
aaatctaaaaccatataataaaataac

SEQ ID NO: 106905 - DNA, 27 bp, Artificial sequence
  SiRNA target sequence
aatctaaaaccatataataaaataact

SEQ ID NO: 106906 - DNA, 27 bp, Artificial sequence
  SiRNA target sequence
atctaaaaccatataataaaataactt

SEQ ID NO: 106907 - DNA, 27 bp, Artificial sequence
  SiRNA target sequence
tctaaaaccatataataaaataacttt

SEQ ID NO: 106908 - DNA, 27 bp, Artificial sequence
  SiRNA target sequence
ctaaaaccatataataaaataactttt

SEQ ID NO: 106909 - DNA, 27 bp, Artificial sequence
  SiRNA target sequence
taaaaccatataataaaataacttttt

SEQ ID NO: 106910 - DNA, 27 bp, Artificial sequence
  SiRNA target sequence
aaaaccatataataaaataactttttt

SEQ ID NO: 106911 - DNA, 27 bp, Artificial sequence
  SiRNA target sequence
aaaccatataataaaataactttttta

SEQ ID NO: 106912 - DNA, 27 bp, Artificial sequence
  SiRNA target sequence
aaccatataataaaataacttttttaa

SEQ ID NO: 106913 - DNA, 27 bp, Artificial sequence
  SiRNA target sequence
accatataataaaataacttttttaaa

SEQ ID NO: 106914 - DNA, 27 bp, Artificial sequence
  SiRNA target sequence
ccatataataaaataacttttttaaaa

SEQ ID NO: 106915 - DNA, 27 bp, Artificial sequence
  SiRNA target sequence
catataataaaataacttttttaaaaa

SEQ ID NO: 106916 - DNA, 27 bp, Artificial sequence
  SiRNA target sequence
atataataaaataacttttttaaaaaa

SEQ ID NO: 106917 - DNA, 27 bp, Artificial sequence
  SiRNA target sequence
tataataaaataacttttttaaaaaaa

SEQ ID NO: 106918 - DNA, 27 bp, Artificial sequence
  SiRNA target sequence
ataataaaataacttttttaaaaaaat

SEQ ID NO: 106919 - DNA, 27 bp, Artificial sequence
  SiRNA target sequence
taataaaataacttttttaaaaaaatt

SEQ ID NO: 106920 - DNA, 27 bp, Artificial sequence
  SiRNA target sequence
aataaaataacttttttaaaaaaattt

SEQ ID NO: 106921 - DNA, 27 bp, Artificial sequence
  SiRNA target sequence
ataaaataacttttttaaaaaaattta

SEQ ID NO: 106922 - DNA, 27 bp, Artificial sequence
  SiRNA target sequence
taaaataacttttttaaaaaaatttaa

SEQ ID NO: 106923 - DNA, 27 bp, Artificial sequence
  SiRNA target sequence
aaaataacttttttaaaaaaatttaaa

SEQ ID NO: 106924 - DNA, 27 bp, Artificial sequence
  SiRNA target sequence
aaataacttttttaaaaaaatttaaat

SEQ ID NO: 106925 - DNA, 27 bp, Artificial sequence
  SiRNA target sequence
aataacttttttaaaaaaatttaaatc

SEQ ID NO: 106926 - DNA, 27 bp, Artificial sequence
  SiRNA target sequence
ataacttttttaaaaaaatttaaatca

SEQ ID NO: 106927 - DNA, 27 bp, Artificial sequence
  SiRNA target sequence
taacttttttaaaaaaatttaaatcag

SEQ ID NO: 106928 - DNA, 27 bp, Artificial sequence
  SiRNA target sequence
aacttttttaaaaaaatttaaatcaga

SEQ ID NO: 106929 - DNA, 27 bp, Artificial sequence
  SiRNA target sequence
acttttttaaaaaaatttaaatcagaa

SEQ ID NO: 106930 - DNA, 27 bp, Artificial sequence
  SiRNA target sequence
cttttttaaaaaaatttaaatcagaat

SEQ ID NO: 106931 - DNA, 27 bp, Artificial sequence
  SiRNA target sequence
ttttttaaaaaaatttaaatcagaata

SEQ ID NO: 106932 - DNA, 27 bp, Artificial sequence
  SiRNA target sequence
tttttaaaaaaatttaaatcagaatag

SEQ ID NO: 106933 - DNA, 27 bp, Artificial sequence
  SiRNA target sequence
ttttaaaaaaatttaaatcagaatagt

SEQ ID NO: 106934 - DNA, 27 bp, Artificial sequence
  SiRNA target sequence
tttaaaaaaatttaaatcagaatagta

SEQ ID NO: 106935 - DNA, 27 bp, Artificial sequence
  SiRNA target sequence
ttaaaaaaatttaaatcagaatagtaa

SEQ ID NO: 106936 - DNA, 27 bp, Artificial sequence
  SiRNA target sequence
taaaaaaatttaaatcagaatagtaat

SEQ ID NO: 106937 - DNA, 27 bp, Artificial sequence
  SiRNA target sequence
aaaaaaatttaaatcagaatagtaatt

SEQ ID NO: 106938 - DNA, 27 bp, Artificial sequence
  SiRNA target sequence
aaaaaatttaaatcagaatagtaatta

SEQ ID NO: 106939 - DNA, 27 bp, Artificial sequence
  SiRNA target sequence
aaaaatttaaatcagaatagtaattaa

SEQ ID NO: 106940 - DNA, 27 bp, Artificial sequence
  SiRNA target sequence
aaaatttaaatcagaatagtaattaac

SEQ ID NO: 106941 - DNA, 27 bp, Artificial sequence
  SiRNA target sequence
aaatttaaatcagaatagtaattaaca

SEQ ID NO: 106942 - DNA, 27 bp, Artificial sequence
  SiRNA target sequence
aatttaaatcagaatagtaattaacaa

SEQ ID NO: 106943 - DNA, 27 bp, Artificial sequence
  SiRNA target sequence
atttaaatcagaatagtaattaacaaa

SEQ ID NO: 106944 - DNA, 27 bp, Artificial sequence
  SiRNA target sequence
tttaaatcagaatagtaattaacaaat

SEQ ID NO: 106945 - DNA, 27 bp, Artificial sequence
  SiRNA target sequence
ttaaatcagaatagtaattaacaaatg

SEQ ID NO: 106946 - DNA, 27 bp, Artificial sequence
  SiRNA target sequence
taaatcagaatagtaattaacaaatgc

SEQ ID NO: 106947 - DNA, 27 bp, Artificial sequence
  SiRNA target sequence
aaatcagaatagtaattaacaaatgcc

SEQ ID NO: 106948 - DNA, 27 bp, Artificial sequence
  SiRNA target sequence
aatcagaatagtaattaacaaatgccc

SEQ ID NO: 106949 - DNA, 27 bp, Artificial sequence
  SiRNA target sequence
atcagaatagtaattaacaaatgccct

SEQ ID NO: 106950 - DNA, 27 bp, Artificial sequence
  SiRNA target sequence
tcagaatagtaattaacaaatgccctg

SEQ ID NO: 106951 - DNA, 27 bp, Artificial sequence
  SiRNA target sequence
cagaatagtaattaacaaatgccctgg

SEQ ID NO: 106952 - DNA, 27 bp, Artificial sequence
  SiRNA target sequence
agaatagtaattaacaaatgccctggg

SEQ ID NO: 106953 - DNA, 27 bp, Artificial sequence
  SiRNA target sequence
gaatagtaattaacaaatgccctggga

SEQ ID NO: 106954 - DNA, 27 bp, Artificial sequence
  SiRNA target sequence
aatagtaattaacaaatgccctgggaa

SEQ ID NO: 106955 - DNA, 27 bp, Artificial sequence
  SiRNA target sequence
atagtaattaacaaatgccctgggaag

SEQ ID NO: 106956 - DNA, 27 bp, Artificial sequence
  SiRNA target sequence
tagtaattaacaaatgccctgggaagt

SEQ ID NO: 106957 - DNA, 27 bp, Artificial sequence
  SiRNA target sequence
agtaattaacaaatgccctgggaagtg

SEQ ID NO: 106958 - DNA, 27 bp, Artificial sequence
  SiRNA target sequence
gtaattaacaaatgccctgggaagtgt

SEQ ID NO: 106959 - DNA, 27 bp, Artificial sequence
  SiRNA target sequence
taattaacaaatgccctgggaagtgta

SEQ ID NO: 106960 - DNA, 27 bp, Artificial sequence
  SiRNA target sequence
aattaacaaatgccctgggaagtgtaa

SEQ ID NO: 106961 - DNA, 27 bp, Artificial sequence
  SiRNA target sequence
attaacaaatgccctgggaagtgtaat

SEQ ID NO: 106962 - DNA, 27 bp, Artificial sequence
  SiRNA target sequence
ttaacaaatgccctgggaagtgtaata

SEQ ID NO: 106963 - DNA, 27 bp, Artificial sequence
  SiRNA target sequence
taacaaatgccctgggaagtgtaatac

SEQ ID NO: 106964 - DNA, 27 bp, Artificial sequence
  SiRNA target sequence
aacaaatgccctgggaagtgtaatacc

SEQ ID NO: 106965 - DNA, 27 bp, Artificial sequence
  SiRNA target sequence
acaaatgccctgggaagtgtaatacca

SEQ ID NO: 106966 - DNA, 27 bp, Artificial sequence
  SiRNA target sequence
caaatgccctgggaagtgtaataccag

SEQ ID NO: 106967 - DNA, 27 bp, Artificial sequence
  SiRNA target sequence
aaatgccctgggaagtgtaataccagt

SEQ ID NO: 106968 - DNA, 27 bp, Artificial sequence
  SiRNA target sequence
aatgccctgggaagtgtaataccagta

SEQ ID NO: 106969 - DNA, 27 bp, Artificial sequence
  SiRNA target sequence
atgccctgggaagtgtaataccagtac

SEQ ID NO: 106970 - DNA, 27 bp, Artificial sequence
  SiRNA target sequence
tgccctgggaagtgtaataccagtacc

SEQ ID NO: 106971 - DNA, 27 bp, Artificial sequence
  SiRNA target sequence
gccctgggaagtgtaataccagtacca

SEQ ID NO: 106972 - DNA, 27 bp, Artificial sequence
  SiRNA target sequence
ccctgggaagtgtaataccagtaccag

SEQ ID NO: 106973 - DNA, 27 bp, Artificial sequence
  SiRNA target sequence
cctgggaagtgtaataccagtaccagt

SEQ ID NO: 106974 - DNA, 27 bp, Artificial sequence
  SiRNA target sequence
ctgggaagtgtaataccagtaccagtg

SEQ ID NO: 106975 - DNA, 27 bp, Artificial sequence
  SiRNA target sequence
tgggaagtgtaataccagtaccagtgc

SEQ ID NO: 106976 - DNA, 27 bp, Artificial sequence
  SiRNA target sequence
gggaagtgtaataccagtaccagtgca

SEQ ID NO: 106977 - DNA, 27 bp, Artificial sequence
  SiRNA target sequence
ggaagtgtaataccagtaccagtgcac

SEQ ID NO: 106978 - DNA, 27 bp, Artificial sequence
  SiRNA target sequence
gaagtgtaataccagtaccagtgcaca

SEQ ID NO: 106979 - DNA, 27 bp, Artificial sequence
  SiRNA target sequence
aagtgtaataccagtaccagtgcacat

SEQ ID NO: 106980 - DNA, 27 bp, Artificial sequence
  SiRNA target sequence
agtgtaataccagtaccagtgcacata

SEQ ID NO: 106981 - DNA, 27 bp, Artificial sequence
  SiRNA target sequence
gtgtaataccagtaccagtgcacataa

SEQ ID NO: 106982 - DNA, 27 bp, Artificial sequence
  SiRNA target sequence
tgtaataccagtaccagtgcacataaa

SEQ ID NO: 106983 - DNA, 27 bp, Artificial sequence
  SiRNA target sequence
gtaataccagtaccagtgcacataaac

SEQ ID NO: 106984 - DNA, 27 bp, Artificial sequence
  SiRNA target sequence
taataccagtaccagtgcacataaaca

SEQ ID NO: 106985 - DNA, 27 bp, Artificial sequence
  SiRNA target sequence
aataccagtaccagtgcacataaacaa

SEQ ID NO: 106986 - DNA, 27 bp, Artificial sequence
  SiRNA target sequence
ataccagtaccagtgcacataaacaaa

SEQ ID NO: 106987 - DNA, 27 bp, Artificial sequence
  SiRNA target sequence
taccagtaccagtgcacataaacaaaa

SEQ ID NO: 106988 - DNA, 27 bp, Artificial sequence
  SiRNA target sequence
accagtaccagtgcacataaacaaaat

SEQ ID NO: 106989 - DNA, 27 bp, Artificial sequence
  SiRNA target sequence
ccagtaccagtgcacataaacaaaatc

SEQ ID NO: 106990 - DNA, 27 bp, Artificial sequence
  SiRNA target sequence
cagtaccagtgcacataaacaaaatct

SEQ ID NO: 106991 - DNA, 27 bp, Artificial sequence
  SiRNA target sequence
agtaccagtgcacataaacaaaatctt

SEQ ID NO: 106992 - DNA, 27 bp, Artificial sequence
  SiRNA target sequence
gtaccagtgcacataaacaaaatcttt

SEQ ID NO: 106993 - DNA, 27 bp, Artificial sequence
  SiRNA target sequence
taccagtgcacataaacaaaatctttt

SEQ ID NO: 106994 - DNA, 27 bp, Artificial sequence
  SiRNA target sequence
accagtgcacataaacaaaatcttttt

SEQ ID NO: 106995 - DNA, 27 bp, Artificial sequence
  SiRNA target sequence
ccagtgcacataaacaaaatcttttta

SEQ ID NO: 106996 - DNA, 27 bp, Artificial sequence
  SiRNA target sequence
cagtgcacataaacaaaatctttttac

SEQ ID NO: 106997 - DNA, 27 bp, Artificial sequence
  SiRNA target sequence
agtgcacataaacaaaatctttttacc

SEQ ID NO: 106998 - DNA, 27 bp, Artificial sequence
  SiRNA target sequence
gtgcacataaacaaaatctttttacca

SEQ ID NO: 106999 - DNA, 27 bp, Artificial sequence
  SiRNA target sequence
tgcacataaacaaaatctttttaccac

SEQ ID NO: 107000 - DNA, 27 bp, Artificial sequence
  SiRNA target sequence
gcacataaacaaaatctttttaccact

SEQ ID NO: 107001 - DNA, 27 bp, Artificial sequence
  SiRNA target sequence
cacataaacaaaatctttttaccacta

SEQ ID NO: 107002 - DNA, 27 bp, Artificial sequence
  SiRNA target sequence
acataaacaaaatctttttaccactaa

SEQ ID NO: 107003 - DNA, 27 bp, Artificial sequence
  SiRNA target sequence
cataaacaaaatctttttaccactaaa

SEQ ID NO: 107004 - DNA, 27 bp, Artificial sequence
  SiRNA target sequence
ataaacaaaatctttttaccactaaaa

SEQ ID NO: 107005 - DNA, 27 bp, Artificial sequence
  SiRNA target sequence
taaacaaaatctttttaccactaaaat

SEQ ID NO: 107006 - DNA, 27 bp, Artificial sequence
  SiRNA target sequence
aaacaaaatctttttaccactaaaatt

SEQ ID NO: 107007 - DNA, 27 bp, Artificial sequence
  SiRNA target sequence
aacaaaatctttttaccactaaaatta

SEQ ID NO: 107008 - DNA, 27 bp, Artificial sequence
  SiRNA target sequence
acaaaatctttttaccactaaaattaa

SEQ ID NO: 107009 - DNA, 27 bp, Artificial sequence
  SiRNA target sequence
caaaatctttttaccactaaaattaag

SEQ ID NO: 107010 - DNA, 27 bp, Artificial sequence
  SiRNA target sequence
aaaatctttttaccactaaaattaagt

SEQ ID NO: 107011 - DNA, 27 bp, Artificial sequence
  SiRNA target sequence
aaatctttttaccactaaaattaagtc

SEQ ID NO: 107012 - DNA, 27 bp, Artificial sequence
  SiRNA target sequence
aatctttttaccactaaaattaagtct

SEQ ID NO: 107013 - DNA, 27 bp, Artificial sequence
  SiRNA target sequence
atctttttaccactaaaattaagtcta

SEQ ID NO: 107014 - DNA, 27 bp, Artificial sequence
  SiRNA target sequence
tctttttaccactaaaattaagtctat

SEQ ID NO: 107015 - DNA, 27 bp, Artificial sequence
  SiRNA target sequence
ctttttaccactaaaattaagtctatt

SEQ ID NO: 107016 - DNA, 27 bp, Artificial sequence
  SiRNA target sequence
tttttaccactaaaattaagtctattt

SEQ ID NO: 107017 - DNA, 27 bp, Artificial sequence
  SiRNA target sequence
ttttaccactaaaattaagtctatttt

SEQ ID NO: 107018 - DNA, 27 bp, Artificial sequence
  SiRNA target sequence
tttaccactaaaattaagtctattttg

SEQ ID NO: 107019 - DNA, 27 bp, Artificial sequence
  SiRNA target sequence
ttaccactaaaattaagtctattttgt

SEQ ID NO: 107020 - DNA, 27 bp, Artificial sequence
  SiRNA target sequence
taccactaaaattaagtctattttgta

SEQ ID NO: 107021 - DNA, 27 bp, Artificial sequence
  SiRNA target sequence
accactaaaattaagtctattttgtac

SEQ ID NO: 107022 - DNA, 27 bp, Artificial sequence
  SiRNA target sequence
ccactaaaattaagtctattttgtact

SEQ ID NO: 107023 - DNA, 27 bp, Artificial sequence
  SiRNA target sequence
cactaaaattaagtctattttgtacta

SEQ ID NO: 107024 - DNA, 27 bp, Artificial sequence
  SiRNA target sequence
actaaaattaagtctattttgtactat

SEQ ID NO: 107025 - DNA, 27 bp, Artificial sequence
  SiRNA target sequence
ctaaaattaagtctattttgtactatg

SEQ ID NO: 107026 - DNA, 27 bp, Artificial sequence
  SiRNA target sequence
taaaattaagtctattttgtactatgt

SEQ ID NO: 107027 - DNA, 27 bp, Artificial sequence
  SiRNA target sequence
aaaattaagtctattttgtactatgtt

SEQ ID NO: 107028 - DNA, 27 bp, Artificial sequence
  SiRNA target sequence
aaattaagtctattttgtactatgtta

SEQ ID NO: 107029 - DNA, 27 bp, Artificial sequence
  SiRNA target sequence
aattaagtctattttgtactatgttaa

SEQ ID NO: 107030 - DNA, 27 bp, Artificial sequence
  SiRNA target sequence
attaagtctattttgtactatgttaac

SEQ ID NO: 107031 - DNA, 27 bp, Artificial sequence
  SiRNA target sequence
ttaagtctattttgtactatgttaaca

SEQ ID NO: 107032 - DNA, 27 bp, Artificial sequence
  SiRNA target sequence
taagtctattttgtactatgttaacat

SEQ ID NO: 107033 - DNA, 27 bp, Artificial sequence
  SiRNA target sequence
aagtctattttgtactatgttaacatg

SEQ ID NO: 107034 - DNA, 27 bp, Artificial sequence
  SiRNA target sequence
agtctattttgtactatgttaacatga

SEQ ID NO: 107035 - DNA, 27 bp, Artificial sequence
  SiRNA target sequence
gtctattttgtactatgttaacatgaa

SEQ ID NO: 107036 - DNA, 27 bp, Artificial sequence
  SiRNA target sequence
tctattttgtactatgttaacatgaat

SEQ ID NO: 107037 - DNA, 27 bp, Artificial sequence
  SiRNA target sequence
ctattttgtactatgttaacatgaata

SEQ ID NO: 107038 - DNA, 27 bp, Artificial sequence
  SiRNA target sequence
tattttgtactatgttaacatgaatag

SEQ ID NO: 107039 - DNA, 27 bp, Artificial sequence
  SiRNA target sequence
attttgtactatgttaacatgaatagt

SEQ ID NO: 107040 - DNA, 27 bp, Artificial sequence
  SiRNA target sequence
ttttgtactatgttaacatgaatagta

SEQ ID NO: 107041 - DNA, 27 bp, Artificial sequence
  SiRNA target sequence
tttgtactatgttaacatgaatagtag

SEQ ID NO: 107042 - DNA, 27 bp, Artificial sequence
  SiRNA target sequence
ttgtactatgttaacatgaatagtaga

SEQ ID NO: 107043 - DNA, 27 bp, Artificial sequence
  SiRNA target sequence
tgtactatgttaacatgaatagtagac

SEQ ID NO: 107044 - DNA, 27 bp, Artificial sequence
  SiRNA target sequence
gtactatgttaacatgaatagtagacc

SEQ ID NO: 107045 - DNA, 27 bp, Artificial sequence
  SiRNA target sequence
tactatgttaacatgaatagtagaccc

SEQ ID NO: 107046 - DNA, 27 bp, Artificial sequence
  SiRNA target sequence
actatgttaacatgaatagtagaccct

SEQ ID NO: 107047 - DNA, 27 bp, Artificial sequence
  SiRNA target sequence
ctatgttaacatgaatagtagaccctt

SEQ ID NO: 107048 - DNA, 27 bp, Artificial sequence
  SiRNA target sequence
tatgttaacatgaatagtagacccttt

SEQ ID NO: 107049 - DNA, 27 bp, Artificial sequence
  SiRNA target sequence
atgttaacatgaatagtagacccttta

SEQ ID NO: 107050 - DNA, 27 bp, Artificial sequence
  SiRNA target sequence
tgttaacatgaatagtagaccctttag

SEQ ID NO: 107051 - DNA, 27 bp, Artificial sequence
  SiRNA target sequence
gttaacatgaatagtagaccctttagt

SEQ ID NO: 107052 - DNA, 27 bp, Artificial sequence
  SiRNA target sequence
ttaacatgaatagtagaccctttagta

SEQ ID NO: 107053 - DNA, 27 bp, Artificial sequence
  SiRNA target sequence
taacatgaatagtagaccctttagtaa

SEQ ID NO: 107054 - DNA, 27 bp, Artificial sequence
  SiRNA target sequence
aacatgaatagtagaccctttagtaag

SEQ ID NO: 107055 - DNA, 27 bp, Artificial sequence
  SiRNA target sequence
acatgaatagtagaccctttagtaagt

SEQ ID NO: 107056 - DNA, 27 bp, Artificial sequence
  SiRNA target sequence
catgaatagtagaccctttagtaagta

SEQ ID NO: 107057 - DNA, 27 bp, Artificial sequence
  SiRNA target sequence
atgaatagtagaccctttagtaagtaa

SEQ ID NO: 107058 - DNA, 27 bp, Artificial sequence
  SiRNA target sequence
tgaatagtagaccctttagtaagtaat

SEQ ID NO: 107059 - DNA, 27 bp, Artificial sequence
  SiRNA target sequence
gaatagtagaccctttagtaagtaatt

SEQ ID NO: 107060 - DNA, 27 bp, Artificial sequence
  SiRNA target sequence
aatagtagaccctttagtaagtaattt

SEQ ID NO: 107061 - DNA, 27 bp, Artificial sequence
  SiRNA target sequence
atagtagaccctttagtaagtaatttt

SEQ ID NO: 107062 - DNA, 27 bp, Artificial sequence
  SiRNA target sequence
tagtagaccctttagtaagtaatttta

SEQ ID NO: 107063 - DNA, 27 bp, Artificial sequence
  SiRNA target sequence
agtagaccctttagtaagtaattttaa

SEQ ID NO: 107064 - DNA, 27 bp, Artificial sequence
  SiRNA target sequence
gtagaccctttagtaagtaattttaaa

SEQ ID NO: 107065 - DNA, 27 bp, Artificial sequence
  SiRNA target sequence
tagaccctttagtaagtaattttaaat

SEQ ID NO: 107066 - DNA, 27 bp, Artificial sequence
  SiRNA target sequence
agaccctttagtaagtaattttaaata

SEQ ID NO: 107067 - DNA, 27 bp, Artificial sequence
  SiRNA target sequence
gaccctttagtaagtaattttaaatac

SEQ ID NO: 107068 - DNA, 27 bp, Artificial sequence
  SiRNA target sequence
accctttagtaagtaattttaaatact

SEQ ID NO: 107069 - DNA, 27 bp, Artificial sequence
  SiRNA target sequence
ccctttagtaagtaattttaaatactc

SEQ ID NO: 107070 - DNA, 27 bp, Artificial sequence
  SiRNA target sequence
cctttagtaagtaattttaaatactct

SEQ ID NO: 107071 - DNA, 27 bp, Artificial sequence
  SiRNA target sequence
ctttagtaagtaattttaaatactctg

SEQ ID NO: 107072 - DNA, 27 bp, Artificial sequence
  SiRNA target sequence
tttagtaagtaattttaaatactctga

SEQ ID NO: 107073 - DNA, 27 bp, Artificial sequence
  SiRNA target sequence
ttagtaagtaattttaaatactctgaa

SEQ ID NO: 107074 - DNA, 27 bp, Artificial sequence
  SiRNA target sequence
tagtaagtaattttaaatactctgaac

SEQ ID NO: 107075 - DNA, 27 bp, Artificial sequence
  SiRNA target sequence
agtaagtaattttaaatactctgaaca

SEQ ID NO: 107076 - DNA, 27 bp, Artificial sequence
  SiRNA target sequence
gtaagtaattttaaatactctgaacaa

SEQ ID NO: 107077 - DNA, 27 bp, Artificial sequence
  SiRNA target sequence
taagtaattttaaatactctgaacaaa

SEQ ID NO: 107078 - DNA, 27 bp, Artificial sequence
  SiRNA target sequence
aagtaattttaaatactctgaacaaag

SEQ ID NO: 107079 - DNA, 27 bp, Artificial sequence
  SiRNA target sequence
agtaattttaaatactctgaacaaaga

SEQ ID NO: 107080 - DNA, 27 bp, Artificial sequence
  SiRNA target sequence
gtaattttaaatactctgaacaaagac

SEQ ID NO: 107081 - DNA, 27 bp, Artificial sequence
  SiRNA target sequence
taattttaaatactctgaacaaagacc

SEQ ID NO: 107082 - DNA, 27 bp, Artificial sequence
  SiRNA target sequence
aattttaaatactctgaacaaagacct

SEQ ID NO: 107083 - DNA, 27 bp, Artificial sequence
  SiRNA target sequence
attttaaatactctgaacaaagacctt

SEQ ID NO: 107084 - DNA, 27 bp, Artificial sequence
  SiRNA target sequence
ttttaaatactctgaacaaagaccttt

SEQ ID NO: 107085 - DNA, 27 bp, Artificial sequence
  SiRNA target sequence
tttaaatactctgaacaaagacctttt

SEQ ID NO: 107086 - DNA, 27 bp, Artificial sequence
  SiRNA target sequence
ttaaatactctgaacaaagaccttttc

SEQ ID NO: 107087 - DNA, 27 bp, Artificial sequence
  SiRNA target sequence
taaatactctgaacaaagaccttttcg

SEQ ID NO: 107088 - DNA, 27 bp, Artificial sequence
  SiRNA target sequence
aaatactctgaacaaagaccttttcgt

SEQ ID NO: 107089 - DNA, 27 bp, Artificial sequence
  SiRNA target sequence
aatactctgaacaaagaccttttcgtt

SEQ ID NO: 107090 - DNA, 27 bp, Artificial sequence
  SiRNA target sequence
atactctgaacaaagaccttttcgttc

SEQ ID NO: 107091 - DNA, 27 bp, Artificial sequence
  SiRNA target sequence
tactctgaacaaagaccttttcgttct

SEQ ID NO: 107092 - DNA, 27 bp, Artificial sequence
  SiRNA target sequence
actctgaacaaagaccttttcgttctt

SEQ ID NO: 107093 - DNA, 27 bp, Artificial sequence
  SiRNA target sequence
ctctgaacaaagaccttttcgttcttc

SEQ ID NO: 107094 - DNA, 27 bp, Artificial sequence
  SiRNA target sequence
tctgaacaaagaccttttcgttcttct

SEQ ID NO: 107095 - DNA, 27 bp, Artificial sequence
  SiRNA target sequence
ctgaacaaagaccttttcgttcttctt

SEQ ID NO: 107096 - DNA, 27 bp, Artificial sequence
  SiRNA target sequence
tgaacaaagaccttttcgttcttcttt

SEQ ID NO: 107097 - DNA, 27 bp, Artificial sequence
  SiRNA target sequence
gaacaaagaccttttcgttcttctttt

SEQ ID NO: 107098 - DNA, 27 bp, Artificial sequence
  SiRNA target sequence
aacaaagaccttttcgttcttctttta

SEQ ID NO: 107099 - DNA, 27 bp, Artificial sequence
  SiRNA target sequence
acaaagaccttttcgttcttcttttaa

SEQ ID NO: 107100 - DNA, 27 bp, Artificial sequence
  SiRNA target sequence
caaagaccttttcgttcttcttttaaa

SEQ ID NO: 107101 - DNA, 27 bp, Artificial sequence
  SiRNA target sequence
aaagaccttttcgttcttcttttaaac

SEQ ID NO: 107102 - DNA, 27 bp, Artificial sequence
  SiRNA target sequence
aagaccttttcgttcttcttttaaact

SEQ ID NO: 107103 - DNA, 27 bp, Artificial sequence
  SiRNA target sequence
agaccttttcgttcttcttttaaactt

SEQ ID NO: 107104 - DNA, 27 bp, Artificial sequence
  SiRNA target sequence
gaccttttcgttcttcttttaaacttg

SEQ ID NO: 107105 - DNA, 27 bp, Artificial sequence
  SiRNA target sequence
accttttcgttcttcttttaaacttgt

SEQ ID NO: 107106 - DNA, 27 bp, Artificial sequence
  SiRNA target sequence
ccttttcgttcttcttttaaacttgtt

SEQ ID NO: 107107 - DNA, 27 bp, Artificial sequence
  SiRNA target sequence
cttttcgttcttcttttaaacttgttt

SEQ ID NO: 107108 - DNA, 27 bp, Artificial sequence
  SiRNA target sequence
ttttcgttcttcttttaaacttgtttt

SEQ ID NO: 107109 - DNA, 27 bp, Artificial sequence
  SiRNA target sequence
tttcgttcttcttttaaacttgtttta

SEQ ID NO: 107110 - DNA, 27 bp, Artificial sequence
  SiRNA target sequence
ttcgttcttcttttaaacttgttttaa

SEQ ID NO: 107111 - DNA, 27 bp, Artificial sequence
  SiRNA target sequence
tcgttcttcttttaaacttgttttaaa

SEQ ID NO: 107112 - DNA, 27 bp, Artificial sequence
  SiRNA target sequence
cgttcttcttttaaacttgttttaaaa

SEQ ID NO: 107113 - DNA, 27 bp, Artificial sequence
  SiRNA target sequence
gttcttcttttaaacttgttttaaaag

SEQ ID NO: 107114 - DNA, 27 bp, Artificial sequence
  SiRNA target sequence
ttcttcttttaaacttgttttaaaaga

SEQ ID NO: 107115 - DNA, 27 bp, Artificial sequence
  SiRNA target sequence
tcttcttttaaacttgttttaaaagaa

SEQ ID NO: 107116 - DNA, 27 bp, Artificial sequence
  SiRNA target sequence
cttcttttaaacttgttttaaaagaaa

SEQ ID NO: 107117 - DNA, 27 bp, Artificial sequence
  SiRNA target sequence
ttcttttaaacttgttttaaaagaaac

SEQ ID NO: 107118 - DNA, 27 bp, Artificial sequence
  SiRNA target sequence
tcttttaaacttgttttaaaagaaaca

SEQ ID NO: 107119 - DNA, 27 bp, Artificial sequence
  SiRNA target sequence
cttttaaacttgttttaaaagaaacaa

SEQ ID NO: 107120 - DNA, 27 bp, Artificial sequence
  SiRNA target sequence
ttttaaacttgttttaaaagaaacaag

SEQ ID NO: 107121 - DNA, 27 bp, Artificial sequence
  SiRNA target sequence
tttaaacttgttttaaaagaaacaaga

SEQ ID NO: 107122 - DNA, 27 bp, Artificial sequence
  SiRNA target sequence
ttaaacttgttttaaaagaaacaagag

SEQ ID NO: 107123 - DNA, 27 bp, Artificial sequence
  SiRNA target sequence
taaacttgttttaaaagaaacaagaga

SEQ ID NO: 107124 - DNA, 27 bp, Artificial sequence
  SiRNA target sequence
aaacttgttttaaaagaaacaagagag

SEQ ID NO: 107125 - DNA, 27 bp, Artificial sequence
  SiRNA target sequence
aacttgttttaaaagaaacaagagaga

SEQ ID NO: 107126 - DNA, 27 bp, Artificial sequence
  SiRNA target sequence
acttgttttaaaagaaacaagagagac

SEQ ID NO: 107127 - DNA, 27 bp, Artificial sequence
  SiRNA target sequence
cttgttttaaaagaaacaagagagacg

SEQ ID NO: 107128 - DNA, 27 bp, Artificial sequence
  SiRNA target sequence
ttgttttaaaagaaacaagagagacgg

SEQ ID NO: 107129 - DNA, 27 bp, Artificial sequence
  SiRNA target sequence
tgttttaaaagaaacaagagagacggt

SEQ ID NO: 107130 - DNA, 27 bp, Artificial sequence
  SiRNA target sequence
gttttaaaagaaacaagagagacggtg

SEQ ID NO: 107131 - DNA, 27 bp, Artificial sequence
  SiRNA target sequence
ttttaaaagaaacaagagagacggtga

SEQ ID NO: 107132 - DNA, 27 bp, Artificial sequence
  SiRNA target sequence
tttaaaagaaacaagagagacggtgac

SEQ ID NO: 107133 - DNA, 27 bp, Artificial sequence
  SiRNA target sequence
ttaaaagaaacaagagagacggtgaca

SEQ ID NO: 107134 - DNA, 27 bp, Artificial sequence
  SiRNA target sequence
taaaagaaacaagagagacggtgacaa

SEQ ID NO: 107135 - DNA, 27 bp, Artificial sequence
  SiRNA target sequence
aaaagaaacaagagagacggtgacaaa

SEQ ID NO: 107136 - DNA, 27 bp, Artificial sequence
  SiRNA target sequence
aaagaaacaagagagacggtgacaaag

SEQ ID NO: 107137 - DNA, 27 bp, Artificial sequence
  SiRNA target sequence
aagaaacaagagagacggtgacaaagt

SEQ ID NO: 107138 - DNA, 27 bp, Artificial sequence
  SiRNA target sequence
agaaacaagagagacggtgacaaagta

SEQ ID NO: 107139 - DNA, 27 bp, Artificial sequence
  SiRNA target sequence
gaaacaagagagacggtgacaaagtaa

SEQ ID NO: 107140 - DNA, 27 bp, Artificial sequence
  SiRNA target sequence
aaacaagagagacggtgacaaagtaac

SEQ ID NO: 107141 - DNA, 27 bp, Artificial sequence
  SiRNA target sequence
aacaagagagacggtgacaaagtaaca

SEQ ID NO: 107142 - DNA, 27 bp, Artificial sequence
  SiRNA target sequence
acaagagagacggtgacaaagtaacaa

SEQ ID NO: 107143 - DNA, 27 bp, Artificial sequence
  SiRNA target sequence
caagagagacggtgacaaagtaacaaa

SEQ ID NO: 107144 - DNA, 27 bp, Artificial sequence
  SiRNA target sequence
aagagagacggtgacaaagtaacaaaa

SEQ ID NO: 107145 - DNA, 27 bp, Artificial sequence
  SiRNA target sequence
agagagacggtgacaaagtaacaaaaa

SEQ ID NO: 107146 - DNA, 27 bp, Artificial sequence
  SiRNA target sequence
gagagacggtgacaaagtaacaaaaat

SEQ ID NO: 107147 - DNA, 27 bp, Artificial sequence
  SiRNA target sequence
agagacggtgacaaagtaacaaaaatc

SEQ ID NO: 107148 - DNA, 27 bp, Artificial sequence
  SiRNA target sequence
gagacggtgacaaagtaacaaaaatct

SEQ ID NO: 107149 - DNA, 27 bp, Artificial sequence
  SiRNA target sequence
agacggtgacaaagtaacaaaaatctt

SEQ ID NO: 107150 - DNA, 27 bp, Artificial sequence
  SiRNA target sequence
gacggtgacaaagtaacaaaaatcttt

SEQ ID NO: 107151 - DNA, 27 bp, Artificial sequence
  SiRNA target sequence
acggtgacaaagtaacaaaaatctttt

SEQ ID NO: 107152 - DNA, 27 bp, Artificial sequence
  SiRNA target sequence
cggtgacaaagtaacaaaaatcttttt

SEQ ID NO: 107153 - DNA, 27 bp, Artificial sequence
  SiRNA target sequence
ggtgacaaagtaacaaaaatctttttt

SEQ ID NO: 107154 - DNA, 27 bp, Artificial sequence
  SiRNA target sequence
gtgacaaagtaacaaaaatcttttttc

SEQ ID NO: 107155 - DNA, 27 bp, Artificial sequence
  SiRNA target sequence
tgacaaagtaacaaaaatcttttttcg

SEQ ID NO: 107156 - DNA, 27 bp, Artificial sequence
  SiRNA target sequence
gacaaagtaacaaaaatcttttttcgt

SEQ ID NO: 107157 - DNA, 27 bp, Artificial sequence
  SiRNA target sequence
acaaagtaacaaaaatcttttttcgtt

SEQ ID NO: 107158 - DNA, 27 bp, Artificial sequence
  SiRNA target sequence
caaagtaacaaaaatcttttttcgtta

SEQ ID NO: 107159 - DNA, 27 bp, Artificial sequence
  SiRNA target sequence
aaagtaacaaaaatcttttttcgttaa

SEQ ID NO: 107160 - DNA, 27 bp, Artificial sequence
  SiRNA target sequence
aagtaacaaaaatcttttttcgttaat

SEQ ID NO: 107161 - DNA, 27 bp, Artificial sequence
  SiRNA target sequence
agtaacaaaaatcttttttcgttaatg

SEQ ID NO: 107162 - DNA, 27 bp, Artificial sequence
  SiRNA target sequence
gtaacaaaaatcttttttcgttaatgt

SEQ ID NO: 107163 - DNA, 27 bp, Artificial sequence
  SiRNA target sequence
taacaaaaatcttttttcgttaatgta

SEQ ID NO: 107164 - DNA, 27 bp, Artificial sequence
  SiRNA target sequence
aacaaaaatcttttttcgttaatgtaa

SEQ ID NO: 107165 - DNA, 27 bp, Artificial sequence
  SiRNA target sequence
acaaaaatcttttttcgttaatgtaaa

SEQ ID NO: 107166 - DNA, 27 bp, Artificial sequence
  SiRNA target sequence
caaaaatcttttttcgttaatgtaaaa

SEQ ID NO: 107167 - DNA, 27 bp, Artificial sequence
  SiRNA target sequence
aaaaatcttttttcgttaatgtaaaat

SEQ ID NO: 107168 - DNA, 27 bp, Artificial sequence
  SiRNA target sequence
aaaatcttttttcgttaatgtaaaata

SEQ ID NO: 107169 - DNA, 27 bp, Artificial sequence
  SiRNA target sequence
aaatcttttttcgttaatgtaaaatat

SEQ ID NO: 107170 - DNA, 27 bp, Artificial sequence
  SiRNA target sequence
aatcttttttcgttaatgtaaaatatc

SEQ ID NO: 107171 - DNA, 27 bp, Artificial sequence
  SiRNA target sequence
atcttttttcgttaatgtaaaatatct

SEQ ID NO: 107172 - DNA, 27 bp, Artificial sequence
  SiRNA target sequence
tcttttttcgttaatgtaaaatatctt

SEQ ID NO: 107173 - DNA, 27 bp, Artificial sequence
  SiRNA target sequence
cttttttcgttaatgtaaaatatcttg

SEQ ID NO: 107174 - DNA, 27 bp, Artificial sequence
  SiRNA target sequence
ttttttcgttaatgtaaaatatcttgg

SEQ ID NO: 107175 - DNA, 27 bp, Artificial sequence
  SiRNA target sequence
tttttcgttaatgtaaaatatcttgga

SEQ ID NO: 107176 - DNA, 27 bp, Artificial sequence
  SiRNA target sequence
ttttcgttaatgtaaaatatcttggat

SEQ ID NO: 107177 - DNA, 27 bp, Artificial sequence
  SiRNA target sequence
tttcgttaatgtaaaatatcttggatt

SEQ ID NO: 107178 - DNA, 27 bp, Artificial sequence
  SiRNA target sequence
ttcgttaatgtaaaatatcttggatta

SEQ ID NO: 107179 - DNA, 27 bp, Artificial sequence
  SiRNA target sequence
tcgttaatgtaaaatatcttggattaa

SEQ ID NO: 107180 - DNA, 27 bp, Artificial sequence
  SiRNA target sequence
cgttaatgtaaaatatcttggattaat

SEQ ID NO: 107181 - DNA, 27 bp, Artificial sequence
  SiRNA target sequence
gttaatgtaaaatatcttggattaatt

SEQ ID NO: 107182 - DNA, 27 bp, Artificial sequence
  SiRNA target sequence
ttaatgtaaaatatcttggattaatta

SEQ ID NO: 107183 - DNA, 27 bp, Artificial sequence
  SiRNA target sequence
taatgtaaaatatcttggattaattac

SEQ ID NO: 107184 - DNA, 27 bp, Artificial sequence
  SiRNA target sequence
aatgtaaaatatcttggattaattaca

SEQ ID NO: 107185 - DNA, 27 bp, Artificial sequence
  SiRNA target sequence
atgtaaaatatcttggattaattacag

SEQ ID NO: 107186 - DNA, 27 bp, Artificial sequence
  SiRNA target sequence
tgtaaaatatcttggattaattacagg

SEQ ID NO: 107187 - DNA, 27 bp, Artificial sequence
  SiRNA target sequence
gtaaaatatcttggattaattacaggg

SEQ ID NO: 107188 - DNA, 27 bp, Artificial sequence
  SiRNA target sequence
taaaatatcttggattaattacaggga

SEQ ID NO: 107189 - DNA, 27 bp, Artificial sequence
  SiRNA target sequence
aaaatatcttggattaattacagggat

SEQ ID NO: 107190 - DNA, 27 bp, Artificial sequence
  SiRNA target sequence
aaatatcttggattaattacagggata

SEQ ID NO: 107191 - DNA, 27 bp, Artificial sequence
  SiRNA target sequence
aatatcttggattaattacagggatat

SEQ ID NO: 107192 - DNA, 27 bp, Artificial sequence
  SiRNA target sequence
atatcttggattaattacagggatata

SEQ ID NO: 107193 - DNA, 27 bp, Artificial sequence
  SiRNA target sequence
tatcttggattaattacagggatatac

SEQ ID NO: 107194 - DNA, 27 bp, Artificial sequence
  SiRNA target sequence
atcttggattaattacagggatatact

SEQ ID NO: 107195 - DNA, 27 bp, Artificial sequence
  SiRNA target sequence
tcttggattaattacagggatatactt

SEQ ID NO: 107196 - DNA, 27 bp, Artificial sequence
  SiRNA target sequence
cttggattaattacagggatatacttg

SEQ ID NO: 107197 - DNA, 27 bp, Artificial sequence
  SiRNA target sequence
ttggattaattacagggatatacttgt

SEQ ID NO: 107198 - DNA, 27 bp, Artificial sequence
  SiRNA target sequence
tggattaattacagggatatacttgta

SEQ ID NO: 107199 - DNA, 27 bp, Artificial sequence
  SiRNA target sequence
ggattaattacagggatatacttgtac

SEQ ID NO: 107200 - DNA, 27 bp, Artificial sequence
  SiRNA target sequence
gattaattacagggatatacttgtaca

SEQ ID NO: 107201 - DNA, 27 bp, Artificial sequence
  SiRNA target sequence
attaattacagggatatacttgtacat

SEQ ID NO: 107202 - DNA, 27 bp, Artificial sequence
  SiRNA target sequence
ttaattacagggatatacttgtacata

SEQ ID NO: 107203 - DNA, 27 bp, Artificial sequence
  SiRNA target sequence
taattacagggatatacttgtacataa

SEQ ID NO: 107204 - DNA, 27 bp, Artificial sequence
  SiRNA target sequence
aattacagggatatacttgtacataaa

SEQ ID NO: 107205 - DNA, 27 bp, Artificial sequence
  SiRNA target sequence
attacagggatatacttgtacataaaa

SEQ ID NO: 107206 - DNA, 27 bp, Artificial sequence
  SiRNA target sequence
ttacagggatatacttgtacataaaat

SEQ ID NO: 107207 - DNA, 27 bp, Artificial sequence
  SiRNA target sequence
tacagggatatacttgtacataaaatt

SEQ ID NO: 107208 - DNA, 27 bp, Artificial sequence
  SiRNA target sequence
acagggatatacttgtacataaaattt

SEQ ID NO: 107209 - DNA, 27 bp, Artificial sequence
  SiRNA target sequence
cagggatatacttgtacataaaatttg

SEQ ID NO: 107210 - DNA, 27 bp, Artificial sequence
  SiRNA target sequence
agggatatacttgtacataaaatttga

SEQ ID NO: 107211 - DNA, 27 bp, Artificial sequence
  SiRNA target sequence
gggatatacttgtacataaaatttgag

SEQ ID NO: 107212 - DNA, 27 bp, Artificial sequence
  SiRNA target sequence
ggatatacttgtacataaaatttgagg

SEQ ID NO: 107213 - DNA, 27 bp, Artificial sequence
  SiRNA target sequence
gatatacttgtacataaaatttgaggt

SEQ ID NO: 107214 - DNA, 27 bp, Artificial sequence
  SiRNA target sequence
atatacttgtacataaaatttgaggta

SEQ ID NO: 107215 - DNA, 27 bp, Artificial sequence
  SiRNA target sequence
tatacttgtacataaaatttgaggtaa

SEQ ID NO: 107216 - DNA, 27 bp, Artificial sequence
  SiRNA target sequence
atacttgtacataaaatttgaggtaag

SEQ ID NO: 107217 - DNA, 27 bp, Artificial sequence
  SiRNA target sequence
tacttgtacataaaatttgaggtaagt

SEQ ID NO: 107218 - DNA, 27 bp, Artificial sequence
  SiRNA target sequence
acttgtacataaaatttgaggtaagtt

SEQ ID NO: 107219 - DNA, 27 bp, Artificial sequence
  SiRNA target sequence
cttgtacataaaatttgaggtaagttt

SEQ ID NO: 107220 - DNA, 27 bp, Artificial sequence
  SiRNA target sequence
ttgtacataaaatttgaggtaagtttt

SEQ ID NO: 107221 - DNA, 27 bp, Artificial sequence
  SiRNA target sequence
tgtacataaaatttgaggtaagtttta

SEQ ID NO: 107222 - DNA, 27 bp, Artificial sequence
  SiRNA target sequence
gtacataaaatttgaggtaagttttat

SEQ ID NO: 107223 - DNA, 27 bp, Artificial sequence
  SiRNA target sequence
tacataaaatttgaggtaagttttatc

SEQ ID NO: 107224 - DNA, 27 bp, Artificial sequence
  SiRNA target sequence
acataaaatttgaggtaagttttatct

SEQ ID NO: 107225 - DNA, 27 bp, Artificial sequence
  SiRNA target sequence
cataaaatttgaggtaagttttatctt

SEQ ID NO: 107226 - DNA, 27 bp, Artificial sequence
  SiRNA target sequence
ataaaatttgaggtaagttttatctta

SEQ ID NO: 107227 - DNA, 27 bp, Artificial sequence
  SiRNA target sequence
taaaatttgaggtaagttttatcttaa

SEQ ID NO: 107228 - DNA, 27 bp, Artificial sequence
  SiRNA target sequence
aaaatttgaggtaagttttatcttaaa

SEQ ID NO: 107229 - DNA, 27 bp, Artificial sequence
  SiRNA target sequence
aaatttgaggtaagttttatcttaaaa

SEQ ID NO: 107230 - DNA, 27 bp, Artificial sequence
  SiRNA target sequence
aatttgaggtaagttttatcttaaaat

SEQ ID NO: 107231 - DNA, 27 bp, Artificial sequence
  SiRNA target sequence
atttgaggtaagttttatcttaaaatc

SEQ ID NO: 107232 - DNA, 27 bp, Artificial sequence
  SiRNA target sequence
tttgaggtaagttttatcttaaaatct

SEQ ID NO: 107233 - DNA, 27 bp, Artificial sequence
  SiRNA target sequence
ttgaggtaagttttatcttaaaatctt

SEQ ID NO: 107234 - DNA, 27 bp, Artificial sequence
  SiRNA target sequence
tgaggtaagttttatcttaaaatcttt

SEQ ID NO: 107235 - DNA, 27 bp, Artificial sequence
  SiRNA target sequence
gaggtaagttttatcttaaaatctttt

SEQ ID NO: 107236 - DNA, 27 bp, Artificial sequence
  SiRNA target sequence
aggtaagttttatcttaaaatctttta

SEQ ID NO: 107237 - DNA, 27 bp, Artificial sequence
  SiRNA target sequence
ggtaagttttatcttaaaatcttttag

SEQ ID NO: 107238 - DNA, 27 bp, Artificial sequence
  SiRNA target sequence
gtaagttttatcttaaaatcttttaga

SEQ ID NO: 107239 - DNA, 27 bp, Artificial sequence
  SiRNA target sequence
taagttttatcttaaaatcttttagaa

SEQ ID NO: 107240 - DNA, 27 bp, Artificial sequence
  SiRNA target sequence
aagttttatcttaaaatcttttagaac

SEQ ID NO: 107241 - DNA, 27 bp, Artificial sequence
  SiRNA target sequence
agttttatcttaaaatcttttagaacc

SEQ ID NO: 107242 - DNA, 27 bp, Artificial sequence
  SiRNA target sequence
gttttatcttaaaatcttttagaacct

SEQ ID NO: 107243 - DNA, 27 bp, Artificial sequence
  SiRNA target sequence
ttttatcttaaaatcttttagaacctc

SEQ ID NO: 107244 - DNA, 27 bp, Artificial sequence
  SiRNA target sequence
tttatcttaaaatcttttagaacctca

SEQ ID NO: 107245 - DNA, 27 bp, Artificial sequence
  SiRNA target sequence
ttatcttaaaatcttttagaacctcaa

SEQ ID NO: 107246 - DNA, 27 bp, Artificial sequence
  SiRNA target sequence
tatcttaaaatcttttagaacctcaaa

SEQ ID NO: 107247 - DNA, 27 bp, Artificial sequence
  SiRNA target sequence
atcttaaaatcttttagaacctcaaaa

SEQ ID NO: 107248 - DNA, 27 bp, Artificial sequence
  SiRNA target sequence
tcttaaaatcttttagaacctcaaaaa

SEQ ID NO: 107249 - DNA, 27 bp, Artificial sequence
  SiRNA target sequence
cttaaaatcttttagaacctcaaaaat

SEQ ID NO: 107250 - DNA, 27 bp, Artificial sequence
  SiRNA target sequence
ttaaaatcttttagaacctcaaaaata

SEQ ID NO: 107251 - DNA, 27 bp, Artificial sequence
  SiRNA target sequence
taaaatcttttagaacctcaaaaatag

SEQ ID NO: 107252 - DNA, 27 bp, Artificial sequence
  SiRNA target sequence
aaaatcttttagaacctcaaaaatagt

SEQ ID NO: 107253 - DNA, 27 bp, Artificial sequence
  SiRNA target sequence
aaatcttttagaacctcaaaaatagtg

SEQ ID NO: 107254 - DNA, 27 bp, Artificial sequence
  SiRNA target sequence
aatcttttagaacctcaaaaatagtgc

SEQ ID NO: 107255 - DNA, 27 bp, Artificial sequence
  SiRNA target sequence
atcttttagaacctcaaaaatagtgcg

SEQ ID NO: 107256 - DNA, 27 bp, Artificial sequence
  SiRNA target sequence
tcttttagaacctcaaaaatagtgcgc

SEQ ID NO: 107257 - DNA, 27 bp, Artificial sequence
  SiRNA target sequence
cttttagaacctcaaaaatagtgcgct

SEQ ID NO: 107258 - DNA, 27 bp, Artificial sequence
  SiRNA target sequence
ttttagaacctcaaaaatagtgcgctt

SEQ ID NO: 107259 - DNA, 27 bp, Artificial sequence
  SiRNA target sequence
tttagaacctcaaaaatagtgcgcttc

SEQ ID NO: 107260 - DNA, 27 bp, Artificial sequence
  SiRNA target sequence
ttagaacctcaaaaatagtgcgcttcg

SEQ ID NO: 107261 - DNA, 27 bp, Artificial sequence
  SiRNA target sequence
tagaacctcaaaaatagtgcgcttcgg

SEQ ID NO: 107262 - DNA, 27 bp, Artificial sequence
  SiRNA target sequence
agaacctcaaaaatagtgcgcttcggt

SEQ ID NO: 107263 - DNA, 27 bp, Artificial sequence
  SiRNA target sequence
gaacctcaaaaatagtgcgcttcggta

SEQ ID NO: 107264 - DNA, 27 bp, Artificial sequence
  SiRNA target sequence
aacctcaaaaatagtgcgcttcggtag

SEQ ID NO: 107265 - DNA, 27 bp, Artificial sequence
  SiRNA target sequence
acctcaaaaatagtgcgcttcggtagt

SEQ ID NO: 107266 - DNA, 27 bp, Artificial sequence
  SiRNA target sequence
cctcaaaaatagtgcgcttcggtagta

SEQ ID NO: 107267 - DNA, 27 bp, Artificial sequence
  SiRNA target sequence
ctcaaaaatagtgcgcttcggtagtaa

SEQ ID NO: 107268 - DNA, 27 bp, Artificial sequence
  SiRNA target sequence
tcaaaaatagtgcgcttcggtagtaaa

SEQ ID NO: 107269 - DNA, 27 bp, Artificial sequence
  SiRNA target sequence
caaaaatagtgcgcttcggtagtaaaa

SEQ ID NO: 107270 - DNA, 27 bp, Artificial sequence
  SiRNA target sequence
aaaaatagtgcgcttcggtagtaaaat

SEQ ID NO: 107271 - DNA, 27 bp, Artificial sequence
  SiRNA target sequence
aaaatagtgcgcttcggtagtaaaatg

SEQ ID NO: 107272 - DNA, 27 bp, Artificial sequence
  SiRNA target sequence
aaatagtgcgcttcggtagtaaaatgt

SEQ ID NO: 107273 - DNA, 27 bp, Artificial sequence
  SiRNA target sequence
aatagtgcgcttcggtagtaaaatgta

SEQ ID NO: 107274 - DNA, 27 bp, Artificial sequence
  SiRNA target sequence
atagtgcgcttcggtagtaaaatgtaa

SEQ ID NO: 107275 - DNA, 27 bp, Artificial sequence
  SiRNA target sequence
tagtgcgcttcggtagtaaaatgtaat

SEQ ID NO: 107276 - DNA, 27 bp, Artificial sequence
  SiRNA target sequence
agtgcgcttcggtagtaaaatgtaatc

SEQ ID NO: 107277 - DNA, 27 bp, Artificial sequence
  SiRNA target sequence
gtgcgcttcggtagtaaaatgtaatca

SEQ ID NO: 107278 - DNA, 27 bp, Artificial sequence
  SiRNA target sequence
tgcgcttcggtagtaaaatgtaatcat

SEQ ID NO: 107279 - DNA, 27 bp, Artificial sequence
  SiRNA target sequence
gcgcttcggtagtaaaatgtaatcata

SEQ ID NO: 107280 - DNA, 27 bp, Artificial sequence
  SiRNA target sequence
cgcttcggtagtaaaatgtaatcatag

SEQ ID NO: 107281 - DNA, 27 bp, Artificial sequence
  SiRNA target sequence
gcttcggtagtaaaatgtaatcatagt

SEQ ID NO: 107282 - DNA, 27 bp, Artificial sequence
  SiRNA target sequence
cttcggtagtaaaatgtaatcatagta

SEQ ID NO: 107283 - DNA, 27 bp, Artificial sequence
  SiRNA target sequence
ttcggtagtaaaatgtaatcatagtac

SEQ ID NO: 107284 - DNA, 27 bp, Artificial sequence
  SiRNA target sequence
tcggtagtaaaatgtaatcatagtaca

SEQ ID NO: 107285 - DNA, 27 bp, Artificial sequence
  SiRNA target sequence
cggtagtaaaatgtaatcatagtacag

SEQ ID NO: 107286 - DNA, 27 bp, Artificial sequence
  SiRNA target sequence
ggtagtaaaatgtaatcatagtacaga

SEQ ID NO: 107287 - DNA, 27 bp, Artificial sequence
  SiRNA target sequence
gtagtaaaatgtaatcatagtacagat

SEQ ID NO: 107288 - DNA, 27 bp, Artificial sequence
  SiRNA target sequence
tagtaaaatgtaatcatagtacagatc

SEQ ID NO: 107289 - DNA, 27 bp, Artificial sequence
  SiRNA target sequence
agtaaaatgtaatcatagtacagatcg

SEQ ID NO: 107290 - DNA, 27 bp, Artificial sequence
  SiRNA target sequence
gtaaaatgtaatcatagtacagatcgt

SEQ ID NO: 107291 - DNA, 27 bp, Artificial sequence
  SiRNA target sequence
taaaatgtaatcatagtacagatcgta

SEQ ID NO: 107292 - DNA, 27 bp, Artificial sequence
  SiRNA target sequence
aaaatgtaatcatagtacagatcgtaa

SEQ ID NO: 107293 - DNA, 27 bp, Artificial sequence
  SiRNA target sequence
aaatgtaatcatagtacagatcgtaat

SEQ ID NO: 107294 - DNA, 27 bp, Artificial sequence
  SiRNA target sequence
aatgtaatcatagtacagatcgtaatt

SEQ ID NO: 107295 - DNA, 27 bp, Artificial sequence
  SiRNA target sequence
atgtaatcatagtacagatcgtaattt

SEQ ID NO: 107296 - DNA, 27 bp, Artificial sequence
  SiRNA target sequence
tgtaatcatagtacagatcgtaattta

SEQ ID NO: 107297 - DNA, 27 bp, Artificial sequence
  SiRNA target sequence
gtaatcatagtacagatcgtaatttag

SEQ ID NO: 107298 - DNA, 27 bp, Artificial sequence
  SiRNA target sequence
taatcatagtacagatcgtaatttaga

SEQ ID NO: 107299 - DNA, 27 bp, Artificial sequence
  SiRNA target sequence
aatcatagtacagatcgtaatttagat

SEQ ID NO: 107300 - DNA, 27 bp, Artificial sequence
  SiRNA target sequence
atcatagtacagatcgtaatttagata

SEQ ID NO: 107301 - DNA, 27 bp, Artificial sequence
  SiRNA target sequence
tcatagtacagatcgtaatttagataa

SEQ ID NO: 107302 - DNA, 27 bp, Artificial sequence
  SiRNA target sequence
catagtacagatcgtaatttagataaa

SEQ ID NO: 107303 - DNA, 27 bp, Artificial sequence
  SiRNA target sequence
atagtacagatcgtaatttagataaat

SEQ ID NO: 107304 - DNA, 27 bp, Artificial sequence
  SiRNA target sequence
tagtacagatcgtaatttagataaatt

SEQ ID NO: 107305 - DNA, 27 bp, Artificial sequence
  SiRNA target sequence
agtacagatcgtaatttagataaattt

SEQ ID NO: 107306 - DNA, 27 bp, Artificial sequence
  SiRNA target sequence
gtacagatcgtaatttagataaatttc

SEQ ID NO: 107307 - DNA, 27 bp, Artificial sequence
  SiRNA target sequence
tacagatcgtaatttagataaatttct

SEQ ID NO: 107308 - DNA, 27 bp, Artificial sequence
  SiRNA target sequence
acagatcgtaatttagataaatttctt

SEQ ID NO: 107309 - DNA, 27 bp, Artificial sequence
  SiRNA target sequence
cagatcgtaatttagataaatttcttt

SEQ ID NO: 107310 - DNA, 27 bp, Artificial sequence
  SiRNA target sequence
agatcgtaatttagataaatttcttta

SEQ ID NO: 107311 - DNA, 27 bp, Artificial sequence
  SiRNA target sequence
gatcgtaatttagataaatttctttac

SEQ ID NO: 107312 - DNA, 27 bp, Artificial sequence
  SiRNA target sequence
atcgtaatttagataaatttctttaca

SEQ ID NO: 107313 - DNA, 27 bp, Artificial sequence
  SiRNA target sequence
tcgtaatttagataaatttctttacat

SEQ ID NO: 107314 - DNA, 27 bp, Artificial sequence
  SiRNA target sequence
cgtaatttagataaatttctttacatt

SEQ ID NO: 107315 - DNA, 27 bp, Artificial sequence
  SiRNA target sequence
gtaatttagataaatttctttacattt

SEQ ID NO: 107316 - DNA, 27 bp, Artificial sequence
  SiRNA target sequence
taatttagataaatttctttacatttc

SEQ ID NO: 107317 - DNA, 27 bp, Artificial sequence
  SiRNA target sequence
aatttagataaatttctttacatttct

SEQ ID NO: 107318 - DNA, 27 bp, Artificial sequence
  SiRNA target sequence
atttagataaatttctttacatttctc

SEQ ID NO: 107319 - DNA, 27 bp, Artificial sequence
  SiRNA target sequence
tttagataaatttctttacatttctca

SEQ ID NO: 107320 - DNA, 27 bp, Artificial sequence
  SiRNA target sequence
ttagataaatttctttacatttctcac

SEQ ID NO: 107321 - DNA, 27 bp, Artificial sequence
  SiRNA target sequence
tagataaatttctttacatttctcacg

SEQ ID NO: 107322 - DNA, 27 bp, Artificial sequence
  SiRNA target sequence
agataaatttctttacatttctcacga

SEQ ID NO: 107323 - DNA, 27 bp, Artificial sequence
  SiRNA target sequence
gataaatttctttacatttctcacgat

SEQ ID NO: 107324 - DNA, 27 bp, Artificial sequence
  SiRNA target sequence
ataaatttctttacatttctcacgata

SEQ ID NO: 107325 - DNA, 27 bp, Artificial sequence
  SiRNA target sequence
taaatttctttacatttctcacgatat

SEQ ID NO: 107326 - DNA, 27 bp, Artificial sequence
  SiRNA target sequence
aaatttctttacatttctcacgatatt

SEQ ID NO: 107327 - DNA, 27 bp, Artificial sequence
  SiRNA target sequence
aatttctttacatttctcacgatattc

SEQ ID NO: 107328 - DNA, 27 bp, Artificial sequence
  SiRNA target sequence
atttctttacatttctcacgatattcc

SEQ ID NO: 107329 - DNA, 27 bp, Artificial sequence
  SiRNA target sequence
tttctttacatttctcacgatattcct

SEQ ID NO: 107330 - DNA, 27 bp, Artificial sequence
  SiRNA target sequence
ttctttacatttctcacgatattcctc

SEQ ID NO: 107331 - DNA, 27 bp, Artificial sequence
  SiRNA target sequence
tctttacatttctcacgatattcctca

SEQ ID NO: 107332 - DNA, 27 bp, Artificial sequence
  SiRNA target sequence
ctttacatttctcacgatattcctcag

SEQ ID NO: 107333 - DNA, 27 bp, Artificial sequence
  SiRNA target sequence
tttacatttctcacgatattcctcagc

SEQ ID NO: 107334 - DNA, 27 bp, Artificial sequence
  SiRNA target sequence
ttacatttctcacgatattcctcagca

SEQ ID NO: 107335 - DNA, 27 bp, Artificial sequence
  SiRNA target sequence
tacatttctcacgatattcctcagcaa

SEQ ID NO: 107336 - DNA, 27 bp, Artificial sequence
  SiRNA target sequence
acatttctcacgatattcctcagcaat

SEQ ID NO: 107337 - DNA, 27 bp, Artificial sequence
  SiRNA target sequence
catttctcacgatattcctcagcaatg

SEQ ID NO: 107338 - DNA, 27 bp, Artificial sequence
  SiRNA target sequence
atttctcacgatattcctcagcaatgg

SEQ ID NO: 107339 - DNA, 27 bp, Artificial sequence
  SiRNA target sequence
tttctcacgatattcctcagcaatggt

SEQ ID NO: 107340 - DNA, 27 bp, Artificial sequence
  SiRNA target sequence
ttctcacgatattcctcagcaatggta

SEQ ID NO: 107341 - DNA, 27 bp, Artificial sequence
  SiRNA target sequence
tctcacgatattcctcagcaatggtat

SEQ ID NO: 107342 - DNA, 27 bp, Artificial sequence
  SiRNA target sequence
ctcacgatattcctcagcaatggtatc

SEQ ID NO: 107343 - DNA, 27 bp, Artificial sequence
  SiRNA target sequence
tcacgatattcctcagcaatggtatct

SEQ ID NO: 107344 - DNA, 27 bp, Artificial sequence
  SiRNA target sequence
cacgatattcctcagcaatggtatctg

SEQ ID NO: 107345 - DNA, 27 bp, Artificial sequence
  SiRNA target sequence
acgatattcctcagcaatggtatctgt

SEQ ID NO: 107346 - DNA, 27 bp, Artificial sequence
  SiRNA target sequence
cgatattcctcagcaatggtatctgtg

SEQ ID NO: 107347 - DNA, 27 bp, Artificial sequence
  SiRNA target sequence
gatattcctcagcaatggtatctgtga

SEQ ID NO: 107348 - DNA, 27 bp, Artificial sequence
  SiRNA target sequence
atattcctcagcaatggtatctgtgat

SEQ ID NO: 107349 - DNA, 27 bp, Artificial sequence
  SiRNA target sequence
tattcctcagcaatggtatctgtgata

SEQ ID NO: 107350 - DNA, 27 bp, Artificial sequence
  SiRNA target sequence
attcctcagcaatggtatctgtgataa

SEQ ID NO: 107351 - DNA, 27 bp, Artificial sequence
  SiRNA target sequence
ttcctcagcaatggtatctgtgataag

SEQ ID NO: 107352 - DNA, 27 bp, Artificial sequence
  SiRNA target sequence
tcctcagcaatggtatctgtgataagc

SEQ ID NO: 107353 - DNA, 27 bp, Artificial sequence
  SiRNA target sequence
cctcagcaatggtatctgtgataagcg

SEQ ID NO: 107354 - DNA, 27 bp, Artificial sequence
  SiRNA target sequence
ctcagcaatggtatctgtgataagcga

SEQ ID NO: 107355 - DNA, 27 bp, Artificial sequence
  SiRNA target sequence
tcagcaatggtatctgtgataagcgaa

SEQ ID NO: 107356 - DNA, 27 bp, Artificial sequence
  SiRNA target sequence
cagcaatggtatctgtgataagcgaaa

SEQ ID NO: 107357 - DNA, 27 bp, Artificial sequence
  SiRNA target sequence
agcaatggtatctgtgataagcgaaag

SEQ ID NO: 107358 - DNA, 27 bp, Artificial sequence
  SiRNA target sequence
gcaatggtatctgtgataagcgaaagt

SEQ ID NO: 107359 - DNA, 27 bp, Artificial sequence
  SiRNA target sequence
caatggtatctgtgataagcgaaagtt

SEQ ID NO: 107360 - DNA, 27 bp, Artificial sequence
  SiRNA target sequence
aatggtatctgtgataagcgaaagttg

SEQ ID NO: 107361 - DNA, 27 bp, Artificial sequence
  SiRNA target sequence
atggtatctgtgataagcgaaagttgt

SEQ ID NO: 107362 - DNA, 27 bp, Artificial sequence
  SiRNA target sequence
tggtatctgtgataagcgaaagttgta

SEQ ID NO: 107363 - DNA, 27 bp, Artificial sequence
  SiRNA target sequence
ggtatctgtgataagcgaaagttgtag

SEQ ID NO: 107364 - DNA, 27 bp, Artificial sequence
  SiRNA target sequence
gtatctgtgataagcgaaagttgtaga

SEQ ID NO: 107365 - DNA, 27 bp, Artificial sequence
  SiRNA target sequence
tatctgtgataagcgaaagttgtagaa

SEQ ID NO: 107366 - DNA, 27 bp, Artificial sequence
  SiRNA target sequence
atctgtgataagcgaaagttgtagaaa

SEQ ID NO: 107367 - DNA, 27 bp, Artificial sequence
  SiRNA target sequence
tctgtgataagcgaaagttgtagaaaa

SEQ ID NO: 107368 - DNA, 27 bp, Artificial sequence
  SiRNA target sequence
ctgtgataagcgaaagttgtagaaaaa

SEQ ID NO: 107369 - DNA, 27 bp, Artificial sequence
  SiRNA target sequence
tgtgataagcgaaagttgtagaaaaaa

SEQ ID NO: 107370 - DNA, 27 bp, Artificial sequence
  SiRNA target sequence
gtgataagcgaaagttgtagaaaaaaa

SEQ ID NO: 107371 - DNA, 27 bp, Artificial sequence
  SiRNA target sequence
tgataagcgaaagttgtagaaaaaaat

SEQ ID NO: 107372 - DNA, 27 bp, Artificial sequence
  SiRNA target sequence
gataagcgaaagttgtagaaaaaaata

SEQ ID NO: 107373 - DNA, 27 bp, Artificial sequence
  SiRNA target sequence
ataagcgaaagttgtagaaaaaaatag

SEQ ID NO: 107374 - DNA, 27 bp, Artificial sequence
  SiRNA target sequence
taagcgaaagttgtagaaaaaaataga

SEQ ID NO: 107375 - DNA, 27 bp, Artificial sequence
  SiRNA target sequence
aagcgaaagttgtagaaaaaaatagat

SEQ ID NO: 107376 - DNA, 27 bp, Artificial sequence
  SiRNA target sequence
agcgaaagttgtagaaaaaaatagatt

SEQ ID NO: 107377 - DNA, 27 bp, Artificial sequence
  SiRNA target sequence
gcgaaagttgtagaaaaaaatagattt

SEQ ID NO: 107378 - DNA, 27 bp, Artificial sequence
  SiRNA target sequence
cgaaagttgtagaaaaaaatagatttg

SEQ ID NO: 107379 - DNA, 27 bp, Artificial sequence
  SiRNA target sequence
gaaagttgtagaaaaaaatagatttga

SEQ ID NO: 107380 - DNA, 27 bp, Artificial sequence
  SiRNA target sequence
aaagttgtagaaaaaaatagatttgag

SEQ ID NO: 107381 - DNA, 27 bp, Artificial sequence
  SiRNA target sequence
aagttgtagaaaaaaatagatttgagg

SEQ ID NO: 107382 - DNA, 27 bp, Artificial sequence
  SiRNA target sequence
agttgtagaaaaaaatagatttgagga

SEQ ID NO: 107383 - DNA, 27 bp, Artificial sequence
  SiRNA target sequence
gttgtagaaaaaaatagatttgaggaa

SEQ ID NO: 107384 - DNA, 27 bp, Artificial sequence
  SiRNA target sequence
ttgtagaaaaaaatagatttgaggaat

SEQ ID NO: 107385 - DNA, 27 bp, Artificial sequence
  SiRNA target sequence
tgtagaaaaaaatagatttgaggaata

SEQ ID NO: 107386 - DNA, 27 bp, Artificial sequence
  SiRNA target sequence
gtagaaaaaaatagatttgaggaatag

SEQ ID NO: 107387 - DNA, 27 bp, Artificial sequence
  SiRNA target sequence
tagaaaaaaatagatttgaggaataga

SEQ ID NO: 107388 - DNA, 27 bp, Artificial sequence
  SiRNA target sequence
agaaaaaaatagatttgaggaatagaa

SEQ ID NO: 107389 - DNA, 27 bp, Artificial sequence
  SiRNA target sequence
gaaaaaaatagatttgaggaatagaat

SEQ ID NO: 107390 - DNA, 27 bp, Artificial sequence
  SiRNA target sequence
aaaaaaatagatttgaggaatagaatt

SEQ ID NO: 107391 - DNA, 27 bp, Artificial sequence
  SiRNA target sequence
aaaaaatagatttgaggaatagaatta

SEQ ID NO: 107392 - DNA, 27 bp, Artificial sequence
  SiRNA target sequence
aaaaatagatttgaggaatagaattaa

SEQ ID NO: 107393 - DNA, 27 bp, Artificial sequence
  SiRNA target sequence
aaaatagatttgaggaatagaattaaa

SEQ ID NO: 107394 - DNA, 27 bp, Artificial sequence
  SiRNA target sequence
aaatagatttgaggaatagaattaaaa

SEQ ID NO: 107395 - DNA, 27 bp, Artificial sequence
  SiRNA target sequence
aatagatttgaggaatagaattaaaat

SEQ ID NO: 107396 - DNA, 27 bp, Artificial sequence
  SiRNA target sequence
atagatttgaggaatagaattaaaatc

SEQ ID NO: 107397 - DNA, 27 bp, Artificial sequence
  SiRNA target sequence
tagatttgaggaatagaattaaaatca

SEQ ID NO: 107398 - DNA, 27 bp, Artificial sequence
  SiRNA target sequence
agatttgaggaatagaattaaaatcac

SEQ ID NO: 107399 - DNA, 27 bp, Artificial sequence
  SiRNA target sequence
gatttgaggaatagaattaaaatcaca

SEQ ID NO: 107400 - DNA, 27 bp, Artificial sequence
  SiRNA target sequence
atttgaggaatagaattaaaatcacaa

SEQ ID NO: 107401 - DNA, 27 bp, Artificial sequence
  SiRNA target sequence
tttgaggaatagaattaaaatcacaat

SEQ ID NO: 107402 - DNA, 27 bp, Artificial sequence
  SiRNA target sequence
ttgaggaatagaattaaaatcacaata

SEQ ID NO: 107403 - DNA, 27 bp, Artificial sequence
  SiRNA target sequence
tgaggaatagaattaaaatcacaatat

SEQ ID NO: 107404 - DNA, 27 bp, Artificial sequence
  SiRNA target sequence
gaggaatagaattaaaatcacaatatt

SEQ ID NO: 107405 - DNA, 27 bp, Artificial sequence
  SiRNA target sequence
aggaatagaattaaaatcacaatattt

SEQ ID NO: 107406 - DNA, 27 bp, Artificial sequence
  SiRNA target sequence
ggaatagaattaaaatcacaatatttt

SEQ ID NO: 107407 - DNA, 27 bp, Artificial sequence
  SiRNA target sequence
gaatagaattaaaatcacaatattttt

SEQ ID NO: 107408 - DNA, 27 bp, Artificial sequence
  SiRNA target sequence
aatagaattaaaatcacaatatttttt

SEQ ID NO: 107409 - DNA, 27 bp, Artificial sequence
  SiRNA target sequence
atagaattaaaatcacaatatttttta

SEQ ID NO: 107410 - DNA, 27 bp, Artificial sequence
  SiRNA target sequence
tagaattaaaatcacaatattttttaa

SEQ ID NO: 107411 - DNA, 27 bp, Artificial sequence
  SiRNA target sequence
agaattaaaatcacaatattttttaat

SEQ ID NO: 107412 - DNA, 27 bp, Artificial sequence
  SiRNA target sequence
gaattaaaatcacaatattttttaata

SEQ ID NO: 107413 - DNA, 27 bp, Artificial sequence
  SiRNA target sequence
aattaaaatcacaatattttttaatat

SEQ ID NO: 107414 - DNA, 27 bp, Artificial sequence
  SiRNA target sequence
attaaaatcacaatattttttaatata

SEQ ID NO: 107415 - DNA, 27 bp, Artificial sequence
  SiRNA target sequence
ttaaaatcacaatattttttaatatat

SEQ ID NO: 107416 - DNA, 27 bp, Artificial sequence
  SiRNA target sequence
taaaatcacaatattttttaatatatt

SEQ ID NO: 107417 - DNA, 27 bp, Artificial sequence
  SiRNA target sequence
aaaatcacaatattttttaatatattt

SEQ ID NO: 107418 - DNA, 27 bp, Artificial sequence
  SiRNA target sequence
aaatcacaatattttttaatatattta

SEQ ID NO: 107419 - DNA, 27 bp, Artificial sequence
  SiRNA target sequence
aatcacaatattttttaatatatttaa

SEQ ID NO: 107420 - DNA, 27 bp, Artificial sequence
  SiRNA target sequence
atcacaatattttttaatatatttaac

SEQ ID NO: 107421 - DNA, 27 bp, Artificial sequence
  SiRNA target sequence
tcacaatattttttaatatatttaacc

SEQ ID NO: 107422 - DNA, 27 bp, Artificial sequence
  SiRNA target sequence
cacaatattttttaatatatttaacca

SEQ ID NO: 107423 - DNA, 27 bp, Artificial sequence
  SiRNA target sequence
acaatattttttaatatatttaaccaa

SEQ ID NO: 107424 - DNA, 27 bp, Artificial sequence
  SiRNA target sequence
caatattttttaatatatttaaccaag

SEQ ID NO: 107425 - DNA, 27 bp, Artificial sequence
  SiRNA target sequence
aatattttttaatatatttaaccaagg

SEQ ID NO: 107426 - DNA, 27 bp, Artificial sequence
  SiRNA target sequence
atattttttaatatatttaaccaaggt

SEQ ID NO: 107427 - DNA, 27 bp, Artificial sequence
  SiRNA target sequence
tattttttaatatatttaaccaaggta

SEQ ID NO: 107428 - DNA, 27 bp, Artificial sequence
  SiRNA target sequence
attttttaatatatttaaccaaggtat

SEQ ID NO: 107429 - DNA, 27 bp, Artificial sequence
  SiRNA target sequence
ttttttaatatatttaaccaaggtatt

SEQ ID NO: 107430 - DNA, 27 bp, Artificial sequence
  SiRNA target sequence
tttttaatatatttaaccaaggtattg

SEQ ID NO: 107431 - DNA, 27 bp, Artificial sequence
  SiRNA target sequence
ttttaatatatttaaccaaggtattgt

SEQ ID NO: 107432 - DNA, 27 bp, Artificial sequence
  SiRNA target sequence
tttaatatatttaaccaaggtattgtc

SEQ ID NO: 107433 - DNA, 27 bp, Artificial sequence
  SiRNA target sequence
ttaatatatttaaccaaggtattgtcc

SEQ ID NO: 107434 - DNA, 27 bp, Artificial sequence
  SiRNA target sequence
taatatatttaaccaaggtattgtcct

SEQ ID NO: 107435 - DNA, 27 bp, Artificial sequence
  SiRNA target sequence
aatatatttaaccaaggtattgtcctt

SEQ ID NO: 107436 - DNA, 27 bp, Artificial sequence
  SiRNA target sequence
atatatttaaccaaggtattgtccttt

SEQ ID NO: 107437 - DNA, 27 bp, Artificial sequence
  SiRNA target sequence
tatatttaaccaaggtattgtccttta

SEQ ID NO: 107438 - DNA, 27 bp, Artificial sequence
  SiRNA target sequence
atatttaaccaaggtattgtcctttat

SEQ ID NO: 107439 - DNA, 27 bp, Artificial sequence
  SiRNA target sequence
tatttaaccaaggtattgtcctttatg

SEQ ID NO: 107440 - DNA, 27 bp, Artificial sequence
  SiRNA target sequence
atttaaccaaggtattgtcctttatgt

SEQ ID NO: 107441 - DNA, 27 bp, Artificial sequence
  SiRNA target sequence
tttaaccaaggtattgtcctttatgtt

SEQ ID NO: 107442 - DNA, 27 bp, Artificial sequence
  SiRNA target sequence
ttaaccaaggtattgtcctttatgtta

SEQ ID NO: 107443 - DNA, 27 bp, Artificial sequence
  SiRNA target sequence
taaccaaggtattgtcctttatgttat

SEQ ID NO: 107444 - DNA, 27 bp, Artificial sequence
  SiRNA target sequence
aaccaaggtattgtcctttatgttatt

SEQ ID NO: 107445 - DNA, 27 bp, Artificial sequence
  SiRNA target sequence
accaaggtattgtcctttatgttatta

SEQ ID NO: 107446 - DNA, 27 bp, Artificial sequence
  SiRNA target sequence
ccaaggtattgtcctttatgttattat

SEQ ID NO: 107447 - DNA, 27 bp, Artificial sequence
  SiRNA target sequence
caaggtattgtcctttatgttattata

SEQ ID NO: 107448 - DNA, 27 bp, Artificial sequence
  SiRNA target sequence
aaggtattgtcctttatgttattatat

SEQ ID NO: 107449 - DNA, 27 bp, Artificial sequence
  SiRNA target sequence
aggtattgtcctttatgttattatatc

SEQ ID NO: 107450 - DNA, 27 bp, Artificial sequence
  SiRNA target sequence
ggtattgtcctttatgttattatatct

SEQ ID NO: 107451 - DNA, 27 bp, Artificial sequence
  SiRNA target sequence
gtattgtcctttatgttattatatctt

SEQ ID NO: 107452 - DNA, 27 bp, Artificial sequence
  SiRNA target sequence
tattgtcctttatgttattatatctta

SEQ ID NO: 107453 - DNA, 27 bp, Artificial sequence
  SiRNA target sequence
attgtcctttatgttattatatcttac

SEQ ID NO: 107454 - DNA, 27 bp, Artificial sequence
  SiRNA target sequence
ttgtcctttatgttattatatcttaca

SEQ ID NO: 107455 - DNA, 27 bp, Artificial sequence
  SiRNA target sequence
tgtcctttatgttattatatcttacaa

SEQ ID NO: 107456 - DNA, 27 bp, Artificial sequence
  SiRNA target sequence
gtcctttatgttattatatcttacaaa

SEQ ID NO: 107457 - DNA, 27 bp, Artificial sequence
  SiRNA target sequence
tcctttatgttattatatcttacaaac

SEQ ID NO: 107458 - DNA, 27 bp, Artificial sequence
  SiRNA target sequence
cctttatgttattatatcttacaaact

SEQ ID NO: 107459 - DNA, 27 bp, Artificial sequence
  SiRNA target sequence
ctttatgttattatatcttacaaactc

SEQ ID NO: 107460 - DNA, 27 bp, Artificial sequence
  SiRNA target sequence
tttatgttattatatcttacaaactcc

SEQ ID NO: 107461 - DNA, 27 bp, Artificial sequence
  SiRNA target sequence
ttatgttattatatcttacaaactcct

SEQ ID NO: 107462 - DNA, 27 bp, Artificial sequence
  SiRNA target sequence
tatgttattatatcttacaaactcctc

SEQ ID NO: 107463 - DNA, 27 bp, Artificial sequence
  SiRNA target sequence
atgttattatatcttacaaactcctcg

SEQ ID NO: 107464 - DNA, 27 bp, Artificial sequence
  SiRNA target sequence
tgttattatatcttacaaactcctcgt

SEQ ID NO: 107465 - DNA, 27 bp, Artificial sequence
  SiRNA target sequence
gttattatatcttacaaactcctcgta

SEQ ID NO: 107466 - DNA, 27 bp, Artificial sequence
  SiRNA target sequence
ttattatatcttacaaactcctcgtaa

SEQ ID NO: 107467 - DNA, 27 bp, Artificial sequence
  SiRNA target sequence
tattatatcttacaaactcctcgtaat

SEQ ID NO: 107468 - DNA, 27 bp, Artificial sequence
  SiRNA target sequence
attatatcttacaaactcctcgtaatt

SEQ ID NO: 107469 - DNA, 27 bp, Artificial sequence
  SiRNA target sequence
ttatatcttacaaactcctcgtaatta

SEQ ID NO: 107470 - DNA, 27 bp, Artificial sequence
  SiRNA target sequence
tatatcttacaaactcctcgtaattat

SEQ ID NO: 107471 - DNA, 27 bp, Artificial sequence
  SiRNA target sequence
atatcttacaaactcctcgtaattata

SEQ ID NO: 107472 - DNA, 27 bp, Artificial sequence
  SiRNA target sequence
tatcttacaaactcctcgtaattataa

SEQ ID NO: 107473 - DNA, 27 bp, Artificial sequence
  SiRNA target sequence
atcttacaaactcctcgtaattataat

SEQ ID NO: 107474 - DNA, 27 bp, Artificial sequence
  SiRNA target sequence
tcttacaaactcctcgtaattataatt

SEQ ID NO: 107475 - DNA, 27 bp, Artificial sequence
  SiRNA target sequence
cttacaaactcctcgtaattataattt

SEQ ID NO: 107476 - DNA, 27 bp, Artificial sequence
  SiRNA target sequence
ttacaaactcctcgtaattataatttt

SEQ ID NO: 107477 - DNA, 27 bp, Artificial sequence
  SiRNA target sequence
tacaaactcctcgtaattataattttc

SEQ ID NO: 107478 - DNA, 27 bp, Artificial sequence
  SiRNA target sequence
acaaactcctcgtaattataattttca

SEQ ID NO: 107479 - DNA, 27 bp, Artificial sequence
  SiRNA target sequence
caaactcctcgtaattataattttcag

SEQ ID NO: 107480 - DNA, 27 bp, Artificial sequence
  SiRNA target sequence
aaactcctcgtaattataattttcagg

SEQ ID NO: 107481 - DNA, 27 bp, Artificial sequence
  SiRNA target sequence
aactcctcgtaattataattttcagga

SEQ ID NO: 107482 - DNA, 27 bp, Artificial sequence
  SiRNA target sequence
actcctcgtaattataattttcaggat

SEQ ID NO: 107483 - DNA, 27 bp, Artificial sequence
  SiRNA target sequence
ctcctcgtaattataattttcaggata

SEQ ID NO: 107484 - DNA, 27 bp, Artificial sequence
  SiRNA target sequence
tcctcgtaattataattttcaggataa

SEQ ID NO: 107485 - DNA, 27 bp, Artificial sequence
  SiRNA target sequence
cctcgtaattataattttcaggataaa

SEQ ID NO: 107486 - DNA, 27 bp, Artificial sequence
  SiRNA target sequence
ctcgtaattataattttcaggataaac

SEQ ID NO: 107487 - DNA, 27 bp, Artificial sequence
  SiRNA target sequence
tcgtaattataattttcaggataaacc

SEQ ID NO: 107488 - DNA, 27 bp, Artificial sequence
  SiRNA target sequence
cgtaattataattttcaggataaaccg

SEQ ID NO: 107489 - DNA, 27 bp, Artificial sequence
  SiRNA target sequence
gtaattataattttcaggataaaccgc

SEQ ID NO: 107490 - DNA, 27 bp, Artificial sequence
  SiRNA target sequence
taattataattttcaggataaaccgct

SEQ ID NO: 107491 - DNA, 27 bp, Artificial sequence
  SiRNA target sequence
aattataattttcaggataaaccgcta

SEQ ID NO: 107492 - DNA, 27 bp, Artificial sequence
  SiRNA target sequence
attataattttcaggataaaccgctag

SEQ ID NO: 107493 - DNA, 27 bp, Artificial sequence
  SiRNA target sequence
ttataattttcaggataaaccgctaga

SEQ ID NO: 107494 - DNA, 27 bp, Artificial sequence
  SiRNA target sequence
tataattttcaggataaaccgctagac

SEQ ID NO: 107495 - DNA, 27 bp, Artificial sequence
  SiRNA target sequence
ataattttcaggataaaccgctagaca

SEQ ID NO: 107496 - DNA, 27 bp, Artificial sequence
  SiRNA target sequence
taattttcaggataaaccgctagacaa

SEQ ID NO: 107497 - DNA, 27 bp, Artificial sequence
  SiRNA target sequence
aattttcaggataaaccgctagacaat

SEQ ID NO: 107498 - DNA, 27 bp, Artificial sequence
  SiRNA target sequence
attttcaggataaaccgctagacaatc

SEQ ID NO: 107499 - DNA, 27 bp, Artificial sequence
  SiRNA target sequence
ttttcaggataaaccgctagacaatca

SEQ ID NO: 107500 - DNA, 27 bp, Artificial sequence
  SiRNA target sequence
tttcaggataaaccgctagacaatcac

SEQ ID NO: 107501 - DNA, 27 bp, Artificial sequence
  SiRNA target sequence
ttcaggataaaccgctagacaatcacc

SEQ ID NO: 107502 - DNA, 27 bp, Artificial sequence
  SiRNA target sequence
tcaggataaaccgctagacaatcaccg

SEQ ID NO: 107503 - DNA, 27 bp, Artificial sequence
  SiRNA target sequence
caggataaaccgctagacaatcaccga

SEQ ID NO: 107504 - DNA, 27 bp, Artificial sequence
  SiRNA target sequence
aggataaaccgctagacaatcaccgat

SEQ ID NO: 107505 - DNA, 27 bp, Artificial sequence
  SiRNA target sequence
ggataaaccgctagacaatcaccgatt

SEQ ID NO: 107506 - DNA, 27 bp, Artificial sequence
  SiRNA target sequence
gataaaccgctagacaatcaccgattt

SEQ ID NO: 107507 - DNA, 27 bp, Artificial sequence
  SiRNA target sequence
ataaaccgctagacaatcaccgatttc

SEQ ID NO: 107508 - DNA, 27 bp, Artificial sequence
  SiRNA target sequence
taaaccgctagacaatcaccgatttca

SEQ ID NO: 107509 - DNA, 27 bp, Artificial sequence
  SiRNA target sequence
aaaccgctagacaatcaccgatttcaa

SEQ ID NO: 107510 - DNA, 27 bp, Artificial sequence
  SiRNA target sequence
aaccgctagacaatcaccgatttcaaa

SEQ ID NO: 107511 - DNA, 27 bp, Artificial sequence
  SiRNA target sequence
accgctagacaatcaccgatttcaaaa

SEQ ID NO: 107512 - DNA, 27 bp, Artificial sequence
  SiRNA target sequence
ccgctagacaatcaccgatttcaaaat

SEQ ID NO: 107513 - DNA, 27 bp, Artificial sequence
  SiRNA target sequence
cgctagacaatcaccgatttcaaaatt

SEQ ID NO: 107514 - DNA, 27 bp, Artificial sequence
  SiRNA target sequence
gctagacaatcaccgatttcaaaattt

SEQ ID NO: 107515 - DNA, 27 bp, Artificial sequence
  SiRNA target sequence
ctagacaatcaccgatttcaaaatttt

SEQ ID NO: 107516 - DNA, 27 bp, Artificial sequence
  SiRNA target sequence
tagacaatcaccgatttcaaaattttc

SEQ ID NO: 107517 - DNA, 27 bp, Artificial sequence
  SiRNA target sequence
agacaatcaccgatttcaaaattttct

SEQ ID NO: 107518 - DNA, 27 bp, Artificial sequence
  SiRNA target sequence
gacaatcaccgatttcaaaattttcta

SEQ ID NO: 107519 - DNA, 27 bp, Artificial sequence
  SiRNA target sequence
acaatcaccgatttcaaaattttctat

SEQ ID NO: 107520 - DNA, 27 bp, Artificial sequence
  SiRNA target sequence
caatcaccgatttcaaaattttctata

SEQ ID NO: 107521 - DNA, 27 bp, Artificial sequence
  SiRNA target sequence
aatcaccgatttcaaaattttctatat

SEQ ID NO: 107522 - DNA, 27 bp, Artificial sequence
  SiRNA target sequence
atcaccgatttcaaaattttctatatc

SEQ ID NO: 107523 - DNA, 27 bp, Artificial sequence
  SiRNA target sequence
tcaccgatttcaaaattttctatatct

SEQ ID NO: 107524 - DNA, 27 bp, Artificial sequence
  SiRNA target sequence
caccgatttcaaaattttctatatcta

SEQ ID NO: 107525 - DNA, 27 bp, Artificial sequence
  SiRNA target sequence
accgatttcaaaattttctatatctat

SEQ ID NO: 107526 - DNA, 27 bp, Artificial sequence
  SiRNA target sequence
ccgatttcaaaattttctatatctata

SEQ ID NO: 107527 - DNA, 27 bp, Artificial sequence
  SiRNA target sequence
cgatttcaaaattttctatatctatat

SEQ ID NO: 107528 - DNA, 27 bp, Artificial sequence
  SiRNA target sequence
gatttcaaaattttctatatctatatc

SEQ ID NO: 107529 - DNA, 27 bp, Artificial sequence
  SiRNA target sequence
atttcaaaattttctatatctatatca

SEQ ID NO: 107530 - DNA, 27 bp, Artificial sequence
  SiRNA target sequence
tttcaaaattttctatatctatatcaa

SEQ ID NO: 107531 - DNA, 27 bp, Artificial sequence
  SiRNA target sequence
ttcaaaattttctatatctatatcaaa

SEQ ID NO: 107532 - DNA, 27 bp, Artificial sequence
  SiRNA target sequence
tcaaaattttctatatctatatcaaat

SEQ ID NO: 107533 - DNA, 27 bp, Artificial sequence
  SiRNA target sequence
caaaattttctatatctatatcaaatt

SEQ ID NO: 107534 - DNA, 27 bp, Artificial sequence
  SiRNA target sequence
aaaattttctatatctatatcaaattt

SEQ ID NO: 107535 - DNA, 27 bp, Artificial sequence
  SiRNA target sequence
aaattttctatatctatatcaaatttt

SEQ ID NO: 107536 - DNA, 27 bp, Artificial sequence
  SiRNA target sequence
aattttctatatctatatcaaatttta

SEQ ID NO: 107537 - DNA, 27 bp, Artificial sequence
  SiRNA target sequence
attttctatatctatatcaaattttat

SEQ ID NO: 107538 - DNA, 27 bp, Artificial sequence
  SiRNA target sequence
ttttctatatctatatcaaattttatt

SEQ ID NO: 107539 - DNA, 27 bp, Artificial sequence
  SiRNA target sequence
tttctatatctatatcaaattttattt

SEQ ID NO: 107540 - DNA, 27 bp, Artificial sequence
  SiRNA target sequence
ttctatatctatatcaaattttatttc

SEQ ID NO: 107541 - DNA, 27 bp, Artificial sequence
  SiRNA target sequence
tctatatctatatcaaattttatttct

SEQ ID NO: 107542 - DNA, 27 bp, Artificial sequence
  SiRNA target sequence
ctatatctatatcaaattttatttcta

SEQ ID NO: 107543 - DNA, 27 bp, Artificial sequence
  SiRNA target sequence
tatatctatatcaaattttatttctaa

SEQ ID NO: 107544 - DNA, 27 bp, Artificial sequence
  SiRNA target sequence
atatctatatcaaattttatttctaaa

SEQ ID NO: 107545 - DNA, 27 bp, Artificial sequence
  SiRNA target sequence
tatctatatcaaattttatttctaaaa

SEQ ID NO: 107546 - DNA, 27 bp, Artificial sequence
  SiRNA target sequence
atctatatcaaattttatttctaaaat

SEQ ID NO: 107547 - DNA, 27 bp, Artificial sequence
  SiRNA target sequence
tctatatcaaattttatttctaaaata

SEQ ID NO: 107548 - DNA, 27 bp, Artificial sequence
  SiRNA target sequence
ctatatcaaattttatttctaaaatag

SEQ ID NO: 107549 - DNA, 27 bp, Artificial sequence
  SiRNA target sequence
tatatcaaattttatttctaaaatagg

SEQ ID NO: 107550 - DNA, 27 bp, Artificial sequence
  SiRNA target sequence
atatcaaattttatttctaaaatagga

SEQ ID NO: 107551 - DNA, 27 bp, Artificial sequence
  SiRNA target sequence
tatcaaattttatttctaaaataggat

SEQ ID NO: 107552 - DNA, 27 bp, Artificial sequence
  SiRNA target sequence
atcaaattttatttctaaaataggata

SEQ ID NO: 107553 - DNA, 27 bp, Artificial sequence
  SiRNA target sequence
tcaaattttatttctaaaataggataa

SEQ ID NO: 107554 - DNA, 27 bp, Artificial sequence
  SiRNA target sequence
caaattttatttctaaaataggataaa

SEQ ID NO: 107555 - DNA, 27 bp, Artificial sequence
  SiRNA target sequence
aaattttatttctaaaataggataaat

SEQ ID NO: 107556 - DNA, 27 bp, Artificial sequence
  SiRNA target sequence
aattttatttctaaaataggataaatg

SEQ ID NO: 107557 - DNA, 27 bp, Artificial sequence
  SiRNA target sequence
attttatttctaaaataggataaatgt

SEQ ID NO: 107558 - DNA, 27 bp, Artificial sequence
  SiRNA target sequence
ttttatttctaaaataggataaatgta

SEQ ID NO: 107559 - DNA, 27 bp, Artificial sequence
  SiRNA target sequence
tttatttctaaaataggataaatgtaa

SEQ ID NO: 107560 - DNA, 27 bp, Artificial sequence
  SiRNA target sequence
ttatttctaaaataggataaatgtaat

SEQ ID NO: 107561 - DNA, 27 bp, Artificial sequence
  SiRNA target sequence
tatttctaaaataggataaatgtaatt

SEQ ID NO: 107562 - DNA, 27 bp, Artificial sequence
  SiRNA target sequence
atttctaaaataggataaatgtaattg

SEQ ID NO: 107563 - DNA, 27 bp, Artificial sequence
  SiRNA target sequence
tttctaaaataggataaatgtaattgt

SEQ ID NO: 107564 - DNA, 27 bp, Artificial sequence
  SiRNA target sequence
ttctaaaataggataaatgtaattgta

SEQ ID NO: 107565 - DNA, 27 bp, Artificial sequence
  SiRNA target sequence
tctaaaataggataaatgtaattgtaa

SEQ ID NO: 107566 - DNA, 27 bp, Artificial sequence
  SiRNA target sequence
ctaaaataggataaatgtaattgtaag

SEQ ID NO: 107567 - DNA, 27 bp, Artificial sequence
  SiRNA target sequence
taaaataggataaatgtaattgtaagg

SEQ ID NO: 107568 - DNA, 27 bp, Artificial sequence
  SiRNA target sequence
aaaataggataaatgtaattgtaaggt

SEQ ID NO: 107569 - DNA, 27 bp, Artificial sequence
  SiRNA target sequence
aaataggataaatgtaattgtaaggtg

SEQ ID NO: 107570 - DNA, 27 bp, Artificial sequence
  SiRNA target sequence
aataggataaatgtaattgtaaggtgt

SEQ ID NO: 107571 - DNA, 27 bp, Artificial sequence
  SiRNA target sequence
ataggataaatgtaattgtaaggtgtt

SEQ ID NO: 107572 - DNA, 27 bp, Artificial sequence
  SiRNA target sequence
taggataaatgtaattgtaaggtgtta

SEQ ID NO: 107573 - DNA, 27 bp, Artificial sequence
  SiRNA target sequence
aggataaatgtaattgtaaggtgttaa

SEQ ID NO: 107574 - DNA, 27 bp, Artificial sequence
  SiRNA target sequence
ggataaatgtaattgtaaggtgttaat

SEQ ID NO: 107575 - DNA, 27 bp, Artificial sequence
  SiRNA target sequence
gataaatgtaattgtaaggtgttaata

SEQ ID NO: 107576 - DNA, 27 bp, Artificial sequence
  SiRNA target sequence
ataaatgtaattgtaaggtgttaatat

SEQ ID NO: 107577 - DNA, 27 bp, Artificial sequence
  SiRNA target sequence
taaatgtaattgtaaggtgttaatatc

SEQ ID NO: 107578 - DNA, 27 bp, Artificial sequence
  SiRNA target sequence
aaatgtaattgtaaggtgttaatatct

SEQ ID NO: 107579 - DNA, 27 bp, Artificial sequence
  SiRNA target sequence
aatgtaattgtaaggtgttaatatctt

SEQ ID NO: 107580 - DNA, 27 bp, Artificial sequence
  SiRNA target sequence
atgtaattgtaaggtgttaatatctta

SEQ ID NO: 107581 - DNA, 27 bp, Artificial sequence
  SiRNA target sequence
tgtaattgtaaggtgttaatatcttaa

SEQ ID NO: 107582 - DNA, 27 bp, Artificial sequence
  SiRNA target sequence
gtaattgtaaggtgttaatatcttaat

SEQ ID NO: 107583 - DNA, 27 bp, Artificial sequence
  SiRNA target sequence
taattgtaaggtgttaatatcttaata

SEQ ID NO: 107584 - DNA, 27 bp, Artificial sequence
  SiRNA target sequence
aattgtaaggtgttaatatcttaatat

SEQ ID NO: 107585 - DNA, 27 bp, Artificial sequence
  SiRNA target sequence
attgtaaggtgttaatatcttaatatc

SEQ ID NO: 107586 - DNA, 27 bp, Artificial sequence
  SiRNA target sequence
ttgtaaggtgttaatatcttaatatca

SEQ ID NO: 107587 - DNA, 27 bp, Artificial sequence
  SiRNA target sequence
tgtaaggtgttaatatcttaatatcat

SEQ ID NO: 107588 - DNA, 27 bp, Artificial sequence
  SiRNA target sequence
gtaaggtgttaatatcttaatatcatt

SEQ ID NO: 107589 - DNA, 27 bp, Artificial sequence
  SiRNA target sequence
taaggtgttaatatcttaatatcattt

SEQ ID NO: 107590 - DNA, 27 bp, Artificial sequence
  SiRNA target sequence
aaggtgttaatatcttaatatcattta

SEQ ID NO: 107591 - DNA, 27 bp, Artificial sequence
  SiRNA target sequence
aggtgttaatatcttaatatcatttat

SEQ ID NO: 107592 - DNA, 27 bp, Artificial sequence
  SiRNA target sequence
ggtgttaatatcttaatatcatttatt

SEQ ID NO: 107593 - DNA, 27 bp, Artificial sequence
  SiRNA target sequence
gtgttaatatcttaatatcatttattg

SEQ ID NO: 107594 - DNA, 27 bp, Artificial sequence
  SiRNA target sequence
tgttaatatcttaatatcatttattga

SEQ ID NO: 107595 - DNA, 27 bp, Artificial sequence
  SiRNA target sequence
gttaatatcttaatatcatttattgac

SEQ ID NO: 107596 - DNA, 27 bp, Artificial sequence
  SiRNA target sequence
ttaatatcttaatatcatttattgacg

SEQ ID NO: 107597 - DNA, 27 bp, Artificial sequence
  SiRNA target sequence
taatatcttaatatcatttattgacgc

SEQ ID NO: 107598 - DNA, 27 bp, Artificial sequence
  SiRNA target sequence
aatatcttaatatcatttattgacgca

SEQ ID NO: 107599 - DNA, 27 bp, Artificial sequence
  SiRNA target sequence
atatcttaatatcatttattgacgcac

SEQ ID NO: 107600 - DNA, 27 bp, Artificial sequence
  SiRNA target sequence
tatcttaatatcatttattgacgcact

SEQ ID NO: 107601 - DNA, 27 bp, Artificial sequence
  SiRNA target sequence
atcttaatatcatttattgacgcactg

SEQ ID NO: 107602 - DNA, 27 bp, Artificial sequence
  SiRNA target sequence
tcttaatatcatttattgacgcactgt

SEQ ID NO: 107603 - DNA, 27 bp, Artificial sequence
  SiRNA target sequence
cttaatatcatttattgacgcactgta

SEQ ID NO: 107604 - DNA, 27 bp, Artificial sequence
  SiRNA target sequence
ttaatatcatttattgacgcactgtat

SEQ ID NO: 107605 - DNA, 27 bp, Artificial sequence
  SiRNA target sequence
taatatcatttattgacgcactgtata

SEQ ID NO: 107606 - DNA, 27 bp, Artificial sequence
  SiRNA target sequence
aatatcatttattgacgcactgtataa

SEQ ID NO: 107607 - DNA, 27 bp, Artificial sequence
  SiRNA target sequence
atatcatttattgacgcactgtataaa

SEQ ID NO: 107608 - DNA, 27 bp, Artificial sequence
  SiRNA target sequence
tatcatttattgacgcactgtataaat

SEQ ID NO: 107609 - DNA, 27 bp, Artificial sequence
  SiRNA target sequence
atcatttattgacgcactgtataaatc

SEQ ID NO: 107610 - DNA, 27 bp, Artificial sequence
  SiRNA target sequence
tcatttattgacgcactgtataaatca

SEQ ID NO: 107611 - DNA, 27 bp, Artificial sequence
  SiRNA target sequence
catttattgacgcactgtataaatcat

SEQ ID NO: 107612 - DNA, 27 bp, Artificial sequence
  SiRNA target sequence
atttattgacgcactgtataaatcatt

SEQ ID NO: 107613 - DNA, 27 bp, Artificial sequence
  SiRNA target sequence
tttattgacgcactgtataaatcattt

SEQ ID NO: 107614 - DNA, 27 bp, Artificial sequence
  SiRNA target sequence
ttattgacgcactgtataaatcatttt

SEQ ID NO: 107615 - DNA, 27 bp, Artificial sequence
  SiRNA target sequence
tattgacgcactgtataaatcattttt

SEQ ID NO: 107616 - DNA, 27 bp, Artificial sequence
  SiRNA target sequence
attgacgcactgtataaatcattttta

SEQ ID NO: 107617 - DNA, 27 bp, Artificial sequence
  SiRNA target sequence
ttgacgcactgtataaatcatttttac

SEQ ID NO: 107618 - DNA, 27 bp, Artificial sequence
  SiRNA target sequence
tgacgcactgtataaatcatttttaca

SEQ ID NO: 107619 - DNA, 27 bp, Artificial sequence
  SiRNA target sequence
gacgcactgtataaatcatttttacaa

SEQ ID NO: 107620 - DNA, 27 bp, Artificial sequence
  SiRNA target sequence
acgcactgtataaatcatttttacaac

SEQ ID NO: 107621 - DNA, 27 bp, Artificial sequence
  SiRNA target sequence
cgcactgtataaatcatttttacaact

SEQ ID NO: 107622 - DNA, 27 bp, Artificial sequence
  SiRNA target sequence
gcactgtataaatcatttttacaactt

SEQ ID NO: 107623 - DNA, 27 bp, Artificial sequence
  SiRNA target sequence
cactgtataaatcatttttacaacttg

SEQ ID NO: 107624 - DNA, 27 bp, Artificial sequence
  SiRNA target sequence
actgtataaatcatttttacaacttgc

SEQ ID NO: 107625 - DNA, 27 bp, Artificial sequence
  SiRNA target sequence
ctgtataaatcatttttacaacttgca

SEQ ID NO: 107626 - DNA, 27 bp, Artificial sequence
  SiRNA target sequence
tgtataaatcatttttacaacttgcaa

SEQ ID NO: 107627 - DNA, 27 bp, Artificial sequence
  SiRNA target sequence
gtataaatcatttttacaacttgcaaa

SEQ ID NO: 107628 - DNA, 27 bp, Artificial sequence
  SiRNA target sequence
tataaatcatttttacaacttgcaaaa

SEQ ID NO: 107629 - DNA, 27 bp, Artificial sequence
  SiRNA target sequence
ataaatcatttttacaacttgcaaaat

SEQ ID NO: 107630 - DNA, 27 bp, Artificial sequence
  SiRNA target sequence
taaatcatttttacaacttgcaaaatt

SEQ ID NO: 107631 - DNA, 27 bp, Artificial sequence
  SiRNA target sequence
aaatcatttttacaacttgcaaaattt

SEQ ID NO: 107632 - DNA, 27 bp, Artificial sequence
  SiRNA target sequence
aatcatttttacaacttgcaaaatttt

SEQ ID NO: 107633 - DNA, 27 bp, Artificial sequence
  SiRNA target sequence
atcatttttacaacttgcaaaattttt

SEQ ID NO: 107634 - DNA, 27 bp, Artificial sequence
  SiRNA target sequence
tcatttttacaacttgcaaaattttta

SEQ ID NO: 107635 - DNA, 27 bp, Artificial sequence
  SiRNA target sequence
catttttacaacttgcaaaatttttag

SEQ ID NO: 107636 - DNA, 27 bp, Artificial sequence
  SiRNA target sequence
atttttacaacttgcaaaatttttagc

SEQ ID NO: 107637 - DNA, 27 bp, Artificial sequence
  SiRNA target sequence
tttttacaacttgcaaaatttttagca

SEQ ID NO: 107638 - DNA, 27 bp, Artificial sequence
  SiRNA target sequence
ttttacaacttgcaaaatttttagcat

SEQ ID NO: 107639 - DNA, 27 bp, Artificial sequence
  SiRNA target sequence
tttacaacttgcaaaatttttagcatt

SEQ ID NO: 107640 - DNA, 27 bp, Artificial sequence
  SiRNA target sequence
ttacaacttgcaaaatttttagcattt

SEQ ID NO: 107641 - DNA, 27 bp, Artificial sequence
  SiRNA target sequence
tacaacttgcaaaatttttagcatttt

SEQ ID NO: 107642 - DNA, 27 bp, Artificial sequence
  SiRNA target sequence
acaacttgcaaaatttttagcattttg

SEQ ID NO: 107643 - DNA, 27 bp, Artificial sequence
  SiRNA target sequence
caacttgcaaaatttttagcattttgt

SEQ ID NO: 107644 - DNA, 27 bp, Artificial sequence
  SiRNA target sequence
aacttgcaaaatttttagcattttgta

SEQ ID NO: 107645 - DNA, 27 bp, Artificial sequence
  SiRNA target sequence
acttgcaaaatttttagcattttgtag

SEQ ID NO: 107646 - DNA, 27 bp, Artificial sequence
  SiRNA target sequence
cttgcaaaatttttagcattttgtagt

SEQ ID NO: 107647 - DNA, 27 bp, Artificial sequence
  SiRNA target sequence
ttgcaaaatttttagcattttgtagtt

SEQ ID NO: 107648 - DNA, 27 bp, Artificial sequence
  SiRNA target sequence
tgcaaaatttttagcattttgtagttt

SEQ ID NO: 107649 - DNA, 27 bp, Artificial sequence
  SiRNA target sequence
gcaaaatttttagcattttgtagtttg

SEQ ID NO: 107650 - DNA, 27 bp, Artificial sequence
  SiRNA target sequence
caaaatttttagcattttgtagtttgt

SEQ ID NO: 107651 - DNA, 27 bp, Artificial sequence
  SiRNA target sequence
aaaatttttagcattttgtagtttgta

SEQ ID NO: 107652 - DNA, 27 bp, Artificial sequence
  SiRNA target sequence
aaatttttagcattttgtagtttgtaa

SEQ ID NO: 107653 - DNA, 27 bp, Artificial sequence
  SiRNA target sequence
aatttttagcattttgtagtttgtaat

SEQ ID NO: 107654 - DNA, 27 bp, Artificial sequence
  SiRNA target sequence
atttttagcattttgtagtttgtaatg

SEQ ID NO: 107655 - DNA, 27 bp, Artificial sequence
  SiRNA target sequence
tttttagcattttgtagtttgtaatgc

SEQ ID NO: 107656 - DNA, 27 bp, Artificial sequence
  SiRNA target sequence
ttttagcattttgtagtttgtaatgcg

SEQ ID NO: 107657 - DNA, 27 bp, Artificial sequence
  SiRNA target sequence
tttagcattttgtagtttgtaatgcgg

SEQ ID NO: 107658 - DNA, 27 bp, Artificial sequence
  SiRNA target sequence
ttagcattttgtagtttgtaatgcggt

SEQ ID NO: 107659 - DNA, 27 bp, Artificial sequence
  SiRNA target sequence
tagcattttgtagtttgtaatgcggta

SEQ ID NO: 107660 - DNA, 27 bp, Artificial sequence
  SiRNA target sequence
agcattttgtagtttgtaatgcggtaa

SEQ ID NO: 107661 - DNA, 27 bp, Artificial sequence
  SiRNA target sequence
gcattttgtagtttgtaatgcggtaat

SEQ ID NO: 107662 - DNA, 27 bp, Artificial sequence
  SiRNA target sequence
cattttgtagtttgtaatgcggtaata

SEQ ID NO: 107663 - DNA, 27 bp, Artificial sequence
  SiRNA target sequence
attttgtagtttgtaatgcggtaatat

SEQ ID NO: 107664 - DNA, 27 bp, Artificial sequence
  SiRNA target sequence
ttttgtagtttgtaatgcggtaatata

SEQ ID NO: 107665 - DNA, 27 bp, Artificial sequence
  SiRNA target sequence
tttgtagtttgtaatgcggtaatatat

SEQ ID NO: 107666 - DNA, 27 bp, Artificial sequence
  SiRNA target sequence
ttgtagtttgtaatgcggtaatatata

SEQ ID NO: 107667 - DNA, 27 bp, Artificial sequence
  SiRNA target sequence
tgtagtttgtaatgcggtaatatataa

SEQ ID NO: 107668 - DNA, 27 bp, Artificial sequence
  SiRNA target sequence
gtagtttgtaatgcggtaatatataat

SEQ ID NO: 107669 - DNA, 27 bp, Artificial sequence
  SiRNA target sequence
tagtttgtaatgcggtaatatataata

SEQ ID NO: 107670 - DNA, 27 bp, Artificial sequence
  SiRNA target sequence
agtttgtaatgcggtaatatataatat

SEQ ID NO: 107671 - DNA, 27 bp, Artificial sequence
  SiRNA target sequence
gtttgtaatgcggtaatatataatata

SEQ ID NO: 107672 - DNA, 27 bp, Artificial sequence
  SiRNA target sequence
tttgtaatgcggtaatatataatatag

SEQ ID NO: 107673 - DNA, 27 bp, Artificial sequence
  SiRNA target sequence
ttgtaatgcggtaatatataatataga

SEQ ID NO: 107674 - DNA, 27 bp, Artificial sequence
  SiRNA target sequence
tgtaatgcggtaatatataatatagat

SEQ ID NO: 107675 - DNA, 27 bp, Artificial sequence
  SiRNA target sequence
gtaatgcggtaatatataatatagatc

SEQ ID NO: 107676 - DNA, 27 bp, Artificial sequence
  SiRNA target sequence
taatgcggtaatatataatatagatct

SEQ ID NO: 107677 - DNA, 27 bp, Artificial sequence
  SiRNA target sequence
aatgcggtaatatataatatagatctt

SEQ ID NO: 107678 - DNA, 27 bp, Artificial sequence
  SiRNA target sequence
atgcggtaatatataatatagatcttt

SEQ ID NO: 107679 - DNA, 27 bp, Artificial sequence
  SiRNA target sequence
tgcggtaatatataatatagatctttt

SEQ ID NO: 107680 - DNA, 27 bp, Artificial sequence
  SiRNA target sequence
gcggtaatatataatatagatctttta

SEQ ID NO: 107681 - DNA, 27 bp, Artificial sequence
  SiRNA target sequence
cggtaatatataatatagatcttttat

SEQ ID NO: 107682 - DNA, 27 bp, Artificial sequence
  SiRNA target sequence
ggtaatatataatatagatcttttatc

SEQ ID NO: 107683 - DNA, 27 bp, Artificial sequence
  SiRNA target sequence
gtaatatataatatagatcttttatcc

SEQ ID NO: 107684 - DNA, 27 bp, Artificial sequence
  SiRNA target sequence
taatatataatatagatcttttatcca

SEQ ID NO: 107685 - DNA, 27 bp, Artificial sequence
  SiRNA target sequence
aatatataatatagatcttttatccat

SEQ ID NO: 107686 - DNA, 27 bp, Artificial sequence
  SiRNA target sequence
atatataatatagatcttttatccatg

SEQ ID NO: 107687 - DNA, 27 bp, Artificial sequence
  SiRNA target sequence
tatataatatagatcttttatccatgt

SEQ ID NO: 107688 - DNA, 27 bp, Artificial sequence
  SiRNA target sequence
atataatatagatcttttatccatgtc

SEQ ID NO: 107689 - DNA, 27 bp, Artificial sequence
  SiRNA target sequence
tataatatagatcttttatccatgtct

SEQ ID NO: 107690 - DNA, 27 bp, Artificial sequence
  SiRNA target sequence
ataatatagatcttttatccatgtctt

SEQ ID NO: 107691 - DNA, 27 bp, Artificial sequence
  SiRNA target sequence
taatatagatcttttatccatgtctta

SEQ ID NO: 107692 - DNA, 27 bp, Artificial sequence
  SiRNA target sequence
aatatagatcttttatccatgtcttaa

SEQ ID NO: 107693 - DNA, 27 bp, Artificial sequence
  SiRNA target sequence
atatagatcttttatccatgtcttaaa

SEQ ID NO: 107694 - DNA, 27 bp, Artificial sequence
  SiRNA target sequence
tatagatcttttatccatgtcttaaat

SEQ ID NO: 107695 - DNA, 27 bp, Artificial sequence
  SiRNA target sequence
atagatcttttatccatgtcttaaatt

SEQ ID NO: 107696 - DNA, 27 bp, Artificial sequence
  SiRNA target sequence
tagatcttttatccatgtcttaaattc

SEQ ID NO: 107697 - DNA, 27 bp, Artificial sequence
  SiRNA target sequence
agatcttttatccatgtcttaaattcg

SEQ ID NO: 107698 - DNA, 27 bp, Artificial sequence
  SiRNA target sequence
gatcttttatccatgtcttaaattcgc

SEQ ID NO: 107699 - DNA, 27 bp, Artificial sequence
  SiRNA target sequence
atcttttatccatgtcttaaattcgcc

SEQ ID NO: 107700 - DNA, 27 bp, Artificial sequence
  SiRNA target sequence
tcttttatccatgtcttaaattcgccc

SEQ ID NO: 107701 - DNA, 27 bp, Artificial sequence
  SiRNA target sequence
cttttatccatgtcttaaattcgccca

SEQ ID NO: 107702 - DNA, 27 bp, Artificial sequence
  SiRNA target sequence
ttttatccatgtcttaaattcgcccat

SEQ ID NO: 107703 - DNA, 27 bp, Artificial sequence
  SiRNA target sequence
tttatccatgtcttaaattcgcccata

SEQ ID NO: 107704 - DNA, 27 bp, Artificial sequence
  SiRNA target sequence
ttatccatgtcttaaattcgcccataa

SEQ ID NO: 107705 - DNA, 27 bp, Artificial sequence
  SiRNA target sequence
tatccatgtcttaaattcgcccataaa

SEQ ID NO: 107706 - DNA, 27 bp, Artificial sequence
  SiRNA target sequence
atccatgtcttaaattcgcccataaat

SEQ ID NO: 107707 - DNA, 27 bp, Artificial sequence
  SiRNA target sequence
tccatgtcttaaattcgcccataaatc

SEQ ID NO: 107708 - DNA, 27 bp, Artificial sequence
  SiRNA target sequence
ccatgtcttaaattcgcccataaatcc

SEQ ID NO: 107709 - DNA, 27 bp, Artificial sequence
  SiRNA target sequence
catgtcttaaattcgcccataaatcct

SEQ ID NO: 107710 - DNA, 27 bp, Artificial sequence
  SiRNA target sequence
atgtcttaaattcgcccataaatcctt

SEQ ID NO: 107711 - DNA, 27 bp, Artificial sequence
  SiRNA target sequence
tgtcttaaattcgcccataaatccttc

SEQ ID NO: 107712 - DNA, 27 bp, Artificial sequence
  SiRNA target sequence
gtcttaaattcgcccataaatccttct

SEQ ID NO: 107713 - DNA, 27 bp, Artificial sequence
  SiRNA target sequence
tcttaaattcgcccataaatccttctt

SEQ ID NO: 107714 - DNA, 27 bp, Artificial sequence
  SiRNA target sequence
cttaaattcgcccataaatccttcttt

SEQ ID NO: 107715 - DNA, 27 bp, Artificial sequence
  SiRNA target sequence
ttaaattcgcccataaatccttctttg

SEQ ID NO: 107716 - DNA, 27 bp, Artificial sequence
  SiRNA target sequence
taaattcgcccataaatccttctttgt

SEQ ID NO: 107717 - DNA, 27 bp, Artificial sequence
  SiRNA target sequence
aaattcgcccataaatccttctttgtc

SEQ ID NO: 107718 - DNA, 27 bp, Artificial sequence
  SiRNA target sequence
aattcgcccataaatccttctttgtct

SEQ ID NO: 107719 - DNA, 27 bp, Artificial sequence
  SiRNA target sequence
attcgcccataaatccttctttgtctt

SEQ ID NO: 107720 - DNA, 27 bp, Artificial sequence
  SiRNA target sequence
ttcgcccataaatccttctttgtcttg

SEQ ID NO: 107721 - DNA, 27 bp, Artificial sequence
  SiRNA target sequence
tcgcccataaatccttctttgtcttgg

SEQ ID NO: 107722 - DNA, 27 bp, Artificial sequence
  SiRNA target sequence
cgcccataaatccttctttgtcttggc

SEQ ID NO: 107723 - DNA, 27 bp, Artificial sequence
  SiRNA target sequence
gcccataaatccttctttgtcttggct

SEQ ID NO: 107724 - DNA, 27 bp, Artificial sequence
  SiRNA target sequence
cccataaatccttctttgtcttggcta

SEQ ID NO: 107725 - DNA, 27 bp, Artificial sequence
  SiRNA target sequence
ccataaatccttctttgtcttggctat

SEQ ID NO: 107726 - DNA, 27 bp, Artificial sequence
  SiRNA target sequence
cataaatccttctttgtcttggctatc

SEQ ID NO: 107727 - DNA, 27 bp, Artificial sequence
  SiRNA target sequence
ataaatccttctttgtcttggctatct

SEQ ID NO: 107728 - DNA, 27 bp, Artificial sequence
  SiRNA target sequence
taaatccttctttgtcttggctatctc

SEQ ID NO: 107729 - DNA, 27 bp, Artificial sequence
  SiRNA target sequence
aaatccttctttgtcttggctatctcc

SEQ ID NO: 107730 - DNA, 27 bp, Artificial sequence
  SiRNA target sequence
aatccttctttgtcttggctatctcca

SEQ ID NO: 107731 - DNA, 27 bp, Artificial sequence
  SiRNA target sequence
atccttctttgtcttggctatctccat

SEQ ID NO: 107732 - DNA, 27 bp, Artificial sequence
  SiRNA target sequence
tccttctttgtcttggctatctccatt

SEQ ID NO: 107733 - DNA, 27 bp, Artificial sequence
  SiRNA target sequence
ccttctttgtcttggctatctccatta

SEQ ID NO: 107734 - DNA, 27 bp, Artificial sequence
  SiRNA target sequence
cttctttgtcttggctatctccattac

SEQ ID NO: 107735 - DNA, 27 bp, Artificial sequence
  SiRNA target sequence
ttctttgtcttggctatctccattacc

SEQ ID NO: 107736 - DNA, 27 bp, Artificial sequence
  SiRNA target sequence
tctttgtcttggctatctccattaccc

SEQ ID NO: 107737 - DNA, 27 bp, Artificial sequence
  SiRNA target sequence
ctttgtcttggctatctccattaccct

SEQ ID NO: 107738 - DNA, 27 bp, Artificial sequence
  SiRNA target sequence
tttgtcttggctatctccattaccctt

SEQ ID NO: 107739 - DNA, 27 bp, Artificial sequence
  SiRNA target sequence
ttgtcttggctatctccattacccttt

SEQ ID NO: 107740 - DNA, 27 bp, Artificial sequence
  SiRNA target sequence
tgtcttggctatctccattaccctttc

SEQ ID NO: 107741 - DNA, 27 bp, Artificial sequence
  SiRNA target sequence
gtcttggctatctccattaccctttct

SEQ ID NO: 107742 - DNA, 27 bp, Artificial sequence
  SiRNA target sequence
tcttggctatctccattaccctttctt

SEQ ID NO: 107743 - DNA, 27 bp, Artificial sequence
  SiRNA target sequence
cttggctatctccattaccctttctta

SEQ ID NO: 107744 - DNA, 27 bp, Artificial sequence
  SiRNA target sequence
ttggctatctccattaccctttcttat

SEQ ID NO: 107745 - DNA, 27 bp, Artificial sequence
  SiRNA target sequence
tggctatctccattaccctttcttatc

SEQ ID NO: 107746 - DNA, 27 bp, Artificial sequence
  SiRNA target sequence
ggctatctccattaccctttcttatca

SEQ ID NO: 107747 - DNA, 27 bp, Artificial sequence
  SiRNA target sequence
gctatctccattaccctttcttatcag

SEQ ID NO: 107748 - DNA, 27 bp, Artificial sequence
  SiRNA target sequence
ctatctccattaccctttcttatcaga

SEQ ID NO: 107749 - DNA, 27 bp, Artificial sequence
  SiRNA target sequence
tatctccattaccctttcttatcagag

SEQ ID NO: 107750 - DNA, 27 bp, Artificial sequence
  SiRNA target sequence
atctccattaccctttcttatcagagg

SEQ ID NO: 107751 - DNA, 27 bp, Artificial sequence
  SiRNA target sequence
tctccattaccctttcttatcagaggt

SEQ ID NO: 107752 - DNA, 27 bp, Artificial sequence
  SiRNA target sequence
ctccattaccctttcttatcagaggtt

SEQ ID NO: 107753 - DNA, 27 bp, Artificial sequence
  SiRNA target sequence
tccattaccctttcttatcagaggttt

SEQ ID NO: 107754 - DNA, 27 bp, Artificial sequence
  SiRNA target sequence
ccattaccctttcttatcagaggttta

SEQ ID NO: 107755 - DNA, 27 bp, Artificial sequence
  SiRNA target sequence
cattaccctttcttatcagaggtttag

SEQ ID NO: 107756 - DNA, 27 bp, Artificial sequence
  SiRNA target sequence
attaccctttcttatcagaggtttagc

SEQ ID NO: 107757 - DNA, 27 bp, Artificial sequence
  SiRNA target sequence
ttaccctttcttatcagaggtttagct

SEQ ID NO: 107758 - DNA, 27 bp, Artificial sequence
  SiRNA target sequence
taccctttcttatcagaggtttagctc

SEQ ID NO: 107759 - DNA, 27 bp, Artificial sequence
  SiRNA target sequence
accctttcttatcagaggtttagctcc

SEQ ID NO: 107760 - DNA, 27 bp, Artificial sequence
  SiRNA target sequence
ccctttcttatcagaggtttagctccg

SEQ ID NO: 107761 - DNA, 27 bp, Artificial sequence
  SiRNA target sequence
cctttcttatcagaggtttagctccgt

SEQ ID NO: 107762 - DNA, 27 bp, Artificial sequence
  SiRNA target sequence
ctttcttatcagaggtttagctccgtg

SEQ ID NO: 107763 - DNA, 27 bp, Artificial sequence
  SiRNA target sequence
tttcttatcagaggtttagctccgtgt

SEQ ID NO: 107764 - DNA, 27 bp, Artificial sequence
  SiRNA target sequence
ttcttatcagaggtttagctccgtgtt

SEQ ID NO: 107765 - DNA, 27 bp, Artificial sequence
  SiRNA target sequence
tcttatcagaggtttagctccgtgttt

SEQ ID NO: 107766 - DNA, 27 bp, Artificial sequence
  SiRNA target sequence
cttatcagaggtttagctccgtgtttt

SEQ ID NO: 107767 - DNA, 27 bp, Artificial sequence
  SiRNA target sequence
ttatcagaggtttagctccgtgtttta

SEQ ID NO: 107768 - DNA, 27 bp, Artificial sequence
  SiRNA target sequence
tatcagaggtttagctccgtgttttaa

SEQ ID NO: 107769 - DNA, 27 bp, Artificial sequence
  SiRNA target sequence
atcagaggtttagctccgtgttttaaa

SEQ ID NO: 107770 - DNA, 27 bp, Artificial sequence
  SiRNA target sequence
tcagaggtttagctccgtgttttaaaa

SEQ ID NO: 107771 - DNA, 27 bp, Artificial sequence
  SiRNA target sequence
cagaggtttagctccgtgttttaaaag

SEQ ID NO: 107772 - DNA, 27 bp, Artificial sequence
  SiRNA target sequence
agaggtttagctccgtgttttaaaagg

SEQ ID NO: 107773 - DNA, 27 bp, Artificial sequence
  SiRNA target sequence
gaggtttagctccgtgttttaaaaggc

SEQ ID NO: 107774 - DNA, 27 bp, Artificial sequence
  SiRNA target sequence
aggtttagctccgtgttttaaaaggca

SEQ ID NO: 107775 - DNA, 27 bp, Artificial sequence
  SiRNA target sequence
ggtttagctccgtgttttaaaaggcaa

SEQ ID NO: 107776 - DNA, 27 bp, Artificial sequence
  SiRNA target sequence
gtttagctccgtgttttaaaaggcaat

SEQ ID NO: 107777 - DNA, 27 bp, Artificial sequence
  SiRNA target sequence
tttagctccgtgttttaaaaggcaatt

SEQ ID NO: 107778 - DNA, 27 bp, Artificial sequence
  SiRNA target sequence
ttagctccgtgttttaaaaggcaatta

SEQ ID NO: 107779 - DNA, 27 bp, Artificial sequence
  SiRNA target sequence
tagctccgtgttttaaaaggcaattat

SEQ ID NO: 107780 - DNA, 27 bp, Artificial sequence
  SiRNA target sequence
agctccgtgttttaaaaggcaattata

SEQ ID NO: 107781 - DNA, 27 bp, Artificial sequence
  SiRNA target sequence
gctccgtgttttaaaaggcaattatac

SEQ ID NO: 107782 - DNA, 27 bp, Artificial sequence
  SiRNA target sequence
ctccgtgttttaaaaggcaattataca

SEQ ID NO: 107783 - DNA, 27 bp, Artificial sequence
  SiRNA target sequence
tccgtgttttaaaaggcaattatacaa

SEQ ID NO: 107784 - DNA, 27 bp, Artificial sequence
  SiRNA target sequence
ccgtgttttaaaaggcaattatacaac

SEQ ID NO: 107785 - DNA, 27 bp, Artificial sequence
  SiRNA target sequence
cgtgttttaaaaggcaattatacaact

SEQ ID NO: 107786 - DNA, 27 bp, Artificial sequence
  SiRNA target sequence
gtgttttaaaaggcaattatacaactt

SEQ ID NO: 107787 - DNA, 27 bp, Artificial sequence
  SiRNA target sequence
tgttttaaaaggcaattatacaacttt

SEQ ID NO: 107788 - DNA, 27 bp, Artificial sequence
  SiRNA target sequence
gttttaaaaggcaattatacaactttt

SEQ ID NO: 107789 - DNA, 27 bp, Artificial sequence
  SiRNA target sequence
ttttaaaaggcaattatacaacttttt

SEQ ID NO: 107790 - DNA, 27 bp, Artificial sequence
  SiRNA target sequence
tttaaaaggcaattatacaacttttta

SEQ ID NO: 107791 - DNA, 27 bp, Artificial sequence
  SiRNA target sequence
ttaaaaggcaattatacaactttttag

SEQ ID NO: 107792 - DNA, 27 bp, Artificial sequence
  SiRNA target sequence
taaaaggcaattatacaactttttaga

SEQ ID NO: 107793 - DNA, 27 bp, Artificial sequence
  SiRNA target sequence
aaaaggcaattatacaactttttagaa

SEQ ID NO: 107794 - DNA, 27 bp, Artificial sequence
  SiRNA target sequence
aaaggcaattatacaactttttagaac

SEQ ID NO: 107795 - DNA, 27 bp, Artificial sequence
  SiRNA target sequence
aaggcaattatacaactttttagaaca

SEQ ID NO: 107796 - DNA, 27 bp, Artificial sequence
  SiRNA target sequence
aggcaattatacaactttttagaacaa

SEQ ID NO: 107797 - DNA, 27 bp, Artificial sequence
  SiRNA target sequence
ggcaattatacaactttttagaacaaa

SEQ ID NO: 107798 - DNA, 27 bp, Artificial sequence
  SiRNA target sequence
gcaattatacaactttttagaacaaaa

SEQ ID NO: 107799 - DNA, 27 bp, Artificial sequence
  SiRNA target sequence
caattatacaactttttagaacaaaaa

SEQ ID NO: 107800 - DNA, 27 bp, Artificial sequence
  SiRNA target sequence
aattatacaactttttagaacaaaaat

SEQ ID NO: 107801 - DNA, 27 bp, Artificial sequence
  SiRNA target sequence
attatacaactttttagaacaaaaatt

SEQ ID NO: 107802 - DNA, 27 bp, Artificial sequence
  SiRNA target sequence
ttatacaactttttagaacaaaaatta

SEQ ID NO: 107803 - DNA, 27 bp, Artificial sequence
  SiRNA target sequence
tatacaactttttagaacaaaaattaa

SEQ ID NO: 107804 - DNA, 27 bp, Artificial sequence
  SiRNA target sequence
atacaactttttagaacaaaaattaaa

SEQ ID NO: 107805 - DNA, 27 bp, Artificial sequence
  SiRNA target sequence
tacaactttttagaacaaaaattaaaa

SEQ ID NO: 107806 - DNA, 27 bp, Artificial sequence
  SiRNA target sequence
acaactttttagaacaaaaattaaaag

SEQ ID NO: 107807 - DNA, 27 bp, Artificial sequence
  SiRNA target sequence
caactttttagaacaaaaattaaaaga

SEQ ID NO: 107808 - DNA, 27 bp, Artificial sequence
  SiRNA target sequence
aactttttagaacaaaaattaaaagat

SEQ ID NO: 107809 - DNA, 27 bp, Artificial sequence
  SiRNA target sequence
actttttagaacaaaaattaaaagatt

SEQ ID NO: 107810 - DNA, 27 bp, Artificial sequence
  SiRNA target sequence
ctttttagaacaaaaattaaaagattt

SEQ ID NO: 107811 - DNA, 27 bp, Artificial sequence
  SiRNA target sequence
tttttagaacaaaaattaaaagattta

SEQ ID NO: 107812 - DNA, 27 bp, Artificial sequence
  SiRNA target sequence
ttttagaacaaaaattaaaagatttat

SEQ ID NO: 107813 - DNA, 27 bp, Artificial sequence
  SiRNA target sequence
tttagaacaaaaattaaaagatttata

SEQ ID NO: 107814 - DNA, 27 bp, Artificial sequence
  SiRNA target sequence
ttagaacaaaaattaaaagatttataa

SEQ ID NO: 107815 - DNA, 27 bp, Artificial sequence
  SiRNA target sequence
tagaacaaaaattaaaagatttataag

SEQ ID NO: 107816 - DNA, 27 bp, Artificial sequence
  SiRNA target sequence
agaacaaaaattaaaagatttataaga

SEQ ID NO: 107817 - DNA, 27 bp, Artificial sequence
  SiRNA target sequence
gaacaaaaattaaaagatttataagac

SEQ ID NO: 107818 - DNA, 27 bp, Artificial sequence
  SiRNA target sequence
aacaaaaattaaaagatttataagacg

SEQ ID NO: 107819 - DNA, 27 bp, Artificial sequence
  SiRNA target sequence
acaaaaattaaaagatttataagacga

SEQ ID NO: 107820 - DNA, 27 bp, Artificial sequence
  SiRNA target sequence
caaaaattaaaagatttataagacgaa

SEQ ID NO: 107821 - DNA, 27 bp, Artificial sequence
  SiRNA target sequence
aaaaattaaaagatttataagacgaat

SEQ ID NO: 107822 - DNA, 27 bp, Artificial sequence
  SiRNA target sequence
aaaattaaaagatttataagacgaatc

SEQ ID NO: 107823 - DNA, 27 bp, Artificial sequence
  SiRNA target sequence
aaattaaaagatttataagacgaatcc

SEQ ID NO: 107824 - DNA, 27 bp, Artificial sequence
  SiRNA target sequence
aattaaaagatttataagacgaatccc

SEQ ID NO: 107825 - DNA, 27 bp, Artificial sequence
  SiRNA target sequence
attaaaagatttataagacgaatcccc

SEQ ID NO: 107826 - DNA, 27 bp, Artificial sequence
  SiRNA target sequence
ttaaaagatttataagacgaatcccca

SEQ ID NO: 107827 - DNA, 27 bp, Artificial sequence
  SiRNA target sequence
taaaagatttataagacgaatccccaa

SEQ ID NO: 107828 - DNA, 27 bp, Artificial sequence
  SiRNA target sequence
aaaagatttataagacgaatccccaag

SEQ ID NO: 107829 - DNA, 27 bp, Artificial sequence
  SiRNA target sequence
aaagatttataagacgaatccccaagg

SEQ ID NO: 107830 - DNA, 27 bp, Artificial sequence
  SiRNA target sequence
aagatttataagacgaatccccaaggc

SEQ ID NO: 107831 - DNA, 27 bp, Artificial sequence
  SiRNA target sequence
agatttataagacgaatccccaaggcc

SEQ ID NO: 107832 - DNA, 27 bp, Artificial sequence
  SiRNA target sequence
gatttataagacgaatccccaaggcca

SEQ ID NO: 107833 - DNA, 27 bp, Artificial sequence
  SiRNA target sequence
atttataagacgaatccccaaggccaa

SEQ ID NO: 107834 - DNA, 27 bp, Artificial sequence
  SiRNA target sequence
tttataagacgaatccccaaggccaaa

SEQ ID NO: 107835 - DNA, 27 bp, Artificial sequence
  SiRNA target sequence
ttataagacgaatccccaaggccaaat

SEQ ID NO: 107836 - DNA, 27 bp, Artificial sequence
  SiRNA target sequence
tataagacgaatccccaaggccaaata

SEQ ID NO: 107837 - DNA, 27 bp, Artificial sequence
  SiRNA target sequence
ataagacgaatccccaaggccaaatac

SEQ ID NO: 107838 - DNA, 27 bp, Artificial sequence
  SiRNA target sequence
taagacgaatccccaaggccaaataca

SEQ ID NO: 107839 - DNA, 27 bp, Artificial sequence
  SiRNA target sequence
aagacgaatccccaaggccaaatacag

SEQ ID NO: 107840 - DNA, 27 bp, Artificial sequence
  SiRNA target sequence
agacgaatccccaaggccaaatacagc

SEQ ID NO: 107841 - DNA, 27 bp, Artificial sequence
  SiRNA target sequence
gacgaatccccaaggccaaatacagca

SEQ ID NO: 107842 - DNA, 27 bp, Artificial sequence
  SiRNA target sequence
acgaatccccaaggccaaatacagcaa

SEQ ID NO: 107843 - DNA, 27 bp, Artificial sequence
  SiRNA target sequence
cgaatccccaaggccaaatacagcaaa

SEQ ID NO: 107844 - DNA, 27 bp, Artificial sequence
  SiRNA target sequence
gaatccccaaggccaaatacagcaaaa

SEQ ID NO: 107845 - DNA, 27 bp, Artificial sequence
  SiRNA target sequence
aatccccaaggccaaatacagcaaaat

SEQ ID NO: 107846 - DNA, 27 bp, Artificial sequence
  SiRNA target sequence
atccccaaggccaaatacagcaaaatt

SEQ ID NO: 107847 - DNA, 27 bp, Artificial sequence
  SiRNA target sequence
tccccaaggccaaatacagcaaaattt

SEQ ID NO: 107848 - DNA, 27 bp, Artificial sequence
  SiRNA target sequence
ccccaaggccaaatacagcaaaattta

SEQ ID NO: 107849 - DNA, 27 bp, Artificial sequence
  SiRNA target sequence
cccaaggccaaatacagcaaaatttaa

SEQ ID NO: 107850 - DNA, 27 bp, Artificial sequence
  SiRNA target sequence
ccaaggccaaatacagcaaaatttaag

SEQ ID NO: 107851 - DNA, 27 bp, Artificial sequence
  SiRNA target sequence
caaggccaaatacagcaaaatttaagt

SEQ ID NO: 107852 - DNA, 27 bp, Artificial sequence
  SiRNA target sequence
aaggccaaatacagcaaaatttaagtg

SEQ ID NO: 107853 - DNA, 27 bp, Artificial sequence
  SiRNA target sequence
aggccaaatacagcaaaatttaagtgt

SEQ ID NO: 107854 - DNA, 27 bp, Artificial sequence
  SiRNA target sequence
ggccaaatacagcaaaatttaagtgtt

SEQ ID NO: 107855 - DNA, 27 bp, Artificial sequence
  SiRNA target sequence
gccaaatacagcaaaatttaagtgttg

SEQ ID NO: 107856 - DNA, 27 bp, Artificial sequence
  SiRNA target sequence
ccaaatacagcaaaatttaagtgttgt

SEQ ID NO: 107857 - DNA, 27 bp, Artificial sequence
  SiRNA target sequence
caaatacagcaaaatttaagtgttgta

SEQ ID NO: 107858 - DNA, 27 bp, Artificial sequence
  SiRNA target sequence
aaatacagcaaaatttaagtgttgtaa

SEQ ID NO: 107859 - DNA, 27 bp, Artificial sequence
  SiRNA target sequence
aatacagcaaaatttaagtgttgtaaa

SEQ ID NO: 107860 - DNA, 27 bp, Artificial sequence
  SiRNA target sequence
atacagcaaaatttaagtgttgtaaaa

SEQ ID NO: 107861 - DNA, 27 bp, Artificial sequence
  SiRNA target sequence
tacagcaaaatttaagtgttgtaaaaa

SEQ ID NO: 107862 - DNA, 27 bp, Artificial sequence
  SiRNA target sequence
acagcaaaatttaagtgttgtaaaaaa

SEQ ID NO: 107863 - DNA, 27 bp, Artificial sequence
  SiRNA target sequence
cagcaaaatttaagtgttgtaaaaaat

SEQ ID NO: 107864 - DNA, 27 bp, Artificial sequence
  SiRNA target sequence
agcaaaatttaagtgttgtaaaaaatt

SEQ ID NO: 107865 - DNA, 27 bp, Artificial sequence
  SiRNA target sequence
gcaaaatttaagtgttgtaaaaaattt

SEQ ID NO: 107866 - DNA, 27 bp, Artificial sequence
  SiRNA target sequence
caaaatttaagtgttgtaaaaaatttg

SEQ ID NO: 107867 - DNA, 27 bp, Artificial sequence
  SiRNA target sequence
aaaatttaagtgttgtaaaaaatttgt

SEQ ID NO: 107868 - DNA, 27 bp, Artificial sequence
  SiRNA target sequence
aaatttaagtgttgtaaaaaatttgta

SEQ ID NO: 107869 - DNA, 27 bp, Artificial sequence
  SiRNA target sequence
aatttaagtgttgtaaaaaatttgtag

SEQ ID NO: 107870 - DNA, 27 bp, Artificial sequence
  SiRNA target sequence
atttaagtgttgtaaaaaatttgtagg

SEQ ID NO: 107871 - DNA, 27 bp, Artificial sequence
  SiRNA target sequence
tttaagtgttgtaaaaaatttgtaggc

SEQ ID NO: 107872 - DNA, 27 bp, Artificial sequence
  SiRNA target sequence
ttaagtgttgtaaaaaatttgtaggca

SEQ ID NO: 107873 - DNA, 27 bp, Artificial sequence
  SiRNA target sequence
taagtgttgtaaaaaatttgtaggcag

SEQ ID NO: 107874 - DNA, 27 bp, Artificial sequence
  SiRNA target sequence
aagtgttgtaaaaaatttgtaggcaga

SEQ ID NO: 107875 - DNA, 27 bp, Artificial sequence
  SiRNA target sequence
agtgttgtaaaaaatttgtaggcagat

SEQ ID NO: 107876 - DNA, 27 bp, Artificial sequence
  SiRNA target sequence
gtgttgtaaaaaatttgtaggcagatt

SEQ ID NO: 107877 - DNA, 27 bp, Artificial sequence
  SiRNA target sequence
tgttgtaaaaaatttgtaggcagattt

SEQ ID NO: 107878 - DNA, 27 bp, Artificial sequence
  SiRNA target sequence
gttgtaaaaaatttgtaggcagatttt

SEQ ID NO: 107879 - DNA, 27 bp, Artificial sequence
  SiRNA target sequence
ttgtaaaaaatttgtaggcagattttt

SEQ ID NO: 107880 - DNA, 27 bp, Artificial sequence
  SiRNA target sequence
tgtaaaaaatttgtaggcagatttttt

SEQ ID NO: 107881 - DNA, 27 bp, Artificial sequence
  SiRNA target sequence
gtaaaaaatttgtaggcagattttttt

SEQ ID NO: 107882 - DNA, 27 bp, Artificial sequence
  SiRNA target sequence
taaaaaatttgtaggcagatttttttt

SEQ ID NO: 107883 - DNA, 27 bp, Artificial sequence
  SiRNA target sequence
aaaaaatttgtaggcagattttttttg

SEQ ID NO: 107884 - DNA, 27 bp, Artificial sequence
  SiRNA target sequence
aaaaatttgtaggcagattttttttgc

SEQ ID NO: 107885 - DNA, 27 bp, Artificial sequence
  SiRNA target sequence
aaaatttgtaggcagattttttttgcg

SEQ ID NO: 107886 - DNA, 27 bp, Artificial sequence
  SiRNA target sequence
aaatttgtaggcagattttttttgcgc

SEQ ID NO: 107887 - DNA, 27 bp, Artificial sequence
  SiRNA target sequence
aatttgtaggcagattttttttgcgca

SEQ ID NO: 107888 - DNA, 27 bp, Artificial sequence
  SiRNA target sequence
atttgtaggcagattttttttgcgcaa

SEQ ID NO: 107889 - DNA, 27 bp, Artificial sequence
  SiRNA target sequence
tttgtaggcagattttttttgcgcaaa

SEQ ID NO: 107890 - DNA, 27 bp, Artificial sequence
  SiRNA target sequence
ttgtaggcagattttttttgcgcaaaa

SEQ ID NO: 107891 - DNA, 27 bp, Artificial sequence
  SiRNA target sequence
tgtaggcagattttttttgcgcaaaaa

SEQ ID NO: 107892 - DNA, 27 bp, Artificial sequence
  SiRNA target sequence
gtaggcagattttttttgcgcaaaaat

SEQ ID NO: 107893 - DNA, 27 bp, Artificial sequence
  SiRNA target sequence
taggcagattttttttgcgcaaaaatt

SEQ ID NO: 107894 - DNA, 27 bp, Artificial sequence
  SiRNA target sequence
aggcagattttttttgcgcaaaaattt

SEQ ID NO: 107895 - DNA, 27 bp, Artificial sequence
  SiRNA target sequence
ggcagattttttttgcgcaaaaatttc

SEQ ID NO: 107896 - DNA, 27 bp, Artificial sequence
  SiRNA target sequence
gcagattttttttgcgcaaaaatttcc

SEQ ID NO: 107897 - DNA, 27 bp, Artificial sequence
  SiRNA target sequence
cagattttttttgcgcaaaaatttcca

SEQ ID NO: 107898 - DNA, 27 bp, Artificial sequence
  SiRNA target sequence
agattttttttgcgcaaaaatttccaa

SEQ ID NO: 107899 - DNA, 27 bp, Artificial sequence
  SiRNA target sequence
gattttttttgcgcaaaaatttccaaa

SEQ ID NO: 107900 - DNA, 27 bp, Artificial sequence
  SiRNA target sequence
attttttttgcgcaaaaatttccaaaa

SEQ ID NO: 107901 - DNA, 27 bp, Artificial sequence
  SiRNA target sequence
ttttttttgcgcaaaaatttccaaaat

SEQ ID NO: 107902 - DNA, 27 bp, Artificial sequence
  SiRNA target sequence
tttttttgcgcaaaaatttccaaaatt

SEQ ID NO: 107903 - DNA, 27 bp, Artificial sequence
  SiRNA target sequence
ttttttgcgcaaaaatttccaaaattt

SEQ ID NO: 107904 - DNA, 27 bp, Artificial sequence
  SiRNA target sequence
tttttgcgcaaaaatttccaaaattta

SEQ ID NO: 107905 - DNA, 27 bp, Artificial sequence
  SiRNA target sequence
ttttgcgcaaaaatttccaaaatttag

SEQ ID NO: 107906 - DNA, 27 bp, Artificial sequence
  SiRNA target sequence
tttgcgcaaaaatttccaaaatttagt

SEQ ID NO: 107907 - DNA, 27 bp, Artificial sequence
  SiRNA target sequence
ttgcgcaaaaatttccaaaatttagtc

SEQ ID NO: 107908 - DNA, 27 bp, Artificial sequence
  SiRNA target sequence
tgcgcaaaaatttccaaaatttagtca

SEQ ID NO: 107909 - DNA, 27 bp, Artificial sequence
  SiRNA target sequence
gcgcaaaaatttccaaaatttagtcat

SEQ ID NO: 107910 - DNA, 27 bp, Artificial sequence
  SiRNA target sequence
cgcaaaaatttccaaaatttagtcatg

SEQ ID NO: 107911 - DNA, 27 bp, Artificial sequence
  SiRNA target sequence
gcaaaaatttccaaaatttagtcatgt

SEQ ID NO: 107912 - DNA, 27 bp, Artificial sequence
  SiRNA target sequence
caaaaatttccaaaatttagtcatgtt

SEQ ID NO: 107913 - DNA, 27 bp, Artificial sequence
  SiRNA target sequence
aaaaatttccaaaatttagtcatgtta

SEQ ID NO: 107914 - DNA, 27 bp, Artificial sequence
  SiRNA target sequence
aaaatttccaaaatttagtcatgttaa

SEQ ID NO: 107915 - DNA, 27 bp, Artificial sequence
  SiRNA target sequence
aaatttccaaaatttagtcatgttaaa

SEQ ID NO: 107916 - DNA, 27 bp, Artificial sequence
  SiRNA target sequence
aatttccaaaatttagtcatgttaaaa

SEQ ID NO: 107917 - DNA, 27 bp, Artificial sequence
  SiRNA target sequence
atttccaaaatttagtcatgttaaaag

SEQ ID NO: 107918 - DNA, 27 bp, Artificial sequence
  SiRNA target sequence
tttccaaaatttagtcatgttaaaagg

SEQ ID NO: 107919 - DNA, 27 bp, Artificial sequence
  SiRNA target sequence
ttccaaaatttagtcatgttaaaaggt

SEQ ID NO: 107920 - DNA, 27 bp, Artificial sequence
  SiRNA target sequence
tccaaaatttagtcatgttaaaaggtt

SEQ ID NO: 107921 - DNA, 27 bp, Artificial sequence
  SiRNA target sequence
ccaaaatttagtcatgttaaaaggttc

SEQ ID NO: 107922 - DNA, 27 bp, Artificial sequence
  SiRNA target sequence
caaaatttagtcatgttaaaaggttca

SEQ ID NO: 107923 - DNA, 27 bp, Artificial sequence
  SiRNA target sequence
aaaatttagtcatgttaaaaggttcag

SEQ ID NO: 107924 - DNA, 27 bp, Artificial sequence
  SiRNA target sequence
aaatttagtcatgttaaaaggttcaga

SEQ ID NO: 107925 - DNA, 27 bp, Artificial sequence
  SiRNA target sequence
aatttagtcatgttaaaaggttcagaa

SEQ ID NO: 107926 - DNA, 27 bp, Artificial sequence
  SiRNA target sequence
atttagtcatgttaaaaggttcagaac

SEQ ID NO: 107927 - DNA, 27 bp, Artificial sequence
  SiRNA target sequence
tttagtcatgttaaaaggttcagaacc

SEQ ID NO: 107928 - DNA, 27 bp, Artificial sequence
  SiRNA target sequence
ttagtcatgttaaaaggttcagaacca

SEQ ID NO: 107929 - DNA, 27 bp, Artificial sequence
  SiRNA target sequence
tagtcatgttaaaaggttcagaaccat

SEQ ID NO: 107930 - DNA, 27 bp, Artificial sequence
  SiRNA target sequence
agtcatgttaaaaggttcagaaccatt

SEQ ID NO: 107931 - DNA, 27 bp, Artificial sequence
  SiRNA target sequence
gtcatgttaaaaggttcagaaccattc

SEQ ID NO: 107932 - DNA, 27 bp, Artificial sequence
  SiRNA target sequence
tcatgttaaaaggttcagaaccattcc

SEQ ID NO: 107933 - DNA, 27 bp, Artificial sequence
  SiRNA target sequence
catgttaaaaggttcagaaccattccc

SEQ ID NO: 107934 - DNA, 27 bp, Artificial sequence
  SiRNA target sequence
atgttaaaaggttcagaaccattccca

SEQ ID NO: 107935 - DNA, 27 bp, Artificial sequence
  SiRNA target sequence
tgttaaaaggttcagaaccattcccat

SEQ ID NO: 107936 - DNA, 27 bp, Artificial sequence
  SiRNA target sequence
gttaaaaggttcagaaccattcccatg

SEQ ID NO: 107937 - DNA, 27 bp, Artificial sequence
  SiRNA target sequence
ttaaaaggttcagaaccattcccatga

SEQ ID NO: 107938 - DNA, 27 bp, Artificial sequence
  SiRNA target sequence
taaaaggttcagaaccattcccatgag

SEQ ID NO: 107939 - DNA, 27 bp, Artificial sequence
  SiRNA target sequence
aaaaggttcagaaccattcccatgagt

SEQ ID NO: 107940 - DNA, 27 bp, Artificial sequence
  SiRNA target sequence
aaaggttcagaaccattcccatgagtc

SEQ ID NO: 107941 - DNA, 27 bp, Artificial sequence
  SiRNA target sequence
aaggttcagaaccattcccatgagtcg

SEQ ID NO: 107942 - DNA, 27 bp, Artificial sequence
  SiRNA target sequence
aggttcagaaccattcccatgagtcga

SEQ ID NO: 107943 - DNA, 27 bp, Artificial sequence
  SiRNA target sequence
ggttcagaaccattcccatgagtcgaa

SEQ ID NO: 107944 - DNA, 27 bp, Artificial sequence
  SiRNA target sequence
gttcagaaccattcccatgagtcgaac

SEQ ID NO: 107945 - DNA, 27 bp, Artificial sequence
  SiRNA target sequence
ttcagaaccattcccatgagtcgaaca

SEQ ID NO: 107946 - DNA, 27 bp, Artificial sequence
  SiRNA target sequence
tcagaaccattcccatgagtcgaacat

SEQ ID NO: 107947 - DNA, 27 bp, Artificial sequence
  SiRNA target sequence
cagaaccattcccatgagtcgaacata

SEQ ID NO: 107948 - DNA, 27 bp, Artificial sequence
  SiRNA target sequence
agaaccattcccatgagtcgaacatac

SEQ ID NO: 107949 - DNA, 27 bp, Artificial sequence
  SiRNA target sequence
gaaccattcccatgagtcgaacataca

SEQ ID NO: 107950 - DNA, 27 bp, Artificial sequence
  SiRNA target sequence
aaccattcccatgagtcgaacatacaa

SEQ ID NO: 107951 - DNA, 27 bp, Artificial sequence
  SiRNA target sequence
accattcccatgagtcgaacatacaaa

SEQ ID NO: 107952 - DNA, 27 bp, Artificial sequence
  SiRNA target sequence
ccattcccatgagtcgaacatacaaat

SEQ ID NO: 107953 - DNA, 27 bp, Artificial sequence
  SiRNA target sequence
cattcccatgagtcgaacatacaaata

SEQ ID NO: 107954 - DNA, 27 bp, Artificial sequence
  SiRNA target sequence
attcccatgagtcgaacatacaaatat

SEQ ID NO: 107955 - DNA, 27 bp, Artificial sequence
  SiRNA target sequence
ttcccatgagtcgaacatacaaatata

SEQ ID NO: 107956 - DNA, 27 bp, Artificial sequence
  SiRNA target sequence
tcccatgagtcgaacatacaaatataa

SEQ ID NO: 107957 - DNA, 27 bp, Artificial sequence
  SiRNA target sequence
cccatgagtcgaacatacaaatataat

SEQ ID NO: 107958 - DNA, 27 bp, Artificial sequence
  SiRNA target sequence
ccatgagtcgaacatacaaatataatc

SEQ ID NO: 107959 - DNA, 27 bp, Artificial sequence
  SiRNA target sequence
catgagtcgaacatacaaatataatca

SEQ ID NO: 107960 - DNA, 27 bp, Artificial sequence
  SiRNA target sequence
atgagtcgaacatacaaatataatcat

SEQ ID NO: 107961 - DNA, 27 bp, Artificial sequence
  SiRNA target sequence
tgagtcgaacatacaaatataatcata

SEQ ID NO: 107962 - DNA, 27 bp, Artificial sequence
  SiRNA target sequence
gagtcgaacatacaaatataatcatat

SEQ ID NO: 107963 - DNA, 27 bp, Artificial sequence
  SiRNA target sequence
agtcgaacatacaaatataatcatatc

SEQ ID NO: 107964 - DNA, 27 bp, Artificial sequence
  SiRNA target sequence
gtcgaacatacaaatataatcatatca

SEQ ID NO: 107965 - DNA, 27 bp, Artificial sequence
  SiRNA target sequence
tcgaacatacaaatataatcatatcaa

SEQ ID NO: 107966 - DNA, 27 bp, Artificial sequence
  SiRNA target sequence
cgaacatacaaatataatcatatcaat

SEQ ID NO: 107967 - DNA, 27 bp, Artificial sequence
  SiRNA target sequence
gaacatacaaatataatcatatcaata

SEQ ID NO: 107968 - DNA, 27 bp, Artificial sequence
  SiRNA target sequence
aacatacaaatataatcatatcaatat

SEQ ID NO: 107969 - DNA, 27 bp, Artificial sequence
  SiRNA target sequence
acatacaaatataatcatatcaatatc

SEQ ID NO: 107970 - DNA, 27 bp, Artificial sequence
  SiRNA target sequence
catacaaatataatcatatcaatatct

SEQ ID NO: 107971 - DNA, 27 bp, Artificial sequence
  SiRNA target sequence
atacaaatataatcatatcaatatcta

SEQ ID NO: 107972 - DNA, 27 bp, Artificial sequence
  SiRNA target sequence
tacaaatataatcatatcaatatctaa

SEQ ID NO: 107973 - DNA, 27 bp, Artificial sequence
  SiRNA target sequence
acaaatataatcatatcaatatctaat

SEQ ID NO: 107974 - DNA, 27 bp, Artificial sequence
  SiRNA target sequence
caaatataatcatatcaatatctaata

SEQ ID NO: 107975 - DNA, 27 bp, Artificial sequence
  SiRNA target sequence
aaatataatcatatcaatatctaatat

SEQ ID NO: 107976 - DNA, 27 bp, Artificial sequence
  SiRNA target sequence
aatataatcatatcaatatctaatatt

SEQ ID NO: 107977 - DNA, 27 bp, Artificial sequence
  SiRNA target sequence
atataatcatatcaatatctaatattt

SEQ ID NO: 107978 - DNA, 27 bp, Artificial sequence
  SiRNA target sequence
tataatcatatcaatatctaatatttt

SEQ ID NO: 107979 - DNA, 27 bp, Artificial sequence
  SiRNA target sequence
ataatcatatcaatatctaatattttt

SEQ ID NO: 107980 - DNA, 27 bp, Artificial sequence
  SiRNA target sequence
taatcatatcaatatctaatatttttt

SEQ ID NO: 107981 - DNA, 27 bp, Artificial sequence
  SiRNA target sequence
aatcatatcaatatctaatattttttc

SEQ ID NO: 107982 - DNA, 27 bp, Artificial sequence
  SiRNA target sequence
atcatatcaatatctaatattttttcg

SEQ ID NO: 107983 - DNA, 27 bp, Artificial sequence
  SiRNA target sequence
tcatatcaatatctaatattttttcga

SEQ ID NO: 107984 - DNA, 27 bp, Artificial sequence
  SiRNA target sequence
catatcaatatctaatattttttcgaa

SEQ ID NO: 107985 - DNA, 27 bp, Artificial sequence
  SiRNA target sequence
atatcaatatctaatattttttcgaaa

SEQ ID NO: 107986 - DNA, 27 bp, Artificial sequence
  SiRNA target sequence
tatcaatatctaatattttttcgaaat

SEQ ID NO: 107987 - DNA, 27 bp, Artificial sequence
  SiRNA target sequence
atcaatatctaatattttttcgaaatc

SEQ ID NO: 107988 - DNA, 27 bp, Artificial sequence
  SiRNA target sequence
tcaatatctaatattttttcgaaatca

SEQ ID NO: 107989 - DNA, 27 bp, Artificial sequence
  SiRNA target sequence
caatatctaatattttttcgaaatcaa

SEQ ID NO: 107990 - DNA, 27 bp, Artificial sequence
  SiRNA target sequence
aatatctaatattttttcgaaatcaaa

SEQ ID NO: 107991 - DNA, 27 bp, Artificial sequence
  SiRNA target sequence
atatctaatattttttcgaaatcaaaa

SEQ ID NO: 107992 - DNA, 27 bp, Artificial sequence
  SiRNA target sequence
tatctaatattttttcgaaatcaaaac

SEQ ID NO: 107993 - DNA, 27 bp, Artificial sequence
  SiRNA target sequence
atctaatattttttcgaaatcaaaact

SEQ ID NO: 107994 - DNA, 27 bp, Artificial sequence
  SiRNA target sequence
tctaatattttttcgaaatcaaaactg

SEQ ID NO: 107995 - DNA, 27 bp, Artificial sequence
  SiRNA target sequence
ctaatattttttcgaaatcaaaactgt

SEQ ID NO: 107996 - DNA, 27 bp, Artificial sequence
  SiRNA target sequence
taatattttttcgaaatcaaaactgtc

SEQ ID NO: 107997 - DNA, 27 bp, Artificial sequence
  SiRNA target sequence
aatattttttcgaaatcaaaactgtcc

SEQ ID NO: 107998 - DNA, 27 bp, Artificial sequence
  SiRNA target sequence
atattttttcgaaatcaaaactgtcca

SEQ ID NO: 107999 - DNA, 27 bp, Artificial sequence
  SiRNA target sequence
tattttttcgaaatcaaaactgtccat

SEQ ID NO: 108000 - DNA, 27 bp, Artificial sequence
  SiRNA target sequence
attttttcgaaatcaaaactgtccata

SEQ ID NO: 108001 - DNA, 27 bp, Artificial sequence
  SiRNA target sequence
ttttttcgaaatcaaaactgtccatat

SEQ ID NO: 108002 - DNA, 27 bp, Artificial sequence
  SiRNA target sequence
tttttcgaaatcaaaactgtccatatc

SEQ ID NO: 108003 - DNA, 27 bp, Artificial sequence
  SiRNA target sequence
ttttcgaaatcaaaactgtccatatct

SEQ ID NO: 108004 - DNA, 27 bp, Artificial sequence
  SiRNA target sequence
tttcgaaatcaaaactgtccatatcta

SEQ ID NO: 108005 - DNA, 27 bp, Artificial sequence
  SiRNA target sequence
ttcgaaatcaaaactgtccatatctaa

SEQ ID NO: 108006 - DNA, 27 bp, Artificial sequence
  SiRNA target sequence
tcgaaatcaaaactgtccatatctaaa

SEQ ID NO: 108007 - DNA, 27 bp, Artificial sequence
  SiRNA target sequence
cgaaatcaaaactgtccatatctaaag

SEQ ID NO: 108008 - DNA, 27 bp, Artificial sequence
  SiRNA target sequence
gaaatcaaaactgtccatatctaaagt

SEQ ID NO: 108009 - DNA, 27 bp, Artificial sequence
  SiRNA target sequence
aaatcaaaactgtccatatctaaagta

SEQ ID NO: 108010 - DNA, 27 bp, Artificial sequence
  SiRNA target sequence
aatcaaaactgtccatatctaaagtaa

SEQ ID NO: 108011 - DNA, 27 bp, Artificial sequence
  SiRNA target sequence
atcaaaactgtccatatctaaagtaaa

SEQ ID NO: 108012 - DNA, 27 bp, Artificial sequence
  SiRNA target sequence
tcaaaactgtccatatctaaagtaaaa

SEQ ID NO: 108013 - DNA, 27 bp, Artificial sequence
  SiRNA target sequence
caaaactgtccatatctaaagtaaaat

SEQ ID NO: 108014 - DNA, 27 bp, Artificial sequence
  SiRNA target sequence
aaaactgtccatatctaaagtaaaatc

SEQ ID NO: 108015 - DNA, 27 bp, Artificial sequence
  SiRNA target sequence
aaactgtccatatctaaagtaaaatct

SEQ ID NO: 108016 - DNA, 27 bp, Artificial sequence
  SiRNA target sequence
aactgtccatatctaaagtaaaatctg

SEQ ID NO: 108017 - DNA, 27 bp, Artificial sequence
  SiRNA target sequence
actgtccatatctaaagtaaaatctgt

SEQ ID NO: 108018 - DNA, 27 bp, Artificial sequence
  SiRNA target sequence
ctgtccatatctaaagtaaaatctgtt

SEQ ID NO: 108019 - DNA, 27 bp, Artificial sequence
  SiRNA target sequence
tgtccatatctaaagtaaaatctgttg

SEQ ID NO: 108020 - DNA, 27 bp, Artificial sequence
  SiRNA target sequence
gtccatatctaaagtaaaatctgttgg

SEQ ID NO: 108021 - DNA, 27 bp, Artificial sequence
  SiRNA target sequence
tccatatctaaagtaaaatctgttgga

SEQ ID NO: 108022 - DNA, 27 bp, Artificial sequence
  SiRNA target sequence
ccatatctaaagtaaaatctgttggaa

SEQ ID NO: 108023 - DNA, 27 bp, Artificial sequence
  SiRNA target sequence
catatctaaagtaaaatctgttggaag

SEQ ID NO: 108024 - DNA, 27 bp, Artificial sequence
  SiRNA target sequence
atatctaaagtaaaatctgttggaagc

SEQ ID NO: 108025 - DNA, 27 bp, Artificial sequence
  SiRNA target sequence
tatctaaagtaaaatctgttggaagca

SEQ ID NO: 108026 - DNA, 27 bp, Artificial sequence
  SiRNA target sequence
atctaaagtaaaatctgttggaagcaa

SEQ ID NO: 108027 - DNA, 27 bp, Artificial sequence
  SiRNA target sequence
tctaaagtaaaatctgttggaagcaat

SEQ ID NO: 108028 - DNA, 27 bp, Artificial sequence
  SiRNA target sequence
ctaaagtaaaatctgttggaagcaatt

SEQ ID NO: 108029 - DNA, 27 bp, Artificial sequence
  SiRNA target sequence
taaagtaaaatctgttggaagcaattc

SEQ ID NO: 108030 - DNA, 27 bp, Artificial sequence
  SiRNA target sequence
aaagtaaaatctgttggaagcaattct

SEQ ID NO: 108031 - DNA, 27 bp, Artificial sequence
  SiRNA target sequence
aagtaaaatctgttggaagcaattctt

SEQ ID NO: 108032 - DNA, 27 bp, Artificial sequence
  SiRNA target sequence
agtaaaatctgttggaagcaattcttt

SEQ ID NO: 108033 - DNA, 27 bp, Artificial sequence
  SiRNA target sequence
gtaaaatctgttggaagcaattcttta

SEQ ID NO: 108034 - DNA, 27 bp, Artificial sequence
  SiRNA target sequence
taaaatctgttggaagcaattctttat

SEQ ID NO: 108035 - DNA, 27 bp, Artificial sequence
  SiRNA target sequence
aaaatctgttggaagcaattctttatc

SEQ ID NO: 108036 - DNA, 27 bp, Artificial sequence
  SiRNA target sequence
aaatctgttggaagcaattctttatca

SEQ ID NO: 108037 - DNA, 27 bp, Artificial sequence
  SiRNA target sequence
aatctgttggaagcaattctttatcaa

SEQ ID NO: 108038 - DNA, 27 bp, Artificial sequence
  SiRNA target sequence
atctgttggaagcaattctttatcaac

SEQ ID NO: 108039 - DNA, 27 bp, Artificial sequence
  SiRNA target sequence
tctgttggaagcaattctttatcaacg

SEQ ID NO: 108040 - DNA, 27 bp, Artificial sequence
  SiRNA target sequence
ctgttggaagcaattctttatcaacgt

SEQ ID NO: 108041 - DNA, 27 bp, Artificial sequence
  SiRNA target sequence
tgttggaagcaattctttatcaacgtt

SEQ ID NO: 108042 - DNA, 27 bp, Artificial sequence
  SiRNA target sequence
gttggaagcaattctttatcaacgtta

SEQ ID NO: 108043 - DNA, 27 bp, Artificial sequence
  SiRNA target sequence
ttggaagcaattctttatcaacgttat

SEQ ID NO: 108044 - DNA, 27 bp, Artificial sequence
  SiRNA target sequence
tggaagcaattctttatcaacgttata

SEQ ID NO: 108045 - DNA, 27 bp, Artificial sequence
  SiRNA target sequence
ggaagcaattctttatcaacgttataa

SEQ ID NO: 108046 - DNA, 27 bp, Artificial sequence
  SiRNA target sequence
gaagcaattctttatcaacgttataaa

SEQ ID NO: 108047 - DNA, 27 bp, Artificial sequence
  SiRNA target sequence
aagcaattctttatcaacgttataaat

SEQ ID NO: 108048 - DNA, 27 bp, Artificial sequence
  SiRNA target sequence
agcaattctttatcaacgttataaatc

SEQ ID NO: 108049 - DNA, 27 bp, Artificial sequence
  SiRNA target sequence
gcaattctttatcaacgttataaatca

SEQ ID NO: 108050 - DNA, 27 bp, Artificial sequence
  SiRNA target sequence
caattctttatcaacgttataaatcaa

SEQ ID NO: 108051 - DNA, 27 bp, Artificial sequence
  SiRNA target sequence
aattctttatcaacgttataaatcaaa

SEQ ID NO: 108052 - DNA, 27 bp, Artificial sequence
  SiRNA target sequence
attctttatcaacgttataaatcaaat

SEQ ID NO: 108053 - DNA, 27 bp, Artificial sequence
  SiRNA target sequence
ttctttatcaacgttataaatcaaatc

SEQ ID NO: 108054 - DNA, 27 bp, Artificial sequence
  SiRNA target sequence
tctttatcaacgttataaatcaaatct

SEQ ID NO: 108055 - DNA, 27 bp, Artificial sequence
  SiRNA target sequence
ctttatcaacgttataaatcaaatctt

SEQ ID NO: 108056 - DNA, 27 bp, Artificial sequence
  SiRNA target sequence
tttatcaacgttataaatcaaatcttt

SEQ ID NO: 108057 - DNA, 27 bp, Artificial sequence
  SiRNA target sequence
ttatcaacgttataaatcaaatcttta

SEQ ID NO: 108058 - DNA, 27 bp, Artificial sequence
  SiRNA target sequence
tatcaacgttataaatcaaatctttat

SEQ ID NO: 108059 - DNA, 27 bp, Artificial sequence
  SiRNA target sequence
atcaacgttataaatcaaatctttatt

SEQ ID NO: 108060 - DNA, 27 bp, Artificial sequence
  SiRNA target sequence
tcaacgttataaatcaaatctttattg

SEQ ID NO: 108061 - DNA, 27 bp, Artificial sequence
  SiRNA target sequence
caacgttataaatcaaatctttattgt

SEQ ID NO: 108062 - DNA, 27 bp, Artificial sequence
  SiRNA target sequence
aacgttataaatcaaatctttattgta

SEQ ID NO: 108063 - DNA, 27 bp, Artificial sequence
  SiRNA target sequence
acgttataaatcaaatctttattgtat

SEQ ID NO: 108064 - DNA, 27 bp, Artificial sequence
  SiRNA target sequence
cgttataaatcaaatctttattgtatc

SEQ ID NO: 108065 - DNA, 27 bp, Artificial sequence
  SiRNA target sequence
gttataaatcaaatctttattgtatcc

SEQ ID NO: 108066 - DNA, 27 bp, Artificial sequence
  SiRNA target sequence
ttataaatcaaatctttattgtatccg

SEQ ID NO: 108067 - DNA, 27 bp, Artificial sequence
  SiRNA target sequence
tataaatcaaatctttattgtatccgt

SEQ ID NO: 108068 - DNA, 27 bp, Artificial sequence
  SiRNA target sequence
ataaatcaaatctttattgtatccgta

SEQ ID NO: 108069 - DNA, 27 bp, Artificial sequence
  SiRNA target sequence
taaatcaaatctttattgtatccgtat

SEQ ID NO: 108070 - DNA, 27 bp, Artificial sequence
  SiRNA target sequence
aaatcaaatctttattgtatccgtata

SEQ ID NO: 108071 - DNA, 27 bp, Artificial sequence
  SiRNA target sequence
aatcaaatctttattgtatccgtatag

SEQ ID NO: 108072 - DNA, 27 bp, Artificial sequence
  SiRNA target sequence
atcaaatctttattgtatccgtatagt

SEQ ID NO: 108073 - DNA, 27 bp, Artificial sequence
  SiRNA target sequence
tcaaatctttattgtatccgtatagta

SEQ ID NO: 108074 - DNA, 27 bp, Artificial sequence
  SiRNA target sequence
caaatctttattgtatccgtatagtat

SEQ ID NO: 108075 - DNA, 27 bp, Artificial sequence
  SiRNA target sequence
aaatctttattgtatccgtatagtata

SEQ ID NO: 108076 - DNA, 27 bp, Artificial sequence
  SiRNA target sequence
aatctttattgtatccgtatagtataa

SEQ ID NO: 108077 - DNA, 27 bp, Artificial sequence
  SiRNA target sequence
atctttattgtatccgtatagtataac

SEQ ID NO: 108078 - DNA, 27 bp, Artificial sequence
  SiRNA target sequence
tctttattgtatccgtatagtataaca

SEQ ID NO: 108079 - DNA, 27 bp, Artificial sequence
  SiRNA target sequence
ctttattgtatccgtatagtataacat

SEQ ID NO: 108080 - DNA, 27 bp, Artificial sequence
  SiRNA target sequence
tttattgtatccgtatagtataacatt

SEQ ID NO: 108081 - DNA, 27 bp, Artificial sequence
  SiRNA target sequence
ttattgtatccgtatagtataacattt

SEQ ID NO: 108082 - DNA, 27 bp, Artificial sequence
  SiRNA target sequence
tattgtatccgtatagtataacatttt

SEQ ID NO: 108083 - DNA, 27 bp, Artificial sequence
  SiRNA target sequence
attgtatccgtatagtataacattttg

SEQ ID NO: 108084 - DNA, 27 bp, Artificial sequence
  SiRNA target sequence
ttgtatccgtatagtataacattttga

SEQ ID NO: 108085 - DNA, 27 bp, Artificial sequence
  SiRNA target sequence
tgtatccgtatagtataacattttgaa

SEQ ID NO: 108086 - DNA, 27 bp, Artificial sequence
  SiRNA target sequence
gtatccgtatagtataacattttgaat

SEQ ID NO: 108087 - DNA, 27 bp, Artificial sequence
  SiRNA target sequence
tatccgtatagtataacattttgaata

SEQ ID NO: 108088 - DNA, 27 bp, Artificial sequence
  SiRNA target sequence
atccgtatagtataacattttgaataa

SEQ ID NO: 108089 - DNA, 27 bp, Artificial sequence
  SiRNA target sequence
tccgtatagtataacattttgaataag

SEQ ID NO: 108090 - DNA, 27 bp, Artificial sequence
  SiRNA target sequence
ccgtatagtataacattttgaataagt

SEQ ID NO: 108091 - DNA, 27 bp, Artificial sequence
  SiRNA target sequence
cgtatagtataacattttgaataagtt

SEQ ID NO: 108092 - DNA, 27 bp, Artificial sequence
  SiRNA target sequence
gtatagtataacattttgaataagttt

SEQ ID NO: 108093 - DNA, 27 bp, Artificial sequence
  SiRNA target sequence
tatagtataacattttgaataagttta

SEQ ID NO: 108094 - DNA, 27 bp, Artificial sequence
  SiRNA target sequence
atagtataacattttgaataagtttag

SEQ ID NO: 108095 - DNA, 27 bp, Artificial sequence
  SiRNA target sequence
tagtataacattttgaataagtttagc

SEQ ID NO: 108096 - DNA, 27 bp, Artificial sequence
  SiRNA target sequence
agtataacattttgaataagtttagca

SEQ ID NO: 108097 - DNA, 27 bp, Artificial sequence
  SiRNA target sequence
gtataacattttgaataagtttagcaa

SEQ ID NO: 108098 - DNA, 27 bp, Artificial sequence
  SiRNA target sequence
tataacattttgaataagtttagcaat

SEQ ID NO: 108099 - DNA, 27 bp, Artificial sequence
  SiRNA target sequence
ataacattttgaataagtttagcaata

SEQ ID NO: 108100 - DNA, 27 bp, Artificial sequence
  SiRNA target sequence
taacattttgaataagtttagcaatat

SEQ ID NO: 108101 - DNA, 27 bp, Artificial sequence
  SiRNA target sequence
aacattttgaataagtttagcaatatg

SEQ ID NO: 108102 - DNA, 27 bp, Artificial sequence
  SiRNA target sequence
acattttgaataagtttagcaatatgt

SEQ ID NO: 108103 - DNA, 27 bp, Artificial sequence
  SiRNA target sequence
cattttgaataagtttagcaatatgta

SEQ ID NO: 108104 - DNA, 27 bp, Artificial sequence
  SiRNA target sequence
attttgaataagtttagcaatatgtat

SEQ ID NO: 108105 - DNA, 27 bp, Artificial sequence
  SiRNA target sequence
ttttgaataagtttagcaatatgtata

SEQ ID NO: 108106 - DNA, 27 bp, Artificial sequence
  SiRNA target sequence
tttgaataagtttagcaatatgtatag

SEQ ID NO: 108107 - DNA, 27 bp, Artificial sequence
  SiRNA target sequence
ttgaataagtttagcaatatgtataga

SEQ ID NO: 108108 - DNA, 27 bp, Artificial sequence
  SiRNA target sequence
tgaataagtttagcaatatgtatagaa

SEQ ID NO: 108109 - DNA, 27 bp, Artificial sequence
  SiRNA target sequence
gaataagtttagcaatatgtatagaat

SEQ ID NO: 108110 - DNA, 27 bp, Artificial sequence
  SiRNA target sequence
aataagtttagcaatatgtatagaatt

SEQ ID NO: 108111 - DNA, 27 bp, Artificial sequence
  SiRNA target sequence
ataagtttagcaatatgtatagaattt

SEQ ID NO: 108112 - DNA, 27 bp, Artificial sequence
  SiRNA target sequence
taagtttagcaatatgtatagaatttc

SEQ ID NO: 108113 - DNA, 27 bp, Artificial sequence
  SiRNA target sequence
aagtttagcaatatgtatagaatttcc

SEQ ID NO: 108114 - DNA, 27 bp, Artificial sequence
  SiRNA target sequence
agtttagcaatatgtatagaatttcct

SEQ ID NO: 108115 - DNA, 27 bp, Artificial sequence
  SiRNA target sequence
gtttagcaatatgtatagaatttcctg

SEQ ID NO: 108116 - DNA, 27 bp, Artificial sequence
  SiRNA target sequence
tttagcaatatgtatagaatttcctgt

SEQ ID NO: 108117 - DNA, 27 bp, Artificial sequence
  SiRNA target sequence
ttagcaatatgtatagaatttcctgtt

SEQ ID NO: 108118 - DNA, 27 bp, Artificial sequence
  SiRNA target sequence
tagcaatatgtatagaatttcctgttt

SEQ ID NO: 108119 - DNA, 27 bp, Artificial sequence
  SiRNA target sequence
agcaatatgtatagaatttcctgtttg

SEQ ID NO: 108120 - DNA, 27 bp, Artificial sequence
  SiRNA target sequence
gcaatatgtatagaatttcctgtttgg

SEQ ID NO: 108121 - DNA, 27 bp, Artificial sequence
  SiRNA target sequence
caatatgtatagaatttcctgtttggg

SEQ ID NO: 108122 - DNA, 27 bp, Artificial sequence
  SiRNA target sequence
aatatgtatagaatttcctgtttggga

SEQ ID NO: 108123 - DNA, 27 bp, Artificial sequence
  SiRNA target sequence
atatgtatagaatttcctgtttgggag

SEQ ID NO: 108124 - DNA, 27 bp, Artificial sequence
  SiRNA target sequence
tatgtatagaatttcctgtttgggagc

SEQ ID NO: 108125 - DNA, 27 bp, Artificial sequence
  SiRNA target sequence
atgtatagaatttcctgtttgggagcc

SEQ ID NO: 108126 - DNA, 27 bp, Artificial sequence
  SiRNA target sequence
tgtatagaatttcctgtttgggagcca

SEQ ID NO: 108127 - DNA, 27 bp, Artificial sequence
  SiRNA target sequence
gtatagaatttcctgtttgggagccat

SEQ ID NO: 108128 - DNA, 27 bp, Artificial sequence
  SiRNA target sequence
tatagaatttcctgtttgggagccata

SEQ ID NO: 108129 - DNA, 27 bp, Artificial sequence
  SiRNA target sequence
atagaatttcctgtttgggagccatat

SEQ ID NO: 108130 - DNA, 27 bp, Artificial sequence
  SiRNA target sequence
tagaatttcctgtttgggagccatata

SEQ ID NO: 108131 - DNA, 27 bp, Artificial sequence
  SiRNA target sequence
agaatttcctgtttgggagccatataa

SEQ ID NO: 108132 - DNA, 27 bp, Artificial sequence
  SiRNA target sequence
gaatttcctgtttgggagccatataag

SEQ ID NO: 108133 - DNA, 27 bp, Artificial sequence
  SiRNA target sequence
aatttcctgtttgggagccatataaga

SEQ ID NO: 108134 - DNA, 27 bp, Artificial sequence
  SiRNA target sequence
atttcctgtttgggagccatataagat

SEQ ID NO: 108135 - DNA, 27 bp, Artificial sequence
  SiRNA target sequence
tttcctgtttgggagccatataagatt

SEQ ID NO: 108136 - DNA, 27 bp, Artificial sequence
  SiRNA target sequence
ttcctgtttgggagccatataagatta

SEQ ID NO: 108137 - DNA, 27 bp, Artificial sequence
  SiRNA target sequence
tcctgtttgggagccatataagattat

SEQ ID NO: 108138 - DNA, 27 bp, Artificial sequence
  SiRNA target sequence
cctgtttgggagccatataagattatc

SEQ ID NO: 108139 - DNA, 27 bp, Artificial sequence
  SiRNA target sequence
ctgtttgggagccatataagattatca

SEQ ID NO: 108140 - DNA, 27 bp, Artificial sequence
  SiRNA target sequence
tgtttgggagccatataagattatcat

SEQ ID NO: 108141 - DNA, 19 bp, Artificial sequence
  SiRNA target sequence
ttattcagaataaacatct

SEQ ID NO: 108142 - DNA, 19 bp, Artificial sequence
  SiRNA target sequence
tattcagaataaacatctt

SEQ ID NO: 108143 - DNA, 19 bp, Artificial sequence
  SiRNA target sequence
attcagaataaacatcttt

SEQ ID NO: 108144 - DNA, 19 bp, Artificial sequence
  SiRNA target sequence
ttcagaataaacatctttt

SEQ ID NO: 108145 - DNA, 19 bp, Artificial sequence
  SiRNA target sequence
tcagaataaacatctttta

SEQ ID NO: 108146 - DNA, 19 bp, Artificial sequence
  SiRNA target sequence
cagaataaacatcttttaa

SEQ ID NO: 108147 - DNA, 19 bp, Artificial sequence
  SiRNA target sequence
agaataaacatcttttaaa

SEQ ID NO: 108148 - DNA, 19 bp, Artificial sequence
  SiRNA target sequence
gaataaacatcttttaaaa

SEQ ID NO: 108149 - DNA, 19 bp, Artificial sequence
  SiRNA target sequence
aataaacatcttttaaaag

SEQ ID NO: 108150 - DNA, 19 bp, Artificial sequence
  SiRNA target sequence
ataaacatcttttaaaagt

SEQ ID NO: 108151 - DNA, 19 bp, Artificial sequence
  SiRNA target sequence
taaacatcttttaaaagtt

SEQ ID NO: 108152 - DNA, 19 bp, Artificial sequence
  SiRNA target sequence
aaacatcttttaaaagttc

SEQ ID NO: 108153 - DNA, 19 bp, Artificial sequence
  SiRNA target sequence
aacatcttttaaaagttca

SEQ ID NO: 108154 - DNA, 19 bp, Artificial sequence
  SiRNA target sequence
acatcttttaaaagttcat

SEQ ID NO: 108155 - DNA, 19 bp, Artificial sequence
  SiRNA target sequence
catcttttaaaagttcatc

SEQ ID NO: 108156 - DNA, 19 bp, Artificial sequence
  SiRNA target sequence
atcttttaaaagttcatcg

SEQ ID NO: 108157 - DNA, 19 bp, Artificial sequence
  SiRNA target sequence
tcttttaaaagttcatcga

SEQ ID NO: 108158 - DNA, 19 bp, Artificial sequence
  SiRNA target sequence
cttttaaaagttcatcgat

SEQ ID NO: 108159 - DNA, 19 bp, Artificial sequence
  SiRNA target sequence
ttttaaaagttcatcgata

SEQ ID NO: 108160 - DNA, 19 bp, Artificial sequence
  SiRNA target sequence
tttaaaagttcatcgatat

SEQ ID NO: 108161 - DNA, 19 bp, Artificial sequence
  SiRNA target sequence
ttaaaagttcatcgatatc

SEQ ID NO: 108162 - DNA, 19 bp, Artificial sequence
  SiRNA target sequence
taaaagttcatcgatatcg

SEQ ID NO: 108163 - DNA, 19 bp, Artificial sequence
  SiRNA target sequence
aaaagttcatcgatatcgg

SEQ ID NO: 108164 - DNA, 19 bp, Artificial sequence
  SiRNA target sequence
aaagttcatcgatatcggg

SEQ ID NO: 108165 - DNA, 19 bp, Artificial sequence
  SiRNA target sequence
aagttcatcgatatcgggt

SEQ ID NO: 108166 - DNA, 19 bp, Artificial sequence
  SiRNA target sequence
agttcatcgatatcgggtt

SEQ ID NO: 108167 - DNA, 19 bp, Artificial sequence
  SiRNA target sequence
gttcatcgatatcgggttc

SEQ ID NO: 108168 - DNA, 19 bp, Artificial sequence
  SiRNA target sequence
ttcatcgatatcgggttct

SEQ ID NO: 108169 - DNA, 19 bp, Artificial sequence
  SiRNA target sequence
tcatcgatatcgggttctt

SEQ ID NO: 108170 - DNA, 19 bp, Artificial sequence
  SiRNA target sequence
catcgatatcgggttcttt

SEQ ID NO: 108171 - DNA, 19 bp, Artificial sequence
  SiRNA target sequence
atcgatatcgggttcttta

SEQ ID NO: 108172 - DNA, 19 bp, Artificial sequence
  SiRNA target sequence
tcgatatcgggttctttag

SEQ ID NO: 108173 - DNA, 19 bp, Artificial sequence
  SiRNA target sequence
cgatatcgggttctttaga

SEQ ID NO: 108174 - DNA, 19 bp, Artificial sequence
  SiRNA target sequence
gatatcgggttctttagaa

SEQ ID NO: 108175 - DNA, 19 bp, Artificial sequence
  SiRNA target sequence
atatcgggttctttagaaa

SEQ ID NO: 108176 - DNA, 19 bp, Artificial sequence
  SiRNA target sequence
tatcgggttctttagaaaa

SEQ ID NO: 108177 - DNA, 19 bp, Artificial sequence
  SiRNA target sequence
atcgggttctttagaaaaa

SEQ ID NO: 108178 - DNA, 19 bp, Artificial sequence
  SiRNA target sequence
tcgggttctttagaaaaaa

SEQ ID NO: 108179 - DNA, 19 bp, Artificial sequence
  SiRNA target sequence
cgggttctttagaaaaaat

SEQ ID NO: 108180 - DNA, 19 bp, Artificial sequence
  SiRNA target sequence
gggttctttagaaaaaata

SEQ ID NO: 108181 - DNA, 19 bp, Artificial sequence
  SiRNA target sequence
ggttctttagaaaaaataa

SEQ ID NO: 108182 - DNA, 19 bp, Artificial sequence
  SiRNA target sequence
gttctttagaaaaaataac

SEQ ID NO: 108183 - DNA, 19 bp, Artificial sequence
  SiRNA target sequence
ttctttagaaaaaataact

SEQ ID NO: 108184 - DNA, 19 bp, Artificial sequence
  SiRNA target sequence
tctttagaaaaaataactt

SEQ ID NO: 108185 - DNA, 19 bp, Artificial sequence
  SiRNA target sequence
ctttagaaaaaataacttt

SEQ ID NO: 108186 - DNA, 19 bp, Artificial sequence
  SiRNA target sequence
tttagaaaaaataactttt

SEQ ID NO: 108187 - DNA, 19 bp, Artificial sequence
  SiRNA target sequence
ttagaaaaaataacttttt

SEQ ID NO: 108188 - DNA, 19 bp, Artificial sequence
  SiRNA target sequence
tagaaaaaataactttttt

SEQ ID NO: 108189 - DNA, 19 bp, Artificial sequence
  SiRNA target sequence
agaaaaaataactttttta

SEQ ID NO: 108190 - DNA, 19 bp, Artificial sequence
  SiRNA target sequence
gaaaaaataacttttttaa

SEQ ID NO: 108191 - DNA, 19 bp, Artificial sequence
  SiRNA target sequence
aaaaaataacttttttaac

SEQ ID NO: 108192 - DNA, 19 bp, Artificial sequence
  SiRNA target sequence
aaaaataacttttttaaca

SEQ ID NO: 108193 - DNA, 19 bp, Artificial sequence
  SiRNA target sequence
aaaataacttttttaacac

SEQ ID NO: 108194 - DNA, 19 bp, Artificial sequence
  SiRNA target sequence
aaataacttttttaacacc

SEQ ID NO: 108195 - DNA, 19 bp, Artificial sequence
  SiRNA target sequence
aataacttttttaacacct

SEQ ID NO: 108196 - DNA, 19 bp, Artificial sequence
  SiRNA target sequence
ataacttttttaacacctt

SEQ ID NO: 108197 - DNA, 19 bp, Artificial sequence
  SiRNA target sequence
taacttttttaacaccttc

SEQ ID NO: 108198 - DNA, 19 bp, Artificial sequence
  SiRNA target sequence
aacttttttaacaccttct

SEQ ID NO: 108199 - DNA, 19 bp, Artificial sequence
  SiRNA target sequence
acttttttaacaccttctt

SEQ ID NO: 108200 - DNA, 19 bp, Artificial sequence
  SiRNA target sequence
cttttttaacaccttcttc

SEQ ID NO: 108201 - DNA, 19 bp, Artificial sequence
  SiRNA target sequence
ttttttaacaccttcttca

SEQ ID NO: 108202 - DNA, 19 bp, Artificial sequence
  SiRNA target sequence
tttttaacaccttcttcaa

SEQ ID NO: 108203 - DNA, 19 bp, Artificial sequence
  SiRNA target sequence
ttttaacaccttcttcaaa

SEQ ID NO: 108204 - DNA, 19 bp, Artificial sequence
  SiRNA target sequence
tttaacaccttcttcaaag

SEQ ID NO: 108205 - DNA, 19 bp, Artificial sequence
  SiRNA target sequence
ttaacaccttcttcaaagc

SEQ ID NO: 108206 - DNA, 19 bp, Artificial sequence
  SiRNA target sequence
taacaccttcttcaaagca

SEQ ID NO: 108207 - DNA, 19 bp, Artificial sequence
  SiRNA target sequence
aacaccttcttcaaagcag

SEQ ID NO: 108208 - DNA, 19 bp, Artificial sequence
  SiRNA target sequence
acaccttcttcaaagcagg

SEQ ID NO: 108209 - DNA, 19 bp, Artificial sequence
  SiRNA target sequence
caccttcttcaaagcagga

SEQ ID NO: 108210 - DNA, 19 bp, Artificial sequence
  SiRNA target sequence
accttcttcaaagcaggaa

SEQ ID NO: 108211 - DNA, 19 bp, Artificial sequence
  SiRNA target sequence
ccttcttcaaagcaggaaa

SEQ ID NO: 108212 - DNA, 19 bp, Artificial sequence
  SiRNA target sequence
cttcttcaaagcaggaaat

SEQ ID NO: 108213 - DNA, 19 bp, Artificial sequence
  SiRNA target sequence
ttcttcaaagcaggaaatt

SEQ ID NO: 108214 - DNA, 19 bp, Artificial sequence
  SiRNA target sequence
tcttcaaagcaggaaatta

SEQ ID NO: 108215 - DNA, 19 bp, Artificial sequence
  SiRNA target sequence
cttcaaagcaggaaattac

SEQ ID NO: 108216 - DNA, 19 bp, Artificial sequence
  SiRNA target sequence
ttcaaagcaggaaattacc

SEQ ID NO: 108217 - DNA, 19 bp, Artificial sequence
  SiRNA target sequence
tcaaagcaggaaattacct

SEQ ID NO: 108218 - DNA, 19 bp, Artificial sequence
  SiRNA target sequence
caaagcaggaaattacctc

SEQ ID NO: 108219 - DNA, 19 bp, Artificial sequence
  SiRNA target sequence
aaagcaggaaattacctca

SEQ ID NO: 108220 - DNA, 19 bp, Artificial sequence
  SiRNA target sequence
aagcaggaaattacctcat

SEQ ID NO: 108221 - DNA, 19 bp, Artificial sequence
  SiRNA target sequence
agcaggaaattacctcatc

SEQ ID NO: 108222 - DNA, 19 bp, Artificial sequence
  SiRNA target sequence
gcaggaaattacctcatct

SEQ ID NO: 108223 - DNA, 19 bp, Artificial sequence
  SiRNA target sequence
caggaaattacctcatctt

SEQ ID NO: 108224 - DNA, 19 bp, Artificial sequence
  SiRNA target sequence
aggaaattacctcatcttc

SEQ ID NO: 108225 - DNA, 19 bp, Artificial sequence
  SiRNA target sequence
ggaaattacctcatcttcg

SEQ ID NO: 108226 - DNA, 19 bp, Artificial sequence
  SiRNA target sequence
gaaattacctcatcttcga

SEQ ID NO: 108227 - DNA, 19 bp, Artificial sequence
  SiRNA target sequence
aaattacctcatcttcgat

SEQ ID NO: 108228 - DNA, 19 bp, Artificial sequence
  SiRNA target sequence
aattacctcatcttcgata

SEQ ID NO: 108229 - DNA, 19 bp, Artificial sequence
  SiRNA target sequence
attacctcatcttcgataa

SEQ ID NO: 108230 - DNA, 19 bp, Artificial sequence
  SiRNA target sequence
ttacctcatcttcgataat

SEQ ID NO: 108231 - DNA, 19 bp, Artificial sequence
  SiRNA target sequence
tacctcatcttcgataatt

SEQ ID NO: 108232 - DNA, 19 bp, Artificial sequence
  SiRNA target sequence
acctcatcttcgataattt

SEQ ID NO: 108233 - DNA, 19 bp, Artificial sequence
  SiRNA target sequence
cctcatcttcgataatttt

SEQ ID NO: 108234 - DNA, 19 bp, Artificial sequence
  SiRNA target sequence
ctcatcttcgataattttt

SEQ ID NO: 108235 - DNA, 19 bp, Artificial sequence
  SiRNA target sequence
tcatcttcgataattttta

SEQ ID NO: 108236 - DNA, 19 bp, Artificial sequence
  SiRNA target sequence
catcttcgataatttttac

SEQ ID NO: 108237 - DNA, 19 bp, Artificial sequence
  SiRNA target sequence
atcttcgataatttttact

SEQ ID NO: 108238 - DNA, 19 bp, Artificial sequence
  SiRNA target sequence
tcttcgataatttttactt

SEQ ID NO: 108239 - DNA, 19 bp, Artificial sequence
  SiRNA target sequence
cttcgataatttttacttc

SEQ ID NO: 108240 - DNA, 19 bp, Artificial sequence
  SiRNA target sequence
ttcgataatttttacttct

SEQ ID NO: 108241 - DNA, 19 bp, Artificial sequence
  SiRNA target sequence
tcgataatttttacttctt

SEQ ID NO: 108242 - DNA, 19 bp, Artificial sequence
  SiRNA target sequence
cgataatttttacttcttc

SEQ ID NO: 108243 - DNA, 19 bp, Artificial sequence
  SiRNA target sequence
gataatttttacttcttca

SEQ ID NO: 108244 - DNA, 19 bp, Artificial sequence
  SiRNA target sequence
ataatttttacttcttcac

SEQ ID NO: 108245 - DNA, 19 bp, Artificial sequence
  SiRNA target sequence
taatttttacttcttcaca

SEQ ID NO: 108246 - DNA, 19 bp, Artificial sequence
  SiRNA target sequence
aatttttacttcttcacaa

SEQ ID NO: 108247 - DNA, 19 bp, Artificial sequence
  SiRNA target sequence
atttttacttcttcacaag

SEQ ID NO: 108248 - DNA, 19 bp, Artificial sequence
  SiRNA target sequence
tttttacttcttcacaagt

SEQ ID NO: 108249 - DNA, 19 bp, Artificial sequence
  SiRNA target sequence
ttttacttcttcacaagtc

SEQ ID NO: 108250 - DNA, 19 bp, Artificial sequence
  SiRNA target sequence
tttacttcttcacaagtcg

SEQ ID NO: 108251 - DNA, 19 bp, Artificial sequence
  SiRNA target sequence
ttacttcttcacaagtcgc

SEQ ID NO: 108252 - DNA, 19 bp, Artificial sequence
  SiRNA target sequence
tacttcttcacaagtcgca

SEQ ID NO: 108253 - DNA, 19 bp, Artificial sequence
  SiRNA target sequence
acttcttcacaagtcgcaa

SEQ ID NO: 108254 - DNA, 19 bp, Artificial sequence
  SiRNA target sequence
cttcttcacaagtcgcaaa

SEQ ID NO: 108255 - DNA, 19 bp, Artificial sequence
  SiRNA target sequence
ttcttcacaagtcgcaaat

SEQ ID NO: 108256 - DNA, 19 bp, Artificial sequence
  SiRNA target sequence
tcttcacaagtcgcaaatt

SEQ ID NO: 108257 - DNA, 19 bp, Artificial sequence
  SiRNA target sequence
cttcacaagtcgcaaattt

SEQ ID NO: 108258 - DNA, 19 bp, Artificial sequence
  SiRNA target sequence
ttcacaagtcgcaaatttt

SEQ ID NO: 108259 - DNA, 19 bp, Artificial sequence
  SiRNA target sequence
tcacaagtcgcaaattttt

SEQ ID NO: 108260 - DNA, 19 bp, Artificial sequence
  SiRNA target sequence
cacaagtcgcaaatttttg

SEQ ID NO: 108261 - DNA, 19 bp, Artificial sequence
  SiRNA target sequence
acaagtcgcaaatttttgt

SEQ ID NO: 108262 - DNA, 19 bp, Artificial sequence
  SiRNA target sequence
caagtcgcaaatttttgta

SEQ ID NO: 108263 - DNA, 19 bp, Artificial sequence
  SiRNA target sequence
aagtcgcaaatttttgtaa

SEQ ID NO: 108264 - DNA, 19 bp, Artificial sequence
  SiRNA target sequence
agtcgcaaatttttgtaag

SEQ ID NO: 108265 - DNA, 19 bp, Artificial sequence
  SiRNA target sequence
gtcgcaaatttttgtaagt

SEQ ID NO: 108266 - DNA, 19 bp, Artificial sequence
  SiRNA target sequence
tcgcaaatttttgtaagtt

SEQ ID NO: 108267 - DNA, 19 bp, Artificial sequence
  SiRNA target sequence
cgcaaatttttgtaagtta

SEQ ID NO: 108268 - DNA, 19 bp, Artificial sequence
  SiRNA target sequence
gcaaatttttgtaagttat

SEQ ID NO: 108269 - DNA, 19 bp, Artificial sequence
  SiRNA target sequence
caaatttttgtaagttatt

SEQ ID NO: 108270 - DNA, 19 bp, Artificial sequence
  SiRNA target sequence
aaatttttgtaagttattt

SEQ ID NO: 108271 - DNA, 19 bp, Artificial sequence
  SiRNA target sequence
aatttttgtaagttatttt

SEQ ID NO: 108272 - DNA, 19 bp, Artificial sequence
  SiRNA target sequence
atttttgtaagttattttt

SEQ ID NO: 108273 - DNA, 19 bp, Artificial sequence
  SiRNA target sequence
tttttgtaagttatttttt

SEQ ID NO: 108274 - DNA, 19 bp, Artificial sequence
  SiRNA target sequence
ttttgtaagttattttttg

SEQ ID NO: 108275 - DNA, 19 bp, Artificial sequence
  SiRNA target sequence
tttgtaagttattttttgc

SEQ ID NO: 108276 - DNA, 19 bp, Artificial sequence
  SiRNA target sequence
ttgtaagttattttttgct

SEQ ID NO: 108277 - DNA, 19 bp, Artificial sequence
  SiRNA target sequence
tgtaagttattttttgctt

SEQ ID NO: 108278 - DNA, 19 bp, Artificial sequence
  SiRNA target sequence
gtaagttattttttgcttc

SEQ ID NO: 108279 - DNA, 19 bp, Artificial sequence
  SiRNA target sequence
taagttattttttgcttct

SEQ ID NO: 108280 - DNA, 19 bp, Artificial sequence
  SiRNA target sequence
aagttattttttgcttctt

SEQ ID NO: 108281 - DNA, 19 bp, Artificial sequence
  SiRNA target sequence
agttattttttgcttcttt

SEQ ID NO: 108282 - DNA, 19 bp, Artificial sequence
  SiRNA target sequence
gttattttttgcttcttta

SEQ ID NO: 108283 - DNA, 19 bp, Artificial sequence
  SiRNA target sequence
ttattttttgcttctttaa

SEQ ID NO: 108284 - DNA, 19 bp, Artificial sequence
  SiRNA target sequence
tattttttgcttctttaag

SEQ ID NO: 108285 - DNA, 19 bp, Artificial sequence
  SiRNA target sequence
attttttgcttctttaagg

SEQ ID NO: 108286 - DNA, 19 bp, Artificial sequence
  SiRNA target sequence
ttttttgcttctttaaggc

SEQ ID NO: 108287 - DNA, 19 bp, Artificial sequence
  SiRNA target sequence
tttttgcttctttaaggca

SEQ ID NO: 108288 - DNA, 19 bp, Artificial sequence
  SiRNA target sequence
ttttgcttctttaaggcaa

SEQ ID NO: 108289 - DNA, 19 bp, Artificial sequence
  SiRNA target sequence
tttgcttctttaaggcaat

SEQ ID NO: 108290 - DNA, 19 bp, Artificial sequence
  SiRNA target sequence
ttgcttctttaaggcaatc

SEQ ID NO: 108291 - DNA, 19 bp, Artificial sequence
  SiRNA target sequence
tgcttctttaaggcaatca

SEQ ID NO: 108292 - DNA, 19 bp, Artificial sequence
  SiRNA target sequence
gcttctttaaggcaatcat

SEQ ID NO: 108293 - DNA, 19 bp, Artificial sequence
  SiRNA target sequence
cttctttaaggcaatcatt

SEQ ID NO: 108294 - DNA, 19 bp, Artificial sequence
  SiRNA target sequence
ttctttaaggcaatcatta

SEQ ID NO: 108295 - DNA, 19 bp, Artificial sequence
  SiRNA target sequence
tctttaaggcaatcattat

SEQ ID NO: 108296 - DNA, 19 bp, Artificial sequence
  SiRNA target sequence
ctttaaggcaatcattatt

SEQ ID NO: 108297 - DNA, 19 bp, Artificial sequence
  SiRNA target sequence
tttaaggcaatcattattt

SEQ ID NO: 108298 - DNA, 19 bp, Artificial sequence
  SiRNA target sequence
ttaaggcaatcattatttt

SEQ ID NO: 108299 - DNA, 19 bp, Artificial sequence
  SiRNA target sequence
taaggcaatcattattttt

SEQ ID NO: 108300 - DNA, 19 bp, Artificial sequence
  SiRNA target sequence
aaggcaatcattatttttt

SEQ ID NO: 108301 - DNA, 19 bp, Artificial sequence
  SiRNA target sequence
aggcaatcattattttttt

SEQ ID NO: 108302 - DNA, 19 bp, Artificial sequence
  SiRNA target sequence
ggcaatcattatttttttt

SEQ ID NO: 108303 - DNA, 19 bp, Artificial sequence
  SiRNA target sequence
gcaatcattattttttttt

SEQ ID NO: 108304 - DNA, 19 bp, Artificial sequence
  SiRNA target sequence
caatcattatttttttttt

SEQ ID NO: 108305 - DNA, 19 bp, Artificial sequence
  SiRNA target sequence
aatcattattttttttttc

SEQ ID NO: 108306 - DNA, 19 bp, Artificial sequence
  SiRNA target sequence
atcattattttttttttca

SEQ ID NO: 108307 - DNA, 19 bp, Artificial sequence
  SiRNA target sequence
tcattattttttttttcat

SEQ ID NO: 108308 - DNA, 19 bp, Artificial sequence
  SiRNA target sequence
cattattttttttttcatt

SEQ ID NO: 108309 - DNA, 19 bp, Artificial sequence
  SiRNA target sequence
attattttttttttcatta

SEQ ID NO: 108310 - DNA, 19 bp, Artificial sequence
  SiRNA target sequence
ttattttttttttcattaa

SEQ ID NO: 108311 - DNA, 19 bp, Artificial sequence
  SiRNA target sequence
tattttttttttcattaat

SEQ ID NO: 108312 - DNA, 19 bp, Artificial sequence
  SiRNA target sequence
attttttttttcattaatt

SEQ ID NO: 108313 - DNA, 19 bp, Artificial sequence
  SiRNA target sequence
ttttttttttcattaattt

SEQ ID NO: 108314 - DNA, 19 bp, Artificial sequence
  SiRNA target sequence
tttttttttcattaatttc

SEQ ID NO: 108315 - DNA, 19 bp, Artificial sequence
  SiRNA target sequence
ttttttttcattaatttcc

SEQ ID NO: 108316 - DNA, 19 bp, Artificial sequence
  SiRNA target sequence
tttttttcattaatttcct

SEQ ID NO: 108317 - DNA, 19 bp, Artificial sequence
  SiRNA target sequence
ttttttcattaatttcctc

SEQ ID NO: 108318 - DNA, 19 bp, Artificial sequence
  SiRNA target sequence
tttttcattaatttcctcc

SEQ ID NO: 108319 - DNA, 19 bp, Artificial sequence
  SiRNA target sequence
ttttcattaatttcctccg

SEQ ID NO: 108320 - DNA, 19 bp, Artificial sequence
  SiRNA target sequence
tttcattaatttcctccgt

SEQ ID NO: 108321 - DNA, 19 bp, Artificial sequence
  SiRNA target sequence
ttcattaatttcctccgtg

SEQ ID NO: 108322 - DNA, 19 bp, Artificial sequence
  SiRNA target sequence
tcattaatttcctccgtgg

SEQ ID NO: 108323 - DNA, 19 bp, Artificial sequence
  SiRNA target sequence
cattaatttcctccgtgga

SEQ ID NO: 108324 - DNA, 19 bp, Artificial sequence
  SiRNA target sequence
attaatttcctccgtggat

SEQ ID NO: 108325 - DNA, 19 bp, Artificial sequence
  SiRNA target sequence
ttaatttcctccgtggatc

SEQ ID NO: 108326 - DNA, 19 bp, Artificial sequence
  SiRNA target sequence
taatttcctccgtggatct

SEQ ID NO: 108327 - DNA, 19 bp, Artificial sequence
  SiRNA target sequence
aatttcctccgtggatctg

SEQ ID NO: 108328 - DNA, 19 bp, Artificial sequence
  SiRNA target sequence
atttcctccgtggatctgt

SEQ ID NO: 108329 - DNA, 19 bp, Artificial sequence
  SiRNA target sequence
tttcctccgtggatctgta

SEQ ID NO: 108330 - DNA, 19 bp, Artificial sequence
  SiRNA target sequence
ttcctccgtggatctgtaa

SEQ ID NO: 108331 - DNA, 19 bp, Artificial sequence
  SiRNA target sequence
tcctccgtggatctgtaaa

SEQ ID NO: 108332 - DNA, 19 bp, Artificial sequence
  SiRNA target sequence
cctccgtggatctgtaaaa

SEQ ID NO: 108333 - DNA, 19 bp, Artificial sequence
  SiRNA target sequence
ctccgtggatctgtaaaaa

SEQ ID NO: 108334 - DNA, 19 bp, Artificial sequence
  SiRNA target sequence
tccgtggatctgtaaaaat

SEQ ID NO: 108335 - DNA, 19 bp, Artificial sequence
  SiRNA target sequence
ccgtggatctgtaaaaatc

SEQ ID NO: 108336 - DNA, 19 bp, Artificial sequence
  SiRNA target sequence
cgtggatctgtaaaaatcg

SEQ ID NO: 108337 - DNA, 19 bp, Artificial sequence
  SiRNA target sequence
gtggatctgtaaaaatcgt

SEQ ID NO: 108338 - DNA, 19 bp, Artificial sequence
  SiRNA target sequence
tggatctgtaaaaatcgtt

SEQ ID NO: 108339 - DNA, 19 bp, Artificial sequence
  SiRNA target sequence
ggatctgtaaaaatcgtta

SEQ ID NO: 108340 - DNA, 19 bp, Artificial sequence
  SiRNA target sequence
gatctgtaaaaatcgttaa

SEQ ID NO: 108341 - DNA, 19 bp, Artificial sequence
  SiRNA target sequence
atctgtaaaaatcgttaac

SEQ ID NO: 108342 - DNA, 19 bp, Artificial sequence
  SiRNA target sequence
tctgtaaaaatcgttaaca

SEQ ID NO: 108343 - DNA, 19 bp, Artificial sequence
  SiRNA target sequence
ctgtaaaaatcgttaacat

SEQ ID NO: 108344 - DNA, 19 bp, Artificial sequence
  SiRNA target sequence
tgtaaaaatcgttaacatc

SEQ ID NO: 108345 - DNA, 19 bp, Artificial sequence
  SiRNA target sequence
gtaaaaatcgttaacatct

SEQ ID NO: 108346 - DNA, 19 bp, Artificial sequence
  SiRNA target sequence
taaaaatcgttaacatcta

SEQ ID NO: 108347 - DNA, 19 bp, Artificial sequence
  SiRNA target sequence
aaaaatcgttaacatctaa

SEQ ID NO: 108348 - DNA, 19 bp, Artificial sequence
  SiRNA target sequence
aaaatcgttaacatctaaa

SEQ ID NO: 108349 - DNA, 19 bp, Artificial sequence
  SiRNA target sequence
aaatcgttaacatctaaac

SEQ ID NO: 108350 - DNA, 19 bp, Artificial sequence
  SiRNA target sequence
aatcgttaacatctaaaca

SEQ ID NO: 108351 - DNA, 19 bp, Artificial sequence
  SiRNA target sequence
atcgttaacatctaaacag

SEQ ID NO: 108352 - DNA, 19 bp, Artificial sequence
  SiRNA target sequence
tcgttaacatctaaacagg

SEQ ID NO: 108353 - DNA, 19 bp, Artificial sequence
  SiRNA target sequence
cgttaacatctaaacagga

SEQ ID NO: 108354 - DNA, 19 bp, Artificial sequence
  SiRNA target sequence
gttaacatctaaacaggag

SEQ ID NO: 108355 - DNA, 19 bp, Artificial sequence
  SiRNA target sequence
ttaacatctaaacaggagt

SEQ ID NO: 108356 - DNA, 19 bp, Artificial sequence
  SiRNA target sequence
taacatctaaacaggagtg

SEQ ID NO: 108357 - DNA, 19 bp, Artificial sequence
  SiRNA target sequence
aacatctaaacaggagtgc

SEQ ID NO: 108358 - DNA, 19 bp, Artificial sequence
  SiRNA target sequence
acatctaaacaggagtgcc

SEQ ID NO: 108359 - DNA, 19 bp, Artificial sequence
  SiRNA target sequence
catctaaacaggagtgccc

SEQ ID NO: 108360 - DNA, 19 bp, Artificial sequence
  SiRNA target sequence
atctaaacaggagtgccca

SEQ ID NO: 108361 - DNA, 19 bp, Artificial sequence
  SiRNA target sequence
tctaaacaggagtgcccac

SEQ ID NO: 108362 - DNA, 19 bp, Artificial sequence
  SiRNA target sequence
ctaaacaggagtgcccaca

SEQ ID NO: 108363 - DNA, 19 bp, Artificial sequence
  SiRNA target sequence
taaacaggagtgcccacat

SEQ ID NO: 108364 - DNA, 19 bp, Artificial sequence
  SiRNA target sequence
aaacaggagtgcccacatg

SEQ ID NO: 108365 - DNA, 19 bp, Artificial sequence
  SiRNA target sequence
aacaggagtgcccacatgt

SEQ ID NO: 108366 - DNA, 19 bp, Artificial sequence
  SiRNA target sequence
acaggagtgcccacatgtc

SEQ ID NO: 108367 - DNA, 19 bp, Artificial sequence
  SiRNA target sequence
caggagtgcccacatgtcc

SEQ ID NO: 108368 - DNA, 19 bp, Artificial sequence
  SiRNA target sequence
aggagtgcccacatgtcct

SEQ ID NO: 108369 - DNA, 19 bp, Artificial sequence
  SiRNA target sequence
ggagtgcccacatgtcctg

SEQ ID NO: 108370 - DNA, 19 bp, Artificial sequence
  SiRNA target sequence
gagtgcccacatgtcctgt

SEQ ID NO: 108371 - DNA, 19 bp, Artificial sequence
  SiRNA target sequence
agtgcccacatgtcctgta

SEQ ID NO: 108372 - DNA, 19 bp, Artificial sequence
  SiRNA target sequence
gtgcccacatgtcctgtac

SEQ ID NO: 108373 - DNA, 19 bp, Artificial sequence
  SiRNA target sequence
tgcccacatgtcctgtacg

SEQ ID NO: 108374 - DNA, 19 bp, Artificial sequence
  SiRNA target sequence
gcccacatgtcctgtacgt

SEQ ID NO: 108375 - DNA, 19 bp, Artificial sequence
  SiRNA target sequence
cccacatgtcctgtacgta

SEQ ID NO: 108376 - DNA, 19 bp, Artificial sequence
  SiRNA target sequence
ccacatgtcctgtacgtat

SEQ ID NO: 108377 - DNA, 19 bp, Artificial sequence
  SiRNA target sequence
cacatgtcctgtacgtatc

SEQ ID NO: 108378 - DNA, 19 bp, Artificial sequence
  SiRNA target sequence
acatgtcctgtacgtatca

SEQ ID NO: 108379 - DNA, 19 bp, Artificial sequence
  SiRNA target sequence
catgtcctgtacgtatcaa

SEQ ID NO: 108380 - DNA, 19 bp, Artificial sequence
  SiRNA target sequence
atgtcctgtacgtatcaat

SEQ ID NO: 108381 - DNA, 19 bp, Artificial sequence
  SiRNA target sequence
tgtcctgtacgtatcaatt

SEQ ID NO: 108382 - DNA, 19 bp, Artificial sequence
  SiRNA target sequence
gtcctgtacgtatcaattt

SEQ ID NO: 108383 - DNA, 19 bp, Artificial sequence
  SiRNA target sequence
tcctgtacgtatcaatttg

SEQ ID NO: 108384 - DNA, 19 bp, Artificial sequence
  SiRNA target sequence
cctgtacgtatcaatttgc

SEQ ID NO: 108385 - DNA, 19 bp, Artificial sequence
  SiRNA target sequence
ctgtacgtatcaatttgca

SEQ ID NO: 108386 - DNA, 19 bp, Artificial sequence
  SiRNA target sequence
tgtacgtatcaatttgcaa

SEQ ID NO: 108387 - DNA, 19 bp, Artificial sequence
  SiRNA target sequence
gtacgtatcaatttgcaag

SEQ ID NO: 108388 - DNA, 19 bp, Artificial sequence
  SiRNA target sequence
tacgtatcaatttgcaaga

SEQ ID NO: 108389 - DNA, 19 bp, Artificial sequence
  SiRNA target sequence
acgtatcaatttgcaagat

SEQ ID NO: 108390 - DNA, 19 bp, Artificial sequence
  SiRNA target sequence
cgtatcaatttgcaagatg

SEQ ID NO: 108391 - DNA, 19 bp, Artificial sequence
  SiRNA target sequence
gtatcaatttgcaagatga

SEQ ID NO: 108392 - DNA, 19 bp, Artificial sequence
  SiRNA target sequence
tatcaatttgcaagatgat

SEQ ID NO: 108393 - DNA, 19 bp, Artificial sequence
  SiRNA target sequence
atcaatttgcaagatgata

SEQ ID NO: 108394 - DNA, 19 bp, Artificial sequence
  SiRNA target sequence
tcaatttgcaagatgatag

SEQ ID NO: 108395 - DNA, 19 bp, Artificial sequence
  SiRNA target sequence
caatttgcaagatgatagg

SEQ ID NO: 108396 - DNA, 19 bp, Artificial sequence
  SiRNA target sequence
aatttgcaagatgataggt

SEQ ID NO: 108397 - DNA, 19 bp, Artificial sequence
  SiRNA target sequence
atttgcaagatgataggtc

SEQ ID NO: 108398 - DNA, 19 bp, Artificial sequence
  SiRNA target sequence
tttgcaagatgataggtcc

SEQ ID NO: 108399 - DNA, 19 bp, Artificial sequence
  SiRNA target sequence
ttgcaagatgataggtcct

SEQ ID NO: 108400 - DNA, 19 bp, Artificial sequence
  SiRNA target sequence
tgcaagatgataggtcctt

SEQ ID NO: 108401 - DNA, 19 bp, Artificial sequence
  SiRNA target sequence
gcaagatgataggtccttt

SEQ ID NO: 108402 - DNA, 19 bp, Artificial sequence
  SiRNA target sequence
caagatgataggtcctttt

SEQ ID NO: 108403 - DNA, 19 bp, Artificial sequence
  SiRNA target sequence
aagatgataggtccttttt

SEQ ID NO: 108404 - DNA, 19 bp, Artificial sequence
  SiRNA target sequence
agatgataggtcctttttc

SEQ ID NO: 108405 - DNA, 19 bp, Artificial sequence
  SiRNA target sequence
gatgataggtcctttttct

SEQ ID NO: 108406 - DNA, 19 bp, Artificial sequence
  SiRNA target sequence
atgataggtcctttttcta

SEQ ID NO: 108407 - DNA, 19 bp, Artificial sequence
  SiRNA target sequence
tgataggtcctttttctat

SEQ ID NO: 108408 - DNA, 19 bp, Artificial sequence
  SiRNA target sequence
gataggtcctttttctatt

SEQ ID NO: 108409 - DNA, 19 bp, Artificial sequence
  SiRNA target sequence
ataggtcctttttctattg

SEQ ID NO: 108410 - DNA, 19 bp, Artificial sequence
  SiRNA target sequence
taggtcctttttctattgc

SEQ ID NO: 108411 - DNA, 19 bp, Artificial sequence
  SiRNA target sequence
aggtcctttttctattgca

SEQ ID NO: 108412 - DNA, 19 bp, Artificial sequence
  SiRNA target sequence
ggtcctttttctattgcat

SEQ ID NO: 108413 - DNA, 19 bp, Artificial sequence
  SiRNA target sequence
gtcctttttctattgcatg

SEQ ID NO: 108414 - DNA, 19 bp, Artificial sequence
  SiRNA target sequence
tcctttttctattgcatgt

SEQ ID NO: 108415 - DNA, 19 bp, Artificial sequence
  SiRNA target sequence
cctttttctattgcatgtt

SEQ ID NO: 108416 - DNA, 19 bp, Artificial sequence
  SiRNA target sequence
ctttttctattgcatgttg

SEQ ID NO: 108417 - DNA, 19 bp, Artificial sequence
  SiRNA target sequence
tttttctattgcatgttgt

SEQ ID NO: 108418 - DNA, 19 bp, Artificial sequence
  SiRNA target sequence
ttttctattgcatgttgtc

SEQ ID NO: 108419 - DNA, 19 bp, Artificial sequence
  SiRNA target sequence
tttctattgcatgttgtct

SEQ ID NO: 108420 - DNA, 19 bp, Artificial sequence
  SiRNA target sequence
ttctattgcatgttgtcta

SEQ ID NO: 108421 - DNA, 19 bp, Artificial sequence
  SiRNA target sequence
tctattgcatgttgtctag

SEQ ID NO: 108422 - DNA, 19 bp, Artificial sequence
  SiRNA target sequence
ctattgcatgttgtctagc

SEQ ID NO: 108423 - DNA, 19 bp, Artificial sequence
  SiRNA target sequence
tattgcatgttgtctagca

SEQ ID NO: 108424 - DNA, 19 bp, Artificial sequence
  SiRNA target sequence
attgcatgttgtctagcaa

SEQ ID NO: 108425 - DNA, 19 bp, Artificial sequence
  SiRNA target sequence
ttgcatgttgtctagcaaa

SEQ ID NO: 108426 - DNA, 19 bp, Artificial sequence
  SiRNA target sequence
tgcatgttgtctagcaaat

SEQ ID NO: 108427 - DNA, 19 bp, Artificial sequence
  SiRNA target sequence
gcatgttgtctagcaaatg

SEQ ID NO: 108428 - DNA, 19 bp, Artificial sequence
  SiRNA target sequence
catgttgtctagcaaatgt

SEQ ID NO: 108429 - DNA, 19 bp, Artificial sequence
  SiRNA target sequence
atgttgtctagcaaatgta

SEQ ID NO: 108430 - DNA, 19 bp, Artificial sequence
  SiRNA target sequence
tgttgtctagcaaatgtaa

SEQ ID NO: 108431 - DNA, 19 bp, Artificial sequence
  SiRNA target sequence
gttgtctagcaaatgtaaa

SEQ ID NO: 108432 - DNA, 19 bp, Artificial sequence
  SiRNA target sequence
ttgtctagcaaatgtaaat

SEQ ID NO: 108433 - DNA, 19 bp, Artificial sequence
  SiRNA target sequence
tgtctagcaaatgtaaata

SEQ ID NO: 108434 - DNA, 19 bp, Artificial sequence
  SiRNA target sequence
gtctagcaaatgtaaatac

SEQ ID NO: 108435 - DNA, 19 bp, Artificial sequence
  SiRNA target sequence
tctagcaaatgtaaataca

SEQ ID NO: 108436 - DNA, 19 bp, Artificial sequence
  SiRNA target sequence
ctagcaaatgtaaatacat

SEQ ID NO: 108437 - DNA, 19 bp, Artificial sequence
  SiRNA target sequence
tagcaaatgtaaatacatc

SEQ ID NO: 108438 - DNA, 19 bp, Artificial sequence
  SiRNA target sequence
agcaaatgtaaatacatca

SEQ ID NO: 108439 - DNA, 19 bp, Artificial sequence
  SiRNA target sequence
gcaaatgtaaatacatcaa

SEQ ID NO: 108440 - DNA, 19 bp, Artificial sequence
  SiRNA target sequence
caaatgtaaatacatcaat

SEQ ID NO: 108441 - DNA, 19 bp, Artificial sequence
  SiRNA target sequence
aaatgtaaatacatcaatc

SEQ ID NO: 108442 - DNA, 19 bp, Artificial sequence
  SiRNA target sequence
aatgtaaatacatcaatca

SEQ ID NO: 108443 - DNA, 19 bp, Artificial sequence
  SiRNA target sequence
atgtaaatacatcaatcag

SEQ ID NO: 108444 - DNA, 19 bp, Artificial sequence
  SiRNA target sequence
tgtaaatacatcaatcagt

SEQ ID NO: 108445 - DNA, 19 bp, Artificial sequence
  SiRNA target sequence
gtaaatacatcaatcagtt

SEQ ID NO: 108446 - DNA, 19 bp, Artificial sequence
  SiRNA target sequence
taaatacatcaatcagttg

SEQ ID NO: 108447 - DNA, 19 bp, Artificial sequence
  SiRNA target sequence
aaatacatcaatcagttga

SEQ ID NO: 108448 - DNA, 19 bp, Artificial sequence
  SiRNA target sequence
aatacatcaatcagttgag

SEQ ID NO: 108449 - DNA, 19 bp, Artificial sequence
  SiRNA target sequence
atacatcaatcagttgagt

SEQ ID NO: 108450 - DNA, 19 bp, Artificial sequence
  SiRNA target sequence
tacatcaatcagttgagtt

SEQ ID NO: 108451 - DNA, 19 bp, Artificial sequence
  SiRNA target sequence
acatcaatcagttgagtta

SEQ ID NO: 108452 - DNA, 19 bp, Artificial sequence
  SiRNA target sequence
catcaatcagttgagttat

SEQ ID NO: 108453 - DNA, 19 bp, Artificial sequence
  SiRNA target sequence
atcaatcagttgagttatg

SEQ ID NO: 108454 - DNA, 19 bp, Artificial sequence
  SiRNA target sequence
tcaatcagttgagttatgt

SEQ ID NO: 108455 - DNA, 19 bp, Artificial sequence
  SiRNA target sequence
caatcagttgagttatgtt

SEQ ID NO: 108456 - DNA, 19 bp, Artificial sequence
  SiRNA target sequence
aatcagttgagttatgttt

SEQ ID NO: 108457 - DNA, 19 bp, Artificial sequence
  SiRNA target sequence
atcagttgagttatgtttt

SEQ ID NO: 108458 - DNA, 19 bp, Artificial sequence
  SiRNA target sequence
tcagttgagttatgttttt

SEQ ID NO: 108459 - DNA, 19 bp, Artificial sequence
  SiRNA target sequence
cagttgagttatgttttta

SEQ ID NO: 108460 - DNA, 19 bp, Artificial sequence
  SiRNA target sequence
agttgagttatgtttttat

SEQ ID NO: 108461 - DNA, 19 bp, Artificial sequence
  SiRNA target sequence
gttgagttatgtttttatc

SEQ ID NO: 108462 - DNA, 19 bp, Artificial sequence
  SiRNA target sequence
ttgagttatgtttttatct

SEQ ID NO: 108463 - DNA, 19 bp, Artificial sequence
  SiRNA target sequence
tgagttatgtttttatctg

SEQ ID NO: 108464 - DNA, 19 bp, Artificial sequence
  SiRNA target sequence
gagttatgtttttatctgt

SEQ ID NO: 108465 - DNA, 19 bp, Artificial sequence
  SiRNA target sequence
agttatgtttttatctgta

SEQ ID NO: 108466 - DNA, 19 bp, Artificial sequence
  SiRNA target sequence
gttatgtttttatctgtaa

SEQ ID NO: 108467 - DNA, 19 bp, Artificial sequence
  SiRNA target sequence
ttatgtttttatctgtaag

SEQ ID NO: 108468 - DNA, 19 bp, Artificial sequence
  SiRNA target sequence
tatgtttttatctgtaaga

SEQ ID NO: 108469 - DNA, 19 bp, Artificial sequence
  SiRNA target sequence
atgtttttatctgtaagac

SEQ ID NO: 108470 - DNA, 19 bp, Artificial sequence
  SiRNA target sequence
tgtttttatctgtaagacg

SEQ ID NO: 108471 - DNA, 19 bp, Artificial sequence
  SiRNA target sequence
gtttttatctgtaagacgt

SEQ ID NO: 108472 - DNA, 19 bp, Artificial sequence
  SiRNA target sequence
tttttatctgtaagacgta

SEQ ID NO: 108473 - DNA, 19 bp, Artificial sequence
  SiRNA target sequence
ttttatctgtaagacgtat

SEQ ID NO: 108474 - DNA, 19 bp, Artificial sequence
  SiRNA target sequence
tttatctgtaagacgtata

SEQ ID NO: 108475 - DNA, 19 bp, Artificial sequence
  SiRNA target sequence
ttatctgtaagacgtatac

SEQ ID NO: 108476 - DNA, 19 bp, Artificial sequence
  SiRNA target sequence
tatctgtaagacgtatacc

SEQ ID NO: 108477 - DNA, 19 bp, Artificial sequence
  SiRNA target sequence
atctgtaagacgtatacct

SEQ ID NO: 108478 - DNA, 19 bp, Artificial sequence
  SiRNA target sequence
tctgtaagacgtatacctg

SEQ ID NO: 108479 - DNA, 19 bp, Artificial sequence
  SiRNA target sequence
ctgtaagacgtatacctgg

SEQ ID NO: 108480 - DNA, 19 bp, Artificial sequence
  SiRNA target sequence
tgtaagacgtatacctgga

SEQ ID NO: 108481 - DNA, 19 bp, Artificial sequence
  SiRNA target sequence
gtaagacgtatacctggaa

SEQ ID NO: 108482 - DNA, 19 bp, Artificial sequence
  SiRNA target sequence
taagacgtatacctggaat

SEQ ID NO: 108483 - DNA, 19 bp, Artificial sequence
  SiRNA target sequence
aagacgtatacctggaata

SEQ ID NO: 108484 - DNA, 19 bp, Artificial sequence
  SiRNA target sequence
agacgtatacctggaatat

SEQ ID NO: 108485 - DNA, 19 bp, Artificial sequence
  SiRNA target sequence
gacgtatacctggaatatt

SEQ ID NO: 108486 - DNA, 19 bp, Artificial sequence
  SiRNA target sequence
acgtatacctggaatatta

SEQ ID NO: 108487 - DNA, 19 bp, Artificial sequence
  SiRNA target sequence
cgtatacctggaatattat

SEQ ID NO: 108488 - DNA, 19 bp, Artificial sequence
  SiRNA target sequence
gtatacctggaatattata

SEQ ID NO: 108489 - DNA, 19 bp, Artificial sequence
  SiRNA target sequence
tatacctggaatattatat

SEQ ID NO: 108490 - DNA, 19 bp, Artificial sequence
  SiRNA target sequence
atacctggaatattatatc

SEQ ID NO: 108491 - DNA, 19 bp, Artificial sequence
  SiRNA target sequence
tacctggaatattatatcc

SEQ ID NO: 108492 - DNA, 19 bp, Artificial sequence
  SiRNA target sequence
acctggaatattatatccc

SEQ ID NO: 108493 - DNA, 19 bp, Artificial sequence
  SiRNA target sequence
cctggaatattatatcccc

SEQ ID NO: 108494 - DNA, 19 bp, Artificial sequence
  SiRNA target sequence
ctggaatattatatcccct

SEQ ID NO: 108495 - DNA, 19 bp, Artificial sequence
  SiRNA target sequence
tggaatattatatcccctt

SEQ ID NO: 108496 - DNA, 19 bp, Artificial sequence
  SiRNA target sequence
ggaatattatatccccttt

SEQ ID NO: 108497 - DNA, 19 bp, Artificial sequence
  SiRNA target sequence
gaatattatatcccctttt

SEQ ID NO: 108498 - DNA, 19 bp, Artificial sequence
  SiRNA target sequence
aatattatatcccctttta

SEQ ID NO: 108499 - DNA, 19 bp, Artificial sequence
  SiRNA target sequence
atattatatccccttttaa

SEQ ID NO: 108500 - DNA, 19 bp, Artificial sequence
  SiRNA target sequence
tattatatccccttttaaa

SEQ ID NO: 108501 - DNA, 19 bp, Artificial sequence
  SiRNA target sequence
attatatccccttttaaaa

SEQ ID NO: 108502 - DNA, 19 bp, Artificial sequence
  SiRNA target sequence
ttatatccccttttaaaat

SEQ ID NO: 108503 - DNA, 19 bp, Artificial sequence
  SiRNA target sequence
tatatccccttttaaaata

SEQ ID NO: 108504 - DNA, 19 bp, Artificial sequence
  SiRNA target sequence
atatccccttttaaaatat

SEQ ID NO: 108505 - DNA, 19 bp, Artificial sequence
  SiRNA target sequence
tatccccttttaaaatatt

SEQ ID NO: 108506 - DNA, 19 bp, Artificial sequence
  SiRNA target sequence
atccccttttaaaatattc

SEQ ID NO: 108507 - DNA, 19 bp, Artificial sequence
  SiRNA target sequence
tccccttttaaaatattca

SEQ ID NO: 108508 - DNA, 19 bp, Artificial sequence
  SiRNA target sequence
ccccttttaaaatattcag

SEQ ID NO: 108509 - DNA, 19 bp, Artificial sequence
  SiRNA target sequence
cccttttaaaatattcagg

SEQ ID NO: 108510 - DNA, 19 bp, Artificial sequence
  SiRNA target sequence
ccttttaaaatattcagga

SEQ ID NO: 108511 - DNA, 19 bp, Artificial sequence
  SiRNA target sequence
cttttaaaatattcaggat

SEQ ID NO: 108512 - DNA, 19 bp, Artificial sequence
  SiRNA target sequence
ttttaaaatattcaggata

SEQ ID NO: 108513 - DNA, 19 bp, Artificial sequence
  SiRNA target sequence
tttaaaatattcaggatat

SEQ ID NO: 108514 - DNA, 19 bp, Artificial sequence
  SiRNA target sequence
ttaaaatattcaggatatg

SEQ ID NO: 108515 - DNA, 19 bp, Artificial sequence
  SiRNA target sequence
taaaatattcaggatatgt

SEQ ID NO: 108516 - DNA, 19 bp, Artificial sequence
  SiRNA target sequence
aaaatattcaggatatgta

SEQ ID NO: 108517 - DNA, 19 bp, Artificial sequence
  SiRNA target sequence
aaatattcaggatatgtag

SEQ ID NO: 108518 - DNA, 19 bp, Artificial sequence
  SiRNA target sequence
aatattcaggatatgtagt

SEQ ID NO: 108519 - DNA, 19 bp, Artificial sequence
  SiRNA target sequence
atattcaggatatgtagtg

SEQ ID NO: 108520 - DNA, 19 bp, Artificial sequence
  SiRNA target sequence
tattcaggatatgtagtgg

SEQ ID NO: 108521 - DNA, 19 bp, Artificial sequence
  SiRNA target sequence
attcaggatatgtagtgga

SEQ ID NO: 108522 - DNA, 19 bp, Artificial sequence
  SiRNA target sequence
ttcaggatatgtagtggaa

SEQ ID NO: 108523 - DNA, 19 bp, Artificial sequence
  SiRNA target sequence
tcaggatatgtagtggaat

SEQ ID NO: 108524 - DNA, 19 bp, Artificial sequence
  SiRNA target sequence
caggatatgtagtggaatt

SEQ ID NO: 108525 - DNA, 19 bp, Artificial sequence
  SiRNA target sequence
aggatatgtagtggaatta

SEQ ID NO: 108526 - DNA, 19 bp, Artificial sequence
  SiRNA target sequence
ggatatgtagtggaattac

SEQ ID NO: 108527 - DNA, 19 bp, Artificial sequence
  SiRNA target sequence
gatatgtagtggaattact

SEQ ID NO: 108528 - DNA, 19 bp, Artificial sequence
  SiRNA target sequence
atatgtagtggaattactt

SEQ ID NO: 108529 - DNA, 19 bp, Artificial sequence
  SiRNA target sequence
tatgtagtggaattacttt

SEQ ID NO: 108530 - DNA, 19 bp, Artificial sequence
  SiRNA target sequence
atgtagtggaattactttc

SEQ ID NO: 108531 - DNA, 19 bp, Artificial sequence
  SiRNA target sequence
tgtagtggaattactttca

SEQ ID NO: 108532 - DNA, 19 bp, Artificial sequence
  SiRNA target sequence
gtagtggaattactttcag

SEQ ID NO: 108533 - DNA, 19 bp, Artificial sequence
  SiRNA target sequence
tagtggaattactttcagg

SEQ ID NO: 108534 - DNA, 19 bp, Artificial sequence
  SiRNA target sequence
agtggaattactttcaggt

SEQ ID NO: 108535 - DNA, 19 bp, Artificial sequence
  SiRNA target sequence
gtggaattactttcaggtg

SEQ ID NO: 108536 - DNA, 19 bp, Artificial sequence
  SiRNA target sequence
tggaattactttcaggtgt

SEQ ID NO: 108537 - DNA, 19 bp, Artificial sequence
  SiRNA target sequence
ggaattactttcaggtgtc

SEQ ID NO: 108538 - DNA, 19 bp, Artificial sequence
  SiRNA target sequence
gaattactttcaggtgtcc

SEQ ID NO: 108539 - DNA, 19 bp, Artificial sequence
  SiRNA target sequence
aattactttcaggtgtcca

SEQ ID NO: 108540 - DNA, 19 bp, Artificial sequence
  SiRNA target sequence
attactttcaggtgtccac

SEQ ID NO: 108541 - DNA, 19 bp, Artificial sequence
  SiRNA target sequence
ttactttcaggtgtccaca

SEQ ID NO: 108542 - DNA, 19 bp, Artificial sequence
  SiRNA target sequence
tactttcaggtgtccacat

SEQ ID NO: 108543 - DNA, 19 bp, Artificial sequence
  SiRNA target sequence
actttcaggtgtccacata

SEQ ID NO: 108544 - DNA, 19 bp, Artificial sequence
  SiRNA target sequence
ctttcaggtgtccacatac

SEQ ID NO: 108545 - DNA, 19 bp, Artificial sequence
  SiRNA target sequence
tttcaggtgtccacatact

SEQ ID NO: 108546 - DNA, 19 bp, Artificial sequence
  SiRNA target sequence
ttcaggtgtccacatacta

SEQ ID NO: 108547 - DNA, 19 bp, Artificial sequence
  SiRNA target sequence
tcaggtgtccacatactat

SEQ ID NO: 108548 - DNA, 19 bp, Artificial sequence
  SiRNA target sequence
caggtgtccacatactata

SEQ ID NO: 108549 - DNA, 19 bp, Artificial sequence
  SiRNA target sequence
aggtgtccacatactataa

SEQ ID NO: 108550 - DNA, 19 bp, Artificial sequence
  SiRNA target sequence
ggtgtccacatactataat

SEQ ID NO: 108551 - DNA, 19 bp, Artificial sequence
  SiRNA target sequence
gtgtccacatactataatg

SEQ ID NO: 108552 - DNA, 19 bp, Artificial sequence
  SiRNA target sequence
tgtccacatactataatga

SEQ ID NO: 108553 - DNA, 19 bp, Artificial sequence
  SiRNA target sequence
gtccacatactataatgat

SEQ ID NO: 108554 - DNA, 19 bp, Artificial sequence
  SiRNA target sequence
tccacatactataatgatt

SEQ ID NO: 108555 - DNA, 19 bp, Artificial sequence
  SiRNA target sequence
ccacatactataatgatta

SEQ ID NO: 108556 - DNA, 19 bp, Artificial sequence
  SiRNA target sequence
cacatactataatgattat

SEQ ID NO: 108557 - DNA, 19 bp, Artificial sequence
  SiRNA target sequence
acatactataatgattatt

SEQ ID NO: 108558 - DNA, 19 bp, Artificial sequence
  SiRNA target sequence
catactataatgattattt

SEQ ID NO: 108559 - DNA, 19 bp, Artificial sequence
  SiRNA target sequence
atactataatgattatttt

SEQ ID NO: 108560 - DNA, 19 bp, Artificial sequence
  SiRNA target sequence
tactataatgattattttc

SEQ ID NO: 108561 - DNA, 19 bp, Artificial sequence
  SiRNA target sequence
actataatgattattttca

SEQ ID NO: 108562 - DNA, 19 bp, Artificial sequence
  SiRNA target sequence
ctataatgattattttcac

SEQ ID NO: 108563 - DNA, 19 bp, Artificial sequence
  SiRNA target sequence
tataatgattattttcaca

SEQ ID NO: 108564 - DNA, 19 bp, Artificial sequence
  SiRNA target sequence
ataatgattattttcacat

SEQ ID NO: 108565 - DNA, 19 bp, Artificial sequence
  SiRNA target sequence
taatgattattttcacata

SEQ ID NO: 108566 - DNA, 19 bp, Artificial sequence
  SiRNA target sequence
aatgattattttcacatac

SEQ ID NO: 108567 - DNA, 19 bp, Artificial sequence
  SiRNA target sequence
atgattattttcacataca

SEQ ID NO: 108568 - DNA, 19 bp, Artificial sequence
  SiRNA target sequence
tgattattttcacatacat

SEQ ID NO: 108569 - DNA, 19 bp, Artificial sequence
  SiRNA target sequence
gattattttcacatacata

SEQ ID NO: 108570 - DNA, 19 bp, Artificial sequence
  SiRNA target sequence
attattttcacatacataa

SEQ ID NO: 108571 - DNA, 19 bp, Artificial sequence
  SiRNA target sequence
ttattttcacatacataaa

SEQ ID NO: 108572 - DNA, 19 bp, Artificial sequence
  SiRNA target sequence
tattttcacatacataaac

SEQ ID NO: 108573 - DNA, 19 bp, Artificial sequence
  SiRNA target sequence
attttcacatacataaacc

SEQ ID NO: 108574 - DNA, 19 bp, Artificial sequence
  SiRNA target sequence
ttttcacatacataaacca

SEQ ID NO: 108575 - DNA, 19 bp, Artificial sequence
  SiRNA target sequence
tttcacatacataaaccac

SEQ ID NO: 108576 - DNA, 19 bp, Artificial sequence
  SiRNA target sequence
ttcacatacataaaccaca

SEQ ID NO: 108577 - DNA, 19 bp, Artificial sequence
  SiRNA target sequence
tcacatacataaaccacag

SEQ ID NO: 108578 - DNA, 19 bp, Artificial sequence
  SiRNA target sequence
cacatacataaaccacagg

SEQ ID NO: 108579 - DNA, 19 bp, Artificial sequence
  SiRNA target sequence
acatacataaaccacagga

SEQ ID NO: 108580 - DNA, 19 bp, Artificial sequence
  SiRNA target sequence
catacataaaccacaggaa

SEQ ID NO: 108581 - DNA, 19 bp, Artificial sequence
  SiRNA target sequence
atacataaaccacaggaag

SEQ ID NO: 108582 - DNA, 19 bp, Artificial sequence
  SiRNA target sequence
tacataaaccacaggaagt

SEQ ID NO: 108583 - DNA, 19 bp, Artificial sequence
  SiRNA target sequence
acataaaccacaggaagtt

SEQ ID NO: 108584 - DNA, 19 bp, Artificial sequence
  SiRNA target sequence
cataaaccacaggaagttt

SEQ ID NO: 108585 - DNA, 19 bp, Artificial sequence
  SiRNA target sequence
ataaaccacaggaagtttc

SEQ ID NO: 108586 - DNA, 19 bp, Artificial sequence
  SiRNA target sequence
taaaccacaggaagtttcc

SEQ ID NO: 108587 - DNA, 19 bp, Artificial sequence
  SiRNA target sequence
aaaccacaggaagtttcca

SEQ ID NO: 108588 - DNA, 19 bp, Artificial sequence
  SiRNA target sequence
aaccacaggaagtttccat

SEQ ID NO: 108589 - DNA, 19 bp, Artificial sequence
  SiRNA target sequence
accacaggaagtttccata

SEQ ID NO: 108590 - DNA, 19 bp, Artificial sequence
  SiRNA target sequence
ccacaggaagtttccataa

SEQ ID NO: 108591 - DNA, 19 bp, Artificial sequence
  SiRNA target sequence
cacaggaagtttccataat

SEQ ID NO: 108592 - DNA, 19 bp, Artificial sequence
  SiRNA target sequence
acaggaagtttccataatg

SEQ ID NO: 108593 - DNA, 19 bp, Artificial sequence
  SiRNA target sequence
caggaagtttccataatgc

SEQ ID NO: 108594 - DNA, 19 bp, Artificial sequence
  SiRNA target sequence
aggaagtttccataatgca

SEQ ID NO: 108595 - DNA, 19 bp, Artificial sequence
  SiRNA target sequence
ggaagtttccataatgcag

SEQ ID NO: 108596 - DNA, 19 bp, Artificial sequence
  SiRNA target sequence
gaagtttccataatgcagc

SEQ ID NO: 108597 - DNA, 19 bp, Artificial sequence
  SiRNA target sequence
aagtttccataatgcagcc

SEQ ID NO: 108598 - DNA, 19 bp, Artificial sequence
  SiRNA target sequence
agtttccataatgcagcca

SEQ ID NO: 108599 - DNA, 19 bp, Artificial sequence
  SiRNA target sequence
gtttccataatgcagccat

SEQ ID NO: 108600 - DNA, 19 bp, Artificial sequence
  SiRNA target sequence
tttccataatgcagccata

SEQ ID NO: 108601 - DNA, 19 bp, Artificial sequence
  SiRNA target sequence
ttccataatgcagccatat

SEQ ID NO: 108602 - DNA, 19 bp, Artificial sequence
  SiRNA target sequence
tccataatgcagccatatt

SEQ ID NO: 108603 - DNA, 19 bp, Artificial sequence
  SiRNA target sequence
ccataatgcagccatattg

SEQ ID NO: 108604 - DNA, 19 bp, Artificial sequence
  SiRNA target sequence
cataatgcagccatattga

SEQ ID NO: 108605 - DNA, 19 bp, Artificial sequence
  SiRNA target sequence
ataatgcagccatattgaa

SEQ ID NO: 108606 - DNA, 19 bp, Artificial sequence
  SiRNA target sequence
taatgcagccatattgaac

SEQ ID NO: 108607 - DNA, 19 bp, Artificial sequence
  SiRNA target sequence
aatgcagccatattgaacg

SEQ ID NO: 108608 - DNA, 19 bp, Artificial sequence
  SiRNA target sequence
atgcagccatattgaacga

SEQ ID NO: 108609 - DNA, 19 bp, Artificial sequence
  SiRNA target sequence
tgcagccatattgaacgac

SEQ ID NO: 108610 - DNA, 19 bp, Artificial sequence
  SiRNA target sequence
gcagccatattgaacgact

SEQ ID NO: 108611 - DNA, 19 bp, Artificial sequence
  SiRNA target sequence
cagccatattgaacgactc

SEQ ID NO: 108612 - DNA, 19 bp, Artificial sequence
  SiRNA target sequence
agccatattgaacgactcc

SEQ ID NO: 108613 - DNA, 19 bp, Artificial sequence
  SiRNA target sequence
gccatattgaacgactccc

SEQ ID NO: 108614 - DNA, 19 bp, Artificial sequence
  SiRNA target sequence
ccatattgaacgactccca

SEQ ID NO: 108615 - DNA, 19 bp, Artificial sequence
  SiRNA target sequence
catattgaacgactcccag

SEQ ID NO: 108616 - DNA, 19 bp, Artificial sequence
  SiRNA target sequence
atattgaacgactcccaga

SEQ ID NO: 108617 - DNA, 19 bp, Artificial sequence
  SiRNA target sequence
tattgaacgactcccagac

SEQ ID NO: 108618 - DNA, 19 bp, Artificial sequence
  SiRNA target sequence
attgaacgactcccagacc

SEQ ID NO: 108619 - DNA, 19 bp, Artificial sequence
  SiRNA target sequence
ttgaacgactcccagacct

SEQ ID NO: 108620 - DNA, 19 bp, Artificial sequence
  SiRNA target sequence
tgaacgactcccagacctg

SEQ ID NO: 108621 - DNA, 19 bp, Artificial sequence
  SiRNA target sequence
gaacgactcccagacctgt

SEQ ID NO: 108622 - DNA, 19 bp, Artificial sequence
  SiRNA target sequence
aacgactcccagacctgtc

SEQ ID NO: 108623 - DNA, 19 bp, Artificial sequence
  SiRNA target sequence
acgactcccagacctgtcc

SEQ ID NO: 108624 - DNA, 19 bp, Artificial sequence
  SiRNA target sequence
cgactcccagacctgtccc

SEQ ID NO: 108625 - DNA, 19 bp, Artificial sequence
  SiRNA target sequence
gactcccagacctgtccct

SEQ ID NO: 108626 - DNA, 19 bp, Artificial sequence
  SiRNA target sequence
actcccagacctgtccctg

SEQ ID NO: 108627 - DNA, 19 bp, Artificial sequence
  SiRNA target sequence
ctcccagacctgtccctga

SEQ ID NO: 108628 - DNA, 19 bp, Artificial sequence
  SiRNA target sequence
tcccagacctgtccctgat

SEQ ID NO: 108629 - DNA, 19 bp, Artificial sequence
  SiRNA target sequence
cccagacctgtccctgatt

SEQ ID NO: 108630 - DNA, 19 bp, Artificial sequence
  SiRNA target sequence
ccagacctgtccctgattt

SEQ ID NO: 108631 - DNA, 19 bp, Artificial sequence
  SiRNA target sequence
cagacctgtccctgatttg

SEQ ID NO: 108632 - DNA, 19 bp, Artificial sequence
  SiRNA target sequence
agacctgtccctgatttgc

SEQ ID NO: 108633 - DNA, 19 bp, Artificial sequence
  SiRNA target sequence
gacctgtccctgatttgca

SEQ ID NO: 108634 - DNA, 19 bp, Artificial sequence
  SiRNA target sequence
acctgtccctgatttgcag

SEQ ID NO: 108635 - DNA, 19 bp, Artificial sequence
  SiRNA target sequence
cctgtccctgatttgcagc

SEQ ID NO: 108636 - DNA, 19 bp, Artificial sequence
  SiRNA target sequence
ctgtccctgatttgcagca

SEQ ID NO: 108637 - DNA, 19 bp, Artificial sequence
  SiRNA target sequence
tgtccctgatttgcagcac

SEQ ID NO: 108638 - DNA, 19 bp, Artificial sequence
  SiRNA target sequence
gtccctgatttgcagcacc

SEQ ID NO: 108639 - DNA, 19 bp, Artificial sequence
  SiRNA target sequence
tccctgatttgcagcacca

SEQ ID NO: 108640 - DNA, 19 bp, Artificial sequence
  SiRNA target sequence
ccctgatttgcagcaccat

SEQ ID NO: 108641 - DNA, 19 bp, Artificial sequence
  SiRNA target sequence
cctgatttgcagcaccatc

SEQ ID NO: 108642 - DNA, 19 bp, Artificial sequence
  SiRNA target sequence
ctgatttgcagcaccatcc

SEQ ID NO: 108643 - DNA, 19 bp, Artificial sequence
  SiRNA target sequence
tgatttgcagcaccatccc

SEQ ID NO: 108644 - DNA, 19 bp, Artificial sequence
  SiRNA target sequence
gatttgcagcaccatcccc

SEQ ID NO: 108645 - DNA, 19 bp, Artificial sequence
  SiRNA target sequence
atttgcagcaccatccccg

SEQ ID NO: 108646 - DNA, 19 bp, Artificial sequence
  SiRNA target sequence
tttgcagcaccatccccga

SEQ ID NO: 108647 - DNA, 19 bp, Artificial sequence
  SiRNA target sequence
ttgcagcaccatccccgaa

SEQ ID NO: 108648 - DNA, 19 bp, Artificial sequence
  SiRNA target sequence
tgcagcaccatccccgaaa

SEQ ID NO: 108649 - DNA, 19 bp, Artificial sequence
  SiRNA target sequence
gcagcaccatccccgaaaa

SEQ ID NO: 108650 - DNA, 19 bp, Artificial sequence
  SiRNA target sequence
cagcaccatccccgaaaaa

SEQ ID NO: 108651 - DNA, 19 bp, Artificial sequence
  SiRNA target sequence
agcaccatccccgaaaaat

SEQ ID NO: 108652 - DNA, 19 bp, Artificial sequence
  SiRNA target sequence
gcaccatccccgaaaaata

SEQ ID NO: 108653 - DNA, 19 bp, Artificial sequence
  SiRNA target sequence
caccatccccgaaaaatac

SEQ ID NO: 108654 - DNA, 19 bp, Artificial sequence
  SiRNA target sequence
accatccccgaaaaataca

SEQ ID NO: 108655 - DNA, 19 bp, Artificial sequence
  SiRNA target sequence
ccatccccgaaaaatacaa

SEQ ID NO: 108656 - DNA, 19 bp, Artificial sequence
  SiRNA target sequence
catccccgaaaaatacaaa

SEQ ID NO: 108657 - DNA, 19 bp, Artificial sequence
  SiRNA target sequence
atccccgaaaaatacaaat

SEQ ID NO: 108658 - DNA, 19 bp, Artificial sequence
  SiRNA target sequence
tccccgaaaaatacaaatg

SEQ ID NO: 108659 - DNA, 19 bp, Artificial sequence
  SiRNA target sequence
ccccgaaaaatacaaatgc

SEQ ID NO: 108660 - DNA, 19 bp, Artificial sequence
  SiRNA target sequence
cccgaaaaatacaaatgct

SEQ ID NO: 108661 - DNA, 19 bp, Artificial sequence
  SiRNA target sequence
ccgaaaaatacaaatgcta

SEQ ID NO: 108662 - DNA, 19 bp, Artificial sequence
  SiRNA target sequence
cgaaaaatacaaatgctac

SEQ ID NO: 108663 - DNA, 19 bp, Artificial sequence
  SiRNA target sequence
gaaaaatacaaatgctaca

SEQ ID NO: 108664 - DNA, 19 bp, Artificial sequence
  SiRNA target sequence
aaaaatacaaatgctacat

SEQ ID NO: 108665 - DNA, 19 bp, Artificial sequence
  SiRNA target sequence
aaaatacaaatgctacatt

SEQ ID NO: 108666 - DNA, 19 bp, Artificial sequence
  SiRNA target sequence
aaatacaaatgctacattt

SEQ ID NO: 108667 - DNA, 19 bp, Artificial sequence
  SiRNA target sequence
aatacaaatgctacatttt

SEQ ID NO: 108668 - DNA, 19 bp, Artificial sequence
  SiRNA target sequence
atacaaatgctacattttt

SEQ ID NO: 108669 - DNA, 19 bp, Artificial sequence
  SiRNA target sequence
tacaaatgctacatttttt

SEQ ID NO: 108670 - DNA, 19 bp, Artificial sequence
  SiRNA target sequence
acaaatgctacatttttta

SEQ ID NO: 108671 - DNA, 19 bp, Artificial sequence
  SiRNA target sequence
caaatgctacattttttac

SEQ ID NO: 108672 - DNA, 19 bp, Artificial sequence
  SiRNA target sequence
aaatgctacattttttact

SEQ ID NO: 108673 - DNA, 19 bp, Artificial sequence
  SiRNA target sequence
aatgctacattttttactt

SEQ ID NO: 108674 - DNA, 19 bp, Artificial sequence
  SiRNA target sequence
atgctacattttttacttt

SEQ ID NO: 108675 - DNA, 19 bp, Artificial sequence
  SiRNA target sequence
tgctacattttttactttt

SEQ ID NO: 108676 - DNA, 19 bp, Artificial sequence
  SiRNA target sequence
gctacattttttacttttt

SEQ ID NO: 108677 - DNA, 19 bp, Artificial sequence
  SiRNA target sequence
ctacattttttactttttt

SEQ ID NO: 108678 - DNA, 19 bp, Artificial sequence
  SiRNA target sequence
tacattttttactttttta

SEQ ID NO: 108679 - DNA, 19 bp, Artificial sequence
  SiRNA target sequence
acattttttacttttttat

SEQ ID NO: 108680 - DNA, 19 bp, Artificial sequence
  SiRNA target sequence
cattttttacttttttata

SEQ ID NO: 108681 - DNA, 19 bp, Artificial sequence
  SiRNA target sequence
attttttacttttttatat

SEQ ID NO: 108682 - DNA, 19 bp, Artificial sequence
  SiRNA target sequence
ttttttacttttttatatt

SEQ ID NO: 108683 - DNA, 19 bp, Artificial sequence
  SiRNA target sequence
tttttacttttttatattg

SEQ ID NO: 108684 - DNA, 19 bp, Artificial sequence
  SiRNA target sequence
ttttacttttttatattgt

SEQ ID NO: 108685 - DNA, 19 bp, Artificial sequence
  SiRNA target sequence
tttacttttttatattgta

SEQ ID NO: 108686 - DNA, 19 bp, Artificial sequence
  SiRNA target sequence
ttacttttttatattgtaa

SEQ ID NO: 108687 - DNA, 19 bp, Artificial sequence
  SiRNA target sequence
tacttttttatattgtaaa

SEQ ID NO: 108688 - DNA, 19 bp, Artificial sequence
  SiRNA target sequence
acttttttatattgtaaag

SEQ ID NO: 108689 - DNA, 19 bp, Artificial sequence
  SiRNA target sequence
cttttttatattgtaaagc

SEQ ID NO: 108690 - DNA, 19 bp, Artificial sequence
  SiRNA target sequence
ttttttatattgtaaagca

SEQ ID NO: 108691 - DNA, 19 bp, Artificial sequence
  SiRNA target sequence
tttttatattgtaaagcaa

SEQ ID NO: 108692 - DNA, 19 bp, Artificial sequence
  SiRNA target sequence
ttttatattgtaaagcaaa

SEQ ID NO: 108693 - DNA, 19 bp, Artificial sequence
  SiRNA target sequence
tttatattgtaaagcaaat

SEQ ID NO: 108694 - DNA, 19 bp, Artificial sequence
  SiRNA target sequence
ttatattgtaaagcaaatc

SEQ ID NO: 108695 - DNA, 19 bp, Artificial sequence
  SiRNA target sequence
tatattgtaaagcaaatcc

SEQ ID NO: 108696 - DNA, 19 bp, Artificial sequence
  SiRNA target sequence
atattgtaaagcaaatccc

SEQ ID NO: 108697 - DNA, 19 bp, Artificial sequence
  SiRNA target sequence
tattgtaaagcaaatccca

SEQ ID NO: 108698 - DNA, 19 bp, Artificial sequence
  SiRNA target sequence
attgtaaagcaaatcccaa

SEQ ID NO: 108699 - DNA, 19 bp, Artificial sequence
  SiRNA target sequence
ttgtaaagcaaatcccaat

SEQ ID NO: 108700 - DNA, 19 bp, Artificial sequence
  SiRNA target sequence
tgtaaagcaaatcccaatc

SEQ ID NO: 108701 - DNA, 19 bp, Artificial sequence
  SiRNA target sequence
gtaaagcaaatcccaatcc

SEQ ID NO: 108702 - DNA, 19 bp, Artificial sequence
  SiRNA target sequence
taaagcaaatcccaatcct

SEQ ID NO: 108703 - DNA, 19 bp, Artificial sequence
  SiRNA target sequence
aaagcaaatcccaatcctg

SEQ ID NO: 108704 - DNA, 19 bp, Artificial sequence
  SiRNA target sequence
aagcaaatcccaatcctgt

SEQ ID NO: 108705 - DNA, 19 bp, Artificial sequence
  SiRNA target sequence
agcaaatcccaatcctgta

SEQ ID NO: 108706 - DNA, 19 bp, Artificial sequence
  SiRNA target sequence
gcaaatcccaatcctgtac

SEQ ID NO: 108707 - DNA, 19 bp, Artificial sequence
  SiRNA target sequence
caaatcccaatcctgtacc

SEQ ID NO: 108708 - DNA, 19 bp, Artificial sequence
  SiRNA target sequence
aaatcccaatcctgtacca

SEQ ID NO: 108709 - DNA, 19 bp, Artificial sequence
  SiRNA target sequence
aatcccaatcctgtaccaa

SEQ ID NO: 108710 - DNA, 19 bp, Artificial sequence
  SiRNA target sequence
atcccaatcctgtaccaag

SEQ ID NO: 108711 - DNA, 19 bp, Artificial sequence
  SiRNA target sequence
tcccaatcctgtaccaagc

SEQ ID NO: 108712 - DNA, 19 bp, Artificial sequence
  SiRNA target sequence
cccaatcctgtaccaagcg

SEQ ID NO: 108713 - DNA, 19 bp, Artificial sequence
  SiRNA target sequence
ccaatcctgtaccaagcga

SEQ ID NO: 108714 - DNA, 19 bp, Artificial sequence
  SiRNA target sequence
caatcctgtaccaagcgat

SEQ ID NO: 108715 - DNA, 19 bp, Artificial sequence
  SiRNA target sequence
aatcctgtaccaagcgata

SEQ ID NO: 108716 - DNA, 19 bp, Artificial sequence
  SiRNA target sequence
atcctgtaccaagcgatac

SEQ ID NO: 108717 - DNA, 19 bp, Artificial sequence
  SiRNA target sequence
tcctgtaccaagcgatacc

SEQ ID NO: 108718 - DNA, 19 bp, Artificial sequence
  SiRNA target sequence
cctgtaccaagcgatacct

SEQ ID NO: 108719 - DNA, 19 bp, Artificial sequence
  SiRNA target sequence
ctgtaccaagcgatacctg

SEQ ID NO: 108720 - DNA, 19 bp, Artificial sequence
  SiRNA target sequence
tgtaccaagcgatacctgc

SEQ ID NO: 108721 - DNA, 19 bp, Artificial sequence
  SiRNA target sequence
gtaccaagcgatacctgcg

SEQ ID NO: 108722 - DNA, 19 bp, Artificial sequence
  SiRNA target sequence
taccaagcgatacctgcgc

SEQ ID NO: 108723 - DNA, 19 bp, Artificial sequence
  SiRNA target sequence
accaagcgatacctgcgca

SEQ ID NO: 108724 - DNA, 19 bp, Artificial sequence
  SiRNA target sequence
ccaagcgatacctgcgcac

SEQ ID NO: 108725 - DNA, 19 bp, Artificial sequence
  SiRNA target sequence
caagcgatacctgcgcacc

SEQ ID NO: 108726 - DNA, 19 bp, Artificial sequence
  SiRNA target sequence
aagcgatacctgcgcacct

SEQ ID NO: 108727 - DNA, 19 bp, Artificial sequence
  SiRNA target sequence
agcgatacctgcgcaccta

SEQ ID NO: 108728 - DNA, 19 bp, Artificial sequence
  SiRNA target sequence
gcgatacctgcgcacctac

SEQ ID NO: 108729 - DNA, 19 bp, Artificial sequence
  SiRNA target sequence
cgatacctgcgcacctact

SEQ ID NO: 108730 - DNA, 19 bp, Artificial sequence
  SiRNA target sequence
gatacctgcgcacctacta

SEQ ID NO: 108731 - DNA, 19 bp, Artificial sequence
  SiRNA target sequence
atacctgcgcacctactat

SEQ ID NO: 108732 - DNA, 19 bp, Artificial sequence
  SiRNA target sequence
tacctgcgcacctactata

SEQ ID NO: 108733 - DNA, 19 bp, Artificial sequence
  SiRNA target sequence
acctgcgcacctactatac

SEQ ID NO: 108734 - DNA, 19 bp, Artificial sequence
  SiRNA target sequence
cctgcgcacctactatacc

SEQ ID NO: 108735 - DNA, 19 bp, Artificial sequence
  SiRNA target sequence
ctgcgcacctactataccg

SEQ ID NO: 108736 - DNA, 19 bp, Artificial sequence
  SiRNA target sequence
tgcgcacctactataccgt

SEQ ID NO: 108737 - DNA, 19 bp, Artificial sequence
  SiRNA target sequence
gcgcacctactataccgtg

SEQ ID NO: 108738 - DNA, 19 bp, Artificial sequence
  SiRNA target sequence
cgcacctactataccgtgt

SEQ ID NO: 108739 - DNA, 19 bp, Artificial sequence
  SiRNA target sequence
gcacctactataccgtgtc

SEQ ID NO: 108740 - DNA, 19 bp, Artificial sequence
  SiRNA target sequence
cacctactataccgtgtcc

SEQ ID NO: 108741 - DNA, 19 bp, Artificial sequence
  SiRNA target sequence
acctactataccgtgtccc

SEQ ID NO: 108742 - DNA, 19 bp, Artificial sequence
  SiRNA target sequence
cctactataccgtgtcccc

SEQ ID NO: 108743 - DNA, 19 bp, Artificial sequence
  SiRNA target sequence
ctactataccgtgtccccc

SEQ ID NO: 108744 - DNA, 19 bp, Artificial sequence
  SiRNA target sequence
tactataccgtgtccccca

SEQ ID NO: 108745 - DNA, 19 bp, Artificial sequence
  SiRNA target sequence
actataccgtgtcccccat

SEQ ID NO: 108746 - DNA, 19 bp, Artificial sequence
  SiRNA target sequence
ctataccgtgtcccccata

SEQ ID NO: 108747 - DNA, 19 bp, Artificial sequence
  SiRNA target sequence
tataccgtgtcccccataa

SEQ ID NO: 108748 - DNA, 19 bp, Artificial sequence
  SiRNA target sequence
ataccgtgtcccccataaa

SEQ ID NO: 108749 - DNA, 19 bp, Artificial sequence
  SiRNA target sequence
taccgtgtcccccataaaa

SEQ ID NO: 108750 - DNA, 19 bp, Artificial sequence
  SiRNA target sequence
accgtgtcccccataaaat

SEQ ID NO: 108751 - DNA, 19 bp, Artificial sequence
  SiRNA target sequence
ccgtgtcccccataaaatt

SEQ ID NO: 108752 - DNA, 19 bp, Artificial sequence
  SiRNA target sequence
cgtgtcccccataaaattg

SEQ ID NO: 108753 - DNA, 19 bp, Artificial sequence
  SiRNA target sequence
gtgtcccccataaaattgg

SEQ ID NO: 108754 - DNA, 19 bp, Artificial sequence
  SiRNA target sequence
tgtcccccataaaattggt

SEQ ID NO: 108755 - DNA, 19 bp, Artificial sequence
  SiRNA target sequence
gtcccccataaaattggtc

SEQ ID NO: 108756 - DNA, 19 bp, Artificial sequence
  SiRNA target sequence
tcccccataaaattggtca

SEQ ID NO: 108757 - DNA, 19 bp, Artificial sequence
  SiRNA target sequence
cccccataaaattggtcat

SEQ ID NO: 108758 - DNA, 19 bp, Artificial sequence
  SiRNA target sequence
ccccataaaattggtcatt

SEQ ID NO: 108759 - DNA, 19 bp, Artificial sequence
  SiRNA target sequence
cccataaaattggtcatta

SEQ ID NO: 108760 - DNA, 19 bp, Artificial sequence
  SiRNA target sequence
ccataaaattggtcattat

SEQ ID NO: 108761 - DNA, 19 bp, Artificial sequence
  SiRNA target sequence
cataaaattggtcattata

SEQ ID NO: 108762 - DNA, 19 bp, Artificial sequence
  SiRNA target sequence
ataaaattggtcattatac

SEQ ID NO: 108763 - DNA, 19 bp, Artificial sequence
  SiRNA target sequence
taaaattggtcattataca

SEQ ID NO: 108764 - DNA, 19 bp, Artificial sequence
  SiRNA target sequence
aaaattggtcattatacaa

SEQ ID NO: 108765 - DNA, 19 bp, Artificial sequence
  SiRNA target sequence
aaattggtcattatacaaa

SEQ ID NO: 108766 - DNA, 19 bp, Artificial sequence
  SiRNA target sequence
aattggtcattatacaaat

SEQ ID NO: 108767 - DNA, 19 bp, Artificial sequence
  SiRNA target sequence
attggtcattatacaaatg

SEQ ID NO: 108768 - DNA, 19 bp, Artificial sequence
  SiRNA target sequence
ttggtcattatacaaatgc

SEQ ID NO: 108769 - DNA, 19 bp, Artificial sequence
  SiRNA target sequence
tggtcattatacaaatgca

SEQ ID NO: 108770 - DNA, 19 bp, Artificial sequence
  SiRNA target sequence
ggtcattatacaaatgcat

SEQ ID NO: 108771 - DNA, 19 bp, Artificial sequence
  SiRNA target sequence
gtcattatacaaatgcatc

SEQ ID NO: 108772 - DNA, 19 bp, Artificial sequence
  SiRNA target sequence
tcattatacaaatgcatcg

SEQ ID NO: 108773 - DNA, 19 bp, Artificial sequence
  SiRNA target sequence
cattatacaaatgcatcga

SEQ ID NO: 108774 - DNA, 19 bp, Artificial sequence
  SiRNA target sequence
attatacaaatgcatcgat

SEQ ID NO: 108775 - DNA, 19 bp, Artificial sequence
  SiRNA target sequence
ttatacaaatgcatcgatc

SEQ ID NO: 108776 - DNA, 19 bp, Artificial sequence
  SiRNA target sequence
tatacaaatgcatcgatcc

SEQ ID NO: 108777 - DNA, 19 bp, Artificial sequence
  SiRNA target sequence
atacaaatgcatcgatcct

SEQ ID NO: 108778 - DNA, 19 bp, Artificial sequence
  SiRNA target sequence
tacaaatgcatcgatcctc

SEQ ID NO: 108779 - DNA, 19 bp, Artificial sequence
  SiRNA target sequence
acaaatgcatcgatcctcc

SEQ ID NO: 108780 - DNA, 19 bp, Artificial sequence
  SiRNA target sequence
caaatgcatcgatcctcct

SEQ ID NO: 108781 - DNA, 19 bp, Artificial sequence
  SiRNA target sequence
aaatgcatcgatcctcctt

SEQ ID NO: 108782 - DNA, 19 bp, Artificial sequence
  SiRNA target sequence
aatgcatcgatcctccttt

SEQ ID NO: 108783 - DNA, 19 bp, Artificial sequence
  SiRNA target sequence
atgcatcgatcctcctttt

SEQ ID NO: 108784 - DNA, 19 bp, Artificial sequence
  SiRNA target sequence
tgcatcgatcctccttttc

SEQ ID NO: 108785 - DNA, 19 bp, Artificial sequence
  SiRNA target sequence
gcatcgatcctccttttcc

SEQ ID NO: 108786 - DNA, 19 bp, Artificial sequence
  SiRNA target sequence
catcgatcctccttttcct

SEQ ID NO: 108787 - DNA, 19 bp, Artificial sequence
  SiRNA target sequence
atcgatcctccttttcctt

SEQ ID NO: 108788 - DNA, 19 bp, Artificial sequence
  SiRNA target sequence
tcgatcctccttttccttt

SEQ ID NO: 108789 - DNA, 19 bp, Artificial sequence
  SiRNA target sequence
cgatcctccttttcctttg

SEQ ID NO: 108790 - DNA, 19 bp, Artificial sequence
  SiRNA target sequence
gatcctccttttcctttgc

SEQ ID NO: 108791 - DNA, 19 bp, Artificial sequence
  SiRNA target sequence
atcctccttttcctttgca

SEQ ID NO: 108792 - DNA, 19 bp, Artificial sequence
  SiRNA target sequence
tcctccttttcctttgcaa

SEQ ID NO: 108793 - DNA, 19 bp, Artificial sequence
  SiRNA target sequence
cctccttttcctttgcaat

SEQ ID NO: 108794 - DNA, 19 bp, Artificial sequence
  SiRNA target sequence
ctccttttcctttgcaatt

SEQ ID NO: 108795 - DNA, 19 bp, Artificial sequence
  SiRNA target sequence
tccttttcctttgcaatta

SEQ ID NO: 108796 - DNA, 19 bp, Artificial sequence
  SiRNA target sequence
ccttttcctttgcaattac

SEQ ID NO: 108797 - DNA, 19 bp, Artificial sequence
  SiRNA target sequence
cttttcctttgcaattacc

SEQ ID NO: 108798 - DNA, 19 bp, Artificial sequence
  SiRNA target sequence
ttttcctttgcaattacca

SEQ ID NO: 108799 - DNA, 19 bp, Artificial sequence
  SiRNA target sequence
tttcctttgcaattaccaa

SEQ ID NO: 108800 - DNA, 19 bp, Artificial sequence
  SiRNA target sequence
ttcctttgcaattaccaat

SEQ ID NO: 108801 - DNA, 19 bp, Artificial sequence
  SiRNA target sequence
tcctttgcaattaccaata

SEQ ID NO: 108802 - DNA, 19 bp, Artificial sequence
  SiRNA target sequence
cctttgcaattaccaatag

SEQ ID NO: 108803 - DNA, 19 bp, Artificial sequence
  SiRNA target sequence
ctttgcaattaccaatagc

SEQ ID NO: 108804 - DNA, 19 bp, Artificial sequence
  SiRNA target sequence
tttgcaattaccaatagcc

SEQ ID NO: 108805 - DNA, 19 bp, Artificial sequence
  SiRNA target sequence
ttgcaattaccaatagcct

SEQ ID NO: 108806 - DNA, 19 bp, Artificial sequence
  SiRNA target sequence
tgcaattaccaatagcctt

SEQ ID NO: 108807 - DNA, 19 bp, Artificial sequence
  SiRNA target sequence
gcaattaccaatagccttt

SEQ ID NO: 108808 - DNA, 19 bp, Artificial sequence
  SiRNA target sequence
caattaccaatagcctttc

SEQ ID NO: 108809 - DNA, 19 bp, Artificial sequence
  SiRNA target sequence
aattaccaatagcctttcc

SEQ ID NO: 108810 - DNA, 19 bp, Artificial sequence
  SiRNA target sequence
attaccaatagcctttcct

SEQ ID NO: 108811 - DNA, 19 bp, Artificial sequence
  SiRNA target sequence
ttaccaatagcctttccta

SEQ ID NO: 108812 - DNA, 19 bp, Artificial sequence
  SiRNA target sequence
taccaatagcctttcctaa

SEQ ID NO: 108813 - DNA, 19 bp, Artificial sequence
  SiRNA target sequence
accaatagcctttcctaat

SEQ ID NO: 108814 - DNA, 19 bp, Artificial sequence
  SiRNA target sequence
ccaatagcctttcctaata

SEQ ID NO: 108815 - DNA, 19 bp, Artificial sequence
  SiRNA target sequence
caatagcctttcctaataa

SEQ ID NO: 108816 - DNA, 19 bp, Artificial sequence
  SiRNA target sequence
aatagcctttcctaataat

SEQ ID NO: 108817 - DNA, 19 bp, Artificial sequence
  SiRNA target sequence
atagcctttcctaataatt

SEQ ID NO: 108818 - DNA, 19 bp, Artificial sequence
  SiRNA target sequence
tagcctttcctaataattc

SEQ ID NO: 108819 - DNA, 19 bp, Artificial sequence
  SiRNA target sequence
agcctttcctaataattcc

SEQ ID NO: 108820 - DNA, 19 bp, Artificial sequence
  SiRNA target sequence
gcctttcctaataattccc

SEQ ID NO: 108821 - DNA, 19 bp, Artificial sequence
  SiRNA target sequence
cctttcctaataattcccc

SEQ ID NO: 108822 - DNA, 19 bp, Artificial sequence
  SiRNA target sequence
ctttcctaataattcccct

SEQ ID NO: 108823 - DNA, 19 bp, Artificial sequence
  SiRNA target sequence
tttcctaataattccccta

SEQ ID NO: 108824 - DNA, 19 bp, Artificial sequence
  SiRNA target sequence
ttcctaataattcccctat

SEQ ID NO: 108825 - DNA, 19 bp, Artificial sequence
  SiRNA target sequence
tcctaataattcccctata

SEQ ID NO: 108826 - DNA, 19 bp, Artificial sequence
  SiRNA target sequence
cctaataattcccctataa

SEQ ID NO: 108827 - DNA, 19 bp, Artificial sequence
  SiRNA target sequence
ctaataattcccctataat

SEQ ID NO: 108828 - DNA, 19 bp, Artificial sequence
  SiRNA target sequence
taataattcccctataata

SEQ ID NO: 108829 - DNA, 19 bp, Artificial sequence
  SiRNA target sequence
aataattcccctataatac

SEQ ID NO: 108830 - DNA, 19 bp, Artificial sequence
  SiRNA target sequence
ataattcccctataatact

SEQ ID NO: 108831 - DNA, 19 bp, Artificial sequence
  SiRNA target sequence
taattcccctataatactt

SEQ ID NO: 108832 - DNA, 19 bp, Artificial sequence
  SiRNA target sequence
aattcccctataatacttt

SEQ ID NO: 108833 - DNA, 19 bp, Artificial sequence
  SiRNA target sequence
attcccctataatactttc

SEQ ID NO: 108834 - DNA, 19 bp, Artificial sequence
  SiRNA target sequence
ttcccctataatactttct

SEQ ID NO: 108835 - DNA, 19 bp, Artificial sequence
  SiRNA target sequence
tcccctataatactttcta

SEQ ID NO: 108836 - DNA, 19 bp, Artificial sequence
  SiRNA target sequence
cccctataatactttctat

SEQ ID NO: 108837 - DNA, 19 bp, Artificial sequence
  SiRNA target sequence
ccctataatactttctata

SEQ ID NO: 108838 - DNA, 19 bp, Artificial sequence
  SiRNA target sequence
cctataatactttctatac

SEQ ID NO: 108839 - DNA, 19 bp, Artificial sequence
  SiRNA target sequence
ctataatactttctatact

SEQ ID NO: 108840 - DNA, 19 bp, Artificial sequence
  SiRNA target sequence
tataatactttctatactg

SEQ ID NO: 108841 - DNA, 19 bp, Artificial sequence
  SiRNA target sequence
ataatactttctatactga

SEQ ID NO: 108842 - DNA, 19 bp, Artificial sequence
  SiRNA target sequence
taatactttctatactgat

SEQ ID NO: 108843 - DNA, 19 bp, Artificial sequence
  SiRNA target sequence
aatactttctatactgatt

SEQ ID NO: 108844 - DNA, 19 bp, Artificial sequence
  SiRNA target sequence
atactttctatactgattc

SEQ ID NO: 108845 - DNA, 19 bp, Artificial sequence
  SiRNA target sequence
tactttctatactgattcc

SEQ ID NO: 108846 - DNA, 19 bp, Artificial sequence
  SiRNA target sequence
actttctatactgattcca

SEQ ID NO: 108847 - DNA, 19 bp, Artificial sequence
  SiRNA target sequence
ctttctatactgattccac

SEQ ID NO: 108848 - DNA, 19 bp, Artificial sequence
  SiRNA target sequence
tttctatactgattccaca

SEQ ID NO: 108849 - DNA, 19 bp, Artificial sequence
  SiRNA target sequence
ttctatactgattccacaa

SEQ ID NO: 108850 - DNA, 19 bp, Artificial sequence
  SiRNA target sequence
tctatactgattccacaaa

SEQ ID NO: 108851 - DNA, 19 bp, Artificial sequence
  SiRNA target sequence
ctatactgattccacaaat

SEQ ID NO: 108852 - DNA, 19 bp, Artificial sequence
  SiRNA target sequence
tatactgattccacaaata

SEQ ID NO: 108853 - DNA, 19 bp, Artificial sequence
  SiRNA target sequence
atactgattccacaaataa

SEQ ID NO: 108854 - DNA, 19 bp, Artificial sequence
  SiRNA target sequence
tactgattccacaaataaa

SEQ ID NO: 108855 - DNA, 19 bp, Artificial sequence
  SiRNA target sequence
actgattccacaaataaat

SEQ ID NO: 108856 - DNA, 19 bp, Artificial sequence
  SiRNA target sequence
ctgattccacaaataaatg

SEQ ID NO: 108857 - DNA, 19 bp, Artificial sequence
  SiRNA target sequence
tgattccacaaataaatgc

SEQ ID NO: 108858 - DNA, 19 bp, Artificial sequence
  SiRNA target sequence
gattccacaaataaatgct

SEQ ID NO: 108859 - DNA, 19 bp, Artificial sequence
  SiRNA target sequence
attccacaaataaatgcta

SEQ ID NO: 108860 - DNA, 19 bp, Artificial sequence
  SiRNA target sequence
ttccacaaataaatgctaa

SEQ ID NO: 108861 - DNA, 19 bp, Artificial sequence
  SiRNA target sequence
tccacaaataaatgctaat

SEQ ID NO: 108862 - DNA, 19 bp, Artificial sequence
  SiRNA target sequence
ccacaaataaatgctaatc

SEQ ID NO: 108863 - DNA, 19 bp, Artificial sequence
  SiRNA target sequence
cacaaataaatgctaatcc

SEQ ID NO: 108864 - DNA, 19 bp, Artificial sequence
  SiRNA target sequence
acaaataaatgctaatcca

SEQ ID NO: 108865 - DNA, 19 bp, Artificial sequence
  SiRNA target sequence
caaataaatgctaatccat

SEQ ID NO: 108866 - DNA, 19 bp, Artificial sequence
  SiRNA target sequence
aaataaatgctaatccatg

SEQ ID NO: 108867 - DNA, 19 bp, Artificial sequence
  SiRNA target sequence
aataaatgctaatccatgg

SEQ ID NO: 108868 - DNA, 19 bp, Artificial sequence
  SiRNA target sequence
ataaatgctaatccatggc

SEQ ID NO: 108869 - DNA, 19 bp, Artificial sequence
  SiRNA target sequence
taaatgctaatccatggca

SEQ ID NO: 108870 - DNA, 19 bp, Artificial sequence
  SiRNA target sequence
aaatgctaatccatggcat

SEQ ID NO: 108871 - DNA, 19 bp, Artificial sequence
  SiRNA target sequence
aatgctaatccatggcatc

SEQ ID NO: 108872 - DNA, 19 bp, Artificial sequence
  SiRNA target sequence
atgctaatccatggcatct

SEQ ID NO: 108873 - DNA, 19 bp, Artificial sequence
  SiRNA target sequence
tgctaatccatggcatcta

SEQ ID NO: 108874 - DNA, 19 bp, Artificial sequence
  SiRNA target sequence
gctaatccatggcatctat

SEQ ID NO: 108875 - DNA, 19 bp, Artificial sequence
  SiRNA target sequence
ctaatccatggcatctata

SEQ ID NO: 108876 - DNA, 19 bp, Artificial sequence
  SiRNA target sequence
taatccatggcatctataa

SEQ ID NO: 108877 - DNA, 19 bp, Artificial sequence
  SiRNA target sequence
aatccatggcatctataag

SEQ ID NO: 108878 - DNA, 19 bp, Artificial sequence
  SiRNA target sequence
atccatggcatctataaga

SEQ ID NO: 108879 - DNA, 19 bp, Artificial sequence
  SiRNA target sequence
tccatggcatctataagat

SEQ ID NO: 108880 - DNA, 19 bp, Artificial sequence
  SiRNA target sequence
ccatggcatctataagatc

SEQ ID NO: 108881 - DNA, 19 bp, Artificial sequence
  SiRNA target sequence
catggcatctataagatcc

SEQ ID NO: 108882 - DNA, 19 bp, Artificial sequence
  SiRNA target sequence
atggcatctataagatcct

SEQ ID NO: 108883 - DNA, 19 bp, Artificial sequence
  SiRNA target sequence
tggcatctataagatccta

SEQ ID NO: 108884 - DNA, 19 bp, Artificial sequence
  SiRNA target sequence
ggcatctataagatcctat

SEQ ID NO: 108885 - DNA, 19 bp, Artificial sequence
  SiRNA target sequence
gcatctataagatcctatg

SEQ ID NO: 108886 - DNA, 19 bp, Artificial sequence
  SiRNA target sequence
catctataagatcctatga

SEQ ID NO: 108887 - DNA, 19 bp, Artificial sequence
  SiRNA target sequence
atctataagatcctatgac

SEQ ID NO: 108888 - DNA, 19 bp, Artificial sequence
  SiRNA target sequence
tctataagatcctatgact

SEQ ID NO: 108889 - DNA, 19 bp, Artificial sequence
  SiRNA target sequence
ctataagatcctatgactt

SEQ ID NO: 108890 - DNA, 19 bp, Artificial sequence
  SiRNA target sequence
tataagatcctatgacttt

SEQ ID NO: 108891 - DNA, 19 bp, Artificial sequence
  SiRNA target sequence
ataagatcctatgacttta

SEQ ID NO: 108892 - DNA, 19 bp, Artificial sequence
  SiRNA target sequence
taagatcctatgactttat

SEQ ID NO: 108893 - DNA, 19 bp, Artificial sequence
  SiRNA target sequence
aagatcctatgactttatc

SEQ ID NO: 108894 - DNA, 19 bp, Artificial sequence
  SiRNA target sequence
agatcctatgactttatca

SEQ ID NO: 108895 - DNA, 19 bp, Artificial sequence
  SiRNA target sequence
gatcctatgactttatcat

SEQ ID NO: 108896 - DNA, 19 bp, Artificial sequence
  SiRNA target sequence
atcctatgactttatcatt

SEQ ID NO: 108897 - DNA, 19 bp, Artificial sequence
  SiRNA target sequence
tcctatgactttatcattt

SEQ ID NO: 108898 - DNA, 19 bp, Artificial sequence
  SiRNA target sequence
cctatgactttatcatttt

SEQ ID NO: 108899 - DNA, 19 bp, Artificial sequence
  SiRNA target sequence
ctatgactttatcattttt

SEQ ID NO: 108900 - DNA, 19 bp, Artificial sequence
  SiRNA target sequence
tatgactttatcattttta

SEQ ID NO: 108901 - DNA, 19 bp, Artificial sequence
  SiRNA target sequence
atgactttatcatttttat

SEQ ID NO: 108902 - DNA, 19 bp, Artificial sequence
  SiRNA target sequence
tgactttatcatttttatc

SEQ ID NO: 108903 - DNA, 19 bp, Artificial sequence
  SiRNA target sequence
gactttatcatttttatct

SEQ ID NO: 108904 - DNA, 19 bp, Artificial sequence
  SiRNA target sequence
actttatcatttttatcta

SEQ ID NO: 108905 - DNA, 19 bp, Artificial sequence
  SiRNA target sequence
ctttatcatttttatctag

SEQ ID NO: 108906 - DNA, 19 bp, Artificial sequence
  SiRNA target sequence
tttatcatttttatctagt

SEQ ID NO: 108907 - DNA, 19 bp, Artificial sequence
  SiRNA target sequence
ttatcatttttatctagta

SEQ ID NO: 108908 - DNA, 19 bp, Artificial sequence
  SiRNA target sequence
tatcatttttatctagtac

SEQ ID NO: 108909 - DNA, 19 bp, Artificial sequence
  SiRNA target sequence
atcatttttatctagtacc

SEQ ID NO: 108910 - DNA, 19 bp, Artificial sequence
  SiRNA target sequence
tcatttttatctagtacct

SEQ ID NO: 108911 - DNA, 19 bp, Artificial sequence
  SiRNA target sequence
catttttatctagtacctt

SEQ ID NO: 108912 - DNA, 19 bp, Artificial sequence
  SiRNA target sequence
atttttatctagtaccttt

SEQ ID NO: 108913 - DNA, 19 bp, Artificial sequence
  SiRNA target sequence
tttttatctagtacctttt

SEQ ID NO: 108914 - DNA, 19 bp, Artificial sequence
  SiRNA target sequence
ttttatctagtaccttttg

SEQ ID NO: 108915 - DNA, 19 bp, Artificial sequence
  SiRNA target sequence
tttatctagtaccttttgt

SEQ ID NO: 108916 - DNA, 19 bp, Artificial sequence
  SiRNA target sequence
ttatctagtaccttttgta

SEQ ID NO: 108917 - DNA, 19 bp, Artificial sequence
  SiRNA target sequence
tatctagtaccttttgtaa

SEQ ID NO: 108918 - DNA, 19 bp, Artificial sequence
  SiRNA target sequence
atctagtaccttttgtaaa

SEQ ID NO: 108919 - DNA, 19 bp, Artificial sequence
  SiRNA target sequence
tctagtaccttttgtaaac

SEQ ID NO: 108920 - DNA, 19 bp, Artificial sequence
  SiRNA target sequence
ctagtaccttttgtaaact

SEQ ID NO: 108921 - DNA, 19 bp, Artificial sequence
  SiRNA target sequence
tagtaccttttgtaaactc

SEQ ID NO: 108922 - DNA, 19 bp, Artificial sequence
  SiRNA target sequence
agtaccttttgtaaactca

SEQ ID NO: 108923 - DNA, 19 bp, Artificial sequence
  SiRNA target sequence
gtaccttttgtaaactcat

SEQ ID NO: 108924 - DNA, 19 bp, Artificial sequence
  SiRNA target sequence
taccttttgtaaactcata

SEQ ID NO: 108925 - DNA, 19 bp, Artificial sequence
  SiRNA target sequence
accttttgtaaactcatat

SEQ ID NO: 108926 - DNA, 19 bp, Artificial sequence
  SiRNA target sequence
ccttttgtaaactcatata

SEQ ID NO: 108927 - DNA, 19 bp, Artificial sequence
  SiRNA target sequence
cttttgtaaactcatataa

SEQ ID NO: 108928 - DNA, 19 bp, Artificial sequence
  SiRNA target sequence
ttttgtaaactcatataaa

SEQ ID NO: 108929 - DNA, 19 bp, Artificial sequence
  SiRNA target sequence
tttgtaaactcatataaat

SEQ ID NO: 108930 - DNA, 19 bp, Artificial sequence
  SiRNA target sequence
ttgtaaactcatataaatg

SEQ ID NO: 108931 - DNA, 19 bp, Artificial sequence
  SiRNA target sequence
tgtaaactcatataaatgt

SEQ ID NO: 108932 - DNA, 19 bp, Artificial sequence
  SiRNA target sequence
gtaaactcatataaatgtt

SEQ ID NO: 108933 - DNA, 19 bp, Artificial sequence
  SiRNA target sequence
taaactcatataaatgttt

SEQ ID NO: 108934 - DNA, 19 bp, Artificial sequence
  SiRNA target sequence
aaactcatataaatgtttt

SEQ ID NO: 108935 - DNA, 19 bp, Artificial sequence
  SiRNA target sequence
aactcatataaatgttttc

SEQ ID NO: 108936 - DNA, 19 bp, Artificial sequence
  SiRNA target sequence
actcatataaatgttttcc

SEQ ID NO: 108937 - DNA, 19 bp, Artificial sequence
  SiRNA target sequence
ctcatataaatgttttcct

SEQ ID NO: 108938 - DNA, 19 bp, Artificial sequence
  SiRNA target sequence
tcatataaatgttttcctg

SEQ ID NO: 108939 - DNA, 19 bp, Artificial sequence
  SiRNA target sequence
catataaatgttttcctgt

SEQ ID NO: 108940 - DNA, 19 bp, Artificial sequence
  SiRNA target sequence
atataaatgttttcctgtc

SEQ ID NO: 108941 - DNA, 19 bp, Artificial sequence
  SiRNA target sequence
tataaatgttttcctgtcc

SEQ ID NO: 108942 - DNA, 19 bp, Artificial sequence
  SiRNA target sequence
ataaatgttttcctgtcct

SEQ ID NO: 108943 - DNA, 19 bp, Artificial sequence
  SiRNA target sequence
taaatgttttcctgtccta

SEQ ID NO: 108944 - DNA, 19 bp, Artificial sequence
  SiRNA target sequence
aaatgttttcctgtcctat

SEQ ID NO: 108945 - DNA, 19 bp, Artificial sequence
  SiRNA target sequence
aatgttttcctgtcctatt

SEQ ID NO: 108946 - DNA, 19 bp, Artificial sequence
  SiRNA target sequence
atgttttcctgtcctatta

SEQ ID NO: 108947 - DNA, 19 bp, Artificial sequence
  SiRNA target sequence
tgttttcctgtcctattac

SEQ ID NO: 108948 - DNA, 19 bp, Artificial sequence
  SiRNA target sequence
gttttcctgtcctattact

SEQ ID NO: 108949 - DNA, 19 bp, Artificial sequence
  SiRNA target sequence
ttttcctgtcctattacta

SEQ ID NO: 108950 - DNA, 19 bp, Artificial sequence
  SiRNA target sequence
tttcctgtcctattactaa

SEQ ID NO: 108951 - DNA, 19 bp, Artificial sequence
  SiRNA target sequence
ttcctgtcctattactaaa

SEQ ID NO: 108952 - DNA, 19 bp, Artificial sequence
  SiRNA target sequence
tcctgtcctattactaaat

SEQ ID NO: 108953 - DNA, 19 bp, Artificial sequence
  SiRNA target sequence
cctgtcctattactaaatg

SEQ ID NO: 108954 - DNA, 19 bp, Artificial sequence
  SiRNA target sequence
ctgtcctattactaaatga

SEQ ID NO: 108955 - DNA, 19 bp, Artificial sequence
  SiRNA target sequence
tgtcctattactaaatgac

SEQ ID NO: 108956 - DNA, 19 bp, Artificial sequence
  SiRNA target sequence
gtcctattactaaatgaca

SEQ ID NO: 108957 - DNA, 19 bp, Artificial sequence
  SiRNA target sequence
tcctattactaaatgacag

SEQ ID NO: 108958 - DNA, 19 bp, Artificial sequence
  SiRNA target sequence
cctattactaaatgacaga

SEQ ID NO: 108959 - DNA, 19 bp, Artificial sequence
  SiRNA target sequence
ctattactaaatgacagaa

SEQ ID NO: 108960 - DNA, 19 bp, Artificial sequence
  SiRNA target sequence
tattactaaatgacagaag

SEQ ID NO: 108961 - DNA, 19 bp, Artificial sequence
  SiRNA target sequence
attactaaatgacagaagc

SEQ ID NO: 108962 - DNA, 19 bp, Artificial sequence
  SiRNA target sequence
ttactaaatgacagaagcc

SEQ ID NO: 108963 - DNA, 19 bp, Artificial sequence
  SiRNA target sequence
tactaaatgacagaagcct

SEQ ID NO: 108964 - DNA, 19 bp, Artificial sequence
  SiRNA target sequence
actaaatgacagaagcctc

SEQ ID NO: 108965 - DNA, 19 bp, Artificial sequence
  SiRNA target sequence
ctaaatgacagaagcctct

SEQ ID NO: 108966 - DNA, 19 bp, Artificial sequence
  SiRNA target sequence
taaatgacagaagcctctt

SEQ ID NO: 108967 - DNA, 19 bp, Artificial sequence
  SiRNA target sequence
aaatgacagaagcctctta

SEQ ID NO: 108968 - DNA, 19 bp, Artificial sequence
  SiRNA target sequence
aatgacagaagcctcttat

SEQ ID NO: 108969 - DNA, 19 bp, Artificial sequence
  SiRNA target sequence
atgacagaagcctcttata

SEQ ID NO: 108970 - DNA, 19 bp, Artificial sequence
  SiRNA target sequence
tgacagaagcctcttatat

SEQ ID NO: 108971 - DNA, 19 bp, Artificial sequence
  SiRNA target sequence
gacagaagcctcttatatt

SEQ ID NO: 108972 - DNA, 19 bp, Artificial sequence
  SiRNA target sequence
acagaagcctcttatattt

SEQ ID NO: 108973 - DNA, 19 bp, Artificial sequence
  SiRNA target sequence
cagaagcctcttatatttc

SEQ ID NO: 108974 - DNA, 19 bp, Artificial sequence
  SiRNA target sequence
agaagcctcttatatttcc

SEQ ID NO: 108975 - DNA, 19 bp, Artificial sequence
  SiRNA target sequence
gaagcctcttatatttcct

SEQ ID NO: 108976 - DNA, 19 bp, Artificial sequence
  SiRNA target sequence
aagcctcttatatttcctt

SEQ ID NO: 108977 - DNA, 19 bp, Artificial sequence
  SiRNA target sequence
agcctcttatatttccttt

SEQ ID NO: 108978 - DNA, 19 bp, Artificial sequence
  SiRNA target sequence
gcctcttatatttcctttt

SEQ ID NO: 108979 - DNA, 19 bp, Artificial sequence
  SiRNA target sequence
cctcttatatttccttttt

SEQ ID NO: 108980 - DNA, 19 bp, Artificial sequence
  SiRNA target sequence
ctcttatatttcctttttt

SEQ ID NO: 108981 - DNA, 19 bp, Artificial sequence
  SiRNA target sequence
tcttatatttcctttttta

SEQ ID NO: 108982 - DNA, 19 bp, Artificial sequence
  SiRNA target sequence
cttatatttccttttttat

SEQ ID NO: 108983 - DNA, 19 bp, Artificial sequence
  SiRNA target sequence
ttatatttccttttttata

SEQ ID NO: 108984 - DNA, 19 bp, Artificial sequence
  SiRNA target sequence
tatatttccttttttatac

SEQ ID NO: 108985 - DNA, 19 bp, Artificial sequence
  SiRNA target sequence
atatttccttttttatact

SEQ ID NO: 108986 - DNA, 19 bp, Artificial sequence
  SiRNA target sequence
tatttccttttttatactt

SEQ ID NO: 108987 - DNA, 19 bp, Artificial sequence
  SiRNA target sequence
atttccttttttatactta

SEQ ID NO: 108988 - DNA, 19 bp, Artificial sequence
  SiRNA target sequence
tttccttttttatacttag

SEQ ID NO: 108989 - DNA, 19 bp, Artificial sequence
  SiRNA target sequence
ttccttttttatacttaga

SEQ ID NO: 108990 - DNA, 19 bp, Artificial sequence
  SiRNA target sequence
tccttttttatacttagag

SEQ ID NO: 108991 - DNA, 19 bp, Artificial sequence
  SiRNA target sequence
ccttttttatacttagagt

SEQ ID NO: 108992 - DNA, 19 bp, Artificial sequence
  SiRNA target sequence
cttttttatacttagagtt

SEQ ID NO: 108993 - DNA, 19 bp, Artificial sequence
  SiRNA target sequence
ttttttatacttagagtta

SEQ ID NO: 108994 - DNA, 19 bp, Artificial sequence
  SiRNA target sequence
tttttatacttagagttag

SEQ ID NO: 108995 - DNA, 19 bp, Artificial sequence
  SiRNA target sequence
ttttatacttagagttagc

SEQ ID NO: 108996 - DNA, 19 bp, Artificial sequence
  SiRNA target sequence
tttatacttagagttagca

SEQ ID NO: 108997 - DNA, 19 bp, Artificial sequence
  SiRNA target sequence
ttatacttagagttagcat

SEQ ID NO: 108998 - DNA, 19 bp, Artificial sequence
  SiRNA target sequence
tatacttagagttagcata

SEQ ID NO: 108999 - DNA, 19 bp, Artificial sequence
  SiRNA target sequence
atacttagagttagcatat

SEQ ID NO: 109000 - DNA, 19 bp, Artificial sequence
  SiRNA target sequence
tacttagagttagcatatt

SEQ ID NO: 109001 - DNA, 19 bp, Artificial sequence
  SiRNA target sequence
acttagagttagcatattc

SEQ ID NO: 109002 - DNA, 19 bp, Artificial sequence
  SiRNA target sequence
cttagagttagcatattct

SEQ ID NO: 109003 - DNA, 19 bp, Artificial sequence
  SiRNA target sequence
ttagagttagcatattctt

SEQ ID NO: 109004 - DNA, 19 bp, Artificial sequence
  SiRNA target sequence
tagagttagcatattcttc

SEQ ID NO: 109005 - DNA, 19 bp, Artificial sequence
  SiRNA target sequence
agagttagcatattcttcg

SEQ ID NO: 109006 - DNA, 19 bp, Artificial sequence
  SiRNA target sequence
gagttagcatattcttcga

SEQ ID NO: 109007 - DNA, 19 bp, Artificial sequence
  SiRNA target sequence
agttagcatattcttcgat

SEQ ID NO: 109008 - DNA, 19 bp, Artificial sequence
  SiRNA target sequence
gttagcatattcttcgata

SEQ ID NO: 109009 - DNA, 19 bp, Artificial sequence
  SiRNA target sequence
ttagcatattcttcgataa

SEQ ID NO: 109010 - DNA, 19 bp, Artificial sequence
  SiRNA target sequence
tagcatattcttcgataag

SEQ ID NO: 109011 - DNA, 19 bp, Artificial sequence
  SiRNA target sequence
agcatattcttcgataaga

SEQ ID NO: 109012 - DNA, 19 bp, Artificial sequence
  SiRNA target sequence
gcatattcttcgataagac

SEQ ID NO: 109013 - DNA, 19 bp, Artificial sequence
  SiRNA target sequence
catattcttcgataagacg

SEQ ID NO: 109014 - DNA, 19 bp, Artificial sequence
  SiRNA target sequence
atattcttcgataagacgt

SEQ ID NO: 109015 - DNA, 19 bp, Artificial sequence
  SiRNA target sequence
tattcttcgataagacgta

SEQ ID NO: 109016 - DNA, 19 bp, Artificial sequence
  SiRNA target sequence
attcttcgataagacgtag

SEQ ID NO: 109017 - DNA, 19 bp, Artificial sequence
  SiRNA target sequence
ttcttcgataagacgtaga

SEQ ID NO: 109018 - DNA, 19 bp, Artificial sequence
  SiRNA target sequence
tcttcgataagacgtagaa

SEQ ID NO: 109019 - DNA, 19 bp, Artificial sequence
  SiRNA target sequence
cttcgataagacgtagaat

SEQ ID NO: 109020 - DNA, 19 bp, Artificial sequence
  SiRNA target sequence
ttcgataagacgtagaatt

SEQ ID NO: 109021 - DNA, 19 bp, Artificial sequence
  SiRNA target sequence
tcgataagacgtagaatta

SEQ ID NO: 109022 - DNA, 19 bp, Artificial sequence
  SiRNA target sequence
cgataagacgtagaattaa

SEQ ID NO: 109023 - DNA, 19 bp, Artificial sequence
  SiRNA target sequence
gataagacgtagaattaac

SEQ ID NO: 109024 - DNA, 19 bp, Artificial sequence
  SiRNA target sequence
ataagacgtagaattaaca

SEQ ID NO: 109025 - DNA, 19 bp, Artificial sequence
  SiRNA target sequence
taagacgtagaattaacat

SEQ ID NO: 109026 - DNA, 19 bp, Artificial sequence
  SiRNA target sequence
aagacgtagaattaacata

SEQ ID NO: 109027 - DNA, 19 bp, Artificial sequence
  SiRNA target sequence
agacgtagaattaacatat

SEQ ID NO: 109028 - DNA, 19 bp, Artificial sequence
  SiRNA target sequence
gacgtagaattaacatatt

SEQ ID NO: 109029 - DNA, 19 bp, Artificial sequence
  SiRNA target sequence
acgtagaattaacatattt

SEQ ID NO: 109030 - DNA, 19 bp, Artificial sequence
  SiRNA target sequence
cgtagaattaacatatttc

SEQ ID NO: 109031 - DNA, 19 bp, Artificial sequence
  SiRNA target sequence
gtagaattaacatatttct

SEQ ID NO: 109032 - DNA, 19 bp, Artificial sequence
  SiRNA target sequence
tagaattaacatatttcta

SEQ ID NO: 109033 - DNA, 19 bp, Artificial sequence
  SiRNA target sequence
agaattaacatatttctat

SEQ ID NO: 109034 - DNA, 19 bp, Artificial sequence
  SiRNA target sequence
gaattaacatatttctata

SEQ ID NO: 109035 - DNA, 19 bp, Artificial sequence
  SiRNA target sequence
aattaacatatttctataa

SEQ ID NO: 109036 - DNA, 19 bp, Artificial sequence
  SiRNA target sequence
attaacatatttctataaa

SEQ ID NO: 109037 - DNA, 19 bp, Artificial sequence
  SiRNA target sequence
ttaacatatttctataaac

SEQ ID NO: 109038 - DNA, 19 bp, Artificial sequence
  SiRNA target sequence
taacatatttctataaaca

SEQ ID NO: 109039 - DNA, 19 bp, Artificial sequence
  SiRNA target sequence
aacatatttctataaacat

SEQ ID NO: 109040 - DNA, 19 bp, Artificial sequence
  SiRNA target sequence
acatatttctataaacatc

SEQ ID NO: 109041 - DNA, 19 bp, Artificial sequence
  SiRNA target sequence
catatttctataaacatct

SEQ ID NO: 109042 - DNA, 19 bp, Artificial sequence
  SiRNA target sequence
atatttctataaacatctt

SEQ ID NO: 109043 - DNA, 19 bp, Artificial sequence
  SiRNA target sequence
tatttctataaacatcttg

SEQ ID NO: 109044 - DNA, 19 bp, Artificial sequence
  SiRNA target sequence
atttctataaacatcttgt

SEQ ID NO: 109045 - DNA, 19 bp, Artificial sequence
  SiRNA target sequence
tttctataaacatcttgta

SEQ ID NO: 109046 - DNA, 19 bp, Artificial sequence
  SiRNA target sequence
ttctataaacatcttgtac

SEQ ID NO: 109047 - DNA, 19 bp, Artificial sequence
  SiRNA target sequence
tctataaacatcttgtaca

SEQ ID NO: 109048 - DNA, 19 bp, Artificial sequence
  SiRNA target sequence
ctataaacatcttgtacaa

SEQ ID NO: 109049 - DNA, 19 bp, Artificial sequence
  SiRNA target sequence
tataaacatcttgtacaag

SEQ ID NO: 109050 - DNA, 19 bp, Artificial sequence
  SiRNA target sequence
ataaacatcttgtacaagt

SEQ ID NO: 109051 - DNA, 19 bp, Artificial sequence
  SiRNA target sequence
taaacatcttgtacaagtt

SEQ ID NO: 109052 - DNA, 19 bp, Artificial sequence
  SiRNA target sequence
aaacatcttgtacaagttc

SEQ ID NO: 109053 - DNA, 19 bp, Artificial sequence
  SiRNA target sequence
aacatcttgtacaagttct

SEQ ID NO: 109054 - DNA, 19 bp, Artificial sequence
  SiRNA target sequence
acatcttgtacaagttctt

SEQ ID NO: 109055 - DNA, 19 bp, Artificial sequence
  SiRNA target sequence
catcttgtacaagttcttt

SEQ ID NO: 109056 - DNA, 19 bp, Artificial sequence
  SiRNA target sequence
atcttgtacaagttctttg

SEQ ID NO: 109057 - DNA, 19 bp, Artificial sequence
  SiRNA target sequence
tcttgtacaagttctttgt

SEQ ID NO: 109058 - DNA, 19 bp, Artificial sequence
  SiRNA target sequence
cttgtacaagttctttgtt

SEQ ID NO: 109059 - DNA, 19 bp, Artificial sequence
  SiRNA target sequence
ttgtacaagttctttgttt

SEQ ID NO: 109060 - DNA, 19 bp, Artificial sequence
  SiRNA target sequence
tgtacaagttctttgttta

SEQ ID NO: 109061 - DNA, 19 bp, Artificial sequence
  SiRNA target sequence
gtacaagttctttgtttaa

SEQ ID NO: 109062 - DNA, 19 bp, Artificial sequence
  SiRNA target sequence
tacaagttctttgtttaaa

SEQ ID NO: 109063 - DNA, 19 bp, Artificial sequence
  SiRNA target sequence
acaagttctttgtttaaag

SEQ ID NO: 109064 - DNA, 19 bp, Artificial sequence
  SiRNA target sequence
caagttctttgtttaaagt

SEQ ID NO: 109065 - DNA, 19 bp, Artificial sequence
  SiRNA target sequence
aagttctttgtttaaagta

SEQ ID NO: 109066 - DNA, 19 bp, Artificial sequence
  SiRNA target sequence
agttctttgtttaaagtag

SEQ ID NO: 109067 - DNA, 19 bp, Artificial sequence
  SiRNA target sequence
gttctttgtttaaagtagt

SEQ ID NO: 109068 - DNA, 19 bp, Artificial sequence
  SiRNA target sequence
ttctttgtttaaagtagtt

SEQ ID NO: 109069 - DNA, 19 bp, Artificial sequence
  SiRNA target sequence
tctttgtttaaagtagttt

SEQ ID NO: 109070 - DNA, 19 bp, Artificial sequence
  SiRNA target sequence
ctttgtttaaagtagtttt

SEQ ID NO: 109071 - DNA, 19 bp, Artificial sequence
  SiRNA target sequence
tttgtttaaagtagttttc

SEQ ID NO: 109072 - DNA, 19 bp, Artificial sequence
  SiRNA target sequence
ttgtttaaagtagttttca

SEQ ID NO: 109073 - DNA, 19 bp, Artificial sequence
  SiRNA target sequence
tgtttaaagtagttttcag

SEQ ID NO: 109074 - DNA, 19 bp, Artificial sequence
  SiRNA target sequence
gtttaaagtagttttcagt

SEQ ID NO: 109075 - DNA, 19 bp, Artificial sequence
  SiRNA target sequence
tttaaagtagttttcagtt

SEQ ID NO: 109076 - DNA, 19 bp, Artificial sequence
  SiRNA target sequence
ttaaagtagttttcagttt

SEQ ID NO: 109077 - DNA, 19 bp, Artificial sequence
  SiRNA target sequence
taaagtagttttcagttta

SEQ ID NO: 109078 - DNA, 19 bp, Artificial sequence
  SiRNA target sequence
aaagtagttttcagtttaa

SEQ ID NO: 109079 - DNA, 19 bp, Artificial sequence
  SiRNA target sequence
aagtagttttcagtttaac

SEQ ID NO: 109080 - DNA, 19 bp, Artificial sequence
  SiRNA target sequence
agtagttttcagtttaact

SEQ ID NO: 109081 - DNA, 19 bp, Artificial sequence
  SiRNA target sequence
gtagttttcagtttaactg

SEQ ID NO: 109082 - DNA, 19 bp, Artificial sequence
  SiRNA target sequence
tagttttcagtttaactgt

SEQ ID NO: 109083 - DNA, 19 bp, Artificial sequence
  SiRNA target sequence
agttttcagtttaactgta

SEQ ID NO: 109084 - DNA, 19 bp, Artificial sequence
  SiRNA target sequence
gttttcagtttaactgtat

SEQ ID NO: 109085 - DNA, 19 bp, Artificial sequence
  SiRNA target sequence
ttttcagtttaactgtatt

SEQ ID NO: 109086 - DNA, 19 bp, Artificial sequence
  SiRNA target sequence
tttcagtttaactgtattt

SEQ ID NO: 109087 - DNA, 19 bp, Artificial sequence
  SiRNA target sequence
ttcagtttaactgtatttt

SEQ ID NO: 109088 - DNA, 19 bp, Artificial sequence
  SiRNA target sequence
tcagtttaactgtattttt

SEQ ID NO: 109089 - DNA, 19 bp, Artificial sequence
  SiRNA target sequence
cagtttaactgtattttta

SEQ ID NO: 109090 - DNA, 19 bp, Artificial sequence
  SiRNA target sequence
agtttaactgtatttttat

SEQ ID NO: 109091 - DNA, 19 bp, Artificial sequence
  SiRNA target sequence
gtttaactgtatttttatc

SEQ ID NO: 109092 - DNA, 19 bp, Artificial sequence
  SiRNA target sequence
tttaactgtatttttatct

SEQ ID NO: 109093 - DNA, 19 bp, Artificial sequence
  SiRNA target sequence
ttaactgtatttttatcta

SEQ ID NO: 109094 - DNA, 19 bp, Artificial sequence
  SiRNA target sequence
taactgtatttttatctac

SEQ ID NO: 109095 - DNA, 19 bp, Artificial sequence
  SiRNA target sequence
aactgtatttttatctacc

SEQ ID NO: 109096 - DNA, 19 bp, Artificial sequence
  SiRNA target sequence
actgtatttttatctacca

SEQ ID NO: 109097 - DNA, 19 bp, Artificial sequence
  SiRNA target sequence
ctgtatttttatctaccaa

SEQ ID NO: 109098 - DNA, 19 bp, Artificial sequence
  SiRNA target sequence
tgtatttttatctaccaaa

SEQ ID NO: 109099 - DNA, 19 bp, Artificial sequence
  SiRNA target sequence
gtatttttatctaccaaat

SEQ ID NO: 109100 - DNA, 19 bp, Artificial sequence
  SiRNA target sequence
tatttttatctaccaaata

SEQ ID NO: 109101 - DNA, 19 bp, Artificial sequence
  SiRNA target sequence
atttttatctaccaaataa

SEQ ID NO: 109102 - DNA, 19 bp, Artificial sequence
  SiRNA target sequence
tttttatctaccaaataat

SEQ ID NO: 109103 - DNA, 19 bp, Artificial sequence
  SiRNA target sequence
ttttatctaccaaataata

SEQ ID NO: 109104 - DNA, 19 bp, Artificial sequence
  SiRNA target sequence
tttatctaccaaataataa

SEQ ID NO: 109105 - DNA, 19 bp, Artificial sequence
  SiRNA target sequence
ttatctaccaaataataat

SEQ ID NO: 109106 - DNA, 19 bp, Artificial sequence
  SiRNA target sequence
tatctaccaaataataatc

SEQ ID NO: 109107 - DNA, 19 bp, Artificial sequence
  SiRNA target sequence
atctaccaaataataatct

SEQ ID NO: 109108 - DNA, 19 bp, Artificial sequence
  SiRNA target sequence
tctaccaaataataatcta

SEQ ID NO: 109109 - DNA, 19 bp, Artificial sequence
  SiRNA target sequence
ctaccaaataataatctat

SEQ ID NO: 109110 - DNA, 19 bp, Artificial sequence
  SiRNA target sequence
taccaaataataatctatc

SEQ ID NO: 109111 - DNA, 19 bp, Artificial sequence
  SiRNA target sequence
accaaataataatctatca

SEQ ID NO: 109112 - DNA, 19 bp, Artificial sequence
  SiRNA target sequence
ccaaataataatctatcat

SEQ ID NO: 109113 - DNA, 20 bp, Artificial sequence
  SiRNA target sequence
ttattcagaataaacatctt

SEQ ID NO: 109114 - DNA, 20 bp, Artificial sequence
  SiRNA target sequence
tattcagaataaacatcttt

SEQ ID NO: 109115 - DNA, 20 bp, Artificial sequence
  SiRNA target sequence
attcagaataaacatctttt

SEQ ID NO: 109116 - DNA, 20 bp, Artificial sequence
  SiRNA target sequence
ttcagaataaacatctttta

SEQ ID NO: 109117 - DNA, 20 bp, Artificial sequence
  SiRNA target sequence
tcagaataaacatcttttaa

SEQ ID NO: 109118 - DNA, 20 bp, Artificial sequence
  SiRNA target sequence
cagaataaacatcttttaaa

SEQ ID NO: 109119 - DNA, 20 bp, Artificial sequence
  SiRNA target sequence
agaataaacatcttttaaaa

SEQ ID NO: 109120 - DNA, 20 bp, Artificial sequence
  SiRNA target sequence
gaataaacatcttttaaaag

SEQ ID NO: 109121 - DNA, 20 bp, Artificial sequence
  SiRNA target sequence
aataaacatcttttaaaagt

SEQ ID NO: 109122 - DNA, 20 bp, Artificial sequence
  SiRNA target sequence
ataaacatcttttaaaagtt

SEQ ID NO: 109123 - DNA, 20 bp, Artificial sequence
  SiRNA target sequence
taaacatcttttaaaagttc

SEQ ID NO: 109124 - DNA, 20 bp, Artificial sequence
  SiRNA target sequence
aaacatcttttaaaagttca

SEQ ID NO: 109125 - DNA, 20 bp, Artificial sequence
  SiRNA target sequence
aacatcttttaaaagttcat

SEQ ID NO: 109126 - DNA, 20 bp, Artificial sequence
  SiRNA target sequence
acatcttttaaaagttcatc

SEQ ID NO: 109127 - DNA, 20 bp, Artificial sequence
  SiRNA target sequence
catcttttaaaagttcatcg

SEQ ID NO: 109128 - DNA, 20 bp, Artificial sequence
  SiRNA target sequence
atcttttaaaagttcatcga

SEQ ID NO: 109129 - DNA, 20 bp, Artificial sequence
  SiRNA target sequence
tcttttaaaagttcatcgat

SEQ ID NO: 109130 - DNA, 20 bp, Artificial sequence
  SiRNA target sequence
cttttaaaagttcatcgata

SEQ ID NO: 109131 - DNA, 20 bp, Artificial sequence
  SiRNA target sequence
ttttaaaagttcatcgatat

SEQ ID NO: 109132 - DNA, 20 bp, Artificial sequence
  SiRNA target sequence
tttaaaagttcatcgatatc

SEQ ID NO: 109133 - DNA, 20 bp, Artificial sequence
  SiRNA target sequence
ttaaaagttcatcgatatcg

SEQ ID NO: 109134 - DNA, 20 bp, Artificial sequence
  SiRNA target sequence
taaaagttcatcgatatcgg

SEQ ID NO: 109135 - DNA, 20 bp, Artificial sequence
  SiRNA target sequence
aaaagttcatcgatatcggg

SEQ ID NO: 109136 - DNA, 20 bp, Artificial sequence
  SiRNA target sequence
aaagttcatcgatatcgggt

SEQ ID NO: 109137 - DNA, 20 bp, Artificial sequence
  SiRNA target sequence
aagttcatcgatatcgggtt

SEQ ID NO: 109138 - DNA, 20 bp, Artificial sequence
  SiRNA target sequence
agttcatcgatatcgggttc

SEQ ID NO: 109139 - DNA, 20 bp, Artificial sequence
  SiRNA target sequence
gttcatcgatatcgggttct

SEQ ID NO: 109140 - DNA, 20 bp, Artificial sequence
  SiRNA target sequence
ttcatcgatatcgggttctt

SEQ ID NO: 109141 - DNA, 20 bp, Artificial sequence
  SiRNA target sequence
tcatcgatatcgggttcttt

SEQ ID NO: 109142 - DNA, 20 bp, Artificial sequence
  SiRNA target sequence
catcgatatcgggttcttta

SEQ ID NO: 109143 - DNA, 20 bp, Artificial sequence
  SiRNA target sequence
atcgatatcgggttctttag

SEQ ID NO: 109144 - DNA, 20 bp, Artificial sequence
  SiRNA target sequence
tcgatatcgggttctttaga

SEQ ID NO: 109145 - DNA, 20 bp, Artificial sequence
  SiRNA target sequence
cgatatcgggttctttagaa

SEQ ID NO: 109146 - DNA, 20 bp, Artificial sequence
  SiRNA target sequence
gatatcgggttctttagaaa

SEQ ID NO: 109147 - DNA, 20 bp, Artificial sequence
  SiRNA target sequence
atatcgggttctttagaaaa

SEQ ID NO: 109148 - DNA, 20 bp, Artificial sequence
  SiRNA target sequence
tatcgggttctttagaaaaa

SEQ ID NO: 109149 - DNA, 20 bp, Artificial sequence
  SiRNA target sequence
atcgggttctttagaaaaaa

SEQ ID NO: 109150 - DNA, 20 bp, Artificial sequence
  SiRNA target sequence
tcgggttctttagaaaaaat

SEQ ID NO: 109151 - DNA, 20 bp, Artificial sequence
  SiRNA target sequence
cgggttctttagaaaaaata

SEQ ID NO: 109152 - DNA, 20 bp, Artificial sequence
  SiRNA target sequence
gggttctttagaaaaaataa

SEQ ID NO: 109153 - DNA, 20 bp, Artificial sequence
  SiRNA target sequence
ggttctttagaaaaaataac

SEQ ID NO: 109154 - DNA, 20 bp, Artificial sequence
  SiRNA target sequence
gttctttagaaaaaataact

SEQ ID NO: 109155 - DNA, 20 bp, Artificial sequence
  SiRNA target sequence
ttctttagaaaaaataactt

SEQ ID NO: 109156 - DNA, 20 bp, Artificial sequence
  SiRNA target sequence
tctttagaaaaaataacttt

SEQ ID NO: 109157 - DNA, 20 bp, Artificial sequence
  SiRNA target sequence
ctttagaaaaaataactttt

SEQ ID NO: 109158 - DNA, 20 bp, Artificial sequence
  SiRNA target sequence
tttagaaaaaataacttttt

SEQ ID NO: 109159 - DNA, 20 bp, Artificial sequence
  SiRNA target sequence
ttagaaaaaataactttttt

SEQ ID NO: 109160 - DNA, 20 bp, Artificial sequence
  SiRNA target sequence
tagaaaaaataactttttta

SEQ ID NO: 109161 - DNA, 20 bp, Artificial sequence
  SiRNA target sequence
agaaaaaataacttttttaa

SEQ ID NO: 109162 - DNA, 20 bp, Artificial sequence
  SiRNA target sequence
gaaaaaataacttttttaac

SEQ ID NO: 109163 - DNA, 20 bp, Artificial sequence
  SiRNA target sequence
aaaaaataacttttttaaca

SEQ ID NO: 109164 - DNA, 20 bp, Artificial sequence
  SiRNA target sequence
aaaaataacttttttaacac

SEQ ID NO: 109165 - DNA, 20 bp, Artificial sequence
  SiRNA target sequence
aaaataacttttttaacacc

SEQ ID NO: 109166 - DNA, 20 bp, Artificial sequence
  SiRNA target sequence
aaataacttttttaacacct

SEQ ID NO: 109167 - DNA, 20 bp, Artificial sequence
  SiRNA target sequence
aataacttttttaacacctt

SEQ ID NO: 109168 - DNA, 20 bp, Artificial sequence
  SiRNA target sequence
ataacttttttaacaccttc

SEQ ID NO: 109169 - DNA, 20 bp, Artificial sequence
  SiRNA target sequence
taacttttttaacaccttct

SEQ ID NO: 109170 - DNA, 20 bp, Artificial sequence
  SiRNA target sequence
aacttttttaacaccttctt

SEQ ID NO: 109171 - DNA, 20 bp, Artificial sequence
  SiRNA target sequence
acttttttaacaccttcttc

SEQ ID NO: 109172 - DNA, 20 bp, Artificial sequence
  SiRNA target sequence
cttttttaacaccttcttca

SEQ ID NO: 109173 - DNA, 20 bp, Artificial sequence
  SiRNA target sequence
ttttttaacaccttcttcaa

SEQ ID NO: 109174 - DNA, 20 bp, Artificial sequence
  SiRNA target sequence
tttttaacaccttcttcaaa

SEQ ID NO: 109175 - DNA, 20 bp, Artificial sequence
  SiRNA target sequence
ttttaacaccttcttcaaag

SEQ ID NO: 109176 - DNA, 20 bp, Artificial sequence
  SiRNA target sequence
tttaacaccttcttcaaagc

SEQ ID NO: 109177 - DNA, 20 bp, Artificial sequence
  SiRNA target sequence
ttaacaccttcttcaaagca

SEQ ID NO: 109178 - DNA, 20 bp, Artificial sequence
  SiRNA target sequence
taacaccttcttcaaagcag

SEQ ID NO: 109179 - DNA, 20 bp, Artificial sequence
  SiRNA target sequence
aacaccttcttcaaagcagg

SEQ ID NO: 109180 - DNA, 20 bp, Artificial sequence
  SiRNA target sequence
acaccttcttcaaagcagga

SEQ ID NO: 109181 - DNA, 20 bp, Artificial sequence
  SiRNA target sequence
caccttcttcaaagcaggaa

SEQ ID NO: 109182 - DNA, 20 bp, Artificial sequence
  SiRNA target sequence
accttcttcaaagcaggaaa

SEQ ID NO: 109183 - DNA, 20 bp, Artificial sequence
  SiRNA target sequence
ccttcttcaaagcaggaaat

SEQ ID NO: 109184 - DNA, 20 bp, Artificial sequence
  SiRNA target sequence
cttcttcaaagcaggaaatt

SEQ ID NO: 109185 - DNA, 20 bp, Artificial sequence
  SiRNA target sequence
ttcttcaaagcaggaaatta

SEQ ID NO: 109186 - DNA, 20 bp, Artificial sequence
  SiRNA target sequence
tcttcaaagcaggaaattac

SEQ ID NO: 109187 - DNA, 20 bp, Artificial sequence
  SiRNA target sequence
cttcaaagcaggaaattacc

SEQ ID NO: 109188 - DNA, 20 bp, Artificial sequence
  SiRNA target sequence
ttcaaagcaggaaattacct

SEQ ID NO: 109189 - DNA, 20 bp, Artificial sequence
  SiRNA target sequence
tcaaagcaggaaattacctc

SEQ ID NO: 109190 - DNA, 20 bp, Artificial sequence
  SiRNA target sequence
caaagcaggaaattacctca

SEQ ID NO: 109191 - DNA, 20 bp, Artificial sequence
  SiRNA target sequence
aaagcaggaaattacctcat

SEQ ID NO: 109192 - DNA, 20 bp, Artificial sequence
  SiRNA target sequence
aagcaggaaattacctcatc

SEQ ID NO: 109193 - DNA, 20 bp, Artificial sequence
  SiRNA target sequence
agcaggaaattacctcatct

SEQ ID NO: 109194 - DNA, 20 bp, Artificial sequence
  SiRNA target sequence
gcaggaaattacctcatctt

SEQ ID NO: 109195 - DNA, 20 bp, Artificial sequence
  SiRNA target sequence
caggaaattacctcatcttc

SEQ ID NO: 109196 - DNA, 20 bp, Artificial sequence
  SiRNA target sequence
aggaaattacctcatcttcg

SEQ ID NO: 109197 - DNA, 20 bp, Artificial sequence
  SiRNA target sequence
ggaaattacctcatcttcga

SEQ ID NO: 109198 - DNA, 20 bp, Artificial sequence
  SiRNA target sequence
gaaattacctcatcttcgat

SEQ ID NO: 109199 - DNA, 20 bp, Artificial sequence
  SiRNA target sequence
aaattacctcatcttcgata

SEQ ID NO: 109200 - DNA, 20 bp, Artificial sequence
  SiRNA target sequence
aattacctcatcttcgataa

SEQ ID NO: 109201 - DNA, 20 bp, Artificial sequence
  SiRNA target sequence
attacctcatcttcgataat

SEQ ID NO: 109202 - DNA, 20 bp, Artificial sequence
  SiRNA target sequence
ttacctcatcttcgataatt

SEQ ID NO: 109203 - DNA, 20 bp, Artificial sequence
  SiRNA target sequence
tacctcatcttcgataattt

SEQ ID NO: 109204 - DNA, 20 bp, Artificial sequence
  SiRNA target sequence
acctcatcttcgataatttt

SEQ ID NO: 109205 - DNA, 20 bp, Artificial sequence
  SiRNA target sequence
cctcatcttcgataattttt

SEQ ID NO: 109206 - DNA, 20 bp, Artificial sequence
  SiRNA target sequence
ctcatcttcgataattttta

SEQ ID NO: 109207 - DNA, 20 bp, Artificial sequence
  SiRNA target sequence
tcatcttcgataatttttac

SEQ ID NO: 109208 - DNA, 20 bp, Artificial sequence
  SiRNA target sequence
catcttcgataatttttact

SEQ ID NO: 109209 - DNA, 20 bp, Artificial sequence
  SiRNA target sequence
atcttcgataatttttactt

SEQ ID NO: 109210 - DNA, 20 bp, Artificial sequence
  SiRNA target sequence
tcttcgataatttttacttc

SEQ ID NO: 109211 - DNA, 20 bp, Artificial sequence
  SiRNA target sequence
cttcgataatttttacttct

SEQ ID NO: 109212 - DNA, 20 bp, Artificial sequence
  SiRNA target sequence
ttcgataatttttacttctt

SEQ ID NO: 109213 - DNA, 20 bp, Artificial sequence
  SiRNA target sequence
tcgataatttttacttcttc

SEQ ID NO: 109214 - DNA, 20 bp, Artificial sequence
  SiRNA target sequence
cgataatttttacttcttca

SEQ ID NO: 109215 - DNA, 20 bp, Artificial sequence
  SiRNA target sequence
gataatttttacttcttcac

SEQ ID NO: 109216 - DNA, 20 bp, Artificial sequence
  SiRNA target sequence
ataatttttacttcttcaca

SEQ ID NO: 109217 - DNA, 20 bp, Artificial sequence
  SiRNA target sequence
taatttttacttcttcacaa

SEQ ID NO: 109218 - DNA, 20 bp, Artificial sequence
  SiRNA target sequence
aatttttacttcttcacaag

SEQ ID NO: 109219 - DNA, 20 bp, Artificial sequence
  SiRNA target sequence
atttttacttcttcacaagt

SEQ ID NO: 109220 - DNA, 20 bp, Artificial sequence
  SiRNA target sequence
tttttacttcttcacaagtc

SEQ ID NO: 109221 - DNA, 20 bp, Artificial sequence
  SiRNA target sequence
ttttacttcttcacaagtcg

SEQ ID NO: 109222 - DNA, 20 bp, Artificial sequence
  SiRNA target sequence
tttacttcttcacaagtcgc

SEQ ID NO: 109223 - DNA, 20 bp, Artificial sequence
  SiRNA target sequence
ttacttcttcacaagtcgca

SEQ ID NO: 109224 - DNA, 20 bp, Artificial sequence
  SiRNA target sequence
tacttcttcacaagtcgcaa

SEQ ID NO: 109225 - DNA, 20 bp, Artificial sequence
  SiRNA target sequence
acttcttcacaagtcgcaaa

SEQ ID NO: 109226 - DNA, 20 bp, Artificial sequence
  SiRNA target sequence
cttcttcacaagtcgcaaat

SEQ ID NO: 109227 - DNA, 20 bp, Artificial sequence
  SiRNA target sequence
ttcttcacaagtcgcaaatt

SEQ ID NO: 109228 - DNA, 20 bp, Artificial sequence
  SiRNA target sequence
tcttcacaagtcgcaaattt

SEQ ID NO: 109229 - DNA, 20 bp, Artificial sequence
  SiRNA target sequence
cttcacaagtcgcaaatttt

SEQ ID NO: 109230 - DNA, 20 bp, Artificial sequence
  SiRNA target sequence
ttcacaagtcgcaaattttt

SEQ ID NO: 109231 - DNA, 20 bp, Artificial sequence
  SiRNA target sequence
tcacaagtcgcaaatttttg

SEQ ID NO: 109232 - DNA, 20 bp, Artificial sequence
  SiRNA target sequence
cacaagtcgcaaatttttgt

SEQ ID NO: 109233 - DNA, 20 bp, Artificial sequence
  SiRNA target sequence
acaagtcgcaaatttttgta

SEQ ID NO: 109234 - DNA, 20 bp, Artificial sequence
  SiRNA target sequence
caagtcgcaaatttttgtaa

SEQ ID NO: 109235 - DNA, 20 bp, Artificial sequence
  SiRNA target sequence
aagtcgcaaatttttgtaag

SEQ ID NO: 109236 - DNA, 20 bp, Artificial sequence
  SiRNA target sequence
agtcgcaaatttttgtaagt

SEQ ID NO: 109237 - DNA, 20 bp, Artificial sequence
  SiRNA target sequence
gtcgcaaatttttgtaagtt

SEQ ID NO: 109238 - DNA, 20 bp, Artificial sequence
  SiRNA target sequence
tcgcaaatttttgtaagtta

SEQ ID NO: 109239 - DNA, 20 bp, Artificial sequence
  SiRNA target sequence
cgcaaatttttgtaagttat

SEQ ID NO: 109240 - DNA, 20 bp, Artificial sequence
  SiRNA target sequence
gcaaatttttgtaagttatt

SEQ ID NO: 109241 - DNA, 20 bp, Artificial sequence
  SiRNA target sequence
caaatttttgtaagttattt

SEQ ID NO: 109242 - DNA, 20 bp, Artificial sequence
  SiRNA target sequence
aaatttttgtaagttatttt

SEQ ID NO: 109243 - DNA, 20 bp, Artificial sequence
  SiRNA target sequence
aatttttgtaagttattttt

SEQ ID NO: 109244 - DNA, 20 bp, Artificial sequence
  SiRNA target sequence
atttttgtaagttatttttt

SEQ ID NO: 109245 - DNA, 20 bp, Artificial sequence
  SiRNA target sequence
tttttgtaagttattttttg

SEQ ID NO: 109246 - DNA, 20 bp, Artificial sequence
  SiRNA target sequence
ttttgtaagttattttttgc

SEQ ID NO: 109247 - DNA, 20 bp, Artificial sequence
  SiRNA target sequence
tttgtaagttattttttgct

SEQ ID NO: 109248 - DNA, 20 bp, Artificial sequence
  SiRNA target sequence
ttgtaagttattttttgctt

SEQ ID NO: 109249 - DNA, 20 bp, Artificial sequence
  SiRNA target sequence
tgtaagttattttttgcttc

SEQ ID NO: 109250 - DNA, 20 bp, Artificial sequence
  SiRNA target sequence
gtaagttattttttgcttct

SEQ ID NO: 109251 - DNA, 20 bp, Artificial sequence
  SiRNA target sequence
taagttattttttgcttctt

SEQ ID NO: 109252 - DNA, 20 bp, Artificial sequence
  SiRNA target sequence
aagttattttttgcttcttt

SEQ ID NO: 109253 - DNA, 20 bp, Artificial sequence
  SiRNA target sequence
agttattttttgcttcttta

SEQ ID NO: 109254 - DNA, 20 bp, Artificial sequence
  SiRNA target sequence
gttattttttgcttctttaa

SEQ ID NO: 109255 - DNA, 20 bp, Artificial sequence
  SiRNA target sequence
ttattttttgcttctttaag

SEQ ID NO: 109256 - DNA, 20 bp, Artificial sequence
  SiRNA target sequence
tattttttgcttctttaagg

SEQ ID NO: 109257 - DNA, 20 bp, Artificial sequence
  SiRNA target sequence
attttttgcttctttaaggc

SEQ ID NO: 109258 - DNA, 20 bp, Artificial sequence
  SiRNA target sequence
ttttttgcttctttaaggca

SEQ ID NO: 109259 - DNA, 20 bp, Artificial sequence
  SiRNA target sequence
tttttgcttctttaaggcaa

SEQ ID NO: 109260 - DNA, 20 bp, Artificial sequence
  SiRNA target sequence
ttttgcttctttaaggcaat

SEQ ID NO: 109261 - DNA, 20 bp, Artificial sequence
  SiRNA target sequence
tttgcttctttaaggcaatc

SEQ ID NO: 109262 - DNA, 20 bp, Artificial sequence
  SiRNA target sequence
ttgcttctttaaggcaatca

SEQ ID NO: 109263 - DNA, 20 bp, Artificial sequence
  SiRNA target sequence
tgcttctttaaggcaatcat

SEQ ID NO: 109264 - DNA, 20 bp, Artificial sequence
  SiRNA target sequence
gcttctttaaggcaatcatt

SEQ ID NO: 109265 - DNA, 20 bp, Artificial sequence
  SiRNA target sequence
cttctttaaggcaatcatta

SEQ ID NO: 109266 - DNA, 20 bp, Artificial sequence
  SiRNA target sequence
ttctttaaggcaatcattat

SEQ ID NO: 109267 - DNA, 20 bp, Artificial sequence
  SiRNA target sequence
tctttaaggcaatcattatt

SEQ ID NO: 109268 - DNA, 20 bp, Artificial sequence
  SiRNA target sequence
ctttaaggcaatcattattt

SEQ ID NO: 109269 - DNA, 20 bp, Artificial sequence
  SiRNA target sequence
tttaaggcaatcattatttt

SEQ ID NO: 109270 - DNA, 20 bp, Artificial sequence
  SiRNA target sequence
ttaaggcaatcattattttt

SEQ ID NO: 109271 - DNA, 20 bp, Artificial sequence
  SiRNA target sequence
taaggcaatcattatttttt

SEQ ID NO: 109272 - DNA, 20 bp, Artificial sequence
  SiRNA target sequence
aaggcaatcattattttttt

SEQ ID NO: 109273 - DNA, 20 bp, Artificial sequence
  SiRNA target sequence
aggcaatcattatttttttt

SEQ ID NO: 109274 - DNA, 20 bp, Artificial sequence
  SiRNA target sequence
ggcaatcattattttttttt

SEQ ID NO: 109275 - DNA, 20 bp, Artificial sequence
  SiRNA target sequence
gcaatcattatttttttttt

SEQ ID NO: 109276 - DNA, 20 bp, Artificial sequence
  SiRNA target sequence
caatcattattttttttttc

SEQ ID NO: 109277 - DNA, 20 bp, Artificial sequence
  SiRNA target sequence
aatcattattttttttttca

SEQ ID NO: 109278 - DNA, 20 bp, Artificial sequence
  SiRNA target sequence
atcattattttttttttcat

SEQ ID NO: 109279 - DNA, 20 bp, Artificial sequence
  SiRNA target sequence
tcattattttttttttcatt

SEQ ID NO: 109280 - DNA, 20 bp, Artificial sequence
  SiRNA target sequence
cattattttttttttcatta

SEQ ID NO: 109281 - DNA, 20 bp, Artificial sequence
  SiRNA target sequence
attattttttttttcattaa

SEQ ID NO: 109282 - DNA, 20 bp, Artificial sequence
  SiRNA target sequence
ttattttttttttcattaat

SEQ ID NO: 109283 - DNA, 20 bp, Artificial sequence
  SiRNA target sequence
tattttttttttcattaatt

SEQ ID NO: 109284 - DNA, 20 bp, Artificial sequence
  SiRNA target sequence
attttttttttcattaattt

SEQ ID NO: 109285 - DNA, 20 bp, Artificial sequence
  SiRNA target sequence
ttttttttttcattaatttc

SEQ ID NO: 109286 - DNA, 20 bp, Artificial sequence
  SiRNA target sequence
tttttttttcattaatttcc

SEQ ID NO: 109287 - DNA, 20 bp, Artificial sequence
  SiRNA target sequence
ttttttttcattaatttcct

SEQ ID NO: 109288 - DNA, 20 bp, Artificial sequence
  SiRNA target sequence
tttttttcattaatttcctc

SEQ ID NO: 109289 - DNA, 20 bp, Artificial sequence
  SiRNA target sequence
ttttttcattaatttcctcc

SEQ ID NO: 109290 - DNA, 20 bp, Artificial sequence
  SiRNA target sequence
tttttcattaatttcctccg

SEQ ID NO: 109291 - DNA, 20 bp, Artificial sequence
  SiRNA target sequence
ttttcattaatttcctccgt

SEQ ID NO: 109292 - DNA, 20 bp, Artificial sequence
  SiRNA target sequence
tttcattaatttcctccgtg

SEQ ID NO: 109293 - DNA, 20 bp, Artificial sequence
  SiRNA target sequence
ttcattaatttcctccgtgg

SEQ ID NO: 109294 - DNA, 20 bp, Artificial sequence
  SiRNA target sequence
tcattaatttcctccgtgga

SEQ ID NO: 109295 - DNA, 20 bp, Artificial sequence
  SiRNA target sequence
cattaatttcctccgtggat

SEQ ID NO: 109296 - DNA, 20 bp, Artificial sequence
  SiRNA target sequence
attaatttcctccgtggatc

SEQ ID NO: 109297 - DNA, 20 bp, Artificial sequence
  SiRNA target sequence
ttaatttcctccgtggatct

SEQ ID NO: 109298 - DNA, 20 bp, Artificial sequence
  SiRNA target sequence
taatttcctccgtggatctg

SEQ ID NO: 109299 - DNA, 20 bp, Artificial sequence
  SiRNA target sequence
aatttcctccgtggatctgt

SEQ ID NO: 109300 - DNA, 20 bp, Artificial sequence
  SiRNA target sequence
atttcctccgtggatctgta

SEQ ID NO: 109301 - DNA, 20 bp, Artificial sequence
  SiRNA target sequence
tttcctccgtggatctgtaa

SEQ ID NO: 109302 - DNA, 20 bp, Artificial sequence
  SiRNA target sequence
ttcctccgtggatctgtaaa

SEQ ID NO: 109303 - DNA, 20 bp, Artificial sequence
  SiRNA target sequence
tcctccgtggatctgtaaaa

SEQ ID NO: 109304 - DNA, 20 bp, Artificial sequence
  SiRNA target sequence
cctccgtggatctgtaaaaa

SEQ ID NO: 109305 - DNA, 20 bp, Artificial sequence
  SiRNA target sequence
ctccgtggatctgtaaaaat

SEQ ID NO: 109306 - DNA, 20 bp, Artificial sequence
  SiRNA target sequence
tccgtggatctgtaaaaatc

SEQ ID NO: 109307 - DNA, 20 bp, Artificial sequence
  SiRNA target sequence
ccgtggatctgtaaaaatcg

SEQ ID NO: 109308 - DNA, 20 bp, Artificial sequence
  SiRNA target sequence
cgtggatctgtaaaaatcgt

SEQ ID NO: 109309 - DNA, 20 bp, Artificial sequence
  SiRNA target sequence
gtggatctgtaaaaatcgtt

SEQ ID NO: 109310 - DNA, 20 bp, Artificial sequence
  SiRNA target sequence
tggatctgtaaaaatcgtta

SEQ ID NO: 109311 - DNA, 20 bp, Artificial sequence
  SiRNA target sequence
ggatctgtaaaaatcgttaa

SEQ ID NO: 109312 - DNA, 20 bp, Artificial sequence
  SiRNA target sequence
gatctgtaaaaatcgttaac

SEQ ID NO: 109313 - DNA, 20 bp, Artificial sequence
  SiRNA target sequence
atctgtaaaaatcgttaaca

SEQ ID NO: 109314 - DNA, 20 bp, Artificial sequence
  SiRNA target sequence
tctgtaaaaatcgttaacat

SEQ ID NO: 109315 - DNA, 20 bp, Artificial sequence
  SiRNA target sequence
ctgtaaaaatcgttaacatc

SEQ ID NO: 109316 - DNA, 20 bp, Artificial sequence
  SiRNA target sequence
tgtaaaaatcgttaacatct

SEQ ID NO: 109317 - DNA, 20 bp, Artificial sequence
  SiRNA target sequence
gtaaaaatcgttaacatcta

SEQ ID NO: 109318 - DNA, 20 bp, Artificial sequence
  SiRNA target sequence
taaaaatcgttaacatctaa

SEQ ID NO: 109319 - DNA, 20 bp, Artificial sequence
  SiRNA target sequence
aaaaatcgttaacatctaaa

SEQ ID NO: 109320 - DNA, 20 bp, Artificial sequence
  SiRNA target sequence
aaaatcgttaacatctaaac

SEQ ID NO: 109321 - DNA, 20 bp, Artificial sequence
  SiRNA target sequence
aaatcgttaacatctaaaca

SEQ ID NO: 109322 - DNA, 20 bp, Artificial sequence
  SiRNA target sequence
aatcgttaacatctaaacag

SEQ ID NO: 109323 - DNA, 20 bp, Artificial sequence
  SiRNA target sequence
atcgttaacatctaaacagg

SEQ ID NO: 109324 - DNA, 20 bp, Artificial sequence
  SiRNA target sequence
tcgttaacatctaaacagga

SEQ ID NO: 109325 - DNA, 20 bp, Artificial sequence
  SiRNA target sequence
cgttaacatctaaacaggag

SEQ ID NO: 109326 - DNA, 20 bp, Artificial sequence
  SiRNA target sequence
gttaacatctaaacaggagt

SEQ ID NO: 109327 - DNA, 20 bp, Artificial sequence
  SiRNA target sequence
ttaacatctaaacaggagtg

SEQ ID NO: 109328 - DNA, 20 bp, Artificial sequence
  SiRNA target sequence
taacatctaaacaggagtgc

SEQ ID NO: 109329 - DNA, 20 bp, Artificial sequence
  SiRNA target sequence
aacatctaaacaggagtgcc

SEQ ID NO: 109330 - DNA, 20 bp, Artificial sequence
  SiRNA target sequence
acatctaaacaggagtgccc

SEQ ID NO: 109331 - DNA, 20 bp, Artificial sequence
  SiRNA target sequence
catctaaacaggagtgccca

SEQ ID NO: 109332 - DNA, 20 bp, Artificial sequence
  SiRNA target sequence
atctaaacaggagtgcccac

SEQ ID NO: 109333 - DNA, 20 bp, Artificial sequence
  SiRNA target sequence
tctaaacaggagtgcccaca

SEQ ID NO: 109334 - DNA, 20 bp, Artificial sequence
  SiRNA target sequence
ctaaacaggagtgcccacat

SEQ ID NO: 109335 - DNA, 20 bp, Artificial sequence
  SiRNA target sequence
taaacaggagtgcccacatg

SEQ ID NO: 109336 - DNA, 20 bp, Artificial sequence
  SiRNA target sequence
aaacaggagtgcccacatgt

SEQ ID NO: 109337 - DNA, 20 bp, Artificial sequence
  SiRNA target sequence
aacaggagtgcccacatgtc

SEQ ID NO: 109338 - DNA, 20 bp, Artificial sequence
  SiRNA target sequence
acaggagtgcccacatgtcc

SEQ ID NO: 109339 - DNA, 20 bp, Artificial sequence
  SiRNA target sequence
caggagtgcccacatgtcct

SEQ ID NO: 109340 - DNA, 20 bp, Artificial sequence
  SiRNA target sequence
aggagtgcccacatgtcctg

SEQ ID NO: 109341 - DNA, 20 bp, Artificial sequence
  SiRNA target sequence
ggagtgcccacatgtcctgt

SEQ ID NO: 109342 - DNA, 20 bp, Artificial sequence
  SiRNA target sequence
gagtgcccacatgtcctgta

SEQ ID NO: 109343 - DNA, 20 bp, Artificial sequence
  SiRNA target sequence
agtgcccacatgtcctgtac

SEQ ID NO: 109344 - DNA, 20 bp, Artificial sequence
  SiRNA target sequence
gtgcccacatgtcctgtacg

SEQ ID NO: 109345 - DNA, 20 bp, Artificial sequence
  SiRNA target sequence
tgcccacatgtcctgtacgt

SEQ ID NO: 109346 - DNA, 20 bp, Artificial sequence
  SiRNA target sequence
gcccacatgtcctgtacgta

SEQ ID NO: 109347 - DNA, 20 bp, Artificial sequence
  SiRNA target sequence
cccacatgtcctgtacgtat

SEQ ID NO: 109348 - DNA, 20 bp, Artificial sequence
  SiRNA target sequence
ccacatgtcctgtacgtatc

SEQ ID NO: 109349 - DNA, 20 bp, Artificial sequence
  SiRNA target sequence
cacatgtcctgtacgtatca

SEQ ID NO: 109350 - DNA, 20 bp, Artificial sequence
  SiRNA target sequence
acatgtcctgtacgtatcaa

SEQ ID NO: 109351 - DNA, 20 bp, Artificial sequence
  SiRNA target sequence
catgtcctgtacgtatcaat

SEQ ID NO: 109352 - DNA, 20 bp, Artificial sequence
  SiRNA target sequence
atgtcctgtacgtatcaatt

SEQ ID NO: 109353 - DNA, 20 bp, Artificial sequence
  SiRNA target sequence
tgtcctgtacgtatcaattt

SEQ ID NO: 109354 - DNA, 20 bp, Artificial sequence
  SiRNA target sequence
gtcctgtacgtatcaatttg

SEQ ID NO: 109355 - DNA, 20 bp, Artificial sequence
  SiRNA target sequence
tcctgtacgtatcaatttgc

SEQ ID NO: 109356 - DNA, 20 bp, Artificial sequence
  SiRNA target sequence
cctgtacgtatcaatttgca

SEQ ID NO: 109357 - DNA, 20 bp, Artificial sequence
  SiRNA target sequence
ctgtacgtatcaatttgcaa

SEQ ID NO: 109358 - DNA, 20 bp, Artificial sequence
  SiRNA target sequence
tgtacgtatcaatttgcaag

SEQ ID NO: 109359 - DNA, 20 bp, Artificial sequence
  SiRNA target sequence
gtacgtatcaatttgcaaga

SEQ ID NO: 109360 - DNA, 20 bp, Artificial sequence
  SiRNA target sequence
tacgtatcaatttgcaagat

SEQ ID NO: 109361 - DNA, 20 bp, Artificial sequence
  SiRNA target sequence
acgtatcaatttgcaagatg

SEQ ID NO: 109362 - DNA, 20 bp, Artificial sequence
  SiRNA target sequence
cgtatcaatttgcaagatga

SEQ ID NO: 109363 - DNA, 20 bp, Artificial sequence
  SiRNA target sequence
gtatcaatttgcaagatgat

SEQ ID NO: 109364 - DNA, 20 bp, Artificial sequence
  SiRNA target sequence
tatcaatttgcaagatgata

SEQ ID NO: 109365 - DNA, 20 bp, Artificial sequence
  SiRNA target sequence
atcaatttgcaagatgatag

SEQ ID NO: 109366 - DNA, 20 bp, Artificial sequence
  SiRNA target sequence
tcaatttgcaagatgatagg

SEQ ID NO: 109367 - DNA, 20 bp, Artificial sequence
  SiRNA target sequence
caatttgcaagatgataggt

SEQ ID NO: 109368 - DNA, 20 bp, Artificial sequence
  SiRNA target sequence
aatttgcaagatgataggtc

SEQ ID NO: 109369 - DNA, 20 bp, Artificial sequence
  SiRNA target sequence
atttgcaagatgataggtcc

SEQ ID NO: 109370 - DNA, 20 bp, Artificial sequence
  SiRNA target sequence
tttgcaagatgataggtcct

SEQ ID NO: 109371 - DNA, 20 bp, Artificial sequence
  SiRNA target sequence
ttgcaagatgataggtcctt

SEQ ID NO: 109372 - DNA, 20 bp, Artificial sequence
  SiRNA target sequence
tgcaagatgataggtccttt

SEQ ID NO: 109373 - DNA, 20 bp, Artificial sequence
  SiRNA target sequence
gcaagatgataggtcctttt

SEQ ID NO: 109374 - DNA, 20 bp, Artificial sequence
  SiRNA target sequence
caagatgataggtccttttt

SEQ ID NO: 109375 - DNA, 20 bp, Artificial sequence
  SiRNA target sequence
aagatgataggtcctttttc

SEQ ID NO: 109376 - DNA, 20 bp, Artificial sequence
  SiRNA target sequence
agatgataggtcctttttct

SEQ ID NO: 109377 - DNA, 20 bp, Artificial sequence
  SiRNA target sequence
gatgataggtcctttttcta

SEQ ID NO: 109378 - DNA, 20 bp, Artificial sequence
  SiRNA target sequence
atgataggtcctttttctat

SEQ ID NO: 109379 - DNA, 20 bp, Artificial sequence
  SiRNA target sequence
tgataggtcctttttctatt

SEQ ID NO: 109380 - DNA, 20 bp, Artificial sequence
  SiRNA target sequence
gataggtcctttttctattg

SEQ ID NO: 109381 - DNA, 20 bp, Artificial sequence
  SiRNA target sequence
ataggtcctttttctattgc

SEQ ID NO: 109382 - DNA, 20 bp, Artificial sequence
  SiRNA target sequence
taggtcctttttctattgca

SEQ ID NO: 109383 - DNA, 20 bp, Artificial sequence
  SiRNA target sequence
aggtcctttttctattgcat

SEQ ID NO: 109384 - DNA, 20 bp, Artificial sequence
  SiRNA target sequence
ggtcctttttctattgcatg

SEQ ID NO: 109385 - DNA, 20 bp, Artificial sequence
  SiRNA target sequence
gtcctttttctattgcatgt

SEQ ID NO: 109386 - DNA, 20 bp, Artificial sequence
  SiRNA target sequence
tcctttttctattgcatgtt

SEQ ID NO: 109387 - DNA, 20 bp, Artificial sequence
  SiRNA target sequence
cctttttctattgcatgttg

SEQ ID NO: 109388 - DNA, 20 bp, Artificial sequence
  SiRNA target sequence
ctttttctattgcatgttgt

SEQ ID NO: 109389 - DNA, 20 bp, Artificial sequence
  SiRNA target sequence
tttttctattgcatgttgtc

SEQ ID NO: 109390 - DNA, 20 bp, Artificial sequence
  SiRNA target sequence
ttttctattgcatgttgtct

SEQ ID NO: 109391 - DNA, 20 bp, Artificial sequence
  SiRNA target sequence
tttctattgcatgttgtcta

SEQ ID NO: 109392 - DNA, 20 bp, Artificial sequence
  SiRNA target sequence
ttctattgcatgttgtctag

SEQ ID NO: 109393 - DNA, 20 bp, Artificial sequence
  SiRNA target sequence
tctattgcatgttgtctagc

SEQ ID NO: 109394 - DNA, 20 bp, Artificial sequence
  SiRNA target sequence
ctattgcatgttgtctagca

SEQ ID NO: 109395 - DNA, 20 bp, Artificial sequence
  SiRNA target sequence
tattgcatgttgtctagcaa

SEQ ID NO: 109396 - DNA, 20 bp, Artificial sequence
  SiRNA target sequence
attgcatgttgtctagcaaa

SEQ ID NO: 109397 - DNA, 20 bp, Artificial sequence
  SiRNA target sequence
ttgcatgttgtctagcaaat

SEQ ID NO: 109398 - DNA, 20 bp, Artificial sequence
  SiRNA target sequence
tgcatgttgtctagcaaatg

SEQ ID NO: 109399 - DNA, 20 bp, Artificial sequence
  SiRNA target sequence
gcatgttgtctagcaaatgt

SEQ ID NO: 109400 - DNA, 20 bp, Artificial sequence
  SiRNA target sequence
catgttgtctagcaaatgta

SEQ ID NO: 109401 - DNA, 20 bp, Artificial sequence
  SiRNA target sequence
atgttgtctagcaaatgtaa

SEQ ID NO: 109402 - DNA, 20 bp, Artificial sequence
  SiRNA target sequence
tgttgtctagcaaatgtaaa

SEQ ID NO: 109403 - DNA, 20 bp, Artificial sequence
  SiRNA target sequence
gttgtctagcaaatgtaaat

SEQ ID NO: 109404 - DNA, 20 bp, Artificial sequence
  SiRNA target sequence
ttgtctagcaaatgtaaata

SEQ ID NO: 109405 - DNA, 20 bp, Artificial sequence
  SiRNA target sequence
tgtctagcaaatgtaaatac

SEQ ID NO: 109406 - DNA, 20 bp, Artificial sequence
  SiRNA target sequence
gtctagcaaatgtaaataca

SEQ ID NO: 109407 - DNA, 20 bp, Artificial sequence
  SiRNA target sequence
tctagcaaatgtaaatacat

SEQ ID NO: 109408 - DNA, 20 bp, Artificial sequence
  SiRNA target sequence
ctagcaaatgtaaatacatc

SEQ ID NO: 109409 - DNA, 20 bp, Artificial sequence
  SiRNA target sequence
tagcaaatgtaaatacatca

SEQ ID NO: 109410 - DNA, 20 bp, Artificial sequence
  SiRNA target sequence
agcaaatgtaaatacatcaa

SEQ ID NO: 109411 - DNA, 20 bp, Artificial sequence
  SiRNA target sequence
gcaaatgtaaatacatcaat

SEQ ID NO: 109412 - DNA, 20 bp, Artificial sequence
  SiRNA target sequence
caaatgtaaatacatcaatc

SEQ ID NO: 109413 - DNA, 20 bp, Artificial sequence
  SiRNA target sequence
aaatgtaaatacatcaatca

SEQ ID NO: 109414 - DNA, 20 bp, Artificial sequence
  SiRNA target sequence
aatgtaaatacatcaatcag

SEQ ID NO: 109415 - DNA, 20 bp, Artificial sequence
  SiRNA target sequence
atgtaaatacatcaatcagt

SEQ ID NO: 109416 - DNA, 20 bp, Artificial sequence
  SiRNA target sequence
tgtaaatacatcaatcagtt

SEQ ID NO: 109417 - DNA, 20 bp, Artificial sequence
  SiRNA target sequence
gtaaatacatcaatcagttg

SEQ ID NO: 109418 - DNA, 20 bp, Artificial sequence
  SiRNA target sequence
taaatacatcaatcagttga

SEQ ID NO: 109419 - DNA, 20 bp, Artificial sequence
  SiRNA target sequence
aaatacatcaatcagttgag

SEQ ID NO: 109420 - DNA, 20 bp, Artificial sequence
  SiRNA target sequence
aatacatcaatcagttgagt

SEQ ID NO: 109421 - DNA, 20 bp, Artificial sequence
  SiRNA target sequence
atacatcaatcagttgagtt

SEQ ID NO: 109422 - DNA, 20 bp, Artificial sequence
  SiRNA target sequence
tacatcaatcagttgagtta

SEQ ID NO: 109423 - DNA, 20 bp, Artificial sequence
  SiRNA target sequence
acatcaatcagttgagttat

SEQ ID NO: 109424 - DNA, 20 bp, Artificial sequence
  SiRNA target sequence
catcaatcagttgagttatg

SEQ ID NO: 109425 - DNA, 20 bp, Artificial sequence
  SiRNA target sequence
atcaatcagttgagttatgt

SEQ ID NO: 109426 - DNA, 20 bp, Artificial sequence
  SiRNA target sequence
tcaatcagttgagttatgtt

SEQ ID NO: 109427 - DNA, 20 bp, Artificial sequence
  SiRNA target sequence
caatcagttgagttatgttt

SEQ ID NO: 109428 - DNA, 20 bp, Artificial sequence
  SiRNA target sequence
aatcagttgagttatgtttt

SEQ ID NO: 109429 - DNA, 20 bp, Artificial sequence
  SiRNA target sequence
atcagttgagttatgttttt

SEQ ID NO: 109430 - DNA, 20 bp, Artificial sequence
  SiRNA target sequence
tcagttgagttatgttttta

SEQ ID NO: 109431 - DNA, 20 bp, Artificial sequence
  SiRNA target sequence
cagttgagttatgtttttat

SEQ ID NO: 109432 - DNA, 20 bp, Artificial sequence
  SiRNA target sequence
agttgagttatgtttttatc

SEQ ID NO: 109433 - DNA, 20 bp, Artificial sequence
  SiRNA target sequence
gttgagttatgtttttatct

SEQ ID NO: 109434 - DNA, 20 bp, Artificial sequence
  SiRNA target sequence
ttgagttatgtttttatctg

SEQ ID NO: 109435 - DNA, 20 bp, Artificial sequence
  SiRNA target sequence
tgagttatgtttttatctgt

SEQ ID NO: 109436 - DNA, 20 bp, Artificial sequence
  SiRNA target sequence
gagttatgtttttatctgta

SEQ ID NO: 109437 - DNA, 20 bp, Artificial sequence
  SiRNA target sequence
agttatgtttttatctgtaa

SEQ ID NO: 109438 - DNA, 20 bp, Artificial sequence
  SiRNA target sequence
gttatgtttttatctgtaag

SEQ ID NO: 109439 - DNA, 20 bp, Artificial sequence
  SiRNA target sequence
ttatgtttttatctgtaaga

SEQ ID NO: 109440 - DNA, 20 bp, Artificial sequence
  SiRNA target sequence
tatgtttttatctgtaagac

SEQ ID NO: 109441 - DNA, 20 bp, Artificial sequence
  SiRNA target sequence
atgtttttatctgtaagacg

SEQ ID NO: 109442 - DNA, 20 bp, Artificial sequence
  SiRNA target sequence
tgtttttatctgtaagacgt

SEQ ID NO: 109443 - DNA, 20 bp, Artificial sequence
  SiRNA target sequence
gtttttatctgtaagacgta

SEQ ID NO: 109444 - DNA, 20 bp, Artificial sequence
  SiRNA target sequence
tttttatctgtaagacgtat

SEQ ID NO: 109445 - DNA, 20 bp, Artificial sequence
  SiRNA target sequence
ttttatctgtaagacgtata

SEQ ID NO: 109446 - DNA, 20 bp, Artificial sequence
  SiRNA target sequence
tttatctgtaagacgtatac

SEQ ID NO: 109447 - DNA, 20 bp, Artificial sequence
  SiRNA target sequence
ttatctgtaagacgtatacc

SEQ ID NO: 109448 - DNA, 20 bp, Artificial sequence
  SiRNA target sequence
tatctgtaagacgtatacct

SEQ ID NO: 109449 - DNA, 20 bp, Artificial sequence
  SiRNA target sequence
atctgtaagacgtatacctg

SEQ ID NO: 109450 - DNA, 20 bp, Artificial sequence
  SiRNA target sequence
tctgtaagacgtatacctgg

SEQ ID NO: 109451 - DNA, 20 bp, Artificial sequence
  SiRNA target sequence
ctgtaagacgtatacctgga

SEQ ID NO: 109452 - DNA, 20 bp, Artificial sequence
  SiRNA target sequence
tgtaagacgtatacctggaa

SEQ ID NO: 109453 - DNA, 20 bp, Artificial sequence
  SiRNA target sequence
gtaagacgtatacctggaat

SEQ ID NO: 109454 - DNA, 20 bp, Artificial sequence
  SiRNA target sequence
taagacgtatacctggaata

SEQ ID NO: 109455 - DNA, 20 bp, Artificial sequence
  SiRNA target sequence
aagacgtatacctggaatat

SEQ ID NO: 109456 - DNA, 20 bp, Artificial sequence
  SiRNA target sequence
agacgtatacctggaatatt

SEQ ID NO: 109457 - DNA, 20 bp, Artificial sequence
  SiRNA target sequence
gacgtatacctggaatatta

SEQ ID NO: 109458 - DNA, 20 bp, Artificial sequence
  SiRNA target sequence
acgtatacctggaatattat

SEQ ID NO: 109459 - DNA, 20 bp, Artificial sequence
  SiRNA target sequence
cgtatacctggaatattata

SEQ ID NO: 109460 - DNA, 20 bp, Artificial sequence
  SiRNA target sequence
gtatacctggaatattatat

SEQ ID NO: 109461 - DNA, 20 bp, Artificial sequence
  SiRNA target sequence
tatacctggaatattatatc

SEQ ID NO: 109462 - DNA, 20 bp, Artificial sequence
  SiRNA target sequence
atacctggaatattatatcc

SEQ ID NO: 109463 - DNA, 20 bp, Artificial sequence
  SiRNA target sequence
tacctggaatattatatccc

SEQ ID NO: 109464 - DNA, 20 bp, Artificial sequence
  SiRNA target sequence
acctggaatattatatcccc

SEQ ID NO: 109465 - DNA, 20 bp, Artificial sequence
  SiRNA target sequence
cctggaatattatatcccct

SEQ ID NO: 109466 - DNA, 20 bp, Artificial sequence
  SiRNA target sequence
ctggaatattatatcccctt

SEQ ID NO: 109467 - DNA, 20 bp, Artificial sequence
  SiRNA target sequence
tggaatattatatccccttt

SEQ ID NO: 109468 - DNA, 20 bp, Artificial sequence
  SiRNA target sequence
ggaatattatatcccctttt

SEQ ID NO: 109469 - DNA, 20 bp, Artificial sequence
  SiRNA target sequence
gaatattatatcccctttta

SEQ ID NO: 109470 - DNA, 20 bp, Artificial sequence
  SiRNA target sequence
aatattatatccccttttaa

SEQ ID NO: 109471 - DNA, 20 bp, Artificial sequence
  SiRNA target sequence
atattatatccccttttaaa

SEQ ID NO: 109472 - DNA, 20 bp, Artificial sequence
  SiRNA target sequence
tattatatccccttttaaaa

SEQ ID NO: 109473 - DNA, 20 bp, Artificial sequence
  SiRNA target sequence
attatatccccttttaaaat

SEQ ID NO: 109474 - DNA, 20 bp, Artificial sequence
  SiRNA target sequence
ttatatccccttttaaaata

SEQ ID NO: 109475 - DNA, 20 bp, Artificial sequence
  SiRNA target sequence
tatatccccttttaaaatat

SEQ ID NO: 109476 - DNA, 20 bp, Artificial sequence
  SiRNA target sequence
atatccccttttaaaatatt

SEQ ID NO: 109477 - DNA, 20 bp, Artificial sequence
  SiRNA target sequence
tatccccttttaaaatattc

SEQ ID NO: 109478 - DNA, 20 bp, Artificial sequence
  SiRNA target sequence
atccccttttaaaatattca

SEQ ID NO: 109479 - DNA, 20 bp, Artificial sequence
  SiRNA target sequence
tccccttttaaaatattcag

SEQ ID NO: 109480 - DNA, 20 bp, Artificial sequence
  SiRNA target sequence
ccccttttaaaatattcagg

SEQ ID NO: 109481 - DNA, 20 bp, Artificial sequence
  SiRNA target sequence
cccttttaaaatattcagga

SEQ ID NO: 109482 - DNA, 20 bp, Artificial sequence
  SiRNA target sequence
ccttttaaaatattcaggat

SEQ ID NO: 109483 - DNA, 20 bp, Artificial sequence
  SiRNA target sequence
cttttaaaatattcaggata

SEQ ID NO: 109484 - DNA, 20 bp, Artificial sequence
  SiRNA target sequence
ttttaaaatattcaggatat

SEQ ID NO: 109485 - DNA, 20 bp, Artificial sequence
  SiRNA target sequence
tttaaaatattcaggatatg

SEQ ID NO: 109486 - DNA, 20 bp, Artificial sequence
  SiRNA target sequence
ttaaaatattcaggatatgt

SEQ ID NO: 109487 - DNA, 20 bp, Artificial sequence
  SiRNA target sequence
taaaatattcaggatatgta

SEQ ID NO: 109488 - DNA, 20 bp, Artificial sequence
  SiRNA target sequence
aaaatattcaggatatgtag

SEQ ID NO: 109489 - DNA, 20 bp, Artificial sequence
  SiRNA target sequence
aaatattcaggatatgtagt

SEQ ID NO: 109490 - DNA, 20 bp, Artificial sequence
  SiRNA target sequence
aatattcaggatatgtagtg

SEQ ID NO: 109491 - DNA, 20 bp, Artificial sequence
  SiRNA target sequence
atattcaggatatgtagtgg

SEQ ID NO: 109492 - DNA, 20 bp, Artificial sequence
  SiRNA target sequence
tattcaggatatgtagtgga

SEQ ID NO: 109493 - DNA, 20 bp, Artificial sequence
  SiRNA target sequence
attcaggatatgtagtggaa

SEQ ID NO: 109494 - DNA, 20 bp, Artificial sequence
  SiRNA target sequence
ttcaggatatgtagtggaat

SEQ ID NO: 109495 - DNA, 20 bp, Artificial sequence
  SiRNA target sequence
tcaggatatgtagtggaatt

SEQ ID NO: 109496 - DNA, 20 bp, Artificial sequence
  SiRNA target sequence
caggatatgtagtggaatta

SEQ ID NO: 109497 - DNA, 20 bp, Artificial sequence
  SiRNA target sequence
aggatatgtagtggaattac

SEQ ID NO: 109498 - DNA, 20 bp, Artificial sequence
  SiRNA target sequence
ggatatgtagtggaattact

SEQ ID NO: 109499 - DNA, 20 bp, Artificial sequence
  SiRNA target sequence
gatatgtagtggaattactt

SEQ ID NO: 109500 - DNA, 20 bp, Artificial sequence
  SiRNA target sequence
atatgtagtggaattacttt

SEQ ID NO: 109501 - DNA, 20 bp, Artificial sequence
  SiRNA target sequence
tatgtagtggaattactttc

SEQ ID NO: 109502 - DNA, 20 bp, Artificial sequence
  SiRNA target sequence
atgtagtggaattactttca

SEQ ID NO: 109503 - DNA, 20 bp, Artificial sequence
  SiRNA target sequence
tgtagtggaattactttcag

SEQ ID NO: 109504 - DNA, 20 bp, Artificial sequence
  SiRNA target sequence
gtagtggaattactttcagg

SEQ ID NO: 109505 - DNA, 20 bp, Artificial sequence
  SiRNA target sequence
tagtggaattactttcaggt

SEQ ID NO: 109506 - DNA, 20 bp, Artificial sequence
  SiRNA target sequence
agtggaattactttcaggtg

SEQ ID NO: 109507 - DNA, 20 bp, Artificial sequence
  SiRNA target sequence
gtggaattactttcaggtgt

SEQ ID NO: 109508 - DNA, 20 bp, Artificial sequence
  SiRNA target sequence
tggaattactttcaggtgtc

SEQ ID NO: 109509 - DNA, 20 bp, Artificial sequence
  SiRNA target sequence
ggaattactttcaggtgtcc

SEQ ID NO: 109510 - DNA, 20 bp, Artificial sequence
  SiRNA target sequence
gaattactttcaggtgtcca

SEQ ID NO: 109511 - DNA, 20 bp, Artificial sequence
  SiRNA target sequence
aattactttcaggtgtccac

SEQ ID NO: 109512 - DNA, 20 bp, Artificial sequence
  SiRNA target sequence
attactttcaggtgtccaca

SEQ ID NO: 109513 - DNA, 20 bp, Artificial sequence
  SiRNA target sequence
ttactttcaggtgtccacat

SEQ ID NO: 109514 - DNA, 20 bp, Artificial sequence
  SiRNA target sequence
tactttcaggtgtccacata

SEQ ID NO: 109515 - DNA, 20 bp, Artificial sequence
  SiRNA target sequence
actttcaggtgtccacatac

SEQ ID NO: 109516 - DNA, 20 bp, Artificial sequence
  SiRNA target sequence
ctttcaggtgtccacatact

SEQ ID NO: 109517 - DNA, 20 bp, Artificial sequence
  SiRNA target sequence
tttcaggtgtccacatacta

SEQ ID NO: 109518 - DNA, 20 bp, Artificial sequence
  SiRNA target sequence
ttcaggtgtccacatactat

SEQ ID NO: 109519 - DNA, 20 bp, Artificial sequence
  SiRNA target sequence
tcaggtgtccacatactata

SEQ ID NO: 109520 - DNA, 20 bp, Artificial sequence
  SiRNA target sequence
caggtgtccacatactataa

SEQ ID NO: 109521 - DNA, 20 bp, Artificial sequence
  SiRNA target sequence
aggtgtccacatactataat

SEQ ID NO: 109522 - DNA, 20 bp, Artificial sequence
  SiRNA target sequence
ggtgtccacatactataatg

SEQ ID NO: 109523 - DNA, 20 bp, Artificial sequence
  SiRNA target sequence
gtgtccacatactataatga

SEQ ID NO: 109524 - DNA, 20 bp, Artificial sequence
  SiRNA target sequence
tgtccacatactataatgat

SEQ ID NO: 109525 - DNA, 20 bp, Artificial sequence
  SiRNA target sequence
gtccacatactataatgatt

SEQ ID NO: 109526 - DNA, 20 bp, Artificial sequence
  SiRNA target sequence
tccacatactataatgatta

SEQ ID NO: 109527 - DNA, 20 bp, Artificial sequence
  SiRNA target sequence
ccacatactataatgattat

SEQ ID NO: 109528 - DNA, 20 bp, Artificial sequence
  SiRNA target sequence
cacatactataatgattatt

SEQ ID NO: 109529 - DNA, 20 bp, Artificial sequence
  SiRNA target sequence
acatactataatgattattt

SEQ ID NO: 109530 - DNA, 20 bp, Artificial sequence
  SiRNA target sequence
catactataatgattatttt

SEQ ID NO: 109531 - DNA, 20 bp, Artificial sequence
  SiRNA target sequence
atactataatgattattttc

SEQ ID NO: 109532 - DNA, 20 bp, Artificial sequence
  SiRNA target sequence
tactataatgattattttca

SEQ ID NO: 109533 - DNA, 20 bp, Artificial sequence
  SiRNA target sequence
actataatgattattttcac

SEQ ID NO: 109534 - DNA, 20 bp, Artificial sequence
  SiRNA target sequence
ctataatgattattttcaca

SEQ ID NO: 109535 - DNA, 20 bp, Artificial sequence
  SiRNA target sequence
tataatgattattttcacat

SEQ ID NO: 109536 - DNA, 20 bp, Artificial sequence
  SiRNA target sequence
ataatgattattttcacata

SEQ ID NO: 109537 - DNA, 20 bp, Artificial sequence
  SiRNA target sequence
taatgattattttcacatac

SEQ ID NO: 109538 - DNA, 20 bp, Artificial sequence
  SiRNA target sequence
aatgattattttcacataca

SEQ ID NO: 109539 - DNA, 20 bp, Artificial sequence
  SiRNA target sequence
atgattattttcacatacat

SEQ ID NO: 109540 - DNA, 20 bp, Artificial sequence
  SiRNA target sequence
tgattattttcacatacata

SEQ ID NO: 109541 - DNA, 20 bp, Artificial sequence
  SiRNA target sequence
gattattttcacatacataa

SEQ ID NO: 109542 - DNA, 20 bp, Artificial sequence
  SiRNA target sequence
attattttcacatacataaa

SEQ ID NO: 109543 - DNA, 20 bp, Artificial sequence
  SiRNA target sequence
ttattttcacatacataaac

SEQ ID NO: 109544 - DNA, 20 bp, Artificial sequence
  SiRNA target sequence
tattttcacatacataaacc

SEQ ID NO: 109545 - DNA, 20 bp, Artificial sequence
  SiRNA target sequence
attttcacatacataaacca

SEQ ID NO: 109546 - DNA, 20 bp, Artificial sequence
  SiRNA target sequence
ttttcacatacataaaccac

SEQ ID NO: 109547 - DNA, 20 bp, Artificial sequence
  SiRNA target sequence
tttcacatacataaaccaca

SEQ ID NO: 109548 - DNA, 20 bp, Artificial sequence
  SiRNA target sequence
ttcacatacataaaccacag

SEQ ID NO: 109549 - DNA, 20 bp, Artificial sequence
  SiRNA target sequence
tcacatacataaaccacagg

SEQ ID NO: 109550 - DNA, 20 bp, Artificial sequence
  SiRNA target sequence
cacatacataaaccacagga

SEQ ID NO: 109551 - DNA, 20 bp, Artificial sequence
  SiRNA target sequence
acatacataaaccacaggaa

SEQ ID NO: 109552 - DNA, 20 bp, Artificial sequence
  SiRNA target sequence
catacataaaccacaggaag

SEQ ID NO: 109553 - DNA, 20 bp, Artificial sequence
  SiRNA target sequence
atacataaaccacaggaagt

SEQ ID NO: 109554 - DNA, 20 bp, Artificial sequence
  SiRNA target sequence
tacataaaccacaggaagtt

SEQ ID NO: 109555 - DNA, 20 bp, Artificial sequence
  SiRNA target sequence
acataaaccacaggaagttt

SEQ ID NO: 109556 - DNA, 20 bp, Artificial sequence
  SiRNA target sequence
cataaaccacaggaagtttc

SEQ ID NO: 109557 - DNA, 20 bp, Artificial sequence
  SiRNA target sequence
ataaaccacaggaagtttcc

SEQ ID NO: 109558 - DNA, 20 bp, Artificial sequence
  SiRNA target sequence
taaaccacaggaagtttcca

SEQ ID NO: 109559 - DNA, 20 bp, Artificial sequence
  SiRNA target sequence
aaaccacaggaagtttccat

SEQ ID NO: 109560 - DNA, 20 bp, Artificial sequence
  SiRNA target sequence
aaccacaggaagtttccata

SEQ ID NO: 109561 - DNA, 20 bp, Artificial sequence
  SiRNA target sequence
accacaggaagtttccataa

SEQ ID NO: 109562 - DNA, 20 bp, Artificial sequence
  SiRNA target sequence
ccacaggaagtttccataat

SEQ ID NO: 109563 - DNA, 20 bp, Artificial sequence
  SiRNA target sequence
cacaggaagtttccataatg

SEQ ID NO: 109564 - DNA, 20 bp, Artificial sequence
  SiRNA target sequence
acaggaagtttccataatgc

SEQ ID NO: 109565 - DNA, 20 bp, Artificial sequence
  SiRNA target sequence
caggaagtttccataatgca

SEQ ID NO: 109566 - DNA, 20 bp, Artificial sequence
  SiRNA target sequence
aggaagtttccataatgcag

SEQ ID NO: 109567 - DNA, 20 bp, Artificial sequence
  SiRNA target sequence
ggaagtttccataatgcagc

SEQ ID NO: 109568 - DNA, 20 bp, Artificial sequence
  SiRNA target sequence
gaagtttccataatgcagcc

SEQ ID NO: 109569 - DNA, 20 bp, Artificial sequence
  SiRNA target sequence
aagtttccataatgcagcca

SEQ ID NO: 109570 - DNA, 20 bp, Artificial sequence
  SiRNA target sequence
agtttccataatgcagccat

SEQ ID NO: 109571 - DNA, 20 bp, Artificial sequence
  SiRNA target sequence
gtttccataatgcagccata

SEQ ID NO: 109572 - DNA, 20 bp, Artificial sequence
  SiRNA target sequence
tttccataatgcagccatat

SEQ ID NO: 109573 - DNA, 20 bp, Artificial sequence
  SiRNA target sequence
ttccataatgcagccatatt

SEQ ID NO: 109574 - DNA, 20 bp, Artificial sequence
  SiRNA target sequence
tccataatgcagccatattg

SEQ ID NO: 109575 - DNA, 20 bp, Artificial sequence
  SiRNA target sequence
ccataatgcagccatattga

SEQ ID NO: 109576 - DNA, 20 bp, Artificial sequence
  SiRNA target sequence
cataatgcagccatattgaa

SEQ ID NO: 109577 - DNA, 20 bp, Artificial sequence
  SiRNA target sequence
ataatgcagccatattgaac

SEQ ID NO: 109578 - DNA, 20 bp, Artificial sequence
  SiRNA target sequence
taatgcagccatattgaacg

SEQ ID NO: 109579 - DNA, 20 bp, Artificial sequence
  SiRNA target sequence
aatgcagccatattgaacga

SEQ ID NO: 109580 - DNA, 20 bp, Artificial sequence
  SiRNA target sequence
atgcagccatattgaacgac

SEQ ID NO: 109581 - DNA, 20 bp, Artificial sequence
  SiRNA target sequence
tgcagccatattgaacgact

SEQ ID NO: 109582 - DNA, 20 bp, Artificial sequence
  SiRNA target sequence
gcagccatattgaacgactc

SEQ ID NO: 109583 - DNA, 20 bp, Artificial sequence
  SiRNA target sequence
cagccatattgaacgactcc

SEQ ID NO: 109584 - DNA, 20 bp, Artificial sequence
  SiRNA target sequence
agccatattgaacgactccc

SEQ ID NO: 109585 - DNA, 20 bp, Artificial sequence
  SiRNA target sequence
gccatattgaacgactccca

SEQ ID NO: 109586 - DNA, 20 bp, Artificial sequence
  SiRNA target sequence
ccatattgaacgactcccag

SEQ ID NO: 109587 - DNA, 20 bp, Artificial sequence
  SiRNA target sequence
catattgaacgactcccaga

SEQ ID NO: 109588 - DNA, 20 bp, Artificial sequence
  SiRNA target sequence
atattgaacgactcccagac

SEQ ID NO: 109589 - DNA, 20 bp, Artificial sequence
  SiRNA target sequence
tattgaacgactcccagacc

SEQ ID NO: 109590 - DNA, 20 bp, Artificial sequence
  SiRNA target sequence
attgaacgactcccagacct

SEQ ID NO: 109591 - DNA, 20 bp, Artificial sequence
  SiRNA target sequence
ttgaacgactcccagacctg

SEQ ID NO: 109592 - DNA, 20 bp, Artificial sequence
  SiRNA target sequence
tgaacgactcccagacctgt

SEQ ID NO: 109593 - DNA, 20 bp, Artificial sequence
  SiRNA target sequence
gaacgactcccagacctgtc

SEQ ID NO: 109594 - DNA, 20 bp, Artificial sequence
  SiRNA target sequence
aacgactcccagacctgtcc

SEQ ID NO: 109595 - DNA, 20 bp, Artificial sequence
  SiRNA target sequence
acgactcccagacctgtccc

SEQ ID NO: 109596 - DNA, 20 bp, Artificial sequence
  SiRNA target sequence
cgactcccagacctgtccct

SEQ ID NO: 109597 - DNA, 20 bp, Artificial sequence
  SiRNA target sequence
gactcccagacctgtccctg

SEQ ID NO: 109598 - DNA, 20 bp, Artificial sequence
  SiRNA target sequence
actcccagacctgtccctga

SEQ ID NO: 109599 - DNA, 20 bp, Artificial sequence
  SiRNA target sequence
ctcccagacctgtccctgat

SEQ ID NO: 109600 - DNA, 20 bp, Artificial sequence
  SiRNA target sequence
tcccagacctgtccctgatt

SEQ ID NO: 109601 - DNA, 20 bp, Artificial sequence
  SiRNA target sequence
cccagacctgtccctgattt

SEQ ID NO: 109602 - DNA, 20 bp, Artificial sequence
  SiRNA target sequence
ccagacctgtccctgatttg

SEQ ID NO: 109603 - DNA, 20 bp, Artificial sequence
  SiRNA target sequence
cagacctgtccctgatttgc

SEQ ID NO: 109604 - DNA, 20 bp, Artificial sequence
  SiRNA target sequence
agacctgtccctgatttgca

SEQ ID NO: 109605 - DNA, 20 bp, Artificial sequence
  SiRNA target sequence
gacctgtccctgatttgcag

SEQ ID NO: 109606 - DNA, 20 bp, Artificial sequence
  SiRNA target sequence
acctgtccctgatttgcagc

SEQ ID NO: 109607 - DNA, 20 bp, Artificial sequence
  SiRNA target sequence
cctgtccctgatttgcagca

SEQ ID NO: 109608 - DNA, 20 bp, Artificial sequence
  SiRNA target sequence
ctgtccctgatttgcagcac

SEQ ID NO: 109609 - DNA, 20 bp, Artificial sequence
  SiRNA target sequence
tgtccctgatttgcagcacc

SEQ ID NO: 109610 - DNA, 20 bp, Artificial sequence
  SiRNA target sequence
gtccctgatttgcagcacca

SEQ ID NO: 109611 - DNA, 20 bp, Artificial sequence
  SiRNA target sequence
tccctgatttgcagcaccat

SEQ ID NO: 109612 - DNA, 20 bp, Artificial sequence
  SiRNA target sequence
ccctgatttgcagcaccatc

SEQ ID NO: 109613 - DNA, 20 bp, Artificial sequence
  SiRNA target sequence
cctgatttgcagcaccatcc

SEQ ID NO: 109614 - DNA, 20 bp, Artificial sequence
  SiRNA target sequence
ctgatttgcagcaccatccc

SEQ ID NO: 109615 - DNA, 20 bp, Artificial sequence
  SiRNA target sequence
tgatttgcagcaccatcccc

SEQ ID NO: 109616 - DNA, 20 bp, Artificial sequence
  SiRNA target sequence
gatttgcagcaccatccccg

SEQ ID NO: 109617 - DNA, 20 bp, Artificial sequence
  SiRNA target sequence
atttgcagcaccatccccga

SEQ ID NO: 109618 - DNA, 20 bp, Artificial sequence
  SiRNA target sequence
tttgcagcaccatccccgaa

SEQ ID NO: 109619 - DNA, 20 bp, Artificial sequence
  SiRNA target sequence
ttgcagcaccatccccgaaa

SEQ ID NO: 109620 - DNA, 20 bp, Artificial sequence
  SiRNA target sequence
tgcagcaccatccccgaaaa

SEQ ID NO: 109621 - DNA, 20 bp, Artificial sequence
  SiRNA target sequence
gcagcaccatccccgaaaaa

SEQ ID NO: 109622 - DNA, 20 bp, Artificial sequence
  SiRNA target sequence
cagcaccatccccgaaaaat

SEQ ID NO: 109623 - DNA, 20 bp, Artificial sequence
  SiRNA target sequence
agcaccatccccgaaaaata

SEQ ID NO: 109624 - DNA, 20 bp, Artificial sequence
  SiRNA target sequence
gcaccatccccgaaaaatac

SEQ ID NO: 109625 - DNA, 20 bp, Artificial sequence
  SiRNA target sequence
caccatccccgaaaaataca

SEQ ID NO: 109626 - DNA, 20 bp, Artificial sequence
  SiRNA target sequence
accatccccgaaaaatacaa

SEQ ID NO: 109627 - DNA, 20 bp, Artificial sequence
  SiRNA target sequence
ccatccccgaaaaatacaaa

SEQ ID NO: 109628 - DNA, 20 bp, Artificial sequence
  SiRNA target sequence
catccccgaaaaatacaaat

SEQ ID NO: 109629 - DNA, 20 bp, Artificial sequence
  SiRNA target sequence
atccccgaaaaatacaaatg

SEQ ID NO: 109630 - DNA, 20 bp, Artificial sequence
  SiRNA target sequence
tccccgaaaaatacaaatgc

SEQ ID NO: 109631 - DNA, 20 bp, Artificial sequence
  SiRNA target sequence
ccccgaaaaatacaaatgct

SEQ ID NO: 109632 - DNA, 20 bp, Artificial sequence
  SiRNA target sequence
cccgaaaaatacaaatgcta

SEQ ID NO: 109633 - DNA, 20 bp, Artificial sequence
  SiRNA target sequence
ccgaaaaatacaaatgctac

SEQ ID NO: 109634 - DNA, 20 bp, Artificial sequence
  SiRNA target sequence
cgaaaaatacaaatgctaca

SEQ ID NO: 109635 - DNA, 20 bp, Artificial sequence
  SiRNA target sequence
gaaaaatacaaatgctacat

SEQ ID NO: 109636 - DNA, 20 bp, Artificial sequence
  SiRNA target sequence
aaaaatacaaatgctacatt

SEQ ID NO: 109637 - DNA, 20 bp, Artificial sequence
  SiRNA target sequence
aaaatacaaatgctacattt

SEQ ID NO: 109638 - DNA, 20 bp, Artificial sequence
  SiRNA target sequence
aaatacaaatgctacatttt

SEQ ID NO: 109639 - DNA, 20 bp, Artificial sequence
  SiRNA target sequence
aatacaaatgctacattttt

SEQ ID NO: 109640 - DNA, 20 bp, Artificial sequence
  SiRNA target sequence
atacaaatgctacatttttt

SEQ ID NO: 109641 - DNA, 20 bp, Artificial sequence
  SiRNA target sequence
tacaaatgctacatttttta

SEQ ID NO: 109642 - DNA, 20 bp, Artificial sequence
  SiRNA target sequence
acaaatgctacattttttac

SEQ ID NO: 109643 - DNA, 20 bp, Artificial sequence
  SiRNA target sequence
caaatgctacattttttact

SEQ ID NO: 109644 - DNA, 20 bp, Artificial sequence
  SiRNA target sequence
aaatgctacattttttactt

SEQ ID NO: 109645 - DNA, 20 bp, Artificial sequence
  SiRNA target sequence
aatgctacattttttacttt

SEQ ID NO: 109646 - DNA, 20 bp, Artificial sequence
  SiRNA target sequence
atgctacattttttactttt

SEQ ID NO: 109647 - DNA, 20 bp, Artificial sequence
  SiRNA target sequence
tgctacattttttacttttt

SEQ ID NO: 109648 - DNA, 20 bp, Artificial sequence
  SiRNA target sequence
gctacattttttactttttt

SEQ ID NO: 109649 - DNA, 20 bp, Artificial sequence
  SiRNA target sequence
ctacattttttactttttta

SEQ ID NO: 109650 - DNA, 20 bp, Artificial sequence
  SiRNA target sequence
tacattttttacttttttat

SEQ ID NO: 109651 - DNA, 20 bp, Artificial sequence
  SiRNA target sequence
acattttttacttttttata

SEQ ID NO: 109652 - DNA, 20 bp, Artificial sequence
  SiRNA target sequence
cattttttacttttttatat

SEQ ID NO: 109653 - DNA, 20 bp, Artificial sequence
  SiRNA target sequence
attttttacttttttatatt

SEQ ID NO: 109654 - DNA, 20 bp, Artificial sequence
  SiRNA target sequence
ttttttacttttttatattg

SEQ ID NO: 109655 - DNA, 20 bp, Artificial sequence
  SiRNA target sequence
tttttacttttttatattgt

SEQ ID NO: 109656 - DNA, 20 bp, Artificial sequence
  SiRNA target sequence
ttttacttttttatattgta

SEQ ID NO: 109657 - DNA, 20 bp, Artificial sequence
  SiRNA target sequence
tttacttttttatattgtaa

SEQ ID NO: 109658 - DNA, 20 bp, Artificial sequence
  SiRNA target sequence
ttacttttttatattgtaaa

SEQ ID NO: 109659 - DNA, 20 bp, Artificial sequence
  SiRNA target sequence
tacttttttatattgtaaag

SEQ ID NO: 109660 - DNA, 20 bp, Artificial sequence
  SiRNA target sequence
acttttttatattgtaaagc

SEQ ID NO: 109661 - DNA, 20 bp, Artificial sequence
  SiRNA target sequence
cttttttatattgtaaagca

SEQ ID NO: 109662 - DNA, 20 bp, Artificial sequence
  SiRNA target sequence
ttttttatattgtaaagcaa

SEQ ID NO: 109663 - DNA, 20 bp, Artificial sequence
  SiRNA target sequence
tttttatattgtaaagcaaa

SEQ ID NO: 109664 - DNA, 20 bp, Artificial sequence
  SiRNA target sequence
ttttatattgtaaagcaaat

SEQ ID NO: 109665 - DNA, 20 bp, Artificial sequence
  SiRNA target sequence
tttatattgtaaagcaaatc

SEQ ID NO: 109666 - DNA, 20 bp, Artificial sequence
  SiRNA target sequence
ttatattgtaaagcaaatcc

SEQ ID NO: 109667 - DNA, 20 bp, Artificial sequence
  SiRNA target sequence
tatattgtaaagcaaatccc

SEQ ID NO: 109668 - DNA, 20 bp, Artificial sequence
  SiRNA target sequence
atattgtaaagcaaatccca

SEQ ID NO: 109669 - DNA, 20 bp, Artificial sequence
  SiRNA target sequence
tattgtaaagcaaatcccaa

SEQ ID NO: 109670 - DNA, 20 bp, Artificial sequence
  SiRNA target sequence
attgtaaagcaaatcccaat

SEQ ID NO: 109671 - DNA, 20 bp, Artificial sequence
  SiRNA target sequence
ttgtaaagcaaatcccaatc

SEQ ID NO: 109672 - DNA, 20 bp, Artificial sequence
  SiRNA target sequence
tgtaaagcaaatcccaatcc

SEQ ID NO: 109673 - DNA, 20 bp, Artificial sequence
  SiRNA target sequence
gtaaagcaaatcccaatcct

SEQ ID NO: 109674 - DNA, 20 bp, Artificial sequence
  SiRNA target sequence
taaagcaaatcccaatcctg

SEQ ID NO: 109675 - DNA, 20 bp, Artificial sequence
  SiRNA target sequence
aaagcaaatcccaatcctgt

SEQ ID NO: 109676 - DNA, 20 bp, Artificial sequence
  SiRNA target sequence
aagcaaatcccaatcctgta

SEQ ID NO: 109677 - DNA, 20 bp, Artificial sequence
  SiRNA target sequence
agcaaatcccaatcctgtac

SEQ ID NO: 109678 - DNA, 20 bp, Artificial sequence
  SiRNA target sequence
gcaaatcccaatcctgtacc

SEQ ID NO: 109679 - DNA, 20 bp, Artificial sequence
  SiRNA target sequence
caaatcccaatcctgtacca

SEQ ID NO: 109680 - DNA, 20 bp, Artificial sequence
  SiRNA target sequence
aaatcccaatcctgtaccaa

SEQ ID NO: 109681 - DNA, 20 bp, Artificial sequence
  SiRNA target sequence
aatcccaatcctgtaccaag

SEQ ID NO: 109682 - DNA, 20 bp, Artificial sequence
  SiRNA target sequence
atcccaatcctgtaccaagc

SEQ ID NO: 109683 - DNA, 20 bp, Artificial sequence
  SiRNA target sequence
tcccaatcctgtaccaagcg

SEQ ID NO: 109684 - DNA, 20 bp, Artificial sequence
  SiRNA target sequence
cccaatcctgtaccaagcga

SEQ ID NO: 109685 - DNA, 20 bp, Artificial sequence
  SiRNA target sequence
ccaatcctgtaccaagcgat

SEQ ID NO: 109686 - DNA, 20 bp, Artificial sequence
  SiRNA target sequence
caatcctgtaccaagcgata

SEQ ID NO: 109687 - DNA, 20 bp, Artificial sequence
  SiRNA target sequence
aatcctgtaccaagcgatac

SEQ ID NO: 109688 - DNA, 20 bp, Artificial sequence
  SiRNA target sequence
atcctgtaccaagcgatacc

SEQ ID NO: 109689 - DNA, 20 bp, Artificial sequence
  SiRNA target sequence
tcctgtaccaagcgatacct

SEQ ID NO: 109690 - DNA, 20 bp, Artificial sequence
  SiRNA target sequence
cctgtaccaagcgatacctg

SEQ ID NO: 109691 - DNA, 20 bp, Artificial sequence
  SiRNA target sequence
ctgtaccaagcgatacctgc

SEQ ID NO: 109692 - DNA, 20 bp, Artificial sequence
  SiRNA target sequence
tgtaccaagcgatacctgcg

SEQ ID NO: 109693 - DNA, 20 bp, Artificial sequence
  SiRNA target sequence
gtaccaagcgatacctgcgc

SEQ ID NO: 109694 - DNA, 20 bp, Artificial sequence
  SiRNA target sequence
taccaagcgatacctgcgca

SEQ ID NO: 109695 - DNA, 20 bp, Artificial sequence
  SiRNA target sequence
accaagcgatacctgcgcac

SEQ ID NO: 109696 - DNA, 20 bp, Artificial sequence
  SiRNA target sequence
ccaagcgatacctgcgcacc

SEQ ID NO: 109697 - DNA, 20 bp, Artificial sequence
  SiRNA target sequence
caagcgatacctgcgcacct

SEQ ID NO: 109698 - DNA, 20 bp, Artificial sequence
  SiRNA target sequence
aagcgatacctgcgcaccta

SEQ ID NO: 109699 - DNA, 20 bp, Artificial sequence
  SiRNA target sequence
agcgatacctgcgcacctac

SEQ ID NO: 109700 - DNA, 20 bp, Artificial sequence
  SiRNA target sequence
gcgatacctgcgcacctact

SEQ ID NO: 109701 - DNA, 20 bp, Artificial sequence
  SiRNA target sequence
cgatacctgcgcacctacta

SEQ ID NO: 109702 - DNA, 20 bp, Artificial sequence
  SiRNA target sequence
gatacctgcgcacctactat

SEQ ID NO: 109703 - DNA, 20 bp, Artificial sequence
  SiRNA target sequence
atacctgcgcacctactata

SEQ ID NO: 109704 - DNA, 20 bp, Artificial sequence
  SiRNA target sequence
tacctgcgcacctactatac

SEQ ID NO: 109705 - DNA, 20 bp, Artificial sequence
  SiRNA target sequence
acctgcgcacctactatacc

SEQ ID NO: 109706 - DNA, 20 bp, Artificial sequence
  SiRNA target sequence
cctgcgcacctactataccg

SEQ ID NO: 109707 - DNA, 20 bp, Artificial sequence
  SiRNA target sequence
ctgcgcacctactataccgt

SEQ ID NO: 109708 - DNA, 20 bp, Artificial sequence
  SiRNA target sequence
tgcgcacctactataccgtg

SEQ ID NO: 109709 - DNA, 20 bp, Artificial sequence
  SiRNA target sequence
gcgcacctactataccgtgt

SEQ ID NO: 109710 - DNA, 20 bp, Artificial sequence
  SiRNA target sequence
cgcacctactataccgtgtc

SEQ ID NO: 109711 - DNA, 20 bp, Artificial sequence
  SiRNA target sequence
gcacctactataccgtgtcc

SEQ ID NO: 109712 - DNA, 20 bp, Artificial sequence
  SiRNA target sequence
cacctactataccgtgtccc

SEQ ID NO: 109713 - DNA, 20 bp, Artificial sequence
  SiRNA target sequence
acctactataccgtgtcccc

SEQ ID NO: 109714 - DNA, 20 bp, Artificial sequence
  SiRNA target sequence
cctactataccgtgtccccc

SEQ ID NO: 109715 - DNA, 20 bp, Artificial sequence
  SiRNA target sequence
ctactataccgtgtccccca

SEQ ID NO: 109716 - DNA, 20 bp, Artificial sequence
  SiRNA target sequence
tactataccgtgtcccccat

SEQ ID NO: 109717 - DNA, 20 bp, Artificial sequence
  SiRNA target sequence
actataccgtgtcccccata

SEQ ID NO: 109718 - DNA, 20 bp, Artificial sequence
  SiRNA target sequence
ctataccgtgtcccccataa

SEQ ID NO: 109719 - DNA, 20 bp, Artificial sequence
  SiRNA target sequence
tataccgtgtcccccataaa

SEQ ID NO: 109720 - DNA, 20 bp, Artificial sequence
  SiRNA target sequence
ataccgtgtcccccataaaa

SEQ ID NO: 109721 - DNA, 20 bp, Artificial sequence
  SiRNA target sequence
taccgtgtcccccataaaat

SEQ ID NO: 109722 - DNA, 20 bp, Artificial sequence
  SiRNA target sequence
accgtgtcccccataaaatt

SEQ ID NO: 109723 - DNA, 20 bp, Artificial sequence
  SiRNA target sequence
ccgtgtcccccataaaattg

SEQ ID NO: 109724 - DNA, 20 bp, Artificial sequence
  SiRNA target sequence
cgtgtcccccataaaattgg

SEQ ID NO: 109725 - DNA, 20 bp, Artificial sequence
  SiRNA target sequence
gtgtcccccataaaattggt

SEQ ID NO: 109726 - DNA, 20 bp, Artificial sequence
  SiRNA target sequence
tgtcccccataaaattggtc

SEQ ID NO: 109727 - DNA, 20 bp, Artificial sequence
  SiRNA target sequence
gtcccccataaaattggtca

SEQ ID NO: 109728 - DNA, 20 bp, Artificial sequence
  SiRNA target sequence
tcccccataaaattggtcat

SEQ ID NO: 109729 - DNA, 20 bp, Artificial sequence
  SiRNA target sequence
cccccataaaattggtcatt

SEQ ID NO: 109730 - DNA, 20 bp, Artificial sequence
  SiRNA target sequence
ccccataaaattggtcatta

SEQ ID NO: 109731 - DNA, 20 bp, Artificial sequence
  SiRNA target sequence
cccataaaattggtcattat

SEQ ID NO: 109732 - DNA, 20 bp, Artificial sequence
  SiRNA target sequence
ccataaaattggtcattata

SEQ ID NO: 109733 - DNA, 20 bp, Artificial sequence
  SiRNA target sequence
cataaaattggtcattatac

SEQ ID NO: 109734 - DNA, 20 bp, Artificial sequence
  SiRNA target sequence
ataaaattggtcattataca

SEQ ID NO: 109735 - DNA, 20 bp, Artificial sequence
  SiRNA target sequence
taaaattggtcattatacaa

SEQ ID NO: 109736 - DNA, 20 bp, Artificial sequence
  SiRNA target sequence
aaaattggtcattatacaaa

SEQ ID NO: 109737 - DNA, 20 bp, Artificial sequence
  SiRNA target sequence
aaattggtcattatacaaat

SEQ ID NO: 109738 - DNA, 20 bp, Artificial sequence
  SiRNA target sequence
aattggtcattatacaaatg

SEQ ID NO: 109739 - DNA, 20 bp, Artificial sequence
  SiRNA target sequence
attggtcattatacaaatgc

SEQ ID NO: 109740 - DNA, 20 bp, Artificial sequence
  SiRNA target sequence
ttggtcattatacaaatgca

SEQ ID NO: 109741 - DNA, 20 bp, Artificial sequence
  SiRNA target sequence
tggtcattatacaaatgcat

SEQ ID NO: 109742 - DNA, 20 bp, Artificial sequence
  SiRNA target sequence
ggtcattatacaaatgcatc

SEQ ID NO: 109743 - DNA, 20 bp, Artificial sequence
  SiRNA target sequence
gtcattatacaaatgcatcg

SEQ ID NO: 109744 - DNA, 20 bp, Artificial sequence
  SiRNA target sequence
tcattatacaaatgcatcga

SEQ ID NO: 109745 - DNA, 20 bp, Artificial sequence
  SiRNA target sequence
cattatacaaatgcatcgat

SEQ ID NO: 109746 - DNA, 20 bp, Artificial sequence
  SiRNA target sequence
attatacaaatgcatcgatc

SEQ ID NO: 109747 - DNA, 20 bp, Artificial sequence
  SiRNA target sequence
ttatacaaatgcatcgatcc

SEQ ID NO: 109748 - DNA, 20 bp, Artificial sequence
  SiRNA target sequence
tatacaaatgcatcgatcct

SEQ ID NO: 109749 - DNA, 20 bp, Artificial sequence
  SiRNA target sequence
atacaaatgcatcgatcctc

SEQ ID NO: 109750 - DNA, 20 bp, Artificial sequence
  SiRNA target sequence
tacaaatgcatcgatcctcc

SEQ ID NO: 109751 - DNA, 20 bp, Artificial sequence
  SiRNA target sequence
acaaatgcatcgatcctcct

SEQ ID NO: 109752 - DNA, 20 bp, Artificial sequence
  SiRNA target sequence
caaatgcatcgatcctcctt

SEQ ID NO: 109753 - DNA, 20 bp, Artificial sequence
  SiRNA target sequence
aaatgcatcgatcctccttt

SEQ ID NO: 109754 - DNA, 20 bp, Artificial sequence
  SiRNA target sequence
aatgcatcgatcctcctttt

SEQ ID NO: 109755 - DNA, 20 bp, Artificial sequence
  SiRNA target sequence
atgcatcgatcctccttttc

SEQ ID NO: 109756 - DNA, 20 bp, Artificial sequence
  SiRNA target sequence
tgcatcgatcctccttttcc

SEQ ID NO: 109757 - DNA, 20 bp, Artificial sequence
  SiRNA target sequence
gcatcgatcctccttttcct

SEQ ID NO: 109758 - DNA, 20 bp, Artificial sequence
  SiRNA target sequence
catcgatcctccttttcctt

SEQ ID NO: 109759 - DNA, 20 bp, Artificial sequence
  SiRNA target sequence
atcgatcctccttttccttt

SEQ ID NO: 109760 - DNA, 20 bp, Artificial sequence
  SiRNA target sequence
tcgatcctccttttcctttg

SEQ ID NO: 109761 - DNA, 20 bp, Artificial sequence
  SiRNA target sequence
cgatcctccttttcctttgc

SEQ ID NO: 109762 - DNA, 20 bp, Artificial sequence
  SiRNA target sequence
gatcctccttttcctttgca

SEQ ID NO: 109763 - DNA, 20 bp, Artificial sequence
  SiRNA target sequence
atcctccttttcctttgcaa

SEQ ID NO: 109764 - DNA, 20 bp, Artificial sequence
  SiRNA target sequence
tcctccttttcctttgcaat

SEQ ID NO: 109765 - DNA, 20 bp, Artificial sequence
  SiRNA target sequence
cctccttttcctttgcaatt

SEQ ID NO: 109766 - DNA, 20 bp, Artificial sequence
  SiRNA target sequence
ctccttttcctttgcaatta

SEQ ID NO: 109767 - DNA, 20 bp, Artificial sequence
  SiRNA target sequence
tccttttcctttgcaattac

SEQ ID NO: 109768 - DNA, 20 bp, Artificial sequence
  SiRNA target sequence
ccttttcctttgcaattacc

SEQ ID NO: 109769 - DNA, 20 bp, Artificial sequence
  SiRNA target sequence
cttttcctttgcaattacca

SEQ ID NO: 109770 - DNA, 20 bp, Artificial sequence
  SiRNA target sequence
ttttcctttgcaattaccaa

SEQ ID NO: 109771 - DNA, 20 bp, Artificial sequence
  SiRNA target sequence
tttcctttgcaattaccaat

SEQ ID NO: 109772 - DNA, 20 bp, Artificial sequence
  SiRNA target sequence
ttcctttgcaattaccaata

SEQ ID NO: 109773 - DNA, 20 bp, Artificial sequence
  SiRNA target sequence
tcctttgcaattaccaatag

SEQ ID NO: 109774 - DNA, 20 bp, Artificial sequence
  SiRNA target sequence
cctttgcaattaccaatagc

SEQ ID NO: 109775 - DNA, 20 bp, Artificial sequence
  SiRNA target sequence
ctttgcaattaccaatagcc

SEQ ID NO: 109776 - DNA, 20 bp, Artificial sequence
  SiRNA target sequence
tttgcaattaccaatagcct

SEQ ID NO: 109777 - DNA, 20 bp, Artificial sequence
  SiRNA target sequence
ttgcaattaccaatagcctt

SEQ ID NO: 109778 - DNA, 20 bp, Artificial sequence
  SiRNA target sequence
tgcaattaccaatagccttt

SEQ ID NO: 109779 - DNA, 20 bp, Artificial sequence
  SiRNA target sequence
gcaattaccaatagcctttc

SEQ ID NO: 109780 - DNA, 20 bp, Artificial sequence
  SiRNA target sequence
caattaccaatagcctttcc

SEQ ID NO: 109781 - DNA, 20 bp, Artificial sequence
  SiRNA target sequence
aattaccaatagcctttcct

SEQ ID NO: 109782 - DNA, 20 bp, Artificial sequence
  SiRNA target sequence
attaccaatagcctttccta

SEQ ID NO: 109783 - DNA, 20 bp, Artificial sequence
  SiRNA target sequence
ttaccaatagcctttcctaa

SEQ ID NO: 109784 - DNA, 20 bp, Artificial sequence
  SiRNA target sequence
taccaatagcctttcctaat

SEQ ID NO: 109785 - DNA, 20 bp, Artificial sequence
  SiRNA target sequence
accaatagcctttcctaata

SEQ ID NO: 109786 - DNA, 20 bp, Artificial sequence
  SiRNA target sequence
ccaatagcctttcctaataa

SEQ ID NO: 109787 - DNA, 20 bp, Artificial sequence
  SiRNA target sequence
caatagcctttcctaataat

SEQ ID NO: 109788 - DNA, 20 bp, Artificial sequence
  SiRNA target sequence
aatagcctttcctaataatt

SEQ ID NO: 109789 - DNA, 20 bp, Artificial sequence
  SiRNA target sequence
atagcctttcctaataattc

SEQ ID NO: 109790 - DNA, 20 bp, Artificial sequence
  SiRNA target sequence
tagcctttcctaataattcc

SEQ ID NO: 109791 - DNA, 20 bp, Artificial sequence
  SiRNA target sequence
agcctttcctaataattccc

SEQ ID NO: 109792 - DNA, 20 bp, Artificial sequence
  SiRNA target sequence
gcctttcctaataattcccc

SEQ ID NO: 109793 - DNA, 20 bp, Artificial sequence
  SiRNA target sequence
cctttcctaataattcccct

SEQ ID NO: 109794 - DNA, 20 bp, Artificial sequence
  SiRNA target sequence
ctttcctaataattccccta

SEQ ID NO: 109795 - DNA, 20 bp, Artificial sequence
  SiRNA target sequence
tttcctaataattcccctat

SEQ ID NO: 109796 - DNA, 20 bp, Artificial sequence
  SiRNA target sequence
ttcctaataattcccctata

SEQ ID NO: 109797 - DNA, 20 bp, Artificial sequence
  SiRNA target sequence
tcctaataattcccctataa

SEQ ID NO: 109798 - DNA, 20 bp, Artificial sequence
  SiRNA target sequence
cctaataattcccctataat

SEQ ID NO: 109799 - DNA, 20 bp, Artificial sequence
  SiRNA target sequence
ctaataattcccctataata

SEQ ID NO: 109800 - DNA, 20 bp, Artificial sequence
  SiRNA target sequence
taataattcccctataatac

SEQ ID NO: 109801 - DNA, 20 bp, Artificial sequence
  SiRNA target sequence
aataattcccctataatact

SEQ ID NO: 109802 - DNA, 20 bp, Artificial sequence
  SiRNA target sequence
ataattcccctataatactt

SEQ ID NO: 109803 - DNA, 20 bp, Artificial sequence
  SiRNA target sequence
taattcccctataatacttt

SEQ ID NO: 109804 - DNA, 20 bp, Artificial sequence
  SiRNA target sequence
aattcccctataatactttc

SEQ ID NO: 109805 - DNA, 20 bp, Artificial sequence
  SiRNA target sequence
attcccctataatactttct

SEQ ID NO: 109806 - DNA, 20 bp, Artificial sequence
  SiRNA target sequence
ttcccctataatactttcta

SEQ ID NO: 109807 - DNA, 20 bp, Artificial sequence
  SiRNA target sequence
tcccctataatactttctat

SEQ ID NO: 109808 - DNA, 20 bp, Artificial sequence
  SiRNA target sequence
cccctataatactttctata

SEQ ID NO: 109809 - DNA, 20 bp, Artificial sequence
  SiRNA target sequence
ccctataatactttctatac

SEQ ID NO: 109810 - DNA, 20 bp, Artificial sequence
  SiRNA target sequence
cctataatactttctatact

SEQ ID NO: 109811 - DNA, 20 bp, Artificial sequence
  SiRNA target sequence
ctataatactttctatactg

SEQ ID NO: 109812 - DNA, 20 bp, Artificial sequence
  SiRNA target sequence
tataatactttctatactga

SEQ ID NO: 109813 - DNA, 20 bp, Artificial sequence
  SiRNA target sequence
ataatactttctatactgat

SEQ ID NO: 109814 - DNA, 20 bp, Artificial sequence
  SiRNA target sequence
taatactttctatactgatt

SEQ ID NO: 109815 - DNA, 20 bp, Artificial sequence
  SiRNA target sequence
aatactttctatactgattc

SEQ ID NO: 109816 - DNA, 20 bp, Artificial sequence
  SiRNA target sequence
atactttctatactgattcc

SEQ ID NO: 109817 - DNA, 20 bp, Artificial sequence
  SiRNA target sequence
tactttctatactgattcca

SEQ ID NO: 109818 - DNA, 20 bp, Artificial sequence
  SiRNA target sequence
actttctatactgattccac

SEQ ID NO: 109819 - DNA, 20 bp, Artificial sequence
  SiRNA target sequence
ctttctatactgattccaca

SEQ ID NO: 109820 - DNA, 20 bp, Artificial sequence
  SiRNA target sequence
tttctatactgattccacaa

SEQ ID NO: 109821 - DNA, 20 bp, Artificial sequence
  SiRNA target sequence
ttctatactgattccacaaa

SEQ ID NO: 109822 - DNA, 20 bp, Artificial sequence
  SiRNA target sequence
tctatactgattccacaaat

SEQ ID NO: 109823 - DNA, 20 bp, Artificial sequence
  SiRNA target sequence
ctatactgattccacaaata

SEQ ID NO: 109824 - DNA, 20 bp, Artificial sequence
  SiRNA target sequence
tatactgattccacaaataa

SEQ ID NO: 109825 - DNA, 20 bp, Artificial sequence
  SiRNA target sequence
atactgattccacaaataaa

SEQ ID NO: 109826 - DNA, 20 bp, Artificial sequence
  SiRNA target sequence
tactgattccacaaataaat

SEQ ID NO: 109827 - DNA, 20 bp, Artificial sequence
  SiRNA target sequence
actgattccacaaataaatg

SEQ ID NO: 109828 - DNA, 20 bp, Artificial sequence
  SiRNA target sequence
ctgattccacaaataaatgc

SEQ ID NO: 109829 - DNA, 20 bp, Artificial sequence
  SiRNA target sequence
tgattccacaaataaatgct

SEQ ID NO: 109830 - DNA, 20 bp, Artificial sequence
  SiRNA target sequence
gattccacaaataaatgcta

SEQ ID NO: 109831 - DNA, 20 bp, Artificial sequence
  SiRNA target sequence
attccacaaataaatgctaa

SEQ ID NO: 109832 - DNA, 20 bp, Artificial sequence
  SiRNA target sequence
ttccacaaataaatgctaat

SEQ ID NO: 109833 - DNA, 20 bp, Artificial sequence
  SiRNA target sequence
tccacaaataaatgctaatc

SEQ ID NO: 109834 - DNA, 20 bp, Artificial sequence
  SiRNA target sequence
ccacaaataaatgctaatcc

SEQ ID NO: 109835 - DNA, 20 bp, Artificial sequence
  SiRNA target sequence
cacaaataaatgctaatcca

SEQ ID NO: 109836 - DNA, 20 bp, Artificial sequence
  SiRNA target sequence
acaaataaatgctaatccat

SEQ ID NO: 109837 - DNA, 20 bp, Artificial sequence
  SiRNA target sequence
caaataaatgctaatccatg

SEQ ID NO: 109838 - DNA, 20 bp, Artificial sequence
  SiRNA target sequence
aaataaatgctaatccatgg

SEQ ID NO: 109839 - DNA, 20 bp, Artificial sequence
  SiRNA target sequence
aataaatgctaatccatggc

SEQ ID NO: 109840 - DNA, 20 bp, Artificial sequence
  SiRNA target sequence
ataaatgctaatccatggca

SEQ ID NO: 109841 - DNA, 20 bp, Artificial sequence
  SiRNA target sequence
taaatgctaatccatggcat

SEQ ID NO: 109842 - DNA, 20 bp, Artificial sequence
  SiRNA target sequence
aaatgctaatccatggcatc

SEQ ID NO: 109843 - DNA, 20 bp, Artificial sequence
  SiRNA target sequence
aatgctaatccatggcatct

SEQ ID NO: 109844 - DNA, 20 bp, Artificial sequence
  SiRNA target sequence
atgctaatccatggcatcta

SEQ ID NO: 109845 - DNA, 20 bp, Artificial sequence
  SiRNA target sequence
tgctaatccatggcatctat

SEQ ID NO: 109846 - DNA, 20 bp, Artificial sequence
  SiRNA target sequence
gctaatccatggcatctata

SEQ ID NO: 109847 - DNA, 20 bp, Artificial sequence
  SiRNA target sequence
ctaatccatggcatctataa

SEQ ID NO: 109848 - DNA, 20 bp, Artificial sequence
  SiRNA target sequence
taatccatggcatctataag

SEQ ID NO: 109849 - DNA, 20 bp, Artificial sequence
  SiRNA target sequence
aatccatggcatctataaga

SEQ ID NO: 109850 - DNA, 20 bp, Artificial sequence
  SiRNA target sequence
atccatggcatctataagat

SEQ ID NO: 109851 - DNA, 20 bp, Artificial sequence
  SiRNA target sequence
tccatggcatctataagatc

SEQ ID NO: 109852 - DNA, 20 bp, Artificial sequence
  SiRNA target sequence
ccatggcatctataagatcc

SEQ ID NO: 109853 - DNA, 20 bp, Artificial sequence
  SiRNA target sequence
catggcatctataagatcct

SEQ ID NO: 109854 - DNA, 20 bp, Artificial sequence
  SiRNA target sequence
atggcatctataagatccta

SEQ ID NO: 109855 - DNA, 20 bp, Artificial sequence
  SiRNA target sequence
tggcatctataagatcctat

SEQ ID NO: 109856 - DNA, 20 bp, Artificial sequence
  SiRNA target sequence
ggcatctataagatcctatg

SEQ ID NO: 109857 - DNA, 20 bp, Artificial sequence
  SiRNA target sequence
gcatctataagatcctatga

SEQ ID NO: 109858 - DNA, 20 bp, Artificial sequence
  SiRNA target sequence
catctataagatcctatgac

SEQ ID NO: 109859 - DNA, 20 bp, Artificial sequence
  SiRNA target sequence
atctataagatcctatgact

SEQ ID NO: 109860 - DNA, 20 bp, Artificial sequence
  SiRNA target sequence
tctataagatcctatgactt

SEQ ID NO: 109861 - DNA, 20 bp, Artificial sequence
  SiRNA target sequence
ctataagatcctatgacttt

SEQ ID NO: 109862 - DNA, 20 bp, Artificial sequence
  SiRNA target sequence
tataagatcctatgacttta

SEQ ID NO: 109863 - DNA, 20 bp, Artificial sequence
  SiRNA target sequence
ataagatcctatgactttat

SEQ ID NO: 109864 - DNA, 20 bp, Artificial sequence
  SiRNA target sequence
taagatcctatgactttatc

SEQ ID NO: 109865 - DNA, 20 bp, Artificial sequence
  SiRNA target sequence
aagatcctatgactttatca

SEQ ID NO: 109866 - DNA, 20 bp, Artificial sequence
  SiRNA target sequence
agatcctatgactttatcat

SEQ ID NO: 109867 - DNA, 20 bp, Artificial sequence
  SiRNA target sequence
gatcctatgactttatcatt

SEQ ID NO: 109868 - DNA, 20 bp, Artificial sequence
  SiRNA target sequence
atcctatgactttatcattt

SEQ ID NO: 109869 - DNA, 20 bp, Artificial sequence
  SiRNA target sequence
tcctatgactttatcatttt

SEQ ID NO: 109870 - DNA, 20 bp, Artificial sequence
  SiRNA target sequence
cctatgactttatcattttt

SEQ ID NO: 109871 - DNA, 20 bp, Artificial sequence
  SiRNA target sequence
ctatgactttatcattttta

SEQ ID NO: 109872 - DNA, 20 bp, Artificial sequence
  SiRNA target sequence
tatgactttatcatttttat

SEQ ID NO: 109873 - DNA, 20 bp, Artificial sequence
  SiRNA target sequence
atgactttatcatttttatc

SEQ ID NO: 109874 - DNA, 20 bp, Artificial sequence
  SiRNA target sequence
tgactttatcatttttatct

SEQ ID NO: 109875 - DNA, 20 bp, Artificial sequence
  SiRNA target sequence
gactttatcatttttatcta

SEQ ID NO: 109876 - DNA, 20 bp, Artificial sequence
  SiRNA target sequence
actttatcatttttatctag

SEQ ID NO: 109877 - DNA, 20 bp, Artificial sequence
  SiRNA target sequence
ctttatcatttttatctagt

SEQ ID NO: 109878 - DNA, 20 bp, Artificial sequence
  SiRNA target sequence
tttatcatttttatctagta

SEQ ID NO: 109879 - DNA, 20 bp, Artificial sequence
  SiRNA target sequence
ttatcatttttatctagtac

SEQ ID NO: 109880 - DNA, 20 bp, Artificial sequence
  SiRNA target sequence
tatcatttttatctagtacc

SEQ ID NO: 109881 - DNA, 20 bp, Artificial sequence
  SiRNA target sequence
atcatttttatctagtacct

SEQ ID NO: 109882 - DNA, 20 bp, Artificial sequence
  SiRNA target sequence
tcatttttatctagtacctt

SEQ ID NO: 109883 - DNA, 20 bp, Artificial sequence
  SiRNA target sequence
catttttatctagtaccttt

SEQ ID NO: 109884 - DNA, 20 bp, Artificial sequence
  SiRNA target sequence
atttttatctagtacctttt

SEQ ID NO: 109885 - DNA, 20 bp, Artificial sequence
  SiRNA target sequence
tttttatctagtaccttttg

SEQ ID NO: 109886 - DNA, 20 bp, Artificial sequence
  SiRNA target sequence
ttttatctagtaccttttgt

SEQ ID NO: 109887 - DNA, 20 bp, Artificial sequence
  SiRNA target sequence
tttatctagtaccttttgta

SEQ ID NO: 109888 - DNA, 20 bp, Artificial sequence
  SiRNA target sequence
ttatctagtaccttttgtaa

SEQ ID NO: 109889 - DNA, 20 bp, Artificial sequence
  SiRNA target sequence
tatctagtaccttttgtaaa

SEQ ID NO: 109890 - DNA, 20 bp, Artificial sequence
  SiRNA target sequence
atctagtaccttttgtaaac

SEQ ID NO: 109891 - DNA, 20 bp, Artificial sequence
  SiRNA target sequence
tctagtaccttttgtaaact

SEQ ID NO: 109892 - DNA, 20 bp, Artificial sequence
  SiRNA target sequence
ctagtaccttttgtaaactc

SEQ ID NO: 109893 - DNA, 20 bp, Artificial sequence
  SiRNA target sequence
tagtaccttttgtaaactca

SEQ ID NO: 109894 - DNA, 20 bp, Artificial sequence
  SiRNA target sequence
agtaccttttgtaaactcat

SEQ ID NO: 109895 - DNA, 20 bp, Artificial sequence
  SiRNA target sequence
gtaccttttgtaaactcata

SEQ ID NO: 109896 - DNA, 20 bp, Artificial sequence
  SiRNA target sequence
taccttttgtaaactcatat

SEQ ID NO: 109897 - DNA, 20 bp, Artificial sequence
  SiRNA target sequence
accttttgtaaactcatata

SEQ ID NO: 109898 - DNA, 20 bp, Artificial sequence
  SiRNA target sequence
ccttttgtaaactcatataa

SEQ ID NO: 109899 - DNA, 20 bp, Artificial sequence
  SiRNA target sequence
cttttgtaaactcatataaa

SEQ ID NO: 109900 - DNA, 20 bp, Artificial sequence
  SiRNA target sequence
ttttgtaaactcatataaat

SEQ ID NO: 109901 - DNA, 20 bp, Artificial sequence
  SiRNA target sequence
tttgtaaactcatataaatg

SEQ ID NO: 109902 - DNA, 20 bp, Artificial sequence
  SiRNA target sequence
ttgtaaactcatataaatgt

SEQ ID NO: 109903 - DNA, 20 bp, Artificial sequence
  SiRNA target sequence
tgtaaactcatataaatgtt

SEQ ID NO: 109904 - DNA, 20 bp, Artificial sequence
  SiRNA target sequence
gtaaactcatataaatgttt

SEQ ID NO: 109905 - DNA, 20 bp, Artificial sequence
  SiRNA target sequence
taaactcatataaatgtttt

SEQ ID NO: 109906 - DNA, 20 bp, Artificial sequence
  SiRNA target sequence
aaactcatataaatgttttc

SEQ ID NO: 109907 - DNA, 20 bp, Artificial sequence
  SiRNA target sequence
aactcatataaatgttttcc

SEQ ID NO: 109908 - DNA, 20 bp, Artificial sequence
  SiRNA target sequence
actcatataaatgttttcct

SEQ ID NO: 109909 - DNA, 20 bp, Artificial sequence
  SiRNA target sequence
ctcatataaatgttttcctg

SEQ ID NO: 109910 - DNA, 20 bp, Artificial sequence
  SiRNA target sequence
tcatataaatgttttcctgt

SEQ ID NO: 109911 - DNA, 20 bp, Artificial sequence
  SiRNA target sequence
catataaatgttttcctgtc

SEQ ID NO: 109912 - DNA, 20 bp, Artificial sequence
  SiRNA target sequence
atataaatgttttcctgtcc

SEQ ID NO: 109913 - DNA, 20 bp, Artificial sequence
  SiRNA target sequence
tataaatgttttcctgtcct

SEQ ID NO: 109914 - DNA, 20 bp, Artificial sequence
  SiRNA target sequence
ataaatgttttcctgtccta

SEQ ID NO: 109915 - DNA, 20 bp, Artificial sequence
  SiRNA target sequence
taaatgttttcctgtcctat

SEQ ID NO: 109916 - DNA, 20 bp, Artificial sequence
  SiRNA target sequence
aaatgttttcctgtcctatt

SEQ ID NO: 109917 - DNA, 20 bp, Artificial sequence
  SiRNA target sequence
aatgttttcctgtcctatta

SEQ ID NO: 109918 - DNA, 20 bp, Artificial sequence
  SiRNA target sequence
atgttttcctgtcctattac

SEQ ID NO: 109919 - DNA, 20 bp, Artificial sequence
  SiRNA target sequence
tgttttcctgtcctattact

SEQ ID NO: 109920 - DNA, 20 bp, Artificial sequence
  SiRNA target sequence
gttttcctgtcctattacta

SEQ ID NO: 109921 - DNA, 20 bp, Artificial sequence
  SiRNA target sequence
ttttcctgtcctattactaa

SEQ ID NO: 109922 - DNA, 20 bp, Artificial sequence
  SiRNA target sequence
tttcctgtcctattactaaa

SEQ ID NO: 109923 - DNA, 20 bp, Artificial sequence
  SiRNA target sequence
ttcctgtcctattactaaat

SEQ ID NO: 109924 - DNA, 20 bp, Artificial sequence
  SiRNA target sequence
tcctgtcctattactaaatg

SEQ ID NO: 109925 - DNA, 20 bp, Artificial sequence
  SiRNA target sequence
cctgtcctattactaaatga

SEQ ID NO: 109926 - DNA, 20 bp, Artificial sequence
  SiRNA target sequence
ctgtcctattactaaatgac

SEQ ID NO: 109927 - DNA, 20 bp, Artificial sequence
  SiRNA target sequence
tgtcctattactaaatgaca

SEQ ID NO: 109928 - DNA, 20 bp, Artificial sequence
  SiRNA target sequence
gtcctattactaaatgacag

SEQ ID NO: 109929 - DNA, 20 bp, Artificial sequence
  SiRNA target sequence
tcctattactaaatgacaga

SEQ ID NO: 109930 - DNA, 20 bp, Artificial sequence
  SiRNA target sequence
cctattactaaatgacagaa

SEQ ID NO: 109931 - DNA, 20 bp, Artificial sequence
  SiRNA target sequence
ctattactaaatgacagaag

SEQ ID NO: 109932 - DNA, 20 bp, Artificial sequence
  SiRNA target sequence
tattactaaatgacagaagc

SEQ ID NO: 109933 - DNA, 20 bp, Artificial sequence
  SiRNA target sequence
attactaaatgacagaagcc

SEQ ID NO: 109934 - DNA, 20 bp, Artificial sequence
  SiRNA target sequence
ttactaaatgacagaagcct

SEQ ID NO: 109935 - DNA, 20 bp, Artificial sequence
  SiRNA target sequence
tactaaatgacagaagcctc

SEQ ID NO: 109936 - DNA, 20 bp, Artificial sequence
  SiRNA target sequence
actaaatgacagaagcctct

SEQ ID NO: 109937 - DNA, 20 bp, Artificial sequence
  SiRNA target sequence
ctaaatgacagaagcctctt

SEQ ID NO: 109938 - DNA, 20 bp, Artificial sequence
  SiRNA target sequence
taaatgacagaagcctctta

SEQ ID NO: 109939 - DNA, 20 bp, Artificial sequence
  SiRNA target sequence
aaatgacagaagcctcttat

SEQ ID NO: 109940 - DNA, 20 bp, Artificial sequence
  SiRNA target sequence
aatgacagaagcctcttata

SEQ ID NO: 109941 - DNA, 20 bp, Artificial sequence
  SiRNA target sequence
atgacagaagcctcttatat

SEQ ID NO: 109942 - DNA, 20 bp, Artificial sequence
  SiRNA target sequence
tgacagaagcctcttatatt

SEQ ID NO: 109943 - DNA, 20 bp, Artificial sequence
  SiRNA target sequence
gacagaagcctcttatattt

SEQ ID NO: 109944 - DNA, 20 bp, Artificial sequence
  SiRNA target sequence
acagaagcctcttatatttc

SEQ ID NO: 109945 - DNA, 20 bp, Artificial sequence
  SiRNA target sequence
cagaagcctcttatatttcc

SEQ ID NO: 109946 - DNA, 20 bp, Artificial sequence
  SiRNA target sequence
agaagcctcttatatttcct

SEQ ID NO: 109947 - DNA, 20 bp, Artificial sequence
  SiRNA target sequence
gaagcctcttatatttcctt

SEQ ID NO: 109948 - DNA, 20 bp, Artificial sequence
  SiRNA target sequence
aagcctcttatatttccttt

SEQ ID NO: 109949 - DNA, 20 bp, Artificial sequence
  SiRNA target sequence
agcctcttatatttcctttt

SEQ ID NO: 109950 - DNA, 20 bp, Artificial sequence
  SiRNA target sequence
gcctcttatatttccttttt

SEQ ID NO: 109951 - DNA, 20 bp, Artificial sequence
  SiRNA target sequence
cctcttatatttcctttttt

SEQ ID NO: 109952 - DNA, 20 bp, Artificial sequence
  SiRNA target sequence
ctcttatatttcctttttta

SEQ ID NO: 109953 - DNA, 20 bp, Artificial sequence
  SiRNA target sequence
tcttatatttccttttttat

SEQ ID NO: 109954 - DNA, 20 bp, Artificial sequence
  SiRNA target sequence
cttatatttccttttttata

SEQ ID NO: 109955 - DNA, 20 bp, Artificial sequence
  SiRNA target sequence
ttatatttccttttttatac

SEQ ID NO: 109956 - DNA, 20 bp, Artificial sequence
  SiRNA target sequence
tatatttccttttttatact

SEQ ID NO: 109957 - DNA, 20 bp, Artificial sequence
  SiRNA target sequence
atatttccttttttatactt

SEQ ID NO: 109958 - DNA, 20 bp, Artificial sequence
  SiRNA target sequence
tatttccttttttatactta

SEQ ID NO: 109959 - DNA, 20 bp, Artificial sequence
  SiRNA target sequence
atttccttttttatacttag

SEQ ID NO: 109960 - DNA, 20 bp, Artificial sequence
  SiRNA target sequence
tttccttttttatacttaga

SEQ ID NO: 109961 - DNA, 20 bp, Artificial sequence
  SiRNA target sequence
ttccttttttatacttagag

SEQ ID NO: 109962 - DNA, 20 bp, Artificial sequence
  SiRNA target sequence
tccttttttatacttagagt

SEQ ID NO: 109963 - DNA, 20 bp, Artificial sequence
  SiRNA target sequence
ccttttttatacttagagtt

SEQ ID NO: 109964 - DNA, 20 bp, Artificial sequence
  SiRNA target sequence
cttttttatacttagagtta

SEQ ID NO: 109965 - DNA, 20 bp, Artificial sequence
  SiRNA target sequence
ttttttatacttagagttag

SEQ ID NO: 109966 - DNA, 20 bp, Artificial sequence
  SiRNA target sequence
tttttatacttagagttagc

SEQ ID NO: 109967 - DNA, 20 bp, Artificial sequence
  SiRNA target sequence
ttttatacttagagttagca

SEQ ID NO: 109968 - DNA, 20 bp, Artificial sequence
  SiRNA target sequence
tttatacttagagttagcat

SEQ ID NO: 109969 - DNA, 20 bp, Artificial sequence
  SiRNA target sequence
ttatacttagagttagcata

SEQ ID NO: 109970 - DNA, 20 bp, Artificial sequence
  SiRNA target sequence
tatacttagagttagcatat

SEQ ID NO: 109971 - DNA, 20 bp, Artificial sequence
  SiRNA target sequence
atacttagagttagcatatt

SEQ ID NO: 109972 - DNA, 20 bp, Artificial sequence
  SiRNA target sequence
tacttagagttagcatattc

SEQ ID NO: 109973 - DNA, 20 bp, Artificial sequence
  SiRNA target sequence
acttagagttagcatattct

SEQ ID NO: 109974 - DNA, 20 bp, Artificial sequence
  SiRNA target sequence
cttagagttagcatattctt

SEQ ID NO: 109975 - DNA, 20 bp, Artificial sequence
  SiRNA target sequence
ttagagttagcatattcttc

SEQ ID NO: 109976 - DNA, 20 bp, Artificial sequence
  SiRNA target sequence
tagagttagcatattcttcg

SEQ ID NO: 109977 - DNA, 20 bp, Artificial sequence
  SiRNA target sequence
agagttagcatattcttcga

SEQ ID NO: 109978 - DNA, 20 bp, Artificial sequence
  SiRNA target sequence
gagttagcatattcttcgat

SEQ ID NO: 109979 - DNA, 20 bp, Artificial sequence
  SiRNA target sequence
agttagcatattcttcgata

SEQ ID NO: 109980 - DNA, 20 bp, Artificial sequence
  SiRNA target sequence
gttagcatattcttcgataa

SEQ ID NO: 109981 - DNA, 20 bp, Artificial sequence
  SiRNA target sequence
ttagcatattcttcgataag

SEQ ID NO: 109982 - DNA, 20 bp, Artificial sequence
  SiRNA target sequence
tagcatattcttcgataaga

SEQ ID NO: 109983 - DNA, 20 bp, Artificial sequence
  SiRNA target sequence
agcatattcttcgataagac

SEQ ID NO: 109984 - DNA, 20 bp, Artificial sequence
  SiRNA target sequence
gcatattcttcgataagacg

SEQ ID NO: 109985 - DNA, 20 bp, Artificial sequence
  SiRNA target sequence
catattcttcgataagacgt

SEQ ID NO: 109986 - DNA, 20 bp, Artificial sequence
  SiRNA target sequence
atattcttcgataagacgta

SEQ ID NO: 109987 - DNA, 20 bp, Artificial sequence
  SiRNA target sequence
tattcttcgataagacgtag

SEQ ID NO: 109988 - DNA, 20 bp, Artificial sequence
  SiRNA target sequence
attcttcgataagacgtaga

SEQ ID NO: 109989 - DNA, 20 bp, Artificial sequence
  SiRNA target sequence
ttcttcgataagacgtagaa

SEQ ID NO: 109990 - DNA, 20 bp, Artificial sequence
  SiRNA target sequence
tcttcgataagacgtagaat

SEQ ID NO: 109991 - DNA, 20 bp, Artificial sequence
  SiRNA target sequence
cttcgataagacgtagaatt

SEQ ID NO: 109992 - DNA, 20 bp, Artificial sequence
  SiRNA target sequence
ttcgataagacgtagaatta

SEQ ID NO: 109993 - DNA, 20 bp, Artificial sequence
  SiRNA target sequence
tcgataagacgtagaattaa

SEQ ID NO: 109994 - DNA, 20 bp, Artificial sequence
  SiRNA target sequence
cgataagacgtagaattaac

SEQ ID NO: 109995 - DNA, 20 bp, Artificial sequence
  SiRNA target sequence
gataagacgtagaattaaca

SEQ ID NO: 109996 - DNA, 20 bp, Artificial sequence
  SiRNA target sequence
ataagacgtagaattaacat

SEQ ID NO: 109997 - DNA, 20 bp, Artificial sequence
  SiRNA target sequence
taagacgtagaattaacata

SEQ ID NO: 109998 - DNA, 20 bp, Artificial sequence
  SiRNA target sequence
aagacgtagaattaacatat

SEQ ID NO: 109999 - DNA, 20 bp, Artificial sequence
  SiRNA target sequence
agacgtagaattaacatatt

SEQ ID NO: 110000 - DNA, 20 bp, Artificial sequence
  SiRNA target sequence
gacgtagaattaacatattt

SEQ ID NO: 110001 - DNA, 20 bp, Artificial sequence
  SiRNA target sequence
acgtagaattaacatatttc

SEQ ID NO: 110002 - DNA, 20 bp, Artificial sequence
  SiRNA target sequence
cgtagaattaacatatttct

SEQ ID NO: 110003 - DNA, 20 bp, Artificial sequence
  SiRNA target sequence
gtagaattaacatatttcta

SEQ ID NO: 110004 - DNA, 20 bp, Artificial sequence
  SiRNA target sequence
tagaattaacatatttctat

SEQ ID NO: 110005 - DNA, 20 bp, Artificial sequence
  SiRNA target sequence
agaattaacatatttctata

SEQ ID NO: 110006 - DNA, 20 bp, Artificial sequence
  SiRNA target sequence
gaattaacatatttctataa

SEQ ID NO: 110007 - DNA, 20 bp, Artificial sequence
  SiRNA target sequence
aattaacatatttctataaa

SEQ ID NO: 110008 - DNA, 20 bp, Artificial sequence
  SiRNA target sequence
attaacatatttctataaac

SEQ ID NO: 110009 - DNA, 20 bp, Artificial sequence
  SiRNA target sequence
ttaacatatttctataaaca

SEQ ID NO: 110010 - DNA, 20 bp, Artificial sequence
  SiRNA target sequence
taacatatttctataaacat

SEQ ID NO: 110011 - DNA, 20 bp, Artificial sequence
  SiRNA target sequence
aacatatttctataaacatc

SEQ ID NO: 110012 - DNA, 20 bp, Artificial sequence
  SiRNA target sequence
acatatttctataaacatct

SEQ ID NO: 110013 - DNA, 20 bp, Artificial sequence
  SiRNA target sequence
catatttctataaacatctt

SEQ ID NO: 110014 - DNA, 20 bp, Artificial sequence
  SiRNA target sequence
atatttctataaacatcttg

SEQ ID NO: 110015 - DNA, 20 bp, Artificial sequence
  SiRNA target sequence
tatttctataaacatcttgt

SEQ ID NO: 110016 - DNA, 20 bp, Artificial sequence
  SiRNA target sequence
atttctataaacatcttgta

SEQ ID NO: 110017 - DNA, 20 bp, Artificial sequence
  SiRNA target sequence
tttctataaacatcttgtac

SEQ ID NO: 110018 - DNA, 20 bp, Artificial sequence
  SiRNA target sequence
ttctataaacatcttgtaca

SEQ ID NO: 110019 - DNA, 20 bp, Artificial sequence
  SiRNA target sequence
tctataaacatcttgtacaa

SEQ ID NO: 110020 - DNA, 20 bp, Artificial sequence
  SiRNA target sequence
ctataaacatcttgtacaag

SEQ ID NO: 110021 - DNA, 20 bp, Artificial sequence
  SiRNA target sequence
tataaacatcttgtacaagt

SEQ ID NO: 110022 - DNA, 20 bp, Artificial sequence
  SiRNA target sequence
ataaacatcttgtacaagtt

SEQ ID NO: 110023 - DNA, 20 bp, Artificial sequence
  SiRNA target sequence
taaacatcttgtacaagttc

SEQ ID NO: 110024 - DNA, 20 bp, Artificial sequence
  SiRNA target sequence
aaacatcttgtacaagttct

SEQ ID NO: 110025 - DNA, 20 bp, Artificial sequence
  SiRNA target sequence
aacatcttgtacaagttctt

SEQ ID NO: 110026 - DNA, 20 bp, Artificial sequence
  SiRNA target sequence
acatcttgtacaagttcttt

SEQ ID NO: 110027 - DNA, 20 bp, Artificial sequence
  SiRNA target sequence
catcttgtacaagttctttg

SEQ ID NO: 110028 - DNA, 20 bp, Artificial sequence
  SiRNA target sequence
atcttgtacaagttctttgt

SEQ ID NO: 110029 - DNA, 20 bp, Artificial sequence
  SiRNA target sequence
tcttgtacaagttctttgtt

SEQ ID NO: 110030 - DNA, 20 bp, Artificial sequence
  SiRNA target sequence
cttgtacaagttctttgttt

SEQ ID NO: 110031 - DNA, 20 bp, Artificial sequence
  SiRNA target sequence
ttgtacaagttctttgttta

SEQ ID NO: 110032 - DNA, 20 bp, Artificial sequence
  SiRNA target sequence
tgtacaagttctttgtttaa

SEQ ID NO: 110033 - DNA, 20 bp, Artificial sequence
  SiRNA target sequence
gtacaagttctttgtttaaa

SEQ ID NO: 110034 - DNA, 20 bp, Artificial sequence
  SiRNA target sequence
tacaagttctttgtttaaag

SEQ ID NO: 110035 - DNA, 20 bp, Artificial sequence
  SiRNA target sequence
acaagttctttgtttaaagt

SEQ ID NO: 110036 - DNA, 20 bp, Artificial sequence
  SiRNA target sequence
caagttctttgtttaaagta

SEQ ID NO: 110037 - DNA, 20 bp, Artificial sequence
  SiRNA target sequence
aagttctttgtttaaagtag

SEQ ID NO: 110038 - DNA, 20 bp, Artificial sequence
  SiRNA target sequence
agttctttgtttaaagtagt

SEQ ID NO: 110039 - DNA, 20 bp, Artificial sequence
  SiRNA target sequence
gttctttgtttaaagtagtt

SEQ ID NO: 110040 - DNA, 20 bp, Artificial sequence
  SiRNA target sequence
ttctttgtttaaagtagttt

SEQ ID NO: 110041 - DNA, 20 bp, Artificial sequence
  SiRNA target sequence
tctttgtttaaagtagtttt

SEQ ID NO: 110042 - DNA, 20 bp, Artificial sequence
  SiRNA target sequence
ctttgtttaaagtagttttc

SEQ ID NO: 110043 - DNA, 20 bp, Artificial sequence
  SiRNA target sequence
tttgtttaaagtagttttca

SEQ ID NO: 110044 - DNA, 20 bp, Artificial sequence
  SiRNA target sequence
ttgtttaaagtagttttcag

SEQ ID NO: 110045 - DNA, 20 bp, Artificial sequence
  SiRNA target sequence
tgtttaaagtagttttcagt

SEQ ID NO: 110046 - DNA, 20 bp, Artificial sequence
  SiRNA target sequence
gtttaaagtagttttcagtt

SEQ ID NO: 110047 - DNA, 20 bp, Artificial sequence
  SiRNA target sequence
tttaaagtagttttcagttt

SEQ ID NO: 110048 - DNA, 20 bp, Artificial sequence
  SiRNA target sequence
ttaaagtagttttcagttta

SEQ ID NO: 110049 - DNA, 20 bp, Artificial sequence
  SiRNA target sequence
taaagtagttttcagtttaa

SEQ ID NO: 110050 - DNA, 20 bp, Artificial sequence
  SiRNA target sequence
aaagtagttttcagtttaac

SEQ ID NO: 110051 - DNA, 20 bp, Artificial sequence
  SiRNA target sequence
aagtagttttcagtttaact

SEQ ID NO: 110052 - DNA, 20 bp, Artificial sequence
  SiRNA target sequence
agtagttttcagtttaactg

SEQ ID NO: 110053 - DNA, 20 bp, Artificial sequence
  SiRNA target sequence
gtagttttcagtttaactgt

SEQ ID NO: 110054 - DNA, 20 bp, Artificial sequence
  SiRNA target sequence
tagttttcagtttaactgta

SEQ ID NO: 110055 - DNA, 20 bp, Artificial sequence
  SiRNA target sequence
agttttcagtttaactgtat

SEQ ID NO: 110056 - DNA, 20 bp, Artificial sequence
  SiRNA target sequence
gttttcagtttaactgtatt

SEQ ID NO: 110057 - DNA, 20 bp, Artificial sequence
  SiRNA target sequence
ttttcagtttaactgtattt

SEQ ID NO: 110058 - DNA, 20 bp, Artificial sequence
  SiRNA target sequence
tttcagtttaactgtatttt

SEQ ID NO: 110059 - DNA, 20 bp, Artificial sequence
  SiRNA target sequence
ttcagtttaactgtattttt

SEQ ID NO: 110060 - DNA, 20 bp, Artificial sequence
  SiRNA target sequence
tcagtttaactgtattttta

SEQ ID NO: 110061 - DNA, 20 bp, Artificial sequence
  SiRNA target sequence
cagtttaactgtatttttat

SEQ ID NO: 110062 - DNA, 20 bp, Artificial sequence
  SiRNA target sequence
agtttaactgtatttttatc

SEQ ID NO: 110063 - DNA, 20 bp, Artificial sequence
  SiRNA target sequence
gtttaactgtatttttatct

SEQ ID NO: 110064 - DNA, 20 bp, Artificial sequence
  SiRNA target sequence
tttaactgtatttttatcta

SEQ ID NO: 110065 - DNA, 20 bp, Artificial sequence
  SiRNA target sequence
ttaactgtatttttatctac

SEQ ID NO: 110066 - DNA, 20 bp, Artificial sequence
  SiRNA target sequence
taactgtatttttatctacc

SEQ ID NO: 110067 - DNA, 20 bp, Artificial sequence
  SiRNA target sequence
aactgtatttttatctacca

SEQ ID NO: 110068 - DNA, 20 bp, Artificial sequence
  SiRNA target sequence
actgtatttttatctaccaa

SEQ ID NO: 110069 - DNA, 20 bp, Artificial sequence
  SiRNA target sequence
ctgtatttttatctaccaaa

SEQ ID NO: 110070 - DNA, 20 bp, Artificial sequence
  SiRNA target sequence
tgtatttttatctaccaaat

SEQ ID NO: 110071 - DNA, 20 bp, Artificial sequence
  SiRNA target sequence
gtatttttatctaccaaata

SEQ ID NO: 110072 - DNA, 20 bp, Artificial sequence
  SiRNA target sequence
tatttttatctaccaaataa

SEQ ID NO: 110073 - DNA, 20 bp, Artificial sequence
  SiRNA target sequence
atttttatctaccaaataat

SEQ ID NO: 110074 - DNA, 20 bp, Artificial sequence
  SiRNA target sequence
tttttatctaccaaataata

SEQ ID NO: 110075 - DNA, 20 bp, Artificial sequence
  SiRNA target sequence
ttttatctaccaaataataa

SEQ ID NO: 110076 - DNA, 20 bp, Artificial sequence
  SiRNA target sequence
tttatctaccaaataataat

SEQ ID NO: 110077 - DNA, 20 bp, Artificial sequence
  SiRNA target sequence
ttatctaccaaataataatc

SEQ ID NO: 110078 - DNA, 20 bp, Artificial sequence
  SiRNA target sequence
tatctaccaaataataatct

SEQ ID NO: 110079 - DNA, 20 bp, Artificial sequence
  SiRNA target sequence
atctaccaaataataatcta

SEQ ID NO: 110080 - DNA, 20 bp, Artificial sequence
  SiRNA target sequence
tctaccaaataataatctat

SEQ ID NO: 110081 - DNA, 20 bp, Artificial sequence
  SiRNA target sequence
ctaccaaataataatctatc

SEQ ID NO: 110082 - DNA, 20 bp, Artificial sequence
  SiRNA target sequence
taccaaataataatctatca

SEQ ID NO: 110083 - DNA, 20 bp, Artificial sequence
  SiRNA target sequence
accaaataataatctatcat

SEQ ID NO: 110084 - DNA, 21 bp, Artificial sequence
  SiRNA target sequence
ttattcagaataaacatcttt

SEQ ID NO: 110085 - DNA, 21 bp, Artificial sequence
  SiRNA target sequence
tattcagaataaacatctttt

SEQ ID NO: 110086 - DNA, 21 bp, Artificial sequence
  SiRNA target sequence
attcagaataaacatctttta

SEQ ID NO: 110087 - DNA, 21 bp, Artificial sequence
  SiRNA target sequence
ttcagaataaacatcttttaa

SEQ ID NO: 110088 - DNA, 21 bp, Artificial sequence
  SiRNA target sequence
tcagaataaacatcttttaaa

SEQ ID NO: 110089 - DNA, 21 bp, Artificial sequence
  SiRNA target sequence
cagaataaacatcttttaaaa

SEQ ID NO: 110090 - DNA, 21 bp, Artificial sequence
  SiRNA target sequence
agaataaacatcttttaaaag

SEQ ID NO: 110091 - DNA, 21 bp, Artificial sequence
  SiRNA target sequence
gaataaacatcttttaaaagt

SEQ ID NO: 110092 - DNA, 21 bp, Artificial sequence
  SiRNA target sequence
aataaacatcttttaaaagtt

SEQ ID NO: 110093 - DNA, 21 bp, Artificial sequence
  SiRNA target sequence
ataaacatcttttaaaagttc

SEQ ID NO: 110094 - DNA, 21 bp, Artificial sequence
  SiRNA target sequence
taaacatcttttaaaagttca

SEQ ID NO: 110095 - DNA, 21 bp, Artificial sequence
  SiRNA target sequence
aaacatcttttaaaagttcat

SEQ ID NO: 110096 - DNA, 21 bp, Artificial sequence
  SiRNA target sequence
aacatcttttaaaagttcatc

SEQ ID NO: 110097 - DNA, 21 bp, Artificial sequence
  SiRNA target sequence
acatcttttaaaagttcatcg

SEQ ID NO: 110098 - DNA, 21 bp, Artificial sequence
  SiRNA target sequence
catcttttaaaagttcatcga

SEQ ID NO: 110099 - DNA, 21 bp, Artificial sequence
  SiRNA target sequence
atcttttaaaagttcatcgat

SEQ ID NO: 110100 - DNA, 21 bp, Artificial sequence
  SiRNA target sequence
tcttttaaaagttcatcgata

SEQ ID NO: 110101 - DNA, 21 bp, Artificial sequence
  SiRNA target sequence
cttttaaaagttcatcgatat

SEQ ID NO: 110102 - DNA, 21 bp, Artificial sequence
  SiRNA target sequence
ttttaaaagttcatcgatatc

SEQ ID NO: 110103 - DNA, 21 bp, Artificial sequence
  SiRNA target sequence
tttaaaagttcatcgatatcg

SEQ ID NO: 110104 - DNA, 21 bp, Artificial sequence
  SiRNA target sequence
ttaaaagttcatcgatatcgg

SEQ ID NO: 110105 - DNA, 21 bp, Artificial sequence
  SiRNA target sequence
taaaagttcatcgatatcggg

SEQ ID NO: 110106 - DNA, 21 bp, Artificial sequence
  SiRNA target sequence
aaaagttcatcgatatcgggt

SEQ ID NO: 110107 - DNA, 21 bp, Artificial sequence
  SiRNA target sequence
aaagttcatcgatatcgggtt

SEQ ID NO: 110108 - DNA, 21 bp, Artificial sequence
  SiRNA target sequence
aagttcatcgatatcgggttc

SEQ ID NO: 110109 - DNA, 21 bp, Artificial sequence
  SiRNA target sequence
agttcatcgatatcgggttct

SEQ ID NO: 110110 - DNA, 21 bp, Artificial sequence
  SiRNA target sequence
gttcatcgatatcgggttctt

SEQ ID NO: 110111 - DNA, 21 bp, Artificial sequence
  SiRNA target sequence
ttcatcgatatcgggttcttt

SEQ ID NO: 110112 - DNA, 21 bp, Artificial sequence
  SiRNA target sequence
tcatcgatatcgggttcttta

SEQ ID NO: 110113 - DNA, 21 bp, Artificial sequence
  SiRNA target sequence
catcgatatcgggttctttag

SEQ ID NO: 110114 - DNA, 21 bp, Artificial sequence
  SiRNA target sequence
atcgatatcgggttctttaga

SEQ ID NO: 110115 - DNA, 21 bp, Artificial sequence
  SiRNA target sequence
tcgatatcgggttctttagaa

SEQ ID NO: 110116 - DNA, 21 bp, Artificial sequence
  SiRNA target sequence
cgatatcgggttctttagaaa

SEQ ID NO: 110117 - DNA, 21 bp, Artificial sequence
  SiRNA target sequence
gatatcgggttctttagaaaa

SEQ ID NO: 110118 - DNA, 21 bp, Artificial sequence
  SiRNA target sequence
atatcgggttctttagaaaaa

SEQ ID NO: 110119 - DNA, 21 bp, Artificial sequence
  SiRNA target sequence
tatcgggttctttagaaaaaa

SEQ ID NO: 110120 - DNA, 21 bp, Artificial sequence
  SiRNA target sequence
atcgggttctttagaaaaaat

SEQ ID NO: 110121 - DNA, 21 bp, Artificial sequence
  SiRNA target sequence
tcgggttctttagaaaaaata

SEQ ID NO: 110122 - DNA, 21 bp, Artificial sequence
  SiRNA target sequence
cgggttctttagaaaaaataa

SEQ ID NO: 110123 - DNA, 21 bp, Artificial sequence
  SiRNA target sequence
gggttctttagaaaaaataac

SEQ ID NO: 110124 - DNA, 21 bp, Artificial sequence
  SiRNA target sequence
ggttctttagaaaaaataact

SEQ ID NO: 110125 - DNA, 21 bp, Artificial sequence
  SiRNA target sequence
gttctttagaaaaaataactt

SEQ ID NO: 110126 - DNA, 21 bp, Artificial sequence
  SiRNA target sequence
ttctttagaaaaaataacttt

SEQ ID NO: 110127 - DNA, 21 bp, Artificial sequence
  SiRNA target sequence
tctttagaaaaaataactttt

SEQ ID NO: 110128 - DNA, 21 bp, Artificial sequence
  SiRNA target sequence
ctttagaaaaaataacttttt

SEQ ID NO: 110129 - DNA, 21 bp, Artificial sequence
  SiRNA target sequence
tttagaaaaaataactttttt

SEQ ID NO: 110130 - DNA, 21 bp, Artificial sequence
  SiRNA target sequence
ttagaaaaaataactttttta

SEQ ID NO: 110131 - DNA, 21 bp, Artificial sequence
  SiRNA target sequence
tagaaaaaataacttttttaa

SEQ ID NO: 110132 - DNA, 21 bp, Artificial sequence
  SiRNA target sequence
agaaaaaataacttttttaac

SEQ ID NO: 110133 - DNA, 21 bp, Artificial sequence
  SiRNA target sequence
gaaaaaataacttttttaaca

SEQ ID NO: 110134 - DNA, 21 bp, Artificial sequence
  SiRNA target sequence
aaaaaataacttttttaacac

SEQ ID NO: 110135 - DNA, 21 bp, Artificial sequence
  SiRNA target sequence
aaaaataacttttttaacacc

SEQ ID NO: 110136 - DNA, 21 bp, Artificial sequence
  SiRNA target sequence
aaaataacttttttaacacct

SEQ ID NO: 110137 - DNA, 21 bp, Artificial sequence
  SiRNA target sequence
aaataacttttttaacacctt

SEQ ID NO: 110138 - DNA, 21 bp, Artificial sequence
  SiRNA target sequence
aataacttttttaacaccttc

SEQ ID NO: 110139 - DNA, 21 bp, Artificial sequence
  SiRNA target sequence
ataacttttttaacaccttct

SEQ ID NO: 110140 - DNA, 21 bp, Artificial sequence
  SiRNA target sequence
taacttttttaacaccttctt

SEQ ID NO: 110141 - DNA, 21 bp, Artificial sequence
  SiRNA target sequence
aacttttttaacaccttcttc

SEQ ID NO: 110142 - DNA, 21 bp, Artificial sequence
  SiRNA target sequence
acttttttaacaccttcttca

SEQ ID NO: 110143 - DNA, 21 bp, Artificial sequence
  SiRNA target sequence
cttttttaacaccttcttcaa

SEQ ID NO: 110144 - DNA, 21 bp, Artificial sequence
  SiRNA target sequence
ttttttaacaccttcttcaaa

SEQ ID NO: 110145 - DNA, 21 bp, Artificial sequence
  SiRNA target sequence
tttttaacaccttcttcaaag

SEQ ID NO: 110146 - DNA, 21 bp, Artificial sequence
  SiRNA target sequence
ttttaacaccttcttcaaagc

SEQ ID NO: 110147 - DNA, 21 bp, Artificial sequence
  SiRNA target sequence
tttaacaccttcttcaaagca

SEQ ID NO: 110148 - DNA, 21 bp, Artificial sequence
  SiRNA target sequence
ttaacaccttcttcaaagcag

SEQ ID NO: 110149 - DNA, 21 bp, Artificial sequence
  SiRNA target sequence
taacaccttcttcaaagcagg

SEQ ID NO: 110150 - DNA, 21 bp, Artificial sequence
  SiRNA target sequence
aacaccttcttcaaagcagga

SEQ ID NO: 110151 - DNA, 21 bp, Artificial sequence
  SiRNA target sequence
acaccttcttcaaagcaggaa

SEQ ID NO: 110152 - DNA, 21 bp, Artificial sequence
  SiRNA target sequence
caccttcttcaaagcaggaaa

SEQ ID NO: 110153 - DNA, 21 bp, Artificial sequence
  SiRNA target sequence
accttcttcaaagcaggaaat

SEQ ID NO: 110154 - DNA, 21 bp, Artificial sequence
  SiRNA target sequence
ccttcttcaaagcaggaaatt

SEQ ID NO: 110155 - DNA, 21 bp, Artificial sequence
  SiRNA target sequence
cttcttcaaagcaggaaatta

SEQ ID NO: 110156 - DNA, 21 bp, Artificial sequence
  SiRNA target sequence
ttcttcaaagcaggaaattac

SEQ ID NO: 110157 - DNA, 21 bp, Artificial sequence
  SiRNA target sequence
tcttcaaagcaggaaattacc

SEQ ID NO: 110158 - DNA, 21 bp, Artificial sequence
  SiRNA target sequence
cttcaaagcaggaaattacct

SEQ ID NO: 110159 - DNA, 21 bp, Artificial sequence
  SiRNA target sequence
ttcaaagcaggaaattacctc

SEQ ID NO: 110160 - DNA, 21 bp, Artificial sequence
  SiRNA target sequence
tcaaagcaggaaattacctca

SEQ ID NO: 110161 - DNA, 21 bp, Artificial sequence
  SiRNA target sequence
caaagcaggaaattacctcat

SEQ ID NO: 110162 - DNA, 21 bp, Artificial sequence
  SiRNA target sequence
aaagcaggaaattacctcatc

SEQ ID NO: 110163 - DNA, 21 bp, Artificial sequence
  SiRNA target sequence
aagcaggaaattacctcatct

SEQ ID NO: 110164 - DNA, 21 bp, Artificial sequence
  SiRNA target sequence
agcaggaaattacctcatctt

SEQ ID NO: 110165 - DNA, 21 bp, Artificial sequence
  SiRNA target sequence
gcaggaaattacctcatcttc

SEQ ID NO: 110166 - DNA, 21 bp, Artificial sequence
  SiRNA target sequence
caggaaattacctcatcttcg

SEQ ID NO: 110167 - DNA, 21 bp, Artificial sequence
  SiRNA target sequence
aggaaattacctcatcttcga

SEQ ID NO: 110168 - DNA, 21 bp, Artificial sequence
  SiRNA target sequence
ggaaattacctcatcttcgat

SEQ ID NO: 110169 - DNA, 21 bp, Artificial sequence
  SiRNA target sequence
gaaattacctcatcttcgata

SEQ ID NO: 110170 - DNA, 21 bp, Artificial sequence
  SiRNA target sequence
aaattacctcatcttcgataa

SEQ ID NO: 110171 - DNA, 21 bp, Artificial sequence
  SiRNA target sequence
aattacctcatcttcgataat

SEQ ID NO: 110172 - DNA, 21 bp, Artificial sequence
  SiRNA target sequence
attacctcatcttcgataatt

SEQ ID NO: 110173 - DNA, 21 bp, Artificial sequence
  SiRNA target sequence
ttacctcatcttcgataattt

SEQ ID NO: 110174 - DNA, 21 bp, Artificial sequence
  SiRNA target sequence
tacctcatcttcgataatttt

SEQ ID NO: 110175 - DNA, 21 bp, Artificial sequence
  SiRNA target sequence
acctcatcttcgataattttt

SEQ ID NO: 110176 - DNA, 21 bp, Artificial sequence
  SiRNA target sequence
cctcatcttcgataattttta

SEQ ID NO: 110177 - DNA, 21 bp, Artificial sequence
  SiRNA target sequence
ctcatcttcgataatttttac

SEQ ID NO: 110178 - DNA, 21 bp, Artificial sequence
  SiRNA target sequence
tcatcttcgataatttttact

SEQ ID NO: 110179 - DNA, 21 bp, Artificial sequence
  SiRNA target sequence
catcttcgataatttttactt

SEQ ID NO: 110180 - DNA, 21 bp, Artificial sequence
  SiRNA target sequence
atcttcgataatttttacttc

SEQ ID NO: 110181 - DNA, 21 bp, Artificial sequence
  SiRNA target sequence
tcttcgataatttttacttct

SEQ ID NO: 110182 - DNA, 21 bp, Artificial sequence
  SiRNA target sequence
cttcgataatttttacttctt

SEQ ID NO: 110183 - DNA, 21 bp, Artificial sequence
  SiRNA target sequence
ttcgataatttttacttcttc

SEQ ID NO: 110184 - DNA, 21 bp, Artificial sequence
  SiRNA target sequence
tcgataatttttacttcttca

SEQ ID NO: 110185 - DNA, 21 bp, Artificial sequence
  SiRNA target sequence
cgataatttttacttcttcac

SEQ ID NO: 110186 - DNA, 21 bp, Artificial sequence
  SiRNA target sequence
gataatttttacttcttcaca

SEQ ID NO: 110187 - DNA, 21 bp, Artificial sequence
  SiRNA target sequence
ataatttttacttcttcacaa

SEQ ID NO: 110188 - DNA, 21 bp, Artificial sequence
  SiRNA target sequence
taatttttacttcttcacaag

SEQ ID NO: 110189 - DNA, 21 bp, Artificial sequence
  SiRNA target sequence
aatttttacttcttcacaagt

SEQ ID NO: 110190 - DNA, 21 bp, Artificial sequence
  SiRNA target sequence
atttttacttcttcacaagtc

SEQ ID NO: 110191 - DNA, 21 bp, Artificial sequence
  SiRNA target sequence
tttttacttcttcacaagtcg

SEQ ID NO: 110192 - DNA, 21 bp, Artificial sequence
  SiRNA target sequence
ttttacttcttcacaagtcgc

SEQ ID NO: 110193 - DNA, 21 bp, Artificial sequence
  SiRNA target sequence
tttacttcttcacaagtcgca

SEQ ID NO: 110194 - DNA, 21 bp, Artificial sequence
  SiRNA target sequence
ttacttcttcacaagtcgcaa

SEQ ID NO: 110195 - DNA, 21 bp, Artificial sequence
  SiRNA target sequence
tacttcttcacaagtcgcaaa

SEQ ID NO: 110196 - DNA, 21 bp, Artificial sequence
  SiRNA target sequence
acttcttcacaagtcgcaaat

SEQ ID NO: 110197 - DNA, 21 bp, Artificial sequence
  SiRNA target sequence
cttcttcacaagtcgcaaatt

SEQ ID NO: 110198 - DNA, 21 bp, Artificial sequence
  SiRNA target sequence
ttcttcacaagtcgcaaattt

SEQ ID NO: 110199 - DNA, 21 bp, Artificial sequence
  SiRNA target sequence
tcttcacaagtcgcaaatttt

SEQ ID NO: 110200 - DNA, 21 bp, Artificial sequence
  SiRNA target sequence
cttcacaagtcgcaaattttt

SEQ ID NO: 110201 - DNA, 21 bp, Artificial sequence
  SiRNA target sequence
ttcacaagtcgcaaatttttg

SEQ ID NO: 110202 - DNA, 21 bp, Artificial sequence
  SiRNA target sequence
tcacaagtcgcaaatttttgt

SEQ ID NO: 110203 - DNA, 21 bp, Artificial sequence
  SiRNA target sequence
cacaagtcgcaaatttttgta

SEQ ID NO: 110204 - DNA, 21 bp, Artificial sequence
  SiRNA target sequence
acaagtcgcaaatttttgtaa

SEQ ID NO: 110205 - DNA, 21 bp, Artificial sequence
  SiRNA target sequence
caagtcgcaaatttttgtaag

SEQ ID NO: 110206 - DNA, 21 bp, Artificial sequence
  SiRNA target sequence
aagtcgcaaatttttgtaagt

SEQ ID NO: 110207 - DNA, 21 bp, Artificial sequence
  SiRNA target sequence
agtcgcaaatttttgtaagtt

SEQ ID NO: 110208 - DNA, 21 bp, Artificial sequence
  SiRNA target sequence
gtcgcaaatttttgtaagtta

SEQ ID NO: 110209 - DNA, 21 bp, Artificial sequence
  SiRNA target sequence
tcgcaaatttttgtaagttat

SEQ ID NO: 110210 - DNA, 21 bp, Artificial sequence
  SiRNA target sequence
cgcaaatttttgtaagttatt

SEQ ID NO: 110211 - DNA, 21 bp, Artificial sequence
  SiRNA target sequence
gcaaatttttgtaagttattt

SEQ ID NO: 110212 - DNA, 21 bp, Artificial sequence
  SiRNA target sequence
caaatttttgtaagttatttt

SEQ ID NO: 110213 - DNA, 21 bp, Artificial sequence
  SiRNA target sequence
aaatttttgtaagttattttt

SEQ ID NO: 110214 - DNA, 21 bp, Artificial sequence
  SiRNA target sequence
aatttttgtaagttatttttt

SEQ ID NO: 110215 - DNA, 21 bp, Artificial sequence
  SiRNA target sequence
atttttgtaagttattttttg

SEQ ID NO: 110216 - DNA, 21 bp, Artificial sequence
  SiRNA target sequence
tttttgtaagttattttttgc

SEQ ID NO: 110217 - DNA, 21 bp, Artificial sequence
  SiRNA target sequence
ttttgtaagttattttttgct

SEQ ID NO: 110218 - DNA, 21 bp, Artificial sequence
  SiRNA target sequence
tttgtaagttattttttgctt

SEQ ID NO: 110219 - DNA, 21 bp, Artificial sequence
  SiRNA target sequence
ttgtaagttattttttgcttc

SEQ ID NO: 110220 - DNA, 21 bp, Artificial sequence
  SiRNA target sequence
tgtaagttattttttgcttct

SEQ ID NO: 110221 - DNA, 21 bp, Artificial sequence
  SiRNA target sequence
gtaagttattttttgcttctt

SEQ ID NO: 110222 - DNA, 21 bp, Artificial sequence
  SiRNA target sequence
taagttattttttgcttcttt

SEQ ID NO: 110223 - DNA, 21 bp, Artificial sequence
  SiRNA target sequence
aagttattttttgcttcttta

SEQ ID NO: 110224 - DNA, 21 bp, Artificial sequence
  SiRNA target sequence
agttattttttgcttctttaa

SEQ ID NO: 110225 - DNA, 21 bp, Artificial sequence
  SiRNA target sequence
gttattttttgcttctttaag

SEQ ID NO: 110226 - DNA, 21 bp, Artificial sequence
  SiRNA target sequence
ttattttttgcttctttaagg

SEQ ID NO: 110227 - DNA, 21 bp, Artificial sequence
  SiRNA target sequence
tattttttgcttctttaaggc

SEQ ID NO: 110228 - DNA, 21 bp, Artificial sequence
  SiRNA target sequence
attttttgcttctttaaggca

SEQ ID NO: 110229 - DNA, 21 bp, Artificial sequence
  SiRNA target sequence
ttttttgcttctttaaggcaa

SEQ ID NO: 110230 - DNA, 21 bp, Artificial sequence
  SiRNA target sequence
tttttgcttctttaaggcaat

SEQ ID NO: 110231 - DNA, 21 bp, Artificial sequence
  SiRNA target sequence
ttttgcttctttaaggcaatc

SEQ ID NO: 110232 - DNA, 21 bp, Artificial sequence
  SiRNA target sequence
tttgcttctttaaggcaatca

SEQ ID NO: 110233 - DNA, 21 bp, Artificial sequence
  SiRNA target sequence
ttgcttctttaaggcaatcat

SEQ ID NO: 110234 - DNA, 21 bp, Artificial sequence
  SiRNA target sequence
tgcttctttaaggcaatcatt

SEQ ID NO: 110235 - DNA, 21 bp, Artificial sequence
  SiRNA target sequence
gcttctttaaggcaatcatta

SEQ ID NO: 110236 - DNA, 21 bp, Artificial sequence
  SiRNA target sequence
cttctttaaggcaatcattat

SEQ ID NO: 110237 - DNA, 21 bp, Artificial sequence
  SiRNA target sequence
ttctttaaggcaatcattatt

SEQ ID NO: 110238 - DNA, 21 bp, Artificial sequence
  SiRNA target sequence
tctttaaggcaatcattattt

SEQ ID NO: 110239 - DNA, 21 bp, Artificial sequence
  SiRNA target sequence
ctttaaggcaatcattatttt

SEQ ID NO: 110240 - DNA, 21 bp, Artificial sequence
  SiRNA target sequence
tttaaggcaatcattattttt

SEQ ID NO: 110241 - DNA, 21 bp, Artificial sequence
  SiRNA target sequence
ttaaggcaatcattatttttt

SEQ ID NO: 110242 - DNA, 21 bp, Artificial sequence
  SiRNA target sequence
taaggcaatcattattttttt

SEQ ID NO: 110243 - DNA, 21 bp, Artificial sequence
  SiRNA target sequence
aaggcaatcattatttttttt

SEQ ID NO: 110244 - DNA, 21 bp, Artificial sequence
  SiRNA target sequence
aggcaatcattattttttttt

SEQ ID NO: 110245 - DNA, 21 bp, Artificial sequence
  SiRNA target sequence
ggcaatcattatttttttttt

SEQ ID NO: 110246 - DNA, 21 bp, Artificial sequence
  SiRNA target sequence
gcaatcattattttttttttc

SEQ ID NO: 110247 - DNA, 21 bp, Artificial sequence
  SiRNA target sequence
caatcattattttttttttca

SEQ ID NO: 110248 - DNA, 21 bp, Artificial sequence
  SiRNA target sequence
aatcattattttttttttcat

SEQ ID NO: 110249 - DNA, 21 bp, Artificial sequence
  SiRNA target sequence
atcattattttttttttcatt

SEQ ID NO: 110250 - DNA, 21 bp, Artificial sequence
  SiRNA target sequence
tcattattttttttttcatta

SEQ ID NO: 110251 - DNA, 21 bp, Artificial sequence
  SiRNA target sequence
cattattttttttttcattaa

SEQ ID NO: 110252 - DNA, 21 bp, Artificial sequence
  SiRNA target sequence
attattttttttttcattaat

SEQ ID NO: 110253 - DNA, 21 bp, Artificial sequence
  SiRNA target sequence
ttattttttttttcattaatt

SEQ ID NO: 110254 - DNA, 21 bp, Artificial sequence
  SiRNA target sequence
tattttttttttcattaattt

SEQ ID NO: 110255 - DNA, 21 bp, Artificial sequence
  SiRNA target sequence
attttttttttcattaatttc

SEQ ID NO: 110256 - DNA, 21 bp, Artificial sequence
  SiRNA target sequence
ttttttttttcattaatttcc

SEQ ID NO: 110257 - DNA, 21 bp, Artificial sequence
  SiRNA target sequence
tttttttttcattaatttcct

SEQ ID NO: 110258 - DNA, 21 bp, Artificial sequence
  SiRNA target sequence
ttttttttcattaatttcctc

SEQ ID NO: 110259 - DNA, 21 bp, Artificial sequence
  SiRNA target sequence
tttttttcattaatttcctcc

SEQ ID NO: 110260 - DNA, 21 bp, Artificial sequence
  SiRNA target sequence
ttttttcattaatttcctccg

SEQ ID NO: 110261 - DNA, 21 bp, Artificial sequence
  SiRNA target sequence
tttttcattaatttcctccgt

SEQ ID NO: 110262 - DNA, 21 bp, Artificial sequence
  SiRNA target sequence
ttttcattaatttcctccgtg

SEQ ID NO: 110263 - DNA, 21 bp, Artificial sequence
  SiRNA target sequence
tttcattaatttcctccgtgg

SEQ ID NO: 110264 - DNA, 21 bp, Artificial sequence
  SiRNA target sequence
ttcattaatttcctccgtgga

SEQ ID NO: 110265 - DNA, 21 bp, Artificial sequence
  SiRNA target sequence
tcattaatttcctccgtggat

SEQ ID NO: 110266 - DNA, 21 bp, Artificial sequence
  SiRNA target sequence
cattaatttcctccgtggatc

SEQ ID NO: 110267 - DNA, 21 bp, Artificial sequence
  SiRNA target sequence
attaatttcctccgtggatct

SEQ ID NO: 110268 - DNA, 21 bp, Artificial sequence
  SiRNA target sequence
ttaatttcctccgtggatctg

SEQ ID NO: 110269 - DNA, 21 bp, Artificial sequence
  SiRNA target sequence
taatttcctccgtggatctgt

SEQ ID NO: 110270 - DNA, 21 bp, Artificial sequence
  SiRNA target sequence
aatttcctccgtggatctgta

SEQ ID NO: 110271 - DNA, 21 bp, Artificial sequence
  SiRNA target sequence
atttcctccgtggatctgtaa

SEQ ID NO: 110272 - DNA, 21 bp, Artificial sequence
  SiRNA target sequence
tttcctccgtggatctgtaaa

SEQ ID NO: 110273 - DNA, 21 bp, Artificial sequence
  SiRNA target sequence
ttcctccgtggatctgtaaaa

SEQ ID NO: 110274 - DNA, 21 bp, Artificial sequence
  SiRNA target sequence
tcctccgtggatctgtaaaaa

SEQ ID NO: 110275 - DNA, 21 bp, Artificial sequence
  SiRNA target sequence
cctccgtggatctgtaaaaat

SEQ ID NO: 110276 - DNA, 21 bp, Artificial sequence
  SiRNA target sequence
ctccgtggatctgtaaaaatc

SEQ ID NO: 110277 - DNA, 21 bp, Artificial sequence
  SiRNA target sequence
tccgtggatctgtaaaaatcg

SEQ ID NO: 110278 - DNA, 21 bp, Artificial sequence
  SiRNA target sequence
ccgtggatctgtaaaaatcgt

SEQ ID NO: 110279 - DNA, 21 bp, Artificial sequence
  SiRNA target sequence
cgtggatctgtaaaaatcgtt

SEQ ID NO: 110280 - DNA, 21 bp, Artificial sequence
  SiRNA target sequence
gtggatctgtaaaaatcgtta

SEQ ID NO: 110281 - DNA, 21 bp, Artificial sequence
  SiRNA target sequence
tggatctgtaaaaatcgttaa

SEQ ID NO: 110282 - DNA, 21 bp, Artificial sequence
  SiRNA target sequence
ggatctgtaaaaatcgttaac

SEQ ID NO: 110283 - DNA, 21 bp, Artificial sequence
  SiRNA target sequence
gatctgtaaaaatcgttaaca

SEQ ID NO: 110284 - DNA, 21 bp, Artificial sequence
  SiRNA target sequence
atctgtaaaaatcgttaacat

SEQ ID NO: 110285 - DNA, 21 bp, Artificial sequence
  SiRNA target sequence
tctgtaaaaatcgttaacatc

SEQ ID NO: 110286 - DNA, 21 bp, Artificial sequence
  SiRNA target sequence
ctgtaaaaatcgttaacatct

SEQ ID NO: 110287 - DNA, 21 bp, Artificial sequence
  SiRNA target sequence
tgtaaaaatcgttaacatcta

SEQ ID NO: 110288 - DNA, 21 bp, Artificial sequence
  SiRNA target sequence
gtaaaaatcgttaacatctaa

SEQ ID NO: 110289 - DNA, 21 bp, Artificial sequence
  SiRNA target sequence
taaaaatcgttaacatctaaa

SEQ ID NO: 110290 - DNA, 21 bp, Artificial sequence
  SiRNA target sequence
aaaaatcgttaacatctaaac

SEQ ID NO: 110291 - DNA, 21 bp, Artificial sequence
  SiRNA target sequence
aaaatcgttaacatctaaaca

SEQ ID NO: 110292 - DNA, 21 bp, Artificial sequence
  SiRNA target sequence
aaatcgttaacatctaaacag

SEQ ID NO: 110293 - DNA, 21 bp, Artificial sequence
  SiRNA target sequence
aatcgttaacatctaaacagg

SEQ ID NO: 110294 - DNA, 21 bp, Artificial sequence
  SiRNA target sequence
atcgttaacatctaaacagga

SEQ ID NO: 110295 - DNA, 21 bp, Artificial sequence
  SiRNA target sequence
tcgttaacatctaaacaggag

SEQ ID NO: 110296 - DNA, 21 bp, Artificial sequence
  SiRNA target sequence
cgttaacatctaaacaggagt

SEQ ID NO: 110297 - DNA, 21 bp, Artificial sequence
  SiRNA target sequence
gttaacatctaaacaggagtg

SEQ ID NO: 110298 - DNA, 21 bp, Artificial sequence
  SiRNA target sequence
ttaacatctaaacaggagtgc

SEQ ID NO: 110299 - DNA, 21 bp, Artificial sequence
  SiRNA target sequence
taacatctaaacaggagtgcc

SEQ ID NO: 110300 - DNA, 21 bp, Artificial sequence
  SiRNA target sequence
aacatctaaacaggagtgccc

SEQ ID NO: 110301 - DNA, 21 bp, Artificial sequence
  SiRNA target sequence
acatctaaacaggagtgccca

SEQ ID NO: 110302 - DNA, 21 bp, Artificial sequence
  SiRNA target sequence
catctaaacaggagtgcccac

SEQ ID NO: 110303 - DNA, 21 bp, Artificial sequence
  SiRNA target sequence
atctaaacaggagtgcccaca

SEQ ID NO: 110304 - DNA, 21 bp, Artificial sequence
  SiRNA target sequence
tctaaacaggagtgcccacat

SEQ ID NO: 110305 - DNA, 21 bp, Artificial sequence
  SiRNA target sequence
ctaaacaggagtgcccacatg

SEQ ID NO: 110306 - DNA, 21 bp, Artificial sequence
  SiRNA target sequence
taaacaggagtgcccacatgt

SEQ ID NO: 110307 - DNA, 21 bp, Artificial sequence
  SiRNA target sequence
aaacaggagtgcccacatgtc

SEQ ID NO: 110308 - DNA, 21 bp, Artificial sequence
  SiRNA target sequence
aacaggagtgcccacatgtcc

SEQ ID NO: 110309 - DNA, 21 bp, Artificial sequence
  SiRNA target sequence
acaggagtgcccacatgtcct

SEQ ID NO: 110310 - DNA, 21 bp, Artificial sequence
  SiRNA target sequence
caggagtgcccacatgtcctg

SEQ ID NO: 110311 - DNA, 21 bp, Artificial sequence
  SiRNA target sequence
aggagtgcccacatgtcctgt

SEQ ID NO: 110312 - DNA, 21 bp, Artificial sequence
  SiRNA target sequence
ggagtgcccacatgtcctgta

SEQ ID NO: 110313 - DNA, 21 bp, Artificial sequence
  SiRNA target sequence
gagtgcccacatgtcctgtac

SEQ ID NO: 110314 - DNA, 21 bp, Artificial sequence
  SiRNA target sequence
agtgcccacatgtcctgtacg

SEQ ID NO: 110315 - DNA, 21 bp, Artificial sequence
  SiRNA target sequence
gtgcccacatgtcctgtacgt

SEQ ID NO: 110316 - DNA, 21 bp, Artificial sequence
  SiRNA target sequence
tgcccacatgtcctgtacgta

SEQ ID NO: 110317 - DNA, 21 bp, Artificial sequence
  SiRNA target sequence
gcccacatgtcctgtacgtat

SEQ ID NO: 110318 - DNA, 21 bp, Artificial sequence
  SiRNA target sequence
cccacatgtcctgtacgtatc

SEQ ID NO: 110319 - DNA, 21 bp, Artificial sequence
  SiRNA target sequence
ccacatgtcctgtacgtatca

SEQ ID NO: 110320 - DNA, 21 bp, Artificial sequence
  SiRNA target sequence
cacatgtcctgtacgtatcaa

SEQ ID NO: 110321 - DNA, 21 bp, Artificial sequence
  SiRNA target sequence
acatgtcctgtacgtatcaat

SEQ ID NO: 110322 - DNA, 21 bp, Artificial sequence
  SiRNA target sequence
catgtcctgtacgtatcaatt

SEQ ID NO: 110323 - DNA, 21 bp, Artificial sequence
  SiRNA target sequence
atgtcctgtacgtatcaattt

SEQ ID NO: 110324 - DNA, 21 bp, Artificial sequence
  SiRNA target sequence
tgtcctgtacgtatcaatttg

SEQ ID NO: 110325 - DNA, 21 bp, Artificial sequence
  SiRNA target sequence
gtcctgtacgtatcaatttgc

SEQ ID NO: 110326 - DNA, 21 bp, Artificial sequence
  SiRNA target sequence
tcctgtacgtatcaatttgca

SEQ ID NO: 110327 - DNA, 21 bp, Artificial sequence
  SiRNA target sequence
cctgtacgtatcaatttgcaa

SEQ ID NO: 110328 - DNA, 21 bp, Artificial sequence
  SiRNA target sequence
ctgtacgtatcaatttgcaag

SEQ ID NO: 110329 - DNA, 21 bp, Artificial sequence
  SiRNA target sequence
tgtacgtatcaatttgcaaga

SEQ ID NO: 110330 - DNA, 21 bp, Artificial sequence
  SiRNA target sequence
gtacgtatcaatttgcaagat

SEQ ID NO: 110331 - DNA, 21 bp, Artificial sequence
  SiRNA target sequence
tacgtatcaatttgcaagatg

SEQ ID NO: 110332 - DNA, 21 bp, Artificial sequence
  SiRNA target sequence
acgtatcaatttgcaagatga

SEQ ID NO: 110333 - DNA, 21 bp, Artificial sequence
  SiRNA target sequence
cgtatcaatttgcaagatgat

SEQ ID NO: 110334 - DNA, 21 bp, Artificial sequence
  SiRNA target sequence
gtatcaatttgcaagatgata

SEQ ID NO: 110335 - DNA, 21 bp, Artificial sequence
  SiRNA target sequence
tatcaatttgcaagatgatag

SEQ ID NO: 110336 - DNA, 21 bp, Artificial sequence
  SiRNA target sequence
atcaatttgcaagatgatagg

SEQ ID NO: 110337 - DNA, 21 bp, Artificial sequence
  SiRNA target sequence
tcaatttgcaagatgataggt

SEQ ID NO: 110338 - DNA, 21 bp, Artificial sequence
  SiRNA target sequence
caatttgcaagatgataggtc

SEQ ID NO: 110339 - DNA, 21 bp, Artificial sequence
  SiRNA target sequence
aatttgcaagatgataggtcc

SEQ ID NO: 110340 - DNA, 21 bp, Artificial sequence
  SiRNA target sequence
atttgcaagatgataggtcct

SEQ ID NO: 110341 - DNA, 21 bp, Artificial sequence
  SiRNA target sequence
tttgcaagatgataggtcctt

SEQ ID NO: 110342 - DNA, 21 bp, Artificial sequence
  SiRNA target sequence
ttgcaagatgataggtccttt

SEQ ID NO: 110343 - DNA, 21 bp, Artificial sequence
  SiRNA target sequence
tgcaagatgataggtcctttt

SEQ ID NO: 110344 - DNA, 21 bp, Artificial sequence
  SiRNA target sequence
gcaagatgataggtccttttt

SEQ ID NO: 110345 - DNA, 21 bp, Artificial sequence
  SiRNA target sequence
caagatgataggtcctttttc

SEQ ID NO: 110346 - DNA, 21 bp, Artificial sequence
  SiRNA target sequence
aagatgataggtcctttttct

SEQ ID NO: 110347 - DNA, 21 bp, Artificial sequence
  SiRNA target sequence
agatgataggtcctttttcta

SEQ ID NO: 110348 - DNA, 21 bp, Artificial sequence
  SiRNA target sequence
gatgataggtcctttttctat

SEQ ID NO: 110349 - DNA, 21 bp, Artificial sequence
  SiRNA target sequence
atgataggtcctttttctatt

SEQ ID NO: 110350 - DNA, 21 bp, Artificial sequence
  SiRNA target sequence
tgataggtcctttttctattg

SEQ ID NO: 110351 - DNA, 21 bp, Artificial sequence
  SiRNA target sequence
gataggtcctttttctattgc

SEQ ID NO: 110352 - DNA, 21 bp, Artificial sequence
  SiRNA target sequence
ataggtcctttttctattgca

SEQ ID NO: 110353 - DNA, 21 bp, Artificial sequence
  SiRNA target sequence
taggtcctttttctattgcat

SEQ ID NO: 110354 - DNA, 21 bp, Artificial sequence
  SiRNA target sequence
aggtcctttttctattgcatg

SEQ ID NO: 110355 - DNA, 21 bp, Artificial sequence
  SiRNA target sequence
ggtcctttttctattgcatgt

SEQ ID NO: 110356 - DNA, 21 bp, Artificial sequence
  SiRNA target sequence
gtcctttttctattgcatgtt

SEQ ID NO: 110357 - DNA, 21 bp, Artificial sequence
  SiRNA target sequence
tcctttttctattgcatgttg

SEQ ID NO: 110358 - DNA, 21 bp, Artificial sequence
  SiRNA target sequence
cctttttctattgcatgttgt

SEQ ID NO: 110359 - DNA, 21 bp, Artificial sequence
  SiRNA target sequence
ctttttctattgcatgttgtc

SEQ ID NO: 110360 - DNA, 21 bp, Artificial sequence
  SiRNA target sequence
tttttctattgcatgttgtct

SEQ ID NO: 110361 - DNA, 21 bp, Artificial sequence
  SiRNA target sequence
ttttctattgcatgttgtcta

SEQ ID NO: 110362 - DNA, 21 bp, Artificial sequence
  SiRNA target sequence
tttctattgcatgttgtctag

SEQ ID NO: 110363 - DNA, 21 bp, Artificial sequence
  SiRNA target sequence
ttctattgcatgttgtctagc

SEQ ID NO: 110364 - DNA, 21 bp, Artificial sequence
  SiRNA target sequence
tctattgcatgttgtctagca

SEQ ID NO: 110365 - DNA, 21 bp, Artificial sequence
  SiRNA target sequence
ctattgcatgttgtctagcaa

SEQ ID NO: 110366 - DNA, 21 bp, Artificial sequence
  SiRNA target sequence
tattgcatgttgtctagcaaa

SEQ ID NO: 110367 - DNA, 21 bp, Artificial sequence
  SiRNA target sequence
attgcatgttgtctagcaaat

SEQ ID NO: 110368 - DNA, 21 bp, Artificial sequence
  SiRNA target sequence
ttgcatgttgtctagcaaatg

SEQ ID NO: 110369 - DNA, 21 bp, Artificial sequence
  SiRNA target sequence
tgcatgttgtctagcaaatgt

SEQ ID NO: 110370 - DNA, 21 bp, Artificial sequence
  SiRNA target sequence
gcatgttgtctagcaaatgta

SEQ ID NO: 110371 - DNA, 21 bp, Artificial sequence
  SiRNA target sequence
catgttgtctagcaaatgtaa

SEQ ID NO: 110372 - DNA, 21 bp, Artificial sequence
  SiRNA target sequence
atgttgtctagcaaatgtaaa

SEQ ID NO: 110373 - DNA, 21 bp, Artificial sequence
  SiRNA target sequence
tgttgtctagcaaatgtaaat

SEQ ID NO: 110374 - DNA, 21 bp, Artificial sequence
  SiRNA target sequence
gttgtctagcaaatgtaaata

SEQ ID NO: 110375 - DNA, 21 bp, Artificial sequence
  SiRNA target sequence
ttgtctagcaaatgtaaatac

SEQ ID NO: 110376 - DNA, 21 bp, Artificial sequence
  SiRNA target sequence
tgtctagcaaatgtaaataca

SEQ ID NO: 110377 - DNA, 21 bp, Artificial sequence
  SiRNA target sequence
gtctagcaaatgtaaatacat

SEQ ID NO: 110378 - DNA, 21 bp, Artificial sequence
  SiRNA target sequence
tctagcaaatgtaaatacatc

SEQ ID NO: 110379 - DNA, 21 bp, Artificial sequence
  SiRNA target sequence
ctagcaaatgtaaatacatca

SEQ ID NO: 110380 - DNA, 21 bp, Artificial sequence
  SiRNA target sequence
tagcaaatgtaaatacatcaa

SEQ ID NO: 110381 - DNA, 21 bp, Artificial sequence
  SiRNA target sequence
agcaaatgtaaatacatcaat

SEQ ID NO: 110382 - DNA, 21 bp, Artificial sequence
  SiRNA target sequence
gcaaatgtaaatacatcaatc

SEQ ID NO: 110383 - DNA, 21 bp, Artificial sequence
  SiRNA target sequence
caaatgtaaatacatcaatca

SEQ ID NO: 110384 - DNA, 21 bp, Artificial sequence
  SiRNA target sequence
aaatgtaaatacatcaatcag

SEQ ID NO: 110385 - DNA, 21 bp, Artificial sequence
  SiRNA target sequence
aatgtaaatacatcaatcagt

SEQ ID NO: 110386 - DNA, 21 bp, Artificial sequence
  SiRNA target sequence
atgtaaatacatcaatcagtt

SEQ ID NO: 110387 - DNA, 21 bp, Artificial sequence
  SiRNA target sequence
tgtaaatacatcaatcagttg

SEQ ID NO: 110388 - DNA, 21 bp, Artificial sequence
  SiRNA target sequence
gtaaatacatcaatcagttga

SEQ ID NO: 110389 - DNA, 21 bp, Artificial sequence
  SiRNA target sequence
taaatacatcaatcagttgag

SEQ ID NO: 110390 - DNA, 21 bp, Artificial sequence
  SiRNA target sequence
aaatacatcaatcagttgagt

SEQ ID NO: 110391 - DNA, 21 bp, Artificial sequence
  SiRNA target sequence
aatacatcaatcagttgagtt

SEQ ID NO: 110392 - DNA, 21 bp, Artificial sequence
  SiRNA target sequence
atacatcaatcagttgagtta

SEQ ID NO: 110393 - DNA, 21 bp, Artificial sequence
  SiRNA target sequence
tacatcaatcagttgagttat

SEQ ID NO: 110394 - DNA, 21 bp, Artificial sequence
  SiRNA target sequence
acatcaatcagttgagttatg

SEQ ID NO: 110395 - DNA, 21 bp, Artificial sequence
  SiRNA target sequence
catcaatcagttgagttatgt

SEQ ID NO: 110396 - DNA, 21 bp, Artificial sequence
  SiRNA target sequence
atcaatcagttgagttatgtt

SEQ ID NO: 110397 - DNA, 21 bp, Artificial sequence
  SiRNA target sequence
tcaatcagttgagttatgttt

SEQ ID NO: 110398 - DNA, 21 bp, Artificial sequence
  SiRNA target sequence
caatcagttgagttatgtttt

SEQ ID NO: 110399 - DNA, 21 bp, Artificial sequence
  SiRNA target sequence
aatcagttgagttatgttttt

SEQ ID NO: 110400 - DNA, 21 bp, Artificial sequence
  SiRNA target sequence
atcagttgagttatgttttta

SEQ ID NO: 110401 - DNA, 21 bp, Artificial sequence
  SiRNA target sequence
tcagttgagttatgtttttat

SEQ ID NO: 110402 - DNA, 21 bp, Artificial sequence
  SiRNA target sequence
cagttgagttatgtttttatc

SEQ ID NO: 110403 - DNA, 21 bp, Artificial sequence
  SiRNA target sequence
agttgagttatgtttttatct

SEQ ID NO: 110404 - DNA, 21 bp, Artificial sequence
  SiRNA target sequence
gttgagttatgtttttatctg

SEQ ID NO: 110405 - DNA, 21 bp, Artificial sequence
  SiRNA target sequence
ttgagttatgtttttatctgt

SEQ ID NO: 110406 - DNA, 21 bp, Artificial sequence
  SiRNA target sequence
tgagttatgtttttatctgta

SEQ ID NO: 110407 - DNA, 21 bp, Artificial sequence
  SiRNA target sequence
gagttatgtttttatctgtaa

SEQ ID NO: 110408 - DNA, 21 bp, Artificial sequence
  SiRNA target sequence
agttatgtttttatctgtaag

SEQ ID NO: 110409 - DNA, 21 bp, Artificial sequence
  SiRNA target sequence
gttatgtttttatctgtaaga

SEQ ID NO: 110410 - DNA, 21 bp, Artificial sequence
  SiRNA target sequence
ttatgtttttatctgtaagac

SEQ ID NO: 110411 - DNA, 21 bp, Artificial sequence
  SiRNA target sequence
tatgtttttatctgtaagacg

SEQ ID NO: 110412 - DNA, 21 bp, Artificial sequence
  SiRNA target sequence
atgtttttatctgtaagacgt

SEQ ID NO: 110413 - DNA, 21 bp, Artificial sequence
  SiRNA target sequence
tgtttttatctgtaagacgta

SEQ ID NO: 110414 - DNA, 21 bp, Artificial sequence
  SiRNA target sequence
gtttttatctgtaagacgtat

SEQ ID NO: 110415 - DNA, 21 bp, Artificial sequence
  SiRNA target sequence
tttttatctgtaagacgtata

SEQ ID NO: 110416 - DNA, 21 bp, Artificial sequence
  SiRNA target sequence
ttttatctgtaagacgtatac

SEQ ID NO: 110417 - DNA, 21 bp, Artificial sequence
  SiRNA target sequence
tttatctgtaagacgtatacc

SEQ ID NO: 110418 - DNA, 21 bp, Artificial sequence
  SiRNA target sequence
ttatctgtaagacgtatacct

SEQ ID NO: 110419 - DNA, 21 bp, Artificial sequence
  SiRNA target sequence
tatctgtaagacgtatacctg

SEQ ID NO: 110420 - DNA, 21 bp, Artificial sequence
  SiRNA target sequence
atctgtaagacgtatacctgg

SEQ ID NO: 110421 - DNA, 21 bp, Artificial sequence
  SiRNA target sequence
tctgtaagacgtatacctgga

SEQ ID NO: 110422 - DNA, 21 bp, Artificial sequence
  SiRNA target sequence
ctgtaagacgtatacctggaa

SEQ ID NO: 110423 - DNA, 21 bp, Artificial sequence
  SiRNA target sequence
tgtaagacgtatacctggaat

SEQ ID NO: 110424 - DNA, 21 bp, Artificial sequence
  SiRNA target sequence
gtaagacgtatacctggaata

SEQ ID NO: 110425 - DNA, 21 bp, Artificial sequence
  SiRNA target sequence
taagacgtatacctggaatat

SEQ ID NO: 110426 - DNA, 21 bp, Artificial sequence
  SiRNA target sequence
aagacgtatacctggaatatt

SEQ ID NO: 110427 - DNA, 21 bp, Artificial sequence
  SiRNA target sequence
agacgtatacctggaatatta

SEQ ID NO: 110428 - DNA, 21 bp, Artificial sequence
  SiRNA target sequence
gacgtatacctggaatattat

SEQ ID NO: 110429 - DNA, 21 bp, Artificial sequence
  SiRNA target sequence
acgtatacctggaatattata

SEQ ID NO: 110430 - DNA, 21 bp, Artificial sequence
  SiRNA target sequence
cgtatacctggaatattatat

SEQ ID NO: 110431 - DNA, 21 bp, Artificial sequence
  SiRNA target sequence
gtatacctggaatattatatc

SEQ ID NO: 110432 - DNA, 21 bp, Artificial sequence
  SiRNA target sequence
tatacctggaatattatatcc

SEQ ID NO: 110433 - DNA, 21 bp, Artificial sequence
  SiRNA target sequence
atacctggaatattatatccc

SEQ ID NO: 110434 - DNA, 21 bp, Artificial sequence
  SiRNA target sequence
tacctggaatattatatcccc

SEQ ID NO: 110435 - DNA, 21 bp, Artificial sequence
  SiRNA target sequence
acctggaatattatatcccct

SEQ ID NO: 110436 - DNA, 21 bp, Artificial sequence
  SiRNA target sequence
cctggaatattatatcccctt

SEQ ID NO: 110437 - DNA, 21 bp, Artificial sequence
  SiRNA target sequence
ctggaatattatatccccttt

SEQ ID NO: 110438 - DNA, 21 bp, Artificial sequence
  SiRNA target sequence
tggaatattatatcccctttt

SEQ ID NO: 110439 - DNA, 21 bp, Artificial sequence
  SiRNA target sequence
ggaatattatatcccctttta

SEQ ID NO: 110440 - DNA, 21 bp, Artificial sequence
  SiRNA target sequence
gaatattatatccccttttaa

SEQ ID NO: 110441 - DNA, 21 bp, Artificial sequence
  SiRNA target sequence
aatattatatccccttttaaa

SEQ ID NO: 110442 - DNA, 21 bp, Artificial sequence
  SiRNA target sequence
atattatatccccttttaaaa

SEQ ID NO: 110443 - DNA, 21 bp, Artificial sequence
  SiRNA target sequence
tattatatccccttttaaaat

SEQ ID NO: 110444 - DNA, 21 bp, Artificial sequence
  SiRNA target sequence
attatatccccttttaaaata

SEQ ID NO: 110445 - DNA, 21 bp, Artificial sequence
  SiRNA target sequence
ttatatccccttttaaaatat

SEQ ID NO: 110446 - DNA, 21 bp, Artificial sequence
  SiRNA target sequence
tatatccccttttaaaatatt

SEQ ID NO: 110447 - DNA, 21 bp, Artificial sequence
  SiRNA target sequence
atatccccttttaaaatattc

SEQ ID NO: 110448 - DNA, 21 bp, Artificial sequence
  SiRNA target sequence
tatccccttttaaaatattca

SEQ ID NO: 110449 - DNA, 21 bp, Artificial sequence
  SiRNA target sequence
atccccttttaaaatattcag

SEQ ID NO: 110450 - DNA, 21 bp, Artificial sequence
  SiRNA target sequence
tccccttttaaaatattcagg

SEQ ID NO: 110451 - DNA, 21 bp, Artificial sequence
  SiRNA target sequence
ccccttttaaaatattcagga

SEQ ID NO: 110452 - DNA, 21 bp, Artificial sequence
  SiRNA target sequence
cccttttaaaatattcaggat

SEQ ID NO: 110453 - DNA, 21 bp, Artificial sequence
  SiRNA target sequence
ccttttaaaatattcaggata

SEQ ID NO: 110454 - DNA, 21 bp, Artificial sequence
  SiRNA target sequence
cttttaaaatattcaggatat

SEQ ID NO: 110455 - DNA, 21 bp, Artificial sequence
  SiRNA target sequence
ttttaaaatattcaggatatg

SEQ ID NO: 110456 - DNA, 21 bp, Artificial sequence
  SiRNA target sequence
tttaaaatattcaggatatgt

SEQ ID NO: 110457 - DNA, 21 bp, Artificial sequence
  SiRNA target sequence
ttaaaatattcaggatatgta

SEQ ID NO: 110458 - DNA, 21 bp, Artificial sequence
  SiRNA target sequence
taaaatattcaggatatgtag

SEQ ID NO: 110459 - DNA, 21 bp, Artificial sequence
  SiRNA target sequence
aaaatattcaggatatgtagt

SEQ ID NO: 110460 - DNA, 21 bp, Artificial sequence
  SiRNA target sequence
aaatattcaggatatgtagtg

SEQ ID NO: 110461 - DNA, 21 bp, Artificial sequence
  SiRNA target sequence
aatattcaggatatgtagtgg

SEQ ID NO: 110462 - DNA, 21 bp, Artificial sequence
  SiRNA target sequence
atattcaggatatgtagtgga

SEQ ID NO: 110463 - DNA, 21 bp, Artificial sequence
  SiRNA target sequence
tattcaggatatgtagtggaa

SEQ ID NO: 110464 - DNA, 21 bp, Artificial sequence
  SiRNA target sequence
attcaggatatgtagtggaat

SEQ ID NO: 110465 - DNA, 21 bp, Artificial sequence
  SiRNA target sequence
ttcaggatatgtagtggaatt

SEQ ID NO: 110466 - DNA, 21 bp, Artificial sequence
  SiRNA target sequence
tcaggatatgtagtggaatta

SEQ ID NO: 110467 - DNA, 21 bp, Artificial sequence
  SiRNA target sequence
caggatatgtagtggaattac

SEQ ID NO: 110468 - DNA, 21 bp, Artificial sequence
  SiRNA target sequence
aggatatgtagtggaattact

SEQ ID NO: 110469 - DNA, 21 bp, Artificial sequence
  SiRNA target sequence
ggatatgtagtggaattactt

SEQ ID NO: 110470 - DNA, 21 bp, Artificial sequence
  SiRNA target sequence
gatatgtagtggaattacttt

SEQ ID NO: 110471 - DNA, 21 bp, Artificial sequence
  SiRNA target sequence
atatgtagtggaattactttc

SEQ ID NO: 110472 - DNA, 21 bp, Artificial sequence
  SiRNA target sequence
tatgtagtggaattactttca

SEQ ID NO: 110473 - DNA, 21 bp, Artificial sequence
  SiRNA target sequence
atgtagtggaattactttcag

SEQ ID NO: 110474 - DNA, 21 bp, Artificial sequence
  SiRNA target sequence
tgtagtggaattactttcagg

SEQ ID NO: 110475 - DNA, 21 bp, Artificial sequence
  SiRNA target sequence
gtagtggaattactttcaggt

SEQ ID NO: 110476 - DNA, 21 bp, Artificial sequence
  SiRNA target sequence
tagtggaattactttcaggtg

SEQ ID NO: 110477 - DNA, 21 bp, Artificial sequence
  SiRNA target sequence
agtggaattactttcaggtgt

SEQ ID NO: 110478 - DNA, 21 bp, Artificial sequence
  SiRNA target sequence
gtggaattactttcaggtgtc

SEQ ID NO: 110479 - DNA, 21 bp, Artificial sequence
  SiRNA target sequence
tggaattactttcaggtgtcc

SEQ ID NO: 110480 - DNA, 21 bp, Artificial sequence
  SiRNA target sequence
ggaattactttcaggtgtcca

SEQ ID NO: 110481 - DNA, 21 bp, Artificial sequence
  SiRNA target sequence
gaattactttcaggtgtccac

SEQ ID NO: 110482 - DNA, 21 bp, Artificial sequence
  SiRNA target sequence
aattactttcaggtgtccaca

SEQ ID NO: 110483 - DNA, 21 bp, Artificial sequence
  SiRNA target sequence
attactttcaggtgtccacat

SEQ ID NO: 110484 - DNA, 21 bp, Artificial sequence
  SiRNA target sequence
ttactttcaggtgtccacata

SEQ ID NO: 110485 - DNA, 21 bp, Artificial sequence
  SiRNA target sequence
tactttcaggtgtccacatac

SEQ ID NO: 110486 - DNA, 21 bp, Artificial sequence
  SiRNA target sequence
actttcaggtgtccacatact

SEQ ID NO: 110487 - DNA, 21 bp, Artificial sequence
  SiRNA target sequence
ctttcaggtgtccacatacta

SEQ ID NO: 110488 - DNA, 21 bp, Artificial sequence
  SiRNA target sequence
tttcaggtgtccacatactat

SEQ ID NO: 110489 - DNA, 21 bp, Artificial sequence
  SiRNA target sequence
ttcaggtgtccacatactata

SEQ ID NO: 110490 - DNA, 21 bp, Artificial sequence
  SiRNA target sequence
tcaggtgtccacatactataa

SEQ ID NO: 110491 - DNA, 21 bp, Artificial sequence
  SiRNA target sequence
caggtgtccacatactataat

SEQ ID NO: 110492 - DNA, 21 bp, Artificial sequence
  SiRNA target sequence
aggtgtccacatactataatg

SEQ ID NO: 110493 - DNA, 21 bp, Artificial sequence
  SiRNA target sequence
ggtgtccacatactataatga

SEQ ID NO: 110494 - DNA, 21 bp, Artificial sequence
  SiRNA target sequence
gtgtccacatactataatgat

SEQ ID NO: 110495 - DNA, 21 bp, Artificial sequence
  SiRNA target sequence
tgtccacatactataatgatt

SEQ ID NO: 110496 - DNA, 21 bp, Artificial sequence
  SiRNA target sequence
gtccacatactataatgatta

SEQ ID NO: 110497 - DNA, 21 bp, Artificial sequence
  SiRNA target sequence
tccacatactataatgattat

SEQ ID NO: 110498 - DNA, 21 bp, Artificial sequence
  SiRNA target sequence
ccacatactataatgattatt

SEQ ID NO: 110499 - DNA, 21 bp, Artificial sequence
  SiRNA target sequence
cacatactataatgattattt

SEQ ID NO: 110500 - DNA, 21 bp, Artificial sequence
  SiRNA target sequence
acatactataatgattatttt

SEQ ID NO: 110501 - DNA, 21 bp, Artificial sequence
  SiRNA target sequence
catactataatgattattttc

SEQ ID NO: 110502 - DNA, 21 bp, Artificial sequence
  SiRNA target sequence
atactataatgattattttca

SEQ ID NO: 110503 - DNA, 21 bp, Artificial sequence
  SiRNA target sequence
tactataatgattattttcac

SEQ ID NO: 110504 - DNA, 21 bp, Artificial sequence
  SiRNA target sequence
actataatgattattttcaca

SEQ ID NO: 110505 - DNA, 21 bp, Artificial sequence
  SiRNA target sequence
ctataatgattattttcacat

SEQ ID NO: 110506 - DNA, 21 bp, Artificial sequence
  SiRNA target sequence
tataatgattattttcacata

SEQ ID NO: 110507 - DNA, 21 bp, Artificial sequence
  SiRNA target sequence
ataatgattattttcacatac

SEQ ID NO: 110508 - DNA, 21 bp, Artificial sequence
  SiRNA target sequence
taatgattattttcacataca

SEQ ID NO: 110509 - DNA, 21 bp, Artificial sequence
  SiRNA target sequence
aatgattattttcacatacat

SEQ ID NO: 110510 - DNA, 21 bp, Artificial sequence
  SiRNA target sequence
atgattattttcacatacata

SEQ ID NO: 110511 - DNA, 21 bp, Artificial sequence
  SiRNA target sequence
tgattattttcacatacataa

SEQ ID NO: 110512 - DNA, 21 bp, Artificial sequence
  SiRNA target sequence
gattattttcacatacataaa

SEQ ID NO: 110513 - DNA, 21 bp, Artificial sequence
  SiRNA target sequence
attattttcacatacataaac

SEQ ID NO: 110514 - DNA, 21 bp, Artificial sequence
  SiRNA target sequence
ttattttcacatacataaacc

SEQ ID NO: 110515 - DNA, 21 bp, Artificial sequence
  SiRNA target sequence
tattttcacatacataaacca

SEQ ID NO: 110516 - DNA, 21 bp, Artificial sequence
  SiRNA target sequence
attttcacatacataaaccac

SEQ ID NO: 110517 - DNA, 21 bp, Artificial sequence
  SiRNA target sequence
ttttcacatacataaaccaca

SEQ ID NO: 110518 - DNA, 21 bp, Artificial sequence
  SiRNA target sequence
tttcacatacataaaccacag

SEQ ID NO: 110519 - DNA, 21 bp, Artificial sequence
  SiRNA target sequence
ttcacatacataaaccacagg

SEQ ID NO: 110520 - DNA, 21 bp, Artificial sequence
  SiRNA target sequence
tcacatacataaaccacagga

SEQ ID NO: 110521 - DNA, 21 bp, Artificial sequence
  SiRNA target sequence
cacatacataaaccacaggaa

SEQ ID NO: 110522 - DNA, 21 bp, Artificial sequence
  SiRNA target sequence
acatacataaaccacaggaag

SEQ ID NO: 110523 - DNA, 21 bp, Artificial sequence
  SiRNA target sequence
catacataaaccacaggaagt

SEQ ID NO: 110524 - DNA, 21 bp, Artificial sequence
  SiRNA target sequence
atacataaaccacaggaagtt

SEQ ID NO: 110525 - DNA, 21 bp, Artificial sequence
  SiRNA target sequence
tacataaaccacaggaagttt

SEQ ID NO: 110526 - DNA, 21 bp, Artificial sequence
  SiRNA target sequence
acataaaccacaggaagtttc

SEQ ID NO: 110527 - DNA, 21 bp, Artificial sequence
  SiRNA target sequence
cataaaccacaggaagtttcc

SEQ ID NO: 110528 - DNA, 21 bp, Artificial sequence
  SiRNA target sequence
ataaaccacaggaagtttcca

SEQ ID NO: 110529 - DNA, 21 bp, Artificial sequence
  SiRNA target sequence
taaaccacaggaagtttccat

SEQ ID NO: 110530 - DNA, 21 bp, Artificial sequence
  SiRNA target sequence
aaaccacaggaagtttccata

SEQ ID NO: 110531 - DNA, 21 bp, Artificial sequence
  SiRNA target sequence
aaccacaggaagtttccataa

SEQ ID NO: 110532 - DNA, 21 bp, Artificial sequence
  SiRNA target sequence
accacaggaagtttccataat

SEQ ID NO: 110533 - DNA, 21 bp, Artificial sequence
  SiRNA target sequence
ccacaggaagtttccataatg

SEQ ID NO: 110534 - DNA, 21 bp, Artificial sequence
  SiRNA target sequence
cacaggaagtttccataatgc

SEQ ID NO: 110535 - DNA, 21 bp, Artificial sequence
  SiRNA target sequence
acaggaagtttccataatgca

SEQ ID NO: 110536 - DNA, 21 bp, Artificial sequence
  SiRNA target sequence
caggaagtttccataatgcag

SEQ ID NO: 110537 - DNA, 21 bp, Artificial sequence
  SiRNA target sequence
aggaagtttccataatgcagc

SEQ ID NO: 110538 - DNA, 21 bp, Artificial sequence
  SiRNA target sequence
ggaagtttccataatgcagcc

SEQ ID NO: 110539 - DNA, 21 bp, Artificial sequence
  SiRNA target sequence
gaagtttccataatgcagcca

SEQ ID NO: 110540 - DNA, 21 bp, Artificial sequence
  SiRNA target sequence
aagtttccataatgcagccat

SEQ ID NO: 110541 - DNA, 21 bp, Artificial sequence
  SiRNA target sequence
agtttccataatgcagccata

SEQ ID NO: 110542 - DNA, 21 bp, Artificial sequence
  SiRNA target sequence
gtttccataatgcagccatat

SEQ ID NO: 110543 - DNA, 21 bp, Artificial sequence
  SiRNA target sequence
tttccataatgcagccatatt

SEQ ID NO: 110544 - DNA, 21 bp, Artificial sequence
  SiRNA target sequence
ttccataatgcagccatattg

SEQ ID NO: 110545 - DNA, 21 bp, Artificial sequence
  SiRNA target sequence
tccataatgcagccatattga

SEQ ID NO: 110546 - DNA, 21 bp, Artificial sequence
  SiRNA target sequence
ccataatgcagccatattgaa

SEQ ID NO: 110547 - DNA, 21 bp, Artificial sequence
  SiRNA target sequence
cataatgcagccatattgaac

SEQ ID NO: 110548 - DNA, 21 bp, Artificial sequence
  SiRNA target sequence
ataatgcagccatattgaacg

SEQ ID NO: 110549 - DNA, 21 bp, Artificial sequence
  SiRNA target sequence
taatgcagccatattgaacga

SEQ ID NO: 110550 - DNA, 21 bp, Artificial sequence
  SiRNA target sequence
aatgcagccatattgaacgac

SEQ ID NO: 110551 - DNA, 21 bp, Artificial sequence
  SiRNA target sequence
atgcagccatattgaacgact

SEQ ID NO: 110552 - DNA, 21 bp, Artificial sequence
  SiRNA target sequence
tgcagccatattgaacgactc

SEQ ID NO: 110553 - DNA, 21 bp, Artificial sequence
  SiRNA target sequence
gcagccatattgaacgactcc

SEQ ID NO: 110554 - DNA, 21 bp, Artificial sequence
  SiRNA target sequence
cagccatattgaacgactccc

SEQ ID NO: 110555 - DNA, 21 bp, Artificial sequence
  SiRNA target sequence
agccatattgaacgactccca

SEQ ID NO: 110556 - DNA, 21 bp, Artificial sequence
  SiRNA target sequence
gccatattgaacgactcccag

SEQ ID NO: 110557 - DNA, 21 bp, Artificial sequence
  SiRNA target sequence
ccatattgaacgactcccaga

SEQ ID NO: 110558 - DNA, 21 bp, Artificial sequence
  SiRNA target sequence
catattgaacgactcccagac

SEQ ID NO: 110559 - DNA, 21 bp, Artificial sequence
  SiRNA target sequence
atattgaacgactcccagacc

SEQ ID NO: 110560 - DNA, 21 bp, Artificial sequence
  SiRNA target sequence
tattgaacgactcccagacct

SEQ ID NO: 110561 - DNA, 21 bp, Artificial sequence
  SiRNA target sequence
attgaacgactcccagacctg

SEQ ID NO: 110562 - DNA, 21 bp, Artificial sequence
  SiRNA target sequence
ttgaacgactcccagacctgt

SEQ ID NO: 110563 - DNA, 21 bp, Artificial sequence
  SiRNA target sequence
tgaacgactcccagacctgtc

SEQ ID NO: 110564 - DNA, 21 bp, Artificial sequence
  SiRNA target sequence
gaacgactcccagacctgtcc

SEQ ID NO: 110565 - DNA, 21 bp, Artificial sequence
  SiRNA target sequence
aacgactcccagacctgtccc

SEQ ID NO: 110566 - DNA, 21 bp, Artificial sequence
  SiRNA target sequence
acgactcccagacctgtccct

SEQ ID NO: 110567 - DNA, 21 bp, Artificial sequence
  SiRNA target sequence
cgactcccagacctgtccctg

SEQ ID NO: 110568 - DNA, 21 bp, Artificial sequence
  SiRNA target sequence
gactcccagacctgtccctga

SEQ ID NO: 110569 - DNA, 21 bp, Artificial sequence
  SiRNA target sequence
actcccagacctgtccctgat

SEQ ID NO: 110570 - DNA, 21 bp, Artificial sequence
  SiRNA target sequence
ctcccagacctgtccctgatt

SEQ ID NO: 110571 - DNA, 21 bp, Artificial sequence
  SiRNA target sequence
tcccagacctgtccctgattt

SEQ ID NO: 110572 - DNA, 21 bp, Artificial sequence
  SiRNA target sequence
cccagacctgtccctgatttg

SEQ ID NO: 110573 - DNA, 21 bp, Artificial sequence
  SiRNA target sequence
ccagacctgtccctgatttgc

SEQ ID NO: 110574 - DNA, 21 bp, Artificial sequence
  SiRNA target sequence
cagacctgtccctgatttgca

SEQ ID NO: 110575 - DNA, 21 bp, Artificial sequence
  SiRNA target sequence
agacctgtccctgatttgcag

SEQ ID NO: 110576 - DNA, 21 bp, Artificial sequence
  SiRNA target sequence
gacctgtccctgatttgcagc

SEQ ID NO: 110577 - DNA, 21 bp, Artificial sequence
  SiRNA target sequence
acctgtccctgatttgcagca

SEQ ID NO: 110578 - DNA, 21 bp, Artificial sequence
  SiRNA target sequence
cctgtccctgatttgcagcac

SEQ ID NO: 110579 - DNA, 21 bp, Artificial sequence
  SiRNA target sequence
ctgtccctgatttgcagcacc

SEQ ID NO: 110580 - DNA, 21 bp, Artificial sequence
  SiRNA target sequence
tgtccctgatttgcagcacca

SEQ ID NO: 110581 - DNA, 21 bp, Artificial sequence
  SiRNA target sequence
gtccctgatttgcagcaccat

SEQ ID NO: 110582 - DNA, 21 bp, Artificial sequence
  SiRNA target sequence
tccctgatttgcagcaccatc

SEQ ID NO: 110583 - DNA, 21 bp, Artificial sequence
  SiRNA target sequence
ccctgatttgcagcaccatcc

SEQ ID NO: 110584 - DNA, 21 bp, Artificial sequence
  SiRNA target sequence
cctgatttgcagcaccatccc

SEQ ID NO: 110585 - DNA, 21 bp, Artificial sequence
  SiRNA target sequence
ctgatttgcagcaccatcccc

SEQ ID NO: 110586 - DNA, 21 bp, Artificial sequence
  SiRNA target sequence
tgatttgcagcaccatccccg

SEQ ID NO: 110587 - DNA, 21 bp, Artificial sequence
  SiRNA target sequence
gatttgcagcaccatccccga

SEQ ID NO: 110588 - DNA, 21 bp, Artificial sequence
  SiRNA target sequence
atttgcagcaccatccccgaa

SEQ ID NO: 110589 - DNA, 21 bp, Artificial sequence
  SiRNA target sequence
tttgcagcaccatccccgaaa

SEQ ID NO: 110590 - DNA, 21 bp, Artificial sequence
  SiRNA target sequence
ttgcagcaccatccccgaaaa

SEQ ID NO: 110591 - DNA, 21 bp, Artificial sequence
  SiRNA target sequence
tgcagcaccatccccgaaaaa

SEQ ID NO: 110592 - DNA, 21 bp, Artificial sequence
  SiRNA target sequence
gcagcaccatccccgaaaaat

SEQ ID NO: 110593 - DNA, 21 bp, Artificial sequence
  SiRNA target sequence
cagcaccatccccgaaaaata

SEQ ID NO: 110594 - DNA, 21 bp, Artificial sequence
  SiRNA target sequence
agcaccatccccgaaaaatac

SEQ ID NO: 110595 - DNA, 21 bp, Artificial sequence
  SiRNA target sequence
gcaccatccccgaaaaataca

SEQ ID NO: 110596 - DNA, 21 bp, Artificial sequence
  SiRNA target sequence
caccatccccgaaaaatacaa

SEQ ID NO: 110597 - DNA, 21 bp, Artificial sequence
  SiRNA target sequence
accatccccgaaaaatacaaa

SEQ ID NO: 110598 - DNA, 21 bp, Artificial sequence
  SiRNA target sequence
ccatccccgaaaaatacaaat

SEQ ID NO: 110599 - DNA, 21 bp, Artificial sequence
  SiRNA target sequence
catccccgaaaaatacaaatg

SEQ ID NO: 110600 - DNA, 21 bp, Artificial sequence
  SiRNA target sequence
atccccgaaaaatacaaatgc

SEQ ID NO: 110601 - DNA, 21 bp, Artificial sequence
  SiRNA target sequence
tccccgaaaaatacaaatgct

SEQ ID NO: 110602 - DNA, 21 bp, Artificial sequence
  SiRNA target sequence
ccccgaaaaatacaaatgcta

SEQ ID NO: 110603 - DNA, 21 bp, Artificial sequence
  SiRNA target sequence
cccgaaaaatacaaatgctac

SEQ ID NO: 110604 - DNA, 21 bp, Artificial sequence
  SiRNA target sequence
ccgaaaaatacaaatgctaca

SEQ ID NO: 110605 - DNA, 21 bp, Artificial sequence
  SiRNA target sequence
cgaaaaatacaaatgctacat

SEQ ID NO: 110606 - DNA, 21 bp, Artificial sequence
  SiRNA target sequence
gaaaaatacaaatgctacatt

SEQ ID NO: 110607 - DNA, 21 bp, Artificial sequence
  SiRNA target sequence
aaaaatacaaatgctacattt

SEQ ID NO: 110608 - DNA, 21 bp, Artificial sequence
  SiRNA target sequence
aaaatacaaatgctacatttt

SEQ ID NO: 110609 - DNA, 21 bp, Artificial sequence
  SiRNA target sequence
aaatacaaatgctacattttt

SEQ ID NO: 110610 - DNA, 21 bp, Artificial sequence
  SiRNA target sequence
aatacaaatgctacatttttt

SEQ ID NO: 110611 - DNA, 21 bp, Artificial sequence
  SiRNA target sequence
atacaaatgctacatttttta

SEQ ID NO: 110612 - DNA, 21 bp, Artificial sequence
  SiRNA target sequence
tacaaatgctacattttttac

SEQ ID NO: 110613 - DNA, 21 bp, Artificial sequence
  SiRNA target sequence
acaaatgctacattttttact

SEQ ID NO: 110614 - DNA, 21 bp, Artificial sequence
  SiRNA target sequence
caaatgctacattttttactt

SEQ ID NO: 110615 - DNA, 21 bp, Artificial sequence
  SiRNA target sequence
aaatgctacattttttacttt

SEQ ID NO: 110616 - DNA, 21 bp, Artificial sequence
  SiRNA target sequence
aatgctacattttttactttt

SEQ ID NO: 110617 - DNA, 21 bp, Artificial sequence
  SiRNA target sequence
atgctacattttttacttttt

SEQ ID NO: 110618 - DNA, 21 bp, Artificial sequence
  SiRNA target sequence
tgctacattttttactttttt

SEQ ID NO: 110619 - DNA, 21 bp, Artificial sequence
  SiRNA target sequence
gctacattttttactttttta

SEQ ID NO: 110620 - DNA, 21 bp, Artificial sequence
  SiRNA target sequence
ctacattttttacttttttat

SEQ ID NO: 110621 - DNA, 21 bp, Artificial sequence
  SiRNA target sequence
tacattttttacttttttata

SEQ ID NO: 110622 - DNA, 21 bp, Artificial sequence
  SiRNA target sequence
acattttttacttttttatat

SEQ ID NO: 110623 - DNA, 21 bp, Artificial sequence
  SiRNA target sequence
cattttttacttttttatatt

SEQ ID NO: 110624 - DNA, 21 bp, Artificial sequence
  SiRNA target sequence
attttttacttttttatattg

SEQ ID NO: 110625 - DNA, 21 bp, Artificial sequence
  SiRNA target sequence
ttttttacttttttatattgt

SEQ ID NO: 110626 - DNA, 21 bp, Artificial sequence
  SiRNA target sequence
tttttacttttttatattgta

SEQ ID NO: 110627 - DNA, 21 bp, Artificial sequence
  SiRNA target sequence
ttttacttttttatattgtaa

SEQ ID NO: 110628 - DNA, 21 bp, Artificial sequence
  SiRNA target sequence
tttacttttttatattgtaaa

SEQ ID NO: 110629 - DNA, 21 bp, Artificial sequence
  SiRNA target sequence
ttacttttttatattgtaaag

SEQ ID NO: 110630 - DNA, 21 bp, Artificial sequence
  SiRNA target sequence
tacttttttatattgtaaagc

SEQ ID NO: 110631 - DNA, 21 bp, Artificial sequence
  SiRNA target sequence
acttttttatattgtaaagca

SEQ ID NO: 110632 - DNA, 21 bp, Artificial sequence
  SiRNA target sequence
cttttttatattgtaaagcaa

SEQ ID NO: 110633 - DNA, 21 bp, Artificial sequence
  SiRNA target sequence
ttttttatattgtaaagcaaa

SEQ ID NO: 110634 - DNA, 21 bp, Artificial sequence
  SiRNA target sequence
tttttatattgtaaagcaaat

SEQ ID NO: 110635 - DNA, 21 bp, Artificial sequence
  SiRNA target sequence
ttttatattgtaaagcaaatc

SEQ ID NO: 110636 - DNA, 21 bp, Artificial sequence
  SiRNA target sequence
tttatattgtaaagcaaatcc

SEQ ID NO: 110637 - DNA, 21 bp, Artificial sequence
  SiRNA target sequence
ttatattgtaaagcaaatccc

SEQ ID NO: 110638 - DNA, 21 bp, Artificial sequence
  SiRNA target sequence
tatattgtaaagcaaatccca

SEQ ID NO: 110639 - DNA, 21 bp, Artificial sequence
  SiRNA target sequence
atattgtaaagcaaatcccaa

SEQ ID NO: 110640 - DNA, 21 bp, Artificial sequence
  SiRNA target sequence
tattgtaaagcaaatcccaat

SEQ ID NO: 110641 - DNA, 21 bp, Artificial sequence
  SiRNA target sequence
attgtaaagcaaatcccaatc

SEQ ID NO: 110642 - DNA, 21 bp, Artificial sequence
  SiRNA target sequence
ttgtaaagcaaatcccaatcc

SEQ ID NO: 110643 - DNA, 21 bp, Artificial sequence
  SiRNA target sequence
tgtaaagcaaatcccaatcct

SEQ ID NO: 110644 - DNA, 21 bp, Artificial sequence
  SiRNA target sequence
gtaaagcaaatcccaatcctg

SEQ ID NO: 110645 - DNA, 21 bp, Artificial sequence
  SiRNA target sequence
taaagcaaatcccaatcctgt

SEQ ID NO: 110646 - DNA, 21 bp, Artificial sequence
  SiRNA target sequence
aaagcaaatcccaatcctgta

SEQ ID NO: 110647 - DNA, 21 bp, Artificial sequence
  SiRNA target sequence
aagcaaatcccaatcctgtac

SEQ ID NO: 110648 - DNA, 21 bp, Artificial sequence
  SiRNA target sequence
agcaaatcccaatcctgtacc

SEQ ID NO: 110649 - DNA, 21 bp, Artificial sequence
  SiRNA target sequence
gcaaatcccaatcctgtacca

SEQ ID NO: 110650 - DNA, 21 bp, Artificial sequence
  SiRNA target sequence
caaatcccaatcctgtaccaa

SEQ ID NO: 110651 - DNA, 21 bp, Artificial sequence
  SiRNA target sequence
aaatcccaatcctgtaccaag

SEQ ID NO: 110652 - DNA, 21 bp, Artificial sequence
  SiRNA target sequence
aatcccaatcctgtaccaagc

SEQ ID NO: 110653 - DNA, 21 bp, Artificial sequence
  SiRNA target sequence
atcccaatcctgtaccaagcg

SEQ ID NO: 110654 - DNA, 21 bp, Artificial sequence
  SiRNA target sequence
tcccaatcctgtaccaagcga

SEQ ID NO: 110655 - DNA, 21 bp, Artificial sequence
  SiRNA target sequence
cccaatcctgtaccaagcgat

SEQ ID NO: 110656 - DNA, 21 bp, Artificial sequence
  SiRNA target sequence
ccaatcctgtaccaagcgata

SEQ ID NO: 110657 - DNA, 21 bp, Artificial sequence
  SiRNA target sequence
caatcctgtaccaagcgatac

SEQ ID NO: 110658 - DNA, 21 bp, Artificial sequence
  SiRNA target sequence
aatcctgtaccaagcgatacc

SEQ ID NO: 110659 - DNA, 21 bp, Artificial sequence
  SiRNA target sequence
atcctgtaccaagcgatacct

SEQ ID NO: 110660 - DNA, 21 bp, Artificial sequence
  SiRNA target sequence
tcctgtaccaagcgatacctg

SEQ ID NO: 110661 - DNA, 21 bp, Artificial sequence
  SiRNA target sequence
cctgtaccaagcgatacctgc

SEQ ID NO: 110662 - DNA, 21 bp, Artificial sequence
  SiRNA target sequence
ctgtaccaagcgatacctgcg

SEQ ID NO: 110663 - DNA, 21 bp, Artificial sequence
  SiRNA target sequence
tgtaccaagcgatacctgcgc

SEQ ID NO: 110664 - DNA, 21 bp, Artificial sequence
  SiRNA target sequence
gtaccaagcgatacctgcgca

SEQ ID NO: 110665 - DNA, 21 bp, Artificial sequence
  SiRNA target sequence
taccaagcgatacctgcgcac

SEQ ID NO: 110666 - DNA, 21 bp, Artificial sequence
  SiRNA target sequence
accaagcgatacctgcgcacc

SEQ ID NO: 110667 - DNA, 21 bp, Artificial sequence
  SiRNA target sequence
ccaagcgatacctgcgcacct

SEQ ID NO: 110668 - DNA, 21 bp, Artificial sequence
  SiRNA target sequence
caagcgatacctgcgcaccta

SEQ ID NO: 110669 - DNA, 21 bp, Artificial sequence
  SiRNA target sequence
aagcgatacctgcgcacctac

SEQ ID NO: 110670 - DNA, 21 bp, Artificial sequence
  SiRNA target sequence
agcgatacctgcgcacctact

SEQ ID NO: 110671 - DNA, 21 bp, Artificial sequence
  SiRNA target sequence
gcgatacctgcgcacctacta

SEQ ID NO: 110672 - DNA, 21 bp, Artificial sequence
  SiRNA target sequence
cgatacctgcgcacctactat

SEQ ID NO: 110673 - DNA, 21 bp, Artificial sequence
  SiRNA target sequence
gatacctgcgcacctactata

SEQ ID NO: 110674 - DNA, 21 bp, Artificial sequence
  SiRNA target sequence
atacctgcgcacctactatac

SEQ ID NO: 110675 - DNA, 21 bp, Artificial sequence
  SiRNA target sequence
tacctgcgcacctactatacc

SEQ ID NO: 110676 - DNA, 21 bp, Artificial sequence
  SiRNA target sequence
acctgcgcacctactataccg

SEQ ID NO: 110677 - DNA, 21 bp, Artificial sequence
  SiRNA target sequence
cctgcgcacctactataccgt

SEQ ID NO: 110678 - DNA, 21 bp, Artificial sequence
  SiRNA target sequence
ctgcgcacctactataccgtg

SEQ ID NO: 110679 - DNA, 21 bp, Artificial sequence
  SiRNA target sequence
tgcgcacctactataccgtgt

SEQ ID NO: 110680 - DNA, 21 bp, Artificial sequence
  SiRNA target sequence
gcgcacctactataccgtgtc

SEQ ID NO: 110681 - DNA, 21 bp, Artificial sequence
  SiRNA target sequence
cgcacctactataccgtgtcc

SEQ ID NO: 110682 - DNA, 21 bp, Artificial sequence
  SiRNA target sequence
gcacctactataccgtgtccc

SEQ ID NO: 110683 - DNA, 21 bp, Artificial sequence
  SiRNA target sequence
cacctactataccgtgtcccc

SEQ ID NO: 110684 - DNA, 21 bp, Artificial sequence
  SiRNA target sequence
acctactataccgtgtccccc

SEQ ID NO: 110685 - DNA, 21 bp, Artificial sequence
  SiRNA target sequence
cctactataccgtgtccccca

SEQ ID NO: 110686 - DNA, 21 bp, Artificial sequence
  SiRNA target sequence
ctactataccgtgtcccccat

SEQ ID NO: 110687 - DNA, 21 bp, Artificial sequence
  SiRNA target sequence
tactataccgtgtcccccata

SEQ ID NO: 110688 - DNA, 21 bp, Artificial sequence
  SiRNA target sequence
actataccgtgtcccccataa

SEQ ID NO: 110689 - DNA, 21 bp, Artificial sequence
  SiRNA target sequence
ctataccgtgtcccccataaa

SEQ ID NO: 110690 - DNA, 21 bp, Artificial sequence
  SiRNA target sequence
tataccgtgtcccccataaaa

SEQ ID NO: 110691 - DNA, 21 bp, Artificial sequence
  SiRNA target sequence
ataccgtgtcccccataaaat

SEQ ID NO: 110692 - DNA, 21 bp, Artificial sequence
  SiRNA target sequence
taccgtgtcccccataaaatt

SEQ ID NO: 110693 - DNA, 21 bp, Artificial sequence
  SiRNA target sequence
accgtgtcccccataaaattg

SEQ ID NO: 110694 - DNA, 21 bp, Artificial sequence
  SiRNA target sequence
ccgtgtcccccataaaattgg

SEQ ID NO: 110695 - DNA, 21 bp, Artificial sequence
  SiRNA target sequence
cgtgtcccccataaaattggt

SEQ ID NO: 110696 - DNA, 21 bp, Artificial sequence
  SiRNA target sequence
gtgtcccccataaaattggtc

SEQ ID NO: 110697 - DNA, 21 bp, Artificial sequence
  SiRNA target sequence
tgtcccccataaaattggtca

SEQ ID NO: 110698 - DNA, 21 bp, Artificial sequence
  SiRNA target sequence
gtcccccataaaattggtcat

SEQ ID NO: 110699 - DNA, 21 bp, Artificial sequence
  SiRNA target sequence
tcccccataaaattggtcatt

SEQ ID NO: 110700 - DNA, 21 bp, Artificial sequence
  SiRNA target sequence
cccccataaaattggtcatta

SEQ ID NO: 110701 - DNA, 21 bp, Artificial sequence
  SiRNA target sequence
ccccataaaattggtcattat

SEQ ID NO: 110702 - DNA, 21 bp, Artificial sequence
  SiRNA target sequence
cccataaaattggtcattata

SEQ ID NO: 110703 - DNA, 21 bp, Artificial sequence
  SiRNA target sequence
ccataaaattggtcattatac

SEQ ID NO: 110704 - DNA, 21 bp, Artificial sequence
  SiRNA target sequence
cataaaattggtcattataca

SEQ ID NO: 110705 - DNA, 21 bp, Artificial sequence
  SiRNA target sequence
ataaaattggtcattatacaa

SEQ ID NO: 110706 - DNA, 21 bp, Artificial sequence
  SiRNA target sequence
taaaattggtcattatacaaa

SEQ ID NO: 110707 - DNA, 21 bp, Artificial sequence
  SiRNA target sequence
aaaattggtcattatacaaat

SEQ ID NO: 110708 - DNA, 21 bp, Artificial sequence
  SiRNA target sequence
aaattggtcattatacaaatg

SEQ ID NO: 110709 - DNA, 21 bp, Artificial sequence
  SiRNA target sequence
aattggtcattatacaaatgc

SEQ ID NO: 110710 - DNA, 21 bp, Artificial sequence
  SiRNA target sequence
attggtcattatacaaatgca

SEQ ID NO: 110711 - DNA, 21 bp, Artificial sequence
  SiRNA target sequence
ttggtcattatacaaatgcat

SEQ ID NO: 110712 - DNA, 21 bp, Artificial sequence
  SiRNA target sequence
tggtcattatacaaatgcatc

SEQ ID NO: 110713 - DNA, 21 bp, Artificial sequence
  SiRNA target sequence
ggtcattatacaaatgcatcg

SEQ ID NO: 110714 - DNA, 21 bp, Artificial sequence
  SiRNA target sequence
gtcattatacaaatgcatcga

SEQ ID NO: 110715 - DNA, 21 bp, Artificial sequence
  SiRNA target sequence
tcattatacaaatgcatcgat

SEQ ID NO: 110716 - DNA, 21 bp, Artificial sequence
  SiRNA target sequence
cattatacaaatgcatcgatc

SEQ ID NO: 110717 - DNA, 21 bp, Artificial sequence
  SiRNA target sequence
attatacaaatgcatcgatcc

SEQ ID NO: 110718 - DNA, 21 bp, Artificial sequence
  SiRNA target sequence
ttatacaaatgcatcgatcct

SEQ ID NO: 110719 - DNA, 21 bp, Artificial sequence
  SiRNA target sequence
tatacaaatgcatcgatcctc

SEQ ID NO: 110720 - DNA, 21 bp, Artificial sequence
  SiRNA target sequence
atacaaatgcatcgatcctcc

SEQ ID NO: 110721 - DNA, 21 bp, Artificial sequence
  SiRNA target sequence
tacaaatgcatcgatcctcct

SEQ ID NO: 110722 - DNA, 21 bp, Artificial sequence
  SiRNA target sequence
acaaatgcatcgatcctcctt

SEQ ID NO: 110723 - DNA, 21 bp, Artificial sequence
  SiRNA target sequence
caaatgcatcgatcctccttt

SEQ ID NO: 110724 - DNA, 21 bp, Artificial sequence
  SiRNA target sequence
aaatgcatcgatcctcctttt

SEQ ID NO: 110725 - DNA, 21 bp, Artificial sequence
  SiRNA target sequence
aatgcatcgatcctccttttc

SEQ ID NO: 110726 - DNA, 21 bp, Artificial sequence
  SiRNA target sequence
atgcatcgatcctccttttcc

SEQ ID NO: 110727 - DNA, 21 bp, Artificial sequence
  SiRNA target sequence
tgcatcgatcctccttttcct

SEQ ID NO: 110728 - DNA, 21 bp, Artificial sequence
  SiRNA target sequence
gcatcgatcctccttttcctt

SEQ ID NO: 110729 - DNA, 21 bp, Artificial sequence
  SiRNA target sequence
catcgatcctccttttccttt

SEQ ID NO: 110730 - DNA, 21 bp, Artificial sequence
  SiRNA target sequence
atcgatcctccttttcctttg

SEQ ID NO: 110731 - DNA, 21 bp, Artificial sequence
  SiRNA target sequence
tcgatcctccttttcctttgc

SEQ ID NO: 110732 - DNA, 21 bp, Artificial sequence
  SiRNA target sequence
cgatcctccttttcctttgca

SEQ ID NO: 110733 - DNA, 21 bp, Artificial sequence
  SiRNA target sequence
gatcctccttttcctttgcaa

SEQ ID NO: 110734 - DNA, 21 bp, Artificial sequence
  SiRNA target sequence
atcctccttttcctttgcaat

SEQ ID NO: 110735 - DNA, 21 bp, Artificial sequence
  SiRNA target sequence
tcctccttttcctttgcaatt

SEQ ID NO: 110736 - DNA, 21 bp, Artificial sequence
  SiRNA target sequence
cctccttttcctttgcaatta

SEQ ID NO: 110737 - DNA, 21 bp, Artificial sequence
  SiRNA target sequence
ctccttttcctttgcaattac

SEQ ID NO: 110738 - DNA, 21 bp, Artificial sequence
  SiRNA target sequence
tccttttcctttgcaattacc

SEQ ID NO: 110739 - DNA, 21 bp, Artificial sequence
  SiRNA target sequence
ccttttcctttgcaattacca

SEQ ID NO: 110740 - DNA, 21 bp, Artificial sequence
  SiRNA target sequence
cttttcctttgcaattaccaa

SEQ ID NO: 110741 - DNA, 21 bp, Artificial sequence
  SiRNA target sequence
ttttcctttgcaattaccaat

SEQ ID NO: 110742 - DNA, 21 bp, Artificial sequence
  SiRNA target sequence
tttcctttgcaattaccaata

SEQ ID NO: 110743 - DNA, 21 bp, Artificial sequence
  SiRNA target sequence
ttcctttgcaattaccaatag

SEQ ID NO: 110744 - DNA, 21 bp, Artificial sequence
  SiRNA target sequence
tcctttgcaattaccaatagc

SEQ ID NO: 110745 - DNA, 21 bp, Artificial sequence
  SiRNA target sequence
cctttgcaattaccaatagcc

SEQ ID NO: 110746 - DNA, 21 bp, Artificial sequence
  SiRNA target sequence
ctttgcaattaccaatagcct

SEQ ID NO: 110747 - DNA, 21 bp, Artificial sequence
  SiRNA target sequence
tttgcaattaccaatagcctt

SEQ ID NO: 110748 - DNA, 21 bp, Artificial sequence
  SiRNA target sequence
ttgcaattaccaatagccttt

SEQ ID NO: 110749 - DNA, 21 bp, Artificial sequence
  SiRNA target sequence
tgcaattaccaatagcctttc

SEQ ID NO: 110750 - DNA, 21 bp, Artificial sequence
  SiRNA target sequence
gcaattaccaatagcctttcc

SEQ ID NO: 110751 - DNA, 21 bp, Artificial sequence
  SiRNA target sequence
caattaccaatagcctttcct

SEQ ID NO: 110752 - DNA, 21 bp, Artificial sequence
  SiRNA target sequence
aattaccaatagcctttccta

SEQ ID NO: 110753 - DNA, 21 bp, Artificial sequence
  SiRNA target sequence
attaccaatagcctttcctaa

SEQ ID NO: 110754 - DNA, 21 bp, Artificial sequence
  SiRNA target sequence
ttaccaatagcctttcctaat

SEQ ID NO: 110755 - DNA, 21 bp, Artificial sequence
  SiRNA target sequence
taccaatagcctttcctaata

SEQ ID NO: 110756 - DNA, 21 bp, Artificial sequence
  SiRNA target sequence
accaatagcctttcctaataa

SEQ ID NO: 110757 - DNA, 21 bp, Artificial sequence
  SiRNA target sequence
ccaatagcctttcctaataat

SEQ ID NO: 110758 - DNA, 21 bp, Artificial sequence
  SiRNA target sequence
caatagcctttcctaataatt

SEQ ID NO: 110759 - DNA, 21 bp, Artificial sequence
  SiRNA target sequence
aatagcctttcctaataattc

SEQ ID NO: 110760 - DNA, 21 bp, Artificial sequence
  SiRNA target sequence
atagcctttcctaataattcc

SEQ ID NO: 110761 - DNA, 21 bp, Artificial sequence
  SiRNA target sequence
tagcctttcctaataattccc

SEQ ID NO: 110762 - DNA, 21 bp, Artificial sequence
  SiRNA target sequence
agcctttcctaataattcccc

SEQ ID NO: 110763 - DNA, 21 bp, Artificial sequence
  SiRNA target sequence
gcctttcctaataattcccct

SEQ ID NO: 110764 - DNA, 21 bp, Artificial sequence
  SiRNA target sequence
cctttcctaataattccccta

SEQ ID NO: 110765 - DNA, 21 bp, Artificial sequence
  SiRNA target sequence
ctttcctaataattcccctat

SEQ ID NO: 110766 - DNA, 21 bp, Artificial sequence
  SiRNA target sequence
tttcctaataattcccctata

SEQ ID NO: 110767 - DNA, 21 bp, Artificial sequence
  SiRNA target sequence
ttcctaataattcccctataa

SEQ ID NO: 110768 - DNA, 21 bp, Artificial sequence
  SiRNA target sequence
tcctaataattcccctataat

SEQ ID NO: 110769 - DNA, 21 bp, Artificial sequence
  SiRNA target sequence
cctaataattcccctataata

SEQ ID NO: 110770 - DNA, 21 bp, Artificial sequence
  SiRNA target sequence
ctaataattcccctataatac

SEQ ID NO: 110771 - DNA, 21 bp, Artificial sequence
  SiRNA target sequence
taataattcccctataatact

SEQ ID NO: 110772 - DNA, 21 bp, Artificial sequence
  SiRNA target sequence
aataattcccctataatactt

SEQ ID NO: 110773 - DNA, 21 bp, Artificial sequence
  SiRNA target sequence
ataattcccctataatacttt

SEQ ID NO: 110774 - DNA, 21 bp, Artificial sequence
  SiRNA target sequence
taattcccctataatactttc

SEQ ID NO: 110775 - DNA, 21 bp, Artificial sequence
  SiRNA target sequence
aattcccctataatactttct

SEQ ID NO: 110776 - DNA, 21 bp, Artificial sequence
  SiRNA target sequence
attcccctataatactttcta

SEQ ID NO: 110777 - DNA, 21 bp, Artificial sequence
  SiRNA target sequence
ttcccctataatactttctat

SEQ ID NO: 110778 - DNA, 21 bp, Artificial sequence
  SiRNA target sequence
tcccctataatactttctata

SEQ ID NO: 110779 - DNA, 21 bp, Artificial sequence
  SiRNA target sequence
cccctataatactttctatac

SEQ ID NO: 110780 - DNA, 21 bp, Artificial sequence
  SiRNA target sequence
ccctataatactttctatact

SEQ ID NO: 110781 - DNA, 21 bp, Artificial sequence
  SiRNA target sequence
cctataatactttctatactg

SEQ ID NO: 110782 - DNA, 21 bp, Artificial sequence
  SiRNA target sequence
ctataatactttctatactga

SEQ ID NO: 110783 - DNA, 21 bp, Artificial sequence
  SiRNA target sequence
tataatactttctatactgat

SEQ ID NO: 110784 - DNA, 21 bp, Artificial sequence
  SiRNA target sequence
ataatactttctatactgatt

SEQ ID NO: 110785 - DNA, 21 bp, Artificial sequence
  SiRNA target sequence
taatactttctatactgattc

SEQ ID NO: 110786 - DNA, 21 bp, Artificial sequence
  SiRNA target sequence
aatactttctatactgattcc

SEQ ID NO: 110787 - DNA, 21 bp, Artificial sequence
  SiRNA target sequence
atactttctatactgattcca

SEQ ID NO: 110788 - DNA, 21 bp, Artificial sequence
  SiRNA target sequence
tactttctatactgattccac

SEQ ID NO: 110789 - DNA, 21 bp, Artificial sequence
  SiRNA target sequence
actttctatactgattccaca

SEQ ID NO: 110790 - DNA, 21 bp, Artificial sequence
  SiRNA target sequence
ctttctatactgattccacaa

SEQ ID NO: 110791 - DNA, 21 bp, Artificial sequence
  SiRNA target sequence
tttctatactgattccacaaa

SEQ ID NO: 110792 - DNA, 21 bp, Artificial sequence
  SiRNA target sequence
ttctatactgattccacaaat

SEQ ID NO: 110793 - DNA, 21 bp, Artificial sequence
  SiRNA target sequence
tctatactgattccacaaata

SEQ ID NO: 110794 - DNA, 21 bp, Artificial sequence
  SiRNA target sequence
ctatactgattccacaaataa

SEQ ID NO: 110795 - DNA, 21 bp, Artificial sequence
  SiRNA target sequence
tatactgattccacaaataaa

SEQ ID NO: 110796 - DNA, 21 bp, Artificial sequence
  SiRNA target sequence
atactgattccacaaataaat

SEQ ID NO: 110797 - DNA, 21 bp, Artificial sequence
  SiRNA target sequence
tactgattccacaaataaatg

SEQ ID NO: 110798 - DNA, 21 bp, Artificial sequence
  SiRNA target sequence
actgattccacaaataaatgc

SEQ ID NO: 110799 - DNA, 21 bp, Artificial sequence
  SiRNA target sequence
ctgattccacaaataaatgct

SEQ ID NO: 110800 - DNA, 21 bp, Artificial sequence
  SiRNA target sequence
tgattccacaaataaatgcta

SEQ ID NO: 110801 - DNA, 21 bp, Artificial sequence
  SiRNA target sequence
gattccacaaataaatgctaa

SEQ ID NO: 110802 - DNA, 21 bp, Artificial sequence
  SiRNA target sequence
attccacaaataaatgctaat

SEQ ID NO: 110803 - DNA, 21 bp, Artificial sequence
  SiRNA target sequence
ttccacaaataaatgctaatc

SEQ ID NO: 110804 - DNA, 21 bp, Artificial sequence
  SiRNA target sequence
tccacaaataaatgctaatcc

SEQ ID NO: 110805 - DNA, 21 bp, Artificial sequence
  SiRNA target sequence
ccacaaataaatgctaatcca

SEQ ID NO: 110806 - DNA, 21 bp, Artificial sequence
  SiRNA target sequence
cacaaataaatgctaatccat

SEQ ID NO: 110807 - DNA, 21 bp, Artificial sequence
  SiRNA target sequence
acaaataaatgctaatccatg

SEQ ID NO: 110808 - DNA, 21 bp, Artificial sequence
  SiRNA target sequence
caaataaatgctaatccatgg

SEQ ID NO: 110809 - DNA, 21 bp, Artificial sequence
  SiRNA target sequence
aaataaatgctaatccatggc

SEQ ID NO: 110810 - DNA, 21 bp, Artificial sequence
  SiRNA target sequence
aataaatgctaatccatggca

SEQ ID NO: 110811 - DNA, 21 bp, Artificial sequence
  SiRNA target sequence
ataaatgctaatccatggcat

SEQ ID NO: 110812 - DNA, 21 bp, Artificial sequence
  SiRNA target sequence
taaatgctaatccatggcatc

SEQ ID NO: 110813 - DNA, 21 bp, Artificial sequence
  SiRNA target sequence
aaatgctaatccatggcatct

SEQ ID NO: 110814 - DNA, 21 bp, Artificial sequence
  SiRNA target sequence
aatgctaatccatggcatcta

SEQ ID NO: 110815 - DNA, 21 bp, Artificial sequence
  SiRNA target sequence
atgctaatccatggcatctat

SEQ ID NO: 110816 - DNA, 21 bp, Artificial sequence
  SiRNA target sequence
tgctaatccatggcatctata

SEQ ID NO: 110817 - DNA, 21 bp, Artificial sequence
  SiRNA target sequence
gctaatccatggcatctataa

SEQ ID NO: 110818 - DNA, 21 bp, Artificial sequence
  SiRNA target sequence
ctaatccatggcatctataag

SEQ ID NO: 110819 - DNA, 21 bp, Artificial sequence
  SiRNA target sequence
taatccatggcatctataaga

SEQ ID NO: 110820 - DNA, 21 bp, Artificial sequence
  SiRNA target sequence
aatccatggcatctataagat

SEQ ID NO: 110821 - DNA, 21 bp, Artificial sequence
  SiRNA target sequence
atccatggcatctataagatc

SEQ ID NO: 110822 - DNA, 21 bp, Artificial sequence
  SiRNA target sequence
tccatggcatctataagatcc

SEQ ID NO: 110823 - DNA, 21 bp, Artificial sequence
  SiRNA target sequence
ccatggcatctataagatcct

SEQ ID NO: 110824 - DNA, 21 bp, Artificial sequence
  SiRNA target sequence
catggcatctataagatccta

SEQ ID NO: 110825 - DNA, 21 bp, Artificial sequence
  SiRNA target sequence
atggcatctataagatcctat

SEQ ID NO: 110826 - DNA, 21 bp, Artificial sequence
  SiRNA target sequence
tggcatctataagatcctatg

SEQ ID NO: 110827 - DNA, 21 bp, Artificial sequence
  SiRNA target sequence
ggcatctataagatcctatga

SEQ ID NO: 110828 - DNA, 21 bp, Artificial sequence
  SiRNA target sequence
gcatctataagatcctatgac

SEQ ID NO: 110829 - DNA, 21 bp, Artificial sequence
  SiRNA target sequence
catctataagatcctatgact

SEQ ID NO: 110830 - DNA, 21 bp, Artificial sequence
  SiRNA target sequence
atctataagatcctatgactt

SEQ ID NO: 110831 - DNA, 21 bp, Artificial sequence
  SiRNA target sequence
tctataagatcctatgacttt

SEQ ID NO: 110832 - DNA, 21 bp, Artificial sequence
  SiRNA target sequence
ctataagatcctatgacttta

SEQ ID NO: 110833 - DNA, 21 bp, Artificial sequence
  SiRNA target sequence
tataagatcctatgactttat

SEQ ID NO: 110834 - DNA, 21 bp, Artificial sequence
  SiRNA target sequence
ataagatcctatgactttatc

SEQ ID NO: 110835 - DNA, 21 bp, Artificial sequence
  SiRNA target sequence
taagatcctatgactttatca

SEQ ID NO: 110836 - DNA, 21 bp, Artificial sequence
  SiRNA target sequence
aagatcctatgactttatcat

SEQ ID NO: 110837 - DNA, 21 bp, Artificial sequence
  SiRNA target sequence
agatcctatgactttatcatt

SEQ ID NO: 110838 - DNA, 21 bp, Artificial sequence
  SiRNA target sequence
gatcctatgactttatcattt

SEQ ID NO: 110839 - DNA, 21 bp, Artificial sequence
  SiRNA target sequence
atcctatgactttatcatttt

SEQ ID NO: 110840 - DNA, 21 bp, Artificial sequence
  SiRNA target sequence
tcctatgactttatcattttt

SEQ ID NO: 110841 - DNA, 21 bp, Artificial sequence
  SiRNA target sequence
cctatgactttatcattttta

SEQ ID NO: 110842 - DNA, 21 bp, Artificial sequence
  SiRNA target sequence
ctatgactttatcatttttat

SEQ ID NO: 110843 - DNA, 21 bp, Artificial sequence
  SiRNA target sequence
tatgactttatcatttttatc

SEQ ID NO: 110844 - DNA, 21 bp, Artificial sequence
  SiRNA target sequence
atgactttatcatttttatct

SEQ ID NO: 110845 - DNA, 21 bp, Artificial sequence
  SiRNA target sequence
tgactttatcatttttatcta

SEQ ID NO: 110846 - DNA, 21 bp, Artificial sequence
  SiRNA target sequence
gactttatcatttttatctag

SEQ ID NO: 110847 - DNA, 21 bp, Artificial sequence
  SiRNA target sequence
actttatcatttttatctagt

SEQ ID NO: 110848 - DNA, 21 bp, Artificial sequence
  SiRNA target sequence
ctttatcatttttatctagta

SEQ ID NO: 110849 - DNA, 21 bp, Artificial sequence
  SiRNA target sequence
tttatcatttttatctagtac

SEQ ID NO: 110850 - DNA, 21 bp, Artificial sequence
  SiRNA target sequence
ttatcatttttatctagtacc

SEQ ID NO: 110851 - DNA, 21 bp, Artificial sequence
  SiRNA target sequence
tatcatttttatctagtacct

SEQ ID NO: 110852 - DNA, 21 bp, Artificial sequence
  SiRNA target sequence
atcatttttatctagtacctt

SEQ ID NO: 110853 - DNA, 21 bp, Artificial sequence
  SiRNA target sequence
tcatttttatctagtaccttt

SEQ ID NO: 110854 - DNA, 21 bp, Artificial sequence
  SiRNA target sequence
catttttatctagtacctttt

SEQ ID NO: 110855 - DNA, 21 bp, Artificial sequence
  SiRNA target sequence
atttttatctagtaccttttg

SEQ ID NO: 110856 - DNA, 21 bp, Artificial sequence
  SiRNA target sequence
tttttatctagtaccttttgt

SEQ ID NO: 110857 - DNA, 21 bp, Artificial sequence
  SiRNA target sequence
ttttatctagtaccttttgta

SEQ ID NO: 110858 - DNA, 21 bp, Artificial sequence
  SiRNA target sequence
tttatctagtaccttttgtaa

SEQ ID NO: 110859 - DNA, 21 bp, Artificial sequence
  SiRNA target sequence
ttatctagtaccttttgtaaa

SEQ ID NO: 110860 - DNA, 21 bp, Artificial sequence
  SiRNA target sequence
tatctagtaccttttgtaaac

SEQ ID NO: 110861 - DNA, 21 bp, Artificial sequence
  SiRNA target sequence
atctagtaccttttgtaaact

SEQ ID NO: 110862 - DNA, 21 bp, Artificial sequence
  SiRNA target sequence
tctagtaccttttgtaaactc

SEQ ID NO: 110863 - DNA, 21 bp, Artificial sequence
  SiRNA target sequence
ctagtaccttttgtaaactca

SEQ ID NO: 110864 - DNA, 21 bp, Artificial sequence
  SiRNA target sequence
tagtaccttttgtaaactcat

SEQ ID NO: 110865 - DNA, 21 bp, Artificial sequence
  SiRNA target sequence
agtaccttttgtaaactcata

SEQ ID NO: 110866 - DNA, 21 bp, Artificial sequence
  SiRNA target sequence
gtaccttttgtaaactcatat

SEQ ID NO: 110867 - DNA, 21 bp, Artificial sequence
  SiRNA target sequence
taccttttgtaaactcatata

SEQ ID NO: 110868 - DNA, 21 bp, Artificial sequence
  SiRNA target sequence
accttttgtaaactcatataa

SEQ ID NO: 110869 - DNA, 21 bp, Artificial sequence
  SiRNA target sequence
ccttttgtaaactcatataaa

SEQ ID NO: 110870 - DNA, 21 bp, Artificial sequence
  SiRNA target sequence
cttttgtaaactcatataaat

SEQ ID NO: 110871 - DNA, 21 bp, Artificial sequence
  SiRNA target sequence
ttttgtaaactcatataaatg

SEQ ID NO: 110872 - DNA, 21 bp, Artificial sequence
  SiRNA target sequence
tttgtaaactcatataaatgt

SEQ ID NO: 110873 - DNA, 21 bp, Artificial sequence
  SiRNA target sequence
ttgtaaactcatataaatgtt

SEQ ID NO: 110874 - DNA, 21 bp, Artificial sequence
  SiRNA target sequence
tgtaaactcatataaatgttt

SEQ ID NO: 110875 - DNA, 21 bp, Artificial sequence
  SiRNA target sequence
gtaaactcatataaatgtttt

SEQ ID NO: 110876 - DNA, 21 bp, Artificial sequence
  SiRNA target sequence
taaactcatataaatgttttc

SEQ ID NO: 110877 - DNA, 21 bp, Artificial sequence
  SiRNA target sequence
aaactcatataaatgttttcc

SEQ ID NO: 110878 - DNA, 21 bp, Artificial sequence
  SiRNA target sequence
aactcatataaatgttttcct

SEQ ID NO: 110879 - DNA, 21 bp, Artificial sequence
  SiRNA target sequence
actcatataaatgttttcctg

SEQ ID NO: 110880 - DNA, 21 bp, Artificial sequence
  SiRNA target sequence
ctcatataaatgttttcctgt

SEQ ID NO: 110881 - DNA, 21 bp, Artificial sequence
  SiRNA target sequence
tcatataaatgttttcctgtc

SEQ ID NO: 110882 - DNA, 21 bp, Artificial sequence
  SiRNA target sequence
catataaatgttttcctgtcc

SEQ ID NO: 110883 - DNA, 21 bp, Artificial sequence
  SiRNA target sequence
atataaatgttttcctgtcct

SEQ ID NO: 110884 - DNA, 21 bp, Artificial sequence
  SiRNA target sequence
tataaatgttttcctgtccta

SEQ ID NO: 110885 - DNA, 21 bp, Artificial sequence
  SiRNA target sequence
ataaatgttttcctgtcctat

SEQ ID NO: 110886 - DNA, 21 bp, Artificial sequence
  SiRNA target sequence
taaatgttttcctgtcctatt

SEQ ID NO: 110887 - DNA, 21 bp, Artificial sequence
  SiRNA target sequence
aaatgttttcctgtcctatta

SEQ ID NO: 110888 - DNA, 21 bp, Artificial sequence
  SiRNA target sequence
aatgttttcctgtcctattac

SEQ ID NO: 110889 - DNA, 21 bp, Artificial sequence
  SiRNA target sequence
atgttttcctgtcctattact

SEQ ID NO: 110890 - DNA, 21 bp, Artificial sequence
  SiRNA target sequence
tgttttcctgtcctattacta

SEQ ID NO: 110891 - DNA, 21 bp, Artificial sequence
  SiRNA target sequence
gttttcctgtcctattactaa

SEQ ID NO: 110892 - DNA, 21 bp, Artificial sequence
  SiRNA target sequence
ttttcctgtcctattactaaa

SEQ ID NO: 110893 - DNA, 21 bp, Artificial sequence
  SiRNA target sequence
tttcctgtcctattactaaat

SEQ ID NO: 110894 - DNA, 21 bp, Artificial sequence
  SiRNA target sequence
ttcctgtcctattactaaatg

SEQ ID NO: 110895 - DNA, 21 bp, Artificial sequence
  SiRNA target sequence
tcctgtcctattactaaatga

SEQ ID NO: 110896 - DNA, 21 bp, Artificial sequence
  SiRNA target sequence
cctgtcctattactaaatgac

SEQ ID NO: 110897 - DNA, 21 bp, Artificial sequence
  SiRNA target sequence
ctgtcctattactaaatgaca

SEQ ID NO: 110898 - DNA, 21 bp, Artificial sequence
  SiRNA target sequence
tgtcctattactaaatgacag

SEQ ID NO: 110899 - DNA, 21 bp, Artificial sequence
  SiRNA target sequence
gtcctattactaaatgacaga

SEQ ID NO: 110900 - DNA, 21 bp, Artificial sequence
  SiRNA target sequence
tcctattactaaatgacagaa

SEQ ID NO: 110901 - DNA, 21 bp, Artificial sequence
  SiRNA target sequence
cctattactaaatgacagaag

SEQ ID NO: 110902 - DNA, 21 bp, Artificial sequence
  SiRNA target sequence
ctattactaaatgacagaagc

SEQ ID NO: 110903 - DNA, 21 bp, Artificial sequence
  SiRNA target sequence
tattactaaatgacagaagcc

SEQ ID NO: 110904 - DNA, 21 bp, Artificial sequence
  SiRNA target sequence
attactaaatgacagaagcct

SEQ ID NO: 110905 - DNA, 21 bp, Artificial sequence
  SiRNA target sequence
ttactaaatgacagaagcctc

SEQ ID NO: 110906 - DNA, 21 bp, Artificial sequence
  SiRNA target sequence
tactaaatgacagaagcctct

SEQ ID NO: 110907 - DNA, 21 bp, Artificial sequence
  SiRNA target sequence
actaaatgacagaagcctctt

SEQ ID NO: 110908 - DNA, 21 bp, Artificial sequence
  SiRNA target sequence
ctaaatgacagaagcctctta

SEQ ID NO: 110909 - DNA, 21 bp, Artificial sequence
  SiRNA target sequence
taaatgacagaagcctcttat

SEQ ID NO: 110910 - DNA, 21 bp, Artificial sequence
  SiRNA target sequence
aaatgacagaagcctcttata

SEQ ID NO: 110911 - DNA, 21 bp, Artificial sequence
  SiRNA target sequence
aatgacagaagcctcttatat

SEQ ID NO: 110912 - DNA, 21 bp, Artificial sequence
  SiRNA target sequence
atgacagaagcctcttatatt

SEQ ID NO: 110913 - DNA, 21 bp, Artificial sequence
  SiRNA target sequence
tgacagaagcctcttatattt

SEQ ID NO: 110914 - DNA, 21 bp, Artificial sequence
  SiRNA target sequence
gacagaagcctcttatatttc

SEQ ID NO: 110915 - DNA, 21 bp, Artificial sequence
  SiRNA target sequence
acagaagcctcttatatttcc

SEQ ID NO: 110916 - DNA, 21 bp, Artificial sequence
  SiRNA target sequence
cagaagcctcttatatttcct

SEQ ID NO: 110917 - DNA, 21 bp, Artificial sequence
  SiRNA target sequence
agaagcctcttatatttcctt

SEQ ID NO: 110918 - DNA, 21 bp, Artificial sequence
  SiRNA target sequence
gaagcctcttatatttccttt

SEQ ID NO: 110919 - DNA, 21 bp, Artificial sequence
  SiRNA target sequence
aagcctcttatatttcctttt

SEQ ID NO: 110920 - DNA, 21 bp, Artificial sequence
  SiRNA target sequence
agcctcttatatttccttttt

SEQ ID NO: 110921 - DNA, 21 bp, Artificial sequence
  SiRNA target sequence
gcctcttatatttcctttttt

SEQ ID NO: 110922 - DNA, 21 bp, Artificial sequence
  SiRNA target sequence
cctcttatatttcctttttta

SEQ ID NO: 110923 - DNA, 21 bp, Artificial sequence
  SiRNA target sequence
ctcttatatttccttttttat

SEQ ID NO: 110924 - DNA, 21 bp, Artificial sequence
  SiRNA target sequence
tcttatatttccttttttata

SEQ ID NO: 110925 - DNA, 21 bp, Artificial sequence
  SiRNA target sequence
cttatatttccttttttatac

SEQ ID NO: 110926 - DNA, 21 bp, Artificial sequence
  SiRNA target sequence
ttatatttccttttttatact

SEQ ID NO: 110927 - DNA, 21 bp, Artificial sequence
  SiRNA target sequence
tatatttccttttttatactt

SEQ ID NO: 110928 - DNA, 21 bp, Artificial sequence
  SiRNA target sequence
atatttccttttttatactta

SEQ ID NO: 110929 - DNA, 21 bp, Artificial sequence
  SiRNA target sequence
tatttccttttttatacttag

SEQ ID NO: 110930 - DNA, 21 bp, Artificial sequence
  SiRNA target sequence
atttccttttttatacttaga

SEQ ID NO: 110931 - DNA, 21 bp, Artificial sequence
  SiRNA target sequence
tttccttttttatacttagag

SEQ ID NO: 110932 - DNA, 21 bp, Artificial sequence
  SiRNA target sequence
ttccttttttatacttagagt

SEQ ID NO: 110933 - DNA, 21 bp, Artificial sequence
  SiRNA target sequence
tccttttttatacttagagtt

SEQ ID NO: 110934 - DNA, 21 bp, Artificial sequence
  SiRNA target sequence
ccttttttatacttagagtta

SEQ ID NO: 110935 - DNA, 21 bp, Artificial sequence
  SiRNA target sequence
cttttttatacttagagttag

SEQ ID NO: 110936 - DNA, 21 bp, Artificial sequence
  SiRNA target sequence
ttttttatacttagagttagc

SEQ ID NO: 110937 - DNA, 21 bp, Artificial sequence
  SiRNA target sequence
tttttatacttagagttagca

SEQ ID NO: 110938 - DNA, 21 bp, Artificial sequence
  SiRNA target sequence
ttttatacttagagttagcat

SEQ ID NO: 110939 - DNA, 21 bp, Artificial sequence
  SiRNA target sequence
tttatacttagagttagcata

SEQ ID NO: 110940 - DNA, 21 bp, Artificial sequence
  SiRNA target sequence
ttatacttagagttagcatat

SEQ ID NO: 110941 - DNA, 21 bp, Artificial sequence
  SiRNA target sequence
tatacttagagttagcatatt

SEQ ID NO: 110942 - DNA, 21 bp, Artificial sequence
  SiRNA target sequence
atacttagagttagcatattc

SEQ ID NO: 110943 - DNA, 21 bp, Artificial sequence
  SiRNA target sequence
tacttagagttagcatattct

SEQ ID NO: 110944 - DNA, 21 bp, Artificial sequence
  SiRNA target sequence
acttagagttagcatattctt

SEQ ID NO: 110945 - DNA, 21 bp, Artificial sequence
  SiRNA target sequence
cttagagttagcatattcttc

SEQ ID NO: 110946 - DNA, 21 bp, Artificial sequence
  SiRNA target sequence
ttagagttagcatattcttcg

SEQ ID NO: 110947 - DNA, 21 bp, Artificial sequence
  SiRNA target sequence
tagagttagcatattcttcga

SEQ ID NO: 110948 - DNA, 21 bp, Artificial sequence
  SiRNA target sequence
agagttagcatattcttcgat

SEQ ID NO: 110949 - DNA, 21 bp, Artificial sequence
  SiRNA target sequence
gagttagcatattcttcgata

SEQ ID NO: 110950 - DNA, 21 bp, Artificial sequence
  SiRNA target sequence
agttagcatattcttcgataa

SEQ ID NO: 110951 - DNA, 21 bp, Artificial sequence
  SiRNA target sequence
gttagcatattcttcgataag

SEQ ID NO: 110952 - DNA, 21 bp, Artificial sequence
  SiRNA target sequence
ttagcatattcttcgataaga

SEQ ID NO: 110953 - DNA, 21 bp, Artificial sequence
  SiRNA target sequence
tagcatattcttcgataagac

SEQ ID NO: 110954 - DNA, 21 bp, Artificial sequence
  SiRNA target sequence
agcatattcttcgataagacg

SEQ ID NO: 110955 - DNA, 21 bp, Artificial sequence
  SiRNA target sequence
gcatattcttcgataagacgt

SEQ ID NO: 110956 - DNA, 21 bp, Artificial sequence
  SiRNA target sequence
catattcttcgataagacgta

SEQ ID NO: 110957 - DNA, 21 bp, Artificial sequence
  SiRNA target sequence
atattcttcgataagacgtag

SEQ ID NO: 110958 - DNA, 21 bp, Artificial sequence
  SiRNA target sequence
tattcttcgataagacgtaga

SEQ ID NO: 110959 - DNA, 21 bp, Artificial sequence
  SiRNA target sequence
attcttcgataagacgtagaa

SEQ ID NO: 110960 - DNA, 21 bp, Artificial sequence
  SiRNA target sequence
ttcttcgataagacgtagaat

SEQ ID NO: 110961 - DNA, 21 bp, Artificial sequence
  SiRNA target sequence
tcttcgataagacgtagaatt

SEQ ID NO: 110962 - DNA, 21 bp, Artificial sequence
  SiRNA target sequence
cttcgataagacgtagaatta

SEQ ID NO: 110963 - DNA, 21 bp, Artificial sequence
  SiRNA target sequence
ttcgataagacgtagaattaa

SEQ ID NO: 110964 - DNA, 21 bp, Artificial sequence
  SiRNA target sequence
tcgataagacgtagaattaac

SEQ ID NO: 110965 - DNA, 21 bp, Artificial sequence
  SiRNA target sequence
cgataagacgtagaattaaca

SEQ ID NO: 110966 - DNA, 21 bp, Artificial sequence
  SiRNA target sequence
gataagacgtagaattaacat

SEQ ID NO: 110967 - DNA, 21 bp, Artificial sequence
  SiRNA target sequence
ataagacgtagaattaacata

SEQ ID NO: 110968 - DNA, 21 bp, Artificial sequence
  SiRNA target sequence
taagacgtagaattaacatat

SEQ ID NO: 110969 - DNA, 21 bp, Artificial sequence
  SiRNA target sequence
aagacgtagaattaacatatt

SEQ ID NO: 110970 - DNA, 21 bp, Artificial sequence
  SiRNA target sequence
agacgtagaattaacatattt

SEQ ID NO: 110971 - DNA, 21 bp, Artificial sequence
  SiRNA target sequence
gacgtagaattaacatatttc

SEQ ID NO: 110972 - DNA, 21 bp, Artificial sequence
  SiRNA target sequence
acgtagaattaacatatttct

SEQ ID NO: 110973 - DNA, 21 bp, Artificial sequence
  SiRNA target sequence
cgtagaattaacatatttcta

SEQ ID NO: 110974 - DNA, 21 bp, Artificial sequence
  SiRNA target sequence
gtagaattaacatatttctat

SEQ ID NO: 110975 - DNA, 21 bp, Artificial sequence
  SiRNA target sequence
tagaattaacatatttctata

SEQ ID NO: 110976 - DNA, 21 bp, Artificial sequence
  SiRNA target sequence
agaattaacatatttctataa

SEQ ID NO: 110977 - DNA, 21 bp, Artificial sequence
  SiRNA target sequence
gaattaacatatttctataaa

SEQ ID NO: 110978 - DNA, 21 bp, Artificial sequence
  SiRNA target sequence
aattaacatatttctataaac

SEQ ID NO: 110979 - DNA, 21 bp, Artificial sequence
  SiRNA target sequence
attaacatatttctataaaca

SEQ ID NO: 110980 - DNA, 21 bp, Artificial sequence
  SiRNA target sequence
ttaacatatttctataaacat

SEQ ID NO: 110981 - DNA, 21 bp, Artificial sequence
  SiRNA target sequence
taacatatttctataaacatc

SEQ ID NO: 110982 - DNA, 21 bp, Artificial sequence
  SiRNA target sequence
aacatatttctataaacatct

SEQ ID NO: 110983 - DNA, 21 bp, Artificial sequence
  SiRNA target sequence
acatatttctataaacatctt

SEQ ID NO: 110984 - DNA, 21 bp, Artificial sequence
  SiRNA target sequence
catatttctataaacatcttg

SEQ ID NO: 110985 - DNA, 21 bp, Artificial sequence
  SiRNA target sequence
atatttctataaacatcttgt

SEQ ID NO: 110986 - DNA, 21 bp, Artificial sequence
  SiRNA target sequence
tatttctataaacatcttgta

SEQ ID NO: 110987 - DNA, 21 bp, Artificial sequence
  SiRNA target sequence
atttctataaacatcttgtac

SEQ ID NO: 110988 - DNA, 21 bp, Artificial sequence
  SiRNA target sequence
tttctataaacatcttgtaca

SEQ ID NO: 110989 - DNA, 21 bp, Artificial sequence
  SiRNA target sequence
ttctataaacatcttgtacaa

SEQ ID NO: 110990 - DNA, 21 bp, Artificial sequence
  SiRNA target sequence
tctataaacatcttgtacaag

SEQ ID NO: 110991 - DNA, 21 bp, Artificial sequence
  SiRNA target sequence
ctataaacatcttgtacaagt

SEQ ID NO: 110992 - DNA, 21 bp, Artificial sequence
  SiRNA target sequence
tataaacatcttgtacaagtt

SEQ ID NO: 110993 - DNA, 21 bp, Artificial sequence
  SiRNA target sequence
ataaacatcttgtacaagttc

SEQ ID NO: 110994 - DNA, 21 bp, Artificial sequence
  SiRNA target sequence
taaacatcttgtacaagttct

SEQ ID NO: 110995 - DNA, 21 bp, Artificial sequence
  SiRNA target sequence
aaacatcttgtacaagttctt

SEQ ID NO: 110996 - DNA, 21 bp, Artificial sequence
  SiRNA target sequence
aacatcttgtacaagttcttt

SEQ ID NO: 110997 - DNA, 21 bp, Artificial sequence
  SiRNA target sequence
acatcttgtacaagttctttg

SEQ ID NO: 110998 - DNA, 21 bp, Artificial sequence
  SiRNA target sequence
catcttgtacaagttctttgt

SEQ ID NO: 110999 - DNA, 21 bp, Artificial sequence
  SiRNA target sequence
atcttgtacaagttctttgtt

SEQ ID NO: 111000 - DNA, 21 bp, Artificial sequence
  SiRNA target sequence
tcttgtacaagttctttgttt

SEQ ID NO: 111001 - DNA, 21 bp, Artificial sequence
  SiRNA target sequence
cttgtacaagttctttgttta

SEQ ID NO: 111002 - DNA, 21 bp, Artificial sequence
  SiRNA target sequence
ttgtacaagttctttgtttaa

SEQ ID NO: 111003 - DNA, 21 bp, Artificial sequence
  SiRNA target sequence
tgtacaagttctttgtttaaa

SEQ ID NO: 111004 - DNA, 21 bp, Artificial sequence
  SiRNA target sequence
gtacaagttctttgtttaaag

SEQ ID NO: 111005 - DNA, 21 bp, Artificial sequence
  SiRNA target sequence
tacaagttctttgtttaaagt

SEQ ID NO: 111006 - DNA, 21 bp, Artificial sequence
  SiRNA target sequence
acaagttctttgtttaaagta

SEQ ID NO: 111007 - DNA, 21 bp, Artificial sequence
  SiRNA target sequence
caagttctttgtttaaagtag

SEQ ID NO: 111008 - DNA, 21 bp, Artificial sequence
  SiRNA target sequence
aagttctttgtttaaagtagt

SEQ ID NO: 111009 - DNA, 21 bp, Artificial sequence
  SiRNA target sequence
agttctttgtttaaagtagtt

SEQ ID NO: 111010 - DNA, 21 bp, Artificial sequence
  SiRNA target sequence
gttctttgtttaaagtagttt

SEQ ID NO: 111011 - DNA, 21 bp, Artificial sequence
  SiRNA target sequence
ttctttgtttaaagtagtttt

SEQ ID NO: 111012 - DNA, 21 bp, Artificial sequence
  SiRNA target sequence
tctttgtttaaagtagttttc

SEQ ID NO: 111013 - DNA, 21 bp, Artificial sequence
  SiRNA target sequence
ctttgtttaaagtagttttca

SEQ ID NO: 111014 - DNA, 21 bp, Artificial sequence
  SiRNA target sequence
tttgtttaaagtagttttcag

SEQ ID NO: 111015 - DNA, 21 bp, Artificial sequence
  SiRNA target sequence
ttgtttaaagtagttttcagt

SEQ ID NO: 111016 - DNA, 21 bp, Artificial sequence
  SiRNA target sequence
tgtttaaagtagttttcagtt

SEQ ID NO: 111017 - DNA, 21 bp, Artificial sequence
  SiRNA target sequence
gtttaaagtagttttcagttt

SEQ ID NO: 111018 - DNA, 21 bp, Artificial sequence
  SiRNA target sequence
tttaaagtagttttcagttta

SEQ ID NO: 111019 - DNA, 21 bp, Artificial sequence
  SiRNA target sequence
ttaaagtagttttcagtttaa

SEQ ID NO: 111020 - DNA, 21 bp, Artificial sequence
  SiRNA target sequence
taaagtagttttcagtttaac

SEQ ID NO: 111021 - DNA, 21 bp, Artificial sequence
  SiRNA target sequence
aaagtagttttcagtttaact

SEQ ID NO: 111022 - DNA, 21 bp, Artificial sequence
  SiRNA target sequence
aagtagttttcagtttaactg

SEQ ID NO: 111023 - DNA, 21 bp, Artificial sequence
  SiRNA target sequence
agtagttttcagtttaactgt

SEQ ID NO: 111024 - DNA, 21 bp, Artificial sequence
  SiRNA target sequence
gtagttttcagtttaactgta

SEQ ID NO: 111025 - DNA, 21 bp, Artificial sequence
  SiRNA target sequence
tagttttcagtttaactgtat

SEQ ID NO: 111026 - DNA, 21 bp, Artificial sequence
  SiRNA target sequence
agttttcagtttaactgtatt

SEQ ID NO: 111027 - DNA, 21 bp, Artificial sequence
  SiRNA target sequence
gttttcagtttaactgtattt

SEQ ID NO: 111028 - DNA, 21 bp, Artificial sequence
  SiRNA target sequence
ttttcagtttaactgtatttt

SEQ ID NO: 111029 - DNA, 21 bp, Artificial sequence
  SiRNA target sequence
tttcagtttaactgtattttt

SEQ ID NO: 111030 - DNA, 21 bp, Artificial sequence
  SiRNA target sequence
ttcagtttaactgtattttta

SEQ ID NO: 111031 - DNA, 21 bp, Artificial sequence
  SiRNA target sequence
tcagtttaactgtatttttat

SEQ ID NO: 111032 - DNA, 21 bp, Artificial sequence
  SiRNA target sequence
cagtttaactgtatttttatc

SEQ ID NO: 111033 - DNA, 21 bp, Artificial sequence
  SiRNA target sequence
agtttaactgtatttttatct

SEQ ID NO: 111034 - DNA, 21 bp, Artificial sequence
  SiRNA target sequence
gtttaactgtatttttatcta

SEQ ID NO: 111035 - DNA, 21 bp, Artificial sequence
  SiRNA target sequence
tttaactgtatttttatctac

SEQ ID NO: 111036 - DNA, 21 bp, Artificial sequence
  SiRNA target sequence
ttaactgtatttttatctacc

SEQ ID NO: 111037 - DNA, 21 bp, Artificial sequence
  SiRNA target sequence
taactgtatttttatctacca

SEQ ID NO: 111038 - DNA, 21 bp, Artificial sequence
  SiRNA target sequence
aactgtatttttatctaccaa

SEQ ID NO: 111039 - DNA, 21 bp, Artificial sequence
  SiRNA target sequence
actgtatttttatctaccaaa

SEQ ID NO: 111040 - DNA, 21 bp, Artificial sequence
  SiRNA target sequence
ctgtatttttatctaccaaat

SEQ ID NO: 111041 - DNA, 21 bp, Artificial sequence
  SiRNA target sequence
tgtatttttatctaccaaata

SEQ ID NO: 111042 - DNA, 21 bp, Artificial sequence
  SiRNA target sequence
gtatttttatctaccaaataa

SEQ ID NO: 111043 - DNA, 21 bp, Artificial sequence
  SiRNA target sequence
tatttttatctaccaaataat

SEQ ID NO: 111044 - DNA, 21 bp, Artificial sequence
  SiRNA target sequence
atttttatctaccaaataata

SEQ ID NO: 111045 - DNA, 21 bp, Artificial sequence
  SiRNA target sequence
tttttatctaccaaataataa

SEQ ID NO: 111046 - DNA, 21 bp, Artificial sequence
  SiRNA target sequence
ttttatctaccaaataataat

SEQ ID NO: 111047 - DNA, 21 bp, Artificial sequence
  SiRNA target sequence
tttatctaccaaataataatc

SEQ ID NO: 111048 - DNA, 21 bp, Artificial sequence
  SiRNA target sequence
ttatctaccaaataataatct

SEQ ID NO: 111049 - DNA, 21 bp, Artificial sequence
  SiRNA target sequence
tatctaccaaataataatcta

SEQ ID NO: 111050 - DNA, 21 bp, Artificial sequence
  SiRNA target sequence
atctaccaaataataatctat

SEQ ID NO: 111051 - DNA, 21 bp, Artificial sequence
  SiRNA target sequence
tctaccaaataataatctatc

SEQ ID NO: 111052 - DNA, 21 bp, Artificial sequence
  SiRNA target sequence
ctaccaaataataatctatca

SEQ ID NO: 111053 - DNA, 21 bp, Artificial sequence
  SiRNA target sequence
taccaaataataatctatcat

SEQ ID NO: 111054 - DNA, 22 bp, Artificial sequence
  SiRNA target sequence
ttattcagaataaacatctttt

SEQ ID NO: 111055 - DNA, 22 bp, Artificial sequence
  SiRNA target sequence
tattcagaataaacatctttta

SEQ ID NO: 111056 - DNA, 22 bp, Artificial sequence
  SiRNA target sequence
attcagaataaacatcttttaa

SEQ ID NO: 111057 - DNA, 22 bp, Artificial sequence
  SiRNA target sequence
ttcagaataaacatcttttaaa

SEQ ID NO: 111058 - DNA, 22 bp, Artificial sequence
  SiRNA target sequence
tcagaataaacatcttttaaaa

SEQ ID NO: 111059 - DNA, 22 bp, Artificial sequence
  SiRNA target sequence
cagaataaacatcttttaaaag

SEQ ID NO: 111060 - DNA, 22 bp, Artificial sequence
  SiRNA target sequence
agaataaacatcttttaaaagt

SEQ ID NO: 111061 - DNA, 22 bp, Artificial sequence
  SiRNA target sequence
gaataaacatcttttaaaagtt

SEQ ID NO: 111062 - DNA, 22 bp, Artificial sequence
  SiRNA target sequence
aataaacatcttttaaaagttc

SEQ ID NO: 111063 - DNA, 22 bp, Artificial sequence
  SiRNA target sequence
ataaacatcttttaaaagttca

SEQ ID NO: 111064 - DNA, 22 bp, Artificial sequence
  SiRNA target sequence
taaacatcttttaaaagttcat

SEQ ID NO: 111065 - DNA, 22 bp, Artificial sequence
  SiRNA target sequence
aaacatcttttaaaagttcatc

SEQ ID NO: 111066 - DNA, 22 bp, Artificial sequence
  SiRNA target sequence
aacatcttttaaaagttcatcg

SEQ ID NO: 111067 - DNA, 22 bp, Artificial sequence
  SiRNA target sequence
acatcttttaaaagttcatcga

SEQ ID NO: 111068 - DNA, 22 bp, Artificial sequence
  SiRNA target sequence
catcttttaaaagttcatcgat

SEQ ID NO: 111069 - DNA, 22 bp, Artificial sequence
  SiRNA target sequence
atcttttaaaagttcatcgata

SEQ ID NO: 111070 - DNA, 22 bp, Artificial sequence
  SiRNA target sequence
tcttttaaaagttcatcgatat

SEQ ID NO: 111071 - DNA, 22 bp, Artificial sequence
  SiRNA target sequence
cttttaaaagttcatcgatatc

SEQ ID NO: 111072 - DNA, 22 bp, Artificial sequence
  SiRNA target sequence
ttttaaaagttcatcgatatcg

SEQ ID NO: 111073 - DNA, 22 bp, Artificial sequence
  SiRNA target sequence
tttaaaagttcatcgatatcgg

SEQ ID NO: 111074 - DNA, 22 bp, Artificial sequence
  SiRNA target sequence
ttaaaagttcatcgatatcggg

SEQ ID NO: 111075 - DNA, 22 bp, Artificial sequence
  SiRNA target sequence
taaaagttcatcgatatcgggt

SEQ ID NO: 111076 - DNA, 22 bp, Artificial sequence
  SiRNA target sequence
aaaagttcatcgatatcgggtt

SEQ ID NO: 111077 - DNA, 22 bp, Artificial sequence
  SiRNA target sequence
aaagttcatcgatatcgggttc

SEQ ID NO: 111078 - DNA, 22 bp, Artificial sequence
  SiRNA target sequence
aagttcatcgatatcgggttct

SEQ ID NO: 111079 - DNA, 22 bp, Artificial sequence
  SiRNA target sequence
agttcatcgatatcgggttctt

SEQ ID NO: 111080 - DNA, 22 bp, Artificial sequence
  SiRNA target sequence
gttcatcgatatcgggttcttt

SEQ ID NO: 111081 - DNA, 22 bp, Artificial sequence
  SiRNA target sequence
ttcatcgatatcgggttcttta

SEQ ID NO: 111082 - DNA, 22 bp, Artificial sequence
  SiRNA target sequence
tcatcgatatcgggttctttag

SEQ ID NO: 111083 - DNA, 22 bp, Artificial sequence
  SiRNA target sequence
catcgatatcgggttctttaga

SEQ ID NO: 111084 - DNA, 22 bp, Artificial sequence
  SiRNA target sequence
atcgatatcgggttctttagaa

SEQ ID NO: 111085 - DNA, 22 bp, Artificial sequence
  SiRNA target sequence
tcgatatcgggttctttagaaa

SEQ ID NO: 111086 - DNA, 22 bp, Artificial sequence
  SiRNA target sequence
cgatatcgggttctttagaaaa

SEQ ID NO: 111087 - DNA, 22 bp, Artificial sequence
  SiRNA target sequence
gatatcgggttctttagaaaaa

SEQ ID NO: 111088 - DNA, 22 bp, Artificial sequence
  SiRNA target sequence
atatcgggttctttagaaaaaa

SEQ ID NO: 111089 - DNA, 22 bp, Artificial sequence
  SiRNA target sequence
tatcgggttctttagaaaaaat

SEQ ID NO: 111090 - DNA, 22 bp, Artificial sequence
  SiRNA target sequence
atcgggttctttagaaaaaata

SEQ ID NO: 111091 - DNA, 22 bp, Artificial sequence
  SiRNA target sequence
tcgggttctttagaaaaaataa

SEQ ID NO: 111092 - DNA, 22 bp, Artificial sequence
  SiRNA target sequence
cgggttctttagaaaaaataac

SEQ ID NO: 111093 - DNA, 22 bp, Artificial sequence
  SiRNA target sequence
gggttctttagaaaaaataact

SEQ ID NO: 111094 - DNA, 22 bp, Artificial sequence
  SiRNA target sequence
ggttctttagaaaaaataactt

SEQ ID NO: 111095 - DNA, 22 bp, Artificial sequence
  SiRNA target sequence
gttctttagaaaaaataacttt

SEQ ID NO: 111096 - DNA, 22 bp, Artificial sequence
  SiRNA target sequence
ttctttagaaaaaataactttt

SEQ ID NO: 111097 - DNA, 22 bp, Artificial sequence
  SiRNA target sequence
tctttagaaaaaataacttttt

SEQ ID NO: 111098 - DNA, 22 bp, Artificial sequence
  SiRNA target sequence
ctttagaaaaaataactttttt

SEQ ID NO: 111099 - DNA, 22 bp, Artificial sequence
  SiRNA target sequence
tttagaaaaaataactttttta

SEQ ID NO: 111100 - DNA, 22 bp, Artificial sequence
  SiRNA target sequence
ttagaaaaaataacttttttaa

SEQ ID NO: 111101 - DNA, 22 bp, Artificial sequence
  SiRNA target sequence
tagaaaaaataacttttttaac

SEQ ID NO: 111102 - DNA, 22 bp, Artificial sequence
  SiRNA target sequence
agaaaaaataacttttttaaca

SEQ ID NO: 111103 - DNA, 22 bp, Artificial sequence
  SiRNA target sequence
gaaaaaataacttttttaacac

SEQ ID NO: 111104 - DNA, 22 bp, Artificial sequence
  SiRNA target sequence
aaaaaataacttttttaacacc

SEQ ID NO: 111105 - DNA, 22 bp, Artificial sequence
  SiRNA target sequence
aaaaataacttttttaacacct

SEQ ID NO: 111106 - DNA, 22 bp, Artificial sequence
  SiRNA target sequence
aaaataacttttttaacacctt

SEQ ID NO: 111107 - DNA, 22 bp, Artificial sequence
  SiRNA target sequence
aaataacttttttaacaccttc

SEQ ID NO: 111108 - DNA, 22 bp, Artificial sequence
  SiRNA target sequence
aataacttttttaacaccttct

SEQ ID NO: 111109 - DNA, 22 bp, Artificial sequence
  SiRNA target sequence
ataacttttttaacaccttctt

SEQ ID NO: 111110 - DNA, 22 bp, Artificial sequence
  SiRNA target sequence
taacttttttaacaccttcttc

SEQ ID NO: 111111 - DNA, 22 bp, Artificial sequence
  SiRNA target sequence
aacttttttaacaccttcttca

SEQ ID NO: 111112 - DNA, 22 bp, Artificial sequence
  SiRNA target sequence
acttttttaacaccttcttcaa

SEQ ID NO: 111113 - DNA, 22 bp, Artificial sequence
  SiRNA target sequence
cttttttaacaccttcttcaaa

SEQ ID NO: 111114 - DNA, 22 bp, Artificial sequence
  SiRNA target sequence
ttttttaacaccttcttcaaag

SEQ ID NO: 111115 - DNA, 22 bp, Artificial sequence
  SiRNA target sequence
tttttaacaccttcttcaaagc

SEQ ID NO: 111116 - DNA, 22 bp, Artificial sequence
  SiRNA target sequence
ttttaacaccttcttcaaagca

SEQ ID NO: 111117 - DNA, 22 bp, Artificial sequence
  SiRNA target sequence
tttaacaccttcttcaaagcag

SEQ ID NO: 111118 - DNA, 22 bp, Artificial sequence
  SiRNA target sequence
ttaacaccttcttcaaagcagg

SEQ ID NO: 111119 - DNA, 22 bp, Artificial sequence
  SiRNA target sequence
taacaccttcttcaaagcagga

SEQ ID NO: 111120 - DNA, 22 bp, Artificial sequence
  SiRNA target sequence
aacaccttcttcaaagcaggaa

SEQ ID NO: 111121 - DNA, 22 bp, Artificial sequence
  SiRNA target sequence
acaccttcttcaaagcaggaaa

SEQ ID NO: 111122 - DNA, 22 bp, Artificial sequence
  SiRNA target sequence
caccttcttcaaagcaggaaat

SEQ ID NO: 111123 - DNA, 22 bp, Artificial sequence
  SiRNA target sequence
accttcttcaaagcaggaaatt

SEQ ID NO: 111124 - DNA, 22 bp, Artificial sequence
  SiRNA target sequence
ccttcttcaaagcaggaaatta

SEQ ID NO: 111125 - DNA, 22 bp, Artificial sequence
  SiRNA target sequence
cttcttcaaagcaggaaattac

SEQ ID NO: 111126 - DNA, 22 bp, Artificial sequence
  SiRNA target sequence
ttcttcaaagcaggaaattacc

SEQ ID NO: 111127 - DNA, 22 bp, Artificial sequence
  SiRNA target sequence
tcttcaaagcaggaaattacct

SEQ ID NO: 111128 - DNA, 22 bp, Artificial sequence
  SiRNA target sequence
cttcaaagcaggaaattacctc

SEQ ID NO: 111129 - DNA, 22 bp, Artificial sequence
  SiRNA target sequence
ttcaaagcaggaaattacctca

SEQ ID NO: 111130 - DNA, 22 bp, Artificial sequence
  SiRNA target sequence
tcaaagcaggaaattacctcat

SEQ ID NO: 111131 - DNA, 22 bp, Artificial sequence
  SiRNA target sequence
caaagcaggaaattacctcatc

SEQ ID NO: 111132 - DNA, 22 bp, Artificial sequence
  SiRNA target sequence
aaagcaggaaattacctcatct

SEQ ID NO: 111133 - DNA, 22 bp, Artificial sequence
  SiRNA target sequence
aagcaggaaattacctcatctt

SEQ ID NO: 111134 - DNA, 22 bp, Artificial sequence
  SiRNA target sequence
agcaggaaattacctcatcttc

SEQ ID NO: 111135 - DNA, 22 bp, Artificial sequence
  SiRNA target sequence
gcaggaaattacctcatcttcg

SEQ ID NO: 111136 - DNA, 22 bp, Artificial sequence
  SiRNA target sequence
caggaaattacctcatcttcga

SEQ ID NO: 111137 - DNA, 22 bp, Artificial sequence
  SiRNA target sequence
aggaaattacctcatcttcgat

SEQ ID NO: 111138 - DNA, 22 bp, Artificial sequence
  SiRNA target sequence
ggaaattacctcatcttcgata

SEQ ID NO: 111139 - DNA, 22 bp, Artificial sequence
  SiRNA target sequence
gaaattacctcatcttcgataa

SEQ ID NO: 111140 - DNA, 22 bp, Artificial sequence
  SiRNA target sequence
aaattacctcatcttcgataat

SEQ ID NO: 111141 - DNA, 22 bp, Artificial sequence
  SiRNA target sequence
aattacctcatcttcgataatt

SEQ ID NO: 111142 - DNA, 22 bp, Artificial sequence
  SiRNA target sequence
attacctcatcttcgataattt

SEQ ID NO: 111143 - DNA, 22 bp, Artificial sequence
  SiRNA target sequence
ttacctcatcttcgataatttt

SEQ ID NO: 111144 - DNA, 22 bp, Artificial sequence
  SiRNA target sequence
tacctcatcttcgataattttt

SEQ ID NO: 111145 - DNA, 22 bp, Artificial sequence
  SiRNA target sequence
acctcatcttcgataattttta

SEQ ID NO: 111146 - DNA, 22 bp, Artificial sequence
  SiRNA target sequence
cctcatcttcgataatttttac

SEQ ID NO: 111147 - DNA, 22 bp, Artificial sequence
  SiRNA target sequence
ctcatcttcgataatttttact

SEQ ID NO: 111148 - DNA, 22 bp, Artificial sequence
  SiRNA target sequence
tcatcttcgataatttttactt

SEQ ID NO: 111149 - DNA, 22 bp, Artificial sequence
  SiRNA target sequence
catcttcgataatttttacttc

SEQ ID NO: 111150 - DNA, 22 bp, Artificial sequence
  SiRNA target sequence
atcttcgataatttttacttct

SEQ ID NO: 111151 - DNA, 22 bp, Artificial sequence
  SiRNA target sequence
tcttcgataatttttacttctt

SEQ ID NO: 111152 - DNA, 22 bp, Artificial sequence
  SiRNA target sequence
cttcgataatttttacttcttc

SEQ ID NO: 111153 - DNA, 22 bp, Artificial sequence
  SiRNA target sequence
ttcgataatttttacttcttca

SEQ ID NO: 111154 - DNA, 22 bp, Artificial sequence
  SiRNA target sequence
tcgataatttttacttcttcac

SEQ ID NO: 111155 - DNA, 22 bp, Artificial sequence
  SiRNA target sequence
cgataatttttacttcttcaca

SEQ ID NO: 111156 - DNA, 22 bp, Artificial sequence
  SiRNA target sequence
gataatttttacttcttcacaa

SEQ ID NO: 111157 - DNA, 22 bp, Artificial sequence
  SiRNA target sequence
ataatttttacttcttcacaag

SEQ ID NO: 111158 - DNA, 22 bp, Artificial sequence
  SiRNA target sequence
taatttttacttcttcacaagt

SEQ ID NO: 111159 - DNA, 22 bp, Artificial sequence
  SiRNA target sequence
aatttttacttcttcacaagtc

SEQ ID NO: 111160 - DNA, 22 bp, Artificial sequence
  SiRNA target sequence
atttttacttcttcacaagtcg

SEQ ID NO: 111161 - DNA, 22 bp, Artificial sequence
  SiRNA target sequence
tttttacttcttcacaagtcgc

SEQ ID NO: 111162 - DNA, 22 bp, Artificial sequence
  SiRNA target sequence
ttttacttcttcacaagtcgca

SEQ ID NO: 111163 - DNA, 22 bp, Artificial sequence
  SiRNA target sequence
tttacttcttcacaagtcgcaa

SEQ ID NO: 111164 - DNA, 22 bp, Artificial sequence
  SiRNA target sequence
ttacttcttcacaagtcgcaaa

SEQ ID NO: 111165 - DNA, 22 bp, Artificial sequence
  SiRNA target sequence
tacttcttcacaagtcgcaaat

SEQ ID NO: 111166 - DNA, 22 bp, Artificial sequence
  SiRNA target sequence
acttcttcacaagtcgcaaatt

SEQ ID NO: 111167 - DNA, 22 bp, Artificial sequence
  SiRNA target sequence
cttcttcacaagtcgcaaattt

SEQ ID NO: 111168 - DNA, 22 bp, Artificial sequence
  SiRNA target sequence
ttcttcacaagtcgcaaatttt

SEQ ID NO: 111169 - DNA, 22 bp, Artificial sequence
  SiRNA target sequence
tcttcacaagtcgcaaattttt

SEQ ID NO: 111170 - DNA, 22 bp, Artificial sequence
  SiRNA target sequence
cttcacaagtcgcaaatttttg

SEQ ID NO: 111171 - DNA, 22 bp, Artificial sequence
  SiRNA target sequence
ttcacaagtcgcaaatttttgt

SEQ ID NO: 111172 - DNA, 22 bp, Artificial sequence
  SiRNA target sequence
tcacaagtcgcaaatttttgta

SEQ ID NO: 111173 - DNA, 22 bp, Artificial sequence
  SiRNA target sequence
cacaagtcgcaaatttttgtaa

SEQ ID NO: 111174 - DNA, 22 bp, Artificial sequence
  SiRNA target sequence
acaagtcgcaaatttttgtaag

SEQ ID NO: 111175 - DNA, 22 bp, Artificial sequence
  SiRNA target sequence
caagtcgcaaatttttgtaagt

SEQ ID NO: 111176 - DNA, 22 bp, Artificial sequence
  SiRNA target sequence
aagtcgcaaatttttgtaagtt

SEQ ID NO: 111177 - DNA, 22 bp, Artificial sequence
  SiRNA target sequence
agtcgcaaatttttgtaagtta

SEQ ID NO: 111178 - DNA, 22 bp, Artificial sequence
  SiRNA target sequence
gtcgcaaatttttgtaagttat

SEQ ID NO: 111179 - DNA, 22 bp, Artificial sequence
  SiRNA target sequence
tcgcaaatttttgtaagttatt

SEQ ID NO: 111180 - DNA, 22 bp, Artificial sequence
  SiRNA target sequence
cgcaaatttttgtaagttattt

SEQ ID NO: 111181 - DNA, 22 bp, Artificial sequence
  SiRNA target sequence
gcaaatttttgtaagttatttt

SEQ ID NO: 111182 - DNA, 22 bp, Artificial sequence
  SiRNA target sequence
caaatttttgtaagttattttt

SEQ ID NO: 111183 - DNA, 22 bp, Artificial sequence
  SiRNA target sequence
aaatttttgtaagttatttttt

SEQ ID NO: 111184 - DNA, 22 bp, Artificial sequence
  SiRNA target sequence
aatttttgtaagttattttttg

SEQ ID NO: 111185 - DNA, 22 bp, Artificial sequence
  SiRNA target sequence
atttttgtaagttattttttgc

SEQ ID NO: 111186 - DNA, 22 bp, Artificial sequence
  SiRNA target sequence
tttttgtaagttattttttgct

SEQ ID NO: 111187 - DNA, 22 bp, Artificial sequence
  SiRNA target sequence
ttttgtaagttattttttgctt

SEQ ID NO: 111188 - DNA, 22 bp, Artificial sequence
  SiRNA target sequence
tttgtaagttattttttgcttc

SEQ ID NO: 111189 - DNA, 22 bp, Artificial sequence
  SiRNA target sequence
ttgtaagttattttttgcttct

SEQ ID NO: 111190 - DNA, 22 bp, Artificial sequence
  SiRNA target sequence
tgtaagttattttttgcttctt

SEQ ID NO: 111191 - DNA, 22 bp, Artificial sequence
  SiRNA target sequence
gtaagttattttttgcttcttt

SEQ ID NO: 111192 - DNA, 22 bp, Artificial sequence
  SiRNA target sequence
taagttattttttgcttcttta

SEQ ID NO: 111193 - DNA, 22 bp, Artificial sequence
  SiRNA target sequence
aagttattttttgcttctttaa

SEQ ID NO: 111194 - DNA, 22 bp, Artificial sequence
  SiRNA target sequence
agttattttttgcttctttaag

SEQ ID NO: 111195 - DNA, 22 bp, Artificial sequence
  SiRNA target sequence
gttattttttgcttctttaagg

SEQ ID NO: 111196 - DNA, 22 bp, Artificial sequence
  SiRNA target sequence
ttattttttgcttctttaaggc

SEQ ID NO: 111197 - DNA, 22 bp, Artificial sequence
  SiRNA target sequence
tattttttgcttctttaaggca

SEQ ID NO: 111198 - DNA, 22 bp, Artificial sequence
  SiRNA target sequence
attttttgcttctttaaggcaa

SEQ ID NO: 111199 - DNA, 22 bp, Artificial sequence
  SiRNA target sequence
ttttttgcttctttaaggcaat

SEQ ID NO: 111200 - DNA, 22 bp, Artificial sequence
  SiRNA target sequence
tttttgcttctttaaggcaatc

SEQ ID NO: 111201 - DNA, 22 bp, Artificial sequence
  SiRNA target sequence
ttttgcttctttaaggcaatca

SEQ ID NO: 111202 - DNA, 22 bp, Artificial sequence
  SiRNA target sequence
tttgcttctttaaggcaatcat

SEQ ID NO: 111203 - DNA, 22 bp, Artificial sequence
  SiRNA target sequence
ttgcttctttaaggcaatcatt

SEQ ID NO: 111204 - DNA, 22 bp, Artificial sequence
  SiRNA target sequence
tgcttctttaaggcaatcatta

SEQ ID NO: 111205 - DNA, 22 bp, Artificial sequence
  SiRNA target sequence
gcttctttaaggcaatcattat

SEQ ID NO: 111206 - DNA, 22 bp, Artificial sequence
  SiRNA target sequence
cttctttaaggcaatcattatt

SEQ ID NO: 111207 - DNA, 22 bp, Artificial sequence
  SiRNA target sequence
ttctttaaggcaatcattattt

SEQ ID NO: 111208 - DNA, 22 bp, Artificial sequence
  SiRNA target sequence
tctttaaggcaatcattatttt

SEQ ID NO: 111209 - DNA, 22 bp, Artificial sequence
  SiRNA target sequence
ctttaaggcaatcattattttt

SEQ ID NO: 111210 - DNA, 22 bp, Artificial sequence
  SiRNA target sequence
tttaaggcaatcattatttttt

SEQ ID NO: 111211 - DNA, 22 bp, Artificial sequence
  SiRNA target sequence
ttaaggcaatcattattttttt

SEQ ID NO: 111212 - DNA, 22 bp, Artificial sequence
  SiRNA target sequence
taaggcaatcattatttttttt

SEQ ID NO: 111213 - DNA, 22 bp, Artificial sequence
  SiRNA target sequence
aaggcaatcattattttttttt

SEQ ID NO: 111214 - DNA, 22 bp, Artificial sequence
  SiRNA target sequence
aggcaatcattatttttttttt

SEQ ID NO: 111215 - DNA, 22 bp, Artificial sequence
  SiRNA target sequence
ggcaatcattattttttttttc

SEQ ID NO: 111216 - DNA, 22 bp, Artificial sequence
  SiRNA target sequence
gcaatcattattttttttttca

SEQ ID NO: 111217 - DNA, 22 bp, Artificial sequence
  SiRNA target sequence
caatcattattttttttttcat

SEQ ID NO: 111218 - DNA, 22 bp, Artificial sequence
  SiRNA target sequence
aatcattattttttttttcatt

SEQ ID NO: 111219 - DNA, 22 bp, Artificial sequence
  SiRNA target sequence
atcattattttttttttcatta

SEQ ID NO: 111220 - DNA, 22 bp, Artificial sequence
  SiRNA target sequence
tcattattttttttttcattaa

SEQ ID NO: 111221 - DNA, 22 bp, Artificial sequence
  SiRNA target sequence
cattattttttttttcattaat

SEQ ID NO: 111222 - DNA, 22 bp, Artificial sequence
  SiRNA target sequence
attattttttttttcattaatt

SEQ ID NO: 111223 - DNA, 22 bp, Artificial sequence
  SiRNA target sequence
ttattttttttttcattaattt

SEQ ID NO: 111224 - DNA, 22 bp, Artificial sequence
  SiRNA target sequence
tattttttttttcattaatttc

SEQ ID NO: 111225 - DNA, 22 bp, Artificial sequence
  SiRNA target sequence
attttttttttcattaatttcc

SEQ ID NO: 111226 - DNA, 22 bp, Artificial sequence
  SiRNA target sequence
ttttttttttcattaatttcct

SEQ ID NO: 111227 - DNA, 22 bp, Artificial sequence
  SiRNA target sequence
tttttttttcattaatttcctc

SEQ ID NO: 111228 - DNA, 22 bp, Artificial sequence
  SiRNA target sequence
ttttttttcattaatttcctcc

SEQ ID NO: 111229 - DNA, 22 bp, Artificial sequence
  SiRNA target sequence
tttttttcattaatttcctccg

SEQ ID NO: 111230 - DNA, 22 bp, Artificial sequence
  SiRNA target sequence
ttttttcattaatttcctccgt

SEQ ID NO: 111231 - DNA, 22 bp, Artificial sequence
  SiRNA target sequence
tttttcattaatttcctccgtg

SEQ ID NO: 111232 - DNA, 22 bp, Artificial sequence
  SiRNA target sequence
ttttcattaatttcctccgtgg

SEQ ID NO: 111233 - DNA, 22 bp, Artificial sequence
  SiRNA target sequence
tttcattaatttcctccgtgga

SEQ ID NO: 111234 - DNA, 22 bp, Artificial sequence
  SiRNA target sequence
ttcattaatttcctccgtggat

SEQ ID NO: 111235 - DNA, 22 bp, Artificial sequence
  SiRNA target sequence
tcattaatttcctccgtggatc

SEQ ID NO: 111236 - DNA, 22 bp, Artificial sequence
  SiRNA target sequence
cattaatttcctccgtggatct

SEQ ID NO: 111237 - DNA, 22 bp, Artificial sequence
  SiRNA target sequence
attaatttcctccgtggatctg

SEQ ID NO: 111238 - DNA, 22 bp, Artificial sequence
  SiRNA target sequence
ttaatttcctccgtggatctgt

SEQ ID NO: 111239 - DNA, 22 bp, Artificial sequence
  SiRNA target sequence
taatttcctccgtggatctgta

SEQ ID NO: 111240 - DNA, 22 bp, Artificial sequence
  SiRNA target sequence
aatttcctccgtggatctgtaa

SEQ ID NO: 111241 - DNA, 22 bp, Artificial sequence
  SiRNA target sequence
atttcctccgtggatctgtaaa

SEQ ID NO: 111242 - DNA, 22 bp, Artificial sequence
  SiRNA target sequence
tttcctccgtggatctgtaaaa

SEQ ID NO: 111243 - DNA, 22 bp, Artificial sequence
  SiRNA target sequence
ttcctccgtggatctgtaaaaa

SEQ ID NO: 111244 - DNA, 22 bp, Artificial sequence
  SiRNA target sequence
tcctccgtggatctgtaaaaat

SEQ ID NO: 111245 - DNA, 22 bp, Artificial sequence
  SiRNA target sequence
cctccgtggatctgtaaaaatc

SEQ ID NO: 111246 - DNA, 22 bp, Artificial sequence
  SiRNA target sequence
ctccgtggatctgtaaaaatcg

SEQ ID NO: 111247 - DNA, 22 bp, Artificial sequence
  SiRNA target sequence
tccgtggatctgtaaaaatcgt

SEQ ID NO: 111248 - DNA, 22 bp, Artificial sequence
  SiRNA target sequence
ccgtggatctgtaaaaatcgtt

SEQ ID NO: 111249 - DNA, 22 bp, Artificial sequence
  SiRNA target sequence
cgtggatctgtaaaaatcgtta

SEQ ID NO: 111250 - DNA, 22 bp, Artificial sequence
  SiRNA target sequence
gtggatctgtaaaaatcgttaa

SEQ ID NO: 111251 - DNA, 22 bp, Artificial sequence
  SiRNA target sequence
tggatctgtaaaaatcgttaac

SEQ ID NO: 111252 - DNA, 22 bp, Artificial sequence
  SiRNA target sequence
ggatctgtaaaaatcgttaaca

SEQ ID NO: 111253 - DNA, 22 bp, Artificial sequence
  SiRNA target sequence
gatctgtaaaaatcgttaacat

SEQ ID NO: 111254 - DNA, 22 bp, Artificial sequence
  SiRNA target sequence
atctgtaaaaatcgttaacatc

SEQ ID NO: 111255 - DNA, 22 bp, Artificial sequence
  SiRNA target sequence
tctgtaaaaatcgttaacatct

SEQ ID NO: 111256 - DNA, 22 bp, Artificial sequence
  SiRNA target sequence
ctgtaaaaatcgttaacatcta

SEQ ID NO: 111257 - DNA, 22 bp, Artificial sequence
  SiRNA target sequence
tgtaaaaatcgttaacatctaa

SEQ ID NO: 111258 - DNA, 22 bp, Artificial sequence
  SiRNA target sequence
gtaaaaatcgttaacatctaaa

SEQ ID NO: 111259 - DNA, 22 bp, Artificial sequence
  SiRNA target sequence
taaaaatcgttaacatctaaac

SEQ ID NO: 111260 - DNA, 22 bp, Artificial sequence
  SiRNA target sequence
aaaaatcgttaacatctaaaca

SEQ ID NO: 111261 - DNA, 22 bp, Artificial sequence
  SiRNA target sequence
aaaatcgttaacatctaaacag

SEQ ID NO: 111262 - DNA, 22 bp, Artificial sequence
  SiRNA target sequence
aaatcgttaacatctaaacagg

SEQ ID NO: 111263 - DNA, 22 bp, Artificial sequence
  SiRNA target sequence
aatcgttaacatctaaacagga

SEQ ID NO: 111264 - DNA, 22 bp, Artificial sequence
  SiRNA target sequence
atcgttaacatctaaacaggag

SEQ ID NO: 111265 - DNA, 22 bp, Artificial sequence
  SiRNA target sequence
tcgttaacatctaaacaggagt

SEQ ID NO: 111266 - DNA, 22 bp, Artificial sequence
  SiRNA target sequence
cgttaacatctaaacaggagtg

SEQ ID NO: 111267 - DNA, 22 bp, Artificial sequence
  SiRNA target sequence
gttaacatctaaacaggagtgc

SEQ ID NO: 111268 - DNA, 22 bp, Artificial sequence
  SiRNA target sequence
ttaacatctaaacaggagtgcc

SEQ ID NO: 111269 - DNA, 22 bp, Artificial sequence
  SiRNA target sequence
taacatctaaacaggagtgccc

SEQ ID NO: 111270 - DNA, 22 bp, Artificial sequence
  SiRNA target sequence
aacatctaaacaggagtgccca

SEQ ID NO: 111271 - DNA, 22 bp, Artificial sequence
  SiRNA target sequence
acatctaaacaggagtgcccac

SEQ ID NO: 111272 - DNA, 22 bp, Artificial sequence
  SiRNA target sequence
catctaaacaggagtgcccaca

SEQ ID NO: 111273 - DNA, 22 bp, Artificial sequence
  SiRNA target sequence
atctaaacaggagtgcccacat

SEQ ID NO: 111274 - DNA, 22 bp, Artificial sequence
  SiRNA target sequence
tctaaacaggagtgcccacatg

SEQ ID NO: 111275 - DNA, 22 bp, Artificial sequence
  SiRNA target sequence
ctaaacaggagtgcccacatgt

SEQ ID NO: 111276 - DNA, 22 bp, Artificial sequence
  SiRNA target sequence
taaacaggagtgcccacatgtc

SEQ ID NO: 111277 - DNA, 22 bp, Artificial sequence
  SiRNA target sequence
aaacaggagtgcccacatgtcc

SEQ ID NO: 111278 - DNA, 22 bp, Artificial sequence
  SiRNA target sequence
aacaggagtgcccacatgtcct

SEQ ID NO: 111279 - DNA, 22 bp, Artificial sequence
  SiRNA target sequence
acaggagtgcccacatgtcctg

SEQ ID NO: 111280 - DNA, 22 bp, Artificial sequence
  SiRNA target sequence
caggagtgcccacatgtcctgt

SEQ ID NO: 111281 - DNA, 22 bp, Artificial sequence
  SiRNA target sequence
aggagtgcccacatgtcctgta

SEQ ID NO: 111282 - DNA, 22 bp, Artificial sequence
  SiRNA target sequence
ggagtgcccacatgtcctgtac

SEQ ID NO: 111283 - DNA, 22 bp, Artificial sequence
  SiRNA target sequence
gagtgcccacatgtcctgtacg

SEQ ID NO: 111284 - DNA, 22 bp, Artificial sequence
  SiRNA target sequence
agtgcccacatgtcctgtacgt

SEQ ID NO: 111285 - DNA, 22 bp, Artificial sequence
  SiRNA target sequence
gtgcccacatgtcctgtacgta

SEQ ID NO: 111286 - DNA, 22 bp, Artificial sequence
  SiRNA target sequence
tgcccacatgtcctgtacgtat

SEQ ID NO: 111287 - DNA, 22 bp, Artificial sequence
  SiRNA target sequence
gcccacatgtcctgtacgtatc

SEQ ID NO: 111288 - DNA, 22 bp, Artificial sequence
  SiRNA target sequence
cccacatgtcctgtacgtatca

SEQ ID NO: 111289 - DNA, 22 bp, Artificial sequence
  SiRNA target sequence
ccacatgtcctgtacgtatcaa

SEQ ID NO: 111290 - DNA, 22 bp, Artificial sequence
  SiRNA target sequence
cacatgtcctgtacgtatcaat

SEQ ID NO: 111291 - DNA, 22 bp, Artificial sequence
  SiRNA target sequence
acatgtcctgtacgtatcaatt

SEQ ID NO: 111292 - DNA, 22 bp, Artificial sequence
  SiRNA target sequence
catgtcctgtacgtatcaattt

SEQ ID NO: 111293 - DNA, 22 bp, Artificial sequence
  SiRNA target sequence
atgtcctgtacgtatcaatttg

SEQ ID NO: 111294 - DNA, 22 bp, Artificial sequence
  SiRNA target sequence
tgtcctgtacgtatcaatttgc

SEQ ID NO: 111295 - DNA, 22 bp, Artificial sequence
  SiRNA target sequence
gtcctgtacgtatcaatttgca

SEQ ID NO: 111296 - DNA, 22 bp, Artificial sequence
  SiRNA target sequence
tcctgtacgtatcaatttgcaa

SEQ ID NO: 111297 - DNA, 22 bp, Artificial sequence
  SiRNA target sequence
cctgtacgtatcaatttgcaag

SEQ ID NO: 111298 - DNA, 22 bp, Artificial sequence
  SiRNA target sequence
ctgtacgtatcaatttgcaaga

SEQ ID NO: 111299 - DNA, 22 bp, Artificial sequence
  SiRNA target sequence
tgtacgtatcaatttgcaagat

SEQ ID NO: 111300 - DNA, 22 bp, Artificial sequence
  SiRNA target sequence
gtacgtatcaatttgcaagatg

SEQ ID NO: 111301 - DNA, 22 bp, Artificial sequence
  SiRNA target sequence
tacgtatcaatttgcaagatga

SEQ ID NO: 111302 - DNA, 22 bp, Artificial sequence
  SiRNA target sequence
acgtatcaatttgcaagatgat

SEQ ID NO: 111303 - DNA, 22 bp, Artificial sequence
  SiRNA target sequence
cgtatcaatttgcaagatgata

SEQ ID NO: 111304 - DNA, 22 bp, Artificial sequence
  SiRNA target sequence
gtatcaatttgcaagatgatag

SEQ ID NO: 111305 - DNA, 22 bp, Artificial sequence
  SiRNA target sequence
tatcaatttgcaagatgatagg

SEQ ID NO: 111306 - DNA, 22 bp, Artificial sequence
  SiRNA target sequence
atcaatttgcaagatgataggt

SEQ ID NO: 111307 - DNA, 22 bp, Artificial sequence
  SiRNA target sequence
tcaatttgcaagatgataggtc

SEQ ID NO: 111308 - DNA, 22 bp, Artificial sequence
  SiRNA target sequence
caatttgcaagatgataggtcc

SEQ ID NO: 111309 - DNA, 22 bp, Artificial sequence
  SiRNA target sequence
aatttgcaagatgataggtcct

SEQ ID NO: 111310 - DNA, 22 bp, Artificial sequence
  SiRNA target sequence
atttgcaagatgataggtcctt

SEQ ID NO: 111311 - DNA, 22 bp, Artificial sequence
  SiRNA target sequence
tttgcaagatgataggtccttt

SEQ ID NO: 111312 - DNA, 22 bp, Artificial sequence
  SiRNA target sequence
ttgcaagatgataggtcctttt

SEQ ID NO: 111313 - DNA, 22 bp, Artificial sequence
  SiRNA target sequence
tgcaagatgataggtccttttt

SEQ ID NO: 111314 - DNA, 22 bp, Artificial sequence
  SiRNA target sequence
gcaagatgataggtcctttttc

SEQ ID NO: 111315 - DNA, 22 bp, Artificial sequence
  SiRNA target sequence
caagatgataggtcctttttct

SEQ ID NO: 111316 - DNA, 22 bp, Artificial sequence
  SiRNA target sequence
aagatgataggtcctttttcta

SEQ ID NO: 111317 - DNA, 22 bp, Artificial sequence
  SiRNA target sequence
agatgataggtcctttttctat

SEQ ID NO: 111318 - DNA, 22 bp, Artificial sequence
  SiRNA target sequence
gatgataggtcctttttctatt

SEQ ID NO: 111319 - DNA, 22 bp, Artificial sequence
  SiRNA target sequence
atgataggtcctttttctattg

SEQ ID NO: 111320 - DNA, 22 bp, Artificial sequence
  SiRNA target sequence
tgataggtcctttttctattgc

SEQ ID NO: 111321 - DNA, 22 bp, Artificial sequence
  SiRNA target sequence
gataggtcctttttctattgca

SEQ ID NO: 111322 - DNA, 22 bp, Artificial sequence
  SiRNA target sequence
ataggtcctttttctattgcat

SEQ ID NO: 111323 - DNA, 22 bp, Artificial sequence
  SiRNA target sequence
taggtcctttttctattgcatg

SEQ ID NO: 111324 - DNA, 22 bp, Artificial sequence
  SiRNA target sequence
aggtcctttttctattgcatgt

SEQ ID NO: 111325 - DNA, 22 bp, Artificial sequence
  SiRNA target sequence
ggtcctttttctattgcatgtt

SEQ ID NO: 111326 - DNA, 22 bp, Artificial sequence
  SiRNA target sequence
gtcctttttctattgcatgttg

SEQ ID NO: 111327 - DNA, 22 bp, Artificial sequence
  SiRNA target sequence
tcctttttctattgcatgttgt

SEQ ID NO: 111328 - DNA, 22 bp, Artificial sequence
  SiRNA target sequence
cctttttctattgcatgttgtc

SEQ ID NO: 111329 - DNA, 22 bp, Artificial sequence
  SiRNA target sequence
ctttttctattgcatgttgtct

SEQ ID NO: 111330 - DNA, 22 bp, Artificial sequence
  SiRNA target sequence
tttttctattgcatgttgtcta

SEQ ID NO: 111331 - DNA, 22 bp, Artificial sequence
  SiRNA target sequence
ttttctattgcatgttgtctag

SEQ ID NO: 111332 - DNA, 22 bp, Artificial sequence
  SiRNA target sequence
tttctattgcatgttgtctagc

SEQ ID NO: 111333 - DNA, 22 bp, Artificial sequence
  SiRNA target sequence
ttctattgcatgttgtctagca

SEQ ID NO: 111334 - DNA, 22 bp, Artificial sequence
  SiRNA target sequence
tctattgcatgttgtctagcaa

SEQ ID NO: 111335 - DNA, 22 bp, Artificial sequence
  SiRNA target sequence
ctattgcatgttgtctagcaaa

SEQ ID NO: 111336 - DNA, 22 bp, Artificial sequence
  SiRNA target sequence
tattgcatgttgtctagcaaat

SEQ ID NO: 111337 - DNA, 22 bp, Artificial sequence
  SiRNA target sequence
attgcatgttgtctagcaaatg

SEQ ID NO: 111338 - DNA, 22 bp, Artificial sequence
  SiRNA target sequence
ttgcatgttgtctagcaaatgt

SEQ ID NO: 111339 - DNA, 22 bp, Artificial sequence
  SiRNA target sequence
tgcatgttgtctagcaaatgta

SEQ ID NO: 111340 - DNA, 22 bp, Artificial sequence
  SiRNA target sequence
gcatgttgtctagcaaatgtaa

SEQ ID NO: 111341 - DNA, 22 bp, Artificial sequence
  SiRNA target sequence
catgttgtctagcaaatgtaaa

SEQ ID NO: 111342 - DNA, 22 bp, Artificial sequence
  SiRNA target sequence
atgttgtctagcaaatgtaaat

SEQ ID NO: 111343 - DNA, 22 bp, Artificial sequence
  SiRNA target sequence
tgttgtctagcaaatgtaaata

SEQ ID NO: 111344 - DNA, 22 bp, Artificial sequence
  SiRNA target sequence
gttgtctagcaaatgtaaatac

SEQ ID NO: 111345 - DNA, 22 bp, Artificial sequence
  SiRNA target sequence
ttgtctagcaaatgtaaataca

SEQ ID NO: 111346 - DNA, 22 bp, Artificial sequence
  SiRNA target sequence
tgtctagcaaatgtaaatacat

SEQ ID NO: 111347 - DNA, 22 bp, Artificial sequence
  SiRNA target sequence
gtctagcaaatgtaaatacatc

SEQ ID NO: 111348 - DNA, 22 bp, Artificial sequence
  SiRNA target sequence
tctagcaaatgtaaatacatca

SEQ ID NO: 111349 - DNA, 22 bp, Artificial sequence
  SiRNA target sequence
ctagcaaatgtaaatacatcaa

SEQ ID NO: 111350 - DNA, 22 bp, Artificial sequence
  SiRNA target sequence
tagcaaatgtaaatacatcaat

SEQ ID NO: 111351 - DNA, 22 bp, Artificial sequence
  SiRNA target sequence
agcaaatgtaaatacatcaatc

SEQ ID NO: 111352 - DNA, 22 bp, Artificial sequence
  SiRNA target sequence
gcaaatgtaaatacatcaatca

SEQ ID NO: 111353 - DNA, 22 bp, Artificial sequence
  SiRNA target sequence
caaatgtaaatacatcaatcag

SEQ ID NO: 111354 - DNA, 22 bp, Artificial sequence
  SiRNA target sequence
aaatgtaaatacatcaatcagt

SEQ ID NO: 111355 - DNA, 22 bp, Artificial sequence
  SiRNA target sequence
aatgtaaatacatcaatcagtt

SEQ ID NO: 111356 - DNA, 22 bp, Artificial sequence
  SiRNA target sequence
atgtaaatacatcaatcagttg

SEQ ID NO: 111357 - DNA, 22 bp, Artificial sequence
  SiRNA target sequence
tgtaaatacatcaatcagttga

SEQ ID NO: 111358 - DNA, 22 bp, Artificial sequence
  SiRNA target sequence
gtaaatacatcaatcagttgag

SEQ ID NO: 111359 - DNA, 22 bp, Artificial sequence
  SiRNA target sequence
taaatacatcaatcagttgagt

SEQ ID NO: 111360 - DNA, 22 bp, Artificial sequence
  SiRNA target sequence
aaatacatcaatcagttgagtt

SEQ ID NO: 111361 - DNA, 22 bp, Artificial sequence
  SiRNA target sequence
aatacatcaatcagttgagtta

SEQ ID NO: 111362 - DNA, 22 bp, Artificial sequence
  SiRNA target sequence
atacatcaatcagttgagttat

SEQ ID NO: 111363 - DNA, 22 bp, Artificial sequence
  SiRNA target sequence
tacatcaatcagttgagttatg

SEQ ID NO: 111364 - DNA, 22 bp, Artificial sequence
  SiRNA target sequence
acatcaatcagttgagttatgt

SEQ ID NO: 111365 - DNA, 22 bp, Artificial sequence
  SiRNA target sequence
catcaatcagttgagttatgtt

SEQ ID NO: 111366 - DNA, 22 bp, Artificial sequence
  SiRNA target sequence
atcaatcagttgagttatgttt

SEQ ID NO: 111367 - DNA, 22 bp, Artificial sequence
  SiRNA target sequence
tcaatcagttgagttatgtttt

SEQ ID NO: 111368 - DNA, 22 bp, Artificial sequence
  SiRNA target sequence
caatcagttgagttatgttttt

SEQ ID NO: 111369 - DNA, 22 bp, Artificial sequence
  SiRNA target sequence
aatcagttgagttatgttttta

SEQ ID NO: 111370 - DNA, 22 bp, Artificial sequence
  SiRNA target sequence
atcagttgagttatgtttttat

SEQ ID NO: 111371 - DNA, 22 bp, Artificial sequence
  SiRNA target sequence
tcagttgagttatgtttttatc

SEQ ID NO: 111372 - DNA, 22 bp, Artificial sequence
  SiRNA target sequence
cagttgagttatgtttttatct

SEQ ID NO: 111373 - DNA, 22 bp, Artificial sequence
  SiRNA target sequence
agttgagttatgtttttatctg

SEQ ID NO: 111374 - DNA, 22 bp, Artificial sequence
  SiRNA target sequence
gttgagttatgtttttatctgt

SEQ ID NO: 111375 - DNA, 22 bp, Artificial sequence
  SiRNA target sequence
ttgagttatgtttttatctgta

SEQ ID NO: 111376 - DNA, 22 bp, Artificial sequence
  SiRNA target sequence
tgagttatgtttttatctgtaa

SEQ ID NO: 111377 - DNA, 22 bp, Artificial sequence
  SiRNA target sequence
gagttatgtttttatctgtaag

SEQ ID NO: 111378 - DNA, 22 bp, Artificial sequence
  SiRNA target sequence
agttatgtttttatctgtaaga

SEQ ID NO: 111379 - DNA, 22 bp, Artificial sequence
  SiRNA target sequence
gttatgtttttatctgtaagac

SEQ ID NO: 111380 - DNA, 22 bp, Artificial sequence
  SiRNA target sequence
ttatgtttttatctgtaagacg

SEQ ID NO: 111381 - DNA, 22 bp, Artificial sequence
  SiRNA target sequence
tatgtttttatctgtaagacgt

SEQ ID NO: 111382 - DNA, 22 bp, Artificial sequence
  SiRNA target sequence
atgtttttatctgtaagacgta

SEQ ID NO: 111383 - DNA, 22 bp, Artificial sequence
  SiRNA target sequence
tgtttttatctgtaagacgtat

SEQ ID NO: 111384 - DNA, 22 bp, Artificial sequence
  SiRNA target sequence
gtttttatctgtaagacgtata

SEQ ID NO: 111385 - DNA, 22 bp, Artificial sequence
  SiRNA target sequence
tttttatctgtaagacgtatac

SEQ ID NO: 111386 - DNA, 22 bp, Artificial sequence
  SiRNA target sequence
ttttatctgtaagacgtatacc

SEQ ID NO: 111387 - DNA, 22 bp, Artificial sequence
  SiRNA target sequence
tttatctgtaagacgtatacct

SEQ ID NO: 111388 - DNA, 22 bp, Artificial sequence
  SiRNA target sequence
ttatctgtaagacgtatacctg

SEQ ID NO: 111389 - DNA, 22 bp, Artificial sequence
  SiRNA target sequence
tatctgtaagacgtatacctgg

SEQ ID NO: 111390 - DNA, 22 bp, Artificial sequence
  SiRNA target sequence
atctgtaagacgtatacctgga

SEQ ID NO: 111391 - DNA, 22 bp, Artificial sequence
  SiRNA target sequence
tctgtaagacgtatacctggaa

SEQ ID NO: 111392 - DNA, 22 bp, Artificial sequence
  SiRNA target sequence
ctgtaagacgtatacctggaat

SEQ ID NO: 111393 - DNA, 22 bp, Artificial sequence
  SiRNA target sequence
tgtaagacgtatacctggaata

SEQ ID NO: 111394 - DNA, 22 bp, Artificial sequence
  SiRNA target sequence
gtaagacgtatacctggaatat

SEQ ID NO: 111395 - DNA, 22 bp, Artificial sequence
  SiRNA target sequence
taagacgtatacctggaatatt

SEQ ID NO: 111396 - DNA, 22 bp, Artificial sequence
  SiRNA target sequence
aagacgtatacctggaatatta

SEQ ID NO: 111397 - DNA, 22 bp, Artificial sequence
  SiRNA target sequence
agacgtatacctggaatattat

SEQ ID NO: 111398 - DNA, 22 bp, Artificial sequence
  SiRNA target sequence
gacgtatacctggaatattata

SEQ ID NO: 111399 - DNA, 22 bp, Artificial sequence
  SiRNA target sequence
acgtatacctggaatattatat

SEQ ID NO: 111400 - DNA, 22 bp, Artificial sequence
  SiRNA target sequence
cgtatacctggaatattatatc

SEQ ID NO: 111401 - DNA, 22 bp, Artificial sequence
  SiRNA target sequence
gtatacctggaatattatatcc

SEQ ID NO: 111402 - DNA, 22 bp, Artificial sequence
  SiRNA target sequence
tatacctggaatattatatccc

SEQ ID NO: 111403 - DNA, 22 bp, Artificial sequence
  SiRNA target sequence
atacctggaatattatatcccc

SEQ ID NO: 111404 - DNA, 22 bp, Artificial sequence
  SiRNA target sequence
tacctggaatattatatcccct

SEQ ID NO: 111405 - DNA, 22 bp, Artificial sequence
  SiRNA target sequence
acctggaatattatatcccctt

SEQ ID NO: 111406 - DNA, 22 bp, Artificial sequence
  SiRNA target sequence
cctggaatattatatccccttt

SEQ ID NO: 111407 - DNA, 22 bp, Artificial sequence
  SiRNA target sequence
ctggaatattatatcccctttt

SEQ ID NO: 111408 - DNA, 22 bp, Artificial sequence
  SiRNA target sequence
tggaatattatatcccctttta

SEQ ID NO: 111409 - DNA, 22 bp, Artificial sequence
  SiRNA target sequence
ggaatattatatccccttttaa

SEQ ID NO: 111410 - DNA, 22 bp, Artificial sequence
  SiRNA target sequence
gaatattatatccccttttaaa

SEQ ID NO: 111411 - DNA, 22 bp, Artificial sequence
  SiRNA target sequence
aatattatatccccttttaaaa

SEQ ID NO: 111412 - DNA, 22 bp, Artificial sequence
  SiRNA target sequence
atattatatccccttttaaaat

SEQ ID NO: 111413 - DNA, 22 bp, Artificial sequence
  SiRNA target sequence
tattatatccccttttaaaata

SEQ ID NO: 111414 - DNA, 22 bp, Artificial sequence
  SiRNA target sequence
attatatccccttttaaaatat

SEQ ID NO: 111415 - DNA, 22 bp, Artificial sequence
  SiRNA target sequence
ttatatccccttttaaaatatt

SEQ ID NO: 111416 - DNA, 22 bp, Artificial sequence
  SiRNA target sequence
tatatccccttttaaaatattc

SEQ ID NO: 111417 - DNA, 22 bp, Artificial sequence
  SiRNA target sequence
atatccccttttaaaatattca

SEQ ID NO: 111418 - DNA, 22 bp, Artificial sequence
  SiRNA target sequence
tatccccttttaaaatattcag

SEQ ID NO: 111419 - DNA, 22 bp, Artificial sequence
  SiRNA target sequence
atccccttttaaaatattcagg

SEQ ID NO: 111420 - DNA, 22 bp, Artificial sequence
  SiRNA target sequence
tccccttttaaaatattcagga

SEQ ID NO: 111421 - DNA, 22 bp, Artificial sequence
  SiRNA target sequence
ccccttttaaaatattcaggat

SEQ ID NO: 111422 - DNA, 22 bp, Artificial sequence
  SiRNA target sequence
cccttttaaaatattcaggata

SEQ ID NO: 111423 - DNA, 22 bp, Artificial sequence
  SiRNA target sequence
ccttttaaaatattcaggatat

SEQ ID NO: 111424 - DNA, 22 bp, Artificial sequence
  SiRNA target sequence
cttttaaaatattcaggatatg

SEQ ID NO: 111425 - DNA, 22 bp, Artificial sequence
  SiRNA target sequence
ttttaaaatattcaggatatgt

SEQ ID NO: 111426 - DNA, 22 bp, Artificial sequence
  SiRNA target sequence
tttaaaatattcaggatatgta

SEQ ID NO: 111427 - DNA, 22 bp, Artificial sequence
  SiRNA target sequence
ttaaaatattcaggatatgtag

SEQ ID NO: 111428 - DNA, 22 bp, Artificial sequence
  SiRNA target sequence
taaaatattcaggatatgtagt

SEQ ID NO: 111429 - DNA, 22 bp, Artificial sequence
  SiRNA target sequence
aaaatattcaggatatgtagtg

SEQ ID NO: 111430 - DNA, 22 bp, Artificial sequence
  SiRNA target sequence
aaatattcaggatatgtagtgg

SEQ ID NO: 111431 - DNA, 22 bp, Artificial sequence
  SiRNA target sequence
aatattcaggatatgtagtgga

SEQ ID NO: 111432 - DNA, 22 bp, Artificial sequence
  SiRNA target sequence
atattcaggatatgtagtggaa

SEQ ID NO: 111433 - DNA, 22 bp, Artificial sequence
  SiRNA target sequence
tattcaggatatgtagtggaat

SEQ ID NO: 111434 - DNA, 22 bp, Artificial sequence
  SiRNA target sequence
attcaggatatgtagtggaatt

SEQ ID NO: 111435 - DNA, 22 bp, Artificial sequence
  SiRNA target sequence
ttcaggatatgtagtggaatta

SEQ ID NO: 111436 - DNA, 22 bp, Artificial sequence
  SiRNA target sequence
tcaggatatgtagtggaattac

SEQ ID NO: 111437 - DNA, 22 bp, Artificial sequence
  SiRNA target sequence
caggatatgtagtggaattact

SEQ ID NO: 111438 - DNA, 22 bp, Artificial sequence
  SiRNA target sequence
aggatatgtagtggaattactt

SEQ ID NO: 111439 - DNA, 22 bp, Artificial sequence
  SiRNA target sequence
ggatatgtagtggaattacttt

SEQ ID NO: 111440 - DNA, 22 bp, Artificial sequence
  SiRNA target sequence
gatatgtagtggaattactttc

SEQ ID NO: 111441 - DNA, 22 bp, Artificial sequence
  SiRNA target sequence
atatgtagtggaattactttca

SEQ ID NO: 111442 - DNA, 22 bp, Artificial sequence
  SiRNA target sequence
tatgtagtggaattactttcag

SEQ ID NO: 111443 - DNA, 22 bp, Artificial sequence
  SiRNA target sequence
atgtagtggaattactttcagg

SEQ ID NO: 111444 - DNA, 22 bp, Artificial sequence
  SiRNA target sequence
tgtagtggaattactttcaggt

SEQ ID NO: 111445 - DNA, 22 bp, Artificial sequence
  SiRNA target sequence
gtagtggaattactttcaggtg

SEQ ID NO: 111446 - DNA, 22 bp, Artificial sequence
  SiRNA target sequence
tagtggaattactttcaggtgt

SEQ ID NO: 111447 - DNA, 22 bp, Artificial sequence
  SiRNA target sequence
agtggaattactttcaggtgtc

SEQ ID NO: 111448 - DNA, 22 bp, Artificial sequence
  SiRNA target sequence
gtggaattactttcaggtgtcc

SEQ ID NO: 111449 - DNA, 22 bp, Artificial sequence
  SiRNA target sequence
tggaattactttcaggtgtcca

SEQ ID NO: 111450 - DNA, 22 bp, Artificial sequence
  SiRNA target sequence
ggaattactttcaggtgtccac

SEQ ID NO: 111451 - DNA, 22 bp, Artificial sequence
  SiRNA target sequence
gaattactttcaggtgtccaca

SEQ ID NO: 111452 - DNA, 22 bp, Artificial sequence
  SiRNA target sequence
aattactttcaggtgtccacat

SEQ ID NO: 111453 - DNA, 22 bp, Artificial sequence
  SiRNA target sequence
attactttcaggtgtccacata

SEQ ID NO: 111454 - DNA, 22 bp, Artificial sequence
  SiRNA target sequence
ttactttcaggtgtccacatac

SEQ ID NO: 111455 - DNA, 22 bp, Artificial sequence
  SiRNA target sequence
tactttcaggtgtccacatact

SEQ ID NO: 111456 - DNA, 22 bp, Artificial sequence
  SiRNA target sequence
actttcaggtgtccacatacta

SEQ ID NO: 111457 - DNA, 22 bp, Artificial sequence
  SiRNA target sequence
ctttcaggtgtccacatactat

SEQ ID NO: 111458 - DNA, 22 bp, Artificial sequence
  SiRNA target sequence
tttcaggtgtccacatactata

SEQ ID NO: 111459 - DNA, 22 bp, Artificial sequence
  SiRNA target sequence
ttcaggtgtccacatactataa

SEQ ID NO: 111460 - DNA, 22 bp, Artificial sequence
  SiRNA target sequence
tcaggtgtccacatactataat

SEQ ID NO: 111461 - DNA, 22 bp, Artificial sequence
  SiRNA target sequence
caggtgtccacatactataatg

SEQ ID NO: 111462 - DNA, 22 bp, Artificial sequence
  SiRNA target sequence
aggtgtccacatactataatga

SEQ ID NO: 111463 - DNA, 22 bp, Artificial sequence
  SiRNA target sequence
ggtgtccacatactataatgat

SEQ ID NO: 111464 - DNA, 22 bp, Artificial sequence
  SiRNA target sequence
gtgtccacatactataatgatt

SEQ ID NO: 111465 - DNA, 22 bp, Artificial sequence
  SiRNA target sequence
tgtccacatactataatgatta

SEQ ID NO: 111466 - DNA, 22 bp, Artificial sequence
  SiRNA target sequence
gtccacatactataatgattat

SEQ ID NO: 111467 - DNA, 22 bp, Artificial sequence
  SiRNA target sequence
tccacatactataatgattatt

SEQ ID NO: 111468 - DNA, 22 bp, Artificial sequence
  SiRNA target sequence
ccacatactataatgattattt

SEQ ID NO: 111469 - DNA, 22 bp, Artificial sequence
  SiRNA target sequence
cacatactataatgattatttt

SEQ ID NO: 111470 - DNA, 22 bp, Artificial sequence
  SiRNA target sequence
acatactataatgattattttc

SEQ ID NO: 111471 - DNA, 22 bp, Artificial sequence
  SiRNA target sequence
catactataatgattattttca

SEQ ID NO: 111472 - DNA, 22 bp, Artificial sequence
  SiRNA target sequence
atactataatgattattttcac

SEQ ID NO: 111473 - DNA, 22 bp, Artificial sequence
  SiRNA target sequence
tactataatgattattttcaca

SEQ ID NO: 111474 - DNA, 22 bp, Artificial sequence
  SiRNA target sequence
actataatgattattttcacat

SEQ ID NO: 111475 - DNA, 22 bp, Artificial sequence
  SiRNA target sequence
ctataatgattattttcacata

SEQ ID NO: 111476 - DNA, 22 bp, Artificial sequence
  SiRNA target sequence
tataatgattattttcacatac

SEQ ID NO: 111477 - DNA, 22 bp, Artificial sequence
  SiRNA target sequence
ataatgattattttcacataca

SEQ ID NO: 111478 - DNA, 22 bp, Artificial sequence
  SiRNA target sequence
taatgattattttcacatacat

SEQ ID NO: 111479 - DNA, 22 bp, Artificial sequence
  SiRNA target sequence
aatgattattttcacatacata

SEQ ID NO: 111480 - DNA, 22 bp, Artificial sequence
  SiRNA target sequence
atgattattttcacatacataa

SEQ ID NO: 111481 - DNA, 22 bp, Artificial sequence
  SiRNA target sequence
tgattattttcacatacataaa

SEQ ID NO: 111482 - DNA, 22 bp, Artificial sequence
  SiRNA target sequence
gattattttcacatacataaac

SEQ ID NO: 111483 - DNA, 22 bp, Artificial sequence
  SiRNA target sequence
attattttcacatacataaacc

SEQ ID NO: 111484 - DNA, 22 bp, Artificial sequence
  SiRNA target sequence
ttattttcacatacataaacca

SEQ ID NO: 111485 - DNA, 22 bp, Artificial sequence
  SiRNA target sequence
tattttcacatacataaaccac

SEQ ID NO: 111486 - DNA, 22 bp, Artificial sequence
  SiRNA target sequence
attttcacatacataaaccaca

SEQ ID NO: 111487 - DNA, 22 bp, Artificial sequence
  SiRNA target sequence
ttttcacatacataaaccacag

SEQ ID NO: 111488 - DNA, 22 bp, Artificial sequence
  SiRNA target sequence
tttcacatacataaaccacagg

SEQ ID NO: 111489 - DNA, 22 bp, Artificial sequence
  SiRNA target sequence
ttcacatacataaaccacagga

SEQ ID NO: 111490 - DNA, 22 bp, Artificial sequence
  SiRNA target sequence
tcacatacataaaccacaggaa

SEQ ID NO: 111491 - DNA, 22 bp, Artificial sequence
  SiRNA target sequence
cacatacataaaccacaggaag

SEQ ID NO: 111492 - DNA, 22 bp, Artificial sequence
  SiRNA target sequence
acatacataaaccacaggaagt

SEQ ID NO: 111493 - DNA, 22 bp, Artificial sequence
  SiRNA target sequence
catacataaaccacaggaagtt

SEQ ID NO: 111494 - DNA, 22 bp, Artificial sequence
  SiRNA target sequence
atacataaaccacaggaagttt

SEQ ID NO: 111495 - DNA, 22 bp, Artificial sequence
  SiRNA target sequence
tacataaaccacaggaagtttc

SEQ ID NO: 111496 - DNA, 22 bp, Artificial sequence
  SiRNA target sequence
acataaaccacaggaagtttcc

SEQ ID NO: 111497 - DNA, 22 bp, Artificial sequence
  SiRNA target sequence
cataaaccacaggaagtttcca

SEQ ID NO: 111498 - DNA, 22 bp, Artificial sequence
  SiRNA target sequence
ataaaccacaggaagtttccat

SEQ ID NO: 111499 - DNA, 22 bp, Artificial sequence
  SiRNA target sequence
taaaccacaggaagtttccata

SEQ ID NO: 111500 - DNA, 22 bp, Artificial sequence
  SiRNA target sequence
aaaccacaggaagtttccataa

SEQ ID NO: 111501 - DNA, 22 bp, Artificial sequence
  SiRNA target sequence
aaccacaggaagtttccataat

SEQ ID NO: 111502 - DNA, 22 bp, Artificial sequence
  SiRNA target sequence
accacaggaagtttccataatg

SEQ ID NO: 111503 - DNA, 22 bp, Artificial sequence
  SiRNA target sequence
ccacaggaagtttccataatgc

SEQ ID NO: 111504 - DNA, 22 bp, Artificial sequence
  SiRNA target sequence
cacaggaagtttccataatgca

SEQ ID NO: 111505 - DNA, 22 bp, Artificial sequence
  SiRNA target sequence
acaggaagtttccataatgcag

SEQ ID NO: 111506 - DNA, 22 bp, Artificial sequence
  SiRNA target sequence
caggaagtttccataatgcagc

SEQ ID NO: 111507 - DNA, 22 bp, Artificial sequence
  SiRNA target sequence
aggaagtttccataatgcagcc

SEQ ID NO: 111508 - DNA, 22 bp, Artificial sequence
  SiRNA target sequence
ggaagtttccataatgcagcca

SEQ ID NO: 111509 - DNA, 22 bp, Artificial sequence
  SiRNA target sequence
gaagtttccataatgcagccat

SEQ ID NO: 111510 - DNA, 22 bp, Artificial sequence
  SiRNA target sequence
aagtttccataatgcagccata

SEQ ID NO: 111511 - DNA, 22 bp, Artificial sequence
  SiRNA target sequence
agtttccataatgcagccatat

SEQ ID NO: 111512 - DNA, 22 bp, Artificial sequence
  SiRNA target sequence
gtttccataatgcagccatatt

SEQ ID NO: 111513 - DNA, 22 bp, Artificial sequence
  SiRNA target sequence
tttccataatgcagccatattg

SEQ ID NO: 111514 - DNA, 22 bp, Artificial sequence
  SiRNA target sequence
ttccataatgcagccatattga

SEQ ID NO: 111515 - DNA, 22 bp, Artificial sequence
  SiRNA target sequence
tccataatgcagccatattgaa

SEQ ID NO: 111516 - DNA, 22 bp, Artificial sequence
  SiRNA target sequence
ccataatgcagccatattgaac

SEQ ID NO: 111517 - DNA, 22 bp, Artificial sequence
  SiRNA target sequence
cataatgcagccatattgaacg

SEQ ID NO: 111518 - DNA, 22 bp, Artificial sequence
  SiRNA target sequence
ataatgcagccatattgaacga

SEQ ID NO: 111519 - DNA, 22 bp, Artificial sequence
  SiRNA target sequence
taatgcagccatattgaacgac

SEQ ID NO: 111520 - DNA, 22 bp, Artificial sequence
  SiRNA target sequence
aatgcagccatattgaacgact

SEQ ID NO: 111521 - DNA, 22 bp, Artificial sequence
  SiRNA target sequence
atgcagccatattgaacgactc

SEQ ID NO: 111522 - DNA, 22 bp, Artificial sequence
  SiRNA target sequence
tgcagccatattgaacgactcc

SEQ ID NO: 111523 - DNA, 22 bp, Artificial sequence
  SiRNA target sequence
gcagccatattgaacgactccc

SEQ ID NO: 111524 - DNA, 22 bp, Artificial sequence
  SiRNA target sequence
cagccatattgaacgactccca

SEQ ID NO: 111525 - DNA, 22 bp, Artificial sequence
  SiRNA target sequence
agccatattgaacgactcccag

SEQ ID NO: 111526 - DNA, 22 bp, Artificial sequence
  SiRNA target sequence
gccatattgaacgactcccaga

SEQ ID NO: 111527 - DNA, 22 bp, Artificial sequence
  SiRNA target sequence
ccatattgaacgactcccagac

SEQ ID NO: 111528 - DNA, 22 bp, Artificial sequence
  SiRNA target sequence
catattgaacgactcccagacc

SEQ ID NO: 111529 - DNA, 22 bp, Artificial sequence
  SiRNA target sequence
atattgaacgactcccagacct

SEQ ID NO: 111530 - DNA, 22 bp, Artificial sequence
  SiRNA target sequence
tattgaacgactcccagacctg

SEQ ID NO: 111531 - DNA, 22 bp, Artificial sequence
  SiRNA target sequence
attgaacgactcccagacctgt

SEQ ID NO: 111532 - DNA, 22 bp, Artificial sequence
  SiRNA target sequence
ttgaacgactcccagacctgtc

SEQ ID NO: 111533 - DNA, 22 bp, Artificial sequence
  SiRNA target sequence
tgaacgactcccagacctgtcc

SEQ ID NO: 111534 - DNA, 22 bp, Artificial sequence
  SiRNA target sequence
gaacgactcccagacctgtccc

SEQ ID NO: 111535 - DNA, 22 bp, Artificial sequence
  SiRNA target sequence
aacgactcccagacctgtccct

SEQ ID NO: 111536 - DNA, 22 bp, Artificial sequence
  SiRNA target sequence
acgactcccagacctgtccctg

SEQ ID NO: 111537 - DNA, 22 bp, Artificial sequence
  SiRNA target sequence
cgactcccagacctgtccctga

SEQ ID NO: 111538 - DNA, 22 bp, Artificial sequence
  SiRNA target sequence
gactcccagacctgtccctgat

SEQ ID NO: 111539 - DNA, 22 bp, Artificial sequence
  SiRNA target sequence
actcccagacctgtccctgatt

SEQ ID NO: 111540 - DNA, 22 bp, Artificial sequence
  SiRNA target sequence
ctcccagacctgtccctgattt

SEQ ID NO: 111541 - DNA, 22 bp, Artificial sequence
  SiRNA target sequence
tcccagacctgtccctgatttg

SEQ ID NO: 111542 - DNA, 22 bp, Artificial sequence
  SiRNA target sequence
cccagacctgtccctgatttgc

SEQ ID NO: 111543 - DNA, 22 bp, Artificial sequence
  SiRNA target sequence
ccagacctgtccctgatttgca

SEQ ID NO: 111544 - DNA, 22 bp, Artificial sequence
  SiRNA target sequence
cagacctgtccctgatttgcag

SEQ ID NO: 111545 - DNA, 22 bp, Artificial sequence
  SiRNA target sequence
agacctgtccctgatttgcagc

SEQ ID NO: 111546 - DNA, 22 bp, Artificial sequence
  SiRNA target sequence
gacctgtccctgatttgcagca

SEQ ID NO: 111547 - DNA, 22 bp, Artificial sequence
  SiRNA target sequence
acctgtccctgatttgcagcac

SEQ ID NO: 111548 - DNA, 22 bp, Artificial sequence
  SiRNA target sequence
cctgtccctgatttgcagcacc

SEQ ID NO: 111549 - DNA, 22 bp, Artificial sequence
  SiRNA target sequence
ctgtccctgatttgcagcacca

SEQ ID NO: 111550 - DNA, 22 bp, Artificial sequence
  SiRNA target sequence
tgtccctgatttgcagcaccat

SEQ ID NO: 111551 - DNA, 22 bp, Artificial sequence
  SiRNA target sequence
gtccctgatttgcagcaccatc

SEQ ID NO: 111552 - DNA, 22 bp, Artificial sequence
  SiRNA target sequence
tccctgatttgcagcaccatcc

SEQ ID NO: 111553 - DNA, 22 bp, Artificial sequence
  SiRNA target sequence
ccctgatttgcagcaccatccc

SEQ ID NO: 111554 - DNA, 22 bp, Artificial sequence
  SiRNA target sequence
cctgatttgcagcaccatcccc

SEQ ID NO: 111555 - DNA, 22 bp, Artificial sequence
  SiRNA target sequence
ctgatttgcagcaccatccccg

SEQ ID NO: 111556 - DNA, 22 bp, Artificial sequence
  SiRNA target sequence
tgatttgcagcaccatccccga

SEQ ID NO: 111557 - DNA, 22 bp, Artificial sequence
  SiRNA target sequence
gatttgcagcaccatccccgaa

SEQ ID NO: 111558 - DNA, 22 bp, Artificial sequence
  SiRNA target sequence
atttgcagcaccatccccgaaa

SEQ ID NO: 111559 - DNA, 22 bp, Artificial sequence
  SiRNA target sequence
tttgcagcaccatccccgaaaa

SEQ ID NO: 111560 - DNA, 22 bp, Artificial sequence
  SiRNA target sequence
ttgcagcaccatccccgaaaaa

SEQ ID NO: 111561 - DNA, 22 bp, Artificial sequence
  SiRNA target sequence
tgcagcaccatccccgaaaaat

SEQ ID NO: 111562 - DNA, 22 bp, Artificial sequence
  SiRNA target sequence
gcagcaccatccccgaaaaata

SEQ ID NO: 111563 - DNA, 22 bp, Artificial sequence
  SiRNA target sequence
cagcaccatccccgaaaaatac

SEQ ID NO: 111564 - DNA, 22 bp, Artificial sequence
  SiRNA target sequence
agcaccatccccgaaaaataca

SEQ ID NO: 111565 - DNA, 22 bp, Artificial sequence
  SiRNA target sequence
gcaccatccccgaaaaatacaa

SEQ ID NO: 111566 - DNA, 22 bp, Artificial sequence
  SiRNA target sequence
caccatccccgaaaaatacaaa

SEQ ID NO: 111567 - DNA, 22 bp, Artificial sequence
  SiRNA target sequence
accatccccgaaaaatacaaat

SEQ ID NO: 111568 - DNA, 22 bp, Artificial sequence
  SiRNA target sequence
ccatccccgaaaaatacaaatg

SEQ ID NO: 111569 - DNA, 22 bp, Artificial sequence
  SiRNA target sequence
catccccgaaaaatacaaatgc

SEQ ID NO: 111570 - DNA, 22 bp, Artificial sequence
  SiRNA target sequence
atccccgaaaaatacaaatgct

SEQ ID NO: 111571 - DNA, 22 bp, Artificial sequence
  SiRNA target sequence
tccccgaaaaatacaaatgcta

SEQ ID NO: 111572 - DNA, 22 bp, Artificial sequence
  SiRNA target sequence
ccccgaaaaatacaaatgctac

SEQ ID NO: 111573 - DNA, 22 bp, Artificial sequence
  SiRNA target sequence
cccgaaaaatacaaatgctaca

SEQ ID NO: 111574 - DNA, 22 bp, Artificial sequence
  SiRNA target sequence
ccgaaaaatacaaatgctacat

SEQ ID NO: 111575 - DNA, 22 bp, Artificial sequence
  SiRNA target sequence
cgaaaaatacaaatgctacatt

SEQ ID NO: 111576 - DNA, 22 bp, Artificial sequence
  SiRNA target sequence
gaaaaatacaaatgctacattt

SEQ ID NO: 111577 - DNA, 22 bp, Artificial sequence
  SiRNA target sequence
aaaaatacaaatgctacatttt

SEQ ID NO: 111578 - DNA, 22 bp, Artificial sequence
  SiRNA target sequence
aaaatacaaatgctacattttt

SEQ ID NO: 111579 - DNA, 22 bp, Artificial sequence
  SiRNA target sequence
aaatacaaatgctacatttttt

SEQ ID NO: 111580 - DNA, 22 bp, Artificial sequence
  SiRNA target sequence
aatacaaatgctacatttttta

SEQ ID NO: 111581 - DNA, 22 bp, Artificial sequence
  SiRNA target sequence
atacaaatgctacattttttac

SEQ ID NO: 111582 - DNA, 22 bp, Artificial sequence
  SiRNA target sequence
tacaaatgctacattttttact

SEQ ID NO: 111583 - DNA, 22 bp, Artificial sequence
  SiRNA target sequence
acaaatgctacattttttactt

SEQ ID NO: 111584 - DNA, 22 bp, Artificial sequence
  SiRNA target sequence
caaatgctacattttttacttt

SEQ ID NO: 111585 - DNA, 22 bp, Artificial sequence
  SiRNA target sequence
aaatgctacattttttactttt

SEQ ID NO: 111586 - DNA, 22 bp, Artificial sequence
  SiRNA target sequence
aatgctacattttttacttttt

SEQ ID NO: 111587 - DNA, 22 bp, Artificial sequence
  SiRNA target sequence
atgctacattttttactttttt

SEQ ID NO: 111588 - DNA, 22 bp, Artificial sequence
  SiRNA target sequence
tgctacattttttactttttta

SEQ ID NO: 111589 - DNA, 22 bp, Artificial sequence
  SiRNA target sequence
gctacattttttacttttttat

SEQ ID NO: 111590 - DNA, 22 bp, Artificial sequence
  SiRNA target sequence
ctacattttttacttttttata

SEQ ID NO: 111591 - DNA, 22 bp, Artificial sequence
  SiRNA target sequence
tacattttttacttttttatat

SEQ ID NO: 111592 - DNA, 22 bp, Artificial sequence
  SiRNA target sequence
acattttttacttttttatatt

SEQ ID NO: 111593 - DNA, 22 bp, Artificial sequence
  SiRNA target sequence
cattttttacttttttatattg

SEQ ID NO: 111594 - DNA, 22 bp, Artificial sequence
  SiRNA target sequence
attttttacttttttatattgt

SEQ ID NO: 111595 - DNA, 22 bp, Artificial sequence
  SiRNA target sequence
ttttttacttttttatattgta

SEQ ID NO: 111596 - DNA, 22 bp, Artificial sequence
  SiRNA target sequence
tttttacttttttatattgtaa

SEQ ID NO: 111597 - DNA, 22 bp, Artificial sequence
  SiRNA target sequence
ttttacttttttatattgtaaa

SEQ ID NO: 111598 - DNA, 22 bp, Artificial sequence
  SiRNA target sequence
tttacttttttatattgtaaag

SEQ ID NO: 111599 - DNA, 22 bp, Artificial sequence
  SiRNA target sequence
ttacttttttatattgtaaagc

SEQ ID NO: 111600 - DNA, 22 bp, Artificial sequence
  SiRNA target sequence
tacttttttatattgtaaagca

SEQ ID NO: 111601 - DNA, 22 bp, Artificial sequence
  SiRNA target sequence
acttttttatattgtaaagcaa

SEQ ID NO: 111602 - DNA, 22 bp, Artificial sequence
  SiRNA target sequence
cttttttatattgtaaagcaaa

SEQ ID NO: 111603 - DNA, 22 bp, Artificial sequence
  SiRNA target sequence
ttttttatattgtaaagcaaat

SEQ ID NO: 111604 - DNA, 22 bp, Artificial sequence
  SiRNA target sequence
tttttatattgtaaagcaaatc

SEQ ID NO: 111605 - DNA, 22 bp, Artificial sequence
  SiRNA target sequence
ttttatattgtaaagcaaatcc

SEQ ID NO: 111606 - DNA, 22 bp, Artificial sequence
  SiRNA target sequence
tttatattgtaaagcaaatccc

SEQ ID NO: 111607 - DNA, 22 bp, Artificial sequence
  SiRNA target sequence
ttatattgtaaagcaaatccca

SEQ ID NO: 111608 - DNA, 22 bp, Artificial sequence
  SiRNA target sequence
tatattgtaaagcaaatcccaa

SEQ ID NO: 111609 - DNA, 22 bp, Artificial sequence
  SiRNA target sequence
atattgtaaagcaaatcccaat

SEQ ID NO: 111610 - DNA, 22 bp, Artificial sequence
  SiRNA target sequence
tattgtaaagcaaatcccaatc

SEQ ID NO: 111611 - DNA, 22 bp, Artificial sequence
  SiRNA target sequence
attgtaaagcaaatcccaatcc

SEQ ID NO: 111612 - DNA, 22 bp, Artificial sequence
  SiRNA target sequence
ttgtaaagcaaatcccaatcct

SEQ ID NO: 111613 - DNA, 22 bp, Artificial sequence
  SiRNA target sequence
tgtaaagcaaatcccaatcctg

SEQ ID NO: 111614 - DNA, 22 bp, Artificial sequence
  SiRNA target sequence
gtaaagcaaatcccaatcctgt

SEQ ID NO: 111615 - DNA, 22 bp, Artificial sequence
  SiRNA target sequence
taaagcaaatcccaatcctgta

SEQ ID NO: 111616 - DNA, 22 bp, Artificial sequence
  SiRNA target sequence
aaagcaaatcccaatcctgtac

SEQ ID NO: 111617 - DNA, 22 bp, Artificial sequence
  SiRNA target sequence
aagcaaatcccaatcctgtacc

SEQ ID NO: 111618 - DNA, 22 bp, Artificial sequence
  SiRNA target sequence
agcaaatcccaatcctgtacca

SEQ ID NO: 111619 - DNA, 22 bp, Artificial sequence
  SiRNA target sequence
gcaaatcccaatcctgtaccaa

SEQ ID NO: 111620 - DNA, 22 bp, Artificial sequence
  SiRNA target sequence
caaatcccaatcctgtaccaag

SEQ ID NO: 111621 - DNA, 22 bp, Artificial sequence
  SiRNA target sequence
aaatcccaatcctgtaccaagc

SEQ ID NO: 111622 - DNA, 22 bp, Artificial sequence
  SiRNA target sequence
aatcccaatcctgtaccaagcg

SEQ ID NO: 111623 - DNA, 22 bp, Artificial sequence
  SiRNA target sequence
atcccaatcctgtaccaagcga

SEQ ID NO: 111624 - DNA, 22 bp, Artificial sequence
  SiRNA target sequence
tcccaatcctgtaccaagcgat

SEQ ID NO: 111625 - DNA, 22 bp, Artificial sequence
  SiRNA target sequence
cccaatcctgtaccaagcgata

SEQ ID NO: 111626 - DNA, 22 bp, Artificial sequence
  SiRNA target sequence
ccaatcctgtaccaagcgatac

SEQ ID NO: 111627 - DNA, 22 bp, Artificial sequence
  SiRNA target sequence
caatcctgtaccaagcgatacc

SEQ ID NO: 111628 - DNA, 22 bp, Artificial sequence
  SiRNA target sequence
aatcctgtaccaagcgatacct

SEQ ID NO: 111629 - DNA, 22 bp, Artificial sequence
  SiRNA target sequence
atcctgtaccaagcgatacctg

SEQ ID NO: 111630 - DNA, 22 bp, Artificial sequence
  SiRNA target sequence
tcctgtaccaagcgatacctgc

SEQ ID NO: 111631 - DNA, 22 bp, Artificial sequence
  SiRNA target sequence
cctgtaccaagcgatacctgcg

SEQ ID NO: 111632 - DNA, 22 bp, Artificial sequence
  SiRNA target sequence
ctgtaccaagcgatacctgcgc

SEQ ID NO: 111633 - DNA, 22 bp, Artificial sequence
  SiRNA target sequence
tgtaccaagcgatacctgcgca

SEQ ID NO: 111634 - DNA, 22 bp, Artificial sequence
  SiRNA target sequence
gtaccaagcgatacctgcgcac

SEQ ID NO: 111635 - DNA, 22 bp, Artificial sequence
  SiRNA target sequence
taccaagcgatacctgcgcacc

SEQ ID NO: 111636 - DNA, 22 bp, Artificial sequence
  SiRNA target sequence
accaagcgatacctgcgcacct

SEQ ID NO: 111637 - DNA, 22 bp, Artificial sequence
  SiRNA target sequence
ccaagcgatacctgcgcaccta

SEQ ID NO: 111638 - DNA, 22 bp, Artificial sequence
  SiRNA target sequence
caagcgatacctgcgcacctac

SEQ ID NO: 111639 - DNA, 22 bp, Artificial sequence
  SiRNA target sequence
aagcgatacctgcgcacctact

SEQ ID NO: 111640 - DNA, 22 bp, Artificial sequence
  SiRNA target sequence
agcgatacctgcgcacctacta

SEQ ID NO: 111641 - DNA, 22 bp, Artificial sequence
  SiRNA target sequence
gcgatacctgcgcacctactat

SEQ ID NO: 111642 - DNA, 22 bp, Artificial sequence
  SiRNA target sequence
cgatacctgcgcacctactata

SEQ ID NO: 111643 - DNA, 22 bp, Artificial sequence
  SiRNA target sequence
gatacctgcgcacctactatac

SEQ ID NO: 111644 - DNA, 22 bp, Artificial sequence
  SiRNA target sequence
atacctgcgcacctactatacc

SEQ ID NO: 111645 - DNA, 22 bp, Artificial sequence
  SiRNA target sequence
tacctgcgcacctactataccg

SEQ ID NO: 111646 - DNA, 22 bp, Artificial sequence
  SiRNA target sequence
acctgcgcacctactataccgt

SEQ ID NO: 111647 - DNA, 22 bp, Artificial sequence
  SiRNA target sequence
cctgcgcacctactataccgtg

SEQ ID NO: 111648 - DNA, 22 bp, Artificial sequence
  SiRNA target sequence
ctgcgcacctactataccgtgt

SEQ ID NO: 111649 - DNA, 22 bp, Artificial sequence
  SiRNA target sequence
tgcgcacctactataccgtgtc

SEQ ID NO: 111650 - DNA, 22 bp, Artificial sequence
  SiRNA target sequence
gcgcacctactataccgtgtcc

SEQ ID NO: 111651 - DNA, 22 bp, Artificial sequence
  SiRNA target sequence
cgcacctactataccgtgtccc

SEQ ID NO: 111652 - DNA, 22 bp, Artificial sequence
  SiRNA target sequence
gcacctactataccgtgtcccc

SEQ ID NO: 111653 - DNA, 22 bp, Artificial sequence
  SiRNA target sequence
cacctactataccgtgtccccc

SEQ ID NO: 111654 - DNA, 22 bp, Artificial sequence
  SiRNA target sequence
acctactataccgtgtccccca

SEQ ID NO: 111655 - DNA, 22 bp, Artificial sequence
  SiRNA target sequence
cctactataccgtgtcccccat

SEQ ID NO: 111656 - DNA, 22 bp, Artificial sequence
  SiRNA target sequence
ctactataccgtgtcccccata

SEQ ID NO: 111657 - DNA, 22 bp, Artificial sequence
  SiRNA target sequence
tactataccgtgtcccccataa

SEQ ID NO: 111658 - DNA, 22 bp, Artificial sequence
  SiRNA target sequence
actataccgtgtcccccataaa

SEQ ID NO: 111659 - DNA, 22 bp, Artificial sequence
  SiRNA target sequence
ctataccgtgtcccccataaaa

SEQ ID NO: 111660 - DNA, 22 bp, Artificial sequence
  SiRNA target sequence
tataccgtgtcccccataaaat

SEQ ID NO: 111661 - DNA, 22 bp, Artificial sequence
  SiRNA target sequence
ataccgtgtcccccataaaatt

SEQ ID NO: 111662 - DNA, 22 bp, Artificial sequence
  SiRNA target sequence
taccgtgtcccccataaaattg

SEQ ID NO: 111663 - DNA, 22 bp, Artificial sequence
  SiRNA target sequence
accgtgtcccccataaaattgg

SEQ ID NO: 111664 - DNA, 22 bp, Artificial sequence
  SiRNA target sequence
ccgtgtcccccataaaattggt

SEQ ID NO: 111665 - DNA, 22 bp, Artificial sequence
  SiRNA target sequence
cgtgtcccccataaaattggtc

SEQ ID NO: 111666 - DNA, 22 bp, Artificial sequence
  SiRNA target sequence
gtgtcccccataaaattggtca

SEQ ID NO: 111667 - DNA, 22 bp, Artificial sequence
  SiRNA target sequence
tgtcccccataaaattggtcat

SEQ ID NO: 111668 - DNA, 22 bp, Artificial sequence
  SiRNA target sequence
gtcccccataaaattggtcatt

SEQ ID NO: 111669 - DNA, 22 bp, Artificial sequence
  SiRNA target sequence
tcccccataaaattggtcatta

SEQ ID NO: 111670 - DNA, 22 bp, Artificial sequence
  SiRNA target sequence
cccccataaaattggtcattat

SEQ ID NO: 111671 - DNA, 22 bp, Artificial sequence
  SiRNA target sequence
ccccataaaattggtcattata

SEQ ID NO: 111672 - DNA, 22 bp, Artificial sequence
  SiRNA target sequence
cccataaaattggtcattatac

SEQ ID NO: 111673 - DNA, 22 bp, Artificial sequence
  SiRNA target sequence
ccataaaattggtcattataca

SEQ ID NO: 111674 - DNA, 22 bp, Artificial sequence
  SiRNA target sequence
cataaaattggtcattatacaa

SEQ ID NO: 111675 - DNA, 22 bp, Artificial sequence
  SiRNA target sequence
ataaaattggtcattatacaaa

SEQ ID NO: 111676 - DNA, 22 bp, Artificial sequence
  SiRNA target sequence
taaaattggtcattatacaaat

SEQ ID NO: 111677 - DNA, 22 bp, Artificial sequence
  SiRNA target sequence
aaaattggtcattatacaaatg

SEQ ID NO: 111678 - DNA, 22 bp, Artificial sequence
  SiRNA target sequence
aaattggtcattatacaaatgc

SEQ ID NO: 111679 - DNA, 22 bp, Artificial sequence
  SiRNA target sequence
aattggtcattatacaaatgca

SEQ ID NO: 111680 - DNA, 22 bp, Artificial sequence
  SiRNA target sequence
attggtcattatacaaatgcat

SEQ ID NO: 111681 - DNA, 22 bp, Artificial sequence
  SiRNA target sequence
ttggtcattatacaaatgcatc

SEQ ID NO: 111682 - DNA, 22 bp, Artificial sequence
  SiRNA target sequence
tggtcattatacaaatgcatcg

SEQ ID NO: 111683 - DNA, 22 bp, Artificial sequence
  SiRNA target sequence
ggtcattatacaaatgcatcga

SEQ ID NO: 111684 - DNA, 22 bp, Artificial sequence
  SiRNA target sequence
gtcattatacaaatgcatcgat

SEQ ID NO: 111685 - DNA, 22 bp, Artificial sequence
  SiRNA target sequence
tcattatacaaatgcatcgatc

SEQ ID NO: 111686 - DNA, 22 bp, Artificial sequence
  SiRNA target sequence
cattatacaaatgcatcgatcc

SEQ ID NO: 111687 - DNA, 22 bp, Artificial sequence
  SiRNA target sequence
attatacaaatgcatcgatcct

SEQ ID NO: 111688 - DNA, 22 bp, Artificial sequence
  SiRNA target sequence
ttatacaaatgcatcgatcctc

SEQ ID NO: 111689 - DNA, 22 bp, Artificial sequence
  SiRNA target sequence
tatacaaatgcatcgatcctcc

SEQ ID NO: 111690 - DNA, 22 bp, Artificial sequence
  SiRNA target sequence
atacaaatgcatcgatcctcct

SEQ ID NO: 111691 - DNA, 22 bp, Artificial sequence
  SiRNA target sequence
tacaaatgcatcgatcctcctt

SEQ ID NO: 111692 - DNA, 22 bp, Artificial sequence
  SiRNA target sequence
acaaatgcatcgatcctccttt

SEQ ID NO: 111693 - DNA, 22 bp, Artificial sequence
  SiRNA target sequence
caaatgcatcgatcctcctttt

SEQ ID NO: 111694 - DNA, 22 bp, Artificial sequence
  SiRNA target sequence
aaatgcatcgatcctccttttc

SEQ ID NO: 111695 - DNA, 22 bp, Artificial sequence
  SiRNA target sequence
aatgcatcgatcctccttttcc

SEQ ID NO: 111696 - DNA, 22 bp, Artificial sequence
  SiRNA target sequence
atgcatcgatcctccttttcct

SEQ ID NO: 111697 - DNA, 22 bp, Artificial sequence
  SiRNA target sequence
tgcatcgatcctccttttcctt

SEQ ID NO: 111698 - DNA, 22 bp, Artificial sequence
  SiRNA target sequence
gcatcgatcctccttttccttt

SEQ ID NO: 111699 - DNA, 22 bp, Artificial sequence
  SiRNA target sequence
catcgatcctccttttcctttg

SEQ ID NO: 111700 - DNA, 22 bp, Artificial sequence
  SiRNA target sequence
atcgatcctccttttcctttgc

SEQ ID NO: 111701 - DNA, 22 bp, Artificial sequence
  SiRNA target sequence
tcgatcctccttttcctttgca

SEQ ID NO: 111702 - DNA, 22 bp, Artificial sequence
  SiRNA target sequence
cgatcctccttttcctttgcaa

SEQ ID NO: 111703 - DNA, 22 bp, Artificial sequence
  SiRNA target sequence
gatcctccttttcctttgcaat

SEQ ID NO: 111704 - DNA, 22 bp, Artificial sequence
  SiRNA target sequence
atcctccttttcctttgcaatt

SEQ ID NO: 111705 - DNA, 22 bp, Artificial sequence
  SiRNA target sequence
tcctccttttcctttgcaatta

SEQ ID NO: 111706 - DNA, 22 bp, Artificial sequence
  SiRNA target sequence
cctccttttcctttgcaattac

SEQ ID NO: 111707 - DNA, 22 bp, Artificial sequence
  SiRNA target sequence
ctccttttcctttgcaattacc

SEQ ID NO: 111708 - DNA, 22 bp, Artificial sequence
  SiRNA target sequence
tccttttcctttgcaattacca

SEQ ID NO: 111709 - DNA, 22 bp, Artificial sequence
  SiRNA target sequence
ccttttcctttgcaattaccaa

SEQ ID NO: 111710 - DNA, 22 bp, Artificial sequence
  SiRNA target sequence
cttttcctttgcaattaccaat

SEQ ID NO: 111711 - DNA, 22 bp, Artificial sequence
  SiRNA target sequence
ttttcctttgcaattaccaata

SEQ ID NO: 111712 - DNA, 22 bp, Artificial sequence
  SiRNA target sequence
tttcctttgcaattaccaatag

SEQ ID NO: 111713 - DNA, 22 bp, Artificial sequence
  SiRNA target sequence
ttcctttgcaattaccaatagc

SEQ ID NO: 111714 - DNA, 22 bp, Artificial sequence
  SiRNA target sequence
tcctttgcaattaccaatagcc

SEQ ID NO: 111715 - DNA, 22 bp, Artificial sequence
  SiRNA target sequence
cctttgcaattaccaatagcct

SEQ ID NO: 111716 - DNA, 22 bp, Artificial sequence
  SiRNA target sequence
ctttgcaattaccaatagcctt

SEQ ID NO: 111717 - DNA, 22 bp, Artificial sequence
  SiRNA target sequence
tttgcaattaccaatagccttt

SEQ ID NO: 111718 - DNA, 22 bp, Artificial sequence
  SiRNA target sequence
ttgcaattaccaatagcctttc

SEQ ID NO: 111719 - DNA, 22 bp, Artificial sequence
  SiRNA target sequence
tgcaattaccaatagcctttcc

SEQ ID NO: 111720 - DNA, 22 bp, Artificial sequence
  SiRNA target sequence
gcaattaccaatagcctttcct

SEQ ID NO: 111721 - DNA, 22 bp, Artificial sequence
  SiRNA target sequence
caattaccaatagcctttccta

SEQ ID NO: 111722 - DNA, 22 bp, Artificial sequence
  SiRNA target sequence
aattaccaatagcctttcctaa

SEQ ID NO: 111723 - DNA, 22 bp, Artificial sequence
  SiRNA target sequence
attaccaatagcctttcctaat

SEQ ID NO: 111724 - DNA, 22 bp, Artificial sequence
  SiRNA target sequence
ttaccaatagcctttcctaata

SEQ ID NO: 111725 - DNA, 22 bp, Artificial sequence
  SiRNA target sequence
taccaatagcctttcctaataa

SEQ ID NO: 111726 - DNA, 22 bp, Artificial sequence
  SiRNA target sequence
accaatagcctttcctaataat

SEQ ID NO: 111727 - DNA, 22 bp, Artificial sequence
  SiRNA target sequence
ccaatagcctttcctaataatt

SEQ ID NO: 111728 - DNA, 22 bp, Artificial sequence
  SiRNA target sequence
caatagcctttcctaataattc

SEQ ID NO: 111729 - DNA, 22 bp, Artificial sequence
  SiRNA target sequence
aatagcctttcctaataattcc

SEQ ID NO: 111730 - DNA, 22 bp, Artificial sequence
  SiRNA target sequence
atagcctttcctaataattccc

SEQ ID NO: 111731 - DNA, 22 bp, Artificial sequence
  SiRNA target sequence
tagcctttcctaataattcccc

SEQ ID NO: 111732 - DNA, 22 bp, Artificial sequence
  SiRNA target sequence
agcctttcctaataattcccct

SEQ ID NO: 111733 - DNA, 22 bp, Artificial sequence
  SiRNA target sequence
gcctttcctaataattccccta

SEQ ID NO: 111734 - DNA, 22 bp, Artificial sequence
  SiRNA target sequence
cctttcctaataattcccctat

SEQ ID NO: 111735 - DNA, 22 bp, Artificial sequence
  SiRNA target sequence
ctttcctaataattcccctata

SEQ ID NO: 111736 - DNA, 22 bp, Artificial sequence
  SiRNA target sequence
tttcctaataattcccctataa

SEQ ID NO: 111737 - DNA, 22 bp, Artificial sequence
  SiRNA target sequence
ttcctaataattcccctataat

SEQ ID NO: 111738 - DNA, 22 bp, Artificial sequence
  SiRNA target sequence
tcctaataattcccctataata

SEQ ID NO: 111739 - DNA, 22 bp, Artificial sequence
  SiRNA target sequence
cctaataattcccctataatac

SEQ ID NO: 111740 - DNA, 22 bp, Artificial sequence
  SiRNA target sequence
ctaataattcccctataatact

SEQ ID NO: 111741 - DNA, 22 bp, Artificial sequence
  SiRNA target sequence
taataattcccctataatactt

SEQ ID NO: 111742 - DNA, 22 bp, Artificial sequence
  SiRNA target sequence
aataattcccctataatacttt

SEQ ID NO: 111743 - DNA, 22 bp, Artificial sequence
  SiRNA target sequence
ataattcccctataatactttc

SEQ ID NO: 111744 - DNA, 22 bp, Artificial sequence
  SiRNA target sequence
taattcccctataatactttct

SEQ ID NO: 111745 - DNA, 22 bp, Artificial sequence
  SiRNA target sequence
aattcccctataatactttcta

SEQ ID NO: 111746 - DNA, 22 bp, Artificial sequence
  SiRNA target sequence
attcccctataatactttctat

SEQ ID NO: 111747 - DNA, 22 bp, Artificial sequence
  SiRNA target sequence
ttcccctataatactttctata

SEQ ID NO: 111748 - DNA, 22 bp, Artificial sequence
  SiRNA target sequence
tcccctataatactttctatac

SEQ ID NO: 111749 - DNA, 22 bp, Artificial sequence
  SiRNA target sequence
cccctataatactttctatact

SEQ ID NO: 111750 - DNA, 22 bp, Artificial sequence
  SiRNA target sequence
ccctataatactttctatactg

SEQ ID NO: 111751 - DNA, 22 bp, Artificial sequence
  SiRNA target sequence
cctataatactttctatactga

SEQ ID NO: 111752 - DNA, 22 bp, Artificial sequence
  SiRNA target sequence
ctataatactttctatactgat

SEQ ID NO: 111753 - DNA, 22 bp, Artificial sequence
  SiRNA target sequence
tataatactttctatactgatt

SEQ ID NO: 111754 - DNA, 22 bp, Artificial sequence
  SiRNA target sequence
ataatactttctatactgattc

SEQ ID NO: 111755 - DNA, 22 bp, Artificial sequence
  SiRNA target sequence
taatactttctatactgattcc

SEQ ID NO: 111756 - DNA, 22 bp, Artificial sequence
  SiRNA target sequence
aatactttctatactgattcca

SEQ ID NO: 111757 - DNA, 22 bp, Artificial sequence
  SiRNA target sequence
atactttctatactgattccac

SEQ ID NO: 111758 - DNA, 22 bp, Artificial sequence
  SiRNA target sequence
tactttctatactgattccaca

SEQ ID NO: 111759 - DNA, 22 bp, Artificial sequence
  SiRNA target sequence
actttctatactgattccacaa

SEQ ID NO: 111760 - DNA, 22 bp, Artificial sequence
  SiRNA target sequence
ctttctatactgattccacaaa

SEQ ID NO: 111761 - DNA, 22 bp, Artificial sequence
  SiRNA target sequence
tttctatactgattccacaaat

SEQ ID NO: 111762 - DNA, 22 bp, Artificial sequence
  SiRNA target sequence
ttctatactgattccacaaata

SEQ ID NO: 111763 - DNA, 22 bp, Artificial sequence
  SiRNA target sequence
tctatactgattccacaaataa

SEQ ID NO: 111764 - DNA, 22 bp, Artificial sequence
  SiRNA target sequence
ctatactgattccacaaataaa

SEQ ID NO: 111765 - DNA, 22 bp, Artificial sequence
  SiRNA target sequence
tatactgattccacaaataaat

SEQ ID NO: 111766 - DNA, 22 bp, Artificial sequence
  SiRNA target sequence
atactgattccacaaataaatg

SEQ ID NO: 111767 - DNA, 22 bp, Artificial sequence
  SiRNA target sequence
tactgattccacaaataaatgc

SEQ ID NO: 111768 - DNA, 22 bp, Artificial sequence
  SiRNA target sequence
actgattccacaaataaatgct

SEQ ID NO: 111769 - DNA, 22 bp, Artificial sequence
  SiRNA target sequence
ctgattccacaaataaatgcta

SEQ ID NO: 111770 - DNA, 22 bp, Artificial sequence
  SiRNA target sequence
tgattccacaaataaatgctaa

SEQ ID NO: 111771 - DNA, 22 bp, Artificial sequence
  SiRNA target sequence
gattccacaaataaatgctaat

SEQ ID NO: 111772 - DNA, 22 bp, Artificial sequence
  SiRNA target sequence
attccacaaataaatgctaatc

SEQ ID NO: 111773 - DNA, 22 bp, Artificial sequence
  SiRNA target sequence
ttccacaaataaatgctaatcc

SEQ ID NO: 111774 - DNA, 22 bp, Artificial sequence
  SiRNA target sequence
tccacaaataaatgctaatcca

SEQ ID NO: 111775 - DNA, 22 bp, Artificial sequence
  SiRNA target sequence
ccacaaataaatgctaatccat

SEQ ID NO: 111776 - DNA, 22 bp, Artificial sequence
  SiRNA target sequence
cacaaataaatgctaatccatg

SEQ ID NO: 111777 - DNA, 22 bp, Artificial sequence
  SiRNA target sequence
acaaataaatgctaatccatgg

SEQ ID NO: 111778 - DNA, 22 bp, Artificial sequence
  SiRNA target sequence
caaataaatgctaatccatggc

SEQ ID NO: 111779 - DNA, 22 bp, Artificial sequence
  SiRNA target sequence
aaataaatgctaatccatggca

SEQ ID NO: 111780 - DNA, 22 bp, Artificial sequence
  SiRNA target sequence
aataaatgctaatccatggcat

SEQ ID NO: 111781 - DNA, 22 bp, Artificial sequence
  SiRNA target sequence
ataaatgctaatccatggcatc

SEQ ID NO: 111782 - DNA, 22 bp, Artificial sequence
  SiRNA target sequence
taaatgctaatccatggcatct

SEQ ID NO: 111783 - DNA, 22 bp, Artificial sequence
  SiRNA target sequence
aaatgctaatccatggcatcta

SEQ ID NO: 111784 - DNA, 22 bp, Artificial sequence
  SiRNA target sequence
aatgctaatccatggcatctat

SEQ ID NO: 111785 - DNA, 22 bp, Artificial sequence
  SiRNA target sequence
atgctaatccatggcatctata

SEQ ID NO: 111786 - DNA, 22 bp, Artificial sequence
  SiRNA target sequence
tgctaatccatggcatctataa

SEQ ID NO: 111787 - DNA, 22 bp, Artificial sequence
  SiRNA target sequence
gctaatccatggcatctataag

SEQ ID NO: 111788 - DNA, 22 bp, Artificial sequence
  SiRNA target sequence
ctaatccatggcatctataaga

SEQ ID NO: 111789 - DNA, 22 bp, Artificial sequence
  SiRNA target sequence
taatccatggcatctataagat

SEQ ID NO: 111790 - DNA, 22 bp, Artificial sequence
  SiRNA target sequence
aatccatggcatctataagatc

SEQ ID NO: 111791 - DNA, 22 bp, Artificial sequence
  SiRNA target sequence
atccatggcatctataagatcc

SEQ ID NO: 111792 - DNA, 22 bp, Artificial sequence
  SiRNA target sequence
tccatggcatctataagatcct

SEQ ID NO: 111793 - DNA, 22 bp, Artificial sequence
  SiRNA target sequence
ccatggcatctataagatccta

SEQ ID NO: 111794 - DNA, 22 bp, Artificial sequence
  SiRNA target sequence
catggcatctataagatcctat

SEQ ID NO: 111795 - DNA, 22 bp, Artificial sequence
  SiRNA target sequence
atggcatctataagatcctatg

SEQ ID NO: 111796 - DNA, 22 bp, Artificial sequence
  SiRNA target sequence
tggcatctataagatcctatga

SEQ ID NO: 111797 - DNA, 22 bp, Artificial sequence
  SiRNA target sequence
ggcatctataagatcctatgac

SEQ ID NO: 111798 - DNA, 22 bp, Artificial sequence
  SiRNA target sequence
gcatctataagatcctatgact

SEQ ID NO: 111799 - DNA, 22 bp, Artificial sequence
  SiRNA target sequence
catctataagatcctatgactt

SEQ ID NO: 111800 - DNA, 22 bp, Artificial sequence
  SiRNA target sequence
atctataagatcctatgacttt

SEQ ID NO: 111801 - DNA, 22 bp, Artificial sequence
  SiRNA target sequence
tctataagatcctatgacttta

SEQ ID NO: 111802 - DNA, 22 bp, Artificial sequence
  SiRNA target sequence
ctataagatcctatgactttat

SEQ ID NO: 111803 - DNA, 22 bp, Artificial sequence
  SiRNA target sequence
tataagatcctatgactttatc

SEQ ID NO: 111804 - DNA, 22 bp, Artificial sequence
  SiRNA target sequence
ataagatcctatgactttatca

SEQ ID NO: 111805 - DNA, 22 bp, Artificial sequence
  SiRNA target sequence
taagatcctatgactttatcat

SEQ ID NO: 111806 - DNA, 22 bp, Artificial sequence
  SiRNA target sequence
aagatcctatgactttatcatt

SEQ ID NO: 111807 - DNA, 22 bp, Artificial sequence
  SiRNA target sequence
agatcctatgactttatcattt

SEQ ID NO: 111808 - DNA, 22 bp, Artificial sequence
  SiRNA target sequence
gatcctatgactttatcatttt

SEQ ID NO: 111809 - DNA, 22 bp, Artificial sequence
  SiRNA target sequence
atcctatgactttatcattttt

SEQ ID NO: 111810 - DNA, 22 bp, Artificial sequence
  SiRNA target sequence
tcctatgactttatcattttta

SEQ ID NO: 111811 - DNA, 22 bp, Artificial sequence
  SiRNA target sequence
cctatgactttatcatttttat

SEQ ID NO: 111812 - DNA, 22 bp, Artificial sequence
  SiRNA target sequence
ctatgactttatcatttttatc

SEQ ID NO: 111813 - DNA, 22 bp, Artificial sequence
  SiRNA target sequence
tatgactttatcatttttatct

SEQ ID NO: 111814 - DNA, 22 bp, Artificial sequence
  SiRNA target sequence
atgactttatcatttttatcta

SEQ ID NO: 111815 - DNA, 22 bp, Artificial sequence
  SiRNA target sequence
tgactttatcatttttatctag

SEQ ID NO: 111816 - DNA, 22 bp, Artificial sequence
  SiRNA target sequence
gactttatcatttttatctagt

SEQ ID NO: 111817 - DNA, 22 bp, Artificial sequence
  SiRNA target sequence
actttatcatttttatctagta

SEQ ID NO: 111818 - DNA, 22 bp, Artificial sequence
  SiRNA target sequence
ctttatcatttttatctagtac

SEQ ID NO: 111819 - DNA, 22 bp, Artificial sequence
  SiRNA target sequence
tttatcatttttatctagtacc

SEQ ID NO: 111820 - DNA, 22 bp, Artificial sequence
  SiRNA target sequence
ttatcatttttatctagtacct

SEQ ID NO: 111821 - DNA, 22 bp, Artificial sequence
  SiRNA target sequence
tatcatttttatctagtacctt

SEQ ID NO: 111822 - DNA, 22 bp, Artificial sequence
  SiRNA target sequence
atcatttttatctagtaccttt

SEQ ID NO: 111823 - DNA, 22 bp, Artificial sequence
  SiRNA target sequence
tcatttttatctagtacctttt

SEQ ID NO: 111824 - DNA, 22 bp, Artificial sequence
  SiRNA target sequence
catttttatctagtaccttttg

SEQ ID NO: 111825 - DNA, 22 bp, Artificial sequence
  SiRNA target sequence
atttttatctagtaccttttgt

SEQ ID NO: 111826 - DNA, 22 bp, Artificial sequence
  SiRNA target sequence
tttttatctagtaccttttgta

SEQ ID NO: 111827 - DNA, 22 bp, Artificial sequence
  SiRNA target sequence
ttttatctagtaccttttgtaa

SEQ ID NO: 111828 - DNA, 22 bp, Artificial sequence
  SiRNA target sequence
tttatctagtaccttttgtaaa

SEQ ID NO: 111829 - DNA, 22 bp, Artificial sequence
  SiRNA target sequence
ttatctagtaccttttgtaaac

SEQ ID NO: 111830 - DNA, 22 bp, Artificial sequence
  SiRNA target sequence
tatctagtaccttttgtaaact

SEQ ID NO: 111831 - DNA, 22 bp, Artificial sequence
  SiRNA target sequence
atctagtaccttttgtaaactc

SEQ ID NO: 111832 - DNA, 22 bp, Artificial sequence
  SiRNA target sequence
tctagtaccttttgtaaactca

SEQ ID NO: 111833 - DNA, 22 bp, Artificial sequence
  SiRNA target sequence
ctagtaccttttgtaaactcat

SEQ ID NO: 111834 - DNA, 22 bp, Artificial sequence
  SiRNA target sequence
tagtaccttttgtaaactcata

SEQ ID NO: 111835 - DNA, 22 bp, Artificial sequence
  SiRNA target sequence
agtaccttttgtaaactcatat

SEQ ID NO: 111836 - DNA, 22 bp, Artificial sequence
  SiRNA target sequence
gtaccttttgtaaactcatata

SEQ ID NO: 111837 - DNA, 22 bp, Artificial sequence
  SiRNA target sequence
taccttttgtaaactcatataa

SEQ ID NO: 111838 - DNA, 22 bp, Artificial sequence
  SiRNA target sequence
accttttgtaaactcatataaa

SEQ ID NO: 111839 - DNA, 22 bp, Artificial sequence
  SiRNA target sequence
ccttttgtaaactcatataaat

SEQ ID NO: 111840 - DNA, 22 bp, Artificial sequence
  SiRNA target sequence
cttttgtaaactcatataaatg

SEQ ID NO: 111841 - DNA, 22 bp, Artificial sequence
  SiRNA target sequence
ttttgtaaactcatataaatgt

SEQ ID NO: 111842 - DNA, 22 bp, Artificial sequence
  SiRNA target sequence
tttgtaaactcatataaatgtt

SEQ ID NO: 111843 - DNA, 22 bp, Artificial sequence
  SiRNA target sequence
ttgtaaactcatataaatgttt

SEQ ID NO: 111844 - DNA, 22 bp, Artificial sequence
  SiRNA target sequence
tgtaaactcatataaatgtttt

SEQ ID NO: 111845 - DNA, 22 bp, Artificial sequence
  SiRNA target sequence
gtaaactcatataaatgttttc

SEQ ID NO: 111846 - DNA, 22 bp, Artificial sequence
  SiRNA target sequence
taaactcatataaatgttttcc

SEQ ID NO: 111847 - DNA, 22 bp, Artificial sequence
  SiRNA target sequence
aaactcatataaatgttttcct

SEQ ID NO: 111848 - DNA, 22 bp, Artificial sequence
  SiRNA target sequence
aactcatataaatgttttcctg

SEQ ID NO: 111849 - DNA, 22 bp, Artificial sequence
  SiRNA target sequence
actcatataaatgttttcctgt

SEQ ID NO: 111850 - DNA, 22 bp, Artificial sequence
  SiRNA target sequence
ctcatataaatgttttcctgtc

SEQ ID NO: 111851 - DNA, 22 bp, Artificial sequence
  SiRNA target sequence
tcatataaatgttttcctgtcc

SEQ ID NO: 111852 - DNA, 22 bp, Artificial sequence
  SiRNA target sequence
catataaatgttttcctgtcct

SEQ ID NO: 111853 - DNA, 22 bp, Artificial sequence
  SiRNA target sequence
atataaatgttttcctgtccta

SEQ ID NO: 111854 - DNA, 22 bp, Artificial sequence
  SiRNA target sequence
tataaatgttttcctgtcctat

SEQ ID NO: 111855 - DNA, 22 bp, Artificial sequence
  SiRNA target sequence
ataaatgttttcctgtcctatt

SEQ ID NO: 111856 - DNA, 22 bp, Artificial sequence
  SiRNA target sequence
taaatgttttcctgtcctatta

SEQ ID NO: 111857 - DNA, 22 bp, Artificial sequence
  SiRNA target sequence
aaatgttttcctgtcctattac

SEQ ID NO: 111858 - DNA, 22 bp, Artificial sequence
  SiRNA target sequence
aatgttttcctgtcctattact

SEQ ID NO: 111859 - DNA, 22 bp, Artificial sequence
  SiRNA target sequence
atgttttcctgtcctattacta

SEQ ID NO: 111860 - DNA, 22 bp, Artificial sequence
  SiRNA target sequence
tgttttcctgtcctattactaa

SEQ ID NO: 111861 - DNA, 22 bp, Artificial sequence
  SiRNA target sequence
gttttcctgtcctattactaaa

SEQ ID NO: 111862 - DNA, 22 bp, Artificial sequence
  SiRNA target sequence
ttttcctgtcctattactaaat

SEQ ID NO: 111863 - DNA, 22 bp, Artificial sequence
  SiRNA target sequence
tttcctgtcctattactaaatg

SEQ ID NO: 111864 - DNA, 22 bp, Artificial sequence
  SiRNA target sequence
ttcctgtcctattactaaatga

SEQ ID NO: 111865 - DNA, 22 bp, Artificial sequence
  SiRNA target sequence
tcctgtcctattactaaatgac

SEQ ID NO: 111866 - DNA, 22 bp, Artificial sequence
  SiRNA target sequence
cctgtcctattactaaatgaca

SEQ ID NO: 111867 - DNA, 22 bp, Artificial sequence
  SiRNA target sequence
ctgtcctattactaaatgacag

SEQ ID NO: 111868 - DNA, 22 bp, Artificial sequence
  SiRNA target sequence
tgtcctattactaaatgacaga

SEQ ID NO: 111869 - DNA, 22 bp, Artificial sequence
  SiRNA target sequence
gtcctattactaaatgacagaa

SEQ ID NO: 111870 - DNA, 22 bp, Artificial sequence
  SiRNA target sequence
tcctattactaaatgacagaag

SEQ ID NO: 111871 - DNA, 22 bp, Artificial sequence
  SiRNA target sequence
cctattactaaatgacagaagc

SEQ ID NO: 111872 - DNA, 22 bp, Artificial sequence
  SiRNA target sequence
ctattactaaatgacagaagcc

SEQ ID NO: 111873 - DNA, 22 bp, Artificial sequence
  SiRNA target sequence
tattactaaatgacagaagcct

SEQ ID NO: 111874 - DNA, 22 bp, Artificial sequence
  SiRNA target sequence
attactaaatgacagaagcctc

SEQ ID NO: 111875 - DNA, 22 bp, Artificial sequence
  SiRNA target sequence
ttactaaatgacagaagcctct

SEQ ID NO: 111876 - DNA, 22 bp, Artificial sequence
  SiRNA target sequence
tactaaatgacagaagcctctt

SEQ ID NO: 111877 - DNA, 22 bp, Artificial sequence
  SiRNA target sequence
actaaatgacagaagcctctta

SEQ ID NO: 111878 - DNA, 22 bp, Artificial sequence
  SiRNA target sequence
ctaaatgacagaagcctcttat

SEQ ID NO: 111879 - DNA, 22 bp, Artificial sequence
  SiRNA target sequence
taaatgacagaagcctcttata

SEQ ID NO: 111880 - DNA, 22 bp, Artificial sequence
  SiRNA target sequence
aaatgacagaagcctcttatat

SEQ ID NO: 111881 - DNA, 22 bp, Artificial sequence
  SiRNA target sequence
aatgacagaagcctcttatatt

SEQ ID NO: 111882 - DNA, 22 bp, Artificial sequence
  SiRNA target sequence
atgacagaagcctcttatattt

SEQ ID NO: 111883 - DNA, 22 bp, Artificial sequence
  SiRNA target sequence
tgacagaagcctcttatatttc

SEQ ID NO: 111884 - DNA, 22 bp, Artificial sequence
  SiRNA target sequence
gacagaagcctcttatatttcc

SEQ ID NO: 111885 - DNA, 22 bp, Artificial sequence
  SiRNA target sequence
acagaagcctcttatatttcct

SEQ ID NO: 111886 - DNA, 22 bp, Artificial sequence
  SiRNA target sequence
cagaagcctcttatatttcctt

SEQ ID NO: 111887 - DNA, 22 bp, Artificial sequence
  SiRNA target sequence
agaagcctcttatatttccttt

SEQ ID NO: 111888 - DNA, 22 bp, Artificial sequence
  SiRNA target sequence
gaagcctcttatatttcctttt

SEQ ID NO: 111889 - DNA, 22 bp, Artificial sequence
  SiRNA target sequence
aagcctcttatatttccttttt

SEQ ID NO: 111890 - DNA, 22 bp, Artificial sequence
  SiRNA target sequence
agcctcttatatttcctttttt

SEQ ID NO: 111891 - DNA, 22 bp, Artificial sequence
  SiRNA target sequence
gcctcttatatttcctttttta

SEQ ID NO: 111892 - DNA, 22 bp, Artificial sequence
  SiRNA target sequence
cctcttatatttccttttttat

SEQ ID NO: 111893 - DNA, 22 bp, Artificial sequence
  SiRNA target sequence
ctcttatatttccttttttata

SEQ ID NO: 111894 - DNA, 22 bp, Artificial sequence
  SiRNA target sequence
tcttatatttccttttttatac

SEQ ID NO: 111895 - DNA, 22 bp, Artificial sequence
  SiRNA target sequence
cttatatttccttttttatact

SEQ ID NO: 111896 - DNA, 22 bp, Artificial sequence
  SiRNA target sequence
ttatatttccttttttatactt

SEQ ID NO: 111897 - DNA, 22 bp, Artificial sequence
  SiRNA target sequence
tatatttccttttttatactta

SEQ ID NO: 111898 - DNA, 22 bp, Artificial sequence
  SiRNA target sequence
atatttccttttttatacttag

SEQ ID NO: 111899 - DNA, 22 bp, Artificial sequence
  SiRNA target sequence
tatttccttttttatacttaga

SEQ ID NO: 111900 - DNA, 22 bp, Artificial sequence
  SiRNA target sequence
atttccttttttatacttagag

SEQ ID NO: 111901 - DNA, 22 bp, Artificial sequence
  SiRNA target sequence
tttccttttttatacttagagt

SEQ ID NO: 111902 - DNA, 22 bp, Artificial sequence
  SiRNA target sequence
ttccttttttatacttagagtt

SEQ ID NO: 111903 - DNA, 22 bp, Artificial sequence
  SiRNA target sequence
tccttttttatacttagagtta

SEQ ID NO: 111904 - DNA, 22 bp, Artificial sequence
  SiRNA target sequence
ccttttttatacttagagttag

SEQ ID NO: 111905 - DNA, 22 bp, Artificial sequence
  SiRNA target sequence
cttttttatacttagagttagc

SEQ ID NO: 111906 - DNA, 22 bp, Artificial sequence
  SiRNA target sequence
ttttttatacttagagttagca

SEQ ID NO: 111907 - DNA, 22 bp, Artificial sequence
  SiRNA target sequence
tttttatacttagagttagcat

SEQ ID NO: 111908 - DNA, 22 bp, Artificial sequence
  SiRNA target sequence
ttttatacttagagttagcata

SEQ ID NO: 111909 - DNA, 22 bp, Artificial sequence
  SiRNA target sequence
tttatacttagagttagcatat

SEQ ID NO: 111910 - DNA, 22 bp, Artificial sequence
  SiRNA target sequence
ttatacttagagttagcatatt

SEQ ID NO: 111911 - DNA, 22 bp, Artificial sequence
  SiRNA target sequence
tatacttagagttagcatattc

SEQ ID NO: 111912 - DNA, 22 bp, Artificial sequence
  SiRNA target sequence
atacttagagttagcatattct

SEQ ID NO: 111913 - DNA, 22 bp, Artificial sequence
  SiRNA target sequence
tacttagagttagcatattctt

SEQ ID NO: 111914 - DNA, 22 bp, Artificial sequence
  SiRNA target sequence
acttagagttagcatattcttc

SEQ ID NO: 111915 - DNA, 22 bp, Artificial sequence
  SiRNA target sequence
cttagagttagcatattcttcg

SEQ ID NO: 111916 - DNA, 22 bp, Artificial sequence
  SiRNA target sequence
ttagagttagcatattcttcga

SEQ ID NO: 111917 - DNA, 22 bp, Artificial sequence
  SiRNA target sequence
tagagttagcatattcttcgat

SEQ ID NO: 111918 - DNA, 22 bp, Artificial sequence
  SiRNA target sequence
agagttagcatattcttcgata

SEQ ID NO: 111919 - DNA, 22 bp, Artificial sequence
  SiRNA target sequence
gagttagcatattcttcgataa

SEQ ID NO: 111920 - DNA, 22 bp, Artificial sequence
  SiRNA target sequence
agttagcatattcttcgataag

SEQ ID NO: 111921 - DNA, 22 bp, Artificial sequence
  SiRNA target sequence
gttagcatattcttcgataaga

SEQ ID NO: 111922 - DNA, 22 bp, Artificial sequence
  SiRNA target sequence
ttagcatattcttcgataagac

SEQ ID NO: 111923 - DNA, 22 bp, Artificial sequence
  SiRNA target sequence
tagcatattcttcgataagacg

SEQ ID NO: 111924 - DNA, 22 bp, Artificial sequence
  SiRNA target sequence
agcatattcttcgataagacgt

SEQ ID NO: 111925 - DNA, 22 bp, Artificial sequence
  SiRNA target sequence
gcatattcttcgataagacgta

SEQ ID NO: 111926 - DNA, 22 bp, Artificial sequence
  SiRNA target sequence
catattcttcgataagacgtag

SEQ ID NO: 111927 - DNA, 22 bp, Artificial sequence
  SiRNA target sequence
atattcttcgataagacgtaga

SEQ ID NO: 111928 - DNA, 22 bp, Artificial sequence
  SiRNA target sequence
tattcttcgataagacgtagaa

SEQ ID NO: 111929 - DNA, 22 bp, Artificial sequence
  SiRNA target sequence
attcttcgataagacgtagaat

SEQ ID NO: 111930 - DNA, 22 bp, Artificial sequence
  SiRNA target sequence
ttcttcgataagacgtagaatt

SEQ ID NO: 111931 - DNA, 22 bp, Artificial sequence
  SiRNA target sequence
tcttcgataagacgtagaatta

SEQ ID NO: 111932 - DNA, 22 bp, Artificial sequence
  SiRNA target sequence
cttcgataagacgtagaattaa

SEQ ID NO: 111933 - DNA, 22 bp, Artificial sequence
  SiRNA target sequence
ttcgataagacgtagaattaac

SEQ ID NO: 111934 - DNA, 22 bp, Artificial sequence
  SiRNA target sequence
tcgataagacgtagaattaaca

SEQ ID NO: 111935 - DNA, 22 bp, Artificial sequence
  SiRNA target sequence
cgataagacgtagaattaacat

SEQ ID NO: 111936 - DNA, 22 bp, Artificial sequence
  SiRNA target sequence
gataagacgtagaattaacata

SEQ ID NO: 111937 - DNA, 22 bp, Artificial sequence
  SiRNA target sequence
ataagacgtagaattaacatat

SEQ ID NO: 111938 - DNA, 22 bp, Artificial sequence
  SiRNA target sequence
taagacgtagaattaacatatt

SEQ ID NO: 111939 - DNA, 22 bp, Artificial sequence
  SiRNA target sequence
aagacgtagaattaacatattt

SEQ ID NO: 111940 - DNA, 22 bp, Artificial sequence
  SiRNA target sequence
agacgtagaattaacatatttc

SEQ ID NO: 111941 - DNA, 22 bp, Artificial sequence
  SiRNA target sequence
gacgtagaattaacatatttct

SEQ ID NO: 111942 - DNA, 22 bp, Artificial sequence
  SiRNA target sequence
acgtagaattaacatatttcta

SEQ ID NO: 111943 - DNA, 22 bp, Artificial sequence
  SiRNA target sequence
cgtagaattaacatatttctat

SEQ ID NO: 111944 - DNA, 22 bp, Artificial sequence
  SiRNA target sequence
gtagaattaacatatttctata

SEQ ID NO: 111945 - DNA, 22 bp, Artificial sequence
  SiRNA target sequence
tagaattaacatatttctataa

SEQ ID NO: 111946 - DNA, 22 bp, Artificial sequence
  SiRNA target sequence
agaattaacatatttctataaa

SEQ ID NO: 111947 - DNA, 22 bp, Artificial sequence
  SiRNA target sequence
gaattaacatatttctataaac

SEQ ID NO: 111948 - DNA, 22 bp, Artificial sequence
  SiRNA target sequence
aattaacatatttctataaaca

SEQ ID NO: 111949 - DNA, 22 bp, Artificial sequence
  SiRNA target sequence
attaacatatttctataaacat

SEQ ID NO: 111950 - DNA, 22 bp, Artificial sequence
  SiRNA target sequence
ttaacatatttctataaacatc

SEQ ID NO: 111951 - DNA, 22 bp, Artificial sequence
  SiRNA target sequence
taacatatttctataaacatct

SEQ ID NO: 111952 - DNA, 22 bp, Artificial sequence
  SiRNA target sequence
aacatatttctataaacatctt

SEQ ID NO: 111953 - DNA, 22 bp, Artificial sequence
  SiRNA target sequence
acatatttctataaacatcttg

SEQ ID NO: 111954 - DNA, 22 bp, Artificial sequence
  SiRNA target sequence
catatttctataaacatcttgt

SEQ ID NO: 111955 - DNA, 22 bp, Artificial sequence
  SiRNA target sequence
atatttctataaacatcttgta

SEQ ID NO: 111956 - DNA, 22 bp, Artificial sequence
  SiRNA target sequence
tatttctataaacatcttgtac

SEQ ID NO: 111957 - DNA, 22 bp, Artificial sequence
  SiRNA target sequence
atttctataaacatcttgtaca

SEQ ID NO: 111958 - DNA, 22 bp, Artificial sequence
  SiRNA target sequence
tttctataaacatcttgtacaa

SEQ ID NO: 111959 - DNA, 22 bp, Artificial sequence
  SiRNA target sequence
ttctataaacatcttgtacaag

SEQ ID NO: 111960 - DNA, 22 bp, Artificial sequence
  SiRNA target sequence
tctataaacatcttgtacaagt

SEQ ID NO: 111961 - DNA, 22 bp, Artificial sequence
  SiRNA target sequence
ctataaacatcttgtacaagtt

SEQ ID NO: 111962 - DNA, 22 bp, Artificial sequence
  SiRNA target sequence
tataaacatcttgtacaagttc

SEQ ID NO: 111963 - DNA, 22 bp, Artificial sequence
  SiRNA target sequence
ataaacatcttgtacaagttct

SEQ ID NO: 111964 - DNA, 22 bp, Artificial sequence
  SiRNA target sequence
taaacatcttgtacaagttctt

SEQ ID NO: 111965 - DNA, 22 bp, Artificial sequence
  SiRNA target sequence
aaacatcttgtacaagttcttt

SEQ ID NO: 111966 - DNA, 22 bp, Artificial sequence
  SiRNA target sequence
aacatcttgtacaagttctttg

SEQ ID NO: 111967 - DNA, 22 bp, Artificial sequence
  SiRNA target sequence
acatcttgtacaagttctttgt

SEQ ID NO: 111968 - DNA, 22 bp, Artificial sequence
  SiRNA target sequence
catcttgtacaagttctttgtt

SEQ ID NO: 111969 - DNA, 22 bp, Artificial sequence
  SiRNA target sequence
atcttgtacaagttctttgttt

SEQ ID NO: 111970 - DNA, 22 bp, Artificial sequence
  SiRNA target sequence
tcttgtacaagttctttgttta

SEQ ID NO: 111971 - DNA, 22 bp, Artificial sequence
  SiRNA target sequence
cttgtacaagttctttgtttaa

SEQ ID NO: 111972 - DNA, 22 bp, Artificial sequence
  SiRNA target sequence
ttgtacaagttctttgtttaaa

SEQ ID NO: 111973 - DNA, 22 bp, Artificial sequence
  SiRNA target sequence
tgtacaagttctttgtttaaag

SEQ ID NO: 111974 - DNA, 22 bp, Artificial sequence
  SiRNA target sequence
gtacaagttctttgtttaaagt

SEQ ID NO: 111975 - DNA, 22 bp, Artificial sequence
  SiRNA target sequence
tacaagttctttgtttaaagta

SEQ ID NO: 111976 - DNA, 22 bp, Artificial sequence
  SiRNA target sequence
acaagttctttgtttaaagtag

SEQ ID NO: 111977 - DNA, 22 bp, Artificial sequence
  SiRNA target sequence
caagttctttgtttaaagtagt

SEQ ID NO: 111978 - DNA, 22 bp, Artificial sequence
  SiRNA target sequence
aagttctttgtttaaagtagtt

SEQ ID NO: 111979 - DNA, 22 bp, Artificial sequence
  SiRNA target sequence
agttctttgtttaaagtagttt

SEQ ID NO: 111980 - DNA, 22 bp, Artificial sequence
  SiRNA target sequence
gttctttgtttaaagtagtttt

SEQ ID NO: 111981 - DNA, 22 bp, Artificial sequence
  SiRNA target sequence
ttctttgtttaaagtagttttc

SEQ ID NO: 111982 - DNA, 22 bp, Artificial sequence
  SiRNA target sequence
tctttgtttaaagtagttttca

SEQ ID NO: 111983 - DNA, 22 bp, Artificial sequence
  SiRNA target sequence
ctttgtttaaagtagttttcag

SEQ ID NO: 111984 - DNA, 22 bp, Artificial sequence
  SiRNA target sequence
tttgtttaaagtagttttcagt

SEQ ID NO: 111985 - DNA, 22 bp, Artificial sequence
  SiRNA target sequence
ttgtttaaagtagttttcagtt

SEQ ID NO: 111986 - DNA, 22 bp, Artificial sequence
  SiRNA target sequence
tgtttaaagtagttttcagttt

SEQ ID NO: 111987 - DNA, 22 bp, Artificial sequence
  SiRNA target sequence
gtttaaagtagttttcagttta

SEQ ID NO: 111988 - DNA, 22 bp, Artificial sequence
  SiRNA target sequence
tttaaagtagttttcagtttaa

SEQ ID NO: 111989 - DNA, 22 bp, Artificial sequence
  SiRNA target sequence
ttaaagtagttttcagtttaac

SEQ ID NO: 111990 - DNA, 22 bp, Artificial sequence
  SiRNA target sequence
taaagtagttttcagtttaact

SEQ ID NO: 111991 - DNA, 22 bp, Artificial sequence
  SiRNA target sequence
aaagtagttttcagtttaactg

SEQ ID NO: 111992 - DNA, 22 bp, Artificial sequence
  SiRNA target sequence
aagtagttttcagtttaactgt

SEQ ID NO: 111993 - DNA, 22 bp, Artificial sequence
  SiRNA target sequence
agtagttttcagtttaactgta

SEQ ID NO: 111994 - DNA, 22 bp, Artificial sequence
  SiRNA target sequence
gtagttttcagtttaactgtat

SEQ ID NO: 111995 - DNA, 22 bp, Artificial sequence
  SiRNA target sequence
tagttttcagtttaactgtatt

SEQ ID NO: 111996 - DNA, 22 bp, Artificial sequence
  SiRNA target sequence
agttttcagtttaactgtattt

SEQ ID NO: 111997 - DNA, 22 bp, Artificial sequence
  SiRNA target sequence
gttttcagtttaactgtatttt

SEQ ID NO: 111998 - DNA, 22 bp, Artificial sequence
  SiRNA target sequence
ttttcagtttaactgtattttt

SEQ ID NO: 111999 - DNA, 22 bp, Artificial sequence
  SiRNA target sequence
tttcagtttaactgtattttta

SEQ ID NO: 112000 - DNA, 22 bp, Artificial sequence
  SiRNA target sequence
ttcagtttaactgtatttttat

SEQ ID NO: 112001 - DNA, 22 bp, Artificial sequence
  SiRNA target sequence
tcagtttaactgtatttttatc

SEQ ID NO: 112002 - DNA, 22 bp, Artificial sequence
  SiRNA target sequence
cagtttaactgtatttttatct

SEQ ID NO: 112003 - DNA, 22 bp, Artificial sequence
  SiRNA target sequence
agtttaactgtatttttatcta

SEQ ID NO: 112004 - DNA, 22 bp, Artificial sequence
  SiRNA target sequence
gtttaactgtatttttatctac

SEQ ID NO: 112005 - DNA, 22 bp, Artificial sequence
  SiRNA target sequence
tttaactgtatttttatctacc

SEQ ID NO: 112006 - DNA, 22 bp, Artificial sequence
  SiRNA target sequence
ttaactgtatttttatctacca

SEQ ID NO: 112007 - DNA, 22 bp, Artificial sequence
  SiRNA target sequence
taactgtatttttatctaccaa

SEQ ID NO: 112008 - DNA, 22 bp, Artificial sequence
  SiRNA target sequence
aactgtatttttatctaccaaa

SEQ ID NO: 112009 - DNA, 22 bp, Artificial sequence
  SiRNA target sequence
actgtatttttatctaccaaat

SEQ ID NO: 112010 - DNA, 22 bp, Artificial sequence
  SiRNA target sequence
ctgtatttttatctaccaaata

SEQ ID NO: 112011 - DNA, 22 bp, Artificial sequence
  SiRNA target sequence
tgtatttttatctaccaaataa

SEQ ID NO: 112012 - DNA, 22 bp, Artificial sequence
  SiRNA target sequence
gtatttttatctaccaaataat

SEQ ID NO: 112013 - DNA, 22 bp, Artificial sequence
  SiRNA target sequence
tatttttatctaccaaataata

SEQ ID NO: 112014 - DNA, 22 bp, Artificial sequence
  SiRNA target sequence
atttttatctaccaaataataa

SEQ ID NO: 112015 - DNA, 22 bp, Artificial sequence
  SiRNA target sequence
tttttatctaccaaataataat

SEQ ID NO: 112016 - DNA, 22 bp, Artificial sequence
  SiRNA target sequence
ttttatctaccaaataataatc

SEQ ID NO: 112017 - DNA, 22 bp, Artificial sequence
  SiRNA target sequence
tttatctaccaaataataatct

SEQ ID NO: 112018 - DNA, 22 bp, Artificial sequence
  SiRNA target sequence
ttatctaccaaataataatcta

SEQ ID NO: 112019 - DNA, 22 bp, Artificial sequence
  SiRNA target sequence
tatctaccaaataataatctat

SEQ ID NO: 112020 - DNA, 22 bp, Artificial sequence
  SiRNA target sequence
atctaccaaataataatctatc

SEQ ID NO: 112021 - DNA, 22 bp, Artificial sequence
  SiRNA target sequence
tctaccaaataataatctatca

SEQ ID NO: 112022 - DNA, 22 bp, Artificial sequence
  SiRNA target sequence
ctaccaaataataatctatcat

SEQ ID NO: 112023 - DNA, 23 bp, Artificial sequence
  SiRNA target sequence
ttattcagaataaacatctttta

SEQ ID NO: 112024 - DNA, 23 bp, Artificial sequence
  SiRNA target sequence
tattcagaataaacatcttttaa

SEQ ID NO: 112025 - DNA, 23 bp, Artificial sequence
  SiRNA target sequence
attcagaataaacatcttttaaa

SEQ ID NO: 112026 - DNA, 23 bp, Artificial sequence
  SiRNA target sequence
ttcagaataaacatcttttaaaa

SEQ ID NO: 112027 - DNA, 23 bp, Artificial sequence
  SiRNA target sequence
tcagaataaacatcttttaaaag

SEQ ID NO: 112028 - DNA, 23 bp, Artificial sequence
  SiRNA target sequence
cagaataaacatcttttaaaagt

SEQ ID NO: 112029 - DNA, 23 bp, Artificial sequence
  SiRNA target sequence
agaataaacatcttttaaaagtt

SEQ ID NO: 112030 - DNA, 23 bp, Artificial sequence
  SiRNA target sequence
gaataaacatcttttaaaagttc

SEQ ID NO: 112031 - DNA, 23 bp, Artificial sequence
  SiRNA target sequence
aataaacatcttttaaaagttca

SEQ ID NO: 112032 - DNA, 23 bp, Artificial sequence
  SiRNA target sequence
ataaacatcttttaaaagttcat

SEQ ID NO: 112033 - DNA, 23 bp, Artificial sequence
  SiRNA target sequence
taaacatcttttaaaagttcatc

SEQ ID NO: 112034 - DNA, 23 bp, Artificial sequence
  SiRNA target sequence
aaacatcttttaaaagttcatcg

SEQ ID NO: 112035 - DNA, 23 bp, Artificial sequence
  SiRNA target sequence
aacatcttttaaaagttcatcga

SEQ ID NO: 112036 - DNA, 23 bp, Artificial sequence
  SiRNA target sequence
acatcttttaaaagttcatcgat

SEQ ID NO: 112037 - DNA, 23 bp, Artificial sequence
  SiRNA target sequence
catcttttaaaagttcatcgata

SEQ ID NO: 112038 - DNA, 23 bp, Artificial sequence
  SiRNA target sequence
atcttttaaaagttcatcgatat

SEQ ID NO: 112039 - DNA, 23 bp, Artificial sequence
  SiRNA target sequence
tcttttaaaagttcatcgatatc

SEQ ID NO: 112040 - DNA, 23 bp, Artificial sequence
  SiRNA target sequence
cttttaaaagttcatcgatatcg

SEQ ID NO: 112041 - DNA, 23 bp, Artificial sequence
  SiRNA target sequence
ttttaaaagttcatcgatatcgg

SEQ ID NO: 112042 - DNA, 23 bp, Artificial sequence
  SiRNA target sequence
tttaaaagttcatcgatatcggg

SEQ ID NO: 112043 - DNA, 23 bp, Artificial sequence
  SiRNA target sequence
ttaaaagttcatcgatatcgggt

SEQ ID NO: 112044 - DNA, 23 bp, Artificial sequence
  SiRNA target sequence
taaaagttcatcgatatcgggtt

SEQ ID NO: 112045 - DNA, 23 bp, Artificial sequence
  SiRNA target sequence
aaaagttcatcgatatcgggttc

SEQ ID NO: 112046 - DNA, 23 bp, Artificial sequence
  SiRNA target sequence
aaagttcatcgatatcgggttct

SEQ ID NO: 112047 - DNA, 23 bp, Artificial sequence
  SiRNA target sequence
aagttcatcgatatcgggttctt

SEQ ID NO: 112048 - DNA, 23 bp, Artificial sequence
  SiRNA target sequence
agttcatcgatatcgggttcttt

SEQ ID NO: 112049 - DNA, 23 bp, Artificial sequence
  SiRNA target sequence
gttcatcgatatcgggttcttta

SEQ ID NO: 112050 - DNA, 23 bp, Artificial sequence
  SiRNA target sequence
ttcatcgatatcgggttctttag

SEQ ID NO: 112051 - DNA, 23 bp, Artificial sequence
  SiRNA target sequence
tcatcgatatcgggttctttaga

SEQ ID NO: 112052 - DNA, 23 bp, Artificial sequence
  SiRNA target sequence
catcgatatcgggttctttagaa

SEQ ID NO: 112053 - DNA, 23 bp, Artificial sequence
  SiRNA target sequence
atcgatatcgggttctttagaaa

SEQ ID NO: 112054 - DNA, 23 bp, Artificial sequence
  SiRNA target sequence
tcgatatcgggttctttagaaaa

SEQ ID NO: 112055 - DNA, 23 bp, Artificial sequence
  SiRNA target sequence
cgatatcgggttctttagaaaaa

SEQ ID NO: 112056 - DNA, 23 bp, Artificial sequence
  SiRNA target sequence
gatatcgggttctttagaaaaaa

SEQ ID NO: 112057 - DNA, 23 bp, Artificial sequence
  SiRNA target sequence
atatcgggttctttagaaaaaat

SEQ ID NO: 112058 - DNA, 23 bp, Artificial sequence
  SiRNA target sequence
tatcgggttctttagaaaaaata

SEQ ID NO: 112059 - DNA, 23 bp, Artificial sequence
  SiRNA target sequence
atcgggttctttagaaaaaataa

SEQ ID NO: 112060 - DNA, 23 bp, Artificial sequence
  SiRNA target sequence
tcgggttctttagaaaaaataac

SEQ ID NO: 112061 - DNA, 23 bp, Artificial sequence
  SiRNA target sequence
cgggttctttagaaaaaataact

SEQ ID NO: 112062 - DNA, 23 bp, Artificial sequence
  SiRNA target sequence
gggttctttagaaaaaataactt

SEQ ID NO: 112063 - DNA, 23 bp, Artificial sequence
  SiRNA target sequence
ggttctttagaaaaaataacttt

SEQ ID NO: 112064 - DNA, 23 bp, Artificial sequence
  SiRNA target sequence
gttctttagaaaaaataactttt

SEQ ID NO: 112065 - DNA, 23 bp, Artificial sequence
  SiRNA target sequence
ttctttagaaaaaataacttttt

SEQ ID NO: 112066 - DNA, 23 bp, Artificial sequence
  SiRNA target sequence
tctttagaaaaaataactttttt

SEQ ID NO: 112067 - DNA, 23 bp, Artificial sequence
  SiRNA target sequence
ctttagaaaaaataactttttta

SEQ ID NO: 112068 - DNA, 23 bp, Artificial sequence
  SiRNA target sequence
tttagaaaaaataacttttttaa

SEQ ID NO: 112069 - DNA, 23 bp, Artificial sequence
  SiRNA target sequence
ttagaaaaaataacttttttaac

SEQ ID NO: 112070 - DNA, 23 bp, Artificial sequence
  SiRNA target sequence
tagaaaaaataacttttttaaca

SEQ ID NO: 112071 - DNA, 23 bp, Artificial sequence
  SiRNA target sequence
agaaaaaataacttttttaacac

SEQ ID NO: 112072 - DNA, 23 bp, Artificial sequence
  SiRNA target sequence
gaaaaaataacttttttaacacc

SEQ ID NO: 112073 - DNA, 23 bp, Artificial sequence
  SiRNA target sequence
aaaaaataacttttttaacacct

SEQ ID NO: 112074 - DNA, 23 bp, Artificial sequence
  SiRNA target sequence
aaaaataacttttttaacacctt

SEQ ID NO: 112075 - DNA, 23 bp, Artificial sequence
  SiRNA target sequence
aaaataacttttttaacaccttc

SEQ ID NO: 112076 - DNA, 23 bp, Artificial sequence
  SiRNA target sequence
aaataacttttttaacaccttct

SEQ ID NO: 112077 - DNA, 23 bp, Artificial sequence
  SiRNA target sequence
aataacttttttaacaccttctt

SEQ ID NO: 112078 - DNA, 23 bp, Artificial sequence
  SiRNA target sequence
ataacttttttaacaccttcttc

SEQ ID NO: 112079 - DNA, 23 bp, Artificial sequence
  SiRNA target sequence
taacttttttaacaccttcttca

SEQ ID NO: 112080 - DNA, 23 bp, Artificial sequence
  SiRNA target sequence
aacttttttaacaccttcttcaa

SEQ ID NO: 112081 - DNA, 23 bp, Artificial sequence
  SiRNA target sequence
acttttttaacaccttcttcaaa

SEQ ID NO: 112082 - DNA, 23 bp, Artificial sequence
  SiRNA target sequence
cttttttaacaccttcttcaaag

SEQ ID NO: 112083 - DNA, 23 bp, Artificial sequence
  SiRNA target sequence
ttttttaacaccttcttcaaagc

SEQ ID NO: 112084 - DNA, 23 bp, Artificial sequence
  SiRNA target sequence
tttttaacaccttcttcaaagca

SEQ ID NO: 112085 - DNA, 23 bp, Artificial sequence
  SiRNA target sequence
ttttaacaccttcttcaaagcag

SEQ ID NO: 112086 - DNA, 23 bp, Artificial sequence
  SiRNA target sequence
tttaacaccttcttcaaagcagg

SEQ ID NO: 112087 - DNA, 23 bp, Artificial sequence
  SiRNA target sequence
ttaacaccttcttcaaagcagga

SEQ ID NO: 112088 - DNA, 23 bp, Artificial sequence
  SiRNA target sequence
taacaccttcttcaaagcaggaa

SEQ ID NO: 112089 - DNA, 23 bp, Artificial sequence
  SiRNA target sequence
aacaccttcttcaaagcaggaaa

SEQ ID NO: 112090 - DNA, 23 bp, Artificial sequence
  SiRNA target sequence
acaccttcttcaaagcaggaaat

SEQ ID NO: 112091 - DNA, 23 bp, Artificial sequence
  SiRNA target sequence
caccttcttcaaagcaggaaatt

SEQ ID NO: 112092 - DNA, 23 bp, Artificial sequence
  SiRNA target sequence
accttcttcaaagcaggaaatta

SEQ ID NO: 112093 - DNA, 23 bp, Artificial sequence
  SiRNA target sequence
ccttcttcaaagcaggaaattac

SEQ ID NO: 112094 - DNA, 23 bp, Artificial sequence
  SiRNA target sequence
cttcttcaaagcaggaaattacc

SEQ ID NO: 112095 - DNA, 23 bp, Artificial sequence
  SiRNA target sequence
ttcttcaaagcaggaaattacct

SEQ ID NO: 112096 - DNA, 23 bp, Artificial sequence
  SiRNA target sequence
tcttcaaagcaggaaattacctc

SEQ ID NO: 112097 - DNA, 23 bp, Artificial sequence
  SiRNA target sequence
cttcaaagcaggaaattacctca

SEQ ID NO: 112098 - DNA, 23 bp, Artificial sequence
  SiRNA target sequence
ttcaaagcaggaaattacctcat

SEQ ID NO: 112099 - DNA, 23 bp, Artificial sequence
  SiRNA target sequence
tcaaagcaggaaattacctcatc

SEQ ID NO: 112100 - DNA, 23 bp, Artificial sequence
  SiRNA target sequence
caaagcaggaaattacctcatct

SEQ ID NO: 112101 - DNA, 23 bp, Artificial sequence
  SiRNA target sequence
aaagcaggaaattacctcatctt

SEQ ID NO: 112102 - DNA, 23 bp, Artificial sequence
  SiRNA target sequence
aagcaggaaattacctcatcttc

SEQ ID NO: 112103 - DNA, 23 bp, Artificial sequence
  SiRNA target sequence
agcaggaaattacctcatcttcg

SEQ ID NO: 112104 - DNA, 23 bp, Artificial sequence
  SiRNA target sequence
gcaggaaattacctcatcttcga

SEQ ID NO: 112105 - DNA, 23 bp, Artificial sequence
  SiRNA target sequence
caggaaattacctcatcttcgat

SEQ ID NO: 112106 - DNA, 23 bp, Artificial sequence
  SiRNA target sequence
aggaaattacctcatcttcgata

SEQ ID NO: 112107 - DNA, 23 bp, Artificial sequence
  SiRNA target sequence
ggaaattacctcatcttcgataa

SEQ ID NO: 112108 - DNA, 23 bp, Artificial sequence
  SiRNA target sequence
gaaattacctcatcttcgataat

SEQ ID NO: 112109 - DNA, 23 bp, Artificial sequence
  SiRNA target sequence
aaattacctcatcttcgataatt

SEQ ID NO: 112110 - DNA, 23 bp, Artificial sequence
  SiRNA target sequence
aattacctcatcttcgataattt

SEQ ID NO: 112111 - DNA, 23 bp, Artificial sequence
  SiRNA target sequence
attacctcatcttcgataatttt

SEQ ID NO: 112112 - DNA, 23 bp, Artificial sequence
  SiRNA target sequence
ttacctcatcttcgataattttt

SEQ ID NO: 112113 - DNA, 23 bp, Artificial sequence
  SiRNA target sequence
tacctcatcttcgataattttta

SEQ ID NO: 112114 - DNA, 23 bp, Artificial sequence
  SiRNA target sequence
acctcatcttcgataatttttac

SEQ ID NO: 112115 - DNA, 23 bp, Artificial sequence
  SiRNA target sequence
cctcatcttcgataatttttact

SEQ ID NO: 112116 - DNA, 23 bp, Artificial sequence
  SiRNA target sequence
ctcatcttcgataatttttactt

SEQ ID NO: 112117 - DNA, 23 bp, Artificial sequence
  SiRNA target sequence
tcatcttcgataatttttacttc

SEQ ID NO: 112118 - DNA, 23 bp, Artificial sequence
  SiRNA target sequence
catcttcgataatttttacttct

SEQ ID NO: 112119 - DNA, 23 bp, Artificial sequence
  SiRNA target sequence
atcttcgataatttttacttctt

SEQ ID NO: 112120 - DNA, 23 bp, Artificial sequence
  SiRNA target sequence
tcttcgataatttttacttcttc

SEQ ID NO: 112121 - DNA, 23 bp, Artificial sequence
  SiRNA target sequence
cttcgataatttttacttcttca

SEQ ID NO: 112122 - DNA, 23 bp, Artificial sequence
  SiRNA target sequence
ttcgataatttttacttcttcac

SEQ ID NO: 112123 - DNA, 23 bp, Artificial sequence
  SiRNA target sequence
tcgataatttttacttcttcaca

SEQ ID NO: 112124 - DNA, 23 bp, Artificial sequence
  SiRNA target sequence
cgataatttttacttcttcacaa

SEQ ID NO: 112125 - DNA, 23 bp, Artificial sequence
  SiRNA target sequence
gataatttttacttcttcacaag

SEQ ID NO: 112126 - DNA, 23 bp, Artificial sequence
  SiRNA target sequence
ataatttttacttcttcacaagt

SEQ ID NO: 112127 - DNA, 23 bp, Artificial sequence
  SiRNA target sequence
taatttttacttcttcacaagtc

SEQ ID NO: 112128 - DNA, 23 bp, Artificial sequence
  SiRNA target sequence
aatttttacttcttcacaagtcg

SEQ ID NO: 112129 - DNA, 23 bp, Artificial sequence
  SiRNA target sequence
atttttacttcttcacaagtcgc

SEQ ID NO: 112130 - DNA, 23 bp, Artificial sequence
  SiRNA target sequence
tttttacttcttcacaagtcgca

SEQ ID NO: 112131 - DNA, 23 bp, Artificial sequence
  SiRNA target sequence
ttttacttcttcacaagtcgcaa

SEQ ID NO: 112132 - DNA, 23 bp, Artificial sequence
  SiRNA target sequence
tttacttcttcacaagtcgcaaa

SEQ ID NO: 112133 - DNA, 23 bp, Artificial sequence
  SiRNA target sequence
ttacttcttcacaagtcgcaaat

SEQ ID NO: 112134 - DNA, 23 bp, Artificial sequence
  SiRNA target sequence
tacttcttcacaagtcgcaaatt

SEQ ID NO: 112135 - DNA, 23 bp, Artificial sequence
  SiRNA target sequence
acttcttcacaagtcgcaaattt

SEQ ID NO: 112136 - DNA, 23 bp, Artificial sequence
  SiRNA target sequence
cttcttcacaagtcgcaaatttt

SEQ ID NO: 112137 - DNA, 23 bp, Artificial sequence
  SiRNA target sequence
ttcttcacaagtcgcaaattttt

SEQ ID NO: 112138 - DNA, 23 bp, Artificial sequence
  SiRNA target sequence
tcttcacaagtcgcaaatttttg

SEQ ID NO: 112139 - DNA, 23 bp, Artificial sequence
  SiRNA target sequence
cttcacaagtcgcaaatttttgt

SEQ ID NO: 112140 - DNA, 23 bp, Artificial sequence
  SiRNA target sequence
ttcacaagtcgcaaatttttgta

SEQ ID NO: 112141 - DNA, 23 bp, Artificial sequence
  SiRNA target sequence
tcacaagtcgcaaatttttgtaa

SEQ ID NO: 112142 - DNA, 23 bp, Artificial sequence
  SiRNA target sequence
cacaagtcgcaaatttttgtaag

SEQ ID NO: 112143 - DNA, 23 bp, Artificial sequence
  SiRNA target sequence
acaagtcgcaaatttttgtaagt

SEQ ID NO: 112144 - DNA, 23 bp, Artificial sequence
  SiRNA target sequence
caagtcgcaaatttttgtaagtt

SEQ ID NO: 112145 - DNA, 23 bp, Artificial sequence
  SiRNA target sequence
aagtcgcaaatttttgtaagtta

SEQ ID NO: 112146 - DNA, 23 bp, Artificial sequence
  SiRNA target sequence
agtcgcaaatttttgtaagttat

SEQ ID NO: 112147 - DNA, 23 bp, Artificial sequence
  SiRNA target sequence
gtcgcaaatttttgtaagttatt

SEQ ID NO: 112148 - DNA, 23 bp, Artificial sequence
  SiRNA target sequence
tcgcaaatttttgtaagttattt

SEQ ID NO: 112149 - DNA, 23 bp, Artificial sequence
  SiRNA target sequence
cgcaaatttttgtaagttatttt

SEQ ID NO: 112150 - DNA, 23 bp, Artificial sequence
  SiRNA target sequence
gcaaatttttgtaagttattttt

SEQ ID NO: 112151 - DNA, 23 bp, Artificial sequence
  SiRNA target sequence
caaatttttgtaagttatttttt

SEQ ID NO: 112152 - DNA, 23 bp, Artificial sequence
  SiRNA target sequence
aaatttttgtaagttattttttg

SEQ ID NO: 112153 - DNA, 23 bp, Artificial sequence
  SiRNA target sequence
aatttttgtaagttattttttgc

SEQ ID NO: 112154 - DNA, 23 bp, Artificial sequence
  SiRNA target sequence
atttttgtaagttattttttgct

SEQ ID NO: 112155 - DNA, 23 bp, Artificial sequence
  SiRNA target sequence
tttttgtaagttattttttgctt

SEQ ID NO: 112156 - DNA, 23 bp, Artificial sequence
  SiRNA target sequence
ttttgtaagttattttttgcttc

SEQ ID NO: 112157 - DNA, 23 bp, Artificial sequence
  SiRNA target sequence
tttgtaagttattttttgcttct

SEQ ID NO: 112158 - DNA, 23 bp, Artificial sequence
  SiRNA target sequence
ttgtaagttattttttgcttctt

SEQ ID NO: 112159 - DNA, 23 bp, Artificial sequence
  SiRNA target sequence
tgtaagttattttttgcttcttt

SEQ ID NO: 112160 - DNA, 23 bp, Artificial sequence
  SiRNA target sequence
gtaagttattttttgcttcttta

SEQ ID NO: 112161 - DNA, 23 bp, Artificial sequence
  SiRNA target sequence
taagttattttttgcttctttaa

SEQ ID NO: 112162 - DNA, 23 bp, Artificial sequence
  SiRNA target sequence
aagttattttttgcttctttaag

SEQ ID NO: 112163 - DNA, 23 bp, Artificial sequence
  SiRNA target sequence
agttattttttgcttctttaagg

SEQ ID NO: 112164 - DNA, 23 bp, Artificial sequence
  SiRNA target sequence
gttattttttgcttctttaaggc

SEQ ID NO: 112165 - DNA, 23 bp, Artificial sequence
  SiRNA target sequence
ttattttttgcttctttaaggca

SEQ ID NO: 112166 - DNA, 23 bp, Artificial sequence
  SiRNA target sequence
tattttttgcttctttaaggcaa

SEQ ID NO: 112167 - DNA, 23 bp, Artificial sequence
  SiRNA target sequence
attttttgcttctttaaggcaat

SEQ ID NO: 112168 - DNA, 23 bp, Artificial sequence
  SiRNA target sequence
ttttttgcttctttaaggcaatc

SEQ ID NO: 112169 - DNA, 23 bp, Artificial sequence
  SiRNA target sequence
tttttgcttctttaaggcaatca

SEQ ID NO: 112170 - DNA, 23 bp, Artificial sequence
  SiRNA target sequence
ttttgcttctttaaggcaatcat

SEQ ID NO: 112171 - DNA, 23 bp, Artificial sequence
  SiRNA target sequence
tttgcttctttaaggcaatcatt

SEQ ID NO: 112172 - DNA, 23 bp, Artificial sequence
  SiRNA target sequence
ttgcttctttaaggcaatcatta

SEQ ID NO: 112173 - DNA, 23 bp, Artificial sequence
  SiRNA target sequence
tgcttctttaaggcaatcattat

SEQ ID NO: 112174 - DNA, 23 bp, Artificial sequence
  SiRNA target sequence
gcttctttaaggcaatcattatt

SEQ ID NO: 112175 - DNA, 23 bp, Artificial sequence
  SiRNA target sequence
cttctttaaggcaatcattattt

SEQ ID NO: 112176 - DNA, 23 bp, Artificial sequence
  SiRNA target sequence
ttctttaaggcaatcattatttt

SEQ ID NO: 112177 - DNA, 23 bp, Artificial sequence
  SiRNA target sequence
tctttaaggcaatcattattttt

SEQ ID NO: 112178 - DNA, 23 bp, Artificial sequence
  SiRNA target sequence
ctttaaggcaatcattatttttt

SEQ ID NO: 112179 - DNA, 23 bp, Artificial sequence
  SiRNA target sequence
tttaaggcaatcattattttttt

SEQ ID NO: 112180 - DNA, 23 bp, Artificial sequence
  SiRNA target sequence
ttaaggcaatcattatttttttt

SEQ ID NO: 112181 - DNA, 23 bp, Artificial sequence
  SiRNA target sequence
taaggcaatcattattttttttt

SEQ ID NO: 112182 - DNA, 23 bp, Artificial sequence
  SiRNA target sequence
aaggcaatcattatttttttttt

SEQ ID NO: 112183 - DNA, 23 bp, Artificial sequence
  SiRNA target sequence
aggcaatcattattttttttttc

SEQ ID NO: 112184 - DNA, 23 bp, Artificial sequence
  SiRNA target sequence
ggcaatcattattttttttttca

SEQ ID NO: 112185 - DNA, 23 bp, Artificial sequence
  SiRNA target sequence
gcaatcattattttttttttcat

SEQ ID NO: 112186 - DNA, 23 bp, Artificial sequence
  SiRNA target sequence
caatcattattttttttttcatt

SEQ ID NO: 112187 - DNA, 23 bp, Artificial sequence
  SiRNA target sequence
aatcattattttttttttcatta

SEQ ID NO: 112188 - DNA, 23 bp, Artificial sequence
  SiRNA target sequence
atcattattttttttttcattaa

SEQ ID NO: 112189 - DNA, 23 bp, Artificial sequence
  SiRNA target sequence
tcattattttttttttcattaat

SEQ ID NO: 112190 - DNA, 23 bp, Artificial sequence
  SiRNA target sequence
cattattttttttttcattaatt

SEQ ID NO: 112191 - DNA, 23 bp, Artificial sequence
  SiRNA target sequence
attattttttttttcattaattt

SEQ ID NO: 112192 - DNA, 23 bp, Artificial sequence
  SiRNA target sequence
ttattttttttttcattaatttc

SEQ ID NO: 112193 - DNA, 23 bp, Artificial sequence
  SiRNA target sequence
tattttttttttcattaatttcc

SEQ ID NO: 112194 - DNA, 23 bp, Artificial sequence
  SiRNA target sequence
attttttttttcattaatttcct

SEQ ID NO: 112195 - DNA, 23 bp, Artificial sequence
  SiRNA target sequence
ttttttttttcattaatttcctc

SEQ ID NO: 112196 - DNA, 23 bp, Artificial sequence
  SiRNA target sequence
tttttttttcattaatttcctcc

SEQ ID NO: 112197 - DNA, 23 bp, Artificial sequence
  SiRNA target sequence
ttttttttcattaatttcctccg

SEQ ID NO: 112198 - DNA, 23 bp, Artificial sequence
  SiRNA target sequence
tttttttcattaatttcctccgt

SEQ ID NO: 112199 - DNA, 23 bp, Artificial sequence
  SiRNA target sequence
ttttttcattaatttcctccgtg

SEQ ID NO: 112200 - DNA, 23 bp, Artificial sequence
  SiRNA target sequence
tttttcattaatttcctccgtgg

SEQ ID NO: 112201 - DNA, 23 bp, Artificial sequence
  SiRNA target sequence
ttttcattaatttcctccgtgga

SEQ ID NO: 112202 - DNA, 23 bp, Artificial sequence
  SiRNA target sequence
tttcattaatttcctccgtggat

SEQ ID NO: 112203 - DNA, 23 bp, Artificial sequence
  SiRNA target sequence
ttcattaatttcctccgtggatc

SEQ ID NO: 112204 - DNA, 23 bp, Artificial sequence
  SiRNA target sequence
tcattaatttcctccgtggatct

SEQ ID NO: 112205 - DNA, 23 bp, Artificial sequence
  SiRNA target sequence
cattaatttcctccgtggatctg

SEQ ID NO: 112206 - DNA, 23 bp, Artificial sequence
  SiRNA target sequence
attaatttcctccgtggatctgt

SEQ ID NO: 112207 - DNA, 23 bp, Artificial sequence
  SiRNA target sequence
ttaatttcctccgtggatctgta

SEQ ID NO: 112208 - DNA, 23 bp, Artificial sequence
  SiRNA target sequence
taatttcctccgtggatctgtaa

SEQ ID NO: 112209 - DNA, 23 bp, Artificial sequence
  SiRNA target sequence
aatttcctccgtggatctgtaaa

SEQ ID NO: 112210 - DNA, 23 bp, Artificial sequence
  SiRNA target sequence
atttcctccgtggatctgtaaaa

SEQ ID NO: 112211 - DNA, 23 bp, Artificial sequence
  SiRNA target sequence
tttcctccgtggatctgtaaaaa

SEQ ID NO: 112212 - DNA, 23 bp, Artificial sequence
  SiRNA target sequence
ttcctccgtggatctgtaaaaat

SEQ ID NO: 112213 - DNA, 23 bp, Artificial sequence
  SiRNA target sequence
tcctccgtggatctgtaaaaatc

SEQ ID NO: 112214 - DNA, 23 bp, Artificial sequence
  SiRNA target sequence
cctccgtggatctgtaaaaatcg

SEQ ID NO: 112215 - DNA, 23 bp, Artificial sequence
  SiRNA target sequence
ctccgtggatctgtaaaaatcgt

SEQ ID NO: 112216 - DNA, 23 bp, Artificial sequence
  SiRNA target sequence
tccgtggatctgtaaaaatcgtt

SEQ ID NO: 112217 - DNA, 23 bp, Artificial sequence
  SiRNA target sequence
ccgtggatctgtaaaaatcgtta

SEQ ID NO: 112218 - DNA, 23 bp, Artificial sequence
  SiRNA target sequence
cgtggatctgtaaaaatcgttaa

SEQ ID NO: 112219 - DNA, 23 bp, Artificial sequence
  SiRNA target sequence
gtggatctgtaaaaatcgttaac

SEQ ID NO: 112220 - DNA, 23 bp, Artificial sequence
  SiRNA target sequence
tggatctgtaaaaatcgttaaca

SEQ ID NO: 112221 - DNA, 23 bp, Artificial sequence
  SiRNA target sequence
ggatctgtaaaaatcgttaacat

SEQ ID NO: 112222 - DNA, 23 bp, Artificial sequence
  SiRNA target sequence
gatctgtaaaaatcgttaacatc

SEQ ID NO: 112223 - DNA, 23 bp, Artificial sequence
  SiRNA target sequence
atctgtaaaaatcgttaacatct

SEQ ID NO: 112224 - DNA, 23 bp, Artificial sequence
  SiRNA target sequence
tctgtaaaaatcgttaacatcta

SEQ ID NO: 112225 - DNA, 23 bp, Artificial sequence
  SiRNA target sequence
ctgtaaaaatcgttaacatctaa

SEQ ID NO: 112226 - DNA, 23 bp, Artificial sequence
  SiRNA target sequence
tgtaaaaatcgttaacatctaaa

SEQ ID NO: 112227 - DNA, 23 bp, Artificial sequence
  SiRNA target sequence
gtaaaaatcgttaacatctaaac

SEQ ID NO: 112228 - DNA, 23 bp, Artificial sequence
  SiRNA target sequence
taaaaatcgttaacatctaaaca

SEQ ID NO: 112229 - DNA, 23 bp, Artificial sequence
  SiRNA target sequence
aaaaatcgttaacatctaaacag

SEQ ID NO: 112230 - DNA, 23 bp, Artificial sequence
  SiRNA target sequence
aaaatcgttaacatctaaacagg

SEQ ID NO: 112231 - DNA, 23 bp, Artificial sequence
  SiRNA target sequence
aaatcgttaacatctaaacagga

SEQ ID NO: 112232 - DNA, 23 bp, Artificial sequence
  SiRNA target sequence
aatcgttaacatctaaacaggag

SEQ ID NO: 112233 - DNA, 23 bp, Artificial sequence
  SiRNA target sequence
atcgttaacatctaaacaggagt

SEQ ID NO: 112234 - DNA, 23 bp, Artificial sequence
  SiRNA target sequence
tcgttaacatctaaacaggagtg

SEQ ID NO: 112235 - DNA, 23 bp, Artificial sequence
  SiRNA target sequence
cgttaacatctaaacaggagtgc

SEQ ID NO: 112236 - DNA, 23 bp, Artificial sequence
  SiRNA target sequence
gttaacatctaaacaggagtgcc

SEQ ID NO: 112237 - DNA, 23 bp, Artificial sequence
  SiRNA target sequence
ttaacatctaaacaggagtgccc

SEQ ID NO: 112238 - DNA, 23 bp, Artificial sequence
  SiRNA target sequence
taacatctaaacaggagtgccca

SEQ ID NO: 112239 - DNA, 23 bp, Artificial sequence
  SiRNA target sequence
aacatctaaacaggagtgcccac

SEQ ID NO: 112240 - DNA, 23 bp, Artificial sequence
  SiRNA target sequence
acatctaaacaggagtgcccaca

SEQ ID NO: 112241 - DNA, 23 bp, Artificial sequence
  SiRNA target sequence
catctaaacaggagtgcccacat

SEQ ID NO: 112242 - DNA, 23 bp, Artificial sequence
  SiRNA target sequence
atctaaacaggagtgcccacatg

SEQ ID NO: 112243 - DNA, 23 bp, Artificial sequence
  SiRNA target sequence
tctaaacaggagtgcccacatgt

SEQ ID NO: 112244 - DNA, 23 bp, Artificial sequence
  SiRNA target sequence
ctaaacaggagtgcccacatgtc

SEQ ID NO: 112245 - DNA, 23 bp, Artificial sequence
  SiRNA target sequence
taaacaggagtgcccacatgtcc

SEQ ID NO: 112246 - DNA, 23 bp, Artificial sequence
  SiRNA target sequence
aaacaggagtgcccacatgtcct

SEQ ID NO: 112247 - DNA, 23 bp, Artificial sequence
  SiRNA target sequence
aacaggagtgcccacatgtcctg

SEQ ID NO: 112248 - DNA, 23 bp, Artificial sequence
  SiRNA target sequence
acaggagtgcccacatgtcctgt

SEQ ID NO: 112249 - DNA, 23 bp, Artificial sequence
  SiRNA target sequence
caggagtgcccacatgtcctgta

SEQ ID NO: 112250 - DNA, 23 bp, Artificial sequence
  SiRNA target sequence
aggagtgcccacatgtcctgtac

SEQ ID NO: 112251 - DNA, 23 bp, Artificial sequence
  SiRNA target sequence
ggagtgcccacatgtcctgtacg

SEQ ID NO: 112252 - DNA, 23 bp, Artificial sequence
  SiRNA target sequence
gagtgcccacatgtcctgtacgt

SEQ ID NO: 112253 - DNA, 23 bp, Artificial sequence
  SiRNA target sequence
agtgcccacatgtcctgtacgta

SEQ ID NO: 112254 - DNA, 23 bp, Artificial sequence
  SiRNA target sequence
gtgcccacatgtcctgtacgtat

SEQ ID NO: 112255 - DNA, 23 bp, Artificial sequence
  SiRNA target sequence
tgcccacatgtcctgtacgtatc

SEQ ID NO: 112256 - DNA, 23 bp, Artificial sequence
  SiRNA target sequence
gcccacatgtcctgtacgtatca

SEQ ID NO: 112257 - DNA, 23 bp, Artificial sequence
  SiRNA target sequence
cccacatgtcctgtacgtatcaa

SEQ ID NO: 112258 - DNA, 23 bp, Artificial sequence
  SiRNA target sequence
ccacatgtcctgtacgtatcaat

SEQ ID NO: 112259 - DNA, 23 bp, Artificial sequence
  SiRNA target sequence
cacatgtcctgtacgtatcaatt

SEQ ID NO: 112260 - DNA, 23 bp, Artificial sequence
  SiRNA target sequence
acatgtcctgtacgtatcaattt

SEQ ID NO: 112261 - DNA, 23 bp, Artificial sequence
  SiRNA target sequence
catgtcctgtacgtatcaatttg

SEQ ID NO: 112262 - DNA, 23 bp, Artificial sequence
  SiRNA target sequence
atgtcctgtacgtatcaatttgc

SEQ ID NO: 112263 - DNA, 23 bp, Artificial sequence
  SiRNA target sequence
tgtcctgtacgtatcaatttgca

SEQ ID NO: 112264 - DNA, 23 bp, Artificial sequence
  SiRNA target sequence
gtcctgtacgtatcaatttgcaa

SEQ ID NO: 112265 - DNA, 23 bp, Artificial sequence
  SiRNA target sequence
tcctgtacgtatcaatttgcaag

SEQ ID NO: 112266 - DNA, 23 bp, Artificial sequence
  SiRNA target sequence
cctgtacgtatcaatttgcaaga

SEQ ID NO: 112267 - DNA, 23 bp, Artificial sequence
  SiRNA target sequence
ctgtacgtatcaatttgcaagat

SEQ ID NO: 112268 - DNA, 23 bp, Artificial sequence
  SiRNA target sequence
tgtacgtatcaatttgcaagatg

SEQ ID NO: 112269 - DNA, 23 bp, Artificial sequence
  SiRNA target sequence
gtacgtatcaatttgcaagatga

SEQ ID NO: 112270 - DNA, 23 bp, Artificial sequence
  SiRNA target sequence
tacgtatcaatttgcaagatgat

SEQ ID NO: 112271 - DNA, 23 bp, Artificial sequence
  SiRNA target sequence
acgtatcaatttgcaagatgata

SEQ ID NO: 112272 - DNA, 23 bp, Artificial sequence
  SiRNA target sequence
cgtatcaatttgcaagatgatag

SEQ ID NO: 112273 - DNA, 23 bp, Artificial sequence
  SiRNA target sequence
gtatcaatttgcaagatgatagg

SEQ ID NO: 112274 - DNA, 23 bp, Artificial sequence
  SiRNA target sequence
tatcaatttgcaagatgataggt

SEQ ID NO: 112275 - DNA, 23 bp, Artificial sequence
  SiRNA target sequence
atcaatttgcaagatgataggtc

SEQ ID NO: 112276 - DNA, 23 bp, Artificial sequence
  SiRNA target sequence
tcaatttgcaagatgataggtcc

SEQ ID NO: 112277 - DNA, 23 bp, Artificial sequence
  SiRNA target sequence
caatttgcaagatgataggtcct

SEQ ID NO: 112278 - DNA, 23 bp, Artificial sequence
  SiRNA target sequence
aatttgcaagatgataggtcctt

SEQ ID NO: 112279 - DNA, 23 bp, Artificial sequence
  SiRNA target sequence
atttgcaagatgataggtccttt

SEQ ID NO: 112280 - DNA, 23 bp, Artificial sequence
  SiRNA target sequence
tttgcaagatgataggtcctttt

SEQ ID NO: 112281 - DNA, 23 bp, Artificial sequence
  SiRNA target sequence
ttgcaagatgataggtccttttt

SEQ ID NO: 112282 - DNA, 23 bp, Artificial sequence
  SiRNA target sequence
tgcaagatgataggtcctttttc

SEQ ID NO: 112283 - DNA, 23 bp, Artificial sequence
  SiRNA target sequence
gcaagatgataggtcctttttct

SEQ ID NO: 112284 - DNA, 23 bp, Artificial sequence
  SiRNA target sequence
caagatgataggtcctttttcta

SEQ ID NO: 112285 - DNA, 23 bp, Artificial sequence
  SiRNA target sequence
aagatgataggtcctttttctat

SEQ ID NO: 112286 - DNA, 23 bp, Artificial sequence
  SiRNA target sequence
agatgataggtcctttttctatt

SEQ ID NO: 112287 - DNA, 23 bp, Artificial sequence
  SiRNA target sequence
gatgataggtcctttttctattg

SEQ ID NO: 112288 - DNA, 23 bp, Artificial sequence
  SiRNA target sequence
atgataggtcctttttctattgc

SEQ ID NO: 112289 - DNA, 23 bp, Artificial sequence
  SiRNA target sequence
tgataggtcctttttctattgca

SEQ ID NO: 112290 - DNA, 23 bp, Artificial sequence
  SiRNA target sequence
gataggtcctttttctattgcat

SEQ ID NO: 112291 - DNA, 23 bp, Artificial sequence
  SiRNA target sequence
ataggtcctttttctattgcatg

SEQ ID NO: 112292 - DNA, 23 bp, Artificial sequence
  SiRNA target sequence
taggtcctttttctattgcatgt

SEQ ID NO: 112293 - DNA, 23 bp, Artificial sequence
  SiRNA target sequence
aggtcctttttctattgcatgtt

SEQ ID NO: 112294 - DNA, 23 bp, Artificial sequence
  SiRNA target sequence
ggtcctttttctattgcatgttg

SEQ ID NO: 112295 - DNA, 23 bp, Artificial sequence
  SiRNA target sequence
gtcctttttctattgcatgttgt

SEQ ID NO: 112296 - DNA, 23 bp, Artificial sequence
  SiRNA target sequence
tcctttttctattgcatgttgtc

SEQ ID NO: 112297 - DNA, 23 bp, Artificial sequence
  SiRNA target sequence
cctttttctattgcatgttgtct

SEQ ID NO: 112298 - DNA, 23 bp, Artificial sequence
  SiRNA target sequence
ctttttctattgcatgttgtcta

SEQ ID NO: 112299 - DNA, 23 bp, Artificial sequence
  SiRNA target sequence
tttttctattgcatgttgtctag

SEQ ID NO: 112300 - DNA, 23 bp, Artificial sequence
  SiRNA target sequence
ttttctattgcatgttgtctagc

SEQ ID NO: 112301 - DNA, 23 bp, Artificial sequence
  SiRNA target sequence
tttctattgcatgttgtctagca

SEQ ID NO: 112302 - DNA, 23 bp, Artificial sequence
  SiRNA target sequence
ttctattgcatgttgtctagcaa

SEQ ID NO: 112303 - DNA, 23 bp, Artificial sequence
  SiRNA target sequence
tctattgcatgttgtctagcaaa

SEQ ID NO: 112304 - DNA, 23 bp, Artificial sequence
  SiRNA target sequence
ctattgcatgttgtctagcaaat

SEQ ID NO: 112305 - DNA, 23 bp, Artificial sequence
  SiRNA target sequence
tattgcatgttgtctagcaaatg

SEQ ID NO: 112306 - DNA, 23 bp, Artificial sequence
  SiRNA target sequence
attgcatgttgtctagcaaatgt

SEQ ID NO: 112307 - DNA, 23 bp, Artificial sequence
  SiRNA target sequence
ttgcatgttgtctagcaaatgta

SEQ ID NO: 112308 - DNA, 23 bp, Artificial sequence
  SiRNA target sequence
tgcatgttgtctagcaaatgtaa

SEQ ID NO: 112309 - DNA, 23 bp, Artificial sequence
  SiRNA target sequence
gcatgttgtctagcaaatgtaaa

SEQ ID NO: 112310 - DNA, 23 bp, Artificial sequence
  SiRNA target sequence
catgttgtctagcaaatgtaaat

SEQ ID NO: 112311 - DNA, 23 bp, Artificial sequence
  SiRNA target sequence
atgttgtctagcaaatgtaaata

SEQ ID NO: 112312 - DNA, 23 bp, Artificial sequence
  SiRNA target sequence
tgttgtctagcaaatgtaaatac

SEQ ID NO: 112313 - DNA, 23 bp, Artificial sequence
  SiRNA target sequence
gttgtctagcaaatgtaaataca

SEQ ID NO: 112314 - DNA, 23 bp, Artificial sequence
  SiRNA target sequence
ttgtctagcaaatgtaaatacat

SEQ ID NO: 112315 - DNA, 23 bp, Artificial sequence
  SiRNA target sequence
tgtctagcaaatgtaaatacatc

SEQ ID NO: 112316 - DNA, 23 bp, Artificial sequence
  SiRNA target sequence
gtctagcaaatgtaaatacatca

SEQ ID NO: 112317 - DNA, 23 bp, Artificial sequence
  SiRNA target sequence
tctagcaaatgtaaatacatcaa

SEQ ID NO: 112318 - DNA, 23 bp, Artificial sequence
  SiRNA target sequence
ctagcaaatgtaaatacatcaat

SEQ ID NO: 112319 - DNA, 23 bp, Artificial sequence
  SiRNA target sequence
tagcaaatgtaaatacatcaatc

SEQ ID NO: 112320 - DNA, 23 bp, Artificial sequence
  SiRNA target sequence
agcaaatgtaaatacatcaatca

SEQ ID NO: 112321 - DNA, 23 bp, Artificial sequence
  SiRNA target sequence
gcaaatgtaaatacatcaatcag

SEQ ID NO: 112322 - DNA, 23 bp, Artificial sequence
  SiRNA target sequence
caaatgtaaatacatcaatcagt

SEQ ID NO: 112323 - DNA, 23 bp, Artificial sequence
  SiRNA target sequence
aaatgtaaatacatcaatcagtt

SEQ ID NO: 112324 - DNA, 23 bp, Artificial sequence
  SiRNA target sequence
aatgtaaatacatcaatcagttg

SEQ ID NO: 112325 - DNA, 23 bp, Artificial sequence
  SiRNA target sequence
atgtaaatacatcaatcagttga

SEQ ID NO: 112326 - DNA, 23 bp, Artificial sequence
  SiRNA target sequence
tgtaaatacatcaatcagttgag

SEQ ID NO: 112327 - DNA, 23 bp, Artificial sequence
  SiRNA target sequence
gtaaatacatcaatcagttgagt

SEQ ID NO: 112328 - DNA, 23 bp, Artificial sequence
  SiRNA target sequence
taaatacatcaatcagttgagtt

SEQ ID NO: 112329 - DNA, 23 bp, Artificial sequence
  SiRNA target sequence
aaatacatcaatcagttgagtta

SEQ ID NO: 112330 - DNA, 23 bp, Artificial sequence
  SiRNA target sequence
aatacatcaatcagttgagttat

SEQ ID NO: 112331 - DNA, 23 bp, Artificial sequence
  SiRNA target sequence
atacatcaatcagttgagttatg

SEQ ID NO: 112332 - DNA, 23 bp, Artificial sequence
  SiRNA target sequence
tacatcaatcagttgagttatgt

SEQ ID NO: 112333 - DNA, 23 bp, Artificial sequence
  SiRNA target sequence
acatcaatcagttgagttatgtt

SEQ ID NO: 112334 - DNA, 23 bp, Artificial sequence
  SiRNA target sequence
catcaatcagttgagttatgttt

SEQ ID NO: 112335 - DNA, 23 bp, Artificial sequence
  SiRNA target sequence
atcaatcagttgagttatgtttt

SEQ ID NO: 112336 - DNA, 23 bp, Artificial sequence
  SiRNA target sequence
tcaatcagttgagttatgttttt

SEQ ID NO: 112337 - DNA, 23 bp, Artificial sequence
  SiRNA target sequence
caatcagttgagttatgttttta

SEQ ID NO: 112338 - DNA, 23 bp, Artificial sequence
  SiRNA target sequence
aatcagttgagttatgtttttat

SEQ ID NO: 112339 - DNA, 23 bp, Artificial sequence
  SiRNA target sequence
atcagttgagttatgtttttatc

SEQ ID NO: 112340 - DNA, 23 bp, Artificial sequence
  SiRNA target sequence
tcagttgagttatgtttttatct

SEQ ID NO: 112341 - DNA, 23 bp, Artificial sequence
  SiRNA target sequence
cagttgagttatgtttttatctg

SEQ ID NO: 112342 - DNA, 23 bp, Artificial sequence
  SiRNA target sequence
agttgagttatgtttttatctgt

SEQ ID NO: 112343 - DNA, 23 bp, Artificial sequence
  SiRNA target sequence
gttgagttatgtttttatctgta

SEQ ID NO: 112344 - DNA, 23 bp, Artificial sequence
  SiRNA target sequence
ttgagttatgtttttatctgtaa

SEQ ID NO: 112345 - DNA, 23 bp, Artificial sequence
  SiRNA target sequence
tgagttatgtttttatctgtaag

SEQ ID NO: 112346 - DNA, 23 bp, Artificial sequence
  SiRNA target sequence
gagttatgtttttatctgtaaga

SEQ ID NO: 112347 - DNA, 23 bp, Artificial sequence
  SiRNA target sequence
agttatgtttttatctgtaagac

SEQ ID NO: 112348 - DNA, 23 bp, Artificial sequence
  SiRNA target sequence
gttatgtttttatctgtaagacg

SEQ ID NO: 112349 - DNA, 23 bp, Artificial sequence
  SiRNA target sequence
ttatgtttttatctgtaagacgt

SEQ ID NO: 112350 - DNA, 23 bp, Artificial sequence
  SiRNA target sequence
tatgtttttatctgtaagacgta

SEQ ID NO: 112351 - DNA, 23 bp, Artificial sequence
  SiRNA target sequence
atgtttttatctgtaagacgtat

SEQ ID NO: 112352 - DNA, 23 bp, Artificial sequence
  SiRNA target sequence
tgtttttatctgtaagacgtata

SEQ ID NO: 112353 - DNA, 23 bp, Artificial sequence
  SiRNA target sequence
gtttttatctgtaagacgtatac

SEQ ID NO: 112354 - DNA, 23 bp, Artificial sequence
  SiRNA target sequence
tttttatctgtaagacgtatacc

SEQ ID NO: 112355 - DNA, 23 bp, Artificial sequence
  SiRNA target sequence
ttttatctgtaagacgtatacct

SEQ ID NO: 112356 - DNA, 23 bp, Artificial sequence
  SiRNA target sequence
tttatctgtaagacgtatacctg

SEQ ID NO: 112357 - DNA, 23 bp, Artificial sequence
  SiRNA target sequence
ttatctgtaagacgtatacctgg

SEQ ID NO: 112358 - DNA, 23 bp, Artificial sequence
  SiRNA target sequence
tatctgtaagacgtatacctgga

SEQ ID NO: 112359 - DNA, 23 bp, Artificial sequence
  SiRNA target sequence
atctgtaagacgtatacctggaa

SEQ ID NO: 112360 - DNA, 23 bp, Artificial sequence
  SiRNA target sequence
tctgtaagacgtatacctggaat

SEQ ID NO: 112361 - DNA, 23 bp, Artificial sequence
  SiRNA target sequence
ctgtaagacgtatacctggaata

SEQ ID NO: 112362 - DNA, 23 bp, Artificial sequence
  SiRNA target sequence
tgtaagacgtatacctggaatat

SEQ ID NO: 112363 - DNA, 23 bp, Artificial sequence
  SiRNA target sequence
gtaagacgtatacctggaatatt

SEQ ID NO: 112364 - DNA, 23 bp, Artificial sequence
  SiRNA target sequence
taagacgtatacctggaatatta

SEQ ID NO: 112365 - DNA, 23 bp, Artificial sequence
  SiRNA target sequence
aagacgtatacctggaatattat

SEQ ID NO: 112366 - DNA, 23 bp, Artificial sequence
  SiRNA target sequence
agacgtatacctggaatattata

SEQ ID NO: 112367 - DNA, 23 bp, Artificial sequence
  SiRNA target sequence
gacgtatacctggaatattatat

SEQ ID NO: 112368 - DNA, 23 bp, Artificial sequence
  SiRNA target sequence
acgtatacctggaatattatatc

SEQ ID NO: 112369 - DNA, 23 bp, Artificial sequence
  SiRNA target sequence
cgtatacctggaatattatatcc

SEQ ID NO: 112370 - DNA, 23 bp, Artificial sequence
  SiRNA target sequence
gtatacctggaatattatatccc

SEQ ID NO: 112371 - DNA, 23 bp, Artificial sequence
  SiRNA target sequence
tatacctggaatattatatcccc

SEQ ID NO: 112372 - DNA, 23 bp, Artificial sequence
  SiRNA target sequence
atacctggaatattatatcccct

SEQ ID NO: 112373 - DNA, 23 bp, Artificial sequence
  SiRNA target sequence
tacctggaatattatatcccctt

SEQ ID NO: 112374 - DNA, 23 bp, Artificial sequence
  SiRNA target sequence
acctggaatattatatccccttt

SEQ ID NO: 112375 - DNA, 23 bp, Artificial sequence
  SiRNA target sequence
cctggaatattatatcccctttt

SEQ ID NO: 112376 - DNA, 23 bp, Artificial sequence
  SiRNA target sequence
ctggaatattatatcccctttta

SEQ ID NO: 112377 - DNA, 23 bp, Artificial sequence
  SiRNA target sequence
tggaatattatatccccttttaa

SEQ ID NO: 112378 - DNA, 23 bp, Artificial sequence
  SiRNA target sequence
ggaatattatatccccttttaaa

SEQ ID NO: 112379 - DNA, 23 bp, Artificial sequence
  SiRNA target sequence
gaatattatatccccttttaaaa

SEQ ID NO: 112380 - DNA, 23 bp, Artificial sequence
  SiRNA target sequence
aatattatatccccttttaaaat

SEQ ID NO: 112381 - DNA, 23 bp, Artificial sequence
  SiRNA target sequence
atattatatccccttttaaaata

SEQ ID NO: 112382 - DNA, 23 bp, Artificial sequence
  SiRNA target sequence
tattatatccccttttaaaatat

SEQ ID NO: 112383 - DNA, 23 bp, Artificial sequence
  SiRNA target sequence
attatatccccttttaaaatatt

SEQ ID NO: 112384 - DNA, 23 bp, Artificial sequence
  SiRNA target sequence
ttatatccccttttaaaatattc

SEQ ID NO: 112385 - DNA, 23 bp, Artificial sequence
  SiRNA target sequence
tatatccccttttaaaatattca

SEQ ID NO: 112386 - DNA, 23 bp, Artificial sequence
  SiRNA target sequence
atatccccttttaaaatattcag

SEQ ID NO: 112387 - DNA, 23 bp, Artificial sequence
  SiRNA target sequence
tatccccttttaaaatattcagg

SEQ ID NO: 112388 - DNA, 23 bp, Artificial sequence
  SiRNA target sequence
atccccttttaaaatattcagga

SEQ ID NO: 112389 - DNA, 23 bp, Artificial sequence
  SiRNA target sequence
tccccttttaaaatattcaggat

SEQ ID NO: 112390 - DNA, 23 bp, Artificial sequence
  SiRNA target sequence
ccccttttaaaatattcaggata

SEQ ID NO: 112391 - DNA, 23 bp, Artificial sequence
  SiRNA target sequence
cccttttaaaatattcaggatat

SEQ ID NO: 112392 - DNA, 23 bp, Artificial sequence
  SiRNA target sequence
ccttttaaaatattcaggatatg

SEQ ID NO: 112393 - DNA, 23 bp, Artificial sequence
  SiRNA target sequence
cttttaaaatattcaggatatgt

SEQ ID NO: 112394 - DNA, 23 bp, Artificial sequence
  SiRNA target sequence
ttttaaaatattcaggatatgta

SEQ ID NO: 112395 - DNA, 23 bp, Artificial sequence
  SiRNA target sequence
tttaaaatattcaggatatgtag

SEQ ID NO: 112396 - DNA, 23 bp, Artificial sequence
  SiRNA target sequence
ttaaaatattcaggatatgtagt

SEQ ID NO: 112397 - DNA, 23 bp, Artificial sequence
  SiRNA target sequence
taaaatattcaggatatgtagtg

SEQ ID NO: 112398 - DNA, 23 bp, Artificial sequence
  SiRNA target sequence
aaaatattcaggatatgtagtgg

SEQ ID NO: 112399 - DNA, 23 bp, Artificial sequence
  SiRNA target sequence
aaatattcaggatatgtagtgga

SEQ ID NO: 112400 - DNA, 23 bp, Artificial sequence
  SiRNA target sequence
aatattcaggatatgtagtggaa

SEQ ID NO: 112401 - DNA, 23 bp, Artificial sequence
  SiRNA target sequence
atattcaggatatgtagtggaat

SEQ ID NO: 112402 - DNA, 23 bp, Artificial sequence
  SiRNA target sequence
tattcaggatatgtagtggaatt

SEQ ID NO: 112403 - DNA, 23 bp, Artificial sequence
  SiRNA target sequence
attcaggatatgtagtggaatta

SEQ ID NO: 112404 - DNA, 23 bp, Artificial sequence
  SiRNA target sequence
ttcaggatatgtagtggaattac

SEQ ID NO: 112405 - DNA, 23 bp, Artificial sequence
  SiRNA target sequence
tcaggatatgtagtggaattact

SEQ ID NO: 112406 - DNA, 23 bp, Artificial sequence
  SiRNA target sequence
caggatatgtagtggaattactt

SEQ ID NO: 112407 - DNA, 23 bp, Artificial sequence
  SiRNA target sequence
aggatatgtagtggaattacttt

SEQ ID NO: 112408 - DNA, 23 bp, Artificial sequence
  SiRNA target sequence
ggatatgtagtggaattactttc

SEQ ID NO: 112409 - DNA, 23 bp, Artificial sequence
  SiRNA target sequence
gatatgtagtggaattactttca

SEQ ID NO: 112410 - DNA, 23 bp, Artificial sequence
  SiRNA target sequence
atatgtagtggaattactttcag

SEQ ID NO: 112411 - DNA, 23 bp, Artificial sequence
  SiRNA target sequence
tatgtagtggaattactttcagg

SEQ ID NO: 112412 - DNA, 23 bp, Artificial sequence
  SiRNA target sequence
atgtagtggaattactttcaggt

SEQ ID NO: 112413 - DNA, 23 bp, Artificial sequence
  SiRNA target sequence
tgtagtggaattactttcaggtg

SEQ ID NO: 112414 - DNA, 23 bp, Artificial sequence
  SiRNA target sequence
gtagtggaattactttcaggtgt

SEQ ID NO: 112415 - DNA, 23 bp, Artificial sequence
  SiRNA target sequence
tagtggaattactttcaggtgtc

SEQ ID NO: 112416 - DNA, 23 bp, Artificial sequence
  SiRNA target sequence
agtggaattactttcaggtgtcc

SEQ ID NO: 112417 - DNA, 23 bp, Artificial sequence
  SiRNA target sequence
gtggaattactttcaggtgtcca

SEQ ID NO: 112418 - DNA, 23 bp, Artificial sequence
  SiRNA target sequence
tggaattactttcaggtgtccac

SEQ ID NO: 112419 - DNA, 23 bp, Artificial sequence
  SiRNA target sequence
ggaattactttcaggtgtccaca

SEQ ID NO: 112420 - DNA, 23 bp, Artificial sequence
  SiRNA target sequence
gaattactttcaggtgtccacat

SEQ ID NO: 112421 - DNA, 23 bp, Artificial sequence
  SiRNA target sequence
aattactttcaggtgtccacata

SEQ ID NO: 112422 - DNA, 23 bp, Artificial sequence
  SiRNA target sequence
attactttcaggtgtccacatac

SEQ ID NO: 112423 - DNA, 23 bp, Artificial sequence
  SiRNA target sequence
ttactttcaggtgtccacatact

SEQ ID NO: 112424 - DNA, 23 bp, Artificial sequence
  SiRNA target sequence
tactttcaggtgtccacatacta

SEQ ID NO: 112425 - DNA, 23 bp, Artificial sequence
  SiRNA target sequence
actttcaggtgtccacatactat

SEQ ID NO: 112426 - DNA, 23 bp, Artificial sequence
  SiRNA target sequence
ctttcaggtgtccacatactata

SEQ ID NO: 112427 - DNA, 23 bp, Artificial sequence
  SiRNA target sequence
tttcaggtgtccacatactataa

SEQ ID NO: 112428 - DNA, 23 bp, Artificial sequence
  SiRNA target sequence
ttcaggtgtccacatactataat

SEQ ID NO: 112429 - DNA, 23 bp, Artificial sequence
  SiRNA target sequence
tcaggtgtccacatactataatg

SEQ ID NO: 112430 - DNA, 23 bp, Artificial sequence
  SiRNA target sequence
caggtgtccacatactataatga

SEQ ID NO: 112431 - DNA, 23 bp, Artificial sequence
  SiRNA target sequence
aggtgtccacatactataatgat

SEQ ID NO: 112432 - DNA, 23 bp, Artificial sequence
  SiRNA target sequence
ggtgtccacatactataatgatt

SEQ ID NO: 112433 - DNA, 23 bp, Artificial sequence
  SiRNA target sequence
gtgtccacatactataatgatta

SEQ ID NO: 112434 - DNA, 23 bp, Artificial sequence
  SiRNA target sequence
tgtccacatactataatgattat

SEQ ID NO: 112435 - DNA, 23 bp, Artificial sequence
  SiRNA target sequence
gtccacatactataatgattatt

SEQ ID NO: 112436 - DNA, 23 bp, Artificial sequence
  SiRNA target sequence
tccacatactataatgattattt

SEQ ID NO: 112437 - DNA, 23 bp, Artificial sequence
  SiRNA target sequence
ccacatactataatgattatttt

SEQ ID NO: 112438 - DNA, 23 bp, Artificial sequence
  SiRNA target sequence
cacatactataatgattattttc

SEQ ID NO: 112439 - DNA, 23 bp, Artificial sequence
  SiRNA target sequence
acatactataatgattattttca

SEQ ID NO: 112440 - DNA, 23 bp, Artificial sequence
  SiRNA target sequence
catactataatgattattttcac

SEQ ID NO: 112441 - DNA, 23 bp, Artificial sequence
  SiRNA target sequence
atactataatgattattttcaca

SEQ ID NO: 112442 - DNA, 23 bp, Artificial sequence
  SiRNA target sequence
tactataatgattattttcacat

SEQ ID NO: 112443 - DNA, 23 bp, Artificial sequence
  SiRNA target sequence
actataatgattattttcacata

SEQ ID NO: 112444 - DNA, 23 bp, Artificial sequence
  SiRNA target sequence
ctataatgattattttcacatac

SEQ ID NO: 112445 - DNA, 23 bp, Artificial sequence
  SiRNA target sequence
tataatgattattttcacataca

SEQ ID NO: 112446 - DNA, 23 bp, Artificial sequence
  SiRNA target sequence
ataatgattattttcacatacat

SEQ ID NO: 112447 - DNA, 23 bp, Artificial sequence
  SiRNA target sequence
taatgattattttcacatacata

SEQ ID NO: 112448 - DNA, 23 bp, Artificial sequence
  SiRNA target sequence
aatgattattttcacatacataa

SEQ ID NO: 112449 - DNA, 23 bp, Artificial sequence
  SiRNA target sequence
atgattattttcacatacataaa

SEQ ID NO: 112450 - DNA, 23 bp, Artificial sequence
  SiRNA target sequence
tgattattttcacatacataaac

SEQ ID NO: 112451 - DNA, 23 bp, Artificial sequence
  SiRNA target sequence
gattattttcacatacataaacc

SEQ ID NO: 112452 - DNA, 23 bp, Artificial sequence
  SiRNA target sequence
attattttcacatacataaacca

SEQ ID NO: 112453 - DNA, 23 bp, Artificial sequence
  SiRNA target sequence
ttattttcacatacataaaccac

SEQ ID NO: 112454 - DNA, 23 bp, Artificial sequence
  SiRNA target sequence
tattttcacatacataaaccaca

SEQ ID NO: 112455 - DNA, 23 bp, Artificial sequence
  SiRNA target sequence
attttcacatacataaaccacag

SEQ ID NO: 112456 - DNA, 23 bp, Artificial sequence
  SiRNA target sequence
ttttcacatacataaaccacagg

SEQ ID NO: 112457 - DNA, 23 bp, Artificial sequence
  SiRNA target sequence
tttcacatacataaaccacagga

SEQ ID NO: 112458 - DNA, 23 bp, Artificial sequence
  SiRNA target sequence
ttcacatacataaaccacaggaa

SEQ ID NO: 112459 - DNA, 23 bp, Artificial sequence
  SiRNA target sequence
tcacatacataaaccacaggaag

SEQ ID NO: 112460 - DNA, 23 bp, Artificial sequence
  SiRNA target sequence
cacatacataaaccacaggaagt

SEQ ID NO: 112461 - DNA, 23 bp, Artificial sequence
  SiRNA target sequence
acatacataaaccacaggaagtt

SEQ ID NO: 112462 - DNA, 23 bp, Artificial sequence
  SiRNA target sequence
catacataaaccacaggaagttt

SEQ ID NO: 112463 - DNA, 23 bp, Artificial sequence
  SiRNA target sequence
atacataaaccacaggaagtttc

SEQ ID NO: 112464 - DNA, 23 bp, Artificial sequence
  SiRNA target sequence
tacataaaccacaggaagtttcc

SEQ ID NO: 112465 - DNA, 23 bp, Artificial sequence
  SiRNA target sequence
acataaaccacaggaagtttcca

SEQ ID NO: 112466 - DNA, 23 bp, Artificial sequence
  SiRNA target sequence
cataaaccacaggaagtttccat

SEQ ID NO: 112467 - DNA, 23 bp, Artificial sequence
  SiRNA target sequence
ataaaccacaggaagtttccata

SEQ ID NO: 112468 - DNA, 23 bp, Artificial sequence
  SiRNA target sequence
taaaccacaggaagtttccataa

SEQ ID NO: 112469 - DNA, 23 bp, Artificial sequence
  SiRNA target sequence
aaaccacaggaagtttccataat

SEQ ID NO: 112470 - DNA, 23 bp, Artificial sequence
  SiRNA target sequence
aaccacaggaagtttccataatg

SEQ ID NO: 112471 - DNA, 23 bp, Artificial sequence
  SiRNA target sequence
accacaggaagtttccataatgc

SEQ ID NO: 112472 - DNA, 23 bp, Artificial sequence
  SiRNA target sequence
ccacaggaagtttccataatgca

SEQ ID NO: 112473 - DNA, 23 bp, Artificial sequence
  SiRNA target sequence
cacaggaagtttccataatgcag

SEQ ID NO: 112474 - DNA, 23 bp, Artificial sequence
  SiRNA target sequence
acaggaagtttccataatgcagc

SEQ ID NO: 112475 - DNA, 23 bp, Artificial sequence
  SiRNA target sequence
caggaagtttccataatgcagcc

SEQ ID NO: 112476 - DNA, 23 bp, Artificial sequence
  SiRNA target sequence
aggaagtttccataatgcagcca

SEQ ID NO: 112477 - DNA, 23 bp, Artificial sequence
  SiRNA target sequence
ggaagtttccataatgcagccat

SEQ ID NO: 112478 - DNA, 23 bp, Artificial sequence
  SiRNA target sequence
gaagtttccataatgcagccata

SEQ ID NO: 112479 - DNA, 23 bp, Artificial sequence
  SiRNA target sequence
aagtttccataatgcagccatat

SEQ ID NO: 112480 - DNA, 23 bp, Artificial sequence
  SiRNA target sequence
agtttccataatgcagccatatt

SEQ ID NO: 112481 - DNA, 23 bp, Artificial sequence
  SiRNA target sequence
gtttccataatgcagccatattg

SEQ ID NO: 112482 - DNA, 23 bp, Artificial sequence
  SiRNA target sequence
tttccataatgcagccatattga

SEQ ID NO: 112483 - DNA, 23 bp, Artificial sequence
  SiRNA target sequence
ttccataatgcagccatattgaa

SEQ ID NO: 112484 - DNA, 23 bp, Artificial sequence
  SiRNA target sequence
tccataatgcagccatattgaac

SEQ ID NO: 112485 - DNA, 23 bp, Artificial sequence
  SiRNA target sequence
ccataatgcagccatattgaacg

SEQ ID NO: 112486 - DNA, 23 bp, Artificial sequence
  SiRNA target sequence
cataatgcagccatattgaacga

SEQ ID NO: 112487 - DNA, 23 bp, Artificial sequence
  SiRNA target sequence
ataatgcagccatattgaacgac

SEQ ID NO: 112488 - DNA, 23 bp, Artificial sequence
  SiRNA target sequence
taatgcagccatattgaacgact

SEQ ID NO: 112489 - DNA, 23 bp, Artificial sequence
  SiRNA target sequence
aatgcagccatattgaacgactc

SEQ ID NO: 112490 - DNA, 23 bp, Artificial sequence
  SiRNA target sequence
atgcagccatattgaacgactcc

SEQ ID NO: 112491 - DNA, 23 bp, Artificial sequence
  SiRNA target sequence
tgcagccatattgaacgactccc

SEQ ID NO: 112492 - DNA, 23 bp, Artificial sequence
  SiRNA target sequence
gcagccatattgaacgactccca

SEQ ID NO: 112493 - DNA, 23 bp, Artificial sequence
  SiRNA target sequence
cagccatattgaacgactcccag

SEQ ID NO: 112494 - DNA, 23 bp, Artificial sequence
  SiRNA target sequence
agccatattgaacgactcccaga

SEQ ID NO: 112495 - DNA, 23 bp, Artificial sequence
  SiRNA target sequence
gccatattgaacgactcccagac

SEQ ID NO: 112496 - DNA, 23 bp, Artificial sequence
  SiRNA target sequence
ccatattgaacgactcccagacc

SEQ ID NO: 112497 - DNA, 23 bp, Artificial sequence
  SiRNA target sequence
catattgaacgactcccagacct

SEQ ID NO: 112498 - DNA, 23 bp, Artificial sequence
  SiRNA target sequence
atattgaacgactcccagacctg

SEQ ID NO: 112499 - DNA, 23 bp, Artificial sequence
  SiRNA target sequence
tattgaacgactcccagacctgt

SEQ ID NO: 112500 - DNA, 23 bp, Artificial sequence
  SiRNA target sequence
attgaacgactcccagacctgtc

SEQ ID NO: 112501 - DNA, 23 bp, Artificial sequence
  SiRNA target sequence
ttgaacgactcccagacctgtcc

SEQ ID NO: 112502 - DNA, 23 bp, Artificial sequence
  SiRNA target sequence
tgaacgactcccagacctgtccc

SEQ ID NO: 112503 - DNA, 23 bp, Artificial sequence
  SiRNA target sequence
gaacgactcccagacctgtccct

SEQ ID NO: 112504 - DNA, 23 bp, Artificial sequence
  SiRNA target sequence
aacgactcccagacctgtccctg

SEQ ID NO: 112505 - DNA, 23 bp, Artificial sequence
  SiRNA target sequence
acgactcccagacctgtccctga

SEQ ID NO: 112506 - DNA, 23 bp, Artificial sequence
  SiRNA target sequence
cgactcccagacctgtccctgat

SEQ ID NO: 112507 - DNA, 23 bp, Artificial sequence
  SiRNA target sequence
gactcccagacctgtccctgatt

SEQ ID NO: 112508 - DNA, 23 bp, Artificial sequence
  SiRNA target sequence
actcccagacctgtccctgattt

SEQ ID NO: 112509 - DNA, 23 bp, Artificial sequence
  SiRNA target sequence
ctcccagacctgtccctgatttg

SEQ ID NO: 112510 - DNA, 23 bp, Artificial sequence
  SiRNA target sequence
tcccagacctgtccctgatttgc

SEQ ID NO: 112511 - DNA, 23 bp, Artificial sequence
  SiRNA target sequence
cccagacctgtccctgatttgca

SEQ ID NO: 112512 - DNA, 23 bp, Artificial sequence
  SiRNA target sequence
ccagacctgtccctgatttgcag

SEQ ID NO: 112513 - DNA, 23 bp, Artificial sequence
  SiRNA target sequence
cagacctgtccctgatttgcagc

SEQ ID NO: 112514 - DNA, 23 bp, Artificial sequence
  SiRNA target sequence
agacctgtccctgatttgcagca

SEQ ID NO: 112515 - DNA, 23 bp, Artificial sequence
  SiRNA target sequence
gacctgtccctgatttgcagcac

SEQ ID NO: 112516 - DNA, 23 bp, Artificial sequence
  SiRNA target sequence
acctgtccctgatttgcagcacc

SEQ ID NO: 112517 - DNA, 23 bp, Artificial sequence
  SiRNA target sequence
cctgtccctgatttgcagcacca

SEQ ID NO: 112518 - DNA, 23 bp, Artificial sequence
  SiRNA target sequence
ctgtccctgatttgcagcaccat

SEQ ID NO: 112519 - DNA, 23 bp, Artificial sequence
  SiRNA target sequence
tgtccctgatttgcagcaccatc

SEQ ID NO: 112520 - DNA, 23 bp, Artificial sequence
  SiRNA target sequence
gtccctgatttgcagcaccatcc

SEQ ID NO: 112521 - DNA, 23 bp, Artificial sequence
  SiRNA target sequence
tccctgatttgcagcaccatccc

SEQ ID NO: 112522 - DNA, 23 bp, Artificial sequence
  SiRNA target sequence
ccctgatttgcagcaccatcccc

SEQ ID NO: 112523 - DNA, 23 bp, Artificial sequence
  SiRNA target sequence
cctgatttgcagcaccatccccg

SEQ ID NO: 112524 - DNA, 23 bp, Artificial sequence
  SiRNA target sequence
ctgatttgcagcaccatccccga

SEQ ID NO: 112525 - DNA, 23 bp, Artificial sequence
  SiRNA target sequence
tgatttgcagcaccatccccgaa

SEQ ID NO: 112526 - DNA, 23 bp, Artificial sequence
  SiRNA target sequence
gatttgcagcaccatccccgaaa

SEQ ID NO: 112527 - DNA, 23 bp, Artificial sequence
  SiRNA target sequence
atttgcagcaccatccccgaaaa

SEQ ID NO: 112528 - DNA, 23 bp, Artificial sequence
  SiRNA target sequence
tttgcagcaccatccccgaaaaa

SEQ ID NO: 112529 - DNA, 23 bp, Artificial sequence
  SiRNA target sequence
ttgcagcaccatccccgaaaaat

SEQ ID NO: 112530 - DNA, 23 bp, Artificial sequence
  SiRNA target sequence
tgcagcaccatccccgaaaaata

SEQ ID NO: 112531 - DNA, 23 bp, Artificial sequence
  SiRNA target sequence
gcagcaccatccccgaaaaatac

SEQ ID NO: 112532 - DNA, 23 bp, Artificial sequence
  SiRNA target sequence
cagcaccatccccgaaaaataca

SEQ ID NO: 112533 - DNA, 23 bp, Artificial sequence
  SiRNA target sequence
agcaccatccccgaaaaatacaa

SEQ ID NO: 112534 - DNA, 23 bp, Artificial sequence
  SiRNA target sequence
gcaccatccccgaaaaatacaaa

SEQ ID NO: 112535 - DNA, 23 bp, Artificial sequence
  SiRNA target sequence
caccatccccgaaaaatacaaat

SEQ ID NO: 112536 - DNA, 23 bp, Artificial sequence
  SiRNA target sequence
accatccccgaaaaatacaaatg

SEQ ID NO: 112537 - DNA, 23 bp, Artificial sequence
  SiRNA target sequence
ccatccccgaaaaatacaaatgc

SEQ ID NO: 112538 - DNA, 23 bp, Artificial sequence
  SiRNA target sequence
catccccgaaaaatacaaatgct

SEQ ID NO: 112539 - DNA, 23 bp, Artificial sequence
  SiRNA target sequence
atccccgaaaaatacaaatgcta

SEQ ID NO: 112540 - DNA, 23 bp, Artificial sequence
  SiRNA target sequence
tccccgaaaaatacaaatgctac

SEQ ID NO: 112541 - DNA, 23 bp, Artificial sequence
  SiRNA target sequence
ccccgaaaaatacaaatgctaca

SEQ ID NO: 112542 - DNA, 23 bp, Artificial sequence
  SiRNA target sequence
cccgaaaaatacaaatgctacat

SEQ ID NO: 112543 - DNA, 23 bp, Artificial sequence
  SiRNA target sequence
ccgaaaaatacaaatgctacatt

SEQ ID NO: 112544 - DNA, 23 bp, Artificial sequence
  SiRNA target sequence
cgaaaaatacaaatgctacattt

SEQ ID NO: 112545 - DNA, 23 bp, Artificial sequence
  SiRNA target sequence
gaaaaatacaaatgctacatttt

SEQ ID NO: 112546 - DNA, 23 bp, Artificial sequence
  SiRNA target sequence
aaaaatacaaatgctacattttt

SEQ ID NO: 112547 - DNA, 23 bp, Artificial sequence
  SiRNA target sequence
aaaatacaaatgctacatttttt

SEQ ID NO: 112548 - DNA, 23 bp, Artificial sequence
  SiRNA target sequence
aaatacaaatgctacatttttta

SEQ ID NO: 112549 - DNA, 23 bp, Artificial sequence
  SiRNA target sequence
aatacaaatgctacattttttac

SEQ ID NO: 112550 - DNA, 23 bp, Artificial sequence
  SiRNA target sequence
atacaaatgctacattttttact

SEQ ID NO: 112551 - DNA, 23 bp, Artificial sequence
  SiRNA target sequence
tacaaatgctacattttttactt

SEQ ID NO: 112552 - DNA, 23 bp, Artificial sequence
  SiRNA target sequence
acaaatgctacattttttacttt

SEQ ID NO: 112553 - DNA, 23 bp, Artificial sequence
  SiRNA target sequence
caaatgctacattttttactttt

SEQ ID NO: 112554 - DNA, 23 bp, Artificial sequence
  SiRNA target sequence
aaatgctacattttttacttttt

SEQ ID NO: 112555 - DNA, 23 bp, Artificial sequence
  SiRNA target sequence
aatgctacattttttactttttt

SEQ ID NO: 112556 - DNA, 23 bp, Artificial sequence
  SiRNA target sequence
atgctacattttttactttttta

SEQ ID NO: 112557 - DNA, 23 bp, Artificial sequence
  SiRNA target sequence
tgctacattttttacttttttat

SEQ ID NO: 112558 - DNA, 23 bp, Artificial sequence
  SiRNA target sequence
gctacattttttacttttttata

SEQ ID NO: 112559 - DNA, 23 bp, Artificial sequence
  SiRNA target sequence
ctacattttttacttttttatat

SEQ ID NO: 112560 - DNA, 23 bp, Artificial sequence
  SiRNA target sequence
tacattttttacttttttatatt

SEQ ID NO: 112561 - DNA, 23 bp, Artificial sequence
  SiRNA target sequence
acattttttacttttttatattg

SEQ ID NO: 112562 - DNA, 23 bp, Artificial sequence
  SiRNA target sequence
cattttttacttttttatattgt

SEQ ID NO: 112563 - DNA, 23 bp, Artificial sequence
  SiRNA target sequence
attttttacttttttatattgta

SEQ ID NO: 112564 - DNA, 23 bp, Artificial sequence
  SiRNA target sequence
ttttttacttttttatattgtaa

SEQ ID NO: 112565 - DNA, 23 bp, Artificial sequence
  SiRNA target sequence
tttttacttttttatattgtaaa

SEQ ID NO: 112566 - DNA, 23 bp, Artificial sequence
  SiRNA target sequence
ttttacttttttatattgtaaag

SEQ ID NO: 112567 - DNA, 23 bp, Artificial sequence
  SiRNA target sequence
tttacttttttatattgtaaagc

SEQ ID NO: 112568 - DNA, 23 bp, Artificial sequence
  SiRNA target sequence
ttacttttttatattgtaaagca

SEQ ID NO: 112569 - DNA, 23 bp, Artificial sequence
  SiRNA target sequence
tacttttttatattgtaaagcaa

SEQ ID NO: 112570 - DNA, 23 bp, Artificial sequence
  SiRNA target sequence
acttttttatattgtaaagcaaa

SEQ ID NO: 112571 - DNA, 23 bp, Artificial sequence
  SiRNA target sequence
cttttttatattgtaaagcaaat

SEQ ID NO: 112572 - DNA, 23 bp, Artificial sequence
  SiRNA target sequence
ttttttatattgtaaagcaaatc

SEQ ID NO: 112573 - DNA, 23 bp, Artificial sequence
  SiRNA target sequence
tttttatattgtaaagcaaatcc

SEQ ID NO: 112574 - DNA, 23 bp, Artificial sequence
  SiRNA target sequence
ttttatattgtaaagcaaatccc

SEQ ID NO: 112575 - DNA, 23 bp, Artificial sequence
  SiRNA target sequence
tttatattgtaaagcaaatccca

SEQ ID NO: 112576 - DNA, 23 bp, Artificial sequence
  SiRNA target sequence
ttatattgtaaagcaaatcccaa

SEQ ID NO: 112577 - DNA, 23 bp, Artificial sequence
  SiRNA target sequence
tatattgtaaagcaaatcccaat

SEQ ID NO: 112578 - DNA, 23 bp, Artificial sequence
  SiRNA target sequence
atattgtaaagcaaatcccaatc

SEQ ID NO: 112579 - DNA, 23 bp, Artificial sequence
  SiRNA target sequence
tattgtaaagcaaatcccaatcc

SEQ ID NO: 112580 - DNA, 23 bp, Artificial sequence
  SiRNA target sequence
attgtaaagcaaatcccaatcct

SEQ ID NO: 112581 - DNA, 23 bp, Artificial sequence
  SiRNA target sequence
ttgtaaagcaaatcccaatcctg

SEQ ID NO: 112582 - DNA, 23 bp, Artificial sequence
  SiRNA target sequence
tgtaaagcaaatcccaatcctgt

SEQ ID NO: 112583 - DNA, 23 bp, Artificial sequence
  SiRNA target sequence
gtaaagcaaatcccaatcctgta

SEQ ID NO: 112584 - DNA, 23 bp, Artificial sequence
  SiRNA target sequence
taaagcaaatcccaatcctgtac

SEQ ID NO: 112585 - DNA, 23 bp, Artificial sequence
  SiRNA target sequence
aaagcaaatcccaatcctgtacc

SEQ ID NO: 112586 - DNA, 23 bp, Artificial sequence
  SiRNA target sequence
aagcaaatcccaatcctgtacca

SEQ ID NO: 112587 - DNA, 23 bp, Artificial sequence
  SiRNA target sequence
agcaaatcccaatcctgtaccaa

SEQ ID NO: 112588 - DNA, 23 bp, Artificial sequence
  SiRNA target sequence
gcaaatcccaatcctgtaccaag

SEQ ID NO: 112589 - DNA, 23 bp, Artificial sequence
  SiRNA target sequence
caaatcccaatcctgtaccaagc

SEQ ID NO: 112590 - DNA, 23 bp, Artificial sequence
  SiRNA target sequence
aaatcccaatcctgtaccaagcg

SEQ ID NO: 112591 - DNA, 23 bp, Artificial sequence
  SiRNA target sequence
aatcccaatcctgtaccaagcga

SEQ ID NO: 112592 - DNA, 23 bp, Artificial sequence
  SiRNA target sequence
atcccaatcctgtaccaagcgat

SEQ ID NO: 112593 - DNA, 23 bp, Artificial sequence
  SiRNA target sequence
tcccaatcctgtaccaagcgata

SEQ ID NO: 112594 - DNA, 23 bp, Artificial sequence
  SiRNA target sequence
cccaatcctgtaccaagcgatac

SEQ ID NO: 112595 - DNA, 23 bp, Artificial sequence
  SiRNA target sequence
ccaatcctgtaccaagcgatacc

SEQ ID NO: 112596 - DNA, 23 bp, Artificial sequence
  SiRNA target sequence
caatcctgtaccaagcgatacct

SEQ ID NO: 112597 - DNA, 23 bp, Artificial sequence
  SiRNA target sequence
aatcctgtaccaagcgatacctg

SEQ ID NO: 112598 - DNA, 23 bp, Artificial sequence
  SiRNA target sequence
atcctgtaccaagcgatacctgc

SEQ ID NO: 112599 - DNA, 23 bp, Artificial sequence
  SiRNA target sequence
tcctgtaccaagcgatacctgcg

SEQ ID NO: 112600 - DNA, 23 bp, Artificial sequence
  SiRNA target sequence
cctgtaccaagcgatacctgcgc

SEQ ID NO: 112601 - DNA, 23 bp, Artificial sequence
  SiRNA target sequence
ctgtaccaagcgatacctgcgca

SEQ ID NO: 112602 - DNA, 23 bp, Artificial sequence
  SiRNA target sequence
tgtaccaagcgatacctgcgcac

SEQ ID NO: 112603 - DNA, 23 bp, Artificial sequence
  SiRNA target sequence
gtaccaagcgatacctgcgcacc

SEQ ID NO: 112604 - DNA, 23 bp, Artificial sequence
  SiRNA target sequence
taccaagcgatacctgcgcacct

SEQ ID NO: 112605 - DNA, 23 bp, Artificial sequence
  SiRNA target sequence
accaagcgatacctgcgcaccta

SEQ ID NO: 112606 - DNA, 23 bp, Artificial sequence
  SiRNA target sequence
ccaagcgatacctgcgcacctac

SEQ ID NO: 112607 - DNA, 23 bp, Artificial sequence
  SiRNA target sequence
caagcgatacctgcgcacctact

SEQ ID NO: 112608 - DNA, 23 bp, Artificial sequence
  SiRNA target sequence
aagcgatacctgcgcacctacta

SEQ ID NO: 112609 - DNA, 23 bp, Artificial sequence
  SiRNA target sequence
agcgatacctgcgcacctactat

SEQ ID NO: 112610 - DNA, 23 bp, Artificial sequence
  SiRNA target sequence
gcgatacctgcgcacctactata

SEQ ID NO: 112611 - DNA, 23 bp, Artificial sequence
  SiRNA target sequence
cgatacctgcgcacctactatac

SEQ ID NO: 112612 - DNA, 23 bp, Artificial sequence
  SiRNA target sequence
gatacctgcgcacctactatacc

SEQ ID NO: 112613 - DNA, 23 bp, Artificial sequence
  SiRNA target sequence
atacctgcgcacctactataccg

SEQ ID NO: 112614 - DNA, 23 bp, Artificial sequence
  SiRNA target sequence
tacctgcgcacctactataccgt

SEQ ID NO: 112615 - DNA, 23 bp, Artificial sequence
  SiRNA target sequence
acctgcgcacctactataccgtg

SEQ ID NO: 112616 - DNA, 23 bp, Artificial sequence
  SiRNA target sequence
cctgcgcacctactataccgtgt

SEQ ID NO: 112617 - DNA, 23 bp, Artificial sequence
  SiRNA target sequence
ctgcgcacctactataccgtgtc

SEQ ID NO: 112618 - DNA, 23 bp, Artificial sequence
  SiRNA target sequence
tgcgcacctactataccgtgtcc

SEQ ID NO: 112619 - DNA, 23 bp, Artificial sequence
  SiRNA target sequence
gcgcacctactataccgtgtccc

SEQ ID NO: 112620 - DNA, 23 bp, Artificial sequence
  SiRNA target sequence
cgcacctactataccgtgtcccc

SEQ ID NO: 112621 - DNA, 23 bp, Artificial sequence
  SiRNA target sequence
gcacctactataccgtgtccccc

SEQ ID NO: 112622 - DNA, 23 bp, Artificial sequence
  SiRNA target sequence
cacctactataccgtgtccccca

SEQ ID NO: 112623 - DNA, 23 bp, Artificial sequence
  SiRNA target sequence
acctactataccgtgtcccccat

SEQ ID NO: 112624 - DNA, 23 bp, Artificial sequence
  SiRNA target sequence
cctactataccgtgtcccccata

SEQ ID NO: 112625 - DNA, 23 bp, Artificial sequence
  SiRNA target sequence
ctactataccgtgtcccccataa

SEQ ID NO: 112626 - DNA, 23 bp, Artificial sequence
  SiRNA target sequence
tactataccgtgtcccccataaa

SEQ ID NO: 112627 - DNA, 23 bp, Artificial sequence
  SiRNA target sequence
actataccgtgtcccccataaaa

SEQ ID NO: 112628 - DNA, 23 bp, Artificial sequence
  SiRNA target sequence
ctataccgtgtcccccataaaat

SEQ ID NO: 112629 - DNA, 23 bp, Artificial sequence
  SiRNA target sequence
tataccgtgtcccccataaaatt

SEQ ID NO: 112630 - DNA, 23 bp, Artificial sequence
  SiRNA target sequence
ataccgtgtcccccataaaattg

SEQ ID NO: 112631 - DNA, 23 bp, Artificial sequence
  SiRNA target sequence
taccgtgtcccccataaaattgg

SEQ ID NO: 112632 - DNA, 23 bp, Artificial sequence
  SiRNA target sequence
accgtgtcccccataaaattggt

SEQ ID NO: 112633 - DNA, 23 bp, Artificial sequence
  SiRNA target sequence
ccgtgtcccccataaaattggtc

SEQ ID NO: 112634 - DNA, 23 bp, Artificial sequence
  SiRNA target sequence
cgtgtcccccataaaattggtca

SEQ ID NO: 112635 - DNA, 23 bp, Artificial sequence
  SiRNA target sequence
gtgtcccccataaaattggtcat

SEQ ID NO: 112636 - DNA, 23 bp, Artificial sequence
  SiRNA target sequence
tgtcccccataaaattggtcatt

SEQ ID NO: 112637 - DNA, 23 bp, Artificial sequence
  SiRNA target sequence
gtcccccataaaattggtcatta

SEQ ID NO: 112638 - DNA, 23 bp, Artificial sequence
  SiRNA target sequence
tcccccataaaattggtcattat

SEQ ID NO: 112639 - DNA, 23 bp, Artificial sequence
  SiRNA target sequence
cccccataaaattggtcattata

SEQ ID NO: 112640 - DNA, 23 bp, Artificial sequence
  SiRNA target sequence
ccccataaaattggtcattatac

SEQ ID NO: 112641 - DNA, 23 bp, Artificial sequence
  SiRNA target sequence
cccataaaattggtcattataca

SEQ ID NO: 112642 - DNA, 23 bp, Artificial sequence
  SiRNA target sequence
ccataaaattggtcattatacaa

SEQ ID NO: 112643 - DNA, 23 bp, Artificial sequence
  SiRNA target sequence
cataaaattggtcattatacaaa

SEQ ID NO: 112644 - DNA, 23 bp, Artificial sequence
  SiRNA target sequence
ataaaattggtcattatacaaat

SEQ ID NO: 112645 - DNA, 23 bp, Artificial sequence
  SiRNA target sequence
taaaattggtcattatacaaatg

SEQ ID NO: 112646 - DNA, 23 bp, Artificial sequence
  SiRNA target sequence
aaaattggtcattatacaaatgc

SEQ ID NO: 112647 - DNA, 23 bp, Artificial sequence
  SiRNA target sequence
aaattggtcattatacaaatgca

SEQ ID NO: 112648 - DNA, 23 bp, Artificial sequence
  SiRNA target sequence
aattggtcattatacaaatgcat

SEQ ID NO: 112649 - DNA, 23 bp, Artificial sequence
  SiRNA target sequence
attggtcattatacaaatgcatc

SEQ ID NO: 112650 - DNA, 23 bp, Artificial sequence
  SiRNA target sequence
ttggtcattatacaaatgcatcg

SEQ ID NO: 112651 - DNA, 23 bp, Artificial sequence
  SiRNA target sequence
tggtcattatacaaatgcatcga

SEQ ID NO: 112652 - DNA, 23 bp, Artificial sequence
  SiRNA target sequence
ggtcattatacaaatgcatcgat

SEQ ID NO: 112653 - DNA, 23 bp, Artificial sequence
  SiRNA target sequence
gtcattatacaaatgcatcgatc

SEQ ID NO: 112654 - DNA, 23 bp, Artificial sequence
  SiRNA target sequence
tcattatacaaatgcatcgatcc

SEQ ID NO: 112655 - DNA, 23 bp, Artificial sequence
  SiRNA target sequence
cattatacaaatgcatcgatcct

SEQ ID NO: 112656 - DNA, 23 bp, Artificial sequence
  SiRNA target sequence
attatacaaatgcatcgatcctc

SEQ ID NO: 112657 - DNA, 23 bp, Artificial sequence
  SiRNA target sequence
ttatacaaatgcatcgatcctcc

SEQ ID NO: 112658 - DNA, 23 bp, Artificial sequence
  SiRNA target sequence
tatacaaatgcatcgatcctcct

SEQ ID NO: 112659 - DNA, 23 bp, Artificial sequence
  SiRNA target sequence
atacaaatgcatcgatcctcctt

SEQ ID NO: 112660 - DNA, 23 bp, Artificial sequence
  SiRNA target sequence
tacaaatgcatcgatcctccttt

SEQ ID NO: 112661 - DNA, 23 bp, Artificial sequence
  SiRNA target sequence
acaaatgcatcgatcctcctttt

SEQ ID NO: 112662 - DNA, 23 bp, Artificial sequence
  SiRNA target sequence
caaatgcatcgatcctccttttc

SEQ ID NO: 112663 - DNA, 23 bp, Artificial sequence
  SiRNA target sequence
aaatgcatcgatcctccttttcc

SEQ ID NO: 112664 - DNA, 23 bp, Artificial sequence
  SiRNA target sequence
aatgcatcgatcctccttttcct

SEQ ID NO: 112665 - DNA, 23 bp, Artificial sequence
  SiRNA target sequence
atgcatcgatcctccttttcctt

SEQ ID NO: 112666 - DNA, 23 bp, Artificial sequence
  SiRNA target sequence
tgcatcgatcctccttttccttt

SEQ ID NO: 112667 - DNA, 23 bp, Artificial sequence
  SiRNA target sequence
gcatcgatcctccttttcctttg

SEQ ID NO: 112668 - DNA, 23 bp, Artificial sequence
  SiRNA target sequence
catcgatcctccttttcctttgc

SEQ ID NO: 112669 - DNA, 23 bp, Artificial sequence
  SiRNA target sequence
atcgatcctccttttcctttgca

SEQ ID NO: 112670 - DNA, 23 bp, Artificial sequence
  SiRNA target sequence
tcgatcctccttttcctttgcaa

SEQ ID NO: 112671 - DNA, 23 bp, Artificial sequence
  SiRNA target sequence
cgatcctccttttcctttgcaat

SEQ ID NO: 112672 - DNA, 23 bp, Artificial sequence
  SiRNA target sequence
gatcctccttttcctttgcaatt

SEQ ID NO: 112673 - DNA, 23 bp, Artificial sequence
  SiRNA target sequence
atcctccttttcctttgcaatta

SEQ ID NO: 112674 - DNA, 23 bp, Artificial sequence
  SiRNA target sequence
tcctccttttcctttgcaattac

SEQ ID NO: 112675 - DNA, 23 bp, Artificial sequence
  SiRNA target sequence
cctccttttcctttgcaattacc

SEQ ID NO: 112676 - DNA, 23 bp, Artificial sequence
  SiRNA target sequence
ctccttttcctttgcaattacca

SEQ ID NO: 112677 - DNA, 23 bp, Artificial sequence
  SiRNA target sequence
tccttttcctttgcaattaccaa

SEQ ID NO: 112678 - DNA, 23 bp, Artificial sequence
  SiRNA target sequence
ccttttcctttgcaattaccaat

SEQ ID NO: 112679 - DNA, 23 bp, Artificial sequence
  SiRNA target sequence
cttttcctttgcaattaccaata

SEQ ID NO: 112680 - DNA, 23 bp, Artificial sequence
  SiRNA target sequence
ttttcctttgcaattaccaatag

SEQ ID NO: 112681 - DNA, 23 bp, Artificial sequence
  SiRNA target sequence
tttcctttgcaattaccaatagc

SEQ ID NO: 112682 - DNA, 23 bp, Artificial sequence
  SiRNA target sequence
ttcctttgcaattaccaatagcc

SEQ ID NO: 112683 - DNA, 23 bp, Artificial sequence
  SiRNA target sequence
tcctttgcaattaccaatagcct

SEQ ID NO: 112684 - DNA, 23 bp, Artificial sequence
  SiRNA target sequence
cctttgcaattaccaatagcctt

SEQ ID NO: 112685 - DNA, 23 bp, Artificial sequence
  SiRNA target sequence
ctttgcaattaccaatagccttt

SEQ ID NO: 112686 - DNA, 23 bp, Artificial sequence
  SiRNA target sequence
tttgcaattaccaatagcctttc

SEQ ID NO: 112687 - DNA, 23 bp, Artificial sequence
  SiRNA target sequence
ttgcaattaccaatagcctttcc

SEQ ID NO: 112688 - DNA, 23 bp, Artificial sequence
  SiRNA target sequence
tgcaattaccaatagcctttcct

SEQ ID NO: 112689 - DNA, 23 bp, Artificial sequence
  SiRNA target sequence
gcaattaccaatagcctttccta

SEQ ID NO: 112690 - DNA, 23 bp, Artificial sequence
  SiRNA target sequence
caattaccaatagcctttcctaa

SEQ ID NO: 112691 - DNA, 23 bp, Artificial sequence
  SiRNA target sequence
aattaccaatagcctttcctaat

SEQ ID NO: 112692 - DNA, 23 bp, Artificial sequence
  SiRNA target sequence
attaccaatagcctttcctaata

SEQ ID NO: 112693 - DNA, 23 bp, Artificial sequence
  SiRNA target sequence
ttaccaatagcctttcctaataa

SEQ ID NO: 112694 - DNA, 23 bp, Artificial sequence
  SiRNA target sequence
taccaatagcctttcctaataat

SEQ ID NO: 112695 - DNA, 23 bp, Artificial sequence
  SiRNA target sequence
accaatagcctttcctaataatt

SEQ ID NO: 112696 - DNA, 23 bp, Artificial sequence
  SiRNA target sequence
ccaatagcctttcctaataattc

SEQ ID NO: 112697 - DNA, 23 bp, Artificial sequence
  SiRNA target sequence
caatagcctttcctaataattcc

SEQ ID NO: 112698 - DNA, 23 bp, Artificial sequence
  SiRNA target sequence
aatagcctttcctaataattccc

SEQ ID NO: 112699 - DNA, 23 bp, Artificial sequence
  SiRNA target sequence
atagcctttcctaataattcccc

SEQ ID NO: 112700 - DNA, 23 bp, Artificial sequence
  SiRNA target sequence
tagcctttcctaataattcccct

SEQ ID NO: 112701 - DNA, 23 bp, Artificial sequence
  SiRNA target sequence
agcctttcctaataattccccta

SEQ ID NO: 112702 - DNA, 23 bp, Artificial sequence
  SiRNA target sequence
gcctttcctaataattcccctat

SEQ ID NO: 112703 - DNA, 23 bp, Artificial sequence
  SiRNA target sequence
cctttcctaataattcccctata

SEQ ID NO: 112704 - DNA, 23 bp, Artificial sequence
  SiRNA target sequence
ctttcctaataattcccctataa

SEQ ID NO: 112705 - DNA, 23 bp, Artificial sequence
  SiRNA target sequence
tttcctaataattcccctataat

SEQ ID NO: 112706 - DNA, 23 bp, Artificial sequence
  SiRNA target sequence
ttcctaataattcccctataata

SEQ ID NO: 112707 - DNA, 23 bp, Artificial sequence
  SiRNA target sequence
tcctaataattcccctataatac

SEQ ID NO: 112708 - DNA, 23 bp, Artificial sequence
  SiRNA target sequence
cctaataattcccctataatact

SEQ ID NO: 112709 - DNA, 23 bp, Artificial sequence
  SiRNA target sequence
ctaataattcccctataatactt

SEQ ID NO: 112710 - DNA, 23 bp, Artificial sequence
  SiRNA target sequence
taataattcccctataatacttt

SEQ ID NO: 112711 - DNA, 23 bp, Artificial sequence
  SiRNA target sequence
aataattcccctataatactttc

SEQ ID NO: 112712 - DNA, 23 bp, Artificial sequence
  SiRNA target sequence
ataattcccctataatactttct

SEQ ID NO: 112713 - DNA, 23 bp, Artificial sequence
  SiRNA target sequence
taattcccctataatactttcta

SEQ ID NO: 112714 - DNA, 23 bp, Artificial sequence
  SiRNA target sequence
aattcccctataatactttctat

SEQ ID NO: 112715 - DNA, 23 bp, Artificial sequence
  SiRNA target sequence
attcccctataatactttctata

SEQ ID NO: 112716 - DNA, 23 bp, Artificial sequence
  SiRNA target sequence
ttcccctataatactttctatac

SEQ ID NO: 112717 - DNA, 23 bp, Artificial sequence
  SiRNA target sequence
tcccctataatactttctatact

SEQ ID NO: 112718 - DNA, 23 bp, Artificial sequence
  SiRNA target sequence
cccctataatactttctatactg

SEQ ID NO: 112719 - DNA, 23 bp, Artificial sequence
  SiRNA target sequence
ccctataatactttctatactga

SEQ ID NO: 112720 - DNA, 23 bp, Artificial sequence
  SiRNA target sequence
cctataatactttctatactgat

SEQ ID NO: 112721 - DNA, 23 bp, Artificial sequence
  SiRNA target sequence
ctataatactttctatactgatt

SEQ ID NO: 112722 - DNA, 23 bp, Artificial sequence
  SiRNA target sequence
tataatactttctatactgattc

SEQ ID NO: 112723 - DNA, 23 bp, Artificial sequence
  SiRNA target sequence
ataatactttctatactgattcc

SEQ ID NO: 112724 - DNA, 23 bp, Artificial sequence
  SiRNA target sequence
taatactttctatactgattcca

SEQ ID NO: 112725 - DNA, 23 bp, Artificial sequence
  SiRNA target sequence
aatactttctatactgattccac

SEQ ID NO: 112726 - DNA, 23 bp, Artificial sequence
  SiRNA target sequence
atactttctatactgattccaca

SEQ ID NO: 112727 - DNA, 23 bp, Artificial sequence
  SiRNA target sequence
tactttctatactgattccacaa

SEQ ID NO: 112728 - DNA, 23 bp, Artificial sequence
  SiRNA target sequence
actttctatactgattccacaaa

SEQ ID NO: 112729 - DNA, 23 bp, Artificial sequence
  SiRNA target sequence
ctttctatactgattccacaaat

SEQ ID NO: 112730 - DNA, 23 bp, Artificial sequence
  SiRNA target sequence
tttctatactgattccacaaata

SEQ ID NO: 112731 - DNA, 23 bp, Artificial sequence
  SiRNA target sequence
ttctatactgattccacaaataa

SEQ ID NO: 112732 - DNA, 23 bp, Artificial sequence
  SiRNA target sequence
tctatactgattccacaaataaa

SEQ ID NO: 112733 - DNA, 23 bp, Artificial sequence
  SiRNA target sequence
ctatactgattccacaaataaat

SEQ ID NO: 112734 - DNA, 23 bp, Artificial sequence
  SiRNA target sequence
tatactgattccacaaataaatg

SEQ ID NO: 112735 - DNA, 23 bp, Artificial sequence
  SiRNA target sequence
atactgattccacaaataaatgc

SEQ ID NO: 112736 - DNA, 23 bp, Artificial sequence
  SiRNA target sequence
tactgattccacaaataaatgct

SEQ ID NO: 112737 - DNA, 23 bp, Artificial sequence
  SiRNA target sequence
actgattccacaaataaatgcta

SEQ ID NO: 112738 - DNA, 23 bp, Artificial sequence
  SiRNA target sequence
ctgattccacaaataaatgctaa

SEQ ID NO: 112739 - DNA, 23 bp, Artificial sequence
  SiRNA target sequence
tgattccacaaataaatgctaat

SEQ ID NO: 112740 - DNA, 23 bp, Artificial sequence
  SiRNA target sequence
gattccacaaataaatgctaatc

SEQ ID NO: 112741 - DNA, 23 bp, Artificial sequence
  SiRNA target sequence
attccacaaataaatgctaatcc

SEQ ID NO: 112742 - DNA, 23 bp, Artificial sequence
  SiRNA target sequence
ttccacaaataaatgctaatcca

SEQ ID NO: 112743 - DNA, 23 bp, Artificial sequence
  SiRNA target sequence
tccacaaataaatgctaatccat

SEQ ID NO: 112744 - DNA, 23 bp, Artificial sequence
  SiRNA target sequence
ccacaaataaatgctaatccatg

SEQ ID NO: 112745 - DNA, 23 bp, Artificial sequence
  SiRNA target sequence
cacaaataaatgctaatccatgg

SEQ ID NO: 112746 - DNA, 23 bp, Artificial sequence
  SiRNA target sequence
acaaataaatgctaatccatggc

SEQ ID NO: 112747 - DNA, 23 bp, Artificial sequence
  SiRNA target sequence
caaataaatgctaatccatggca

SEQ ID NO: 112748 - DNA, 23 bp, Artificial sequence
  SiRNA target sequence
aaataaatgctaatccatggcat

SEQ ID NO: 112749 - DNA, 23 bp, Artificial sequence
  SiRNA target sequence
aataaatgctaatccatggcatc

SEQ ID NO: 112750 - DNA, 23 bp, Artificial sequence
  SiRNA target sequence
ataaatgctaatccatggcatct

SEQ ID NO: 112751 - DNA, 23 bp, Artificial sequence
  SiRNA target sequence
taaatgctaatccatggcatcta

SEQ ID NO: 112752 - DNA, 23 bp, Artificial sequence
  SiRNA target sequence
aaatgctaatccatggcatctat

SEQ ID NO: 112753 - DNA, 23 bp, Artificial sequence
  SiRNA target sequence
aatgctaatccatggcatctata

SEQ ID NO: 112754 - DNA, 23 bp, Artificial sequence
  SiRNA target sequence
atgctaatccatggcatctataa

SEQ ID NO: 112755 - DNA, 23 bp, Artificial sequence
  SiRNA target sequence
tgctaatccatggcatctataag

SEQ ID NO: 112756 - DNA, 23 bp, Artificial sequence
  SiRNA target sequence
gctaatccatggcatctataaga

SEQ ID NO: 112757 - DNA, 23 bp, Artificial sequence
  SiRNA target sequence
ctaatccatggcatctataagat

SEQ ID NO: 112758 - DNA, 23 bp, Artificial sequence
  SiRNA target sequence
taatccatggcatctataagatc

SEQ ID NO: 112759 - DNA, 23 bp, Artificial sequence
  SiRNA target sequence
aatccatggcatctataagatcc

SEQ ID NO: 112760 - DNA, 23 bp, Artificial sequence
  SiRNA target sequence
atccatggcatctataagatcct

SEQ ID NO: 112761 - DNA, 23 bp, Artificial sequence
  SiRNA target sequence
tccatggcatctataagatccta

SEQ ID NO: 112762 - DNA, 23 bp, Artificial sequence
  SiRNA target sequence
ccatggcatctataagatcctat

SEQ ID NO: 112763 - DNA, 23 bp, Artificial sequence
  SiRNA target sequence
catggcatctataagatcctatg

SEQ ID NO: 112764 - DNA, 23 bp, Artificial sequence
  SiRNA target sequence
atggcatctataagatcctatga

SEQ ID NO: 112765 - DNA, 23 bp, Artificial sequence
  SiRNA target sequence
tggcatctataagatcctatgac

SEQ ID NO: 112766 - DNA, 23 bp, Artificial sequence
  SiRNA target sequence
ggcatctataagatcctatgact

SEQ ID NO: 112767 - DNA, 23 bp, Artificial sequence
  SiRNA target sequence
gcatctataagatcctatgactt

SEQ ID NO: 112768 - DNA, 23 bp, Artificial sequence
  SiRNA target sequence
catctataagatcctatgacttt

SEQ ID NO: 112769 - DNA, 23 bp, Artificial sequence
  SiRNA target sequence
atctataagatcctatgacttta

SEQ ID NO: 112770 - DNA, 23 bp, Artificial sequence
  SiRNA target sequence
tctataagatcctatgactttat

SEQ ID NO: 112771 - DNA, 23 bp, Artificial sequence
  SiRNA target sequence
ctataagatcctatgactttatc

SEQ ID NO: 112772 - DNA, 23 bp, Artificial sequence
  SiRNA target sequence
tataagatcctatgactttatca

SEQ ID NO: 112773 - DNA, 23 bp, Artificial sequence
  SiRNA target sequence
ataagatcctatgactttatcat

SEQ ID NO: 112774 - DNA, 23 bp, Artificial sequence
  SiRNA target sequence
taagatcctatgactttatcatt

SEQ ID NO: 112775 - DNA, 23 bp, Artificial sequence
  SiRNA target sequence
aagatcctatgactttatcattt

SEQ ID NO: 112776 - DNA, 23 bp, Artificial sequence
  SiRNA target sequence
agatcctatgactttatcatttt

SEQ ID NO: 112777 - DNA, 23 bp, Artificial sequence
  SiRNA target sequence
gatcctatgactttatcattttt

SEQ ID NO: 112778 - DNA, 23 bp, Artificial sequence
  SiRNA target sequence
atcctatgactttatcattttta

SEQ ID NO: 112779 - DNA, 23 bp, Artificial sequence
  SiRNA target sequence
tcctatgactttatcatttttat

SEQ ID NO: 112780 - DNA, 23 bp, Artificial sequence
  SiRNA target sequence
cctatgactttatcatttttatc

SEQ ID NO: 112781 - DNA, 23 bp, Artificial sequence
  SiRNA target sequence
ctatgactttatcatttttatct

SEQ ID NO: 112782 - DNA, 23 bp, Artificial sequence
  SiRNA target sequence
tatgactttatcatttttatcta

SEQ ID NO: 112783 - DNA, 23 bp, Artificial sequence
  SiRNA target sequence
atgactttatcatttttatctag

SEQ ID NO: 112784 - DNA, 23 bp, Artificial sequence
  SiRNA target sequence
tgactttatcatttttatctagt

SEQ ID NO: 112785 - DNA, 23 bp, Artificial sequence
  SiRNA target sequence
gactttatcatttttatctagta

SEQ ID NO: 112786 - DNA, 23 bp, Artificial sequence
  SiRNA target sequence
actttatcatttttatctagtac

SEQ ID NO: 112787 - DNA, 23 bp, Artificial sequence
  SiRNA target sequence
ctttatcatttttatctagtacc

SEQ ID NO: 112788 - DNA, 23 bp, Artificial sequence
  SiRNA target sequence
tttatcatttttatctagtacct

SEQ ID NO: 112789 - DNA, 23 bp, Artificial sequence
  SiRNA target sequence
ttatcatttttatctagtacctt

SEQ ID NO: 112790 - DNA, 23 bp, Artificial sequence
  SiRNA target sequence
tatcatttttatctagtaccttt

SEQ ID NO: 112791 - DNA, 23 bp, Artificial sequence
  SiRNA target sequence
atcatttttatctagtacctttt

SEQ ID NO: 112792 - DNA, 23 bp, Artificial sequence
  SiRNA target sequence
tcatttttatctagtaccttttg

SEQ ID NO: 112793 - DNA, 23 bp, Artificial sequence
  SiRNA target sequence
catttttatctagtaccttttgt

SEQ ID NO: 112794 - DNA, 23 bp, Artificial sequence
  SiRNA target sequence
atttttatctagtaccttttgta

SEQ ID NO: 112795 - DNA, 23 bp, Artificial sequence
  SiRNA target sequence
tttttatctagtaccttttgtaa

SEQ ID NO: 112796 - DNA, 23 bp, Artificial sequence
  SiRNA target sequence
ttttatctagtaccttttgtaaa

SEQ ID NO: 112797 - DNA, 23 bp, Artificial sequence
  SiRNA target sequence
tttatctagtaccttttgtaaac

SEQ ID NO: 112798 - DNA, 23 bp, Artificial sequence
  SiRNA target sequence
ttatctagtaccttttgtaaact

SEQ ID NO: 112799 - DNA, 23 bp, Artificial sequence
  SiRNA target sequence
tatctagtaccttttgtaaactc

SEQ ID NO: 112800 - DNA, 23 bp, Artificial sequence
  SiRNA target sequence
atctagtaccttttgtaaactca

SEQ ID NO: 112801 - DNA, 23 bp, Artificial sequence
  SiRNA target sequence
tctagtaccttttgtaaactcat

SEQ ID NO: 112802 - DNA, 23 bp, Artificial sequence
  SiRNA target sequence
ctagtaccttttgtaaactcata

SEQ ID NO: 112803 - DNA, 23 bp, Artificial sequence
  SiRNA target sequence
tagtaccttttgtaaactcatat

SEQ ID NO: 112804 - DNA, 23 bp, Artificial sequence
  SiRNA target sequence
agtaccttttgtaaactcatata

SEQ ID NO: 112805 - DNA, 23 bp, Artificial sequence
  SiRNA target sequence
gtaccttttgtaaactcatataa

SEQ ID NO: 112806 - DNA, 23 bp, Artificial sequence
  SiRNA target sequence
taccttttgtaaactcatataaa

SEQ ID NO: 112807 - DNA, 23 bp, Artificial sequence
  SiRNA target sequence
accttttgtaaactcatataaat

SEQ ID NO: 112808 - DNA, 23 bp, Artificial sequence
  SiRNA target sequence
ccttttgtaaactcatataaatg

SEQ ID NO: 112809 - DNA, 23 bp, Artificial sequence
  SiRNA target sequence
cttttgtaaactcatataaatgt

SEQ ID NO: 112810 - DNA, 23 bp, Artificial sequence
  SiRNA target sequence
ttttgtaaactcatataaatgtt

SEQ ID NO: 112811 - DNA, 23 bp, Artificial sequence
  SiRNA target sequence
tttgtaaactcatataaatgttt

SEQ ID NO: 112812 - DNA, 23 bp, Artificial sequence
  SiRNA target sequence
ttgtaaactcatataaatgtttt

SEQ ID NO: 112813 - DNA, 23 bp, Artificial sequence
  SiRNA target sequence
tgtaaactcatataaatgttttc

SEQ ID NO: 112814 - DNA, 23 bp, Artificial sequence
  SiRNA target sequence
gtaaactcatataaatgttttcc

SEQ ID NO: 112815 - DNA, 23 bp, Artificial sequence
  SiRNA target sequence
taaactcatataaatgttttcct

SEQ ID NO: 112816 - DNA, 23 bp, Artificial sequence
  SiRNA target sequence
aaactcatataaatgttttcctg

SEQ ID NO: 112817 - DNA, 23 bp, Artificial sequence
  SiRNA target sequence
aactcatataaatgttttcctgt

SEQ ID NO: 112818 - DNA, 23 bp, Artificial sequence
  SiRNA target sequence
actcatataaatgttttcctgtc

SEQ ID NO: 112819 - DNA, 23 bp, Artificial sequence
  SiRNA target sequence
ctcatataaatgttttcctgtcc

SEQ ID NO: 112820 - DNA, 23 bp, Artificial sequence
  SiRNA target sequence
tcatataaatgttttcctgtcct

SEQ ID NO: 112821 - DNA, 23 bp, Artificial sequence
  SiRNA target sequence
catataaatgttttcctgtccta

SEQ ID NO: 112822 - DNA, 23 bp, Artificial sequence
  SiRNA target sequence
atataaatgttttcctgtcctat

SEQ ID NO: 112823 - DNA, 23 bp, Artificial sequence
  SiRNA target sequence
tataaatgttttcctgtcctatt

SEQ ID NO: 112824 - DNA, 23 bp, Artificial sequence
  SiRNA target sequence
ataaatgttttcctgtcctatta

SEQ ID NO: 112825 - DNA, 23 bp, Artificial sequence
  SiRNA target sequence
taaatgttttcctgtcctattac

SEQ ID NO: 112826 - DNA, 23 bp, Artificial sequence
  SiRNA target sequence
aaatgttttcctgtcctattact

SEQ ID NO: 112827 - DNA, 23 bp, Artificial sequence
  SiRNA target sequence
aatgttttcctgtcctattacta

SEQ ID NO: 112828 - DNA, 23 bp, Artificial sequence
  SiRNA target sequence
atgttttcctgtcctattactaa

SEQ ID NO: 112829 - DNA, 23 bp, Artificial sequence
  SiRNA target sequence
tgttttcctgtcctattactaaa

SEQ ID NO: 112830 - DNA, 23 bp, Artificial sequence
  SiRNA target sequence
gttttcctgtcctattactaaat

SEQ ID NO: 112831 - DNA, 23 bp, Artificial sequence
  SiRNA target sequence
ttttcctgtcctattactaaatg

SEQ ID NO: 112832 - DNA, 23 bp, Artificial sequence
  SiRNA target sequence
tttcctgtcctattactaaatga

SEQ ID NO: 112833 - DNA, 23 bp, Artificial sequence
  SiRNA target sequence
ttcctgtcctattactaaatgac

SEQ ID NO: 112834 - DNA, 23 bp, Artificial sequence
  SiRNA target sequence
tcctgtcctattactaaatgaca

SEQ ID NO: 112835 - DNA, 23 bp, Artificial sequence
  SiRNA target sequence
cctgtcctattactaaatgacag

SEQ ID NO: 112836 - DNA, 23 bp, Artificial sequence
  SiRNA target sequence
ctgtcctattactaaatgacaga

SEQ ID NO: 112837 - DNA, 23 bp, Artificial sequence
  SiRNA target sequence
tgtcctattactaaatgacagaa

SEQ ID NO: 112838 - DNA, 23 bp, Artificial sequence
  SiRNA target sequence
gtcctattactaaatgacagaag

SEQ ID NO: 112839 - DNA, 23 bp, Artificial sequence
  SiRNA target sequence
tcctattactaaatgacagaagc

SEQ ID NO: 112840 - DNA, 23 bp, Artificial sequence
  SiRNA target sequence
cctattactaaatgacagaagcc

SEQ ID NO: 112841 - DNA, 23 bp, Artificial sequence
  SiRNA target sequence
ctattactaaatgacagaagcct

SEQ ID NO: 112842 - DNA, 23 bp, Artificial sequence
  SiRNA target sequence
tattactaaatgacagaagcctc

SEQ ID NO: 112843 - DNA, 23 bp, Artificial sequence
  SiRNA target sequence
attactaaatgacagaagcctct

SEQ ID NO: 112844 - DNA, 23 bp, Artificial sequence
  SiRNA target sequence
ttactaaatgacagaagcctctt

SEQ ID NO: 112845 - DNA, 23 bp, Artificial sequence
  SiRNA target sequence
tactaaatgacagaagcctctta

SEQ ID NO: 112846 - DNA, 23 bp, Artificial sequence
  SiRNA target sequence
actaaatgacagaagcctcttat

SEQ ID NO: 112847 - DNA, 23 bp, Artificial sequence
  SiRNA target sequence
ctaaatgacagaagcctcttata

SEQ ID NO: 112848 - DNA, 23 bp, Artificial sequence
  SiRNA target sequence
taaatgacagaagcctcttatat

SEQ ID NO: 112849 - DNA, 23 bp, Artificial sequence
  SiRNA target sequence
aaatgacagaagcctcttatatt

SEQ ID NO: 112850 - DNA, 23 bp, Artificial sequence
  SiRNA target sequence
aatgacagaagcctcttatattt

SEQ ID NO: 112851 - DNA, 23 bp, Artificial sequence
  SiRNA target sequence
atgacagaagcctcttatatttc

SEQ ID NO: 112852 - DNA, 23 bp, Artificial sequence
  SiRNA target sequence
tgacagaagcctcttatatttcc

SEQ ID NO: 112853 - DNA, 23 bp, Artificial sequence
  SiRNA target sequence
gacagaagcctcttatatttcct

SEQ ID NO: 112854 - DNA, 23 bp, Artificial sequence
  SiRNA target sequence
acagaagcctcttatatttcctt

SEQ ID NO: 112855 - DNA, 23 bp, Artificial sequence
  SiRNA target sequence
cagaagcctcttatatttccttt

SEQ ID NO: 112856 - DNA, 23 bp, Artificial sequence
  SiRNA target sequence
agaagcctcttatatttcctttt

SEQ ID NO: 112857 - DNA, 23 bp, Artificial sequence
  SiRNA target sequence
gaagcctcttatatttccttttt

SEQ ID NO: 112858 - DNA, 23 bp, Artificial sequence
  SiRNA target sequence
aagcctcttatatttcctttttt

SEQ ID NO: 112859 - DNA, 23 bp, Artificial sequence
  SiRNA target sequence
agcctcttatatttcctttttta

SEQ ID NO: 112860 - DNA, 23 bp, Artificial sequence
  SiRNA target sequence
gcctcttatatttccttttttat

SEQ ID NO: 112861 - DNA, 23 bp, Artificial sequence
  SiRNA target sequence
cctcttatatttccttttttata

SEQ ID NO: 112862 - DNA, 23 bp, Artificial sequence
  SiRNA target sequence
ctcttatatttccttttttatac

SEQ ID NO: 112863 - DNA, 23 bp, Artificial sequence
  SiRNA target sequence
tcttatatttccttttttatact

SEQ ID NO: 112864 - DNA, 23 bp, Artificial sequence
  SiRNA target sequence
cttatatttccttttttatactt

SEQ ID NO: 112865 - DNA, 23 bp, Artificial sequence
  SiRNA target sequence
ttatatttccttttttatactta

SEQ ID NO: 112866 - DNA, 23 bp, Artificial sequence
  SiRNA target sequence
tatatttccttttttatacttag

SEQ ID NO: 112867 - DNA, 23 bp, Artificial sequence
  SiRNA target sequence
atatttccttttttatacttaga

SEQ ID NO: 112868 - DNA, 23 bp, Artificial sequence
  SiRNA target sequence
tatttccttttttatacttagag

SEQ ID NO: 112869 - DNA, 23 bp, Artificial sequence
  SiRNA target sequence
atttccttttttatacttagagt

SEQ ID NO: 112870 - DNA, 23 bp, Artificial sequence
  SiRNA target sequence
tttccttttttatacttagagtt

SEQ ID NO: 112871 - DNA, 23 bp, Artificial sequence
  SiRNA target sequence
ttccttttttatacttagagtta

SEQ ID NO: 112872 - DNA, 23 bp, Artificial sequence
  SiRNA target sequence
tccttttttatacttagagttag

SEQ ID NO: 112873 - DNA, 23 bp, Artificial sequence
  SiRNA target sequence
ccttttttatacttagagttagc

SEQ ID NO: 112874 - DNA, 23 bp, Artificial sequence
  SiRNA target sequence
cttttttatacttagagttagca

SEQ ID NO: 112875 - DNA, 23 bp, Artificial sequence
  SiRNA target sequence
ttttttatacttagagttagcat

SEQ ID NO: 112876 - DNA, 23 bp, Artificial sequence
  SiRNA target sequence
tttttatacttagagttagcata

SEQ ID NO: 112877 - DNA, 23 bp, Artificial sequence
  SiRNA target sequence
ttttatacttagagttagcatat

SEQ ID NO: 112878 - DNA, 23 bp, Artificial sequence
  SiRNA target sequence
tttatacttagagttagcatatt

SEQ ID NO: 112879 - DNA, 23 bp, Artificial sequence
  SiRNA target sequence
ttatacttagagttagcatattc

SEQ ID NO: 112880 - DNA, 23 bp, Artificial sequence
  SiRNA target sequence
tatacttagagttagcatattct

SEQ ID NO: 112881 - DNA, 23 bp, Artificial sequence
  SiRNA target sequence
atacttagagttagcatattctt

SEQ ID NO: 112882 - DNA, 23 bp, Artificial sequence
  SiRNA target sequence
tacttagagttagcatattcttc

SEQ ID NO: 112883 - DNA, 23 bp, Artificial sequence
  SiRNA target sequence
acttagagttagcatattcttcg

SEQ ID NO: 112884 - DNA, 23 bp, Artificial sequence
  SiRNA target sequence
cttagagttagcatattcttcga

SEQ ID NO: 112885 - DNA, 23 bp, Artificial sequence
  SiRNA target sequence
ttagagttagcatattcttcgat

SEQ ID NO: 112886 - DNA, 23 bp, Artificial sequence
  SiRNA target sequence
tagagttagcatattcttcgata

SEQ ID NO: 112887 - DNA, 23 bp, Artificial sequence
  SiRNA target sequence
agagttagcatattcttcgataa

SEQ ID NO: 112888 - DNA, 23 bp, Artificial sequence
  SiRNA target sequence
gagttagcatattcttcgataag

SEQ ID NO: 112889 - DNA, 23 bp, Artificial sequence
  SiRNA target sequence
agttagcatattcttcgataaga

SEQ ID NO: 112890 - DNA, 23 bp, Artificial sequence
  SiRNA target sequence
gttagcatattcttcgataagac

SEQ ID NO: 112891 - DNA, 23 bp, Artificial sequence
  SiRNA target sequence
ttagcatattcttcgataagacg

SEQ ID NO: 112892 - DNA, 23 bp, Artificial sequence
  SiRNA target sequence
tagcatattcttcgataagacgt

SEQ ID NO: 112893 - DNA, 23 bp, Artificial sequence
  SiRNA target sequence
agcatattcttcgataagacgta

SEQ ID NO: 112894 - DNA, 23 bp, Artificial sequence
  SiRNA target sequence
gcatattcttcgataagacgtag

SEQ ID NO: 112895 - DNA, 23 bp, Artificial sequence
  SiRNA target sequence
catattcttcgataagacgtaga

SEQ ID NO: 112896 - DNA, 23 bp, Artificial sequence
  SiRNA target sequence
atattcttcgataagacgtagaa

SEQ ID NO: 112897 - DNA, 23 bp, Artificial sequence
  SiRNA target sequence
tattcttcgataagacgtagaat

SEQ ID NO: 112898 - DNA, 23 bp, Artificial sequence
  SiRNA target sequence
attcttcgataagacgtagaatt

SEQ ID NO: 112899 - DNA, 23 bp, Artificial sequence
  SiRNA target sequence
ttcttcgataagacgtagaatta

SEQ ID NO: 112900 - DNA, 23 bp, Artificial sequence
  SiRNA target sequence
tcttcgataagacgtagaattaa

SEQ ID NO: 112901 - DNA, 23 bp, Artificial sequence
  SiRNA target sequence
cttcgataagacgtagaattaac

SEQ ID NO: 112902 - DNA, 23 bp, Artificial sequence
  SiRNA target sequence
ttcgataagacgtagaattaaca

SEQ ID NO: 112903 - DNA, 23 bp, Artificial sequence
  SiRNA target sequence
tcgataagacgtagaattaacat

SEQ ID NO: 112904 - DNA, 23 bp, Artificial sequence
  SiRNA target sequence
cgataagacgtagaattaacata

SEQ ID NO: 112905 - DNA, 23 bp, Artificial sequence
  SiRNA target sequence
gataagacgtagaattaacatat

SEQ ID NO: 112906 - DNA, 23 bp, Artificial sequence
  SiRNA target sequence
ataagacgtagaattaacatatt

SEQ ID NO: 112907 - DNA, 23 bp, Artificial sequence
  SiRNA target sequence
taagacgtagaattaacatattt

SEQ ID NO: 112908 - DNA, 23 bp, Artificial sequence
  SiRNA target sequence
aagacgtagaattaacatatttc

SEQ ID NO: 112909 - DNA, 23 bp, Artificial sequence
  SiRNA target sequence
agacgtagaattaacatatttct

SEQ ID NO: 112910 - DNA, 23 bp, Artificial sequence
  SiRNA target sequence
gacgtagaattaacatatttcta

SEQ ID NO: 112911 - DNA, 23 bp, Artificial sequence
  SiRNA target sequence
acgtagaattaacatatttctat

SEQ ID NO: 112912 - DNA, 23 bp, Artificial sequence
  SiRNA target sequence
cgtagaattaacatatttctata

SEQ ID NO: 112913 - DNA, 23 bp, Artificial sequence
  SiRNA target sequence
gtagaattaacatatttctataa

SEQ ID NO: 112914 - DNA, 23 bp, Artificial sequence
  SiRNA target sequence
tagaattaacatatttctataaa

SEQ ID NO: 112915 - DNA, 23 bp, Artificial sequence
  SiRNA target sequence
agaattaacatatttctataaac

SEQ ID NO: 112916 - DNA, 23 bp, Artificial sequence
  SiRNA target sequence
gaattaacatatttctataaaca

SEQ ID NO: 112917 - DNA, 23 bp, Artificial sequence
  SiRNA target sequence
aattaacatatttctataaacat

SEQ ID NO: 112918 - DNA, 23 bp, Artificial sequence
  SiRNA target sequence
attaacatatttctataaacatc

SEQ ID NO: 112919 - DNA, 23 bp, Artificial sequence
  SiRNA target sequence
ttaacatatttctataaacatct

SEQ ID NO: 112920 - DNA, 23 bp, Artificial sequence
  SiRNA target sequence
taacatatttctataaacatctt

SEQ ID NO: 112921 - DNA, 23 bp, Artificial sequence
  SiRNA target sequence
aacatatttctataaacatcttg

SEQ ID NO: 112922 - DNA, 23 bp, Artificial sequence
  SiRNA target sequence
acatatttctataaacatcttgt

SEQ ID NO: 112923 - DNA, 23 bp, Artificial sequence
  SiRNA target sequence
catatttctataaacatcttgta

SEQ ID NO: 112924 - DNA, 23 bp, Artificial sequence
  SiRNA target sequence
atatttctataaacatcttgtac

SEQ ID NO: 112925 - DNA, 23 bp, Artificial sequence
  SiRNA target sequence
tatttctataaacatcttgtaca

SEQ ID NO: 112926 - DNA, 23 bp, Artificial sequence
  SiRNA target sequence
atttctataaacatcttgtacaa

SEQ ID NO: 112927 - DNA, 23 bp, Artificial sequence
  SiRNA target sequence
tttctataaacatcttgtacaag

SEQ ID NO: 112928 - DNA, 23 bp, Artificial sequence
  SiRNA target sequence
ttctataaacatcttgtacaagt

SEQ ID NO: 112929 - DNA, 23 bp, Artificial sequence
  SiRNA target sequence
tctataaacatcttgtacaagtt

SEQ ID NO: 112930 - DNA, 23 bp, Artificial sequence
  SiRNA target sequence
ctataaacatcttgtacaagttc

SEQ ID NO: 112931 - DNA, 23 bp, Artificial sequence
  SiRNA target sequence
tataaacatcttgtacaagttct

SEQ ID NO: 112932 - DNA, 23 bp, Artificial sequence
  SiRNA target sequence
ataaacatcttgtacaagttctt

SEQ ID NO: 112933 - DNA, 23 bp, Artificial sequence
  SiRNA target sequence
taaacatcttgtacaagttcttt

SEQ ID NO: 112934 - DNA, 23 bp, Artificial sequence
  SiRNA target sequence
aaacatcttgtacaagttctttg

SEQ ID NO: 112935 - DNA, 23 bp, Artificial sequence
  SiRNA target sequence
aacatcttgtacaagttctttgt

SEQ ID NO: 112936 - DNA, 23 bp, Artificial sequence
  SiRNA target sequence
acatcttgtacaagttctttgtt

SEQ ID NO: 112937 - DNA, 23 bp, Artificial sequence
  SiRNA target sequence
catcttgtacaagttctttgttt

SEQ ID NO: 112938 - DNA, 23 bp, Artificial sequence
  SiRNA target sequence
atcttgtacaagttctttgttta

SEQ ID NO: 112939 - DNA, 23 bp, Artificial sequence
  SiRNA target sequence
tcttgtacaagttctttgtttaa

SEQ ID NO: 112940 - DNA, 23 bp, Artificial sequence
  SiRNA target sequence
cttgtacaagttctttgtttaaa

SEQ ID NO: 112941 - DNA, 23 bp, Artificial sequence
  SiRNA target sequence
ttgtacaagttctttgtttaaag

SEQ ID NO: 112942 - DNA, 23 bp, Artificial sequence
  SiRNA target sequence
tgtacaagttctttgtttaaagt

SEQ ID NO: 112943 - DNA, 23 bp, Artificial sequence
  SiRNA target sequence
gtacaagttctttgtttaaagta

SEQ ID NO: 112944 - DNA, 23 bp, Artificial sequence
  SiRNA target sequence
tacaagttctttgtttaaagtag

SEQ ID NO: 112945 - DNA, 23 bp, Artificial sequence
  SiRNA target sequence
acaagttctttgtttaaagtagt

SEQ ID NO: 112946 - DNA, 23 bp, Artificial sequence
  SiRNA target sequence
caagttctttgtttaaagtagtt

SEQ ID NO: 112947 - DNA, 23 bp, Artificial sequence
  SiRNA target sequence
aagttctttgtttaaagtagttt

SEQ ID NO: 112948 - DNA, 23 bp, Artificial sequence
  SiRNA target sequence
agttctttgtttaaagtagtttt

SEQ ID NO: 112949 - DNA, 23 bp, Artificial sequence
  SiRNA target sequence
gttctttgtttaaagtagttttc

SEQ ID NO: 112950 - DNA, 23 bp, Artificial sequence
  SiRNA target sequence
ttctttgtttaaagtagttttca

SEQ ID NO: 112951 - DNA, 23 bp, Artificial sequence
  SiRNA target sequence
tctttgtttaaagtagttttcag

SEQ ID NO: 112952 - DNA, 23 bp, Artificial sequence
  SiRNA target sequence
ctttgtttaaagtagttttcagt

SEQ ID NO: 112953 - DNA, 23 bp, Artificial sequence
  SiRNA target sequence
tttgtttaaagtagttttcagtt

SEQ ID NO: 112954 - DNA, 23 bp, Artificial sequence
  SiRNA target sequence
ttgtttaaagtagttttcagttt

SEQ ID NO: 112955 - DNA, 23 bp, Artificial sequence
  SiRNA target sequence
tgtttaaagtagttttcagttta

SEQ ID NO: 112956 - DNA, 23 bp, Artificial sequence
  SiRNA target sequence
gtttaaagtagttttcagtttaa

SEQ ID NO: 112957 - DNA, 23 bp, Artificial sequence
  SiRNA target sequence
tttaaagtagttttcagtttaac

SEQ ID NO: 112958 - DNA, 23 bp, Artificial sequence
  SiRNA target sequence
ttaaagtagttttcagtttaact

SEQ ID NO: 112959 - DNA, 23 bp, Artificial sequence
  SiRNA target sequence
taaagtagttttcagtttaactg

SEQ ID NO: 112960 - DNA, 23 bp, Artificial sequence
  SiRNA target sequence
aaagtagttttcagtttaactgt

SEQ ID NO: 112961 - DNA, 23 bp, Artificial sequence
  SiRNA target sequence
aagtagttttcagtttaactgta

SEQ ID NO: 112962 - DNA, 23 bp, Artificial sequence
  SiRNA target sequence
agtagttttcagtttaactgtat

SEQ ID NO: 112963 - DNA, 23 bp, Artificial sequence
  SiRNA target sequence
gtagttttcagtttaactgtatt

SEQ ID NO: 112964 - DNA, 23 bp, Artificial sequence
  SiRNA target sequence
tagttttcagtttaactgtattt

SEQ ID NO: 112965 - DNA, 23 bp, Artificial sequence
  SiRNA target sequence
agttttcagtttaactgtatttt

SEQ ID NO: 112966 - DNA, 23 bp, Artificial sequence
  SiRNA target sequence
gttttcagtttaactgtattttt

SEQ ID NO: 112967 - DNA, 23 bp, Artificial sequence
  SiRNA target sequence
ttttcagtttaactgtattttta

SEQ ID NO: 112968 - DNA, 23 bp, Artificial sequence
  SiRNA target sequence
tttcagtttaactgtatttttat

SEQ ID NO: 112969 - DNA, 23 bp, Artificial sequence
  SiRNA target sequence
ttcagtttaactgtatttttatc

SEQ ID NO: 112970 - DNA, 23 bp, Artificial sequence
  SiRNA target sequence
tcagtttaactgtatttttatct

SEQ ID NO: 112971 - DNA, 23 bp, Artificial sequence
  SiRNA target sequence
cagtttaactgtatttttatcta

SEQ ID NO: 112972 - DNA, 23 bp, Artificial sequence
  SiRNA target sequence
agtttaactgtatttttatctac

SEQ ID NO: 112973 - DNA, 23 bp, Artificial sequence
  SiRNA target sequence
gtttaactgtatttttatctacc

SEQ ID NO: 112974 - DNA, 23 bp, Artificial sequence
  SiRNA target sequence
tttaactgtatttttatctacca

SEQ ID NO: 112975 - DNA, 23 bp, Artificial sequence
  SiRNA target sequence
ttaactgtatttttatctaccaa

SEQ ID NO: 112976 - DNA, 23 bp, Artificial sequence
  SiRNA target sequence
taactgtatttttatctaccaaa

SEQ ID NO: 112977 - DNA, 23 bp, Artificial sequence
  SiRNA target sequence
aactgtatttttatctaccaaat

SEQ ID NO: 112978 - DNA, 23 bp, Artificial sequence
  SiRNA target sequence
actgtatttttatctaccaaata

SEQ ID NO: 112979 - DNA, 23 bp, Artificial sequence
  SiRNA target sequence
ctgtatttttatctaccaaataa

SEQ ID NO: 112980 - DNA, 23 bp, Artificial sequence
  SiRNA target sequence
tgtatttttatctaccaaataat

SEQ ID NO: 112981 - DNA, 23 bp, Artificial sequence
  SiRNA target sequence
gtatttttatctaccaaataata

SEQ ID NO: 112982 - DNA, 23 bp, Artificial sequence
  SiRNA target sequence
tatttttatctaccaaataataa

SEQ ID NO: 112983 - DNA, 23 bp, Artificial sequence
  SiRNA target sequence
atttttatctaccaaataataat

SEQ ID NO: 112984 - DNA, 23 bp, Artificial sequence
  SiRNA target sequence
tttttatctaccaaataataatc

SEQ ID NO: 112985 - DNA, 23 bp, Artificial sequence
  SiRNA target sequence
ttttatctaccaaataataatct

SEQ ID NO: 112986 - DNA, 23 bp, Artificial sequence
  SiRNA target sequence
tttatctaccaaataataatcta

SEQ ID NO: 112987 - DNA, 23 bp, Artificial sequence
  SiRNA target sequence
ttatctaccaaataataatctat

SEQ ID NO: 112988 - DNA, 23 bp, Artificial sequence
  SiRNA target sequence
tatctaccaaataataatctatc

SEQ ID NO: 112989 - DNA, 23 bp, Artificial sequence
  SiRNA target sequence
atctaccaaataataatctatca

SEQ ID NO: 112990 - DNA, 23 bp, Artificial sequence
  SiRNA target sequence
tctaccaaataataatctatcat

SEQ ID NO: 112991 - DNA, 24 bp, Artificial sequence
  SiRNA target sequence
ttattcagaataaacatcttttaa

SEQ ID NO: 112992 - DNA, 24 bp, Artificial sequence
  SiRNA target sequence
tattcagaataaacatcttttaaa

SEQ ID NO: 112993 - DNA, 24 bp, Artificial sequence
  SiRNA target sequence
attcagaataaacatcttttaaaa

SEQ ID NO: 112994 - DNA, 24 bp, Artificial sequence
  SiRNA target sequence
ttcagaataaacatcttttaaaag

SEQ ID NO: 112995 - DNA, 24 bp, Artificial sequence
  SiRNA target sequence
tcagaataaacatcttttaaaagt

SEQ ID NO: 112996 - DNA, 24 bp, Artificial sequence
  SiRNA target sequence
cagaataaacatcttttaaaagtt

SEQ ID NO: 112997 - DNA, 24 bp, Artificial sequence
  SiRNA target sequence
agaataaacatcttttaaaagttc

SEQ ID NO: 112998 - DNA, 24 bp, Artificial sequence
  SiRNA target sequence
gaataaacatcttttaaaagttca

SEQ ID NO: 112999 - DNA, 24 bp, Artificial sequence
  SiRNA target sequence
aataaacatcttttaaaagttcat

SEQ ID NO: 113000 - DNA, 24 bp, Artificial sequence
  SiRNA target sequence
ataaacatcttttaaaagttcatc

SEQ ID NO: 113001 - DNA, 24 bp, Artificial sequence
  SiRNA target sequence
taaacatcttttaaaagttcatcg

SEQ ID NO: 113002 - DNA, 24 bp, Artificial sequence
  SiRNA target sequence
aaacatcttttaaaagttcatcga

SEQ ID NO: 113003 - DNA, 24 bp, Artificial sequence
  SiRNA target sequence
aacatcttttaaaagttcatcgat

SEQ ID NO: 113004 - DNA, 24 bp, Artificial sequence
  SiRNA target sequence
acatcttttaaaagttcatcgata

SEQ ID NO: 113005 - DNA, 24 bp, Artificial sequence
  SiRNA target sequence
catcttttaaaagttcatcgatat

SEQ ID NO: 113006 - DNA, 24 bp, Artificial sequence
  SiRNA target sequence
atcttttaaaagttcatcgatatc

SEQ ID NO: 113007 - DNA, 24 bp, Artificial sequence
  SiRNA target sequence
tcttttaaaagttcatcgatatcg

SEQ ID NO: 113008 - DNA, 24 bp, Artificial sequence
  SiRNA target sequence
cttttaaaagttcatcgatatcgg

SEQ ID NO: 113009 - DNA, 24 bp, Artificial sequence
  SiRNA target sequence
ttttaaaagttcatcgatatcggg

SEQ ID NO: 113010 - DNA, 24 bp, Artificial sequence
  SiRNA target sequence
tttaaaagttcatcgatatcgggt

SEQ ID NO: 113011 - DNA, 24 bp, Artificial sequence
  SiRNA target sequence
ttaaaagttcatcgatatcgggtt

SEQ ID NO: 113012 - DNA, 24 bp, Artificial sequence
  SiRNA target sequence
taaaagttcatcgatatcgggttc

SEQ ID NO: 113013 - DNA, 24 bp, Artificial sequence
  SiRNA target sequence
aaaagttcatcgatatcgggttct

SEQ ID NO: 113014 - DNA, 24 bp, Artificial sequence
  SiRNA target sequence
aaagttcatcgatatcgggttctt

SEQ ID NO: 113015 - DNA, 24 bp, Artificial sequence
  SiRNA target sequence
aagttcatcgatatcgggttcttt

SEQ ID NO: 113016 - DNA, 24 bp, Artificial sequence
  SiRNA target sequence
agttcatcgatatcgggttcttta

SEQ ID NO: 113017 - DNA, 24 bp, Artificial sequence
  SiRNA target sequence
gttcatcgatatcgggttctttag

SEQ ID NO: 113018 - DNA, 24 bp, Artificial sequence
  SiRNA target sequence
ttcatcgatatcgggttctttaga

SEQ ID NO: 113019 - DNA, 24 bp, Artificial sequence
  SiRNA target sequence
tcatcgatatcgggttctttagaa

SEQ ID NO: 113020 - DNA, 24 bp, Artificial sequence
  SiRNA target sequence
catcgatatcgggttctttagaaa

SEQ ID NO: 113021 - DNA, 24 bp, Artificial sequence
  SiRNA target sequence
atcgatatcgggttctttagaaaa

SEQ ID NO: 113022 - DNA, 24 bp, Artificial sequence
  SiRNA target sequence
tcgatatcgggttctttagaaaaa

SEQ ID NO: 113023 - DNA, 24 bp, Artificial sequence
  SiRNA target sequence
cgatatcgggttctttagaaaaaa

SEQ ID NO: 113024 - DNA, 24 bp, Artificial sequence
  SiRNA target sequence
gatatcgggttctttagaaaaaat

SEQ ID NO: 113025 - DNA, 24 bp, Artificial sequence
  SiRNA target sequence
atatcgggttctttagaaaaaata

SEQ ID NO: 113026 - DNA, 24 bp, Artificial sequence
  SiRNA target sequence
tatcgggttctttagaaaaaataa

SEQ ID NO: 113027 - DNA, 24 bp, Artificial sequence
  SiRNA target sequence
atcgggttctttagaaaaaataac

SEQ ID NO: 113028 - DNA, 24 bp, Artificial sequence
  SiRNA target sequence
tcgggttctttagaaaaaataact

SEQ ID NO: 113029 - DNA, 24 bp, Artificial sequence
  SiRNA target sequence
cgggttctttagaaaaaataactt

SEQ ID NO: 113030 - DNA, 24 bp, Artificial sequence
  SiRNA target sequence
gggttctttagaaaaaataacttt

SEQ ID NO: 113031 - DNA, 24 bp, Artificial sequence
  SiRNA target sequence
ggttctttagaaaaaataactttt

SEQ ID NO: 113032 - DNA, 24 bp, Artificial sequence
  SiRNA target sequence
gttctttagaaaaaataacttttt

SEQ ID NO: 113033 - DNA, 24 bp, Artificial sequence
  SiRNA target sequence
ttctttagaaaaaataactttttt

SEQ ID NO: 113034 - DNA, 24 bp, Artificial sequence
  SiRNA target sequence
tctttagaaaaaataactttttta

SEQ ID NO: 113035 - DNA, 24 bp, Artificial sequence
  SiRNA target sequence
ctttagaaaaaataacttttttaa

SEQ ID NO: 113036 - DNA, 24 bp, Artificial sequence
  SiRNA target sequence
tttagaaaaaataacttttttaac

SEQ ID NO: 113037 - DNA, 24 bp, Artificial sequence
  SiRNA target sequence
ttagaaaaaataacttttttaaca

SEQ ID NO: 113038 - DNA, 24 bp, Artificial sequence
  SiRNA target sequence
tagaaaaaataacttttttaacac

SEQ ID NO: 113039 - DNA, 24 bp, Artificial sequence
  SiRNA target sequence
agaaaaaataacttttttaacacc

SEQ ID NO: 113040 - DNA, 24 bp, Artificial sequence
  SiRNA target sequence
gaaaaaataacttttttaacacct

SEQ ID NO: 113041 - DNA, 24 bp, Artificial sequence
  SiRNA target sequence
aaaaaataacttttttaacacctt

SEQ ID NO: 113042 - DNA, 24 bp, Artificial sequence
  SiRNA target sequence
aaaaataacttttttaacaccttc

SEQ ID NO: 113043 - DNA, 24 bp, Artificial sequence
  SiRNA target sequence
aaaataacttttttaacaccttct

SEQ ID NO: 113044 - DNA, 24 bp, Artificial sequence
  SiRNA target sequence
aaataacttttttaacaccttctt

SEQ ID NO: 113045 - DNA, 24 bp, Artificial sequence
  SiRNA target sequence
aataacttttttaacaccttcttc

SEQ ID NO: 113046 - DNA, 24 bp, Artificial sequence
  SiRNA target sequence
ataacttttttaacaccttcttca

SEQ ID NO: 113047 - DNA, 24 bp, Artificial sequence
  SiRNA target sequence
taacttttttaacaccttcttcaa

SEQ ID NO: 113048 - DNA, 24 bp, Artificial sequence
  SiRNA target sequence
aacttttttaacaccttcttcaaa

SEQ ID NO: 113049 - DNA, 24 bp, Artificial sequence
  SiRNA target sequence
acttttttaacaccttcttcaaag

SEQ ID NO: 113050 - DNA, 24 bp, Artificial sequence
  SiRNA target sequence
cttttttaacaccttcttcaaagc

SEQ ID NO: 113051 - DNA, 24 bp, Artificial sequence
  SiRNA target sequence
ttttttaacaccttcttcaaagca

SEQ ID NO: 113052 - DNA, 24 bp, Artificial sequence
  SiRNA target sequence
tttttaacaccttcttcaaagcag

SEQ ID NO: 113053 - DNA, 24 bp, Artificial sequence
  SiRNA target sequence
ttttaacaccttcttcaaagcagg

SEQ ID NO: 113054 - DNA, 24 bp, Artificial sequence
  SiRNA target sequence
tttaacaccttcttcaaagcagga

SEQ ID NO: 113055 - DNA, 24 bp, Artificial sequence
  SiRNA target sequence
ttaacaccttcttcaaagcaggaa

SEQ ID NO: 113056 - DNA, 24 bp, Artificial sequence
  SiRNA target sequence
taacaccttcttcaaagcaggaaa

SEQ ID NO: 113057 - DNA, 24 bp, Artificial sequence
  SiRNA target sequence
aacaccttcttcaaagcaggaaat

SEQ ID NO: 113058 - DNA, 24 bp, Artificial sequence
  SiRNA target sequence
acaccttcttcaaagcaggaaatt

SEQ ID NO: 113059 - DNA, 24 bp, Artificial sequence
  SiRNA target sequence
caccttcttcaaagcaggaaatta

SEQ ID NO: 113060 - DNA, 24 bp, Artificial sequence
  SiRNA target sequence
accttcttcaaagcaggaaattac

SEQ ID NO: 113061 - DNA, 24 bp, Artificial sequence
  SiRNA target sequence
ccttcttcaaagcaggaaattacc

SEQ ID NO: 113062 - DNA, 24 bp, Artificial sequence
  SiRNA target sequence
cttcttcaaagcaggaaattacct

SEQ ID NO: 113063 - DNA, 24 bp, Artificial sequence
  SiRNA target sequence
ttcttcaaagcaggaaattacctc

SEQ ID NO: 113064 - DNA, 24 bp, Artificial sequence
  SiRNA target sequence
tcttcaaagcaggaaattacctca

SEQ ID NO: 113065 - DNA, 24 bp, Artificial sequence
  SiRNA target sequence
cttcaaagcaggaaattacctcat

SEQ ID NO: 113066 - DNA, 24 bp, Artificial sequence
  SiRNA target sequence
ttcaaagcaggaaattacctcatc

SEQ ID NO: 113067 - DNA, 24 bp, Artificial sequence
  SiRNA target sequence
tcaaagcaggaaattacctcatct

SEQ ID NO: 113068 - DNA, 24 bp, Artificial sequence
  SiRNA target sequence
caaagcaggaaattacctcatctt

SEQ ID NO: 113069 - DNA, 24 bp, Artificial sequence
  SiRNA target sequence
aaagcaggaaattacctcatcttc

SEQ ID NO: 113070 - DNA, 24 bp, Artificial sequence
  SiRNA target sequence
aagcaggaaattacctcatcttcg

SEQ ID NO: 113071 - DNA, 24 bp, Artificial sequence
  SiRNA target sequence
agcaggaaattacctcatcttcga

SEQ ID NO: 113072 - DNA, 24 bp, Artificial sequence
  SiRNA target sequence
gcaggaaattacctcatcttcgat

SEQ ID NO: 113073 - DNA, 24 bp, Artificial sequence
  SiRNA target sequence
caggaaattacctcatcttcgata

SEQ ID NO: 113074 - DNA, 24 bp, Artificial sequence
  SiRNA target sequence
aggaaattacctcatcttcgataa

SEQ ID NO: 113075 - DNA, 24 bp, Artificial sequence
  SiRNA target sequence
ggaaattacctcatcttcgataat

SEQ ID NO: 113076 - DNA, 24 bp, Artificial sequence
  SiRNA target sequence
gaaattacctcatcttcgataatt

SEQ ID NO: 113077 - DNA, 24 bp, Artificial sequence
  SiRNA target sequence
aaattacctcatcttcgataattt

SEQ ID NO: 113078 - DNA, 24 bp, Artificial sequence
  SiRNA target sequence
aattacctcatcttcgataatttt

SEQ ID NO: 113079 - DNA, 24 bp, Artificial sequence
  SiRNA target sequence
attacctcatcttcgataattttt

SEQ ID NO: 113080 - DNA, 24 bp, Artificial sequence
  SiRNA target sequence
ttacctcatcttcgataattttta

SEQ ID NO: 113081 - DNA, 24 bp, Artificial sequence
  SiRNA target sequence
tacctcatcttcgataatttttac

SEQ ID NO: 113082 - DNA, 24 bp, Artificial sequence
  SiRNA target sequence
acctcatcttcgataatttttact

SEQ ID NO: 113083 - DNA, 24 bp, Artificial sequence
  SiRNA target sequence
cctcatcttcgataatttttactt

SEQ ID NO: 113084 - DNA, 24 bp, Artificial sequence
  SiRNA target sequence
ctcatcttcgataatttttacttc

SEQ ID NO: 113085 - DNA, 24 bp, Artificial sequence
  SiRNA target sequence
tcatcttcgataatttttacttct

SEQ ID NO: 113086 - DNA, 24 bp, Artificial sequence
  SiRNA target sequence
catcttcgataatttttacttctt

SEQ ID NO: 113087 - DNA, 24 bp, Artificial sequence
  SiRNA target sequence
atcttcgataatttttacttcttc

SEQ ID NO: 113088 - DNA, 24 bp, Artificial sequence
  SiRNA target sequence
tcttcgataatttttacttcttca

SEQ ID NO: 113089 - DNA, 24 bp, Artificial sequence
  SiRNA target sequence
cttcgataatttttacttcttcac

SEQ ID NO: 113090 - DNA, 24 bp, Artificial sequence
  SiRNA target sequence
ttcgataatttttacttcttcaca

SEQ ID NO: 113091 - DNA, 24 bp, Artificial sequence
  SiRNA target sequence
tcgataatttttacttcttcacaa

SEQ ID NO: 113092 - DNA, 24 bp, Artificial sequence
  SiRNA target sequence
cgataatttttacttcttcacaag

SEQ ID NO: 113093 - DNA, 24 bp, Artificial sequence
  SiRNA target sequence
gataatttttacttcttcacaagt

SEQ ID NO: 113094 - DNA, 24 bp, Artificial sequence
  SiRNA target sequence
ataatttttacttcttcacaagtc

SEQ ID NO: 113095 - DNA, 24 bp, Artificial sequence
  SiRNA target sequence
taatttttacttcttcacaagtcg

SEQ ID NO: 113096 - DNA, 24 bp, Artificial sequence
  SiRNA target sequence
aatttttacttcttcacaagtcgc

SEQ ID NO: 113097 - DNA, 24 bp, Artificial sequence
  SiRNA target sequence
atttttacttcttcacaagtcgca

SEQ ID NO: 113098 - DNA, 24 bp, Artificial sequence
  SiRNA target sequence
tttttacttcttcacaagtcgcaa

SEQ ID NO: 113099 - DNA, 24 bp, Artificial sequence
  SiRNA target sequence
ttttacttcttcacaagtcgcaaa

SEQ ID NO: 113100 - DNA, 24 bp, Artificial sequence
  SiRNA target sequence
tttacttcttcacaagtcgcaaat

SEQ ID NO: 113101 - DNA, 24 bp, Artificial sequence
  SiRNA target sequence
ttacttcttcacaagtcgcaaatt

SEQ ID NO: 113102 - DNA, 24 bp, Artificial sequence
  SiRNA target sequence
tacttcttcacaagtcgcaaattt

SEQ ID NO: 113103 - DNA, 24 bp, Artificial sequence
  SiRNA target sequence
acttcttcacaagtcgcaaatttt

SEQ ID NO: 113104 - DNA, 24 bp, Artificial sequence
  SiRNA target sequence
cttcttcacaagtcgcaaattttt

SEQ ID NO: 113105 - DNA, 24 bp, Artificial sequence
  SiRNA target sequence
ttcttcacaagtcgcaaatttttg

SEQ ID NO: 113106 - DNA, 24 bp, Artificial sequence
  SiRNA target sequence
tcttcacaagtcgcaaatttttgt

SEQ ID NO: 113107 - DNA, 24 bp, Artificial sequence
  SiRNA target sequence
cttcacaagtcgcaaatttttgta

SEQ ID NO: 113108 - DNA, 24 bp, Artificial sequence
  SiRNA target sequence
ttcacaagtcgcaaatttttgtaa

SEQ ID NO: 113109 - DNA, 24 bp, Artificial sequence
  SiRNA target sequence
tcacaagtcgcaaatttttgtaag

SEQ ID NO: 113110 - DNA, 24 bp, Artificial sequence
  SiRNA target sequence
cacaagtcgcaaatttttgtaagt

SEQ ID NO: 113111 - DNA, 24 bp, Artificial sequence
  SiRNA target sequence
acaagtcgcaaatttttgtaagtt

SEQ ID NO: 113112 - DNA, 24 bp, Artificial sequence
  SiRNA target sequence
caagtcgcaaatttttgtaagtta

SEQ ID NO: 113113 - DNA, 24 bp, Artificial sequence
  SiRNA target sequence
aagtcgcaaatttttgtaagttat

SEQ ID NO: 113114 - DNA, 24 bp, Artificial sequence
  SiRNA target sequence
agtcgcaaatttttgtaagttatt

SEQ ID NO: 113115 - DNA, 24 bp, Artificial sequence
  SiRNA target sequence
gtcgcaaatttttgtaagttattt

SEQ ID NO: 113116 - DNA, 24 bp, Artificial sequence
  SiRNA target sequence
tcgcaaatttttgtaagttatttt

SEQ ID NO: 113117 - DNA, 24 bp, Artificial sequence
  SiRNA target sequence
cgcaaatttttgtaagttattttt

SEQ ID NO: 113118 - DNA, 24 bp, Artificial sequence
  SiRNA target sequence
gcaaatttttgtaagttatttttt

SEQ ID NO: 113119 - DNA, 24 bp, Artificial sequence
  SiRNA target sequence
caaatttttgtaagttattttttg

SEQ ID NO: 113120 - DNA, 24 bp, Artificial sequence
  SiRNA target sequence
aaatttttgtaagttattttttgc

SEQ ID NO: 113121 - DNA, 24 bp, Artificial sequence
  SiRNA target sequence
aatttttgtaagttattttttgct

SEQ ID NO: 113122 - DNA, 24 bp, Artificial sequence
  SiRNA target sequence
atttttgtaagttattttttgctt

SEQ ID NO: 113123 - DNA, 24 bp, Artificial sequence
  SiRNA target sequence
tttttgtaagttattttttgcttc

SEQ ID NO: 113124 - DNA, 24 bp, Artificial sequence
  SiRNA target sequence
ttttgtaagttattttttgcttct

SEQ ID NO: 113125 - DNA, 24 bp, Artificial sequence
  SiRNA target sequence
tttgtaagttattttttgcttctt

SEQ ID NO: 113126 - DNA, 24 bp, Artificial sequence
  SiRNA target sequence
ttgtaagttattttttgcttcttt

SEQ ID NO: 113127 - DNA, 24 bp, Artificial sequence
  SiRNA target sequence
tgtaagttattttttgcttcttta

SEQ ID NO: 113128 - DNA, 24 bp, Artificial sequence
  SiRNA target sequence
gtaagttattttttgcttctttaa

SEQ ID NO: 113129 - DNA, 24 bp, Artificial sequence
  SiRNA target sequence
taagttattttttgcttctttaag

SEQ ID NO: 113130 - DNA, 24 bp, Artificial sequence
  SiRNA target sequence
aagttattttttgcttctttaagg

SEQ ID NO: 113131 - DNA, 24 bp, Artificial sequence
  SiRNA target sequence
agttattttttgcttctttaaggc

SEQ ID NO: 113132 - DNA, 24 bp, Artificial sequence
  SiRNA target sequence
gttattttttgcttctttaaggca

SEQ ID NO: 113133 - DNA, 24 bp, Artificial sequence
  SiRNA target sequence
ttattttttgcttctttaaggcaa

SEQ ID NO: 113134 - DNA, 24 bp, Artificial sequence
  SiRNA target sequence
tattttttgcttctttaaggcaat

SEQ ID NO: 113135 - DNA, 24 bp, Artificial sequence
  SiRNA target sequence
attttttgcttctttaaggcaatc

SEQ ID NO: 113136 - DNA, 24 bp, Artificial sequence
  SiRNA target sequence
ttttttgcttctttaaggcaatca

SEQ ID NO: 113137 - DNA, 24 bp, Artificial sequence
  SiRNA target sequence
tttttgcttctttaaggcaatcat

SEQ ID NO: 113138 - DNA, 24 bp, Artificial sequence
  SiRNA target sequence
ttttgcttctttaaggcaatcatt

SEQ ID NO: 113139 - DNA, 24 bp, Artificial sequence
  SiRNA target sequence
tttgcttctttaaggcaatcatta

SEQ ID NO: 113140 - DNA, 24 bp, Artificial sequence
  SiRNA target sequence
ttgcttctttaaggcaatcattat

SEQ ID NO: 113141 - DNA, 24 bp, Artificial sequence
  SiRNA target sequence
tgcttctttaaggcaatcattatt

SEQ ID NO: 113142 - DNA, 24 bp, Artificial sequence
  SiRNA target sequence
gcttctttaaggcaatcattattt

SEQ ID NO: 113143 - DNA, 24 bp, Artificial sequence
  SiRNA target sequence
cttctttaaggcaatcattatttt

SEQ ID NO: 113144 - DNA, 24 bp, Artificial sequence
  SiRNA target sequence
ttctttaaggcaatcattattttt

SEQ ID NO: 113145 - DNA, 24 bp, Artificial sequence
  SiRNA target sequence
tctttaaggcaatcattatttttt

SEQ ID NO: 113146 - DNA, 24 bp, Artificial sequence
  SiRNA target sequence
ctttaaggcaatcattattttttt

SEQ ID NO: 113147 - DNA, 24 bp, Artificial sequence
  SiRNA target sequence
tttaaggcaatcattatttttttt

SEQ ID NO: 113148 - DNA, 24 bp, Artificial sequence
  SiRNA target sequence
ttaaggcaatcattattttttttt

SEQ ID NO: 113149 - DNA, 24 bp, Artificial sequence
  SiRNA target sequence
taaggcaatcattatttttttttt

SEQ ID NO: 113150 - DNA, 24 bp, Artificial sequence
  SiRNA target sequence
aaggcaatcattattttttttttc

SEQ ID NO: 113151 - DNA, 24 bp, Artificial sequence
  SiRNA target sequence
aggcaatcattattttttttttca

SEQ ID NO: 113152 - DNA, 24 bp, Artificial sequence
  SiRNA target sequence
ggcaatcattattttttttttcat

SEQ ID NO: 113153 - DNA, 24 bp, Artificial sequence
  SiRNA target sequence
gcaatcattattttttttttcatt

SEQ ID NO: 113154 - DNA, 24 bp, Artificial sequence
  SiRNA target sequence
caatcattattttttttttcatta

SEQ ID NO: 113155 - DNA, 24 bp, Artificial sequence
  SiRNA target sequence
aatcattattttttttttcattaa

SEQ ID NO: 113156 - DNA, 24 bp, Artificial sequence
  SiRNA target sequence
atcattattttttttttcattaat

SEQ ID NO: 113157 - DNA, 24 bp, Artificial sequence
  SiRNA target sequence
tcattattttttttttcattaatt

SEQ ID NO: 113158 - DNA, 24 bp, Artificial sequence
  SiRNA target sequence
cattattttttttttcattaattt

SEQ ID NO: 113159 - DNA, 24 bp, Artificial sequence
  SiRNA target sequence
attattttttttttcattaatttc

SEQ ID NO: 113160 - DNA, 24 bp, Artificial sequence
  SiRNA target sequence
ttattttttttttcattaatttcc

SEQ ID NO: 113161 - DNA, 24 bp, Artificial sequence
  SiRNA target sequence
tattttttttttcattaatttcct

SEQ ID NO: 113162 - DNA, 24 bp, Artificial sequence
  SiRNA target sequence
attttttttttcattaatttcctc

SEQ ID NO: 113163 - DNA, 24 bp, Artificial sequence
  SiRNA target sequence
ttttttttttcattaatttcctcc

SEQ ID NO: 113164 - DNA, 24 bp, Artificial sequence
  SiRNA target sequence
tttttttttcattaatttcctccg

SEQ ID NO: 113165 - DNA, 24 bp, Artificial sequence
  SiRNA target sequence
ttttttttcattaatttcctccgt

SEQ ID NO: 113166 - DNA, 24 bp, Artificial sequence
  SiRNA target sequence
tttttttcattaatttcctccgtg

SEQ ID NO: 113167 - DNA, 24 bp, Artificial sequence
  SiRNA target sequence
ttttttcattaatttcctccgtgg

SEQ ID NO: 113168 - DNA, 24 bp, Artificial sequence
  SiRNA target sequence
tttttcattaatttcctccgtgga

SEQ ID NO: 113169 - DNA, 24 bp, Artificial sequence
  SiRNA target sequence
ttttcattaatttcctccgtggat

SEQ ID NO: 113170 - DNA, 24 bp, Artificial sequence
  SiRNA target sequence
tttcattaatttcctccgtggatc

SEQ ID NO: 113171 - DNA, 24 bp, Artificial sequence
  SiRNA target sequence
ttcattaatttcctccgtggatct

SEQ ID NO: 113172 - DNA, 24 bp, Artificial sequence
  SiRNA target sequence
tcattaatttcctccgtggatctg

SEQ ID NO: 113173 - DNA, 24 bp, Artificial sequence
  SiRNA target sequence
cattaatttcctccgtggatctgt

SEQ ID NO: 113174 - DNA, 24 bp, Artificial sequence
  SiRNA target sequence
attaatttcctccgtggatctgta

SEQ ID NO: 113175 - DNA, 24 bp, Artificial sequence
  SiRNA target sequence
ttaatttcctccgtggatctgtaa

SEQ ID NO: 113176 - DNA, 24 bp, Artificial sequence
  SiRNA target sequence
taatttcctccgtggatctgtaaa

SEQ ID NO: 113177 - DNA, 24 bp, Artificial sequence
  SiRNA target sequence
aatttcctccgtggatctgtaaaa

SEQ ID NO: 113178 - DNA, 24 bp, Artificial sequence
  SiRNA target sequence
atttcctccgtggatctgtaaaaa

SEQ ID NO: 113179 - DNA, 24 bp, Artificial sequence
  SiRNA target sequence
tttcctccgtggatctgtaaaaat

SEQ ID NO: 113180 - DNA, 24 bp, Artificial sequence
  SiRNA target sequence
ttcctccgtggatctgtaaaaatc

SEQ ID NO: 113181 - DNA, 24 bp, Artificial sequence
  SiRNA target sequence
tcctccgtggatctgtaaaaatcg

SEQ ID NO: 113182 - DNA, 24 bp, Artificial sequence
  SiRNA target sequence
cctccgtggatctgtaaaaatcgt

SEQ ID NO: 113183 - DNA, 24 bp, Artificial sequence
  SiRNA target sequence
ctccgtggatctgtaaaaatcgtt

SEQ ID NO: 113184 - DNA, 24 bp, Artificial sequence
  SiRNA target sequence
tccgtggatctgtaaaaatcgtta

SEQ ID NO: 113185 - DNA, 24 bp, Artificial sequence
  SiRNA target sequence
ccgtggatctgtaaaaatcgttaa

SEQ ID NO: 113186 - DNA, 24 bp, Artificial sequence
  SiRNA target sequence
cgtggatctgtaaaaatcgttaac

SEQ ID NO: 113187 - DNA, 24 bp, Artificial sequence
  SiRNA target sequence
gtggatctgtaaaaatcgttaaca

SEQ ID NO: 113188 - DNA, 24 bp, Artificial sequence
  SiRNA target sequence
tggatctgtaaaaatcgttaacat

SEQ ID NO: 113189 - DNA, 24 bp, Artificial sequence
  SiRNA target sequence
ggatctgtaaaaatcgttaacatc

SEQ ID NO: 113190 - DNA, 24 bp, Artificial sequence
  SiRNA target sequence
gatctgtaaaaatcgttaacatct

SEQ ID NO: 113191 - DNA, 24 bp, Artificial sequence
  SiRNA target sequence
atctgtaaaaatcgttaacatcta

SEQ ID NO: 113192 - DNA, 24 bp, Artificial sequence
  SiRNA target sequence
tctgtaaaaatcgttaacatctaa

SEQ ID NO: 113193 - DNA, 24 bp, Artificial sequence
  SiRNA target sequence
ctgtaaaaatcgttaacatctaaa

SEQ ID NO: 113194 - DNA, 24 bp, Artificial sequence
  SiRNA target sequence
tgtaaaaatcgttaacatctaaac

SEQ ID NO: 113195 - DNA, 24 bp, Artificial sequence
  SiRNA target sequence
gtaaaaatcgttaacatctaaaca

SEQ ID NO: 113196 - DNA, 24 bp, Artificial sequence
  SiRNA target sequence
taaaaatcgttaacatctaaacag

SEQ ID NO: 113197 - DNA, 24 bp, Artificial sequence
  SiRNA target sequence
aaaaatcgttaacatctaaacagg

SEQ ID NO: 113198 - DNA, 24 bp, Artificial sequence
  SiRNA target sequence
aaaatcgttaacatctaaacagga

SEQ ID NO: 113199 - DNA, 24 bp, Artificial sequence
  SiRNA target sequence
aaatcgttaacatctaaacaggag

SEQ ID NO: 113200 - DNA, 24 bp, Artificial sequence
  SiRNA target sequence
aatcgttaacatctaaacaggagt

SEQ ID NO: 113201 - DNA, 24 bp, Artificial sequence
  SiRNA target sequence
atcgttaacatctaaacaggagtg

SEQ ID NO: 113202 - DNA, 24 bp, Artificial sequence
  SiRNA target sequence
tcgttaacatctaaacaggagtgc

SEQ ID NO: 113203 - DNA, 24 bp, Artificial sequence
  SiRNA target sequence
cgttaacatctaaacaggagtgcc

SEQ ID NO: 113204 - DNA, 24 bp, Artificial sequence
  SiRNA target sequence
gttaacatctaaacaggagtgccc

SEQ ID NO: 113205 - DNA, 24 bp, Artificial sequence
  SiRNA target sequence
ttaacatctaaacaggagtgccca

SEQ ID NO: 113206 - DNA, 24 bp, Artificial sequence
  SiRNA target sequence
taacatctaaacaggagtgcccac

SEQ ID NO: 113207 - DNA, 24 bp, Artificial sequence
  SiRNA target sequence
aacatctaaacaggagtgcccaca

SEQ ID NO: 113208 - DNA, 24 bp, Artificial sequence
  SiRNA target sequence
acatctaaacaggagtgcccacat

SEQ ID NO: 113209 - DNA, 24 bp, Artificial sequence
  SiRNA target sequence
catctaaacaggagtgcccacatg

SEQ ID NO: 113210 - DNA, 24 bp, Artificial sequence
  SiRNA target sequence
atctaaacaggagtgcccacatgt

SEQ ID NO: 113211 - DNA, 24 bp, Artificial sequence
  SiRNA target sequence
tctaaacaggagtgcccacatgtc

SEQ ID NO: 113212 - DNA, 24 bp, Artificial sequence
  SiRNA target sequence
ctaaacaggagtgcccacatgtcc

SEQ ID NO: 113213 - DNA, 24 bp, Artificial sequence
  SiRNA target sequence
taaacaggagtgcccacatgtcct

SEQ ID NO: 113214 - DNA, 24 bp, Artificial sequence
  SiRNA target sequence
aaacaggagtgcccacatgtcctg

SEQ ID NO: 113215 - DNA, 24 bp, Artificial sequence
  SiRNA target sequence
aacaggagtgcccacatgtcctgt

SEQ ID NO: 113216 - DNA, 24 bp, Artificial sequence
  SiRNA target sequence
acaggagtgcccacatgtcctgta

SEQ ID NO: 113217 - DNA, 24 bp, Artificial sequence
  SiRNA target sequence
caggagtgcccacatgtcctgtac

SEQ ID NO: 113218 - DNA, 24 bp, Artificial sequence
  SiRNA target sequence
aggagtgcccacatgtcctgtacg

SEQ ID NO: 113219 - DNA, 24 bp, Artificial sequence
  SiRNA target sequence
ggagtgcccacatgtcctgtacgt

SEQ ID NO: 113220 - DNA, 24 bp, Artificial sequence
  SiRNA target sequence
gagtgcccacatgtcctgtacgta

SEQ ID NO: 113221 - DNA, 24 bp, Artificial sequence
  SiRNA target sequence
agtgcccacatgtcctgtacgtat

SEQ ID NO: 113222 - DNA, 24 bp, Artificial sequence
  SiRNA target sequence
gtgcccacatgtcctgtacgtatc

SEQ ID NO: 113223 - DNA, 24 bp, Artificial sequence
  SiRNA target sequence
tgcccacatgtcctgtacgtatca

SEQ ID NO: 113224 - DNA, 24 bp, Artificial sequence
  SiRNA target sequence
gcccacatgtcctgtacgtatcaa

SEQ ID NO: 113225 - DNA, 24 bp, Artificial sequence
  SiRNA target sequence
cccacatgtcctgtacgtatcaat

SEQ ID NO: 113226 - DNA, 24 bp, Artificial sequence
  SiRNA target sequence
ccacatgtcctgtacgtatcaatt

SEQ ID NO: 113227 - DNA, 24 bp, Artificial sequence
  SiRNA target sequence
cacatgtcctgtacgtatcaattt

SEQ ID NO: 113228 - DNA, 24 bp, Artificial sequence
  SiRNA target sequence
acatgtcctgtacgtatcaatttg

SEQ ID NO: 113229 - DNA, 24 bp, Artificial sequence
  SiRNA target sequence
catgtcctgtacgtatcaatttgc

SEQ ID NO: 113230 - DNA, 24 bp, Artificial sequence
  SiRNA target sequence
atgtcctgtacgtatcaatttgca

SEQ ID NO: 113231 - DNA, 24 bp, Artificial sequence
  SiRNA target sequence
tgtcctgtacgtatcaatttgcaa

SEQ ID NO: 113232 - DNA, 24 bp, Artificial sequence
  SiRNA target sequence
gtcctgtacgtatcaatttgcaag

SEQ ID NO: 113233 - DNA, 24 bp, Artificial sequence
  SiRNA target sequence
tcctgtacgtatcaatttgcaaga

SEQ ID NO: 113234 - DNA, 24 bp, Artificial sequence
  SiRNA target sequence
cctgtacgtatcaatttgcaagat

SEQ ID NO: 113235 - DNA, 24 bp, Artificial sequence
  SiRNA target sequence
ctgtacgtatcaatttgcaagatg

SEQ ID NO: 113236 - DNA, 24 bp, Artificial sequence
  SiRNA target sequence
tgtacgtatcaatttgcaagatga

SEQ ID NO: 113237 - DNA, 24 bp, Artificial sequence
  SiRNA target sequence
gtacgtatcaatttgcaagatgat

SEQ ID NO: 113238 - DNA, 24 bp, Artificial sequence
  SiRNA target sequence
tacgtatcaatttgcaagatgata

SEQ ID NO: 113239 - DNA, 24 bp, Artificial sequence
  SiRNA target sequence
acgtatcaatttgcaagatgatag

SEQ ID NO: 113240 - DNA, 24 bp, Artificial sequence
  SiRNA target sequence
cgtatcaatttgcaagatgatagg

SEQ ID NO: 113241 - DNA, 24 bp, Artificial sequence
  SiRNA target sequence
gtatcaatttgcaagatgataggt

SEQ ID NO: 113242 - DNA, 24 bp, Artificial sequence
  SiRNA target sequence
tatcaatttgcaagatgataggtc

SEQ ID NO: 113243 - DNA, 24 bp, Artificial sequence
  SiRNA target sequence
atcaatttgcaagatgataggtcc

SEQ ID NO: 113244 - DNA, 24 bp, Artificial sequence
  SiRNA target sequence
tcaatttgcaagatgataggtcct

SEQ ID NO: 113245 - DNA, 24 bp, Artificial sequence
  SiRNA target sequence
caatttgcaagatgataggtcctt

SEQ ID NO: 113246 - DNA, 24 bp, Artificial sequence
  SiRNA target sequence
aatttgcaagatgataggtccttt

SEQ ID NO: 113247 - DNA, 24 bp, Artificial sequence
  SiRNA target sequence
atttgcaagatgataggtcctttt

SEQ ID NO: 113248 - DNA, 24 bp, Artificial sequence
  SiRNA target sequence
tttgcaagatgataggtccttttt

SEQ ID NO: 113249 - DNA, 24 bp, Artificial sequence
  SiRNA target sequence
ttgcaagatgataggtcctttttc

SEQ ID NO: 113250 - DNA, 24 bp, Artificial sequence
  SiRNA target sequence
tgcaagatgataggtcctttttct

SEQ ID NO: 113251 - DNA, 24 bp, Artificial sequence
  SiRNA target sequence
gcaagatgataggtcctttttcta

SEQ ID NO: 113252 - DNA, 24 bp, Artificial sequence
  SiRNA target sequence
caagatgataggtcctttttctat

SEQ ID NO: 113253 - DNA, 24 bp, Artificial sequence
  SiRNA target sequence
aagatgataggtcctttttctatt

SEQ ID NO: 113254 - DNA, 24 bp, Artificial sequence
  SiRNA target sequence
agatgataggtcctttttctattg

SEQ ID NO: 113255 - DNA, 24 bp, Artificial sequence
  SiRNA target sequence
gatgataggtcctttttctattgc

SEQ ID NO: 113256 - DNA, 24 bp, Artificial sequence
  SiRNA target sequence
atgataggtcctttttctattgca

SEQ ID NO: 113257 - DNA, 24 bp, Artificial sequence
  SiRNA target sequence
tgataggtcctttttctattgcat

SEQ ID NO: 113258 - DNA, 24 bp, Artificial sequence
  SiRNA target sequence
gataggtcctttttctattgcatg

SEQ ID NO: 113259 - DNA, 24 bp, Artificial sequence
  SiRNA target sequence
ataggtcctttttctattgcatgt

SEQ ID NO: 113260 - DNA, 24 bp, Artificial sequence
  SiRNA target sequence
taggtcctttttctattgcatgtt

SEQ ID NO: 113261 - DNA, 24 bp, Artificial sequence
  SiRNA target sequence
aggtcctttttctattgcatgttg

SEQ ID NO: 113262 - DNA, 24 bp, Artificial sequence
  SiRNA target sequence
ggtcctttttctattgcatgttgt

SEQ ID NO: 113263 - DNA, 24 bp, Artificial sequence
  SiRNA target sequence
gtcctttttctattgcatgttgtc

SEQ ID NO: 113264 - DNA, 24 bp, Artificial sequence
  SiRNA target sequence
tcctttttctattgcatgttgtct

SEQ ID NO: 113265 - DNA, 24 bp, Artificial sequence
  SiRNA target sequence
cctttttctattgcatgttgtcta

SEQ ID NO: 113266 - DNA, 24 bp, Artificial sequence
  SiRNA target sequence
ctttttctattgcatgttgtctag

SEQ ID NO: 113267 - DNA, 24 bp, Artificial sequence
  SiRNA target sequence
tttttctattgcatgttgtctagc

SEQ ID NO: 113268 - DNA, 24 bp, Artificial sequence
  SiRNA target sequence
ttttctattgcatgttgtctagca

SEQ ID NO: 113269 - DNA, 24 bp, Artificial sequence
  SiRNA target sequence
tttctattgcatgttgtctagcaa

SEQ ID NO: 113270 - DNA, 24 bp, Artificial sequence
  SiRNA target sequence
ttctattgcatgttgtctagcaaa

SEQ ID NO: 113271 - DNA, 24 bp, Artificial sequence
  SiRNA target sequence
tctattgcatgttgtctagcaaat

SEQ ID NO: 113272 - DNA, 24 bp, Artificial sequence
  SiRNA target sequence
ctattgcatgttgtctagcaaatg

SEQ ID NO: 113273 - DNA, 24 bp, Artificial sequence
  SiRNA target sequence
tattgcatgttgtctagcaaatgt

SEQ ID NO: 113274 - DNA, 24 bp, Artificial sequence
  SiRNA target sequence
attgcatgttgtctagcaaatgta

SEQ ID NO: 113275 - DNA, 24 bp, Artificial sequence
  SiRNA target sequence
ttgcatgttgtctagcaaatgtaa

SEQ ID NO: 113276 - DNA, 24 bp, Artificial sequence
  SiRNA target sequence
tgcatgttgtctagcaaatgtaaa

SEQ ID NO: 113277 - DNA, 24 bp, Artificial sequence
  SiRNA target sequence
gcatgttgtctagcaaatgtaaat

SEQ ID NO: 113278 - DNA, 24 bp, Artificial sequence
  SiRNA target sequence
catgttgtctagcaaatgtaaata

SEQ ID NO: 113279 - DNA, 24 bp, Artificial sequence
  SiRNA target sequence
atgttgtctagcaaatgtaaatac

SEQ ID NO: 113280 - DNA, 24 bp, Artificial sequence
  SiRNA target sequence
tgttgtctagcaaatgtaaataca

SEQ ID NO: 113281 - DNA, 24 bp, Artificial sequence
  SiRNA target sequence
gttgtctagcaaatgtaaatacat

SEQ ID NO: 113282 - DNA, 24 bp, Artificial sequence
  SiRNA target sequence
ttgtctagcaaatgtaaatacatc

SEQ ID NO: 113283 - DNA, 24 bp, Artificial sequence
  SiRNA target sequence
tgtctagcaaatgtaaatacatca

SEQ ID NO: 113284 - DNA, 24 bp, Artificial sequence
  SiRNA target sequence
gtctagcaaatgtaaatacatcaa

SEQ ID NO: 113285 - DNA, 24 bp, Artificial sequence
  SiRNA target sequence
tctagcaaatgtaaatacatcaat

SEQ ID NO: 113286 - DNA, 24 bp, Artificial sequence
  SiRNA target sequence
ctagcaaatgtaaatacatcaatc

SEQ ID NO: 113287 - DNA, 24 bp, Artificial sequence
  SiRNA target sequence
tagcaaatgtaaatacatcaatca

SEQ ID NO: 113288 - DNA, 24 bp, Artificial sequence
  SiRNA target sequence
agcaaatgtaaatacatcaatcag

SEQ ID NO: 113289 - DNA, 24 bp, Artificial sequence
  SiRNA target sequence
gcaaatgtaaatacatcaatcagt

SEQ ID NO: 113290 - DNA, 24 bp, Artificial sequence
  SiRNA target sequence
caaatgtaaatacatcaatcagtt

SEQ ID NO: 113291 - DNA, 24 bp, Artificial sequence
  SiRNA target sequence
aaatgtaaatacatcaatcagttg

SEQ ID NO: 113292 - DNA, 24 bp, Artificial sequence
  SiRNA target sequence
aatgtaaatacatcaatcagttga

SEQ ID NO: 113293 - DNA, 24 bp, Artificial sequence
  SiRNA target sequence
atgtaaatacatcaatcagttgag

SEQ ID NO: 113294 - DNA, 24 bp, Artificial sequence
  SiRNA target sequence
tgtaaatacatcaatcagttgagt

SEQ ID NO: 113295 - DNA, 24 bp, Artificial sequence
  SiRNA target sequence
gtaaatacatcaatcagttgagtt

SEQ ID NO: 113296 - DNA, 24 bp, Artificial sequence
  SiRNA target sequence
taaatacatcaatcagttgagtta

SEQ ID NO: 113297 - DNA, 24 bp, Artificial sequence
  SiRNA target sequence
aaatacatcaatcagttgagttat

SEQ ID NO: 113298 - DNA, 24 bp, Artificial sequence
  SiRNA target sequence
aatacatcaatcagttgagttatg

SEQ ID NO: 113299 - DNA, 24 bp, Artificial sequence
  SiRNA target sequence
atacatcaatcagttgagttatgt

SEQ ID NO: 113300 - DNA, 24 bp, Artificial sequence
  SiRNA target sequence
tacatcaatcagttgagttatgtt

SEQ ID NO: 113301 - DNA, 24 bp, Artificial sequence
  SiRNA target sequence
acatcaatcagttgagttatgttt

SEQ ID NO: 113302 - DNA, 24 bp, Artificial sequence
  SiRNA target sequence
catcaatcagttgagttatgtttt

SEQ ID NO: 113303 - DNA, 24 bp, Artificial sequence
  SiRNA target sequence
atcaatcagttgagttatgttttt

SEQ ID NO: 113304 - DNA, 24 bp, Artificial sequence
  SiRNA target sequence
tcaatcagttgagttatgttttta

SEQ ID NO: 113305 - DNA, 24 bp, Artificial sequence
  SiRNA target sequence
caatcagttgagttatgtttttat

SEQ ID NO: 113306 - DNA, 24 bp, Artificial sequence
  SiRNA target sequence
aatcagttgagttatgtttttatc

SEQ ID NO: 113307 - DNA, 24 bp, Artificial sequence
  SiRNA target sequence
atcagttgagttatgtttttatct

SEQ ID NO: 113308 - DNA, 24 bp, Artificial sequence
  SiRNA target sequence
tcagttgagttatgtttttatctg

SEQ ID NO: 113309 - DNA, 24 bp, Artificial sequence
  SiRNA target sequence
cagttgagttatgtttttatctgt

SEQ ID NO: 113310 - DNA, 24 bp, Artificial sequence
  SiRNA target sequence
agttgagttatgtttttatctgta

SEQ ID NO: 113311 - DNA, 24 bp, Artificial sequence
  SiRNA target sequence
gttgagttatgtttttatctgtaa

SEQ ID NO: 113312 - DNA, 24 bp, Artificial sequence
  SiRNA target sequence
ttgagttatgtttttatctgtaag

SEQ ID NO: 113313 - DNA, 24 bp, Artificial sequence
  SiRNA target sequence
tgagttatgtttttatctgtaaga

SEQ ID NO: 113314 - DNA, 24 bp, Artificial sequence
  SiRNA target sequence
gagttatgtttttatctgtaagac

SEQ ID NO: 113315 - DNA, 24 bp, Artificial sequence
  SiRNA target sequence
agttatgtttttatctgtaagacg

SEQ ID NO: 113316 - DNA, 24 bp, Artificial sequence
  SiRNA target sequence
gttatgtttttatctgtaagacgt

SEQ ID NO: 113317 - DNA, 24 bp, Artificial sequence
  SiRNA target sequence
ttatgtttttatctgtaagacgta

SEQ ID NO: 113318 - DNA, 24 bp, Artificial sequence
  SiRNA target sequence
tatgtttttatctgtaagacgtat

SEQ ID NO: 113319 - DNA, 24 bp, Artificial sequence
  SiRNA target sequence
atgtttttatctgtaagacgtata

SEQ ID NO: 113320 - DNA, 24 bp, Artificial sequence
  SiRNA target sequence
tgtttttatctgtaagacgtatac

SEQ ID NO: 113321 - DNA, 24 bp, Artificial sequence
  SiRNA target sequence
gtttttatctgtaagacgtatacc

SEQ ID NO: 113322 - DNA, 24 bp, Artificial sequence
  SiRNA target sequence
tttttatctgtaagacgtatacct

SEQ ID NO: 113323 - DNA, 24 bp, Artificial sequence
  SiRNA target sequence
ttttatctgtaagacgtatacctg

SEQ ID NO: 113324 - DNA, 24 bp, Artificial sequence
  SiRNA target sequence
tttatctgtaagacgtatacctgg

SEQ ID NO: 113325 - DNA, 24 bp, Artificial sequence
  SiRNA target sequence
ttatctgtaagacgtatacctgga

SEQ ID NO: 113326 - DNA, 24 bp, Artificial sequence
  SiRNA target sequence
tatctgtaagacgtatacctggaa

SEQ ID NO: 113327 - DNA, 24 bp, Artificial sequence
  SiRNA target sequence
atctgtaagacgtatacctggaat

SEQ ID NO: 113328 - DNA, 24 bp, Artificial sequence
  SiRNA target sequence
tctgtaagacgtatacctggaata

SEQ ID NO: 113329 - DNA, 24 bp, Artificial sequence
  SiRNA target sequence
ctgtaagacgtatacctggaatat

SEQ ID NO: 113330 - DNA, 24 bp, Artificial sequence
  SiRNA target sequence
tgtaagacgtatacctggaatatt

SEQ ID NO: 113331 - DNA, 24 bp, Artificial sequence
  SiRNA target sequence
gtaagacgtatacctggaatatta

SEQ ID NO: 113332 - DNA, 24 bp, Artificial sequence
  SiRNA target sequence
taagacgtatacctggaatattat

SEQ ID NO: 113333 - DNA, 24 bp, Artificial sequence
  SiRNA target sequence
aagacgtatacctggaatattata

SEQ ID NO: 113334 - DNA, 24 bp, Artificial sequence
  SiRNA target sequence
agacgtatacctggaatattatat

SEQ ID NO: 113335 - DNA, 24 bp, Artificial sequence
  SiRNA target sequence
gacgtatacctggaatattatatc

SEQ ID NO: 113336 - DNA, 24 bp, Artificial sequence
  SiRNA target sequence
acgtatacctggaatattatatcc

SEQ ID NO: 113337 - DNA, 24 bp, Artificial sequence
  SiRNA target sequence
cgtatacctggaatattatatccc

SEQ ID NO: 113338 - DNA, 24 bp, Artificial sequence
  SiRNA target sequence
gtatacctggaatattatatcccc

SEQ ID NO: 113339 - DNA, 24 bp, Artificial sequence
  SiRNA target sequence
tatacctggaatattatatcccct

SEQ ID NO: 113340 - DNA, 24 bp, Artificial sequence
  SiRNA target sequence
atacctggaatattatatcccctt

SEQ ID NO: 113341 - DNA, 24 bp, Artificial sequence
  SiRNA target sequence
tacctggaatattatatccccttt

SEQ ID NO: 113342 - DNA, 24 bp, Artificial sequence
  SiRNA target sequence
acctggaatattatatcccctttt

SEQ ID NO: 113343 - DNA, 24 bp, Artificial sequence
  SiRNA target sequence
cctggaatattatatcccctttta

SEQ ID NO: 113344 - DNA, 24 bp, Artificial sequence
  SiRNA target sequence
ctggaatattatatccccttttaa

SEQ ID NO: 113345 - DNA, 24 bp, Artificial sequence
  SiRNA target sequence
tggaatattatatccccttttaaa

SEQ ID NO: 113346 - DNA, 24 bp, Artificial sequence
  SiRNA target sequence
ggaatattatatccccttttaaaa

SEQ ID NO: 113347 - DNA, 24 bp, Artificial sequence
  SiRNA target sequence
gaatattatatccccttttaaaat

SEQ ID NO: 113348 - DNA, 24 bp, Artificial sequence
  SiRNA target sequence
aatattatatccccttttaaaata

SEQ ID NO: 113349 - DNA, 24 bp, Artificial sequence
  SiRNA target sequence
atattatatccccttttaaaatat

SEQ ID NO: 113350 - DNA, 24 bp, Artificial sequence
  SiRNA target sequence
tattatatccccttttaaaatatt

SEQ ID NO: 113351 - DNA, 24 bp, Artificial sequence
  SiRNA target sequence
attatatccccttttaaaatattc

SEQ ID NO: 113352 - DNA, 24 bp, Artificial sequence
  SiRNA target sequence
ttatatccccttttaaaatattca

SEQ ID NO: 113353 - DNA, 24 bp, Artificial sequence
  SiRNA target sequence
tatatccccttttaaaatattcag

SEQ ID NO: 113354 - DNA, 24 bp, Artificial sequence
  SiRNA target sequence
atatccccttttaaaatattcagg

SEQ ID NO: 113355 - DNA, 24 bp, Artificial sequence
  SiRNA target sequence
tatccccttttaaaatattcagga

SEQ ID NO: 113356 - DNA, 24 bp, Artificial sequence
  SiRNA target sequence
atccccttttaaaatattcaggat

SEQ ID NO: 113357 - DNA, 24 bp, Artificial sequence
  SiRNA target sequence
tccccttttaaaatattcaggata

SEQ ID NO: 113358 - DNA, 24 bp, Artificial sequence
  SiRNA target sequence
ccccttttaaaatattcaggatat

SEQ ID NO: 113359 - DNA, 24 bp, Artificial sequence
  SiRNA target sequence
cccttttaaaatattcaggatatg

SEQ ID NO: 113360 - DNA, 24 bp, Artificial sequence
  SiRNA target sequence
ccttttaaaatattcaggatatgt

SEQ ID NO: 113361 - DNA, 24 bp, Artificial sequence
  SiRNA target sequence
cttttaaaatattcaggatatgta

SEQ ID NO: 113362 - DNA, 24 bp, Artificial sequence
  SiRNA target sequence
ttttaaaatattcaggatatgtag

SEQ ID NO: 113363 - DNA, 24 bp, Artificial sequence
  SiRNA target sequence
tttaaaatattcaggatatgtagt

SEQ ID NO: 113364 - DNA, 24 bp, Artificial sequence
  SiRNA target sequence
ttaaaatattcaggatatgtagtg

SEQ ID NO: 113365 - DNA, 24 bp, Artificial sequence
  SiRNA target sequence
taaaatattcaggatatgtagtgg

SEQ ID NO: 113366 - DNA, 24 bp, Artificial sequence
  SiRNA target sequence
aaaatattcaggatatgtagtgga

SEQ ID NO: 113367 - DNA, 24 bp, Artificial sequence
  SiRNA target sequence
aaatattcaggatatgtagtggaa

SEQ ID NO: 113368 - DNA, 24 bp, Artificial sequence
  SiRNA target sequence
aatattcaggatatgtagtggaat

SEQ ID NO: 113369 - DNA, 24 bp, Artificial sequence
  SiRNA target sequence
atattcaggatatgtagtggaatt

SEQ ID NO: 113370 - DNA, 24 bp, Artificial sequence
  SiRNA target sequence
tattcaggatatgtagtggaatta

SEQ ID NO: 113371 - DNA, 24 bp, Artificial sequence
  SiRNA target sequence
attcaggatatgtagtggaattac

SEQ ID NO: 113372 - DNA, 24 bp, Artificial sequence
  SiRNA target sequence
ttcaggatatgtagtggaattact

SEQ ID NO: 113373 - DNA, 24 bp, Artificial sequence
  SiRNA target sequence
tcaggatatgtagtggaattactt

SEQ ID NO: 113374 - DNA, 24 bp, Artificial sequence
  SiRNA target sequence
caggatatgtagtggaattacttt

SEQ ID NO: 113375 - DNA, 24 bp, Artificial sequence
  SiRNA target sequence
aggatatgtagtggaattactttc

SEQ ID NO: 113376 - DNA, 24 bp, Artificial sequence
  SiRNA target sequence
ggatatgtagtggaattactttca

SEQ ID NO: 113377 - DNA, 24 bp, Artificial sequence
  SiRNA target sequence
gatatgtagtggaattactttcag

SEQ ID NO: 113378 - DNA, 24 bp, Artificial sequence
  SiRNA target sequence
atatgtagtggaattactttcagg

SEQ ID NO: 113379 - DNA, 24 bp, Artificial sequence
  SiRNA target sequence
tatgtagtggaattactttcaggt

SEQ ID NO: 113380 - DNA, 24 bp, Artificial sequence
  SiRNA target sequence
atgtagtggaattactttcaggtg

SEQ ID NO: 113381 - DNA, 24 bp, Artificial sequence
  SiRNA target sequence
tgtagtggaattactttcaggtgt

SEQ ID NO: 113382 - DNA, 24 bp, Artificial sequence
  SiRNA target sequence
gtagtggaattactttcaggtgtc

SEQ ID NO: 113383 - DNA, 24 bp, Artificial sequence
  SiRNA target sequence
tagtggaattactttcaggtgtcc

SEQ ID NO: 113384 - DNA, 24 bp, Artificial sequence
  SiRNA target sequence
agtggaattactttcaggtgtcca

SEQ ID NO: 113385 - DNA, 24 bp, Artificial sequence
  SiRNA target sequence
gtggaattactttcaggtgtccac

SEQ ID NO: 113386 - DNA, 24 bp, Artificial sequence
  SiRNA target sequence
tggaattactttcaggtgtccaca

SEQ ID NO: 113387 - DNA, 24 bp, Artificial sequence
  SiRNA target sequence
ggaattactttcaggtgtccacat

SEQ ID NO: 113388 - DNA, 24 bp, Artificial sequence
  SiRNA target sequence
gaattactttcaggtgtccacata

SEQ ID NO: 113389 - DNA, 24 bp, Artificial sequence
  SiRNA target sequence
aattactttcaggtgtccacatac

SEQ ID NO: 113390 - DNA, 24 bp, Artificial sequence
  SiRNA target sequence
attactttcaggtgtccacatact

SEQ ID NO: 113391 - DNA, 24 bp, Artificial sequence
  SiRNA target sequence
ttactttcaggtgtccacatacta

SEQ ID NO: 113392 - DNA, 24 bp, Artificial sequence
  SiRNA target sequence
tactttcaggtgtccacatactat

SEQ ID NO: 113393 - DNA, 24 bp, Artificial sequence
  SiRNA target sequence
actttcaggtgtccacatactata

SEQ ID NO: 113394 - DNA, 24 bp, Artificial sequence
  SiRNA target sequence
ctttcaggtgtccacatactataa

SEQ ID NO: 113395 - DNA, 24 bp, Artificial sequence
  SiRNA target sequence
tttcaggtgtccacatactataat

SEQ ID NO: 113396 - DNA, 24 bp, Artificial sequence
  SiRNA target sequence
ttcaggtgtccacatactataatg

SEQ ID NO: 113397 - DNA, 24 bp, Artificial sequence
  SiRNA target sequence
tcaggtgtccacatactataatga

SEQ ID NO: 113398 - DNA, 24 bp, Artificial sequence
  SiRNA target sequence
caggtgtccacatactataatgat

SEQ ID NO: 113399 - DNA, 24 bp, Artificial sequence
  SiRNA target sequence
aggtgtccacatactataatgatt

SEQ ID NO: 113400 - DNA, 24 bp, Artificial sequence
  SiRNA target sequence
ggtgtccacatactataatgatta

SEQ ID NO: 113401 - DNA, 24 bp, Artificial sequence
  SiRNA target sequence
gtgtccacatactataatgattat

SEQ ID NO: 113402 - DNA, 24 bp, Artificial sequence
  SiRNA target sequence
tgtccacatactataatgattatt

SEQ ID NO: 113403 - DNA, 24 bp, Artificial sequence
  SiRNA target sequence
gtccacatactataatgattattt

SEQ ID NO: 113404 - DNA, 24 bp, Artificial sequence
  SiRNA target sequence
tccacatactataatgattatttt

SEQ ID NO: 113405 - DNA, 24 bp, Artificial sequence
  SiRNA target sequence
ccacatactataatgattattttc

SEQ ID NO: 113406 - DNA, 24 bp, Artificial sequence
  SiRNA target sequence
cacatactataatgattattttca

SEQ ID NO: 113407 - DNA, 24 bp, Artificial sequence
  SiRNA target sequence
acatactataatgattattttcac

SEQ ID NO: 113408 - DNA, 24 bp, Artificial sequence
  SiRNA target sequence
catactataatgattattttcaca

SEQ ID NO: 113409 - DNA, 24 bp, Artificial sequence
  SiRNA target sequence
atactataatgattattttcacat

SEQ ID NO: 113410 - DNA, 24 bp, Artificial sequence
  SiRNA target sequence
tactataatgattattttcacata

SEQ ID NO: 113411 - DNA, 24 bp, Artificial sequence
  SiRNA target sequence
actataatgattattttcacatac

SEQ ID NO: 113412 - DNA, 24 bp, Artificial sequence
  SiRNA target sequence
ctataatgattattttcacataca

SEQ ID NO: 113413 - DNA, 24 bp, Artificial sequence
  SiRNA target sequence
tataatgattattttcacatacat

SEQ ID NO: 113414 - DNA, 24 bp, Artificial sequence
  SiRNA target sequence
ataatgattattttcacatacata

SEQ ID NO: 113415 - DNA, 24 bp, Artificial sequence
  SiRNA target sequence
taatgattattttcacatacataa

SEQ ID NO: 113416 - DNA, 24 bp, Artificial sequence
  SiRNA target sequence
aatgattattttcacatacataaa

SEQ ID NO: 113417 - DNA, 24 bp, Artificial sequence
  SiRNA target sequence
atgattattttcacatacataaac

SEQ ID NO: 113418 - DNA, 24 bp, Artificial sequence
  SiRNA target sequence
tgattattttcacatacataaacc

SEQ ID NO: 113419 - DNA, 24 bp, Artificial sequence
  SiRNA target sequence
gattattttcacatacataaacca

SEQ ID NO: 113420 - DNA, 24 bp, Artificial sequence
  SiRNA target sequence
attattttcacatacataaaccac

SEQ ID NO: 113421 - DNA, 24 bp, Artificial sequence
  SiRNA target sequence
ttattttcacatacataaaccaca

SEQ ID NO: 113422 - DNA, 24 bp, Artificial sequence
  SiRNA target sequence
tattttcacatacataaaccacag

SEQ ID NO: 113423 - DNA, 24 bp, Artificial sequence
  SiRNA target sequence
attttcacatacataaaccacagg

SEQ ID NO: 113424 - DNA, 24 bp, Artificial sequence
  SiRNA target sequence
ttttcacatacataaaccacagga

SEQ ID NO: 113425 - DNA, 24 bp, Artificial sequence
  SiRNA target sequence
tttcacatacataaaccacaggaa

SEQ ID NO: 113426 - DNA, 24 bp, Artificial sequence
  SiRNA target sequence
ttcacatacataaaccacaggaag

SEQ ID NO: 113427 - DNA, 24 bp, Artificial sequence
  SiRNA target sequence
tcacatacataaaccacaggaagt

SEQ ID NO: 113428 - DNA, 24 bp, Artificial sequence
  SiRNA target sequence
cacatacataaaccacaggaagtt

SEQ ID NO: 113429 - DNA, 24 bp, Artificial sequence
  SiRNA target sequence
acatacataaaccacaggaagttt

SEQ ID NO: 113430 - DNA, 24 bp, Artificial sequence
  SiRNA target sequence
catacataaaccacaggaagtttc

SEQ ID NO: 113431 - DNA, 24 bp, Artificial sequence
  SiRNA target sequence
atacataaaccacaggaagtttcc

SEQ ID NO: 113432 - DNA, 24 bp, Artificial sequence
  SiRNA target sequence
tacataaaccacaggaagtttcca

SEQ ID NO: 113433 - DNA, 24 bp, Artificial sequence
  SiRNA target sequence
acataaaccacaggaagtttccat

SEQ ID NO: 113434 - DNA, 24 bp, Artificial sequence
  SiRNA target sequence
cataaaccacaggaagtttccata

SEQ ID NO: 113435 - DNA, 24 bp, Artificial sequence
  SiRNA target sequence
ataaaccacaggaagtttccataa

SEQ ID NO: 113436 - DNA, 24 bp, Artificial sequence
  SiRNA target sequence
taaaccacaggaagtttccataat

SEQ ID NO: 113437 - DNA, 24 bp, Artificial sequence
  SiRNA target sequence
aaaccacaggaagtttccataatg

SEQ ID NO: 113438 - DNA, 24 bp, Artificial sequence
  SiRNA target sequence
aaccacaggaagtttccataatgc

SEQ ID NO: 113439 - DNA, 24 bp, Artificial sequence
  SiRNA target sequence
accacaggaagtttccataatgca

SEQ ID NO: 113440 - DNA, 24 bp, Artificial sequence
  SiRNA target sequence
ccacaggaagtttccataatgcag

SEQ ID NO: 113441 - DNA, 24 bp, Artificial sequence
  SiRNA target sequence
cacaggaagtttccataatgcagc

SEQ ID NO: 113442 - DNA, 24 bp, Artificial sequence
  SiRNA target sequence
acaggaagtttccataatgcagcc

SEQ ID NO: 113443 - DNA, 24 bp, Artificial sequence
  SiRNA target sequence
caggaagtttccataatgcagcca

SEQ ID NO: 113444 - DNA, 24 bp, Artificial sequence
  SiRNA target sequence
aggaagtttccataatgcagccat

SEQ ID NO: 113445 - DNA, 24 bp, Artificial sequence
  SiRNA target sequence
ggaagtttccataatgcagccata

SEQ ID NO: 113446 - DNA, 24 bp, Artificial sequence
  SiRNA target sequence
gaagtttccataatgcagccatat

SEQ ID NO: 113447 - DNA, 24 bp, Artificial sequence
  SiRNA target sequence
aagtttccataatgcagccatatt

SEQ ID NO: 113448 - DNA, 24 bp, Artificial sequence
  SiRNA target sequence
agtttccataatgcagccatattg

SEQ ID NO: 113449 - DNA, 24 bp, Artificial sequence
  SiRNA target sequence
gtttccataatgcagccatattga

SEQ ID NO: 113450 - DNA, 24 bp, Artificial sequence
  SiRNA target sequence
tttccataatgcagccatattgaa

SEQ ID NO: 113451 - DNA, 24 bp, Artificial sequence
  SiRNA target sequence
ttccataatgcagccatattgaac

SEQ ID NO: 113452 - DNA, 24 bp, Artificial sequence
  SiRNA target sequence
tccataatgcagccatattgaacg

SEQ ID NO: 113453 - DNA, 24 bp, Artificial sequence
  SiRNA target sequence
ccataatgcagccatattgaacga

SEQ ID NO: 113454 - DNA, 24 bp, Artificial sequence
  SiRNA target sequence
cataatgcagccatattgaacgac

SEQ ID NO: 113455 - DNA, 24 bp, Artificial sequence
  SiRNA target sequence
ataatgcagccatattgaacgact

SEQ ID NO: 113456 - DNA, 24 bp, Artificial sequence
  SiRNA target sequence
taatgcagccatattgaacgactc

SEQ ID NO: 113457 - DNA, 24 bp, Artificial sequence
  SiRNA target sequence
aatgcagccatattgaacgactcc

SEQ ID NO: 113458 - DNA, 24 bp, Artificial sequence
  SiRNA target sequence
atgcagccatattgaacgactccc

SEQ ID NO: 113459 - DNA, 24 bp, Artificial sequence
  SiRNA target sequence
tgcagccatattgaacgactccca

SEQ ID NO: 113460 - DNA, 24 bp, Artificial sequence
  SiRNA target sequence
gcagccatattgaacgactcccag

SEQ ID NO: 113461 - DNA, 24 bp, Artificial sequence
  SiRNA target sequence
cagccatattgaacgactcccaga

SEQ ID NO: 113462 - DNA, 24 bp, Artificial sequence
  SiRNA target sequence
agccatattgaacgactcccagac

SEQ ID NO: 113463 - DNA, 24 bp, Artificial sequence
  SiRNA target sequence
gccatattgaacgactcccagacc

SEQ ID NO: 113464 - DNA, 24 bp, Artificial sequence
  SiRNA target sequence
ccatattgaacgactcccagacct

SEQ ID NO: 113465 - DNA, 24 bp, Artificial sequence
  SiRNA target sequence
catattgaacgactcccagacctg

SEQ ID NO: 113466 - DNA, 24 bp, Artificial sequence
  SiRNA target sequence
atattgaacgactcccagacctgt

SEQ ID NO: 113467 - DNA, 24 bp, Artificial sequence
  SiRNA target sequence
tattgaacgactcccagacctgtc

SEQ ID NO: 113468 - DNA, 24 bp, Artificial sequence
  SiRNA target sequence
attgaacgactcccagacctgtcc

SEQ ID NO: 113469 - DNA, 24 bp, Artificial sequence
  SiRNA target sequence
ttgaacgactcccagacctgtccc

SEQ ID NO: 113470 - DNA, 24 bp, Artificial sequence
  SiRNA target sequence
tgaacgactcccagacctgtccct

SEQ ID NO: 113471 - DNA, 24 bp, Artificial sequence
  SiRNA target sequence
gaacgactcccagacctgtccctg

SEQ ID NO: 113472 - DNA, 24 bp, Artificial sequence
  SiRNA target sequence
aacgactcccagacctgtccctga

SEQ ID NO: 113473 - DNA, 24 bp, Artificial sequence
  SiRNA target sequence
acgactcccagacctgtccctgat

SEQ ID NO: 113474 - DNA, 24 bp, Artificial sequence
  SiRNA target sequence
cgactcccagacctgtccctgatt

SEQ ID NO: 113475 - DNA, 24 bp, Artificial sequence
  SiRNA target sequence
gactcccagacctgtccctgattt

SEQ ID NO: 113476 - DNA, 24 bp, Artificial sequence
  SiRNA target sequence
actcccagacctgtccctgatttg

SEQ ID NO: 113477 - DNA, 24 bp, Artificial sequence
  SiRNA target sequence
ctcccagacctgtccctgatttgc

SEQ ID NO: 113478 - DNA, 24 bp, Artificial sequence
  SiRNA target sequence
tcccagacctgtccctgatttgca

SEQ ID NO: 113479 - DNA, 24 bp, Artificial sequence
  SiRNA target sequence
cccagacctgtccctgatttgcag

SEQ ID NO: 113480 - DNA, 24 bp, Artificial sequence
  SiRNA target sequence
ccagacctgtccctgatttgcagc

SEQ ID NO: 113481 - DNA, 24 bp, Artificial sequence
  SiRNA target sequence
cagacctgtccctgatttgcagca

SEQ ID NO: 113482 - DNA, 24 bp, Artificial sequence
  SiRNA target sequence
agacctgtccctgatttgcagcac

SEQ ID NO: 113483 - DNA, 24 bp, Artificial sequence
  SiRNA target sequence
gacctgtccctgatttgcagcacc

SEQ ID NO: 113484 - DNA, 24 bp, Artificial sequence
  SiRNA target sequence
acctgtccctgatttgcagcacca

SEQ ID NO: 113485 - DNA, 24 bp, Artificial sequence
  SiRNA target sequence
cctgtccctgatttgcagcaccat

SEQ ID NO: 113486 - DNA, 24 bp, Artificial sequence
  SiRNA target sequence
ctgtccctgatttgcagcaccatc

SEQ ID NO: 113487 - DNA, 24 bp, Artificial sequence
  SiRNA target sequence
tgtccctgatttgcagcaccatcc

SEQ ID NO: 113488 - DNA, 24 bp, Artificial sequence
  SiRNA target sequence
gtccctgatttgcagcaccatccc

SEQ ID NO: 113489 - DNA, 24 bp, Artificial sequence
  SiRNA target sequence
tccctgatttgcagcaccatcccc

SEQ ID NO: 113490 - DNA, 24 bp, Artificial sequence
  SiRNA target sequence
ccctgatttgcagcaccatccccg

SEQ ID NO: 113491 - DNA, 24 bp, Artificial sequence
  SiRNA target sequence
cctgatttgcagcaccatccccga

SEQ ID NO: 113492 - DNA, 24 bp, Artificial sequence
  SiRNA target sequence
ctgatttgcagcaccatccccgaa

SEQ ID NO: 113493 - DNA, 24 bp, Artificial sequence
  SiRNA target sequence
tgatttgcagcaccatccccgaaa

SEQ ID NO: 113494 - DNA, 24 bp, Artificial sequence
  SiRNA target sequence
gatttgcagcaccatccccgaaaa

SEQ ID NO: 113495 - DNA, 24 bp, Artificial sequence
  SiRNA target sequence
atttgcagcaccatccccgaaaaa

SEQ ID NO: 113496 - DNA, 24 bp, Artificial sequence
  SiRNA target sequence
tttgcagcaccatccccgaaaaat

SEQ ID NO: 113497 - DNA, 24 bp, Artificial sequence
  SiRNA target sequence
ttgcagcaccatccccgaaaaata

SEQ ID NO: 113498 - DNA, 24 bp, Artificial sequence
  SiRNA target sequence
tgcagcaccatccccgaaaaatac

SEQ ID NO: 113499 - DNA, 24 bp, Artificial sequence
  SiRNA target sequence
gcagcaccatccccgaaaaataca

SEQ ID NO: 113500 - DNA, 24 bp, Artificial sequence
  SiRNA target sequence
cagcaccatccccgaaaaatacaa

SEQ ID NO: 113501 - DNA, 24 bp, Artificial sequence
  SiRNA target sequence
agcaccatccccgaaaaatacaaa

SEQ ID NO: 113502 - DNA, 24 bp, Artificial sequence
  SiRNA target sequence
gcaccatccccgaaaaatacaaat

SEQ ID NO: 113503 - DNA, 24 bp, Artificial sequence
  SiRNA target sequence
caccatccccgaaaaatacaaatg

SEQ ID NO: 113504 - DNA, 24 bp, Artificial sequence
  SiRNA target sequence
accatccccgaaaaatacaaatgc

SEQ ID NO: 113505 - DNA, 24 bp, Artificial sequence
  SiRNA target sequence
ccatccccgaaaaatacaaatgct

SEQ ID NO: 113506 - DNA, 24 bp, Artificial sequence
  SiRNA target sequence
catccccgaaaaatacaaatgcta

SEQ ID NO: 113507 - DNA, 24 bp, Artificial sequence
  SiRNA target sequence
atccccgaaaaatacaaatgctac

SEQ ID NO: 113508 - DNA, 24 bp, Artificial sequence
  SiRNA target sequence
tccccgaaaaatacaaatgctaca

SEQ ID NO: 113509 - DNA, 24 bp, Artificial sequence
  SiRNA target sequence
ccccgaaaaatacaaatgctacat

SEQ ID NO: 113510 - DNA, 24 bp, Artificial sequence
  SiRNA target sequence
cccgaaaaatacaaatgctacatt

SEQ ID NO: 113511 - DNA, 24 bp, Artificial sequence
  SiRNA target sequence
ccgaaaaatacaaatgctacattt

SEQ ID NO: 113512 - DNA, 24 bp, Artificial sequence
  SiRNA target sequence
cgaaaaatacaaatgctacatttt

SEQ ID NO: 113513 - DNA, 24 bp, Artificial sequence
  SiRNA target sequence
gaaaaatacaaatgctacattttt

SEQ ID NO: 113514 - DNA, 24 bp, Artificial sequence
  SiRNA target sequence
aaaaatacaaatgctacatttttt

SEQ ID NO: 113515 - DNA, 24 bp, Artificial sequence
  SiRNA target sequence
aaaatacaaatgctacatttttta

SEQ ID NO: 113516 - DNA, 24 bp, Artificial sequence
  SiRNA target sequence
aaatacaaatgctacattttttac

SEQ ID NO: 113517 - DNA, 24 bp, Artificial sequence
  SiRNA target sequence
aatacaaatgctacattttttact

SEQ ID NO: 113518 - DNA, 24 bp, Artificial sequence
  SiRNA target sequence
atacaaatgctacattttttactt

SEQ ID NO: 113519 - DNA, 24 bp, Artificial sequence
  SiRNA target sequence
tacaaatgctacattttttacttt

SEQ ID NO: 113520 - DNA, 24 bp, Artificial sequence
  SiRNA target sequence
acaaatgctacattttttactttt

SEQ ID NO: 113521 - DNA, 24 bp, Artificial sequence
  SiRNA target sequence
caaatgctacattttttacttttt

SEQ ID NO: 113522 - DNA, 24 bp, Artificial sequence
  SiRNA target sequence
aaatgctacattttttactttttt

SEQ ID NO: 113523 - DNA, 24 bp, Artificial sequence
  SiRNA target sequence
aatgctacattttttactttttta

SEQ ID NO: 113524 - DNA, 24 bp, Artificial sequence
  SiRNA target sequence
atgctacattttttacttttttat

SEQ ID NO: 113525 - DNA, 24 bp, Artificial sequence
  SiRNA target sequence
tgctacattttttacttttttata

SEQ ID NO: 113526 - DNA, 24 bp, Artificial sequence
  SiRNA target sequence
gctacattttttacttttttatat

SEQ ID NO: 113527 - DNA, 24 bp, Artificial sequence
  SiRNA target sequence
ctacattttttacttttttatatt

SEQ ID NO: 113528 - DNA, 24 bp, Artificial sequence
  SiRNA target sequence
tacattttttacttttttatattg

SEQ ID NO: 113529 - DNA, 24 bp, Artificial sequence
  SiRNA target sequence
acattttttacttttttatattgt

SEQ ID NO: 113530 - DNA, 24 bp, Artificial sequence
  SiRNA target sequence
cattttttacttttttatattgta

SEQ ID NO: 113531 - DNA, 24 bp, Artificial sequence
  SiRNA target sequence
attttttacttttttatattgtaa

SEQ ID NO: 113532 - DNA, 24 bp, Artificial sequence
  SiRNA target sequence
ttttttacttttttatattgtaaa

SEQ ID NO: 113533 - DNA, 24 bp, Artificial sequence
  SiRNA target sequence
tttttacttttttatattgtaaag

SEQ ID NO: 113534 - DNA, 24 bp, Artificial sequence
  SiRNA target sequence
ttttacttttttatattgtaaagc

SEQ ID NO: 113535 - DNA, 24 bp, Artificial sequence
  SiRNA target sequence
tttacttttttatattgtaaagca

SEQ ID NO: 113536 - DNA, 24 bp, Artificial sequence
  SiRNA target sequence
ttacttttttatattgtaaagcaa

SEQ ID NO: 113537 - DNA, 24 bp, Artificial sequence
  SiRNA target sequence
tacttttttatattgtaaagcaaa

SEQ ID NO: 113538 - DNA, 24 bp, Artificial sequence
  SiRNA target sequence
acttttttatattgtaaagcaaat

SEQ ID NO: 113539 - DNA, 24 bp, Artificial sequence
  SiRNA target sequence
cttttttatattgtaaagcaaatc

SEQ ID NO: 113540 - DNA, 24 bp, Artificial sequence
  SiRNA target sequence
ttttttatattgtaaagcaaatcc

SEQ ID NO: 113541 - DNA, 24 bp, Artificial sequence
  SiRNA target sequence
tttttatattgtaaagcaaatccc

SEQ ID NO: 113542 - DNA, 24 bp, Artificial sequence
  SiRNA target sequence
ttttatattgtaaagcaaatccca

SEQ ID NO: 113543 - DNA, 24 bp, Artificial sequence
  SiRNA target sequence
tttatattgtaaagcaaatcccaa

SEQ ID NO: 113544 - DNA, 24 bp, Artificial sequence
  SiRNA target sequence
ttatattgtaaagcaaatcccaat

SEQ ID NO: 113545 - DNA, 24 bp, Artificial sequence
  SiRNA target sequence
tatattgtaaagcaaatcccaatc

SEQ ID NO: 113546 - DNA, 24 bp, Artificial sequence
  SiRNA target sequence
atattgtaaagcaaatcccaatcc

SEQ ID NO: 113547 - DNA, 24 bp, Artificial sequence
  SiRNA target sequence
tattgtaaagcaaatcccaatcct

SEQ ID NO: 113548 - DNA, 24 bp, Artificial sequence
  SiRNA target sequence
attgtaaagcaaatcccaatcctg

SEQ ID NO: 113549 - DNA, 24 bp, Artificial sequence
  SiRNA target sequence
ttgtaaagcaaatcccaatcctgt

SEQ ID NO: 113550 - DNA, 24 bp, Artificial sequence
  SiRNA target sequence
tgtaaagcaaatcccaatcctgta

SEQ ID NO: 113551 - DNA, 24 bp, Artificial sequence
  SiRNA target sequence
gtaaagcaaatcccaatcctgtac

SEQ ID NO: 113552 - DNA, 24 bp, Artificial sequence
  SiRNA target sequence
taaagcaaatcccaatcctgtacc

SEQ ID NO: 113553 - DNA, 24 bp, Artificial sequence
  SiRNA target sequence
aaagcaaatcccaatcctgtacca

SEQ ID NO: 113554 - DNA, 24 bp, Artificial sequence
  SiRNA target sequence
aagcaaatcccaatcctgtaccaa

SEQ ID NO: 113555 - DNA, 24 bp, Artificial sequence
  SiRNA target sequence
agcaaatcccaatcctgtaccaag

SEQ ID NO: 113556 - DNA, 24 bp, Artificial sequence
  SiRNA target sequence
gcaaatcccaatcctgtaccaagc

SEQ ID NO: 113557 - DNA, 24 bp, Artificial sequence
  SiRNA target sequence
caaatcccaatcctgtaccaagcg

SEQ ID NO: 113558 - DNA, 24 bp, Artificial sequence
  SiRNA target sequence
aaatcccaatcctgtaccaagcga

SEQ ID NO: 113559 - DNA, 24 bp, Artificial sequence
  SiRNA target sequence
aatcccaatcctgtaccaagcgat

SEQ ID NO: 113560 - DNA, 24 bp, Artificial sequence
  SiRNA target sequence
atcccaatcctgtaccaagcgata

SEQ ID NO: 113561 - DNA, 24 bp, Artificial sequence
  SiRNA target sequence
tcccaatcctgtaccaagcgatac

SEQ ID NO: 113562 - DNA, 24 bp, Artificial sequence
  SiRNA target sequence
cccaatcctgtaccaagcgatacc

SEQ ID NO: 113563 - DNA, 24 bp, Artificial sequence
  SiRNA target sequence
ccaatcctgtaccaagcgatacct

SEQ ID NO: 113564 - DNA, 24 bp, Artificial sequence
  SiRNA target sequence
caatcctgtaccaagcgatacctg

SEQ ID NO: 113565 - DNA, 24 bp, Artificial sequence
  SiRNA target sequence
aatcctgtaccaagcgatacctgc

SEQ ID NO: 113566 - DNA, 24 bp, Artificial sequence
  SiRNA target sequence
atcctgtaccaagcgatacctgcg

SEQ ID NO: 113567 - DNA, 24 bp, Artificial sequence
  SiRNA target sequence
tcctgtaccaagcgatacctgcgc

SEQ ID NO: 113568 - DNA, 24 bp, Artificial sequence
  SiRNA target sequence
cctgtaccaagcgatacctgcgca

SEQ ID NO: 113569 - DNA, 24 bp, Artificial sequence
  SiRNA target sequence
ctgtaccaagcgatacctgcgcac

SEQ ID NO: 113570 - DNA, 24 bp, Artificial sequence
  SiRNA target sequence
tgtaccaagcgatacctgcgcacc

SEQ ID NO: 113571 - DNA, 24 bp, Artificial sequence
  SiRNA target sequence
gtaccaagcgatacctgcgcacct

SEQ ID NO: 113572 - DNA, 24 bp, Artificial sequence
  SiRNA target sequence
taccaagcgatacctgcgcaccta

SEQ ID NO: 113573 - DNA, 24 bp, Artificial sequence
  SiRNA target sequence
accaagcgatacctgcgcacctac

SEQ ID NO: 113574 - DNA, 24 bp, Artificial sequence
  SiRNA target sequence
ccaagcgatacctgcgcacctact

SEQ ID NO: 113575 - DNA, 24 bp, Artificial sequence
  SiRNA target sequence
caagcgatacctgcgcacctacta

SEQ ID NO: 113576 - DNA, 24 bp, Artificial sequence
  SiRNA target sequence
aagcgatacctgcgcacctactat

SEQ ID NO: 113577 - DNA, 24 bp, Artificial sequence
  SiRNA target sequence
agcgatacctgcgcacctactata

SEQ ID NO: 113578 - DNA, 24 bp, Artificial sequence
  SiRNA target sequence
gcgatacctgcgcacctactatac

SEQ ID NO: 113579 - DNA, 24 bp, Artificial sequence
  SiRNA target sequence
cgatacctgcgcacctactatacc

SEQ ID NO: 113580 - DNA, 24 bp, Artificial sequence
  SiRNA target sequence
gatacctgcgcacctactataccg

SEQ ID NO: 113581 - DNA, 24 bp, Artificial sequence
  SiRNA target sequence
atacctgcgcacctactataccgt

SEQ ID NO: 113582 - DNA, 24 bp, Artificial sequence
  SiRNA target sequence
tacctgcgcacctactataccgtg

SEQ ID NO: 113583 - DNA, 24 bp, Artificial sequence
  SiRNA target sequence
acctgcgcacctactataccgtgt

SEQ ID NO: 113584 - DNA, 24 bp, Artificial sequence
  SiRNA target sequence
cctgcgcacctactataccgtgtc

SEQ ID NO: 113585 - DNA, 24 bp, Artificial sequence
  SiRNA target sequence
ctgcgcacctactataccgtgtcc

SEQ ID NO: 113586 - DNA, 24 bp, Artificial sequence
  SiRNA target sequence
tgcgcacctactataccgtgtccc

SEQ ID NO: 113587 - DNA, 24 bp, Artificial sequence
  SiRNA target sequence
gcgcacctactataccgtgtcccc

SEQ ID NO: 113588 - DNA, 24 bp, Artificial sequence
  SiRNA target sequence
cgcacctactataccgtgtccccc

SEQ ID NO: 113589 - DNA, 24 bp, Artificial sequence
  SiRNA target sequence
gcacctactataccgtgtccccca

SEQ ID NO: 113590 - DNA, 24 bp, Artificial sequence
  SiRNA target sequence
cacctactataccgtgtcccccat

SEQ ID NO: 113591 - DNA, 24 bp, Artificial sequence
  SiRNA target sequence
acctactataccgtgtcccccata

SEQ ID NO: 113592 - DNA, 24 bp, Artificial sequence
  SiRNA target sequence
cctactataccgtgtcccccataa

SEQ ID NO: 113593 - DNA, 24 bp, Artificial sequence
  SiRNA target sequence
ctactataccgtgtcccccataaa

SEQ ID NO: 113594 - DNA, 24 bp, Artificial sequence
  SiRNA target sequence
tactataccgtgtcccccataaaa

SEQ ID NO: 113595 - DNA, 24 bp, Artificial sequence
  SiRNA target sequence
actataccgtgtcccccataaaat

SEQ ID NO: 113596 - DNA, 24 bp, Artificial sequence
  SiRNA target sequence
ctataccgtgtcccccataaaatt

SEQ ID NO: 113597 - DNA, 24 bp, Artificial sequence
  SiRNA target sequence
tataccgtgtcccccataaaattg

SEQ ID NO: 113598 - DNA, 24 bp, Artificial sequence
  SiRNA target sequence
ataccgtgtcccccataaaattgg

SEQ ID NO: 113599 - DNA, 24 bp, Artificial sequence
  SiRNA target sequence
taccgtgtcccccataaaattggt

SEQ ID NO: 113600 - DNA, 24 bp, Artificial sequence
  SiRNA target sequence
accgtgtcccccataaaattggtc

SEQ ID NO: 113601 - DNA, 24 bp, Artificial sequence
  SiRNA target sequence
ccgtgtcccccataaaattggtca

SEQ ID NO: 113602 - DNA, 24 bp, Artificial sequence
  SiRNA target sequence
cgtgtcccccataaaattggtcat

SEQ ID NO: 113603 - DNA, 24 bp, Artificial sequence
  SiRNA target sequence
gtgtcccccataaaattggtcatt

SEQ ID NO: 113604 - DNA, 24 bp, Artificial sequence
  SiRNA target sequence
tgtcccccataaaattggtcatta

SEQ ID NO: 113605 - DNA, 24 bp, Artificial sequence
  SiRNA target sequence
gtcccccataaaattggtcattat

SEQ ID NO: 113606 - DNA, 24 bp, Artificial sequence
  SiRNA target sequence
tcccccataaaattggtcattata

SEQ ID NO: 113607 - DNA, 24 bp, Artificial sequence
  SiRNA target sequence
cccccataaaattggtcattatac

SEQ ID NO: 113608 - DNA, 24 bp, Artificial sequence
  SiRNA target sequence
ccccataaaattggtcattataca

SEQ ID NO: 113609 - DNA, 24 bp, Artificial sequence
  SiRNA target sequence
cccataaaattggtcattatacaa

SEQ ID NO: 113610 - DNA, 24 bp, Artificial sequence
  SiRNA target sequence
ccataaaattggtcattatacaaa

SEQ ID NO: 113611 - DNA, 24 bp, Artificial sequence
  SiRNA target sequence
cataaaattggtcattatacaaat

SEQ ID NO: 113612 - DNA, 24 bp, Artificial sequence
  SiRNA target sequence
ataaaattggtcattatacaaatg

SEQ ID NO: 113613 - DNA, 24 bp, Artificial sequence
  SiRNA target sequence
taaaattggtcattatacaaatgc

SEQ ID NO: 113614 - DNA, 24 bp, Artificial sequence
  SiRNA target sequence
aaaattggtcattatacaaatgca

SEQ ID NO: 113615 - DNA, 24 bp, Artificial sequence
  SiRNA target sequence
aaattggtcattatacaaatgcat

SEQ ID NO: 113616 - DNA, 24 bp, Artificial sequence
  SiRNA target sequence
aattggtcattatacaaatgcatc

SEQ ID NO: 113617 - DNA, 24 bp, Artificial sequence
  SiRNA target sequence
attggtcattatacaaatgcatcg

SEQ ID NO: 113618 - DNA, 24 bp, Artificial sequence
  SiRNA target sequence
ttggtcattatacaaatgcatcga

SEQ ID NO: 113619 - DNA, 24 bp, Artificial sequence
  SiRNA target sequence
tggtcattatacaaatgcatcgat

SEQ ID NO: 113620 - DNA, 24 bp, Artificial sequence
  SiRNA target sequence
ggtcattatacaaatgcatcgatc

SEQ ID NO: 113621 - DNA, 24 bp, Artificial sequence
  SiRNA target sequence
gtcattatacaaatgcatcgatcc

SEQ ID NO: 113622 - DNA, 24 bp, Artificial sequence
  SiRNA target sequence
tcattatacaaatgcatcgatcct

SEQ ID NO: 113623 - DNA, 24 bp, Artificial sequence
  SiRNA target sequence
cattatacaaatgcatcgatcctc

SEQ ID NO: 113624 - DNA, 24 bp, Artificial sequence
  SiRNA target sequence
attatacaaatgcatcgatcctcc

SEQ ID NO: 113625 - DNA, 24 bp, Artificial sequence
  SiRNA target sequence
ttatacaaatgcatcgatcctcct

SEQ ID NO: 113626 - DNA, 24 bp, Artificial sequence
  SiRNA target sequence
tatacaaatgcatcgatcctcctt

SEQ ID NO: 113627 - DNA, 24 bp, Artificial sequence
  SiRNA target sequence
atacaaatgcatcgatcctccttt

SEQ ID NO: 113628 - DNA, 24 bp, Artificial sequence
  SiRNA target sequence
tacaaatgcatcgatcctcctttt

SEQ ID NO: 113629 - DNA, 24 bp, Artificial sequence
  SiRNA target sequence
acaaatgcatcgatcctccttttc

SEQ ID NO: 113630 - DNA, 24 bp, Artificial sequence
  SiRNA target sequence
caaatgcatcgatcctccttttcc

SEQ ID NO: 113631 - DNA, 24 bp, Artificial sequence
  SiRNA target sequence
aaatgcatcgatcctccttttcct

SEQ ID NO: 113632 - DNA, 24 bp, Artificial sequence
  SiRNA target sequence
aatgcatcgatcctccttttcctt

SEQ ID NO: 113633 - DNA, 24 bp, Artificial sequence
  SiRNA target sequence
atgcatcgatcctccttttccttt

SEQ ID NO: 113634 - DNA, 24 bp, Artificial sequence
  SiRNA target sequence
tgcatcgatcctccttttcctttg

SEQ ID NO: 113635 - DNA, 24 bp, Artificial sequence
  SiRNA target sequence
gcatcgatcctccttttcctttgc

SEQ ID NO: 113636 - DNA, 24 bp, Artificial sequence
  SiRNA target sequence
catcgatcctccttttcctttgca

SEQ ID NO: 113637 - DNA, 24 bp, Artificial sequence
  SiRNA target sequence
atcgatcctccttttcctttgcaa

SEQ ID NO: 113638 - DNA, 24 bp, Artificial sequence
  SiRNA target sequence
tcgatcctccttttcctttgcaat

SEQ ID NO: 113639 - DNA, 24 bp, Artificial sequence
  SiRNA target sequence
cgatcctccttttcctttgcaatt

SEQ ID NO: 113640 - DNA, 24 bp, Artificial sequence
  SiRNA target sequence
gatcctccttttcctttgcaatta

SEQ ID NO: 113641 - DNA, 24 bp, Artificial sequence
  SiRNA target sequence
atcctccttttcctttgcaattac

SEQ ID NO: 113642 - DNA, 24 bp, Artificial sequence
  SiRNA target sequence
tcctccttttcctttgcaattacc

SEQ ID NO: 113643 - DNA, 24 bp, Artificial sequence
  SiRNA target sequence
cctccttttcctttgcaattacca

SEQ ID NO: 113644 - DNA, 24 bp, Artificial sequence
  SiRNA target sequence
ctccttttcctttgcaattaccaa

SEQ ID NO: 113645 - DNA, 24 bp, Artificial sequence
  SiRNA target sequence
tccttttcctttgcaattaccaat

SEQ ID NO: 113646 - DNA, 24 bp, Artificial sequence
  SiRNA target sequence
ccttttcctttgcaattaccaata

SEQ ID NO: 113647 - DNA, 24 bp, Artificial sequence
  SiRNA target sequence
cttttcctttgcaattaccaatag

SEQ ID NO: 113648 - DNA, 24 bp, Artificial sequence
  SiRNA target sequence
ttttcctttgcaattaccaatagc

SEQ ID NO: 113649 - DNA, 24 bp, Artificial sequence
  SiRNA target sequence
tttcctttgcaattaccaatagcc

SEQ ID NO: 113650 - DNA, 24 bp, Artificial sequence
  SiRNA target sequence
ttcctttgcaattaccaatagcct

SEQ ID NO: 113651 - DNA, 24 bp, Artificial sequence
  SiRNA target sequence
tcctttgcaattaccaatagcctt

SEQ ID NO: 113652 - DNA, 24 bp, Artificial sequence
  SiRNA target sequence
cctttgcaattaccaatagccttt

SEQ ID NO: 113653 - DNA, 24 bp, Artificial sequence
  SiRNA target sequence
ctttgcaattaccaatagcctttc

SEQ ID NO: 113654 - DNA, 24 bp, Artificial sequence
  SiRNA target sequence
tttgcaattaccaatagcctttcc

SEQ ID NO: 113655 - DNA, 24 bp, Artificial sequence
  SiRNA target sequence
ttgcaattaccaatagcctttcct

SEQ ID NO: 113656 - DNA, 24 bp, Artificial sequence
  SiRNA target sequence
tgcaattaccaatagcctttccta

SEQ ID NO: 113657 - DNA, 24 bp, Artificial sequence
  SiRNA target sequence
gcaattaccaatagcctttcctaa

SEQ ID NO: 113658 - DNA, 24 bp, Artificial sequence
  SiRNA target sequence
caattaccaatagcctttcctaat

SEQ ID NO: 113659 - DNA, 24 bp, Artificial sequence
  SiRNA target sequence
aattaccaatagcctttcctaata

SEQ ID NO: 113660 - DNA, 24 bp, Artificial sequence
  SiRNA target sequence
attaccaatagcctttcctaataa

SEQ ID NO: 113661 - DNA, 24 bp, Artificial sequence
  SiRNA target sequence
ttaccaatagcctttcctaataat

SEQ ID NO: 113662 - DNA, 24 bp, Artificial sequence
  SiRNA target sequence
taccaatagcctttcctaataatt

SEQ ID NO: 113663 - DNA, 24 bp, Artificial sequence
  SiRNA target sequence
accaatagcctttcctaataattc

SEQ ID NO: 113664 - DNA, 24 bp, Artificial sequence
  SiRNA target sequence
ccaatagcctttcctaataattcc

SEQ ID NO: 113665 - DNA, 24 bp, Artificial sequence
  SiRNA target sequence
caatagcctttcctaataattccc

SEQ ID NO: 113666 - DNA, 24 bp, Artificial sequence
  SiRNA target sequence
aatagcctttcctaataattcccc

SEQ ID NO: 113667 - DNA, 24 bp, Artificial sequence
  SiRNA target sequence
atagcctttcctaataattcccct

SEQ ID NO: 113668 - DNA, 24 bp, Artificial sequence
  SiRNA target sequence
tagcctttcctaataattccccta

SEQ ID NO: 113669 - DNA, 24 bp, Artificial sequence
  SiRNA target sequence
agcctttcctaataattcccctat

SEQ ID NO: 113670 - DNA, 24 bp, Artificial sequence
  SiRNA target sequence
gcctttcctaataattcccctata

SEQ ID NO: 113671 - DNA, 24 bp, Artificial sequence
  SiRNA target sequence
cctttcctaataattcccctataa

SEQ ID NO: 113672 - DNA, 24 bp, Artificial sequence
  SiRNA target sequence
ctttcctaataattcccctataat

SEQ ID NO: 113673 - DNA, 24 bp, Artificial sequence
  SiRNA target sequence
tttcctaataattcccctataata

SEQ ID NO: 113674 - DNA, 24 bp, Artificial sequence
  SiRNA target sequence
ttcctaataattcccctataatac

SEQ ID NO: 113675 - DNA, 24 bp, Artificial sequence
  SiRNA target sequence
tcctaataattcccctataatact

SEQ ID NO: 113676 - DNA, 24 bp, Artificial sequence
  SiRNA target sequence
cctaataattcccctataatactt

SEQ ID NO: 113677 - DNA, 24 bp, Artificial sequence
  SiRNA target sequence
ctaataattcccctataatacttt

SEQ ID NO: 113678 - DNA, 24 bp, Artificial sequence
  SiRNA target sequence
taataattcccctataatactttc

SEQ ID NO: 113679 - DNA, 24 bp, Artificial sequence
  SiRNA target sequence
aataattcccctataatactttct

SEQ ID NO: 113680 - DNA, 24 bp, Artificial sequence
  SiRNA target sequence
ataattcccctataatactttcta

SEQ ID NO: 113681 - DNA, 24 bp, Artificial sequence
  SiRNA target sequence
taattcccctataatactttctat

SEQ ID NO: 113682 - DNA, 24 bp, Artificial sequence
  SiRNA target sequence
aattcccctataatactttctata

SEQ ID NO: 113683 - DNA, 24 bp, Artificial sequence
  SiRNA target sequence
attcccctataatactttctatac

SEQ ID NO: 113684 - DNA, 24 bp, Artificial sequence
  SiRNA target sequence
ttcccctataatactttctatact

SEQ ID NO: 113685 - DNA, 24 bp, Artificial sequence
  SiRNA target sequence
tcccctataatactttctatactg

SEQ ID NO: 113686 - DNA, 24 bp, Artificial sequence
  SiRNA target sequence
cccctataatactttctatactga

SEQ ID NO: 113687 - DNA, 24 bp, Artificial sequence
  SiRNA target sequence
ccctataatactttctatactgat

SEQ ID NO: 113688 - DNA, 24 bp, Artificial sequence
  SiRNA target sequence
cctataatactttctatactgatt

SEQ ID NO: 113689 - DNA, 24 bp, Artificial sequence
  SiRNA target sequence
ctataatactttctatactgattc

SEQ ID NO: 113690 - DNA, 24 bp, Artificial sequence
  SiRNA target sequence
tataatactttctatactgattcc

SEQ ID NO: 113691 - DNA, 24 bp, Artificial sequence
  SiRNA target sequence
ataatactttctatactgattcca

SEQ ID NO: 113692 - DNA, 24 bp, Artificial sequence
  SiRNA target sequence
taatactttctatactgattccac

SEQ ID NO: 113693 - DNA, 24 bp, Artificial sequence
  SiRNA target sequence
aatactttctatactgattccaca

SEQ ID NO: 113694 - DNA, 24 bp, Artificial sequence
  SiRNA target sequence
atactttctatactgattccacaa

SEQ ID NO: 113695 - DNA, 24 bp, Artificial sequence
  SiRNA target sequence
tactttctatactgattccacaaa

SEQ ID NO: 113696 - DNA, 24 bp, Artificial sequence
  SiRNA target sequence
actttctatactgattccacaaat

SEQ ID NO: 113697 - DNA, 24 bp, Artificial sequence
  SiRNA target sequence
ctttctatactgattccacaaata

SEQ ID NO: 113698 - DNA, 24 bp, Artificial sequence
  SiRNA target sequence
tttctatactgattccacaaataa

SEQ ID NO: 113699 - DNA, 24 bp, Artificial sequence
  SiRNA target sequence
ttctatactgattccacaaataaa

SEQ ID NO: 113700 - DNA, 24 bp, Artificial sequence
  SiRNA target sequence
tctatactgattccacaaataaat

SEQ ID NO: 113701 - DNA, 24 bp, Artificial sequence
  SiRNA target sequence
ctatactgattccacaaataaatg

SEQ ID NO: 113702 - DNA, 24 bp, Artificial sequence
  SiRNA target sequence
tatactgattccacaaataaatgc

SEQ ID NO: 113703 - DNA, 24 bp, Artificial sequence
  SiRNA target sequence
atactgattccacaaataaatgct

SEQ ID NO: 113704 - DNA, 24 bp, Artificial sequence
  SiRNA target sequence
tactgattccacaaataaatgcta

SEQ ID NO: 113705 - DNA, 24 bp, Artificial sequence
  SiRNA target sequence
actgattccacaaataaatgctaa

SEQ ID NO: 113706 - DNA, 24 bp, Artificial sequence
  SiRNA target sequence
ctgattccacaaataaatgctaat

SEQ ID NO: 113707 - DNA, 24 bp, Artificial sequence
  SiRNA target sequence
tgattccacaaataaatgctaatc

SEQ ID NO: 113708 - DNA, 24 bp, Artificial sequence
  SiRNA target sequence
gattccacaaataaatgctaatcc

SEQ ID NO: 113709 - DNA, 24 bp, Artificial sequence
  SiRNA target sequence
attccacaaataaatgctaatcca

SEQ ID NO: 113710 - DNA, 24 bp, Artificial sequence
  SiRNA target sequence
ttccacaaataaatgctaatccat

SEQ ID NO: 113711 - DNA, 24 bp, Artificial sequence
  SiRNA target sequence
tccacaaataaatgctaatccatg

SEQ ID NO: 113712 - DNA, 24 bp, Artificial sequence
  SiRNA target sequence
ccacaaataaatgctaatccatgg

SEQ ID NO: 113713 - DNA, 24 bp, Artificial sequence
  SiRNA target sequence
cacaaataaatgctaatccatggc

SEQ ID NO: 113714 - DNA, 24 bp, Artificial sequence
  SiRNA target sequence
acaaataaatgctaatccatggca

SEQ ID NO: 113715 - DNA, 24 bp, Artificial sequence
  SiRNA target sequence
caaataaatgctaatccatggcat

SEQ ID NO: 113716 - DNA, 24 bp, Artificial sequence
  SiRNA target sequence
aaataaatgctaatccatggcatc

SEQ ID NO: 113717 - DNA, 24 bp, Artificial sequence
  SiRNA target sequence
aataaatgctaatccatggcatct

SEQ ID NO: 113718 - DNA, 24 bp, Artificial sequence
  SiRNA target sequence
ataaatgctaatccatggcatcta

SEQ ID NO: 113719 - DNA, 24 bp, Artificial sequence
  SiRNA target sequence
taaatgctaatccatggcatctat

SEQ ID NO: 113720 - DNA, 24 bp, Artificial sequence
  SiRNA target sequence
aaatgctaatccatggcatctata

SEQ ID NO: 113721 - DNA, 24 bp, Artificial sequence
  SiRNA target sequence
aatgctaatccatggcatctataa

SEQ ID NO: 113722 - DNA, 24 bp, Artificial sequence
  SiRNA target sequence
atgctaatccatggcatctataag

SEQ ID NO: 113723 - DNA, 24 bp, Artificial sequence
  SiRNA target sequence
tgctaatccatggcatctataaga

SEQ ID NO: 113724 - DNA, 24 bp, Artificial sequence
  SiRNA target sequence
gctaatccatggcatctataagat

SEQ ID NO: 113725 - DNA, 24 bp, Artificial sequence
  SiRNA target sequence
ctaatccatggcatctataagatc

SEQ ID NO: 113726 - DNA, 24 bp, Artificial sequence
  SiRNA target sequence
taatccatggcatctataagatcc

SEQ ID NO: 113727 - DNA, 24 bp, Artificial sequence
  SiRNA target sequence
aatccatggcatctataagatcct

SEQ ID NO: 113728 - DNA, 24 bp, Artificial sequence
  SiRNA target sequence
atccatggcatctataagatccta

SEQ ID NO: 113729 - DNA, 24 bp, Artificial sequence
  SiRNA target sequence
tccatggcatctataagatcctat

SEQ ID NO: 113730 - DNA, 24 bp, Artificial sequence
  SiRNA target sequence
ccatggcatctataagatcctatg

SEQ ID NO: 113731 - DNA, 24 bp, Artificial sequence
  SiRNA target sequence
catggcatctataagatcctatga

SEQ ID NO: 113732 - DNA, 24 bp, Artificial sequence
  SiRNA target sequence
atggcatctataagatcctatgac

SEQ ID NO: 113733 - DNA, 24 bp, Artificial sequence
  SiRNA target sequence
tggcatctataagatcctatgact

SEQ ID NO: 113734 - DNA, 24 bp, Artificial sequence
  SiRNA target sequence
ggcatctataagatcctatgactt

SEQ ID NO: 113735 - DNA, 24 bp, Artificial sequence
  SiRNA target sequence
gcatctataagatcctatgacttt

SEQ ID NO: 113736 - DNA, 24 bp, Artificial sequence
  SiRNA target sequence
catctataagatcctatgacttta

SEQ ID NO: 113737 - DNA, 24 bp, Artificial sequence
  SiRNA target sequence
atctataagatcctatgactttat

SEQ ID NO: 113738 - DNA, 24 bp, Artificial sequence
  SiRNA target sequence
tctataagatcctatgactttatc

SEQ ID NO: 113739 - DNA, 24 bp, Artificial sequence
  SiRNA target sequence
ctataagatcctatgactttatca

SEQ ID NO: 113740 - DNA, 24 bp, Artificial sequence
  SiRNA target sequence
tataagatcctatgactttatcat

SEQ ID NO: 113741 - DNA, 24 bp, Artificial sequence
  SiRNA target sequence
ataagatcctatgactttatcatt

SEQ ID NO: 113742 - DNA, 24 bp, Artificial sequence
  SiRNA target sequence
taagatcctatgactttatcattt

SEQ ID NO: 113743 - DNA, 24 bp, Artificial sequence
  SiRNA target sequence
aagatcctatgactttatcatttt

SEQ ID NO: 113744 - DNA, 24 bp, Artificial sequence
  SiRNA target sequence
agatcctatgactttatcattttt

SEQ ID NO: 113745 - DNA, 24 bp, Artificial sequence
  SiRNA target sequence
gatcctatgactttatcattttta

SEQ ID NO: 113746 - DNA, 24 bp, Artificial sequence
  SiRNA target sequence
atcctatgactttatcatttttat

SEQ ID NO: 113747 - DNA, 24 bp, Artificial sequence
  SiRNA target sequence
tcctatgactttatcatttttatc

SEQ ID NO: 113748 - DNA, 24 bp, Artificial sequence
  SiRNA target sequence
cctatgactttatcatttttatct

SEQ ID NO: 113749 - DNA, 24 bp, Artificial sequence
  SiRNA target sequence
ctatgactttatcatttttatcta

SEQ ID NO: 113750 - DNA, 24 bp, Artificial sequence
  SiRNA target sequence
tatgactttatcatttttatctag

SEQ ID NO: 113751 - DNA, 24 bp, Artificial sequence
  SiRNA target sequence
atgactttatcatttttatctagt

SEQ ID NO: 113752 - DNA, 24 bp, Artificial sequence
  SiRNA target sequence
tgactttatcatttttatctagta

SEQ ID NO: 113753 - DNA, 24 bp, Artificial sequence
  SiRNA target sequence
gactttatcatttttatctagtac

SEQ ID NO: 113754 - DNA, 24 bp, Artificial sequence
  SiRNA target sequence
actttatcatttttatctagtacc

SEQ ID NO: 113755 - DNA, 24 bp, Artificial sequence
  SiRNA target sequence
ctttatcatttttatctagtacct

SEQ ID NO: 113756 - DNA, 24 bp, Artificial sequence
  SiRNA target sequence
tttatcatttttatctagtacctt

SEQ ID NO: 113757 - DNA, 24 bp, Artificial sequence
  SiRNA target sequence
ttatcatttttatctagtaccttt

SEQ ID NO: 113758 - DNA, 24 bp, Artificial sequence
  SiRNA target sequence
tatcatttttatctagtacctttt

SEQ ID NO: 113759 - DNA, 24 bp, Artificial sequence
  SiRNA target sequence
atcatttttatctagtaccttttg

SEQ ID NO: 113760 - DNA, 24 bp, Artificial sequence
  SiRNA target sequence
tcatttttatctagtaccttttgt

SEQ ID NO: 113761 - DNA, 24 bp, Artificial sequence
  SiRNA target sequence
catttttatctagtaccttttgta

SEQ ID NO: 113762 - DNA, 24 bp, Artificial sequence
  SiRNA target sequence
atttttatctagtaccttttgtaa

SEQ ID NO: 113763 - DNA, 24 bp, Artificial sequence
  SiRNA target sequence
tttttatctagtaccttttgtaaa

SEQ ID NO: 113764 - DNA, 24 bp, Artificial sequence
  SiRNA target sequence
ttttatctagtaccttttgtaaac

SEQ ID NO: 113765 - DNA, 24 bp, Artificial sequence
  SiRNA target sequence
tttatctagtaccttttgtaaact

SEQ ID NO: 113766 - DNA, 24 bp, Artificial sequence
  SiRNA target sequence
ttatctagtaccttttgtaaactc

SEQ ID NO: 113767 - DNA, 24 bp, Artificial sequence
  SiRNA target sequence
tatctagtaccttttgtaaactca

SEQ ID NO: 113768 - DNA, 24 bp, Artificial sequence
  SiRNA target sequence
atctagtaccttttgtaaactcat

SEQ ID NO: 113769 - DNA, 24 bp, Artificial sequence
  SiRNA target sequence
tctagtaccttttgtaaactcata

SEQ ID NO: 113770 - DNA, 24 bp, Artificial sequence
  SiRNA target sequence
ctagtaccttttgtaaactcatat

SEQ ID NO: 113771 - DNA, 24 bp, Artificial sequence
  SiRNA target sequence
tagtaccttttgtaaactcatata

SEQ ID NO: 113772 - DNA, 24 bp, Artificial sequence
  SiRNA target sequence
agtaccttttgtaaactcatataa

SEQ ID NO: 113773 - DNA, 24 bp, Artificial sequence
  SiRNA target sequence
gtaccttttgtaaactcatataaa

SEQ ID NO: 113774 - DNA, 24 bp, Artificial sequence
  SiRNA target sequence
taccttttgtaaactcatataaat

SEQ ID NO: 113775 - DNA, 24 bp, Artificial sequence
  SiRNA target sequence
accttttgtaaactcatataaatg

SEQ ID NO: 113776 - DNA, 24 bp, Artificial sequence
  SiRNA target sequence
ccttttgtaaactcatataaatgt

SEQ ID NO: 113777 - DNA, 24 bp, Artificial sequence
  SiRNA target sequence
cttttgtaaactcatataaatgtt

SEQ ID NO: 113778 - DNA, 24 bp, Artificial sequence
  SiRNA target sequence
ttttgtaaactcatataaatgttt

SEQ ID NO: 113779 - DNA, 24 bp, Artificial sequence
  SiRNA target sequence
tttgtaaactcatataaatgtttt

SEQ ID NO: 113780 - DNA, 24 bp, Artificial sequence
  SiRNA target sequence
ttgtaaactcatataaatgttttc

SEQ ID NO: 113781 - DNA, 24 bp, Artificial sequence
  SiRNA target sequence
tgtaaactcatataaatgttttcc

SEQ ID NO: 113782 - DNA, 24 bp, Artificial sequence
  SiRNA target sequence
gtaaactcatataaatgttttcct

SEQ ID NO: 113783 - DNA, 24 bp, Artificial sequence
  SiRNA target sequence
taaactcatataaatgttttcctg

SEQ ID NO: 113784 - DNA, 24 bp, Artificial sequence
  SiRNA target sequence
aaactcatataaatgttttcctgt

SEQ ID NO: 113785 - DNA, 24 bp, Artificial sequence
  SiRNA target sequence
aactcatataaatgttttcctgtc

SEQ ID NO: 113786 - DNA, 24 bp, Artificial sequence
  SiRNA target sequence
actcatataaatgttttcctgtcc

SEQ ID NO: 113787 - DNA, 24 bp, Artificial sequence
  SiRNA target sequence
ctcatataaatgttttcctgtcct

SEQ ID NO: 113788 - DNA, 24 bp, Artificial sequence
  SiRNA target sequence
tcatataaatgttttcctgtccta

SEQ ID NO: 113789 - DNA, 24 bp, Artificial sequence
  SiRNA target sequence
catataaatgttttcctgtcctat

SEQ ID NO: 113790 - DNA, 24 bp, Artificial sequence
  SiRNA target sequence
atataaatgttttcctgtcctatt

SEQ ID NO: 113791 - DNA, 24 bp, Artificial sequence
  SiRNA target sequence
tataaatgttttcctgtcctatta

SEQ ID NO: 113792 - DNA, 24 bp, Artificial sequence
  SiRNA target sequence
ataaatgttttcctgtcctattac

SEQ ID NO: 113793 - DNA, 24 bp, Artificial sequence
  SiRNA target sequence
taaatgttttcctgtcctattact

SEQ ID NO: 113794 - DNA, 24 bp, Artificial sequence
  SiRNA target sequence
aaatgttttcctgtcctattacta

SEQ ID NO: 113795 - DNA, 24 bp, Artificial sequence
  SiRNA target sequence
aatgttttcctgtcctattactaa

SEQ ID NO: 113796 - DNA, 24 bp, Artificial sequence
  SiRNA target sequence
atgttttcctgtcctattactaaa

SEQ ID NO: 113797 - DNA, 24 bp, Artificial sequence
  SiRNA target sequence
tgttttcctgtcctattactaaat

SEQ ID NO: 113798 - DNA, 24 bp, Artificial sequence
  SiRNA target sequence
gttttcctgtcctattactaaatg

SEQ ID NO: 113799 - DNA, 24 bp, Artificial sequence
  SiRNA target sequence
ttttcctgtcctattactaaatga

SEQ ID NO: 113800 - DNA, 24 bp, Artificial sequence
  SiRNA target sequence
tttcctgtcctattactaaatgac

SEQ ID NO: 113801 - DNA, 24 bp, Artificial sequence
  SiRNA target sequence
ttcctgtcctattactaaatgaca

SEQ ID NO: 113802 - DNA, 24 bp, Artificial sequence
  SiRNA target sequence
tcctgtcctattactaaatgacag

SEQ ID NO: 113803 - DNA, 24 bp, Artificial sequence
  SiRNA target sequence
cctgtcctattactaaatgacaga

SEQ ID NO: 113804 - DNA, 24 bp, Artificial sequence
  SiRNA target sequence
ctgtcctattactaaatgacagaa

SEQ ID NO: 113805 - DNA, 24 bp, Artificial sequence
  SiRNA target sequence
tgtcctattactaaatgacagaag

SEQ ID NO: 113806 - DNA, 24 bp, Artificial sequence
  SiRNA target sequence
gtcctattactaaatgacagaagc

SEQ ID NO: 113807 - DNA, 24 bp, Artificial sequence
  SiRNA target sequence
tcctattactaaatgacagaagcc

SEQ ID NO: 113808 - DNA, 24 bp, Artificial sequence
  SiRNA target sequence
cctattactaaatgacagaagcct

SEQ ID NO: 113809 - DNA, 24 bp, Artificial sequence
  SiRNA target sequence
ctattactaaatgacagaagcctc

SEQ ID NO: 113810 - DNA, 24 bp, Artificial sequence
  SiRNA target sequence
tattactaaatgacagaagcctct

SEQ ID NO: 113811 - DNA, 24 bp, Artificial sequence
  SiRNA target sequence
attactaaatgacagaagcctctt

SEQ ID NO: 113812 - DNA, 24 bp, Artificial sequence
  SiRNA target sequence
ttactaaatgacagaagcctctta

SEQ ID NO: 113813 - DNA, 24 bp, Artificial sequence
  SiRNA target sequence
tactaaatgacagaagcctcttat

SEQ ID NO: 113814 - DNA, 24 bp, Artificial sequence
  SiRNA target sequence
actaaatgacagaagcctcttata

SEQ ID NO: 113815 - DNA, 24 bp, Artificial sequence
  SiRNA target sequence
ctaaatgacagaagcctcttatat

SEQ ID NO: 113816 - DNA, 24 bp, Artificial sequence
  SiRNA target sequence
taaatgacagaagcctcttatatt

SEQ ID NO: 113817 - DNA, 24 bp, Artificial sequence
  SiRNA target sequence
aaatgacagaagcctcttatattt

SEQ ID NO: 113818 - DNA, 24 bp, Artificial sequence
  SiRNA target sequence
aatgacagaagcctcttatatttc

SEQ ID NO: 113819 - DNA, 24 bp, Artificial sequence
  SiRNA target sequence
atgacagaagcctcttatatttcc

SEQ ID NO: 113820 - DNA, 24 bp, Artificial sequence
  SiRNA target sequence
tgacagaagcctcttatatttcct

SEQ ID NO: 113821 - DNA, 24 bp, Artificial sequence
  SiRNA target sequence
gacagaagcctcttatatttcctt

SEQ ID NO: 113822 - DNA, 24 bp, Artificial sequence
  SiRNA target sequence
acagaagcctcttatatttccttt

SEQ ID NO: 113823 - DNA, 24 bp, Artificial sequence
  SiRNA target sequence
cagaagcctcttatatttcctttt

SEQ ID NO: 113824 - DNA, 24 bp, Artificial sequence
  SiRNA target sequence
agaagcctcttatatttccttttt

SEQ ID NO: 113825 - DNA, 24 bp, Artificial sequence
  SiRNA target sequence
gaagcctcttatatttcctttttt

SEQ ID NO: 113826 - DNA, 24 bp, Artificial sequence
  SiRNA target sequence
aagcctcttatatttcctttttta

SEQ ID NO: 113827 - DNA, 24 bp, Artificial sequence
  SiRNA target sequence
agcctcttatatttccttttttat

SEQ ID NO: 113828 - DNA, 24 bp, Artificial sequence
  SiRNA target sequence
gcctcttatatttccttttttata

SEQ ID NO: 113829 - DNA, 24 bp, Artificial sequence
  SiRNA target sequence
cctcttatatttccttttttatac

SEQ ID NO: 113830 - DNA, 24 bp, Artificial sequence
  SiRNA target sequence
ctcttatatttccttttttatact

SEQ ID NO: 113831 - DNA, 24 bp, Artificial sequence
  SiRNA target sequence
tcttatatttccttttttatactt

SEQ ID NO: 113832 - DNA, 24 bp, Artificial sequence
  SiRNA target sequence
cttatatttccttttttatactta

SEQ ID NO: 113833 - DNA, 24 bp, Artificial sequence
  SiRNA target sequence
ttatatttccttttttatacttag

SEQ ID NO: 113834 - DNA, 24 bp, Artificial sequence
  SiRNA target sequence
tatatttccttttttatacttaga

SEQ ID NO: 113835 - DNA, 24 bp, Artificial sequence
  SiRNA target sequence
atatttccttttttatacttagag

SEQ ID NO: 113836 - DNA, 24 bp, Artificial sequence
  SiRNA target sequence
tatttccttttttatacttagagt

SEQ ID NO: 113837 - DNA, 24 bp, Artificial sequence
  SiRNA target sequence
atttccttttttatacttagagtt

SEQ ID NO: 113838 - DNA, 24 bp, Artificial sequence
  SiRNA target sequence
tttccttttttatacttagagtta

SEQ ID NO: 113839 - DNA, 24 bp, Artificial sequence
  SiRNA target sequence
ttccttttttatacttagagttag

SEQ ID NO: 113840 - DNA, 24 bp, Artificial sequence
  SiRNA target sequence
tccttttttatacttagagttagc

SEQ ID NO: 113841 - DNA, 24 bp, Artificial sequence
  SiRNA target sequence
ccttttttatacttagagttagca

SEQ ID NO: 113842 - DNA, 24 bp, Artificial sequence
  SiRNA target sequence
cttttttatacttagagttagcat

SEQ ID NO: 113843 - DNA, 24 bp, Artificial sequence
  SiRNA target sequence
ttttttatacttagagttagcata

SEQ ID NO: 113844 - DNA, 24 bp, Artificial sequence
  SiRNA target sequence
tttttatacttagagttagcatat

SEQ ID NO: 113845 - DNA, 24 bp, Artificial sequence
  SiRNA target sequence
ttttatacttagagttagcatatt

SEQ ID NO: 113846 - DNA, 24 bp, Artificial sequence
  SiRNA target sequence
tttatacttagagttagcatattc

SEQ ID NO: 113847 - DNA, 24 bp, Artificial sequence
  SiRNA target sequence
ttatacttagagttagcatattct

SEQ ID NO: 113848 - DNA, 24 bp, Artificial sequence
  SiRNA target sequence
tatacttagagttagcatattctt

SEQ ID NO: 113849 - DNA, 24 bp, Artificial sequence
  SiRNA target sequence
atacttagagttagcatattcttc

SEQ ID NO: 113850 - DNA, 24 bp, Artificial sequence
  SiRNA target sequence
tacttagagttagcatattcttcg

SEQ ID NO: 113851 - DNA, 24 bp, Artificial sequence
  SiRNA target sequence
acttagagttagcatattcttcga

SEQ ID NO: 113852 - DNA, 24 bp, Artificial sequence
  SiRNA target sequence
cttagagttagcatattcttcgat

SEQ ID NO: 113853 - DNA, 24 bp, Artificial sequence
  SiRNA target sequence
ttagagttagcatattcttcgata

SEQ ID NO: 113854 - DNA, 24 bp, Artificial sequence
  SiRNA target sequence
tagagttagcatattcttcgataa

SEQ ID NO: 113855 - DNA, 24 bp, Artificial sequence
  SiRNA target sequence
agagttagcatattcttcgataag

SEQ ID NO: 113856 - DNA, 24 bp, Artificial sequence
  SiRNA target sequence
gagttagcatattcttcgataaga

SEQ ID NO: 113857 - DNA, 24 bp, Artificial sequence
  SiRNA target sequence
agttagcatattcttcgataagac

SEQ ID NO: 113858 - DNA, 24 bp, Artificial sequence
  SiRNA target sequence
gttagcatattcttcgataagacg

SEQ ID NO: 113859 - DNA, 24 bp, Artificial sequence
  SiRNA target sequence
ttagcatattcttcgataagacgt

SEQ ID NO: 113860 - DNA, 24 bp, Artificial sequence
  SiRNA target sequence
tagcatattcttcgataagacgta

SEQ ID NO: 113861 - DNA, 24 bp, Artificial sequence
  SiRNA target sequence
agcatattcttcgataagacgtag

SEQ ID NO: 113862 - DNA, 24 bp, Artificial sequence
  SiRNA target sequence
gcatattcttcgataagacgtaga

SEQ ID NO: 113863 - DNA, 24 bp, Artificial sequence
  SiRNA target sequence
catattcttcgataagacgtagaa

SEQ ID NO: 113864 - DNA, 24 bp, Artificial sequence
  SiRNA target sequence
atattcttcgataagacgtagaat

SEQ ID NO: 113865 - DNA, 24 bp, Artificial sequence
  SiRNA target sequence
tattcttcgataagacgtagaatt

SEQ ID NO: 113866 - DNA, 24 bp, Artificial sequence
  SiRNA target sequence
attcttcgataagacgtagaatta

SEQ ID NO: 113867 - DNA, 24 bp, Artificial sequence
  SiRNA target sequence
ttcttcgataagacgtagaattaa

SEQ ID NO: 113868 - DNA, 24 bp, Artificial sequence
  SiRNA target sequence
tcttcgataagacgtagaattaac

SEQ ID NO: 113869 - DNA, 24 bp, Artificial sequence
  SiRNA target sequence
cttcgataagacgtagaattaaca

SEQ ID NO: 113870 - DNA, 24 bp, Artificial sequence
  SiRNA target sequence
ttcgataagacgtagaattaacat

SEQ ID NO: 113871 - DNA, 24 bp, Artificial sequence
  SiRNA target sequence
tcgataagacgtagaattaacata

SEQ ID NO: 113872 - DNA, 24 bp, Artificial sequence
  SiRNA target sequence
cgataagacgtagaattaacatat

SEQ ID NO: 113873 - DNA, 24 bp, Artificial sequence
  SiRNA target sequence
gataagacgtagaattaacatatt

SEQ ID NO: 113874 - DNA, 24 bp, Artificial sequence
  SiRNA target sequence
ataagacgtagaattaacatattt

SEQ ID NO: 113875 - DNA, 24 bp, Artificial sequence
  SiRNA target sequence
taagacgtagaattaacatatttc

SEQ ID NO: 113876 - DNA, 24 bp, Artificial sequence
  SiRNA target sequence
aagacgtagaattaacatatttct

SEQ ID NO: 113877 - DNA, 24 bp, Artificial sequence
  SiRNA target sequence
agacgtagaattaacatatttcta

SEQ ID NO: 113878 - DNA, 24 bp, Artificial sequence
  SiRNA target sequence
gacgtagaattaacatatttctat

SEQ ID NO: 113879 - DNA, 24 bp, Artificial sequence
  SiRNA target sequence
acgtagaattaacatatttctata

SEQ ID NO: 113880 - DNA, 24 bp, Artificial sequence
  SiRNA target sequence
cgtagaattaacatatttctataa

SEQ ID NO: 113881 - DNA, 24 bp, Artificial sequence
  SiRNA target sequence
gtagaattaacatatttctataaa

SEQ ID NO: 113882 - DNA, 24 bp, Artificial sequence
  SiRNA target sequence
tagaattaacatatttctataaac

SEQ ID NO: 113883 - DNA, 24 bp, Artificial sequence
  SiRNA target sequence
agaattaacatatttctataaaca

SEQ ID NO: 113884 - DNA, 24 bp, Artificial sequence
  SiRNA target sequence
gaattaacatatttctataaacat

SEQ ID NO: 113885 - DNA, 24 bp, Artificial sequence
  SiRNA target sequence
aattaacatatttctataaacatc

SEQ ID NO: 113886 - DNA, 24 bp, Artificial sequence
  SiRNA target sequence
attaacatatttctataaacatct

SEQ ID NO: 113887 - DNA, 24 bp, Artificial sequence
  SiRNA target sequence
ttaacatatttctataaacatctt

SEQ ID NO: 113888 - DNA, 24 bp, Artificial sequence
  SiRNA target sequence
taacatatttctataaacatcttg

SEQ ID NO: 113889 - DNA, 24 bp, Artificial sequence
  SiRNA target sequence
aacatatttctataaacatcttgt

SEQ ID NO: 113890 - DNA, 24 bp, Artificial sequence
  SiRNA target sequence
acatatttctataaacatcttgta

SEQ ID NO: 113891 - DNA, 24 bp, Artificial sequence
  SiRNA target sequence
catatttctataaacatcttgtac

SEQ ID NO: 113892 - DNA, 24 bp, Artificial sequence
  SiRNA target sequence
atatttctataaacatcttgtaca

SEQ ID NO: 113893 - DNA, 24 bp, Artificial sequence
  SiRNA target sequence
tatttctataaacatcttgtacaa

SEQ ID NO: 113894 - DNA, 24 bp, Artificial sequence
  SiRNA target sequence
atttctataaacatcttgtacaag

SEQ ID NO: 113895 - DNA, 24 bp, Artificial sequence
  SiRNA target sequence
tttctataaacatcttgtacaagt

SEQ ID NO: 113896 - DNA, 24 bp, Artificial sequence
  SiRNA target sequence
ttctataaacatcttgtacaagtt

SEQ ID NO: 113897 - DNA, 24 bp, Artificial sequence
  SiRNA target sequence
tctataaacatcttgtacaagttc

SEQ ID NO: 113898 - DNA, 24 bp, Artificial sequence
  SiRNA target sequence
ctataaacatcttgtacaagttct

SEQ ID NO: 113899 - DNA, 24 bp, Artificial sequence
  SiRNA target sequence
tataaacatcttgtacaagttctt

SEQ ID NO: 113900 - DNA, 24 bp, Artificial sequence
  SiRNA target sequence
ataaacatcttgtacaagttcttt

SEQ ID NO: 113901 - DNA, 24 bp, Artificial sequence
  SiRNA target sequence
taaacatcttgtacaagttctttg

SEQ ID NO: 113902 - DNA, 24 bp, Artificial sequence
  SiRNA target sequence
aaacatcttgtacaagttctttgt

SEQ ID NO: 113903 - DNA, 24 bp, Artificial sequence
  SiRNA target sequence
aacatcttgtacaagttctttgtt

SEQ ID NO: 113904 - DNA, 24 bp, Artificial sequence
  SiRNA target sequence
acatcttgtacaagttctttgttt

SEQ ID NO: 113905 - DNA, 24 bp, Artificial sequence
  SiRNA target sequence
catcttgtacaagttctttgttta

SEQ ID NO: 113906 - DNA, 24 bp, Artificial sequence
  SiRNA target sequence
atcttgtacaagttctttgtttaa

SEQ ID NO: 113907 - DNA, 24 bp, Artificial sequence
  SiRNA target sequence
tcttgtacaagttctttgtttaaa

SEQ ID NO: 113908 - DNA, 24 bp, Artificial sequence
  SiRNA target sequence
cttgtacaagttctttgtttaaag

SEQ ID NO: 113909 - DNA, 24 bp, Artificial sequence
  SiRNA target sequence
ttgtacaagttctttgtttaaagt

SEQ ID NO: 113910 - DNA, 24 bp, Artificial sequence
  SiRNA target sequence
tgtacaagttctttgtttaaagta

SEQ ID NO: 113911 - DNA, 24 bp, Artificial sequence
  SiRNA target sequence
gtacaagttctttgtttaaagtag

SEQ ID NO: 113912 - DNA, 24 bp, Artificial sequence
  SiRNA target sequence
tacaagttctttgtttaaagtagt

SEQ ID NO: 113913 - DNA, 24 bp, Artificial sequence
  SiRNA target sequence
acaagttctttgtttaaagtagtt

SEQ ID NO: 113914 - DNA, 24 bp, Artificial sequence
  SiRNA target sequence
caagttctttgtttaaagtagttt

SEQ ID NO: 113915 - DNA, 24 bp, Artificial sequence
  SiRNA target sequence
aagttctttgtttaaagtagtttt

SEQ ID NO: 113916 - DNA, 24 bp, Artificial sequence
  SiRNA target sequence
agttctttgtttaaagtagttttc

SEQ ID NO: 113917 - DNA, 24 bp, Artificial sequence
  SiRNA target sequence
gttctttgtttaaagtagttttca

SEQ ID NO: 113918 - DNA, 24 bp, Artificial sequence
  SiRNA target sequence
ttctttgtttaaagtagttttcag

SEQ ID NO: 113919 - DNA, 24 bp, Artificial sequence
  SiRNA target sequence
tctttgtttaaagtagttttcagt

SEQ ID NO: 113920 - DNA, 24 bp, Artificial sequence
  SiRNA target sequence
ctttgtttaaagtagttttcagtt

SEQ ID NO: 113921 - DNA, 24 bp, Artificial sequence
  SiRNA target sequence
tttgtttaaagtagttttcagttt

SEQ ID NO: 113922 - DNA, 24 bp, Artificial sequence
  SiRNA target sequence
ttgtttaaagtagttttcagttta

SEQ ID NO: 113923 - DNA, 24 bp, Artificial sequence
  SiRNA target sequence
tgtttaaagtagttttcagtttaa

SEQ ID NO: 113924 - DNA, 24 bp, Artificial sequence
  SiRNA target sequence
gtttaaagtagttttcagtttaac

SEQ ID NO: 113925 - DNA, 24 bp, Artificial sequence
  SiRNA target sequence
tttaaagtagttttcagtttaact

SEQ ID NO: 113926 - DNA, 24 bp, Artificial sequence
  SiRNA target sequence
ttaaagtagttttcagtttaactg

SEQ ID NO: 113927 - DNA, 24 bp, Artificial sequence
  SiRNA target sequence
taaagtagttttcagtttaactgt

SEQ ID NO: 113928 - DNA, 24 bp, Artificial sequence
  SiRNA target sequence
aaagtagttttcagtttaactgta

SEQ ID NO: 113929 - DNA, 24 bp, Artificial sequence
  SiRNA target sequence
aagtagttttcagtttaactgtat

SEQ ID NO: 113930 - DNA, 24 bp, Artificial sequence
  SiRNA target sequence
agtagttttcagtttaactgtatt

SEQ ID NO: 113931 - DNA, 24 bp, Artificial sequence
  SiRNA target sequence
gtagttttcagtttaactgtattt

SEQ ID NO: 113932 - DNA, 24 bp, Artificial sequence
  SiRNA target sequence
tagttttcagtttaactgtatttt

SEQ ID NO: 113933 - DNA, 24 bp, Artificial sequence
  SiRNA target sequence
agttttcagtttaactgtattttt

SEQ ID NO: 113934 - DNA, 24 bp, Artificial sequence
  SiRNA target sequence
gttttcagtttaactgtattttta

SEQ ID NO: 113935 - DNA, 24 bp, Artificial sequence
  SiRNA target sequence
ttttcagtttaactgtatttttat

SEQ ID NO: 113936 - DNA, 24 bp, Artificial sequence
  SiRNA target sequence
tttcagtttaactgtatttttatc

SEQ ID NO: 113937 - DNA, 24 bp, Artificial sequence
  SiRNA target sequence
ttcagtttaactgtatttttatct

SEQ ID NO: 113938 - DNA, 24 bp, Artificial sequence
  SiRNA target sequence
tcagtttaactgtatttttatcta

SEQ ID NO: 113939 - DNA, 24 bp, Artificial sequence
  SiRNA target sequence
cagtttaactgtatttttatctac

SEQ ID NO: 113940 - DNA, 24 bp, Artificial sequence
  SiRNA target sequence
agtttaactgtatttttatctacc

SEQ ID NO: 113941 - DNA, 24 bp, Artificial sequence
  SiRNA target sequence
gtttaactgtatttttatctacca

SEQ ID NO: 113942 - DNA, 24 bp, Artificial sequence
  SiRNA target sequence
tttaactgtatttttatctaccaa

SEQ ID NO: 113943 - DNA, 24 bp, Artificial sequence
  SiRNA target sequence
ttaactgtatttttatctaccaaa

SEQ ID NO: 113944 - DNA, 24 bp, Artificial sequence
  SiRNA target sequence
taactgtatttttatctaccaaat

SEQ ID NO: 113945 - DNA, 24 bp, Artificial sequence
  SiRNA target sequence
aactgtatttttatctaccaaata

SEQ ID NO: 113946 - DNA, 24 bp, Artificial sequence
  SiRNA target sequence
actgtatttttatctaccaaataa

SEQ ID NO: 113947 - DNA, 24 bp, Artificial sequence
  SiRNA target sequence
ctgtatttttatctaccaaataat

SEQ ID NO: 113948 - DNA, 24 bp, Artificial sequence
  SiRNA target sequence
tgtatttttatctaccaaataata

SEQ ID NO: 113949 - DNA, 24 bp, Artificial sequence
  SiRNA target sequence
gtatttttatctaccaaataataa

SEQ ID NO: 113950 - DNA, 24 bp, Artificial sequence
  SiRNA target sequence
tatttttatctaccaaataataat

SEQ ID NO: 113951 - DNA, 24 bp, Artificial sequence
  SiRNA target sequence
atttttatctaccaaataataatc

SEQ ID NO: 113952 - DNA, 24 bp, Artificial sequence
  SiRNA target sequence
tttttatctaccaaataataatct

SEQ ID NO: 113953 - DNA, 24 bp, Artificial sequence
  SiRNA target sequence
ttttatctaccaaataataatcta

SEQ ID NO: 113954 - DNA, 24 bp, Artificial sequence
  SiRNA target sequence
tttatctaccaaataataatctat

SEQ ID NO: 113955 - DNA, 24 bp, Artificial sequence
  SiRNA target sequence
ttatctaccaaataataatctatc

SEQ ID NO: 113956 - DNA, 24 bp, Artificial sequence
  SiRNA target sequence
tatctaccaaataataatctatca

SEQ ID NO: 113957 - DNA, 24 bp, Artificial sequence
  SiRNA target sequence
atctaccaaataataatctatcat

SEQ ID NO: 113958 - DNA, 25 bp, Artificial sequence
  SiRNA target sequence
ttattcagaataaacatcttttaaa

SEQ ID NO: 113959 - DNA, 25 bp, Artificial sequence
  SiRNA target sequence
tattcagaataaacatcttttaaaa

SEQ ID NO: 113960 - DNA, 25 bp, Artificial sequence
  SiRNA target sequence
attcagaataaacatcttttaaaag

SEQ ID NO: 113961 - DNA, 25 bp, Artificial sequence
  SiRNA target sequence
ttcagaataaacatcttttaaaagt

SEQ ID NO: 113962 - DNA, 25 bp, Artificial sequence
  SiRNA target sequence
tcagaataaacatcttttaaaagtt

SEQ ID NO: 113963 - DNA, 25 bp, Artificial sequence
  SiRNA target sequence
cagaataaacatcttttaaaagttc

SEQ ID NO: 113964 - DNA, 25 bp, Artificial sequence
  SiRNA target sequence
agaataaacatcttttaaaagttca

SEQ ID NO: 113965 - DNA, 25 bp, Artificial sequence
  SiRNA target sequence
gaataaacatcttttaaaagttcat

SEQ ID NO: 113966 - DNA, 25 bp, Artificial sequence
  SiRNA target sequence
aataaacatcttttaaaagttcatc

SEQ ID NO: 113967 - DNA, 25 bp, Artificial sequence
  SiRNA target sequence
ataaacatcttttaaaagttcatcg

SEQ ID NO: 113968 - DNA, 25 bp, Artificial sequence
  SiRNA target sequence
taaacatcttttaaaagttcatcga

SEQ ID NO: 113969 - DNA, 25 bp, Artificial sequence
  SiRNA target sequence
aaacatcttttaaaagttcatcgat

SEQ ID NO: 113970 - DNA, 25 bp, Artificial sequence
  SiRNA target sequence
aacatcttttaaaagttcatcgata

SEQ ID NO: 113971 - DNA, 25 bp, Artificial sequence
  SiRNA target sequence
acatcttttaaaagttcatcgatat

SEQ ID NO: 113972 - DNA, 25 bp, Artificial sequence
  SiRNA target sequence
catcttttaaaagttcatcgatatc

SEQ ID NO: 113973 - DNA, 25 bp, Artificial sequence
  SiRNA target sequence
atcttttaaaagttcatcgatatcg

SEQ ID NO: 113974 - DNA, 25 bp, Artificial sequence
  SiRNA target sequence
tcttttaaaagttcatcgatatcgg

SEQ ID NO: 113975 - DNA, 25 bp, Artificial sequence
  SiRNA target sequence
cttttaaaagttcatcgatatcggg

SEQ ID NO: 113976 - DNA, 25 bp, Artificial sequence
  SiRNA target sequence
ttttaaaagttcatcgatatcgggt

SEQ ID NO: 113977 - DNA, 25 bp, Artificial sequence
  SiRNA target sequence
tttaaaagttcatcgatatcgggtt

SEQ ID NO: 113978 - DNA, 25 bp, Artificial sequence
  SiRNA target sequence
ttaaaagttcatcgatatcgggttc

SEQ ID NO: 113979 - DNA, 25 bp, Artificial sequence
  SiRNA target sequence
taaaagttcatcgatatcgggttct

SEQ ID NO: 113980 - DNA, 25 bp, Artificial sequence
  SiRNA target sequence
aaaagttcatcgatatcgggttctt

SEQ ID NO: 113981 - DNA, 25 bp, Artificial sequence
  SiRNA target sequence
aaagttcatcgatatcgggttcttt

SEQ ID NO: 113982 - DNA, 25 bp, Artificial sequence
  SiRNA target sequence
aagttcatcgatatcgggttcttta

SEQ ID NO: 113983 - DNA, 25 bp, Artificial sequence
  SiRNA target sequence
agttcatcgatatcgggttctttag

SEQ ID NO: 113984 - DNA, 25 bp, Artificial sequence
  SiRNA target sequence
gttcatcgatatcgggttctttaga

SEQ ID NO: 113985 - DNA, 25 bp, Artificial sequence
  SiRNA target sequence
ttcatcgatatcgggttctttagaa

SEQ ID NO: 113986 - DNA, 25 bp, Artificial sequence
  SiRNA target sequence
tcatcgatatcgggttctttagaaa

SEQ ID NO: 113987 - DNA, 25 bp, Artificial sequence
  SiRNA target sequence
catcgatatcgggttctttagaaaa

SEQ ID NO: 113988 - DNA, 25 bp, Artificial sequence
  SiRNA target sequence
atcgatatcgggttctttagaaaaa

SEQ ID NO: 113989 - DNA, 25 bp, Artificial sequence
  SiRNA target sequence
tcgatatcgggttctttagaaaaaa

SEQ ID NO: 113990 - DNA, 25 bp, Artificial sequence
  SiRNA target sequence
cgatatcgggttctttagaaaaaat

SEQ ID NO: 113991 - DNA, 25 bp, Artificial sequence
  SiRNA target sequence
gatatcgggttctttagaaaaaata

SEQ ID NO: 113992 - DNA, 25 bp, Artificial sequence
  SiRNA target sequence
atatcgggttctttagaaaaaataa

SEQ ID NO: 113993 - DNA, 25 bp, Artificial sequence
  SiRNA target sequence
tatcgggttctttagaaaaaataac

SEQ ID NO: 113994 - DNA, 25 bp, Artificial sequence
  SiRNA target sequence
atcgggttctttagaaaaaataact

SEQ ID NO: 113995 - DNA, 25 bp, Artificial sequence
  SiRNA target sequence
tcgggttctttagaaaaaataactt

SEQ ID NO: 113996 - DNA, 25 bp, Artificial sequence
  SiRNA target sequence
cgggttctttagaaaaaataacttt

SEQ ID NO: 113997 - DNA, 25 bp, Artificial sequence
  SiRNA target sequence
gggttctttagaaaaaataactttt

SEQ ID NO: 113998 - DNA, 25 bp, Artificial sequence
  SiRNA target sequence
ggttctttagaaaaaataacttttt

SEQ ID NO: 113999 - DNA, 25 bp, Artificial sequence
  SiRNA target sequence
gttctttagaaaaaataactttttt

SEQ ID NO: 114000 - DNA, 25 bp, Artificial sequence
  SiRNA target sequence
ttctttagaaaaaataactttttta

SEQ ID NO: 114001 - DNA, 25 bp, Artificial sequence
  SiRNA target sequence
tctttagaaaaaataacttttttaa

SEQ ID NO: 114002 - DNA, 25 bp, Artificial sequence
  SiRNA target sequence
ctttagaaaaaataacttttttaac

SEQ ID NO: 114003 - DNA, 25 bp, Artificial sequence
  SiRNA target sequence
tttagaaaaaataacttttttaaca

SEQ ID NO: 114004 - DNA, 25 bp, Artificial sequence
  SiRNA target sequence
ttagaaaaaataacttttttaacac

SEQ ID NO: 114005 - DNA, 25 bp, Artificial sequence
  SiRNA target sequence
tagaaaaaataacttttttaacacc

SEQ ID NO: 114006 - DNA, 25 bp, Artificial sequence
  SiRNA target sequence
agaaaaaataacttttttaacacct

SEQ ID NO: 114007 - DNA, 25 bp, Artificial sequence
  SiRNA target sequence
gaaaaaataacttttttaacacctt

SEQ ID NO: 114008 - DNA, 25 bp, Artificial sequence
  SiRNA target sequence
aaaaaataacttttttaacaccttc

SEQ ID NO: 114009 - DNA, 25 bp, Artificial sequence
  SiRNA target sequence
aaaaataacttttttaacaccttct

SEQ ID NO: 114010 - DNA, 25 bp, Artificial sequence
  SiRNA target sequence
aaaataacttttttaacaccttctt

SEQ ID NO: 114011 - DNA, 25 bp, Artificial sequence
  SiRNA target sequence
aaataacttttttaacaccttcttc

SEQ ID NO: 114012 - DNA, 25 bp, Artificial sequence
  SiRNA target sequence
aataacttttttaacaccttcttca

SEQ ID NO: 114013 - DNA, 25 bp, Artificial sequence
  SiRNA target sequence
ataacttttttaacaccttcttcaa

SEQ ID NO: 114014 - DNA, 25 bp, Artificial sequence
  SiRNA target sequence
taacttttttaacaccttcttcaaa

SEQ ID NO: 114015 - DNA, 25 bp, Artificial sequence
  SiRNA target sequence
aacttttttaacaccttcttcaaag

SEQ ID NO: 114016 - DNA, 25 bp, Artificial sequence
  SiRNA target sequence
acttttttaacaccttcttcaaagc

SEQ ID NO: 114017 - DNA, 25 bp, Artificial sequence
  SiRNA target sequence
cttttttaacaccttcttcaaagca

SEQ ID NO: 114018 - DNA, 25 bp, Artificial sequence
  SiRNA target sequence
ttttttaacaccttcttcaaagcag

SEQ ID NO: 114019 - DNA, 25 bp, Artificial sequence
  SiRNA target sequence
tttttaacaccttcttcaaagcagg

SEQ ID NO: 114020 - DNA, 25 bp, Artificial sequence
  SiRNA target sequence
ttttaacaccttcttcaaagcagga

SEQ ID NO: 114021 - DNA, 25 bp, Artificial sequence
  SiRNA target sequence
tttaacaccttcttcaaagcaggaa

SEQ ID NO: 114022 - DNA, 25 bp, Artificial sequence
  SiRNA target sequence
ttaacaccttcttcaaagcaggaaa

SEQ ID NO: 114023 - DNA, 25 bp, Artificial sequence
  SiRNA target sequence
taacaccttcttcaaagcaggaaat

SEQ ID NO: 114024 - DNA, 25 bp, Artificial sequence
  SiRNA target sequence
aacaccttcttcaaagcaggaaatt

SEQ ID NO: 114025 - DNA, 25 bp, Artificial sequence
  SiRNA target sequence
acaccttcttcaaagcaggaaatta

SEQ ID NO: 114026 - DNA, 25 bp, Artificial sequence
  SiRNA target sequence
caccttcttcaaagcaggaaattac

SEQ ID NO: 114027 - DNA, 25 bp, Artificial sequence
  SiRNA target sequence
accttcttcaaagcaggaaattacc

SEQ ID NO: 114028 - DNA, 25 bp, Artificial sequence
  SiRNA target sequence
ccttcttcaaagcaggaaattacct

SEQ ID NO: 114029 - DNA, 25 bp, Artificial sequence
  SiRNA target sequence
cttcttcaaagcaggaaattacctc

SEQ ID NO: 114030 - DNA, 25 bp, Artificial sequence
  SiRNA target sequence
ttcttcaaagcaggaaattacctca

SEQ ID NO: 114031 - DNA, 25 bp, Artificial sequence
  SiRNA target sequence
tcttcaaagcaggaaattacctcat

SEQ ID NO: 114032 - DNA, 25 bp, Artificial sequence
  SiRNA target sequence
cttcaaagcaggaaattacctcatc

SEQ ID NO: 114033 - DNA, 25 bp, Artificial sequence
  SiRNA target sequence
ttcaaagcaggaaattacctcatct

SEQ ID NO: 114034 - DNA, 25 bp, Artificial sequence
  SiRNA target sequence
tcaaagcaggaaattacctcatctt

SEQ ID NO: 114035 - DNA, 25 bp, Artificial sequence
  SiRNA target sequence
caaagcaggaaattacctcatcttc

SEQ ID NO: 114036 - DNA, 25 bp, Artificial sequence
  SiRNA target sequence
aaagcaggaaattacctcatcttcg

SEQ ID NO: 114037 - DNA, 25 bp, Artificial sequence
  SiRNA target sequence
aagcaggaaattacctcatcttcga

SEQ ID NO: 114038 - DNA, 25 bp, Artificial sequence
  SiRNA target sequence
agcaggaaattacctcatcttcgat

SEQ ID NO: 114039 - DNA, 25 bp, Artificial sequence
  SiRNA target sequence
gcaggaaattacctcatcttcgata

SEQ ID NO: 114040 - DNA, 25 bp, Artificial sequence
  SiRNA target sequence
caggaaattacctcatcttcgataa

SEQ ID NO: 114041 - DNA, 25 bp, Artificial sequence
  SiRNA target sequence
aggaaattacctcatcttcgataat

SEQ ID NO: 114042 - DNA, 25 bp, Artificial sequence
  SiRNA target sequence
ggaaattacctcatcttcgataatt

SEQ ID NO: 114043 - DNA, 25 bp, Artificial sequence
  SiRNA target sequence
gaaattacctcatcttcgataattt

SEQ ID NO: 114044 - DNA, 25 bp, Artificial sequence
  SiRNA target sequence
aaattacctcatcttcgataatttt

SEQ ID NO: 114045 - DNA, 25 bp, Artificial sequence
  SiRNA target sequence
aattacctcatcttcgataattttt

SEQ ID NO: 114046 - DNA, 25 bp, Artificial sequence
  SiRNA target sequence
attacctcatcttcgataattttta

SEQ ID NO: 114047 - DNA, 25 bp, Artificial sequence
  SiRNA target sequence
ttacctcatcttcgataatttttac

SEQ ID NO: 114048 - DNA, 25 bp, Artificial sequence
  SiRNA target sequence
tacctcatcttcgataatttttact

SEQ ID NO: 114049 - DNA, 25 bp, Artificial sequence
  SiRNA target sequence
acctcatcttcgataatttttactt

SEQ ID NO: 114050 - DNA, 25 bp, Artificial sequence
  SiRNA target sequence
cctcatcttcgataatttttacttc

SEQ ID NO: 114051 - DNA, 25 bp, Artificial sequence
  SiRNA target sequence
ctcatcttcgataatttttacttct

SEQ ID NO: 114052 - DNA, 25 bp, Artificial sequence
  SiRNA target sequence
tcatcttcgataatttttacttctt

SEQ ID NO: 114053 - DNA, 25 bp, Artificial sequence
  SiRNA target sequence
catcttcgataatttttacttcttc

SEQ ID NO: 114054 - DNA, 25 bp, Artificial sequence
  SiRNA target sequence
atcttcgataatttttacttcttca

SEQ ID NO: 114055 - DNA, 25 bp, Artificial sequence
  SiRNA target sequence
tcttcgataatttttacttcttcac

SEQ ID NO: 114056 - DNA, 25 bp, Artificial sequence
  SiRNA target sequence
cttcgataatttttacttcttcaca

SEQ ID NO: 114057 - DNA, 25 bp, Artificial sequence
  SiRNA target sequence
ttcgataatttttacttcttcacaa

SEQ ID NO: 114058 - DNA, 25 bp, Artificial sequence
  SiRNA target sequence
tcgataatttttacttcttcacaag

SEQ ID NO: 114059 - DNA, 25 bp, Artificial sequence
  SiRNA target sequence
cgataatttttacttcttcacaagt

SEQ ID NO: 114060 - DNA, 25 bp, Artificial sequence
  SiRNA target sequence
gataatttttacttcttcacaagtc

SEQ ID NO: 114061 - DNA, 25 bp, Artificial sequence
  SiRNA target sequence
ataatttttacttcttcacaagtcg

SEQ ID NO: 114062 - DNA, 25 bp, Artificial sequence
  SiRNA target sequence
taatttttacttcttcacaagtcgc

SEQ ID NO: 114063 - DNA, 25 bp, Artificial sequence
  SiRNA target sequence
aatttttacttcttcacaagtcgca

SEQ ID NO: 114064 - DNA, 25 bp, Artificial sequence
  SiRNA target sequence
atttttacttcttcacaagtcgcaa

SEQ ID NO: 114065 - DNA, 25 bp, Artificial sequence
  SiRNA target sequence
tttttacttcttcacaagtcgcaaa

SEQ ID NO: 114066 - DNA, 25 bp, Artificial sequence
  SiRNA target sequence
ttttacttcttcacaagtcgcaaat

SEQ ID NO: 114067 - DNA, 25 bp, Artificial sequence
  SiRNA target sequence
tttacttcttcacaagtcgcaaatt

SEQ ID NO: 114068 - DNA, 25 bp, Artificial sequence
  SiRNA target sequence
ttacttcttcacaagtcgcaaattt

SEQ ID NO: 114069 - DNA, 25 bp, Artificial sequence
  SiRNA target sequence
tacttcttcacaagtcgcaaatttt

SEQ ID NO: 114070 - DNA, 25 bp, Artificial sequence
  SiRNA target sequence
acttcttcacaagtcgcaaattttt

SEQ ID NO: 114071 - DNA, 25 bp, Artificial sequence
  SiRNA target sequence
cttcttcacaagtcgcaaatttttg

SEQ ID NO: 114072 - DNA, 25 bp, Artificial sequence
  SiRNA target sequence
ttcttcacaagtcgcaaatttttgt

SEQ ID NO: 114073 - DNA, 25 bp, Artificial sequence
  SiRNA target sequence
tcttcacaagtcgcaaatttttgta

SEQ ID NO: 114074 - DNA, 25 bp, Artificial sequence
  SiRNA target sequence
cttcacaagtcgcaaatttttgtaa

SEQ ID NO: 114075 - DNA, 25 bp, Artificial sequence
  SiRNA target sequence
ttcacaagtcgcaaatttttgtaag

SEQ ID NO: 114076 - DNA, 25 bp, Artificial sequence
  SiRNA target sequence
tcacaagtcgcaaatttttgtaagt

SEQ ID NO: 114077 - DNA, 25 bp, Artificial sequence
  SiRNA target sequence
cacaagtcgcaaatttttgtaagtt

SEQ ID NO: 114078 - DNA, 25 bp, Artificial sequence
  SiRNA target sequence
acaagtcgcaaatttttgtaagtta

SEQ ID NO: 114079 - DNA, 25 bp, Artificial sequence
  SiRNA target sequence
caagtcgcaaatttttgtaagttat

SEQ ID NO: 114080 - DNA, 25 bp, Artificial sequence
  SiRNA target sequence
aagtcgcaaatttttgtaagttatt

SEQ ID NO: 114081 - DNA, 25 bp, Artificial sequence
  SiRNA target sequence
agtcgcaaatttttgtaagttattt

SEQ ID NO: 114082 - DNA, 25 bp, Artificial sequence
  SiRNA target sequence
gtcgcaaatttttgtaagttatttt

SEQ ID NO: 114083 - DNA, 25 bp, Artificial sequence
  SiRNA target sequence
tcgcaaatttttgtaagttattttt

SEQ ID NO: 114084 - DNA, 25 bp, Artificial sequence
  SiRNA target sequence
cgcaaatttttgtaagttatttttt

SEQ ID NO: 114085 - DNA, 25 bp, Artificial sequence
  SiRNA target sequence
gcaaatttttgtaagttattttttg

SEQ ID NO: 114086 - DNA, 25 bp, Artificial sequence
  SiRNA target sequence
caaatttttgtaagttattttttgc

SEQ ID NO: 114087 - DNA, 25 bp, Artificial sequence
  SiRNA target sequence
aaatttttgtaagttattttttgct

SEQ ID NO: 114088 - DNA, 25 bp, Artificial sequence
  SiRNA target sequence
aatttttgtaagttattttttgctt

SEQ ID NO: 114089 - DNA, 25 bp, Artificial sequence
  SiRNA target sequence
atttttgtaagttattttttgcttc

SEQ ID NO: 114090 - DNA, 25 bp, Artificial sequence
  SiRNA target sequence
tttttgtaagttattttttgcttct

SEQ ID NO: 114091 - DNA, 25 bp, Artificial sequence
  SiRNA target sequence
ttttgtaagttattttttgcttctt

SEQ ID NO: 114092 - DNA, 25 bp, Artificial sequence
  SiRNA target sequence
tttgtaagttattttttgcttcttt

SEQ ID NO: 114093 - DNA, 25 bp, Artificial sequence
  SiRNA target sequence
ttgtaagttattttttgcttcttta

SEQ ID NO: 114094 - DNA, 25 bp, Artificial sequence
  SiRNA target sequence
tgtaagttattttttgcttctttaa

SEQ ID NO: 114095 - DNA, 25 bp, Artificial sequence
  SiRNA target sequence
gtaagttattttttgcttctttaag

SEQ ID NO: 114096 - DNA, 25 bp, Artificial sequence
  SiRNA target sequence
taagttattttttgcttctttaagg

SEQ ID NO: 114097 - DNA, 25 bp, Artificial sequence
  SiRNA target sequence
aagttattttttgcttctttaaggc

SEQ ID NO: 114098 - DNA, 25 bp, Artificial sequence
  SiRNA target sequence
agttattttttgcttctttaaggca

SEQ ID NO: 114099 - DNA, 25 bp, Artificial sequence
  SiRNA target sequence
gttattttttgcttctttaaggcaa

SEQ ID NO: 114100 - DNA, 25 bp, Artificial sequence
  SiRNA target sequence
ttattttttgcttctttaaggcaat

SEQ ID NO: 114101 - DNA, 25 bp, Artificial sequence
  SiRNA target sequence
tattttttgcttctttaaggcaatc

SEQ ID NO: 114102 - DNA, 25 bp, Artificial sequence
  SiRNA target sequence
attttttgcttctttaaggcaatca

SEQ ID NO: 114103 - DNA, 25 bp, Artificial sequence
  SiRNA target sequence
ttttttgcttctttaaggcaatcat

SEQ ID NO: 114104 - DNA, 25 bp, Artificial sequence
  SiRNA target sequence
tttttgcttctttaaggcaatcatt

SEQ ID NO: 114105 - DNA, 25 bp, Artificial sequence
  SiRNA target sequence
ttttgcttctttaaggcaatcatta

SEQ ID NO: 114106 - DNA, 25 bp, Artificial sequence
  SiRNA target sequence
tttgcttctttaaggcaatcattat

SEQ ID NO: 114107 - DNA, 25 bp, Artificial sequence
  SiRNA target sequence
ttgcttctttaaggcaatcattatt

SEQ ID NO: 114108 - DNA, 25 bp, Artificial sequence
  SiRNA target sequence
tgcttctttaaggcaatcattattt

SEQ ID NO: 114109 - DNA, 25 bp, Artificial sequence
  SiRNA target sequence
gcttctttaaggcaatcattatttt

SEQ ID NO: 114110 - DNA, 25 bp, Artificial sequence
  SiRNA target sequence
cttctttaaggcaatcattattttt

SEQ ID NO: 114111 - DNA, 25 bp, Artificial sequence
  SiRNA target sequence
ttctttaaggcaatcattatttttt

SEQ ID NO: 114112 - DNA, 25 bp, Artificial sequence
  SiRNA target sequence
tctttaaggcaatcattattttttt

SEQ ID NO: 114113 - DNA, 25 bp, Artificial sequence
  SiRNA target sequence
ctttaaggcaatcattatttttttt

SEQ ID NO: 114114 - DNA, 25 bp, Artificial sequence
  SiRNA target sequence
tttaaggcaatcattattttttttt

SEQ ID NO: 114115 - DNA, 25 bp, Artificial sequence
  SiRNA target sequence
ttaaggcaatcattatttttttttt

SEQ ID NO: 114116 - DNA, 25 bp, Artificial sequence
  SiRNA target sequence
taaggcaatcattattttttttttc

SEQ ID NO: 114117 - DNA, 25 bp, Artificial sequence
  SiRNA target sequence
aaggcaatcattattttttttttca

SEQ ID NO: 114118 - DNA, 25 bp, Artificial sequence
  SiRNA target sequence
aggcaatcattattttttttttcat

SEQ ID NO: 114119 - DNA, 25 bp, Artificial sequence
  SiRNA target sequence
ggcaatcattattttttttttcatt

SEQ ID NO: 114120 - DNA, 25 bp, Artificial sequence
  SiRNA target sequence
gcaatcattattttttttttcatta

SEQ ID NO: 114121 - DNA, 25 bp, Artificial sequence
  SiRNA target sequence
caatcattattttttttttcattaa

SEQ ID NO: 114122 - DNA, 25 bp, Artificial sequence
  SiRNA target sequence
aatcattattttttttttcattaat

SEQ ID NO: 114123 - DNA, 25 bp, Artificial sequence
  SiRNA target sequence
atcattattttttttttcattaatt

SEQ ID NO: 114124 - DNA, 25 bp, Artificial sequence
  SiRNA target sequence
tcattattttttttttcattaattt

SEQ ID NO: 114125 - DNA, 25 bp, Artificial sequence
  SiRNA target sequence
cattattttttttttcattaatttc

SEQ ID NO: 114126 - DNA, 25 bp, Artificial sequence
  SiRNA target sequence
attattttttttttcattaatttcc

SEQ ID NO: 114127 - DNA, 25 bp, Artificial sequence
  SiRNA target sequence
ttattttttttttcattaatttcct

SEQ ID NO: 114128 - DNA, 25 bp, Artificial sequence
  SiRNA target sequence
tattttttttttcattaatttcctc

SEQ ID NO: 114129 - DNA, 25 bp, Artificial sequence
  SiRNA target sequence
attttttttttcattaatttcctcc

SEQ ID NO: 114130 - DNA, 25 bp, Artificial sequence
  SiRNA target sequence
ttttttttttcattaatttcctccg

SEQ ID NO: 114131 - DNA, 25 bp, Artificial sequence
  SiRNA target sequence
tttttttttcattaatttcctccgt

SEQ ID NO: 114132 - DNA, 25 bp, Artificial sequence
  SiRNA target sequence
ttttttttcattaatttcctccgtg

SEQ ID NO: 114133 - DNA, 25 bp, Artificial sequence
  SiRNA target sequence
tttttttcattaatttcctccgtgg

SEQ ID NO: 114134 - DNA, 25 bp, Artificial sequence
  SiRNA target sequence
ttttttcattaatttcctccgtgga

SEQ ID NO: 114135 - DNA, 25 bp, Artificial sequence
  SiRNA target sequence
tttttcattaatttcctccgtggat

SEQ ID NO: 114136 - DNA, 25 bp, Artificial sequence
  SiRNA target sequence
ttttcattaatttcctccgtggatc

SEQ ID NO: 114137 - DNA, 25 bp, Artificial sequence
  SiRNA target sequence
tttcattaatttcctccgtggatct

SEQ ID NO: 114138 - DNA, 25 bp, Artificial sequence
  SiRNA target sequence
ttcattaatttcctccgtggatctg

SEQ ID NO: 114139 - DNA, 25 bp, Artificial sequence
  SiRNA target sequence
tcattaatttcctccgtggatctgt

SEQ ID NO: 114140 - DNA, 25 bp, Artificial sequence
  SiRNA target sequence
cattaatttcctccgtggatctgta

SEQ ID NO: 114141 - DNA, 25 bp, Artificial sequence
  SiRNA target sequence
attaatttcctccgtggatctgtaa

SEQ ID NO: 114142 - DNA, 25 bp, Artificial sequence
  SiRNA target sequence
ttaatttcctccgtggatctgtaaa

SEQ ID NO: 114143 - DNA, 25 bp, Artificial sequence
  SiRNA target sequence
taatttcctccgtggatctgtaaaa

SEQ ID NO: 114144 - DNA, 25 bp, Artificial sequence
  SiRNA target sequence
aatttcctccgtggatctgtaaaaa

SEQ ID NO: 114145 - DNA, 25 bp, Artificial sequence
  SiRNA target sequence
atttcctccgtggatctgtaaaaat

SEQ ID NO: 114146 - DNA, 25 bp, Artificial sequence
  SiRNA target sequence
tttcctccgtggatctgtaaaaatc

SEQ ID NO: 114147 - DNA, 25 bp, Artificial sequence
  SiRNA target sequence
ttcctccgtggatctgtaaaaatcg

SEQ ID NO: 114148 - DNA, 25 bp, Artificial sequence
  SiRNA target sequence
tcctccgtggatctgtaaaaatcgt

SEQ ID NO: 114149 - DNA, 25 bp, Artificial sequence
  SiRNA target sequence
cctccgtggatctgtaaaaatcgtt

SEQ ID NO: 114150 - DNA, 25 bp, Artificial sequence
  SiRNA target sequence
ctccgtggatctgtaaaaatcgtta

SEQ ID NO: 114151 - DNA, 25 bp, Artificial sequence
  SiRNA target sequence
tccgtggatctgtaaaaatcgttaa

SEQ ID NO: 114152 - DNA, 25 bp, Artificial sequence
  SiRNA target sequence
ccgtggatctgtaaaaatcgttaac

SEQ ID NO: 114153 - DNA, 25 bp, Artificial sequence
  SiRNA target sequence
cgtggatctgtaaaaatcgttaaca

SEQ ID NO: 114154 - DNA, 25 bp, Artificial sequence
  SiRNA target sequence
gtggatctgtaaaaatcgttaacat

SEQ ID NO: 114155 - DNA, 25 bp, Artificial sequence
  SiRNA target sequence
tggatctgtaaaaatcgttaacatc

SEQ ID NO: 114156 - DNA, 25 bp, Artificial sequence
  SiRNA target sequence
ggatctgtaaaaatcgttaacatct

SEQ ID NO: 114157 - DNA, 25 bp, Artificial sequence
  SiRNA target sequence
gatctgtaaaaatcgttaacatcta

SEQ ID NO: 114158 - DNA, 25 bp, Artificial sequence
  SiRNA target sequence
atctgtaaaaatcgttaacatctaa

SEQ ID NO: 114159 - DNA, 25 bp, Artificial sequence
  SiRNA target sequence
tctgtaaaaatcgttaacatctaaa

SEQ ID NO: 114160 - DNA, 25 bp, Artificial sequence
  SiRNA target sequence
ctgtaaaaatcgttaacatctaaac

SEQ ID NO: 114161 - DNA, 25 bp, Artificial sequence
  SiRNA target sequence
tgtaaaaatcgttaacatctaaaca

SEQ ID NO: 114162 - DNA, 25 bp, Artificial sequence
  SiRNA target sequence
gtaaaaatcgttaacatctaaacag

SEQ ID NO: 114163 - DNA, 25 bp, Artificial sequence
  SiRNA target sequence
taaaaatcgttaacatctaaacagg

SEQ ID NO: 114164 - DNA, 25 bp, Artificial sequence
  SiRNA target sequence
aaaaatcgttaacatctaaacagga

SEQ ID NO: 114165 - DNA, 25 bp, Artificial sequence
  SiRNA target sequence
aaaatcgttaacatctaaacaggag

SEQ ID NO: 114166 - DNA, 25 bp, Artificial sequence
  SiRNA target sequence
aaatcgttaacatctaaacaggagt

SEQ ID NO: 114167 - DNA, 25 bp, Artificial sequence
  SiRNA target sequence
aatcgttaacatctaaacaggagtg

SEQ ID NO: 114168 - DNA, 25 bp, Artificial sequence
  SiRNA target sequence
atcgttaacatctaaacaggagtgc

SEQ ID NO: 114169 - DNA, 25 bp, Artificial sequence
  SiRNA target sequence
tcgttaacatctaaacaggagtgcc

SEQ ID NO: 114170 - DNA, 25 bp, Artificial sequence
  SiRNA target sequence
cgttaacatctaaacaggagtgccc

SEQ ID NO: 114171 - DNA, 25 bp, Artificial sequence
  SiRNA target sequence
gttaacatctaaacaggagtgccca

SEQ ID NO: 114172 - DNA, 25 bp, Artificial sequence
  SiRNA target sequence
ttaacatctaaacaggagtgcccac

SEQ ID NO: 114173 - DNA, 25 bp, Artificial sequence
  SiRNA target sequence
taacatctaaacaggagtgcccaca

SEQ ID NO: 114174 - DNA, 25 bp, Artificial sequence
  SiRNA target sequence
aacatctaaacaggagtgcccacat

SEQ ID NO: 114175 - DNA, 25 bp, Artificial sequence
  SiRNA target sequence
acatctaaacaggagtgcccacatg

SEQ ID NO: 114176 - DNA, 25 bp, Artificial sequence
  SiRNA target sequence
catctaaacaggagtgcccacatgt

SEQ ID NO: 114177 - DNA, 25 bp, Artificial sequence
  SiRNA target sequence
atctaaacaggagtgcccacatgtc

SEQ ID NO: 114178 - DNA, 25 bp, Artificial sequence
  SiRNA target sequence
tctaaacaggagtgcccacatgtcc

SEQ ID NO: 114179 - DNA, 25 bp, Artificial sequence
  SiRNA target sequence
ctaaacaggagtgcccacatgtcct

SEQ ID NO: 114180 - DNA, 25 bp, Artificial sequence
  SiRNA target sequence
taaacaggagtgcccacatgtcctg

SEQ ID NO: 114181 - DNA, 25 bp, Artificial sequence
  SiRNA target sequence
aaacaggagtgcccacatgtcctgt

SEQ ID NO: 114182 - DNA, 25 bp, Artificial sequence
  SiRNA target sequence
aacaggagtgcccacatgtcctgta

SEQ ID NO: 114183 - DNA, 25 bp, Artificial sequence
  SiRNA target sequence
acaggagtgcccacatgtcctgtac

SEQ ID NO: 114184 - DNA, 25 bp, Artificial sequence
  SiRNA target sequence
caggagtgcccacatgtcctgtacg

SEQ ID NO: 114185 - DNA, 25 bp, Artificial sequence
  SiRNA target sequence
aggagtgcccacatgtcctgtacgt

SEQ ID NO: 114186 - DNA, 25 bp, Artificial sequence
  SiRNA target sequence
ggagtgcccacatgtcctgtacgta

SEQ ID NO: 114187 - DNA, 25 bp, Artificial sequence
  SiRNA target sequence
gagtgcccacatgtcctgtacgtat

SEQ ID NO: 114188 - DNA, 25 bp, Artificial sequence
  SiRNA target sequence
agtgcccacatgtcctgtacgtatc

SEQ ID NO: 114189 - DNA, 25 bp, Artificial sequence
  SiRNA target sequence
gtgcccacatgtcctgtacgtatca

SEQ ID NO: 114190 - DNA, 25 bp, Artificial sequence
  SiRNA target sequence
tgcccacatgtcctgtacgtatcaa

SEQ ID NO: 114191 - DNA, 25 bp, Artificial sequence
  SiRNA target sequence
gcccacatgtcctgtacgtatcaat

SEQ ID NO: 114192 - DNA, 25 bp, Artificial sequence
  SiRNA target sequence
cccacatgtcctgtacgtatcaatt

SEQ ID NO: 114193 - DNA, 25 bp, Artificial sequence
  SiRNA target sequence
ccacatgtcctgtacgtatcaattt

SEQ ID NO: 114194 - DNA, 25 bp, Artificial sequence
  SiRNA target sequence
cacatgtcctgtacgtatcaatttg

SEQ ID NO: 114195 - DNA, 25 bp, Artificial sequence
  SiRNA target sequence
acatgtcctgtacgtatcaatttgc

SEQ ID NO: 114196 - DNA, 25 bp, Artificial sequence
  SiRNA target sequence
catgtcctgtacgtatcaatttgca

SEQ ID NO: 114197 - DNA, 25 bp, Artificial sequence
  SiRNA target sequence
atgtcctgtacgtatcaatttgcaa

SEQ ID NO: 114198 - DNA, 25 bp, Artificial sequence
  SiRNA target sequence
tgtcctgtacgtatcaatttgcaag

SEQ ID NO: 114199 - DNA, 25 bp, Artificial sequence
  SiRNA target sequence
gtcctgtacgtatcaatttgcaaga

SEQ ID NO: 114200 - DNA, 25 bp, Artificial sequence
  SiRNA target sequence
tcctgtacgtatcaatttgcaagat

SEQ ID NO: 114201 - DNA, 25 bp, Artificial sequence
  SiRNA target sequence
cctgtacgtatcaatttgcaagatg

SEQ ID NO: 114202 - DNA, 25 bp, Artificial sequence
  SiRNA target sequence
ctgtacgtatcaatttgcaagatga

SEQ ID NO: 114203 - DNA, 25 bp, Artificial sequence
  SiRNA target sequence
tgtacgtatcaatttgcaagatgat

SEQ ID NO: 114204 - DNA, 25 bp, Artificial sequence
  SiRNA target sequence
gtacgtatcaatttgcaagatgata

SEQ ID NO: 114205 - DNA, 25 bp, Artificial sequence
  SiRNA target sequence
tacgtatcaatttgcaagatgatag

SEQ ID NO: 114206 - DNA, 25 bp, Artificial sequence
  SiRNA target sequence
acgtatcaatttgcaagatgatagg

SEQ ID NO: 114207 - DNA, 25 bp, Artificial sequence
  SiRNA target sequence
cgtatcaatttgcaagatgataggt

SEQ ID NO: 114208 - DNA, 25 bp, Artificial sequence
  SiRNA target sequence
gtatcaatttgcaagatgataggtc

SEQ ID NO: 114209 - DNA, 25 bp, Artificial sequence
  SiRNA target sequence
tatcaatttgcaagatgataggtcc

SEQ ID NO: 114210 - DNA, 25 bp, Artificial sequence
  SiRNA target sequence
atcaatttgcaagatgataggtcct

SEQ ID NO: 114211 - DNA, 25 bp, Artificial sequence
  SiRNA target sequence
tcaatttgcaagatgataggtcctt

SEQ ID NO: 114212 - DNA, 25 bp, Artificial sequence
  SiRNA target sequence
caatttgcaagatgataggtccttt

SEQ ID NO: 114213 - DNA, 25 bp, Artificial sequence
  SiRNA target sequence
aatttgcaagatgataggtcctttt

SEQ ID NO: 114214 - DNA, 25 bp, Artificial sequence
  SiRNA target sequence
atttgcaagatgataggtccttttt

SEQ ID NO: 114215 - DNA, 25 bp, Artificial sequence
  SiRNA target sequence
tttgcaagatgataggtcctttttc

SEQ ID NO: 114216 - DNA, 25 bp, Artificial sequence
  SiRNA target sequence
ttgcaagatgataggtcctttttct

SEQ ID NO: 114217 - DNA, 25 bp, Artificial sequence
  SiRNA target sequence
tgcaagatgataggtcctttttcta

SEQ ID NO: 114218 - DNA, 25 bp, Artificial sequence
  SiRNA target sequence
gcaagatgataggtcctttttctat

SEQ ID NO: 114219 - DNA, 25 bp, Artificial sequence
  SiRNA target sequence
caagatgataggtcctttttctatt

SEQ ID NO: 114220 - DNA, 25 bp, Artificial sequence
  SiRNA target sequence
aagatgataggtcctttttctattg

SEQ ID NO: 114221 - DNA, 25 bp, Artificial sequence
  SiRNA target sequence
agatgataggtcctttttctattgc

SEQ ID NO: 114222 - DNA, 25 bp, Artificial sequence
  SiRNA target sequence
gatgataggtcctttttctattgca

SEQ ID NO: 114223 - DNA, 25 bp, Artificial sequence
  SiRNA target sequence
atgataggtcctttttctattgcat

SEQ ID NO: 114224 - DNA, 25 bp, Artificial sequence
  SiRNA target sequence
tgataggtcctttttctattgcatg

SEQ ID NO: 114225 - DNA, 25 bp, Artificial sequence
  SiRNA target sequence
gataggtcctttttctattgcatgt

SEQ ID NO: 114226 - DNA, 25 bp, Artificial sequence
  SiRNA target sequence
ataggtcctttttctattgcatgtt

SEQ ID NO: 114227 - DNA, 25 bp, Artificial sequence
  SiRNA target sequence
taggtcctttttctattgcatgttg

SEQ ID NO: 114228 - DNA, 25 bp, Artificial sequence
  SiRNA target sequence
aggtcctttttctattgcatgttgt

SEQ ID NO: 114229 - DNA, 25 bp, Artificial sequence
  SiRNA target sequence
ggtcctttttctattgcatgttgtc

SEQ ID NO: 114230 - DNA, 25 bp, Artificial sequence
  SiRNA target sequence
gtcctttttctattgcatgttgtct

SEQ ID NO: 114231 - DNA, 25 bp, Artificial sequence
  SiRNA target sequence
tcctttttctattgcatgttgtcta

SEQ ID NO: 114232 - DNA, 25 bp, Artificial sequence
  SiRNA target sequence
cctttttctattgcatgttgtctag

SEQ ID NO: 114233 - DNA, 25 bp, Artificial sequence
  SiRNA target sequence
ctttttctattgcatgttgtctagc

SEQ ID NO: 114234 - DNA, 25 bp, Artificial sequence
  SiRNA target sequence
tttttctattgcatgttgtctagca

SEQ ID NO: 114235 - DNA, 25 bp, Artificial sequence
  SiRNA target sequence
ttttctattgcatgttgtctagcaa

SEQ ID NO: 114236 - DNA, 25 bp, Artificial sequence
  SiRNA target sequence
tttctattgcatgttgtctagcaaa

SEQ ID NO: 114237 - DNA, 25 bp, Artificial sequence
  SiRNA target sequence
ttctattgcatgttgtctagcaaat

SEQ ID NO: 114238 - DNA, 25 bp, Artificial sequence
  SiRNA target sequence
tctattgcatgttgtctagcaaatg

SEQ ID NO: 114239 - DNA, 25 bp, Artificial sequence
  SiRNA target sequence
ctattgcatgttgtctagcaaatgt

SEQ ID NO: 114240 - DNA, 25 bp, Artificial sequence
  SiRNA target sequence
tattgcatgttgtctagcaaatgta

SEQ ID NO: 114241 - DNA, 25 bp, Artificial sequence
  SiRNA target sequence
attgcatgttgtctagcaaatgtaa

SEQ ID NO: 114242 - DNA, 25 bp, Artificial sequence
  SiRNA target sequence
ttgcatgttgtctagcaaatgtaaa

SEQ ID NO: 114243 - DNA, 25 bp, Artificial sequence
  SiRNA target sequence
tgcatgttgtctagcaaatgtaaat

SEQ ID NO: 114244 - DNA, 25 bp, Artificial sequence
  SiRNA target sequence
gcatgttgtctagcaaatgtaaata

SEQ ID NO: 114245 - DNA, 25 bp, Artificial sequence
  SiRNA target sequence
catgttgtctagcaaatgtaaatac

SEQ ID NO: 114246 - DNA, 25 bp, Artificial sequence
  SiRNA target sequence
atgttgtctagcaaatgtaaataca

SEQ ID NO: 114247 - DNA, 25 bp, Artificial sequence
  SiRNA target sequence
tgttgtctagcaaatgtaaatacat

SEQ ID NO: 114248 - DNA, 25 bp, Artificial sequence
  SiRNA target sequence
gttgtctagcaaatgtaaatacatc

SEQ ID NO: 114249 - DNA, 25 bp, Artificial sequence
  SiRNA target sequence
ttgtctagcaaatgtaaatacatca

SEQ ID NO: 114250 - DNA, 25 bp, Artificial sequence
  SiRNA target sequence
tgtctagcaaatgtaaatacatcaa

SEQ ID NO: 114251 - DNA, 25 bp, Artificial sequence
  SiRNA target sequence
gtctagcaaatgtaaatacatcaat

SEQ ID NO: 114252 - DNA, 25 bp, Artificial sequence
  SiRNA target sequence
tctagcaaatgtaaatacatcaatc

SEQ ID NO: 114253 - DNA, 25 bp, Artificial sequence
  SiRNA target sequence
ctagcaaatgtaaatacatcaatca

SEQ ID NO: 114254 - DNA, 25 bp, Artificial sequence
  SiRNA target sequence
tagcaaatgtaaatacatcaatcag

SEQ ID NO: 114255 - DNA, 25 bp, Artificial sequence
  SiRNA target sequence
agcaaatgtaaatacatcaatcagt

SEQ ID NO: 114256 - DNA, 25 bp, Artificial sequence
  SiRNA target sequence
gcaaatgtaaatacatcaatcagtt

SEQ ID NO: 114257 - DNA, 25 bp, Artificial sequence
  SiRNA target sequence
caaatgtaaatacatcaatcagttg

SEQ ID NO: 114258 - DNA, 25 bp, Artificial sequence
  SiRNA target sequence
aaatgtaaatacatcaatcagttga

SEQ ID NO: 114259 - DNA, 25 bp, Artificial sequence
  SiRNA target sequence
aatgtaaatacatcaatcagttgag

SEQ ID NO: 114260 - DNA, 25 bp, Artificial sequence
  SiRNA target sequence
atgtaaatacatcaatcagttgagt

SEQ ID NO: 114261 - DNA, 25 bp, Artificial sequence
  SiRNA target sequence
tgtaaatacatcaatcagttgagtt

SEQ ID NO: 114262 - DNA, 25 bp, Artificial sequence
  SiRNA target sequence
gtaaatacatcaatcagttgagtta

SEQ ID NO: 114263 - DNA, 25 bp, Artificial sequence
  SiRNA target sequence
taaatacatcaatcagttgagttat

SEQ ID NO: 114264 - DNA, 25 bp, Artificial sequence
  SiRNA target sequence
aaatacatcaatcagttgagttatg

SEQ ID NO: 114265 - DNA, 25 bp, Artificial sequence
  SiRNA target sequence
aatacatcaatcagttgagttatgt

SEQ ID NO: 114266 - DNA, 25 bp, Artificial sequence
  SiRNA target sequence
atacatcaatcagttgagttatgtt

SEQ ID NO: 114267 - DNA, 25 bp, Artificial sequence
  SiRNA target sequence
tacatcaatcagttgagttatgttt

SEQ ID NO: 114268 - DNA, 25 bp, Artificial sequence
  SiRNA target sequence
acatcaatcagttgagttatgtttt

SEQ ID NO: 114269 - DNA, 25 bp, Artificial sequence
  SiRNA target sequence
catcaatcagttgagttatgttttt

SEQ ID NO: 114270 - DNA, 25 bp, Artificial sequence
  SiRNA target sequence
atcaatcagttgagttatgttttta

SEQ ID NO: 114271 - DNA, 25 bp, Artificial sequence
  SiRNA target sequence
tcaatcagttgagttatgtttttat

SEQ ID NO: 114272 - DNA, 25 bp, Artificial sequence
  SiRNA target sequence
caatcagttgagttatgtttttatc

SEQ ID NO: 114273 - DNA, 25 bp, Artificial sequence
  SiRNA target sequence
aatcagttgagttatgtttttatct

SEQ ID NO: 114274 - DNA, 25 bp, Artificial sequence
  SiRNA target sequence
atcagttgagttatgtttttatctg

SEQ ID NO: 114275 - DNA, 25 bp, Artificial sequence
  SiRNA target sequence
tcagttgagttatgtttttatctgt

SEQ ID NO: 114276 - DNA, 25 bp, Artificial sequence
  SiRNA target sequence
cagttgagttatgtttttatctgta

SEQ ID NO: 114277 - DNA, 25 bp, Artificial sequence
  SiRNA target sequence
agttgagttatgtttttatctgtaa

SEQ ID NO: 114278 - DNA, 25 bp, Artificial sequence
  SiRNA target sequence
gttgagttatgtttttatctgtaag

SEQ ID NO: 114279 - DNA, 25 bp, Artificial sequence
  SiRNA target sequence
ttgagttatgtttttatctgtaaga

SEQ ID NO: 114280 - DNA, 25 bp, Artificial sequence
  SiRNA target sequence
tgagttatgtttttatctgtaagac

SEQ ID NO: 114281 - DNA, 25 bp, Artificial sequence
  SiRNA target sequence
gagttatgtttttatctgtaagacg

SEQ ID NO: 114282 - DNA, 25 bp, Artificial sequence
  SiRNA target sequence
agttatgtttttatctgtaagacgt

SEQ ID NO: 114283 - DNA, 25 bp, Artificial sequence
  SiRNA target sequence
gttatgtttttatctgtaagacgta

SEQ ID NO: 114284 - DNA, 25 bp, Artificial sequence
  SiRNA target sequence
ttatgtttttatctgtaagacgtat

SEQ ID NO: 114285 - DNA, 25 bp, Artificial sequence
  SiRNA target sequence
tatgtttttatctgtaagacgtata

SEQ ID NO: 114286 - DNA, 25 bp, Artificial sequence
  SiRNA target sequence
atgtttttatctgtaagacgtatac

SEQ ID NO: 114287 - DNA, 25 bp, Artificial sequence
  SiRNA target sequence
tgtttttatctgtaagacgtatacc

SEQ ID NO: 114288 - DNA, 25 bp, Artificial sequence
  SiRNA target sequence
gtttttatctgtaagacgtatacct

SEQ ID NO: 114289 - DNA, 25 bp, Artificial sequence
  SiRNA target sequence
tttttatctgtaagacgtatacctg

SEQ ID NO: 114290 - DNA, 25 bp, Artificial sequence
  SiRNA target sequence
ttttatctgtaagacgtatacctgg

SEQ ID NO: 114291 - DNA, 25 bp, Artificial sequence
  SiRNA target sequence
tttatctgtaagacgtatacctgga

SEQ ID NO: 114292 - DNA, 25 bp, Artificial sequence
  SiRNA target sequence
ttatctgtaagacgtatacctggaa

SEQ ID NO: 114293 - DNA, 25 bp, Artificial sequence
  SiRNA target sequence
tatctgtaagacgtatacctggaat

SEQ ID NO: 114294 - DNA, 25 bp, Artificial sequence
  SiRNA target sequence
atctgtaagacgtatacctggaata

SEQ ID NO: 114295 - DNA, 25 bp, Artificial sequence
  SiRNA target sequence
tctgtaagacgtatacctggaatat

SEQ ID NO: 114296 - DNA, 25 bp, Artificial sequence
  SiRNA target sequence
ctgtaagacgtatacctggaatatt

SEQ ID NO: 114297 - DNA, 25 bp, Artificial sequence
  SiRNA target sequence
tgtaagacgtatacctggaatatta

SEQ ID NO: 114298 - DNA, 25 bp, Artificial sequence
  SiRNA target sequence
gtaagacgtatacctggaatattat

SEQ ID NO: 114299 - DNA, 25 bp, Artificial sequence
  SiRNA target sequence
taagacgtatacctggaatattata

SEQ ID NO: 114300 - DNA, 25 bp, Artificial sequence
  SiRNA target sequence
aagacgtatacctggaatattatat

SEQ ID NO: 114301 - DNA, 25 bp, Artificial sequence
  SiRNA target sequence
agacgtatacctggaatattatatc

SEQ ID NO: 114302 - DNA, 25 bp, Artificial sequence
  SiRNA target sequence
gacgtatacctggaatattatatcc

SEQ ID NO: 114303 - DNA, 25 bp, Artificial sequence
  SiRNA target sequence
acgtatacctggaatattatatccc

SEQ ID NO: 114304 - DNA, 25 bp, Artificial sequence
  SiRNA target sequence
cgtatacctggaatattatatcccc

SEQ ID NO: 114305 - DNA, 25 bp, Artificial sequence
  SiRNA target sequence
gtatacctggaatattatatcccct

SEQ ID NO: 114306 - DNA, 25 bp, Artificial sequence
  SiRNA target sequence
tatacctggaatattatatcccctt

SEQ ID NO: 114307 - DNA, 25 bp, Artificial sequence
  SiRNA target sequence
atacctggaatattatatccccttt

SEQ ID NO: 114308 - DNA, 25 bp, Artificial sequence
  SiRNA target sequence
tacctggaatattatatcccctttt

SEQ ID NO: 114309 - DNA, 25 bp, Artificial sequence
  SiRNA target sequence
acctggaatattatatcccctttta

SEQ ID NO: 114310 - DNA, 25 bp, Artificial sequence
  SiRNA target sequence
cctggaatattatatccccttttaa

SEQ ID NO: 114311 - DNA, 25 bp, Artificial sequence
  SiRNA target sequence
ctggaatattatatccccttttaaa

SEQ ID NO: 114312 - DNA, 25 bp, Artificial sequence
  SiRNA target sequence
tggaatattatatccccttttaaaa

SEQ ID NO: 114313 - DNA, 25 bp, Artificial sequence
  SiRNA target sequence
ggaatattatatccccttttaaaat

SEQ ID NO: 114314 - DNA, 25 bp, Artificial sequence
  SiRNA target sequence
gaatattatatccccttttaaaata

SEQ ID NO: 114315 - DNA, 25 bp, Artificial sequence
  SiRNA target sequence
aatattatatccccttttaaaatat

SEQ ID NO: 114316 - DNA, 25 bp, Artificial sequence
  SiRNA target sequence
atattatatccccttttaaaatatt

SEQ ID NO: 114317 - DNA, 25 bp, Artificial sequence
  SiRNA target sequence
tattatatccccttttaaaatattc

SEQ ID NO: 114318 - DNA, 25 bp, Artificial sequence
  SiRNA target sequence
attatatccccttttaaaatattca

SEQ ID NO: 114319 - DNA, 25 bp, Artificial sequence
  SiRNA target sequence
ttatatccccttttaaaatattcag

SEQ ID NO: 114320 - DNA, 25 bp, Artificial sequence
  SiRNA target sequence
tatatccccttttaaaatattcagg

SEQ ID NO: 114321 - DNA, 25 bp, Artificial sequence
  SiRNA target sequence
atatccccttttaaaatattcagga

SEQ ID NO: 114322 - DNA, 25 bp, Artificial sequence
  SiRNA target sequence
tatccccttttaaaatattcaggat

SEQ ID NO: 114323 - DNA, 25 bp, Artificial sequence
  SiRNA target sequence
atccccttttaaaatattcaggata

SEQ ID NO: 114324 - DNA, 25 bp, Artificial sequence
  SiRNA target sequence
tccccttttaaaatattcaggatat

SEQ ID NO: 114325 - DNA, 25 bp, Artificial sequence
  SiRNA target sequence
ccccttttaaaatattcaggatatg

SEQ ID NO: 114326 - DNA, 25 bp, Artificial sequence
  SiRNA target sequence
cccttttaaaatattcaggatatgt

SEQ ID NO: 114327 - DNA, 25 bp, Artificial sequence
  SiRNA target sequence
ccttttaaaatattcaggatatgta

SEQ ID NO: 114328 - DNA, 25 bp, Artificial sequence
  SiRNA target sequence
cttttaaaatattcaggatatgtag

SEQ ID NO: 114329 - DNA, 25 bp, Artificial sequence
  SiRNA target sequence
ttttaaaatattcaggatatgtagt

SEQ ID NO: 114330 - DNA, 25 bp, Artificial sequence
  SiRNA target sequence
tttaaaatattcaggatatgtagtg

SEQ ID NO: 114331 - DNA, 25 bp, Artificial sequence
  SiRNA target sequence
ttaaaatattcaggatatgtagtgg

SEQ ID NO: 114332 - DNA, 25 bp, Artificial sequence
  SiRNA target sequence
taaaatattcaggatatgtagtgga

SEQ ID NO: 114333 - DNA, 25 bp, Artificial sequence
  SiRNA target sequence
aaaatattcaggatatgtagtggaa

SEQ ID NO: 114334 - DNA, 25 bp, Artificial sequence
  SiRNA target sequence
aaatattcaggatatgtagtggaat

SEQ ID NO: 114335 - DNA, 25 bp, Artificial sequence
  SiRNA target sequence
aatattcaggatatgtagtggaatt

SEQ ID NO: 114336 - DNA, 25 bp, Artificial sequence
  SiRNA target sequence
atattcaggatatgtagtggaatta

SEQ ID NO: 114337 - DNA, 25 bp, Artificial sequence
  SiRNA target sequence
tattcaggatatgtagtggaattac

SEQ ID NO: 114338 - DNA, 25 bp, Artificial sequence
  SiRNA target sequence
attcaggatatgtagtggaattact

SEQ ID NO: 114339 - DNA, 25 bp, Artificial sequence
  SiRNA target sequence
ttcaggatatgtagtggaattactt

SEQ ID NO: 114340 - DNA, 25 bp, Artificial sequence
  SiRNA target sequence
tcaggatatgtagtggaattacttt

SEQ ID NO: 114341 - DNA, 25 bp, Artificial sequence
  SiRNA target sequence
caggatatgtagtggaattactttc

SEQ ID NO: 114342 - DNA, 25 bp, Artificial sequence
  SiRNA target sequence
aggatatgtagtggaattactttca

SEQ ID NO: 114343 - DNA, 25 bp, Artificial sequence
  SiRNA target sequence
ggatatgtagtggaattactttcag

SEQ ID NO: 114344 - DNA, 25 bp, Artificial sequence
  SiRNA target sequence
gatatgtagtggaattactttcagg

SEQ ID NO: 114345 - DNA, 25 bp, Artificial sequence
  SiRNA target sequence
atatgtagtggaattactttcaggt

SEQ ID NO: 114346 - DNA, 25 bp, Artificial sequence
  SiRNA target sequence
tatgtagtggaattactttcaggtg

SEQ ID NO: 114347 - DNA, 25 bp, Artificial sequence
  SiRNA target sequence
atgtagtggaattactttcaggtgt

SEQ ID NO: 114348 - DNA, 25 bp, Artificial sequence
  SiRNA target sequence
tgtagtggaattactttcaggtgtc

SEQ ID NO: 114349 - DNA, 25 bp, Artificial sequence
  SiRNA target sequence
gtagtggaattactttcaggtgtcc

SEQ ID NO: 114350 - DNA, 25 bp, Artificial sequence
  SiRNA target sequence
tagtggaattactttcaggtgtcca

SEQ ID NO: 114351 - DNA, 25 bp, Artificial sequence
  SiRNA target sequence
agtggaattactttcaggtgtccac

SEQ ID NO: 114352 - DNA, 25 bp, Artificial sequence
  SiRNA target sequence
gtggaattactttcaggtgtccaca

SEQ ID NO: 114353 - DNA, 25 bp, Artificial sequence
  SiRNA target sequence
tggaattactttcaggtgtccacat

SEQ ID NO: 114354 - DNA, 25 bp, Artificial sequence
  SiRNA target sequence
ggaattactttcaggtgtccacata

SEQ ID NO: 114355 - DNA, 25 bp, Artificial sequence
  SiRNA target sequence
gaattactttcaggtgtccacatac

SEQ ID NO: 114356 - DNA, 25 bp, Artificial sequence
  SiRNA target sequence
aattactttcaggtgtccacatact

SEQ ID NO: 114357 - DNA, 25 bp, Artificial sequence
  SiRNA target sequence
attactttcaggtgtccacatacta

SEQ ID NO: 114358 - DNA, 25 bp, Artificial sequence
  SiRNA target sequence
ttactttcaggtgtccacatactat

SEQ ID NO: 114359 - DNA, 25 bp, Artificial sequence
  SiRNA target sequence
tactttcaggtgtccacatactata

SEQ ID NO: 114360 - DNA, 25 bp, Artificial sequence
  SiRNA target sequence
actttcaggtgtccacatactataa

SEQ ID NO: 114361 - DNA, 25 bp, Artificial sequence
  SiRNA target sequence
ctttcaggtgtccacatactataat

SEQ ID NO: 114362 - DNA, 25 bp, Artificial sequence
  SiRNA target sequence
tttcaggtgtccacatactataatg

SEQ ID NO: 114363 - DNA, 25 bp, Artificial sequence
  SiRNA target sequence
ttcaggtgtccacatactataatga

SEQ ID NO: 114364 - DNA, 25 bp, Artificial sequence
  SiRNA target sequence
tcaggtgtccacatactataatgat

SEQ ID NO: 114365 - DNA, 25 bp, Artificial sequence
  SiRNA target sequence
caggtgtccacatactataatgatt

SEQ ID NO: 114366 - DNA, 25 bp, Artificial sequence
  SiRNA target sequence
aggtgtccacatactataatgatta

SEQ ID NO: 114367 - DNA, 25 bp, Artificial sequence
  SiRNA target sequence
ggtgtccacatactataatgattat

SEQ ID NO: 114368 - DNA, 25 bp, Artificial sequence
  SiRNA target sequence
gtgtccacatactataatgattatt

SEQ ID NO: 114369 - DNA, 25 bp, Artificial sequence
  SiRNA target sequence
tgtccacatactataatgattattt

SEQ ID NO: 114370 - DNA, 25 bp, Artificial sequence
  SiRNA target sequence
gtccacatactataatgattatttt

SEQ ID NO: 114371 - DNA, 25 bp, Artificial sequence
  SiRNA target sequence
tccacatactataatgattattttc

SEQ ID NO: 114372 - DNA, 25 bp, Artificial sequence
  SiRNA target sequence
ccacatactataatgattattttca

SEQ ID NO: 114373 - DNA, 25 bp, Artificial sequence
  SiRNA target sequence
cacatactataatgattattttcac

SEQ ID NO: 114374 - DNA, 25 bp, Artificial sequence
  SiRNA target sequence
acatactataatgattattttcaca

SEQ ID NO: 114375 - DNA, 25 bp, Artificial sequence
  SiRNA target sequence
catactataatgattattttcacat

SEQ ID NO: 114376 - DNA, 25 bp, Artificial sequence
  SiRNA target sequence
atactataatgattattttcacata

SEQ ID NO: 114377 - DNA, 25 bp, Artificial sequence
  SiRNA target sequence
tactataatgattattttcacatac

SEQ ID NO: 114378 - DNA, 25 bp, Artificial sequence
  SiRNA target sequence
actataatgattattttcacataca

SEQ ID NO: 114379 - DNA, 25 bp, Artificial sequence
  SiRNA target sequence
ctataatgattattttcacatacat

SEQ ID NO: 114380 - DNA, 25 bp, Artificial sequence
  SiRNA target sequence
tataatgattattttcacatacata

SEQ ID NO: 114381 - DNA, 25 bp, Artificial sequence
  SiRNA target sequence
ataatgattattttcacatacataa

SEQ ID NO: 114382 - DNA, 25 bp, Artificial sequence
  SiRNA target sequence
taatgattattttcacatacataaa

SEQ ID NO: 114383 - DNA, 25 bp, Artificial sequence
  SiRNA target sequence
aatgattattttcacatacataaac

SEQ ID NO: 114384 - DNA, 25 bp, Artificial sequence
  SiRNA target sequence
atgattattttcacatacataaacc

SEQ ID NO: 114385 - DNA, 25 bp, Artificial sequence
  SiRNA target sequence
tgattattttcacatacataaacca

SEQ ID NO: 114386 - DNA, 25 bp, Artificial sequence
  SiRNA target sequence
gattattttcacatacataaaccac

SEQ ID NO: 114387 - DNA, 25 bp, Artificial sequence
  SiRNA target sequence
attattttcacatacataaaccaca

SEQ ID NO: 114388 - DNA, 25 bp, Artificial sequence
  SiRNA target sequence
ttattttcacatacataaaccacag

SEQ ID NO: 114389 - DNA, 25 bp, Artificial sequence
  SiRNA target sequence
tattttcacatacataaaccacagg

SEQ ID NO: 114390 - DNA, 25 bp, Artificial sequence
  SiRNA target sequence
attttcacatacataaaccacagga

SEQ ID NO: 114391 - DNA, 25 bp, Artificial sequence
  SiRNA target sequence
ttttcacatacataaaccacaggaa

SEQ ID NO: 114392 - DNA, 25 bp, Artificial sequence
  SiRNA target sequence
tttcacatacataaaccacaggaag

SEQ ID NO: 114393 - DNA, 25 bp, Artificial sequence
  SiRNA target sequence
ttcacatacataaaccacaggaagt

SEQ ID NO: 114394 - DNA, 25 bp, Artificial sequence
  SiRNA target sequence
tcacatacataaaccacaggaagtt

SEQ ID NO: 114395 - DNA, 25 bp, Artificial sequence
  SiRNA target sequence
cacatacataaaccacaggaagttt

SEQ ID NO: 114396 - DNA, 25 bp, Artificial sequence
  SiRNA target sequence
acatacataaaccacaggaagtttc

SEQ ID NO: 114397 - DNA, 25 bp, Artificial sequence
  SiRNA target sequence
catacataaaccacaggaagtttcc

SEQ ID NO: 114398 - DNA, 25 bp, Artificial sequence
  SiRNA target sequence
atacataaaccacaggaagtttcca

SEQ ID NO: 114399 - DNA, 25 bp, Artificial sequence
  SiRNA target sequence
tacataaaccacaggaagtttccat

SEQ ID NO: 114400 - DNA, 25 bp, Artificial sequence
  SiRNA target sequence
acataaaccacaggaagtttccata

SEQ ID NO: 114401 - DNA, 25 bp, Artificial sequence
  SiRNA target sequence
cataaaccacaggaagtttccataa

SEQ ID NO: 114402 - DNA, 25 bp, Artificial sequence
  SiRNA target sequence
ataaaccacaggaagtttccataat

SEQ ID NO: 114403 - DNA, 25 bp, Artificial sequence
  SiRNA target sequence
taaaccacaggaagtttccataatg

SEQ ID NO: 114404 - DNA, 25 bp, Artificial sequence
  SiRNA target sequence
aaaccacaggaagtttccataatgc

SEQ ID NO: 114405 - DNA, 25 bp, Artificial sequence
  SiRNA target sequence
aaccacaggaagtttccataatgca

SEQ ID NO: 114406 - DNA, 25 bp, Artificial sequence
  SiRNA target sequence
accacaggaagtttccataatgcag

SEQ ID NO: 114407 - DNA, 25 bp, Artificial sequence
  SiRNA target sequence
ccacaggaagtttccataatgcagc

SEQ ID NO: 114408 - DNA, 25 bp, Artificial sequence
  SiRNA target sequence
cacaggaagtttccataatgcagcc

SEQ ID NO: 114409 - DNA, 25 bp, Artificial sequence
  SiRNA target sequence
acaggaagtttccataatgcagcca

SEQ ID NO: 114410 - DNA, 25 bp, Artificial sequence
  SiRNA target sequence
caggaagtttccataatgcagccat

SEQ ID NO: 114411 - DNA, 25 bp, Artificial sequence
  SiRNA target sequence
aggaagtttccataatgcagccata

SEQ ID NO: 114412 - DNA, 25 bp, Artificial sequence
  SiRNA target sequence
ggaagtttccataatgcagccatat

SEQ ID NO: 114413 - DNA, 25 bp, Artificial sequence
  SiRNA target sequence
gaagtttccataatgcagccatatt

SEQ ID NO: 114414 - DNA, 25 bp, Artificial sequence
  SiRNA target sequence
aagtttccataatgcagccatattg

SEQ ID NO: 114415 - DNA, 25 bp, Artificial sequence
  SiRNA target sequence
agtttccataatgcagccatattga

SEQ ID NO: 114416 - DNA, 25 bp, Artificial sequence
  SiRNA target sequence
gtttccataatgcagccatattgaa

SEQ ID NO: 114417 - DNA, 25 bp, Artificial sequence
  SiRNA target sequence
tttccataatgcagccatattgaac

SEQ ID NO: 114418 - DNA, 25 bp, Artificial sequence
  SiRNA target sequence
ttccataatgcagccatattgaacg

SEQ ID NO: 114419 - DNA, 25 bp, Artificial sequence
  SiRNA target sequence
tccataatgcagccatattgaacga

SEQ ID NO: 114420 - DNA, 25 bp, Artificial sequence
  SiRNA target sequence
ccataatgcagccatattgaacgac

SEQ ID NO: 114421 - DNA, 25 bp, Artificial sequence
  SiRNA target sequence
cataatgcagccatattgaacgact

SEQ ID NO: 114422 - DNA, 25 bp, Artificial sequence
  SiRNA target sequence
ataatgcagccatattgaacgactc

SEQ ID NO: 114423 - DNA, 25 bp, Artificial sequence
  SiRNA target sequence
taatgcagccatattgaacgactcc

SEQ ID NO: 114424 - DNA, 25 bp, Artificial sequence
  SiRNA target sequence
aatgcagccatattgaacgactccc

SEQ ID NO: 114425 - DNA, 25 bp, Artificial sequence
  SiRNA target sequence
atgcagccatattgaacgactccca

SEQ ID NO: 114426 - DNA, 25 bp, Artificial sequence
  SiRNA target sequence
tgcagccatattgaacgactcccag

SEQ ID NO: 114427 - DNA, 25 bp, Artificial sequence
  SiRNA target sequence
gcagccatattgaacgactcccaga

SEQ ID NO: 114428 - DNA, 25 bp, Artificial sequence
  SiRNA target sequence
cagccatattgaacgactcccagac

SEQ ID NO: 114429 - DNA, 25 bp, Artificial sequence
  SiRNA target sequence
agccatattgaacgactcccagacc

SEQ ID NO: 114430 - DNA, 25 bp, Artificial sequence
  SiRNA target sequence
gccatattgaacgactcccagacct

SEQ ID NO: 114431 - DNA, 25 bp, Artificial sequence
  SiRNA target sequence
ccatattgaacgactcccagacctg

SEQ ID NO: 114432 - DNA, 25 bp, Artificial sequence
  SiRNA target sequence
catattgaacgactcccagacctgt

SEQ ID NO: 114433 - DNA, 25 bp, Artificial sequence
  SiRNA target sequence
atattgaacgactcccagacctgtc

SEQ ID NO: 114434 - DNA, 25 bp, Artificial sequence
  SiRNA target sequence
tattgaacgactcccagacctgtcc

SEQ ID NO: 114435 - DNA, 25 bp, Artificial sequence
  SiRNA target sequence
attgaacgactcccagacctgtccc

SEQ ID NO: 114436 - DNA, 25 bp, Artificial sequence
  SiRNA target sequence
ttgaacgactcccagacctgtccct

SEQ ID NO: 114437 - DNA, 25 bp, Artificial sequence
  SiRNA target sequence
tgaacgactcccagacctgtccctg

SEQ ID NO: 114438 - DNA, 25 bp, Artificial sequence
  SiRNA target sequence
gaacgactcccagacctgtccctga

SEQ ID NO: 114439 - DNA, 25 bp, Artificial sequence
  SiRNA target sequence
aacgactcccagacctgtccctgat

SEQ ID NO: 114440 - DNA, 25 bp, Artificial sequence
  SiRNA target sequence
acgactcccagacctgtccctgatt

SEQ ID NO: 114441 - DNA, 25 bp, Artificial sequence
  SiRNA target sequence
cgactcccagacctgtccctgattt

SEQ ID NO: 114442 - DNA, 25 bp, Artificial sequence
  SiRNA target sequence
gactcccagacctgtccctgatttg

SEQ ID NO: 114443 - DNA, 25 bp, Artificial sequence
  SiRNA target sequence
actcccagacctgtccctgatttgc

SEQ ID NO: 114444 - DNA, 25 bp, Artificial sequence
  SiRNA target sequence
ctcccagacctgtccctgatttgca

SEQ ID NO: 114445 - DNA, 25 bp, Artificial sequence
  SiRNA target sequence
tcccagacctgtccctgatttgcag

SEQ ID NO: 114446 - DNA, 25 bp, Artificial sequence
  SiRNA target sequence
cccagacctgtccctgatttgcagc

SEQ ID NO: 114447 - DNA, 25 bp, Artificial sequence
  SiRNA target sequence
ccagacctgtccctgatttgcagca

SEQ ID NO: 114448 - DNA, 25 bp, Artificial sequence
  SiRNA target sequence
cagacctgtccctgatttgcagcac

SEQ ID NO: 114449 - DNA, 25 bp, Artificial sequence
  SiRNA target sequence
agacctgtccctgatttgcagcacc

SEQ ID NO: 114450 - DNA, 25 bp, Artificial sequence
  SiRNA target sequence
gacctgtccctgatttgcagcacca

SEQ ID NO: 114451 - DNA, 25 bp, Artificial sequence
  SiRNA target sequence
acctgtccctgatttgcagcaccat

SEQ ID NO: 114452 - DNA, 25 bp, Artificial sequence
  SiRNA target sequence
cctgtccctgatttgcagcaccatc

SEQ ID NO: 114453 - DNA, 25 bp, Artificial sequence
  SiRNA target sequence
ctgtccctgatttgcagcaccatcc

SEQ ID NO: 114454 - DNA, 25 bp, Artificial sequence
  SiRNA target sequence
tgtccctgatttgcagcaccatccc

SEQ ID NO: 114455 - DNA, 25 bp, Artificial sequence
  SiRNA target sequence
gtccctgatttgcagcaccatcccc

SEQ ID NO: 114456 - DNA, 25 bp, Artificial sequence
  SiRNA target sequence
tccctgatttgcagcaccatccccg

SEQ ID NO: 114457 - DNA, 25 bp, Artificial sequence
  SiRNA target sequence
ccctgatttgcagcaccatccccga

SEQ ID NO: 114458 - DNA, 25 bp, Artificial sequence
  SiRNA target sequence
cctgatttgcagcaccatccccgaa

SEQ ID NO: 114459 - DNA, 25 bp, Artificial sequence
  SiRNA target sequence
ctgatttgcagcaccatccccgaaa

SEQ ID NO: 114460 - DNA, 25 bp, Artificial sequence
  SiRNA target sequence
tgatttgcagcaccatccccgaaaa

SEQ ID NO: 114461 - DNA, 25 bp, Artificial sequence
  SiRNA target sequence
gatttgcagcaccatccccgaaaaa

SEQ ID NO: 114462 - DNA, 25 bp, Artificial sequence
  SiRNA target sequence
atttgcagcaccatccccgaaaaat

SEQ ID NO: 114463 - DNA, 25 bp, Artificial sequence
  SiRNA target sequence
tttgcagcaccatccccgaaaaata

SEQ ID NO: 114464 - DNA, 25 bp, Artificial sequence
  SiRNA target sequence
ttgcagcaccatccccgaaaaatac

SEQ ID NO: 114465 - DNA, 25 bp, Artificial sequence
  SiRNA target sequence
tgcagcaccatccccgaaaaataca

SEQ ID NO: 114466 - DNA, 25 bp, Artificial sequence
  SiRNA target sequence
gcagcaccatccccgaaaaatacaa

SEQ ID NO: 114467 - DNA, 25 bp, Artificial sequence
  SiRNA target sequence
cagcaccatccccgaaaaatacaaa

SEQ ID NO: 114468 - DNA, 25 bp, Artificial sequence
  SiRNA target sequence
agcaccatccccgaaaaatacaaat

SEQ ID NO: 114469 - DNA, 25 bp, Artificial sequence
  SiRNA target sequence
gcaccatccccgaaaaatacaaatg

SEQ ID NO: 114470 - DNA, 25 bp, Artificial sequence
  SiRNA target sequence
caccatccccgaaaaatacaaatgc

SEQ ID NO: 114471 - DNA, 25 bp, Artificial sequence
  SiRNA target sequence
accatccccgaaaaatacaaatgct

SEQ ID NO: 114472 - DNA, 25 bp, Artificial sequence
  SiRNA target sequence
ccatccccgaaaaatacaaatgcta

SEQ ID NO: 114473 - DNA, 25 bp, Artificial sequence
  SiRNA target sequence
catccccgaaaaatacaaatgctac

SEQ ID NO: 114474 - DNA, 25 bp, Artificial sequence
  SiRNA target sequence
atccccgaaaaatacaaatgctaca

SEQ ID NO: 114475 - DNA, 25 bp, Artificial sequence
  SiRNA target sequence
tccccgaaaaatacaaatgctacat

SEQ ID NO: 114476 - DNA, 25 bp, Artificial sequence
  SiRNA target sequence
ccccgaaaaatacaaatgctacatt

SEQ ID NO: 114477 - DNA, 25 bp, Artificial sequence
  SiRNA target sequence
cccgaaaaatacaaatgctacattt

SEQ ID NO: 114478 - DNA, 25 bp, Artificial sequence
  SiRNA target sequence
ccgaaaaatacaaatgctacatttt

SEQ ID NO: 114479 - DNA, 25 bp, Artificial sequence
  SiRNA target sequence
cgaaaaatacaaatgctacattttt

SEQ ID NO: 114480 - DNA, 25 bp, Artificial sequence
  SiRNA target sequence
gaaaaatacaaatgctacatttttt

SEQ ID NO: 114481 - DNA, 25 bp, Artificial sequence
  SiRNA target sequence
aaaaatacaaatgctacatttttta

SEQ ID NO: 114482 - DNA, 25 bp, Artificial sequence
  SiRNA target sequence
aaaatacaaatgctacattttttac

SEQ ID NO: 114483 - DNA, 25 bp, Artificial sequence
  SiRNA target sequence
aaatacaaatgctacattttttact

SEQ ID NO: 114484 - DNA, 25 bp, Artificial sequence
  SiRNA target sequence
aatacaaatgctacattttttactt

SEQ ID NO: 114485 - DNA, 25 bp, Artificial sequence
  SiRNA target sequence
atacaaatgctacattttttacttt

SEQ ID NO: 114486 - DNA, 25 bp, Artificial sequence
  SiRNA target sequence
tacaaatgctacattttttactttt

SEQ ID NO: 114487 - DNA, 25 bp, Artificial sequence
  SiRNA target sequence
acaaatgctacattttttacttttt

SEQ ID NO: 114488 - DNA, 25 bp, Artificial sequence
  SiRNA target sequence
caaatgctacattttttactttttt

SEQ ID NO: 114489 - DNA, 25 bp, Artificial sequence
  SiRNA target sequence
aaatgctacattttttactttttta

SEQ ID NO: 114490 - DNA, 25 bp, Artificial sequence
  SiRNA target sequence
aatgctacattttttacttttttat

SEQ ID NO: 114491 - DNA, 25 bp, Artificial sequence
  SiRNA target sequence
atgctacattttttacttttttata

SEQ ID NO: 114492 - DNA, 25 bp, Artificial sequence
  SiRNA target sequence
tgctacattttttacttttttatat

SEQ ID NO: 114493 - DNA, 25 bp, Artificial sequence
  SiRNA target sequence
gctacattttttacttttttatatt

SEQ ID NO: 114494 - DNA, 25 bp, Artificial sequence
  SiRNA target sequence
ctacattttttacttttttatattg

SEQ ID NO: 114495 - DNA, 25 bp, Artificial sequence
  SiRNA target sequence
tacattttttacttttttatattgt

SEQ ID NO: 114496 - DNA, 25 bp, Artificial sequence
  SiRNA target sequence
acattttttacttttttatattgta

SEQ ID NO: 114497 - DNA, 25 bp, Artificial sequence
  SiRNA target sequence
cattttttacttttttatattgtaa

SEQ ID NO: 114498 - DNA, 25 bp, Artificial sequence
  SiRNA target sequence
attttttacttttttatattgtaaa

SEQ ID NO: 114499 - DNA, 25 bp, Artificial sequence
  SiRNA target sequence
ttttttacttttttatattgtaaag

SEQ ID NO: 114500 - DNA, 25 bp, Artificial sequence
  SiRNA target sequence
tttttacttttttatattgtaaagc

SEQ ID NO: 114501 - DNA, 25 bp, Artificial sequence
  SiRNA target sequence
ttttacttttttatattgtaaagca

SEQ ID NO: 114502 - DNA, 25 bp, Artificial sequence
  SiRNA target sequence
tttacttttttatattgtaaagcaa

SEQ ID NO: 114503 - DNA, 25 bp, Artificial sequence
  SiRNA target sequence
ttacttttttatattgtaaagcaaa

SEQ ID NO: 114504 - DNA, 25 bp, Artificial sequence
  SiRNA target sequence
tacttttttatattgtaaagcaaat

SEQ ID NO: 114505 - DNA, 25 bp, Artificial sequence
  SiRNA target sequence
acttttttatattgtaaagcaaatc

SEQ ID NO: 114506 - DNA, 25 bp, Artificial sequence
  SiRNA target sequence
cttttttatattgtaaagcaaatcc

SEQ ID NO: 114507 - DNA, 25 bp, Artificial sequence
  SiRNA target sequence
ttttttatattgtaaagcaaatccc

SEQ ID NO: 114508 - DNA, 25 bp, Artificial sequence
  SiRNA target sequence
tttttatattgtaaagcaaatccca

SEQ ID NO: 114509 - DNA, 25 bp, Artificial sequence
  SiRNA target sequence
ttttatattgtaaagcaaatcccaa

SEQ ID NO: 114510 - DNA, 25 bp, Artificial sequence
  SiRNA target sequence
tttatattgtaaagcaaatcccaat

SEQ ID NO: 114511 - DNA, 25 bp, Artificial sequence
  SiRNA target sequence
ttatattgtaaagcaaatcccaatc

SEQ ID NO: 114512 - DNA, 25 bp, Artificial sequence
  SiRNA target sequence
tatattgtaaagcaaatcccaatcc

SEQ ID NO: 114513 - DNA, 25 bp, Artificial sequence
  SiRNA target sequence
atattgtaaagcaaatcccaatcct

SEQ ID NO: 114514 - DNA, 25 bp, Artificial sequence
  SiRNA target sequence
tattgtaaagcaaatcccaatcctg

SEQ ID NO: 114515 - DNA, 25 bp, Artificial sequence
  SiRNA target sequence
attgtaaagcaaatcccaatcctgt

SEQ ID NO: 114516 - DNA, 25 bp, Artificial sequence
  SiRNA target sequence
ttgtaaagcaaatcccaatcctgta

SEQ ID NO: 114517 - DNA, 25 bp, Artificial sequence
  SiRNA target sequence
tgtaaagcaaatcccaatcctgtac

SEQ ID NO: 114518 - DNA, 25 bp, Artificial sequence
  SiRNA target sequence
gtaaagcaaatcccaatcctgtacc

SEQ ID NO: 114519 - DNA, 25 bp, Artificial sequence
  SiRNA target sequence
taaagcaaatcccaatcctgtacca

SEQ ID NO: 114520 - DNA, 25 bp, Artificial sequence
  SiRNA target sequence
aaagcaaatcccaatcctgtaccaa

SEQ ID NO: 114521 - DNA, 25 bp, Artificial sequence
  SiRNA target sequence
aagcaaatcccaatcctgtaccaag

SEQ ID NO: 114522 - DNA, 25 bp, Artificial sequence
  SiRNA target sequence
agcaaatcccaatcctgtaccaagc

SEQ ID NO: 114523 - DNA, 25 bp, Artificial sequence
  SiRNA target sequence
gcaaatcccaatcctgtaccaagcg

SEQ ID NO: 114524 - DNA, 25 bp, Artificial sequence
  SiRNA target sequence
caaatcccaatcctgtaccaagcga

SEQ ID NO: 114525 - DNA, 25 bp, Artificial sequence
  SiRNA target sequence
aaatcccaatcctgtaccaagcgat

SEQ ID NO: 114526 - DNA, 25 bp, Artificial sequence
  SiRNA target sequence
aatcccaatcctgtaccaagcgata

SEQ ID NO: 114527 - DNA, 25 bp, Artificial sequence
  SiRNA target sequence
atcccaatcctgtaccaagcgatac

SEQ ID NO: 114528 - DNA, 25 bp, Artificial sequence
  SiRNA target sequence
tcccaatcctgtaccaagcgatacc

SEQ ID NO: 114529 - DNA, 25 bp, Artificial sequence
  SiRNA target sequence
cccaatcctgtaccaagcgatacct

SEQ ID NO: 114530 - DNA, 25 bp, Artificial sequence
  SiRNA target sequence
ccaatcctgtaccaagcgatacctg

SEQ ID NO: 114531 - DNA, 25 bp, Artificial sequence
  SiRNA target sequence
caatcctgtaccaagcgatacctgc

SEQ ID NO: 114532 - DNA, 25 bp, Artificial sequence
  SiRNA target sequence
aatcctgtaccaagcgatacctgcg

SEQ ID NO: 114533 - DNA, 25 bp, Artificial sequence
  SiRNA target sequence
atcctgtaccaagcgatacctgcgc

SEQ ID NO: 114534 - DNA, 25 bp, Artificial sequence
  SiRNA target sequence
tcctgtaccaagcgatacctgcgca

SEQ ID NO: 114535 - DNA, 25 bp, Artificial sequence
  SiRNA target sequence
cctgtaccaagcgatacctgcgcac

SEQ ID NO: 114536 - DNA, 25 bp, Artificial sequence
  SiRNA target sequence
ctgtaccaagcgatacctgcgcacc

SEQ ID NO: 114537 - DNA, 25 bp, Artificial sequence
  SiRNA target sequence
tgtaccaagcgatacctgcgcacct

SEQ ID NO: 114538 - DNA, 25 bp, Artificial sequence
  SiRNA target sequence
gtaccaagcgatacctgcgcaccta

SEQ ID NO: 114539 - DNA, 25 bp, Artificial sequence
  SiRNA target sequence
taccaagcgatacctgcgcacctac

SEQ ID NO: 114540 - DNA, 25 bp, Artificial sequence
  SiRNA target sequence
accaagcgatacctgcgcacctact

SEQ ID NO: 114541 - DNA, 25 bp, Artificial sequence
  SiRNA target sequence
ccaagcgatacctgcgcacctacta

SEQ ID NO: 114542 - DNA, 25 bp, Artificial sequence
  SiRNA target sequence
caagcgatacctgcgcacctactat

SEQ ID NO: 114543 - DNA, 25 bp, Artificial sequence
  SiRNA target sequence
aagcgatacctgcgcacctactata

SEQ ID NO: 114544 - DNA, 25 bp, Artificial sequence
  SiRNA target sequence
agcgatacctgcgcacctactatac

SEQ ID NO: 114545 - DNA, 25 bp, Artificial sequence
  SiRNA target sequence
gcgatacctgcgcacctactatacc

SEQ ID NO: 114546 - DNA, 25 bp, Artificial sequence
  SiRNA target sequence
cgatacctgcgcacctactataccg

SEQ ID NO: 114547 - DNA, 25 bp, Artificial sequence
  SiRNA target sequence
gatacctgcgcacctactataccgt

SEQ ID NO: 114548 - DNA, 25 bp, Artificial sequence
  SiRNA target sequence
atacctgcgcacctactataccgtg

SEQ ID NO: 114549 - DNA, 25 bp, Artificial sequence
  SiRNA target sequence
tacctgcgcacctactataccgtgt

SEQ ID NO: 114550 - DNA, 25 bp, Artificial sequence
  SiRNA target sequence
acctgcgcacctactataccgtgtc

SEQ ID NO: 114551 - DNA, 25 bp, Artificial sequence
  SiRNA target sequence
cctgcgcacctactataccgtgtcc

SEQ ID NO: 114552 - DNA, 25 bp, Artificial sequence
  SiRNA target sequence
ctgcgcacctactataccgtgtccc

SEQ ID NO: 114553 - DNA, 25 bp, Artificial sequence
  SiRNA target sequence
tgcgcacctactataccgtgtcccc

SEQ ID NO: 114554 - DNA, 25 bp, Artificial sequence
  SiRNA target sequence
gcgcacctactataccgtgtccccc

SEQ ID NO: 114555 - DNA, 25 bp, Artificial sequence
  SiRNA target sequence
cgcacctactataccgtgtccccca

SEQ ID NO: 114556 - DNA, 25 bp, Artificial sequence
  SiRNA target sequence
gcacctactataccgtgtcccccat

SEQ ID NO: 114557 - DNA, 25 bp, Artificial sequence
  SiRNA target sequence
cacctactataccgtgtcccccata

SEQ ID NO: 114558 - DNA, 25 bp, Artificial sequence
  SiRNA target sequence
acctactataccgtgtcccccataa

SEQ ID NO: 114559 - DNA, 25 bp, Artificial sequence
  SiRNA target sequence
cctactataccgtgtcccccataaa

SEQ ID NO: 114560 - DNA, 25 bp, Artificial sequence
  SiRNA target sequence
ctactataccgtgtcccccataaaa

SEQ ID NO: 114561 - DNA, 25 bp, Artificial sequence
  SiRNA target sequence
tactataccgtgtcccccataaaat

SEQ ID NO: 114562 - DNA, 25 bp, Artificial sequence
  SiRNA target sequence
actataccgtgtcccccataaaatt

SEQ ID NO: 114563 - DNA, 25 bp, Artificial sequence
  SiRNA target sequence
ctataccgtgtcccccataaaattg

SEQ ID NO: 114564 - DNA, 25 bp, Artificial sequence
  SiRNA target sequence
tataccgtgtcccccataaaattgg

SEQ ID NO: 114565 - DNA, 25 bp, Artificial sequence
  SiRNA target sequence
ataccgtgtcccccataaaattggt

SEQ ID NO: 114566 - DNA, 25 bp, Artificial sequence
  SiRNA target sequence
taccgtgtcccccataaaattggtc

SEQ ID NO: 114567 - DNA, 25 bp, Artificial sequence
  SiRNA target sequence
accgtgtcccccataaaattggtca

SEQ ID NO: 114568 - DNA, 25 bp, Artificial sequence
  SiRNA target sequence
ccgtgtcccccataaaattggtcat

SEQ ID NO: 114569 - DNA, 25 bp, Artificial sequence
  SiRNA target sequence
cgtgtcccccataaaattggtcatt

SEQ ID NO: 114570 - DNA, 25 bp, Artificial sequence
  SiRNA target sequence
gtgtcccccataaaattggtcatta

SEQ ID NO: 114571 - DNA, 25 bp, Artificial sequence
  SiRNA target sequence
tgtcccccataaaattggtcattat

SEQ ID NO: 114572 - DNA, 25 bp, Artificial sequence
  SiRNA target sequence
gtcccccataaaattggtcattata

SEQ ID NO: 114573 - DNA, 25 bp, Artificial sequence
  SiRNA target sequence
tcccccataaaattggtcattatac

SEQ ID NO: 114574 - DNA, 25 bp, Artificial sequence
  SiRNA target sequence
cccccataaaattggtcattataca

SEQ ID NO: 114575 - DNA, 25 bp, Artificial sequence
  SiRNA target sequence
ccccataaaattggtcattatacaa

SEQ ID NO: 114576 - DNA, 25 bp, Artificial sequence
  SiRNA target sequence
cccataaaattggtcattatacaaa

SEQ ID NO: 114577 - DNA, 25 bp, Artificial sequence
  SiRNA target sequence
ccataaaattggtcattatacaaat

SEQ ID NO: 114578 - DNA, 25 bp, Artificial sequence
  SiRNA target sequence
cataaaattggtcattatacaaatg

SEQ ID NO: 114579 - DNA, 25 bp, Artificial sequence
  SiRNA target sequence
ataaaattggtcattatacaaatgc

SEQ ID NO: 114580 - DNA, 25 bp, Artificial sequence
  SiRNA target sequence
taaaattggtcattatacaaatgca

SEQ ID NO: 114581 - DNA, 25 bp, Artificial sequence
  SiRNA target sequence
aaaattggtcattatacaaatgcat

SEQ ID NO: 114582 - DNA, 25 bp, Artificial sequence
  SiRNA target sequence
aaattggtcattatacaaatgcatc

SEQ ID NO: 114583 - DNA, 25 bp, Artificial sequence
  SiRNA target sequence
aattggtcattatacaaatgcatcg

SEQ ID NO: 114584 - DNA, 25 bp, Artificial sequence
  SiRNA target sequence
attggtcattatacaaatgcatcga

SEQ ID NO: 114585 - DNA, 25 bp, Artificial sequence
  SiRNA target sequence
ttggtcattatacaaatgcatcgat

SEQ ID NO: 114586 - DNA, 25 bp, Artificial sequence
  SiRNA target sequence
tggtcattatacaaatgcatcgatc

SEQ ID NO: 114587 - DNA, 25 bp, Artificial sequence
  SiRNA target sequence
ggtcattatacaaatgcatcgatcc

SEQ ID NO: 114588 - DNA, 25 bp, Artificial sequence
  SiRNA target sequence
gtcattatacaaatgcatcgatcct

SEQ ID NO: 114589 - DNA, 25 bp, Artificial sequence
  SiRNA target sequence
tcattatacaaatgcatcgatcctc

SEQ ID NO: 114590 - DNA, 25 bp, Artificial sequence
  SiRNA target sequence
cattatacaaatgcatcgatcctcc

SEQ ID NO: 114591 - DNA, 25 bp, Artificial sequence
  SiRNA target sequence
attatacaaatgcatcgatcctcct

SEQ ID NO: 114592 - DNA, 25 bp, Artificial sequence
  SiRNA target sequence
ttatacaaatgcatcgatcctcctt

SEQ ID NO: 114593 - DNA, 25 bp, Artificial sequence
  SiRNA target sequence
tatacaaatgcatcgatcctccttt

SEQ ID NO: 114594 - DNA, 25 bp, Artificial sequence
  SiRNA target sequence
atacaaatgcatcgatcctcctttt

SEQ ID NO: 114595 - DNA, 25 bp, Artificial sequence
  SiRNA target sequence
tacaaatgcatcgatcctccttttc

SEQ ID NO: 114596 - DNA, 25 bp, Artificial sequence
  SiRNA target sequence
acaaatgcatcgatcctccttttcc

SEQ ID NO: 114597 - DNA, 25 bp, Artificial sequence
  SiRNA target sequence
caaatgcatcgatcctccttttcct

SEQ ID NO: 114598 - DNA, 25 bp, Artificial sequence
  SiRNA target sequence
aaatgcatcgatcctccttttcctt

SEQ ID NO: 114599 - DNA, 25 bp, Artificial sequence
  SiRNA target sequence
aatgcatcgatcctccttttccttt

SEQ ID NO: 114600 - DNA, 25 bp, Artificial sequence
  SiRNA target sequence
atgcatcgatcctccttttcctttg

SEQ ID NO: 114601 - DNA, 25 bp, Artificial sequence
  SiRNA target sequence
tgcatcgatcctccttttcctttgc

SEQ ID NO: 114602 - DNA, 25 bp, Artificial sequence
  SiRNA target sequence
gcatcgatcctccttttcctttgca

SEQ ID NO: 114603 - DNA, 25 bp, Artificial sequence
  SiRNA target sequence
catcgatcctccttttcctttgcaa

SEQ ID NO: 114604 - DNA, 25 bp, Artificial sequence
  SiRNA target sequence
atcgatcctccttttcctttgcaat

SEQ ID NO: 114605 - DNA, 25 bp, Artificial sequence
  SiRNA target sequence
tcgatcctccttttcctttgcaatt

SEQ ID NO: 114606 - DNA, 25 bp, Artificial sequence
  SiRNA target sequence
cgatcctccttttcctttgcaatta

SEQ ID NO: 114607 - DNA, 25 bp, Artificial sequence
  SiRNA target sequence
gatcctccttttcctttgcaattac

SEQ ID NO: 114608 - DNA, 25 bp, Artificial sequence
  SiRNA target sequence
atcctccttttcctttgcaattacc

SEQ ID NO: 114609 - DNA, 25 bp, Artificial sequence
  SiRNA target sequence
tcctccttttcctttgcaattacca

SEQ ID NO: 114610 - DNA, 25 bp, Artificial sequence
  SiRNA target sequence
cctccttttcctttgcaattaccaa

SEQ ID NO: 114611 - DNA, 25 bp, Artificial sequence
  SiRNA target sequence
ctccttttcctttgcaattaccaat

SEQ ID NO: 114612 - DNA, 25 bp, Artificial sequence
  SiRNA target sequence
tccttttcctttgcaattaccaata

SEQ ID NO: 114613 - DNA, 25 bp, Artificial sequence
  SiRNA target sequence
ccttttcctttgcaattaccaatag

SEQ ID NO: 114614 - DNA, 25 bp, Artificial sequence
  SiRNA target sequence
cttttcctttgcaattaccaatagc

SEQ ID NO: 114615 - DNA, 25 bp, Artificial sequence
  SiRNA target sequence
ttttcctttgcaattaccaatagcc

SEQ ID NO: 114616 - DNA, 25 bp, Artificial sequence
  SiRNA target sequence
tttcctttgcaattaccaatagcct

SEQ ID NO: 114617 - DNA, 25 bp, Artificial sequence
  SiRNA target sequence
ttcctttgcaattaccaatagcctt

SEQ ID NO: 114618 - DNA, 25 bp, Artificial sequence
  SiRNA target sequence
tcctttgcaattaccaatagccttt

SEQ ID NO: 114619 - DNA, 25 bp, Artificial sequence
  SiRNA target sequence
cctttgcaattaccaatagcctttc

SEQ ID NO: 114620 - DNA, 25 bp, Artificial sequence
  SiRNA target sequence
ctttgcaattaccaatagcctttcc

SEQ ID NO: 114621 - DNA, 25 bp, Artificial sequence
  SiRNA target sequence
tttgcaattaccaatagcctttcct

SEQ ID NO: 114622 - DNA, 25 bp, Artificial sequence
  SiRNA target sequence
ttgcaattaccaatagcctttccta

SEQ ID NO: 114623 - DNA, 25 bp, Artificial sequence
  SiRNA target sequence
tgcaattaccaatagcctttcctaa

SEQ ID NO: 114624 - DNA, 25 bp, Artificial sequence
  SiRNA target sequence
gcaattaccaatagcctttcctaat

SEQ ID NO: 114625 - DNA, 25 bp, Artificial sequence
  SiRNA target sequence
caattaccaatagcctttcctaata

SEQ ID NO: 114626 - DNA, 25 bp, Artificial sequence
  SiRNA target sequence
aattaccaatagcctttcctaataa

SEQ ID NO: 114627 - DNA, 25 bp, Artificial sequence
  SiRNA target sequence
attaccaatagcctttcctaataat

SEQ ID NO: 114628 - DNA, 25 bp, Artificial sequence
  SiRNA target sequence
ttaccaatagcctttcctaataatt

SEQ ID NO: 114629 - DNA, 25 bp, Artificial sequence
  SiRNA target sequence
taccaatagcctttcctaataattc

SEQ ID NO: 114630 - DNA, 25 bp, Artificial sequence
  SiRNA target sequence
accaatagcctttcctaataattcc

SEQ ID NO: 114631 - DNA, 25 bp, Artificial sequence
  SiRNA target sequence
ccaatagcctttcctaataattccc

SEQ ID NO: 114632 - DNA, 25 bp, Artificial sequence
  SiRNA target sequence
caatagcctttcctaataattcccc

SEQ ID NO: 114633 - DNA, 25 bp, Artificial sequence
  SiRNA target sequence
aatagcctttcctaataattcccct

SEQ ID NO: 114634 - DNA, 25 bp, Artificial sequence
  SiRNA target sequence
atagcctttcctaataattccccta

SEQ ID NO: 114635 - DNA, 25 bp, Artificial sequence
  SiRNA target sequence
tagcctttcctaataattcccctat

SEQ ID NO: 114636 - DNA, 25 bp, Artificial sequence
  SiRNA target sequence
agcctttcctaataattcccctata

SEQ ID NO: 114637 - DNA, 25 bp, Artificial sequence
  SiRNA target sequence
gcctttcctaataattcccctataa

SEQ ID NO: 114638 - DNA, 25 bp, Artificial sequence
  SiRNA target sequence
cctttcctaataattcccctataat

SEQ ID NO: 114639 - DNA, 25 bp, Artificial sequence
  SiRNA target sequence
ctttcctaataattcccctataata

SEQ ID NO: 114640 - DNA, 25 bp, Artificial sequence
  SiRNA target sequence
tttcctaataattcccctataatac

SEQ ID NO: 114641 - DNA, 25 bp, Artificial sequence
  SiRNA target sequence
ttcctaataattcccctataatact

SEQ ID NO: 114642 - DNA, 25 bp, Artificial sequence
  SiRNA target sequence
tcctaataattcccctataatactt

SEQ ID NO: 114643 - DNA, 25 bp, Artificial sequence
  SiRNA target sequence
cctaataattcccctataatacttt

SEQ ID NO: 114644 - DNA, 25 bp, Artificial sequence
  SiRNA target sequence
ctaataattcccctataatactttc

SEQ ID NO: 114645 - DNA, 25 bp, Artificial sequence
  SiRNA target sequence
taataattcccctataatactttct

SEQ ID NO: 114646 - DNA, 25 bp, Artificial sequence
  SiRNA target sequence
aataattcccctataatactttcta

SEQ ID NO: 114647 - DNA, 25 bp, Artificial sequence
  SiRNA target sequence
ataattcccctataatactttctat

SEQ ID NO: 114648 - DNA, 25 bp, Artificial sequence
  SiRNA target sequence
taattcccctataatactttctata

SEQ ID NO: 114649 - DNA, 25 bp, Artificial sequence
  SiRNA target sequence
aattcccctataatactttctatac

SEQ ID NO: 114650 - DNA, 25 bp, Artificial sequence
  SiRNA target sequence
attcccctataatactttctatact

SEQ ID NO: 114651 - DNA, 25 bp, Artificial sequence
  SiRNA target sequence
ttcccctataatactttctatactg

SEQ ID NO: 114652 - DNA, 25 bp, Artificial sequence
  SiRNA target sequence
tcccctataatactttctatactga

SEQ ID NO: 114653 - DNA, 25 bp, Artificial sequence
  SiRNA target sequence
cccctataatactttctatactgat

SEQ ID NO: 114654 - DNA, 25 bp, Artificial sequence
  SiRNA target sequence
ccctataatactttctatactgatt

SEQ ID NO: 114655 - DNA, 25 bp, Artificial sequence
  SiRNA target sequence
cctataatactttctatactgattc

SEQ ID NO: 114656 - DNA, 25 bp, Artificial sequence
  SiRNA target sequence
ctataatactttctatactgattcc

SEQ ID NO: 114657 - DNA, 25 bp, Artificial sequence
  SiRNA target sequence
tataatactttctatactgattcca

SEQ ID NO: 114658 - DNA, 25 bp, Artificial sequence
  SiRNA target sequence
ataatactttctatactgattccac

SEQ ID NO: 114659 - DNA, 25 bp, Artificial sequence
  SiRNA target sequence
taatactttctatactgattccaca

SEQ ID NO: 114660 - DNA, 25 bp, Artificial sequence
  SiRNA target sequence
aatactttctatactgattccacaa

SEQ ID NO: 114661 - DNA, 25 bp, Artificial sequence
  SiRNA target sequence
atactttctatactgattccacaaa

SEQ ID NO: 114662 - DNA, 25 bp, Artificial sequence
  SiRNA target sequence
tactttctatactgattccacaaat

SEQ ID NO: 114663 - DNA, 25 bp, Artificial sequence
  SiRNA target sequence
actttctatactgattccacaaata

SEQ ID NO: 114664 - DNA, 25 bp, Artificial sequence
  SiRNA target sequence
ctttctatactgattccacaaataa

SEQ ID NO: 114665 - DNA, 25 bp, Artificial sequence
  SiRNA target sequence
tttctatactgattccacaaataaa

SEQ ID NO: 114666 - DNA, 25 bp, Artificial sequence
  SiRNA target sequence
ttctatactgattccacaaataaat

SEQ ID NO: 114667 - DNA, 25 bp, Artificial sequence
  SiRNA target sequence
tctatactgattccacaaataaatg

SEQ ID NO: 114668 - DNA, 25 bp, Artificial sequence
  SiRNA target sequence
ctatactgattccacaaataaatgc

SEQ ID NO: 114669 - DNA, 25 bp, Artificial sequence
  SiRNA target sequence
tatactgattccacaaataaatgct

SEQ ID NO: 114670 - DNA, 25 bp, Artificial sequence
  SiRNA target sequence
atactgattccacaaataaatgcta

SEQ ID NO: 114671 - DNA, 25 bp, Artificial sequence
  SiRNA target sequence
tactgattccacaaataaatgctaa

SEQ ID NO: 114672 - DNA, 25 bp, Artificial sequence
  SiRNA target sequence
actgattccacaaataaatgctaat

SEQ ID NO: 114673 - DNA, 25 bp, Artificial sequence
  SiRNA target sequence
ctgattccacaaataaatgctaatc

SEQ ID NO: 114674 - DNA, 25 bp, Artificial sequence
  SiRNA target sequence
tgattccacaaataaatgctaatcc

SEQ ID NO: 114675 - DNA, 25 bp, Artificial sequence
  SiRNA target sequence
gattccacaaataaatgctaatcca

SEQ ID NO: 114676 - DNA, 25 bp, Artificial sequence
  SiRNA target sequence
attccacaaataaatgctaatccat

SEQ ID NO: 114677 - DNA, 25 bp, Artificial sequence
  SiRNA target sequence
ttccacaaataaatgctaatccatg

SEQ ID NO: 114678 - DNA, 25 bp, Artificial sequence
  SiRNA target sequence
tccacaaataaatgctaatccatgg

SEQ ID NO: 114679 - DNA, 25 bp, Artificial sequence
  SiRNA target sequence
ccacaaataaatgctaatccatggc

SEQ ID NO: 114680 - DNA, 25 bp, Artificial sequence
  SiRNA target sequence
cacaaataaatgctaatccatggca

SEQ ID NO: 114681 - DNA, 25 bp, Artificial sequence
  SiRNA target sequence
acaaataaatgctaatccatggcat

SEQ ID NO: 114682 - DNA, 25 bp, Artificial sequence
  SiRNA target sequence
caaataaatgctaatccatggcatc

SEQ ID NO: 114683 - DNA, 25 bp, Artificial sequence
  SiRNA target sequence
aaataaatgctaatccatggcatct

SEQ ID NO: 114684 - DNA, 25 bp, Artificial sequence
  SiRNA target sequence
aataaatgctaatccatggcatcta

SEQ ID NO: 114685 - DNA, 25 bp, Artificial sequence
  SiRNA target sequence
ataaatgctaatccatggcatctat

SEQ ID NO: 114686 - DNA, 25 bp, Artificial sequence
  SiRNA target sequence
taaatgctaatccatggcatctata

SEQ ID NO: 114687 - DNA, 25 bp, Artificial sequence
  SiRNA target sequence
aaatgctaatccatggcatctataa

SEQ ID NO: 114688 - DNA, 25 bp, Artificial sequence
  SiRNA target sequence
aatgctaatccatggcatctataag

SEQ ID NO: 114689 - DNA, 25 bp, Artificial sequence
  SiRNA target sequence
atgctaatccatggcatctataaga

SEQ ID NO: 114690 - DNA, 25 bp, Artificial sequence
  SiRNA target sequence
tgctaatccatggcatctataagat

SEQ ID NO: 114691 - DNA, 25 bp, Artificial sequence
  SiRNA target sequence
gctaatccatggcatctataagatc

SEQ ID NO: 114692 - DNA, 25 bp, Artificial sequence
  SiRNA target sequence
ctaatccatggcatctataagatcc

SEQ ID NO: 114693 - DNA, 25 bp, Artificial sequence
  SiRNA target sequence
taatccatggcatctataagatcct

SEQ ID NO: 114694 - DNA, 25 bp, Artificial sequence
  SiRNA target sequence
aatccatggcatctataagatccta

SEQ ID NO: 114695 - DNA, 25 bp, Artificial sequence
  SiRNA target sequence
atccatggcatctataagatcctat

SEQ ID NO: 114696 - DNA, 25 bp, Artificial sequence
  SiRNA target sequence
tccatggcatctataagatcctatg

SEQ ID NO: 114697 - DNA, 25 bp, Artificial sequence
  SiRNA target sequence
ccatggcatctataagatcctatga

SEQ ID NO: 114698 - DNA, 25 bp, Artificial sequence
  SiRNA target sequence
catggcatctataagatcctatgac

SEQ ID NO: 114699 - DNA, 25 bp, Artificial sequence
  SiRNA target sequence
atggcatctataagatcctatgact

SEQ ID NO: 114700 - DNA, 25 bp, Artificial sequence
  SiRNA target sequence
tggcatctataagatcctatgactt

SEQ ID NO: 114701 - DNA, 25 bp, Artificial sequence
  SiRNA target sequence
ggcatctataagatcctatgacttt

SEQ ID NO: 114702 - DNA, 25 bp, Artificial sequence
  SiRNA target sequence
gcatctataagatcctatgacttta

SEQ ID NO: 114703 - DNA, 25 bp, Artificial sequence
  SiRNA target sequence
catctataagatcctatgactttat

SEQ ID NO: 114704 - DNA, 25 bp, Artificial sequence
  SiRNA target sequence
atctataagatcctatgactttatc

SEQ ID NO: 114705 - DNA, 25 bp, Artificial sequence
  SiRNA target sequence
tctataagatcctatgactttatca

SEQ ID NO: 114706 - DNA, 25 bp, Artificial sequence
  SiRNA target sequence
ctataagatcctatgactttatcat

SEQ ID NO: 114707 - DNA, 25 bp, Artificial sequence
  SiRNA target sequence
tataagatcctatgactttatcatt

SEQ ID NO: 114708 - DNA, 25 bp, Artificial sequence
  SiRNA target sequence
ataagatcctatgactttatcattt

SEQ ID NO: 114709 - DNA, 25 bp, Artificial sequence
  SiRNA target sequence
taagatcctatgactttatcatttt

SEQ ID NO: 114710 - DNA, 25 bp, Artificial sequence
  SiRNA target sequence
aagatcctatgactttatcattttt

SEQ ID NO: 114711 - DNA, 25 bp, Artificial sequence
  SiRNA target sequence
agatcctatgactttatcattttta

SEQ ID NO: 114712 - DNA, 25 bp, Artificial sequence
  SiRNA target sequence
gatcctatgactttatcatttttat

SEQ ID NO: 114713 - DNA, 25 bp, Artificial sequence
  SiRNA target sequence
atcctatgactttatcatttttatc

SEQ ID NO: 114714 - DNA, 25 bp, Artificial sequence
  SiRNA target sequence
tcctatgactttatcatttttatct

SEQ ID NO: 114715 - DNA, 25 bp, Artificial sequence
  SiRNA target sequence
cctatgactttatcatttttatcta

SEQ ID NO: 114716 - DNA, 25 bp, Artificial sequence
  SiRNA target sequence
ctatgactttatcatttttatctag

SEQ ID NO: 114717 - DNA, 25 bp, Artificial sequence
  SiRNA target sequence
tatgactttatcatttttatctagt

SEQ ID NO: 114718 - DNA, 25 bp, Artificial sequence
  SiRNA target sequence
atgactttatcatttttatctagta

SEQ ID NO: 114719 - DNA, 25 bp, Artificial sequence
  SiRNA target sequence
tgactttatcatttttatctagtac

SEQ ID NO: 114720 - DNA, 25 bp, Artificial sequence
  SiRNA target sequence
gactttatcatttttatctagtacc

SEQ ID NO: 114721 - DNA, 25 bp, Artificial sequence
  SiRNA target sequence
actttatcatttttatctagtacct

SEQ ID NO: 114722 - DNA, 25 bp, Artificial sequence
  SiRNA target sequence
ctttatcatttttatctagtacctt

SEQ ID NO: 114723 - DNA, 25 bp, Artificial sequence
  SiRNA target sequence
tttatcatttttatctagtaccttt

SEQ ID NO: 114724 - DNA, 25 bp, Artificial sequence
  SiRNA target sequence
ttatcatttttatctagtacctttt

SEQ ID NO: 114725 - DNA, 25 bp, Artificial sequence
  SiRNA target sequence
tatcatttttatctagtaccttttg

SEQ ID NO: 114726 - DNA, 25 bp, Artificial sequence
  SiRNA target sequence
atcatttttatctagtaccttttgt

SEQ ID NO: 114727 - DNA, 25 bp, Artificial sequence
  SiRNA target sequence
tcatttttatctagtaccttttgta

SEQ ID NO: 114728 - DNA, 25 bp, Artificial sequence
  SiRNA target sequence
catttttatctagtaccttttgtaa

SEQ ID NO: 114729 - DNA, 25 bp, Artificial sequence
  SiRNA target sequence
atttttatctagtaccttttgtaaa

SEQ ID NO: 114730 - DNA, 25 bp, Artificial sequence
  SiRNA target sequence
tttttatctagtaccttttgtaaac

SEQ ID NO: 114731 - DNA, 25 bp, Artificial sequence
  SiRNA target sequence
ttttatctagtaccttttgtaaact

SEQ ID NO: 114732 - DNA, 25 bp, Artificial sequence
  SiRNA target sequence
tttatctagtaccttttgtaaactc

SEQ ID NO: 114733 - DNA, 25 bp, Artificial sequence
  SiRNA target sequence
ttatctagtaccttttgtaaactca

SEQ ID NO: 114734 - DNA, 25 bp, Artificial sequence
  SiRNA target sequence
tatctagtaccttttgtaaactcat

SEQ ID NO: 114735 - DNA, 25 bp, Artificial sequence
  SiRNA target sequence
atctagtaccttttgtaaactcata

SEQ ID NO: 114736 - DNA, 25 bp, Artificial sequence
  SiRNA target sequence
tctagtaccttttgtaaactcatat

SEQ ID NO: 114737 - DNA, 25 bp, Artificial sequence
  SiRNA target sequence
ctagtaccttttgtaaactcatata

SEQ ID NO: 114738 - DNA, 25 bp, Artificial sequence
  SiRNA target sequence
tagtaccttttgtaaactcatataa

SEQ ID NO: 114739 - DNA, 25 bp, Artificial sequence
  SiRNA target sequence
agtaccttttgtaaactcatataaa

SEQ ID NO: 114740 - DNA, 25 bp, Artificial sequence
  SiRNA target sequence
gtaccttttgtaaactcatataaat

SEQ ID NO: 114741 - DNA, 25 bp, Artificial sequence
  SiRNA target sequence
taccttttgtaaactcatataaatg

SEQ ID NO: 114742 - DNA, 25 bp, Artificial sequence
  SiRNA target sequence
accttttgtaaactcatataaatgt

SEQ ID NO: 114743 - DNA, 25 bp, Artificial sequence
  SiRNA target sequence
ccttttgtaaactcatataaatgtt

SEQ ID NO: 114744 - DNA, 25 bp, Artificial sequence
  SiRNA target sequence
cttttgtaaactcatataaatgttt

SEQ ID NO: 114745 - DNA, 25 bp, Artificial sequence
  SiRNA target sequence
ttttgtaaactcatataaatgtttt

SEQ ID NO: 114746 - DNA, 25 bp, Artificial sequence
  SiRNA target sequence
tttgtaaactcatataaatgttttc

SEQ ID NO: 114747 - DNA, 25 bp, Artificial sequence
  SiRNA target sequence
ttgtaaactcatataaatgttttcc

SEQ ID NO: 114748 - DNA, 25 bp, Artificial sequence
  SiRNA target sequence
tgtaaactcatataaatgttttcct

SEQ ID NO: 114749 - DNA, 25 bp, Artificial sequence
  SiRNA target sequence
gtaaactcatataaatgttttcctg

SEQ ID NO: 114750 - DNA, 25 bp, Artificial sequence
  SiRNA target sequence
taaactcatataaatgttttcctgt

SEQ ID NO: 114751 - DNA, 25 bp, Artificial sequence
  SiRNA target sequence
aaactcatataaatgttttcctgtc

SEQ ID NO: 114752 - DNA, 25 bp, Artificial sequence
  SiRNA target sequence
aactcatataaatgttttcctgtcc

SEQ ID NO: 114753 - DNA, 25 bp, Artificial sequence
  SiRNA target sequence
actcatataaatgttttcctgtcct

SEQ ID NO: 114754 - DNA, 25 bp, Artificial sequence
  SiRNA target sequence
ctcatataaatgttttcctgtccta

SEQ ID NO: 114755 - DNA, 25 bp, Artificial sequence
  SiRNA target sequence
tcatataaatgttttcctgtcctat

SEQ ID NO: 114756 - DNA, 25 bp, Artificial sequence
  SiRNA target sequence
catataaatgttttcctgtcctatt

SEQ ID NO: 114757 - DNA, 25 bp, Artificial sequence
  SiRNA target sequence
atataaatgttttcctgtcctatta

SEQ ID NO: 114758 - DNA, 25 bp, Artificial sequence
  SiRNA target sequence
tataaatgttttcctgtcctattac

SEQ ID NO: 114759 - DNA, 25 bp, Artificial sequence
  SiRNA target sequence
ataaatgttttcctgtcctattact

SEQ ID NO: 114760 - DNA, 25 bp, Artificial sequence
  SiRNA target sequence
taaatgttttcctgtcctattacta

SEQ ID NO: 114761 - DNA, 25 bp, Artificial sequence
  SiRNA target sequence
aaatgttttcctgtcctattactaa

SEQ ID NO: 114762 - DNA, 25 bp, Artificial sequence
  SiRNA target sequence
aatgttttcctgtcctattactaaa

SEQ ID NO: 114763 - DNA, 25 bp, Artificial sequence
  SiRNA target sequence
atgttttcctgtcctattactaaat

SEQ ID NO: 114764 - DNA, 25 bp, Artificial sequence
  SiRNA target sequence
tgttttcctgtcctattactaaatg

SEQ ID NO: 114765 - DNA, 25 bp, Artificial sequence
  SiRNA target sequence
gttttcctgtcctattactaaatga

SEQ ID NO: 114766 - DNA, 25 bp, Artificial sequence
  SiRNA target sequence
ttttcctgtcctattactaaatgac

SEQ ID NO: 114767 - DNA, 25 bp, Artificial sequence
  SiRNA target sequence
tttcctgtcctattactaaatgaca

SEQ ID NO: 114768 - DNA, 25 bp, Artificial sequence
  SiRNA target sequence
ttcctgtcctattactaaatgacag

SEQ ID NO: 114769 - DNA, 25 bp, Artificial sequence
  SiRNA target sequence
tcctgtcctattactaaatgacaga

SEQ ID NO: 114770 - DNA, 25 bp, Artificial sequence
  SiRNA target sequence
cctgtcctattactaaatgacagaa

SEQ ID NO: 114771 - DNA, 25 bp, Artificial sequence
  SiRNA target sequence
ctgtcctattactaaatgacagaag

SEQ ID NO: 114772 - DNA, 25 bp, Artificial sequence
  SiRNA target sequence
tgtcctattactaaatgacagaagc

SEQ ID NO: 114773 - DNA, 25 bp, Artificial sequence
  SiRNA target sequence
gtcctattactaaatgacagaagcc

SEQ ID NO: 114774 - DNA, 25 bp, Artificial sequence
  SiRNA target sequence
tcctattactaaatgacagaagcct

SEQ ID NO: 114775 - DNA, 25 bp, Artificial sequence
  SiRNA target sequence
cctattactaaatgacagaagcctc

SEQ ID NO: 114776 - DNA, 25 bp, Artificial sequence
  SiRNA target sequence
ctattactaaatgacagaagcctct

SEQ ID NO: 114777 - DNA, 25 bp, Artificial sequence
  SiRNA target sequence
tattactaaatgacagaagcctctt

SEQ ID NO: 114778 - DNA, 25 bp, Artificial sequence
  SiRNA target sequence
attactaaatgacagaagcctctta

SEQ ID NO: 114779 - DNA, 25 bp, Artificial sequence
  SiRNA target sequence
ttactaaatgacagaagcctcttat

SEQ ID NO: 114780 - DNA, 25 bp, Artificial sequence
  SiRNA target sequence
tactaaatgacagaagcctcttata

SEQ ID NO: 114781 - DNA, 25 bp, Artificial sequence
  SiRNA target sequence
actaaatgacagaagcctcttatat

SEQ ID NO: 114782 - DNA, 25 bp, Artificial sequence
  SiRNA target sequence
ctaaatgacagaagcctcttatatt

SEQ ID NO: 114783 - DNA, 25 bp, Artificial sequence
  SiRNA target sequence
taaatgacagaagcctcttatattt

SEQ ID NO: 114784 - DNA, 25 bp, Artificial sequence
  SiRNA target sequence
aaatgacagaagcctcttatatttc

SEQ ID NO: 114785 - DNA, 25 bp, Artificial sequence
  SiRNA target sequence
aatgacagaagcctcttatatttcc

SEQ ID NO: 114786 - DNA, 25 bp, Artificial sequence
  SiRNA target sequence
atgacagaagcctcttatatttcct

SEQ ID NO: 114787 - DNA, 25 bp, Artificial sequence
  SiRNA target sequence
tgacagaagcctcttatatttcctt

SEQ ID NO: 114788 - DNA, 25 bp, Artificial sequence
  SiRNA target sequence
gacagaagcctcttatatttccttt

SEQ ID NO: 114789 - DNA, 25 bp, Artificial sequence
  SiRNA target sequence
acagaagcctcttatatttcctttt

SEQ ID NO: 114790 - DNA, 25 bp, Artificial sequence
  SiRNA target sequence
cagaagcctcttatatttccttttt

SEQ ID NO: 114791 - DNA, 25 bp, Artificial sequence
  SiRNA target sequence
agaagcctcttatatttcctttttt

SEQ ID NO: 114792 - DNA, 25 bp, Artificial sequence
  SiRNA target sequence
gaagcctcttatatttcctttttta

SEQ ID NO: 114793 - DNA, 25 bp, Artificial sequence
  SiRNA target sequence
aagcctcttatatttccttttttat

SEQ ID NO: 114794 - DNA, 25 bp, Artificial sequence
  SiRNA target sequence
agcctcttatatttccttttttata

SEQ ID NO: 114795 - DNA, 25 bp, Artificial sequence
  SiRNA target sequence
gcctcttatatttccttttttatac

SEQ ID NO: 114796 - DNA, 25 bp, Artificial sequence
  SiRNA target sequence
cctcttatatttccttttttatact

SEQ ID NO: 114797 - DNA, 25 bp, Artificial sequence
  SiRNA target sequence
ctcttatatttccttttttatactt

SEQ ID NO: 114798 - DNA, 25 bp, Artificial sequence
  SiRNA target sequence
tcttatatttccttttttatactta

SEQ ID NO: 114799 - DNA, 25 bp, Artificial sequence
  SiRNA target sequence
cttatatttccttttttatacttag

SEQ ID NO: 114800 - DNA, 25 bp, Artificial sequence
  SiRNA target sequence
ttatatttccttttttatacttaga

SEQ ID NO: 114801 - DNA, 25 bp, Artificial sequence
  SiRNA target sequence
tatatttccttttttatacttagag

SEQ ID NO: 114802 - DNA, 25 bp, Artificial sequence
  SiRNA target sequence
atatttccttttttatacttagagt

SEQ ID NO: 114803 - DNA, 25 bp, Artificial sequence
  SiRNA target sequence
tatttccttttttatacttagagtt

SEQ ID NO: 114804 - DNA, 25 bp, Artificial sequence
  SiRNA target sequence
atttccttttttatacttagagtta

SEQ ID NO: 114805 - DNA, 25 bp, Artificial sequence
  SiRNA target sequence
tttccttttttatacttagagttag

SEQ ID NO: 114806 - DNA, 25 bp, Artificial sequence
  SiRNA target sequence
ttccttttttatacttagagttagc

SEQ ID NO: 114807 - DNA, 25 bp, Artificial sequence
  SiRNA target sequence
tccttttttatacttagagttagca

SEQ ID NO: 114808 - DNA, 25 bp, Artificial sequence
  SiRNA target sequence
ccttttttatacttagagttagcat

SEQ ID NO: 114809 - DNA, 25 bp, Artificial sequence
  SiRNA target sequence
cttttttatacttagagttagcata

SEQ ID NO: 114810 - DNA, 25 bp, Artificial sequence
  SiRNA target sequence
ttttttatacttagagttagcatat

SEQ ID NO: 114811 - DNA, 25 bp, Artificial sequence
  SiRNA target sequence
tttttatacttagagttagcatatt

SEQ ID NO: 114812 - DNA, 25 bp, Artificial sequence
  SiRNA target sequence
ttttatacttagagttagcatattc

SEQ ID NO: 114813 - DNA, 25 bp, Artificial sequence
  SiRNA target sequence
tttatacttagagttagcatattct

SEQ ID NO: 114814 - DNA, 25 bp, Artificial sequence
  SiRNA target sequence
ttatacttagagttagcatattctt

SEQ ID NO: 114815 - DNA, 25 bp, Artificial sequence
  SiRNA target sequence
tatacttagagttagcatattcttc

SEQ ID NO: 114816 - DNA, 25 bp, Artificial sequence
  SiRNA target sequence
atacttagagttagcatattcttcg

SEQ ID NO: 114817 - DNA, 25 bp, Artificial sequence
  SiRNA target sequence
tacttagagttagcatattcttcga

SEQ ID NO: 114818 - DNA, 25 bp, Artificial sequence
  SiRNA target sequence
acttagagttagcatattcttcgat

SEQ ID NO: 114819 - DNA, 25 bp, Artificial sequence
  SiRNA target sequence
cttagagttagcatattcttcgata

SEQ ID NO: 114820 - DNA, 25 bp, Artificial sequence
  SiRNA target sequence
ttagagttagcatattcttcgataa

SEQ ID NO: 114821 - DNA, 25 bp, Artificial sequence
  SiRNA target sequence
tagagttagcatattcttcgataag

SEQ ID NO: 114822 - DNA, 25 bp, Artificial sequence
  SiRNA target sequence
agagttagcatattcttcgataaga

SEQ ID NO: 114823 - DNA, 25 bp, Artificial sequence
  SiRNA target sequence
gagttagcatattcttcgataagac

SEQ ID NO: 114824 - DNA, 25 bp, Artificial sequence
  SiRNA target sequence
agttagcatattcttcgataagacg

SEQ ID NO: 114825 - DNA, 25 bp, Artificial sequence
  SiRNA target sequence
gttagcatattcttcgataagacgt

SEQ ID NO: 114826 - DNA, 25 bp, Artificial sequence
  SiRNA target sequence
ttagcatattcttcgataagacgta

SEQ ID NO: 114827 - DNA, 25 bp, Artificial sequence
  SiRNA target sequence
tagcatattcttcgataagacgtag

SEQ ID NO: 114828 - DNA, 25 bp, Artificial sequence
  SiRNA target sequence
agcatattcttcgataagacgtaga

SEQ ID NO: 114829 - DNA, 25 bp, Artificial sequence
  SiRNA target sequence
gcatattcttcgataagacgtagaa

SEQ ID NO: 114830 - DNA, 25 bp, Artificial sequence
  SiRNA target sequence
catattcttcgataagacgtagaat

SEQ ID NO: 114831 - DNA, 25 bp, Artificial sequence
  SiRNA target sequence
atattcttcgataagacgtagaatt

SEQ ID NO: 114832 - DNA, 25 bp, Artificial sequence
  SiRNA target sequence
tattcttcgataagacgtagaatta

SEQ ID NO: 114833 - DNA, 25 bp, Artificial sequence
  SiRNA target sequence
attcttcgataagacgtagaattaa

SEQ ID NO: 114834 - DNA, 25 bp, Artificial sequence
  SiRNA target sequence
ttcttcgataagacgtagaattaac

SEQ ID NO: 114835 - DNA, 25 bp, Artificial sequence
  SiRNA target sequence
tcttcgataagacgtagaattaaca

SEQ ID NO: 114836 - DNA, 25 bp, Artificial sequence
  SiRNA target sequence
cttcgataagacgtagaattaacat

SEQ ID NO: 114837 - DNA, 25 bp, Artificial sequence
  SiRNA target sequence
ttcgataagacgtagaattaacata

SEQ ID NO: 114838 - DNA, 25 bp, Artificial sequence
  SiRNA target sequence
tcgataagacgtagaattaacatat

SEQ ID NO: 114839 - DNA, 25 bp, Artificial sequence
  SiRNA target sequence
cgataagacgtagaattaacatatt

SEQ ID NO: 114840 - DNA, 25 bp, Artificial sequence
  SiRNA target sequence
gataagacgtagaattaacatattt

SEQ ID NO: 114841 - DNA, 25 bp, Artificial sequence
  SiRNA target sequence
ataagacgtagaattaacatatttc

SEQ ID NO: 114842 - DNA, 25 bp, Artificial sequence
  SiRNA target sequence
taagacgtagaattaacatatttct

SEQ ID NO: 114843 - DNA, 25 bp, Artificial sequence
  SiRNA target sequence
aagacgtagaattaacatatttcta

SEQ ID NO: 114844 - DNA, 25 bp, Artificial sequence
  SiRNA target sequence
agacgtagaattaacatatttctat

SEQ ID NO: 114845 - DNA, 25 bp, Artificial sequence
  SiRNA target sequence
gacgtagaattaacatatttctata

SEQ ID NO: 114846 - DNA, 25 bp, Artificial sequence
  SiRNA target sequence
acgtagaattaacatatttctataa

SEQ ID NO: 114847 - DNA, 25 bp, Artificial sequence
  SiRNA target sequence
cgtagaattaacatatttctataaa

SEQ ID NO: 114848 - DNA, 25 bp, Artificial sequence
  SiRNA target sequence
gtagaattaacatatttctataaac

SEQ ID NO: 114849 - DNA, 25 bp, Artificial sequence
  SiRNA target sequence
tagaattaacatatttctataaaca

SEQ ID NO: 114850 - DNA, 25 bp, Artificial sequence
  SiRNA target sequence
agaattaacatatttctataaacat

SEQ ID NO: 114851 - DNA, 25 bp, Artificial sequence
  SiRNA target sequence
gaattaacatatttctataaacatc

SEQ ID NO: 114852 - DNA, 25 bp, Artificial sequence
  SiRNA target sequence
aattaacatatttctataaacatct

SEQ ID NO: 114853 - DNA, 25 bp, Artificial sequence
  SiRNA target sequence
attaacatatttctataaacatctt

SEQ ID NO: 114854 - DNA, 25 bp, Artificial sequence
  SiRNA target sequence
ttaacatatttctataaacatcttg

SEQ ID NO: 114855 - DNA, 25 bp, Artificial sequence
  SiRNA target sequence
taacatatttctataaacatcttgt

SEQ ID NO: 114856 - DNA, 25 bp, Artificial sequence
  SiRNA target sequence
aacatatttctataaacatcttgta

SEQ ID NO: 114857 - DNA, 25 bp, Artificial sequence
  SiRNA target sequence
acatatttctataaacatcttgtac

SEQ ID NO: 114858 - DNA, 25 bp, Artificial sequence
  SiRNA target sequence
catatttctataaacatcttgtaca

SEQ ID NO: 114859 - DNA, 25 bp, Artificial sequence
  SiRNA target sequence
atatttctataaacatcttgtacaa

SEQ ID NO: 114860 - DNA, 25 bp, Artificial sequence
  SiRNA target sequence
tatttctataaacatcttgtacaag

SEQ ID NO: 114861 - DNA, 25 bp, Artificial sequence
  SiRNA target sequence
atttctataaacatcttgtacaagt

SEQ ID NO: 114862 - DNA, 25 bp, Artificial sequence
  SiRNA target sequence
tttctataaacatcttgtacaagtt

SEQ ID NO: 114863 - DNA, 25 bp, Artificial sequence
  SiRNA target sequence
ttctataaacatcttgtacaagttc

SEQ ID NO: 114864 - DNA, 25 bp, Artificial sequence
  SiRNA target sequence
tctataaacatcttgtacaagttct

SEQ ID NO: 114865 - DNA, 25 bp, Artificial sequence
  SiRNA target sequence
ctataaacatcttgtacaagttctt

SEQ ID NO: 114866 - DNA, 25 bp, Artificial sequence
  SiRNA target sequence
tataaacatcttgtacaagttcttt

SEQ ID NO: 114867 - DNA, 25 bp, Artificial sequence
  SiRNA target sequence
ataaacatcttgtacaagttctttg

SEQ ID NO: 114868 - DNA, 25 bp, Artificial sequence
  SiRNA target sequence
taaacatcttgtacaagttctttgt

SEQ ID NO: 114869 - DNA, 25 bp, Artificial sequence
  SiRNA target sequence
aaacatcttgtacaagttctttgtt

SEQ ID NO: 114870 - DNA, 25 bp, Artificial sequence
  SiRNA target sequence
aacatcttgtacaagttctttgttt

SEQ ID NO: 114871 - DNA, 25 bp, Artificial sequence
  SiRNA target sequence
acatcttgtacaagttctttgttta

SEQ ID NO: 114872 - DNA, 25 bp, Artificial sequence
  SiRNA target sequence
catcttgtacaagttctttgtttaa

SEQ ID NO: 114873 - DNA, 25 bp, Artificial sequence
  SiRNA target sequence
atcttgtacaagttctttgtttaaa

SEQ ID NO: 114874 - DNA, 25 bp, Artificial sequence
  SiRNA target sequence
tcttgtacaagttctttgtttaaag

SEQ ID NO: 114875 - DNA, 25 bp, Artificial sequence
  SiRNA target sequence
cttgtacaagttctttgtttaaagt

SEQ ID NO: 114876 - DNA, 25 bp, Artificial sequence
  SiRNA target sequence
ttgtacaagttctttgtttaaagta

SEQ ID NO: 114877 - DNA, 25 bp, Artificial sequence
  SiRNA target sequence
tgtacaagttctttgtttaaagtag

SEQ ID NO: 114878 - DNA, 25 bp, Artificial sequence
  SiRNA target sequence
gtacaagttctttgtttaaagtagt

SEQ ID NO: 114879 - DNA, 25 bp, Artificial sequence
  SiRNA target sequence
tacaagttctttgtttaaagtagtt

SEQ ID NO: 114880 - DNA, 25 bp, Artificial sequence
  SiRNA target sequence
acaagttctttgtttaaagtagttt

SEQ ID NO: 114881 - DNA, 25 bp, Artificial sequence
  SiRNA target sequence
caagttctttgtttaaagtagtttt

SEQ ID NO: 114882 - DNA, 25 bp, Artificial sequence
  SiRNA target sequence
aagttctttgtttaaagtagttttc

SEQ ID NO: 114883 - DNA, 25 bp, Artificial sequence
  SiRNA target sequence
agttctttgtttaaagtagttttca

SEQ ID NO: 114884 - DNA, 25 bp, Artificial sequence
  SiRNA target sequence
gttctttgtttaaagtagttttcag

SEQ ID NO: 114885 - DNA, 25 bp, Artificial sequence
  SiRNA target sequence
ttctttgtttaaagtagttttcagt

SEQ ID NO: 114886 - DNA, 25 bp, Artificial sequence
  SiRNA target sequence
tctttgtttaaagtagttttcagtt

SEQ ID NO: 114887 - DNA, 25 bp, Artificial sequence
  SiRNA target sequence
ctttgtttaaagtagttttcagttt

SEQ ID NO: 114888 - DNA, 25 bp, Artificial sequence
  SiRNA target sequence
tttgtttaaagtagttttcagttta

SEQ ID NO: 114889 - DNA, 25 bp, Artificial sequence
  SiRNA target sequence
ttgtttaaagtagttttcagtttaa

SEQ ID NO: 114890 - DNA, 25 bp, Artificial sequence
  SiRNA target sequence
tgtttaaagtagttttcagtttaac

SEQ ID NO: 114891 - DNA, 25 bp, Artificial sequence
  SiRNA target sequence
gtttaaagtagttttcagtttaact

SEQ ID NO: 114892 - DNA, 25 bp, Artificial sequence
  SiRNA target sequence
tttaaagtagttttcagtttaactg

SEQ ID NO: 114893 - DNA, 25 bp, Artificial sequence
  SiRNA target sequence
ttaaagtagttttcagtttaactgt

SEQ ID NO: 114894 - DNA, 25 bp, Artificial sequence
  SiRNA target sequence
taaagtagttttcagtttaactgta

SEQ ID NO: 114895 - DNA, 25 bp, Artificial sequence
  SiRNA target sequence
aaagtagttttcagtttaactgtat

SEQ ID NO: 114896 - DNA, 25 bp, Artificial sequence
  SiRNA target sequence
aagtagttttcagtttaactgtatt

SEQ ID NO: 114897 - DNA, 25 bp, Artificial sequence
  SiRNA target sequence
agtagttttcagtttaactgtattt

SEQ ID NO: 114898 - DNA, 25 bp, Artificial sequence
  SiRNA target sequence
gtagttttcagtttaactgtatttt

SEQ ID NO: 114899 - DNA, 25 bp, Artificial sequence
  SiRNA target sequence
tagttttcagtttaactgtattttt

SEQ ID NO: 114900 - DNA, 25 bp, Artificial sequence
  SiRNA target sequence
agttttcagtttaactgtattttta

SEQ ID NO: 114901 - DNA, 25 bp, Artificial sequence
  SiRNA target sequence
gttttcagtttaactgtatttttat

SEQ ID NO: 114902 - DNA, 25 bp, Artificial sequence
  SiRNA target sequence
ttttcagtttaactgtatttttatc

SEQ ID NO: 114903 - DNA, 25 bp, Artificial sequence
  SiRNA target sequence
tttcagtttaactgtatttttatct

SEQ ID NO: 114904 - DNA, 25 bp, Artificial sequence
  SiRNA target sequence
ttcagtttaactgtatttttatcta

SEQ ID NO: 114905 - DNA, 25 bp, Artificial sequence
  SiRNA target sequence
tcagtttaactgtatttttatctac

SEQ ID NO: 114906 - DNA, 25 bp, Artificial sequence
  SiRNA target sequence
cagtttaactgtatttttatctacc

SEQ ID NO: 114907 - DNA, 25 bp, Artificial sequence
  SiRNA target sequence
agtttaactgtatttttatctacca

SEQ ID NO: 114908 - DNA, 25 bp, Artificial sequence
  SiRNA target sequence
gtttaactgtatttttatctaccaa

SEQ ID NO: 114909 - DNA, 25 bp, Artificial sequence
  SiRNA target sequence
tttaactgtatttttatctaccaaa

SEQ ID NO: 114910 - DNA, 25 bp, Artificial sequence
  SiRNA target sequence
ttaactgtatttttatctaccaaat

SEQ ID NO: 114911 - DNA, 25 bp, Artificial sequence
  SiRNA target sequence
taactgtatttttatctaccaaata

SEQ ID NO: 114912 - DNA, 25 bp, Artificial sequence
  SiRNA target sequence
aactgtatttttatctaccaaataa

SEQ ID NO: 114913 - DNA, 25 bp, Artificial sequence
  SiRNA target sequence
actgtatttttatctaccaaataat

SEQ ID NO: 114914 - DNA, 25 bp, Artificial sequence
  SiRNA target sequence
ctgtatttttatctaccaaataata

SEQ ID NO: 114915 - DNA, 25 bp, Artificial sequence
  SiRNA target sequence
tgtatttttatctaccaaataataa

SEQ ID NO: 114916 - DNA, 25 bp, Artificial sequence
  SiRNA target sequence
gtatttttatctaccaaataataat

SEQ ID NO: 114917 - DNA, 25 bp, Artificial sequence
  SiRNA target sequence
tatttttatctaccaaataataatc

SEQ ID NO: 114918 - DNA, 25 bp, Artificial sequence
  SiRNA target sequence
atttttatctaccaaataataatct

SEQ ID NO: 114919 - DNA, 25 bp, Artificial sequence
  SiRNA target sequence
tttttatctaccaaataataatcta

SEQ ID NO: 114920 - DNA, 25 bp, Artificial sequence
  SiRNA target sequence
ttttatctaccaaataataatctat

SEQ ID NO: 114921 - DNA, 25 bp, Artificial sequence
  SiRNA target sequence
tttatctaccaaataataatctatc

SEQ ID NO: 114922 - DNA, 25 bp, Artificial sequence
  SiRNA target sequence
ttatctaccaaataataatctatca

SEQ ID NO: 114923 - DNA, 25 bp, Artificial sequence
  SiRNA target sequence
tatctaccaaataataatctatcat

SEQ ID NO: 114924 - DNA, 26 bp, Artificial sequence
  SiRNA target sequence
ttattcagaataaacatcttttaaaa

SEQ ID NO: 114925 - DNA, 26 bp, Artificial sequence
  SiRNA target sequence
tattcagaataaacatcttttaaaag

SEQ ID NO: 114926 - DNA, 26 bp, Artificial sequence
  SiRNA target sequence
attcagaataaacatcttttaaaagt

SEQ ID NO: 114927 - DNA, 26 bp, Artificial sequence
  SiRNA target sequence
ttcagaataaacatcttttaaaagtt

SEQ ID NO: 114928 - DNA, 26 bp, Artificial sequence
  SiRNA target sequence
tcagaataaacatcttttaaaagttc

SEQ ID NO: 114929 - DNA, 26 bp, Artificial sequence
  SiRNA target sequence
cagaataaacatcttttaaaagttca

SEQ ID NO: 114930 - DNA, 26 bp, Artificial sequence
  SiRNA target sequence
agaataaacatcttttaaaagttcat

SEQ ID NO: 114931 - DNA, 26 bp, Artificial sequence
  SiRNA target sequence
gaataaacatcttttaaaagttcatc

SEQ ID NO: 114932 - DNA, 26 bp, Artificial sequence
  SiRNA target sequence
aataaacatcttttaaaagttcatcg

SEQ ID NO: 114933 - DNA, 26 bp, Artificial sequence
  SiRNA target sequence
ataaacatcttttaaaagttcatcga

SEQ ID NO: 114934 - DNA, 26 bp, Artificial sequence
  SiRNA target sequence
taaacatcttttaaaagttcatcgat

SEQ ID NO: 114935 - DNA, 26 bp, Artificial sequence
  SiRNA target sequence
aaacatcttttaaaagttcatcgata

SEQ ID NO: 114936 - DNA, 26 bp, Artificial sequence
  SiRNA target sequence
aacatcttttaaaagttcatcgatat

SEQ ID NO: 114937 - DNA, 26 bp, Artificial sequence
  SiRNA target sequence
acatcttttaaaagttcatcgatatc

SEQ ID NO: 114938 - DNA, 26 bp, Artificial sequence
  SiRNA target sequence
catcttttaaaagttcatcgatatcg

SEQ ID NO: 114939 - DNA, 26 bp, Artificial sequence
  SiRNA target sequence
atcttttaaaagttcatcgatatcgg

SEQ ID NO: 114940 - DNA, 26 bp, Artificial sequence
  SiRNA target sequence
tcttttaaaagttcatcgatatcggg

SEQ ID NO: 114941 - DNA, 26 bp, Artificial sequence
  SiRNA target sequence
cttttaaaagttcatcgatatcgggt

SEQ ID NO: 114942 - DNA, 26 bp, Artificial sequence
  SiRNA target sequence
ttttaaaagttcatcgatatcgggtt

SEQ ID NO: 114943 - DNA, 26 bp, Artificial sequence
  SiRNA target sequence
tttaaaagttcatcgatatcgggttc

SEQ ID NO: 114944 - DNA, 26 bp, Artificial sequence
  SiRNA target sequence
ttaaaagttcatcgatatcgggttct

SEQ ID NO: 114945 - DNA, 26 bp, Artificial sequence
  SiRNA target sequence
taaaagttcatcgatatcgggttctt

SEQ ID NO: 114946 - DNA, 26 bp, Artificial sequence
  SiRNA target sequence
aaaagttcatcgatatcgggttcttt

SEQ ID NO: 114947 - DNA, 26 bp, Artificial sequence
  SiRNA target sequence
aaagttcatcgatatcgggttcttta

SEQ ID NO: 114948 - DNA, 26 bp, Artificial sequence
  SiRNA target sequence
aagttcatcgatatcgggttctttag

SEQ ID NO: 114949 - DNA, 26 bp, Artificial sequence
  SiRNA target sequence
agttcatcgatatcgggttctttaga

SEQ ID NO: 114950 - DNA, 26 bp, Artificial sequence
  SiRNA target sequence
gttcatcgatatcgggttctttagaa

SEQ ID NO: 114951 - DNA, 26 bp, Artificial sequence
  SiRNA target sequence
ttcatcgatatcgggttctttagaaa

SEQ ID NO: 114952 - DNA, 26 bp, Artificial sequence
  SiRNA target sequence
tcatcgatatcgggttctttagaaaa

SEQ ID NO: 114953 - DNA, 26 bp, Artificial sequence
  SiRNA target sequence
catcgatatcgggttctttagaaaaa

SEQ ID NO: 114954 - DNA, 26 bp, Artificial sequence
  SiRNA target sequence
atcgatatcgggttctttagaaaaaa

SEQ ID NO: 114955 - DNA, 26 bp, Artificial sequence
  SiRNA target sequence
tcgatatcgggttctttagaaaaaat

SEQ ID NO: 114956 - DNA, 26 bp, Artificial sequence
  SiRNA target sequence
cgatatcgggttctttagaaaaaata

SEQ ID NO: 114957 - DNA, 26 bp, Artificial sequence
  SiRNA target sequence
gatatcgggttctttagaaaaaataa

SEQ ID NO: 114958 - DNA, 26 bp, Artificial sequence
  SiRNA target sequence
atatcgggttctttagaaaaaataac

SEQ ID NO: 114959 - DNA, 26 bp, Artificial sequence
  SiRNA target sequence
tatcgggttctttagaaaaaataact

SEQ ID NO: 114960 - DNA, 26 bp, Artificial sequence
  SiRNA target sequence
atcgggttctttagaaaaaataactt

SEQ ID NO: 114961 - DNA, 26 bp, Artificial sequence
  SiRNA target sequence
tcgggttctttagaaaaaataacttt

SEQ ID NO: 114962 - DNA, 26 bp, Artificial sequence
  SiRNA target sequence
cgggttctttagaaaaaataactttt

SEQ ID NO: 114963 - DNA, 26 bp, Artificial sequence
  SiRNA target sequence
gggttctttagaaaaaataacttttt

SEQ ID NO: 114964 - DNA, 26 bp, Artificial sequence
  SiRNA target sequence
ggttctttagaaaaaataactttttt

SEQ ID NO: 114965 - DNA, 26 bp, Artificial sequence
  SiRNA target sequence
gttctttagaaaaaataactttttta

SEQ ID NO: 114966 - DNA, 26 bp, Artificial sequence
  SiRNA target sequence
ttctttagaaaaaataacttttttaa

SEQ ID NO: 114967 - DNA, 26 bp, Artificial sequence
  SiRNA target sequence
tctttagaaaaaataacttttttaac

SEQ ID NO: 114968 - DNA, 26 bp, Artificial sequence
  SiRNA target sequence
ctttagaaaaaataacttttttaaca

SEQ ID NO: 114969 - DNA, 26 bp, Artificial sequence
  SiRNA target sequence
tttagaaaaaataacttttttaacac

SEQ ID NO: 114970 - DNA, 26 bp, Artificial sequence
  SiRNA target sequence
ttagaaaaaataacttttttaacacc

SEQ ID NO: 114971 - DNA, 26 bp, Artificial sequence
  SiRNA target sequence
tagaaaaaataacttttttaacacct

SEQ ID NO: 114972 - DNA, 26 bp, Artificial sequence
  SiRNA target sequence
agaaaaaataacttttttaacacctt

SEQ ID NO: 114973 - DNA, 26 bp, Artificial sequence
  SiRNA target sequence
gaaaaaataacttttttaacaccttc

SEQ ID NO: 114974 - DNA, 26 bp, Artificial sequence
  SiRNA target sequence
aaaaaataacttttttaacaccttct

SEQ ID NO: 114975 - DNA, 26 bp, Artificial sequence
  SiRNA target sequence
aaaaataacttttttaacaccttctt

SEQ ID NO: 114976 - DNA, 26 bp, Artificial sequence
  SiRNA target sequence
aaaataacttttttaacaccttcttc

SEQ ID NO: 114977 - DNA, 26 bp, Artificial sequence
  SiRNA target sequence
aaataacttttttaacaccttcttca

SEQ ID NO: 114978 - DNA, 26 bp, Artificial sequence
  SiRNA target sequence
aataacttttttaacaccttcttcaa

SEQ ID NO: 114979 - DNA, 26 bp, Artificial sequence
  SiRNA target sequence
ataacttttttaacaccttcttcaaa

SEQ ID NO: 114980 - DNA, 26 bp, Artificial sequence
  SiRNA target sequence
taacttttttaacaccttcttcaaag

SEQ ID NO: 114981 - DNA, 26 bp, Artificial sequence
  SiRNA target sequence
aacttttttaacaccttcttcaaagc

SEQ ID NO: 114982 - DNA, 26 bp, Artificial sequence
  SiRNA target sequence
acttttttaacaccttcttcaaagca

SEQ ID NO: 114983 - DNA, 26 bp, Artificial sequence
  SiRNA target sequence
cttttttaacaccttcttcaaagcag

SEQ ID NO: 114984 - DNA, 26 bp, Artificial sequence
  SiRNA target sequence
ttttttaacaccttcttcaaagcagg

SEQ ID NO: 114985 - DNA, 26 bp, Artificial sequence
  SiRNA target sequence
tttttaacaccttcttcaaagcagga

SEQ ID NO: 114986 - DNA, 26 bp, Artificial sequence
  SiRNA target sequence
ttttaacaccttcttcaaagcaggaa

SEQ ID NO: 114987 - DNA, 26 bp, Artificial sequence
  SiRNA target sequence
tttaacaccttcttcaaagcaggaaa

SEQ ID NO: 114988 - DNA, 26 bp, Artificial sequence
  SiRNA target sequence
ttaacaccttcttcaaagcaggaaat

SEQ ID NO: 114989 - DNA, 26 bp, Artificial sequence
  SiRNA target sequence
taacaccttcttcaaagcaggaaatt

SEQ ID NO: 114990 - DNA, 26 bp, Artificial sequence
  SiRNA target sequence
aacaccttcttcaaagcaggaaatta

SEQ ID NO: 114991 - DNA, 26 bp, Artificial sequence
  SiRNA target sequence
acaccttcttcaaagcaggaaattac

SEQ ID NO: 114992 - DNA, 26 bp, Artificial sequence
  SiRNA target sequence
caccttcttcaaagcaggaaattacc

SEQ ID NO: 114993 - DNA, 26 bp, Artificial sequence
  SiRNA target sequence
accttcttcaaagcaggaaattacct

SEQ ID NO: 114994 - DNA, 26 bp, Artificial sequence
  SiRNA target sequence
ccttcttcaaagcaggaaattacctc

SEQ ID NO: 114995 - DNA, 26 bp, Artificial sequence
  SiRNA target sequence
cttcttcaaagcaggaaattacctca

SEQ ID NO: 114996 - DNA, 26 bp, Artificial sequence
  SiRNA target sequence
ttcttcaaagcaggaaattacctcat

SEQ ID NO: 114997 - DNA, 26 bp, Artificial sequence
  SiRNA target sequence
tcttcaaagcaggaaattacctcatc

SEQ ID NO: 114998 - DNA, 26 bp, Artificial sequence
  SiRNA target sequence
cttcaaagcaggaaattacctcatct

SEQ ID NO: 114999 - DNA, 26 bp, Artificial sequence
  SiRNA target sequence
ttcaaagcaggaaattacctcatctt

SEQ ID NO: 115000 - DNA, 26 bp, Artificial sequence
  SiRNA target sequence
tcaaagcaggaaattacctcatcttc

SEQ ID NO: 115001 - DNA, 26 bp, Artificial sequence
  SiRNA target sequence
caaagcaggaaattacctcatcttcg

SEQ ID NO: 115002 - DNA, 26 bp, Artificial sequence
  SiRNA target sequence
aaagcaggaaattacctcatcttcga

SEQ ID NO: 115003 - DNA, 26 bp, Artificial sequence
  SiRNA target sequence
aagcaggaaattacctcatcttcgat

SEQ ID NO: 115004 - DNA, 26 bp, Artificial sequence
  SiRNA target sequence
agcaggaaattacctcatcttcgata

SEQ ID NO: 115005 - DNA, 26 bp, Artificial sequence
  SiRNA target sequence
gcaggaaattacctcatcttcgataa

SEQ ID NO: 115006 - DNA, 26 bp, Artificial sequence
  SiRNA target sequence
caggaaattacctcatcttcgataat

SEQ ID NO: 115007 - DNA, 26 bp, Artificial sequence
  SiRNA target sequence
aggaaattacctcatcttcgataatt

SEQ ID NO: 115008 - DNA, 26 bp, Artificial sequence
  SiRNA target sequence
ggaaattacctcatcttcgataattt

SEQ ID NO: 115009 - DNA, 26 bp, Artificial sequence
  SiRNA target sequence
gaaattacctcatcttcgataatttt

SEQ ID NO: 115010 - DNA, 26 bp, Artificial sequence
  SiRNA target sequence
aaattacctcatcttcgataattttt

SEQ ID NO: 115011 - DNA, 26 bp, Artificial sequence
  SiRNA target sequence
aattacctcatcttcgataattttta

SEQ ID NO: 115012 - DNA, 26 bp, Artificial sequence
  SiRNA target sequence
attacctcatcttcgataatttttac

SEQ ID NO: 115013 - DNA, 26 bp, Artificial sequence
  SiRNA target sequence
ttacctcatcttcgataatttttact

SEQ ID NO: 115014 - DNA, 26 bp, Artificial sequence
  SiRNA target sequence
tacctcatcttcgataatttttactt

SEQ ID NO: 115015 - DNA, 26 bp, Artificial sequence
  SiRNA target sequence
acctcatcttcgataatttttacttc

SEQ ID NO: 115016 - DNA, 26 bp, Artificial sequence
  SiRNA target sequence
cctcatcttcgataatttttacttct

SEQ ID NO: 115017 - DNA, 26 bp, Artificial sequence
  SiRNA target sequence
ctcatcttcgataatttttacttctt

SEQ ID NO: 115018 - DNA, 26 bp, Artificial sequence
  SiRNA target sequence
tcatcttcgataatttttacttcttc

SEQ ID NO: 115019 - DNA, 26 bp, Artificial sequence
  SiRNA target sequence
catcttcgataatttttacttcttca

SEQ ID NO: 115020 - DNA, 26 bp, Artificial sequence
  SiRNA target sequence
atcttcgataatttttacttcttcac

SEQ ID NO: 115021 - DNA, 26 bp, Artificial sequence
  SiRNA target sequence
tcttcgataatttttacttcttcaca

SEQ ID NO: 115022 - DNA, 26 bp, Artificial sequence
  SiRNA target sequence
cttcgataatttttacttcttcacaa

SEQ ID NO: 115023 - DNA, 26 bp, Artificial sequence
  SiRNA target sequence
ttcgataatttttacttcttcacaag

SEQ ID NO: 115024 - DNA, 26 bp, Artificial sequence
  SiRNA target sequence
tcgataatttttacttcttcacaagt

SEQ ID NO: 115025 - DNA, 26 bp, Artificial sequence
  SiRNA target sequence
cgataatttttacttcttcacaagtc

SEQ ID NO: 115026 - DNA, 26 bp, Artificial sequence
  SiRNA target sequence
gataatttttacttcttcacaagtcg

SEQ ID NO: 115027 - DNA, 26 bp, Artificial sequence
  SiRNA target sequence
ataatttttacttcttcacaagtcgc

SEQ ID NO: 115028 - DNA, 26 bp, Artificial sequence
  SiRNA target sequence
taatttttacttcttcacaagtcgca

SEQ ID NO: 115029 - DNA, 26 bp, Artificial sequence
  SiRNA target sequence
aatttttacttcttcacaagtcgcaa

SEQ ID NO: 115030 - DNA, 26 bp, Artificial sequence
  SiRNA target sequence
atttttacttcttcacaagtcgcaaa

SEQ ID NO: 115031 - DNA, 26 bp, Artificial sequence
  SiRNA target sequence
tttttacttcttcacaagtcgcaaat

SEQ ID NO: 115032 - DNA, 26 bp, Artificial sequence
  SiRNA target sequence
ttttacttcttcacaagtcgcaaatt

SEQ ID NO: 115033 - DNA, 26 bp, Artificial sequence
  SiRNA target sequence
tttacttcttcacaagtcgcaaattt

SEQ ID NO: 115034 - DNA, 26 bp, Artificial sequence
  SiRNA target sequence
ttacttcttcacaagtcgcaaatttt

SEQ ID NO: 115035 - DNA, 26 bp, Artificial sequence
  SiRNA target sequence
tacttcttcacaagtcgcaaattttt

SEQ ID NO: 115036 - DNA, 26 bp, Artificial sequence
  SiRNA target sequence
acttcttcacaagtcgcaaatttttg

SEQ ID NO: 115037 - DNA, 26 bp, Artificial sequence
  SiRNA target sequence
cttcttcacaagtcgcaaatttttgt

SEQ ID NO: 115038 - DNA, 26 bp, Artificial sequence
  SiRNA target sequence
ttcttcacaagtcgcaaatttttgta

SEQ ID NO: 115039 - DNA, 26 bp, Artificial sequence
  SiRNA target sequence
tcttcacaagtcgcaaatttttgtaa

SEQ ID NO: 115040 - DNA, 26 bp, Artificial sequence
  SiRNA target sequence
cttcacaagtcgcaaatttttgtaag

SEQ ID NO: 115041 - DNA, 26 bp, Artificial sequence
  SiRNA target sequence
ttcacaagtcgcaaatttttgtaagt

SEQ ID NO: 115042 - DNA, 26 bp, Artificial sequence
  SiRNA target sequence
tcacaagtcgcaaatttttgtaagtt

SEQ ID NO: 115043 - DNA, 26 bp, Artificial sequence
  SiRNA target sequence
cacaagtcgcaaatttttgtaagtta

SEQ ID NO: 115044 - DNA, 26 bp, Artificial sequence
  SiRNA target sequence
acaagtcgcaaatttttgtaagttat

SEQ ID NO: 115045 - DNA, 26 bp, Artificial sequence
  SiRNA target sequence
caagtcgcaaatttttgtaagttatt

SEQ ID NO: 115046 - DNA, 26 bp, Artificial sequence
  SiRNA target sequence
aagtcgcaaatttttgtaagttattt

SEQ ID NO: 115047 - DNA, 26 bp, Artificial sequence
  SiRNA target sequence
agtcgcaaatttttgtaagttatttt

SEQ ID NO: 115048 - DNA, 26 bp, Artificial sequence
  SiRNA target sequence
gtcgcaaatttttgtaagttattttt

SEQ ID NO: 115049 - DNA, 26 bp, Artificial sequence
  SiRNA target sequence
tcgcaaatttttgtaagttatttttt

SEQ ID NO: 115050 - DNA, 26 bp, Artificial sequence
  SiRNA target sequence
cgcaaatttttgtaagttattttttg

SEQ ID NO: 115051 - DNA, 26 bp, Artificial sequence
  SiRNA target sequence
gcaaatttttgtaagttattttttgc

SEQ ID NO: 115052 - DNA, 26 bp, Artificial sequence
  SiRNA target sequence
caaatttttgtaagttattttttgct

SEQ ID NO: 115053 - DNA, 26 bp, Artificial sequence
  SiRNA target sequence
aaatttttgtaagttattttttgctt

SEQ ID NO: 115054 - DNA, 26 bp, Artificial sequence
  SiRNA target sequence
aatttttgtaagttattttttgcttc

SEQ ID NO: 115055 - DNA, 26 bp, Artificial sequence
  SiRNA target sequence
atttttgtaagttattttttgcttct

SEQ ID NO: 115056 - DNA, 26 bp, Artificial sequence
  SiRNA target sequence
tttttgtaagttattttttgcttctt

SEQ ID NO: 115057 - DNA, 26 bp, Artificial sequence
  SiRNA target sequence
ttttgtaagttattttttgcttcttt

SEQ ID NO: 115058 - DNA, 26 bp, Artificial sequence
  SiRNA target sequence
tttgtaagttattttttgcttcttta

SEQ ID NO: 115059 - DNA, 26 bp, Artificial sequence
  SiRNA target sequence
ttgtaagttattttttgcttctttaa

SEQ ID NO: 115060 - DNA, 26 bp, Artificial sequence
  SiRNA target sequence
tgtaagttattttttgcttctttaag

SEQ ID NO: 115061 - DNA, 26 bp, Artificial sequence
  SiRNA target sequence
gtaagttattttttgcttctttaagg

SEQ ID NO: 115062 - DNA, 26 bp, Artificial sequence
  SiRNA target sequence
taagttattttttgcttctttaaggc

SEQ ID NO: 115063 - DNA, 26 bp, Artificial sequence
  SiRNA target sequence
aagttattttttgcttctttaaggca

SEQ ID NO: 115064 - DNA, 26 bp, Artificial sequence
  SiRNA target sequence
agttattttttgcttctttaaggcaa

SEQ ID NO: 115065 - DNA, 26 bp, Artificial sequence
  SiRNA target sequence
gttattttttgcttctttaaggcaat

SEQ ID NO: 115066 - DNA, 26 bp, Artificial sequence
  SiRNA target sequence
ttattttttgcttctttaaggcaatc

SEQ ID NO: 115067 - DNA, 26 bp, Artificial sequence
  SiRNA target sequence
tattttttgcttctttaaggcaatca

SEQ ID NO: 115068 - DNA, 26 bp, Artificial sequence
  SiRNA target sequence
attttttgcttctttaaggcaatcat

SEQ ID NO: 115069 - DNA, 26 bp, Artificial sequence
  SiRNA target sequence
ttttttgcttctttaaggcaatcatt

SEQ ID NO: 115070 - DNA, 26 bp, Artificial sequence
  SiRNA target sequence
tttttgcttctttaaggcaatcatta

SEQ ID NO: 115071 - DNA, 26 bp, Artificial sequence
  SiRNA target sequence
ttttgcttctttaaggcaatcattat

SEQ ID NO: 115072 - DNA, 26 bp, Artificial sequence
  SiRNA target sequence
tttgcttctttaaggcaatcattatt

SEQ ID NO: 115073 - DNA, 26 bp, Artificial sequence
  SiRNA target sequence
ttgcttctttaaggcaatcattattt

SEQ ID NO: 115074 - DNA, 26 bp, Artificial sequence
  SiRNA target sequence
tgcttctttaaggcaatcattatttt

SEQ ID NO: 115075 - DNA, 26 bp, Artificial sequence
  SiRNA target sequence
gcttctttaaggcaatcattattttt

SEQ ID NO: 115076 - DNA, 26 bp, Artificial sequence
  SiRNA target sequence
cttctttaaggcaatcattatttttt

SEQ ID NO: 115077 - DNA, 26 bp, Artificial sequence
  SiRNA target sequence
ttctttaaggcaatcattattttttt

SEQ ID NO: 115078 - DNA, 26 bp, Artificial sequence
  SiRNA target sequence
tctttaaggcaatcattatttttttt

SEQ ID NO: 115079 - DNA, 26 bp, Artificial sequence
  SiRNA target sequence
ctttaaggcaatcattattttttttt

SEQ ID NO: 115080 - DNA, 26 bp, Artificial sequence
  SiRNA target sequence
tttaaggcaatcattatttttttttt

SEQ ID NO: 115081 - DNA, 26 bp, Artificial sequence
  SiRNA target sequence
ttaaggcaatcattattttttttttc

SEQ ID NO: 115082 - DNA, 26 bp, Artificial sequence
  SiRNA target sequence
taaggcaatcattattttttttttca

SEQ ID NO: 115083 - DNA, 26 bp, Artificial sequence
  SiRNA target sequence
aaggcaatcattattttttttttcat

SEQ ID NO: 115084 - DNA, 26 bp, Artificial sequence
  SiRNA target sequence
aggcaatcattattttttttttcatt

SEQ ID NO: 115085 - DNA, 26 bp, Artificial sequence
  SiRNA target sequence
ggcaatcattattttttttttcatta

SEQ ID NO: 115086 - DNA, 26 bp, Artificial sequence
  SiRNA target sequence
gcaatcattattttttttttcattaa

SEQ ID NO: 115087 - DNA, 26 bp, Artificial sequence
  SiRNA target sequence
caatcattattttttttttcattaat

SEQ ID NO: 115088 - DNA, 26 bp, Artificial sequence
  SiRNA target sequence
aatcattattttttttttcattaatt

SEQ ID NO: 115089 - DNA, 26 bp, Artificial sequence
  SiRNA target sequence
atcattattttttttttcattaattt

SEQ ID NO: 115090 - DNA, 26 bp, Artificial sequence
  SiRNA target sequence
tcattattttttttttcattaatttc

SEQ ID NO: 115091 - DNA, 26 bp, Artificial sequence
  SiRNA target sequence
cattattttttttttcattaatttcc

SEQ ID NO: 115092 - DNA, 26 bp, Artificial sequence
  SiRNA target sequence
attattttttttttcattaatttcct

SEQ ID NO: 115093 - DNA, 26 bp, Artificial sequence
  SiRNA target sequence
ttattttttttttcattaatttcctc

SEQ ID NO: 115094 - DNA, 26 bp, Artificial sequence
  SiRNA target sequence
tattttttttttcattaatttcctcc

SEQ ID NO: 115095 - DNA, 26 bp, Artificial sequence
  SiRNA target sequence
attttttttttcattaatttcctccg

SEQ ID NO: 115096 - DNA, 26 bp, Artificial sequence
  SiRNA target sequence
ttttttttttcattaatttcctccgt

SEQ ID NO: 115097 - DNA, 26 bp, Artificial sequence
  SiRNA target sequence
tttttttttcattaatttcctccgtg

SEQ ID NO: 115098 - DNA, 26 bp, Artificial sequence
  SiRNA target sequence
ttttttttcattaatttcctccgtgg

SEQ ID NO: 115099 - DNA, 26 bp, Artificial sequence
  SiRNA target sequence
tttttttcattaatttcctccgtgga

SEQ ID NO: 115100 - DNA, 26 bp, Artificial sequence
  SiRNA target sequence
ttttttcattaatttcctccgtggat

SEQ ID NO: 115101 - DNA, 26 bp, Artificial sequence
  SiRNA target sequence
tttttcattaatttcctccgtggatc

SEQ ID NO: 115102 - DNA, 26 bp, Artificial sequence
  SiRNA target sequence
ttttcattaatttcctccgtggatct

SEQ ID NO: 115103 - DNA, 26 bp, Artificial sequence
  SiRNA target sequence
tttcattaatttcctccgtggatctg

SEQ ID NO: 115104 - DNA, 26 bp, Artificial sequence
  SiRNA target sequence
ttcattaatttcctccgtggatctgt

SEQ ID NO: 115105 - DNA, 26 bp, Artificial sequence
  SiRNA target sequence
tcattaatttcctccgtggatctgta

SEQ ID NO: 115106 - DNA, 26 bp, Artificial sequence
  SiRNA target sequence
cattaatttcctccgtggatctgtaa

SEQ ID NO: 115107 - DNA, 26 bp, Artificial sequence
  SiRNA target sequence
attaatttcctccgtggatctgtaaa

SEQ ID NO: 115108 - DNA, 26 bp, Artificial sequence
  SiRNA target sequence
ttaatttcctccgtggatctgtaaaa

SEQ ID NO: 115109 - DNA, 26 bp, Artificial sequence
  SiRNA target sequence
taatttcctccgtggatctgtaaaaa

SEQ ID NO: 115110 - DNA, 26 bp, Artificial sequence
  SiRNA target sequence
aatttcctccgtggatctgtaaaaat

SEQ ID NO: 115111 - DNA, 26 bp, Artificial sequence
  SiRNA target sequence
atttcctccgtggatctgtaaaaatc

SEQ ID NO: 115112 - DNA, 26 bp, Artificial sequence
  SiRNA target sequence
tttcctccgtggatctgtaaaaatcg

SEQ ID NO: 115113 - DNA, 26 bp, Artificial sequence
  SiRNA target sequence
ttcctccgtggatctgtaaaaatcgt

SEQ ID NO: 115114 - DNA, 26 bp, Artificial sequence
  SiRNA target sequence
tcctccgtggatctgtaaaaatcgtt

SEQ ID NO: 115115 - DNA, 26 bp, Artificial sequence
  SiRNA target sequence
cctccgtggatctgtaaaaatcgtta

SEQ ID NO: 115116 - DNA, 26 bp, Artificial sequence
  SiRNA target sequence
ctccgtggatctgtaaaaatcgttaa

SEQ ID NO: 115117 - DNA, 26 bp, Artificial sequence
  SiRNA target sequence
tccgtggatctgtaaaaatcgttaac

SEQ ID NO: 115118 - DNA, 26 bp, Artificial sequence
  SiRNA target sequence
ccgtggatctgtaaaaatcgttaaca

SEQ ID NO: 115119 - DNA, 26 bp, Artificial sequence
  SiRNA target sequence
cgtggatctgtaaaaatcgttaacat

SEQ ID NO: 115120 - DNA, 26 bp, Artificial sequence
  SiRNA target sequence
gtggatctgtaaaaatcgttaacatc

SEQ ID NO: 115121 - DNA, 26 bp, Artificial sequence
  SiRNA target sequence
tggatctgtaaaaatcgttaacatct

SEQ ID NO: 115122 - DNA, 26 bp, Artificial sequence
  SiRNA target sequence
ggatctgtaaaaatcgttaacatcta

SEQ ID NO: 115123 - DNA, 26 bp, Artificial sequence
  SiRNA target sequence
gatctgtaaaaatcgttaacatctaa

SEQ ID NO: 115124 - DNA, 26 bp, Artificial sequence
  SiRNA target sequence
atctgtaaaaatcgttaacatctaaa

SEQ ID NO: 115125 - DNA, 26 bp, Artificial sequence
  SiRNA target sequence
tctgtaaaaatcgttaacatctaaac

SEQ ID NO: 115126 - DNA, 26 bp, Artificial sequence
  SiRNA target sequence
ctgtaaaaatcgttaacatctaaaca

SEQ ID NO: 115127 - DNA, 26 bp, Artificial sequence
  SiRNA target sequence
tgtaaaaatcgttaacatctaaacag

SEQ ID NO: 115128 - DNA, 26 bp, Artificial sequence
  SiRNA target sequence
gtaaaaatcgttaacatctaaacagg

SEQ ID NO: 115129 - DNA, 26 bp, Artificial sequence
  SiRNA target sequence
taaaaatcgttaacatctaaacagga

SEQ ID NO: 115130 - DNA, 26 bp, Artificial sequence
  SiRNA target sequence
aaaaatcgttaacatctaaacaggag

SEQ ID NO: 115131 - DNA, 26 bp, Artificial sequence
  SiRNA target sequence
aaaatcgttaacatctaaacaggagt

SEQ ID NO: 115132 - DNA, 26 bp, Artificial sequence
  SiRNA target sequence
aaatcgttaacatctaaacaggagtg

SEQ ID NO: 115133 - DNA, 26 bp, Artificial sequence
  SiRNA target sequence
aatcgttaacatctaaacaggagtgc

SEQ ID NO: 115134 - DNA, 26 bp, Artificial sequence
  SiRNA target sequence
atcgttaacatctaaacaggagtgcc

SEQ ID NO: 115135 - DNA, 26 bp, Artificial sequence
  SiRNA target sequence
tcgttaacatctaaacaggagtgccc

SEQ ID NO: 115136 - DNA, 26 bp, Artificial sequence
  SiRNA target sequence
cgttaacatctaaacaggagtgccca

SEQ ID NO: 115137 - DNA, 26 bp, Artificial sequence
  SiRNA target sequence
gttaacatctaaacaggagtgcccac

SEQ ID NO: 115138 - DNA, 26 bp, Artificial sequence
  SiRNA target sequence
ttaacatctaaacaggagtgcccaca

SEQ ID NO: 115139 - DNA, 26 bp, Artificial sequence
  SiRNA target sequence
taacatctaaacaggagtgcccacat

SEQ ID NO: 115140 - DNA, 26 bp, Artificial sequence
  SiRNA target sequence
aacatctaaacaggagtgcccacatg

SEQ ID NO: 115141 - DNA, 26 bp, Artificial sequence
  SiRNA target sequence
acatctaaacaggagtgcccacatgt

SEQ ID NO: 115142 - DNA, 26 bp, Artificial sequence
  SiRNA target sequence
catctaaacaggagtgcccacatgtc

SEQ ID NO: 115143 - DNA, 26 bp, Artificial sequence
  SiRNA target sequence
atctaaacaggagtgcccacatgtcc

SEQ ID NO: 115144 - DNA, 26 bp, Artificial sequence
  SiRNA target sequence
tctaaacaggagtgcccacatgtcct

SEQ ID NO: 115145 - DNA, 26 bp, Artificial sequence
  SiRNA target sequence
ctaaacaggagtgcccacatgtcctg

SEQ ID NO: 115146 - DNA, 26 bp, Artificial sequence
  SiRNA target sequence
taaacaggagtgcccacatgtcctgt

SEQ ID NO: 115147 - DNA, 26 bp, Artificial sequence
  SiRNA target sequence
aaacaggagtgcccacatgtcctgta

SEQ ID NO: 115148 - DNA, 26 bp, Artificial sequence
  SiRNA target sequence
aacaggagtgcccacatgtcctgtac

SEQ ID NO: 115149 - DNA, 26 bp, Artificial sequence
  SiRNA target sequence
acaggagtgcccacatgtcctgtacg

SEQ ID NO: 115150 - DNA, 26 bp, Artificial sequence
  SiRNA target sequence
caggagtgcccacatgtcctgtacgt

SEQ ID NO: 115151 - DNA, 26 bp, Artificial sequence
  SiRNA target sequence
aggagtgcccacatgtcctgtacgta

SEQ ID NO: 115152 - DNA, 26 bp, Artificial sequence
  SiRNA target sequence
ggagtgcccacatgtcctgtacgtat

SEQ ID NO: 115153 - DNA, 26 bp, Artificial sequence
  SiRNA target sequence
gagtgcccacatgtcctgtacgtatc

SEQ ID NO: 115154 - DNA, 26 bp, Artificial sequence
  SiRNA target sequence
agtgcccacatgtcctgtacgtatca

SEQ ID NO: 115155 - DNA, 26 bp, Artificial sequence
  SiRNA target sequence
gtgcccacatgtcctgtacgtatcaa

SEQ ID NO: 115156 - DNA, 26 bp, Artificial sequence
  SiRNA target sequence
tgcccacatgtcctgtacgtatcaat

SEQ ID NO: 115157 - DNA, 26 bp, Artificial sequence
  SiRNA target sequence
gcccacatgtcctgtacgtatcaatt

SEQ ID NO: 115158 - DNA, 26 bp, Artificial sequence
  SiRNA target sequence
cccacatgtcctgtacgtatcaattt

SEQ ID NO: 115159 - DNA, 26 bp, Artificial sequence
  SiRNA target sequence
ccacatgtcctgtacgtatcaatttg

SEQ ID NO: 115160 - DNA, 26 bp, Artificial sequence
  SiRNA target sequence
cacatgtcctgtacgtatcaatttgc

SEQ ID NO: 115161 - DNA, 26 bp, Artificial sequence
  SiRNA target sequence
acatgtcctgtacgtatcaatttgca

SEQ ID NO: 115162 - DNA, 26 bp, Artificial sequence
  SiRNA target sequence
catgtcctgtacgtatcaatttgcaa

SEQ ID NO: 115163 - DNA, 26 bp, Artificial sequence
  SiRNA target sequence
atgtcctgtacgtatcaatttgcaag

SEQ ID NO: 115164 - DNA, 26 bp, Artificial sequence
  SiRNA target sequence
tgtcctgtacgtatcaatttgcaaga

SEQ ID NO: 115165 - DNA, 26 bp, Artificial sequence
  SiRNA target sequence
gtcctgtacgtatcaatttgcaagat

SEQ ID NO: 115166 - DNA, 26 bp, Artificial sequence
  SiRNA target sequence
tcctgtacgtatcaatttgcaagatg

SEQ ID NO: 115167 - DNA, 26 bp, Artificial sequence
  SiRNA target sequence
cctgtacgtatcaatttgcaagatga

SEQ ID NO: 115168 - DNA, 26 bp, Artificial sequence
  SiRNA target sequence
ctgtacgtatcaatttgcaagatgat

SEQ ID NO: 115169 - DNA, 26 bp, Artificial sequence
  SiRNA target sequence
tgtacgtatcaatttgcaagatgata

SEQ ID NO: 115170 - DNA, 26 bp, Artificial sequence
  SiRNA target sequence
gtacgtatcaatttgcaagatgatag

SEQ ID NO: 115171 - DNA, 26 bp, Artificial sequence
  SiRNA target sequence
tacgtatcaatttgcaagatgatagg

SEQ ID NO: 115172 - DNA, 26 bp, Artificial sequence
  SiRNA target sequence
acgtatcaatttgcaagatgataggt

SEQ ID NO: 115173 - DNA, 26 bp, Artificial sequence
  SiRNA target sequence
cgtatcaatttgcaagatgataggtc

SEQ ID NO: 115174 - DNA, 26 bp, Artificial sequence
  SiRNA target sequence
gtatcaatttgcaagatgataggtcc

SEQ ID NO: 115175 - DNA, 26 bp, Artificial sequence
  SiRNA target sequence
tatcaatttgcaagatgataggtcct

SEQ ID NO: 115176 - DNA, 26 bp, Artificial sequence
  SiRNA target sequence
atcaatttgcaagatgataggtcctt

SEQ ID NO: 115177 - DNA, 26 bp, Artificial sequence
  SiRNA target sequence
tcaatttgcaagatgataggtccttt

SEQ ID NO: 115178 - DNA, 26 bp, Artificial sequence
  SiRNA target sequence
caatttgcaagatgataggtcctttt

SEQ ID NO: 115179 - DNA, 26 bp, Artificial sequence
  SiRNA target sequence
aatttgcaagatgataggtccttttt

SEQ ID NO: 115180 - DNA, 26 bp, Artificial sequence
  SiRNA target sequence
atttgcaagatgataggtcctttttc

SEQ ID NO: 115181 - DNA, 26 bp, Artificial sequence
  SiRNA target sequence
tttgcaagatgataggtcctttttct

SEQ ID NO: 115182 - DNA, 26 bp, Artificial sequence
  SiRNA target sequence
ttgcaagatgataggtcctttttcta

SEQ ID NO: 115183 - DNA, 26 bp, Artificial sequence
  SiRNA target sequence
tgcaagatgataggtcctttttctat

SEQ ID NO: 115184 - DNA, 26 bp, Artificial sequence
  SiRNA target sequence
gcaagatgataggtcctttttctatt

SEQ ID NO: 115185 - DNA, 26 bp, Artificial sequence
  SiRNA target sequence
caagatgataggtcctttttctattg

SEQ ID NO: 115186 - DNA, 26 bp, Artificial sequence
  SiRNA target sequence
aagatgataggtcctttttctattgc

SEQ ID NO: 115187 - DNA, 26 bp, Artificial sequence
  SiRNA target sequence
agatgataggtcctttttctattgca

SEQ ID NO: 115188 - DNA, 26 bp, Artificial sequence
  SiRNA target sequence
gatgataggtcctttttctattgcat

SEQ ID NO: 115189 - DNA, 26 bp, Artificial sequence
  SiRNA target sequence
atgataggtcctttttctattgcatg

SEQ ID NO: 115190 - DNA, 26 bp, Artificial sequence
  SiRNA target sequence
tgataggtcctttttctattgcatgt

SEQ ID NO: 115191 - DNA, 26 bp, Artificial sequence
  SiRNA target sequence
gataggtcctttttctattgcatgtt

SEQ ID NO: 115192 - DNA, 26 bp, Artificial sequence
  SiRNA target sequence
ataggtcctttttctattgcatgttg

SEQ ID NO: 115193 - DNA, 26 bp, Artificial sequence
  SiRNA target sequence
taggtcctttttctattgcatgttgt

SEQ ID NO: 115194 - DNA, 26 bp, Artificial sequence
  SiRNA target sequence
aggtcctttttctattgcatgttgtc

SEQ ID NO: 115195 - DNA, 26 bp, Artificial sequence
  SiRNA target sequence
ggtcctttttctattgcatgttgtct

SEQ ID NO: 115196 - DNA, 26 bp, Artificial sequence
  SiRNA target sequence
gtcctttttctattgcatgttgtcta

SEQ ID NO: 115197 - DNA, 26 bp, Artificial sequence
  SiRNA target sequence
tcctttttctattgcatgttgtctag

SEQ ID NO: 115198 - DNA, 26 bp, Artificial sequence
  SiRNA target sequence
cctttttctattgcatgttgtctagc

SEQ ID NO: 115199 - DNA, 26 bp, Artificial sequence
  SiRNA target sequence
ctttttctattgcatgttgtctagca

SEQ ID NO: 115200 - DNA, 26 bp, Artificial sequence
  SiRNA target sequence
tttttctattgcatgttgtctagcaa

SEQ ID NO: 115201 - DNA, 26 bp, Artificial sequence
  SiRNA target sequence
ttttctattgcatgttgtctagcaaa

SEQ ID NO: 115202 - DNA, 26 bp, Artificial sequence
  SiRNA target sequence
tttctattgcatgttgtctagcaaat

SEQ ID NO: 115203 - DNA, 26 bp, Artificial sequence
  SiRNA target sequence
ttctattgcatgttgtctagcaaatg

SEQ ID NO: 115204 - DNA, 26 bp, Artificial sequence
  SiRNA target sequence
tctattgcatgttgtctagcaaatgt

SEQ ID NO: 115205 - DNA, 26 bp, Artificial sequence
  SiRNA target sequence
ctattgcatgttgtctagcaaatgta

SEQ ID NO: 115206 - DNA, 26 bp, Artificial sequence
  SiRNA target sequence
tattgcatgttgtctagcaaatgtaa

SEQ ID NO: 115207 - DNA, 26 bp, Artificial sequence
  SiRNA target sequence
attgcatgttgtctagcaaatgtaaa

SEQ ID NO: 115208 - DNA, 26 bp, Artificial sequence
  SiRNA target sequence
ttgcatgttgtctagcaaatgtaaat

SEQ ID NO: 115209 - DNA, 26 bp, Artificial sequence
  SiRNA target sequence
tgcatgttgtctagcaaatgtaaata

SEQ ID NO: 115210 - DNA, 26 bp, Artificial sequence
  SiRNA target sequence
gcatgttgtctagcaaatgtaaatac

SEQ ID NO: 115211 - DNA, 26 bp, Artificial sequence
  SiRNA target sequence
catgttgtctagcaaatgtaaataca

SEQ ID NO: 115212 - DNA, 26 bp, Artificial sequence
  SiRNA target sequence
atgttgtctagcaaatgtaaatacat

SEQ ID NO: 115213 - DNA, 26 bp, Artificial sequence
  SiRNA target sequence
tgttgtctagcaaatgtaaatacatc

SEQ ID NO: 115214 - DNA, 26 bp, Artificial sequence
  SiRNA target sequence
gttgtctagcaaatgtaaatacatca

SEQ ID NO: 115215 - DNA, 26 bp, Artificial sequence
  SiRNA target sequence
ttgtctagcaaatgtaaatacatcaa

SEQ ID NO: 115216 - DNA, 26 bp, Artificial sequence
  SiRNA target sequence
tgtctagcaaatgtaaatacatcaat

SEQ ID NO: 115217 - DNA, 26 bp, Artificial sequence
  SiRNA target sequence
gtctagcaaatgtaaatacatcaatc

SEQ ID NO: 115218 - DNA, 26 bp, Artificial sequence
  SiRNA target sequence
tctagcaaatgtaaatacatcaatca

SEQ ID NO: 115219 - DNA, 26 bp, Artificial sequence
  SiRNA target sequence
ctagcaaatgtaaatacatcaatcag

SEQ ID NO: 115220 - DNA, 26 bp, Artificial sequence
  SiRNA target sequence
tagcaaatgtaaatacatcaatcagt

SEQ ID NO: 115221 - DNA, 26 bp, Artificial sequence
  SiRNA target sequence
agcaaatgtaaatacatcaatcagtt

SEQ ID NO: 115222 - DNA, 26 bp, Artificial sequence
  SiRNA target sequence
gcaaatgtaaatacatcaatcagttg

SEQ ID NO: 115223 - DNA, 26 bp, Artificial sequence
  SiRNA target sequence
caaatgtaaatacatcaatcagttga

SEQ ID NO: 115224 - DNA, 26 bp, Artificial sequence
  SiRNA target sequence
aaatgtaaatacatcaatcagttgag

SEQ ID NO: 115225 - DNA, 26 bp, Artificial sequence
  SiRNA target sequence
aatgtaaatacatcaatcagttgagt

SEQ ID NO: 115226 - DNA, 26 bp, Artificial sequence
  SiRNA target sequence
atgtaaatacatcaatcagttgagtt

SEQ ID NO: 115227 - DNA, 26 bp, Artificial sequence
  SiRNA target sequence
tgtaaatacatcaatcagttgagtta

SEQ ID NO: 115228 - DNA, 26 bp, Artificial sequence
  SiRNA target sequence
gtaaatacatcaatcagttgagttat

SEQ ID NO: 115229 - DNA, 26 bp, Artificial sequence
  SiRNA target sequence
taaatacatcaatcagttgagttatg

SEQ ID NO: 115230 - DNA, 26 bp, Artificial sequence
  SiRNA target sequence
aaatacatcaatcagttgagttatgt

SEQ ID NO: 115231 - DNA, 26 bp, Artificial sequence
  SiRNA target sequence
aatacatcaatcagttgagttatgtt

SEQ ID NO: 115232 - DNA, 26 bp, Artificial sequence
  SiRNA target sequence
atacatcaatcagttgagttatgttt

SEQ ID NO: 115233 - DNA, 26 bp, Artificial sequence
  SiRNA target sequence
tacatcaatcagttgagttatgtttt

SEQ ID NO: 115234 - DNA, 26 bp, Artificial sequence
  SiRNA target sequence
acatcaatcagttgagttatgttttt

SEQ ID NO: 115235 - DNA, 26 bp, Artificial sequence
  SiRNA target sequence
catcaatcagttgagttatgttttta

SEQ ID NO: 115236 - DNA, 26 bp, Artificial sequence
  SiRNA target sequence
atcaatcagttgagttatgtttttat

SEQ ID NO: 115237 - DNA, 26 bp, Artificial sequence
  SiRNA target sequence
tcaatcagttgagttatgtttttatc

SEQ ID NO: 115238 - DNA, 26 bp, Artificial sequence
  SiRNA target sequence
caatcagttgagttatgtttttatct

SEQ ID NO: 115239 - DNA, 26 bp, Artificial sequence
  SiRNA target sequence
aatcagttgagttatgtttttatctg

SEQ ID NO: 115240 - DNA, 26 bp, Artificial sequence
  SiRNA target sequence
atcagttgagttatgtttttatctgt

SEQ ID NO: 115241 - DNA, 26 bp, Artificial sequence
  SiRNA target sequence
tcagttgagttatgtttttatctgta

SEQ ID NO: 115242 - DNA, 26 bp, Artificial sequence
  SiRNA target sequence
cagttgagttatgtttttatctgtaa

SEQ ID NO: 115243 - DNA, 26 bp, Artificial sequence
  SiRNA target sequence
agttgagttatgtttttatctgtaag

SEQ ID NO: 115244 - DNA, 26 bp, Artificial sequence
  SiRNA target sequence
gttgagttatgtttttatctgtaaga

SEQ ID NO: 115245 - DNA, 26 bp, Artificial sequence
  SiRNA target sequence
ttgagttatgtttttatctgtaagac

SEQ ID NO: 115246 - DNA, 26 bp, Artificial sequence
  SiRNA target sequence
tgagttatgtttttatctgtaagacg

SEQ ID NO: 115247 - DNA, 26 bp, Artificial sequence
  SiRNA target sequence
gagttatgtttttatctgtaagacgt

SEQ ID NO: 115248 - DNA, 26 bp, Artificial sequence
  SiRNA target sequence
agttatgtttttatctgtaagacgta

SEQ ID NO: 115249 - DNA, 26 bp, Artificial sequence
  SiRNA target sequence
gttatgtttttatctgtaagacgtat

SEQ ID NO: 115250 - DNA, 26 bp, Artificial sequence
  SiRNA target sequence
ttatgtttttatctgtaagacgtata

SEQ ID NO: 115251 - DNA, 26 bp, Artificial sequence
  SiRNA target sequence
tatgtttttatctgtaagacgtatac

SEQ ID NO: 115252 - DNA, 26 bp, Artificial sequence
  SiRNA target sequence
atgtttttatctgtaagacgtatacc

SEQ ID NO: 115253 - DNA, 26 bp, Artificial sequence
  SiRNA target sequence
tgtttttatctgtaagacgtatacct

SEQ ID NO: 115254 - DNA, 26 bp, Artificial sequence
  SiRNA target sequence
gtttttatctgtaagacgtatacctg

SEQ ID NO: 115255 - DNA, 26 bp, Artificial sequence
  SiRNA target sequence
tttttatctgtaagacgtatacctgg

SEQ ID NO: 115256 - DNA, 26 bp, Artificial sequence
  SiRNA target sequence
ttttatctgtaagacgtatacctgga

SEQ ID NO: 115257 - DNA, 26 bp, Artificial sequence
  SiRNA target sequence
tttatctgtaagacgtatacctggaa

SEQ ID NO: 115258 - DNA, 26 bp, Artificial sequence
  SiRNA target sequence
ttatctgtaagacgtatacctggaat

SEQ ID NO: 115259 - DNA, 26 bp, Artificial sequence
  SiRNA target sequence
tatctgtaagacgtatacctggaata

SEQ ID NO: 115260 - DNA, 26 bp, Artificial sequence
  SiRNA target sequence
atctgtaagacgtatacctggaatat

SEQ ID NO: 115261 - DNA, 26 bp, Artificial sequence
  SiRNA target sequence
tctgtaagacgtatacctggaatatt

SEQ ID NO: 115262 - DNA, 26 bp, Artificial sequence
  SiRNA target sequence
ctgtaagacgtatacctggaatatta

SEQ ID NO: 115263 - DNA, 26 bp, Artificial sequence
  SiRNA target sequence
tgtaagacgtatacctggaatattat

SEQ ID NO: 115264 - DNA, 26 bp, Artificial sequence
  SiRNA target sequence
gtaagacgtatacctggaatattata

SEQ ID NO: 115265 - DNA, 26 bp, Artificial sequence
  SiRNA target sequence
taagacgtatacctggaatattatat

SEQ ID NO: 115266 - DNA, 26 bp, Artificial sequence
  SiRNA target sequence
aagacgtatacctggaatattatatc

SEQ ID NO: 115267 - DNA, 26 bp, Artificial sequence
  SiRNA target sequence
agacgtatacctggaatattatatcc

SEQ ID NO: 115268 - DNA, 26 bp, Artificial sequence
  SiRNA target sequence
gacgtatacctggaatattatatccc

SEQ ID NO: 115269 - DNA, 26 bp, Artificial sequence
  SiRNA target sequence
acgtatacctggaatattatatcccc

SEQ ID NO: 115270 - DNA, 26 bp, Artificial sequence
  SiRNA target sequence
cgtatacctggaatattatatcccct

SEQ ID NO: 115271 - DNA, 26 bp, Artificial sequence
  SiRNA target sequence
gtatacctggaatattatatcccctt

SEQ ID NO: 115272 - DNA, 26 bp, Artificial sequence
  SiRNA target sequence
tatacctggaatattatatccccttt

SEQ ID NO: 115273 - DNA, 26 bp, Artificial sequence
  SiRNA target sequence
atacctggaatattatatcccctttt

SEQ ID NO: 115274 - DNA, 26 bp, Artificial sequence
  SiRNA target sequence
tacctggaatattatatcccctttta

SEQ ID NO: 115275 - DNA, 26 bp, Artificial sequence
  SiRNA target sequence
acctggaatattatatccccttttaa

SEQ ID NO: 115276 - DNA, 26 bp, Artificial sequence
  SiRNA target sequence
cctggaatattatatccccttttaaa

SEQ ID NO: 115277 - DNA, 26 bp, Artificial sequence
  SiRNA target sequence
ctggaatattatatccccttttaaaa

SEQ ID NO: 115278 - DNA, 26 bp, Artificial sequence
  SiRNA target sequence
tggaatattatatccccttttaaaat

SEQ ID NO: 115279 - DNA, 26 bp, Artificial sequence
  SiRNA target sequence
ggaatattatatccccttttaaaata

SEQ ID NO: 115280 - DNA, 26 bp, Artificial sequence
  SiRNA target sequence
gaatattatatccccttttaaaatat

SEQ ID NO: 115281 - DNA, 26 bp, Artificial sequence
  SiRNA target sequence
aatattatatccccttttaaaatatt

SEQ ID NO: 115282 - DNA, 26 bp, Artificial sequence
  SiRNA target sequence
atattatatccccttttaaaatattc

SEQ ID NO: 115283 - DNA, 26 bp, Artificial sequence
  SiRNA target sequence
tattatatccccttttaaaatattca

SEQ ID NO: 115284 - DNA, 26 bp, Artificial sequence
  SiRNA target sequence
attatatccccttttaaaatattcag

SEQ ID NO: 115285 - DNA, 26 bp, Artificial sequence
  SiRNA target sequence
ttatatccccttttaaaatattcagg

SEQ ID NO: 115286 - DNA, 26 bp, Artificial sequence
  SiRNA target sequence
tatatccccttttaaaatattcagga

SEQ ID NO: 115287 - DNA, 26 bp, Artificial sequence
  SiRNA target sequence
atatccccttttaaaatattcaggat

SEQ ID NO: 115288 - DNA, 26 bp, Artificial sequence
  SiRNA target sequence
tatccccttttaaaatattcaggata

SEQ ID NO: 115289 - DNA, 26 bp, Artificial sequence
  SiRNA target sequence
atccccttttaaaatattcaggatat

SEQ ID NO: 115290 - DNA, 26 bp, Artificial sequence
  SiRNA target sequence
tccccttttaaaatattcaggatatg

SEQ ID NO: 115291 - DNA, 26 bp, Artificial sequence
  SiRNA target sequence
ccccttttaaaatattcaggatatgt

SEQ ID NO: 115292 - DNA, 26 bp, Artificial sequence
  SiRNA target sequence
cccttttaaaatattcaggatatgta

SEQ ID NO: 115293 - DNA, 26 bp, Artificial sequence
  SiRNA target sequence
ccttttaaaatattcaggatatgtag

SEQ ID NO: 115294 - DNA, 26 bp, Artificial sequence
  SiRNA target sequence
cttttaaaatattcaggatatgtagt

SEQ ID NO: 115295 - DNA, 26 bp, Artificial sequence
  SiRNA target sequence
ttttaaaatattcaggatatgtagtg

SEQ ID NO: 115296 - DNA, 26 bp, Artificial sequence
  SiRNA target sequence
tttaaaatattcaggatatgtagtgg

SEQ ID NO: 115297 - DNA, 26 bp, Artificial sequence
  SiRNA target sequence
ttaaaatattcaggatatgtagtgga

SEQ ID NO: 115298 - DNA, 26 bp, Artificial sequence
  SiRNA target sequence
taaaatattcaggatatgtagtggaa

SEQ ID NO: 115299 - DNA, 26 bp, Artificial sequence
  SiRNA target sequence
aaaatattcaggatatgtagtggaat

SEQ ID NO: 115300 - DNA, 26 bp, Artificial sequence
  SiRNA target sequence
aaatattcaggatatgtagtggaatt

SEQ ID NO: 115301 - DNA, 26 bp, Artificial sequence
  SiRNA target sequence
aatattcaggatatgtagtggaatta

SEQ ID NO: 115302 - DNA, 26 bp, Artificial sequence
  SiRNA target sequence
atattcaggatatgtagtggaattac

SEQ ID NO: 115303 - DNA, 26 bp, Artificial sequence
  SiRNA target sequence
tattcaggatatgtagtggaattact

SEQ ID NO: 115304 - DNA, 26 bp, Artificial sequence
  SiRNA target sequence
attcaggatatgtagtggaattactt

SEQ ID NO: 115305 - DNA, 26 bp, Artificial sequence
  SiRNA target sequence
ttcaggatatgtagtggaattacttt

SEQ ID NO: 115306 - DNA, 26 bp, Artificial sequence
  SiRNA target sequence
tcaggatatgtagtggaattactttc

SEQ ID NO: 115307 - DNA, 26 bp, Artificial sequence
  SiRNA target sequence
caggatatgtagtggaattactttca

SEQ ID NO: 115308 - DNA, 26 bp, Artificial sequence
  SiRNA target sequence
aggatatgtagtggaattactttcag

SEQ ID NO: 115309 - DNA, 26 bp, Artificial sequence
  SiRNA target sequence
ggatatgtagtggaattactttcagg

SEQ ID NO: 115310 - DNA, 26 bp, Artificial sequence
  SiRNA target sequence
gatatgtagtggaattactttcaggt

SEQ ID NO: 115311 - DNA, 26 bp, Artificial sequence
  SiRNA target sequence
atatgtagtggaattactttcaggtg

SEQ ID NO: 115312 - DNA, 26 bp, Artificial sequence
  SiRNA target sequence
tatgtagtggaattactttcaggtgt

SEQ ID NO: 115313 - DNA, 26 bp, Artificial sequence
  SiRNA target sequence
atgtagtggaattactttcaggtgtc

SEQ ID NO: 115314 - DNA, 26 bp, Artificial sequence
  SiRNA target sequence
tgtagtggaattactttcaggtgtcc

SEQ ID NO: 115315 - DNA, 26 bp, Artificial sequence
  SiRNA target sequence
gtagtggaattactttcaggtgtcca

SEQ ID NO: 115316 - DNA, 26 bp, Artificial sequence
  SiRNA target sequence
tagtggaattactttcaggtgtccac

SEQ ID NO: 115317 - DNA, 26 bp, Artificial sequence
  SiRNA target sequence
agtggaattactttcaggtgtccaca

SEQ ID NO: 115318 - DNA, 26 bp, Artificial sequence
  SiRNA target sequence
gtggaattactttcaggtgtccacat

SEQ ID NO: 115319 - DNA, 26 bp, Artificial sequence
  SiRNA target sequence
tggaattactttcaggtgtccacata

SEQ ID NO: 115320 - DNA, 26 bp, Artificial sequence
  SiRNA target sequence
ggaattactttcaggtgtccacatac

SEQ ID NO: 115321 - DNA, 26 bp, Artificial sequence
  SiRNA target sequence
gaattactttcaggtgtccacatact

SEQ ID NO: 115322 - DNA, 26 bp, Artificial sequence
  SiRNA target sequence
aattactttcaggtgtccacatacta

SEQ ID NO: 115323 - DNA, 26 bp, Artificial sequence
  SiRNA target sequence
attactttcaggtgtccacatactat

SEQ ID NO: 115324 - DNA, 26 bp, Artificial sequence
  SiRNA target sequence
ttactttcaggtgtccacatactata

SEQ ID NO: 115325 - DNA, 26 bp, Artificial sequence
  SiRNA target sequence
tactttcaggtgtccacatactataa

SEQ ID NO: 115326 - DNA, 26 bp, Artificial sequence
  SiRNA target sequence
actttcaggtgtccacatactataat

SEQ ID NO: 115327 - DNA, 26 bp, Artificial sequence
  SiRNA target sequence
ctttcaggtgtccacatactataatg

SEQ ID NO: 115328 - DNA, 26 bp, Artificial sequence
  SiRNA target sequence
tttcaggtgtccacatactataatga

SEQ ID NO: 115329 - DNA, 26 bp, Artificial sequence
  SiRNA target sequence
ttcaggtgtccacatactataatgat

SEQ ID NO: 115330 - DNA, 26 bp, Artificial sequence
  SiRNA target sequence
tcaggtgtccacatactataatgatt

SEQ ID NO: 115331 - DNA, 26 bp, Artificial sequence
  SiRNA target sequence
caggtgtccacatactataatgatta

SEQ ID NO: 115332 - DNA, 26 bp, Artificial sequence
  SiRNA target sequence
aggtgtccacatactataatgattat

SEQ ID NO: 115333 - DNA, 26 bp, Artificial sequence
  SiRNA target sequence
ggtgtccacatactataatgattatt

SEQ ID NO: 115334 - DNA, 26 bp, Artificial sequence
  SiRNA target sequence
gtgtccacatactataatgattattt

SEQ ID NO: 115335 - DNA, 26 bp, Artificial sequence
  SiRNA target sequence
tgtccacatactataatgattatttt

SEQ ID NO: 115336 - DNA, 26 bp, Artificial sequence
  SiRNA target sequence
gtccacatactataatgattattttc

SEQ ID NO: 115337 - DNA, 26 bp, Artificial sequence
  SiRNA target sequence
tccacatactataatgattattttca

SEQ ID NO: 115338 - DNA, 26 bp, Artificial sequence
  SiRNA target sequence
ccacatactataatgattattttcac

SEQ ID NO: 115339 - DNA, 26 bp, Artificial sequence
  SiRNA target sequence
cacatactataatgattattttcaca

SEQ ID NO: 115340 - DNA, 26 bp, Artificial sequence
  SiRNA target sequence
acatactataatgattattttcacat

SEQ ID NO: 115341 - DNA, 26 bp, Artificial sequence
  SiRNA target sequence
catactataatgattattttcacata

SEQ ID NO: 115342 - DNA, 26 bp, Artificial sequence
  SiRNA target sequence
atactataatgattattttcacatac

SEQ ID NO: 115343 - DNA, 26 bp, Artificial sequence
  SiRNA target sequence
tactataatgattattttcacataca

SEQ ID NO: 115344 - DNA, 26 bp, Artificial sequence
  SiRNA target sequence
actataatgattattttcacatacat

SEQ ID NO: 115345 - DNA, 26 bp, Artificial sequence
  SiRNA target sequence
ctataatgattattttcacatacata

SEQ ID NO: 115346 - DNA, 26 bp, Artificial sequence
  SiRNA target sequence
tataatgattattttcacatacataa

SEQ ID NO: 115347 - DNA, 26 bp, Artificial sequence
  SiRNA target sequence
ataatgattattttcacatacataaa

SEQ ID NO: 115348 - DNA, 26 bp, Artificial sequence
  SiRNA target sequence
taatgattattttcacatacataaac

SEQ ID NO: 115349 - DNA, 26 bp, Artificial sequence
  SiRNA target sequence
aatgattattttcacatacataaacc

SEQ ID NO: 115350 - DNA, 26 bp, Artificial sequence
  SiRNA target sequence
atgattattttcacatacataaacca

SEQ ID NO: 115351 - DNA, 26 bp, Artificial sequence
  SiRNA target sequence
tgattattttcacatacataaaccac

SEQ ID NO: 115352 - DNA, 26 bp, Artificial sequence
  SiRNA target sequence
gattattttcacatacataaaccaca

SEQ ID NO: 115353 - DNA, 26 bp, Artificial sequence
  SiRNA target sequence
attattttcacatacataaaccacag

SEQ ID NO: 115354 - DNA, 26 bp, Artificial sequence
  SiRNA target sequence
ttattttcacatacataaaccacagg

SEQ ID NO: 115355 - DNA, 26 bp, Artificial sequence
  SiRNA target sequence
tattttcacatacataaaccacagga

SEQ ID NO: 115356 - DNA, 26 bp, Artificial sequence
  SiRNA target sequence
attttcacatacataaaccacaggaa

SEQ ID NO: 115357 - DNA, 26 bp, Artificial sequence
  SiRNA target sequence
ttttcacatacataaaccacaggaag

SEQ ID NO: 115358 - DNA, 26 bp, Artificial sequence
  SiRNA target sequence
tttcacatacataaaccacaggaagt

SEQ ID NO: 115359 - DNA, 26 bp, Artificial sequence
  SiRNA target sequence
ttcacatacataaaccacaggaagtt

SEQ ID NO: 115360 - DNA, 26 bp, Artificial sequence
  SiRNA target sequence
tcacatacataaaccacaggaagttt

SEQ ID NO: 115361 - DNA, 26 bp, Artificial sequence
  SiRNA target sequence
cacatacataaaccacaggaagtttc

SEQ ID NO: 115362 - DNA, 26 bp, Artificial sequence
  SiRNA target sequence
acatacataaaccacaggaagtttcc

SEQ ID NO: 115363 - DNA, 26 bp, Artificial sequence
  SiRNA target sequence
catacataaaccacaggaagtttcca

SEQ ID NO: 115364 - DNA, 26 bp, Artificial sequence
  SiRNA target sequence
atacataaaccacaggaagtttccat

SEQ ID NO: 115365 - DNA, 26 bp, Artificial sequence
  SiRNA target sequence
tacataaaccacaggaagtttccata

SEQ ID NO: 115366 - DNA, 26 bp, Artificial sequence
  SiRNA target sequence
acataaaccacaggaagtttccataa

SEQ ID NO: 115367 - DNA, 26 bp, Artificial sequence
  SiRNA target sequence
cataaaccacaggaagtttccataat

SEQ ID NO: 115368 - DNA, 26 bp, Artificial sequence
  SiRNA target sequence
ataaaccacaggaagtttccataatg

SEQ ID NO: 115369 - DNA, 26 bp, Artificial sequence
  SiRNA target sequence
taaaccacaggaagtttccataatgc

SEQ ID NO: 115370 - DNA, 26 bp, Artificial sequence
  SiRNA target sequence
aaaccacaggaagtttccataatgca

SEQ ID NO: 115371 - DNA, 26 bp, Artificial sequence
  SiRNA target sequence
aaccacaggaagtttccataatgcag

SEQ ID NO: 115372 - DNA, 26 bp, Artificial sequence
  SiRNA target sequence
accacaggaagtttccataatgcagc

SEQ ID NO: 115373 - DNA, 26 bp, Artificial sequence
  SiRNA target sequence
ccacaggaagtttccataatgcagcc

SEQ ID NO: 115374 - DNA, 26 bp, Artificial sequence
  SiRNA target sequence
cacaggaagtttccataatgcagcca

SEQ ID NO: 115375 - DNA, 26 bp, Artificial sequence
  SiRNA target sequence
acaggaagtttccataatgcagccat

SEQ ID NO: 115376 - DNA, 26 bp, Artificial sequence
  SiRNA target sequence
caggaagtttccataatgcagccata

SEQ ID NO: 115377 - DNA, 26 bp, Artificial sequence
  SiRNA target sequence
aggaagtttccataatgcagccatat

SEQ ID NO: 115378 - DNA, 26 bp, Artificial sequence
  SiRNA target sequence
ggaagtttccataatgcagccatatt

SEQ ID NO: 115379 - DNA, 26 bp, Artificial sequence
  SiRNA target sequence
gaagtttccataatgcagccatattg

SEQ ID NO: 115380 - DNA, 26 bp, Artificial sequence
  SiRNA target sequence
aagtttccataatgcagccatattga

SEQ ID NO: 115381 - DNA, 26 bp, Artificial sequence
  SiRNA target sequence
agtttccataatgcagccatattgaa

SEQ ID NO: 115382 - DNA, 26 bp, Artificial sequence
  SiRNA target sequence
gtttccataatgcagccatattgaac

SEQ ID NO: 115383 - DNA, 26 bp, Artificial sequence
  SiRNA target sequence
tttccataatgcagccatattgaacg

SEQ ID NO: 115384 - DNA, 26 bp, Artificial sequence
  SiRNA target sequence
ttccataatgcagccatattgaacga

SEQ ID NO: 115385 - DNA, 26 bp, Artificial sequence
  SiRNA target sequence
tccataatgcagccatattgaacgac

SEQ ID NO: 115386 - DNA, 26 bp, Artificial sequence
  SiRNA target sequence
ccataatgcagccatattgaacgact

SEQ ID NO: 115387 - DNA, 26 bp, Artificial sequence
  SiRNA target sequence
cataatgcagccatattgaacgactc

SEQ ID NO: 115388 - DNA, 26 bp, Artificial sequence
  SiRNA target sequence
ataatgcagccatattgaacgactcc

SEQ ID NO: 115389 - DNA, 26 bp, Artificial sequence
  SiRNA target sequence
taatgcagccatattgaacgactccc

SEQ ID NO: 115390 - DNA, 26 bp, Artificial sequence
  SiRNA target sequence
aatgcagccatattgaacgactccca

SEQ ID NO: 115391 - DNA, 26 bp, Artificial sequence
  SiRNA target sequence
atgcagccatattgaacgactcccag

SEQ ID NO: 115392 - DNA, 26 bp, Artificial sequence
  SiRNA target sequence
tgcagccatattgaacgactcccaga

SEQ ID NO: 115393 - DNA, 26 bp, Artificial sequence
  SiRNA target sequence
gcagccatattgaacgactcccagac

SEQ ID NO: 115394 - DNA, 26 bp, Artificial sequence
  SiRNA target sequence
cagccatattgaacgactcccagacc

SEQ ID NO: 115395 - DNA, 26 bp, Artificial sequence
  SiRNA target sequence
agccatattgaacgactcccagacct

SEQ ID NO: 115396 - DNA, 26 bp, Artificial sequence
  SiRNA target sequence
gccatattgaacgactcccagacctg

SEQ ID NO: 115397 - DNA, 26 bp, Artificial sequence
  SiRNA target sequence
ccatattgaacgactcccagacctgt

SEQ ID NO: 115398 - DNA, 26 bp, Artificial sequence
  SiRNA target sequence
catattgaacgactcccagacctgtc

SEQ ID NO: 115399 - DNA, 26 bp, Artificial sequence
  SiRNA target sequence
atattgaacgactcccagacctgtcc

SEQ ID NO: 115400 - DNA, 26 bp, Artificial sequence
  SiRNA target sequence
tattgaacgactcccagacctgtccc

SEQ ID NO: 115401 - DNA, 26 bp, Artificial sequence
  SiRNA target sequence
attgaacgactcccagacctgtccct

SEQ ID NO: 115402 - DNA, 26 bp, Artificial sequence
  SiRNA target sequence
ttgaacgactcccagacctgtccctg

SEQ ID NO: 115403 - DNA, 26 bp, Artificial sequence
  SiRNA target sequence
tgaacgactcccagacctgtccctga

SEQ ID NO: 115404 - DNA, 26 bp, Artificial sequence
  SiRNA target sequence
gaacgactcccagacctgtccctgat

SEQ ID NO: 115405 - DNA, 26 bp, Artificial sequence
  SiRNA target sequence
aacgactcccagacctgtccctgatt

SEQ ID NO: 115406 - DNA, 26 bp, Artificial sequence
  SiRNA target sequence
acgactcccagacctgtccctgattt

SEQ ID NO: 115407 - DNA, 26 bp, Artificial sequence
  SiRNA target sequence
cgactcccagacctgtccctgatttg

SEQ ID NO: 115408 - DNA, 26 bp, Artificial sequence
  SiRNA target sequence
gactcccagacctgtccctgatttgc

SEQ ID NO: 115409 - DNA, 26 bp, Artificial sequence
  SiRNA target sequence
actcccagacctgtccctgatttgca

SEQ ID NO: 115410 - DNA, 26 bp, Artificial sequence
  SiRNA target sequence
ctcccagacctgtccctgatttgcag

SEQ ID NO: 115411 - DNA, 26 bp, Artificial sequence
  SiRNA target sequence
tcccagacctgtccctgatttgcagc

SEQ ID NO: 115412 - DNA, 26 bp, Artificial sequence
  SiRNA target sequence
cccagacctgtccctgatttgcagca

SEQ ID NO: 115413 - DNA, 26 bp, Artificial sequence
  SiRNA target sequence
ccagacctgtccctgatttgcagcac

SEQ ID NO: 115414 - DNA, 26 bp, Artificial sequence
  SiRNA target sequence
cagacctgtccctgatttgcagcacc

SEQ ID NO: 115415 - DNA, 26 bp, Artificial sequence
  SiRNA target sequence
agacctgtccctgatttgcagcacca

SEQ ID NO: 115416 - DNA, 26 bp, Artificial sequence
  SiRNA target sequence
gacctgtccctgatttgcagcaccat

SEQ ID NO: 115417 - DNA, 26 bp, Artificial sequence
  SiRNA target sequence
acctgtccctgatttgcagcaccatc

SEQ ID NO: 115418 - DNA, 26 bp, Artificial sequence
  SiRNA target sequence
cctgtccctgatttgcagcaccatcc

SEQ ID NO: 115419 - DNA, 26 bp, Artificial sequence
  SiRNA target sequence
ctgtccctgatttgcagcaccatccc

SEQ ID NO: 115420 - DNA, 26 bp, Artificial sequence
  SiRNA target sequence
tgtccctgatttgcagcaccatcccc

SEQ ID NO: 115421 - DNA, 26 bp, Artificial sequence
  SiRNA target sequence
gtccctgatttgcagcaccatccccg

SEQ ID NO: 115422 - DNA, 26 bp, Artificial sequence
  SiRNA target sequence
tccctgatttgcagcaccatccccga

SEQ ID NO: 115423 - DNA, 26 bp, Artificial sequence
  SiRNA target sequence
ccctgatttgcagcaccatccccgaa

SEQ ID NO: 115424 - DNA, 26 bp, Artificial sequence
  SiRNA target sequence
cctgatttgcagcaccatccccgaaa

SEQ ID NO: 115425 - DNA, 26 bp, Artificial sequence
  SiRNA target sequence
ctgatttgcagcaccatccccgaaaa

SEQ ID NO: 115426 - DNA, 26 bp, Artificial sequence
  SiRNA target sequence
tgatttgcagcaccatccccgaaaaa

SEQ ID NO: 115427 - DNA, 26 bp, Artificial sequence
  SiRNA target sequence
gatttgcagcaccatccccgaaaaat

SEQ ID NO: 115428 - DNA, 26 bp, Artificial sequence
  SiRNA target sequence
atttgcagcaccatccccgaaaaata

SEQ ID NO: 115429 - DNA, 26 bp, Artificial sequence
  SiRNA target sequence
tttgcagcaccatccccgaaaaatac

SEQ ID NO: 115430 - DNA, 26 bp, Artificial sequence
  SiRNA target sequence
ttgcagcaccatccccgaaaaataca

SEQ ID NO: 115431 - DNA, 26 bp, Artificial sequence
  SiRNA target sequence
tgcagcaccatccccgaaaaatacaa

SEQ ID NO: 115432 - DNA, 26 bp, Artificial sequence
  SiRNA target sequence
gcagcaccatccccgaaaaatacaaa

SEQ ID NO: 115433 - DNA, 26 bp, Artificial sequence
  SiRNA target sequence
cagcaccatccccgaaaaatacaaat

SEQ ID NO: 115434 - DNA, 26 bp, Artificial sequence
  SiRNA target sequence
agcaccatccccgaaaaatacaaatg

SEQ ID NO: 115435 - DNA, 26 bp, Artificial sequence
  SiRNA target sequence
gcaccatccccgaaaaatacaaatgc

SEQ ID NO: 115436 - DNA, 26 bp, Artificial sequence
  SiRNA target sequence
caccatccccgaaaaatacaaatgct

SEQ ID NO: 115437 - DNA, 26 bp, Artificial sequence
  SiRNA target sequence
accatccccgaaaaatacaaatgcta

SEQ ID NO: 115438 - DNA, 26 bp, Artificial sequence
  SiRNA target sequence
ccatccccgaaaaatacaaatgctac

SEQ ID NO: 115439 - DNA, 26 bp, Artificial sequence
  SiRNA target sequence
catccccgaaaaatacaaatgctaca

SEQ ID NO: 115440 - DNA, 26 bp, Artificial sequence
  SiRNA target sequence
atccccgaaaaatacaaatgctacat

SEQ ID NO: 115441 - DNA, 26 bp, Artificial sequence
  SiRNA target sequence
tccccgaaaaatacaaatgctacatt

SEQ ID NO: 115442 - DNA, 26 bp, Artificial sequence
  SiRNA target sequence
ccccgaaaaatacaaatgctacattt

SEQ ID NO: 115443 - DNA, 26 bp, Artificial sequence
  SiRNA target sequence
cccgaaaaatacaaatgctacatttt

SEQ ID NO: 115444 - DNA, 26 bp, Artificial sequence
  SiRNA target sequence
ccgaaaaatacaaatgctacattttt

SEQ ID NO: 115445 - DNA, 26 bp, Artificial sequence
  SiRNA target sequence
cgaaaaatacaaatgctacatttttt

SEQ ID NO: 115446 - DNA, 26 bp, Artificial sequence
  SiRNA target sequence
gaaaaatacaaatgctacatttttta

SEQ ID NO: 115447 - DNA, 26 bp, Artificial sequence
  SiRNA target sequence
aaaaatacaaatgctacattttttac

SEQ ID NO: 115448 - DNA, 26 bp, Artificial sequence
  SiRNA target sequence
aaaatacaaatgctacattttttact

SEQ ID NO: 115449 - DNA, 26 bp, Artificial sequence
  SiRNA target sequence
aaatacaaatgctacattttttactt

SEQ ID NO: 115450 - DNA, 26 bp, Artificial sequence
  SiRNA target sequence
aatacaaatgctacattttttacttt

SEQ ID NO: 115451 - DNA, 26 bp, Artificial sequence
  SiRNA target sequence
atacaaatgctacattttttactttt

SEQ ID NO: 115452 - DNA, 26 bp, Artificial sequence
  SiRNA target sequence
tacaaatgctacattttttacttttt

SEQ ID NO: 115453 - DNA, 26 bp, Artificial sequence
  SiRNA target sequence
acaaatgctacattttttactttttt

SEQ ID NO: 115454 - DNA, 26 bp, Artificial sequence
  SiRNA target sequence
caaatgctacattttttactttttta

SEQ ID NO: 115455 - DNA, 26 bp, Artificial sequence
  SiRNA target sequence
aaatgctacattttttacttttttat

SEQ ID NO: 115456 - DNA, 26 bp, Artificial sequence
  SiRNA target sequence
aatgctacattttttacttttttata

SEQ ID NO: 115457 - DNA, 26 bp, Artificial sequence
  SiRNA target sequence
atgctacattttttacttttttatat

SEQ ID NO: 115458 - DNA, 26 bp, Artificial sequence
  SiRNA target sequence
tgctacattttttacttttttatatt

SEQ ID NO: 115459 - DNA, 26 bp, Artificial sequence
  SiRNA target sequence
gctacattttttacttttttatattg

SEQ ID NO: 115460 - DNA, 26 bp, Artificial sequence
  SiRNA target sequence
ctacattttttacttttttatattgt

SEQ ID NO: 115461 - DNA, 26 bp, Artificial sequence
  SiRNA target sequence
tacattttttacttttttatattgta

SEQ ID NO: 115462 - DNA, 26 bp, Artificial sequence
  SiRNA target sequence
acattttttacttttttatattgtaa

SEQ ID NO: 115463 - DNA, 26 bp, Artificial sequence
  SiRNA target sequence
cattttttacttttttatattgtaaa

SEQ ID NO: 115464 - DNA, 26 bp, Artificial sequence
  SiRNA target sequence
attttttacttttttatattgtaaag

SEQ ID NO: 115465 - DNA, 26 bp, Artificial sequence
  SiRNA target sequence
ttttttacttttttatattgtaaagc

SEQ ID NO: 115466 - DNA, 26 bp, Artificial sequence
  SiRNA target sequence
tttttacttttttatattgtaaagca

SEQ ID NO: 115467 - DNA, 26 bp, Artificial sequence
  SiRNA target sequence
ttttacttttttatattgtaaagcaa

SEQ ID NO: 115468 - DNA, 26 bp, Artificial sequence
  SiRNA target sequence
tttacttttttatattgtaaagcaaa

SEQ ID NO: 115469 - DNA, 26 bp, Artificial sequence
  SiRNA target sequence
ttacttttttatattgtaaagcaaat

SEQ ID NO: 115470 - DNA, 26 bp, Artificial sequence
  SiRNA target sequence
tacttttttatattgtaaagcaaatc

SEQ ID NO: 115471 - DNA, 26 bp, Artificial sequence
  SiRNA target sequence
acttttttatattgtaaagcaaatcc

SEQ ID NO: 115472 - DNA, 26 bp, Artificial sequence
  SiRNA target sequence
cttttttatattgtaaagcaaatccc

SEQ ID NO: 115473 - DNA, 26 bp, Artificial sequence
  SiRNA target sequence
ttttttatattgtaaagcaaatccca

SEQ ID NO: 115474 - DNA, 26 bp, Artificial sequence
  SiRNA target sequence
tttttatattgtaaagcaaatcccaa

SEQ ID NO: 115475 - DNA, 26 bp, Artificial sequence
  SiRNA target sequence
ttttatattgtaaagcaaatcccaat

SEQ ID NO: 115476 - DNA, 26 bp, Artificial sequence
  SiRNA target sequence
tttatattgtaaagcaaatcccaatc

SEQ ID NO: 115477 - DNA, 26 bp, Artificial sequence
  SiRNA target sequence
ttatattgtaaagcaaatcccaatcc

SEQ ID NO: 115478 - DNA, 26 bp, Artificial sequence
  SiRNA target sequence
tatattgtaaagcaaatcccaatcct

SEQ ID NO: 115479 - DNA, 26 bp, Artificial sequence
  SiRNA target sequence
atattgtaaagcaaatcccaatcctg

SEQ ID NO: 115480 - DNA, 26 bp, Artificial sequence
  SiRNA target sequence
tattgtaaagcaaatcccaatcctgt

SEQ ID NO: 115481 - DNA, 26 bp, Artificial sequence
  SiRNA target sequence
attgtaaagcaaatcccaatcctgta

SEQ ID NO: 115482 - DNA, 26 bp, Artificial sequence
  SiRNA target sequence
ttgtaaagcaaatcccaatcctgtac

SEQ ID NO: 115483 - DNA, 26 bp, Artificial sequence
  SiRNA target sequence
tgtaaagcaaatcccaatcctgtacc

SEQ ID NO: 115484 - DNA, 26 bp, Artificial sequence
  SiRNA target sequence
gtaaagcaaatcccaatcctgtacca

SEQ ID NO: 115485 - DNA, 26 bp, Artificial sequence
  SiRNA target sequence
taaagcaaatcccaatcctgtaccaa

SEQ ID NO: 115486 - DNA, 26 bp, Artificial sequence
  SiRNA target sequence
aaagcaaatcccaatcctgtaccaag

SEQ ID NO: 115487 - DNA, 26 bp, Artificial sequence
  SiRNA target sequence
aagcaaatcccaatcctgtaccaagc

SEQ ID NO: 115488 - DNA, 26 bp, Artificial sequence
  SiRNA target sequence
agcaaatcccaatcctgtaccaagcg

SEQ ID NO: 115489 - DNA, 26 bp, Artificial sequence
  SiRNA target sequence
gcaaatcccaatcctgtaccaagcga

SEQ ID NO: 115490 - DNA, 26 bp, Artificial sequence
  SiRNA target sequence
caaatcccaatcctgtaccaagcgat

SEQ ID NO: 115491 - DNA, 26 bp, Artificial sequence
  SiRNA target sequence
aaatcccaatcctgtaccaagcgata

SEQ ID NO: 115492 - DNA, 26 bp, Artificial sequence
  SiRNA target sequence
aatcccaatcctgtaccaagcgatac

SEQ ID NO: 115493 - DNA, 26 bp, Artificial sequence
  SiRNA target sequence
atcccaatcctgtaccaagcgatacc

SEQ ID NO: 115494 - DNA, 26 bp, Artificial sequence
  SiRNA target sequence
tcccaatcctgtaccaagcgatacct

SEQ ID NO: 115495 - DNA, 26 bp, Artificial sequence
  SiRNA target sequence
cccaatcctgtaccaagcgatacctg

SEQ ID NO: 115496 - DNA, 26 bp, Artificial sequence
  SiRNA target sequence
ccaatcctgtaccaagcgatacctgc

SEQ ID NO: 115497 - DNA, 26 bp, Artificial sequence
  SiRNA target sequence
caatcctgtaccaagcgatacctgcg

SEQ ID NO: 115498 - DNA, 26 bp, Artificial sequence
  SiRNA target sequence
aatcctgtaccaagcgatacctgcgc

SEQ ID NO: 115499 - DNA, 26 bp, Artificial sequence
  SiRNA target sequence
atcctgtaccaagcgatacctgcgca

SEQ ID NO: 115500 - DNA, 26 bp, Artificial sequence
  SiRNA target sequence
tcctgtaccaagcgatacctgcgcac

SEQ ID NO: 115501 - DNA, 26 bp, Artificial sequence
  SiRNA target sequence
cctgtaccaagcgatacctgcgcacc

SEQ ID NO: 115502 - DNA, 26 bp, Artificial sequence
  SiRNA target sequence
ctgtaccaagcgatacctgcgcacct

SEQ ID NO: 115503 - DNA, 26 bp, Artificial sequence
  SiRNA target sequence
tgtaccaagcgatacctgcgcaccta

SEQ ID NO: 115504 - DNA, 26 bp, Artificial sequence
  SiRNA target sequence
gtaccaagcgatacctgcgcacctac

SEQ ID NO: 115505 - DNA, 26 bp, Artificial sequence
  SiRNA target sequence
taccaagcgatacctgcgcacctact

SEQ ID NO: 115506 - DNA, 26 bp, Artificial sequence
  SiRNA target sequence
accaagcgatacctgcgcacctacta

SEQ ID NO: 115507 - DNA, 26 bp, Artificial sequence
  SiRNA target sequence
ccaagcgatacctgcgcacctactat

SEQ ID NO: 115508 - DNA, 26 bp, Artificial sequence
  SiRNA target sequence
caagcgatacctgcgcacctactata

SEQ ID NO: 115509 - DNA, 26 bp, Artificial sequence
  SiRNA target sequence
aagcgatacctgcgcacctactatac

SEQ ID NO: 115510 - DNA, 26 bp, Artificial sequence
  SiRNA target sequence
agcgatacctgcgcacctactatacc

SEQ ID NO: 115511 - DNA, 26 bp, Artificial sequence
  SiRNA target sequence
gcgatacctgcgcacctactataccg

SEQ ID NO: 115512 - DNA, 26 bp, Artificial sequence
  SiRNA target sequence
cgatacctgcgcacctactataccgt

SEQ ID NO: 115513 - DNA, 26 bp, Artificial sequence
  SiRNA target sequence
gatacctgcgcacctactataccgtg

SEQ ID NO: 115514 - DNA, 26 bp, Artificial sequence
  SiRNA target sequence
atacctgcgcacctactataccgtgt

SEQ ID NO: 115515 - DNA, 26 bp, Artificial sequence
  SiRNA target sequence
tacctgcgcacctactataccgtgtc

SEQ ID NO: 115516 - DNA, 26 bp, Artificial sequence
  SiRNA target sequence
acctgcgcacctactataccgtgtcc

SEQ ID NO: 115517 - DNA, 26 bp, Artificial sequence
  SiRNA target sequence
cctgcgcacctactataccgtgtccc

SEQ ID NO: 115518 - DNA, 26 bp, Artificial sequence
  SiRNA target sequence
ctgcgcacctactataccgtgtcccc

SEQ ID NO: 115519 - DNA, 26 bp, Artificial sequence
  SiRNA target sequence
tgcgcacctactataccgtgtccccc

SEQ ID NO: 115520 - DNA, 26 bp, Artificial sequence
  SiRNA target sequence
gcgcacctactataccgtgtccccca

SEQ ID NO: 115521 - DNA, 26 bp, Artificial sequence
  SiRNA target sequence
cgcacctactataccgtgtcccccat

SEQ ID NO: 115522 - DNA, 26 bp, Artificial sequence
  SiRNA target sequence
gcacctactataccgtgtcccccata

SEQ ID NO: 115523 - DNA, 26 bp, Artificial sequence
  SiRNA target sequence
cacctactataccgtgtcccccataa

SEQ ID NO: 115524 - DNA, 26 bp, Artificial sequence
  SiRNA target sequence
acctactataccgtgtcccccataaa

SEQ ID NO: 115525 - DNA, 26 bp, Artificial sequence
  SiRNA target sequence
cctactataccgtgtcccccataaaa

SEQ ID NO: 115526 - DNA, 26 bp, Artificial sequence
  SiRNA target sequence
ctactataccgtgtcccccataaaat

SEQ ID NO: 115527 - DNA, 26 bp, Artificial sequence
  SiRNA target sequence
tactataccgtgtcccccataaaatt

SEQ ID NO: 115528 - DNA, 26 bp, Artificial sequence
  SiRNA target sequence
actataccgtgtcccccataaaattg

SEQ ID NO: 115529 - DNA, 26 bp, Artificial sequence
  SiRNA target sequence
ctataccgtgtcccccataaaattgg

SEQ ID NO: 115530 - DNA, 26 bp, Artificial sequence
  SiRNA target sequence
tataccgtgtcccccataaaattggt

SEQ ID NO: 115531 - DNA, 26 bp, Artificial sequence
  SiRNA target sequence
ataccgtgtcccccataaaattggtc

SEQ ID NO: 115532 - DNA, 26 bp, Artificial sequence
  SiRNA target sequence
taccgtgtcccccataaaattggtca

SEQ ID NO: 115533 - DNA, 26 bp, Artificial sequence
  SiRNA target sequence
accgtgtcccccataaaattggtcat

SEQ ID NO: 115534 - DNA, 26 bp, Artificial sequence
  SiRNA target sequence
ccgtgtcccccataaaattggtcatt

SEQ ID NO: 115535 - DNA, 26 bp, Artificial sequence
  SiRNA target sequence
cgtgtcccccataaaattggtcatta

SEQ ID NO: 115536 - DNA, 26 bp, Artificial sequence
  SiRNA target sequence
gtgtcccccataaaattggtcattat

SEQ ID NO: 115537 - DNA, 26 bp, Artificial sequence
  SiRNA target sequence
tgtcccccataaaattggtcattata

SEQ ID NO: 115538 - DNA, 26 bp, Artificial sequence
  SiRNA target sequence
gtcccccataaaattggtcattatac

SEQ ID NO: 115539 - DNA, 26 bp, Artificial sequence
  SiRNA target sequence
tcccccataaaattggtcattataca

SEQ ID NO: 115540 - DNA, 26 bp, Artificial sequence
  SiRNA target sequence
cccccataaaattggtcattatacaa

SEQ ID NO: 115541 - DNA, 26 bp, Artificial sequence
  SiRNA target sequence
ccccataaaattggtcattatacaaa

SEQ ID NO: 115542 - DNA, 26 bp, Artificial sequence
  SiRNA target sequence
cccataaaattggtcattatacaaat

SEQ ID NO: 115543 - DNA, 26 bp, Artificial sequence
  SiRNA target sequence
ccataaaattggtcattatacaaatg

SEQ ID NO: 115544 - DNA, 26 bp, Artificial sequence
  SiRNA target sequence
cataaaattggtcattatacaaatgc

SEQ ID NO: 115545 - DNA, 26 bp, Artificial sequence
  SiRNA target sequence
ataaaattggtcattatacaaatgca

SEQ ID NO: 115546 - DNA, 26 bp, Artificial sequence
  SiRNA target sequence
taaaattggtcattatacaaatgcat

SEQ ID NO: 115547 - DNA, 26 bp, Artificial sequence
  SiRNA target sequence
aaaattggtcattatacaaatgcatc

SEQ ID NO: 115548 - DNA, 26 bp, Artificial sequence
  SiRNA target sequence
aaattggtcattatacaaatgcatcg

SEQ ID NO: 115549 - DNA, 26 bp, Artificial sequence
  SiRNA target sequence
aattggtcattatacaaatgcatcga

SEQ ID NO: 115550 - DNA, 26 bp, Artificial sequence
  SiRNA target sequence
attggtcattatacaaatgcatcgat

SEQ ID NO: 115551 - DNA, 26 bp, Artificial sequence
  SiRNA target sequence
ttggtcattatacaaatgcatcgatc

SEQ ID NO: 115552 - DNA, 26 bp, Artificial sequence
  SiRNA target sequence
tggtcattatacaaatgcatcgatcc

SEQ ID NO: 115553 - DNA, 26 bp, Artificial sequence
  SiRNA target sequence
ggtcattatacaaatgcatcgatcct

SEQ ID NO: 115554 - DNA, 26 bp, Artificial sequence
  SiRNA target sequence
gtcattatacaaatgcatcgatcctc

SEQ ID NO: 115555 - DNA, 26 bp, Artificial sequence
  SiRNA target sequence
tcattatacaaatgcatcgatcctcc

SEQ ID NO: 115556 - DNA, 26 bp, Artificial sequence
  SiRNA target sequence
cattatacaaatgcatcgatcctcct

SEQ ID NO: 115557 - DNA, 26 bp, Artificial sequence
  SiRNA target sequence
attatacaaatgcatcgatcctcctt

SEQ ID NO: 115558 - DNA, 26 bp, Artificial sequence
  SiRNA target sequence
ttatacaaatgcatcgatcctccttt

SEQ ID NO: 115559 - DNA, 26 bp, Artificial sequence
  SiRNA target sequence
tatacaaatgcatcgatcctcctttt

SEQ ID NO: 115560 - DNA, 26 bp, Artificial sequence
  SiRNA target sequence
atacaaatgcatcgatcctccttttc

SEQ ID NO: 115561 - DNA, 26 bp, Artificial sequence
  SiRNA target sequence
tacaaatgcatcgatcctccttttcc

SEQ ID NO: 115562 - DNA, 26 bp, Artificial sequence
  SiRNA target sequence
acaaatgcatcgatcctccttttcct

SEQ ID NO: 115563 - DNA, 26 bp, Artificial sequence
  SiRNA target sequence
caaatgcatcgatcctccttttcctt

SEQ ID NO: 115564 - DNA, 26 bp, Artificial sequence
  SiRNA target sequence
aaatgcatcgatcctccttttccttt

SEQ ID NO: 115565 - DNA, 26 bp, Artificial sequence
  SiRNA target sequence
aatgcatcgatcctccttttcctttg

SEQ ID NO: 115566 - DNA, 26 bp, Artificial sequence
  SiRNA target sequence
atgcatcgatcctccttttcctttgc

SEQ ID NO: 115567 - DNA, 26 bp, Artificial sequence
  SiRNA target sequence
tgcatcgatcctccttttcctttgca

SEQ ID NO: 115568 - DNA, 26 bp, Artificial sequence
  SiRNA target sequence
gcatcgatcctccttttcctttgcaa

SEQ ID NO: 115569 - DNA, 26 bp, Artificial sequence
  SiRNA target sequence
catcgatcctccttttcctttgcaat

SEQ ID NO: 115570 - DNA, 26 bp, Artificial sequence
  SiRNA target sequence
atcgatcctccttttcctttgcaatt

SEQ ID NO: 115571 - DNA, 26 bp, Artificial sequence
  SiRNA target sequence
tcgatcctccttttcctttgcaatta

SEQ ID NO: 115572 - DNA, 26 bp, Artificial sequence
  SiRNA target sequence
cgatcctccttttcctttgcaattac

SEQ ID NO: 115573 - DNA, 26 bp, Artificial sequence
  SiRNA target sequence
gatcctccttttcctttgcaattacc

SEQ ID NO: 115574 - DNA, 26 bp, Artificial sequence
  SiRNA target sequence
atcctccttttcctttgcaattacca

SEQ ID NO: 115575 - DNA, 26 bp, Artificial sequence
  SiRNA target sequence
tcctccttttcctttgcaattaccaa

SEQ ID NO: 115576 - DNA, 26 bp, Artificial sequence
  SiRNA target sequence
cctccttttcctttgcaattaccaat

SEQ ID NO: 115577 - DNA, 26 bp, Artificial sequence
  SiRNA target sequence
ctccttttcctttgcaattaccaata

SEQ ID NO: 115578 - DNA, 26 bp, Artificial sequence
  SiRNA target sequence
tccttttcctttgcaattaccaatag

SEQ ID NO: 115579 - DNA, 26 bp, Artificial sequence
  SiRNA target sequence
ccttttcctttgcaattaccaatagc

SEQ ID NO: 115580 - DNA, 26 bp, Artificial sequence
  SiRNA target sequence
cttttcctttgcaattaccaatagcc

SEQ ID NO: 115581 - DNA, 26 bp, Artificial sequence
  SiRNA target sequence
ttttcctttgcaattaccaatagcct

SEQ ID NO: 115582 - DNA, 26 bp, Artificial sequence
  SiRNA target sequence
tttcctttgcaattaccaatagcctt

SEQ ID NO: 115583 - DNA, 26 bp, Artificial sequence
  SiRNA target sequence
ttcctttgcaattaccaatagccttt

SEQ ID NO: 115584 - DNA, 26 bp, Artificial sequence
  SiRNA target sequence
tcctttgcaattaccaatagcctttc

SEQ ID NO: 115585 - DNA, 26 bp, Artificial sequence
  SiRNA target sequence
cctttgcaattaccaatagcctttcc

SEQ ID NO: 115586 - DNA, 26 bp, Artificial sequence
  SiRNA target sequence
ctttgcaattaccaatagcctttcct

SEQ ID NO: 115587 - DNA, 26 bp, Artificial sequence
  SiRNA target sequence
tttgcaattaccaatagcctttccta

SEQ ID NO: 115588 - DNA, 26 bp, Artificial sequence
  SiRNA target sequence
ttgcaattaccaatagcctttcctaa

SEQ ID NO: 115589 - DNA, 26 bp, Artificial sequence
  SiRNA target sequence
tgcaattaccaatagcctttcctaat

SEQ ID NO: 115590 - DNA, 26 bp, Artificial sequence
  SiRNA target sequence
gcaattaccaatagcctttcctaata

SEQ ID NO: 115591 - DNA, 26 bp, Artificial sequence
  SiRNA target sequence
caattaccaatagcctttcctaataa

SEQ ID NO: 115592 - DNA, 26 bp, Artificial sequence
  SiRNA target sequence
aattaccaatagcctttcctaataat

SEQ ID NO: 115593 - DNA, 26 bp, Artificial sequence
  SiRNA target sequence
attaccaatagcctttcctaataatt

SEQ ID NO: 115594 - DNA, 26 bp, Artificial sequence
  SiRNA target sequence
ttaccaatagcctttcctaataattc

SEQ ID NO: 115595 - DNA, 26 bp, Artificial sequence
  SiRNA target sequence
taccaatagcctttcctaataattcc

SEQ ID NO: 115596 - DNA, 26 bp, Artificial sequence
  SiRNA target sequence
accaatagcctttcctaataattccc

SEQ ID NO: 115597 - DNA, 26 bp, Artificial sequence
  SiRNA target sequence
ccaatagcctttcctaataattcccc

SEQ ID NO: 115598 - DNA, 26 bp, Artificial sequence
  SiRNA target sequence
caatagcctttcctaataattcccct

SEQ ID NO: 115599 - DNA, 26 bp, Artificial sequence
  SiRNA target sequence
aatagcctttcctaataattccccta

SEQ ID NO: 115600 - DNA, 26 bp, Artificial sequence
  SiRNA target sequence
atagcctttcctaataattcccctat

SEQ ID NO: 115601 - DNA, 26 bp, Artificial sequence
  SiRNA target sequence
tagcctttcctaataattcccctata

SEQ ID NO: 115602 - DNA, 26 bp, Artificial sequence
  SiRNA target sequence
agcctttcctaataattcccctataa

SEQ ID NO: 115603 - DNA, 26 bp, Artificial sequence
  SiRNA target sequence
gcctttcctaataattcccctataat

SEQ ID NO: 115604 - DNA, 26 bp, Artificial sequence
  SiRNA target sequence
cctttcctaataattcccctataata

SEQ ID NO: 115605 - DNA, 26 bp, Artificial sequence
  SiRNA target sequence
ctttcctaataattcccctataatac

SEQ ID NO: 115606 - DNA, 26 bp, Artificial sequence
  SiRNA target sequence
tttcctaataattcccctataatact

SEQ ID NO: 115607 - DNA, 26 bp, Artificial sequence
  SiRNA target sequence
ttcctaataattcccctataatactt

SEQ ID NO: 115608 - DNA, 26 bp, Artificial sequence
  SiRNA target sequence
tcctaataattcccctataatacttt

SEQ ID NO: 115609 - DNA, 26 bp, Artificial sequence
  SiRNA target sequence
cctaataattcccctataatactttc

SEQ ID NO: 115610 - DNA, 26 bp, Artificial sequence
  SiRNA target sequence
ctaataattcccctataatactttct

SEQ ID NO: 115611 - DNA, 26 bp, Artificial sequence
  SiRNA target sequence
taataattcccctataatactttcta

SEQ ID NO: 115612 - DNA, 26 bp, Artificial sequence
  SiRNA target sequence
aataattcccctataatactttctat

SEQ ID NO: 115613 - DNA, 26 bp, Artificial sequence
  SiRNA target sequence
ataattcccctataatactttctata

SEQ ID NO: 115614 - DNA, 26 bp, Artificial sequence
  SiRNA target sequence
taattcccctataatactttctatac

SEQ ID NO: 115615 - DNA, 26 bp, Artificial sequence
  SiRNA target sequence
aattcccctataatactttctatact

SEQ ID NO: 115616 - DNA, 26 bp, Artificial sequence
  SiRNA target sequence
attcccctataatactttctatactg

SEQ ID NO: 115617 - DNA, 26 bp, Artificial sequence
  SiRNA target sequence
ttcccctataatactttctatactga

SEQ ID NO: 115618 - DNA, 26 bp, Artificial sequence
  SiRNA target sequence
tcccctataatactttctatactgat

SEQ ID NO: 115619 - DNA, 26 bp, Artificial sequence
  SiRNA target sequence
cccctataatactttctatactgatt

SEQ ID NO: 115620 - DNA, 26 bp, Artificial sequence
  SiRNA target sequence
ccctataatactttctatactgattc

SEQ ID NO: 115621 - DNA, 26 bp, Artificial sequence
  SiRNA target sequence
cctataatactttctatactgattcc

SEQ ID NO: 115622 - DNA, 26 bp, Artificial sequence
  SiRNA target sequence
ctataatactttctatactgattcca

SEQ ID NO: 115623 - DNA, 26 bp, Artificial sequence
  SiRNA target sequence
tataatactttctatactgattccac

SEQ ID NO: 115624 - DNA, 26 bp, Artificial sequence
  SiRNA target sequence
ataatactttctatactgattccaca

SEQ ID NO: 115625 - DNA, 26 bp, Artificial sequence
  SiRNA target sequence
taatactttctatactgattccacaa

SEQ ID NO: 115626 - DNA, 26 bp, Artificial sequence
  SiRNA target sequence
aatactttctatactgattccacaaa

SEQ ID NO: 115627 - DNA, 26 bp, Artificial sequence
  SiRNA target sequence
atactttctatactgattccacaaat

SEQ ID NO: 115628 - DNA, 26 bp, Artificial sequence
  SiRNA target sequence
tactttctatactgattccacaaata

SEQ ID NO: 115629 - DNA, 26 bp, Artificial sequence
  SiRNA target sequence
actttctatactgattccacaaataa

SEQ ID NO: 115630 - DNA, 26 bp, Artificial sequence
  SiRNA target sequence
ctttctatactgattccacaaataaa

SEQ ID NO: 115631 - DNA, 26 bp, Artificial sequence
  SiRNA target sequence
tttctatactgattccacaaataaat

SEQ ID NO: 115632 - DNA, 26 bp, Artificial sequence
  SiRNA target sequence
ttctatactgattccacaaataaatg

SEQ ID NO: 115633 - DNA, 26 bp, Artificial sequence
  SiRNA target sequence
tctatactgattccacaaataaatgc

SEQ ID NO: 115634 - DNA, 26 bp, Artificial sequence
  SiRNA target sequence
ctatactgattccacaaataaatgct

SEQ ID NO: 115635 - DNA, 26 bp, Artificial sequence
  SiRNA target sequence
tatactgattccacaaataaatgcta

SEQ ID NO: 115636 - DNA, 26 bp, Artificial sequence
  SiRNA target sequence
atactgattccacaaataaatgctaa

SEQ ID NO: 115637 - DNA, 26 bp, Artificial sequence
  SiRNA target sequence
tactgattccacaaataaatgctaat

SEQ ID NO: 115638 - DNA, 26 bp, Artificial sequence
  SiRNA target sequence
actgattccacaaataaatgctaatc

SEQ ID NO: 115639 - DNA, 26 bp, Artificial sequence
  SiRNA target sequence
ctgattccacaaataaatgctaatcc

SEQ ID NO: 115640 - DNA, 26 bp, Artificial sequence
  SiRNA target sequence
tgattccacaaataaatgctaatcca

SEQ ID NO: 115641 - DNA, 26 bp, Artificial sequence
  SiRNA target sequence
gattccacaaataaatgctaatccat

SEQ ID NO: 115642 - DNA, 26 bp, Artificial sequence
  SiRNA target sequence
attccacaaataaatgctaatccatg

SEQ ID NO: 115643 - DNA, 26 bp, Artificial sequence
  SiRNA target sequence
ttccacaaataaatgctaatccatgg

SEQ ID NO: 115644 - DNA, 26 bp, Artificial sequence
  SiRNA target sequence
tccacaaataaatgctaatccatggc

SEQ ID NO: 115645 - DNA, 26 bp, Artificial sequence
  SiRNA target sequence
ccacaaataaatgctaatccatggca

SEQ ID NO: 115646 - DNA, 26 bp, Artificial sequence
  SiRNA target sequence
cacaaataaatgctaatccatggcat

SEQ ID NO: 115647 - DNA, 26 bp, Artificial sequence
  SiRNA target sequence
acaaataaatgctaatccatggcatc

SEQ ID NO: 115648 - DNA, 26 bp, Artificial sequence
  SiRNA target sequence
caaataaatgctaatccatggcatct

SEQ ID NO: 115649 - DNA, 26 bp, Artificial sequence
  SiRNA target sequence
aaataaatgctaatccatggcatcta

SEQ ID NO: 115650 - DNA, 26 bp, Artificial sequence
  SiRNA target sequence
aataaatgctaatccatggcatctat

SEQ ID NO: 115651 - DNA, 26 bp, Artificial sequence
  SiRNA target sequence
ataaatgctaatccatggcatctata

SEQ ID NO: 115652 - DNA, 26 bp, Artificial sequence
  SiRNA target sequence
taaatgctaatccatggcatctataa

SEQ ID NO: 115653 - DNA, 26 bp, Artificial sequence
  SiRNA target sequence
aaatgctaatccatggcatctataag

SEQ ID NO: 115654 - DNA, 26 bp, Artificial sequence
  SiRNA target sequence
aatgctaatccatggcatctataaga

SEQ ID NO: 115655 - DNA, 26 bp, Artificial sequence
  SiRNA target sequence
atgctaatccatggcatctataagat

SEQ ID NO: 115656 - DNA, 26 bp, Artificial sequence
  SiRNA target sequence
tgctaatccatggcatctataagatc

SEQ ID NO: 115657 - DNA, 26 bp, Artificial sequence
  SiRNA target sequence
gctaatccatggcatctataagatcc

SEQ ID NO: 115658 - DNA, 26 bp, Artificial sequence
  SiRNA target sequence
ctaatccatggcatctataagatcct

SEQ ID NO: 115659 - DNA, 26 bp, Artificial sequence
  SiRNA target sequence
taatccatggcatctataagatccta

SEQ ID NO: 115660 - DNA, 26 bp, Artificial sequence
  SiRNA target sequence
aatccatggcatctataagatcctat

SEQ ID NO: 115661 - DNA, 26 bp, Artificial sequence
  SiRNA target sequence
atccatggcatctataagatcctatg

SEQ ID NO: 115662 - DNA, 26 bp, Artificial sequence
  SiRNA target sequence
tccatggcatctataagatcctatga

SEQ ID NO: 115663 - DNA, 26 bp, Artificial sequence
  SiRNA target sequence
ccatggcatctataagatcctatgac

SEQ ID NO: 115664 - DNA, 26 bp, Artificial sequence
  SiRNA target sequence
catggcatctataagatcctatgact

SEQ ID NO: 115665 - DNA, 26 bp, Artificial sequence
  SiRNA target sequence
atggcatctataagatcctatgactt

SEQ ID NO: 115666 - DNA, 26 bp, Artificial sequence
  SiRNA target sequence
tggcatctataagatcctatgacttt

SEQ ID NO: 115667 - DNA, 26 bp, Artificial sequence
  SiRNA target sequence
ggcatctataagatcctatgacttta

SEQ ID NO: 115668 - DNA, 26 bp, Artificial sequence
  SiRNA target sequence
gcatctataagatcctatgactttat

SEQ ID NO: 115669 - DNA, 26 bp, Artificial sequence
  SiRNA target sequence
catctataagatcctatgactttatc

SEQ ID NO: 115670 - DNA, 26 bp, Artificial sequence
  SiRNA target sequence
atctataagatcctatgactttatca

SEQ ID NO: 115671 - DNA, 26 bp, Artificial sequence
  SiRNA target sequence
tctataagatcctatgactttatcat

SEQ ID NO: 115672 - DNA, 26 bp, Artificial sequence
  SiRNA target sequence
ctataagatcctatgactttatcatt

SEQ ID NO: 115673 - DNA, 26 bp, Artificial sequence
  SiRNA target sequence
tataagatcctatgactttatcattt

SEQ ID NO: 115674 - DNA, 26 bp, Artificial sequence
  SiRNA target sequence
ataagatcctatgactttatcatttt

SEQ ID NO: 115675 - DNA, 26 bp, Artificial sequence
  SiRNA target sequence
taagatcctatgactttatcattttt

SEQ ID NO: 115676 - DNA, 26 bp, Artificial sequence
  SiRNA target sequence
aagatcctatgactttatcattttta

SEQ ID NO: 115677 - DNA, 26 bp, Artificial sequence
  SiRNA target sequence
agatcctatgactttatcatttttat

SEQ ID NO: 115678 - DNA, 26 bp, Artificial sequence
  SiRNA target sequence
gatcctatgactttatcatttttatc

SEQ ID NO: 115679 - DNA, 26 bp, Artificial sequence
  SiRNA target sequence
atcctatgactttatcatttttatct

SEQ ID NO: 115680 - DNA, 26 bp, Artificial sequence
  SiRNA target sequence
tcctatgactttatcatttttatcta

SEQ ID NO: 115681 - DNA, 26 bp, Artificial sequence
  SiRNA target sequence
cctatgactttatcatttttatctag

SEQ ID NO: 115682 - DNA, 26 bp, Artificial sequence
  SiRNA target sequence
ctatgactttatcatttttatctagt

SEQ ID NO: 115683 - DNA, 26 bp, Artificial sequence
  SiRNA target sequence
tatgactttatcatttttatctagta

SEQ ID NO: 115684 - DNA, 26 bp, Artificial sequence
  SiRNA target sequence
atgactttatcatttttatctagtac

SEQ ID NO: 115685 - DNA, 26 bp, Artificial sequence
  SiRNA target sequence
tgactttatcatttttatctagtacc

SEQ ID NO: 115686 - DNA, 26 bp, Artificial sequence
  SiRNA target sequence
gactttatcatttttatctagtacct

SEQ ID NO: 115687 - DNA, 26 bp, Artificial sequence
  SiRNA target sequence
actttatcatttttatctagtacctt

SEQ ID NO: 115688 - DNA, 26 bp, Artificial sequence
  SiRNA target sequence
ctttatcatttttatctagtaccttt

SEQ ID NO: 115689 - DNA, 26 bp, Artificial sequence
  SiRNA target sequence
tttatcatttttatctagtacctttt

SEQ ID NO: 115690 - DNA, 26 bp, Artificial sequence
  SiRNA target sequence
ttatcatttttatctagtaccttttg

SEQ ID NO: 115691 - DNA, 26 bp, Artificial sequence
  SiRNA target sequence
tatcatttttatctagtaccttttgt

SEQ ID NO: 115692 - DNA, 26 bp, Artificial sequence
  SiRNA target sequence
atcatttttatctagtaccttttgta

SEQ ID NO: 115693 - DNA, 26 bp, Artificial sequence
  SiRNA target sequence
tcatttttatctagtaccttttgtaa

SEQ ID NO: 115694 - DNA, 26 bp, Artificial sequence
  SiRNA target sequence
catttttatctagtaccttttgtaaa

SEQ ID NO: 115695 - DNA, 26 bp, Artificial sequence
  SiRNA target sequence
atttttatctagtaccttttgtaaac

SEQ ID NO: 115696 - DNA, 26 bp, Artificial sequence
  SiRNA target sequence
tttttatctagtaccttttgtaaact

SEQ ID NO: 115697 - DNA, 26 bp, Artificial sequence
  SiRNA target sequence
ttttatctagtaccttttgtaaactc

SEQ ID NO: 115698 - DNA, 26 bp, Artificial sequence
  SiRNA target sequence
tttatctagtaccttttgtaaactca

SEQ ID NO: 115699 - DNA, 26 bp, Artificial sequence
  SiRNA target sequence
ttatctagtaccttttgtaaactcat

SEQ ID NO: 115700 - DNA, 26 bp, Artificial sequence
  SiRNA target sequence
tatctagtaccttttgtaaactcata

SEQ ID NO: 115701 - DNA, 26 bp, Artificial sequence
  SiRNA target sequence
atctagtaccttttgtaaactcatat

SEQ ID NO: 115702 - DNA, 26 bp, Artificial sequence
  SiRNA target sequence
tctagtaccttttgtaaactcatata

SEQ ID NO: 115703 - DNA, 26 bp, Artificial sequence
  SiRNA target sequence
ctagtaccttttgtaaactcatataa

SEQ ID NO: 115704 - DNA, 26 bp, Artificial sequence
  SiRNA target sequence
tagtaccttttgtaaactcatataaa

SEQ ID NO: 115705 - DNA, 26 bp, Artificial sequence
  SiRNA target sequence
agtaccttttgtaaactcatataaat

SEQ ID NO: 115706 - DNA, 26 bp, Artificial sequence
  SiRNA target sequence
gtaccttttgtaaactcatataaatg

SEQ ID NO: 115707 - DNA, 26 bp, Artificial sequence
  SiRNA target sequence
taccttttgtaaactcatataaatgt

SEQ ID NO: 115708 - DNA, 26 bp, Artificial sequence
  SiRNA target sequence
accttttgtaaactcatataaatgtt

SEQ ID NO: 115709 - DNA, 26 bp, Artificial sequence
  SiRNA target sequence
ccttttgtaaactcatataaatgttt

SEQ ID NO: 115710 - DNA, 26 bp, Artificial sequence
  SiRNA target sequence
cttttgtaaactcatataaatgtttt

SEQ ID NO: 115711 - DNA, 26 bp, Artificial sequence
  SiRNA target sequence
ttttgtaaactcatataaatgttttc

SEQ ID NO: 115712 - DNA, 26 bp, Artificial sequence
  SiRNA target sequence
tttgtaaactcatataaatgttttcc

SEQ ID NO: 115713 - DNA, 26 bp, Artificial sequence
  SiRNA target sequence
ttgtaaactcatataaatgttttcct

SEQ ID NO: 115714 - DNA, 26 bp, Artificial sequence
  SiRNA target sequence
tgtaaactcatataaatgttttcctg

SEQ ID NO: 115715 - DNA, 26 bp, Artificial sequence
  SiRNA target sequence
gtaaactcatataaatgttttcctgt

SEQ ID NO: 115716 - DNA, 26 bp, Artificial sequence
  SiRNA target sequence
taaactcatataaatgttttcctgtc

SEQ ID NO: 115717 - DNA, 26 bp, Artificial sequence
  SiRNA target sequence
aaactcatataaatgttttcctgtcc

SEQ ID NO: 115718 - DNA, 26 bp, Artificial sequence
  SiRNA target sequence
aactcatataaatgttttcctgtcct

SEQ ID NO: 115719 - DNA, 26 bp, Artificial sequence
  SiRNA target sequence
actcatataaatgttttcctgtccta

SEQ ID NO: 115720 - DNA, 26 bp, Artificial sequence
  SiRNA target sequence
ctcatataaatgttttcctgtcctat

SEQ ID NO: 115721 - DNA, 26 bp, Artificial sequence
  SiRNA target sequence
tcatataaatgttttcctgtcctatt

SEQ ID NO: 115722 - DNA, 26 bp, Artificial sequence
  SiRNA target sequence
catataaatgttttcctgtcctatta

SEQ ID NO: 115723 - DNA, 26 bp, Artificial sequence
  SiRNA target sequence
atataaatgttttcctgtcctattac

SEQ ID NO: 115724 - DNA, 26 bp, Artificial sequence
  SiRNA target sequence
tataaatgttttcctgtcctattact

SEQ ID NO: 115725 - DNA, 26 bp, Artificial sequence
  SiRNA target sequence
ataaatgttttcctgtcctattacta

SEQ ID NO: 115726 - DNA, 26 bp, Artificial sequence
  SiRNA target sequence
taaatgttttcctgtcctattactaa

SEQ ID NO: 115727 - DNA, 26 bp, Artificial sequence
  SiRNA target sequence
aaatgttttcctgtcctattactaaa

SEQ ID NO: 115728 - DNA, 26 bp, Artificial sequence
  SiRNA target sequence
aatgttttcctgtcctattactaaat

SEQ ID NO: 115729 - DNA, 26 bp, Artificial sequence
  SiRNA target sequence
atgttttcctgtcctattactaaatg

SEQ ID NO: 115730 - DNA, 26 bp, Artificial sequence
  SiRNA target sequence
tgttttcctgtcctattactaaatga

SEQ ID NO: 115731 - DNA, 26 bp, Artificial sequence
  SiRNA target sequence
gttttcctgtcctattactaaatgac

SEQ ID NO: 115732 - DNA, 26 bp, Artificial sequence
  SiRNA target sequence
ttttcctgtcctattactaaatgaca

SEQ ID NO: 115733 - DNA, 26 bp, Artificial sequence
  SiRNA target sequence
tttcctgtcctattactaaatgacag

SEQ ID NO: 115734 - DNA, 26 bp, Artificial sequence
  SiRNA target sequence
ttcctgtcctattactaaatgacaga

SEQ ID NO: 115735 - DNA, 26 bp, Artificial sequence
  SiRNA target sequence
tcctgtcctattactaaatgacagaa

SEQ ID NO: 115736 - DNA, 26 bp, Artificial sequence
  SiRNA target sequence
cctgtcctattactaaatgacagaag

SEQ ID NO: 115737 - DNA, 26 bp, Artificial sequence
  SiRNA target sequence
ctgtcctattactaaatgacagaagc

SEQ ID NO: 115738 - DNA, 26 bp, Artificial sequence
  SiRNA target sequence
tgtcctattactaaatgacagaagcc

SEQ ID NO: 115739 - DNA, 26 bp, Artificial sequence
  SiRNA target sequence
gtcctattactaaatgacagaagcct

SEQ ID NO: 115740 - DNA, 26 bp, Artificial sequence
  SiRNA target sequence
tcctattactaaatgacagaagcctc

SEQ ID NO: 115741 - DNA, 26 bp, Artificial sequence
  SiRNA target sequence
cctattactaaatgacagaagcctct

SEQ ID NO: 115742 - DNA, 26 bp, Artificial sequence
  SiRNA target sequence
ctattactaaatgacagaagcctctt

SEQ ID NO: 115743 - DNA, 26 bp, Artificial sequence
  SiRNA target sequence
tattactaaatgacagaagcctctta

SEQ ID NO: 115744 - DNA, 26 bp, Artificial sequence
  SiRNA target sequence
attactaaatgacagaagcctcttat

SEQ ID NO: 115745 - DNA, 26 bp, Artificial sequence
  SiRNA target sequence
ttactaaatgacagaagcctcttata

SEQ ID NO: 115746 - DNA, 26 bp, Artificial sequence
  SiRNA target sequence
tactaaatgacagaagcctcttatat

SEQ ID NO: 115747 - DNA, 26 bp, Artificial sequence
  SiRNA target sequence
actaaatgacagaagcctcttatatt

SEQ ID NO: 115748 - DNA, 26 bp, Artificial sequence
  SiRNA target sequence
ctaaatgacagaagcctcttatattt

SEQ ID NO: 115749 - DNA, 26 bp, Artificial sequence
  SiRNA target sequence
taaatgacagaagcctcttatatttc

SEQ ID NO: 115750 - DNA, 26 bp, Artificial sequence
  SiRNA target sequence
aaatgacagaagcctcttatatttcc

SEQ ID NO: 115751 - DNA, 26 bp, Artificial sequence
  SiRNA target sequence
aatgacagaagcctcttatatttcct

SEQ ID NO: 115752 - DNA, 26 bp, Artificial sequence
  SiRNA target sequence
atgacagaagcctcttatatttcctt

SEQ ID NO: 115753 - DNA, 26 bp, Artificial sequence
  SiRNA target sequence
tgacagaagcctcttatatttccttt

SEQ ID NO: 115754 - DNA, 26 bp, Artificial sequence
  SiRNA target sequence
gacagaagcctcttatatttcctttt

SEQ ID NO: 115755 - DNA, 26 bp, Artificial sequence
  SiRNA target sequence
acagaagcctcttatatttccttttt

SEQ ID NO: 115756 - DNA, 26 bp, Artificial sequence
  SiRNA target sequence
cagaagcctcttatatttcctttttt

SEQ ID NO: 115757 - DNA, 26 bp, Artificial sequence
  SiRNA target sequence
agaagcctcttatatttcctttttta

SEQ ID NO: 115758 - DNA, 26 bp, Artificial sequence
  SiRNA target sequence
gaagcctcttatatttccttttttat

SEQ ID NO: 115759 - DNA, 26 bp, Artificial sequence
  SiRNA target sequence
aagcctcttatatttccttttttata

SEQ ID NO: 115760 - DNA, 26 bp, Artificial sequence
  SiRNA target sequence
agcctcttatatttccttttttatac

SEQ ID NO: 115761 - DNA, 26 bp, Artificial sequence
  SiRNA target sequence
gcctcttatatttccttttttatact

SEQ ID NO: 115762 - DNA, 26 bp, Artificial sequence
  SiRNA target sequence
cctcttatatttccttttttatactt

SEQ ID NO: 115763 - DNA, 26 bp, Artificial sequence
  SiRNA target sequence
ctcttatatttccttttttatactta

SEQ ID NO: 115764 - DNA, 26 bp, Artificial sequence
  SiRNA target sequence
tcttatatttccttttttatacttag

SEQ ID NO: 115765 - DNA, 26 bp, Artificial sequence
  SiRNA target sequence
cttatatttccttttttatacttaga

SEQ ID NO: 115766 - DNA, 26 bp, Artificial sequence
  SiRNA target sequence
ttatatttccttttttatacttagag

SEQ ID NO: 115767 - DNA, 26 bp, Artificial sequence
  SiRNA target sequence
tatatttccttttttatacttagagt

SEQ ID NO: 115768 - DNA, 26 bp, Artificial sequence
  SiRNA target sequence
atatttccttttttatacttagagtt

SEQ ID NO: 115769 - DNA, 26 bp, Artificial sequence
  SiRNA target sequence
tatttccttttttatacttagagtta

SEQ ID NO: 115770 - DNA, 26 bp, Artificial sequence
  SiRNA target sequence
atttccttttttatacttagagttag

SEQ ID NO: 115771 - DNA, 26 bp, Artificial sequence
  SiRNA target sequence
tttccttttttatacttagagttagc

SEQ ID NO: 115772 - DNA, 26 bp, Artificial sequence
  SiRNA target sequence
ttccttttttatacttagagttagca

SEQ ID NO: 115773 - DNA, 26 bp, Artificial sequence
  SiRNA target sequence
tccttttttatacttagagttagcat

SEQ ID NO: 115774 - DNA, 26 bp, Artificial sequence
  SiRNA target sequence
ccttttttatacttagagttagcata

SEQ ID NO: 115775 - DNA, 26 bp, Artificial sequence
  SiRNA target sequence
cttttttatacttagagttagcatat

SEQ ID NO: 115776 - DNA, 26 bp, Artificial sequence
  SiRNA target sequence
ttttttatacttagagttagcatatt

SEQ ID NO: 115777 - DNA, 26 bp, Artificial sequence
  SiRNA target sequence
tttttatacttagagttagcatattc

SEQ ID NO: 115778 - DNA, 26 bp, Artificial sequence
  SiRNA target sequence
ttttatacttagagttagcatattct

SEQ ID NO: 115779 - DNA, 26 bp, Artificial sequence
  SiRNA target sequence
tttatacttagagttagcatattctt

SEQ ID NO: 115780 - DNA, 26 bp, Artificial sequence
  SiRNA target sequence
ttatacttagagttagcatattcttc

SEQ ID NO: 115781 - DNA, 26 bp, Artificial sequence
  SiRNA target sequence
tatacttagagttagcatattcttcg

SEQ ID NO: 115782 - DNA, 26 bp, Artificial sequence
  SiRNA target sequence
atacttagagttagcatattcttcga

SEQ ID NO: 115783 - DNA, 26 bp, Artificial sequence
  SiRNA target sequence
tacttagagttagcatattcttcgat

SEQ ID NO: 115784 - DNA, 26 bp, Artificial sequence
  SiRNA target sequence
acttagagttagcatattcttcgata

SEQ ID NO: 115785 - DNA, 26 bp, Artificial sequence
  SiRNA target sequence
cttagagttagcatattcttcgataa

SEQ ID NO: 115786 - DNA, 26 bp, Artificial sequence
  SiRNA target sequence
ttagagttagcatattcttcgataag

SEQ ID NO: 115787 - DNA, 26 bp, Artificial sequence
  SiRNA target sequence
tagagttagcatattcttcgataaga

SEQ ID NO: 115788 - DNA, 26 bp, Artificial sequence
  SiRNA target sequence
agagttagcatattcttcgataagac

SEQ ID NO: 115789 - DNA, 26 bp, Artificial sequence
  SiRNA target sequence
gagttagcatattcttcgataagacg

SEQ ID NO: 115790 - DNA, 26 bp, Artificial sequence
  SiRNA target sequence
agttagcatattcttcgataagacgt

SEQ ID NO: 115791 - DNA, 26 bp, Artificial sequence
  SiRNA target sequence
gttagcatattcttcgataagacgta

SEQ ID NO: 115792 - DNA, 26 bp, Artificial sequence
  SiRNA target sequence
ttagcatattcttcgataagacgtag

SEQ ID NO: 115793 - DNA, 26 bp, Artificial sequence
  SiRNA target sequence
tagcatattcttcgataagacgtaga

SEQ ID NO: 115794 - DNA, 26 bp, Artificial sequence
  SiRNA target sequence
agcatattcttcgataagacgtagaa

SEQ ID NO: 115795 - DNA, 26 bp, Artificial sequence
  SiRNA target sequence
gcatattcttcgataagacgtagaat

SEQ ID NO: 115796 - DNA, 26 bp, Artificial sequence
  SiRNA target sequence
catattcttcgataagacgtagaatt

SEQ ID NO: 115797 - DNA, 26 bp, Artificial sequence
  SiRNA target sequence
atattcttcgataagacgtagaatta

SEQ ID NO: 115798 - DNA, 26 bp, Artificial sequence
  SiRNA target sequence
tattcttcgataagacgtagaattaa

SEQ ID NO: 115799 - DNA, 26 bp, Artificial sequence
  SiRNA target sequence
attcttcgataagacgtagaattaac

SEQ ID NO: 115800 - DNA, 26 bp, Artificial sequence
  SiRNA target sequence
ttcttcgataagacgtagaattaaca

SEQ ID NO: 115801 - DNA, 26 bp, Artificial sequence
  SiRNA target sequence
tcttcgataagacgtagaattaacat

SEQ ID NO: 115802 - DNA, 26 bp, Artificial sequence
  SiRNA target sequence
cttcgataagacgtagaattaacata

SEQ ID NO: 115803 - DNA, 26 bp, Artificial sequence
  SiRNA target sequence
ttcgataagacgtagaattaacatat

SEQ ID NO: 115804 - DNA, 26 bp, Artificial sequence
  SiRNA target sequence
tcgataagacgtagaattaacatatt

SEQ ID NO: 115805 - DNA, 26 bp, Artificial sequence
  SiRNA target sequence
cgataagacgtagaattaacatattt

SEQ ID NO: 115806 - DNA, 26 bp, Artificial sequence
  SiRNA target sequence
gataagacgtagaattaacatatttc

SEQ ID NO: 115807 - DNA, 26 bp, Artificial sequence
  SiRNA target sequence
ataagacgtagaattaacatatttct

SEQ ID NO: 115808 - DNA, 26 bp, Artificial sequence
  SiRNA target sequence
taagacgtagaattaacatatttcta

SEQ ID NO: 115809 - DNA, 26 bp, Artificial sequence
  SiRNA target sequence
aagacgtagaattaacatatttctat

SEQ ID NO: 115810 - DNA, 26 bp, Artificial sequence
  SiRNA target sequence
agacgtagaattaacatatttctata

SEQ ID NO: 115811 - DNA, 26 bp, Artificial sequence
  SiRNA target sequence
gacgtagaattaacatatttctataa

SEQ ID NO: 115812 - DNA, 26 bp, Artificial sequence
  SiRNA target sequence
acgtagaattaacatatttctataaa

SEQ ID NO: 115813 - DNA, 26 bp, Artificial sequence
  SiRNA target sequence
cgtagaattaacatatttctataaac

SEQ ID NO: 115814 - DNA, 26 bp, Artificial sequence
  SiRNA target sequence
gtagaattaacatatttctataaaca

SEQ ID NO: 115815 - DNA, 26 bp, Artificial sequence
  SiRNA target sequence
tagaattaacatatttctataaacat

SEQ ID NO: 115816 - DNA, 26 bp, Artificial sequence
  SiRNA target sequence
agaattaacatatttctataaacatc

SEQ ID NO: 115817 - DNA, 26 bp, Artificial sequence
  SiRNA target sequence
gaattaacatatttctataaacatct

SEQ ID NO: 115818 - DNA, 26 bp, Artificial sequence
  SiRNA target sequence
aattaacatatttctataaacatctt

SEQ ID NO: 115819 - DNA, 26 bp, Artificial sequence
  SiRNA target sequence
attaacatatttctataaacatcttg

SEQ ID NO: 115820 - DNA, 26 bp, Artificial sequence
  SiRNA target sequence
ttaacatatttctataaacatcttgt

SEQ ID NO: 115821 - DNA, 26 bp, Artificial sequence
  SiRNA target sequence
taacatatttctataaacatcttgta

SEQ ID NO: 115822 - DNA, 26 bp, Artificial sequence
  SiRNA target sequence
aacatatttctataaacatcttgtac

SEQ ID NO: 115823 - DNA, 26 bp, Artificial sequence
  SiRNA target sequence
acatatttctataaacatcttgtaca

SEQ ID NO: 115824 - DNA, 26 bp, Artificial sequence
  SiRNA target sequence
catatttctataaacatcttgtacaa

SEQ ID NO: 115825 - DNA, 26 bp, Artificial sequence
  SiRNA target sequence
atatttctataaacatcttgtacaag

SEQ ID NO: 115826 - DNA, 26 bp, Artificial sequence
  SiRNA target sequence
tatttctataaacatcttgtacaagt

SEQ ID NO: 115827 - DNA, 26 bp, Artificial sequence
  SiRNA target sequence
atttctataaacatcttgtacaagtt

SEQ ID NO: 115828 - DNA, 26 bp, Artificial sequence
  SiRNA target sequence
tttctataaacatcttgtacaagttc

SEQ ID NO: 115829 - DNA, 26 bp, Artificial sequence
  SiRNA target sequence
ttctataaacatcttgtacaagttct

SEQ ID NO: 115830 - DNA, 26 bp, Artificial sequence
  SiRNA target sequence
tctataaacatcttgtacaagttctt

SEQ ID NO: 115831 - DNA, 26 bp, Artificial sequence
  SiRNA target sequence
ctataaacatcttgtacaagttcttt

SEQ ID NO: 115832 - DNA, 26 bp, Artificial sequence
  SiRNA target sequence
tataaacatcttgtacaagttctttg

SEQ ID NO: 115833 - DNA, 26 bp, Artificial sequence
  SiRNA target sequence
ataaacatcttgtacaagttctttgt

SEQ ID NO: 115834 - DNA, 26 bp, Artificial sequence
  SiRNA target sequence
taaacatcttgtacaagttctttgtt

SEQ ID NO: 115835 - DNA, 26 bp, Artificial sequence
  SiRNA target sequence
aaacatcttgtacaagttctttgttt

SEQ ID NO: 115836 - DNA, 26 bp, Artificial sequence
  SiRNA target sequence
aacatcttgtacaagttctttgttta

SEQ ID NO: 115837 - DNA, 26 bp, Artificial sequence
  SiRNA target sequence
acatcttgtacaagttctttgtttaa

SEQ ID NO: 115838 - DNA, 26 bp, Artificial sequence
  SiRNA target sequence
catcttgtacaagttctttgtttaaa

SEQ ID NO: 115839 - DNA, 26 bp, Artificial sequence
  SiRNA target sequence
atcttgtacaagttctttgtttaaag

SEQ ID NO: 115840 - DNA, 26 bp, Artificial sequence
  SiRNA target sequence
tcttgtacaagttctttgtttaaagt

SEQ ID NO: 115841 - DNA, 26 bp, Artificial sequence
  SiRNA target sequence
cttgtacaagttctttgtttaaagta

SEQ ID NO: 115842 - DNA, 26 bp, Artificial sequence
  SiRNA target sequence
ttgtacaagttctttgtttaaagtag

SEQ ID NO: 115843 - DNA, 26 bp, Artificial sequence
  SiRNA target sequence
tgtacaagttctttgtttaaagtagt

SEQ ID NO: 115844 - DNA, 26 bp, Artificial sequence
  SiRNA target sequence
gtacaagttctttgtttaaagtagtt

SEQ ID NO: 115845 - DNA, 26 bp, Artificial sequence
  SiRNA target sequence
tacaagttctttgtttaaagtagttt

SEQ ID NO: 115846 - DNA, 26 bp, Artificial sequence
  SiRNA target sequence
acaagttctttgtttaaagtagtttt

SEQ ID NO: 115847 - DNA, 26 bp, Artificial sequence
  SiRNA target sequence
caagttctttgtttaaagtagttttc

SEQ ID NO: 115848 - DNA, 26 bp, Artificial sequence
  SiRNA target sequence
aagttctttgtttaaagtagttttca

SEQ ID NO: 115849 - DNA, 26 bp, Artificial sequence
  SiRNA target sequence
agttctttgtttaaagtagttttcag

SEQ ID NO: 115850 - DNA, 26 bp, Artificial sequence
  SiRNA target sequence
gttctttgtttaaagtagttttcagt

SEQ ID NO: 115851 - DNA, 26 bp, Artificial sequence
  SiRNA target sequence
ttctttgtttaaagtagttttcagtt

SEQ ID NO: 115852 - DNA, 26 bp, Artificial sequence
  SiRNA target sequence
tctttgtttaaagtagttttcagttt

SEQ ID NO: 115853 - DNA, 26 bp, Artificial sequence
  SiRNA target sequence
ctttgtttaaagtagttttcagttta

SEQ ID NO: 115854 - DNA, 26 bp, Artificial sequence
  SiRNA target sequence
tttgtttaaagtagttttcagtttaa

SEQ ID NO: 115855 - DNA, 26 bp, Artificial sequence
  SiRNA target sequence
ttgtttaaagtagttttcagtttaac

SEQ ID NO: 115856 - DNA, 26 bp, Artificial sequence
  SiRNA target sequence
tgtttaaagtagttttcagtttaact

SEQ ID NO: 115857 - DNA, 26 bp, Artificial sequence
  SiRNA target sequence
gtttaaagtagttttcagtttaactg

SEQ ID NO: 115858 - DNA, 26 bp, Artificial sequence
  SiRNA target sequence
tttaaagtagttttcagtttaactgt

SEQ ID NO: 115859 - DNA, 26 bp, Artificial sequence
  SiRNA target sequence
ttaaagtagttttcagtttaactgta

SEQ ID NO: 115860 - DNA, 26 bp, Artificial sequence
  SiRNA target sequence
taaagtagttttcagtttaactgtat

SEQ ID NO: 115861 - DNA, 26 bp, Artificial sequence
  SiRNA target sequence
aaagtagttttcagtttaactgtatt

SEQ ID NO: 115862 - DNA, 26 bp, Artificial sequence
  SiRNA target sequence
aagtagttttcagtttaactgtattt

SEQ ID NO: 115863 - DNA, 26 bp, Artificial sequence
  SiRNA target sequence
agtagttttcagtttaactgtatttt

SEQ ID NO: 115864 - DNA, 26 bp, Artificial sequence
  SiRNA target sequence
gtagttttcagtttaactgtattttt

SEQ ID NO: 115865 - DNA, 26 bp, Artificial sequence
  SiRNA target sequence
tagttttcagtttaactgtattttta

SEQ ID NO: 115866 - DNA, 26 bp, Artificial sequence
  SiRNA target sequence
agttttcagtttaactgtatttttat

SEQ ID NO: 115867 - DNA, 26 bp, Artificial sequence
  SiRNA target sequence
gttttcagtttaactgtatttttatc

SEQ ID NO: 115868 - DNA, 26 bp, Artificial sequence
  SiRNA target sequence
ttttcagtttaactgtatttttatct

SEQ ID NO: 115869 - DNA, 26 bp, Artificial sequence
  SiRNA target sequence
tttcagtttaactgtatttttatcta

SEQ ID NO: 115870 - DNA, 26 bp, Artificial sequence
  SiRNA target sequence
ttcagtttaactgtatttttatctac

SEQ ID NO: 115871 - DNA, 26 bp, Artificial sequence
  SiRNA target sequence
tcagtttaactgtatttttatctacc

SEQ ID NO: 115872 - DNA, 26 bp, Artificial sequence
  SiRNA target sequence
cagtttaactgtatttttatctacca

SEQ ID NO: 115873 - DNA, 26 bp, Artificial sequence
  SiRNA target sequence
agtttaactgtatttttatctaccaa

SEQ ID NO: 115874 - DNA, 26 bp, Artificial sequence
  SiRNA target sequence
gtttaactgtatttttatctaccaaa

SEQ ID NO: 115875 - DNA, 26 bp, Artificial sequence
  SiRNA target sequence
tttaactgtatttttatctaccaaat

SEQ ID NO: 115876 - DNA, 26 bp, Artificial sequence
  SiRNA target sequence
ttaactgtatttttatctaccaaata

SEQ ID NO: 115877 - DNA, 26 bp, Artificial sequence
  SiRNA target sequence
taactgtatttttatctaccaaataa

SEQ ID NO: 115878 - DNA, 26 bp, Artificial sequence
  SiRNA target sequence
aactgtatttttatctaccaaataat

SEQ ID NO: 115879 - DNA, 26 bp, Artificial sequence
  SiRNA target sequence
actgtatttttatctaccaaataata

SEQ ID NO: 115880 - DNA, 26 bp, Artificial sequence
  SiRNA target sequence
ctgtatttttatctaccaaataataa

SEQ ID NO: 115881 - DNA, 26 bp, Artificial sequence
  SiRNA target sequence
tgtatttttatctaccaaataataat

SEQ ID NO: 115882 - DNA, 26 bp, Artificial sequence
  SiRNA target sequence
gtatttttatctaccaaataataatc

SEQ ID NO: 115883 - DNA, 26 bp, Artificial sequence
  SiRNA target sequence
tatttttatctaccaaataataatct

SEQ ID NO: 115884 - DNA, 26 bp, Artificial sequence
  SiRNA target sequence
atttttatctaccaaataataatcta

SEQ ID NO: 115885 - DNA, 26 bp, Artificial sequence
  SiRNA target sequence
tttttatctaccaaataataatctat

SEQ ID NO: 115886 - DNA, 26 bp, Artificial sequence
  SiRNA target sequence
ttttatctaccaaataataatctatc

SEQ ID NO: 115887 - DNA, 26 bp, Artificial sequence
  SiRNA target sequence
tttatctaccaaataataatctatca

SEQ ID NO: 115888 - DNA, 26 bp, Artificial sequence
  SiRNA target sequence
ttatctaccaaataataatctatcat

SEQ ID NO: 115889 - DNA, 27 bp, Artificial sequence
  SiRNA target sequence
ttattcagaataaacatcttttaaaag

SEQ ID NO: 115890 - DNA, 27 bp, Artificial sequence
  SiRNA target sequence
tattcagaataaacatcttttaaaagt

SEQ ID NO: 115891 - DNA, 27 bp, Artificial sequence
  SiRNA target sequence
attcagaataaacatcttttaaaagtt

SEQ ID NO: 115892 - DNA, 27 bp, Artificial sequence
  SiRNA target sequence
ttcagaataaacatcttttaaaagttc

SEQ ID NO: 115893 - DNA, 27 bp, Artificial sequence
  SiRNA target sequence
tcagaataaacatcttttaaaagttca

SEQ ID NO: 115894 - DNA, 27 bp, Artificial sequence
  SiRNA target sequence
cagaataaacatcttttaaaagttcat

SEQ ID NO: 115895 - DNA, 27 bp, Artificial sequence
  SiRNA target sequence
agaataaacatcttttaaaagttcatc

SEQ ID NO: 115896 - DNA, 27 bp, Artificial sequence
  SiRNA target sequence
gaataaacatcttttaaaagttcatcg

SEQ ID NO: 115897 - DNA, 27 bp, Artificial sequence
  SiRNA target sequence
aataaacatcttttaaaagttcatcga

SEQ ID NO: 115898 - DNA, 27 bp, Artificial sequence
  SiRNA target sequence
ataaacatcttttaaaagttcatcgat

SEQ ID NO: 115899 - DNA, 27 bp, Artificial sequence
  SiRNA target sequence
taaacatcttttaaaagttcatcgata

SEQ ID NO: 115900 - DNA, 27 bp, Artificial sequence
  SiRNA target sequence
aaacatcttttaaaagttcatcgatat

SEQ ID NO: 115901 - DNA, 27 bp, Artificial sequence
  SiRNA target sequence
aacatcttttaaaagttcatcgatatc

SEQ ID NO: 115902 - DNA, 27 bp, Artificial sequence
  SiRNA target sequence
acatcttttaaaagttcatcgatatcg

SEQ ID NO: 115903 - DNA, 27 bp, Artificial sequence
  SiRNA target sequence
catcttttaaaagttcatcgatatcgg

SEQ ID NO: 115904 - DNA, 27 bp, Artificial sequence
  SiRNA target sequence
atcttttaaaagttcatcgatatcggg

SEQ ID NO: 115905 - DNA, 27 bp, Artificial sequence
  SiRNA target sequence
tcttttaaaagttcatcgatatcgggt

SEQ ID NO: 115906 - DNA, 27 bp, Artificial sequence
  SiRNA target sequence
cttttaaaagttcatcgatatcgggtt

SEQ ID NO: 115907 - DNA, 27 bp, Artificial sequence
  SiRNA target sequence
ttttaaaagttcatcgatatcgggttc

SEQ ID NO: 115908 - DNA, 27 bp, Artificial sequence
  SiRNA target sequence
tttaaaagttcatcgatatcgggttct

SEQ ID NO: 115909 - DNA, 27 bp, Artificial sequence
  SiRNA target sequence
ttaaaagttcatcgatatcgggttctt

SEQ ID NO: 115910 - DNA, 27 bp, Artificial sequence
  SiRNA target sequence
taaaagttcatcgatatcgggttcttt

SEQ ID NO: 115911 - DNA, 27 bp, Artificial sequence
  SiRNA target sequence
aaaagttcatcgatatcgggttcttta

SEQ ID NO: 115912 - DNA, 27 bp, Artificial sequence
  SiRNA target sequence
aaagttcatcgatatcgggttctttag

SEQ ID NO: 115913 - DNA, 27 bp, Artificial sequence
  SiRNA target sequence
aagttcatcgatatcgggttctttaga

SEQ ID NO: 115914 - DNA, 27 bp, Artificial sequence
  SiRNA target sequence
agttcatcgatatcgggttctttagaa

SEQ ID NO: 115915 - DNA, 27 bp, Artificial sequence
  SiRNA target sequence
gttcatcgatatcgggttctttagaaa

SEQ ID NO: 115916 - DNA, 27 bp, Artificial sequence
  SiRNA target sequence
ttcatcgatatcgggttctttagaaaa

SEQ ID NO: 115917 - DNA, 27 bp, Artificial sequence
  SiRNA target sequence
tcatcgatatcgggttctttagaaaaa

SEQ ID NO: 115918 - DNA, 27 bp, Artificial sequence
  SiRNA target sequence
catcgatatcgggttctttagaaaaaa

SEQ ID NO: 115919 - DNA, 27 bp, Artificial sequence
  SiRNA target sequence
atcgatatcgggttctttagaaaaaat

SEQ ID NO: 115920 - DNA, 27 bp, Artificial sequence
  SiRNA target sequence
tcgatatcgggttctttagaaaaaata

SEQ ID NO: 115921 - DNA, 27 bp, Artificial sequence
  SiRNA target sequence
cgatatcgggttctttagaaaaaataa

SEQ ID NO: 115922 - DNA, 27 bp, Artificial sequence
  SiRNA target sequence
gatatcgggttctttagaaaaaataac

SEQ ID NO: 115923 - DNA, 27 bp, Artificial sequence
  SiRNA target sequence
atatcgggttctttagaaaaaataact

SEQ ID NO: 115924 - DNA, 27 bp, Artificial sequence
  SiRNA target sequence
tatcgggttctttagaaaaaataactt

SEQ ID NO: 115925 - DNA, 27 bp, Artificial sequence
  SiRNA target sequence
atcgggttctttagaaaaaataacttt

SEQ ID NO: 115926 - DNA, 27 bp, Artificial sequence
  SiRNA target sequence
tcgggttctttagaaaaaataactttt

SEQ ID NO: 115927 - DNA, 27 bp, Artificial sequence
  SiRNA target sequence
cgggttctttagaaaaaataacttttt

SEQ ID NO: 115928 - DNA, 27 bp, Artificial sequence
  SiRNA target sequence
gggttctttagaaaaaataactttttt

SEQ ID NO: 115929 - DNA, 27 bp, Artificial sequence
  SiRNA target sequence
ggttctttagaaaaaataactttttta

SEQ ID NO: 115930 - DNA, 27 bp, Artificial sequence
  SiRNA target sequence
gttctttagaaaaaataacttttttaa

SEQ ID NO: 115931 - DNA, 27 bp, Artificial sequence
  SiRNA target sequence
ttctttagaaaaaataacttttttaac

SEQ ID NO: 115932 - DNA, 27 bp, Artificial sequence
  SiRNA target sequence
tctttagaaaaaataacttttttaaca

SEQ ID NO: 115933 - DNA, 27 bp, Artificial sequence
  SiRNA target sequence
ctttagaaaaaataacttttttaacac

SEQ ID NO: 115934 - DNA, 27 bp, Artificial sequence
  SiRNA target sequence
tttagaaaaaataacttttttaacacc

SEQ ID NO: 115935 - DNA, 27 bp, Artificial sequence
  SiRNA target sequence
ttagaaaaaataacttttttaacacct

SEQ ID NO: 115936 - DNA, 27 bp, Artificial sequence
  SiRNA target sequence
tagaaaaaataacttttttaacacctt

SEQ ID NO: 115937 - DNA, 27 bp, Artificial sequence
  SiRNA target sequence
agaaaaaataacttttttaacaccttc

SEQ ID NO: 115938 - DNA, 27 bp, Artificial sequence
  SiRNA target sequence
gaaaaaataacttttttaacaccttct

SEQ ID NO: 115939 - DNA, 27 bp, Artificial sequence
  SiRNA target sequence
aaaaaataacttttttaacaccttctt

SEQ ID NO: 115940 - DNA, 27 bp, Artificial sequence
  SiRNA target sequence
aaaaataacttttttaacaccttcttc

SEQ ID NO: 115941 - DNA, 27 bp, Artificial sequence
  SiRNA target sequence
aaaataacttttttaacaccttcttca

SEQ ID NO: 115942 - DNA, 27 bp, Artificial sequence
  SiRNA target sequence
aaataacttttttaacaccttcttcaa

SEQ ID NO: 115943 - DNA, 27 bp, Artificial sequence
  SiRNA target sequence
aataacttttttaacaccttcttcaaa

SEQ ID NO: 115944 - DNA, 27 bp, Artificial sequence
  SiRNA target sequence
ataacttttttaacaccttcttcaaag

SEQ ID NO: 115945 - DNA, 27 bp, Artificial sequence
  SiRNA target sequence
taacttttttaacaccttcttcaaagc

SEQ ID NO: 115946 - DNA, 27 bp, Artificial sequence
  SiRNA target sequence
aacttttttaacaccttcttcaaagca

SEQ ID NO: 115947 - DNA, 27 bp, Artificial sequence
  SiRNA target sequence
acttttttaacaccttcttcaaagcag

SEQ ID NO: 115948 - DNA, 27 bp, Artificial sequence
  SiRNA target sequence
cttttttaacaccttcttcaaagcagg

SEQ ID NO: 115949 - DNA, 27 bp, Artificial sequence
  SiRNA target sequence
ttttttaacaccttcttcaaagcagga

SEQ ID NO: 115950 - DNA, 27 bp, Artificial sequence
  SiRNA target sequence
tttttaacaccttcttcaaagcaggaa

SEQ ID NO: 115951 - DNA, 27 bp, Artificial sequence
  SiRNA target sequence
ttttaacaccttcttcaaagcaggaaa

SEQ ID NO: 115952 - DNA, 27 bp, Artificial sequence
  SiRNA target sequence
tttaacaccttcttcaaagcaggaaat

SEQ ID NO: 115953 - DNA, 27 bp, Artificial sequence
  SiRNA target sequence
ttaacaccttcttcaaagcaggaaatt

SEQ ID NO: 115954 - DNA, 27 bp, Artificial sequence
  SiRNA target sequence
taacaccttcttcaaagcaggaaatta

SEQ ID NO: 115955 - DNA, 27 bp, Artificial sequence
  SiRNA target sequence
aacaccttcttcaaagcaggaaattac

SEQ ID NO: 115956 - DNA, 27 bp, Artificial sequence
  SiRNA target sequence
acaccttcttcaaagcaggaaattacc

SEQ ID NO: 115957 - DNA, 27 bp, Artificial sequence
  SiRNA target sequence
caccttcttcaaagcaggaaattacct

SEQ ID NO: 115958 - DNA, 27 bp, Artificial sequence
  SiRNA target sequence
accttcttcaaagcaggaaattacctc

SEQ ID NO: 115959 - DNA, 27 bp, Artificial sequence
  SiRNA target sequence
ccttcttcaaagcaggaaattacctca

SEQ ID NO: 115960 - DNA, 27 bp, Artificial sequence
  SiRNA target sequence
cttcttcaaagcaggaaattacctcat

SEQ ID NO: 115961 - DNA, 27 bp, Artificial sequence
  SiRNA target sequence
ttcttcaaagcaggaaattacctcatc

SEQ ID NO: 115962 - DNA, 27 bp, Artificial sequence
  SiRNA target sequence
tcttcaaagcaggaaattacctcatct

SEQ ID NO: 115963 - DNA, 27 bp, Artificial sequence
  SiRNA target sequence
cttcaaagcaggaaattacctcatctt

SEQ ID NO: 115964 - DNA, 27 bp, Artificial sequence
  SiRNA target sequence
ttcaaagcaggaaattacctcatcttc

SEQ ID NO: 115965 - DNA, 27 bp, Artificial sequence
  SiRNA target sequence
tcaaagcaggaaattacctcatcttcg

SEQ ID NO: 115966 - DNA, 27 bp, Artificial sequence
  SiRNA target sequence
caaagcaggaaattacctcatcttcga

SEQ ID NO: 115967 - DNA, 27 bp, Artificial sequence
  SiRNA target sequence
aaagcaggaaattacctcatcttcgat

SEQ ID NO: 115968 - DNA, 27 bp, Artificial sequence
  SiRNA target sequence
aagcaggaaattacctcatcttcgata

SEQ ID NO: 115969 - DNA, 27 bp, Artificial sequence
  SiRNA target sequence
agcaggaaattacctcatcttcgataa

SEQ ID NO: 115970 - DNA, 27 bp, Artificial sequence
  SiRNA target sequence
gcaggaaattacctcatcttcgataat

SEQ ID NO: 115971 - DNA, 27 bp, Artificial sequence
  SiRNA target sequence
caggaaattacctcatcttcgataatt

SEQ ID NO: 115972 - DNA, 27 bp, Artificial sequence
  SiRNA target sequence
aggaaattacctcatcttcgataattt

SEQ ID NO: 115973 - DNA, 27 bp, Artificial sequence
  SiRNA target sequence
ggaaattacctcatcttcgataatttt

SEQ ID NO: 115974 - DNA, 27 bp, Artificial sequence
  SiRNA target sequence
gaaattacctcatcttcgataattttt

SEQ ID NO: 115975 - DNA, 27 bp, Artificial sequence
  SiRNA target sequence
aaattacctcatcttcgataattttta

SEQ ID NO: 115976 - DNA, 27 bp, Artificial sequence
  SiRNA target sequence
aattacctcatcttcgataatttttac

SEQ ID NO: 115977 - DNA, 27 bp, Artificial sequence
  SiRNA target sequence
attacctcatcttcgataatttttact

SEQ ID NO: 115978 - DNA, 27 bp, Artificial sequence
  SiRNA target sequence
ttacctcatcttcgataatttttactt

SEQ ID NO: 115979 - DNA, 27 bp, Artificial sequence
  SiRNA target sequence
tacctcatcttcgataatttttacttc

SEQ ID NO: 115980 - DNA, 27 bp, Artificial sequence
  SiRNA target sequence
acctcatcttcgataatttttacttct

SEQ ID NO: 115981 - DNA, 27 bp, Artificial sequence
  SiRNA target sequence
cctcatcttcgataatttttacttctt

SEQ ID NO: 115982 - DNA, 27 bp, Artificial sequence
  SiRNA target sequence
ctcatcttcgataatttttacttcttc

SEQ ID NO: 115983 - DNA, 27 bp, Artificial sequence
  SiRNA target sequence
tcatcttcgataatttttacttcttca

SEQ ID NO: 115984 - DNA, 27 bp, Artificial sequence
  SiRNA target sequence
catcttcgataatttttacttcttcac

SEQ ID NO: 115985 - DNA, 27 bp, Artificial sequence
  SiRNA target sequence
atcttcgataatttttacttcttcaca

SEQ ID NO: 115986 - DNA, 27 bp, Artificial sequence
  SiRNA target sequence
tcttcgataatttttacttcttcacaa

SEQ ID NO: 115987 - DNA, 27 bp, Artificial sequence
  SiRNA target sequence
cttcgataatttttacttcttcacaag

SEQ ID NO: 115988 - DNA, 27 bp, Artificial sequence
  SiRNA target sequence
ttcgataatttttacttcttcacaagt

SEQ ID NO: 115989 - DNA, 27 bp, Artificial sequence
  SiRNA target sequence
tcgataatttttacttcttcacaagtc

SEQ ID NO: 115990 - DNA, 27 bp, Artificial sequence
  SiRNA target sequence
cgataatttttacttcttcacaagtcg

SEQ ID NO: 115991 - DNA, 27 bp, Artificial sequence
  SiRNA target sequence
gataatttttacttcttcacaagtcgc

SEQ ID NO: 115992 - DNA, 27 bp, Artificial sequence
  SiRNA target sequence
ataatttttacttcttcacaagtcgca

SEQ ID NO: 115993 - DNA, 27 bp, Artificial sequence
  SiRNA target sequence
taatttttacttcttcacaagtcgcaa

SEQ ID NO: 115994 - DNA, 27 bp, Artificial sequence
  SiRNA target sequence
aatttttacttcttcacaagtcgcaaa

SEQ ID NO: 115995 - DNA, 27 bp, Artificial sequence
  SiRNA target sequence
atttttacttcttcacaagtcgcaaat

SEQ ID NO: 115996 - DNA, 27 bp, Artificial sequence
  SiRNA target sequence
tttttacttcttcacaagtcgcaaatt

SEQ ID NO: 115997 - DNA, 27 bp, Artificial sequence
  SiRNA target sequence
ttttacttcttcacaagtcgcaaattt

SEQ ID NO: 115998 - DNA, 27 bp, Artificial sequence
  SiRNA target sequence
tttacttcttcacaagtcgcaaatttt

SEQ ID NO: 115999 - DNA, 27 bp, Artificial sequence
  SiRNA target sequence
ttacttcttcacaagtcgcaaattttt

SEQ ID NO: 116000 - DNA, 27 bp, Artificial sequence
  SiRNA target sequence
tacttcttcacaagtcgcaaatttttg

SEQ ID NO: 116001 - DNA, 27 bp, Artificial sequence
  SiRNA target sequence
acttcttcacaagtcgcaaatttttgt

SEQ ID NO: 116002 - DNA, 27 bp, Artificial sequence
  SiRNA target sequence
cttcttcacaagtcgcaaatttttgta

SEQ ID NO: 116003 - DNA, 27 bp, Artificial sequence
  SiRNA target sequence
ttcttcacaagtcgcaaatttttgtaa

SEQ ID NO: 116004 - DNA, 27 bp, Artificial sequence
  SiRNA target sequence
tcttcacaagtcgcaaatttttgtaag

SEQ ID NO: 116005 - DNA, 27 bp, Artificial sequence
  SiRNA target sequence
cttcacaagtcgcaaatttttgtaagt

SEQ ID NO: 116006 - DNA, 27 bp, Artificial sequence
  SiRNA target sequence
ttcacaagtcgcaaatttttgtaagtt

SEQ ID NO: 116007 - DNA, 27 bp, Artificial sequence
  SiRNA target sequence
tcacaagtcgcaaatttttgtaagtta

SEQ ID NO: 116008 - DNA, 27 bp, Artificial sequence
  SiRNA target sequence
cacaagtcgcaaatttttgtaagttat

SEQ ID NO: 116009 - DNA, 27 bp, Artificial sequence
  SiRNA target sequence
acaagtcgcaaatttttgtaagttatt

SEQ ID NO: 116010 - DNA, 27 bp, Artificial sequence
  SiRNA target sequence
caagtcgcaaatttttgtaagttattt

SEQ ID NO: 116011 - DNA, 27 bp, Artificial sequence
  SiRNA target sequence
aagtcgcaaatttttgtaagttatttt

SEQ ID NO: 116012 - DNA, 27 bp, Artificial sequence
  SiRNA target sequence
agtcgcaaatttttgtaagttattttt

SEQ ID NO: 116013 - DNA, 27 bp, Artificial sequence
  SiRNA target sequence
gtcgcaaatttttgtaagttatttttt

SEQ ID NO: 116014 - DNA, 27 bp, Artificial sequence
  SiRNA target sequence
tcgcaaatttttgtaagttattttttg

SEQ ID NO: 116015 - DNA, 27 bp, Artificial sequence
  SiRNA target sequence
cgcaaatttttgtaagttattttttgc

SEQ ID NO: 116016 - DNA, 27 bp, Artificial sequence
  SiRNA target sequence
gcaaatttttgtaagttattttttgct

SEQ ID NO: 116017 - DNA, 27 bp, Artificial sequence
  SiRNA target sequence
caaatttttgtaagttattttttgctt

SEQ ID NO: 116018 - DNA, 27 bp, Artificial sequence
  SiRNA target sequence
aaatttttgtaagttattttttgcttc

SEQ ID NO: 116019 - DNA, 27 bp, Artificial sequence
  SiRNA target sequence
aatttttgtaagttattttttgcttct

SEQ ID NO: 116020 - DNA, 27 bp, Artificial sequence
  SiRNA target sequence
atttttgtaagttattttttgcttctt

SEQ ID NO: 116021 - DNA, 27 bp, Artificial sequence
  SiRNA target sequence
tttttgtaagttattttttgcttcttt

SEQ ID NO: 116022 - DNA, 27 bp, Artificial sequence
  SiRNA target sequence
ttttgtaagttattttttgcttcttta

SEQ ID NO: 116023 - DNA, 27 bp, Artificial sequence
  SiRNA target sequence
tttgtaagttattttttgcttctttaa

SEQ ID NO: 116024 - DNA, 27 bp, Artificial sequence
  SiRNA target sequence
ttgtaagttattttttgcttctttaag

SEQ ID NO: 116025 - DNA, 27 bp, Artificial sequence
  SiRNA target sequence
tgtaagttattttttgcttctttaagg

SEQ ID NO: 116026 - DNA, 27 bp, Artificial sequence
  SiRNA target sequence
gtaagttattttttgcttctttaaggc

SEQ ID NO: 116027 - DNA, 27 bp, Artificial sequence
  SiRNA target sequence
taagttattttttgcttctttaaggca

SEQ ID NO: 116028 - DNA, 27 bp, Artificial sequence
  SiRNA target sequence
aagttattttttgcttctttaaggcaa

SEQ ID NO: 116029 - DNA, 27 bp, Artificial sequence
  SiRNA target sequence
agttattttttgcttctttaaggcaat

SEQ ID NO: 116030 - DNA, 27 bp, Artificial sequence
  SiRNA target sequence
gttattttttgcttctttaaggcaatc

SEQ ID NO: 116031 - DNA, 27 bp, Artificial sequence
  SiRNA target sequence
ttattttttgcttctttaaggcaatca

SEQ ID NO: 116032 - DNA, 27 bp, Artificial sequence
  SiRNA target sequence
tattttttgcttctttaaggcaatcat

SEQ ID NO: 116033 - DNA, 27 bp, Artificial sequence
  SiRNA target sequence
attttttgcttctttaaggcaatcatt

SEQ ID NO: 116034 - DNA, 27 bp, Artificial sequence
  SiRNA target sequence
ttttttgcttctttaaggcaatcatta

SEQ ID NO: 116035 - DNA, 27 bp, Artificial sequence
  SiRNA target sequence
tttttgcttctttaaggcaatcattat

SEQ ID NO: 116036 - DNA, 27 bp, Artificial sequence
  SiRNA target sequence
ttttgcttctttaaggcaatcattatt

SEQ ID NO: 116037 - DNA, 27 bp, Artificial sequence
  SiRNA target sequence
tttgcttctttaaggcaatcattattt

SEQ ID NO: 116038 - DNA, 27 bp, Artificial sequence
  SiRNA target sequence
ttgcttctttaaggcaatcattatttt

SEQ ID NO: 116039 - DNA, 27 bp, Artificial sequence
  SiRNA target sequence
tgcttctttaaggcaatcattattttt

SEQ ID NO: 116040 - DNA, 27 bp, Artificial sequence
  SiRNA target sequence
gcttctttaaggcaatcattatttttt

SEQ ID NO: 116041 - DNA, 27 bp, Artificial sequence
  SiRNA target sequence
cttctttaaggcaatcattattttttt

SEQ ID NO: 116042 - DNA, 27 bp, Artificial sequence
  SiRNA target sequence
ttctttaaggcaatcattatttttttt

SEQ ID NO: 116043 - DNA, 27 bp, Artificial sequence
  SiRNA target sequence
tctttaaggcaatcattattttttttt

SEQ ID NO: 116044 - DNA, 27 bp, Artificial sequence
  SiRNA target sequence
ctttaaggcaatcattatttttttttt

SEQ ID NO: 116045 - DNA, 27 bp, Artificial sequence
  SiRNA target sequence
tttaaggcaatcattattttttttttc

SEQ ID NO: 116046 - DNA, 27 bp, Artificial sequence
  SiRNA target sequence
ttaaggcaatcattattttttttttca

SEQ ID NO: 116047 - DNA, 27 bp, Artificial sequence
  SiRNA target sequence
taaggcaatcattattttttttttcat

SEQ ID NO: 116048 - DNA, 27 bp, Artificial sequence
  SiRNA target sequence
aaggcaatcattattttttttttcatt

SEQ ID NO: 116049 - DNA, 27 bp, Artificial sequence
  SiRNA target sequence
aggcaatcattattttttttttcatta

SEQ ID NO: 116050 - DNA, 27 bp, Artificial sequence
  SiRNA target sequence
ggcaatcattattttttttttcattaa

SEQ ID NO: 116051 - DNA, 27 bp, Artificial sequence
  SiRNA target sequence
gcaatcattattttttttttcattaat

SEQ ID NO: 116052 - DNA, 27 bp, Artificial sequence
  SiRNA target sequence
caatcattattttttttttcattaatt

SEQ ID NO: 116053 - DNA, 27 bp, Artificial sequence
  SiRNA target sequence
aatcattattttttttttcattaattt

SEQ ID NO: 116054 - DNA, 27 bp, Artificial sequence
  SiRNA target sequence
atcattattttttttttcattaatttc

SEQ ID NO: 116055 - DNA, 27 bp, Artificial sequence
  SiRNA target sequence
tcattattttttttttcattaatttcc

SEQ ID NO: 116056 - DNA, 27 bp, Artificial sequence
  SiRNA target sequence
cattattttttttttcattaatttcct

SEQ ID NO: 116057 - DNA, 27 bp, Artificial sequence
  SiRNA target sequence
attattttttttttcattaatttcctc

SEQ ID NO: 116058 - DNA, 27 bp, Artificial sequence
  SiRNA target sequence
ttattttttttttcattaatttcctcc

SEQ ID NO: 116059 - DNA, 27 bp, Artificial sequence
  SiRNA target sequence
tattttttttttcattaatttcctccg

SEQ ID NO: 116060 - DNA, 27 bp, Artificial sequence
  SiRNA target sequence
attttttttttcattaatttcctccgt

SEQ ID NO: 116061 - DNA, 27 bp, Artificial sequence
  SiRNA target sequence
ttttttttttcattaatttcctccgtg

SEQ ID NO: 116062 - DNA, 27 bp, Artificial sequence
  SiRNA target sequence
tttttttttcattaatttcctccgtgg

SEQ ID NO: 116063 - DNA, 27 bp, Artificial sequence
  SiRNA target sequence
ttttttttcattaatttcctccgtgga

SEQ ID NO: 116064 - DNA, 27 bp, Artificial sequence
  SiRNA target sequence
tttttttcattaatttcctccgtggat

SEQ ID NO: 116065 - DNA, 27 bp, Artificial sequence
  SiRNA target sequence
ttttttcattaatttcctccgtggatc

SEQ ID NO: 116066 - DNA, 27 bp, Artificial sequence
  SiRNA target sequence
tttttcattaatttcctccgtggatct

SEQ ID NO: 116067 - DNA, 27 bp, Artificial sequence
  SiRNA target sequence
ttttcattaatttcctccgtggatctg

SEQ ID NO: 116068 - DNA, 27 bp, Artificial sequence
  SiRNA target sequence
tttcattaatttcctccgtggatctgt

SEQ ID NO: 116069 - DNA, 27 bp, Artificial sequence
  SiRNA target sequence
ttcattaatttcctccgtggatctgta

SEQ ID NO: 116070 - DNA, 27 bp, Artificial sequence
  SiRNA target sequence
tcattaatttcctccgtggatctgtaa

SEQ ID NO: 116071 - DNA, 27 bp, Artificial sequence
  SiRNA target sequence
cattaatttcctccgtggatctgtaaa

SEQ ID NO: 116072 - DNA, 27 bp, Artificial sequence
  SiRNA target sequence
attaatttcctccgtggatctgtaaaa

SEQ ID NO: 116073 - DNA, 27 bp, Artificial sequence
  SiRNA target sequence
ttaatttcctccgtggatctgtaaaaa

SEQ ID NO: 116074 - DNA, 27 bp, Artificial sequence
  SiRNA target sequence
taatttcctccgtggatctgtaaaaat

SEQ ID NO: 116075 - DNA, 27 bp, Artificial sequence
  SiRNA target sequence
aatttcctccgtggatctgtaaaaatc

SEQ ID NO: 116076 - DNA, 27 bp, Artificial sequence
  SiRNA target sequence
atttcctccgtggatctgtaaaaatcg

SEQ ID NO: 116077 - DNA, 27 bp, Artificial sequence
  SiRNA target sequence
tttcctccgtggatctgtaaaaatcgt

SEQ ID NO: 116078 - DNA, 27 bp, Artificial sequence
  SiRNA target sequence
ttcctccgtggatctgtaaaaatcgtt

SEQ ID NO: 116079 - DNA, 27 bp, Artificial sequence
  SiRNA target sequence
tcctccgtggatctgtaaaaatcgtta

SEQ ID NO: 116080 - DNA, 27 bp, Artificial sequence
  SiRNA target sequence
cctccgtggatctgtaaaaatcgttaa

SEQ ID NO: 116081 - DNA, 27 bp, Artificial sequence
  SiRNA target sequence
ctccgtggatctgtaaaaatcgttaac

SEQ ID NO: 116082 - DNA, 27 bp, Artificial sequence
  SiRNA target sequence
tccgtggatctgtaaaaatcgttaaca

SEQ ID NO: 116083 - DNA, 27 bp, Artificial sequence
  SiRNA target sequence
ccgtggatctgtaaaaatcgttaacat

SEQ ID NO: 116084 - DNA, 27 bp, Artificial sequence
  SiRNA target sequence
cgtggatctgtaaaaatcgttaacatc

SEQ ID NO: 116085 - DNA, 27 bp, Artificial sequence
  SiRNA target sequence
gtggatctgtaaaaatcgttaacatct

SEQ ID NO: 116086 - DNA, 27 bp, Artificial sequence
  SiRNA target sequence
tggatctgtaaaaatcgttaacatcta

SEQ ID NO: 116087 - DNA, 27 bp, Artificial sequence
  SiRNA target sequence
ggatctgtaaaaatcgttaacatctaa

SEQ ID NO: 116088 - DNA, 27 bp, Artificial sequence
  SiRNA target sequence
gatctgtaaaaatcgttaacatctaaa

SEQ ID NO: 116089 - DNA, 27 bp, Artificial sequence
  SiRNA target sequence
atctgtaaaaatcgttaacatctaaac

SEQ ID NO: 116090 - DNA, 27 bp, Artificial sequence
  SiRNA target sequence
tctgtaaaaatcgttaacatctaaaca

SEQ ID NO: 116091 - DNA, 27 bp, Artificial sequence
  SiRNA target sequence
ctgtaaaaatcgttaacatctaaacag

SEQ ID NO: 116092 - DNA, 27 bp, Artificial sequence
  SiRNA target sequence
tgtaaaaatcgttaacatctaaacagg

SEQ ID NO: 116093 - DNA, 27 bp, Artificial sequence
  SiRNA target sequence
gtaaaaatcgttaacatctaaacagga

SEQ ID NO: 116094 - DNA, 27 bp, Artificial sequence
  SiRNA target sequence
taaaaatcgttaacatctaaacaggag

SEQ ID NO: 116095 - DNA, 27 bp, Artificial sequence
  SiRNA target sequence
aaaaatcgttaacatctaaacaggagt

SEQ ID NO: 116096 - DNA, 27 bp, Artificial sequence
  SiRNA target sequence
aaaatcgttaacatctaaacaggagtg

SEQ ID NO: 116097 - DNA, 27 bp, Artificial sequence
  SiRNA target sequence
aaatcgttaacatctaaacaggagtgc

SEQ ID NO: 116098 - DNA, 27 bp, Artificial sequence
  SiRNA target sequence
aatcgttaacatctaaacaggagtgcc

SEQ ID NO: 116099 - DNA, 27 bp, Artificial sequence
  SiRNA target sequence
atcgttaacatctaaacaggagtgccc

SEQ ID NO: 116100 - DNA, 27 bp, Artificial sequence
  SiRNA target sequence
tcgttaacatctaaacaggagtgccca

SEQ ID NO: 116101 - DNA, 27 bp, Artificial sequence
  SiRNA target sequence
cgttaacatctaaacaggagtgcccac

SEQ ID NO: 116102 - DNA, 27 bp, Artificial sequence
  SiRNA target sequence
gttaacatctaaacaggagtgcccaca

SEQ ID NO: 116103 - DNA, 27 bp, Artificial sequence
  SiRNA target sequence
ttaacatctaaacaggagtgcccacat

SEQ ID NO: 116104 - DNA, 27 bp, Artificial sequence
  SiRNA target sequence
taacatctaaacaggagtgcccacatg

SEQ ID NO: 116105 - DNA, 27 bp, Artificial sequence
  SiRNA target sequence
aacatctaaacaggagtgcccacatgt

SEQ ID NO: 116106 - DNA, 27 bp, Artificial sequence
  SiRNA target sequence
acatctaaacaggagtgcccacatgtc

SEQ ID NO: 116107 - DNA, 27 bp, Artificial sequence
  SiRNA target sequence
catctaaacaggagtgcccacatgtcc

SEQ ID NO: 116108 - DNA, 27 bp, Artificial sequence
  SiRNA target sequence
atctaaacaggagtgcccacatgtcct

SEQ ID NO: 116109 - DNA, 27 bp, Artificial sequence
  SiRNA target sequence
tctaaacaggagtgcccacatgtcctg

SEQ ID NO: 116110 - DNA, 27 bp, Artificial sequence
  SiRNA target sequence
ctaaacaggagtgcccacatgtcctgt

SEQ ID NO: 116111 - DNA, 27 bp, Artificial sequence
  SiRNA target sequence
taaacaggagtgcccacatgtcctgta

SEQ ID NO: 116112 - DNA, 27 bp, Artificial sequence
  SiRNA target sequence
aaacaggagtgcccacatgtcctgtac

SEQ ID NO: 116113 - DNA, 27 bp, Artificial sequence
  SiRNA target sequence
aacaggagtgcccacatgtcctgtacg

SEQ ID NO: 116114 - DNA, 27 bp, Artificial sequence
  SiRNA target sequence
acaggagtgcccacatgtcctgtacgt

SEQ ID NO: 116115 - DNA, 27 bp, Artificial sequence
  SiRNA target sequence
caggagtgcccacatgtcctgtacgta

SEQ ID NO: 116116 - DNA, 27 bp, Artificial sequence
  SiRNA target sequence
aggagtgcccacatgtcctgtacgtat

SEQ ID NO: 116117 - DNA, 27 bp, Artificial sequence
  SiRNA target sequence
ggagtgcccacatgtcctgtacgtatc

SEQ ID NO: 116118 - DNA, 27 bp, Artificial sequence
  SiRNA target sequence
gagtgcccacatgtcctgtacgtatca

SEQ ID NO: 116119 - DNA, 27 bp, Artificial sequence
  SiRNA target sequence
agtgcccacatgtcctgtacgtatcaa

SEQ ID NO: 116120 - DNA, 27 bp, Artificial sequence
  SiRNA target sequence
gtgcccacatgtcctgtacgtatcaat

SEQ ID NO: 116121 - DNA, 27 bp, Artificial sequence
  SiRNA target sequence
tgcccacatgtcctgtacgtatcaatt

SEQ ID NO: 116122 - DNA, 27 bp, Artificial sequence
  SiRNA target sequence
gcccacatgtcctgtacgtatcaattt

SEQ ID NO: 116123 - DNA, 27 bp, Artificial sequence
  SiRNA target sequence
cccacatgtcctgtacgtatcaatttg

SEQ ID NO: 116124 - DNA, 27 bp, Artificial sequence
  SiRNA target sequence
ccacatgtcctgtacgtatcaatttgc

SEQ ID NO: 116125 - DNA, 27 bp, Artificial sequence
  SiRNA target sequence
cacatgtcctgtacgtatcaatttgca

SEQ ID NO: 116126 - DNA, 27 bp, Artificial sequence
  SiRNA target sequence
acatgtcctgtacgtatcaatttgcaa

SEQ ID NO: 116127 - DNA, 27 bp, Artificial sequence
  SiRNA target sequence
catgtcctgtacgtatcaatttgcaag

SEQ ID NO: 116128 - DNA, 27 bp, Artificial sequence
  SiRNA target sequence
atgtcctgtacgtatcaatttgcaaga

SEQ ID NO: 116129 - DNA, 27 bp, Artificial sequence
  SiRNA target sequence
tgtcctgtacgtatcaatttgcaagat

SEQ ID NO: 116130 - DNA, 27 bp, Artificial sequence
  SiRNA target sequence
gtcctgtacgtatcaatttgcaagatg

SEQ ID NO: 116131 - DNA, 27 bp, Artificial sequence
  SiRNA target sequence
tcctgtacgtatcaatttgcaagatga

SEQ ID NO: 116132 - DNA, 27 bp, Artificial sequence
  SiRNA target sequence
cctgtacgtatcaatttgcaagatgat

SEQ ID NO: 116133 - DNA, 27 bp, Artificial sequence
  SiRNA target sequence
ctgtacgtatcaatttgcaagatgata

SEQ ID NO: 116134 - DNA, 27 bp, Artificial sequence
  SiRNA target sequence
tgtacgtatcaatttgcaagatgatag

SEQ ID NO: 116135 - DNA, 27 bp, Artificial sequence
  SiRNA target sequence
gtacgtatcaatttgcaagatgatagg

SEQ ID NO: 116136 - DNA, 27 bp, Artificial sequence
  SiRNA target sequence
tacgtatcaatttgcaagatgataggt

SEQ ID NO: 116137 - DNA, 27 bp, Artificial sequence
  SiRNA target sequence
acgtatcaatttgcaagatgataggtc

SEQ ID NO: 116138 - DNA, 27 bp, Artificial sequence
  SiRNA target sequence
cgtatcaatttgcaagatgataggtcc

SEQ ID NO: 116139 - DNA, 27 bp, Artificial sequence
  SiRNA target sequence
gtatcaatttgcaagatgataggtcct

SEQ ID NO: 116140 - DNA, 27 bp, Artificial sequence
  SiRNA target sequence
tatcaatttgcaagatgataggtcctt

SEQ ID NO: 116141 - DNA, 27 bp, Artificial sequence
  SiRNA target sequence
atcaatttgcaagatgataggtccttt

SEQ ID NO: 116142 - DNA, 27 bp, Artificial sequence
  SiRNA target sequence
tcaatttgcaagatgataggtcctttt

SEQ ID NO: 116143 - DNA, 27 bp, Artificial sequence
  SiRNA target sequence
caatttgcaagatgataggtccttttt

SEQ ID NO: 116144 - DNA, 27 bp, Artificial sequence
  SiRNA target sequence
aatttgcaagatgataggtcctttttc

SEQ ID NO: 116145 - DNA, 27 bp, Artificial sequence
  SiRNA target sequence
atttgcaagatgataggtcctttttct

SEQ ID NO: 116146 - DNA, 27 bp, Artificial sequence
  SiRNA target sequence
tttgcaagatgataggtcctttttcta

SEQ ID NO: 116147 - DNA, 27 bp, Artificial sequence
  SiRNA target sequence
ttgcaagatgataggtcctttttctat

SEQ ID NO: 116148 - DNA, 27 bp, Artificial sequence
  SiRNA target sequence
tgcaagatgataggtcctttttctatt

SEQ ID NO: 116149 - DNA, 27 bp, Artificial sequence
  SiRNA target sequence
gcaagatgataggtcctttttctattg

SEQ ID NO: 116150 - DNA, 27 bp, Artificial sequence
  SiRNA target sequence
caagatgataggtcctttttctattgc

SEQ ID NO: 116151 - DNA, 27 bp, Artificial sequence
  SiRNA target sequence
aagatgataggtcctttttctattgca

SEQ ID NO: 116152 - DNA, 27 bp, Artificial sequence
  SiRNA target sequence
agatgataggtcctttttctattgcat

SEQ ID NO: 116153 - DNA, 27 bp, Artificial sequence
  SiRNA target sequence
gatgataggtcctttttctattgcatg

SEQ ID NO: 116154 - DNA, 27 bp, Artificial sequence
  SiRNA target sequence
atgataggtcctttttctattgcatgt

SEQ ID NO: 116155 - DNA, 27 bp, Artificial sequence
  SiRNA target sequence
tgataggtcctttttctattgcatgtt

SEQ ID NO: 116156 - DNA, 27 bp, Artificial sequence
  SiRNA target sequence
gataggtcctttttctattgcatgttg

SEQ ID NO: 116157 - DNA, 27 bp, Artificial sequence
  SiRNA target sequence
ataggtcctttttctattgcatgttgt

SEQ ID NO: 116158 - DNA, 27 bp, Artificial sequence
  SiRNA target sequence
taggtcctttttctattgcatgttgtc

SEQ ID NO: 116159 - DNA, 27 bp, Artificial sequence
  SiRNA target sequence
aggtcctttttctattgcatgttgtct

SEQ ID NO: 116160 - DNA, 27 bp, Artificial sequence
  SiRNA target sequence
ggtcctttttctattgcatgttgtcta

SEQ ID NO: 116161 - DNA, 27 bp, Artificial sequence
  SiRNA target sequence
gtcctttttctattgcatgttgtctag

SEQ ID NO: 116162 - DNA, 27 bp, Artificial sequence
  SiRNA target sequence
tcctttttctattgcatgttgtctagc

SEQ ID NO: 116163 - DNA, 27 bp, Artificial sequence
  SiRNA target sequence
cctttttctattgcatgttgtctagca

SEQ ID NO: 116164 - DNA, 27 bp, Artificial sequence
  SiRNA target sequence
ctttttctattgcatgttgtctagcaa

SEQ ID NO: 116165 - DNA, 27 bp, Artificial sequence
  SiRNA target sequence
tttttctattgcatgttgtctagcaaa

SEQ ID NO: 116166 - DNA, 27 bp, Artificial sequence
  SiRNA target sequence
ttttctattgcatgttgtctagcaaat

SEQ ID NO: 116167 - DNA, 27 bp, Artificial sequence
  SiRNA target sequence
tttctattgcatgttgtctagcaaatg

SEQ ID NO: 116168 - DNA, 27 bp, Artificial sequence
  SiRNA target sequence
ttctattgcatgttgtctagcaaatgt

SEQ ID NO: 116169 - DNA, 27 bp, Artificial sequence
  SiRNA target sequence
tctattgcatgttgtctagcaaatgta

SEQ ID NO: 116170 - DNA, 27 bp, Artificial sequence
  SiRNA target sequence
ctattgcatgttgtctagcaaatgtaa

SEQ ID NO: 116171 - DNA, 27 bp, Artificial sequence
  SiRNA target sequence
tattgcatgttgtctagcaaatgtaaa

SEQ ID NO: 116172 - DNA, 27 bp, Artificial sequence
  SiRNA target sequence
attgcatgttgtctagcaaatgtaaat

SEQ ID NO: 116173 - DNA, 27 bp, Artificial sequence
  SiRNA target sequence
ttgcatgttgtctagcaaatgtaaata

SEQ ID NO: 116174 - DNA, 27 bp, Artificial sequence
  SiRNA target sequence
tgcatgttgtctagcaaatgtaaatac

SEQ ID NO: 116175 - DNA, 27 bp, Artificial sequence
  SiRNA target sequence
gcatgttgtctagcaaatgtaaataca

SEQ ID NO: 116176 - DNA, 27 bp, Artificial sequence
  SiRNA target sequence
catgttgtctagcaaatgtaaatacat

SEQ ID NO: 116177 - DNA, 27 bp, Artificial sequence
  SiRNA target sequence
atgttgtctagcaaatgtaaatacatc

SEQ ID NO: 116178 - DNA, 27 bp, Artificial sequence
  SiRNA target sequence
tgttgtctagcaaatgtaaatacatca

SEQ ID NO: 116179 - DNA, 27 bp, Artificial sequence
  SiRNA target sequence
gttgtctagcaaatgtaaatacatcaa

SEQ ID NO: 116180 - DNA, 27 bp, Artificial sequence
  SiRNA target sequence
ttgtctagcaaatgtaaatacatcaat

SEQ ID NO: 116181 - DNA, 27 bp, Artificial sequence
  SiRNA target sequence
tgtctagcaaatgtaaatacatcaatc

SEQ ID NO: 116182 - DNA, 27 bp, Artificial sequence
  SiRNA target sequence
gtctagcaaatgtaaatacatcaatca

SEQ ID NO: 116183 - DNA, 27 bp, Artificial sequence
  SiRNA target sequence
tctagcaaatgtaaatacatcaatcag

SEQ ID NO: 116184 - DNA, 27 bp, Artificial sequence
  SiRNA target sequence
ctagcaaatgtaaatacatcaatcagt

SEQ ID NO: 116185 - DNA, 27 bp, Artificial sequence
  SiRNA target sequence
tagcaaatgtaaatacatcaatcagtt

SEQ ID NO: 116186 - DNA, 27 bp, Artificial sequence
  SiRNA target sequence
agcaaatgtaaatacatcaatcagttg

SEQ ID NO: 116187 - DNA, 27 bp, Artificial sequence
  SiRNA target sequence
gcaaatgtaaatacatcaatcagttga

SEQ ID NO: 116188 - DNA, 27 bp, Artificial sequence
  SiRNA target sequence
caaatgtaaatacatcaatcagttgag

SEQ ID NO: 116189 - DNA, 27 bp, Artificial sequence
  SiRNA target sequence
aaatgtaaatacatcaatcagttgagt

SEQ ID NO: 116190 - DNA, 27 bp, Artificial sequence
  SiRNA target sequence
aatgtaaatacatcaatcagttgagtt

SEQ ID NO: 116191 - DNA, 27 bp, Artificial sequence
  SiRNA target sequence
atgtaaatacatcaatcagttgagtta

SEQ ID NO: 116192 - DNA, 27 bp, Artificial sequence
  SiRNA target sequence
tgtaaatacatcaatcagttgagttat

SEQ ID NO: 116193 - DNA, 27 bp, Artificial sequence
  SiRNA target sequence
gtaaatacatcaatcagttgagttatg

SEQ ID NO: 116194 - DNA, 27 bp, Artificial sequence
  SiRNA target sequence
taaatacatcaatcagttgagttatgt

SEQ ID NO: 116195 - DNA, 27 bp, Artificial sequence
  SiRNA target sequence
aaatacatcaatcagttgagttatgtt

SEQ ID NO: 116196 - DNA, 27 bp, Artificial sequence
  SiRNA target sequence
aatacatcaatcagttgagttatgttt

SEQ ID NO: 116197 - DNA, 27 bp, Artificial sequence
  SiRNA target sequence
atacatcaatcagttgagttatgtttt

SEQ ID NO: 116198 - DNA, 27 bp, Artificial sequence
  SiRNA target sequence
tacatcaatcagttgagttatgttttt

SEQ ID NO: 116199 - DNA, 27 bp, Artificial sequence
  SiRNA target sequence
acatcaatcagttgagttatgttttta

SEQ ID NO: 116200 - DNA, 27 bp, Artificial sequence
  SiRNA target sequence
catcaatcagttgagttatgtttttat

SEQ ID NO: 116201 - DNA, 27 bp, Artificial sequence
  SiRNA target sequence
atcaatcagttgagttatgtttttatc

SEQ ID NO: 116202 - DNA, 27 bp, Artificial sequence
  SiRNA target sequence
tcaatcagttgagttatgtttttatct

SEQ ID NO: 116203 - DNA, 27 bp, Artificial sequence
  SiRNA target sequence
caatcagttgagttatgtttttatctg

SEQ ID NO: 116204 - DNA, 27 bp, Artificial sequence
  SiRNA target sequence
aatcagttgagttatgtttttatctgt

SEQ ID NO: 116205 - DNA, 27 bp, Artificial sequence
  SiRNA target sequence
atcagttgagttatgtttttatctgta

SEQ ID NO: 116206 - DNA, 27 bp, Artificial sequence
  SiRNA target sequence
tcagttgagttatgtttttatctgtaa

SEQ ID NO: 116207 - DNA, 27 bp, Artificial sequence
  SiRNA target sequence
cagttgagttatgtttttatctgtaag

SEQ ID NO: 116208 - DNA, 27 bp, Artificial sequence
  SiRNA target sequence
agttgagttatgtttttatctgtaaga

SEQ ID NO: 116209 - DNA, 27 bp, Artificial sequence
  SiRNA target sequence
gttgagttatgtttttatctgtaagac

SEQ ID NO: 116210 - DNA, 27 bp, Artificial sequence
  SiRNA target sequence
ttgagttatgtttttatctgtaagacg

SEQ ID NO: 116211 - DNA, 27 bp, Artificial sequence
  SiRNA target sequence
tgagttatgtttttatctgtaagacgt

SEQ ID NO: 116212 - DNA, 27 bp, Artificial sequence
  SiRNA target sequence
gagttatgtttttatctgtaagacgta

SEQ ID NO: 116213 - DNA, 27 bp, Artificial sequence
  SiRNA target sequence
agttatgtttttatctgtaagacgtat

SEQ ID NO: 116214 - DNA, 27 bp, Artificial sequence
  SiRNA target sequence
gttatgtttttatctgtaagacgtata

SEQ ID NO: 116215 - DNA, 27 bp, Artificial sequence
  SiRNA target sequence
ttatgtttttatctgtaagacgtatac

SEQ ID NO: 116216 - DNA, 27 bp, Artificial sequence
  SiRNA target sequence
tatgtttttatctgtaagacgtatacc

SEQ ID NO: 116217 - DNA, 27 bp, Artificial sequence
  SiRNA target sequence
atgtttttatctgtaagacgtatacct

SEQ ID NO: 116218 - DNA, 27 bp, Artificial sequence
  SiRNA target sequence
tgtttttatctgtaagacgtatacctg

SEQ ID NO: 116219 - DNA, 27 bp, Artificial sequence
  SiRNA target sequence
gtttttatctgtaagacgtatacctgg

SEQ ID NO: 116220 - DNA, 27 bp, Artificial sequence
  SiRNA target sequence
tttttatctgtaagacgtatacctgga

SEQ ID NO: 116221 - DNA, 27 bp, Artificial sequence
  SiRNA target sequence
ttttatctgtaagacgtatacctggaa

SEQ ID NO: 116222 - DNA, 27 bp, Artificial sequence
  SiRNA target sequence
tttatctgtaagacgtatacctggaat

SEQ ID NO: 116223 - DNA, 27 bp, Artificial sequence
  SiRNA target sequence
ttatctgtaagacgtatacctggaata

SEQ ID NO: 116224 - DNA, 27 bp, Artificial sequence
  SiRNA target sequence
tatctgtaagacgtatacctggaatat

SEQ ID NO: 116225 - DNA, 27 bp, Artificial sequence
  SiRNA target sequence
atctgtaagacgtatacctggaatatt

SEQ ID NO: 116226 - DNA, 27 bp, Artificial sequence
  SiRNA target sequence
tctgtaagacgtatacctggaatatta

SEQ ID NO: 116227 - DNA, 27 bp, Artificial sequence
  SiRNA target sequence
ctgtaagacgtatacctggaatattat

SEQ ID NO: 116228 - DNA, 27 bp, Artificial sequence
  SiRNA target sequence
tgtaagacgtatacctggaatattata

SEQ ID NO: 116229 - DNA, 27 bp, Artificial sequence
  SiRNA target sequence
gtaagacgtatacctggaatattatat

SEQ ID NO: 116230 - DNA, 27 bp, Artificial sequence
  SiRNA target sequence
taagacgtatacctggaatattatatc

SEQ ID NO: 116231 - DNA, 27 bp, Artificial sequence
  SiRNA target sequence
aagacgtatacctggaatattatatcc

SEQ ID NO: 116232 - DNA, 27 bp, Artificial sequence
  SiRNA target sequence
agacgtatacctggaatattatatccc

SEQ ID NO: 116233 - DNA, 27 bp, Artificial sequence
  SiRNA target sequence
gacgtatacctggaatattatatcccc

SEQ ID NO: 116234 - DNA, 27 bp, Artificial sequence
  SiRNA target sequence
acgtatacctggaatattatatcccct

SEQ ID NO: 116235 - DNA, 27 bp, Artificial sequence
  SiRNA target sequence
cgtatacctggaatattatatcccctt

SEQ ID NO: 116236 - DNA, 27 bp, Artificial sequence
  SiRNA target sequence
gtatacctggaatattatatccccttt

SEQ ID NO: 116237 - DNA, 27 bp, Artificial sequence
  SiRNA target sequence
tatacctggaatattatatcccctttt

SEQ ID NO: 116238 - DNA, 27 bp, Artificial sequence
  SiRNA target sequence
atacctggaatattatatcccctttta

SEQ ID NO: 116239 - DNA, 27 bp, Artificial sequence
  SiRNA target sequence
tacctggaatattatatccccttttaa

SEQ ID NO: 116240 - DNA, 27 bp, Artificial sequence
  SiRNA target sequence
acctggaatattatatccccttttaaa

SEQ ID NO: 116241 - DNA, 27 bp, Artificial sequence
  SiRNA target sequence
cctggaatattatatccccttttaaaa

SEQ ID NO: 116242 - DNA, 27 bp, Artificial sequence
  SiRNA target sequence
ctggaatattatatccccttttaaaat

SEQ ID NO: 116243 - DNA, 27 bp, Artificial sequence
  SiRNA target sequence
tggaatattatatccccttttaaaata

SEQ ID NO: 116244 - DNA, 27 bp, Artificial sequence
  SiRNA target sequence
ggaatattatatccccttttaaaatat

SEQ ID NO: 116245 - DNA, 27 bp, Artificial sequence
  SiRNA target sequence
gaatattatatccccttttaaaatatt

SEQ ID NO: 116246 - DNA, 27 bp, Artificial sequence
  SiRNA target sequence
aatattatatccccttttaaaatattc

SEQ ID NO: 116247 - DNA, 27 bp, Artificial sequence
  SiRNA target sequence
atattatatccccttttaaaatattca

SEQ ID NO: 116248 - DNA, 27 bp, Artificial sequence
  SiRNA target sequence
tattatatccccttttaaaatattcag

SEQ ID NO: 116249 - DNA, 27 bp, Artificial sequence
  SiRNA target sequence
attatatccccttttaaaatattcagg

SEQ ID NO: 116250 - DNA, 27 bp, Artificial sequence
  SiRNA target sequence
ttatatccccttttaaaatattcagga

SEQ ID NO: 116251 - DNA, 27 bp, Artificial sequence
  SiRNA target sequence
tatatccccttttaaaatattcaggat

SEQ ID NO: 116252 - DNA, 27 bp, Artificial sequence
  SiRNA target sequence
atatccccttttaaaatattcaggata

SEQ ID NO: 116253 - DNA, 27 bp, Artificial sequence
  SiRNA target sequence
tatccccttttaaaatattcaggatat

SEQ ID NO: 116254 - DNA, 27 bp, Artificial sequence
  SiRNA target sequence
atccccttttaaaatattcaggatatg

SEQ ID NO: 116255 - DNA, 27 bp, Artificial sequence
  SiRNA target sequence
tccccttttaaaatattcaggatatgt

SEQ ID NO: 116256 - DNA, 27 bp, Artificial sequence
  SiRNA target sequence
ccccttttaaaatattcaggatatgta

SEQ ID NO: 116257 - DNA, 27 bp, Artificial sequence
  SiRNA target sequence
cccttttaaaatattcaggatatgtag

SEQ ID NO: 116258 - DNA, 27 bp, Artificial sequence
  SiRNA target sequence
ccttttaaaatattcaggatatgtagt

SEQ ID NO: 116259 - DNA, 27 bp, Artificial sequence
  SiRNA target sequence
cttttaaaatattcaggatatgtagtg

SEQ ID NO: 116260 - DNA, 27 bp, Artificial sequence
  SiRNA target sequence
ttttaaaatattcaggatatgtagtgg

SEQ ID NO: 116261 - DNA, 27 bp, Artificial sequence
  SiRNA target sequence
tttaaaatattcaggatatgtagtgga

SEQ ID NO: 116262 - DNA, 27 bp, Artificial sequence
  SiRNA target sequence
ttaaaatattcaggatatgtagtggaa

SEQ ID NO: 116263 - DNA, 27 bp, Artificial sequence
  SiRNA target sequence
taaaatattcaggatatgtagtggaat

SEQ ID NO: 116264 - DNA, 27 bp, Artificial sequence
  SiRNA target sequence
aaaatattcaggatatgtagtggaatt

SEQ ID NO: 116265 - DNA, 27 bp, Artificial sequence
  SiRNA target sequence
aaatattcaggatatgtagtggaatta

SEQ ID NO: 116266 - DNA, 27 bp, Artificial sequence
  SiRNA target sequence
aatattcaggatatgtagtggaattac

SEQ ID NO: 116267 - DNA, 27 bp, Artificial sequence
  SiRNA target sequence
atattcaggatatgtagtggaattact

SEQ ID NO: 116268 - DNA, 27 bp, Artificial sequence
  SiRNA target sequence
tattcaggatatgtagtggaattactt

SEQ ID NO: 116269 - DNA, 27 bp, Artificial sequence
  SiRNA target sequence
attcaggatatgtagtggaattacttt

SEQ ID NO: 116270 - DNA, 27 bp, Artificial sequence
  SiRNA target sequence
ttcaggatatgtagtggaattactttc

SEQ ID NO: 116271 - DNA, 27 bp, Artificial sequence
  SiRNA target sequence
tcaggatatgtagtggaattactttca

SEQ ID NO: 116272 - DNA, 27 bp, Artificial sequence
  SiRNA target sequence
caggatatgtagtggaattactttcag

SEQ ID NO: 116273 - DNA, 27 bp, Artificial sequence
  SiRNA target sequence
aggatatgtagtggaattactttcagg

SEQ ID NO: 116274 - DNA, 27 bp, Artificial sequence
  SiRNA target sequence
ggatatgtagtggaattactttcaggt

SEQ ID NO: 116275 - DNA, 27 bp, Artificial sequence
  SiRNA target sequence
gatatgtagtggaattactttcaggtg

SEQ ID NO: 116276 - DNA, 27 bp, Artificial sequence
  SiRNA target sequence
atatgtagtggaattactttcaggtgt

SEQ ID NO: 116277 - DNA, 27 bp, Artificial sequence
  SiRNA target sequence
tatgtagtggaattactttcaggtgtc

SEQ ID NO: 116278 - DNA, 27 bp, Artificial sequence
  SiRNA target sequence
atgtagtggaattactttcaggtgtcc

SEQ ID NO: 116279 - DNA, 27 bp, Artificial sequence
  SiRNA target sequence
tgtagtggaattactttcaggtgtcca

SEQ ID NO: 116280 - DNA, 27 bp, Artificial sequence
  SiRNA target sequence
gtagtggaattactttcaggtgtccac

SEQ ID NO: 116281 - DNA, 27 bp, Artificial sequence
  SiRNA target sequence
tagtggaattactttcaggtgtccaca

SEQ ID NO: 116282 - DNA, 27 bp, Artificial sequence
  SiRNA target sequence
agtggaattactttcaggtgtccacat

SEQ ID NO: 116283 - DNA, 27 bp, Artificial sequence
  SiRNA target sequence
gtggaattactttcaggtgtccacata

SEQ ID NO: 116284 - DNA, 27 bp, Artificial sequence
  SiRNA target sequence
tggaattactttcaggtgtccacatac

SEQ ID NO: 116285 - DNA, 27 bp, Artificial sequence
  SiRNA target sequence
ggaattactttcaggtgtccacatact

SEQ ID NO: 116286 - DNA, 27 bp, Artificial sequence
  SiRNA target sequence
gaattactttcaggtgtccacatacta

SEQ ID NO: 116287 - DNA, 27 bp, Artificial sequence
  SiRNA target sequence
aattactttcaggtgtccacatactat

SEQ ID NO: 116288 - DNA, 27 bp, Artificial sequence
  SiRNA target sequence
attactttcaggtgtccacatactata

SEQ ID NO: 116289 - DNA, 27 bp, Artificial sequence
  SiRNA target sequence
ttactttcaggtgtccacatactataa

SEQ ID NO: 116290 - DNA, 27 bp, Artificial sequence
  SiRNA target sequence
tactttcaggtgtccacatactataat

SEQ ID NO: 116291 - DNA, 27 bp, Artificial sequence
  SiRNA target sequence
actttcaggtgtccacatactataatg

SEQ ID NO: 116292 - DNA, 27 bp, Artificial sequence
  SiRNA target sequence
ctttcaggtgtccacatactataatga

SEQ ID NO: 116293 - DNA, 27 bp, Artificial sequence
  SiRNA target sequence
tttcaggtgtccacatactataatgat

SEQ ID NO: 116294 - DNA, 27 bp, Artificial sequence
  SiRNA target sequence
ttcaggtgtccacatactataatgatt

SEQ ID NO: 116295 - DNA, 27 bp, Artificial sequence
  SiRNA target sequence
tcaggtgtccacatactataatgatta

SEQ ID NO: 116296 - DNA, 27 bp, Artificial sequence
  SiRNA target sequence
caggtgtccacatactataatgattat

SEQ ID NO: 116297 - DNA, 27 bp, Artificial sequence
  SiRNA target sequence
aggtgtccacatactataatgattatt

SEQ ID NO: 116298 - DNA, 27 bp, Artificial sequence
  SiRNA target sequence
ggtgtccacatactataatgattattt

SEQ ID NO: 116299 - DNA, 27 bp, Artificial sequence
  SiRNA target sequence
gtgtccacatactataatgattatttt

SEQ ID NO: 116300 - DNA, 27 bp, Artificial sequence
  SiRNA target sequence
tgtccacatactataatgattattttc

SEQ ID NO: 116301 - DNA, 27 bp, Artificial sequence
  SiRNA target sequence
gtccacatactataatgattattttca

SEQ ID NO: 116302 - DNA, 27 bp, Artificial sequence
  SiRNA target sequence
tccacatactataatgattattttcac

SEQ ID NO: 116303 - DNA, 27 bp, Artificial sequence
  SiRNA target sequence
ccacatactataatgattattttcaca

SEQ ID NO: 116304 - DNA, 27 bp, Artificial sequence
  SiRNA target sequence
cacatactataatgattattttcacat

SEQ ID NO: 116305 - DNA, 27 bp, Artificial sequence
  SiRNA target sequence
acatactataatgattattttcacata

SEQ ID NO: 116306 - DNA, 27 bp, Artificial sequence
  SiRNA target sequence
catactataatgattattttcacatac

SEQ ID NO: 116307 - DNA, 27 bp, Artificial sequence
  SiRNA target sequence
atactataatgattattttcacataca

SEQ ID NO: 116308 - DNA, 27 bp, Artificial sequence
  SiRNA target sequence
tactataatgattattttcacatacat

SEQ ID NO: 116309 - DNA, 27 bp, Artificial sequence
  SiRNA target sequence
actataatgattattttcacatacata

SEQ ID NO: 116310 - DNA, 27 bp, Artificial sequence
  SiRNA target sequence
ctataatgattattttcacatacataa

SEQ ID NO: 116311 - DNA, 27 bp, Artificial sequence
  SiRNA target sequence
tataatgattattttcacatacataaa

SEQ ID NO: 116312 - DNA, 27 bp, Artificial sequence
  SiRNA target sequence
ataatgattattttcacatacataaac

SEQ ID NO: 116313 - DNA, 27 bp, Artificial sequence
  SiRNA target sequence
taatgattattttcacatacataaacc

SEQ ID NO: 116314 - DNA, 27 bp, Artificial sequence
  SiRNA target sequence
aatgattattttcacatacataaacca

SEQ ID NO: 116315 - DNA, 27 bp, Artificial sequence
  SiRNA target sequence
atgattattttcacatacataaaccac

SEQ ID NO: 116316 - DNA, 27 bp, Artificial sequence
  SiRNA target sequence
tgattattttcacatacataaaccaca

SEQ ID NO: 116317 - DNA, 27 bp, Artificial sequence
  SiRNA target sequence
gattattttcacatacataaaccacag

SEQ ID NO: 116318 - DNA, 27 bp, Artificial sequence
  SiRNA target sequence
attattttcacatacataaaccacagg

SEQ ID NO: 116319 - DNA, 27 bp, Artificial sequence
  SiRNA target sequence
ttattttcacatacataaaccacagga

SEQ ID NO: 116320 - DNA, 27 bp, Artificial sequence
  SiRNA target sequence
tattttcacatacataaaccacaggaa

SEQ ID NO: 116321 - DNA, 27 bp, Artificial sequence
  SiRNA target sequence
attttcacatacataaaccacaggaag

SEQ ID NO: 116322 - DNA, 27 bp, Artificial sequence
  SiRNA target sequence
ttttcacatacataaaccacaggaagt

SEQ ID NO: 116323 - DNA, 27 bp, Artificial sequence
  SiRNA target sequence
tttcacatacataaaccacaggaagtt

SEQ ID NO: 116324 - DNA, 27 bp, Artificial sequence
  SiRNA target sequence
ttcacatacataaaccacaggaagttt

SEQ ID NO: 116325 - DNA, 27 bp, Artificial sequence
  SiRNA target sequence
tcacatacataaaccacaggaagtttc

SEQ ID NO: 116326 - DNA, 27 bp, Artificial sequence
  SiRNA target sequence
cacatacataaaccacaggaagtttcc

SEQ ID NO: 116327 - DNA, 27 bp, Artificial sequence
  SiRNA target sequence
acatacataaaccacaggaagtttcca

SEQ ID NO: 116328 - DNA, 27 bp, Artificial sequence
  SiRNA target sequence
catacataaaccacaggaagtttccat

SEQ ID NO: 116329 - DNA, 27 bp, Artificial sequence
  SiRNA target sequence
atacataaaccacaggaagtttccata

SEQ ID NO: 116330 - DNA, 27 bp, Artificial sequence
  SiRNA target sequence
tacataaaccacaggaagtttccataa

SEQ ID NO: 116331 - DNA, 27 bp, Artificial sequence
  SiRNA target sequence
acataaaccacaggaagtttccataat

SEQ ID NO: 116332 - DNA, 27 bp, Artificial sequence
  SiRNA target sequence
cataaaccacaggaagtttccataatg

SEQ ID NO: 116333 - DNA, 27 bp, Artificial sequence
  SiRNA target sequence
ataaaccacaggaagtttccataatgc

SEQ ID NO: 116334 - DNA, 27 bp, Artificial sequence
  SiRNA target sequence
taaaccacaggaagtttccataatgca

SEQ ID NO: 116335 - DNA, 27 bp, Artificial sequence
  SiRNA target sequence
aaaccacaggaagtttccataatgcag

SEQ ID NO: 116336 - DNA, 27 bp, Artificial sequence
  SiRNA target sequence
aaccacaggaagtttccataatgcagc

SEQ ID NO: 116337 - DNA, 27 bp, Artificial sequence
  SiRNA target sequence
accacaggaagtttccataatgcagcc

SEQ ID NO: 116338 - DNA, 27 bp, Artificial sequence
  SiRNA target sequence
ccacaggaagtttccataatgcagcca

SEQ ID NO: 116339 - DNA, 27 bp, Artificial sequence
  SiRNA target sequence
cacaggaagtttccataatgcagccat

SEQ ID NO: 116340 - DNA, 27 bp, Artificial sequence
  SiRNA target sequence
acaggaagtttccataatgcagccata

SEQ ID NO: 116341 - DNA, 27 bp, Artificial sequence
  SiRNA target sequence
caggaagtttccataatgcagccatat

SEQ ID NO: 116342 - DNA, 27 bp, Artificial sequence
  SiRNA target sequence
aggaagtttccataatgcagccatatt

SEQ ID NO: 116343 - DNA, 27 bp, Artificial sequence
  SiRNA target sequence
ggaagtttccataatgcagccatattg

SEQ ID NO: 116344 - DNA, 27 bp, Artificial sequence
  SiRNA target sequence
gaagtttccataatgcagccatattga

SEQ ID NO: 116345 - DNA, 27 bp, Artificial sequence
  SiRNA target sequence
aagtttccataatgcagccatattgaa

SEQ ID NO: 116346 - DNA, 27 bp, Artificial sequence
  SiRNA target sequence
agtttccataatgcagccatattgaac

SEQ ID NO: 116347 - DNA, 27 bp, Artificial sequence
  SiRNA target sequence
gtttccataatgcagccatattgaacg

SEQ ID NO: 116348 - DNA, 27 bp, Artificial sequence
  SiRNA target sequence
tttccataatgcagccatattgaacga

SEQ ID NO: 116349 - DNA, 27 bp, Artificial sequence
  SiRNA target sequence
ttccataatgcagccatattgaacgac

SEQ ID NO: 116350 - DNA, 27 bp, Artificial sequence
  SiRNA target sequence
tccataatgcagccatattgaacgact

SEQ ID NO: 116351 - DNA, 27 bp, Artificial sequence
  SiRNA target sequence
ccataatgcagccatattgaacgactc

SEQ ID NO: 116352 - DNA, 27 bp, Artificial sequence
  SiRNA target sequence
cataatgcagccatattgaacgactcc

SEQ ID NO: 116353 - DNA, 27 bp, Artificial sequence
  SiRNA target sequence
ataatgcagccatattgaacgactccc

SEQ ID NO: 116354 - DNA, 27 bp, Artificial sequence
  SiRNA target sequence
taatgcagccatattgaacgactccca

SEQ ID NO: 116355 - DNA, 27 bp, Artificial sequence
  SiRNA target sequence
aatgcagccatattgaacgactcccag

SEQ ID NO: 116356 - DNA, 27 bp, Artificial sequence
  SiRNA target sequence
atgcagccatattgaacgactcccaga

SEQ ID NO: 116357 - DNA, 27 bp, Artificial sequence
  SiRNA target sequence
tgcagccatattgaacgactcccagac

SEQ ID NO: 116358 - DNA, 27 bp, Artificial sequence
  SiRNA target sequence
gcagccatattgaacgactcccagacc

SEQ ID NO: 116359 - DNA, 27 bp, Artificial sequence
  SiRNA target sequence
cagccatattgaacgactcccagacct

SEQ ID NO: 116360 - DNA, 27 bp, Artificial sequence
  SiRNA target sequence
agccatattgaacgactcccagacctg

SEQ ID NO: 116361 - DNA, 27 bp, Artificial sequence
  SiRNA target sequence
gccatattgaacgactcccagacctgt

SEQ ID NO: 116362 - DNA, 27 bp, Artificial sequence
  SiRNA target sequence
ccatattgaacgactcccagacctgtc

SEQ ID NO: 116363 - DNA, 27 bp, Artificial sequence
  SiRNA target sequence
catattgaacgactcccagacctgtcc

SEQ ID NO: 116364 - DNA, 27 bp, Artificial sequence
  SiRNA target sequence
atattgaacgactcccagacctgtccc

SEQ ID NO: 116365 - DNA, 27 bp, Artificial sequence
  SiRNA target sequence
tattgaacgactcccagacctgtccct

SEQ ID NO: 116366 - DNA, 27 bp, Artificial sequence
  SiRNA target sequence
attgaacgactcccagacctgtccctg

SEQ ID NO: 116367 - DNA, 27 bp, Artificial sequence
  SiRNA target sequence
ttgaacgactcccagacctgtccctga

SEQ ID NO: 116368 - DNA, 27 bp, Artificial sequence
  SiRNA target sequence
tgaacgactcccagacctgtccctgat

SEQ ID NO: 116369 - DNA, 27 bp, Artificial sequence
  SiRNA target sequence
gaacgactcccagacctgtccctgatt

SEQ ID NO: 116370 - DNA, 27 bp, Artificial sequence
  SiRNA target sequence
aacgactcccagacctgtccctgattt

SEQ ID NO: 116371 - DNA, 27 bp, Artificial sequence
  SiRNA target sequence
acgactcccagacctgtccctgatttg

SEQ ID NO: 116372 - DNA, 27 bp, Artificial sequence
  SiRNA target sequence
cgactcccagacctgtccctgatttgc

SEQ ID NO: 116373 - DNA, 27 bp, Artificial sequence
  SiRNA target sequence
gactcccagacctgtccctgatttgca

SEQ ID NO: 116374 - DNA, 27 bp, Artificial sequence
  SiRNA target sequence
actcccagacctgtccctgatttgcag

SEQ ID NO: 116375 - DNA, 27 bp, Artificial sequence
  SiRNA target sequence
ctcccagacctgtccctgatttgcagc

SEQ ID NO: 116376 - DNA, 27 bp, Artificial sequence
  SiRNA target sequence
tcccagacctgtccctgatttgcagca

SEQ ID NO: 116377 - DNA, 27 bp, Artificial sequence
  SiRNA target sequence
cccagacctgtccctgatttgcagcac

SEQ ID NO: 116378 - DNA, 27 bp, Artificial sequence
  SiRNA target sequence
ccagacctgtccctgatttgcagcacc

SEQ ID NO: 116379 - DNA, 27 bp, Artificial sequence
  SiRNA target sequence
cagacctgtccctgatttgcagcacca

SEQ ID NO: 116380 - DNA, 27 bp, Artificial sequence
  SiRNA target sequence
agacctgtccctgatttgcagcaccat

SEQ ID NO: 116381 - DNA, 27 bp, Artificial sequence
  SiRNA target sequence
gacctgtccctgatttgcagcaccatc

SEQ ID NO: 116382 - DNA, 27 bp, Artificial sequence
  SiRNA target sequence
acctgtccctgatttgcagcaccatcc

SEQ ID NO: 116383 - DNA, 27 bp, Artificial sequence
  SiRNA target sequence
cctgtccctgatttgcagcaccatccc

SEQ ID NO: 116384 - DNA, 27 bp, Artificial sequence
  SiRNA target sequence
ctgtccctgatttgcagcaccatcccc

SEQ ID NO: 116385 - DNA, 27 bp, Artificial sequence
  SiRNA target sequence
tgtccctgatttgcagcaccatccccg

SEQ ID NO: 116386 - DNA, 27 bp, Artificial sequence
  SiRNA target sequence
gtccctgatttgcagcaccatccccga

SEQ ID NO: 116387 - DNA, 27 bp, Artificial sequence
  SiRNA target sequence
tccctgatttgcagcaccatccccgaa

SEQ ID NO: 116388 - DNA, 27 bp, Artificial sequence
  SiRNA target sequence
ccctgatttgcagcaccatccccgaaa

SEQ ID NO: 116389 - DNA, 27 bp, Artificial sequence
  SiRNA target sequence
cctgatttgcagcaccatccccgaaaa

SEQ ID NO: 116390 - DNA, 27 bp, Artificial sequence
  SiRNA target sequence
ctgatttgcagcaccatccccgaaaaa

SEQ ID NO: 116391 - DNA, 27 bp, Artificial sequence
  SiRNA target sequence
tgatttgcagcaccatccccgaaaaat

SEQ ID NO: 116392 - DNA, 27 bp, Artificial sequence
  SiRNA target sequence
gatttgcagcaccatccccgaaaaata

SEQ ID NO: 116393 - DNA, 27 bp, Artificial sequence
  SiRNA target sequence
atttgcagcaccatccccgaaaaatac

SEQ ID NO: 116394 - DNA, 27 bp, Artificial sequence
  SiRNA target sequence
tttgcagcaccatccccgaaaaataca

SEQ ID NO: 116395 - DNA, 27 bp, Artificial sequence
  SiRNA target sequence
ttgcagcaccatccccgaaaaatacaa

SEQ ID NO: 116396 - DNA, 27 bp, Artificial sequence
  SiRNA target sequence
tgcagcaccatccccgaaaaatacaaa

SEQ ID NO: 116397 - DNA, 27 bp, Artificial sequence
  SiRNA target sequence
gcagcaccatccccgaaaaatacaaat

SEQ ID NO: 116398 - DNA, 27 bp, Artificial sequence
  SiRNA target sequence
cagcaccatccccgaaaaatacaaatg

SEQ ID NO: 116399 - DNA, 27 bp, Artificial sequence
  SiRNA target sequence
agcaccatccccgaaaaatacaaatgc

SEQ ID NO: 116400 - DNA, 27 bp, Artificial sequence
  SiRNA target sequence
gcaccatccccgaaaaatacaaatgct

SEQ ID NO: 116401 - DNA, 27 bp, Artificial sequence
  SiRNA target sequence
caccatccccgaaaaatacaaatgcta

SEQ ID NO: 116402 - DNA, 27 bp, Artificial sequence
  SiRNA target sequence
accatccccgaaaaatacaaatgctac

SEQ ID NO: 116403 - DNA, 27 bp, Artificial sequence
  SiRNA target sequence
ccatccccgaaaaatacaaatgctaca

SEQ ID NO: 116404 - DNA, 27 bp, Artificial sequence
  SiRNA target sequence
catccccgaaaaatacaaatgctacat

SEQ ID NO: 116405 - DNA, 27 bp, Artificial sequence
  SiRNA target sequence
atccccgaaaaatacaaatgctacatt

SEQ ID NO: 116406 - DNA, 27 bp, Artificial sequence
  SiRNA target sequence
tccccgaaaaatacaaatgctacattt

SEQ ID NO: 116407 - DNA, 27 bp, Artificial sequence
  SiRNA target sequence
ccccgaaaaatacaaatgctacatttt

SEQ ID NO: 116408 - DNA, 27 bp, Artificial sequence
  SiRNA target sequence
cccgaaaaatacaaatgctacattttt

SEQ ID NO: 116409 - DNA, 27 bp, Artificial sequence
  SiRNA target sequence
ccgaaaaatacaaatgctacatttttt

SEQ ID NO: 116410 - DNA, 27 bp, Artificial sequence
  SiRNA target sequence
cgaaaaatacaaatgctacatttttta

SEQ ID NO: 116411 - DNA, 27 bp, Artificial sequence
  SiRNA target sequence
gaaaaatacaaatgctacattttttac

SEQ ID NO: 116412 - DNA, 27 bp, Artificial sequence
  SiRNA target sequence
aaaaatacaaatgctacattttttact

SEQ ID NO: 116413 - DNA, 27 bp, Artificial sequence
  SiRNA target sequence
aaaatacaaatgctacattttttactt

SEQ ID NO: 116414 - DNA, 27 bp, Artificial sequence
  SiRNA target sequence
aaatacaaatgctacattttttacttt

SEQ ID NO: 116415 - DNA, 27 bp, Artificial sequence
  SiRNA target sequence
aatacaaatgctacattttttactttt

SEQ ID NO: 116416 - DNA, 27 bp, Artificial sequence
  SiRNA target sequence
atacaaatgctacattttttacttttt

SEQ ID NO: 116417 - DNA, 27 bp, Artificial sequence
  SiRNA target sequence
tacaaatgctacattttttactttttt

SEQ ID NO: 116418 - DNA, 27 bp, Artificial sequence
  SiRNA target sequence
acaaatgctacattttttactttttta

SEQ ID NO: 116419 - DNA, 27 bp, Artificial sequence
  SiRNA target sequence
caaatgctacattttttacttttttat

SEQ ID NO: 116420 - DNA, 27 bp, Artificial sequence
  SiRNA target sequence
aaatgctacattttttacttttttata

SEQ ID NO: 116421 - DNA, 27 bp, Artificial sequence
  SiRNA target sequence
aatgctacattttttacttttttatat

SEQ ID NO: 116422 - DNA, 27 bp, Artificial sequence
  SiRNA target sequence
atgctacattttttacttttttatatt

SEQ ID NO: 116423 - DNA, 27 bp, Artificial sequence
  SiRNA target sequence
tgctacattttttacttttttatattg

SEQ ID NO: 116424 - DNA, 27 bp, Artificial sequence
  SiRNA target sequence
gctacattttttacttttttatattgt

SEQ ID NO: 116425 - DNA, 27 bp, Artificial sequence
  SiRNA target sequence
ctacattttttacttttttatattgta

SEQ ID NO: 116426 - DNA, 27 bp, Artificial sequence
  SiRNA target sequence
tacattttttacttttttatattgtaa

SEQ ID NO: 116427 - DNA, 27 bp, Artificial sequence
  SiRNA target sequence
acattttttacttttttatattgtaaa

SEQ ID NO: 116428 - DNA, 27 bp, Artificial sequence
  SiRNA target sequence
cattttttacttttttatattgtaaag

SEQ ID NO: 116429 - DNA, 27 bp, Artificial sequence
  SiRNA target sequence
attttttacttttttatattgtaaagc

SEQ ID NO: 116430 - DNA, 27 bp, Artificial sequence
  SiRNA target sequence
ttttttacttttttatattgtaaagca

SEQ ID NO: 116431 - DNA, 27 bp, Artificial sequence
  SiRNA target sequence
tttttacttttttatattgtaaagcaa

SEQ ID NO: 116432 - DNA, 27 bp, Artificial sequence
  SiRNA target sequence
ttttacttttttatattgtaaagcaaa

SEQ ID NO: 116433 - DNA, 27 bp, Artificial sequence
  SiRNA target sequence
tttacttttttatattgtaaagcaaat

SEQ ID NO: 116434 - DNA, 27 bp, Artificial sequence
  SiRNA target sequence
ttacttttttatattgtaaagcaaatc

SEQ ID NO: 116435 - DNA, 27 bp, Artificial sequence
  SiRNA target sequence
tacttttttatattgtaaagcaaatcc

SEQ ID NO: 116436 - DNA, 27 bp, Artificial sequence
  SiRNA target sequence
acttttttatattgtaaagcaaatccc

SEQ ID NO: 116437 - DNA, 27 bp, Artificial sequence
  SiRNA target sequence
cttttttatattgtaaagcaaatccca

SEQ ID NO: 116438 - DNA, 27 bp, Artificial sequence
  SiRNA target sequence
ttttttatattgtaaagcaaatcccaa

SEQ ID NO: 116439 - DNA, 27 bp, Artificial sequence
  SiRNA target sequence
tttttatattgtaaagcaaatcccaat

SEQ ID NO: 116440 - DNA, 27 bp, Artificial sequence
  SiRNA target sequence
ttttatattgtaaagcaaatcccaatc

SEQ ID NO: 116441 - DNA, 27 bp, Artificial sequence
  SiRNA target sequence
tttatattgtaaagcaaatcccaatcc

SEQ ID NO: 116442 - DNA, 27 bp, Artificial sequence
  SiRNA target sequence
ttatattgtaaagcaaatcccaatcct

SEQ ID NO: 116443 - DNA, 27 bp, Artificial sequence
  SiRNA target sequence
tatattgtaaagcaaatcccaatcctg

SEQ ID NO: 116444 - DNA, 27 bp, Artificial sequence
  SiRNA target sequence
atattgtaaagcaaatcccaatcctgt

SEQ ID NO: 116445 - DNA, 27 bp, Artificial sequence
  SiRNA target sequence
tattgtaaagcaaatcccaatcctgta

SEQ ID NO: 116446 - DNA, 27 bp, Artificial sequence
  SiRNA target sequence
attgtaaagcaaatcccaatcctgtac

SEQ ID NO: 116447 - DNA, 27 bp, Artificial sequence
  SiRNA target sequence
ttgtaaagcaaatcccaatcctgtacc

SEQ ID NO: 116448 - DNA, 27 bp, Artificial sequence
  SiRNA target sequence
tgtaaagcaaatcccaatcctgtacca

SEQ ID NO: 116449 - DNA, 27 bp, Artificial sequence
  SiRNA target sequence
gtaaagcaaatcccaatcctgtaccaa

SEQ ID NO: 116450 - DNA, 27 bp, Artificial sequence
  SiRNA target sequence
taaagcaaatcccaatcctgtaccaag

SEQ ID NO: 116451 - DNA, 27 bp, Artificial sequence
  SiRNA target sequence
aaagcaaatcccaatcctgtaccaagc

SEQ ID NO: 116452 - DNA, 27 bp, Artificial sequence
  SiRNA target sequence
aagcaaatcccaatcctgtaccaagcg

SEQ ID NO: 116453 - DNA, 27 bp, Artificial sequence
  SiRNA target sequence
agcaaatcccaatcctgtaccaagcga

SEQ ID NO: 116454 - DNA, 27 bp, Artificial sequence
  SiRNA target sequence
gcaaatcccaatcctgtaccaagcgat

SEQ ID NO: 116455 - DNA, 27 bp, Artificial sequence
  SiRNA target sequence
caaatcccaatcctgtaccaagcgata

SEQ ID NO: 116456 - DNA, 27 bp, Artificial sequence
  SiRNA target sequence
aaatcccaatcctgtaccaagcgatac

SEQ ID NO: 116457 - DNA, 27 bp, Artificial sequence
  SiRNA target sequence
aatcccaatcctgtaccaagcgatacc

SEQ ID NO: 116458 - DNA, 27 bp, Artificial sequence
  SiRNA target sequence
atcccaatcctgtaccaagcgatacct

SEQ ID NO: 116459 - DNA, 27 bp, Artificial sequence
  SiRNA target sequence
tcccaatcctgtaccaagcgatacctg

SEQ ID NO: 116460 - DNA, 27 bp, Artificial sequence
  SiRNA target sequence
cccaatcctgtaccaagcgatacctgc

SEQ ID NO: 116461 - DNA, 27 bp, Artificial sequence
  SiRNA target sequence
ccaatcctgtaccaagcgatacctgcg

SEQ ID NO: 116462 - DNA, 27 bp, Artificial sequence
  SiRNA target sequence
caatcctgtaccaagcgatacctgcgc

SEQ ID NO: 116463 - DNA, 27 bp, Artificial sequence
  SiRNA target sequence
aatcctgtaccaagcgatacctgcgca

SEQ ID NO: 116464 - DNA, 27 bp, Artificial sequence
  SiRNA target sequence
atcctgtaccaagcgatacctgcgcac

SEQ ID NO: 116465 - DNA, 27 bp, Artificial sequence
  SiRNA target sequence
tcctgtaccaagcgatacctgcgcacc

SEQ ID NO: 116466 - DNA, 27 bp, Artificial sequence
  SiRNA target sequence
cctgtaccaagcgatacctgcgcacct

SEQ ID NO: 116467 - DNA, 27 bp, Artificial sequence
  SiRNA target sequence
ctgtaccaagcgatacctgcgcaccta

SEQ ID NO: 116468 - DNA, 27 bp, Artificial sequence
  SiRNA target sequence
tgtaccaagcgatacctgcgcacctac

SEQ ID NO: 116469 - DNA, 27 bp, Artificial sequence
  SiRNA target sequence
gtaccaagcgatacctgcgcacctact

SEQ ID NO: 116470 - DNA, 27 bp, Artificial sequence
  SiRNA target sequence
taccaagcgatacctgcgcacctacta

SEQ ID NO: 116471 - DNA, 27 bp, Artificial sequence
  SiRNA target sequence
accaagcgatacctgcgcacctactat

SEQ ID NO: 116472 - DNA, 27 bp, Artificial sequence
  SiRNA target sequence
ccaagcgatacctgcgcacctactata

SEQ ID NO: 116473 - DNA, 27 bp, Artificial sequence
  SiRNA target sequence
caagcgatacctgcgcacctactatac

SEQ ID NO: 116474 - DNA, 27 bp, Artificial sequence
  SiRNA target sequence
aagcgatacctgcgcacctactatacc

SEQ ID NO: 116475 - DNA, 27 bp, Artificial sequence
  SiRNA target sequence
agcgatacctgcgcacctactataccg

SEQ ID NO: 116476 - DNA, 27 bp, Artificial sequence
  SiRNA target sequence
gcgatacctgcgcacctactataccgt

SEQ ID NO: 116477 - DNA, 27 bp, Artificial sequence
  SiRNA target sequence
cgatacctgcgcacctactataccgtg

SEQ ID NO: 116478 - DNA, 27 bp, Artificial sequence
  SiRNA target sequence
gatacctgcgcacctactataccgtgt

SEQ ID NO: 116479 - DNA, 27 bp, Artificial sequence
  SiRNA target sequence
atacctgcgcacctactataccgtgtc

SEQ ID NO: 116480 - DNA, 27 bp, Artificial sequence
  SiRNA target sequence
tacctgcgcacctactataccgtgtcc

SEQ ID NO: 116481 - DNA, 27 bp, Artificial sequence
  SiRNA target sequence
acctgcgcacctactataccgtgtccc

SEQ ID NO: 116482 - DNA, 27 bp, Artificial sequence
  SiRNA target sequence
cctgcgcacctactataccgtgtcccc

SEQ ID NO: 116483 - DNA, 27 bp, Artificial sequence
  SiRNA target sequence
ctgcgcacctactataccgtgtccccc

SEQ ID NO: 116484 - DNA, 27 bp, Artificial sequence
  SiRNA target sequence
tgcgcacctactataccgtgtccccca

SEQ ID NO: 116485 - DNA, 27 bp, Artificial sequence
  SiRNA target sequence
gcgcacctactataccgtgtcccccat

SEQ ID NO: 116486 - DNA, 27 bp, Artificial sequence
  SiRNA target sequence
cgcacctactataccgtgtcccccata

SEQ ID NO: 116487 - DNA, 27 bp, Artificial sequence
  SiRNA target sequence
gcacctactataccgtgtcccccataa

SEQ ID NO: 116488 - DNA, 27 bp, Artificial sequence
  SiRNA target sequence
cacctactataccgtgtcccccataaa

SEQ ID NO: 116489 - DNA, 27 bp, Artificial sequence
  SiRNA target sequence
acctactataccgtgtcccccataaaa

SEQ ID NO: 116490 - DNA, 27 bp, Artificial sequence
  SiRNA target sequence
cctactataccgtgtcccccataaaat

SEQ ID NO: 116491 - DNA, 27 bp, Artificial sequence
  SiRNA target sequence
ctactataccgtgtcccccataaaatt

SEQ ID NO: 116492 - DNA, 27 bp, Artificial sequence
  SiRNA target sequence
tactataccgtgtcccccataaaattg

SEQ ID NO: 116493 - DNA, 27 bp, Artificial sequence
  SiRNA target sequence
actataccgtgtcccccataaaattgg

SEQ ID NO: 116494 - DNA, 27 bp, Artificial sequence
  SiRNA target sequence
ctataccgtgtcccccataaaattggt

SEQ ID NO: 116495 - DNA, 27 bp, Artificial sequence
  SiRNA target sequence
tataccgtgtcccccataaaattggtc

SEQ ID NO: 116496 - DNA, 27 bp, Artificial sequence
  SiRNA target sequence
ataccgtgtcccccataaaattggtca

SEQ ID NO: 116497 - DNA, 27 bp, Artificial sequence
  SiRNA target sequence
taccgtgtcccccataaaattggtcat

SEQ ID NO: 116498 - DNA, 27 bp, Artificial sequence
  SiRNA target sequence
accgtgtcccccataaaattggtcatt

SEQ ID NO: 116499 - DNA, 27 bp, Artificial sequence
  SiRNA target sequence
ccgtgtcccccataaaattggtcatta

SEQ ID NO: 116500 - DNA, 27 bp, Artificial sequence
  SiRNA target sequence
cgtgtcccccataaaattggtcattat

SEQ ID NO: 116501 - DNA, 27 bp, Artificial sequence
  SiRNA target sequence
gtgtcccccataaaattggtcattata

SEQ ID NO: 116502 - DNA, 27 bp, Artificial sequence
  SiRNA target sequence
tgtcccccataaaattggtcattatac

SEQ ID NO: 116503 - DNA, 27 bp, Artificial sequence
  SiRNA target sequence
gtcccccataaaattggtcattataca

SEQ ID NO: 116504 - DNA, 27 bp, Artificial sequence
  SiRNA target sequence
tcccccataaaattggtcattatacaa

SEQ ID NO: 116505 - DNA, 27 bp, Artificial sequence
  SiRNA target sequence
cccccataaaattggtcattatacaaa

SEQ ID NO: 116506 - DNA, 27 bp, Artificial sequence
  SiRNA target sequence
ccccataaaattggtcattatacaaat

SEQ ID NO: 116507 - DNA, 27 bp, Artificial sequence
  SiRNA target sequence
cccataaaattggtcattatacaaatg

SEQ ID NO: 116508 - DNA, 27 bp, Artificial sequence
  SiRNA target sequence
ccataaaattggtcattatacaaatgc

SEQ ID NO: 116509 - DNA, 27 bp, Artificial sequence
  SiRNA target sequence
cataaaattggtcattatacaaatgca

SEQ ID NO: 116510 - DNA, 27 bp, Artificial sequence
  SiRNA target sequence
ataaaattggtcattatacaaatgcat

SEQ ID NO: 116511 - DNA, 27 bp, Artificial sequence
  SiRNA target sequence
taaaattggtcattatacaaatgcatc

SEQ ID NO: 116512 - DNA, 27 bp, Artificial sequence
  SiRNA target sequence
aaaattggtcattatacaaatgcatcg

SEQ ID NO: 116513 - DNA, 27 bp, Artificial sequence
  SiRNA target sequence
aaattggtcattatacaaatgcatcga

SEQ ID NO: 116514 - DNA, 27 bp, Artificial sequence
  SiRNA target sequence
aattggtcattatacaaatgcatcgat

SEQ ID NO: 116515 - DNA, 27 bp, Artificial sequence
  SiRNA target sequence
attggtcattatacaaatgcatcgatc

SEQ ID NO: 116516 - DNA, 27 bp, Artificial sequence
  SiRNA target sequence
ttggtcattatacaaatgcatcgatcc

SEQ ID NO: 116517 - DNA, 27 bp, Artificial sequence
  SiRNA target sequence
tggtcattatacaaatgcatcgatcct

SEQ ID NO: 116518 - DNA, 27 bp, Artificial sequence
  SiRNA target sequence
ggtcattatacaaatgcatcgatcctc

SEQ ID NO: 116519 - DNA, 27 bp, Artificial sequence
  SiRNA target sequence
gtcattatacaaatgcatcgatcctcc

SEQ ID NO: 116520 - DNA, 27 bp, Artificial sequence
  SiRNA target sequence
tcattatacaaatgcatcgatcctcct

SEQ ID NO: 116521 - DNA, 27 bp, Artificial sequence
  SiRNA target sequence
cattatacaaatgcatcgatcctcctt

SEQ ID NO: 116522 - DNA, 27 bp, Artificial sequence
  SiRNA target sequence
attatacaaatgcatcgatcctccttt

SEQ ID NO: 116523 - DNA, 27 bp, Artificial sequence
  SiRNA target sequence
ttatacaaatgcatcgatcctcctttt

SEQ ID NO: 116524 - DNA, 27 bp, Artificial sequence
  SiRNA target sequence
tatacaaatgcatcgatcctccttttc

SEQ ID NO: 116525 - DNA, 27 bp, Artificial sequence
  SiRNA target sequence
atacaaatgcatcgatcctccttttcc

SEQ ID NO: 116526 - DNA, 27 bp, Artificial sequence
  SiRNA target sequence
tacaaatgcatcgatcctccttttcct

SEQ ID NO: 116527 - DNA, 27 bp, Artificial sequence
  SiRNA target sequence
acaaatgcatcgatcctccttttcctt

SEQ ID NO: 116528 - DNA, 27 bp, Artificial sequence
  SiRNA target sequence
caaatgcatcgatcctccttttccttt

SEQ ID NO: 116529 - DNA, 27 bp, Artificial sequence
  SiRNA target sequence
aaatgcatcgatcctccttttcctttg

SEQ ID NO: 116530 - DNA, 27 bp, Artificial sequence
  SiRNA target sequence
aatgcatcgatcctccttttcctttgc

SEQ ID NO: 116531 - DNA, 27 bp, Artificial sequence
  SiRNA target sequence
atgcatcgatcctccttttcctttgca

SEQ ID NO: 116532 - DNA, 27 bp, Artificial sequence
  SiRNA target sequence
tgcatcgatcctccttttcctttgcaa

SEQ ID NO: 116533 - DNA, 27 bp, Artificial sequence
  SiRNA target sequence
gcatcgatcctccttttcctttgcaat

SEQ ID NO: 116534 - DNA, 27 bp, Artificial sequence
  SiRNA target sequence
catcgatcctccttttcctttgcaatt

SEQ ID NO: 116535 - DNA, 27 bp, Artificial sequence
  SiRNA target sequence
atcgatcctccttttcctttgcaatta

SEQ ID NO: 116536 - DNA, 27 bp, Artificial sequence
  SiRNA target sequence
tcgatcctccttttcctttgcaattac

SEQ ID NO: 116537 - DNA, 27 bp, Artificial sequence
  SiRNA target sequence
cgatcctccttttcctttgcaattacc

SEQ ID NO: 116538 - DNA, 27 bp, Artificial sequence
  SiRNA target sequence
gatcctccttttcctttgcaattacca

SEQ ID NO: 116539 - DNA, 27 bp, Artificial sequence
  SiRNA target sequence
atcctccttttcctttgcaattaccaa

SEQ ID NO: 116540 - DNA, 27 bp, Artificial sequence
  SiRNA target sequence
tcctccttttcctttgcaattaccaat

SEQ ID NO: 116541 - DNA, 27 bp, Artificial sequence
  SiRNA target sequence
cctccttttcctttgcaattaccaata

SEQ ID NO: 116542 - DNA, 27 bp, Artificial sequence
  SiRNA target sequence
ctccttttcctttgcaattaccaatag

SEQ ID NO: 116543 - DNA, 27 bp, Artificial sequence
  SiRNA target sequence
tccttttcctttgcaattaccaatagc

SEQ ID NO: 116544 - DNA, 27 bp, Artificial sequence
  SiRNA target sequence
ccttttcctttgcaattaccaatagcc

SEQ ID NO: 116545 - DNA, 27 bp, Artificial sequence
  SiRNA target sequence
cttttcctttgcaattaccaatagcct

SEQ ID NO: 116546 - DNA, 27 bp, Artificial sequence
  SiRNA target sequence
ttttcctttgcaattaccaatagcctt

SEQ ID NO: 116547 - DNA, 27 bp, Artificial sequence
  SiRNA target sequence
tttcctttgcaattaccaatagccttt

SEQ ID NO: 116548 - DNA, 27 bp, Artificial sequence
  SiRNA target sequence
ttcctttgcaattaccaatagcctttc

SEQ ID NO: 116549 - DNA, 27 bp, Artificial sequence
  SiRNA target sequence
tcctttgcaattaccaatagcctttcc

SEQ ID NO: 116550 - DNA, 27 bp, Artificial sequence
  SiRNA target sequence
cctttgcaattaccaatagcctttcct

SEQ ID NO: 116551 - DNA, 27 bp, Artificial sequence
  SiRNA target sequence
ctttgcaattaccaatagcctttccta

SEQ ID NO: 116552 - DNA, 27 bp, Artificial sequence
  SiRNA target sequence
tttgcaattaccaatagcctttcctaa

SEQ ID NO: 116553 - DNA, 27 bp, Artificial sequence
  SiRNA target sequence
ttgcaattaccaatagcctttcctaat

SEQ ID NO: 116554 - DNA, 27 bp, Artificial sequence
  SiRNA target sequence
tgcaattaccaatagcctttcctaata

SEQ ID NO: 116555 - DNA, 27 bp, Artificial sequence
  SiRNA target sequence
gcaattaccaatagcctttcctaataa

SEQ ID NO: 116556 - DNA, 27 bp, Artificial sequence
  SiRNA target sequence
caattaccaatagcctttcctaataat

SEQ ID NO: 116557 - DNA, 27 bp, Artificial sequence
  SiRNA target sequence
aattaccaatagcctttcctaataatt

SEQ ID NO: 116558 - DNA, 27 bp, Artificial sequence
  SiRNA target sequence
attaccaatagcctttcctaataattc

SEQ ID NO: 116559 - DNA, 27 bp, Artificial sequence
  SiRNA target sequence
ttaccaatagcctttcctaataattcc

SEQ ID NO: 116560 - DNA, 27 bp, Artificial sequence
  SiRNA target sequence
taccaatagcctttcctaataattccc

SEQ ID NO: 116561 - DNA, 27 bp, Artificial sequence
  SiRNA target sequence
accaatagcctttcctaataattcccc

SEQ ID NO: 116562 - DNA, 27 bp, Artificial sequence
  SiRNA target sequence
ccaatagcctttcctaataattcccct

SEQ ID NO: 116563 - DNA, 27 bp, Artificial sequence
  SiRNA target sequence
caatagcctttcctaataattccccta

SEQ ID NO: 116564 - DNA, 27 bp, Artificial sequence
  SiRNA target sequence
aatagcctttcctaataattcccctat

SEQ ID NO: 116565 - DNA, 27 bp, Artificial sequence
  SiRNA target sequence
atagcctttcctaataattcccctata

SEQ ID NO: 116566 - DNA, 27 bp, Artificial sequence
  SiRNA target sequence
tagcctttcctaataattcccctataa

SEQ ID NO: 116567 - DNA, 27 bp, Artificial sequence
  SiRNA target sequence
agcctttcctaataattcccctataat

SEQ ID NO: 116568 - DNA, 27 bp, Artificial sequence
  SiRNA target sequence
gcctttcctaataattcccctataata

SEQ ID NO: 116569 - DNA, 27 bp, Artificial sequence
  SiRNA target sequence
cctttcctaataattcccctataatac

SEQ ID NO: 116570 - DNA, 27 bp, Artificial sequence
  SiRNA target sequence
ctttcctaataattcccctataatact

SEQ ID NO: 116571 - DNA, 27 bp, Artificial sequence
  SiRNA target sequence
tttcctaataattcccctataatactt

SEQ ID NO: 116572 - DNA, 27 bp, Artificial sequence
  SiRNA target sequence
ttcctaataattcccctataatacttt

SEQ ID NO: 116573 - DNA, 27 bp, Artificial sequence
  SiRNA target sequence
tcctaataattcccctataatactttc

SEQ ID NO: 116574 - DNA, 27 bp, Artificial sequence
  SiRNA target sequence
cctaataattcccctataatactttct

SEQ ID NO: 116575 - DNA, 27 bp, Artificial sequence
  SiRNA target sequence
ctaataattcccctataatactttcta

SEQ ID NO: 116576 - DNA, 27 bp, Artificial sequence
  SiRNA target sequence
taataattcccctataatactttctat

SEQ ID NO: 116577 - DNA, 27 bp, Artificial sequence
  SiRNA target sequence
aataattcccctataatactttctata

SEQ ID NO: 116578 - DNA, 27 bp, Artificial sequence
  SiRNA target sequence
ataattcccctataatactttctatac

SEQ ID NO: 116579 - DNA, 27 bp, Artificial sequence
  SiRNA target sequence
taattcccctataatactttctatact

SEQ ID NO: 116580 - DNA, 27 bp, Artificial sequence
  SiRNA target sequence
aattcccctataatactttctatactg

SEQ ID NO: 116581 - DNA, 27 bp, Artificial sequence
  SiRNA target sequence
attcccctataatactttctatactga

SEQ ID NO: 116582 - DNA, 27 bp, Artificial sequence
  SiRNA target sequence
ttcccctataatactttctatactgat

SEQ ID NO: 116583 - DNA, 27 bp, Artificial sequence
  SiRNA target sequence
tcccctataatactttctatactgatt

SEQ ID NO: 116584 - DNA, 27 bp, Artificial sequence
  SiRNA target sequence
cccctataatactttctatactgattc

SEQ ID NO: 116585 - DNA, 27 bp, Artificial sequence
  SiRNA target sequence
ccctataatactttctatactgattcc

SEQ ID NO: 116586 - DNA, 27 bp, Artificial sequence
  SiRNA target sequence
cctataatactttctatactgattcca

SEQ ID NO: 116587 - DNA, 27 bp, Artificial sequence
  SiRNA target sequence
ctataatactttctatactgattccac

SEQ ID NO: 116588 - DNA, 27 bp, Artificial sequence
  SiRNA target sequence
tataatactttctatactgattccaca

SEQ ID NO: 116589 - DNA, 27 bp, Artificial sequence
  SiRNA target sequence
ataatactttctatactgattccacaa

SEQ ID NO: 116590 - DNA, 27 bp, Artificial sequence
  SiRNA target sequence
taatactttctatactgattccacaaa

SEQ ID NO: 116591 - DNA, 27 bp, Artificial sequence
  SiRNA target sequence
aatactttctatactgattccacaaat

SEQ ID NO: 116592 - DNA, 27 bp, Artificial sequence
  SiRNA target sequence
atactttctatactgattccacaaata

SEQ ID NO: 116593 - DNA, 27 bp, Artificial sequence
  SiRNA target sequence
tactttctatactgattccacaaataa

SEQ ID NO: 116594 - DNA, 27 bp, Artificial sequence
  SiRNA target sequence
actttctatactgattccacaaataaa

SEQ ID NO: 116595 - DNA, 27 bp, Artificial sequence
  SiRNA target sequence
ctttctatactgattccacaaataaat

SEQ ID NO: 116596 - DNA, 27 bp, Artificial sequence
  SiRNA target sequence
tttctatactgattccacaaataaatg

SEQ ID NO: 116597 - DNA, 27 bp, Artificial sequence
  SiRNA target sequence
ttctatactgattccacaaataaatgc

SEQ ID NO: 116598 - DNA, 27 bp, Artificial sequence
  SiRNA target sequence
tctatactgattccacaaataaatgct

SEQ ID NO: 116599 - DNA, 27 bp, Artificial sequence
  SiRNA target sequence
ctatactgattccacaaataaatgcta

SEQ ID NO: 116600 - DNA, 27 bp, Artificial sequence
  SiRNA target sequence
tatactgattccacaaataaatgctaa

SEQ ID NO: 116601 - DNA, 27 bp, Artificial sequence
  SiRNA target sequence
atactgattccacaaataaatgctaat

SEQ ID NO: 116602 - DNA, 27 bp, Artificial sequence
  SiRNA target sequence
tactgattccacaaataaatgctaatc

SEQ ID NO: 116603 - DNA, 27 bp, Artificial sequence
  SiRNA target sequence
actgattccacaaataaatgctaatcc

SEQ ID NO: 116604 - DNA, 27 bp, Artificial sequence
  SiRNA target sequence
ctgattccacaaataaatgctaatcca

SEQ ID NO: 116605 - DNA, 27 bp, Artificial sequence
  SiRNA target sequence
tgattccacaaataaatgctaatccat

SEQ ID NO: 116606 - DNA, 27 bp, Artificial sequence
  SiRNA target sequence
gattccacaaataaatgctaatccatg

SEQ ID NO: 116607 - DNA, 27 bp, Artificial sequence
  SiRNA target sequence
attccacaaataaatgctaatccatgg

SEQ ID NO: 116608 - DNA, 27 bp, Artificial sequence
  SiRNA target sequence
ttccacaaataaatgctaatccatggc

SEQ ID NO: 116609 - DNA, 27 bp, Artificial sequence
  SiRNA target sequence
tccacaaataaatgctaatccatggca

SEQ ID NO: 116610 - DNA, 27 bp, Artificial sequence
  SiRNA target sequence
ccacaaataaatgctaatccatggcat

SEQ ID NO: 116611 - DNA, 27 bp, Artificial sequence
  SiRNA target sequence
cacaaataaatgctaatccatggcatc

SEQ ID NO: 116612 - DNA, 27 bp, Artificial sequence
  SiRNA target sequence
acaaataaatgctaatccatggcatct

SEQ ID NO: 116613 - DNA, 27 bp, Artificial sequence
  SiRNA target sequence
caaataaatgctaatccatggcatcta

SEQ ID NO: 116614 - DNA, 27 bp, Artificial sequence
  SiRNA target sequence
aaataaatgctaatccatggcatctat

SEQ ID NO: 116615 - DNA, 27 bp, Artificial sequence
  SiRNA target sequence
aataaatgctaatccatggcatctata

SEQ ID NO: 116616 - DNA, 27 bp, Artificial sequence
  SiRNA target sequence
ataaatgctaatccatggcatctataa

SEQ ID NO: 116617 - DNA, 27 bp, Artificial sequence
  SiRNA target sequence
taaatgctaatccatggcatctataag

SEQ ID NO: 116618 - DNA, 27 bp, Artificial sequence
  SiRNA target sequence
aaatgctaatccatggcatctataaga

SEQ ID NO: 116619 - DNA, 27 bp, Artificial sequence
  SiRNA target sequence
aatgctaatccatggcatctataagat

SEQ ID NO: 116620 - DNA, 27 bp, Artificial sequence
  SiRNA target sequence
atgctaatccatggcatctataagatc

SEQ ID NO: 116621 - DNA, 27 bp, Artificial sequence
  SiRNA target sequence
tgctaatccatggcatctataagatcc

SEQ ID NO: 116622 - DNA, 27 bp, Artificial sequence
  SiRNA target sequence
gctaatccatggcatctataagatcct

SEQ ID NO: 116623 - DNA, 27 bp, Artificial sequence
  SiRNA target sequence
ctaatccatggcatctataagatccta

SEQ ID NO: 116624 - DNA, 27 bp, Artificial sequence
  SiRNA target sequence
taatccatggcatctataagatcctat

SEQ ID NO: 116625 - DNA, 27 bp, Artificial sequence
  SiRNA target sequence
aatccatggcatctataagatcctatg

SEQ ID NO: 116626 - DNA, 27 bp, Artificial sequence
  SiRNA target sequence
atccatggcatctataagatcctatga

SEQ ID NO: 116627 - DNA, 27 bp, Artificial sequence
  SiRNA target sequence
tccatggcatctataagatcctatgac

SEQ ID NO: 116628 - DNA, 27 bp, Artificial sequence
  SiRNA target sequence
ccatggcatctataagatcctatgact

SEQ ID NO: 116629 - DNA, 27 bp, Artificial sequence
  SiRNA target sequence
catggcatctataagatcctatgactt

SEQ ID NO: 116630 - DNA, 27 bp, Artificial sequence
  SiRNA target sequence
atggcatctataagatcctatgacttt

SEQ ID NO: 116631 - DNA, 27 bp, Artificial sequence
  SiRNA target sequence
tggcatctataagatcctatgacttta

SEQ ID NO: 116632 - DNA, 27 bp, Artificial sequence
  SiRNA target sequence
ggcatctataagatcctatgactttat

SEQ ID NO: 116633 - DNA, 27 bp, Artificial sequence
  SiRNA target sequence
gcatctataagatcctatgactttatc

SEQ ID NO: 116634 - DNA, 27 bp, Artificial sequence
  SiRNA target sequence
catctataagatcctatgactttatca

SEQ ID NO: 116635 - DNA, 27 bp, Artificial sequence
  SiRNA target sequence
atctataagatcctatgactttatcat

SEQ ID NO: 116636 - DNA, 27 bp, Artificial sequence
  SiRNA target sequence
tctataagatcctatgactttatcatt

SEQ ID NO: 116637 - DNA, 27 bp, Artificial sequence
  SiRNA target sequence
ctataagatcctatgactttatcattt

SEQ ID NO: 116638 - DNA, 27 bp, Artificial sequence
  SiRNA target sequence
tataagatcctatgactttatcatttt

SEQ ID NO: 116639 - DNA, 27 bp, Artificial sequence
  SiRNA target sequence
ataagatcctatgactttatcattttt

SEQ ID NO: 116640 - DNA, 27 bp, Artificial sequence
  SiRNA target sequence
taagatcctatgactttatcattttta

SEQ ID NO: 116641 - DNA, 27 bp, Artificial sequence
  SiRNA target sequence
aagatcctatgactttatcatttttat

SEQ ID NO: 116642 - DNA, 27 bp, Artificial sequence
  SiRNA target sequence
agatcctatgactttatcatttttatc

SEQ ID NO: 116643 - DNA, 27 bp, Artificial sequence
  SiRNA target sequence
gatcctatgactttatcatttttatct

SEQ ID NO: 116644 - DNA, 27 bp, Artificial sequence
  SiRNA target sequence
atcctatgactttatcatttttatcta

SEQ ID NO: 116645 - DNA, 27 bp, Artificial sequence
  SiRNA target sequence
tcctatgactttatcatttttatctag

SEQ ID NO: 116646 - DNA, 27 bp, Artificial sequence
  SiRNA target sequence
cctatgactttatcatttttatctagt

SEQ ID NO: 116647 - DNA, 27 bp, Artificial sequence
  SiRNA target sequence
ctatgactttatcatttttatctagta

SEQ ID NO: 116648 - DNA, 27 bp, Artificial sequence
  SiRNA target sequence
tatgactttatcatttttatctagtac

SEQ ID NO: 116649 - DNA, 27 bp, Artificial sequence
  SiRNA target sequence
atgactttatcatttttatctagtacc

SEQ ID NO: 116650 - DNA, 27 bp, Artificial sequence
  SiRNA target sequence
tgactttatcatttttatctagtacct

SEQ ID NO: 116651 - DNA, 27 bp, Artificial sequence
  SiRNA target sequence
gactttatcatttttatctagtacctt

SEQ ID NO: 116652 - DNA, 27 bp, Artificial sequence
  SiRNA target sequence
actttatcatttttatctagtaccttt

SEQ ID NO: 116653 - DNA, 27 bp, Artificial sequence
  SiRNA target sequence
ctttatcatttttatctagtacctttt

SEQ ID NO: 116654 - DNA, 27 bp, Artificial sequence
  SiRNA target sequence
tttatcatttttatctagtaccttttg

SEQ ID NO: 116655 - DNA, 27 bp, Artificial sequence
  SiRNA target sequence
ttatcatttttatctagtaccttttgt

SEQ ID NO: 116656 - DNA, 27 bp, Artificial sequence
  SiRNA target sequence
tatcatttttatctagtaccttttgta

SEQ ID NO: 116657 - DNA, 27 bp, Artificial sequence
  SiRNA target sequence
atcatttttatctagtaccttttgtaa

SEQ ID NO: 116658 - DNA, 27 bp, Artificial sequence
  SiRNA target sequence
tcatttttatctagtaccttttgtaaa

SEQ ID NO: 116659 - DNA, 27 bp, Artificial sequence
  SiRNA target sequence
catttttatctagtaccttttgtaaac

SEQ ID NO: 116660 - DNA, 27 bp, Artificial sequence
  SiRNA target sequence
atttttatctagtaccttttgtaaact

SEQ ID NO: 116661 - DNA, 27 bp, Artificial sequence
  SiRNA target sequence
tttttatctagtaccttttgtaaactc

SEQ ID NO: 116662 - DNA, 27 bp, Artificial sequence
  SiRNA target sequence
ttttatctagtaccttttgtaaactca

SEQ ID NO: 116663 - DNA, 27 bp, Artificial sequence
  SiRNA target sequence
tttatctagtaccttttgtaaactcat

SEQ ID NO: 116664 - DNA, 27 bp, Artificial sequence
  SiRNA target sequence
ttatctagtaccttttgtaaactcata

SEQ ID NO: 116665 - DNA, 27 bp, Artificial sequence
  SiRNA target sequence
tatctagtaccttttgtaaactcatat

SEQ ID NO: 116666 - DNA, 27 bp, Artificial sequence
  SiRNA target sequence
atctagtaccttttgtaaactcatata

SEQ ID NO: 116667 - DNA, 27 bp, Artificial sequence
  SiRNA target sequence
tctagtaccttttgtaaactcatataa

SEQ ID NO: 116668 - DNA, 27 bp, Artificial sequence
  SiRNA target sequence
ctagtaccttttgtaaactcatataaa

SEQ ID NO: 116669 - DNA, 27 bp, Artificial sequence
  SiRNA target sequence
tagtaccttttgtaaactcatataaat

SEQ ID NO: 116670 - DNA, 27 bp, Artificial sequence
  SiRNA target sequence
agtaccttttgtaaactcatataaatg

SEQ ID NO: 116671 - DNA, 27 bp, Artificial sequence
  SiRNA target sequence
gtaccttttgtaaactcatataaatgt

SEQ ID NO: 116672 - DNA, 27 bp, Artificial sequence
  SiRNA target sequence
taccttttgtaaactcatataaatgtt

SEQ ID NO: 116673 - DNA, 27 bp, Artificial sequence
  SiRNA target sequence
accttttgtaaactcatataaatgttt

SEQ ID NO: 116674 - DNA, 27 bp, Artificial sequence
  SiRNA target sequence
ccttttgtaaactcatataaatgtttt

SEQ ID NO: 116675 - DNA, 27 bp, Artificial sequence
  SiRNA target sequence
cttttgtaaactcatataaatgttttc

SEQ ID NO: 116676 - DNA, 27 bp, Artificial sequence
  SiRNA target sequence
ttttgtaaactcatataaatgttttcc

SEQ ID NO: 116677 - DNA, 27 bp, Artificial sequence
  SiRNA target sequence
tttgtaaactcatataaatgttttcct

SEQ ID NO: 116678 - DNA, 27 bp, Artificial sequence
  SiRNA target sequence
ttgtaaactcatataaatgttttcctg

SEQ ID NO: 116679 - DNA, 27 bp, Artificial sequence
  SiRNA target sequence
tgtaaactcatataaatgttttcctgt

SEQ ID NO: 116680 - DNA, 27 bp, Artificial sequence
  SiRNA target sequence
gtaaactcatataaatgttttcctgtc

SEQ ID NO: 116681 - DNA, 27 bp, Artificial sequence
  SiRNA target sequence
taaactcatataaatgttttcctgtcc

SEQ ID NO: 116682 - DNA, 27 bp, Artificial sequence
  SiRNA target sequence
aaactcatataaatgttttcctgtcct

SEQ ID NO: 116683 - DNA, 27 bp, Artificial sequence
  SiRNA target sequence
aactcatataaatgttttcctgtccta

SEQ ID NO: 116684 - DNA, 27 bp, Artificial sequence
  SiRNA target sequence
actcatataaatgttttcctgtcctat

SEQ ID NO: 116685 - DNA, 27 bp, Artificial sequence
  SiRNA target sequence
ctcatataaatgttttcctgtcctatt

SEQ ID NO: 116686 - DNA, 27 bp, Artificial sequence
  SiRNA target sequence
tcatataaatgttttcctgtcctatta

SEQ ID NO: 116687 - DNA, 27 bp, Artificial sequence
  SiRNA target sequence
catataaatgttttcctgtcctattac

SEQ ID NO: 116688 - DNA, 27 bp, Artificial sequence
  SiRNA target sequence
atataaatgttttcctgtcctattact

SEQ ID NO: 116689 - DNA, 27 bp, Artificial sequence
  SiRNA target sequence
tataaatgttttcctgtcctattacta

SEQ ID NO: 116690 - DNA, 27 bp, Artificial sequence
  SiRNA target sequence
ataaatgttttcctgtcctattactaa

SEQ ID NO: 116691 - DNA, 27 bp, Artificial sequence
  SiRNA target sequence
taaatgttttcctgtcctattactaaa

SEQ ID NO: 116692 - DNA, 27 bp, Artificial sequence
  SiRNA target sequence
aaatgttttcctgtcctattactaaat

SEQ ID NO: 116693 - DNA, 27 bp, Artificial sequence
  SiRNA target sequence
aatgttttcctgtcctattactaaatg

SEQ ID NO: 116694 - DNA, 27 bp, Artificial sequence
  SiRNA target sequence
atgttttcctgtcctattactaaatga

SEQ ID NO: 116695 - DNA, 27 bp, Artificial sequence
  SiRNA target sequence
tgttttcctgtcctattactaaatgac

SEQ ID NO: 116696 - DNA, 27 bp, Artificial sequence
  SiRNA target sequence
gttttcctgtcctattactaaatgaca

SEQ ID NO: 116697 - DNA, 27 bp, Artificial sequence
  SiRNA target sequence
ttttcctgtcctattactaaatgacag

SEQ ID NO: 116698 - DNA, 27 bp, Artificial sequence
  SiRNA target sequence
tttcctgtcctattactaaatgacaga

SEQ ID NO: 116699 - DNA, 27 bp, Artificial sequence
  SiRNA target sequence
ttcctgtcctattactaaatgacagaa

SEQ ID NO: 116700 - DNA, 27 bp, Artificial sequence
  SiRNA target sequence
tcctgtcctattactaaatgacagaag

SEQ ID NO: 116701 - DNA, 27 bp, Artificial sequence
  SiRNA target sequence
cctgtcctattactaaatgacagaagc

SEQ ID NO: 116702 - DNA, 27 bp, Artificial sequence
  SiRNA target sequence
ctgtcctattactaaatgacagaagcc

SEQ ID NO: 116703 - DNA, 27 bp, Artificial sequence
  SiRNA target sequence
tgtcctattactaaatgacagaagcct

SEQ ID NO: 116704 - DNA, 27 bp, Artificial sequence
  SiRNA target sequence
gtcctattactaaatgacagaagcctc

SEQ ID NO: 116705 - DNA, 27 bp, Artificial sequence
  SiRNA target sequence
tcctattactaaatgacagaagcctct

SEQ ID NO: 116706 - DNA, 27 bp, Artificial sequence
  SiRNA target sequence
cctattactaaatgacagaagcctctt

SEQ ID NO: 116707 - DNA, 27 bp, Artificial sequence
  SiRNA target sequence
ctattactaaatgacagaagcctctta

SEQ ID NO: 116708 - DNA, 27 bp, Artificial sequence
  SiRNA target sequence
tattactaaatgacagaagcctcttat

SEQ ID NO: 116709 - DNA, 27 bp, Artificial sequence
  SiRNA target sequence
attactaaatgacagaagcctcttata

SEQ ID NO: 116710 - DNA, 27 bp, Artificial sequence
  SiRNA target sequence
ttactaaatgacagaagcctcttatat

SEQ ID NO: 116711 - DNA, 27 bp, Artificial sequence
  SiRNA target sequence
tactaaatgacagaagcctcttatatt

SEQ ID NO: 116712 - DNA, 27 bp, Artificial sequence
  SiRNA target sequence
actaaatgacagaagcctcttatattt

SEQ ID NO: 116713 - DNA, 27 bp, Artificial sequence
  SiRNA target sequence
ctaaatgacagaagcctcttatatttc

SEQ ID NO: 116714 - DNA, 27 bp, Artificial sequence
  SiRNA target sequence
taaatgacagaagcctcttatatttcc

SEQ ID NO: 116715 - DNA, 27 bp, Artificial sequence
  SiRNA target sequence
aaatgacagaagcctcttatatttcct

SEQ ID NO: 116716 - DNA, 27 bp, Artificial sequence
  SiRNA target sequence
aatgacagaagcctcttatatttcctt

SEQ ID NO: 116717 - DNA, 27 bp, Artificial sequence
  SiRNA target sequence
atgacagaagcctcttatatttccttt

SEQ ID NO: 116718 - DNA, 27 bp, Artificial sequence
  SiRNA target sequence
tgacagaagcctcttatatttcctttt

SEQ ID NO: 116719 - DNA, 27 bp, Artificial sequence
  SiRNA target sequence
gacagaagcctcttatatttccttttt

SEQ ID NO: 116720 - DNA, 27 bp, Artificial sequence
  SiRNA target sequence
acagaagcctcttatatttcctttttt

SEQ ID NO: 116721 - DNA, 27 bp, Artificial sequence
  SiRNA target sequence
cagaagcctcttatatttcctttttta

SEQ ID NO: 116722 - DNA, 27 bp, Artificial sequence
  SiRNA target sequence
agaagcctcttatatttccttttttat

SEQ ID NO: 116723 - DNA, 27 bp, Artificial sequence
  SiRNA target sequence
gaagcctcttatatttccttttttata

SEQ ID NO: 116724 - DNA, 27 bp, Artificial sequence
  SiRNA target sequence
aagcctcttatatttccttttttatac

SEQ ID NO: 116725 - DNA, 27 bp, Artificial sequence
  SiRNA target sequence
agcctcttatatttccttttttatact

SEQ ID NO: 116726 - DNA, 27 bp, Artificial sequence
  SiRNA target sequence
gcctcttatatttccttttttatactt

SEQ ID NO: 116727 - DNA, 27 bp, Artificial sequence
  SiRNA target sequence
cctcttatatttccttttttatactta

SEQ ID NO: 116728 - DNA, 27 bp, Artificial sequence
  SiRNA target sequence
ctcttatatttccttttttatacttag

SEQ ID NO: 116729 - DNA, 27 bp, Artificial sequence
  SiRNA target sequence
tcttatatttccttttttatacttaga

SEQ ID NO: 116730 - DNA, 27 bp, Artificial sequence
  SiRNA target sequence
cttatatttccttttttatacttagag

SEQ ID NO: 116731 - DNA, 27 bp, Artificial sequence
  SiRNA target sequence
ttatatttccttttttatacttagagt

SEQ ID NO: 116732 - DNA, 27 bp, Artificial sequence
  SiRNA target sequence
tatatttccttttttatacttagagtt

SEQ ID NO: 116733 - DNA, 27 bp, Artificial sequence
  SiRNA target sequence
atatttccttttttatacttagagtta

SEQ ID NO: 116734 - DNA, 27 bp, Artificial sequence
  SiRNA target sequence
tatttccttttttatacttagagttag

SEQ ID NO: 116735 - DNA, 27 bp, Artificial sequence
  SiRNA target sequence
atttccttttttatacttagagttagc

SEQ ID NO: 116736 - DNA, 27 bp, Artificial sequence
  SiRNA target sequence
tttccttttttatacttagagttagca

SEQ ID NO: 116737 - DNA, 27 bp, Artificial sequence
  SiRNA target sequence
ttccttttttatacttagagttagcat

SEQ ID NO: 116738 - DNA, 27 bp, Artificial sequence
  SiRNA target sequence
tccttttttatacttagagttagcata

SEQ ID NO: 116739 - DNA, 27 bp, Artificial sequence
  SiRNA target sequence
ccttttttatacttagagttagcatat

SEQ ID NO: 116740 - DNA, 27 bp, Artificial sequence
  SiRNA target sequence
cttttttatacttagagttagcatatt

SEQ ID NO: 116741 - DNA, 27 bp, Artificial sequence
  SiRNA target sequence
ttttttatacttagagttagcatattc

SEQ ID NO: 116742 - DNA, 27 bp, Artificial sequence
  SiRNA target sequence
tttttatacttagagttagcatattct

SEQ ID NO: 116743 - DNA, 27 bp, Artificial sequence
  SiRNA target sequence
ttttatacttagagttagcatattctt

SEQ ID NO: 116744 - DNA, 27 bp, Artificial sequence
  SiRNA target sequence
tttatacttagagttagcatattcttc

SEQ ID NO: 116745 - DNA, 27 bp, Artificial sequence
  SiRNA target sequence
ttatacttagagttagcatattcttcg

SEQ ID NO: 116746 - DNA, 27 bp, Artificial sequence
  SiRNA target sequence
tatacttagagttagcatattcttcga

SEQ ID NO: 116747 - DNA, 27 bp, Artificial sequence
  SiRNA target sequence
atacttagagttagcatattcttcgat

SEQ ID NO: 116748 - DNA, 27 bp, Artificial sequence
  SiRNA target sequence
tacttagagttagcatattcttcgata

SEQ ID NO: 116749 - DNA, 27 bp, Artificial sequence
  SiRNA target sequence
acttagagttagcatattcttcgataa

SEQ ID NO: 116750 - DNA, 27 bp, Artificial sequence
  SiRNA target sequence
cttagagttagcatattcttcgataag

SEQ ID NO: 116751 - DNA, 27 bp, Artificial sequence
  SiRNA target sequence
ttagagttagcatattcttcgataaga

SEQ ID NO: 116752 - DNA, 27 bp, Artificial sequence
  SiRNA target sequence
tagagttagcatattcttcgataagac

SEQ ID NO: 116753 - DNA, 27 bp, Artificial sequence
  SiRNA target sequence
agagttagcatattcttcgataagacg

SEQ ID NO: 116754 - DNA, 27 bp, Artificial sequence
  SiRNA target sequence
gagttagcatattcttcgataagacgt

SEQ ID NO: 116755 - DNA, 27 bp, Artificial sequence
  SiRNA target sequence
agttagcatattcttcgataagacgta

SEQ ID NO: 116756 - DNA, 27 bp, Artificial sequence
  SiRNA target sequence
gttagcatattcttcgataagacgtag

SEQ ID NO: 116757 - DNA, 27 bp, Artificial sequence
  SiRNA target sequence
ttagcatattcttcgataagacgtaga

SEQ ID NO: 116758 - DNA, 27 bp, Artificial sequence
  SiRNA target sequence
tagcatattcttcgataagacgtagaa

SEQ ID NO: 116759 - DNA, 27 bp, Artificial sequence
  SiRNA target sequence
agcatattcttcgataagacgtagaat

SEQ ID NO: 116760 - DNA, 27 bp, Artificial sequence
  SiRNA target sequence
gcatattcttcgataagacgtagaatt

SEQ ID NO: 116761 - DNA, 27 bp, Artificial sequence
  SiRNA target sequence
catattcttcgataagacgtagaatta

SEQ ID NO: 116762 - DNA, 27 bp, Artificial sequence
  SiRNA target sequence
atattcttcgataagacgtagaattaa

SEQ ID NO: 116763 - DNA, 27 bp, Artificial sequence
  SiRNA target sequence
tattcttcgataagacgtagaattaac

SEQ ID NO: 116764 - DNA, 27 bp, Artificial sequence
  SiRNA target sequence
attcttcgataagacgtagaattaaca

SEQ ID NO: 116765 - DNA, 27 bp, Artificial sequence
  SiRNA target sequence
ttcttcgataagacgtagaattaacat

SEQ ID NO: 116766 - DNA, 27 bp, Artificial sequence
  SiRNA target sequence
tcttcgataagacgtagaattaacata

SEQ ID NO: 116767 - DNA, 27 bp, Artificial sequence
  SiRNA target sequence
cttcgataagacgtagaattaacatat

SEQ ID NO: 116768 - DNA, 27 bp, Artificial sequence
  SiRNA target sequence
ttcgataagacgtagaattaacatatt

SEQ ID NO: 116769 - DNA, 27 bp, Artificial sequence
  SiRNA target sequence
tcgataagacgtagaattaacatattt

SEQ ID NO: 116770 - DNA, 27 bp, Artificial sequence
  SiRNA target sequence
cgataagacgtagaattaacatatttc

SEQ ID NO: 116771 - DNA, 27 bp, Artificial sequence
  SiRNA target sequence
gataagacgtagaattaacatatttct

SEQ ID NO: 116772 - DNA, 27 bp, Artificial sequence
  SiRNA target sequence
ataagacgtagaattaacatatttcta

SEQ ID NO: 116773 - DNA, 27 bp, Artificial sequence
  SiRNA target sequence
taagacgtagaattaacatatttctat

SEQ ID NO: 116774 - DNA, 27 bp, Artificial sequence
  SiRNA target sequence
aagacgtagaattaacatatttctata

SEQ ID NO: 116775 - DNA, 27 bp, Artificial sequence
  SiRNA target sequence
agacgtagaattaacatatttctataa

SEQ ID NO: 116776 - DNA, 27 bp, Artificial sequence
  SiRNA target sequence
gacgtagaattaacatatttctataaa

SEQ ID NO: 116777 - DNA, 27 bp, Artificial sequence
  SiRNA target sequence
acgtagaattaacatatttctataaac

SEQ ID NO: 116778 - DNA, 27 bp, Artificial sequence
  SiRNA target sequence
cgtagaattaacatatttctataaaca

SEQ ID NO: 116779 - DNA, 27 bp, Artificial sequence
  SiRNA target sequence
gtagaattaacatatttctataaacat

SEQ ID NO: 116780 - DNA, 27 bp, Artificial sequence
  SiRNA target sequence
tagaattaacatatttctataaacatc

SEQ ID NO: 116781 - DNA, 27 bp, Artificial sequence
  SiRNA target sequence
agaattaacatatttctataaacatct

SEQ ID NO: 116782 - DNA, 27 bp, Artificial sequence
  SiRNA target sequence
gaattaacatatttctataaacatctt

SEQ ID NO: 116783 - DNA, 27 bp, Artificial sequence
  SiRNA target sequence
aattaacatatttctataaacatcttg

SEQ ID NO: 116784 - DNA, 27 bp, Artificial sequence
  SiRNA target sequence
attaacatatttctataaacatcttgt

SEQ ID NO: 116785 - DNA, 27 bp, Artificial sequence
  SiRNA target sequence
ttaacatatttctataaacatcttgta

SEQ ID NO: 116786 - DNA, 27 bp, Artificial sequence
  SiRNA target sequence
taacatatttctataaacatcttgtac

SEQ ID NO: 116787 - DNA, 27 bp, Artificial sequence
  SiRNA target sequence
aacatatttctataaacatcttgtaca

SEQ ID NO: 116788 - DNA, 27 bp, Artificial sequence
  SiRNA target sequence
acatatttctataaacatcttgtacaa

SEQ ID NO: 116789 - DNA, 27 bp, Artificial sequence
  SiRNA target sequence
catatttctataaacatcttgtacaag

SEQ ID NO: 116790 - DNA, 27 bp, Artificial sequence
  SiRNA target sequence
atatttctataaacatcttgtacaagt

SEQ ID NO: 116791 - DNA, 27 bp, Artificial sequence
  SiRNA target sequence
tatttctataaacatcttgtacaagtt

SEQ ID NO: 116792 - DNA, 27 bp, Artificial sequence
  SiRNA target sequence
atttctataaacatcttgtacaagttc

SEQ ID NO: 116793 - DNA, 27 bp, Artificial sequence
  SiRNA target sequence
tttctataaacatcttgtacaagttct

SEQ ID NO: 116794 - DNA, 27 bp, Artificial sequence
  SiRNA target sequence
ttctataaacatcttgtacaagttctt

SEQ ID NO: 116795 - DNA, 27 bp, Artificial sequence
  SiRNA target sequence
tctataaacatcttgtacaagttcttt

SEQ ID NO: 116796 - DNA, 27 bp, Artificial sequence
  SiRNA target sequence
ctataaacatcttgtacaagttctttg

SEQ ID NO: 116797 - DNA, 27 bp, Artificial sequence
  SiRNA target sequence
tataaacatcttgtacaagttctttgt

SEQ ID NO: 116798 - DNA, 27 bp, Artificial sequence
  SiRNA target sequence
ataaacatcttgtacaagttctttgtt

SEQ ID NO: 116799 - DNA, 27 bp, Artificial sequence
  SiRNA target sequence
taaacatcttgtacaagttctttgttt

SEQ ID NO: 116800 - DNA, 27 bp, Artificial sequence
  SiRNA target sequence
aaacatcttgtacaagttctttgttta

SEQ ID NO: 116801 - DNA, 27 bp, Artificial sequence
  SiRNA target sequence
aacatcttgtacaagttctttgtttaa

SEQ ID NO: 116802 - DNA, 27 bp, Artificial sequence
  SiRNA target sequence
acatcttgtacaagttctttgtttaaa

SEQ ID NO: 116803 - DNA, 27 bp, Artificial sequence
  SiRNA target sequence
catcttgtacaagttctttgtttaaag

SEQ ID NO: 116804 - DNA, 27 bp, Artificial sequence
  SiRNA target sequence
atcttgtacaagttctttgtttaaagt

SEQ ID NO: 116805 - DNA, 27 bp, Artificial sequence
  SiRNA target sequence
tcttgtacaagttctttgtttaaagta

SEQ ID NO: 116806 - DNA, 27 bp, Artificial sequence
  SiRNA target sequence
cttgtacaagttctttgtttaaagtag

SEQ ID NO: 116807 - DNA, 27 bp, Artificial sequence
  SiRNA target sequence
ttgtacaagttctttgtttaaagtagt

SEQ ID NO: 116808 - DNA, 27 bp, Artificial sequence
  SiRNA target sequence
tgtacaagttctttgtttaaagtagtt

SEQ ID NO: 116809 - DNA, 27 bp, Artificial sequence
  SiRNA target sequence
gtacaagttctttgtttaaagtagttt

SEQ ID NO: 116810 - DNA, 27 bp, Artificial sequence
  SiRNA target sequence
tacaagttctttgtttaaagtagtttt

SEQ ID NO: 116811 - DNA, 27 bp, Artificial sequence
  SiRNA target sequence
acaagttctttgtttaaagtagttttc

SEQ ID NO: 116812 - DNA, 27 bp, Artificial sequence
  SiRNA target sequence
caagttctttgtttaaagtagttttca

SEQ ID NO: 116813 - DNA, 27 bp, Artificial sequence
  SiRNA target sequence
aagttctttgtttaaagtagttttcag

SEQ ID NO: 116814 - DNA, 27 bp, Artificial sequence
  SiRNA target sequence
agttctttgtttaaagtagttttcagt

SEQ ID NO: 116815 - DNA, 27 bp, Artificial sequence
  SiRNA target sequence
gttctttgtttaaagtagttttcagtt

SEQ ID NO: 116816 - DNA, 27 bp, Artificial sequence
  SiRNA target sequence
ttctttgtttaaagtagttttcagttt

SEQ ID NO: 116817 - DNA, 27 bp, Artificial sequence
  SiRNA target sequence
tctttgtttaaagtagttttcagttta

SEQ ID NO: 116818 - DNA, 27 bp, Artificial sequence
  SiRNA target sequence
ctttgtttaaagtagttttcagtttaa

SEQ ID NO: 116819 - DNA, 27 bp, Artificial sequence
  SiRNA target sequence
tttgtttaaagtagttttcagtttaac

SEQ ID NO: 116820 - DNA, 27 bp, Artificial sequence
  SiRNA target sequence
ttgtttaaagtagttttcagtttaact

SEQ ID NO: 116821 - DNA, 27 bp, Artificial sequence
  SiRNA target sequence
tgtttaaagtagttttcagtttaactg

SEQ ID NO: 116822 - DNA, 27 bp, Artificial sequence
  SiRNA target sequence
gtttaaagtagttttcagtttaactgt

SEQ ID NO: 116823 - DNA, 27 bp, Artificial sequence
  SiRNA target sequence
tttaaagtagttttcagtttaactgta

SEQ ID NO: 116824 - DNA, 27 bp, Artificial sequence
  SiRNA target sequence
ttaaagtagttttcagtttaactgtat

SEQ ID NO: 116825 - DNA, 27 bp, Artificial sequence
  SiRNA target sequence
taaagtagttttcagtttaactgtatt

SEQ ID NO: 116826 - DNA, 27 bp, Artificial sequence
  SiRNA target sequence
aaagtagttttcagtttaactgtattt

SEQ ID NO: 116827 - DNA, 27 bp, Artificial sequence
  SiRNA target sequence
aagtagttttcagtttaactgtatttt

SEQ ID NO: 116828 - DNA, 27 bp, Artificial sequence
  SiRNA target sequence
agtagttttcagtttaactgtattttt

SEQ ID NO: 116829 - DNA, 27 bp, Artificial sequence
  SiRNA target sequence
gtagttttcagtttaactgtattttta

SEQ ID NO: 116830 - DNA, 27 bp, Artificial sequence
  SiRNA target sequence
tagttttcagtttaactgtatttttat

SEQ ID NO: 116831 - DNA, 27 bp, Artificial sequence
  SiRNA target sequence
agttttcagtttaactgtatttttatc

SEQ ID NO: 116832 - DNA, 27 bp, Artificial sequence
  SiRNA target sequence
gttttcagtttaactgtatttttatct

SEQ ID NO: 116833 - DNA, 27 bp, Artificial sequence
  SiRNA target sequence
ttttcagtttaactgtatttttatcta

SEQ ID NO: 116834 - DNA, 27 bp, Artificial sequence
  SiRNA target sequence
tttcagtttaactgtatttttatctac

SEQ ID NO: 116835 - DNA, 27 bp, Artificial sequence
  SiRNA target sequence
ttcagtttaactgtatttttatctacc

SEQ ID NO: 116836 - DNA, 27 bp, Artificial sequence
  SiRNA target sequence
tcagtttaactgtatttttatctacca

SEQ ID NO: 116837 - DNA, 27 bp, Artificial sequence
  SiRNA target sequence
cagtttaactgtatttttatctaccaa

SEQ ID NO: 116838 - DNA, 27 bp, Artificial sequence
  SiRNA target sequence
agtttaactgtatttttatctaccaaa

SEQ ID NO: 116839 - DNA, 27 bp, Artificial sequence
  SiRNA target sequence
gtttaactgtatttttatctaccaaat

SEQ ID NO: 116840 - DNA, 27 bp, Artificial sequence
  SiRNA target sequence
tttaactgtatttttatctaccaaata

SEQ ID NO: 116841 - DNA, 27 bp, Artificial sequence
  SiRNA target sequence
ttaactgtatttttatctaccaaataa

SEQ ID NO: 116842 - DNA, 27 bp, Artificial sequence
  SiRNA target sequence
taactgtatttttatctaccaaataat

SEQ ID NO: 116843 - DNA, 27 bp, Artificial sequence
  SiRNA target sequence
aactgtatttttatctaccaaataata

SEQ ID NO: 116844 - DNA, 27 bp, Artificial sequence
  SiRNA target sequence
actgtatttttatctaccaaataataa

SEQ ID NO: 116845 - DNA, 27 bp, Artificial sequence
  SiRNA target sequence
ctgtatttttatctaccaaataataat

SEQ ID NO: 116846 - DNA, 27 bp, Artificial sequence
  SiRNA target sequence
tgtatttttatctaccaaataataatc

SEQ ID NO: 116847 - DNA, 27 bp, Artificial sequence
  SiRNA target sequence
gtatttttatctaccaaataataatct

SEQ ID NO: 116848 - DNA, 27 bp, Artificial sequence
  SiRNA target sequence
tatttttatctaccaaataataatcta

SEQ ID NO: 116849 - DNA, 27 bp, Artificial sequence
  SiRNA target sequence
atttttatctaccaaataataatctat

SEQ ID NO: 116850 - DNA, 27 bp, Artificial sequence
  SiRNA target sequence
tttttatctaccaaataataatctatc

SEQ ID NO: 116851 - DNA, 27 bp, Artificial sequence
  SiRNA target sequence
ttttatctaccaaataataatctatca

SEQ ID NO: 116852 - DNA, 27 bp, Artificial sequence
  SiRNA target sequence
tttatctaccaaataataatctatcat

SEQ ID NO: 116853 - DNA, 19 bp, Artificial sequence
  SiRNA target sequence
atgatagaaattcgcgatc

SEQ ID NO: 116854 - DNA, 19 bp, Artificial sequence
  SiRNA target sequence
tgatagaaattcgcgatct

SEQ ID NO: 116855 - DNA, 19 bp, Artificial sequence
  SiRNA target sequence
gatagaaattcgcgatctt

SEQ ID NO: 116856 - DNA, 19 bp, Artificial sequence
  SiRNA target sequence
atagaaattcgcgatctta

SEQ ID NO: 116857 - DNA, 19 bp, Artificial sequence
  SiRNA target sequence
tagaaattcgcgatcttat

SEQ ID NO: 116858 - DNA, 19 bp, Artificial sequence
  SiRNA target sequence
agaaattcgcgatcttata

SEQ ID NO: 116859 - DNA, 19 bp, Artificial sequence
  SiRNA target sequence
gaaattcgcgatcttataa

SEQ ID NO: 116860 - DNA, 19 bp, Artificial sequence
  SiRNA target sequence
aaattcgcgatcttataaa

SEQ ID NO: 116861 - DNA, 19 bp, Artificial sequence
  SiRNA target sequence
aattcgcgatcttataaat

SEQ ID NO: 116862 - DNA, 19 bp, Artificial sequence
  SiRNA target sequence
attcgcgatcttataaatc

SEQ ID NO: 116863 - DNA, 19 bp, Artificial sequence
  SiRNA target sequence
ttcgcgatcttataaatca

SEQ ID NO: 116864 - DNA, 19 bp, Artificial sequence
  SiRNA target sequence
tcgcgatcttataaatcaa

SEQ ID NO: 116865 - DNA, 19 bp, Artificial sequence
  SiRNA target sequence
cgcgatcttataaatcaag

SEQ ID NO: 116866 - DNA, 19 bp, Artificial sequence
  SiRNA target sequence
gcgatcttataaatcaagc

SEQ ID NO: 116867 - DNA, 19 bp, Artificial sequence
  SiRNA target sequence
cgatcttataaatcaagca

SEQ ID NO: 116868 - DNA, 19 bp, Artificial sequence
  SiRNA target sequence
gatcttataaatcaagcat

SEQ ID NO: 116869 - DNA, 19 bp, Artificial sequence
  SiRNA target sequence
atcttataaatcaagcatt

SEQ ID NO: 116870 - DNA, 19 bp, Artificial sequence
  SiRNA target sequence
tcttataaatcaagcattg

SEQ ID NO: 116871 - DNA, 19 bp, Artificial sequence
  SiRNA target sequence
cttataaatcaagcattgg

SEQ ID NO: 116872 - DNA, 19 bp, Artificial sequence
  SiRNA target sequence
ttataaatcaagcattgga

SEQ ID NO: 116873 - DNA, 19 bp, Artificial sequence
  SiRNA target sequence
tataaatcaagcattggat

SEQ ID NO: 116874 - DNA, 19 bp, Artificial sequence
  SiRNA target sequence
ataaatcaagcattggatg

SEQ ID NO: 116875 - DNA, 19 bp, Artificial sequence
  SiRNA target sequence
taaatcaagcattggatga

SEQ ID NO: 116876 - DNA, 19 bp, Artificial sequence
  SiRNA target sequence
aaatcaagcattggatgag

SEQ ID NO: 116877 - DNA, 19 bp, Artificial sequence
  SiRNA target sequence
aatcaagcattggatgagg

SEQ ID NO: 116878 - DNA, 19 bp, Artificial sequence
  SiRNA target sequence
atcaagcattggatgagga

SEQ ID NO: 116879 - DNA, 19 bp, Artificial sequence
  SiRNA target sequence
tcaagcattggatgaggaa

SEQ ID NO: 116880 - DNA, 19 bp, Artificial sequence
  SiRNA target sequence
caagcattggatgaggaaa

SEQ ID NO: 116881 - DNA, 19 bp, Artificial sequence
  SiRNA target sequence
aagcattggatgaggaaat

SEQ ID NO: 116882 - DNA, 19 bp, Artificial sequence
  SiRNA target sequence
agcattggatgaggaaatg

SEQ ID NO: 116883 - DNA, 19 bp, Artificial sequence
  SiRNA target sequence
gcattggatgaggaaatgg

SEQ ID NO: 116884 - DNA, 19 bp, Artificial sequence
  SiRNA target sequence
cattggatgaggaaatggg

SEQ ID NO: 116885 - DNA, 19 bp, Artificial sequence
  SiRNA target sequence
attggatgaggaaatggga

SEQ ID NO: 116886 - DNA, 19 bp, Artificial sequence
  SiRNA target sequence
ttggatgaggaaatgggaa

SEQ ID NO: 116887 - DNA, 19 bp, Artificial sequence
  SiRNA target sequence
tggatgaggaaatgggaat

SEQ ID NO: 116888 - DNA, 19 bp, Artificial sequence
  SiRNA target sequence
ggatgaggaaatgggaatg

SEQ ID NO: 116889 - DNA, 19 bp, Artificial sequence
  SiRNA target sequence
gatgaggaaatgggaatgg

SEQ ID NO: 116890 - DNA, 19 bp, Artificial sequence
  SiRNA target sequence
atgaggaaatgggaatgga

SEQ ID NO: 116891 - DNA, 19 bp, Artificial sequence
  SiRNA target sequence
tgaggaaatgggaatggat

SEQ ID NO: 116892 - DNA, 19 bp, Artificial sequence
  SiRNA target sequence
gaggaaatgggaatggatc

SEQ ID NO: 116893 - DNA, 19 bp, Artificial sequence
  SiRNA target sequence
aggaaatgggaatggatca

SEQ ID NO: 116894 - DNA, 19 bp, Artificial sequence
  SiRNA target sequence
ggaaatgggaatggatcat

SEQ ID NO: 116895 - DNA, 19 bp, Artificial sequence
  SiRNA target sequence
gaaatgggaatggatcata

SEQ ID NO: 116896 - DNA, 19 bp, Artificial sequence
  SiRNA target sequence
aaatgggaatggatcataa

SEQ ID NO: 116897 - DNA, 19 bp, Artificial sequence
  SiRNA target sequence
aatgggaatggatcataat

SEQ ID NO: 116898 - DNA, 19 bp, Artificial sequence
  SiRNA target sequence
atgggaatggatcataatg

SEQ ID NO: 116899 - DNA, 19 bp, Artificial sequence
  SiRNA target sequence
tgggaatggatcataatgt

SEQ ID NO: 116900 - DNA, 19 bp, Artificial sequence
  SiRNA target sequence
gggaatggatcataatgta

SEQ ID NO: 116901 - DNA, 19 bp, Artificial sequence
  SiRNA target sequence
ggaatggatcataatgtat

SEQ ID NO: 116902 - DNA, 19 bp, Artificial sequence
  SiRNA target sequence
gaatggatcataatgtata

SEQ ID NO: 116903 - DNA, 19 bp, Artificial sequence
  SiRNA target sequence
aatggatcataatgtatat

SEQ ID NO: 116904 - DNA, 19 bp, Artificial sequence
  SiRNA target sequence
atggatcataatgtatata

SEQ ID NO: 116905 - DNA, 19 bp, Artificial sequence
  SiRNA target sequence
tggatcataatgtatatat

SEQ ID NO: 116906 - DNA, 19 bp, Artificial sequence
  SiRNA target sequence
ggatcataatgtatatata

SEQ ID NO: 116907 - DNA, 19 bp, Artificial sequence
  SiRNA target sequence
gatcataatgtatatataa

SEQ ID NO: 116908 - DNA, 19 bp, Artificial sequence
  SiRNA target sequence
atcataatgtatatataat

SEQ ID NO: 116909 - DNA, 19 bp, Artificial sequence
  SiRNA target sequence
tcataatgtatatataata

SEQ ID NO: 116910 - DNA, 19 bp, Artificial sequence
  SiRNA target sequence
cataatgtatatataatag

SEQ ID NO: 116911 - DNA, 19 bp, Artificial sequence
  SiRNA target sequence
ataatgtatatataatagg

SEQ ID NO: 116912 - DNA, 19 bp, Artificial sequence
  SiRNA target sequence
taatgtatatataatagga

SEQ ID NO: 116913 - DNA, 19 bp, Artificial sequence
  SiRNA target sequence
aatgtatatataataggag

SEQ ID NO: 116914 - DNA, 19 bp, Artificial sequence
  SiRNA target sequence
atgtatatataataggaga

SEQ ID NO: 116915 - DNA, 19 bp, Artificial sequence
  SiRNA target sequence
tgtatatataataggagaa

SEQ ID NO: 116916 - DNA, 19 bp, Artificial sequence
  SiRNA target sequence
gtatatataataggagaag

SEQ ID NO: 116917 - DNA, 19 bp, Artificial sequence
  SiRNA target sequence
tatatataataggagaaga

SEQ ID NO: 116918 - DNA, 19 bp, Artificial sequence
  SiRNA target sequence
atatataataggagaagaa

SEQ ID NO: 116919 - DNA, 19 bp, Artificial sequence
  SiRNA target sequence
tatataataggagaagaag

SEQ ID NO: 116920 - DNA, 19 bp, Artificial sequence
  SiRNA target sequence
atataataggagaagaagt

SEQ ID NO: 116921 - DNA, 19 bp, Artificial sequence
  SiRNA target sequence
tataataggagaagaagta

SEQ ID NO: 116922 - DNA, 19 bp, Artificial sequence
  SiRNA target sequence
ataataggagaagaagtag

SEQ ID NO: 116923 - DNA, 19 bp, Artificial sequence
  SiRNA target sequence
taataggagaagaagtagg

SEQ ID NO: 116924 - DNA, 19 bp, Artificial sequence
  SiRNA target sequence
aataggagaagaagtaggc

SEQ ID NO: 116925 - DNA, 19 bp, Artificial sequence
  SiRNA target sequence
ataggagaagaagtaggca

SEQ ID NO: 116926 - DNA, 19 bp, Artificial sequence
  SiRNA target sequence
taggagaagaagtaggcat

SEQ ID NO: 116927 - DNA, 19 bp, Artificial sequence
  SiRNA target sequence
aggagaagaagtaggcatc

SEQ ID NO: 116928 - DNA, 19 bp, Artificial sequence
  SiRNA target sequence
ggagaagaagtaggcatct

SEQ ID NO: 116929 - DNA, 19 bp, Artificial sequence
  SiRNA target sequence
gagaagaagtaggcatctc

SEQ ID NO: 116930 - DNA, 19 bp, Artificial sequence
  SiRNA target sequence
agaagaagtaggcatctct

SEQ ID NO: 116931 - DNA, 19 bp, Artificial sequence
  SiRNA target sequence
gaagaagtaggcatctctg

SEQ ID NO: 116932 - DNA, 19 bp, Artificial sequence
  SiRNA target sequence
aagaagtaggcatctctgg

SEQ ID NO: 116933 - DNA, 19 bp, Artificial sequence
  SiRNA target sequence
agaagtaggcatctctggt

SEQ ID NO: 116934 - DNA, 19 bp, Artificial sequence
  SiRNA target sequence
gaagtaggcatctctggtg

SEQ ID NO: 116935 - DNA, 19 bp, Artificial sequence
  SiRNA target sequence
aagtaggcatctctggtgg

SEQ ID NO: 116936 - DNA, 19 bp, Artificial sequence
  SiRNA target sequence
agtaggcatctctggtggt

SEQ ID NO: 116937 - DNA, 19 bp, Artificial sequence
  SiRNA target sequence
gtaggcatctctggtggtc

SEQ ID NO: 116938 - DNA, 19 bp, Artificial sequence
  SiRNA target sequence
taggcatctctggtggtcc

SEQ ID NO: 116939 - DNA, 19 bp, Artificial sequence
  SiRNA target sequence
aggcatctctggtggtcct

SEQ ID NO: 116940 - DNA, 19 bp, Artificial sequence
  SiRNA target sequence
ggcatctctggtggtcctc

SEQ ID NO: 116941 - DNA, 19 bp, Artificial sequence
  SiRNA target sequence
gcatctctggtggtcctca

SEQ ID NO: 116942 - DNA, 19 bp, Artificial sequence
  SiRNA target sequence
catctctggtggtcctcac

SEQ ID NO: 116943 - DNA, 19 bp, Artificial sequence
  SiRNA target sequence
atctctggtggtcctcacg

SEQ ID NO: 116944 - DNA, 19 bp, Artificial sequence
  SiRNA target sequence
tctctggtggtcctcacgg

SEQ ID NO: 116945 - DNA, 19 bp, Artificial sequence
  SiRNA target sequence
ctctggtggtcctcacggt

SEQ ID NO: 116946 - DNA, 19 bp, Artificial sequence
  SiRNA target sequence
tctggtggtcctcacggtc

SEQ ID NO: 116947 - DNA, 19 bp, Artificial sequence
  SiRNA target sequence
ctggtggtcctcacggtct

SEQ ID NO: 116948 - DNA, 19 bp, Artificial sequence
  SiRNA target sequence
tggtggtcctcacggtctt

SEQ ID NO: 116949 - DNA, 19 bp, Artificial sequence
  SiRNA target sequence
ggtggtcctcacggtctta

SEQ ID NO: 116950 - DNA, 19 bp, Artificial sequence
  SiRNA target sequence
gtggtcctcacggtcttac

SEQ ID NO: 116951 - DNA, 19 bp, Artificial sequence
  SiRNA target sequence
tggtcctcacggtcttact

SEQ ID NO: 116952 - DNA, 19 bp, Artificial sequence
  SiRNA target sequence
ggtcctcacggtcttacta

SEQ ID NO: 116953 - DNA, 19 bp, Artificial sequence
  SiRNA target sequence
gtcctcacggtcttactaa

SEQ ID NO: 116954 - DNA, 19 bp, Artificial sequence
  SiRNA target sequence
tcctcacggtcttactaaa

SEQ ID NO: 116955 - DNA, 19 bp, Artificial sequence
  SiRNA target sequence
cctcacggtcttactaaaa

SEQ ID NO: 116956 - DNA, 19 bp, Artificial sequence
  SiRNA target sequence
ctcacggtcttactaaaaa

SEQ ID NO: 116957 - DNA, 19 bp, Artificial sequence
  SiRNA target sequence
tcacggtcttactaaaaat

SEQ ID NO: 116958 - DNA, 19 bp, Artificial sequence
  SiRNA target sequence
cacggtcttactaaaaatt

SEQ ID NO: 116959 - DNA, 19 bp, Artificial sequence
  SiRNA target sequence
acggtcttactaaaaattt

SEQ ID NO: 116960 - DNA, 19 bp, Artificial sequence
  SiRNA target sequence
cggtcttactaaaaatttg

SEQ ID NO: 116961 - DNA, 19 bp, Artificial sequence
  SiRNA target sequence
ggtcttactaaaaatttga

SEQ ID NO: 116962 - DNA, 19 bp, Artificial sequence
  SiRNA target sequence
gtcttactaaaaatttgat

SEQ ID NO: 116963 - DNA, 19 bp, Artificial sequence
  SiRNA target sequence
tcttactaaaaatttgatc

SEQ ID NO: 116964 - DNA, 19 bp, Artificial sequence
  SiRNA target sequence
cttactaaaaatttgatca

SEQ ID NO: 116965 - DNA, 19 bp, Artificial sequence
  SiRNA target sequence
ttactaaaaatttgatcaa

SEQ ID NO: 116966 - DNA, 19 bp, Artificial sequence
  SiRNA target sequence
tactaaaaatttgatcaaa

SEQ ID NO: 116967 - DNA, 19 bp, Artificial sequence
  SiRNA target sequence
actaaaaatttgatcaaaa

SEQ ID NO: 116968 - DNA, 19 bp, Artificial sequence
  SiRNA target sequence
ctaaaaatttgatcaaaaa

SEQ ID NO: 116969 - DNA, 19 bp, Artificial sequence
  SiRNA target sequence
taaaaatttgatcaaaaaa

SEQ ID NO: 116970 - DNA, 19 bp, Artificial sequence
  SiRNA target sequence
aaaaatttgatcaaaaaat

SEQ ID NO: 116971 - DNA, 19 bp, Artificial sequence
  SiRNA target sequence
aaaatttgatcaaaaaata

SEQ ID NO: 116972 - DNA, 19 bp, Artificial sequence
  SiRNA target sequence
aaatttgatcaaaaaatac

SEQ ID NO: 116973 - DNA, 19 bp, Artificial sequence
  SiRNA target sequence
aatttgatcaaaaaatacg

SEQ ID NO: 116974 - DNA, 19 bp, Artificial sequence
  SiRNA target sequence
atttgatcaaaaaatacgg

SEQ ID NO: 116975 - DNA, 19 bp, Artificial sequence
  SiRNA target sequence
tttgatcaaaaaatacggc

SEQ ID NO: 116976 - DNA, 19 bp, Artificial sequence
  SiRNA target sequence
ttgatcaaaaaatacggcg

SEQ ID NO: 116977 - DNA, 19 bp, Artificial sequence
  SiRNA target sequence
tgatcaaaaaatacggcga

SEQ ID NO: 116978 - DNA, 19 bp, Artificial sequence
  SiRNA target sequence
gatcaaaaaatacggcgat

SEQ ID NO: 116979 - DNA, 19 bp, Artificial sequence
  SiRNA target sequence
atcaaaaaatacggcgatc

SEQ ID NO: 116980 - DNA, 19 bp, Artificial sequence
  SiRNA target sequence
tcaaaaaatacggcgatca

SEQ ID NO: 116981 - DNA, 19 bp, Artificial sequence
  SiRNA target sequence
caaaaaatacggcgatcaa

SEQ ID NO: 116982 - DNA, 19 bp, Artificial sequence
  SiRNA target sequence
aaaaaatacggcgatcaaa

SEQ ID NO: 116983 - DNA, 19 bp, Artificial sequence
  SiRNA target sequence
aaaaatacggcgatcaaag

SEQ ID NO: 116984 - DNA, 19 bp, Artificial sequence
  SiRNA target sequence
aaaatacggcgatcaaaga

SEQ ID NO: 116985 - DNA, 19 bp, Artificial sequence
  SiRNA target sequence
aaatacggcgatcaaagag

SEQ ID NO: 116986 - DNA, 19 bp, Artificial sequence
  SiRNA target sequence
aatacggcgatcaaagagt

SEQ ID NO: 116987 - DNA, 19 bp, Artificial sequence
  SiRNA target sequence
atacggcgatcaaagagtg

SEQ ID NO: 116988 - DNA, 19 bp, Artificial sequence
  SiRNA target sequence
tacggcgatcaaagagtga

SEQ ID NO: 116989 - DNA, 19 bp, Artificial sequence
  SiRNA target sequence
acggcgatcaaagagtgaa

SEQ ID NO: 116990 - DNA, 19 bp, Artificial sequence
  SiRNA target sequence
cggcgatcaaagagtgaag

SEQ ID NO: 116991 - DNA, 19 bp, Artificial sequence
  SiRNA target sequence
ggcgatcaaagagtgaagg

SEQ ID NO: 116992 - DNA, 19 bp, Artificial sequence
  SiRNA target sequence
gcgatcaaagagtgaagga

SEQ ID NO: 116993 - DNA, 19 bp, Artificial sequence
  SiRNA target sequence
cgatcaaagagtgaaggat

SEQ ID NO: 116994 - DNA, 19 bp, Artificial sequence
  SiRNA target sequence
gatcaaagagtgaaggata

SEQ ID NO: 116995 - DNA, 19 bp, Artificial sequence
  SiRNA target sequence
atcaaagagtgaaggatac

SEQ ID NO: 116996 - DNA, 19 bp, Artificial sequence
  SiRNA target sequence
tcaaagagtgaaggatacc

SEQ ID NO: 116997 - DNA, 19 bp, Artificial sequence
  SiRNA target sequence
caaagagtgaaggataccc

SEQ ID NO: 116998 - DNA, 19 bp, Artificial sequence
  SiRNA target sequence
aaagagtgaaggatacccc

SEQ ID NO: 116999 - DNA, 19 bp, Artificial sequence
  SiRNA target sequence
aagagtgaaggatacccct

SEQ ID NO: 117000 - DNA, 19 bp, Artificial sequence
  SiRNA target sequence
agagtgaaggataccccta

SEQ ID NO: 117001 - DNA, 19 bp, Artificial sequence
  SiRNA target sequence
gagtgaaggatacccctat

SEQ ID NO: 117002 - DNA, 19 bp, Artificial sequence
  SiRNA target sequence
agtgaaggatacccctatt

SEQ ID NO: 117003 - DNA, 19 bp, Artificial sequence
  SiRNA target sequence
gtgaaggatacccctattt

SEQ ID NO: 117004 - DNA, 19 bp, Artificial sequence
  SiRNA target sequence
tgaaggatacccctatttc

SEQ ID NO: 117005 - DNA, 19 bp, Artificial sequence
  SiRNA target sequence
gaaggatacccctatttcg

SEQ ID NO: 117006 - DNA, 19 bp, Artificial sequence
  SiRNA target sequence
aaggatacccctatttcgg

SEQ ID NO: 117007 - DNA, 19 bp, Artificial sequence
  SiRNA target sequence
aggatacccctatttcgga

SEQ ID NO: 117008 - DNA, 19 bp, Artificial sequence
  SiRNA target sequence
ggatacccctatttcggaa

SEQ ID NO: 117009 - DNA, 19 bp, Artificial sequence
  SiRNA target sequence
gatacccctatttcggaaa

SEQ ID NO: 117010 - DNA, 19 bp, Artificial sequence
  SiRNA target sequence
atacccctatttcggaaat

SEQ ID NO: 117011 - DNA, 19 bp, Artificial sequence
  SiRNA target sequence
tacccctatttcggaaatg

SEQ ID NO: 117012 - DNA, 19 bp, Artificial sequence
  SiRNA target sequence
acccctatttcggaaatgg

SEQ ID NO: 117013 - DNA, 19 bp, Artificial sequence
  SiRNA target sequence
cccctatttcggaaatggg

SEQ ID NO: 117014 - DNA, 19 bp, Artificial sequence
  SiRNA target sequence
ccctatttcggaaatggga

SEQ ID NO: 117015 - DNA, 19 bp, Artificial sequence
  SiRNA target sequence
cctatttcggaaatgggat

SEQ ID NO: 117016 - DNA, 19 bp, Artificial sequence
  SiRNA target sequence
ctatttcggaaatgggatt

SEQ ID NO: 117017 - DNA, 19 bp, Artificial sequence
  SiRNA target sequence
tatttcggaaatgggattt

SEQ ID NO: 117018 - DNA, 19 bp, Artificial sequence
  SiRNA target sequence
atttcggaaatgggattta

SEQ ID NO: 117019 - DNA, 19 bp, Artificial sequence
  SiRNA target sequence
tttcggaaatgggatttac

SEQ ID NO: 117020 - DNA, 19 bp, Artificial sequence
  SiRNA target sequence
ttcggaaatgggatttaca

SEQ ID NO: 117021 - DNA, 19 bp, Artificial sequence
  SiRNA target sequence
tcggaaatgggatttacag

SEQ ID NO: 117022 - DNA, 19 bp, Artificial sequence
  SiRNA target sequence
cggaaatgggatttacagg

SEQ ID NO: 117023 - DNA, 19 bp, Artificial sequence
  SiRNA target sequence
ggaaatgggatttacaggt

SEQ ID NO: 117024 - DNA, 19 bp, Artificial sequence
  SiRNA target sequence
gaaatgggatttacaggtc

SEQ ID NO: 117025 - DNA, 19 bp, Artificial sequence
  SiRNA target sequence
aaatgggatttacaggtct

SEQ ID NO: 117026 - DNA, 19 bp, Artificial sequence
  SiRNA target sequence
aatgggatttacaggtctc

SEQ ID NO: 117027 - DNA, 19 bp, Artificial sequence
  SiRNA target sequence
atgggatttacaggtctcg

SEQ ID NO: 117028 - DNA, 19 bp, Artificial sequence
  SiRNA target sequence
tgggatttacaggtctcgc

SEQ ID NO: 117029 - DNA, 19 bp, Artificial sequence
  SiRNA target sequence
gggatttacaggtctcgct

SEQ ID NO: 117030 - DNA, 19 bp, Artificial sequence
  SiRNA target sequence
ggatttacaggtctcgctg

SEQ ID NO: 117031 - DNA, 19 bp, Artificial sequence
  SiRNA target sequence
gatttacaggtctcgctgt

SEQ ID NO: 117032 - DNA, 19 bp, Artificial sequence
  SiRNA target sequence
atttacaggtctcgctgtg

SEQ ID NO: 117033 - DNA, 19 bp, Artificial sequence
  SiRNA target sequence
tttacaggtctcgctgtgg

SEQ ID NO: 117034 - DNA, 19 bp, Artificial sequence
  SiRNA target sequence
ttacaggtctcgctgtggg

SEQ ID NO: 117035 - DNA, 19 bp, Artificial sequence
  SiRNA target sequence
tacaggtctcgctgtgggt

SEQ ID NO: 117036 - DNA, 19 bp, Artificial sequence
  SiRNA target sequence
acaggtctcgctgtgggtt

SEQ ID NO: 117037 - DNA, 19 bp, Artificial sequence
  SiRNA target sequence
caggtctcgctgtgggttc

SEQ ID NO: 117038 - DNA, 19 bp, Artificial sequence
  SiRNA target sequence
aggtctcgctgtgggttca

SEQ ID NO: 117039 - DNA, 19 bp, Artificial sequence
  SiRNA target sequence
ggtctcgctgtgggttcaa

SEQ ID NO: 117040 - DNA, 19 bp, Artificial sequence
  SiRNA target sequence
gtctcgctgtgggttcaag

SEQ ID NO: 117041 - DNA, 19 bp, Artificial sequence
  SiRNA target sequence
tctcgctgtgggttcaagc

SEQ ID NO: 117042 - DNA, 19 bp, Artificial sequence
  SiRNA target sequence
ctcgctgtgggttcaagct

SEQ ID NO: 117043 - DNA, 19 bp, Artificial sequence
  SiRNA target sequence
tcgctgtgggttcaagcta

SEQ ID NO: 117044 - DNA, 19 bp, Artificial sequence
  SiRNA target sequence
cgctgtgggttcaagctat

SEQ ID NO: 117045 - DNA, 19 bp, Artificial sequence
  SiRNA target sequence
gctgtgggttcaagctatt

SEQ ID NO: 117046 - DNA, 19 bp, Artificial sequence
  SiRNA target sequence
ctgtgggttcaagctattt

SEQ ID NO: 117047 - DNA, 19 bp, Artificial sequence
  SiRNA target sequence
tgtgggttcaagctattta

SEQ ID NO: 117048 - DNA, 19 bp, Artificial sequence
  SiRNA target sequence
gtgggttcaagctatttag

SEQ ID NO: 117049 - DNA, 19 bp, Artificial sequence
  SiRNA target sequence
tgggttcaagctatttagg

SEQ ID NO: 117050 - DNA, 19 bp, Artificial sequence
  SiRNA target sequence
gggttcaagctatttaggg

SEQ ID NO: 117051 - DNA, 19 bp, Artificial sequence
  SiRNA target sequence
ggttcaagctatttagggt

SEQ ID NO: 117052 - DNA, 19 bp, Artificial sequence
  SiRNA target sequence
gttcaagctatttagggtt

SEQ ID NO: 117053 - DNA, 19 bp, Artificial sequence
  SiRNA target sequence
ttcaagctatttagggtta

SEQ ID NO: 117054 - DNA, 19 bp, Artificial sequence
  SiRNA target sequence
tcaagctatttagggttaa

SEQ ID NO: 117055 - DNA, 19 bp, Artificial sequence
  SiRNA target sequence
caagctatttagggttaag

SEQ ID NO: 117056 - DNA, 19 bp, Artificial sequence
  SiRNA target sequence
aagctatttagggttaaga

SEQ ID NO: 117057 - DNA, 19 bp, Artificial sequence
  SiRNA target sequence
agctatttagggttaagac

SEQ ID NO: 117058 - DNA, 19 bp, Artificial sequence
  SiRNA target sequence
gctatttagggttaagacc

SEQ ID NO: 117059 - DNA, 19 bp, Artificial sequence
  SiRNA target sequence
ctatttagggttaagaccc

SEQ ID NO: 117060 - DNA, 19 bp, Artificial sequence
  SiRNA target sequence
tatttagggttaagacccg

SEQ ID NO: 117061 - DNA, 19 bp, Artificial sequence
  SiRNA target sequence
atttagggttaagacccgt

SEQ ID NO: 117062 - DNA, 19 bp, Artificial sequence
  SiRNA target sequence
tttagggttaagacccgta

SEQ ID NO: 117063 - DNA, 19 bp, Artificial sequence
  SiRNA target sequence
ttagggttaagacccgtag

SEQ ID NO: 117064 - DNA, 19 bp, Artificial sequence
  SiRNA target sequence
tagggttaagacccgtagt

SEQ ID NO: 117065 - DNA, 19 bp, Artificial sequence
  SiRNA target sequence
agggttaagacccgtagta

SEQ ID NO: 117066 - DNA, 19 bp, Artificial sequence
  SiRNA target sequence
gggttaagacccgtagtag

SEQ ID NO: 117067 - DNA, 19 bp, Artificial sequence
  SiRNA target sequence
ggttaagacccgtagtaga

SEQ ID NO: 117068 - DNA, 19 bp, Artificial sequence
  SiRNA target sequence
gttaagacccgtagtagat

SEQ ID NO: 117069 - DNA, 19 bp, Artificial sequence
  SiRNA target sequence
ttaagacccgtagtagatt

SEQ ID NO: 117070 - DNA, 19 bp, Artificial sequence
  SiRNA target sequence
taagacccgtagtagattt

SEQ ID NO: 117071 - DNA, 19 bp, Artificial sequence
  SiRNA target sequence
aagacccgtagtagatttt

SEQ ID NO: 117072 - DNA, 19 bp, Artificial sequence
  SiRNA target sequence
agacccgtagtagatttta

SEQ ID NO: 117073 - DNA, 19 bp, Artificial sequence
  SiRNA target sequence
gacccgtagtagattttat

SEQ ID NO: 117074 - DNA, 19 bp, Artificial sequence
  SiRNA target sequence
acccgtagtagattttatg

SEQ ID NO: 117075 - DNA, 19 bp, Artificial sequence
  SiRNA target sequence
cccgtagtagattttatga

SEQ ID NO: 117076 - DNA, 19 bp, Artificial sequence
  SiRNA target sequence
ccgtagtagattttatgac

SEQ ID NO: 117077 - DNA, 19 bp, Artificial sequence
  SiRNA target sequence
cgtagtagattttatgact

SEQ ID NO: 117078 - DNA, 19 bp, Artificial sequence
  SiRNA target sequence
gtagtagattttatgactt

SEQ ID NO: 117079 - DNA, 19 bp, Artificial sequence
  SiRNA target sequence
tagtagattttatgacttg

SEQ ID NO: 117080 - DNA, 19 bp, Artificial sequence
  SiRNA target sequence
agtagattttatgacttgg

SEQ ID NO: 117081 - DNA, 19 bp, Artificial sequence
  SiRNA target sequence
gtagattttatgacttgga

SEQ ID NO: 117082 - DNA, 19 bp, Artificial sequence
  SiRNA target sequence
tagattttatgacttggaa

SEQ ID NO: 117083 - DNA, 19 bp, Artificial sequence
  SiRNA target sequence
agattttatgacttggaat

SEQ ID NO: 117084 - DNA, 19 bp, Artificial sequence
  SiRNA target sequence
gattttatgacttggaatt

SEQ ID NO: 117085 - DNA, 19 bp, Artificial sequence
  SiRNA target sequence
attttatgacttggaattt

SEQ ID NO: 117086 - DNA, 19 bp, Artificial sequence
  SiRNA target sequence
ttttatgacttggaatttt

SEQ ID NO: 117087 - DNA, 19 bp, Artificial sequence
  SiRNA target sequence
tttatgacttggaattttg

SEQ ID NO: 117088 - DNA, 19 bp, Artificial sequence
  SiRNA target sequence
ttatgacttggaattttgc

SEQ ID NO: 117089 - DNA, 19 bp, Artificial sequence
  SiRNA target sequence
tatgacttggaattttgct

SEQ ID NO: 117090 - DNA, 19 bp, Artificial sequence
  SiRNA target sequence
atgacttggaattttgctt

SEQ ID NO: 117091 - DNA, 19 bp, Artificial sequence
  SiRNA target sequence
tgacttggaattttgcttt

SEQ ID NO: 117092 - DNA, 19 bp, Artificial sequence
  SiRNA target sequence
gacttggaattttgctttg

SEQ ID NO: 117093 - DNA, 19 bp, Artificial sequence
  SiRNA target sequence
acttggaattttgctttgc

SEQ ID NO: 117094 - DNA, 19 bp, Artificial sequence
  SiRNA target sequence
cttggaattttgctttgca

SEQ ID NO: 117095 - DNA, 19 bp, Artificial sequence
  SiRNA target sequence
ttggaattttgctttgcaa

SEQ ID NO: 117096 - DNA, 19 bp, Artificial sequence
  SiRNA target sequence
tggaattttgctttgcaat

SEQ ID NO: 117097 - DNA, 19 bp, Artificial sequence
  SiRNA target sequence
ggaattttgctttgcaatc

SEQ ID NO: 117098 - DNA, 19 bp, Artificial sequence
  SiRNA target sequence
gaattttgctttgcaatca

SEQ ID NO: 117099 - DNA, 19 bp, Artificial sequence
  SiRNA target sequence
aattttgctttgcaatcaa

SEQ ID NO: 117100 - DNA, 19 bp, Artificial sequence
  SiRNA target sequence
attttgctttgcaatcaat

SEQ ID NO: 117101 - DNA, 19 bp, Artificial sequence
  SiRNA target sequence
ttttgctttgcaatcaatt

SEQ ID NO: 117102 - DNA, 19 bp, Artificial sequence
  SiRNA target sequence
tttgctttgcaatcaattg

SEQ ID NO: 117103 - DNA, 19 bp, Artificial sequence
  SiRNA target sequence
ttgctttgcaatcaattga

SEQ ID NO: 117104 - DNA, 19 bp, Artificial sequence
  SiRNA target sequence
tgctttgcaatcaattgac

SEQ ID NO: 117105 - DNA, 19 bp, Artificial sequence
  SiRNA target sequence
gctttgcaatcaattgacc

SEQ ID NO: 117106 - DNA, 19 bp, Artificial sequence
  SiRNA target sequence
ctttgcaatcaattgacca

SEQ ID NO: 117107 - DNA, 19 bp, Artificial sequence
  SiRNA target sequence
tttgcaatcaattgaccat

SEQ ID NO: 117108 - DNA, 19 bp, Artificial sequence
  SiRNA target sequence
ttgcaatcaattgaccata

SEQ ID NO: 117109 - DNA, 19 bp, Artificial sequence
  SiRNA target sequence
tgcaatcaattgaccatat

SEQ ID NO: 117110 - DNA, 19 bp, Artificial sequence
  SiRNA target sequence
gcaatcaattgaccatatt

SEQ ID NO: 117111 - DNA, 19 bp, Artificial sequence
  SiRNA target sequence
caatcaattgaccatatta

SEQ ID NO: 117112 - DNA, 19 bp, Artificial sequence
  SiRNA target sequence
aatcaattgaccatattat

SEQ ID NO: 117113 - DNA, 19 bp, Artificial sequence
  SiRNA target sequence
atcaattgaccatattatt

SEQ ID NO: 117114 - DNA, 19 bp, Artificial sequence
  SiRNA target sequence
tcaattgaccatattatta

SEQ ID NO: 117115 - DNA, 19 bp, Artificial sequence
  SiRNA target sequence
caattgaccatattattaa

SEQ ID NO: 117116 - DNA, 19 bp, Artificial sequence
  SiRNA target sequence
aattgaccatattattaat

SEQ ID NO: 117117 - DNA, 19 bp, Artificial sequence
  SiRNA target sequence
attgaccatattattaatt

SEQ ID NO: 117118 - DNA, 19 bp, Artificial sequence
  SiRNA target sequence
ttgaccatattattaattc

SEQ ID NO: 117119 - DNA, 19 bp, Artificial sequence
  SiRNA target sequence
tgaccatattattaattct

SEQ ID NO: 117120 - DNA, 19 bp, Artificial sequence
  SiRNA target sequence
gaccatattattaattctt

SEQ ID NO: 117121 - DNA, 19 bp, Artificial sequence
  SiRNA target sequence
accatattattaattcttg

SEQ ID NO: 117122 - DNA, 19 bp, Artificial sequence
  SiRNA target sequence
ccatattattaattcttgt

SEQ ID NO: 117123 - DNA, 19 bp, Artificial sequence
  SiRNA target sequence
catattattaattcttgtg

SEQ ID NO: 117124 - DNA, 19 bp, Artificial sequence
  SiRNA target sequence
atattattaattcttgtgc

SEQ ID NO: 117125 - DNA, 19 bp, Artificial sequence
  SiRNA target sequence
tattattaattcttgtgcg

SEQ ID NO: 117126 - DNA, 19 bp, Artificial sequence
  SiRNA target sequence
attattaattcttgtgcga

SEQ ID NO: 117127 - DNA, 19 bp, Artificial sequence
  SiRNA target sequence
ttattaattcttgtgcgaa

SEQ ID NO: 117128 - DNA, 19 bp, Artificial sequence
  SiRNA target sequence
tattaattcttgtgcgaaa

SEQ ID NO: 117129 - DNA, 19 bp, Artificial sequence
  SiRNA target sequence
attaattcttgtgcgaaaa

SEQ ID NO: 117130 - DNA, 19 bp, Artificial sequence
  SiRNA target sequence
ttaattcttgtgcgaaaac

SEQ ID NO: 117131 - DNA, 19 bp, Artificial sequence
  SiRNA target sequence
taattcttgtgcgaaaacc

SEQ ID NO: 117132 - DNA, 19 bp, Artificial sequence
  SiRNA target sequence
aattcttgtgcgaaaacct

SEQ ID NO: 117133 - DNA, 19 bp, Artificial sequence
  SiRNA target sequence
attcttgtgcgaaaacctt

SEQ ID NO: 117134 - DNA, 19 bp, Artificial sequence
  SiRNA target sequence
ttcttgtgcgaaaaccttg

SEQ ID NO: 117135 - DNA, 19 bp, Artificial sequence
  SiRNA target sequence
tcttgtgcgaaaaccttgt

SEQ ID NO: 117136 - DNA, 19 bp, Artificial sequence
  SiRNA target sequence
cttgtgcgaaaaccttgta

SEQ ID NO: 117137 - DNA, 19 bp, Artificial sequence
  SiRNA target sequence
ttgtgcgaaaaccttgtat

SEQ ID NO: 117138 - DNA, 19 bp, Artificial sequence
  SiRNA target sequence
tgtgcgaaaaccttgtata

SEQ ID NO: 117139 - DNA, 19 bp, Artificial sequence
  SiRNA target sequence
gtgcgaaaaccttgtatat

SEQ ID NO: 117140 - DNA, 19 bp, Artificial sequence
  SiRNA target sequence
tgcgaaaaccttgtatatg

SEQ ID NO: 117141 - DNA, 19 bp, Artificial sequence
  SiRNA target sequence
gcgaaaaccttgtatatgt

SEQ ID NO: 117142 - DNA, 19 bp, Artificial sequence
  SiRNA target sequence
cgaaaaccttgtatatgtc

SEQ ID NO: 117143 - DNA, 19 bp, Artificial sequence
  SiRNA target sequence
gaaaaccttgtatatgtca

SEQ ID NO: 117144 - DNA, 19 bp, Artificial sequence
  SiRNA target sequence
aaaaccttgtatatgtcag

SEQ ID NO: 117145 - DNA, 19 bp, Artificial sequence
  SiRNA target sequence
aaaccttgtatatgtcagg

SEQ ID NO: 117146 - DNA, 19 bp, Artificial sequence
  SiRNA target sequence
aaccttgtatatgtcagga

SEQ ID NO: 117147 - DNA, 19 bp, Artificial sequence
  SiRNA target sequence
accttgtatatgtcaggag

SEQ ID NO: 117148 - DNA, 19 bp, Artificial sequence
  SiRNA target sequence
ccttgtatatgtcaggagg

SEQ ID NO: 117149 - DNA, 19 bp, Artificial sequence
  SiRNA target sequence
cttgtatatgtcaggagga

SEQ ID NO: 117150 - DNA, 19 bp, Artificial sequence
  SiRNA target sequence
ttgtatatgtcaggaggaa

SEQ ID NO: 117151 - DNA, 19 bp, Artificial sequence
  SiRNA target sequence
tgtatatgtcaggaggaag

SEQ ID NO: 117152 - DNA, 19 bp, Artificial sequence
  SiRNA target sequence
gtatatgtcaggaggaaga

SEQ ID NO: 117153 - DNA, 19 bp, Artificial sequence
  SiRNA target sequence
tatatgtcaggaggaagaa

SEQ ID NO: 117154 - DNA, 19 bp, Artificial sequence
  SiRNA target sequence
atatgtcaggaggaagaat

SEQ ID NO: 117155 - DNA, 19 bp, Artificial sequence
  SiRNA target sequence
tatgtcaggaggaagaata

SEQ ID NO: 117156 - DNA, 19 bp, Artificial sequence
  SiRNA target sequence
atgtcaggaggaagaatac

SEQ ID NO: 117157 - DNA, 19 bp, Artificial sequence
  SiRNA target sequence
tgtcaggaggaagaataca

SEQ ID NO: 117158 - DNA, 19 bp, Artificial sequence
  SiRNA target sequence
gtcaggaggaagaatacaa

SEQ ID NO: 117159 - DNA, 19 bp, Artificial sequence
  SiRNA target sequence
tcaggaggaagaatacaat

SEQ ID NO: 117160 - DNA, 19 bp, Artificial sequence
  SiRNA target sequence
caggaggaagaatacaatg

SEQ ID NO: 117161 - DNA, 19 bp, Artificial sequence
  SiRNA target sequence
aggaggaagaatacaatgt

SEQ ID NO: 117162 - DNA, 19 bp, Artificial sequence
  SiRNA target sequence
ggaggaagaatacaatgtc

SEQ ID NO: 117163 - DNA, 19 bp, Artificial sequence
  SiRNA target sequence
gaggaagaatacaatgtcc

SEQ ID NO: 117164 - DNA, 19 bp, Artificial sequence
  SiRNA target sequence
aggaagaatacaatgtcca

SEQ ID NO: 117165 - DNA, 19 bp, Artificial sequence
  SiRNA target sequence
ggaagaatacaatgtccaa

SEQ ID NO: 117166 - DNA, 19 bp, Artificial sequence
  SiRNA target sequence
gaagaatacaatgtccaat

SEQ ID NO: 117167 - DNA, 19 bp, Artificial sequence
  SiRNA target sequence
aagaatacaatgtccaatt

SEQ ID NO: 117168 - DNA, 19 bp, Artificial sequence
  SiRNA target sequence
agaatacaatgtccaattg

SEQ ID NO: 117169 - DNA, 19 bp, Artificial sequence
  SiRNA target sequence
gaatacaatgtccaattgt

SEQ ID NO: 117170 - DNA, 19 bp, Artificial sequence
  SiRNA target sequence
aatacaatgtccaattgtt

SEQ ID NO: 117171 - DNA, 19 bp, Artificial sequence
  SiRNA target sequence
atacaatgtccaattgttt

SEQ ID NO: 117172 - DNA, 19 bp, Artificial sequence
  SiRNA target sequence
tacaatgtccaattgtttt

SEQ ID NO: 117173 - DNA, 19 bp, Artificial sequence
  SiRNA target sequence
acaatgtccaattgttttt

SEQ ID NO: 117174 - DNA, 19 bp, Artificial sequence
  SiRNA target sequence
caatgtccaattgttttta

SEQ ID NO: 117175 - DNA, 19 bp, Artificial sequence
  SiRNA target sequence
aatgtccaattgtttttag

SEQ ID NO: 117176 - DNA, 19 bp, Artificial sequence
  SiRNA target sequence
atgtccaattgtttttagg

SEQ ID NO: 117177 - DNA, 19 bp, Artificial sequence
  SiRNA target sequence
tgtccaattgtttttaggg

SEQ ID NO: 117178 - DNA, 19 bp, Artificial sequence
  SiRNA target sequence
gtccaattgtttttagggg

SEQ ID NO: 117179 - DNA, 19 bp, Artificial sequence
  SiRNA target sequence
tccaattgtttttagggga

SEQ ID NO: 117180 - DNA, 19 bp, Artificial sequence
  SiRNA target sequence
ccaattgtttttaggggac

SEQ ID NO: 117181 - DNA, 19 bp, Artificial sequence
  SiRNA target sequence
caattgtttttaggggacc

SEQ ID NO: 117182 - DNA, 19 bp, Artificial sequence
  SiRNA target sequence
aattgtttttaggggacca

SEQ ID NO: 117183 - DNA, 19 bp, Artificial sequence
  SiRNA target sequence
attgtttttaggggaccaa

SEQ ID NO: 117184 - DNA, 19 bp, Artificial sequence
  SiRNA target sequence
ttgtttttaggggaccaaa

SEQ ID NO: 117185 - DNA, 19 bp, Artificial sequence
  SiRNA target sequence
tgtttttaggggaccaaat

SEQ ID NO: 117186 - DNA, 19 bp, Artificial sequence
  SiRNA target sequence
gtttttaggggaccaaatg

SEQ ID NO: 117187 - DNA, 19 bp, Artificial sequence
  SiRNA target sequence
tttttaggggaccaaatgg

SEQ ID NO: 117188 - DNA, 19 bp, Artificial sequence
  SiRNA target sequence
ttttaggggaccaaatgga

SEQ ID NO: 117189 - DNA, 19 bp, Artificial sequence
  SiRNA target sequence
tttaggggaccaaatggat

SEQ ID NO: 117190 - DNA, 19 bp, Artificial sequence
  SiRNA target sequence
ttaggggaccaaatggatt

SEQ ID NO: 117191 - DNA, 19 bp, Artificial sequence
  SiRNA target sequence
taggggaccaaatggattc

SEQ ID NO: 117192 - DNA, 19 bp, Artificial sequence
  SiRNA target sequence
aggggaccaaatggattca

SEQ ID NO: 117193 - DNA, 19 bp, Artificial sequence
  SiRNA target sequence
ggggaccaaatggattcaa

SEQ ID NO: 117194 - DNA, 19 bp, Artificial sequence
  SiRNA target sequence
gggaccaaatggattcaat

SEQ ID NO: 117195 - DNA, 19 bp, Artificial sequence
  SiRNA target sequence
ggaccaaatggattcaata

SEQ ID NO: 117196 - DNA, 19 bp, Artificial sequence
  SiRNA target sequence
gaccaaatggattcaataa

SEQ ID NO: 117197 - DNA, 19 bp, Artificial sequence
  SiRNA target sequence
accaaatggattcaataat

SEQ ID NO: 117198 - DNA, 19 bp, Artificial sequence
  SiRNA target sequence
ccaaatggattcaataatg

SEQ ID NO: 117199 - DNA, 19 bp, Artificial sequence
  SiRNA target sequence
caaatggattcaataatgg

SEQ ID NO: 117200 - DNA, 19 bp, Artificial sequence
  SiRNA target sequence
aaatggattcaataatggg

SEQ ID NO: 117201 - DNA, 19 bp, Artificial sequence
  SiRNA target sequence
aatggattcaataatgggt

SEQ ID NO: 117202 - DNA, 19 bp, Artificial sequence
  SiRNA target sequence
atggattcaataatgggta

SEQ ID NO: 117203 - DNA, 19 bp, Artificial sequence
  SiRNA target sequence
tggattcaataatgggtac

SEQ ID NO: 117204 - DNA, 19 bp, Artificial sequence
  SiRNA target sequence
ggattcaataatgggtacg

SEQ ID NO: 117205 - DNA, 19 bp, Artificial sequence
  SiRNA target sequence
gattcaataatgggtacgc

SEQ ID NO: 117206 - DNA, 19 bp, Artificial sequence
  SiRNA target sequence
attcaataatgggtacgct

SEQ ID NO: 117207 - DNA, 19 bp, Artificial sequence
  SiRNA target sequence
ttcaataatgggtacgctg

SEQ ID NO: 117208 - DNA, 19 bp, Artificial sequence
  SiRNA target sequence
tcaataatgggtacgctgc

SEQ ID NO: 117209 - DNA, 19 bp, Artificial sequence
  SiRNA target sequence
caataatgggtacgctgca

SEQ ID NO: 117210 - DNA, 19 bp, Artificial sequence
  SiRNA target sequence
aataatgggtacgctgcac

SEQ ID NO: 117211 - DNA, 19 bp, Artificial sequence
  SiRNA target sequence
ataatgggtacgctgcaca

SEQ ID NO: 117212 - DNA, 19 bp, Artificial sequence
  SiRNA target sequence
taatgggtacgctgcacag

SEQ ID NO: 117213 - DNA, 19 bp, Artificial sequence
  SiRNA target sequence
aatgggtacgctgcacagc

SEQ ID NO: 117214 - DNA, 19 bp, Artificial sequence
  SiRNA target sequence
atgggtacgctgcacagca

SEQ ID NO: 117215 - DNA, 19 bp, Artificial sequence
  SiRNA target sequence
tgggtacgctgcacagcac

SEQ ID NO: 117216 - DNA, 19 bp, Artificial sequence
  SiRNA target sequence
gggtacgctgcacagcaca

SEQ ID NO: 117217 - DNA, 19 bp, Artificial sequence
  SiRNA target sequence
ggtacgctgcacagcacac

SEQ ID NO: 117218 - DNA, 19 bp, Artificial sequence
  SiRNA target sequence
gtacgctgcacagcacaca

SEQ ID NO: 117219 - DNA, 19 bp, Artificial sequence
  SiRNA target sequence
tacgctgcacagcacacac

SEQ ID NO: 117220 - DNA, 19 bp, Artificial sequence
  SiRNA target sequence
acgctgcacagcacacaca

SEQ ID NO: 117221 - DNA, 19 bp, Artificial sequence
  SiRNA target sequence
cgctgcacagcacacacaa

SEQ ID NO: 117222 - DNA, 19 bp, Artificial sequence
  SiRNA target sequence
gctgcacagcacacacaag

SEQ ID NO: 117223 - DNA, 19 bp, Artificial sequence
  SiRNA target sequence
ctgcacagcacacacaaga

SEQ ID NO: 117224 - DNA, 19 bp, Artificial sequence
  SiRNA target sequence
tgcacagcacacacaagat

SEQ ID NO: 117225 - DNA, 19 bp, Artificial sequence
  SiRNA target sequence
gcacagcacacacaagatt

SEQ ID NO: 117226 - DNA, 19 bp, Artificial sequence
  SiRNA target sequence
cacagcacacacaagattt

SEQ ID NO: 117227 - DNA, 19 bp, Artificial sequence
  SiRNA target sequence
acagcacacacaagatttt

SEQ ID NO: 117228 - DNA, 19 bp, Artificial sequence
  SiRNA target sequence
cagcacacacaagattttg

SEQ ID NO: 117229 - DNA, 19 bp, Artificial sequence
  SiRNA target sequence
agcacacacaagattttgc

SEQ ID NO: 117230 - DNA, 19 bp, Artificial sequence
  SiRNA target sequence
gcacacacaagattttgca

SEQ ID NO: 117231 - DNA, 19 bp, Artificial sequence
  SiRNA target sequence
cacacacaagattttgcac

SEQ ID NO: 117232 - DNA, 19 bp, Artificial sequence
  SiRNA target sequence
acacacaagattttgcacc

SEQ ID NO: 117233 - DNA, 19 bp, Artificial sequence
  SiRNA target sequence
cacacaagattttgcacca

SEQ ID NO: 117234 - DNA, 19 bp, Artificial sequence
  SiRNA target sequence
acacaagattttgcaccaa

SEQ ID NO: 117235 - DNA, 19 bp, Artificial sequence
  SiRNA target sequence
cacaagattttgcaccaat

SEQ ID NO: 117236 - DNA, 19 bp, Artificial sequence
  SiRNA target sequence
acaagattttgcaccaata

SEQ ID NO: 117237 - DNA, 19 bp, Artificial sequence
  SiRNA target sequence
caagattttgcaccaatat

SEQ ID NO: 117238 - DNA, 19 bp, Artificial sequence
  SiRNA target sequence
aagattttgcaccaatata

SEQ ID NO: 117239 - DNA, 19 bp, Artificial sequence
  SiRNA target sequence
agattttgcaccaatatat

SEQ ID NO: 117240 - DNA, 19 bp, Artificial sequence
  SiRNA target sequence
gattttgcaccaatatatg

SEQ ID NO: 117241 - DNA, 19 bp, Artificial sequence
  SiRNA target sequence
attttgcaccaatatatgg

SEQ ID NO: 117242 - DNA, 19 bp, Artificial sequence
  SiRNA target sequence
ttttgcaccaatatatggt

SEQ ID NO: 117243 - DNA, 19 bp, Artificial sequence
  SiRNA target sequence
tttgcaccaatatatggtt

SEQ ID NO: 117244 - DNA, 19 bp, Artificial sequence
  SiRNA target sequence
ttgcaccaatatatggttc

SEQ ID NO: 117245 - DNA, 19 bp, Artificial sequence
  SiRNA target sequence
tgcaccaatatatggttct

SEQ ID NO: 117246 - DNA, 19 bp, Artificial sequence
  SiRNA target sequence
gcaccaatatatggttcta

SEQ ID NO: 117247 - DNA, 19 bp, Artificial sequence
  SiRNA target sequence
caccaatatatggttctat

SEQ ID NO: 117248 - DNA, 19 bp, Artificial sequence
  SiRNA target sequence
accaatatatggttctatt

SEQ ID NO: 117249 - DNA, 19 bp, Artificial sequence
  SiRNA target sequence
ccaatatatggttctattc

SEQ ID NO: 117250 - DNA, 19 bp, Artificial sequence
  SiRNA target sequence
caatatatggttctattcc

SEQ ID NO: 117251 - DNA, 19 bp, Artificial sequence
  SiRNA target sequence
aatatatggttctattcca

SEQ ID NO: 117252 - DNA, 19 bp, Artificial sequence
  SiRNA target sequence
atatatggttctattccag

SEQ ID NO: 117253 - DNA, 19 bp, Artificial sequence
  SiRNA target sequence
tatatggttctattccagg

SEQ ID NO: 117254 - DNA, 19 bp, Artificial sequence
  SiRNA target sequence
atatggttctattccaggc

SEQ ID NO: 117255 - DNA, 19 bp, Artificial sequence
  SiRNA target sequence
tatggttctattccaggcc

SEQ ID NO: 117256 - DNA, 19 bp, Artificial sequence
  SiRNA target sequence
atggttctattccaggcct

SEQ ID NO: 117257 - DNA, 19 bp, Artificial sequence
  SiRNA target sequence
tggttctattccaggcctt

SEQ ID NO: 117258 - DNA, 19 bp, Artificial sequence
  SiRNA target sequence
ggttctattccaggcctta

SEQ ID NO: 117259 - DNA, 19 bp, Artificial sequence
  SiRNA target sequence
gttctattccaggccttaa

SEQ ID NO: 117260 - DNA, 19 bp, Artificial sequence
  SiRNA target sequence
ttctattccaggccttaag

SEQ ID NO: 117261 - DNA, 19 bp, Artificial sequence
  SiRNA target sequence
tctattccaggccttaagg

SEQ ID NO: 117262 - DNA, 19 bp, Artificial sequence
  SiRNA target sequence
ctattccaggccttaaggt

SEQ ID NO: 117263 - DNA, 19 bp, Artificial sequence
  SiRNA target sequence
tattccaggccttaaggtg

SEQ ID NO: 117264 - DNA, 19 bp, Artificial sequence
  SiRNA target sequence
attccaggccttaaggtgg

SEQ ID NO: 117265 - DNA, 19 bp, Artificial sequence
  SiRNA target sequence
ttccaggccttaaggtggt

SEQ ID NO: 117266 - DNA, 19 bp, Artificial sequence
  SiRNA target sequence
tccaggccttaaggtggtt

SEQ ID NO: 117267 - DNA, 19 bp, Artificial sequence
  SiRNA target sequence
ccaggccttaaggtggttt

SEQ ID NO: 117268 - DNA, 19 bp, Artificial sequence
  SiRNA target sequence
caggccttaaggtggtttg

SEQ ID NO: 117269 - DNA, 19 bp, Artificial sequence
  SiRNA target sequence
aggccttaaggtggtttgt

SEQ ID NO: 117270 - DNA, 19 bp, Artificial sequence
  SiRNA target sequence
ggccttaaggtggtttgtc

SEQ ID NO: 117271 - DNA, 19 bp, Artificial sequence
  SiRNA target sequence
gccttaaggtggtttgtcc

SEQ ID NO: 117272 - DNA, 19 bp, Artificial sequence
  SiRNA target sequence
ccttaaggtggtttgtcct

SEQ ID NO: 117273 - DNA, 19 bp, Artificial sequence
  SiRNA target sequence
cttaaggtggtttgtcctt

SEQ ID NO: 117274 - DNA, 19 bp, Artificial sequence
  SiRNA target sequence
ttaaggtggtttgtcctta

SEQ ID NO: 117275 - DNA, 19 bp, Artificial sequence
  SiRNA target sequence
taaggtggtttgtccttat

SEQ ID NO: 117276 - DNA, 19 bp, Artificial sequence
  SiRNA target sequence
aaggtggtttgtccttata

SEQ ID NO: 117277 - DNA, 19 bp, Artificial sequence
  SiRNA target sequence
aggtggtttgtccttatac

SEQ ID NO: 117278 - DNA, 19 bp, Artificial sequence
  SiRNA target sequence
ggtggtttgtccttatacg

SEQ ID NO: 117279 - DNA, 19 bp, Artificial sequence
  SiRNA target sequence
gtggtttgtccttatacgg

SEQ ID NO: 117280 - DNA, 19 bp, Artificial sequence
  SiRNA target sequence
tggtttgtccttatacggg

SEQ ID NO: 117281 - DNA, 19 bp, Artificial sequence
  SiRNA target sequence
ggtttgtccttatacgggt

SEQ ID NO: 117282 - DNA, 19 bp, Artificial sequence
  SiRNA target sequence
gtttgtccttatacgggta

SEQ ID NO: 117283 - DNA, 19 bp, Artificial sequence
  SiRNA target sequence
tttgtccttatacgggtaa

SEQ ID NO: 117284 - DNA, 19 bp, Artificial sequence
  SiRNA target sequence
ttgtccttatacgggtaaa

SEQ ID NO: 117285 - DNA, 19 bp, Artificial sequence
  SiRNA target sequence
tgtccttatacgggtaaag

SEQ ID NO: 117286 - DNA, 19 bp, Artificial sequence
  SiRNA target sequence
gtccttatacgggtaaaga

SEQ ID NO: 117287 - DNA, 19 bp, Artificial sequence
  SiRNA target sequence
tccttatacgggtaaagac

SEQ ID NO: 117288 - DNA, 19 bp, Artificial sequence
  SiRNA target sequence
ccttatacgggtaaagacc

SEQ ID NO: 117289 - DNA, 19 bp, Artificial sequence
  SiRNA target sequence
cttatacgggtaaagacca

SEQ ID NO: 117290 - DNA, 19 bp, Artificial sequence
  SiRNA target sequence
ttatacgggtaaagaccat

SEQ ID NO: 117291 - DNA, 19 bp, Artificial sequence
  SiRNA target sequence
tatacgggtaaagaccata

SEQ ID NO: 117292 - DNA, 19 bp, Artificial sequence
  SiRNA target sequence
atacgggtaaagaccataa

SEQ ID NO: 117293 - DNA, 19 bp, Artificial sequence
  SiRNA target sequence
tacgggtaaagaccataaa

SEQ ID NO: 117294 - DNA, 19 bp, Artificial sequence
  SiRNA target sequence
acgggtaaagaccataaag

SEQ ID NO: 117295 - DNA, 19 bp, Artificial sequence
  SiRNA target sequence
cgggtaaagaccataaagg

SEQ ID NO: 117296 - DNA, 19 bp, Artificial sequence
  SiRNA target sequence
gggtaaagaccataaagga

SEQ ID NO: 117297 - DNA, 19 bp, Artificial sequence
  SiRNA target sequence
ggtaaagaccataaaggac

SEQ ID NO: 117298 - DNA, 19 bp, Artificial sequence
  SiRNA target sequence
gtaaagaccataaaggact

SEQ ID NO: 117299 - DNA, 19 bp, Artificial sequence
  SiRNA target sequence
taaagaccataaaggactt

SEQ ID NO: 117300 - DNA, 19 bp, Artificial sequence
  SiRNA target sequence
aaagaccataaaggacttt

SEQ ID NO: 117301 - DNA, 19 bp, Artificial sequence
  SiRNA target sequence
aagaccataaaggactttt

SEQ ID NO: 117302 - DNA, 19 bp, Artificial sequence
  SiRNA target sequence
agaccataaaggactttta

SEQ ID NO: 117303 - DNA, 19 bp, Artificial sequence
  SiRNA target sequence
gaccataaaggacttttaa

SEQ ID NO: 117304 - DNA, 19 bp, Artificial sequence
  SiRNA target sequence
accataaaggacttttaaa

SEQ ID NO: 117305 - DNA, 19 bp, Artificial sequence
  SiRNA target sequence
ccataaaggacttttaaaa

SEQ ID NO: 117306 - DNA, 19 bp, Artificial sequence
  SiRNA target sequence
cataaaggacttttaaaaa

SEQ ID NO: 117307 - DNA, 19 bp, Artificial sequence
  SiRNA target sequence
ataaaggacttttaaaaag

SEQ ID NO: 117308 - DNA, 19 bp, Artificial sequence
  SiRNA target sequence
taaaggacttttaaaaagc

SEQ ID NO: 117309 - DNA, 19 bp, Artificial sequence
  SiRNA target sequence
aaaggacttttaaaaagcg

SEQ ID NO: 117310 - DNA, 19 bp, Artificial sequence
  SiRNA target sequence
aaggacttttaaaaagcgc

SEQ ID NO: 117311 - DNA, 19 bp, Artificial sequence
  SiRNA target sequence
aggacttttaaaaagcgct

SEQ ID NO: 117312 - DNA, 19 bp, Artificial sequence
  SiRNA target sequence
ggacttttaaaaagcgcta

SEQ ID NO: 117313 - DNA, 19 bp, Artificial sequence
  SiRNA target sequence
gacttttaaaaagcgctat

SEQ ID NO: 117314 - DNA, 19 bp, Artificial sequence
  SiRNA target sequence
acttttaaaaagcgctatt

SEQ ID NO: 117315 - DNA, 19 bp, Artificial sequence
  SiRNA target sequence
cttttaaaaagcgctatta

SEQ ID NO: 117316 - DNA, 19 bp, Artificial sequence
  SiRNA target sequence
ttttaaaaagcgctattag

SEQ ID NO: 117317 - DNA, 19 bp, Artificial sequence
  SiRNA target sequence
tttaaaaagcgctattaga

SEQ ID NO: 117318 - DNA, 19 bp, Artificial sequence
  SiRNA target sequence
ttaaaaagcgctattagag

SEQ ID NO: 117319 - DNA, 19 bp, Artificial sequence
  SiRNA target sequence
taaaaagcgctattagaga

SEQ ID NO: 117320 - DNA, 19 bp, Artificial sequence
  SiRNA target sequence
aaaaagcgctattagagac

SEQ ID NO: 117321 - DNA, 19 bp, Artificial sequence
  SiRNA target sequence
aaaagcgctattagagaca

SEQ ID NO: 117322 - DNA, 19 bp, Artificial sequence
  SiRNA target sequence
aaagcgctattagagacaa

SEQ ID NO: 117323 - DNA, 19 bp, Artificial sequence
  SiRNA target sequence
aagcgctattagagacaat

SEQ ID NO: 117324 - DNA, 19 bp, Artificial sequence
  SiRNA target sequence
agcgctattagagacaata

SEQ ID NO: 117325 - DNA, 19 bp, Artificial sequence
  SiRNA target sequence
gcgctattagagacaataa

SEQ ID NO: 117326 - DNA, 19 bp, Artificial sequence
  SiRNA target sequence
cgctattagagacaataac

SEQ ID NO: 117327 - DNA, 19 bp, Artificial sequence
  SiRNA target sequence
gctattagagacaataacc

SEQ ID NO: 117328 - DNA, 19 bp, Artificial sequence
  SiRNA target sequence
ctattagagacaataaccc

SEQ ID NO: 117329 - DNA, 19 bp, Artificial sequence
  SiRNA target sequence
tattagagacaataacccg

SEQ ID NO: 117330 - DNA, 19 bp, Artificial sequence
  SiRNA target sequence
attagagacaataacccgg

SEQ ID NO: 117331 - DNA, 19 bp, Artificial sequence
  SiRNA target sequence
ttagagacaataacccggt

SEQ ID NO: 117332 - DNA, 19 bp, Artificial sequence
  SiRNA target sequence
tagagacaataacccggtt

SEQ ID NO: 117333 - DNA, 19 bp, Artificial sequence
  SiRNA target sequence
agagacaataacccggtta

SEQ ID NO: 117334 - DNA, 19 bp, Artificial sequence
  SiRNA target sequence
gagacaataacccggttat

SEQ ID NO: 117335 - DNA, 19 bp, Artificial sequence
  SiRNA target sequence
agacaataacccggttata

SEQ ID NO: 117336 - DNA, 19 bp, Artificial sequence
  SiRNA target sequence
gacaataacccggttatat

SEQ ID NO: 117337 - DNA, 19 bp, Artificial sequence
  SiRNA target sequence
acaataacccggttatatt

SEQ ID NO: 117338 - DNA, 19 bp, Artificial sequence
  SiRNA target sequence
caataacccggttatattt

SEQ ID NO: 117339 - DNA, 19 bp, Artificial sequence
  SiRNA target sequence
aataacccggttatatttc

SEQ ID NO: 117340 - DNA, 19 bp, Artificial sequence
  SiRNA target sequence
ataacccggttatatttct

SEQ ID NO: 117341 - DNA, 19 bp, Artificial sequence
  SiRNA target sequence
taacccggttatatttctt

SEQ ID NO: 117342 - DNA, 19 bp, Artificial sequence
  SiRNA target sequence
aacccggttatatttcttg

SEQ ID NO: 117343 - DNA, 19 bp, Artificial sequence
  SiRNA target sequence
acccggttatatttcttga

SEQ ID NO: 117344 - DNA, 19 bp, Artificial sequence
  SiRNA target sequence
cccggttatatttcttgag

SEQ ID NO: 117345 - DNA, 19 bp, Artificial sequence
  SiRNA target sequence
ccggttatatttcttgaga

SEQ ID NO: 117346 - DNA, 19 bp, Artificial sequence
  SiRNA target sequence
cggttatatttcttgagaa

SEQ ID NO: 117347 - DNA, 19 bp, Artificial sequence
  SiRNA target sequence
ggttatatttcttgagaat

SEQ ID NO: 117348 - DNA, 19 bp, Artificial sequence
  SiRNA target sequence
gttatatttcttgagaatg

SEQ ID NO: 117349 - DNA, 19 bp, Artificial sequence
  SiRNA target sequence
ttatatttcttgagaatga

SEQ ID NO: 117350 - DNA, 19 bp, Artificial sequence
  SiRNA target sequence
tatatttcttgagaatgaa

SEQ ID NO: 117351 - DNA, 19 bp, Artificial sequence
  SiRNA target sequence
atatttcttgagaatgaaa

SEQ ID NO: 117352 - DNA, 19 bp, Artificial sequence
  SiRNA target sequence
tatttcttgagaatgaaat

SEQ ID NO: 117353 - DNA, 19 bp, Artificial sequence
  SiRNA target sequence
atttcttgagaatgaaata

SEQ ID NO: 117354 - DNA, 19 bp, Artificial sequence
  SiRNA target sequence
tttcttgagaatgaaatat

SEQ ID NO: 117355 - DNA, 19 bp, Artificial sequence
  SiRNA target sequence
ttcttgagaatgaaatatt

SEQ ID NO: 117356 - DNA, 19 bp, Artificial sequence
  SiRNA target sequence
tcttgagaatgaaatatta

SEQ ID NO: 117357 - DNA, 19 bp, Artificial sequence
  SiRNA target sequence
cttgagaatgaaatattat

SEQ ID NO: 117358 - DNA, 19 bp, Artificial sequence
  SiRNA target sequence
ttgagaatgaaatattata

SEQ ID NO: 117359 - DNA, 19 bp, Artificial sequence
  SiRNA target sequence
tgagaatgaaatattatat

SEQ ID NO: 117360 - DNA, 19 bp, Artificial sequence
  SiRNA target sequence
gagaatgaaatattatata

SEQ ID NO: 117361 - DNA, 19 bp, Artificial sequence
  SiRNA target sequence
agaatgaaatattatataa

SEQ ID NO: 117362 - DNA, 19 bp, Artificial sequence
  SiRNA target sequence
gaatgaaatattatataaa

SEQ ID NO: 117363 - DNA, 19 bp, Artificial sequence
  SiRNA target sequence
aatgaaatattatataaag

SEQ ID NO: 117364 - DNA, 19 bp, Artificial sequence
  SiRNA target sequence
atgaaatattatataaaga

SEQ ID NO: 117365 - DNA, 19 bp, Artificial sequence
  SiRNA target sequence
tgaaatattatataaagat

SEQ ID NO: 117366 - DNA, 19 bp, Artificial sequence
  SiRNA target sequence
gaaatattatataaagata

SEQ ID NO: 117367 - DNA, 19 bp, Artificial sequence
  SiRNA target sequence
aaatattatataaagataa

SEQ ID NO: 117368 - DNA, 19 bp, Artificial sequence
  SiRNA target sequence
aatattatataaagataaa

SEQ ID NO: 117369 - DNA, 19 bp, Artificial sequence
  SiRNA target sequence
atattatataaagataaat

SEQ ID NO: 117370 - DNA, 19 bp, Artificial sequence
  SiRNA target sequence
tattatataaagataaata

SEQ ID NO: 117371 - DNA, 19 bp, Artificial sequence
  SiRNA target sequence
attatataaagataaatac

SEQ ID NO: 117372 - DNA, 19 bp, Artificial sequence
  SiRNA target sequence
ttatataaagataaatacc

SEQ ID NO: 117373 - DNA, 19 bp, Artificial sequence
  SiRNA target sequence
tatataaagataaatacct

SEQ ID NO: 117374 - DNA, 19 bp, Artificial sequence
  SiRNA target sequence
atataaagataaatacctt

SEQ ID NO: 117375 - DNA, 19 bp, Artificial sequence
  SiRNA target sequence
tataaagataaataccttg

SEQ ID NO: 117376 - DNA, 19 bp, Artificial sequence
  SiRNA target sequence
ataaagataaataccttga

SEQ ID NO: 117377 - DNA, 19 bp, Artificial sequence
  SiRNA target sequence
taaagataaataccttgaa

SEQ ID NO: 117378 - DNA, 19 bp, Artificial sequence
  SiRNA target sequence
aaagataaataccttgaag

SEQ ID NO: 117379 - DNA, 19 bp, Artificial sequence
  SiRNA target sequence
aagataaataccttgaagt

SEQ ID NO: 117380 - DNA, 19 bp, Artificial sequence
  SiRNA target sequence
agataaataccttgaagtg

SEQ ID NO: 117381 - DNA, 19 bp, Artificial sequence
  SiRNA target sequence
gataaataccttgaagtgt

SEQ ID NO: 117382 - DNA, 19 bp, Artificial sequence
  SiRNA target sequence
ataaataccttgaagtgtc

SEQ ID NO: 117383 - DNA, 19 bp, Artificial sequence
  SiRNA target sequence
taaataccttgaagtgtct

SEQ ID NO: 117384 - DNA, 19 bp, Artificial sequence
  SiRNA target sequence
aaataccttgaagtgtcta

SEQ ID NO: 117385 - DNA, 19 bp, Artificial sequence
  SiRNA target sequence
aataccttgaagtgtctaa

SEQ ID NO: 117386 - DNA, 19 bp, Artificial sequence
  SiRNA target sequence
ataccttgaagtgtctaat

SEQ ID NO: 117387 - DNA, 19 bp, Artificial sequence
  SiRNA target sequence
taccttgaagtgtctaata

SEQ ID NO: 117388 - DNA, 19 bp, Artificial sequence
  SiRNA target sequence
accttgaagtgtctaataa

SEQ ID NO: 117389 - DNA, 19 bp, Artificial sequence
  SiRNA target sequence
ccttgaagtgtctaataat

SEQ ID NO: 117390 - DNA, 19 bp, Artificial sequence
  SiRNA target sequence
cttgaagtgtctaataatt

SEQ ID NO: 117391 - DNA, 19 bp, Artificial sequence
  SiRNA target sequence
ttgaagtgtctaataatta

SEQ ID NO: 117392 - DNA, 19 bp, Artificial sequence
  SiRNA target sequence
tgaagtgtctaataattat

SEQ ID NO: 117393 - DNA, 19 bp, Artificial sequence
  SiRNA target sequence
gaagtgtctaataattata

SEQ ID NO: 117394 - DNA, 19 bp, Artificial sequence
  SiRNA target sequence
aagtgtctaataattatat

SEQ ID NO: 117395 - DNA, 19 bp, Artificial sequence
  SiRNA target sequence
agtgtctaataattatatt

SEQ ID NO: 117396 - DNA, 19 bp, Artificial sequence
  SiRNA target sequence
gtgtctaataattatattc

SEQ ID NO: 117397 - DNA, 19 bp, Artificial sequence
  SiRNA target sequence
tgtctaataattatattca

SEQ ID NO: 117398 - DNA, 19 bp, Artificial sequence
  SiRNA target sequence
gtctaataattatattcaa

SEQ ID NO: 117399 - DNA, 19 bp, Artificial sequence
  SiRNA target sequence
tctaataattatattcaac

SEQ ID NO: 117400 - DNA, 19 bp, Artificial sequence
  SiRNA target sequence
ctaataattatattcaacc

SEQ ID NO: 117401 - DNA, 19 bp, Artificial sequence
  SiRNA target sequence
taataattatattcaacca

SEQ ID NO: 117402 - DNA, 19 bp, Artificial sequence
  SiRNA target sequence
aataattatattcaaccac

SEQ ID NO: 117403 - DNA, 19 bp, Artificial sequence
  SiRNA target sequence
ataattatattcaaccact

SEQ ID NO: 117404 - DNA, 19 bp, Artificial sequence
  SiRNA target sequence
taattatattcaaccactt

SEQ ID NO: 117405 - DNA, 19 bp, Artificial sequence
  SiRNA target sequence
aattatattcaaccacttg

SEQ ID NO: 117406 - DNA, 19 bp, Artificial sequence
  SiRNA target sequence
attatattcaaccacttga

SEQ ID NO: 117407 - DNA, 19 bp, Artificial sequence
  SiRNA target sequence
ttatattcaaccacttgac

SEQ ID NO: 117408 - DNA, 19 bp, Artificial sequence
  SiRNA target sequence
tatattcaaccacttgaca

SEQ ID NO: 117409 - DNA, 19 bp, Artificial sequence
  SiRNA target sequence
atattcaaccacttgacaa

SEQ ID NO: 117410 - DNA, 19 bp, Artificial sequence
  SiRNA target sequence
tattcaaccacttgacaag

SEQ ID NO: 117411 - DNA, 19 bp, Artificial sequence
  SiRNA target sequence
attcaaccacttgacaagg

SEQ ID NO: 117412 - DNA, 19 bp, Artificial sequence
  SiRNA target sequence
ttcaaccacttgacaaggc

SEQ ID NO: 117413 - DNA, 19 bp, Artificial sequence
  SiRNA target sequence
tcaaccacttgacaaggca

SEQ ID NO: 117414 - DNA, 19 bp, Artificial sequence
  SiRNA target sequence
caaccacttgacaaggcag

SEQ ID NO: 117415 - DNA, 19 bp, Artificial sequence
  SiRNA target sequence
aaccacttgacaaggcagt

SEQ ID NO: 117416 - DNA, 19 bp, Artificial sequence
  SiRNA target sequence
accacttgacaaggcagta

SEQ ID NO: 117417 - DNA, 19 bp, Artificial sequence
  SiRNA target sequence
ccacttgacaaggcagtaa

SEQ ID NO: 117418 - DNA, 19 bp, Artificial sequence
  SiRNA target sequence
cacttgacaaggcagtaat

SEQ ID NO: 117419 - DNA, 19 bp, Artificial sequence
  SiRNA target sequence
acttgacaaggcagtaatt

SEQ ID NO: 117420 - DNA, 19 bp, Artificial sequence
  SiRNA target sequence
cttgacaaggcagtaattg

SEQ ID NO: 117421 - DNA, 19 bp, Artificial sequence
  SiRNA target sequence
ttgacaaggcagtaattga

SEQ ID NO: 117422 - DNA, 19 bp, Artificial sequence
  SiRNA target sequence
tgacaaggcagtaattgaa

SEQ ID NO: 117423 - DNA, 19 bp, Artificial sequence
  SiRNA target sequence
gacaaggcagtaattgaaa

SEQ ID NO: 117424 - DNA, 19 bp, Artificial sequence
  SiRNA target sequence
acaaggcagtaattgaaaa

SEQ ID NO: 117425 - DNA, 19 bp, Artificial sequence
  SiRNA target sequence
caaggcagtaattgaaaaa

SEQ ID NO: 117426 - DNA, 19 bp, Artificial sequence
  SiRNA target sequence
aaggcagtaattgaaaaaa

SEQ ID NO: 117427 - DNA, 19 bp, Artificial sequence
  SiRNA target sequence
aggcagtaattgaaaaaaa

SEQ ID NO: 117428 - DNA, 19 bp, Artificial sequence
  SiRNA target sequence
ggcagtaattgaaaaaaat

SEQ ID NO: 117429 - DNA, 19 bp, Artificial sequence
  SiRNA target sequence
gcagtaattgaaaaaaatg

SEQ ID NO: 117430 - DNA, 19 bp, Artificial sequence
  SiRNA target sequence
cagtaattgaaaaaaatgg

SEQ ID NO: 117431 - DNA, 19 bp, Artificial sequence
  SiRNA target sequence
agtaattgaaaaaaatggt

SEQ ID NO: 117432 - DNA, 19 bp, Artificial sequence
  SiRNA target sequence
gtaattgaaaaaaatggtg

SEQ ID NO: 117433 - DNA, 19 bp, Artificial sequence
  SiRNA target sequence
taattgaaaaaaatggtgt

SEQ ID NO: 117434 - DNA, 19 bp, Artificial sequence
  SiRNA target sequence
aattgaaaaaaatggtgtt

SEQ ID NO: 117435 - DNA, 19 bp, Artificial sequence
  SiRNA target sequence
attgaaaaaaatggtgttg

SEQ ID NO: 117436 - DNA, 19 bp, Artificial sequence
  SiRNA target sequence
ttgaaaaaaatggtgttga

SEQ ID NO: 117437 - DNA, 19 bp, Artificial sequence
  SiRNA target sequence
tgaaaaaaatggtgttgac

SEQ ID NO: 117438 - DNA, 19 bp, Artificial sequence
  SiRNA target sequence
gaaaaaaatggtgttgacg

SEQ ID NO: 117439 - DNA, 19 bp, Artificial sequence
  SiRNA target sequence
aaaaaaatggtgttgacgt

SEQ ID NO: 117440 - DNA, 19 bp, Artificial sequence
  SiRNA target sequence
aaaaaatggtgttgacgtt

SEQ ID NO: 117441 - DNA, 19 bp, Artificial sequence
  SiRNA target sequence
aaaaatggtgttgacgtta

SEQ ID NO: 117442 - DNA, 19 bp, Artificial sequence
  SiRNA target sequence
aaaatggtgttgacgttac

SEQ ID NO: 117443 - DNA, 19 bp, Artificial sequence
  SiRNA target sequence
aaatggtgttgacgttaca

SEQ ID NO: 117444 - DNA, 19 bp, Artificial sequence
  SiRNA target sequence
aatggtgttgacgttacag

SEQ ID NO: 117445 - DNA, 19 bp, Artificial sequence
  SiRNA target sequence
atggtgttgacgttacagt

SEQ ID NO: 117446 - DNA, 19 bp, Artificial sequence
  SiRNA target sequence
tggtgttgacgttacagtt

SEQ ID NO: 117447 - DNA, 19 bp, Artificial sequence
  SiRNA target sequence
ggtgttgacgttacagttt

SEQ ID NO: 117448 - DNA, 19 bp, Artificial sequence
  SiRNA target sequence
gtgttgacgttacagtttt

SEQ ID NO: 117449 - DNA, 19 bp, Artificial sequence
  SiRNA target sequence
tgttgacgttacagtttta

SEQ ID NO: 117450 - DNA, 19 bp, Artificial sequence
  SiRNA target sequence
gttgacgttacagttttag

SEQ ID NO: 117451 - DNA, 19 bp, Artificial sequence
  SiRNA target sequence
ttgacgttacagttttagg

SEQ ID NO: 117452 - DNA, 19 bp, Artificial sequence
  SiRNA target sequence
tgacgttacagttttagga

SEQ ID NO: 117453 - DNA, 19 bp, Artificial sequence
  SiRNA target sequence
gacgttacagttttaggaa

SEQ ID NO: 117454 - DNA, 19 bp, Artificial sequence
  SiRNA target sequence
acgttacagttttaggaat

SEQ ID NO: 117455 - DNA, 19 bp, Artificial sequence
  SiRNA target sequence
cgttacagttttaggaata

SEQ ID NO: 117456 - DNA, 19 bp, Artificial sequence
  SiRNA target sequence
gttacagttttaggaatat

SEQ ID NO: 117457 - DNA, 19 bp, Artificial sequence
  SiRNA target sequence
ttacagttttaggaatatc

SEQ ID NO: 117458 - DNA, 19 bp, Artificial sequence
  SiRNA target sequence
tacagttttaggaatatca

SEQ ID NO: 117459 - DNA, 19 bp, Artificial sequence
  SiRNA target sequence
acagttttaggaatatcaa

SEQ ID NO: 117460 - DNA, 19 bp, Artificial sequence
  SiRNA target sequence
cagttttaggaatatcaat

SEQ ID NO: 117461 - DNA, 19 bp, Artificial sequence
  SiRNA target sequence
agttttaggaatatcaata

SEQ ID NO: 117462 - DNA, 19 bp, Artificial sequence
  SiRNA target sequence
gttttaggaatatcaataa

SEQ ID NO: 117463 - DNA, 19 bp, Artificial sequence
  SiRNA target sequence
ttttaggaatatcaataag

SEQ ID NO: 117464 - DNA, 19 bp, Artificial sequence
  SiRNA target sequence
tttaggaatatcaataagt

SEQ ID NO: 117465 - DNA, 19 bp, Artificial sequence
  SiRNA target sequence
ttaggaatatcaataagtc

SEQ ID NO: 117466 - DNA, 19 bp, Artificial sequence
  SiRNA target sequence
taggaatatcaataagtct

SEQ ID NO: 117467 - DNA, 19 bp, Artificial sequence
  SiRNA target sequence
aggaatatcaataagtctt

SEQ ID NO: 117468 - DNA, 19 bp, Artificial sequence
  SiRNA target sequence
ggaatatcaataagtctta

SEQ ID NO: 117469 - DNA, 19 bp, Artificial sequence
  SiRNA target sequence
gaatatcaataagtcttaa

SEQ ID NO: 117470 - DNA, 19 bp, Artificial sequence
  SiRNA target sequence
aatatcaataagtcttaaa

SEQ ID NO: 117471 - DNA, 19 bp, Artificial sequence
  SiRNA target sequence
atatcaataagtcttaaag

SEQ ID NO: 117472 - DNA, 19 bp, Artificial sequence
  SiRNA target sequence
tatcaataagtcttaaaga

SEQ ID NO: 117473 - DNA, 19 bp, Artificial sequence
  SiRNA target sequence
atcaataagtcttaaagaa

SEQ ID NO: 117474 - DNA, 19 bp, Artificial sequence
  SiRNA target sequence
tcaataagtcttaaagaaa

SEQ ID NO: 117475 - DNA, 19 bp, Artificial sequence
  SiRNA target sequence
caataagtcttaaagaaat

SEQ ID NO: 117476 - DNA, 19 bp, Artificial sequence
  SiRNA target sequence
aataagtcttaaagaaatt

SEQ ID NO: 117477 - DNA, 19 bp, Artificial sequence
  SiRNA target sequence
ataagtcttaaagaaattt

SEQ ID NO: 117478 - DNA, 19 bp, Artificial sequence
  SiRNA target sequence
taagtcttaaagaaatttt

SEQ ID NO: 117479 - DNA, 19 bp, Artificial sequence
  SiRNA target sequence
aagtcttaaagaaattttt

SEQ ID NO: 117480 - DNA, 19 bp, Artificial sequence
  SiRNA target sequence
agtcttaaagaaattttta

SEQ ID NO: 117481 - DNA, 19 bp, Artificial sequence
  SiRNA target sequence
gtcttaaagaaatttttaa

SEQ ID NO: 117482 - DNA, 19 bp, Artificial sequence
  SiRNA target sequence
tcttaaagaaatttttaaa

SEQ ID NO: 117483 - DNA, 19 bp, Artificial sequence
  SiRNA target sequence
cttaaagaaatttttaaag

SEQ ID NO: 117484 - DNA, 19 bp, Artificial sequence
  SiRNA target sequence
ttaaagaaatttttaaagc

SEQ ID NO: 117485 - DNA, 19 bp, Artificial sequence
  SiRNA target sequence
taaagaaatttttaaagca

SEQ ID NO: 117486 - DNA, 19 bp, Artificial sequence
  SiRNA target sequence
aaagaaatttttaaagcag

SEQ ID NO: 117487 - DNA, 19 bp, Artificial sequence
  SiRNA target sequence
aagaaatttttaaagcaga

SEQ ID NO: 117488 - DNA, 19 bp, Artificial sequence
  SiRNA target sequence
agaaatttttaaagcagac

SEQ ID NO: 117489 - DNA, 19 bp, Artificial sequence
  SiRNA target sequence
gaaatttttaaagcagaca

SEQ ID NO: 117490 - DNA, 19 bp, Artificial sequence
  SiRNA target sequence
aaatttttaaagcagacag

SEQ ID NO: 117491 - DNA, 19 bp, Artificial sequence
  SiRNA target sequence
aatttttaaagcagacagt

SEQ ID NO: 117492 - DNA, 19 bp, Artificial sequence
  SiRNA target sequence
atttttaaagcagacagtt

SEQ ID NO: 117493 - DNA, 19 bp, Artificial sequence
  SiRNA target sequence
tttttaaagcagacagttt

SEQ ID NO: 117494 - DNA, 19 bp, Artificial sequence
  SiRNA target sequence
ttttaaagcagacagtttg

SEQ ID NO: 117495 - DNA, 19 bp, Artificial sequence
  SiRNA target sequence
tttaaagcagacagtttgt

SEQ ID NO: 117496 - DNA, 19 bp, Artificial sequence
  SiRNA target sequence
ttaaagcagacagtttgtt

SEQ ID NO: 117497 - DNA, 19 bp, Artificial sequence
  SiRNA target sequence
taaagcagacagtttgtta

SEQ ID NO: 117498 - DNA, 19 bp, Artificial sequence
  SiRNA target sequence
aaagcagacagtttgttag

SEQ ID NO: 117499 - DNA, 19 bp, Artificial sequence
  SiRNA target sequence
aagcagacagtttgttaga

SEQ ID NO: 117500 - DNA, 19 bp, Artificial sequence
  SiRNA target sequence
agcagacagtttgttagag

SEQ ID NO: 117501 - DNA, 19 bp, Artificial sequence
  SiRNA target sequence
gcagacagtttgttagaga

SEQ ID NO: 117502 - DNA, 19 bp, Artificial sequence
  SiRNA target sequence
cagacagtttgttagagaa

SEQ ID NO: 117503 - DNA, 19 bp, Artificial sequence
  SiRNA target sequence
agacagtttgttagagaaa

SEQ ID NO: 117504 - DNA, 19 bp, Artificial sequence
  SiRNA target sequence
gacagtttgttagagaaaa

SEQ ID NO: 117505 - DNA, 19 bp, Artificial sequence
  SiRNA target sequence
acagtttgttagagaaaaa

SEQ ID NO: 117506 - DNA, 19 bp, Artificial sequence
  SiRNA target sequence
cagtttgttagagaaaaaa

SEQ ID NO: 117507 - DNA, 19 bp, Artificial sequence
  SiRNA target sequence
agtttgttagagaaaaaaa

SEQ ID NO: 117508 - DNA, 19 bp, Artificial sequence
  SiRNA target sequence
gtttgttagagaaaaaaaa

SEQ ID NO: 117509 - DNA, 19 bp, Artificial sequence
  SiRNA target sequence
tttgttagagaaaaaaaat

SEQ ID NO: 117510 - DNA, 19 bp, Artificial sequence
  SiRNA target sequence
ttgttagagaaaaaaaata

SEQ ID NO: 117511 - DNA, 19 bp, Artificial sequence
  SiRNA target sequence
tgttagagaaaaaaaatat

SEQ ID NO: 117512 - DNA, 19 bp, Artificial sequence
  SiRNA target sequence
gttagagaaaaaaaatatc

SEQ ID NO: 117513 - DNA, 19 bp, Artificial sequence
  SiRNA target sequence
ttagagaaaaaaaatatcg

SEQ ID NO: 117514 - DNA, 19 bp, Artificial sequence
  SiRNA target sequence
tagagaaaaaaaatatcga

SEQ ID NO: 117515 - DNA, 19 bp, Artificial sequence
  SiRNA target sequence
agagaaaaaaaatatcgac

SEQ ID NO: 117516 - DNA, 19 bp, Artificial sequence
  SiRNA target sequence
gagaaaaaaaatatcgaca

SEQ ID NO: 117517 - DNA, 19 bp, Artificial sequence
  SiRNA target sequence
agaaaaaaaatatcgacat

SEQ ID NO: 117518 - DNA, 19 bp, Artificial sequence
  SiRNA target sequence
gaaaaaaaatatcgacatt

SEQ ID NO: 117519 - DNA, 19 bp, Artificial sequence
  SiRNA target sequence
aaaaaaaatatcgacattg

SEQ ID NO: 117520 - DNA, 19 bp, Artificial sequence
  SiRNA target sequence
aaaaaaatatcgacattga

SEQ ID NO: 117521 - DNA, 19 bp, Artificial sequence
  SiRNA target sequence
aaaaaatatcgacattgag

SEQ ID NO: 117522 - DNA, 19 bp, Artificial sequence
  SiRNA target sequence
aaaaatatcgacattgaga

SEQ ID NO: 117523 - DNA, 19 bp, Artificial sequence
  SiRNA target sequence
aaaatatcgacattgagat

SEQ ID NO: 117524 - DNA, 19 bp, Artificial sequence
  SiRNA target sequence
aaatatcgacattgagata

SEQ ID NO: 117525 - DNA, 19 bp, Artificial sequence
  SiRNA target sequence
aatatcgacattgagataa

SEQ ID NO: 117526 - DNA, 19 bp, Artificial sequence
  SiRNA target sequence
atatcgacattgagataat

SEQ ID NO: 117527 - DNA, 19 bp, Artificial sequence
  SiRNA target sequence
tatcgacattgagataatt

SEQ ID NO: 117528 - DNA, 19 bp, Artificial sequence
  SiRNA target sequence
atcgacattgagataatta

SEQ ID NO: 117529 - DNA, 19 bp, Artificial sequence
  SiRNA target sequence
tcgacattgagataattaa

SEQ ID NO: 117530 - DNA, 19 bp, Artificial sequence
  SiRNA target sequence
cgacattgagataattaat

SEQ ID NO: 117531 - DNA, 19 bp, Artificial sequence
  SiRNA target sequence
gacattgagataattaatc

SEQ ID NO: 117532 - DNA, 19 bp, Artificial sequence
  SiRNA target sequence
acattgagataattaatct

SEQ ID NO: 117533 - DNA, 19 bp, Artificial sequence
  SiRNA target sequence
cattgagataattaatctt

SEQ ID NO: 117534 - DNA, 19 bp, Artificial sequence
  SiRNA target sequence
attgagataattaatcttg

SEQ ID NO: 117535 - DNA, 19 bp, Artificial sequence
  SiRNA target sequence
ttgagataattaatcttgt

SEQ ID NO: 117536 - DNA, 19 bp, Artificial sequence
  SiRNA target sequence
tgagataattaatcttgtg

SEQ ID NO: 117537 - DNA, 19 bp, Artificial sequence
  SiRNA target sequence
gagataattaatcttgtgt

SEQ ID NO: 117538 - DNA, 19 bp, Artificial sequence
  SiRNA target sequence
agataattaatcttgtgtc

SEQ ID NO: 117539 - DNA, 19 bp, Artificial sequence
  SiRNA target sequence
gataattaatcttgtgtca

SEQ ID NO: 117540 - DNA, 19 bp, Artificial sequence
  SiRNA target sequence
ataattaatcttgtgtcaa

SEQ ID NO: 117541 - DNA, 19 bp, Artificial sequence
  SiRNA target sequence
taattaatcttgtgtcaat

SEQ ID NO: 117542 - DNA, 19 bp, Artificial sequence
  SiRNA target sequence
aattaatcttgtgtcaata

SEQ ID NO: 117543 - DNA, 19 bp, Artificial sequence
  SiRNA target sequence
attaatcttgtgtcaataa

SEQ ID NO: 117544 - DNA, 19 bp, Artificial sequence
  SiRNA target sequence
ttaatcttgtgtcaataaa

SEQ ID NO: 117545 - DNA, 19 bp, Artificial sequence
  SiRNA target sequence
taatcttgtgtcaataaaa

SEQ ID NO: 117546 - DNA, 19 bp, Artificial sequence
  SiRNA target sequence
aatcttgtgtcaataaaac

SEQ ID NO: 117547 - DNA, 19 bp, Artificial sequence
  SiRNA target sequence
atcttgtgtcaataaaacc

SEQ ID NO: 117548 - DNA, 19 bp, Artificial sequence
  SiRNA target sequence
tcttgtgtcaataaaacca

SEQ ID NO: 117549 - DNA, 19 bp, Artificial sequence
  SiRNA target sequence
cttgtgtcaataaaaccaa

SEQ ID NO: 117550 - DNA, 19 bp, Artificial sequence
  SiRNA target sequence
ttgtgtcaataaaaccaat

SEQ ID NO: 117551 - DNA, 19 bp, Artificial sequence
  SiRNA target sequence
tgtgtcaataaaaccaatt

SEQ ID NO: 117552 - DNA, 19 bp, Artificial sequence
  SiRNA target sequence
gtgtcaataaaaccaattg

SEQ ID NO: 117553 - DNA, 19 bp, Artificial sequence
  SiRNA target sequence
tgtcaataaaaccaattga

SEQ ID NO: 117554 - DNA, 19 bp, Artificial sequence
  SiRNA target sequence
gtcaataaaaccaattgat

SEQ ID NO: 117555 - DNA, 19 bp, Artificial sequence
  SiRNA target sequence
tcaataaaaccaattgatt

SEQ ID NO: 117556 - DNA, 19 bp, Artificial sequence
  SiRNA target sequence
caataaaaccaattgatta

SEQ ID NO: 117557 - DNA, 19 bp, Artificial sequence
  SiRNA target sequence
aataaaaccaattgattat

SEQ ID NO: 117558 - DNA, 19 bp, Artificial sequence
  SiRNA target sequence
ataaaaccaattgattatg

SEQ ID NO: 117559 - DNA, 19 bp, Artificial sequence
  SiRNA target sequence
taaaaccaattgattatgt

SEQ ID NO: 117560 - DNA, 19 bp, Artificial sequence
  SiRNA target sequence
aaaaccaattgattatgtt

SEQ ID NO: 117561 - DNA, 19 bp, Artificial sequence
  SiRNA target sequence
aaaccaattgattatgtta

SEQ ID NO: 117562 - DNA, 19 bp, Artificial sequence
  SiRNA target sequence
aaccaattgattatgttac

SEQ ID NO: 117563 - DNA, 19 bp, Artificial sequence
  SiRNA target sequence
accaattgattatgttact

SEQ ID NO: 117564 - DNA, 19 bp, Artificial sequence
  SiRNA target sequence
ccaattgattatgttacta

SEQ ID NO: 117565 - DNA, 19 bp, Artificial sequence
  SiRNA target sequence
caattgattatgttactat

SEQ ID NO: 117566 - DNA, 19 bp, Artificial sequence
  SiRNA target sequence
aattgattatgttactatt

SEQ ID NO: 117567 - DNA, 19 bp, Artificial sequence
  SiRNA target sequence
attgattatgttactattg

SEQ ID NO: 117568 - DNA, 19 bp, Artificial sequence
  SiRNA target sequence
ttgattatgttactattga

SEQ ID NO: 117569 - DNA, 19 bp, Artificial sequence
  SiRNA target sequence
tgattatgttactattgaa

SEQ ID NO: 117570 - DNA, 19 bp, Artificial sequence
  SiRNA target sequence
gattatgttactattgaaa

SEQ ID NO: 117571 - DNA, 19 bp, Artificial sequence
  SiRNA target sequence
attatgttactattgaaat

SEQ ID NO: 117572 - DNA, 19 bp, Artificial sequence
  SiRNA target sequence
ttatgttactattgaaata

SEQ ID NO: 117573 - DNA, 19 bp, Artificial sequence
  SiRNA target sequence
tatgttactattgaaatat

SEQ ID NO: 117574 - DNA, 19 bp, Artificial sequence
  SiRNA target sequence
atgttactattgaaatatc

SEQ ID NO: 117575 - DNA, 19 bp, Artificial sequence
  SiRNA target sequence
tgttactattgaaatatca

SEQ ID NO: 117576 - DNA, 19 bp, Artificial sequence
  SiRNA target sequence
gttactattgaaatatcag

SEQ ID NO: 117577 - DNA, 19 bp, Artificial sequence
  SiRNA target sequence
ttactattgaaatatcagt

SEQ ID NO: 117578 - DNA, 19 bp, Artificial sequence
  SiRNA target sequence
tactattgaaatatcagtc

SEQ ID NO: 117579 - DNA, 19 bp, Artificial sequence
  SiRNA target sequence
actattgaaatatcagtca

SEQ ID NO: 117580 - DNA, 19 bp, Artificial sequence
  SiRNA target sequence
ctattgaaatatcagtcaa

SEQ ID NO: 117581 - DNA, 19 bp, Artificial sequence
  SiRNA target sequence
tattgaaatatcagtcaaa

SEQ ID NO: 117582 - DNA, 19 bp, Artificial sequence
  SiRNA target sequence
attgaaatatcagtcaaaa

SEQ ID NO: 117583 - DNA, 19 bp, Artificial sequence
  SiRNA target sequence
ttgaaatatcagtcaaaaa

SEQ ID NO: 117584 - DNA, 19 bp, Artificial sequence
  SiRNA target sequence
tgaaatatcagtcaaaaaa

SEQ ID NO: 117585 - DNA, 19 bp, Artificial sequence
  SiRNA target sequence
gaaatatcagtcaaaaaaa

SEQ ID NO: 117586 - DNA, 19 bp, Artificial sequence
  SiRNA target sequence
aaatatcagtcaaaaaaac

SEQ ID NO: 117587 - DNA, 19 bp, Artificial sequence
  SiRNA target sequence
aatatcagtcaaaaaaaca

SEQ ID NO: 117588 - DNA, 19 bp, Artificial sequence
  SiRNA target sequence
atatcagtcaaaaaaacac

SEQ ID NO: 117589 - DNA, 19 bp, Artificial sequence
  SiRNA target sequence
tatcagtcaaaaaaacaca

SEQ ID NO: 117590 - DNA, 19 bp, Artificial sequence
  SiRNA target sequence
atcagtcaaaaaaacacaa

SEQ ID NO: 117591 - DNA, 19 bp, Artificial sequence
  SiRNA target sequence
tcagtcaaaaaaacacaaa

SEQ ID NO: 117592 - DNA, 19 bp, Artificial sequence
  SiRNA target sequence
cagtcaaaaaaacacaaaa

SEQ ID NO: 117593 - DNA, 19 bp, Artificial sequence
  SiRNA target sequence
agtcaaaaaaacacaaaag

SEQ ID NO: 117594 - DNA, 19 bp, Artificial sequence
  SiRNA target sequence
gtcaaaaaaacacaaaagt

SEQ ID NO: 117595 - DNA, 19 bp, Artificial sequence
  SiRNA target sequence
tcaaaaaaacacaaaagtt

SEQ ID NO: 117596 - DNA, 19 bp, Artificial sequence
  SiRNA target sequence
caaaaaaacacaaaagtta

SEQ ID NO: 117597 - DNA, 19 bp, Artificial sequence
  SiRNA target sequence
aaaaaaacacaaaagttag

SEQ ID NO: 117598 - DNA, 19 bp, Artificial sequence
  SiRNA target sequence
aaaaaacacaaaagttagt

SEQ ID NO: 117599 - DNA, 19 bp, Artificial sequence
  SiRNA target sequence
aaaaacacaaaagttagtg

SEQ ID NO: 117600 - DNA, 19 bp, Artificial sequence
  SiRNA target sequence
aaaacacaaaagttagtga

SEQ ID NO: 117601 - DNA, 19 bp, Artificial sequence
  SiRNA target sequence
aaacacaaaagttagtgat

SEQ ID NO: 117602 - DNA, 19 bp, Artificial sequence
  SiRNA target sequence
aacacaaaagttagtgata

SEQ ID NO: 117603 - DNA, 19 bp, Artificial sequence
  SiRNA target sequence
acacaaaagttagtgatag

SEQ ID NO: 117604 - DNA, 19 bp, Artificial sequence
  SiRNA target sequence
cacaaaagttagtgatagt

SEQ ID NO: 117605 - DNA, 19 bp, Artificial sequence
  SiRNA target sequence
acaaaagttagtgatagtt

SEQ ID NO: 117606 - DNA, 19 bp, Artificial sequence
  SiRNA target sequence
caaaagttagtgatagttg

SEQ ID NO: 117607 - DNA, 19 bp, Artificial sequence
  SiRNA target sequence
aaaagttagtgatagttga

SEQ ID NO: 117608 - DNA, 19 bp, Artificial sequence
  SiRNA target sequence
aaagttagtgatagttgat

SEQ ID NO: 117609 - DNA, 19 bp, Artificial sequence
  SiRNA target sequence
aagttagtgatagttgatt

SEQ ID NO: 117610 - DNA, 19 bp, Artificial sequence
  SiRNA target sequence
agttagtgatagttgattt

SEQ ID NO: 117611 - DNA, 19 bp, Artificial sequence
  SiRNA target sequence
gttagtgatagttgatttt

SEQ ID NO: 117612 - DNA, 19 bp, Artificial sequence
  SiRNA target sequence
ttagtgatagttgattttg

SEQ ID NO: 117613 - DNA, 19 bp, Artificial sequence
  SiRNA target sequence
tagtgatagttgattttgc

SEQ ID NO: 117614 - DNA, 19 bp, Artificial sequence
  SiRNA target sequence
agtgatagttgattttgca

SEQ ID NO: 117615 - DNA, 19 bp, Artificial sequence
  SiRNA target sequence
gtgatagttgattttgcat

SEQ ID NO: 117616 - DNA, 19 bp, Artificial sequence
  SiRNA target sequence
tgatagttgattttgcata

SEQ ID NO: 117617 - DNA, 19 bp, Artificial sequence
  SiRNA target sequence
gatagttgattttgcatat

SEQ ID NO: 117618 - DNA, 19 bp, Artificial sequence
  SiRNA target sequence
atagttgattttgcatatc

SEQ ID NO: 117619 - DNA, 19 bp, Artificial sequence
  SiRNA target sequence
tagttgattttgcatatcc

SEQ ID NO: 117620 - DNA, 19 bp, Artificial sequence
  SiRNA target sequence
agttgattttgcatatcct

SEQ ID NO: 117621 - DNA, 19 bp, Artificial sequence
  SiRNA target sequence
gttgattttgcatatccta

SEQ ID NO: 117622 - DNA, 19 bp, Artificial sequence
  SiRNA target sequence
ttgattttgcatatcctac

SEQ ID NO: 117623 - DNA, 19 bp, Artificial sequence
  SiRNA target sequence
tgattttgcatatcctact

SEQ ID NO: 117624 - DNA, 19 bp, Artificial sequence
  SiRNA target sequence
gattttgcatatcctactt

SEQ ID NO: 117625 - DNA, 19 bp, Artificial sequence
  SiRNA target sequence
attttgcatatcctacttt

SEQ ID NO: 117626 - DNA, 19 bp, Artificial sequence
  SiRNA target sequence
ttttgcatatcctactttc

SEQ ID NO: 117627 - DNA, 19 bp, Artificial sequence
  SiRNA target sequence
tttgcatatcctactttca

SEQ ID NO: 117628 - DNA, 19 bp, Artificial sequence
  SiRNA target sequence
ttgcatatcctactttcaa

SEQ ID NO: 117629 - DNA, 19 bp, Artificial sequence
  SiRNA target sequence
tgcatatcctactttcaat

SEQ ID NO: 117630 - DNA, 19 bp, Artificial sequence
  SiRNA target sequence
gcatatcctactttcaata

SEQ ID NO: 117631 - DNA, 19 bp, Artificial sequence
  SiRNA target sequence
catatcctactttcaatat

SEQ ID NO: 117632 - DNA, 19 bp, Artificial sequence
  SiRNA target sequence
atatcctactttcaatatt

SEQ ID NO: 117633 - DNA, 19 bp, Artificial sequence
  SiRNA target sequence
tatcctactttcaatattg

SEQ ID NO: 117634 - DNA, 19 bp, Artificial sequence
  SiRNA target sequence
atcctactttcaatattgc

SEQ ID NO: 117635 - DNA, 19 bp, Artificial sequence
  SiRNA target sequence
tcctactttcaatattgcg

SEQ ID NO: 117636 - DNA, 19 bp, Artificial sequence
  SiRNA target sequence
cctactttcaatattgcga

SEQ ID NO: 117637 - DNA, 19 bp, Artificial sequence
  SiRNA target sequence
ctactttcaatattgcgag

SEQ ID NO: 117638 - DNA, 19 bp, Artificial sequence
  SiRNA target sequence
tactttcaatattgcgagt

SEQ ID NO: 117639 - DNA, 19 bp, Artificial sequence
  SiRNA target sequence
actttcaatattgcgagtg

SEQ ID NO: 117640 - DNA, 19 bp, Artificial sequence
  SiRNA target sequence
ctttcaatattgcgagtga

SEQ ID NO: 117641 - DNA, 19 bp, Artificial sequence
  SiRNA target sequence
tttcaatattgcgagtgaa

SEQ ID NO: 117642 - DNA, 19 bp, Artificial sequence
  SiRNA target sequence
ttcaatattgcgagtgaaa

SEQ ID NO: 117643 - DNA, 19 bp, Artificial sequence
  SiRNA target sequence
tcaatattgcgagtgaaat

SEQ ID NO: 117644 - DNA, 19 bp, Artificial sequence
  SiRNA target sequence
caatattgcgagtgaaata

SEQ ID NO: 117645 - DNA, 19 bp, Artificial sequence
  SiRNA target sequence
aatattgcgagtgaaatag

SEQ ID NO: 117646 - DNA, 19 bp, Artificial sequence
  SiRNA target sequence
atattgcgagtgaaatagc

SEQ ID NO: 117647 - DNA, 19 bp, Artificial sequence
  SiRNA target sequence
tattgcgagtgaaatagct

SEQ ID NO: 117648 - DNA, 19 bp, Artificial sequence
  SiRNA target sequence
attgcgagtgaaatagctg

SEQ ID NO: 117649 - DNA, 19 bp, Artificial sequence
  SiRNA target sequence
ttgcgagtgaaatagctgc

SEQ ID NO: 117650 - DNA, 19 bp, Artificial sequence
  SiRNA target sequence
tgcgagtgaaatagctgcg

SEQ ID NO: 117651 - DNA, 19 bp, Artificial sequence
  SiRNA target sequence
gcgagtgaaatagctgcgc

SEQ ID NO: 117652 - DNA, 19 bp, Artificial sequence
  SiRNA target sequence
cgagtgaaatagctgcgca

SEQ ID NO: 117653 - DNA, 19 bp, Artificial sequence
  SiRNA target sequence
gagtgaaatagctgcgcac

SEQ ID NO: 117654 - DNA, 19 bp, Artificial sequence
  SiRNA target sequence
agtgaaatagctgcgcact

SEQ ID NO: 117655 - DNA, 19 bp, Artificial sequence
  SiRNA target sequence
gtgaaatagctgcgcactt

SEQ ID NO: 117656 - DNA, 19 bp, Artificial sequence
  SiRNA target sequence
tgaaatagctgcgcacttt

SEQ ID NO: 117657 - DNA, 19 bp, Artificial sequence
  SiRNA target sequence
gaaatagctgcgcactttt

SEQ ID NO: 117658 - DNA, 19 bp, Artificial sequence
  SiRNA target sequence
aaatagctgcgcactttta

SEQ ID NO: 117659 - DNA, 19 bp, Artificial sequence
  SiRNA target sequence
aatagctgcgcacttttac

SEQ ID NO: 117660 - DNA, 19 bp, Artificial sequence
  SiRNA target sequence
atagctgcgcacttttacg

SEQ ID NO: 117661 - DNA, 19 bp, Artificial sequence
  SiRNA target sequence
tagctgcgcacttttacga

SEQ ID NO: 117662 - DNA, 19 bp, Artificial sequence
  SiRNA target sequence
agctgcgcacttttacgaa

SEQ ID NO: 117663 - DNA, 19 bp, Artificial sequence
  SiRNA target sequence
gctgcgcacttttacgaaa

SEQ ID NO: 117664 - DNA, 19 bp, Artificial sequence
  SiRNA target sequence
ctgcgcacttttacgaaaa

SEQ ID NO: 117665 - DNA, 19 bp, Artificial sequence
  SiRNA target sequence
tgcgcacttttacgaaaaa

SEQ ID NO: 117666 - DNA, 19 bp, Artificial sequence
  SiRNA target sequence
gcgcacttttacgaaaaat

SEQ ID NO: 117667 - DNA, 19 bp, Artificial sequence
  SiRNA target sequence
cgcacttttacgaaaaatt

SEQ ID NO: 117668 - DNA, 19 bp, Artificial sequence
  SiRNA target sequence
gcacttttacgaaaaattt

SEQ ID NO: 117669 - DNA, 19 bp, Artificial sequence
  SiRNA target sequence
cacttttacgaaaaattta

SEQ ID NO: 117670 - DNA, 19 bp, Artificial sequence
  SiRNA target sequence
acttttacgaaaaatttaa

SEQ ID NO: 117671 - DNA, 19 bp, Artificial sequence
  SiRNA target sequence
cttttacgaaaaatttaaa

SEQ ID NO: 117672 - DNA, 19 bp, Artificial sequence
  SiRNA target sequence
ttttacgaaaaatttaaag

SEQ ID NO: 117673 - DNA, 19 bp, Artificial sequence
  SiRNA target sequence
tttacgaaaaatttaaaga

SEQ ID NO: 117674 - DNA, 19 bp, Artificial sequence
  SiRNA target sequence
ttacgaaaaatttaaagat

SEQ ID NO: 117675 - DNA, 19 bp, Artificial sequence
  SiRNA target sequence
tacgaaaaatttaaagata

SEQ ID NO: 117676 - DNA, 19 bp, Artificial sequence
  SiRNA target sequence
acgaaaaatttaaagatat

SEQ ID NO: 117677 - DNA, 19 bp, Artificial sequence
  SiRNA target sequence
cgaaaaatttaaagatata

SEQ ID NO: 117678 - DNA, 19 bp, Artificial sequence
  SiRNA target sequence
gaaaaatttaaagatataa

SEQ ID NO: 117679 - DNA, 19 bp, Artificial sequence
  SiRNA target sequence
aaaaatttaaagatataaa

SEQ ID NO: 117680 - DNA, 19 bp, Artificial sequence
  SiRNA target sequence
aaaatttaaagatataaaa

SEQ ID NO: 117681 - DNA, 19 bp, Artificial sequence
  SiRNA target sequence
aaatttaaagatataaaaa

SEQ ID NO: 117682 - DNA, 19 bp, Artificial sequence
  SiRNA target sequence
aatttaaagatataaaaat

SEQ ID NO: 117683 - DNA, 19 bp, Artificial sequence
  SiRNA target sequence
atttaaagatataaaaatt

SEQ ID NO: 117684 - DNA, 19 bp, Artificial sequence
  SiRNA target sequence
tttaaagatataaaaatta

SEQ ID NO: 117685 - DNA, 19 bp, Artificial sequence
  SiRNA target sequence
ttaaagatataaaaattat

SEQ ID NO: 117686 - DNA, 19 bp, Artificial sequence
  SiRNA target sequence
taaagatataaaaattatg

SEQ ID NO: 117687 - DNA, 19 bp, Artificial sequence
  SiRNA target sequence
aaagatataaaaattatgc

SEQ ID NO: 117688 - DNA, 19 bp, Artificial sequence
  SiRNA target sequence
aagatataaaaattatgcg

SEQ ID NO: 117689 - DNA, 19 bp, Artificial sequence
  SiRNA target sequence
agatataaaaattatgcgt

SEQ ID NO: 117690 - DNA, 19 bp, Artificial sequence
  SiRNA target sequence
gatataaaaattatgcgtg

SEQ ID NO: 117691 - DNA, 19 bp, Artificial sequence
  SiRNA target sequence
atataaaaattatgcgtgt

SEQ ID NO: 117692 - DNA, 19 bp, Artificial sequence
  SiRNA target sequence
tataaaaattatgcgtgtt

SEQ ID NO: 117693 - DNA, 19 bp, Artificial sequence
  SiRNA target sequence
ataaaaattatgcgtgttc

SEQ ID NO: 117694 - DNA, 19 bp, Artificial sequence
  SiRNA target sequence
taaaaattatgcgtgttct

SEQ ID NO: 117695 - DNA, 19 bp, Artificial sequence
  SiRNA target sequence
aaaaattatgcgtgttctt

SEQ ID NO: 117696 - DNA, 19 bp, Artificial sequence
  SiRNA target sequence
aaaattatgcgtgttcttg

SEQ ID NO: 117697 - DNA, 19 bp, Artificial sequence
  SiRNA target sequence
aaattatgcgtgttcttgc

SEQ ID NO: 117698 - DNA, 19 bp, Artificial sequence
  SiRNA target sequence
aattatgcgtgttcttgcg

SEQ ID NO: 117699 - DNA, 19 bp, Artificial sequence
  SiRNA target sequence
attatgcgtgttcttgcgc

SEQ ID NO: 117700 - DNA, 19 bp, Artificial sequence
  SiRNA target sequence
ttatgcgtgttcttgcgca

SEQ ID NO: 117701 - DNA, 19 bp, Artificial sequence
  SiRNA target sequence
tatgcgtgttcttgcgcaa

SEQ ID NO: 117702 - DNA, 19 bp, Artificial sequence
  SiRNA target sequence
atgcgtgttcttgcgcaag

SEQ ID NO: 117703 - DNA, 19 bp, Artificial sequence
  SiRNA target sequence
tgcgtgttcttgcgcaaga

SEQ ID NO: 117704 - DNA, 19 bp, Artificial sequence
  SiRNA target sequence
gcgtgttcttgcgcaagat

SEQ ID NO: 117705 - DNA, 19 bp, Artificial sequence
  SiRNA target sequence
cgtgttcttgcgcaagata

SEQ ID NO: 117706 - DNA, 19 bp, Artificial sequence
  SiRNA target sequence
gtgttcttgcgcaagatat

SEQ ID NO: 117707 - DNA, 19 bp, Artificial sequence
  SiRNA target sequence
tgttcttgcgcaagatatt

SEQ ID NO: 117708 - DNA, 19 bp, Artificial sequence
  SiRNA target sequence
gttcttgcgcaagatattc

SEQ ID NO: 117709 - DNA, 19 bp, Artificial sequence
  SiRNA target sequence
ttcttgcgcaagatattcc

SEQ ID NO: 117710 - DNA, 19 bp, Artificial sequence
  SiRNA target sequence
tcttgcgcaagatattcct

SEQ ID NO: 117711 - DNA, 19 bp, Artificial sequence
  SiRNA target sequence
cttgcgcaagatattccta

SEQ ID NO: 117712 - DNA, 19 bp, Artificial sequence
  SiRNA target sequence
ttgcgcaagatattcctac

SEQ ID NO: 117713 - DNA, 19 bp, Artificial sequence
  SiRNA target sequence
tgcgcaagatattcctaca

SEQ ID NO: 117714 - DNA, 19 bp, Artificial sequence
  SiRNA target sequence
gcgcaagatattcctacac

SEQ ID NO: 117715 - DNA, 19 bp, Artificial sequence
  SiRNA target sequence
cgcaagatattcctacacc

SEQ ID NO: 117716 - DNA, 19 bp, Artificial sequence
  SiRNA target sequence
gcaagatattcctacaccg

SEQ ID NO: 117717 - DNA, 19 bp, Artificial sequence
  SiRNA target sequence
caagatattcctacaccgt

SEQ ID NO: 117718 - DNA, 19 bp, Artificial sequence
  SiRNA target sequence
aagatattcctacaccgta

SEQ ID NO: 117719 - DNA, 19 bp, Artificial sequence
  SiRNA target sequence
agatattcctacaccgtat

SEQ ID NO: 117720 - DNA, 19 bp, Artificial sequence
  SiRNA target sequence
gatattcctacaccgtatg

SEQ ID NO: 117721 - DNA, 19 bp, Artificial sequence
  SiRNA target sequence
atattcctacaccgtatgc

SEQ ID NO: 117722 - DNA, 19 bp, Artificial sequence
  SiRNA target sequence
tattcctacaccgtatgca

SEQ ID NO: 117723 - DNA, 19 bp, Artificial sequence
  SiRNA target sequence
attcctacaccgtatgcac

SEQ ID NO: 117724 - DNA, 19 bp, Artificial sequence
  SiRNA target sequence
ttcctacaccgtatgcact

SEQ ID NO: 117725 - DNA, 19 bp, Artificial sequence
  SiRNA target sequence
tcctacaccgtatgcactt

SEQ ID NO: 117726 - DNA, 19 bp, Artificial sequence
  SiRNA target sequence
cctacaccgtatgcactta

SEQ ID NO: 117727 - DNA, 19 bp, Artificial sequence
  SiRNA target sequence
ctacaccgtatgcacttaa

SEQ ID NO: 117728 - DNA, 19 bp, Artificial sequence
  SiRNA target sequence
tacaccgtatgcacttaat

SEQ ID NO: 117729 - DNA, 19 bp, Artificial sequence
  SiRNA target sequence
acaccgtatgcacttaatc

SEQ ID NO: 117730 - DNA, 19 bp, Artificial sequence
  SiRNA target sequence
caccgtatgcacttaatct

SEQ ID NO: 117731 - DNA, 19 bp, Artificial sequence
  SiRNA target sequence
accgtatgcacttaatctt

SEQ ID NO: 117732 - DNA, 19 bp, Artificial sequence
  SiRNA target sequence
ccgtatgcacttaatcttg

SEQ ID NO: 117733 - DNA, 19 bp, Artificial sequence
  SiRNA target sequence
cgtatgcacttaatcttga

SEQ ID NO: 117734 - DNA, 19 bp, Artificial sequence
  SiRNA target sequence
gtatgcacttaatcttgaa

SEQ ID NO: 117735 - DNA, 19 bp, Artificial sequence
  SiRNA target sequence
tatgcacttaatcttgaaa

SEQ ID NO: 117736 - DNA, 19 bp, Artificial sequence
  SiRNA target sequence
atgcacttaatcttgaaaa

SEQ ID NO: 117737 - DNA, 19 bp, Artificial sequence
  SiRNA target sequence
tgcacttaatcttgaaaaa

SEQ ID NO: 117738 - DNA, 19 bp, Artificial sequence
  SiRNA target sequence
gcacttaatcttgaaaaaa

SEQ ID NO: 117739 - DNA, 19 bp, Artificial sequence
  SiRNA target sequence
cacttaatcttgaaaaaat

SEQ ID NO: 117740 - DNA, 19 bp, Artificial sequence
  SiRNA target sequence
acttaatcttgaaaaaatg

SEQ ID NO: 117741 - DNA, 19 bp, Artificial sequence
  SiRNA target sequence
cttaatcttgaaaaaatgt

SEQ ID NO: 117742 - DNA, 19 bp, Artificial sequence
  SiRNA target sequence
ttaatcttgaaaaaatgtc

SEQ ID NO: 117743 - DNA, 19 bp, Artificial sequence
  SiRNA target sequence
taatcttgaaaaaatgtct

SEQ ID NO: 117744 - DNA, 19 bp, Artificial sequence
  SiRNA target sequence
aatcttgaaaaaatgtctt

SEQ ID NO: 117745 - DNA, 19 bp, Artificial sequence
  SiRNA target sequence
atcttgaaaaaatgtctta

SEQ ID NO: 117746 - DNA, 19 bp, Artificial sequence
  SiRNA target sequence
tcttgaaaaaatgtcttat

SEQ ID NO: 117747 - DNA, 19 bp, Artificial sequence
  SiRNA target sequence
cttgaaaaaatgtcttatc

SEQ ID NO: 117748 - DNA, 19 bp, Artificial sequence
  SiRNA target sequence
ttgaaaaaatgtcttatcc

SEQ ID NO: 117749 - DNA, 19 bp, Artificial sequence
  SiRNA target sequence
tgaaaaaatgtcttatccg

SEQ ID NO: 117750 - DNA, 19 bp, Artificial sequence
  SiRNA target sequence
gaaaaaatgtcttatccga

SEQ ID NO: 117751 - DNA, 19 bp, Artificial sequence
  SiRNA target sequence
aaaaaatgtcttatccgac

SEQ ID NO: 117752 - DNA, 19 bp, Artificial sequence
  SiRNA target sequence
aaaaatgtcttatccgaca

SEQ ID NO: 117753 - DNA, 19 bp, Artificial sequence
  SiRNA target sequence
aaaatgtcttatccgacat

SEQ ID NO: 117754 - DNA, 19 bp, Artificial sequence
  SiRNA target sequence
aaatgtcttatccgacatg

SEQ ID NO: 117755 - DNA, 19 bp, Artificial sequence
  SiRNA target sequence
aatgtcttatccgacatgc

SEQ ID NO: 117756 - DNA, 19 bp, Artificial sequence
  SiRNA target sequence
atgtcttatccgacatgca

SEQ ID NO: 117757 - DNA, 19 bp, Artificial sequence
  SiRNA target sequence
tgtcttatccgacatgcaa

SEQ ID NO: 117758 - DNA, 19 bp, Artificial sequence
  SiRNA target sequence
gtcttatccgacatgcaat

SEQ ID NO: 117759 - DNA, 19 bp, Artificial sequence
  SiRNA target sequence
tcttatccgacatgcaatg

SEQ ID NO: 117760 - DNA, 19 bp, Artificial sequence
  SiRNA target sequence
cttatccgacatgcaatga

SEQ ID NO: 117761 - DNA, 19 bp, Artificial sequence
  SiRNA target sequence
ttatccgacatgcaatgat

SEQ ID NO: 117762 - DNA, 19 bp, Artificial sequence
  SiRNA target sequence
tatccgacatgcaatgata

SEQ ID NO: 117763 - DNA, 19 bp, Artificial sequence
  SiRNA target sequence
atccgacatgcaatgatat

SEQ ID NO: 117764 - DNA, 19 bp, Artificial sequence
  SiRNA target sequence
tccgacatgcaatgatatt

SEQ ID NO: 117765 - DNA, 19 bp, Artificial sequence
  SiRNA target sequence
ccgacatgcaatgatattg

SEQ ID NO: 117766 - DNA, 19 bp, Artificial sequence
  SiRNA target sequence
cgacatgcaatgatattgt

SEQ ID NO: 117767 - DNA, 19 bp, Artificial sequence
  SiRNA target sequence
gacatgcaatgatattgta

SEQ ID NO: 117768 - DNA, 19 bp, Artificial sequence
  SiRNA target sequence
acatgcaatgatattgtaa

SEQ ID NO: 117769 - DNA, 19 bp, Artificial sequence
  SiRNA target sequence
catgcaatgatattgtaaa

SEQ ID NO: 117770 - DNA, 19 bp, Artificial sequence
  SiRNA target sequence
atgcaatgatattgtaaat

SEQ ID NO: 117771 - DNA, 19 bp, Artificial sequence
  SiRNA target sequence
tgcaatgatattgtaaatg

SEQ ID NO: 117772 - DNA, 19 bp, Artificial sequence
  SiRNA target sequence
gcaatgatattgtaaatgc

SEQ ID NO: 117773 - DNA, 19 bp, Artificial sequence
  SiRNA target sequence
caatgatattgtaaatgct

SEQ ID NO: 117774 - DNA, 19 bp, Artificial sequence
  SiRNA target sequence
aatgatattgtaaatgctg

SEQ ID NO: 117775 - DNA, 19 bp, Artificial sequence
  SiRNA target sequence
atgatattgtaaatgctgt

SEQ ID NO: 117776 - DNA, 19 bp, Artificial sequence
  SiRNA target sequence
tgatattgtaaatgctgtt

SEQ ID NO: 117777 - DNA, 19 bp, Artificial sequence
  SiRNA target sequence
gatattgtaaatgctgtta

SEQ ID NO: 117778 - DNA, 19 bp, Artificial sequence
  SiRNA target sequence
atattgtaaatgctgttac

SEQ ID NO: 117779 - DNA, 19 bp, Artificial sequence
  SiRNA target sequence
tattgtaaatgctgttaca

SEQ ID NO: 117780 - DNA, 19 bp, Artificial sequence
  SiRNA target sequence
attgtaaatgctgttacaa

SEQ ID NO: 117781 - DNA, 19 bp, Artificial sequence
  SiRNA target sequence
ttgtaaatgctgttacaaa

SEQ ID NO: 117782 - DNA, 19 bp, Artificial sequence
  SiRNA target sequence
tgtaaatgctgttacaaaa

SEQ ID NO: 117783 - DNA, 19 bp, Artificial sequence
  SiRNA target sequence
gtaaatgctgttacaaaaa

SEQ ID NO: 117784 - DNA, 19 bp, Artificial sequence
  SiRNA target sequence
taaatgctgttacaaaaat

SEQ ID NO: 117785 - DNA, 19 bp, Artificial sequence
  SiRNA target sequence
aaatgctgttacaaaaata

SEQ ID NO: 117786 - DNA, 19 bp, Artificial sequence
  SiRNA target sequence
aatgctgttacaaaaataa

SEQ ID NO: 117787 - DNA, 19 bp, Artificial sequence
  SiRNA target sequence
atgctgttacaaaaataaa

SEQ ID NO: 117788 - DNA, 19 bp, Artificial sequence
  SiRNA target sequence
tgctgttacaaaaataaat

SEQ ID NO: 117789 - DNA, 19 bp, Artificial sequence
  SiRNA target sequence
gctgttacaaaaataaatt

SEQ ID NO: 117790 - DNA, 19 bp, Artificial sequence
  SiRNA target sequence
ctgttacaaaaataaattc

SEQ ID NO: 117791 - DNA, 19 bp, Artificial sequence
  SiRNA target sequence
tgttacaaaaataaattca

SEQ ID NO: 117792 - DNA, 19 bp, Artificial sequence
  SiRNA target sequence
gttacaaaaataaattcat

SEQ ID NO: 117793 - DNA, 19 bp, Artificial sequence
  SiRNA target sequence
ttacaaaaataaattcata

SEQ ID NO: 117794 - DNA, 19 bp, Artificial sequence
  SiRNA target sequence
tacaaaaataaattcatag

SEQ ID NO: 117795 - DNA, 20 bp, Artificial sequence
  SiRNA target sequence
atgatagaaattcgcgatct

SEQ ID NO: 117796 - DNA, 20 bp, Artificial sequence
  SiRNA target sequence
tgatagaaattcgcgatctt

SEQ ID NO: 117797 - DNA, 20 bp, Artificial sequence
  SiRNA target sequence
gatagaaattcgcgatctta

SEQ ID NO: 117798 - DNA, 20 bp, Artificial sequence
  SiRNA target sequence
atagaaattcgcgatcttat

SEQ ID NO: 117799 - DNA, 20 bp, Artificial sequence
  SiRNA target sequence
tagaaattcgcgatcttata

SEQ ID NO: 117800 - DNA, 20 bp, Artificial sequence
  SiRNA target sequence
agaaattcgcgatcttataa

SEQ ID NO: 117801 - DNA, 20 bp, Artificial sequence
  SiRNA target sequence
gaaattcgcgatcttataaa

SEQ ID NO: 117802 - DNA, 20 bp, Artificial sequence
  SiRNA target sequence
aaattcgcgatcttataaat

SEQ ID NO: 117803 - DNA, 20 bp, Artificial sequence
  SiRNA target sequence
aattcgcgatcttataaatc

SEQ ID NO: 117804 - DNA, 20 bp, Artificial sequence
  SiRNA target sequence
attcgcgatcttataaatca

SEQ ID NO: 117805 - DNA, 20 bp, Artificial sequence
  SiRNA target sequence
ttcgcgatcttataaatcaa

SEQ ID NO: 117806 - DNA, 20 bp, Artificial sequence
  SiRNA target sequence
tcgcgatcttataaatcaag

SEQ ID NO: 117807 - DNA, 20 bp, Artificial sequence
  SiRNA target sequence
cgcgatcttataaatcaagc

SEQ ID NO: 117808 - DNA, 20 bp, Artificial sequence
  SiRNA target sequence
gcgatcttataaatcaagca

SEQ ID NO: 117809 - DNA, 20 bp, Artificial sequence
  SiRNA target sequence
cgatcttataaatcaagcat

SEQ ID NO: 117810 - DNA, 20 bp, Artificial sequence
  SiRNA target sequence
gatcttataaatcaagcatt

SEQ ID NO: 117811 - DNA, 20 bp, Artificial sequence
  SiRNA target sequence
atcttataaatcaagcattg

SEQ ID NO: 117812 - DNA, 20 bp, Artificial sequence
  SiRNA target sequence
tcttataaatcaagcattgg

SEQ ID NO: 117813 - DNA, 20 bp, Artificial sequence
  SiRNA target sequence
cttataaatcaagcattgga

SEQ ID NO: 117814 - DNA, 20 bp, Artificial sequence
  SiRNA target sequence
ttataaatcaagcattggat

SEQ ID NO: 117815 - DNA, 20 bp, Artificial sequence
  SiRNA target sequence
tataaatcaagcattggatg

SEQ ID NO: 117816 - DNA, 20 bp, Artificial sequence
  SiRNA target sequence
ataaatcaagcattggatga

SEQ ID NO: 117817 - DNA, 20 bp, Artificial sequence
  SiRNA target sequence
taaatcaagcattggatgag

SEQ ID NO: 117818 - DNA, 20 bp, Artificial sequence
  SiRNA target sequence
aaatcaagcattggatgagg

SEQ ID NO: 117819 - DNA, 20 bp, Artificial sequence
  SiRNA target sequence
aatcaagcattggatgagga

SEQ ID NO: 117820 - DNA, 20 bp, Artificial sequence
  SiRNA target sequence
atcaagcattggatgaggaa

SEQ ID NO: 117821 - DNA, 20 bp, Artificial sequence
  SiRNA target sequence
tcaagcattggatgaggaaa

SEQ ID NO: 117822 - DNA, 20 bp, Artificial sequence
  SiRNA target sequence
caagcattggatgaggaaat

SEQ ID NO: 117823 - DNA, 20 bp, Artificial sequence
  SiRNA target sequence
aagcattggatgaggaaatg

SEQ ID NO: 117824 - DNA, 20 bp, Artificial sequence
  SiRNA target sequence
agcattggatgaggaaatgg

SEQ ID NO: 117825 - DNA, 20 bp, Artificial sequence
  SiRNA target sequence
gcattggatgaggaaatggg

SEQ ID NO: 117826 - DNA, 20 bp, Artificial sequence
  SiRNA target sequence
cattggatgaggaaatggga

SEQ ID NO: 117827 - DNA, 20 bp, Artificial sequence
  SiRNA target sequence
attggatgaggaaatgggaa

SEQ ID NO: 117828 - DNA, 20 bp, Artificial sequence
  SiRNA target sequence
ttggatgaggaaatgggaat

SEQ ID NO: 117829 - DNA, 20 bp, Artificial sequence
  SiRNA target sequence
tggatgaggaaatgggaatg

SEQ ID NO: 117830 - DNA, 20 bp, Artificial sequence
  SiRNA target sequence
ggatgaggaaatgggaatgg

SEQ ID NO: 117831 - DNA, 20 bp, Artificial sequence
  SiRNA target sequence
gatgaggaaatgggaatgga

SEQ ID NO: 117832 - DNA, 20 bp, Artificial sequence
  SiRNA target sequence
atgaggaaatgggaatggat

SEQ ID NO: 117833 - DNA, 20 bp, Artificial sequence
  SiRNA target sequence
tgaggaaatgggaatggatc

SEQ ID NO: 117834 - DNA, 20 bp, Artificial sequence
  SiRNA target sequence
gaggaaatgggaatggatca

SEQ ID NO: 117835 - DNA, 20 bp, Artificial sequence
  SiRNA target sequence
aggaaatgggaatggatcat

SEQ ID NO: 117836 - DNA, 20 bp, Artificial sequence
  SiRNA target sequence
ggaaatgggaatggatcata

SEQ ID NO: 117837 - DNA, 20 bp, Artificial sequence
  SiRNA target sequence
gaaatgggaatggatcataa

SEQ ID NO: 117838 - DNA, 20 bp, Artificial sequence
  SiRNA target sequence
aaatgggaatggatcataat

SEQ ID NO: 117839 - DNA, 20 bp, Artificial sequence
  SiRNA target sequence
aatgggaatggatcataatg

SEQ ID NO: 117840 - DNA, 20 bp, Artificial sequence
  SiRNA target sequence
atgggaatggatcataatgt

SEQ ID NO: 117841 - DNA, 20 bp, Artificial sequence
  SiRNA target sequence
tgggaatggatcataatgta

SEQ ID NO: 117842 - DNA, 20 bp, Artificial sequence
  SiRNA target sequence
gggaatggatcataatgtat

SEQ ID NO: 117843 - DNA, 20 bp, Artificial sequence
  SiRNA target sequence
ggaatggatcataatgtata

SEQ ID NO: 117844 - DNA, 20 bp, Artificial sequence
  SiRNA target sequence
gaatggatcataatgtatat

SEQ ID NO: 117845 - DNA, 20 bp, Artificial sequence
  SiRNA target sequence
aatggatcataatgtatata

SEQ ID NO: 117846 - DNA, 20 bp, Artificial sequence
  SiRNA target sequence
atggatcataatgtatatat

SEQ ID NO: 117847 - DNA, 20 bp, Artificial sequence
  SiRNA target sequence
tggatcataatgtatatata

SEQ ID NO: 117848 - DNA, 20 bp, Artificial sequence
  SiRNA target sequence
ggatcataatgtatatataa

SEQ ID NO: 117849 - DNA, 20 bp, Artificial sequence
  SiRNA target sequence
gatcataatgtatatataat

SEQ ID NO: 117850 - DNA, 20 bp, Artificial sequence
  SiRNA target sequence
atcataatgtatatataata

SEQ ID NO: 117851 - DNA, 20 bp, Artificial sequence
  SiRNA target sequence
tcataatgtatatataatag

SEQ ID NO: 117852 - DNA, 20 bp, Artificial sequence
  SiRNA target sequence
cataatgtatatataatagg

SEQ ID NO: 117853 - DNA, 20 bp, Artificial sequence
  SiRNA target sequence
ataatgtatatataatagga

SEQ ID NO: 117854 - DNA, 20 bp, Artificial sequence
  SiRNA target sequence
taatgtatatataataggag

SEQ ID NO: 117855 - DNA, 20 bp, Artificial sequence
  SiRNA target sequence
aatgtatatataataggaga

SEQ ID NO: 117856 - DNA, 20 bp, Artificial sequence
  SiRNA target sequence
atgtatatataataggagaa

SEQ ID NO: 117857 - DNA, 20 bp, Artificial sequence
  SiRNA target sequence
tgtatatataataggagaag

SEQ ID NO: 117858 - DNA, 20 bp, Artificial sequence
  SiRNA target sequence
gtatatataataggagaaga

SEQ ID NO: 117859 - DNA, 20 bp, Artificial sequence
  SiRNA target sequence
tatatataataggagaagaa

SEQ ID NO: 117860 - DNA, 20 bp, Artificial sequence
  SiRNA target sequence
atatataataggagaagaag

SEQ ID NO: 117861 - DNA, 20 bp, Artificial sequence
  SiRNA target sequence
tatataataggagaagaagt

SEQ ID NO: 117862 - DNA, 20 bp, Artificial sequence
  SiRNA target sequence
atataataggagaagaagta

SEQ ID NO: 117863 - DNA, 20 bp, Artificial sequence
  SiRNA target sequence
tataataggagaagaagtag

SEQ ID NO: 117864 - DNA, 20 bp, Artificial sequence
  SiRNA target sequence
ataataggagaagaagtagg

SEQ ID NO: 117865 - DNA, 20 bp, Artificial sequence
  SiRNA target sequence
taataggagaagaagtaggc

SEQ ID NO: 117866 - DNA, 20 bp, Artificial sequence
  SiRNA target sequence
aataggagaagaagtaggca

SEQ ID NO: 117867 - DNA, 20 bp, Artificial sequence
  SiRNA target sequence
ataggagaagaagtaggcat

SEQ ID NO: 117868 - DNA, 20 bp, Artificial sequence
  SiRNA target sequence
taggagaagaagtaggcatc

SEQ ID NO: 117869 - DNA, 20 bp, Artificial sequence
  SiRNA target sequence
aggagaagaagtaggcatct

SEQ ID NO: 117870 - DNA, 20 bp, Artificial sequence
  SiRNA target sequence
ggagaagaagtaggcatctc

SEQ ID NO: 117871 - DNA, 20 bp, Artificial sequence
  SiRNA target sequence
gagaagaagtaggcatctct

SEQ ID NO: 117872 - DNA, 20 bp, Artificial sequence
  SiRNA target sequence
agaagaagtaggcatctctg

SEQ ID NO: 117873 - DNA, 20 bp, Artificial sequence
  SiRNA target sequence
gaagaagtaggcatctctgg

SEQ ID NO: 117874 - DNA, 20 bp, Artificial sequence
  SiRNA target sequence
aagaagtaggcatctctggt

SEQ ID NO: 117875 - DNA, 20 bp, Artificial sequence
  SiRNA target sequence
agaagtaggcatctctggtg

SEQ ID NO: 117876 - DNA, 20 bp, Artificial sequence
  SiRNA target sequence
gaagtaggcatctctggtgg

SEQ ID NO: 117877 - DNA, 20 bp, Artificial sequence
  SiRNA target sequence
aagtaggcatctctggtggt

SEQ ID NO: 117878 - DNA, 20 bp, Artificial sequence
  SiRNA target sequence
agtaggcatctctggtggtc

SEQ ID NO: 117879 - DNA, 20 bp, Artificial sequence
  SiRNA target sequence
gtaggcatctctggtggtcc

SEQ ID NO: 117880 - DNA, 20 bp, Artificial sequence
  SiRNA target sequence
taggcatctctggtggtcct

SEQ ID NO: 117881 - DNA, 20 bp, Artificial sequence
  SiRNA target sequence
aggcatctctggtggtcctc

SEQ ID NO: 117882 - DNA, 20 bp, Artificial sequence
  SiRNA target sequence
ggcatctctggtggtcctca

SEQ ID NO: 117883 - DNA, 20 bp, Artificial sequence
  SiRNA target sequence
gcatctctggtggtcctcac

SEQ ID NO: 117884 - DNA, 20 bp, Artificial sequence
  SiRNA target sequence
catctctggtggtcctcacg

SEQ ID NO: 117885 - DNA, 20 bp, Artificial sequence
  SiRNA target sequence
atctctggtggtcctcacgg

SEQ ID NO: 117886 - DNA, 20 bp, Artificial sequence
  SiRNA target sequence
tctctggtggtcctcacggt

SEQ ID NO: 117887 - DNA, 20 bp, Artificial sequence
  SiRNA target sequence
ctctggtggtcctcacggtc

SEQ ID NO: 117888 - DNA, 20 bp, Artificial sequence
  SiRNA target sequence
tctggtggtcctcacggtct

SEQ ID NO: 117889 - DNA, 20 bp, Artificial sequence
  SiRNA target sequence
ctggtggtcctcacggtctt

SEQ ID NO: 117890 - DNA, 20 bp, Artificial sequence
  SiRNA target sequence
tggtggtcctcacggtctta

SEQ ID NO: 117891 - DNA, 20 bp, Artificial sequence
  SiRNA target sequence
ggtggtcctcacggtcttac

SEQ ID NO: 117892 - DNA, 20 bp, Artificial sequence
  SiRNA target sequence
gtggtcctcacggtcttact

SEQ ID NO: 117893 - DNA, 20 bp, Artificial sequence
  SiRNA target sequence
tggtcctcacggtcttacta

SEQ ID NO: 117894 - DNA, 20 bp, Artificial sequence
  SiRNA target sequence
ggtcctcacggtcttactaa

SEQ ID NO: 117895 - DNA, 20 bp, Artificial sequence
  SiRNA target sequence
gtcctcacggtcttactaaa

SEQ ID NO: 117896 - DNA, 20 bp, Artificial sequence
  SiRNA target sequence
tcctcacggtcttactaaaa

SEQ ID NO: 117897 - DNA, 20 bp, Artificial sequence
  SiRNA target sequence
cctcacggtcttactaaaaa

SEQ ID NO: 117898 - DNA, 20 bp, Artificial sequence
  SiRNA target sequence
ctcacggtcttactaaaaat

SEQ ID NO: 117899 - DNA, 20 bp, Artificial sequence
  SiRNA target sequence
tcacggtcttactaaaaatt

SEQ ID NO: 117900 - DNA, 20 bp, Artificial sequence
  SiRNA target sequence
cacggtcttactaaaaattt

SEQ ID NO: 117901 - DNA, 20 bp, Artificial sequence
  SiRNA target sequence
acggtcttactaaaaatttg

SEQ ID NO: 117902 - DNA, 20 bp, Artificial sequence
  SiRNA target sequence
cggtcttactaaaaatttga

SEQ ID NO: 117903 - DNA, 20 bp, Artificial sequence
  SiRNA target sequence
ggtcttactaaaaatttgat

SEQ ID NO: 117904 - DNA, 20 bp, Artificial sequence
  SiRNA target sequence
gtcttactaaaaatttgatc

SEQ ID NO: 117905 - DNA, 20 bp, Artificial sequence
  SiRNA target sequence
tcttactaaaaatttgatca

SEQ ID NO: 117906 - DNA, 20 bp, Artificial sequence
  SiRNA target sequence
cttactaaaaatttgatcaa

SEQ ID NO: 117907 - DNA, 20 bp, Artificial sequence
  SiRNA target sequence
ttactaaaaatttgatcaaa

SEQ ID NO: 117908 - DNA, 20 bp, Artificial sequence
  SiRNA target sequence
tactaaaaatttgatcaaaa

SEQ ID NO: 117909 - DNA, 20 bp, Artificial sequence
  SiRNA target sequence
actaaaaatttgatcaaaaa

SEQ ID NO: 117910 - DNA, 20 bp, Artificial sequence
  SiRNA target sequence
ctaaaaatttgatcaaaaaa

SEQ ID NO: 117911 - DNA, 20 bp, Artificial sequence
  SiRNA target sequence
taaaaatttgatcaaaaaat

SEQ ID NO: 117912 - DNA, 20 bp, Artificial sequence
  SiRNA target sequence
aaaaatttgatcaaaaaata

SEQ ID NO: 117913 - DNA, 20 bp, Artificial sequence
  SiRNA target sequence
aaaatttgatcaaaaaatac

SEQ ID NO: 117914 - DNA, 20 bp, Artificial sequence
  SiRNA target sequence
aaatttgatcaaaaaatacg

SEQ ID NO: 117915 - DNA, 20 bp, Artificial sequence
  SiRNA target sequence
aatttgatcaaaaaatacgg

SEQ ID NO: 117916 - DNA, 20 bp, Artificial sequence
  SiRNA target sequence
atttgatcaaaaaatacggc

SEQ ID NO: 117917 - DNA, 20 bp, Artificial sequence
  SiRNA target sequence
tttgatcaaaaaatacggcg

SEQ ID NO: 117918 - DNA, 20 bp, Artificial sequence
  SiRNA target sequence
ttgatcaaaaaatacggcga

SEQ ID NO: 117919 - DNA, 20 bp, Artificial sequence
  SiRNA target sequence
tgatcaaaaaatacggcgat

SEQ ID NO: 117920 - DNA, 20 bp, Artificial sequence
  SiRNA target sequence
gatcaaaaaatacggcgatc

SEQ ID NO: 117921 - DNA, 20 bp, Artificial sequence
  SiRNA target sequence
atcaaaaaatacggcgatca

SEQ ID NO: 117922 - DNA, 20 bp, Artificial sequence
  SiRNA target sequence
tcaaaaaatacggcgatcaa

SEQ ID NO: 117923 - DNA, 20 bp, Artificial sequence
  SiRNA target sequence
caaaaaatacggcgatcaaa

SEQ ID NO: 117924 - DNA, 20 bp, Artificial sequence
  SiRNA target sequence
aaaaaatacggcgatcaaag

SEQ ID NO: 117925 - DNA, 20 bp, Artificial sequence
  SiRNA target sequence
aaaaatacggcgatcaaaga

SEQ ID NO: 117926 - DNA, 20 bp, Artificial sequence
  SiRNA target sequence
aaaatacggcgatcaaagag

SEQ ID NO: 117927 - DNA, 20 bp, Artificial sequence
  SiRNA target sequence
aaatacggcgatcaaagagt

SEQ ID NO: 117928 - DNA, 20 bp, Artificial sequence
  SiRNA target sequence
aatacggcgatcaaagagtg

SEQ ID NO: 117929 - DNA, 20 bp, Artificial sequence
  SiRNA target sequence
atacggcgatcaaagagtga

SEQ ID NO: 117930 - DNA, 20 bp, Artificial sequence
  SiRNA target sequence
tacggcgatcaaagagtgaa

SEQ ID NO: 117931 - DNA, 20 bp, Artificial sequence
  SiRNA target sequence
acggcgatcaaagagtgaag

SEQ ID NO: 117932 - DNA, 20 bp, Artificial sequence
  SiRNA target sequence
cggcgatcaaagagtgaagg

SEQ ID NO: 117933 - DNA, 20 bp, Artificial sequence
  SiRNA target sequence
ggcgatcaaagagtgaagga

SEQ ID NO: 117934 - DNA, 20 bp, Artificial sequence
  SiRNA target sequence
gcgatcaaagagtgaaggat

SEQ ID NO: 117935 - DNA, 20 bp, Artificial sequence
  SiRNA target sequence
cgatcaaagagtgaaggata

SEQ ID NO: 117936 - DNA, 20 bp, Artificial sequence
  SiRNA target sequence
gatcaaagagtgaaggatac

SEQ ID NO: 117937 - DNA, 20 bp, Artificial sequence
  SiRNA target sequence
atcaaagagtgaaggatacc

SEQ ID NO: 117938 - DNA, 20 bp, Artificial sequence
  SiRNA target sequence
tcaaagagtgaaggataccc

SEQ ID NO: 117939 - DNA, 20 bp, Artificial sequence
  SiRNA target sequence
caaagagtgaaggatacccc

SEQ ID NO: 117940 - DNA, 20 bp, Artificial sequence
  SiRNA target sequence
aaagagtgaaggatacccct

SEQ ID NO: 117941 - DNA, 20 bp, Artificial sequence
  SiRNA target sequence
aagagtgaaggataccccta

SEQ ID NO: 117942 - DNA, 20 bp, Artificial sequence
  SiRNA target sequence
agagtgaaggatacccctat

SEQ ID NO: 117943 - DNA, 20 bp, Artificial sequence
  SiRNA target sequence
gagtgaaggatacccctatt

SEQ ID NO: 117944 - DNA, 20 bp, Artificial sequence
  SiRNA target sequence
agtgaaggatacccctattt

SEQ ID NO: 117945 - DNA, 20 bp, Artificial sequence
  SiRNA target sequence
gtgaaggatacccctatttc

SEQ ID NO: 117946 - DNA, 20 bp, Artificial sequence
  SiRNA target sequence
tgaaggatacccctatttcg

SEQ ID NO: 117947 - DNA, 20 bp, Artificial sequence
  SiRNA target sequence
gaaggatacccctatttcgg

SEQ ID NO: 117948 - DNA, 20 bp, Artificial sequence
  SiRNA target sequence
aaggatacccctatttcgga

SEQ ID NO: 117949 - DNA, 20 bp, Artificial sequence
  SiRNA target sequence
aggatacccctatttcggaa

SEQ ID NO: 117950 - DNA, 20 bp, Artificial sequence
  SiRNA target sequence
ggatacccctatttcggaaa

SEQ ID NO: 117951 - DNA, 20 bp, Artificial sequence
  SiRNA target sequence
gatacccctatttcggaaat

SEQ ID NO: 117952 - DNA, 20 bp, Artificial sequence
  SiRNA target sequence
atacccctatttcggaaatg

SEQ ID NO: 117953 - DNA, 20 bp, Artificial sequence
  SiRNA target sequence
tacccctatttcggaaatgg

SEQ ID NO: 117954 - DNA, 20 bp, Artificial sequence
  SiRNA target sequence
acccctatttcggaaatggg

SEQ ID NO: 117955 - DNA, 20 bp, Artificial sequence
  SiRNA target sequence
cccctatttcggaaatggga

SEQ ID NO: 117956 - DNA, 20 bp, Artificial sequence
  SiRNA target sequence
ccctatttcggaaatgggat

SEQ ID NO: 117957 - DNA, 20 bp, Artificial sequence
  SiRNA target sequence
cctatttcggaaatgggatt

SEQ ID NO: 117958 - DNA, 20 bp, Artificial sequence
  SiRNA target sequence
ctatttcggaaatgggattt

SEQ ID NO: 117959 - DNA, 20 bp, Artificial sequence
  SiRNA target sequence
tatttcggaaatgggattta

SEQ ID NO: 117960 - DNA, 20 bp, Artificial sequence
  SiRNA target sequence
atttcggaaatgggatttac

SEQ ID NO: 117961 - DNA, 20 bp, Artificial sequence
  SiRNA target sequence
tttcggaaatgggatttaca

SEQ ID NO: 117962 - DNA, 20 bp, Artificial sequence
  SiRNA target sequence
ttcggaaatgggatttacag

SEQ ID NO: 117963 - DNA, 20 bp, Artificial sequence
  SiRNA target sequence
tcggaaatgggatttacagg

SEQ ID NO: 117964 - DNA, 20 bp, Artificial sequence
  SiRNA target sequence
cggaaatgggatttacaggt

SEQ ID NO: 117965 - DNA, 20 bp, Artificial sequence
  SiRNA target sequence
ggaaatgggatttacaggtc

SEQ ID NO: 117966 - DNA, 20 bp, Artificial sequence
  SiRNA target sequence
gaaatgggatttacaggtct

SEQ ID NO: 117967 - DNA, 20 bp, Artificial sequence
  SiRNA target sequence
aaatgggatttacaggtctc

SEQ ID NO: 117968 - DNA, 20 bp, Artificial sequence
  SiRNA target sequence
aatgggatttacaggtctcg

SEQ ID NO: 117969 - DNA, 20 bp, Artificial sequence
  SiRNA target sequence
atgggatttacaggtctcgc

SEQ ID NO: 117970 - DNA, 20 bp, Artificial sequence
  SiRNA target sequence
tgggatttacaggtctcgct

SEQ ID NO: 117971 - DNA, 20 bp, Artificial sequence
  SiRNA target sequence
gggatttacaggtctcgctg

SEQ ID NO: 117972 - DNA, 20 bp, Artificial sequence
  SiRNA target sequence
ggatttacaggtctcgctgt

SEQ ID NO: 117973 - DNA, 20 bp, Artificial sequence
  SiRNA target sequence
gatttacaggtctcgctgtg

SEQ ID NO: 117974 - DNA, 20 bp, Artificial sequence
  SiRNA target sequence
atttacaggtctcgctgtgg

SEQ ID NO: 117975 - DNA, 20 bp, Artificial sequence
  SiRNA target sequence
tttacaggtctcgctgtggg

SEQ ID NO: 117976 - DNA, 20 bp, Artificial sequence
  SiRNA target sequence
ttacaggtctcgctgtgggt

SEQ ID NO: 117977 - DNA, 20 bp, Artificial sequence
  SiRNA target sequence
tacaggtctcgctgtgggtt

SEQ ID NO: 117978 - DNA, 20 bp, Artificial sequence
  SiRNA target sequence
acaggtctcgctgtgggttc

SEQ ID NO: 117979 - DNA, 20 bp, Artificial sequence
  SiRNA target sequence
caggtctcgctgtgggttca

SEQ ID NO: 117980 - DNA, 20 bp, Artificial sequence
  SiRNA target sequence
aggtctcgctgtgggttcaa

SEQ ID NO: 117981 - DNA, 20 bp, Artificial sequence
  SiRNA target sequence
ggtctcgctgtgggttcaag

SEQ ID NO: 117982 - DNA, 20 bp, Artificial sequence
  SiRNA target sequence
gtctcgctgtgggttcaagc

SEQ ID NO: 117983 - DNA, 20 bp, Artificial sequence
  SiRNA target sequence
tctcgctgtgggttcaagct

SEQ ID NO: 117984 - DNA, 20 bp, Artificial sequence
  SiRNA target sequence
ctcgctgtgggttcaagcta

SEQ ID NO: 117985 - DNA, 20 bp, Artificial sequence
  SiRNA target sequence
tcgctgtgggttcaagctat

SEQ ID NO: 117986 - DNA, 20 bp, Artificial sequence
  SiRNA target sequence
cgctgtgggttcaagctatt

SEQ ID NO: 117987 - DNA, 20 bp, Artificial sequence
  SiRNA target sequence
gctgtgggttcaagctattt

SEQ ID NO: 117988 - DNA, 20 bp, Artificial sequence
  SiRNA target sequence
ctgtgggttcaagctattta

SEQ ID NO: 117989 - DNA, 20 bp, Artificial sequence
  SiRNA target sequence
tgtgggttcaagctatttag

SEQ ID NO: 117990 - DNA, 20 bp, Artificial sequence
  SiRNA target sequence
gtgggttcaagctatttagg

SEQ ID NO: 117991 - DNA, 20 bp, Artificial sequence
  SiRNA target sequence
tgggttcaagctatttaggg

SEQ ID NO: 117992 - DNA, 20 bp, Artificial sequence
  SiRNA target sequence
gggttcaagctatttagggt

SEQ ID NO: 117993 - DNA, 20 bp, Artificial sequence
  SiRNA target sequence
ggttcaagctatttagggtt

SEQ ID NO: 117994 - DNA, 20 bp, Artificial sequence
  SiRNA target sequence
gttcaagctatttagggtta

SEQ ID NO: 117995 - DNA, 20 bp, Artificial sequence
  SiRNA target sequence
ttcaagctatttagggttaa

SEQ ID NO: 117996 - DNA, 20 bp, Artificial sequence
  SiRNA target sequence
tcaagctatttagggttaag

SEQ ID NO: 117997 - DNA, 20 bp, Artificial sequence
  SiRNA target sequence
caagctatttagggttaaga

SEQ ID NO: 117998 - DNA, 20 bp, Artificial sequence
  SiRNA target sequence
aagctatttagggttaagac

SEQ ID NO: 117999 - DNA, 20 bp, Artificial sequence
  SiRNA target sequence
agctatttagggttaagacc

SEQ ID NO: 118000 - DNA, 20 bp, Artificial sequence
  SiRNA target sequence
gctatttagggttaagaccc

SEQ ID NO: 118001 - DNA, 20 bp, Artificial sequence
  SiRNA target sequence
ctatttagggttaagacccg

SEQ ID NO: 118002 - DNA, 20 bp, Artificial sequence
  SiRNA target sequence
tatttagggttaagacccgt

SEQ ID NO: 118003 - DNA, 20 bp, Artificial sequence
  SiRNA target sequence
atttagggttaagacccgta

SEQ ID NO: 118004 - DNA, 20 bp, Artificial sequence
  SiRNA target sequence
tttagggttaagacccgtag

SEQ ID NO: 118005 - DNA, 20 bp, Artificial sequence
  SiRNA target sequence
ttagggttaagacccgtagt

SEQ ID NO: 118006 - DNA, 20 bp, Artificial sequence
  SiRNA target sequence
tagggttaagacccgtagta

SEQ ID NO: 118007 - DNA, 20 bp, Artificial sequence
  SiRNA target sequence
agggttaagacccgtagtag

SEQ ID NO: 118008 - DNA, 20 bp, Artificial sequence
  SiRNA target sequence
gggttaagacccgtagtaga

SEQ ID NO: 118009 - DNA, 20 bp, Artificial sequence
  SiRNA target sequence
ggttaagacccgtagtagat

SEQ ID NO: 118010 - DNA, 20 bp, Artificial sequence
  SiRNA target sequence
gttaagacccgtagtagatt

SEQ ID NO: 118011 - DNA, 20 bp, Artificial sequence
  SiRNA target sequence
ttaagacccgtagtagattt

SEQ ID NO: 118012 - DNA, 20 bp, Artificial sequence
  SiRNA target sequence
taagacccgtagtagatttt

SEQ ID NO: 118013 - DNA, 20 bp, Artificial sequence
  SiRNA target sequence
aagacccgtagtagatttta

SEQ ID NO: 118014 - DNA, 20 bp, Artificial sequence
  SiRNA target sequence
agacccgtagtagattttat

SEQ ID NO: 118015 - DNA, 20 bp, Artificial sequence
  SiRNA target sequence
gacccgtagtagattttatg

SEQ ID NO: 118016 - DNA, 20 bp, Artificial sequence
  SiRNA target sequence
acccgtagtagattttatga

SEQ ID NO: 118017 - DNA, 20 bp, Artificial sequence
  SiRNA target sequence
cccgtagtagattttatgac

SEQ ID NO: 118018 - DNA, 20 bp, Artificial sequence
  SiRNA target sequence
ccgtagtagattttatgact

SEQ ID NO: 118019 - DNA, 20 bp, Artificial sequence
  SiRNA target sequence
cgtagtagattttatgactt

SEQ ID NO: 118020 - DNA, 20 bp, Artificial sequence
  SiRNA target sequence
gtagtagattttatgacttg

SEQ ID NO: 118021 - DNA, 20 bp, Artificial sequence
  SiRNA target sequence
tagtagattttatgacttgg

SEQ ID NO: 118022 - DNA, 20 bp, Artificial sequence
  SiRNA target sequence
agtagattttatgacttgga

SEQ ID NO: 118023 - DNA, 20 bp, Artificial sequence
  SiRNA target sequence
gtagattttatgacttggaa

SEQ ID NO: 118024 - DNA, 20 bp, Artificial sequence
  SiRNA target sequence
tagattttatgacttggaat

SEQ ID NO: 118025 - DNA, 20 bp, Artificial sequence
  SiRNA target sequence
agattttatgacttggaatt

SEQ ID NO: 118026 - DNA, 20 bp, Artificial sequence
  SiRNA target sequence
gattttatgacttggaattt

SEQ ID NO: 118027 - DNA, 20 bp, Artificial sequence
  SiRNA target sequence
attttatgacttggaatttt

SEQ ID NO: 118028 - DNA, 20 bp, Artificial sequence
  SiRNA target sequence
ttttatgacttggaattttg

SEQ ID NO: 118029 - DNA, 20 bp, Artificial sequence
  SiRNA target sequence
tttatgacttggaattttgc

SEQ ID NO: 118030 - DNA, 20 bp, Artificial sequence
  SiRNA target sequence
ttatgacttggaattttgct

SEQ ID NO: 118031 - DNA, 20 bp, Artificial sequence
  SiRNA target sequence
tatgacttggaattttgctt

SEQ ID NO: 118032 - DNA, 20 bp, Artificial sequence
  SiRNA target sequence
atgacttggaattttgcttt

SEQ ID NO: 118033 - DNA, 20 bp, Artificial sequence
  SiRNA target sequence
tgacttggaattttgctttg

SEQ ID NO: 118034 - DNA, 20 bp, Artificial sequence
  SiRNA target sequence
gacttggaattttgctttgc

SEQ ID NO: 118035 - DNA, 20 bp, Artificial sequence
  SiRNA target sequence
acttggaattttgctttgca

SEQ ID NO: 118036 - DNA, 20 bp, Artificial sequence
  SiRNA target sequence
cttggaattttgctttgcaa

SEQ ID NO: 118037 - DNA, 20 bp, Artificial sequence
  SiRNA target sequence
ttggaattttgctttgcaat

SEQ ID NO: 118038 - DNA, 20 bp, Artificial sequence
  SiRNA target sequence
tggaattttgctttgcaatc

SEQ ID NO: 118039 - DNA, 20 bp, Artificial sequence
  SiRNA target sequence
ggaattttgctttgcaatca

SEQ ID NO: 118040 - DNA, 20 bp, Artificial sequence
  SiRNA target sequence
gaattttgctttgcaatcaa

SEQ ID NO: 118041 - DNA, 20 bp, Artificial sequence
  SiRNA target sequence
aattttgctttgcaatcaat

SEQ ID NO: 118042 - DNA, 20 bp, Artificial sequence
  SiRNA target sequence
attttgctttgcaatcaatt

SEQ ID NO: 118043 - DNA, 20 bp, Artificial sequence
  SiRNA target sequence
ttttgctttgcaatcaattg

SEQ ID NO: 118044 - DNA, 20 bp, Artificial sequence
  SiRNA target sequence
tttgctttgcaatcaattga

SEQ ID NO: 118045 - DNA, 20 bp, Artificial sequence
  SiRNA target sequence
ttgctttgcaatcaattgac

SEQ ID NO: 118046 - DNA, 20 bp, Artificial sequence
  SiRNA target sequence
tgctttgcaatcaattgacc

SEQ ID NO: 118047 - DNA, 20 bp, Artificial sequence
  SiRNA target sequence
gctttgcaatcaattgacca

SEQ ID NO: 118048 - DNA, 20 bp, Artificial sequence
  SiRNA target sequence
ctttgcaatcaattgaccat

SEQ ID NO: 118049 - DNA, 20 bp, Artificial sequence
  SiRNA target sequence
tttgcaatcaattgaccata

SEQ ID NO: 118050 - DNA, 20 bp, Artificial sequence
  SiRNA target sequence
ttgcaatcaattgaccatat

SEQ ID NO: 118051 - DNA, 20 bp, Artificial sequence
  SiRNA target sequence
tgcaatcaattgaccatatt

SEQ ID NO: 118052 - DNA, 20 bp, Artificial sequence
  SiRNA target sequence
gcaatcaattgaccatatta

SEQ ID NO: 118053 - DNA, 20 bp, Artificial sequence
  SiRNA target sequence
caatcaattgaccatattat

SEQ ID NO: 118054 - DNA, 20 bp, Artificial sequence
  SiRNA target sequence
aatcaattgaccatattatt

SEQ ID NO: 118055 - DNA, 20 bp, Artificial sequence
  SiRNA target sequence
atcaattgaccatattatta

SEQ ID NO: 118056 - DNA, 20 bp, Artificial sequence
  SiRNA target sequence
tcaattgaccatattattaa

SEQ ID NO: 118057 - DNA, 20 bp, Artificial sequence
  SiRNA target sequence
caattgaccatattattaat

SEQ ID NO: 118058 - DNA, 20 bp, Artificial sequence
  SiRNA target sequence
aattgaccatattattaatt

SEQ ID NO: 118059 - DNA, 20 bp, Artificial sequence
  SiRNA target sequence
attgaccatattattaattc

SEQ ID NO: 118060 - DNA, 20 bp, Artificial sequence
  SiRNA target sequence
ttgaccatattattaattct

SEQ ID NO: 118061 - DNA, 20 bp, Artificial sequence
  SiRNA target sequence
tgaccatattattaattctt

SEQ ID NO: 118062 - DNA, 20 bp, Artificial sequence
  SiRNA target sequence
gaccatattattaattcttg

SEQ ID NO: 118063 - DNA, 20 bp, Artificial sequence
  SiRNA target sequence
accatattattaattcttgt

SEQ ID NO: 118064 - DNA, 20 bp, Artificial sequence
  SiRNA target sequence
ccatattattaattcttgtg

SEQ ID NO: 118065 - DNA, 20 bp, Artificial sequence
  SiRNA target sequence
catattattaattcttgtgc

SEQ ID NO: 118066 - DNA, 20 bp, Artificial sequence
  SiRNA target sequence
atattattaattcttgtgcg

SEQ ID NO: 118067 - DNA, 20 bp, Artificial sequence
  SiRNA target sequence
tattattaattcttgtgcga

SEQ ID NO: 118068 - DNA, 20 bp, Artificial sequence
  SiRNA target sequence
attattaattcttgtgcgaa

SEQ ID NO: 118069 - DNA, 20 bp, Artificial sequence
  SiRNA target sequence
ttattaattcttgtgcgaaa

SEQ ID NO: 118070 - DNA, 20 bp, Artificial sequence
  SiRNA target sequence
tattaattcttgtgcgaaaa

SEQ ID NO: 118071 - DNA, 20 bp, Artificial sequence
  SiRNA target sequence
attaattcttgtgcgaaaac

SEQ ID NO: 118072 - DNA, 20 bp, Artificial sequence
  SiRNA target sequence
ttaattcttgtgcgaaaacc

SEQ ID NO: 118073 - DNA, 20 bp, Artificial sequence
  SiRNA target sequence
taattcttgtgcgaaaacct

SEQ ID NO: 118074 - DNA, 20 bp, Artificial sequence
  SiRNA target sequence
aattcttgtgcgaaaacctt

SEQ ID NO: 118075 - DNA, 20 bp, Artificial sequence
  SiRNA target sequence
attcttgtgcgaaaaccttg

SEQ ID NO: 118076 - DNA, 20 bp, Artificial sequence
  SiRNA target sequence
ttcttgtgcgaaaaccttgt

SEQ ID NO: 118077 - DNA, 20 bp, Artificial sequence
  SiRNA target sequence
tcttgtgcgaaaaccttgta

SEQ ID NO: 118078 - DNA, 20 bp, Artificial sequence
  SiRNA target sequence
cttgtgcgaaaaccttgtat

SEQ ID NO: 118079 - DNA, 20 bp, Artificial sequence
  SiRNA target sequence
ttgtgcgaaaaccttgtata

SEQ ID NO: 118080 - DNA, 20 bp, Artificial sequence
  SiRNA target sequence
tgtgcgaaaaccttgtatat

SEQ ID NO: 118081 - DNA, 20 bp, Artificial sequence
  SiRNA target sequence
gtgcgaaaaccttgtatatg

SEQ ID NO: 118082 - DNA, 20 bp, Artificial sequence
  SiRNA target sequence
tgcgaaaaccttgtatatgt

SEQ ID NO: 118083 - DNA, 20 bp, Artificial sequence
  SiRNA target sequence
gcgaaaaccttgtatatgtc

SEQ ID NO: 118084 - DNA, 20 bp, Artificial sequence
  SiRNA target sequence
cgaaaaccttgtatatgtca

SEQ ID NO: 118085 - DNA, 20 bp, Artificial sequence
  SiRNA target sequence
gaaaaccttgtatatgtcag

SEQ ID NO: 118086 - DNA, 20 bp, Artificial sequence
  SiRNA target sequence
aaaaccttgtatatgtcagg

SEQ ID NO: 118087 - DNA, 20 bp, Artificial sequence
  SiRNA target sequence
aaaccttgtatatgtcagga

SEQ ID NO: 118088 - DNA, 20 bp, Artificial sequence
  SiRNA target sequence
aaccttgtatatgtcaggag

SEQ ID NO: 118089 - DNA, 20 bp, Artificial sequence
  SiRNA target sequence
accttgtatatgtcaggagg

SEQ ID NO: 118090 - DNA, 20 bp, Artificial sequence
  SiRNA target sequence
ccttgtatatgtcaggagga

SEQ ID NO: 118091 - DNA, 20 bp, Artificial sequence
  SiRNA target sequence
cttgtatatgtcaggaggaa

SEQ ID NO: 118092 - DNA, 20 bp, Artificial sequence
  SiRNA target sequence
ttgtatatgtcaggaggaag

SEQ ID NO: 118093 - DNA, 20 bp, Artificial sequence
  SiRNA target sequence
tgtatatgtcaggaggaaga

SEQ ID NO: 118094 - DNA, 20 bp, Artificial sequence
  SiRNA target sequence
gtatatgtcaggaggaagaa

SEQ ID NO: 118095 - DNA, 20 bp, Artificial sequence
  SiRNA target sequence
tatatgtcaggaggaagaat

SEQ ID NO: 118096 - DNA, 20 bp, Artificial sequence
  SiRNA target sequence
atatgtcaggaggaagaata

SEQ ID NO: 118097 - DNA, 20 bp, Artificial sequence
  SiRNA target sequence
tatgtcaggaggaagaatac

SEQ ID NO: 118098 - DNA, 20 bp, Artificial sequence
  SiRNA target sequence
atgtcaggaggaagaataca

SEQ ID NO: 118099 - DNA, 20 bp, Artificial sequence
  SiRNA target sequence
tgtcaggaggaagaatacaa

SEQ ID NO: 118100 - DNA, 20 bp, Artificial sequence
  SiRNA target sequence
gtcaggaggaagaatacaat

SEQ ID NO: 118101 - DNA, 20 bp, Artificial sequence
  SiRNA target sequence
tcaggaggaagaatacaatg

SEQ ID NO: 118102 - DNA, 20 bp, Artificial sequence
  SiRNA target sequence
caggaggaagaatacaatgt

SEQ ID NO: 118103 - DNA, 20 bp, Artificial sequence
  SiRNA target sequence
aggaggaagaatacaatgtc

SEQ ID NO: 118104 - DNA, 20 bp, Artificial sequence
  SiRNA target sequence
ggaggaagaatacaatgtcc

SEQ ID NO: 118105 - DNA, 20 bp, Artificial sequence
  SiRNA target sequence
gaggaagaatacaatgtcca

SEQ ID NO: 118106 - DNA, 20 bp, Artificial sequence
  SiRNA target sequence
aggaagaatacaatgtccaa

SEQ ID NO: 118107 - DNA, 20 bp, Artificial sequence
  SiRNA target sequence
ggaagaatacaatgtccaat

SEQ ID NO: 118108 - DNA, 20 bp, Artificial sequence
  SiRNA target sequence
gaagaatacaatgtccaatt

SEQ ID NO: 118109 - DNA, 20 bp, Artificial sequence
  SiRNA target sequence
aagaatacaatgtccaattg

SEQ ID NO: 118110 - DNA, 20 bp, Artificial sequence
  SiRNA target sequence
agaatacaatgtccaattgt

SEQ ID NO: 118111 - DNA, 20 bp, Artificial sequence
  SiRNA target sequence
gaatacaatgtccaattgtt

SEQ ID NO: 118112 - DNA, 20 bp, Artificial sequence
  SiRNA target sequence
aatacaatgtccaattgttt

SEQ ID NO: 118113 - DNA, 20 bp, Artificial sequence
  SiRNA target sequence
atacaatgtccaattgtttt

SEQ ID NO: 118114 - DNA, 20 bp, Artificial sequence
  SiRNA target sequence
tacaatgtccaattgttttt

SEQ ID NO: 118115 - DNA, 20 bp, Artificial sequence
  SiRNA target sequence
acaatgtccaattgttttta

SEQ ID NO: 118116 - DNA, 20 bp, Artificial sequence
  SiRNA target sequence
caatgtccaattgtttttag

SEQ ID NO: 118117 - DNA, 20 bp, Artificial sequence
  SiRNA target sequence
aatgtccaattgtttttagg

SEQ ID NO: 118118 - DNA, 20 bp, Artificial sequence
  SiRNA target sequence
atgtccaattgtttttaggg

SEQ ID NO: 118119 - DNA, 20 bp, Artificial sequence
  SiRNA target sequence
tgtccaattgtttttagggg

SEQ ID NO: 118120 - DNA, 20 bp, Artificial sequence
  SiRNA target sequence
gtccaattgtttttagggga

SEQ ID NO: 118121 - DNA, 20 bp, Artificial sequence
  SiRNA target sequence
tccaattgtttttaggggac

SEQ ID NO: 118122 - DNA, 20 bp, Artificial sequence
  SiRNA target sequence
ccaattgtttttaggggacc

SEQ ID NO: 118123 - DNA, 20 bp, Artificial sequence
  SiRNA target sequence
caattgtttttaggggacca

SEQ ID NO: 118124 - DNA, 20 bp, Artificial sequence
  SiRNA target sequence
aattgtttttaggggaccaa

SEQ ID NO: 118125 - DNA, 20 bp, Artificial sequence
  SiRNA target sequence
attgtttttaggggaccaaa

SEQ ID NO: 118126 - DNA, 20 bp, Artificial sequence
  SiRNA target sequence
ttgtttttaggggaccaaat

SEQ ID NO: 118127 - DNA, 20 bp, Artificial sequence
  SiRNA target sequence
tgtttttaggggaccaaatg

SEQ ID NO: 118128 - DNA, 20 bp, Artificial sequence
  SiRNA target sequence
gtttttaggggaccaaatgg

SEQ ID NO: 118129 - DNA, 20 bp, Artificial sequence
  SiRNA target sequence
tttttaggggaccaaatgga

SEQ ID NO: 118130 - DNA, 20 bp, Artificial sequence
  SiRNA target sequence
ttttaggggaccaaatggat

SEQ ID NO: 118131 - DNA, 20 bp, Artificial sequence
  SiRNA target sequence
tttaggggaccaaatggatt

SEQ ID NO: 118132 - DNA, 20 bp, Artificial sequence
  SiRNA target sequence
ttaggggaccaaatggattc

SEQ ID NO: 118133 - DNA, 20 bp, Artificial sequence
  SiRNA target sequence
taggggaccaaatggattca

SEQ ID NO: 118134 - DNA, 20 bp, Artificial sequence
  SiRNA target sequence
aggggaccaaatggattcaa

SEQ ID NO: 118135 - DNA, 20 bp, Artificial sequence
  SiRNA target sequence
ggggaccaaatggattcaat

SEQ ID NO: 118136 - DNA, 20 bp, Artificial sequence
  SiRNA target sequence
gggaccaaatggattcaata

SEQ ID NO: 118137 - DNA, 20 bp, Artificial sequence
  SiRNA target sequence
ggaccaaatggattcaataa

SEQ ID NO: 118138 - DNA, 20 bp, Artificial sequence
  SiRNA target sequence
gaccaaatggattcaataat

SEQ ID NO: 118139 - DNA, 20 bp, Artificial sequence
  SiRNA target sequence
accaaatggattcaataatg

SEQ ID NO: 118140 - DNA, 20 bp, Artificial sequence
  SiRNA target sequence
ccaaatggattcaataatgg

SEQ ID NO: 118141 - DNA, 20 bp, Artificial sequence
  SiRNA target sequence
caaatggattcaataatggg

SEQ ID NO: 118142 - DNA, 20 bp, Artificial sequence
  SiRNA target sequence
aaatggattcaataatgggt

SEQ ID NO: 118143 - DNA, 20 bp, Artificial sequence
  SiRNA target sequence
aatggattcaataatgggta

SEQ ID NO: 118144 - DNA, 20 bp, Artificial sequence
  SiRNA target sequence
atggattcaataatgggtac

SEQ ID NO: 118145 - DNA, 20 bp, Artificial sequence
  SiRNA target sequence
tggattcaataatgggtacg

SEQ ID NO: 118146 - DNA, 20 bp, Artificial sequence
  SiRNA target sequence
ggattcaataatgggtacgc

SEQ ID NO: 118147 - DNA, 20 bp, Artificial sequence
  SiRNA target sequence
gattcaataatgggtacgct

SEQ ID NO: 118148 - DNA, 20 bp, Artificial sequence
  SiRNA target sequence
attcaataatgggtacgctg

SEQ ID NO: 118149 - DNA, 20 bp, Artificial sequence
  SiRNA target sequence
ttcaataatgggtacgctgc

SEQ ID NO: 118150 - DNA, 20 bp, Artificial sequence
  SiRNA target sequence
tcaataatgggtacgctgca

SEQ ID NO: 118151 - DNA, 20 bp, Artificial sequence
  SiRNA target sequence
caataatgggtacgctgcac

SEQ ID NO: 118152 - DNA, 20 bp, Artificial sequence
  SiRNA target sequence
aataatgggtacgctgcaca

SEQ ID NO: 118153 - DNA, 20 bp, Artificial sequence
  SiRNA target sequence
ataatgggtacgctgcacag

SEQ ID NO: 118154 - DNA, 20 bp, Artificial sequence
  SiRNA target sequence
taatgggtacgctgcacagc

SEQ ID NO: 118155 - DNA, 20 bp, Artificial sequence
  SiRNA target sequence
aatgggtacgctgcacagca

SEQ ID NO: 118156 - DNA, 20 bp, Artificial sequence
  SiRNA target sequence
atgggtacgctgcacagcac

SEQ ID NO: 118157 - DNA, 20 bp, Artificial sequence
  SiRNA target sequence
tgggtacgctgcacagcaca

SEQ ID NO: 118158 - DNA, 20 bp, Artificial sequence
  SiRNA target sequence
gggtacgctgcacagcacac

SEQ ID NO: 118159 - DNA, 20 bp, Artificial sequence
  SiRNA target sequence
ggtacgctgcacagcacaca

SEQ ID NO: 118160 - DNA, 20 bp, Artificial sequence
  SiRNA target sequence
gtacgctgcacagcacacac

SEQ ID NO: 118161 - DNA, 20 bp, Artificial sequence
  SiRNA target sequence
tacgctgcacagcacacaca

SEQ ID NO: 118162 - DNA, 20 bp, Artificial sequence
  SiRNA target sequence
acgctgcacagcacacacaa

SEQ ID NO: 118163 - DNA, 20 bp, Artificial sequence
  SiRNA target sequence
cgctgcacagcacacacaag

SEQ ID NO: 118164 - DNA, 20 bp, Artificial sequence
  SiRNA target sequence
gctgcacagcacacacaaga

SEQ ID NO: 118165 - DNA, 20 bp, Artificial sequence
  SiRNA target sequence
ctgcacagcacacacaagat

SEQ ID NO: 118166 - DNA, 20 bp, Artificial sequence
  SiRNA target sequence
tgcacagcacacacaagatt

SEQ ID NO: 118167 - DNA, 20 bp, Artificial sequence
  SiRNA target sequence
gcacagcacacacaagattt

SEQ ID NO: 118168 - DNA, 20 bp, Artificial sequence
  SiRNA target sequence
cacagcacacacaagatttt

SEQ ID NO: 118169 - DNA, 20 bp, Artificial sequence
  SiRNA target sequence
acagcacacacaagattttg

SEQ ID NO: 118170 - DNA, 20 bp, Artificial sequence
  SiRNA target sequence
cagcacacacaagattttgc

SEQ ID NO: 118171 - DNA, 20 bp, Artificial sequence
  SiRNA target sequence
agcacacacaagattttgca

SEQ ID NO: 118172 - DNA, 20 bp, Artificial sequence
  SiRNA target sequence
gcacacacaagattttgcac

SEQ ID NO: 118173 - DNA, 20 bp, Artificial sequence
  SiRNA target sequence
cacacacaagattttgcacc

SEQ ID NO: 118174 - DNA, 20 bp, Artificial sequence
  SiRNA target sequence
acacacaagattttgcacca

SEQ ID NO: 118175 - DNA, 20 bp, Artificial sequence
  SiRNA target sequence
cacacaagattttgcaccaa

SEQ ID NO: 118176 - DNA, 20 bp, Artificial sequence
  SiRNA target sequence
acacaagattttgcaccaat

SEQ ID NO: 118177 - DNA, 20 bp, Artificial sequence
  SiRNA target sequence
cacaagattttgcaccaata

SEQ ID NO: 118178 - DNA, 20 bp, Artificial sequence
  SiRNA target sequence
acaagattttgcaccaatat

SEQ ID NO: 118179 - DNA, 20 bp, Artificial sequence
  SiRNA target sequence
caagattttgcaccaatata

SEQ ID NO: 118180 - DNA, 20 bp, Artificial sequence
  SiRNA target sequence
aagattttgcaccaatatat

SEQ ID NO: 118181 - DNA, 20 bp, Artificial sequence
  SiRNA target sequence
agattttgcaccaatatatg

SEQ ID NO: 118182 - DNA, 20 bp, Artificial sequence
  SiRNA target sequence
gattttgcaccaatatatgg

SEQ ID NO: 118183 - DNA, 20 bp, Artificial sequence
  SiRNA target sequence
attttgcaccaatatatggt

SEQ ID NO: 118184 - DNA, 20 bp, Artificial sequence
  SiRNA target sequence
ttttgcaccaatatatggtt

SEQ ID NO: 118185 - DNA, 20 bp, Artificial sequence
  SiRNA target sequence
tttgcaccaatatatggttc

SEQ ID NO: 118186 - DNA, 20 bp, Artificial sequence
  SiRNA target sequence
ttgcaccaatatatggttct

SEQ ID NO: 118187 - DNA, 20 bp, Artificial sequence
  SiRNA target sequence
tgcaccaatatatggttcta

SEQ ID NO: 118188 - DNA, 20 bp, Artificial sequence
  SiRNA target sequence
gcaccaatatatggttctat

SEQ ID NO: 118189 - DNA, 20 bp, Artificial sequence
  SiRNA target sequence
caccaatatatggttctatt

SEQ ID NO: 118190 - DNA, 20 bp, Artificial sequence
  SiRNA target sequence
accaatatatggttctattc

SEQ ID NO: 118191 - DNA, 20 bp, Artificial sequence
  SiRNA target sequence
ccaatatatggttctattcc

SEQ ID NO: 118192 - DNA, 20 bp, Artificial sequence
  SiRNA target sequence
caatatatggttctattcca

SEQ ID NO: 118193 - DNA, 20 bp, Artificial sequence
  SiRNA target sequence
aatatatggttctattccag

SEQ ID NO: 118194 - DNA, 20 bp, Artificial sequence
  SiRNA target sequence
atatatggttctattccagg

SEQ ID NO: 118195 - DNA, 20 bp, Artificial sequence
  SiRNA target sequence
tatatggttctattccaggc

SEQ ID NO: 118196 - DNA, 20 bp, Artificial sequence
  SiRNA target sequence
atatggttctattccaggcc

SEQ ID NO: 118197 - DNA, 20 bp, Artificial sequence
  SiRNA target sequence
tatggttctattccaggcct

SEQ ID NO: 118198 - DNA, 20 bp, Artificial sequence
  SiRNA target sequence
atggttctattccaggcctt

SEQ ID NO: 118199 - DNA, 20 bp, Artificial sequence
  SiRNA target sequence
tggttctattccaggcctta

SEQ ID NO: 118200 - DNA, 20 bp, Artificial sequence
  SiRNA target sequence
ggttctattccaggccttaa

SEQ ID NO: 118201 - DNA, 20 bp, Artificial sequence
  SiRNA target sequence
gttctattccaggccttaag

SEQ ID NO: 118202 - DNA, 20 bp, Artificial sequence
  SiRNA target sequence
ttctattccaggccttaagg

SEQ ID NO: 118203 - DNA, 20 bp, Artificial sequence
  SiRNA target sequence
tctattccaggccttaaggt

SEQ ID NO: 118204 - DNA, 20 bp, Artificial sequence
  SiRNA target sequence
ctattccaggccttaaggtg

SEQ ID NO: 118205 - DNA, 20 bp, Artificial sequence
  SiRNA target sequence
tattccaggccttaaggtgg

SEQ ID NO: 118206 - DNA, 20 bp, Artificial sequence
  SiRNA target sequence
attccaggccttaaggtggt

SEQ ID NO: 118207 - DNA, 20 bp, Artificial sequence
  SiRNA target sequence
ttccaggccttaaggtggtt

SEQ ID NO: 118208 - DNA, 20 bp, Artificial sequence
  SiRNA target sequence
tccaggccttaaggtggttt

SEQ ID NO: 118209 - DNA, 20 bp, Artificial sequence
  SiRNA target sequence
ccaggccttaaggtggtttg

SEQ ID NO: 118210 - DNA, 20 bp, Artificial sequence
  SiRNA target sequence
caggccttaaggtggtttgt

SEQ ID NO: 118211 - DNA, 20 bp, Artificial sequence
  SiRNA target sequence
aggccttaaggtggtttgtc

SEQ ID NO: 118212 - DNA, 20 bp, Artificial sequence
  SiRNA target sequence
ggccttaaggtggtttgtcc

SEQ ID NO: 118213 - DNA, 20 bp, Artificial sequence
  SiRNA target sequence
gccttaaggtggtttgtcct

SEQ ID NO: 118214 - DNA, 20 bp, Artificial sequence
  SiRNA target sequence
ccttaaggtggtttgtcctt

SEQ ID NO: 118215 - DNA, 20 bp, Artificial sequence
  SiRNA target sequence
cttaaggtggtttgtcctta

SEQ ID NO: 118216 - DNA, 20 bp, Artificial sequence
  SiRNA target sequence
ttaaggtggtttgtccttat

SEQ ID NO: 118217 - DNA, 20 bp, Artificial sequence
  SiRNA target sequence
taaggtggtttgtccttata

SEQ ID NO: 118218 - DNA, 20 bp, Artificial sequence
  SiRNA target sequence
aaggtggtttgtccttatac

SEQ ID NO: 118219 - DNA, 20 bp, Artificial sequence
  SiRNA target sequence
aggtggtttgtccttatacg

SEQ ID NO: 118220 - DNA, 20 bp, Artificial sequence
  SiRNA target sequence
ggtggtttgtccttatacgg

SEQ ID NO: 118221 - DNA, 20 bp, Artificial sequence
  SiRNA target sequence
gtggtttgtccttatacggg

SEQ ID NO: 118222 - DNA, 20 bp, Artificial sequence
  SiRNA target sequence
tggtttgtccttatacgggt

SEQ ID NO: 118223 - DNA, 20 bp, Artificial sequence
  SiRNA target sequence
ggtttgtccttatacgggta

SEQ ID NO: 118224 - DNA, 20 bp, Artificial sequence
  SiRNA target sequence
gtttgtccttatacgggtaa

SEQ ID NO: 118225 - DNA, 20 bp, Artificial sequence
  SiRNA target sequence
tttgtccttatacgggtaaa

SEQ ID NO: 118226 - DNA, 20 bp, Artificial sequence
  SiRNA target sequence
ttgtccttatacgggtaaag

SEQ ID NO: 118227 - DNA, 20 bp, Artificial sequence
  SiRNA target sequence
tgtccttatacgggtaaaga

SEQ ID NO: 118228 - DNA, 20 bp, Artificial sequence
  SiRNA target sequence
gtccttatacgggtaaagac

SEQ ID NO: 118229 - DNA, 20 bp, Artificial sequence
  SiRNA target sequence
tccttatacgggtaaagacc

SEQ ID NO: 118230 - DNA, 20 bp, Artificial sequence
  SiRNA target sequence
ccttatacgggtaaagacca

SEQ ID NO: 118231 - DNA, 20 bp, Artificial sequence
  SiRNA target sequence
cttatacgggtaaagaccat

SEQ ID NO: 118232 - DNA, 20 bp, Artificial sequence
  SiRNA target sequence
ttatacgggtaaagaccata

SEQ ID NO: 118233 - DNA, 20 bp, Artificial sequence
  SiRNA target sequence
tatacgggtaaagaccataa

SEQ ID NO: 118234 - DNA, 20 bp, Artificial sequence
  SiRNA target sequence
atacgggtaaagaccataaa

SEQ ID NO: 118235 - DNA, 20 bp, Artificial sequence
  SiRNA target sequence
tacgggtaaagaccataaag

SEQ ID NO: 118236 - DNA, 20 bp, Artificial sequence
  SiRNA target sequence
acgggtaaagaccataaagg

SEQ ID NO: 118237 - DNA, 20 bp, Artificial sequence
  SiRNA target sequence
cgggtaaagaccataaagga

SEQ ID NO: 118238 - DNA, 20 bp, Artificial sequence
  SiRNA target sequence
gggtaaagaccataaaggac

SEQ ID NO: 118239 - DNA, 20 bp, Artificial sequence
  SiRNA target sequence
ggtaaagaccataaaggact

SEQ ID NO: 118240 - DNA, 20 bp, Artificial sequence
  SiRNA target sequence
gtaaagaccataaaggactt

SEQ ID NO: 118241 - DNA, 20 bp, Artificial sequence
  SiRNA target sequence
taaagaccataaaggacttt

SEQ ID NO: 118242 - DNA, 20 bp, Artificial sequence
  SiRNA target sequence
aaagaccataaaggactttt

SEQ ID NO: 118243 - DNA, 20 bp, Artificial sequence
  SiRNA target sequence
aagaccataaaggactttta

SEQ ID NO: 118244 - DNA, 20 bp, Artificial sequence
  SiRNA target sequence
agaccataaaggacttttaa

SEQ ID NO: 118245 - DNA, 20 bp, Artificial sequence
  SiRNA target sequence
gaccataaaggacttttaaa

SEQ ID NO: 118246 - DNA, 20 bp, Artificial sequence
  SiRNA target sequence
accataaaggacttttaaaa

SEQ ID NO: 118247 - DNA, 20 bp, Artificial sequence
  SiRNA target sequence
ccataaaggacttttaaaaa

SEQ ID NO: 118248 - DNA, 20 bp, Artificial sequence
  SiRNA target sequence
cataaaggacttttaaaaag

SEQ ID NO: 118249 - DNA, 20 bp, Artificial sequence
  SiRNA target sequence
ataaaggacttttaaaaagc

SEQ ID NO: 118250 - DNA, 20 bp, Artificial sequence
  SiRNA target sequence
taaaggacttttaaaaagcg

SEQ ID NO: 118251 - DNA, 20 bp, Artificial sequence
  SiRNA target sequence
aaaggacttttaaaaagcgc

SEQ ID NO: 118252 - DNA, 20 bp, Artificial sequence
  SiRNA target sequence
aaggacttttaaaaagcgct

SEQ ID NO: 118253 - DNA, 20 bp, Artificial sequence
  SiRNA target sequence
aggacttttaaaaagcgcta

SEQ ID NO: 118254 - DNA, 20 bp, Artificial sequence
  SiRNA target sequence
ggacttttaaaaagcgctat

SEQ ID NO: 118255 - DNA, 20 bp, Artificial sequence
  SiRNA target sequence
gacttttaaaaagcgctatt

SEQ ID NO: 118256 - DNA, 20 bp, Artificial sequence
  SiRNA target sequence
acttttaaaaagcgctatta

SEQ ID NO: 118257 - DNA, 20 bp, Artificial sequence
  SiRNA target sequence
cttttaaaaagcgctattag

SEQ ID NO: 118258 - DNA, 20 bp, Artificial sequence
  SiRNA target sequence
ttttaaaaagcgctattaga

SEQ ID NO: 118259 - DNA, 20 bp, Artificial sequence
  SiRNA target sequence
tttaaaaagcgctattagag

SEQ ID NO: 118260 - DNA, 20 bp, Artificial sequence
  SiRNA target sequence
ttaaaaagcgctattagaga

SEQ ID NO: 118261 - DNA, 20 bp, Artificial sequence
  SiRNA target sequence
taaaaagcgctattagagac

SEQ ID NO: 118262 - DNA, 20 bp, Artificial sequence
  SiRNA target sequence
aaaaagcgctattagagaca

SEQ ID NO: 118263 - DNA, 20 bp, Artificial sequence
  SiRNA target sequence
aaaagcgctattagagacaa

SEQ ID NO: 118264 - DNA, 20 bp, Artificial sequence
  SiRNA target sequence
aaagcgctattagagacaat

SEQ ID NO: 118265 - DNA, 20 bp, Artificial sequence
  SiRNA target sequence
aagcgctattagagacaata

SEQ ID NO: 118266 - DNA, 20 bp, Artificial sequence
  SiRNA target sequence
agcgctattagagacaataa

SEQ ID NO: 118267 - DNA, 20 bp, Artificial sequence
  SiRNA target sequence
gcgctattagagacaataac

SEQ ID NO: 118268 - DNA, 20 bp, Artificial sequence
  SiRNA target sequence
cgctattagagacaataacc

SEQ ID NO: 118269 - DNA, 20 bp, Artificial sequence
  SiRNA target sequence
gctattagagacaataaccc

SEQ ID NO: 118270 - DNA, 20 bp, Artificial sequence
  SiRNA target sequence
ctattagagacaataacccg

SEQ ID NO: 118271 - DNA, 20 bp, Artificial sequence
  SiRNA target sequence
tattagagacaataacccgg

SEQ ID NO: 118272 - DNA, 20 bp, Artificial sequence
  SiRNA target sequence
attagagacaataacccggt

SEQ ID NO: 118273 - DNA, 20 bp, Artificial sequence
  SiRNA target sequence
ttagagacaataacccggtt

SEQ ID NO: 118274 - DNA, 20 bp, Artificial sequence
  SiRNA target sequence
tagagacaataacccggtta

SEQ ID NO: 118275 - DNA, 20 bp, Artificial sequence
  SiRNA target sequence
agagacaataacccggttat

SEQ ID NO: 118276 - DNA, 20 bp, Artificial sequence
  SiRNA target sequence
gagacaataacccggttata

SEQ ID NO: 118277 - DNA, 20 bp, Artificial sequence
  SiRNA target sequence
agacaataacccggttatat

SEQ ID NO: 118278 - DNA, 20 bp, Artificial sequence
  SiRNA target sequence
gacaataacccggttatatt

SEQ ID NO: 118279 - DNA, 20 bp, Artificial sequence
  SiRNA target sequence
acaataacccggttatattt

SEQ ID NO: 118280 - DNA, 20 bp, Artificial sequence
  SiRNA target sequence
caataacccggttatatttc

SEQ ID NO: 118281 - DNA, 20 bp, Artificial sequence
  SiRNA target sequence
aataacccggttatatttct

SEQ ID NO: 118282 - DNA, 20 bp, Artificial sequence
  SiRNA target sequence
ataacccggttatatttctt

SEQ ID NO: 118283 - DNA, 20 bp, Artificial sequence
  SiRNA target sequence
taacccggttatatttcttg

SEQ ID NO: 118284 - DNA, 20 bp, Artificial sequence
  SiRNA target sequence
aacccggttatatttcttga

SEQ ID NO: 118285 - DNA, 20 bp, Artificial sequence
  SiRNA target sequence
acccggttatatttcttgag

SEQ ID NO: 118286 - DNA, 20 bp, Artificial sequence
  SiRNA target sequence
cccggttatatttcttgaga

SEQ ID NO: 118287 - DNA, 20 bp, Artificial sequence
  SiRNA target sequence
ccggttatatttcttgagaa

SEQ ID NO: 118288 - DNA, 20 bp, Artificial sequence
  SiRNA target sequence
cggttatatttcttgagaat

SEQ ID NO: 118289 - DNA, 20 bp, Artificial sequence
  SiRNA target sequence
ggttatatttcttgagaatg

SEQ ID NO: 118290 - DNA, 20 bp, Artificial sequence
  SiRNA target sequence
gttatatttcttgagaatga

SEQ ID NO: 118291 - DNA, 20 bp, Artificial sequence
  SiRNA target sequence
ttatatttcttgagaatgaa

SEQ ID NO: 118292 - DNA, 20 bp, Artificial sequence
  SiRNA target sequence
tatatttcttgagaatgaaa

SEQ ID NO: 118293 - DNA, 20 bp, Artificial sequence
  SiRNA target sequence
atatttcttgagaatgaaat

SEQ ID NO: 118294 - DNA, 20 bp, Artificial sequence
  SiRNA target sequence
tatttcttgagaatgaaata

SEQ ID NO: 118295 - DNA, 20 bp, Artificial sequence
  SiRNA target sequence
atttcttgagaatgaaatat

SEQ ID NO: 118296 - DNA, 20 bp, Artificial sequence
  SiRNA target sequence
tttcttgagaatgaaatatt

SEQ ID NO: 118297 - DNA, 20 bp, Artificial sequence
  SiRNA target sequence
ttcttgagaatgaaatatta

SEQ ID NO: 118298 - DNA, 20 bp, Artificial sequence
  SiRNA target sequence
tcttgagaatgaaatattat

SEQ ID NO: 118299 - DNA, 20 bp, Artificial sequence
  SiRNA target sequence
cttgagaatgaaatattata

SEQ ID NO: 118300 - DNA, 20 bp, Artificial sequence
  SiRNA target sequence
ttgagaatgaaatattatat

SEQ ID NO: 118301 - DNA, 20 bp, Artificial sequence
  SiRNA target sequence
tgagaatgaaatattatata

SEQ ID NO: 118302 - DNA, 20 bp, Artificial sequence
  SiRNA target sequence
gagaatgaaatattatataa

SEQ ID NO: 118303 - DNA, 20 bp, Artificial sequence
  SiRNA target sequence
agaatgaaatattatataaa

SEQ ID NO: 118304 - DNA, 20 bp, Artificial sequence
  SiRNA target sequence
gaatgaaatattatataaag

SEQ ID NO: 118305 - DNA, 20 bp, Artificial sequence
  SiRNA target sequence
aatgaaatattatataaaga

SEQ ID NO: 118306 - DNA, 20 bp, Artificial sequence
  SiRNA target sequence
atgaaatattatataaagat

SEQ ID NO: 118307 - DNA, 20 bp, Artificial sequence
  SiRNA target sequence
tgaaatattatataaagata

SEQ ID NO: 118308 - DNA, 20 bp, Artificial sequence
  SiRNA target sequence
gaaatattatataaagataa

SEQ ID NO: 118309 - DNA, 20 bp, Artificial sequence
  SiRNA target sequence
aaatattatataaagataaa

SEQ ID NO: 118310 - DNA, 20 bp, Artificial sequence
  SiRNA target sequence
aatattatataaagataaat

SEQ ID NO: 118311 - DNA, 20 bp, Artificial sequence
  SiRNA target sequence
atattatataaagataaata

SEQ ID NO: 118312 - DNA, 20 bp, Artificial sequence
  SiRNA target sequence
tattatataaagataaatac

SEQ ID NO: 118313 - DNA, 20 bp, Artificial sequence
  SiRNA target sequence
attatataaagataaatacc

SEQ ID NO: 118314 - DNA, 20 bp, Artificial sequence
  SiRNA target sequence
ttatataaagataaatacct

SEQ ID NO: 118315 - DNA, 20 bp, Artificial sequence
  SiRNA target sequence
tatataaagataaatacctt

SEQ ID NO: 118316 - DNA, 20 bp, Artificial sequence
  SiRNA target sequence
atataaagataaataccttg

SEQ ID NO: 118317 - DNA, 20 bp, Artificial sequence
  SiRNA target sequence
tataaagataaataccttga

SEQ ID NO: 118318 - DNA, 20 bp, Artificial sequence
  SiRNA target sequence
ataaagataaataccttgaa

SEQ ID NO: 118319 - DNA, 20 bp, Artificial sequence
  SiRNA target sequence
taaagataaataccttgaag

SEQ ID NO: 118320 - DNA, 20 bp, Artificial sequence
  SiRNA target sequence
aaagataaataccttgaagt

SEQ ID NO: 118321 - DNA, 20 bp, Artificial sequence
  SiRNA target sequence
aagataaataccttgaagtg

SEQ ID NO: 118322 - DNA, 20 bp, Artificial sequence
  SiRNA target sequence
agataaataccttgaagtgt

SEQ ID NO: 118323 - DNA, 20 bp, Artificial sequence
  SiRNA target sequence
gataaataccttgaagtgtc

SEQ ID NO: 118324 - DNA, 20 bp, Artificial sequence
  SiRNA target sequence
ataaataccttgaagtgtct

SEQ ID NO: 118325 - DNA, 20 bp, Artificial sequence
  SiRNA target sequence
taaataccttgaagtgtcta

SEQ ID NO: 118326 - DNA, 20 bp, Artificial sequence
  SiRNA target sequence
aaataccttgaagtgtctaa

SEQ ID NO: 118327 - DNA, 20 bp, Artificial sequence
  SiRNA target sequence
aataccttgaagtgtctaat

SEQ ID NO: 118328 - DNA, 20 bp, Artificial sequence
  SiRNA target sequence
ataccttgaagtgtctaata

SEQ ID NO: 118329 - DNA, 20 bp, Artificial sequence
  SiRNA target sequence
taccttgaagtgtctaataa

SEQ ID NO: 118330 - DNA, 20 bp, Artificial sequence
  SiRNA target sequence
accttgaagtgtctaataat

SEQ ID NO: 118331 - DNA, 20 bp, Artificial sequence
  SiRNA target sequence
ccttgaagtgtctaataatt

SEQ ID NO: 118332 - DNA, 20 bp, Artificial sequence
  SiRNA target sequence
cttgaagtgtctaataatta

SEQ ID NO: 118333 - DNA, 20 bp, Artificial sequence
  SiRNA target sequence
ttgaagtgtctaataattat

SEQ ID NO: 118334 - DNA, 20 bp, Artificial sequence
  SiRNA target sequence
tgaagtgtctaataattata

SEQ ID NO: 118335 - DNA, 20 bp, Artificial sequence
  SiRNA target sequence
gaagtgtctaataattatat

SEQ ID NO: 118336 - DNA, 20 bp, Artificial sequence
  SiRNA target sequence
aagtgtctaataattatatt

SEQ ID NO: 118337 - DNA, 20 bp, Artificial sequence
  SiRNA target sequence
agtgtctaataattatattc

SEQ ID NO: 118338 - DNA, 20 bp, Artificial sequence
  SiRNA target sequence
gtgtctaataattatattca

SEQ ID NO: 118339 - DNA, 20 bp, Artificial sequence
  SiRNA target sequence
tgtctaataattatattcaa

SEQ ID NO: 118340 - DNA, 20 bp, Artificial sequence
  SiRNA target sequence
gtctaataattatattcaac

SEQ ID NO: 118341 - DNA, 20 bp, Artificial sequence
  SiRNA target sequence
tctaataattatattcaacc

SEQ ID NO: 118342 - DNA, 20 bp, Artificial sequence
  SiRNA target sequence
ctaataattatattcaacca

SEQ ID NO: 118343 - DNA, 20 bp, Artificial sequence
  SiRNA target sequence
taataattatattcaaccac

SEQ ID NO: 118344 - DNA, 20 bp, Artificial sequence
  SiRNA target sequence
aataattatattcaaccact

SEQ ID NO: 118345 - DNA, 20 bp, Artificial sequence
  SiRNA target sequence
ataattatattcaaccactt

SEQ ID NO: 118346 - DNA, 20 bp, Artificial sequence
  SiRNA target sequence
taattatattcaaccacttg

SEQ ID NO: 118347 - DNA, 20 bp, Artificial sequence
  SiRNA target sequence
aattatattcaaccacttga

SEQ ID NO: 118348 - DNA, 20 bp, Artificial sequence
  SiRNA target sequence
attatattcaaccacttgac

SEQ ID NO: 118349 - DNA, 20 bp, Artificial sequence
  SiRNA target sequence
ttatattcaaccacttgaca

SEQ ID NO: 118350 - DNA, 20 bp, Artificial sequence
  SiRNA target sequence
tatattcaaccacttgacaa

SEQ ID NO: 118351 - DNA, 20 bp, Artificial sequence
  SiRNA target sequence
atattcaaccacttgacaag

SEQ ID NO: 118352 - DNA, 20 bp, Artificial sequence
  SiRNA target sequence
tattcaaccacttgacaagg

SEQ ID NO: 118353 - DNA, 20 bp, Artificial sequence
  SiRNA target sequence
attcaaccacttgacaaggc

SEQ ID NO: 118354 - DNA, 20 bp, Artificial sequence
  SiRNA target sequence
ttcaaccacttgacaaggca

SEQ ID NO: 118355 - DNA, 20 bp, Artificial sequence
  SiRNA target sequence
tcaaccacttgacaaggcag

SEQ ID NO: 118356 - DNA, 20 bp, Artificial sequence
  SiRNA target sequence
caaccacttgacaaggcagt

SEQ ID NO: 118357 - DNA, 20 bp, Artificial sequence
  SiRNA target sequence
aaccacttgacaaggcagta

SEQ ID NO: 118358 - DNA, 20 bp, Artificial sequence
  SiRNA target sequence
accacttgacaaggcagtaa

SEQ ID NO: 118359 - DNA, 20 bp, Artificial sequence
  SiRNA target sequence
ccacttgacaaggcagtaat

SEQ ID NO: 118360 - DNA, 20 bp, Artificial sequence
  SiRNA target sequence
cacttgacaaggcagtaatt

SEQ ID NO: 118361 - DNA, 20 bp, Artificial sequence
  SiRNA target sequence
acttgacaaggcagtaattg

SEQ ID NO: 118362 - DNA, 20 bp, Artificial sequence
  SiRNA target sequence
cttgacaaggcagtaattga

SEQ ID NO: 118363 - DNA, 20 bp, Artificial sequence
  SiRNA target sequence
ttgacaaggcagtaattgaa

SEQ ID NO: 118364 - DNA, 20 bp, Artificial sequence
  SiRNA target sequence
tgacaaggcagtaattgaaa

SEQ ID NO: 118365 - DNA, 20 bp, Artificial sequence
  SiRNA target sequence
gacaaggcagtaattgaaaa

SEQ ID NO: 118366 - DNA, 20 bp, Artificial sequence
  SiRNA target sequence
acaaggcagtaattgaaaaa

SEQ ID NO: 118367 - DNA, 20 bp, Artificial sequence
  SiRNA target sequence
caaggcagtaattgaaaaaa

SEQ ID NO: 118368 - DNA, 20 bp, Artificial sequence
  SiRNA target sequence
aaggcagtaattgaaaaaaa

SEQ ID NO: 118369 - DNA, 20 bp, Artificial sequence
  SiRNA target sequence
aggcagtaattgaaaaaaat

SEQ ID NO: 118370 - DNA, 20 bp, Artificial sequence
  SiRNA target sequence
ggcagtaattgaaaaaaatg

SEQ ID NO: 118371 - DNA, 20 bp, Artificial sequence
  SiRNA target sequence
gcagtaattgaaaaaaatgg

SEQ ID NO: 118372 - DNA, 20 bp, Artificial sequence
  SiRNA target sequence
cagtaattgaaaaaaatggt

SEQ ID NO: 118373 - DNA, 20 bp, Artificial sequence
  SiRNA target sequence
agtaattgaaaaaaatggtg

SEQ ID NO: 118374 - DNA, 20 bp, Artificial sequence
  SiRNA target sequence
gtaattgaaaaaaatggtgt

SEQ ID NO: 118375 - DNA, 20 bp, Artificial sequence
  SiRNA target sequence
taattgaaaaaaatggtgtt

SEQ ID NO: 118376 - DNA, 20 bp, Artificial sequence
  SiRNA target sequence
aattgaaaaaaatggtgttg

SEQ ID NO: 118377 - DNA, 20 bp, Artificial sequence
  SiRNA target sequence
attgaaaaaaatggtgttga

SEQ ID NO: 118378 - DNA, 20 bp, Artificial sequence
  SiRNA target sequence
ttgaaaaaaatggtgttgac

SEQ ID NO: 118379 - DNA, 20 bp, Artificial sequence
  SiRNA target sequence
tgaaaaaaatggtgttgacg

SEQ ID NO: 118380 - DNA, 20 bp, Artificial sequence
  SiRNA target sequence
gaaaaaaatggtgttgacgt

SEQ ID NO: 118381 - DNA, 20 bp, Artificial sequence
  SiRNA target sequence
aaaaaaatggtgttgacgtt

SEQ ID NO: 118382 - DNA, 20 bp, Artificial sequence
  SiRNA target sequence
aaaaaatggtgttgacgtta

SEQ ID NO: 118383 - DNA, 20 bp, Artificial sequence
  SiRNA target sequence
aaaaatggtgttgacgttac

SEQ ID NO: 118384 - DNA, 20 bp, Artificial sequence
  SiRNA target sequence
aaaatggtgttgacgttaca

SEQ ID NO: 118385 - DNA, 20 bp, Artificial sequence
  SiRNA target sequence
aaatggtgttgacgttacag

SEQ ID NO: 118386 - DNA, 20 bp, Artificial sequence
  SiRNA target sequence
aatggtgttgacgttacagt

SEQ ID NO: 118387 - DNA, 20 bp, Artificial sequence
  SiRNA target sequence
atggtgttgacgttacagtt

SEQ ID NO: 118388 - DNA, 20 bp, Artificial sequence
  SiRNA target sequence
tggtgttgacgttacagttt

SEQ ID NO: 118389 - DNA, 20 bp, Artificial sequence
  SiRNA target sequence
ggtgttgacgttacagtttt

SEQ ID NO: 118390 - DNA, 20 bp, Artificial sequence
  SiRNA target sequence
gtgttgacgttacagtttta

SEQ ID NO: 118391 - DNA, 20 bp, Artificial sequence
  SiRNA target sequence
tgttgacgttacagttttag

SEQ ID NO: 118392 - DNA, 20 bp, Artificial sequence
  SiRNA target sequence
gttgacgttacagttttagg

SEQ ID NO: 118393 - DNA, 20 bp, Artificial sequence
  SiRNA target sequence
ttgacgttacagttttagga

SEQ ID NO: 118394 - DNA, 20 bp, Artificial sequence
  SiRNA target sequence
tgacgttacagttttaggaa

SEQ ID NO: 118395 - DNA, 20 bp, Artificial sequence
  SiRNA target sequence
gacgttacagttttaggaat

SEQ ID NO: 118396 - DNA, 20 bp, Artificial sequence
  SiRNA target sequence
acgttacagttttaggaata

SEQ ID NO: 118397 - DNA, 20 bp, Artificial sequence
  SiRNA target sequence
cgttacagttttaggaatat

SEQ ID NO: 118398 - DNA, 20 bp, Artificial sequence
  SiRNA target sequence
gttacagttttaggaatatc

SEQ ID NO: 118399 - DNA, 20 bp, Artificial sequence
  SiRNA target sequence
ttacagttttaggaatatca

SEQ ID NO: 118400 - DNA, 20 bp, Artificial sequence
  SiRNA target sequence
tacagttttaggaatatcaa

SEQ ID NO: 118401 - DNA, 20 bp, Artificial sequence
  SiRNA target sequence
acagttttaggaatatcaat

SEQ ID NO: 118402 - DNA, 20 bp, Artificial sequence
  SiRNA target sequence
cagttttaggaatatcaata

SEQ ID NO: 118403 - DNA, 20 bp, Artificial sequence
  SiRNA target sequence
agttttaggaatatcaataa

SEQ ID NO: 118404 - DNA, 20 bp, Artificial sequence
  SiRNA target sequence
gttttaggaatatcaataag

SEQ ID NO: 118405 - DNA, 20 bp, Artificial sequence
  SiRNA target sequence
ttttaggaatatcaataagt

SEQ ID NO: 118406 - DNA, 20 bp, Artificial sequence
  SiRNA target sequence
tttaggaatatcaataagtc

SEQ ID NO: 118407 - DNA, 20 bp, Artificial sequence
  SiRNA target sequence
ttaggaatatcaataagtct

SEQ ID NO: 118408 - DNA, 20 bp, Artificial sequence
  SiRNA target sequence
taggaatatcaataagtctt

SEQ ID NO: 118409 - DNA, 20 bp, Artificial sequence
  SiRNA target sequence
aggaatatcaataagtctta

SEQ ID NO: 118410 - DNA, 20 bp, Artificial sequence
  SiRNA target sequence
ggaatatcaataagtcttaa

SEQ ID NO: 118411 - DNA, 20 bp, Artificial sequence
  SiRNA target sequence
gaatatcaataagtcttaaa

SEQ ID NO: 118412 - DNA, 20 bp, Artificial sequence
  SiRNA target sequence
aatatcaataagtcttaaag

SEQ ID NO: 118413 - DNA, 20 bp, Artificial sequence
  SiRNA target sequence
atatcaataagtcttaaaga

SEQ ID NO: 118414 - DNA, 20 bp, Artificial sequence
  SiRNA target sequence
tatcaataagtcttaaagaa

SEQ ID NO: 118415 - DNA, 20 bp, Artificial sequence
  SiRNA target sequence
atcaataagtcttaaagaaa

SEQ ID NO: 118416 - DNA, 20 bp, Artificial sequence
  SiRNA target sequence
tcaataagtcttaaagaaat

SEQ ID NO: 118417 - DNA, 20 bp, Artificial sequence
  SiRNA target sequence
caataagtcttaaagaaatt

SEQ ID NO: 118418 - DNA, 20 bp, Artificial sequence
  SiRNA target sequence
aataagtcttaaagaaattt

SEQ ID NO: 118419 - DNA, 20 bp, Artificial sequence
  SiRNA target sequence
ataagtcttaaagaaatttt

SEQ ID NO: 118420 - DNA, 20 bp, Artificial sequence
  SiRNA target sequence
taagtcttaaagaaattttt

SEQ ID NO: 118421 - DNA, 20 bp, Artificial sequence
  SiRNA target sequence
aagtcttaaagaaattttta

SEQ ID NO: 118422 - DNA, 20 bp, Artificial sequence
  SiRNA target sequence
agtcttaaagaaatttttaa

SEQ ID NO: 118423 - DNA, 20 bp, Artificial sequence
  SiRNA target sequence
gtcttaaagaaatttttaaa

SEQ ID NO: 118424 - DNA, 20 bp, Artificial sequence
  SiRNA target sequence
tcttaaagaaatttttaaag

SEQ ID NO: 118425 - DNA, 20 bp, Artificial sequence
  SiRNA target sequence
cttaaagaaatttttaaagc

SEQ ID NO: 118426 - DNA, 20 bp, Artificial sequence
  SiRNA target sequence
ttaaagaaatttttaaagca

SEQ ID NO: 118427 - DNA, 20 bp, Artificial sequence
  SiRNA target sequence
taaagaaatttttaaagcag

SEQ ID NO: 118428 - DNA, 20 bp, Artificial sequence
  SiRNA target sequence
aaagaaatttttaaagcaga

SEQ ID NO: 118429 - DNA, 20 bp, Artificial sequence
  SiRNA target sequence
aagaaatttttaaagcagac

SEQ ID NO: 118430 - DNA, 20 bp, Artificial sequence
  SiRNA target sequence
agaaatttttaaagcagaca

SEQ ID NO: 118431 - DNA, 20 bp, Artificial sequence
  SiRNA target sequence
gaaatttttaaagcagacag

SEQ ID NO: 118432 - DNA, 20 bp, Artificial sequence
  SiRNA target sequence
aaatttttaaagcagacagt

SEQ ID NO: 118433 - DNA, 20 bp, Artificial sequence
  SiRNA target sequence
aatttttaaagcagacagtt

SEQ ID NO: 118434 - DNA, 20 bp, Artificial sequence
  SiRNA target sequence
atttttaaagcagacagttt

SEQ ID NO: 118435 - DNA, 20 bp, Artificial sequence
  SiRNA target sequence
tttttaaagcagacagtttg

SEQ ID NO: 118436 - DNA, 20 bp, Artificial sequence
  SiRNA target sequence
ttttaaagcagacagtttgt

SEQ ID NO: 118437 - DNA, 20 bp, Artificial sequence
  SiRNA target sequence
tttaaagcagacagtttgtt

SEQ ID NO: 118438 - DNA, 20 bp, Artificial sequence
  SiRNA target sequence
ttaaagcagacagtttgtta

SEQ ID NO: 118439 - DNA, 20 bp, Artificial sequence
  SiRNA target sequence
taaagcagacagtttgttag

SEQ ID NO: 118440 - DNA, 20 bp, Artificial sequence
  SiRNA target sequence
aaagcagacagtttgttaga

SEQ ID NO: 118441 - DNA, 20 bp, Artificial sequence
  SiRNA target sequence
aagcagacagtttgttagag

SEQ ID NO: 118442 - DNA, 20 bp, Artificial sequence
  SiRNA target sequence
agcagacagtttgttagaga

SEQ ID NO: 118443 - DNA, 20 bp, Artificial sequence
  SiRNA target sequence
gcagacagtttgttagagaa

SEQ ID NO: 118444 - DNA, 20 bp, Artificial sequence
  SiRNA target sequence
cagacagtttgttagagaaa

SEQ ID NO: 118445 - DNA, 20 bp, Artificial sequence
  SiRNA target sequence
agacagtttgttagagaaaa

SEQ ID NO: 118446 - DNA, 20 bp, Artificial sequence
  SiRNA target sequence
gacagtttgttagagaaaaa

SEQ ID NO: 118447 - DNA, 20 bp, Artificial sequence
  SiRNA target sequence
acagtttgttagagaaaaaa

SEQ ID NO: 118448 - DNA, 20 bp, Artificial sequence
  SiRNA target sequence
cagtttgttagagaaaaaaa

SEQ ID NO: 118449 - DNA, 20 bp, Artificial sequence
  SiRNA target sequence
agtttgttagagaaaaaaaa

SEQ ID NO: 118450 - DNA, 20 bp, Artificial sequence
  SiRNA target sequence
gtttgttagagaaaaaaaat

SEQ ID NO: 118451 - DNA, 20 bp, Artificial sequence
  SiRNA target sequence
tttgttagagaaaaaaaata

SEQ ID NO: 118452 - DNA, 20 bp, Artificial sequence
  SiRNA target sequence
ttgttagagaaaaaaaatat

SEQ ID NO: 118453 - DNA, 20 bp, Artificial sequence
  SiRNA target sequence
tgttagagaaaaaaaatatc

SEQ ID NO: 118454 - DNA, 20 bp, Artificial sequence
  SiRNA target sequence
gttagagaaaaaaaatatcg

SEQ ID NO: 118455 - DNA, 20 bp, Artificial sequence
  SiRNA target sequence
ttagagaaaaaaaatatcga

SEQ ID NO: 118456 - DNA, 20 bp, Artificial sequence
  SiRNA target sequence
tagagaaaaaaaatatcgac

SEQ ID NO: 118457 - DNA, 20 bp, Artificial sequence
  SiRNA target sequence
agagaaaaaaaatatcgaca

SEQ ID NO: 118458 - DNA, 20 bp, Artificial sequence
  SiRNA target sequence
gagaaaaaaaatatcgacat

SEQ ID NO: 118459 - DNA, 20 bp, Artificial sequence
  SiRNA target sequence
agaaaaaaaatatcgacatt

SEQ ID NO: 118460 - DNA, 20 bp, Artificial sequence
  SiRNA target sequence
gaaaaaaaatatcgacattg

SEQ ID NO: 118461 - DNA, 20 bp, Artificial sequence
  SiRNA target sequence
aaaaaaaatatcgacattga

SEQ ID NO: 118462 - DNA, 20 bp, Artificial sequence
  SiRNA target sequence
aaaaaaatatcgacattgag

SEQ ID NO: 118463 - DNA, 20 bp, Artificial sequence
  SiRNA target sequence
aaaaaatatcgacattgaga

SEQ ID NO: 118464 - DNA, 20 bp, Artificial sequence
  SiRNA target sequence
aaaaatatcgacattgagat

SEQ ID NO: 118465 - DNA, 20 bp, Artificial sequence
  SiRNA target sequence
aaaatatcgacattgagata

SEQ ID NO: 118466 - DNA, 20 bp, Artificial sequence
  SiRNA target sequence
aaatatcgacattgagataa

SEQ ID NO: 118467 - DNA, 20 bp, Artificial sequence
  SiRNA target sequence
aatatcgacattgagataat

SEQ ID NO: 118468 - DNA, 20 bp, Artificial sequence
  SiRNA target sequence
atatcgacattgagataatt

SEQ ID NO: 118469 - DNA, 20 bp, Artificial sequence
  SiRNA target sequence
tatcgacattgagataatta

SEQ ID NO: 118470 - DNA, 20 bp, Artificial sequence
  SiRNA target sequence
atcgacattgagataattaa

SEQ ID NO: 118471 - DNA, 20 bp, Artificial sequence
  SiRNA target sequence
tcgacattgagataattaat

SEQ ID NO: 118472 - DNA, 20 bp, Artificial sequence
  SiRNA target sequence
cgacattgagataattaatc

SEQ ID NO: 118473 - DNA, 20 bp, Artificial sequence
  SiRNA target sequence
gacattgagataattaatct

SEQ ID NO: 118474 - DNA, 20 bp, Artificial sequence
  SiRNA target sequence
acattgagataattaatctt

SEQ ID NO: 118475 - DNA, 20 bp, Artificial sequence
  SiRNA target sequence
cattgagataattaatcttg

SEQ ID NO: 118476 - DNA, 20 bp, Artificial sequence
  SiRNA target sequence
attgagataattaatcttgt

SEQ ID NO: 118477 - DNA, 20 bp, Artificial sequence
  SiRNA target sequence
ttgagataattaatcttgtg

SEQ ID NO: 118478 - DNA, 20 bp, Artificial sequence
  SiRNA target sequence
tgagataattaatcttgtgt

SEQ ID NO: 118479 - DNA, 20 bp, Artificial sequence
  SiRNA target sequence
gagataattaatcttgtgtc

SEQ ID NO: 118480 - DNA, 20 bp, Artificial sequence
  SiRNA target sequence
agataattaatcttgtgtca

SEQ ID NO: 118481 - DNA, 20 bp, Artificial sequence
  SiRNA target sequence
gataattaatcttgtgtcaa

SEQ ID NO: 118482 - DNA, 20 bp, Artificial sequence
  SiRNA target sequence
ataattaatcttgtgtcaat

SEQ ID NO: 118483 - DNA, 20 bp, Artificial sequence
  SiRNA target sequence
taattaatcttgtgtcaata

SEQ ID NO: 118484 - DNA, 20 bp, Artificial sequence
  SiRNA target sequence
aattaatcttgtgtcaataa

SEQ ID NO: 118485 - DNA, 20 bp, Artificial sequence
  SiRNA target sequence
attaatcttgtgtcaataaa

SEQ ID NO: 118486 - DNA, 20 bp, Artificial sequence
  SiRNA target sequence
ttaatcttgtgtcaataaaa

SEQ ID NO: 118487 - DNA, 20 bp, Artificial sequence
  SiRNA target sequence
taatcttgtgtcaataaaac

SEQ ID NO: 118488 - DNA, 20 bp, Artificial sequence
  SiRNA target sequence
aatcttgtgtcaataaaacc

SEQ ID NO: 118489 - DNA, 20 bp, Artificial sequence
  SiRNA target sequence
atcttgtgtcaataaaacca

SEQ ID NO: 118490 - DNA, 20 bp, Artificial sequence
  SiRNA target sequence
tcttgtgtcaataaaaccaa

SEQ ID NO: 118491 - DNA, 20 bp, Artificial sequence
  SiRNA target sequence
cttgtgtcaataaaaccaat

SEQ ID NO: 118492 - DNA, 20 bp, Artificial sequence
  SiRNA target sequence
ttgtgtcaataaaaccaatt

SEQ ID NO: 118493 - DNA, 20 bp, Artificial sequence
  SiRNA target sequence
tgtgtcaataaaaccaattg

SEQ ID NO: 118494 - DNA, 20 bp, Artificial sequence
  SiRNA target sequence
gtgtcaataaaaccaattga

SEQ ID NO: 118495 - DNA, 20 bp, Artificial sequence
  SiRNA target sequence
tgtcaataaaaccaattgat

SEQ ID NO: 118496 - DNA, 20 bp, Artificial sequence
  SiRNA target sequence
gtcaataaaaccaattgatt

SEQ ID NO: 118497 - DNA, 20 bp, Artificial sequence
  SiRNA target sequence
tcaataaaaccaattgatta

SEQ ID NO: 118498 - DNA, 20 bp, Artificial sequence
  SiRNA target sequence
caataaaaccaattgattat

SEQ ID NO: 118499 - DNA, 20 bp, Artificial sequence
  SiRNA target sequence
aataaaaccaattgattatg

SEQ ID NO: 118500 - DNA, 20 bp, Artificial sequence
  SiRNA target sequence
ataaaaccaattgattatgt

SEQ ID NO: 118501 - DNA, 20 bp, Artificial sequence
  SiRNA target sequence
taaaaccaattgattatgtt

SEQ ID NO: 118502 - DNA, 20 bp, Artificial sequence
  SiRNA target sequence
aaaaccaattgattatgtta

SEQ ID NO: 118503 - DNA, 20 bp, Artificial sequence
  SiRNA target sequence
aaaccaattgattatgttac

SEQ ID NO: 118504 - DNA, 20 bp, Artificial sequence
  SiRNA target sequence
aaccaattgattatgttact

SEQ ID NO: 118505 - DNA, 20 bp, Artificial sequence
  SiRNA target sequence
accaattgattatgttacta

SEQ ID NO: 118506 - DNA, 20 bp, Artificial sequence
  SiRNA target sequence
ccaattgattatgttactat

SEQ ID NO: 118507 - DNA, 20 bp, Artificial sequence
  SiRNA target sequence
caattgattatgttactatt

SEQ ID NO: 118508 - DNA, 20 bp, Artificial sequence
  SiRNA target sequence
aattgattatgttactattg

SEQ ID NO: 118509 - DNA, 20 bp, Artificial sequence
  SiRNA target sequence
attgattatgttactattga

SEQ ID NO: 118510 - DNA, 20 bp, Artificial sequence
  SiRNA target sequence
ttgattatgttactattgaa

SEQ ID NO: 118511 - DNA, 20 bp, Artificial sequence
  SiRNA target sequence
tgattatgttactattgaaa

SEQ ID NO: 118512 - DNA, 20 bp, Artificial sequence
  SiRNA target sequence
gattatgttactattgaaat

SEQ ID NO: 118513 - DNA, 20 bp, Artificial sequence
  SiRNA target sequence
attatgttactattgaaata

SEQ ID NO: 118514 - DNA, 20 bp, Artificial sequence
  SiRNA target sequence
ttatgttactattgaaatat

SEQ ID NO: 118515 - DNA, 20 bp, Artificial sequence
  SiRNA target sequence
tatgttactattgaaatatc

SEQ ID NO: 118516 - DNA, 20 bp, Artificial sequence
  SiRNA target sequence
atgttactattgaaatatca

SEQ ID NO: 118517 - DNA, 20 bp, Artificial sequence
  SiRNA target sequence
tgttactattgaaatatcag

SEQ ID NO: 118518 - DNA, 20 bp, Artificial sequence
  SiRNA target sequence
gttactattgaaatatcagt

SEQ ID NO: 118519 - DNA, 20 bp, Artificial sequence
  SiRNA target sequence
ttactattgaaatatcagtc

SEQ ID NO: 118520 - DNA, 20 bp, Artificial sequence
  SiRNA target sequence
tactattgaaatatcagtca

SEQ ID NO: 118521 - DNA, 20 bp, Artificial sequence
  SiRNA target sequence
actattgaaatatcagtcaa

SEQ ID NO: 118522 - DNA, 20 bp, Artificial sequence
  SiRNA target sequence
ctattgaaatatcagtcaaa

SEQ ID NO: 118523 - DNA, 20 bp, Artificial sequence
  SiRNA target sequence
tattgaaatatcagtcaaaa

SEQ ID NO: 118524 - DNA, 20 bp, Artificial sequence
  SiRNA target sequence
attgaaatatcagtcaaaaa

SEQ ID NO: 118525 - DNA, 20 bp, Artificial sequence
  SiRNA target sequence
ttgaaatatcagtcaaaaaa

SEQ ID NO: 118526 - DNA, 20 bp, Artificial sequence
  SiRNA target sequence
tgaaatatcagtcaaaaaaa

SEQ ID NO: 118527 - DNA, 20 bp, Artificial sequence
  SiRNA target sequence
gaaatatcagtcaaaaaaac

SEQ ID NO: 118528 - DNA, 20 bp, Artificial sequence
  SiRNA target sequence
aaatatcagtcaaaaaaaca

SEQ ID NO: 118529 - DNA, 20 bp, Artificial sequence
  SiRNA target sequence
aatatcagtcaaaaaaacac

SEQ ID NO: 118530 - DNA, 20 bp, Artificial sequence
  SiRNA target sequence
atatcagtcaaaaaaacaca

SEQ ID NO: 118531 - DNA, 20 bp, Artificial sequence
  SiRNA target sequence
tatcagtcaaaaaaacacaa

SEQ ID NO: 118532 - DNA, 20 bp, Artificial sequence
  SiRNA target sequence
atcagtcaaaaaaacacaaa

SEQ ID NO: 118533 - DNA, 20 bp, Artificial sequence
  SiRNA target sequence
tcagtcaaaaaaacacaaaa

SEQ ID NO: 118534 - DNA, 20 bp, Artificial sequence
  SiRNA target sequence
cagtcaaaaaaacacaaaag

SEQ ID NO: 118535 - DNA, 20 bp, Artificial sequence
  SiRNA target sequence
agtcaaaaaaacacaaaagt

SEQ ID NO: 118536 - DNA, 20 bp, Artificial sequence
  SiRNA target sequence
gtcaaaaaaacacaaaagtt

SEQ ID NO: 118537 - DNA, 20 bp, Artificial sequence
  SiRNA target sequence
tcaaaaaaacacaaaagtta

SEQ ID NO: 118538 - DNA, 20 bp, Artificial sequence
  SiRNA target sequence
caaaaaaacacaaaagttag

SEQ ID NO: 118539 - DNA, 20 bp, Artificial sequence
  SiRNA target sequence
aaaaaaacacaaaagttagt

SEQ ID NO: 118540 - DNA, 20 bp, Artificial sequence
  SiRNA target sequence
aaaaaacacaaaagttagtg

SEQ ID NO: 118541 - DNA, 20 bp, Artificial sequence
  SiRNA target sequence
aaaaacacaaaagttagtga

SEQ ID NO: 118542 - DNA, 20 bp, Artificial sequence
  SiRNA target sequence
aaaacacaaaagttagtgat

SEQ ID NO: 118543 - DNA, 20 bp, Artificial sequence
  SiRNA target sequence
aaacacaaaagttagtgata

SEQ ID NO: 118544 - DNA, 20 bp, Artificial sequence
  SiRNA target sequence
aacacaaaagttagtgatag

SEQ ID NO: 118545 - DNA, 20 bp, Artificial sequence
  SiRNA target sequence
acacaaaagttagtgatagt

SEQ ID NO: 118546 - DNA, 20 bp, Artificial sequence
  SiRNA target sequence
cacaaaagttagtgatagtt

SEQ ID NO: 118547 - DNA, 20 bp, Artificial sequence
  SiRNA target sequence
acaaaagttagtgatagttg

SEQ ID NO: 118548 - DNA, 20 bp, Artificial sequence
  SiRNA target sequence
caaaagttagtgatagttga

SEQ ID NO: 118549 - DNA, 20 bp, Artificial sequence
  SiRNA target sequence
aaaagttagtgatagttgat

SEQ ID NO: 118550 - DNA, 20 bp, Artificial sequence
  SiRNA target sequence
aaagttagtgatagttgatt

SEQ ID NO: 118551 - DNA, 20 bp, Artificial sequence
  SiRNA target sequence
aagttagtgatagttgattt

SEQ ID NO: 118552 - DNA, 20 bp, Artificial sequence
  SiRNA target sequence
agttagtgatagttgatttt

SEQ ID NO: 118553 - DNA, 20 bp, Artificial sequence
  SiRNA target sequence
gttagtgatagttgattttg

SEQ ID NO: 118554 - DNA, 20 bp, Artificial sequence
  SiRNA target sequence
ttagtgatagttgattttgc

SEQ ID NO: 118555 - DNA, 20 bp, Artificial sequence
  SiRNA target sequence
tagtgatagttgattttgca

SEQ ID NO: 118556 - DNA, 20 bp, Artificial sequence
  SiRNA target sequence
agtgatagttgattttgcat

SEQ ID NO: 118557 - DNA, 20 bp, Artificial sequence
  SiRNA target sequence
gtgatagttgattttgcata

SEQ ID NO: 118558 - DNA, 20 bp, Artificial sequence
  SiRNA target sequence
tgatagttgattttgcatat

SEQ ID NO: 118559 - DNA, 20 bp, Artificial sequence
  SiRNA target sequence
gatagttgattttgcatatc

SEQ ID NO: 118560 - DNA, 20 bp, Artificial sequence
  SiRNA target sequence
atagttgattttgcatatcc

SEQ ID NO: 118561 - DNA, 20 bp, Artificial sequence
  SiRNA target sequence
tagttgattttgcatatcct

SEQ ID NO: 118562 - DNA, 20 bp, Artificial sequence
  SiRNA target sequence
agttgattttgcatatccta

SEQ ID NO: 118563 - DNA, 20 bp, Artificial sequence
  SiRNA target sequence
gttgattttgcatatcctac

SEQ ID NO: 118564 - DNA, 20 bp, Artificial sequence
  SiRNA target sequence
ttgattttgcatatcctact

SEQ ID NO: 118565 - DNA, 20 bp, Artificial sequence
  SiRNA target sequence
tgattttgcatatcctactt

SEQ ID NO: 118566 - DNA, 20 bp, Artificial sequence
  SiRNA target sequence
gattttgcatatcctacttt

SEQ ID NO: 118567 - DNA, 20 bp, Artificial sequence
  SiRNA target sequence
attttgcatatcctactttc

SEQ ID NO: 118568 - DNA, 20 bp, Artificial sequence
  SiRNA target sequence
ttttgcatatcctactttca

SEQ ID NO: 118569 - DNA, 20 bp, Artificial sequence
  SiRNA target sequence
tttgcatatcctactttcaa

SEQ ID NO: 118570 - DNA, 20 bp, Artificial sequence
  SiRNA target sequence
ttgcatatcctactttcaat

SEQ ID NO: 118571 - DNA, 20 bp, Artificial sequence
  SiRNA target sequence
tgcatatcctactttcaata

SEQ ID NO: 118572 - DNA, 20 bp, Artificial sequence
  SiRNA target sequence
gcatatcctactttcaatat

SEQ ID NO: 118573 - DNA, 20 bp, Artificial sequence
  SiRNA target sequence
catatcctactttcaatatt

SEQ ID NO: 118574 - DNA, 20 bp, Artificial sequence
  SiRNA target sequence
atatcctactttcaatattg

SEQ ID NO: 118575 - DNA, 20 bp, Artificial sequence
  SiRNA target sequence
tatcctactttcaatattgc

SEQ ID NO: 118576 - DNA, 20 bp, Artificial sequence
  SiRNA target sequence
atcctactttcaatattgcg

SEQ ID NO: 118577 - DNA, 20 bp, Artificial sequence
  SiRNA target sequence
tcctactttcaatattgcga

SEQ ID NO: 118578 - DNA, 20 bp, Artificial sequence
  SiRNA target sequence
cctactttcaatattgcgag

SEQ ID NO: 118579 - DNA, 20 bp, Artificial sequence
  SiRNA target sequence
ctactttcaatattgcgagt

SEQ ID NO: 118580 - DNA, 20 bp, Artificial sequence
  SiRNA target sequence
tactttcaatattgcgagtg

SEQ ID NO: 118581 - DNA, 20 bp, Artificial sequence
  SiRNA target sequence
actttcaatattgcgagtga

SEQ ID NO: 118582 - DNA, 20 bp, Artificial sequence
  SiRNA target sequence
ctttcaatattgcgagtgaa

SEQ ID NO: 118583 - DNA, 20 bp, Artificial sequence
  SiRNA target sequence
tttcaatattgcgagtgaaa

SEQ ID NO: 118584 - DNA, 20 bp, Artificial sequence
  SiRNA target sequence
ttcaatattgcgagtgaaat

SEQ ID NO: 118585 - DNA, 20 bp, Artificial sequence
  SiRNA target sequence
tcaatattgcgagtgaaata

SEQ ID NO: 118586 - DNA, 20 bp, Artificial sequence
  SiRNA target sequence
caatattgcgagtgaaatag

SEQ ID NO: 118587 - DNA, 20 bp, Artificial sequence
  SiRNA target sequence
aatattgcgagtgaaatagc

SEQ ID NO: 118588 - DNA, 20 bp, Artificial sequence
  SiRNA target sequence
atattgcgagtgaaatagct

SEQ ID NO: 118589 - DNA, 20 bp, Artificial sequence
  SiRNA target sequence
tattgcgagtgaaatagctg

SEQ ID NO: 118590 - DNA, 20 bp, Artificial sequence
  SiRNA target sequence
attgcgagtgaaatagctgc

SEQ ID NO: 118591 - DNA, 20 bp, Artificial sequence
  SiRNA target sequence
ttgcgagtgaaatagctgcg

SEQ ID NO: 118592 - DNA, 20 bp, Artificial sequence
  SiRNA target sequence
tgcgagtgaaatagctgcgc

SEQ ID NO: 118593 - DNA, 20 bp, Artificial sequence
  SiRNA target sequence
gcgagtgaaatagctgcgca

SEQ ID NO: 118594 - DNA, 20 bp, Artificial sequence
  SiRNA target sequence
cgagtgaaatagctgcgcac

SEQ ID NO: 118595 - DNA, 20 bp, Artificial sequence
  SiRNA target sequence
gagtgaaatagctgcgcact

SEQ ID NO: 118596 - DNA, 20 bp, Artificial sequence
  SiRNA target sequence
agtgaaatagctgcgcactt

SEQ ID NO: 118597 - DNA, 20 bp, Artificial sequence
  SiRNA target sequence
gtgaaatagctgcgcacttt

SEQ ID NO: 118598 - DNA, 20 bp, Artificial sequence
  SiRNA target sequence
tgaaatagctgcgcactttt

SEQ ID NO: 118599 - DNA, 20 bp, Artificial sequence
  SiRNA target sequence
gaaatagctgcgcactttta

SEQ ID NO: 118600 - DNA, 20 bp, Artificial sequence
  SiRNA target sequence
aaatagctgcgcacttttac

SEQ ID NO: 118601 - DNA, 20 bp, Artificial sequence
  SiRNA target sequence
aatagctgcgcacttttacg

SEQ ID NO: 118602 - DNA, 20 bp, Artificial sequence
  SiRNA target sequence
atagctgcgcacttttacga

SEQ ID NO: 118603 - DNA, 20 bp, Artificial sequence
  SiRNA target sequence
tagctgcgcacttttacgaa

SEQ ID NO: 118604 - DNA, 20 bp, Artificial sequence
  SiRNA target sequence
agctgcgcacttttacgaaa

SEQ ID NO: 118605 - DNA, 20 bp, Artificial sequence
  SiRNA target sequence
gctgcgcacttttacgaaaa

SEQ ID NO: 118606 - DNA, 20 bp, Artificial sequence
  SiRNA target sequence
ctgcgcacttttacgaaaaa

SEQ ID NO: 118607 - DNA, 20 bp, Artificial sequence
  SiRNA target sequence
tgcgcacttttacgaaaaat

SEQ ID NO: 118608 - DNA, 20 bp, Artificial sequence
  SiRNA target sequence
gcgcacttttacgaaaaatt

SEQ ID NO: 118609 - DNA, 20 bp, Artificial sequence
  SiRNA target sequence
cgcacttttacgaaaaattt

SEQ ID NO: 118610 - DNA, 20 bp, Artificial sequence
  SiRNA target sequence
gcacttttacgaaaaattta

SEQ ID NO: 118611 - DNA, 20 bp, Artificial sequence
  SiRNA target sequence
cacttttacgaaaaatttaa

SEQ ID NO: 118612 - DNA, 20 bp, Artificial sequence
  SiRNA target sequence
acttttacgaaaaatttaaa

SEQ ID NO: 118613 - DNA, 20 bp, Artificial sequence
  SiRNA target sequence
cttttacgaaaaatttaaag

SEQ ID NO: 118614 - DNA, 20 bp, Artificial sequence
  SiRNA target sequence
ttttacgaaaaatttaaaga

SEQ ID NO: 118615 - DNA, 20 bp, Artificial sequence
  SiRNA target sequence
tttacgaaaaatttaaagat

SEQ ID NO: 118616 - DNA, 20 bp, Artificial sequence
  SiRNA target sequence
ttacgaaaaatttaaagata

SEQ ID NO: 118617 - DNA, 20 bp, Artificial sequence
  SiRNA target sequence
tacgaaaaatttaaagatat

SEQ ID NO: 118618 - DNA, 20 bp, Artificial sequence
  SiRNA target sequence
acgaaaaatttaaagatata

SEQ ID NO: 118619 - DNA, 20 bp, Artificial sequence
  SiRNA target sequence
cgaaaaatttaaagatataa

SEQ ID NO: 118620 - DNA, 20 bp, Artificial sequence
  SiRNA target sequence
gaaaaatttaaagatataaa

SEQ ID NO: 118621 - DNA, 20 bp, Artificial sequence
  SiRNA target sequence
aaaaatttaaagatataaaa

SEQ ID NO: 118622 - DNA, 20 bp, Artificial sequence
  SiRNA target sequence
aaaatttaaagatataaaaa

SEQ ID NO: 118623 - DNA, 20 bp, Artificial sequence
  SiRNA target sequence
aaatttaaagatataaaaat

SEQ ID NO: 118624 - DNA, 20 bp, Artificial sequence
  SiRNA target sequence
aatttaaagatataaaaatt

SEQ ID NO: 118625 - DNA, 20 bp, Artificial sequence
  SiRNA target sequence
atttaaagatataaaaatta

SEQ ID NO: 118626 - DNA, 20 bp, Artificial sequence
  SiRNA target sequence
tttaaagatataaaaattat

SEQ ID NO: 118627 - DNA, 20 bp, Artificial sequence
  SiRNA target sequence
ttaaagatataaaaattatg

SEQ ID NO: 118628 - DNA, 20 bp, Artificial sequence
  SiRNA target sequence
taaagatataaaaattatgc

SEQ ID NO: 118629 - DNA, 20 bp, Artificial sequence
  SiRNA target sequence
aaagatataaaaattatgcg

SEQ ID NO: 118630 - DNA, 20 bp, Artificial sequence
  SiRNA target sequence
aagatataaaaattatgcgt

SEQ ID NO: 118631 - DNA, 20 bp, Artificial sequence
  SiRNA target sequence
agatataaaaattatgcgtg

SEQ ID NO: 118632 - DNA, 20 bp, Artificial sequence
  SiRNA target sequence
gatataaaaattatgcgtgt

SEQ ID NO: 118633 - DNA, 20 bp, Artificial sequence
  SiRNA target sequence
atataaaaattatgcgtgtt

SEQ ID NO: 118634 - DNA, 20 bp, Artificial sequence
  SiRNA target sequence
tataaaaattatgcgtgttc

SEQ ID NO: 118635 - DNA, 20 bp, Artificial sequence
  SiRNA target sequence
ataaaaattatgcgtgttct

SEQ ID NO: 118636 - DNA, 20 bp, Artificial sequence
  SiRNA target sequence
taaaaattatgcgtgttctt

SEQ ID NO: 118637 - DNA, 20 bp, Artificial sequence
  SiRNA target sequence
aaaaattatgcgtgttcttg

SEQ ID NO: 118638 - DNA, 20 bp, Artificial sequence
  SiRNA target sequence
aaaattatgcgtgttcttgc

SEQ ID NO: 118639 - DNA, 20 bp, Artificial sequence
  SiRNA target sequence
aaattatgcgtgttcttgcg

SEQ ID NO: 118640 - DNA, 20 bp, Artificial sequence
  SiRNA target sequence
aattatgcgtgttcttgcgc

SEQ ID NO: 118641 - DNA, 20 bp, Artificial sequence
  SiRNA target sequence
attatgcgtgttcttgcgca

SEQ ID NO: 118642 - DNA, 20 bp, Artificial sequence
  SiRNA target sequence
ttatgcgtgttcttgcgcaa

SEQ ID NO: 118643 - DNA, 20 bp, Artificial sequence
  SiRNA target sequence
tatgcgtgttcttgcgcaag

SEQ ID NO: 118644 - DNA, 20 bp, Artificial sequence
  SiRNA target sequence
atgcgtgttcttgcgcaaga

SEQ ID NO: 118645 - DNA, 20 bp, Artificial sequence
  SiRNA target sequence
tgcgtgttcttgcgcaagat

SEQ ID NO: 118646 - DNA, 20 bp, Artificial sequence
  SiRNA target sequence
gcgtgttcttgcgcaagata

SEQ ID NO: 118647 - DNA, 20 bp, Artificial sequence
  SiRNA target sequence
cgtgttcttgcgcaagatat

SEQ ID NO: 118648 - DNA, 20 bp, Artificial sequence
  SiRNA target sequence
gtgttcttgcgcaagatatt

SEQ ID NO: 118649 - DNA, 20 bp, Artificial sequence
  SiRNA target sequence
tgttcttgcgcaagatattc

SEQ ID NO: 118650 - DNA, 20 bp, Artificial sequence
  SiRNA target sequence
gttcttgcgcaagatattcc

SEQ ID NO: 118651 - DNA, 20 bp, Artificial sequence
  SiRNA target sequence
ttcttgcgcaagatattcct

SEQ ID NO: 118652 - DNA, 20 bp, Artificial sequence
  SiRNA target sequence
tcttgcgcaagatattccta

SEQ ID NO: 118653 - DNA, 20 bp, Artificial sequence
  SiRNA target sequence
cttgcgcaagatattcctac

SEQ ID NO: 118654 - DNA, 20 bp, Artificial sequence
  SiRNA target sequence
ttgcgcaagatattcctaca

SEQ ID NO: 118655 - DNA, 20 bp, Artificial sequence
  SiRNA target sequence
tgcgcaagatattcctacac

SEQ ID NO: 118656 - DNA, 20 bp, Artificial sequence
  SiRNA target sequence
gcgcaagatattcctacacc

SEQ ID NO: 118657 - DNA, 20 bp, Artificial sequence
  SiRNA target sequence
cgcaagatattcctacaccg

SEQ ID NO: 118658 - DNA, 20 bp, Artificial sequence
  SiRNA target sequence
gcaagatattcctacaccgt

SEQ ID NO: 118659 - DNA, 20 bp, Artificial sequence
  SiRNA target sequence
caagatattcctacaccgta

SEQ ID NO: 118660 - DNA, 20 bp, Artificial sequence
  SiRNA target sequence
aagatattcctacaccgtat

SEQ ID NO: 118661 - DNA, 20 bp, Artificial sequence
  SiRNA target sequence
agatattcctacaccgtatg

SEQ ID NO: 118662 - DNA, 20 bp, Artificial sequence
  SiRNA target sequence
gatattcctacaccgtatgc

SEQ ID NO: 118663 - DNA, 20 bp, Artificial sequence
  SiRNA target sequence
atattcctacaccgtatgca

SEQ ID NO: 118664 - DNA, 20 bp, Artificial sequence
  SiRNA target sequence
tattcctacaccgtatgcac

SEQ ID NO: 118665 - DNA, 20 bp, Artificial sequence
  SiRNA target sequence
attcctacaccgtatgcact

SEQ ID NO: 118666 - DNA, 20 bp, Artificial sequence
  SiRNA target sequence
ttcctacaccgtatgcactt

SEQ ID NO: 118667 - DNA, 20 bp, Artificial sequence
  SiRNA target sequence
tcctacaccgtatgcactta

SEQ ID NO: 118668 - DNA, 20 bp, Artificial sequence
  SiRNA target sequence
cctacaccgtatgcacttaa

SEQ ID NO: 118669 - DNA, 20 bp, Artificial sequence
  SiRNA target sequence
ctacaccgtatgcacttaat

SEQ ID NO: 118670 - DNA, 20 bp, Artificial sequence
  SiRNA target sequence
tacaccgtatgcacttaatc

SEQ ID NO: 118671 - DNA, 20 bp, Artificial sequence
  SiRNA target sequence
acaccgtatgcacttaatct

SEQ ID NO: 118672 - DNA, 20 bp, Artificial sequence
  SiRNA target sequence
caccgtatgcacttaatctt

SEQ ID NO: 118673 - DNA, 20 bp, Artificial sequence
  SiRNA target sequence
accgtatgcacttaatcttg

SEQ ID NO: 118674 - DNA, 20 bp, Artificial sequence
  SiRNA target sequence
ccgtatgcacttaatcttga

SEQ ID NO: 118675 - DNA, 20 bp, Artificial sequence
  SiRNA target sequence
cgtatgcacttaatcttgaa

SEQ ID NO: 118676 - DNA, 20 bp, Artificial sequence
  SiRNA target sequence
gtatgcacttaatcttgaaa

SEQ ID NO: 118677 - DNA, 20 bp, Artificial sequence
  SiRNA target sequence
tatgcacttaatcttgaaaa

SEQ ID NO: 118678 - DNA, 20 bp, Artificial sequence
  SiRNA target sequence
atgcacttaatcttgaaaaa

SEQ ID NO: 118679 - DNA, 20 bp, Artificial sequence
  SiRNA target sequence
tgcacttaatcttgaaaaaa

SEQ ID NO: 118680 - DNA, 20 bp, Artificial sequence
  SiRNA target sequence
gcacttaatcttgaaaaaat

SEQ ID NO: 118681 - DNA, 20 bp, Artificial sequence
  SiRNA target sequence
cacttaatcttgaaaaaatg

SEQ ID NO: 118682 - DNA, 20 bp, Artificial sequence
  SiRNA target sequence
acttaatcttgaaaaaatgt

SEQ ID NO: 118683 - DNA, 20 bp, Artificial sequence
  SiRNA target sequence
cttaatcttgaaaaaatgtc

SEQ ID NO: 118684 - DNA, 20 bp, Artificial sequence
  SiRNA target sequence
ttaatcttgaaaaaatgtct

SEQ ID NO: 118685 - DNA, 20 bp, Artificial sequence
  SiRNA target sequence
taatcttgaaaaaatgtctt

SEQ ID NO: 118686 - DNA, 20 bp, Artificial sequence
  SiRNA target sequence
aatcttgaaaaaatgtctta

SEQ ID NO: 118687 - DNA, 20 bp, Artificial sequence
  SiRNA target sequence
atcttgaaaaaatgtcttat

SEQ ID NO: 118688 - DNA, 20 bp, Artificial sequence
  SiRNA target sequence
tcttgaaaaaatgtcttatc

SEQ ID NO: 118689 - DNA, 20 bp, Artificial sequence
  SiRNA target sequence
cttgaaaaaatgtcttatcc

SEQ ID NO: 118690 - DNA, 20 bp, Artificial sequence
  SiRNA target sequence
ttgaaaaaatgtcttatccg

SEQ ID NO: 118691 - DNA, 20 bp, Artificial sequence
  SiRNA target sequence
tgaaaaaatgtcttatccga

SEQ ID NO: 118692 - DNA, 20 bp, Artificial sequence
  SiRNA target sequence
gaaaaaatgtcttatccgac

SEQ ID NO: 118693 - DNA, 20 bp, Artificial sequence
  SiRNA target sequence
aaaaaatgtcttatccgaca

SEQ ID NO: 118694 - DNA, 20 bp, Artificial sequence
  SiRNA target sequence
aaaaatgtcttatccgacat

SEQ ID NO: 118695 - DNA, 20 bp, Artificial sequence
  SiRNA target sequence
aaaatgtcttatccgacatg

SEQ ID NO: 118696 - DNA, 20 bp, Artificial sequence
  SiRNA target sequence
aaatgtcttatccgacatgc

SEQ ID NO: 118697 - DNA, 20 bp, Artificial sequence
  SiRNA target sequence
aatgtcttatccgacatgca

SEQ ID NO: 118698 - DNA, 20 bp, Artificial sequence
  SiRNA target sequence
atgtcttatccgacatgcaa

SEQ ID NO: 118699 - DNA, 20 bp, Artificial sequence
  SiRNA target sequence
tgtcttatccgacatgcaat

SEQ ID NO: 118700 - DNA, 20 bp, Artificial sequence
  SiRNA target sequence
gtcttatccgacatgcaatg

SEQ ID NO: 118701 - DNA, 20 bp, Artificial sequence
  SiRNA target sequence
tcttatccgacatgcaatga

SEQ ID NO: 118702 - DNA, 20 bp, Artificial sequence
  SiRNA target sequence
cttatccgacatgcaatgat

SEQ ID NO: 118703 - DNA, 20 bp, Artificial sequence
  SiRNA target sequence
ttatccgacatgcaatgata

SEQ ID NO: 118704 - DNA, 20 bp, Artificial sequence
  SiRNA target sequence
tatccgacatgcaatgatat

SEQ ID NO: 118705 - DNA, 20 bp, Artificial sequence
  SiRNA target sequence
atccgacatgcaatgatatt

SEQ ID NO: 118706 - DNA, 20 bp, Artificial sequence
  SiRNA target sequence
tccgacatgcaatgatattg

SEQ ID NO: 118707 - DNA, 20 bp, Artificial sequence
  SiRNA target sequence
ccgacatgcaatgatattgt

SEQ ID NO: 118708 - DNA, 20 bp, Artificial sequence
  SiRNA target sequence
cgacatgcaatgatattgta

SEQ ID NO: 118709 - DNA, 20 bp, Artificial sequence
  SiRNA target sequence
gacatgcaatgatattgtaa

SEQ ID NO: 118710 - DNA, 20 bp, Artificial sequence
  SiRNA target sequence
acatgcaatgatattgtaaa

SEQ ID NO: 118711 - DNA, 20 bp, Artificial sequence
  SiRNA target sequence
catgcaatgatattgtaaat

SEQ ID NO: 118712 - DNA, 20 bp, Artificial sequence
  SiRNA target sequence
atgcaatgatattgtaaatg

SEQ ID NO: 118713 - DNA, 20 bp, Artificial sequence
  SiRNA target sequence
tgcaatgatattgtaaatgc

SEQ ID NO: 118714 - DNA, 20 bp, Artificial sequence
  SiRNA target sequence
gcaatgatattgtaaatgct

SEQ ID NO: 118715 - DNA, 20 bp, Artificial sequence
  SiRNA target sequence
caatgatattgtaaatgctg

SEQ ID NO: 118716 - DNA, 20 bp, Artificial sequence
  SiRNA target sequence
aatgatattgtaaatgctgt

SEQ ID NO: 118717 - DNA, 20 bp, Artificial sequence
  SiRNA target sequence
atgatattgtaaatgctgtt

SEQ ID NO: 118718 - DNA, 20 bp, Artificial sequence
  SiRNA target sequence
tgatattgtaaatgctgtta

SEQ ID NO: 118719 - DNA, 20 bp, Artificial sequence
  SiRNA target sequence
gatattgtaaatgctgttac

SEQ ID NO: 118720 - DNA, 20 bp, Artificial sequence
  SiRNA target sequence
atattgtaaatgctgttaca

SEQ ID NO: 118721 - DNA, 20 bp, Artificial sequence
  SiRNA target sequence
tattgtaaatgctgttacaa

SEQ ID NO: 118722 - DNA, 20 bp, Artificial sequence
  SiRNA target sequence
attgtaaatgctgttacaaa

SEQ ID NO: 118723 - DNA, 20 bp, Artificial sequence
  SiRNA target sequence
ttgtaaatgctgttacaaaa

SEQ ID NO: 118724 - DNA, 20 bp, Artificial sequence
  SiRNA target sequence
tgtaaatgctgttacaaaaa

SEQ ID NO: 118725 - DNA, 20 bp, Artificial sequence
  SiRNA target sequence
gtaaatgctgttacaaaaat

SEQ ID NO: 118726 - DNA, 20 bp, Artificial sequence
  SiRNA target sequence
taaatgctgttacaaaaata

SEQ ID NO: 118727 - DNA, 20 bp, Artificial sequence
  SiRNA target sequence
aaatgctgttacaaaaataa

SEQ ID NO: 118728 - DNA, 20 bp, Artificial sequence
  SiRNA target sequence
aatgctgttacaaaaataaa

SEQ ID NO: 118729 - DNA, 20 bp, Artificial sequence
  SiRNA target sequence
atgctgttacaaaaataaat

SEQ ID NO: 118730 - DNA, 20 bp, Artificial sequence
  SiRNA target sequence
tgctgttacaaaaataaatt

SEQ ID NO: 118731 - DNA, 20 bp, Artificial sequence
  SiRNA target sequence
gctgttacaaaaataaattc

SEQ ID NO: 118732 - DNA, 20 bp, Artificial sequence
  SiRNA target sequence
ctgttacaaaaataaattca

SEQ ID NO: 118733 - DNA, 20 bp, Artificial sequence
  SiRNA target sequence
tgttacaaaaataaattcat

SEQ ID NO: 118734 - DNA, 20 bp, Artificial sequence
  SiRNA target sequence
gttacaaaaataaattcata

SEQ ID NO: 118735 - DNA, 20 bp, Artificial sequence
  SiRNA target sequence
ttacaaaaataaattcatag

SEQ ID NO: 118736 - DNA, 21 bp, Artificial sequence
  SiRNA target sequence
atgatagaaattcgcgatctt

SEQ ID NO: 118737 - DNA, 21 bp, Artificial sequence
  SiRNA target sequence
tgatagaaattcgcgatctta

SEQ ID NO: 118738 - DNA, 21 bp, Artificial sequence
  SiRNA target sequence
gatagaaattcgcgatcttat

SEQ ID NO: 118739 - DNA, 21 bp, Artificial sequence
  SiRNA target sequence
atagaaattcgcgatcttata

SEQ ID NO: 118740 - DNA, 21 bp, Artificial sequence
  SiRNA target sequence
tagaaattcgcgatcttataa

SEQ ID NO: 118741 - DNA, 21 bp, Artificial sequence
  SiRNA target sequence
agaaattcgcgatcttataaa

SEQ ID NO: 118742 - DNA, 21 bp, Artificial sequence
  SiRNA target sequence
gaaattcgcgatcttataaat

SEQ ID NO: 118743 - DNA, 21 bp, Artificial sequence
  SiRNA target sequence
aaattcgcgatcttataaatc

SEQ ID NO: 118744 - DNA, 21 bp, Artificial sequence
  SiRNA target sequence
aattcgcgatcttataaatca

SEQ ID NO: 118745 - DNA, 21 bp, Artificial sequence
  SiRNA target sequence
attcgcgatcttataaatcaa

SEQ ID NO: 118746 - DNA, 21 bp, Artificial sequence
  SiRNA target sequence
ttcgcgatcttataaatcaag

SEQ ID NO: 118747 - DNA, 21 bp, Artificial sequence
  SiRNA target sequence
tcgcgatcttataaatcaagc

SEQ ID NO: 118748 - DNA, 21 bp, Artificial sequence
  SiRNA target sequence
cgcgatcttataaatcaagca

SEQ ID NO: 118749 - DNA, 21 bp, Artificial sequence
  SiRNA target sequence
gcgatcttataaatcaagcat

SEQ ID NO: 118750 - DNA, 21 bp, Artificial sequence
  SiRNA target sequence
cgatcttataaatcaagcatt

SEQ ID NO: 118751 - DNA, 21 bp, Artificial sequence
  SiRNA target sequence
gatcttataaatcaagcattg

SEQ ID NO: 118752 - DNA, 21 bp, Artificial sequence
  SiRNA target sequence
atcttataaatcaagcattgg

SEQ ID NO: 118753 - DNA, 21 bp, Artificial sequence
  SiRNA target sequence
tcttataaatcaagcattgga

SEQ ID NO: 118754 - DNA, 21 bp, Artificial sequence
  SiRNA target sequence
cttataaatcaagcattggat

SEQ ID NO: 118755 - DNA, 21 bp, Artificial sequence
  SiRNA target sequence
ttataaatcaagcattggatg

SEQ ID NO: 118756 - DNA, 21 bp, Artificial sequence
  SiRNA target sequence
tataaatcaagcattggatga

SEQ ID NO: 118757 - DNA, 21 bp, Artificial sequence
  SiRNA target sequence
ataaatcaagcattggatgag

SEQ ID NO: 118758 - DNA, 21 bp, Artificial sequence
  SiRNA target sequence
taaatcaagcattggatgagg

SEQ ID NO: 118759 - DNA, 21 bp, Artificial sequence
  SiRNA target sequence
aaatcaagcattggatgagga

SEQ ID NO: 118760 - DNA, 21 bp, Artificial sequence
  SiRNA target sequence
aatcaagcattggatgaggaa

SEQ ID NO: 118761 - DNA, 21 bp, Artificial sequence
  SiRNA target sequence
atcaagcattggatgaggaaa

SEQ ID NO: 118762 - DNA, 21 bp, Artificial sequence
  SiRNA target sequence
tcaagcattggatgaggaaat

SEQ ID NO: 118763 - DNA, 21 bp, Artificial sequence
  SiRNA target sequence
caagcattggatgaggaaatg

SEQ ID NO: 118764 - DNA, 21 bp, Artificial sequence
  SiRNA target sequence
aagcattggatgaggaaatgg

SEQ ID NO: 118765 - DNA, 21 bp, Artificial sequence
  SiRNA target sequence
agcattggatgaggaaatggg

SEQ ID NO: 118766 - DNA, 21 bp, Artificial sequence
  SiRNA target sequence
gcattggatgaggaaatggga

SEQ ID NO: 118767 - DNA, 21 bp, Artificial sequence
  SiRNA target sequence
cattggatgaggaaatgggaa

SEQ ID NO: 118768 - DNA, 21 bp, Artificial sequence
  SiRNA target sequence
attggatgaggaaatgggaat

SEQ ID NO: 118769 - DNA, 21 bp, Artificial sequence
  SiRNA target sequence
ttggatgaggaaatgggaatg

SEQ ID NO: 118770 - DNA, 21 bp, Artificial sequence
  SiRNA target sequence
tggatgaggaaatgggaatgg

SEQ ID NO: 118771 - DNA, 21 bp, Artificial sequence
  SiRNA target sequence
ggatgaggaaatgggaatgga

SEQ ID NO: 118772 - DNA, 21 bp, Artificial sequence
  SiRNA target sequence
gatgaggaaatgggaatggat

SEQ ID NO: 118773 - DNA, 21 bp, Artificial sequence
  SiRNA target sequence
atgaggaaatgggaatggatc

SEQ ID NO: 118774 - DNA, 21 bp, Artificial sequence
  SiRNA target sequence
tgaggaaatgggaatggatca

SEQ ID NO: 118775 - DNA, 21 bp, Artificial sequence
  SiRNA target sequence
gaggaaatgggaatggatcat

SEQ ID NO: 118776 - DNA, 21 bp, Artificial sequence
  SiRNA target sequence
aggaaatgggaatggatcata

SEQ ID NO: 118777 - DNA, 21 bp, Artificial sequence
  SiRNA target sequence
ggaaatgggaatggatcataa

SEQ ID NO: 118778 - DNA, 21 bp, Artificial sequence
  SiRNA target sequence
gaaatgggaatggatcataat

SEQ ID NO: 118779 - DNA, 21 bp, Artificial sequence
  SiRNA target sequence
aaatgggaatggatcataatg

SEQ ID NO: 118780 - DNA, 21 bp, Artificial sequence
  SiRNA target sequence
aatgggaatggatcataatgt

SEQ ID NO: 118781 - DNA, 21 bp, Artificial sequence
  SiRNA target sequence
atgggaatggatcataatgta

SEQ ID NO: 118782 - DNA, 21 bp, Artificial sequence
  SiRNA target sequence
tgggaatggatcataatgtat

SEQ ID NO: 118783 - DNA, 21 bp, Artificial sequence
  SiRNA target sequence
gggaatggatcataatgtata

SEQ ID NO: 118784 - DNA, 21 bp, Artificial sequence
  SiRNA target sequence
ggaatggatcataatgtatat

SEQ ID NO: 118785 - DNA, 21 bp, Artificial sequence
  SiRNA target sequence
gaatggatcataatgtatata

SEQ ID NO: 118786 - DNA, 21 bp, Artificial sequence
  SiRNA target sequence
aatggatcataatgtatatat

SEQ ID NO: 118787 - DNA, 21 bp, Artificial sequence
  SiRNA target sequence
atggatcataatgtatatata

SEQ ID NO: 118788 - DNA, 21 bp, Artificial sequence
  SiRNA target sequence
tggatcataatgtatatataa

SEQ ID NO: 118789 - DNA, 21 bp, Artificial sequence
  SiRNA target sequence
ggatcataatgtatatataat

SEQ ID NO: 118790 - DNA, 21 bp, Artificial sequence
  SiRNA target sequence
gatcataatgtatatataata

SEQ ID NO: 118791 - DNA, 21 bp, Artificial sequence
  SiRNA target sequence
atcataatgtatatataatag

SEQ ID NO: 118792 - DNA, 21 bp, Artificial sequence
  SiRNA target sequence
tcataatgtatatataatagg

SEQ ID NO: 118793 - DNA, 21 bp, Artificial sequence
  SiRNA target sequence
cataatgtatatataatagga

SEQ ID NO: 118794 - DNA, 21 bp, Artificial sequence
  SiRNA target sequence
ataatgtatatataataggag

SEQ ID NO: 118795 - DNA, 21 bp, Artificial sequence
  SiRNA target sequence
taatgtatatataataggaga

SEQ ID NO: 118796 - DNA, 21 bp, Artificial sequence
  SiRNA target sequence
aatgtatatataataggagaa

SEQ ID NO: 118797 - DNA, 21 bp, Artificial sequence
  SiRNA target sequence
atgtatatataataggagaag

SEQ ID NO: 118798 - DNA, 21 bp, Artificial sequence
  SiRNA target sequence
tgtatatataataggagaaga

SEQ ID NO: 118799 - DNA, 21 bp, Artificial sequence
  SiRNA target sequence
gtatatataataggagaagaa

SEQ ID NO: 118800 - DNA, 21 bp, Artificial sequence
  SiRNA target sequence
tatatataataggagaagaag

SEQ ID NO: 118801 - DNA, 21 bp, Artificial sequence
  SiRNA target sequence
atatataataggagaagaagt

SEQ ID NO: 118802 - DNA, 21 bp, Artificial sequence
  SiRNA target sequence
tatataataggagaagaagta

SEQ ID NO: 118803 - DNA, 21 bp, Artificial sequence
  SiRNA target sequence
atataataggagaagaagtag

SEQ ID NO: 118804 - DNA, 21 bp, Artificial sequence
  SiRNA target sequence
tataataggagaagaagtagg

SEQ ID NO: 118805 - DNA, 21 bp, Artificial sequence
  SiRNA target sequence
ataataggagaagaagtaggc

SEQ ID NO: 118806 - DNA, 21 bp, Artificial sequence
  SiRNA target sequence
taataggagaagaagtaggca

SEQ ID NO: 118807 - DNA, 21 bp, Artificial sequence
  SiRNA target sequence
aataggagaagaagtaggcat

SEQ ID NO: 118808 - DNA, 21 bp, Artificial sequence
  SiRNA target sequence
ataggagaagaagtaggcatc

SEQ ID NO: 118809 - DNA, 21 bp, Artificial sequence
  SiRNA target sequence
taggagaagaagtaggcatct

SEQ ID NO: 118810 - DNA, 21 bp, Artificial sequence
  SiRNA target sequence
aggagaagaagtaggcatctc

SEQ ID NO: 118811 - DNA, 21 bp, Artificial sequence
  SiRNA target sequence
ggagaagaagtaggcatctct

SEQ ID NO: 118812 - DNA, 21 bp, Artificial sequence
  SiRNA target sequence
gagaagaagtaggcatctctg

SEQ ID NO: 118813 - DNA, 21 bp, Artificial sequence
  SiRNA target sequence
agaagaagtaggcatctctgg

SEQ ID NO: 118814 - DNA, 21 bp, Artificial sequence
  SiRNA target sequence
gaagaagtaggcatctctggt

SEQ ID NO: 118815 - DNA, 21 bp, Artificial sequence
  SiRNA target sequence
aagaagtaggcatctctggtg

SEQ ID NO: 118816 - DNA, 21 bp, Artificial sequence
  SiRNA target sequence
agaagtaggcatctctggtgg

SEQ ID NO: 118817 - DNA, 21 bp, Artificial sequence
  SiRNA target sequence
gaagtaggcatctctggtggt

SEQ ID NO: 118818 - DNA, 21 bp, Artificial sequence
  SiRNA target sequence
aagtaggcatctctggtggtc

SEQ ID NO: 118819 - DNA, 21 bp, Artificial sequence
  SiRNA target sequence
agtaggcatctctggtggtcc

SEQ ID NO: 118820 - DNA, 21 bp, Artificial sequence
  SiRNA target sequence
gtaggcatctctggtggtcct

SEQ ID NO: 118821 - DNA, 21 bp, Artificial sequence
  SiRNA target sequence
taggcatctctggtggtcctc

SEQ ID NO: 118822 - DNA, 21 bp, Artificial sequence
  SiRNA target sequence
aggcatctctggtggtcctca

SEQ ID NO: 118823 - DNA, 21 bp, Artificial sequence
  SiRNA target sequence
ggcatctctggtggtcctcac

SEQ ID NO: 118824 - DNA, 21 bp, Artificial sequence
  SiRNA target sequence
gcatctctggtggtcctcacg

SEQ ID NO: 118825 - DNA, 21 bp, Artificial sequence
  SiRNA target sequence
catctctggtggtcctcacgg

SEQ ID NO: 118826 - DNA, 21 bp, Artificial sequence
  SiRNA target sequence
atctctggtggtcctcacggt

SEQ ID NO: 118827 - DNA, 21 bp, Artificial sequence
  SiRNA target sequence
tctctggtggtcctcacggtc

SEQ ID NO: 118828 - DNA, 21 bp, Artificial sequence
  SiRNA target sequence
ctctggtggtcctcacggtct

SEQ ID NO: 118829 - DNA, 21 bp, Artificial sequence
  SiRNA target sequence
tctggtggtcctcacggtctt

SEQ ID NO: 118830 - DNA, 21 bp, Artificial sequence
  SiRNA target sequence
ctggtggtcctcacggtctta

SEQ ID NO: 118831 - DNA, 21 bp, Artificial sequence
  SiRNA target sequence
tggtggtcctcacggtcttac

SEQ ID NO: 118832 - DNA, 21 bp, Artificial sequence
  SiRNA target sequence
ggtggtcctcacggtcttact

SEQ ID NO: 118833 - DNA, 21 bp, Artificial sequence
  SiRNA target sequence
gtggtcctcacggtcttacta

SEQ ID NO: 118834 - DNA, 21 bp, Artificial sequence
  SiRNA target sequence
tggtcctcacggtcttactaa

SEQ ID NO: 118835 - DNA, 21 bp, Artificial sequence
  SiRNA target sequence
ggtcctcacggtcttactaaa

SEQ ID NO: 118836 - DNA, 21 bp, Artificial sequence
  SiRNA target sequence
gtcctcacggtcttactaaaa

SEQ ID NO: 118837 - DNA, 21 bp, Artificial sequence
  SiRNA target sequence
tcctcacggtcttactaaaaa

SEQ ID NO: 118838 - DNA, 21 bp, Artificial sequence
  SiRNA target sequence
cctcacggtcttactaaaaat

SEQ ID NO: 118839 - DNA, 21 bp, Artificial sequence
  SiRNA target sequence
ctcacggtcttactaaaaatt

SEQ ID NO: 118840 - DNA, 21 bp, Artificial sequence
  SiRNA target sequence
tcacggtcttactaaaaattt

SEQ ID NO: 118841 - DNA, 21 bp, Artificial sequence
  SiRNA target sequence
cacggtcttactaaaaatttg

SEQ ID NO: 118842 - DNA, 21 bp, Artificial sequence
  SiRNA target sequence
acggtcttactaaaaatttga

SEQ ID NO: 118843 - DNA, 21 bp, Artificial sequence
  SiRNA target sequence
cggtcttactaaaaatttgat

SEQ ID NO: 118844 - DNA, 21 bp, Artificial sequence
  SiRNA target sequence
ggtcttactaaaaatttgatc

SEQ ID NO: 118845 - DNA, 21 bp, Artificial sequence
  SiRNA target sequence
gtcttactaaaaatttgatca

SEQ ID NO: 118846 - DNA, 21 bp, Artificial sequence
  SiRNA target sequence
tcttactaaaaatttgatcaa

SEQ ID NO: 118847 - DNA, 21 bp, Artificial sequence
  SiRNA target sequence
cttactaaaaatttgatcaaa

SEQ ID NO: 118848 - DNA, 21 bp, Artificial sequence
  SiRNA target sequence
ttactaaaaatttgatcaaaa

SEQ ID NO: 118849 - DNA, 21 bp, Artificial sequence
  SiRNA target sequence
tactaaaaatttgatcaaaaa

SEQ ID NO: 118850 - DNA, 21 bp, Artificial sequence
  SiRNA target sequence
actaaaaatttgatcaaaaaa

SEQ ID NO: 118851 - DNA, 21 bp, Artificial sequence
  SiRNA target sequence
ctaaaaatttgatcaaaaaat

SEQ ID NO: 118852 - DNA, 21 bp, Artificial sequence
  SiRNA target sequence
taaaaatttgatcaaaaaata

SEQ ID NO: 118853 - DNA, 21 bp, Artificial sequence
  SiRNA target sequence
aaaaatttgatcaaaaaatac

SEQ ID NO: 118854 - DNA, 21 bp, Artificial sequence
  SiRNA target sequence
aaaatttgatcaaaaaatacg

SEQ ID NO: 118855 - DNA, 21 bp, Artificial sequence
  SiRNA target sequence
aaatttgatcaaaaaatacgg

SEQ ID NO: 118856 - DNA, 21 bp, Artificial sequence
  SiRNA target sequence
aatttgatcaaaaaatacggc

SEQ ID NO: 118857 - DNA, 21 bp, Artificial sequence
  SiRNA target sequence
atttgatcaaaaaatacggcg

SEQ ID NO: 118858 - DNA, 21 bp, Artificial sequence
  SiRNA target sequence
tttgatcaaaaaatacggcga

SEQ ID NO: 118859 - DNA, 21 bp, Artificial sequence
  SiRNA target sequence
ttgatcaaaaaatacggcgat

SEQ ID NO: 118860 - DNA, 21 bp, Artificial sequence
  SiRNA target sequence
tgatcaaaaaatacggcgatc

SEQ ID NO: 118861 - DNA, 21 bp, Artificial sequence
  SiRNA target sequence
gatcaaaaaatacggcgatca

SEQ ID NO: 118862 - DNA, 21 bp, Artificial sequence
  SiRNA target sequence
atcaaaaaatacggcgatcaa

SEQ ID NO: 118863 - DNA, 21 bp, Artificial sequence
  SiRNA target sequence
tcaaaaaatacggcgatcaaa

SEQ ID NO: 118864 - DNA, 21 bp, Artificial sequence
  SiRNA target sequence
caaaaaatacggcgatcaaag

SEQ ID NO: 118865 - DNA, 21 bp, Artificial sequence
  SiRNA target sequence
aaaaaatacggcgatcaaaga

SEQ ID NO: 118866 - DNA, 21 bp, Artificial sequence
  SiRNA target sequence
aaaaatacggcgatcaaagag

SEQ ID NO: 118867 - DNA, 21 bp, Artificial sequence
  SiRNA target sequence
aaaatacggcgatcaaagagt

SEQ ID NO: 118868 - DNA, 21 bp, Artificial sequence
  SiRNA target sequence
aaatacggcgatcaaagagtg

SEQ ID NO: 118869 - DNA, 21 bp, Artificial sequence
  SiRNA target sequence
aatacggcgatcaaagagtga

SEQ ID NO: 118870 - DNA, 21 bp, Artificial sequence
  SiRNA target sequence
atacggcgatcaaagagtgaa

SEQ ID NO: 118871 - DNA, 21 bp, Artificial sequence
  SiRNA target sequence
tacggcgatcaaagagtgaag

SEQ ID NO: 118872 - DNA, 21 bp, Artificial sequence
  SiRNA target sequence
acggcgatcaaagagtgaagg

SEQ ID NO: 118873 - DNA, 21 bp, Artificial sequence
  SiRNA target sequence
cggcgatcaaagagtgaagga

SEQ ID NO: 118874 - DNA, 21 bp, Artificial sequence
  SiRNA target sequence
ggcgatcaaagagtgaaggat

SEQ ID NO: 118875 - DNA, 21 bp, Artificial sequence
  SiRNA target sequence
gcgatcaaagagtgaaggata

SEQ ID NO: 118876 - DNA, 21 bp, Artificial sequence
  SiRNA target sequence
cgatcaaagagtgaaggatac

SEQ ID NO: 118877 - DNA, 21 bp, Artificial sequence
  SiRNA target sequence
gatcaaagagtgaaggatacc

SEQ ID NO: 118878 - DNA, 21 bp, Artificial sequence
  SiRNA target sequence
atcaaagagtgaaggataccc

SEQ ID NO: 118879 - DNA, 21 bp, Artificial sequence
  SiRNA target sequence
tcaaagagtgaaggatacccc

SEQ ID NO: 118880 - DNA, 21 bp, Artificial sequence
  SiRNA target sequence
caaagagtgaaggatacccct

SEQ ID NO: 118881 - DNA, 21 bp, Artificial sequence
  SiRNA target sequence
aaagagtgaaggataccccta

SEQ ID NO: 118882 - DNA, 21 bp, Artificial sequence
  SiRNA target sequence
aagagtgaaggatacccctat

SEQ ID NO: 118883 - DNA, 21 bp, Artificial sequence
  SiRNA target sequence
agagtgaaggatacccctatt

SEQ ID NO: 118884 - DNA, 21 bp, Artificial sequence
  SiRNA target sequence
gagtgaaggatacccctattt

SEQ ID NO: 118885 - DNA, 21 bp, Artificial sequence
  SiRNA target sequence
agtgaaggatacccctatttc

SEQ ID NO: 118886 - DNA, 21 bp, Artificial sequence
  SiRNA target sequence
gtgaaggatacccctatttcg

SEQ ID NO: 118887 - DNA, 21 bp, Artificial sequence
  SiRNA target sequence
tgaaggatacccctatttcgg

SEQ ID NO: 118888 - DNA, 21 bp, Artificial sequence
  SiRNA target sequence
gaaggatacccctatttcgga

SEQ ID NO: 118889 - DNA, 21 bp, Artificial sequence
  SiRNA target sequence
aaggatacccctatttcggaa

SEQ ID NO: 118890 - DNA, 21 bp, Artificial sequence
  SiRNA target sequence
aggatacccctatttcggaaa

SEQ ID NO: 118891 - DNA, 21 bp, Artificial sequence
  SiRNA target sequence
ggatacccctatttcggaaat

SEQ ID NO: 118892 - DNA, 21 bp, Artificial sequence
  SiRNA target sequence
gatacccctatttcggaaatg

SEQ ID NO: 118893 - DNA, 21 bp, Artificial sequence
  SiRNA target sequence
atacccctatttcggaaatgg

SEQ ID NO: 118894 - DNA, 21 bp, Artificial sequence
  SiRNA target sequence
tacccctatttcggaaatggg

SEQ ID NO: 118895 - DNA, 21 bp, Artificial sequence
  SiRNA target sequence
acccctatttcggaaatggga

SEQ ID NO: 118896 - DNA, 21 bp, Artificial sequence
  SiRNA target sequence
cccctatttcggaaatgggat

SEQ ID NO: 118897 - DNA, 21 bp, Artificial sequence
  SiRNA target sequence
ccctatttcggaaatgggatt

SEQ ID NO: 118898 - DNA, 21 bp, Artificial sequence
  SiRNA target sequence
cctatttcggaaatgggattt

SEQ ID NO: 118899 - DNA, 21 bp, Artificial sequence
  SiRNA target sequence
ctatttcggaaatgggattta

SEQ ID NO: 118900 - DNA, 21 bp, Artificial sequence
  SiRNA target sequence
tatttcggaaatgggatttac

SEQ ID NO: 118901 - DNA, 21 bp, Artificial sequence
  SiRNA target sequence
atttcggaaatgggatttaca

SEQ ID NO: 118902 - DNA, 21 bp, Artificial sequence
  SiRNA target sequence
tttcggaaatgggatttacag

SEQ ID NO: 118903 - DNA, 21 bp, Artificial sequence
  SiRNA target sequence
ttcggaaatgggatttacagg

SEQ ID NO: 118904 - DNA, 21 bp, Artificial sequence
  SiRNA target sequence
tcggaaatgggatttacaggt

SEQ ID NO: 118905 - DNA, 21 bp, Artificial sequence
  SiRNA target sequence
cggaaatgggatttacaggtc

SEQ ID NO: 118906 - DNA, 21 bp, Artificial sequence
  SiRNA target sequence
ggaaatgggatttacaggtct

SEQ ID NO: 118907 - DNA, 21 bp, Artificial sequence
  SiRNA target sequence
gaaatgggatttacaggtctc

SEQ ID NO: 118908 - DNA, 21 bp, Artificial sequence
  SiRNA target sequence
aaatgggatttacaggtctcg

SEQ ID NO: 118909 - DNA, 21 bp, Artificial sequence
  SiRNA target sequence
aatgggatttacaggtctcgc

SEQ ID NO: 118910 - DNA, 21 bp, Artificial sequence
  SiRNA target sequence
atgggatttacaggtctcgct

SEQ ID NO: 118911 - DNA, 21 bp, Artificial sequence
  SiRNA target sequence
tgggatttacaggtctcgctg

SEQ ID NO: 118912 - DNA, 21 bp, Artificial sequence
  SiRNA target sequence
gggatttacaggtctcgctgt

SEQ ID NO: 118913 - DNA, 21 bp, Artificial sequence
  SiRNA target sequence
ggatttacaggtctcgctgtg

SEQ ID NO: 118914 - DNA, 21 bp, Artificial sequence
  SiRNA target sequence
gatttacaggtctcgctgtgg

SEQ ID NO: 118915 - DNA, 21 bp, Artificial sequence
  SiRNA target sequence
atttacaggtctcgctgtggg

SEQ ID NO: 118916 - DNA, 21 bp, Artificial sequence
  SiRNA target sequence
tttacaggtctcgctgtgggt

SEQ ID NO: 118917 - DNA, 21 bp, Artificial sequence
  SiRNA target sequence
ttacaggtctcgctgtgggtt

SEQ ID NO: 118918 - DNA, 21 bp, Artificial sequence
  SiRNA target sequence
tacaggtctcgctgtgggttc

SEQ ID NO: 118919 - DNA, 21 bp, Artificial sequence
  SiRNA target sequence
acaggtctcgctgtgggttca

SEQ ID NO: 118920 - DNA, 21 bp, Artificial sequence
  SiRNA target sequence
caggtctcgctgtgggttcaa

SEQ ID NO: 118921 - DNA, 21 bp, Artificial sequence
  SiRNA target sequence
aggtctcgctgtgggttcaag

SEQ ID NO: 118922 - DNA, 21 bp, Artificial sequence
  SiRNA target sequence
ggtctcgctgtgggttcaagc

SEQ ID NO: 118923 - DNA, 21 bp, Artificial sequence
  SiRNA target sequence
gtctcgctgtgggttcaagct

SEQ ID NO: 118924 - DNA, 21 bp, Artificial sequence
  SiRNA target sequence
tctcgctgtgggttcaagcta

SEQ ID NO: 118925 - DNA, 21 bp, Artificial sequence
  SiRNA target sequence
ctcgctgtgggttcaagctat

SEQ ID NO: 118926 - DNA, 21 bp, Artificial sequence
  SiRNA target sequence
tcgctgtgggttcaagctatt

SEQ ID NO: 118927 - DNA, 21 bp, Artificial sequence
  SiRNA target sequence
cgctgtgggttcaagctattt

SEQ ID NO: 118928 - DNA, 21 bp, Artificial sequence
  SiRNA target sequence
gctgtgggttcaagctattta

SEQ ID NO: 118929 - DNA, 21 bp, Artificial sequence
  SiRNA target sequence
ctgtgggttcaagctatttag

SEQ ID NO: 118930 - DNA, 21 bp, Artificial sequence
  SiRNA target sequence
tgtgggttcaagctatttagg

SEQ ID NO: 118931 - DNA, 21 bp, Artificial sequence
  SiRNA target sequence
gtgggttcaagctatttaggg

SEQ ID NO: 118932 - DNA, 21 bp, Artificial sequence
  SiRNA target sequence
tgggttcaagctatttagggt

SEQ ID NO: 118933 - DNA, 21 bp, Artificial sequence
  SiRNA target sequence
gggttcaagctatttagggtt

SEQ ID NO: 118934 - DNA, 21 bp, Artificial sequence
  SiRNA target sequence
ggttcaagctatttagggtta

SEQ ID NO: 118935 - DNA, 21 bp, Artificial sequence
  SiRNA target sequence
gttcaagctatttagggttaa

SEQ ID NO: 118936 - DNA, 21 bp, Artificial sequence
  SiRNA target sequence
ttcaagctatttagggttaag

SEQ ID NO: 118937 - DNA, 21 bp, Artificial sequence
  SiRNA target sequence
tcaagctatttagggttaaga

SEQ ID NO: 118938 - DNA, 21 bp, Artificial sequence
  SiRNA target sequence
caagctatttagggttaagac

SEQ ID NO: 118939 - DNA, 21 bp, Artificial sequence
  SiRNA target sequence
aagctatttagggttaagacc

SEQ ID NO: 118940 - DNA, 21 bp, Artificial sequence
  SiRNA target sequence
agctatttagggttaagaccc

SEQ ID NO: 118941 - DNA, 21 bp, Artificial sequence
  SiRNA target sequence
gctatttagggttaagacccg

SEQ ID NO: 118942 - DNA, 21 bp, Artificial sequence
  SiRNA target sequence
ctatttagggttaagacccgt

SEQ ID NO: 118943 - DNA, 21 bp, Artificial sequence
  SiRNA target sequence
tatttagggttaagacccgta

SEQ ID NO: 118944 - DNA, 21 bp, Artificial sequence
  SiRNA target sequence
atttagggttaagacccgtag

SEQ ID NO: 118945 - DNA, 21 bp, Artificial sequence
  SiRNA target sequence
tttagggttaagacccgtagt

SEQ ID NO: 118946 - DNA, 21 bp, Artificial sequence
  SiRNA target sequence
ttagggttaagacccgtagta

SEQ ID NO: 118947 - DNA, 21 bp, Artificial sequence
  SiRNA target sequence
tagggttaagacccgtagtag

SEQ ID NO: 118948 - DNA, 21 bp, Artificial sequence
  SiRNA target sequence
agggttaagacccgtagtaga

SEQ ID NO: 118949 - DNA, 21 bp, Artificial sequence
  SiRNA target sequence
gggttaagacccgtagtagat

SEQ ID NO: 118950 - DNA, 21 bp, Artificial sequence
  SiRNA target sequence
ggttaagacccgtagtagatt

SEQ ID NO: 118951 - DNA, 21 bp, Artificial sequence
  SiRNA target sequence
gttaagacccgtagtagattt

SEQ ID NO: 118952 - DNA, 21 bp, Artificial sequence
  SiRNA target sequence
ttaagacccgtagtagatttt

SEQ ID NO: 118953 - DNA, 21 bp, Artificial sequence
  SiRNA target sequence
taagacccgtagtagatttta

SEQ ID NO: 118954 - DNA, 21 bp, Artificial sequence
  SiRNA target sequence
aagacccgtagtagattttat

SEQ ID NO: 118955 - DNA, 21 bp, Artificial sequence
  SiRNA target sequence
agacccgtagtagattttatg

SEQ ID NO: 118956 - DNA, 21 bp, Artificial sequence
  SiRNA target sequence
gacccgtagtagattttatga

SEQ ID NO: 118957 - DNA, 21 bp, Artificial sequence
  SiRNA target sequence
acccgtagtagattttatgac

SEQ ID NO: 118958 - DNA, 21 bp, Artificial sequence
  SiRNA target sequence
cccgtagtagattttatgact

SEQ ID NO: 118959 - DNA, 21 bp, Artificial sequence
  SiRNA target sequence
ccgtagtagattttatgactt

SEQ ID NO: 118960 - DNA, 21 bp, Artificial sequence
  SiRNA target sequence
cgtagtagattttatgacttg

SEQ ID NO: 118961 - DNA, 21 bp, Artificial sequence
  SiRNA target sequence
gtagtagattttatgacttgg

SEQ ID NO: 118962 - DNA, 21 bp, Artificial sequence
  SiRNA target sequence
tagtagattttatgacttgga

SEQ ID NO: 118963 - DNA, 21 bp, Artificial sequence
  SiRNA target sequence
agtagattttatgacttggaa

SEQ ID NO: 118964 - DNA, 21 bp, Artificial sequence
  SiRNA target sequence
gtagattttatgacttggaat

SEQ ID NO: 118965 - DNA, 21 bp, Artificial sequence
  SiRNA target sequence
tagattttatgacttggaatt

SEQ ID NO: 118966 - DNA, 21 bp, Artificial sequence
  SiRNA target sequence
agattttatgacttggaattt

SEQ ID NO: 118967 - DNA, 21 bp, Artificial sequence
  SiRNA target sequence
gattttatgacttggaatttt

SEQ ID NO: 118968 - DNA, 21 bp, Artificial sequence
  SiRNA target sequence
attttatgacttggaattttg

SEQ ID NO: 118969 - DNA, 21 bp, Artificial sequence
  SiRNA target sequence
ttttatgacttggaattttgc

SEQ ID NO: 118970 - DNA, 21 bp, Artificial sequence
  SiRNA target sequence
tttatgacttggaattttgct

SEQ ID NO: 118971 - DNA, 21 bp, Artificial sequence
  SiRNA target sequence
ttatgacttggaattttgctt

SEQ ID NO: 118972 - DNA, 21 bp, Artificial sequence
  SiRNA target sequence
tatgacttggaattttgcttt

SEQ ID NO: 118973 - DNA, 21 bp, Artificial sequence
  SiRNA target sequence
atgacttggaattttgctttg

SEQ ID NO: 118974 - DNA, 21 bp, Artificial sequence
  SiRNA target sequence
tgacttggaattttgctttgc

SEQ ID NO: 118975 - DNA, 21 bp, Artificial sequence
  SiRNA target sequence
gacttggaattttgctttgca

SEQ ID NO: 118976 - DNA, 21 bp, Artificial sequence
  SiRNA target sequence
acttggaattttgctttgcaa

SEQ ID NO: 118977 - DNA, 21 bp, Artificial sequence
  SiRNA target sequence
cttggaattttgctttgcaat

SEQ ID NO: 118978 - DNA, 21 bp, Artificial sequence
  SiRNA target sequence
ttggaattttgctttgcaatc

SEQ ID NO: 118979 - DNA, 21 bp, Artificial sequence
  SiRNA target sequence
tggaattttgctttgcaatca

SEQ ID NO: 118980 - DNA, 21 bp, Artificial sequence
  SiRNA target sequence
ggaattttgctttgcaatcaa

SEQ ID NO: 118981 - DNA, 21 bp, Artificial sequence
  SiRNA target sequence
gaattttgctttgcaatcaat

SEQ ID NO: 118982 - DNA, 21 bp, Artificial sequence
  SiRNA target sequence
aattttgctttgcaatcaatt

SEQ ID NO: 118983 - DNA, 21 bp, Artificial sequence
  SiRNA target sequence
attttgctttgcaatcaattg

SEQ ID NO: 118984 - DNA, 21 bp, Artificial sequence
  SiRNA target sequence
ttttgctttgcaatcaattga

SEQ ID NO: 118985 - DNA, 21 bp, Artificial sequence
  SiRNA target sequence
tttgctttgcaatcaattgac

SEQ ID NO: 118986 - DNA, 21 bp, Artificial sequence
  SiRNA target sequence
ttgctttgcaatcaattgacc

SEQ ID NO: 118987 - DNA, 21 bp, Artificial sequence
  SiRNA target sequence
tgctttgcaatcaattgacca

SEQ ID NO: 118988 - DNA, 21 bp, Artificial sequence
  SiRNA target sequence
gctttgcaatcaattgaccat

SEQ ID NO: 118989 - DNA, 21 bp, Artificial sequence
  SiRNA target sequence
ctttgcaatcaattgaccata

SEQ ID NO: 118990 - DNA, 21 bp, Artificial sequence
  SiRNA target sequence
tttgcaatcaattgaccatat

SEQ ID NO: 118991 - DNA, 21 bp, Artificial sequence
  SiRNA target sequence
ttgcaatcaattgaccatatt

SEQ ID NO: 118992 - DNA, 21 bp, Artificial sequence
  SiRNA target sequence
tgcaatcaattgaccatatta

SEQ ID NO: 118993 - DNA, 21 bp, Artificial sequence
  SiRNA target sequence
gcaatcaattgaccatattat

SEQ ID NO: 118994 - DNA, 21 bp, Artificial sequence
  SiRNA target sequence
caatcaattgaccatattatt

SEQ ID NO: 118995 - DNA, 21 bp, Artificial sequence
  SiRNA target sequence
aatcaattgaccatattatta

SEQ ID NO: 118996 - DNA, 21 bp, Artificial sequence
  SiRNA target sequence
atcaattgaccatattattaa

SEQ ID NO: 118997 - DNA, 21 bp, Artificial sequence
  SiRNA target sequence
tcaattgaccatattattaat

SEQ ID NO: 118998 - DNA, 21 bp, Artificial sequence
  SiRNA target sequence
caattgaccatattattaatt

SEQ ID NO: 118999 - DNA, 21 bp, Artificial sequence
  SiRNA target sequence
aattgaccatattattaattc

SEQ ID NO: 119000 - DNA, 21 bp, Artificial sequence
  SiRNA target sequence
attgaccatattattaattct

SEQ ID NO: 119001 - DNA, 21 bp, Artificial sequence
  SiRNA target sequence
ttgaccatattattaattctt

SEQ ID NO: 119002 - DNA, 21 bp, Artificial sequence
  SiRNA target sequence
tgaccatattattaattcttg

SEQ ID NO: 119003 - DNA, 21 bp, Artificial sequence
  SiRNA target sequence
gaccatattattaattcttgt

SEQ ID NO: 119004 - DNA, 21 bp, Artificial sequence
  SiRNA target sequence
accatattattaattcttgtg

SEQ ID NO: 119005 - DNA, 21 bp, Artificial sequence
  SiRNA target sequence
ccatattattaattcttgtgc

SEQ ID NO: 119006 - DNA, 21 bp, Artificial sequence
  SiRNA target sequence
catattattaattcttgtgcg

SEQ ID NO: 119007 - DNA, 21 bp, Artificial sequence
  SiRNA target sequence
atattattaattcttgtgcga

SEQ ID NO: 119008 - DNA, 21 bp, Artificial sequence
  SiRNA target sequence
tattattaattcttgtgcgaa

SEQ ID NO: 119009 - DNA, 21 bp, Artificial sequence
  SiRNA target sequence
attattaattcttgtgcgaaa

SEQ ID NO: 119010 - DNA, 21 bp, Artificial sequence
  SiRNA target sequence
ttattaattcttgtgcgaaaa

SEQ ID NO: 119011 - DNA, 21 bp, Artificial sequence
  SiRNA target sequence
tattaattcttgtgcgaaaac

SEQ ID NO: 119012 - DNA, 21 bp, Artificial sequence
  SiRNA target sequence
attaattcttgtgcgaaaacc

SEQ ID NO: 119013 - DNA, 21 bp, Artificial sequence
  SiRNA target sequence
ttaattcttgtgcgaaaacct

SEQ ID NO: 119014 - DNA, 21 bp, Artificial sequence
  SiRNA target sequence
taattcttgtgcgaaaacctt

SEQ ID NO: 119015 - DNA, 21 bp, Artificial sequence
  SiRNA target sequence
aattcttgtgcgaaaaccttg

SEQ ID NO: 119016 - DNA, 21 bp, Artificial sequence
  SiRNA target sequence
attcttgtgcgaaaaccttgt

SEQ ID NO: 119017 - DNA, 21 bp, Artificial sequence
  SiRNA target sequence
ttcttgtgcgaaaaccttgta

SEQ ID NO: 119018 - DNA, 21 bp, Artificial sequence
  SiRNA target sequence
tcttgtgcgaaaaccttgtat

SEQ ID NO: 119019 - DNA, 21 bp, Artificial sequence
  SiRNA target sequence
cttgtgcgaaaaccttgtata

SEQ ID NO: 119020 - DNA, 21 bp, Artificial sequence
  SiRNA target sequence
ttgtgcgaaaaccttgtatat

SEQ ID NO: 119021 - DNA, 21 bp, Artificial sequence
  SiRNA target sequence
tgtgcgaaaaccttgtatatg

SEQ ID NO: 119022 - DNA, 21 bp, Artificial sequence
  SiRNA target sequence
gtgcgaaaaccttgtatatgt

SEQ ID NO: 119023 - DNA, 21 bp, Artificial sequence
  SiRNA target sequence
tgcgaaaaccttgtatatgtc

SEQ ID NO: 119024 - DNA, 21 bp, Artificial sequence
  SiRNA target sequence
gcgaaaaccttgtatatgtca

SEQ ID NO: 119025 - DNA, 21 bp, Artificial sequence
  SiRNA target sequence
cgaaaaccttgtatatgtcag

SEQ ID NO: 119026 - DNA, 21 bp, Artificial sequence
  SiRNA target sequence
gaaaaccttgtatatgtcagg

SEQ ID NO: 119027 - DNA, 21 bp, Artificial sequence
  SiRNA target sequence
aaaaccttgtatatgtcagga

SEQ ID NO: 119028 - DNA, 21 bp, Artificial sequence
  SiRNA target sequence
aaaccttgtatatgtcaggag

SEQ ID NO: 119029 - DNA, 21 bp, Artificial sequence
  SiRNA target sequence
aaccttgtatatgtcaggagg

SEQ ID NO: 119030 - DNA, 21 bp, Artificial sequence
  SiRNA target sequence
accttgtatatgtcaggagga

SEQ ID NO: 119031 - DNA, 21 bp, Artificial sequence
  SiRNA target sequence
ccttgtatatgtcaggaggaa

SEQ ID NO: 119032 - DNA, 21 bp, Artificial sequence
  SiRNA target sequence
cttgtatatgtcaggaggaag

SEQ ID NO: 119033 - DNA, 21 bp, Artificial sequence
  SiRNA target sequence
ttgtatatgtcaggaggaaga

SEQ ID NO: 119034 - DNA, 21 bp, Artificial sequence
  SiRNA target sequence
tgtatatgtcaggaggaagaa

SEQ ID NO: 119035 - DNA, 21 bp, Artificial sequence
  SiRNA target sequence
gtatatgtcaggaggaagaat

SEQ ID NO: 119036 - DNA, 21 bp, Artificial sequence
  SiRNA target sequence
tatatgtcaggaggaagaata

SEQ ID NO: 119037 - DNA, 21 bp, Artificial sequence
  SiRNA target sequence
atatgtcaggaggaagaatac

SEQ ID NO: 119038 - DNA, 21 bp, Artificial sequence
  SiRNA target sequence
tatgtcaggaggaagaataca

SEQ ID NO: 119039 - DNA, 21 bp, Artificial sequence
  SiRNA target sequence
atgtcaggaggaagaatacaa

SEQ ID NO: 119040 - DNA, 21 bp, Artificial sequence
  SiRNA target sequence
tgtcaggaggaagaatacaat

SEQ ID NO: 119041 - DNA, 21 bp, Artificial sequence
  SiRNA target sequence
gtcaggaggaagaatacaatg

SEQ ID NO: 119042 - DNA, 21 bp, Artificial sequence
  SiRNA target sequence
tcaggaggaagaatacaatgt

SEQ ID NO: 119043 - DNA, 21 bp, Artificial sequence
  SiRNA target sequence
caggaggaagaatacaatgtc

SEQ ID NO: 119044 - DNA, 21 bp, Artificial sequence
  SiRNA target sequence
aggaggaagaatacaatgtcc

SEQ ID NO: 119045 - DNA, 21 bp, Artificial sequence
  SiRNA target sequence
ggaggaagaatacaatgtcca

SEQ ID NO: 119046 - DNA, 21 bp, Artificial sequence
  SiRNA target sequence
gaggaagaatacaatgtccaa

SEQ ID NO: 119047 - DNA, 21 bp, Artificial sequence
  SiRNA target sequence
aggaagaatacaatgtccaat

SEQ ID NO: 119048 - DNA, 21 bp, Artificial sequence
  SiRNA target sequence
ggaagaatacaatgtccaatt

SEQ ID NO: 119049 - DNA, 21 bp, Artificial sequence
  SiRNA target sequence
gaagaatacaatgtccaattg

SEQ ID NO: 119050 - DNA, 21 bp, Artificial sequence
  SiRNA target sequence
aagaatacaatgtccaattgt

SEQ ID NO: 119051 - DNA, 21 bp, Artificial sequence
  SiRNA target sequence
agaatacaatgtccaattgtt

SEQ ID NO: 119052 - DNA, 21 bp, Artificial sequence
  SiRNA target sequence
gaatacaatgtccaattgttt

SEQ ID NO: 119053 - DNA, 21 bp, Artificial sequence
  SiRNA target sequence
aatacaatgtccaattgtttt

SEQ ID NO: 119054 - DNA, 21 bp, Artificial sequence
  SiRNA target sequence
atacaatgtccaattgttttt

SEQ ID NO: 119055 - DNA, 21 bp, Artificial sequence
  SiRNA target sequence
tacaatgtccaattgttttta

SEQ ID NO: 119056 - DNA, 21 bp, Artificial sequence
  SiRNA target sequence
acaatgtccaattgtttttag

SEQ ID NO: 119057 - DNA, 21 bp, Artificial sequence
  SiRNA target sequence
caatgtccaattgtttttagg

SEQ ID NO: 119058 - DNA, 21 bp, Artificial sequence
  SiRNA target sequence
aatgtccaattgtttttaggg

SEQ ID NO: 119059 - DNA, 21 bp, Artificial sequence
  SiRNA target sequence
atgtccaattgtttttagggg

SEQ ID NO: 119060 - DNA, 21 bp, Artificial sequence
  SiRNA target sequence
tgtccaattgtttttagggga

SEQ ID NO: 119061 - DNA, 21 bp, Artificial sequence
  SiRNA target sequence
gtccaattgtttttaggggac

SEQ ID NO: 119062 - DNA, 21 bp, Artificial sequence
  SiRNA target sequence
tccaattgtttttaggggacc

SEQ ID NO: 119063 - DNA, 21 bp, Artificial sequence
  SiRNA target sequence
ccaattgtttttaggggacca

SEQ ID NO: 119064 - DNA, 21 bp, Artificial sequence
  SiRNA target sequence
caattgtttttaggggaccaa

SEQ ID NO: 119065 - DNA, 21 bp, Artificial sequence
  SiRNA target sequence
aattgtttttaggggaccaaa

SEQ ID NO: 119066 - DNA, 21 bp, Artificial sequence
  SiRNA target sequence
attgtttttaggggaccaaat

SEQ ID NO: 119067 - DNA, 21 bp, Artificial sequence
  SiRNA target sequence
ttgtttttaggggaccaaatg

SEQ ID NO: 119068 - DNA, 21 bp, Artificial sequence
  SiRNA target sequence
tgtttttaggggaccaaatgg

SEQ ID NO: 119069 - DNA, 21 bp, Artificial sequence
  SiRNA target sequence
gtttttaggggaccaaatgga

SEQ ID NO: 119070 - DNA, 21 bp, Artificial sequence
  SiRNA target sequence
tttttaggggaccaaatggat

SEQ ID NO: 119071 - DNA, 21 bp, Artificial sequence
  SiRNA target sequence
ttttaggggaccaaatggatt

SEQ ID NO: 119072 - DNA, 21 bp, Artificial sequence
  SiRNA target sequence
tttaggggaccaaatggattc

SEQ ID NO: 119073 - DNA, 21 bp, Artificial sequence
  SiRNA target sequence
ttaggggaccaaatggattca

SEQ ID NO: 119074 - DNA, 21 bp, Artificial sequence
  SiRNA target sequence
taggggaccaaatggattcaa

SEQ ID NO: 119075 - DNA, 21 bp, Artificial sequence
  SiRNA target sequence
aggggaccaaatggattcaat

SEQ ID NO: 119076 - DNA, 21 bp, Artificial sequence
  SiRNA target sequence
ggggaccaaatggattcaata

SEQ ID NO: 119077 - DNA, 21 bp, Artificial sequence
  SiRNA target sequence
gggaccaaatggattcaataa

SEQ ID NO: 119078 - DNA, 21 bp, Artificial sequence
  SiRNA target sequence
ggaccaaatggattcaataat

SEQ ID NO: 119079 - DNA, 21 bp, Artificial sequence
  SiRNA target sequence
gaccaaatggattcaataatg

SEQ ID NO: 119080 - DNA, 21 bp, Artificial sequence
  SiRNA target sequence
accaaatggattcaataatgg

SEQ ID NO: 119081 - DNA, 21 bp, Artificial sequence
  SiRNA target sequence
ccaaatggattcaataatggg

SEQ ID NO: 119082 - DNA, 21 bp, Artificial sequence
  SiRNA target sequence
caaatggattcaataatgggt

SEQ ID NO: 119083 - DNA, 21 bp, Artificial sequence
  SiRNA target sequence
aaatggattcaataatgggta

SEQ ID NO: 119084 - DNA, 21 bp, Artificial sequence
  SiRNA target sequence
aatggattcaataatgggtac

SEQ ID NO: 119085 - DNA, 21 bp, Artificial sequence
  SiRNA target sequence
atggattcaataatgggtacg

SEQ ID NO: 119086 - DNA, 21 bp, Artificial sequence
  SiRNA target sequence
tggattcaataatgggtacgc

SEQ ID NO: 119087 - DNA, 21 bp, Artificial sequence
  SiRNA target sequence
ggattcaataatgggtacgct

SEQ ID NO: 119088 - DNA, 21 bp, Artificial sequence
  SiRNA target sequence
gattcaataatgggtacgctg

SEQ ID NO: 119089 - DNA, 21 bp, Artificial sequence
  SiRNA target sequence
attcaataatgggtacgctgc

SEQ ID NO: 119090 - DNA, 21 bp, Artificial sequence
  SiRNA target sequence
ttcaataatgggtacgctgca

SEQ ID NO: 119091 - DNA, 21 bp, Artificial sequence
  SiRNA target sequence
tcaataatgggtacgctgcac

SEQ ID NO: 119092 - DNA, 21 bp, Artificial sequence
  SiRNA target sequence
caataatgggtacgctgcaca

SEQ ID NO: 119093 - DNA, 21 bp, Artificial sequence
  SiRNA target sequence
aataatgggtacgctgcacag

SEQ ID NO: 119094 - DNA, 21 bp, Artificial sequence
  SiRNA target sequence
ataatgggtacgctgcacagc

SEQ ID NO: 119095 - DNA, 21 bp, Artificial sequence
  SiRNA target sequence
taatgggtacgctgcacagca

SEQ ID NO: 119096 - DNA, 21 bp, Artificial sequence
  SiRNA target sequence
aatgggtacgctgcacagcac

SEQ ID NO: 119097 - DNA, 21 bp, Artificial sequence
  SiRNA target sequence
atgggtacgctgcacagcaca

SEQ ID NO: 119098 - DNA, 21 bp, Artificial sequence
  SiRNA target sequence
tgggtacgctgcacagcacac

SEQ ID NO: 119099 - DNA, 21 bp, Artificial sequence
  SiRNA target sequence
gggtacgctgcacagcacaca

SEQ ID NO: 119100 - DNA, 21 bp, Artificial sequence
  SiRNA target sequence
ggtacgctgcacagcacacac

SEQ ID NO: 119101 - DNA, 21 bp, Artificial sequence
  SiRNA target sequence
gtacgctgcacagcacacaca

SEQ ID NO: 119102 - DNA, 21 bp, Artificial sequence
  SiRNA target sequence
tacgctgcacagcacacacaa

SEQ ID NO: 119103 - DNA, 21 bp, Artificial sequence
  SiRNA target sequence
acgctgcacagcacacacaag

SEQ ID NO: 119104 - DNA, 21 bp, Artificial sequence
  SiRNA target sequence
cgctgcacagcacacacaaga

SEQ ID NO: 119105 - DNA, 21 bp, Artificial sequence
  SiRNA target sequence
gctgcacagcacacacaagat

SEQ ID NO: 119106 - DNA, 21 bp, Artificial sequence
  SiRNA target sequence
ctgcacagcacacacaagatt

SEQ ID NO: 119107 - DNA, 21 bp, Artificial sequence
  SiRNA target sequence
tgcacagcacacacaagattt

SEQ ID NO: 119108 - DNA, 21 bp, Artificial sequence
  SiRNA target sequence
gcacagcacacacaagatttt

SEQ ID NO: 119109 - DNA, 21 bp, Artificial sequence
  SiRNA target sequence
cacagcacacacaagattttg

SEQ ID NO: 119110 - DNA, 21 bp, Artificial sequence
  SiRNA target sequence
acagcacacacaagattttgc

SEQ ID NO: 119111 - DNA, 21 bp, Artificial sequence
  SiRNA target sequence
cagcacacacaagattttgca

SEQ ID NO: 119112 - DNA, 21 bp, Artificial sequence
  SiRNA target sequence
agcacacacaagattttgcac

SEQ ID NO: 119113 - DNA, 21 bp, Artificial sequence
  SiRNA target sequence
gcacacacaagattttgcacc

SEQ ID NO: 119114 - DNA, 21 bp, Artificial sequence
  SiRNA target sequence
cacacacaagattttgcacca

SEQ ID NO: 119115 - DNA, 21 bp, Artificial sequence
  SiRNA target sequence
acacacaagattttgcaccaa

SEQ ID NO: 119116 - DNA, 21 bp, Artificial sequence
  SiRNA target sequence
cacacaagattttgcaccaat

SEQ ID NO: 119117 - DNA, 21 bp, Artificial sequence
  SiRNA target sequence
acacaagattttgcaccaata

SEQ ID NO: 119118 - DNA, 21 bp, Artificial sequence
  SiRNA target sequence
cacaagattttgcaccaatat

SEQ ID NO: 119119 - DNA, 21 bp, Artificial sequence
  SiRNA target sequence
acaagattttgcaccaatata

SEQ ID NO: 119120 - DNA, 21 bp, Artificial sequence
  SiRNA target sequence
caagattttgcaccaatatat

SEQ ID NO: 119121 - DNA, 21 bp, Artificial sequence
  SiRNA target sequence
aagattttgcaccaatatatg

SEQ ID NO: 119122 - DNA, 21 bp, Artificial sequence
  SiRNA target sequence
agattttgcaccaatatatgg

SEQ ID NO: 119123 - DNA, 21 bp, Artificial sequence
  SiRNA target sequence
gattttgcaccaatatatggt

SEQ ID NO: 119124 - DNA, 21 bp, Artificial sequence
  SiRNA target sequence
attttgcaccaatatatggtt

SEQ ID NO: 119125 - DNA, 21 bp, Artificial sequence
  SiRNA target sequence
ttttgcaccaatatatggttc

SEQ ID NO: 119126 - DNA, 21 bp, Artificial sequence
  SiRNA target sequence
tttgcaccaatatatggttct

SEQ ID NO: 119127 - DNA, 21 bp, Artificial sequence
  SiRNA target sequence
ttgcaccaatatatggttcta

SEQ ID NO: 119128 - DNA, 21 bp, Artificial sequence
  SiRNA target sequence
tgcaccaatatatggttctat

SEQ ID NO: 119129 - DNA, 21 bp, Artificial sequence
  SiRNA target sequence
gcaccaatatatggttctatt

SEQ ID NO: 119130 - DNA, 21 bp, Artificial sequence
  SiRNA target sequence
caccaatatatggttctattc

SEQ ID NO: 119131 - DNA, 21 bp, Artificial sequence
  SiRNA target sequence
accaatatatggttctattcc

SEQ ID NO: 119132 - DNA, 21 bp, Artificial sequence
  SiRNA target sequence
ccaatatatggttctattcca

SEQ ID NO: 119133 - DNA, 21 bp, Artificial sequence
  SiRNA target sequence
caatatatggttctattccag

SEQ ID NO: 119134 - DNA, 21 bp, Artificial sequence
  SiRNA target sequence
aatatatggttctattccagg

SEQ ID NO: 119135 - DNA, 21 bp, Artificial sequence
  SiRNA target sequence
atatatggttctattccaggc

SEQ ID NO: 119136 - DNA, 21 bp, Artificial sequence
  SiRNA target sequence
tatatggttctattccaggcc

SEQ ID NO: 119137 - DNA, 21 bp, Artificial sequence
  SiRNA target sequence
atatggttctattccaggcct

SEQ ID NO: 119138 - DNA, 21 bp, Artificial sequence
  SiRNA target sequence
tatggttctattccaggcctt

SEQ ID NO: 119139 - DNA, 21 bp, Artificial sequence
  SiRNA target sequence
atggttctattccaggcctta

SEQ ID NO: 119140 - DNA, 21 bp, Artificial sequence
  SiRNA target sequence
tggttctattccaggccttaa

SEQ ID NO: 119141 - DNA, 21 bp, Artificial sequence
  SiRNA target sequence
ggttctattccaggccttaag

SEQ ID NO: 119142 - DNA, 21 bp, Artificial sequence
  SiRNA target sequence
gttctattccaggccttaagg

SEQ ID NO: 119143 - DNA, 21 bp, Artificial sequence
  SiRNA target sequence
ttctattccaggccttaaggt

SEQ ID NO: 119144 - DNA, 21 bp, Artificial sequence
  SiRNA target sequence
tctattccaggccttaaggtg

SEQ ID NO: 119145 - DNA, 21 bp, Artificial sequence
  SiRNA target sequence
ctattccaggccttaaggtgg

SEQ ID NO: 119146 - DNA, 21 bp, Artificial sequence
  SiRNA target sequence
tattccaggccttaaggtggt

SEQ ID NO: 119147 - DNA, 21 bp, Artificial sequence
  SiRNA target sequence
attccaggccttaaggtggtt

SEQ ID NO: 119148 - DNA, 21 bp, Artificial sequence
  SiRNA target sequence
ttccaggccttaaggtggttt

SEQ ID NO: 119149 - DNA, 21 bp, Artificial sequence
  SiRNA target sequence
tccaggccttaaggtggtttg

SEQ ID NO: 119150 - DNA, 21 bp, Artificial sequence
  SiRNA target sequence
ccaggccttaaggtggtttgt

SEQ ID NO: 119151 - DNA, 21 bp, Artificial sequence
  SiRNA target sequence
caggccttaaggtggtttgtc

SEQ ID NO: 119152 - DNA, 21 bp, Artificial sequence
  SiRNA target sequence
aggccttaaggtggtttgtcc

SEQ ID NO: 119153 - DNA, 21 bp, Artificial sequence
  SiRNA target sequence
ggccttaaggtggtttgtcct

SEQ ID NO: 119154 - DNA, 21 bp, Artificial sequence
  SiRNA target sequence
gccttaaggtggtttgtcctt

SEQ ID NO: 119155 - DNA, 21 bp, Artificial sequence
  SiRNA target sequence
ccttaaggtggtttgtcctta

SEQ ID NO: 119156 - DNA, 21 bp, Artificial sequence
  SiRNA target sequence
cttaaggtggtttgtccttat

SEQ ID NO: 119157 - DNA, 21 bp, Artificial sequence
  SiRNA target sequence
ttaaggtggtttgtccttata

SEQ ID NO: 119158 - DNA, 21 bp, Artificial sequence
  SiRNA target sequence
taaggtggtttgtccttatac

SEQ ID NO: 119159 - DNA, 21 bp, Artificial sequence
  SiRNA target sequence
aaggtggtttgtccttatacg

SEQ ID NO: 119160 - DNA, 21 bp, Artificial sequence
  SiRNA target sequence
aggtggtttgtccttatacgg

SEQ ID NO: 119161 - DNA, 21 bp, Artificial sequence
  SiRNA target sequence
ggtggtttgtccttatacggg

SEQ ID NO: 119162 - DNA, 21 bp, Artificial sequence
  SiRNA target sequence
gtggtttgtccttatacgggt

SEQ ID NO: 119163 - DNA, 21 bp, Artificial sequence
  SiRNA target sequence
tggtttgtccttatacgggta

SEQ ID NO: 119164 - DNA, 21 bp, Artificial sequence
  SiRNA target sequence
ggtttgtccttatacgggtaa

SEQ ID NO: 119165 - DNA, 21 bp, Artificial sequence
  SiRNA target sequence
gtttgtccttatacgggtaaa

SEQ ID NO: 119166 - DNA, 21 bp, Artificial sequence
  SiRNA target sequence
tttgtccttatacgggtaaag

SEQ ID NO: 119167 - DNA, 21 bp, Artificial sequence
  SiRNA target sequence
ttgtccttatacgggtaaaga

SEQ ID NO: 119168 - DNA, 21 bp, Artificial sequence
  SiRNA target sequence
tgtccttatacgggtaaagac

SEQ ID NO: 119169 - DNA, 21 bp, Artificial sequence
  SiRNA target sequence
gtccttatacgggtaaagacc

SEQ ID NO: 119170 - DNA, 21 bp, Artificial sequence
  SiRNA target sequence
tccttatacgggtaaagacca

SEQ ID NO: 119171 - DNA, 21 bp, Artificial sequence
  SiRNA target sequence
ccttatacgggtaaagaccat

SEQ ID NO: 119172 - DNA, 21 bp, Artificial sequence
  SiRNA target sequence
cttatacgggtaaagaccata

SEQ ID NO: 119173 - DNA, 21 bp, Artificial sequence
  SiRNA target sequence
ttatacgggtaaagaccataa

SEQ ID NO: 119174 - DNA, 21 bp, Artificial sequence
  SiRNA target sequence
tatacgggtaaagaccataaa

SEQ ID NO: 119175 - DNA, 21 bp, Artificial sequence
  SiRNA target sequence
atacgggtaaagaccataaag

SEQ ID NO: 119176 - DNA, 21 bp, Artificial sequence
  SiRNA target sequence
tacgggtaaagaccataaagg

SEQ ID NO: 119177 - DNA, 21 bp, Artificial sequence
  SiRNA target sequence
acgggtaaagaccataaagga

SEQ ID NO: 119178 - DNA, 21 bp, Artificial sequence
  SiRNA target sequence
cgggtaaagaccataaaggac

SEQ ID NO: 119179 - DNA, 21 bp, Artificial sequence
  SiRNA target sequence
gggtaaagaccataaaggact

SEQ ID NO: 119180 - DNA, 21 bp, Artificial sequence
  SiRNA target sequence
ggtaaagaccataaaggactt

SEQ ID NO: 119181 - DNA, 21 bp, Artificial sequence
  SiRNA target sequence
gtaaagaccataaaggacttt

SEQ ID NO: 119182 - DNA, 21 bp, Artificial sequence
  SiRNA target sequence
taaagaccataaaggactttt

SEQ ID NO: 119183 - DNA, 21 bp, Artificial sequence
  SiRNA target sequence
aaagaccataaaggactttta

SEQ ID NO: 119184 - DNA, 21 bp, Artificial sequence
  SiRNA target sequence
aagaccataaaggacttttaa

SEQ ID NO: 119185 - DNA, 21 bp, Artificial sequence
  SiRNA target sequence
agaccataaaggacttttaaa

SEQ ID NO: 119186 - DNA, 21 bp, Artificial sequence
  SiRNA target sequence
gaccataaaggacttttaaaa

SEQ ID NO: 119187 - DNA, 21 bp, Artificial sequence
  SiRNA target sequence
accataaaggacttttaaaaa

SEQ ID NO: 119188 - DNA, 21 bp, Artificial sequence
  SiRNA target sequence
ccataaaggacttttaaaaag

SEQ ID NO: 119189 - DNA, 21 bp, Artificial sequence
  SiRNA target sequence
cataaaggacttttaaaaagc

SEQ ID NO: 119190 - DNA, 21 bp, Artificial sequence
  SiRNA target sequence
ataaaggacttttaaaaagcg

SEQ ID NO: 119191 - DNA, 21 bp, Artificial sequence
  SiRNA target sequence
taaaggacttttaaaaagcgc

SEQ ID NO: 119192 - DNA, 21 bp, Artificial sequence
  SiRNA target sequence
aaaggacttttaaaaagcgct

SEQ ID NO: 119193 - DNA, 21 bp, Artificial sequence
  SiRNA target sequence
aaggacttttaaaaagcgcta

SEQ ID NO: 119194 - DNA, 21 bp, Artificial sequence
  SiRNA target sequence
aggacttttaaaaagcgctat

SEQ ID NO: 119195 - DNA, 21 bp, Artificial sequence
  SiRNA target sequence
ggacttttaaaaagcgctatt

SEQ ID NO: 119196 - DNA, 21 bp, Artificial sequence
  SiRNA target sequence
gacttttaaaaagcgctatta

SEQ ID NO: 119197 - DNA, 21 bp, Artificial sequence
  SiRNA target sequence
acttttaaaaagcgctattag

SEQ ID NO: 119198 - DNA, 21 bp, Artificial sequence
  SiRNA target sequence
cttttaaaaagcgctattaga

SEQ ID NO: 119199 - DNA, 21 bp, Artificial sequence
  SiRNA target sequence
ttttaaaaagcgctattagag

SEQ ID NO: 119200 - DNA, 21 bp, Artificial sequence
  SiRNA target sequence
tttaaaaagcgctattagaga

SEQ ID NO: 119201 - DNA, 21 bp, Artificial sequence
  SiRNA target sequence
ttaaaaagcgctattagagac

SEQ ID NO: 119202 - DNA, 21 bp, Artificial sequence
  SiRNA target sequence
taaaaagcgctattagagaca

SEQ ID NO: 119203 - DNA, 21 bp, Artificial sequence
  SiRNA target sequence
aaaaagcgctattagagacaa

SEQ ID NO: 119204 - DNA, 21 bp, Artificial sequence
  SiRNA target sequence
aaaagcgctattagagacaat

SEQ ID NO: 119205 - DNA, 21 bp, Artificial sequence
  SiRNA target sequence
aaagcgctattagagacaata

SEQ ID NO: 119206 - DNA, 21 bp, Artificial sequence
  SiRNA target sequence
aagcgctattagagacaataa

SEQ ID NO: 119207 - DNA, 21 bp, Artificial sequence
  SiRNA target sequence
agcgctattagagacaataac

SEQ ID NO: 119208 - DNA, 21 bp, Artificial sequence
  SiRNA target sequence
gcgctattagagacaataacc

SEQ ID NO: 119209 - DNA, 21 bp, Artificial sequence
  SiRNA target sequence
cgctattagagacaataaccc

SEQ ID NO: 119210 - DNA, 21 bp, Artificial sequence
  SiRNA target sequence
gctattagagacaataacccg

SEQ ID NO: 119211 - DNA, 21 bp, Artificial sequence
  SiRNA target sequence
ctattagagacaataacccgg

SEQ ID NO: 119212 - DNA, 21 bp, Artificial sequence
  SiRNA target sequence
tattagagacaataacccggt

SEQ ID NO: 119213 - DNA, 21 bp, Artificial sequence
  SiRNA target sequence
attagagacaataacccggtt

SEQ ID NO: 119214 - DNA, 21 bp, Artificial sequence
  SiRNA target sequence
ttagagacaataacccggtta

SEQ ID NO: 119215 - DNA, 21 bp, Artificial sequence
  SiRNA target sequence
tagagacaataacccggttat

SEQ ID NO: 119216 - DNA, 21 bp, Artificial sequence
  SiRNA target sequence
agagacaataacccggttata

SEQ ID NO: 119217 - DNA, 21 bp, Artificial sequence
  SiRNA target sequence
gagacaataacccggttatat

SEQ ID NO: 119218 - DNA, 21 bp, Artificial sequence
  SiRNA target sequence
agacaataacccggttatatt

SEQ ID NO: 119219 - DNA, 21 bp, Artificial sequence
  SiRNA target sequence
gacaataacccggttatattt

SEQ ID NO: 119220 - DNA, 21 bp, Artificial sequence
  SiRNA target sequence
acaataacccggttatatttc

SEQ ID NO: 119221 - DNA, 21 bp, Artificial sequence
  SiRNA target sequence
caataacccggttatatttct

SEQ ID NO: 119222 - DNA, 21 bp, Artificial sequence
  SiRNA target sequence
aataacccggttatatttctt

SEQ ID NO: 119223 - DNA, 21 bp, Artificial sequence
  SiRNA target sequence
ataacccggttatatttcttg

SEQ ID NO: 119224 - DNA, 21 bp, Artificial sequence
  SiRNA target sequence
taacccggttatatttcttga

SEQ ID NO: 119225 - DNA, 21 bp, Artificial sequence
  SiRNA target sequence
aacccggttatatttcttgag

SEQ ID NO: 119226 - DNA, 21 bp, Artificial sequence
  SiRNA target sequence
acccggttatatttcttgaga

SEQ ID NO: 119227 - DNA, 21 bp, Artificial sequence
  SiRNA target sequence
cccggttatatttcttgagaa

SEQ ID NO: 119228 - DNA, 21 bp, Artificial sequence
  SiRNA target sequence
ccggttatatttcttgagaat

SEQ ID NO: 119229 - DNA, 21 bp, Artificial sequence
  SiRNA target sequence
cggttatatttcttgagaatg

SEQ ID NO: 119230 - DNA, 21 bp, Artificial sequence
  SiRNA target sequence
ggttatatttcttgagaatga

SEQ ID NO: 119231 - DNA, 21 bp, Artificial sequence
  SiRNA target sequence
gttatatttcttgagaatgaa

SEQ ID NO: 119232 - DNA, 21 bp, Artificial sequence
  SiRNA target sequence
ttatatttcttgagaatgaaa

SEQ ID NO: 119233 - DNA, 21 bp, Artificial sequence
  SiRNA target sequence
tatatttcttgagaatgaaat

SEQ ID NO: 119234 - DNA, 21 bp, Artificial sequence
  SiRNA target sequence
atatttcttgagaatgaaata

SEQ ID NO: 119235 - DNA, 21 bp, Artificial sequence
  SiRNA target sequence
tatttcttgagaatgaaatat

SEQ ID NO: 119236 - DNA, 21 bp, Artificial sequence
  SiRNA target sequence
atttcttgagaatgaaatatt

SEQ ID NO: 119237 - DNA, 21 bp, Artificial sequence
  SiRNA target sequence
tttcttgagaatgaaatatta

SEQ ID NO: 119238 - DNA, 21 bp, Artificial sequence
  SiRNA target sequence
ttcttgagaatgaaatattat

SEQ ID NO: 119239 - DNA, 21 bp, Artificial sequence
  SiRNA target sequence
tcttgagaatgaaatattata

SEQ ID NO: 119240 - DNA, 21 bp, Artificial sequence
  SiRNA target sequence
cttgagaatgaaatattatat

SEQ ID NO: 119241 - DNA, 21 bp, Artificial sequence
  SiRNA target sequence
ttgagaatgaaatattatata

SEQ ID NO: 119242 - DNA, 21 bp, Artificial sequence
  SiRNA target sequence
tgagaatgaaatattatataa

SEQ ID NO: 119243 - DNA, 21 bp, Artificial sequence
  SiRNA target sequence
gagaatgaaatattatataaa

SEQ ID NO: 119244 - DNA, 21 bp, Artificial sequence
  SiRNA target sequence
agaatgaaatattatataaag

SEQ ID NO: 119245 - DNA, 21 bp, Artificial sequence
  SiRNA target sequence
gaatgaaatattatataaaga

SEQ ID NO: 119246 - DNA, 21 bp, Artificial sequence
  SiRNA target sequence
aatgaaatattatataaagat

SEQ ID NO: 119247 - DNA, 21 bp, Artificial sequence
  SiRNA target sequence
atgaaatattatataaagata

SEQ ID NO: 119248 - DNA, 21 bp, Artificial sequence
  SiRNA target sequence
tgaaatattatataaagataa

SEQ ID NO: 119249 - DNA, 21 bp, Artificial sequence
  SiRNA target sequence
gaaatattatataaagataaa

SEQ ID NO: 119250 - DNA, 21 bp, Artificial sequence
  SiRNA target sequence
aaatattatataaagataaat

SEQ ID NO: 119251 - DNA, 21 bp, Artificial sequence
  SiRNA target sequence
aatattatataaagataaata

SEQ ID NO: 119252 - DNA, 21 bp, Artificial sequence
  SiRNA target sequence
atattatataaagataaatac

SEQ ID NO: 119253 - DNA, 21 bp, Artificial sequence
  SiRNA target sequence
tattatataaagataaatacc

SEQ ID NO: 119254 - DNA, 21 bp, Artificial sequence
  SiRNA target sequence
attatataaagataaatacct

SEQ ID NO: 119255 - DNA, 21 bp, Artificial sequence
  SiRNA target sequence
ttatataaagataaatacctt

SEQ ID NO: 119256 - DNA, 21 bp, Artificial sequence
  SiRNA target sequence
tatataaagataaataccttg

SEQ ID NO: 119257 - DNA, 21 bp, Artificial sequence
  SiRNA target sequence
atataaagataaataccttga

SEQ ID NO: 119258 - DNA, 21 bp, Artificial sequence
  SiRNA target sequence
tataaagataaataccttgaa

SEQ ID NO: 119259 - DNA, 21 bp, Artificial sequence
  SiRNA target sequence
ataaagataaataccttgaag

SEQ ID NO: 119260 - DNA, 21 bp, Artificial sequence
  SiRNA target sequence
taaagataaataccttgaagt

SEQ ID NO: 119261 - DNA, 21 bp, Artificial sequence
  SiRNA target sequence
aaagataaataccttgaagtg

SEQ ID NO: 119262 - DNA, 21 bp, Artificial sequence
  SiRNA target sequence
aagataaataccttgaagtgt

SEQ ID NO: 119263 - DNA, 21 bp, Artificial sequence
  SiRNA target sequence
agataaataccttgaagtgtc

SEQ ID NO: 119264 - DNA, 21 bp, Artificial sequence
  SiRNA target sequence
gataaataccttgaagtgtct

SEQ ID NO: 119265 - DNA, 21 bp, Artificial sequence
  SiRNA target sequence
ataaataccttgaagtgtcta

SEQ ID NO: 119266 - DNA, 21 bp, Artificial sequence
  SiRNA target sequence
taaataccttgaagtgtctaa

SEQ ID NO: 119267 - DNA, 21 bp, Artificial sequence
  SiRNA target sequence
aaataccttgaagtgtctaat

SEQ ID NO: 119268 - DNA, 21 bp, Artificial sequence
  SiRNA target sequence
aataccttgaagtgtctaata

SEQ ID NO: 119269 - DNA, 21 bp, Artificial sequence
  SiRNA target sequence
ataccttgaagtgtctaataa

SEQ ID NO: 119270 - DNA, 21 bp, Artificial sequence
  SiRNA target sequence
taccttgaagtgtctaataat

SEQ ID NO: 119271 - DNA, 21 bp, Artificial sequence
  SiRNA target sequence
accttgaagtgtctaataatt

SEQ ID NO: 119272 - DNA, 21 bp, Artificial sequence
  SiRNA target sequence
ccttgaagtgtctaataatta

SEQ ID NO: 119273 - DNA, 21 bp, Artificial sequence
  SiRNA target sequence
cttgaagtgtctaataattat

SEQ ID NO: 119274 - DNA, 21 bp, Artificial sequence
  SiRNA target sequence
ttgaagtgtctaataattata

SEQ ID NO: 119275 - DNA, 21 bp, Artificial sequence
  SiRNA target sequence
tgaagtgtctaataattatat

SEQ ID NO: 119276 - DNA, 21 bp, Artificial sequence
  SiRNA target sequence
gaagtgtctaataattatatt

SEQ ID NO: 119277 - DNA, 21 bp, Artificial sequence
  SiRNA target sequence
aagtgtctaataattatattc

SEQ ID NO: 119278 - DNA, 21 bp, Artificial sequence
  SiRNA target sequence
agtgtctaataattatattca

SEQ ID NO: 119279 - DNA, 21 bp, Artificial sequence
  SiRNA target sequence
gtgtctaataattatattcaa

SEQ ID NO: 119280 - DNA, 21 bp, Artificial sequence
  SiRNA target sequence
tgtctaataattatattcaac

SEQ ID NO: 119281 - DNA, 21 bp, Artificial sequence
  SiRNA target sequence
gtctaataattatattcaacc

SEQ ID NO: 119282 - DNA, 21 bp, Artificial sequence
  SiRNA target sequence
tctaataattatattcaacca

SEQ ID NO: 119283 - DNA, 21 bp, Artificial sequence
  SiRNA target sequence
ctaataattatattcaaccac

SEQ ID NO: 119284 - DNA, 21 bp, Artificial sequence
  SiRNA target sequence
taataattatattcaaccact

SEQ ID NO: 119285 - DNA, 21 bp, Artificial sequence
  SiRNA target sequence
aataattatattcaaccactt

SEQ ID NO: 119286 - DNA, 21 bp, Artificial sequence
  SiRNA target sequence
ataattatattcaaccacttg

SEQ ID NO: 119287 - DNA, 21 bp, Artificial sequence
  SiRNA target sequence
taattatattcaaccacttga

SEQ ID NO: 119288 - DNA, 21 bp, Artificial sequence
  SiRNA target sequence
aattatattcaaccacttgac

SEQ ID NO: 119289 - DNA, 21 bp, Artificial sequence
  SiRNA target sequence
attatattcaaccacttgaca

SEQ ID NO: 119290 - DNA, 21 bp, Artificial sequence
  SiRNA target sequence
ttatattcaaccacttgacaa

SEQ ID NO: 119291 - DNA, 21 bp, Artificial sequence
  SiRNA target sequence
tatattcaaccacttgacaag

SEQ ID NO: 119292 - DNA, 21 bp, Artificial sequence
  SiRNA target sequence
atattcaaccacttgacaagg

SEQ ID NO: 119293 - DNA, 21 bp, Artificial sequence
  SiRNA target sequence
tattcaaccacttgacaaggc

SEQ ID NO: 119294 - DNA, 21 bp, Artificial sequence
  SiRNA target sequence
attcaaccacttgacaaggca

SEQ ID NO: 119295 - DNA, 21 bp, Artificial sequence
  SiRNA target sequence
ttcaaccacttgacaaggcag

SEQ ID NO: 119296 - DNA, 21 bp, Artificial sequence
  SiRNA target sequence
tcaaccacttgacaaggcagt

SEQ ID NO: 119297 - DNA, 21 bp, Artificial sequence
  SiRNA target sequence
caaccacttgacaaggcagta

SEQ ID NO: 119298 - DNA, 21 bp, Artificial sequence
  SiRNA target sequence
aaccacttgacaaggcagtaa

SEQ ID NO: 119299 - DNA, 21 bp, Artificial sequence
  SiRNA target sequence
accacttgacaaggcagtaat

SEQ ID NO: 119300 - DNA, 21 bp, Artificial sequence
  SiRNA target sequence
ccacttgacaaggcagtaatt

SEQ ID NO: 119301 - DNA, 21 bp, Artificial sequence
  SiRNA target sequence
cacttgacaaggcagtaattg

SEQ ID NO: 119302 - DNA, 21 bp, Artificial sequence
  SiRNA target sequence
acttgacaaggcagtaattga

SEQ ID NO: 119303 - DNA, 21 bp, Artificial sequence
  SiRNA target sequence
cttgacaaggcagtaattgaa

SEQ ID NO: 119304 - DNA, 21 bp, Artificial sequence
  SiRNA target sequence
ttgacaaggcagtaattgaaa

SEQ ID NO: 119305 - DNA, 21 bp, Artificial sequence
  SiRNA target sequence
tgacaaggcagtaattgaaaa

SEQ ID NO: 119306 - DNA, 21 bp, Artificial sequence
  SiRNA target sequence
gacaaggcagtaattgaaaaa

SEQ ID NO: 119307 - DNA, 21 bp, Artificial sequence
  SiRNA target sequence
acaaggcagtaattgaaaaaa

SEQ ID NO: 119308 - DNA, 21 bp, Artificial sequence
  SiRNA target sequence
caaggcagtaattgaaaaaaa

SEQ ID NO: 119309 - DNA, 21 bp, Artificial sequence
  SiRNA target sequence
aaggcagtaattgaaaaaaat

SEQ ID NO: 119310 - DNA, 21 bp, Artificial sequence
  SiRNA target sequence
aggcagtaattgaaaaaaatg

SEQ ID NO: 119311 - DNA, 21 bp, Artificial sequence
  SiRNA target sequence
ggcagtaattgaaaaaaatgg

SEQ ID NO: 119312 - DNA, 21 bp, Artificial sequence
  SiRNA target sequence
gcagtaattgaaaaaaatggt

SEQ ID NO: 119313 - DNA, 21 bp, Artificial sequence
  SiRNA target sequence
cagtaattgaaaaaaatggtg

SEQ ID NO: 119314 - DNA, 21 bp, Artificial sequence
  SiRNA target sequence
agtaattgaaaaaaatggtgt

SEQ ID NO: 119315 - DNA, 21 bp, Artificial sequence
  SiRNA target sequence
gtaattgaaaaaaatggtgtt

SEQ ID NO: 119316 - DNA, 21 bp, Artificial sequence
  SiRNA target sequence
taattgaaaaaaatggtgttg

SEQ ID NO: 119317 - DNA, 21 bp, Artificial sequence
  SiRNA target sequence
aattgaaaaaaatggtgttga

SEQ ID NO: 119318 - DNA, 21 bp, Artificial sequence
  SiRNA target sequence
attgaaaaaaatggtgttgac

SEQ ID NO: 119319 - DNA, 21 bp, Artificial sequence
  SiRNA target sequence
ttgaaaaaaatggtgttgacg

SEQ ID NO: 119320 - DNA, 21 bp, Artificial sequence
  SiRNA target sequence
tgaaaaaaatggtgttgacgt

SEQ ID NO: 119321 - DNA, 21 bp, Artificial sequence
  SiRNA target sequence
gaaaaaaatggtgttgacgtt

SEQ ID NO: 119322 - DNA, 21 bp, Artificial sequence
  SiRNA target sequence
aaaaaaatggtgttgacgtta

SEQ ID NO: 119323 - DNA, 21 bp, Artificial sequence
  SiRNA target sequence
aaaaaatggtgttgacgttac

SEQ ID NO: 119324 - DNA, 21 bp, Artificial sequence
  SiRNA target sequence
aaaaatggtgttgacgttaca

SEQ ID NO: 119325 - DNA, 21 bp, Artificial sequence
  SiRNA target sequence
aaaatggtgttgacgttacag

SEQ ID NO: 119326 - DNA, 21 bp, Artificial sequence
  SiRNA target sequence
aaatggtgttgacgttacagt

SEQ ID NO: 119327 - DNA, 21 bp, Artificial sequence
  SiRNA target sequence
aatggtgttgacgttacagtt

SEQ ID NO: 119328 - DNA, 21 bp, Artificial sequence
  SiRNA target sequence
atggtgttgacgttacagttt

SEQ ID NO: 119329 - DNA, 21 bp, Artificial sequence
  SiRNA target sequence
tggtgttgacgttacagtttt

SEQ ID NO: 119330 - DNA, 21 bp, Artificial sequence
  SiRNA target sequence
ggtgttgacgttacagtttta

SEQ ID NO: 119331 - DNA, 21 bp, Artificial sequence
  SiRNA target sequence
gtgttgacgttacagttttag

SEQ ID NO: 119332 - DNA, 21 bp, Artificial sequence
  SiRNA target sequence
tgttgacgttacagttttagg

SEQ ID NO: 119333 - DNA, 21 bp, Artificial sequence
  SiRNA target sequence
gttgacgttacagttttagga

SEQ ID NO: 119334 - DNA, 21 bp, Artificial sequence
  SiRNA target sequence
ttgacgttacagttttaggaa

SEQ ID NO: 119335 - DNA, 21 bp, Artificial sequence
  SiRNA target sequence
tgacgttacagttttaggaat

SEQ ID NO: 119336 - DNA, 21 bp, Artificial sequence
  SiRNA target sequence
gacgttacagttttaggaata

SEQ ID NO: 119337 - DNA, 21 bp, Artificial sequence
  SiRNA target sequence
acgttacagttttaggaatat

SEQ ID NO: 119338 - DNA, 21 bp, Artificial sequence
  SiRNA target sequence
cgttacagttttaggaatatc

SEQ ID NO: 119339 - DNA, 21 bp, Artificial sequence
  SiRNA target sequence
gttacagttttaggaatatca

SEQ ID NO: 119340 - DNA, 21 bp, Artificial sequence
  SiRNA target sequence
ttacagttttaggaatatcaa

SEQ ID NO: 119341 - DNA, 21 bp, Artificial sequence
  SiRNA target sequence
tacagttttaggaatatcaat

SEQ ID NO: 119342 - DNA, 21 bp, Artificial sequence
  SiRNA target sequence
acagttttaggaatatcaata

SEQ ID NO: 119343 - DNA, 21 bp, Artificial sequence
  SiRNA target sequence
cagttttaggaatatcaataa

SEQ ID NO: 119344 - DNA, 21 bp, Artificial sequence
  SiRNA target sequence
agttttaggaatatcaataag

SEQ ID NO: 119345 - DNA, 21 bp, Artificial sequence
  SiRNA target sequence
gttttaggaatatcaataagt

SEQ ID NO: 119346 - DNA, 21 bp, Artificial sequence
  SiRNA target sequence
ttttaggaatatcaataagtc

SEQ ID NO: 119347 - DNA, 21 bp, Artificial sequence
  SiRNA target sequence
tttaggaatatcaataagtct

SEQ ID NO: 119348 - DNA, 21 bp, Artificial sequence
  SiRNA target sequence
ttaggaatatcaataagtctt

SEQ ID NO: 119349 - DNA, 21 bp, Artificial sequence
  SiRNA target sequence
taggaatatcaataagtctta

SEQ ID NO: 119350 - DNA, 21 bp, Artificial sequence
  SiRNA target sequence
aggaatatcaataagtcttaa

SEQ ID NO: 119351 - DNA, 21 bp, Artificial sequence
  SiRNA target sequence
ggaatatcaataagtcttaaa

SEQ ID NO: 119352 - DNA, 21 bp, Artificial sequence
  SiRNA target sequence
gaatatcaataagtcttaaag

SEQ ID NO: 119353 - DNA, 21 bp, Artificial sequence
  SiRNA target sequence
aatatcaataagtcttaaaga

SEQ ID NO: 119354 - DNA, 21 bp, Artificial sequence
  SiRNA target sequence
atatcaataagtcttaaagaa

SEQ ID NO: 119355 - DNA, 21 bp, Artificial sequence
  SiRNA target sequence
tatcaataagtcttaaagaaa

SEQ ID NO: 119356 - DNA, 21 bp, Artificial sequence
  SiRNA target sequence
atcaataagtcttaaagaaat

SEQ ID NO: 119357 - DNA, 21 bp, Artificial sequence
  SiRNA target sequence
tcaataagtcttaaagaaatt

SEQ ID NO: 119358 - DNA, 21 bp, Artificial sequence
  SiRNA target sequence
caataagtcttaaagaaattt

SEQ ID NO: 119359 - DNA, 21 bp, Artificial sequence
  SiRNA target sequence
aataagtcttaaagaaatttt

SEQ ID NO: 119360 - DNA, 21 bp, Artificial sequence
  SiRNA target sequence
ataagtcttaaagaaattttt

SEQ ID NO: 119361 - DNA, 21 bp, Artificial sequence
  SiRNA target sequence
taagtcttaaagaaattttta

SEQ ID NO: 119362 - DNA, 21 bp, Artificial sequence
  SiRNA target sequence
aagtcttaaagaaatttttaa

SEQ ID NO: 119363 - DNA, 21 bp, Artificial sequence
  SiRNA target sequence
agtcttaaagaaatttttaaa

SEQ ID NO: 119364 - DNA, 21 bp, Artificial sequence
  SiRNA target sequence
gtcttaaagaaatttttaaag

SEQ ID NO: 119365 - DNA, 21 bp, Artificial sequence
  SiRNA target sequence
tcttaaagaaatttttaaagc

SEQ ID NO: 119366 - DNA, 21 bp, Artificial sequence
  SiRNA target sequence
cttaaagaaatttttaaagca

SEQ ID NO: 119367 - DNA, 21 bp, Artificial sequence
  SiRNA target sequence
ttaaagaaatttttaaagcag

SEQ ID NO: 119368 - DNA, 21 bp, Artificial sequence
  SiRNA target sequence
taaagaaatttttaaagcaga

SEQ ID NO: 119369 - DNA, 21 bp, Artificial sequence
  SiRNA target sequence
aaagaaatttttaaagcagac

SEQ ID NO: 119370 - DNA, 21 bp, Artificial sequence
  SiRNA target sequence
aagaaatttttaaagcagaca

SEQ ID NO: 119371 - DNA, 21 bp, Artificial sequence
  SiRNA target sequence
agaaatttttaaagcagacag

SEQ ID NO: 119372 - DNA, 21 bp, Artificial sequence
  SiRNA target sequence
gaaatttttaaagcagacagt

SEQ ID NO: 119373 - DNA, 21 bp, Artificial sequence
  SiRNA target sequence
aaatttttaaagcagacagtt

SEQ ID NO: 119374 - DNA, 21 bp, Artificial sequence
  SiRNA target sequence
aatttttaaagcagacagttt

SEQ ID NO: 119375 - DNA, 21 bp, Artificial sequence
  SiRNA target sequence
atttttaaagcagacagtttg

SEQ ID NO: 119376 - DNA, 21 bp, Artificial sequence
  SiRNA target sequence
tttttaaagcagacagtttgt

SEQ ID NO: 119377 - DNA, 21 bp, Artificial sequence
  SiRNA target sequence
ttttaaagcagacagtttgtt

SEQ ID NO: 119378 - DNA, 21 bp, Artificial sequence
  SiRNA target sequence
tttaaagcagacagtttgtta

SEQ ID NO: 119379 - DNA, 21 bp, Artificial sequence
  SiRNA target sequence
ttaaagcagacagtttgttag

SEQ ID NO: 119380 - DNA, 21 bp, Artificial sequence
  SiRNA target sequence
taaagcagacagtttgttaga

SEQ ID NO: 119381 - DNA, 21 bp, Artificial sequence
  SiRNA target sequence
aaagcagacagtttgttagag

SEQ ID NO: 119382 - DNA, 21 bp, Artificial sequence
  SiRNA target sequence
aagcagacagtttgttagaga

SEQ ID NO: 119383 - DNA, 21 bp, Artificial sequence
  SiRNA target sequence
agcagacagtttgttagagaa

SEQ ID NO: 119384 - DNA, 21 bp, Artificial sequence
  SiRNA target sequence
gcagacagtttgttagagaaa

SEQ ID NO: 119385 - DNA, 21 bp, Artificial sequence
  SiRNA target sequence
cagacagtttgttagagaaaa

SEQ ID NO: 119386 - DNA, 21 bp, Artificial sequence
  SiRNA target sequence
agacagtttgttagagaaaaa

SEQ ID NO: 119387 - DNA, 21 bp, Artificial sequence
  SiRNA target sequence
gacagtttgttagagaaaaaa

SEQ ID NO: 119388 - DNA, 21 bp, Artificial sequence
  SiRNA target sequence
acagtttgttagagaaaaaaa

SEQ ID NO: 119389 - DNA, 21 bp, Artificial sequence
  SiRNA target sequence
cagtttgttagagaaaaaaaa

SEQ ID NO: 119390 - DNA, 21 bp, Artificial sequence
  SiRNA target sequence
agtttgttagagaaaaaaaat

SEQ ID NO: 119391 - DNA, 21 bp, Artificial sequence
  SiRNA target sequence
gtttgttagagaaaaaaaata

SEQ ID NO: 119392 - DNA, 21 bp, Artificial sequence
  SiRNA target sequence
tttgttagagaaaaaaaatat

SEQ ID NO: 119393 - DNA, 21 bp, Artificial sequence
  SiRNA target sequence
ttgttagagaaaaaaaatatc

SEQ ID NO: 119394 - DNA, 21 bp, Artificial sequence
  SiRNA target sequence
tgttagagaaaaaaaatatcg

SEQ ID NO: 119395 - DNA, 21 bp, Artificial sequence
  SiRNA target sequence
gttagagaaaaaaaatatcga

SEQ ID NO: 119396 - DNA, 21 bp, Artificial sequence
  SiRNA target sequence
ttagagaaaaaaaatatcgac

SEQ ID NO: 119397 - DNA, 21 bp, Artificial sequence
  SiRNA target sequence
tagagaaaaaaaatatcgaca

SEQ ID NO: 119398 - DNA, 21 bp, Artificial sequence
  SiRNA target sequence
agagaaaaaaaatatcgacat

SEQ ID NO: 119399 - DNA, 21 bp, Artificial sequence
  SiRNA target sequence
gagaaaaaaaatatcgacatt

SEQ ID NO: 119400 - DNA, 21 bp, Artificial sequence
  SiRNA target sequence
agaaaaaaaatatcgacattg

SEQ ID NO: 119401 - DNA, 21 bp, Artificial sequence
  SiRNA target sequence
gaaaaaaaatatcgacattga

SEQ ID NO: 119402 - DNA, 21 bp, Artificial sequence
  SiRNA target sequence
aaaaaaaatatcgacattgag

SEQ ID NO: 119403 - DNA, 21 bp, Artificial sequence
  SiRNA target sequence
aaaaaaatatcgacattgaga

SEQ ID NO: 119404 - DNA, 21 bp, Artificial sequence
  SiRNA target sequence
aaaaaatatcgacattgagat

SEQ ID NO: 119405 - DNA, 21 bp, Artificial sequence
  SiRNA target sequence
aaaaatatcgacattgagata

SEQ ID NO: 119406 - DNA, 21 bp, Artificial sequence
  SiRNA target sequence
aaaatatcgacattgagataa

SEQ ID NO: 119407 - DNA, 21 bp, Artificial sequence
  SiRNA target sequence
aaatatcgacattgagataat

SEQ ID NO: 119408 - DNA, 21 bp, Artificial sequence
  SiRNA target sequence
aatatcgacattgagataatt

SEQ ID NO: 119409 - DNA, 21 bp, Artificial sequence
  SiRNA target sequence
atatcgacattgagataatta

SEQ ID NO: 119410 - DNA, 21 bp, Artificial sequence
  SiRNA target sequence
tatcgacattgagataattaa

SEQ ID NO: 119411 - DNA, 21 bp, Artificial sequence
  SiRNA target sequence
atcgacattgagataattaat

SEQ ID NO: 119412 - DNA, 21 bp, Artificial sequence
  SiRNA target sequence
tcgacattgagataattaatc

SEQ ID NO: 119413 - DNA, 21 bp, Artificial sequence
  SiRNA target sequence
cgacattgagataattaatct

SEQ ID NO: 119414 - DNA, 21 bp, Artificial sequence
  SiRNA target sequence
gacattgagataattaatctt

SEQ ID NO: 119415 - DNA, 21 bp, Artificial sequence
  SiRNA target sequence
acattgagataattaatcttg

SEQ ID NO: 119416 - DNA, 21 bp, Artificial sequence
  SiRNA target sequence
cattgagataattaatcttgt

SEQ ID NO: 119417 - DNA, 21 bp, Artificial sequence
  SiRNA target sequence
attgagataattaatcttgtg

SEQ ID NO: 119418 - DNA, 21 bp, Artificial sequence
  SiRNA target sequence
ttgagataattaatcttgtgt

SEQ ID NO: 119419 - DNA, 21 bp, Artificial sequence
  SiRNA target sequence
tgagataattaatcttgtgtc

SEQ ID NO: 119420 - DNA, 21 bp, Artificial sequence
  SiRNA target sequence
gagataattaatcttgtgtca

SEQ ID NO: 119421 - DNA, 21 bp, Artificial sequence
  SiRNA target sequence
agataattaatcttgtgtcaa

SEQ ID NO: 119422 - DNA, 21 bp, Artificial sequence
  SiRNA target sequence
gataattaatcttgtgtcaat

SEQ ID NO: 119423 - DNA, 21 bp, Artificial sequence
  SiRNA target sequence
ataattaatcttgtgtcaata

SEQ ID NO: 119424 - DNA, 21 bp, Artificial sequence
  SiRNA target sequence
taattaatcttgtgtcaataa

SEQ ID NO: 119425 - DNA, 21 bp, Artificial sequence
  SiRNA target sequence
aattaatcttgtgtcaataaa

SEQ ID NO: 119426 - DNA, 21 bp, Artificial sequence
  SiRNA target sequence
attaatcttgtgtcaataaaa

SEQ ID NO: 119427 - DNA, 21 bp, Artificial sequence
  SiRNA target sequence
ttaatcttgtgtcaataaaac

SEQ ID NO: 119428 - DNA, 21 bp, Artificial sequence
  SiRNA target sequence
taatcttgtgtcaataaaacc

SEQ ID NO: 119429 - DNA, 21 bp, Artificial sequence
  SiRNA target sequence
aatcttgtgtcaataaaacca

SEQ ID NO: 119430 - DNA, 21 bp, Artificial sequence
  SiRNA target sequence
atcttgtgtcaataaaaccaa

SEQ ID NO: 119431 - DNA, 21 bp, Artificial sequence
  SiRNA target sequence
tcttgtgtcaataaaaccaat

SEQ ID NO: 119432 - DNA, 21 bp, Artificial sequence
  SiRNA target sequence
cttgtgtcaataaaaccaatt

SEQ ID NO: 119433 - DNA, 21 bp, Artificial sequence
  SiRNA target sequence
ttgtgtcaataaaaccaattg

SEQ ID NO: 119434 - DNA, 21 bp, Artificial sequence
  SiRNA target sequence
tgtgtcaataaaaccaattga

SEQ ID NO: 119435 - DNA, 21 bp, Artificial sequence
  SiRNA target sequence
gtgtcaataaaaccaattgat

SEQ ID NO: 119436 - DNA, 21 bp, Artificial sequence
  SiRNA target sequence
tgtcaataaaaccaattgatt

SEQ ID NO: 119437 - DNA, 21 bp, Artificial sequence
  SiRNA target sequence
gtcaataaaaccaattgatta

SEQ ID NO: 119438 - DNA, 21 bp, Artificial sequence
  SiRNA target sequence
tcaataaaaccaattgattat

SEQ ID NO: 119439 - DNA, 21 bp, Artificial sequence
  SiRNA target sequence
caataaaaccaattgattatg

SEQ ID NO: 119440 - DNA, 21 bp, Artificial sequence
  SiRNA target sequence
aataaaaccaattgattatgt

SEQ ID NO: 119441 - DNA, 21 bp, Artificial sequence
  SiRNA target sequence
ataaaaccaattgattatgtt

SEQ ID NO: 119442 - DNA, 21 bp, Artificial sequence
  SiRNA target sequence
taaaaccaattgattatgtta

SEQ ID NO: 119443 - DNA, 21 bp, Artificial sequence
  SiRNA target sequence
aaaaccaattgattatgttac

SEQ ID NO: 119444 - DNA, 21 bp, Artificial sequence
  SiRNA target sequence
aaaccaattgattatgttact

SEQ ID NO: 119445 - DNA, 21 bp, Artificial sequence
  SiRNA target sequence
aaccaattgattatgttacta

SEQ ID NO: 119446 - DNA, 21 bp, Artificial sequence
  SiRNA target sequence
accaattgattatgttactat

SEQ ID NO: 119447 - DNA, 21 bp, Artificial sequence
  SiRNA target sequence
ccaattgattatgttactatt

SEQ ID NO: 119448 - DNA, 21 bp, Artificial sequence
  SiRNA target sequence
caattgattatgttactattg

SEQ ID NO: 119449 - DNA, 21 bp, Artificial sequence
  SiRNA target sequence
aattgattatgttactattga

SEQ ID NO: 119450 - DNA, 21 bp, Artificial sequence
  SiRNA target sequence
attgattatgttactattgaa

SEQ ID NO: 119451 - DNA, 21 bp, Artificial sequence
  SiRNA target sequence
ttgattatgttactattgaaa

SEQ ID NO: 119452 - DNA, 21 bp, Artificial sequence
  SiRNA target sequence
tgattatgttactattgaaat

SEQ ID NO: 119453 - DNA, 21 bp, Artificial sequence
  SiRNA target sequence
gattatgttactattgaaata

SEQ ID NO: 119454 - DNA, 21 bp, Artificial sequence
  SiRNA target sequence
attatgttactattgaaatat

SEQ ID NO: 119455 - DNA, 21 bp, Artificial sequence
  SiRNA target sequence
ttatgttactattgaaatatc

SEQ ID NO: 119456 - DNA, 21 bp, Artificial sequence
  SiRNA target sequence
tatgttactattgaaatatca

SEQ ID NO: 119457 - DNA, 21 bp, Artificial sequence
  SiRNA target sequence
atgttactattgaaatatcag

SEQ ID NO: 119458 - DNA, 21 bp, Artificial sequence
  SiRNA target sequence
tgttactattgaaatatcagt

SEQ ID NO: 119459 - DNA, 21 bp, Artificial sequence
  SiRNA target sequence
gttactattgaaatatcagtc

SEQ ID NO: 119460 - DNA, 21 bp, Artificial sequence
  SiRNA target sequence
ttactattgaaatatcagtca

SEQ ID NO: 119461 - DNA, 21 bp, Artificial sequence
  SiRNA target sequence
tactattgaaatatcagtcaa

SEQ ID NO: 119462 - DNA, 21 bp, Artificial sequence
  SiRNA target sequence
actattgaaatatcagtcaaa

SEQ ID NO: 119463 - DNA, 21 bp, Artificial sequence
  SiRNA target sequence
ctattgaaatatcagtcaaaa

SEQ ID NO: 119464 - DNA, 21 bp, Artificial sequence
  SiRNA target sequence
tattgaaatatcagtcaaaaa

SEQ ID NO: 119465 - DNA, 21 bp, Artificial sequence
  SiRNA target sequence
attgaaatatcagtcaaaaaa

SEQ ID NO: 119466 - DNA, 21 bp, Artificial sequence
  SiRNA target sequence
ttgaaatatcagtcaaaaaaa

SEQ ID NO: 119467 - DNA, 21 bp, Artificial sequence
  SiRNA target sequence
tgaaatatcagtcaaaaaaac

SEQ ID NO: 119468 - DNA, 21 bp, Artificial sequence
  SiRNA target sequence
gaaatatcagtcaaaaaaaca

SEQ ID NO: 119469 - DNA, 21 bp, Artificial sequence
  SiRNA target sequence
aaatatcagtcaaaaaaacac

SEQ ID NO: 119470 - DNA, 21 bp, Artificial sequence
  SiRNA target sequence
aatatcagtcaaaaaaacaca

SEQ ID NO: 119471 - DNA, 21 bp, Artificial sequence
  SiRNA target sequence
atatcagtcaaaaaaacacaa

SEQ ID NO: 119472 - DNA, 21 bp, Artificial sequence
  SiRNA target sequence
tatcagtcaaaaaaacacaaa

SEQ ID NO: 119473 - DNA, 21 bp, Artificial sequence
  SiRNA target sequence
atcagtcaaaaaaacacaaaa

SEQ ID NO: 119474 - DNA, 21 bp, Artificial sequence
  SiRNA target sequence
tcagtcaaaaaaacacaaaag

SEQ ID NO: 119475 - DNA, 21 bp, Artificial sequence
  SiRNA target sequence
cagtcaaaaaaacacaaaagt

SEQ ID NO: 119476 - DNA, 21 bp, Artificial sequence
  SiRNA target sequence
agtcaaaaaaacacaaaagtt

SEQ ID NO: 119477 - DNA, 21 bp, Artificial sequence
  SiRNA target sequence
gtcaaaaaaacacaaaagtta

SEQ ID NO: 119478 - DNA, 21 bp, Artificial sequence
  SiRNA target sequence
tcaaaaaaacacaaaagttag

SEQ ID NO: 119479 - DNA, 21 bp, Artificial sequence
  SiRNA target sequence
caaaaaaacacaaaagttagt

SEQ ID NO: 119480 - DNA, 21 bp, Artificial sequence
  SiRNA target sequence
aaaaaaacacaaaagttagtg

SEQ ID NO: 119481 - DNA, 21 bp, Artificial sequence
  SiRNA target sequence
aaaaaacacaaaagttagtga

SEQ ID NO: 119482 - DNA, 21 bp, Artificial sequence
  SiRNA target sequence
aaaaacacaaaagttagtgat

SEQ ID NO: 119483 - DNA, 21 bp, Artificial sequence
  SiRNA target sequence
aaaacacaaaagttagtgata

SEQ ID NO: 119484 - DNA, 21 bp, Artificial sequence
  SiRNA target sequence
aaacacaaaagttagtgatag

SEQ ID NO: 119485 - DNA, 21 bp, Artificial sequence
  SiRNA target sequence
aacacaaaagttagtgatagt

SEQ ID NO: 119486 - DNA, 21 bp, Artificial sequence
  SiRNA target sequence
acacaaaagttagtgatagtt

SEQ ID NO: 119487 - DNA, 21 bp, Artificial sequence
  SiRNA target sequence
cacaaaagttagtgatagttg

SEQ ID NO: 119488 - DNA, 21 bp, Artificial sequence
  SiRNA target sequence
acaaaagttagtgatagttga

SEQ ID NO: 119489 - DNA, 21 bp, Artificial sequence
  SiRNA target sequence
caaaagttagtgatagttgat

SEQ ID NO: 119490 - DNA, 21 bp, Artificial sequence
  SiRNA target sequence
aaaagttagtgatagttgatt

SEQ ID NO: 119491 - DNA, 21 bp, Artificial sequence
  SiRNA target sequence
aaagttagtgatagttgattt

SEQ ID NO: 119492 - DNA, 21 bp, Artificial sequence
  SiRNA target sequence
aagttagtgatagttgatttt

SEQ ID NO: 119493 - DNA, 21 bp, Artificial sequence
  SiRNA target sequence
agttagtgatagttgattttg

SEQ ID NO: 119494 - DNA, 21 bp, Artificial sequence
  SiRNA target sequence
gttagtgatagttgattttgc

SEQ ID NO: 119495 - DNA, 21 bp, Artificial sequence
  SiRNA target sequence
ttagtgatagttgattttgca

SEQ ID NO: 119496 - DNA, 21 bp, Artificial sequence
  SiRNA target sequence
tagtgatagttgattttgcat

SEQ ID NO: 119497 - DNA, 21 bp, Artificial sequence
  SiRNA target sequence
agtgatagttgattttgcata

SEQ ID NO: 119498 - DNA, 21 bp, Artificial sequence
  SiRNA target sequence
gtgatagttgattttgcatat

SEQ ID NO: 119499 - DNA, 21 bp, Artificial sequence
  SiRNA target sequence
tgatagttgattttgcatatc

SEQ ID NO: 119500 - DNA, 21 bp, Artificial sequence
  SiRNA target sequence
gatagttgattttgcatatcc

SEQ ID NO: 119501 - DNA, 21 bp, Artificial sequence
  SiRNA target sequence
atagttgattttgcatatcct

SEQ ID NO: 119502 - DNA, 21 bp, Artificial sequence
  SiRNA target sequence
tagttgattttgcatatccta

SEQ ID NO: 119503 - DNA, 21 bp, Artificial sequence
  SiRNA target sequence
agttgattttgcatatcctac

SEQ ID NO: 119504 - DNA, 21 bp, Artificial sequence
  SiRNA target sequence
gttgattttgcatatcctact

SEQ ID NO: 119505 - DNA, 21 bp, Artificial sequence
  SiRNA target sequence
ttgattttgcatatcctactt

SEQ ID NO: 119506 - DNA, 21 bp, Artificial sequence
  SiRNA target sequence
tgattttgcatatcctacttt

SEQ ID NO: 119507 - DNA, 21 bp, Artificial sequence
  SiRNA target sequence
gattttgcatatcctactttc

SEQ ID NO: 119508 - DNA, 21 bp, Artificial sequence
  SiRNA target sequence
attttgcatatcctactttca

SEQ ID NO: 119509 - DNA, 21 bp, Artificial sequence
  SiRNA target sequence
ttttgcatatcctactttcaa

SEQ ID NO: 119510 - DNA, 21 bp, Artificial sequence
  SiRNA target sequence
tttgcatatcctactttcaat

SEQ ID NO: 119511 - DNA, 21 bp, Artificial sequence
  SiRNA target sequence
ttgcatatcctactttcaata

SEQ ID NO: 119512 - DNA, 21 bp, Artificial sequence
  SiRNA target sequence
tgcatatcctactttcaatat

SEQ ID NO: 119513 - DNA, 21 bp, Artificial sequence
  SiRNA target sequence
gcatatcctactttcaatatt

SEQ ID NO: 119514 - DNA, 21 bp, Artificial sequence
  SiRNA target sequence
catatcctactttcaatattg

SEQ ID NO: 119515 - DNA, 21 bp, Artificial sequence
  SiRNA target sequence
atatcctactttcaatattgc

SEQ ID NO: 119516 - DNA, 21 bp, Artificial sequence
  SiRNA target sequence
tatcctactttcaatattgcg

SEQ ID NO: 119517 - DNA, 21 bp, Artificial sequence
  SiRNA target sequence
atcctactttcaatattgcga

SEQ ID NO: 119518 - DNA, 21 bp, Artificial sequence
  SiRNA target sequence
tcctactttcaatattgcgag

SEQ ID NO: 119519 - DNA, 21 bp, Artificial sequence
  SiRNA target sequence
cctactttcaatattgcgagt

SEQ ID NO: 119520 - DNA, 21 bp, Artificial sequence
  SiRNA target sequence
ctactttcaatattgcgagtg

SEQ ID NO: 119521 - DNA, 21 bp, Artificial sequence
  SiRNA target sequence
tactttcaatattgcgagtga

SEQ ID NO: 119522 - DNA, 21 bp, Artificial sequence
  SiRNA target sequence
actttcaatattgcgagtgaa

SEQ ID NO: 119523 - DNA, 21 bp, Artificial sequence
  SiRNA target sequence
ctttcaatattgcgagtgaaa

SEQ ID NO: 119524 - DNA, 21 bp, Artificial sequence
  SiRNA target sequence
tttcaatattgcgagtgaaat

SEQ ID NO: 119525 - DNA, 21 bp, Artificial sequence
  SiRNA target sequence
ttcaatattgcgagtgaaata

SEQ ID NO: 119526 - DNA, 21 bp, Artificial sequence
  SiRNA target sequence
tcaatattgcgagtgaaatag

SEQ ID NO: 119527 - DNA, 21 bp, Artificial sequence
  SiRNA target sequence
caatattgcgagtgaaatagc

SEQ ID NO: 119528 - DNA, 21 bp, Artificial sequence
  SiRNA target sequence
aatattgcgagtgaaatagct

SEQ ID NO: 119529 - DNA, 21 bp, Artificial sequence
  SiRNA target sequence
atattgcgagtgaaatagctg

SEQ ID NO: 119530 - DNA, 21 bp, Artificial sequence
  SiRNA target sequence
tattgcgagtgaaatagctgc

SEQ ID NO: 119531 - DNA, 21 bp, Artificial sequence
  SiRNA target sequence
attgcgagtgaaatagctgcg

SEQ ID NO: 119532 - DNA, 21 bp, Artificial sequence
  SiRNA target sequence
ttgcgagtgaaatagctgcgc

SEQ ID NO: 119533 - DNA, 21 bp, Artificial sequence
  SiRNA target sequence
tgcgagtgaaatagctgcgca

SEQ ID NO: 119534 - DNA, 21 bp, Artificial sequence
  SiRNA target sequence
gcgagtgaaatagctgcgcac

SEQ ID NO: 119535 - DNA, 21 bp, Artificial sequence
  SiRNA target sequence
cgagtgaaatagctgcgcact

SEQ ID NO: 119536 - DNA, 21 bp, Artificial sequence
  SiRNA target sequence
gagtgaaatagctgcgcactt

SEQ ID NO: 119537 - DNA, 21 bp, Artificial sequence
  SiRNA target sequence
agtgaaatagctgcgcacttt

SEQ ID NO: 119538 - DNA, 21 bp, Artificial sequence
  SiRNA target sequence
gtgaaatagctgcgcactttt

SEQ ID NO: 119539 - DNA, 21 bp, Artificial sequence
  SiRNA target sequence
tgaaatagctgcgcactttta

SEQ ID NO: 119540 - DNA, 21 bp, Artificial sequence
  SiRNA target sequence
gaaatagctgcgcacttttac

SEQ ID NO: 119541 - DNA, 21 bp, Artificial sequence
  SiRNA target sequence
aaatagctgcgcacttttacg

SEQ ID NO: 119542 - DNA, 21 bp, Artificial sequence
  SiRNA target sequence
aatagctgcgcacttttacga

SEQ ID NO: 119543 - DNA, 21 bp, Artificial sequence
  SiRNA target sequence
atagctgcgcacttttacgaa

SEQ ID NO: 119544 - DNA, 21 bp, Artificial sequence
  SiRNA target sequence
tagctgcgcacttttacgaaa

SEQ ID NO: 119545 - DNA, 21 bp, Artificial sequence
  SiRNA target sequence
agctgcgcacttttacgaaaa

SEQ ID NO: 119546 - DNA, 21 bp, Artificial sequence
  SiRNA target sequence
gctgcgcacttttacgaaaaa

SEQ ID NO: 119547 - DNA, 21 bp, Artificial sequence
  SiRNA target sequence
ctgcgcacttttacgaaaaat

SEQ ID NO: 119548 - DNA, 21 bp, Artificial sequence
  SiRNA target sequence
tgcgcacttttacgaaaaatt

SEQ ID NO: 119549 - DNA, 21 bp, Artificial sequence
  SiRNA target sequence
gcgcacttttacgaaaaattt

SEQ ID NO: 119550 - DNA, 21 bp, Artificial sequence
  SiRNA target sequence
cgcacttttacgaaaaattta

SEQ ID NO: 119551 - DNA, 21 bp, Artificial sequence
  SiRNA target sequence
gcacttttacgaaaaatttaa

SEQ ID NO: 119552 - DNA, 21 bp, Artificial sequence
  SiRNA target sequence
cacttttacgaaaaatttaaa

SEQ ID NO: 119553 - DNA, 21 bp, Artificial sequence
  SiRNA target sequence
acttttacgaaaaatttaaag

SEQ ID NO: 119554 - DNA, 21 bp, Artificial sequence
  SiRNA target sequence
cttttacgaaaaatttaaaga

SEQ ID NO: 119555 - DNA, 21 bp, Artificial sequence
  SiRNA target sequence
ttttacgaaaaatttaaagat

SEQ ID NO: 119556 - DNA, 21 bp, Artificial sequence
  SiRNA target sequence
tttacgaaaaatttaaagata

SEQ ID NO: 119557 - DNA, 21 bp, Artificial sequence
  SiRNA target sequence
ttacgaaaaatttaaagatat

SEQ ID NO: 119558 - DNA, 21 bp, Artificial sequence
  SiRNA target sequence
tacgaaaaatttaaagatata

SEQ ID NO: 119559 - DNA, 21 bp, Artificial sequence
  SiRNA target sequence
acgaaaaatttaaagatataa

SEQ ID NO: 119560 - DNA, 21 bp, Artificial sequence
  SiRNA target sequence
cgaaaaatttaaagatataaa

SEQ ID NO: 119561 - DNA, 21 bp, Artificial sequence
  SiRNA target sequence
gaaaaatttaaagatataaaa

SEQ ID NO: 119562 - DNA, 21 bp, Artificial sequence
  SiRNA target sequence
aaaaatttaaagatataaaaa

SEQ ID NO: 119563 - DNA, 21 bp, Artificial sequence
  SiRNA target sequence
aaaatttaaagatataaaaat

SEQ ID NO: 119564 - DNA, 21 bp, Artificial sequence
  SiRNA target sequence
aaatttaaagatataaaaatt

SEQ ID NO: 119565 - DNA, 21 bp, Artificial sequence
  SiRNA target sequence
aatttaaagatataaaaatta

SEQ ID NO: 119566 - DNA, 21 bp, Artificial sequence
  SiRNA target sequence
atttaaagatataaaaattat

SEQ ID NO: 119567 - DNA, 21 bp, Artificial sequence
  SiRNA target sequence
tttaaagatataaaaattatg

SEQ ID NO: 119568 - DNA, 21 bp, Artificial sequence
  SiRNA target sequence
ttaaagatataaaaattatgc

SEQ ID NO: 119569 - DNA, 21 bp, Artificial sequence
  SiRNA target sequence
taaagatataaaaattatgcg

SEQ ID NO: 119570 - DNA, 21 bp, Artificial sequence
  SiRNA target sequence
aaagatataaaaattatgcgt

SEQ ID NO: 119571 - DNA, 21 bp, Artificial sequence
  SiRNA target sequence
aagatataaaaattatgcgtg

SEQ ID NO: 119572 - DNA, 21 bp, Artificial sequence
  SiRNA target sequence
agatataaaaattatgcgtgt

SEQ ID NO: 119573 - DNA, 21 bp, Artificial sequence
  SiRNA target sequence
gatataaaaattatgcgtgtt

SEQ ID NO: 119574 - DNA, 21 bp, Artificial sequence
  SiRNA target sequence
atataaaaattatgcgtgttc

SEQ ID NO: 119575 - DNA, 21 bp, Artificial sequence
  SiRNA target sequence
tataaaaattatgcgtgttct

SEQ ID NO: 119576 - DNA, 21 bp, Artificial sequence
  SiRNA target sequence
ataaaaattatgcgtgttctt

SEQ ID NO: 119577 - DNA, 21 bp, Artificial sequence
  SiRNA target sequence
taaaaattatgcgtgttcttg

SEQ ID NO: 119578 - DNA, 21 bp, Artificial sequence
  SiRNA target sequence
aaaaattatgcgtgttcttgc

SEQ ID NO: 119579 - DNA, 21 bp, Artificial sequence
  SiRNA target sequence
aaaattatgcgtgttcttgcg

SEQ ID NO: 119580 - DNA, 21 bp, Artificial sequence
  SiRNA target sequence
aaattatgcgtgttcttgcgc

SEQ ID NO: 119581 - DNA, 21 bp, Artificial sequence
  SiRNA target sequence
aattatgcgtgttcttgcgca

SEQ ID NO: 119582 - DNA, 21 bp, Artificial sequence
  SiRNA target sequence
attatgcgtgttcttgcgcaa

SEQ ID NO: 119583 - DNA, 21 bp, Artificial sequence
  SiRNA target sequence
ttatgcgtgttcttgcgcaag

SEQ ID NO: 119584 - DNA, 21 bp, Artificial sequence
  SiRNA target sequence
tatgcgtgttcttgcgcaaga

SEQ ID NO: 119585 - DNA, 21 bp, Artificial sequence
  SiRNA target sequence
atgcgtgttcttgcgcaagat

SEQ ID NO: 119586 - DNA, 21 bp, Artificial sequence
  SiRNA target sequence
tgcgtgttcttgcgcaagata

SEQ ID NO: 119587 - DNA, 21 bp, Artificial sequence
  SiRNA target sequence
gcgtgttcttgcgcaagatat

SEQ ID NO: 119588 - DNA, 21 bp, Artificial sequence
  SiRNA target sequence
cgtgttcttgcgcaagatatt

SEQ ID NO: 119589 - DNA, 21 bp, Artificial sequence
  SiRNA target sequence
gtgttcttgcgcaagatattc

SEQ ID NO: 119590 - DNA, 21 bp, Artificial sequence
  SiRNA target sequence
tgttcttgcgcaagatattcc

SEQ ID NO: 119591 - DNA, 21 bp, Artificial sequence
  SiRNA target sequence
gttcttgcgcaagatattcct

SEQ ID NO: 119592 - DNA, 21 bp, Artificial sequence
  SiRNA target sequence
ttcttgcgcaagatattccta

SEQ ID NO: 119593 - DNA, 21 bp, Artificial sequence
  SiRNA target sequence
tcttgcgcaagatattcctac

SEQ ID NO: 119594 - DNA, 21 bp, Artificial sequence
  SiRNA target sequence
cttgcgcaagatattcctaca

SEQ ID NO: 119595 - DNA, 21 bp, Artificial sequence
  SiRNA target sequence
ttgcgcaagatattcctacac

SEQ ID NO: 119596 - DNA, 21 bp, Artificial sequence
  SiRNA target sequence
tgcgcaagatattcctacacc

SEQ ID NO: 119597 - DNA, 21 bp, Artificial sequence
  SiRNA target sequence
gcgcaagatattcctacaccg

SEQ ID NO: 119598 - DNA, 21 bp, Artificial sequence
  SiRNA target sequence
cgcaagatattcctacaccgt

SEQ ID NO: 119599 - DNA, 21 bp, Artificial sequence
  SiRNA target sequence
gcaagatattcctacaccgta

SEQ ID NO: 119600 - DNA, 21 bp, Artificial sequence
  SiRNA target sequence
caagatattcctacaccgtat

SEQ ID NO: 119601 - DNA, 21 bp, Artificial sequence
  SiRNA target sequence
aagatattcctacaccgtatg

SEQ ID NO: 119602 - DNA, 21 bp, Artificial sequence
  SiRNA target sequence
agatattcctacaccgtatgc

SEQ ID NO: 119603 - DNA, 21 bp, Artificial sequence
  SiRNA target sequence
gatattcctacaccgtatgca

SEQ ID NO: 119604 - DNA, 21 bp, Artificial sequence
  SiRNA target sequence
atattcctacaccgtatgcac

SEQ ID NO: 119605 - DNA, 21 bp, Artificial sequence
  SiRNA target sequence
tattcctacaccgtatgcact

SEQ ID NO: 119606 - DNA, 21 bp, Artificial sequence
  SiRNA target sequence
attcctacaccgtatgcactt

SEQ ID NO: 119607 - DNA, 21 bp, Artificial sequence
  SiRNA target sequence
ttcctacaccgtatgcactta

SEQ ID NO: 119608 - DNA, 21 bp, Artificial sequence
  SiRNA target sequence
tcctacaccgtatgcacttaa

SEQ ID NO: 119609 - DNA, 21 bp, Artificial sequence
  SiRNA target sequence
cctacaccgtatgcacttaat

SEQ ID NO: 119610 - DNA, 21 bp, Artificial sequence
  SiRNA target sequence
ctacaccgtatgcacttaatc

SEQ ID NO: 119611 - DNA, 21 bp, Artificial sequence
  SiRNA target sequence
tacaccgtatgcacttaatct

SEQ ID NO: 119612 - DNA, 21 bp, Artificial sequence
  SiRNA target sequence
acaccgtatgcacttaatctt

SEQ ID NO: 119613 - DNA, 21 bp, Artificial sequence
  SiRNA target sequence
caccgtatgcacttaatcttg

SEQ ID NO: 119614 - DNA, 21 bp, Artificial sequence
  SiRNA target sequence
accgtatgcacttaatcttga

SEQ ID NO: 119615 - DNA, 21 bp, Artificial sequence
  SiRNA target sequence
ccgtatgcacttaatcttgaa

SEQ ID NO: 119616 - DNA, 21 bp, Artificial sequence
  SiRNA target sequence
cgtatgcacttaatcttgaaa

SEQ ID NO: 119617 - DNA, 21 bp, Artificial sequence
  SiRNA target sequence
gtatgcacttaatcttgaaaa

SEQ ID NO: 119618 - DNA, 21 bp, Artificial sequence
  SiRNA target sequence
tatgcacttaatcttgaaaaa

SEQ ID NO: 119619 - DNA, 21 bp, Artificial sequence
  SiRNA target sequence
atgcacttaatcttgaaaaaa

SEQ ID NO: 119620 - DNA, 21 bp, Artificial sequence
  SiRNA target sequence
tgcacttaatcttgaaaaaat

SEQ ID NO: 119621 - DNA, 21 bp, Artificial sequence
  SiRNA target sequence
gcacttaatcttgaaaaaatg

SEQ ID NO: 119622 - DNA, 21 bp, Artificial sequence
  SiRNA target sequence
cacttaatcttgaaaaaatgt

SEQ ID NO: 119623 - DNA, 21 bp, Artificial sequence
  SiRNA target sequence
acttaatcttgaaaaaatgtc

SEQ ID NO: 119624 - DNA, 21 bp, Artificial sequence
  SiRNA target sequence
cttaatcttgaaaaaatgtct

SEQ ID NO: 119625 - DNA, 21 bp, Artificial sequence
  SiRNA target sequence
ttaatcttgaaaaaatgtctt

SEQ ID NO: 119626 - DNA, 21 bp, Artificial sequence
  SiRNA target sequence
taatcttgaaaaaatgtctta

SEQ ID NO: 119627 - DNA, 21 bp, Artificial sequence
  SiRNA target sequence
aatcttgaaaaaatgtcttat

SEQ ID NO: 119628 - DNA, 21 bp, Artificial sequence
  SiRNA target sequence
atcttgaaaaaatgtcttatc

SEQ ID NO: 119629 - DNA, 21 bp, Artificial sequence
  SiRNA target sequence
tcttgaaaaaatgtcttatcc

SEQ ID NO: 119630 - DNA, 21 bp, Artificial sequence
  SiRNA target sequence
cttgaaaaaatgtcttatccg

SEQ ID NO: 119631 - DNA, 21 bp, Artificial sequence
  SiRNA target sequence
ttgaaaaaatgtcttatccga

SEQ ID NO: 119632 - DNA, 21 bp, Artificial sequence
  SiRNA target sequence
tgaaaaaatgtcttatccgac

SEQ ID NO: 119633 - DNA, 21 bp, Artificial sequence
  SiRNA target sequence
gaaaaaatgtcttatccgaca

SEQ ID NO: 119634 - DNA, 21 bp, Artificial sequence
  SiRNA target sequence
aaaaaatgtcttatccgacat

SEQ ID NO: 119635 - DNA, 21 bp, Artificial sequence
  SiRNA target sequence
aaaaatgtcttatccgacatg

SEQ ID NO: 119636 - DNA, 21 bp, Artificial sequence
  SiRNA target sequence
aaaatgtcttatccgacatgc

SEQ ID NO: 119637 - DNA, 21 bp, Artificial sequence
  SiRNA target sequence
aaatgtcttatccgacatgca

SEQ ID NO: 119638 - DNA, 21 bp, Artificial sequence
  SiRNA target sequence
aatgtcttatccgacatgcaa

SEQ ID NO: 119639 - DNA, 21 bp, Artificial sequence
  SiRNA target sequence
atgtcttatccgacatgcaat

SEQ ID NO: 119640 - DNA, 21 bp, Artificial sequence
  SiRNA target sequence
tgtcttatccgacatgcaatg

SEQ ID NO: 119641 - DNA, 21 bp, Artificial sequence
  SiRNA target sequence
gtcttatccgacatgcaatga

SEQ ID NO: 119642 - DNA, 21 bp, Artificial sequence
  SiRNA target sequence
tcttatccgacatgcaatgat

SEQ ID NO: 119643 - DNA, 21 bp, Artificial sequence
  SiRNA target sequence
cttatccgacatgcaatgata

SEQ ID NO: 119644 - DNA, 21 bp, Artificial sequence
  SiRNA target sequence
ttatccgacatgcaatgatat

SEQ ID NO: 119645 - DNA, 21 bp, Artificial sequence
  SiRNA target sequence
tatccgacatgcaatgatatt

SEQ ID NO: 119646 - DNA, 21 bp, Artificial sequence
  SiRNA target sequence
atccgacatgcaatgatattg

SEQ ID NO: 119647 - DNA, 21 bp, Artificial sequence
  SiRNA target sequence
tccgacatgcaatgatattgt

SEQ ID NO: 119648 - DNA, 21 bp, Artificial sequence
  SiRNA target sequence
ccgacatgcaatgatattgta

SEQ ID NO: 119649 - DNA, 21 bp, Artificial sequence
  SiRNA target sequence
cgacatgcaatgatattgtaa

SEQ ID NO: 119650 - DNA, 21 bp, Artificial sequence
  SiRNA target sequence
gacatgcaatgatattgtaaa

SEQ ID NO: 119651 - DNA, 21 bp, Artificial sequence
  SiRNA target sequence
acatgcaatgatattgtaaat

SEQ ID NO: 119652 - DNA, 21 bp, Artificial sequence
  SiRNA target sequence
catgcaatgatattgtaaatg

SEQ ID NO: 119653 - DNA, 21 bp, Artificial sequence
  SiRNA target sequence
atgcaatgatattgtaaatgc

SEQ ID NO: 119654 - DNA, 21 bp, Artificial sequence
  SiRNA target sequence
tgcaatgatattgtaaatgct

SEQ ID NO: 119655 - DNA, 21 bp, Artificial sequence
  SiRNA target sequence
gcaatgatattgtaaatgctg

SEQ ID NO: 119656 - DNA, 21 bp, Artificial sequence
  SiRNA target sequence
caatgatattgtaaatgctgt

SEQ ID NO: 119657 - DNA, 21 bp, Artificial sequence
  SiRNA target sequence
aatgatattgtaaatgctgtt

SEQ ID NO: 119658 - DNA, 21 bp, Artificial sequence
  SiRNA target sequence
atgatattgtaaatgctgtta

SEQ ID NO: 119659 - DNA, 21 bp, Artificial sequence
  SiRNA target sequence
tgatattgtaaatgctgttac

SEQ ID NO: 119660 - DNA, 21 bp, Artificial sequence
  SiRNA target sequence
gatattgtaaatgctgttaca

SEQ ID NO: 119661 - DNA, 21 bp, Artificial sequence
  SiRNA target sequence
atattgtaaatgctgttacaa

SEQ ID NO: 119662 - DNA, 21 bp, Artificial sequence
  SiRNA target sequence
tattgtaaatgctgttacaaa

SEQ ID NO: 119663 - DNA, 21 bp, Artificial sequence
  SiRNA target sequence
attgtaaatgctgttacaaaa

SEQ ID NO: 119664 - DNA, 21 bp, Artificial sequence
  SiRNA target sequence
ttgtaaatgctgttacaaaaa

SEQ ID NO: 119665 - DNA, 21 bp, Artificial sequence
  SiRNA target sequence
tgtaaatgctgttacaaaaat

SEQ ID NO: 119666 - DNA, 21 bp, Artificial sequence
  SiRNA target sequence
gtaaatgctgttacaaaaata

SEQ ID NO: 119667 - DNA, 21 bp, Artificial sequence
  SiRNA target sequence
taaatgctgttacaaaaataa

SEQ ID NO: 119668 - DNA, 21 bp, Artificial sequence
  SiRNA target sequence
aaatgctgttacaaaaataaa

SEQ ID NO: 119669 - DNA, 21 bp, Artificial sequence
  SiRNA target sequence
aatgctgttacaaaaataaat

SEQ ID NO: 119670 - DNA, 21 bp, Artificial sequence
  SiRNA target sequence
atgctgttacaaaaataaatt

SEQ ID NO: 119671 - DNA, 21 bp, Artificial sequence
  SiRNA target sequence
tgctgttacaaaaataaattc

SEQ ID NO: 119672 - DNA, 21 bp, Artificial sequence
  SiRNA target sequence
gctgttacaaaaataaattca

SEQ ID NO: 119673 - DNA, 21 bp, Artificial sequence
  SiRNA target sequence
ctgttacaaaaataaattcat

SEQ ID NO: 119674 - DNA, 21 bp, Artificial sequence
  SiRNA target sequence
tgttacaaaaataaattcata

SEQ ID NO: 119675 - DNA, 21 bp, Artificial sequence
  SiRNA target sequence
gttacaaaaataaattcatag

SEQ ID NO: 119676 - DNA, 22 bp, Artificial sequence
  SiRNA target sequence
atgatagaaattcgcgatctta

SEQ ID NO: 119677 - DNA, 22 bp, Artificial sequence
  SiRNA target sequence
tgatagaaattcgcgatcttat

SEQ ID NO: 119678 - DNA, 22 bp, Artificial sequence
  SiRNA target sequence
gatagaaattcgcgatcttata

SEQ ID NO: 119679 - DNA, 22 bp, Artificial sequence
  SiRNA target sequence
atagaaattcgcgatcttataa

SEQ ID NO: 119680 - DNA, 22 bp, Artificial sequence
  SiRNA target sequence
tagaaattcgcgatcttataaa

SEQ ID NO: 119681 - DNA, 22 bp, Artificial sequence
  SiRNA target sequence
agaaattcgcgatcttataaat

SEQ ID NO: 119682 - DNA, 22 bp, Artificial sequence
  SiRNA target sequence
gaaattcgcgatcttataaatc

SEQ ID NO: 119683 - DNA, 22 bp, Artificial sequence
  SiRNA target sequence
aaattcgcgatcttataaatca

SEQ ID NO: 119684 - DNA, 22 bp, Artificial sequence
  SiRNA target sequence
aattcgcgatcttataaatcaa

SEQ ID NO: 119685 - DNA, 22 bp, Artificial sequence
  SiRNA target sequence
attcgcgatcttataaatcaag

SEQ ID NO: 119686 - DNA, 22 bp, Artificial sequence
  SiRNA target sequence
ttcgcgatcttataaatcaagc

SEQ ID NO: 119687 - DNA, 22 bp, Artificial sequence
  SiRNA target sequence
tcgcgatcttataaatcaagca

SEQ ID NO: 119688 - DNA, 22 bp, Artificial sequence
  SiRNA target sequence
cgcgatcttataaatcaagcat

SEQ ID NO: 119689 - DNA, 22 bp, Artificial sequence
  SiRNA target sequence
gcgatcttataaatcaagcatt

SEQ ID NO: 119690 - DNA, 22 bp, Artificial sequence
  SiRNA target sequence
cgatcttataaatcaagcattg

SEQ ID NO: 119691 - DNA, 22 bp, Artificial sequence
  SiRNA target sequence
gatcttataaatcaagcattgg

SEQ ID NO: 119692 - DNA, 22 bp, Artificial sequence
  SiRNA target sequence
atcttataaatcaagcattgga

SEQ ID NO: 119693 - DNA, 22 bp, Artificial sequence
  SiRNA target sequence
tcttataaatcaagcattggat

SEQ ID NO: 119694 - DNA, 22 bp, Artificial sequence
  SiRNA target sequence
cttataaatcaagcattggatg

SEQ ID NO: 119695 - DNA, 22 bp, Artificial sequence
  SiRNA target sequence
ttataaatcaagcattggatga

SEQ ID NO: 119696 - DNA, 22 bp, Artificial sequence
  SiRNA target sequence
tataaatcaagcattggatgag

SEQ ID NO: 119697 - DNA, 22 bp, Artificial sequence
  SiRNA target sequence
ataaatcaagcattggatgagg

SEQ ID NO: 119698 - DNA, 22 bp, Artificial sequence
  SiRNA target sequence
taaatcaagcattggatgagga

SEQ ID NO: 119699 - DNA, 22 bp, Artificial sequence
  SiRNA target sequence
aaatcaagcattggatgaggaa

SEQ ID NO: 119700 - DNA, 22 bp, Artificial sequence
  SiRNA target sequence
aatcaagcattggatgaggaaa

SEQ ID NO: 119701 - DNA, 22 bp, Artificial sequence
  SiRNA target sequence
atcaagcattggatgaggaaat

SEQ ID NO: 119702 - DNA, 22 bp, Artificial sequence
  SiRNA target sequence
tcaagcattggatgaggaaatg

SEQ ID NO: 119703 - DNA, 22 bp, Artificial sequence
  SiRNA target sequence
caagcattggatgaggaaatgg

SEQ ID NO: 119704 - DNA, 22 bp, Artificial sequence
  SiRNA target sequence
aagcattggatgaggaaatggg

SEQ ID NO: 119705 - DNA, 22 bp, Artificial sequence
  SiRNA target sequence
agcattggatgaggaaatggga

SEQ ID NO: 119706 - DNA, 22 bp, Artificial sequence
  SiRNA target sequence
gcattggatgaggaaatgggaa

SEQ ID NO: 119707 - DNA, 22 bp, Artificial sequence
  SiRNA target sequence
cattggatgaggaaatgggaat

SEQ ID NO: 119708 - DNA, 22 bp, Artificial sequence
  SiRNA target sequence
attggatgaggaaatgggaatg

SEQ ID NO: 119709 - DNA, 22 bp, Artificial sequence
  SiRNA target sequence
ttggatgaggaaatgggaatgg

SEQ ID NO: 119710 - DNA, 22 bp, Artificial sequence
  SiRNA target sequence
tggatgaggaaatgggaatgga

SEQ ID NO: 119711 - DNA, 22 bp, Artificial sequence
  SiRNA target sequence
ggatgaggaaatgggaatggat

SEQ ID NO: 119712 - DNA, 22 bp, Artificial sequence
  SiRNA target sequence
gatgaggaaatgggaatggatc

SEQ ID NO: 119713 - DNA, 22 bp, Artificial sequence
  SiRNA target sequence
atgaggaaatgggaatggatca

SEQ ID NO: 119714 - DNA, 22 bp, Artificial sequence
  SiRNA target sequence
tgaggaaatgggaatggatcat

SEQ ID NO: 119715 - DNA, 22 bp, Artificial sequence
  SiRNA target sequence
gaggaaatgggaatggatcata

SEQ ID NO: 119716 - DNA, 22 bp, Artificial sequence
  SiRNA target sequence
aggaaatgggaatggatcataa

SEQ ID NO: 119717 - DNA, 22 bp, Artificial sequence
  SiRNA target sequence
ggaaatgggaatggatcataat

SEQ ID NO: 119718 - DNA, 22 bp, Artificial sequence
  SiRNA target sequence
gaaatgggaatggatcataatg

SEQ ID NO: 119719 - DNA, 22 bp, Artificial sequence
  SiRNA target sequence
aaatgggaatggatcataatgt

SEQ ID NO: 119720 - DNA, 22 bp, Artificial sequence
  SiRNA target sequence
aatgggaatggatcataatgta

SEQ ID NO: 119721 - DNA, 22 bp, Artificial sequence
  SiRNA target sequence
atgggaatggatcataatgtat

SEQ ID NO: 119722 - DNA, 22 bp, Artificial sequence
  SiRNA target sequence
tgggaatggatcataatgtata

SEQ ID NO: 119723 - DNA, 22 bp, Artificial sequence
  SiRNA target sequence
gggaatggatcataatgtatat

SEQ ID NO: 119724 - DNA, 22 bp, Artificial sequence
  SiRNA target sequence
ggaatggatcataatgtatata

SEQ ID NO: 119725 - DNA, 22 bp, Artificial sequence
  SiRNA target sequence
gaatggatcataatgtatatat

SEQ ID NO: 119726 - DNA, 22 bp, Artificial sequence
  SiRNA target sequence
aatggatcataatgtatatata

SEQ ID NO: 119727 - DNA, 22 bp, Artificial sequence
  SiRNA target sequence
atggatcataatgtatatataa

SEQ ID NO: 119728 - DNA, 22 bp, Artificial sequence
  SiRNA target sequence
tggatcataatgtatatataat

SEQ ID NO: 119729 - DNA, 22 bp, Artificial sequence
  SiRNA target sequence
ggatcataatgtatatataata

SEQ ID NO: 119730 - DNA, 22 bp, Artificial sequence
  SiRNA target sequence
gatcataatgtatatataatag

SEQ ID NO: 119731 - DNA, 22 bp, Artificial sequence
  SiRNA target sequence
atcataatgtatatataatagg

SEQ ID NO: 119732 - DNA, 22 bp, Artificial sequence
  SiRNA target sequence
tcataatgtatatataatagga

SEQ ID NO: 119733 - DNA, 22 bp, Artificial sequence
  SiRNA target sequence
cataatgtatatataataggag

SEQ ID NO: 119734 - DNA, 22 bp, Artificial sequence
  SiRNA target sequence
ataatgtatatataataggaga

SEQ ID NO: 119735 - DNA, 22 bp, Artificial sequence
  SiRNA target sequence
taatgtatatataataggagaa

SEQ ID NO: 119736 - DNA, 22 bp, Artificial sequence
  SiRNA target sequence
aatgtatatataataggagaag

SEQ ID NO: 119737 - DNA, 22 bp, Artificial sequence
  SiRNA target sequence
atgtatatataataggagaaga

SEQ ID NO: 119738 - DNA, 22 bp, Artificial sequence
  SiRNA target sequence
tgtatatataataggagaagaa

SEQ ID NO: 119739 - DNA, 22 bp, Artificial sequence
  SiRNA target sequence
gtatatataataggagaagaag

SEQ ID NO: 119740 - DNA, 22 bp, Artificial sequence
  SiRNA target sequence
tatatataataggagaagaagt

SEQ ID NO: 119741 - DNA, 22 bp, Artificial sequence
  SiRNA target sequence
atatataataggagaagaagta

SEQ ID NO: 119742 - DNA, 22 bp, Artificial sequence
  SiRNA target sequence
tatataataggagaagaagtag

SEQ ID NO: 119743 - DNA, 22 bp, Artificial sequence
  SiRNA target sequence
atataataggagaagaagtagg

SEQ ID NO: 119744 - DNA, 22 bp, Artificial sequence
  SiRNA target sequence
tataataggagaagaagtaggc

SEQ ID NO: 119745 - DNA, 22 bp, Artificial sequence
  SiRNA target sequence
ataataggagaagaagtaggca

SEQ ID NO: 119746 - DNA, 22 bp, Artificial sequence
  SiRNA target sequence
taataggagaagaagtaggcat

SEQ ID NO: 119747 - DNA, 22 bp, Artificial sequence
  SiRNA target sequence
aataggagaagaagtaggcatc

SEQ ID NO: 119748 - DNA, 22 bp, Artificial sequence
  SiRNA target sequence
ataggagaagaagtaggcatct

SEQ ID NO: 119749 - DNA, 22 bp, Artificial sequence
  SiRNA target sequence
taggagaagaagtaggcatctc

SEQ ID NO: 119750 - DNA, 22 bp, Artificial sequence
  SiRNA target sequence
aggagaagaagtaggcatctct

SEQ ID NO: 119751 - DNA, 22 bp, Artificial sequence
  SiRNA target sequence
ggagaagaagtaggcatctctg

SEQ ID NO: 119752 - DNA, 22 bp, Artificial sequence
  SiRNA target sequence
gagaagaagtaggcatctctgg

SEQ ID NO: 119753 - DNA, 22 bp, Artificial sequence
  SiRNA target sequence
agaagaagtaggcatctctggt

SEQ ID NO: 119754 - DNA, 22 bp, Artificial sequence
  SiRNA target sequence
gaagaagtaggcatctctggtg

SEQ ID NO: 119755 - DNA, 22 bp, Artificial sequence
  SiRNA target sequence
aagaagtaggcatctctggtgg

SEQ ID NO: 119756 - DNA, 22 bp, Artificial sequence
  SiRNA target sequence
agaagtaggcatctctggtggt

SEQ ID NO: 119757 - DNA, 22 bp, Artificial sequence
  SiRNA target sequence
gaagtaggcatctctggtggtc

SEQ ID NO: 119758 - DNA, 22 bp, Artificial sequence
  SiRNA target sequence
aagtaggcatctctggtggtcc

SEQ ID NO: 119759 - DNA, 22 bp, Artificial sequence
  SiRNA target sequence
agtaggcatctctggtggtcct

SEQ ID NO: 119760 - DNA, 22 bp, Artificial sequence
  SiRNA target sequence
gtaggcatctctggtggtcctc

SEQ ID NO: 119761 - DNA, 22 bp, Artificial sequence
  SiRNA target sequence
taggcatctctggtggtcctca

SEQ ID NO: 119762 - DNA, 22 bp, Artificial sequence
  SiRNA target sequence
aggcatctctggtggtcctcac

SEQ ID NO: 119763 - DNA, 22 bp, Artificial sequence
  SiRNA target sequence
ggcatctctggtggtcctcacg

SEQ ID NO: 119764 - DNA, 22 bp, Artificial sequence
  SiRNA target sequence
gcatctctggtggtcctcacgg

SEQ ID NO: 119765 - DNA, 22 bp, Artificial sequence
  SiRNA target sequence
catctctggtggtcctcacggt

SEQ ID NO: 119766 - DNA, 22 bp, Artificial sequence
  SiRNA target sequence
atctctggtggtcctcacggtc

SEQ ID NO: 119767 - DNA, 22 bp, Artificial sequence
  SiRNA target sequence
tctctggtggtcctcacggtct

SEQ ID NO: 119768 - DNA, 22 bp, Artificial sequence
  SiRNA target sequence
ctctggtggtcctcacggtctt

SEQ ID NO: 119769 - DNA, 22 bp, Artificial sequence
  SiRNA target sequence
tctggtggtcctcacggtctta

SEQ ID NO: 119770 - DNA, 22 bp, Artificial sequence
  SiRNA target sequence
ctggtggtcctcacggtcttac

SEQ ID NO: 119771 - DNA, 22 bp, Artificial sequence
  SiRNA target sequence
tggtggtcctcacggtcttact

SEQ ID NO: 119772 - DNA, 22 bp, Artificial sequence
  SiRNA target sequence
ggtggtcctcacggtcttacta

SEQ ID NO: 119773 - DNA, 22 bp, Artificial sequence
  SiRNA target sequence
gtggtcctcacggtcttactaa

SEQ ID NO: 119774 - DNA, 22 bp, Artificial sequence
  SiRNA target sequence
tggtcctcacggtcttactaaa

SEQ ID NO: 119775 - DNA, 22 bp, Artificial sequence
  SiRNA target sequence
ggtcctcacggtcttactaaaa

SEQ ID NO: 119776 - DNA, 22 bp, Artificial sequence
  SiRNA target sequence
gtcctcacggtcttactaaaaa

SEQ ID NO: 119777 - DNA, 22 bp, Artificial sequence
  SiRNA target sequence
tcctcacggtcttactaaaaat

SEQ ID NO: 119778 - DNA, 22 bp, Artificial sequence
  SiRNA target sequence
cctcacggtcttactaaaaatt

SEQ ID NO: 119779 - DNA, 22 bp, Artificial sequence
  SiRNA target sequence
ctcacggtcttactaaaaattt

SEQ ID NO: 119780 - DNA, 22 bp, Artificial sequence
  SiRNA target sequence
tcacggtcttactaaaaatttg

SEQ ID NO: 119781 - DNA, 22 bp, Artificial sequence
  SiRNA target sequence
cacggtcttactaaaaatttga

SEQ ID NO: 119782 - DNA, 22 bp, Artificial sequence
  SiRNA target sequence
acggtcttactaaaaatttgat

SEQ ID NO: 119783 - DNA, 22 bp, Artificial sequence
  SiRNA target sequence
cggtcttactaaaaatttgatc

SEQ ID NO: 119784 - DNA, 22 bp, Artificial sequence
  SiRNA target sequence
ggtcttactaaaaatttgatca

SEQ ID NO: 119785 - DNA, 22 bp, Artificial sequence
  SiRNA target sequence
gtcttactaaaaatttgatcaa

SEQ ID NO: 119786 - DNA, 22 bp, Artificial sequence
  SiRNA target sequence
tcttactaaaaatttgatcaaa

SEQ ID NO: 119787 - DNA, 22 bp, Artificial sequence
  SiRNA target sequence
cttactaaaaatttgatcaaaa

SEQ ID NO: 119788 - DNA, 22 bp, Artificial sequence
  SiRNA target sequence
ttactaaaaatttgatcaaaaa

SEQ ID NO: 119789 - DNA, 22 bp, Artificial sequence
  SiRNA target sequence
tactaaaaatttgatcaaaaaa

SEQ ID NO: 119790 - DNA, 22 bp, Artificial sequence
  SiRNA target sequence
actaaaaatttgatcaaaaaat

SEQ ID NO: 119791 - DNA, 22 bp, Artificial sequence
  SiRNA target sequence
ctaaaaatttgatcaaaaaata

SEQ ID NO: 119792 - DNA, 22 bp, Artificial sequence
  SiRNA target sequence
taaaaatttgatcaaaaaatac

SEQ ID NO: 119793 - DNA, 22 bp, Artificial sequence
  SiRNA target sequence
aaaaatttgatcaaaaaatacg

SEQ ID NO: 119794 - DNA, 22 bp, Artificial sequence
  SiRNA target sequence
aaaatttgatcaaaaaatacgg

SEQ ID NO: 119795 - DNA, 22 bp, Artificial sequence
  SiRNA target sequence
aaatttgatcaaaaaatacggc

SEQ ID NO: 119796 - DNA, 22 bp, Artificial sequence
  SiRNA target sequence
aatttgatcaaaaaatacggcg

SEQ ID NO: 119797 - DNA, 22 bp, Artificial sequence
  SiRNA target sequence
atttgatcaaaaaatacggcga

SEQ ID NO: 119798 - DNA, 22 bp, Artificial sequence
  SiRNA target sequence
tttgatcaaaaaatacggcgat

SEQ ID NO: 119799 - DNA, 22 bp, Artificial sequence
  SiRNA target sequence
ttgatcaaaaaatacggcgatc

SEQ ID NO: 119800 - DNA, 22 bp, Artificial sequence
  SiRNA target sequence
tgatcaaaaaatacggcgatca

SEQ ID NO: 119801 - DNA, 22 bp, Artificial sequence
  SiRNA target sequence
gatcaaaaaatacggcgatcaa

SEQ ID NO: 119802 - DNA, 22 bp, Artificial sequence
  SiRNA target sequence
atcaaaaaatacggcgatcaaa

SEQ ID NO: 119803 - DNA, 22 bp, Artificial sequence
  SiRNA target sequence
tcaaaaaatacggcgatcaaag

SEQ ID NO: 119804 - DNA, 22 bp, Artificial sequence
  SiRNA target sequence
caaaaaatacggcgatcaaaga

SEQ ID NO: 119805 - DNA, 22 bp, Artificial sequence
  SiRNA target sequence
aaaaaatacggcgatcaaagag

SEQ ID NO: 119806 - DNA, 22 bp, Artificial sequence
  SiRNA target sequence
aaaaatacggcgatcaaagagt

SEQ ID NO: 119807 - DNA, 22 bp, Artificial sequence
  SiRNA target sequence
aaaatacggcgatcaaagagtg

SEQ ID NO: 119808 - DNA, 22 bp, Artificial sequence
  SiRNA target sequence
aaatacggcgatcaaagagtga

SEQ ID NO: 119809 - DNA, 22 bp, Artificial sequence
  SiRNA target sequence
aatacggcgatcaaagagtgaa

SEQ ID NO: 119810 - DNA, 22 bp, Artificial sequence
  SiRNA target sequence
atacggcgatcaaagagtgaag

SEQ ID NO: 119811 - DNA, 22 bp, Artificial sequence
  SiRNA target sequence
tacggcgatcaaagagtgaagg

SEQ ID NO: 119812 - DNA, 22 bp, Artificial sequence
  SiRNA target sequence
acggcgatcaaagagtgaagga

SEQ ID NO: 119813 - DNA, 22 bp, Artificial sequence
  SiRNA target sequence
cggcgatcaaagagtgaaggat

SEQ ID NO: 119814 - DNA, 22 bp, Artificial sequence
  SiRNA target sequence
ggcgatcaaagagtgaaggata

SEQ ID NO: 119815 - DNA, 22 bp, Artificial sequence
  SiRNA target sequence
gcgatcaaagagtgaaggatac

SEQ ID NO: 119816 - DNA, 22 bp, Artificial sequence
  SiRNA target sequence
cgatcaaagagtgaaggatacc

SEQ ID NO: 119817 - DNA, 22 bp, Artificial sequence
  SiRNA target sequence
gatcaaagagtgaaggataccc

SEQ ID NO: 119818 - DNA, 22 bp, Artificial sequence
  SiRNA target sequence
atcaaagagtgaaggatacccc

SEQ ID NO: 119819 - DNA, 22 bp, Artificial sequence
  SiRNA target sequence
tcaaagagtgaaggatacccct

SEQ ID NO: 119820 - DNA, 22 bp, Artificial sequence
  SiRNA target sequence
caaagagtgaaggataccccta

SEQ ID NO: 119821 - DNA, 22 bp, Artificial sequence
  SiRNA target sequence
aaagagtgaaggatacccctat

SEQ ID NO: 119822 - DNA, 22 bp, Artificial sequence
  SiRNA target sequence
aagagtgaaggatacccctatt

SEQ ID NO: 119823 - DNA, 22 bp, Artificial sequence
  SiRNA target sequence
agagtgaaggatacccctattt

SEQ ID NO: 119824 - DNA, 22 bp, Artificial sequence
  SiRNA target sequence
gagtgaaggatacccctatttc

SEQ ID NO: 119825 - DNA, 22 bp, Artificial sequence
  SiRNA target sequence
agtgaaggatacccctatttcg

SEQ ID NO: 119826 - DNA, 22 bp, Artificial sequence
  SiRNA target sequence
gtgaaggatacccctatttcgg

SEQ ID NO: 119827 - DNA, 22 bp, Artificial sequence
  SiRNA target sequence
tgaaggatacccctatttcgga

SEQ ID NO: 119828 - DNA, 22 bp, Artificial sequence
  SiRNA target sequence
gaaggatacccctatttcggaa

SEQ ID NO: 119829 - DNA, 22 bp, Artificial sequence
  SiRNA target sequence
aaggatacccctatttcggaaa

SEQ ID NO: 119830 - DNA, 22 bp, Artificial sequence
  SiRNA target sequence
aggatacccctatttcggaaat

SEQ ID NO: 119831 - DNA, 22 bp, Artificial sequence
  SiRNA target sequence
ggatacccctatttcggaaatg

SEQ ID NO: 119832 - DNA, 22 bp, Artificial sequence
  SiRNA target sequence
gatacccctatttcggaaatgg

SEQ ID NO: 119833 - DNA, 22 bp, Artificial sequence
  SiRNA target sequence
atacccctatttcggaaatggg

SEQ ID NO: 119834 - DNA, 22 bp, Artificial sequence
  SiRNA target sequence
tacccctatttcggaaatggga

SEQ ID NO: 119835 - DNA, 22 bp, Artificial sequence
  SiRNA target sequence
acccctatttcggaaatgggat

SEQ ID NO: 119836 - DNA, 22 bp, Artificial sequence
  SiRNA target sequence
cccctatttcggaaatgggatt

SEQ ID NO: 119837 - DNA, 22 bp, Artificial sequence
  SiRNA target sequence
ccctatttcggaaatgggattt

SEQ ID NO: 119838 - DNA, 22 bp, Artificial sequence
  SiRNA target sequence
cctatttcggaaatgggattta

SEQ ID NO: 119839 - DNA, 22 bp, Artificial sequence
  SiRNA target sequence
ctatttcggaaatgggatttac

SEQ ID NO: 119840 - DNA, 22 bp, Artificial sequence
  SiRNA target sequence
tatttcggaaatgggatttaca

SEQ ID NO: 119841 - DNA, 22 bp, Artificial sequence
  SiRNA target sequence
atttcggaaatgggatttacag

SEQ ID NO: 119842 - DNA, 22 bp, Artificial sequence
  SiRNA target sequence
tttcggaaatgggatttacagg

SEQ ID NO: 119843 - DNA, 22 bp, Artificial sequence
  SiRNA target sequence
ttcggaaatgggatttacaggt

SEQ ID NO: 119844 - DNA, 22 bp, Artificial sequence
  SiRNA target sequence
tcggaaatgggatttacaggtc

SEQ ID NO: 119845 - DNA, 22 bp, Artificial sequence
  SiRNA target sequence
cggaaatgggatttacaggtct

SEQ ID NO: 119846 - DNA, 22 bp, Artificial sequence
  SiRNA target sequence
ggaaatgggatttacaggtctc

SEQ ID NO: 119847 - DNA, 22 bp, Artificial sequence
  SiRNA target sequence
gaaatgggatttacaggtctcg

SEQ ID NO: 119848 - DNA, 22 bp, Artificial sequence
  SiRNA target sequence
aaatgggatttacaggtctcgc

SEQ ID NO: 119849 - DNA, 22 bp, Artificial sequence
  SiRNA target sequence
aatgggatttacaggtctcgct

SEQ ID NO: 119850 - DNA, 22 bp, Artificial sequence
  SiRNA target sequence
atgggatttacaggtctcgctg

SEQ ID NO: 119851 - DNA, 22 bp, Artificial sequence
  SiRNA target sequence
tgggatttacaggtctcgctgt

SEQ ID NO: 119852 - DNA, 22 bp, Artificial sequence
  SiRNA target sequence
gggatttacaggtctcgctgtg

SEQ ID NO: 119853 - DNA, 22 bp, Artificial sequence
  SiRNA target sequence
ggatttacaggtctcgctgtgg

SEQ ID NO: 119854 - DNA, 22 bp, Artificial sequence
  SiRNA target sequence
gatttacaggtctcgctgtggg

SEQ ID NO: 119855 - DNA, 22 bp, Artificial sequence
  SiRNA target sequence
atttacaggtctcgctgtgggt

SEQ ID NO: 119856 - DNA, 22 bp, Artificial sequence
  SiRNA target sequence
tttacaggtctcgctgtgggtt

SEQ ID NO: 119857 - DNA, 22 bp, Artificial sequence
  SiRNA target sequence
ttacaggtctcgctgtgggttc

SEQ ID NO: 119858 - DNA, 22 bp, Artificial sequence
  SiRNA target sequence
tacaggtctcgctgtgggttca

SEQ ID NO: 119859 - DNA, 22 bp, Artificial sequence
  SiRNA target sequence
acaggtctcgctgtgggttcaa

SEQ ID NO: 119860 - DNA, 22 bp, Artificial sequence
  SiRNA target sequence
caggtctcgctgtgggttcaag

SEQ ID NO: 119861 - DNA, 22 bp, Artificial sequence
  SiRNA target sequence
aggtctcgctgtgggttcaagc

SEQ ID NO: 119862 - DNA, 22 bp, Artificial sequence
  SiRNA target sequence
ggtctcgctgtgggttcaagct

SEQ ID NO: 119863 - DNA, 22 bp, Artificial sequence
  SiRNA target sequence
gtctcgctgtgggttcaagcta

SEQ ID NO: 119864 - DNA, 22 bp, Artificial sequence
  SiRNA target sequence
tctcgctgtgggttcaagctat

SEQ ID NO: 119865 - DNA, 22 bp, Artificial sequence
  SiRNA target sequence
ctcgctgtgggttcaagctatt

SEQ ID NO: 119866 - DNA, 22 bp, Artificial sequence
  SiRNA target sequence
tcgctgtgggttcaagctattt

SEQ ID NO: 119867 - DNA, 22 bp, Artificial sequence
  SiRNA target sequence
cgctgtgggttcaagctattta

SEQ ID NO: 119868 - DNA, 22 bp, Artificial sequence
  SiRNA target sequence
gctgtgggttcaagctatttag

SEQ ID NO: 119869 - DNA, 22 bp, Artificial sequence
  SiRNA target sequence
ctgtgggttcaagctatttagg

SEQ ID NO: 119870 - DNA, 22 bp, Artificial sequence
  SiRNA target sequence
tgtgggttcaagctatttaggg

SEQ ID NO: 119871 - DNA, 22 bp, Artificial sequence
  SiRNA target sequence
gtgggttcaagctatttagggt

SEQ ID NO: 119872 - DNA, 22 bp, Artificial sequence
  SiRNA target sequence
tgggttcaagctatttagggtt

SEQ ID NO: 119873 - DNA, 22 bp, Artificial sequence
  SiRNA target sequence
gggttcaagctatttagggtta

SEQ ID NO: 119874 - DNA, 22 bp, Artificial sequence
  SiRNA target sequence
ggttcaagctatttagggttaa

SEQ ID NO: 119875 - DNA, 22 bp, Artificial sequence
  SiRNA target sequence
gttcaagctatttagggttaag

SEQ ID NO: 119876 - DNA, 22 bp, Artificial sequence
  SiRNA target sequence
ttcaagctatttagggttaaga

SEQ ID NO: 119877 - DNA, 22 bp, Artificial sequence
  SiRNA target sequence
tcaagctatttagggttaagac

SEQ ID NO: 119878 - DNA, 22 bp, Artificial sequence
  SiRNA target sequence
caagctatttagggttaagacc

SEQ ID NO: 119879 - DNA, 22 bp, Artificial sequence
  SiRNA target sequence
aagctatttagggttaagaccc

SEQ ID NO: 119880 - DNA, 22 bp, Artificial sequence
  SiRNA target sequence
agctatttagggttaagacccg

SEQ ID NO: 119881 - DNA, 22 bp, Artificial sequence
  SiRNA target sequence
gctatttagggttaagacccgt

SEQ ID NO: 119882 - DNA, 22 bp, Artificial sequence
  SiRNA target sequence
ctatttagggttaagacccgta

SEQ ID NO: 119883 - DNA, 22 bp, Artificial sequence
  SiRNA target sequence
tatttagggttaagacccgtag

SEQ ID NO: 119884 - DNA, 22 bp, Artificial sequence
  SiRNA target sequence
atttagggttaagacccgtagt

SEQ ID NO: 119885 - DNA, 22 bp, Artificial sequence
  SiRNA target sequence
tttagggttaagacccgtagta

SEQ ID NO: 119886 - DNA, 22 bp, Artificial sequence
  SiRNA target sequence
ttagggttaagacccgtagtag

SEQ ID NO: 119887 - DNA, 22 bp, Artificial sequence
  SiRNA target sequence
tagggttaagacccgtagtaga

SEQ ID NO: 119888 - DNA, 22 bp, Artificial sequence
  SiRNA target sequence
agggttaagacccgtagtagat

SEQ ID NO: 119889 - DNA, 22 bp, Artificial sequence
  SiRNA target sequence
gggttaagacccgtagtagatt

SEQ ID NO: 119890 - DNA, 22 bp, Artificial sequence
  SiRNA target sequence
ggttaagacccgtagtagattt

SEQ ID NO: 119891 - DNA, 22 bp, Artificial sequence
  SiRNA target sequence
gttaagacccgtagtagatttt

SEQ ID NO: 119892 - DNA, 22 bp, Artificial sequence
  SiRNA target sequence
ttaagacccgtagtagatttta

SEQ ID NO: 119893 - DNA, 22 bp, Artificial sequence
  SiRNA target sequence
taagacccgtagtagattttat

SEQ ID NO: 119894 - DNA, 22 bp, Artificial sequence
  SiRNA target sequence
aagacccgtagtagattttatg

SEQ ID NO: 119895 - DNA, 22 bp, Artificial sequence
  SiRNA target sequence
agacccgtagtagattttatga

SEQ ID NO: 119896 - DNA, 22 bp, Artificial sequence
  SiRNA target sequence
gacccgtagtagattttatgac

SEQ ID NO: 119897 - DNA, 22 bp, Artificial sequence
  SiRNA target sequence
acccgtagtagattttatgact

SEQ ID NO: 119898 - DNA, 22 bp, Artificial sequence
  SiRNA target sequence
cccgtagtagattttatgactt

SEQ ID NO: 119899 - DNA, 22 bp, Artificial sequence
  SiRNA target sequence
ccgtagtagattttatgacttg

SEQ ID NO: 119900 - DNA, 22 bp, Artificial sequence
  SiRNA target sequence
cgtagtagattttatgacttgg

SEQ ID NO: 119901 - DNA, 22 bp, Artificial sequence
  SiRNA target sequence
gtagtagattttatgacttgga

SEQ ID NO: 119902 - DNA, 22 bp, Artificial sequence
  SiRNA target sequence
tagtagattttatgacttggaa

SEQ ID NO: 119903 - DNA, 22 bp, Artificial sequence
  SiRNA target sequence
agtagattttatgacttggaat

SEQ ID NO: 119904 - DNA, 22 bp, Artificial sequence
  SiRNA target sequence
gtagattttatgacttggaatt

SEQ ID NO: 119905 - DNA, 22 bp, Artificial sequence
  SiRNA target sequence
tagattttatgacttggaattt

SEQ ID NO: 119906 - DNA, 22 bp, Artificial sequence
  SiRNA target sequence
agattttatgacttggaatttt

SEQ ID NO: 119907 - DNA, 22 bp, Artificial sequence
  SiRNA target sequence
gattttatgacttggaattttg

SEQ ID NO: 119908 - DNA, 22 bp, Artificial sequence
  SiRNA target sequence
attttatgacttggaattttgc

SEQ ID NO: 119909 - DNA, 22 bp, Artificial sequence
  SiRNA target sequence
ttttatgacttggaattttgct

SEQ ID NO: 119910 - DNA, 22 bp, Artificial sequence
  SiRNA target sequence
tttatgacttggaattttgctt

SEQ ID NO: 119911 - DNA, 22 bp, Artificial sequence
  SiRNA target sequence
ttatgacttggaattttgcttt

SEQ ID NO: 119912 - DNA, 22 bp, Artificial sequence
  SiRNA target sequence
tatgacttggaattttgctttg

SEQ ID NO: 119913 - DNA, 22 bp, Artificial sequence
  SiRNA target sequence
atgacttggaattttgctttgc

SEQ ID NO: 119914 - DNA, 22 bp, Artificial sequence
  SiRNA target sequence
tgacttggaattttgctttgca

SEQ ID NO: 119915 - DNA, 22 bp, Artificial sequence
  SiRNA target sequence
gacttggaattttgctttgcaa

SEQ ID NO: 119916 - DNA, 22 bp, Artificial sequence
  SiRNA target sequence
acttggaattttgctttgcaat

SEQ ID NO: 119917 - DNA, 22 bp, Artificial sequence
  SiRNA target sequence
cttggaattttgctttgcaatc

SEQ ID NO: 119918 - DNA, 22 bp, Artificial sequence
  SiRNA target sequence
ttggaattttgctttgcaatca

SEQ ID NO: 119919 - DNA, 22 bp, Artificial sequence
  SiRNA target sequence
tggaattttgctttgcaatcaa

SEQ ID NO: 119920 - DNA, 22 bp, Artificial sequence
  SiRNA target sequence
ggaattttgctttgcaatcaat

SEQ ID NO: 119921 - DNA, 22 bp, Artificial sequence
  SiRNA target sequence
gaattttgctttgcaatcaatt

SEQ ID NO: 119922 - DNA, 22 bp, Artificial sequence
  SiRNA target sequence
aattttgctttgcaatcaattg

SEQ ID NO: 119923 - DNA, 22 bp, Artificial sequence
  SiRNA target sequence
attttgctttgcaatcaattga

SEQ ID NO: 119924 - DNA, 22 bp, Artificial sequence
  SiRNA target sequence
ttttgctttgcaatcaattgac

SEQ ID NO: 119925 - DNA, 22 bp, Artificial sequence
  SiRNA target sequence
tttgctttgcaatcaattgacc

SEQ ID NO: 119926 - DNA, 22 bp, Artificial sequence
  SiRNA target sequence
ttgctttgcaatcaattgacca

SEQ ID NO: 119927 - DNA, 22 bp, Artificial sequence
  SiRNA target sequence
tgctttgcaatcaattgaccat

SEQ ID NO: 119928 - DNA, 22 bp, Artificial sequence
  SiRNA target sequence
gctttgcaatcaattgaccata

SEQ ID NO: 119929 - DNA, 22 bp, Artificial sequence
  SiRNA target sequence
ctttgcaatcaattgaccatat

SEQ ID NO: 119930 - DNA, 22 bp, Artificial sequence
  SiRNA target sequence
tttgcaatcaattgaccatatt

SEQ ID NO: 119931 - DNA, 22 bp, Artificial sequence
  SiRNA target sequence
ttgcaatcaattgaccatatta

SEQ ID NO: 119932 - DNA, 22 bp, Artificial sequence
  SiRNA target sequence
tgcaatcaattgaccatattat

SEQ ID NO: 119933 - DNA, 22 bp, Artificial sequence
  SiRNA target sequence
gcaatcaattgaccatattatt

SEQ ID NO: 119934 - DNA, 22 bp, Artificial sequence
  SiRNA target sequence
caatcaattgaccatattatta

SEQ ID NO: 119935 - DNA, 22 bp, Artificial sequence
  SiRNA target sequence
aatcaattgaccatattattaa

SEQ ID NO: 119936 - DNA, 22 bp, Artificial sequence
  SiRNA target sequence
atcaattgaccatattattaat

SEQ ID NO: 119937 - DNA, 22 bp, Artificial sequence
  SiRNA target sequence
tcaattgaccatattattaatt

SEQ ID NO: 119938 - DNA, 22 bp, Artificial sequence
  SiRNA target sequence
caattgaccatattattaattc

SEQ ID NO: 119939 - DNA, 22 bp, Artificial sequence
  SiRNA target sequence
aattgaccatattattaattct

SEQ ID NO: 119940 - DNA, 22 bp, Artificial sequence
  SiRNA target sequence
attgaccatattattaattctt

SEQ ID NO: 119941 - DNA, 22 bp, Artificial sequence
  SiRNA target sequence
ttgaccatattattaattcttg

SEQ ID NO: 119942 - DNA, 22 bp, Artificial sequence
  SiRNA target sequence
tgaccatattattaattcttgt

SEQ ID NO: 119943 - DNA, 22 bp, Artificial sequence
  SiRNA target sequence
gaccatattattaattcttgtg

SEQ ID NO: 119944 - DNA, 22 bp, Artificial sequence
  SiRNA target sequence
accatattattaattcttgtgc

SEQ ID NO: 119945 - DNA, 22 bp, Artificial sequence
  SiRNA target sequence
ccatattattaattcttgtgcg

SEQ ID NO: 119946 - DNA, 22 bp, Artificial sequence
  SiRNA target sequence
catattattaattcttgtgcga

SEQ ID NO: 119947 - DNA, 22 bp, Artificial sequence
  SiRNA target sequence
atattattaattcttgtgcgaa

SEQ ID NO: 119948 - DNA, 22 bp, Artificial sequence
  SiRNA target sequence
tattattaattcttgtgcgaaa

SEQ ID NO: 119949 - DNA, 22 bp, Artificial sequence
  SiRNA target sequence
attattaattcttgtgcgaaaa

SEQ ID NO: 119950 - DNA, 22 bp, Artificial sequence
  SiRNA target sequence
ttattaattcttgtgcgaaaac

SEQ ID NO: 119951 - DNA, 22 bp, Artificial sequence
  SiRNA target sequence
tattaattcttgtgcgaaaacc

SEQ ID NO: 119952 - DNA, 22 bp, Artificial sequence
  SiRNA target sequence
attaattcttgtgcgaaaacct

SEQ ID NO: 119953 - DNA, 22 bp, Artificial sequence
  SiRNA target sequence
ttaattcttgtgcgaaaacctt

SEQ ID NO: 119954 - DNA, 22 bp, Artificial sequence
  SiRNA target sequence
taattcttgtgcgaaaaccttg

SEQ ID NO: 119955 - DNA, 22 bp, Artificial sequence
  SiRNA target sequence
aattcttgtgcgaaaaccttgt

SEQ ID NO: 119956 - DNA, 22 bp, Artificial sequence
  SiRNA target sequence
attcttgtgcgaaaaccttgta

SEQ ID NO: 119957 - DNA, 22 bp, Artificial sequence
  SiRNA target sequence
ttcttgtgcgaaaaccttgtat

SEQ ID NO: 119958 - DNA, 22 bp, Artificial sequence
  SiRNA target sequence
tcttgtgcgaaaaccttgtata

SEQ ID NO: 119959 - DNA, 22 bp, Artificial sequence
  SiRNA target sequence
cttgtgcgaaaaccttgtatat

SEQ ID NO: 119960 - DNA, 22 bp, Artificial sequence
  SiRNA target sequence
ttgtgcgaaaaccttgtatatg

SEQ ID NO: 119961 - DNA, 22 bp, Artificial sequence
  SiRNA target sequence
tgtgcgaaaaccttgtatatgt

SEQ ID NO: 119962 - DNA, 22 bp, Artificial sequence
  SiRNA target sequence
gtgcgaaaaccttgtatatgtc

SEQ ID NO: 119963 - DNA, 22 bp, Artificial sequence
  SiRNA target sequence
tgcgaaaaccttgtatatgtca

SEQ ID NO: 119964 - DNA, 22 bp, Artificial sequence
  SiRNA target sequence
gcgaaaaccttgtatatgtcag

SEQ ID NO: 119965 - DNA, 22 bp, Artificial sequence
  SiRNA target sequence
cgaaaaccttgtatatgtcagg

SEQ ID NO: 119966 - DNA, 22 bp, Artificial sequence
  SiRNA target sequence
gaaaaccttgtatatgtcagga

SEQ ID NO: 119967 - DNA, 22 bp, Artificial sequence
  SiRNA target sequence
aaaaccttgtatatgtcaggag

SEQ ID NO: 119968 - DNA, 22 bp, Artificial sequence
  SiRNA target sequence
aaaccttgtatatgtcaggagg

SEQ ID NO: 119969 - DNA, 22 bp, Artificial sequence
  SiRNA target sequence
aaccttgtatatgtcaggagga

SEQ ID NO: 119970 - DNA, 22 bp, Artificial sequence
  SiRNA target sequence
accttgtatatgtcaggaggaa

SEQ ID NO: 119971 - DNA, 22 bp, Artificial sequence
  SiRNA target sequence
ccttgtatatgtcaggaggaag

SEQ ID NO: 119972 - DNA, 22 bp, Artificial sequence
  SiRNA target sequence
cttgtatatgtcaggaggaaga

SEQ ID NO: 119973 - DNA, 22 bp, Artificial sequence
  SiRNA target sequence
ttgtatatgtcaggaggaagaa

SEQ ID NO: 119974 - DNA, 22 bp, Artificial sequence
  SiRNA target sequence
tgtatatgtcaggaggaagaat

SEQ ID NO: 119975 - DNA, 22 bp, Artificial sequence
  SiRNA target sequence
gtatatgtcaggaggaagaata

SEQ ID NO: 119976 - DNA, 22 bp, Artificial sequence
  SiRNA target sequence
tatatgtcaggaggaagaatac

SEQ ID NO: 119977 - DNA, 22 bp, Artificial sequence
  SiRNA target sequence
atatgtcaggaggaagaataca

SEQ ID NO: 119978 - DNA, 22 bp, Artificial sequence
  SiRNA target sequence
tatgtcaggaggaagaatacaa

SEQ ID NO: 119979 - DNA, 22 bp, Artificial sequence
  SiRNA target sequence
atgtcaggaggaagaatacaat

SEQ ID NO: 119980 - DNA, 22 bp, Artificial sequence
  SiRNA target sequence
tgtcaggaggaagaatacaatg

SEQ ID NO: 119981 - DNA, 22 bp, Artificial sequence
  SiRNA target sequence
gtcaggaggaagaatacaatgt

SEQ ID NO: 119982 - DNA, 22 bp, Artificial sequence
  SiRNA target sequence
tcaggaggaagaatacaatgtc

SEQ ID NO: 119983 - DNA, 22 bp, Artificial sequence
  SiRNA target sequence
caggaggaagaatacaatgtcc

SEQ ID NO: 119984 - DNA, 22 bp, Artificial sequence
  SiRNA target sequence
aggaggaagaatacaatgtcca

SEQ ID NO: 119985 - DNA, 22 bp, Artificial sequence
  SiRNA target sequence
ggaggaagaatacaatgtccaa

SEQ ID NO: 119986 - DNA, 22 bp, Artificial sequence
  SiRNA target sequence
gaggaagaatacaatgtccaat

SEQ ID NO: 119987 - DNA, 22 bp, Artificial sequence
  SiRNA target sequence
aggaagaatacaatgtccaatt

SEQ ID NO: 119988 - DNA, 22 bp, Artificial sequence
  SiRNA target sequence
ggaagaatacaatgtccaattg

SEQ ID NO: 119989 - DNA, 22 bp, Artificial sequence
  SiRNA target sequence
gaagaatacaatgtccaattgt

SEQ ID NO: 119990 - DNA, 22 bp, Artificial sequence
  SiRNA target sequence
aagaatacaatgtccaattgtt

SEQ ID NO: 119991 - DNA, 22 bp, Artificial sequence
  SiRNA target sequence
agaatacaatgtccaattgttt

SEQ ID NO: 119992 - DNA, 22 bp, Artificial sequence
  SiRNA target sequence
gaatacaatgtccaattgtttt

SEQ ID NO: 119993 - DNA, 22 bp, Artificial sequence
  SiRNA target sequence
aatacaatgtccaattgttttt

SEQ ID NO: 119994 - DNA, 22 bp, Artificial sequence
  SiRNA target sequence
atacaatgtccaattgttttta

SEQ ID NO: 119995 - DNA, 22 bp, Artificial sequence
  SiRNA target sequence
tacaatgtccaattgtttttag

SEQ ID NO: 119996 - DNA, 22 bp, Artificial sequence
  SiRNA target sequence
acaatgtccaattgtttttagg

SEQ ID NO: 119997 - DNA, 22 bp, Artificial sequence
  SiRNA target sequence
caatgtccaattgtttttaggg

SEQ ID NO: 119998 - DNA, 22 bp, Artificial sequence
  SiRNA target sequence
aatgtccaattgtttttagggg

SEQ ID NO: 119999 - DNA, 22 bp, Artificial sequence
  SiRNA target sequence
atgtccaattgtttttagggga

SEQ ID NO: 120000 - DNA, 22 bp, Artificial sequence
  SiRNA target sequence
tgtccaattgtttttaggggac

SEQ ID NO: 120001 - DNA, 22 bp, Artificial sequence
  SiRNA target sequence
gtccaattgtttttaggggacc

SEQ ID NO: 120002 - DNA, 22 bp, Artificial sequence
  SiRNA target sequence
tccaattgtttttaggggacca

SEQ ID NO: 120003 - DNA, 22 bp, Artificial sequence
  SiRNA target sequence
ccaattgtttttaggggaccaa

SEQ ID NO: 120004 - DNA, 22 bp, Artificial sequence
  SiRNA target sequence
caattgtttttaggggaccaaa

SEQ ID NO: 120005 - DNA, 22 bp, Artificial sequence
  SiRNA target sequence
aattgtttttaggggaccaaat

SEQ ID NO: 120006 - DNA, 22 bp, Artificial sequence
  SiRNA target sequence
attgtttttaggggaccaaatg

SEQ ID NO: 120007 - DNA, 22 bp, Artificial sequence
  SiRNA target sequence
ttgtttttaggggaccaaatgg

SEQ ID NO: 120008 - DNA, 22 bp, Artificial sequence
  SiRNA target sequence
tgtttttaggggaccaaatgga

SEQ ID NO: 120009 - DNA, 22 bp, Artificial sequence
  SiRNA target sequence
gtttttaggggaccaaatggat

SEQ ID NO: 120010 - DNA, 22 bp, Artificial sequence
  SiRNA target sequence
tttttaggggaccaaatggatt

SEQ ID NO: 120011 - DNA, 22 bp, Artificial sequence
  SiRNA target sequence
ttttaggggaccaaatggattc

SEQ ID NO: 120012 - DNA, 22 bp, Artificial sequence
  SiRNA target sequence
tttaggggaccaaatggattca

SEQ ID NO: 120013 - DNA, 22 bp, Artificial sequence
  SiRNA target sequence
ttaggggaccaaatggattcaa

SEQ ID NO: 120014 - DNA, 22 bp, Artificial sequence
  SiRNA target sequence
taggggaccaaatggattcaat

SEQ ID NO: 120015 - DNA, 22 bp, Artificial sequence
  SiRNA target sequence
aggggaccaaatggattcaata

SEQ ID NO: 120016 - DNA, 22 bp, Artificial sequence
  SiRNA target sequence
ggggaccaaatggattcaataa

SEQ ID NO: 120017 - DNA, 22 bp, Artificial sequence
  SiRNA target sequence
gggaccaaatggattcaataat

SEQ ID NO: 120018 - DNA, 22 bp, Artificial sequence
  SiRNA target sequence
ggaccaaatggattcaataatg

SEQ ID NO: 120019 - DNA, 22 bp, Artificial sequence
  SiRNA target sequence
gaccaaatggattcaataatgg

SEQ ID NO: 120020 - DNA, 22 bp, Artificial sequence
  SiRNA target sequence
accaaatggattcaataatggg

SEQ ID NO: 120021 - DNA, 22 bp, Artificial sequence
  SiRNA target sequence
ccaaatggattcaataatgggt

SEQ ID NO: 120022 - DNA, 22 bp, Artificial sequence
  SiRNA target sequence
caaatggattcaataatgggta

SEQ ID NO: 120023 - DNA, 22 bp, Artificial sequence
  SiRNA target sequence
aaatggattcaataatgggtac

SEQ ID NO: 120024 - DNA, 22 bp, Artificial sequence
  SiRNA target sequence
aatggattcaataatgggtacg

SEQ ID NO: 120025 - DNA, 22 bp, Artificial sequence
  SiRNA target sequence
atggattcaataatgggtacgc

SEQ ID NO: 120026 - DNA, 22 bp, Artificial sequence
  SiRNA target sequence
tggattcaataatgggtacgct

SEQ ID NO: 120027 - DNA, 22 bp, Artificial sequence
  SiRNA target sequence
ggattcaataatgggtacgctg

SEQ ID NO: 120028 - DNA, 22 bp, Artificial sequence
  SiRNA target sequence
gattcaataatgggtacgctgc

SEQ ID NO: 120029 - DNA, 22 bp, Artificial sequence
  SiRNA target sequence
attcaataatgggtacgctgca

SEQ ID NO: 120030 - DNA, 22 bp, Artificial sequence
  SiRNA target sequence
ttcaataatgggtacgctgcac

SEQ ID NO: 120031 - DNA, 22 bp, Artificial sequence
  SiRNA target sequence
tcaataatgggtacgctgcaca

SEQ ID NO: 120032 - DNA, 22 bp, Artificial sequence
  SiRNA target sequence
caataatgggtacgctgcacag

SEQ ID NO: 120033 - DNA, 22 bp, Artificial sequence
  SiRNA target sequence
aataatgggtacgctgcacagc

SEQ ID NO: 120034 - DNA, 22 bp, Artificial sequence
  SiRNA target sequence
ataatgggtacgctgcacagca

SEQ ID NO: 120035 - DNA, 22 bp, Artificial sequence
  SiRNA target sequence
taatgggtacgctgcacagcac

SEQ ID NO: 120036 - DNA, 22 bp, Artificial sequence
  SiRNA target sequence
aatgggtacgctgcacagcaca

SEQ ID NO: 120037 - DNA, 22 bp, Artificial sequence
  SiRNA target sequence
atgggtacgctgcacagcacac

SEQ ID NO: 120038 - DNA, 22 bp, Artificial sequence
  SiRNA target sequence
tgggtacgctgcacagcacaca

SEQ ID NO: 120039 - DNA, 22 bp, Artificial sequence
  SiRNA target sequence
gggtacgctgcacagcacacac

SEQ ID NO: 120040 - DNA, 22 bp, Artificial sequence
  SiRNA target sequence
ggtacgctgcacagcacacaca

SEQ ID NO: 120041 - DNA, 22 bp, Artificial sequence
  SiRNA target sequence
gtacgctgcacagcacacacaa

SEQ ID NO: 120042 - DNA, 22 bp, Artificial sequence
  SiRNA target sequence
tacgctgcacagcacacacaag

SEQ ID NO: 120043 - DNA, 22 bp, Artificial sequence
  SiRNA target sequence
acgctgcacagcacacacaaga

SEQ ID NO: 120044 - DNA, 22 bp, Artificial sequence
  SiRNA target sequence
cgctgcacagcacacacaagat

SEQ ID NO: 120045 - DNA, 22 bp, Artificial sequence
  SiRNA target sequence
gctgcacagcacacacaagatt

SEQ ID NO: 120046 - DNA, 22 bp, Artificial sequence
  SiRNA target sequence
ctgcacagcacacacaagattt

SEQ ID NO: 120047 - DNA, 22 bp, Artificial sequence
  SiRNA target sequence
tgcacagcacacacaagatttt

SEQ ID NO: 120048 - DNA, 22 bp, Artificial sequence
  SiRNA target sequence
gcacagcacacacaagattttg

SEQ ID NO: 120049 - DNA, 22 bp, Artificial sequence
  SiRNA target sequence
cacagcacacacaagattttgc

SEQ ID NO: 120050 - DNA, 22 bp, Artificial sequence
  SiRNA target sequence
acagcacacacaagattttgca

SEQ ID NO: 120051 - DNA, 22 bp, Artificial sequence
  SiRNA target sequence
cagcacacacaagattttgcac

SEQ ID NO: 120052 - DNA, 22 bp, Artificial sequence
  SiRNA target sequence
agcacacacaagattttgcacc

SEQ ID NO: 120053 - DNA, 22 bp, Artificial sequence
  SiRNA target sequence
gcacacacaagattttgcacca

SEQ ID NO: 120054 - DNA, 22 bp, Artificial sequence
  SiRNA target sequence
cacacacaagattttgcaccaa

SEQ ID NO: 120055 - DNA, 22 bp, Artificial sequence
  SiRNA target sequence
acacacaagattttgcaccaat

SEQ ID NO: 120056 - DNA, 22 bp, Artificial sequence
  SiRNA target sequence
cacacaagattttgcaccaata

SEQ ID NO: 120057 - DNA, 22 bp, Artificial sequence
  SiRNA target sequence
acacaagattttgcaccaatat

SEQ ID NO: 120058 - DNA, 22 bp, Artificial sequence
  SiRNA target sequence
cacaagattttgcaccaatata

SEQ ID NO: 120059 - DNA, 22 bp, Artificial sequence
  SiRNA target sequence
acaagattttgcaccaatatat

SEQ ID NO: 120060 - DNA, 22 bp, Artificial sequence
  SiRNA target sequence
caagattttgcaccaatatatg

SEQ ID NO: 120061 - DNA, 22 bp, Artificial sequence
  SiRNA target sequence
aagattttgcaccaatatatgg

SEQ ID NO: 120062 - DNA, 22 bp, Artificial sequence
  SiRNA target sequence
agattttgcaccaatatatggt

SEQ ID NO: 120063 - DNA, 22 bp, Artificial sequence
  SiRNA target sequence
gattttgcaccaatatatggtt

SEQ ID NO: 120064 - DNA, 22 bp, Artificial sequence
  SiRNA target sequence
attttgcaccaatatatggttc

SEQ ID NO: 120065 - DNA, 22 bp, Artificial sequence
  SiRNA target sequence
ttttgcaccaatatatggttct

SEQ ID NO: 120066 - DNA, 22 bp, Artificial sequence
  SiRNA target sequence
tttgcaccaatatatggttcta

SEQ ID NO: 120067 - DNA, 22 bp, Artificial sequence
  SiRNA target sequence
ttgcaccaatatatggttctat

SEQ ID NO: 120068 - DNA, 22 bp, Artificial sequence
  SiRNA target sequence
tgcaccaatatatggttctatt

SEQ ID NO: 120069 - DNA, 22 bp, Artificial sequence
  SiRNA target sequence
gcaccaatatatggttctattc

SEQ ID NO: 120070 - DNA, 22 bp, Artificial sequence
  SiRNA target sequence
caccaatatatggttctattcc

SEQ ID NO: 120071 - DNA, 22 bp, Artificial sequence
  SiRNA target sequence
accaatatatggttctattcca

SEQ ID NO: 120072 - DNA, 22 bp, Artificial sequence
  SiRNA target sequence
ccaatatatggttctattccag

SEQ ID NO: 120073 - DNA, 22 bp, Artificial sequence
  SiRNA target sequence
caatatatggttctattccagg

SEQ ID NO: 120074 - DNA, 22 bp, Artificial sequence
  SiRNA target sequence
aatatatggttctattccaggc

SEQ ID NO: 120075 - DNA, 22 bp, Artificial sequence
  SiRNA target sequence
atatatggttctattccaggcc

SEQ ID NO: 120076 - DNA, 22 bp, Artificial sequence
  SiRNA target sequence
tatatggttctattccaggcct

SEQ ID NO: 120077 - DNA, 22 bp, Artificial sequence
  SiRNA target sequence
atatggttctattccaggcctt

SEQ ID NO: 120078 - DNA, 22 bp, Artificial sequence
  SiRNA target sequence
tatggttctattccaggcctta

SEQ ID NO: 120079 - DNA, 22 bp, Artificial sequence
  SiRNA target sequence
atggttctattccaggccttaa

SEQ ID NO: 120080 - DNA, 22 bp, Artificial sequence
  SiRNA target sequence
tggttctattccaggccttaag

SEQ ID NO: 120081 - DNA, 22 bp, Artificial sequence
  SiRNA target sequence
ggttctattccaggccttaagg

SEQ ID NO: 120082 - DNA, 22 bp, Artificial sequence
  SiRNA target sequence
gttctattccaggccttaaggt

SEQ ID NO: 120083 - DNA, 22 bp, Artificial sequence
  SiRNA target sequence
ttctattccaggccttaaggtg

SEQ ID NO: 120084 - DNA, 22 bp, Artificial sequence
  SiRNA target sequence
tctattccaggccttaaggtgg

SEQ ID NO: 120085 - DNA, 22 bp, Artificial sequence
  SiRNA target sequence
ctattccaggccttaaggtggt

SEQ ID NO: 120086 - DNA, 22 bp, Artificial sequence
  SiRNA target sequence
tattccaggccttaaggtggtt

SEQ ID NO: 120087 - DNA, 22 bp, Artificial sequence
  SiRNA target sequence
attccaggccttaaggtggttt

SEQ ID NO: 120088 - DNA, 22 bp, Artificial sequence
  SiRNA target sequence
ttccaggccttaaggtggtttg

SEQ ID NO: 120089 - DNA, 22 bp, Artificial sequence
  SiRNA target sequence
tccaggccttaaggtggtttgt

SEQ ID NO: 120090 - DNA, 22 bp, Artificial sequence
  SiRNA target sequence
ccaggccttaaggtggtttgtc

SEQ ID NO: 120091 - DNA, 22 bp, Artificial sequence
  SiRNA target sequence
caggccttaaggtggtttgtcc

SEQ ID NO: 120092 - DNA, 22 bp, Artificial sequence
  SiRNA target sequence
aggccttaaggtggtttgtcct

SEQ ID NO: 120093 - DNA, 22 bp, Artificial sequence
  SiRNA target sequence
ggccttaaggtggtttgtcctt

SEQ ID NO: 120094 - DNA, 22 bp, Artificial sequence
  SiRNA target sequence
gccttaaggtggtttgtcctta

SEQ ID NO: 120095 - DNA, 22 bp, Artificial sequence
  SiRNA target sequence
ccttaaggtggtttgtccttat

SEQ ID NO: 120096 - DNA, 22 bp, Artificial sequence
  SiRNA target sequence
cttaaggtggtttgtccttata

SEQ ID NO: 120097 - DNA, 22 bp, Artificial sequence
  SiRNA target sequence
ttaaggtggtttgtccttatac

SEQ ID NO: 120098 - DNA, 22 bp, Artificial sequence
  SiRNA target sequence
taaggtggtttgtccttatacg

SEQ ID NO: 120099 - DNA, 22 bp, Artificial sequence
  SiRNA target sequence
aaggtggtttgtccttatacgg

SEQ ID NO: 120100 - DNA, 22 bp, Artificial sequence
  SiRNA target sequence
aggtggtttgtccttatacggg

SEQ ID NO: 120101 - DNA, 22 bp, Artificial sequence
  SiRNA target sequence
ggtggtttgtccttatacgggt

SEQ ID NO: 120102 - DNA, 22 bp, Artificial sequence
  SiRNA target sequence
gtggtttgtccttatacgggta

SEQ ID NO: 120103 - DNA, 22 bp, Artificial sequence
  SiRNA target sequence
tggtttgtccttatacgggtaa

SEQ ID NO: 120104 - DNA, 22 bp, Artificial sequence
  SiRNA target sequence
ggtttgtccttatacgggtaaa

SEQ ID NO: 120105 - DNA, 22 bp, Artificial sequence
  SiRNA target sequence
gtttgtccttatacgggtaaag

SEQ ID NO: 120106 - DNA, 22 bp, Artificial sequence
  SiRNA target sequence
tttgtccttatacgggtaaaga

SEQ ID NO: 120107 - DNA, 22 bp, Artificial sequence
  SiRNA target sequence
ttgtccttatacgggtaaagac

SEQ ID NO: 120108 - DNA, 22 bp, Artificial sequence
  SiRNA target sequence
tgtccttatacgggtaaagacc

SEQ ID NO: 120109 - DNA, 22 bp, Artificial sequence
  SiRNA target sequence
gtccttatacgggtaaagacca

SEQ ID NO: 120110 - DNA, 22 bp, Artificial sequence
  SiRNA target sequence
tccttatacgggtaaagaccat

SEQ ID NO: 120111 - DNA, 22 bp, Artificial sequence
  SiRNA target sequence
ccttatacgggtaaagaccata

SEQ ID NO: 120112 - DNA, 22 bp, Artificial sequence
  SiRNA target sequence
cttatacgggtaaagaccataa

SEQ ID NO: 120113 - DNA, 22 bp, Artificial sequence
  SiRNA target sequence
ttatacgggtaaagaccataaa

SEQ ID NO: 120114 - DNA, 22 bp, Artificial sequence
  SiRNA target sequence
tatacgggtaaagaccataaag

SEQ ID NO: 120115 - DNA, 22 bp, Artificial sequence
  SiRNA target sequence
atacgggtaaagaccataaagg

SEQ ID NO: 120116 - DNA, 22 bp, Artificial sequence
  SiRNA target sequence
tacgggtaaagaccataaagga

SEQ ID NO: 120117 - DNA, 22 bp, Artificial sequence
  SiRNA target sequence
acgggtaaagaccataaaggac

SEQ ID NO: 120118 - DNA, 22 bp, Artificial sequence
  SiRNA target sequence
cgggtaaagaccataaaggact

SEQ ID NO: 120119 - DNA, 22 bp, Artificial sequence
  SiRNA target sequence
gggtaaagaccataaaggactt

SEQ ID NO: 120120 - DNA, 22 bp, Artificial sequence
  SiRNA target sequence
ggtaaagaccataaaggacttt

SEQ ID NO: 120121 - DNA, 22 bp, Artificial sequence
  SiRNA target sequence
gtaaagaccataaaggactttt

SEQ ID NO: 120122 - DNA, 22 bp, Artificial sequence
  SiRNA target sequence
taaagaccataaaggactttta

SEQ ID NO: 120123 - DNA, 22 bp, Artificial sequence
  SiRNA target sequence
aaagaccataaaggacttttaa

SEQ ID NO: 120124 - DNA, 22 bp, Artificial sequence
  SiRNA target sequence
aagaccataaaggacttttaaa

SEQ ID NO: 120125 - DNA, 22 bp, Artificial sequence
  SiRNA target sequence
agaccataaaggacttttaaaa

SEQ ID NO: 120126 - DNA, 22 bp, Artificial sequence
  SiRNA target sequence
gaccataaaggacttttaaaaa

SEQ ID NO: 120127 - DNA, 22 bp, Artificial sequence
  SiRNA target sequence
accataaaggacttttaaaaag

SEQ ID NO: 120128 - DNA, 22 bp, Artificial sequence
  SiRNA target sequence
ccataaaggacttttaaaaagc

SEQ ID NO: 120129 - DNA, 22 bp, Artificial sequence
  SiRNA target sequence
cataaaggacttttaaaaagcg

SEQ ID NO: 120130 - DNA, 22 bp, Artificial sequence
  SiRNA target sequence
ataaaggacttttaaaaagcgc

SEQ ID NO: 120131 - DNA, 22 bp, Artificial sequence
  SiRNA target sequence
taaaggacttttaaaaagcgct

SEQ ID NO: 120132 - DNA, 22 bp, Artificial sequence
  SiRNA target sequence
aaaggacttttaaaaagcgcta

SEQ ID NO: 120133 - DNA, 22 bp, Artificial sequence
  SiRNA target sequence
aaggacttttaaaaagcgctat

SEQ ID NO: 120134 - DNA, 22 bp, Artificial sequence
  SiRNA target sequence
aggacttttaaaaagcgctatt

SEQ ID NO: 120135 - DNA, 22 bp, Artificial sequence
  SiRNA target sequence
ggacttttaaaaagcgctatta

SEQ ID NO: 120136 - DNA, 22 bp, Artificial sequence
  SiRNA target sequence
gacttttaaaaagcgctattag

SEQ ID NO: 120137 - DNA, 22 bp, Artificial sequence
  SiRNA target sequence
acttttaaaaagcgctattaga

SEQ ID NO: 120138 - DNA, 22 bp, Artificial sequence
  SiRNA target sequence
cttttaaaaagcgctattagag

SEQ ID NO: 120139 - DNA, 22 bp, Artificial sequence
  SiRNA target sequence
ttttaaaaagcgctattagaga

SEQ ID NO: 120140 - DNA, 22 bp, Artificial sequence
  SiRNA target sequence
tttaaaaagcgctattagagac

SEQ ID NO: 120141 - DNA, 22 bp, Artificial sequence
  SiRNA target sequence
ttaaaaagcgctattagagaca

SEQ ID NO: 120142 - DNA, 22 bp, Artificial sequence
  SiRNA target sequence
taaaaagcgctattagagacaa

SEQ ID NO: 120143 - DNA, 22 bp, Artificial sequence
  SiRNA target sequence
aaaaagcgctattagagacaat

SEQ ID NO: 120144 - DNA, 22 bp, Artificial sequence
  SiRNA target sequence
aaaagcgctattagagacaata

SEQ ID NO: 120145 - DNA, 22 bp, Artificial sequence
  SiRNA target sequence
aaagcgctattagagacaataa

SEQ ID NO: 120146 - DNA, 22 bp, Artificial sequence
  SiRNA target sequence
aagcgctattagagacaataac

SEQ ID NO: 120147 - DNA, 22 bp, Artificial sequence
  SiRNA target sequence
agcgctattagagacaataacc

SEQ ID NO: 120148 - DNA, 22 bp, Artificial sequence
  SiRNA target sequence
gcgctattagagacaataaccc

SEQ ID NO: 120149 - DNA, 22 bp, Artificial sequence
  SiRNA target sequence
cgctattagagacaataacccg

SEQ ID NO: 120150 - DNA, 22 bp, Artificial sequence
  SiRNA target sequence
gctattagagacaataacccgg

SEQ ID NO: 120151 - DNA, 22 bp, Artificial sequence
  SiRNA target sequence
ctattagagacaataacccggt

SEQ ID NO: 120152 - DNA, 22 bp, Artificial sequence
  SiRNA target sequence
tattagagacaataacccggtt

SEQ ID NO: 120153 - DNA, 22 bp, Artificial sequence
  SiRNA target sequence
attagagacaataacccggtta

SEQ ID NO: 120154 - DNA, 22 bp, Artificial sequence
  SiRNA target sequence
ttagagacaataacccggttat

SEQ ID NO: 120155 - DNA, 22 bp, Artificial sequence
  SiRNA target sequence
tagagacaataacccggttata

SEQ ID NO: 120156 - DNA, 22 bp, Artificial sequence
  SiRNA target sequence
agagacaataacccggttatat

SEQ ID NO: 120157 - DNA, 22 bp, Artificial sequence
  SiRNA target sequence
gagacaataacccggttatatt

SEQ ID NO: 120158 - DNA, 22 bp, Artificial sequence
  SiRNA target sequence
agacaataacccggttatattt

SEQ ID NO: 120159 - DNA, 22 bp, Artificial sequence
  SiRNA target sequence
gacaataacccggttatatttc

SEQ ID NO: 120160 - DNA, 22 bp, Artificial sequence
  SiRNA target sequence
acaataacccggttatatttct

SEQ ID NO: 120161 - DNA, 22 bp, Artificial sequence
  SiRNA target sequence
caataacccggttatatttctt

SEQ ID NO: 120162 - DNA, 22 bp, Artificial sequence
  SiRNA target sequence
aataacccggttatatttcttg

SEQ ID NO: 120163 - DNA, 22 bp, Artificial sequence
  SiRNA target sequence
ataacccggttatatttcttga

SEQ ID NO: 120164 - DNA, 22 bp, Artificial sequence
  SiRNA target sequence
taacccggttatatttcttgag

SEQ ID NO: 120165 - DNA, 22 bp, Artificial sequence
  SiRNA target sequence
aacccggttatatttcttgaga

SEQ ID NO: 120166 - DNA, 22 bp, Artificial sequence
  SiRNA target sequence
acccggttatatttcttgagaa

SEQ ID NO: 120167 - DNA, 22 bp, Artificial sequence
  SiRNA target sequence
cccggttatatttcttgagaat

SEQ ID NO: 120168 - DNA, 22 bp, Artificial sequence
  SiRNA target sequence
ccggttatatttcttgagaatg

SEQ ID NO: 120169 - DNA, 22 bp, Artificial sequence
  SiRNA target sequence
cggttatatttcttgagaatga

SEQ ID NO: 120170 - DNA, 22 bp, Artificial sequence
  SiRNA target sequence
ggttatatttcttgagaatgaa

SEQ ID NO: 120171 - DNA, 22 bp, Artificial sequence
  SiRNA target sequence
gttatatttcttgagaatgaaa

SEQ ID NO: 120172 - DNA, 22 bp, Artificial sequence
  SiRNA target sequence
ttatatttcttgagaatgaaat

SEQ ID NO: 120173 - DNA, 22 bp, Artificial sequence
  SiRNA target sequence
tatatttcttgagaatgaaata

SEQ ID NO: 120174 - DNA, 22 bp, Artificial sequence
  SiRNA target sequence
atatttcttgagaatgaaatat

SEQ ID NO: 120175 - DNA, 22 bp, Artificial sequence
  SiRNA target sequence
tatttcttgagaatgaaatatt

SEQ ID NO: 120176 - DNA, 22 bp, Artificial sequence
  SiRNA target sequence
atttcttgagaatgaaatatta

SEQ ID NO: 120177 - DNA, 22 bp, Artificial sequence
  SiRNA target sequence
tttcttgagaatgaaatattat

SEQ ID NO: 120178 - DNA, 22 bp, Artificial sequence
  SiRNA target sequence
ttcttgagaatgaaatattata

SEQ ID NO: 120179 - DNA, 22 bp, Artificial sequence
  SiRNA target sequence
tcttgagaatgaaatattatat

SEQ ID NO: 120180 - DNA, 22 bp, Artificial sequence
  SiRNA target sequence
cttgagaatgaaatattatata

SEQ ID NO: 120181 - DNA, 22 bp, Artificial sequence
  SiRNA target sequence
ttgagaatgaaatattatataa

SEQ ID NO: 120182 - DNA, 22 bp, Artificial sequence
  SiRNA target sequence
tgagaatgaaatattatataaa

SEQ ID NO: 120183 - DNA, 22 bp, Artificial sequence
  SiRNA target sequence
gagaatgaaatattatataaag

SEQ ID NO: 120184 - DNA, 22 bp, Artificial sequence
  SiRNA target sequence
agaatgaaatattatataaaga

SEQ ID NO: 120185 - DNA, 22 bp, Artificial sequence
  SiRNA target sequence
gaatgaaatattatataaagat

SEQ ID NO: 120186 - DNA, 22 bp, Artificial sequence
  SiRNA target sequence
aatgaaatattatataaagata

SEQ ID NO: 120187 - DNA, 22 bp, Artificial sequence
  SiRNA target sequence
atgaaatattatataaagataa

SEQ ID NO: 120188 - DNA, 22 bp, Artificial sequence
  SiRNA target sequence
tgaaatattatataaagataaa

SEQ ID NO: 120189 - DNA, 22 bp, Artificial sequence
  SiRNA target sequence
gaaatattatataaagataaat

SEQ ID NO: 120190 - DNA, 22 bp, Artificial sequence
  SiRNA target sequence
aaatattatataaagataaata

SEQ ID NO: 120191 - DNA, 22 bp, Artificial sequence
  SiRNA target sequence
aatattatataaagataaatac

SEQ ID NO: 120192 - DNA, 22 bp, Artificial sequence
  SiRNA target sequence
atattatataaagataaatacc

SEQ ID NO: 120193 - DNA, 22 bp, Artificial sequence
  SiRNA target sequence
tattatataaagataaatacct

SEQ ID NO: 120194 - DNA, 22 bp, Artificial sequence
  SiRNA target sequence
attatataaagataaatacctt

SEQ ID NO: 120195 - DNA, 22 bp, Artificial sequence
  SiRNA target sequence
ttatataaagataaataccttg

SEQ ID NO: 120196 - DNA, 22 bp, Artificial sequence
  SiRNA target sequence
tatataaagataaataccttga

SEQ ID NO: 120197 - DNA, 22 bp, Artificial sequence
  SiRNA target sequence
atataaagataaataccttgaa

SEQ ID NO: 120198 - DNA, 22 bp, Artificial sequence
  SiRNA target sequence
tataaagataaataccttgaag

SEQ ID NO: 120199 - DNA, 22 bp, Artificial sequence
  SiRNA target sequence
ataaagataaataccttgaagt

SEQ ID NO: 120200 - DNA, 22 bp, Artificial sequence
  SiRNA target sequence
taaagataaataccttgaagtg

SEQ ID NO: 120201 - DNA, 22 bp, Artificial sequence
  SiRNA target sequence
aaagataaataccttgaagtgt

SEQ ID NO: 120202 - DNA, 22 bp, Artificial sequence
  SiRNA target sequence
aagataaataccttgaagtgtc

SEQ ID NO: 120203 - DNA, 22 bp, Artificial sequence
  SiRNA target sequence
agataaataccttgaagtgtct

SEQ ID NO: 120204 - DNA, 22 bp, Artificial sequence
  SiRNA target sequence
gataaataccttgaagtgtcta

SEQ ID NO: 120205 - DNA, 22 bp, Artificial sequence
  SiRNA target sequence
ataaataccttgaagtgtctaa

SEQ ID NO: 120206 - DNA, 22 bp, Artificial sequence
  SiRNA target sequence
taaataccttgaagtgtctaat

SEQ ID NO: 120207 - DNA, 22 bp, Artificial sequence
  SiRNA target sequence
aaataccttgaagtgtctaata

SEQ ID NO: 120208 - DNA, 22 bp, Artificial sequence
  SiRNA target sequence
aataccttgaagtgtctaataa

SEQ ID NO: 120209 - DNA, 22 bp, Artificial sequence
  SiRNA target sequence
ataccttgaagtgtctaataat

SEQ ID NO: 120210 - DNA, 22 bp, Artificial sequence
  SiRNA target sequence
taccttgaagtgtctaataatt

SEQ ID NO: 120211 - DNA, 22 bp, Artificial sequence
  SiRNA target sequence
accttgaagtgtctaataatta

SEQ ID NO: 120212 - DNA, 22 bp, Artificial sequence
  SiRNA target sequence
ccttgaagtgtctaataattat

SEQ ID NO: 120213 - DNA, 22 bp, Artificial sequence
  SiRNA target sequence
cttgaagtgtctaataattata

SEQ ID NO: 120214 - DNA, 22 bp, Artificial sequence
  SiRNA target sequence
ttgaagtgtctaataattatat

SEQ ID NO: 120215 - DNA, 22 bp, Artificial sequence
  SiRNA target sequence
tgaagtgtctaataattatatt

SEQ ID NO: 120216 - DNA, 22 bp, Artificial sequence
  SiRNA target sequence
gaagtgtctaataattatattc

SEQ ID NO: 120217 - DNA, 22 bp, Artificial sequence
  SiRNA target sequence
aagtgtctaataattatattca

SEQ ID NO: 120218 - DNA, 22 bp, Artificial sequence
  SiRNA target sequence
agtgtctaataattatattcaa

SEQ ID NO: 120219 - DNA, 22 bp, Artificial sequence
  SiRNA target sequence
gtgtctaataattatattcaac

SEQ ID NO: 120220 - DNA, 22 bp, Artificial sequence
  SiRNA target sequence
tgtctaataattatattcaacc

SEQ ID NO: 120221 - DNA, 22 bp, Artificial sequence
  SiRNA target sequence
gtctaataattatattcaacca

SEQ ID NO: 120222 - DNA, 22 bp, Artificial sequence
  SiRNA target sequence
tctaataattatattcaaccac

SEQ ID NO: 120223 - DNA, 22 bp, Artificial sequence
  SiRNA target sequence
ctaataattatattcaaccact

SEQ ID NO: 120224 - DNA, 22 bp, Artificial sequence
  SiRNA target sequence
taataattatattcaaccactt

SEQ ID NO: 120225 - DNA, 22 bp, Artificial sequence
  SiRNA target sequence
aataattatattcaaccacttg

SEQ ID NO: 120226 - DNA, 22 bp, Artificial sequence
  SiRNA target sequence
ataattatattcaaccacttga

SEQ ID NO: 120227 - DNA, 22 bp, Artificial sequence
  SiRNA target sequence
taattatattcaaccacttgac

SEQ ID NO: 120228 - DNA, 22 bp, Artificial sequence
  SiRNA target sequence
aattatattcaaccacttgaca

SEQ ID NO: 120229 - DNA, 22 bp, Artificial sequence
  SiRNA target sequence
attatattcaaccacttgacaa

SEQ ID NO: 120230 - DNA, 22 bp, Artificial sequence
  SiRNA target sequence
ttatattcaaccacttgacaag

SEQ ID NO: 120231 - DNA, 22 bp, Artificial sequence
  SiRNA target sequence
tatattcaaccacttgacaagg

SEQ ID NO: 120232 - DNA, 22 bp, Artificial sequence
  SiRNA target sequence
atattcaaccacttgacaaggc

SEQ ID NO: 120233 - DNA, 22 bp, Artificial sequence
  SiRNA target sequence
tattcaaccacttgacaaggca

SEQ ID NO: 120234 - DNA, 22 bp, Artificial sequence
  SiRNA target sequence
attcaaccacttgacaaggcag

SEQ ID NO: 120235 - DNA, 22 bp, Artificial sequence
  SiRNA target sequence
ttcaaccacttgacaaggcagt

SEQ ID NO: 120236 - DNA, 22 bp, Artificial sequence
  SiRNA target sequence
tcaaccacttgacaaggcagta

SEQ ID NO: 120237 - DNA, 22 bp, Artificial sequence
  SiRNA target sequence
caaccacttgacaaggcagtaa

SEQ ID NO: 120238 - DNA, 22 bp, Artificial sequence
  SiRNA target sequence
aaccacttgacaaggcagtaat

SEQ ID NO: 120239 - DNA, 22 bp, Artificial sequence
  SiRNA target sequence
accacttgacaaggcagtaatt

SEQ ID NO: 120240 - DNA, 22 bp, Artificial sequence
  SiRNA target sequence
ccacttgacaaggcagtaattg

SEQ ID NO: 120241 - DNA, 22 bp, Artificial sequence
  SiRNA target sequence
cacttgacaaggcagtaattga

SEQ ID NO: 120242 - DNA, 22 bp, Artificial sequence
  SiRNA target sequence
acttgacaaggcagtaattgaa

SEQ ID NO: 120243 - DNA, 22 bp, Artificial sequence
  SiRNA target sequence
cttgacaaggcagtaattgaaa

SEQ ID NO: 120244 - DNA, 22 bp, Artificial sequence
  SiRNA target sequence
ttgacaaggcagtaattgaaaa

SEQ ID NO: 120245 - DNA, 22 bp, Artificial sequence
  SiRNA target sequence
tgacaaggcagtaattgaaaaa

SEQ ID NO: 120246 - DNA, 22 bp, Artificial sequence
  SiRNA target sequence
gacaaggcagtaattgaaaaaa

SEQ ID NO: 120247 - DNA, 22 bp, Artificial sequence
  SiRNA target sequence
acaaggcagtaattgaaaaaaa

SEQ ID NO: 120248 - DNA, 22 bp, Artificial sequence
  SiRNA target sequence
caaggcagtaattgaaaaaaat

SEQ ID NO: 120249 - DNA, 22 bp, Artificial sequence
  SiRNA target sequence
aaggcagtaattgaaaaaaatg

SEQ ID NO: 120250 - DNA, 22 bp, Artificial sequence
  SiRNA target sequence
aggcagtaattgaaaaaaatgg

SEQ ID NO: 120251 - DNA, 22 bp, Artificial sequence
  SiRNA target sequence
ggcagtaattgaaaaaaatggt

SEQ ID NO: 120252 - DNA, 22 bp, Artificial sequence
  SiRNA target sequence
gcagtaattgaaaaaaatggtg

SEQ ID NO: 120253 - DNA, 22 bp, Artificial sequence
  SiRNA target sequence
cagtaattgaaaaaaatggtgt

SEQ ID NO: 120254 - DNA, 22 bp, Artificial sequence
  SiRNA target sequence
agtaattgaaaaaaatggtgtt

SEQ ID NO: 120255 - DNA, 22 bp, Artificial sequence
  SiRNA target sequence
gtaattgaaaaaaatggtgttg

SEQ ID NO: 120256 - DNA, 22 bp, Artificial sequence
  SiRNA target sequence
taattgaaaaaaatggtgttga

SEQ ID NO: 120257 - DNA, 22 bp, Artificial sequence
  SiRNA target sequence
aattgaaaaaaatggtgttgac

SEQ ID NO: 120258 - DNA, 22 bp, Artificial sequence
  SiRNA target sequence
attgaaaaaaatggtgttgacg

SEQ ID NO: 120259 - DNA, 22 bp, Artificial sequence
  SiRNA target sequence
ttgaaaaaaatggtgttgacgt

SEQ ID NO: 120260 - DNA, 22 bp, Artificial sequence
  SiRNA target sequence
tgaaaaaaatggtgttgacgtt

SEQ ID NO: 120261 - DNA, 22 bp, Artificial sequence
  SiRNA target sequence
gaaaaaaatggtgttgacgtta

SEQ ID NO: 120262 - DNA, 22 bp, Artificial sequence
  SiRNA target sequence
aaaaaaatggtgttgacgttac

SEQ ID NO: 120263 - DNA, 22 bp, Artificial sequence
  SiRNA target sequence
aaaaaatggtgttgacgttaca

SEQ ID NO: 120264 - DNA, 22 bp, Artificial sequence
  SiRNA target sequence
aaaaatggtgttgacgttacag

SEQ ID NO: 120265 - DNA, 22 bp, Artificial sequence
  SiRNA target sequence
aaaatggtgttgacgttacagt

SEQ ID NO: 120266 - DNA, 22 bp, Artificial sequence
  SiRNA target sequence
aaatggtgttgacgttacagtt

SEQ ID NO: 120267 - DNA, 22 bp, Artificial sequence
  SiRNA target sequence
aatggtgttgacgttacagttt

SEQ ID NO: 120268 - DNA, 22 bp, Artificial sequence
  SiRNA target sequence
atggtgttgacgttacagtttt

SEQ ID NO: 120269 - DNA, 22 bp, Artificial sequence
  SiRNA target sequence
tggtgttgacgttacagtttta

SEQ ID NO: 120270 - DNA, 22 bp, Artificial sequence
  SiRNA target sequence
ggtgttgacgttacagttttag

SEQ ID NO: 120271 - DNA, 22 bp, Artificial sequence
  SiRNA target sequence
gtgttgacgttacagttttagg

SEQ ID NO: 120272 - DNA, 22 bp, Artificial sequence
  SiRNA target sequence
tgttgacgttacagttttagga

SEQ ID NO: 120273 - DNA, 22 bp, Artificial sequence
  SiRNA target sequence
gttgacgttacagttttaggaa

SEQ ID NO: 120274 - DNA, 22 bp, Artificial sequence
  SiRNA target sequence
ttgacgttacagttttaggaat

SEQ ID NO: 120275 - DNA, 22 bp, Artificial sequence
  SiRNA target sequence
tgacgttacagttttaggaata

SEQ ID NO: 120276 - DNA, 22 bp, Artificial sequence
  SiRNA target sequence
gacgttacagttttaggaatat

SEQ ID NO: 120277 - DNA, 22 bp, Artificial sequence
  SiRNA target sequence
acgttacagttttaggaatatc

SEQ ID NO: 120278 - DNA, 22 bp, Artificial sequence
  SiRNA target sequence
cgttacagttttaggaatatca

SEQ ID NO: 120279 - DNA, 22 bp, Artificial sequence
  SiRNA target sequence
gttacagttttaggaatatcaa

SEQ ID NO: 120280 - DNA, 22 bp, Artificial sequence
  SiRNA target sequence
ttacagttttaggaatatcaat

SEQ ID NO: 120281 - DNA, 22 bp, Artificial sequence
  SiRNA target sequence
tacagttttaggaatatcaata

SEQ ID NO: 120282 - DNA, 22 bp, Artificial sequence
  SiRNA target sequence
acagttttaggaatatcaataa

SEQ ID NO: 120283 - DNA, 22 bp, Artificial sequence
  SiRNA target sequence
cagttttaggaatatcaataag

SEQ ID NO: 120284 - DNA, 22 bp, Artificial sequence
  SiRNA target sequence
agttttaggaatatcaataagt

SEQ ID NO: 120285 - DNA, 22 bp, Artificial sequence
  SiRNA target sequence
gttttaggaatatcaataagtc

SEQ ID NO: 120286 - DNA, 22 bp, Artificial sequence
  SiRNA target sequence
ttttaggaatatcaataagtct

SEQ ID NO: 120287 - DNA, 22 bp, Artificial sequence
  SiRNA target sequence
tttaggaatatcaataagtctt

SEQ ID NO: 120288 - DNA, 22 bp, Artificial sequence
  SiRNA target sequence
ttaggaatatcaataagtctta

SEQ ID NO: 120289 - DNA, 22 bp, Artificial sequence
  SiRNA target sequence
taggaatatcaataagtcttaa

SEQ ID NO: 120290 - DNA, 22 bp, Artificial sequence
  SiRNA target sequence
aggaatatcaataagtcttaaa

SEQ ID NO: 120291 - DNA, 22 bp, Artificial sequence
  SiRNA target sequence
ggaatatcaataagtcttaaag

SEQ ID NO: 120292 - DNA, 22 bp, Artificial sequence
  SiRNA target sequence
gaatatcaataagtcttaaaga

SEQ ID NO: 120293 - DNA, 22 bp, Artificial sequence
  SiRNA target sequence
aatatcaataagtcttaaagaa

SEQ ID NO: 120294 - DNA, 22 bp, Artificial sequence
  SiRNA target sequence
atatcaataagtcttaaagaaa

SEQ ID NO: 120295 - DNA, 22 bp, Artificial sequence
  SiRNA target sequence
tatcaataagtcttaaagaaat

SEQ ID NO: 120296 - DNA, 22 bp, Artificial sequence
  SiRNA target sequence
atcaataagtcttaaagaaatt

SEQ ID NO: 120297 - DNA, 22 bp, Artificial sequence
  SiRNA target sequence
tcaataagtcttaaagaaattt

SEQ ID NO: 120298 - DNA, 22 bp, Artificial sequence
  SiRNA target sequence
caataagtcttaaagaaatttt

SEQ ID NO: 120299 - DNA, 22 bp, Artificial sequence
  SiRNA target sequence
aataagtcttaaagaaattttt

SEQ ID NO: 120300 - DNA, 22 bp, Artificial sequence
  SiRNA target sequence
ataagtcttaaagaaattttta

SEQ ID NO: 120301 - DNA, 22 bp, Artificial sequence
  SiRNA target sequence
taagtcttaaagaaatttttaa

SEQ ID NO: 120302 - DNA, 22 bp, Artificial sequence
  SiRNA target sequence
aagtcttaaagaaatttttaaa

SEQ ID NO: 120303 - DNA, 22 bp, Artificial sequence
  SiRNA target sequence
agtcttaaagaaatttttaaag

SEQ ID NO: 120304 - DNA, 22 bp, Artificial sequence
  SiRNA target sequence
gtcttaaagaaatttttaaagc

SEQ ID NO: 120305 - DNA, 22 bp, Artificial sequence
  SiRNA target sequence
tcttaaagaaatttttaaagca

SEQ ID NO: 120306 - DNA, 22 bp, Artificial sequence
  SiRNA target sequence
cttaaagaaatttttaaagcag

SEQ ID NO: 120307 - DNA, 22 bp, Artificial sequence
  SiRNA target sequence
ttaaagaaatttttaaagcaga

SEQ ID NO: 120308 - DNA, 22 bp, Artificial sequence
  SiRNA target sequence
taaagaaatttttaaagcagac

SEQ ID NO: 120309 - DNA, 22 bp, Artificial sequence
  SiRNA target sequence
aaagaaatttttaaagcagaca

SEQ ID NO: 120310 - DNA, 22 bp, Artificial sequence
  SiRNA target sequence
aagaaatttttaaagcagacag

SEQ ID NO: 120311 - DNA, 22 bp, Artificial sequence
  SiRNA target sequence
agaaatttttaaagcagacagt

SEQ ID NO: 120312 - DNA, 22 bp, Artificial sequence
  SiRNA target sequence
gaaatttttaaagcagacagtt

SEQ ID NO: 120313 - DNA, 22 bp, Artificial sequence
  SiRNA target sequence
aaatttttaaagcagacagttt

SEQ ID NO: 120314 - DNA, 22 bp, Artificial sequence
  SiRNA target sequence
aatttttaaagcagacagtttg

SEQ ID NO: 120315 - DNA, 22 bp, Artificial sequence
  SiRNA target sequence
atttttaaagcagacagtttgt

SEQ ID NO: 120316 - DNA, 22 bp, Artificial sequence
  SiRNA target sequence
tttttaaagcagacagtttgtt

SEQ ID NO: 120317 - DNA, 22 bp, Artificial sequence
  SiRNA target sequence
ttttaaagcagacagtttgtta

SEQ ID NO: 120318 - DNA, 22 bp, Artificial sequence
  SiRNA target sequence
tttaaagcagacagtttgttag

SEQ ID NO: 120319 - DNA, 22 bp, Artificial sequence
  SiRNA target sequence
ttaaagcagacagtttgttaga

SEQ ID NO: 120320 - DNA, 22 bp, Artificial sequence
  SiRNA target sequence
taaagcagacagtttgttagag

SEQ ID NO: 120321 - DNA, 22 bp, Artificial sequence
  SiRNA target sequence
aaagcagacagtttgttagaga

SEQ ID NO: 120322 - DNA, 22 bp, Artificial sequence
  SiRNA target sequence
aagcagacagtttgttagagaa

SEQ ID NO: 120323 - DNA, 22 bp, Artificial sequence
  SiRNA target sequence
agcagacagtttgttagagaaa

SEQ ID NO: 120324 - DNA, 22 bp, Artificial sequence
  SiRNA target sequence
gcagacagtttgttagagaaaa

SEQ ID NO: 120325 - DNA, 22 bp, Artificial sequence
  SiRNA target sequence
cagacagtttgttagagaaaaa

SEQ ID NO: 120326 - DNA, 22 bp, Artificial sequence
  SiRNA target sequence
agacagtttgttagagaaaaaa

SEQ ID NO: 120327 - DNA, 22 bp, Artificial sequence
  SiRNA target sequence
gacagtttgttagagaaaaaaa

SEQ ID NO: 120328 - DNA, 22 bp, Artificial sequence
  SiRNA target sequence
acagtttgttagagaaaaaaaa

SEQ ID NO: 120329 - DNA, 22 bp, Artificial sequence
  SiRNA target sequence
cagtttgttagagaaaaaaaat

SEQ ID NO: 120330 - DNA, 22 bp, Artificial sequence
  SiRNA target sequence
agtttgttagagaaaaaaaata

SEQ ID NO: 120331 - DNA, 22 bp, Artificial sequence
  SiRNA target sequence
gtttgttagagaaaaaaaatat

SEQ ID NO: 120332 - DNA, 22 bp, Artificial sequence
  SiRNA target sequence
tttgttagagaaaaaaaatatc

SEQ ID NO: 120333 - DNA, 22 bp, Artificial sequence
  SiRNA target sequence
ttgttagagaaaaaaaatatcg

SEQ ID NO: 120334 - DNA, 22 bp, Artificial sequence
  SiRNA target sequence
tgttagagaaaaaaaatatcga

SEQ ID NO: 120335 - DNA, 22 bp, Artificial sequence
  SiRNA target sequence
gttagagaaaaaaaatatcgac

SEQ ID NO: 120336 - DNA, 22 bp, Artificial sequence
  SiRNA target sequence
ttagagaaaaaaaatatcgaca

SEQ ID NO: 120337 - DNA, 22 bp, Artificial sequence
  SiRNA target sequence
tagagaaaaaaaatatcgacat

SEQ ID NO: 120338 - DNA, 22 bp, Artificial sequence
  SiRNA target sequence
agagaaaaaaaatatcgacatt

SEQ ID NO: 120339 - DNA, 22 bp, Artificial sequence
  SiRNA target sequence
gagaaaaaaaatatcgacattg

SEQ ID NO: 120340 - DNA, 22 bp, Artificial sequence
  SiRNA target sequence
agaaaaaaaatatcgacattga

SEQ ID NO: 120341 - DNA, 22 bp, Artificial sequence
  SiRNA target sequence
gaaaaaaaatatcgacattgag

SEQ ID NO: 120342 - DNA, 22 bp, Artificial sequence
  SiRNA target sequence
aaaaaaaatatcgacattgaga

SEQ ID NO: 120343 - DNA, 22 bp, Artificial sequence
  SiRNA target sequence
aaaaaaatatcgacattgagat

SEQ ID NO: 120344 - DNA, 22 bp, Artificial sequence
  SiRNA target sequence
aaaaaatatcgacattgagata

SEQ ID NO: 120345 - DNA, 22 bp, Artificial sequence
  SiRNA target sequence
aaaaatatcgacattgagataa

SEQ ID NO: 120346 - DNA, 22 bp, Artificial sequence
  SiRNA target sequence
aaaatatcgacattgagataat

SEQ ID NO: 120347 - DNA, 22 bp, Artificial sequence
  SiRNA target sequence
aaatatcgacattgagataatt

SEQ ID NO: 120348 - DNA, 22 bp, Artificial sequence
  SiRNA target sequence
aatatcgacattgagataatta

SEQ ID NO: 120349 - DNA, 22 bp, Artificial sequence
  SiRNA target sequence
atatcgacattgagataattaa

SEQ ID NO: 120350 - DNA, 22 bp, Artificial sequence
  SiRNA target sequence
tatcgacattgagataattaat

SEQ ID NO: 120351 - DNA, 22 bp, Artificial sequence
  SiRNA target sequence
atcgacattgagataattaatc

SEQ ID NO: 120352 - DNA, 22 bp, Artificial sequence
  SiRNA target sequence
tcgacattgagataattaatct

SEQ ID NO: 120353 - DNA, 22 bp, Artificial sequence
  SiRNA target sequence
cgacattgagataattaatctt

SEQ ID NO: 120354 - DNA, 22 bp, Artificial sequence
  SiRNA target sequence
gacattgagataattaatcttg

SEQ ID NO: 120355 - DNA, 22 bp, Artificial sequence
  SiRNA target sequence
acattgagataattaatcttgt

SEQ ID NO: 120356 - DNA, 22 bp, Artificial sequence
  SiRNA target sequence
cattgagataattaatcttgtg

SEQ ID NO: 120357 - DNA, 22 bp, Artificial sequence
  SiRNA target sequence
attgagataattaatcttgtgt

SEQ ID NO: 120358 - DNA, 22 bp, Artificial sequence
  SiRNA target sequence
ttgagataattaatcttgtgtc

SEQ ID NO: 120359 - DNA, 22 bp, Artificial sequence
  SiRNA target sequence
tgagataattaatcttgtgtca

SEQ ID NO: 120360 - DNA, 22 bp, Artificial sequence
  SiRNA target sequence
gagataattaatcttgtgtcaa

SEQ ID NO: 120361 - DNA, 22 bp, Artificial sequence
  SiRNA target sequence
agataattaatcttgtgtcaat

SEQ ID NO: 120362 - DNA, 22 bp, Artificial sequence
  SiRNA target sequence
gataattaatcttgtgtcaata

SEQ ID NO: 120363 - DNA, 22 bp, Artificial sequence
  SiRNA target sequence
ataattaatcttgtgtcaataa

SEQ ID NO: 120364 - DNA, 22 bp, Artificial sequence
  SiRNA target sequence
taattaatcttgtgtcaataaa

SEQ ID NO: 120365 - DNA, 22 bp, Artificial sequence
  SiRNA target sequence
aattaatcttgtgtcaataaaa

SEQ ID NO: 120366 - DNA, 22 bp, Artificial sequence
  SiRNA target sequence
attaatcttgtgtcaataaaac

SEQ ID NO: 120367 - DNA, 22 bp, Artificial sequence
  SiRNA target sequence
ttaatcttgtgtcaataaaacc

SEQ ID NO: 120368 - DNA, 22 bp, Artificial sequence
  SiRNA target sequence
taatcttgtgtcaataaaacca

SEQ ID NO: 120369 - DNA, 22 bp, Artificial sequence
  SiRNA target sequence
aatcttgtgtcaataaaaccaa

SEQ ID NO: 120370 - DNA, 22 bp, Artificial sequence
  SiRNA target sequence
atcttgtgtcaataaaaccaat

SEQ ID NO: 120371 - DNA, 22 bp, Artificial sequence
  SiRNA target sequence
tcttgtgtcaataaaaccaatt

SEQ ID NO: 120372 - DNA, 22 bp, Artificial sequence
  SiRNA target sequence
cttgtgtcaataaaaccaattg

SEQ ID NO: 120373 - DNA, 22 bp, Artificial sequence
  SiRNA target sequence
ttgtgtcaataaaaccaattga

SEQ ID NO: 120374 - DNA, 22 bp, Artificial sequence
  SiRNA target sequence
tgtgtcaataaaaccaattgat

SEQ ID NO: 120375 - DNA, 22 bp, Artificial sequence
  SiRNA target sequence
gtgtcaataaaaccaattgatt

SEQ ID NO: 120376 - DNA, 22 bp, Artificial sequence
  SiRNA target sequence
tgtcaataaaaccaattgatta

SEQ ID NO: 120377 - DNA, 22 bp, Artificial sequence
  SiRNA target sequence
gtcaataaaaccaattgattat

SEQ ID NO: 120378 - DNA, 22 bp, Artificial sequence
  SiRNA target sequence
tcaataaaaccaattgattatg

SEQ ID NO: 120379 - DNA, 22 bp, Artificial sequence
  SiRNA target sequence
caataaaaccaattgattatgt

SEQ ID NO: 120380 - DNA, 22 bp, Artificial sequence
  SiRNA target sequence
aataaaaccaattgattatgtt

SEQ ID NO: 120381 - DNA, 22 bp, Artificial sequence
  SiRNA target sequence
ataaaaccaattgattatgtta

SEQ ID NO: 120382 - DNA, 22 bp, Artificial sequence
  SiRNA target sequence
taaaaccaattgattatgttac

SEQ ID NO: 120383 - DNA, 22 bp, Artificial sequence
  SiRNA target sequence
aaaaccaattgattatgttact

SEQ ID NO: 120384 - DNA, 22 bp, Artificial sequence
  SiRNA target sequence
aaaccaattgattatgttacta

SEQ ID NO: 120385 - DNA, 22 bp, Artificial sequence
  SiRNA target sequence
aaccaattgattatgttactat

SEQ ID NO: 120386 - DNA, 22 bp, Artificial sequence
  SiRNA target sequence
accaattgattatgttactatt

SEQ ID NO: 120387 - DNA, 22 bp, Artificial sequence
  SiRNA target sequence
ccaattgattatgttactattg

SEQ ID NO: 120388 - DNA, 22 bp, Artificial sequence
  SiRNA target sequence
caattgattatgttactattga

SEQ ID NO: 120389 - DNA, 22 bp, Artificial sequence
  SiRNA target sequence
aattgattatgttactattgaa

SEQ ID NO: 120390 - DNA, 22 bp, Artificial sequence
  SiRNA target sequence
attgattatgttactattgaaa

SEQ ID NO: 120391 - DNA, 22 bp, Artificial sequence
  SiRNA target sequence
ttgattatgttactattgaaat

SEQ ID NO: 120392 - DNA, 22 bp, Artificial sequence
  SiRNA target sequence
tgattatgttactattgaaata

SEQ ID NO: 120393 - DNA, 22 bp, Artificial sequence
  SiRNA target sequence
gattatgttactattgaaatat

SEQ ID NO: 120394 - DNA, 22 bp, Artificial sequence
  SiRNA target sequence
attatgttactattgaaatatc

SEQ ID NO: 120395 - DNA, 22 bp, Artificial sequence
  SiRNA target sequence
ttatgttactattgaaatatca

SEQ ID NO: 120396 - DNA, 22 bp, Artificial sequence
  SiRNA target sequence
tatgttactattgaaatatcag

SEQ ID NO: 120397 - DNA, 22 bp, Artificial sequence
  SiRNA target sequence
atgttactattgaaatatcagt

SEQ ID NO: 120398 - DNA, 22 bp, Artificial sequence
  SiRNA target sequence
tgttactattgaaatatcagtc

SEQ ID NO: 120399 - DNA, 22 bp, Artificial sequence
  SiRNA target sequence
gttactattgaaatatcagtca

SEQ ID NO: 120400 - DNA, 22 bp, Artificial sequence
  SiRNA target sequence
ttactattgaaatatcagtcaa

SEQ ID NO: 120401 - DNA, 22 bp, Artificial sequence
  SiRNA target sequence
tactattgaaatatcagtcaaa

SEQ ID NO: 120402 - DNA, 22 bp, Artificial sequence
  SiRNA target sequence
actattgaaatatcagtcaaaa

SEQ ID NO: 120403 - DNA, 22 bp, Artificial sequence
  SiRNA target sequence
ctattgaaatatcagtcaaaaa

SEQ ID NO: 120404 - DNA, 22 bp, Artificial sequence
  SiRNA target sequence
tattgaaatatcagtcaaaaaa

SEQ ID NO: 120405 - DNA, 22 bp, Artificial sequence
  SiRNA target sequence
attgaaatatcagtcaaaaaaa

SEQ ID NO: 120406 - DNA, 22 bp, Artificial sequence
  SiRNA target sequence
ttgaaatatcagtcaaaaaaac

SEQ ID NO: 120407 - DNA, 22 bp, Artificial sequence
  SiRNA target sequence
tgaaatatcagtcaaaaaaaca

SEQ ID NO: 120408 - DNA, 22 bp, Artificial sequence
  SiRNA target sequence
gaaatatcagtcaaaaaaacac

SEQ ID NO: 120409 - DNA, 22 bp, Artificial sequence
  SiRNA target sequence
aaatatcagtcaaaaaaacaca

SEQ ID NO: 120410 - DNA, 22 bp, Artificial sequence
  SiRNA target sequence
aatatcagtcaaaaaaacacaa

SEQ ID NO: 120411 - DNA, 22 bp, Artificial sequence
  SiRNA target sequence
atatcagtcaaaaaaacacaaa

SEQ ID NO: 120412 - DNA, 22 bp, Artificial sequence
  SiRNA target sequence
tatcagtcaaaaaaacacaaaa

SEQ ID NO: 120413 - DNA, 22 bp, Artificial sequence
  SiRNA target sequence
atcagtcaaaaaaacacaaaag

SEQ ID NO: 120414 - DNA, 22 bp, Artificial sequence
  SiRNA target sequence
tcagtcaaaaaaacacaaaagt

SEQ ID NO: 120415 - DNA, 22 bp, Artificial sequence
  SiRNA target sequence
cagtcaaaaaaacacaaaagtt

SEQ ID NO: 120416 - DNA, 22 bp, Artificial sequence
  SiRNA target sequence
agtcaaaaaaacacaaaagtta

SEQ ID NO: 120417 - DNA, 22 bp, Artificial sequence
  SiRNA target sequence
gtcaaaaaaacacaaaagttag

SEQ ID NO: 120418 - DNA, 22 bp, Artificial sequence
  SiRNA target sequence
tcaaaaaaacacaaaagttagt

SEQ ID NO: 120419 - DNA, 22 bp, Artificial sequence
  SiRNA target sequence
caaaaaaacacaaaagttagtg

SEQ ID NO: 120420 - DNA, 22 bp, Artificial sequence
  SiRNA target sequence
aaaaaaacacaaaagttagtga

SEQ ID NO: 120421 - DNA, 22 bp, Artificial sequence
  SiRNA target sequence
aaaaaacacaaaagttagtgat

SEQ ID NO: 120422 - DNA, 22 bp, Artificial sequence
  SiRNA target sequence
aaaaacacaaaagttagtgata

SEQ ID NO: 120423 - DNA, 22 bp, Artificial sequence
  SiRNA target sequence
aaaacacaaaagttagtgatag

SEQ ID NO: 120424 - DNA, 22 bp, Artificial sequence
  SiRNA target sequence
aaacacaaaagttagtgatagt

SEQ ID NO: 120425 - DNA, 22 bp, Artificial sequence
  SiRNA target sequence
aacacaaaagttagtgatagtt

SEQ ID NO: 120426 - DNA, 22 bp, Artificial sequence
  SiRNA target sequence
acacaaaagttagtgatagttg

SEQ ID NO: 120427 - DNA, 22 bp, Artificial sequence
  SiRNA target sequence
cacaaaagttagtgatagttga

SEQ ID NO: 120428 - DNA, 22 bp, Artificial sequence
  SiRNA target sequence
acaaaagttagtgatagttgat

SEQ ID NO: 120429 - DNA, 22 bp, Artificial sequence
  SiRNA target sequence
caaaagttagtgatagttgatt

SEQ ID NO: 120430 - DNA, 22 bp, Artificial sequence
  SiRNA target sequence
aaaagttagtgatagttgattt

SEQ ID NO: 120431 - DNA, 22 bp, Artificial sequence
  SiRNA target sequence
aaagttagtgatagttgatttt

SEQ ID NO: 120432 - DNA, 22 bp, Artificial sequence
  SiRNA target sequence
aagttagtgatagttgattttg

SEQ ID NO: 120433 - DNA, 22 bp, Artificial sequence
  SiRNA target sequence
agttagtgatagttgattttgc

SEQ ID NO: 120434 - DNA, 22 bp, Artificial sequence
  SiRNA target sequence
gttagtgatagttgattttgca

SEQ ID NO: 120435 - DNA, 22 bp, Artificial sequence
  SiRNA target sequence
ttagtgatagttgattttgcat

SEQ ID NO: 120436 - DNA, 22 bp, Artificial sequence
  SiRNA target sequence
tagtgatagttgattttgcata

SEQ ID NO: 120437 - DNA, 22 bp, Artificial sequence
  SiRNA target sequence
agtgatagttgattttgcatat

SEQ ID NO: 120438 - DNA, 22 bp, Artificial sequence
  SiRNA target sequence
gtgatagttgattttgcatatc

SEQ ID NO: 120439 - DNA, 22 bp, Artificial sequence
  SiRNA target sequence
tgatagttgattttgcatatcc

SEQ ID NO: 120440 - DNA, 22 bp, Artificial sequence
  SiRNA target sequence
gatagttgattttgcatatcct

SEQ ID NO: 120441 - DNA, 22 bp, Artificial sequence
  SiRNA target sequence
atagttgattttgcatatccta

SEQ ID NO: 120442 - DNA, 22 bp, Artificial sequence
  SiRNA target sequence
tagttgattttgcatatcctac

SEQ ID NO: 120443 - DNA, 22 bp, Artificial sequence
  SiRNA target sequence
agttgattttgcatatcctact

SEQ ID NO: 120444 - DNA, 22 bp, Artificial sequence
  SiRNA target sequence
gttgattttgcatatcctactt

SEQ ID NO: 120445 - DNA, 22 bp, Artificial sequence
  SiRNA target sequence
ttgattttgcatatcctacttt

SEQ ID NO: 120446 - DNA, 22 bp, Artificial sequence
  SiRNA target sequence
tgattttgcatatcctactttc

SEQ ID NO: 120447 - DNA, 22 bp, Artificial sequence
  SiRNA target sequence
gattttgcatatcctactttca

SEQ ID NO: 120448 - DNA, 22 bp, Artificial sequence
  SiRNA target sequence
attttgcatatcctactttcaa

SEQ ID NO: 120449 - DNA, 22 bp, Artificial sequence
  SiRNA target sequence
ttttgcatatcctactttcaat

SEQ ID NO: 120450 - DNA, 22 bp, Artificial sequence
  SiRNA target sequence
tttgcatatcctactttcaata

SEQ ID NO: 120451 - DNA, 22 bp, Artificial sequence
  SiRNA target sequence
ttgcatatcctactttcaatat

SEQ ID NO: 120452 - DNA, 22 bp, Artificial sequence
  SiRNA target sequence
tgcatatcctactttcaatatt

SEQ ID NO: 120453 - DNA, 22 bp, Artificial sequence
  SiRNA target sequence
gcatatcctactttcaatattg

SEQ ID NO: 120454 - DNA, 22 bp, Artificial sequence
  SiRNA target sequence
catatcctactttcaatattgc

SEQ ID NO: 120455 - DNA, 22 bp, Artificial sequence
  SiRNA target sequence
atatcctactttcaatattgcg

SEQ ID NO: 120456 - DNA, 22 bp, Artificial sequence
  SiRNA target sequence
tatcctactttcaatattgcga

SEQ ID NO: 120457 - DNA, 22 bp, Artificial sequence
  SiRNA target sequence
atcctactttcaatattgcgag

SEQ ID NO: 120458 - DNA, 22 bp, Artificial sequence
  SiRNA target sequence
tcctactttcaatattgcgagt

SEQ ID NO: 120459 - DNA, 22 bp, Artificial sequence
  SiRNA target sequence
cctactttcaatattgcgagtg

SEQ ID NO: 120460 - DNA, 22 bp, Artificial sequence
  SiRNA target sequence
ctactttcaatattgcgagtga

SEQ ID NO: 120461 - DNA, 22 bp, Artificial sequence
  SiRNA target sequence
tactttcaatattgcgagtgaa

SEQ ID NO: 120462 - DNA, 22 bp, Artificial sequence
  SiRNA target sequence
actttcaatattgcgagtgaaa

SEQ ID NO: 120463 - DNA, 22 bp, Artificial sequence
  SiRNA target sequence
ctttcaatattgcgagtgaaat

SEQ ID NO: 120464 - DNA, 22 bp, Artificial sequence
  SiRNA target sequence
tttcaatattgcgagtgaaata

SEQ ID NO: 120465 - DNA, 22 bp, Artificial sequence
  SiRNA target sequence
ttcaatattgcgagtgaaatag

SEQ ID NO: 120466 - DNA, 22 bp, Artificial sequence
  SiRNA target sequence
tcaatattgcgagtgaaatagc

SEQ ID NO: 120467 - DNA, 22 bp, Artificial sequence
  SiRNA target sequence
caatattgcgagtgaaatagct

SEQ ID NO: 120468 - DNA, 22 bp, Artificial sequence
  SiRNA target sequence
aatattgcgagtgaaatagctg

SEQ ID NO: 120469 - DNA, 22 bp, Artificial sequence
  SiRNA target sequence
atattgcgagtgaaatagctgc

SEQ ID NO: 120470 - DNA, 22 bp, Artificial sequence
  SiRNA target sequence
tattgcgagtgaaatagctgcg

SEQ ID NO: 120471 - DNA, 22 bp, Artificial sequence
  SiRNA target sequence
attgcgagtgaaatagctgcgc

SEQ ID NO: 120472 - DNA, 22 bp, Artificial sequence
  SiRNA target sequence
ttgcgagtgaaatagctgcgca

SEQ ID NO: 120473 - DNA, 22 bp, Artificial sequence
  SiRNA target sequence
tgcgagtgaaatagctgcgcac

SEQ ID NO: 120474 - DNA, 22 bp, Artificial sequence
  SiRNA target sequence
gcgagtgaaatagctgcgcact

SEQ ID NO: 120475 - DNA, 22 bp, Artificial sequence
  SiRNA target sequence
cgagtgaaatagctgcgcactt

SEQ ID NO: 120476 - DNA, 22 bp, Artificial sequence
  SiRNA target sequence
gagtgaaatagctgcgcacttt

SEQ ID NO: 120477 - DNA, 22 bp, Artificial sequence
  SiRNA target sequence
agtgaaatagctgcgcactttt

SEQ ID NO: 120478 - DNA, 22 bp, Artificial sequence
  SiRNA target sequence
gtgaaatagctgcgcactttta

SEQ ID NO: 120479 - DNA, 22 bp, Artificial sequence
  SiRNA target sequence
tgaaatagctgcgcacttttac

SEQ ID NO: 120480 - DNA, 22 bp, Artificial sequence
  SiRNA target sequence
gaaatagctgcgcacttttacg

SEQ ID NO: 120481 - DNA, 22 bp, Artificial sequence
  SiRNA target sequence
aaatagctgcgcacttttacga

SEQ ID NO: 120482 - DNA, 22 bp, Artificial sequence
  SiRNA target sequence
aatagctgcgcacttttacgaa

SEQ ID NO: 120483 - DNA, 22 bp, Artificial sequence
  SiRNA target sequence
atagctgcgcacttttacgaaa

SEQ ID NO: 120484 - DNA, 22 bp, Artificial sequence
  SiRNA target sequence
tagctgcgcacttttacgaaaa

SEQ ID NO: 120485 - DNA, 22 bp, Artificial sequence
  SiRNA target sequence
agctgcgcacttttacgaaaaa

SEQ ID NO: 120486 - DNA, 22 bp, Artificial sequence
  SiRNA target sequence
gctgcgcacttttacgaaaaat

SEQ ID NO: 120487 - DNA, 22 bp, Artificial sequence
  SiRNA target sequence
ctgcgcacttttacgaaaaatt

SEQ ID NO: 120488 - DNA, 22 bp, Artificial sequence
  SiRNA target sequence
tgcgcacttttacgaaaaattt

SEQ ID NO: 120489 - DNA, 22 bp, Artificial sequence
  SiRNA target sequence
gcgcacttttacgaaaaattta

SEQ ID NO: 120490 - DNA, 22 bp, Artificial sequence
  SiRNA target sequence
cgcacttttacgaaaaatttaa

SEQ ID NO: 120491 - DNA, 22 bp, Artificial sequence
  SiRNA target sequence
gcacttttacgaaaaatttaaa

SEQ ID NO: 120492 - DNA, 22 bp, Artificial sequence
  SiRNA target sequence
cacttttacgaaaaatttaaag

SEQ ID NO: 120493 - DNA, 22 bp, Artificial sequence
  SiRNA target sequence
acttttacgaaaaatttaaaga

SEQ ID NO: 120494 - DNA, 22 bp, Artificial sequence
  SiRNA target sequence
cttttacgaaaaatttaaagat

SEQ ID NO: 120495 - DNA, 22 bp, Artificial sequence
  SiRNA target sequence
ttttacgaaaaatttaaagata

SEQ ID NO: 120496 - DNA, 22 bp, Artificial sequence
  SiRNA target sequence
tttacgaaaaatttaaagatat

SEQ ID NO: 120497 - DNA, 22 bp, Artificial sequence
  SiRNA target sequence
ttacgaaaaatttaaagatata

SEQ ID NO: 120498 - DNA, 22 bp, Artificial sequence
  SiRNA target sequence
tacgaaaaatttaaagatataa

SEQ ID NO: 120499 - DNA, 22 bp, Artificial sequence
  SiRNA target sequence
acgaaaaatttaaagatataaa

SEQ ID NO: 120500 - DNA, 22 bp, Artificial sequence
  SiRNA target sequence
cgaaaaatttaaagatataaaa

SEQ ID NO: 120501 - DNA, 22 bp, Artificial sequence
  SiRNA target sequence
gaaaaatttaaagatataaaaa

SEQ ID NO: 120502 - DNA, 22 bp, Artificial sequence
  SiRNA target sequence
aaaaatttaaagatataaaaat

SEQ ID NO: 120503 - DNA, 22 bp, Artificial sequence
  SiRNA target sequence
aaaatttaaagatataaaaatt

SEQ ID NO: 120504 - DNA, 22 bp, Artificial sequence
  SiRNA target sequence
aaatttaaagatataaaaatta

SEQ ID NO: 120505 - DNA, 22 bp, Artificial sequence
  SiRNA target sequence
aatttaaagatataaaaattat

SEQ ID NO: 120506 - DNA, 22 bp, Artificial sequence
  SiRNA target sequence
atttaaagatataaaaattatg

SEQ ID NO: 120507 - DNA, 22 bp, Artificial sequence
  SiRNA target sequence
tttaaagatataaaaattatgc

SEQ ID NO: 120508 - DNA, 22 bp, Artificial sequence
  SiRNA target sequence
ttaaagatataaaaattatgcg

SEQ ID NO: 120509 - DNA, 22 bp, Artificial sequence
  SiRNA target sequence
taaagatataaaaattatgcgt

SEQ ID NO: 120510 - DNA, 22 bp, Artificial sequence
  SiRNA target sequence
aaagatataaaaattatgcgtg

SEQ ID NO: 120511 - DNA, 22 bp, Artificial sequence
  SiRNA target sequence
aagatataaaaattatgcgtgt

SEQ ID NO: 120512 - DNA, 22 bp, Artificial sequence
  SiRNA target sequence
agatataaaaattatgcgtgtt

SEQ ID NO: 120513 - DNA, 22 bp, Artificial sequence
  SiRNA target sequence
gatataaaaattatgcgtgttc

SEQ ID NO: 120514 - DNA, 22 bp, Artificial sequence
  SiRNA target sequence
atataaaaattatgcgtgttct

SEQ ID NO: 120515 - DNA, 22 bp, Artificial sequence
  SiRNA target sequence
tataaaaattatgcgtgttctt

SEQ ID NO: 120516 - DNA, 22 bp, Artificial sequence
  SiRNA target sequence
ataaaaattatgcgtgttcttg

SEQ ID NO: 120517 - DNA, 22 bp, Artificial sequence
  SiRNA target sequence
taaaaattatgcgtgttcttgc

SEQ ID NO: 120518 - DNA, 22 bp, Artificial sequence
  SiRNA target sequence
aaaaattatgcgtgttcttgcg

SEQ ID NO: 120519 - DNA, 22 bp, Artificial sequence
  SiRNA target sequence
aaaattatgcgtgttcttgcgc

SEQ ID NO: 120520 - DNA, 22 bp, Artificial sequence
  SiRNA target sequence
aaattatgcgtgttcttgcgca

SEQ ID NO: 120521 - DNA, 22 bp, Artificial sequence
  SiRNA target sequence
aattatgcgtgttcttgcgcaa

SEQ ID NO: 120522 - DNA, 22 bp, Artificial sequence
  SiRNA target sequence
attatgcgtgttcttgcgcaag

SEQ ID NO: 120523 - DNA, 22 bp, Artificial sequence
  SiRNA target sequence
ttatgcgtgttcttgcgcaaga

SEQ ID NO: 120524 - DNA, 22 bp, Artificial sequence
  SiRNA target sequence
tatgcgtgttcttgcgcaagat

SEQ ID NO: 120525 - DNA, 22 bp, Artificial sequence
  SiRNA target sequence
atgcgtgttcttgcgcaagata

SEQ ID NO: 120526 - DNA, 22 bp, Artificial sequence
  SiRNA target sequence
tgcgtgttcttgcgcaagatat

SEQ ID NO: 120527 - DNA, 22 bp, Artificial sequence
  SiRNA target sequence
gcgtgttcttgcgcaagatatt

SEQ ID NO: 120528 - DNA, 22 bp, Artificial sequence
  SiRNA target sequence
cgtgttcttgcgcaagatattc

SEQ ID NO: 120529 - DNA, 22 bp, Artificial sequence
  SiRNA target sequence
gtgttcttgcgcaagatattcc

SEQ ID NO: 120530 - DNA, 22 bp, Artificial sequence
  SiRNA target sequence
tgttcttgcgcaagatattcct

SEQ ID NO: 120531 - DNA, 22 bp, Artificial sequence
  SiRNA target sequence
gttcttgcgcaagatattccta

SEQ ID NO: 120532 - DNA, 22 bp, Artificial sequence
  SiRNA target sequence
ttcttgcgcaagatattcctac

SEQ ID NO: 120533 - DNA, 22 bp, Artificial sequence
  SiRNA target sequence
tcttgcgcaagatattcctaca

SEQ ID NO: 120534 - DNA, 22 bp, Artificial sequence
  SiRNA target sequence
cttgcgcaagatattcctacac

SEQ ID NO: 120535 - DNA, 22 bp, Artificial sequence
  SiRNA target sequence
ttgcgcaagatattcctacacc

SEQ ID NO: 120536 - DNA, 22 bp, Artificial sequence
  SiRNA target sequence
tgcgcaagatattcctacaccg

SEQ ID NO: 120537 - DNA, 22 bp, Artificial sequence
  SiRNA target sequence
gcgcaagatattcctacaccgt

SEQ ID NO: 120538 - DNA, 22 bp, Artificial sequence
  SiRNA target sequence
cgcaagatattcctacaccgta

SEQ ID NO: 120539 - DNA, 22 bp, Artificial sequence
  SiRNA target sequence
gcaagatattcctacaccgtat

SEQ ID NO: 120540 - DNA, 22 bp, Artificial sequence
  SiRNA target sequence
caagatattcctacaccgtatg

SEQ ID NO: 120541 - DNA, 22 bp, Artificial sequence
  SiRNA target sequence
aagatattcctacaccgtatgc

SEQ ID NO: 120542 - DNA, 22 bp, Artificial sequence
  SiRNA target sequence
agatattcctacaccgtatgca

SEQ ID NO: 120543 - DNA, 22 bp, Artificial sequence
  SiRNA target sequence
gatattcctacaccgtatgcac

SEQ ID NO: 120544 - DNA, 22 bp, Artificial sequence
  SiRNA target sequence
atattcctacaccgtatgcact

SEQ ID NO: 120545 - DNA, 22 bp, Artificial sequence
  SiRNA target sequence
tattcctacaccgtatgcactt

SEQ ID NO: 120546 - DNA, 22 bp, Artificial sequence
  SiRNA target sequence
attcctacaccgtatgcactta

SEQ ID NO: 120547 - DNA, 22 bp, Artificial sequence
  SiRNA target sequence
ttcctacaccgtatgcacttaa

SEQ ID NO: 120548 - DNA, 22 bp, Artificial sequence
  SiRNA target sequence
tcctacaccgtatgcacttaat

SEQ ID NO: 120549 - DNA, 22 bp, Artificial sequence
  SiRNA target sequence
cctacaccgtatgcacttaatc

SEQ ID NO: 120550 - DNA, 22 bp, Artificial sequence
  SiRNA target sequence
ctacaccgtatgcacttaatct

SEQ ID NO: 120551 - DNA, 22 bp, Artificial sequence
  SiRNA target sequence
tacaccgtatgcacttaatctt

SEQ ID NO: 120552 - DNA, 22 bp, Artificial sequence
  SiRNA target sequence
acaccgtatgcacttaatcttg

SEQ ID NO: 120553 - DNA, 22 bp, Artificial sequence
  SiRNA target sequence
caccgtatgcacttaatcttga

SEQ ID NO: 120554 - DNA, 22 bp, Artificial sequence
  SiRNA target sequence
accgtatgcacttaatcttgaa

SEQ ID NO: 120555 - DNA, 22 bp, Artificial sequence
  SiRNA target sequence
ccgtatgcacttaatcttgaaa

SEQ ID NO: 120556 - DNA, 22 bp, Artificial sequence
  SiRNA target sequence
cgtatgcacttaatcttgaaaa

SEQ ID NO: 120557 - DNA, 22 bp, Artificial sequence
  SiRNA target sequence
gtatgcacttaatcttgaaaaa

SEQ ID NO: 120558 - DNA, 22 bp, Artificial sequence
  SiRNA target sequence
tatgcacttaatcttgaaaaaa

SEQ ID NO: 120559 - DNA, 22 bp, Artificial sequence
  SiRNA target sequence
atgcacttaatcttgaaaaaat

SEQ ID NO: 120560 - DNA, 22 bp, Artificial sequence
  SiRNA target sequence
tgcacttaatcttgaaaaaatg

SEQ ID NO: 120561 - DNA, 22 bp, Artificial sequence
  SiRNA target sequence
gcacttaatcttgaaaaaatgt

SEQ ID NO: 120562 - DNA, 22 bp, Artificial sequence
  SiRNA target sequence
cacttaatcttgaaaaaatgtc

SEQ ID NO: 120563 - DNA, 22 bp, Artificial sequence
  SiRNA target sequence
acttaatcttgaaaaaatgtct

SEQ ID NO: 120564 - DNA, 22 bp, Artificial sequence
  SiRNA target sequence
cttaatcttgaaaaaatgtctt

SEQ ID NO: 120565 - DNA, 22 bp, Artificial sequence
  SiRNA target sequence
ttaatcttgaaaaaatgtctta

SEQ ID NO: 120566 - DNA, 22 bp, Artificial sequence
  SiRNA target sequence
taatcttgaaaaaatgtcttat

SEQ ID NO: 120567 - DNA, 22 bp, Artificial sequence
  SiRNA target sequence
aatcttgaaaaaatgtcttatc

SEQ ID NO: 120568 - DNA, 22 bp, Artificial sequence
  SiRNA target sequence
atcttgaaaaaatgtcttatcc

SEQ ID NO: 120569 - DNA, 22 bp, Artificial sequence
  SiRNA target sequence
tcttgaaaaaatgtcttatccg

SEQ ID NO: 120570 - DNA, 22 bp, Artificial sequence
  SiRNA target sequence
cttgaaaaaatgtcttatccga

SEQ ID NO: 120571 - DNA, 22 bp, Artificial sequence
  SiRNA target sequence
ttgaaaaaatgtcttatccgac

SEQ ID NO: 120572 - DNA, 22 bp, Artificial sequence
  SiRNA target sequence
tgaaaaaatgtcttatccgaca

SEQ ID NO: 120573 - DNA, 22 bp, Artificial sequence
  SiRNA target sequence
gaaaaaatgtcttatccgacat

SEQ ID NO: 120574 - DNA, 22 bp, Artificial sequence
  SiRNA target sequence
aaaaaatgtcttatccgacatg

SEQ ID NO: 120575 - DNA, 22 bp, Artificial sequence
  SiRNA target sequence
aaaaatgtcttatccgacatgc

SEQ ID NO: 120576 - DNA, 22 bp, Artificial sequence
  SiRNA target sequence
aaaatgtcttatccgacatgca

SEQ ID NO: 120577 - DNA, 22 bp, Artificial sequence
  SiRNA target sequence
aaatgtcttatccgacatgcaa

SEQ ID NO: 120578 - DNA, 22 bp, Artificial sequence
  SiRNA target sequence
aatgtcttatccgacatgcaat

SEQ ID NO: 120579 - DNA, 22 bp, Artificial sequence
  SiRNA target sequence
atgtcttatccgacatgcaatg

SEQ ID NO: 120580 - DNA, 22 bp, Artificial sequence
  SiRNA target sequence
tgtcttatccgacatgcaatga

SEQ ID NO: 120581 - DNA, 22 bp, Artificial sequence
  SiRNA target sequence
gtcttatccgacatgcaatgat

SEQ ID NO: 120582 - DNA, 22 bp, Artificial sequence
  SiRNA target sequence
tcttatccgacatgcaatgata

SEQ ID NO: 120583 - DNA, 22 bp, Artificial sequence
  SiRNA target sequence
cttatccgacatgcaatgatat

SEQ ID NO: 120584 - DNA, 22 bp, Artificial sequence
  SiRNA target sequence
ttatccgacatgcaatgatatt

SEQ ID NO: 120585 - DNA, 22 bp, Artificial sequence
  SiRNA target sequence
tatccgacatgcaatgatattg

SEQ ID NO: 120586 - DNA, 22 bp, Artificial sequence
  SiRNA target sequence
atccgacatgcaatgatattgt

SEQ ID NO: 120587 - DNA, 22 bp, Artificial sequence
  SiRNA target sequence
tccgacatgcaatgatattgta

SEQ ID NO: 120588 - DNA, 22 bp, Artificial sequence
  SiRNA target sequence
ccgacatgcaatgatattgtaa

SEQ ID NO: 120589 - DNA, 22 bp, Artificial sequence
  SiRNA target sequence
cgacatgcaatgatattgtaaa

SEQ ID NO: 120590 - DNA, 22 bp, Artificial sequence
  SiRNA target sequence
gacatgcaatgatattgtaaat

SEQ ID NO: 120591 - DNA, 22 bp, Artificial sequence
  SiRNA target sequence
acatgcaatgatattgtaaatg

SEQ ID NO: 120592 - DNA, 22 bp, Artificial sequence
  SiRNA target sequence
catgcaatgatattgtaaatgc

SEQ ID NO: 120593 - DNA, 22 bp, Artificial sequence
  SiRNA target sequence
atgcaatgatattgtaaatgct

SEQ ID NO: 120594 - DNA, 22 bp, Artificial sequence
  SiRNA target sequence
tgcaatgatattgtaaatgctg

SEQ ID NO: 120595 - DNA, 22 bp, Artificial sequence
  SiRNA target sequence
gcaatgatattgtaaatgctgt

SEQ ID NO: 120596 - DNA, 22 bp, Artificial sequence
  SiRNA target sequence
caatgatattgtaaatgctgtt

SEQ ID NO: 120597 - DNA, 22 bp, Artificial sequence
  SiRNA target sequence
aatgatattgtaaatgctgtta

SEQ ID NO: 120598 - DNA, 22 bp, Artificial sequence
  SiRNA target sequence
atgatattgtaaatgctgttac

SEQ ID NO: 120599 - DNA, 22 bp, Artificial sequence
  SiRNA target sequence
tgatattgtaaatgctgttaca

SEQ ID NO: 120600 - DNA, 22 bp, Artificial sequence
  SiRNA target sequence
gatattgtaaatgctgttacaa

SEQ ID NO: 120601 - DNA, 22 bp, Artificial sequence
  SiRNA target sequence
atattgtaaatgctgttacaaa

SEQ ID NO: 120602 - DNA, 22 bp, Artificial sequence
  SiRNA target sequence
tattgtaaatgctgttacaaaa

SEQ ID NO: 120603 - DNA, 22 bp, Artificial sequence
  SiRNA target sequence
attgtaaatgctgttacaaaaa

SEQ ID NO: 120604 - DNA, 22 bp, Artificial sequence
  SiRNA target sequence
ttgtaaatgctgttacaaaaat

SEQ ID NO: 120605 - DNA, 22 bp, Artificial sequence
  SiRNA target sequence
tgtaaatgctgttacaaaaata

SEQ ID NO: 120606 - DNA, 22 bp, Artificial sequence
  SiRNA target sequence
gtaaatgctgttacaaaaataa

SEQ ID NO: 120607 - DNA, 22 bp, Artificial sequence
  SiRNA target sequence
taaatgctgttacaaaaataaa

SEQ ID NO: 120608 - DNA, 22 bp, Artificial sequence
  SiRNA target sequence
aaatgctgttacaaaaataaat

SEQ ID NO: 120609 - DNA, 22 bp, Artificial sequence
  SiRNA target sequence
aatgctgttacaaaaataaatt

SEQ ID NO: 120610 - DNA, 22 bp, Artificial sequence
  SiRNA target sequence
atgctgttacaaaaataaattc

SEQ ID NO: 120611 - DNA, 22 bp, Artificial sequence
  SiRNA target sequence
tgctgttacaaaaataaattca

SEQ ID NO: 120612 - DNA, 22 bp, Artificial sequence
  SiRNA target sequence
gctgttacaaaaataaattcat

SEQ ID NO: 120613 - DNA, 22 bp, Artificial sequence
  SiRNA target sequence
ctgttacaaaaataaattcata

SEQ ID NO: 120614 - DNA, 22 bp, Artificial sequence
  SiRNA target sequence
tgttacaaaaataaattcatag

SEQ ID NO: 120615 - DNA, 23 bp, Artificial sequence
  SiRNA target sequence
atgatagaaattcgcgatcttat

SEQ ID NO: 120616 - DNA, 23 bp, Artificial sequence
  SiRNA target sequence
tgatagaaattcgcgatcttata

SEQ ID NO: 120617 - DNA, 23 bp, Artificial sequence
  SiRNA target sequence
gatagaaattcgcgatcttataa

SEQ ID NO: 120618 - DNA, 23 bp, Artificial sequence
  SiRNA target sequence
atagaaattcgcgatcttataaa

SEQ ID NO: 120619 - DNA, 23 bp, Artificial sequence
  SiRNA target sequence
tagaaattcgcgatcttataaat

SEQ ID NO: 120620 - DNA, 23 bp, Artificial sequence
  SiRNA target sequence
agaaattcgcgatcttataaatc

SEQ ID NO: 120621 - DNA, 23 bp, Artificial sequence
  SiRNA target sequence
gaaattcgcgatcttataaatca

SEQ ID NO: 120622 - DNA, 23 bp, Artificial sequence
  SiRNA target sequence
aaattcgcgatcttataaatcaa

SEQ ID NO: 120623 - DNA, 23 bp, Artificial sequence
  SiRNA target sequence
aattcgcgatcttataaatcaag

SEQ ID NO: 120624 - DNA, 23 bp, Artificial sequence
  SiRNA target sequence
attcgcgatcttataaatcaagc

SEQ ID NO: 120625 - DNA, 23 bp, Artificial sequence
  SiRNA target sequence
ttcgcgatcttataaatcaagca

SEQ ID NO: 120626 - DNA, 23 bp, Artificial sequence
  SiRNA target sequence
tcgcgatcttataaatcaagcat

SEQ ID NO: 120627 - DNA, 23 bp, Artificial sequence
  SiRNA target sequence
cgcgatcttataaatcaagcatt

SEQ ID NO: 120628 - DNA, 23 bp, Artificial sequence
  SiRNA target sequence
gcgatcttataaatcaagcattg

SEQ ID NO: 120629 - DNA, 23 bp, Artificial sequence
  SiRNA target sequence
cgatcttataaatcaagcattgg

SEQ ID NO: 120630 - DNA, 23 bp, Artificial sequence
  SiRNA target sequence
gatcttataaatcaagcattgga

SEQ ID NO: 120631 - DNA, 23 bp, Artificial sequence
  SiRNA target sequence
atcttataaatcaagcattggat

SEQ ID NO: 120632 - DNA, 23 bp, Artificial sequence
  SiRNA target sequence
tcttataaatcaagcattggatg

SEQ ID NO: 120633 - DNA, 23 bp, Artificial sequence
  SiRNA target sequence
cttataaatcaagcattggatga

SEQ ID NO: 120634 - DNA, 23 bp, Artificial sequence
  SiRNA target sequence
ttataaatcaagcattggatgag

SEQ ID NO: 120635 - DNA, 23 bp, Artificial sequence
  SiRNA target sequence
tataaatcaagcattggatgagg

SEQ ID NO: 120636 - DNA, 23 bp, Artificial sequence
  SiRNA target sequence
ataaatcaagcattggatgagga

SEQ ID NO: 120637 - DNA, 23 bp, Artificial sequence
  SiRNA target sequence
taaatcaagcattggatgaggaa

SEQ ID NO: 120638 - DNA, 23 bp, Artificial sequence
  SiRNA target sequence
aaatcaagcattggatgaggaaa

SEQ ID NO: 120639 - DNA, 23 bp, Artificial sequence
  SiRNA target sequence
aatcaagcattggatgaggaaat

SEQ ID NO: 120640 - DNA, 23 bp, Artificial sequence
  SiRNA target sequence
atcaagcattggatgaggaaatg

SEQ ID NO: 120641 - DNA, 23 bp, Artificial sequence
  SiRNA target sequence
tcaagcattggatgaggaaatgg

SEQ ID NO: 120642 - DNA, 23 bp, Artificial sequence
  SiRNA target sequence
caagcattggatgaggaaatggg

SEQ ID NO: 120643 - DNA, 23 bp, Artificial sequence
  SiRNA target sequence
aagcattggatgaggaaatggga

SEQ ID NO: 120644 - DNA, 23 bp, Artificial sequence
  SiRNA target sequence
agcattggatgaggaaatgggaa

SEQ ID NO: 120645 - DNA, 23 bp, Artificial sequence
  SiRNA target sequence
gcattggatgaggaaatgggaat

SEQ ID NO: 120646 - DNA, 23 bp, Artificial sequence
  SiRNA target sequence
cattggatgaggaaatgggaatg

SEQ ID NO: 120647 - DNA, 23 bp, Artificial sequence
  SiRNA target sequence
attggatgaggaaatgggaatgg

SEQ ID NO: 120648 - DNA, 23 bp, Artificial sequence
  SiRNA target sequence
ttggatgaggaaatgggaatgga

SEQ ID NO: 120649 - DNA, 23 bp, Artificial sequence
  SiRNA target sequence
tggatgaggaaatgggaatggat

SEQ ID NO: 120650 - DNA, 23 bp, Artificial sequence
  SiRNA target sequence
ggatgaggaaatgggaatggatc

SEQ ID NO: 120651 - DNA, 23 bp, Artificial sequence
  SiRNA target sequence
gatgaggaaatgggaatggatca

SEQ ID NO: 120652 - DNA, 23 bp, Artificial sequence
  SiRNA target sequence
atgaggaaatgggaatggatcat

SEQ ID NO: 120653 - DNA, 23 bp, Artificial sequence
  SiRNA target sequence
tgaggaaatgggaatggatcata

SEQ ID NO: 120654 - DNA, 23 bp, Artificial sequence
  SiRNA target sequence
gaggaaatgggaatggatcataa

SEQ ID NO: 120655 - DNA, 23 bp, Artificial sequence
  SiRNA target sequence
aggaaatgggaatggatcataat

SEQ ID NO: 120656 - DNA, 23 bp, Artificial sequence
  SiRNA target sequence
ggaaatgggaatggatcataatg

SEQ ID NO: 120657 - DNA, 23 bp, Artificial sequence
  SiRNA target sequence
gaaatgggaatggatcataatgt

SEQ ID NO: 120658 - DNA, 23 bp, Artificial sequence
  SiRNA target sequence
aaatgggaatggatcataatgta

SEQ ID NO: 120659 - DNA, 23 bp, Artificial sequence
  SiRNA target sequence
aatgggaatggatcataatgtat

SEQ ID NO: 120660 - DNA, 23 bp, Artificial sequence
  SiRNA target sequence
atgggaatggatcataatgtata

SEQ ID NO: 120661 - DNA, 23 bp, Artificial sequence
  SiRNA target sequence
tgggaatggatcataatgtatat

SEQ ID NO: 120662 - DNA, 23 bp, Artificial sequence
  SiRNA target sequence
gggaatggatcataatgtatata

SEQ ID NO: 120663 - DNA, 23 bp, Artificial sequence
  SiRNA target sequence
ggaatggatcataatgtatatat

SEQ ID NO: 120664 - DNA, 23 bp, Artificial sequence
  SiRNA target sequence
gaatggatcataatgtatatata

SEQ ID NO: 120665 - DNA, 23 bp, Artificial sequence
  SiRNA target sequence
aatggatcataatgtatatataa

SEQ ID NO: 120666 - DNA, 23 bp, Artificial sequence
  SiRNA target sequence
atggatcataatgtatatataat

SEQ ID NO: 120667 - DNA, 23 bp, Artificial sequence
  SiRNA target sequence
tggatcataatgtatatataata

SEQ ID NO: 120668 - DNA, 23 bp, Artificial sequence
  SiRNA target sequence
ggatcataatgtatatataatag

SEQ ID NO: 120669 - DNA, 23 bp, Artificial sequence
  SiRNA target sequence
gatcataatgtatatataatagg

SEQ ID NO: 120670 - DNA, 23 bp, Artificial sequence
  SiRNA target sequence
atcataatgtatatataatagga

SEQ ID NO: 120671 - DNA, 23 bp, Artificial sequence
  SiRNA target sequence
tcataatgtatatataataggag

SEQ ID NO: 120672 - DNA, 23 bp, Artificial sequence
  SiRNA target sequence
cataatgtatatataataggaga

SEQ ID NO: 120673 - DNA, 23 bp, Artificial sequence
  SiRNA target sequence
ataatgtatatataataggagaa

SEQ ID NO: 120674 - DNA, 23 bp, Artificial sequence
  SiRNA target sequence
taatgtatatataataggagaag

SEQ ID NO: 120675 - DNA, 23 bp, Artificial sequence
  SiRNA target sequence
aatgtatatataataggagaaga

SEQ ID NO: 120676 - DNA, 23 bp, Artificial sequence
  SiRNA target sequence
atgtatatataataggagaagaa

SEQ ID NO: 120677 - DNA, 23 bp, Artificial sequence
  SiRNA target sequence
tgtatatataataggagaagaag

SEQ ID NO: 120678 - DNA, 23 bp, Artificial sequence
  SiRNA target sequence
gtatatataataggagaagaagt

SEQ ID NO: 120679 - DNA, 23 bp, Artificial sequence
  SiRNA target sequence
tatatataataggagaagaagta

SEQ ID NO: 120680 - DNA, 23 bp, Artificial sequence
  SiRNA target sequence
atatataataggagaagaagtag

SEQ ID NO: 120681 - DNA, 23 bp, Artificial sequence
  SiRNA target sequence
tatataataggagaagaagtagg

SEQ ID NO: 120682 - DNA, 23 bp, Artificial sequence
  SiRNA target sequence
atataataggagaagaagtaggc

SEQ ID NO: 120683 - DNA, 23 bp, Artificial sequence
  SiRNA target sequence
tataataggagaagaagtaggca

SEQ ID NO: 120684 - DNA, 23 bp, Artificial sequence
  SiRNA target sequence
ataataggagaagaagtaggcat

SEQ ID NO: 120685 - DNA, 23 bp, Artificial sequence
  SiRNA target sequence
taataggagaagaagtaggcatc

SEQ ID NO: 120686 - DNA, 23 bp, Artificial sequence
  SiRNA target sequence
aataggagaagaagtaggcatct

SEQ ID NO: 120687 - DNA, 23 bp, Artificial sequence
  SiRNA target sequence
ataggagaagaagtaggcatctc

SEQ ID NO: 120688 - DNA, 23 bp, Artificial sequence
  SiRNA target sequence
taggagaagaagtaggcatctct

SEQ ID NO: 120689 - DNA, 23 bp, Artificial sequence
  SiRNA target sequence
aggagaagaagtaggcatctctg

SEQ ID NO: 120690 - DNA, 23 bp, Artificial sequence
  SiRNA target sequence
ggagaagaagtaggcatctctgg

SEQ ID NO: 120691 - DNA, 23 bp, Artificial sequence
  SiRNA target sequence
gagaagaagtaggcatctctggt

SEQ ID NO: 120692 - DNA, 23 bp, Artificial sequence
  SiRNA target sequence
agaagaagtaggcatctctggtg

SEQ ID NO: 120693 - DNA, 23 bp, Artificial sequence
  SiRNA target sequence
gaagaagtaggcatctctggtgg

SEQ ID NO: 120694 - DNA, 23 bp, Artificial sequence
  SiRNA target sequence
aagaagtaggcatctctggtggt

SEQ ID NO: 120695 - DNA, 23 bp, Artificial sequence
  SiRNA target sequence
agaagtaggcatctctggtggtc

SEQ ID NO: 120696 - DNA, 23 bp, Artificial sequence
  SiRNA target sequence
gaagtaggcatctctggtggtcc

SEQ ID NO: 120697 - DNA, 23 bp, Artificial sequence
  SiRNA target sequence
aagtaggcatctctggtggtcct

SEQ ID NO: 120698 - DNA, 23 bp, Artificial sequence
  SiRNA target sequence
agtaggcatctctggtggtcctc

SEQ ID NO: 120699 - DNA, 23 bp, Artificial sequence
  SiRNA target sequence
gtaggcatctctggtggtcctca

SEQ ID NO: 120700 - DNA, 23 bp, Artificial sequence
  SiRNA target sequence
taggcatctctggtggtcctcac

SEQ ID NO: 120701 - DNA, 23 bp, Artificial sequence
  SiRNA target sequence
aggcatctctggtggtcctcacg

SEQ ID NO: 120702 - DNA, 23 bp, Artificial sequence
  SiRNA target sequence
ggcatctctggtggtcctcacgg

SEQ ID NO: 120703 - DNA, 23 bp, Artificial sequence
  SiRNA target sequence
gcatctctggtggtcctcacggt

SEQ ID NO: 120704 - DNA, 23 bp, Artificial sequence
  SiRNA target sequence
catctctggtggtcctcacggtc

SEQ ID NO: 120705 - DNA, 23 bp, Artificial sequence
  SiRNA target sequence
atctctggtggtcctcacggtct

SEQ ID NO: 120706 - DNA, 23 bp, Artificial sequence
  SiRNA target sequence
tctctggtggtcctcacggtctt

SEQ ID NO: 120707 - DNA, 23 bp, Artificial sequence
  SiRNA target sequence
ctctggtggtcctcacggtctta

SEQ ID NO: 120708 - DNA, 23 bp, Artificial sequence
  SiRNA target sequence
tctggtggtcctcacggtcttac

SEQ ID NO: 120709 - DNA, 23 bp, Artificial sequence
  SiRNA target sequence
ctggtggtcctcacggtcttact

SEQ ID NO: 120710 - DNA, 23 bp, Artificial sequence
  SiRNA target sequence
tggtggtcctcacggtcttacta

SEQ ID NO: 120711 - DNA, 23 bp, Artificial sequence
  SiRNA target sequence
ggtggtcctcacggtcttactaa

SEQ ID NO: 120712 - DNA, 23 bp, Artificial sequence
  SiRNA target sequence
gtggtcctcacggtcttactaaa

SEQ ID NO: 120713 - DNA, 23 bp, Artificial sequence
  SiRNA target sequence
tggtcctcacggtcttactaaaa

SEQ ID NO: 120714 - DNA, 23 bp, Artificial sequence
  SiRNA target sequence
ggtcctcacggtcttactaaaaa

SEQ ID NO: 120715 - DNA, 23 bp, Artificial sequence
  SiRNA target sequence
gtcctcacggtcttactaaaaat

SEQ ID NO: 120716 - DNA, 23 bp, Artificial sequence
  SiRNA target sequence
tcctcacggtcttactaaaaatt

SEQ ID NO: 120717 - DNA, 23 bp, Artificial sequence
  SiRNA target sequence
cctcacggtcttactaaaaattt

SEQ ID NO: 120718 - DNA, 23 bp, Artificial sequence
  SiRNA target sequence
ctcacggtcttactaaaaatttg

SEQ ID NO: 120719 - DNA, 23 bp, Artificial sequence
  SiRNA target sequence
tcacggtcttactaaaaatttga

SEQ ID NO: 120720 - DNA, 23 bp, Artificial sequence
  SiRNA target sequence
cacggtcttactaaaaatttgat

SEQ ID NO: 120721 - DNA, 23 bp, Artificial sequence
  SiRNA target sequence
acggtcttactaaaaatttgatc

SEQ ID NO: 120722 - DNA, 23 bp, Artificial sequence
  SiRNA target sequence
cggtcttactaaaaatttgatca

SEQ ID NO: 120723 - DNA, 23 bp, Artificial sequence
  SiRNA target sequence
ggtcttactaaaaatttgatcaa

SEQ ID NO: 120724 - DNA, 23 bp, Artificial sequence
  SiRNA target sequence
gtcttactaaaaatttgatcaaa

SEQ ID NO: 120725 - DNA, 23 bp, Artificial sequence
  SiRNA target sequence
tcttactaaaaatttgatcaaaa

SEQ ID NO: 120726 - DNA, 23 bp, Artificial sequence
  SiRNA target sequence
cttactaaaaatttgatcaaaaa

SEQ ID NO: 120727 - DNA, 23 bp, Artificial sequence
  SiRNA target sequence
ttactaaaaatttgatcaaaaaa

SEQ ID NO: 120728 - DNA, 23 bp, Artificial sequence
  SiRNA target sequence
tactaaaaatttgatcaaaaaat

SEQ ID NO: 120729 - DNA, 23 bp, Artificial sequence
  SiRNA target sequence
actaaaaatttgatcaaaaaata

SEQ ID NO: 120730 - DNA, 23 bp, Artificial sequence
  SiRNA target sequence
ctaaaaatttgatcaaaaaatac

SEQ ID NO: 120731 - DNA, 23 bp, Artificial sequence
  SiRNA target sequence
taaaaatttgatcaaaaaatacg

SEQ ID NO: 120732 - DNA, 23 bp, Artificial sequence
  SiRNA target sequence
aaaaatttgatcaaaaaatacgg

SEQ ID NO: 120733 - DNA, 23 bp, Artificial sequence
  SiRNA target sequence
aaaatttgatcaaaaaatacggc

SEQ ID NO: 120734 - DNA, 23 bp, Artificial sequence
  SiRNA target sequence
aaatttgatcaaaaaatacggcg

SEQ ID NO: 120735 - DNA, 23 bp, Artificial sequence
  SiRNA target sequence
aatttgatcaaaaaatacggcga

SEQ ID NO: 120736 - DNA, 23 bp, Artificial sequence
  SiRNA target sequence
atttgatcaaaaaatacggcgat

SEQ ID NO: 120737 - DNA, 23 bp, Artificial sequence
  SiRNA target sequence
tttgatcaaaaaatacggcgatc

SEQ ID NO: 120738 - DNA, 23 bp, Artificial sequence
  SiRNA target sequence
ttgatcaaaaaatacggcgatca

SEQ ID NO: 120739 - DNA, 23 bp, Artificial sequence
  SiRNA target sequence
tgatcaaaaaatacggcgatcaa

SEQ ID NO: 120740 - DNA, 23 bp, Artificial sequence
  SiRNA target sequence
gatcaaaaaatacggcgatcaaa

SEQ ID NO: 120741 - DNA, 23 bp, Artificial sequence
  SiRNA target sequence
atcaaaaaatacggcgatcaaag

SEQ ID NO: 120742 - DNA, 23 bp, Artificial sequence
  SiRNA target sequence
tcaaaaaatacggcgatcaaaga

SEQ ID NO: 120743 - DNA, 23 bp, Artificial sequence
  SiRNA target sequence
caaaaaatacggcgatcaaagag

SEQ ID NO: 120744 - DNA, 23 bp, Artificial sequence
  SiRNA target sequence
aaaaaatacggcgatcaaagagt

SEQ ID NO: 120745 - DNA, 23 bp, Artificial sequence
  SiRNA target sequence
aaaaatacggcgatcaaagagtg

SEQ ID NO: 120746 - DNA, 23 bp, Artificial sequence
  SiRNA target sequence
aaaatacggcgatcaaagagtga

SEQ ID NO: 120747 - DNA, 23 bp, Artificial sequence
  SiRNA target sequence
aaatacggcgatcaaagagtgaa

SEQ ID NO: 120748 - DNA, 23 bp, Artificial sequence
  SiRNA target sequence
aatacggcgatcaaagagtgaag

SEQ ID NO: 120749 - DNA, 23 bp, Artificial sequence
  SiRNA target sequence
atacggcgatcaaagagtgaagg

SEQ ID NO: 120750 - DNA, 23 bp, Artificial sequence
  SiRNA target sequence
tacggcgatcaaagagtgaagga

SEQ ID NO: 120751 - DNA, 23 bp, Artificial sequence
  SiRNA target sequence
acggcgatcaaagagtgaaggat

SEQ ID NO: 120752 - DNA, 23 bp, Artificial sequence
  SiRNA target sequence
cggcgatcaaagagtgaaggata

SEQ ID NO: 120753 - DNA, 23 bp, Artificial sequence
  SiRNA target sequence
ggcgatcaaagagtgaaggatac

SEQ ID NO: 120754 - DNA, 23 bp, Artificial sequence
  SiRNA target sequence
gcgatcaaagagtgaaggatacc

SEQ ID NO: 120755 - DNA, 23 bp, Artificial sequence
  SiRNA target sequence
cgatcaaagagtgaaggataccc

SEQ ID NO: 120756 - DNA, 23 bp, Artificial sequence
  SiRNA target sequence
gatcaaagagtgaaggatacccc

SEQ ID NO: 120757 - DNA, 23 bp, Artificial sequence
  SiRNA target sequence
atcaaagagtgaaggatacccct

SEQ ID NO: 120758 - DNA, 23 bp, Artificial sequence
  SiRNA target sequence
tcaaagagtgaaggataccccta

SEQ ID NO: 120759 - DNA, 23 bp, Artificial sequence
  SiRNA target sequence
caaagagtgaaggatacccctat

SEQ ID NO: 120760 - DNA, 23 bp, Artificial sequence
  SiRNA target sequence
aaagagtgaaggatacccctatt

SEQ ID NO: 120761 - DNA, 23 bp, Artificial sequence
  SiRNA target sequence
aagagtgaaggatacccctattt

SEQ ID NO: 120762 - DNA, 23 bp, Artificial sequence
  SiRNA target sequence
agagtgaaggatacccctatttc

SEQ ID NO: 120763 - DNA, 23 bp, Artificial sequence
  SiRNA target sequence
gagtgaaggatacccctatttcg

SEQ ID NO: 120764 - DNA, 23 bp, Artificial sequence
  SiRNA target sequence
agtgaaggatacccctatttcgg

SEQ ID NO: 120765 - DNA, 23 bp, Artificial sequence
  SiRNA target sequence
gtgaaggatacccctatttcgga

SEQ ID NO: 120766 - DNA, 23 bp, Artificial sequence
  SiRNA target sequence
tgaaggatacccctatttcggaa

SEQ ID NO: 120767 - DNA, 23 bp, Artificial sequence
  SiRNA target sequence
gaaggatacccctatttcggaaa

SEQ ID NO: 120768 - DNA, 23 bp, Artificial sequence
  SiRNA target sequence
aaggatacccctatttcggaaat

SEQ ID NO: 120769 - DNA, 23 bp, Artificial sequence
  SiRNA target sequence
aggatacccctatttcggaaatg

SEQ ID NO: 120770 - DNA, 23 bp, Artificial sequence
  SiRNA target sequence
ggatacccctatttcggaaatgg

SEQ ID NO: 120771 - DNA, 23 bp, Artificial sequence
  SiRNA target sequence
gatacccctatttcggaaatggg

SEQ ID NO: 120772 - DNA, 23 bp, Artificial sequence
  SiRNA target sequence
atacccctatttcggaaatggga

SEQ ID NO: 120773 - DNA, 23 bp, Artificial sequence
  SiRNA target sequence
tacccctatttcggaaatgggat

SEQ ID NO: 120774 - DNA, 23 bp, Artificial sequence
  SiRNA target sequence
acccctatttcggaaatgggatt

SEQ ID NO: 120775 - DNA, 23 bp, Artificial sequence
  SiRNA target sequence
cccctatttcggaaatgggattt

SEQ ID NO: 120776 - DNA, 23 bp, Artificial sequence
  SiRNA target sequence
ccctatttcggaaatgggattta

SEQ ID NO: 120777 - DNA, 23 bp, Artificial sequence
  SiRNA target sequence
cctatttcggaaatgggatttac

SEQ ID NO: 120778 - DNA, 23 bp, Artificial sequence
  SiRNA target sequence
ctatttcggaaatgggatttaca

SEQ ID NO: 120779 - DNA, 23 bp, Artificial sequence
  SiRNA target sequence
tatttcggaaatgggatttacag

SEQ ID NO: 120780 - DNA, 23 bp, Artificial sequence
  SiRNA target sequence
atttcggaaatgggatttacagg

SEQ ID NO: 120781 - DNA, 23 bp, Artificial sequence
  SiRNA target sequence
tttcggaaatgggatttacaggt

SEQ ID NO: 120782 - DNA, 23 bp, Artificial sequence
  SiRNA target sequence
ttcggaaatgggatttacaggtc

SEQ ID NO: 120783 - DNA, 23 bp, Artificial sequence
  SiRNA target sequence
tcggaaatgggatttacaggtct

SEQ ID NO: 120784 - DNA, 23 bp, Artificial sequence
  SiRNA target sequence
cggaaatgggatttacaggtctc

SEQ ID NO: 120785 - DNA, 23 bp, Artificial sequence
  SiRNA target sequence
ggaaatgggatttacaggtctcg

SEQ ID NO: 120786 - DNA, 23 bp, Artificial sequence
  SiRNA target sequence
gaaatgggatttacaggtctcgc

SEQ ID NO: 120787 - DNA, 23 bp, Artificial sequence
  SiRNA target sequence
aaatgggatttacaggtctcgct

SEQ ID NO: 120788 - DNA, 23 bp, Artificial sequence
  SiRNA target sequence
aatgggatttacaggtctcgctg

SEQ ID NO: 120789 - DNA, 23 bp, Artificial sequence
  SiRNA target sequence
atgggatttacaggtctcgctgt

SEQ ID NO: 120790 - DNA, 23 bp, Artificial sequence
  SiRNA target sequence
tgggatttacaggtctcgctgtg

SEQ ID NO: 120791 - DNA, 23 bp, Artificial sequence
  SiRNA target sequence
gggatttacaggtctcgctgtgg

SEQ ID NO: 120792 - DNA, 23 bp, Artificial sequence
  SiRNA target sequence
ggatttacaggtctcgctgtggg

SEQ ID NO: 120793 - DNA, 23 bp, Artificial sequence
  SiRNA target sequence
gatttacaggtctcgctgtgggt

SEQ ID NO: 120794 - DNA, 23 bp, Artificial sequence
  SiRNA target sequence
atttacaggtctcgctgtgggtt

SEQ ID NO: 120795 - DNA, 23 bp, Artificial sequence
  SiRNA target sequence
tttacaggtctcgctgtgggttc

SEQ ID NO: 120796 - DNA, 23 bp, Artificial sequence
  SiRNA target sequence
ttacaggtctcgctgtgggttca

SEQ ID NO: 120797 - DNA, 23 bp, Artificial sequence
  SiRNA target sequence
tacaggtctcgctgtgggttcaa

SEQ ID NO: 120798 - DNA, 23 bp, Artificial sequence
  SiRNA target sequence
acaggtctcgctgtgggttcaag

SEQ ID NO: 120799 - DNA, 23 bp, Artificial sequence
  SiRNA target sequence
caggtctcgctgtgggttcaagc

SEQ ID NO: 120800 - DNA, 23 bp, Artificial sequence
  SiRNA target sequence
aggtctcgctgtgggttcaagct

SEQ ID NO: 120801 - DNA, 23 bp, Artificial sequence
  SiRNA target sequence
ggtctcgctgtgggttcaagcta

SEQ ID NO: 120802 - DNA, 23 bp, Artificial sequence
  SiRNA target sequence
gtctcgctgtgggttcaagctat

SEQ ID NO: 120803 - DNA, 23 bp, Artificial sequence
  SiRNA target sequence
tctcgctgtgggttcaagctatt

SEQ ID NO: 120804 - DNA, 23 bp, Artificial sequence
  SiRNA target sequence
ctcgctgtgggttcaagctattt

SEQ ID NO: 120805 - DNA, 23 bp, Artificial sequence
  SiRNA target sequence
tcgctgtgggttcaagctattta

SEQ ID NO: 120806 - DNA, 23 bp, Artificial sequence
  SiRNA target sequence
cgctgtgggttcaagctatttag

SEQ ID NO: 120807 - DNA, 23 bp, Artificial sequence
  SiRNA target sequence
gctgtgggttcaagctatttagg

SEQ ID NO: 120808 - DNA, 23 bp, Artificial sequence
  SiRNA target sequence
ctgtgggttcaagctatttaggg

SEQ ID NO: 120809 - DNA, 23 bp, Artificial sequence
  SiRNA target sequence
tgtgggttcaagctatttagggt

SEQ ID NO: 120810 - DNA, 23 bp, Artificial sequence
  SiRNA target sequence
gtgggttcaagctatttagggtt

SEQ ID NO: 120811 - DNA, 23 bp, Artificial sequence
  SiRNA target sequence
tgggttcaagctatttagggtta

SEQ ID NO: 120812 - DNA, 23 bp, Artificial sequence
  SiRNA target sequence
gggttcaagctatttagggttaa

SEQ ID NO: 120813 - DNA, 23 bp, Artificial sequence
  SiRNA target sequence
ggttcaagctatttagggttaag

SEQ ID NO: 120814 - DNA, 23 bp, Artificial sequence
  SiRNA target sequence
gttcaagctatttagggttaaga

SEQ ID NO: 120815 - DNA, 23 bp, Artificial sequence
  SiRNA target sequence
ttcaagctatttagggttaagac

SEQ ID NO: 120816 - DNA, 23 bp, Artificial sequence
  SiRNA target sequence
tcaagctatttagggttaagacc

SEQ ID NO: 120817 - DNA, 23 bp, Artificial sequence
  SiRNA target sequence
caagctatttagggttaagaccc

SEQ ID NO: 120818 - DNA, 23 bp, Artificial sequence
  SiRNA target sequence
aagctatttagggttaagacccg

SEQ ID NO: 120819 - DNA, 23 bp, Artificial sequence
  SiRNA target sequence
agctatttagggttaagacccgt

SEQ ID NO: 120820 - DNA, 23 bp, Artificial sequence
  SiRNA target sequence
gctatttagggttaagacccgta

SEQ ID NO: 120821 - DNA, 23 bp, Artificial sequence
  SiRNA target sequence
ctatttagggttaagacccgtag

SEQ ID NO: 120822 - DNA, 23 bp, Artificial sequence
  SiRNA target sequence
tatttagggttaagacccgtagt

SEQ ID NO: 120823 - DNA, 23 bp, Artificial sequence
  SiRNA target sequence
atttagggttaagacccgtagta

SEQ ID NO: 120824 - DNA, 23 bp, Artificial sequence
  SiRNA target sequence
tttagggttaagacccgtagtag

SEQ ID NO: 120825 - DNA, 23 bp, Artificial sequence
  SiRNA target sequence
ttagggttaagacccgtagtaga

SEQ ID NO: 120826 - DNA, 23 bp, Artificial sequence
  SiRNA target sequence
tagggttaagacccgtagtagat

SEQ ID NO: 120827 - DNA, 23 bp, Artificial sequence
  SiRNA target sequence
agggttaagacccgtagtagatt

SEQ ID NO: 120828 - DNA, 23 bp, Artificial sequence
  SiRNA target sequence
gggttaagacccgtagtagattt

SEQ ID NO: 120829 - DNA, 23 bp, Artificial sequence
  SiRNA target sequence
ggttaagacccgtagtagatttt

SEQ ID NO: 120830 - DNA, 23 bp, Artificial sequence
  SiRNA target sequence
gttaagacccgtagtagatttta

SEQ ID NO: 120831 - DNA, 23 bp, Artificial sequence
  SiRNA target sequence
ttaagacccgtagtagattttat

SEQ ID NO: 120832 - DNA, 23 bp, Artificial sequence
  SiRNA target sequence
taagacccgtagtagattttatg

SEQ ID NO: 120833 - DNA, 23 bp, Artificial sequence
  SiRNA target sequence
aagacccgtagtagattttatga

SEQ ID NO: 120834 - DNA, 23 bp, Artificial sequence
  SiRNA target sequence
agacccgtagtagattttatgac

SEQ ID NO: 120835 - DNA, 23 bp, Artificial sequence
  SiRNA target sequence
gacccgtagtagattttatgact

SEQ ID NO: 120836 - DNA, 23 bp, Artificial sequence
  SiRNA target sequence
acccgtagtagattttatgactt

SEQ ID NO: 120837 - DNA, 23 bp, Artificial sequence
  SiRNA target sequence
cccgtagtagattttatgacttg

SEQ ID NO: 120838 - DNA, 23 bp, Artificial sequence
  SiRNA target sequence
ccgtagtagattttatgacttgg

SEQ ID NO: 120839 - DNA, 23 bp, Artificial sequence
  SiRNA target sequence
cgtagtagattttatgacttgga

SEQ ID NO: 120840 - DNA, 23 bp, Artificial sequence
  SiRNA target sequence
gtagtagattttatgacttggaa

SEQ ID NO: 120841 - DNA, 23 bp, Artificial sequence
  SiRNA target sequence
tagtagattttatgacttggaat

SEQ ID NO: 120842 - DNA, 23 bp, Artificial sequence
  SiRNA target sequence
agtagattttatgacttggaatt

SEQ ID NO: 120843 - DNA, 23 bp, Artificial sequence
  SiRNA target sequence
gtagattttatgacttggaattt

SEQ ID NO: 120844 - DNA, 23 bp, Artificial sequence
  SiRNA target sequence
tagattttatgacttggaatttt

SEQ ID NO: 120845 - DNA, 23 bp, Artificial sequence
  SiRNA target sequence
agattttatgacttggaattttg

SEQ ID NO: 120846 - DNA, 23 bp, Artificial sequence
  SiRNA target sequence
gattttatgacttggaattttgc

SEQ ID NO: 120847 - DNA, 23 bp, Artificial sequence
  SiRNA target sequence
attttatgacttggaattttgct

SEQ ID NO: 120848 - DNA, 23 bp, Artificial sequence
  SiRNA target sequence
ttttatgacttggaattttgctt

SEQ ID NO: 120849 - DNA, 23 bp, Artificial sequence
  SiRNA target sequence
tttatgacttggaattttgcttt

SEQ ID NO: 120850 - DNA, 23 bp, Artificial sequence
  SiRNA target sequence
ttatgacttggaattttgctttg

SEQ ID NO: 120851 - DNA, 23 bp, Artificial sequence
  SiRNA target sequence
tatgacttggaattttgctttgc

SEQ ID NO: 120852 - DNA, 23 bp, Artificial sequence
  SiRNA target sequence
atgacttggaattttgctttgca

SEQ ID NO: 120853 - DNA, 23 bp, Artificial sequence
  SiRNA target sequence
tgacttggaattttgctttgcaa

SEQ ID NO: 120854 - DNA, 23 bp, Artificial sequence
  SiRNA target sequence
gacttggaattttgctttgcaat

SEQ ID NO: 120855 - DNA, 23 bp, Artificial sequence
  SiRNA target sequence
acttggaattttgctttgcaatc

SEQ ID NO: 120856 - DNA, 23 bp, Artificial sequence
  SiRNA target sequence
cttggaattttgctttgcaatca

SEQ ID NO: 120857 - DNA, 23 bp, Artificial sequence
  SiRNA target sequence
ttggaattttgctttgcaatcaa

SEQ ID NO: 120858 - DNA, 23 bp, Artificial sequence
  SiRNA target sequence
tggaattttgctttgcaatcaat

SEQ ID NO: 120859 - DNA, 23 bp, Artificial sequence
  SiRNA target sequence
ggaattttgctttgcaatcaatt

SEQ ID NO: 120860 - DNA, 23 bp, Artificial sequence
  SiRNA target sequence
gaattttgctttgcaatcaattg

SEQ ID NO: 120861 - DNA, 23 bp, Artificial sequence
  SiRNA target sequence
aattttgctttgcaatcaattga

SEQ ID NO: 120862 - DNA, 23 bp, Artificial sequence
  SiRNA target sequence
attttgctttgcaatcaattgac

SEQ ID NO: 120863 - DNA, 23 bp, Artificial sequence
  SiRNA target sequence
ttttgctttgcaatcaattgacc

SEQ ID NO: 120864 - DNA, 23 bp, Artificial sequence
  SiRNA target sequence
tttgctttgcaatcaattgacca

SEQ ID NO: 120865 - DNA, 23 bp, Artificial sequence
  SiRNA target sequence
ttgctttgcaatcaattgaccat

SEQ ID NO: 120866 - DNA, 23 bp, Artificial sequence
  SiRNA target sequence
tgctttgcaatcaattgaccata

SEQ ID NO: 120867 - DNA, 23 bp, Artificial sequence
  SiRNA target sequence
gctttgcaatcaattgaccatat

SEQ ID NO: 120868 - DNA, 23 bp, Artificial sequence
  SiRNA target sequence
ctttgcaatcaattgaccatatt

SEQ ID NO: 120869 - DNA, 23 bp, Artificial sequence
  SiRNA target sequence
tttgcaatcaattgaccatatta

SEQ ID NO: 120870 - DNA, 23 bp, Artificial sequence
  SiRNA target sequence
ttgcaatcaattgaccatattat

SEQ ID NO: 120871 - DNA, 23 bp, Artificial sequence
  SiRNA target sequence
tgcaatcaattgaccatattatt

SEQ ID NO: 120872 - DNA, 23 bp, Artificial sequence
  SiRNA target sequence
gcaatcaattgaccatattatta

SEQ ID NO: 120873 - DNA, 23 bp, Artificial sequence
  SiRNA target sequence
caatcaattgaccatattattaa

SEQ ID NO: 120874 - DNA, 23 bp, Artificial sequence
  SiRNA target sequence
aatcaattgaccatattattaat

SEQ ID NO: 120875 - DNA, 23 bp, Artificial sequence
  SiRNA target sequence
atcaattgaccatattattaatt

SEQ ID NO: 120876 - DNA, 23 bp, Artificial sequence
  SiRNA target sequence
tcaattgaccatattattaattc

SEQ ID NO: 120877 - DNA, 23 bp, Artificial sequence
  SiRNA target sequence
caattgaccatattattaattct

SEQ ID NO: 120878 - DNA, 23 bp, Artificial sequence
  SiRNA target sequence
aattgaccatattattaattctt

SEQ ID NO: 120879 - DNA, 23 bp, Artificial sequence
  SiRNA target sequence
attgaccatattattaattcttg

SEQ ID NO: 120880 - DNA, 23 bp, Artificial sequence
  SiRNA target sequence
ttgaccatattattaattcttgt

SEQ ID NO: 120881 - DNA, 23 bp, Artificial sequence
  SiRNA target sequence
tgaccatattattaattcttgtg

SEQ ID NO: 120882 - DNA, 23 bp, Artificial sequence
  SiRNA target sequence
gaccatattattaattcttgtgc

SEQ ID NO: 120883 - DNA, 23 bp, Artificial sequence
  SiRNA target sequence
accatattattaattcttgtgcg

SEQ ID NO: 120884 - DNA, 23 bp, Artificial sequence
  SiRNA target sequence
ccatattattaattcttgtgcga

SEQ ID NO: 120885 - DNA, 23 bp, Artificial sequence
  SiRNA target sequence
catattattaattcttgtgcgaa

SEQ ID NO: 120886 - DNA, 23 bp, Artificial sequence
  SiRNA target sequence
atattattaattcttgtgcgaaa

SEQ ID NO: 120887 - DNA, 23 bp, Artificial sequence
  SiRNA target sequence
tattattaattcttgtgcgaaaa

SEQ ID NO: 120888 - DNA, 23 bp, Artificial sequence
  SiRNA target sequence
attattaattcttgtgcgaaaac

SEQ ID NO: 120889 - DNA, 23 bp, Artificial sequence
  SiRNA target sequence
ttattaattcttgtgcgaaaacc

SEQ ID NO: 120890 - DNA, 23 bp, Artificial sequence
  SiRNA target sequence
tattaattcttgtgcgaaaacct

SEQ ID NO: 120891 - DNA, 23 bp, Artificial sequence
  SiRNA target sequence
attaattcttgtgcgaaaacctt

SEQ ID NO: 120892 - DNA, 23 bp, Artificial sequence
  SiRNA target sequence
ttaattcttgtgcgaaaaccttg

SEQ ID NO: 120893 - DNA, 23 bp, Artificial sequence
  SiRNA target sequence
taattcttgtgcgaaaaccttgt

SEQ ID NO: 120894 - DNA, 23 bp, Artificial sequence
  SiRNA target sequence
aattcttgtgcgaaaaccttgta

SEQ ID NO: 120895 - DNA, 23 bp, Artificial sequence
  SiRNA target sequence
attcttgtgcgaaaaccttgtat

SEQ ID NO: 120896 - DNA, 23 bp, Artificial sequence
  SiRNA target sequence
ttcttgtgcgaaaaccttgtata

SEQ ID NO: 120897 - DNA, 23 bp, Artificial sequence
  SiRNA target sequence
tcttgtgcgaaaaccttgtatat

SEQ ID NO: 120898 - DNA, 23 bp, Artificial sequence
  SiRNA target sequence
cttgtgcgaaaaccttgtatatg

SEQ ID NO: 120899 - DNA, 23 bp, Artificial sequence
  SiRNA target sequence
ttgtgcgaaaaccttgtatatgt

SEQ ID NO: 120900 - DNA, 23 bp, Artificial sequence
  SiRNA target sequence
tgtgcgaaaaccttgtatatgtc

SEQ ID NO: 120901 - DNA, 23 bp, Artificial sequence
  SiRNA target sequence
gtgcgaaaaccttgtatatgtca

SEQ ID NO: 120902 - DNA, 23 bp, Artificial sequence
  SiRNA target sequence
tgcgaaaaccttgtatatgtcag

SEQ ID NO: 120903 - DNA, 23 bp, Artificial sequence
  SiRNA target sequence
gcgaaaaccttgtatatgtcagg

SEQ ID NO: 120904 - DNA, 23 bp, Artificial sequence
  SiRNA target sequence
cgaaaaccttgtatatgtcagga

SEQ ID NO: 120905 - DNA, 23 bp, Artificial sequence
  SiRNA target sequence
gaaaaccttgtatatgtcaggag

SEQ ID NO: 120906 - DNA, 23 bp, Artificial sequence
  SiRNA target sequence
aaaaccttgtatatgtcaggagg

SEQ ID NO: 120907 - DNA, 23 bp, Artificial sequence
  SiRNA target sequence
aaaccttgtatatgtcaggagga

SEQ ID NO: 120908 - DNA, 23 bp, Artificial sequence
  SiRNA target sequence
aaccttgtatatgtcaggaggaa

SEQ ID NO: 120909 - DNA, 23 bp, Artificial sequence
  SiRNA target sequence
accttgtatatgtcaggaggaag

SEQ ID NO: 120910 - DNA, 23 bp, Artificial sequence
  SiRNA target sequence
ccttgtatatgtcaggaggaaga

SEQ ID NO: 120911 - DNA, 23 bp, Artificial sequence
  SiRNA target sequence
cttgtatatgtcaggaggaagaa

SEQ ID NO: 120912 - DNA, 23 bp, Artificial sequence
  SiRNA target sequence
ttgtatatgtcaggaggaagaat

SEQ ID NO: 120913 - DNA, 23 bp, Artificial sequence
  SiRNA target sequence
tgtatatgtcaggaggaagaata

SEQ ID NO: 120914 - DNA, 23 bp, Artificial sequence
  SiRNA target sequence
gtatatgtcaggaggaagaatac

SEQ ID NO: 120915 - DNA, 23 bp, Artificial sequence
  SiRNA target sequence
tatatgtcaggaggaagaataca

SEQ ID NO: 120916 - DNA, 23 bp, Artificial sequence
  SiRNA target sequence
atatgtcaggaggaagaatacaa

SEQ ID NO: 120917 - DNA, 23 bp, Artificial sequence
  SiRNA target sequence
tatgtcaggaggaagaatacaat

SEQ ID NO: 120918 - DNA, 23 bp, Artificial sequence
  SiRNA target sequence
atgtcaggaggaagaatacaatg

SEQ ID NO: 120919 - DNA, 23 bp, Artificial sequence
  SiRNA target sequence
tgtcaggaggaagaatacaatgt

SEQ ID NO: 120920 - DNA, 23 bp, Artificial sequence
  SiRNA target sequence
gtcaggaggaagaatacaatgtc

SEQ ID NO: 120921 - DNA, 23 bp, Artificial sequence
  SiRNA target sequence
tcaggaggaagaatacaatgtcc

SEQ ID NO: 120922 - DNA, 23 bp, Artificial sequence
  SiRNA target sequence
caggaggaagaatacaatgtcca

SEQ ID NO: 120923 - DNA, 23 bp, Artificial sequence
  SiRNA target sequence
aggaggaagaatacaatgtccaa

SEQ ID NO: 120924 - DNA, 23 bp, Artificial sequence
  SiRNA target sequence
ggaggaagaatacaatgtccaat

SEQ ID NO: 120925 - DNA, 23 bp, Artificial sequence
  SiRNA target sequence
gaggaagaatacaatgtccaatt

SEQ ID NO: 120926 - DNA, 23 bp, Artificial sequence
  SiRNA target sequence
aggaagaatacaatgtccaattg

SEQ ID NO: 120927 - DNA, 23 bp, Artificial sequence
  SiRNA target sequence
ggaagaatacaatgtccaattgt

SEQ ID NO: 120928 - DNA, 23 bp, Artificial sequence
  SiRNA target sequence
gaagaatacaatgtccaattgtt

SEQ ID NO: 120929 - DNA, 23 bp, Artificial sequence
  SiRNA target sequence
aagaatacaatgtccaattgttt

SEQ ID NO: 120930 - DNA, 23 bp, Artificial sequence
  SiRNA target sequence
agaatacaatgtccaattgtttt

SEQ ID NO: 120931 - DNA, 23 bp, Artificial sequence
  SiRNA target sequence
gaatacaatgtccaattgttttt

SEQ ID NO: 120932 - DNA, 23 bp, Artificial sequence
  SiRNA target sequence
aatacaatgtccaattgttttta

SEQ ID NO: 120933 - DNA, 23 bp, Artificial sequence
  SiRNA target sequence
atacaatgtccaattgtttttag

SEQ ID NO: 120934 - DNA, 23 bp, Artificial sequence
  SiRNA target sequence
tacaatgtccaattgtttttagg

SEQ ID NO: 120935 - DNA, 23 bp, Artificial sequence
  SiRNA target sequence
acaatgtccaattgtttttaggg

SEQ ID NO: 120936 - DNA, 23 bp, Artificial sequence
  SiRNA target sequence
caatgtccaattgtttttagggg

SEQ ID NO: 120937 - DNA, 23 bp, Artificial sequence
  SiRNA target sequence
aatgtccaattgtttttagggga

SEQ ID NO: 120938 - DNA, 23 bp, Artificial sequence
  SiRNA target sequence
atgtccaattgtttttaggggac

SEQ ID NO: 120939 - DNA, 23 bp, Artificial sequence
  SiRNA target sequence
tgtccaattgtttttaggggacc

SEQ ID NO: 120940 - DNA, 23 bp, Artificial sequence
  SiRNA target sequence
gtccaattgtttttaggggacca

SEQ ID NO: 120941 - DNA, 23 bp, Artificial sequence
  SiRNA target sequence
tccaattgtttttaggggaccaa

SEQ ID NO: 120942 - DNA, 23 bp, Artificial sequence
  SiRNA target sequence
ccaattgtttttaggggaccaaa

SEQ ID NO: 120943 - DNA, 23 bp, Artificial sequence
  SiRNA target sequence
caattgtttttaggggaccaaat

SEQ ID NO: 120944 - DNA, 23 bp, Artificial sequence
  SiRNA target sequence
aattgtttttaggggaccaaatg

SEQ ID NO: 120945 - DNA, 23 bp, Artificial sequence
  SiRNA target sequence
attgtttttaggggaccaaatgg

SEQ ID NO: 120946 - DNA, 23 bp, Artificial sequence
  SiRNA target sequence
ttgtttttaggggaccaaatgga

SEQ ID NO: 120947 - DNA, 23 bp, Artificial sequence
  SiRNA target sequence
tgtttttaggggaccaaatggat

SEQ ID NO: 120948 - DNA, 23 bp, Artificial sequence
  SiRNA target sequence
gtttttaggggaccaaatggatt

SEQ ID NO: 120949 - DNA, 23 bp, Artificial sequence
  SiRNA target sequence
tttttaggggaccaaatggattc

SEQ ID NO: 120950 - DNA, 23 bp, Artificial sequence
  SiRNA target sequence
ttttaggggaccaaatggattca

SEQ ID NO: 120951 - DNA, 23 bp, Artificial sequence
  SiRNA target sequence
tttaggggaccaaatggattcaa

SEQ ID NO: 120952 - DNA, 23 bp, Artificial sequence
  SiRNA target sequence
ttaggggaccaaatggattcaat

SEQ ID NO: 120953 - DNA, 23 bp, Artificial sequence
  SiRNA target sequence
taggggaccaaatggattcaata

SEQ ID NO: 120954 - DNA, 23 bp, Artificial sequence
  SiRNA target sequence
aggggaccaaatggattcaataa

SEQ ID NO: 120955 - DNA, 23 bp, Artificial sequence
  SiRNA target sequence
ggggaccaaatggattcaataat

SEQ ID NO: 120956 - DNA, 23 bp, Artificial sequence
  SiRNA target sequence
gggaccaaatggattcaataatg

SEQ ID NO: 120957 - DNA, 23 bp, Artificial sequence
  SiRNA target sequence
ggaccaaatggattcaataatgg

SEQ ID NO: 120958 - DNA, 23 bp, Artificial sequence
  SiRNA target sequence
gaccaaatggattcaataatggg

SEQ ID NO: 120959 - DNA, 23 bp, Artificial sequence
  SiRNA target sequence
accaaatggattcaataatgggt

SEQ ID NO: 120960 - DNA, 23 bp, Artificial sequence
  SiRNA target sequence
ccaaatggattcaataatgggta

SEQ ID NO: 120961 - DNA, 23 bp, Artificial sequence
  SiRNA target sequence
caaatggattcaataatgggtac

SEQ ID NO: 120962 - DNA, 23 bp, Artificial sequence
  SiRNA target sequence
aaatggattcaataatgggtacg

SEQ ID NO: 120963 - DNA, 23 bp, Artificial sequence
  SiRNA target sequence
aatggattcaataatgggtacgc

SEQ ID NO: 120964 - DNA, 23 bp, Artificial sequence
  SiRNA target sequence
atggattcaataatgggtacgct

SEQ ID NO: 120965 - DNA, 23 bp, Artificial sequence
  SiRNA target sequence
tggattcaataatgggtacgctg

SEQ ID NO: 120966 - DNA, 23 bp, Artificial sequence
  SiRNA target sequence
ggattcaataatgggtacgctgc

SEQ ID NO: 120967 - DNA, 23 bp, Artificial sequence
  SiRNA target sequence
gattcaataatgggtacgctgca

SEQ ID NO: 120968 - DNA, 23 bp, Artificial sequence
  SiRNA target sequence
attcaataatgggtacgctgcac

SEQ ID NO: 120969 - DNA, 23 bp, Artificial sequence
  SiRNA target sequence
ttcaataatgggtacgctgcaca

SEQ ID NO: 120970 - DNA, 23 bp, Artificial sequence
  SiRNA target sequence
tcaataatgggtacgctgcacag

SEQ ID NO: 120971 - DNA, 23 bp, Artificial sequence
  SiRNA target sequence
caataatgggtacgctgcacagc

SEQ ID NO: 120972 - DNA, 23 bp, Artificial sequence
  SiRNA target sequence
aataatgggtacgctgcacagca

SEQ ID NO: 120973 - DNA, 23 bp, Artificial sequence
  SiRNA target sequence
ataatgggtacgctgcacagcac

SEQ ID NO: 120974 - DNA, 23 bp, Artificial sequence
  SiRNA target sequence
taatgggtacgctgcacagcaca

SEQ ID NO: 120975 - DNA, 23 bp, Artificial sequence
  SiRNA target sequence
aatgggtacgctgcacagcacac

SEQ ID NO: 120976 - DNA, 23 bp, Artificial sequence
  SiRNA target sequence
atgggtacgctgcacagcacaca

SEQ ID NO: 120977 - DNA, 23 bp, Artificial sequence
  SiRNA target sequence
tgggtacgctgcacagcacacac

SEQ ID NO: 120978 - DNA, 23 bp, Artificial sequence
  SiRNA target sequence
gggtacgctgcacagcacacaca

SEQ ID NO: 120979 - DNA, 23 bp, Artificial sequence
  SiRNA target sequence
ggtacgctgcacagcacacacaa

SEQ ID NO: 120980 - DNA, 23 bp, Artificial sequence
  SiRNA target sequence
gtacgctgcacagcacacacaag

SEQ ID NO: 120981 - DNA, 23 bp, Artificial sequence
  SiRNA target sequence
tacgctgcacagcacacacaaga

SEQ ID NO: 120982 - DNA, 23 bp, Artificial sequence
  SiRNA target sequence
acgctgcacagcacacacaagat

SEQ ID NO: 120983 - DNA, 23 bp, Artificial sequence
  SiRNA target sequence
cgctgcacagcacacacaagatt

SEQ ID NO: 120984 - DNA, 23 bp, Artificial sequence
  SiRNA target sequence
gctgcacagcacacacaagattt

SEQ ID NO: 120985 - DNA, 23 bp, Artificial sequence
  SiRNA target sequence
ctgcacagcacacacaagatttt

SEQ ID NO: 120986 - DNA, 23 bp, Artificial sequence
  SiRNA target sequence
tgcacagcacacacaagattttg

SEQ ID NO: 120987 - DNA, 23 bp, Artificial sequence
  SiRNA target sequence
gcacagcacacacaagattttgc

SEQ ID NO: 120988 - DNA, 23 bp, Artificial sequence
  SiRNA target sequence
cacagcacacacaagattttgca

SEQ ID NO: 120989 - DNA, 23 bp, Artificial sequence
  SiRNA target sequence
acagcacacacaagattttgcac

SEQ ID NO: 120990 - DNA, 23 bp, Artificial sequence
  SiRNA target sequence
cagcacacacaagattttgcacc

SEQ ID NO: 120991 - DNA, 23 bp, Artificial sequence
  SiRNA target sequence
agcacacacaagattttgcacca

SEQ ID NO: 120992 - DNA, 23 bp, Artificial sequence
  SiRNA target sequence
gcacacacaagattttgcaccaa

SEQ ID NO: 120993 - DNA, 23 bp, Artificial sequence
  SiRNA target sequence
cacacacaagattttgcaccaat

SEQ ID NO: 120994 - DNA, 23 bp, Artificial sequence
  SiRNA target sequence
acacacaagattttgcaccaata

SEQ ID NO: 120995 - DNA, 23 bp, Artificial sequence
  SiRNA target sequence
cacacaagattttgcaccaatat

SEQ ID NO: 120996 - DNA, 23 bp, Artificial sequence
  SiRNA target sequence
acacaagattttgcaccaatata

SEQ ID NO: 120997 - DNA, 23 bp, Artificial sequence
  SiRNA target sequence
cacaagattttgcaccaatatat

SEQ ID NO: 120998 - DNA, 23 bp, Artificial sequence
  SiRNA target sequence
acaagattttgcaccaatatatg

SEQ ID NO: 120999 - DNA, 23 bp, Artificial sequence
  SiRNA target sequence
caagattttgcaccaatatatgg

SEQ ID NO: 121000 - DNA, 23 bp, Artificial sequence
  SiRNA target sequence
aagattttgcaccaatatatggt

SEQ ID NO: 121001 - DNA, 23 bp, Artificial sequence
  SiRNA target sequence
agattttgcaccaatatatggtt

SEQ ID NO: 121002 - DNA, 23 bp, Artificial sequence
  SiRNA target sequence
gattttgcaccaatatatggttc

SEQ ID NO: 121003 - DNA, 23 bp, Artificial sequence
  SiRNA target sequence
attttgcaccaatatatggttct

SEQ ID NO: 121004 - DNA, 23 bp, Artificial sequence
  SiRNA target sequence
ttttgcaccaatatatggttcta

SEQ ID NO: 121005 - DNA, 23 bp, Artificial sequence
  SiRNA target sequence
tttgcaccaatatatggttctat

SEQ ID NO: 121006 - DNA, 23 bp, Artificial sequence
  SiRNA target sequence
ttgcaccaatatatggttctatt

SEQ ID NO: 121007 - DNA, 23 bp, Artificial sequence
  SiRNA target sequence
tgcaccaatatatggttctattc

SEQ ID NO: 121008 - DNA, 23 bp, Artificial sequence
  SiRNA target sequence
gcaccaatatatggttctattcc

SEQ ID NO: 121009 - DNA, 23 bp, Artificial sequence
  SiRNA target sequence
caccaatatatggttctattcca

SEQ ID NO: 121010 - DNA, 23 bp, Artificial sequence
  SiRNA target sequence
accaatatatggttctattccag

SEQ ID NO: 121011 - DNA, 23 bp, Artificial sequence
  SiRNA target sequence
ccaatatatggttctattccagg

SEQ ID NO: 121012 - DNA, 23 bp, Artificial sequence
  SiRNA target sequence
caatatatggttctattccaggc

SEQ ID NO: 121013 - DNA, 23 bp, Artificial sequence
  SiRNA target sequence
aatatatggttctattccaggcc

SEQ ID NO: 121014 - DNA, 23 bp, Artificial sequence
  SiRNA target sequence
atatatggttctattccaggcct

SEQ ID NO: 121015 - DNA, 23 bp, Artificial sequence
  SiRNA target sequence
tatatggttctattccaggcctt

SEQ ID NO: 121016 - DNA, 23 bp, Artificial sequence
  SiRNA target sequence
atatggttctattccaggcctta

SEQ ID NO: 121017 - DNA, 23 bp, Artificial sequence
  SiRNA target sequence
tatggttctattccaggccttaa

SEQ ID NO: 121018 - DNA, 23 bp, Artificial sequence
  SiRNA target sequence
atggttctattccaggccttaag

SEQ ID NO: 121019 - DNA, 23 bp, Artificial sequence
  SiRNA target sequence
tggttctattccaggccttaagg

SEQ ID NO: 121020 - DNA, 23 bp, Artificial sequence
  SiRNA target sequence
ggttctattccaggccttaaggt

SEQ ID NO: 121021 - DNA, 23 bp, Artificial sequence
  SiRNA target sequence
gttctattccaggccttaaggtg

SEQ ID NO: 121022 - DNA, 23 bp, Artificial sequence
  SiRNA target sequence
ttctattccaggccttaaggtgg

SEQ ID NO: 121023 - DNA, 23 bp, Artificial sequence
  SiRNA target sequence
tctattccaggccttaaggtggt

SEQ ID NO: 121024 - DNA, 23 bp, Artificial sequence
  SiRNA target sequence
ctattccaggccttaaggtggtt

SEQ ID NO: 121025 - DNA, 23 bp, Artificial sequence
  SiRNA target sequence
tattccaggccttaaggtggttt

SEQ ID NO: 121026 - DNA, 23 bp, Artificial sequence
  SiRNA target sequence
attccaggccttaaggtggtttg

SEQ ID NO: 121027 - DNA, 23 bp, Artificial sequence
  SiRNA target sequence
ttccaggccttaaggtggtttgt

SEQ ID NO: 121028 - DNA, 23 bp, Artificial sequence
  SiRNA target sequence
tccaggccttaaggtggtttgtc

SEQ ID NO: 121029 - DNA, 23 bp, Artificial sequence
  SiRNA target sequence
ccaggccttaaggtggtttgtcc

SEQ ID NO: 121030 - DNA, 23 bp, Artificial sequence
  SiRNA target sequence
caggccttaaggtggtttgtcct

SEQ ID NO: 121031 - DNA, 23 bp, Artificial sequence
  SiRNA target sequence
aggccttaaggtggtttgtcctt

SEQ ID NO: 121032 - DNA, 23 bp, Artificial sequence
  SiRNA target sequence
ggccttaaggtggtttgtcctta

SEQ ID NO: 121033 - DNA, 23 bp, Artificial sequence
  SiRNA target sequence
gccttaaggtggtttgtccttat

SEQ ID NO: 121034 - DNA, 23 bp, Artificial sequence
  SiRNA target sequence
ccttaaggtggtttgtccttata

SEQ ID NO: 121035 - DNA, 23 bp, Artificial sequence
  SiRNA target sequence
cttaaggtggtttgtccttatac

SEQ ID NO: 121036 - DNA, 23 bp, Artificial sequence
  SiRNA target sequence
ttaaggtggtttgtccttatacg

SEQ ID NO: 121037 - DNA, 23 bp, Artificial sequence
  SiRNA target sequence
taaggtggtttgtccttatacgg

SEQ ID NO: 121038 - DNA, 23 bp, Artificial sequence
  SiRNA target sequence
aaggtggtttgtccttatacggg

SEQ ID NO: 121039 - DNA, 23 bp, Artificial sequence
  SiRNA target sequence
aggtggtttgtccttatacgggt

SEQ ID NO: 121040 - DNA, 23 bp, Artificial sequence
  SiRNA target sequence
ggtggtttgtccttatacgggta

SEQ ID NO: 121041 - DNA, 23 bp, Artificial sequence
  SiRNA target sequence
gtggtttgtccttatacgggtaa

SEQ ID NO: 121042 - DNA, 23 bp, Artificial sequence
  SiRNA target sequence
tggtttgtccttatacgggtaaa

SEQ ID NO: 121043 - DNA, 23 bp, Artificial sequence
  SiRNA target sequence
ggtttgtccttatacgggtaaag

SEQ ID NO: 121044 - DNA, 23 bp, Artificial sequence
  SiRNA target sequence
gtttgtccttatacgggtaaaga

SEQ ID NO: 121045 - DNA, 23 bp, Artificial sequence
  SiRNA target sequence
tttgtccttatacgggtaaagac

SEQ ID NO: 121046 - DNA, 23 bp, Artificial sequence
  SiRNA target sequence
ttgtccttatacgggtaaagacc

SEQ ID NO: 121047 - DNA, 23 bp, Artificial sequence
  SiRNA target sequence
tgtccttatacgggtaaagacca

SEQ ID NO: 121048 - DNA, 23 bp, Artificial sequence
  SiRNA target sequence
gtccttatacgggtaaagaccat

SEQ ID NO: 121049 - DNA, 23 bp, Artificial sequence
  SiRNA target sequence
tccttatacgggtaaagaccata

SEQ ID NO: 121050 - DNA, 23 bp, Artificial sequence
  SiRNA target sequence
ccttatacgggtaaagaccataa

SEQ ID NO: 121051 - DNA, 23 bp, Artificial sequence
  SiRNA target sequence
cttatacgggtaaagaccataaa

SEQ ID NO: 121052 - DNA, 23 bp, Artificial sequence
  SiRNA target sequence
ttatacgggtaaagaccataaag

SEQ ID NO: 121053 - DNA, 23 bp, Artificial sequence
  SiRNA target sequence
tatacgggtaaagaccataaagg

SEQ ID NO: 121054 - DNA, 23 bp, Artificial sequence
  SiRNA target sequence
atacgggtaaagaccataaagga

SEQ ID NO: 121055 - DNA, 23 bp, Artificial sequence
  SiRNA target sequence
tacgggtaaagaccataaaggac

SEQ ID NO: 121056 - DNA, 23 bp, Artificial sequence
  SiRNA target sequence
acgggtaaagaccataaaggact

SEQ ID NO: 121057 - DNA, 23 bp, Artificial sequence
  SiRNA target sequence
cgggtaaagaccataaaggactt

SEQ ID NO: 121058 - DNA, 23 bp, Artificial sequence
  SiRNA target sequence
gggtaaagaccataaaggacttt

SEQ ID NO: 121059 - DNA, 23 bp, Artificial sequence
  SiRNA target sequence
ggtaaagaccataaaggactttt

SEQ ID NO: 121060 - DNA, 23 bp, Artificial sequence
  SiRNA target sequence
gtaaagaccataaaggactttta

SEQ ID NO: 121061 - DNA, 23 bp, Artificial sequence
  SiRNA target sequence
taaagaccataaaggacttttaa

SEQ ID NO: 121062 - DNA, 23 bp, Artificial sequence
  SiRNA target sequence
aaagaccataaaggacttttaaa

SEQ ID NO: 121063 - DNA, 23 bp, Artificial sequence
  SiRNA target sequence
aagaccataaaggacttttaaaa

SEQ ID NO: 121064 - DNA, 23 bp, Artificial sequence
  SiRNA target sequence
agaccataaaggacttttaaaaa

SEQ ID NO: 121065 - DNA, 23 bp, Artificial sequence
  SiRNA target sequence
gaccataaaggacttttaaaaag

SEQ ID NO: 121066 - DNA, 23 bp, Artificial sequence
  SiRNA target sequence
accataaaggacttttaaaaagc

SEQ ID NO: 121067 - DNA, 23 bp, Artificial sequence
  SiRNA target sequence
ccataaaggacttttaaaaagcg

SEQ ID NO: 121068 - DNA, 23 bp, Artificial sequence
  SiRNA target sequence
cataaaggacttttaaaaagcgc

SEQ ID NO: 121069 - DNA, 23 bp, Artificial sequence
  SiRNA target sequence
ataaaggacttttaaaaagcgct

SEQ ID NO: 121070 - DNA, 23 bp, Artificial sequence
  SiRNA target sequence
taaaggacttttaaaaagcgcta

SEQ ID NO: 121071 - DNA, 23 bp, Artificial sequence
  SiRNA target sequence
aaaggacttttaaaaagcgctat

SEQ ID NO: 121072 - DNA, 23 bp, Artificial sequence
  SiRNA target sequence
aaggacttttaaaaagcgctatt

SEQ ID NO: 121073 - DNA, 23 bp, Artificial sequence
  SiRNA target sequence
aggacttttaaaaagcgctatta

SEQ ID NO: 121074 - DNA, 23 bp, Artificial sequence
  SiRNA target sequence
ggacttttaaaaagcgctattag

SEQ ID NO: 121075 - DNA, 23 bp, Artificial sequence
  SiRNA target sequence
gacttttaaaaagcgctattaga

SEQ ID NO: 121076 - DNA, 23 bp, Artificial sequence
  SiRNA target sequence
acttttaaaaagcgctattagag

SEQ ID NO: 121077 - DNA, 23 bp, Artificial sequence
  SiRNA target sequence
cttttaaaaagcgctattagaga

SEQ ID NO: 121078 - DNA, 23 bp, Artificial sequence
  SiRNA target sequence
ttttaaaaagcgctattagagac

SEQ ID NO: 121079 - DNA, 23 bp, Artificial sequence
  SiRNA target sequence
tttaaaaagcgctattagagaca

SEQ ID NO: 121080 - DNA, 23 bp, Artificial sequence
  SiRNA target sequence
ttaaaaagcgctattagagacaa

SEQ ID NO: 121081 - DNA, 23 bp, Artificial sequence
  SiRNA target sequence
taaaaagcgctattagagacaat

SEQ ID NO: 121082 - DNA, 23 bp, Artificial sequence
  SiRNA target sequence
aaaaagcgctattagagacaata

SEQ ID NO: 121083 - DNA, 23 bp, Artificial sequence
  SiRNA target sequence
aaaagcgctattagagacaataa

SEQ ID NO: 121084 - DNA, 23 bp, Artificial sequence
  SiRNA target sequence
aaagcgctattagagacaataac

SEQ ID NO: 121085 - DNA, 23 bp, Artificial sequence
  SiRNA target sequence
aagcgctattagagacaataacc

SEQ ID NO: 121086 - DNA, 23 bp, Artificial sequence
  SiRNA target sequence
agcgctattagagacaataaccc

SEQ ID NO: 121087 - DNA, 23 bp, Artificial sequence
  SiRNA target sequence
gcgctattagagacaataacccg

SEQ ID NO: 121088 - DNA, 23 bp, Artificial sequence
  SiRNA target sequence
cgctattagagacaataacccgg

SEQ ID NO: 121089 - DNA, 23 bp, Artificial sequence
  SiRNA target sequence
gctattagagacaataacccggt

SEQ ID NO: 121090 - DNA, 23 bp, Artificial sequence
  SiRNA target sequence
ctattagagacaataacccggtt

SEQ ID NO: 121091 - DNA, 23 bp, Artificial sequence
  SiRNA target sequence
tattagagacaataacccggtta

SEQ ID NO: 121092 - DNA, 23 bp, Artificial sequence
  SiRNA target sequence
attagagacaataacccggttat

SEQ ID NO: 121093 - DNA, 23 bp, Artificial sequence
  SiRNA target sequence
ttagagacaataacccggttata

SEQ ID NO: 121094 - DNA, 23 bp, Artificial sequence
  SiRNA target sequence
tagagacaataacccggttatat

SEQ ID NO: 121095 - DNA, 23 bp, Artificial sequence
  SiRNA target sequence
agagacaataacccggttatatt

SEQ ID NO: 121096 - DNA, 23 bp, Artificial sequence
  SiRNA target sequence
gagacaataacccggttatattt

SEQ ID NO: 121097 - DNA, 23 bp, Artificial sequence
  SiRNA target sequence
agacaataacccggttatatttc

SEQ ID NO: 121098 - DNA, 23 bp, Artificial sequence
  SiRNA target sequence
gacaataacccggttatatttct

SEQ ID NO: 121099 - DNA, 23 bp, Artificial sequence
  SiRNA target sequence
acaataacccggttatatttctt

SEQ ID NO: 121100 - DNA, 23 bp, Artificial sequence
  SiRNA target sequence
caataacccggttatatttcttg

SEQ ID NO: 121101 - DNA, 23 bp, Artificial sequence
  SiRNA target sequence
aataacccggttatatttcttga

SEQ ID NO: 121102 - DNA, 23 bp, Artificial sequence
  SiRNA target sequence
ataacccggttatatttcttgag

SEQ ID NO: 121103 - DNA, 23 bp, Artificial sequence
  SiRNA target sequence
taacccggttatatttcttgaga

SEQ ID NO: 121104 - DNA, 23 bp, Artificial sequence
  SiRNA target sequence
aacccggttatatttcttgagaa

SEQ ID NO: 121105 - DNA, 23 bp, Artificial sequence
  SiRNA target sequence
acccggttatatttcttgagaat

SEQ ID NO: 121106 - DNA, 23 bp, Artificial sequence
  SiRNA target sequence
cccggttatatttcttgagaatg

SEQ ID NO: 121107 - DNA, 23 bp, Artificial sequence
  SiRNA target sequence
ccggttatatttcttgagaatga

SEQ ID NO: 121108 - DNA, 23 bp, Artificial sequence
  SiRNA target sequence
cggttatatttcttgagaatgaa

SEQ ID NO: 121109 - DNA, 23 bp, Artificial sequence
  SiRNA target sequence
ggttatatttcttgagaatgaaa

SEQ ID NO: 121110 - DNA, 23 bp, Artificial sequence
  SiRNA target sequence
gttatatttcttgagaatgaaat

SEQ ID NO: 121111 - DNA, 23 bp, Artificial sequence
  SiRNA target sequence
ttatatttcttgagaatgaaata

SEQ ID NO: 121112 - DNA, 23 bp, Artificial sequence
  SiRNA target sequence
tatatttcttgagaatgaaatat

SEQ ID NO: 121113 - DNA, 23 bp, Artificial sequence
  SiRNA target sequence
atatttcttgagaatgaaatatt

SEQ ID NO: 121114 - DNA, 23 bp, Artificial sequence
  SiRNA target sequence
tatttcttgagaatgaaatatta

SEQ ID NO: 121115 - DNA, 23 bp, Artificial sequence
  SiRNA target sequence
atttcttgagaatgaaatattat

SEQ ID NO: 121116 - DNA, 23 bp, Artificial sequence
  SiRNA target sequence
tttcttgagaatgaaatattata

SEQ ID NO: 121117 - DNA, 23 bp, Artificial sequence
  SiRNA target sequence
ttcttgagaatgaaatattatat

SEQ ID NO: 121118 - DNA, 23 bp, Artificial sequence
  SiRNA target sequence
tcttgagaatgaaatattatata

SEQ ID NO: 121119 - DNA, 23 bp, Artificial sequence
  SiRNA target sequence
cttgagaatgaaatattatataa

SEQ ID NO: 121120 - DNA, 23 bp, Artificial sequence
  SiRNA target sequence
ttgagaatgaaatattatataaa

SEQ ID NO: 121121 - DNA, 23 bp, Artificial sequence
  SiRNA target sequence
tgagaatgaaatattatataaag

SEQ ID NO: 121122 - DNA, 23 bp, Artificial sequence
  SiRNA target sequence
gagaatgaaatattatataaaga

SEQ ID NO: 121123 - DNA, 23 bp, Artificial sequence
  SiRNA target sequence
agaatgaaatattatataaagat

SEQ ID NO: 121124 - DNA, 23 bp, Artificial sequence
  SiRNA target sequence
gaatgaaatattatataaagata

SEQ ID NO: 121125 - DNA, 23 bp, Artificial sequence
  SiRNA target sequence
aatgaaatattatataaagataa

SEQ ID NO: 121126 - DNA, 23 bp, Artificial sequence
  SiRNA target sequence
atgaaatattatataaagataaa

SEQ ID NO: 121127 - DNA, 23 bp, Artificial sequence
  SiRNA target sequence
tgaaatattatataaagataaat

SEQ ID NO: 121128 - DNA, 23 bp, Artificial sequence
  SiRNA target sequence
gaaatattatataaagataaata

SEQ ID NO: 121129 - DNA, 23 bp, Artificial sequence
  SiRNA target sequence
aaatattatataaagataaatac

SEQ ID NO: 121130 - DNA, 23 bp, Artificial sequence
  SiRNA target sequence
aatattatataaagataaatacc

SEQ ID NO: 121131 - DNA, 23 bp, Artificial sequence
  SiRNA target sequence
atattatataaagataaatacct

SEQ ID NO: 121132 - DNA, 23 bp, Artificial sequence
  SiRNA target sequence
tattatataaagataaatacctt

SEQ ID NO: 121133 - DNA, 23 bp, Artificial sequence
  SiRNA target sequence
attatataaagataaataccttg

SEQ ID NO: 121134 - DNA, 23 bp, Artificial sequence
  SiRNA target sequence
ttatataaagataaataccttga

SEQ ID NO: 121135 - DNA, 23 bp, Artificial sequence
  SiRNA target sequence
tatataaagataaataccttgaa

SEQ ID NO: 121136 - DNA, 23 bp, Artificial sequence
  SiRNA target sequence
atataaagataaataccttgaag

SEQ ID NO: 121137 - DNA, 23 bp, Artificial sequence
  SiRNA target sequence
tataaagataaataccttgaagt

SEQ ID NO: 121138 - DNA, 23 bp, Artificial sequence
  SiRNA target sequence
ataaagataaataccttgaagtg

SEQ ID NO: 121139 - DNA, 23 bp, Artificial sequence
  SiRNA target sequence
taaagataaataccttgaagtgt

SEQ ID NO: 121140 - DNA, 23 bp, Artificial sequence
  SiRNA target sequence
aaagataaataccttgaagtgtc

SEQ ID NO: 121141 - DNA, 23 bp, Artificial sequence
  SiRNA target sequence
aagataaataccttgaagtgtct

SEQ ID NO: 121142 - DNA, 23 bp, Artificial sequence
  SiRNA target sequence
agataaataccttgaagtgtcta

SEQ ID NO: 121143 - DNA, 23 bp, Artificial sequence
  SiRNA target sequence
gataaataccttgaagtgtctaa

SEQ ID NO: 121144 - DNA, 23 bp, Artificial sequence
  SiRNA target sequence
ataaataccttgaagtgtctaat

SEQ ID NO: 121145 - DNA, 23 bp, Artificial sequence
  SiRNA target sequence
taaataccttgaagtgtctaata

SEQ ID NO: 121146 - DNA, 23 bp, Artificial sequence
  SiRNA target sequence
aaataccttgaagtgtctaataa

SEQ ID NO: 121147 - DNA, 23 bp, Artificial sequence
  SiRNA target sequence
aataccttgaagtgtctaataat

SEQ ID NO: 121148 - DNA, 23 bp, Artificial sequence
  SiRNA target sequence
ataccttgaagtgtctaataatt

SEQ ID NO: 121149 - DNA, 23 bp, Artificial sequence
  SiRNA target sequence
taccttgaagtgtctaataatta

SEQ ID NO: 121150 - DNA, 23 bp, Artificial sequence
  SiRNA target sequence
accttgaagtgtctaataattat

SEQ ID NO: 121151 - DNA, 23 bp, Artificial sequence
  SiRNA target sequence
ccttgaagtgtctaataattata

SEQ ID NO: 121152 - DNA, 23 bp, Artificial sequence
  SiRNA target sequence
cttgaagtgtctaataattatat

SEQ ID NO: 121153 - DNA, 23 bp, Artificial sequence
  SiRNA target sequence
ttgaagtgtctaataattatatt

SEQ ID NO: 121154 - DNA, 23 bp, Artificial sequence
  SiRNA target sequence
tgaagtgtctaataattatattc

SEQ ID NO: 121155 - DNA, 23 bp, Artificial sequence
  SiRNA target sequence
gaagtgtctaataattatattca

SEQ ID NO: 121156 - DNA, 23 bp, Artificial sequence
  SiRNA target sequence
aagtgtctaataattatattcaa

SEQ ID NO: 121157 - DNA, 23 bp, Artificial sequence
  SiRNA target sequence
agtgtctaataattatattcaac

SEQ ID NO: 121158 - DNA, 23 bp, Artificial sequence
  SiRNA target sequence
gtgtctaataattatattcaacc

SEQ ID NO: 121159 - DNA, 23 bp, Artificial sequence
  SiRNA target sequence
tgtctaataattatattcaacca

SEQ ID NO: 121160 - DNA, 23 bp, Artificial sequence
  SiRNA target sequence
gtctaataattatattcaaccac

SEQ ID NO: 121161 - DNA, 23 bp, Artificial sequence
  SiRNA target sequence
tctaataattatattcaaccact

SEQ ID NO: 121162 - DNA, 23 bp, Artificial sequence
  SiRNA target sequence
ctaataattatattcaaccactt

SEQ ID NO: 121163 - DNA, 23 bp, Artificial sequence
  SiRNA target sequence
taataattatattcaaccacttg

SEQ ID NO: 121164 - DNA, 23 bp, Artificial sequence
  SiRNA target sequence
aataattatattcaaccacttga

SEQ ID NO: 121165 - DNA, 23 bp, Artificial sequence
  SiRNA target sequence
ataattatattcaaccacttgac

SEQ ID NO: 121166 - DNA, 23 bp, Artificial sequence
  SiRNA target sequence
taattatattcaaccacttgaca

SEQ ID NO: 121167 - DNA, 23 bp, Artificial sequence
  SiRNA target sequence
aattatattcaaccacttgacaa

SEQ ID NO: 121168 - DNA, 23 bp, Artificial sequence
  SiRNA target sequence
attatattcaaccacttgacaag

SEQ ID NO: 121169 - DNA, 23 bp, Artificial sequence
  SiRNA target sequence
ttatattcaaccacttgacaagg

SEQ ID NO: 121170 - DNA, 23 bp, Artificial sequence
  SiRNA target sequence
tatattcaaccacttgacaaggc

SEQ ID NO: 121171 - DNA, 23 bp, Artificial sequence
  SiRNA target sequence
atattcaaccacttgacaaggca

SEQ ID NO: 121172 - DNA, 23 bp, Artificial sequence
  SiRNA target sequence
tattcaaccacttgacaaggcag

SEQ ID NO: 121173 - DNA, 23 bp, Artificial sequence
  SiRNA target sequence
attcaaccacttgacaaggcagt

SEQ ID NO: 121174 - DNA, 23 bp, Artificial sequence
  SiRNA target sequence
ttcaaccacttgacaaggcagta

SEQ ID NO: 121175 - DNA, 23 bp, Artificial sequence
  SiRNA target sequence
tcaaccacttgacaaggcagtaa

SEQ ID NO: 121176 - DNA, 23 bp, Artificial sequence
  SiRNA target sequence
caaccacttgacaaggcagtaat

SEQ ID NO: 121177 - DNA, 23 bp, Artificial sequence
  SiRNA target sequence
aaccacttgacaaggcagtaatt

SEQ ID NO: 121178 - DNA, 23 bp, Artificial sequence
  SiRNA target sequence
accacttgacaaggcagtaattg

SEQ ID NO: 121179 - DNA, 23 bp, Artificial sequence
  SiRNA target sequence
ccacttgacaaggcagtaattga

SEQ ID NO: 121180 - DNA, 23 bp, Artificial sequence
  SiRNA target sequence
cacttgacaaggcagtaattgaa

SEQ ID NO: 121181 - DNA, 23 bp, Artificial sequence
  SiRNA target sequence
acttgacaaggcagtaattgaaa

SEQ ID NO: 121182 - DNA, 23 bp, Artificial sequence
  SiRNA target sequence
cttgacaaggcagtaattgaaaa

SEQ ID NO: 121183 - DNA, 23 bp, Artificial sequence
  SiRNA target sequence
ttgacaaggcagtaattgaaaaa

SEQ ID NO: 121184 - DNA, 23 bp, Artificial sequence
  SiRNA target sequence
tgacaaggcagtaattgaaaaaa

SEQ ID NO: 121185 - DNA, 23 bp, Artificial sequence
  SiRNA target sequence
gacaaggcagtaattgaaaaaaa

SEQ ID NO: 121186 - DNA, 23 bp, Artificial sequence
  SiRNA target sequence
acaaggcagtaattgaaaaaaat

SEQ ID NO: 121187 - DNA, 23 bp, Artificial sequence
  SiRNA target sequence
caaggcagtaattgaaaaaaatg

SEQ ID NO: 121188 - DNA, 23 bp, Artificial sequence
  SiRNA target sequence
aaggcagtaattgaaaaaaatgg

SEQ ID NO: 121189 - DNA, 23 bp, Artificial sequence
  SiRNA target sequence
aggcagtaattgaaaaaaatggt

SEQ ID NO: 121190 - DNA, 23 bp, Artificial sequence
  SiRNA target sequence
ggcagtaattgaaaaaaatggtg

SEQ ID NO: 121191 - DNA, 23 bp, Artificial sequence
  SiRNA target sequence
gcagtaattgaaaaaaatggtgt

SEQ ID NO: 121192 - DNA, 23 bp, Artificial sequence
  SiRNA target sequence
cagtaattgaaaaaaatggtgtt

SEQ ID NO: 121193 - DNA, 23 bp, Artificial sequence
  SiRNA target sequence
agtaattgaaaaaaatggtgttg

SEQ ID NO: 121194 - DNA, 23 bp, Artificial sequence
  SiRNA target sequence
gtaattgaaaaaaatggtgttga

SEQ ID NO: 121195 - DNA, 23 bp, Artificial sequence
  SiRNA target sequence
taattgaaaaaaatggtgttgac

SEQ ID NO: 121196 - DNA, 23 bp, Artificial sequence
  SiRNA target sequence
aattgaaaaaaatggtgttgacg

SEQ ID NO: 121197 - DNA, 23 bp, Artificial sequence
  SiRNA target sequence
attgaaaaaaatggtgttgacgt

SEQ ID NO: 121198 - DNA, 23 bp, Artificial sequence
  SiRNA target sequence
ttgaaaaaaatggtgttgacgtt

SEQ ID NO: 121199 - DNA, 23 bp, Artificial sequence
  SiRNA target sequence
tgaaaaaaatggtgttgacgtta

SEQ ID NO: 121200 - DNA, 23 bp, Artificial sequence
  SiRNA target sequence
gaaaaaaatggtgttgacgttac

SEQ ID NO: 121201 - DNA, 23 bp, Artificial sequence
  SiRNA target sequence
aaaaaaatggtgttgacgttaca

SEQ ID NO: 121202 - DNA, 23 bp, Artificial sequence
  SiRNA target sequence
aaaaaatggtgttgacgttacag

SEQ ID NO: 121203 - DNA, 23 bp, Artificial sequence
  SiRNA target sequence
aaaaatggtgttgacgttacagt

SEQ ID NO: 121204 - DNA, 23 bp, Artificial sequence
  SiRNA target sequence
aaaatggtgttgacgttacagtt

SEQ ID NO: 121205 - DNA, 23 bp, Artificial sequence
  SiRNA target sequence
aaatggtgttgacgttacagttt

SEQ ID NO: 121206 - DNA, 23 bp, Artificial sequence
  SiRNA target sequence
aatggtgttgacgttacagtttt

SEQ ID NO: 121207 - DNA, 23 bp, Artificial sequence
  SiRNA target sequence
atggtgttgacgttacagtttta

SEQ ID NO: 121208 - DNA, 23 bp, Artificial sequence
  SiRNA target sequence
tggtgttgacgttacagttttag

SEQ ID NO: 121209 - DNA, 23 bp, Artificial sequence
  SiRNA target sequence
ggtgttgacgttacagttttagg

SEQ ID NO: 121210 - DNA, 23 bp, Artificial sequence
  SiRNA target sequence
gtgttgacgttacagttttagga

SEQ ID NO: 121211 - DNA, 23 bp, Artificial sequence
  SiRNA target sequence
tgttgacgttacagttttaggaa

SEQ ID NO: 121212 - DNA, 23 bp, Artificial sequence
  SiRNA target sequence
gttgacgttacagttttaggaat

SEQ ID NO: 121213 - DNA, 23 bp, Artificial sequence
  SiRNA target sequence
ttgacgttacagttttaggaata

SEQ ID NO: 121214 - DNA, 23 bp, Artificial sequence
  SiRNA target sequence
tgacgttacagttttaggaatat

SEQ ID NO: 121215 - DNA, 23 bp, Artificial sequence
  SiRNA target sequence
gacgttacagttttaggaatatc

SEQ ID NO: 121216 - DNA, 23 bp, Artificial sequence
  SiRNA target sequence
acgttacagttttaggaatatca

SEQ ID NO: 121217 - DNA, 23 bp, Artificial sequence
  SiRNA target sequence
cgttacagttttaggaatatcaa

SEQ ID NO: 121218 - DNA, 23 bp, Artificial sequence
  SiRNA target sequence
gttacagttttaggaatatcaat

SEQ ID NO: 121219 - DNA, 23 bp, Artificial sequence
  SiRNA target sequence
ttacagttttaggaatatcaata

SEQ ID NO: 121220 - DNA, 23 bp, Artificial sequence
  SiRNA target sequence
tacagttttaggaatatcaataa

SEQ ID NO: 121221 - DNA, 23 bp, Artificial sequence
  SiRNA target sequence
acagttttaggaatatcaataag

SEQ ID NO: 121222 - DNA, 23 bp, Artificial sequence
  SiRNA target sequence
cagttttaggaatatcaataagt

SEQ ID NO: 121223 - DNA, 23 bp, Artificial sequence
  SiRNA target sequence
agttttaggaatatcaataagtc

SEQ ID NO: 121224 - DNA, 23 bp, Artificial sequence
  SiRNA target sequence
gttttaggaatatcaataagtct

SEQ ID NO: 121225 - DNA, 23 bp, Artificial sequence
  SiRNA target sequence
ttttaggaatatcaataagtctt

SEQ ID NO: 121226 - DNA, 23 bp, Artificial sequence
  SiRNA target sequence
tttaggaatatcaataagtctta

SEQ ID NO: 121227 - DNA, 23 bp, Artificial sequence
  SiRNA target sequence
ttaggaatatcaataagtcttaa

SEQ ID NO: 121228 - DNA, 23 bp, Artificial sequence
  SiRNA target sequence
taggaatatcaataagtcttaaa

SEQ ID NO: 121229 - DNA, 23 bp, Artificial sequence
  SiRNA target sequence
aggaatatcaataagtcttaaag

SEQ ID NO: 121230 - DNA, 23 bp, Artificial sequence
  SiRNA target sequence
ggaatatcaataagtcttaaaga

SEQ ID NO: 121231 - DNA, 23 bp, Artificial sequence
  SiRNA target sequence
gaatatcaataagtcttaaagaa

SEQ ID NO: 121232 - DNA, 23 bp, Artificial sequence
  SiRNA target sequence
aatatcaataagtcttaaagaaa

SEQ ID NO: 121233 - DNA, 23 bp, Artificial sequence
  SiRNA target sequence
atatcaataagtcttaaagaaat

SEQ ID NO: 121234 - DNA, 23 bp, Artificial sequence
  SiRNA target sequence
tatcaataagtcttaaagaaatt

SEQ ID NO: 121235 - DNA, 23 bp, Artificial sequence
  SiRNA target sequence
atcaataagtcttaaagaaattt

SEQ ID NO: 121236 - DNA, 23 bp, Artificial sequence
  SiRNA target sequence
tcaataagtcttaaagaaatttt

SEQ ID NO: 121237 - DNA, 23 bp, Artificial sequence
  SiRNA target sequence
caataagtcttaaagaaattttt

SEQ ID NO: 121238 - DNA, 23 bp, Artificial sequence
  SiRNA target sequence
aataagtcttaaagaaattttta

SEQ ID NO: 121239 - DNA, 23 bp, Artificial sequence
  SiRNA target sequence
ataagtcttaaagaaatttttaa

SEQ ID NO: 121240 - DNA, 23 bp, Artificial sequence
  SiRNA target sequence
taagtcttaaagaaatttttaaa

SEQ ID NO: 121241 - DNA, 23 bp, Artificial sequence
  SiRNA target sequence
aagtcttaaagaaatttttaaag

SEQ ID NO: 121242 - DNA, 23 bp, Artificial sequence
  SiRNA target sequence
agtcttaaagaaatttttaaagc

SEQ ID NO: 121243 - DNA, 23 bp, Artificial sequence
  SiRNA target sequence
gtcttaaagaaatttttaaagca

SEQ ID NO: 121244 - DNA, 23 bp, Artificial sequence
  SiRNA target sequence
tcttaaagaaatttttaaagcag

SEQ ID NO: 121245 - DNA, 23 bp, Artificial sequence
  SiRNA target sequence
cttaaagaaatttttaaagcaga

SEQ ID NO: 121246 - DNA, 23 bp, Artificial sequence
  SiRNA target sequence
ttaaagaaatttttaaagcagac

SEQ ID NO: 121247 - DNA, 23 bp, Artificial sequence
  SiRNA target sequence
taaagaaatttttaaagcagaca

SEQ ID NO: 121248 - DNA, 23 bp, Artificial sequence
  SiRNA target sequence
aaagaaatttttaaagcagacag

SEQ ID NO: 121249 - DNA, 23 bp, Artificial sequence
  SiRNA target sequence
aagaaatttttaaagcagacagt

SEQ ID NO: 121250 - DNA, 23 bp, Artificial sequence
  SiRNA target sequence
agaaatttttaaagcagacagtt

SEQ ID NO: 121251 - DNA, 23 bp, Artificial sequence
  SiRNA target sequence
gaaatttttaaagcagacagttt

SEQ ID NO: 121252 - DNA, 23 bp, Artificial sequence
  SiRNA target sequence
aaatttttaaagcagacagtttg

SEQ ID NO: 121253 - DNA, 23 bp, Artificial sequence
  SiRNA target sequence
aatttttaaagcagacagtttgt

SEQ ID NO: 121254 - DNA, 23 bp, Artificial sequence
  SiRNA target sequence
atttttaaagcagacagtttgtt

SEQ ID NO: 121255 - DNA, 23 bp, Artificial sequence
  SiRNA target sequence
tttttaaagcagacagtttgtta

SEQ ID NO: 121256 - DNA, 23 bp, Artificial sequence
  SiRNA target sequence
ttttaaagcagacagtttgttag

SEQ ID NO: 121257 - DNA, 23 bp, Artificial sequence
  SiRNA target sequence
tttaaagcagacagtttgttaga

SEQ ID NO: 121258 - DNA, 23 bp, Artificial sequence
  SiRNA target sequence
ttaaagcagacagtttgttagag

SEQ ID NO: 121259 - DNA, 23 bp, Artificial sequence
  SiRNA target sequence
taaagcagacagtttgttagaga

SEQ ID NO: 121260 - DNA, 23 bp, Artificial sequence
  SiRNA target sequence
aaagcagacagtttgttagagaa

SEQ ID NO: 121261 - DNA, 23 bp, Artificial sequence
  SiRNA target sequence
aagcagacagtttgttagagaaa

SEQ ID NO: 121262 - DNA, 23 bp, Artificial sequence
  SiRNA target sequence
agcagacagtttgttagagaaaa

SEQ ID NO: 121263 - DNA, 23 bp, Artificial sequence
  SiRNA target sequence
gcagacagtttgttagagaaaaa

SEQ ID NO: 121264 - DNA, 23 bp, Artificial sequence
  SiRNA target sequence
cagacagtttgttagagaaaaaa

SEQ ID NO: 121265 - DNA, 23 bp, Artificial sequence
  SiRNA target sequence
agacagtttgttagagaaaaaaa

SEQ ID NO: 121266 - DNA, 23 bp, Artificial sequence
  SiRNA target sequence
gacagtttgttagagaaaaaaaa

SEQ ID NO: 121267 - DNA, 23 bp, Artificial sequence
  SiRNA target sequence
acagtttgttagagaaaaaaaat

SEQ ID NO: 121268 - DNA, 23 bp, Artificial sequence
  SiRNA target sequence
cagtttgttagagaaaaaaaata

SEQ ID NO: 121269 - DNA, 23 bp, Artificial sequence
  SiRNA target sequence
agtttgttagagaaaaaaaatat

SEQ ID NO: 121270 - DNA, 23 bp, Artificial sequence
  SiRNA target sequence
gtttgttagagaaaaaaaatatc

SEQ ID NO: 121271 - DNA, 23 bp, Artificial sequence
  SiRNA target sequence
tttgttagagaaaaaaaatatcg

SEQ ID NO: 121272 - DNA, 23 bp, Artificial sequence
  SiRNA target sequence
ttgttagagaaaaaaaatatcga

SEQ ID NO: 121273 - DNA, 23 bp, Artificial sequence
  SiRNA target sequence
tgttagagaaaaaaaatatcgac

SEQ ID NO: 121274 - DNA, 23 bp, Artificial sequence
  SiRNA target sequence
gttagagaaaaaaaatatcgaca

SEQ ID NO: 121275 - DNA, 23 bp, Artificial sequence
  SiRNA target sequence
ttagagaaaaaaaatatcgacat

SEQ ID NO: 121276 - DNA, 23 bp, Artificial sequence
  SiRNA target sequence
tagagaaaaaaaatatcgacatt

SEQ ID NO: 121277 - DNA, 23 bp, Artificial sequence
  SiRNA target sequence
agagaaaaaaaatatcgacattg

SEQ ID NO: 121278 - DNA, 23 bp, Artificial sequence
  SiRNA target sequence
gagaaaaaaaatatcgacattga

SEQ ID NO: 121279 - DNA, 23 bp, Artificial sequence
  SiRNA target sequence
agaaaaaaaatatcgacattgag

SEQ ID NO: 121280 - DNA, 23 bp, Artificial sequence
  SiRNA target sequence
gaaaaaaaatatcgacattgaga

SEQ ID NO: 121281 - DNA, 23 bp, Artificial sequence
  SiRNA target sequence
aaaaaaaatatcgacattgagat

SEQ ID NO: 121282 - DNA, 23 bp, Artificial sequence
  SiRNA target sequence
aaaaaaatatcgacattgagata

SEQ ID NO: 121283 - DNA, 23 bp, Artificial sequence
  SiRNA target sequence
aaaaaatatcgacattgagataa

SEQ ID NO: 121284 - DNA, 23 bp, Artificial sequence
  SiRNA target sequence
aaaaatatcgacattgagataat

SEQ ID NO: 121285 - DNA, 23 bp, Artificial sequence
  SiRNA target sequence
aaaatatcgacattgagataatt

SEQ ID NO: 121286 - DNA, 23 bp, Artificial sequence
  SiRNA target sequence
aaatatcgacattgagataatta

SEQ ID NO: 121287 - DNA, 23 bp, Artificial sequence
  SiRNA target sequence
aatatcgacattgagataattaa

SEQ ID NO: 121288 - DNA, 23 bp, Artificial sequence
  SiRNA target sequence
atatcgacattgagataattaat

SEQ ID NO: 121289 - DNA, 23 bp, Artificial sequence
  SiRNA target sequence
tatcgacattgagataattaatc

SEQ ID NO: 121290 - DNA, 23 bp, Artificial sequence
  SiRNA target sequence
atcgacattgagataattaatct

SEQ ID NO: 121291 - DNA, 23 bp, Artificial sequence
  SiRNA target sequence
tcgacattgagataattaatctt

SEQ ID NO: 121292 - DNA, 23 bp, Artificial sequence
  SiRNA target sequence
cgacattgagataattaatcttg

SEQ ID NO: 121293 - DNA, 23 bp, Artificial sequence
  SiRNA target sequence
gacattgagataattaatcttgt

SEQ ID NO: 121294 - DNA, 23 bp, Artificial sequence
  SiRNA target sequence
acattgagataattaatcttgtg

SEQ ID NO: 121295 - DNA, 23 bp, Artificial sequence
  SiRNA target sequence
cattgagataattaatcttgtgt

SEQ ID NO: 121296 - DNA, 23 bp, Artificial sequence
  SiRNA target sequence
attgagataattaatcttgtgtc

SEQ ID NO: 121297 - DNA, 23 bp, Artificial sequence
  SiRNA target sequence
ttgagataattaatcttgtgtca

SEQ ID NO: 121298 - DNA, 23 bp, Artificial sequence
  SiRNA target sequence
tgagataattaatcttgtgtcaa

SEQ ID NO: 121299 - DNA, 23 bp, Artificial sequence
  SiRNA target sequence
gagataattaatcttgtgtcaat

SEQ ID NO: 121300 - DNA, 23 bp, Artificial sequence
  SiRNA target sequence
agataattaatcttgtgtcaata

SEQ ID NO: 121301 - DNA, 23 bp, Artificial sequence
  SiRNA target sequence
gataattaatcttgtgtcaataa

SEQ ID NO: 121302 - DNA, 23 bp, Artificial sequence
  SiRNA target sequence
ataattaatcttgtgtcaataaa

SEQ ID NO: 121303 - DNA, 23 bp, Artificial sequence
  SiRNA target sequence
taattaatcttgtgtcaataaaa

SEQ ID NO: 121304 - DNA, 23 bp, Artificial sequence
  SiRNA target sequence
aattaatcttgtgtcaataaaac

SEQ ID NO: 121305 - DNA, 23 bp, Artificial sequence
  SiRNA target sequence
attaatcttgtgtcaataaaacc

SEQ ID NO: 121306 - DNA, 23 bp, Artificial sequence
  SiRNA target sequence
ttaatcttgtgtcaataaaacca

SEQ ID NO: 121307 - DNA, 23 bp, Artificial sequence
  SiRNA target sequence
taatcttgtgtcaataaaaccaa

SEQ ID NO: 121308 - DNA, 23 bp, Artificial sequence
  SiRNA target sequence
aatcttgtgtcaataaaaccaat

SEQ ID NO: 121309 - DNA, 23 bp, Artificial sequence
  SiRNA target sequence
atcttgtgtcaataaaaccaatt

SEQ ID NO: 121310 - DNA, 23 bp, Artificial sequence
  SiRNA target sequence
tcttgtgtcaataaaaccaattg

SEQ ID NO: 121311 - DNA, 23 bp, Artificial sequence
  SiRNA target sequence
cttgtgtcaataaaaccaattga

SEQ ID NO: 121312 - DNA, 23 bp, Artificial sequence
  SiRNA target sequence
ttgtgtcaataaaaccaattgat

SEQ ID NO: 121313 - DNA, 23 bp, Artificial sequence
  SiRNA target sequence
tgtgtcaataaaaccaattgatt

SEQ ID NO: 121314 - DNA, 23 bp, Artificial sequence
  SiRNA target sequence
gtgtcaataaaaccaattgatta

SEQ ID NO: 121315 - DNA, 23 bp, Artificial sequence
  SiRNA target sequence
tgtcaataaaaccaattgattat

SEQ ID NO: 121316 - DNA, 23 bp, Artificial sequence
  SiRNA target sequence
gtcaataaaaccaattgattatg

SEQ ID NO: 121317 - DNA, 23 bp, Artificial sequence
  SiRNA target sequence
tcaataaaaccaattgattatgt

SEQ ID NO: 121318 - DNA, 23 bp, Artificial sequence
  SiRNA target sequence
caataaaaccaattgattatgtt

SEQ ID NO: 121319 - DNA, 23 bp, Artificial sequence
  SiRNA target sequence
aataaaaccaattgattatgtta

SEQ ID NO: 121320 - DNA, 23 bp, Artificial sequence
  SiRNA target sequence
ataaaaccaattgattatgttac

SEQ ID NO: 121321 - DNA, 23 bp, Artificial sequence
  SiRNA target sequence
taaaaccaattgattatgttact

SEQ ID NO: 121322 - DNA, 23 bp, Artificial sequence
  SiRNA target sequence
aaaaccaattgattatgttacta

SEQ ID NO: 121323 - DNA, 23 bp, Artificial sequence
  SiRNA target sequence
aaaccaattgattatgttactat

SEQ ID NO: 121324 - DNA, 23 bp, Artificial sequence
  SiRNA target sequence
aaccaattgattatgttactatt

SEQ ID NO: 121325 - DNA, 23 bp, Artificial sequence
  SiRNA target sequence
accaattgattatgttactattg

SEQ ID NO: 121326 - DNA, 23 bp, Artificial sequence
  SiRNA target sequence
ccaattgattatgttactattga

SEQ ID NO: 121327 - DNA, 23 bp, Artificial sequence
  SiRNA target sequence
caattgattatgttactattgaa

SEQ ID NO: 121328 - DNA, 23 bp, Artificial sequence
  SiRNA target sequence
aattgattatgttactattgaaa

SEQ ID NO: 121329 - DNA, 23 bp, Artificial sequence
  SiRNA target sequence
attgattatgttactattgaaat

SEQ ID NO: 121330 - DNA, 23 bp, Artificial sequence
  SiRNA target sequence
ttgattatgttactattgaaata

SEQ ID NO: 121331 - DNA, 23 bp, Artificial sequence
  SiRNA target sequence
tgattatgttactattgaaatat

SEQ ID NO: 121332 - DNA, 23 bp, Artificial sequence
  SiRNA target sequence
gattatgttactattgaaatatc

SEQ ID NO: 121333 - DNA, 23 bp, Artificial sequence
  SiRNA target sequence
attatgttactattgaaatatca

SEQ ID NO: 121334 - DNA, 23 bp, Artificial sequence
  SiRNA target sequence
ttatgttactattgaaatatcag

SEQ ID NO: 121335 - DNA, 23 bp, Artificial sequence
  SiRNA target sequence
tatgttactattgaaatatcagt

SEQ ID NO: 121336 - DNA, 23 bp, Artificial sequence
  SiRNA target sequence
atgttactattgaaatatcagtc

SEQ ID NO: 121337 - DNA, 23 bp, Artificial sequence
  SiRNA target sequence
tgttactattgaaatatcagtca

SEQ ID NO: 121338 - DNA, 23 bp, Artificial sequence
  SiRNA target sequence
gttactattgaaatatcagtcaa

SEQ ID NO: 121339 - DNA, 23 bp, Artificial sequence
  SiRNA target sequence
ttactattgaaatatcagtcaaa

SEQ ID NO: 121340 - DNA, 23 bp, Artificial sequence
  SiRNA target sequence
tactattgaaatatcagtcaaaa

SEQ ID NO: 121341 - DNA, 23 bp, Artificial sequence
  SiRNA target sequence
actattgaaatatcagtcaaaaa

SEQ ID NO: 121342 - DNA, 23 bp, Artificial sequence
  SiRNA target sequence
ctattgaaatatcagtcaaaaaa

SEQ ID NO: 121343 - DNA, 23 bp, Artificial sequence
  SiRNA target sequence
tattgaaatatcagtcaaaaaaa

SEQ ID NO: 121344 - DNA, 23 bp, Artificial sequence
  SiRNA target sequence
attgaaatatcagtcaaaaaaac

SEQ ID NO: 121345 - DNA, 23 bp, Artificial sequence
  SiRNA target sequence
ttgaaatatcagtcaaaaaaaca

SEQ ID NO: 121346 - DNA, 23 bp, Artificial sequence
  SiRNA target sequence
tgaaatatcagtcaaaaaaacac

SEQ ID NO: 121347 - DNA, 23 bp, Artificial sequence
  SiRNA target sequence
gaaatatcagtcaaaaaaacaca

SEQ ID NO: 121348 - DNA, 23 bp, Artificial sequence
  SiRNA target sequence
aaatatcagtcaaaaaaacacaa

SEQ ID NO: 121349 - DNA, 23 bp, Artificial sequence
  SiRNA target sequence
aatatcagtcaaaaaaacacaaa

SEQ ID NO: 121350 - DNA, 23 bp, Artificial sequence
  SiRNA target sequence
atatcagtcaaaaaaacacaaaa

SEQ ID NO: 121351 - DNA, 23 bp, Artificial sequence
  SiRNA target sequence
tatcagtcaaaaaaacacaaaag

SEQ ID NO: 121352 - DNA, 23 bp, Artificial sequence
  SiRNA target sequence
atcagtcaaaaaaacacaaaagt

SEQ ID NO: 121353 - DNA, 23 bp, Artificial sequence
  SiRNA target sequence
tcagtcaaaaaaacacaaaagtt

SEQ ID NO: 121354 - DNA, 23 bp, Artificial sequence
  SiRNA target sequence
cagtcaaaaaaacacaaaagtta

SEQ ID NO: 121355 - DNA, 23 bp, Artificial sequence
  SiRNA target sequence
agtcaaaaaaacacaaaagttag

SEQ ID NO: 121356 - DNA, 23 bp, Artificial sequence
  SiRNA target sequence
gtcaaaaaaacacaaaagttagt

SEQ ID NO: 121357 - DNA, 23 bp, Artificial sequence
  SiRNA target sequence
tcaaaaaaacacaaaagttagtg

SEQ ID NO: 121358 - DNA, 23 bp, Artificial sequence
  SiRNA target sequence
caaaaaaacacaaaagttagtga

SEQ ID NO: 121359 - DNA, 23 bp, Artificial sequence
  SiRNA target sequence
aaaaaaacacaaaagttagtgat

SEQ ID NO: 121360 - DNA, 23 bp, Artificial sequence
  SiRNA target sequence
aaaaaacacaaaagttagtgata

SEQ ID NO: 121361 - DNA, 23 bp, Artificial sequence
  SiRNA target sequence
aaaaacacaaaagttagtgatag

SEQ ID NO: 121362 - DNA, 23 bp, Artificial sequence
  SiRNA target sequence
aaaacacaaaagttagtgatagt

SEQ ID NO: 121363 - DNA, 23 bp, Artificial sequence
  SiRNA target sequence
aaacacaaaagttagtgatagtt

SEQ ID NO: 121364 - DNA, 23 bp, Artificial sequence
  SiRNA target sequence
aacacaaaagttagtgatagttg

SEQ ID NO: 121365 - DNA, 23 bp, Artificial sequence
  SiRNA target sequence
acacaaaagttagtgatagttga

SEQ ID NO: 121366 - DNA, 23 bp, Artificial sequence
  SiRNA target sequence
cacaaaagttagtgatagttgat

SEQ ID NO: 121367 - DNA, 23 bp, Artificial sequence
  SiRNA target sequence
acaaaagttagtgatagttgatt

SEQ ID NO: 121368 - DNA, 23 bp, Artificial sequence
  SiRNA target sequence
caaaagttagtgatagttgattt

SEQ ID NO: 121369 - DNA, 23 bp, Artificial sequence
  SiRNA target sequence
aaaagttagtgatagttgatttt

SEQ ID NO: 121370 - DNA, 23 bp, Artificial sequence
  SiRNA target sequence
aaagttagtgatagttgattttg

SEQ ID NO: 121371 - DNA, 23 bp, Artificial sequence
  SiRNA target sequence
aagttagtgatagttgattttgc

SEQ ID NO: 121372 - DNA, 23 bp, Artificial sequence
  SiRNA target sequence
agttagtgatagttgattttgca

SEQ ID NO: 121373 - DNA, 23 bp, Artificial sequence
  SiRNA target sequence
gttagtgatagttgattttgcat

SEQ ID NO: 121374 - DNA, 23 bp, Artificial sequence
  SiRNA target sequence
ttagtgatagttgattttgcata

SEQ ID NO: 121375 - DNA, 23 bp, Artificial sequence
  SiRNA target sequence
tagtgatagttgattttgcatat

SEQ ID NO: 121376 - DNA, 23 bp, Artificial sequence
  SiRNA target sequence
agtgatagttgattttgcatatc

SEQ ID NO: 121377 - DNA, 23 bp, Artificial sequence
  SiRNA target sequence
gtgatagttgattttgcatatcc

SEQ ID NO: 121378 - DNA, 23 bp, Artificial sequence
  SiRNA target sequence
tgatagttgattttgcatatcct

SEQ ID NO: 121379 - DNA, 23 bp, Artificial sequence
  SiRNA target sequence
gatagttgattttgcatatccta

SEQ ID NO: 121380 - DNA, 23 bp, Artificial sequence
  SiRNA target sequence
atagttgattttgcatatcctac

SEQ ID NO: 121381 - DNA, 23 bp, Artificial sequence
  SiRNA target sequence
tagttgattttgcatatcctact

SEQ ID NO: 121382 - DNA, 23 bp, Artificial sequence
  SiRNA target sequence
agttgattttgcatatcctactt

SEQ ID NO: 121383 - DNA, 23 bp, Artificial sequence
  SiRNA target sequence
gttgattttgcatatcctacttt

SEQ ID NO: 121384 - DNA, 23 bp, Artificial sequence
  SiRNA target sequence
ttgattttgcatatcctactttc

SEQ ID NO: 121385 - DNA, 23 bp, Artificial sequence
  SiRNA target sequence
tgattttgcatatcctactttca

SEQ ID NO: 121386 - DNA, 23 bp, Artificial sequence
  SiRNA target sequence
gattttgcatatcctactttcaa

SEQ ID NO: 121387 - DNA, 23 bp, Artificial sequence
  SiRNA target sequence
attttgcatatcctactttcaat

SEQ ID NO: 121388 - DNA, 23 bp, Artificial sequence
  SiRNA target sequence
ttttgcatatcctactttcaata

SEQ ID NO: 121389 - DNA, 23 bp, Artificial sequence
  SiRNA target sequence
tttgcatatcctactttcaatat

SEQ ID NO: 121390 - DNA, 23 bp, Artificial sequence
  SiRNA target sequence
ttgcatatcctactttcaatatt

SEQ ID NO: 121391 - DNA, 23 bp, Artificial sequence
  SiRNA target sequence
tgcatatcctactttcaatattg

SEQ ID NO: 121392 - DNA, 23 bp, Artificial sequence
  SiRNA target sequence
gcatatcctactttcaatattgc

SEQ ID NO: 121393 - DNA, 23 bp, Artificial sequence
  SiRNA target sequence
catatcctactttcaatattgcg

SEQ ID NO: 121394 - DNA, 23 bp, Artificial sequence
  SiRNA target sequence
atatcctactttcaatattgcga

SEQ ID NO: 121395 - DNA, 23 bp, Artificial sequence
  SiRNA target sequence
tatcctactttcaatattgcgag

SEQ ID NO: 121396 - DNA, 23 bp, Artificial sequence
  SiRNA target sequence
atcctactttcaatattgcgagt

SEQ ID NO: 121397 - DNA, 23 bp, Artificial sequence
  SiRNA target sequence
tcctactttcaatattgcgagtg

SEQ ID NO: 121398 - DNA, 23 bp, Artificial sequence
  SiRNA target sequence
cctactttcaatattgcgagtga

SEQ ID NO: 121399 - DNA, 23 bp, Artificial sequence
  SiRNA target sequence
ctactttcaatattgcgagtgaa

SEQ ID NO: 121400 - DNA, 23 bp, Artificial sequence
  SiRNA target sequence
tactttcaatattgcgagtgaaa

SEQ ID NO: 121401 - DNA, 23 bp, Artificial sequence
  SiRNA target sequence
actttcaatattgcgagtgaaat

SEQ ID NO: 121402 - DNA, 23 bp, Artificial sequence
  SiRNA target sequence
ctttcaatattgcgagtgaaata

SEQ ID NO: 121403 - DNA, 23 bp, Artificial sequence
  SiRNA target sequence
tttcaatattgcgagtgaaatag

SEQ ID NO: 121404 - DNA, 23 bp, Artificial sequence
  SiRNA target sequence
ttcaatattgcgagtgaaatagc

SEQ ID NO: 121405 - DNA, 23 bp, Artificial sequence
  SiRNA target sequence
tcaatattgcgagtgaaatagct

SEQ ID NO: 121406 - DNA, 23 bp, Artificial sequence
  SiRNA target sequence
caatattgcgagtgaaatagctg

SEQ ID NO: 121407 - DNA, 23 bp, Artificial sequence
  SiRNA target sequence
aatattgcgagtgaaatagctgc

SEQ ID NO: 121408 - DNA, 23 bp, Artificial sequence
  SiRNA target sequence
atattgcgagtgaaatagctgcg

SEQ ID NO: 121409 - DNA, 23 bp, Artificial sequence
  SiRNA target sequence
tattgcgagtgaaatagctgcgc

SEQ ID NO: 121410 - DNA, 23 bp, Artificial sequence
  SiRNA target sequence
attgcgagtgaaatagctgcgca

SEQ ID NO: 121411 - DNA, 23 bp, Artificial sequence
  SiRNA target sequence
ttgcgagtgaaatagctgcgcac

SEQ ID NO: 121412 - DNA, 23 bp, Artificial sequence
  SiRNA target sequence
tgcgagtgaaatagctgcgcact

SEQ ID NO: 121413 - DNA, 23 bp, Artificial sequence
  SiRNA target sequence
gcgagtgaaatagctgcgcactt

SEQ ID NO: 121414 - DNA, 23 bp, Artificial sequence
  SiRNA target sequence
cgagtgaaatagctgcgcacttt

SEQ ID NO: 121415 - DNA, 23 bp, Artificial sequence
  SiRNA target sequence
gagtgaaatagctgcgcactttt

SEQ ID NO: 121416 - DNA, 23 bp, Artificial sequence
  SiRNA target sequence
agtgaaatagctgcgcactttta

SEQ ID NO: 121417 - DNA, 23 bp, Artificial sequence
  SiRNA target sequence
gtgaaatagctgcgcacttttac

SEQ ID NO: 121418 - DNA, 23 bp, Artificial sequence
  SiRNA target sequence
tgaaatagctgcgcacttttacg

SEQ ID NO: 121419 - DNA, 23 bp, Artificial sequence
  SiRNA target sequence
gaaatagctgcgcacttttacga

SEQ ID NO: 121420 - DNA, 23 bp, Artificial sequence
  SiRNA target sequence
aaatagctgcgcacttttacgaa

SEQ ID NO: 121421 - DNA, 23 bp, Artificial sequence
  SiRNA target sequence
aatagctgcgcacttttacgaaa

SEQ ID NO: 121422 - DNA, 23 bp, Artificial sequence
  SiRNA target sequence
atagctgcgcacttttacgaaaa

SEQ ID NO: 121423 - DNA, 23 bp, Artificial sequence
  SiRNA target sequence
tagctgcgcacttttacgaaaaa

SEQ ID NO: 121424 - DNA, 23 bp, Artificial sequence
  SiRNA target sequence
agctgcgcacttttacgaaaaat

SEQ ID NO: 121425 - DNA, 23 bp, Artificial sequence
  SiRNA target sequence
gctgcgcacttttacgaaaaatt

SEQ ID NO: 121426 - DNA, 23 bp, Artificial sequence
  SiRNA target sequence
ctgcgcacttttacgaaaaattt

SEQ ID NO: 121427 - DNA, 23 bp, Artificial sequence
  SiRNA target sequence
tgcgcacttttacgaaaaattta

SEQ ID NO: 121428 - DNA, 23 bp, Artificial sequence
  SiRNA target sequence
gcgcacttttacgaaaaatttaa

SEQ ID NO: 121429 - DNA, 23 bp, Artificial sequence
  SiRNA target sequence
cgcacttttacgaaaaatttaaa

SEQ ID NO: 121430 - DNA, 23 bp, Artificial sequence
  SiRNA target sequence
gcacttttacgaaaaatttaaag

SEQ ID NO: 121431 - DNA, 23 bp, Artificial sequence
  SiRNA target sequence
cacttttacgaaaaatttaaaga

SEQ ID NO: 121432 - DNA, 23 bp, Artificial sequence
  SiRNA target sequence
acttttacgaaaaatttaaagat

SEQ ID NO: 121433 - DNA, 23 bp, Artificial sequence
  SiRNA target sequence
cttttacgaaaaatttaaagata

SEQ ID NO: 121434 - DNA, 23 bp, Artificial sequence
  SiRNA target sequence
ttttacgaaaaatttaaagatat

SEQ ID NO: 121435 - DNA, 23 bp, Artificial sequence
  SiRNA target sequence
tttacgaaaaatttaaagatata

SEQ ID NO: 121436 - DNA, 23 bp, Artificial sequence
  SiRNA target sequence
ttacgaaaaatttaaagatataa

SEQ ID NO: 121437 - DNA, 23 bp, Artificial sequence
  SiRNA target sequence
tacgaaaaatttaaagatataaa

SEQ ID NO: 121438 - DNA, 23 bp, Artificial sequence
  SiRNA target sequence
acgaaaaatttaaagatataaaa

SEQ ID NO: 121439 - DNA, 23 bp, Artificial sequence
  SiRNA target sequence
cgaaaaatttaaagatataaaaa

SEQ ID NO: 121440 - DNA, 23 bp, Artificial sequence
  SiRNA target sequence
gaaaaatttaaagatataaaaat

SEQ ID NO: 121441 - DNA, 23 bp, Artificial sequence
  SiRNA target sequence
aaaaatttaaagatataaaaatt

SEQ ID NO: 121442 - DNA, 23 bp, Artificial sequence
  SiRNA target sequence
aaaatttaaagatataaaaatta

SEQ ID NO: 121443 - DNA, 23 bp, Artificial sequence
  SiRNA target sequence
aaatttaaagatataaaaattat

SEQ ID NO: 121444 - DNA, 23 bp, Artificial sequence
  SiRNA target sequence
aatttaaagatataaaaattatg

SEQ ID NO: 121445 - DNA, 23 bp, Artificial sequence
  SiRNA target sequence
atttaaagatataaaaattatgc

SEQ ID NO: 121446 - DNA, 23 bp, Artificial sequence
  SiRNA target sequence
tttaaagatataaaaattatgcg

SEQ ID NO: 121447 - DNA, 23 bp, Artificial sequence
  SiRNA target sequence
ttaaagatataaaaattatgcgt

SEQ ID NO: 121448 - DNA, 23 bp, Artificial sequence
  SiRNA target sequence
taaagatataaaaattatgcgtg

SEQ ID NO: 121449 - DNA, 23 bp, Artificial sequence
  SiRNA target sequence
aaagatataaaaattatgcgtgt

SEQ ID NO: 121450 - DNA, 23 bp, Artificial sequence
  SiRNA target sequence
aagatataaaaattatgcgtgtt

SEQ ID NO: 121451 - DNA, 23 bp, Artificial sequence
  SiRNA target sequence
agatataaaaattatgcgtgttc

SEQ ID NO: 121452 - DNA, 23 bp, Artificial sequence
  SiRNA target sequence
gatataaaaattatgcgtgttct

SEQ ID NO: 121453 - DNA, 23 bp, Artificial sequence
  SiRNA target sequence
atataaaaattatgcgtgttctt

SEQ ID NO: 121454 - DNA, 23 bp, Artificial sequence
  SiRNA target sequence
tataaaaattatgcgtgttcttg

SEQ ID NO: 121455 - DNA, 23 bp, Artificial sequence
  SiRNA target sequence
ataaaaattatgcgtgttcttgc

SEQ ID NO: 121456 - DNA, 23 bp, Artificial sequence
  SiRNA target sequence
taaaaattatgcgtgttcttgcg

SEQ ID NO: 121457 - DNA, 23 bp, Artificial sequence
  SiRNA target sequence
aaaaattatgcgtgttcttgcgc

SEQ ID NO: 121458 - DNA, 23 bp, Artificial sequence
  SiRNA target sequence
aaaattatgcgtgttcttgcgca

SEQ ID NO: 121459 - DNA, 23 bp, Artificial sequence
  SiRNA target sequence
aaattatgcgtgttcttgcgcaa

SEQ ID NO: 121460 - DNA, 23 bp, Artificial sequence
  SiRNA target sequence
aattatgcgtgttcttgcgcaag

SEQ ID NO: 121461 - DNA, 23 bp, Artificial sequence
  SiRNA target sequence
attatgcgtgttcttgcgcaaga

SEQ ID NO: 121462 - DNA, 23 bp, Artificial sequence
  SiRNA target sequence
ttatgcgtgttcttgcgcaagat

SEQ ID NO: 121463 - DNA, 23 bp, Artificial sequence
  SiRNA target sequence
tatgcgtgttcttgcgcaagata

SEQ ID NO: 121464 - DNA, 23 bp, Artificial sequence
  SiRNA target sequence
atgcgtgttcttgcgcaagatat

SEQ ID NO: 121465 - DNA, 23 bp, Artificial sequence
  SiRNA target sequence
tgcgtgttcttgcgcaagatatt

SEQ ID NO: 121466 - DNA, 23 bp, Artificial sequence
  SiRNA target sequence
gcgtgttcttgcgcaagatattc

SEQ ID NO: 121467 - DNA, 23 bp, Artificial sequence
  SiRNA target sequence
cgtgttcttgcgcaagatattcc

SEQ ID NO: 121468 - DNA, 23 bp, Artificial sequence
  SiRNA target sequence
gtgttcttgcgcaagatattcct

SEQ ID NO: 121469 - DNA, 23 bp, Artificial sequence
  SiRNA target sequence
tgttcttgcgcaagatattccta

SEQ ID NO: 121470 - DNA, 23 bp, Artificial sequence
  SiRNA target sequence
gttcttgcgcaagatattcctac

SEQ ID NO: 121471 - DNA, 23 bp, Artificial sequence
  SiRNA target sequence
ttcttgcgcaagatattcctaca

SEQ ID NO: 121472 - DNA, 23 bp, Artificial sequence
  SiRNA target sequence
tcttgcgcaagatattcctacac

SEQ ID NO: 121473 - DNA, 23 bp, Artificial sequence
  SiRNA target sequence
cttgcgcaagatattcctacacc

SEQ ID NO: 121474 - DNA, 23 bp, Artificial sequence
  SiRNA target sequence
ttgcgcaagatattcctacaccg

SEQ ID NO: 121475 - DNA, 23 bp, Artificial sequence
  SiRNA target sequence
tgcgcaagatattcctacaccgt

SEQ ID NO: 121476 - DNA, 23 bp, Artificial sequence
  SiRNA target sequence
gcgcaagatattcctacaccgta

SEQ ID NO: 121477 - DNA, 23 bp, Artificial sequence
  SiRNA target sequence
cgcaagatattcctacaccgtat

SEQ ID NO: 121478 - DNA, 23 bp, Artificial sequence
  SiRNA target sequence
gcaagatattcctacaccgtatg

SEQ ID NO: 121479 - DNA, 23 bp, Artificial sequence
  SiRNA target sequence
caagatattcctacaccgtatgc

SEQ ID NO: 121480 - DNA, 23 bp, Artificial sequence
  SiRNA target sequence
aagatattcctacaccgtatgca

SEQ ID NO: 121481 - DNA, 23 bp, Artificial sequence
  SiRNA target sequence
agatattcctacaccgtatgcac

SEQ ID NO: 121482 - DNA, 23 bp, Artificial sequence
  SiRNA target sequence
gatattcctacaccgtatgcact

SEQ ID NO: 121483 - DNA, 23 bp, Artificial sequence
  SiRNA target sequence
atattcctacaccgtatgcactt

SEQ ID NO: 121484 - DNA, 23 bp, Artificial sequence
  SiRNA target sequence
tattcctacaccgtatgcactta

SEQ ID NO: 121485 - DNA, 23 bp, Artificial sequence
  SiRNA target sequence
attcctacaccgtatgcacttaa

SEQ ID NO: 121486 - DNA, 23 bp, Artificial sequence
  SiRNA target sequence
ttcctacaccgtatgcacttaat

SEQ ID NO: 121487 - DNA, 23 bp, Artificial sequence
  SiRNA target sequence
tcctacaccgtatgcacttaatc

SEQ ID NO: 121488 - DNA, 23 bp, Artificial sequence
  SiRNA target sequence
cctacaccgtatgcacttaatct

SEQ ID NO: 121489 - DNA, 23 bp, Artificial sequence
  SiRNA target sequence
ctacaccgtatgcacttaatctt

SEQ ID NO: 121490 - DNA, 23 bp, Artificial sequence
  SiRNA target sequence
tacaccgtatgcacttaatcttg

SEQ ID NO: 121491 - DNA, 23 bp, Artificial sequence
  SiRNA target sequence
acaccgtatgcacttaatcttga

SEQ ID NO: 121492 - DNA, 23 bp, Artificial sequence
  SiRNA target sequence
caccgtatgcacttaatcttgaa

SEQ ID NO: 121493 - DNA, 23 bp, Artificial sequence
  SiRNA target sequence
accgtatgcacttaatcttgaaa

SEQ ID NO: 121494 - DNA, 23 bp, Artificial sequence
  SiRNA target sequence
ccgtatgcacttaatcttgaaaa

SEQ ID NO: 121495 - DNA, 23 bp, Artificial sequence
  SiRNA target sequence
cgtatgcacttaatcttgaaaaa

SEQ ID NO: 121496 - DNA, 23 bp, Artificial sequence
  SiRNA target sequence
gtatgcacttaatcttgaaaaaa

SEQ ID NO: 121497 - DNA, 23 bp, Artificial sequence
  SiRNA target sequence
tatgcacttaatcttgaaaaaat

SEQ ID NO: 121498 - DNA, 23 bp, Artificial sequence
  SiRNA target sequence
atgcacttaatcttgaaaaaatg

SEQ ID NO: 121499 - DNA, 23 bp, Artificial sequence
  SiRNA target sequence
tgcacttaatcttgaaaaaatgt

SEQ ID NO: 121500 - DNA, 23 bp, Artificial sequence
  SiRNA target sequence
gcacttaatcttgaaaaaatgtc

SEQ ID NO: 121501 - DNA, 23 bp, Artificial sequence
  SiRNA target sequence
cacttaatcttgaaaaaatgtct

SEQ ID NO: 121502 - DNA, 23 bp, Artificial sequence
  SiRNA target sequence
acttaatcttgaaaaaatgtctt

SEQ ID NO: 121503 - DNA, 23 bp, Artificial sequence
  SiRNA target sequence
cttaatcttgaaaaaatgtctta

SEQ ID NO: 121504 - DNA, 23 bp, Artificial sequence
  SiRNA target sequence
ttaatcttgaaaaaatgtcttat

SEQ ID NO: 121505 - DNA, 23 bp, Artificial sequence
  SiRNA target sequence
taatcttgaaaaaatgtcttatc

SEQ ID NO: 121506 - DNA, 23 bp, Artificial sequence
  SiRNA target sequence
aatcttgaaaaaatgtcttatcc

SEQ ID NO: 121507 - DNA, 23 bp, Artificial sequence
  SiRNA target sequence
atcttgaaaaaatgtcttatccg

SEQ ID NO: 121508 - DNA, 23 bp, Artificial sequence
  SiRNA target sequence
tcttgaaaaaatgtcttatccga

SEQ ID NO: 121509 - DNA, 23 bp, Artificial sequence
  SiRNA target sequence
cttgaaaaaatgtcttatccgac

SEQ ID NO: 121510 - DNA, 23 bp, Artificial sequence
  SiRNA target sequence
ttgaaaaaatgtcttatccgaca

SEQ ID NO: 121511 - DNA, 23 bp, Artificial sequence
  SiRNA target sequence
tgaaaaaatgtcttatccgacat

SEQ ID NO: 121512 - DNA, 23 bp, Artificial sequence
  SiRNA target sequence
gaaaaaatgtcttatccgacatg

SEQ ID NO: 121513 - DNA, 23 bp, Artificial sequence
  SiRNA target sequence
aaaaaatgtcttatccgacatgc

SEQ ID NO: 121514 - DNA, 23 bp, Artificial sequence
  SiRNA target sequence
aaaaatgtcttatccgacatgca

SEQ ID NO: 121515 - DNA, 23 bp, Artificial sequence
  SiRNA target sequence
aaaatgtcttatccgacatgcaa

SEQ ID NO: 121516 - DNA, 23 bp, Artificial sequence
  SiRNA target sequence
aaatgtcttatccgacatgcaat

SEQ ID NO: 121517 - DNA, 23 bp, Artificial sequence
  SiRNA target sequence
aatgtcttatccgacatgcaatg

SEQ ID NO: 121518 - DNA, 23 bp, Artificial sequence
  SiRNA target sequence
atgtcttatccgacatgcaatga

SEQ ID NO: 121519 - DNA, 23 bp, Artificial sequence
  SiRNA target sequence
tgtcttatccgacatgcaatgat

SEQ ID NO: 121520 - DNA, 23 bp, Artificial sequence
  SiRNA target sequence
gtcttatccgacatgcaatgata

SEQ ID NO: 121521 - DNA, 23 bp, Artificial sequence
  SiRNA target sequence
tcttatccgacatgcaatgatat

SEQ ID NO: 121522 - DNA, 23 bp, Artificial sequence
  SiRNA target sequence
cttatccgacatgcaatgatatt

SEQ ID NO: 121523 - DNA, 23 bp, Artificial sequence
  SiRNA target sequence
ttatccgacatgcaatgatattg

SEQ ID NO: 121524 - DNA, 23 bp, Artificial sequence
  SiRNA target sequence
tatccgacatgcaatgatattgt

SEQ ID NO: 121525 - DNA, 23 bp, Artificial sequence
  SiRNA target sequence
atccgacatgcaatgatattgta

SEQ ID NO: 121526 - DNA, 23 bp, Artificial sequence
  SiRNA target sequence
tccgacatgcaatgatattgtaa

SEQ ID NO: 121527 - DNA, 23 bp, Artificial sequence
  SiRNA target sequence
ccgacatgcaatgatattgtaaa

SEQ ID NO: 121528 - DNA, 23 bp, Artificial sequence
  SiRNA target sequence
cgacatgcaatgatattgtaaat

SEQ ID NO: 121529 - DNA, 23 bp, Artificial sequence
  SiRNA target sequence
gacatgcaatgatattgtaaatg

SEQ ID NO: 121530 - DNA, 23 bp, Artificial sequence
  SiRNA target sequence
acatgcaatgatattgtaaatgc

SEQ ID NO: 121531 - DNA, 23 bp, Artificial sequence
  SiRNA target sequence
catgcaatgatattgtaaatgct

SEQ ID NO: 121532 - DNA, 23 bp, Artificial sequence
  SiRNA target sequence
atgcaatgatattgtaaatgctg

SEQ ID NO: 121533 - DNA, 23 bp, Artificial sequence
  SiRNA target sequence
tgcaatgatattgtaaatgctgt

SEQ ID NO: 121534 - DNA, 23 bp, Artificial sequence
  SiRNA target sequence
gcaatgatattgtaaatgctgtt

SEQ ID NO: 121535 - DNA, 23 bp, Artificial sequence
  SiRNA target sequence
caatgatattgtaaatgctgtta

SEQ ID NO: 121536 - DNA, 23 bp, Artificial sequence
  SiRNA target sequence
aatgatattgtaaatgctgttac

SEQ ID NO: 121537 - DNA, 23 bp, Artificial sequence
  SiRNA target sequence
atgatattgtaaatgctgttaca

SEQ ID NO: 121538 - DNA, 23 bp, Artificial sequence
  SiRNA target sequence
tgatattgtaaatgctgttacaa

SEQ ID NO: 121539 - DNA, 23 bp, Artificial sequence
  SiRNA target sequence
gatattgtaaatgctgttacaaa

SEQ ID NO: 121540 - DNA, 23 bp, Artificial sequence
  SiRNA target sequence
atattgtaaatgctgttacaaaa

SEQ ID NO: 121541 - DNA, 23 bp, Artificial sequence
  SiRNA target sequence
tattgtaaatgctgttacaaaaa

SEQ ID NO: 121542 - DNA, 23 bp, Artificial sequence
  SiRNA target sequence
attgtaaatgctgttacaaaaat

SEQ ID NO: 121543 - DNA, 23 bp, Artificial sequence
  SiRNA target sequence
ttgtaaatgctgttacaaaaata

SEQ ID NO: 121544 - DNA, 23 bp, Artificial sequence
  SiRNA target sequence
tgtaaatgctgttacaaaaataa

SEQ ID NO: 121545 - DNA, 23 bp, Artificial sequence
  SiRNA target sequence
gtaaatgctgttacaaaaataaa

SEQ ID NO: 121546 - DNA, 23 bp, Artificial sequence
  SiRNA target sequence
taaatgctgttacaaaaataaat

SEQ ID NO: 121547 - DNA, 23 bp, Artificial sequence
  SiRNA target sequence
aaatgctgttacaaaaataaatt

SEQ ID NO: 121548 - DNA, 23 bp, Artificial sequence
  SiRNA target sequence
aatgctgttacaaaaataaattc

SEQ ID NO: 121549 - DNA, 23 bp, Artificial sequence
  SiRNA target sequence
atgctgttacaaaaataaattca

SEQ ID NO: 121550 - DNA, 23 bp, Artificial sequence
  SiRNA target sequence
tgctgttacaaaaataaattcat

SEQ ID NO: 121551 - DNA, 23 bp, Artificial sequence
  SiRNA target sequence
gctgttacaaaaataaattcata

SEQ ID NO: 121552 - DNA, 23 bp, Artificial sequence
  SiRNA target sequence
ctgttacaaaaataaattcatag

SEQ ID NO: 121553 - DNA, 24 bp, Artificial sequence
  SiRNA target sequence
atgatagaaattcgcgatcttata

SEQ ID NO: 121554 - DNA, 24 bp, Artificial sequence
  SiRNA target sequence
tgatagaaattcgcgatcttataa

SEQ ID NO: 121555 - DNA, 24 bp, Artificial sequence
  SiRNA target sequence
gatagaaattcgcgatcttataaa

SEQ ID NO: 121556 - DNA, 24 bp, Artificial sequence
  SiRNA target sequence
atagaaattcgcgatcttataaat

SEQ ID NO: 121557 - DNA, 24 bp, Artificial sequence
  SiRNA target sequence
tagaaattcgcgatcttataaatc

SEQ ID NO: 121558 - DNA, 24 bp, Artificial sequence
  SiRNA target sequence
agaaattcgcgatcttataaatca

SEQ ID NO: 121559 - DNA, 24 bp, Artificial sequence
  SiRNA target sequence
gaaattcgcgatcttataaatcaa

SEQ ID NO: 121560 - DNA, 24 bp, Artificial sequence
  SiRNA target sequence
aaattcgcgatcttataaatcaag

SEQ ID NO: 121561 - DNA, 24 bp, Artificial sequence
  SiRNA target sequence
aattcgcgatcttataaatcaagc

SEQ ID NO: 121562 - DNA, 24 bp, Artificial sequence
  SiRNA target sequence
attcgcgatcttataaatcaagca

SEQ ID NO: 121563 - DNA, 24 bp, Artificial sequence
  SiRNA target sequence
ttcgcgatcttataaatcaagcat

SEQ ID NO: 121564 - DNA, 24 bp, Artificial sequence
  SiRNA target sequence
tcgcgatcttataaatcaagcatt

SEQ ID NO: 121565 - DNA, 24 bp, Artificial sequence
  SiRNA target sequence
cgcgatcttataaatcaagcattg

SEQ ID NO: 121566 - DNA, 24 bp, Artificial sequence
  SiRNA target sequence
gcgatcttataaatcaagcattgg

SEQ ID NO: 121567 - DNA, 24 bp, Artificial sequence
  SiRNA target sequence
cgatcttataaatcaagcattgga

SEQ ID NO: 121568 - DNA, 24 bp, Artificial sequence
  SiRNA target sequence
gatcttataaatcaagcattggat

SEQ ID NO: 121569 - DNA, 24 bp, Artificial sequence
  SiRNA target sequence
atcttataaatcaagcattggatg

SEQ ID NO: 121570 - DNA, 24 bp, Artificial sequence
  SiRNA target sequence
tcttataaatcaagcattggatga

SEQ ID NO: 121571 - DNA, 24 bp, Artificial sequence
  SiRNA target sequence
cttataaatcaagcattggatgag

SEQ ID NO: 121572 - DNA, 24 bp, Artificial sequence
  SiRNA target sequence
ttataaatcaagcattggatgagg

SEQ ID NO: 121573 - DNA, 24 bp, Artificial sequence
  SiRNA target sequence
tataaatcaagcattggatgagga

SEQ ID NO: 121574 - DNA, 24 bp, Artificial sequence
  SiRNA target sequence
ataaatcaagcattggatgaggaa

SEQ ID NO: 121575 - DNA, 24 bp, Artificial sequence
  SiRNA target sequence
taaatcaagcattggatgaggaaa

SEQ ID NO: 121576 - DNA, 24 bp, Artificial sequence
  SiRNA target sequence
aaatcaagcattggatgaggaaat

SEQ ID NO: 121577 - DNA, 24 bp, Artificial sequence
  SiRNA target sequence
aatcaagcattggatgaggaaatg

SEQ ID NO: 121578 - DNA, 24 bp, Artificial sequence
  SiRNA target sequence
atcaagcattggatgaggaaatgg

SEQ ID NO: 121579 - DNA, 24 bp, Artificial sequence
  SiRNA target sequence
tcaagcattggatgaggaaatggg

SEQ ID NO: 121580 - DNA, 24 bp, Artificial sequence
  SiRNA target sequence
caagcattggatgaggaaatggga

SEQ ID NO: 121581 - DNA, 24 bp, Artificial sequence
  SiRNA target sequence
aagcattggatgaggaaatgggaa

SEQ ID NO: 121582 - DNA, 24 bp, Artificial sequence
  SiRNA target sequence
agcattggatgaggaaatgggaat

SEQ ID NO: 121583 - DNA, 24 bp, Artificial sequence
  SiRNA target sequence
gcattggatgaggaaatgggaatg

SEQ ID NO: 121584 - DNA, 24 bp, Artificial sequence
  SiRNA target sequence
cattggatgaggaaatgggaatgg

SEQ ID NO: 121585 - DNA, 24 bp, Artificial sequence
  SiRNA target sequence
attggatgaggaaatgggaatgga

SEQ ID NO: 121586 - DNA, 24 bp, Artificial sequence
  SiRNA target sequence
ttggatgaggaaatgggaatggat

SEQ ID NO: 121587 - DNA, 24 bp, Artificial sequence
  SiRNA target sequence
tggatgaggaaatgggaatggatc

SEQ ID NO: 121588 - DNA, 24 bp, Artificial sequence
  SiRNA target sequence
ggatgaggaaatgggaatggatca

SEQ ID NO: 121589 - DNA, 24 bp, Artificial sequence
  SiRNA target sequence
gatgaggaaatgggaatggatcat

SEQ ID NO: 121590 - DNA, 24 bp, Artificial sequence
  SiRNA target sequence
atgaggaaatgggaatggatcata

SEQ ID NO: 121591 - DNA, 24 bp, Artificial sequence
  SiRNA target sequence
tgaggaaatgggaatggatcataa

SEQ ID NO: 121592 - DNA, 24 bp, Artificial sequence
  SiRNA target sequence
gaggaaatgggaatggatcataat

SEQ ID NO: 121593 - DNA, 24 bp, Artificial sequence
  SiRNA target sequence
aggaaatgggaatggatcataatg

SEQ ID NO: 121594 - DNA, 24 bp, Artificial sequence
  SiRNA target sequence
ggaaatgggaatggatcataatgt

SEQ ID NO: 121595 - DNA, 24 bp, Artificial sequence
  SiRNA target sequence
gaaatgggaatggatcataatgta

SEQ ID NO: 121596 - DNA, 24 bp, Artificial sequence
  SiRNA target sequence
aaatgggaatggatcataatgtat

SEQ ID NO: 121597 - DNA, 24 bp, Artificial sequence
  SiRNA target sequence
aatgggaatggatcataatgtata

SEQ ID NO: 121598 - DNA, 24 bp, Artificial sequence
  SiRNA target sequence
atgggaatggatcataatgtatat

SEQ ID NO: 121599 - DNA, 24 bp, Artificial sequence
  SiRNA target sequence
tgggaatggatcataatgtatata

SEQ ID NO: 121600 - DNA, 24 bp, Artificial sequence
  SiRNA target sequence
gggaatggatcataatgtatatat

SEQ ID NO: 121601 - DNA, 24 bp, Artificial sequence
  SiRNA target sequence
ggaatggatcataatgtatatata

SEQ ID NO: 121602 - DNA, 24 bp, Artificial sequence
  SiRNA target sequence
gaatggatcataatgtatatataa

SEQ ID NO: 121603 - DNA, 24 bp, Artificial sequence
  SiRNA target sequence
aatggatcataatgtatatataat

SEQ ID NO: 121604 - DNA, 24 bp, Artificial sequence
  SiRNA target sequence
atggatcataatgtatatataata

SEQ ID NO: 121605 - DNA, 24 bp, Artificial sequence
  SiRNA target sequence
tggatcataatgtatatataatag

SEQ ID NO: 121606 - DNA, 24 bp, Artificial sequence
  SiRNA target sequence
ggatcataatgtatatataatagg

SEQ ID NO: 121607 - DNA, 24 bp, Artificial sequence
  SiRNA target sequence
gatcataatgtatatataatagga

SEQ ID NO: 121608 - DNA, 24 bp, Artificial sequence
  SiRNA target sequence
atcataatgtatatataataggag

SEQ ID NO: 121609 - DNA, 24 bp, Artificial sequence
  SiRNA target sequence
tcataatgtatatataataggaga

SEQ ID NO: 121610 - DNA, 24 bp, Artificial sequence
  SiRNA target sequence
cataatgtatatataataggagaa

SEQ ID NO: 121611 - DNA, 24 bp, Artificial sequence
  SiRNA target sequence
ataatgtatatataataggagaag

SEQ ID NO: 121612 - DNA, 24 bp, Artificial sequence
  SiRNA target sequence
taatgtatatataataggagaaga

SEQ ID NO: 121613 - DNA, 24 bp, Artificial sequence
  SiRNA target sequence
aatgtatatataataggagaagaa

SEQ ID NO: 121614 - DNA, 24 bp, Artificial sequence
  SiRNA target sequence
atgtatatataataggagaagaag

SEQ ID NO: 121615 - DNA, 24 bp, Artificial sequence
  SiRNA target sequence
tgtatatataataggagaagaagt

SEQ ID NO: 121616 - DNA, 24 bp, Artificial sequence
  SiRNA target sequence
gtatatataataggagaagaagta

SEQ ID NO: 121617 - DNA, 24 bp, Artificial sequence
  SiRNA target sequence
tatatataataggagaagaagtag

SEQ ID NO: 121618 - DNA, 24 bp, Artificial sequence
  SiRNA target sequence
atatataataggagaagaagtagg

SEQ ID NO: 121619 - DNA, 24 bp, Artificial sequence
  SiRNA target sequence
tatataataggagaagaagtaggc

SEQ ID NO: 121620 - DNA, 24 bp, Artificial sequence
  SiRNA target sequence
atataataggagaagaagtaggca

SEQ ID NO: 121621 - DNA, 24 bp, Artificial sequence
  SiRNA target sequence
tataataggagaagaagtaggcat

SEQ ID NO: 121622 - DNA, 24 bp, Artificial sequence
  SiRNA target sequence
ataataggagaagaagtaggcatc

SEQ ID NO: 121623 - DNA, 24 bp, Artificial sequence
  SiRNA target sequence
taataggagaagaagtaggcatct

SEQ ID NO: 121624 - DNA, 24 bp, Artificial sequence
  SiRNA target sequence
aataggagaagaagtaggcatctc

SEQ ID NO: 121625 - DNA, 24 bp, Artificial sequence
  SiRNA target sequence
ataggagaagaagtaggcatctct

SEQ ID NO: 121626 - DNA, 24 bp, Artificial sequence
  SiRNA target sequence
taggagaagaagtaggcatctctg

SEQ ID NO: 121627 - DNA, 24 bp, Artificial sequence
  SiRNA target sequence
aggagaagaagtaggcatctctgg

SEQ ID NO: 121628 - DNA, 24 bp, Artificial sequence
  SiRNA target sequence
ggagaagaagtaggcatctctggt

SEQ ID NO: 121629 - DNA, 24 bp, Artificial sequence
  SiRNA target sequence
gagaagaagtaggcatctctggtg

SEQ ID NO: 121630 - DNA, 24 bp, Artificial sequence
  SiRNA target sequence
agaagaagtaggcatctctggtgg

SEQ ID NO: 121631 - DNA, 24 bp, Artificial sequence
  SiRNA target sequence
gaagaagtaggcatctctggtggt

SEQ ID NO: 121632 - DNA, 24 bp, Artificial sequence
  SiRNA target sequence
aagaagtaggcatctctggtggtc

SEQ ID NO: 121633 - DNA, 24 bp, Artificial sequence
  SiRNA target sequence
agaagtaggcatctctggtggtcc

SEQ ID NO: 121634 - DNA, 24 bp, Artificial sequence
  SiRNA target sequence
gaagtaggcatctctggtggtcct

SEQ ID NO: 121635 - DNA, 24 bp, Artificial sequence
  SiRNA target sequence
aagtaggcatctctggtggtcctc

SEQ ID NO: 121636 - DNA, 24 bp, Artificial sequence
  SiRNA target sequence
agtaggcatctctggtggtcctca

SEQ ID NO: 121637 - DNA, 24 bp, Artificial sequence
  SiRNA target sequence
gtaggcatctctggtggtcctcac

SEQ ID NO: 121638 - DNA, 24 bp, Artificial sequence
  SiRNA target sequence
taggcatctctggtggtcctcacg

SEQ ID NO: 121639 - DNA, 24 bp, Artificial sequence
  SiRNA target sequence
aggcatctctggtggtcctcacgg

SEQ ID NO: 121640 - DNA, 24 bp, Artificial sequence
  SiRNA target sequence
ggcatctctggtggtcctcacggt

SEQ ID NO: 121641 - DNA, 24 bp, Artificial sequence
  SiRNA target sequence
gcatctctggtggtcctcacggtc

SEQ ID NO: 121642 - DNA, 24 bp, Artificial sequence
  SiRNA target sequence
catctctggtggtcctcacggtct

SEQ ID NO: 121643 - DNA, 24 bp, Artificial sequence
  SiRNA target sequence
atctctggtggtcctcacggtctt

SEQ ID NO: 121644 - DNA, 24 bp, Artificial sequence
  SiRNA target sequence
tctctggtggtcctcacggtctta

SEQ ID NO: 121645 - DNA, 24 bp, Artificial sequence
  SiRNA target sequence
ctctggtggtcctcacggtcttac

SEQ ID NO: 121646 - DNA, 24 bp, Artificial sequence
  SiRNA target sequence
tctggtggtcctcacggtcttact

SEQ ID NO: 121647 - DNA, 24 bp, Artificial sequence
  SiRNA target sequence
ctggtggtcctcacggtcttacta

SEQ ID NO: 121648 - DNA, 24 bp, Artificial sequence
  SiRNA target sequence
tggtggtcctcacggtcttactaa

SEQ ID NO: 121649 - DNA, 24 bp, Artificial sequence
  SiRNA target sequence
ggtggtcctcacggtcttactaaa

SEQ ID NO: 121650 - DNA, 24 bp, Artificial sequence
  SiRNA target sequence
gtggtcctcacggtcttactaaaa

SEQ ID NO: 121651 - DNA, 24 bp, Artificial sequence
  SiRNA target sequence
tggtcctcacggtcttactaaaaa

SEQ ID NO: 121652 - DNA, 24 bp, Artificial sequence
  SiRNA target sequence
ggtcctcacggtcttactaaaaat

SEQ ID NO: 121653 - DNA, 24 bp, Artificial sequence
  SiRNA target sequence
gtcctcacggtcttactaaaaatt

SEQ ID NO: 121654 - DNA, 24 bp, Artificial sequence
  SiRNA target sequence
tcctcacggtcttactaaaaattt

SEQ ID NO: 121655 - DNA, 24 bp, Artificial sequence
  SiRNA target sequence
cctcacggtcttactaaaaatttg

SEQ ID NO: 121656 - DNA, 24 bp, Artificial sequence
  SiRNA target sequence
ctcacggtcttactaaaaatttga

SEQ ID NO: 121657 - DNA, 24 bp, Artificial sequence
  SiRNA target sequence
tcacggtcttactaaaaatttgat

SEQ ID NO: 121658 - DNA, 24 bp, Artificial sequence
  SiRNA target sequence
cacggtcttactaaaaatttgatc

SEQ ID NO: 121659 - DNA, 24 bp, Artificial sequence
  SiRNA target sequence
acggtcttactaaaaatttgatca

SEQ ID NO: 121660 - DNA, 24 bp, Artificial sequence
  SiRNA target sequence
cggtcttactaaaaatttgatcaa

SEQ ID NO: 121661 - DNA, 24 bp, Artificial sequence
  SiRNA target sequence
ggtcttactaaaaatttgatcaaa

SEQ ID NO: 121662 - DNA, 24 bp, Artificial sequence
  SiRNA target sequence
gtcttactaaaaatttgatcaaaa

SEQ ID NO: 121663 - DNA, 24 bp, Artificial sequence
  SiRNA target sequence
tcttactaaaaatttgatcaaaaa

SEQ ID NO: 121664 - DNA, 24 bp, Artificial sequence
  SiRNA target sequence
cttactaaaaatttgatcaaaaaa

SEQ ID NO: 121665 - DNA, 24 bp, Artificial sequence
  SiRNA target sequence
ttactaaaaatttgatcaaaaaat

SEQ ID NO: 121666 - DNA, 24 bp, Artificial sequence
  SiRNA target sequence
tactaaaaatttgatcaaaaaata

SEQ ID NO: 121667 - DNA, 24 bp, Artificial sequence
  SiRNA target sequence
actaaaaatttgatcaaaaaatac

SEQ ID NO: 121668 - DNA, 24 bp, Artificial sequence
  SiRNA target sequence
ctaaaaatttgatcaaaaaatacg

SEQ ID NO: 121669 - DNA, 24 bp, Artificial sequence
  SiRNA target sequence
taaaaatttgatcaaaaaatacgg

SEQ ID NO: 121670 - DNA, 24 bp, Artificial sequence
  SiRNA target sequence
aaaaatttgatcaaaaaatacggc

SEQ ID NO: 121671 - DNA, 24 bp, Artificial sequence
  SiRNA target sequence
aaaatttgatcaaaaaatacggcg

SEQ ID NO: 121672 - DNA, 24 bp, Artificial sequence
  SiRNA target sequence
aaatttgatcaaaaaatacggcga

SEQ ID NO: 121673 - DNA, 24 bp, Artificial sequence
  SiRNA target sequence
aatttgatcaaaaaatacggcgat

SEQ ID NO: 121674 - DNA, 24 bp, Artificial sequence
  SiRNA target sequence
atttgatcaaaaaatacggcgatc

SEQ ID NO: 121675 - DNA, 24 bp, Artificial sequence
  SiRNA target sequence
tttgatcaaaaaatacggcgatca

SEQ ID NO: 121676 - DNA, 24 bp, Artificial sequence
  SiRNA target sequence
ttgatcaaaaaatacggcgatcaa

SEQ ID NO: 121677 - DNA, 24 bp, Artificial sequence
  SiRNA target sequence
tgatcaaaaaatacggcgatcaaa

SEQ ID NO: 121678 - DNA, 24 bp, Artificial sequence
  SiRNA target sequence
gatcaaaaaatacggcgatcaaag

SEQ ID NO: 121679 - DNA, 24 bp, Artificial sequence
  SiRNA target sequence
atcaaaaaatacggcgatcaaaga

SEQ ID NO: 121680 - DNA, 24 bp, Artificial sequence
  SiRNA target sequence
tcaaaaaatacggcgatcaaagag

SEQ ID NO: 121681 - DNA, 24 bp, Artificial sequence
  SiRNA target sequence
caaaaaatacggcgatcaaagagt

SEQ ID NO: 121682 - DNA, 24 bp, Artificial sequence
  SiRNA target sequence
aaaaaatacggcgatcaaagagtg

SEQ ID NO: 121683 - DNA, 24 bp, Artificial sequence
  SiRNA target sequence
aaaaatacggcgatcaaagagtga

SEQ ID NO: 121684 - DNA, 24 bp, Artificial sequence
  SiRNA target sequence
aaaatacggcgatcaaagagtgaa

SEQ ID NO: 121685 - DNA, 24 bp, Artificial sequence
  SiRNA target sequence
aaatacggcgatcaaagagtgaag

SEQ ID NO: 121686 - DNA, 24 bp, Artificial sequence
  SiRNA target sequence
aatacggcgatcaaagagtgaagg

SEQ ID NO: 121687 - DNA, 24 bp, Artificial sequence
  SiRNA target sequence
atacggcgatcaaagagtgaagga

SEQ ID NO: 121688 - DNA, 24 bp, Artificial sequence
  SiRNA target sequence
tacggcgatcaaagagtgaaggat

SEQ ID NO: 121689 - DNA, 24 bp, Artificial sequence
  SiRNA target sequence
acggcgatcaaagagtgaaggata

SEQ ID NO: 121690 - DNA, 24 bp, Artificial sequence
  SiRNA target sequence
cggcgatcaaagagtgaaggatac

SEQ ID NO: 121691 - DNA, 24 bp, Artificial sequence
  SiRNA target sequence
ggcgatcaaagagtgaaggatacc

SEQ ID NO: 121692 - DNA, 24 bp, Artificial sequence
  SiRNA target sequence
gcgatcaaagagtgaaggataccc

SEQ ID NO: 121693 - DNA, 24 bp, Artificial sequence
  SiRNA target sequence
cgatcaaagagtgaaggatacccc

SEQ ID NO: 121694 - DNA, 24 bp, Artificial sequence
  SiRNA target sequence
gatcaaagagtgaaggatacccct

SEQ ID NO: 121695 - DNA, 24 bp, Artificial sequence
  SiRNA target sequence
atcaaagagtgaaggataccccta

SEQ ID NO: 121696 - DNA, 24 bp, Artificial sequence
  SiRNA target sequence
tcaaagagtgaaggatacccctat

SEQ ID NO: 121697 - DNA, 24 bp, Artificial sequence
  SiRNA target sequence
caaagagtgaaggatacccctatt

SEQ ID NO: 121698 - DNA, 24 bp, Artificial sequence
  SiRNA target sequence
aaagagtgaaggatacccctattt

SEQ ID NO: 121699 - DNA, 24 bp, Artificial sequence
  SiRNA target sequence
aagagtgaaggatacccctatttc

SEQ ID NO: 121700 - DNA, 24 bp, Artificial sequence
  SiRNA target sequence
agagtgaaggatacccctatttcg

SEQ ID NO: 121701 - DNA, 24 bp, Artificial sequence
  SiRNA target sequence
gagtgaaggatacccctatttcgg

SEQ ID NO: 121702 - DNA, 24 bp, Artificial sequence
  SiRNA target sequence
agtgaaggatacccctatttcgga

SEQ ID NO: 121703 - DNA, 24 bp, Artificial sequence
  SiRNA target sequence
gtgaaggatacccctatttcggaa

SEQ ID NO: 121704 - DNA, 24 bp, Artificial sequence
  SiRNA target sequence
tgaaggatacccctatttcggaaa

SEQ ID NO: 121705 - DNA, 24 bp, Artificial sequence
  SiRNA target sequence
gaaggatacccctatttcggaaat

SEQ ID NO: 121706 - DNA, 24 bp, Artificial sequence
  SiRNA target sequence
aaggatacccctatttcggaaatg

SEQ ID NO: 121707 - DNA, 24 bp, Artificial sequence
  SiRNA target sequence
aggatacccctatttcggaaatgg

SEQ ID NO: 121708 - DNA, 24 bp, Artificial sequence
  SiRNA target sequence
ggatacccctatttcggaaatggg

SEQ ID NO: 121709 - DNA, 24 bp, Artificial sequence
  SiRNA target sequence
gatacccctatttcggaaatggga

SEQ ID NO: 121710 - DNA, 24 bp, Artificial sequence
  SiRNA target sequence
atacccctatttcggaaatgggat

SEQ ID NO: 121711 - DNA, 24 bp, Artificial sequence
  SiRNA target sequence
tacccctatttcggaaatgggatt

SEQ ID NO: 121712 - DNA, 24 bp, Artificial sequence
  SiRNA target sequence
acccctatttcggaaatgggattt

SEQ ID NO: 121713 - DNA, 24 bp, Artificial sequence
  SiRNA target sequence
cccctatttcggaaatgggattta

SEQ ID NO: 121714 - DNA, 24 bp, Artificial sequence
  SiRNA target sequence
ccctatttcggaaatgggatttac

SEQ ID NO: 121715 - DNA, 24 bp, Artificial sequence
  SiRNA target sequence
cctatttcggaaatgggatttaca

SEQ ID NO: 121716 - DNA, 24 bp, Artificial sequence
  SiRNA target sequence
ctatttcggaaatgggatttacag

SEQ ID NO: 121717 - DNA, 24 bp, Artificial sequence
  SiRNA target sequence
tatttcggaaatgggatttacagg

SEQ ID NO: 121718 - DNA, 24 bp, Artificial sequence
  SiRNA target sequence
atttcggaaatgggatttacaggt

SEQ ID NO: 121719 - DNA, 24 bp, Artificial sequence
  SiRNA target sequence
tttcggaaatgggatttacaggtc

SEQ ID NO: 121720 - DNA, 24 bp, Artificial sequence
  SiRNA target sequence
ttcggaaatgggatttacaggtct

SEQ ID NO: 121721 - DNA, 24 bp, Artificial sequence
  SiRNA target sequence
tcggaaatgggatttacaggtctc

SEQ ID NO: 121722 - DNA, 24 bp, Artificial sequence
  SiRNA target sequence
cggaaatgggatttacaggtctcg

SEQ ID NO: 121723 - DNA, 24 bp, Artificial sequence
  SiRNA target sequence
ggaaatgggatttacaggtctcgc

SEQ ID NO: 121724 - DNA, 24 bp, Artificial sequence
  SiRNA target sequence
gaaatgggatttacaggtctcgct

SEQ ID NO: 121725 - DNA, 24 bp, Artificial sequence
  SiRNA target sequence
aaatgggatttacaggtctcgctg

SEQ ID NO: 121726 - DNA, 24 bp, Artificial sequence
  SiRNA target sequence
aatgggatttacaggtctcgctgt

SEQ ID NO: 121727 - DNA, 24 bp, Artificial sequence
  SiRNA target sequence
atgggatttacaggtctcgctgtg

SEQ ID NO: 121728 - DNA, 24 bp, Artificial sequence
  SiRNA target sequence
tgggatttacaggtctcgctgtgg

SEQ ID NO: 121729 - DNA, 24 bp, Artificial sequence
  SiRNA target sequence
gggatttacaggtctcgctgtggg

SEQ ID NO: 121730 - DNA, 24 bp, Artificial sequence
  SiRNA target sequence
ggatttacaggtctcgctgtgggt

SEQ ID NO: 121731 - DNA, 24 bp, Artificial sequence
  SiRNA target sequence
gatttacaggtctcgctgtgggtt

SEQ ID NO: 121732 - DNA, 24 bp, Artificial sequence
  SiRNA target sequence
atttacaggtctcgctgtgggttc

SEQ ID NO: 121733 - DNA, 24 bp, Artificial sequence
  SiRNA target sequence
tttacaggtctcgctgtgggttca

SEQ ID NO: 121734 - DNA, 24 bp, Artificial sequence
  SiRNA target sequence
ttacaggtctcgctgtgggttcaa

SEQ ID NO: 121735 - DNA, 24 bp, Artificial sequence
  SiRNA target sequence
tacaggtctcgctgtgggttcaag

SEQ ID NO: 121736 - DNA, 24 bp, Artificial sequence
  SiRNA target sequence
acaggtctcgctgtgggttcaagc

SEQ ID NO: 121737 - DNA, 24 bp, Artificial sequence
  SiRNA target sequence
caggtctcgctgtgggttcaagct

SEQ ID NO: 121738 - DNA, 24 bp, Artificial sequence
  SiRNA target sequence
aggtctcgctgtgggttcaagcta

SEQ ID NO: 121739 - DNA, 24 bp, Artificial sequence
  SiRNA target sequence
ggtctcgctgtgggttcaagctat

SEQ ID NO: 121740 - DNA, 24 bp, Artificial sequence
  SiRNA target sequence
gtctcgctgtgggttcaagctatt

SEQ ID NO: 121741 - DNA, 24 bp, Artificial sequence
  SiRNA target sequence
tctcgctgtgggttcaagctattt

SEQ ID NO: 121742 - DNA, 24 bp, Artificial sequence
  SiRNA target sequence
ctcgctgtgggttcaagctattta

SEQ ID NO: 121743 - DNA, 24 bp, Artificial sequence
  SiRNA target sequence
tcgctgtgggttcaagctatttag

SEQ ID NO: 121744 - DNA, 24 bp, Artificial sequence
  SiRNA target sequence
cgctgtgggttcaagctatttagg

SEQ ID NO: 121745 - DNA, 24 bp, Artificial sequence
  SiRNA target sequence
gctgtgggttcaagctatttaggg

SEQ ID NO: 121746 - DNA, 24 bp, Artificial sequence
  SiRNA target sequence
ctgtgggttcaagctatttagggt

SEQ ID NO: 121747 - DNA, 24 bp, Artificial sequence
  SiRNA target sequence
tgtgggttcaagctatttagggtt

SEQ ID NO: 121748 - DNA, 24 bp, Artificial sequence
  SiRNA target sequence
gtgggttcaagctatttagggtta

SEQ ID NO: 121749 - DNA, 24 bp, Artificial sequence
  SiRNA target sequence
tgggttcaagctatttagggttaa

SEQ ID NO: 121750 - DNA, 24 bp, Artificial sequence
  SiRNA target sequence
gggttcaagctatttagggttaag

SEQ ID NO: 121751 - DNA, 24 bp, Artificial sequence
  SiRNA target sequence
ggttcaagctatttagggttaaga

SEQ ID NO: 121752 - DNA, 24 bp, Artificial sequence
  SiRNA target sequence
gttcaagctatttagggttaagac

SEQ ID NO: 121753 - DNA, 24 bp, Artificial sequence
  SiRNA target sequence
ttcaagctatttagggttaagacc

SEQ ID NO: 121754 - DNA, 24 bp, Artificial sequence
  SiRNA target sequence
tcaagctatttagggttaagaccc

SEQ ID NO: 121755 - DNA, 24 bp, Artificial sequence
  SiRNA target sequence
caagctatttagggttaagacccg

SEQ ID NO: 121756 - DNA, 24 bp, Artificial sequence
  SiRNA target sequence
aagctatttagggttaagacccgt

SEQ ID NO: 121757 - DNA, 24 bp, Artificial sequence
  SiRNA target sequence
agctatttagggttaagacccgta

SEQ ID NO: 121758 - DNA, 24 bp, Artificial sequence
  SiRNA target sequence
gctatttagggttaagacccgtag

SEQ ID NO: 121759 - DNA, 24 bp, Artificial sequence
  SiRNA target sequence
ctatttagggttaagacccgtagt

SEQ ID NO: 121760 - DNA, 24 bp, Artificial sequence
  SiRNA target sequence
tatttagggttaagacccgtagta

SEQ ID NO: 121761 - DNA, 24 bp, Artificial sequence
  SiRNA target sequence
atttagggttaagacccgtagtag

SEQ ID NO: 121762 - DNA, 24 bp, Artificial sequence
  SiRNA target sequence
tttagggttaagacccgtagtaga

SEQ ID NO: 121763 - DNA, 24 bp, Artificial sequence
  SiRNA target sequence
ttagggttaagacccgtagtagat

SEQ ID NO: 121764 - DNA, 24 bp, Artificial sequence
  SiRNA target sequence
tagggttaagacccgtagtagatt

SEQ ID NO: 121765 - DNA, 24 bp, Artificial sequence
  SiRNA target sequence
agggttaagacccgtagtagattt

SEQ ID NO: 121766 - DNA, 24 bp, Artificial sequence
  SiRNA target sequence
gggttaagacccgtagtagatttt

SEQ ID NO: 121767 - DNA, 24 bp, Artificial sequence
  SiRNA target sequence
ggttaagacccgtagtagatttta

SEQ ID NO: 121768 - DNA, 24 bp, Artificial sequence
  SiRNA target sequence
gttaagacccgtagtagattttat

SEQ ID NO: 121769 - DNA, 24 bp, Artificial sequence
  SiRNA target sequence
ttaagacccgtagtagattttatg

SEQ ID NO: 121770 - DNA, 24 bp, Artificial sequence
  SiRNA target sequence
taagacccgtagtagattttatga

SEQ ID NO: 121771 - DNA, 24 bp, Artificial sequence
  SiRNA target sequence
aagacccgtagtagattttatgac

SEQ ID NO: 121772 - DNA, 24 bp, Artificial sequence
  SiRNA target sequence
agacccgtagtagattttatgact

SEQ ID NO: 121773 - DNA, 24 bp, Artificial sequence
  SiRNA target sequence
gacccgtagtagattttatgactt

SEQ ID NO: 121774 - DNA, 24 bp, Artificial sequence
  SiRNA target sequence
acccgtagtagattttatgacttg

SEQ ID NO: 121775 - DNA, 24 bp, Artificial sequence
  SiRNA target sequence
cccgtagtagattttatgacttgg

SEQ ID NO: 121776 - DNA, 24 bp, Artificial sequence
  SiRNA target sequence
ccgtagtagattttatgacttgga

SEQ ID NO: 121777 - DNA, 24 bp, Artificial sequence
  SiRNA target sequence
cgtagtagattttatgacttggaa

SEQ ID NO: 121778 - DNA, 24 bp, Artificial sequence
  SiRNA target sequence
gtagtagattttatgacttggaat

SEQ ID NO: 121779 - DNA, 24 bp, Artificial sequence
  SiRNA target sequence
tagtagattttatgacttggaatt

SEQ ID NO: 121780 - DNA, 24 bp, Artificial sequence
  SiRNA target sequence
agtagattttatgacttggaattt

SEQ ID NO: 121781 - DNA, 24 bp, Artificial sequence
  SiRNA target sequence
gtagattttatgacttggaatttt

SEQ ID NO: 121782 - DNA, 24 bp, Artificial sequence
  SiRNA target sequence
tagattttatgacttggaattttg

SEQ ID NO: 121783 - DNA, 24 bp, Artificial sequence
  SiRNA target sequence
agattttatgacttggaattttgc

SEQ ID NO: 121784 - DNA, 24 bp, Artificial sequence
  SiRNA target sequence
gattttatgacttggaattttgct

SEQ ID NO: 121785 - DNA, 24 bp, Artificial sequence
  SiRNA target sequence
attttatgacttggaattttgctt

SEQ ID NO: 121786 - DNA, 24 bp, Artificial sequence
  SiRNA target sequence
ttttatgacttggaattttgcttt

SEQ ID NO: 121787 - DNA, 24 bp, Artificial sequence
  SiRNA target sequence
tttatgacttggaattttgctttg

SEQ ID NO: 121788 - DNA, 24 bp, Artificial sequence
  SiRNA target sequence
ttatgacttggaattttgctttgc

SEQ ID NO: 121789 - DNA, 24 bp, Artificial sequence
  SiRNA target sequence
tatgacttggaattttgctttgca

SEQ ID NO: 121790 - DNA, 24 bp, Artificial sequence
  SiRNA target sequence
atgacttggaattttgctttgcaa

SEQ ID NO: 121791 - DNA, 24 bp, Artificial sequence
  SiRNA target sequence
tgacttggaattttgctttgcaat

SEQ ID NO: 121792 - DNA, 24 bp, Artificial sequence
  SiRNA target sequence
gacttggaattttgctttgcaatc

SEQ ID NO: 121793 - DNA, 24 bp, Artificial sequence
  SiRNA target sequence
acttggaattttgctttgcaatca

SEQ ID NO: 121794 - DNA, 24 bp, Artificial sequence
  SiRNA target sequence
cttggaattttgctttgcaatcaa

SEQ ID NO: 121795 - DNA, 24 bp, Artificial sequence
  SiRNA target sequence
ttggaattttgctttgcaatcaat

SEQ ID NO: 121796 - DNA, 24 bp, Artificial sequence
  SiRNA target sequence
tggaattttgctttgcaatcaatt

SEQ ID NO: 121797 - DNA, 24 bp, Artificial sequence
  SiRNA target sequence
ggaattttgctttgcaatcaattg

SEQ ID NO: 121798 - DNA, 24 bp, Artificial sequence
  SiRNA target sequence
gaattttgctttgcaatcaattga

SEQ ID NO: 121799 - DNA, 24 bp, Artificial sequence
  SiRNA target sequence
aattttgctttgcaatcaattgac

SEQ ID NO: 121800 - DNA, 24 bp, Artificial sequence
  SiRNA target sequence
attttgctttgcaatcaattgacc

SEQ ID NO: 121801 - DNA, 24 bp, Artificial sequence
  SiRNA target sequence
ttttgctttgcaatcaattgacca

SEQ ID NO: 121802 - DNA, 24 bp, Artificial sequence
  SiRNA target sequence
tttgctttgcaatcaattgaccat

SEQ ID NO: 121803 - DNA, 24 bp, Artificial sequence
  SiRNA target sequence
ttgctttgcaatcaattgaccata

SEQ ID NO: 121804 - DNA, 24 bp, Artificial sequence
  SiRNA target sequence
tgctttgcaatcaattgaccatat

SEQ ID NO: 121805 - DNA, 24 bp, Artificial sequence
  SiRNA target sequence
gctttgcaatcaattgaccatatt

SEQ ID NO: 121806 - DNA, 24 bp, Artificial sequence
  SiRNA target sequence
ctttgcaatcaattgaccatatta

SEQ ID NO: 121807 - DNA, 24 bp, Artificial sequence
  SiRNA target sequence
tttgcaatcaattgaccatattat

SEQ ID NO: 121808 - DNA, 24 bp, Artificial sequence
  SiRNA target sequence
ttgcaatcaattgaccatattatt

SEQ ID NO: 121809 - DNA, 24 bp, Artificial sequence
  SiRNA target sequence
tgcaatcaattgaccatattatta

SEQ ID NO: 121810 - DNA, 24 bp, Artificial sequence
  SiRNA target sequence
gcaatcaattgaccatattattaa

SEQ ID NO: 121811 - DNA, 24 bp, Artificial sequence
  SiRNA target sequence
caatcaattgaccatattattaat

SEQ ID NO: 121812 - DNA, 24 bp, Artificial sequence
  SiRNA target sequence
aatcaattgaccatattattaatt

SEQ ID NO: 121813 - DNA, 24 bp, Artificial sequence
  SiRNA target sequence
atcaattgaccatattattaattc

SEQ ID NO: 121814 - DNA, 24 bp, Artificial sequence
  SiRNA target sequence
tcaattgaccatattattaattct

SEQ ID NO: 121815 - DNA, 24 bp, Artificial sequence
  SiRNA target sequence
caattgaccatattattaattctt

SEQ ID NO: 121816 - DNA, 24 bp, Artificial sequence
  SiRNA target sequence
aattgaccatattattaattcttg

SEQ ID NO: 121817 - DNA, 24 bp, Artificial sequence
  SiRNA target sequence
attgaccatattattaattcttgt

SEQ ID NO: 121818 - DNA, 24 bp, Artificial sequence
  SiRNA target sequence
ttgaccatattattaattcttgtg

SEQ ID NO: 121819 - DNA, 24 bp, Artificial sequence
  SiRNA target sequence
tgaccatattattaattcttgtgc

SEQ ID NO: 121820 - DNA, 24 bp, Artificial sequence
  SiRNA target sequence
gaccatattattaattcttgtgcg

SEQ ID NO: 121821 - DNA, 24 bp, Artificial sequence
  SiRNA target sequence
accatattattaattcttgtgcga

SEQ ID NO: 121822 - DNA, 24 bp, Artificial sequence
  SiRNA target sequence
ccatattattaattcttgtgcgaa

SEQ ID NO: 121823 - DNA, 24 bp, Artificial sequence
  SiRNA target sequence
catattattaattcttgtgcgaaa

SEQ ID NO: 121824 - DNA, 24 bp, Artificial sequence
  SiRNA target sequence
atattattaattcttgtgcgaaaa

SEQ ID NO: 121825 - DNA, 24 bp, Artificial sequence
  SiRNA target sequence
tattattaattcttgtgcgaaaac

SEQ ID NO: 121826 - DNA, 24 bp, Artificial sequence
  SiRNA target sequence
attattaattcttgtgcgaaaacc

SEQ ID NO: 121827 - DNA, 24 bp, Artificial sequence
  SiRNA target sequence
ttattaattcttgtgcgaaaacct

SEQ ID NO: 121828 - DNA, 24 bp, Artificial sequence
  SiRNA target sequence
tattaattcttgtgcgaaaacctt

SEQ ID NO: 121829 - DNA, 24 bp, Artificial sequence
  SiRNA target sequence
attaattcttgtgcgaaaaccttg

SEQ ID NO: 121830 - DNA, 24 bp, Artificial sequence
  SiRNA target sequence
ttaattcttgtgcgaaaaccttgt

SEQ ID NO: 121831 - DNA, 24 bp, Artificial sequence
  SiRNA target sequence
taattcttgtgcgaaaaccttgta

SEQ ID NO: 121832 - DNA, 24 bp, Artificial sequence
  SiRNA target sequence
aattcttgtgcgaaaaccttgtat

SEQ ID NO: 121833 - DNA, 24 bp, Artificial sequence
  SiRNA target sequence
attcttgtgcgaaaaccttgtata

SEQ ID NO: 121834 - DNA, 24 bp, Artificial sequence
  SiRNA target sequence
ttcttgtgcgaaaaccttgtatat

SEQ ID NO: 121835 - DNA, 24 bp, Artificial sequence
  SiRNA target sequence
tcttgtgcgaaaaccttgtatatg

SEQ ID NO: 121836 - DNA, 24 bp, Artificial sequence
  SiRNA target sequence
cttgtgcgaaaaccttgtatatgt

SEQ ID NO: 121837 - DNA, 24 bp, Artificial sequence
  SiRNA target sequence
ttgtgcgaaaaccttgtatatgtc

SEQ ID NO: 121838 - DNA, 24 bp, Artificial sequence
  SiRNA target sequence
tgtgcgaaaaccttgtatatgtca

SEQ ID NO: 121839 - DNA, 24 bp, Artificial sequence
  SiRNA target sequence
gtgcgaaaaccttgtatatgtcag

SEQ ID NO: 121840 - DNA, 24 bp, Artificial sequence
  SiRNA target sequence
tgcgaaaaccttgtatatgtcagg

SEQ ID NO: 121841 - DNA, 24 bp, Artificial sequence
  SiRNA target sequence
gcgaaaaccttgtatatgtcagga

SEQ ID NO: 121842 - DNA, 24 bp, Artificial sequence
  SiRNA target sequence
cgaaaaccttgtatatgtcaggag

SEQ ID NO: 121843 - DNA, 24 bp, Artificial sequence
  SiRNA target sequence
gaaaaccttgtatatgtcaggagg

SEQ ID NO: 121844 - DNA, 24 bp, Artificial sequence
  SiRNA target sequence
aaaaccttgtatatgtcaggagga

SEQ ID NO: 121845 - DNA, 24 bp, Artificial sequence
  SiRNA target sequence
aaaccttgtatatgtcaggaggaa

SEQ ID NO: 121846 - DNA, 24 bp, Artificial sequence
  SiRNA target sequence
aaccttgtatatgtcaggaggaag

SEQ ID NO: 121847 - DNA, 24 bp, Artificial sequence
  SiRNA target sequence
accttgtatatgtcaggaggaaga

SEQ ID NO: 121848 - DNA, 24 bp, Artificial sequence
  SiRNA target sequence
ccttgtatatgtcaggaggaagaa

SEQ ID NO: 121849 - DNA, 24 bp, Artificial sequence
  SiRNA target sequence
cttgtatatgtcaggaggaagaat

SEQ ID NO: 121850 - DNA, 24 bp, Artificial sequence
  SiRNA target sequence
ttgtatatgtcaggaggaagaata

SEQ ID NO: 121851 - DNA, 24 bp, Artificial sequence
  SiRNA target sequence
tgtatatgtcaggaggaagaatac

SEQ ID NO: 121852 - DNA, 24 bp, Artificial sequence
  SiRNA target sequence
gtatatgtcaggaggaagaataca

SEQ ID NO: 121853 - DNA, 24 bp, Artificial sequence
  SiRNA target sequence
tatatgtcaggaggaagaatacaa

SEQ ID NO: 121854 - DNA, 24 bp, Artificial sequence
  SiRNA target sequence
atatgtcaggaggaagaatacaat

SEQ ID NO: 121855 - DNA, 24 bp, Artificial sequence
  SiRNA target sequence
tatgtcaggaggaagaatacaatg

SEQ ID NO: 121856 - DNA, 24 bp, Artificial sequence
  SiRNA target sequence
atgtcaggaggaagaatacaatgt

SEQ ID NO: 121857 - DNA, 24 bp, Artificial sequence
  SiRNA target sequence
tgtcaggaggaagaatacaatgtc

SEQ ID NO: 121858 - DNA, 24 bp, Artificial sequence
  SiRNA target sequence
gtcaggaggaagaatacaatgtcc

SEQ ID NO: 121859 - DNA, 24 bp, Artificial sequence
  SiRNA target sequence
tcaggaggaagaatacaatgtcca

SEQ ID NO: 121860 - DNA, 24 bp, Artificial sequence
  SiRNA target sequence
caggaggaagaatacaatgtccaa

SEQ ID NO: 121861 - DNA, 24 bp, Artificial sequence
  SiRNA target sequence
aggaggaagaatacaatgtccaat

SEQ ID NO: 121862 - DNA, 24 bp, Artificial sequence
  SiRNA target sequence
ggaggaagaatacaatgtccaatt

SEQ ID NO: 121863 - DNA, 24 bp, Artificial sequence
  SiRNA target sequence
gaggaagaatacaatgtccaattg

SEQ ID NO: 121864 - DNA, 24 bp, Artificial sequence
  SiRNA target sequence
aggaagaatacaatgtccaattgt

SEQ ID NO: 121865 - DNA, 24 bp, Artificial sequence
  SiRNA target sequence
ggaagaatacaatgtccaattgtt

SEQ ID NO: 121866 - DNA, 24 bp, Artificial sequence
  SiRNA target sequence
gaagaatacaatgtccaattgttt

SEQ ID NO: 121867 - DNA, 24 bp, Artificial sequence
  SiRNA target sequence
aagaatacaatgtccaattgtttt

SEQ ID NO: 121868 - DNA, 24 bp, Artificial sequence
  SiRNA target sequence
agaatacaatgtccaattgttttt

SEQ ID NO: 121869 - DNA, 24 bp, Artificial sequence
  SiRNA target sequence
gaatacaatgtccaattgttttta

SEQ ID NO: 121870 - DNA, 24 bp, Artificial sequence
  SiRNA target sequence
aatacaatgtccaattgtttttag

SEQ ID NO: 121871 - DNA, 24 bp, Artificial sequence
  SiRNA target sequence
atacaatgtccaattgtttttagg

SEQ ID NO: 121872 - DNA, 24 bp, Artificial sequence
  SiRNA target sequence
tacaatgtccaattgtttttaggg

SEQ ID NO: 121873 - DNA, 24 bp, Artificial sequence
  SiRNA target sequence
acaatgtccaattgtttttagggg

SEQ ID NO: 121874 - DNA, 24 bp, Artificial sequence
  SiRNA target sequence
caatgtccaattgtttttagggga

SEQ ID NO: 121875 - DNA, 24 bp, Artificial sequence
  SiRNA target sequence
aatgtccaattgtttttaggggac

SEQ ID NO: 121876 - DNA, 24 bp, Artificial sequence
  SiRNA target sequence
atgtccaattgtttttaggggacc

SEQ ID NO: 121877 - DNA, 24 bp, Artificial sequence
  SiRNA target sequence
tgtccaattgtttttaggggacca

SEQ ID NO: 121878 - DNA, 24 bp, Artificial sequence
  SiRNA target sequence
gtccaattgtttttaggggaccaa

SEQ ID NO: 121879 - DNA, 24 bp, Artificial sequence
  SiRNA target sequence
tccaattgtttttaggggaccaaa

SEQ ID NO: 121880 - DNA, 24 bp, Artificial sequence
  SiRNA target sequence
ccaattgtttttaggggaccaaat

SEQ ID NO: 121881 - DNA, 24 bp, Artificial sequence
  SiRNA target sequence
caattgtttttaggggaccaaatg

SEQ ID NO: 121882 - DNA, 24 bp, Artificial sequence
  SiRNA target sequence
aattgtttttaggggaccaaatgg

SEQ ID NO: 121883 - DNA, 24 bp, Artificial sequence
  SiRNA target sequence
attgtttttaggggaccaaatgga

SEQ ID NO: 121884 - DNA, 24 bp, Artificial sequence
  SiRNA target sequence
ttgtttttaggggaccaaatggat

SEQ ID NO: 121885 - DNA, 24 bp, Artificial sequence
  SiRNA target sequence
tgtttttaggggaccaaatggatt

SEQ ID NO: 121886 - DNA, 24 bp, Artificial sequence
  SiRNA target sequence
gtttttaggggaccaaatggattc

SEQ ID NO: 121887 - DNA, 24 bp, Artificial sequence
  SiRNA target sequence
tttttaggggaccaaatggattca

SEQ ID NO: 121888 - DNA, 24 bp, Artificial sequence
  SiRNA target sequence
ttttaggggaccaaatggattcaa

SEQ ID NO: 121889 - DNA, 24 bp, Artificial sequence
  SiRNA target sequence
tttaggggaccaaatggattcaat

SEQ ID NO: 121890 - DNA, 24 bp, Artificial sequence
  SiRNA target sequence
ttaggggaccaaatggattcaata

SEQ ID NO: 121891 - DNA, 24 bp, Artificial sequence
  SiRNA target sequence
taggggaccaaatggattcaataa

SEQ ID NO: 121892 - DNA, 24 bp, Artificial sequence
  SiRNA target sequence
aggggaccaaatggattcaataat

SEQ ID NO: 121893 - DNA, 24 bp, Artificial sequence
  SiRNA target sequence
ggggaccaaatggattcaataatg

SEQ ID NO: 121894 - DNA, 24 bp, Artificial sequence
  SiRNA target sequence
gggaccaaatggattcaataatgg

SEQ ID NO: 121895 - DNA, 24 bp, Artificial sequence
  SiRNA target sequence
ggaccaaatggattcaataatggg

SEQ ID NO: 121896 - DNA, 24 bp, Artificial sequence
  SiRNA target sequence
gaccaaatggattcaataatgggt

SEQ ID NO: 121897 - DNA, 24 bp, Artificial sequence
  SiRNA target sequence
accaaatggattcaataatgggta

SEQ ID NO: 121898 - DNA, 24 bp, Artificial sequence
  SiRNA target sequence
ccaaatggattcaataatgggtac

SEQ ID NO: 121899 - DNA, 24 bp, Artificial sequence
  SiRNA target sequence
caaatggattcaataatgggtacg

SEQ ID NO: 121900 - DNA, 24 bp, Artificial sequence
  SiRNA target sequence
aaatggattcaataatgggtacgc

SEQ ID NO: 121901 - DNA, 24 bp, Artificial sequence
  SiRNA target sequence
aatggattcaataatgggtacgct

SEQ ID NO: 121902 - DNA, 24 bp, Artificial sequence
  SiRNA target sequence
atggattcaataatgggtacgctg

SEQ ID NO: 121903 - DNA, 24 bp, Artificial sequence
  SiRNA target sequence
tggattcaataatgggtacgctgc

SEQ ID NO: 121904 - DNA, 24 bp, Artificial sequence
  SiRNA target sequence
ggattcaataatgggtacgctgca

SEQ ID NO: 121905 - DNA, 24 bp, Artificial sequence
  SiRNA target sequence
gattcaataatgggtacgctgcac

SEQ ID NO: 121906 - DNA, 24 bp, Artificial sequence
  SiRNA target sequence
attcaataatgggtacgctgcaca

SEQ ID NO: 121907 - DNA, 24 bp, Artificial sequence
  SiRNA target sequence
ttcaataatgggtacgctgcacag

SEQ ID NO: 121908 - DNA, 24 bp, Artificial sequence
  SiRNA target sequence
tcaataatgggtacgctgcacagc

SEQ ID NO: 121909 - DNA, 24 bp, Artificial sequence
  SiRNA target sequence
caataatgggtacgctgcacagca

SEQ ID NO: 121910 - DNA, 24 bp, Artificial sequence
  SiRNA target sequence
aataatgggtacgctgcacagcac

SEQ ID NO: 121911 - DNA, 24 bp, Artificial sequence
  SiRNA target sequence
ataatgggtacgctgcacagcaca

SEQ ID NO: 121912 - DNA, 24 bp, Artificial sequence
  SiRNA target sequence
taatgggtacgctgcacagcacac

SEQ ID NO: 121913 - DNA, 24 bp, Artificial sequence
  SiRNA target sequence
aatgggtacgctgcacagcacaca

SEQ ID NO: 121914 - DNA, 24 bp, Artificial sequence
  SiRNA target sequence
atgggtacgctgcacagcacacac

SEQ ID NO: 121915 - DNA, 24 bp, Artificial sequence
  SiRNA target sequence
tgggtacgctgcacagcacacaca

SEQ ID NO: 121916 - DNA, 24 bp, Artificial sequence
  SiRNA target sequence
gggtacgctgcacagcacacacaa

SEQ ID NO: 121917 - DNA, 24 bp, Artificial sequence
  SiRNA target sequence
ggtacgctgcacagcacacacaag

SEQ ID NO: 121918 - DNA, 24 bp, Artificial sequence
  SiRNA target sequence
gtacgctgcacagcacacacaaga

SEQ ID NO: 121919 - DNA, 24 bp, Artificial sequence
  SiRNA target sequence
tacgctgcacagcacacacaagat

SEQ ID NO: 121920 - DNA, 24 bp, Artificial sequence
  SiRNA target sequence
acgctgcacagcacacacaagatt

SEQ ID NO: 121921 - DNA, 24 bp, Artificial sequence
  SiRNA target sequence
cgctgcacagcacacacaagattt

SEQ ID NO: 121922 - DNA, 24 bp, Artificial sequence
  SiRNA target sequence
gctgcacagcacacacaagatttt

SEQ ID NO: 121923 - DNA, 24 bp, Artificial sequence
  SiRNA target sequence
ctgcacagcacacacaagattttg

SEQ ID NO: 121924 - DNA, 24 bp, Artificial sequence
  SiRNA target sequence
tgcacagcacacacaagattttgc

SEQ ID NO: 121925 - DNA, 24 bp, Artificial sequence
  SiRNA target sequence
gcacagcacacacaagattttgca

SEQ ID NO: 121926 - DNA, 24 bp, Artificial sequence
  SiRNA target sequence
cacagcacacacaagattttgcac

SEQ ID NO: 121927 - DNA, 24 bp, Artificial sequence
  SiRNA target sequence
acagcacacacaagattttgcacc

SEQ ID NO: 121928 - DNA, 24 bp, Artificial sequence
  SiRNA target sequence
cagcacacacaagattttgcacca

SEQ ID NO: 121929 - DNA, 24 bp, Artificial sequence
  SiRNA target sequence
agcacacacaagattttgcaccaa

SEQ ID NO: 121930 - DNA, 24 bp, Artificial sequence
  SiRNA target sequence
gcacacacaagattttgcaccaat

SEQ ID NO: 121931 - DNA, 24 bp, Artificial sequence
  SiRNA target sequence
cacacacaagattttgcaccaata

SEQ ID NO: 121932 - DNA, 24 bp, Artificial sequence
  SiRNA target sequence
acacacaagattttgcaccaatat

SEQ ID NO: 121933 - DNA, 24 bp, Artificial sequence
  SiRNA target sequence
cacacaagattttgcaccaatata

SEQ ID NO: 121934 - DNA, 24 bp, Artificial sequence
  SiRNA target sequence
acacaagattttgcaccaatatat

SEQ ID NO: 121935 - DNA, 24 bp, Artificial sequence
  SiRNA target sequence
cacaagattttgcaccaatatatg

SEQ ID NO: 121936 - DNA, 24 bp, Artificial sequence
  SiRNA target sequence
acaagattttgcaccaatatatgg

SEQ ID NO: 121937 - DNA, 24 bp, Artificial sequence
  SiRNA target sequence
caagattttgcaccaatatatggt

SEQ ID NO: 121938 - DNA, 24 bp, Artificial sequence
  SiRNA target sequence
aagattttgcaccaatatatggtt

SEQ ID NO: 121939 - DNA, 24 bp, Artificial sequence
  SiRNA target sequence
agattttgcaccaatatatggttc

SEQ ID NO: 121940 - DNA, 24 bp, Artificial sequence
  SiRNA target sequence
gattttgcaccaatatatggttct

SEQ ID NO: 121941 - DNA, 24 bp, Artificial sequence
  SiRNA target sequence
attttgcaccaatatatggttcta

SEQ ID NO: 121942 - DNA, 24 bp, Artificial sequence
  SiRNA target sequence
ttttgcaccaatatatggttctat

SEQ ID NO: 121943 - DNA, 24 bp, Artificial sequence
  SiRNA target sequence
tttgcaccaatatatggttctatt

SEQ ID NO: 121944 - DNA, 24 bp, Artificial sequence
  SiRNA target sequence
ttgcaccaatatatggttctattc

SEQ ID NO: 121945 - DNA, 24 bp, Artificial sequence
  SiRNA target sequence
tgcaccaatatatggttctattcc

SEQ ID NO: 121946 - DNA, 24 bp, Artificial sequence
  SiRNA target sequence
gcaccaatatatggttctattcca

SEQ ID NO: 121947 - DNA, 24 bp, Artificial sequence
  SiRNA target sequence
caccaatatatggttctattccag

SEQ ID NO: 121948 - DNA, 24 bp, Artificial sequence
  SiRNA target sequence
accaatatatggttctattccagg

SEQ ID NO: 121949 - DNA, 24 bp, Artificial sequence
  SiRNA target sequence
ccaatatatggttctattccaggc

SEQ ID NO: 121950 - DNA, 24 bp, Artificial sequence
  SiRNA target sequence
caatatatggttctattccaggcc

SEQ ID NO: 121951 - DNA, 24 bp, Artificial sequence
  SiRNA target sequence
aatatatggttctattccaggcct

SEQ ID NO: 121952 - DNA, 24 bp, Artificial sequence
  SiRNA target sequence
atatatggttctattccaggcctt

SEQ ID NO: 121953 - DNA, 24 bp, Artificial sequence
  SiRNA target sequence
tatatggttctattccaggcctta

SEQ ID NO: 121954 - DNA, 24 bp, Artificial sequence
  SiRNA target sequence
atatggttctattccaggccttaa

SEQ ID NO: 121955 - DNA, 24 bp, Artificial sequence
  SiRNA target sequence
tatggttctattccaggccttaag

SEQ ID NO: 121956 - DNA, 24 bp, Artificial sequence
  SiRNA target sequence
atggttctattccaggccttaagg

SEQ ID NO: 121957 - DNA, 24 bp, Artificial sequence
  SiRNA target sequence
tggttctattccaggccttaaggt

SEQ ID NO: 121958 - DNA, 24 bp, Artificial sequence
  SiRNA target sequence
ggttctattccaggccttaaggtg

SEQ ID NO: 121959 - DNA, 24 bp, Artificial sequence
  SiRNA target sequence
gttctattccaggccttaaggtgg

SEQ ID NO: 121960 - DNA, 24 bp, Artificial sequence
  SiRNA target sequence
ttctattccaggccttaaggtggt

SEQ ID NO: 121961 - DNA, 24 bp, Artificial sequence
  SiRNA target sequence
tctattccaggccttaaggtggtt

SEQ ID NO: 121962 - DNA, 24 bp, Artificial sequence
  SiRNA target sequence
ctattccaggccttaaggtggttt

SEQ ID NO: 121963 - DNA, 24 bp, Artificial sequence
  SiRNA target sequence
tattccaggccttaaggtggtttg

SEQ ID NO: 121964 - DNA, 24 bp, Artificial sequence
  SiRNA target sequence
attccaggccttaaggtggtttgt

SEQ ID NO: 121965 - DNA, 24 bp, Artificial sequence
  SiRNA target sequence
ttccaggccttaaggtggtttgtc

SEQ ID NO: 121966 - DNA, 24 bp, Artificial sequence
  SiRNA target sequence
tccaggccttaaggtggtttgtcc

SEQ ID NO: 121967 - DNA, 24 bp, Artificial sequence
  SiRNA target sequence
ccaggccttaaggtggtttgtcct

SEQ ID NO: 121968 - DNA, 24 bp, Artificial sequence
  SiRNA target sequence
caggccttaaggtggtttgtcctt

SEQ ID NO: 121969 - DNA, 24 bp, Artificial sequence
  SiRNA target sequence
aggccttaaggtggtttgtcctta

SEQ ID NO: 121970 - DNA, 24 bp, Artificial sequence
  SiRNA target sequence
ggccttaaggtggtttgtccttat

SEQ ID NO: 121971 - DNA, 24 bp, Artificial sequence
  SiRNA target sequence
gccttaaggtggtttgtccttata

SEQ ID NO: 121972 - DNA, 24 bp, Artificial sequence
  SiRNA target sequence
ccttaaggtggtttgtccttatac

SEQ ID NO: 121973 - DNA, 24 bp, Artificial sequence
  SiRNA target sequence
cttaaggtggtttgtccttatacg

SEQ ID NO: 121974 - DNA, 24 bp, Artificial sequence
  SiRNA target sequence
ttaaggtggtttgtccttatacgg

SEQ ID NO: 121975 - DNA, 24 bp, Artificial sequence
  SiRNA target sequence
taaggtggtttgtccttatacggg

SEQ ID NO: 121976 - DNA, 24 bp, Artificial sequence
  SiRNA target sequence
aaggtggtttgtccttatacgggt

SEQ ID NO: 121977 - DNA, 24 bp, Artificial sequence
  SiRNA target sequence
aggtggtttgtccttatacgggta

SEQ ID NO: 121978 - DNA, 24 bp, Artificial sequence
  SiRNA target sequence
ggtggtttgtccttatacgggtaa

SEQ ID NO: 121979 - DNA, 24 bp, Artificial sequence
  SiRNA target sequence
gtggtttgtccttatacgggtaaa

SEQ ID NO: 121980 - DNA, 24 bp, Artificial sequence
  SiRNA target sequence
tggtttgtccttatacgggtaaag

SEQ ID NO: 121981 - DNA, 24 bp, Artificial sequence
  SiRNA target sequence
ggtttgtccttatacgggtaaaga

SEQ ID NO: 121982 - DNA, 24 bp, Artificial sequence
  SiRNA target sequence
gtttgtccttatacgggtaaagac

SEQ ID NO: 121983 - DNA, 24 bp, Artificial sequence
  SiRNA target sequence
tttgtccttatacgggtaaagacc

SEQ ID NO: 121984 - DNA, 24 bp, Artificial sequence
  SiRNA target sequence
ttgtccttatacgggtaaagacca

SEQ ID NO: 121985 - DNA, 24 bp, Artificial sequence
  SiRNA target sequence
tgtccttatacgggtaaagaccat

SEQ ID NO: 121986 - DNA, 24 bp, Artificial sequence
  SiRNA target sequence
gtccttatacgggtaaagaccata

SEQ ID NO: 121987 - DNA, 24 bp, Artificial sequence
  SiRNA target sequence
tccttatacgggtaaagaccataa

SEQ ID NO: 121988 - DNA, 24 bp, Artificial sequence
  SiRNA target sequence
ccttatacgggtaaagaccataaa

SEQ ID NO: 121989 - DNA, 24 bp, Artificial sequence
  SiRNA target sequence
cttatacgggtaaagaccataaag

SEQ ID NO: 121990 - DNA, 24 bp, Artificial sequence
  SiRNA target sequence
ttatacgggtaaagaccataaagg

SEQ ID NO: 121991 - DNA, 24 bp, Artificial sequence
  SiRNA target sequence
tatacgggtaaagaccataaagga

SEQ ID NO: 121992 - DNA, 24 bp, Artificial sequence
  SiRNA target sequence
atacgggtaaagaccataaaggac

SEQ ID NO: 121993 - DNA, 24 bp, Artificial sequence
  SiRNA target sequence
tacgggtaaagaccataaaggact

SEQ ID NO: 121994 - DNA, 24 bp, Artificial sequence
  SiRNA target sequence
acgggtaaagaccataaaggactt

SEQ ID NO: 121995 - DNA, 24 bp, Artificial sequence
  SiRNA target sequence
cgggtaaagaccataaaggacttt

SEQ ID NO: 121996 - DNA, 24 bp, Artificial sequence
  SiRNA target sequence
gggtaaagaccataaaggactttt

SEQ ID NO: 121997 - DNA, 24 bp, Artificial sequence
  SiRNA target sequence
ggtaaagaccataaaggactttta

SEQ ID NO: 121998 - DNA, 24 bp, Artificial sequence
  SiRNA target sequence
gtaaagaccataaaggacttttaa

SEQ ID NO: 121999 - DNA, 24 bp, Artificial sequence
  SiRNA target sequence
taaagaccataaaggacttttaaa

SEQ ID NO: 122000 - DNA, 24 bp, Artificial sequence
  SiRNA target sequence
aaagaccataaaggacttttaaaa

SEQ ID NO: 122001 - DNA, 24 bp, Artificial sequence
  SiRNA target sequence
aagaccataaaggacttttaaaaa

SEQ ID NO: 122002 - DNA, 24 bp, Artificial sequence
  SiRNA target sequence
agaccataaaggacttttaaaaag

SEQ ID NO: 122003 - DNA, 24 bp, Artificial sequence
  SiRNA target sequence
gaccataaaggacttttaaaaagc

SEQ ID NO: 122004 - DNA, 24 bp, Artificial sequence
  SiRNA target sequence
accataaaggacttttaaaaagcg

SEQ ID NO: 122005 - DNA, 24 bp, Artificial sequence
  SiRNA target sequence
ccataaaggacttttaaaaagcgc

SEQ ID NO: 122006 - DNA, 24 bp, Artificial sequence
  SiRNA target sequence
cataaaggacttttaaaaagcgct

SEQ ID NO: 122007 - DNA, 24 bp, Artificial sequence
  SiRNA target sequence
ataaaggacttttaaaaagcgcta

SEQ ID NO: 122008 - DNA, 24 bp, Artificial sequence
  SiRNA target sequence
taaaggacttttaaaaagcgctat

SEQ ID NO: 122009 - DNA, 24 bp, Artificial sequence
  SiRNA target sequence
aaaggacttttaaaaagcgctatt

SEQ ID NO: 122010 - DNA, 24 bp, Artificial sequence
  SiRNA target sequence
aaggacttttaaaaagcgctatta

SEQ ID NO: 122011 - DNA, 24 bp, Artificial sequence
  SiRNA target sequence
aggacttttaaaaagcgctattag

SEQ ID NO: 122012 - DNA, 24 bp, Artificial sequence
  SiRNA target sequence
ggacttttaaaaagcgctattaga

SEQ ID NO: 122013 - DNA, 24 bp, Artificial sequence
  SiRNA target sequence
gacttttaaaaagcgctattagag

SEQ ID NO: 122014 - DNA, 24 bp, Artificial sequence
  SiRNA target sequence
acttttaaaaagcgctattagaga

SEQ ID NO: 122015 - DNA, 24 bp, Artificial sequence
  SiRNA target sequence
cttttaaaaagcgctattagagac

SEQ ID NO: 122016 - DNA, 24 bp, Artificial sequence
  SiRNA target sequence
ttttaaaaagcgctattagagaca

SEQ ID NO: 122017 - DNA, 24 bp, Artificial sequence
  SiRNA target sequence
tttaaaaagcgctattagagacaa

SEQ ID NO: 122018 - DNA, 24 bp, Artificial sequence
  SiRNA target sequence
ttaaaaagcgctattagagacaat

SEQ ID NO: 122019 - DNA, 24 bp, Artificial sequence
  SiRNA target sequence
taaaaagcgctattagagacaata

SEQ ID NO: 122020 - DNA, 24 bp, Artificial sequence
  SiRNA target sequence
aaaaagcgctattagagacaataa

SEQ ID NO: 122021 - DNA, 24 bp, Artificial sequence
  SiRNA target sequence
aaaagcgctattagagacaataac

SEQ ID NO: 122022 - DNA, 24 bp, Artificial sequence
  SiRNA target sequence
aaagcgctattagagacaataacc

SEQ ID NO: 122023 - DNA, 24 bp, Artificial sequence
  SiRNA target sequence
aagcgctattagagacaataaccc

SEQ ID NO: 122024 - DNA, 24 bp, Artificial sequence
  SiRNA target sequence
agcgctattagagacaataacccg

SEQ ID NO: 122025 - DNA, 24 bp, Artificial sequence
  SiRNA target sequence
gcgctattagagacaataacccgg

SEQ ID NO: 122026 - DNA, 24 bp, Artificial sequence
  SiRNA target sequence
cgctattagagacaataacccggt

SEQ ID NO: 122027 - DNA, 24 bp, Artificial sequence
  SiRNA target sequence
gctattagagacaataacccggtt

SEQ ID NO: 122028 - DNA, 24 bp, Artificial sequence
  SiRNA target sequence
ctattagagacaataacccggtta

SEQ ID NO: 122029 - DNA, 24 bp, Artificial sequence
  SiRNA target sequence
tattagagacaataacccggttat

SEQ ID NO: 122030 - DNA, 24 bp, Artificial sequence
  SiRNA target sequence
attagagacaataacccggttata

SEQ ID NO: 122031 - DNA, 24 bp, Artificial sequence
  SiRNA target sequence
ttagagacaataacccggttatat

SEQ ID NO: 122032 - DNA, 24 bp, Artificial sequence
  SiRNA target sequence
tagagacaataacccggttatatt

SEQ ID NO: 122033 - DNA, 24 bp, Artificial sequence
  SiRNA target sequence
agagacaataacccggttatattt

SEQ ID NO: 122034 - DNA, 24 bp, Artificial sequence
  SiRNA target sequence
gagacaataacccggttatatttc

SEQ ID NO: 122035 - DNA, 24 bp, Artificial sequence
  SiRNA target sequence
agacaataacccggttatatttct

SEQ ID NO: 122036 - DNA, 24 bp, Artificial sequence
  SiRNA target sequence
gacaataacccggttatatttctt

SEQ ID NO: 122037 - DNA, 24 bp, Artificial sequence
  SiRNA target sequence
acaataacccggttatatttcttg

SEQ ID NO: 122038 - DNA, 24 bp, Artificial sequence
  SiRNA target sequence
caataacccggttatatttcttga

SEQ ID NO: 122039 - DNA, 24 bp, Artificial sequence
  SiRNA target sequence
aataacccggttatatttcttgag

SEQ ID NO: 122040 - DNA, 24 bp, Artificial sequence
  SiRNA target sequence
ataacccggttatatttcttgaga

SEQ ID NO: 122041 - DNA, 24 bp, Artificial sequence
  SiRNA target sequence
taacccggttatatttcttgagaa

SEQ ID NO: 122042 - DNA, 24 bp, Artificial sequence
  SiRNA target sequence
aacccggttatatttcttgagaat

SEQ ID NO: 122043 - DNA, 24 bp, Artificial sequence
  SiRNA target sequence
acccggttatatttcttgagaatg

SEQ ID NO: 122044 - DNA, 24 bp, Artificial sequence
  SiRNA target sequence
cccggttatatttcttgagaatga

SEQ ID NO: 122045 - DNA, 24 bp, Artificial sequence
  SiRNA target sequence
ccggttatatttcttgagaatgaa

SEQ ID NO: 122046 - DNA, 24 bp, Artificial sequence
  SiRNA target sequence
cggttatatttcttgagaatgaaa

SEQ ID NO: 122047 - DNA, 24 bp, Artificial sequence
  SiRNA target sequence
ggttatatttcttgagaatgaaat

SEQ ID NO: 122048 - DNA, 24 bp, Artificial sequence
  SiRNA target sequence
gttatatttcttgagaatgaaata

SEQ ID NO: 122049 - DNA, 24 bp, Artificial sequence
  SiRNA target sequence
ttatatttcttgagaatgaaatat

SEQ ID NO: 122050 - DNA, 24 bp, Artificial sequence
  SiRNA target sequence
tatatttcttgagaatgaaatatt

SEQ ID NO: 122051 - DNA, 24 bp, Artificial sequence
  SiRNA target sequence
atatttcttgagaatgaaatatta

SEQ ID NO: 122052 - DNA, 24 bp, Artificial sequence
  SiRNA target sequence
tatttcttgagaatgaaatattat

SEQ ID NO: 122053 - DNA, 24 bp, Artificial sequence
  SiRNA target sequence
atttcttgagaatgaaatattata

SEQ ID NO: 122054 - DNA, 24 bp, Artificial sequence
  SiRNA target sequence
tttcttgagaatgaaatattatat

SEQ ID NO: 122055 - DNA, 24 bp, Artificial sequence
  SiRNA target sequence
ttcttgagaatgaaatattatata

SEQ ID NO: 122056 - DNA, 24 bp, Artificial sequence
  SiRNA target sequence
tcttgagaatgaaatattatataa

SEQ ID NO: 122057 - DNA, 24 bp, Artificial sequence
  SiRNA target sequence
cttgagaatgaaatattatataaa

SEQ ID NO: 122058 - DNA, 24 bp, Artificial sequence
  SiRNA target sequence
ttgagaatgaaatattatataaag

SEQ ID NO: 122059 - DNA, 24 bp, Artificial sequence
  SiRNA target sequence
tgagaatgaaatattatataaaga

SEQ ID NO: 122060 - DNA, 24 bp, Artificial sequence
  SiRNA target sequence
gagaatgaaatattatataaagat

SEQ ID NO: 122061 - DNA, 24 bp, Artificial sequence
  SiRNA target sequence
agaatgaaatattatataaagata

SEQ ID NO: 122062 - DNA, 24 bp, Artificial sequence
  SiRNA target sequence
gaatgaaatattatataaagataa

SEQ ID NO: 122063 - DNA, 24 bp, Artificial sequence
  SiRNA target sequence
aatgaaatattatataaagataaa

SEQ ID NO: 122064 - DNA, 24 bp, Artificial sequence
  SiRNA target sequence
atgaaatattatataaagataaat

SEQ ID NO: 122065 - DNA, 24 bp, Artificial sequence
  SiRNA target sequence
tgaaatattatataaagataaata

SEQ ID NO: 122066 - DNA, 24 bp, Artificial sequence
  SiRNA target sequence
gaaatattatataaagataaatac

SEQ ID NO: 122067 - DNA, 24 bp, Artificial sequence
  SiRNA target sequence
aaatattatataaagataaatacc

SEQ ID NO: 122068 - DNA, 24 bp, Artificial sequence
  SiRNA target sequence
aatattatataaagataaatacct

SEQ ID NO: 122069 - DNA, 24 bp, Artificial sequence
  SiRNA target sequence
atattatataaagataaatacctt

SEQ ID NO: 122070 - DNA, 24 bp, Artificial sequence
  SiRNA target sequence
tattatataaagataaataccttg

SEQ ID NO: 122071 - DNA, 24 bp, Artificial sequence
  SiRNA target sequence
attatataaagataaataccttga

SEQ ID NO: 122072 - DNA, 24 bp, Artificial sequence
  SiRNA target sequence
ttatataaagataaataccttgaa

SEQ ID NO: 122073 - DNA, 24 bp, Artificial sequence
  SiRNA target sequence
tatataaagataaataccttgaag

SEQ ID NO: 122074 - DNA, 24 bp, Artificial sequence
  SiRNA target sequence
atataaagataaataccttgaagt

SEQ ID NO: 122075 - DNA, 24 bp, Artificial sequence
  SiRNA target sequence
tataaagataaataccttgaagtg

SEQ ID NO: 122076 - DNA, 24 bp, Artificial sequence
  SiRNA target sequence
ataaagataaataccttgaagtgt

SEQ ID NO: 122077 - DNA, 24 bp, Artificial sequence
  SiRNA target sequence
taaagataaataccttgaagtgtc

SEQ ID NO: 122078 - DNA, 24 bp, Artificial sequence
  SiRNA target sequence
aaagataaataccttgaagtgtct

SEQ ID NO: 122079 - DNA, 24 bp, Artificial sequence
  SiRNA target sequence
aagataaataccttgaagtgtcta

SEQ ID NO: 122080 - DNA, 24 bp, Artificial sequence
  SiRNA target sequence
agataaataccttgaagtgtctaa

SEQ ID NO: 122081 - DNA, 24 bp, Artificial sequence
  SiRNA target sequence
gataaataccttgaagtgtctaat

SEQ ID NO: 122082 - DNA, 24 bp, Artificial sequence
  SiRNA target sequence
ataaataccttgaagtgtctaata

SEQ ID NO: 122083 - DNA, 24 bp, Artificial sequence
  SiRNA target sequence
taaataccttgaagtgtctaataa

SEQ ID NO: 122084 - DNA, 24 bp, Artificial sequence
  SiRNA target sequence
aaataccttgaagtgtctaataat

SEQ ID NO: 122085 - DNA, 24 bp, Artificial sequence
  SiRNA target sequence
aataccttgaagtgtctaataatt

SEQ ID NO: 122086 - DNA, 24 bp, Artificial sequence
  SiRNA target sequence
ataccttgaagtgtctaataatta

SEQ ID NO: 122087 - DNA, 24 bp, Artificial sequence
  SiRNA target sequence
taccttgaagtgtctaataattat

SEQ ID NO: 122088 - DNA, 24 bp, Artificial sequence
  SiRNA target sequence
accttgaagtgtctaataattata

SEQ ID NO: 122089 - DNA, 24 bp, Artificial sequence
  SiRNA target sequence
ccttgaagtgtctaataattatat

SEQ ID NO: 122090 - DNA, 24 bp, Artificial sequence
  SiRNA target sequence
cttgaagtgtctaataattatatt

SEQ ID NO: 122091 - DNA, 24 bp, Artificial sequence
  SiRNA target sequence
ttgaagtgtctaataattatattc

SEQ ID NO: 122092 - DNA, 24 bp, Artificial sequence
  SiRNA target sequence
tgaagtgtctaataattatattca

SEQ ID NO: 122093 - DNA, 24 bp, Artificial sequence
  SiRNA target sequence
gaagtgtctaataattatattcaa

SEQ ID NO: 122094 - DNA, 24 bp, Artificial sequence
  SiRNA target sequence
aagtgtctaataattatattcaac

SEQ ID NO: 122095 - DNA, 24 bp, Artificial sequence
  SiRNA target sequence
agtgtctaataattatattcaacc

SEQ ID NO: 122096 - DNA, 24 bp, Artificial sequence
  SiRNA target sequence
gtgtctaataattatattcaacca

SEQ ID NO: 122097 - DNA, 24 bp, Artificial sequence
  SiRNA target sequence
tgtctaataattatattcaaccac

SEQ ID NO: 122098 - DNA, 24 bp, Artificial sequence
  SiRNA target sequence
gtctaataattatattcaaccact

SEQ ID NO: 122099 - DNA, 24 bp, Artificial sequence
  SiRNA target sequence
tctaataattatattcaaccactt

SEQ ID NO: 122100 - DNA, 24 bp, Artificial sequence
  SiRNA target sequence
ctaataattatattcaaccacttg

SEQ ID NO: 122101 - DNA, 24 bp, Artificial sequence
  SiRNA target sequence
taataattatattcaaccacttga

SEQ ID NO: 122102 - DNA, 24 bp, Artificial sequence
  SiRNA target sequence
aataattatattcaaccacttgac

SEQ ID NO: 122103 - DNA, 24 bp, Artificial sequence
  SiRNA target sequence
ataattatattcaaccacttgaca

SEQ ID NO: 122104 - DNA, 24 bp, Artificial sequence
  SiRNA target sequence
taattatattcaaccacttgacaa

SEQ ID NO: 122105 - DNA, 24 bp, Artificial sequence
  SiRNA target sequence
aattatattcaaccacttgacaag

SEQ ID NO: 122106 - DNA, 24 bp, Artificial sequence
  SiRNA target sequence
attatattcaaccacttgacaagg

SEQ ID NO: 122107 - DNA, 24 bp, Artificial sequence
  SiRNA target sequence
ttatattcaaccacttgacaaggc

SEQ ID NO: 122108 - DNA, 24 bp, Artificial sequence
  SiRNA target sequence
tatattcaaccacttgacaaggca

SEQ ID NO: 122109 - DNA, 24 bp, Artificial sequence
  SiRNA target sequence
atattcaaccacttgacaaggcag

SEQ ID NO: 122110 - DNA, 24 bp, Artificial sequence
  SiRNA target sequence
tattcaaccacttgacaaggcagt

SEQ ID NO: 122111 - DNA, 24 bp, Artificial sequence
  SiRNA target sequence
attcaaccacttgacaaggcagta

SEQ ID NO: 122112 - DNA, 24 bp, Artificial sequence
  SiRNA target sequence
ttcaaccacttgacaaggcagtaa

SEQ ID NO: 122113 - DNA, 24 bp, Artificial sequence
  SiRNA target sequence
tcaaccacttgacaaggcagtaat

SEQ ID NO: 122114 - DNA, 24 bp, Artificial sequence
  SiRNA target sequence
caaccacttgacaaggcagtaatt

SEQ ID NO: 122115 - DNA, 24 bp, Artificial sequence
  SiRNA target sequence
aaccacttgacaaggcagtaattg

SEQ ID NO: 122116 - DNA, 24 bp, Artificial sequence
  SiRNA target sequence
accacttgacaaggcagtaattga

SEQ ID NO: 122117 - DNA, 24 bp, Artificial sequence
  SiRNA target sequence
ccacttgacaaggcagtaattgaa

SEQ ID NO: 122118 - DNA, 24 bp, Artificial sequence
  SiRNA target sequence
cacttgacaaggcagtaattgaaa

SEQ ID NO: 122119 - DNA, 24 bp, Artificial sequence
  SiRNA target sequence
acttgacaaggcagtaattgaaaa

SEQ ID NO: 122120 - DNA, 24 bp, Artificial sequence
  SiRNA target sequence
cttgacaaggcagtaattgaaaaa

SEQ ID NO: 122121 - DNA, 24 bp, Artificial sequence
  SiRNA target sequence
ttgacaaggcagtaattgaaaaaa

SEQ ID NO: 122122 - DNA, 24 bp, Artificial sequence
  SiRNA target sequence
tgacaaggcagtaattgaaaaaaa

SEQ ID NO: 122123 - DNA, 24 bp, Artificial sequence
  SiRNA target sequence
gacaaggcagtaattgaaaaaaat

SEQ ID NO: 122124 - DNA, 24 bp, Artificial sequence
  SiRNA target sequence
acaaggcagtaattgaaaaaaatg

SEQ ID NO: 122125 - DNA, 24 bp, Artificial sequence
  SiRNA target sequence
caaggcagtaattgaaaaaaatgg

SEQ ID NO: 122126 - DNA, 24 bp, Artificial sequence
  SiRNA target sequence
aaggcagtaattgaaaaaaatggt

SEQ ID NO: 122127 - DNA, 24 bp, Artificial sequence
  SiRNA target sequence
aggcagtaattgaaaaaaatggtg

SEQ ID NO: 122128 - DNA, 24 bp, Artificial sequence
  SiRNA target sequence
ggcagtaattgaaaaaaatggtgt

SEQ ID NO: 122129 - DNA, 24 bp, Artificial sequence
  SiRNA target sequence
gcagtaattgaaaaaaatggtgtt

SEQ ID NO: 122130 - DNA, 24 bp, Artificial sequence
  SiRNA target sequence
cagtaattgaaaaaaatggtgttg

SEQ ID NO: 122131 - DNA, 24 bp, Artificial sequence
  SiRNA target sequence
agtaattgaaaaaaatggtgttga

SEQ ID NO: 122132 - DNA, 24 bp, Artificial sequence
  SiRNA target sequence
gtaattgaaaaaaatggtgttgac

SEQ ID NO: 122133 - DNA, 24 bp, Artificial sequence
  SiRNA target sequence
taattgaaaaaaatggtgttgacg

SEQ ID NO: 122134 - DNA, 24 bp, Artificial sequence
  SiRNA target sequence
aattgaaaaaaatggtgttgacgt

SEQ ID NO: 122135 - DNA, 24 bp, Artificial sequence
  SiRNA target sequence
attgaaaaaaatggtgttgacgtt

SEQ ID NO: 122136 - DNA, 24 bp, Artificial sequence
  SiRNA target sequence
ttgaaaaaaatggtgttgacgtta

SEQ ID NO: 122137 - DNA, 24 bp, Artificial sequence
  SiRNA target sequence
tgaaaaaaatggtgttgacgttac

SEQ ID NO: 122138 - DNA, 24 bp, Artificial sequence
  SiRNA target sequence
gaaaaaaatggtgttgacgttaca

SEQ ID NO: 122139 - DNA, 24 bp, Artificial sequence
  SiRNA target sequence
aaaaaaatggtgttgacgttacag

SEQ ID NO: 122140 - DNA, 24 bp, Artificial sequence
  SiRNA target sequence
aaaaaatggtgttgacgttacagt

SEQ ID NO: 122141 - DNA, 24 bp, Artificial sequence
  SiRNA target sequence
aaaaatggtgttgacgttacagtt

SEQ ID NO: 122142 - DNA, 24 bp, Artificial sequence
  SiRNA target sequence
aaaatggtgttgacgttacagttt

SEQ ID NO: 122143 - DNA, 24 bp, Artificial sequence
  SiRNA target sequence
aaatggtgttgacgttacagtttt

SEQ ID NO: 122144 - DNA, 24 bp, Artificial sequence
  SiRNA target sequence
aatggtgttgacgttacagtttta

SEQ ID NO: 122145 - DNA, 24 bp, Artificial sequence
  SiRNA target sequence
atggtgttgacgttacagttttag

SEQ ID NO: 122146 - DNA, 24 bp, Artificial sequence
  SiRNA target sequence
tggtgttgacgttacagttttagg

SEQ ID NO: 122147 - DNA, 24 bp, Artificial sequence
  SiRNA target sequence
ggtgttgacgttacagttttagga

SEQ ID NO: 122148 - DNA, 24 bp, Artificial sequence
  SiRNA target sequence
gtgttgacgttacagttttaggaa

SEQ ID NO: 122149 - DNA, 24 bp, Artificial sequence
  SiRNA target sequence
tgttgacgttacagttttaggaat

SEQ ID NO: 122150 - DNA, 24 bp, Artificial sequence
  SiRNA target sequence
gttgacgttacagttttaggaata

SEQ ID NO: 122151 - DNA, 24 bp, Artificial sequence
  SiRNA target sequence
ttgacgttacagttttaggaatat

SEQ ID NO: 122152 - DNA, 24 bp, Artificial sequence
  SiRNA target sequence
tgacgttacagttttaggaatatc

SEQ ID NO: 122153 - DNA, 24 bp, Artificial sequence
  SiRNA target sequence
gacgttacagttttaggaatatca

SEQ ID NO: 122154 - DNA, 24 bp, Artificial sequence
  SiRNA target sequence
acgttacagttttaggaatatcaa

SEQ ID NO: 122155 - DNA, 24 bp, Artificial sequence
  SiRNA target sequence
cgttacagttttaggaatatcaat

SEQ ID NO: 122156 - DNA, 24 bp, Artificial sequence
  SiRNA target sequence
gttacagttttaggaatatcaata

SEQ ID NO: 122157 - DNA, 24 bp, Artificial sequence
  SiRNA target sequence
ttacagttttaggaatatcaataa

SEQ ID NO: 122158 - DNA, 24 bp, Artificial sequence
  SiRNA target sequence
tacagttttaggaatatcaataag

SEQ ID NO: 122159 - DNA, 24 bp, Artificial sequence
  SiRNA target sequence
acagttttaggaatatcaataagt

SEQ ID NO: 122160 - DNA, 24 bp, Artificial sequence
  SiRNA target sequence
cagttttaggaatatcaataagtc

SEQ ID NO: 122161 - DNA, 24 bp, Artificial sequence
  SiRNA target sequence
agttttaggaatatcaataagtct

SEQ ID NO: 122162 - DNA, 24 bp, Artificial sequence
  SiRNA target sequence
gttttaggaatatcaataagtctt

SEQ ID NO: 122163 - DNA, 24 bp, Artificial sequence
  SiRNA target sequence
ttttaggaatatcaataagtctta

SEQ ID NO: 122164 - DNA, 24 bp, Artificial sequence
  SiRNA target sequence
tttaggaatatcaataagtcttaa

SEQ ID NO: 122165 - DNA, 24 bp, Artificial sequence
  SiRNA target sequence
ttaggaatatcaataagtcttaaa

SEQ ID NO: 122166 - DNA, 24 bp, Artificial sequence
  SiRNA target sequence
taggaatatcaataagtcttaaag

SEQ ID NO: 122167 - DNA, 24 bp, Artificial sequence
  SiRNA target sequence
aggaatatcaataagtcttaaaga

SEQ ID NO: 122168 - DNA, 24 bp, Artificial sequence
  SiRNA target sequence
ggaatatcaataagtcttaaagaa

SEQ ID NO: 122169 - DNA, 24 bp, Artificial sequence
  SiRNA target sequence
gaatatcaataagtcttaaagaaa

SEQ ID NO: 122170 - DNA, 24 bp, Artificial sequence
  SiRNA target sequence
aatatcaataagtcttaaagaaat

SEQ ID NO: 122171 - DNA, 24 bp, Artificial sequence
  SiRNA target sequence
atatcaataagtcttaaagaaatt

SEQ ID NO: 122172 - DNA, 24 bp, Artificial sequence
  SiRNA target sequence
tatcaataagtcttaaagaaattt

SEQ ID NO: 122173 - DNA, 24 bp, Artificial sequence
  SiRNA target sequence
atcaataagtcttaaagaaatttt

SEQ ID NO: 122174 - DNA, 24 bp, Artificial sequence
  SiRNA target sequence
tcaataagtcttaaagaaattttt

SEQ ID NO: 122175 - DNA, 24 bp, Artificial sequence
  SiRNA target sequence
caataagtcttaaagaaattttta

SEQ ID NO: 122176 - DNA, 24 bp, Artificial sequence
  SiRNA target sequence
aataagtcttaaagaaatttttaa

SEQ ID NO: 122177 - DNA, 24 bp, Artificial sequence
  SiRNA target sequence
ataagtcttaaagaaatttttaaa

SEQ ID NO: 122178 - DNA, 24 bp, Artificial sequence
  SiRNA target sequence
taagtcttaaagaaatttttaaag

SEQ ID NO: 122179 - DNA, 24 bp, Artificial sequence
  SiRNA target sequence
aagtcttaaagaaatttttaaagc

SEQ ID NO: 122180 - DNA, 24 bp, Artificial sequence
  SiRNA target sequence
agtcttaaagaaatttttaaagca

SEQ ID NO: 122181 - DNA, 24 bp, Artificial sequence
  SiRNA target sequence
gtcttaaagaaatttttaaagcag

SEQ ID NO: 122182 - DNA, 24 bp, Artificial sequence
  SiRNA target sequence
tcttaaagaaatttttaaagcaga

SEQ ID NO: 122183 - DNA, 24 bp, Artificial sequence
  SiRNA target sequence
cttaaagaaatttttaaagcagac

SEQ ID NO: 122184 - DNA, 24 bp, Artificial sequence
  SiRNA target sequence
ttaaagaaatttttaaagcagaca

SEQ ID NO: 122185 - DNA, 24 bp, Artificial sequence
  SiRNA target sequence
taaagaaatttttaaagcagacag

SEQ ID NO: 122186 - DNA, 24 bp, Artificial sequence
  SiRNA target sequence
aaagaaatttttaaagcagacagt

SEQ ID NO: 122187 - DNA, 24 bp, Artificial sequence
  SiRNA target sequence
aagaaatttttaaagcagacagtt

SEQ ID NO: 122188 - DNA, 24 bp, Artificial sequence
  SiRNA target sequence
agaaatttttaaagcagacagttt

SEQ ID NO: 122189 - DNA, 24 bp, Artificial sequence
  SiRNA target sequence
gaaatttttaaagcagacagtttg

SEQ ID NO: 122190 - DNA, 24 bp, Artificial sequence
  SiRNA target sequence
aaatttttaaagcagacagtttgt

SEQ ID NO: 122191 - DNA, 24 bp, Artificial sequence
  SiRNA target sequence
aatttttaaagcagacagtttgtt

SEQ ID NO: 122192 - DNA, 24 bp, Artificial sequence
  SiRNA target sequence
atttttaaagcagacagtttgtta

SEQ ID NO: 122193 - DNA, 24 bp, Artificial sequence
  SiRNA target sequence
tttttaaagcagacagtttgttag

SEQ ID NO: 122194 - DNA, 24 bp, Artificial sequence
  SiRNA target sequence
ttttaaagcagacagtttgttaga

SEQ ID NO: 122195 - DNA, 24 bp, Artificial sequence
  SiRNA target sequence
tttaaagcagacagtttgttagag

SEQ ID NO: 122196 - DNA, 24 bp, Artificial sequence
  SiRNA target sequence
ttaaagcagacagtttgttagaga

SEQ ID NO: 122197 - DNA, 24 bp, Artificial sequence
  SiRNA target sequence
taaagcagacagtttgttagagaa

SEQ ID NO: 122198 - DNA, 24 bp, Artificial sequence
  SiRNA target sequence
aaagcagacagtttgttagagaaa

SEQ ID NO: 122199 - DNA, 24 bp, Artificial sequence
  SiRNA target sequence
aagcagacagtttgttagagaaaa

SEQ ID NO: 122200 - DNA, 24 bp, Artificial sequence
  SiRNA target sequence
agcagacagtttgttagagaaaaa

SEQ ID NO: 122201 - DNA, 24 bp, Artificial sequence
  SiRNA target sequence
gcagacagtttgttagagaaaaaa

SEQ ID NO: 122202 - DNA, 24 bp, Artificial sequence
  SiRNA target sequence
cagacagtttgttagagaaaaaaa

SEQ ID NO: 122203 - DNA, 24 bp, Artificial sequence
  SiRNA target sequence
agacagtttgttagagaaaaaaaa

SEQ ID NO: 122204 - DNA, 24 bp, Artificial sequence
  SiRNA target sequence
gacagtttgttagagaaaaaaaat

SEQ ID NO: 122205 - DNA, 24 bp, Artificial sequence
  SiRNA target sequence
acagtttgttagagaaaaaaaata

SEQ ID NO: 122206 - DNA, 24 bp, Artificial sequence
  SiRNA target sequence
cagtttgttagagaaaaaaaatat

SEQ ID NO: 122207 - DNA, 24 bp, Artificial sequence
  SiRNA target sequence
agtttgttagagaaaaaaaatatc

SEQ ID NO: 122208 - DNA, 24 bp, Artificial sequence
  SiRNA target sequence
gtttgttagagaaaaaaaatatcg

SEQ ID NO: 122209 - DNA, 24 bp, Artificial sequence
  SiRNA target sequence
tttgttagagaaaaaaaatatcga

SEQ ID NO: 122210 - DNA, 24 bp, Artificial sequence
  SiRNA target sequence
ttgttagagaaaaaaaatatcgac

SEQ ID NO: 122211 - DNA, 24 bp, Artificial sequence
  SiRNA target sequence
tgttagagaaaaaaaatatcgaca

SEQ ID NO: 122212 - DNA, 24 bp, Artificial sequence
  SiRNA target sequence
gttagagaaaaaaaatatcgacat

SEQ ID NO: 122213 - DNA, 24 bp, Artificial sequence
  SiRNA target sequence
ttagagaaaaaaaatatcgacatt

SEQ ID NO: 122214 - DNA, 24 bp, Artificial sequence
  SiRNA target sequence
tagagaaaaaaaatatcgacattg

SEQ ID NO: 122215 - DNA, 24 bp, Artificial sequence
  SiRNA target sequence
agagaaaaaaaatatcgacattga

SEQ ID NO: 122216 - DNA, 24 bp, Artificial sequence
  SiRNA target sequence
gagaaaaaaaatatcgacattgag

SEQ ID NO: 122217 - DNA, 24 bp, Artificial sequence
  SiRNA target sequence
agaaaaaaaatatcgacattgaga

SEQ ID NO: 122218 - DNA, 24 bp, Artificial sequence
  SiRNA target sequence
gaaaaaaaatatcgacattgagat

SEQ ID NO: 122219 - DNA, 24 bp, Artificial sequence
  SiRNA target sequence
aaaaaaaatatcgacattgagata

SEQ ID NO: 122220 - DNA, 24 bp, Artificial sequence
  SiRNA target sequence
aaaaaaatatcgacattgagataa

SEQ ID NO: 122221 - DNA, 24 bp, Artificial sequence
  SiRNA target sequence
aaaaaatatcgacattgagataat

SEQ ID NO: 122222 - DNA, 24 bp, Artificial sequence
  SiRNA target sequence
aaaaatatcgacattgagataatt

SEQ ID NO: 122223 - DNA, 24 bp, Artificial sequence
  SiRNA target sequence
aaaatatcgacattgagataatta

SEQ ID NO: 122224 - DNA, 24 bp, Artificial sequence
  SiRNA target sequence
aaatatcgacattgagataattaa

SEQ ID NO: 122225 - DNA, 24 bp, Artificial sequence
  SiRNA target sequence
aatatcgacattgagataattaat

SEQ ID NO: 122226 - DNA, 24 bp, Artificial sequence
  SiRNA target sequence
atatcgacattgagataattaatc

SEQ ID NO: 122227 - DNA, 24 bp, Artificial sequence
  SiRNA target sequence
tatcgacattgagataattaatct

SEQ ID NO: 122228 - DNA, 24 bp, Artificial sequence
  SiRNA target sequence
atcgacattgagataattaatctt

SEQ ID NO: 122229 - DNA, 24 bp, Artificial sequence
  SiRNA target sequence
tcgacattgagataattaatcttg

SEQ ID NO: 122230 - DNA, 24 bp, Artificial sequence
  SiRNA target sequence
cgacattgagataattaatcttgt

SEQ ID NO: 122231 - DNA, 24 bp, Artificial sequence
  SiRNA target sequence
gacattgagataattaatcttgtg

SEQ ID NO: 122232 - DNA, 24 bp, Artificial sequence
  SiRNA target sequence
acattgagataattaatcttgtgt

SEQ ID NO: 122233 - DNA, 24 bp, Artificial sequence
  SiRNA target sequence
cattgagataattaatcttgtgtc

SEQ ID NO: 122234 - DNA, 24 bp, Artificial sequence
  SiRNA target sequence
attgagataattaatcttgtgtca

SEQ ID NO: 122235 - DNA, 24 bp, Artificial sequence
  SiRNA target sequence
ttgagataattaatcttgtgtcaa

SEQ ID NO: 122236 - DNA, 24 bp, Artificial sequence
  SiRNA target sequence
tgagataattaatcttgtgtcaat

SEQ ID NO: 122237 - DNA, 24 bp, Artificial sequence
  SiRNA target sequence
gagataattaatcttgtgtcaata

SEQ ID NO: 122238 - DNA, 24 bp, Artificial sequence
  SiRNA target sequence
agataattaatcttgtgtcaataa

SEQ ID NO: 122239 - DNA, 24 bp, Artificial sequence
  SiRNA target sequence
gataattaatcttgtgtcaataaa

SEQ ID NO: 122240 - DNA, 24 bp, Artificial sequence
  SiRNA target sequence
ataattaatcttgtgtcaataaaa

SEQ ID NO: 122241 - DNA, 24 bp, Artificial sequence
  SiRNA target sequence
taattaatcttgtgtcaataaaac

SEQ ID NO: 122242 - DNA, 24 bp, Artificial sequence
  SiRNA target sequence
aattaatcttgtgtcaataaaacc

SEQ ID NO: 122243 - DNA, 24 bp, Artificial sequence
  SiRNA target sequence
attaatcttgtgtcaataaaacca

SEQ ID NO: 122244 - DNA, 24 bp, Artificial sequence
  SiRNA target sequence
ttaatcttgtgtcaataaaaccaa

SEQ ID NO: 122245 - DNA, 24 bp, Artificial sequence
  SiRNA target sequence
taatcttgtgtcaataaaaccaat

SEQ ID NO: 122246 - DNA, 24 bp, Artificial sequence
  SiRNA target sequence
aatcttgtgtcaataaaaccaatt

SEQ ID NO: 122247 - DNA, 24 bp, Artificial sequence
  SiRNA target sequence
atcttgtgtcaataaaaccaattg

SEQ ID NO: 122248 - DNA, 24 bp, Artificial sequence
  SiRNA target sequence
tcttgtgtcaataaaaccaattga

SEQ ID NO: 122249 - DNA, 24 bp, Artificial sequence
  SiRNA target sequence
cttgtgtcaataaaaccaattgat

SEQ ID NO: 122250 - DNA, 24 bp, Artificial sequence
  SiRNA target sequence
ttgtgtcaataaaaccaattgatt

SEQ ID NO: 122251 - DNA, 24 bp, Artificial sequence
  SiRNA target sequence
tgtgtcaataaaaccaattgatta

SEQ ID NO: 122252 - DNA, 24 bp, Artificial sequence
  SiRNA target sequence
gtgtcaataaaaccaattgattat

SEQ ID NO: 122253 - DNA, 24 bp, Artificial sequence
  SiRNA target sequence
tgtcaataaaaccaattgattatg

SEQ ID NO: 122254 - DNA, 24 bp, Artificial sequence
  SiRNA target sequence
gtcaataaaaccaattgattatgt

SEQ ID NO: 122255 - DNA, 24 bp, Artificial sequence
  SiRNA target sequence
tcaataaaaccaattgattatgtt

SEQ ID NO: 122256 - DNA, 24 bp, Artificial sequence
  SiRNA target sequence
caataaaaccaattgattatgtta

SEQ ID NO: 122257 - DNA, 24 bp, Artificial sequence
  SiRNA target sequence
aataaaaccaattgattatgttac

SEQ ID NO: 122258 - DNA, 24 bp, Artificial sequence
  SiRNA target sequence
ataaaaccaattgattatgttact

SEQ ID NO: 122259 - DNA, 24 bp, Artificial sequence
  SiRNA target sequence
taaaaccaattgattatgttacta

SEQ ID NO: 122260 - DNA, 24 bp, Artificial sequence
  SiRNA target sequence
aaaaccaattgattatgttactat

SEQ ID NO: 122261 - DNA, 24 bp, Artificial sequence
  SiRNA target sequence
aaaccaattgattatgttactatt

SEQ ID NO: 122262 - DNA, 24 bp, Artificial sequence
  SiRNA target sequence
aaccaattgattatgttactattg

SEQ ID NO: 122263 - DNA, 24 bp, Artificial sequence
  SiRNA target sequence
accaattgattatgttactattga

SEQ ID NO: 122264 - DNA, 24 bp, Artificial sequence
  SiRNA target sequence
ccaattgattatgttactattgaa

SEQ ID NO: 122265 - DNA, 24 bp, Artificial sequence
  SiRNA target sequence
caattgattatgttactattgaaa

SEQ ID NO: 122266 - DNA, 24 bp, Artificial sequence
  SiRNA target sequence
aattgattatgttactattgaaat

SEQ ID NO: 122267 - DNA, 24 bp, Artificial sequence
  SiRNA target sequence
attgattatgttactattgaaata

SEQ ID NO: 122268 - DNA, 24 bp, Artificial sequence
  SiRNA target sequence
ttgattatgttactattgaaatat

SEQ ID NO: 122269 - DNA, 24 bp, Artificial sequence
  SiRNA target sequence
tgattatgttactattgaaatatc

SEQ ID NO: 122270 - DNA, 24 bp, Artificial sequence
  SiRNA target sequence
gattatgttactattgaaatatca

SEQ ID NO: 122271 - DNA, 24 bp, Artificial sequence
  SiRNA target sequence
attatgttactattgaaatatcag

SEQ ID NO: 122272 - DNA, 24 bp, Artificial sequence
  SiRNA target sequence
ttatgttactattgaaatatcagt

SEQ ID NO: 122273 - DNA, 24 bp, Artificial sequence
  SiRNA target sequence
tatgttactattgaaatatcagtc

SEQ ID NO: 122274 - DNA, 24 bp, Artificial sequence
  SiRNA target sequence
atgttactattgaaatatcagtca

SEQ ID NO: 122275 - DNA, 24 bp, Artificial sequence
  SiRNA target sequence
tgttactattgaaatatcagtcaa

SEQ ID NO: 122276 - DNA, 24 bp, Artificial sequence
  SiRNA target sequence
gttactattgaaatatcagtcaaa

SEQ ID NO: 122277 - DNA, 24 bp, Artificial sequence
  SiRNA target sequence
ttactattgaaatatcagtcaaaa

SEQ ID NO: 122278 - DNA, 24 bp, Artificial sequence
  SiRNA target sequence
tactattgaaatatcagtcaaaaa

SEQ ID NO: 122279 - DNA, 24 bp, Artificial sequence
  SiRNA target sequence
actattgaaatatcagtcaaaaaa

SEQ ID NO: 122280 - DNA, 24 bp, Artificial sequence
  SiRNA target sequence
ctattgaaatatcagtcaaaaaaa

SEQ ID NO: 122281 - DNA, 24 bp, Artificial sequence
  SiRNA target sequence
tattgaaatatcagtcaaaaaaac

SEQ ID NO: 122282 - DNA, 24 bp, Artificial sequence
  SiRNA target sequence
attgaaatatcagtcaaaaaaaca

SEQ ID NO: 122283 - DNA, 24 bp, Artificial sequence
  SiRNA target sequence
ttgaaatatcagtcaaaaaaacac

SEQ ID NO: 122284 - DNA, 24 bp, Artificial sequence
  SiRNA target sequence
tgaaatatcagtcaaaaaaacaca

SEQ ID NO: 122285 - DNA, 24 bp, Artificial sequence
  SiRNA target sequence
gaaatatcagtcaaaaaaacacaa

SEQ ID NO: 122286 - DNA, 24 bp, Artificial sequence
  SiRNA target sequence
aaatatcagtcaaaaaaacacaaa

SEQ ID NO: 122287 - DNA, 24 bp, Artificial sequence
  SiRNA target sequence
aatatcagtcaaaaaaacacaaaa

SEQ ID NO: 122288 - DNA, 24 bp, Artificial sequence
  SiRNA target sequence
atatcagtcaaaaaaacacaaaag

SEQ ID NO: 122289 - DNA, 24 bp, Artificial sequence
  SiRNA target sequence
tatcagtcaaaaaaacacaaaagt

SEQ ID NO: 122290 - DNA, 24 bp, Artificial sequence
  SiRNA target sequence
atcagtcaaaaaaacacaaaagtt

SEQ ID NO: 122291 - DNA, 24 bp, Artificial sequence
  SiRNA target sequence
tcagtcaaaaaaacacaaaagtta

SEQ ID NO: 122292 - DNA, 24 bp, Artificial sequence
  SiRNA target sequence
cagtcaaaaaaacacaaaagttag

SEQ ID NO: 122293 - DNA, 24 bp, Artificial sequence
  SiRNA target sequence
agtcaaaaaaacacaaaagttagt

SEQ ID NO: 122294 - DNA, 24 bp, Artificial sequence
  SiRNA target sequence
gtcaaaaaaacacaaaagttagtg

SEQ ID NO: 122295 - DNA, 24 bp, Artificial sequence
  SiRNA target sequence
tcaaaaaaacacaaaagttagtga

SEQ ID NO: 122296 - DNA, 24 bp, Artificial sequence
  SiRNA target sequence
caaaaaaacacaaaagttagtgat

SEQ ID NO: 122297 - DNA, 24 bp, Artificial sequence
  SiRNA target sequence
aaaaaaacacaaaagttagtgata

SEQ ID NO: 122298 - DNA, 24 bp, Artificial sequence
  SiRNA target sequence
aaaaaacacaaaagttagtgatag

SEQ ID NO: 122299 - DNA, 24 bp, Artificial sequence
  SiRNA target sequence
aaaaacacaaaagttagtgatagt

SEQ ID NO: 122300 - DNA, 24 bp, Artificial sequence
  SiRNA target sequence
aaaacacaaaagttagtgatagtt

SEQ ID NO: 122301 - DNA, 24 bp, Artificial sequence
  SiRNA target sequence
aaacacaaaagttagtgatagttg

SEQ ID NO: 122302 - DNA, 24 bp, Artificial sequence
  SiRNA target sequence
aacacaaaagttagtgatagttga

SEQ ID NO: 122303 - DNA, 24 bp, Artificial sequence
  SiRNA target sequence
acacaaaagttagtgatagttgat

SEQ ID NO: 122304 - DNA, 24 bp, Artificial sequence
  SiRNA target sequence
cacaaaagttagtgatagttgatt

SEQ ID NO: 122305 - DNA, 24 bp, Artificial sequence
  SiRNA target sequence
acaaaagttagtgatagttgattt

SEQ ID NO: 122306 - DNA, 24 bp, Artificial sequence
  SiRNA target sequence
caaaagttagtgatagttgatttt

SEQ ID NO: 122307 - DNA, 24 bp, Artificial sequence
  SiRNA target sequence
aaaagttagtgatagttgattttg

SEQ ID NO: 122308 - DNA, 24 bp, Artificial sequence
  SiRNA target sequence
aaagttagtgatagttgattttgc

SEQ ID NO: 122309 - DNA, 24 bp, Artificial sequence
  SiRNA target sequence
aagttagtgatagttgattttgca

SEQ ID NO: 122310 - DNA, 24 bp, Artificial sequence
  SiRNA target sequence
agttagtgatagttgattttgcat

SEQ ID NO: 122311 - DNA, 24 bp, Artificial sequence
  SiRNA target sequence
gttagtgatagttgattttgcata

SEQ ID NO: 122312 - DNA, 24 bp, Artificial sequence
  SiRNA target sequence
ttagtgatagttgattttgcatat

SEQ ID NO: 122313 - DNA, 24 bp, Artificial sequence
  SiRNA target sequence
tagtgatagttgattttgcatatc

SEQ ID NO: 122314 - DNA, 24 bp, Artificial sequence
  SiRNA target sequence
agtgatagttgattttgcatatcc

SEQ ID NO: 122315 - DNA, 24 bp, Artificial sequence
  SiRNA target sequence
gtgatagttgattttgcatatcct

SEQ ID NO: 122316 - DNA, 24 bp, Artificial sequence
  SiRNA target sequence
tgatagttgattttgcatatccta

SEQ ID NO: 122317 - DNA, 24 bp, Artificial sequence
  SiRNA target sequence
gatagttgattttgcatatcctac

SEQ ID NO: 122318 - DNA, 24 bp, Artificial sequence
  SiRNA target sequence
atagttgattttgcatatcctact

SEQ ID NO: 122319 - DNA, 24 bp, Artificial sequence
  SiRNA target sequence
tagttgattttgcatatcctactt

SEQ ID NO: 122320 - DNA, 24 bp, Artificial sequence
  SiRNA target sequence
agttgattttgcatatcctacttt

SEQ ID NO: 122321 - DNA, 24 bp, Artificial sequence
  SiRNA target sequence
gttgattttgcatatcctactttc

SEQ ID NO: 122322 - DNA, 24 bp, Artificial sequence
  SiRNA target sequence
ttgattttgcatatcctactttca

SEQ ID NO: 122323 - DNA, 24 bp, Artificial sequence
  SiRNA target sequence
tgattttgcatatcctactttcaa

SEQ ID NO: 122324 - DNA, 24 bp, Artificial sequence
  SiRNA target sequence
gattttgcatatcctactttcaat

SEQ ID NO: 122325 - DNA, 24 bp, Artificial sequence
  SiRNA target sequence
attttgcatatcctactttcaata

SEQ ID NO: 122326 - DNA, 24 bp, Artificial sequence
  SiRNA target sequence
ttttgcatatcctactttcaatat

SEQ ID NO: 122327 - DNA, 24 bp, Artificial sequence
  SiRNA target sequence
tttgcatatcctactttcaatatt

SEQ ID NO: 122328 - DNA, 24 bp, Artificial sequence
  SiRNA target sequence
ttgcatatcctactttcaatattg

SEQ ID NO: 122329 - DNA, 24 bp, Artificial sequence
  SiRNA target sequence
tgcatatcctactttcaatattgc

SEQ ID NO: 122330 - DNA, 24 bp, Artificial sequence
  SiRNA target sequence
gcatatcctactttcaatattgcg

SEQ ID NO: 122331 - DNA, 24 bp, Artificial sequence
  SiRNA target sequence
catatcctactttcaatattgcga

SEQ ID NO: 122332 - DNA, 24 bp, Artificial sequence
  SiRNA target sequence
atatcctactttcaatattgcgag

SEQ ID NO: 122333 - DNA, 24 bp, Artificial sequence
  SiRNA target sequence
tatcctactttcaatattgcgagt

SEQ ID NO: 122334 - DNA, 24 bp, Artificial sequence
  SiRNA target sequence
atcctactttcaatattgcgagtg

SEQ ID NO: 122335 - DNA, 24 bp, Artificial sequence
  SiRNA target sequence
tcctactttcaatattgcgagtga

SEQ ID NO: 122336 - DNA, 24 bp, Artificial sequence
  SiRNA target sequence
cctactttcaatattgcgagtgaa

SEQ ID NO: 122337 - DNA, 24 bp, Artificial sequence
  SiRNA target sequence
ctactttcaatattgcgagtgaaa

SEQ ID NO: 122338 - DNA, 24 bp, Artificial sequence
  SiRNA target sequence
tactttcaatattgcgagtgaaat

SEQ ID NO: 122339 - DNA, 24 bp, Artificial sequence
  SiRNA target sequence
actttcaatattgcgagtgaaata

SEQ ID NO: 122340 - DNA, 24 bp, Artificial sequence
  SiRNA target sequence
ctttcaatattgcgagtgaaatag

SEQ ID NO: 122341 - DNA, 24 bp, Artificial sequence
  SiRNA target sequence
tttcaatattgcgagtgaaatagc

SEQ ID NO: 122342 - DNA, 24 bp, Artificial sequence
  SiRNA target sequence
ttcaatattgcgagtgaaatagct

SEQ ID NO: 122343 - DNA, 24 bp, Artificial sequence
  SiRNA target sequence
tcaatattgcgagtgaaatagctg

SEQ ID NO: 122344 - DNA, 24 bp, Artificial sequence
  SiRNA target sequence
caatattgcgagtgaaatagctgc

SEQ ID NO: 122345 - DNA, 24 bp, Artificial sequence
  SiRNA target sequence
aatattgcgagtgaaatagctgcg

SEQ ID NO: 122346 - DNA, 24 bp, Artificial sequence
  SiRNA target sequence
atattgcgagtgaaatagctgcgc

SEQ ID NO: 122347 - DNA, 24 bp, Artificial sequence
  SiRNA target sequence
tattgcgagtgaaatagctgcgca

SEQ ID NO: 122348 - DNA, 24 bp, Artificial sequence
  SiRNA target sequence
attgcgagtgaaatagctgcgcac

SEQ ID NO: 122349 - DNA, 24 bp, Artificial sequence
  SiRNA target sequence
ttgcgagtgaaatagctgcgcact

SEQ ID NO: 122350 - DNA, 24 bp, Artificial sequence
  SiRNA target sequence
tgcgagtgaaatagctgcgcactt

SEQ ID NO: 122351 - DNA, 24 bp, Artificial sequence
  SiRNA target sequence
gcgagtgaaatagctgcgcacttt

SEQ ID NO: 122352 - DNA, 24 bp, Artificial sequence
  SiRNA target sequence
cgagtgaaatagctgcgcactttt

SEQ ID NO: 122353 - DNA, 24 bp, Artificial sequence
  SiRNA target sequence
gagtgaaatagctgcgcactttta

SEQ ID NO: 122354 - DNA, 24 bp, Artificial sequence
  SiRNA target sequence
agtgaaatagctgcgcacttttac

SEQ ID NO: 122355 - DNA, 24 bp, Artificial sequence
  SiRNA target sequence
gtgaaatagctgcgcacttttacg

SEQ ID NO: 122356 - DNA, 24 bp, Artificial sequence
  SiRNA target sequence
tgaaatagctgcgcacttttacga

SEQ ID NO: 122357 - DNA, 24 bp, Artificial sequence
  SiRNA target sequence
gaaatagctgcgcacttttacgaa

SEQ ID NO: 122358 - DNA, 24 bp, Artificial sequence
  SiRNA target sequence
aaatagctgcgcacttttacgaaa

SEQ ID NO: 122359 - DNA, 24 bp, Artificial sequence
  SiRNA target sequence
aatagctgcgcacttttacgaaaa

SEQ ID NO: 122360 - DNA, 24 bp, Artificial sequence
  SiRNA target sequence
atagctgcgcacttttacgaaaaa

SEQ ID NO: 122361 - DNA, 24 bp, Artificial sequence
  SiRNA target sequence
tagctgcgcacttttacgaaaaat

SEQ ID NO: 122362 - DNA, 24 bp, Artificial sequence
  SiRNA target sequence
agctgcgcacttttacgaaaaatt

SEQ ID NO: 122363 - DNA, 24 bp, Artificial sequence
  SiRNA target sequence
gctgcgcacttttacgaaaaattt

SEQ ID NO: 122364 - DNA, 24 bp, Artificial sequence
  SiRNA target sequence
ctgcgcacttttacgaaaaattta

SEQ ID NO: 122365 - DNA, 24 bp, Artificial sequence
  SiRNA target sequence
tgcgcacttttacgaaaaatttaa

SEQ ID NO: 122366 - DNA, 24 bp, Artificial sequence
  SiRNA target sequence
gcgcacttttacgaaaaatttaaa

SEQ ID NO: 122367 - DNA, 24 bp, Artificial sequence
  SiRNA target sequence
cgcacttttacgaaaaatttaaag

SEQ ID NO: 122368 - DNA, 24 bp, Artificial sequence
  SiRNA target sequence
gcacttttacgaaaaatttaaaga

SEQ ID NO: 122369 - DNA, 24 bp, Artificial sequence
  SiRNA target sequence
cacttttacgaaaaatttaaagat

SEQ ID NO: 122370 - DNA, 24 bp, Artificial sequence
  SiRNA target sequence
acttttacgaaaaatttaaagata

SEQ ID NO: 122371 - DNA, 24 bp, Artificial sequence
  SiRNA target sequence
cttttacgaaaaatttaaagatat

SEQ ID NO: 122372 - DNA, 24 bp, Artificial sequence
  SiRNA target sequence
ttttacgaaaaatttaaagatata

SEQ ID NO: 122373 - DNA, 24 bp, Artificial sequence
  SiRNA target sequence
tttacgaaaaatttaaagatataa

SEQ ID NO: 122374 - DNA, 24 bp, Artificial sequence
  SiRNA target sequence
ttacgaaaaatttaaagatataaa

SEQ ID NO: 122375 - DNA, 24 bp, Artificial sequence
  SiRNA target sequence
tacgaaaaatttaaagatataaaa

SEQ ID NO: 122376 - DNA, 24 bp, Artificial sequence
  SiRNA target sequence
acgaaaaatttaaagatataaaaa

SEQ ID NO: 122377 - DNA, 24 bp, Artificial sequence
  SiRNA target sequence
cgaaaaatttaaagatataaaaat

SEQ ID NO: 122378 - DNA, 24 bp, Artificial sequence
  SiRNA target sequence
gaaaaatttaaagatataaaaatt

SEQ ID NO: 122379 - DNA, 24 bp, Artificial sequence
  SiRNA target sequence
aaaaatttaaagatataaaaatta

SEQ ID NO: 122380 - DNA, 24 bp, Artificial sequence
  SiRNA target sequence
aaaatttaaagatataaaaattat

SEQ ID NO: 122381 - DNA, 24 bp, Artificial sequence
  SiRNA target sequence
aaatttaaagatataaaaattatg

SEQ ID NO: 122382 - DNA, 24 bp, Artificial sequence
  SiRNA target sequence
aatttaaagatataaaaattatgc

SEQ ID NO: 122383 - DNA, 24 bp, Artificial sequence
  SiRNA target sequence
atttaaagatataaaaattatgcg

SEQ ID NO: 122384 - DNA, 24 bp, Artificial sequence
  SiRNA target sequence
tttaaagatataaaaattatgcgt

SEQ ID NO: 122385 - DNA, 24 bp, Artificial sequence
  SiRNA target sequence
ttaaagatataaaaattatgcgtg

SEQ ID NO: 122386 - DNA, 24 bp, Artificial sequence
  SiRNA target sequence
taaagatataaaaattatgcgtgt

SEQ ID NO: 122387 - DNA, 24 bp, Artificial sequence
  SiRNA target sequence
aaagatataaaaattatgcgtgtt

SEQ ID NO: 122388 - DNA, 24 bp, Artificial sequence
  SiRNA target sequence
aagatataaaaattatgcgtgttc

SEQ ID NO: 122389 - DNA, 24 bp, Artificial sequence
  SiRNA target sequence
agatataaaaattatgcgtgttct

SEQ ID NO: 122390 - DNA, 24 bp, Artificial sequence
  SiRNA target sequence
gatataaaaattatgcgtgttctt

SEQ ID NO: 122391 - DNA, 24 bp, Artificial sequence
  SiRNA target sequence
atataaaaattatgcgtgttcttg

SEQ ID NO: 122392 - DNA, 24 bp, Artificial sequence
  SiRNA target sequence
tataaaaattatgcgtgttcttgc

SEQ ID NO: 122393 - DNA, 24 bp, Artificial sequence
  SiRNA target sequence
ataaaaattatgcgtgttcttgcg

SEQ ID NO: 122394 - DNA, 24 bp, Artificial sequence
  SiRNA target sequence
taaaaattatgcgtgttcttgcgc

SEQ ID NO: 122395 - DNA, 24 bp, Artificial sequence
  SiRNA target sequence
aaaaattatgcgtgttcttgcgca

SEQ ID NO: 122396 - DNA, 24 bp, Artificial sequence
  SiRNA target sequence
aaaattatgcgtgttcttgcgcaa

SEQ ID NO: 122397 - DNA, 24 bp, Artificial sequence
  SiRNA target sequence
aaattatgcgtgttcttgcgcaag

SEQ ID NO: 122398 - DNA, 24 bp, Artificial sequence
  SiRNA target sequence
aattatgcgtgttcttgcgcaaga

SEQ ID NO: 122399 - DNA, 24 bp, Artificial sequence
  SiRNA target sequence
attatgcgtgttcttgcgcaagat

SEQ ID NO: 122400 - DNA, 24 bp, Artificial sequence
  SiRNA target sequence
ttatgcgtgttcttgcgcaagata

SEQ ID NO: 122401 - DNA, 24 bp, Artificial sequence
  SiRNA target sequence
tatgcgtgttcttgcgcaagatat

SEQ ID NO: 122402 - DNA, 24 bp, Artificial sequence
  SiRNA target sequence
atgcgtgttcttgcgcaagatatt

SEQ ID NO: 122403 - DNA, 24 bp, Artificial sequence
  SiRNA target sequence
tgcgtgttcttgcgcaagatattc

SEQ ID NO: 122404 - DNA, 24 bp, Artificial sequence
  SiRNA target sequence
gcgtgttcttgcgcaagatattcc

SEQ ID NO: 122405 - DNA, 24 bp, Artificial sequence
  SiRNA target sequence
cgtgttcttgcgcaagatattcct

SEQ ID NO: 122406 - DNA, 24 bp, Artificial sequence
  SiRNA target sequence
gtgttcttgcgcaagatattccta

SEQ ID NO: 122407 - DNA, 24 bp, Artificial sequence
  SiRNA target sequence
tgttcttgcgcaagatattcctac

SEQ ID NO: 122408 - DNA, 24 bp, Artificial sequence
  SiRNA target sequence
gttcttgcgcaagatattcctaca

SEQ ID NO: 122409 - DNA, 24 bp, Artificial sequence
  SiRNA target sequence
ttcttgcgcaagatattcctacac

SEQ ID NO: 122410 - DNA, 24 bp, Artificial sequence
  SiRNA target sequence
tcttgcgcaagatattcctacacc

SEQ ID NO: 122411 - DNA, 24 bp, Artificial sequence
  SiRNA target sequence
cttgcgcaagatattcctacaccg

SEQ ID NO: 122412 - DNA, 24 bp, Artificial sequence
  SiRNA target sequence
ttgcgcaagatattcctacaccgt

SEQ ID NO: 122413 - DNA, 24 bp, Artificial sequence
  SiRNA target sequence
tgcgcaagatattcctacaccgta

SEQ ID NO: 122414 - DNA, 24 bp, Artificial sequence
  SiRNA target sequence
gcgcaagatattcctacaccgtat

SEQ ID NO: 122415 - DNA, 24 bp, Artificial sequence
  SiRNA target sequence
cgcaagatattcctacaccgtatg

SEQ ID NO: 122416 - DNA, 24 bp, Artificial sequence
  SiRNA target sequence
gcaagatattcctacaccgtatgc

SEQ ID NO: 122417 - DNA, 24 bp, Artificial sequence
  SiRNA target sequence
caagatattcctacaccgtatgca

SEQ ID NO: 122418 - DNA, 24 bp, Artificial sequence
  SiRNA target sequence
aagatattcctacaccgtatgcac

SEQ ID NO: 122419 - DNA, 24 bp, Artificial sequence
  SiRNA target sequence
agatattcctacaccgtatgcact

SEQ ID NO: 122420 - DNA, 24 bp, Artificial sequence
  SiRNA target sequence
gatattcctacaccgtatgcactt

SEQ ID NO: 122421 - DNA, 24 bp, Artificial sequence
  SiRNA target sequence
atattcctacaccgtatgcactta

SEQ ID NO: 122422 - DNA, 24 bp, Artificial sequence
  SiRNA target sequence
tattcctacaccgtatgcacttaa

SEQ ID NO: 122423 - DNA, 24 bp, Artificial sequence
  SiRNA target sequence
attcctacaccgtatgcacttaat

SEQ ID NO: 122424 - DNA, 24 bp, Artificial sequence
  SiRNA target sequence
ttcctacaccgtatgcacttaatc

SEQ ID NO: 122425 - DNA, 24 bp, Artificial sequence
  SiRNA target sequence
tcctacaccgtatgcacttaatct

SEQ ID NO: 122426 - DNA, 24 bp, Artificial sequence
  SiRNA target sequence
cctacaccgtatgcacttaatctt

SEQ ID NO: 122427 - DNA, 24 bp, Artificial sequence
  SiRNA target sequence
ctacaccgtatgcacttaatcttg

SEQ ID NO: 122428 - DNA, 24 bp, Artificial sequence
  SiRNA target sequence
tacaccgtatgcacttaatcttga

SEQ ID NO: 122429 - DNA, 24 bp, Artificial sequence
  SiRNA target sequence
acaccgtatgcacttaatcttgaa

SEQ ID NO: 122430 - DNA, 24 bp, Artificial sequence
  SiRNA target sequence
caccgtatgcacttaatcttgaaa

SEQ ID NO: 122431 - DNA, 24 bp, Artificial sequence
  SiRNA target sequence
accgtatgcacttaatcttgaaaa

SEQ ID NO: 122432 - DNA, 24 bp, Artificial sequence
  SiRNA target sequence
ccgtatgcacttaatcttgaaaaa

SEQ ID NO: 122433 - DNA, 24 bp, Artificial sequence
  SiRNA target sequence
cgtatgcacttaatcttgaaaaaa

SEQ ID NO: 122434 - DNA, 24 bp, Artificial sequence
  SiRNA target sequence
gtatgcacttaatcttgaaaaaat

SEQ ID NO: 122435 - DNA, 24 bp, Artificial sequence
  SiRNA target sequence
tatgcacttaatcttgaaaaaatg

SEQ ID NO: 122436 - DNA, 24 bp, Artificial sequence
  SiRNA target sequence
atgcacttaatcttgaaaaaatgt

SEQ ID NO: 122437 - DNA, 24 bp, Artificial sequence
  SiRNA target sequence
tgcacttaatcttgaaaaaatgtc

SEQ ID NO: 122438 - DNA, 24 bp, Artificial sequence
  SiRNA target sequence
gcacttaatcttgaaaaaatgtct

SEQ ID NO: 122439 - DNA, 24 bp, Artificial sequence
  SiRNA target sequence
cacttaatcttgaaaaaatgtctt

SEQ ID NO: 122440 - DNA, 24 bp, Artificial sequence
  SiRNA target sequence
acttaatcttgaaaaaatgtctta

SEQ ID NO: 122441 - DNA, 24 bp, Artificial sequence
  SiRNA target sequence
cttaatcttgaaaaaatgtcttat

SEQ ID NO: 122442 - DNA, 24 bp, Artificial sequence
  SiRNA target sequence
ttaatcttgaaaaaatgtcttatc

SEQ ID NO: 122443 - DNA, 24 bp, Artificial sequence
  SiRNA target sequence
taatcttgaaaaaatgtcttatcc

SEQ ID NO: 122444 - DNA, 24 bp, Artificial sequence
  SiRNA target sequence
aatcttgaaaaaatgtcttatccg

SEQ ID NO: 122445 - DNA, 24 bp, Artificial sequence
  SiRNA target sequence
atcttgaaaaaatgtcttatccga

SEQ ID NO: 122446 - DNA, 24 bp, Artificial sequence
  SiRNA target sequence
tcttgaaaaaatgtcttatccgac

SEQ ID NO: 122447 - DNA, 24 bp, Artificial sequence
  SiRNA target sequence
cttgaaaaaatgtcttatccgaca

SEQ ID NO: 122448 - DNA, 24 bp, Artificial sequence
  SiRNA target sequence
ttgaaaaaatgtcttatccgacat

SEQ ID NO: 122449 - DNA, 24 bp, Artificial sequence
  SiRNA target sequence
tgaaaaaatgtcttatccgacatg

SEQ ID NO: 122450 - DNA, 24 bp, Artificial sequence
  SiRNA target sequence
gaaaaaatgtcttatccgacatgc

SEQ ID NO: 122451 - DNA, 24 bp, Artificial sequence
  SiRNA target sequence
aaaaaatgtcttatccgacatgca

SEQ ID NO: 122452 - DNA, 24 bp, Artificial sequence
  SiRNA target sequence
aaaaatgtcttatccgacatgcaa

SEQ ID NO: 122453 - DNA, 24 bp, Artificial sequence
  SiRNA target sequence
aaaatgtcttatccgacatgcaat

SEQ ID NO: 122454 - DNA, 24 bp, Artificial sequence
  SiRNA target sequence
aaatgtcttatccgacatgcaatg

SEQ ID NO: 122455 - DNA, 24 bp, Artificial sequence
  SiRNA target sequence
aatgtcttatccgacatgcaatga

SEQ ID NO: 122456 - DNA, 24 bp, Artificial sequence
  SiRNA target sequence
atgtcttatccgacatgcaatgat

SEQ ID NO: 122457 - DNA, 24 bp, Artificial sequence
  SiRNA target sequence
tgtcttatccgacatgcaatgata

SEQ ID NO: 122458 - DNA, 24 bp, Artificial sequence
  SiRNA target sequence
gtcttatccgacatgcaatgatat

SEQ ID NO: 122459 - DNA, 24 bp, Artificial sequence
  SiRNA target sequence
tcttatccgacatgcaatgatatt

SEQ ID NO: 122460 - DNA, 24 bp, Artificial sequence
  SiRNA target sequence
cttatccgacatgcaatgatattg

SEQ ID NO: 122461 - DNA, 24 bp, Artificial sequence
  SiRNA target sequence
ttatccgacatgcaatgatattgt

SEQ ID NO: 122462 - DNA, 24 bp, Artificial sequence
  SiRNA target sequence
tatccgacatgcaatgatattgta

SEQ ID NO: 122463 - DNA, 24 bp, Artificial sequence
  SiRNA target sequence
atccgacatgcaatgatattgtaa

SEQ ID NO: 122464 - DNA, 24 bp, Artificial sequence
  SiRNA target sequence
tccgacatgcaatgatattgtaaa

SEQ ID NO: 122465 - DNA, 24 bp, Artificial sequence
  SiRNA target sequence
ccgacatgcaatgatattgtaaat

SEQ ID NO: 122466 - DNA, 24 bp, Artificial sequence
  SiRNA target sequence
cgacatgcaatgatattgtaaatg

SEQ ID NO: 122467 - DNA, 24 bp, Artificial sequence
  SiRNA target sequence
gacatgcaatgatattgtaaatgc

SEQ ID NO: 122468 - DNA, 24 bp, Artificial sequence
  SiRNA target sequence
acatgcaatgatattgtaaatgct

SEQ ID NO: 122469 - DNA, 24 bp, Artificial sequence
  SiRNA target sequence
catgcaatgatattgtaaatgctg

SEQ ID NO: 122470 - DNA, 24 bp, Artificial sequence
  SiRNA target sequence
atgcaatgatattgtaaatgctgt

SEQ ID NO: 122471 - DNA, 24 bp, Artificial sequence
  SiRNA target sequence
tgcaatgatattgtaaatgctgtt

SEQ ID NO: 122472 - DNA, 24 bp, Artificial sequence
  SiRNA target sequence
gcaatgatattgtaaatgctgtta

SEQ ID NO: 122473 - DNA, 24 bp, Artificial sequence
  SiRNA target sequence
caatgatattgtaaatgctgttac

SEQ ID NO: 122474 - DNA, 24 bp, Artificial sequence
  SiRNA target sequence
aatgatattgtaaatgctgttaca

SEQ ID NO: 122475 - DNA, 24 bp, Artificial sequence
  SiRNA target sequence
atgatattgtaaatgctgttacaa

SEQ ID NO: 122476 - DNA, 24 bp, Artificial sequence
  SiRNA target sequence
tgatattgtaaatgctgttacaaa

SEQ ID NO: 122477 - DNA, 24 bp, Artificial sequence
  SiRNA target sequence
gatattgtaaatgctgttacaaaa

SEQ ID NO: 122478 - DNA, 24 bp, Artificial sequence
  SiRNA target sequence
atattgtaaatgctgttacaaaaa

SEQ ID NO: 122479 - DNA, 24 bp, Artificial sequence
  SiRNA target sequence
tattgtaaatgctgttacaaaaat

SEQ ID NO: 122480 - DNA, 24 bp, Artificial sequence
  SiRNA target sequence
attgtaaatgctgttacaaaaata

SEQ ID NO: 122481 - DNA, 24 bp, Artificial sequence
  SiRNA target sequence
ttgtaaatgctgttacaaaaataa

SEQ ID NO: 122482 - DNA, 24 bp, Artificial sequence
  SiRNA target sequence
tgtaaatgctgttacaaaaataaa

SEQ ID NO: 122483 - DNA, 24 bp, Artificial sequence
  SiRNA target sequence
gtaaatgctgttacaaaaataaat

SEQ ID NO: 122484 - DNA, 24 bp, Artificial sequence
  SiRNA target sequence
taaatgctgttacaaaaataaatt

SEQ ID NO: 122485 - DNA, 24 bp, Artificial sequence
  SiRNA target sequence
aaatgctgttacaaaaataaattc

SEQ ID NO: 122486 - DNA, 24 bp, Artificial sequence
  SiRNA target sequence
aatgctgttacaaaaataaattca

SEQ ID NO: 122487 - DNA, 24 bp, Artificial sequence
  SiRNA target sequence
atgctgttacaaaaataaattcat

SEQ ID NO: 122488 - DNA, 24 bp, Artificial sequence
  SiRNA target sequence
tgctgttacaaaaataaattcata

SEQ ID NO: 122489 - DNA, 24 bp, Artificial sequence
  SiRNA target sequence
gctgttacaaaaataaattcatag

SEQ ID NO: 122490 - DNA, 25 bp, Artificial sequence
  SiRNA target sequence
atgatagaaattcgcgatcttataa

SEQ ID NO: 122491 - DNA, 25 bp, Artificial sequence
  SiRNA target sequence
tgatagaaattcgcgatcttataaa

SEQ ID NO: 122492 - DNA, 25 bp, Artificial sequence
  SiRNA target sequence
gatagaaattcgcgatcttataaat

SEQ ID NO: 122493 - DNA, 25 bp, Artificial sequence
  SiRNA target sequence
atagaaattcgcgatcttataaatc

SEQ ID NO: 122494 - DNA, 25 bp, Artificial sequence
  SiRNA target sequence
tagaaattcgcgatcttataaatca

SEQ ID NO: 122495 - DNA, 25 bp, Artificial sequence
  SiRNA target sequence
agaaattcgcgatcttataaatcaa

SEQ ID NO: 122496 - DNA, 25 bp, Artificial sequence
  SiRNA target sequence
gaaattcgcgatcttataaatcaag

SEQ ID NO: 122497 - DNA, 25 bp, Artificial sequence
  SiRNA target sequence
aaattcgcgatcttataaatcaagc

SEQ ID NO: 122498 - DNA, 25 bp, Artificial sequence
  SiRNA target sequence
aattcgcgatcttataaatcaagca

SEQ ID NO: 122499 - DNA, 25 bp, Artificial sequence
  SiRNA target sequence
attcgcgatcttataaatcaagcat

SEQ ID NO: 122500 - DNA, 25 bp, Artificial sequence
  SiRNA target sequence
ttcgcgatcttataaatcaagcatt

SEQ ID NO: 122501 - DNA, 25 bp, Artificial sequence
  SiRNA target sequence
tcgcgatcttataaatcaagcattg

SEQ ID NO: 122502 - DNA, 25 bp, Artificial sequence
  SiRNA target sequence
cgcgatcttataaatcaagcattgg

SEQ ID NO: 122503 - DNA, 25 bp, Artificial sequence
  SiRNA target sequence
gcgatcttataaatcaagcattgga

SEQ ID NO: 122504 - DNA, 25 bp, Artificial sequence
  SiRNA target sequence
cgatcttataaatcaagcattggat

SEQ ID NO: 122505 - DNA, 25 bp, Artificial sequence
  SiRNA target sequence
gatcttataaatcaagcattggatg

SEQ ID NO: 122506 - DNA, 25 bp, Artificial sequence
  SiRNA target sequence
atcttataaatcaagcattggatga

SEQ ID NO: 122507 - DNA, 25 bp, Artificial sequence
  SiRNA target sequence
tcttataaatcaagcattggatgag

SEQ ID NO: 122508 - DNA, 25 bp, Artificial sequence
  SiRNA target sequence
cttataaatcaagcattggatgagg

SEQ ID NO: 122509 - DNA, 25 bp, Artificial sequence
  SiRNA target sequence
ttataaatcaagcattggatgagga

SEQ ID NO: 122510 - DNA, 25 bp, Artificial sequence
  SiRNA target sequence
tataaatcaagcattggatgaggaa

SEQ ID NO: 122511 - DNA, 25 bp, Artificial sequence
  SiRNA target sequence
ataaatcaagcattggatgaggaaa

SEQ ID NO: 122512 - DNA, 25 bp, Artificial sequence
  SiRNA target sequence
taaatcaagcattggatgaggaaat

SEQ ID NO: 122513 - DNA, 25 bp, Artificial sequence
  SiRNA target sequence
aaatcaagcattggatgaggaaatg

SEQ ID NO: 122514 - DNA, 25 bp, Artificial sequence
  SiRNA target sequence
aatcaagcattggatgaggaaatgg

SEQ ID NO: 122515 - DNA, 25 bp, Artificial sequence
  SiRNA target sequence
atcaagcattggatgaggaaatggg

SEQ ID NO: 122516 - DNA, 25 bp, Artificial sequence
  SiRNA target sequence
tcaagcattggatgaggaaatggga

SEQ ID NO: 122517 - DNA, 25 bp, Artificial sequence
  SiRNA target sequence
caagcattggatgaggaaatgggaa

SEQ ID NO: 122518 - DNA, 25 bp, Artificial sequence
  SiRNA target sequence
aagcattggatgaggaaatgggaat

SEQ ID NO: 122519 - DNA, 25 bp, Artificial sequence
  SiRNA target sequence
agcattggatgaggaaatgggaatg

SEQ ID NO: 122520 - DNA, 25 bp, Artificial sequence
  SiRNA target sequence
gcattggatgaggaaatgggaatgg

SEQ ID NO: 122521 - DNA, 25 bp, Artificial sequence
  SiRNA target sequence
cattggatgaggaaatgggaatgga

SEQ ID NO: 122522 - DNA, 25 bp, Artificial sequence
  SiRNA target sequence
attggatgaggaaatgggaatggat

SEQ ID NO: 122523 - DNA, 25 bp, Artificial sequence
  SiRNA target sequence
ttggatgaggaaatgggaatggatc

SEQ ID NO: 122524 - DNA, 25 bp, Artificial sequence
  SiRNA target sequence
tggatgaggaaatgggaatggatca

SEQ ID NO: 122525 - DNA, 25 bp, Artificial sequence
  SiRNA target sequence
ggatgaggaaatgggaatggatcat

SEQ ID NO: 122526 - DNA, 25 bp, Artificial sequence
  SiRNA target sequence
gatgaggaaatgggaatggatcata

SEQ ID NO: 122527 - DNA, 25 bp, Artificial sequence
  SiRNA target sequence
atgaggaaatgggaatggatcataa

SEQ ID NO: 122528 - DNA, 25 bp, Artificial sequence
  SiRNA target sequence
tgaggaaatgggaatggatcataat

SEQ ID NO: 122529 - DNA, 25 bp, Artificial sequence
  SiRNA target sequence
gaggaaatgggaatggatcataatg

SEQ ID NO: 122530 - DNA, 25 bp, Artificial sequence
  SiRNA target sequence
aggaaatgggaatggatcataatgt

SEQ ID NO: 122531 - DNA, 25 bp, Artificial sequence
  SiRNA target sequence
ggaaatgggaatggatcataatgta

SEQ ID NO: 122532 - DNA, 25 bp, Artificial sequence
  SiRNA target sequence
gaaatgggaatggatcataatgtat

SEQ ID NO: 122533 - DNA, 25 bp, Artificial sequence
  SiRNA target sequence
aaatgggaatggatcataatgtata

SEQ ID NO: 122534 - DNA, 25 bp, Artificial sequence
  SiRNA target sequence
aatgggaatggatcataatgtatat

SEQ ID NO: 122535 - DNA, 25 bp, Artificial sequence
  SiRNA target sequence
atgggaatggatcataatgtatata

SEQ ID NO: 122536 - DNA, 25 bp, Artificial sequence
  SiRNA target sequence
tgggaatggatcataatgtatatat

SEQ ID NO: 122537 - DNA, 25 bp, Artificial sequence
  SiRNA target sequence
gggaatggatcataatgtatatata

SEQ ID NO: 122538 - DNA, 25 bp, Artificial sequence
  SiRNA target sequence
ggaatggatcataatgtatatataa

SEQ ID NO: 122539 - DNA, 25 bp, Artificial sequence
  SiRNA target sequence
gaatggatcataatgtatatataat

SEQ ID NO: 122540 - DNA, 25 bp, Artificial sequence
  SiRNA target sequence
aatggatcataatgtatatataata

SEQ ID NO: 122541 - DNA, 25 bp, Artificial sequence
  SiRNA target sequence
atggatcataatgtatatataatag

SEQ ID NO: 122542 - DNA, 25 bp, Artificial sequence
  SiRNA target sequence
tggatcataatgtatatataatagg

SEQ ID NO: 122543 - DNA, 25 bp, Artificial sequence
  SiRNA target sequence
ggatcataatgtatatataatagga

SEQ ID NO: 122544 - DNA, 25 bp, Artificial sequence
  SiRNA target sequence
gatcataatgtatatataataggag

SEQ ID NO: 122545 - DNA, 25 bp, Artificial sequence
  SiRNA target sequence
atcataatgtatatataataggaga

SEQ ID NO: 122546 - DNA, 25 bp, Artificial sequence
  SiRNA target sequence
tcataatgtatatataataggagaa

SEQ ID NO: 122547 - DNA, 25 bp, Artificial sequence
  SiRNA target sequence
cataatgtatatataataggagaag

SEQ ID NO: 122548 - DNA, 25 bp, Artificial sequence
  SiRNA target sequence
ataatgtatatataataggagaaga

SEQ ID NO: 122549 - DNA, 25 bp, Artificial sequence
  SiRNA target sequence
taatgtatatataataggagaagaa

SEQ ID NO: 122550 - DNA, 25 bp, Artificial sequence
  SiRNA target sequence
aatgtatatataataggagaagaag

SEQ ID NO: 122551 - DNA, 25 bp, Artificial sequence
  SiRNA target sequence
atgtatatataataggagaagaagt

SEQ ID NO: 122552 - DNA, 25 bp, Artificial sequence
  SiRNA target sequence
tgtatatataataggagaagaagta

SEQ ID NO: 122553 - DNA, 25 bp, Artificial sequence
  SiRNA target sequence
gtatatataataggagaagaagtag

SEQ ID NO: 122554 - DNA, 25 bp, Artificial sequence
  SiRNA target sequence
tatatataataggagaagaagtagg

SEQ ID NO: 122555 - DNA, 25 bp, Artificial sequence
  SiRNA target sequence
atatataataggagaagaagtaggc

SEQ ID NO: 122556 - DNA, 25 bp, Artificial sequence
  SiRNA target sequence
tatataataggagaagaagtaggca

SEQ ID NO: 122557 - DNA, 25 bp, Artificial sequence
  SiRNA target sequence
atataataggagaagaagtaggcat

SEQ ID NO: 122558 - DNA, 25 bp, Artificial sequence
  SiRNA target sequence
tataataggagaagaagtaggcatc

SEQ ID NO: 122559 - DNA, 25 bp, Artificial sequence
  SiRNA target sequence
ataataggagaagaagtaggcatct

SEQ ID NO: 122560 - DNA, 25 bp, Artificial sequence
  SiRNA target sequence
taataggagaagaagtaggcatctc

SEQ ID NO: 122561 - DNA, 25 bp, Artificial sequence
  SiRNA target sequence
aataggagaagaagtaggcatctct

SEQ ID NO: 122562 - DNA, 25 bp, Artificial sequence
  SiRNA target sequence
ataggagaagaagtaggcatctctg

SEQ ID NO: 122563 - DNA, 25 bp, Artificial sequence
  SiRNA target sequence
taggagaagaagtaggcatctctgg

SEQ ID NO: 122564 - DNA, 25 bp, Artificial sequence
  SiRNA target sequence
aggagaagaagtaggcatctctggt

SEQ ID NO: 122565 - DNA, 25 bp, Artificial sequence
  SiRNA target sequence
ggagaagaagtaggcatctctggtg

SEQ ID NO: 122566 - DNA, 25 bp, Artificial sequence
  SiRNA target sequence
gagaagaagtaggcatctctggtgg

SEQ ID NO: 122567 - DNA, 25 bp, Artificial sequence
  SiRNA target sequence
agaagaagtaggcatctctggtggt

SEQ ID NO: 122568 - DNA, 25 bp, Artificial sequence
  SiRNA target sequence
gaagaagtaggcatctctggtggtc

SEQ ID NO: 122569 - DNA, 25 bp, Artificial sequence
  SiRNA target sequence
aagaagtaggcatctctggtggtcc

SEQ ID NO: 122570 - DNA, 25 bp, Artificial sequence
  SiRNA target sequence
agaagtaggcatctctggtggtcct

SEQ ID NO: 122571 - DNA, 25 bp, Artificial sequence
  SiRNA target sequence
gaagtaggcatctctggtggtcctc

SEQ ID NO: 122572 - DNA, 25 bp, Artificial sequence
  SiRNA target sequence
aagtaggcatctctggtggtcctca

SEQ ID NO: 122573 - DNA, 25 bp, Artificial sequence
  SiRNA target sequence
agtaggcatctctggtggtcctcac

SEQ ID NO: 122574 - DNA, 25 bp, Artificial sequence
  SiRNA target sequence
gtaggcatctctggtggtcctcacg

SEQ ID NO: 122575 - DNA, 25 bp, Artificial sequence
  SiRNA target sequence
taggcatctctggtggtcctcacgg

SEQ ID NO: 122576 - DNA, 25 bp, Artificial sequence
  SiRNA target sequence
aggcatctctggtggtcctcacggt

SEQ ID NO: 122577 - DNA, 25 bp, Artificial sequence
  SiRNA target sequence
ggcatctctggtggtcctcacggtc

SEQ ID NO: 122578 - DNA, 25 bp, Artificial sequence
  SiRNA target sequence
gcatctctggtggtcctcacggtct

SEQ ID NO: 122579 - DNA, 25 bp, Artificial sequence
  SiRNA target sequence
catctctggtggtcctcacggtctt

SEQ ID NO: 122580 - DNA, 25 bp, Artificial sequence
  SiRNA target sequence
atctctggtggtcctcacggtctta

SEQ ID NO: 122581 - DNA, 25 bp, Artificial sequence
  SiRNA target sequence
tctctggtggtcctcacggtcttac

SEQ ID NO: 122582 - DNA, 25 bp, Artificial sequence
  SiRNA target sequence
ctctggtggtcctcacggtcttact

SEQ ID NO: 122583 - DNA, 25 bp, Artificial sequence
  SiRNA target sequence
tctggtggtcctcacggtcttacta

SEQ ID NO: 122584 - DNA, 25 bp, Artificial sequence
  SiRNA target sequence
ctggtggtcctcacggtcttactaa

SEQ ID NO: 122585 - DNA, 25 bp, Artificial sequence
  SiRNA target sequence
tggtggtcctcacggtcttactaaa

SEQ ID NO: 122586 - DNA, 25 bp, Artificial sequence
  SiRNA target sequence
ggtggtcctcacggtcttactaaaa

SEQ ID NO: 122587 - DNA, 25 bp, Artificial sequence
  SiRNA target sequence
gtggtcctcacggtcttactaaaaa

SEQ ID NO: 122588 - DNA, 25 bp, Artificial sequence
  SiRNA target sequence
tggtcctcacggtcttactaaaaat

SEQ ID NO: 122589 - DNA, 25 bp, Artificial sequence
  SiRNA target sequence
ggtcctcacggtcttactaaaaatt

SEQ ID NO: 122590 - DNA, 25 bp, Artificial sequence
  SiRNA target sequence
gtcctcacggtcttactaaaaattt

SEQ ID NO: 122591 - DNA, 25 bp, Artificial sequence
  SiRNA target sequence
tcctcacggtcttactaaaaatttg

SEQ ID NO: 122592 - DNA, 25 bp, Artificial sequence
  SiRNA target sequence
cctcacggtcttactaaaaatttga

SEQ ID NO: 122593 - DNA, 25 bp, Artificial sequence
  SiRNA target sequence
ctcacggtcttactaaaaatttgat

SEQ ID NO: 122594 - DNA, 25 bp, Artificial sequence
  SiRNA target sequence
tcacggtcttactaaaaatttgatc

SEQ ID NO: 122595 - DNA, 25 bp, Artificial sequence
  SiRNA target sequence
cacggtcttactaaaaatttgatca

SEQ ID NO: 122596 - DNA, 25 bp, Artificial sequence
  SiRNA target sequence
acggtcttactaaaaatttgatcaa

SEQ ID NO: 122597 - DNA, 25 bp, Artificial sequence
  SiRNA target sequence
cggtcttactaaaaatttgatcaaa

SEQ ID NO: 122598 - DNA, 25 bp, Artificial sequence
  SiRNA target sequence
ggtcttactaaaaatttgatcaaaa

SEQ ID NO: 122599 - DNA, 25 bp, Artificial sequence
  SiRNA target sequence
gtcttactaaaaatttgatcaaaaa

SEQ ID NO: 122600 - DNA, 25 bp, Artificial sequence
  SiRNA target sequence
tcttactaaaaatttgatcaaaaaa

SEQ ID NO: 122601 - DNA, 25 bp, Artificial sequence
  SiRNA target sequence
cttactaaaaatttgatcaaaaaat

SEQ ID NO: 122602 - DNA, 25 bp, Artificial sequence
  SiRNA target sequence
ttactaaaaatttgatcaaaaaata

SEQ ID NO: 122603 - DNA, 25 bp, Artificial sequence
  SiRNA target sequence
tactaaaaatttgatcaaaaaatac

SEQ ID NO: 122604 - DNA, 25 bp, Artificial sequence
  SiRNA target sequence
actaaaaatttgatcaaaaaatacg

SEQ ID NO: 122605 - DNA, 25 bp, Artificial sequence
  SiRNA target sequence
ctaaaaatttgatcaaaaaatacgg

SEQ ID NO: 122606 - DNA, 25 bp, Artificial sequence
  SiRNA target sequence
taaaaatttgatcaaaaaatacggc

SEQ ID NO: 122607 - DNA, 25 bp, Artificial sequence
  SiRNA target sequence
aaaaatttgatcaaaaaatacggcg

SEQ ID NO: 122608 - DNA, 25 bp, Artificial sequence
  SiRNA target sequence
aaaatttgatcaaaaaatacggcga

SEQ ID NO: 122609 - DNA, 25 bp, Artificial sequence
  SiRNA target sequence
aaatttgatcaaaaaatacggcgat

SEQ ID NO: 122610 - DNA, 25 bp, Artificial sequence
  SiRNA target sequence
aatttgatcaaaaaatacggcgatc

SEQ ID NO: 122611 - DNA, 25 bp, Artificial sequence
  SiRNA target sequence
atttgatcaaaaaatacggcgatca

SEQ ID NO: 122612 - DNA, 25 bp, Artificial sequence
  SiRNA target sequence
tttgatcaaaaaatacggcgatcaa

SEQ ID NO: 122613 - DNA, 25 bp, Artificial sequence
  SiRNA target sequence
ttgatcaaaaaatacggcgatcaaa

SEQ ID NO: 122614 - DNA, 25 bp, Artificial sequence
  SiRNA target sequence
tgatcaaaaaatacggcgatcaaag

SEQ ID NO: 122615 - DNA, 25 bp, Artificial sequence
  SiRNA target sequence
gatcaaaaaatacggcgatcaaaga

SEQ ID NO: 122616 - DNA, 25 bp, Artificial sequence
  SiRNA target sequence
atcaaaaaatacggcgatcaaagag

SEQ ID NO: 122617 - DNA, 25 bp, Artificial sequence
  SiRNA target sequence
tcaaaaaatacggcgatcaaagagt

SEQ ID NO: 122618 - DNA, 25 bp, Artificial sequence
  SiRNA target sequence
caaaaaatacggcgatcaaagagtg

SEQ ID NO: 122619 - DNA, 25 bp, Artificial sequence
  SiRNA target sequence
aaaaaatacggcgatcaaagagtga

SEQ ID NO: 122620 - DNA, 25 bp, Artificial sequence
  SiRNA target sequence
aaaaatacggcgatcaaagagtgaa

SEQ ID NO: 122621 - DNA, 25 bp, Artificial sequence
  SiRNA target sequence
aaaatacggcgatcaaagagtgaag

SEQ ID NO: 122622 - DNA, 25 bp, Artificial sequence
  SiRNA target sequence
aaatacggcgatcaaagagtgaagg

SEQ ID NO: 122623 - DNA, 25 bp, Artificial sequence
  SiRNA target sequence
aatacggcgatcaaagagtgaagga

SEQ ID NO: 122624 - DNA, 25 bp, Artificial sequence
  SiRNA target sequence
atacggcgatcaaagagtgaaggat

SEQ ID NO: 122625 - DNA, 25 bp, Artificial sequence
  SiRNA target sequence
tacggcgatcaaagagtgaaggata

SEQ ID NO: 122626 - DNA, 25 bp, Artificial sequence
  SiRNA target sequence
acggcgatcaaagagtgaaggatac

SEQ ID NO: 122627 - DNA, 25 bp, Artificial sequence
  SiRNA target sequence
cggcgatcaaagagtgaaggatacc

SEQ ID NO: 122628 - DNA, 25 bp, Artificial sequence
  SiRNA target sequence
ggcgatcaaagagtgaaggataccc

SEQ ID NO: 122629 - DNA, 25 bp, Artificial sequence
  SiRNA target sequence
gcgatcaaagagtgaaggatacccc

SEQ ID NO: 122630 - DNA, 25 bp, Artificial sequence
  SiRNA target sequence
cgatcaaagagtgaaggatacccct

SEQ ID NO: 122631 - DNA, 25 bp, Artificial sequence
  SiRNA target sequence
gatcaaagagtgaaggataccccta

SEQ ID NO: 122632 - DNA, 25 bp, Artificial sequence
  SiRNA target sequence
atcaaagagtgaaggatacccctat

SEQ ID NO: 122633 - DNA, 25 bp, Artificial sequence
  SiRNA target sequence
tcaaagagtgaaggatacccctatt

SEQ ID NO: 122634 - DNA, 25 bp, Artificial sequence
  SiRNA target sequence
caaagagtgaaggatacccctattt

SEQ ID NO: 122635 - DNA, 25 bp, Artificial sequence
  SiRNA target sequence
aaagagtgaaggatacccctatttc

SEQ ID NO: 122636 - DNA, 25 bp, Artificial sequence
  SiRNA target sequence
aagagtgaaggatacccctatttcg

SEQ ID NO: 122637 - DNA, 25 bp, Artificial sequence
  SiRNA target sequence
agagtgaaggatacccctatttcgg

SEQ ID NO: 122638 - DNA, 25 bp, Artificial sequence
  SiRNA target sequence
gagtgaaggatacccctatttcgga

SEQ ID NO: 122639 - DNA, 25 bp, Artificial sequence
  SiRNA target sequence
agtgaaggatacccctatttcggaa

SEQ ID NO: 122640 - DNA, 25 bp, Artificial sequence
  SiRNA target sequence
gtgaaggatacccctatttcggaaa

SEQ ID NO: 122641 - DNA, 25 bp, Artificial sequence
  SiRNA target sequence
tgaaggatacccctatttcggaaat

SEQ ID NO: 122642 - DNA, 25 bp, Artificial sequence
  SiRNA target sequence
gaaggatacccctatttcggaaatg

SEQ ID NO: 122643 - DNA, 25 bp, Artificial sequence
  SiRNA target sequence
aaggatacccctatttcggaaatgg

SEQ ID NO: 122644 - DNA, 25 bp, Artificial sequence
  SiRNA target sequence
aggatacccctatttcggaaatggg

SEQ ID NO: 122645 - DNA, 25 bp, Artificial sequence
  SiRNA target sequence
ggatacccctatttcggaaatggga

SEQ ID NO: 122646 - DNA, 25 bp, Artificial sequence
  SiRNA target sequence
gatacccctatttcggaaatgggat

SEQ ID NO: 122647 - DNA, 25 bp, Artificial sequence
  SiRNA target sequence
atacccctatttcggaaatgggatt

SEQ ID NO: 122648 - DNA, 25 bp, Artificial sequence
  SiRNA target sequence
tacccctatttcggaaatgggattt

SEQ ID NO: 122649 - DNA, 25 bp, Artificial sequence
  SiRNA target sequence
acccctatttcggaaatgggattta

SEQ ID NO: 122650 - DNA, 25 bp, Artificial sequence
  SiRNA target sequence
cccctatttcggaaatgggatttac

SEQ ID NO: 122651 - DNA, 25 bp, Artificial sequence
  SiRNA target sequence
ccctatttcggaaatgggatttaca

SEQ ID NO: 122652 - DNA, 25 bp, Artificial sequence
  SiRNA target sequence
cctatttcggaaatgggatttacag

SEQ ID NO: 122653 - DNA, 25 bp, Artificial sequence
  SiRNA target sequence
ctatttcggaaatgggatttacagg

SEQ ID NO: 122654 - DNA, 25 bp, Artificial sequence
  SiRNA target sequence
tatttcggaaatgggatttacaggt

SEQ ID NO: 122655 - DNA, 25 bp, Artificial sequence
  SiRNA target sequence
atttcggaaatgggatttacaggtc

SEQ ID NO: 122656 - DNA, 25 bp, Artificial sequence
  SiRNA target sequence
tttcggaaatgggatttacaggtct

SEQ ID NO: 122657 - DNA, 25 bp, Artificial sequence
  SiRNA target sequence
ttcggaaatgggatttacaggtctc

SEQ ID NO: 122658 - DNA, 25 bp, Artificial sequence
  SiRNA target sequence
tcggaaatgggatttacaggtctcg

SEQ ID NO: 122659 - DNA, 25 bp, Artificial sequence
  SiRNA target sequence
cggaaatgggatttacaggtctcgc

SEQ ID NO: 122660 - DNA, 25 bp, Artificial sequence
  SiRNA target sequence
ggaaatgggatttacaggtctcgct

SEQ ID NO: 122661 - DNA, 25 bp, Artificial sequence
  SiRNA target sequence
gaaatgggatttacaggtctcgctg

SEQ ID NO: 122662 - DNA, 25 bp, Artificial sequence
  SiRNA target sequence
aaatgggatttacaggtctcgctgt

SEQ ID NO: 122663 - DNA, 25 bp, Artificial sequence
  SiRNA target sequence
aatgggatttacaggtctcgctgtg

SEQ ID NO: 122664 - DNA, 25 bp, Artificial sequence
  SiRNA target sequence
atgggatttacaggtctcgctgtgg

SEQ ID NO: 122665 - DNA, 25 bp, Artificial sequence
  SiRNA target sequence
tgggatttacaggtctcgctgtggg

SEQ ID NO: 122666 - DNA, 25 bp, Artificial sequence
  SiRNA target sequence
gggatttacaggtctcgctgtgggt

SEQ ID NO: 122667 - DNA, 25 bp, Artificial sequence
  SiRNA target sequence
ggatttacaggtctcgctgtgggtt

SEQ ID NO: 122668 - DNA, 25 bp, Artificial sequence
  SiRNA target sequence
gatttacaggtctcgctgtgggttc

SEQ ID NO: 122669 - DNA, 25 bp, Artificial sequence
  SiRNA target sequence
atttacaggtctcgctgtgggttca

SEQ ID NO: 122670 - DNA, 25 bp, Artificial sequence
  SiRNA target sequence
tttacaggtctcgctgtgggttcaa

SEQ ID NO: 122671 - DNA, 25 bp, Artificial sequence
  SiRNA target sequence
ttacaggtctcgctgtgggttcaag

SEQ ID NO: 122672 - DNA, 25 bp, Artificial sequence
  SiRNA target sequence
tacaggtctcgctgtgggttcaagc

SEQ ID NO: 122673 - DNA, 25 bp, Artificial sequence
  SiRNA target sequence
acaggtctcgctgtgggttcaagct

SEQ ID NO: 122674 - DNA, 25 bp, Artificial sequence
  SiRNA target sequence
caggtctcgctgtgggttcaagcta

SEQ ID NO: 122675 - DNA, 25 bp, Artificial sequence
  SiRNA target sequence
aggtctcgctgtgggttcaagctat

SEQ ID NO: 122676 - DNA, 25 bp, Artificial sequence
  SiRNA target sequence
ggtctcgctgtgggttcaagctatt

SEQ ID NO: 122677 - DNA, 25 bp, Artificial sequence
  SiRNA target sequence
gtctcgctgtgggttcaagctattt

SEQ ID NO: 122678 - DNA, 25 bp, Artificial sequence
  SiRNA target sequence
tctcgctgtgggttcaagctattta

SEQ ID NO: 122679 - DNA, 25 bp, Artificial sequence
  SiRNA target sequence
ctcgctgtgggttcaagctatttag

SEQ ID NO: 122680 - DNA, 25 bp, Artificial sequence
  SiRNA target sequence
tcgctgtgggttcaagctatttagg

SEQ ID NO: 122681 - DNA, 25 bp, Artificial sequence
  SiRNA target sequence
cgctgtgggttcaagctatttaggg

SEQ ID NO: 122682 - DNA, 25 bp, Artificial sequence
  SiRNA target sequence
gctgtgggttcaagctatttagggt

SEQ ID NO: 122683 - DNA, 25 bp, Artificial sequence
  SiRNA target sequence
ctgtgggttcaagctatttagggtt

SEQ ID NO: 122684 - DNA, 25 bp, Artificial sequence
  SiRNA target sequence
tgtgggttcaagctatttagggtta

SEQ ID NO: 122685 - DNA, 25 bp, Artificial sequence
  SiRNA target sequence
gtgggttcaagctatttagggttaa

SEQ ID NO: 122686 - DNA, 25 bp, Artificial sequence
  SiRNA target sequence
tgggttcaagctatttagggttaag

SEQ ID NO: 122687 - DNA, 25 bp, Artificial sequence
  SiRNA target sequence
gggttcaagctatttagggttaaga

SEQ ID NO: 122688 - DNA, 25 bp, Artificial sequence
  SiRNA target sequence
ggttcaagctatttagggttaagac

SEQ ID NO: 122689 - DNA, 25 bp, Artificial sequence
  SiRNA target sequence
gttcaagctatttagggttaagacc

SEQ ID NO: 122690 - DNA, 25 bp, Artificial sequence
  SiRNA target sequence
ttcaagctatttagggttaagaccc

SEQ ID NO: 122691 - DNA, 25 bp, Artificial sequence
  SiRNA target sequence
tcaagctatttagggttaagacccg

SEQ ID NO: 122692 - DNA, 25 bp, Artificial sequence
  SiRNA target sequence
caagctatttagggttaagacccgt

SEQ ID NO: 122693 - DNA, 25 bp, Artificial sequence
  SiRNA target sequence
aagctatttagggttaagacccgta

SEQ ID NO: 122694 - DNA, 25 bp, Artificial sequence
  SiRNA target sequence
agctatttagggttaagacccgtag

SEQ ID NO: 122695 - DNA, 25 bp, Artificial sequence
  SiRNA target sequence
gctatttagggttaagacccgtagt

SEQ ID NO: 122696 - DNA, 25 bp, Artificial sequence
  SiRNA target sequence
ctatttagggttaagacccgtagta

SEQ ID NO: 122697 - DNA, 25 bp, Artificial sequence
  SiRNA target sequence
tatttagggttaagacccgtagtag

SEQ ID NO: 122698 - DNA, 25 bp, Artificial sequence
  SiRNA target sequence
atttagggttaagacccgtagtaga

SEQ ID NO: 122699 - DNA, 25 bp, Artificial sequence
  SiRNA target sequence
tttagggttaagacccgtagtagat

SEQ ID NO: 122700 - DNA, 25 bp, Artificial sequence
  SiRNA target sequence
ttagggttaagacccgtagtagatt

SEQ ID NO: 122701 - DNA, 25 bp, Artificial sequence
  SiRNA target sequence
tagggttaagacccgtagtagattt

SEQ ID NO: 122702 - DNA, 25 bp, Artificial sequence
  SiRNA target sequence
agggttaagacccgtagtagatttt

SEQ ID NO: 122703 - DNA, 25 bp, Artificial sequence
  SiRNA target sequence
gggttaagacccgtagtagatttta

SEQ ID NO: 122704 - DNA, 25 bp, Artificial sequence
  SiRNA target sequence
ggttaagacccgtagtagattttat

SEQ ID NO: 122705 - DNA, 25 bp, Artificial sequence
  SiRNA target sequence
gttaagacccgtagtagattttatg

SEQ ID NO: 122706 - DNA, 25 bp, Artificial sequence
  SiRNA target sequence
ttaagacccgtagtagattttatga

SEQ ID NO: 122707 - DNA, 25 bp, Artificial sequence
  SiRNA target sequence
taagacccgtagtagattttatgac

SEQ ID NO: 122708 - DNA, 25 bp, Artificial sequence
  SiRNA target sequence
aagacccgtagtagattttatgact

SEQ ID NO: 122709 - DNA, 25 bp, Artificial sequence
  SiRNA target sequence
agacccgtagtagattttatgactt

SEQ ID NO: 122710 - DNA, 25 bp, Artificial sequence
  SiRNA target sequence
gacccgtagtagattttatgacttg

SEQ ID NO: 122711 - DNA, 25 bp, Artificial sequence
  SiRNA target sequence
acccgtagtagattttatgacttgg

SEQ ID NO: 122712 - DNA, 25 bp, Artificial sequence
  SiRNA target sequence
cccgtagtagattttatgacttgga

SEQ ID NO: 122713 - DNA, 25 bp, Artificial sequence
  SiRNA target sequence
ccgtagtagattttatgacttggaa

SEQ ID NO: 122714 - DNA, 25 bp, Artificial sequence
  SiRNA target sequence
cgtagtagattttatgacttggaat

SEQ ID NO: 122715 - DNA, 25 bp, Artificial sequence
  SiRNA target sequence
gtagtagattttatgacttggaatt

SEQ ID NO: 122716 - DNA, 25 bp, Artificial sequence
  SiRNA target sequence
tagtagattttatgacttggaattt

SEQ ID NO: 122717 - DNA, 25 bp, Artificial sequence
  SiRNA target sequence
agtagattttatgacttggaatttt

SEQ ID NO: 122718 - DNA, 25 bp, Artificial sequence
  SiRNA target sequence
gtagattttatgacttggaattttg

SEQ ID NO: 122719 - DNA, 25 bp, Artificial sequence
  SiRNA target sequence
tagattttatgacttggaattttgc

SEQ ID NO: 122720 - DNA, 25 bp, Artificial sequence
  SiRNA target sequence
agattttatgacttggaattttgct

SEQ ID NO: 122721 - DNA, 25 bp, Artificial sequence
  SiRNA target sequence
gattttatgacttggaattttgctt

SEQ ID NO: 122722 - DNA, 25 bp, Artificial sequence
  SiRNA target sequence
attttatgacttggaattttgcttt

SEQ ID NO: 122723 - DNA, 25 bp, Artificial sequence
  SiRNA target sequence
ttttatgacttggaattttgctttg

SEQ ID NO: 122724 - DNA, 25 bp, Artificial sequence
  SiRNA target sequence
tttatgacttggaattttgctttgc

SEQ ID NO: 122725 - DNA, 25 bp, Artificial sequence
  SiRNA target sequence
ttatgacttggaattttgctttgca

SEQ ID NO: 122726 - DNA, 25 bp, Artificial sequence
  SiRNA target sequence
tatgacttggaattttgctttgcaa

SEQ ID NO: 122727 - DNA, 25 bp, Artificial sequence
  SiRNA target sequence
atgacttggaattttgctttgcaat

SEQ ID NO: 122728 - DNA, 25 bp, Artificial sequence
  SiRNA target sequence
tgacttggaattttgctttgcaatc

SEQ ID NO: 122729 - DNA, 25 bp, Artificial sequence
  SiRNA target sequence
gacttggaattttgctttgcaatca

SEQ ID NO: 122730 - DNA, 25 bp, Artificial sequence
  SiRNA target sequence
acttggaattttgctttgcaatcaa

SEQ ID NO: 122731 - DNA, 25 bp, Artificial sequence
  SiRNA target sequence
cttggaattttgctttgcaatcaat

SEQ ID NO: 122732 - DNA, 25 bp, Artificial sequence
  SiRNA target sequence
ttggaattttgctttgcaatcaatt

SEQ ID NO: 122733 - DNA, 25 bp, Artificial sequence
  SiRNA target sequence
tggaattttgctttgcaatcaattg

SEQ ID NO: 122734 - DNA, 25 bp, Artificial sequence
  SiRNA target sequence
ggaattttgctttgcaatcaattga

SEQ ID NO: 122735 - DNA, 25 bp, Artificial sequence
  SiRNA target sequence
gaattttgctttgcaatcaattgac

SEQ ID NO: 122736 - DNA, 25 bp, Artificial sequence
  SiRNA target sequence
aattttgctttgcaatcaattgacc

SEQ ID NO: 122737 - DNA, 25 bp, Artificial sequence
  SiRNA target sequence
attttgctttgcaatcaattgacca

SEQ ID NO: 122738 - DNA, 25 bp, Artificial sequence
  SiRNA target sequence
ttttgctttgcaatcaattgaccat

SEQ ID NO: 122739 - DNA, 25 bp, Artificial sequence
  SiRNA target sequence
tttgctttgcaatcaattgaccata

SEQ ID NO: 122740 - DNA, 25 bp, Artificial sequence
  SiRNA target sequence
ttgctttgcaatcaattgaccatat

SEQ ID NO: 122741 - DNA, 25 bp, Artificial sequence
  SiRNA target sequence
tgctttgcaatcaattgaccatatt

SEQ ID NO: 122742 - DNA, 25 bp, Artificial sequence
  SiRNA target sequence
gctttgcaatcaattgaccatatta

SEQ ID NO: 122743 - DNA, 25 bp, Artificial sequence
  SiRNA target sequence
ctttgcaatcaattgaccatattat

SEQ ID NO: 122744 - DNA, 25 bp, Artificial sequence
  SiRNA target sequence
tttgcaatcaattgaccatattatt

SEQ ID NO: 122745 - DNA, 25 bp, Artificial sequence
  SiRNA target sequence
ttgcaatcaattgaccatattatta

SEQ ID NO: 122746 - DNA, 25 bp, Artificial sequence
  SiRNA target sequence
tgcaatcaattgaccatattattaa

SEQ ID NO: 122747 - DNA, 25 bp, Artificial sequence
  SiRNA target sequence
gcaatcaattgaccatattattaat

SEQ ID NO: 122748 - DNA, 25 bp, Artificial sequence
  SiRNA target sequence
caatcaattgaccatattattaatt

SEQ ID NO: 122749 - DNA, 25 bp, Artificial sequence
  SiRNA target sequence
aatcaattgaccatattattaattc

SEQ ID NO: 122750 - DNA, 25 bp, Artificial sequence
  SiRNA target sequence
atcaattgaccatattattaattct

SEQ ID NO: 122751 - DNA, 25 bp, Artificial sequence
  SiRNA target sequence
tcaattgaccatattattaattctt

SEQ ID NO: 122752 - DNA, 25 bp, Artificial sequence
  SiRNA target sequence
caattgaccatattattaattcttg

SEQ ID NO: 122753 - DNA, 25 bp, Artificial sequence
  SiRNA target sequence
aattgaccatattattaattcttgt

SEQ ID NO: 122754 - DNA, 25 bp, Artificial sequence
  SiRNA target sequence
attgaccatattattaattcttgtg

SEQ ID NO: 122755 - DNA, 25 bp, Artificial sequence
  SiRNA target sequence
ttgaccatattattaattcttgtgc

SEQ ID NO: 122756 - DNA, 25 bp, Artificial sequence
  SiRNA target sequence
tgaccatattattaattcttgtgcg

SEQ ID NO: 122757 - DNA, 25 bp, Artificial sequence
  SiRNA target sequence
gaccatattattaattcttgtgcga

SEQ ID NO: 122758 - DNA, 25 bp, Artificial sequence
  SiRNA target sequence
accatattattaattcttgtgcgaa

SEQ ID NO: 122759 - DNA, 25 bp, Artificial sequence
  SiRNA target sequence
ccatattattaattcttgtgcgaaa

SEQ ID NO: 122760 - DNA, 25 bp, Artificial sequence
  SiRNA target sequence
catattattaattcttgtgcgaaaa

SEQ ID NO: 122761 - DNA, 25 bp, Artificial sequence
  SiRNA target sequence
atattattaattcttgtgcgaaaac

SEQ ID NO: 122762 - DNA, 25 bp, Artificial sequence
  SiRNA target sequence
tattattaattcttgtgcgaaaacc

SEQ ID NO: 122763 - DNA, 25 bp, Artificial sequence
  SiRNA target sequence
attattaattcttgtgcgaaaacct

SEQ ID NO: 122764 - DNA, 25 bp, Artificial sequence
  SiRNA target sequence
ttattaattcttgtgcgaaaacctt

SEQ ID NO: 122765 - DNA, 25 bp, Artificial sequence
  SiRNA target sequence
tattaattcttgtgcgaaaaccttg

SEQ ID NO: 122766 - DNA, 25 bp, Artificial sequence
  SiRNA target sequence
attaattcttgtgcgaaaaccttgt

SEQ ID NO: 122767 - DNA, 25 bp, Artificial sequence
  SiRNA target sequence
ttaattcttgtgcgaaaaccttgta

SEQ ID NO: 122768 - DNA, 25 bp, Artificial sequence
  SiRNA target sequence
taattcttgtgcgaaaaccttgtat

SEQ ID NO: 122769 - DNA, 25 bp, Artificial sequence
  SiRNA target sequence
aattcttgtgcgaaaaccttgtata

SEQ ID NO: 122770 - DNA, 25 bp, Artificial sequence
  SiRNA target sequence
attcttgtgcgaaaaccttgtatat

SEQ ID NO: 122771 - DNA, 25 bp, Artificial sequence
  SiRNA target sequence
ttcttgtgcgaaaaccttgtatatg

SEQ ID NO: 122772 - DNA, 25 bp, Artificial sequence
  SiRNA target sequence
tcttgtgcgaaaaccttgtatatgt

SEQ ID NO: 122773 - DNA, 25 bp, Artificial sequence
  SiRNA target sequence
cttgtgcgaaaaccttgtatatgtc

SEQ ID NO: 122774 - DNA, 25 bp, Artificial sequence
  SiRNA target sequence
ttgtgcgaaaaccttgtatatgtca

SEQ ID NO: 122775 - DNA, 25 bp, Artificial sequence
  SiRNA target sequence
tgtgcgaaaaccttgtatatgtcag

SEQ ID NO: 122776 - DNA, 25 bp, Artificial sequence
  SiRNA target sequence
gtgcgaaaaccttgtatatgtcagg

SEQ ID NO: 122777 - DNA, 25 bp, Artificial sequence
  SiRNA target sequence
tgcgaaaaccttgtatatgtcagga

SEQ ID NO: 122778 - DNA, 25 bp, Artificial sequence
  SiRNA target sequence
gcgaaaaccttgtatatgtcaggag

SEQ ID NO: 122779 - DNA, 25 bp, Artificial sequence
  SiRNA target sequence
cgaaaaccttgtatatgtcaggagg

SEQ ID NO: 122780 - DNA, 25 bp, Artificial sequence
  SiRNA target sequence
gaaaaccttgtatatgtcaggagga

SEQ ID NO: 122781 - DNA, 25 bp, Artificial sequence
  SiRNA target sequence
aaaaccttgtatatgtcaggaggaa

SEQ ID NO: 122782 - DNA, 25 bp, Artificial sequence
  SiRNA target sequence
aaaccttgtatatgtcaggaggaag

SEQ ID NO: 122783 - DNA, 25 bp, Artificial sequence
  SiRNA target sequence
aaccttgtatatgtcaggaggaaga

SEQ ID NO: 122784 - DNA, 25 bp, Artificial sequence
  SiRNA target sequence
accttgtatatgtcaggaggaagaa

SEQ ID NO: 122785 - DNA, 25 bp, Artificial sequence
  SiRNA target sequence
ccttgtatatgtcaggaggaagaat

SEQ ID NO: 122786 - DNA, 25 bp, Artificial sequence
  SiRNA target sequence
cttgtatatgtcaggaggaagaata

SEQ ID NO: 122787 - DNA, 25 bp, Artificial sequence
  SiRNA target sequence
ttgtatatgtcaggaggaagaatac

SEQ ID NO: 122788 - DNA, 25 bp, Artificial sequence
  SiRNA target sequence
tgtatatgtcaggaggaagaataca

SEQ ID NO: 122789 - DNA, 25 bp, Artificial sequence
  SiRNA target sequence
gtatatgtcaggaggaagaatacaa

SEQ ID NO: 122790 - DNA, 25 bp, Artificial sequence
  SiRNA target sequence
tatatgtcaggaggaagaatacaat

SEQ ID NO: 122791 - DNA, 25 bp, Artificial sequence
  SiRNA target sequence
atatgtcaggaggaagaatacaatg

SEQ ID NO: 122792 - DNA, 25 bp, Artificial sequence
  SiRNA target sequence
tatgtcaggaggaagaatacaatgt

SEQ ID NO: 122793 - DNA, 25 bp, Artificial sequence
  SiRNA target sequence
atgtcaggaggaagaatacaatgtc

SEQ ID NO: 122794 - DNA, 25 bp, Artificial sequence
  SiRNA target sequence
tgtcaggaggaagaatacaatgtcc

SEQ ID NO: 122795 - DNA, 25 bp, Artificial sequence
  SiRNA target sequence
gtcaggaggaagaatacaatgtcca

SEQ ID NO: 122796 - DNA, 25 bp, Artificial sequence
  SiRNA target sequence
tcaggaggaagaatacaatgtccaa

SEQ ID NO: 122797 - DNA, 25 bp, Artificial sequence
  SiRNA target sequence
caggaggaagaatacaatgtccaat

SEQ ID NO: 122798 - DNA, 25 bp, Artificial sequence
  SiRNA target sequence
aggaggaagaatacaatgtccaatt

SEQ ID NO: 122799 - DNA, 25 bp, Artificial sequence
  SiRNA target sequence
ggaggaagaatacaatgtccaattg

SEQ ID NO: 122800 - DNA, 25 bp, Artificial sequence
  SiRNA target sequence
gaggaagaatacaatgtccaattgt

SEQ ID NO: 122801 - DNA, 25 bp, Artificial sequence
  SiRNA target sequence
aggaagaatacaatgtccaattgtt

SEQ ID NO: 122802 - DNA, 25 bp, Artificial sequence
  SiRNA target sequence
ggaagaatacaatgtccaattgttt

SEQ ID NO: 122803 - DNA, 25 bp, Artificial sequence
  SiRNA target sequence
gaagaatacaatgtccaattgtttt

SEQ ID NO: 122804 - DNA, 25 bp, Artificial sequence
  SiRNA target sequence
aagaatacaatgtccaattgttttt

SEQ ID NO: 122805 - DNA, 25 bp, Artificial sequence
  SiRNA target sequence
agaatacaatgtccaattgttttta

SEQ ID NO: 122806 - DNA, 25 bp, Artificial sequence
  SiRNA target sequence
gaatacaatgtccaattgtttttag

SEQ ID NO: 122807 - DNA, 25 bp, Artificial sequence
  SiRNA target sequence
aatacaatgtccaattgtttttagg

SEQ ID NO: 122808 - DNA, 25 bp, Artificial sequence
  SiRNA target sequence
atacaatgtccaattgtttttaggg

SEQ ID NO: 122809 - DNA, 25 bp, Artificial sequence
  SiRNA target sequence
tacaatgtccaattgtttttagggg

SEQ ID NO: 122810 - DNA, 25 bp, Artificial sequence
  SiRNA target sequence
acaatgtccaattgtttttagggga

SEQ ID NO: 122811 - DNA, 25 bp, Artificial sequence
  SiRNA target sequence
caatgtccaattgtttttaggggac

SEQ ID NO: 122812 - DNA, 25 bp, Artificial sequence
  SiRNA target sequence
aatgtccaattgtttttaggggacc

SEQ ID NO: 122813 - DNA, 25 bp, Artificial sequence
  SiRNA target sequence
atgtccaattgtttttaggggacca

SEQ ID NO: 122814 - DNA, 25 bp, Artificial sequence
  SiRNA target sequence
tgtccaattgtttttaggggaccaa

SEQ ID NO: 122815 - DNA, 25 bp, Artificial sequence
  SiRNA target sequence
gtccaattgtttttaggggaccaaa

SEQ ID NO: 122816 - DNA, 25 bp, Artificial sequence
  SiRNA target sequence
tccaattgtttttaggggaccaaat

SEQ ID NO: 122817 - DNA, 25 bp, Artificial sequence
  SiRNA target sequence
ccaattgtttttaggggaccaaatg

SEQ ID NO: 122818 - DNA, 25 bp, Artificial sequence
  SiRNA target sequence
caattgtttttaggggaccaaatgg

SEQ ID NO: 122819 - DNA, 25 bp, Artificial sequence
  SiRNA target sequence
aattgtttttaggggaccaaatgga

SEQ ID NO: 122820 - DNA, 25 bp, Artificial sequence
  SiRNA target sequence
attgtttttaggggaccaaatggat

SEQ ID NO: 122821 - DNA, 25 bp, Artificial sequence
  SiRNA target sequence
ttgtttttaggggaccaaatggatt

SEQ ID NO: 122822 - DNA, 25 bp, Artificial sequence
  SiRNA target sequence
tgtttttaggggaccaaatggattc

SEQ ID NO: 122823 - DNA, 25 bp, Artificial sequence
  SiRNA target sequence
gtttttaggggaccaaatggattca

SEQ ID NO: 122824 - DNA, 25 bp, Artificial sequence
  SiRNA target sequence
tttttaggggaccaaatggattcaa

SEQ ID NO: 122825 - DNA, 25 bp, Artificial sequence
  SiRNA target sequence
ttttaggggaccaaatggattcaat

SEQ ID NO: 122826 - DNA, 25 bp, Artificial sequence
  SiRNA target sequence
tttaggggaccaaatggattcaata

SEQ ID NO: 122827 - DNA, 25 bp, Artificial sequence
  SiRNA target sequence
ttaggggaccaaatggattcaataa

SEQ ID NO: 122828 - DNA, 25 bp, Artificial sequence
  SiRNA target sequence
taggggaccaaatggattcaataat

SEQ ID NO: 122829 - DNA, 25 bp, Artificial sequence
  SiRNA target sequence
aggggaccaaatggattcaataatg

SEQ ID NO: 122830 - DNA, 25 bp, Artificial sequence
  SiRNA target sequence
ggggaccaaatggattcaataatgg

SEQ ID NO: 122831 - DNA, 25 bp, Artificial sequence
  SiRNA target sequence
gggaccaaatggattcaataatggg

SEQ ID NO: 122832 - DNA, 25 bp, Artificial sequence
  SiRNA target sequence
ggaccaaatggattcaataatgggt

SEQ ID NO: 122833 - DNA, 25 bp, Artificial sequence
  SiRNA target sequence
gaccaaatggattcaataatgggta

SEQ ID NO: 122834 - DNA, 25 bp, Artificial sequence
  SiRNA target sequence
accaaatggattcaataatgggtac

SEQ ID NO: 122835 - DNA, 25 bp, Artificial sequence
  SiRNA target sequence
ccaaatggattcaataatgggtacg

SEQ ID NO: 122836 - DNA, 25 bp, Artificial sequence
  SiRNA target sequence
caaatggattcaataatgggtacgc

SEQ ID NO: 122837 - DNA, 25 bp, Artificial sequence
  SiRNA target sequence
aaatggattcaataatgggtacgct

SEQ ID NO: 122838 - DNA, 25 bp, Artificial sequence
  SiRNA target sequence
aatggattcaataatgggtacgctg

SEQ ID NO: 122839 - DNA, 25 bp, Artificial sequence
  SiRNA target sequence
atggattcaataatgggtacgctgc

SEQ ID NO: 122840 - DNA, 25 bp, Artificial sequence
  SiRNA target sequence
tggattcaataatgggtacgctgca

SEQ ID NO: 122841 - DNA, 25 bp, Artificial sequence
  SiRNA target sequence
ggattcaataatgggtacgctgcac

SEQ ID NO: 122842 - DNA, 25 bp, Artificial sequence
  SiRNA target sequence
gattcaataatgggtacgctgcaca

SEQ ID NO: 122843 - DNA, 25 bp, Artificial sequence
  SiRNA target sequence
attcaataatgggtacgctgcacag

SEQ ID NO: 122844 - DNA, 25 bp, Artificial sequence
  SiRNA target sequence
ttcaataatgggtacgctgcacagc

SEQ ID NO: 122845 - DNA, 25 bp, Artificial sequence
  SiRNA target sequence
tcaataatgggtacgctgcacagca

SEQ ID NO: 122846 - DNA, 25 bp, Artificial sequence
  SiRNA target sequence
caataatgggtacgctgcacagcac

SEQ ID NO: 122847 - DNA, 25 bp, Artificial sequence
  SiRNA target sequence
aataatgggtacgctgcacagcaca

SEQ ID NO: 122848 - DNA, 25 bp, Artificial sequence
  SiRNA target sequence
ataatgggtacgctgcacagcacac

SEQ ID NO: 122849 - DNA, 25 bp, Artificial sequence
  SiRNA target sequence
taatgggtacgctgcacagcacaca

SEQ ID NO: 122850 - DNA, 25 bp, Artificial sequence
  SiRNA target sequence
aatgggtacgctgcacagcacacac

SEQ ID NO: 122851 - DNA, 25 bp, Artificial sequence
  SiRNA target sequence
atgggtacgctgcacagcacacaca

SEQ ID NO: 122852 - DNA, 25 bp, Artificial sequence
  SiRNA target sequence
tgggtacgctgcacagcacacacaa

SEQ ID NO: 122853 - DNA, 25 bp, Artificial sequence
  SiRNA target sequence
gggtacgctgcacagcacacacaag

SEQ ID NO: 122854 - DNA, 25 bp, Artificial sequence
  SiRNA target sequence
ggtacgctgcacagcacacacaaga

SEQ ID NO: 122855 - DNA, 25 bp, Artificial sequence
  SiRNA target sequence
gtacgctgcacagcacacacaagat

SEQ ID NO: 122856 - DNA, 25 bp, Artificial sequence
  SiRNA target sequence
tacgctgcacagcacacacaagatt

SEQ ID NO: 122857 - DNA, 25 bp, Artificial sequence
  SiRNA target sequence
acgctgcacagcacacacaagattt

SEQ ID NO: 122858 - DNA, 25 bp, Artificial sequence
  SiRNA target sequence
cgctgcacagcacacacaagatttt

SEQ ID NO: 122859 - DNA, 25 bp, Artificial sequence
  SiRNA target sequence
gctgcacagcacacacaagattttg

SEQ ID NO: 122860 - DNA, 25 bp, Artificial sequence
  SiRNA target sequence
ctgcacagcacacacaagattttgc

SEQ ID NO: 122861 - DNA, 25 bp, Artificial sequence
  SiRNA target sequence
tgcacagcacacacaagattttgca

SEQ ID NO: 122862 - DNA, 25 bp, Artificial sequence
  SiRNA target sequence
gcacagcacacacaagattttgcac

SEQ ID NO: 122863 - DNA, 25 bp, Artificial sequence
  SiRNA target sequence
cacagcacacacaagattttgcacc

SEQ ID NO: 122864 - DNA, 25 bp, Artificial sequence
  SiRNA target sequence
acagcacacacaagattttgcacca

SEQ ID NO: 122865 - DNA, 25 bp, Artificial sequence
  SiRNA target sequence
cagcacacacaagattttgcaccaa

SEQ ID NO: 122866 - DNA, 25 bp, Artificial sequence
  SiRNA target sequence
agcacacacaagattttgcaccaat

SEQ ID NO: 122867 - DNA, 25 bp, Artificial sequence
  SiRNA target sequence
gcacacacaagattttgcaccaata

SEQ ID NO: 122868 - DNA, 25 bp, Artificial sequence
  SiRNA target sequence
cacacacaagattttgcaccaatat

SEQ ID NO: 122869 - DNA, 25 bp, Artificial sequence
  SiRNA target sequence
acacacaagattttgcaccaatata

SEQ ID NO: 122870 - DNA, 25 bp, Artificial sequence
  SiRNA target sequence
cacacaagattttgcaccaatatat

SEQ ID NO: 122871 - DNA, 25 bp, Artificial sequence
  SiRNA target sequence
acacaagattttgcaccaatatatg

SEQ ID NO: 122872 - DNA, 25 bp, Artificial sequence
  SiRNA target sequence
cacaagattttgcaccaatatatgg

SEQ ID NO: 122873 - DNA, 25 bp, Artificial sequence
  SiRNA target sequence
acaagattttgcaccaatatatggt

SEQ ID NO: 122874 - DNA, 25 bp, Artificial sequence
  SiRNA target sequence
caagattttgcaccaatatatggtt

SEQ ID NO: 122875 - DNA, 25 bp, Artificial sequence
  SiRNA target sequence
aagattttgcaccaatatatggttc

SEQ ID NO: 122876 - DNA, 25 bp, Artificial sequence
  SiRNA target sequence
agattttgcaccaatatatggttct

SEQ ID NO: 122877 - DNA, 25 bp, Artificial sequence
  SiRNA target sequence
gattttgcaccaatatatggttcta

SEQ ID NO: 122878 - DNA, 25 bp, Artificial sequence
  SiRNA target sequence
attttgcaccaatatatggttctat

SEQ ID NO: 122879 - DNA, 25 bp, Artificial sequence
  SiRNA target sequence
ttttgcaccaatatatggttctatt

SEQ ID NO: 122880 - DNA, 25 bp, Artificial sequence
  SiRNA target sequence
tttgcaccaatatatggttctattc

SEQ ID NO: 122881 - DNA, 25 bp, Artificial sequence
  SiRNA target sequence
ttgcaccaatatatggttctattcc

SEQ ID NO: 122882 - DNA, 25 bp, Artificial sequence
  SiRNA target sequence
tgcaccaatatatggttctattcca

SEQ ID NO: 122883 - DNA, 25 bp, Artificial sequence
  SiRNA target sequence
gcaccaatatatggttctattccag

SEQ ID NO: 122884 - DNA, 25 bp, Artificial sequence
  SiRNA target sequence
caccaatatatggttctattccagg

SEQ ID NO: 122885 - DNA, 25 bp, Artificial sequence
  SiRNA target sequence
accaatatatggttctattccaggc

SEQ ID NO: 122886 - DNA, 25 bp, Artificial sequence
  SiRNA target sequence
ccaatatatggttctattccaggcc

SEQ ID NO: 122887 - DNA, 25 bp, Artificial sequence
  SiRNA target sequence
caatatatggttctattccaggcct

SEQ ID NO: 122888 - DNA, 25 bp, Artificial sequence
  SiRNA target sequence
aatatatggttctattccaggcctt

SEQ ID NO: 122889 - DNA, 25 bp, Artificial sequence
  SiRNA target sequence
atatatggttctattccaggcctta

SEQ ID NO: 122890 - DNA, 25 bp, Artificial sequence
  SiRNA target sequence
tatatggttctattccaggccttaa

SEQ ID NO: 122891 - DNA, 25 bp, Artificial sequence
  SiRNA target sequence
atatggttctattccaggccttaag

SEQ ID NO: 122892 - DNA, 25 bp, Artificial sequence
  SiRNA target sequence
tatggttctattccaggccttaagg

SEQ ID NO: 122893 - DNA, 25 bp, Artificial sequence
  SiRNA target sequence
atggttctattccaggccttaaggt

SEQ ID NO: 122894 - DNA, 25 bp, Artificial sequence
  SiRNA target sequence
tggttctattccaggccttaaggtg

SEQ ID NO: 122895 - DNA, 25 bp, Artificial sequence
  SiRNA target sequence
ggttctattccaggccttaaggtgg

SEQ ID NO: 122896 - DNA, 25 bp, Artificial sequence
  SiRNA target sequence
gttctattccaggccttaaggtggt

SEQ ID NO: 122897 - DNA, 25 bp, Artificial sequence
  SiRNA target sequence
ttctattccaggccttaaggtggtt

SEQ ID NO: 122898 - DNA, 25 bp, Artificial sequence
  SiRNA target sequence
tctattccaggccttaaggtggttt

SEQ ID NO: 122899 - DNA, 25 bp, Artificial sequence
  SiRNA target sequence
ctattccaggccttaaggtggtttg

SEQ ID NO: 122900 - DNA, 25 bp, Artificial sequence
  SiRNA target sequence
tattccaggccttaaggtggtttgt

SEQ ID NO: 122901 - DNA, 25 bp, Artificial sequence
  SiRNA target sequence
attccaggccttaaggtggtttgtc

SEQ ID NO: 122902 - DNA, 25 bp, Artificial sequence
  SiRNA target sequence
ttccaggccttaaggtggtttgtcc

SEQ ID NO: 122903 - DNA, 25 bp, Artificial sequence
  SiRNA target sequence
tccaggccttaaggtggtttgtcct

SEQ ID NO: 122904 - DNA, 25 bp, Artificial sequence
  SiRNA target sequence
ccaggccttaaggtggtttgtcctt

SEQ ID NO: 122905 - DNA, 25 bp, Artificial sequence
  SiRNA target sequence
caggccttaaggtggtttgtcctta

SEQ ID NO: 122906 - DNA, 25 bp, Artificial sequence
  SiRNA target sequence
aggccttaaggtggtttgtccttat

SEQ ID NO: 122907 - DNA, 25 bp, Artificial sequence
  SiRNA target sequence
ggccttaaggtggtttgtccttata

SEQ ID NO: 122908 - DNA, 25 bp, Artificial sequence
  SiRNA target sequence
gccttaaggtggtttgtccttatac

SEQ ID NO: 122909 - DNA, 25 bp, Artificial sequence
  SiRNA target sequence
ccttaaggtggtttgtccttatacg

SEQ ID NO: 122910 - DNA, 25 bp, Artificial sequence
  SiRNA target sequence
cttaaggtggtttgtccttatacgg

SEQ ID NO: 122911 - DNA, 25 bp, Artificial sequence
  SiRNA target sequence
ttaaggtggtttgtccttatacggg

SEQ ID NO: 122912 - DNA, 25 bp, Artificial sequence
  SiRNA target sequence
taaggtggtttgtccttatacgggt

SEQ ID NO: 122913 - DNA, 25 bp, Artificial sequence
  SiRNA target sequence
aaggtggtttgtccttatacgggta

SEQ ID NO: 122914 - DNA, 25 bp, Artificial sequence
  SiRNA target sequence
aggtggtttgtccttatacgggtaa

SEQ ID NO: 122915 - DNA, 25 bp, Artificial sequence
  SiRNA target sequence
ggtggtttgtccttatacgggtaaa

SEQ ID NO: 122916 - DNA, 25 bp, Artificial sequence
  SiRNA target sequence
gtggtttgtccttatacgggtaaag

SEQ ID NO: 122917 - DNA, 25 bp, Artificial sequence
  SiRNA target sequence
tggtttgtccttatacgggtaaaga

SEQ ID NO: 122918 - DNA, 25 bp, Artificial sequence
  SiRNA target sequence
ggtttgtccttatacgggtaaagac

SEQ ID NO: 122919 - DNA, 25 bp, Artificial sequence
  SiRNA target sequence
gtttgtccttatacgggtaaagacc

SEQ ID NO: 122920 - DNA, 25 bp, Artificial sequence
  SiRNA target sequence
tttgtccttatacgggtaaagacca

SEQ ID NO: 122921 - DNA, 25 bp, Artificial sequence
  SiRNA target sequence
ttgtccttatacgggtaaagaccat

SEQ ID NO: 122922 - DNA, 25 bp, Artificial sequence
  SiRNA target sequence
tgtccttatacgggtaaagaccata

SEQ ID NO: 122923 - DNA, 25 bp, Artificial sequence
  SiRNA target sequence
gtccttatacgggtaaagaccataa

SEQ ID NO: 122924 - DNA, 25 bp, Artificial sequence
  SiRNA target sequence
tccttatacgggtaaagaccataaa

SEQ ID NO: 122925 - DNA, 25 bp, Artificial sequence
  SiRNA target sequence
ccttatacgggtaaagaccataaag

SEQ ID NO: 122926 - DNA, 25 bp, Artificial sequence
  SiRNA target sequence
cttatacgggtaaagaccataaagg

SEQ ID NO: 122927 - DNA, 25 bp, Artificial sequence
  SiRNA target sequence
ttatacgggtaaagaccataaagga

SEQ ID NO: 122928 - DNA, 25 bp, Artificial sequence
  SiRNA target sequence
tatacgggtaaagaccataaaggac

SEQ ID NO: 122929 - DNA, 25 bp, Artificial sequence
  SiRNA target sequence
atacgggtaaagaccataaaggact

SEQ ID NO: 122930 - DNA, 25 bp, Artificial sequence
  SiRNA target sequence
tacgggtaaagaccataaaggactt

SEQ ID NO: 122931 - DNA, 25 bp, Artificial sequence
  SiRNA target sequence
acgggtaaagaccataaaggacttt

SEQ ID NO: 122932 - DNA, 25 bp, Artificial sequence
  SiRNA target sequence
cgggtaaagaccataaaggactttt

SEQ ID NO: 122933 - DNA, 25 bp, Artificial sequence
  SiRNA target sequence
gggtaaagaccataaaggactttta

SEQ ID NO: 122934 - DNA, 25 bp, Artificial sequence
  SiRNA target sequence
ggtaaagaccataaaggacttttaa

SEQ ID NO: 122935 - DNA, 25 bp, Artificial sequence
  SiRNA target sequence
gtaaagaccataaaggacttttaaa

SEQ ID NO: 122936 - DNA, 25 bp, Artificial sequence
  SiRNA target sequence
taaagaccataaaggacttttaaaa

SEQ ID NO: 122937 - DNA, 25 bp, Artificial sequence
  SiRNA target sequence
aaagaccataaaggacttttaaaaa

SEQ ID NO: 122938 - DNA, 25 bp, Artificial sequence
  SiRNA target sequence
aagaccataaaggacttttaaaaag

SEQ ID NO: 122939 - DNA, 25 bp, Artificial sequence
  SiRNA target sequence
agaccataaaggacttttaaaaagc

SEQ ID NO: 122940 - DNA, 25 bp, Artificial sequence
  SiRNA target sequence
gaccataaaggacttttaaaaagcg

SEQ ID NO: 122941 - DNA, 25 bp, Artificial sequence
  SiRNA target sequence
accataaaggacttttaaaaagcgc

SEQ ID NO: 122942 - DNA, 25 bp, Artificial sequence
  SiRNA target sequence
ccataaaggacttttaaaaagcgct

SEQ ID NO: 122943 - DNA, 25 bp, Artificial sequence
  SiRNA target sequence
cataaaggacttttaaaaagcgcta

SEQ ID NO: 122944 - DNA, 25 bp, Artificial sequence
  SiRNA target sequence
ataaaggacttttaaaaagcgctat

SEQ ID NO: 122945 - DNA, 25 bp, Artificial sequence
  SiRNA target sequence
taaaggacttttaaaaagcgctatt

SEQ ID NO: 122946 - DNA, 25 bp, Artificial sequence
  SiRNA target sequence
aaaggacttttaaaaagcgctatta

SEQ ID NO: 122947 - DNA, 25 bp, Artificial sequence
  SiRNA target sequence
aaggacttttaaaaagcgctattag

SEQ ID NO: 122948 - DNA, 25 bp, Artificial sequence
  SiRNA target sequence
aggacttttaaaaagcgctattaga

SEQ ID NO: 122949 - DNA, 25 bp, Artificial sequence
  SiRNA target sequence
ggacttttaaaaagcgctattagag

SEQ ID NO: 122950 - DNA, 25 bp, Artificial sequence
  SiRNA target sequence
gacttttaaaaagcgctattagaga

SEQ ID NO: 122951 - DNA, 25 bp, Artificial sequence
  SiRNA target sequence
acttttaaaaagcgctattagagac

SEQ ID NO: 122952 - DNA, 25 bp, Artificial sequence
  SiRNA target sequence
cttttaaaaagcgctattagagaca

SEQ ID NO: 122953 - DNA, 25 bp, Artificial sequence
  SiRNA target sequence
ttttaaaaagcgctattagagacaa

SEQ ID NO: 122954 - DNA, 25 bp, Artificial sequence
  SiRNA target sequence
tttaaaaagcgctattagagacaat

SEQ ID NO: 122955 - DNA, 25 bp, Artificial sequence
  SiRNA target sequence
ttaaaaagcgctattagagacaata

SEQ ID NO: 122956 - DNA, 25 bp, Artificial sequence
  SiRNA target sequence
taaaaagcgctattagagacaataa

SEQ ID NO: 122957 - DNA, 25 bp, Artificial sequence
  SiRNA target sequence
aaaaagcgctattagagacaataac

SEQ ID NO: 122958 - DNA, 25 bp, Artificial sequence
  SiRNA target sequence
aaaagcgctattagagacaataacc

SEQ ID NO: 122959 - DNA, 25 bp, Artificial sequence
  SiRNA target sequence
aaagcgctattagagacaataaccc

SEQ ID NO: 122960 - DNA, 25 bp, Artificial sequence
  SiRNA target sequence
aagcgctattagagacaataacccg

SEQ ID NO: 122961 - DNA, 25 bp, Artificial sequence
  SiRNA target sequence
agcgctattagagacaataacccgg

SEQ ID NO: 122962 - DNA, 25 bp, Artificial sequence
  SiRNA target sequence
gcgctattagagacaataacccggt

SEQ ID NO: 122963 - DNA, 25 bp, Artificial sequence
  SiRNA target sequence
cgctattagagacaataacccggtt

SEQ ID NO: 122964 - DNA, 25 bp, Artificial sequence
  SiRNA target sequence
gctattagagacaataacccggtta

SEQ ID NO: 122965 - DNA, 25 bp, Artificial sequence
  SiRNA target sequence
ctattagagacaataacccggttat

SEQ ID NO: 122966 - DNA, 25 bp, Artificial sequence
  SiRNA target sequence
tattagagacaataacccggttata

SEQ ID NO: 122967 - DNA, 25 bp, Artificial sequence
  SiRNA target sequence
attagagacaataacccggttatat

SEQ ID NO: 122968 - DNA, 25 bp, Artificial sequence
  SiRNA target sequence
ttagagacaataacccggttatatt

SEQ ID NO: 122969 - DNA, 25 bp, Artificial sequence
  SiRNA target sequence
tagagacaataacccggttatattt

SEQ ID NO: 122970 - DNA, 25 bp, Artificial sequence
  SiRNA target sequence
agagacaataacccggttatatttc

SEQ ID NO: 122971 - DNA, 25 bp, Artificial sequence
  SiRNA target sequence
gagacaataacccggttatatttct

SEQ ID NO: 122972 - DNA, 25 bp, Artificial sequence
  SiRNA target sequence
agacaataacccggttatatttctt

SEQ ID NO: 122973 - DNA, 25 bp, Artificial sequence
  SiRNA target sequence
gacaataacccggttatatttcttg

SEQ ID NO: 122974 - DNA, 25 bp, Artificial sequence
  SiRNA target sequence
acaataacccggttatatttcttga

SEQ ID NO: 122975 - DNA, 25 bp, Artificial sequence
  SiRNA target sequence
caataacccggttatatttcttgag

SEQ ID NO: 122976 - DNA, 25 bp, Artificial sequence
  SiRNA target sequence
aataacccggttatatttcttgaga

SEQ ID NO: 122977 - DNA, 25 bp, Artificial sequence
  SiRNA target sequence
ataacccggttatatttcttgagaa

SEQ ID NO: 122978 - DNA, 25 bp, Artificial sequence
  SiRNA target sequence
taacccggttatatttcttgagaat

SEQ ID NO: 122979 - DNA, 25 bp, Artificial sequence
  SiRNA target sequence
aacccggttatatttcttgagaatg

SEQ ID NO: 122980 - DNA, 25 bp, Artificial sequence
  SiRNA target sequence
acccggttatatttcttgagaatga

SEQ ID NO: 122981 - DNA, 25 bp, Artificial sequence
  SiRNA target sequence
cccggttatatttcttgagaatgaa

SEQ ID NO: 122982 - DNA, 25 bp, Artificial sequence
  SiRNA target sequence
ccggttatatttcttgagaatgaaa

SEQ ID NO: 122983 - DNA, 25 bp, Artificial sequence
  SiRNA target sequence
cggttatatttcttgagaatgaaat

SEQ ID NO: 122984 - DNA, 25 bp, Artificial sequence
  SiRNA target sequence
ggttatatttcttgagaatgaaata

SEQ ID NO: 122985 - DNA, 25 bp, Artificial sequence
  SiRNA target sequence
gttatatttcttgagaatgaaatat

SEQ ID NO: 122986 - DNA, 25 bp, Artificial sequence
  SiRNA target sequence
ttatatttcttgagaatgaaatatt

SEQ ID NO: 122987 - DNA, 25 bp, Artificial sequence
  SiRNA target sequence
tatatttcttgagaatgaaatatta

SEQ ID NO: 122988 - DNA, 25 bp, Artificial sequence
  SiRNA target sequence
atatttcttgagaatgaaatattat

SEQ ID NO: 122989 - DNA, 25 bp, Artificial sequence
  SiRNA target sequence
tatttcttgagaatgaaatattata

SEQ ID NO: 122990 - DNA, 25 bp, Artificial sequence
  SiRNA target sequence
atttcttgagaatgaaatattatat

SEQ ID NO: 122991 - DNA, 25 bp, Artificial sequence
  SiRNA target sequence
tttcttgagaatgaaatattatata

SEQ ID NO: 122992 - DNA, 25 bp, Artificial sequence
  SiRNA target sequence
ttcttgagaatgaaatattatataa

SEQ ID NO: 122993 - DNA, 25 bp, Artificial sequence
  SiRNA target sequence
tcttgagaatgaaatattatataaa

SEQ ID NO: 122994 - DNA, 25 bp, Artificial sequence
  SiRNA target sequence
cttgagaatgaaatattatataaag

SEQ ID NO: 122995 - DNA, 25 bp, Artificial sequence
  SiRNA target sequence
ttgagaatgaaatattatataaaga

SEQ ID NO: 122996 - DNA, 25 bp, Artificial sequence
  SiRNA target sequence
tgagaatgaaatattatataaagat

SEQ ID NO: 122997 - DNA, 25 bp, Artificial sequence
  SiRNA target sequence
gagaatgaaatattatataaagata

SEQ ID NO: 122998 - DNA, 25 bp, Artificial sequence
  SiRNA target sequence
agaatgaaatattatataaagataa

SEQ ID NO: 122999 - DNA, 25 bp, Artificial sequence
  SiRNA target sequence
gaatgaaatattatataaagataaa

SEQ ID NO: 123000 - DNA, 25 bp, Artificial sequence
  SiRNA target sequence
aatgaaatattatataaagataaat

SEQ ID NO: 123001 - DNA, 25 bp, Artificial sequence
  SiRNA target sequence
atgaaatattatataaagataaata

SEQ ID NO: 123002 - DNA, 25 bp, Artificial sequence
  SiRNA target sequence
tgaaatattatataaagataaatac

SEQ ID NO: 123003 - DNA, 25 bp, Artificial sequence
  SiRNA target sequence
gaaatattatataaagataaatacc

SEQ ID NO: 123004 - DNA, 25 bp, Artificial sequence
  SiRNA target sequence
aaatattatataaagataaatacct

SEQ ID NO: 123005 - DNA, 25 bp, Artificial sequence
  SiRNA target sequence
aatattatataaagataaatacctt

SEQ ID NO: 123006 - DNA, 25 bp, Artificial sequence
  SiRNA target sequence
atattatataaagataaataccttg

SEQ ID NO: 123007 - DNA, 25 bp, Artificial sequence
  SiRNA target sequence
tattatataaagataaataccttga

SEQ ID NO: 123008 - DNA, 25 bp, Artificial sequence
  SiRNA target sequence
attatataaagataaataccttgaa

SEQ ID NO: 123009 - DNA, 25 bp, Artificial sequence
  SiRNA target sequence
ttatataaagataaataccttgaag

SEQ ID NO: 123010 - DNA, 25 bp, Artificial sequence
  SiRNA target sequence
tatataaagataaataccttgaagt

SEQ ID NO: 123011 - DNA, 25 bp, Artificial sequence
  SiRNA target sequence
atataaagataaataccttgaagtg

SEQ ID NO: 123012 - DNA, 25 bp, Artificial sequence
  SiRNA target sequence
tataaagataaataccttgaagtgt

SEQ ID NO: 123013 - DNA, 25 bp, Artificial sequence
  SiRNA target sequence
ataaagataaataccttgaagtgtc

SEQ ID NO: 123014 - DNA, 25 bp, Artificial sequence
  SiRNA target sequence
taaagataaataccttgaagtgtct

SEQ ID NO: 123015 - DNA, 25 bp, Artificial sequence
  SiRNA target sequence
aaagataaataccttgaagtgtcta

SEQ ID NO: 123016 - DNA, 25 bp, Artificial sequence
  SiRNA target sequence
aagataaataccttgaagtgtctaa

SEQ ID NO: 123017 - DNA, 25 bp, Artificial sequence
  SiRNA target sequence
agataaataccttgaagtgtctaat

SEQ ID NO: 123018 - DNA, 25 bp, Artificial sequence
  SiRNA target sequence
gataaataccttgaagtgtctaata

SEQ ID NO: 123019 - DNA, 25 bp, Artificial sequence
  SiRNA target sequence
ataaataccttgaagtgtctaataa

SEQ ID NO: 123020 - DNA, 25 bp, Artificial sequence
  SiRNA target sequence
taaataccttgaagtgtctaataat

SEQ ID NO: 123021 - DNA, 25 bp, Artificial sequence
  SiRNA target sequence
aaataccttgaagtgtctaataatt

SEQ ID NO: 123022 - DNA, 25 bp, Artificial sequence
  SiRNA target sequence
aataccttgaagtgtctaataatta

SEQ ID NO: 123023 - DNA, 25 bp, Artificial sequence
  SiRNA target sequence
ataccttgaagtgtctaataattat

SEQ ID NO: 123024 - DNA, 25 bp, Artificial sequence
  SiRNA target sequence
taccttgaagtgtctaataattata

SEQ ID NO: 123025 - DNA, 25 bp, Artificial sequence
  SiRNA target sequence
accttgaagtgtctaataattatat

SEQ ID NO: 123026 - DNA, 25 bp, Artificial sequence
  SiRNA target sequence
ccttgaagtgtctaataattatatt

SEQ ID NO: 123027 - DNA, 25 bp, Artificial sequence
  SiRNA target sequence
cttgaagtgtctaataattatattc

SEQ ID NO: 123028 - DNA, 25 bp, Artificial sequence
  SiRNA target sequence
ttgaagtgtctaataattatattca

SEQ ID NO: 123029 - DNA, 25 bp, Artificial sequence
  SiRNA target sequence
tgaagtgtctaataattatattcaa

SEQ ID NO: 123030 - DNA, 25 bp, Artificial sequence
  SiRNA target sequence
gaagtgtctaataattatattcaac

SEQ ID NO: 123031 - DNA, 25 bp, Artificial sequence
  SiRNA target sequence
aagtgtctaataattatattcaacc

SEQ ID NO: 123032 - DNA, 25 bp, Artificial sequence
  SiRNA target sequence
agtgtctaataattatattcaacca

SEQ ID NO: 123033 - DNA, 25 bp, Artificial sequence
  SiRNA target sequence
gtgtctaataattatattcaaccac

SEQ ID NO: 123034 - DNA, 25 bp, Artificial sequence
  SiRNA target sequence
tgtctaataattatattcaaccact

SEQ ID NO: 123035 - DNA, 25 bp, Artificial sequence
  SiRNA target sequence
gtctaataattatattcaaccactt

SEQ ID NO: 123036 - DNA, 25 bp, Artificial sequence
  SiRNA target sequence
tctaataattatattcaaccacttg

SEQ ID NO: 123037 - DNA, 25 bp, Artificial sequence
  SiRNA target sequence
ctaataattatattcaaccacttga

SEQ ID NO: 123038 - DNA, 25 bp, Artificial sequence
  SiRNA target sequence
taataattatattcaaccacttgac

SEQ ID NO: 123039 - DNA, 25 bp, Artificial sequence
  SiRNA target sequence
aataattatattcaaccacttgaca

SEQ ID NO: 123040 - DNA, 25 bp, Artificial sequence
  SiRNA target sequence
ataattatattcaaccacttgacaa

SEQ ID NO: 123041 - DNA, 25 bp, Artificial sequence
  SiRNA target sequence
taattatattcaaccacttgacaag

SEQ ID NO: 123042 - DNA, 25 bp, Artificial sequence
  SiRNA target sequence
aattatattcaaccacttgacaagg

SEQ ID NO: 123043 - DNA, 25 bp, Artificial sequence
  SiRNA target sequence
attatattcaaccacttgacaaggc

SEQ ID NO: 123044 - DNA, 25 bp, Artificial sequence
  SiRNA target sequence
ttatattcaaccacttgacaaggca

SEQ ID NO: 123045 - DNA, 25 bp, Artificial sequence
  SiRNA target sequence
tatattcaaccacttgacaaggcag

SEQ ID NO: 123046 - DNA, 25 bp, Artificial sequence
  SiRNA target sequence
atattcaaccacttgacaaggcagt

SEQ ID NO: 123047 - DNA, 25 bp, Artificial sequence
  SiRNA target sequence
tattcaaccacttgacaaggcagta

SEQ ID NO: 123048 - DNA, 25 bp, Artificial sequence
  SiRNA target sequence
attcaaccacttgacaaggcagtaa

SEQ ID NO: 123049 - DNA, 25 bp, Artificial sequence
  SiRNA target sequence
ttcaaccacttgacaaggcagtaat

SEQ ID NO: 123050 - DNA, 25 bp, Artificial sequence
  SiRNA target sequence
tcaaccacttgacaaggcagtaatt

SEQ ID NO: 123051 - DNA, 25 bp, Artificial sequence
  SiRNA target sequence
caaccacttgacaaggcagtaattg

SEQ ID NO: 123052 - DNA, 25 bp, Artificial sequence
  SiRNA target sequence
aaccacttgacaaggcagtaattga

SEQ ID NO: 123053 - DNA, 25 bp, Artificial sequence
  SiRNA target sequence
accacttgacaaggcagtaattgaa

SEQ ID NO: 123054 - DNA, 25 bp, Artificial sequence
  SiRNA target sequence
ccacttgacaaggcagtaattgaaa

SEQ ID NO: 123055 - DNA, 25 bp, Artificial sequence
  SiRNA target sequence
cacttgacaaggcagtaattgaaaa

SEQ ID NO: 123056 - DNA, 25 bp, Artificial sequence
  SiRNA target sequence
acttgacaaggcagtaattgaaaaa

SEQ ID NO: 123057 - DNA, 25 bp, Artificial sequence
  SiRNA target sequence
cttgacaaggcagtaattgaaaaaa

SEQ ID NO: 123058 - DNA, 25 bp, Artificial sequence
  SiRNA target sequence
ttgacaaggcagtaattgaaaaaaa

SEQ ID NO: 123059 - DNA, 25 bp, Artificial sequence
  SiRNA target sequence
tgacaaggcagtaattgaaaaaaat

SEQ ID NO: 123060 - DNA, 25 bp, Artificial sequence
  SiRNA target sequence
gacaaggcagtaattgaaaaaaatg

SEQ ID NO: 123061 - DNA, 25 bp, Artificial sequence
  SiRNA target sequence
acaaggcagtaattgaaaaaaatgg

SEQ ID NO: 123062 - DNA, 25 bp, Artificial sequence
  SiRNA target sequence
caaggcagtaattgaaaaaaatggt

SEQ ID NO: 123063 - DNA, 25 bp, Artificial sequence
  SiRNA target sequence
aaggcagtaattgaaaaaaatggtg

SEQ ID NO: 123064 - DNA, 25 bp, Artificial sequence
  SiRNA target sequence
aggcagtaattgaaaaaaatggtgt

SEQ ID NO: 123065 - DNA, 25 bp, Artificial sequence
  SiRNA target sequence
ggcagtaattgaaaaaaatggtgtt

SEQ ID NO: 123066 - DNA, 25 bp, Artificial sequence
  SiRNA target sequence
gcagtaattgaaaaaaatggtgttg

SEQ ID NO: 123067 - DNA, 25 bp, Artificial sequence
  SiRNA target sequence
cagtaattgaaaaaaatggtgttga

SEQ ID NO: 123068 - DNA, 25 bp, Artificial sequence
  SiRNA target sequence
agtaattgaaaaaaatggtgttgac

SEQ ID NO: 123069 - DNA, 25 bp, Artificial sequence
  SiRNA target sequence
gtaattgaaaaaaatggtgttgacg

SEQ ID NO: 123070 - DNA, 25 bp, Artificial sequence
  SiRNA target sequence
taattgaaaaaaatggtgttgacgt

SEQ ID NO: 123071 - DNA, 25 bp, Artificial sequence
  SiRNA target sequence
aattgaaaaaaatggtgttgacgtt

SEQ ID NO: 123072 - DNA, 25 bp, Artificial sequence
  SiRNA target sequence
attgaaaaaaatggtgttgacgtta

SEQ ID NO: 123073 - DNA, 25 bp, Artificial sequence
  SiRNA target sequence
ttgaaaaaaatggtgttgacgttac

SEQ ID NO: 123074 - DNA, 25 bp, Artificial sequence
  SiRNA target sequence
tgaaaaaaatggtgttgacgttaca

SEQ ID NO: 123075 - DNA, 25 bp, Artificial sequence
  SiRNA target sequence
gaaaaaaatggtgttgacgttacag

SEQ ID NO: 123076 - DNA, 25 bp, Artificial sequence
  SiRNA target sequence
aaaaaaatggtgttgacgttacagt

SEQ ID NO: 123077 - DNA, 25 bp, Artificial sequence
  SiRNA target sequence
aaaaaatggtgttgacgttacagtt

SEQ ID NO: 123078 - DNA, 25 bp, Artificial sequence
  SiRNA target sequence
aaaaatggtgttgacgttacagttt

SEQ ID NO: 123079 - DNA, 25 bp, Artificial sequence
  SiRNA target sequence
aaaatggtgttgacgttacagtttt

SEQ ID NO: 123080 - DNA, 25 bp, Artificial sequence
  SiRNA target sequence
aaatggtgttgacgttacagtttta

SEQ ID NO: 123081 - DNA, 25 bp, Artificial sequence
  SiRNA target sequence
aatggtgttgacgttacagttttag

SEQ ID NO: 123082 - DNA, 25 bp, Artificial sequence
  SiRNA target sequence
atggtgttgacgttacagttttagg

SEQ ID NO: 123083 - DNA, 25 bp, Artificial sequence
  SiRNA target sequence
tggtgttgacgttacagttttagga

SEQ ID NO: 123084 - DNA, 25 bp, Artificial sequence
  SiRNA target sequence
ggtgttgacgttacagttttaggaa

SEQ ID NO: 123085 - DNA, 25 bp, Artificial sequence
  SiRNA target sequence
gtgttgacgttacagttttaggaat

SEQ ID NO: 123086 - DNA, 25 bp, Artificial sequence
  SiRNA target sequence
tgttgacgttacagttttaggaata

SEQ ID NO: 123087 - DNA, 25 bp, Artificial sequence
  SiRNA target sequence
gttgacgttacagttttaggaatat

SEQ ID NO: 123088 - DNA, 25 bp, Artificial sequence
  SiRNA target sequence
ttgacgttacagttttaggaatatc

SEQ ID NO: 123089 - DNA, 25 bp, Artificial sequence
  SiRNA target sequence
tgacgttacagttttaggaatatca

SEQ ID NO: 123090 - DNA, 25 bp, Artificial sequence
  SiRNA target sequence
gacgttacagttttaggaatatcaa

SEQ ID NO: 123091 - DNA, 25 bp, Artificial sequence
  SiRNA target sequence
acgttacagttttaggaatatcaat

SEQ ID NO: 123092 - DNA, 25 bp, Artificial sequence
  SiRNA target sequence
cgttacagttttaggaatatcaata

SEQ ID NO: 123093 - DNA, 25 bp, Artificial sequence
  SiRNA target sequence
gttacagttttaggaatatcaataa

SEQ ID NO: 123094 - DNA, 25 bp, Artificial sequence
  SiRNA target sequence
ttacagttttaggaatatcaataag

SEQ ID NO: 123095 - DNA, 25 bp, Artificial sequence
  SiRNA target sequence
tacagttttaggaatatcaataagt

SEQ ID NO: 123096 - DNA, 25 bp, Artificial sequence
  SiRNA target sequence
acagttttaggaatatcaataagtc

SEQ ID NO: 123097 - DNA, 25 bp, Artificial sequence
  SiRNA target sequence
cagttttaggaatatcaataagtct

SEQ ID NO: 123098 - DNA, 25 bp, Artificial sequence
  SiRNA target sequence
agttttaggaatatcaataagtctt

SEQ ID NO: 123099 - DNA, 25 bp, Artificial sequence
  SiRNA target sequence
gttttaggaatatcaataagtctta

SEQ ID NO: 123100 - DNA, 25 bp, Artificial sequence
  SiRNA target sequence
ttttaggaatatcaataagtcttaa

SEQ ID NO: 123101 - DNA, 25 bp, Artificial sequence
  SiRNA target sequence
tttaggaatatcaataagtcttaaa

SEQ ID NO: 123102 - DNA, 25 bp, Artificial sequence
  SiRNA target sequence
ttaggaatatcaataagtcttaaag

SEQ ID NO: 123103 - DNA, 25 bp, Artificial sequence
  SiRNA target sequence
taggaatatcaataagtcttaaaga

SEQ ID NO: 123104 - DNA, 25 bp, Artificial sequence
  SiRNA target sequence
aggaatatcaataagtcttaaagaa

SEQ ID NO: 123105 - DNA, 25 bp, Artificial sequence
  SiRNA target sequence
ggaatatcaataagtcttaaagaaa

SEQ ID NO: 123106 - DNA, 25 bp, Artificial sequence
  SiRNA target sequence
gaatatcaataagtcttaaagaaat

SEQ ID NO: 123107 - DNA, 25 bp, Artificial sequence
  SiRNA target sequence
aatatcaataagtcttaaagaaatt

SEQ ID NO: 123108 - DNA, 25 bp, Artificial sequence
  SiRNA target sequence
atatcaataagtcttaaagaaattt

SEQ ID NO: 123109 - DNA, 25 bp, Artificial sequence
  SiRNA target sequence
tatcaataagtcttaaagaaatttt

SEQ ID NO: 123110 - DNA, 25 bp, Artificial sequence
  SiRNA target sequence
atcaataagtcttaaagaaattttt

SEQ ID NO: 123111 - DNA, 25 bp, Artificial sequence
  SiRNA target sequence
tcaataagtcttaaagaaattttta

SEQ ID NO: 123112 - DNA, 25 bp, Artificial sequence
  SiRNA target sequence
caataagtcttaaagaaatttttaa

SEQ ID NO: 123113 - DNA, 25 bp, Artificial sequence
  SiRNA target sequence
aataagtcttaaagaaatttttaaa

SEQ ID NO: 123114 - DNA, 25 bp, Artificial sequence
  SiRNA target sequence
ataagtcttaaagaaatttttaaag

SEQ ID NO: 123115 - DNA, 25 bp, Artificial sequence
  SiRNA target sequence
taagtcttaaagaaatttttaaagc

SEQ ID NO: 123116 - DNA, 25 bp, Artificial sequence
  SiRNA target sequence
aagtcttaaagaaatttttaaagca

SEQ ID NO: 123117 - DNA, 25 bp, Artificial sequence
  SiRNA target sequence
agtcttaaagaaatttttaaagcag

SEQ ID NO: 123118 - DNA, 25 bp, Artificial sequence
  SiRNA target sequence
gtcttaaagaaatttttaaagcaga

SEQ ID NO: 123119 - DNA, 25 bp, Artificial sequence
  SiRNA target sequence
tcttaaagaaatttttaaagcagac

SEQ ID NO: 123120 - DNA, 25 bp, Artificial sequence
  SiRNA target sequence
cttaaagaaatttttaaagcagaca

SEQ ID NO: 123121 - DNA, 25 bp, Artificial sequence
  SiRNA target sequence
ttaaagaaatttttaaagcagacag

SEQ ID NO: 123122 - DNA, 25 bp, Artificial sequence
  SiRNA target sequence
taaagaaatttttaaagcagacagt

SEQ ID NO: 123123 - DNA, 25 bp, Artificial sequence
  SiRNA target sequence
aaagaaatttttaaagcagacagtt

SEQ ID NO: 123124 - DNA, 25 bp, Artificial sequence
  SiRNA target sequence
aagaaatttttaaagcagacagttt

SEQ ID NO: 123125 - DNA, 25 bp, Artificial sequence
  SiRNA target sequence
agaaatttttaaagcagacagtttg

SEQ ID NO: 123126 - DNA, 25 bp, Artificial sequence
  SiRNA target sequence
gaaatttttaaagcagacagtttgt

SEQ ID NO: 123127 - DNA, 25 bp, Artificial sequence
  SiRNA target sequence
aaatttttaaagcagacagtttgtt

SEQ ID NO: 123128 - DNA, 25 bp, Artificial sequence
  SiRNA target sequence
aatttttaaagcagacagtttgtta

SEQ ID NO: 123129 - DNA, 25 bp, Artificial sequence
  SiRNA target sequence
atttttaaagcagacagtttgttag

SEQ ID NO: 123130 - DNA, 25 bp, Artificial sequence
  SiRNA target sequence
tttttaaagcagacagtttgttaga

SEQ ID NO: 123131 - DNA, 25 bp, Artificial sequence
  SiRNA target sequence
ttttaaagcagacagtttgttagag

SEQ ID NO: 123132 - DNA, 25 bp, Artificial sequence
  SiRNA target sequence
tttaaagcagacagtttgttagaga

SEQ ID NO: 123133 - DNA, 25 bp, Artificial sequence
  SiRNA target sequence
ttaaagcagacagtttgttagagaa

SEQ ID NO: 123134 - DNA, 25 bp, Artificial sequence
  SiRNA target sequence
taaagcagacagtttgttagagaaa

SEQ ID NO: 123135 - DNA, 25 bp, Artificial sequence
  SiRNA target sequence
aaagcagacagtttgttagagaaaa

SEQ ID NO: 123136 - DNA, 25 bp, Artificial sequence
  SiRNA target sequence
aagcagacagtttgttagagaaaaa

SEQ ID NO: 123137 - DNA, 25 bp, Artificial sequence
  SiRNA target sequence
agcagacagtttgttagagaaaaaa

SEQ ID NO: 123138 - DNA, 25 bp, Artificial sequence
  SiRNA target sequence
gcagacagtttgttagagaaaaaaa

SEQ ID NO: 123139 - DNA, 25 bp, Artificial sequence
  SiRNA target sequence
cagacagtttgttagagaaaaaaaa

SEQ ID NO: 123140 - DNA, 25 bp, Artificial sequence
  SiRNA target sequence
agacagtttgttagagaaaaaaaat

SEQ ID NO: 123141 - DNA, 25 bp, Artificial sequence
  SiRNA target sequence
gacagtttgttagagaaaaaaaata

SEQ ID NO: 123142 - DNA, 25 bp, Artificial sequence
  SiRNA target sequence
acagtttgttagagaaaaaaaatat

SEQ ID NO: 123143 - DNA, 25 bp, Artificial sequence
  SiRNA target sequence
cagtttgttagagaaaaaaaatatc

SEQ ID NO: 123144 - DNA, 25 bp, Artificial sequence
  SiRNA target sequence
agtttgttagagaaaaaaaatatcg

SEQ ID NO: 123145 - DNA, 25 bp, Artificial sequence
  SiRNA target sequence
gtttgttagagaaaaaaaatatcga

SEQ ID NO: 123146 - DNA, 25 bp, Artificial sequence
  SiRNA target sequence
tttgttagagaaaaaaaatatcgac

SEQ ID NO: 123147 - DNA, 25 bp, Artificial sequence
  SiRNA target sequence
ttgttagagaaaaaaaatatcgaca

SEQ ID NO: 123148 - DNA, 25 bp, Artificial sequence
  SiRNA target sequence
tgttagagaaaaaaaatatcgacat

SEQ ID NO: 123149 - DNA, 25 bp, Artificial sequence
  SiRNA target sequence
gttagagaaaaaaaatatcgacatt

SEQ ID NO: 123150 - DNA, 25 bp, Artificial sequence
  SiRNA target sequence
ttagagaaaaaaaatatcgacattg

SEQ ID NO: 123151 - DNA, 25 bp, Artificial sequence
  SiRNA target sequence
tagagaaaaaaaatatcgacattga

SEQ ID NO: 123152 - DNA, 25 bp, Artificial sequence
  SiRNA target sequence
agagaaaaaaaatatcgacattgag

SEQ ID NO: 123153 - DNA, 25 bp, Artificial sequence
  SiRNA target sequence
gagaaaaaaaatatcgacattgaga

SEQ ID NO: 123154 - DNA, 25 bp, Artificial sequence
  SiRNA target sequence
agaaaaaaaatatcgacattgagat

SEQ ID NO: 123155 - DNA, 25 bp, Artificial sequence
  SiRNA target sequence
gaaaaaaaatatcgacattgagata

SEQ ID NO: 123156 - DNA, 25 bp, Artificial sequence
  SiRNA target sequence
aaaaaaaatatcgacattgagataa

SEQ ID NO: 123157 - DNA, 25 bp, Artificial sequence
  SiRNA target sequence
aaaaaaatatcgacattgagataat

SEQ ID NO: 123158 - DNA, 25 bp, Artificial sequence
  SiRNA target sequence
aaaaaatatcgacattgagataatt

SEQ ID NO: 123159 - DNA, 25 bp, Artificial sequence
  SiRNA target sequence
aaaaatatcgacattgagataatta

SEQ ID NO: 123160 - DNA, 25 bp, Artificial sequence
  SiRNA target sequence
aaaatatcgacattgagataattaa

SEQ ID NO: 123161 - DNA, 25 bp, Artificial sequence
  SiRNA target sequence
aaatatcgacattgagataattaat

SEQ ID NO: 123162 - DNA, 25 bp, Artificial sequence
  SiRNA target sequence
aatatcgacattgagataattaatc

SEQ ID NO: 123163 - DNA, 25 bp, Artificial sequence
  SiRNA target sequence
atatcgacattgagataattaatct

SEQ ID NO: 123164 - DNA, 25 bp, Artificial sequence
  SiRNA target sequence
tatcgacattgagataattaatctt

SEQ ID NO: 123165 - DNA, 25 bp, Artificial sequence
  SiRNA target sequence
atcgacattgagataattaatcttg

SEQ ID NO: 123166 - DNA, 25 bp, Artificial sequence
  SiRNA target sequence
tcgacattgagataattaatcttgt

SEQ ID NO: 123167 - DNA, 25 bp, Artificial sequence
  SiRNA target sequence
cgacattgagataattaatcttgtg

SEQ ID NO: 123168 - DNA, 25 bp, Artificial sequence
  SiRNA target sequence
gacattgagataattaatcttgtgt

SEQ ID NO: 123169 - DNA, 25 bp, Artificial sequence
  SiRNA target sequence
acattgagataattaatcttgtgtc

SEQ ID NO: 123170 - DNA, 25 bp, Artificial sequence
  SiRNA target sequence
cattgagataattaatcttgtgtca

SEQ ID NO: 123171 - DNA, 25 bp, Artificial sequence
  SiRNA target sequence
attgagataattaatcttgtgtcaa

SEQ ID NO: 123172 - DNA, 25 bp, Artificial sequence
  SiRNA target sequence
ttgagataattaatcttgtgtcaat

SEQ ID NO: 123173 - DNA, 25 bp, Artificial sequence
  SiRNA target sequence
tgagataattaatcttgtgtcaata

SEQ ID NO: 123174 - DNA, 25 bp, Artificial sequence
  SiRNA target sequence
gagataattaatcttgtgtcaataa

SEQ ID NO: 123175 - DNA, 25 bp, Artificial sequence
  SiRNA target sequence
agataattaatcttgtgtcaataaa

SEQ ID NO: 123176 - DNA, 25 bp, Artificial sequence
  SiRNA target sequence
gataattaatcttgtgtcaataaaa

SEQ ID NO: 123177 - DNA, 25 bp, Artificial sequence
  SiRNA target sequence
ataattaatcttgtgtcaataaaac

SEQ ID NO: 123178 - DNA, 25 bp, Artificial sequence
  SiRNA target sequence
taattaatcttgtgtcaataaaacc

SEQ ID NO: 123179 - DNA, 25 bp, Artificial sequence
  SiRNA target sequence
aattaatcttgtgtcaataaaacca

SEQ ID NO: 123180 - DNA, 25 bp, Artificial sequence
  SiRNA target sequence
attaatcttgtgtcaataaaaccaa

SEQ ID NO: 123181 - DNA, 25 bp, Artificial sequence
  SiRNA target sequence
ttaatcttgtgtcaataaaaccaat

SEQ ID NO: 123182 - DNA, 25 bp, Artificial sequence
  SiRNA target sequence
taatcttgtgtcaataaaaccaatt

SEQ ID NO: 123183 - DNA, 25 bp, Artificial sequence
  SiRNA target sequence
aatcttgtgtcaataaaaccaattg

SEQ ID NO: 123184 - DNA, 25 bp, Artificial sequence
  SiRNA target sequence
atcttgtgtcaataaaaccaattga

SEQ ID NO: 123185 - DNA, 25 bp, Artificial sequence
  SiRNA target sequence
tcttgtgtcaataaaaccaattgat

SEQ ID NO: 123186 - DNA, 25 bp, Artificial sequence
  SiRNA target sequence
cttgtgtcaataaaaccaattgatt

SEQ ID NO: 123187 - DNA, 25 bp, Artificial sequence
  SiRNA target sequence
ttgtgtcaataaaaccaattgatta

SEQ ID NO: 123188 - DNA, 25 bp, Artificial sequence
  SiRNA target sequence
tgtgtcaataaaaccaattgattat

SEQ ID NO: 123189 - DNA, 25 bp, Artificial sequence
  SiRNA target sequence
gtgtcaataaaaccaattgattatg

SEQ ID NO: 123190 - DNA, 25 bp, Artificial sequence
  SiRNA target sequence
tgtcaataaaaccaattgattatgt

SEQ ID NO: 123191 - DNA, 25 bp, Artificial sequence
  SiRNA target sequence
gtcaataaaaccaattgattatgtt

SEQ ID NO: 123192 - DNA, 25 bp, Artificial sequence
  SiRNA target sequence
tcaataaaaccaattgattatgtta

SEQ ID NO: 123193 - DNA, 25 bp, Artificial sequence
  SiRNA target sequence
caataaaaccaattgattatgttac

SEQ ID NO: 123194 - DNA, 25 bp, Artificial sequence
  SiRNA target sequence
aataaaaccaattgattatgttact

SEQ ID NO: 123195 - DNA, 25 bp, Artificial sequence
  SiRNA target sequence
ataaaaccaattgattatgttacta

SEQ ID NO: 123196 - DNA, 25 bp, Artificial sequence
  SiRNA target sequence
taaaaccaattgattatgttactat

SEQ ID NO: 123197 - DNA, 25 bp, Artificial sequence
  SiRNA target sequence
aaaaccaattgattatgttactatt

SEQ ID NO: 123198 - DNA, 25 bp, Artificial sequence
  SiRNA target sequence
aaaccaattgattatgttactattg

SEQ ID NO: 123199 - DNA, 25 bp, Artificial sequence
  SiRNA target sequence
aaccaattgattatgttactattga

SEQ ID NO: 123200 - DNA, 25 bp, Artificial sequence
  SiRNA target sequence
accaattgattatgttactattgaa

SEQ ID NO: 123201 - DNA, 25 bp, Artificial sequence
  SiRNA target sequence
ccaattgattatgttactattgaaa

SEQ ID NO: 123202 - DNA, 25 bp, Artificial sequence
  SiRNA target sequence
caattgattatgttactattgaaat

SEQ ID NO: 123203 - DNA, 25 bp, Artificial sequence
  SiRNA target sequence
aattgattatgttactattgaaata

SEQ ID NO: 123204 - DNA, 25 bp, Artificial sequence
  SiRNA target sequence
attgattatgttactattgaaatat

SEQ ID NO: 123205 - DNA, 25 bp, Artificial sequence
  SiRNA target sequence
ttgattatgttactattgaaatatc

SEQ ID NO: 123206 - DNA, 25 bp, Artificial sequence
  SiRNA target sequence
tgattatgttactattgaaatatca

SEQ ID NO: 123207 - DNA, 25 bp, Artificial sequence
  SiRNA target sequence
gattatgttactattgaaatatcag

SEQ ID NO: 123208 - DNA, 25 bp, Artificial sequence
  SiRNA target sequence
attatgttactattgaaatatcagt

SEQ ID NO: 123209 - DNA, 25 bp, Artificial sequence
  SiRNA target sequence
ttatgttactattgaaatatcagtc

SEQ ID NO: 123210 - DNA, 25 bp, Artificial sequence
  SiRNA target sequence
tatgttactattgaaatatcagtca

SEQ ID NO: 123211 - DNA, 25 bp, Artificial sequence
  SiRNA target sequence
atgttactattgaaatatcagtcaa

SEQ ID NO: 123212 - DNA, 25 bp, Artificial sequence
  SiRNA target sequence
tgttactattgaaatatcagtcaaa

SEQ ID NO: 123213 - DNA, 25 bp, Artificial sequence
  SiRNA target sequence
gttactattgaaatatcagtcaaaa

SEQ ID NO: 123214 - DNA, 25 bp, Artificial sequence
  SiRNA target sequence
ttactattgaaatatcagtcaaaaa

SEQ ID NO: 123215 - DNA, 25 bp, Artificial sequence
  SiRNA target sequence
tactattgaaatatcagtcaaaaaa

SEQ ID NO: 123216 - DNA, 25 bp, Artificial sequence
  SiRNA target sequence
actattgaaatatcagtcaaaaaaa

SEQ ID NO: 123217 - DNA, 25 bp, Artificial sequence
  SiRNA target sequence
ctattgaaatatcagtcaaaaaaac

SEQ ID NO: 123218 - DNA, 25 bp, Artificial sequence
  SiRNA target sequence
tattgaaatatcagtcaaaaaaaca

SEQ ID NO: 123219 - DNA, 25 bp, Artificial sequence
  SiRNA target sequence
attgaaatatcagtcaaaaaaacac

SEQ ID NO: 123220 - DNA, 25 bp, Artificial sequence
  SiRNA target sequence
ttgaaatatcagtcaaaaaaacaca

SEQ ID NO: 123221 - DNA, 25 bp, Artificial sequence
  SiRNA target sequence
tgaaatatcagtcaaaaaaacacaa

SEQ ID NO: 123222 - DNA, 25 bp, Artificial sequence
  SiRNA target sequence
gaaatatcagtcaaaaaaacacaaa

SEQ ID NO: 123223 - DNA, 25 bp, Artificial sequence
  SiRNA target sequence
aaatatcagtcaaaaaaacacaaaa

SEQ ID NO: 123224 - DNA, 25 bp, Artificial sequence
  SiRNA target sequence
aatatcagtcaaaaaaacacaaaag

SEQ ID NO: 123225 - DNA, 25 bp, Artificial sequence
  SiRNA target sequence
atatcagtcaaaaaaacacaaaagt

SEQ ID NO: 123226 - DNA, 25 bp, Artificial sequence
  SiRNA target sequence
tatcagtcaaaaaaacacaaaagtt

SEQ ID NO: 123227 - DNA, 25 bp, Artificial sequence
  SiRNA target sequence
atcagtcaaaaaaacacaaaagtta

SEQ ID NO: 123228 - DNA, 25 bp, Artificial sequence
  SiRNA target sequence
tcagtcaaaaaaacacaaaagttag

SEQ ID NO: 123229 - DNA, 25 bp, Artificial sequence
  SiRNA target sequence
cagtcaaaaaaacacaaaagttagt

SEQ ID NO: 123230 - DNA, 25 bp, Artificial sequence
  SiRNA target sequence
agtcaaaaaaacacaaaagttagtg

SEQ ID NO: 123231 - DNA, 25 bp, Artificial sequence
  SiRNA target sequence
gtcaaaaaaacacaaaagttagtga

SEQ ID NO: 123232 - DNA, 25 bp, Artificial sequence
  SiRNA target sequence
tcaaaaaaacacaaaagttagtgat

SEQ ID NO: 123233 - DNA, 25 bp, Artificial sequence
  SiRNA target sequence
caaaaaaacacaaaagttagtgata

SEQ ID NO: 123234 - DNA, 25 bp, Artificial sequence
  SiRNA target sequence
aaaaaaacacaaaagttagtgatag

SEQ ID NO: 123235 - DNA, 25 bp, Artificial sequence
  SiRNA target sequence
aaaaaacacaaaagttagtgatagt

SEQ ID NO: 123236 - DNA, 25 bp, Artificial sequence
  SiRNA target sequence
aaaaacacaaaagttagtgatagtt

SEQ ID NO: 123237 - DNA, 25 bp, Artificial sequence
  SiRNA target sequence
aaaacacaaaagttagtgatagttg

SEQ ID NO: 123238 - DNA, 25 bp, Artificial sequence
  SiRNA target sequence
aaacacaaaagttagtgatagttga

SEQ ID NO: 123239 - DNA, 25 bp, Artificial sequence
  SiRNA target sequence
aacacaaaagttagtgatagttgat

SEQ ID NO: 123240 - DNA, 25 bp, Artificial sequence
  SiRNA target sequence
acacaaaagttagtgatagttgatt

SEQ ID NO: 123241 - DNA, 25 bp, Artificial sequence
  SiRNA target sequence
cacaaaagttagtgatagttgattt

SEQ ID NO: 123242 - DNA, 25 bp, Artificial sequence
  SiRNA target sequence
acaaaagttagtgatagttgatttt

SEQ ID NO: 123243 - DNA, 25 bp, Artificial sequence
  SiRNA target sequence
caaaagttagtgatagttgattttg

SEQ ID NO: 123244 - DNA, 25 bp, Artificial sequence
  SiRNA target sequence
aaaagttagtgatagttgattttgc

SEQ ID NO: 123245 - DNA, 25 bp, Artificial sequence
  SiRNA target sequence
aaagttagtgatagttgattttgca

SEQ ID NO: 123246 - DNA, 25 bp, Artificial sequence
  SiRNA target sequence
aagttagtgatagttgattttgcat

SEQ ID NO: 123247 - DNA, 25 bp, Artificial sequence
  SiRNA target sequence
agttagtgatagttgattttgcata

SEQ ID NO: 123248 - DNA, 25 bp, Artificial sequence
  SiRNA target sequence
gttagtgatagttgattttgcatat

SEQ ID NO: 123249 - DNA, 25 bp, Artificial sequence
  SiRNA target sequence
ttagtgatagttgattttgcatatc

SEQ ID NO: 123250 - DNA, 25 bp, Artificial sequence
  SiRNA target sequence
tagtgatagttgattttgcatatcc

SEQ ID NO: 123251 - DNA, 25 bp, Artificial sequence
  SiRNA target sequence
agtgatagttgattttgcatatcct

SEQ ID NO: 123252 - DNA, 25 bp, Artificial sequence
  SiRNA target sequence
gtgatagttgattttgcatatccta

SEQ ID NO: 123253 - DNA, 25 bp, Artificial sequence
  SiRNA target sequence
tgatagttgattttgcatatcctac

SEQ ID NO: 123254 - DNA, 25 bp, Artificial sequence
  SiRNA target sequence
gatagttgattttgcatatcctact

SEQ ID NO: 123255 - DNA, 25 bp, Artificial sequence
  SiRNA target sequence
atagttgattttgcatatcctactt

SEQ ID NO: 123256 - DNA, 25 bp, Artificial sequence
  SiRNA target sequence
tagttgattttgcatatcctacttt

SEQ ID NO: 123257 - DNA, 25 bp, Artificial sequence
  SiRNA target sequence
agttgattttgcatatcctactttc

SEQ ID NO: 123258 - DNA, 25 bp, Artificial sequence
  SiRNA target sequence
gttgattttgcatatcctactttca

SEQ ID NO: 123259 - DNA, 25 bp, Artificial sequence
  SiRNA target sequence
ttgattttgcatatcctactttcaa

SEQ ID NO: 123260 - DNA, 25 bp, Artificial sequence
  SiRNA target sequence
tgattttgcatatcctactttcaat

SEQ ID NO: 123261 - DNA, 25 bp, Artificial sequence
  SiRNA target sequence
gattttgcatatcctactttcaata

SEQ ID NO: 123262 - DNA, 25 bp, Artificial sequence
  SiRNA target sequence
attttgcatatcctactttcaatat

SEQ ID NO: 123263 - DNA, 25 bp, Artificial sequence
  SiRNA target sequence
ttttgcatatcctactttcaatatt

SEQ ID NO: 123264 - DNA, 25 bp, Artificial sequence
  SiRNA target sequence
tttgcatatcctactttcaatattg

SEQ ID NO: 123265 - DNA, 25 bp, Artificial sequence
  SiRNA target sequence
ttgcatatcctactttcaatattgc

SEQ ID NO: 123266 - DNA, 25 bp, Artificial sequence
  SiRNA target sequence
tgcatatcctactttcaatattgcg

SEQ ID NO: 123267 - DNA, 25 bp, Artificial sequence
  SiRNA target sequence
gcatatcctactttcaatattgcga

SEQ ID NO: 123268 - DNA, 25 bp, Artificial sequence
  SiRNA target sequence
catatcctactttcaatattgcgag

SEQ ID NO: 123269 - DNA, 25 bp, Artificial sequence
  SiRNA target sequence
atatcctactttcaatattgcgagt

SEQ ID NO: 123270 - DNA, 25 bp, Artificial sequence
  SiRNA target sequence
tatcctactttcaatattgcgagtg

SEQ ID NO: 123271 - DNA, 25 bp, Artificial sequence
  SiRNA target sequence
atcctactttcaatattgcgagtga

SEQ ID NO: 123272 - DNA, 25 bp, Artificial sequence
  SiRNA target sequence
tcctactttcaatattgcgagtgaa

SEQ ID NO: 123273 - DNA, 25 bp, Artificial sequence
  SiRNA target sequence
cctactttcaatattgcgagtgaaa

SEQ ID NO: 123274 - DNA, 25 bp, Artificial sequence
  SiRNA target sequence
ctactttcaatattgcgagtgaaat

SEQ ID NO: 123275 - DNA, 25 bp, Artificial sequence
  SiRNA target sequence
tactttcaatattgcgagtgaaata

SEQ ID NO: 123276 - DNA, 25 bp, Artificial sequence
  SiRNA target sequence
actttcaatattgcgagtgaaatag

SEQ ID NO: 123277 - DNA, 25 bp, Artificial sequence
  SiRNA target sequence
ctttcaatattgcgagtgaaatagc

SEQ ID NO: 123278 - DNA, 25 bp, Artificial sequence
  SiRNA target sequence
tttcaatattgcgagtgaaatagct

SEQ ID NO: 123279 - DNA, 25 bp, Artificial sequence
  SiRNA target sequence
ttcaatattgcgagtgaaatagctg

SEQ ID NO: 123280 - DNA, 25 bp, Artificial sequence
  SiRNA target sequence
tcaatattgcgagtgaaatagctgc

SEQ ID NO: 123281 - DNA, 25 bp, Artificial sequence
  SiRNA target sequence
caatattgcgagtgaaatagctgcg

SEQ ID NO: 123282 - DNA, 25 bp, Artificial sequence
  SiRNA target sequence
aatattgcgagtgaaatagctgcgc

SEQ ID NO: 123283 - DNA, 25 bp, Artificial sequence
  SiRNA target sequence
atattgcgagtgaaatagctgcgca

SEQ ID NO: 123284 - DNA, 25 bp, Artificial sequence
  SiRNA target sequence
tattgcgagtgaaatagctgcgcac

SEQ ID NO: 123285 - DNA, 25 bp, Artificial sequence
  SiRNA target sequence
attgcgagtgaaatagctgcgcact

SEQ ID NO: 123286 - DNA, 25 bp, Artificial sequence
  SiRNA target sequence
ttgcgagtgaaatagctgcgcactt

SEQ ID NO: 123287 - DNA, 25 bp, Artificial sequence
  SiRNA target sequence
tgcgagtgaaatagctgcgcacttt

SEQ ID NO: 123288 - DNA, 25 bp, Artificial sequence
  SiRNA target sequence
gcgagtgaaatagctgcgcactttt

SEQ ID NO: 123289 - DNA, 25 bp, Artificial sequence
  SiRNA target sequence
cgagtgaaatagctgcgcactttta

SEQ ID NO: 123290 - DNA, 25 bp, Artificial sequence
  SiRNA target sequence
gagtgaaatagctgcgcacttttac

SEQ ID NO: 123291 - DNA, 25 bp, Artificial sequence
  SiRNA target sequence
agtgaaatagctgcgcacttttacg

SEQ ID NO: 123292 - DNA, 25 bp, Artificial sequence
  SiRNA target sequence
gtgaaatagctgcgcacttttacga

SEQ ID NO: 123293 - DNA, 25 bp, Artificial sequence
  SiRNA target sequence
tgaaatagctgcgcacttttacgaa

SEQ ID NO: 123294 - DNA, 25 bp, Artificial sequence
  SiRNA target sequence
gaaatagctgcgcacttttacgaaa

SEQ ID NO: 123295 - DNA, 25 bp, Artificial sequence
  SiRNA target sequence
aaatagctgcgcacttttacgaaaa

SEQ ID NO: 123296 - DNA, 25 bp, Artificial sequence
  SiRNA target sequence
aatagctgcgcacttttacgaaaaa

SEQ ID NO: 123297 - DNA, 25 bp, Artificial sequence
  SiRNA target sequence
atagctgcgcacttttacgaaaaat

SEQ ID NO: 123298 - DNA, 25 bp, Artificial sequence
  SiRNA target sequence
tagctgcgcacttttacgaaaaatt

SEQ ID NO: 123299 - DNA, 25 bp, Artificial sequence
  SiRNA target sequence
agctgcgcacttttacgaaaaattt

SEQ ID NO: 123300 - DNA, 25 bp, Artificial sequence
  SiRNA target sequence
gctgcgcacttttacgaaaaattta

SEQ ID NO: 123301 - DNA, 25 bp, Artificial sequence
  SiRNA target sequence
ctgcgcacttttacgaaaaatttaa

SEQ ID NO: 123302 - DNA, 25 bp, Artificial sequence
  SiRNA target sequence
tgcgcacttttacgaaaaatttaaa

SEQ ID NO: 123303 - DNA, 25 bp, Artificial sequence
  SiRNA target sequence
gcgcacttttacgaaaaatttaaag

SEQ ID NO: 123304 - DNA, 25 bp, Artificial sequence
  SiRNA target sequence
cgcacttttacgaaaaatttaaaga

SEQ ID NO: 123305 - DNA, 25 bp, Artificial sequence
  SiRNA target sequence
gcacttttacgaaaaatttaaagat

SEQ ID NO: 123306 - DNA, 25 bp, Artificial sequence
  SiRNA target sequence
cacttttacgaaaaatttaaagata

SEQ ID NO: 123307 - DNA, 25 bp, Artificial sequence
  SiRNA target sequence
acttttacgaaaaatttaaagatat

SEQ ID NO: 123308 - DNA, 25 bp, Artificial sequence
  SiRNA target sequence
cttttacgaaaaatttaaagatata

SEQ ID NO: 123309 - DNA, 25 bp, Artificial sequence
  SiRNA target sequence
ttttacgaaaaatttaaagatataa

SEQ ID NO: 123310 - DNA, 25 bp, Artificial sequence
  SiRNA target sequence
tttacgaaaaatttaaagatataaa

SEQ ID NO: 123311 - DNA, 25 bp, Artificial sequence
  SiRNA target sequence
ttacgaaaaatttaaagatataaaa

SEQ ID NO: 123312 - DNA, 25 bp, Artificial sequence
  SiRNA target sequence
tacgaaaaatttaaagatataaaaa

SEQ ID NO: 123313 - DNA, 25 bp, Artificial sequence
  SiRNA target sequence
acgaaaaatttaaagatataaaaat

SEQ ID NO: 123314 - DNA, 25 bp, Artificial sequence
  SiRNA target sequence
cgaaaaatttaaagatataaaaatt

SEQ ID NO: 123315 - DNA, 25 bp, Artificial sequence
  SiRNA target sequence
gaaaaatttaaagatataaaaatta

SEQ ID NO: 123316 - DNA, 25 bp, Artificial sequence
  SiRNA target sequence
aaaaatttaaagatataaaaattat

SEQ ID NO: 123317 - DNA, 25 bp, Artificial sequence
  SiRNA target sequence
aaaatttaaagatataaaaattatg

SEQ ID NO: 123318 - DNA, 25 bp, Artificial sequence
  SiRNA target sequence
aaatttaaagatataaaaattatgc

SEQ ID NO: 123319 - DNA, 25 bp, Artificial sequence
  SiRNA target sequence
aatttaaagatataaaaattatgcg

SEQ ID NO: 123320 - DNA, 25 bp, Artificial sequence
  SiRNA target sequence
atttaaagatataaaaattatgcgt

SEQ ID NO: 123321 - DNA, 25 bp, Artificial sequence
  SiRNA target sequence
tttaaagatataaaaattatgcgtg

SEQ ID NO: 123322 - DNA, 25 bp, Artificial sequence
  SiRNA target sequence
ttaaagatataaaaattatgcgtgt

SEQ ID NO: 123323 - DNA, 25 bp, Artificial sequence
  SiRNA target sequence
taaagatataaaaattatgcgtgtt

SEQ ID NO: 123324 - DNA, 25 bp, Artificial sequence
  SiRNA target sequence
aaagatataaaaattatgcgtgttc

SEQ ID NO: 123325 - DNA, 25 bp, Artificial sequence
  SiRNA target sequence
aagatataaaaattatgcgtgttct

SEQ ID NO: 123326 - DNA, 25 bp, Artificial sequence
  SiRNA target sequence
agatataaaaattatgcgtgttctt

SEQ ID NO: 123327 - DNA, 25 bp, Artificial sequence
  SiRNA target sequence
gatataaaaattatgcgtgttcttg

SEQ ID NO: 123328 - DNA, 25 bp, Artificial sequence
  SiRNA target sequence
atataaaaattatgcgtgttcttgc

SEQ ID NO: 123329 - DNA, 25 bp, Artificial sequence
  SiRNA target sequence
tataaaaattatgcgtgttcttgcg

SEQ ID NO: 123330 - DNA, 25 bp, Artificial sequence
  SiRNA target sequence
ataaaaattatgcgtgttcttgcgc

SEQ ID NO: 123331 - DNA, 25 bp, Artificial sequence
  SiRNA target sequence
taaaaattatgcgtgttcttgcgca

SEQ ID NO: 123332 - DNA, 25 bp, Artificial sequence
  SiRNA target sequence
aaaaattatgcgtgttcttgcgcaa

SEQ ID NO: 123333 - DNA, 25 bp, Artificial sequence
  SiRNA target sequence
aaaattatgcgtgttcttgcgcaag

SEQ ID NO: 123334 - DNA, 25 bp, Artificial sequence
  SiRNA target sequence
aaattatgcgtgttcttgcgcaaga

SEQ ID NO: 123335 - DNA, 25 bp, Artificial sequence
  SiRNA target sequence
aattatgcgtgttcttgcgcaagat

SEQ ID NO: 123336 - DNA, 25 bp, Artificial sequence
  SiRNA target sequence
attatgcgtgttcttgcgcaagata

SEQ ID NO: 123337 - DNA, 25 bp, Artificial sequence
  SiRNA target sequence
ttatgcgtgttcttgcgcaagatat

SEQ ID NO: 123338 - DNA, 25 bp, Artificial sequence
  SiRNA target sequence
tatgcgtgttcttgcgcaagatatt

SEQ ID NO: 123339 - DNA, 25 bp, Artificial sequence
  SiRNA target sequence
atgcgtgttcttgcgcaagatattc

SEQ ID NO: 123340 - DNA, 25 bp, Artificial sequence
  SiRNA target sequence
tgcgtgttcttgcgcaagatattcc

SEQ ID NO: 123341 - DNA, 25 bp, Artificial sequence
  SiRNA target sequence
gcgtgttcttgcgcaagatattcct

SEQ ID NO: 123342 - DNA, 25 bp, Artificial sequence
  SiRNA target sequence
cgtgttcttgcgcaagatattccta

SEQ ID NO: 123343 - DNA, 25 bp, Artificial sequence
  SiRNA target sequence
gtgttcttgcgcaagatattcctac

SEQ ID NO: 123344 - DNA, 25 bp, Artificial sequence
  SiRNA target sequence
tgttcttgcgcaagatattcctaca

SEQ ID NO: 123345 - DNA, 25 bp, Artificial sequence
  SiRNA target sequence
gttcttgcgcaagatattcctacac

SEQ ID NO: 123346 - DNA, 25 bp, Artificial sequence
  SiRNA target sequence
ttcttgcgcaagatattcctacacc

SEQ ID NO: 123347 - DNA, 25 bp, Artificial sequence
  SiRNA target sequence
tcttgcgcaagatattcctacaccg

SEQ ID NO: 123348 - DNA, 25 bp, Artificial sequence
  SiRNA target sequence
cttgcgcaagatattcctacaccgt

SEQ ID NO: 123349 - DNA, 25 bp, Artificial sequence
  SiRNA target sequence
ttgcgcaagatattcctacaccgta

SEQ ID NO: 123350 - DNA, 25 bp, Artificial sequence
  SiRNA target sequence
tgcgcaagatattcctacaccgtat

SEQ ID NO: 123351 - DNA, 25 bp, Artificial sequence
  SiRNA target sequence
gcgcaagatattcctacaccgtatg

SEQ ID NO: 123352 - DNA, 25 bp, Artificial sequence
  SiRNA target sequence
cgcaagatattcctacaccgtatgc

SEQ ID NO: 123353 - DNA, 25 bp, Artificial sequence
  SiRNA target sequence
gcaagatattcctacaccgtatgca

SEQ ID NO: 123354 - DNA, 25 bp, Artificial sequence
  SiRNA target sequence
caagatattcctacaccgtatgcac

SEQ ID NO: 123355 - DNA, 25 bp, Artificial sequence
  SiRNA target sequence
aagatattcctacaccgtatgcact

SEQ ID NO: 123356 - DNA, 25 bp, Artificial sequence
  SiRNA target sequence
agatattcctacaccgtatgcactt

SEQ ID NO: 123357 - DNA, 25 bp, Artificial sequence
  SiRNA target sequence
gatattcctacaccgtatgcactta

SEQ ID NO: 123358 - DNA, 25 bp, Artificial sequence
  SiRNA target sequence
atattcctacaccgtatgcacttaa

SEQ ID NO: 123359 - DNA, 25 bp, Artificial sequence
  SiRNA target sequence
tattcctacaccgtatgcacttaat

SEQ ID NO: 123360 - DNA, 25 bp, Artificial sequence
  SiRNA target sequence
attcctacaccgtatgcacttaatc

SEQ ID NO: 123361 - DNA, 25 bp, Artificial sequence
  SiRNA target sequence
ttcctacaccgtatgcacttaatct

SEQ ID NO: 123362 - DNA, 25 bp, Artificial sequence
  SiRNA target sequence
tcctacaccgtatgcacttaatctt

SEQ ID NO: 123363 - DNA, 25 bp, Artificial sequence
  SiRNA target sequence
cctacaccgtatgcacttaatcttg

SEQ ID NO: 123364 - DNA, 25 bp, Artificial sequence
  SiRNA target sequence
ctacaccgtatgcacttaatcttga

SEQ ID NO: 123365 - DNA, 25 bp, Artificial sequence
  SiRNA target sequence
tacaccgtatgcacttaatcttgaa

SEQ ID NO: 123366 - DNA, 25 bp, Artificial sequence
  SiRNA target sequence
acaccgtatgcacttaatcttgaaa

SEQ ID NO: 123367 - DNA, 25 bp, Artificial sequence
  SiRNA target sequence
caccgtatgcacttaatcttgaaaa

SEQ ID NO: 123368 - DNA, 25 bp, Artificial sequence
  SiRNA target sequence
accgtatgcacttaatcttgaaaaa

SEQ ID NO: 123369 - DNA, 25 bp, Artificial sequence
  SiRNA target sequence
ccgtatgcacttaatcttgaaaaaa

SEQ ID NO: 123370 - DNA, 25 bp, Artificial sequence
  SiRNA target sequence
cgtatgcacttaatcttgaaaaaat

SEQ ID NO: 123371 - DNA, 25 bp, Artificial sequence
  SiRNA target sequence
gtatgcacttaatcttgaaaaaatg

SEQ ID NO: 123372 - DNA, 25 bp, Artificial sequence
  SiRNA target sequence
tatgcacttaatcttgaaaaaatgt

SEQ ID NO: 123373 - DNA, 25 bp, Artificial sequence
  SiRNA target sequence
atgcacttaatcttgaaaaaatgtc

SEQ ID NO: 123374 - DNA, 25 bp, Artificial sequence
  SiRNA target sequence
tgcacttaatcttgaaaaaatgtct

SEQ ID NO: 123375 - DNA, 25 bp, Artificial sequence
  SiRNA target sequence
gcacttaatcttgaaaaaatgtctt

SEQ ID NO: 123376 - DNA, 25 bp, Artificial sequence
  SiRNA target sequence
cacttaatcttgaaaaaatgtctta

SEQ ID NO: 123377 - DNA, 25 bp, Artificial sequence
  SiRNA target sequence
acttaatcttgaaaaaatgtcttat

SEQ ID NO: 123378 - DNA, 25 bp, Artificial sequence
  SiRNA target sequence
cttaatcttgaaaaaatgtcttatc

SEQ ID NO: 123379 - DNA, 25 bp, Artificial sequence
  SiRNA target sequence
ttaatcttgaaaaaatgtcttatcc

SEQ ID NO: 123380 - DNA, 25 bp, Artificial sequence
  SiRNA target sequence
taatcttgaaaaaatgtcttatccg

SEQ ID NO: 123381 - DNA, 25 bp, Artificial sequence
  SiRNA target sequence
aatcttgaaaaaatgtcttatccga

SEQ ID NO: 123382 - DNA, 25 bp, Artificial sequence
  SiRNA target sequence
atcttgaaaaaatgtcttatccgac

SEQ ID NO: 123383 - DNA, 25 bp, Artificial sequence
  SiRNA target sequence
tcttgaaaaaatgtcttatccgaca

SEQ ID NO: 123384 - DNA, 25 bp, Artificial sequence
  SiRNA target sequence
cttgaaaaaatgtcttatccgacat

SEQ ID NO: 123385 - DNA, 25 bp, Artificial sequence
  SiRNA target sequence
ttgaaaaaatgtcttatccgacatg

SEQ ID NO: 123386 - DNA, 25 bp, Artificial sequence
  SiRNA target sequence
tgaaaaaatgtcttatccgacatgc

SEQ ID NO: 123387 - DNA, 25 bp, Artificial sequence
  SiRNA target sequence
gaaaaaatgtcttatccgacatgca

SEQ ID NO: 123388 - DNA, 25 bp, Artificial sequence
  SiRNA target sequence
aaaaaatgtcttatccgacatgcaa

SEQ ID NO: 123389 - DNA, 25 bp, Artificial sequence
  SiRNA target sequence
aaaaatgtcttatccgacatgcaat

SEQ ID NO: 123390 - DNA, 25 bp, Artificial sequence
  SiRNA target sequence
aaaatgtcttatccgacatgcaatg

SEQ ID NO: 123391 - DNA, 25 bp, Artificial sequence
  SiRNA target sequence
aaatgtcttatccgacatgcaatga

SEQ ID NO: 123392 - DNA, 25 bp, Artificial sequence
  SiRNA target sequence
aatgtcttatccgacatgcaatgat

SEQ ID NO: 123393 - DNA, 25 bp, Artificial sequence
  SiRNA target sequence
atgtcttatccgacatgcaatgata

SEQ ID NO: 123394 - DNA, 25 bp, Artificial sequence
  SiRNA target sequence
tgtcttatccgacatgcaatgatat

SEQ ID NO: 123395 - DNA, 25 bp, Artificial sequence
  SiRNA target sequence
gtcttatccgacatgcaatgatatt

SEQ ID NO: 123396 - DNA, 25 bp, Artificial sequence
  SiRNA target sequence
tcttatccgacatgcaatgatattg

SEQ ID NO: 123397 - DNA, 25 bp, Artificial sequence
  SiRNA target sequence
cttatccgacatgcaatgatattgt

SEQ ID NO: 123398 - DNA, 25 bp, Artificial sequence
  SiRNA target sequence
ttatccgacatgcaatgatattgta

SEQ ID NO: 123399 - DNA, 25 bp, Artificial sequence
  SiRNA target sequence
tatccgacatgcaatgatattgtaa

SEQ ID NO: 123400 - DNA, 25 bp, Artificial sequence
  SiRNA target sequence
atccgacatgcaatgatattgtaaa

SEQ ID NO: 123401 - DNA, 25 bp, Artificial sequence
  SiRNA target sequence
tccgacatgcaatgatattgtaaat

SEQ ID NO: 123402 - DNA, 25 bp, Artificial sequence
  SiRNA target sequence
ccgacatgcaatgatattgtaaatg

SEQ ID NO: 123403 - DNA, 25 bp, Artificial sequence
  SiRNA target sequence
cgacatgcaatgatattgtaaatgc

SEQ ID NO: 123404 - DNA, 25 bp, Artificial sequence
  SiRNA target sequence
gacatgcaatgatattgtaaatgct

SEQ ID NO: 123405 - DNA, 25 bp, Artificial sequence
  SiRNA target sequence
acatgcaatgatattgtaaatgctg

SEQ ID NO: 123406 - DNA, 25 bp, Artificial sequence
  SiRNA target sequence
catgcaatgatattgtaaatgctgt

SEQ ID NO: 123407 - DNA, 25 bp, Artificial sequence
  SiRNA target sequence
atgcaatgatattgtaaatgctgtt

SEQ ID NO: 123408 - DNA, 25 bp, Artificial sequence
  SiRNA target sequence
tgcaatgatattgtaaatgctgtta

SEQ ID NO: 123409 - DNA, 25 bp, Artificial sequence
  SiRNA target sequence
gcaatgatattgtaaatgctgttac

SEQ ID NO: 123410 - DNA, 25 bp, Artificial sequence
  SiRNA target sequence
caatgatattgtaaatgctgttaca

SEQ ID NO: 123411 - DNA, 25 bp, Artificial sequence
  SiRNA target sequence
aatgatattgtaaatgctgttacaa

SEQ ID NO: 123412 - DNA, 25 bp, Artificial sequence
  SiRNA target sequence
atgatattgtaaatgctgttacaaa

SEQ ID NO: 123413 - DNA, 25 bp, Artificial sequence
  SiRNA target sequence
tgatattgtaaatgctgttacaaaa

SEQ ID NO: 123414 - DNA, 25 bp, Artificial sequence
  SiRNA target sequence
gatattgtaaatgctgttacaaaaa

SEQ ID NO: 123415 - DNA, 25 bp, Artificial sequence
  SiRNA target sequence
atattgtaaatgctgttacaaaaat

SEQ ID NO: 123416 - DNA, 25 bp, Artificial sequence
  SiRNA target sequence
tattgtaaatgctgttacaaaaata

SEQ ID NO: 123417 - DNA, 25 bp, Artificial sequence
  SiRNA target sequence
attgtaaatgctgttacaaaaataa

SEQ ID NO: 123418 - DNA, 25 bp, Artificial sequence
  SiRNA target sequence
ttgtaaatgctgttacaaaaataaa

SEQ ID NO: 123419 - DNA, 25 bp, Artificial sequence
  SiRNA target sequence
tgtaaatgctgttacaaaaataaat

SEQ ID NO: 123420 - DNA, 25 bp, Artificial sequence
  SiRNA target sequence
gtaaatgctgttacaaaaataaatt

SEQ ID NO: 123421 - DNA, 25 bp, Artificial sequence
  SiRNA target sequence
taaatgctgttacaaaaataaattc

SEQ ID NO: 123422 - DNA, 25 bp, Artificial sequence
  SiRNA target sequence
aaatgctgttacaaaaataaattca

SEQ ID NO: 123423 - DNA, 25 bp, Artificial sequence
  SiRNA target sequence
aatgctgttacaaaaataaattcat

SEQ ID NO: 123424 - DNA, 25 bp, Artificial sequence
  SiRNA target sequence
atgctgttacaaaaataaattcata

SEQ ID NO: 123425 - DNA, 25 bp, Artificial sequence
  SiRNA target sequence
tgctgttacaaaaataaattcatag

SEQ ID NO: 123426 - DNA, 26 bp, Artificial sequence
  SiRNA target sequence
atgatagaaattcgcgatcttataaa

SEQ ID NO: 123427 - DNA, 26 bp, Artificial sequence
  SiRNA target sequence
tgatagaaattcgcgatcttataaat

SEQ ID NO: 123428 - DNA, 26 bp, Artificial sequence
  SiRNA target sequence
gatagaaattcgcgatcttataaatc

SEQ ID NO: 123429 - DNA, 26 bp, Artificial sequence
  SiRNA target sequence
atagaaattcgcgatcttataaatca

SEQ ID NO: 123430 - DNA, 26 bp, Artificial sequence
  SiRNA target sequence
tagaaattcgcgatcttataaatcaa

SEQ ID NO: 123431 - DNA, 26 bp, Artificial sequence
  SiRNA target sequence
agaaattcgcgatcttataaatcaag

SEQ ID NO: 123432 - DNA, 26 bp, Artificial sequence
  SiRNA target sequence
gaaattcgcgatcttataaatcaagc

SEQ ID NO: 123433 - DNA, 26 bp, Artificial sequence
  SiRNA target sequence
aaattcgcgatcttataaatcaagca

SEQ ID NO: 123434 - DNA, 26 bp, Artificial sequence
  SiRNA target sequence
aattcgcgatcttataaatcaagcat

SEQ ID NO: 123435 - DNA, 26 bp, Artificial sequence
  SiRNA target sequence
attcgcgatcttataaatcaagcatt

SEQ ID NO: 123436 - DNA, 26 bp, Artificial sequence
  SiRNA target sequence
ttcgcgatcttataaatcaagcattg

SEQ ID NO: 123437 - DNA, 26 bp, Artificial sequence
  SiRNA target sequence
tcgcgatcttataaatcaagcattgg

SEQ ID NO: 123438 - DNA, 26 bp, Artificial sequence
  SiRNA target sequence
cgcgatcttataaatcaagcattgga

SEQ ID NO: 123439 - DNA, 26 bp, Artificial sequence
  SiRNA target sequence
gcgatcttataaatcaagcattggat

SEQ ID NO: 123440 - DNA, 26 bp, Artificial sequence
  SiRNA target sequence
cgatcttataaatcaagcattggatg

SEQ ID NO: 123441 - DNA, 26 bp, Artificial sequence
  SiRNA target sequence
gatcttataaatcaagcattggatga

SEQ ID NO: 123442 - DNA, 26 bp, Artificial sequence
  SiRNA target sequence
atcttataaatcaagcattggatgag

SEQ ID NO: 123443 - DNA, 26 bp, Artificial sequence
  SiRNA target sequence
tcttataaatcaagcattggatgagg

SEQ ID NO: 123444 - DNA, 26 bp, Artificial sequence
  SiRNA target sequence
cttataaatcaagcattggatgagga

SEQ ID NO: 123445 - DNA, 26 bp, Artificial sequence
  SiRNA target sequence
ttataaatcaagcattggatgaggaa

SEQ ID NO: 123446 - DNA, 26 bp, Artificial sequence
  SiRNA target sequence
tataaatcaagcattggatgaggaaa

SEQ ID NO: 123447 - DNA, 26 bp, Artificial sequence
  SiRNA target sequence
ataaatcaagcattggatgaggaaat

SEQ ID NO: 123448 - DNA, 26 bp, Artificial sequence
  SiRNA target sequence
taaatcaagcattggatgaggaaatg

SEQ ID NO: 123449 - DNA, 26 bp, Artificial sequence
  SiRNA target sequence
aaatcaagcattggatgaggaaatgg

SEQ ID NO: 123450 - DNA, 26 bp, Artificial sequence
  SiRNA target sequence
aatcaagcattggatgaggaaatggg

SEQ ID NO: 123451 - DNA, 26 bp, Artificial sequence
  SiRNA target sequence
atcaagcattggatgaggaaatggga

SEQ ID NO: 123452 - DNA, 26 bp, Artificial sequence
  SiRNA target sequence
tcaagcattggatgaggaaatgggaa

SEQ ID NO: 123453 - DNA, 26 bp, Artificial sequence
  SiRNA target sequence
caagcattggatgaggaaatgggaat

SEQ ID NO: 123454 - DNA, 26 bp, Artificial sequence
  SiRNA target sequence
aagcattggatgaggaaatgggaatg

SEQ ID NO: 123455 - DNA, 26 bp, Artificial sequence
  SiRNA target sequence
agcattggatgaggaaatgggaatgg

SEQ ID NO: 123456 - DNA, 26 bp, Artificial sequence
  SiRNA target sequence
gcattggatgaggaaatgggaatgga

SEQ ID NO: 123457 - DNA, 26 bp, Artificial sequence
  SiRNA target sequence
cattggatgaggaaatgggaatggat

SEQ ID NO: 123458 - DNA, 26 bp, Artificial sequence
  SiRNA target sequence
attggatgaggaaatgggaatggatc

SEQ ID NO: 123459 - DNA, 26 bp, Artificial sequence
  SiRNA target sequence
ttggatgaggaaatgggaatggatca

SEQ ID NO: 123460 - DNA, 26 bp, Artificial sequence
  SiRNA target sequence
tggatgaggaaatgggaatggatcat

SEQ ID NO: 123461 - DNA, 26 bp, Artificial sequence
  SiRNA target sequence
ggatgaggaaatgggaatggatcata

SEQ ID NO: 123462 - DNA, 26 bp, Artificial sequence
  SiRNA target sequence
gatgaggaaatgggaatggatcataa

SEQ ID NO: 123463 - DNA, 26 bp, Artificial sequence
  SiRNA target sequence
atgaggaaatgggaatggatcataat

SEQ ID NO: 123464 - DNA, 26 bp, Artificial sequence
  SiRNA target sequence
tgaggaaatgggaatggatcataatg

SEQ ID NO: 123465 - DNA, 26 bp, Artificial sequence
  SiRNA target sequence
gaggaaatgggaatggatcataatgt

SEQ ID NO: 123466 - DNA, 26 bp, Artificial sequence
  SiRNA target sequence
aggaaatgggaatggatcataatgta

SEQ ID NO: 123467 - DNA, 26 bp, Artificial sequence
  SiRNA target sequence
ggaaatgggaatggatcataatgtat

SEQ ID NO: 123468 - DNA, 26 bp, Artificial sequence
  SiRNA target sequence
gaaatgggaatggatcataatgtata

SEQ ID NO: 123469 - DNA, 26 bp, Artificial sequence
  SiRNA target sequence
aaatgggaatggatcataatgtatat

SEQ ID NO: 123470 - DNA, 26 bp, Artificial sequence
  SiRNA target sequence
aatgggaatggatcataatgtatata

SEQ ID NO: 123471 - DNA, 26 bp, Artificial sequence
  SiRNA target sequence
atgggaatggatcataatgtatatat

SEQ ID NO: 123472 - DNA, 26 bp, Artificial sequence
  SiRNA target sequence
tgggaatggatcataatgtatatata

SEQ ID NO: 123473 - DNA, 26 bp, Artificial sequence
  SiRNA target sequence
gggaatggatcataatgtatatataa

SEQ ID NO: 123474 - DNA, 26 bp, Artificial sequence
  SiRNA target sequence
ggaatggatcataatgtatatataat

SEQ ID NO: 123475 - DNA, 26 bp, Artificial sequence
  SiRNA target sequence
gaatggatcataatgtatatataata

SEQ ID NO: 123476 - DNA, 26 bp, Artificial sequence
  SiRNA target sequence
aatggatcataatgtatatataatag

SEQ ID NO: 123477 - DNA, 26 bp, Artificial sequence
  SiRNA target sequence
atggatcataatgtatatataatagg

SEQ ID NO: 123478 - DNA, 26 bp, Artificial sequence
  SiRNA target sequence
tggatcataatgtatatataatagga

SEQ ID NO: 123479 - DNA, 26 bp, Artificial sequence
  SiRNA target sequence
ggatcataatgtatatataataggag

SEQ ID NO: 123480 - DNA, 26 bp, Artificial sequence
  SiRNA target sequence
gatcataatgtatatataataggaga

SEQ ID NO: 123481 - DNA, 26 bp, Artificial sequence
  SiRNA target sequence
atcataatgtatatataataggagaa

SEQ ID NO: 123482 - DNA, 26 bp, Artificial sequence
  SiRNA target sequence
tcataatgtatatataataggagaag

SEQ ID NO: 123483 - DNA, 26 bp, Artificial sequence
  SiRNA target sequence
cataatgtatatataataggagaaga

SEQ ID NO: 123484 - DNA, 26 bp, Artificial sequence
  SiRNA target sequence
ataatgtatatataataggagaagaa

SEQ ID NO: 123485 - DNA, 26 bp, Artificial sequence
  SiRNA target sequence
taatgtatatataataggagaagaag

SEQ ID NO: 123486 - DNA, 26 bp, Artificial sequence
  SiRNA target sequence
aatgtatatataataggagaagaagt

SEQ ID NO: 123487 - DNA, 26 bp, Artificial sequence
  SiRNA target sequence
atgtatatataataggagaagaagta

SEQ ID NO: 123488 - DNA, 26 bp, Artificial sequence
  SiRNA target sequence
tgtatatataataggagaagaagtag

SEQ ID NO: 123489 - DNA, 26 bp, Artificial sequence
  SiRNA target sequence
gtatatataataggagaagaagtagg

SEQ ID NO: 123490 - DNA, 26 bp, Artificial sequence
  SiRNA target sequence
tatatataataggagaagaagtaggc

SEQ ID NO: 123491 - DNA, 26 bp, Artificial sequence
  SiRNA target sequence
atatataataggagaagaagtaggca

SEQ ID NO: 123492 - DNA, 26 bp, Artificial sequence
  SiRNA target sequence
tatataataggagaagaagtaggcat

SEQ ID NO: 123493 - DNA, 26 bp, Artificial sequence
  SiRNA target sequence
atataataggagaagaagtaggcatc

SEQ ID NO: 123494 - DNA, 26 bp, Artificial sequence
  SiRNA target sequence
tataataggagaagaagtaggcatct

SEQ ID NO: 123495 - DNA, 26 bp, Artificial sequence
  SiRNA target sequence
ataataggagaagaagtaggcatctc

SEQ ID NO: 123496 - DNA, 26 bp, Artificial sequence
  SiRNA target sequence
taataggagaagaagtaggcatctct

SEQ ID NO: 123497 - DNA, 26 bp, Artificial sequence
  SiRNA target sequence
aataggagaagaagtaggcatctctg

SEQ ID NO: 123498 - DNA, 26 bp, Artificial sequence
  SiRNA target sequence
ataggagaagaagtaggcatctctgg

SEQ ID NO: 123499 - DNA, 26 bp, Artificial sequence
  SiRNA target sequence
taggagaagaagtaggcatctctggt

SEQ ID NO: 123500 - DNA, 26 bp, Artificial sequence
  SiRNA target sequence
aggagaagaagtaggcatctctggtg

SEQ ID NO: 123501 - DNA, 26 bp, Artificial sequence
  SiRNA target sequence
ggagaagaagtaggcatctctggtgg

SEQ ID NO: 123502 - DNA, 26 bp, Artificial sequence
  SiRNA target sequence
gagaagaagtaggcatctctggtggt

SEQ ID NO: 123503 - DNA, 26 bp, Artificial sequence
  SiRNA target sequence
agaagaagtaggcatctctggtggtc

SEQ ID NO: 123504 - DNA, 26 bp, Artificial sequence
  SiRNA target sequence
gaagaagtaggcatctctggtggtcc

SEQ ID NO: 123505 - DNA, 26 bp, Artificial sequence
  SiRNA target sequence
aagaagtaggcatctctggtggtcct

SEQ ID NO: 123506 - DNA, 26 bp, Artificial sequence
  SiRNA target sequence
agaagtaggcatctctggtggtcctc

SEQ ID NO: 123507 - DNA, 26 bp, Artificial sequence
  SiRNA target sequence
gaagtaggcatctctggtggtcctca

SEQ ID NO: 123508 - DNA, 26 bp, Artificial sequence
  SiRNA target sequence
aagtaggcatctctggtggtcctcac

SEQ ID NO: 123509 - DNA, 26 bp, Artificial sequence
  SiRNA target sequence
agtaggcatctctggtggtcctcacg

SEQ ID NO: 123510 - DNA, 26 bp, Artificial sequence
  SiRNA target sequence
gtaggcatctctggtggtcctcacgg

SEQ ID NO: 123511 - DNA, 26 bp, Artificial sequence
  SiRNA target sequence
taggcatctctggtggtcctcacggt

SEQ ID NO: 123512 - DNA, 26 bp, Artificial sequence
  SiRNA target sequence
aggcatctctggtggtcctcacggtc

SEQ ID NO: 123513 - DNA, 26 bp, Artificial sequence
  SiRNA target sequence
ggcatctctggtggtcctcacggtct

SEQ ID NO: 123514 - DNA, 26 bp, Artificial sequence
  SiRNA target sequence
gcatctctggtggtcctcacggtctt

SEQ ID NO: 123515 - DNA, 26 bp, Artificial sequence
  SiRNA target sequence
catctctggtggtcctcacggtctta

SEQ ID NO: 123516 - DNA, 26 bp, Artificial sequence
  SiRNA target sequence
atctctggtggtcctcacggtcttac

SEQ ID NO: 123517 - DNA, 26 bp, Artificial sequence
  SiRNA target sequence
tctctggtggtcctcacggtcttact

SEQ ID NO: 123518 - DNA, 26 bp, Artificial sequence
  SiRNA target sequence
ctctggtggtcctcacggtcttacta

SEQ ID NO: 123519 - DNA, 26 bp, Artificial sequence
  SiRNA target sequence
tctggtggtcctcacggtcttactaa

SEQ ID NO: 123520 - DNA, 26 bp, Artificial sequence
  SiRNA target sequence
ctggtggtcctcacggtcttactaaa

SEQ ID NO: 123521 - DNA, 26 bp, Artificial sequence
  SiRNA target sequence
tggtggtcctcacggtcttactaaaa

SEQ ID NO: 123522 - DNA, 26 bp, Artificial sequence
  SiRNA target sequence
ggtggtcctcacggtcttactaaaaa

SEQ ID NO: 123523 - DNA, 26 bp, Artificial sequence
  SiRNA target sequence
gtggtcctcacggtcttactaaaaat

SEQ ID NO: 123524 - DNA, 26 bp, Artificial sequence
  SiRNA target sequence
tggtcctcacggtcttactaaaaatt

SEQ ID NO: 123525 - DNA, 26 bp, Artificial sequence
  SiRNA target sequence
ggtcctcacggtcttactaaaaattt

SEQ ID NO: 123526 - DNA, 26 bp, Artificial sequence
  SiRNA target sequence
gtcctcacggtcttactaaaaatttg

SEQ ID NO: 123527 - DNA, 26 bp, Artificial sequence
  SiRNA target sequence
tcctcacggtcttactaaaaatttga

SEQ ID NO: 123528 - DNA, 26 bp, Artificial sequence
  SiRNA target sequence
cctcacggtcttactaaaaatttgat

SEQ ID NO: 123529 - DNA, 26 bp, Artificial sequence
  SiRNA target sequence
ctcacggtcttactaaaaatttgatc

SEQ ID NO: 123530 - DNA, 26 bp, Artificial sequence
  SiRNA target sequence
tcacggtcttactaaaaatttgatca

SEQ ID NO: 123531 - DNA, 26 bp, Artificial sequence
  SiRNA target sequence
cacggtcttactaaaaatttgatcaa

SEQ ID NO: 123532 - DNA, 26 bp, Artificial sequence
  SiRNA target sequence
acggtcttactaaaaatttgatcaaa

SEQ ID NO: 123533 - DNA, 26 bp, Artificial sequence
  SiRNA target sequence
cggtcttactaaaaatttgatcaaaa

SEQ ID NO: 123534 - DNA, 26 bp, Artificial sequence
  SiRNA target sequence
ggtcttactaaaaatttgatcaaaaa

SEQ ID NO: 123535 - DNA, 26 bp, Artificial sequence
  SiRNA target sequence
gtcttactaaaaatttgatcaaaaaa

SEQ ID NO: 123536 - DNA, 26 bp, Artificial sequence
  SiRNA target sequence
tcttactaaaaatttgatcaaaaaat

SEQ ID NO: 123537 - DNA, 26 bp, Artificial sequence
  SiRNA target sequence
cttactaaaaatttgatcaaaaaata

SEQ ID NO: 123538 - DNA, 26 bp, Artificial sequence
  SiRNA target sequence
ttactaaaaatttgatcaaaaaatac

SEQ ID NO: 123539 - DNA, 26 bp, Artificial sequence
  SiRNA target sequence
tactaaaaatttgatcaaaaaatacg

SEQ ID NO: 123540 - DNA, 26 bp, Artificial sequence
  SiRNA target sequence
actaaaaatttgatcaaaaaatacgg

SEQ ID NO: 123541 - DNA, 26 bp, Artificial sequence
  SiRNA target sequence
ctaaaaatttgatcaaaaaatacggc

SEQ ID NO: 123542 - DNA, 26 bp, Artificial sequence
  SiRNA target sequence
taaaaatttgatcaaaaaatacggcg

SEQ ID NO: 123543 - DNA, 26 bp, Artificial sequence
  SiRNA target sequence
aaaaatttgatcaaaaaatacggcga

SEQ ID NO: 123544 - DNA, 26 bp, Artificial sequence
  SiRNA target sequence
aaaatttgatcaaaaaatacggcgat

SEQ ID NO: 123545 - DNA, 26 bp, Artificial sequence
  SiRNA target sequence
aaatttgatcaaaaaatacggcgatc

SEQ ID NO: 123546 - DNA, 26 bp, Artificial sequence
  SiRNA target sequence
aatttgatcaaaaaatacggcgatca

SEQ ID NO: 123547 - DNA, 26 bp, Artificial sequence
  SiRNA target sequence
atttgatcaaaaaatacggcgatcaa

SEQ ID NO: 123548 - DNA, 26 bp, Artificial sequence
  SiRNA target sequence
tttgatcaaaaaatacggcgatcaaa

SEQ ID NO: 123549 - DNA, 26 bp, Artificial sequence
  SiRNA target sequence
ttgatcaaaaaatacggcgatcaaag

SEQ ID NO: 123550 - DNA, 26 bp, Artificial sequence
  SiRNA target sequence
tgatcaaaaaatacggcgatcaaaga

SEQ ID NO: 123551 - DNA, 26 bp, Artificial sequence
  SiRNA target sequence
gatcaaaaaatacggcgatcaaagag

SEQ ID NO: 123552 - DNA, 26 bp, Artificial sequence
  SiRNA target sequence
atcaaaaaatacggcgatcaaagagt

SEQ ID NO: 123553 - DNA, 26 bp, Artificial sequence
  SiRNA target sequence
tcaaaaaatacggcgatcaaagagtg

SEQ ID NO: 123554 - DNA, 26 bp, Artificial sequence
  SiRNA target sequence
caaaaaatacggcgatcaaagagtga

SEQ ID NO: 123555 - DNA, 26 bp, Artificial sequence
  SiRNA target sequence
aaaaaatacggcgatcaaagagtgaa

SEQ ID NO: 123556 - DNA, 26 bp, Artificial sequence
  SiRNA target sequence
aaaaatacggcgatcaaagagtgaag

SEQ ID NO: 123557 - DNA, 26 bp, Artificial sequence
  SiRNA target sequence
aaaatacggcgatcaaagagtgaagg

SEQ ID NO: 123558 - DNA, 26 bp, Artificial sequence
  SiRNA target sequence
aaatacggcgatcaaagagtgaagga

SEQ ID NO: 123559 - DNA, 26 bp, Artificial sequence
  SiRNA target sequence
aatacggcgatcaaagagtgaaggat

SEQ ID NO: 123560 - DNA, 26 bp, Artificial sequence
  SiRNA target sequence
atacggcgatcaaagagtgaaggata

SEQ ID NO: 123561 - DNA, 26 bp, Artificial sequence
  SiRNA target sequence
tacggcgatcaaagagtgaaggatac

SEQ ID NO: 123562 - DNA, 26 bp, Artificial sequence
  SiRNA target sequence
acggcgatcaaagagtgaaggatacc

SEQ ID NO: 123563 - DNA, 26 bp, Artificial sequence
  SiRNA target sequence
cggcgatcaaagagtgaaggataccc

SEQ ID NO: 123564 - DNA, 26 bp, Artificial sequence
  SiRNA target sequence
ggcgatcaaagagtgaaggatacccc

SEQ ID NO: 123565 - DNA, 26 bp, Artificial sequence
  SiRNA target sequence
gcgatcaaagagtgaaggatacccct

SEQ ID NO: 123566 - DNA, 26 bp, Artificial sequence
  SiRNA target sequence
cgatcaaagagtgaaggataccccta

SEQ ID NO: 123567 - DNA, 26 bp, Artificial sequence
  SiRNA target sequence
gatcaaagagtgaaggatacccctat

SEQ ID NO: 123568 - DNA, 26 bp, Artificial sequence
  SiRNA target sequence
atcaaagagtgaaggatacccctatt

SEQ ID NO: 123569 - DNA, 26 bp, Artificial sequence
  SiRNA target sequence
tcaaagagtgaaggatacccctattt

SEQ ID NO: 123570 - DNA, 26 bp, Artificial sequence
  SiRNA target sequence
caaagagtgaaggatacccctatttc

SEQ ID NO: 123571 - DNA, 26 bp, Artificial sequence
  SiRNA target sequence
aaagagtgaaggatacccctatttcg

SEQ ID NO: 123572 - DNA, 26 bp, Artificial sequence
  SiRNA target sequence
aagagtgaaggatacccctatttcgg

SEQ ID NO: 123573 - DNA, 26 bp, Artificial sequence
  SiRNA target sequence
agagtgaaggatacccctatttcgga

SEQ ID NO: 123574 - DNA, 26 bp, Artificial sequence
  SiRNA target sequence
gagtgaaggatacccctatttcggaa

SEQ ID NO: 123575 - DNA, 26 bp, Artificial sequence
  SiRNA target sequence
agtgaaggatacccctatttcggaaa

SEQ ID NO: 123576 - DNA, 26 bp, Artificial sequence
  SiRNA target sequence
gtgaaggatacccctatttcggaaat

SEQ ID NO: 123577 - DNA, 26 bp, Artificial sequence
  SiRNA target sequence
tgaaggatacccctatttcggaaatg

SEQ ID NO: 123578 - DNA, 26 bp, Artificial sequence
  SiRNA target sequence
gaaggatacccctatttcggaaatgg

SEQ ID NO: 123579 - DNA, 26 bp, Artificial sequence
  SiRNA target sequence
aaggatacccctatttcggaaatggg

SEQ ID NO: 123580 - DNA, 26 bp, Artificial sequence
  SiRNA target sequence
aggatacccctatttcggaaatggga

SEQ ID NO: 123581 - DNA, 26 bp, Artificial sequence
  SiRNA target sequence
ggatacccctatttcggaaatgggat

SEQ ID NO: 123582 - DNA, 26 bp, Artificial sequence
  SiRNA target sequence
gatacccctatttcggaaatgggatt

SEQ ID NO: 123583 - DNA, 26 bp, Artificial sequence
  SiRNA target sequence
atacccctatttcggaaatgggattt

SEQ ID NO: 123584 - DNA, 26 bp, Artificial sequence
  SiRNA target sequence
tacccctatttcggaaatgggattta

SEQ ID NO: 123585 - DNA, 26 bp, Artificial sequence
  SiRNA target sequence
acccctatttcggaaatgggatttac

SEQ ID NO: 123586 - DNA, 26 bp, Artificial sequence
  SiRNA target sequence
cccctatttcggaaatgggatttaca

SEQ ID NO: 123587 - DNA, 26 bp, Artificial sequence
  SiRNA target sequence
ccctatttcggaaatgggatttacag

SEQ ID NO: 123588 - DNA, 26 bp, Artificial sequence
  SiRNA target sequence
cctatttcggaaatgggatttacagg

SEQ ID NO: 123589 - DNA, 26 bp, Artificial sequence
  SiRNA target sequence
ctatttcggaaatgggatttacaggt

SEQ ID NO: 123590 - DNA, 26 bp, Artificial sequence
  SiRNA target sequence
tatttcggaaatgggatttacaggtc

SEQ ID NO: 123591 - DNA, 26 bp, Artificial sequence
  SiRNA target sequence
atttcggaaatgggatttacaggtct

SEQ ID NO: 123592 - DNA, 26 bp, Artificial sequence
  SiRNA target sequence
tttcggaaatgggatttacaggtctc

SEQ ID NO: 123593 - DNA, 26 bp, Artificial sequence
  SiRNA target sequence
ttcggaaatgggatttacaggtctcg

SEQ ID NO: 123594 - DNA, 26 bp, Artificial sequence
  SiRNA target sequence
tcggaaatgggatttacaggtctcgc

SEQ ID NO: 123595 - DNA, 26 bp, Artificial sequence
  SiRNA target sequence
cggaaatgggatttacaggtctcgct

SEQ ID NO: 123596 - DNA, 26 bp, Artificial sequence
  SiRNA target sequence
ggaaatgggatttacaggtctcgctg

SEQ ID NO: 123597 - DNA, 26 bp, Artificial sequence
  SiRNA target sequence
gaaatgggatttacaggtctcgctgt

SEQ ID NO: 123598 - DNA, 26 bp, Artificial sequence
  SiRNA target sequence
aaatgggatttacaggtctcgctgtg

SEQ ID NO: 123599 - DNA, 26 bp, Artificial sequence
  SiRNA target sequence
aatgggatttacaggtctcgctgtgg

SEQ ID NO: 123600 - DNA, 26 bp, Artificial sequence
  SiRNA target sequence
atgggatttacaggtctcgctgtggg

SEQ ID NO: 123601 - DNA, 26 bp, Artificial sequence
  SiRNA target sequence
tgggatttacaggtctcgctgtgggt

SEQ ID NO: 123602 - DNA, 26 bp, Artificial sequence
  SiRNA target sequence
gggatttacaggtctcgctgtgggtt

SEQ ID NO: 123603 - DNA, 26 bp, Artificial sequence
  SiRNA target sequence
ggatttacaggtctcgctgtgggttc

SEQ ID NO: 123604 - DNA, 26 bp, Artificial sequence
  SiRNA target sequence
gatttacaggtctcgctgtgggttca

SEQ ID NO: 123605 - DNA, 26 bp, Artificial sequence
  SiRNA target sequence
atttacaggtctcgctgtgggttcaa

SEQ ID NO: 123606 - DNA, 26 bp, Artificial sequence
  SiRNA target sequence
tttacaggtctcgctgtgggttcaag

SEQ ID NO: 123607 - DNA, 26 bp, Artificial sequence
  SiRNA target sequence
ttacaggtctcgctgtgggttcaagc

SEQ ID NO: 123608 - DNA, 26 bp, Artificial sequence
  SiRNA target sequence
tacaggtctcgctgtgggttcaagct

SEQ ID NO: 123609 - DNA, 26 bp, Artificial sequence
  SiRNA target sequence
acaggtctcgctgtgggttcaagcta

SEQ ID NO: 123610 - DNA, 26 bp, Artificial sequence
  SiRNA target sequence
caggtctcgctgtgggttcaagctat

SEQ ID NO: 123611 - DNA, 26 bp, Artificial sequence
  SiRNA target sequence
aggtctcgctgtgggttcaagctatt

SEQ ID NO: 123612 - DNA, 26 bp, Artificial sequence
  SiRNA target sequence
ggtctcgctgtgggttcaagctattt

SEQ ID NO: 123613 - DNA, 26 bp, Artificial sequence
  SiRNA target sequence
gtctcgctgtgggttcaagctattta

SEQ ID NO: 123614 - DNA, 26 bp, Artificial sequence
  SiRNA target sequence
tctcgctgtgggttcaagctatttag

SEQ ID NO: 123615 - DNA, 26 bp, Artificial sequence
  SiRNA target sequence
ctcgctgtgggttcaagctatttagg

SEQ ID NO: 123616 - DNA, 26 bp, Artificial sequence
  SiRNA target sequence
tcgctgtgggttcaagctatttaggg

SEQ ID NO: 123617 - DNA, 26 bp, Artificial sequence
  SiRNA target sequence
cgctgtgggttcaagctatttagggt

SEQ ID NO: 123618 - DNA, 26 bp, Artificial sequence
  SiRNA target sequence
gctgtgggttcaagctatttagggtt

SEQ ID NO: 123619 - DNA, 26 bp, Artificial sequence
  SiRNA target sequence
ctgtgggttcaagctatttagggtta

SEQ ID NO: 123620 - DNA, 26 bp, Artificial sequence
  SiRNA target sequence
tgtgggttcaagctatttagggttaa

SEQ ID NO: 123621 - DNA, 26 bp, Artificial sequence
  SiRNA target sequence
gtgggttcaagctatttagggttaag

SEQ ID NO: 123622 - DNA, 26 bp, Artificial sequence
  SiRNA target sequence
tgggttcaagctatttagggttaaga

SEQ ID NO: 123623 - DNA, 26 bp, Artificial sequence
  SiRNA target sequence
gggttcaagctatttagggttaagac

SEQ ID NO: 123624 - DNA, 26 bp, Artificial sequence
  SiRNA target sequence
ggttcaagctatttagggttaagacc

SEQ ID NO: 123625 - DNA, 26 bp, Artificial sequence
  SiRNA target sequence
gttcaagctatttagggttaagaccc

SEQ ID NO: 123626 - DNA, 26 bp, Artificial sequence
  SiRNA target sequence
ttcaagctatttagggttaagacccg

SEQ ID NO: 123627 - DNA, 26 bp, Artificial sequence
  SiRNA target sequence
tcaagctatttagggttaagacccgt

SEQ ID NO: 123628 - DNA, 26 bp, Artificial sequence
  SiRNA target sequence
caagctatttagggttaagacccgta

SEQ ID NO: 123629 - DNA, 26 bp, Artificial sequence
  SiRNA target sequence
aagctatttagggttaagacccgtag

SEQ ID NO: 123630 - DNA, 26 bp, Artificial sequence
  SiRNA target sequence
agctatttagggttaagacccgtagt

SEQ ID NO: 123631 - DNA, 26 bp, Artificial sequence
  SiRNA target sequence
gctatttagggttaagacccgtagta

SEQ ID NO: 123632 - DNA, 26 bp, Artificial sequence
  SiRNA target sequence
ctatttagggttaagacccgtagtag

SEQ ID NO: 123633 - DNA, 26 bp, Artificial sequence
  SiRNA target sequence
tatttagggttaagacccgtagtaga

SEQ ID NO: 123634 - DNA, 26 bp, Artificial sequence
  SiRNA target sequence
atttagggttaagacccgtagtagat

SEQ ID NO: 123635 - DNA, 26 bp, Artificial sequence
  SiRNA target sequence
tttagggttaagacccgtagtagatt

SEQ ID NO: 123636 - DNA, 26 bp, Artificial sequence
  SiRNA target sequence
ttagggttaagacccgtagtagattt

SEQ ID NO: 123637 - DNA, 26 bp, Artificial sequence
  SiRNA target sequence
tagggttaagacccgtagtagatttt

SEQ ID NO: 123638 - DNA, 26 bp, Artificial sequence
  SiRNA target sequence
agggttaagacccgtagtagatttta

SEQ ID NO: 123639 - DNA, 26 bp, Artificial sequence
  SiRNA target sequence
gggttaagacccgtagtagattttat

SEQ ID NO: 123640 - DNA, 26 bp, Artificial sequence
  SiRNA target sequence
ggttaagacccgtagtagattttatg

SEQ ID NO: 123641 - DNA, 26 bp, Artificial sequence
  SiRNA target sequence
gttaagacccgtagtagattttatga

SEQ ID NO: 123642 - DNA, 26 bp, Artificial sequence
  SiRNA target sequence
ttaagacccgtagtagattttatgac

SEQ ID NO: 123643 - DNA, 26 bp, Artificial sequence
  SiRNA target sequence
taagacccgtagtagattttatgact

SEQ ID NO: 123644 - DNA, 26 bp, Artificial sequence
  SiRNA target sequence
aagacccgtagtagattttatgactt

SEQ ID NO: 123645 - DNA, 26 bp, Artificial sequence
  SiRNA target sequence
agacccgtagtagattttatgacttg

SEQ ID NO: 123646 - DNA, 26 bp, Artificial sequence
  SiRNA target sequence
gacccgtagtagattttatgacttgg

SEQ ID NO: 123647 - DNA, 26 bp, Artificial sequence
  SiRNA target sequence
acccgtagtagattttatgacttgga

SEQ ID NO: 123648 - DNA, 26 bp, Artificial sequence
  SiRNA target sequence
cccgtagtagattttatgacttggaa

SEQ ID NO: 123649 - DNA, 26 bp, Artificial sequence
  SiRNA target sequence
ccgtagtagattttatgacttggaat

SEQ ID NO: 123650 - DNA, 26 bp, Artificial sequence
  SiRNA target sequence
cgtagtagattttatgacttggaatt

SEQ ID NO: 123651 - DNA, 26 bp, Artificial sequence
  SiRNA target sequence
gtagtagattttatgacttggaattt

SEQ ID NO: 123652 - DNA, 26 bp, Artificial sequence
  SiRNA target sequence
tagtagattttatgacttggaatttt

SEQ ID NO: 123653 - DNA, 26 bp, Artificial sequence
  SiRNA target sequence
agtagattttatgacttggaattttg

SEQ ID NO: 123654 - DNA, 26 bp, Artificial sequence
  SiRNA target sequence
gtagattttatgacttggaattttgc

SEQ ID NO: 123655 - DNA, 26 bp, Artificial sequence
  SiRNA target sequence
tagattttatgacttggaattttgct

SEQ ID NO: 123656 - DNA, 26 bp, Artificial sequence
  SiRNA target sequence
agattttatgacttggaattttgctt

SEQ ID NO: 123657 - DNA, 26 bp, Artificial sequence
  SiRNA target sequence
gattttatgacttggaattttgcttt

SEQ ID NO: 123658 - DNA, 26 bp, Artificial sequence
  SiRNA target sequence
attttatgacttggaattttgctttg

SEQ ID NO: 123659 - DNA, 26 bp, Artificial sequence
  SiRNA target sequence
ttttatgacttggaattttgctttgc

SEQ ID NO: 123660 - DNA, 26 bp, Artificial sequence
  SiRNA target sequence
tttatgacttggaattttgctttgca

SEQ ID NO: 123661 - DNA, 26 bp, Artificial sequence
  SiRNA target sequence
ttatgacttggaattttgctttgcaa

SEQ ID NO: 123662 - DNA, 26 bp, Artificial sequence
  SiRNA target sequence
tatgacttggaattttgctttgcaat

SEQ ID NO: 123663 - DNA, 26 bp, Artificial sequence
  SiRNA target sequence
atgacttggaattttgctttgcaatc

SEQ ID NO: 123664 - DNA, 26 bp, Artificial sequence
  SiRNA target sequence
tgacttggaattttgctttgcaatca

SEQ ID NO: 123665 - DNA, 26 bp, Artificial sequence
  SiRNA target sequence
gacttggaattttgctttgcaatcaa

SEQ ID NO: 123666 - DNA, 26 bp, Artificial sequence
  SiRNA target sequence
acttggaattttgctttgcaatcaat

SEQ ID NO: 123667 - DNA, 26 bp, Artificial sequence
  SiRNA target sequence
cttggaattttgctttgcaatcaatt

SEQ ID NO: 123668 - DNA, 26 bp, Artificial sequence
  SiRNA target sequence
ttggaattttgctttgcaatcaattg

SEQ ID NO: 123669 - DNA, 26 bp, Artificial sequence
  SiRNA target sequence
tggaattttgctttgcaatcaattga

SEQ ID NO: 123670 - DNA, 26 bp, Artificial sequence
  SiRNA target sequence
ggaattttgctttgcaatcaattgac

SEQ ID NO: 123671 - DNA, 26 bp, Artificial sequence
  SiRNA target sequence
gaattttgctttgcaatcaattgacc

SEQ ID NO: 123672 - DNA, 26 bp, Artificial sequence
  SiRNA target sequence
aattttgctttgcaatcaattgacca

SEQ ID NO: 123673 - DNA, 26 bp, Artificial sequence
  SiRNA target sequence
attttgctttgcaatcaattgaccat

SEQ ID NO: 123674 - DNA, 26 bp, Artificial sequence
  SiRNA target sequence
ttttgctttgcaatcaattgaccata

SEQ ID NO: 123675 - DNA, 26 bp, Artificial sequence
  SiRNA target sequence
tttgctttgcaatcaattgaccatat

SEQ ID NO: 123676 - DNA, 26 bp, Artificial sequence
  SiRNA target sequence
ttgctttgcaatcaattgaccatatt

SEQ ID NO: 123677 - DNA, 26 bp, Artificial sequence
  SiRNA target sequence
tgctttgcaatcaattgaccatatta

SEQ ID NO: 123678 - DNA, 26 bp, Artificial sequence
  SiRNA target sequence
gctttgcaatcaattgaccatattat

SEQ ID NO: 123679 - DNA, 26 bp, Artificial sequence
  SiRNA target sequence
ctttgcaatcaattgaccatattatt

SEQ ID NO: 123680 - DNA, 26 bp, Artificial sequence
  SiRNA target sequence
tttgcaatcaattgaccatattatta

SEQ ID NO: 123681 - DNA, 26 bp, Artificial sequence
  SiRNA target sequence
ttgcaatcaattgaccatattattaa

SEQ ID NO: 123682 - DNA, 26 bp, Artificial sequence
  SiRNA target sequence
tgcaatcaattgaccatattattaat

SEQ ID NO: 123683 - DNA, 26 bp, Artificial sequence
  SiRNA target sequence
gcaatcaattgaccatattattaatt

SEQ ID NO: 123684 - DNA, 26 bp, Artificial sequence
  SiRNA target sequence
caatcaattgaccatattattaattc

SEQ ID NO: 123685 - DNA, 26 bp, Artificial sequence
  SiRNA target sequence
aatcaattgaccatattattaattct

SEQ ID NO: 123686 - DNA, 26 bp, Artificial sequence
  SiRNA target sequence
atcaattgaccatattattaattctt

SEQ ID NO: 123687 - DNA, 26 bp, Artificial sequence
  SiRNA target sequence
tcaattgaccatattattaattcttg

SEQ ID NO: 123688 - DNA, 26 bp, Artificial sequence
  SiRNA target sequence
caattgaccatattattaattcttgt

SEQ ID NO: 123689 - DNA, 26 bp, Artificial sequence
  SiRNA target sequence
aattgaccatattattaattcttgtg

SEQ ID NO: 123690 - DNA, 26 bp, Artificial sequence
  SiRNA target sequence
attgaccatattattaattcttgtgc

SEQ ID NO: 123691 - DNA, 26 bp, Artificial sequence
  SiRNA target sequence
ttgaccatattattaattcttgtgcg

SEQ ID NO: 123692 - DNA, 26 bp, Artificial sequence
  SiRNA target sequence
tgaccatattattaattcttgtgcga

SEQ ID NO: 123693 - DNA, 26 bp, Artificial sequence
  SiRNA target sequence
gaccatattattaattcttgtgcgaa

SEQ ID NO: 123694 - DNA, 26 bp, Artificial sequence
  SiRNA target sequence
accatattattaattcttgtgcgaaa

SEQ ID NO: 123695 - DNA, 26 bp, Artificial sequence
  SiRNA target sequence
ccatattattaattcttgtgcgaaaa

SEQ ID NO: 123696 - DNA, 26 bp, Artificial sequence
  SiRNA target sequence
catattattaattcttgtgcgaaaac

SEQ ID NO: 123697 - DNA, 26 bp, Artificial sequence
  SiRNA target sequence
atattattaattcttgtgcgaaaacc

SEQ ID NO: 123698 - DNA, 26 bp, Artificial sequence
  SiRNA target sequence
tattattaattcttgtgcgaaaacct

SEQ ID NO: 123699 - DNA, 26 bp, Artificial sequence
  SiRNA target sequence
attattaattcttgtgcgaaaacctt

SEQ ID NO: 123700 - DNA, 26 bp, Artificial sequence
  SiRNA target sequence
ttattaattcttgtgcgaaaaccttg

SEQ ID NO: 123701 - DNA, 26 bp, Artificial sequence
  SiRNA target sequence
tattaattcttgtgcgaaaaccttgt

SEQ ID NO: 123702 - DNA, 26 bp, Artificial sequence
  SiRNA target sequence
attaattcttgtgcgaaaaccttgta

SEQ ID NO: 123703 - DNA, 26 bp, Artificial sequence
  SiRNA target sequence
ttaattcttgtgcgaaaaccttgtat

SEQ ID NO: 123704 - DNA, 26 bp, Artificial sequence
  SiRNA target sequence
taattcttgtgcgaaaaccttgtata

SEQ ID NO: 123705 - DNA, 26 bp, Artificial sequence
  SiRNA target sequence
aattcttgtgcgaaaaccttgtatat

SEQ ID NO: 123706 - DNA, 26 bp, Artificial sequence
  SiRNA target sequence
attcttgtgcgaaaaccttgtatatg

SEQ ID NO: 123707 - DNA, 26 bp, Artificial sequence
  SiRNA target sequence
ttcttgtgcgaaaaccttgtatatgt

SEQ ID NO: 123708 - DNA, 26 bp, Artificial sequence
  SiRNA target sequence
tcttgtgcgaaaaccttgtatatgtc

SEQ ID NO: 123709 - DNA, 26 bp, Artificial sequence
  SiRNA target sequence
cttgtgcgaaaaccttgtatatgtca

SEQ ID NO: 123710 - DNA, 26 bp, Artificial sequence
  SiRNA target sequence
ttgtgcgaaaaccttgtatatgtcag

SEQ ID NO: 123711 - DNA, 26 bp, Artificial sequence
  SiRNA target sequence
tgtgcgaaaaccttgtatatgtcagg

SEQ ID NO: 123712 - DNA, 26 bp, Artificial sequence
  SiRNA target sequence
gtgcgaaaaccttgtatatgtcagga

SEQ ID NO: 123713 - DNA, 26 bp, Artificial sequence
  SiRNA target sequence
tgcgaaaaccttgtatatgtcaggag

SEQ ID NO: 123714 - DNA, 26 bp, Artificial sequence
  SiRNA target sequence
gcgaaaaccttgtatatgtcaggagg

SEQ ID NO: 123715 - DNA, 26 bp, Artificial sequence
  SiRNA target sequence
cgaaaaccttgtatatgtcaggagga

SEQ ID NO: 123716 - DNA, 26 bp, Artificial sequence
  SiRNA target sequence
gaaaaccttgtatatgtcaggaggaa

SEQ ID NO: 123717 - DNA, 26 bp, Artificial sequence
  SiRNA target sequence
aaaaccttgtatatgtcaggaggaag

SEQ ID NO: 123718 - DNA, 26 bp, Artificial sequence
  SiRNA target sequence
aaaccttgtatatgtcaggaggaaga

SEQ ID NO: 123719 - DNA, 26 bp, Artificial sequence
  SiRNA target sequence
aaccttgtatatgtcaggaggaagaa

SEQ ID NO: 123720 - DNA, 26 bp, Artificial sequence
  SiRNA target sequence
accttgtatatgtcaggaggaagaat

SEQ ID NO: 123721 - DNA, 26 bp, Artificial sequence
  SiRNA target sequence
ccttgtatatgtcaggaggaagaata

SEQ ID NO: 123722 - DNA, 26 bp, Artificial sequence
  SiRNA target sequence
cttgtatatgtcaggaggaagaatac

SEQ ID NO: 123723 - DNA, 26 bp, Artificial sequence
  SiRNA target sequence
ttgtatatgtcaggaggaagaataca

SEQ ID NO: 123724 - DNA, 26 bp, Artificial sequence
  SiRNA target sequence
tgtatatgtcaggaggaagaatacaa

SEQ ID NO: 123725 - DNA, 26 bp, Artificial sequence
  SiRNA target sequence
gtatatgtcaggaggaagaatacaat

SEQ ID NO: 123726 - DNA, 26 bp, Artificial sequence
  SiRNA target sequence
tatatgtcaggaggaagaatacaatg

SEQ ID NO: 123727 - DNA, 26 bp, Artificial sequence
  SiRNA target sequence
atatgtcaggaggaagaatacaatgt

SEQ ID NO: 123728 - DNA, 26 bp, Artificial sequence
  SiRNA target sequence
tatgtcaggaggaagaatacaatgtc

SEQ ID NO: 123729 - DNA, 26 bp, Artificial sequence
  SiRNA target sequence
atgtcaggaggaagaatacaatgtcc

SEQ ID NO: 123730 - DNA, 26 bp, Artificial sequence
  SiRNA target sequence
tgtcaggaggaagaatacaatgtcca

SEQ ID NO: 123731 - DNA, 26 bp, Artificial sequence
  SiRNA target sequence
gtcaggaggaagaatacaatgtccaa

SEQ ID NO: 123732 - DNA, 26 bp, Artificial sequence
  SiRNA target sequence
tcaggaggaagaatacaatgtccaat

SEQ ID NO: 123733 - DNA, 26 bp, Artificial sequence
  SiRNA target sequence
caggaggaagaatacaatgtccaatt

SEQ ID NO: 123734 - DNA, 26 bp, Artificial sequence
  SiRNA target sequence
aggaggaagaatacaatgtccaattg

SEQ ID NO: 123735 - DNA, 26 bp, Artificial sequence
  SiRNA target sequence
ggaggaagaatacaatgtccaattgt

SEQ ID NO: 123736 - DNA, 26 bp, Artificial sequence
  SiRNA target sequence
gaggaagaatacaatgtccaattgtt

SEQ ID NO: 123737 - DNA, 26 bp, Artificial sequence
  SiRNA target sequence
aggaagaatacaatgtccaattgttt

SEQ ID NO: 123738 - DNA, 26 bp, Artificial sequence
  SiRNA target sequence
ggaagaatacaatgtccaattgtttt

SEQ ID NO: 123739 - DNA, 26 bp, Artificial sequence
  SiRNA target sequence
gaagaatacaatgtccaattgttttt

SEQ ID NO: 123740 - DNA, 26 bp, Artificial sequence
  SiRNA target sequence
aagaatacaatgtccaattgttttta

SEQ ID NO: 123741 - DNA, 26 bp, Artificial sequence
  SiRNA target sequence
agaatacaatgtccaattgtttttag

SEQ ID NO: 123742 - DNA, 26 bp, Artificial sequence
  SiRNA target sequence
gaatacaatgtccaattgtttttagg

SEQ ID NO: 123743 - DNA, 26 bp, Artificial sequence
  SiRNA target sequence
aatacaatgtccaattgtttttaggg

SEQ ID NO: 123744 - DNA, 26 bp, Artificial sequence
  SiRNA target sequence
atacaatgtccaattgtttttagggg

SEQ ID NO: 123745 - DNA, 26 bp, Artificial sequence
  SiRNA target sequence
tacaatgtccaattgtttttagggga

SEQ ID NO: 123746 - DNA, 26 bp, Artificial sequence
  SiRNA target sequence
acaatgtccaattgtttttaggggac

SEQ ID NO: 123747 - DNA, 26 bp, Artificial sequence
  SiRNA target sequence
caatgtccaattgtttttaggggacc

SEQ ID NO: 123748 - DNA, 26 bp, Artificial sequence
  SiRNA target sequence
aatgtccaattgtttttaggggacca

SEQ ID NO: 123749 - DNA, 26 bp, Artificial sequence
  SiRNA target sequence
atgtccaattgtttttaggggaccaa

SEQ ID NO: 123750 - DNA, 26 bp, Artificial sequence
  SiRNA target sequence
tgtccaattgtttttaggggaccaaa

SEQ ID NO: 123751 - DNA, 26 bp, Artificial sequence
  SiRNA target sequence
gtccaattgtttttaggggaccaaat

SEQ ID NO: 123752 - DNA, 26 bp, Artificial sequence
  SiRNA target sequence
tccaattgtttttaggggaccaaatg

SEQ ID NO: 123753 - DNA, 26 bp, Artificial sequence
  SiRNA target sequence
ccaattgtttttaggggaccaaatgg

SEQ ID NO: 123754 - DNA, 26 bp, Artificial sequence
  SiRNA target sequence
caattgtttttaggggaccaaatgga

SEQ ID NO: 123755 - DNA, 26 bp, Artificial sequence
  SiRNA target sequence
aattgtttttaggggaccaaatggat

SEQ ID NO: 123756 - DNA, 26 bp, Artificial sequence
  SiRNA target sequence
attgtttttaggggaccaaatggatt

SEQ ID NO: 123757 - DNA, 26 bp, Artificial sequence
  SiRNA target sequence
ttgtttttaggggaccaaatggattc

SEQ ID NO: 123758 - DNA, 26 bp, Artificial sequence
  SiRNA target sequence
tgtttttaggggaccaaatggattca

SEQ ID NO: 123759 - DNA, 26 bp, Artificial sequence
  SiRNA target sequence
gtttttaggggaccaaatggattcaa

SEQ ID NO: 123760 - DNA, 26 bp, Artificial sequence
  SiRNA target sequence
tttttaggggaccaaatggattcaat

SEQ ID NO: 123761 - DNA, 26 bp, Artificial sequence
  SiRNA target sequence
ttttaggggaccaaatggattcaata

SEQ ID NO: 123762 - DNA, 26 bp, Artificial sequence
  SiRNA target sequence
tttaggggaccaaatggattcaataa

SEQ ID NO: 123763 - DNA, 26 bp, Artificial sequence
  SiRNA target sequence
ttaggggaccaaatggattcaataat

SEQ ID NO: 123764 - DNA, 26 bp, Artificial sequence
  SiRNA target sequence
taggggaccaaatggattcaataatg

SEQ ID NO: 123765 - DNA, 26 bp, Artificial sequence
  SiRNA target sequence
aggggaccaaatggattcaataatgg

SEQ ID NO: 123766 - DNA, 26 bp, Artificial sequence
  SiRNA target sequence
ggggaccaaatggattcaataatggg

SEQ ID NO: 123767 - DNA, 26 bp, Artificial sequence
  SiRNA target sequence
gggaccaaatggattcaataatgggt

SEQ ID NO: 123768 - DNA, 26 bp, Artificial sequence
  SiRNA target sequence
ggaccaaatggattcaataatgggta

SEQ ID NO: 123769 - DNA, 26 bp, Artificial sequence
  SiRNA target sequence
gaccaaatggattcaataatgggtac

SEQ ID NO: 123770 - DNA, 26 bp, Artificial sequence
  SiRNA target sequence
accaaatggattcaataatgggtacg

SEQ ID NO: 123771 - DNA, 26 bp, Artificial sequence
  SiRNA target sequence
ccaaatggattcaataatgggtacgc

SEQ ID NO: 123772 - DNA, 26 bp, Artificial sequence
  SiRNA target sequence
caaatggattcaataatgggtacgct

SEQ ID NO: 123773 - DNA, 26 bp, Artificial sequence
  SiRNA target sequence
aaatggattcaataatgggtacgctg

SEQ ID NO: 123774 - DNA, 26 bp, Artificial sequence
  SiRNA target sequence
aatggattcaataatgggtacgctgc

SEQ ID NO: 123775 - DNA, 26 bp, Artificial sequence
  SiRNA target sequence
atggattcaataatgggtacgctgca

SEQ ID NO: 123776 - DNA, 26 bp, Artificial sequence
  SiRNA target sequence
tggattcaataatgggtacgctgcac

SEQ ID NO: 123777 - DNA, 26 bp, Artificial sequence
  SiRNA target sequence
ggattcaataatgggtacgctgcaca

SEQ ID NO: 123778 - DNA, 26 bp, Artificial sequence
  SiRNA target sequence
gattcaataatgggtacgctgcacag

SEQ ID NO: 123779 - DNA, 26 bp, Artificial sequence
  SiRNA target sequence
attcaataatgggtacgctgcacagc

SEQ ID NO: 123780 - DNA, 26 bp, Artificial sequence
  SiRNA target sequence
ttcaataatgggtacgctgcacagca

SEQ ID NO: 123781 - DNA, 26 bp, Artificial sequence
  SiRNA target sequence
tcaataatgggtacgctgcacagcac

SEQ ID NO: 123782 - DNA, 26 bp, Artificial sequence
  SiRNA target sequence
caataatgggtacgctgcacagcaca

SEQ ID NO: 123783 - DNA, 26 bp, Artificial sequence
  SiRNA target sequence
aataatgggtacgctgcacagcacac

SEQ ID NO: 123784 - DNA, 26 bp, Artificial sequence
  SiRNA target sequence
ataatgggtacgctgcacagcacaca

SEQ ID NO: 123785 - DNA, 26 bp, Artificial sequence
  SiRNA target sequence
taatgggtacgctgcacagcacacac

SEQ ID NO: 123786 - DNA, 26 bp, Artificial sequence
  SiRNA target sequence
aatgggtacgctgcacagcacacaca

SEQ ID NO: 123787 - DNA, 26 bp, Artificial sequence
  SiRNA target sequence
atgggtacgctgcacagcacacacaa

SEQ ID NO: 123788 - DNA, 26 bp, Artificial sequence
  SiRNA target sequence
tgggtacgctgcacagcacacacaag

SEQ ID NO: 123789 - DNA, 26 bp, Artificial sequence
  SiRNA target sequence
gggtacgctgcacagcacacacaaga

SEQ ID NO: 123790 - DNA, 26 bp, Artificial sequence
  SiRNA target sequence
ggtacgctgcacagcacacacaagat

SEQ ID NO: 123791 - DNA, 26 bp, Artificial sequence
  SiRNA target sequence
gtacgctgcacagcacacacaagatt

SEQ ID NO: 123792 - DNA, 26 bp, Artificial sequence
  SiRNA target sequence
tacgctgcacagcacacacaagattt

SEQ ID NO: 123793 - DNA, 26 bp, Artificial sequence
  SiRNA target sequence
acgctgcacagcacacacaagatttt

SEQ ID NO: 123794 - DNA, 26 bp, Artificial sequence
  SiRNA target sequence
cgctgcacagcacacacaagattttg

SEQ ID NO: 123795 - DNA, 26 bp, Artificial sequence
  SiRNA target sequence
gctgcacagcacacacaagattttgc

SEQ ID NO: 123796 - DNA, 26 bp, Artificial sequence
  SiRNA target sequence
ctgcacagcacacacaagattttgca

SEQ ID NO: 123797 - DNA, 26 bp, Artificial sequence
  SiRNA target sequence
tgcacagcacacacaagattttgcac

SEQ ID NO: 123798 - DNA, 26 bp, Artificial sequence
  SiRNA target sequence
gcacagcacacacaagattttgcacc

SEQ ID NO: 123799 - DNA, 26 bp, Artificial sequence
  SiRNA target sequence
cacagcacacacaagattttgcacca

SEQ ID NO: 123800 - DNA, 26 bp, Artificial sequence
  SiRNA target sequence
acagcacacacaagattttgcaccaa

SEQ ID NO: 123801 - DNA, 26 bp, Artificial sequence
  SiRNA target sequence
cagcacacacaagattttgcaccaat

SEQ ID NO: 123802 - DNA, 26 bp, Artificial sequence
  SiRNA target sequence
agcacacacaagattttgcaccaata

SEQ ID NO: 123803 - DNA, 26 bp, Artificial sequence
  SiRNA target sequence
gcacacacaagattttgcaccaatat

SEQ ID NO: 123804 - DNA, 26 bp, Artificial sequence
  SiRNA target sequence
cacacacaagattttgcaccaatata

SEQ ID NO: 123805 - DNA, 26 bp, Artificial sequence
  SiRNA target sequence
acacacaagattttgcaccaatatat

SEQ ID NO: 123806 - DNA, 26 bp, Artificial sequence
  SiRNA target sequence
cacacaagattttgcaccaatatatg

SEQ ID NO: 123807 - DNA, 26 bp, Artificial sequence
  SiRNA target sequence
acacaagattttgcaccaatatatgg

SEQ ID NO: 123808 - DNA, 26 bp, Artificial sequence
  SiRNA target sequence
cacaagattttgcaccaatatatggt

SEQ ID NO: 123809 - DNA, 26 bp, Artificial sequence
  SiRNA target sequence
acaagattttgcaccaatatatggtt

SEQ ID NO: 123810 - DNA, 26 bp, Artificial sequence
  SiRNA target sequence
caagattttgcaccaatatatggttc

SEQ ID NO: 123811 - DNA, 26 bp, Artificial sequence
  SiRNA target sequence
aagattttgcaccaatatatggttct

SEQ ID NO: 123812 - DNA, 26 bp, Artificial sequence
  SiRNA target sequence
agattttgcaccaatatatggttcta

SEQ ID NO: 123813 - DNA, 26 bp, Artificial sequence
  SiRNA target sequence
gattttgcaccaatatatggttctat

SEQ ID NO: 123814 - DNA, 26 bp, Artificial sequence
  SiRNA target sequence
attttgcaccaatatatggttctatt

SEQ ID NO: 123815 - DNA, 26 bp, Artificial sequence
  SiRNA target sequence
ttttgcaccaatatatggttctattc

SEQ ID NO: 123816 - DNA, 26 bp, Artificial sequence
  SiRNA target sequence
tttgcaccaatatatggttctattcc

SEQ ID NO: 123817 - DNA, 26 bp, Artificial sequence
  SiRNA target sequence
ttgcaccaatatatggttctattcca

SEQ ID NO: 123818 - DNA, 26 bp, Artificial sequence
  SiRNA target sequence
tgcaccaatatatggttctattccag

SEQ ID NO: 123819 - DNA, 26 bp, Artificial sequence
  SiRNA target sequence
gcaccaatatatggttctattccagg

SEQ ID NO: 123820 - DNA, 26 bp, Artificial sequence
  SiRNA target sequence
caccaatatatggttctattccaggc

SEQ ID NO: 123821 - DNA, 26 bp, Artificial sequence
  SiRNA target sequence
accaatatatggttctattccaggcc

SEQ ID NO: 123822 - DNA, 26 bp, Artificial sequence
  SiRNA target sequence
ccaatatatggttctattccaggcct

SEQ ID NO: 123823 - DNA, 26 bp, Artificial sequence
  SiRNA target sequence
caatatatggttctattccaggcctt

SEQ ID NO: 123824 - DNA, 26 bp, Artificial sequence
  SiRNA target sequence
aatatatggttctattccaggcctta

SEQ ID NO: 123825 - DNA, 26 bp, Artificial sequence
  SiRNA target sequence
atatatggttctattccaggccttaa

SEQ ID NO: 123826 - DNA, 26 bp, Artificial sequence
  SiRNA target sequence
tatatggttctattccaggccttaag

SEQ ID NO: 123827 - DNA, 26 bp, Artificial sequence
  SiRNA target sequence
atatggttctattccaggccttaagg

SEQ ID NO: 123828 - DNA, 26 bp, Artificial sequence
  SiRNA target sequence
tatggttctattccaggccttaaggt

SEQ ID NO: 123829 - DNA, 26 bp, Artificial sequence
  SiRNA target sequence
atggttctattccaggccttaaggtg

SEQ ID NO: 123830 - DNA, 26 bp, Artificial sequence
  SiRNA target sequence
tggttctattccaggccttaaggtgg

SEQ ID NO: 123831 - DNA, 26 bp, Artificial sequence
  SiRNA target sequence
ggttctattccaggccttaaggtggt

SEQ ID NO: 123832 - DNA, 26 bp, Artificial sequence
  SiRNA target sequence
gttctattccaggccttaaggtggtt

SEQ ID NO: 123833 - DNA, 26 bp, Artificial sequence
  SiRNA target sequence
ttctattccaggccttaaggtggttt

SEQ ID NO: 123834 - DNA, 26 bp, Artificial sequence
  SiRNA target sequence
tctattccaggccttaaggtggtttg

SEQ ID NO: 123835 - DNA, 26 bp, Artificial sequence
  SiRNA target sequence
ctattccaggccttaaggtggtttgt

SEQ ID NO: 123836 - DNA, 26 bp, Artificial sequence
  SiRNA target sequence
tattccaggccttaaggtggtttgtc

SEQ ID NO: 123837 - DNA, 26 bp, Artificial sequence
  SiRNA target sequence
attccaggccttaaggtggtttgtcc

SEQ ID NO: 123838 - DNA, 26 bp, Artificial sequence
  SiRNA target sequence
ttccaggccttaaggtggtttgtcct

SEQ ID NO: 123839 - DNA, 26 bp, Artificial sequence
  SiRNA target sequence
tccaggccttaaggtggtttgtcctt

SEQ ID NO: 123840 - DNA, 26 bp, Artificial sequence
  SiRNA target sequence
ccaggccttaaggtggtttgtcctta

SEQ ID NO: 123841 - DNA, 26 bp, Artificial sequence
  SiRNA target sequence
caggccttaaggtggtttgtccttat

SEQ ID NO: 123842 - DNA, 26 bp, Artificial sequence
  SiRNA target sequence
aggccttaaggtggtttgtccttata

SEQ ID NO: 123843 - DNA, 26 bp, Artificial sequence
  SiRNA target sequence
ggccttaaggtggtttgtccttatac

SEQ ID NO: 123844 - DNA, 26 bp, Artificial sequence
  SiRNA target sequence
gccttaaggtggtttgtccttatacg

SEQ ID NO: 123845 - DNA, 26 bp, Artificial sequence
  SiRNA target sequence
ccttaaggtggtttgtccttatacgg

SEQ ID NO: 123846 - DNA, 26 bp, Artificial sequence
  SiRNA target sequence
cttaaggtggtttgtccttatacggg

SEQ ID NO: 123847 - DNA, 26 bp, Artificial sequence
  SiRNA target sequence
ttaaggtggtttgtccttatacgggt

SEQ ID NO: 123848 - DNA, 26 bp, Artificial sequence
  SiRNA target sequence
taaggtggtttgtccttatacgggta

SEQ ID NO: 123849 - DNA, 26 bp, Artificial sequence
  SiRNA target sequence
aaggtggtttgtccttatacgggtaa

SEQ ID NO: 123850 - DNA, 26 bp, Artificial sequence
  SiRNA target sequence
aggtggtttgtccttatacgggtaaa

SEQ ID NO: 123851 - DNA, 26 bp, Artificial sequence
  SiRNA target sequence
ggtggtttgtccttatacgggtaaag

SEQ ID NO: 123852 - DNA, 26 bp, Artificial sequence
  SiRNA target sequence
gtggtttgtccttatacgggtaaaga

SEQ ID NO: 123853 - DNA, 26 bp, Artificial sequence
  SiRNA target sequence
tggtttgtccttatacgggtaaagac

SEQ ID NO: 123854 - DNA, 26 bp, Artificial sequence
  SiRNA target sequence
ggtttgtccttatacgggtaaagacc

SEQ ID NO: 123855 - DNA, 26 bp, Artificial sequence
  SiRNA target sequence
gtttgtccttatacgggtaaagacca

SEQ ID NO: 123856 - DNA, 26 bp, Artificial sequence
  SiRNA target sequence
tttgtccttatacgggtaaagaccat

SEQ ID NO: 123857 - DNA, 26 bp, Artificial sequence
  SiRNA target sequence
ttgtccttatacgggtaaagaccata

SEQ ID NO: 123858 - DNA, 26 bp, Artificial sequence
  SiRNA target sequence
tgtccttatacgggtaaagaccataa

SEQ ID NO: 123859 - DNA, 26 bp, Artificial sequence
  SiRNA target sequence
gtccttatacgggtaaagaccataaa

SEQ ID NO: 123860 - DNA, 26 bp, Artificial sequence
  SiRNA target sequence
tccttatacgggtaaagaccataaag

SEQ ID NO: 123861 - DNA, 26 bp, Artificial sequence
  SiRNA target sequence
ccttatacgggtaaagaccataaagg

SEQ ID NO: 123862 - DNA, 26 bp, Artificial sequence
  SiRNA target sequence
cttatacgggtaaagaccataaagga

SEQ ID NO: 123863 - DNA, 26 bp, Artificial sequence
  SiRNA target sequence
ttatacgggtaaagaccataaaggac

SEQ ID NO: 123864 - DNA, 26 bp, Artificial sequence
  SiRNA target sequence
tatacgggtaaagaccataaaggact

SEQ ID NO: 123865 - DNA, 26 bp, Artificial sequence
  SiRNA target sequence
atacgggtaaagaccataaaggactt

SEQ ID NO: 123866 - DNA, 26 bp, Artificial sequence
  SiRNA target sequence
tacgggtaaagaccataaaggacttt

SEQ ID NO: 123867 - DNA, 26 bp, Artificial sequence
  SiRNA target sequence
acgggtaaagaccataaaggactttt

SEQ ID NO: 123868 - DNA, 26 bp, Artificial sequence
  SiRNA target sequence
cgggtaaagaccataaaggactttta

SEQ ID NO: 123869 - DNA, 26 bp, Artificial sequence
  SiRNA target sequence
gggtaaagaccataaaggacttttaa

SEQ ID NO: 123870 - DNA, 26 bp, Artificial sequence
  SiRNA target sequence
ggtaaagaccataaaggacttttaaa

SEQ ID NO: 123871 - DNA, 26 bp, Artificial sequence
  SiRNA target sequence
gtaaagaccataaaggacttttaaaa

SEQ ID NO: 123872 - DNA, 26 bp, Artificial sequence
  SiRNA target sequence
taaagaccataaaggacttttaaaaa

SEQ ID NO: 123873 - DNA, 26 bp, Artificial sequence
  SiRNA target sequence
aaagaccataaaggacttttaaaaag

SEQ ID NO: 123874 - DNA, 26 bp, Artificial sequence
  SiRNA target sequence
aagaccataaaggacttttaaaaagc

SEQ ID NO: 123875 - DNA, 26 bp, Artificial sequence
  SiRNA target sequence
agaccataaaggacttttaaaaagcg

SEQ ID NO: 123876 - DNA, 26 bp, Artificial sequence
  SiRNA target sequence
gaccataaaggacttttaaaaagcgc

SEQ ID NO: 123877 - DNA, 26 bp, Artificial sequence
  SiRNA target sequence
accataaaggacttttaaaaagcgct

SEQ ID NO: 123878 - DNA, 26 bp, Artificial sequence
  SiRNA target sequence
ccataaaggacttttaaaaagcgcta

SEQ ID NO: 123879 - DNA, 26 bp, Artificial sequence
  SiRNA target sequence
cataaaggacttttaaaaagcgctat

SEQ ID NO: 123880 - DNA, 26 bp, Artificial sequence
  SiRNA target sequence
ataaaggacttttaaaaagcgctatt

SEQ ID NO: 123881 - DNA, 26 bp, Artificial sequence
  SiRNA target sequence
taaaggacttttaaaaagcgctatta

SEQ ID NO: 123882 - DNA, 26 bp, Artificial sequence
  SiRNA target sequence
aaaggacttttaaaaagcgctattag

SEQ ID NO: 123883 - DNA, 26 bp, Artificial sequence
  SiRNA target sequence
aaggacttttaaaaagcgctattaga

SEQ ID NO: 123884 - DNA, 26 bp, Artificial sequence
  SiRNA target sequence
aggacttttaaaaagcgctattagag

SEQ ID NO: 123885 - DNA, 26 bp, Artificial sequence
  SiRNA target sequence
ggacttttaaaaagcgctattagaga

SEQ ID NO: 123886 - DNA, 26 bp, Artificial sequence
  SiRNA target sequence
gacttttaaaaagcgctattagagac

SEQ ID NO: 123887 - DNA, 26 bp, Artificial sequence
  SiRNA target sequence
acttttaaaaagcgctattagagaca

SEQ ID NO: 123888 - DNA, 26 bp, Artificial sequence
  SiRNA target sequence
cttttaaaaagcgctattagagacaa

SEQ ID NO: 123889 - DNA, 26 bp, Artificial sequence
  SiRNA target sequence
ttttaaaaagcgctattagagacaat

SEQ ID NO: 123890 - DNA, 26 bp, Artificial sequence
  SiRNA target sequence
tttaaaaagcgctattagagacaata

SEQ ID NO: 123891 - DNA, 26 bp, Artificial sequence
  SiRNA target sequence
ttaaaaagcgctattagagacaataa

SEQ ID NO: 123892 - DNA, 26 bp, Artificial sequence
  SiRNA target sequence
taaaaagcgctattagagacaataac

SEQ ID NO: 123893 - DNA, 26 bp, Artificial sequence
  SiRNA target sequence
aaaaagcgctattagagacaataacc

SEQ ID NO: 123894 - DNA, 26 bp, Artificial sequence
  SiRNA target sequence
aaaagcgctattagagacaataaccc

SEQ ID NO: 123895 - DNA, 26 bp, Artificial sequence
  SiRNA target sequence
aaagcgctattagagacaataacccg

SEQ ID NO: 123896 - DNA, 26 bp, Artificial sequence
  SiRNA target sequence
aagcgctattagagacaataacccgg

SEQ ID NO: 123897 - DNA, 26 bp, Artificial sequence
  SiRNA target sequence
agcgctattagagacaataacccggt

SEQ ID NO: 123898 - DNA, 26 bp, Artificial sequence
  SiRNA target sequence
gcgctattagagacaataacccggtt

SEQ ID NO: 123899 - DNA, 26 bp, Artificial sequence
  SiRNA target sequence
cgctattagagacaataacccggtta

SEQ ID NO: 123900 - DNA, 26 bp, Artificial sequence
  SiRNA target sequence
gctattagagacaataacccggttat

SEQ ID NO: 123901 - DNA, 26 bp, Artificial sequence
  SiRNA target sequence
ctattagagacaataacccggttata

SEQ ID NO: 123902 - DNA, 26 bp, Artificial sequence
  SiRNA target sequence
tattagagacaataacccggttatat

SEQ ID NO: 123903 - DNA, 26 bp, Artificial sequence
  SiRNA target sequence
attagagacaataacccggttatatt

SEQ ID NO: 123904 - DNA, 26 bp, Artificial sequence
  SiRNA target sequence
ttagagacaataacccggttatattt

SEQ ID NO: 123905 - DNA, 26 bp, Artificial sequence
  SiRNA target sequence
tagagacaataacccggttatatttc

SEQ ID NO: 123906 - DNA, 26 bp, Artificial sequence
  SiRNA target sequence
agagacaataacccggttatatttct

SEQ ID NO: 123907 - DNA, 26 bp, Artificial sequence
  SiRNA target sequence
gagacaataacccggttatatttctt

SEQ ID NO: 123908 - DNA, 26 bp, Artificial sequence
  SiRNA target sequence
agacaataacccggttatatttcttg

SEQ ID NO: 123909 - DNA, 26 bp, Artificial sequence
  SiRNA target sequence
gacaataacccggttatatttcttga

SEQ ID NO: 123910 - DNA, 26 bp, Artificial sequence
  SiRNA target sequence
acaataacccggttatatttcttgag

SEQ ID NO: 123911 - DNA, 26 bp, Artificial sequence
  SiRNA target sequence
caataacccggttatatttcttgaga

SEQ ID NO: 123912 - DNA, 26 bp, Artificial sequence
  SiRNA target sequence
aataacccggttatatttcttgagaa

SEQ ID NO: 123913 - DNA, 26 bp, Artificial sequence
  SiRNA target sequence
ataacccggttatatttcttgagaat

SEQ ID NO: 123914 - DNA, 26 bp, Artificial sequence
  SiRNA target sequence
taacccggttatatttcttgagaatg

SEQ ID NO: 123915 - DNA, 26 bp, Artificial sequence
  SiRNA target sequence
aacccggttatatttcttgagaatga

SEQ ID NO: 123916 - DNA, 26 bp, Artificial sequence
  SiRNA target sequence
acccggttatatttcttgagaatgaa

SEQ ID NO: 123917 - DNA, 26 bp, Artificial sequence
  SiRNA target sequence
cccggttatatttcttgagaatgaaa

SEQ ID NO: 123918 - DNA, 26 bp, Artificial sequence
  SiRNA target sequence
ccggttatatttcttgagaatgaaat

SEQ ID NO: 123919 - DNA, 26 bp, Artificial sequence
  SiRNA target sequence
cggttatatttcttgagaatgaaata

SEQ ID NO: 123920 - DNA, 26 bp, Artificial sequence
  SiRNA target sequence
ggttatatttcttgagaatgaaatat

SEQ ID NO: 123921 - DNA, 26 bp, Artificial sequence
  SiRNA target sequence
gttatatttcttgagaatgaaatatt

SEQ ID NO: 123922 - DNA, 26 bp, Artificial sequence
  SiRNA target sequence
ttatatttcttgagaatgaaatatta

SEQ ID NO: 123923 - DNA, 26 bp, Artificial sequence
  SiRNA target sequence
tatatttcttgagaatgaaatattat

SEQ ID NO: 123924 - DNA, 26 bp, Artificial sequence
  SiRNA target sequence
atatttcttgagaatgaaatattata

SEQ ID NO: 123925 - DNA, 26 bp, Artificial sequence
  SiRNA target sequence
tatttcttgagaatgaaatattatat

SEQ ID NO: 123926 - DNA, 26 bp, Artificial sequence
  SiRNA target sequence
atttcttgagaatgaaatattatata

SEQ ID NO: 123927 - DNA, 26 bp, Artificial sequence
  SiRNA target sequence
tttcttgagaatgaaatattatataa

SEQ ID NO: 123928 - DNA, 26 bp, Artificial sequence
  SiRNA target sequence
ttcttgagaatgaaatattatataaa

SEQ ID NO: 123929 - DNA, 26 bp, Artificial sequence
  SiRNA target sequence
tcttgagaatgaaatattatataaag

SEQ ID NO: 123930 - DNA, 26 bp, Artificial sequence
  SiRNA target sequence
cttgagaatgaaatattatataaaga

SEQ ID NO: 123931 - DNA, 26 bp, Artificial sequence
  SiRNA target sequence
ttgagaatgaaatattatataaagat

SEQ ID NO: 123932 - DNA, 26 bp, Artificial sequence
  SiRNA target sequence
tgagaatgaaatattatataaagata

SEQ ID NO: 123933 - DNA, 26 bp, Artificial sequence
  SiRNA target sequence
gagaatgaaatattatataaagataa

SEQ ID NO: 123934 - DNA, 26 bp, Artificial sequence
  SiRNA target sequence
agaatgaaatattatataaagataaa

SEQ ID NO: 123935 - DNA, 26 bp, Artificial sequence
  SiRNA target sequence
gaatgaaatattatataaagataaat

SEQ ID NO: 123936 - DNA, 26 bp, Artificial sequence
  SiRNA target sequence
aatgaaatattatataaagataaata

SEQ ID NO: 123937 - DNA, 26 bp, Artificial sequence
  SiRNA target sequence
atgaaatattatataaagataaatac

SEQ ID NO: 123938 - DNA, 26 bp, Artificial sequence
  SiRNA target sequence
tgaaatattatataaagataaatacc

SEQ ID NO: 123939 - DNA, 26 bp, Artificial sequence
  SiRNA target sequence
gaaatattatataaagataaatacct

SEQ ID NO: 123940 - DNA, 26 bp, Artificial sequence
  SiRNA target sequence
aaatattatataaagataaatacctt

SEQ ID NO: 123941 - DNA, 26 bp, Artificial sequence
  SiRNA target sequence
aatattatataaagataaataccttg

SEQ ID NO: 123942 - DNA, 26 bp, Artificial sequence
  SiRNA target sequence
atattatataaagataaataccttga

SEQ ID NO: 123943 - DNA, 26 bp, Artificial sequence
  SiRNA target sequence
tattatataaagataaataccttgaa

SEQ ID NO: 123944 - DNA, 26 bp, Artificial sequence
  SiRNA target sequence
attatataaagataaataccttgaag

SEQ ID NO: 123945 - DNA, 26 bp, Artificial sequence
  SiRNA target sequence
ttatataaagataaataccttgaagt

SEQ ID NO: 123946 - DNA, 26 bp, Artificial sequence
  SiRNA target sequence
tatataaagataaataccttgaagtg

SEQ ID NO: 123947 - DNA, 26 bp, Artificial sequence
  SiRNA target sequence
atataaagataaataccttgaagtgt

SEQ ID NO: 123948 - DNA, 26 bp, Artificial sequence
  SiRNA target sequence
tataaagataaataccttgaagtgtc

SEQ ID NO: 123949 - DNA, 26 bp, Artificial sequence
  SiRNA target sequence
ataaagataaataccttgaagtgtct

SEQ ID NO: 123950 - DNA, 26 bp, Artificial sequence
  SiRNA target sequence
taaagataaataccttgaagtgtcta

SEQ ID NO: 123951 - DNA, 26 bp, Artificial sequence
  SiRNA target sequence
aaagataaataccttgaagtgtctaa

SEQ ID NO: 123952 - DNA, 26 bp, Artificial sequence
  SiRNA target sequence
aagataaataccttgaagtgtctaat

SEQ ID NO: 123953 - DNA, 26 bp, Artificial sequence
  SiRNA target sequence
agataaataccttgaagtgtctaata

SEQ ID NO: 123954 - DNA, 26 bp, Artificial sequence
  SiRNA target sequence
gataaataccttgaagtgtctaataa

SEQ ID NO: 123955 - DNA, 26 bp, Artificial sequence
  SiRNA target sequence
ataaataccttgaagtgtctaataat

SEQ ID NO: 123956 - DNA, 26 bp, Artificial sequence
  SiRNA target sequence
taaataccttgaagtgtctaataatt

SEQ ID NO: 123957 - DNA, 26 bp, Artificial sequence
  SiRNA target sequence
aaataccttgaagtgtctaataatta

SEQ ID NO: 123958 - DNA, 26 bp, Artificial sequence
  SiRNA target sequence
aataccttgaagtgtctaataattat

SEQ ID NO: 123959 - DNA, 26 bp, Artificial sequence
  SiRNA target sequence
ataccttgaagtgtctaataattata

SEQ ID NO: 123960 - DNA, 26 bp, Artificial sequence
  SiRNA target sequence
taccttgaagtgtctaataattatat

SEQ ID NO: 123961 - DNA, 26 bp, Artificial sequence
  SiRNA target sequence
accttgaagtgtctaataattatatt

SEQ ID NO: 123962 - DNA, 26 bp, Artificial sequence
  SiRNA target sequence
ccttgaagtgtctaataattatattc

SEQ ID NO: 123963 - DNA, 26 bp, Artificial sequence
  SiRNA target sequence
cttgaagtgtctaataattatattca

SEQ ID NO: 123964 - DNA, 26 bp, Artificial sequence
  SiRNA target sequence
ttgaagtgtctaataattatattcaa

SEQ ID NO: 123965 - DNA, 26 bp, Artificial sequence
  SiRNA target sequence
tgaagtgtctaataattatattcaac

SEQ ID NO: 123966 - DNA, 26 bp, Artificial sequence
  SiRNA target sequence
gaagtgtctaataattatattcaacc

SEQ ID NO: 123967 - DNA, 26 bp, Artificial sequence
  SiRNA target sequence
aagtgtctaataattatattcaacca

SEQ ID NO: 123968 - DNA, 26 bp, Artificial sequence
  SiRNA target sequence
agtgtctaataattatattcaaccac

SEQ ID NO: 123969 - DNA, 26 bp, Artificial sequence
  SiRNA target sequence
gtgtctaataattatattcaaccact

SEQ ID NO: 123970 - DNA, 26 bp, Artificial sequence
  SiRNA target sequence
tgtctaataattatattcaaccactt

SEQ ID NO: 123971 - DNA, 26 bp, Artificial sequence
  SiRNA target sequence
gtctaataattatattcaaccacttg

SEQ ID NO: 123972 - DNA, 26 bp, Artificial sequence
  SiRNA target sequence
tctaataattatattcaaccacttga

SEQ ID NO: 123973 - DNA, 26 bp, Artificial sequence
  SiRNA target sequence
ctaataattatattcaaccacttgac

SEQ ID NO: 123974 - DNA, 26 bp, Artificial sequence
  SiRNA target sequence
taataattatattcaaccacttgaca

SEQ ID NO: 123975 - DNA, 26 bp, Artificial sequence
  SiRNA target sequence
aataattatattcaaccacttgacaa

SEQ ID NO: 123976 - DNA, 26 bp, Artificial sequence
  SiRNA target sequence
ataattatattcaaccacttgacaag

SEQ ID NO: 123977 - DNA, 26 bp, Artificial sequence
  SiRNA target sequence
taattatattcaaccacttgacaagg

SEQ ID NO: 123978 - DNA, 26 bp, Artificial sequence
  SiRNA target sequence
aattatattcaaccacttgacaaggc

SEQ ID NO: 123979 - DNA, 26 bp, Artificial sequence
  SiRNA target sequence
attatattcaaccacttgacaaggca

SEQ ID NO: 123980 - DNA, 26 bp, Artificial sequence
  SiRNA target sequence
ttatattcaaccacttgacaaggcag

SEQ ID NO: 123981 - DNA, 26 bp, Artificial sequence
  SiRNA target sequence
tatattcaaccacttgacaaggcagt

SEQ ID NO: 123982 - DNA, 26 bp, Artificial sequence
  SiRNA target sequence
atattcaaccacttgacaaggcagta

SEQ ID NO: 123983 - DNA, 26 bp, Artificial sequence
  SiRNA target sequence
tattcaaccacttgacaaggcagtaa

SEQ ID NO: 123984 - DNA, 26 bp, Artificial sequence
  SiRNA target sequence
attcaaccacttgacaaggcagtaat

SEQ ID NO: 123985 - DNA, 26 bp, Artificial sequence
  SiRNA target sequence
ttcaaccacttgacaaggcagtaatt

SEQ ID NO: 123986 - DNA, 26 bp, Artificial sequence
  SiRNA target sequence
tcaaccacttgacaaggcagtaattg

SEQ ID NO: 123987 - DNA, 26 bp, Artificial sequence
  SiRNA target sequence
caaccacttgacaaggcagtaattga

SEQ ID NO: 123988 - DNA, 26 bp, Artificial sequence
  SiRNA target sequence
aaccacttgacaaggcagtaattgaa

SEQ ID NO: 123989 - DNA, 26 bp, Artificial sequence
  SiRNA target sequence
accacttgacaaggcagtaattgaaa

SEQ ID NO: 123990 - DNA, 26 bp, Artificial sequence
  SiRNA target sequence
ccacttgacaaggcagtaattgaaaa

SEQ ID NO: 123991 - DNA, 26 bp, Artificial sequence
  SiRNA target sequence
cacttgacaaggcagtaattgaaaaa

SEQ ID NO: 123992 - DNA, 26 bp, Artificial sequence
  SiRNA target sequence
acttgacaaggcagtaattgaaaaaa

SEQ ID NO: 123993 - DNA, 26 bp, Artificial sequence
  SiRNA target sequence
cttgacaaggcagtaattgaaaaaaa

SEQ ID NO: 123994 - DNA, 26 bp, Artificial sequence
  SiRNA target sequence
ttgacaaggcagtaattgaaaaaaat

SEQ ID NO: 123995 - DNA, 26 bp, Artificial sequence
  SiRNA target sequence
tgacaaggcagtaattgaaaaaaatg

SEQ ID NO: 123996 - DNA, 26 bp, Artificial sequence
  SiRNA target sequence
gacaaggcagtaattgaaaaaaatgg

SEQ ID NO: 123997 - DNA, 26 bp, Artificial sequence
  SiRNA target sequence
acaaggcagtaattgaaaaaaatggt

SEQ ID NO: 123998 - DNA, 26 bp, Artificial sequence
  SiRNA target sequence
caaggcagtaattgaaaaaaatggtg

SEQ ID NO: 123999 - DNA, 26 bp, Artificial sequence
  SiRNA target sequence
aaggcagtaattgaaaaaaatggtgt

SEQ ID NO: 124000 - DNA, 26 bp, Artificial sequence
  SiRNA target sequence
aggcagtaattgaaaaaaatggtgtt

SEQ ID NO: 124001 - DNA, 26 bp, Artificial sequence
  SiRNA target sequence
ggcagtaattgaaaaaaatggtgttg

SEQ ID NO: 124002 - DNA, 26 bp, Artificial sequence
  SiRNA target sequence
gcagtaattgaaaaaaatggtgttga

SEQ ID NO: 124003 - DNA, 26 bp, Artificial sequence
  SiRNA target sequence
cagtaattgaaaaaaatggtgttgac

SEQ ID NO: 124004 - DNA, 26 bp, Artificial sequence
  SiRNA target sequence
agtaattgaaaaaaatggtgttgacg

SEQ ID NO: 124005 - DNA, 26 bp, Artificial sequence
  SiRNA target sequence
gtaattgaaaaaaatggtgttgacgt

SEQ ID NO: 124006 - DNA, 26 bp, Artificial sequence
  SiRNA target sequence
taattgaaaaaaatggtgttgacgtt

SEQ ID NO: 124007 - DNA, 26 bp, Artificial sequence
  SiRNA target sequence
aattgaaaaaaatggtgttgacgtta

SEQ ID NO: 124008 - DNA, 26 bp, Artificial sequence
  SiRNA target sequence
attgaaaaaaatggtgttgacgttac

SEQ ID NO: 124009 - DNA, 26 bp, Artificial sequence
  SiRNA target sequence
ttgaaaaaaatggtgttgacgttaca

SEQ ID NO: 124010 - DNA, 26 bp, Artificial sequence
  SiRNA target sequence
tgaaaaaaatggtgttgacgttacag

SEQ ID NO: 124011 - DNA, 26 bp, Artificial sequence
  SiRNA target sequence
gaaaaaaatggtgttgacgttacagt

SEQ ID NO: 124012 - DNA, 26 bp, Artificial sequence
  SiRNA target sequence
aaaaaaatggtgttgacgttacagtt

SEQ ID NO: 124013 - DNA, 26 bp, Artificial sequence
  SiRNA target sequence
aaaaaatggtgttgacgttacagttt

SEQ ID NO: 124014 - DNA, 26 bp, Artificial sequence
  SiRNA target sequence
aaaaatggtgttgacgttacagtttt

SEQ ID NO: 124015 - DNA, 26 bp, Artificial sequence
  SiRNA target sequence
aaaatggtgttgacgttacagtttta

SEQ ID NO: 124016 - DNA, 26 bp, Artificial sequence
  SiRNA target sequence
aaatggtgttgacgttacagttttag

SEQ ID NO: 124017 - DNA, 26 bp, Artificial sequence
  SiRNA target sequence
aatggtgttgacgttacagttttagg

SEQ ID NO: 124018 - DNA, 26 bp, Artificial sequence
  SiRNA target sequence
atggtgttgacgttacagttttagga

SEQ ID NO: 124019 - DNA, 26 bp, Artificial sequence
  SiRNA target sequence
tggtgttgacgttacagttttaggaa

SEQ ID NO: 124020 - DNA, 26 bp, Artificial sequence
  SiRNA target sequence
ggtgttgacgttacagttttaggaat

SEQ ID NO: 124021 - DNA, 26 bp, Artificial sequence
  SiRNA target sequence
gtgttgacgttacagttttaggaata

SEQ ID NO: 124022 - DNA, 26 bp, Artificial sequence
  SiRNA target sequence
tgttgacgttacagttttaggaatat

SEQ ID NO: 124023 - DNA, 26 bp, Artificial sequence
  SiRNA target sequence
gttgacgttacagttttaggaatatc

SEQ ID NO: 124024 - DNA, 26 bp, Artificial sequence
  SiRNA target sequence
ttgacgttacagttttaggaatatca

SEQ ID NO: 124025 - DNA, 26 bp, Artificial sequence
  SiRNA target sequence
tgacgttacagttttaggaatatcaa

SEQ ID NO: 124026 - DNA, 26 bp, Artificial sequence
  SiRNA target sequence
gacgttacagttttaggaatatcaat

SEQ ID NO: 124027 - DNA, 26 bp, Artificial sequence
  SiRNA target sequence
acgttacagttttaggaatatcaata

SEQ ID NO: 124028 - DNA, 26 bp, Artificial sequence
  SiRNA target sequence
cgttacagttttaggaatatcaataa

SEQ ID NO: 124029 - DNA, 26 bp, Artificial sequence
  SiRNA target sequence
gttacagttttaggaatatcaataag

SEQ ID NO: 124030 - DNA, 26 bp, Artificial sequence
  SiRNA target sequence
ttacagttttaggaatatcaataagt

SEQ ID NO: 124031 - DNA, 26 bp, Artificial sequence
  SiRNA target sequence
tacagttttaggaatatcaataagtc

SEQ ID NO: 124032 - DNA, 26 bp, Artificial sequence
  SiRNA target sequence
acagttttaggaatatcaataagtct

SEQ ID NO: 124033 - DNA, 26 bp, Artificial sequence
  SiRNA target sequence
cagttttaggaatatcaataagtctt

SEQ ID NO: 124034 - DNA, 26 bp, Artificial sequence
  SiRNA target sequence
agttttaggaatatcaataagtctta

SEQ ID NO: 124035 - DNA, 26 bp, Artificial sequence
  SiRNA target sequence
gttttaggaatatcaataagtcttaa

SEQ ID NO: 124036 - DNA, 26 bp, Artificial sequence
  SiRNA target sequence
ttttaggaatatcaataagtcttaaa

SEQ ID NO: 124037 - DNA, 26 bp, Artificial sequence
  SiRNA target sequence
tttaggaatatcaataagtcttaaag

SEQ ID NO: 124038 - DNA, 26 bp, Artificial sequence
  SiRNA target sequence
ttaggaatatcaataagtcttaaaga

SEQ ID NO: 124039 - DNA, 26 bp, Artificial sequence
  SiRNA target sequence
taggaatatcaataagtcttaaagaa

SEQ ID NO: 124040 - DNA, 26 bp, Artificial sequence
  SiRNA target sequence
aggaatatcaataagtcttaaagaaa

SEQ ID NO: 124041 - DNA, 26 bp, Artificial sequence
  SiRNA target sequence
ggaatatcaataagtcttaaagaaat

SEQ ID NO: 124042 - DNA, 26 bp, Artificial sequence
  SiRNA target sequence
gaatatcaataagtcttaaagaaatt

SEQ ID NO: 124043 - DNA, 26 bp, Artificial sequence
  SiRNA target sequence
aatatcaataagtcttaaagaaattt

SEQ ID NO: 124044 - DNA, 26 bp, Artificial sequence
  SiRNA target sequence
atatcaataagtcttaaagaaatttt

SEQ ID NO: 124045 - DNA, 26 bp, Artificial sequence
  SiRNA target sequence
tatcaataagtcttaaagaaattttt

SEQ ID NO: 124046 - DNA, 26 bp, Artificial sequence
  SiRNA target sequence
atcaataagtcttaaagaaattttta

SEQ ID NO: 124047 - DNA, 26 bp, Artificial sequence
  SiRNA target sequence
tcaataagtcttaaagaaatttttaa

SEQ ID NO: 124048 - DNA, 26 bp, Artificial sequence
  SiRNA target sequence
caataagtcttaaagaaatttttaaa

SEQ ID NO: 124049 - DNA, 26 bp, Artificial sequence
  SiRNA target sequence
aataagtcttaaagaaatttttaaag

SEQ ID NO: 124050 - DNA, 26 bp, Artificial sequence
  SiRNA target sequence
ataagtcttaaagaaatttttaaagc

SEQ ID NO: 124051 - DNA, 26 bp, Artificial sequence
  SiRNA target sequence
taagtcttaaagaaatttttaaagca

SEQ ID NO: 124052 - DNA, 26 bp, Artificial sequence
  SiRNA target sequence
aagtcttaaagaaatttttaaagcag

SEQ ID NO: 124053 - DNA, 26 bp, Artificial sequence
  SiRNA target sequence
agtcttaaagaaatttttaaagcaga

SEQ ID NO: 124054 - DNA, 26 bp, Artificial sequence
  SiRNA target sequence
gtcttaaagaaatttttaaagcagac

SEQ ID NO: 124055 - DNA, 26 bp, Artificial sequence
  SiRNA target sequence
tcttaaagaaatttttaaagcagaca

SEQ ID NO: 124056 - DNA, 26 bp, Artificial sequence
  SiRNA target sequence
cttaaagaaatttttaaagcagacag

SEQ ID NO: 124057 - DNA, 26 bp, Artificial sequence
  SiRNA target sequence
ttaaagaaatttttaaagcagacagt

SEQ ID NO: 124058 - DNA, 26 bp, Artificial sequence
  SiRNA target sequence
taaagaaatttttaaagcagacagtt

SEQ ID NO: 124059 - DNA, 26 bp, Artificial sequence
  SiRNA target sequence
aaagaaatttttaaagcagacagttt

SEQ ID NO: 124060 - DNA, 26 bp, Artificial sequence
  SiRNA target sequence
aagaaatttttaaagcagacagtttg

SEQ ID NO: 124061 - DNA, 26 bp, Artificial sequence
  SiRNA target sequence
agaaatttttaaagcagacagtttgt

SEQ ID NO: 124062 - DNA, 26 bp, Artificial sequence
  SiRNA target sequence
gaaatttttaaagcagacagtttgtt

SEQ ID NO: 124063 - DNA, 26 bp, Artificial sequence
  SiRNA target sequence
aaatttttaaagcagacagtttgtta

SEQ ID NO: 124064 - DNA, 26 bp, Artificial sequence
  SiRNA target sequence
aatttttaaagcagacagtttgttag

SEQ ID NO: 124065 - DNA, 26 bp, Artificial sequence
  SiRNA target sequence
atttttaaagcagacagtttgttaga

SEQ ID NO: 124066 - DNA, 26 bp, Artificial sequence
  SiRNA target sequence
tttttaaagcagacagtttgttagag

SEQ ID NO: 124067 - DNA, 26 bp, Artificial sequence
  SiRNA target sequence
ttttaaagcagacagtttgttagaga

SEQ ID NO: 124068 - DNA, 26 bp, Artificial sequence
  SiRNA target sequence
tttaaagcagacagtttgttagagaa

SEQ ID NO: 124069 - DNA, 26 bp, Artificial sequence
  SiRNA target sequence
ttaaagcagacagtttgttagagaaa

SEQ ID NO: 124070 - DNA, 26 bp, Artificial sequence
  SiRNA target sequence
taaagcagacagtttgttagagaaaa

SEQ ID NO: 124071 - DNA, 26 bp, Artificial sequence
  SiRNA target sequence
aaagcagacagtttgttagagaaaaa

SEQ ID NO: 124072 - DNA, 26 bp, Artificial sequence
  SiRNA target sequence
aagcagacagtttgttagagaaaaaa

SEQ ID NO: 124073 - DNA, 26 bp, Artificial sequence
  SiRNA target sequence
agcagacagtttgttagagaaaaaaa

SEQ ID NO: 124074 - DNA, 26 bp, Artificial sequence
  SiRNA target sequence
gcagacagtttgttagagaaaaaaaa

SEQ ID NO: 124075 - DNA, 26 bp, Artificial sequence
  SiRNA target sequence
cagacagtttgttagagaaaaaaaat

SEQ ID NO: 124076 - DNA, 26 bp, Artificial sequence
  SiRNA target sequence
agacagtttgttagagaaaaaaaata

SEQ ID NO: 124077 - DNA, 26 bp, Artificial sequence
  SiRNA target sequence
gacagtttgttagagaaaaaaaatat

SEQ ID NO: 124078 - DNA, 26 bp, Artificial sequence
  SiRNA target sequence
acagtttgttagagaaaaaaaatatc

SEQ ID NO: 124079 - DNA, 26 bp, Artificial sequence
  SiRNA target sequence
cagtttgttagagaaaaaaaatatcg

SEQ ID NO: 124080 - DNA, 26 bp, Artificial sequence
  SiRNA target sequence
agtttgttagagaaaaaaaatatcga

SEQ ID NO: 124081 - DNA, 26 bp, Artificial sequence
  SiRNA target sequence
gtttgttagagaaaaaaaatatcgac

SEQ ID NO: 124082 - DNA, 26 bp, Artificial sequence
  SiRNA target sequence
tttgttagagaaaaaaaatatcgaca

SEQ ID NO: 124083 - DNA, 26 bp, Artificial sequence
  SiRNA target sequence
ttgttagagaaaaaaaatatcgacat

SEQ ID NO: 124084 - DNA, 26 bp, Artificial sequence
  SiRNA target sequence
tgttagagaaaaaaaatatcgacatt

SEQ ID NO: 124085 - DNA, 26 bp, Artificial sequence
  SiRNA target sequence
gttagagaaaaaaaatatcgacattg

SEQ ID NO: 124086 - DNA, 26 bp, Artificial sequence
  SiRNA target sequence
ttagagaaaaaaaatatcgacattga

SEQ ID NO: 124087 - DNA, 26 bp, Artificial sequence
  SiRNA target sequence
tagagaaaaaaaatatcgacattgag

SEQ ID NO: 124088 - DNA, 26 bp, Artificial sequence
  SiRNA target sequence
agagaaaaaaaatatcgacattgaga

SEQ ID NO: 124089 - DNA, 26 bp, Artificial sequence
  SiRNA target sequence
gagaaaaaaaatatcgacattgagat

SEQ ID NO: 124090 - DNA, 26 bp, Artificial sequence
  SiRNA target sequence
agaaaaaaaatatcgacattgagata

SEQ ID NO: 124091 - DNA, 26 bp, Artificial sequence
  SiRNA target sequence
gaaaaaaaatatcgacattgagataa

SEQ ID NO: 124092 - DNA, 26 bp, Artificial sequence
  SiRNA target sequence
aaaaaaaatatcgacattgagataat

SEQ ID NO: 124093 - DNA, 26 bp, Artificial sequence
  SiRNA target sequence
aaaaaaatatcgacattgagataatt

SEQ ID NO: 124094 - DNA, 26 bp, Artificial sequence
  SiRNA target sequence
aaaaaatatcgacattgagataatta

SEQ ID NO: 124095 - DNA, 26 bp, Artificial sequence
  SiRNA target sequence
aaaaatatcgacattgagataattaa

SEQ ID NO: 124096 - DNA, 26 bp, Artificial sequence
  SiRNA target sequence
aaaatatcgacattgagataattaat

SEQ ID NO: 124097 - DNA, 26 bp, Artificial sequence
  SiRNA target sequence
aaatatcgacattgagataattaatc

SEQ ID NO: 124098 - DNA, 26 bp, Artificial sequence
  SiRNA target sequence
aatatcgacattgagataattaatct

SEQ ID NO: 124099 - DNA, 26 bp, Artificial sequence
  SiRNA target sequence
atatcgacattgagataattaatctt

SEQ ID NO: 124100 - DNA, 26 bp, Artificial sequence
  SiRNA target sequence
tatcgacattgagataattaatcttg

SEQ ID NO: 124101 - DNA, 26 bp, Artificial sequence
  SiRNA target sequence
atcgacattgagataattaatcttgt

SEQ ID NO: 124102 - DNA, 26 bp, Artificial sequence
  SiRNA target sequence
tcgacattgagataattaatcttgtg

SEQ ID NO: 124103 - DNA, 26 bp, Artificial sequence
  SiRNA target sequence
cgacattgagataattaatcttgtgt

SEQ ID NO: 124104 - DNA, 26 bp, Artificial sequence
  SiRNA target sequence
gacattgagataattaatcttgtgtc

SEQ ID NO: 124105 - DNA, 26 bp, Artificial sequence
  SiRNA target sequence
acattgagataattaatcttgtgtca

SEQ ID NO: 124106 - DNA, 26 bp, Artificial sequence
  SiRNA target sequence
cattgagataattaatcttgtgtcaa

SEQ ID NO: 124107 - DNA, 26 bp, Artificial sequence
  SiRNA target sequence
attgagataattaatcttgtgtcaat

SEQ ID NO: 124108 - DNA, 26 bp, Artificial sequence
  SiRNA target sequence
ttgagataattaatcttgtgtcaata

SEQ ID NO: 124109 - DNA, 26 bp, Artificial sequence
  SiRNA target sequence
tgagataattaatcttgtgtcaataa

SEQ ID NO: 124110 - DNA, 26 bp, Artificial sequence
  SiRNA target sequence
gagataattaatcttgtgtcaataaa

SEQ ID NO: 124111 - DNA, 26 bp, Artificial sequence
  SiRNA target sequence
agataattaatcttgtgtcaataaaa

SEQ ID NO: 124112 - DNA, 26 bp, Artificial sequence
  SiRNA target sequence
gataattaatcttgtgtcaataaaac

SEQ ID NO: 124113 - DNA, 26 bp, Artificial sequence
  SiRNA target sequence
ataattaatcttgtgtcaataaaacc

SEQ ID NO: 124114 - DNA, 26 bp, Artificial sequence
  SiRNA target sequence
taattaatcttgtgtcaataaaacca

SEQ ID NO: 124115 - DNA, 26 bp, Artificial sequence
  SiRNA target sequence
aattaatcttgtgtcaataaaaccaa

SEQ ID NO: 124116 - DNA, 26 bp, Artificial sequence
  SiRNA target sequence
attaatcttgtgtcaataaaaccaat

SEQ ID NO: 124117 - DNA, 26 bp, Artificial sequence
  SiRNA target sequence
ttaatcttgtgtcaataaaaccaatt

SEQ ID NO: 124118 - DNA, 26 bp, Artificial sequence
  SiRNA target sequence
taatcttgtgtcaataaaaccaattg

SEQ ID NO: 124119 - DNA, 26 bp, Artificial sequence
  SiRNA target sequence
aatcttgtgtcaataaaaccaattga

SEQ ID NO: 124120 - DNA, 26 bp, Artificial sequence
  SiRNA target sequence
atcttgtgtcaataaaaccaattgat

SEQ ID NO: 124121 - DNA, 26 bp, Artificial sequence
  SiRNA target sequence
tcttgtgtcaataaaaccaattgatt

SEQ ID NO: 124122 - DNA, 26 bp, Artificial sequence
  SiRNA target sequence
cttgtgtcaataaaaccaattgatta

SEQ ID NO: 124123 - DNA, 26 bp, Artificial sequence
  SiRNA target sequence
ttgtgtcaataaaaccaattgattat

SEQ ID NO: 124124 - DNA, 26 bp, Artificial sequence
  SiRNA target sequence
tgtgtcaataaaaccaattgattatg

SEQ ID NO: 124125 - DNA, 26 bp, Artificial sequence
  SiRNA target sequence
gtgtcaataaaaccaattgattatgt

SEQ ID NO: 124126 - DNA, 26 bp, Artificial sequence
  SiRNA target sequence
tgtcaataaaaccaattgattatgtt

SEQ ID NO: 124127 - DNA, 26 bp, Artificial sequence
  SiRNA target sequence
gtcaataaaaccaattgattatgtta

SEQ ID NO: 124128 - DNA, 26 bp, Artificial sequence
  SiRNA target sequence
tcaataaaaccaattgattatgttac

SEQ ID NO: 124129 - DNA, 26 bp, Artificial sequence
  SiRNA target sequence
caataaaaccaattgattatgttact

SEQ ID NO: 124130 - DNA, 26 bp, Artificial sequence
  SiRNA target sequence
aataaaaccaattgattatgttacta

SEQ ID NO: 124131 - DNA, 26 bp, Artificial sequence
  SiRNA target sequence
ataaaaccaattgattatgttactat

SEQ ID NO: 124132 - DNA, 26 bp, Artificial sequence
  SiRNA target sequence
taaaaccaattgattatgttactatt

SEQ ID NO: 124133 - DNA, 26 bp, Artificial sequence
  SiRNA target sequence
aaaaccaattgattatgttactattg

SEQ ID NO: 124134 - DNA, 26 bp, Artificial sequence
  SiRNA target sequence
aaaccaattgattatgttactattga

SEQ ID NO: 124135 - DNA, 26 bp, Artificial sequence
  SiRNA target sequence
aaccaattgattatgttactattgaa

SEQ ID NO: 124136 - DNA, 26 bp, Artificial sequence
  SiRNA target sequence
accaattgattatgttactattgaaa

SEQ ID NO: 124137 - DNA, 26 bp, Artificial sequence
  SiRNA target sequence
ccaattgattatgttactattgaaat

SEQ ID NO: 124138 - DNA, 26 bp, Artificial sequence
  SiRNA target sequence
caattgattatgttactattgaaata

SEQ ID NO: 124139 - DNA, 26 bp, Artificial sequence
  SiRNA target sequence
aattgattatgttactattgaaatat

SEQ ID NO: 124140 - DNA, 26 bp, Artificial sequence
  SiRNA target sequence
attgattatgttactattgaaatatc

SEQ ID NO: 124141 - DNA, 26 bp, Artificial sequence
  SiRNA target sequence
ttgattatgttactattgaaatatca

SEQ ID NO: 124142 - DNA, 26 bp, Artificial sequence
  SiRNA target sequence
tgattatgttactattgaaatatcag

SEQ ID NO: 124143 - DNA, 26 bp, Artificial sequence
  SiRNA target sequence
gattatgttactattgaaatatcagt

SEQ ID NO: 124144 - DNA, 26 bp, Artificial sequence
  SiRNA target sequence
attatgttactattgaaatatcagtc

SEQ ID NO: 124145 - DNA, 26 bp, Artificial sequence
  SiRNA target sequence
ttatgttactattgaaatatcagtca

SEQ ID NO: 124146 - DNA, 26 bp, Artificial sequence
  SiRNA target sequence
tatgttactattgaaatatcagtcaa

SEQ ID NO: 124147 - DNA, 26 bp, Artificial sequence
  SiRNA target sequence
atgttactattgaaatatcagtcaaa

SEQ ID NO: 124148 - DNA, 26 bp, Artificial sequence
  SiRNA target sequence
tgttactattgaaatatcagtcaaaa

SEQ ID NO: 124149 - DNA, 26 bp, Artificial sequence
  SiRNA target sequence
gttactattgaaatatcagtcaaaaa

SEQ ID NO: 124150 - DNA, 26 bp, Artificial sequence
  SiRNA target sequence
ttactattgaaatatcagtcaaaaaa

SEQ ID NO: 124151 - DNA, 26 bp, Artificial sequence
  SiRNA target sequence
tactattgaaatatcagtcaaaaaaa

SEQ ID NO: 124152 - DNA, 26 bp, Artificial sequence
  SiRNA target sequence
actattgaaatatcagtcaaaaaaac

SEQ ID NO: 124153 - DNA, 26 bp, Artificial sequence
  SiRNA target sequence
ctattgaaatatcagtcaaaaaaaca

SEQ ID NO: 124154 - DNA, 26 bp, Artificial sequence
  SiRNA target sequence
tattgaaatatcagtcaaaaaaacac

SEQ ID NO: 124155 - DNA, 26 bp, Artificial sequence
  SiRNA target sequence
attgaaatatcagtcaaaaaaacaca

SEQ ID NO: 124156 - DNA, 26 bp, Artificial sequence
  SiRNA target sequence
ttgaaatatcagtcaaaaaaacacaa

SEQ ID NO: 124157 - DNA, 26 bp, Artificial sequence
  SiRNA target sequence
tgaaatatcagtcaaaaaaacacaaa

SEQ ID NO: 124158 - DNA, 26 bp, Artificial sequence
  SiRNA target sequence
gaaatatcagtcaaaaaaacacaaaa

SEQ ID NO: 124159 - DNA, 26 bp, Artificial sequence
  SiRNA target sequence
aaatatcagtcaaaaaaacacaaaag

SEQ ID NO: 124160 - DNA, 26 bp, Artificial sequence
  SiRNA target sequence
aatatcagtcaaaaaaacacaaaagt

SEQ ID NO: 124161 - DNA, 26 bp, Artificial sequence
  SiRNA target sequence
atatcagtcaaaaaaacacaaaagtt

SEQ ID NO: 124162 - DNA, 26 bp, Artificial sequence
  SiRNA target sequence
tatcagtcaaaaaaacacaaaagtta

SEQ ID NO: 124163 - DNA, 26 bp, Artificial sequence
  SiRNA target sequence
atcagtcaaaaaaacacaaaagttag

SEQ ID NO: 124164 - DNA, 26 bp, Artificial sequence
  SiRNA target sequence
tcagtcaaaaaaacacaaaagttagt

SEQ ID NO: 124165 - DNA, 26 bp, Artificial sequence
  SiRNA target sequence
cagtcaaaaaaacacaaaagttagtg

SEQ ID NO: 124166 - DNA, 26 bp, Artificial sequence
  SiRNA target sequence
agtcaaaaaaacacaaaagttagtga

SEQ ID NO: 124167 - DNA, 26 bp, Artificial sequence
  SiRNA target sequence
gtcaaaaaaacacaaaagttagtgat

SEQ ID NO: 124168 - DNA, 26 bp, Artificial sequence
  SiRNA target sequence
tcaaaaaaacacaaaagttagtgata

SEQ ID NO: 124169 - DNA, 26 bp, Artificial sequence
  SiRNA target sequence
caaaaaaacacaaaagttagtgatag

SEQ ID NO: 124170 - DNA, 26 bp, Artificial sequence
  SiRNA target sequence
aaaaaaacacaaaagttagtgatagt

SEQ ID NO: 124171 - DNA, 26 bp, Artificial sequence
  SiRNA target sequence
aaaaaacacaaaagttagtgatagtt

SEQ ID NO: 124172 - DNA, 26 bp, Artificial sequence
  SiRNA target sequence
aaaaacacaaaagttagtgatagttg

SEQ ID NO: 124173 - DNA, 26 bp, Artificial sequence
  SiRNA target sequence
aaaacacaaaagttagtgatagttga

SEQ ID NO: 124174 - DNA, 26 bp, Artificial sequence
  SiRNA target sequence
aaacacaaaagttagtgatagttgat

SEQ ID NO: 124175 - DNA, 26 bp, Artificial sequence
  SiRNA target sequence
aacacaaaagttagtgatagttgatt

SEQ ID NO: 124176 - DNA, 26 bp, Artificial sequence
  SiRNA target sequence
acacaaaagttagtgatagttgattt

SEQ ID NO: 124177 - DNA, 26 bp, Artificial sequence
  SiRNA target sequence
cacaaaagttagtgatagttgatttt

SEQ ID NO: 124178 - DNA, 26 bp, Artificial sequence
  SiRNA target sequence
acaaaagttagtgatagttgattttg

SEQ ID NO: 124179 - DNA, 26 bp, Artificial sequence
  SiRNA target sequence
caaaagttagtgatagttgattttgc

SEQ ID NO: 124180 - DNA, 26 bp, Artificial sequence
  SiRNA target sequence
aaaagttagtgatagttgattttgca

SEQ ID NO: 124181 - DNA, 26 bp, Artificial sequence
  SiRNA target sequence
aaagttagtgatagttgattttgcat

SEQ ID NO: 124182 - DNA, 26 bp, Artificial sequence
  SiRNA target sequence
aagttagtgatagttgattttgcata

SEQ ID NO: 124183 - DNA, 26 bp, Artificial sequence
  SiRNA target sequence
agttagtgatagttgattttgcatat

SEQ ID NO: 124184 - DNA, 26 bp, Artificial sequence
  SiRNA target sequence
gttagtgatagttgattttgcatatc

SEQ ID NO: 124185 - DNA, 26 bp, Artificial sequence
  SiRNA target sequence
ttagtgatagttgattttgcatatcc

SEQ ID NO: 124186 - DNA, 26 bp, Artificial sequence
  SiRNA target sequence
tagtgatagttgattttgcatatcct

SEQ ID NO: 124187 - DNA, 26 bp, Artificial sequence
  SiRNA target sequence
agtgatagttgattttgcatatccta

SEQ ID NO: 124188 - DNA, 26 bp, Artificial sequence
  SiRNA target sequence
gtgatagttgattttgcatatcctac

SEQ ID NO: 124189 - DNA, 26 bp, Artificial sequence
  SiRNA target sequence
tgatagttgattttgcatatcctact

SEQ ID NO: 124190 - DNA, 26 bp, Artificial sequence
  SiRNA target sequence
gatagttgattttgcatatcctactt

SEQ ID NO: 124191 - DNA, 26 bp, Artificial sequence
  SiRNA target sequence
atagttgattttgcatatcctacttt

SEQ ID NO: 124192 - DNA, 26 bp, Artificial sequence
  SiRNA target sequence
tagttgattttgcatatcctactttc

SEQ ID NO: 124193 - DNA, 26 bp, Artificial sequence
  SiRNA target sequence
agttgattttgcatatcctactttca

SEQ ID NO: 124194 - DNA, 26 bp, Artificial sequence
  SiRNA target sequence
gttgattttgcatatcctactttcaa

SEQ ID NO: 124195 - DNA, 26 bp, Artificial sequence
  SiRNA target sequence
ttgattttgcatatcctactttcaat

SEQ ID NO: 124196 - DNA, 26 bp, Artificial sequence
  SiRNA target sequence
tgattttgcatatcctactttcaata

SEQ ID NO: 124197 - DNA, 26 bp, Artificial sequence
  SiRNA target sequence
gattttgcatatcctactttcaatat

SEQ ID NO: 124198 - DNA, 26 bp, Artificial sequence
  SiRNA target sequence
attttgcatatcctactttcaatatt

SEQ ID NO: 124199 - DNA, 26 bp, Artificial sequence
  SiRNA target sequence
ttttgcatatcctactttcaatattg

SEQ ID NO: 124200 - DNA, 26 bp, Artificial sequence
  SiRNA target sequence
tttgcatatcctactttcaatattgc

SEQ ID NO: 124201 - DNA, 26 bp, Artificial sequence
  SiRNA target sequence
ttgcatatcctactttcaatattgcg

SEQ ID NO: 124202 - DNA, 26 bp, Artificial sequence
  SiRNA target sequence
tgcatatcctactttcaatattgcga

SEQ ID NO: 124203 - DNA, 26 bp, Artificial sequence
  SiRNA target sequence
gcatatcctactttcaatattgcgag

SEQ ID NO: 124204 - DNA, 26 bp, Artificial sequence
  SiRNA target sequence
catatcctactttcaatattgcgagt

SEQ ID NO: 124205 - DNA, 26 bp, Artificial sequence
  SiRNA target sequence
atatcctactttcaatattgcgagtg

SEQ ID NO: 124206 - DNA, 26 bp, Artificial sequence
  SiRNA target sequence
tatcctactttcaatattgcgagtga

SEQ ID NO: 124207 - DNA, 26 bp, Artificial sequence
  SiRNA target sequence
atcctactttcaatattgcgagtgaa

SEQ ID NO: 124208 - DNA, 26 bp, Artificial sequence
  SiRNA target sequence
tcctactttcaatattgcgagtgaaa

SEQ ID NO: 124209 - DNA, 26 bp, Artificial sequence
  SiRNA target sequence
cctactttcaatattgcgagtgaaat

SEQ ID NO: 124210 - DNA, 26 bp, Artificial sequence
  SiRNA target sequence
ctactttcaatattgcgagtgaaata

SEQ ID NO: 124211 - DNA, 26 bp, Artificial sequence
  SiRNA target sequence
tactttcaatattgcgagtgaaatag

SEQ ID NO: 124212 - DNA, 26 bp, Artificial sequence
  SiRNA target sequence
actttcaatattgcgagtgaaatagc

SEQ ID NO: 124213 - DNA, 26 bp, Artificial sequence
  SiRNA target sequence
ctttcaatattgcgagtgaaatagct

SEQ ID NO: 124214 - DNA, 26 bp, Artificial sequence
  SiRNA target sequence
tttcaatattgcgagtgaaatagctg

SEQ ID NO: 124215 - DNA, 26 bp, Artificial sequence
  SiRNA target sequence
ttcaatattgcgagtgaaatagctgc

SEQ ID NO: 124216 - DNA, 26 bp, Artificial sequence
  SiRNA target sequence
tcaatattgcgagtgaaatagctgcg

SEQ ID NO: 124217 - DNA, 26 bp, Artificial sequence
  SiRNA target sequence
caatattgcgagtgaaatagctgcgc

SEQ ID NO: 124218 - DNA, 26 bp, Artificial sequence
  SiRNA target sequence
aatattgcgagtgaaatagctgcgca

SEQ ID NO: 124219 - DNA, 26 bp, Artificial sequence
  SiRNA target sequence
atattgcgagtgaaatagctgcgcac

SEQ ID NO: 124220 - DNA, 26 bp, Artificial sequence
  SiRNA target sequence
tattgcgagtgaaatagctgcgcact

SEQ ID NO: 124221 - DNA, 26 bp, Artificial sequence
  SiRNA target sequence
attgcgagtgaaatagctgcgcactt

SEQ ID NO: 124222 - DNA, 26 bp, Artificial sequence
  SiRNA target sequence
ttgcgagtgaaatagctgcgcacttt

SEQ ID NO: 124223 - DNA, 26 bp, Artificial sequence
  SiRNA target sequence
tgcgagtgaaatagctgcgcactttt

SEQ ID NO: 124224 - DNA, 26 bp, Artificial sequence
  SiRNA target sequence
gcgagtgaaatagctgcgcactttta

SEQ ID NO: 124225 - DNA, 26 bp, Artificial sequence
  SiRNA target sequence
cgagtgaaatagctgcgcacttttac

SEQ ID NO: 124226 - DNA, 26 bp, Artificial sequence
  SiRNA target sequence
gagtgaaatagctgcgcacttttacg

SEQ ID NO: 124227 - DNA, 26 bp, Artificial sequence
  SiRNA target sequence
agtgaaatagctgcgcacttttacga

SEQ ID NO: 124228 - DNA, 26 bp, Artificial sequence
  SiRNA target sequence
gtgaaatagctgcgcacttttacgaa

SEQ ID NO: 124229 - DNA, 26 bp, Artificial sequence
  SiRNA target sequence
tgaaatagctgcgcacttttacgaaa

SEQ ID NO: 124230 - DNA, 26 bp, Artificial sequence
  SiRNA target sequence
gaaatagctgcgcacttttacgaaaa

SEQ ID NO: 124231 - DNA, 26 bp, Artificial sequence
  SiRNA target sequence
aaatagctgcgcacttttacgaaaaa

SEQ ID NO: 124232 - DNA, 26 bp, Artificial sequence
  SiRNA target sequence
aatagctgcgcacttttacgaaaaat

SEQ ID NO: 124233 - DNA, 26 bp, Artificial sequence
  SiRNA target sequence
atagctgcgcacttttacgaaaaatt

SEQ ID NO: 124234 - DNA, 26 bp, Artificial sequence
  SiRNA target sequence
tagctgcgcacttttacgaaaaattt

SEQ ID NO: 124235 - DNA, 26 bp, Artificial sequence
  SiRNA target sequence
agctgcgcacttttacgaaaaattta

SEQ ID NO: 124236 - DNA, 26 bp, Artificial sequence
  SiRNA target sequence
gctgcgcacttttacgaaaaatttaa

SEQ ID NO: 124237 - DNA, 26 bp, Artificial sequence
  SiRNA target sequence
ctgcgcacttttacgaaaaatttaaa

SEQ ID NO: 124238 - DNA, 26 bp, Artificial sequence
  SiRNA target sequence
tgcgcacttttacgaaaaatttaaag

SEQ ID NO: 124239 - DNA, 26 bp, Artificial sequence
  SiRNA target sequence
gcgcacttttacgaaaaatttaaaga

SEQ ID NO: 124240 - DNA, 26 bp, Artificial sequence
  SiRNA target sequence
cgcacttttacgaaaaatttaaagat

SEQ ID NO: 124241 - DNA, 26 bp, Artificial sequence
  SiRNA target sequence
gcacttttacgaaaaatttaaagata

SEQ ID NO: 124242 - DNA, 26 bp, Artificial sequence
  SiRNA target sequence
cacttttacgaaaaatttaaagatat

SEQ ID NO: 124243 - DNA, 26 bp, Artificial sequence
  SiRNA target sequence
acttttacgaaaaatttaaagatata

SEQ ID NO: 124244 - DNA, 26 bp, Artificial sequence
  SiRNA target sequence
cttttacgaaaaatttaaagatataa

SEQ ID NO: 124245 - DNA, 26 bp, Artificial sequence
  SiRNA target sequence
ttttacgaaaaatttaaagatataaa

SEQ ID NO: 124246 - DNA, 26 bp, Artificial sequence
  SiRNA target sequence
tttacgaaaaatttaaagatataaaa

SEQ ID NO: 124247 - DNA, 26 bp, Artificial sequence
  SiRNA target sequence
ttacgaaaaatttaaagatataaaaa

SEQ ID NO: 124248 - DNA, 26 bp, Artificial sequence
  SiRNA target sequence
tacgaaaaatttaaagatataaaaat

SEQ ID NO: 124249 - DNA, 26 bp, Artificial sequence
  SiRNA target sequence
acgaaaaatttaaagatataaaaatt

SEQ ID NO: 124250 - DNA, 26 bp, Artificial sequence
  SiRNA target sequence
cgaaaaatttaaagatataaaaatta

SEQ ID NO: 124251 - DNA, 26 bp, Artificial sequence
  SiRNA target sequence
gaaaaatttaaagatataaaaattat

SEQ ID NO: 124252 - DNA, 26 bp, Artificial sequence
  SiRNA target sequence
aaaaatttaaagatataaaaattatg

SEQ ID NO: 124253 - DNA, 26 bp, Artificial sequence
  SiRNA target sequence
aaaatttaaagatataaaaattatgc

SEQ ID NO: 124254 - DNA, 26 bp, Artificial sequence
  SiRNA target sequence
aaatttaaagatataaaaattatgcg

SEQ ID NO: 124255 - DNA, 26 bp, Artificial sequence
  SiRNA target sequence
aatttaaagatataaaaattatgcgt

SEQ ID NO: 124256 - DNA, 26 bp, Artificial sequence
  SiRNA target sequence
atttaaagatataaaaattatgcgtg

SEQ ID NO: 124257 - DNA, 26 bp, Artificial sequence
  SiRNA target sequence
tttaaagatataaaaattatgcgtgt

SEQ ID NO: 124258 - DNA, 26 bp, Artificial sequence
  SiRNA target sequence
ttaaagatataaaaattatgcgtgtt

SEQ ID NO: 124259 - DNA, 26 bp, Artificial sequence
  SiRNA target sequence
taaagatataaaaattatgcgtgttc

SEQ ID NO: 124260 - DNA, 26 bp, Artificial sequence
  SiRNA target sequence
aaagatataaaaattatgcgtgttct

SEQ ID NO: 124261 - DNA, 26 bp, Artificial sequence
  SiRNA target sequence
aagatataaaaattatgcgtgttctt

SEQ ID NO: 124262 - DNA, 26 bp, Artificial sequence
  SiRNA target sequence
agatataaaaattatgcgtgttcttg

SEQ ID NO: 124263 - DNA, 26 bp, Artificial sequence
  SiRNA target sequence
gatataaaaattatgcgtgttcttgc

SEQ ID NO: 124264 - DNA, 26 bp, Artificial sequence
  SiRNA target sequence
atataaaaattatgcgtgttcttgcg

SEQ ID NO: 124265 - DNA, 26 bp, Artificial sequence
  SiRNA target sequence
tataaaaattatgcgtgttcttgcgc

SEQ ID NO: 124266 - DNA, 26 bp, Artificial sequence
  SiRNA target sequence
ataaaaattatgcgtgttcttgcgca

SEQ ID NO: 124267 - DNA, 26 bp, Artificial sequence
  SiRNA target sequence
taaaaattatgcgtgttcttgcgcaa

SEQ ID NO: 124268 - DNA, 26 bp, Artificial sequence
  SiRNA target sequence
aaaaattatgcgtgttcttgcgcaag

SEQ ID NO: 124269 - DNA, 26 bp, Artificial sequence
  SiRNA target sequence
aaaattatgcgtgttcttgcgcaaga

SEQ ID NO: 124270 - DNA, 26 bp, Artificial sequence
  SiRNA target sequence
aaattatgcgtgttcttgcgcaagat

SEQ ID NO: 124271 - DNA, 26 bp, Artificial sequence
  SiRNA target sequence
aattatgcgtgttcttgcgcaagata

SEQ ID NO: 124272 - DNA, 26 bp, Artificial sequence
  SiRNA target sequence
attatgcgtgttcttgcgcaagatat

SEQ ID NO: 124273 - DNA, 26 bp, Artificial sequence
  SiRNA target sequence
ttatgcgtgttcttgcgcaagatatt

SEQ ID NO: 124274 - DNA, 26 bp, Artificial sequence
  SiRNA target sequence
tatgcgtgttcttgcgcaagatattc

SEQ ID NO: 124275 - DNA, 26 bp, Artificial sequence
  SiRNA target sequence
atgcgtgttcttgcgcaagatattcc

SEQ ID NO: 124276 - DNA, 26 bp, Artificial sequence
  SiRNA target sequence
tgcgtgttcttgcgcaagatattcct

SEQ ID NO: 124277 - DNA, 26 bp, Artificial sequence
  SiRNA target sequence
gcgtgttcttgcgcaagatattccta

SEQ ID NO: 124278 - DNA, 26 bp, Artificial sequence
  SiRNA target sequence
cgtgttcttgcgcaagatattcctac

SEQ ID NO: 124279 - DNA, 26 bp, Artificial sequence
  SiRNA target sequence
gtgttcttgcgcaagatattcctaca

SEQ ID NO: 124280 - DNA, 26 bp, Artificial sequence
  SiRNA target sequence
tgttcttgcgcaagatattcctacac

SEQ ID NO: 124281 - DNA, 26 bp, Artificial sequence
  SiRNA target sequence
gttcttgcgcaagatattcctacacc

SEQ ID NO: 124282 - DNA, 26 bp, Artificial sequence
  SiRNA target sequence
ttcttgcgcaagatattcctacaccg

SEQ ID NO: 124283 - DNA, 26 bp, Artificial sequence
  SiRNA target sequence
tcttgcgcaagatattcctacaccgt

SEQ ID NO: 124284 - DNA, 26 bp, Artificial sequence
  SiRNA target sequence
cttgcgcaagatattcctacaccgta

SEQ ID NO: 124285 - DNA, 26 bp, Artificial sequence
  SiRNA target sequence
ttgcgcaagatattcctacaccgtat

SEQ ID NO: 124286 - DNA, 26 bp, Artificial sequence
  SiRNA target sequence
tgcgcaagatattcctacaccgtatg

SEQ ID NO: 124287 - DNA, 26 bp, Artificial sequence
  SiRNA target sequence
gcgcaagatattcctacaccgtatgc

SEQ ID NO: 124288 - DNA, 26 bp, Artificial sequence
  SiRNA target sequence
cgcaagatattcctacaccgtatgca

SEQ ID NO: 124289 - DNA, 26 bp, Artificial sequence
  SiRNA target sequence
gcaagatattcctacaccgtatgcac

SEQ ID NO: 124290 - DNA, 26 bp, Artificial sequence
  SiRNA target sequence
caagatattcctacaccgtatgcact

SEQ ID NO: 124291 - DNA, 26 bp, Artificial sequence
  SiRNA target sequence
aagatattcctacaccgtatgcactt

SEQ ID NO: 124292 - DNA, 26 bp, Artificial sequence
  SiRNA target sequence
agatattcctacaccgtatgcactta

SEQ ID NO: 124293 - DNA, 26 bp, Artificial sequence
  SiRNA target sequence
gatattcctacaccgtatgcacttaa

SEQ ID NO: 124294 - DNA, 26 bp, Artificial sequence
  SiRNA target sequence
atattcctacaccgtatgcacttaat

SEQ ID NO: 124295 - DNA, 26 bp, Artificial sequence
  SiRNA target sequence
tattcctacaccgtatgcacttaatc

SEQ ID NO: 124296 - DNA, 26 bp, Artificial sequence
  SiRNA target sequence
attcctacaccgtatgcacttaatct

SEQ ID NO: 124297 - DNA, 26 bp, Artificial sequence
  SiRNA target sequence
ttcctacaccgtatgcacttaatctt

SEQ ID NO: 124298 - DNA, 26 bp, Artificial sequence
  SiRNA target sequence
tcctacaccgtatgcacttaatcttg

SEQ ID NO: 124299 - DNA, 26 bp, Artificial sequence
  SiRNA target sequence
cctacaccgtatgcacttaatcttga

SEQ ID NO: 124300 - DNA, 26 bp, Artificial sequence
  SiRNA target sequence
ctacaccgtatgcacttaatcttgaa

SEQ ID NO: 124301 - DNA, 26 bp, Artificial sequence
  SiRNA target sequence
tacaccgtatgcacttaatcttgaaa

SEQ ID NO: 124302 - DNA, 26 bp, Artificial sequence
  SiRNA target sequence
acaccgtatgcacttaatcttgaaaa

SEQ ID NO: 124303 - DNA, 26 bp, Artificial sequence
  SiRNA target sequence
caccgtatgcacttaatcttgaaaaa

SEQ ID NO: 124304 - DNA, 26 bp, Artificial sequence
  SiRNA target sequence
accgtatgcacttaatcttgaaaaaa

SEQ ID NO: 124305 - DNA, 26 bp, Artificial sequence
  SiRNA target sequence
ccgtatgcacttaatcttgaaaaaat

SEQ ID NO: 124306 - DNA, 26 bp, Artificial sequence
  SiRNA target sequence
cgtatgcacttaatcttgaaaaaatg

SEQ ID NO: 124307 - DNA, 26 bp, Artificial sequence
  SiRNA target sequence
gtatgcacttaatcttgaaaaaatgt

SEQ ID NO: 124308 - DNA, 26 bp, Artificial sequence
  SiRNA target sequence
tatgcacttaatcttgaaaaaatgtc

SEQ ID NO: 124309 - DNA, 26 bp, Artificial sequence
  SiRNA target sequence
atgcacttaatcttgaaaaaatgtct

SEQ ID NO: 124310 - DNA, 26 bp, Artificial sequence
  SiRNA target sequence
tgcacttaatcttgaaaaaatgtctt

SEQ ID NO: 124311 - DNA, 26 bp, Artificial sequence
  SiRNA target sequence
gcacttaatcttgaaaaaatgtctta

SEQ ID NO: 124312 - DNA, 26 bp, Artificial sequence
  SiRNA target sequence
cacttaatcttgaaaaaatgtcttat

SEQ ID NO: 124313 - DNA, 26 bp, Artificial sequence
  SiRNA target sequence
acttaatcttgaaaaaatgtcttatc

SEQ ID NO: 124314 - DNA, 26 bp, Artificial sequence
  SiRNA target sequence
cttaatcttgaaaaaatgtcttatcc

SEQ ID NO: 124315 - DNA, 26 bp, Artificial sequence
  SiRNA target sequence
ttaatcttgaaaaaatgtcttatccg

SEQ ID NO: 124316 - DNA, 26 bp, Artificial sequence
  SiRNA target sequence
taatcttgaaaaaatgtcttatccga

SEQ ID NO: 124317 - DNA, 26 bp, Artificial sequence
  SiRNA target sequence
aatcttgaaaaaatgtcttatccgac

SEQ ID NO: 124318 - DNA, 26 bp, Artificial sequence
  SiRNA target sequence
atcttgaaaaaatgtcttatccgaca

SEQ ID NO: 124319 - DNA, 26 bp, Artificial sequence
  SiRNA target sequence
tcttgaaaaaatgtcttatccgacat

SEQ ID NO: 124320 - DNA, 26 bp, Artificial sequence
  SiRNA target sequence
cttgaaaaaatgtcttatccgacatg

SEQ ID NO: 124321 - DNA, 26 bp, Artificial sequence
  SiRNA target sequence
ttgaaaaaatgtcttatccgacatgc

SEQ ID NO: 124322 - DNA, 26 bp, Artificial sequence
  SiRNA target sequence
tgaaaaaatgtcttatccgacatgca

SEQ ID NO: 124323 - DNA, 26 bp, Artificial sequence
  SiRNA target sequence
gaaaaaatgtcttatccgacatgcaa

SEQ ID NO: 124324 - DNA, 26 bp, Artificial sequence
  SiRNA target sequence
aaaaaatgtcttatccgacatgcaat

SEQ ID NO: 124325 - DNA, 26 bp, Artificial sequence
  SiRNA target sequence
aaaaatgtcttatccgacatgcaatg

SEQ ID NO: 124326 - DNA, 26 bp, Artificial sequence
  SiRNA target sequence
aaaatgtcttatccgacatgcaatga

SEQ ID NO: 124327 - DNA, 26 bp, Artificial sequence
  SiRNA target sequence
aaatgtcttatccgacatgcaatgat

SEQ ID NO: 124328 - DNA, 26 bp, Artificial sequence
  SiRNA target sequence
aatgtcttatccgacatgcaatgata

SEQ ID NO: 124329 - DNA, 26 bp, Artificial sequence
  SiRNA target sequence
atgtcttatccgacatgcaatgatat

SEQ ID NO: 124330 - DNA, 26 bp, Artificial sequence
  SiRNA target sequence
tgtcttatccgacatgcaatgatatt

SEQ ID NO: 124331 - DNA, 26 bp, Artificial sequence
  SiRNA target sequence
gtcttatccgacatgcaatgatattg

SEQ ID NO: 124332 - DNA, 26 bp, Artificial sequence
  SiRNA target sequence
tcttatccgacatgcaatgatattgt

SEQ ID NO: 124333 - DNA, 26 bp, Artificial sequence
  SiRNA target sequence
cttatccgacatgcaatgatattgta

SEQ ID NO: 124334 - DNA, 26 bp, Artificial sequence
  SiRNA target sequence
ttatccgacatgcaatgatattgtaa

SEQ ID NO: 124335 - DNA, 26 bp, Artificial sequence
  SiRNA target sequence
tatccgacatgcaatgatattgtaaa

SEQ ID NO: 124336 - DNA, 26 bp, Artificial sequence
  SiRNA target sequence
atccgacatgcaatgatattgtaaat

SEQ ID NO: 124337 - DNA, 26 bp, Artificial sequence
  SiRNA target sequence
tccgacatgcaatgatattgtaaatg

SEQ ID NO: 124338 - DNA, 26 bp, Artificial sequence
  SiRNA target sequence
ccgacatgcaatgatattgtaaatgc

SEQ ID NO: 124339 - DNA, 26 bp, Artificial sequence
  SiRNA target sequence
cgacatgcaatgatattgtaaatgct

SEQ ID NO: 124340 - DNA, 26 bp, Artificial sequence
  SiRNA target sequence
gacatgcaatgatattgtaaatgctg

SEQ ID NO: 124341 - DNA, 26 bp, Artificial sequence
  SiRNA target sequence
acatgcaatgatattgtaaatgctgt

SEQ ID NO: 124342 - DNA, 26 bp, Artificial sequence
  SiRNA target sequence
catgcaatgatattgtaaatgctgtt

SEQ ID NO: 124343 - DNA, 26 bp, Artificial sequence
  SiRNA target sequence
atgcaatgatattgtaaatgctgtta

SEQ ID NO: 124344 - DNA, 26 bp, Artificial sequence
  SiRNA target sequence
tgcaatgatattgtaaatgctgttac

SEQ ID NO: 124345 - DNA, 26 bp, Artificial sequence
  SiRNA target sequence
gcaatgatattgtaaatgctgttaca

SEQ ID NO: 124346 - DNA, 26 bp, Artificial sequence
  SiRNA target sequence
caatgatattgtaaatgctgttacaa

SEQ ID NO: 124347 - DNA, 26 bp, Artificial sequence
  SiRNA target sequence
aatgatattgtaaatgctgttacaaa

SEQ ID NO: 124348 - DNA, 26 bp, Artificial sequence
  SiRNA target sequence
atgatattgtaaatgctgttacaaaa

SEQ ID NO: 124349 - DNA, 26 bp, Artificial sequence
  SiRNA target sequence
tgatattgtaaatgctgttacaaaaa

SEQ ID NO: 124350 - DNA, 26 bp, Artificial sequence
  SiRNA target sequence
gatattgtaaatgctgttacaaaaat

SEQ ID NO: 124351 - DNA, 26 bp, Artificial sequence
  SiRNA target sequence
atattgtaaatgctgttacaaaaata

SEQ ID NO: 124352 - DNA, 26 bp, Artificial sequence
  SiRNA target sequence
tattgtaaatgctgttacaaaaataa

SEQ ID NO: 124353 - DNA, 26 bp, Artificial sequence
  SiRNA target sequence
attgtaaatgctgttacaaaaataaa

SEQ ID NO: 124354 - DNA, 26 bp, Artificial sequence
  SiRNA target sequence
ttgtaaatgctgttacaaaaataaat

SEQ ID NO: 124355 - DNA, 26 bp, Artificial sequence
  SiRNA target sequence
tgtaaatgctgttacaaaaataaatt

SEQ ID NO: 124356 - DNA, 26 bp, Artificial sequence
  SiRNA target sequence
gtaaatgctgttacaaaaataaattc

SEQ ID NO: 124357 - DNA, 26 bp, Artificial sequence
  SiRNA target sequence
taaatgctgttacaaaaataaattca

SEQ ID NO: 124358 - DNA, 26 bp, Artificial sequence
  SiRNA target sequence
aaatgctgttacaaaaataaattcat

SEQ ID NO: 124359 - DNA, 26 bp, Artificial sequence
  SiRNA target sequence
aatgctgttacaaaaataaattcata

SEQ ID NO: 124360 - DNA, 26 bp, Artificial sequence
  SiRNA target sequence
atgctgttacaaaaataaattcatag

SEQ ID NO: 124361 - DNA, 27 bp, Artificial sequence
  SiRNA target sequence
atgatagaaattcgcgatcttataaat

SEQ ID NO: 124362 - DNA, 27 bp, Artificial sequence
  SiRNA target sequence
tgatagaaattcgcgatcttataaatc

SEQ ID NO: 124363 - DNA, 27 bp, Artificial sequence
  SiRNA target sequence
gatagaaattcgcgatcttataaatca

SEQ ID NO: 124364 - DNA, 27 bp, Artificial sequence
  SiRNA target sequence
atagaaattcgcgatcttataaatcaa

SEQ ID NO: 124365 - DNA, 27 bp, Artificial sequence
  SiRNA target sequence
tagaaattcgcgatcttataaatcaag

SEQ ID NO: 124366 - DNA, 27 bp, Artificial sequence
  SiRNA target sequence
agaaattcgcgatcttataaatcaagc

SEQ ID NO: 124367 - DNA, 27 bp, Artificial sequence
  SiRNA target sequence
gaaattcgcgatcttataaatcaagca

SEQ ID NO: 124368 - DNA, 27 bp, Artificial sequence
  SiRNA target sequence
aaattcgcgatcttataaatcaagcat

SEQ ID NO: 124369 - DNA, 27 bp, Artificial sequence
  SiRNA target sequence
aattcgcgatcttataaatcaagcatt

SEQ ID NO: 124370 - DNA, 27 bp, Artificial sequence
  SiRNA target sequence
attcgcgatcttataaatcaagcattg

SEQ ID NO: 124371 - DNA, 27 bp, Artificial sequence
  SiRNA target sequence
ttcgcgatcttataaatcaagcattgg

SEQ ID NO: 124372 - DNA, 27 bp, Artificial sequence
  SiRNA target sequence
tcgcgatcttataaatcaagcattgga

SEQ ID NO: 124373 - DNA, 27 bp, Artificial sequence
  SiRNA target sequence
cgcgatcttataaatcaagcattggat

SEQ ID NO: 124374 - DNA, 27 bp, Artificial sequence
  SiRNA target sequence
gcgatcttataaatcaagcattggatg

SEQ ID NO: 124375 - DNA, 27 bp, Artificial sequence
  SiRNA target sequence
cgatcttataaatcaagcattggatga

SEQ ID NO: 124376 - DNA, 27 bp, Artificial sequence
  SiRNA target sequence
gatcttataaatcaagcattggatgag

SEQ ID NO: 124377 - DNA, 27 bp, Artificial sequence
  SiRNA target sequence
atcttataaatcaagcattggatgagg

SEQ ID NO: 124378 - DNA, 27 bp, Artificial sequence
  SiRNA target sequence
tcttataaatcaagcattggatgagga

SEQ ID NO: 124379 - DNA, 27 bp, Artificial sequence
  SiRNA target sequence
cttataaatcaagcattggatgaggaa

SEQ ID NO: 124380 - DNA, 27 bp, Artificial sequence
  SiRNA target sequence
ttataaatcaagcattggatgaggaaa

SEQ ID NO: 124381 - DNA, 27 bp, Artificial sequence
  SiRNA target sequence
tataaatcaagcattggatgaggaaat

SEQ ID NO: 124382 - DNA, 27 bp, Artificial sequence
  SiRNA target sequence
ataaatcaagcattggatgaggaaatg

SEQ ID NO: 124383 - DNA, 27 bp, Artificial sequence
  SiRNA target sequence
taaatcaagcattggatgaggaaatgg

SEQ ID NO: 124384 - DNA, 27 bp, Artificial sequence
  SiRNA target sequence
aaatcaagcattggatgaggaaatggg

SEQ ID NO: 124385 - DNA, 27 bp, Artificial sequence
  SiRNA target sequence
aatcaagcattggatgaggaaatggga

SEQ ID NO: 124386 - DNA, 27 bp, Artificial sequence
  SiRNA target sequence
atcaagcattggatgaggaaatgggaa

SEQ ID NO: 124387 - DNA, 27 bp, Artificial sequence
  SiRNA target sequence
tcaagcattggatgaggaaatgggaat

SEQ ID NO: 124388 - DNA, 27 bp, Artificial sequence
  SiRNA target sequence
caagcattggatgaggaaatgggaatg

SEQ ID NO: 124389 - DNA, 27 bp, Artificial sequence
  SiRNA target sequence
aagcattggatgaggaaatgggaatgg

SEQ ID NO: 124390 - DNA, 27 bp, Artificial sequence
  SiRNA target sequence
agcattggatgaggaaatgggaatgga

SEQ ID NO: 124391 - DNA, 27 bp, Artificial sequence
  SiRNA target sequence
gcattggatgaggaaatgggaatggat

SEQ ID NO: 124392 - DNA, 27 bp, Artificial sequence
  SiRNA target sequence
cattggatgaggaaatgggaatggatc

SEQ ID NO: 124393 - DNA, 27 bp, Artificial sequence
  SiRNA target sequence
attggatgaggaaatgggaatggatca

SEQ ID NO: 124394 - DNA, 27 bp, Artificial sequence
  SiRNA target sequence
ttggatgaggaaatgggaatggatcat

SEQ ID NO: 124395 - DNA, 27 bp, Artificial sequence
  SiRNA target sequence
tggatgaggaaatgggaatggatcata

SEQ ID NO: 124396 - DNA, 27 bp, Artificial sequence
  SiRNA target sequence
ggatgaggaaatgggaatggatcataa

SEQ ID NO: 124397 - DNA, 27 bp, Artificial sequence
  SiRNA target sequence
gatgaggaaatgggaatggatcataat

SEQ ID NO: 124398 - DNA, 27 bp, Artificial sequence
  SiRNA target sequence
atgaggaaatgggaatggatcataatg

SEQ ID NO: 124399 - DNA, 27 bp, Artificial sequence
  SiRNA target sequence
tgaggaaatgggaatggatcataatgt

SEQ ID NO: 124400 - DNA, 27 bp, Artificial sequence
  SiRNA target sequence
gaggaaatgggaatggatcataatgta

SEQ ID NO: 124401 - DNA, 27 bp, Artificial sequence
  SiRNA target sequence
aggaaatgggaatggatcataatgtat

SEQ ID NO: 124402 - DNA, 27 bp, Artificial sequence
  SiRNA target sequence
ggaaatgggaatggatcataatgtata

SEQ ID NO: 124403 - DNA, 27 bp, Artificial sequence
  SiRNA target sequence
gaaatgggaatggatcataatgtatat

SEQ ID NO: 124404 - DNA, 27 bp, Artificial sequence
  SiRNA target sequence
aaatgggaatggatcataatgtatata

SEQ ID NO: 124405 - DNA, 27 bp, Artificial sequence
  SiRNA target sequence
aatgggaatggatcataatgtatatat

SEQ ID NO: 124406 - DNA, 27 bp, Artificial sequence
  SiRNA target sequence
atgggaatggatcataatgtatatata

SEQ ID NO: 124407 - DNA, 27 bp, Artificial sequence
  SiRNA target sequence
tgggaatggatcataatgtatatataa

SEQ ID NO: 124408 - DNA, 27 bp, Artificial sequence
  SiRNA target sequence
gggaatggatcataatgtatatataat

SEQ ID NO: 124409 - DNA, 27 bp, Artificial sequence
  SiRNA target sequence
ggaatggatcataatgtatatataata

SEQ ID NO: 124410 - DNA, 27 bp, Artificial sequence
  SiRNA target sequence
gaatggatcataatgtatatataatag

SEQ ID NO: 124411 - DNA, 27 bp, Artificial sequence
  SiRNA target sequence
aatggatcataatgtatatataatagg

SEQ ID NO: 124412 - DNA, 27 bp, Artificial sequence
  SiRNA target sequence
atggatcataatgtatatataatagga

SEQ ID NO: 124413 - DNA, 27 bp, Artificial sequence
  SiRNA target sequence
tggatcataatgtatatataataggag

SEQ ID NO: 124414 - DNA, 27 bp, Artificial sequence
  SiRNA target sequence
ggatcataatgtatatataataggaga

SEQ ID NO: 124415 - DNA, 27 bp, Artificial sequence
  SiRNA target sequence
gatcataatgtatatataataggagaa

SEQ ID NO: 124416 - DNA, 27 bp, Artificial sequence
  SiRNA target sequence
atcataatgtatatataataggagaag

SEQ ID NO: 124417 - DNA, 27 bp, Artificial sequence
  SiRNA target sequence
tcataatgtatatataataggagaaga

SEQ ID NO: 124418 - DNA, 27 bp, Artificial sequence
  SiRNA target sequence
cataatgtatatataataggagaagaa

SEQ ID NO: 124419 - DNA, 27 bp, Artificial sequence
  SiRNA target sequence
ataatgtatatataataggagaagaag

SEQ ID NO: 124420 - DNA, 27 bp, Artificial sequence
  SiRNA target sequence
taatgtatatataataggagaagaagt

SEQ ID NO: 124421 - DNA, 27 bp, Artificial sequence
  SiRNA target sequence
aatgtatatataataggagaagaagta

SEQ ID NO: 124422 - DNA, 27 bp, Artificial sequence
  SiRNA target sequence
atgtatatataataggagaagaagtag

SEQ ID NO: 124423 - DNA, 27 bp, Artificial sequence
  SiRNA target sequence
tgtatatataataggagaagaagtagg

SEQ ID NO: 124424 - DNA, 27 bp, Artificial sequence
  SiRNA target sequence
gtatatataataggagaagaagtaggc

SEQ ID NO: 124425 - DNA, 27 bp, Artificial sequence
  SiRNA target sequence
tatatataataggagaagaagtaggca

SEQ ID NO: 124426 - DNA, 27 bp, Artificial sequence
  SiRNA target sequence
atatataataggagaagaagtaggcat

SEQ ID NO: 124427 - DNA, 27 bp, Artificial sequence
  SiRNA target sequence
tatataataggagaagaagtaggcatc

SEQ ID NO: 124428 - DNA, 27 bp, Artificial sequence
  SiRNA target sequence
atataataggagaagaagtaggcatct

SEQ ID NO: 124429 - DNA, 27 bp, Artificial sequence
  SiRNA target sequence
tataataggagaagaagtaggcatctc

SEQ ID NO: 124430 - DNA, 27 bp, Artificial sequence
  SiRNA target sequence
ataataggagaagaagtaggcatctct

SEQ ID NO: 124431 - DNA, 27 bp, Artificial sequence
  SiRNA target sequence
taataggagaagaagtaggcatctctg

SEQ ID NO: 124432 - DNA, 27 bp, Artificial sequence
  SiRNA target sequence
aataggagaagaagtaggcatctctgg

SEQ ID NO: 124433 - DNA, 27 bp, Artificial sequence
  SiRNA target sequence
ataggagaagaagtaggcatctctggt

SEQ ID NO: 124434 - DNA, 27 bp, Artificial sequence
  SiRNA target sequence
taggagaagaagtaggcatctctggtg

SEQ ID NO: 124435 - DNA, 27 bp, Artificial sequence
  SiRNA target sequence
aggagaagaagtaggcatctctggtgg

SEQ ID NO: 124436 - DNA, 27 bp, Artificial sequence
  SiRNA target sequence
ggagaagaagtaggcatctctggtggt

SEQ ID NO: 124437 - DNA, 27 bp, Artificial sequence
  SiRNA target sequence
gagaagaagtaggcatctctggtggtc

SEQ ID NO: 124438 - DNA, 27 bp, Artificial sequence
  SiRNA target sequence
agaagaagtaggcatctctggtggtcc

SEQ ID NO: 124439 - DNA, 27 bp, Artificial sequence
  SiRNA target sequence
gaagaagtaggcatctctggtggtcct

SEQ ID NO: 124440 - DNA, 27 bp, Artificial sequence
  SiRNA target sequence
aagaagtaggcatctctggtggtcctc

SEQ ID NO: 124441 - DNA, 27 bp, Artificial sequence
  SiRNA target sequence
agaagtaggcatctctggtggtcctca

SEQ ID NO: 124442 - DNA, 27 bp, Artificial sequence
  SiRNA target sequence
gaagtaggcatctctggtggtcctcac

SEQ ID NO: 124443 - DNA, 27 bp, Artificial sequence
  SiRNA target sequence
aagtaggcatctctggtggtcctcacg

SEQ ID NO: 124444 - DNA, 27 bp, Artificial sequence
  SiRNA target sequence
agtaggcatctctggtggtcctcacgg

SEQ ID NO: 124445 - DNA, 27 bp, Artificial sequence
  SiRNA target sequence
gtaggcatctctggtggtcctcacggt

SEQ ID NO: 124446 - DNA, 27 bp, Artificial sequence
  SiRNA target sequence
taggcatctctggtggtcctcacggtc

SEQ ID NO: 124447 - DNA, 27 bp, Artificial sequence
  SiRNA target sequence
aggcatctctggtggtcctcacggtct

SEQ ID NO: 124448 - DNA, 27 bp, Artificial sequence
  SiRNA target sequence
ggcatctctggtggtcctcacggtctt

SEQ ID NO: 124449 - DNA, 27 bp, Artificial sequence
  SiRNA target sequence
gcatctctggtggtcctcacggtctta

SEQ ID NO: 124450 - DNA, 27 bp, Artificial sequence
  SiRNA target sequence
catctctggtggtcctcacggtcttac

SEQ ID NO: 124451 - DNA, 27 bp, Artificial sequence
  SiRNA target sequence
atctctggtggtcctcacggtcttact

SEQ ID NO: 124452 - DNA, 27 bp, Artificial sequence
  SiRNA target sequence
tctctggtggtcctcacggtcttacta

SEQ ID NO: 124453 - DNA, 27 bp, Artificial sequence
  SiRNA target sequence
ctctggtggtcctcacggtcttactaa

SEQ ID NO: 124454 - DNA, 27 bp, Artificial sequence
  SiRNA target sequence
tctggtggtcctcacggtcttactaaa

SEQ ID NO: 124455 - DNA, 27 bp, Artificial sequence
  SiRNA target sequence
ctggtggtcctcacggtcttactaaaa

SEQ ID NO: 124456 - DNA, 27 bp, Artificial sequence
  SiRNA target sequence
tggtggtcctcacggtcttactaaaaa

SEQ ID NO: 124457 - DNA, 27 bp, Artificial sequence
  SiRNA target sequence
ggtggtcctcacggtcttactaaaaat

SEQ ID NO: 124458 - DNA, 27 bp, Artificial sequence
  SiRNA target sequence
gtggtcctcacggtcttactaaaaatt

SEQ ID NO: 124459 - DNA, 27 bp, Artificial sequence
  SiRNA target sequence
tggtcctcacggtcttactaaaaattt

SEQ ID NO: 124460 - DNA, 27 bp, Artificial sequence
  SiRNA target sequence
ggtcctcacggtcttactaaaaatttg

SEQ ID NO: 124461 - DNA, 27 bp, Artificial sequence
  SiRNA target sequence
gtcctcacggtcttactaaaaatttga

SEQ ID NO: 124462 - DNA, 27 bp, Artificial sequence
  SiRNA target sequence
tcctcacggtcttactaaaaatttgat

SEQ ID NO: 124463 - DNA, 27 bp, Artificial sequence
  SiRNA target sequence
cctcacggtcttactaaaaatttgatc

SEQ ID NO: 124464 - DNA, 27 bp, Artificial sequence
  SiRNA target sequence
ctcacggtcttactaaaaatttgatca

SEQ ID NO: 124465 - DNA, 27 bp, Artificial sequence
  SiRNA target sequence
tcacggtcttactaaaaatttgatcaa

SEQ ID NO: 124466 - DNA, 27 bp, Artificial sequence
  SiRNA target sequence
cacggtcttactaaaaatttgatcaaa

SEQ ID NO: 124467 - DNA, 27 bp, Artificial sequence
  SiRNA target sequence
acggtcttactaaaaatttgatcaaaa

SEQ ID NO: 124468 - DNA, 27 bp, Artificial sequence
  SiRNA target sequence
cggtcttactaaaaatttgatcaaaaa

SEQ ID NO: 124469 - DNA, 27 bp, Artificial sequence
  SiRNA target sequence
ggtcttactaaaaatttgatcaaaaaa

SEQ ID NO: 124470 - DNA, 27 bp, Artificial sequence
  SiRNA target sequence
gtcttactaaaaatttgatcaaaaaat

SEQ ID NO: 124471 - DNA, 27 bp, Artificial sequence
  SiRNA target sequence
tcttactaaaaatttgatcaaaaaata

SEQ ID NO: 124472 - DNA, 27 bp, Artificial sequence
  SiRNA target sequence
cttactaaaaatttgatcaaaaaatac

SEQ ID NO: 124473 - DNA, 27 bp, Artificial sequence
  SiRNA target sequence
ttactaaaaatttgatcaaaaaatacg

SEQ ID NO: 124474 - DNA, 27 bp, Artificial sequence
  SiRNA target sequence
tactaaaaatttgatcaaaaaatacgg

SEQ ID NO: 124475 - DNA, 27 bp, Artificial sequence
  SiRNA target sequence
actaaaaatttgatcaaaaaatacggc

SEQ ID NO: 124476 - DNA, 27 bp, Artificial sequence
  SiRNA target sequence
ctaaaaatttgatcaaaaaatacggcg

SEQ ID NO: 124477 - DNA, 27 bp, Artificial sequence
  SiRNA target sequence
taaaaatttgatcaaaaaatacggcga

SEQ ID NO: 124478 - DNA, 27 bp, Artificial sequence
  SiRNA target sequence
aaaaatttgatcaaaaaatacggcgat

SEQ ID NO: 124479 - DNA, 27 bp, Artificial sequence
  SiRNA target sequence
aaaatttgatcaaaaaatacggcgatc

SEQ ID NO: 124480 - DNA, 27 bp, Artificial sequence
  SiRNA target sequence
aaatttgatcaaaaaatacggcgatca

SEQ ID NO: 124481 - DNA, 27 bp, Artificial sequence
  SiRNA target sequence
aatttgatcaaaaaatacggcgatcaa

SEQ ID NO: 124482 - DNA, 27 bp, Artificial sequence
  SiRNA target sequence
atttgatcaaaaaatacggcgatcaaa

SEQ ID NO: 124483 - DNA, 27 bp, Artificial sequence
  SiRNA target sequence
tttgatcaaaaaatacggcgatcaaag

SEQ ID NO: 124484 - DNA, 27 bp, Artificial sequence
  SiRNA target sequence
ttgatcaaaaaatacggcgatcaaaga

SEQ ID NO: 124485 - DNA, 27 bp, Artificial sequence
  SiRNA target sequence
tgatcaaaaaatacggcgatcaaagag

SEQ ID NO: 124486 - DNA, 27 bp, Artificial sequence
  SiRNA target sequence
gatcaaaaaatacggcgatcaaagagt

SEQ ID NO: 124487 - DNA, 27 bp, Artificial sequence
  SiRNA target sequence
atcaaaaaatacggcgatcaaagagtg

SEQ ID NO: 124488 - DNA, 27 bp, Artificial sequence
  SiRNA target sequence
tcaaaaaatacggcgatcaaagagtga

SEQ ID NO: 124489 - DNA, 27 bp, Artificial sequence
  SiRNA target sequence
caaaaaatacggcgatcaaagagtgaa

SEQ ID NO: 124490 - DNA, 27 bp, Artificial sequence
  SiRNA target sequence
aaaaaatacggcgatcaaagagtgaag

SEQ ID NO: 124491 - DNA, 27 bp, Artificial sequence
  SiRNA target sequence
aaaaatacggcgatcaaagagtgaagg

SEQ ID NO: 124492 - DNA, 27 bp, Artificial sequence
  SiRNA target sequence
aaaatacggcgatcaaagagtgaagga

SEQ ID NO: 124493 - DNA, 27 bp, Artificial sequence
  SiRNA target sequence
aaatacggcgatcaaagagtgaaggat

SEQ ID NO: 124494 - DNA, 27 bp, Artificial sequence
  SiRNA target sequence
aatacggcgatcaaagagtgaaggata

SEQ ID NO: 124495 - DNA, 27 bp, Artificial sequence
  SiRNA target sequence
atacggcgatcaaagagtgaaggatac

SEQ ID NO: 124496 - DNA, 27 bp, Artificial sequence
  SiRNA target sequence
tacggcgatcaaagagtgaaggatacc

SEQ ID NO: 124497 - DNA, 27 bp, Artificial sequence
  SiRNA target sequence
acggcgatcaaagagtgaaggataccc

SEQ ID NO: 124498 - DNA, 27 bp, Artificial sequence
  SiRNA target sequence
cggcgatcaaagagtgaaggatacccc

SEQ ID NO: 124499 - DNA, 27 bp, Artificial sequence
  SiRNA target sequence
ggcgatcaaagagtgaaggatacccct

SEQ ID NO: 124500 - DNA, 27 bp, Artificial sequence
  SiRNA target sequence
gcgatcaaagagtgaaggataccccta

SEQ ID NO: 124501 - DNA, 27 bp, Artificial sequence
  SiRNA target sequence
cgatcaaagagtgaaggatacccctat

SEQ ID NO: 124502 - DNA, 27 bp, Artificial sequence
  SiRNA target sequence
gatcaaagagtgaaggatacccctatt

SEQ ID NO: 124503 - DNA, 27 bp, Artificial sequence
  SiRNA target sequence
atcaaagagtgaaggatacccctattt

SEQ ID NO: 124504 - DNA, 27 bp, Artificial sequence
  SiRNA target sequence
tcaaagagtgaaggatacccctatttc

SEQ ID NO: 124505 - DNA, 27 bp, Artificial sequence
  SiRNA target sequence
caaagagtgaaggatacccctatttcg

SEQ ID NO: 124506 - DNA, 27 bp, Artificial sequence
  SiRNA target sequence
aaagagtgaaggatacccctatttcgg

SEQ ID NO: 124507 - DNA, 27 bp, Artificial sequence
  SiRNA target sequence
aagagtgaaggatacccctatttcgga

SEQ ID NO: 124508 - DNA, 27 bp, Artificial sequence
  SiRNA target sequence
agagtgaaggatacccctatttcggaa

SEQ ID NO: 124509 - DNA, 27 bp, Artificial sequence
  SiRNA target sequence
gagtgaaggatacccctatttcggaaa

SEQ ID NO: 124510 - DNA, 27 bp, Artificial sequence
  SiRNA target sequence
agtgaaggatacccctatttcggaaat

SEQ ID NO: 124511 - DNA, 27 bp, Artificial sequence
  SiRNA target sequence
gtgaaggatacccctatttcggaaatg

SEQ ID NO: 124512 - DNA, 27 bp, Artificial sequence
  SiRNA target sequence
tgaaggatacccctatttcggaaatgg

SEQ ID NO: 124513 - DNA, 27 bp, Artificial sequence
  SiRNA target sequence
gaaggatacccctatttcggaaatggg

SEQ ID NO: 124514 - DNA, 27 bp, Artificial sequence
  SiRNA target sequence
aaggatacccctatttcggaaatggga

SEQ ID NO: 124515 - DNA, 27 bp, Artificial sequence
  SiRNA target sequence
aggatacccctatttcggaaatgggat

SEQ ID NO: 124516 - DNA, 27 bp, Artificial sequence
  SiRNA target sequence
ggatacccctatttcggaaatgggatt

SEQ ID NO: 124517 - DNA, 27 bp, Artificial sequence
  SiRNA target sequence
gatacccctatttcggaaatgggattt

SEQ ID NO: 124518 - DNA, 27 bp, Artificial sequence
  SiRNA target sequence
atacccctatttcggaaatgggattta

SEQ ID NO: 124519 - DNA, 27 bp, Artificial sequence
  SiRNA target sequence
tacccctatttcggaaatgggatttac

SEQ ID NO: 124520 - DNA, 27 bp, Artificial sequence
  SiRNA target sequence
acccctatttcggaaatgggatttaca

SEQ ID NO: 124521 - DNA, 27 bp, Artificial sequence
  SiRNA target sequence
cccctatttcggaaatgggatttacag

SEQ ID NO: 124522 - DNA, 27 bp, Artificial sequence
  SiRNA target sequence
ccctatttcggaaatgggatttacagg

SEQ ID NO: 124523 - DNA, 27 bp, Artificial sequence
  SiRNA target sequence
cctatttcggaaatgggatttacaggt

SEQ ID NO: 124524 - DNA, 27 bp, Artificial sequence
  SiRNA target sequence
ctatttcggaaatgggatttacaggtc

SEQ ID NO: 124525 - DNA, 27 bp, Artificial sequence
  SiRNA target sequence
tatttcggaaatgggatttacaggtct

SEQ ID NO: 124526 - DNA, 27 bp, Artificial sequence
  SiRNA target sequence
atttcggaaatgggatttacaggtctc

SEQ ID NO: 124527 - DNA, 27 bp, Artificial sequence
  SiRNA target sequence
tttcggaaatgggatttacaggtctcg

SEQ ID NO: 124528 - DNA, 27 bp, Artificial sequence
  SiRNA target sequence
ttcggaaatgggatttacaggtctcgc

SEQ ID NO: 124529 - DNA, 27 bp, Artificial sequence
  SiRNA target sequence
tcggaaatgggatttacaggtctcgct

SEQ ID NO: 124530 - DNA, 27 bp, Artificial sequence
  SiRNA target sequence
cggaaatgggatttacaggtctcgctg

SEQ ID NO: 124531 - DNA, 27 bp, Artificial sequence
  SiRNA target sequence
ggaaatgggatttacaggtctcgctgt

SEQ ID NO: 124532 - DNA, 27 bp, Artificial sequence
  SiRNA target sequence
gaaatgggatttacaggtctcgctgtg

SEQ ID NO: 124533 - DNA, 27 bp, Artificial sequence
  SiRNA target sequence
aaatgggatttacaggtctcgctgtgg

SEQ ID NO: 124534 - DNA, 27 bp, Artificial sequence
  SiRNA target sequence
aatgggatttacaggtctcgctgtggg

SEQ ID NO: 124535 - DNA, 27 bp, Artificial sequence
  SiRNA target sequence
atgggatttacaggtctcgctgtgggt

SEQ ID NO: 124536 - DNA, 27 bp, Artificial sequence
  SiRNA target sequence
tgggatttacaggtctcgctgtgggtt

SEQ ID NO: 124537 - DNA, 27 bp, Artificial sequence
  SiRNA target sequence
gggatttacaggtctcgctgtgggttc

SEQ ID NO: 124538 - DNA, 27 bp, Artificial sequence
  SiRNA target sequence
ggatttacaggtctcgctgtgggttca

SEQ ID NO: 124539 - DNA, 27 bp, Artificial sequence
  SiRNA target sequence
gatttacaggtctcgctgtgggttcaa

SEQ ID NO: 124540 - DNA, 27 bp, Artificial sequence
  SiRNA target sequence
atttacaggtctcgctgtgggttcaag

SEQ ID NO: 124541 - DNA, 27 bp, Artificial sequence
  SiRNA target sequence
tttacaggtctcgctgtgggttcaagc

SEQ ID NO: 124542 - DNA, 27 bp, Artificial sequence
  SiRNA target sequence
ttacaggtctcgctgtgggttcaagct

SEQ ID NO: 124543 - DNA, 27 bp, Artificial sequence
  SiRNA target sequence
tacaggtctcgctgtgggttcaagcta

SEQ ID NO: 124544 - DNA, 27 bp, Artificial sequence
  SiRNA target sequence
acaggtctcgctgtgggttcaagctat

SEQ ID NO: 124545 - DNA, 27 bp, Artificial sequence
  SiRNA target sequence
caggtctcgctgtgggttcaagctatt

SEQ ID NO: 124546 - DNA, 27 bp, Artificial sequence
  SiRNA target sequence
aggtctcgctgtgggttcaagctattt

SEQ ID NO: 124547 - DNA, 27 bp, Artificial sequence
  SiRNA target sequence
ggtctcgctgtgggttcaagctattta

SEQ ID NO: 124548 - DNA, 27 bp, Artificial sequence
  SiRNA target sequence
gtctcgctgtgggttcaagctatttag

SEQ ID NO: 124549 - DNA, 27 bp, Artificial sequence
  SiRNA target sequence
tctcgctgtgggttcaagctatttagg

SEQ ID NO: 124550 - DNA, 27 bp, Artificial sequence
  SiRNA target sequence
ctcgctgtgggttcaagctatttaggg

SEQ ID NO: 124551 - DNA, 27 bp, Artificial sequence
  SiRNA target sequence
tcgctgtgggttcaagctatttagggt

SEQ ID NO: 124552 - DNA, 27 bp, Artificial sequence
  SiRNA target sequence
cgctgtgggttcaagctatttagggtt

SEQ ID NO: 124553 - DNA, 27 bp, Artificial sequence
  SiRNA target sequence
gctgtgggttcaagctatttagggtta

SEQ ID NO: 124554 - DNA, 27 bp, Artificial sequence
  SiRNA target sequence
ctgtgggttcaagctatttagggttaa

SEQ ID NO: 124555 - DNA, 27 bp, Artificial sequence
  SiRNA target sequence
tgtgggttcaagctatttagggttaag

SEQ ID NO: 124556 - DNA, 27 bp, Artificial sequence
  SiRNA target sequence
gtgggttcaagctatttagggttaaga

SEQ ID NO: 124557 - DNA, 27 bp, Artificial sequence
  SiRNA target sequence
tgggttcaagctatttagggttaagac

SEQ ID NO: 124558 - DNA, 27 bp, Artificial sequence
  SiRNA target sequence
gggttcaagctatttagggttaagacc

SEQ ID NO: 124559 - DNA, 27 bp, Artificial sequence
  SiRNA target sequence
ggttcaagctatttagggttaagaccc

SEQ ID NO: 124560 - DNA, 27 bp, Artificial sequence
  SiRNA target sequence
gttcaagctatttagggttaagacccg

SEQ ID NO: 124561 - DNA, 27 bp, Artificial sequence
  SiRNA target sequence
ttcaagctatttagggttaagacccgt

SEQ ID NO: 124562 - DNA, 27 bp, Artificial sequence
  SiRNA target sequence
tcaagctatttagggttaagacccgta

SEQ ID NO: 124563 - DNA, 27 bp, Artificial sequence
  SiRNA target sequence
caagctatttagggttaagacccgtag

SEQ ID NO: 124564 - DNA, 27 bp, Artificial sequence
  SiRNA target sequence
aagctatttagggttaagacccgtagt

SEQ ID NO: 124565 - DNA, 27 bp, Artificial sequence
  SiRNA target sequence
agctatttagggttaagacccgtagta

SEQ ID NO: 124566 - DNA, 27 bp, Artificial sequence
  SiRNA target sequence
gctatttagggttaagacccgtagtag

SEQ ID NO: 124567 - DNA, 27 bp, Artificial sequence
  SiRNA target sequence
ctatttagggttaagacccgtagtaga

SEQ ID NO: 124568 - DNA, 27 bp, Artificial sequence
  SiRNA target sequence
tatttagggttaagacccgtagtagat

SEQ ID NO: 124569 - DNA, 27 bp, Artificial sequence
  SiRNA target sequence
atttagggttaagacccgtagtagatt

SEQ ID NO: 124570 - DNA, 27 bp, Artificial sequence
  SiRNA target sequence
tttagggttaagacccgtagtagattt

SEQ ID NO: 124571 - DNA, 27 bp, Artificial sequence
  SiRNA target sequence
ttagggttaagacccgtagtagatttt

SEQ ID NO: 124572 - DNA, 27 bp, Artificial sequence
  SiRNA target sequence
tagggttaagacccgtagtagatttta

SEQ ID NO: 124573 - DNA, 27 bp, Artificial sequence
  SiRNA target sequence
agggttaagacccgtagtagattttat

SEQ ID NO: 124574 - DNA, 27 bp, Artificial sequence
  SiRNA target sequence
gggttaagacccgtagtagattttatg

SEQ ID NO: 124575 - DNA, 27 bp, Artificial sequence
  SiRNA target sequence
ggttaagacccgtagtagattttatga

SEQ ID NO: 124576 - DNA, 27 bp, Artificial sequence
  SiRNA target sequence
gttaagacccgtagtagattttatgac

SEQ ID NO: 124577 - DNA, 27 bp, Artificial sequence
  SiRNA target sequence
ttaagacccgtagtagattttatgact

SEQ ID NO: 124578 - DNA, 27 bp, Artificial sequence
  SiRNA target sequence
taagacccgtagtagattttatgactt

SEQ ID NO: 124579 - DNA, 27 bp, Artificial sequence
  SiRNA target sequence
aagacccgtagtagattttatgacttg

SEQ ID NO: 124580 - DNA, 27 bp, Artificial sequence
  SiRNA target sequence
agacccgtagtagattttatgacttgg

SEQ ID NO: 124581 - DNA, 27 bp, Artificial sequence
  SiRNA target sequence
gacccgtagtagattttatgacttgga

SEQ ID NO: 124582 - DNA, 27 bp, Artificial sequence
  SiRNA target sequence
acccgtagtagattttatgacttggaa

SEQ ID NO: 124583 - DNA, 27 bp, Artificial sequence
  SiRNA target sequence
cccgtagtagattttatgacttggaat

SEQ ID NO: 124584 - DNA, 27 bp, Artificial sequence
  SiRNA target sequence
ccgtagtagattttatgacttggaatt

SEQ ID NO: 124585 - DNA, 27 bp, Artificial sequence
  SiRNA target sequence
cgtagtagattttatgacttggaattt

SEQ ID NO: 124586 - DNA, 27 bp, Artificial sequence
  SiRNA target sequence
gtagtagattttatgacttggaatttt

SEQ ID NO: 124587 - DNA, 27 bp, Artificial sequence
  SiRNA target sequence
tagtagattttatgacttggaattttg

SEQ ID NO: 124588 - DNA, 27 bp, Artificial sequence
  SiRNA target sequence
agtagattttatgacttggaattttgc

SEQ ID NO: 124589 - DNA, 27 bp, Artificial sequence
  SiRNA target sequence
gtagattttatgacttggaattttgct

SEQ ID NO: 124590 - DNA, 27 bp, Artificial sequence
  SiRNA target sequence
tagattttatgacttggaattttgctt

SEQ ID NO: 124591 - DNA, 27 bp, Artificial sequence
  SiRNA target sequence
agattttatgacttggaattttgcttt

SEQ ID NO: 124592 - DNA, 27 bp, Artificial sequence
  SiRNA target sequence
gattttatgacttggaattttgctttg

SEQ ID NO: 124593 - DNA, 27 bp, Artificial sequence
  SiRNA target sequence
attttatgacttggaattttgctttgc

SEQ ID NO: 124594 - DNA, 27 bp, Artificial sequence
  SiRNA target sequence
ttttatgacttggaattttgctttgca

SEQ ID NO: 124595 - DNA, 27 bp, Artificial sequence
  SiRNA target sequence
tttatgacttggaattttgctttgcaa

SEQ ID NO: 124596 - DNA, 27 bp, Artificial sequence
  SiRNA target sequence
ttatgacttggaattttgctttgcaat

SEQ ID NO: 124597 - DNA, 27 bp, Artificial sequence
  SiRNA target sequence
tatgacttggaattttgctttgcaatc

SEQ ID NO: 124598 - DNA, 27 bp, Artificial sequence
  SiRNA target sequence
atgacttggaattttgctttgcaatca

SEQ ID NO: 124599 - DNA, 27 bp, Artificial sequence
  SiRNA target sequence
tgacttggaattttgctttgcaatcaa

SEQ ID NO: 124600 - DNA, 27 bp, Artificial sequence
  SiRNA target sequence
gacttggaattttgctttgcaatcaat

SEQ ID NO: 124601 - DNA, 27 bp, Artificial sequence
  SiRNA target sequence
acttggaattttgctttgcaatcaatt

SEQ ID NO: 124602 - DNA, 27 bp, Artificial sequence
  SiRNA target sequence
cttggaattttgctttgcaatcaattg

SEQ ID NO: 124603 - DNA, 27 bp, Artificial sequence
  SiRNA target sequence
ttggaattttgctttgcaatcaattga

SEQ ID NO: 124604 - DNA, 27 bp, Artificial sequence
  SiRNA target sequence
tggaattttgctttgcaatcaattgac

SEQ ID NO: 124605 - DNA, 27 bp, Artificial sequence
  SiRNA target sequence
ggaattttgctttgcaatcaattgacc

SEQ ID NO: 124606 - DNA, 27 bp, Artificial sequence
  SiRNA target sequence
gaattttgctttgcaatcaattgacca

SEQ ID NO: 124607 - DNA, 27 bp, Artificial sequence
  SiRNA target sequence
aattttgctttgcaatcaattgaccat

SEQ ID NO: 124608 - DNA, 27 bp, Artificial sequence
  SiRNA target sequence
attttgctttgcaatcaattgaccata

SEQ ID NO: 124609 - DNA, 27 bp, Artificial sequence
  SiRNA target sequence
ttttgctttgcaatcaattgaccatat

SEQ ID NO: 124610 - DNA, 27 bp, Artificial sequence
  SiRNA target sequence
tttgctttgcaatcaattgaccatatt

SEQ ID NO: 124611 - DNA, 27 bp, Artificial sequence
  SiRNA target sequence
ttgctttgcaatcaattgaccatatta

SEQ ID NO: 124612 - DNA, 27 bp, Artificial sequence
  SiRNA target sequence
tgctttgcaatcaattgaccatattat

SEQ ID NO: 124613 - DNA, 27 bp, Artificial sequence
  SiRNA target sequence
gctttgcaatcaattgaccatattatt

SEQ ID NO: 124614 - DNA, 27 bp, Artificial sequence
  SiRNA target sequence
ctttgcaatcaattgaccatattatta

SEQ ID NO: 124615 - DNA, 27 bp, Artificial sequence
  SiRNA target sequence
tttgcaatcaattgaccatattattaa

SEQ ID NO: 124616 - DNA, 27 bp, Artificial sequence
  SiRNA target sequence
ttgcaatcaattgaccatattattaat

SEQ ID NO: 124617 - DNA, 27 bp, Artificial sequence
  SiRNA target sequence
tgcaatcaattgaccatattattaatt

SEQ ID NO: 124618 - DNA, 27 bp, Artificial sequence
  SiRNA target sequence
gcaatcaattgaccatattattaattc

SEQ ID NO: 124619 - DNA, 27 bp, Artificial sequence
  SiRNA target sequence
caatcaattgaccatattattaattct

SEQ ID NO: 124620 - DNA, 27 bp, Artificial sequence
  SiRNA target sequence
aatcaattgaccatattattaattctt

SEQ ID NO: 124621 - DNA, 27 bp, Artificial sequence
  SiRNA target sequence
atcaattgaccatattattaattcttg

SEQ ID NO: 124622 - DNA, 27 bp, Artificial sequence
  SiRNA target sequence
tcaattgaccatattattaattcttgt

SEQ ID NO: 124623 - DNA, 27 bp, Artificial sequence
  SiRNA target sequence
caattgaccatattattaattcttgtg

SEQ ID NO: 124624 - DNA, 27 bp, Artificial sequence
  SiRNA target sequence
aattgaccatattattaattcttgtgc

SEQ ID NO: 124625 - DNA, 27 bp, Artificial sequence
  SiRNA target sequence
attgaccatattattaattcttgtgcg

SEQ ID NO: 124626 - DNA, 27 bp, Artificial sequence
  SiRNA target sequence
ttgaccatattattaattcttgtgcga

SEQ ID NO: 124627 - DNA, 27 bp, Artificial sequence
  SiRNA target sequence
tgaccatattattaattcttgtgcgaa

SEQ ID NO: 124628 - DNA, 27 bp, Artificial sequence
  SiRNA target sequence
gaccatattattaattcttgtgcgaaa

SEQ ID NO: 124629 - DNA, 27 bp, Artificial sequence
  SiRNA target sequence
accatattattaattcttgtgcgaaaa

SEQ ID NO: 124630 - DNA, 27 bp, Artificial sequence
  SiRNA target sequence
ccatattattaattcttgtgcgaaaac

SEQ ID NO: 124631 - DNA, 27 bp, Artificial sequence
  SiRNA target sequence
catattattaattcttgtgcgaaaacc

SEQ ID NO: 124632 - DNA, 27 bp, Artificial sequence
  SiRNA target sequence
atattattaattcttgtgcgaaaacct

SEQ ID NO: 124633 - DNA, 27 bp, Artificial sequence
  SiRNA target sequence
tattattaattcttgtgcgaaaacctt

SEQ ID NO: 124634 - DNA, 27 bp, Artificial sequence
  SiRNA target sequence
attattaattcttgtgcgaaaaccttg

SEQ ID NO: 124635 - DNA, 27 bp, Artificial sequence
  SiRNA target sequence
ttattaattcttgtgcgaaaaccttgt

SEQ ID NO: 124636 - DNA, 27 bp, Artificial sequence
  SiRNA target sequence
tattaattcttgtgcgaaaaccttgta

SEQ ID NO: 124637 - DNA, 27 bp, Artificial sequence
  SiRNA target sequence
attaattcttgtgcgaaaaccttgtat

SEQ ID NO: 124638 - DNA, 27 bp, Artificial sequence
  SiRNA target sequence
ttaattcttgtgcgaaaaccttgtata

SEQ ID NO: 124639 - DNA, 27 bp, Artificial sequence
  SiRNA target sequence
taattcttgtgcgaaaaccttgtatat

SEQ ID NO: 124640 - DNA, 27 bp, Artificial sequence
  SiRNA target sequence
aattcttgtgcgaaaaccttgtatatg

SEQ ID NO: 124641 - DNA, 27 bp, Artificial sequence
  SiRNA target sequence
attcttgtgcgaaaaccttgtatatgt

SEQ ID NO: 124642 - DNA, 27 bp, Artificial sequence
  SiRNA target sequence
ttcttgtgcgaaaaccttgtatatgtc

SEQ ID NO: 124643 - DNA, 27 bp, Artificial sequence
  SiRNA target sequence
tcttgtgcgaaaaccttgtatatgtca

SEQ ID NO: 124644 - DNA, 27 bp, Artificial sequence
  SiRNA target sequence
cttgtgcgaaaaccttgtatatgtcag

SEQ ID NO: 124645 - DNA, 27 bp, Artificial sequence
  SiRNA target sequence
ttgtgcgaaaaccttgtatatgtcagg

SEQ ID NO: 124646 - DNA, 27 bp, Artificial sequence
  SiRNA target sequence
tgtgcgaaaaccttgtatatgtcagga

SEQ ID NO: 124647 - DNA, 27 bp, Artificial sequence
  SiRNA target sequence
gtgcgaaaaccttgtatatgtcaggag

SEQ ID NO: 124648 - DNA, 27 bp, Artificial sequence
  SiRNA target sequence
tgcgaaaaccttgtatatgtcaggagg

SEQ ID NO: 124649 - DNA, 27 bp, Artificial sequence
  SiRNA target sequence
gcgaaaaccttgtatatgtcaggagga

SEQ ID NO: 124650 - DNA, 27 bp, Artificial sequence
  SiRNA target sequence
cgaaaaccttgtatatgtcaggaggaa

SEQ ID NO: 124651 - DNA, 27 bp, Artificial sequence
  SiRNA target sequence
gaaaaccttgtatatgtcaggaggaag

SEQ ID NO: 124652 - DNA, 27 bp, Artificial sequence
  SiRNA target sequence
aaaaccttgtatatgtcaggaggaaga

SEQ ID NO: 124653 - DNA, 27 bp, Artificial sequence
  SiRNA target sequence
aaaccttgtatatgtcaggaggaagaa

SEQ ID NO: 124654 - DNA, 27 bp, Artificial sequence
  SiRNA target sequence
aaccttgtatatgtcaggaggaagaat

SEQ ID NO: 124655 - DNA, 27 bp, Artificial sequence
  SiRNA target sequence
accttgtatatgtcaggaggaagaata

SEQ ID NO: 124656 - DNA, 27 bp, Artificial sequence
  SiRNA target sequence
ccttgtatatgtcaggaggaagaatac

SEQ ID NO: 124657 - DNA, 27 bp, Artificial sequence
  SiRNA target sequence
cttgtatatgtcaggaggaagaataca

SEQ ID NO: 124658 - DNA, 27 bp, Artificial sequence
  SiRNA target sequence
ttgtatatgtcaggaggaagaatacaa

SEQ ID NO: 124659 - DNA, 27 bp, Artificial sequence
  SiRNA target sequence
tgtatatgtcaggaggaagaatacaat

SEQ ID NO: 124660 - DNA, 27 bp, Artificial sequence
  SiRNA target sequence
gtatatgtcaggaggaagaatacaatg

SEQ ID NO: 124661 - DNA, 27 bp, Artificial sequence
  SiRNA target sequence
tatatgtcaggaggaagaatacaatgt

SEQ ID NO: 124662 - DNA, 27 bp, Artificial sequence
  SiRNA target sequence
atatgtcaggaggaagaatacaatgtc

SEQ ID NO: 124663 - DNA, 27 bp, Artificial sequence
  SiRNA target sequence
tatgtcaggaggaagaatacaatgtcc

SEQ ID NO: 124664 - DNA, 27 bp, Artificial sequence
  SiRNA target sequence
atgtcaggaggaagaatacaatgtcca

SEQ ID NO: 124665 - DNA, 27 bp, Artificial sequence
  SiRNA target sequence
tgtcaggaggaagaatacaatgtccaa

SEQ ID NO: 124666 - DNA, 27 bp, Artificial sequence
  SiRNA target sequence
gtcaggaggaagaatacaatgtccaat

SEQ ID NO: 124667 - DNA, 27 bp, Artificial sequence
  SiRNA target sequence
tcaggaggaagaatacaatgtccaatt

SEQ ID NO: 124668 - DNA, 27 bp, Artificial sequence
  SiRNA target sequence
caggaggaagaatacaatgtccaattg

SEQ ID NO: 124669 - DNA, 27 bp, Artificial sequence
  SiRNA target sequence
aggaggaagaatacaatgtccaattgt

SEQ ID NO: 124670 - DNA, 27 bp, Artificial sequence
  SiRNA target sequence
ggaggaagaatacaatgtccaattgtt

SEQ ID NO: 124671 - DNA, 27 bp, Artificial sequence
  SiRNA target sequence
gaggaagaatacaatgtccaattgttt

SEQ ID NO: 124672 - DNA, 27 bp, Artificial sequence
  SiRNA target sequence
aggaagaatacaatgtccaattgtttt

SEQ ID NO: 124673 - DNA, 27 bp, Artificial sequence
  SiRNA target sequence
ggaagaatacaatgtccaattgttttt

SEQ ID NO: 124674 - DNA, 27 bp, Artificial sequence
  SiRNA target sequence
gaagaatacaatgtccaattgttttta

SEQ ID NO: 124675 - DNA, 27 bp, Artificial sequence
  SiRNA target sequence
aagaatacaatgtccaattgtttttag

SEQ ID NO: 124676 - DNA, 27 bp, Artificial sequence
  SiRNA target sequence
agaatacaatgtccaattgtttttagg

SEQ ID NO: 124677 - DNA, 27 bp, Artificial sequence
  SiRNA target sequence
gaatacaatgtccaattgtttttaggg

SEQ ID NO: 124678 - DNA, 27 bp, Artificial sequence
  SiRNA target sequence
aatacaatgtccaattgtttttagggg

SEQ ID NO: 124679 - DNA, 27 bp, Artificial sequence
  SiRNA target sequence
atacaatgtccaattgtttttagggga

SEQ ID NO: 124680 - DNA, 27 bp, Artificial sequence
  SiRNA target sequence
tacaatgtccaattgtttttaggggac

SEQ ID NO: 124681 - DNA, 27 bp, Artificial sequence
  SiRNA target sequence
acaatgtccaattgtttttaggggacc

SEQ ID NO: 124682 - DNA, 27 bp, Artificial sequence
  SiRNA target sequence
caatgtccaattgtttttaggggacca

SEQ ID NO: 124683 - DNA, 27 bp, Artificial sequence
  SiRNA target sequence
aatgtccaattgtttttaggggaccaa

SEQ ID NO: 124684 - DNA, 27 bp, Artificial sequence
  SiRNA target sequence
atgtccaattgtttttaggggaccaaa

SEQ ID NO: 124685 - DNA, 27 bp, Artificial sequence
  SiRNA target sequence
tgtccaattgtttttaggggaccaaat

SEQ ID NO: 124686 - DNA, 27 bp, Artificial sequence
  SiRNA target sequence
gtccaattgtttttaggggaccaaatg

SEQ ID NO: 124687 - DNA, 27 bp, Artificial sequence
  SiRNA target sequence
tccaattgtttttaggggaccaaatgg

SEQ ID NO: 124688 - DNA, 27 bp, Artificial sequence
  SiRNA target sequence
ccaattgtttttaggggaccaaatgga

SEQ ID NO: 124689 - DNA, 27 bp, Artificial sequence
  SiRNA target sequence
caattgtttttaggggaccaaatggat

SEQ ID NO: 124690 - DNA, 27 bp, Artificial sequence
  SiRNA target sequence
aattgtttttaggggaccaaatggatt

SEQ ID NO: 124691 - DNA, 27 bp, Artificial sequence
  SiRNA target sequence
attgtttttaggggaccaaatggattc

SEQ ID NO: 124692 - DNA, 27 bp, Artificial sequence
  SiRNA target sequence
ttgtttttaggggaccaaatggattca

SEQ ID NO: 124693 - DNA, 27 bp, Artificial sequence
  SiRNA target sequence
tgtttttaggggaccaaatggattcaa

SEQ ID NO: 124694 - DNA, 27 bp, Artificial sequence
  SiRNA target sequence
gtttttaggggaccaaatggattcaat

SEQ ID NO: 124695 - DNA, 27 bp, Artificial sequence
  SiRNA target sequence
tttttaggggaccaaatggattcaata

SEQ ID NO: 124696 - DNA, 27 bp, Artificial sequence
  SiRNA target sequence
ttttaggggaccaaatggattcaataa

SEQ ID NO: 124697 - DNA, 27 bp, Artificial sequence
  SiRNA target sequence
tttaggggaccaaatggattcaataat

SEQ ID NO: 124698 - DNA, 27 bp, Artificial sequence
  SiRNA target sequence
ttaggggaccaaatggattcaataatg

SEQ ID NO: 124699 - DNA, 27 bp, Artificial sequence
  SiRNA target sequence
taggggaccaaatggattcaataatgg

SEQ ID NO: 124700 - DNA, 27 bp, Artificial sequence
  SiRNA target sequence
aggggaccaaatggattcaataatggg

SEQ ID NO: 124701 - DNA, 27 bp, Artificial sequence
  SiRNA target sequence
ggggaccaaatggattcaataatgggt

SEQ ID NO: 124702 - DNA, 27 bp, Artificial sequence
  SiRNA target sequence
gggaccaaatggattcaataatgggta

SEQ ID NO: 124703 - DNA, 27 bp, Artificial sequence
  SiRNA target sequence
ggaccaaatggattcaataatgggtac

SEQ ID NO: 124704 - DNA, 27 bp, Artificial sequence
  SiRNA target sequence
gaccaaatggattcaataatgggtacg

SEQ ID NO: 124705 - DNA, 27 bp, Artificial sequence
  SiRNA target sequence
accaaatggattcaataatgggtacgc

SEQ ID NO: 124706 - DNA, 27 bp, Artificial sequence
  SiRNA target sequence
ccaaatggattcaataatgggtacgct

SEQ ID NO: 124707 - DNA, 27 bp, Artificial sequence
  SiRNA target sequence
caaatggattcaataatgggtacgctg

SEQ ID NO: 124708 - DNA, 27 bp, Artificial sequence
  SiRNA target sequence
aaatggattcaataatgggtacgctgc

SEQ ID NO: 124709 - DNA, 27 bp, Artificial sequence
  SiRNA target sequence
aatggattcaataatgggtacgctgca

SEQ ID NO: 124710 - DNA, 27 bp, Artificial sequence
  SiRNA target sequence
atggattcaataatgggtacgctgcac

SEQ ID NO: 124711 - DNA, 27 bp, Artificial sequence
  SiRNA target sequence
tggattcaataatgggtacgctgcaca

SEQ ID NO: 124712 - DNA, 27 bp, Artificial sequence
  SiRNA target sequence
ggattcaataatgggtacgctgcacag

SEQ ID NO: 124713 - DNA, 27 bp, Artificial sequence
  SiRNA target sequence
gattcaataatgggtacgctgcacagc

SEQ ID NO: 124714 - DNA, 27 bp, Artificial sequence
  SiRNA target sequence
attcaataatgggtacgctgcacagca

SEQ ID NO: 124715 - DNA, 27 bp, Artificial sequence
  SiRNA target sequence
ttcaataatgggtacgctgcacagcac

SEQ ID NO: 124716 - DNA, 27 bp, Artificial sequence
  SiRNA target sequence
tcaataatgggtacgctgcacagcaca

SEQ ID NO: 124717 - DNA, 27 bp, Artificial sequence
  SiRNA target sequence
caataatgggtacgctgcacagcacac

SEQ ID NO: 124718 - DNA, 27 bp, Artificial sequence
  SiRNA target sequence
aataatgggtacgctgcacagcacaca

SEQ ID NO: 124719 - DNA, 27 bp, Artificial sequence
  SiRNA target sequence
ataatgggtacgctgcacagcacacac

SEQ ID NO: 124720 - DNA, 27 bp, Artificial sequence
  SiRNA target sequence
taatgggtacgctgcacagcacacaca

SEQ ID NO: 124721 - DNA, 27 bp, Artificial sequence
  SiRNA target sequence
aatgggtacgctgcacagcacacacaa

SEQ ID NO: 124722 - DNA, 27 bp, Artificial sequence
  SiRNA target sequence
atgggtacgctgcacagcacacacaag

SEQ ID NO: 124723 - DNA, 27 bp, Artificial sequence
  SiRNA target sequence
tgggtacgctgcacagcacacacaaga

SEQ ID NO: 124724 - DNA, 27 bp, Artificial sequence
  SiRNA target sequence
gggtacgctgcacagcacacacaagat

SEQ ID NO: 124725 - DNA, 27 bp, Artificial sequence
  SiRNA target sequence
ggtacgctgcacagcacacacaagatt

SEQ ID NO: 124726 - DNA, 27 bp, Artificial sequence
  SiRNA target sequence
gtacgctgcacagcacacacaagattt

SEQ ID NO: 124727 - DNA, 27 bp, Artificial sequence
  SiRNA target sequence
tacgctgcacagcacacacaagatttt

SEQ ID NO: 124728 - DNA, 27 bp, Artificial sequence
  SiRNA target sequence
acgctgcacagcacacacaagattttg

SEQ ID NO: 124729 - DNA, 27 bp, Artificial sequence
  SiRNA target sequence
cgctgcacagcacacacaagattttgc

SEQ ID NO: 124730 - DNA, 27 bp, Artificial sequence
  SiRNA target sequence
gctgcacagcacacacaagattttgca

SEQ ID NO: 124731 - DNA, 27 bp, Artificial sequence
  SiRNA target sequence
ctgcacagcacacacaagattttgcac

SEQ ID NO: 124732 - DNA, 27 bp, Artificial sequence
  SiRNA target sequence
tgcacagcacacacaagattttgcacc

SEQ ID NO: 124733 - DNA, 27 bp, Artificial sequence
  SiRNA target sequence
gcacagcacacacaagattttgcacca

SEQ ID NO: 124734 - DNA, 27 bp, Artificial sequence
  SiRNA target sequence
cacagcacacacaagattttgcaccaa

SEQ ID NO: 124735 - DNA, 27 bp, Artificial sequence
  SiRNA target sequence
acagcacacacaagattttgcaccaat

SEQ ID NO: 124736 - DNA, 27 bp, Artificial sequence
  SiRNA target sequence
cagcacacacaagattttgcaccaata

SEQ ID NO: 124737 - DNA, 27 bp, Artificial sequence
  SiRNA target sequence
agcacacacaagattttgcaccaatat

SEQ ID NO: 124738 - DNA, 27 bp, Artificial sequence
  SiRNA target sequence
gcacacacaagattttgcaccaatata

SEQ ID NO: 124739 - DNA, 27 bp, Artificial sequence
  SiRNA target sequence
cacacacaagattttgcaccaatatat

SEQ ID NO: 124740 - DNA, 27 bp, Artificial sequence
  SiRNA target sequence
acacacaagattttgcaccaatatatg

SEQ ID NO: 124741 - DNA, 27 bp, Artificial sequence
  SiRNA target sequence
cacacaagattttgcaccaatatatgg

SEQ ID NO: 124742 - DNA, 27 bp, Artificial sequence
  SiRNA target sequence
acacaagattttgcaccaatatatggt

SEQ ID NO: 124743 - DNA, 27 bp, Artificial sequence
  SiRNA target sequence
cacaagattttgcaccaatatatggtt

SEQ ID NO: 124744 - DNA, 27 bp, Artificial sequence
  SiRNA target sequence
acaagattttgcaccaatatatggttc

SEQ ID NO: 124745 - DNA, 27 bp, Artificial sequence
  SiRNA target sequence
caagattttgcaccaatatatggttct

SEQ ID NO: 124746 - DNA, 27 bp, Artificial sequence
  SiRNA target sequence
aagattttgcaccaatatatggttcta

SEQ ID NO: 124747 - DNA, 27 bp, Artificial sequence
  SiRNA target sequence
agattttgcaccaatatatggttctat

SEQ ID NO: 124748 - DNA, 27 bp, Artificial sequence
  SiRNA target sequence
gattttgcaccaatatatggttctatt

SEQ ID NO: 124749 - DNA, 27 bp, Artificial sequence
  SiRNA target sequence
attttgcaccaatatatggttctattc

SEQ ID NO: 124750 - DNA, 27 bp, Artificial sequence
  SiRNA target sequence
ttttgcaccaatatatggttctattcc

SEQ ID NO: 124751 - DNA, 27 bp, Artificial sequence
  SiRNA target sequence
tttgcaccaatatatggttctattcca

SEQ ID NO: 124752 - DNA, 27 bp, Artificial sequence
  SiRNA target sequence
ttgcaccaatatatggttctattccag

SEQ ID NO: 124753 - DNA, 27 bp, Artificial sequence
  SiRNA target sequence
tgcaccaatatatggttctattccagg

SEQ ID NO: 124754 - DNA, 27 bp, Artificial sequence
  SiRNA target sequence
gcaccaatatatggttctattccaggc

SEQ ID NO: 124755 - DNA, 27 bp, Artificial sequence
  SiRNA target sequence
caccaatatatggttctattccaggcc

SEQ ID NO: 124756 - DNA, 27 bp, Artificial sequence
  SiRNA target sequence
accaatatatggttctattccaggcct

SEQ ID NO: 124757 - DNA, 27 bp, Artificial sequence
  SiRNA target sequence
ccaatatatggttctattccaggcctt

SEQ ID NO: 124758 - DNA, 27 bp, Artificial sequence
  SiRNA target sequence
caatatatggttctattccaggcctta

SEQ ID NO: 124759 - DNA, 27 bp, Artificial sequence
  SiRNA target sequence
aatatatggttctattccaggccttaa

SEQ ID NO: 124760 - DNA, 27 bp, Artificial sequence
  SiRNA target sequence
atatatggttctattccaggccttaag

SEQ ID NO: 124761 - DNA, 27 bp, Artificial sequence
  SiRNA target sequence
tatatggttctattccaggccttaagg

SEQ ID NO: 124762 - DNA, 27 bp, Artificial sequence
  SiRNA target sequence
atatggttctattccaggccttaaggt

SEQ ID NO: 124763 - DNA, 27 bp, Artificial sequence
  SiRNA target sequence
tatggttctattccaggccttaaggtg

SEQ ID NO: 124764 - DNA, 27 bp, Artificial sequence
  SiRNA target sequence
atggttctattccaggccttaaggtgg

SEQ ID NO: 124765 - DNA, 27 bp, Artificial sequence
  SiRNA target sequence
tggttctattccaggccttaaggtggt

SEQ ID NO: 124766 - DNA, 27 bp, Artificial sequence
  SiRNA target sequence
ggttctattccaggccttaaggtggtt

SEQ ID NO: 124767 - DNA, 27 bp, Artificial sequence
  SiRNA target sequence
gttctattccaggccttaaggtggttt

SEQ ID NO: 124768 - DNA, 27 bp, Artificial sequence
  SiRNA target sequence
ttctattccaggccttaaggtggtttg

SEQ ID NO: 124769 - DNA, 27 bp, Artificial sequence
  SiRNA target sequence
tctattccaggccttaaggtggtttgt

SEQ ID NO: 124770 - DNA, 27 bp, Artificial sequence
  SiRNA target sequence
ctattccaggccttaaggtggtttgtc

SEQ ID NO: 124771 - DNA, 27 bp, Artificial sequence
  SiRNA target sequence
tattccaggccttaaggtggtttgtcc

SEQ ID NO: 124772 - DNA, 27 bp, Artificial sequence
  SiRNA target sequence
attccaggccttaaggtggtttgtcct

SEQ ID NO: 124773 - DNA, 27 bp, Artificial sequence
  SiRNA target sequence
ttccaggccttaaggtggtttgtcctt

SEQ ID NO: 124774 - DNA, 27 bp, Artificial sequence
  SiRNA target sequence
tccaggccttaaggtggtttgtcctta

SEQ ID NO: 124775 - DNA, 27 bp, Artificial sequence
  SiRNA target sequence
ccaggccttaaggtggtttgtccttat

SEQ ID NO: 124776 - DNA, 27 bp, Artificial sequence
  SiRNA target sequence
caggccttaaggtggtttgtccttata

SEQ ID NO: 124777 - DNA, 27 bp, Artificial sequence
  SiRNA target sequence
aggccttaaggtggtttgtccttatac

SEQ ID NO: 124778 - DNA, 27 bp, Artificial sequence
  SiRNA target sequence
ggccttaaggtggtttgtccttatacg

SEQ ID NO: 124779 - DNA, 27 bp, Artificial sequence
  SiRNA target sequence
gccttaaggtggtttgtccttatacgg

SEQ ID NO: 124780 - DNA, 27 bp, Artificial sequence
  SiRNA target sequence
ccttaaggtggtttgtccttatacggg

SEQ ID NO: 124781 - DNA, 27 bp, Artificial sequence
  SiRNA target sequence
cttaaggtggtttgtccttatacgggt

SEQ ID NO: 124782 - DNA, 27 bp, Artificial sequence
  SiRNA target sequence
ttaaggtggtttgtccttatacgggta

SEQ ID NO: 124783 - DNA, 27 bp, Artificial sequence
  SiRNA target sequence
taaggtggtttgtccttatacgggtaa

SEQ ID NO: 124784 - DNA, 27 bp, Artificial sequence
  SiRNA target sequence
aaggtggtttgtccttatacgggtaaa

SEQ ID NO: 124785 - DNA, 27 bp, Artificial sequence
  SiRNA target sequence
aggtggtttgtccttatacgggtaaag

SEQ ID NO: 124786 - DNA, 27 bp, Artificial sequence
  SiRNA target sequence
ggtggtttgtccttatacgggtaaaga

SEQ ID NO: 124787 - DNA, 27 bp, Artificial sequence
  SiRNA target sequence
gtggtttgtccttatacgggtaaagac

SEQ ID NO: 124788 - DNA, 27 bp, Artificial sequence
  SiRNA target sequence
tggtttgtccttatacgggtaaagacc

SEQ ID NO: 124789 - DNA, 27 bp, Artificial sequence
  SiRNA target sequence
ggtttgtccttatacgggtaaagacca

SEQ ID NO: 124790 - DNA, 27 bp, Artificial sequence
  SiRNA target sequence
gtttgtccttatacgggtaaagaccat

SEQ ID NO: 124791 - DNA, 27 bp, Artificial sequence
  SiRNA target sequence
tttgtccttatacgggtaaagaccata

SEQ ID NO: 124792 - DNA, 27 bp, Artificial sequence
  SiRNA target sequence
ttgtccttatacgggtaaagaccataa

SEQ ID NO: 124793 - DNA, 27 bp, Artificial sequence
  SiRNA target sequence
tgtccttatacgggtaaagaccataaa

SEQ ID NO: 124794 - DNA, 27 bp, Artificial sequence
  SiRNA target sequence
gtccttatacgggtaaagaccataaag

SEQ ID NO: 124795 - DNA, 27 bp, Artificial sequence
  SiRNA target sequence
tccttatacgggtaaagaccataaagg

SEQ ID NO: 124796 - DNA, 27 bp, Artificial sequence
  SiRNA target sequence
ccttatacgggtaaagaccataaagga

SEQ ID NO: 124797 - DNA, 27 bp, Artificial sequence
  SiRNA target sequence
cttatacgggtaaagaccataaaggac

SEQ ID NO: 124798 - DNA, 27 bp, Artificial sequence
  SiRNA target sequence
ttatacgggtaaagaccataaaggact

SEQ ID NO: 124799 - DNA, 27 bp, Artificial sequence
  SiRNA target sequence
tatacgggtaaagaccataaaggactt

SEQ ID NO: 124800 - DNA, 27 bp, Artificial sequence
  SiRNA target sequence
atacgggtaaagaccataaaggacttt

SEQ ID NO: 124801 - DNA, 27 bp, Artificial sequence
  SiRNA target sequence
tacgggtaaagaccataaaggactttt

SEQ ID NO: 124802 - DNA, 27 bp, Artificial sequence
  SiRNA target sequence
acgggtaaagaccataaaggactttta

SEQ ID NO: 124803 - DNA, 27 bp, Artificial sequence
  SiRNA target sequence
cgggtaaagaccataaaggacttttaa

SEQ ID NO: 124804 - DNA, 27 bp, Artificial sequence
  SiRNA target sequence
gggtaaagaccataaaggacttttaaa

SEQ ID NO: 124805 - DNA, 27 bp, Artificial sequence
  SiRNA target sequence
ggtaaagaccataaaggacttttaaaa

SEQ ID NO: 124806 - DNA, 27 bp, Artificial sequence
  SiRNA target sequence
gtaaagaccataaaggacttttaaaaa

SEQ ID NO: 124807 - DNA, 27 bp, Artificial sequence
  SiRNA target sequence
taaagaccataaaggacttttaaaaag

SEQ ID NO: 124808 - DNA, 27 bp, Artificial sequence
  SiRNA target sequence
aaagaccataaaggacttttaaaaagc

SEQ ID NO: 124809 - DNA, 27 bp, Artificial sequence
  SiRNA target sequence
aagaccataaaggacttttaaaaagcg

SEQ ID NO: 124810 - DNA, 27 bp, Artificial sequence
  SiRNA target sequence
agaccataaaggacttttaaaaagcgc

SEQ ID NO: 124811 - DNA, 27 bp, Artificial sequence
  SiRNA target sequence
gaccataaaggacttttaaaaagcgct

SEQ ID NO: 124812 - DNA, 27 bp, Artificial sequence
  SiRNA target sequence
accataaaggacttttaaaaagcgcta

SEQ ID NO: 124813 - DNA, 27 bp, Artificial sequence
  SiRNA target sequence
ccataaaggacttttaaaaagcgctat

SEQ ID NO: 124814 - DNA, 27 bp, Artificial sequence
  SiRNA target sequence
cataaaggacttttaaaaagcgctatt

SEQ ID NO: 124815 - DNA, 27 bp, Artificial sequence
  SiRNA target sequence
ataaaggacttttaaaaagcgctatta

SEQ ID NO: 124816 - DNA, 27 bp, Artificial sequence
  SiRNA target sequence
taaaggacttttaaaaagcgctattag

SEQ ID NO: 124817 - DNA, 27 bp, Artificial sequence
  SiRNA target sequence
aaaggacttttaaaaagcgctattaga

SEQ ID NO: 124818 - DNA, 27 bp, Artificial sequence
  SiRNA target sequence
aaggacttttaaaaagcgctattagag

SEQ ID NO: 124819 - DNA, 27 bp, Artificial sequence
  SiRNA target sequence
aggacttttaaaaagcgctattagaga

SEQ ID NO: 124820 - DNA, 27 bp, Artificial sequence
  SiRNA target sequence
ggacttttaaaaagcgctattagagac

SEQ ID NO: 124821 - DNA, 27 bp, Artificial sequence
  SiRNA target sequence
gacttttaaaaagcgctattagagaca

SEQ ID NO: 124822 - DNA, 27 bp, Artificial sequence
  SiRNA target sequence
acttttaaaaagcgctattagagacaa

SEQ ID NO: 124823 - DNA, 27 bp, Artificial sequence
  SiRNA target sequence
cttttaaaaagcgctattagagacaat

SEQ ID NO: 124824 - DNA, 27 bp, Artificial sequence
  SiRNA target sequence
ttttaaaaagcgctattagagacaata

SEQ ID NO: 124825 - DNA, 27 bp, Artificial sequence
  SiRNA target sequence
tttaaaaagcgctattagagacaataa

SEQ ID NO: 124826 - DNA, 27 bp, Artificial sequence
  SiRNA target sequence
ttaaaaagcgctattagagacaataac

SEQ ID NO: 124827 - DNA, 27 bp, Artificial sequence
  SiRNA target sequence
taaaaagcgctattagagacaataacc

SEQ ID NO: 124828 - DNA, 27 bp, Artificial sequence
  SiRNA target sequence
aaaaagcgctattagagacaataaccc

SEQ ID NO: 124829 - DNA, 27 bp, Artificial sequence
  SiRNA target sequence
aaaagcgctattagagacaataacccg

SEQ ID NO: 124830 - DNA, 27 bp, Artificial sequence
  SiRNA target sequence
aaagcgctattagagacaataacccgg

SEQ ID NO: 124831 - DNA, 27 bp, Artificial sequence
  SiRNA target sequence
aagcgctattagagacaataacccggt

SEQ ID NO: 124832 - DNA, 27 bp, Artificial sequence
  SiRNA target sequence
agcgctattagagacaataacccggtt

SEQ ID NO: 124833 - DNA, 27 bp, Artificial sequence
  SiRNA target sequence
gcgctattagagacaataacccggtta

SEQ ID NO: 124834 - DNA, 27 bp, Artificial sequence
  SiRNA target sequence
cgctattagagacaataacccggttat

SEQ ID NO: 124835 - DNA, 27 bp, Artificial sequence
  SiRNA target sequence
gctattagagacaataacccggttata

SEQ ID NO: 124836 - DNA, 27 bp, Artificial sequence
  SiRNA target sequence
ctattagagacaataacccggttatat

SEQ ID NO: 124837 - DNA, 27 bp, Artificial sequence
  SiRNA target sequence
tattagagacaataacccggttatatt

SEQ ID NO: 124838 - DNA, 27 bp, Artificial sequence
  SiRNA target sequence
attagagacaataacccggttatattt

SEQ ID NO: 124839 - DNA, 27 bp, Artificial sequence
  SiRNA target sequence
ttagagacaataacccggttatatttc

SEQ ID NO: 124840 - DNA, 27 bp, Artificial sequence
  SiRNA target sequence
tagagacaataacccggttatatttct

SEQ ID NO: 124841 - DNA, 27 bp, Artificial sequence
  SiRNA target sequence
agagacaataacccggttatatttctt

SEQ ID NO: 124842 - DNA, 27 bp, Artificial sequence
  SiRNA target sequence
gagacaataacccggttatatttcttg

SEQ ID NO: 124843 - DNA, 27 bp, Artificial sequence
  SiRNA target sequence
agacaataacccggttatatttcttga

SEQ ID NO: 124844 - DNA, 27 bp, Artificial sequence
  SiRNA target sequence
gacaataacccggttatatttcttgag

SEQ ID NO: 124845 - DNA, 27 bp, Artificial sequence
  SiRNA target sequence
acaataacccggttatatttcttgaga

SEQ ID NO: 124846 - DNA, 27 bp, Artificial sequence
  SiRNA target sequence
caataacccggttatatttcttgagaa

SEQ ID NO: 124847 - DNA, 27 bp, Artificial sequence
  SiRNA target sequence
aataacccggttatatttcttgagaat

SEQ ID NO: 124848 - DNA, 27 bp, Artificial sequence
  SiRNA target sequence
ataacccggttatatttcttgagaatg

SEQ ID NO: 124849 - DNA, 27 bp, Artificial sequence
  SiRNA target sequence
taacccggttatatttcttgagaatga

SEQ ID NO: 124850 - DNA, 27 bp, Artificial sequence
  SiRNA target sequence
aacccggttatatttcttgagaatgaa

SEQ ID NO: 124851 - DNA, 27 bp, Artificial sequence
  SiRNA target sequence
acccggttatatttcttgagaatgaaa

SEQ ID NO: 124852 - DNA, 27 bp, Artificial sequence
  SiRNA target sequence
cccggttatatttcttgagaatgaaat

SEQ ID NO: 124853 - DNA, 27 bp, Artificial sequence
  SiRNA target sequence
ccggttatatttcttgagaatgaaata

SEQ ID NO: 124854 - DNA, 27 bp, Artificial sequence
  SiRNA target sequence
cggttatatttcttgagaatgaaatat

SEQ ID NO: 124855 - DNA, 27 bp, Artificial sequence
  SiRNA target sequence
ggttatatttcttgagaatgaaatatt

SEQ ID NO: 124856 - DNA, 27 bp, Artificial sequence
  SiRNA target sequence
gttatatttcttgagaatgaaatatta

SEQ ID NO: 124857 - DNA, 27 bp, Artificial sequence
  SiRNA target sequence
ttatatttcttgagaatgaaatattat

SEQ ID NO: 124858 - DNA, 27 bp, Artificial sequence
  SiRNA target sequence
tatatttcttgagaatgaaatattata

SEQ ID NO: 124859 - DNA, 27 bp, Artificial sequence
  SiRNA target sequence
atatttcttgagaatgaaatattatat

SEQ ID NO: 124860 - DNA, 27 bp, Artificial sequence
  SiRNA target sequence
tatttcttgagaatgaaatattatata

SEQ ID NO: 124861 - DNA, 27 bp, Artificial sequence
  SiRNA target sequence
atttcttgagaatgaaatattatataa

SEQ ID NO: 124862 - DNA, 27 bp, Artificial sequence
  SiRNA target sequence
tttcttgagaatgaaatattatataaa

SEQ ID NO: 124863 - DNA, 27 bp, Artificial sequence
  SiRNA target sequence
ttcttgagaatgaaatattatataaag

SEQ ID NO: 124864 - DNA, 27 bp, Artificial sequence
  SiRNA target sequence
tcttgagaatgaaatattatataaaga

SEQ ID NO: 124865 - DNA, 27 bp, Artificial sequence
  SiRNA target sequence
cttgagaatgaaatattatataaagat

SEQ ID NO: 124866 - DNA, 27 bp, Artificial sequence
  SiRNA target sequence
ttgagaatgaaatattatataaagata

SEQ ID NO: 124867 - DNA, 27 bp, Artificial sequence
  SiRNA target sequence
tgagaatgaaatattatataaagataa

SEQ ID NO: 124868 - DNA, 27 bp, Artificial sequence
  SiRNA target sequence
gagaatgaaatattatataaagataaa

SEQ ID NO: 124869 - DNA, 27 bp, Artificial sequence
  SiRNA target sequence
agaatgaaatattatataaagataaat

SEQ ID NO: 124870 - DNA, 27 bp, Artificial sequence
  SiRNA target sequence
gaatgaaatattatataaagataaata

SEQ ID NO: 124871 - DNA, 27 bp, Artificial sequence
  SiRNA target sequence
aatgaaatattatataaagataaatac

SEQ ID NO: 124872 - DNA, 27 bp, Artificial sequence
  SiRNA target sequence
atgaaatattatataaagataaatacc

SEQ ID NO: 124873 - DNA, 27 bp, Artificial sequence
  SiRNA target sequence
tgaaatattatataaagataaatacct

SEQ ID NO: 124874 - DNA, 27 bp, Artificial sequence
  SiRNA target sequence
gaaatattatataaagataaatacctt

SEQ ID NO: 124875 - DNA, 27 bp, Artificial sequence
  SiRNA target sequence
aaatattatataaagataaataccttg

SEQ ID NO: 124876 - DNA, 27 bp, Artificial sequence
  SiRNA target sequence
aatattatataaagataaataccttga

SEQ ID NO: 124877 - DNA, 27 bp, Artificial sequence
  SiRNA target sequence
atattatataaagataaataccttgaa

SEQ ID NO: 124878 - DNA, 27 bp, Artificial sequence
  SiRNA target sequence
tattatataaagataaataccttgaag

SEQ ID NO: 124879 - DNA, 27 bp, Artificial sequence
  SiRNA target sequence
attatataaagataaataccttgaagt

SEQ ID NO: 124880 - DNA, 27 bp, Artificial sequence
  SiRNA target sequence
ttatataaagataaataccttgaagtg

SEQ ID NO: 124881 - DNA, 27 bp, Artificial sequence
  SiRNA target sequence
tatataaagataaataccttgaagtgt

SEQ ID NO: 124882 - DNA, 27 bp, Artificial sequence
  SiRNA target sequence
atataaagataaataccttgaagtgtc

SEQ ID NO: 124883 - DNA, 27 bp, Artificial sequence
  SiRNA target sequence
tataaagataaataccttgaagtgtct

SEQ ID NO: 124884 - DNA, 27 bp, Artificial sequence
  SiRNA target sequence
ataaagataaataccttgaagtgtcta

SEQ ID NO: 124885 - DNA, 27 bp, Artificial sequence
  SiRNA target sequence
taaagataaataccttgaagtgtctaa

SEQ ID NO: 124886 - DNA, 27 bp, Artificial sequence
  SiRNA target sequence
aaagataaataccttgaagtgtctaat

SEQ ID NO: 124887 - DNA, 27 bp, Artificial sequence
  SiRNA target sequence
aagataaataccttgaagtgtctaata

SEQ ID NO: 124888 - DNA, 27 bp, Artificial sequence
  SiRNA target sequence
agataaataccttgaagtgtctaataa

SEQ ID NO: 124889 - DNA, 27 bp, Artificial sequence
  SiRNA target sequence
gataaataccttgaagtgtctaataat

SEQ ID NO: 124890 - DNA, 27 bp, Artificial sequence
  SiRNA target sequence
ataaataccttgaagtgtctaataatt

SEQ ID NO: 124891 - DNA, 27 bp, Artificial sequence
  SiRNA target sequence
taaataccttgaagtgtctaataatta

SEQ ID NO: 124892 - DNA, 27 bp, Artificial sequence
  SiRNA target sequence
aaataccttgaagtgtctaataattat

SEQ ID NO: 124893 - DNA, 27 bp, Artificial sequence
  SiRNA target sequence
aataccttgaagtgtctaataattata

SEQ ID NO: 124894 - DNA, 27 bp, Artificial sequence
  SiRNA target sequence
ataccttgaagtgtctaataattatat

SEQ ID NO: 124895 - DNA, 27 bp, Artificial sequence
  SiRNA target sequence
taccttgaagtgtctaataattatatt

SEQ ID NO: 124896 - DNA, 27 bp, Artificial sequence
  SiRNA target sequence
accttgaagtgtctaataattatattc

SEQ ID NO: 124897 - DNA, 27 bp, Artificial sequence
  SiRNA target sequence
ccttgaagtgtctaataattatattca

SEQ ID NO: 124898 - DNA, 27 bp, Artificial sequence
  SiRNA target sequence
cttgaagtgtctaataattatattcaa

SEQ ID NO: 124899 - DNA, 27 bp, Artificial sequence
  SiRNA target sequence
ttgaagtgtctaataattatattcaac

SEQ ID NO: 124900 - DNA, 27 bp, Artificial sequence
  SiRNA target sequence
tgaagtgtctaataattatattcaacc

SEQ ID NO: 124901 - DNA, 27 bp, Artificial sequence
  SiRNA target sequence
gaagtgtctaataattatattcaacca

SEQ ID NO: 124902 - DNA, 27 bp, Artificial sequence
  SiRNA target sequence
aagtgtctaataattatattcaaccac

SEQ ID NO: 124903 - DNA, 27 bp, Artificial sequence
  SiRNA target sequence
agtgtctaataattatattcaaccact

SEQ ID NO: 124904 - DNA, 27 bp, Artificial sequence
  SiRNA target sequence
gtgtctaataattatattcaaccactt

SEQ ID NO: 124905 - DNA, 27 bp, Artificial sequence
  SiRNA target sequence
tgtctaataattatattcaaccacttg

SEQ ID NO: 124906 - DNA, 27 bp, Artificial sequence
  SiRNA target sequence
gtctaataattatattcaaccacttga

SEQ ID NO: 124907 - DNA, 27 bp, Artificial sequence
  SiRNA target sequence
tctaataattatattcaaccacttgac

SEQ ID NO: 124908 - DNA, 27 bp, Artificial sequence
  SiRNA target sequence
ctaataattatattcaaccacttgaca

SEQ ID NO: 124909 - DNA, 27 bp, Artificial sequence
  SiRNA target sequence
taataattatattcaaccacttgacaa

SEQ ID NO: 124910 - DNA, 27 bp, Artificial sequence
  SiRNA target sequence
aataattatattcaaccacttgacaag

SEQ ID NO: 124911 - DNA, 27 bp, Artificial sequence
  SiRNA target sequence
ataattatattcaaccacttgacaagg

SEQ ID NO: 124912 - DNA, 27 bp, Artificial sequence
  SiRNA target sequence
taattatattcaaccacttgacaaggc

SEQ ID NO: 124913 - DNA, 27 bp, Artificial sequence
  SiRNA target sequence
aattatattcaaccacttgacaaggca

SEQ ID NO: 124914 - DNA, 27 bp, Artificial sequence
  SiRNA target sequence
attatattcaaccacttgacaaggcag

SEQ ID NO: 124915 - DNA, 27 bp, Artificial sequence
  SiRNA target sequence
ttatattcaaccacttgacaaggcagt

SEQ ID NO: 124916 - DNA, 27 bp, Artificial sequence
  SiRNA target sequence
tatattcaaccacttgacaaggcagta

SEQ ID NO: 124917 - DNA, 27 bp, Artificial sequence
  SiRNA target sequence
atattcaaccacttgacaaggcagtaa

SEQ ID NO: 124918 - DNA, 27 bp, Artificial sequence
  SiRNA target sequence
tattcaaccacttgacaaggcagtaat

SEQ ID NO: 124919 - DNA, 27 bp, Artificial sequence
  SiRNA target sequence
attcaaccacttgacaaggcagtaatt

SEQ ID NO: 124920 - DNA, 27 bp, Artificial sequence
  SiRNA target sequence
ttcaaccacttgacaaggcagtaattg

SEQ ID NO: 124921 - DNA, 27 bp, Artificial sequence
  SiRNA target sequence
tcaaccacttgacaaggcagtaattga

SEQ ID NO: 124922 - DNA, 27 bp, Artificial sequence
  SiRNA target sequence
caaccacttgacaaggcagtaattgaa

SEQ ID NO: 124923 - DNA, 27 bp, Artificial sequence
  SiRNA target sequence
aaccacttgacaaggcagtaattgaaa

SEQ ID NO: 124924 - DNA, 27 bp, Artificial sequence
  SiRNA target sequence
accacttgacaaggcagtaattgaaaa

SEQ ID NO: 124925 - DNA, 27 bp, Artificial sequence
  SiRNA target sequence
ccacttgacaaggcagtaattgaaaaa

SEQ ID NO: 124926 - DNA, 27 bp, Artificial sequence
  SiRNA target sequence
cacttgacaaggcagtaattgaaaaaa

SEQ ID NO: 124927 - DNA, 27 bp, Artificial sequence
  SiRNA target sequence
acttgacaaggcagtaattgaaaaaaa

SEQ ID NO: 124928 - DNA, 27 bp, Artificial sequence
  SiRNA target sequence
cttgacaaggcagtaattgaaaaaaat

SEQ ID NO: 124929 - DNA, 27 bp, Artificial sequence
  SiRNA target sequence
ttgacaaggcagtaattgaaaaaaatg

SEQ ID NO: 124930 - DNA, 27 bp, Artificial sequence
  SiRNA target sequence
tgacaaggcagtaattgaaaaaaatgg

SEQ ID NO: 124931 - DNA, 27 bp, Artificial sequence
  SiRNA target sequence
gacaaggcagtaattgaaaaaaatggt

SEQ ID NO: 124932 - DNA, 27 bp, Artificial sequence
  SiRNA target sequence
acaaggcagtaattgaaaaaaatggtg

SEQ ID NO: 124933 - DNA, 27 bp, Artificial sequence
  SiRNA target sequence
caaggcagtaattgaaaaaaatggtgt

SEQ ID NO: 124934 - DNA, 27 bp, Artificial sequence
  SiRNA target sequence
aaggcagtaattgaaaaaaatggtgtt

SEQ ID NO: 124935 - DNA, 27 bp, Artificial sequence
  SiRNA target sequence
aggcagtaattgaaaaaaatggtgttg

SEQ ID NO: 124936 - DNA, 27 bp, Artificial sequence
  SiRNA target sequence
ggcagtaattgaaaaaaatggtgttga

SEQ ID NO: 124937 - DNA, 27 bp, Artificial sequence
  SiRNA target sequence
gcagtaattgaaaaaaatggtgttgac

SEQ ID NO: 124938 - DNA, 27 bp, Artificial sequence
  SiRNA target sequence
cagtaattgaaaaaaatggtgttgacg

SEQ ID NO: 124939 - DNA, 27 bp, Artificial sequence
  SiRNA target sequence
agtaattgaaaaaaatggtgttgacgt

SEQ ID NO: 124940 - DNA, 27 bp, Artificial sequence
  SiRNA target sequence
gtaattgaaaaaaatggtgttgacgtt

SEQ ID NO: 124941 - DNA, 27 bp, Artificial sequence
  SiRNA target sequence
taattgaaaaaaatggtgttgacgtta

SEQ ID NO: 124942 - DNA, 27 bp, Artificial sequence
  SiRNA target sequence
aattgaaaaaaatggtgttgacgttac

SEQ ID NO: 124943 - DNA, 27 bp, Artificial sequence
  SiRNA target sequence
attgaaaaaaatggtgttgacgttaca

SEQ ID NO: 124944 - DNA, 27 bp, Artificial sequence
  SiRNA target sequence
ttgaaaaaaatggtgttgacgttacag

SEQ ID NO: 124945 - DNA, 27 bp, Artificial sequence
  SiRNA target sequence
tgaaaaaaatggtgttgacgttacagt

SEQ ID NO: 124946 - DNA, 27 bp, Artificial sequence
  SiRNA target sequence
gaaaaaaatggtgttgacgttacagtt

SEQ ID NO: 124947 - DNA, 27 bp, Artificial sequence
  SiRNA target sequence
aaaaaaatggtgttgacgttacagttt

SEQ ID NO: 124948 - DNA, 27 bp, Artificial sequence
  SiRNA target sequence
aaaaaatggtgttgacgttacagtttt

SEQ ID NO: 124949 - DNA, 27 bp, Artificial sequence
  SiRNA target sequence
aaaaatggtgttgacgttacagtttta

SEQ ID NO: 124950 - DNA, 27 bp, Artificial sequence
  SiRNA target sequence
aaaatggtgttgacgttacagttttag

SEQ ID NO: 124951 - DNA, 27 bp, Artificial sequence
  SiRNA target sequence
aaatggtgttgacgttacagttttagg

SEQ ID NO: 124952 - DNA, 27 bp, Artificial sequence
  SiRNA target sequence
aatggtgttgacgttacagttttagga

SEQ ID NO: 124953 - DNA, 27 bp, Artificial sequence
  SiRNA target sequence
atggtgttgacgttacagttttaggaa

SEQ ID NO: 124954 - DNA, 27 bp, Artificial sequence
  SiRNA target sequence
tggtgttgacgttacagttttaggaat

SEQ ID NO: 124955 - DNA, 27 bp, Artificial sequence
  SiRNA target sequence
ggtgttgacgttacagttttaggaata

SEQ ID NO: 124956 - DNA, 27 bp, Artificial sequence
  SiRNA target sequence
gtgttgacgttacagttttaggaatat

SEQ ID NO: 124957 - DNA, 27 bp, Artificial sequence
  SiRNA target sequence
tgttgacgttacagttttaggaatatc

SEQ ID NO: 124958 - DNA, 27 bp, Artificial sequence
  SiRNA target sequence
gttgacgttacagttttaggaatatca

SEQ ID NO: 124959 - DNA, 27 bp, Artificial sequence
  SiRNA target sequence
ttgacgttacagttttaggaatatcaa

SEQ ID NO: 124960 - DNA, 27 bp, Artificial sequence
  SiRNA target sequence
tgacgttacagttttaggaatatcaat

SEQ ID NO: 124961 - DNA, 27 bp, Artificial sequence
  SiRNA target sequence
gacgttacagttttaggaatatcaata

SEQ ID NO: 124962 - DNA, 27 bp, Artificial sequence
  SiRNA target sequence
acgttacagttttaggaatatcaataa

SEQ ID NO: 124963 - DNA, 27 bp, Artificial sequence
  SiRNA target sequence
cgttacagttttaggaatatcaataag

SEQ ID NO: 124964 - DNA, 27 bp, Artificial sequence
  SiRNA target sequence
gttacagttttaggaatatcaataagt

SEQ ID NO: 124965 - DNA, 27 bp, Artificial sequence
  SiRNA target sequence
ttacagttttaggaatatcaataagtc

SEQ ID NO: 124966 - DNA, 27 bp, Artificial sequence
  SiRNA target sequence
tacagttttaggaatatcaataagtct

SEQ ID NO: 124967 - DNA, 27 bp, Artificial sequence
  SiRNA target sequence
acagttttaggaatatcaataagtctt

SEQ ID NO: 124968 - DNA, 27 bp, Artificial sequence
  SiRNA target sequence
cagttttaggaatatcaataagtctta

SEQ ID NO: 124969 - DNA, 27 bp, Artificial sequence
  SiRNA target sequence
agttttaggaatatcaataagtcttaa

SEQ ID NO: 124970 - DNA, 27 bp, Artificial sequence
  SiRNA target sequence
gttttaggaatatcaataagtcttaaa

SEQ ID NO: 124971 - DNA, 27 bp, Artificial sequence
  SiRNA target sequence
ttttaggaatatcaataagtcttaaag

SEQ ID NO: 124972 - DNA, 27 bp, Artificial sequence
  SiRNA target sequence
tttaggaatatcaataagtcttaaaga

SEQ ID NO: 124973 - DNA, 27 bp, Artificial sequence
  SiRNA target sequence
ttaggaatatcaataagtcttaaagaa

SEQ ID NO: 124974 - DNA, 27 bp, Artificial sequence
  SiRNA target sequence
taggaatatcaataagtcttaaagaaa

SEQ ID NO: 124975 - DNA, 27 bp, Artificial sequence
  SiRNA target sequence
aggaatatcaataagtcttaaagaaat

SEQ ID NO: 124976 - DNA, 27 bp, Artificial sequence
  SiRNA target sequence
ggaatatcaataagtcttaaagaaatt

SEQ ID NO: 124977 - DNA, 27 bp, Artificial sequence
  SiRNA target sequence
gaatatcaataagtcttaaagaaattt

SEQ ID NO: 124978 - DNA, 27 bp, Artificial sequence
  SiRNA target sequence
aatatcaataagtcttaaagaaatttt

SEQ ID NO: 124979 - DNA, 27 bp, Artificial sequence
  SiRNA target sequence
atatcaataagtcttaaagaaattttt

SEQ ID NO: 124980 - DNA, 27 bp, Artificial sequence
  SiRNA target sequence
tatcaataagtcttaaagaaattttta

SEQ ID NO: 124981 - DNA, 27 bp, Artificial sequence
  SiRNA target sequence
atcaataagtcttaaagaaatttttaa

SEQ ID NO: 124982 - DNA, 27 bp, Artificial sequence
  SiRNA target sequence
tcaataagtcttaaagaaatttttaaa

SEQ ID NO: 124983 - DNA, 27 bp, Artificial sequence
  SiRNA target sequence
caataagtcttaaagaaatttttaaag

SEQ ID NO: 124984 - DNA, 27 bp, Artificial sequence
  SiRNA target sequence
aataagtcttaaagaaatttttaaagc

SEQ ID NO: 124985 - DNA, 27 bp, Artificial sequence
  SiRNA target sequence
ataagtcttaaagaaatttttaaagca

SEQ ID NO: 124986 - DNA, 27 bp, Artificial sequence
  SiRNA target sequence
taagtcttaaagaaatttttaaagcag

SEQ ID NO: 124987 - DNA, 27 bp, Artificial sequence
  SiRNA target sequence
aagtcttaaagaaatttttaaagcaga

SEQ ID NO: 124988 - DNA, 27 bp, Artificial sequence
  SiRNA target sequence
agtcttaaagaaatttttaaagcagac

SEQ ID NO: 124989 - DNA, 27 bp, Artificial sequence
  SiRNA target sequence
gtcttaaagaaatttttaaagcagaca

SEQ ID NO: 124990 - DNA, 27 bp, Artificial sequence
  SiRNA target sequence
tcttaaagaaatttttaaagcagacag

SEQ ID NO: 124991 - DNA, 27 bp, Artificial sequence
  SiRNA target sequence
cttaaagaaatttttaaagcagacagt

SEQ ID NO: 124992 - DNA, 27 bp, Artificial sequence
  SiRNA target sequence
ttaaagaaatttttaaagcagacagtt

SEQ ID NO: 124993 - DNA, 27 bp, Artificial sequence
  SiRNA target sequence
taaagaaatttttaaagcagacagttt

SEQ ID NO: 124994 - DNA, 27 bp, Artificial sequence
  SiRNA target sequence
aaagaaatttttaaagcagacagtttg

SEQ ID NO: 124995 - DNA, 27 bp, Artificial sequence
  SiRNA target sequence
aagaaatttttaaagcagacagtttgt

SEQ ID NO: 124996 - DNA, 27 bp, Artificial sequence
  SiRNA target sequence
agaaatttttaaagcagacagtttgtt

SEQ ID NO: 124997 - DNA, 27 bp, Artificial sequence
  SiRNA target sequence
gaaatttttaaagcagacagtttgtta

SEQ ID NO: 124998 - DNA, 27 bp, Artificial sequence
  SiRNA target sequence
aaatttttaaagcagacagtttgttag

SEQ ID NO: 124999 - DNA, 27 bp, Artificial sequence
  SiRNA target sequence
aatttttaaagcagacagtttgttaga

SEQ ID NO: 125000 - DNA, 27 bp, Artificial sequence
  SiRNA target sequence
atttttaaagcagacagtttgttagag

SEQ ID NO: 125001 - DNA, 27 bp, Artificial sequence
  SiRNA target sequence
tttttaaagcagacagtttgttagaga

SEQ ID NO: 125002 - DNA, 27 bp, Artificial sequence
  SiRNA target sequence
ttttaaagcagacagtttgttagagaa

SEQ ID NO: 125003 - DNA, 27 bp, Artificial sequence
  SiRNA target sequence
tttaaagcagacagtttgttagagaaa

SEQ ID NO: 125004 - DNA, 27 bp, Artificial sequence
  SiRNA target sequence
ttaaagcagacagtttgttagagaaaa

SEQ ID NO: 125005 - DNA, 27 bp, Artificial sequence
  SiRNA target sequence
taaagcagacagtttgttagagaaaaa

SEQ ID NO: 125006 - DNA, 27 bp, Artificial sequence
  SiRNA target sequence
aaagcagacagtttgttagagaaaaaa

SEQ ID NO: 125007 - DNA, 27 bp, Artificial sequence
  SiRNA target sequence
aagcagacagtttgttagagaaaaaaa

SEQ ID NO: 125008 - DNA, 27 bp, Artificial sequence
  SiRNA target sequence
agcagacagtttgttagagaaaaaaaa

SEQ ID NO: 125009 - DNA, 27 bp, Artificial sequence
  SiRNA target sequence
gcagacagtttgttagagaaaaaaaat

SEQ ID NO: 125010 - DNA, 27 bp, Artificial sequence
  SiRNA target sequence
cagacagtttgttagagaaaaaaaata

SEQ ID NO: 125011 - DNA, 27 bp, Artificial sequence
  SiRNA target sequence
agacagtttgttagagaaaaaaaatat

SEQ ID NO: 125012 - DNA, 27 bp, Artificial sequence
  SiRNA target sequence
gacagtttgttagagaaaaaaaatatc

SEQ ID NO: 125013 - DNA, 27 bp, Artificial sequence
  SiRNA target sequence
acagtttgttagagaaaaaaaatatcg

SEQ ID NO: 125014 - DNA, 27 bp, Artificial sequence
  SiRNA target sequence
cagtttgttagagaaaaaaaatatcga

SEQ ID NO: 125015 - DNA, 27 bp, Artificial sequence
  SiRNA target sequence
agtttgttagagaaaaaaaatatcgac

SEQ ID NO: 125016 - DNA, 27 bp, Artificial sequence
  SiRNA target sequence
gtttgttagagaaaaaaaatatcgaca

SEQ ID NO: 125017 - DNA, 27 bp, Artificial sequence
  SiRNA target sequence
tttgttagagaaaaaaaatatcgacat

SEQ ID NO: 125018 - DNA, 27 bp, Artificial sequence
  SiRNA target sequence
ttgttagagaaaaaaaatatcgacatt

SEQ ID NO: 125019 - DNA, 27 bp, Artificial sequence
  SiRNA target sequence
tgttagagaaaaaaaatatcgacattg

SEQ ID NO: 125020 - DNA, 27 bp, Artificial sequence
  SiRNA target sequence
gttagagaaaaaaaatatcgacattga

SEQ ID NO: 125021 - DNA, 27 bp, Artificial sequence
  SiRNA target sequence
ttagagaaaaaaaatatcgacattgag

SEQ ID NO: 125022 - DNA, 27 bp, Artificial sequence
  SiRNA target sequence
tagagaaaaaaaatatcgacattgaga

SEQ ID NO: 125023 - DNA, 27 bp, Artificial sequence
  SiRNA target sequence
agagaaaaaaaatatcgacattgagat

SEQ ID NO: 125024 - DNA, 27 bp, Artificial sequence
  SiRNA target sequence
gagaaaaaaaatatcgacattgagata

SEQ ID NO: 125025 - DNA, 27 bp, Artificial sequence
  SiRNA target sequence
agaaaaaaaatatcgacattgagataa

SEQ ID NO: 125026 - DNA, 27 bp, Artificial sequence
  SiRNA target sequence
gaaaaaaaatatcgacattgagataat

SEQ ID NO: 125027 - DNA, 27 bp, Artificial sequence
  SiRNA target sequence
aaaaaaaatatcgacattgagataatt

SEQ ID NO: 125028 - DNA, 27 bp, Artificial sequence
  SiRNA target sequence
aaaaaaatatcgacattgagataatta

SEQ ID NO: 125029 - DNA, 27 bp, Artificial sequence
  SiRNA target sequence
aaaaaatatcgacattgagataattaa

SEQ ID NO: 125030 - DNA, 27 bp, Artificial sequence
  SiRNA target sequence
aaaaatatcgacattgagataattaat

SEQ ID NO: 125031 - DNA, 27 bp, Artificial sequence
  SiRNA target sequence
aaaatatcgacattgagataattaatc

SEQ ID NO: 125032 - DNA, 27 bp, Artificial sequence
  SiRNA target sequence
aaatatcgacattgagataattaatct

SEQ ID NO: 125033 - DNA, 27 bp, Artificial sequence
  SiRNA target sequence
aatatcgacattgagataattaatctt

SEQ ID NO: 125034 - DNA, 27 bp, Artificial sequence
  SiRNA target sequence
atatcgacattgagataattaatcttg

SEQ ID NO: 125035 - DNA, 27 bp, Artificial sequence
  SiRNA target sequence
tatcgacattgagataattaatcttgt

SEQ ID NO: 125036 - DNA, 27 bp, Artificial sequence
  SiRNA target sequence
atcgacattgagataattaatcttgtg

SEQ ID NO: 125037 - DNA, 27 bp, Artificial sequence
  SiRNA target sequence
tcgacattgagataattaatcttgtgt

SEQ ID NO: 125038 - DNA, 27 bp, Artificial sequence
  SiRNA target sequence
cgacattgagataattaatcttgtgtc

SEQ ID NO: 125039 - DNA, 27 bp, Artificial sequence
  SiRNA target sequence
gacattgagataattaatcttgtgtca

SEQ ID NO: 125040 - DNA, 27 bp, Artificial sequence
  SiRNA target sequence
acattgagataattaatcttgtgtcaa

SEQ ID NO: 125041 - DNA, 27 bp, Artificial sequence
  SiRNA target sequence
cattgagataattaatcttgtgtcaat

SEQ ID NO: 125042 - DNA, 27 bp, Artificial sequence
  SiRNA target sequence
attgagataattaatcttgtgtcaata

SEQ ID NO: 125043 - DNA, 27 bp, Artificial sequence
  SiRNA target sequence
ttgagataattaatcttgtgtcaataa

SEQ ID NO: 125044 - DNA, 27 bp, Artificial sequence
  SiRNA target sequence
tgagataattaatcttgtgtcaataaa

SEQ ID NO: 125045 - DNA, 27 bp, Artificial sequence
  SiRNA target sequence
gagataattaatcttgtgtcaataaaa

SEQ ID NO: 125046 - DNA, 27 bp, Artificial sequence
  SiRNA target sequence
agataattaatcttgtgtcaataaaac

SEQ ID NO: 125047 - DNA, 27 bp, Artificial sequence
  SiRNA target sequence
gataattaatcttgtgtcaataaaacc

SEQ ID NO: 125048 - DNA, 27 bp, Artificial sequence
  SiRNA target sequence
ataattaatcttgtgtcaataaaacca

SEQ ID NO: 125049 - DNA, 27 bp, Artificial sequence
  SiRNA target sequence
taattaatcttgtgtcaataaaaccaa

SEQ ID NO: 125050 - DNA, 27 bp, Artificial sequence
  SiRNA target sequence
aattaatcttgtgtcaataaaaccaat

SEQ ID NO: 125051 - DNA, 27 bp, Artificial sequence
  SiRNA target sequence
attaatcttgtgtcaataaaaccaatt

SEQ ID NO: 125052 - DNA, 27 bp, Artificial sequence
  SiRNA target sequence
ttaatcttgtgtcaataaaaccaattg

SEQ ID NO: 125053 - DNA, 27 bp, Artificial sequence
  SiRNA target sequence
taatcttgtgtcaataaaaccaattga

SEQ ID NO: 125054 - DNA, 27 bp, Artificial sequence
  SiRNA target sequence
aatcttgtgtcaataaaaccaattgat

SEQ ID NO: 125055 - DNA, 27 bp, Artificial sequence
  SiRNA target sequence
atcttgtgtcaataaaaccaattgatt

SEQ ID NO: 125056 - DNA, 27 bp, Artificial sequence
  SiRNA target sequence
tcttgtgtcaataaaaccaattgatta

SEQ ID NO: 125057 - DNA, 27 bp, Artificial sequence
  SiRNA target sequence
cttgtgtcaataaaaccaattgattat

SEQ ID NO: 125058 - DNA, 27 bp, Artificial sequence
  SiRNA target sequence
ttgtgtcaataaaaccaattgattatg

SEQ ID NO: 125059 - DNA, 27 bp, Artificial sequence
  SiRNA target sequence
tgtgtcaataaaaccaattgattatgt

SEQ ID NO: 125060 - DNA, 27 bp, Artificial sequence
  SiRNA target sequence
gtgtcaataaaaccaattgattatgtt

SEQ ID NO: 125061 - DNA, 27 bp, Artificial sequence
  SiRNA target sequence
tgtcaataaaaccaattgattatgtta

SEQ ID NO: 125062 - DNA, 27 bp, Artificial sequence
  SiRNA target sequence
gtcaataaaaccaattgattatgttac

SEQ ID NO: 125063 - DNA, 27 bp, Artificial sequence
  SiRNA target sequence
tcaataaaaccaattgattatgttact

SEQ ID NO: 125064 - DNA, 27 bp, Artificial sequence
  SiRNA target sequence
caataaaaccaattgattatgttacta

SEQ ID NO: 125065 - DNA, 27 bp, Artificial sequence
  SiRNA target sequence
aataaaaccaattgattatgttactat

SEQ ID NO: 125066 - DNA, 27 bp, Artificial sequence
  SiRNA target sequence
ataaaaccaattgattatgttactatt

SEQ ID NO: 125067 - DNA, 27 bp, Artificial sequence
  SiRNA target sequence
taaaaccaattgattatgttactattg

SEQ ID NO: 125068 - DNA, 27 bp, Artificial sequence
  SiRNA target sequence
aaaaccaattgattatgttactattga

SEQ ID NO: 125069 - DNA, 27 bp, Artificial sequence
  SiRNA target sequence
aaaccaattgattatgttactattgaa

SEQ ID NO: 125070 - DNA, 27 bp, Artificial sequence
  SiRNA target sequence
aaccaattgattatgttactattgaaa

SEQ ID NO: 125071 - DNA, 27 bp, Artificial sequence
  SiRNA target sequence
accaattgattatgttactattgaaat

SEQ ID NO: 125072 - DNA, 27 bp, Artificial sequence
  SiRNA target sequence
ccaattgattatgttactattgaaata

SEQ ID NO: 125073 - DNA, 27 bp, Artificial sequence
  SiRNA target sequence
caattgattatgttactattgaaatat

SEQ ID NO: 125074 - DNA, 27 bp, Artificial sequence
  SiRNA target sequence
aattgattatgttactattgaaatatc

SEQ ID NO: 125075 - DNA, 27 bp, Artificial sequence
  SiRNA target sequence
attgattatgttactattgaaatatca

SEQ ID NO: 125076 - DNA, 27 bp, Artificial sequence
  SiRNA target sequence
ttgattatgttactattgaaatatcag

SEQ ID NO: 125077 - DNA, 27 bp, Artificial sequence
  SiRNA target sequence
tgattatgttactattgaaatatcagt

SEQ ID NO: 125078 - DNA, 27 bp, Artificial sequence
  SiRNA target sequence
gattatgttactattgaaatatcagtc

SEQ ID NO: 125079 - DNA, 27 bp, Artificial sequence
  SiRNA target sequence
attatgttactattgaaatatcagtca

SEQ ID NO: 125080 - DNA, 27 bp, Artificial sequence
  SiRNA target sequence
ttatgttactattgaaatatcagtcaa

SEQ ID NO: 125081 - DNA, 27 bp, Artificial sequence
  SiRNA target sequence
tatgttactattgaaatatcagtcaaa

SEQ ID NO: 125082 - DNA, 27 bp, Artificial sequence
  SiRNA target sequence
atgttactattgaaatatcagtcaaaa

SEQ ID NO: 125083 - DNA, 27 bp, Artificial sequence
  SiRNA target sequence
tgttactattgaaatatcagtcaaaaa

SEQ ID NO: 125084 - DNA, 27 bp, Artificial sequence
  SiRNA target sequence
gttactattgaaatatcagtcaaaaaa

SEQ ID NO: 125085 - DNA, 27 bp, Artificial sequence
  SiRNA target sequence
ttactattgaaatatcagtcaaaaaaa

SEQ ID NO: 125086 - DNA, 27 bp, Artificial sequence
  SiRNA target sequence
tactattgaaatatcagtcaaaaaaac

SEQ ID NO: 125087 - DNA, 27 bp, Artificial sequence
  SiRNA target sequence
actattgaaatatcagtcaaaaaaaca

SEQ ID NO: 125088 - DNA, 27 bp, Artificial sequence
  SiRNA target sequence
ctattgaaatatcagtcaaaaaaacac

SEQ ID NO: 125089 - DNA, 27 bp, Artificial sequence
  SiRNA target sequence
tattgaaatatcagtcaaaaaaacaca

SEQ ID NO: 125090 - DNA, 27 bp, Artificial sequence
  SiRNA target sequence
attgaaatatcagtcaaaaaaacacaa

SEQ ID NO: 125091 - DNA, 27 bp, Artificial sequence
  SiRNA target sequence
ttgaaatatcagtcaaaaaaacacaaa

SEQ ID NO: 125092 - DNA, 27 bp, Artificial sequence
  SiRNA target sequence
tgaaatatcagtcaaaaaaacacaaaa

SEQ ID NO: 125093 - DNA, 27 bp, Artificial sequence
  SiRNA target sequence
gaaatatcagtcaaaaaaacacaaaag

SEQ ID NO: 125094 - DNA, 27 bp, Artificial sequence
  SiRNA target sequence
aaatatcagtcaaaaaaacacaaaagt

SEQ ID NO: 125095 - DNA, 27 bp, Artificial sequence
  SiRNA target sequence
aatatcagtcaaaaaaacacaaaagtt

SEQ ID NO: 125096 - DNA, 27 bp, Artificial sequence
  SiRNA target sequence
atatcagtcaaaaaaacacaaaagtta

SEQ ID NO: 125097 - DNA, 27 bp, Artificial sequence
  SiRNA target sequence
tatcagtcaaaaaaacacaaaagttag

SEQ ID NO: 125098 - DNA, 27 bp, Artificial sequence
  SiRNA target sequence
atcagtcaaaaaaacacaaaagttagt

SEQ ID NO: 125099 - DNA, 27 bp, Artificial sequence
  SiRNA target sequence
tcagtcaaaaaaacacaaaagttagtg

SEQ ID NO: 125100 - DNA, 27 bp, Artificial sequence
  SiRNA target sequence
cagtcaaaaaaacacaaaagttagtga

SEQ ID NO: 125101 - DNA, 27 bp, Artificial sequence
  SiRNA target sequence
agtcaaaaaaacacaaaagttagtgat

SEQ ID NO: 125102 - DNA, 27 bp, Artificial sequence
  SiRNA target sequence
gtcaaaaaaacacaaaagttagtgata

SEQ ID NO: 125103 - DNA, 27 bp, Artificial sequence
  SiRNA target sequence
tcaaaaaaacacaaaagttagtgatag

SEQ ID NO: 125104 - DNA, 27 bp, Artificial sequence
  SiRNA target sequence
caaaaaaacacaaaagttagtgatagt

SEQ ID NO: 125105 - DNA, 27 bp, Artificial sequence
  SiRNA target sequence
aaaaaaacacaaaagttagtgatagtt

SEQ ID NO: 125106 - DNA, 27 bp, Artificial sequence
  SiRNA target sequence
aaaaaacacaaaagttagtgatagttg

SEQ ID NO: 125107 - DNA, 27 bp, Artificial sequence
  SiRNA target sequence
aaaaacacaaaagttagtgatagttga

SEQ ID NO: 125108 - DNA, 27 bp, Artificial sequence
  SiRNA target sequence
aaaacacaaaagttagtgatagttgat

SEQ ID NO: 125109 - DNA, 27 bp, Artificial sequence
  SiRNA target sequence
aaacacaaaagttagtgatagttgatt

SEQ ID NO: 125110 - DNA, 27 bp, Artificial sequence
  SiRNA target sequence
aacacaaaagttagtgatagttgattt

SEQ ID NO: 125111 - DNA, 27 bp, Artificial sequence
  SiRNA target sequence
acacaaaagttagtgatagttgatttt

SEQ ID NO: 125112 - DNA, 27 bp, Artificial sequence
  SiRNA target sequence
cacaaaagttagtgatagttgattttg

SEQ ID NO: 125113 - DNA, 27 bp, Artificial sequence
  SiRNA target sequence
acaaaagttagtgatagttgattttgc

SEQ ID NO: 125114 - DNA, 27 bp, Artificial sequence
  SiRNA target sequence
caaaagttagtgatagttgattttgca

SEQ ID NO: 125115 - DNA, 27 bp, Artificial sequence
  SiRNA target sequence
aaaagttagtgatagttgattttgcat

SEQ ID NO: 125116 - DNA, 27 bp, Artificial sequence
  SiRNA target sequence
aaagttagtgatagttgattttgcata

SEQ ID NO: 125117 - DNA, 27 bp, Artificial sequence
  SiRNA target sequence
aagttagtgatagttgattttgcatat

SEQ ID NO: 125118 - DNA, 27 bp, Artificial sequence
  SiRNA target sequence
agttagtgatagttgattttgcatatc

SEQ ID NO: 125119 - DNA, 27 bp, Artificial sequence
  SiRNA target sequence
gttagtgatagttgattttgcatatcc

SEQ ID NO: 125120 - DNA, 27 bp, Artificial sequence
  SiRNA target sequence
ttagtgatagttgattttgcatatcct

SEQ ID NO: 125121 - DNA, 27 bp, Artificial sequence
  SiRNA target sequence
tagtgatagttgattttgcatatccta

SEQ ID NO: 125122 - DNA, 27 bp, Artificial sequence
  SiRNA target sequence
agtgatagttgattttgcatatcctac

SEQ ID NO: 125123 - DNA, 27 bp, Artificial sequence
  SiRNA target sequence
gtgatagttgattttgcatatcctact

SEQ ID NO: 125124 - DNA, 27 bp, Artificial sequence
  SiRNA target sequence
tgatagttgattttgcatatcctactt

SEQ ID NO: 125125 - DNA, 27 bp, Artificial sequence
  SiRNA target sequence
gatagttgattttgcatatcctacttt

SEQ ID NO: 125126 - DNA, 27 bp, Artificial sequence
  SiRNA target sequence
atagttgattttgcatatcctactttc

SEQ ID NO: 125127 - DNA, 27 bp, Artificial sequence
  SiRNA target sequence
tagttgattttgcatatcctactttca

SEQ ID NO: 125128 - DNA, 27 bp, Artificial sequence
  SiRNA target sequence
agttgattttgcatatcctactttcaa

SEQ ID NO: 125129 - DNA, 27 bp, Artificial sequence
  SiRNA target sequence
gttgattttgcatatcctactttcaat

SEQ ID NO: 125130 - DNA, 27 bp, Artificial sequence
  SiRNA target sequence
ttgattttgcatatcctactttcaata

SEQ ID NO: 125131 - DNA, 27 bp, Artificial sequence
  SiRNA target sequence
tgattttgcatatcctactttcaatat

SEQ ID NO: 125132 - DNA, 27 bp, Artificial sequence
  SiRNA target sequence
gattttgcatatcctactttcaatatt

SEQ ID NO: 125133 - DNA, 27 bp, Artificial sequence
  SiRNA target sequence
attttgcatatcctactttcaatattg

SEQ ID NO: 125134 - DNA, 27 bp, Artificial sequence
  SiRNA target sequence
ttttgcatatcctactttcaatattgc

SEQ ID NO: 125135 - DNA, 27 bp, Artificial sequence
  SiRNA target sequence
tttgcatatcctactttcaatattgcg

SEQ ID NO: 125136 - DNA, 27 bp, Artificial sequence
  SiRNA target sequence
ttgcatatcctactttcaatattgcga

SEQ ID NO: 125137 - DNA, 27 bp, Artificial sequence
  SiRNA target sequence
tgcatatcctactttcaatattgcgag

SEQ ID NO: 125138 - DNA, 27 bp, Artificial sequence
  SiRNA target sequence
gcatatcctactttcaatattgcgagt

SEQ ID NO: 125139 - DNA, 27 bp, Artificial sequence
  SiRNA target sequence
catatcctactttcaatattgcgagtg

SEQ ID NO: 125140 - DNA, 27 bp, Artificial sequence
  SiRNA target sequence
atatcctactttcaatattgcgagtga

SEQ ID NO: 125141 - DNA, 27 bp, Artificial sequence
  SiRNA target sequence
tatcctactttcaatattgcgagtgaa

SEQ ID NO: 125142 - DNA, 27 bp, Artificial sequence
  SiRNA target sequence
atcctactttcaatattgcgagtgaaa

SEQ ID NO: 125143 - DNA, 27 bp, Artificial sequence
  SiRNA target sequence
tcctactttcaatattgcgagtgaaat

SEQ ID NO: 125144 - DNA, 27 bp, Artificial sequence
  SiRNA target sequence
cctactttcaatattgcgagtgaaata

SEQ ID NO: 125145 - DNA, 27 bp, Artificial sequence
  SiRNA target sequence
ctactttcaatattgcgagtgaaatag

SEQ ID NO: 125146 - DNA, 27 bp, Artificial sequence
  SiRNA target sequence
tactttcaatattgcgagtgaaatagc

SEQ ID NO: 125147 - DNA, 27 bp, Artificial sequence
  SiRNA target sequence
actttcaatattgcgagtgaaatagct

SEQ ID NO: 125148 - DNA, 27 bp, Artificial sequence
  SiRNA target sequence
ctttcaatattgcgagtgaaatagctg

SEQ ID NO: 125149 - DNA, 27 bp, Artificial sequence
  SiRNA target sequence
tttcaatattgcgagtgaaatagctgc

SEQ ID NO: 125150 - DNA, 27 bp, Artificial sequence
  SiRNA target sequence
ttcaatattgcgagtgaaatagctgcg

SEQ ID NO: 125151 - DNA, 27 bp, Artificial sequence
  SiRNA target sequence
tcaatattgcgagtgaaatagctgcgc

SEQ ID NO: 125152 - DNA, 27 bp, Artificial sequence
  SiRNA target sequence
caatattgcgagtgaaatagctgcgca

SEQ ID NO: 125153 - DNA, 27 bp, Artificial sequence
  SiRNA target sequence
aatattgcgagtgaaatagctgcgcac

SEQ ID NO: 125154 - DNA, 27 bp, Artificial sequence
  SiRNA target sequence
atattgcgagtgaaatagctgcgcact

SEQ ID NO: 125155 - DNA, 27 bp, Artificial sequence
  SiRNA target sequence
tattgcgagtgaaatagctgcgcactt

SEQ ID NO: 125156 - DNA, 27 bp, Artificial sequence
  SiRNA target sequence
attgcgagtgaaatagctgcgcacttt

SEQ ID NO: 125157 - DNA, 27 bp, Artificial sequence
  SiRNA target sequence
ttgcgagtgaaatagctgcgcactttt

SEQ ID NO: 125158 - DNA, 27 bp, Artificial sequence
  SiRNA target sequence
tgcgagtgaaatagctgcgcactttta

SEQ ID NO: 125159 - DNA, 27 bp, Artificial sequence
  SiRNA target sequence
gcgagtgaaatagctgcgcacttttac

SEQ ID NO: 125160 - DNA, 27 bp, Artificial sequence
  SiRNA target sequence
cgagtgaaatagctgcgcacttttacg

SEQ ID NO: 125161 - DNA, 27 bp, Artificial sequence
  SiRNA target sequence
gagtgaaatagctgcgcacttttacga

SEQ ID NO: 125162 - DNA, 27 bp, Artificial sequence
  SiRNA target sequence
agtgaaatagctgcgcacttttacgaa

SEQ ID NO: 125163 - DNA, 27 bp, Artificial sequence
  SiRNA target sequence
gtgaaatagctgcgcacttttacgaaa

SEQ ID NO: 125164 - DNA, 27 bp, Artificial sequence
  SiRNA target sequence
tgaaatagctgcgcacttttacgaaaa

SEQ ID NO: 125165 - DNA, 27 bp, Artificial sequence
  SiRNA target sequence
gaaatagctgcgcacttttacgaaaaa

SEQ ID NO: 125166 - DNA, 27 bp, Artificial sequence
  SiRNA target sequence
aaatagctgcgcacttttacgaaaaat

SEQ ID NO: 125167 - DNA, 27 bp, Artificial sequence
  SiRNA target sequence
aatagctgcgcacttttacgaaaaatt

SEQ ID NO: 125168 - DNA, 27 bp, Artificial sequence
  SiRNA target sequence
atagctgcgcacttttacgaaaaattt

SEQ ID NO: 125169 - DNA, 27 bp, Artificial sequence
  SiRNA target sequence
tagctgcgcacttttacgaaaaattta

SEQ ID NO: 125170 - DNA, 27 bp, Artificial sequence
  SiRNA target sequence
agctgcgcacttttacgaaaaatttaa

SEQ ID NO: 125171 - DNA, 27 bp, Artificial sequence
  SiRNA target sequence
gctgcgcacttttacgaaaaatttaaa

SEQ ID NO: 125172 - DNA, 27 bp, Artificial sequence
  SiRNA target sequence
ctgcgcacttttacgaaaaatttaaag

SEQ ID NO: 125173 - DNA, 27 bp, Artificial sequence
  SiRNA target sequence
tgcgcacttttacgaaaaatttaaaga

SEQ ID NO: 125174 - DNA, 27 bp, Artificial sequence
  SiRNA target sequence
gcgcacttttacgaaaaatttaaagat

SEQ ID NO: 125175 - DNA, 27 bp, Artificial sequence
  SiRNA target sequence
cgcacttttacgaaaaatttaaagata

SEQ ID NO: 125176 - DNA, 27 bp, Artificial sequence
  SiRNA target sequence
gcacttttacgaaaaatttaaagatat

SEQ ID NO: 125177 - DNA, 27 bp, Artificial sequence
  SiRNA target sequence
cacttttacgaaaaatttaaagatata

SEQ ID NO: 125178 - DNA, 27 bp, Artificial sequence
  SiRNA target sequence
acttttacgaaaaatttaaagatataa

SEQ ID NO: 125179 - DNA, 27 bp, Artificial sequence
  SiRNA target sequence
cttttacgaaaaatttaaagatataaa

SEQ ID NO: 125180 - DNA, 27 bp, Artificial sequence
  SiRNA target sequence
ttttacgaaaaatttaaagatataaaa

SEQ ID NO: 125181 - DNA, 27 bp, Artificial sequence
  SiRNA target sequence
tttacgaaaaatttaaagatataaaaa

SEQ ID NO: 125182 - DNA, 27 bp, Artificial sequence
  SiRNA target sequence
ttacgaaaaatttaaagatataaaaat

SEQ ID NO: 125183 - DNA, 27 bp, Artificial sequence
  SiRNA target sequence
tacgaaaaatttaaagatataaaaatt

SEQ ID NO: 125184 - DNA, 27 bp, Artificial sequence
  SiRNA target sequence
acgaaaaatttaaagatataaaaatta

SEQ ID NO: 125185 - DNA, 27 bp, Artificial sequence
  SiRNA target sequence
cgaaaaatttaaagatataaaaattat

SEQ ID NO: 125186 - DNA, 27 bp, Artificial sequence
  SiRNA target sequence
gaaaaatttaaagatataaaaattatg

SEQ ID NO: 125187 - DNA, 27 bp, Artificial sequence
  SiRNA target sequence
aaaaatttaaagatataaaaattatgc

SEQ ID NO: 125188 - DNA, 27 bp, Artificial sequence
  SiRNA target sequence
aaaatttaaagatataaaaattatgcg

SEQ ID NO: 125189 - DNA, 27 bp, Artificial sequence
  SiRNA target sequence
aaatttaaagatataaaaattatgcgt

SEQ ID NO: 125190 - DNA, 27 bp, Artificial sequence
  SiRNA target sequence
aatttaaagatataaaaattatgcgtg

SEQ ID NO: 125191 - DNA, 27 bp, Artificial sequence
  SiRNA target sequence
atttaaagatataaaaattatgcgtgt

SEQ ID NO: 125192 - DNA, 27 bp, Artificial sequence
  SiRNA target sequence
tttaaagatataaaaattatgcgtgtt

SEQ ID NO: 125193 - DNA, 27 bp, Artificial sequence
  SiRNA target sequence
ttaaagatataaaaattatgcgtgttc

SEQ ID NO: 125194 - DNA, 27 bp, Artificial sequence
  SiRNA target sequence
taaagatataaaaattatgcgtgttct

SEQ ID NO: 125195 - DNA, 27 bp, Artificial sequence
  SiRNA target sequence
aaagatataaaaattatgcgtgttctt

SEQ ID NO: 125196 - DNA, 27 bp, Artificial sequence
  SiRNA target sequence
aagatataaaaattatgcgtgttcttg

SEQ ID NO: 125197 - DNA, 27 bp, Artificial sequence
  SiRNA target sequence
agatataaaaattatgcgtgttcttgc

SEQ ID NO: 125198 - DNA, 27 bp, Artificial sequence
  SiRNA target sequence
gatataaaaattatgcgtgttcttgcg

SEQ ID NO: 125199 - DNA, 27 bp, Artificial sequence
  SiRNA target sequence
atataaaaattatgcgtgttcttgcgc

SEQ ID NO: 125200 - DNA, 27 bp, Artificial sequence
  SiRNA target sequence
tataaaaattatgcgtgttcttgcgca

SEQ ID NO: 125201 - DNA, 27 bp, Artificial sequence
  SiRNA target sequence
ataaaaattatgcgtgttcttgcgcaa

SEQ ID NO: 125202 - DNA, 27 bp, Artificial sequence
  SiRNA target sequence
taaaaattatgcgtgttcttgcgcaag

SEQ ID NO: 125203 - DNA, 27 bp, Artificial sequence
  SiRNA target sequence
aaaaattatgcgtgttcttgcgcaaga

SEQ ID NO: 125204 - DNA, 27 bp, Artificial sequence
  SiRNA target sequence
aaaattatgcgtgttcttgcgcaagat

SEQ ID NO: 125205 - DNA, 27 bp, Artificial sequence
  SiRNA target sequence
aaattatgcgtgttcttgcgcaagata

SEQ ID NO: 125206 - DNA, 27 bp, Artificial sequence
  SiRNA target sequence
aattatgcgtgttcttgcgcaagatat

SEQ ID NO: 125207 - DNA, 27 bp, Artificial sequence
  SiRNA target sequence
attatgcgtgttcttgcgcaagatatt

SEQ ID NO: 125208 - DNA, 27 bp, Artificial sequence
  SiRNA target sequence
ttatgcgtgttcttgcgcaagatattc

SEQ ID NO: 125209 - DNA, 27 bp, Artificial sequence
  SiRNA target sequence
tatgcgtgttcttgcgcaagatattcc

SEQ ID NO: 125210 - DNA, 27 bp, Artificial sequence
  SiRNA target sequence
atgcgtgttcttgcgcaagatattcct

SEQ ID NO: 125211 - DNA, 27 bp, Artificial sequence
  SiRNA target sequence
tgcgtgttcttgcgcaagatattccta

SEQ ID NO: 125212 - DNA, 27 bp, Artificial sequence
  SiRNA target sequence
gcgtgttcttgcgcaagatattcctac

SEQ ID NO: 125213 - DNA, 27 bp, Artificial sequence
  SiRNA target sequence
cgtgttcttgcgcaagatattcctaca

SEQ ID NO: 125214 - DNA, 27 bp, Artificial sequence
  SiRNA target sequence
gtgttcttgcgcaagatattcctacac

SEQ ID NO: 125215 - DNA, 27 bp, Artificial sequence
  SiRNA target sequence
tgttcttgcgcaagatattcctacacc

SEQ ID NO: 125216 - DNA, 27 bp, Artificial sequence
  SiRNA target sequence
gttcttgcgcaagatattcctacaccg

SEQ ID NO: 125217 - DNA, 27 bp, Artificial sequence
  SiRNA target sequence
ttcttgcgcaagatattcctacaccgt

SEQ ID NO: 125218 - DNA, 27 bp, Artificial sequence
  SiRNA target sequence
tcttgcgcaagatattcctacaccgta

SEQ ID NO: 125219 - DNA, 27 bp, Artificial sequence
  SiRNA target sequence
cttgcgcaagatattcctacaccgtat

SEQ ID NO: 125220 - DNA, 27 bp, Artificial sequence
  SiRNA target sequence
ttgcgcaagatattcctacaccgtatg

SEQ ID NO: 125221 - DNA, 27 bp, Artificial sequence
  SiRNA target sequence
tgcgcaagatattcctacaccgtatgc

SEQ ID NO: 125222 - DNA, 27 bp, Artificial sequence
  SiRNA target sequence
gcgcaagatattcctacaccgtatgca

SEQ ID NO: 125223 - DNA, 27 bp, Artificial sequence
  SiRNA target sequence
cgcaagatattcctacaccgtatgcac

SEQ ID NO: 125224 - DNA, 27 bp, Artificial sequence
  SiRNA target sequence
gcaagatattcctacaccgtatgcact

SEQ ID NO: 125225 - DNA, 27 bp, Artificial sequence
  SiRNA target sequence
caagatattcctacaccgtatgcactt

SEQ ID NO: 125226 - DNA, 27 bp, Artificial sequence
  SiRNA target sequence
aagatattcctacaccgtatgcactta

SEQ ID NO: 125227 - DNA, 27 bp, Artificial sequence
  SiRNA target sequence
agatattcctacaccgtatgcacttaa

SEQ ID NO: 125228 - DNA, 27 bp, Artificial sequence
  SiRNA target sequence
gatattcctacaccgtatgcacttaat

SEQ ID NO: 125229 - DNA, 27 bp, Artificial sequence
  SiRNA target sequence
atattcctacaccgtatgcacttaatc

SEQ ID NO: 125230 - DNA, 27 bp, Artificial sequence
  SiRNA target sequence
tattcctacaccgtatgcacttaatct

SEQ ID NO: 125231 - DNA, 27 bp, Artificial sequence
  SiRNA target sequence
attcctacaccgtatgcacttaatctt

SEQ ID NO: 125232 - DNA, 27 bp, Artificial sequence
  SiRNA target sequence
ttcctacaccgtatgcacttaatcttg

SEQ ID NO: 125233 - DNA, 27 bp, Artificial sequence
  SiRNA target sequence
tcctacaccgtatgcacttaatcttga

SEQ ID NO: 125234 - DNA, 27 bp, Artificial sequence
  SiRNA target sequence
cctacaccgtatgcacttaatcttgaa

SEQ ID NO: 125235 - DNA, 27 bp, Artificial sequence
  SiRNA target sequence
ctacaccgtatgcacttaatcttgaaa

SEQ ID NO: 125236 - DNA, 27 bp, Artificial sequence
  SiRNA target sequence
tacaccgtatgcacttaatcttgaaaa

SEQ ID NO: 125237 - DNA, 27 bp, Artificial sequence
  SiRNA target sequence
acaccgtatgcacttaatcttgaaaaa

SEQ ID NO: 125238 - DNA, 27 bp, Artificial sequence
  SiRNA target sequence
caccgtatgcacttaatcttgaaaaaa

SEQ ID NO: 125239 - DNA, 27 bp, Artificial sequence
  SiRNA target sequence
accgtatgcacttaatcttgaaaaaat

SEQ ID NO: 125240 - DNA, 27 bp, Artificial sequence
  SiRNA target sequence
ccgtatgcacttaatcttgaaaaaatg

SEQ ID NO: 125241 - DNA, 27 bp, Artificial sequence
  SiRNA target sequence
cgtatgcacttaatcttgaaaaaatgt

SEQ ID NO: 125242 - DNA, 27 bp, Artificial sequence
  SiRNA target sequence
gtatgcacttaatcttgaaaaaatgtc

SEQ ID NO: 125243 - DNA, 27 bp, Artificial sequence
  SiRNA target sequence
tatgcacttaatcttgaaaaaatgtct

SEQ ID NO: 125244 - DNA, 27 bp, Artificial sequence
  SiRNA target sequence
atgcacttaatcttgaaaaaatgtctt

SEQ ID NO: 125245 - DNA, 27 bp, Artificial sequence
  SiRNA target sequence
tgcacttaatcttgaaaaaatgtctta

SEQ ID NO: 125246 - DNA, 27 bp, Artificial sequence
  SiRNA target sequence
gcacttaatcttgaaaaaatgtcttat

SEQ ID NO: 125247 - DNA, 27 bp, Artificial sequence
  SiRNA target sequence
cacttaatcttgaaaaaatgtcttatc

SEQ ID NO: 125248 - DNA, 27 bp, Artificial sequence
  SiRNA target sequence
acttaatcttgaaaaaatgtcttatcc

SEQ ID NO: 125249 - DNA, 27 bp, Artificial sequence
  SiRNA target sequence
cttaatcttgaaaaaatgtcttatccg

SEQ ID NO: 125250 - DNA, 27 bp, Artificial sequence
  SiRNA target sequence
ttaatcttgaaaaaatgtcttatccga

SEQ ID NO: 125251 - DNA, 27 bp, Artificial sequence
  SiRNA target sequence
taatcttgaaaaaatgtcttatccgac

SEQ ID NO: 125252 - DNA, 27 bp, Artificial sequence
  SiRNA target sequence
aatcttgaaaaaatgtcttatccgaca

SEQ ID NO: 125253 - DNA, 27 bp, Artificial sequence
  SiRNA target sequence
atcttgaaaaaatgtcttatccgacat

SEQ ID NO: 125254 - DNA, 27 bp, Artificial sequence
  SiRNA target sequence
tcttgaaaaaatgtcttatccgacatg

SEQ ID NO: 125255 - DNA, 27 bp, Artificial sequence
  SiRNA target sequence
cttgaaaaaatgtcttatccgacatgc

SEQ ID NO: 125256 - DNA, 27 bp, Artificial sequence
  SiRNA target sequence
ttgaaaaaatgtcttatccgacatgca

SEQ ID NO: 125257 - DNA, 27 bp, Artificial sequence
  SiRNA target sequence
tgaaaaaatgtcttatccgacatgcaa

SEQ ID NO: 125258 - DNA, 27 bp, Artificial sequence
  SiRNA target sequence
gaaaaaatgtcttatccgacatgcaat

SEQ ID NO: 125259 - DNA, 27 bp, Artificial sequence
  SiRNA target sequence
aaaaaatgtcttatccgacatgcaatg

SEQ ID NO: 125260 - DNA, 27 bp, Artificial sequence
  SiRNA target sequence
aaaaatgtcttatccgacatgcaatga

SEQ ID NO: 125261 - DNA, 27 bp, Artificial sequence
  SiRNA target sequence
aaaatgtcttatccgacatgcaatgat

SEQ ID NO: 125262 - DNA, 27 bp, Artificial sequence
  SiRNA target sequence
aaatgtcttatccgacatgcaatgata

SEQ ID NO: 125263 - DNA, 27 bp, Artificial sequence
  SiRNA target sequence
aatgtcttatccgacatgcaatgatat

SEQ ID NO: 125264 - DNA, 27 bp, Artificial sequence
  SiRNA target sequence
atgtcttatccgacatgcaatgatatt

SEQ ID NO: 125265 - DNA, 27 bp, Artificial sequence
  SiRNA target sequence
tgtcttatccgacatgcaatgatattg

SEQ ID NO: 125266 - DNA, 27 bp, Artificial sequence
  SiRNA target sequence
gtcttatccgacatgcaatgatattgt

SEQ ID NO: 125267 - DNA, 27 bp, Artificial sequence
  SiRNA target sequence
tcttatccgacatgcaatgatattgta

SEQ ID NO: 125268 - DNA, 27 bp, Artificial sequence
  SiRNA target sequence
cttatccgacatgcaatgatattgtaa

SEQ ID NO: 125269 - DNA, 27 bp, Artificial sequence
  SiRNA target sequence
ttatccgacatgcaatgatattgtaaa

SEQ ID NO: 125270 - DNA, 27 bp, Artificial sequence
  SiRNA target sequence
tatccgacatgcaatgatattgtaaat

SEQ ID NO: 125271 - DNA, 27 bp, Artificial sequence
  SiRNA target sequence
atccgacatgcaatgatattgtaaatg

SEQ ID NO: 125272 - DNA, 27 bp, Artificial sequence
  SiRNA target sequence
tccgacatgcaatgatattgtaaatgc

SEQ ID NO: 125273 - DNA, 27 bp, Artificial sequence
  SiRNA target sequence
ccgacatgcaatgatattgtaaatgct

SEQ ID NO: 125274 - DNA, 27 bp, Artificial sequence
  SiRNA target sequence
cgacatgcaatgatattgtaaatgctg

SEQ ID NO: 125275 - DNA, 27 bp, Artificial sequence
  SiRNA target sequence
gacatgcaatgatattgtaaatgctgt

SEQ ID NO: 125276 - DNA, 27 bp, Artificial sequence
  SiRNA target sequence
acatgcaatgatattgtaaatgctgtt

SEQ ID NO: 125277 - DNA, 27 bp, Artificial sequence
  SiRNA target sequence
catgcaatgatattgtaaatgctgtta

SEQ ID NO: 125278 - DNA, 27 bp, Artificial sequence
  SiRNA target sequence
atgcaatgatattgtaaatgctgttac

SEQ ID NO: 125279 - DNA, 27 bp, Artificial sequence
  SiRNA target sequence
tgcaatgatattgtaaatgctgttaca

SEQ ID NO: 125280 - DNA, 27 bp, Artificial sequence
  SiRNA target sequence
gcaatgatattgtaaatgctgttacaa

SEQ ID NO: 125281 - DNA, 27 bp, Artificial sequence
  SiRNA target sequence
caatgatattgtaaatgctgttacaaa

SEQ ID NO: 125282 - DNA, 27 bp, Artificial sequence
  SiRNA target sequence
aatgatattgtaaatgctgttacaaaa

SEQ ID NO: 125283 - DNA, 27 bp, Artificial sequence
  SiRNA target sequence
atgatattgtaaatgctgttacaaaaa

SEQ ID NO: 125284 - DNA, 27 bp, Artificial sequence
  SiRNA target sequence
tgatattgtaaatgctgttacaaaaat

SEQ ID NO: 125285 - DNA, 27 bp, Artificial sequence
  SiRNA target sequence
gatattgtaaatgctgttacaaaaata

SEQ ID NO: 125286 - DNA, 27 bp, Artificial sequence
  SiRNA target sequence
atattgtaaatgctgttacaaaaataa

SEQ ID NO: 125287 - DNA, 27 bp, Artificial sequence
  SiRNA target sequence
tattgtaaatgctgttacaaaaataaa

SEQ ID NO: 125288 - DNA, 27 bp, Artificial sequence
  SiRNA target sequence
attgtaaatgctgttacaaaaataaat

SEQ ID NO: 125289 - DNA, 27 bp, Artificial sequence
  SiRNA target sequence
ttgtaaatgctgttacaaaaataaatt

SEQ ID NO: 125290 - DNA, 27 bp, Artificial sequence
  SiRNA target sequence
tgtaaatgctgttacaaaaataaattc

SEQ ID NO: 125291 - DNA, 27 bp, Artificial sequence
  SiRNA target sequence
gtaaatgctgttacaaaaataaattca

SEQ ID NO: 125292 - DNA, 27 bp, Artificial sequence
  SiRNA target sequence
taaatgctgttacaaaaataaattcat

SEQ ID NO: 125293 - DNA, 27 bp, Artificial sequence
  SiRNA target sequence
aaatgctgttacaaaaataaattcata

SEQ ID NO: 125294 - DNA, 27 bp, Artificial sequence
  SiRNA target sequence
aatgctgttacaaaaataaattcatag

SEQ ID NO: 125295 - DNA, 19 bp, Artificial sequence
  SiRNA target sequence
atggtgtataaggttttat

SEQ ID NO: 125296 - DNA, 19 bp, Artificial sequence
  SiRNA target sequence
tggtgtataaggttttatt

SEQ ID NO: 125297 - DNA, 19 bp, Artificial sequence
  SiRNA target sequence
ggtgtataaggttttattt

SEQ ID NO: 125298 - DNA, 19 bp, Artificial sequence
  SiRNA target sequence
gtgtataaggttttattta

SEQ ID NO: 125299 - DNA, 19 bp, Artificial sequence
  SiRNA target sequence
tgtataaggttttatttac

SEQ ID NO: 125300 - DNA, 19 bp, Artificial sequence
  SiRNA target sequence
gtataaggttttatttaca

SEQ ID NO: 125301 - DNA, 19 bp, Artificial sequence
  SiRNA target sequence
tataaggttttatttacag

SEQ ID NO: 125302 - DNA, 19 bp, Artificial sequence
  SiRNA target sequence
ataaggttttatttacagt

SEQ ID NO: 125303 - DNA, 19 bp, Artificial sequence
  SiRNA target sequence
taaggttttatttacagta

SEQ ID NO: 125304 - DNA, 19 bp, Artificial sequence
  SiRNA target sequence
aaggttttatttacagtaa

SEQ ID NO: 125305 - DNA, 19 bp, Artificial sequence
  SiRNA target sequence
aggttttatttacagtaat

SEQ ID NO: 125306 - DNA, 19 bp, Artificial sequence
  SiRNA target sequence
ggttttatttacagtaata

SEQ ID NO: 125307 - DNA, 19 bp, Artificial sequence
  SiRNA target sequence
gttttatttacagtaatag

SEQ ID NO: 125308 - DNA, 19 bp, Artificial sequence
  SiRNA target sequence
ttttatttacagtaatagg

SEQ ID NO: 125309 - DNA, 19 bp, Artificial sequence
  SiRNA target sequence
tttatttacagtaatagga

SEQ ID NO: 125310 - DNA, 19 bp, Artificial sequence
  SiRNA target sequence
ttatttacagtaataggat

SEQ ID NO: 125311 - DNA, 19 bp, Artificial sequence
  SiRNA target sequence
tatttacagtaataggatt

SEQ ID NO: 125312 - DNA, 19 bp, Artificial sequence
  SiRNA target sequence
atttacagtaataggatta

SEQ ID NO: 125313 - DNA, 19 bp, Artificial sequence
  SiRNA target sequence
tttacagtaataggattaa

SEQ ID NO: 125314 - DNA, 19 bp, Artificial sequence
  SiRNA target sequence
ttacagtaataggattaat

SEQ ID NO: 125315 - DNA, 19 bp, Artificial sequence
  SiRNA target sequence
tacagtaataggattaata

SEQ ID NO: 125316 - DNA, 19 bp, Artificial sequence
  SiRNA target sequence
acagtaataggattaatat

SEQ ID NO: 125317 - DNA, 19 bp, Artificial sequence
  SiRNA target sequence
cagtaataggattaatatg

SEQ ID NO: 125318 - DNA, 19 bp, Artificial sequence
  SiRNA target sequence
agtaataggattaatatgt

SEQ ID NO: 125319 - DNA, 19 bp, Artificial sequence
  SiRNA target sequence
gtaataggattaatatgtg

SEQ ID NO: 125320 - DNA, 19 bp, Artificial sequence
  SiRNA target sequence
taataggattaatatgtgg

SEQ ID NO: 125321 - DNA, 19 bp, Artificial sequence
  SiRNA target sequence
aataggattaatatgtggt

SEQ ID NO: 125322 - DNA, 19 bp, Artificial sequence
  SiRNA target sequence
ataggattaatatgtggta

SEQ ID NO: 125323 - DNA, 19 bp, Artificial sequence
  SiRNA target sequence
taggattaatatgtggtat

SEQ ID NO: 125324 - DNA, 19 bp, Artificial sequence
  SiRNA target sequence
aggattaatatgtggtata

SEQ ID NO: 125325 - DNA, 19 bp, Artificial sequence
  SiRNA target sequence
ggattaatatgtggtatac

SEQ ID NO: 125326 - DNA, 19 bp, Artificial sequence
  SiRNA target sequence
gattaatatgtggtatact

SEQ ID NO: 125327 - DNA, 19 bp, Artificial sequence
  SiRNA target sequence
attaatatgtggtatactt

SEQ ID NO: 125328 - DNA, 19 bp, Artificial sequence
  SiRNA target sequence
ttaatatgtggtatactta

SEQ ID NO: 125329 - DNA, 19 bp, Artificial sequence
  SiRNA target sequence
taatatgtggtatacttac

SEQ ID NO: 125330 - DNA, 19 bp, Artificial sequence
  SiRNA target sequence
aatatgtggtatacttaca

SEQ ID NO: 125331 - DNA, 19 bp, Artificial sequence
  SiRNA target sequence
atatgtggtatacttacaa

SEQ ID NO: 125332 - DNA, 19 bp, Artificial sequence
  SiRNA target sequence
tatgtggtatacttacaat

SEQ ID NO: 125333 - DNA, 19 bp, Artificial sequence
  SiRNA target sequence
atgtggtatacttacaata

SEQ ID NO: 125334 - DNA, 19 bp, Artificial sequence
  SiRNA target sequence
tgtggtatacttacaataa

SEQ ID NO: 125335 - DNA, 19 bp, Artificial sequence
  SiRNA target sequence
gtggtatacttacaataat

SEQ ID NO: 125336 - DNA, 19 bp, Artificial sequence
  SiRNA target sequence
tggtatacttacaataatt

SEQ ID NO: 125337 - DNA, 19 bp, Artificial sequence
  SiRNA target sequence
ggtatacttacaataatta

SEQ ID NO: 125338 - DNA, 19 bp, Artificial sequence
  SiRNA target sequence
gtatacttacaataattaa

SEQ ID NO: 125339 - DNA, 19 bp, Artificial sequence
  SiRNA target sequence
tatacttacaataattaaa

SEQ ID NO: 125340 - DNA, 19 bp, Artificial sequence
  SiRNA target sequence
atacttacaataattaaac

SEQ ID NO: 125341 - DNA, 19 bp, Artificial sequence
  SiRNA target sequence
tacttacaataattaaacg

SEQ ID NO: 125342 - DNA, 19 bp, Artificial sequence
  SiRNA target sequence
acttacaataattaaacga

SEQ ID NO: 125343 - DNA, 19 bp, Artificial sequence
  SiRNA target sequence
cttacaataattaaacgat

SEQ ID NO: 125344 - DNA, 19 bp, Artificial sequence
  SiRNA target sequence
ttacaataattaaacgata

SEQ ID NO: 125345 - DNA, 19 bp, Artificial sequence
  SiRNA target sequence
tacaataattaaacgatac

SEQ ID NO: 125346 - DNA, 19 bp, Artificial sequence
  SiRNA target sequence
acaataattaaacgataca

SEQ ID NO: 125347 - DNA, 19 bp, Artificial sequence
  SiRNA target sequence
caataattaaacgatacaa

SEQ ID NO: 125348 - DNA, 19 bp, Artificial sequence
  SiRNA target sequence
aataattaaacgatacaag

SEQ ID NO: 125349 - DNA, 19 bp, Artificial sequence
  SiRNA target sequence
ataattaaacgatacaagt

SEQ ID NO: 125350 - DNA, 19 bp, Artificial sequence
  SiRNA target sequence
taattaaacgatacaagta

SEQ ID NO: 125351 - DNA, 19 bp, Artificial sequence
  SiRNA target sequence
aattaaacgatacaagtat

SEQ ID NO: 125352 - DNA, 19 bp, Artificial sequence
  SiRNA target sequence
attaaacgatacaagtatt

SEQ ID NO: 125353 - DNA, 19 bp, Artificial sequence
  SiRNA target sequence
ttaaacgatacaagtattt

SEQ ID NO: 125354 - DNA, 19 bp, Artificial sequence
  SiRNA target sequence
taaacgatacaagtatttt

SEQ ID NO: 125355 - DNA, 19 bp, Artificial sequence
  SiRNA target sequence
aaacgatacaagtatttta

SEQ ID NO: 125356 - DNA, 19 bp, Artificial sequence
  SiRNA target sequence
aacgatacaagtattttaa

SEQ ID NO: 125357 - DNA, 19 bp, Artificial sequence
  SiRNA target sequence
acgatacaagtattttaag

SEQ ID NO: 125358 - DNA, 19 bp, Artificial sequence
  SiRNA target sequence
cgatacaagtattttaaga

SEQ ID NO: 125359 - DNA, 19 bp, Artificial sequence
  SiRNA target sequence
gatacaagtattttaagat

SEQ ID NO: 125360 - DNA, 19 bp, Artificial sequence
  SiRNA target sequence
atacaagtattttaagata

SEQ ID NO: 125361 - DNA, 19 bp, Artificial sequence
  SiRNA target sequence
tacaagtattttaagataa

SEQ ID NO: 125362 - DNA, 19 bp, Artificial sequence
  SiRNA target sequence
acaagtattttaagataaa

SEQ ID NO: 125363 - DNA, 19 bp, Artificial sequence
  SiRNA target sequence
caagtattttaagataaaa

SEQ ID NO: 125364 - DNA, 19 bp, Artificial sequence
  SiRNA target sequence
aagtattttaagataaaaa

SEQ ID NO: 125365 - DNA, 19 bp, Artificial sequence
  SiRNA target sequence
agtattttaagataaaaaa

SEQ ID NO: 125366 - DNA, 19 bp, Artificial sequence
  SiRNA target sequence
gtattttaagataaaaaaa

SEQ ID NO: 125367 - DNA, 19 bp, Artificial sequence
  SiRNA target sequence
tattttaagataaaaaaat

SEQ ID NO: 125368 - DNA, 19 bp, Artificial sequence
  SiRNA target sequence
attttaagataaaaaaatt

SEQ ID NO: 125369 - DNA, 19 bp, Artificial sequence
  SiRNA target sequence
ttttaagataaaaaaattg

SEQ ID NO: 125370 - DNA, 19 bp, Artificial sequence
  SiRNA target sequence
tttaagataaaaaaattgg

SEQ ID NO: 125371 - DNA, 19 bp, Artificial sequence
  SiRNA target sequence
ttaagataaaaaaattggc

SEQ ID NO: 125372 - DNA, 19 bp, Artificial sequence
  SiRNA target sequence
taagataaaaaaattggcc

SEQ ID NO: 125373 - DNA, 19 bp, Artificial sequence
  SiRNA target sequence
aagataaaaaaattggcct

SEQ ID NO: 125374 - DNA, 19 bp, Artificial sequence
  SiRNA target sequence
agataaaaaaattggcctt

SEQ ID NO: 125375 - DNA, 19 bp, Artificial sequence
  SiRNA target sequence
gataaaaaaattggcctta

SEQ ID NO: 125376 - DNA, 19 bp, Artificial sequence
  SiRNA target sequence
ataaaaaaattggccttaa

SEQ ID NO: 125377 - DNA, 19 bp, Artificial sequence
  SiRNA target sequence
taaaaaaattggccttaac

SEQ ID NO: 125378 - DNA, 19 bp, Artificial sequence
  SiRNA target sequence
aaaaaaattggccttaact

SEQ ID NO: 125379 - DNA, 19 bp, Artificial sequence
  SiRNA target sequence
aaaaaattggccttaactt

SEQ ID NO: 125380 - DNA, 19 bp, Artificial sequence
  SiRNA target sequence
aaaaattggccttaactta

SEQ ID NO: 125381 - DNA, 19 bp, Artificial sequence
  SiRNA target sequence
aaaattggccttaacttac

SEQ ID NO: 125382 - DNA, 19 bp, Artificial sequence
  SiRNA target sequence
aaattggccttaacttact

SEQ ID NO: 125383 - DNA, 19 bp, Artificial sequence
  SiRNA target sequence
aattggccttaacttactt

SEQ ID NO: 125384 - DNA, 19 bp, Artificial sequence
  SiRNA target sequence
attggccttaacttacttc

SEQ ID NO: 125385 - DNA, 19 bp, Artificial sequence
  SiRNA target sequence
ttggccttaacttacttcg

SEQ ID NO: 125386 - DNA, 19 bp, Artificial sequence
  SiRNA target sequence
tggccttaacttacttcgg

SEQ ID NO: 125387 - DNA, 19 bp, Artificial sequence
  SiRNA target sequence
ggccttaacttacttcggg

SEQ ID NO: 125388 - DNA, 19 bp, Artificial sequence
  SiRNA target sequence
gccttaacttacttcggga

SEQ ID NO: 125389 - DNA, 19 bp, Artificial sequence
  SiRNA target sequence
ccttaacttacttcgggaa

SEQ ID NO: 125390 - DNA, 19 bp, Artificial sequence
  SiRNA target sequence
cttaacttacttcgggaaa

SEQ ID NO: 125391 - DNA, 19 bp, Artificial sequence
  SiRNA target sequence
ttaacttacttcgggaaac

SEQ ID NO: 125392 - DNA, 19 bp, Artificial sequence
  SiRNA target sequence
taacttacttcgggaaaca

SEQ ID NO: 125393 - DNA, 19 bp, Artificial sequence
  SiRNA target sequence
aacttacttcgggaaacaa

SEQ ID NO: 125394 - DNA, 19 bp, Artificial sequence
  SiRNA target sequence
acttacttcgggaaacaag

SEQ ID NO: 125395 - DNA, 19 bp, Artificial sequence
  SiRNA target sequence
cttacttcgggaaacaaga

SEQ ID NO: 125396 - DNA, 19 bp, Artificial sequence
  SiRNA target sequence
ttacttcgggaaacaagac

SEQ ID NO: 125397 - DNA, 19 bp, Artificial sequence
  SiRNA target sequence
tacttcgggaaacaagact

SEQ ID NO: 125398 - DNA, 19 bp, Artificial sequence
  SiRNA target sequence
acttcgggaaacaagactt

SEQ ID NO: 125399 - DNA, 19 bp, Artificial sequence
  SiRNA target sequence
cttcgggaaacaagacttg

SEQ ID NO: 125400 - DNA, 19 bp, Artificial sequence
  SiRNA target sequence
ttcgggaaacaagacttgc

SEQ ID NO: 125401 - DNA, 19 bp, Artificial sequence
  SiRNA target sequence
tcgggaaacaagacttgca

SEQ ID NO: 125402 - DNA, 19 bp, Artificial sequence
  SiRNA target sequence
cgggaaacaagacttgcaa

SEQ ID NO: 125403 - DNA, 19 bp, Artificial sequence
  SiRNA target sequence
gggaaacaagacttgcaat

SEQ ID NO: 125404 - DNA, 19 bp, Artificial sequence
  SiRNA target sequence
ggaaacaagacttgcaatg

SEQ ID NO: 125405 - DNA, 19 bp, Artificial sequence
  SiRNA target sequence
gaaacaagacttgcaatgg

SEQ ID NO: 125406 - DNA, 19 bp, Artificial sequence
  SiRNA target sequence
aaacaagacttgcaatgga

SEQ ID NO: 125407 - DNA, 19 bp, Artificial sequence
  SiRNA target sequence
aacaagacttgcaatggaa

SEQ ID NO: 125408 - DNA, 19 bp, Artificial sequence
  SiRNA target sequence
acaagacttgcaatggaaa

SEQ ID NO: 125409 - DNA, 19 bp, Artificial sequence
  SiRNA target sequence
caagacttgcaatggaaac

SEQ ID NO: 125410 - DNA, 19 bp, Artificial sequence
  SiRNA target sequence
aagacttgcaatggaaacc

SEQ ID NO: 125411 - DNA, 19 bp, Artificial sequence
  SiRNA target sequence
agacttgcaatggaaacct

SEQ ID NO: 125412 - DNA, 19 bp, Artificial sequence
  SiRNA target sequence
gacttgcaatggaaaccta

SEQ ID NO: 125413 - DNA, 19 bp, Artificial sequence
  SiRNA target sequence
acttgcaatggaaacctaa

SEQ ID NO: 125414 - DNA, 19 bp, Artificial sequence
  SiRNA target sequence
cttgcaatggaaacctaaa

SEQ ID NO: 125415 - DNA, 19 bp, Artificial sequence
  SiRNA target sequence
ttgcaatggaaacctaaaa

SEQ ID NO: 125416 - DNA, 19 bp, Artificial sequence
  SiRNA target sequence
tgcaatggaaacctaaaag

SEQ ID NO: 125417 - DNA, 19 bp, Artificial sequence
  SiRNA target sequence
gcaatggaaacctaaaagt

SEQ ID NO: 125418 - DNA, 19 bp, Artificial sequence
  SiRNA target sequence
caatggaaacctaaaagtc

SEQ ID NO: 125419 - DNA, 19 bp, Artificial sequence
  SiRNA target sequence
aatggaaacctaaaagtcg

SEQ ID NO: 125420 - DNA, 19 bp, Artificial sequence
  SiRNA target sequence
atggaaacctaaaagtcgg

SEQ ID NO: 125421 - DNA, 19 bp, Artificial sequence
  SiRNA target sequence
tggaaacctaaaagtcggt

SEQ ID NO: 125422 - DNA, 19 bp, Artificial sequence
  SiRNA target sequence
ggaaacctaaaagtcggtc

SEQ ID NO: 125423 - DNA, 19 bp, Artificial sequence
  SiRNA target sequence
gaaacctaaaagtcggtca

SEQ ID NO: 125424 - DNA, 19 bp, Artificial sequence
  SiRNA target sequence
aaacctaaaagtcggtcag

SEQ ID NO: 125425 - DNA, 19 bp, Artificial sequence
  SiRNA target sequence
aacctaaaagtcggtcaga

SEQ ID NO: 125426 - DNA, 19 bp, Artificial sequence
  SiRNA target sequence
acctaaaagtcggtcagaa

SEQ ID NO: 125427 - DNA, 19 bp, Artificial sequence
  SiRNA target sequence
cctaaaagtcggtcagaaa

SEQ ID NO: 125428 - DNA, 19 bp, Artificial sequence
  SiRNA target sequence
ctaaaagtcggtcagaaat

SEQ ID NO: 125429 - DNA, 19 bp, Artificial sequence
  SiRNA target sequence
taaaagtcggtcagaaatt

SEQ ID NO: 125430 - DNA, 19 bp, Artificial sequence
  SiRNA target sequence
aaaagtcggtcagaaatta

SEQ ID NO: 125431 - DNA, 19 bp, Artificial sequence
  SiRNA target sequence
aaagtcggtcagaaattat

SEQ ID NO: 125432 - DNA, 19 bp, Artificial sequence
  SiRNA target sequence
aagtcggtcagaaattatt

SEQ ID NO: 125433 - DNA, 19 bp, Artificial sequence
  SiRNA target sequence
agtcggtcagaaattatta

SEQ ID NO: 125434 - DNA, 19 bp, Artificial sequence
  SiRNA target sequence
gtcggtcagaaattattaa

SEQ ID NO: 125435 - DNA, 19 bp, Artificial sequence
  SiRNA target sequence
tcggtcagaaattattaac

SEQ ID NO: 125436 - DNA, 19 bp, Artificial sequence
  SiRNA target sequence
cggtcagaaattattaacg

SEQ ID NO: 125437 - DNA, 19 bp, Artificial sequence
  SiRNA target sequence
ggtcagaaattattaacga

SEQ ID NO: 125438 - DNA, 19 bp, Artificial sequence
  SiRNA target sequence
gtcagaaattattaacgat

SEQ ID NO: 125439 - DNA, 19 bp, Artificial sequence
  SiRNA target sequence
tcagaaattattaacgatt

SEQ ID NO: 125440 - DNA, 19 bp, Artificial sequence
  SiRNA target sequence
cagaaattattaacgattt

SEQ ID NO: 125441 - DNA, 19 bp, Artificial sequence
  SiRNA target sequence
agaaattattaacgattta

SEQ ID NO: 125442 - DNA, 19 bp, Artificial sequence
  SiRNA target sequence
gaaattattaacgatttaa

SEQ ID NO: 125443 - DNA, 19 bp, Artificial sequence
  SiRNA target sequence
aaattattaacgatttaaa

SEQ ID NO: 125444 - DNA, 19 bp, Artificial sequence
  SiRNA target sequence
aattattaacgatttaaaa

SEQ ID NO: 125445 - DNA, 19 bp, Artificial sequence
  SiRNA target sequence
attattaacgatttaaaaa

SEQ ID NO: 125446 - DNA, 19 bp, Artificial sequence
  SiRNA target sequence
ttattaacgatttaaaaaa

SEQ ID NO: 125447 - DNA, 19 bp, Artificial sequence
  SiRNA target sequence
tattaacgatttaaaaaat

SEQ ID NO: 125448 - DNA, 19 bp, Artificial sequence
  SiRNA target sequence
attaacgatttaaaaaata

SEQ ID NO: 125449 - DNA, 19 bp, Artificial sequence
  SiRNA target sequence
ttaacgatttaaaaaatac

SEQ ID NO: 125450 - DNA, 19 bp, Artificial sequence
  SiRNA target sequence
taacgatttaaaaaataca

SEQ ID NO: 125451 - DNA, 19 bp, Artificial sequence
  SiRNA target sequence
aacgatttaaaaaatacaa

SEQ ID NO: 125452 - DNA, 19 bp, Artificial sequence
  SiRNA target sequence
acgatttaaaaaatacaaa

SEQ ID NO: 125453 - DNA, 19 bp, Artificial sequence
  SiRNA target sequence
cgatttaaaaaatacaaac

SEQ ID NO: 125454 - DNA, 19 bp, Artificial sequence
  SiRNA target sequence
gatttaaaaaatacaaact

SEQ ID NO: 125455 - DNA, 19 bp, Artificial sequence
  SiRNA target sequence
atttaaaaaatacaaactt

SEQ ID NO: 125456 - DNA, 19 bp, Artificial sequence
  SiRNA target sequence
tttaaaaaatacaaacttt

SEQ ID NO: 125457 - DNA, 19 bp, Artificial sequence
  SiRNA target sequence
ttaaaaaatacaaactttg

SEQ ID NO: 125458 - DNA, 19 bp, Artificial sequence
  SiRNA target sequence
taaaaaatacaaactttga

SEQ ID NO: 125459 - DNA, 19 bp, Artificial sequence
  SiRNA target sequence
aaaaaatacaaactttgac

SEQ ID NO: 125460 - DNA, 19 bp, Artificial sequence
  SiRNA target sequence
aaaaatacaaactttgaca

SEQ ID NO: 125461 - DNA, 19 bp, Artificial sequence
  SiRNA target sequence
aaaatacaaactttgacat

SEQ ID NO: 125462 - DNA, 19 bp, Artificial sequence
  SiRNA target sequence
aaatacaaactttgacata

SEQ ID NO: 125463 - DNA, 19 bp, Artificial sequence
  SiRNA target sequence
aatacaaactttgacatat

SEQ ID NO: 125464 - DNA, 19 bp, Artificial sequence
  SiRNA target sequence
atacaaactttgacatatt

SEQ ID NO: 125465 - DNA, 19 bp, Artificial sequence
  SiRNA target sequence
tacaaactttgacatattg

SEQ ID NO: 125466 - DNA, 19 bp, Artificial sequence
  SiRNA target sequence
acaaactttgacatattga

SEQ ID NO: 125467 - DNA, 19 bp, Artificial sequence
  SiRNA target sequence
caaactttgacatattgat

SEQ ID NO: 125468 - DNA, 19 bp, Artificial sequence
  SiRNA target sequence
aaactttgacatattgatt

SEQ ID NO: 125469 - DNA, 19 bp, Artificial sequence
  SiRNA target sequence
aactttgacatattgatta

SEQ ID NO: 125470 - DNA, 19 bp, Artificial sequence
  SiRNA target sequence
actttgacatattgattat

SEQ ID NO: 125471 - DNA, 19 bp, Artificial sequence
  SiRNA target sequence
ctttgacatattgattatt

SEQ ID NO: 125472 - DNA, 19 bp, Artificial sequence
  SiRNA target sequence
tttgacatattgattattg

SEQ ID NO: 125473 - DNA, 19 bp, Artificial sequence
  SiRNA target sequence
ttgacatattgattattgg

SEQ ID NO: 125474 - DNA, 19 bp, Artificial sequence
  SiRNA target sequence
tgacatattgattattggt

SEQ ID NO: 125475 - DNA, 19 bp, Artificial sequence
  SiRNA target sequence
gacatattgattattggtg

SEQ ID NO: 125476 - DNA, 19 bp, Artificial sequence
  SiRNA target sequence
acatattgattattggtgg

SEQ ID NO: 125477 - DNA, 19 bp, Artificial sequence
  SiRNA target sequence
catattgattattggtggc

SEQ ID NO: 125478 - DNA, 19 bp, Artificial sequence
  SiRNA target sequence
atattgattattggtggcg

SEQ ID NO: 125479 - DNA, 19 bp, Artificial sequence
  SiRNA target sequence
tattgattattggtggcgg

SEQ ID NO: 125480 - DNA, 19 bp, Artificial sequence
  SiRNA target sequence
attgattattggtggcggt

SEQ ID NO: 125481 - DNA, 19 bp, Artificial sequence
  SiRNA target sequence
ttgattattggtggcggtt

SEQ ID NO: 125482 - DNA, 19 bp, Artificial sequence
  SiRNA target sequence
tgattattggtggcggttc

SEQ ID NO: 125483 - DNA, 19 bp, Artificial sequence
  SiRNA target sequence
gattattggtggcggttca

SEQ ID NO: 125484 - DNA, 19 bp, Artificial sequence
  SiRNA target sequence
attattggtggcggttcaa

SEQ ID NO: 125485 - DNA, 19 bp, Artificial sequence
  SiRNA target sequence
ttattggtggcggttcaac

SEQ ID NO: 125486 - DNA, 19 bp, Artificial sequence
  SiRNA target sequence
tattggtggcggttcaacg

SEQ ID NO: 125487 - DNA, 19 bp, Artificial sequence
  SiRNA target sequence
attggtggcggttcaacgg

SEQ ID NO: 125488 - DNA, 19 bp, Artificial sequence
  SiRNA target sequence
ttggtggcggttcaacggg

SEQ ID NO: 125489 - DNA, 19 bp, Artificial sequence
  SiRNA target sequence
tggtggcggttcaacggga

SEQ ID NO: 125490 - DNA, 19 bp, Artificial sequence
  SiRNA target sequence
ggtggcggttcaacgggaa

SEQ ID NO: 125491 - DNA, 19 bp, Artificial sequence
  SiRNA target sequence
gtggcggttcaacgggaat

SEQ ID NO: 125492 - DNA, 19 bp, Artificial sequence
  SiRNA target sequence
tggcggttcaacgggaatg

SEQ ID NO: 125493 - DNA, 19 bp, Artificial sequence
  SiRNA target sequence
ggcggttcaacgggaatgg

SEQ ID NO: 125494 - DNA, 19 bp, Artificial sequence
  SiRNA target sequence
gcggttcaacgggaatggg

SEQ ID NO: 125495 - DNA, 19 bp, Artificial sequence
  SiRNA target sequence
cggttcaacgggaatggga

SEQ ID NO: 125496 - DNA, 19 bp, Artificial sequence
  SiRNA target sequence
ggttcaacgggaatgggat

SEQ ID NO: 125497 - DNA, 19 bp, Artificial sequence
  SiRNA target sequence
gttcaacgggaatgggatg

SEQ ID NO: 125498 - DNA, 19 bp, Artificial sequence
  SiRNA target sequence
ttcaacgggaatgggatgt

SEQ ID NO: 125499 - DNA, 19 bp, Artificial sequence
  SiRNA target sequence
tcaacgggaatgggatgtg

SEQ ID NO: 125500 - DNA, 19 bp, Artificial sequence
  SiRNA target sequence
caacgggaatgggatgtgc

SEQ ID NO: 125501 - DNA, 19 bp, Artificial sequence
  SiRNA target sequence
aacgggaatgggatgtgca

SEQ ID NO: 125502 - DNA, 19 bp, Artificial sequence
  SiRNA target sequence
acgggaatgggatgtgcaa

SEQ ID NO: 125503 - DNA, 19 bp, Artificial sequence
  SiRNA target sequence
cgggaatgggatgtgcaat

SEQ ID NO: 125504 - DNA, 19 bp, Artificial sequence
  SiRNA target sequence
gggaatgggatgtgcaatc

SEQ ID NO: 125505 - DNA, 19 bp, Artificial sequence
  SiRNA target sequence
ggaatgggatgtgcaatcg

SEQ ID NO: 125506 - DNA, 19 bp, Artificial sequence
  SiRNA target sequence
gaatgggatgtgcaatcga

SEQ ID NO: 125507 - DNA, 19 bp, Artificial sequence
  SiRNA target sequence
aatgggatgtgcaatcgaa

SEQ ID NO: 125508 - DNA, 19 bp, Artificial sequence
  SiRNA target sequence
atgggatgtgcaatcgaag

SEQ ID NO: 125509 - DNA, 19 bp, Artificial sequence
  SiRNA target sequence
tgggatgtgcaatcgaagc

SEQ ID NO: 125510 - DNA, 19 bp, Artificial sequence
  SiRNA target sequence
gggatgtgcaatcgaagca

SEQ ID NO: 125511 - DNA, 19 bp, Artificial sequence
  SiRNA target sequence
ggatgtgcaatcgaagcag

SEQ ID NO: 125512 - DNA, 19 bp, Artificial sequence
  SiRNA target sequence
gatgtgcaatcgaagcagc

SEQ ID NO: 125513 - DNA, 19 bp, Artificial sequence
  SiRNA target sequence
atgtgcaatcgaagcagct

SEQ ID NO: 125514 - DNA, 19 bp, Artificial sequence
  SiRNA target sequence
tgtgcaatcgaagcagcta

SEQ ID NO: 125515 - DNA, 19 bp, Artificial sequence
  SiRNA target sequence
gtgcaatcgaagcagctac

SEQ ID NO: 125516 - DNA, 19 bp, Artificial sequence
  SiRNA target sequence
tgcaatcgaagcagctaca

SEQ ID NO: 125517 - DNA, 19 bp, Artificial sequence
  SiRNA target sequence
gcaatcgaagcagctacac

SEQ ID NO: 125518 - DNA, 19 bp, Artificial sequence
  SiRNA target sequence
caatcgaagcagctacacg

SEQ ID NO: 125519 - DNA, 19 bp, Artificial sequence
  SiRNA target sequence
aatcgaagcagctacacga

SEQ ID NO: 125520 - DNA, 19 bp, Artificial sequence
  SiRNA target sequence
atcgaagcagctacacgag

SEQ ID NO: 125521 - DNA, 19 bp, Artificial sequence
  SiRNA target sequence
tcgaagcagctacacgagg

SEQ ID NO: 125522 - DNA, 19 bp, Artificial sequence
  SiRNA target sequence
cgaagcagctacacgaggt

SEQ ID NO: 125523 - DNA, 19 bp, Artificial sequence
  SiRNA target sequence
gaagcagctacacgaggta

SEQ ID NO: 125524 - DNA, 19 bp, Artificial sequence
  SiRNA target sequence
aagcagctacacgaggtat

SEQ ID NO: 125525 - DNA, 19 bp, Artificial sequence
  SiRNA target sequence
agcagctacacgaggtata

SEQ ID NO: 125526 - DNA, 19 bp, Artificial sequence
  SiRNA target sequence
gcagctacacgaggtataa

SEQ ID NO: 125527 - DNA, 19 bp, Artificial sequence
  SiRNA target sequence
cagctacacgaggtataag

SEQ ID NO: 125528 - DNA, 19 bp, Artificial sequence
  SiRNA target sequence
agctacacgaggtataagt

SEQ ID NO: 125529 - DNA, 19 bp, Artificial sequence
  SiRNA target sequence
gctacacgaggtataagtg

SEQ ID NO: 125530 - DNA, 19 bp, Artificial sequence
  SiRNA target sequence
ctacacgaggtataagtgt

SEQ ID NO: 125531 - DNA, 19 bp, Artificial sequence
  SiRNA target sequence
tacacgaggtataagtgtt

SEQ ID NO: 125532 - DNA, 19 bp, Artificial sequence
  SiRNA target sequence
acacgaggtataagtgttg

SEQ ID NO: 125533 - DNA, 19 bp, Artificial sequence
  SiRNA target sequence
cacgaggtataagtgttgg

SEQ ID NO: 125534 - DNA, 19 bp, Artificial sequence
  SiRNA target sequence
acgaggtataagtgttggc

SEQ ID NO: 125535 - DNA, 19 bp, Artificial sequence
  SiRNA target sequence
cgaggtataagtgttggcc

SEQ ID NO: 125536 - DNA, 19 bp, Artificial sequence
  SiRNA target sequence
gaggtataagtgttggcct

SEQ ID NO: 125537 - DNA, 19 bp, Artificial sequence
  SiRNA target sequence
aggtataagtgttggcctg

SEQ ID NO: 125538 - DNA, 19 bp, Artificial sequence
  SiRNA target sequence
ggtataagtgttggcctga

SEQ ID NO: 125539 - DNA, 19 bp, Artificial sequence
  SiRNA target sequence
gtataagtgttggcctgat

SEQ ID NO: 125540 - DNA, 19 bp, Artificial sequence
  SiRNA target sequence
tataagtgttggcctgata

SEQ ID NO: 125541 - DNA, 19 bp, Artificial sequence
  SiRNA target sequence
ataagtgttggcctgatag

SEQ ID NO: 125542 - DNA, 19 bp, Artificial sequence
  SiRNA target sequence
taagtgttggcctgataga

SEQ ID NO: 125543 - DNA, 19 bp, Artificial sequence
  SiRNA target sequence
aagtgttggcctgatagaa

SEQ ID NO: 125544 - DNA, 19 bp, Artificial sequence
  SiRNA target sequence
agtgttggcctgatagaag

SEQ ID NO: 125545 - DNA, 19 bp, Artificial sequence
  SiRNA target sequence
gtgttggcctgatagaagc

SEQ ID NO: 125546 - DNA, 19 bp, Artificial sequence
  SiRNA target sequence
tgttggcctgatagaagca

SEQ ID NO: 125547 - DNA, 19 bp, Artificial sequence
  SiRNA target sequence
gttggcctgatagaagcac

SEQ ID NO: 125548 - DNA, 19 bp, Artificial sequence
  SiRNA target sequence
ttggcctgatagaagcaca

SEQ ID NO: 125549 - DNA, 19 bp, Artificial sequence
  SiRNA target sequence
tggcctgatagaagcacat

SEQ ID NO: 125550 - DNA, 19 bp, Artificial sequence
  SiRNA target sequence
ggcctgatagaagcacatg

SEQ ID NO: 125551 - DNA, 19 bp, Artificial sequence
  SiRNA target sequence
gcctgatagaagcacatga

SEQ ID NO: 125552 - DNA, 19 bp, Artificial sequence
  SiRNA target sequence
cctgatagaagcacatgat

SEQ ID NO: 125553 - DNA, 19 bp, Artificial sequence
  SiRNA target sequence
ctgatagaagcacatgatt

SEQ ID NO: 125554 - DNA, 19 bp, Artificial sequence
  SiRNA target sequence
tgatagaagcacatgattt

SEQ ID NO: 125555 - DNA, 19 bp, Artificial sequence
  SiRNA target sequence
gatagaagcacatgatttt

SEQ ID NO: 125556 - DNA, 19 bp, Artificial sequence
  SiRNA target sequence
atagaagcacatgattttg

SEQ ID NO: 125557 - DNA, 19 bp, Artificial sequence
  SiRNA target sequence
tagaagcacatgattttgg

SEQ ID NO: 125558 - DNA, 19 bp, Artificial sequence
  SiRNA target sequence
agaagcacatgattttggt

SEQ ID NO: 125559 - DNA, 19 bp, Artificial sequence
  SiRNA target sequence
gaagcacatgattttggtt

SEQ ID NO: 125560 - DNA, 19 bp, Artificial sequence
  SiRNA target sequence
aagcacatgattttggttc

SEQ ID NO: 125561 - DNA, 19 bp, Artificial sequence
  SiRNA target sequence
agcacatgattttggttcg

SEQ ID NO: 125562 - DNA, 19 bp, Artificial sequence
  SiRNA target sequence
gcacatgattttggttcgg

SEQ ID NO: 125563 - DNA, 19 bp, Artificial sequence
  SiRNA target sequence
cacatgattttggttcggg

SEQ ID NO: 125564 - DNA, 19 bp, Artificial sequence
  SiRNA target sequence
acatgattttggttcgggc

SEQ ID NO: 125565 - DNA, 19 bp, Artificial sequence
  SiRNA target sequence
catgattttggttcgggca

SEQ ID NO: 125566 - DNA, 19 bp, Artificial sequence
  SiRNA target sequence
atgattttggttcgggcac

SEQ ID NO: 125567 - DNA, 19 bp, Artificial sequence
  SiRNA target sequence
tgattttggttcgggcacg

SEQ ID NO: 125568 - DNA, 19 bp, Artificial sequence
  SiRNA target sequence
gattttggttcgggcacga

SEQ ID NO: 125569 - DNA, 19 bp, Artificial sequence
  SiRNA target sequence
attttggttcgggcacgag

SEQ ID NO: 125570 - DNA, 19 bp, Artificial sequence
  SiRNA target sequence
ttttggttcgggcacgagt

SEQ ID NO: 125571 - DNA, 19 bp, Artificial sequence
  SiRNA target sequence
tttggttcgggcacgagtt

SEQ ID NO: 125572 - DNA, 19 bp, Artificial sequence
  SiRNA target sequence
ttggttcgggcacgagttc

SEQ ID NO: 125573 - DNA, 19 bp, Artificial sequence
  SiRNA target sequence
tggttcgggcacgagttca

SEQ ID NO: 125574 - DNA, 19 bp, Artificial sequence
  SiRNA target sequence
ggttcgggcacgagttcaa

SEQ ID NO: 125575 - DNA, 19 bp, Artificial sequence
  SiRNA target sequence
gttcgggcacgagttcaaa

SEQ ID NO: 125576 - DNA, 19 bp, Artificial sequence
  SiRNA target sequence
ttcgggcacgagttcaaaa

SEQ ID NO: 125577 - DNA, 19 bp, Artificial sequence
  SiRNA target sequence
tcgggcacgagttcaaaat

SEQ ID NO: 125578 - DNA, 19 bp, Artificial sequence
  SiRNA target sequence
cgggcacgagttcaaaatc

SEQ ID NO: 125579 - DNA, 19 bp, Artificial sequence
  SiRNA target sequence
gggcacgagttcaaaatct

SEQ ID NO: 125580 - DNA, 19 bp, Artificial sequence
  SiRNA target sequence
ggcacgagttcaaaatcta

SEQ ID NO: 125581 - DNA, 19 bp, Artificial sequence
  SiRNA target sequence
gcacgagttcaaaatctac

SEQ ID NO: 125582 - DNA, 19 bp, Artificial sequence
  SiRNA target sequence
cacgagttcaaaatctaca

SEQ ID NO: 125583 - DNA, 19 bp, Artificial sequence
  SiRNA target sequence
acgagttcaaaatctacaa

SEQ ID NO: 125584 - DNA, 19 bp, Artificial sequence
  SiRNA target sequence
cgagttcaaaatctacaaa

SEQ ID NO: 125585 - DNA, 19 bp, Artificial sequence
  SiRNA target sequence
gagttcaaaatctacaaaa

SEQ ID NO: 125586 - DNA, 19 bp, Artificial sequence
  SiRNA target sequence
agttcaaaatctacaaaac

SEQ ID NO: 125587 - DNA, 19 bp, Artificial sequence
  SiRNA target sequence
gttcaaaatctacaaaact

SEQ ID NO: 125588 - DNA, 19 bp, Artificial sequence
  SiRNA target sequence
ttcaaaatctacaaaactt

SEQ ID NO: 125589 - DNA, 19 bp, Artificial sequence
  SiRNA target sequence
tcaaaatctacaaaacttt

SEQ ID NO: 125590 - DNA, 19 bp, Artificial sequence
  SiRNA target sequence
caaaatctacaaaactttt

SEQ ID NO: 125591 - DNA, 19 bp, Artificial sequence
  SiRNA target sequence
aaaatctacaaaacttttt

SEQ ID NO: 125592 - DNA, 19 bp, Artificial sequence
  SiRNA target sequence
aaatctacaaaactttttc

SEQ ID NO: 125593 - DNA, 19 bp, Artificial sequence
  SiRNA target sequence
aatctacaaaactttttca

SEQ ID NO: 125594 - DNA, 19 bp, Artificial sequence
  SiRNA target sequence
atctacaaaactttttcat

SEQ ID NO: 125595 - DNA, 19 bp, Artificial sequence
  SiRNA target sequence
tctacaaaactttttcatg

SEQ ID NO: 125596 - DNA, 19 bp, Artificial sequence
  SiRNA target sequence
ctacaaaactttttcatgg

SEQ ID NO: 125597 - DNA, 19 bp, Artificial sequence
  SiRNA target sequence
tacaaaactttttcatggc

SEQ ID NO: 125598 - DNA, 19 bp, Artificial sequence
  SiRNA target sequence
acaaaactttttcatggcg

SEQ ID NO: 125599 - DNA, 19 bp, Artificial sequence
  SiRNA target sequence
caaaactttttcatggcgg

SEQ ID NO: 125600 - DNA, 19 bp, Artificial sequence
  SiRNA target sequence
aaaactttttcatggcggt

SEQ ID NO: 125601 - DNA, 19 bp, Artificial sequence
  SiRNA target sequence
aaactttttcatggcggtg

SEQ ID NO: 125602 - DNA, 19 bp, Artificial sequence
  SiRNA target sequence
aactttttcatggcggtgt

SEQ ID NO: 125603 - DNA, 19 bp, Artificial sequence
  SiRNA target sequence
actttttcatggcggtgta

SEQ ID NO: 125604 - DNA, 19 bp, Artificial sequence
  SiRNA target sequence
ctttttcatggcggtgtac

SEQ ID NO: 125605 - DNA, 19 bp, Artificial sequence
  SiRNA target sequence
tttttcatggcggtgtacg

SEQ ID NO: 125606 - DNA, 19 bp, Artificial sequence
  SiRNA target sequence
ttttcatggcggtgtacgc

SEQ ID NO: 125607 - DNA, 19 bp, Artificial sequence
  SiRNA target sequence
tttcatggcggtgtacgct

SEQ ID NO: 125608 - DNA, 19 bp, Artificial sequence
  SiRNA target sequence
ttcatggcggtgtacgcta

SEQ ID NO: 125609 - DNA, 19 bp, Artificial sequence
  SiRNA target sequence
tcatggcggtgtacgctac

SEQ ID NO: 125610 - DNA, 19 bp, Artificial sequence
  SiRNA target sequence
catggcggtgtacgctacc

SEQ ID NO: 125611 - DNA, 19 bp, Artificial sequence
  SiRNA target sequence
atggcggtgtacgctacct

SEQ ID NO: 125612 - DNA, 19 bp, Artificial sequence
  SiRNA target sequence
tggcggtgtacgctacctt

SEQ ID NO: 125613 - DNA, 19 bp, Artificial sequence
  SiRNA target sequence
ggcggtgtacgctaccttg

SEQ ID NO: 125614 - DNA, 19 bp, Artificial sequence
  SiRNA target sequence
gcggtgtacgctaccttga

SEQ ID NO: 125615 - DNA, 19 bp, Artificial sequence
  SiRNA target sequence
cggtgtacgctaccttgaa

SEQ ID NO: 125616 - DNA, 19 bp, Artificial sequence
  SiRNA target sequence
ggtgtacgctaccttgaaa

SEQ ID NO: 125617 - DNA, 19 bp, Artificial sequence
  SiRNA target sequence
gtgtacgctaccttgaaaa

SEQ ID NO: 125618 - DNA, 19 bp, Artificial sequence
  SiRNA target sequence
tgtacgctaccttgaaaaa

SEQ ID NO: 125619 - DNA, 19 bp, Artificial sequence
  SiRNA target sequence
gtacgctaccttgaaaaag

SEQ ID NO: 125620 - DNA, 19 bp, Artificial sequence
  SiRNA target sequence
tacgctaccttgaaaaagc

SEQ ID NO: 125621 - DNA, 19 bp, Artificial sequence
  SiRNA target sequence
acgctaccttgaaaaagct

SEQ ID NO: 125622 - DNA, 19 bp, Artificial sequence
  SiRNA target sequence
cgctaccttgaaaaagctg

SEQ ID NO: 125623 - DNA, 19 bp, Artificial sequence
  SiRNA target sequence
gctaccttgaaaaagctgt

SEQ ID NO: 125624 - DNA, 19 bp, Artificial sequence
  SiRNA target sequence
ctaccttgaaaaagctgtt

SEQ ID NO: 125625 - DNA, 19 bp, Artificial sequence
  SiRNA target sequence
taccttgaaaaagctgtta

SEQ ID NO: 125626 - DNA, 19 bp, Artificial sequence
  SiRNA target sequence
accttgaaaaagctgttaa

SEQ ID NO: 125627 - DNA, 19 bp, Artificial sequence
  SiRNA target sequence
ccttgaaaaagctgttaat

SEQ ID NO: 125628 - DNA, 19 bp, Artificial sequence
  SiRNA target sequence
cttgaaaaagctgttaatg

SEQ ID NO: 125629 - DNA, 19 bp, Artificial sequence
  SiRNA target sequence
ttgaaaaagctgttaatga

SEQ ID NO: 125630 - DNA, 19 bp, Artificial sequence
  SiRNA target sequence
tgaaaaagctgttaatgat

SEQ ID NO: 125631 - DNA, 19 bp, Artificial sequence
  SiRNA target sequence
gaaaaagctgttaatgatt

SEQ ID NO: 125632 - DNA, 19 bp, Artificial sequence
  SiRNA target sequence
aaaaagctgttaatgattt

SEQ ID NO: 125633 - DNA, 19 bp, Artificial sequence
  SiRNA target sequence
aaaagctgttaatgattta

SEQ ID NO: 125634 - DNA, 19 bp, Artificial sequence
  SiRNA target sequence
aaagctgttaatgatttag

SEQ ID NO: 125635 - DNA, 19 bp, Artificial sequence
  SiRNA target sequence
aagctgttaatgatttaga

SEQ ID NO: 125636 - DNA, 19 bp, Artificial sequence
  SiRNA target sequence
agctgttaatgatttagat

SEQ ID NO: 125637 - DNA, 19 bp, Artificial sequence
  SiRNA target sequence
gctgttaatgatttagata

SEQ ID NO: 125638 - DNA, 19 bp, Artificial sequence
  SiRNA target sequence
ctgttaatgatttagatag

SEQ ID NO: 125639 - DNA, 19 bp, Artificial sequence
  SiRNA target sequence
tgttaatgatttagataga

SEQ ID NO: 125640 - DNA, 19 bp, Artificial sequence
  SiRNA target sequence
gttaatgatttagatagat

SEQ ID NO: 125641 - DNA, 19 bp, Artificial sequence
  SiRNA target sequence
ttaatgatttagatagatc

SEQ ID NO: 125642 - DNA, 19 bp, Artificial sequence
  SiRNA target sequence
taatgatttagatagatct

SEQ ID NO: 125643 - DNA, 19 bp, Artificial sequence
  SiRNA target sequence
aatgatttagatagatctc

SEQ ID NO: 125644 - DNA, 19 bp, Artificial sequence
  SiRNA target sequence
atgatttagatagatctca

SEQ ID NO: 125645 - DNA, 19 bp, Artificial sequence
  SiRNA target sequence
tgatttagatagatctcag

SEQ ID NO: 125646 - DNA, 19 bp, Artificial sequence
  SiRNA target sequence
gatttagatagatctcagt

SEQ ID NO: 125647 - DNA, 19 bp, Artificial sequence
  SiRNA target sequence
atttagatagatctcagtt

SEQ ID NO: 125648 - DNA, 19 bp, Artificial sequence
  SiRNA target sequence
tttagatagatctcagttt

SEQ ID NO: 125649 - DNA, 19 bp, Artificial sequence
  SiRNA target sequence
ttagatagatctcagtttg

SEQ ID NO: 125650 - DNA, 19 bp, Artificial sequence
  SiRNA target sequence
tagatagatctcagtttga

SEQ ID NO: 125651 - DNA, 19 bp, Artificial sequence
  SiRNA target sequence
agatagatctcagtttgac

SEQ ID NO: 125652 - DNA, 19 bp, Artificial sequence
  SiRNA target sequence
gatagatctcagtttgact

SEQ ID NO: 125653 - DNA, 19 bp, Artificial sequence
  SiRNA target sequence
atagatctcagtttgactt

SEQ ID NO: 125654 - DNA, 19 bp, Artificial sequence
  SiRNA target sequence
tagatctcagtttgacttg

SEQ ID NO: 125655 - DNA, 19 bp, Artificial sequence
  SiRNA target sequence
agatctcagtttgacttgg

SEQ ID NO: 125656 - DNA, 19 bp, Artificial sequence
  SiRNA target sequence
gatctcagtttgacttggt

SEQ ID NO: 125657 - DNA, 19 bp, Artificial sequence
  SiRNA target sequence
atctcagtttgacttggta

SEQ ID NO: 125658 - DNA, 19 bp, Artificial sequence
  SiRNA target sequence
tctcagtttgacttggtat

SEQ ID NO: 125659 - DNA, 19 bp, Artificial sequence
  SiRNA target sequence
ctcagtttgacttggtatc

SEQ ID NO: 125660 - DNA, 19 bp, Artificial sequence
  SiRNA target sequence
tcagtttgacttggtatct

SEQ ID NO: 125661 - DNA, 19 bp, Artificial sequence
  SiRNA target sequence
cagtttgacttggtatctg

SEQ ID NO: 125662 - DNA, 19 bp, Artificial sequence
  SiRNA target sequence
agtttgacttggtatctga

SEQ ID NO: 125663 - DNA, 19 bp, Artificial sequence
  SiRNA target sequence
gtttgacttggtatctgaa

SEQ ID NO: 125664 - DNA, 19 bp, Artificial sequence
  SiRNA target sequence
tttgacttggtatctgaag

SEQ ID NO: 125665 - DNA, 19 bp, Artificial sequence
  SiRNA target sequence
ttgacttggtatctgaagc

SEQ ID NO: 125666 - DNA, 19 bp, Artificial sequence
  SiRNA target sequence
tgacttggtatctgaagca

SEQ ID NO: 125667 - DNA, 19 bp, Artificial sequence
  SiRNA target sequence
gacttggtatctgaagcat

SEQ ID NO: 125668 - DNA, 19 bp, Artificial sequence
  SiRNA target sequence
acttggtatctgaagcatt

SEQ ID NO: 125669 - DNA, 19 bp, Artificial sequence
  SiRNA target sequence
cttggtatctgaagcatta

SEQ ID NO: 125670 - DNA, 19 bp, Artificial sequence
  SiRNA target sequence
ttggtatctgaagcattaa

SEQ ID NO: 125671 - DNA, 19 bp, Artificial sequence
  SiRNA target sequence
tggtatctgaagcattaag

SEQ ID NO: 125672 - DNA, 19 bp, Artificial sequence
  SiRNA target sequence
ggtatctgaagcattaagt

SEQ ID NO: 125673 - DNA, 19 bp, Artificial sequence
  SiRNA target sequence
gtatctgaagcattaagtg

SEQ ID NO: 125674 - DNA, 19 bp, Artificial sequence
  SiRNA target sequence
tatctgaagcattaagtga

SEQ ID NO: 125675 - DNA, 19 bp, Artificial sequence
  SiRNA target sequence
atctgaagcattaagtgaa

SEQ ID NO: 125676 - DNA, 19 bp, Artificial sequence
  SiRNA target sequence
tctgaagcattaagtgaac

SEQ ID NO: 125677 - DNA, 19 bp, Artificial sequence
  SiRNA target sequence
ctgaagcattaagtgaacg

SEQ ID NO: 125678 - DNA, 19 bp, Artificial sequence
  SiRNA target sequence
tgaagcattaagtgaacga

SEQ ID NO: 125679 - DNA, 19 bp, Artificial sequence
  SiRNA target sequence
gaagcattaagtgaacgaa

SEQ ID NO: 125680 - DNA, 19 bp, Artificial sequence
  SiRNA target sequence
aagcattaagtgaacgaaa

SEQ ID NO: 125681 - DNA, 19 bp, Artificial sequence
  SiRNA target sequence
agcattaagtgaacgaaaa

SEQ ID NO: 125682 - DNA, 19 bp, Artificial sequence
  SiRNA target sequence
gcattaagtgaacgaaaaa

SEQ ID NO: 125683 - DNA, 19 bp, Artificial sequence
  SiRNA target sequence
cattaagtgaacgaaaaat

SEQ ID NO: 125684 - DNA, 19 bp, Artificial sequence
  SiRNA target sequence
attaagtgaacgaaaaatt

SEQ ID NO: 125685 - DNA, 19 bp, Artificial sequence
  SiRNA target sequence
ttaagtgaacgaaaaattg

SEQ ID NO: 125686 - DNA, 19 bp, Artificial sequence
  SiRNA target sequence
taagtgaacgaaaaattgt

SEQ ID NO: 125687 - DNA, 19 bp, Artificial sequence
  SiRNA target sequence
aagtgaacgaaaaattgtt

SEQ ID NO: 125688 - DNA, 19 bp, Artificial sequence
  SiRNA target sequence
agtgaacgaaaaattgtta

SEQ ID NO: 125689 - DNA, 19 bp, Artificial sequence
  SiRNA target sequence
gtgaacgaaaaattgttat

SEQ ID NO: 125690 - DNA, 19 bp, Artificial sequence
  SiRNA target sequence
tgaacgaaaaattgttatg

SEQ ID NO: 125691 - DNA, 19 bp, Artificial sequence
  SiRNA target sequence
gaacgaaaaattgttatga

SEQ ID NO: 125692 - DNA, 19 bp, Artificial sequence
  SiRNA target sequence
aacgaaaaattgttatgaa

SEQ ID NO: 125693 - DNA, 19 bp, Artificial sequence
  SiRNA target sequence
acgaaaaattgttatgaat

SEQ ID NO: 125694 - DNA, 19 bp, Artificial sequence
  SiRNA target sequence
cgaaaaattgttatgaata

SEQ ID NO: 125695 - DNA, 19 bp, Artificial sequence
  SiRNA target sequence
gaaaaattgttatgaatat

SEQ ID NO: 125696 - DNA, 19 bp, Artificial sequence
  SiRNA target sequence
aaaaattgttatgaatatg

SEQ ID NO: 125697 - DNA, 19 bp, Artificial sequence
  SiRNA target sequence
aaaattgttatgaatatgt

SEQ ID NO: 125698 - DNA, 19 bp, Artificial sequence
  SiRNA target sequence
aaattgttatgaatatgtg

SEQ ID NO: 125699 - DNA, 19 bp, Artificial sequence
  SiRNA target sequence
aattgttatgaatatgtgt

SEQ ID NO: 125700 - DNA, 19 bp, Artificial sequence
  SiRNA target sequence
attgttatgaatatgtgtc

SEQ ID NO: 125701 - DNA, 19 bp, Artificial sequence
  SiRNA target sequence
ttgttatgaatatgtgtcc

SEQ ID NO: 125702 - DNA, 19 bp, Artificial sequence
  SiRNA target sequence
tgttatgaatatgtgtcct

SEQ ID NO: 125703 - DNA, 19 bp, Artificial sequence
  SiRNA target sequence
gttatgaatatgtgtcctt

SEQ ID NO: 125704 - DNA, 19 bp, Artificial sequence
  SiRNA target sequence
ttatgaatatgtgtccttt

SEQ ID NO: 125705 - DNA, 19 bp, Artificial sequence
  SiRNA target sequence
tatgaatatgtgtcctttt

SEQ ID NO: 125706 - DNA, 19 bp, Artificial sequence
  SiRNA target sequence
atgaatatgtgtccttttc

SEQ ID NO: 125707 - DNA, 19 bp, Artificial sequence
  SiRNA target sequence
tgaatatgtgtccttttct

SEQ ID NO: 125708 - DNA, 19 bp, Artificial sequence
  SiRNA target sequence
gaatatgtgtccttttcta

SEQ ID NO: 125709 - DNA, 19 bp, Artificial sequence
  SiRNA target sequence
aatatgtgtccttttctag

SEQ ID NO: 125710 - DNA, 19 bp, Artificial sequence
  SiRNA target sequence
atatgtgtccttttctagt

SEQ ID NO: 125711 - DNA, 19 bp, Artificial sequence
  SiRNA target sequence
tatgtgtccttttctagta

SEQ ID NO: 125712 - DNA, 19 bp, Artificial sequence
  SiRNA target sequence
atgtgtccttttctagtaa

SEQ ID NO: 125713 - DNA, 19 bp, Artificial sequence
  SiRNA target sequence
tgtgtccttttctagtaag

SEQ ID NO: 125714 - DNA, 19 bp, Artificial sequence
  SiRNA target sequence
gtgtccttttctagtaagg

SEQ ID NO: 125715 - DNA, 19 bp, Artificial sequence
  SiRNA target sequence
tgtccttttctagtaaggt

SEQ ID NO: 125716 - DNA, 19 bp, Artificial sequence
  SiRNA target sequence
gtccttttctagtaaggtc

SEQ ID NO: 125717 - DNA, 19 bp, Artificial sequence
  SiRNA target sequence
tccttttctagtaaggtcg

SEQ ID NO: 125718 - DNA, 19 bp, Artificial sequence
  SiRNA target sequence
ccttttctagtaaggtcga

SEQ ID NO: 125719 - DNA, 19 bp, Artificial sequence
  SiRNA target sequence
cttttctagtaaggtcgat

SEQ ID NO: 125720 - DNA, 19 bp, Artificial sequence
  SiRNA target sequence
ttttctagtaaggtcgatg

SEQ ID NO: 125721 - DNA, 19 bp, Artificial sequence
  SiRNA target sequence
tttctagtaaggtcgatgg

SEQ ID NO: 125722 - DNA, 19 bp, Artificial sequence
  SiRNA target sequence
ttctagtaaggtcgatgga

SEQ ID NO: 125723 - DNA, 19 bp, Artificial sequence
  SiRNA target sequence
tctagtaaggtcgatggaa

SEQ ID NO: 125724 - DNA, 19 bp, Artificial sequence
  SiRNA target sequence
ctagtaaggtcgatggaaa

SEQ ID NO: 125725 - DNA, 19 bp, Artificial sequence
  SiRNA target sequence
tagtaaggtcgatggaaat

SEQ ID NO: 125726 - DNA, 19 bp, Artificial sequence
  SiRNA target sequence
agtaaggtcgatggaaata

SEQ ID NO: 125727 - DNA, 19 bp, Artificial sequence
  SiRNA target sequence
gtaaggtcgatggaaatat

SEQ ID NO: 125728 - DNA, 19 bp, Artificial sequence
  SiRNA target sequence
taaggtcgatggaaatatt

SEQ ID NO: 125729 - DNA, 19 bp, Artificial sequence
  SiRNA target sequence
aaggtcgatggaaatatta

SEQ ID NO: 125730 - DNA, 19 bp, Artificial sequence
  SiRNA target sequence
aggtcgatggaaatattat

SEQ ID NO: 125731 - DNA, 19 bp, Artificial sequence
  SiRNA target sequence
ggtcgatggaaatattatt

SEQ ID NO: 125732 - DNA, 19 bp, Artificial sequence
  SiRNA target sequence
gtcgatggaaatattattt

SEQ ID NO: 125733 - DNA, 19 bp, Artificial sequence
  SiRNA target sequence
tcgatggaaatattatttc

SEQ ID NO: 125734 - DNA, 19 bp, Artificial sequence
  SiRNA target sequence
cgatggaaatattatttcc

SEQ ID NO: 125735 - DNA, 19 bp, Artificial sequence
  SiRNA target sequence
gatggaaatattatttccg

SEQ ID NO: 125736 - DNA, 19 bp, Artificial sequence
  SiRNA target sequence
atggaaatattatttccgg

SEQ ID NO: 125737 - DNA, 19 bp, Artificial sequence
  SiRNA target sequence
tggaaatattatttccggt

SEQ ID NO: 125738 - DNA, 19 bp, Artificial sequence
  SiRNA target sequence
ggaaatattatttccggtt

SEQ ID NO: 125739 - DNA, 19 bp, Artificial sequence
  SiRNA target sequence
gaaatattatttccggttt

SEQ ID NO: 125740 - DNA, 19 bp, Artificial sequence
  SiRNA target sequence
aaatattatttccggttta

SEQ ID NO: 125741 - DNA, 19 bp, Artificial sequence
  SiRNA target sequence
aatattatttccggtttat

SEQ ID NO: 125742 - DNA, 19 bp, Artificial sequence
  SiRNA target sequence
atattatttccggtttata

SEQ ID NO: 125743 - DNA, 19 bp, Artificial sequence
  SiRNA target sequence
tattatttccggtttataa

SEQ ID NO: 125744 - DNA, 19 bp, Artificial sequence
  SiRNA target sequence
attatttccggtttataaa

SEQ ID NO: 125745 - DNA, 19 bp, Artificial sequence
  SiRNA target sequence
ttatttccggtttataaaa

SEQ ID NO: 125746 - DNA, 19 bp, Artificial sequence
  SiRNA target sequence
tatttccggtttataaaag

SEQ ID NO: 125747 - DNA, 19 bp, Artificial sequence
  SiRNA target sequence
atttccggtttataaaagg

SEQ ID NO: 125748 - DNA, 19 bp, Artificial sequence
  SiRNA target sequence
tttccggtttataaaaggc

SEQ ID NO: 125749 - DNA, 19 bp, Artificial sequence
  SiRNA target sequence
ttccggtttataaaaggct

SEQ ID NO: 125750 - DNA, 19 bp, Artificial sequence
  SiRNA target sequence
tccggtttataaaaggctt

SEQ ID NO: 125751 - DNA, 19 bp, Artificial sequence
  SiRNA target sequence
ccggtttataaaaggcttt

SEQ ID NO: 125752 - DNA, 19 bp, Artificial sequence
  SiRNA target sequence
cggtttataaaaggctttt

SEQ ID NO: 125753 - DNA, 19 bp, Artificial sequence
  SiRNA target sequence
ggtttataaaaggctttta

SEQ ID NO: 125754 - DNA, 19 bp, Artificial sequence
  SiRNA target sequence
gtttataaaaggcttttaa

SEQ ID NO: 125755 - DNA, 19 bp, Artificial sequence
  SiRNA target sequence
tttataaaaggcttttaat

SEQ ID NO: 125756 - DNA, 19 bp, Artificial sequence
  SiRNA target sequence
ttataaaaggcttttaatt

SEQ ID NO: 125757 - DNA, 19 bp, Artificial sequence
  SiRNA target sequence
tataaaaggcttttaattc

SEQ ID NO: 125758 - DNA, 19 bp, Artificial sequence
  SiRNA target sequence
ataaaaggcttttaattcc

SEQ ID NO: 125759 - DNA, 19 bp, Artificial sequence
  SiRNA target sequence
taaaaggcttttaattcct

SEQ ID NO: 125760 - DNA, 19 bp, Artificial sequence
  SiRNA target sequence
aaaaggcttttaattcctt

SEQ ID NO: 125761 - DNA, 19 bp, Artificial sequence
  SiRNA target sequence
aaaggcttttaattcctta

SEQ ID NO: 125762 - DNA, 19 bp, Artificial sequence
  SiRNA target sequence
aaggcttttaattccttac

SEQ ID NO: 125763 - DNA, 19 bp, Artificial sequence
  SiRNA target sequence
aggcttttaattccttact

SEQ ID NO: 125764 - DNA, 19 bp, Artificial sequence
  SiRNA target sequence
ggcttttaattccttacta

SEQ ID NO: 125765 - DNA, 19 bp, Artificial sequence
  SiRNA target sequence
gcttttaattccttactac

SEQ ID NO: 125766 - DNA, 19 bp, Artificial sequence
  SiRNA target sequence
cttttaattccttactact

SEQ ID NO: 125767 - DNA, 19 bp, Artificial sequence
  SiRNA target sequence
ttttaattccttactacta

SEQ ID NO: 125768 - DNA, 19 bp, Artificial sequence
  SiRNA target sequence
tttaattccttactactat

SEQ ID NO: 125769 - DNA, 19 bp, Artificial sequence
  SiRNA target sequence
ttaattccttactactata

SEQ ID NO: 125770 - DNA, 19 bp, Artificial sequence
  SiRNA target sequence
taattccttactactatat

SEQ ID NO: 125771 - DNA, 19 bp, Artificial sequence
  SiRNA target sequence
aattccttactactatatt

SEQ ID NO: 125772 - DNA, 19 bp, Artificial sequence
  SiRNA target sequence
attccttactactatattg

SEQ ID NO: 125773 - DNA, 19 bp, Artificial sequence
  SiRNA target sequence
ttccttactactatattgg

SEQ ID NO: 125774 - DNA, 19 bp, Artificial sequence
  SiRNA target sequence
tccttactactatattggc

SEQ ID NO: 125775 - DNA, 19 bp, Artificial sequence
  SiRNA target sequence
ccttactactatattggcc

SEQ ID NO: 125776 - DNA, 19 bp, Artificial sequence
  SiRNA target sequence
cttactactatattggcct

SEQ ID NO: 125777 - DNA, 19 bp, Artificial sequence
  SiRNA target sequence
ttactactatattggcctt

SEQ ID NO: 125778 - DNA, 19 bp, Artificial sequence
  SiRNA target sequence
tactactatattggcctta

SEQ ID NO: 125779 - DNA, 19 bp, Artificial sequence
  SiRNA target sequence
actactatattggccttaa

SEQ ID NO: 125780 - DNA, 19 bp, Artificial sequence
  SiRNA target sequence
ctactatattggccttaaa

SEQ ID NO: 125781 - DNA, 19 bp, Artificial sequence
  SiRNA target sequence
tactatattggccttaaat

SEQ ID NO: 125782 - DNA, 19 bp, Artificial sequence
  SiRNA target sequence
actatattggccttaaatt

SEQ ID NO: 125783 - DNA, 19 bp, Artificial sequence
  SiRNA target sequence
ctatattggccttaaattt

SEQ ID NO: 125784 - DNA, 19 bp, Artificial sequence
  SiRNA target sequence
tatattggccttaaatttt

SEQ ID NO: 125785 - DNA, 19 bp, Artificial sequence
  SiRNA target sequence
atattggccttaaatttta

SEQ ID NO: 125786 - DNA, 19 bp, Artificial sequence
  SiRNA target sequence
tattggccttaaattttat

SEQ ID NO: 125787 - DNA, 19 bp, Artificial sequence
  SiRNA target sequence
attggccttaaattttatg

SEQ ID NO: 125788 - DNA, 19 bp, Artificial sequence
  SiRNA target sequence
ttggccttaaattttatga

SEQ ID NO: 125789 - DNA, 19 bp, Artificial sequence
  SiRNA target sequence
tggccttaaattttatgat

SEQ ID NO: 125790 - DNA, 19 bp, Artificial sequence
  SiRNA target sequence
ggccttaaattttatgatt

SEQ ID NO: 125791 - DNA, 19 bp, Artificial sequence
  SiRNA target sequence
gccttaaattttatgattg

SEQ ID NO: 125792 - DNA, 19 bp, Artificial sequence
  SiRNA target sequence
ccttaaattttatgattgg

SEQ ID NO: 125793 - DNA, 19 bp, Artificial sequence
  SiRNA target sequence
cttaaattttatgattgga

SEQ ID NO: 125794 - DNA, 19 bp, Artificial sequence
  SiRNA target sequence
ttaaattttatgattggat

SEQ ID NO: 125795 - DNA, 19 bp, Artificial sequence
  SiRNA target sequence
taaattttatgattggatt

SEQ ID NO: 125796 - DNA, 19 bp, Artificial sequence
  SiRNA target sequence
aaattttatgattggattt

SEQ ID NO: 125797 - DNA, 19 bp, Artificial sequence
  SiRNA target sequence
aattttatgattggatttc

SEQ ID NO: 125798 - DNA, 19 bp, Artificial sequence
  SiRNA target sequence
attttatgattggatttct

SEQ ID NO: 125799 - DNA, 19 bp, Artificial sequence
  SiRNA target sequence
ttttatgattggatttctg

SEQ ID NO: 125800 - DNA, 19 bp, Artificial sequence
  SiRNA target sequence
tttatgattggatttctgg

SEQ ID NO: 125801 - DNA, 19 bp, Artificial sequence
  SiRNA target sequence
ttatgattggatttctggg

SEQ ID NO: 125802 - DNA, 19 bp, Artificial sequence
  SiRNA target sequence
tatgattggatttctgggc

SEQ ID NO: 125803 - DNA, 19 bp, Artificial sequence
  SiRNA target sequence
atgattggatttctgggca

SEQ ID NO: 125804 - DNA, 19 bp, Artificial sequence
  SiRNA target sequence
tgattggatttctgggcaa

SEQ ID NO: 125805 - DNA, 19 bp, Artificial sequence
  SiRNA target sequence
gattggatttctgggcaac

SEQ ID NO: 125806 - DNA, 19 bp, Artificial sequence
  SiRNA target sequence
attggatttctgggcaacg

SEQ ID NO: 125807 - DNA, 19 bp, Artificial sequence
  SiRNA target sequence
ttggatttctgggcaacgg

SEQ ID NO: 125808 - DNA, 19 bp, Artificial sequence
  SiRNA target sequence
tggatttctgggcaacggt

SEQ ID NO: 125809 - DNA, 19 bp, Artificial sequence
  SiRNA target sequence
ggatttctgggcaacggtc

SEQ ID NO: 125810 - DNA, 19 bp, Artificial sequence
  SiRNA target sequence
gatttctgggcaacggtcc

SEQ ID NO: 125811 - DNA, 19 bp, Artificial sequence
  SiRNA target sequence
atttctgggcaacggtccc

SEQ ID NO: 125812 - DNA, 19 bp, Artificial sequence
  SiRNA target sequence
tttctgggcaacggtccct

SEQ ID NO: 125813 - DNA, 19 bp, Artificial sequence
  SiRNA target sequence
ttctgggcaacggtccctt

SEQ ID NO: 125814 - DNA, 19 bp, Artificial sequence
  SiRNA target sequence
tctgggcaacggtcccttg

SEQ ID NO: 125815 - DNA, 19 bp, Artificial sequence
  SiRNA target sequence
ctgggcaacggtcccttgg

SEQ ID NO: 125816 - DNA, 19 bp, Artificial sequence
  SiRNA target sequence
tgggcaacggtcccttggg

SEQ ID NO: 125817 - DNA, 19 bp, Artificial sequence
  SiRNA target sequence
gggcaacggtcccttgggc

SEQ ID NO: 125818 - DNA, 19 bp, Artificial sequence
  SiRNA target sequence
ggcaacggtcccttgggcg

SEQ ID NO: 125819 - DNA, 19 bp, Artificial sequence
  SiRNA target sequence
gcaacggtcccttgggcga

SEQ ID NO: 125820 - DNA, 19 bp, Artificial sequence
  SiRNA target sequence
caacggtcccttgggcgaa

SEQ ID NO: 125821 - DNA, 19 bp, Artificial sequence
  SiRNA target sequence
aacggtcccttgggcgaag

SEQ ID NO: 125822 - DNA, 19 bp, Artificial sequence
  SiRNA target sequence
acggtcccttgggcgaagt

SEQ ID NO: 125823 - DNA, 19 bp, Artificial sequence
  SiRNA target sequence
cggtcccttgggcgaagta

SEQ ID NO: 125824 - DNA, 19 bp, Artificial sequence
  SiRNA target sequence
ggtcccttgggcgaagtaa

SEQ ID NO: 125825 - DNA, 19 bp, Artificial sequence
  SiRNA target sequence
gtcccttgggcgaagtaaa

SEQ ID NO: 125826 - DNA, 19 bp, Artificial sequence
  SiRNA target sequence
tcccttgggcgaagtaaat

SEQ ID NO: 125827 - DNA, 19 bp, Artificial sequence
  SiRNA target sequence
cccttgggcgaagtaaatt

SEQ ID NO: 125828 - DNA, 19 bp, Artificial sequence
  SiRNA target sequence
ccttgggcgaagtaaattt

SEQ ID NO: 125829 - DNA, 19 bp, Artificial sequence
  SiRNA target sequence
cttgggcgaagtaaatttt

SEQ ID NO: 125830 - DNA, 19 bp, Artificial sequence
  SiRNA target sequence
ttgggcgaagtaaattttt

SEQ ID NO: 125831 - DNA, 19 bp, Artificial sequence
  SiRNA target sequence
tgggcgaagtaaatttttg

SEQ ID NO: 125832 - DNA, 19 bp, Artificial sequence
  SiRNA target sequence
gggcgaagtaaatttttgt

SEQ ID NO: 125833 - DNA, 19 bp, Artificial sequence
  SiRNA target sequence
ggcgaagtaaatttttgtc

SEQ ID NO: 125834 - DNA, 19 bp, Artificial sequence
  SiRNA target sequence
gcgaagtaaatttttgtcg

SEQ ID NO: 125835 - DNA, 19 bp, Artificial sequence
  SiRNA target sequence
cgaagtaaatttttgtcgc

SEQ ID NO: 125836 - DNA, 19 bp, Artificial sequence
  SiRNA target sequence
gaagtaaatttttgtcgcg

SEQ ID NO: 125837 - DNA, 19 bp, Artificial sequence
  SiRNA target sequence
aagtaaatttttgtcgcgg

SEQ ID NO: 125838 - DNA, 19 bp, Artificial sequence
  SiRNA target sequence
agtaaatttttgtcgcggc

SEQ ID NO: 125839 - DNA, 19 bp, Artificial sequence
  SiRNA target sequence
gtaaatttttgtcgcggca

SEQ ID NO: 125840 - DNA, 19 bp, Artificial sequence
  SiRNA target sequence
taaatttttgtcgcggcaa

SEQ ID NO: 125841 - DNA, 19 bp, Artificial sequence
  SiRNA target sequence
aaatttttgtcgcggcaac

SEQ ID NO: 125842 - DNA, 19 bp, Artificial sequence
  SiRNA target sequence
aatttttgtcgcggcaaca

SEQ ID NO: 125843 - DNA, 19 bp, Artificial sequence
  SiRNA target sequence
atttttgtcgcggcaacaa

SEQ ID NO: 125844 - DNA, 19 bp, Artificial sequence
  SiRNA target sequence
tttttgtcgcggcaacaaa

SEQ ID NO: 125845 - DNA, 19 bp, Artificial sequence
  SiRNA target sequence
ttttgtcgcggcaacaaac

SEQ ID NO: 125846 - DNA, 19 bp, Artificial sequence
  SiRNA target sequence
tttgtcgcggcaacaaact

SEQ ID NO: 125847 - DNA, 19 bp, Artificial sequence
  SiRNA target sequence
ttgtcgcggcaacaaacta

SEQ ID NO: 125848 - DNA, 19 bp, Artificial sequence
  SiRNA target sequence
tgtcgcggcaacaaactat

SEQ ID NO: 125849 - DNA, 19 bp, Artificial sequence
  SiRNA target sequence
gtcgcggcaacaaactatt

SEQ ID NO: 125850 - DNA, 19 bp, Artificial sequence
  SiRNA target sequence
tcgcggcaacaaactatta

SEQ ID NO: 125851 - DNA, 19 bp, Artificial sequence
  SiRNA target sequence
cgcggcaacaaactattac

SEQ ID NO: 125852 - DNA, 19 bp, Artificial sequence
  SiRNA target sequence
gcggcaacaaactattaca

SEQ ID NO: 125853 - DNA, 19 bp, Artificial sequence
  SiRNA target sequence
cggcaacaaactattacaa

SEQ ID NO: 125854 - DNA, 19 bp, Artificial sequence
  SiRNA target sequence
ggcaacaaactattacaaa

SEQ ID NO: 125855 - DNA, 19 bp, Artificial sequence
  SiRNA target sequence
gcaacaaactattacaaaa

SEQ ID NO: 125856 - DNA, 19 bp, Artificial sequence
  SiRNA target sequence
caacaaactattacaaaat

SEQ ID NO: 125857 - DNA, 19 bp, Artificial sequence
  SiRNA target sequence
aacaaactattacaaaatt

SEQ ID NO: 125858 - DNA, 19 bp, Artificial sequence
  SiRNA target sequence
acaaactattacaaaattt

SEQ ID NO: 125859 - DNA, 19 bp, Artificial sequence
  SiRNA target sequence
caaactattacaaaatttc

SEQ ID NO: 125860 - DNA, 19 bp, Artificial sequence
  SiRNA target sequence
aaactattacaaaatttcc

SEQ ID NO: 125861 - DNA, 19 bp, Artificial sequence
  SiRNA target sequence
aactattacaaaatttcct

SEQ ID NO: 125862 - DNA, 19 bp, Artificial sequence
  SiRNA target sequence
actattacaaaatttccta

SEQ ID NO: 125863 - DNA, 19 bp, Artificial sequence
  SiRNA target sequence
ctattacaaaatttcctaa

SEQ ID NO: 125864 - DNA, 19 bp, Artificial sequence
  SiRNA target sequence
tattacaaaatttcctaat

SEQ ID NO: 125865 - DNA, 19 bp, Artificial sequence
  SiRNA target sequence
attacaaaatttcctaatg

SEQ ID NO: 125866 - DNA, 19 bp, Artificial sequence
  SiRNA target sequence
ttacaaaatttcctaatgt

SEQ ID NO: 125867 - DNA, 19 bp, Artificial sequence
  SiRNA target sequence
tacaaaatttcctaatgtg

SEQ ID NO: 125868 - DNA, 19 bp, Artificial sequence
  SiRNA target sequence
acaaaatttcctaatgtga

SEQ ID NO: 125869 - DNA, 19 bp, Artificial sequence
  SiRNA target sequence
caaaatttcctaatgtgag

SEQ ID NO: 125870 - DNA, 19 bp, Artificial sequence
  SiRNA target sequence
aaaatttcctaatgtgaga

SEQ ID NO: 125871 - DNA, 19 bp, Artificial sequence
  SiRNA target sequence
aaatttcctaatgtgagaa

SEQ ID NO: 125872 - DNA, 19 bp, Artificial sequence
  SiRNA target sequence
aatttcctaatgtgagaaa

SEQ ID NO: 125873 - DNA, 19 bp, Artificial sequence
  SiRNA target sequence
atttcctaatgtgagaaaa

SEQ ID NO: 125874 - DNA, 19 bp, Artificial sequence
  SiRNA target sequence
tttcctaatgtgagaaaaa

SEQ ID NO: 125875 - DNA, 19 bp, Artificial sequence
  SiRNA target sequence
ttcctaatgtgagaaaaat

SEQ ID NO: 125876 - DNA, 19 bp, Artificial sequence
  SiRNA target sequence
tcctaatgtgagaaaaatc

SEQ ID NO: 125877 - DNA, 19 bp, Artificial sequence
  SiRNA target sequence
cctaatgtgagaaaaatcg

SEQ ID NO: 125878 - DNA, 19 bp, Artificial sequence
  SiRNA target sequence
ctaatgtgagaaaaatcga

SEQ ID NO: 125879 - DNA, 19 bp, Artificial sequence
  SiRNA target sequence
taatgtgagaaaaatcgac

SEQ ID NO: 125880 - DNA, 19 bp, Artificial sequence
  SiRNA target sequence
aatgtgagaaaaatcgacc

SEQ ID NO: 125881 - DNA, 19 bp, Artificial sequence
  SiRNA target sequence
atgtgagaaaaatcgacct

SEQ ID NO: 125882 - DNA, 19 bp, Artificial sequence
  SiRNA target sequence
tgtgagaaaaatcgacctt

SEQ ID NO: 125883 - DNA, 19 bp, Artificial sequence
  SiRNA target sequence
gtgagaaaaatcgaccttg

SEQ ID NO: 125884 - DNA, 19 bp, Artificial sequence
  SiRNA target sequence
tgagaaaaatcgaccttgt

SEQ ID NO: 125885 - DNA, 19 bp, Artificial sequence
  SiRNA target sequence
gagaaaaatcgaccttgta

SEQ ID NO: 125886 - DNA, 19 bp, Artificial sequence
  SiRNA target sequence
agaaaaatcgaccttgtag

SEQ ID NO: 125887 - DNA, 19 bp, Artificial sequence
  SiRNA target sequence
gaaaaatcgaccttgtagg

SEQ ID NO: 125888 - DNA, 19 bp, Artificial sequence
  SiRNA target sequence
aaaaatcgaccttgtagga

SEQ ID NO: 125889 - DNA, 19 bp, Artificial sequence
  SiRNA target sequence
aaaatcgaccttgtaggat

SEQ ID NO: 125890 - DNA, 19 bp, Artificial sequence
  SiRNA target sequence
aaatcgaccttgtaggatc

SEQ ID NO: 125891 - DNA, 19 bp, Artificial sequence
  SiRNA target sequence
aatcgaccttgtaggatcc

SEQ ID NO: 125892 - DNA, 19 bp, Artificial sequence
  SiRNA target sequence
atcgaccttgtaggatccg

SEQ ID NO: 125893 - DNA, 19 bp, Artificial sequence
  SiRNA target sequence
tcgaccttgtaggatccgt

SEQ ID NO: 125894 - DNA, 19 bp, Artificial sequence
  SiRNA target sequence
cgaccttgtaggatccgtt

SEQ ID NO: 125895 - DNA, 19 bp, Artificial sequence
  SiRNA target sequence
gaccttgtaggatccgttt

SEQ ID NO: 125896 - DNA, 19 bp, Artificial sequence
  SiRNA target sequence
accttgtaggatccgtttc

SEQ ID NO: 125897 - DNA, 19 bp, Artificial sequence
  SiRNA target sequence
ccttgtaggatccgtttcg

SEQ ID NO: 125898 - DNA, 19 bp, Artificial sequence
  SiRNA target sequence
cttgtaggatccgtttcgt

SEQ ID NO: 125899 - DNA, 19 bp, Artificial sequence
  SiRNA target sequence
ttgtaggatccgtttcgta

SEQ ID NO: 125900 - DNA, 19 bp, Artificial sequence
  SiRNA target sequence
tgtaggatccgtttcgtat

SEQ ID NO: 125901 - DNA, 19 bp, Artificial sequence
  SiRNA target sequence
gtaggatccgtttcgtatc

SEQ ID NO: 125902 - DNA, 19 bp, Artificial sequence
  SiRNA target sequence
taggatccgtttcgtatcg

SEQ ID NO: 125903 - DNA, 19 bp, Artificial sequence
  SiRNA target sequence
aggatccgtttcgtatcgt

SEQ ID NO: 125904 - DNA, 19 bp, Artificial sequence
  SiRNA target sequence
ggatccgtttcgtatcgtg

SEQ ID NO: 125905 - DNA, 19 bp, Artificial sequence
  SiRNA target sequence
gatccgtttcgtatcgtga

SEQ ID NO: 125906 - DNA, 19 bp, Artificial sequence
  SiRNA target sequence
atccgtttcgtatcgtgat

SEQ ID NO: 125907 - DNA, 19 bp, Artificial sequence
  SiRNA target sequence
tccgtttcgtatcgtgatg

SEQ ID NO: 125908 - DNA, 19 bp, Artificial sequence
  SiRNA target sequence
ccgtttcgtatcgtgatgg

SEQ ID NO: 125909 - DNA, 19 bp, Artificial sequence
  SiRNA target sequence
cgtttcgtatcgtgatggc

SEQ ID NO: 125910 - DNA, 19 bp, Artificial sequence
  SiRNA target sequence
gtttcgtatcgtgatggcc

SEQ ID NO: 125911 - DNA, 19 bp, Artificial sequence
  SiRNA target sequence
tttcgtatcgtgatggcca

SEQ ID NO: 125912 - DNA, 19 bp, Artificial sequence
  SiRNA target sequence
ttcgtatcgtgatggccaa

SEQ ID NO: 125913 - DNA, 19 bp, Artificial sequence
  SiRNA target sequence
tcgtatcgtgatggccaat

SEQ ID NO: 125914 - DNA, 19 bp, Artificial sequence
  SiRNA target sequence
cgtatcgtgatggccaatt

SEQ ID NO: 125915 - DNA, 19 bp, Artificial sequence
  SiRNA target sequence
gtatcgtgatggccaattt

SEQ ID NO: 125916 - DNA, 19 bp, Artificial sequence
  SiRNA target sequence
tatcgtgatggccaatttt

SEQ ID NO: 125917 - DNA, 19 bp, Artificial sequence
  SiRNA target sequence
atcgtgatggccaatttta

SEQ ID NO: 125918 - DNA, 19 bp, Artificial sequence
  SiRNA target sequence
tcgtgatggccaattttat

SEQ ID NO: 125919 - DNA, 19 bp, Artificial sequence
  SiRNA target sequence
cgtgatggccaattttatg

SEQ ID NO: 125920 - DNA, 19 bp, Artificial sequence
  SiRNA target sequence
gtgatggccaattttatga

SEQ ID NO: 125921 - DNA, 19 bp, Artificial sequence
  SiRNA target sequence
tgatggccaattttatgat

SEQ ID NO: 125922 - DNA, 19 bp, Artificial sequence
  SiRNA target sequence
gatggccaattttatgatg

SEQ ID NO: 125923 - DNA, 19 bp, Artificial sequence
  SiRNA target sequence
atggccaattttatgatgc

SEQ ID NO: 125924 - DNA, 19 bp, Artificial sequence
  SiRNA target sequence
tggccaattttatgatgct

SEQ ID NO: 125925 - DNA, 19 bp, Artificial sequence
  SiRNA target sequence
ggccaattttatgatgcta

SEQ ID NO: 125926 - DNA, 19 bp, Artificial sequence
  SiRNA target sequence
gccaattttatgatgctaa

SEQ ID NO: 125927 - DNA, 19 bp, Artificial sequence
  SiRNA target sequence
ccaattttatgatgctaaa

SEQ ID NO: 125928 - DNA, 19 bp, Artificial sequence
  SiRNA target sequence
caattttatgatgctaaat

SEQ ID NO: 125929 - DNA, 19 bp, Artificial sequence
  SiRNA target sequence
aattttatgatgctaaata

SEQ ID NO: 125930 - DNA, 19 bp, Artificial sequence
  SiRNA target sequence
attttatgatgctaaatac

SEQ ID NO: 125931 - DNA, 19 bp, Artificial sequence
  SiRNA target sequence
ttttatgatgctaaataca

SEQ ID NO: 125932 - DNA, 19 bp, Artificial sequence
  SiRNA target sequence
tttatgatgctaaatacaa

SEQ ID NO: 125933 - DNA, 19 bp, Artificial sequence
  SiRNA target sequence
ttatgatgctaaatacaat

SEQ ID NO: 125934 - DNA, 19 bp, Artificial sequence
  SiRNA target sequence
tatgatgctaaatacaatg

SEQ ID NO: 125935 - DNA, 19 bp, Artificial sequence
  SiRNA target sequence
atgatgctaaatacaatgt

SEQ ID NO: 125936 - DNA, 19 bp, Artificial sequence
  SiRNA target sequence
tgatgctaaatacaatgtt

SEQ ID NO: 125937 - DNA, 19 bp, Artificial sequence
  SiRNA target sequence
gatgctaaatacaatgttc

SEQ ID NO: 125938 - DNA, 19 bp, Artificial sequence
  SiRNA target sequence
atgctaaatacaatgttct

SEQ ID NO: 125939 - DNA, 19 bp, Artificial sequence
  SiRNA target sequence
tgctaaatacaatgttcta

SEQ ID NO: 125940 - DNA, 19 bp, Artificial sequence
  SiRNA target sequence
gctaaatacaatgttctat

SEQ ID NO: 125941 - DNA, 19 bp, Artificial sequence
  SiRNA target sequence
ctaaatacaatgttctatt

SEQ ID NO: 125942 - DNA, 19 bp, Artificial sequence
  SiRNA target sequence
taaatacaatgttctattg

SEQ ID NO: 125943 - DNA, 19 bp, Artificial sequence
  SiRNA target sequence
aaatacaatgttctattgg

SEQ ID NO: 125944 - DNA, 19 bp, Artificial sequence
  SiRNA target sequence
aatacaatgttctattggg

SEQ ID NO: 125945 - DNA, 19 bp, Artificial sequence
  SiRNA target sequence
atacaatgttctattgggt

SEQ ID NO: 125946 - DNA, 19 bp, Artificial sequence
  SiRNA target sequence
tacaatgttctattgggtg

SEQ ID NO: 125947 - DNA, 19 bp, Artificial sequence
  SiRNA target sequence
acaatgttctattgggtgt

SEQ ID NO: 125948 - DNA, 19 bp, Artificial sequence
  SiRNA target sequence
caatgttctattgggtgtc

SEQ ID NO: 125949 - DNA, 19 bp, Artificial sequence
  SiRNA target sequence
aatgttctattgggtgtca

SEQ ID NO: 125950 - DNA, 19 bp, Artificial sequence
  SiRNA target sequence
atgttctattgggtgtcac

SEQ ID NO: 125951 - DNA, 19 bp, Artificial sequence
  SiRNA target sequence
tgttctattgggtgtcaca

SEQ ID NO: 125952 - DNA, 19 bp, Artificial sequence
  SiRNA target sequence
gttctattgggtgtcacag

SEQ ID NO: 125953 - DNA, 19 bp, Artificial sequence
  SiRNA target sequence
ttctattgggtgtcacagc

SEQ ID NO: 125954 - DNA, 19 bp, Artificial sequence
  SiRNA target sequence
tctattgggtgtcacagct

SEQ ID NO: 125955 - DNA, 19 bp, Artificial sequence
  SiRNA target sequence
ctattgggtgtcacagcta

SEQ ID NO: 125956 - DNA, 19 bp, Artificial sequence
  SiRNA target sequence
tattgggtgtcacagctac

SEQ ID NO: 125957 - DNA, 19 bp, Artificial sequence
  SiRNA target sequence
attgggtgtcacagctacc

SEQ ID NO: 125958 - DNA, 19 bp, Artificial sequence
  SiRNA target sequence
ttgggtgtcacagctacct

SEQ ID NO: 125959 - DNA, 19 bp, Artificial sequence
  SiRNA target sequence
tgggtgtcacagctaccta

SEQ ID NO: 125960 - DNA, 19 bp, Artificial sequence
  SiRNA target sequence
gggtgtcacagctacctac

SEQ ID NO: 125961 - DNA, 19 bp, Artificial sequence
  SiRNA target sequence
ggtgtcacagctacctact

SEQ ID NO: 125962 - DNA, 19 bp, Artificial sequence
  SiRNA target sequence
gtgtcacagctacctacta

SEQ ID NO: 125963 - DNA, 19 bp, Artificial sequence
  SiRNA target sequence
tgtcacagctacctactat

SEQ ID NO: 125964 - DNA, 19 bp, Artificial sequence
  SiRNA target sequence
gtcacagctacctactatg

SEQ ID NO: 125965 - DNA, 19 bp, Artificial sequence
  SiRNA target sequence
tcacagctacctactatgg

SEQ ID NO: 125966 - DNA, 19 bp, Artificial sequence
  SiRNA target sequence
cacagctacctactatgga

SEQ ID NO: 125967 - DNA, 19 bp, Artificial sequence
  SiRNA target sequence
acagctacctactatggag

SEQ ID NO: 125968 - DNA, 19 bp, Artificial sequence
  SiRNA target sequence
cagctacctactatggagc

SEQ ID NO: 125969 - DNA, 19 bp, Artificial sequence
  SiRNA target sequence
agctacctactatggagct

SEQ ID NO: 125970 - DNA, 19 bp, Artificial sequence
  SiRNA target sequence
gctacctactatggagctg

SEQ ID NO: 125971 - DNA, 19 bp, Artificial sequence
  SiRNA target sequence
ctacctactatggagctgt

SEQ ID NO: 125972 - DNA, 19 bp, Artificial sequence
  SiRNA target sequence
tacctactatggagctgtt

SEQ ID NO: 125973 - DNA, 19 bp, Artificial sequence
  SiRNA target sequence
acctactatggagctgttg

SEQ ID NO: 125974 - DNA, 19 bp, Artificial sequence
  SiRNA target sequence
cctactatggagctgttgt

SEQ ID NO: 125975 - DNA, 19 bp, Artificial sequence
  SiRNA target sequence
ctactatggagctgttgta

SEQ ID NO: 125976 - DNA, 19 bp, Artificial sequence
  SiRNA target sequence
tactatggagctgttgtat

SEQ ID NO: 125977 - DNA, 19 bp, Artificial sequence
  SiRNA target sequence
actatggagctgttgtatt

SEQ ID NO: 125978 - DNA, 19 bp, Artificial sequence
  SiRNA target sequence
ctatggagctgttgtatta

SEQ ID NO: 125979 - DNA, 19 bp, Artificial sequence
  SiRNA target sequence
tatggagctgttgtattaa

SEQ ID NO: 125980 - DNA, 19 bp, Artificial sequence
  SiRNA target sequence
atggagctgttgtattaaa

SEQ ID NO: 125981 - DNA, 19 bp, Artificial sequence
  SiRNA target sequence
tggagctgttgtattaaat

SEQ ID NO: 125982 - DNA, 19 bp, Artificial sequence
  SiRNA target sequence
ggagctgttgtattaaatc

SEQ ID NO: 125983 - DNA, 19 bp, Artificial sequence
  SiRNA target sequence
gagctgttgtattaaatca

SEQ ID NO: 125984 - DNA, 19 bp, Artificial sequence
  SiRNA target sequence
agctgttgtattaaatcat

SEQ ID NO: 125985 - DNA, 19 bp, Artificial sequence
  SiRNA target sequence
gctgttgtattaaatcatg

SEQ ID NO: 125986 - DNA, 19 bp, Artificial sequence
  SiRNA target sequence
ctgttgtattaaatcatgc

SEQ ID NO: 125987 - DNA, 19 bp, Artificial sequence
  SiRNA target sequence
tgttgtattaaatcatgca

SEQ ID NO: 125988 - DNA, 19 bp, Artificial sequence
  SiRNA target sequence
gttgtattaaatcatgcaa

SEQ ID NO: 125989 - DNA, 19 bp, Artificial sequence
  SiRNA target sequence
ttgtattaaatcatgcaaa

SEQ ID NO: 125990 - DNA, 19 bp, Artificial sequence
  SiRNA target sequence
tgtattaaatcatgcaaaa

SEQ ID NO: 125991 - DNA, 19 bp, Artificial sequence
  SiRNA target sequence
gtattaaatcatgcaaaat

SEQ ID NO: 125992 - DNA, 19 bp, Artificial sequence
  SiRNA target sequence
tattaaatcatgcaaaatt

SEQ ID NO: 125993 - DNA, 19 bp, Artificial sequence
  SiRNA target sequence
attaaatcatgcaaaattc

SEQ ID NO: 125994 - DNA, 19 bp, Artificial sequence
  SiRNA target sequence
ttaaatcatgcaaaattct

SEQ ID NO: 125995 - DNA, 19 bp, Artificial sequence
  SiRNA target sequence
taaatcatgcaaaattctt

SEQ ID NO: 125996 - DNA, 19 bp, Artificial sequence
  SiRNA target sequence
aaatcatgcaaaattcttg

SEQ ID NO: 125997 - DNA, 19 bp, Artificial sequence
  SiRNA target sequence
aatcatgcaaaattcttgt

SEQ ID NO: 125998 - DNA, 19 bp, Artificial sequence
  SiRNA target sequence
atcatgcaaaattcttgtc

SEQ ID NO: 125999 - DNA, 19 bp, Artificial sequence
  SiRNA target sequence
tcatgcaaaattcttgtca

SEQ ID NO: 126000 - DNA, 19 bp, Artificial sequence
  SiRNA target sequence
catgcaaaattcttgtcag

SEQ ID NO: 126001 - DNA, 19 bp, Artificial sequence
  SiRNA target sequence
atgcaaaattcttgtcagt

SEQ ID NO: 126002 - DNA, 19 bp, Artificial sequence
  SiRNA target sequence
tgcaaaattcttgtcagta

SEQ ID NO: 126003 - DNA, 19 bp, Artificial sequence
  SiRNA target sequence
gcaaaattcttgtcagtaa

SEQ ID NO: 126004 - DNA, 19 bp, Artificial sequence
  SiRNA target sequence
caaaattcttgtcagtaac

SEQ ID NO: 126005 - DNA, 19 bp, Artificial sequence
  SiRNA target sequence
aaaattcttgtcagtaaca

SEQ ID NO: 126006 - DNA, 19 bp, Artificial sequence
  SiRNA target sequence
aaattcttgtcagtaacaa

SEQ ID NO: 126007 - DNA, 19 bp, Artificial sequence
  SiRNA target sequence
aattcttgtcagtaacaaa

SEQ ID NO: 126008 - DNA, 19 bp, Artificial sequence
  SiRNA target sequence
attcttgtcagtaacaaaa

SEQ ID NO: 126009 - DNA, 19 bp, Artificial sequence
  SiRNA target sequence
ttcttgtcagtaacaaaag

SEQ ID NO: 126010 - DNA, 19 bp, Artificial sequence
  SiRNA target sequence
tcttgtcagtaacaaaaga

SEQ ID NO: 126011 - DNA, 19 bp, Artificial sequence
  SiRNA target sequence
cttgtcagtaacaaaagat

SEQ ID NO: 126012 - DNA, 19 bp, Artificial sequence
  SiRNA target sequence
ttgtcagtaacaaaagatg

SEQ ID NO: 126013 - DNA, 19 bp, Artificial sequence
  SiRNA target sequence
tgtcagtaacaaaagatgg

SEQ ID NO: 126014 - DNA, 19 bp, Artificial sequence
  SiRNA target sequence
gtcagtaacaaaagatggc

SEQ ID NO: 126015 - DNA, 19 bp, Artificial sequence
  SiRNA target sequence
tcagtaacaaaagatggcg

SEQ ID NO: 126016 - DNA, 19 bp, Artificial sequence
  SiRNA target sequence
cagtaacaaaagatggcga

SEQ ID NO: 126017 - DNA, 19 bp, Artificial sequence
  SiRNA target sequence
agtaacaaaagatggcgat

SEQ ID NO: 126018 - DNA, 19 bp, Artificial sequence
  SiRNA target sequence
gtaacaaaagatggcgata

SEQ ID NO: 126019 - DNA, 19 bp, Artificial sequence
  SiRNA target sequence
taacaaaagatggcgataa

SEQ ID NO: 126020 - DNA, 19 bp, Artificial sequence
  SiRNA target sequence
aacaaaagatggcgataaa

SEQ ID NO: 126021 - DNA, 19 bp, Artificial sequence
  SiRNA target sequence
acaaaagatggcgataaaa

SEQ ID NO: 126022 - DNA, 19 bp, Artificial sequence
  SiRNA target sequence
caaaagatggcgataaaat

SEQ ID NO: 126023 - DNA, 19 bp, Artificial sequence
  SiRNA target sequence
aaaagatggcgataaaatt

SEQ ID NO: 126024 - DNA, 19 bp, Artificial sequence
  SiRNA target sequence
aaagatggcgataaaatta

SEQ ID NO: 126025 - DNA, 19 bp, Artificial sequence
  SiRNA target sequence
aagatggcgataaaattaa

SEQ ID NO: 126026 - DNA, 19 bp, Artificial sequence
  SiRNA target sequence
agatggcgataaaattaat

SEQ ID NO: 126027 - DNA, 19 bp, Artificial sequence
  SiRNA target sequence
gatggcgataaaattaatg

SEQ ID NO: 126028 - DNA, 19 bp, Artificial sequence
  SiRNA target sequence
atggcgataaaattaatgg

SEQ ID NO: 126029 - DNA, 19 bp, Artificial sequence
  SiRNA target sequence
tggcgataaaattaatgga

SEQ ID NO: 126030 - DNA, 19 bp, Artificial sequence
  SiRNA target sequence
ggcgataaaattaatggaa

SEQ ID NO: 126031 - DNA, 19 bp, Artificial sequence
  SiRNA target sequence
gcgataaaattaatggaat

SEQ ID NO: 126032 - DNA, 19 bp, Artificial sequence
  SiRNA target sequence
cgataaaattaatggaatt

SEQ ID NO: 126033 - DNA, 19 bp, Artificial sequence
  SiRNA target sequence
gataaaattaatggaatta

SEQ ID NO: 126034 - DNA, 19 bp, Artificial sequence
  SiRNA target sequence
ataaaattaatggaattaa

SEQ ID NO: 126035 - DNA, 19 bp, Artificial sequence
  SiRNA target sequence
taaaattaatggaattaaa

SEQ ID NO: 126036 - DNA, 19 bp, Artificial sequence
  SiRNA target sequence
aaaattaatggaattaaat

SEQ ID NO: 126037 - DNA, 19 bp, Artificial sequence
  SiRNA target sequence
aaattaatggaattaaatg

SEQ ID NO: 126038 - DNA, 19 bp, Artificial sequence
  SiRNA target sequence
aattaatggaattaaatgt

SEQ ID NO: 126039 - DNA, 19 bp, Artificial sequence
  SiRNA target sequence
attaatggaattaaatgtc

SEQ ID NO: 126040 - DNA, 19 bp, Artificial sequence
  SiRNA target sequence
ttaatggaattaaatgtca

SEQ ID NO: 126041 - DNA, 19 bp, Artificial sequence
  SiRNA target sequence
taatggaattaaatgtcaa

SEQ ID NO: 126042 - DNA, 19 bp, Artificial sequence
  SiRNA target sequence
aatggaattaaatgtcaag

SEQ ID NO: 126043 - DNA, 19 bp, Artificial sequence
  SiRNA target sequence
atggaattaaatgtcaaga

SEQ ID NO: 126044 - DNA, 19 bp, Artificial sequence
  SiRNA target sequence
tggaattaaatgtcaagat

SEQ ID NO: 126045 - DNA, 19 bp, Artificial sequence
  SiRNA target sequence
ggaattaaatgtcaagatt

SEQ ID NO: 126046 - DNA, 19 bp, Artificial sequence
  SiRNA target sequence
gaattaaatgtcaagattc

SEQ ID NO: 126047 - DNA, 19 bp, Artificial sequence
  SiRNA target sequence
aattaaatgtcaagattca

SEQ ID NO: 126048 - DNA, 19 bp, Artificial sequence
  SiRNA target sequence
attaaatgtcaagattcaa

SEQ ID NO: 126049 - DNA, 19 bp, Artificial sequence
  SiRNA target sequence
ttaaatgtcaagattcaat

SEQ ID NO: 126050 - DNA, 19 bp, Artificial sequence
  SiRNA target sequence
taaatgtcaagattcaata

SEQ ID NO: 126051 - DNA, 19 bp, Artificial sequence
  SiRNA target sequence
aaatgtcaagattcaataa

SEQ ID NO: 126052 - DNA, 19 bp, Artificial sequence
  SiRNA target sequence
aatgtcaagattcaataaa

SEQ ID NO: 126053 - DNA, 19 bp, Artificial sequence
  SiRNA target sequence
atgtcaagattcaataaat

SEQ ID NO: 126054 - DNA, 19 bp, Artificial sequence
  SiRNA target sequence
tgtcaagattcaataaata

SEQ ID NO: 126055 - DNA, 19 bp, Artificial sequence
  SiRNA target sequence
gtcaagattcaataaataa

SEQ ID NO: 126056 - DNA, 19 bp, Artificial sequence
  SiRNA target sequence
tcaagattcaataaataat

SEQ ID NO: 126057 - DNA, 19 bp, Artificial sequence
  SiRNA target sequence
caagattcaataaataatg

SEQ ID NO: 126058 - DNA, 19 bp, Artificial sequence
  SiRNA target sequence
aagattcaataaataatga

SEQ ID NO: 126059 - DNA, 19 bp, Artificial sequence
  SiRNA target sequence
agattcaataaataatgaa

SEQ ID NO: 126060 - DNA, 19 bp, Artificial sequence
  SiRNA target sequence
gattcaataaataatgaaa

SEQ ID NO: 126061 - DNA, 19 bp, Artificial sequence
  SiRNA target sequence
attcaataaataatgaaaa

SEQ ID NO: 126062 - DNA, 19 bp, Artificial sequence
  SiRNA target sequence
ttcaataaataatgaaaaa

SEQ ID NO: 126063 - DNA, 19 bp, Artificial sequence
  SiRNA target sequence
tcaataaataatgaaaaat

SEQ ID NO: 126064 - DNA, 19 bp, Artificial sequence
  SiRNA target sequence
caataaataatgaaaaatt

SEQ ID NO: 126065 - DNA, 19 bp, Artificial sequence
  SiRNA target sequence
aataaataatgaaaaattt

SEQ ID NO: 126066 - DNA, 19 bp, Artificial sequence
  SiRNA target sequence
ataaataatgaaaaatttt

SEQ ID NO: 126067 - DNA, 19 bp, Artificial sequence
  SiRNA target sequence
taaataatgaaaaattttt

SEQ ID NO: 126068 - DNA, 19 bp, Artificial sequence
  SiRNA target sequence
aaataatgaaaaattttta

SEQ ID NO: 126069 - DNA, 19 bp, Artificial sequence
  SiRNA target sequence
aataatgaaaaatttttaa

SEQ ID NO: 126070 - DNA, 19 bp, Artificial sequence
  SiRNA target sequence
ataatgaaaaatttttaat

SEQ ID NO: 126071 - DNA, 19 bp, Artificial sequence
  SiRNA target sequence
taatgaaaaatttttaatt

SEQ ID NO: 126072 - DNA, 19 bp, Artificial sequence
  SiRNA target sequence
aatgaaaaatttttaatta

SEQ ID NO: 126073 - DNA, 19 bp, Artificial sequence
  SiRNA target sequence
atgaaaaatttttaattag

SEQ ID NO: 126074 - DNA, 19 bp, Artificial sequence
  SiRNA target sequence
tgaaaaatttttaattagg

SEQ ID NO: 126075 - DNA, 19 bp, Artificial sequence
  SiRNA target sequence
gaaaaatttttaattaggt

SEQ ID NO: 126076 - DNA, 19 bp, Artificial sequence
  SiRNA target sequence
aaaaatttttaattaggtg

SEQ ID NO: 126077 - DNA, 19 bp, Artificial sequence
  SiRNA target sequence
aaaatttttaattaggtgt

SEQ ID NO: 126078 - DNA, 19 bp, Artificial sequence
  SiRNA target sequence
aaatttttaattaggtgta

SEQ ID NO: 126079 - DNA, 19 bp, Artificial sequence
  SiRNA target sequence
aatttttaattaggtgtaa

SEQ ID NO: 126080 - DNA, 19 bp, Artificial sequence
  SiRNA target sequence
atttttaattaggtgtaaa

SEQ ID NO: 126081 - DNA, 19 bp, Artificial sequence
  SiRNA target sequence
tttttaattaggtgtaaag

SEQ ID NO: 126082 - DNA, 19 bp, Artificial sequence
  SiRNA target sequence
ttttaattaggtgtaaagt

SEQ ID NO: 126083 - DNA, 19 bp, Artificial sequence
  SiRNA target sequence
tttaattaggtgtaaagtt

SEQ ID NO: 126084 - DNA, 19 bp, Artificial sequence
  SiRNA target sequence
ttaattaggtgtaaagttt

SEQ ID NO: 126085 - DNA, 19 bp, Artificial sequence
  SiRNA target sequence
taattaggtgtaaagtttt

SEQ ID NO: 126086 - DNA, 19 bp, Artificial sequence
  SiRNA target sequence
aattaggtgtaaagtttta

SEQ ID NO: 126087 - DNA, 19 bp, Artificial sequence
  SiRNA target sequence
attaggtgtaaagttttaa

SEQ ID NO: 126088 - DNA, 19 bp, Artificial sequence
  SiRNA target sequence
ttaggtgtaaagttttaat

SEQ ID NO: 126089 - DNA, 19 bp, Artificial sequence
  SiRNA target sequence
taggtgtaaagttttaata

SEQ ID NO: 126090 - DNA, 19 bp, Artificial sequence
  SiRNA target sequence
aggtgtaaagttttaataa

SEQ ID NO: 126091 - DNA, 19 bp, Artificial sequence
  SiRNA target sequence
ggtgtaaagttttaataaa

SEQ ID NO: 126092 - DNA, 19 bp, Artificial sequence
  SiRNA target sequence
gtgtaaagttttaataaat

SEQ ID NO: 126093 - DNA, 19 bp, Artificial sequence
  SiRNA target sequence
tgtaaagttttaataaata

SEQ ID NO: 126094 - DNA, 19 bp, Artificial sequence
  SiRNA target sequence
gtaaagttttaataaatac

SEQ ID NO: 126095 - DNA, 19 bp, Artificial sequence
  SiRNA target sequence
taaagttttaataaatact

SEQ ID NO: 126096 - DNA, 19 bp, Artificial sequence
  SiRNA target sequence
aaagttttaataaatactt

SEQ ID NO: 126097 - DNA, 19 bp, Artificial sequence
  SiRNA target sequence
aagttttaataaatacttc

SEQ ID NO: 126098 - DNA, 19 bp, Artificial sequence
  SiRNA target sequence
agttttaataaatacttct

SEQ ID NO: 126099 - DNA, 19 bp, Artificial sequence
  SiRNA target sequence
gttttaataaatacttctg

SEQ ID NO: 126100 - DNA, 19 bp, Artificial sequence
  SiRNA target sequence
ttttaataaatacttctgg

SEQ ID NO: 126101 - DNA, 19 bp, Artificial sequence
  SiRNA target sequence
tttaataaatacttctggc

SEQ ID NO: 126102 - DNA, 19 bp, Artificial sequence
  SiRNA target sequence
ttaataaatacttctggcc

SEQ ID NO: 126103 - DNA, 19 bp, Artificial sequence
  SiRNA target sequence
taataaatacttctggccc

SEQ ID NO: 126104 - DNA, 19 bp, Artificial sequence
  SiRNA target sequence
aataaatacttctggccct

SEQ ID NO: 126105 - DNA, 19 bp, Artificial sequence
  SiRNA target sequence
ataaatacttctggccctt

SEQ ID NO: 126106 - DNA, 19 bp, Artificial sequence
  SiRNA target sequence
taaatacttctggcccttt

SEQ ID NO: 126107 - DNA, 19 bp, Artificial sequence
  SiRNA target sequence
aaatacttctggccctttt

SEQ ID NO: 126108 - DNA, 19 bp, Artificial sequence
  SiRNA target sequence
aatacttctggcccttttg

SEQ ID NO: 126109 - DNA, 19 bp, Artificial sequence
  SiRNA target sequence
atacttctggcccttttgc

SEQ ID NO: 126110 - DNA, 19 bp, Artificial sequence
  SiRNA target sequence
tacttctggcccttttgct

SEQ ID NO: 126111 - DNA, 19 bp, Artificial sequence
  SiRNA target sequence
acttctggcccttttgctg

SEQ ID NO: 126112 - DNA, 19 bp, Artificial sequence
  SiRNA target sequence
cttctggcccttttgctga

SEQ ID NO: 126113 - DNA, 19 bp, Artificial sequence
  SiRNA target sequence
ttctggcccttttgctgac

SEQ ID NO: 126114 - DNA, 19 bp, Artificial sequence
  SiRNA target sequence
tctggcccttttgctgacg

SEQ ID NO: 126115 - DNA, 19 bp, Artificial sequence
  SiRNA target sequence
ctggcccttttgctgacga

SEQ ID NO: 126116 - DNA, 19 bp, Artificial sequence
  SiRNA target sequence
tggcccttttgctgacgag

SEQ ID NO: 126117 - DNA, 19 bp, Artificial sequence
  SiRNA target sequence
ggcccttttgctgacgagg

SEQ ID NO: 126118 - DNA, 19 bp, Artificial sequence
  SiRNA target sequence
gcccttttgctgacgaggt

SEQ ID NO: 126119 - DNA, 19 bp, Artificial sequence
  SiRNA target sequence
cccttttgctgacgaggtt

SEQ ID NO: 126120 - DNA, 19 bp, Artificial sequence
  SiRNA target sequence
ccttttgctgacgaggttc

SEQ ID NO: 126121 - DNA, 19 bp, Artificial sequence
  SiRNA target sequence
cttttgctgacgaggttcg

SEQ ID NO: 126122 - DNA, 19 bp, Artificial sequence
  SiRNA target sequence
ttttgctgacgaggttcga

SEQ ID NO: 126123 - DNA, 19 bp, Artificial sequence
  SiRNA target sequence
tttgctgacgaggttcgaa

SEQ ID NO: 126124 - DNA, 19 bp, Artificial sequence
  SiRNA target sequence
ttgctgacgaggttcgaaa

SEQ ID NO: 126125 - DNA, 19 bp, Artificial sequence
  SiRNA target sequence
tgctgacgaggttcgaaat

SEQ ID NO: 126126 - DNA, 19 bp, Artificial sequence
  SiRNA target sequence
gctgacgaggttcgaaata

SEQ ID NO: 126127 - DNA, 19 bp, Artificial sequence
  SiRNA target sequence
ctgacgaggttcgaaatac

SEQ ID NO: 126128 - DNA, 19 bp, Artificial sequence
  SiRNA target sequence
tgacgaggttcgaaataca

SEQ ID NO: 126129 - DNA, 19 bp, Artificial sequence
  SiRNA target sequence
gacgaggttcgaaatacat

SEQ ID NO: 126130 - DNA, 19 bp, Artificial sequence
  SiRNA target sequence
acgaggttcgaaatacatc

SEQ ID NO: 126131 - DNA, 19 bp, Artificial sequence
  SiRNA target sequence
cgaggttcgaaatacatca

SEQ ID NO: 126132 - DNA, 19 bp, Artificial sequence
  SiRNA target sequence
gaggttcgaaatacatcaa

SEQ ID NO: 126133 - DNA, 19 bp, Artificial sequence
  SiRNA target sequence
aggttcgaaatacatcaat

SEQ ID NO: 126134 - DNA, 19 bp, Artificial sequence
  SiRNA target sequence
ggttcgaaatacatcaatt

SEQ ID NO: 126135 - DNA, 19 bp, Artificial sequence
  SiRNA target sequence
gttcgaaatacatcaattg

SEQ ID NO: 126136 - DNA, 19 bp, Artificial sequence
  SiRNA target sequence
ttcgaaatacatcaattga

SEQ ID NO: 126137 - DNA, 19 bp, Artificial sequence
  SiRNA target sequence
tcgaaatacatcaattgaa

SEQ ID NO: 126138 - DNA, 19 bp, Artificial sequence
  SiRNA target sequence
cgaaatacatcaattgaaa

SEQ ID NO: 126139 - DNA, 19 bp, Artificial sequence
  SiRNA target sequence
gaaatacatcaattgaaaa

SEQ ID NO: 126140 - DNA, 19 bp, Artificial sequence
  SiRNA target sequence
aaatacatcaattgaaaac

SEQ ID NO: 126141 - DNA, 19 bp, Artificial sequence
  SiRNA target sequence
aatacatcaattgaaaact

SEQ ID NO: 126142 - DNA, 19 bp, Artificial sequence
  SiRNA target sequence
atacatcaattgaaaactg

SEQ ID NO: 126143 - DNA, 19 bp, Artificial sequence
  SiRNA target sequence
tacatcaattgaaaactgt

SEQ ID NO: 126144 - DNA, 19 bp, Artificial sequence
  SiRNA target sequence
acatcaattgaaaactgtc

SEQ ID NO: 126145 - DNA, 19 bp, Artificial sequence
  SiRNA target sequence
catcaattgaaaactgtca

SEQ ID NO: 126146 - DNA, 19 bp, Artificial sequence
  SiRNA target sequence
atcaattgaaaactgtcaa

SEQ ID NO: 126147 - DNA, 19 bp, Artificial sequence
  SiRNA target sequence
tcaattgaaaactgtcaac

SEQ ID NO: 126148 - DNA, 19 bp, Artificial sequence
  SiRNA target sequence
caattgaaaactgtcaacc

SEQ ID NO: 126149 - DNA, 19 bp, Artificial sequence
  SiRNA target sequence
aattgaaaactgtcaacca

SEQ ID NO: 126150 - DNA, 19 bp, Artificial sequence
  SiRNA target sequence
attgaaaactgtcaaccaa

SEQ ID NO: 126151 - DNA, 19 bp, Artificial sequence
  SiRNA target sequence
ttgaaaactgtcaaccaat

SEQ ID NO: 126152 - DNA, 19 bp, Artificial sequence
  SiRNA target sequence
tgaaaactgtcaaccaata

SEQ ID NO: 126153 - DNA, 19 bp, Artificial sequence
  SiRNA target sequence
gaaaactgtcaaccaatac

SEQ ID NO: 126154 - DNA, 19 bp, Artificial sequence
  SiRNA target sequence
aaaactgtcaaccaatact

SEQ ID NO: 126155 - DNA, 19 bp, Artificial sequence
  SiRNA target sequence
aaactgtcaaccaatactc

SEQ ID NO: 126156 - DNA, 19 bp, Artificial sequence
  SiRNA target sequence
aactgtcaaccaatactcc

SEQ ID NO: 126157 - DNA, 19 bp, Artificial sequence
  SiRNA target sequence
actgtcaaccaatactcca

SEQ ID NO: 126158 - DNA, 19 bp, Artificial sequence
  SiRNA target sequence
ctgtcaaccaatactccaa

SEQ ID NO: 126159 - DNA, 19 bp, Artificial sequence
  SiRNA target sequence
tgtcaaccaatactccaac

SEQ ID NO: 126160 - DNA, 19 bp, Artificial sequence
  SiRNA target sequence
gtcaaccaatactccaaca

SEQ ID NO: 126161 - DNA, 19 bp, Artificial sequence
  SiRNA target sequence
tcaaccaatactccaacat

SEQ ID NO: 126162 - DNA, 19 bp, Artificial sequence
  SiRNA target sequence
caaccaatactccaacata

SEQ ID NO: 126163 - DNA, 19 bp, Artificial sequence
  SiRNA target sequence
aaccaatactccaacatag

SEQ ID NO: 126164 - DNA, 19 bp, Artificial sequence
  SiRNA target sequence
accaatactccaacatagt

SEQ ID NO: 126165 - DNA, 19 bp, Artificial sequence
  SiRNA target sequence
ccaatactccaacatagtt

SEQ ID NO: 126166 - DNA, 19 bp, Artificial sequence
  SiRNA target sequence
caatactccaacatagtta

SEQ ID NO: 126167 - DNA, 19 bp, Artificial sequence
  SiRNA target sequence
aatactccaacatagttat

SEQ ID NO: 126168 - DNA, 19 bp, Artificial sequence
  SiRNA target sequence
atactccaacatagttatg

SEQ ID NO: 126169 - DNA, 19 bp, Artificial sequence
  SiRNA target sequence
tactccaacatagttatgg

SEQ ID NO: 126170 - DNA, 19 bp, Artificial sequence
  SiRNA target sequence
actccaacatagttatggt

SEQ ID NO: 126171 - DNA, 19 bp, Artificial sequence
  SiRNA target sequence
ctccaacatagttatggta

SEQ ID NO: 126172 - DNA, 19 bp, Artificial sequence
  SiRNA target sequence
tccaacatagttatggtac

SEQ ID NO: 126173 - DNA, 19 bp, Artificial sequence
  SiRNA target sequence
ccaacatagttatggtaca

SEQ ID NO: 126174 - DNA, 19 bp, Artificial sequence
  SiRNA target sequence
caacatagttatggtacac

SEQ ID NO: 126175 - DNA, 19 bp, Artificial sequence
  SiRNA target sequence
aacatagttatggtacaca

SEQ ID NO: 126176 - DNA, 19 bp, Artificial sequence
  SiRNA target sequence
acatagttatggtacacat

SEQ ID NO: 126177 - DNA, 19 bp, Artificial sequence
  SiRNA target sequence
catagttatggtacacata

SEQ ID NO: 126178 - DNA, 19 bp, Artificial sequence
  SiRNA target sequence
atagttatggtacacatat

SEQ ID NO: 126179 - DNA, 19 bp, Artificial sequence
  SiRNA target sequence
tagttatggtacacatatt

SEQ ID NO: 126180 - DNA, 19 bp, Artificial sequence
  SiRNA target sequence
agttatggtacacatattg

SEQ ID NO: 126181 - DNA, 19 bp, Artificial sequence
  SiRNA target sequence
gttatggtacacatattgt

SEQ ID NO: 126182 - DNA, 19 bp, Artificial sequence
  SiRNA target sequence
ttatggtacacatattgta

SEQ ID NO: 126183 - DNA, 19 bp, Artificial sequence
  SiRNA target sequence
tatggtacacatattgtag

SEQ ID NO: 126184 - DNA, 19 bp, Artificial sequence
  SiRNA target sequence
atggtacacatattgtagt

SEQ ID NO: 126185 - DNA, 19 bp, Artificial sequence
  SiRNA target sequence
tggtacacatattgtagtt

SEQ ID NO: 126186 - DNA, 19 bp, Artificial sequence
  SiRNA target sequence
ggtacacatattgtagttc

SEQ ID NO: 126187 - DNA, 19 bp, Artificial sequence
  SiRNA target sequence
gtacacatattgtagttcc

SEQ ID NO: 126188 - DNA, 19 bp, Artificial sequence
  SiRNA target sequence
tacacatattgtagttcct

SEQ ID NO: 126189 - DNA, 19 bp, Artificial sequence
  SiRNA target sequence
acacatattgtagttcctg

SEQ ID NO: 126190 - DNA, 19 bp, Artificial sequence
  SiRNA target sequence
cacatattgtagttcctgc

SEQ ID NO: 126191 - DNA, 19 bp, Artificial sequence
  SiRNA target sequence
acatattgtagttcctgcg

SEQ ID NO: 126192 - DNA, 19 bp, Artificial sequence
  SiRNA target sequence
catattgtagttcctgcga

SEQ ID NO: 126193 - DNA, 19 bp, Artificial sequence
  SiRNA target sequence
atattgtagttcctgcgat

SEQ ID NO: 126194 - DNA, 19 bp, Artificial sequence
  SiRNA target sequence
tattgtagttcctgcgata

SEQ ID NO: 126195 - DNA, 19 bp, Artificial sequence
  SiRNA target sequence
attgtagttcctgcgatat

SEQ ID NO: 126196 - DNA, 19 bp, Artificial sequence
  SiRNA target sequence
ttgtagttcctgcgatatt

SEQ ID NO: 126197 - DNA, 19 bp, Artificial sequence
  SiRNA target sequence
tgtagttcctgcgatattt

SEQ ID NO: 126198 - DNA, 19 bp, Artificial sequence
  SiRNA target sequence
gtagttcctgcgatatttt

SEQ ID NO: 126199 - DNA, 19 bp, Artificial sequence
  SiRNA target sequence
tagttcctgcgatattttc

SEQ ID NO: 126200 - DNA, 19 bp, Artificial sequence
  SiRNA target sequence
agttcctgcgatattttcg

SEQ ID NO: 126201 - DNA, 19 bp, Artificial sequence
  SiRNA target sequence
gttcctgcgatattttcgc

SEQ ID NO: 126202 - DNA, 19 bp, Artificial sequence
  SiRNA target sequence
ttcctgcgatattttcgcc

SEQ ID NO: 126203 - DNA, 19 bp, Artificial sequence
  SiRNA target sequence
tcctgcgatattttcgcct

SEQ ID NO: 126204 - DNA, 19 bp, Artificial sequence
  SiRNA target sequence
cctgcgatattttcgccta

SEQ ID NO: 126205 - DNA, 19 bp, Artificial sequence
  SiRNA target sequence
ctgcgatattttcgcctaa

SEQ ID NO: 126206 - DNA, 19 bp, Artificial sequence
  SiRNA target sequence
tgcgatattttcgcctaaa

SEQ ID NO: 126207 - DNA, 19 bp, Artificial sequence
  SiRNA target sequence
gcgatattttcgcctaaaa

SEQ ID NO: 126208 - DNA, 19 bp, Artificial sequence
  SiRNA target sequence
cgatattttcgcctaaaaa

SEQ ID NO: 126209 - DNA, 19 bp, Artificial sequence
  SiRNA target sequence
gatattttcgcctaaaaat

SEQ ID NO: 126210 - DNA, 19 bp, Artificial sequence
  SiRNA target sequence
atattttcgcctaaaaata

SEQ ID NO: 126211 - DNA, 19 bp, Artificial sequence
  SiRNA target sequence
tattttcgcctaaaaatat

SEQ ID NO: 126212 - DNA, 19 bp, Artificial sequence
  SiRNA target sequence
attttcgcctaaaaatatg

SEQ ID NO: 126213 - DNA, 19 bp, Artificial sequence
  SiRNA target sequence
ttttcgcctaaaaatatgg

SEQ ID NO: 126214 - DNA, 19 bp, Artificial sequence
  SiRNA target sequence
tttcgcctaaaaatatggg

SEQ ID NO: 126215 - DNA, 19 bp, Artificial sequence
  SiRNA target sequence
ttcgcctaaaaatatgggc

SEQ ID NO: 126216 - DNA, 19 bp, Artificial sequence
  SiRNA target sequence
tcgcctaaaaatatgggct

SEQ ID NO: 126217 - DNA, 19 bp, Artificial sequence
  SiRNA target sequence
cgcctaaaaatatgggctt

SEQ ID NO: 126218 - DNA, 19 bp, Artificial sequence
  SiRNA target sequence
gcctaaaaatatgggcttt

SEQ ID NO: 126219 - DNA, 19 bp, Artificial sequence
  SiRNA target sequence
cctaaaaatatgggctttg

SEQ ID NO: 126220 - DNA, 19 bp, Artificial sequence
  SiRNA target sequence
ctaaaaatatgggctttgt

SEQ ID NO: 126221 - DNA, 19 bp, Artificial sequence
  SiRNA target sequence
taaaaatatgggctttgtt

SEQ ID NO: 126222 - DNA, 19 bp, Artificial sequence
  SiRNA target sequence
aaaaatatgggctttgttg

SEQ ID NO: 126223 - DNA, 19 bp, Artificial sequence
  SiRNA target sequence
aaaatatgggctttgttga

SEQ ID NO: 126224 - DNA, 19 bp, Artificial sequence
  SiRNA target sequence
aaatatgggctttgttgat

SEQ ID NO: 126225 - DNA, 19 bp, Artificial sequence
  SiRNA target sequence
aatatgggctttgttgatc

SEQ ID NO: 126226 - DNA, 19 bp, Artificial sequence
  SiRNA target sequence
atatgggctttgttgatcc

SEQ ID NO: 126227 - DNA, 19 bp, Artificial sequence
  SiRNA target sequence
tatgggctttgttgatcca

SEQ ID NO: 126228 - DNA, 19 bp, Artificial sequence
  SiRNA target sequence
atgggctttgttgatccaa

SEQ ID NO: 126229 - DNA, 19 bp, Artificial sequence
  SiRNA target sequence
tgggctttgttgatccaag

SEQ ID NO: 126230 - DNA, 19 bp, Artificial sequence
  SiRNA target sequence
gggctttgttgatccaagc

SEQ ID NO: 126231 - DNA, 19 bp, Artificial sequence
  SiRNA target sequence
ggctttgttgatccaagca

SEQ ID NO: 126232 - DNA, 19 bp, Artificial sequence
  SiRNA target sequence
gctttgttgatccaagcac

SEQ ID NO: 126233 - DNA, 19 bp, Artificial sequence
  SiRNA target sequence
ctttgttgatccaagcacg

SEQ ID NO: 126234 - DNA, 19 bp, Artificial sequence
  SiRNA target sequence
tttgttgatccaagcacga

SEQ ID NO: 126235 - DNA, 19 bp, Artificial sequence
  SiRNA target sequence
ttgttgatccaagcacgag

SEQ ID NO: 126236 - DNA, 19 bp, Artificial sequence
  SiRNA target sequence
tgttgatccaagcacgagt

SEQ ID NO: 126237 - DNA, 19 bp, Artificial sequence
  SiRNA target sequence
gttgatccaagcacgagtg

SEQ ID NO: 126238 - DNA, 19 bp, Artificial sequence
  SiRNA target sequence
ttgatccaagcacgagtga

SEQ ID NO: 126239 - DNA, 19 bp, Artificial sequence
  SiRNA target sequence
tgatccaagcacgagtgat

SEQ ID NO: 126240 - DNA, 19 bp, Artificial sequence
  SiRNA target sequence
gatccaagcacgagtgatg

SEQ ID NO: 126241 - DNA, 19 bp, Artificial sequence
  SiRNA target sequence
atccaagcacgagtgatgg

SEQ ID NO: 126242 - DNA, 19 bp, Artificial sequence
  SiRNA target sequence
tccaagcacgagtgatgga

SEQ ID NO: 126243 - DNA, 19 bp, Artificial sequence
  SiRNA target sequence
ccaagcacgagtgatggaa

SEQ ID NO: 126244 - DNA, 19 bp, Artificial sequence
  SiRNA target sequence
caagcacgagtgatggaag

SEQ ID NO: 126245 - DNA, 19 bp, Artificial sequence
  SiRNA target sequence
aagcacgagtgatggaaga

SEQ ID NO: 126246 - DNA, 19 bp, Artificial sequence
  SiRNA target sequence
agcacgagtgatggaagaa

SEQ ID NO: 126247 - DNA, 19 bp, Artificial sequence
  SiRNA target sequence
gcacgagtgatggaagaat

SEQ ID NO: 126248 - DNA, 19 bp, Artificial sequence
  SiRNA target sequence
cacgagtgatggaagaatc

SEQ ID NO: 126249 - DNA, 19 bp, Artificial sequence
  SiRNA target sequence
acgagtgatggaagaatcg

SEQ ID NO: 126250 - DNA, 19 bp, Artificial sequence
  SiRNA target sequence
cgagtgatggaagaatcgc

SEQ ID NO: 126251 - DNA, 19 bp, Artificial sequence
  SiRNA target sequence
gagtgatggaagaatcgca

SEQ ID NO: 126252 - DNA, 19 bp, Artificial sequence
  SiRNA target sequence
agtgatggaagaatcgcat

SEQ ID NO: 126253 - DNA, 19 bp, Artificial sequence
  SiRNA target sequence
gtgatggaagaatcgcatt

SEQ ID NO: 126254 - DNA, 19 bp, Artificial sequence
  SiRNA target sequence
tgatggaagaatcgcattt

SEQ ID NO: 126255 - DNA, 19 bp, Artificial sequence
  SiRNA target sequence
gatggaagaatcgcatttt

SEQ ID NO: 126256 - DNA, 19 bp, Artificial sequence
  SiRNA target sequence
atggaagaatcgcattttt

SEQ ID NO: 126257 - DNA, 19 bp, Artificial sequence
  SiRNA target sequence
tggaagaatcgcatttttt

SEQ ID NO: 126258 - DNA, 19 bp, Artificial sequence
  SiRNA target sequence
ggaagaatcgcatttttta

SEQ ID NO: 126259 - DNA, 19 bp, Artificial sequence
  SiRNA target sequence
gaagaatcgcattttttat

SEQ ID NO: 126260 - DNA, 19 bp, Artificial sequence
  SiRNA target sequence
aagaatcgcattttttatg

SEQ ID NO: 126261 - DNA, 19 bp, Artificial sequence
  SiRNA target sequence
agaatcgcattttttatga

SEQ ID NO: 126262 - DNA, 19 bp, Artificial sequence
  SiRNA target sequence
gaatcgcattttttatgaa

SEQ ID NO: 126263 - DNA, 19 bp, Artificial sequence
  SiRNA target sequence
aatcgcattttttatgaat

SEQ ID NO: 126264 - DNA, 19 bp, Artificial sequence
  SiRNA target sequence
atcgcattttttatgaatt

SEQ ID NO: 126265 - DNA, 19 bp, Artificial sequence
  SiRNA target sequence
tcgcattttttatgaattt

SEQ ID NO: 126266 - DNA, 19 bp, Artificial sequence
  SiRNA target sequence
cgcattttttatgaatttt

SEQ ID NO: 126267 - DNA, 19 bp, Artificial sequence
  SiRNA target sequence
gcattttttatgaatttta

SEQ ID NO: 126268 - DNA, 19 bp, Artificial sequence
  SiRNA target sequence
cattttttatgaattttaa

SEQ ID NO: 126269 - DNA, 19 bp, Artificial sequence
  SiRNA target sequence
attttttatgaattttaaa

SEQ ID NO: 126270 - DNA, 19 bp, Artificial sequence
  SiRNA target sequence
ttttttatgaattttaaag

SEQ ID NO: 126271 - DNA, 19 bp, Artificial sequence
  SiRNA target sequence
tttttatgaattttaaagg

SEQ ID NO: 126272 - DNA, 19 bp, Artificial sequence
  SiRNA target sequence
ttttatgaattttaaaggt

SEQ ID NO: 126273 - DNA, 19 bp, Artificial sequence
  SiRNA target sequence
tttatgaattttaaaggta

SEQ ID NO: 126274 - DNA, 19 bp, Artificial sequence
  SiRNA target sequence
ttatgaattttaaaggtaa

SEQ ID NO: 126275 - DNA, 19 bp, Artificial sequence
  SiRNA target sequence
tatgaattttaaaggtaaa

SEQ ID NO: 126276 - DNA, 19 bp, Artificial sequence
  SiRNA target sequence
atgaattttaaaggtaaaa

SEQ ID NO: 126277 - DNA, 19 bp, Artificial sequence
  SiRNA target sequence
tgaattttaaaggtaaaac

SEQ ID NO: 126278 - DNA, 19 bp, Artificial sequence
  SiRNA target sequence
gaattttaaaggtaaaaca

SEQ ID NO: 126279 - DNA, 19 bp, Artificial sequence
  SiRNA target sequence
aattttaaaggtaaaacat

SEQ ID NO: 126280 - DNA, 19 bp, Artificial sequence
  SiRNA target sequence
attttaaaggtaaaacatt

SEQ ID NO: 126281 - DNA, 19 bp, Artificial sequence
  SiRNA target sequence
ttttaaaggtaaaacattg

SEQ ID NO: 126282 - DNA, 19 bp, Artificial sequence
  SiRNA target sequence
tttaaaggtaaaacattga

SEQ ID NO: 126283 - DNA, 19 bp, Artificial sequence
  SiRNA target sequence
ttaaaggtaaaacattgat

SEQ ID NO: 126284 - DNA, 19 bp, Artificial sequence
  SiRNA target sequence
taaaggtaaaacattgatt

SEQ ID NO: 126285 - DNA, 19 bp, Artificial sequence
  SiRNA target sequence
aaaggtaaaacattgattg

SEQ ID NO: 126286 - DNA, 19 bp, Artificial sequence
  SiRNA target sequence
aaggtaaaacattgattgg

SEQ ID NO: 126287 - DNA, 19 bp, Artificial sequence
  SiRNA target sequence
aggtaaaacattgattgga

SEQ ID NO: 126288 - DNA, 19 bp, Artificial sequence
  SiRNA target sequence
ggtaaaacattgattggag

SEQ ID NO: 126289 - DNA, 19 bp, Artificial sequence
  SiRNA target sequence
gtaaaacattgattggagg

SEQ ID NO: 126290 - DNA, 19 bp, Artificial sequence
  SiRNA target sequence
taaaacattgattggagga

SEQ ID NO: 126291 - DNA, 19 bp, Artificial sequence
  SiRNA target sequence
aaaacattgattggaggaa

SEQ ID NO: 126292 - DNA, 19 bp, Artificial sequence
  SiRNA target sequence
aaacattgattggaggaac

SEQ ID NO: 126293 - DNA, 19 bp, Artificial sequence
  SiRNA target sequence
aacattgattggaggaaca

SEQ ID NO: 126294 - DNA, 19 bp, Artificial sequence
  SiRNA target sequence
acattgattggaggaacag

SEQ ID NO: 126295 - DNA, 19 bp, Artificial sequence
  SiRNA target sequence
cattgattggaggaacaga

SEQ ID NO: 126296 - DNA, 19 bp, Artificial sequence
  SiRNA target sequence
attgattggaggaacagat

SEQ ID NO: 126297 - DNA, 19 bp, Artificial sequence
  SiRNA target sequence
ttgattggaggaacagatg

SEQ ID NO: 126298 - DNA, 19 bp, Artificial sequence
  SiRNA target sequence
tgattggaggaacagatgt

SEQ ID NO: 126299 - DNA, 19 bp, Artificial sequence
  SiRNA target sequence
gattggaggaacagatgtt

SEQ ID NO: 126300 - DNA, 19 bp, Artificial sequence
  SiRNA target sequence
attggaggaacagatgtta

SEQ ID NO: 126301 - DNA, 19 bp, Artificial sequence
  SiRNA target sequence
ttggaggaacagatgttaa

SEQ ID NO: 126302 - DNA, 19 bp, Artificial sequence
  SiRNA target sequence
tggaggaacagatgttaag

SEQ ID NO: 126303 - DNA, 19 bp, Artificial sequence
  SiRNA target sequence
ggaggaacagatgttaagt

SEQ ID NO: 126304 - DNA, 19 bp, Artificial sequence
  SiRNA target sequence
gaggaacagatgttaagtg

SEQ ID NO: 126305 - DNA, 19 bp, Artificial sequence
  SiRNA target sequence
aggaacagatgttaagtgt

SEQ ID NO: 126306 - DNA, 19 bp, Artificial sequence
  SiRNA target sequence
ggaacagatgttaagtgta

SEQ ID NO: 126307 - DNA, 19 bp, Artificial sequence
  SiRNA target sequence
gaacagatgttaagtgtaa

SEQ ID NO: 126308 - DNA, 19 bp, Artificial sequence
  SiRNA target sequence
aacagatgttaagtgtaaa

SEQ ID NO: 126309 - DNA, 19 bp, Artificial sequence
  SiRNA target sequence
acagatgttaagtgtaaag

SEQ ID NO: 126310 - DNA, 19 bp, Artificial sequence
  SiRNA target sequence
cagatgttaagtgtaaagt

SEQ ID NO: 126311 - DNA, 19 bp, Artificial sequence
  SiRNA target sequence
agatgttaagtgtaaagtt

SEQ ID NO: 126312 - DNA, 19 bp, Artificial sequence
  SiRNA target sequence
gatgttaagtgtaaagttg

SEQ ID NO: 126313 - DNA, 19 bp, Artificial sequence
  SiRNA target sequence
atgttaagtgtaaagttga

SEQ ID NO: 126314 - DNA, 19 bp, Artificial sequence
  SiRNA target sequence
tgttaagtgtaaagttgaa

SEQ ID NO: 126315 - DNA, 19 bp, Artificial sequence
  SiRNA target sequence
gttaagtgtaaagttgaag

SEQ ID NO: 126316 - DNA, 19 bp, Artificial sequence
  SiRNA target sequence
ttaagtgtaaagttgaaga

SEQ ID NO: 126317 - DNA, 19 bp, Artificial sequence
  SiRNA target sequence
taagtgtaaagttgaagat

SEQ ID NO: 126318 - DNA, 19 bp, Artificial sequence
  SiRNA target sequence
aagtgtaaagttgaagatt

SEQ ID NO: 126319 - DNA, 19 bp, Artificial sequence
  SiRNA target sequence
agtgtaaagttgaagattt

SEQ ID NO: 126320 - DNA, 19 bp, Artificial sequence
  SiRNA target sequence
gtgtaaagttgaagattta

SEQ ID NO: 126321 - DNA, 19 bp, Artificial sequence
  SiRNA target sequence
tgtaaagttgaagatttaa

SEQ ID NO: 126322 - DNA, 19 bp, Artificial sequence
  SiRNA target sequence
gtaaagttgaagatttaat

SEQ ID NO: 126323 - DNA, 19 bp, Artificial sequence
  SiRNA target sequence
taaagttgaagatttaata

SEQ ID NO: 126324 - DNA, 19 bp, Artificial sequence
  SiRNA target sequence
aaagttgaagatttaataa

SEQ ID NO: 126325 - DNA, 19 bp, Artificial sequence
  SiRNA target sequence
aagttgaagatttaataaa

SEQ ID NO: 126326 - DNA, 19 bp, Artificial sequence
  SiRNA target sequence
agttgaagatttaataaaa

SEQ ID NO: 126327 - DNA, 19 bp, Artificial sequence
  SiRNA target sequence
gttgaagatttaataaaac

SEQ ID NO: 126328 - DNA, 19 bp, Artificial sequence
  SiRNA target sequence
ttgaagatttaataaaacc

SEQ ID NO: 126329 - DNA, 19 bp, Artificial sequence
  SiRNA target sequence
tgaagatttaataaaaccg

SEQ ID NO: 126330 - DNA, 19 bp, Artificial sequence
  SiRNA target sequence
gaagatttaataaaaccga

SEQ ID NO: 126331 - DNA, 19 bp, Artificial sequence
  SiRNA target sequence
aagatttaataaaaccgac

SEQ ID NO: 126332 - DNA, 19 bp, Artificial sequence
  SiRNA target sequence
agatttaataaaaccgact

SEQ ID NO: 126333 - DNA, 19 bp, Artificial sequence
  SiRNA target sequence
gatttaataaaaccgactg

SEQ ID NO: 126334 - DNA, 19 bp, Artificial sequence
  SiRNA target sequence
atttaataaaaccgactga

SEQ ID NO: 126335 - DNA, 19 bp, Artificial sequence
  SiRNA target sequence
tttaataaaaccgactgaa

SEQ ID NO: 126336 - DNA, 19 bp, Artificial sequence
  SiRNA target sequence
ttaataaaaccgactgaag

SEQ ID NO: 126337 - DNA, 19 bp, Artificial sequence
  SiRNA target sequence
taataaaaccgactgaaga

SEQ ID NO: 126338 - DNA, 19 bp, Artificial sequence
  SiRNA target sequence
aataaaaccgactgaagaa

SEQ ID NO: 126339 - DNA, 19 bp, Artificial sequence
  SiRNA target sequence
ataaaaccgactgaagaag

SEQ ID NO: 126340 - DNA, 19 bp, Artificial sequence
  SiRNA target sequence
taaaaccgactgaagaaga

SEQ ID NO: 126341 - DNA, 19 bp, Artificial sequence
  SiRNA target sequence
aaaaccgactgaagaagat

SEQ ID NO: 126342 - DNA, 19 bp, Artificial sequence
  SiRNA target sequence
aaaccgactgaagaagatc

SEQ ID NO: 126343 - DNA, 19 bp, Artificial sequence
  SiRNA target sequence
aaccgactgaagaagatct

SEQ ID NO: 126344 - DNA, 19 bp, Artificial sequence
  SiRNA target sequence
accgactgaagaagatcta

SEQ ID NO: 126345 - DNA, 19 bp, Artificial sequence
  SiRNA target sequence
ccgactgaagaagatctaa

SEQ ID NO: 126346 - DNA, 19 bp, Artificial sequence
  SiRNA target sequence
cgactgaagaagatctaaa

SEQ ID NO: 126347 - DNA, 19 bp, Artificial sequence
  SiRNA target sequence
gactgaagaagatctaaac

SEQ ID NO: 126348 - DNA, 19 bp, Artificial sequence
  SiRNA target sequence
actgaagaagatctaaact

SEQ ID NO: 126349 - DNA, 19 bp, Artificial sequence
  SiRNA target sequence
ctgaagaagatctaaactt

SEQ ID NO: 126350 - DNA, 19 bp, Artificial sequence
  SiRNA target sequence
tgaagaagatctaaacttt

SEQ ID NO: 126351 - DNA, 19 bp, Artificial sequence
  SiRNA target sequence
gaagaagatctaaactttc

SEQ ID NO: 126352 - DNA, 19 bp, Artificial sequence
  SiRNA target sequence
aagaagatctaaactttct

SEQ ID NO: 126353 - DNA, 19 bp, Artificial sequence
  SiRNA target sequence
agaagatctaaactttctt

SEQ ID NO: 126354 - DNA, 19 bp, Artificial sequence
  SiRNA target sequence
gaagatctaaactttctta

SEQ ID NO: 126355 - DNA, 19 bp, Artificial sequence
  SiRNA target sequence
aagatctaaactttcttat

SEQ ID NO: 126356 - DNA, 19 bp, Artificial sequence
  SiRNA target sequence
agatctaaactttcttatt

SEQ ID NO: 126357 - DNA, 19 bp, Artificial sequence
  SiRNA target sequence
gatctaaactttcttattc

SEQ ID NO: 126358 - DNA, 19 bp, Artificial sequence
  SiRNA target sequence
atctaaactttcttattca

SEQ ID NO: 126359 - DNA, 19 bp, Artificial sequence
  SiRNA target sequence
tctaaactttcttattcac

SEQ ID NO: 126360 - DNA, 19 bp, Artificial sequence
  SiRNA target sequence
ctaaactttcttattcacg

SEQ ID NO: 126361 - DNA, 19 bp, Artificial sequence
  SiRNA target sequence
taaactttcttattcacga

SEQ ID NO: 126362 - DNA, 19 bp, Artificial sequence
  SiRNA target sequence
aaactttcttattcacgag

SEQ ID NO: 126363 - DNA, 19 bp, Artificial sequence
  SiRNA target sequence
aactttcttattcacgagg

SEQ ID NO: 126364 - DNA, 19 bp, Artificial sequence
  SiRNA target sequence
actttcttattcacgaggc

SEQ ID NO: 126365 - DNA, 19 bp, Artificial sequence
  SiRNA target sequence
ctttcttattcacgaggcc

SEQ ID NO: 126366 - DNA, 19 bp, Artificial sequence
  SiRNA target sequence
tttcttattcacgaggcca

SEQ ID NO: 126367 - DNA, 19 bp, Artificial sequence
  SiRNA target sequence
ttcttattcacgaggccaa

SEQ ID NO: 126368 - DNA, 19 bp, Artificial sequence
  SiRNA target sequence
tcttattcacgaggccaat

SEQ ID NO: 126369 - DNA, 19 bp, Artificial sequence
  SiRNA target sequence
cttattcacgaggccaatt

SEQ ID NO: 126370 - DNA, 19 bp, Artificial sequence
  SiRNA target sequence
ttattcacgaggccaatta

SEQ ID NO: 126371 - DNA, 19 bp, Artificial sequence
  SiRNA target sequence
tattcacgaggccaattat

SEQ ID NO: 126372 - DNA, 19 bp, Artificial sequence
  SiRNA target sequence
attcacgaggccaattatt

SEQ ID NO: 126373 - DNA, 19 bp, Artificial sequence
  SiRNA target sequence
ttcacgaggccaattattt

SEQ ID NO: 126374 - DNA, 19 bp, Artificial sequence
  SiRNA target sequence
tcacgaggccaattatttt

SEQ ID NO: 126375 - DNA, 19 bp, Artificial sequence
  SiRNA target sequence
cacgaggccaattatttta

SEQ ID NO: 126376 - DNA, 19 bp, Artificial sequence
  SiRNA target sequence
acgaggccaattattttac

SEQ ID NO: 126377 - DNA, 19 bp, Artificial sequence
  SiRNA target sequence
cgaggccaattattttaca

SEQ ID NO: 126378 - DNA, 19 bp, Artificial sequence
  SiRNA target sequence
gaggccaattattttacag

SEQ ID NO: 126379 - DNA, 19 bp, Artificial sequence
  SiRNA target sequence
aggccaattattttacaga

SEQ ID NO: 126380 - DNA, 19 bp, Artificial sequence
  SiRNA target sequence
ggccaattattttacagat

SEQ ID NO: 126381 - DNA, 19 bp, Artificial sequence
  SiRNA target sequence
gccaattattttacagatc

SEQ ID NO: 126382 - DNA, 19 bp, Artificial sequence
  SiRNA target sequence
ccaattattttacagatca

SEQ ID NO: 126383 - DNA, 19 bp, Artificial sequence
  SiRNA target sequence
caattattttacagatcac

SEQ ID NO: 126384 - DNA, 19 bp, Artificial sequence
  SiRNA target sequence
aattattttacagatcaca

SEQ ID NO: 126385 - DNA, 19 bp, Artificial sequence
  SiRNA target sequence
attattttacagatcacaa

SEQ ID NO: 126386 - DNA, 19 bp, Artificial sequence
  SiRNA target sequence
ttattttacagatcacaat

SEQ ID NO: 126387 - DNA, 19 bp, Artificial sequence
  SiRNA target sequence
tattttacagatcacaatt

SEQ ID NO: 126388 - DNA, 19 bp, Artificial sequence
  SiRNA target sequence
attttacagatcacaattt

SEQ ID NO: 126389 - DNA, 19 bp, Artificial sequence
  SiRNA target sequence
ttttacagatcacaattta

SEQ ID NO: 126390 - DNA, 19 bp, Artificial sequence
  SiRNA target sequence
tttacagatcacaatttaa

SEQ ID NO: 126391 - DNA, 19 bp, Artificial sequence
  SiRNA target sequence
ttacagatcacaatttaaa

SEQ ID NO: 126392 - DNA, 19 bp, Artificial sequence
  SiRNA target sequence
tacagatcacaatttaaaa

SEQ ID NO: 126393 - DNA, 19 bp, Artificial sequence
  SiRNA target sequence
acagatcacaatttaaaat

SEQ ID NO: 126394 - DNA, 19 bp, Artificial sequence
  SiRNA target sequence
cagatcacaatttaaaatt

SEQ ID NO: 126395 - DNA, 19 bp, Artificial sequence
  SiRNA target sequence
agatcacaatttaaaatta

SEQ ID NO: 126396 - DNA, 19 bp, Artificial sequence
  SiRNA target sequence
gatcacaatttaaaattaa

SEQ ID NO: 126397 - DNA, 19 bp, Artificial sequence
  SiRNA target sequence
atcacaatttaaaattaac

SEQ ID NO: 126398 - DNA, 19 bp, Artificial sequence
  SiRNA target sequence
tcacaatttaaaattaaca

SEQ ID NO: 126399 - DNA, 19 bp, Artificial sequence
  SiRNA target sequence
cacaatttaaaattaacaa

SEQ ID NO: 126400 - DNA, 19 bp, Artificial sequence
  SiRNA target sequence
acaatttaaaattaacaaa

SEQ ID NO: 126401 - DNA, 19 bp, Artificial sequence
  SiRNA target sequence
caatttaaaattaacaaaa

SEQ ID NO: 126402 - DNA, 19 bp, Artificial sequence
  SiRNA target sequence
aatttaaaattaacaaaaa

SEQ ID NO: 126403 - DNA, 19 bp, Artificial sequence
  SiRNA target sequence
atttaaaattaacaaaaaa

SEQ ID NO: 126404 - DNA, 19 bp, Artificial sequence
  SiRNA target sequence
tttaaaattaacaaaaaaa

SEQ ID NO: 126405 - DNA, 19 bp, Artificial sequence
  SiRNA target sequence
ttaaaattaacaaaaaaag

SEQ ID NO: 126406 - DNA, 19 bp, Artificial sequence
  SiRNA target sequence
taaaattaacaaaaaaaga

SEQ ID NO: 126407 - DNA, 19 bp, Artificial sequence
  SiRNA target sequence
aaaattaacaaaaaaagat

SEQ ID NO: 126408 - DNA, 19 bp, Artificial sequence
  SiRNA target sequence
aaattaacaaaaaaagatg

SEQ ID NO: 126409 - DNA, 19 bp, Artificial sequence
  SiRNA target sequence
aattaacaaaaaaagatgt

SEQ ID NO: 126410 - DNA, 19 bp, Artificial sequence
  SiRNA target sequence
attaacaaaaaaagatgtt

SEQ ID NO: 126411 - DNA, 19 bp, Artificial sequence
  SiRNA target sequence
ttaacaaaaaaagatgttt

SEQ ID NO: 126412 - DNA, 19 bp, Artificial sequence
  SiRNA target sequence
taacaaaaaaagatgtttt

SEQ ID NO: 126413 - DNA, 19 bp, Artificial sequence
  SiRNA target sequence
aacaaaaaaagatgttttg

SEQ ID NO: 126414 - DNA, 19 bp, Artificial sequence
  SiRNA target sequence
acaaaaaaagatgttttgt

SEQ ID NO: 126415 - DNA, 19 bp, Artificial sequence
  SiRNA target sequence
caaaaaaagatgttttgtc

SEQ ID NO: 126416 - DNA, 19 bp, Artificial sequence
  SiRNA target sequence
aaaaaaagatgttttgtct

SEQ ID NO: 126417 - DNA, 19 bp, Artificial sequence
  SiRNA target sequence
aaaaaagatgttttgtctg

SEQ ID NO: 126418 - DNA, 19 bp, Artificial sequence
  SiRNA target sequence
aaaaagatgttttgtctgt

SEQ ID NO: 126419 - DNA, 19 bp, Artificial sequence
  SiRNA target sequence
aaaagatgttttgtctgtt

SEQ ID NO: 126420 - DNA, 19 bp, Artificial sequence
  SiRNA target sequence
aaagatgttttgtctgttt

SEQ ID NO: 126421 - DNA, 19 bp, Artificial sequence
  SiRNA target sequence
aagatgttttgtctgtttg

SEQ ID NO: 126422 - DNA, 19 bp, Artificial sequence
  SiRNA target sequence
agatgttttgtctgtttgg

SEQ ID NO: 126423 - DNA, 19 bp, Artificial sequence
  SiRNA target sequence
gatgttttgtctgtttgga

SEQ ID NO: 126424 - DNA, 19 bp, Artificial sequence
  SiRNA target sequence
atgttttgtctgtttggac

SEQ ID NO: 126425 - DNA, 19 bp, Artificial sequence
  SiRNA target sequence
tgttttgtctgtttggaca

SEQ ID NO: 126426 - DNA, 19 bp, Artificial sequence
  SiRNA target sequence
gttttgtctgtttggacag

SEQ ID NO: 126427 - DNA, 19 bp, Artificial sequence
  SiRNA target sequence
ttttgtctgtttggacagg

SEQ ID NO: 126428 - DNA, 19 bp, Artificial sequence
  SiRNA target sequence
tttgtctgtttggacaggt

SEQ ID NO: 126429 - DNA, 19 bp, Artificial sequence
  SiRNA target sequence
ttgtctgtttggacaggta

SEQ ID NO: 126430 - DNA, 19 bp, Artificial sequence
  SiRNA target sequence
tgtctgtttggacaggtat

SEQ ID NO: 126431 - DNA, 19 bp, Artificial sequence
  SiRNA target sequence
gtctgtttggacaggtatt

SEQ ID NO: 126432 - DNA, 19 bp, Artificial sequence
  SiRNA target sequence
tctgtttggacaggtatta

SEQ ID NO: 126433 - DNA, 19 bp, Artificial sequence
  SiRNA target sequence
ctgtttggacaggtattag

SEQ ID NO: 126434 - DNA, 19 bp, Artificial sequence
  SiRNA target sequence
tgtttggacaggtattaga

SEQ ID NO: 126435 - DNA, 19 bp, Artificial sequence
  SiRNA target sequence
gtttggacaggtattagac

SEQ ID NO: 126436 - DNA, 19 bp, Artificial sequence
  SiRNA target sequence
tttggacaggtattagacc

SEQ ID NO: 126437 - DNA, 19 bp, Artificial sequence
  SiRNA target sequence
ttggacaggtattagaccg

SEQ ID NO: 126438 - DNA, 19 bp, Artificial sequence
  SiRNA target sequence
tggacaggtattagaccgt

SEQ ID NO: 126439 - DNA, 19 bp, Artificial sequence
  SiRNA target sequence
ggacaggtattagaccgtt

SEQ ID NO: 126440 - DNA, 19 bp, Artificial sequence
  SiRNA target sequence
gacaggtattagaccgtta

SEQ ID NO: 126441 - DNA, 19 bp, Artificial sequence
  SiRNA target sequence
acaggtattagaccgttag

SEQ ID NO: 126442 - DNA, 19 bp, Artificial sequence
  SiRNA target sequence
caggtattagaccgttagt

SEQ ID NO: 126443 - DNA, 19 bp, Artificial sequence
  SiRNA target sequence
aggtattagaccgttagtc

SEQ ID NO: 126444 - DNA, 19 bp, Artificial sequence
  SiRNA target sequence
ggtattagaccgttagtca

SEQ ID NO: 126445 - DNA, 19 bp, Artificial sequence
  SiRNA target sequence
gtattagaccgttagtcaa

SEQ ID NO: 126446 - DNA, 19 bp, Artificial sequence
  SiRNA target sequence
tattagaccgttagtcaag

SEQ ID NO: 126447 - DNA, 19 bp, Artificial sequence
  SiRNA target sequence
attagaccgttagtcaagg

SEQ ID NO: 126448 - DNA, 19 bp, Artificial sequence
  SiRNA target sequence
ttagaccgttagtcaagga

SEQ ID NO: 126449 - DNA, 19 bp, Artificial sequence
  SiRNA target sequence
tagaccgttagtcaaggat

SEQ ID NO: 126450 - DNA, 19 bp, Artificial sequence
  SiRNA target sequence
agaccgttagtcaaggatt

SEQ ID NO: 126451 - DNA, 19 bp, Artificial sequence
  SiRNA target sequence
gaccgttagtcaaggattt

SEQ ID NO: 126452 - DNA, 19 bp, Artificial sequence
  SiRNA target sequence
accgttagtcaaggattta

SEQ ID NO: 126453 - DNA, 19 bp, Artificial sequence
  SiRNA target sequence
ccgttagtcaaggatttat

SEQ ID NO: 126454 - DNA, 19 bp, Artificial sequence
  SiRNA target sequence
cgttagtcaaggatttatc

SEQ ID NO: 126455 - DNA, 19 bp, Artificial sequence
  SiRNA target sequence
gttagtcaaggatttatcg

SEQ ID NO: 126456 - DNA, 19 bp, Artificial sequence
  SiRNA target sequence
ttagtcaaggatttatcga

SEQ ID NO: 126457 - DNA, 19 bp, Artificial sequence
  SiRNA target sequence
tagtcaaggatttatcgaa

SEQ ID NO: 126458 - DNA, 19 bp, Artificial sequence
  SiRNA target sequence
agtcaaggatttatcgaaa

SEQ ID NO: 126459 - DNA, 19 bp, Artificial sequence
  SiRNA target sequence
gtcaaggatttatcgaaaa

SEQ ID NO: 126460 - DNA, 19 bp, Artificial sequence
  SiRNA target sequence
tcaaggatttatcgaaaag

SEQ ID NO: 126461 - DNA, 19 bp, Artificial sequence
  SiRNA target sequence
caaggatttatcgaaaagt

SEQ ID NO: 126462 - DNA, 19 bp, Artificial sequence
  SiRNA target sequence
aaggatttatcgaaaagtt

SEQ ID NO: 126463 - DNA, 19 bp, Artificial sequence
  SiRNA target sequence
aggatttatcgaaaagttc

SEQ ID NO: 126464 - DNA, 19 bp, Artificial sequence
  SiRNA target sequence
ggatttatcgaaaagttca

SEQ ID NO: 126465 - DNA, 19 bp, Artificial sequence
  SiRNA target sequence
gatttatcgaaaagttcaa

SEQ ID NO: 126466 - DNA, 19 bp, Artificial sequence
  SiRNA target sequence
atttatcgaaaagttcaac

SEQ ID NO: 126467 - DNA, 19 bp, Artificial sequence
  SiRNA target sequence
tttatcgaaaagttcaaca

SEQ ID NO: 126468 - DNA, 19 bp, Artificial sequence
  SiRNA target sequence
ttatcgaaaagttcaacag

SEQ ID NO: 126469 - DNA, 19 bp, Artificial sequence
  SiRNA target sequence
tatcgaaaagttcaacaga

SEQ ID NO: 126470 - DNA, 19 bp, Artificial sequence
  SiRNA target sequence
atcgaaaagttcaacagaa

SEQ ID NO: 126471 - DNA, 19 bp, Artificial sequence
  SiRNA target sequence
tcgaaaagttcaacagaaa

SEQ ID NO: 126472 - DNA, 19 bp, Artificial sequence
  SiRNA target sequence
cgaaaagttcaacagaaaa

SEQ ID NO: 126473 - DNA, 19 bp, Artificial sequence
  SiRNA target sequence
gaaaagttcaacagaaaag

SEQ ID NO: 126474 - DNA, 19 bp, Artificial sequence
  SiRNA target sequence
aaaagttcaacagaaaaga

SEQ ID NO: 126475 - DNA, 19 bp, Artificial sequence
  SiRNA target sequence
aaagttcaacagaaaagat

SEQ ID NO: 126476 - DNA, 19 bp, Artificial sequence
  SiRNA target sequence
aagttcaacagaaaagata

SEQ ID NO: 126477 - DNA, 19 bp, Artificial sequence
  SiRNA target sequence
agttcaacagaaaagatat

SEQ ID NO: 126478 - DNA, 19 bp, Artificial sequence
  SiRNA target sequence
gttcaacagaaaagatatg

SEQ ID NO: 126479 - DNA, 19 bp, Artificial sequence
  SiRNA target sequence
ttcaacagaaaagatatgt

SEQ ID NO: 126480 - DNA, 19 bp, Artificial sequence
  SiRNA target sequence
tcaacagaaaagatatgta

SEQ ID NO: 126481 - DNA, 19 bp, Artificial sequence
  SiRNA target sequence
caacagaaaagatatgtag

SEQ ID NO: 126482 - DNA, 19 bp, Artificial sequence
  SiRNA target sequence
aacagaaaagatatgtaga

SEQ ID NO: 126483 - DNA, 19 bp, Artificial sequence
  SiRNA target sequence
acagaaaagatatgtagaa

SEQ ID NO: 126484 - DNA, 19 bp, Artificial sequence
  SiRNA target sequence
cagaaaagatatgtagaaa

SEQ ID NO: 126485 - DNA, 19 bp, Artificial sequence
  SiRNA target sequence
agaaaagatatgtagaaaa

SEQ ID NO: 126486 - DNA, 19 bp, Artificial sequence
  SiRNA target sequence
gaaaagatatgtagaaaac

SEQ ID NO: 126487 - DNA, 19 bp, Artificial sequence
  SiRNA target sequence
aaaagatatgtagaaaaca

SEQ ID NO: 126488 - DNA, 19 bp, Artificial sequence
  SiRNA target sequence
aaagatatgtagaaaacat

SEQ ID NO: 126489 - DNA, 19 bp, Artificial sequence
  SiRNA target sequence
aagatatgtagaaaacata

SEQ ID NO: 126490 - DNA, 19 bp, Artificial sequence
  SiRNA target sequence
agatatgtagaaaacatac

SEQ ID NO: 126491 - DNA, 19 bp, Artificial sequence
  SiRNA target sequence
gatatgtagaaaacatact

SEQ ID NO: 126492 - DNA, 19 bp, Artificial sequence
  SiRNA target sequence
atatgtagaaaacatacta

SEQ ID NO: 126493 - DNA, 19 bp, Artificial sequence
  SiRNA target sequence
tatgtagaaaacatactat

SEQ ID NO: 126494 - DNA, 19 bp, Artificial sequence
  SiRNA target sequence
atgtagaaaacatactata

SEQ ID NO: 126495 - DNA, 19 bp, Artificial sequence
  SiRNA target sequence
tgtagaaaacatactataa

SEQ ID NO: 126496 - DNA, 19 bp, Artificial sequence
  SiRNA target sequence
gtagaaaacatactataag

SEQ ID NO: 126497 - DNA, 19 bp, Artificial sequence
  SiRNA target sequence
tagaaaacatactataaga

SEQ ID NO: 126498 - DNA, 19 bp, Artificial sequence
  SiRNA target sequence
agaaaacatactataagaa

SEQ ID NO: 126499 - DNA, 19 bp, Artificial sequence
  SiRNA target sequence
gaaaacatactataagaat

SEQ ID NO: 126500 - DNA, 19 bp, Artificial sequence
  SiRNA target sequence
aaaacatactataagaata

SEQ ID NO: 126501 - DNA, 19 bp, Artificial sequence
  SiRNA target sequence
aaacatactataagaatag

SEQ ID NO: 126502 - DNA, 19 bp, Artificial sequence
  SiRNA target sequence
aacatactataagaataga

SEQ ID NO: 126503 - DNA, 19 bp, Artificial sequence
  SiRNA target sequence
acatactataagaatagat

SEQ ID NO: 126504 - DNA, 19 bp, Artificial sequence
  SiRNA target sequence
catactataagaatagata

SEQ ID NO: 126505 - DNA, 19 bp, Artificial sequence
  SiRNA target sequence
atactataagaatagataa

SEQ ID NO: 126506 - DNA, 19 bp, Artificial sequence
  SiRNA target sequence
tactataagaatagataaa

SEQ ID NO: 126507 - DNA, 19 bp, Artificial sequence
  SiRNA target sequence
actataagaatagataaag

SEQ ID NO: 126508 - DNA, 19 bp, Artificial sequence
  SiRNA target sequence
ctataagaatagataaaga

SEQ ID NO: 126509 - DNA, 19 bp, Artificial sequence
  SiRNA target sequence
tataagaatagataaagac

SEQ ID NO: 126510 - DNA, 19 bp, Artificial sequence
  SiRNA target sequence
ataagaatagataaagaca

SEQ ID NO: 126511 - DNA, 19 bp, Artificial sequence
  SiRNA target sequence
taagaatagataaagacaa

SEQ ID NO: 126512 - DNA, 19 bp, Artificial sequence
  SiRNA target sequence
aagaatagataaagacaat

SEQ ID NO: 126513 - DNA, 19 bp, Artificial sequence
  SiRNA target sequence
agaatagataaagacaata

SEQ ID NO: 126514 - DNA, 19 bp, Artificial sequence
  SiRNA target sequence
gaatagataaagacaatat

SEQ ID NO: 126515 - DNA, 19 bp, Artificial sequence
  SiRNA target sequence
aatagataaagacaatatg

SEQ ID NO: 126516 - DNA, 19 bp, Artificial sequence
  SiRNA target sequence
atagataaagacaatatgg

SEQ ID NO: 126517 - DNA, 19 bp, Artificial sequence
  SiRNA target sequence
tagataaagacaatatggt

SEQ ID NO: 126518 - DNA, 19 bp, Artificial sequence
  SiRNA target sequence
agataaagacaatatggta

SEQ ID NO: 126519 - DNA, 19 bp, Artificial sequence
  SiRNA target sequence
gataaagacaatatggtaa

SEQ ID NO: 126520 - DNA, 19 bp, Artificial sequence
  SiRNA target sequence
ataaagacaatatggtaac

SEQ ID NO: 126521 - DNA, 19 bp, Artificial sequence
  SiRNA target sequence
taaagacaatatggtaact

SEQ ID NO: 126522 - DNA, 19 bp, Artificial sequence
  SiRNA target sequence
aaagacaatatggtaactg

SEQ ID NO: 126523 - DNA, 19 bp, Artificial sequence
  SiRNA target sequence
aagacaatatggtaactgt

SEQ ID NO: 126524 - DNA, 19 bp, Artificial sequence
  SiRNA target sequence
agacaatatggtaactgta

SEQ ID NO: 126525 - DNA, 19 bp, Artificial sequence
  SiRNA target sequence
gacaatatggtaactgtaa

SEQ ID NO: 126526 - DNA, 19 bp, Artificial sequence
  SiRNA target sequence
acaatatggtaactgtaac

SEQ ID NO: 126527 - DNA, 19 bp, Artificial sequence
  SiRNA target sequence
caatatggtaactgtaaca

SEQ ID NO: 126528 - DNA, 19 bp, Artificial sequence
  SiRNA target sequence
aatatggtaactgtaacag

SEQ ID NO: 126529 - DNA, 19 bp, Artificial sequence
  SiRNA target sequence
atatggtaactgtaacagg

SEQ ID NO: 126530 - DNA, 19 bp, Artificial sequence
  SiRNA target sequence
tatggtaactgtaacaggt

SEQ ID NO: 126531 - DNA, 19 bp, Artificial sequence
  SiRNA target sequence
atggtaactgtaacaggtg

SEQ ID NO: 126532 - DNA, 19 bp, Artificial sequence
  SiRNA target sequence
tggtaactgtaacaggtgg

SEQ ID NO: 126533 - DNA, 19 bp, Artificial sequence
  SiRNA target sequence
ggtaactgtaacaggtggt

SEQ ID NO: 126534 - DNA, 19 bp, Artificial sequence
  SiRNA target sequence
gtaactgtaacaggtggta

SEQ ID NO: 126535 - DNA, 19 bp, Artificial sequence
  SiRNA target sequence
taactgtaacaggtggtaa

SEQ ID NO: 126536 - DNA, 19 bp, Artificial sequence
  SiRNA target sequence
aactgtaacaggtggtaag

SEQ ID NO: 126537 - DNA, 19 bp, Artificial sequence
  SiRNA target sequence
actgtaacaggtggtaagt

SEQ ID NO: 126538 - DNA, 19 bp, Artificial sequence
  SiRNA target sequence
ctgtaacaggtggtaagtg

SEQ ID NO: 126539 - DNA, 19 bp, Artificial sequence
  SiRNA target sequence
tgtaacaggtggtaagtgg

SEQ ID NO: 126540 - DNA, 19 bp, Artificial sequence
  SiRNA target sequence
gtaacaggtggtaagtgga

SEQ ID NO: 126541 - DNA, 19 bp, Artificial sequence
  SiRNA target sequence
taacaggtggtaagtggac

SEQ ID NO: 126542 - DNA, 19 bp, Artificial sequence
  SiRNA target sequence
aacaggtggtaagtggaca

SEQ ID NO: 126543 - DNA, 19 bp, Artificial sequence
  SiRNA target sequence
acaggtggtaagtggacaa

SEQ ID NO: 126544 - DNA, 19 bp, Artificial sequence
  SiRNA target sequence
caggtggtaagtggacaat

SEQ ID NO: 126545 - DNA, 19 bp, Artificial sequence
  SiRNA target sequence
aggtggtaagtggacaatt

SEQ ID NO: 126546 - DNA, 19 bp, Artificial sequence
  SiRNA target sequence
ggtggtaagtggacaattt

SEQ ID NO: 126547 - DNA, 19 bp, Artificial sequence
  SiRNA target sequence
gtggtaagtggacaatttt

SEQ ID NO: 126548 - DNA, 19 bp, Artificial sequence
  SiRNA target sequence
tggtaagtggacaattttt

SEQ ID NO: 126549 - DNA, 19 bp, Artificial sequence
  SiRNA target sequence
ggtaagtggacaatttttc

SEQ ID NO: 126550 - DNA, 19 bp, Artificial sequence
  SiRNA target sequence
gtaagtggacaatttttcg

SEQ ID NO: 126551 - DNA, 19 bp, Artificial sequence
  SiRNA target sequence
taagtggacaatttttcga

SEQ ID NO: 126552 - DNA, 19 bp, Artificial sequence
  SiRNA target sequence
aagtggacaatttttcgac

SEQ ID NO: 126553 - DNA, 19 bp, Artificial sequence
  SiRNA target sequence
agtggacaatttttcgact

SEQ ID NO: 126554 - DNA, 19 bp, Artificial sequence
  SiRNA target sequence
gtggacaatttttcgactt

SEQ ID NO: 126555 - DNA, 19 bp, Artificial sequence
  SiRNA target sequence
tggacaatttttcgactta

SEQ ID NO: 126556 - DNA, 19 bp, Artificial sequence
  SiRNA target sequence
ggacaatttttcgacttat

SEQ ID NO: 126557 - DNA, 19 bp, Artificial sequence
  SiRNA target sequence
gacaatttttcgacttatg

SEQ ID NO: 126558 - DNA, 19 bp, Artificial sequence
  SiRNA target sequence
acaatttttcgacttatgg

SEQ ID NO: 126559 - DNA, 19 bp, Artificial sequence
  SiRNA target sequence
caatttttcgacttatggg

SEQ ID NO: 126560 - DNA, 19 bp, Artificial sequence
  SiRNA target sequence
aatttttcgacttatggga

SEQ ID NO: 126561 - DNA, 19 bp, Artificial sequence
  SiRNA target sequence
atttttcgacttatgggag

SEQ ID NO: 126562 - DNA, 19 bp, Artificial sequence
  SiRNA target sequence
tttttcgacttatgggaga

SEQ ID NO: 126563 - DNA, 19 bp, Artificial sequence
  SiRNA target sequence
ttttcgacttatgggagaa

SEQ ID NO: 126564 - DNA, 19 bp, Artificial sequence
  SiRNA target sequence
tttcgacttatgggagaac

SEQ ID NO: 126565 - DNA, 19 bp, Artificial sequence
  SiRNA target sequence
ttcgacttatgggagaaca

SEQ ID NO: 126566 - DNA, 19 bp, Artificial sequence
  SiRNA target sequence
tcgacttatgggagaacag

SEQ ID NO: 126567 - DNA, 19 bp, Artificial sequence
  SiRNA target sequence
cgacttatgggagaacaga

SEQ ID NO: 126568 - DNA, 19 bp, Artificial sequence
  SiRNA target sequence
gacttatgggagaacagac

SEQ ID NO: 126569 - DNA, 19 bp, Artificial sequence
  SiRNA target sequence
acttatgggagaacagaca

SEQ ID NO: 126570 - DNA, 19 bp, Artificial sequence
  SiRNA target sequence
cttatgggagaacagacaa

SEQ ID NO: 126571 - DNA, 19 bp, Artificial sequence
  SiRNA target sequence
ttatgggagaacagacaat

SEQ ID NO: 126572 - DNA, 19 bp, Artificial sequence
  SiRNA target sequence
tatgggagaacagacaata

SEQ ID NO: 126573 - DNA, 19 bp, Artificial sequence
  SiRNA target sequence
atgggagaacagacaataa

SEQ ID NO: 126574 - DNA, 19 bp, Artificial sequence
  SiRNA target sequence
tgggagaacagacaataaa

SEQ ID NO: 126575 - DNA, 19 bp, Artificial sequence
  SiRNA target sequence
gggagaacagacaataaat

SEQ ID NO: 126576 - DNA, 19 bp, Artificial sequence
  SiRNA target sequence
ggagaacagacaataaatc

SEQ ID NO: 126577 - DNA, 19 bp, Artificial sequence
  SiRNA target sequence
gagaacagacaataaatca

SEQ ID NO: 126578 - DNA, 19 bp, Artificial sequence
  SiRNA target sequence
agaacagacaataaatcaa

SEQ ID NO: 126579 - DNA, 19 bp, Artificial sequence
  SiRNA target sequence
gaacagacaataaatcaaa

SEQ ID NO: 126580 - DNA, 19 bp, Artificial sequence
  SiRNA target sequence
aacagacaataaatcaaat

SEQ ID NO: 126581 - DNA, 19 bp, Artificial sequence
  SiRNA target sequence
acagacaataaatcaaatt

SEQ ID NO: 126582 - DNA, 19 bp, Artificial sequence
  SiRNA target sequence
cagacaataaatcaaatta

SEQ ID NO: 126583 - DNA, 19 bp, Artificial sequence
  SiRNA target sequence
agacaataaatcaaattat

SEQ ID NO: 126584 - DNA, 19 bp, Artificial sequence
  SiRNA target sequence
gacaataaatcaaattata

SEQ ID NO: 126585 - DNA, 19 bp, Artificial sequence
  SiRNA target sequence
acaataaatcaaattataa

SEQ ID NO: 126586 - DNA, 19 bp, Artificial sequence
  SiRNA target sequence
caataaatcaaattataaa

SEQ ID NO: 126587 - DNA, 19 bp, Artificial sequence
  SiRNA target sequence
aataaatcaaattataaaa

SEQ ID NO: 126588 - DNA, 19 bp, Artificial sequence
  SiRNA target sequence
ataaatcaaattataaaag

SEQ ID NO: 126589 - DNA, 19 bp, Artificial sequence
  SiRNA target sequence
taaatcaaattataaaagt

SEQ ID NO: 126590 - DNA, 19 bp, Artificial sequence
  SiRNA target sequence
aaatcaaattataaaagtt

SEQ ID NO: 126591 - DNA, 19 bp, Artificial sequence
  SiRNA target sequence
aatcaaattataaaagttt

SEQ ID NO: 126592 - DNA, 19 bp, Artificial sequence
  SiRNA target sequence
atcaaattataaaagtttt

SEQ ID NO: 126593 - DNA, 19 bp, Artificial sequence
  SiRNA target sequence
tcaaattataaaagttttt

SEQ ID NO: 126594 - DNA, 19 bp, Artificial sequence
  SiRNA target sequence
caaattataaaagttttta

SEQ ID NO: 126595 - DNA, 19 bp, Artificial sequence
  SiRNA target sequence
aaattataaaagtttttaa

SEQ ID NO: 126596 - DNA, 19 bp, Artificial sequence
  SiRNA target sequence
aattataaaagtttttaat

SEQ ID NO: 126597 - DNA, 19 bp, Artificial sequence
  SiRNA target sequence
attataaaagtttttaata

SEQ ID NO: 126598 - DNA, 19 bp, Artificial sequence
  SiRNA target sequence
ttataaaagtttttaatat

SEQ ID NO: 126599 - DNA, 19 bp, Artificial sequence
  SiRNA target sequence
tataaaagtttttaatata

SEQ ID NO: 126600 - DNA, 19 bp, Artificial sequence
  SiRNA target sequence
ataaaagtttttaatataa

SEQ ID NO: 126601 - DNA, 19 bp, Artificial sequence
  SiRNA target sequence
taaaagtttttaatataaa

SEQ ID NO: 126602 - DNA, 19 bp, Artificial sequence
  SiRNA target sequence
aaaagtttttaatataaag

SEQ ID NO: 126603 - DNA, 19 bp, Artificial sequence
  SiRNA target sequence
aaagtttttaatataaagt

SEQ ID NO: 126604 - DNA, 19 bp, Artificial sequence
  SiRNA target sequence
aagtttttaatataaagtc

SEQ ID NO: 126605 - DNA, 19 bp, Artificial sequence
  SiRNA target sequence
agtttttaatataaagtct

SEQ ID NO: 126606 - DNA, 19 bp, Artificial sequence
  SiRNA target sequence
gtttttaatataaagtcta

SEQ ID NO: 126607 - DNA, 19 bp, Artificial sequence
  SiRNA target sequence
tttttaatataaagtctaa

SEQ ID NO: 126608 - DNA, 19 bp, Artificial sequence
  SiRNA target sequence
ttttaatataaagtctaat

SEQ ID NO: 126609 - DNA, 19 bp, Artificial sequence
  SiRNA target sequence
tttaatataaagtctaata

SEQ ID NO: 126610 - DNA, 19 bp, Artificial sequence
  SiRNA target sequence
ttaatataaagtctaataa

SEQ ID NO: 126611 - DNA, 19 bp, Artificial sequence
  SiRNA target sequence
taatataaagtctaataaa

SEQ ID NO: 126612 - DNA, 19 bp, Artificial sequence
  SiRNA target sequence
aatataaagtctaataaac

SEQ ID NO: 126613 - DNA, 19 bp, Artificial sequence
  SiRNA target sequence
atataaagtctaataaacc

SEQ ID NO: 126614 - DNA, 19 bp, Artificial sequence
  SiRNA target sequence
tataaagtctaataaacca

SEQ ID NO: 126615 - DNA, 19 bp, Artificial sequence
  SiRNA target sequence
ataaagtctaataaaccaa

SEQ ID NO: 126616 - DNA, 19 bp, Artificial sequence
  SiRNA target sequence
taaagtctaataaaccaag

SEQ ID NO: 126617 - DNA, 19 bp, Artificial sequence
  SiRNA target sequence
aaagtctaataaaccaagt

SEQ ID NO: 126618 - DNA, 19 bp, Artificial sequence
  SiRNA target sequence
aagtctaataaaccaagta

SEQ ID NO: 126619 - DNA, 19 bp, Artificial sequence
  SiRNA target sequence
agtctaataaaccaagtat

SEQ ID NO: 126620 - DNA, 19 bp, Artificial sequence
  SiRNA target sequence
gtctaataaaccaagtata

SEQ ID NO: 126621 - DNA, 19 bp, Artificial sequence
  SiRNA target sequence
tctaataaaccaagtataa

SEQ ID NO: 126622 - DNA, 19 bp, Artificial sequence
  SiRNA target sequence
ctaataaaccaagtataac

SEQ ID NO: 126623 - DNA, 19 bp, Artificial sequence
  SiRNA target sequence
taataaaccaagtataaca

SEQ ID NO: 126624 - DNA, 19 bp, Artificial sequence
  SiRNA target sequence
aataaaccaagtataacac

SEQ ID NO: 126625 - DNA, 19 bp, Artificial sequence
  SiRNA target sequence
ataaaccaagtataacaca

SEQ ID NO: 126626 - DNA, 19 bp, Artificial sequence
  SiRNA target sequence
taaaccaagtataacacaa

SEQ ID NO: 126627 - DNA, 19 bp, Artificial sequence
  SiRNA target sequence
aaaccaagtataacacaat

SEQ ID NO: 126628 - DNA, 19 bp, Artificial sequence
  SiRNA target sequence
aaccaagtataacacaata

SEQ ID NO: 126629 - DNA, 19 bp, Artificial sequence
  SiRNA target sequence
accaagtataacacaatat

SEQ ID NO: 126630 - DNA, 19 bp, Artificial sequence
  SiRNA target sequence
ccaagtataacacaatatc

SEQ ID NO: 126631 - DNA, 19 bp, Artificial sequence
  SiRNA target sequence
caagtataacacaatatct

SEQ ID NO: 126632 - DNA, 19 bp, Artificial sequence
  SiRNA target sequence
aagtataacacaatatctt

SEQ ID NO: 126633 - DNA, 19 bp, Artificial sequence
  SiRNA target sequence
agtataacacaatatcttc

SEQ ID NO: 126634 - DNA, 19 bp, Artificial sequence
  SiRNA target sequence
gtataacacaatatcttcc

SEQ ID NO: 126635 - DNA, 19 bp, Artificial sequence
  SiRNA target sequence
tataacacaatatcttcct

SEQ ID NO: 126636 - DNA, 19 bp, Artificial sequence
  SiRNA target sequence
ataacacaatatcttcctg

SEQ ID NO: 126637 - DNA, 19 bp, Artificial sequence
  SiRNA target sequence
taacacaatatcttcctgt

SEQ ID NO: 126638 - DNA, 19 bp, Artificial sequence
  SiRNA target sequence
aacacaatatcttcctgtt

SEQ ID NO: 126639 - DNA, 19 bp, Artificial sequence
  SiRNA target sequence
acacaatatcttcctgttt

SEQ ID NO: 126640 - DNA, 19 bp, Artificial sequence
  SiRNA target sequence
cacaatatcttcctgtttt

SEQ ID NO: 126641 - DNA, 19 bp, Artificial sequence
  SiRNA target sequence
acaatatcttcctgttttg

SEQ ID NO: 126642 - DNA, 19 bp, Artificial sequence
  SiRNA target sequence
caatatcttcctgttttgg

SEQ ID NO: 126643 - DNA, 19 bp, Artificial sequence
  SiRNA target sequence
aatatcttcctgttttggg

SEQ ID NO: 126644 - DNA, 19 bp, Artificial sequence
  SiRNA target sequence
atatcttcctgttttggga

SEQ ID NO: 126645 - DNA, 19 bp, Artificial sequence
  SiRNA target sequence
tatcttcctgttttgggat

SEQ ID NO: 126646 - DNA, 19 bp, Artificial sequence
  SiRNA target sequence
atcttcctgttttgggatc

SEQ ID NO: 126647 - DNA, 19 bp, Artificial sequence
  SiRNA target sequence
tcttcctgttttgggatca

SEQ ID NO: 126648 - DNA, 19 bp, Artificial sequence
  SiRNA target sequence
cttcctgttttgggatcac

SEQ ID NO: 126649 - DNA, 19 bp, Artificial sequence
  SiRNA target sequence
ttcctgttttgggatcaca

SEQ ID NO: 126650 - DNA, 19 bp, Artificial sequence
  SiRNA target sequence
tcctgttttgggatcacag

SEQ ID NO: 126651 - DNA, 19 bp, Artificial sequence
  SiRNA target sequence
cctgttttgggatcacagg

SEQ ID NO: 126652 - DNA, 19 bp, Artificial sequence
  SiRNA target sequence
ctgttttgggatcacaggg

SEQ ID NO: 126653 - DNA, 19 bp, Artificial sequence
  SiRNA target sequence
tgttttgggatcacaggga

SEQ ID NO: 126654 - DNA, 19 bp, Artificial sequence
  SiRNA target sequence
gttttgggatcacagggat

SEQ ID NO: 126655 - DNA, 19 bp, Artificial sequence
  SiRNA target sequence
ttttgggatcacagggata

SEQ ID NO: 126656 - DNA, 19 bp, Artificial sequence
  SiRNA target sequence
tttgggatcacagggatat

SEQ ID NO: 126657 - DNA, 19 bp, Artificial sequence
  SiRNA target sequence
ttgggatcacagggatata

SEQ ID NO: 126658 - DNA, 19 bp, Artificial sequence
  SiRNA target sequence
tgggatcacagggatatac

SEQ ID NO: 126659 - DNA, 19 bp, Artificial sequence
  SiRNA target sequence
gggatcacagggatatact

SEQ ID NO: 126660 - DNA, 19 bp, Artificial sequence
  SiRNA target sequence
ggatcacagggatatacta

SEQ ID NO: 126661 - DNA, 19 bp, Artificial sequence
  SiRNA target sequence
gatcacagggatatactaa

SEQ ID NO: 126662 - DNA, 19 bp, Artificial sequence
  SiRNA target sequence
atcacagggatatactaaa

SEQ ID NO: 126663 - DNA, 19 bp, Artificial sequence
  SiRNA target sequence
tcacagggatatactaaag

SEQ ID NO: 126664 - DNA, 19 bp, Artificial sequence
  SiRNA target sequence
cacagggatatactaaagc

SEQ ID NO: 126665 - DNA, 19 bp, Artificial sequence
  SiRNA target sequence
acagggatatactaaagct

SEQ ID NO: 126666 - DNA, 19 bp, Artificial sequence
  SiRNA target sequence
cagggatatactaaagcta

SEQ ID NO: 126667 - DNA, 19 bp, Artificial sequence
  SiRNA target sequence
agggatatactaaagctac

SEQ ID NO: 126668 - DNA, 19 bp, Artificial sequence
  SiRNA target sequence
gggatatactaaagctaca

SEQ ID NO: 126669 - DNA, 19 bp, Artificial sequence
  SiRNA target sequence
ggatatactaaagctacag

SEQ ID NO: 126670 - DNA, 19 bp, Artificial sequence
  SiRNA target sequence
gatatactaaagctacaga

SEQ ID NO: 126671 - DNA, 19 bp, Artificial sequence
  SiRNA target sequence
atatactaaagctacagaa

SEQ ID NO: 126672 - DNA, 19 bp, Artificial sequence
  SiRNA target sequence
tatactaaagctacagaat

SEQ ID NO: 126673 - DNA, 19 bp, Artificial sequence
  SiRNA target sequence
atactaaagctacagaatt

SEQ ID NO: 126674 - DNA, 19 bp, Artificial sequence
  SiRNA target sequence
tactaaagctacagaattt

SEQ ID NO: 126675 - DNA, 19 bp, Artificial sequence
  SiRNA target sequence
actaaagctacagaatttg

SEQ ID NO: 126676 - DNA, 19 bp, Artificial sequence
  SiRNA target sequence
ctaaagctacagaatttga

SEQ ID NO: 126677 - DNA, 19 bp, Artificial sequence
  SiRNA target sequence
taaagctacagaatttgat

SEQ ID NO: 126678 - DNA, 19 bp, Artificial sequence
  SiRNA target sequence
aaagctacagaatttgatt

SEQ ID NO: 126679 - DNA, 19 bp, Artificial sequence
  SiRNA target sequence
aagctacagaatttgattt

SEQ ID NO: 126680 - DNA, 19 bp, Artificial sequence
  SiRNA target sequence
agctacagaatttgatttg

SEQ ID NO: 126681 - DNA, 19 bp, Artificial sequence
  SiRNA target sequence
gctacagaatttgatttgg

SEQ ID NO: 126682 - DNA, 19 bp, Artificial sequence
  SiRNA target sequence
ctacagaatttgatttggc

SEQ ID NO: 126683 - DNA, 19 bp, Artificial sequence
  SiRNA target sequence
tacagaatttgatttggca

SEQ ID NO: 126684 - DNA, 19 bp, Artificial sequence
  SiRNA target sequence
acagaatttgatttggcac

SEQ ID NO: 126685 - DNA, 19 bp, Artificial sequence
  SiRNA target sequence
cagaatttgatttggcact

SEQ ID NO: 126686 - DNA, 19 bp, Artificial sequence
  SiRNA target sequence
agaatttgatttggcactt

SEQ ID NO: 126687 - DNA, 19 bp, Artificial sequence
  SiRNA target sequence
gaatttgatttggcactta

SEQ ID NO: 126688 - DNA, 19 bp, Artificial sequence
  SiRNA target sequence
aatttgatttggcacttac

SEQ ID NO: 126689 - DNA, 19 bp, Artificial sequence
  SiRNA target sequence
atttgatttggcacttact

SEQ ID NO: 126690 - DNA, 19 bp, Artificial sequence
  SiRNA target sequence
tttgatttggcacttactt

SEQ ID NO: 126691 - DNA, 19 bp, Artificial sequence
  SiRNA target sequence
ttgatttggcacttacttt

SEQ ID NO: 126692 - DNA, 19 bp, Artificial sequence
  SiRNA target sequence
tgatttggcacttacttta

SEQ ID NO: 126693 - DNA, 19 bp, Artificial sequence
  SiRNA target sequence
gatttggcacttactttaa

SEQ ID NO: 126694 - DNA, 19 bp, Artificial sequence
  SiRNA target sequence
atttggcacttactttaaa

SEQ ID NO: 126695 - DNA, 19 bp, Artificial sequence
  SiRNA target sequence
tttggcacttactttaaat

SEQ ID NO: 126696 - DNA, 19 bp, Artificial sequence
  SiRNA target sequence
ttggcacttactttaaata

SEQ ID NO: 126697 - DNA, 19 bp, Artificial sequence
  SiRNA target sequence
tggcacttactttaaatat

SEQ ID NO: 126698 - DNA, 19 bp, Artificial sequence
  SiRNA target sequence
ggcacttactttaaatatt

SEQ ID NO: 126699 - DNA, 19 bp, Artificial sequence
  SiRNA target sequence
gcacttactttaaatattc

SEQ ID NO: 126700 - DNA, 19 bp, Artificial sequence
  SiRNA target sequence
cacttactttaaatattcc

SEQ ID NO: 126701 - DNA, 19 bp, Artificial sequence
  SiRNA target sequence
acttactttaaatattcca

SEQ ID NO: 126702 - DNA, 19 bp, Artificial sequence
  SiRNA target sequence
cttactttaaatattccag

SEQ ID NO: 126703 - DNA, 19 bp, Artificial sequence
  SiRNA target sequence
ttactttaaatattccaga

SEQ ID NO: 126704 - DNA, 19 bp, Artificial sequence
  SiRNA target sequence
tactttaaatattccagaa

SEQ ID NO: 126705 - DNA, 19 bp, Artificial sequence
  SiRNA target sequence
actttaaatattccagaag

SEQ ID NO: 126706 - DNA, 19 bp, Artificial sequence
  SiRNA target sequence
ctttaaatattccagaaga

SEQ ID NO: 126707 - DNA, 19 bp, Artificial sequence
  SiRNA target sequence
tttaaatattccagaagat

SEQ ID NO: 126708 - DNA, 19 bp, Artificial sequence
  SiRNA target sequence
ttaaatattccagaagata

SEQ ID NO: 126709 - DNA, 19 bp, Artificial sequence
  SiRNA target sequence
taaatattccagaagatat

SEQ ID NO: 126710 - DNA, 19 bp, Artificial sequence
  SiRNA target sequence
aaatattccagaagatata

SEQ ID NO: 126711 - DNA, 19 bp, Artificial sequence
  SiRNA target sequence
aatattccagaagatatag

SEQ ID NO: 126712 - DNA, 19 bp, Artificial sequence
  SiRNA target sequence
atattccagaagatatagc

SEQ ID NO: 126713 - DNA, 19 bp, Artificial sequence
  SiRNA target sequence
tattccagaagatatagct

SEQ ID NO: 126714 - DNA, 19 bp, Artificial sequence
  SiRNA target sequence
attccagaagatatagcta

SEQ ID NO: 126715 - DNA, 19 bp, Artificial sequence
  SiRNA target sequence
ttccagaagatatagctaa

SEQ ID NO: 126716 - DNA, 19 bp, Artificial sequence
  SiRNA target sequence
tccagaagatatagctaag

SEQ ID NO: 126717 - DNA, 19 bp, Artificial sequence
  SiRNA target sequence
ccagaagatatagctaagc

SEQ ID NO: 126718 - DNA, 19 bp, Artificial sequence
  SiRNA target sequence
cagaagatatagctaagca

SEQ ID NO: 126719 - DNA, 19 bp, Artificial sequence
  SiRNA target sequence
agaagatatagctaagcat

SEQ ID NO: 126720 - DNA, 19 bp, Artificial sequence
  SiRNA target sequence
gaagatatagctaagcatt

SEQ ID NO: 126721 - DNA, 19 bp, Artificial sequence
  SiRNA target sequence
aagatatagctaagcattt

SEQ ID NO: 126722 - DNA, 19 bp, Artificial sequence
  SiRNA target sequence
agatatagctaagcattta

SEQ ID NO: 126723 - DNA, 19 bp, Artificial sequence
  SiRNA target sequence
gatatagctaagcatttag

SEQ ID NO: 126724 - DNA, 19 bp, Artificial sequence
  SiRNA target sequence
atatagctaagcatttagc

SEQ ID NO: 126725 - DNA, 19 bp, Artificial sequence
  SiRNA target sequence
tatagctaagcatttagct

SEQ ID NO: 126726 - DNA, 19 bp, Artificial sequence
  SiRNA target sequence
atagctaagcatttagcta

SEQ ID NO: 126727 - DNA, 19 bp, Artificial sequence
  SiRNA target sequence
tagctaagcatttagctac

SEQ ID NO: 126728 - DNA, 19 bp, Artificial sequence
  SiRNA target sequence
agctaagcatttagctaca

SEQ ID NO: 126729 - DNA, 19 bp, Artificial sequence
  SiRNA target sequence
gctaagcatttagctacaa

SEQ ID NO: 126730 - DNA, 19 bp, Artificial sequence
  SiRNA target sequence
ctaagcatttagctacaac

SEQ ID NO: 126731 - DNA, 19 bp, Artificial sequence
  SiRNA target sequence
taagcatttagctacaact

SEQ ID NO: 126732 - DNA, 19 bp, Artificial sequence
  SiRNA target sequence
aagcatttagctacaactt

SEQ ID NO: 126733 - DNA, 19 bp, Artificial sequence
  SiRNA target sequence
agcatttagctacaactta

SEQ ID NO: 126734 - DNA, 19 bp, Artificial sequence
  SiRNA target sequence
gcatttagctacaacttat

SEQ ID NO: 126735 - DNA, 19 bp, Artificial sequence
  SiRNA target sequence
catttagctacaacttatg

SEQ ID NO: 126736 - DNA, 19 bp, Artificial sequence
  SiRNA target sequence
atttagctacaacttatgg

SEQ ID NO: 126737 - DNA, 19 bp, Artificial sequence
  SiRNA target sequence
tttagctacaacttatggt

SEQ ID NO: 126738 - DNA, 19 bp, Artificial sequence
  SiRNA target sequence
ttagctacaacttatggta

SEQ ID NO: 126739 - DNA, 19 bp, Artificial sequence
  SiRNA target sequence
tagctacaacttatggtac

SEQ ID NO: 126740 - DNA, 19 bp, Artificial sequence
  SiRNA target sequence
agctacaacttatggtacc

SEQ ID NO: 126741 - DNA, 19 bp, Artificial sequence
  SiRNA target sequence
gctacaacttatggtacca

SEQ ID NO: 126742 - DNA, 19 bp, Artificial sequence
  SiRNA target sequence
ctacaacttatggtaccaa

SEQ ID NO: 126743 - DNA, 19 bp, Artificial sequence
  SiRNA target sequence
tacaacttatggtaccaaa

SEQ ID NO: 126744 - DNA, 19 bp, Artificial sequence
  SiRNA target sequence
acaacttatggtaccaaag

SEQ ID NO: 126745 - DNA, 19 bp, Artificial sequence
  SiRNA target sequence
caacttatggtaccaaagc

SEQ ID NO: 126746 - DNA, 19 bp, Artificial sequence
  SiRNA target sequence
aacttatggtaccaaagct

SEQ ID NO: 126747 - DNA, 19 bp, Artificial sequence
  SiRNA target sequence
acttatggtaccaaagctt

SEQ ID NO: 126748 - DNA, 19 bp, Artificial sequence
  SiRNA target sequence
cttatggtaccaaagctta

SEQ ID NO: 126749 - DNA, 19 bp, Artificial sequence
  SiRNA target sequence
ttatggtaccaaagcttac

SEQ ID NO: 126750 - DNA, 19 bp, Artificial sequence
  SiRNA target sequence
tatggtaccaaagcttaca

SEQ ID NO: 126751 - DNA, 19 bp, Artificial sequence
  SiRNA target sequence
atggtaccaaagcttacaa

SEQ ID NO: 126752 - DNA, 19 bp, Artificial sequence
  SiRNA target sequence
tggtaccaaagcttacaat

SEQ ID NO: 126753 - DNA, 19 bp, Artificial sequence
  SiRNA target sequence
ggtaccaaagcttacaatt

SEQ ID NO: 126754 - DNA, 19 bp, Artificial sequence
  SiRNA target sequence
gtaccaaagcttacaattt

SEQ ID NO: 126755 - DNA, 19 bp, Artificial sequence
  SiRNA target sequence
taccaaagcttacaatttc

SEQ ID NO: 126756 - DNA, 19 bp, Artificial sequence
  SiRNA target sequence
accaaagcttacaatttct

SEQ ID NO: 126757 - DNA, 19 bp, Artificial sequence
  SiRNA target sequence
ccaaagcttacaatttctc

SEQ ID NO: 126758 - DNA, 19 bp, Artificial sequence
  SiRNA target sequence
caaagcttacaatttctct

SEQ ID NO: 126759 - DNA, 19 bp, Artificial sequence
  SiRNA target sequence
aaagcttacaatttctctg

SEQ ID NO: 126760 - DNA, 19 bp, Artificial sequence
  SiRNA target sequence
aagcttacaatttctctga

SEQ ID NO: 126761 - DNA, 19 bp, Artificial sequence
  SiRNA target sequence
agcttacaatttctctgaa

SEQ ID NO: 126762 - DNA, 19 bp, Artificial sequence
  SiRNA target sequence
gcttacaatttctctgaat

SEQ ID NO: 126763 - DNA, 19 bp, Artificial sequence
  SiRNA target sequence
cttacaatttctctgaata

SEQ ID NO: 126764 - DNA, 19 bp, Artificial sequence
  SiRNA target sequence
ttacaatttctctgaatac

SEQ ID NO: 126765 - DNA, 19 bp, Artificial sequence
  SiRNA target sequence
tacaatttctctgaatact

SEQ ID NO: 126766 - DNA, 19 bp, Artificial sequence
  SiRNA target sequence
acaatttctctgaatactt

SEQ ID NO: 126767 - DNA, 19 bp, Artificial sequence
  SiRNA target sequence
caatttctctgaatacttt

SEQ ID NO: 126768 - DNA, 19 bp, Artificial sequence
  SiRNA target sequence
aatttctctgaatacttta

SEQ ID NO: 126769 - DNA, 19 bp, Artificial sequence
  SiRNA target sequence
atttctctgaatactttaa

SEQ ID NO: 126770 - DNA, 19 bp, Artificial sequence
  SiRNA target sequence
tttctctgaatactttaat

SEQ ID NO: 126771 - DNA, 19 bp, Artificial sequence
  SiRNA target sequence
ttctctgaatactttaatg

SEQ ID NO: 126772 - DNA, 19 bp, Artificial sequence
  SiRNA target sequence
tctctgaatactttaatgg

SEQ ID NO: 126773 - DNA, 19 bp, Artificial sequence
  SiRNA target sequence
ctctgaatactttaatggg

SEQ ID NO: 126774 - DNA, 19 bp, Artificial sequence
  SiRNA target sequence
tctgaatactttaatgggt

SEQ ID NO: 126775 - DNA, 19 bp, Artificial sequence
  SiRNA target sequence
ctgaatactttaatgggtc

SEQ ID NO: 126776 - DNA, 19 bp, Artificial sequence
  SiRNA target sequence
tgaatactttaatgggtca

SEQ ID NO: 126777 - DNA, 19 bp, Artificial sequence
  SiRNA target sequence
gaatactttaatgggtcat

SEQ ID NO: 126778 - DNA, 19 bp, Artificial sequence
  SiRNA target sequence
aatactttaatgggtcata

SEQ ID NO: 126779 - DNA, 19 bp, Artificial sequence
  SiRNA target sequence
atactttaatgggtcatac

SEQ ID NO: 126780 - DNA, 19 bp, Artificial sequence
  SiRNA target sequence
tactttaatgggtcataca

SEQ ID NO: 126781 - DNA, 19 bp, Artificial sequence
  SiRNA target sequence
actttaatgggtcatacac

SEQ ID NO: 126782 - DNA, 19 bp, Artificial sequence
  SiRNA target sequence
ctttaatgggtcatacacc

SEQ ID NO: 126783 - DNA, 19 bp, Artificial sequence
  SiRNA target sequence
tttaatgggtcatacacca

SEQ ID NO: 126784 - DNA, 19 bp, Artificial sequence
  SiRNA target sequence
ttaatgggtcatacaccag

SEQ ID NO: 126785 - DNA, 19 bp, Artificial sequence
  SiRNA target sequence
taatgggtcatacaccaga

SEQ ID NO: 126786 - DNA, 19 bp, Artificial sequence
  SiRNA target sequence
aatgggtcatacaccagac

SEQ ID NO: 126787 - DNA, 19 bp, Artificial sequence
  SiRNA target sequence
atgggtcatacaccagact

SEQ ID NO: 126788 - DNA, 19 bp, Artificial sequence
  SiRNA target sequence
tgggtcatacaccagactt

SEQ ID NO: 126789 - DNA, 19 bp, Artificial sequence
  SiRNA target sequence
gggtcatacaccagactta

SEQ ID NO: 126790 - DNA, 19 bp, Artificial sequence
  SiRNA target sequence
ggtcatacaccagacttac

SEQ ID NO: 126791 - DNA, 19 bp, Artificial sequence
  SiRNA target sequence
gtcatacaccagacttaca

SEQ ID NO: 126792 - DNA, 19 bp, Artificial sequence
  SiRNA target sequence
tcatacaccagacttacag

SEQ ID NO: 126793 - DNA, 19 bp, Artificial sequence
  SiRNA target sequence
catacaccagacttacaga

SEQ ID NO: 126794 - DNA, 19 bp, Artificial sequence
  SiRNA target sequence
atacaccagacttacagat

SEQ ID NO: 126795 - DNA, 19 bp, Artificial sequence
  SiRNA target sequence
tacaccagacttacagatg

SEQ ID NO: 126796 - DNA, 19 bp, Artificial sequence
  SiRNA target sequence
acaccagacttacagatgg

SEQ ID NO: 126797 - DNA, 19 bp, Artificial sequence
  SiRNA target sequence
caccagacttacagatggt

SEQ ID NO: 126798 - DNA, 19 bp, Artificial sequence
  SiRNA target sequence
accagacttacagatggtt

SEQ ID NO: 126799 - DNA, 19 bp, Artificial sequence
  SiRNA target sequence
ccagacttacagatggtta

SEQ ID NO: 126800 - DNA, 19 bp, Artificial sequence
  SiRNA target sequence
cagacttacagatggttat

SEQ ID NO: 126801 - DNA, 19 bp, Artificial sequence
  SiRNA target sequence
agacttacagatggttatc

SEQ ID NO: 126802 - DNA, 19 bp, Artificial sequence
  SiRNA target sequence
gacttacagatggttatcc

SEQ ID NO: 126803 - DNA, 19 bp, Artificial sequence
  SiRNA target sequence
acttacagatggttatcct

SEQ ID NO: 126804 - DNA, 19 bp, Artificial sequence
  SiRNA target sequence
cttacagatggttatcctt

SEQ ID NO: 126805 - DNA, 19 bp, Artificial sequence
  SiRNA target sequence
ttacagatggttatcctta

SEQ ID NO: 126806 - DNA, 19 bp, Artificial sequence
  SiRNA target sequence
tacagatggttatccttat

SEQ ID NO: 126807 - DNA, 19 bp, Artificial sequence
  SiRNA target sequence
acagatggttatccttata

SEQ ID NO: 126808 - DNA, 19 bp, Artificial sequence
  SiRNA target sequence
cagatggttatccttatac

SEQ ID NO: 126809 - DNA, 19 bp, Artificial sequence
  SiRNA target sequence
agatggttatccttataca

SEQ ID NO: 126810 - DNA, 19 bp, Artificial sequence
  SiRNA target sequence
gatggttatccttatacaa

SEQ ID NO: 126811 - DNA, 19 bp, Artificial sequence
  SiRNA target sequence
atggttatccttatacaaa

SEQ ID NO: 126812 - DNA, 19 bp, Artificial sequence
  SiRNA target sequence
tggttatccttatacaaaa

SEQ ID NO: 126813 - DNA, 19 bp, Artificial sequence
  SiRNA target sequence
ggttatccttatacaaaag

SEQ ID NO: 126814 - DNA, 19 bp, Artificial sequence
  SiRNA target sequence
gttatccttatacaaaaga

SEQ ID NO: 126815 - DNA, 19 bp, Artificial sequence
  SiRNA target sequence
ttatccttatacaaaagaa

SEQ ID NO: 126816 - DNA, 19 bp, Artificial sequence
  SiRNA target sequence
tatccttatacaaaagaag

SEQ ID NO: 126817 - DNA, 19 bp, Artificial sequence
  SiRNA target sequence
atccttatacaaaagaaga

SEQ ID NO: 126818 - DNA, 19 bp, Artificial sequence
  SiRNA target sequence
tccttatacaaaagaagaa

SEQ ID NO: 126819 - DNA, 19 bp, Artificial sequence
  SiRNA target sequence
ccttatacaaaagaagaaa

SEQ ID NO: 126820 - DNA, 19 bp, Artificial sequence
  SiRNA target sequence
cttatacaaaagaagaaat

SEQ ID NO: 126821 - DNA, 19 bp, Artificial sequence
  SiRNA target sequence
ttatacaaaagaagaaata

SEQ ID NO: 126822 - DNA, 19 bp, Artificial sequence
  SiRNA target sequence
tatacaaaagaagaaatag

SEQ ID NO: 126823 - DNA, 19 bp, Artificial sequence
  SiRNA target sequence
atacaaaagaagaaatagt

SEQ ID NO: 126824 - DNA, 19 bp, Artificial sequence
  SiRNA target sequence
tacaaaagaagaaatagta

SEQ ID NO: 126825 - DNA, 19 bp, Artificial sequence
  SiRNA target sequence
acaaaagaagaaatagtat

SEQ ID NO: 126826 - DNA, 19 bp, Artificial sequence
  SiRNA target sequence
caaaagaagaaatagtata

SEQ ID NO: 126827 - DNA, 19 bp, Artificial sequence
  SiRNA target sequence
aaaagaagaaatagtatat

SEQ ID NO: 126828 - DNA, 19 bp, Artificial sequence
  SiRNA target sequence
aaagaagaaatagtatatt

SEQ ID NO: 126829 - DNA, 19 bp, Artificial sequence
  SiRNA target sequence
aagaagaaatagtatattg

SEQ ID NO: 126830 - DNA, 19 bp, Artificial sequence
  SiRNA target sequence
agaagaaatagtatattgt

SEQ ID NO: 126831 - DNA, 19 bp, Artificial sequence
  SiRNA target sequence
gaagaaatagtatattgta

SEQ ID NO: 126832 - DNA, 19 bp, Artificial sequence
  SiRNA target sequence
aagaaatagtatattgtat

SEQ ID NO: 126833 - DNA, 19 bp, Artificial sequence
  SiRNA target sequence
agaaatagtatattgtatc

SEQ ID NO: 126834 - DNA, 19 bp, Artificial sequence
  SiRNA target sequence
gaaatagtatattgtatcg

SEQ ID NO: 126835 - DNA, 19 bp, Artificial sequence
  SiRNA target sequence
aaatagtatattgtatcga

SEQ ID NO: 126836 - DNA, 19 bp, Artificial sequence
  SiRNA target sequence
aatagtatattgtatcgaa

SEQ ID NO: 126837 - DNA, 19 bp, Artificial sequence
  SiRNA target sequence
atagtatattgtatcgaac

SEQ ID NO: 126838 - DNA, 19 bp, Artificial sequence
  SiRNA target sequence
tagtatattgtatcgaaca

SEQ ID NO: 126839 - DNA, 19 bp, Artificial sequence
  SiRNA target sequence
agtatattgtatcgaacat

SEQ ID NO: 126840 - DNA, 19 bp, Artificial sequence
  SiRNA target sequence
gtatattgtatcgaacatg

SEQ ID NO: 126841 - DNA, 19 bp, Artificial sequence
  SiRNA target sequence
tatattgtatcgaacatga

SEQ ID NO: 126842 - DNA, 19 bp, Artificial sequence
  SiRNA target sequence
atattgtatcgaacatgaa

SEQ ID NO: 126843 - DNA, 19 bp, Artificial sequence
  SiRNA target sequence
tattgtatcgaacatgaat

SEQ ID NO: 126844 - DNA, 19 bp, Artificial sequence
  SiRNA target sequence
attgtatcgaacatgaatt

SEQ ID NO: 126845 - DNA, 19 bp, Artificial sequence
  SiRNA target sequence
ttgtatcgaacatgaattg

SEQ ID NO: 126846 - DNA, 19 bp, Artificial sequence
  SiRNA target sequence
tgtatcgaacatgaattgg

SEQ ID NO: 126847 - DNA, 19 bp, Artificial sequence
  SiRNA target sequence
gtatcgaacatgaattggc

SEQ ID NO: 126848 - DNA, 19 bp, Artificial sequence
  SiRNA target sequence
tatcgaacatgaattggct

SEQ ID NO: 126849 - DNA, 19 bp, Artificial sequence
  SiRNA target sequence
atcgaacatgaattggctt

SEQ ID NO: 126850 - DNA, 19 bp, Artificial sequence
  SiRNA target sequence
tcgaacatgaattggctta

SEQ ID NO: 126851 - DNA, 19 bp, Artificial sequence
  SiRNA target sequence
cgaacatgaattggcttat

SEQ ID NO: 126852 - DNA, 19 bp, Artificial sequence
  SiRNA target sequence
gaacatgaattggcttatc

SEQ ID NO: 126853 - DNA, 19 bp, Artificial sequence
  SiRNA target sequence
aacatgaattggcttatcg

SEQ ID NO: 126854 - DNA, 19 bp, Artificial sequence
  SiRNA target sequence
acatgaattggcttatcgc

SEQ ID NO: 126855 - DNA, 19 bp, Artificial sequence
  SiRNA target sequence
catgaattggcttatcgca

SEQ ID NO: 126856 - DNA, 19 bp, Artificial sequence
  SiRNA target sequence
atgaattggcttatcgcat

SEQ ID NO: 126857 - DNA, 19 bp, Artificial sequence
  SiRNA target sequence
tgaattggcttatcgcatc

SEQ ID NO: 126858 - DNA, 19 bp, Artificial sequence
  SiRNA target sequence
gaattggcttatcgcatca

SEQ ID NO: 126859 - DNA, 19 bp, Artificial sequence
  SiRNA target sequence
aattggcttatcgcatcag

SEQ ID NO: 126860 - DNA, 19 bp, Artificial sequence
  SiRNA target sequence
attggcttatcgcatcagt

SEQ ID NO: 126861 - DNA, 19 bp, Artificial sequence
  SiRNA target sequence
ttggcttatcgcatcagtg

SEQ ID NO: 126862 - DNA, 19 bp, Artificial sequence
  SiRNA target sequence
tggcttatcgcatcagtga

SEQ ID NO: 126863 - DNA, 19 bp, Artificial sequence
  SiRNA target sequence
ggcttatcgcatcagtgat

SEQ ID NO: 126864 - DNA, 19 bp, Artificial sequence
  SiRNA target sequence
gcttatcgcatcagtgata

SEQ ID NO: 126865 - DNA, 19 bp, Artificial sequence
  SiRNA target sequence
cttatcgcatcagtgatat

SEQ ID NO: 126866 - DNA, 19 bp, Artificial sequence
  SiRNA target sequence
ttatcgcatcagtgatata

SEQ ID NO: 126867 - DNA, 19 bp, Artificial sequence
  SiRNA target sequence
tatcgcatcagtgatatat

SEQ ID NO: 126868 - DNA, 19 bp, Artificial sequence
  SiRNA target sequence
atcgcatcagtgatatatt

SEQ ID NO: 126869 - DNA, 19 bp, Artificial sequence
  SiRNA target sequence
tcgcatcagtgatatatta

SEQ ID NO: 126870 - DNA, 19 bp, Artificial sequence
  SiRNA target sequence
cgcatcagtgatatattat

SEQ ID NO: 126871 - DNA, 19 bp, Artificial sequence
  SiRNA target sequence
gcatcagtgatatattatt

SEQ ID NO: 126872 - DNA, 19 bp, Artificial sequence
  SiRNA target sequence
catcagtgatatattattt

SEQ ID NO: 126873 - DNA, 19 bp, Artificial sequence
  SiRNA target sequence
atcagtgatatattattta

SEQ ID NO: 126874 - DNA, 19 bp, Artificial sequence
  SiRNA target sequence
tcagtgatatattatttaa

SEQ ID NO: 126875 - DNA, 19 bp, Artificial sequence
  SiRNA target sequence
cagtgatatattatttaat

SEQ ID NO: 126876 - DNA, 19 bp, Artificial sequence
  SiRNA target sequence
agtgatatattatttaata

SEQ ID NO: 126877 - DNA, 19 bp, Artificial sequence
  SiRNA target sequence
gtgatatattatttaatag

SEQ ID NO: 126878 - DNA, 19 bp, Artificial sequence
  SiRNA target sequence
tgatatattatttaatagg

SEQ ID NO: 126879 - DNA, 19 bp, Artificial sequence
  SiRNA target sequence
gatatattatttaatagga

SEQ ID NO: 126880 - DNA, 19 bp, Artificial sequence
  SiRNA target sequence
atatattatttaataggat

SEQ ID NO: 126881 - DNA, 19 bp, Artificial sequence
  SiRNA target sequence
tatattatttaataggatg

SEQ ID NO: 126882 - DNA, 19 bp, Artificial sequence
  SiRNA target sequence
atattatttaataggatga

SEQ ID NO: 126883 - DNA, 19 bp, Artificial sequence
  SiRNA target sequence
tattatttaataggatgat

SEQ ID NO: 126884 - DNA, 19 bp, Artificial sequence
  SiRNA target sequence
attatttaataggatgatg

SEQ ID NO: 126885 - DNA, 19 bp, Artificial sequence
  SiRNA target sequence
ttatttaataggatgatga

SEQ ID NO: 126886 - DNA, 19 bp, Artificial sequence
  SiRNA target sequence
tatttaataggatgatgat

SEQ ID NO: 126887 - DNA, 19 bp, Artificial sequence
  SiRNA target sequence
atttaataggatgatgata

SEQ ID NO: 126888 - DNA, 19 bp, Artificial sequence
  SiRNA target sequence
tttaataggatgatgatag

SEQ ID NO: 126889 - DNA, 19 bp, Artificial sequence
  SiRNA target sequence
ttaataggatgatgatagg

SEQ ID NO: 126890 - DNA, 19 bp, Artificial sequence
  SiRNA target sequence
taataggatgatgatagga

SEQ ID NO: 126891 - DNA, 19 bp, Artificial sequence
  SiRNA target sequence
aataggatgatgataggat

SEQ ID NO: 126892 - DNA, 19 bp, Artificial sequence
  SiRNA target sequence
ataggatgatgataggata

SEQ ID NO: 126893 - DNA, 19 bp, Artificial sequence
  SiRNA target sequence
taggatgatgataggatac

SEQ ID NO: 126894 - DNA, 19 bp, Artificial sequence
  SiRNA target sequence
aggatgatgataggataca

SEQ ID NO: 126895 - DNA, 19 bp, Artificial sequence
  SiRNA target sequence
ggatgatgataggatacat

SEQ ID NO: 126896 - DNA, 19 bp, Artificial sequence
  SiRNA target sequence
gatgatgataggatacatt

SEQ ID NO: 126897 - DNA, 19 bp, Artificial sequence
  SiRNA target sequence
atgatgataggatacattg

SEQ ID NO: 126898 - DNA, 19 bp, Artificial sequence
  SiRNA target sequence
tgatgataggatacattga

SEQ ID NO: 126899 - DNA, 19 bp, Artificial sequence
  SiRNA target sequence
gatgataggatacattgac

SEQ ID NO: 126900 - DNA, 19 bp, Artificial sequence
  SiRNA target sequence
atgataggatacattgacg

SEQ ID NO: 126901 - DNA, 19 bp, Artificial sequence
  SiRNA target sequence
tgataggatacattgacgt

SEQ ID NO: 126902 - DNA, 19 bp, Artificial sequence
  SiRNA target sequence
gataggatacattgacgtc

SEQ ID NO: 126903 - DNA, 19 bp, Artificial sequence
  SiRNA target sequence
ataggatacattgacgtca

SEQ ID NO: 126904 - DNA, 19 bp, Artificial sequence
  SiRNA target sequence
taggatacattgacgtcag

SEQ ID NO: 126905 - DNA, 19 bp, Artificial sequence
  SiRNA target sequence
aggatacattgacgtcaga

SEQ ID NO: 126906 - DNA, 19 bp, Artificial sequence
  SiRNA target sequence
ggatacattgacgtcagaa

SEQ ID NO: 126907 - DNA, 19 bp, Artificial sequence
  SiRNA target sequence
gatacattgacgtcagaag

SEQ ID NO: 126908 - DNA, 19 bp, Artificial sequence
  SiRNA target sequence
atacattgacgtcagaaga

SEQ ID NO: 126909 - DNA, 19 bp, Artificial sequence
  SiRNA target sequence
tacattgacgtcagaagag

SEQ ID NO: 126910 - DNA, 19 bp, Artificial sequence
  SiRNA target sequence
acattgacgtcagaagagc

SEQ ID NO: 126911 - DNA, 19 bp, Artificial sequence
  SiRNA target sequence
cattgacgtcagaagagca

SEQ ID NO: 126912 - DNA, 19 bp, Artificial sequence
  SiRNA target sequence
attgacgtcagaagagcat

SEQ ID NO: 126913 - DNA, 19 bp, Artificial sequence
  SiRNA target sequence
ttgacgtcagaagagcatt

SEQ ID NO: 126914 - DNA, 19 bp, Artificial sequence
  SiRNA target sequence
tgacgtcagaagagcattt

SEQ ID NO: 126915 - DNA, 19 bp, Artificial sequence
  SiRNA target sequence
gacgtcagaagagcatttg

SEQ ID NO: 126916 - DNA, 19 bp, Artificial sequence
  SiRNA target sequence
acgtcagaagagcatttga

SEQ ID NO: 126917 - DNA, 19 bp, Artificial sequence
  SiRNA target sequence
cgtcagaagagcatttgat

SEQ ID NO: 126918 - DNA, 19 bp, Artificial sequence
  SiRNA target sequence
gtcagaagagcatttgatt

SEQ ID NO: 126919 - DNA, 19 bp, Artificial sequence
  SiRNA target sequence
tcagaagagcatttgattt

SEQ ID NO: 126920 - DNA, 19 bp, Artificial sequence
  SiRNA target sequence
cagaagagcatttgattta

SEQ ID NO: 126921 - DNA, 19 bp, Artificial sequence
  SiRNA target sequence
agaagagcatttgatttaa

SEQ ID NO: 126922 - DNA, 19 bp, Artificial sequence
  SiRNA target sequence
gaagagcatttgatttaat

SEQ ID NO: 126923 - DNA, 19 bp, Artificial sequence
  SiRNA target sequence
aagagcatttgatttaatt

SEQ ID NO: 126924 - DNA, 19 bp, Artificial sequence
  SiRNA target sequence
agagcatttgatttaattg

SEQ ID NO: 126925 - DNA, 19 bp, Artificial sequence
  SiRNA target sequence
gagcatttgatttaattgg

SEQ ID NO: 126926 - DNA, 19 bp, Artificial sequence
  SiRNA target sequence
agcatttgatttaattggt

SEQ ID NO: 126927 - DNA, 19 bp, Artificial sequence
  SiRNA target sequence
gcatttgatttaattggta

SEQ ID NO: 126928 - DNA, 19 bp, Artificial sequence
  SiRNA target sequence
catttgatttaattggtat

SEQ ID NO: 126929 - DNA, 19 bp, Artificial sequence
  SiRNA target sequence
atttgatttaattggtata

SEQ ID NO: 126930 - DNA, 19 bp, Artificial sequence
  SiRNA target sequence
tttgatttaattggtatag

SEQ ID NO: 126931 - DNA, 19 bp, Artificial sequence
  SiRNA target sequence
ttgatttaattggtatagt

SEQ ID NO: 126932 - DNA, 19 bp, Artificial sequence
  SiRNA target sequence
tgatttaattggtatagta

SEQ ID NO: 126933 - DNA, 19 bp, Artificial sequence
  SiRNA target sequence
gatttaattggtatagtag

SEQ ID NO: 126934 - DNA, 19 bp, Artificial sequence
  SiRNA target sequence
atttaattggtatagtagc

SEQ ID NO: 126935 - DNA, 19 bp, Artificial sequence
  SiRNA target sequence
tttaattggtatagtagct

SEQ ID NO: 126936 - DNA, 19 bp, Artificial sequence
  SiRNA target sequence
ttaattggtatagtagctg

SEQ ID NO: 126937 - DNA, 19 bp, Artificial sequence
  SiRNA target sequence
taattggtatagtagctga

SEQ ID NO: 126938 - DNA, 19 bp, Artificial sequence
  SiRNA target sequence
aattggtatagtagctgaa

SEQ ID NO: 126939 - DNA, 19 bp, Artificial sequence
  SiRNA target sequence
attggtatagtagctgaag

SEQ ID NO: 126940 - DNA, 19 bp, Artificial sequence
  SiRNA target sequence
ttggtatagtagctgaagt

SEQ ID NO: 126941 - DNA, 19 bp, Artificial sequence
  SiRNA target sequence
tggtatagtagctgaagta

SEQ ID NO: 126942 - DNA, 19 bp, Artificial sequence
  SiRNA target sequence
ggtatagtagctgaagtaa

SEQ ID NO: 126943 - DNA, 19 bp, Artificial sequence
  SiRNA target sequence
gtatagtagctgaagtaat

SEQ ID NO: 126944 - DNA, 19 bp, Artificial sequence
  SiRNA target sequence
tatagtagctgaagtaatg

SEQ ID NO: 126945 - DNA, 19 bp, Artificial sequence
  SiRNA target sequence
atagtagctgaagtaatga

SEQ ID NO: 126946 - DNA, 19 bp, Artificial sequence
  SiRNA target sequence
tagtagctgaagtaatgaa

SEQ ID NO: 126947 - DNA, 19 bp, Artificial sequence
  SiRNA target sequence
agtagctgaagtaatgaaa

SEQ ID NO: 126948 - DNA, 19 bp, Artificial sequence
  SiRNA target sequence
gtagctgaagtaatgaaag

SEQ ID NO: 126949 - DNA, 19 bp, Artificial sequence
  SiRNA target sequence
tagctgaagtaatgaaaga

SEQ ID NO: 126950 - DNA, 19 bp, Artificial sequence
  SiRNA target sequence
agctgaagtaatgaaagac

SEQ ID NO: 126951 - DNA, 19 bp, Artificial sequence
  SiRNA target sequence
gctgaagtaatgaaagact

SEQ ID NO: 126952 - DNA, 19 bp, Artificial sequence
  SiRNA target sequence
ctgaagtaatgaaagacta

SEQ ID NO: 126953 - DNA, 19 bp, Artificial sequence
  SiRNA target sequence
tgaagtaatgaaagactat

SEQ ID NO: 126954 - DNA, 19 bp, Artificial sequence
  SiRNA target sequence
gaagtaatgaaagactatt

SEQ ID NO: 126955 - DNA, 19 bp, Artificial sequence
  SiRNA target sequence
aagtaatgaaagactatta

SEQ ID NO: 126956 - DNA, 19 bp, Artificial sequence
  SiRNA target sequence
agtaatgaaagactattac

SEQ ID NO: 126957 - DNA, 19 bp, Artificial sequence
  SiRNA target sequence
gtaatgaaagactattacg

SEQ ID NO: 126958 - DNA, 19 bp, Artificial sequence
  SiRNA target sequence
taatgaaagactattacgg

SEQ ID NO: 126959 - DNA, 19 bp, Artificial sequence
  SiRNA target sequence
aatgaaagactattacgga

SEQ ID NO: 126960 - DNA, 19 bp, Artificial sequence
  SiRNA target sequence
atgaaagactattacggat

SEQ ID NO: 126961 - DNA, 19 bp, Artificial sequence
  SiRNA target sequence
tgaaagactattacggatg

SEQ ID NO: 126962 - DNA, 19 bp, Artificial sequence
  SiRNA target sequence
gaaagactattacggatgg

SEQ ID NO: 126963 - DNA, 19 bp, Artificial sequence
  SiRNA target sequence
aaagactattacggatggg

SEQ ID NO: 126964 - DNA, 19 bp, Artificial sequence
  SiRNA target sequence
aagactattacggatggga

SEQ ID NO: 126965 - DNA, 19 bp, Artificial sequence
  SiRNA target sequence
agactattacggatgggat

SEQ ID NO: 126966 - DNA, 19 bp, Artificial sequence
  SiRNA target sequence
gactattacggatgggatc

SEQ ID NO: 126967 - DNA, 19 bp, Artificial sequence
  SiRNA target sequence
actattacggatgggatca

SEQ ID NO: 126968 - DNA, 19 bp, Artificial sequence
  SiRNA target sequence
ctattacggatgggatcag

SEQ ID NO: 126969 - DNA, 19 bp, Artificial sequence
  SiRNA target sequence
tattacggatgggatcagc

SEQ ID NO: 126970 - DNA, 19 bp, Artificial sequence
  SiRNA target sequence
attacggatgggatcagca

SEQ ID NO: 126971 - DNA, 19 bp, Artificial sequence
  SiRNA target sequence
ttacggatgggatcagcaa

SEQ ID NO: 126972 - DNA, 19 bp, Artificial sequence
  SiRNA target sequence
tacggatgggatcagcaaa

SEQ ID NO: 126973 - DNA, 19 bp, Artificial sequence
  SiRNA target sequence
acggatgggatcagcaaag

SEQ ID NO: 126974 - DNA, 19 bp, Artificial sequence
  SiRNA target sequence
cggatgggatcagcaaaga

SEQ ID NO: 126975 - DNA, 19 bp, Artificial sequence
  SiRNA target sequence
ggatgggatcagcaaagat

SEQ ID NO: 126976 - DNA, 19 bp, Artificial sequence
  SiRNA target sequence
gatgggatcagcaaagata

SEQ ID NO: 126977 - DNA, 19 bp, Artificial sequence
  SiRNA target sequence
atgggatcagcaaagatat

SEQ ID NO: 126978 - DNA, 19 bp, Artificial sequence
  SiRNA target sequence
tgggatcagcaaagatata

SEQ ID NO: 126979 - DNA, 19 bp, Artificial sequence
  SiRNA target sequence
gggatcagcaaagatataa

SEQ ID NO: 126980 - DNA, 19 bp, Artificial sequence
  SiRNA target sequence
ggatcagcaaagatataat

SEQ ID NO: 126981 - DNA, 19 bp, Artificial sequence
  SiRNA target sequence
gatcagcaaagatataatg

SEQ ID NO: 126982 - DNA, 19 bp, Artificial sequence
  SiRNA target sequence
atcagcaaagatataatga

SEQ ID NO: 126983 - DNA, 19 bp, Artificial sequence
  SiRNA target sequence
tcagcaaagatataatgaa

SEQ ID NO: 126984 - DNA, 19 bp, Artificial sequence
  SiRNA target sequence
cagcaaagatataatgaag

SEQ ID NO: 126985 - DNA, 19 bp, Artificial sequence
  SiRNA target sequence
agcaaagatataatgaaga

SEQ ID NO: 126986 - DNA, 19 bp, Artificial sequence
  SiRNA target sequence
gcaaagatataatgaagaa

SEQ ID NO: 126987 - DNA, 19 bp, Artificial sequence
  SiRNA target sequence
caaagatataatgaagaaa

SEQ ID NO: 126988 - DNA, 19 bp, Artificial sequence
  SiRNA target sequence
aaagatataatgaagaaac

SEQ ID NO: 126989 - DNA, 19 bp, Artificial sequence
  SiRNA target sequence
aagatataatgaagaaaca

SEQ ID NO: 126990 - DNA, 19 bp, Artificial sequence
  SiRNA target sequence
agatataatgaagaaacaa

SEQ ID NO: 126991 - DNA, 19 bp, Artificial sequence
  SiRNA target sequence
gatataatgaagaaacaaa

SEQ ID NO: 126992 - DNA, 19 bp, Artificial sequence
  SiRNA target sequence
atataatgaagaaacaaaa

SEQ ID NO: 126993 - DNA, 19 bp, Artificial sequence
  SiRNA target sequence
tataatgaagaaacaaaat

SEQ ID NO: 126994 - DNA, 19 bp, Artificial sequence
  SiRNA target sequence
ataatgaagaaacaaaatt

SEQ ID NO: 126995 - DNA, 19 bp, Artificial sequence
  SiRNA target sequence
taatgaagaaacaaaatta

SEQ ID NO: 126996 - DNA, 19 bp, Artificial sequence
  SiRNA target sequence
aatgaagaaacaaaattat

SEQ ID NO: 126997 - DNA, 19 bp, Artificial sequence
  SiRNA target sequence
atgaagaaacaaaattatg

SEQ ID NO: 126998 - DNA, 19 bp, Artificial sequence
  SiRNA target sequence
tgaagaaacaaaattatgc

SEQ ID NO: 126999 - DNA, 19 bp, Artificial sequence
  SiRNA target sequence
gaagaaacaaaattatgca

SEQ ID NO: 127000 - DNA, 19 bp, Artificial sequence
  SiRNA target sequence
aagaaacaaaattatgcat

SEQ ID NO: 127001 - DNA, 19 bp, Artificial sequence
  SiRNA target sequence
agaaacaaaattatgcatg

SEQ ID NO: 127002 - DNA, 19 bp, Artificial sequence
  SiRNA target sequence
gaaacaaaattatgcatgg

SEQ ID NO: 127003 - DNA, 19 bp, Artificial sequence
  SiRNA target sequence
aaacaaaattatgcatgga

SEQ ID NO: 127004 - DNA, 19 bp, Artificial sequence
  SiRNA target sequence
aacaaaattatgcatggaa

SEQ ID NO: 127005 - DNA, 19 bp, Artificial sequence
  SiRNA target sequence
acaaaattatgcatggaaa

SEQ ID NO: 127006 - DNA, 19 bp, Artificial sequence
  SiRNA target sequence
caaaattatgcatggaaat

SEQ ID NO: 127007 - DNA, 19 bp, Artificial sequence
  SiRNA target sequence
aaaattatgcatggaaatg

SEQ ID NO: 127008 - DNA, 19 bp, Artificial sequence
  SiRNA target sequence
aaattatgcatggaaatga

SEQ ID NO: 127009 - DNA, 19 bp, Artificial sequence
  SiRNA target sequence
aattatgcatggaaatgat

SEQ ID NO: 127010 - DNA, 19 bp, Artificial sequence
  SiRNA target sequence
attatgcatggaaatgatg

SEQ ID NO: 127011 - DNA, 19 bp, Artificial sequence
  SiRNA target sequence
ttatgcatggaaatgatgg

SEQ ID NO: 127012 - DNA, 19 bp, Artificial sequence
  SiRNA target sequence
tatgcatggaaatgatgga

SEQ ID NO: 127013 - DNA, 19 bp, Artificial sequence
  SiRNA target sequence
atgcatggaaatgatggaa

SEQ ID NO: 127014 - DNA, 19 bp, Artificial sequence
  SiRNA target sequence
tgcatggaaatgatggaaa

SEQ ID NO: 127015 - DNA, 19 bp, Artificial sequence
  SiRNA target sequence
gcatggaaatgatggaaac

SEQ ID NO: 127016 - DNA, 19 bp, Artificial sequence
  SiRNA target sequence
catggaaatgatggaaact

SEQ ID NO: 127017 - DNA, 19 bp, Artificial sequence
  SiRNA target sequence
atggaaatgatggaaactt

SEQ ID NO: 127018 - DNA, 19 bp, Artificial sequence
  SiRNA target sequence
tggaaatgatggaaacttg

SEQ ID NO: 127019 - DNA, 19 bp, Artificial sequence
  SiRNA target sequence
ggaaatgatggaaacttgt

SEQ ID NO: 127020 - DNA, 19 bp, Artificial sequence
  SiRNA target sequence
gaaatgatggaaacttgtg

SEQ ID NO: 127021 - DNA, 19 bp, Artificial sequence
  SiRNA target sequence
aaatgatggaaacttgtgg

SEQ ID NO: 127022 - DNA, 19 bp, Artificial sequence
  SiRNA target sequence
aatgatggaaacttgtggt

SEQ ID NO: 127023 - DNA, 19 bp, Artificial sequence
  SiRNA target sequence
atgatggaaacttgtggtt

SEQ ID NO: 127024 - DNA, 19 bp, Artificial sequence
  SiRNA target sequence
tgatggaaacttgtggtta

SEQ ID NO: 127025 - DNA, 19 bp, Artificial sequence
  SiRNA target sequence
gatggaaacttgtggttat

SEQ ID NO: 127026 - DNA, 19 bp, Artificial sequence
  SiRNA target sequence
atggaaacttgtggttata

SEQ ID NO: 127027 - DNA, 19 bp, Artificial sequence
  SiRNA target sequence
tggaaacttgtggttatag

SEQ ID NO: 127028 - DNA, 19 bp, Artificial sequence
  SiRNA target sequence
ggaaacttgtggttatagt

SEQ ID NO: 127029 - DNA, 19 bp, Artificial sequence
  SiRNA target sequence
gaaacttgtggttatagtt

SEQ ID NO: 127030 - DNA, 19 bp, Artificial sequence
  SiRNA target sequence
aaacttgtggttatagttt

SEQ ID NO: 127031 - DNA, 19 bp, Artificial sequence
  SiRNA target sequence
aacttgtggttatagttta

SEQ ID NO: 127032 - DNA, 19 bp, Artificial sequence
  SiRNA target sequence
acttgtggttatagtttat

SEQ ID NO: 127033 - DNA, 19 bp, Artificial sequence
  SiRNA target sequence
cttgtggttatagtttatt

SEQ ID NO: 127034 - DNA, 19 bp, Artificial sequence
  SiRNA target sequence
ttgtggttatagtttatta

SEQ ID NO: 127035 - DNA, 19 bp, Artificial sequence
  SiRNA target sequence
tgtggttatagtttattaa

SEQ ID NO: 127036 - DNA, 19 bp, Artificial sequence
  SiRNA target sequence
gtggttatagtttattaaa

SEQ ID NO: 127037 - DNA, 19 bp, Artificial sequence
  SiRNA target sequence
tggttatagtttattaaaa

SEQ ID NO: 127038 - DNA, 19 bp, Artificial sequence
  SiRNA target sequence
ggttatagtttattaaaaa

SEQ ID NO: 127039 - DNA, 19 bp, Artificial sequence
  SiRNA target sequence
gttatagtttattaaaaaa

SEQ ID NO: 127040 - DNA, 19 bp, Artificial sequence
  SiRNA target sequence
ttatagtttattaaaaaat

SEQ ID NO: 127041 - DNA, 19 bp, Artificial sequence
  SiRNA target sequence
tatagtttattaaaaaatt

SEQ ID NO: 127042 - DNA, 19 bp, Artificial sequence
  SiRNA target sequence
atagtttattaaaaaatta

SEQ ID NO: 127043 - DNA, 19 bp, Artificial sequence
  SiRNA target sequence
tagtttattaaaaaattaa

SEQ ID NO: 127044 - DNA, 20 bp, Artificial sequence
  SiRNA target sequence
atggtgtataaggttttatt

SEQ ID NO: 127045 - DNA, 20 bp, Artificial sequence
  SiRNA target sequence
tggtgtataaggttttattt

SEQ ID NO: 127046 - DNA, 20 bp, Artificial sequence
  SiRNA target sequence
ggtgtataaggttttattta

SEQ ID NO: 127047 - DNA, 20 bp, Artificial sequence
  SiRNA target sequence
gtgtataaggttttatttac

SEQ ID NO: 127048 - DNA, 20 bp, Artificial sequence
  SiRNA target sequence
tgtataaggttttatttaca

SEQ ID NO: 127049 - DNA, 20 bp, Artificial sequence
  SiRNA target sequence
gtataaggttttatttacag

SEQ ID NO: 127050 - DNA, 20 bp, Artificial sequence
  SiRNA target sequence
tataaggttttatttacagt

SEQ ID NO: 127051 - DNA, 20 bp, Artificial sequence
  SiRNA target sequence
ataaggttttatttacagta

SEQ ID NO: 127052 - DNA, 20 bp, Artificial sequence
  SiRNA target sequence
taaggttttatttacagtaa

SEQ ID NO: 127053 - DNA, 20 bp, Artificial sequence
  SiRNA target sequence
aaggttttatttacagtaat

SEQ ID NO: 127054 - DNA, 20 bp, Artificial sequence
  SiRNA target sequence
aggttttatttacagtaata

SEQ ID NO: 127055 - DNA, 20 bp, Artificial sequence
  SiRNA target sequence
ggttttatttacagtaatag

SEQ ID NO: 127056 - DNA, 20 bp, Artificial sequence
  SiRNA target sequence
gttttatttacagtaatagg

SEQ ID NO: 127057 - DNA, 20 bp, Artificial sequence
  SiRNA target sequence
ttttatttacagtaatagga

SEQ ID NO: 127058 - DNA, 20 bp, Artificial sequence
  SiRNA target sequence
tttatttacagtaataggat

SEQ ID NO: 127059 - DNA, 20 bp, Artificial sequence
  SiRNA target sequence
ttatttacagtaataggatt

SEQ ID NO: 127060 - DNA, 20 bp, Artificial sequence
  SiRNA target sequence
tatttacagtaataggatta

SEQ ID NO: 127061 - DNA, 20 bp, Artificial sequence
  SiRNA target sequence
atttacagtaataggattaa

SEQ ID NO: 127062 - DNA, 20 bp, Artificial sequence
  SiRNA target sequence
tttacagtaataggattaat

SEQ ID NO: 127063 - DNA, 20 bp, Artificial sequence
  SiRNA target sequence
ttacagtaataggattaata

SEQ ID NO: 127064 - DNA, 20 bp, Artificial sequence
  SiRNA target sequence
tacagtaataggattaatat

SEQ ID NO: 127065 - DNA, 20 bp, Artificial sequence
  SiRNA target sequence
acagtaataggattaatatg

SEQ ID NO: 127066 - DNA, 20 bp, Artificial sequence
  SiRNA target sequence
cagtaataggattaatatgt

SEQ ID NO: 127067 - DNA, 20 bp, Artificial sequence
  SiRNA target sequence
agtaataggattaatatgtg

SEQ ID NO: 127068 - DNA, 20 bp, Artificial sequence
  SiRNA target sequence
gtaataggattaatatgtgg

SEQ ID NO: 127069 - DNA, 20 bp, Artificial sequence
  SiRNA target sequence
taataggattaatatgtggt

SEQ ID NO: 127070 - DNA, 20 bp, Artificial sequence
  SiRNA target sequence
aataggattaatatgtggta

SEQ ID NO: 127071 - DNA, 20 bp, Artificial sequence
  SiRNA target sequence
ataggattaatatgtggtat

SEQ ID NO: 127072 - DNA, 20 bp, Artificial sequence
  SiRNA target sequence
taggattaatatgtggtata

SEQ ID NO: 127073 - DNA, 20 bp, Artificial sequence
  SiRNA target sequence
aggattaatatgtggtatac

SEQ ID NO: 127074 - DNA, 20 bp, Artificial sequence
  SiRNA target sequence
ggattaatatgtggtatact

SEQ ID NO: 127075 - DNA, 20 bp, Artificial sequence
  SiRNA target sequence
gattaatatgtggtatactt

SEQ ID NO: 127076 - DNA, 20 bp, Artificial sequence
  SiRNA target sequence
attaatatgtggtatactta

SEQ ID NO: 127077 - DNA, 20 bp, Artificial sequence
  SiRNA target sequence
ttaatatgtggtatacttac

SEQ ID NO: 127078 - DNA, 20 bp, Artificial sequence
  SiRNA target sequence
taatatgtggtatacttaca

SEQ ID NO: 127079 - DNA, 20 bp, Artificial sequence
  SiRNA target sequence
aatatgtggtatacttacaa

SEQ ID NO: 127080 - DNA, 20 bp, Artificial sequence
  SiRNA target sequence
atatgtggtatacttacaat

SEQ ID NO: 127081 - DNA, 20 bp, Artificial sequence
  SiRNA target sequence
tatgtggtatacttacaata

SEQ ID NO: 127082 - DNA, 20 bp, Artificial sequence
  SiRNA target sequence
atgtggtatacttacaataa

SEQ ID NO: 127083 - DNA, 20 bp, Artificial sequence
  SiRNA target sequence
tgtggtatacttacaataat

SEQ ID NO: 127084 - DNA, 20 bp, Artificial sequence
  SiRNA target sequence
gtggtatacttacaataatt

SEQ ID NO: 127085 - DNA, 20 bp, Artificial sequence
  SiRNA target sequence
tggtatacttacaataatta

SEQ ID NO: 127086 - DNA, 20 bp, Artificial sequence
  SiRNA target sequence
ggtatacttacaataattaa

SEQ ID NO: 127087 - DNA, 20 bp, Artificial sequence
  SiRNA target sequence
gtatacttacaataattaaa

SEQ ID NO: 127088 - DNA, 20 bp, Artificial sequence
  SiRNA target sequence
tatacttacaataattaaac

SEQ ID NO: 127089 - DNA, 20 bp, Artificial sequence
  SiRNA target sequence
atacttacaataattaaacg

SEQ ID NO: 127090 - DNA, 20 bp, Artificial sequence
  SiRNA target sequence
tacttacaataattaaacga

SEQ ID NO: 127091 - DNA, 20 bp, Artificial sequence
  SiRNA target sequence
acttacaataattaaacgat

SEQ ID NO: 127092 - DNA, 20 bp, Artificial sequence
  SiRNA target sequence
cttacaataattaaacgata

SEQ ID NO: 127093 - DNA, 20 bp, Artificial sequence
  SiRNA target sequence
ttacaataattaaacgatac

SEQ ID NO: 127094 - DNA, 20 bp, Artificial sequence
  SiRNA target sequence
tacaataattaaacgataca

SEQ ID NO: 127095 - DNA, 20 bp, Artificial sequence
  SiRNA target sequence
acaataattaaacgatacaa

SEQ ID NO: 127096 - DNA, 20 bp, Artificial sequence
  SiRNA target sequence
caataattaaacgatacaag

SEQ ID NO: 127097 - DNA, 20 bp, Artificial sequence
  SiRNA target sequence
aataattaaacgatacaagt

SEQ ID NO: 127098 - DNA, 20 bp, Artificial sequence
  SiRNA target sequence
ataattaaacgatacaagta

SEQ ID NO: 127099 - DNA, 20 bp, Artificial sequence
  SiRNA target sequence
taattaaacgatacaagtat

SEQ ID NO: 127100 - DNA, 20 bp, Artificial sequence
  SiRNA target sequence
aattaaacgatacaagtatt

SEQ ID NO: 127101 - DNA, 20 bp, Artificial sequence
  SiRNA target sequence
attaaacgatacaagtattt

SEQ ID NO: 127102 - DNA, 20 bp, Artificial sequence
  SiRNA target sequence
ttaaacgatacaagtatttt

SEQ ID NO: 127103 - DNA, 20 bp, Artificial sequence
  SiRNA target sequence
taaacgatacaagtatttta

SEQ ID NO: 127104 - DNA, 20 bp, Artificial sequence
  SiRNA target sequence
aaacgatacaagtattttaa

SEQ ID NO: 127105 - DNA, 20 bp, Artificial sequence
  SiRNA target sequence
aacgatacaagtattttaag

SEQ ID NO: 127106 - DNA, 20 bp, Artificial sequence
  SiRNA target sequence
acgatacaagtattttaaga

SEQ ID NO: 127107 - DNA, 20 bp, Artificial sequence
  SiRNA target sequence
cgatacaagtattttaagat

SEQ ID NO: 127108 - DNA, 20 bp, Artificial sequence
  SiRNA target sequence
gatacaagtattttaagata

SEQ ID NO: 127109 - DNA, 20 bp, Artificial sequence
  SiRNA target sequence
atacaagtattttaagataa

SEQ ID NO: 127110 - DNA, 20 bp, Artificial sequence
  SiRNA target sequence
tacaagtattttaagataaa

SEQ ID NO: 127111 - DNA, 20 bp, Artificial sequence
  SiRNA target sequence
acaagtattttaagataaaa

SEQ ID NO: 127112 - DNA, 20 bp, Artificial sequence
  SiRNA target sequence
caagtattttaagataaaaa

SEQ ID NO: 127113 - DNA, 20 bp, Artificial sequence
  SiRNA target sequence
aagtattttaagataaaaaa

SEQ ID NO: 127114 - DNA, 20 bp, Artificial sequence
  SiRNA target sequence
agtattttaagataaaaaaa

SEQ ID NO: 127115 - DNA, 20 bp, Artificial sequence
  SiRNA target sequence
gtattttaagataaaaaaat

SEQ ID NO: 127116 - DNA, 20 bp, Artificial sequence
  SiRNA target sequence
tattttaagataaaaaaatt

SEQ ID NO: 127117 - DNA, 20 bp, Artificial sequence
  SiRNA target sequence
attttaagataaaaaaattg

SEQ ID NO: 127118 - DNA, 20 bp, Artificial sequence
  SiRNA target sequence
ttttaagataaaaaaattgg

SEQ ID NO: 127119 - DNA, 20 bp, Artificial sequence
  SiRNA target sequence
tttaagataaaaaaattggc

SEQ ID NO: 127120 - DNA, 20 bp, Artificial sequence
  SiRNA target sequence
ttaagataaaaaaattggcc

SEQ ID NO: 127121 - DNA, 20 bp, Artificial sequence
  SiRNA target sequence
taagataaaaaaattggcct

SEQ ID NO: 127122 - DNA, 20 bp, Artificial sequence
  SiRNA target sequence
aagataaaaaaattggcctt

SEQ ID NO: 127123 - DNA, 20 bp, Artificial sequence
  SiRNA target sequence
agataaaaaaattggcctta

SEQ ID NO: 127124 - DNA, 20 bp, Artificial sequence
  SiRNA target sequence
gataaaaaaattggccttaa

SEQ ID NO: 127125 - DNA, 20 bp, Artificial sequence
  SiRNA target sequence
ataaaaaaattggccttaac

SEQ ID NO: 127126 - DNA, 20 bp, Artificial sequence
  SiRNA target sequence
taaaaaaattggccttaact

SEQ ID NO: 127127 - DNA, 20 bp, Artificial sequence
  SiRNA target sequence
aaaaaaattggccttaactt

SEQ ID NO: 127128 - DNA, 20 bp, Artificial sequence
  SiRNA target sequence
aaaaaattggccttaactta

SEQ ID NO: 127129 - DNA, 20 bp, Artificial sequence
  SiRNA target sequence
aaaaattggccttaacttac

SEQ ID NO: 127130 - DNA, 20 bp, Artificial sequence
  SiRNA target sequence
aaaattggccttaacttact

SEQ ID NO: 127131 - DNA, 20 bp, Artificial sequence
  SiRNA target sequence
aaattggccttaacttactt

SEQ ID NO: 127132 - DNA, 20 bp, Artificial sequence
  SiRNA target sequence
aattggccttaacttacttc

SEQ ID NO: 127133 - DNA, 20 bp, Artificial sequence
  SiRNA target sequence
attggccttaacttacttcg

SEQ ID NO: 127134 - DNA, 20 bp, Artificial sequence
  SiRNA target sequence
ttggccttaacttacttcgg

SEQ ID NO: 127135 - DNA, 20 bp, Artificial sequence
  SiRNA target sequence
tggccttaacttacttcggg

SEQ ID NO: 127136 - DNA, 20 bp, Artificial sequence
  SiRNA target sequence
ggccttaacttacttcggga

SEQ ID NO: 127137 - DNA, 20 bp, Artificial sequence
  SiRNA target sequence
gccttaacttacttcgggaa

SEQ ID NO: 127138 - DNA, 20 bp, Artificial sequence
  SiRNA target sequence
ccttaacttacttcgggaaa

SEQ ID NO: 127139 - DNA, 20 bp, Artificial sequence
  SiRNA target sequence
cttaacttacttcgggaaac

SEQ ID NO: 127140 - DNA, 20 bp, Artificial sequence
  SiRNA target sequence
ttaacttacttcgggaaaca

SEQ ID NO: 127141 - DNA, 20 bp, Artificial sequence
  SiRNA target sequence
taacttacttcgggaaacaa

SEQ ID NO: 127142 - DNA, 20 bp, Artificial sequence
  SiRNA target sequence
aacttacttcgggaaacaag

SEQ ID NO: 127143 - DNA, 20 bp, Artificial sequence
  SiRNA target sequence
acttacttcgggaaacaaga

SEQ ID NO: 127144 - DNA, 20 bp, Artificial sequence
  SiRNA target sequence
cttacttcgggaaacaagac

SEQ ID NO: 127145 - DNA, 20 bp, Artificial sequence
  SiRNA target sequence
ttacttcgggaaacaagact

SEQ ID NO: 127146 - DNA, 20 bp, Artificial sequence
  SiRNA target sequence
tacttcgggaaacaagactt

SEQ ID NO: 127147 - DNA, 20 bp, Artificial sequence
  SiRNA target sequence
acttcgggaaacaagacttg

SEQ ID NO: 127148 - DNA, 20 bp, Artificial sequence
  SiRNA target sequence
cttcgggaaacaagacttgc

SEQ ID NO: 127149 - DNA, 20 bp, Artificial sequence
  SiRNA target sequence
ttcgggaaacaagacttgca

SEQ ID NO: 127150 - DNA, 20 bp, Artificial sequence
  SiRNA target sequence
tcgggaaacaagacttgcaa

SEQ ID NO: 127151 - DNA, 20 bp, Artificial sequence
  SiRNA target sequence
cgggaaacaagacttgcaat

SEQ ID NO: 127152 - DNA, 20 bp, Artificial sequence
  SiRNA target sequence
gggaaacaagacttgcaatg

SEQ ID NO: 127153 - DNA, 20 bp, Artificial sequence
  SiRNA target sequence
ggaaacaagacttgcaatgg

SEQ ID NO: 127154 - DNA, 20 bp, Artificial sequence
  SiRNA target sequence
gaaacaagacttgcaatgga

SEQ ID NO: 127155 - DNA, 20 bp, Artificial sequence
  SiRNA target sequence
aaacaagacttgcaatggaa

SEQ ID NO: 127156 - DNA, 20 bp, Artificial sequence
  SiRNA target sequence
aacaagacttgcaatggaaa

SEQ ID NO: 127157 - DNA, 20 bp, Artificial sequence
  SiRNA target sequence
acaagacttgcaatggaaac

SEQ ID NO: 127158 - DNA, 20 bp, Artificial sequence
  SiRNA target sequence
caagacttgcaatggaaacc

SEQ ID NO: 127159 - DNA, 20 bp, Artificial sequence
  SiRNA target sequence
aagacttgcaatggaaacct

SEQ ID NO: 127160 - DNA, 20 bp, Artificial sequence
  SiRNA target sequence
agacttgcaatggaaaccta

SEQ ID NO: 127161 - DNA, 20 bp, Artificial sequence
  SiRNA target sequence
gacttgcaatggaaacctaa

SEQ ID NO: 127162 - DNA, 20 bp, Artificial sequence
  SiRNA target sequence
acttgcaatggaaacctaaa

SEQ ID NO: 127163 - DNA, 20 bp, Artificial sequence
  SiRNA target sequence
cttgcaatggaaacctaaaa

SEQ ID NO: 127164 - DNA, 20 bp, Artificial sequence
  SiRNA target sequence
ttgcaatggaaacctaaaag

SEQ ID NO: 127165 - DNA, 20 bp, Artificial sequence
  SiRNA target sequence
tgcaatggaaacctaaaagt

SEQ ID NO: 127166 - DNA, 20 bp, Artificial sequence
  SiRNA target sequence
gcaatggaaacctaaaagtc

SEQ ID NO: 127167 - DNA, 20 bp, Artificial sequence
  SiRNA target sequence
caatggaaacctaaaagtcg

SEQ ID NO: 127168 - DNA, 20 bp, Artificial sequence
  SiRNA target sequence
aatggaaacctaaaagtcgg

SEQ ID NO: 127169 - DNA, 20 bp, Artificial sequence
  SiRNA target sequence
atggaaacctaaaagtcggt

SEQ ID NO: 127170 - DNA, 20 bp, Artificial sequence
  SiRNA target sequence
tggaaacctaaaagtcggtc

SEQ ID NO: 127171 - DNA, 20 bp, Artificial sequence
  SiRNA target sequence
ggaaacctaaaagtcggtca

SEQ ID NO: 127172 - DNA, 20 bp, Artificial sequence
  SiRNA target sequence
gaaacctaaaagtcggtcag

SEQ ID NO: 127173 - DNA, 20 bp, Artificial sequence
  SiRNA target sequence
aaacctaaaagtcggtcaga

SEQ ID NO: 127174 - DNA, 20 bp, Artificial sequence
  SiRNA target sequence
aacctaaaagtcggtcagaa

SEQ ID NO: 127175 - DNA, 20 bp, Artificial sequence
  SiRNA target sequence
acctaaaagtcggtcagaaa

SEQ ID NO: 127176 - DNA, 20 bp, Artificial sequence
  SiRNA target sequence
cctaaaagtcggtcagaaat

SEQ ID NO: 127177 - DNA, 20 bp, Artificial sequence
  SiRNA target sequence
ctaaaagtcggtcagaaatt

SEQ ID NO: 127178 - DNA, 20 bp, Artificial sequence
  SiRNA target sequence
taaaagtcggtcagaaatta

SEQ ID NO: 127179 - DNA, 20 bp, Artificial sequence
  SiRNA target sequence
aaaagtcggtcagaaattat

SEQ ID NO: 127180 - DNA, 20 bp, Artificial sequence
  SiRNA target sequence
aaagtcggtcagaaattatt

SEQ ID NO: 127181 - DNA, 20 bp, Artificial sequence
  SiRNA target sequence
aagtcggtcagaaattatta

SEQ ID NO: 127182 - DNA, 20 bp, Artificial sequence
  SiRNA target sequence
agtcggtcagaaattattaa

SEQ ID NO: 127183 - DNA, 20 bp, Artificial sequence
  SiRNA target sequence
gtcggtcagaaattattaac

SEQ ID NO: 127184 - DNA, 20 bp, Artificial sequence
  SiRNA target sequence
tcggtcagaaattattaacg

SEQ ID NO: 127185 - DNA, 20 bp, Artificial sequence
  SiRNA target sequence
cggtcagaaattattaacga

SEQ ID NO: 127186 - DNA, 20 bp, Artificial sequence
  SiRNA target sequence
ggtcagaaattattaacgat

SEQ ID NO: 127187 - DNA, 20 bp, Artificial sequence
  SiRNA target sequence
gtcagaaattattaacgatt

SEQ ID NO: 127188 - DNA, 20 bp, Artificial sequence
  SiRNA target sequence
tcagaaattattaacgattt

SEQ ID NO: 127189 - DNA, 20 bp, Artificial sequence
  SiRNA target sequence
cagaaattattaacgattta

SEQ ID NO: 127190 - DNA, 20 bp, Artificial sequence
  SiRNA target sequence
agaaattattaacgatttaa

SEQ ID NO: 127191 - DNA, 20 bp, Artificial sequence
  SiRNA target sequence
gaaattattaacgatttaaa

SEQ ID NO: 127192 - DNA, 20 bp, Artificial sequence
  SiRNA target sequence
aaattattaacgatttaaaa

SEQ ID NO: 127193 - DNA, 20 bp, Artificial sequence
  SiRNA target sequence
aattattaacgatttaaaaa

SEQ ID NO: 127194 - DNA, 20 bp, Artificial sequence
  SiRNA target sequence
attattaacgatttaaaaaa

SEQ ID NO: 127195 - DNA, 20 bp, Artificial sequence
  SiRNA target sequence
ttattaacgatttaaaaaat

SEQ ID NO: 127196 - DNA, 20 bp, Artificial sequence
  SiRNA target sequence
tattaacgatttaaaaaata

SEQ ID NO: 127197 - DNA, 20 bp, Artificial sequence
  SiRNA target sequence
attaacgatttaaaaaatac

SEQ ID NO: 127198 - DNA, 20 bp, Artificial sequence
  SiRNA target sequence
ttaacgatttaaaaaataca

SEQ ID NO: 127199 - DNA, 20 bp, Artificial sequence
  SiRNA target sequence
taacgatttaaaaaatacaa

SEQ ID NO: 127200 - DNA, 20 bp, Artificial sequence
  SiRNA target sequence
aacgatttaaaaaatacaaa

SEQ ID NO: 127201 - DNA, 20 bp, Artificial sequence
  SiRNA target sequence
acgatttaaaaaatacaaac

SEQ ID NO: 127202 - DNA, 20 bp, Artificial sequence
  SiRNA target sequence
cgatttaaaaaatacaaact

SEQ ID NO: 127203 - DNA, 20 bp, Artificial sequence
  SiRNA target sequence
gatttaaaaaatacaaactt

SEQ ID NO: 127204 - DNA, 20 bp, Artificial sequence
  SiRNA target sequence
atttaaaaaatacaaacttt

SEQ ID NO: 127205 - DNA, 20 bp, Artificial sequence
  SiRNA target sequence
tttaaaaaatacaaactttg

SEQ ID NO: 127206 - DNA, 20 bp, Artificial sequence
  SiRNA target sequence
ttaaaaaatacaaactttga

SEQ ID NO: 127207 - DNA, 20 bp, Artificial sequence
  SiRNA target sequence
taaaaaatacaaactttgac

SEQ ID NO: 127208 - DNA, 20 bp, Artificial sequence
  SiRNA target sequence
aaaaaatacaaactttgaca

SEQ ID NO: 127209 - DNA, 20 bp, Artificial sequence
  SiRNA target sequence
aaaaatacaaactttgacat

SEQ ID NO: 127210 - DNA, 20 bp, Artificial sequence
  SiRNA target sequence
aaaatacaaactttgacata

SEQ ID NO: 127211 - DNA, 20 bp, Artificial sequence
  SiRNA target sequence
aaatacaaactttgacatat

SEQ ID NO: 127212 - DNA, 20 bp, Artificial sequence
  SiRNA target sequence
aatacaaactttgacatatt

SEQ ID NO: 127213 - DNA, 20 bp, Artificial sequence
  SiRNA target sequence
atacaaactttgacatattg

SEQ ID NO: 127214 - DNA, 20 bp, Artificial sequence
  SiRNA target sequence
tacaaactttgacatattga

SEQ ID NO: 127215 - DNA, 20 bp, Artificial sequence
  SiRNA target sequence
acaaactttgacatattgat

SEQ ID NO: 127216 - DNA, 20 bp, Artificial sequence
  SiRNA target sequence
caaactttgacatattgatt

SEQ ID NO: 127217 - DNA, 20 bp, Artificial sequence
  SiRNA target sequence
aaactttgacatattgatta

SEQ ID NO: 127218 - DNA, 20 bp, Artificial sequence
  SiRNA target sequence
aactttgacatattgattat

SEQ ID NO: 127219 - DNA, 20 bp, Artificial sequence
  SiRNA target sequence
actttgacatattgattatt

SEQ ID NO: 127220 - DNA, 20 bp, Artificial sequence
  SiRNA target sequence
ctttgacatattgattattg

SEQ ID NO: 127221 - DNA, 20 bp, Artificial sequence
  SiRNA target sequence
tttgacatattgattattgg

SEQ ID NO: 127222 - DNA, 20 bp, Artificial sequence
  SiRNA target sequence
ttgacatattgattattggt

SEQ ID NO: 127223 - DNA, 20 bp, Artificial sequence
  SiRNA target sequence
tgacatattgattattggtg

SEQ ID NO: 127224 - DNA, 20 bp, Artificial sequence
  SiRNA target sequence
gacatattgattattggtgg

SEQ ID NO: 127225 - DNA, 20 bp, Artificial sequence
  SiRNA target sequence
acatattgattattggtggc

SEQ ID NO: 127226 - DNA, 20 bp, Artificial sequence
  SiRNA target sequence
catattgattattggtggcg

SEQ ID NO: 127227 - DNA, 20 bp, Artificial sequence
  SiRNA target sequence
atattgattattggtggcgg

SEQ ID NO: 127228 - DNA, 20 bp, Artificial sequence
  SiRNA target sequence
tattgattattggtggcggt

SEQ ID NO: 127229 - DNA, 20 bp, Artificial sequence
  SiRNA target sequence
attgattattggtggcggtt

SEQ ID NO: 127230 - DNA, 20 bp, Artificial sequence
  SiRNA target sequence
ttgattattggtggcggttc

SEQ ID NO: 127231 - DNA, 20 bp, Artificial sequence
  SiRNA target sequence
tgattattggtggcggttca

SEQ ID NO: 127232 - DNA, 20 bp, Artificial sequence
  SiRNA target sequence
gattattggtggcggttcaa

SEQ ID NO: 127233 - DNA, 20 bp, Artificial sequence
  SiRNA target sequence
attattggtggcggttcaac

SEQ ID NO: 127234 - DNA, 20 bp, Artificial sequence
  SiRNA target sequence
ttattggtggcggttcaacg

SEQ ID NO: 127235 - DNA, 20 bp, Artificial sequence
  SiRNA target sequence
tattggtggcggttcaacgg

SEQ ID NO: 127236 - DNA, 20 bp, Artificial sequence
  SiRNA target sequence
attggtggcggttcaacggg

SEQ ID NO: 127237 - DNA, 20 bp, Artificial sequence
  SiRNA target sequence
ttggtggcggttcaacggga

SEQ ID NO: 127238 - DNA, 20 bp, Artificial sequence
  SiRNA target sequence
tggtggcggttcaacgggaa

SEQ ID NO: 127239 - DNA, 20 bp, Artificial sequence
  SiRNA target sequence
ggtggcggttcaacgggaat

SEQ ID NO: 127240 - DNA, 20 bp, Artificial sequence
  SiRNA target sequence
gtggcggttcaacgggaatg

SEQ ID NO: 127241 - DNA, 20 bp, Artificial sequence
  SiRNA target sequence
tggcggttcaacgggaatgg

SEQ ID NO: 127242 - DNA, 20 bp, Artificial sequence
  SiRNA target sequence
ggcggttcaacgggaatggg

SEQ ID NO: 127243 - DNA, 20 bp, Artificial sequence
  SiRNA target sequence
gcggttcaacgggaatggga

SEQ ID NO: 127244 - DNA, 20 bp, Artificial sequence
  SiRNA target sequence
cggttcaacgggaatgggat

SEQ ID NO: 127245 - DNA, 20 bp, Artificial sequence
  SiRNA target sequence
ggttcaacgggaatgggatg

SEQ ID NO: 127246 - DNA, 20 bp, Artificial sequence
  SiRNA target sequence
gttcaacgggaatgggatgt

SEQ ID NO: 127247 - DNA, 20 bp, Artificial sequence
  SiRNA target sequence
ttcaacgggaatgggatgtg

SEQ ID NO: 127248 - DNA, 20 bp, Artificial sequence
  SiRNA target sequence
tcaacgggaatgggatgtgc

SEQ ID NO: 127249 - DNA, 20 bp, Artificial sequence
  SiRNA target sequence
caacgggaatgggatgtgca

SEQ ID NO: 127250 - DNA, 20 bp, Artificial sequence
  SiRNA target sequence
aacgggaatgggatgtgcaa

SEQ ID NO: 127251 - DNA, 20 bp, Artificial sequence
  SiRNA target sequence
acgggaatgggatgtgcaat

SEQ ID NO: 127252 - DNA, 20 bp, Artificial sequence
  SiRNA target sequence
cgggaatgggatgtgcaatc

SEQ ID NO: 127253 - DNA, 20 bp, Artificial sequence
  SiRNA target sequence
gggaatgggatgtgcaatcg

SEQ ID NO: 127254 - DNA, 20 bp, Artificial sequence
  SiRNA target sequence
ggaatgggatgtgcaatcga

SEQ ID NO: 127255 - DNA, 20 bp, Artificial sequence
  SiRNA target sequence
gaatgggatgtgcaatcgaa

SEQ ID NO: 127256 - DNA, 20 bp, Artificial sequence
  SiRNA target sequence
aatgggatgtgcaatcgaag

SEQ ID NO: 127257 - DNA, 20 bp, Artificial sequence
  SiRNA target sequence
atgggatgtgcaatcgaagc

SEQ ID NO: 127258 - DNA, 20 bp, Artificial sequence
  SiRNA target sequence
tgggatgtgcaatcgaagca

SEQ ID NO: 127259 - DNA, 20 bp, Artificial sequence
  SiRNA target sequence
gggatgtgcaatcgaagcag

SEQ ID NO: 127260 - DNA, 20 bp, Artificial sequence
  SiRNA target sequence
ggatgtgcaatcgaagcagc

SEQ ID NO: 127261 - DNA, 20 bp, Artificial sequence
  SiRNA target sequence
gatgtgcaatcgaagcagct

SEQ ID NO: 127262 - DNA, 20 bp, Artificial sequence
  SiRNA target sequence
atgtgcaatcgaagcagcta

SEQ ID NO: 127263 - DNA, 20 bp, Artificial sequence
  SiRNA target sequence
tgtgcaatcgaagcagctac

SEQ ID NO: 127264 - DNA, 20 bp, Artificial sequence
  SiRNA target sequence
gtgcaatcgaagcagctaca

SEQ ID NO: 127265 - DNA, 20 bp, Artificial sequence
  SiRNA target sequence
tgcaatcgaagcagctacac

SEQ ID NO: 127266 - DNA, 20 bp, Artificial sequence
  SiRNA target sequence
gcaatcgaagcagctacacg

SEQ ID NO: 127267 - DNA, 20 bp, Artificial sequence
  SiRNA target sequence
caatcgaagcagctacacga

SEQ ID NO: 127268 - DNA, 20 bp, Artificial sequence
  SiRNA target sequence
aatcgaagcagctacacgag

SEQ ID NO: 127269 - DNA, 20 bp, Artificial sequence
  SiRNA target sequence
atcgaagcagctacacgagg

SEQ ID NO: 127270 - DNA, 20 bp, Artificial sequence
  SiRNA target sequence
tcgaagcagctacacgaggt

SEQ ID NO: 127271 - DNA, 20 bp, Artificial sequence
  SiRNA target sequence
cgaagcagctacacgaggta

SEQ ID NO: 127272 - DNA, 20 bp, Artificial sequence
  SiRNA target sequence
gaagcagctacacgaggtat

SEQ ID NO: 127273 - DNA, 20 bp, Artificial sequence
  SiRNA target sequence
aagcagctacacgaggtata

SEQ ID NO: 127274 - DNA, 20 bp, Artificial sequence
  SiRNA target sequence
agcagctacacgaggtataa

SEQ ID NO: 127275 - DNA, 20 bp, Artificial sequence
  SiRNA target sequence
gcagctacacgaggtataag

SEQ ID NO: 127276 - DNA, 20 bp, Artificial sequence
  SiRNA target sequence
cagctacacgaggtataagt

SEQ ID NO: 127277 - DNA, 20 bp, Artificial sequence
  SiRNA target sequence
agctacacgaggtataagtg

SEQ ID NO: 127278 - DNA, 20 bp, Artificial sequence
  SiRNA target sequence
gctacacgaggtataagtgt

SEQ ID NO: 127279 - DNA, 20 bp, Artificial sequence
  SiRNA target sequence
ctacacgaggtataagtgtt

SEQ ID NO: 127280 - DNA, 20 bp, Artificial sequence
  SiRNA target sequence
tacacgaggtataagtgttg

SEQ ID NO: 127281 - DNA, 20 bp, Artificial sequence
  SiRNA target sequence
acacgaggtataagtgttgg

SEQ ID NO: 127282 - DNA, 20 bp, Artificial sequence
  SiRNA target sequence
cacgaggtataagtgttggc

SEQ ID NO: 127283 - DNA, 20 bp, Artificial sequence
  SiRNA target sequence
acgaggtataagtgttggcc

SEQ ID NO: 127284 - DNA, 20 bp, Artificial sequence
  SiRNA target sequence
cgaggtataagtgttggcct

SEQ ID NO: 127285 - DNA, 20 bp, Artificial sequence
  SiRNA target sequence
gaggtataagtgttggcctg

SEQ ID NO: 127286 - DNA, 20 bp, Artificial sequence
  SiRNA target sequence
aggtataagtgttggcctga

SEQ ID NO: 127287 - DNA, 20 bp, Artificial sequence
  SiRNA target sequence
ggtataagtgttggcctgat

SEQ ID NO: 127288 - DNA, 20 bp, Artificial sequence
  SiRNA target sequence
gtataagtgttggcctgata

SEQ ID NO: 127289 - DNA, 20 bp, Artificial sequence
  SiRNA target sequence
tataagtgttggcctgatag

SEQ ID NO: 127290 - DNA, 20 bp, Artificial sequence
  SiRNA target sequence
ataagtgttggcctgataga

SEQ ID NO: 127291 - DNA, 20 bp, Artificial sequence
  SiRNA target sequence
taagtgttggcctgatagaa

SEQ ID NO: 127292 - DNA, 20 bp, Artificial sequence
  SiRNA target sequence
aagtgttggcctgatagaag

SEQ ID NO: 127293 - DNA, 20 bp, Artificial sequence
  SiRNA target sequence
agtgttggcctgatagaagc

SEQ ID NO: 127294 - DNA, 20 bp, Artificial sequence
  SiRNA target sequence
gtgttggcctgatagaagca

SEQ ID NO: 127295 - DNA, 20 bp, Artificial sequence
  SiRNA target sequence
tgttggcctgatagaagcac

SEQ ID NO: 127296 - DNA, 20 bp, Artificial sequence
  SiRNA target sequence
gttggcctgatagaagcaca

SEQ ID NO: 127297 - DNA, 20 bp, Artificial sequence
  SiRNA target sequence
ttggcctgatagaagcacat

SEQ ID NO: 127298 - DNA, 20 bp, Artificial sequence
  SiRNA target sequence
tggcctgatagaagcacatg

SEQ ID NO: 127299 - DNA, 20 bp, Artificial sequence
  SiRNA target sequence
ggcctgatagaagcacatga

SEQ ID NO: 127300 - DNA, 20 bp, Artificial sequence
  SiRNA target sequence
gcctgatagaagcacatgat

SEQ ID NO: 127301 - DNA, 20 bp, Artificial sequence
  SiRNA target sequence
cctgatagaagcacatgatt

SEQ ID NO: 127302 - DNA, 20 bp, Artificial sequence
  SiRNA target sequence
ctgatagaagcacatgattt

SEQ ID NO: 127303 - DNA, 20 bp, Artificial sequence
  SiRNA target sequence
tgatagaagcacatgatttt

SEQ ID NO: 127304 - DNA, 20 bp, Artificial sequence
  SiRNA target sequence
gatagaagcacatgattttg

SEQ ID NO: 127305 - DNA, 20 bp, Artificial sequence
  SiRNA target sequence
atagaagcacatgattttgg

SEQ ID NO: 127306 - DNA, 20 bp, Artificial sequence
  SiRNA target sequence
tagaagcacatgattttggt

SEQ ID NO: 127307 - DNA, 20 bp, Artificial sequence
  SiRNA target sequence
agaagcacatgattttggtt

SEQ ID NO: 127308 - DNA, 20 bp, Artificial sequence
  SiRNA target sequence
gaagcacatgattttggttc

SEQ ID NO: 127309 - DNA, 20 bp, Artificial sequence
  SiRNA target sequence
aagcacatgattttggttcg

SEQ ID NO: 127310 - DNA, 20 bp, Artificial sequence
  SiRNA target sequence
agcacatgattttggttcgg

SEQ ID NO: 127311 - DNA, 20 bp, Artificial sequence
  SiRNA target sequence
gcacatgattttggttcggg

SEQ ID NO: 127312 - DNA, 20 bp, Artificial sequence
  SiRNA target sequence
cacatgattttggttcgggc

SEQ ID NO: 127313 - DNA, 20 bp, Artificial sequence
  SiRNA target sequence
acatgattttggttcgggca

SEQ ID NO: 127314 - DNA, 20 bp, Artificial sequence
  SiRNA target sequence
catgattttggttcgggcac

SEQ ID NO: 127315 - DNA, 20 bp, Artificial sequence
  SiRNA target sequence
atgattttggttcgggcacg

SEQ ID NO: 127316 - DNA, 20 bp, Artificial sequence
  SiRNA target sequence
tgattttggttcgggcacga

SEQ ID NO: 127317 - DNA, 20 bp, Artificial sequence
  SiRNA target sequence
gattttggttcgggcacgag

SEQ ID NO: 127318 - DNA, 20 bp, Artificial sequence
  SiRNA target sequence
attttggttcgggcacgagt

SEQ ID NO: 127319 - DNA, 20 bp, Artificial sequence
  SiRNA target sequence
ttttggttcgggcacgagtt

SEQ ID NO: 127320 - DNA, 20 bp, Artificial sequence
  SiRNA target sequence
tttggttcgggcacgagttc

SEQ ID NO: 127321 - DNA, 20 bp, Artificial sequence
  SiRNA target sequence
ttggttcgggcacgagttca

SEQ ID NO: 127322 - DNA, 20 bp, Artificial sequence
  SiRNA target sequence
tggttcgggcacgagttcaa

SEQ ID NO: 127323 - DNA, 20 bp, Artificial sequence
  SiRNA target sequence
ggttcgggcacgagttcaaa

SEQ ID NO: 127324 - DNA, 20 bp, Artificial sequence
  SiRNA target sequence
gttcgggcacgagttcaaaa

SEQ ID NO: 127325 - DNA, 20 bp, Artificial sequence
  SiRNA target sequence
ttcgggcacgagttcaaaat

SEQ ID NO: 127326 - DNA, 20 bp, Artificial sequence
  SiRNA target sequence
tcgggcacgagttcaaaatc

SEQ ID NO: 127327 - DNA, 20 bp, Artificial sequence
  SiRNA target sequence
cgggcacgagttcaaaatct

SEQ ID NO: 127328 - DNA, 20 bp, Artificial sequence
  SiRNA target sequence
gggcacgagttcaaaatcta

SEQ ID NO: 127329 - DNA, 20 bp, Artificial sequence
  SiRNA target sequence
ggcacgagttcaaaatctac

SEQ ID NO: 127330 - DNA, 20 bp, Artificial sequence
  SiRNA target sequence
gcacgagttcaaaatctaca

SEQ ID NO: 127331 - DNA, 20 bp, Artificial sequence
  SiRNA target sequence
cacgagttcaaaatctacaa

SEQ ID NO: 127332 - DNA, 20 bp, Artificial sequence
  SiRNA target sequence
acgagttcaaaatctacaaa

SEQ ID NO: 127333 - DNA, 20 bp, Artificial sequence
  SiRNA target sequence
cgagttcaaaatctacaaaa

SEQ ID NO: 127334 - DNA, 20 bp, Artificial sequence
  SiRNA target sequence
gagttcaaaatctacaaaac

SEQ ID NO: 127335 - DNA, 20 bp, Artificial sequence
  SiRNA target sequence
agttcaaaatctacaaaact

SEQ ID NO: 127336 - DNA, 20 bp, Artificial sequence
  SiRNA target sequence
gttcaaaatctacaaaactt

SEQ ID NO: 127337 - DNA, 20 bp, Artificial sequence
  SiRNA target sequence
ttcaaaatctacaaaacttt

SEQ ID NO: 127338 - DNA, 20 bp, Artificial sequence
  SiRNA target sequence
tcaaaatctacaaaactttt

SEQ ID NO: 127339 - DNA, 20 bp, Artificial sequence
  SiRNA target sequence
caaaatctacaaaacttttt

SEQ ID NO: 127340 - DNA, 20 bp, Artificial sequence
  SiRNA target sequence
aaaatctacaaaactttttc

SEQ ID NO: 127341 - DNA, 20 bp, Artificial sequence
  SiRNA target sequence
aaatctacaaaactttttca

SEQ ID NO: 127342 - DNA, 20 bp, Artificial sequence
  SiRNA target sequence
aatctacaaaactttttcat

SEQ ID NO: 127343 - DNA, 20 bp, Artificial sequence
  SiRNA target sequence
atctacaaaactttttcatg

SEQ ID NO: 127344 - DNA, 20 bp, Artificial sequence
  SiRNA target sequence
tctacaaaactttttcatgg

SEQ ID NO: 127345 - DNA, 20 bp, Artificial sequence
  SiRNA target sequence
ctacaaaactttttcatggc

SEQ ID NO: 127346 - DNA, 20 bp, Artificial sequence
  SiRNA target sequence
tacaaaactttttcatggcg

SEQ ID NO: 127347 - DNA, 20 bp, Artificial sequence
  SiRNA target sequence
acaaaactttttcatggcgg

SEQ ID NO: 127348 - DNA, 20 bp, Artificial sequence
  SiRNA target sequence
caaaactttttcatggcggt

SEQ ID NO: 127349 - DNA, 20 bp, Artificial sequence
  SiRNA target sequence
aaaactttttcatggcggtg

SEQ ID NO: 127350 - DNA, 20 bp, Artificial sequence
  SiRNA target sequence
aaactttttcatggcggtgt

SEQ ID NO: 127351 - DNA, 20 bp, Artificial sequence
  SiRNA target sequence
aactttttcatggcggtgta

SEQ ID NO: 127352 - DNA, 20 bp, Artificial sequence
  SiRNA target sequence
actttttcatggcggtgtac

SEQ ID NO: 127353 - DNA, 20 bp, Artificial sequence
  SiRNA target sequence
ctttttcatggcggtgtacg

SEQ ID NO: 127354 - DNA, 20 bp, Artificial sequence
  SiRNA target sequence
tttttcatggcggtgtacgc

SEQ ID NO: 127355 - DNA, 20 bp, Artificial sequence
  SiRNA target sequence
ttttcatggcggtgtacgct

SEQ ID NO: 127356 - DNA, 20 bp, Artificial sequence
  SiRNA target sequence
tttcatggcggtgtacgcta

SEQ ID NO: 127357 - DNA, 20 bp, Artificial sequence
  SiRNA target sequence
ttcatggcggtgtacgctac

SEQ ID NO: 127358 - DNA, 20 bp, Artificial sequence
  SiRNA target sequence
tcatggcggtgtacgctacc

SEQ ID NO: 127359 - DNA, 20 bp, Artificial sequence
  SiRNA target sequence
catggcggtgtacgctacct

SEQ ID NO: 127360 - DNA, 20 bp, Artificial sequence
  SiRNA target sequence
atggcggtgtacgctacctt

SEQ ID NO: 127361 - DNA, 20 bp, Artificial sequence
  SiRNA target sequence
tggcggtgtacgctaccttg

SEQ ID NO: 127362 - DNA, 20 bp, Artificial sequence
  SiRNA target sequence
ggcggtgtacgctaccttga

SEQ ID NO: 127363 - DNA, 20 bp, Artificial sequence
  SiRNA target sequence
gcggtgtacgctaccttgaa

SEQ ID NO: 127364 - DNA, 20 bp, Artificial sequence
  SiRNA target sequence
cggtgtacgctaccttgaaa

SEQ ID NO: 127365 - DNA, 20 bp, Artificial sequence
  SiRNA target sequence
ggtgtacgctaccttgaaaa

SEQ ID NO: 127366 - DNA, 20 bp, Artificial sequence
  SiRNA target sequence
gtgtacgctaccttgaaaaa

SEQ ID NO: 127367 - DNA, 20 bp, Artificial sequence
  SiRNA target sequence
tgtacgctaccttgaaaaag

SEQ ID NO: 127368 - DNA, 20 bp, Artificial sequence
  SiRNA target sequence
gtacgctaccttgaaaaagc

SEQ ID NO: 127369 - DNA, 20 bp, Artificial sequence
  SiRNA target sequence
tacgctaccttgaaaaagct

SEQ ID NO: 127370 - DNA, 20 bp, Artificial sequence
  SiRNA target sequence
acgctaccttgaaaaagctg

SEQ ID NO: 127371 - DNA, 20 bp, Artificial sequence
  SiRNA target sequence
cgctaccttgaaaaagctgt

SEQ ID NO: 127372 - DNA, 20 bp, Artificial sequence
  SiRNA target sequence
gctaccttgaaaaagctgtt

SEQ ID NO: 127373 - DNA, 20 bp, Artificial sequence
  SiRNA target sequence
ctaccttgaaaaagctgtta

SEQ ID NO: 127374 - DNA, 20 bp, Artificial sequence
  SiRNA target sequence
taccttgaaaaagctgttaa

SEQ ID NO: 127375 - DNA, 20 bp, Artificial sequence
  SiRNA target sequence
accttgaaaaagctgttaat

SEQ ID NO: 127376 - DNA, 20 bp, Artificial sequence
  SiRNA target sequence
ccttgaaaaagctgttaatg

SEQ ID NO: 127377 - DNA, 20 bp, Artificial sequence
  SiRNA target sequence
cttgaaaaagctgttaatga

SEQ ID NO: 127378 - DNA, 20 bp, Artificial sequence
  SiRNA target sequence
ttgaaaaagctgttaatgat

SEQ ID NO: 127379 - DNA, 20 bp, Artificial sequence
  SiRNA target sequence
tgaaaaagctgttaatgatt

SEQ ID NO: 127380 - DNA, 20 bp, Artificial sequence
  SiRNA target sequence
gaaaaagctgttaatgattt

SEQ ID NO: 127381 - DNA, 20 bp, Artificial sequence
  SiRNA target sequence
aaaaagctgttaatgattta

SEQ ID NO: 127382 - DNA, 20 bp, Artificial sequence
  SiRNA target sequence
aaaagctgttaatgatttag

SEQ ID NO: 127383 - DNA, 20 bp, Artificial sequence
  SiRNA target sequence
aaagctgttaatgatttaga

SEQ ID NO: 127384 - DNA, 20 bp, Artificial sequence
  SiRNA target sequence
aagctgttaatgatttagat

SEQ ID NO: 127385 - DNA, 20 bp, Artificial sequence
  SiRNA target sequence
agctgttaatgatttagata

SEQ ID NO: 127386 - DNA, 20 bp, Artificial sequence
  SiRNA target sequence
gctgttaatgatttagatag

SEQ ID NO: 127387 - DNA, 20 bp, Artificial sequence
  SiRNA target sequence
ctgttaatgatttagataga

SEQ ID NO: 127388 - DNA, 20 bp, Artificial sequence
  SiRNA target sequence
tgttaatgatttagatagat

SEQ ID NO: 127389 - DNA, 20 bp, Artificial sequence
  SiRNA target sequence
gttaatgatttagatagatc

SEQ ID NO: 127390 - DNA, 20 bp, Artificial sequence
  SiRNA target sequence
ttaatgatttagatagatct

SEQ ID NO: 127391 - DNA, 20 bp, Artificial sequence
  SiRNA target sequence
taatgatttagatagatctc

SEQ ID NO: 127392 - DNA, 20 bp, Artificial sequence
  SiRNA target sequence
aatgatttagatagatctca

SEQ ID NO: 127393 - DNA, 20 bp, Artificial sequence
  SiRNA target sequence
atgatttagatagatctcag

SEQ ID NO: 127394 - DNA, 20 bp, Artificial sequence
  SiRNA target sequence
tgatttagatagatctcagt

SEQ ID NO: 127395 - DNA, 20 bp, Artificial sequence
  SiRNA target sequence
gatttagatagatctcagtt

SEQ ID NO: 127396 - DNA, 20 bp, Artificial sequence
  SiRNA target sequence
atttagatagatctcagttt

SEQ ID NO: 127397 - DNA, 20 bp, Artificial sequence
  SiRNA target sequence
tttagatagatctcagtttg

SEQ ID NO: 127398 - DNA, 20 bp, Artificial sequence
  SiRNA target sequence
ttagatagatctcagtttga

SEQ ID NO: 127399 - DNA, 20 bp, Artificial sequence
  SiRNA target sequence
tagatagatctcagtttgac

SEQ ID NO: 127400 - DNA, 20 bp, Artificial sequence
  SiRNA target sequence
agatagatctcagtttgact

SEQ ID NO: 127401 - DNA, 20 bp, Artificial sequence
  SiRNA target sequence
gatagatctcagtttgactt

SEQ ID NO: 127402 - DNA, 20 bp, Artificial sequence
  SiRNA target sequence
atagatctcagtttgacttg

SEQ ID NO: 127403 - DNA, 20 bp, Artificial sequence
  SiRNA target sequence
tagatctcagtttgacttgg

SEQ ID NO: 127404 - DNA, 20 bp, Artificial sequence
  SiRNA target sequence
agatctcagtttgacttggt

SEQ ID NO: 127405 - DNA, 20 bp, Artificial sequence
  SiRNA target sequence
gatctcagtttgacttggta

SEQ ID NO: 127406 - DNA, 20 bp, Artificial sequence
  SiRNA target sequence
atctcagtttgacttggtat

SEQ ID NO: 127407 - DNA, 20 bp, Artificial sequence
  SiRNA target sequence
tctcagtttgacttggtatc

SEQ ID NO: 127408 - DNA, 20 bp, Artificial sequence
  SiRNA target sequence
ctcagtttgacttggtatct

SEQ ID NO: 127409 - DNA, 20 bp, Artificial sequence
  SiRNA target sequence
tcagtttgacttggtatctg

SEQ ID NO: 127410 - DNA, 20 bp, Artificial sequence
  SiRNA target sequence
cagtttgacttggtatctga

SEQ ID NO: 127411 - DNA, 20 bp, Artificial sequence
  SiRNA target sequence
agtttgacttggtatctgaa

SEQ ID NO: 127412 - DNA, 20 bp, Artificial sequence
  SiRNA target sequence
gtttgacttggtatctgaag

SEQ ID NO: 127413 - DNA, 20 bp, Artificial sequence
  SiRNA target sequence
tttgacttggtatctgaagc

SEQ ID NO: 127414 - DNA, 20 bp, Artificial sequence
  SiRNA target sequence
ttgacttggtatctgaagca

SEQ ID NO: 127415 - DNA, 20 bp, Artificial sequence
  SiRNA target sequence
tgacttggtatctgaagcat

SEQ ID NO: 127416 - DNA, 20 bp, Artificial sequence
  SiRNA target sequence
gacttggtatctgaagcatt

SEQ ID NO: 127417 - DNA, 20 bp, Artificial sequence
  SiRNA target sequence
acttggtatctgaagcatta

SEQ ID NO: 127418 - DNA, 20 bp, Artificial sequence
  SiRNA target sequence
cttggtatctgaagcattaa

SEQ ID NO: 127419 - DNA, 20 bp, Artificial sequence
  SiRNA target sequence
ttggtatctgaagcattaag

SEQ ID NO: 127420 - DNA, 20 bp, Artificial sequence
  SiRNA target sequence
tggtatctgaagcattaagt

SEQ ID NO: 127421 - DNA, 20 bp, Artificial sequence
  SiRNA target sequence
ggtatctgaagcattaagtg

SEQ ID NO: 127422 - DNA, 20 bp, Artificial sequence
  SiRNA target sequence
gtatctgaagcattaagtga

SEQ ID NO: 127423 - DNA, 20 bp, Artificial sequence
  SiRNA target sequence
tatctgaagcattaagtgaa

SEQ ID NO: 127424 - DNA, 20 bp, Artificial sequence
  SiRNA target sequence
atctgaagcattaagtgaac

SEQ ID NO: 127425 - DNA, 20 bp, Artificial sequence
  SiRNA target sequence
tctgaagcattaagtgaacg

SEQ ID NO: 127426 - DNA, 20 bp, Artificial sequence
  SiRNA target sequence
ctgaagcattaagtgaacga

SEQ ID NO: 127427 - DNA, 20 bp, Artificial sequence
  SiRNA target sequence
tgaagcattaagtgaacgaa

SEQ ID NO: 127428 - DNA, 20 bp, Artificial sequence
  SiRNA target sequence
gaagcattaagtgaacgaaa

SEQ ID NO: 127429 - DNA, 20 bp, Artificial sequence
  SiRNA target sequence
aagcattaagtgaacgaaaa

SEQ ID NO: 127430 - DNA, 20 bp, Artificial sequence
  SiRNA target sequence
agcattaagtgaacgaaaaa

SEQ ID NO: 127431 - DNA, 20 bp, Artificial sequence
  SiRNA target sequence
gcattaagtgaacgaaaaat

SEQ ID NO: 127432 - DNA, 20 bp, Artificial sequence
  SiRNA target sequence
cattaagtgaacgaaaaatt

SEQ ID NO: 127433 - DNA, 20 bp, Artificial sequence
  SiRNA target sequence
attaagtgaacgaaaaattg

SEQ ID NO: 127434 - DNA, 20 bp, Artificial sequence
  SiRNA target sequence
ttaagtgaacgaaaaattgt

SEQ ID NO: 127435 - DNA, 20 bp, Artificial sequence
  SiRNA target sequence
taagtgaacgaaaaattgtt

SEQ ID NO: 127436 - DNA, 20 bp, Artificial sequence
  SiRNA target sequence
aagtgaacgaaaaattgtta

SEQ ID NO: 127437 - DNA, 20 bp, Artificial sequence
  SiRNA target sequence
agtgaacgaaaaattgttat

SEQ ID NO: 127438 - DNA, 20 bp, Artificial sequence
  SiRNA target sequence
gtgaacgaaaaattgttatg

SEQ ID NO: 127439 - DNA, 20 bp, Artificial sequence
  SiRNA target sequence
tgaacgaaaaattgttatga

SEQ ID NO: 127440 - DNA, 20 bp, Artificial sequence
  SiRNA target sequence
gaacgaaaaattgttatgaa

SEQ ID NO: 127441 - DNA, 20 bp, Artificial sequence
  SiRNA target sequence
aacgaaaaattgttatgaat

SEQ ID NO: 127442 - DNA, 20 bp, Artificial sequence
  SiRNA target sequence
acgaaaaattgttatgaata

SEQ ID NO: 127443 - DNA, 20 bp, Artificial sequence
  SiRNA target sequence
cgaaaaattgttatgaatat

SEQ ID NO: 127444 - DNA, 20 bp, Artificial sequence
  SiRNA target sequence
gaaaaattgttatgaatatg

SEQ ID NO: 127445 - DNA, 20 bp, Artificial sequence
  SiRNA target sequence
aaaaattgttatgaatatgt

SEQ ID NO: 127446 - DNA, 20 bp, Artificial sequence
  SiRNA target sequence
aaaattgttatgaatatgtg

SEQ ID NO: 127447 - DNA, 20 bp, Artificial sequence
  SiRNA target sequence
aaattgttatgaatatgtgt

SEQ ID NO: 127448 - DNA, 20 bp, Artificial sequence
  SiRNA target sequence
aattgttatgaatatgtgtc

SEQ ID NO: 127449 - DNA, 20 bp, Artificial sequence
  SiRNA target sequence
attgttatgaatatgtgtcc

SEQ ID NO: 127450 - DNA, 20 bp, Artificial sequence
  SiRNA target sequence
ttgttatgaatatgtgtcct

SEQ ID NO: 127451 - DNA, 20 bp, Artificial sequence
  SiRNA target sequence
tgttatgaatatgtgtcctt

SEQ ID NO: 127452 - DNA, 20 bp, Artificial sequence
  SiRNA target sequence
gttatgaatatgtgtccttt

SEQ ID NO: 127453 - DNA, 20 bp, Artificial sequence
  SiRNA target sequence
ttatgaatatgtgtcctttt

SEQ ID NO: 127454 - DNA, 20 bp, Artificial sequence
  SiRNA target sequence
tatgaatatgtgtccttttc

SEQ ID NO: 127455 - DNA, 20 bp, Artificial sequence
  SiRNA target sequence
atgaatatgtgtccttttct

SEQ ID NO: 127456 - DNA, 20 bp, Artificial sequence
  SiRNA target sequence
tgaatatgtgtccttttcta

SEQ ID NO: 127457 - DNA, 20 bp, Artificial sequence
  SiRNA target sequence
gaatatgtgtccttttctag

SEQ ID NO: 127458 - DNA, 20 bp, Artificial sequence
  SiRNA target sequence
aatatgtgtccttttctagt

SEQ ID NO: 127459 - DNA, 20 bp, Artificial sequence
  SiRNA target sequence
atatgtgtccttttctagta

SEQ ID NO: 127460 - DNA, 20 bp, Artificial sequence
  SiRNA target sequence
tatgtgtccttttctagtaa

SEQ ID NO: 127461 - DNA, 20 bp, Artificial sequence
  SiRNA target sequence
atgtgtccttttctagtaag

SEQ ID NO: 127462 - DNA, 20 bp, Artificial sequence
  SiRNA target sequence
tgtgtccttttctagtaagg

SEQ ID NO: 127463 - DNA, 20 bp, Artificial sequence
  SiRNA target sequence
gtgtccttttctagtaaggt

SEQ ID NO: 127464 - DNA, 20 bp, Artificial sequence
  SiRNA target sequence
tgtccttttctagtaaggtc

SEQ ID NO: 127465 - DNA, 20 bp, Artificial sequence
  SiRNA target sequence
gtccttttctagtaaggtcg

SEQ ID NO: 127466 - DNA, 20 bp, Artificial sequence
  SiRNA target sequence
tccttttctagtaaggtcga

SEQ ID NO: 127467 - DNA, 20 bp, Artificial sequence
  SiRNA target sequence
ccttttctagtaaggtcgat

SEQ ID NO: 127468 - DNA, 20 bp, Artificial sequence
  SiRNA target sequence
cttttctagtaaggtcgatg

SEQ ID NO: 127469 - DNA, 20 bp, Artificial sequence
  SiRNA target sequence
ttttctagtaaggtcgatgg

SEQ ID NO: 127470 - DNA, 20 bp, Artificial sequence
  SiRNA target sequence
tttctagtaaggtcgatgga

SEQ ID NO: 127471 - DNA, 20 bp, Artificial sequence
  SiRNA target sequence
ttctagtaaggtcgatggaa

SEQ ID NO: 127472 - DNA, 20 bp, Artificial sequence
  SiRNA target sequence
tctagtaaggtcgatggaaa

SEQ ID NO: 127473 - DNA, 20 bp, Artificial sequence
  SiRNA target sequence
ctagtaaggtcgatggaaat

SEQ ID NO: 127474 - DNA, 20 bp, Artificial sequence
  SiRNA target sequence
tagtaaggtcgatggaaata

SEQ ID NO: 127475 - DNA, 20 bp, Artificial sequence
  SiRNA target sequence
agtaaggtcgatggaaatat

SEQ ID NO: 127476 - DNA, 20 bp, Artificial sequence
  SiRNA target sequence
gtaaggtcgatggaaatatt

SEQ ID NO: 127477 - DNA, 20 bp, Artificial sequence
  SiRNA target sequence
taaggtcgatggaaatatta

SEQ ID NO: 127478 - DNA, 20 bp, Artificial sequence
  SiRNA target sequence
aaggtcgatggaaatattat

SEQ ID NO: 127479 - DNA, 20 bp, Artificial sequence
  SiRNA target sequence
aggtcgatggaaatattatt

SEQ ID NO: 127480 - DNA, 20 bp, Artificial sequence
  SiRNA target sequence
ggtcgatggaaatattattt

SEQ ID NO: 127481 - DNA, 20 bp, Artificial sequence
  SiRNA target sequence
gtcgatggaaatattatttc

SEQ ID NO: 127482 - DNA, 20 bp, Artificial sequence
  SiRNA target sequence
tcgatggaaatattatttcc

SEQ ID NO: 127483 - DNA, 20 bp, Artificial sequence
  SiRNA target sequence
cgatggaaatattatttccg

SEQ ID NO: 127484 - DNA, 20 bp, Artificial sequence
  SiRNA target sequence
gatggaaatattatttccgg

SEQ ID NO: 127485 - DNA, 20 bp, Artificial sequence
  SiRNA target sequence
atggaaatattatttccggt

SEQ ID NO: 127486 - DNA, 20 bp, Artificial sequence
  SiRNA target sequence
tggaaatattatttccggtt

SEQ ID NO: 127487 - DNA, 20 bp, Artificial sequence
  SiRNA target sequence
ggaaatattatttccggttt

SEQ ID NO: 127488 - DNA, 20 bp, Artificial sequence
  SiRNA target sequence
gaaatattatttccggttta

SEQ ID NO: 127489 - DNA, 20 bp, Artificial sequence
  SiRNA target sequence
aaatattatttccggtttat

SEQ ID NO: 127490 - DNA, 20 bp, Artificial sequence
  SiRNA target sequence
aatattatttccggtttata

SEQ ID NO: 127491 - DNA, 20 bp, Artificial sequence
  SiRNA target sequence
atattatttccggtttataa

SEQ ID NO: 127492 - DNA, 20 bp, Artificial sequence
  SiRNA target sequence
tattatttccggtttataaa

SEQ ID NO: 127493 - DNA, 20 bp, Artificial sequence
  SiRNA target sequence
attatttccggtttataaaa

SEQ ID NO: 127494 - DNA, 20 bp, Artificial sequence
  SiRNA target sequence
ttatttccggtttataaaag

SEQ ID NO: 127495 - DNA, 20 bp, Artificial sequence
  SiRNA target sequence
tatttccggtttataaaagg

SEQ ID NO: 127496 - DNA, 20 bp, Artificial sequence
  SiRNA target sequence
atttccggtttataaaaggc

SEQ ID NO: 127497 - DNA, 20 bp, Artificial sequence
  SiRNA target sequence
tttccggtttataaaaggct

SEQ ID NO: 127498 - DNA, 20 bp, Artificial sequence
  SiRNA target sequence
ttccggtttataaaaggctt

SEQ ID NO: 127499 - DNA, 20 bp, Artificial sequence
  SiRNA target sequence
tccggtttataaaaggcttt

SEQ ID NO: 127500 - DNA, 20 bp, Artificial sequence
  SiRNA target sequence
ccggtttataaaaggctttt

SEQ ID NO: 127501 - DNA, 20 bp, Artificial sequence
  SiRNA target sequence
cggtttataaaaggctttta

SEQ ID NO: 127502 - DNA, 20 bp, Artificial sequence
  SiRNA target sequence
ggtttataaaaggcttttaa

SEQ ID NO: 127503 - DNA, 20 bp, Artificial sequence
  SiRNA target sequence
gtttataaaaggcttttaat

SEQ ID NO: 127504 - DNA, 20 bp, Artificial sequence
  SiRNA target sequence
tttataaaaggcttttaatt

SEQ ID NO: 127505 - DNA, 20 bp, Artificial sequence
  SiRNA target sequence
ttataaaaggcttttaattc

SEQ ID NO: 127506 - DNA, 20 bp, Artificial sequence
  SiRNA target sequence
tataaaaggcttttaattcc

SEQ ID NO: 127507 - DNA, 20 bp, Artificial sequence
  SiRNA target sequence
ataaaaggcttttaattcct

SEQ ID NO: 127508 - DNA, 20 bp, Artificial sequence
  SiRNA target sequence
taaaaggcttttaattcctt

SEQ ID NO: 127509 - DNA, 20 bp, Artificial sequence
  SiRNA target sequence
aaaaggcttttaattcctta

SEQ ID NO: 127510 - DNA, 20 bp, Artificial sequence
  SiRNA target sequence
aaaggcttttaattccttac

SEQ ID NO: 127511 - DNA, 20 bp, Artificial sequence
  SiRNA target sequence
aaggcttttaattccttact

SEQ ID NO: 127512 - DNA, 20 bp, Artificial sequence
  SiRNA target sequence
aggcttttaattccttacta

SEQ ID NO: 127513 - DNA, 20 bp, Artificial sequence
  SiRNA target sequence
ggcttttaattccttactac

SEQ ID NO: 127514 - DNA, 20 bp, Artificial sequence
  SiRNA target sequence
gcttttaattccttactact

SEQ ID NO: 127515 - DNA, 20 bp, Artificial sequence
  SiRNA target sequence
cttttaattccttactacta

SEQ ID NO: 127516 - DNA, 20 bp, Artificial sequence
  SiRNA target sequence
ttttaattccttactactat

SEQ ID NO: 127517 - DNA, 20 bp, Artificial sequence
  SiRNA target sequence
tttaattccttactactata

SEQ ID NO: 127518 - DNA, 20 bp, Artificial sequence
  SiRNA target sequence
ttaattccttactactatat

SEQ ID NO: 127519 - DNA, 20 bp, Artificial sequence
  SiRNA target sequence
taattccttactactatatt

SEQ ID NO: 127520 - DNA, 20 bp, Artificial sequence
  SiRNA target sequence
aattccttactactatattg

SEQ ID NO: 127521 - DNA, 20 bp, Artificial sequence
  SiRNA target sequence
attccttactactatattgg

SEQ ID NO: 127522 - DNA, 20 bp, Artificial sequence
  SiRNA target sequence
ttccttactactatattggc

SEQ ID NO: 127523 - DNA, 20 bp, Artificial sequence
  SiRNA target sequence
tccttactactatattggcc

SEQ ID NO: 127524 - DNA, 20 bp, Artificial sequence
  SiRNA target sequence
ccttactactatattggcct

SEQ ID NO: 127525 - DNA, 20 bp, Artificial sequence
  SiRNA target sequence
cttactactatattggcctt

SEQ ID NO: 127526 - DNA, 20 bp, Artificial sequence
  SiRNA target sequence
ttactactatattggcctta

SEQ ID NO: 127527 - DNA, 20 bp, Artificial sequence
  SiRNA target sequence
tactactatattggccttaa

SEQ ID NO: 127528 - DNA, 20 bp, Artificial sequence
  SiRNA target sequence
actactatattggccttaaa

SEQ ID NO: 127529 - DNA, 20 bp, Artificial sequence
  SiRNA target sequence
ctactatattggccttaaat

SEQ ID NO: 127530 - DNA, 20 bp, Artificial sequence
  SiRNA target sequence
tactatattggccttaaatt

SEQ ID NO: 127531 - DNA, 20 bp, Artificial sequence
  SiRNA target sequence
actatattggccttaaattt

SEQ ID NO: 127532 - DNA, 20 bp, Artificial sequence
  SiRNA target sequence
ctatattggccttaaatttt

SEQ ID NO: 127533 - DNA, 20 bp, Artificial sequence
  SiRNA target sequence
tatattggccttaaatttta

SEQ ID NO: 127534 - DNA, 20 bp, Artificial sequence
  SiRNA target sequence
atattggccttaaattttat

SEQ ID NO: 127535 - DNA, 20 bp, Artificial sequence
  SiRNA target sequence
tattggccttaaattttatg

SEQ ID NO: 127536 - DNA, 20 bp, Artificial sequence
  SiRNA target sequence
attggccttaaattttatga

SEQ ID NO: 127537 - DNA, 20 bp, Artificial sequence
  SiRNA target sequence
ttggccttaaattttatgat

SEQ ID NO: 127538 - DNA, 20 bp, Artificial sequence
  SiRNA target sequence
tggccttaaattttatgatt

SEQ ID NO: 127539 - DNA, 20 bp, Artificial sequence
  SiRNA target sequence
ggccttaaattttatgattg

SEQ ID NO: 127540 - DNA, 20 bp, Artificial sequence
  SiRNA target sequence
gccttaaattttatgattgg

SEQ ID NO: 127541 - DNA, 20 bp, Artificial sequence
  SiRNA target sequence
ccttaaattttatgattgga

SEQ ID NO: 127542 - DNA, 20 bp, Artificial sequence
  SiRNA target sequence
cttaaattttatgattggat

SEQ ID NO: 127543 - DNA, 20 bp, Artificial sequence
  SiRNA target sequence
ttaaattttatgattggatt

SEQ ID NO: 127544 - DNA, 20 bp, Artificial sequence
  SiRNA target sequence
taaattttatgattggattt

SEQ ID NO: 127545 - DNA, 20 bp, Artificial sequence
  SiRNA target sequence
aaattttatgattggatttc

SEQ ID NO: 127546 - DNA, 20 bp, Artificial sequence
  SiRNA target sequence
aattttatgattggatttct

SEQ ID NO: 127547 - DNA, 20 bp, Artificial sequence
  SiRNA target sequence
attttatgattggatttctg

SEQ ID NO: 127548 - DNA, 20 bp, Artificial sequence
  SiRNA target sequence
ttttatgattggatttctgg

SEQ ID NO: 127549 - DNA, 20 bp, Artificial sequence
  SiRNA target sequence
tttatgattggatttctggg

SEQ ID NO: 127550 - DNA, 20 bp, Artificial sequence
  SiRNA target sequence
ttatgattggatttctgggc

SEQ ID NO: 127551 - DNA, 20 bp, Artificial sequence
  SiRNA target sequence
tatgattggatttctgggca

SEQ ID NO: 127552 - DNA, 20 bp, Artificial sequence
  SiRNA target sequence
atgattggatttctgggcaa

SEQ ID NO: 127553 - DNA, 20 bp, Artificial sequence
  SiRNA target sequence
tgattggatttctgggcaac

SEQ ID NO: 127554 - DNA, 20 bp, Artificial sequence
  SiRNA target sequence
gattggatttctgggcaacg

SEQ ID NO: 127555 - DNA, 20 bp, Artificial sequence
  SiRNA target sequence
attggatttctgggcaacgg

SEQ ID NO: 127556 - DNA, 20 bp, Artificial sequence
  SiRNA target sequence
ttggatttctgggcaacggt

SEQ ID NO: 127557 - DNA, 20 bp, Artificial sequence
  SiRNA target sequence
tggatttctgggcaacggtc

SEQ ID NO: 127558 - DNA, 20 bp, Artificial sequence
  SiRNA target sequence
ggatttctgggcaacggtcc

SEQ ID NO: 127559 - DNA, 20 bp, Artificial sequence
  SiRNA target sequence
gatttctgggcaacggtccc

SEQ ID NO: 127560 - DNA, 20 bp, Artificial sequence
  SiRNA target sequence
atttctgggcaacggtccct

SEQ ID NO: 127561 - DNA, 20 bp, Artificial sequence
  SiRNA target sequence
tttctgggcaacggtccctt

SEQ ID NO: 127562 - DNA, 20 bp, Artificial sequence
  SiRNA target sequence
ttctgggcaacggtcccttg

SEQ ID NO: 127563 - DNA, 20 bp, Artificial sequence
  SiRNA target sequence
tctgggcaacggtcccttgg

SEQ ID NO: 127564 - DNA, 20 bp, Artificial sequence
  SiRNA target sequence
ctgggcaacggtcccttggg

SEQ ID NO: 127565 - DNA, 20 bp, Artificial sequence
  SiRNA target sequence
tgggcaacggtcccttgggc

SEQ ID NO: 127566 - DNA, 20 bp, Artificial sequence
  SiRNA target sequence
gggcaacggtcccttgggcg

SEQ ID NO: 127567 - DNA, 20 bp, Artificial sequence
  SiRNA target sequence
ggcaacggtcccttgggcga

SEQ ID NO: 127568 - DNA, 20 bp, Artificial sequence
  SiRNA target sequence
gcaacggtcccttgggcgaa

SEQ ID NO: 127569 - DNA, 20 bp, Artificial sequence
  SiRNA target sequence
caacggtcccttgggcgaag

SEQ ID NO: 127570 - DNA, 20 bp, Artificial sequence
  SiRNA target sequence
aacggtcccttgggcgaagt

SEQ ID NO: 127571 - DNA, 20 bp, Artificial sequence
  SiRNA target sequence
acggtcccttgggcgaagta

SEQ ID NO: 127572 - DNA, 20 bp, Artificial sequence
  SiRNA target sequence
cggtcccttgggcgaagtaa

SEQ ID NO: 127573 - DNA, 20 bp, Artificial sequence
  SiRNA target sequence
ggtcccttgggcgaagtaaa

SEQ ID NO: 127574 - DNA, 20 bp, Artificial sequence
  SiRNA target sequence
gtcccttgggcgaagtaaat

SEQ ID NO: 127575 - DNA, 20 bp, Artificial sequence
  SiRNA target sequence
tcccttgggcgaagtaaatt

SEQ ID NO: 127576 - DNA, 20 bp, Artificial sequence
  SiRNA target sequence
cccttgggcgaagtaaattt

SEQ ID NO: 127577 - DNA, 20 bp, Artificial sequence
  SiRNA target sequence
ccttgggcgaagtaaatttt

SEQ ID NO: 127578 - DNA, 20 bp, Artificial sequence
  SiRNA target sequence
cttgggcgaagtaaattttt

SEQ ID NO: 127579 - DNA, 20 bp, Artificial sequence
  SiRNA target sequence
ttgggcgaagtaaatttttg

SEQ ID NO: 127580 - DNA, 20 bp, Artificial sequence
  SiRNA target sequence
tgggcgaagtaaatttttgt

SEQ ID NO: 127581 - DNA, 20 bp, Artificial sequence
  SiRNA target sequence
gggcgaagtaaatttttgtc

SEQ ID NO: 127582 - DNA, 20 bp, Artificial sequence
  SiRNA target sequence
ggcgaagtaaatttttgtcg

SEQ ID NO: 127583 - DNA, 20 bp, Artificial sequence
  SiRNA target sequence
gcgaagtaaatttttgtcgc

SEQ ID NO: 127584 - DNA, 20 bp, Artificial sequence
  SiRNA target sequence
cgaagtaaatttttgtcgcg

SEQ ID NO: 127585 - DNA, 20 bp, Artificial sequence
  SiRNA target sequence
gaagtaaatttttgtcgcgg

SEQ ID NO: 127586 - DNA, 20 bp, Artificial sequence
  SiRNA target sequence
aagtaaatttttgtcgcggc

SEQ ID NO: 127587 - DNA, 20 bp, Artificial sequence
  SiRNA target sequence
agtaaatttttgtcgcggca

SEQ ID NO: 127588 - DNA, 20 bp, Artificial sequence
  SiRNA target sequence
gtaaatttttgtcgcggcaa

SEQ ID NO: 127589 - DNA, 20 bp, Artificial sequence
  SiRNA target sequence
taaatttttgtcgcggcaac

SEQ ID NO: 127590 - DNA, 20 bp, Artificial sequence
  SiRNA target sequence
aaatttttgtcgcggcaaca

SEQ ID NO: 127591 - DNA, 20 bp, Artificial sequence
  SiRNA target sequence
aatttttgtcgcggcaacaa

SEQ ID NO: 127592 - DNA, 20 bp, Artificial sequence
  SiRNA target sequence
atttttgtcgcggcaacaaa

SEQ ID NO: 127593 - DNA, 20 bp, Artificial sequence
  SiRNA target sequence
tttttgtcgcggcaacaaac

SEQ ID NO: 127594 - DNA, 20 bp, Artificial sequence
  SiRNA target sequence
ttttgtcgcggcaacaaact

SEQ ID NO: 127595 - DNA, 20 bp, Artificial sequence
  SiRNA target sequence
tttgtcgcggcaacaaacta

SEQ ID NO: 127596 - DNA, 20 bp, Artificial sequence
  SiRNA target sequence
ttgtcgcggcaacaaactat

SEQ ID NO: 127597 - DNA, 20 bp, Artificial sequence
  SiRNA target sequence
tgtcgcggcaacaaactatt

SEQ ID NO: 127598 - DNA, 20 bp, Artificial sequence
  SiRNA target sequence
gtcgcggcaacaaactatta

SEQ ID NO: 127599 - DNA, 20 bp, Artificial sequence
  SiRNA target sequence
tcgcggcaacaaactattac

SEQ ID NO: 127600 - DNA, 20 bp, Artificial sequence
  SiRNA target sequence
cgcggcaacaaactattaca

SEQ ID NO: 127601 - DNA, 20 bp, Artificial sequence
  SiRNA target sequence
gcggcaacaaactattacaa

SEQ ID NO: 127602 - DNA, 20 bp, Artificial sequence
  SiRNA target sequence
cggcaacaaactattacaaa

SEQ ID NO: 127603 - DNA, 20 bp, Artificial sequence
  SiRNA target sequence
ggcaacaaactattacaaaa

SEQ ID NO: 127604 - DNA, 20 bp, Artificial sequence
  SiRNA target sequence
gcaacaaactattacaaaat

SEQ ID NO: 127605 - DNA, 20 bp, Artificial sequence
  SiRNA target sequence
caacaaactattacaaaatt

SEQ ID NO: 127606 - DNA, 20 bp, Artificial sequence
  SiRNA target sequence
aacaaactattacaaaattt

SEQ ID NO: 127607 - DNA, 20 bp, Artificial sequence
  SiRNA target sequence
acaaactattacaaaatttc

SEQ ID NO: 127608 - DNA, 20 bp, Artificial sequence
  SiRNA target sequence
caaactattacaaaatttcc

SEQ ID NO: 127609 - DNA, 20 bp, Artificial sequence
  SiRNA target sequence
aaactattacaaaatttcct

SEQ ID NO: 127610 - DNA, 20 bp, Artificial sequence
  SiRNA target sequence
aactattacaaaatttccta

SEQ ID NO: 127611 - DNA, 20 bp, Artificial sequence
  SiRNA target sequence
actattacaaaatttcctaa

SEQ ID NO: 127612 - DNA, 20 bp, Artificial sequence
  SiRNA target sequence
ctattacaaaatttcctaat

SEQ ID NO: 127613 - DNA, 20 bp, Artificial sequence
  SiRNA target sequence
tattacaaaatttcctaatg

SEQ ID NO: 127614 - DNA, 20 bp, Artificial sequence
  SiRNA target sequence
attacaaaatttcctaatgt

SEQ ID NO: 127615 - DNA, 20 bp, Artificial sequence
  SiRNA target sequence
ttacaaaatttcctaatgtg

SEQ ID NO: 127616 - DNA, 20 bp, Artificial sequence
  SiRNA target sequence
tacaaaatttcctaatgtga

SEQ ID NO: 127617 - DNA, 20 bp, Artificial sequence
  SiRNA target sequence
acaaaatttcctaatgtgag

SEQ ID NO: 127618 - DNA, 20 bp, Artificial sequence
  SiRNA target sequence
caaaatttcctaatgtgaga

SEQ ID NO: 127619 - DNA, 20 bp, Artificial sequence
  SiRNA target sequence
aaaatttcctaatgtgagaa

SEQ ID NO: 127620 - DNA, 20 bp, Artificial sequence
  SiRNA target sequence
aaatttcctaatgtgagaaa

SEQ ID NO: 127621 - DNA, 20 bp, Artificial sequence
  SiRNA target sequence
aatttcctaatgtgagaaaa

SEQ ID NO: 127622 - DNA, 20 bp, Artificial sequence
  SiRNA target sequence
atttcctaatgtgagaaaaa

SEQ ID NO: 127623 - DNA, 20 bp, Artificial sequence
  SiRNA target sequence
tttcctaatgtgagaaaaat

SEQ ID NO: 127624 - DNA, 20 bp, Artificial sequence
  SiRNA target sequence
ttcctaatgtgagaaaaatc

SEQ ID NO: 127625 - DNA, 20 bp, Artificial sequence
  SiRNA target sequence
tcctaatgtgagaaaaatcg

SEQ ID NO: 127626 - DNA, 20 bp, Artificial sequence
  SiRNA target sequence
cctaatgtgagaaaaatcga

SEQ ID NO: 127627 - DNA, 20 bp, Artificial sequence
  SiRNA target sequence
ctaatgtgagaaaaatcgac

SEQ ID NO: 127628 - DNA, 20 bp, Artificial sequence
  SiRNA target sequence
taatgtgagaaaaatcgacc

SEQ ID NO: 127629 - DNA, 20 bp, Artificial sequence
  SiRNA target sequence
aatgtgagaaaaatcgacct

SEQ ID NO: 127630 - DNA, 20 bp, Artificial sequence
  SiRNA target sequence
atgtgagaaaaatcgacctt

SEQ ID NO: 127631 - DNA, 20 bp, Artificial sequence
  SiRNA target sequence
tgtgagaaaaatcgaccttg

SEQ ID NO: 127632 - DNA, 20 bp, Artificial sequence
  SiRNA target sequence
gtgagaaaaatcgaccttgt

SEQ ID NO: 127633 - DNA, 20 bp, Artificial sequence
  SiRNA target sequence
tgagaaaaatcgaccttgta

SEQ ID NO: 127634 - DNA, 20 bp, Artificial sequence
  SiRNA target sequence
gagaaaaatcgaccttgtag

SEQ ID NO: 127635 - DNA, 20 bp, Artificial sequence
  SiRNA target sequence
agaaaaatcgaccttgtagg

SEQ ID NO: 127636 - DNA, 20 bp, Artificial sequence
  SiRNA target sequence
gaaaaatcgaccttgtagga

SEQ ID NO: 127637 - DNA, 20 bp, Artificial sequence
  SiRNA target sequence
aaaaatcgaccttgtaggat

SEQ ID NO: 127638 - DNA, 20 bp, Artificial sequence
  SiRNA target sequence
aaaatcgaccttgtaggatc

SEQ ID NO: 127639 - DNA, 20 bp, Artificial sequence
  SiRNA target sequence
aaatcgaccttgtaggatcc

SEQ ID NO: 127640 - DNA, 20 bp, Artificial sequence
  SiRNA target sequence
aatcgaccttgtaggatccg

SEQ ID NO: 127641 - DNA, 20 bp, Artificial sequence
  SiRNA target sequence
atcgaccttgtaggatccgt

SEQ ID NO: 127642 - DNA, 20 bp, Artificial sequence
  SiRNA target sequence
tcgaccttgtaggatccgtt

SEQ ID NO: 127643 - DNA, 20 bp, Artificial sequence
  SiRNA target sequence
cgaccttgtaggatccgttt

SEQ ID NO: 127644 - DNA, 20 bp, Artificial sequence
  SiRNA target sequence
gaccttgtaggatccgtttc

SEQ ID NO: 127645 - DNA, 20 bp, Artificial sequence
  SiRNA target sequence
accttgtaggatccgtttcg

SEQ ID NO: 127646 - DNA, 20 bp, Artificial sequence
  SiRNA target sequence
ccttgtaggatccgtttcgt

SEQ ID NO: 127647 - DNA, 20 bp, Artificial sequence
  SiRNA target sequence
cttgtaggatccgtttcgta

SEQ ID NO: 127648 - DNA, 20 bp, Artificial sequence
  SiRNA target sequence
ttgtaggatccgtttcgtat

SEQ ID NO: 127649 - DNA, 20 bp, Artificial sequence
  SiRNA target sequence
tgtaggatccgtttcgtatc

SEQ ID NO: 127650 - DNA, 20 bp, Artificial sequence
  SiRNA target sequence
gtaggatccgtttcgtatcg

SEQ ID NO: 127651 - DNA, 20 bp, Artificial sequence
  SiRNA target sequence
taggatccgtttcgtatcgt

SEQ ID NO: 127652 - DNA, 20 bp, Artificial sequence
  SiRNA target sequence
aggatccgtttcgtatcgtg

SEQ ID NO: 127653 - DNA, 20 bp, Artificial sequence
  SiRNA target sequence
ggatccgtttcgtatcgtga

SEQ ID NO: 127654 - DNA, 20 bp, Artificial sequence
  SiRNA target sequence
gatccgtttcgtatcgtgat

SEQ ID NO: 127655 - DNA, 20 bp, Artificial sequence
  SiRNA target sequence
atccgtttcgtatcgtgatg

SEQ ID NO: 127656 - DNA, 20 bp, Artificial sequence
  SiRNA target sequence
tccgtttcgtatcgtgatgg

SEQ ID NO: 127657 - DNA, 20 bp, Artificial sequence
  SiRNA target sequence
ccgtttcgtatcgtgatggc

SEQ ID NO: 127658 - DNA, 20 bp, Artificial sequence
  SiRNA target sequence
cgtttcgtatcgtgatggcc

SEQ ID NO: 127659 - DNA, 20 bp, Artificial sequence
  SiRNA target sequence
gtttcgtatcgtgatggcca

SEQ ID NO: 127660 - DNA, 20 bp, Artificial sequence
  SiRNA target sequence
tttcgtatcgtgatggccaa

SEQ ID NO: 127661 - DNA, 20 bp, Artificial sequence
  SiRNA target sequence
ttcgtatcgtgatggccaat

SEQ ID NO: 127662 - DNA, 20 bp, Artificial sequence
  SiRNA target sequence
tcgtatcgtgatggccaatt

SEQ ID NO: 127663 - DNA, 20 bp, Artificial sequence
  SiRNA target sequence
cgtatcgtgatggccaattt

SEQ ID NO: 127664 - DNA, 20 bp, Artificial sequence
  SiRNA target sequence
gtatcgtgatggccaatttt

SEQ ID NO: 127665 - DNA, 20 bp, Artificial sequence
  SiRNA target sequence
tatcgtgatggccaatttta

SEQ ID NO: 127666 - DNA, 20 bp, Artificial sequence
  SiRNA target sequence
atcgtgatggccaattttat

SEQ ID NO: 127667 - DNA, 20 bp, Artificial sequence
  SiRNA target sequence
tcgtgatggccaattttatg

SEQ ID NO: 127668 - DNA, 20 bp, Artificial sequence
  SiRNA target sequence
cgtgatggccaattttatga

SEQ ID NO: 127669 - DNA, 20 bp, Artificial sequence
  SiRNA target sequence
gtgatggccaattttatgat

SEQ ID NO: 127670 - DNA, 20 bp, Artificial sequence
  SiRNA target sequence
tgatggccaattttatgatg

SEQ ID NO: 127671 - DNA, 20 bp, Artificial sequence
  SiRNA target sequence
gatggccaattttatgatgc

SEQ ID NO: 127672 - DNA, 20 bp, Artificial sequence
  SiRNA target sequence
atggccaattttatgatgct

SEQ ID NO: 127673 - DNA, 20 bp, Artificial sequence
  SiRNA target sequence
tggccaattttatgatgcta

SEQ ID NO: 127674 - DNA, 20 bp, Artificial sequence
  SiRNA target sequence
ggccaattttatgatgctaa

SEQ ID NO: 127675 - DNA, 20 bp, Artificial sequence
  SiRNA target sequence
gccaattttatgatgctaaa

SEQ ID NO: 127676 - DNA, 20 bp, Artificial sequence
  SiRNA target sequence
ccaattttatgatgctaaat

SEQ ID NO: 127677 - DNA, 20 bp, Artificial sequence
  SiRNA target sequence
caattttatgatgctaaata

SEQ ID NO: 127678 - DNA, 20 bp, Artificial sequence
  SiRNA target sequence
aattttatgatgctaaatac

SEQ ID NO: 127679 - DNA, 20 bp, Artificial sequence
  SiRNA target sequence
attttatgatgctaaataca

SEQ ID NO: 127680 - DNA, 20 bp, Artificial sequence
  SiRNA target sequence
ttttatgatgctaaatacaa

SEQ ID NO: 127681 - DNA, 20 bp, Artificial sequence
  SiRNA target sequence
tttatgatgctaaatacaat

SEQ ID NO: 127682 - DNA, 20 bp, Artificial sequence
  SiRNA target sequence
ttatgatgctaaatacaatg

SEQ ID NO: 127683 - DNA, 20 bp, Artificial sequence
  SiRNA target sequence
tatgatgctaaatacaatgt

SEQ ID NO: 127684 - DNA, 20 bp, Artificial sequence
  SiRNA target sequence
atgatgctaaatacaatgtt

SEQ ID NO: 127685 - DNA, 20 bp, Artificial sequence
  SiRNA target sequence
tgatgctaaatacaatgttc

SEQ ID NO: 127686 - DNA, 20 bp, Artificial sequence
  SiRNA target sequence
gatgctaaatacaatgttct

SEQ ID NO: 127687 - DNA, 20 bp, Artificial sequence
  SiRNA target sequence
atgctaaatacaatgttcta

SEQ ID NO: 127688 - DNA, 20 bp, Artificial sequence
  SiRNA target sequence
tgctaaatacaatgttctat

SEQ ID NO: 127689 - DNA, 20 bp, Artificial sequence
  SiRNA target sequence
gctaaatacaatgttctatt

SEQ ID NO: 127690 - DNA, 20 bp, Artificial sequence
  SiRNA target sequence
ctaaatacaatgttctattg

SEQ ID NO: 127691 - DNA, 20 bp, Artificial sequence
  SiRNA target sequence
taaatacaatgttctattgg

SEQ ID NO: 127692 - DNA, 20 bp, Artificial sequence
  SiRNA target sequence
aaatacaatgttctattggg

SEQ ID NO: 127693 - DNA, 20 bp, Artificial sequence
  SiRNA target sequence
aatacaatgttctattgggt

SEQ ID NO: 127694 - DNA, 20 bp, Artificial sequence
  SiRNA target sequence
atacaatgttctattgggtg

SEQ ID NO: 127695 - DNA, 20 bp, Artificial sequence
  SiRNA target sequence
tacaatgttctattgggtgt

SEQ ID NO: 127696 - DNA, 20 bp, Artificial sequence
  SiRNA target sequence
acaatgttctattgggtgtc

SEQ ID NO: 127697 - DNA, 20 bp, Artificial sequence
  SiRNA target sequence
caatgttctattgggtgtca

SEQ ID NO: 127698 - DNA, 20 bp, Artificial sequence
  SiRNA target sequence
aatgttctattgggtgtcac

SEQ ID NO: 127699 - DNA, 20 bp, Artificial sequence
  SiRNA target sequence
atgttctattgggtgtcaca

SEQ ID NO: 127700 - DNA, 20 bp, Artificial sequence
  SiRNA target sequence
tgttctattgggtgtcacag

SEQ ID NO: 127701 - DNA, 20 bp, Artificial sequence
  SiRNA target sequence
gttctattgggtgtcacagc

SEQ ID NO: 127702 - DNA, 20 bp, Artificial sequence
  SiRNA target sequence
ttctattgggtgtcacagct

SEQ ID NO: 127703 - DNA, 20 bp, Artificial sequence
  SiRNA target sequence
tctattgggtgtcacagcta

SEQ ID NO: 127704 - DNA, 20 bp, Artificial sequence
  SiRNA target sequence
ctattgggtgtcacagctac

SEQ ID NO: 127705 - DNA, 20 bp, Artificial sequence
  SiRNA target sequence
tattgggtgtcacagctacc

SEQ ID NO: 127706 - DNA, 20 bp, Artificial sequence
  SiRNA target sequence
attgggtgtcacagctacct

SEQ ID NO: 127707 - DNA, 20 bp, Artificial sequence
  SiRNA target sequence
ttgggtgtcacagctaccta

SEQ ID NO: 127708 - DNA, 20 bp, Artificial sequence
  SiRNA target sequence
tgggtgtcacagctacctac

SEQ ID NO: 127709 - DNA, 20 bp, Artificial sequence
  SiRNA target sequence
gggtgtcacagctacctact

SEQ ID NO: 127710 - DNA, 20 bp, Artificial sequence
  SiRNA target sequence
ggtgtcacagctacctacta

SEQ ID NO: 127711 - DNA, 20 bp, Artificial sequence
  SiRNA target sequence
gtgtcacagctacctactat

SEQ ID NO: 127712 - DNA, 20 bp, Artificial sequence
  SiRNA target sequence
tgtcacagctacctactatg

SEQ ID NO: 127713 - DNA, 20 bp, Artificial sequence
  SiRNA target sequence
gtcacagctacctactatgg

SEQ ID NO: 127714 - DNA, 20 bp, Artificial sequence
  SiRNA target sequence
tcacagctacctactatgga

SEQ ID NO: 127715 - DNA, 20 bp, Artificial sequence
  SiRNA target sequence
cacagctacctactatggag

SEQ ID NO: 127716 - DNA, 20 bp, Artificial sequence
  SiRNA target sequence
acagctacctactatggagc

SEQ ID NO: 127717 - DNA, 20 bp, Artificial sequence
  SiRNA target sequence
cagctacctactatggagct

SEQ ID NO: 127718 - DNA, 20 bp, Artificial sequence
  SiRNA target sequence
agctacctactatggagctg

SEQ ID NO: 127719 - DNA, 20 bp, Artificial sequence
  SiRNA target sequence
gctacctactatggagctgt

SEQ ID NO: 127720 - DNA, 20 bp, Artificial sequence
  SiRNA target sequence
ctacctactatggagctgtt

SEQ ID NO: 127721 - DNA, 20 bp, Artificial sequence
  SiRNA target sequence
tacctactatggagctgttg

SEQ ID NO: 127722 - DNA, 20 bp, Artificial sequence
  SiRNA target sequence
acctactatggagctgttgt

SEQ ID NO: 127723 - DNA, 20 bp, Artificial sequence
  SiRNA target sequence
cctactatggagctgttgta

SEQ ID NO: 127724 - DNA, 20 bp, Artificial sequence
  SiRNA target sequence
ctactatggagctgttgtat

SEQ ID NO: 127725 - DNA, 20 bp, Artificial sequence
  SiRNA target sequence
tactatggagctgttgtatt

SEQ ID NO: 127726 - DNA, 20 bp, Artificial sequence
  SiRNA target sequence
actatggagctgttgtatta

SEQ ID NO: 127727 - DNA, 20 bp, Artificial sequence
  SiRNA target sequence
ctatggagctgttgtattaa

SEQ ID NO: 127728 - DNA, 20 bp, Artificial sequence
  SiRNA target sequence
tatggagctgttgtattaaa

SEQ ID NO: 127729 - DNA, 20 bp, Artificial sequence
  SiRNA target sequence
atggagctgttgtattaaat

SEQ ID NO: 127730 - DNA, 20 bp, Artificial sequence
  SiRNA target sequence
tggagctgttgtattaaatc

SEQ ID NO: 127731 - DNA, 20 bp, Artificial sequence
  SiRNA target sequence
ggagctgttgtattaaatca

SEQ ID NO: 127732 - DNA, 20 bp, Artificial sequence
  SiRNA target sequence
gagctgttgtattaaatcat

SEQ ID NO: 127733 - DNA, 20 bp, Artificial sequence
  SiRNA target sequence
agctgttgtattaaatcatg

SEQ ID NO: 127734 - DNA, 20 bp, Artificial sequence
  SiRNA target sequence
gctgttgtattaaatcatgc

SEQ ID NO: 127735 - DNA, 20 bp, Artificial sequence
  SiRNA target sequence
ctgttgtattaaatcatgca

SEQ ID NO: 127736 - DNA, 20 bp, Artificial sequence
  SiRNA target sequence
tgttgtattaaatcatgcaa

SEQ ID NO: 127737 - DNA, 20 bp, Artificial sequence
  SiRNA target sequence
gttgtattaaatcatgcaaa

SEQ ID NO: 127738 - DNA, 20 bp, Artificial sequence
  SiRNA target sequence
ttgtattaaatcatgcaaaa

SEQ ID NO: 127739 - DNA, 20 bp, Artificial sequence
  SiRNA target sequence
tgtattaaatcatgcaaaat

SEQ ID NO: 127740 - DNA, 20 bp, Artificial sequence
  SiRNA target sequence
gtattaaatcatgcaaaatt

SEQ ID NO: 127741 - DNA, 20 bp, Artificial sequence
  SiRNA target sequence
tattaaatcatgcaaaattc

SEQ ID NO: 127742 - DNA, 20 bp, Artificial sequence
  SiRNA target sequence
attaaatcatgcaaaattct

SEQ ID NO: 127743 - DNA, 20 bp, Artificial sequence
  SiRNA target sequence
ttaaatcatgcaaaattctt

SEQ ID NO: 127744 - DNA, 20 bp, Artificial sequence
  SiRNA target sequence
taaatcatgcaaaattcttg

SEQ ID NO: 127745 - DNA, 20 bp, Artificial sequence
  SiRNA target sequence
aaatcatgcaaaattcttgt

SEQ ID NO: 127746 - DNA, 20 bp, Artificial sequence
  SiRNA target sequence
aatcatgcaaaattcttgtc

SEQ ID NO: 127747 - DNA, 20 bp, Artificial sequence
  SiRNA target sequence
atcatgcaaaattcttgtca

SEQ ID NO: 127748 - DNA, 20 bp, Artificial sequence
  SiRNA target sequence
tcatgcaaaattcttgtcag

SEQ ID NO: 127749 - DNA, 20 bp, Artificial sequence
  SiRNA target sequence
catgcaaaattcttgtcagt

SEQ ID NO: 127750 - DNA, 20 bp, Artificial sequence
  SiRNA target sequence
atgcaaaattcttgtcagta

SEQ ID NO: 127751 - DNA, 20 bp, Artificial sequence
  SiRNA target sequence
tgcaaaattcttgtcagtaa

SEQ ID NO: 127752 - DNA, 20 bp, Artificial sequence
  SiRNA target sequence
gcaaaattcttgtcagtaac

SEQ ID NO: 127753 - DNA, 20 bp, Artificial sequence
  SiRNA target sequence
caaaattcttgtcagtaaca

SEQ ID NO: 127754 - DNA, 20 bp, Artificial sequence
  SiRNA target sequence
aaaattcttgtcagtaacaa

SEQ ID NO: 127755 - DNA, 20 bp, Artificial sequence
  SiRNA target sequence
aaattcttgtcagtaacaaa

SEQ ID NO: 127756 - DNA, 20 bp, Artificial sequence
  SiRNA target sequence
aattcttgtcagtaacaaaa

SEQ ID NO: 127757 - DNA, 20 bp, Artificial sequence
  SiRNA target sequence
attcttgtcagtaacaaaag

SEQ ID NO: 127758 - DNA, 20 bp, Artificial sequence
  SiRNA target sequence
ttcttgtcagtaacaaaaga

SEQ ID NO: 127759 - DNA, 20 bp, Artificial sequence
  SiRNA target sequence
tcttgtcagtaacaaaagat

SEQ ID NO: 127760 - DNA, 20 bp, Artificial sequence
  SiRNA target sequence
cttgtcagtaacaaaagatg

SEQ ID NO: 127761 - DNA, 20 bp, Artificial sequence
  SiRNA target sequence
ttgtcagtaacaaaagatgg

SEQ ID NO: 127762 - DNA, 20 bp, Artificial sequence
  SiRNA target sequence
tgtcagtaacaaaagatggc

SEQ ID NO: 127763 - DNA, 20 bp, Artificial sequence
  SiRNA target sequence
gtcagtaacaaaagatggcg

SEQ ID NO: 127764 - DNA, 20 bp, Artificial sequence
  SiRNA target sequence
tcagtaacaaaagatggcga

SEQ ID NO: 127765 - DNA, 20 bp, Artificial sequence
  SiRNA target sequence
cagtaacaaaagatggcgat

SEQ ID NO: 127766 - DNA, 20 bp, Artificial sequence
  SiRNA target sequence
agtaacaaaagatggcgata

SEQ ID NO: 127767 - DNA, 20 bp, Artificial sequence
  SiRNA target sequence
gtaacaaaagatggcgataa

SEQ ID NO: 127768 - DNA, 20 bp, Artificial sequence
  SiRNA target sequence
taacaaaagatggcgataaa

SEQ ID NO: 127769 - DNA, 20 bp, Artificial sequence
  SiRNA target sequence
aacaaaagatggcgataaaa

SEQ ID NO: 127770 - DNA, 20 bp, Artificial sequence
  SiRNA target sequence
acaaaagatggcgataaaat

SEQ ID NO: 127771 - DNA, 20 bp, Artificial sequence
  SiRNA target sequence
caaaagatggcgataaaatt

SEQ ID NO: 127772 - DNA, 20 bp, Artificial sequence
  SiRNA target sequence
aaaagatggcgataaaatta

SEQ ID NO: 127773 - DNA, 20 bp, Artificial sequence
  SiRNA target sequence
aaagatggcgataaaattaa

SEQ ID NO: 127774 - DNA, 20 bp, Artificial sequence
  SiRNA target sequence
aagatggcgataaaattaat

SEQ ID NO: 127775 - DNA, 20 bp, Artificial sequence
  SiRNA target sequence
agatggcgataaaattaatg

SEQ ID NO: 127776 - DNA, 20 bp, Artificial sequence
  SiRNA target sequence
gatggcgataaaattaatgg

SEQ ID NO: 127777 - DNA, 20 bp, Artificial sequence
  SiRNA target sequence
atggcgataaaattaatgga

SEQ ID NO: 127778 - DNA, 20 bp, Artificial sequence
  SiRNA target sequence
tggcgataaaattaatggaa

SEQ ID NO: 127779 - DNA, 20 bp, Artificial sequence
  SiRNA target sequence
ggcgataaaattaatggaat

SEQ ID NO: 127780 - DNA, 20 bp, Artificial sequence
  SiRNA target sequence
gcgataaaattaatggaatt

SEQ ID NO: 127781 - DNA, 20 bp, Artificial sequence
  SiRNA target sequence
cgataaaattaatggaatta

SEQ ID NO: 127782 - DNA, 20 bp, Artificial sequence
  SiRNA target sequence
gataaaattaatggaattaa

SEQ ID NO: 127783 - DNA, 20 bp, Artificial sequence
  SiRNA target sequence
ataaaattaatggaattaaa

SEQ ID NO: 127784 - DNA, 20 bp, Artificial sequence
  SiRNA target sequence
taaaattaatggaattaaat

SEQ ID NO: 127785 - DNA, 20 bp, Artificial sequence
  SiRNA target sequence
aaaattaatggaattaaatg

SEQ ID NO: 127786 - DNA, 20 bp, Artificial sequence
  SiRNA target sequence
aaattaatggaattaaatgt

SEQ ID NO: 127787 - DNA, 20 bp, Artificial sequence
  SiRNA target sequence
aattaatggaattaaatgtc

SEQ ID NO: 127788 - DNA, 20 bp, Artificial sequence
  SiRNA target sequence
attaatggaattaaatgtca

SEQ ID NO: 127789 - DNA, 20 bp, Artificial sequence
  SiRNA target sequence
ttaatggaattaaatgtcaa

SEQ ID NO: 127790 - DNA, 20 bp, Artificial sequence
  SiRNA target sequence
taatggaattaaatgtcaag

SEQ ID NO: 127791 - DNA, 20 bp, Artificial sequence
  SiRNA target sequence
aatggaattaaatgtcaaga

SEQ ID NO: 127792 - DNA, 20 bp, Artificial sequence
  SiRNA target sequence
atggaattaaatgtcaagat

SEQ ID NO: 127793 - DNA, 20 bp, Artificial sequence
  SiRNA target sequence
tggaattaaatgtcaagatt

SEQ ID NO: 127794 - DNA, 20 bp, Artificial sequence
  SiRNA target sequence
ggaattaaatgtcaagattc

SEQ ID NO: 127795 - DNA, 20 bp, Artificial sequence
  SiRNA target sequence
gaattaaatgtcaagattca

SEQ ID NO: 127796 - DNA, 20 bp, Artificial sequence
  SiRNA target sequence
aattaaatgtcaagattcaa

SEQ ID NO: 127797 - DNA, 20 bp, Artificial sequence
  SiRNA target sequence
attaaatgtcaagattcaat

SEQ ID NO: 127798 - DNA, 20 bp, Artificial sequence
  SiRNA target sequence
ttaaatgtcaagattcaata

SEQ ID NO: 127799 - DNA, 20 bp, Artificial sequence
  SiRNA target sequence
taaatgtcaagattcaataa

SEQ ID NO: 127800 - DNA, 20 bp, Artificial sequence
  SiRNA target sequence
aaatgtcaagattcaataaa

SEQ ID NO: 127801 - DNA, 20 bp, Artificial sequence
  SiRNA target sequence
aatgtcaagattcaataaat

SEQ ID NO: 127802 - DNA, 20 bp, Artificial sequence
  SiRNA target sequence
atgtcaagattcaataaata

SEQ ID NO: 127803 - DNA, 20 bp, Artificial sequence
  SiRNA target sequence
tgtcaagattcaataaataa

SEQ ID NO: 127804 - DNA, 20 bp, Artificial sequence
  SiRNA target sequence
gtcaagattcaataaataat

SEQ ID NO: 127805 - DNA, 20 bp, Artificial sequence
  SiRNA target sequence
tcaagattcaataaataatg

SEQ ID NO: 127806 - DNA, 20 bp, Artificial sequence
  SiRNA target sequence
caagattcaataaataatga

SEQ ID NO: 127807 - DNA, 20 bp, Artificial sequence
  SiRNA target sequence
aagattcaataaataatgaa

SEQ ID NO: 127808 - DNA, 20 bp, Artificial sequence
  SiRNA target sequence
agattcaataaataatgaaa

SEQ ID NO: 127809 - DNA, 20 bp, Artificial sequence
  SiRNA target sequence
gattcaataaataatgaaaa

SEQ ID NO: 127810 - DNA, 20 bp, Artificial sequence
  SiRNA target sequence
attcaataaataatgaaaaa

SEQ ID NO: 127811 - DNA, 20 bp, Artificial sequence
  SiRNA target sequence
ttcaataaataatgaaaaat

SEQ ID NO: 127812 - DNA, 20 bp, Artificial sequence
  SiRNA target sequence
tcaataaataatgaaaaatt

SEQ ID NO: 127813 - DNA, 20 bp, Artificial sequence
  SiRNA target sequence
caataaataatgaaaaattt

SEQ ID NO: 127814 - DNA, 20 bp, Artificial sequence
  SiRNA target sequence
aataaataatgaaaaatttt

SEQ ID NO: 127815 - DNA, 20 bp, Artificial sequence
  SiRNA target sequence
ataaataatgaaaaattttt

SEQ ID NO: 127816 - DNA, 20 bp, Artificial sequence
  SiRNA target sequence
taaataatgaaaaattttta

SEQ ID NO: 127817 - DNA, 20 bp, Artificial sequence
  SiRNA target sequence
aaataatgaaaaatttttaa

SEQ ID NO: 127818 - DNA, 20 bp, Artificial sequence
  SiRNA target sequence
aataatgaaaaatttttaat

SEQ ID NO: 127819 - DNA, 20 bp, Artificial sequence
  SiRNA target sequence
ataatgaaaaatttttaatt

SEQ ID NO: 127820 - DNA, 20 bp, Artificial sequence
  SiRNA target sequence
taatgaaaaatttttaatta

SEQ ID NO: 127821 - DNA, 20 bp, Artificial sequence
  SiRNA target sequence
aatgaaaaatttttaattag

SEQ ID NO: 127822 - DNA, 20 bp, Artificial sequence
  SiRNA target sequence
atgaaaaatttttaattagg

SEQ ID NO: 127823 - DNA, 20 bp, Artificial sequence
  SiRNA target sequence
tgaaaaatttttaattaggt

SEQ ID NO: 127824 - DNA, 20 bp, Artificial sequence
  SiRNA target sequence
gaaaaatttttaattaggtg

SEQ ID NO: 127825 - DNA, 20 bp, Artificial sequence
  SiRNA target sequence
aaaaatttttaattaggtgt

SEQ ID NO: 127826 - DNA, 20 bp, Artificial sequence
  SiRNA target sequence
aaaatttttaattaggtgta

SEQ ID NO: 127827 - DNA, 20 bp, Artificial sequence
  SiRNA target sequence
aaatttttaattaggtgtaa

SEQ ID NO: 127828 - DNA, 20 bp, Artificial sequence
  SiRNA target sequence
aatttttaattaggtgtaaa

SEQ ID NO: 127829 - DNA, 20 bp, Artificial sequence
  SiRNA target sequence
atttttaattaggtgtaaag

SEQ ID NO: 127830 - DNA, 20 bp, Artificial sequence
  SiRNA target sequence
tttttaattaggtgtaaagt

SEQ ID NO: 127831 - DNA, 20 bp, Artificial sequence
  SiRNA target sequence
ttttaattaggtgtaaagtt

SEQ ID NO: 127832 - DNA, 20 bp, Artificial sequence
  SiRNA target sequence
tttaattaggtgtaaagttt

SEQ ID NO: 127833 - DNA, 20 bp, Artificial sequence
  SiRNA target sequence
ttaattaggtgtaaagtttt

SEQ ID NO: 127834 - DNA, 20 bp, Artificial sequence
  SiRNA target sequence
taattaggtgtaaagtttta

SEQ ID NO: 127835 - DNA, 20 bp, Artificial sequence
  SiRNA target sequence
aattaggtgtaaagttttaa

SEQ ID NO: 127836 - DNA, 20 bp, Artificial sequence
  SiRNA target sequence
attaggtgtaaagttttaat

SEQ ID NO: 127837 - DNA, 20 bp, Artificial sequence
  SiRNA target sequence
ttaggtgtaaagttttaata

SEQ ID NO: 127838 - DNA, 20 bp, Artificial sequence
  SiRNA target sequence
taggtgtaaagttttaataa

SEQ ID NO: 127839 - DNA, 20 bp, Artificial sequence
  SiRNA target sequence
aggtgtaaagttttaataaa

SEQ ID NO: 127840 - DNA, 20 bp, Artificial sequence
  SiRNA target sequence
ggtgtaaagttttaataaat

SEQ ID NO: 127841 - DNA, 20 bp, Artificial sequence
  SiRNA target sequence
gtgtaaagttttaataaata

SEQ ID NO: 127842 - DNA, 20 bp, Artificial sequence
  SiRNA target sequence
tgtaaagttttaataaatac

SEQ ID NO: 127843 - DNA, 20 bp, Artificial sequence
  SiRNA target sequence
gtaaagttttaataaatact

SEQ ID NO: 127844 - DNA, 20 bp, Artificial sequence
  SiRNA target sequence
taaagttttaataaatactt

SEQ ID NO: 127845 - DNA, 20 bp, Artificial sequence
  SiRNA target sequence
aaagttttaataaatacttc

SEQ ID NO: 127846 - DNA, 20 bp, Artificial sequence
  SiRNA target sequence
aagttttaataaatacttct

SEQ ID NO: 127847 - DNA, 20 bp, Artificial sequence
  SiRNA target sequence
agttttaataaatacttctg

SEQ ID NO: 127848 - DNA, 20 bp, Artificial sequence
  SiRNA target sequence
gttttaataaatacttctgg

SEQ ID NO: 127849 - DNA, 20 bp, Artificial sequence
  SiRNA target sequence
ttttaataaatacttctggc

SEQ ID NO: 127850 - DNA, 20 bp, Artificial sequence
  SiRNA target sequence
tttaataaatacttctggcc

SEQ ID NO: 127851 - DNA, 20 bp, Artificial sequence
  SiRNA target sequence
ttaataaatacttctggccc

SEQ ID NO: 127852 - DNA, 20 bp, Artificial sequence
  SiRNA target sequence
taataaatacttctggccct

SEQ ID NO: 127853 - DNA, 20 bp, Artificial sequence
  SiRNA target sequence
aataaatacttctggccctt

SEQ ID NO: 127854 - DNA, 20 bp, Artificial sequence
  SiRNA target sequence
ataaatacttctggcccttt

SEQ ID NO: 127855 - DNA, 20 bp, Artificial sequence
  SiRNA target sequence
taaatacttctggccctttt

SEQ ID NO: 127856 - DNA, 20 bp, Artificial sequence
  SiRNA target sequence
aaatacttctggcccttttg

SEQ ID NO: 127857 - DNA, 20 bp, Artificial sequence
  SiRNA target sequence
aatacttctggcccttttgc

SEQ ID NO: 127858 - DNA, 20 bp, Artificial sequence
  SiRNA target sequence
atacttctggcccttttgct

SEQ ID NO: 127859 - DNA, 20 bp, Artificial sequence
  SiRNA target sequence
tacttctggcccttttgctg

SEQ ID NO: 127860 - DNA, 20 bp, Artificial sequence
  SiRNA target sequence
acttctggcccttttgctga

SEQ ID NO: 127861 - DNA, 20 bp, Artificial sequence
  SiRNA target sequence
cttctggcccttttgctgac

SEQ ID NO: 127862 - DNA, 20 bp, Artificial sequence
  SiRNA target sequence
ttctggcccttttgctgacg

SEQ ID NO: 127863 - DNA, 20 bp, Artificial sequence
  SiRNA target sequence
tctggcccttttgctgacga

SEQ ID NO: 127864 - DNA, 20 bp, Artificial sequence
  SiRNA target sequence
ctggcccttttgctgacgag

SEQ ID NO: 127865 - DNA, 20 bp, Artificial sequence
  SiRNA target sequence
tggcccttttgctgacgagg

SEQ ID NO: 127866 - DNA, 20 bp, Artificial sequence
  SiRNA target sequence
ggcccttttgctgacgaggt

SEQ ID NO: 127867 - DNA, 20 bp, Artificial sequence
  SiRNA target sequence
gcccttttgctgacgaggtt

SEQ ID NO: 127868 - DNA, 20 bp, Artificial sequence
  SiRNA target sequence
cccttttgctgacgaggttc

SEQ ID NO: 127869 - DNA, 20 bp, Artificial sequence
  SiRNA target sequence
ccttttgctgacgaggttcg

SEQ ID NO: 127870 - DNA, 20 bp, Artificial sequence
  SiRNA target sequence
cttttgctgacgaggttcga

SEQ ID NO: 127871 - DNA, 20 bp, Artificial sequence
  SiRNA target sequence
ttttgctgacgaggttcgaa

SEQ ID NO: 127872 - DNA, 20 bp, Artificial sequence
  SiRNA target sequence
tttgctgacgaggttcgaaa

SEQ ID NO: 127873 - DNA, 20 bp, Artificial sequence
  SiRNA target sequence
ttgctgacgaggttcgaaat

SEQ ID NO: 127874 - DNA, 20 bp, Artificial sequence
  SiRNA target sequence
tgctgacgaggttcgaaata

SEQ ID NO: 127875 - DNA, 20 bp, Artificial sequence
  SiRNA target sequence
gctgacgaggttcgaaatac

SEQ ID NO: 127876 - DNA, 20 bp, Artificial sequence
  SiRNA target sequence
ctgacgaggttcgaaataca

SEQ ID NO: 127877 - DNA, 20 bp, Artificial sequence
  SiRNA target sequence
tgacgaggttcgaaatacat

SEQ ID NO: 127878 - DNA, 20 bp, Artificial sequence
  SiRNA target sequence
gacgaggttcgaaatacatc

SEQ ID NO: 127879 - DNA, 20 bp, Artificial sequence
  SiRNA target sequence
acgaggttcgaaatacatca

SEQ ID NO: 127880 - DNA, 20 bp, Artificial sequence
  SiRNA target sequence
cgaggttcgaaatacatcaa

SEQ ID NO: 127881 - DNA, 20 bp, Artificial sequence
  SiRNA target sequence
gaggttcgaaatacatcaat

SEQ ID NO: 127882 - DNA, 20 bp, Artificial sequence
  SiRNA target sequence
aggttcgaaatacatcaatt

SEQ ID NO: 127883 - DNA, 20 bp, Artificial sequence
  SiRNA target sequence
ggttcgaaatacatcaattg

SEQ ID NO: 127884 - DNA, 20 bp, Artificial sequence
  SiRNA target sequence
gttcgaaatacatcaattga

SEQ ID NO: 127885 - DNA, 20 bp, Artificial sequence
  SiRNA target sequence
ttcgaaatacatcaattgaa

SEQ ID NO: 127886 - DNA, 20 bp, Artificial sequence
  SiRNA target sequence
tcgaaatacatcaattgaaa

SEQ ID NO: 127887 - DNA, 20 bp, Artificial sequence
  SiRNA target sequence
cgaaatacatcaattgaaaa

SEQ ID NO: 127888 - DNA, 20 bp, Artificial sequence
  SiRNA target sequence
gaaatacatcaattgaaaac

SEQ ID NO: 127889 - DNA, 20 bp, Artificial sequence
  SiRNA target sequence
aaatacatcaattgaaaact

SEQ ID NO: 127890 - DNA, 20 bp, Artificial sequence
  SiRNA target sequence
aatacatcaattgaaaactg

SEQ ID NO: 127891 - DNA, 20 bp, Artificial sequence
  SiRNA target sequence
atacatcaattgaaaactgt

SEQ ID NO: 127892 - DNA, 20 bp, Artificial sequence
  SiRNA target sequence
tacatcaattgaaaactgtc

SEQ ID NO: 127893 - DNA, 20 bp, Artificial sequence
  SiRNA target sequence
acatcaattgaaaactgtca

SEQ ID NO: 127894 - DNA, 20 bp, Artificial sequence
  SiRNA target sequence
catcaattgaaaactgtcaa

SEQ ID NO: 127895 - DNA, 20 bp, Artificial sequence
  SiRNA target sequence
atcaattgaaaactgtcaac

SEQ ID NO: 127896 - DNA, 20 bp, Artificial sequence
  SiRNA target sequence
tcaattgaaaactgtcaacc

SEQ ID NO: 127897 - DNA, 20 bp, Artificial sequence
  SiRNA target sequence
caattgaaaactgtcaacca

SEQ ID NO: 127898 - DNA, 20 bp, Artificial sequence
  SiRNA target sequence
aattgaaaactgtcaaccaa

SEQ ID NO: 127899 - DNA, 20 bp, Artificial sequence
  SiRNA target sequence
attgaaaactgtcaaccaat

SEQ ID NO: 127900 - DNA, 20 bp, Artificial sequence
  SiRNA target sequence
ttgaaaactgtcaaccaata

SEQ ID NO: 127901 - DNA, 20 bp, Artificial sequence
  SiRNA target sequence
tgaaaactgtcaaccaatac

SEQ ID NO: 127902 - DNA, 20 bp, Artificial sequence
  SiRNA target sequence
gaaaactgtcaaccaatact

SEQ ID NO: 127903 - DNA, 20 bp, Artificial sequence
  SiRNA target sequence
aaaactgtcaaccaatactc

SEQ ID NO: 127904 - DNA, 20 bp, Artificial sequence
  SiRNA target sequence
aaactgtcaaccaatactcc

SEQ ID NO: 127905 - DNA, 20 bp, Artificial sequence
  SiRNA target sequence
aactgtcaaccaatactcca

SEQ ID NO: 127906 - DNA, 20 bp, Artificial sequence
  SiRNA target sequence
actgtcaaccaatactccaa

SEQ ID NO: 127907 - DNA, 20 bp, Artificial sequence
  SiRNA target sequence
ctgtcaaccaatactccaac

SEQ ID NO: 127908 - DNA, 20 bp, Artificial sequence
  SiRNA target sequence
tgtcaaccaatactccaaca

SEQ ID NO: 127909 - DNA, 20 bp, Artificial sequence
  SiRNA target sequence
gtcaaccaatactccaacat

SEQ ID NO: 127910 - DNA, 20 bp, Artificial sequence
  SiRNA target sequence
tcaaccaatactccaacata

SEQ ID NO: 127911 - DNA, 20 bp, Artificial sequence
  SiRNA target sequence
caaccaatactccaacatag

SEQ ID NO: 127912 - DNA, 20 bp, Artificial sequence
  SiRNA target sequence
aaccaatactccaacatagt

SEQ ID NO: 127913 - DNA, 20 bp, Artificial sequence
  SiRNA target sequence
accaatactccaacatagtt

SEQ ID NO: 127914 - DNA, 20 bp, Artificial sequence
  SiRNA target sequence
ccaatactccaacatagtta

SEQ ID NO: 127915 - DNA, 20 bp, Artificial sequence
  SiRNA target sequence
caatactccaacatagttat

SEQ ID NO: 127916 - DNA, 20 bp, Artificial sequence
  SiRNA target sequence
aatactccaacatagttatg

SEQ ID NO: 127917 - DNA, 20 bp, Artificial sequence
  SiRNA target sequence
atactccaacatagttatgg

SEQ ID NO: 127918 - DNA, 20 bp, Artificial sequence
  SiRNA target sequence
tactccaacatagttatggt

SEQ ID NO: 127919 - DNA, 20 bp, Artificial sequence
  SiRNA target sequence
actccaacatagttatggta

SEQ ID NO: 127920 - DNA, 20 bp, Artificial sequence
  SiRNA target sequence
ctccaacatagttatggtac

SEQ ID NO: 127921 - DNA, 20 bp, Artificial sequence
  SiRNA target sequence
tccaacatagttatggtaca

SEQ ID NO: 127922 - DNA, 20 bp, Artificial sequence
  SiRNA target sequence
ccaacatagttatggtacac

SEQ ID NO: 127923 - DNA, 20 bp, Artificial sequence
  SiRNA target sequence
caacatagttatggtacaca

SEQ ID NO: 127924 - DNA, 20 bp, Artificial sequence
  SiRNA target sequence
aacatagttatggtacacat

SEQ ID NO: 127925 - DNA, 20 bp, Artificial sequence
  SiRNA target sequence
acatagttatggtacacata

SEQ ID NO: 127926 - DNA, 20 bp, Artificial sequence
  SiRNA target sequence
catagttatggtacacatat

SEQ ID NO: 127927 - DNA, 20 bp, Artificial sequence
  SiRNA target sequence
atagttatggtacacatatt

SEQ ID NO: 127928 - DNA, 20 bp, Artificial sequence
  SiRNA target sequence
tagttatggtacacatattg

SEQ ID NO: 127929 - DNA, 20 bp, Artificial sequence
  SiRNA target sequence
agttatggtacacatattgt

SEQ ID NO: 127930 - DNA, 20 bp, Artificial sequence
  SiRNA target sequence
gttatggtacacatattgta

SEQ ID NO: 127931 - DNA, 20 bp, Artificial sequence
  SiRNA target sequence
ttatggtacacatattgtag

SEQ ID NO: 127932 - DNA, 20 bp, Artificial sequence
  SiRNA target sequence
tatggtacacatattgtagt

SEQ ID NO: 127933 - DNA, 20 bp, Artificial sequence
  SiRNA target sequence
atggtacacatattgtagtt

SEQ ID NO: 127934 - DNA, 20 bp, Artificial sequence
  SiRNA target sequence
tggtacacatattgtagttc

SEQ ID NO: 127935 - DNA, 20 bp, Artificial sequence
  SiRNA target sequence
ggtacacatattgtagttcc

SEQ ID NO: 127936 - DNA, 20 bp, Artificial sequence
  SiRNA target sequence
gtacacatattgtagttcct

SEQ ID NO: 127937 - DNA, 20 bp, Artificial sequence
  SiRNA target sequence
tacacatattgtagttcctg

SEQ ID NO: 127938 - DNA, 20 bp, Artificial sequence
  SiRNA target sequence
acacatattgtagttcctgc

SEQ ID NO: 127939 - DNA, 20 bp, Artificial sequence
  SiRNA target sequence
cacatattgtagttcctgcg

SEQ ID NO: 127940 - DNA, 20 bp, Artificial sequence
  SiRNA target sequence
acatattgtagttcctgcga

SEQ ID NO: 127941 - DNA, 20 bp, Artificial sequence
  SiRNA target sequence
catattgtagttcctgcgat

SEQ ID NO: 127942 - DNA, 20 bp, Artificial sequence
  SiRNA target sequence
atattgtagttcctgcgata

SEQ ID NO: 127943 - DNA, 20 bp, Artificial sequence
  SiRNA target sequence
tattgtagttcctgcgatat

SEQ ID NO: 127944 - DNA, 20 bp, Artificial sequence
  SiRNA target sequence
attgtagttcctgcgatatt

SEQ ID NO: 127945 - DNA, 20 bp, Artificial sequence
  SiRNA target sequence
ttgtagttcctgcgatattt

SEQ ID NO: 127946 - DNA, 20 bp, Artificial sequence
  SiRNA target sequence
tgtagttcctgcgatatttt

SEQ ID NO: 127947 - DNA, 20 bp, Artificial sequence
  SiRNA target sequence
gtagttcctgcgatattttc

SEQ ID NO: 127948 - DNA, 20 bp, Artificial sequence
  SiRNA target sequence
tagttcctgcgatattttcg

SEQ ID NO: 127949 - DNA, 20 bp, Artificial sequence
  SiRNA target sequence
agttcctgcgatattttcgc

SEQ ID NO: 127950 - DNA, 20 bp, Artificial sequence
  SiRNA target sequence
gttcctgcgatattttcgcc

SEQ ID NO: 127951 - DNA, 20 bp, Artificial sequence
  SiRNA target sequence
ttcctgcgatattttcgcct

SEQ ID NO: 127952 - DNA, 20 bp, Artificial sequence
  SiRNA target sequence
tcctgcgatattttcgccta

SEQ ID NO: 127953 - DNA, 20 bp, Artificial sequence
  SiRNA target sequence
cctgcgatattttcgcctaa

SEQ ID NO: 127954 - DNA, 20 bp, Artificial sequence
  SiRNA target sequence
ctgcgatattttcgcctaaa

SEQ ID NO: 127955 - DNA, 20 bp, Artificial sequence
  SiRNA target sequence
tgcgatattttcgcctaaaa

SEQ ID NO: 127956 - DNA, 20 bp, Artificial sequence
  SiRNA target sequence
gcgatattttcgcctaaaaa

SEQ ID NO: 127957 - DNA, 20 bp, Artificial sequence
  SiRNA target sequence
cgatattttcgcctaaaaat

SEQ ID NO: 127958 - DNA, 20 bp, Artificial sequence
  SiRNA target sequence
gatattttcgcctaaaaata

SEQ ID NO: 127959 - DNA, 20 bp, Artificial sequence
  SiRNA target sequence
atattttcgcctaaaaatat

SEQ ID NO: 127960 - DNA, 20 bp, Artificial sequence
  SiRNA target sequence
tattttcgcctaaaaatatg

SEQ ID NO: 127961 - DNA, 20 bp, Artificial sequence
  SiRNA target sequence
attttcgcctaaaaatatgg

SEQ ID NO: 127962 - DNA, 20 bp, Artificial sequence
  SiRNA target sequence
ttttcgcctaaaaatatggg

SEQ ID NO: 127963 - DNA, 20 bp, Artificial sequence
  SiRNA target sequence
tttcgcctaaaaatatgggc

SEQ ID NO: 127964 - DNA, 20 bp, Artificial sequence
  SiRNA target sequence
ttcgcctaaaaatatgggct

SEQ ID NO: 127965 - DNA, 20 bp, Artificial sequence
  SiRNA target sequence
tcgcctaaaaatatgggctt

SEQ ID NO: 127966 - DNA, 20 bp, Artificial sequence
  SiRNA target sequence
cgcctaaaaatatgggcttt

SEQ ID NO: 127967 - DNA, 20 bp, Artificial sequence
  SiRNA target sequence
gcctaaaaatatgggctttg

SEQ ID NO: 127968 - DNA, 20 bp, Artificial sequence
  SiRNA target sequence
cctaaaaatatgggctttgt

SEQ ID NO: 127969 - DNA, 20 bp, Artificial sequence
  SiRNA target sequence
ctaaaaatatgggctttgtt

SEQ ID NO: 127970 - DNA, 20 bp, Artificial sequence
  SiRNA target sequence
taaaaatatgggctttgttg

SEQ ID NO: 127971 - DNA, 20 bp, Artificial sequence
  SiRNA target sequence
aaaaatatgggctttgttga

SEQ ID NO: 127972 - DNA, 20 bp, Artificial sequence
  SiRNA target sequence
aaaatatgggctttgttgat

SEQ ID NO: 127973 - DNA, 20 bp, Artificial sequence
  SiRNA target sequence
aaatatgggctttgttgatc

SEQ ID NO: 127974 - DNA, 20 bp, Artificial sequence
  SiRNA target sequence
aatatgggctttgttgatcc

SEQ ID NO: 127975 - DNA, 20 bp, Artificial sequence
  SiRNA target sequence
atatgggctttgttgatcca

SEQ ID NO: 127976 - DNA, 20 bp, Artificial sequence
  SiRNA target sequence
tatgggctttgttgatccaa

SEQ ID NO: 127977 - DNA, 20 bp, Artificial sequence
  SiRNA target sequence
atgggctttgttgatccaag

SEQ ID NO: 127978 - DNA, 20 bp, Artificial sequence
  SiRNA target sequence
tgggctttgttgatccaagc

SEQ ID NO: 127979 - DNA, 20 bp, Artificial sequence
  SiRNA target sequence
gggctttgttgatccaagca

SEQ ID NO: 127980 - DNA, 20 bp, Artificial sequence
  SiRNA target sequence
ggctttgttgatccaagcac

SEQ ID NO: 127981 - DNA, 20 bp, Artificial sequence
  SiRNA target sequence
gctttgttgatccaagcacg

SEQ ID NO: 127982 - DNA, 20 bp, Artificial sequence
  SiRNA target sequence
ctttgttgatccaagcacga

SEQ ID NO: 127983 - DNA, 20 bp, Artificial sequence
  SiRNA target sequence
tttgttgatccaagcacgag

SEQ ID NO: 127984 - DNA, 20 bp, Artificial sequence
  SiRNA target sequence
ttgttgatccaagcacgagt

SEQ ID NO: 127985 - DNA, 20 bp, Artificial sequence
  SiRNA target sequence
tgttgatccaagcacgagtg

SEQ ID NO: 127986 - DNA, 20 bp, Artificial sequence
  SiRNA target sequence
gttgatccaagcacgagtga

SEQ ID NO: 127987 - DNA, 20 bp, Artificial sequence
  SiRNA target sequence
ttgatccaagcacgagtgat

SEQ ID NO: 127988 - DNA, 20 bp, Artificial sequence
  SiRNA target sequence
tgatccaagcacgagtgatg

SEQ ID NO: 127989 - DNA, 20 bp, Artificial sequence
  SiRNA target sequence
gatccaagcacgagtgatgg

SEQ ID NO: 127990 - DNA, 20 bp, Artificial sequence
  SiRNA target sequence
atccaagcacgagtgatgga

SEQ ID NO: 127991 - DNA, 20 bp, Artificial sequence
  SiRNA target sequence
tccaagcacgagtgatggaa

SEQ ID NO: 127992 - DNA, 20 bp, Artificial sequence
  SiRNA target sequence
ccaagcacgagtgatggaag

SEQ ID NO: 127993 - DNA, 20 bp, Artificial sequence
  SiRNA target sequence
caagcacgagtgatggaaga

SEQ ID NO: 127994 - DNA, 20 bp, Artificial sequence
  SiRNA target sequence
aagcacgagtgatggaagaa

SEQ ID NO: 127995 - DNA, 20 bp, Artificial sequence
  SiRNA target sequence
agcacgagtgatggaagaat

SEQ ID NO: 127996 - DNA, 20 bp, Artificial sequence
  SiRNA target sequence
gcacgagtgatggaagaatc

SEQ ID NO: 127997 - DNA, 20 bp, Artificial sequence
  SiRNA target sequence
cacgagtgatggaagaatcg

SEQ ID NO: 127998 - DNA, 20 bp, Artificial sequence
  SiRNA target sequence
acgagtgatggaagaatcgc

SEQ ID NO: 127999 - DNA, 20 bp, Artificial sequence
  SiRNA target sequence
cgagtgatggaagaatcgca

SEQ ID NO: 128000 - DNA, 20 bp, Artificial sequence
  SiRNA target sequence
gagtgatggaagaatcgcat

SEQ ID NO: 128001 - DNA, 20 bp, Artificial sequence
  SiRNA target sequence
agtgatggaagaatcgcatt

SEQ ID NO: 128002 - DNA, 20 bp, Artificial sequence
  SiRNA target sequence
gtgatggaagaatcgcattt

SEQ ID NO: 128003 - DNA, 20 bp, Artificial sequence
  SiRNA target sequence
tgatggaagaatcgcatttt

SEQ ID NO: 128004 - DNA, 20 bp, Artificial sequence
  SiRNA target sequence
gatggaagaatcgcattttt

SEQ ID NO: 128005 - DNA, 20 bp, Artificial sequence
  SiRNA target sequence
atggaagaatcgcatttttt

SEQ ID NO: 128006 - DNA, 20 bp, Artificial sequence
  SiRNA target sequence
tggaagaatcgcatttttta

SEQ ID NO: 128007 - DNA, 20 bp, Artificial sequence
  SiRNA target sequence
ggaagaatcgcattttttat

SEQ ID NO: 128008 - DNA, 20 bp, Artificial sequence
  SiRNA target sequence
gaagaatcgcattttttatg

SEQ ID NO: 128009 - DNA, 20 bp, Artificial sequence
  SiRNA target sequence
aagaatcgcattttttatga

SEQ ID NO: 128010 - DNA, 20 bp, Artificial sequence
  SiRNA target sequence
agaatcgcattttttatgaa

SEQ ID NO: 128011 - DNA, 20 bp, Artificial sequence
  SiRNA target sequence
gaatcgcattttttatgaat

SEQ ID NO: 128012 - DNA, 20 bp, Artificial sequence
  SiRNA target sequence
aatcgcattttttatgaatt

SEQ ID NO: 128013 - DNA, 20 bp, Artificial sequence
  SiRNA target sequence
atcgcattttttatgaattt

SEQ ID NO: 128014 - DNA, 20 bp, Artificial sequence
  SiRNA target sequence
tcgcattttttatgaatttt

SEQ ID NO: 128015 - DNA, 20 bp, Artificial sequence
  SiRNA target sequence
cgcattttttatgaatttta

SEQ ID NO: 128016 - DNA, 20 bp, Artificial sequence
  SiRNA target sequence
gcattttttatgaattttaa

SEQ ID NO: 128017 - DNA, 20 bp, Artificial sequence
  SiRNA target sequence
cattttttatgaattttaaa

SEQ ID NO: 128018 - DNA, 20 bp, Artificial sequence
  SiRNA target sequence
attttttatgaattttaaag

SEQ ID NO: 128019 - DNA, 20 bp, Artificial sequence
  SiRNA target sequence
ttttttatgaattttaaagg

SEQ ID NO: 128020 - DNA, 20 bp, Artificial sequence
  SiRNA target sequence
tttttatgaattttaaaggt

SEQ ID NO: 128021 - DNA, 20 bp, Artificial sequence
  SiRNA target sequence
ttttatgaattttaaaggta

SEQ ID NO: 128022 - DNA, 20 bp, Artificial sequence
  SiRNA target sequence
tttatgaattttaaaggtaa

SEQ ID NO: 128023 - DNA, 20 bp, Artificial sequence
  SiRNA target sequence
ttatgaattttaaaggtaaa

SEQ ID NO: 128024 - DNA, 20 bp, Artificial sequence
  SiRNA target sequence
tatgaattttaaaggtaaaa

SEQ ID NO: 128025 - DNA, 20 bp, Artificial sequence
  SiRNA target sequence
atgaattttaaaggtaaaac

SEQ ID NO: 128026 - DNA, 20 bp, Artificial sequence
  SiRNA target sequence
tgaattttaaaggtaaaaca

SEQ ID NO: 128027 - DNA, 20 bp, Artificial sequence
  SiRNA target sequence
gaattttaaaggtaaaacat

SEQ ID NO: 128028 - DNA, 20 bp, Artificial sequence
  SiRNA target sequence
aattttaaaggtaaaacatt

SEQ ID NO: 128029 - DNA, 20 bp, Artificial sequence
  SiRNA target sequence
attttaaaggtaaaacattg

SEQ ID NO: 128030 - DNA, 20 bp, Artificial sequence
  SiRNA target sequence
ttttaaaggtaaaacattga

SEQ ID NO: 128031 - DNA, 20 bp, Artificial sequence
  SiRNA target sequence
tttaaaggtaaaacattgat

SEQ ID NO: 128032 - DNA, 20 bp, Artificial sequence
  SiRNA target sequence
ttaaaggtaaaacattgatt

SEQ ID NO: 128033 - DNA, 20 bp, Artificial sequence
  SiRNA target sequence
taaaggtaaaacattgattg

SEQ ID NO: 128034 - DNA, 20 bp, Artificial sequence
  SiRNA target sequence
aaaggtaaaacattgattgg

SEQ ID NO: 128035 - DNA, 20 bp, Artificial sequence
  SiRNA target sequence
aaggtaaaacattgattgga

SEQ ID NO: 128036 - DNA, 20 bp, Artificial sequence
  SiRNA target sequence
aggtaaaacattgattggag

SEQ ID NO: 128037 - DNA, 20 bp, Artificial sequence
  SiRNA target sequence
ggtaaaacattgattggagg

SEQ ID NO: 128038 - DNA, 20 bp, Artificial sequence
  SiRNA target sequence
gtaaaacattgattggagga

SEQ ID NO: 128039 - DNA, 20 bp, Artificial sequence
  SiRNA target sequence
taaaacattgattggaggaa

SEQ ID NO: 128040 - DNA, 20 bp, Artificial sequence
  SiRNA target sequence
aaaacattgattggaggaac

SEQ ID NO: 128041 - DNA, 20 bp, Artificial sequence
  SiRNA target sequence
aaacattgattggaggaaca

SEQ ID NO: 128042 - DNA, 20 bp, Artificial sequence
  SiRNA target sequence
aacattgattggaggaacag

SEQ ID NO: 128043 - DNA, 20 bp, Artificial sequence
  SiRNA target sequence
acattgattggaggaacaga

SEQ ID NO: 128044 - DNA, 20 bp, Artificial sequence
  SiRNA target sequence
cattgattggaggaacagat

SEQ ID NO: 128045 - DNA, 20 bp, Artificial sequence
  SiRNA target sequence
attgattggaggaacagatg

SEQ ID NO: 128046 - DNA, 20 bp, Artificial sequence
  SiRNA target sequence
ttgattggaggaacagatgt

SEQ ID NO: 128047 - DNA, 20 bp, Artificial sequence
  SiRNA target sequence
tgattggaggaacagatgtt

SEQ ID NO: 128048 - DNA, 20 bp, Artificial sequence
  SiRNA target sequence
gattggaggaacagatgtta

SEQ ID NO: 128049 - DNA, 20 bp, Artificial sequence
  SiRNA target sequence
attggaggaacagatgttaa

SEQ ID NO: 128050 - DNA, 20 bp, Artificial sequence
  SiRNA target sequence
ttggaggaacagatgttaag

SEQ ID NO: 128051 - DNA, 20 bp, Artificial sequence
  SiRNA target sequence
tggaggaacagatgttaagt

SEQ ID NO: 128052 - DNA, 20 bp, Artificial sequence
  SiRNA target sequence
ggaggaacagatgttaagtg

SEQ ID NO: 128053 - DNA, 20 bp, Artificial sequence
  SiRNA target sequence
gaggaacagatgttaagtgt

SEQ ID NO: 128054 - DNA, 20 bp, Artificial sequence
  SiRNA target sequence
aggaacagatgttaagtgta

SEQ ID NO: 128055 - DNA, 20 bp, Artificial sequence
  SiRNA target sequence
ggaacagatgttaagtgtaa

SEQ ID NO: 128056 - DNA, 20 bp, Artificial sequence
  SiRNA target sequence
gaacagatgttaagtgtaaa

SEQ ID NO: 128057 - DNA, 20 bp, Artificial sequence
  SiRNA target sequence
aacagatgttaagtgtaaag

SEQ ID NO: 128058 - DNA, 20 bp, Artificial sequence
  SiRNA target sequence
acagatgttaagtgtaaagt

SEQ ID NO: 128059 - DNA, 20 bp, Artificial sequence
  SiRNA target sequence
cagatgttaagtgtaaagtt

SEQ ID NO: 128060 - DNA, 20 bp, Artificial sequence
  SiRNA target sequence
agatgttaagtgtaaagttg

SEQ ID NO: 128061 - DNA, 20 bp, Artificial sequence
  SiRNA target sequence
gatgttaagtgtaaagttga

SEQ ID NO: 128062 - DNA, 20 bp, Artificial sequence
  SiRNA target sequence
atgttaagtgtaaagttgaa

SEQ ID NO: 128063 - DNA, 20 bp, Artificial sequence
  SiRNA target sequence
tgttaagtgtaaagttgaag

SEQ ID NO: 128064 - DNA, 20 bp, Artificial sequence
  SiRNA target sequence
gttaagtgtaaagttgaaga

SEQ ID NO: 128065 - DNA, 20 bp, Artificial sequence
  SiRNA target sequence
ttaagtgtaaagttgaagat

SEQ ID NO: 128066 - DNA, 20 bp, Artificial sequence
  SiRNA target sequence
taagtgtaaagttgaagatt

SEQ ID NO: 128067 - DNA, 20 bp, Artificial sequence
  SiRNA target sequence
aagtgtaaagttgaagattt

SEQ ID NO: 128068 - DNA, 20 bp, Artificial sequence
  SiRNA target sequence
agtgtaaagttgaagattta

SEQ ID NO: 128069 - DNA, 20 bp, Artificial sequence
  SiRNA target sequence
gtgtaaagttgaagatttaa

SEQ ID NO: 128070 - DNA, 20 bp, Artificial sequence
  SiRNA target sequence
tgtaaagttgaagatttaat

SEQ ID NO: 128071 - DNA, 20 bp, Artificial sequence
  SiRNA target sequence
gtaaagttgaagatttaata

SEQ ID NO: 128072 - DNA, 20 bp, Artificial sequence
  SiRNA target sequence
taaagttgaagatttaataa

SEQ ID NO: 128073 - DNA, 20 bp, Artificial sequence
  SiRNA target sequence
aaagttgaagatttaataaa

SEQ ID NO: 128074 - DNA, 20 bp, Artificial sequence
  SiRNA target sequence
aagttgaagatttaataaaa

SEQ ID NO: 128075 - DNA, 20 bp, Artificial sequence
  SiRNA target sequence
agttgaagatttaataaaac

SEQ ID NO: 128076 - DNA, 20 bp, Artificial sequence
  SiRNA target sequence
gttgaagatttaataaaacc

SEQ ID NO: 128077 - DNA, 20 bp, Artificial sequence
  SiRNA target sequence
ttgaagatttaataaaaccg

SEQ ID NO: 128078 - DNA, 20 bp, Artificial sequence
  SiRNA target sequence
tgaagatttaataaaaccga

SEQ ID NO: 128079 - DNA, 20 bp, Artificial sequence
  SiRNA target sequence
gaagatttaataaaaccgac

SEQ ID NO: 128080 - DNA, 20 bp, Artificial sequence
  SiRNA target sequence
aagatttaataaaaccgact

SEQ ID NO: 128081 - DNA, 20 bp, Artificial sequence
  SiRNA target sequence
agatttaataaaaccgactg

SEQ ID NO: 128082 - DNA, 20 bp, Artificial sequence
  SiRNA target sequence
gatttaataaaaccgactga

SEQ ID NO: 128083 - DNA, 20 bp, Artificial sequence
  SiRNA target sequence
atttaataaaaccgactgaa

SEQ ID NO: 128084 - DNA, 20 bp, Artificial sequence
  SiRNA target sequence
tttaataaaaccgactgaag

SEQ ID NO: 128085 - DNA, 20 bp, Artificial sequence
  SiRNA target sequence
ttaataaaaccgactgaaga

SEQ ID NO: 128086 - DNA, 20 bp, Artificial sequence
  SiRNA target sequence
taataaaaccgactgaagaa

SEQ ID NO: 128087 - DNA, 20 bp, Artificial sequence
  SiRNA target sequence
aataaaaccgactgaagaag

SEQ ID NO: 128088 - DNA, 20 bp, Artificial sequence
  SiRNA target sequence
ataaaaccgactgaagaaga

SEQ ID NO: 128089 - DNA, 20 bp, Artificial sequence
  SiRNA target sequence
taaaaccgactgaagaagat

SEQ ID NO: 128090 - DNA, 20 bp, Artificial sequence
  SiRNA target sequence
aaaaccgactgaagaagatc

SEQ ID NO: 128091 - DNA, 20 bp, Artificial sequence
  SiRNA target sequence
aaaccgactgaagaagatct

SEQ ID NO: 128092 - DNA, 20 bp, Artificial sequence
  SiRNA target sequence
aaccgactgaagaagatcta

SEQ ID NO: 128093 - DNA, 20 bp, Artificial sequence
  SiRNA target sequence
accgactgaagaagatctaa

SEQ ID NO: 128094 - DNA, 20 bp, Artificial sequence
  SiRNA target sequence
ccgactgaagaagatctaaa

SEQ ID NO: 128095 - DNA, 20 bp, Artificial sequence
  SiRNA target sequence
cgactgaagaagatctaaac

SEQ ID NO: 128096 - DNA, 20 bp, Artificial sequence
  SiRNA target sequence
gactgaagaagatctaaact

SEQ ID NO: 128097 - DNA, 20 bp, Artificial sequence
  SiRNA target sequence
actgaagaagatctaaactt

SEQ ID NO: 128098 - DNA, 20 bp, Artificial sequence
  SiRNA target sequence
ctgaagaagatctaaacttt

SEQ ID NO: 128099 - DNA, 20 bp, Artificial sequence
  SiRNA target sequence
tgaagaagatctaaactttc

SEQ ID NO: 128100 - DNA, 20 bp, Artificial sequence
  SiRNA target sequence
gaagaagatctaaactttct

SEQ ID NO: 128101 - DNA, 20 bp, Artificial sequence
  SiRNA target sequence
aagaagatctaaactttctt

SEQ ID NO: 128102 - DNA, 20 bp, Artificial sequence
  SiRNA target sequence
agaagatctaaactttctta

SEQ ID NO: 128103 - DNA, 20 bp, Artificial sequence
  SiRNA target sequence
gaagatctaaactttcttat

SEQ ID NO: 128104 - DNA, 20 bp, Artificial sequence
  SiRNA target sequence
aagatctaaactttcttatt

SEQ ID NO: 128105 - DNA, 20 bp, Artificial sequence
  SiRNA target sequence
agatctaaactttcttattc

SEQ ID NO: 128106 - DNA, 20 bp, Artificial sequence
  SiRNA target sequence
gatctaaactttcttattca

SEQ ID NO: 128107 - DNA, 20 bp, Artificial sequence
  SiRNA target sequence
atctaaactttcttattcac

SEQ ID NO: 128108 - DNA, 20 bp, Artificial sequence
  SiRNA target sequence
tctaaactttcttattcacg

SEQ ID NO: 128109 - DNA, 20 bp, Artificial sequence
  SiRNA target sequence
ctaaactttcttattcacga

SEQ ID NO: 128110 - DNA, 20 bp, Artificial sequence
  SiRNA target sequence
taaactttcttattcacgag

SEQ ID NO: 128111 - DNA, 20 bp, Artificial sequence
  SiRNA target sequence
aaactttcttattcacgagg

SEQ ID NO: 128112 - DNA, 20 bp, Artificial sequence
  SiRNA target sequence
aactttcttattcacgaggc

SEQ ID NO: 128113 - DNA, 20 bp, Artificial sequence
  SiRNA target sequence
actttcttattcacgaggcc

SEQ ID NO: 128114 - DNA, 20 bp, Artificial sequence
  SiRNA target sequence
ctttcttattcacgaggcca

SEQ ID NO: 128115 - DNA, 20 bp, Artificial sequence
  SiRNA target sequence
tttcttattcacgaggccaa

SEQ ID NO: 128116 - DNA, 20 bp, Artificial sequence
  SiRNA target sequence
ttcttattcacgaggccaat

SEQ ID NO: 128117 - DNA, 20 bp, Artificial sequence
  SiRNA target sequence
tcttattcacgaggccaatt

SEQ ID NO: 128118 - DNA, 20 bp, Artificial sequence
  SiRNA target sequence
cttattcacgaggccaatta

SEQ ID NO: 128119 - DNA, 20 bp, Artificial sequence
  SiRNA target sequence
ttattcacgaggccaattat

SEQ ID NO: 128120 - DNA, 20 bp, Artificial sequence
  SiRNA target sequence
tattcacgaggccaattatt

SEQ ID NO: 128121 - DNA, 20 bp, Artificial sequence
  SiRNA target sequence
attcacgaggccaattattt

SEQ ID NO: 128122 - DNA, 20 bp, Artificial sequence
  SiRNA target sequence
ttcacgaggccaattatttt

SEQ ID NO: 128123 - DNA, 20 bp, Artificial sequence
  SiRNA target sequence
tcacgaggccaattatttta

SEQ ID NO: 128124 - DNA, 20 bp, Artificial sequence
  SiRNA target sequence
cacgaggccaattattttac

SEQ ID NO: 128125 - DNA, 20 bp, Artificial sequence
  SiRNA target sequence
acgaggccaattattttaca

SEQ ID NO: 128126 - DNA, 20 bp, Artificial sequence
  SiRNA target sequence
cgaggccaattattttacag

SEQ ID NO: 128127 - DNA, 20 bp, Artificial sequence
  SiRNA target sequence
gaggccaattattttacaga

SEQ ID NO: 128128 - DNA, 20 bp, Artificial sequence
  SiRNA target sequence
aggccaattattttacagat

SEQ ID NO: 128129 - DNA, 20 bp, Artificial sequence
  SiRNA target sequence
ggccaattattttacagatc

SEQ ID NO: 128130 - DNA, 20 bp, Artificial sequence
  SiRNA target sequence
gccaattattttacagatca

SEQ ID NO: 128131 - DNA, 20 bp, Artificial sequence
  SiRNA target sequence
ccaattattttacagatcac

SEQ ID NO: 128132 - DNA, 20 bp, Artificial sequence
  SiRNA target sequence
caattattttacagatcaca

SEQ ID NO: 128133 - DNA, 20 bp, Artificial sequence
  SiRNA target sequence
aattattttacagatcacaa

SEQ ID NO: 128134 - DNA, 20 bp, Artificial sequence
  SiRNA target sequence
attattttacagatcacaat

SEQ ID NO: 128135 - DNA, 20 bp, Artificial sequence
  SiRNA target sequence
ttattttacagatcacaatt

SEQ ID NO: 128136 - DNA, 20 bp, Artificial sequence
  SiRNA target sequence
tattttacagatcacaattt

SEQ ID NO: 128137 - DNA, 20 bp, Artificial sequence
  SiRNA target sequence
attttacagatcacaattta

SEQ ID NO: 128138 - DNA, 20 bp, Artificial sequence
  SiRNA target sequence
ttttacagatcacaatttaa

SEQ ID NO: 128139 - DNA, 20 bp, Artificial sequence
  SiRNA target sequence
tttacagatcacaatttaaa

SEQ ID NO: 128140 - DNA, 20 bp, Artificial sequence
  SiRNA target sequence
ttacagatcacaatttaaaa

SEQ ID NO: 128141 - DNA, 20 bp, Artificial sequence
  SiRNA target sequence
tacagatcacaatttaaaat

SEQ ID NO: 128142 - DNA, 20 bp, Artificial sequence
  SiRNA target sequence
acagatcacaatttaaaatt

SEQ ID NO: 128143 - DNA, 20 bp, Artificial sequence
  SiRNA target sequence
cagatcacaatttaaaatta

SEQ ID NO: 128144 - DNA, 20 bp, Artificial sequence
  SiRNA target sequence
agatcacaatttaaaattaa

SEQ ID NO: 128145 - DNA, 20 bp, Artificial sequence
  SiRNA target sequence
gatcacaatttaaaattaac

SEQ ID NO: 128146 - DNA, 20 bp, Artificial sequence
  SiRNA target sequence
atcacaatttaaaattaaca

SEQ ID NO: 128147 - DNA, 20 bp, Artificial sequence
  SiRNA target sequence
tcacaatttaaaattaacaa

SEQ ID NO: 128148 - DNA, 20 bp, Artificial sequence
  SiRNA target sequence
cacaatttaaaattaacaaa

SEQ ID NO: 128149 - DNA, 20 bp, Artificial sequence
  SiRNA target sequence
acaatttaaaattaacaaaa

SEQ ID NO: 128150 - DNA, 20 bp, Artificial sequence
  SiRNA target sequence
caatttaaaattaacaaaaa

SEQ ID NO: 128151 - DNA, 20 bp, Artificial sequence
  SiRNA target sequence
aatttaaaattaacaaaaaa

SEQ ID NO: 128152 - DNA, 20 bp, Artificial sequence
  SiRNA target sequence
atttaaaattaacaaaaaaa

SEQ ID NO: 128153 - DNA, 20 bp, Artificial sequence
  SiRNA target sequence
tttaaaattaacaaaaaaag

SEQ ID NO: 128154 - DNA, 20 bp, Artificial sequence
  SiRNA target sequence
ttaaaattaacaaaaaaaga

SEQ ID NO: 128155 - DNA, 20 bp, Artificial sequence
  SiRNA target sequence
taaaattaacaaaaaaagat

SEQ ID NO: 128156 - DNA, 20 bp, Artificial sequence
  SiRNA target sequence
aaaattaacaaaaaaagatg

SEQ ID NO: 128157 - DNA, 20 bp, Artificial sequence
  SiRNA target sequence
aaattaacaaaaaaagatgt

SEQ ID NO: 128158 - DNA, 20 bp, Artificial sequence
  SiRNA target sequence
aattaacaaaaaaagatgtt

SEQ ID NO: 128159 - DNA, 20 bp, Artificial sequence
  SiRNA target sequence
attaacaaaaaaagatgttt

SEQ ID NO: 128160 - DNA, 20 bp, Artificial sequence
  SiRNA target sequence
ttaacaaaaaaagatgtttt

SEQ ID NO: 128161 - DNA, 20 bp, Artificial sequence
  SiRNA target sequence
taacaaaaaaagatgttttg

SEQ ID NO: 128162 - DNA, 20 bp, Artificial sequence
  SiRNA target sequence
aacaaaaaaagatgttttgt

SEQ ID NO: 128163 - DNA, 20 bp, Artificial sequence
  SiRNA target sequence
acaaaaaaagatgttttgtc

SEQ ID NO: 128164 - DNA, 20 bp, Artificial sequence
  SiRNA target sequence
caaaaaaagatgttttgtct

SEQ ID NO: 128165 - DNA, 20 bp, Artificial sequence
  SiRNA target sequence
aaaaaaagatgttttgtctg

SEQ ID NO: 128166 - DNA, 20 bp, Artificial sequence
  SiRNA target sequence
aaaaaagatgttttgtctgt

SEQ ID NO: 128167 - DNA, 20 bp, Artificial sequence
  SiRNA target sequence
aaaaagatgttttgtctgtt

SEQ ID NO: 128168 - DNA, 20 bp, Artificial sequence
  SiRNA target sequence
aaaagatgttttgtctgttt

SEQ ID NO: 128169 - DNA, 20 bp, Artificial sequence
  SiRNA target sequence
aaagatgttttgtctgtttg

SEQ ID NO: 128170 - DNA, 20 bp, Artificial sequence
  SiRNA target sequence
aagatgttttgtctgtttgg

SEQ ID NO: 128171 - DNA, 20 bp, Artificial sequence
  SiRNA target sequence
agatgttttgtctgtttgga

SEQ ID NO: 128172 - DNA, 20 bp, Artificial sequence
  SiRNA target sequence
gatgttttgtctgtttggac

SEQ ID NO: 128173 - DNA, 20 bp, Artificial sequence
  SiRNA target sequence
atgttttgtctgtttggaca

SEQ ID NO: 128174 - DNA, 20 bp, Artificial sequence
  SiRNA target sequence
tgttttgtctgtttggacag

SEQ ID NO: 128175 - DNA, 20 bp, Artificial sequence
  SiRNA target sequence
gttttgtctgtttggacagg

SEQ ID NO: 128176 - DNA, 20 bp, Artificial sequence
  SiRNA target sequence
ttttgtctgtttggacaggt

SEQ ID NO: 128177 - DNA, 20 bp, Artificial sequence
  SiRNA target sequence
tttgtctgtttggacaggta

SEQ ID NO: 128178 - DNA, 20 bp, Artificial sequence
  SiRNA target sequence
ttgtctgtttggacaggtat

SEQ ID NO: 128179 - DNA, 20 bp, Artificial sequence
  SiRNA target sequence
tgtctgtttggacaggtatt

SEQ ID NO: 128180 - DNA, 20 bp, Artificial sequence
  SiRNA target sequence
gtctgtttggacaggtatta

SEQ ID NO: 128181 - DNA, 20 bp, Artificial sequence
  SiRNA target sequence
tctgtttggacaggtattag

SEQ ID NO: 128182 - DNA, 20 bp, Artificial sequence
  SiRNA target sequence
ctgtttggacaggtattaga

SEQ ID NO: 128183 - DNA, 20 bp, Artificial sequence
  SiRNA target sequence
tgtttggacaggtattagac

SEQ ID NO: 128184 - DNA, 20 bp, Artificial sequence
  SiRNA target sequence
gtttggacaggtattagacc

SEQ ID NO: 128185 - DNA, 20 bp, Artificial sequence
  SiRNA target sequence
tttggacaggtattagaccg

SEQ ID NO: 128186 - DNA, 20 bp, Artificial sequence
  SiRNA target sequence
ttggacaggtattagaccgt

SEQ ID NO: 128187 - DNA, 20 bp, Artificial sequence
  SiRNA target sequence
tggacaggtattagaccgtt

SEQ ID NO: 128188 - DNA, 20 bp, Artificial sequence
  SiRNA target sequence
ggacaggtattagaccgtta

SEQ ID NO: 128189 - DNA, 20 bp, Artificial sequence
  SiRNA target sequence
gacaggtattagaccgttag

SEQ ID NO: 128190 - DNA, 20 bp, Artificial sequence
  SiRNA target sequence
acaggtattagaccgttagt

SEQ ID NO: 128191 - DNA, 20 bp, Artificial sequence
  SiRNA target sequence
caggtattagaccgttagtc

SEQ ID NO: 128192 - DNA, 20 bp, Artificial sequence
  SiRNA target sequence
aggtattagaccgttagtca

SEQ ID NO: 128193 - DNA, 20 bp, Artificial sequence
  SiRNA target sequence
ggtattagaccgttagtcaa

SEQ ID NO: 128194 - DNA, 20 bp, Artificial sequence
  SiRNA target sequence
gtattagaccgttagtcaag

SEQ ID NO: 128195 - DNA, 20 bp, Artificial sequence
  SiRNA target sequence
tattagaccgttagtcaagg

SEQ ID NO: 128196 - DNA, 20 bp, Artificial sequence
  SiRNA target sequence
attagaccgttagtcaagga

SEQ ID NO: 128197 - DNA, 20 bp, Artificial sequence
  SiRNA target sequence
ttagaccgttagtcaaggat

SEQ ID NO: 128198 - DNA, 20 bp, Artificial sequence
  SiRNA target sequence
tagaccgttagtcaaggatt

SEQ ID NO: 128199 - DNA, 20 bp, Artificial sequence
  SiRNA target sequence
agaccgttagtcaaggattt

SEQ ID NO: 128200 - DNA, 20 bp, Artificial sequence
  SiRNA target sequence
gaccgttagtcaaggattta

SEQ ID NO: 128201 - DNA, 20 bp, Artificial sequence
  SiRNA target sequence
accgttagtcaaggatttat

SEQ ID NO: 128202 - DNA, 20 bp, Artificial sequence
  SiRNA target sequence
ccgttagtcaaggatttatc

SEQ ID NO: 128203 - DNA, 20 bp, Artificial sequence
  SiRNA target sequence
cgttagtcaaggatttatcg

SEQ ID NO: 128204 - DNA, 20 bp, Artificial sequence
  SiRNA target sequence
gttagtcaaggatttatcga

SEQ ID NO: 128205 - DNA, 20 bp, Artificial sequence
  SiRNA target sequence
ttagtcaaggatttatcgaa

SEQ ID NO: 128206 - DNA, 20 bp, Artificial sequence
  SiRNA target sequence
tagtcaaggatttatcgaaa

SEQ ID NO: 128207 - DNA, 20 bp, Artificial sequence
  SiRNA target sequence
agtcaaggatttatcgaaaa

SEQ ID NO: 128208 - DNA, 20 bp, Artificial sequence
  SiRNA target sequence
gtcaaggatttatcgaaaag

SEQ ID NO: 128209 - DNA, 20 bp, Artificial sequence
  SiRNA target sequence
tcaaggatttatcgaaaagt

SEQ ID NO: 128210 - DNA, 20 bp, Artificial sequence
  SiRNA target sequence
caaggatttatcgaaaagtt

SEQ ID NO: 128211 - DNA, 20 bp, Artificial sequence
  SiRNA target sequence
aaggatttatcgaaaagttc

SEQ ID NO: 128212 - DNA, 20 bp, Artificial sequence
  SiRNA target sequence
aggatttatcgaaaagttca

SEQ ID NO: 128213 - DNA, 20 bp, Artificial sequence
  SiRNA target sequence
ggatttatcgaaaagttcaa

SEQ ID NO: 128214 - DNA, 20 bp, Artificial sequence
  SiRNA target sequence
gatttatcgaaaagttcaac

SEQ ID NO: 128215 - DNA, 20 bp, Artificial sequence
  SiRNA target sequence
atttatcgaaaagttcaaca

SEQ ID NO: 128216 - DNA, 20 bp, Artificial sequence
  SiRNA target sequence
tttatcgaaaagttcaacag

SEQ ID NO: 128217 - DNA, 20 bp, Artificial sequence
  SiRNA target sequence
ttatcgaaaagttcaacaga

SEQ ID NO: 128218 - DNA, 20 bp, Artificial sequence
  SiRNA target sequence
tatcgaaaagttcaacagaa

SEQ ID NO: 128219 - DNA, 20 bp, Artificial sequence
  SiRNA target sequence
atcgaaaagttcaacagaaa

SEQ ID NO: 128220 - DNA, 20 bp, Artificial sequence
  SiRNA target sequence
tcgaaaagttcaacagaaaa

SEQ ID NO: 128221 - DNA, 20 bp, Artificial sequence
  SiRNA target sequence
cgaaaagttcaacagaaaag

SEQ ID NO: 128222 - DNA, 20 bp, Artificial sequence
  SiRNA target sequence
gaaaagttcaacagaaaaga

SEQ ID NO: 128223 - DNA, 20 bp, Artificial sequence
  SiRNA target sequence
aaaagttcaacagaaaagat

SEQ ID NO: 128224 - DNA, 20 bp, Artificial sequence
  SiRNA target sequence
aaagttcaacagaaaagata

SEQ ID NO: 128225 - DNA, 20 bp, Artificial sequence
  SiRNA target sequence
aagttcaacagaaaagatat

SEQ ID NO: 128226 - DNA, 20 bp, Artificial sequence
  SiRNA target sequence
agttcaacagaaaagatatg

SEQ ID NO: 128227 - DNA, 20 bp, Artificial sequence
  SiRNA target sequence
gttcaacagaaaagatatgt

SEQ ID NO: 128228 - DNA, 20 bp, Artificial sequence
  SiRNA target sequence
ttcaacagaaaagatatgta

SEQ ID NO: 128229 - DNA, 20 bp, Artificial sequence
  SiRNA target sequence
tcaacagaaaagatatgtag

SEQ ID NO: 128230 - DNA, 20 bp, Artificial sequence
  SiRNA target sequence
caacagaaaagatatgtaga

SEQ ID NO: 128231 - DNA, 20 bp, Artificial sequence
  SiRNA target sequence
aacagaaaagatatgtagaa

SEQ ID NO: 128232 - DNA, 20 bp, Artificial sequence
  SiRNA target sequence
acagaaaagatatgtagaaa

SEQ ID NO: 128233 - DNA, 20 bp, Artificial sequence
  SiRNA target sequence
cagaaaagatatgtagaaaa

SEQ ID NO: 128234 - DNA, 20 bp, Artificial sequence
  SiRNA target sequence
agaaaagatatgtagaaaac

SEQ ID NO: 128235 - DNA, 20 bp, Artificial sequence
  SiRNA target sequence
gaaaagatatgtagaaaaca

SEQ ID NO: 128236 - DNA, 20 bp, Artificial sequence
  SiRNA target sequence
aaaagatatgtagaaaacat

SEQ ID NO: 128237 - DNA, 20 bp, Artificial sequence
  SiRNA target sequence
aaagatatgtagaaaacata

SEQ ID NO: 128238 - DNA, 20 bp, Artificial sequence
  SiRNA target sequence
aagatatgtagaaaacatac

SEQ ID NO: 128239 - DNA, 20 bp, Artificial sequence
  SiRNA target sequence
agatatgtagaaaacatact

SEQ ID NO: 128240 - DNA, 20 bp, Artificial sequence
  SiRNA target sequence
gatatgtagaaaacatacta

SEQ ID NO: 128241 - DNA, 20 bp, Artificial sequence
  SiRNA target sequence
atatgtagaaaacatactat

SEQ ID NO: 128242 - DNA, 20 bp, Artificial sequence
  SiRNA target sequence
tatgtagaaaacatactata

SEQ ID NO: 128243 - DNA, 20 bp, Artificial sequence
  SiRNA target sequence
atgtagaaaacatactataa

SEQ ID NO: 128244 - DNA, 20 bp, Artificial sequence
  SiRNA target sequence
tgtagaaaacatactataag

SEQ ID NO: 128245 - DNA, 20 bp, Artificial sequence
  SiRNA target sequence
gtagaaaacatactataaga

SEQ ID NO: 128246 - DNA, 20 bp, Artificial sequence
  SiRNA target sequence
tagaaaacatactataagaa

SEQ ID NO: 128247 - DNA, 20 bp, Artificial sequence
  SiRNA target sequence
agaaaacatactataagaat

SEQ ID NO: 128248 - DNA, 20 bp, Artificial sequence
  SiRNA target sequence
gaaaacatactataagaata

SEQ ID NO: 128249 - DNA, 20 bp, Artificial sequence
  SiRNA target sequence
aaaacatactataagaatag

SEQ ID NO: 128250 - DNA, 20 bp, Artificial sequence
  SiRNA target sequence
aaacatactataagaataga

SEQ ID NO: 128251 - DNA, 20 bp, Artificial sequence
  SiRNA target sequence
aacatactataagaatagat

SEQ ID NO: 128252 - DNA, 20 bp, Artificial sequence
  SiRNA target sequence
acatactataagaatagata

SEQ ID NO: 128253 - DNA, 20 bp, Artificial sequence
  SiRNA target sequence
catactataagaatagataa

SEQ ID NO: 128254 - DNA, 20 bp, Artificial sequence
  SiRNA target sequence
atactataagaatagataaa

SEQ ID NO: 128255 - DNA, 20 bp, Artificial sequence
  SiRNA target sequence
tactataagaatagataaag

SEQ ID NO: 128256 - DNA, 20 bp, Artificial sequence
  SiRNA target sequence
actataagaatagataaaga

SEQ ID NO: 128257 - DNA, 20 bp, Artificial sequence
  SiRNA target sequence
ctataagaatagataaagac

SEQ ID NO: 128258 - DNA, 20 bp, Artificial sequence
  SiRNA target sequence
tataagaatagataaagaca

SEQ ID NO: 128259 - DNA, 20 bp, Artificial sequence
  SiRNA target sequence
ataagaatagataaagacaa

SEQ ID NO: 128260 - DNA, 20 bp, Artificial sequence
  SiRNA target sequence
taagaatagataaagacaat

SEQ ID NO: 128261 - DNA, 20 bp, Artificial sequence
  SiRNA target sequence
aagaatagataaagacaata

SEQ ID NO: 128262 - DNA, 20 bp, Artificial sequence
  SiRNA target sequence
agaatagataaagacaatat

SEQ ID NO: 128263 - DNA, 20 bp, Artificial sequence
  SiRNA target sequence
gaatagataaagacaatatg

SEQ ID NO: 128264 - DNA, 20 bp, Artificial sequence
  SiRNA target sequence
aatagataaagacaatatgg

SEQ ID NO: 128265 - DNA, 20 bp, Artificial sequence
  SiRNA target sequence
atagataaagacaatatggt

SEQ ID NO: 128266 - DNA, 20 bp, Artificial sequence
  SiRNA target sequence
tagataaagacaatatggta

SEQ ID NO: 128267 - DNA, 20 bp, Artificial sequence
  SiRNA target sequence
agataaagacaatatggtaa

SEQ ID NO: 128268 - DNA, 20 bp, Artificial sequence
  SiRNA target sequence
gataaagacaatatggtaac

SEQ ID NO: 128269 - DNA, 20 bp, Artificial sequence
  SiRNA target sequence
ataaagacaatatggtaact

SEQ ID NO: 128270 - DNA, 20 bp, Artificial sequence
  SiRNA target sequence
taaagacaatatggtaactg

SEQ ID NO: 128271 - DNA, 20 bp, Artificial sequence
  SiRNA target sequence
aaagacaatatggtaactgt

SEQ ID NO: 128272 - DNA, 20 bp, Artificial sequence
  SiRNA target sequence
aagacaatatggtaactgta

SEQ ID NO: 128273 - DNA, 20 bp, Artificial sequence
  SiRNA target sequence
agacaatatggtaactgtaa

SEQ ID NO: 128274 - DNA, 20 bp, Artificial sequence
  SiRNA target sequence
gacaatatggtaactgtaac

SEQ ID NO: 128275 - DNA, 20 bp, Artificial sequence
  SiRNA target sequence
acaatatggtaactgtaaca

SEQ ID NO: 128276 - DNA, 20 bp, Artificial sequence
  SiRNA target sequence
caatatggtaactgtaacag

SEQ ID NO: 128277 - DNA, 20 bp, Artificial sequence
  SiRNA target sequence
aatatggtaactgtaacagg

SEQ ID NO: 128278 - DNA, 20 bp, Artificial sequence
  SiRNA target sequence
atatggtaactgtaacaggt

SEQ ID NO: 128279 - DNA, 20 bp, Artificial sequence
  SiRNA target sequence
tatggtaactgtaacaggtg

SEQ ID NO: 128280 - DNA, 20 bp, Artificial sequence
  SiRNA target sequence
atggtaactgtaacaggtgg

SEQ ID NO: 128281 - DNA, 20 bp, Artificial sequence
  SiRNA target sequence
tggtaactgtaacaggtggt

SEQ ID NO: 128282 - DNA, 20 bp, Artificial sequence
  SiRNA target sequence
ggtaactgtaacaggtggta

SEQ ID NO: 128283 - DNA, 20 bp, Artificial sequence
  SiRNA target sequence
gtaactgtaacaggtggtaa

SEQ ID NO: 128284 - DNA, 20 bp, Artificial sequence
  SiRNA target sequence
taactgtaacaggtggtaag

SEQ ID NO: 128285 - DNA, 20 bp, Artificial sequence
  SiRNA target sequence
aactgtaacaggtggtaagt

SEQ ID NO: 128286 - DNA, 20 bp, Artificial sequence
  SiRNA target sequence
actgtaacaggtggtaagtg

SEQ ID NO: 128287 - DNA, 20 bp, Artificial sequence
  SiRNA target sequence
ctgtaacaggtggtaagtgg

SEQ ID NO: 128288 - DNA, 20 bp, Artificial sequence
  SiRNA target sequence
tgtaacaggtggtaagtgga

SEQ ID NO: 128289 - DNA, 20 bp, Artificial sequence
  SiRNA target sequence
gtaacaggtggtaagtggac

SEQ ID NO: 128290 - DNA, 20 bp, Artificial sequence
  SiRNA target sequence
taacaggtggtaagtggaca

SEQ ID NO: 128291 - DNA, 20 bp, Artificial sequence
  SiRNA target sequence
aacaggtggtaagtggacaa

SEQ ID NO: 128292 - DNA, 20 bp, Artificial sequence
  SiRNA target sequence
acaggtggtaagtggacaat

SEQ ID NO: 128293 - DNA, 20 bp, Artificial sequence
  SiRNA target sequence
caggtggtaagtggacaatt

SEQ ID NO: 128294 - DNA, 20 bp, Artificial sequence
  SiRNA target sequence
aggtggtaagtggacaattt

SEQ ID NO: 128295 - DNA, 20 bp, Artificial sequence
  SiRNA target sequence
ggtggtaagtggacaatttt

SEQ ID NO: 128296 - DNA, 20 bp, Artificial sequence
  SiRNA target sequence
gtggtaagtggacaattttt

SEQ ID NO: 128297 - DNA, 20 bp, Artificial sequence
  SiRNA target sequence
tggtaagtggacaatttttc

SEQ ID NO: 128298 - DNA, 20 bp, Artificial sequence
  SiRNA target sequence
ggtaagtggacaatttttcg

SEQ ID NO: 128299 - DNA, 20 bp, Artificial sequence
  SiRNA target sequence
gtaagtggacaatttttcga

SEQ ID NO: 128300 - DNA, 20 bp, Artificial sequence
  SiRNA target sequence
taagtggacaatttttcgac

SEQ ID NO: 128301 - DNA, 20 bp, Artificial sequence
  SiRNA target sequence
aagtggacaatttttcgact

SEQ ID NO: 128302 - DNA, 20 bp, Artificial sequence
  SiRNA target sequence
agtggacaatttttcgactt

SEQ ID NO: 128303 - DNA, 20 bp, Artificial sequence
  SiRNA target sequence
gtggacaatttttcgactta

SEQ ID NO: 128304 - DNA, 20 bp, Artificial sequence
  SiRNA target sequence
tggacaatttttcgacttat

SEQ ID NO: 128305 - DNA, 20 bp, Artificial sequence
  SiRNA target sequence
ggacaatttttcgacttatg

SEQ ID NO: 128306 - DNA, 20 bp, Artificial sequence
  SiRNA target sequence
gacaatttttcgacttatgg

SEQ ID NO: 128307 - DNA, 20 bp, Artificial sequence
  SiRNA target sequence
acaatttttcgacttatggg

SEQ ID NO: 128308 - DNA, 20 bp, Artificial sequence
  SiRNA target sequence
caatttttcgacttatggga

SEQ ID NO: 128309 - DNA, 20 bp, Artificial sequence
  SiRNA target sequence
aatttttcgacttatgggag

SEQ ID NO: 128310 - DNA, 20 bp, Artificial sequence
  SiRNA target sequence
atttttcgacttatgggaga

SEQ ID NO: 128311 - DNA, 20 bp, Artificial sequence
  SiRNA target sequence
tttttcgacttatgggagaa

SEQ ID NO: 128312 - DNA, 20 bp, Artificial sequence
  SiRNA target sequence
ttttcgacttatgggagaac

SEQ ID NO: 128313 - DNA, 20 bp, Artificial sequence
  SiRNA target sequence
tttcgacttatgggagaaca

SEQ ID NO: 128314 - DNA, 20 bp, Artificial sequence
  SiRNA target sequence
ttcgacttatgggagaacag

SEQ ID NO: 128315 - DNA, 20 bp, Artificial sequence
  SiRNA target sequence
tcgacttatgggagaacaga

SEQ ID NO: 128316 - DNA, 20 bp, Artificial sequence
  SiRNA target sequence
cgacttatgggagaacagac

SEQ ID NO: 128317 - DNA, 20 bp, Artificial sequence
  SiRNA target sequence
gacttatgggagaacagaca

SEQ ID NO: 128318 - DNA, 20 bp, Artificial sequence
  SiRNA target sequence
acttatgggagaacagacaa

SEQ ID NO: 128319 - DNA, 20 bp, Artificial sequence
  SiRNA target sequence
cttatgggagaacagacaat

SEQ ID NO: 128320 - DNA, 20 bp, Artificial sequence
  SiRNA target sequence
ttatgggagaacagacaata

SEQ ID NO: 128321 - DNA, 20 bp, Artificial sequence
  SiRNA target sequence
tatgggagaacagacaataa

SEQ ID NO: 128322 - DNA, 20 bp, Artificial sequence
  SiRNA target sequence
atgggagaacagacaataaa

SEQ ID NO: 128323 - DNA, 20 bp, Artificial sequence
  SiRNA target sequence
tgggagaacagacaataaat

SEQ ID NO: 128324 - DNA, 20 bp, Artificial sequence
  SiRNA target sequence
gggagaacagacaataaatc

SEQ ID NO: 128325 - DNA, 20 bp, Artificial sequence
  SiRNA target sequence
ggagaacagacaataaatca

SEQ ID NO: 128326 - DNA, 20 bp, Artificial sequence
  SiRNA target sequence
gagaacagacaataaatcaa

SEQ ID NO: 128327 - DNA, 20 bp, Artificial sequence
  SiRNA target sequence
agaacagacaataaatcaaa

SEQ ID NO: 128328 - DNA, 20 bp, Artificial sequence
  SiRNA target sequence
gaacagacaataaatcaaat

SEQ ID NO: 128329 - DNA, 20 bp, Artificial sequence
  SiRNA target sequence
aacagacaataaatcaaatt

SEQ ID NO: 128330 - DNA, 20 bp, Artificial sequence
  SiRNA target sequence
acagacaataaatcaaatta

SEQ ID NO: 128331 - DNA, 20 bp, Artificial sequence
  SiRNA target sequence
cagacaataaatcaaattat

SEQ ID NO: 128332 - DNA, 20 bp, Artificial sequence
  SiRNA target sequence
agacaataaatcaaattata

SEQ ID NO: 128333 - DNA, 20 bp, Artificial sequence
  SiRNA target sequence
gacaataaatcaaattataa

SEQ ID NO: 128334 - DNA, 20 bp, Artificial sequence
  SiRNA target sequence
acaataaatcaaattataaa

SEQ ID NO: 128335 - DNA, 20 bp, Artificial sequence
  SiRNA target sequence
caataaatcaaattataaaa

SEQ ID NO: 128336 - DNA, 20 bp, Artificial sequence
  SiRNA target sequence
aataaatcaaattataaaag

SEQ ID NO: 128337 - DNA, 20 bp, Artificial sequence
  SiRNA target sequence
ataaatcaaattataaaagt

SEQ ID NO: 128338 - DNA, 20 bp, Artificial sequence
  SiRNA target sequence
taaatcaaattataaaagtt

SEQ ID NO: 128339 - DNA, 20 bp, Artificial sequence
  SiRNA target sequence
aaatcaaattataaaagttt

SEQ ID NO: 128340 - DNA, 20 bp, Artificial sequence
  SiRNA target sequence
aatcaaattataaaagtttt

SEQ ID NO: 128341 - DNA, 20 bp, Artificial sequence
  SiRNA target sequence
atcaaattataaaagttttt

SEQ ID NO: 128342 - DNA, 20 bp, Artificial sequence
  SiRNA target sequence
tcaaattataaaagttttta

SEQ ID NO: 128343 - DNA, 20 bp, Artificial sequence
  SiRNA target sequence
caaattataaaagtttttaa

SEQ ID NO: 128344 - DNA, 20 bp, Artificial sequence
  SiRNA target sequence
aaattataaaagtttttaat

SEQ ID NO: 128345 - DNA, 20 bp, Artificial sequence
  SiRNA target sequence
aattataaaagtttttaata

SEQ ID NO: 128346 - DNA, 20 bp, Artificial sequence
  SiRNA target sequence
attataaaagtttttaatat

SEQ ID NO: 128347 - DNA, 20 bp, Artificial sequence
  SiRNA target sequence
ttataaaagtttttaatata

SEQ ID NO: 128348 - DNA, 20 bp, Artificial sequence
  SiRNA target sequence
tataaaagtttttaatataa

SEQ ID NO: 128349 - DNA, 20 bp, Artificial sequence
  SiRNA target sequence
ataaaagtttttaatataaa

SEQ ID NO: 128350 - DNA, 20 bp, Artificial sequence
  SiRNA target sequence
taaaagtttttaatataaag

SEQ ID NO: 128351 - DNA, 20 bp, Artificial sequence
  SiRNA target sequence
aaaagtttttaatataaagt

SEQ ID NO: 128352 - DNA, 20 bp, Artificial sequence
  SiRNA target sequence
aaagtttttaatataaagtc

SEQ ID NO: 128353 - DNA, 20 bp, Artificial sequence
  SiRNA target sequence
aagtttttaatataaagtct

SEQ ID NO: 128354 - DNA, 20 bp, Artificial sequence
  SiRNA target sequence
agtttttaatataaagtcta

SEQ ID NO: 128355 - DNA, 20 bp, Artificial sequence
  SiRNA target sequence
gtttttaatataaagtctaa

SEQ ID NO: 128356 - DNA, 20 bp, Artificial sequence
  SiRNA target sequence
tttttaatataaagtctaat

SEQ ID NO: 128357 - DNA, 20 bp, Artificial sequence
  SiRNA target sequence
ttttaatataaagtctaata

SEQ ID NO: 128358 - DNA, 20 bp, Artificial sequence
  SiRNA target sequence
tttaatataaagtctaataa

SEQ ID NO: 128359 - DNA, 20 bp, Artificial sequence
  SiRNA target sequence
ttaatataaagtctaataaa

SEQ ID NO: 128360 - DNA, 20 bp, Artificial sequence
  SiRNA target sequence
taatataaagtctaataaac

SEQ ID NO: 128361 - DNA, 20 bp, Artificial sequence
  SiRNA target sequence
aatataaagtctaataaacc

SEQ ID NO: 128362 - DNA, 20 bp, Artificial sequence
  SiRNA target sequence
atataaagtctaataaacca

SEQ ID NO: 128363 - DNA, 20 bp, Artificial sequence
  SiRNA target sequence
tataaagtctaataaaccaa

SEQ ID NO: 128364 - DNA, 20 bp, Artificial sequence
  SiRNA target sequence
ataaagtctaataaaccaag

SEQ ID NO: 128365 - DNA, 20 bp, Artificial sequence
  SiRNA target sequence
taaagtctaataaaccaagt

SEQ ID NO: 128366 - DNA, 20 bp, Artificial sequence
  SiRNA target sequence
aaagtctaataaaccaagta

SEQ ID NO: 128367 - DNA, 20 bp, Artificial sequence
  SiRNA target sequence
aagtctaataaaccaagtat

SEQ ID NO: 128368 - DNA, 20 bp, Artificial sequence
  SiRNA target sequence
agtctaataaaccaagtata

SEQ ID NO: 128369 - DNA, 20 bp, Artificial sequence
  SiRNA target sequence
gtctaataaaccaagtataa

SEQ ID NO: 128370 - DNA, 20 bp, Artificial sequence
  SiRNA target sequence
tctaataaaccaagtataac

SEQ ID NO: 128371 - DNA, 20 bp, Artificial sequence
  SiRNA target sequence
ctaataaaccaagtataaca

SEQ ID NO: 128372 - DNA, 20 bp, Artificial sequence
  SiRNA target sequence
taataaaccaagtataacac

SEQ ID NO: 128373 - DNA, 20 bp, Artificial sequence
  SiRNA target sequence
aataaaccaagtataacaca

SEQ ID NO: 128374 - DNA, 20 bp, Artificial sequence
  SiRNA target sequence
ataaaccaagtataacacaa

SEQ ID NO: 128375 - DNA, 20 bp, Artificial sequence
  SiRNA target sequence
taaaccaagtataacacaat

SEQ ID NO: 128376 - DNA, 20 bp, Artificial sequence
  SiRNA target sequence
aaaccaagtataacacaata

SEQ ID NO: 128377 - DNA, 20 bp, Artificial sequence
  SiRNA target sequence
aaccaagtataacacaatat

SEQ ID NO: 128378 - DNA, 20 bp, Artificial sequence
  SiRNA target sequence
accaagtataacacaatatc

SEQ ID NO: 128379 - DNA, 20 bp, Artificial sequence
  SiRNA target sequence
ccaagtataacacaatatct

SEQ ID NO: 128380 - DNA, 20 bp, Artificial sequence
  SiRNA target sequence
caagtataacacaatatctt

SEQ ID NO: 128381 - DNA, 20 bp, Artificial sequence
  SiRNA target sequence
aagtataacacaatatcttc

SEQ ID NO: 128382 - DNA, 20 bp, Artificial sequence
  SiRNA target sequence
agtataacacaatatcttcc

SEQ ID NO: 128383 - DNA, 20 bp, Artificial sequence
  SiRNA target sequence
gtataacacaatatcttcct

SEQ ID NO: 128384 - DNA, 20 bp, Artificial sequence
  SiRNA target sequence
tataacacaatatcttcctg

SEQ ID NO: 128385 - DNA, 20 bp, Artificial sequence
  SiRNA target sequence
ataacacaatatcttcctgt

SEQ ID NO: 128386 - DNA, 20 bp, Artificial sequence
  SiRNA target sequence
taacacaatatcttcctgtt

SEQ ID NO: 128387 - DNA, 20 bp, Artificial sequence
  SiRNA target sequence
aacacaatatcttcctgttt

SEQ ID NO: 128388 - DNA, 20 bp, Artificial sequence
  SiRNA target sequence
acacaatatcttcctgtttt

SEQ ID NO: 128389 - DNA, 20 bp, Artificial sequence
  SiRNA target sequence
cacaatatcttcctgttttg

SEQ ID NO: 128390 - DNA, 20 bp, Artificial sequence
  SiRNA target sequence
acaatatcttcctgttttgg

SEQ ID NO: 128391 - DNA, 20 bp, Artificial sequence
  SiRNA target sequence
caatatcttcctgttttggg

SEQ ID NO: 128392 - DNA, 20 bp, Artificial sequence
  SiRNA target sequence
aatatcttcctgttttggga

SEQ ID NO: 128393 - DNA, 20 bp, Artificial sequence
  SiRNA target sequence
atatcttcctgttttgggat

SEQ ID NO: 128394 - DNA, 20 bp, Artificial sequence
  SiRNA target sequence
tatcttcctgttttgggatc

SEQ ID NO: 128395 - DNA, 20 bp, Artificial sequence
  SiRNA target sequence
atcttcctgttttgggatca

SEQ ID NO: 128396 - DNA, 20 bp, Artificial sequence
  SiRNA target sequence
tcttcctgttttgggatcac

SEQ ID NO: 128397 - DNA, 20 bp, Artificial sequence
  SiRNA target sequence
cttcctgttttgggatcaca

SEQ ID NO: 128398 - DNA, 20 bp, Artificial sequence
  SiRNA target sequence
ttcctgttttgggatcacag

SEQ ID NO: 128399 - DNA, 20 bp, Artificial sequence
  SiRNA target sequence
tcctgttttgggatcacagg

SEQ ID NO: 128400 - DNA, 20 bp, Artificial sequence
  SiRNA target sequence
cctgttttgggatcacaggg

SEQ ID NO: 128401 - DNA, 20 bp, Artificial sequence
  SiRNA target sequence
ctgttttgggatcacaggga

SEQ ID NO: 128402 - DNA, 20 bp, Artificial sequence
  SiRNA target sequence
tgttttgggatcacagggat

SEQ ID NO: 128403 - DNA, 20 bp, Artificial sequence
  SiRNA target sequence
gttttgggatcacagggata

SEQ ID NO: 128404 - DNA, 20 bp, Artificial sequence
  SiRNA target sequence
ttttgggatcacagggatat

SEQ ID NO: 128405 - DNA, 20 bp, Artificial sequence
  SiRNA target sequence
tttgggatcacagggatata

SEQ ID NO: 128406 - DNA, 20 bp, Artificial sequence
  SiRNA target sequence
ttgggatcacagggatatac

SEQ ID NO: 128407 - DNA, 20 bp, Artificial sequence
  SiRNA target sequence
tgggatcacagggatatact

SEQ ID NO: 128408 - DNA, 20 bp, Artificial sequence
  SiRNA target sequence
gggatcacagggatatacta

SEQ ID NO: 128409 - DNA, 20 bp, Artificial sequence
  SiRNA target sequence
ggatcacagggatatactaa

SEQ ID NO: 128410 - DNA, 20 bp, Artificial sequence
  SiRNA target sequence
gatcacagggatatactaaa

SEQ ID NO: 128411 - DNA, 20 bp, Artificial sequence
  SiRNA target sequence
atcacagggatatactaaag

SEQ ID NO: 128412 - DNA, 20 bp, Artificial sequence
  SiRNA target sequence
tcacagggatatactaaagc

SEQ ID NO: 128413 - DNA, 20 bp, Artificial sequence
  SiRNA target sequence
cacagggatatactaaagct

SEQ ID NO: 128414 - DNA, 20 bp, Artificial sequence
  SiRNA target sequence
acagggatatactaaagcta

SEQ ID NO: 128415 - DNA, 20 bp, Artificial sequence
  SiRNA target sequence
cagggatatactaaagctac

SEQ ID NO: 128416 - DNA, 20 bp, Artificial sequence
  SiRNA target sequence
agggatatactaaagctaca

SEQ ID NO: 128417 - DNA, 20 bp, Artificial sequence
  SiRNA target sequence
gggatatactaaagctacag

SEQ ID NO: 128418 - DNA, 20 bp, Artificial sequence
  SiRNA target sequence
ggatatactaaagctacaga

SEQ ID NO: 128419 - DNA, 20 bp, Artificial sequence
  SiRNA target sequence
gatatactaaagctacagaa

SEQ ID NO: 128420 - DNA, 20 bp, Artificial sequence
  SiRNA target sequence
atatactaaagctacagaat

SEQ ID NO: 128421 - DNA, 20 bp, Artificial sequence
  SiRNA target sequence
tatactaaagctacagaatt

SEQ ID NO: 128422 - DNA, 20 bp, Artificial sequence
  SiRNA target sequence
atactaaagctacagaattt

SEQ ID NO: 128423 - DNA, 20 bp, Artificial sequence
  SiRNA target sequence
tactaaagctacagaatttg

SEQ ID NO: 128424 - DNA, 20 bp, Artificial sequence
  SiRNA target sequence
actaaagctacagaatttga

SEQ ID NO: 128425 - DNA, 20 bp, Artificial sequence
  SiRNA target sequence
ctaaagctacagaatttgat

SEQ ID NO: 128426 - DNA, 20 bp, Artificial sequence
  SiRNA target sequence
taaagctacagaatttgatt

SEQ ID NO: 128427 - DNA, 20 bp, Artificial sequence
  SiRNA target sequence
aaagctacagaatttgattt

SEQ ID NO: 128428 - DNA, 20 bp, Artificial sequence
  SiRNA target sequence
aagctacagaatttgatttg

SEQ ID NO: 128429 - DNA, 20 bp, Artificial sequence
  SiRNA target sequence
agctacagaatttgatttgg

SEQ ID NO: 128430 - DNA, 20 bp, Artificial sequence
  SiRNA target sequence
gctacagaatttgatttggc

SEQ ID NO: 128431 - DNA, 20 bp, Artificial sequence
  SiRNA target sequence
ctacagaatttgatttggca

SEQ ID NO: 128432 - DNA, 20 bp, Artificial sequence
  SiRNA target sequence
tacagaatttgatttggcac

SEQ ID NO: 128433 - DNA, 20 bp, Artificial sequence
  SiRNA target sequence
acagaatttgatttggcact

SEQ ID NO: 128434 - DNA, 20 bp, Artificial sequence
  SiRNA target sequence
cagaatttgatttggcactt

SEQ ID NO: 128435 - DNA, 20 bp, Artificial sequence
  SiRNA target sequence
agaatttgatttggcactta

SEQ ID NO: 128436 - DNA, 20 bp, Artificial sequence
  SiRNA target sequence
gaatttgatttggcacttac

SEQ ID NO: 128437 - DNA, 20 bp, Artificial sequence
  SiRNA target sequence
aatttgatttggcacttact

SEQ ID NO: 128438 - DNA, 20 bp, Artificial sequence
  SiRNA target sequence
atttgatttggcacttactt

SEQ ID NO: 128439 - DNA, 20 bp, Artificial sequence
  SiRNA target sequence
tttgatttggcacttacttt

SEQ ID NO: 128440 - DNA, 20 bp, Artificial sequence
  SiRNA target sequence
ttgatttggcacttacttta

SEQ ID NO: 128441 - DNA, 20 bp, Artificial sequence
  SiRNA target sequence
tgatttggcacttactttaa

SEQ ID NO: 128442 - DNA, 20 bp, Artificial sequence
  SiRNA target sequence
gatttggcacttactttaaa

SEQ ID NO: 128443 - DNA, 20 bp, Artificial sequence
  SiRNA target sequence
atttggcacttactttaaat

SEQ ID NO: 128444 - DNA, 20 bp, Artificial sequence
  SiRNA target sequence
tttggcacttactttaaata

SEQ ID NO: 128445 - DNA, 20 bp, Artificial sequence
  SiRNA target sequence
ttggcacttactttaaatat

SEQ ID NO: 128446 - DNA, 20 bp, Artificial sequence
  SiRNA target sequence
tggcacttactttaaatatt

SEQ ID NO: 128447 - DNA, 20 bp, Artificial sequence
  SiRNA target sequence
ggcacttactttaaatattc

SEQ ID NO: 128448 - DNA, 20 bp, Artificial sequence
  SiRNA target sequence
gcacttactttaaatattcc

SEQ ID NO: 128449 - DNA, 20 bp, Artificial sequence
  SiRNA target sequence
cacttactttaaatattcca

SEQ ID NO: 128450 - DNA, 20 bp, Artificial sequence
  SiRNA target sequence
acttactttaaatattccag

SEQ ID NO: 128451 - DNA, 20 bp, Artificial sequence
  SiRNA target sequence
cttactttaaatattccaga

SEQ ID NO: 128452 - DNA, 20 bp, Artificial sequence
  SiRNA target sequence
ttactttaaatattccagaa

SEQ ID NO: 128453 - DNA, 20 bp, Artificial sequence
  SiRNA target sequence
tactttaaatattccagaag

SEQ ID NO: 128454 - DNA, 20 bp, Artificial sequence
  SiRNA target sequence
actttaaatattccagaaga

SEQ ID NO: 128455 - DNA, 20 bp, Artificial sequence
  SiRNA target sequence
ctttaaatattccagaagat

SEQ ID NO: 128456 - DNA, 20 bp, Artificial sequence
  SiRNA target sequence
tttaaatattccagaagata

SEQ ID NO: 128457 - DNA, 20 bp, Artificial sequence
  SiRNA target sequence
ttaaatattccagaagatat

SEQ ID NO: 128458 - DNA, 20 bp, Artificial sequence
  SiRNA target sequence
taaatattccagaagatata

SEQ ID NO: 128459 - DNA, 20 bp, Artificial sequence
  SiRNA target sequence
aaatattccagaagatatag

SEQ ID NO: 128460 - DNA, 20 bp, Artificial sequence
  SiRNA target sequence
aatattccagaagatatagc

SEQ ID NO: 128461 - DNA, 20 bp, Artificial sequence
  SiRNA target sequence
atattccagaagatatagct

SEQ ID NO: 128462 - DNA, 20 bp, Artificial sequence
  SiRNA target sequence
tattccagaagatatagcta

SEQ ID NO: 128463 - DNA, 20 bp, Artificial sequence
  SiRNA target sequence
attccagaagatatagctaa

SEQ ID NO: 128464 - DNA, 20 bp, Artificial sequence
  SiRNA target sequence
ttccagaagatatagctaag

SEQ ID NO: 128465 - DNA, 20 bp, Artificial sequence
  SiRNA target sequence
tccagaagatatagctaagc

SEQ ID NO: 128466 - DNA, 20 bp, Artificial sequence
  SiRNA target sequence
ccagaagatatagctaagca

SEQ ID NO: 128467 - DNA, 20 bp, Artificial sequence
  SiRNA target sequence
cagaagatatagctaagcat

SEQ ID NO: 128468 - DNA, 20 bp, Artificial sequence
  SiRNA target sequence
agaagatatagctaagcatt

SEQ ID NO: 128469 - DNA, 20 bp, Artificial sequence
  SiRNA target sequence
gaagatatagctaagcattt

SEQ ID NO: 128470 - DNA, 20 bp, Artificial sequence
  SiRNA target sequence
aagatatagctaagcattta

SEQ ID NO: 128471 - DNA, 20 bp, Artificial sequence
  SiRNA target sequence
agatatagctaagcatttag

SEQ ID NO: 128472 - DNA, 20 bp, Artificial sequence
  SiRNA target sequence
gatatagctaagcatttagc

SEQ ID NO: 128473 - DNA, 20 bp, Artificial sequence
  SiRNA target sequence
atatagctaagcatttagct

SEQ ID NO: 128474 - DNA, 20 bp, Artificial sequence
  SiRNA target sequence
tatagctaagcatttagcta

SEQ ID NO: 128475 - DNA, 20 bp, Artificial sequence
  SiRNA target sequence
atagctaagcatttagctac

SEQ ID NO: 128476 - DNA, 20 bp, Artificial sequence
  SiRNA target sequence
tagctaagcatttagctaca

SEQ ID NO: 128477 - DNA, 20 bp, Artificial sequence
  SiRNA target sequence
agctaagcatttagctacaa

SEQ ID NO: 128478 - DNA, 20 bp, Artificial sequence
  SiRNA target sequence
gctaagcatttagctacaac

SEQ ID NO: 128479 - DNA, 20 bp, Artificial sequence
  SiRNA target sequence
ctaagcatttagctacaact

SEQ ID NO: 128480 - DNA, 20 bp, Artificial sequence
  SiRNA target sequence
taagcatttagctacaactt

SEQ ID NO: 128481 - DNA, 20 bp, Artificial sequence
  SiRNA target sequence
aagcatttagctacaactta

SEQ ID NO: 128482 - DNA, 20 bp, Artificial sequence
  SiRNA target sequence
agcatttagctacaacttat

SEQ ID NO: 128483 - DNA, 20 bp, Artificial sequence
  SiRNA target sequence
gcatttagctacaacttatg

SEQ ID NO: 128484 - DNA, 20 bp, Artificial sequence
  SiRNA target sequence
catttagctacaacttatgg

SEQ ID NO: 128485 - DNA, 20 bp, Artificial sequence
  SiRNA target sequence
atttagctacaacttatggt

SEQ ID NO: 128486 - DNA, 20 bp, Artificial sequence
  SiRNA target sequence
tttagctacaacttatggta

SEQ ID NO: 128487 - DNA, 20 bp, Artificial sequence
  SiRNA target sequence
ttagctacaacttatggtac

SEQ ID NO: 128488 - DNA, 20 bp, Artificial sequence
  SiRNA target sequence
tagctacaacttatggtacc

SEQ ID NO: 128489 - DNA, 20 bp, Artificial sequence
  SiRNA target sequence
agctacaacttatggtacca

SEQ ID NO: 128490 - DNA, 20 bp, Artificial sequence
  SiRNA target sequence
gctacaacttatggtaccaa

SEQ ID NO: 128491 - DNA, 20 bp, Artificial sequence
  SiRNA target sequence
ctacaacttatggtaccaaa

SEQ ID NO: 128492 - DNA, 20 bp, Artificial sequence
  SiRNA target sequence
tacaacttatggtaccaaag

SEQ ID NO: 128493 - DNA, 20 bp, Artificial sequence
  SiRNA target sequence
acaacttatggtaccaaagc

SEQ ID NO: 128494 - DNA, 20 bp, Artificial sequence
  SiRNA target sequence
caacttatggtaccaaagct

SEQ ID NO: 128495 - DNA, 20 bp, Artificial sequence
  SiRNA target sequence
aacttatggtaccaaagctt

SEQ ID NO: 128496 - DNA, 20 bp, Artificial sequence
  SiRNA target sequence
acttatggtaccaaagctta

SEQ ID NO: 128497 - DNA, 20 bp, Artificial sequence
  SiRNA target sequence
cttatggtaccaaagcttac

SEQ ID NO: 128498 - DNA, 20 bp, Artificial sequence
  SiRNA target sequence
ttatggtaccaaagcttaca

SEQ ID NO: 128499 - DNA, 20 bp, Artificial sequence
  SiRNA target sequence
tatggtaccaaagcttacaa

SEQ ID NO: 128500 - DNA, 20 bp, Artificial sequence
  SiRNA target sequence
atggtaccaaagcttacaat

SEQ ID NO: 128501 - DNA, 20 bp, Artificial sequence
  SiRNA target sequence
tggtaccaaagcttacaatt

SEQ ID NO: 128502 - DNA, 20 bp, Artificial sequence
  SiRNA target sequence
ggtaccaaagcttacaattt

SEQ ID NO: 128503 - DNA, 20 bp, Artificial sequence
  SiRNA target sequence
gtaccaaagcttacaatttc

SEQ ID NO: 128504 - DNA, 20 bp, Artificial sequence
  SiRNA target sequence
taccaaagcttacaatttct

SEQ ID NO: 128505 - DNA, 20 bp, Artificial sequence
  SiRNA target sequence
accaaagcttacaatttctc

SEQ ID NO: 128506 - DNA, 20 bp, Artificial sequence
  SiRNA target sequence
ccaaagcttacaatttctct

SEQ ID NO: 128507 - DNA, 20 bp, Artificial sequence
  SiRNA target sequence
caaagcttacaatttctctg

SEQ ID NO: 128508 - DNA, 20 bp, Artificial sequence
  SiRNA target sequence
aaagcttacaatttctctga

SEQ ID NO: 128509 - DNA, 20 bp, Artificial sequence
  SiRNA target sequence
aagcttacaatttctctgaa

SEQ ID NO: 128510 - DNA, 20 bp, Artificial sequence
  SiRNA target sequence
agcttacaatttctctgaat

SEQ ID NO: 128511 - DNA, 20 bp, Artificial sequence
  SiRNA target sequence
gcttacaatttctctgaata

SEQ ID NO: 128512 - DNA, 20 bp, Artificial sequence
  SiRNA target sequence
cttacaatttctctgaatac

SEQ ID NO: 128513 - DNA, 20 bp, Artificial sequence
  SiRNA target sequence
ttacaatttctctgaatact

SEQ ID NO: 128514 - DNA, 20 bp, Artificial sequence
  SiRNA target sequence
tacaatttctctgaatactt

SEQ ID NO: 128515 - DNA, 20 bp, Artificial sequence
  SiRNA target sequence
acaatttctctgaatacttt

SEQ ID NO: 128516 - DNA, 20 bp, Artificial sequence
  SiRNA target sequence
caatttctctgaatacttta

SEQ ID NO: 128517 - DNA, 20 bp, Artificial sequence
  SiRNA target sequence
aatttctctgaatactttaa

SEQ ID NO: 128518 - DNA, 20 bp, Artificial sequence
  SiRNA target sequence
atttctctgaatactttaat

SEQ ID NO: 128519 - DNA, 20 bp, Artificial sequence
  SiRNA target sequence
tttctctgaatactttaatg

SEQ ID NO: 128520 - DNA, 20 bp, Artificial sequence
  SiRNA target sequence
ttctctgaatactttaatgg

SEQ ID NO: 128521 - DNA, 20 bp, Artificial sequence
  SiRNA target sequence
tctctgaatactttaatggg

SEQ ID NO: 128522 - DNA, 20 bp, Artificial sequence
  SiRNA target sequence
ctctgaatactttaatgggt

SEQ ID NO: 128523 - DNA, 20 bp, Artificial sequence
  SiRNA target sequence
tctgaatactttaatgggtc

SEQ ID NO: 128524 - DNA, 20 bp, Artificial sequence
  SiRNA target sequence
ctgaatactttaatgggtca

SEQ ID NO: 128525 - DNA, 20 bp, Artificial sequence
  SiRNA target sequence
tgaatactttaatgggtcat

SEQ ID NO: 128526 - DNA, 20 bp, Artificial sequence
  SiRNA target sequence
gaatactttaatgggtcata

SEQ ID NO: 128527 - DNA, 20 bp, Artificial sequence
  SiRNA target sequence
aatactttaatgggtcatac

SEQ ID NO: 128528 - DNA, 20 bp, Artificial sequence
  SiRNA target sequence
atactttaatgggtcataca

SEQ ID NO: 128529 - DNA, 20 bp, Artificial sequence
  SiRNA target sequence
tactttaatgggtcatacac

SEQ ID NO: 128530 - DNA, 20 bp, Artificial sequence
  SiRNA target sequence
actttaatgggtcatacacc

SEQ ID NO: 128531 - DNA, 20 bp, Artificial sequence
  SiRNA target sequence
ctttaatgggtcatacacca

SEQ ID NO: 128532 - DNA, 20 bp, Artificial sequence
  SiRNA target sequence
tttaatgggtcatacaccag

SEQ ID NO: 128533 - DNA, 20 bp, Artificial sequence
  SiRNA target sequence
ttaatgggtcatacaccaga

SEQ ID NO: 128534 - DNA, 20 bp, Artificial sequence
  SiRNA target sequence
taatgggtcatacaccagac

SEQ ID NO: 128535 - DNA, 20 bp, Artificial sequence
  SiRNA target sequence
aatgggtcatacaccagact

SEQ ID NO: 128536 - DNA, 20 bp, Artificial sequence
  SiRNA target sequence
atgggtcatacaccagactt

SEQ ID NO: 128537 - DNA, 20 bp, Artificial sequence
  SiRNA target sequence
tgggtcatacaccagactta

SEQ ID NO: 128538 - DNA, 20 bp, Artificial sequence
  SiRNA target sequence
gggtcatacaccagacttac

SEQ ID NO: 128539 - DNA, 20 bp, Artificial sequence
  SiRNA target sequence
ggtcatacaccagacttaca

SEQ ID NO: 128540 - DNA, 20 bp, Artificial sequence
  SiRNA target sequence
gtcatacaccagacttacag

SEQ ID NO: 128541 - DNA, 20 bp, Artificial sequence
  SiRNA target sequence
tcatacaccagacttacaga

SEQ ID NO: 128542 - DNA, 20 bp, Artificial sequence
  SiRNA target sequence
catacaccagacttacagat

SEQ ID NO: 128543 - DNA, 20 bp, Artificial sequence
  SiRNA target sequence
atacaccagacttacagatg

SEQ ID NO: 128544 - DNA, 20 bp, Artificial sequence
  SiRNA target sequence
tacaccagacttacagatgg

SEQ ID NO: 128545 - DNA, 20 bp, Artificial sequence
  SiRNA target sequence
acaccagacttacagatggt

SEQ ID NO: 128546 - DNA, 20 bp, Artificial sequence
  SiRNA target sequence
caccagacttacagatggtt

SEQ ID NO: 128547 - DNA, 20 bp, Artificial sequence
  SiRNA target sequence
accagacttacagatggtta

SEQ ID NO: 128548 - DNA, 20 bp, Artificial sequence
  SiRNA target sequence
ccagacttacagatggttat

SEQ ID NO: 128549 - DNA, 20 bp, Artificial sequence
  SiRNA target sequence
cagacttacagatggttatc

SEQ ID NO: 128550 - DNA, 20 bp, Artificial sequence
  SiRNA target sequence
agacttacagatggttatcc

SEQ ID NO: 128551 - DNA, 20 bp, Artificial sequence
  SiRNA target sequence
gacttacagatggttatcct

SEQ ID NO: 128552 - DNA, 20 bp, Artificial sequence
  SiRNA target sequence
acttacagatggttatcctt

SEQ ID NO: 128553 - DNA, 20 bp, Artificial sequence
  SiRNA target sequence
cttacagatggttatcctta

SEQ ID NO: 128554 - DNA, 20 bp, Artificial sequence
  SiRNA target sequence
ttacagatggttatccttat

SEQ ID NO: 128555 - DNA, 20 bp, Artificial sequence
  SiRNA target sequence
tacagatggttatccttata

SEQ ID NO: 128556 - DNA, 20 bp, Artificial sequence
  SiRNA target sequence
acagatggttatccttatac

SEQ ID NO: 128557 - DNA, 20 bp, Artificial sequence
  SiRNA target sequence
cagatggttatccttataca

SEQ ID NO: 128558 - DNA, 20 bp, Artificial sequence
  SiRNA target sequence
agatggttatccttatacaa

SEQ ID NO: 128559 - DNA, 20 bp, Artificial sequence
  SiRNA target sequence
gatggttatccttatacaaa

SEQ ID NO: 128560 - DNA, 20 bp, Artificial sequence
  SiRNA target sequence
atggttatccttatacaaaa

SEQ ID NO: 128561 - DNA, 20 bp, Artificial sequence
  SiRNA target sequence
tggttatccttatacaaaag

SEQ ID NO: 128562 - DNA, 20 bp, Artificial sequence
  SiRNA target sequence
ggttatccttatacaaaaga

SEQ ID NO: 128563 - DNA, 20 bp, Artificial sequence
  SiRNA target sequence
gttatccttatacaaaagaa

SEQ ID NO: 128564 - DNA, 20 bp, Artificial sequence
  SiRNA target sequence
ttatccttatacaaaagaag

SEQ ID NO: 128565 - DNA, 20 bp, Artificial sequence
  SiRNA target sequence
tatccttatacaaaagaaga

SEQ ID NO: 128566 - DNA, 20 bp, Artificial sequence
  SiRNA target sequence
atccttatacaaaagaagaa

SEQ ID NO: 128567 - DNA, 20 bp, Artificial sequence
  SiRNA target sequence
tccttatacaaaagaagaaa

SEQ ID NO: 128568 - DNA, 20 bp, Artificial sequence
  SiRNA target sequence
ccttatacaaaagaagaaat

SEQ ID NO: 128569 - DNA, 20 bp, Artificial sequence
  SiRNA target sequence
cttatacaaaagaagaaata

SEQ ID NO: 128570 - DNA, 20 bp, Artificial sequence
  SiRNA target sequence
ttatacaaaagaagaaatag

SEQ ID NO: 128571 - DNA, 20 bp, Artificial sequence
  SiRNA target sequence
tatacaaaagaagaaatagt

SEQ ID NO: 128572 - DNA, 20 bp, Artificial sequence
  SiRNA target sequence
atacaaaagaagaaatagta

SEQ ID NO: 128573 - DNA, 20 bp, Artificial sequence
  SiRNA target sequence
tacaaaagaagaaatagtat

SEQ ID NO: 128574 - DNA, 20 bp, Artificial sequence
  SiRNA target sequence
acaaaagaagaaatagtata

SEQ ID NO: 128575 - DNA, 20 bp, Artificial sequence
  SiRNA target sequence
caaaagaagaaatagtatat

SEQ ID NO: 128576 - DNA, 20 bp, Artificial sequence
  SiRNA target sequence
aaaagaagaaatagtatatt

SEQ ID NO: 128577 - DNA, 20 bp, Artificial sequence
  SiRNA target sequence
aaagaagaaatagtatattg

SEQ ID NO: 128578 - DNA, 20 bp, Artificial sequence
  SiRNA target sequence
aagaagaaatagtatattgt

SEQ ID NO: 128579 - DNA, 20 bp, Artificial sequence
  SiRNA target sequence
agaagaaatagtatattgta

SEQ ID NO: 128580 - DNA, 20 bp, Artificial sequence
  SiRNA target sequence
gaagaaatagtatattgtat

SEQ ID NO: 128581 - DNA, 20 bp, Artificial sequence
  SiRNA target sequence
aagaaatagtatattgtatc

SEQ ID NO: 128582 - DNA, 20 bp, Artificial sequence
  SiRNA target sequence
agaaatagtatattgtatcg

SEQ ID NO: 128583 - DNA, 20 bp, Artificial sequence
  SiRNA target sequence
gaaatagtatattgtatcga

SEQ ID NO: 128584 - DNA, 20 bp, Artificial sequence
  SiRNA target sequence
aaatagtatattgtatcgaa

SEQ ID NO: 128585 - DNA, 20 bp, Artificial sequence
  SiRNA target sequence
aatagtatattgtatcgaac

SEQ ID NO: 128586 - DNA, 20 bp, Artificial sequence
  SiRNA target sequence
atagtatattgtatcgaaca

SEQ ID NO: 128587 - DNA, 20 bp, Artificial sequence
  SiRNA target sequence
tagtatattgtatcgaacat

SEQ ID NO: 128588 - DNA, 20 bp, Artificial sequence
  SiRNA target sequence
agtatattgtatcgaacatg

SEQ ID NO: 128589 - DNA, 20 bp, Artificial sequence
  SiRNA target sequence
gtatattgtatcgaacatga

SEQ ID NO: 128590 - DNA, 20 bp, Artificial sequence
  SiRNA target sequence
tatattgtatcgaacatgaa

SEQ ID NO: 128591 - DNA, 20 bp, Artificial sequence
  SiRNA target sequence
atattgtatcgaacatgaat

SEQ ID NO: 128592 - DNA, 20 bp, Artificial sequence
  SiRNA target sequence
tattgtatcgaacatgaatt

SEQ ID NO: 128593 - DNA, 20 bp, Artificial sequence
  SiRNA target sequence
attgtatcgaacatgaattg

SEQ ID NO: 128594 - DNA, 20 bp, Artificial sequence
  SiRNA target sequence
ttgtatcgaacatgaattgg

SEQ ID NO: 128595 - DNA, 20 bp, Artificial sequence
  SiRNA target sequence
tgtatcgaacatgaattggc

SEQ ID NO: 128596 - DNA, 20 bp, Artificial sequence
  SiRNA target sequence
gtatcgaacatgaattggct

SEQ ID NO: 128597 - DNA, 20 bp, Artificial sequence
  SiRNA target sequence
tatcgaacatgaattggctt

SEQ ID NO: 128598 - DNA, 20 bp, Artificial sequence
  SiRNA target sequence
atcgaacatgaattggctta

SEQ ID NO: 128599 - DNA, 20 bp, Artificial sequence
  SiRNA target sequence
tcgaacatgaattggcttat

SEQ ID NO: 128600 - DNA, 20 bp, Artificial sequence
  SiRNA target sequence
cgaacatgaattggcttatc

SEQ ID NO: 128601 - DNA, 20 bp, Artificial sequence
  SiRNA target sequence
gaacatgaattggcttatcg

SEQ ID NO: 128602 - DNA, 20 bp, Artificial sequence
  SiRNA target sequence
aacatgaattggcttatcgc

SEQ ID NO: 128603 - DNA, 20 bp, Artificial sequence
  SiRNA target sequence
acatgaattggcttatcgca

SEQ ID NO: 128604 - DNA, 20 bp, Artificial sequence
  SiRNA target sequence
catgaattggcttatcgcat

SEQ ID NO: 128605 - DNA, 20 bp, Artificial sequence
  SiRNA target sequence
atgaattggcttatcgcatc

SEQ ID NO: 128606 - DNA, 20 bp, Artificial sequence
  SiRNA target sequence
tgaattggcttatcgcatca

SEQ ID NO: 128607 - DNA, 20 bp, Artificial sequence
  SiRNA target sequence
gaattggcttatcgcatcag

SEQ ID NO: 128608 - DNA, 20 bp, Artificial sequence
  SiRNA target sequence
aattggcttatcgcatcagt

SEQ ID NO: 128609 - DNA, 20 bp, Artificial sequence
  SiRNA target sequence
attggcttatcgcatcagtg

SEQ ID NO: 128610 - DNA, 20 bp, Artificial sequence
  SiRNA target sequence
ttggcttatcgcatcagtga

SEQ ID NO: 128611 - DNA, 20 bp, Artificial sequence
  SiRNA target sequence
tggcttatcgcatcagtgat

SEQ ID NO: 128612 - DNA, 20 bp, Artificial sequence
  SiRNA target sequence
ggcttatcgcatcagtgata

SEQ ID NO: 128613 - DNA, 20 bp, Artificial sequence
  SiRNA target sequence
gcttatcgcatcagtgatat

SEQ ID NO: 128614 - DNA, 20 bp, Artificial sequence
  SiRNA target sequence
cttatcgcatcagtgatata

SEQ ID NO: 128615 - DNA, 20 bp, Artificial sequence
  SiRNA target sequence
ttatcgcatcagtgatatat

SEQ ID NO: 128616 - DNA, 20 bp, Artificial sequence
  SiRNA target sequence
tatcgcatcagtgatatatt

SEQ ID NO: 128617 - DNA, 20 bp, Artificial sequence
  SiRNA target sequence
atcgcatcagtgatatatta

SEQ ID NO: 128618 - DNA, 20 bp, Artificial sequence
  SiRNA target sequence
tcgcatcagtgatatattat

SEQ ID NO: 128619 - DNA, 20 bp, Artificial sequence
  SiRNA target sequence
cgcatcagtgatatattatt

SEQ ID NO: 128620 - DNA, 20 bp, Artificial sequence
  SiRNA target sequence
gcatcagtgatatattattt

SEQ ID NO: 128621 - DNA, 20 bp, Artificial sequence
  SiRNA target sequence
catcagtgatatattattta

SEQ ID NO: 128622 - DNA, 20 bp, Artificial sequence
  SiRNA target sequence
atcagtgatatattatttaa

SEQ ID NO: 128623 - DNA, 20 bp, Artificial sequence
  SiRNA target sequence
tcagtgatatattatttaat

SEQ ID NO: 128624 - DNA, 20 bp, Artificial sequence
  SiRNA target sequence
cagtgatatattatttaata

SEQ ID NO: 128625 - DNA, 20 bp, Artificial sequence
  SiRNA target sequence
agtgatatattatttaatag

SEQ ID NO: 128626 - DNA, 20 bp, Artificial sequence
  SiRNA target sequence
gtgatatattatttaatagg

SEQ ID NO: 128627 - DNA, 20 bp, Artificial sequence
  SiRNA target sequence
tgatatattatttaatagga

SEQ ID NO: 128628 - DNA, 20 bp, Artificial sequence
  SiRNA target sequence
gatatattatttaataggat

SEQ ID NO: 128629 - DNA, 20 bp, Artificial sequence
  SiRNA target sequence
atatattatttaataggatg

SEQ ID NO: 128630 - DNA, 20 bp, Artificial sequence
  SiRNA target sequence
tatattatttaataggatga

SEQ ID NO: 128631 - DNA, 20 bp, Artificial sequence
  SiRNA target sequence
atattatttaataggatgat

SEQ ID NO: 128632 - DNA, 20 bp, Artificial sequence
  SiRNA target sequence
tattatttaataggatgatg

SEQ ID NO: 128633 - DNA, 20 bp, Artificial sequence
  SiRNA target sequence
attatttaataggatgatga

SEQ ID NO: 128634 - DNA, 20 bp, Artificial sequence
  SiRNA target sequence
ttatttaataggatgatgat

SEQ ID NO: 128635 - DNA, 20 bp, Artificial sequence
  SiRNA target sequence
tatttaataggatgatgata

SEQ ID NO: 128636 - DNA, 20 bp, Artificial sequence
  SiRNA target sequence
atttaataggatgatgatag

SEQ ID NO: 128637 - DNA, 20 bp, Artificial sequence
  SiRNA target sequence
tttaataggatgatgatagg

SEQ ID NO: 128638 - DNA, 20 bp, Artificial sequence
  SiRNA target sequence
ttaataggatgatgatagga

SEQ ID NO: 128639 - DNA, 20 bp, Artificial sequence
  SiRNA target sequence
taataggatgatgataggat

SEQ ID NO: 128640 - DNA, 20 bp, Artificial sequence
  SiRNA target sequence
aataggatgatgataggata

SEQ ID NO: 128641 - DNA, 20 bp, Artificial sequence
  SiRNA target sequence
ataggatgatgataggatac

SEQ ID NO: 128642 - DNA, 20 bp, Artificial sequence
  SiRNA target sequence
taggatgatgataggataca

SEQ ID NO: 128643 - DNA, 20 bp, Artificial sequence
  SiRNA target sequence
aggatgatgataggatacat

SEQ ID NO: 128644 - DNA, 20 bp, Artificial sequence
  SiRNA target sequence
ggatgatgataggatacatt

SEQ ID NO: 128645 - DNA, 20 bp, Artificial sequence
  SiRNA target sequence
gatgatgataggatacattg

SEQ ID NO: 128646 - DNA, 20 bp, Artificial sequence
  SiRNA target sequence
atgatgataggatacattga

SEQ ID NO: 128647 - DNA, 20 bp, Artificial sequence
  SiRNA target sequence
tgatgataggatacattgac

SEQ ID NO: 128648 - DNA, 20 bp, Artificial sequence
  SiRNA target sequence
gatgataggatacattgacg

SEQ ID NO: 128649 - DNA, 20 bp, Artificial sequence
  SiRNA target sequence
atgataggatacattgacgt

SEQ ID NO: 128650 - DNA, 20 bp, Artificial sequence
  SiRNA target sequence
tgataggatacattgacgtc

SEQ ID NO: 128651 - DNA, 20 bp, Artificial sequence
  SiRNA target sequence
gataggatacattgacgtca

SEQ ID NO: 128652 - DNA, 20 bp, Artificial sequence
  SiRNA target sequence
ataggatacattgacgtcag

SEQ ID NO: 128653 - DNA, 20 bp, Artificial sequence
  SiRNA target sequence
taggatacattgacgtcaga

SEQ ID NO: 128654 - DNA, 20 bp, Artificial sequence
  SiRNA target sequence
aggatacattgacgtcagaa

SEQ ID NO: 128655 - DNA, 20 bp, Artificial sequence
  SiRNA target sequence
ggatacattgacgtcagaag

SEQ ID NO: 128656 - DNA, 20 bp, Artificial sequence
  SiRNA target sequence
gatacattgacgtcagaaga

SEQ ID NO: 128657 - DNA, 20 bp, Artificial sequence
  SiRNA target sequence
atacattgacgtcagaagag

SEQ ID NO: 128658 - DNA, 20 bp, Artificial sequence
  SiRNA target sequence
tacattgacgtcagaagagc

SEQ ID NO: 128659 - DNA, 20 bp, Artificial sequence
  SiRNA target sequence
acattgacgtcagaagagca

SEQ ID NO: 128660 - DNA, 20 bp, Artificial sequence
  SiRNA target sequence
cattgacgtcagaagagcat

SEQ ID NO: 128661 - DNA, 20 bp, Artificial sequence
  SiRNA target sequence
attgacgtcagaagagcatt

SEQ ID NO: 128662 - DNA, 20 bp, Artificial sequence
  SiRNA target sequence
ttgacgtcagaagagcattt

SEQ ID NO: 128663 - DNA, 20 bp, Artificial sequence
  SiRNA target sequence
tgacgtcagaagagcatttg

SEQ ID NO: 128664 - DNA, 20 bp, Artificial sequence
  SiRNA target sequence
gacgtcagaagagcatttga

SEQ ID NO: 128665 - DNA, 20 bp, Artificial sequence
  SiRNA target sequence
acgtcagaagagcatttgat

SEQ ID NO: 128666 - DNA, 20 bp, Artificial sequence
  SiRNA target sequence
cgtcagaagagcatttgatt

SEQ ID NO: 128667 - DNA, 20 bp, Artificial sequence
  SiRNA target sequence
gtcagaagagcatttgattt

SEQ ID NO: 128668 - DNA, 20 bp, Artificial sequence
  SiRNA target sequence
tcagaagagcatttgattta

SEQ ID NO: 128669 - DNA, 20 bp, Artificial sequence
  SiRNA target sequence
cagaagagcatttgatttaa

SEQ ID NO: 128670 - DNA, 20 bp, Artificial sequence
  SiRNA target sequence
agaagagcatttgatttaat

SEQ ID NO: 128671 - DNA, 20 bp, Artificial sequence
  SiRNA target sequence
gaagagcatttgatttaatt

SEQ ID NO: 128672 - DNA, 20 bp, Artificial sequence
  SiRNA target sequence
aagagcatttgatttaattg

SEQ ID NO: 128673 - DNA, 20 bp, Artificial sequence
  SiRNA target sequence
agagcatttgatttaattgg

SEQ ID NO: 128674 - DNA, 20 bp, Artificial sequence
  SiRNA target sequence
gagcatttgatttaattggt

SEQ ID NO: 128675 - DNA, 20 bp, Artificial sequence
  SiRNA target sequence
agcatttgatttaattggta

SEQ ID NO: 128676 - DNA, 20 bp, Artificial sequence
  SiRNA target sequence
gcatttgatttaattggtat

SEQ ID NO: 128677 - DNA, 20 bp, Artificial sequence
  SiRNA target sequence
catttgatttaattggtata

SEQ ID NO: 128678 - DNA, 20 bp, Artificial sequence
  SiRNA target sequence
atttgatttaattggtatag

SEQ ID NO: 128679 - DNA, 20 bp, Artificial sequence
  SiRNA target sequence
tttgatttaattggtatagt

SEQ ID NO: 128680 - DNA, 20 bp, Artificial sequence
  SiRNA target sequence
ttgatttaattggtatagta

SEQ ID NO: 128681 - DNA, 20 bp, Artificial sequence
  SiRNA target sequence
tgatttaattggtatagtag

SEQ ID NO: 128682 - DNA, 20 bp, Artificial sequence
  SiRNA target sequence
gatttaattggtatagtagc

SEQ ID NO: 128683 - DNA, 20 bp, Artificial sequence
  SiRNA target sequence
atttaattggtatagtagct

SEQ ID NO: 128684 - DNA, 20 bp, Artificial sequence
  SiRNA target sequence
tttaattggtatagtagctg

SEQ ID NO: 128685 - DNA, 20 bp, Artificial sequence
  SiRNA target sequence
ttaattggtatagtagctga

SEQ ID NO: 128686 - DNA, 20 bp, Artificial sequence
  SiRNA target sequence
taattggtatagtagctgaa

SEQ ID NO: 128687 - DNA, 20 bp, Artificial sequence
  SiRNA target sequence
aattggtatagtagctgaag

SEQ ID NO: 128688 - DNA, 20 bp, Artificial sequence
  SiRNA target sequence
attggtatagtagctgaagt

SEQ ID NO: 128689 - DNA, 20 bp, Artificial sequence
  SiRNA target sequence
ttggtatagtagctgaagta

SEQ ID NO: 128690 - DNA, 20 bp, Artificial sequence
  SiRNA target sequence
tggtatagtagctgaagtaa

SEQ ID NO: 128691 - DNA, 20 bp, Artificial sequence
  SiRNA target sequence
ggtatagtagctgaagtaat

SEQ ID NO: 128692 - DNA, 20 bp, Artificial sequence
  SiRNA target sequence
gtatagtagctgaagtaatg

SEQ ID NO: 128693 - DNA, 20 bp, Artificial sequence
  SiRNA target sequence
tatagtagctgaagtaatga

SEQ ID NO: 128694 - DNA, 20 bp, Artificial sequence
  SiRNA target sequence
atagtagctgaagtaatgaa

SEQ ID NO: 128695 - DNA, 20 bp, Artificial sequence
  SiRNA target sequence
tagtagctgaagtaatgaaa

SEQ ID NO: 128696 - DNA, 20 bp, Artificial sequence
  SiRNA target sequence
agtagctgaagtaatgaaag

SEQ ID NO: 128697 - DNA, 20 bp, Artificial sequence
  SiRNA target sequence
gtagctgaagtaatgaaaga

SEQ ID NO: 128698 - DNA, 20 bp, Artificial sequence
  SiRNA target sequence
tagctgaagtaatgaaagac

SEQ ID NO: 128699 - DNA, 20 bp, Artificial sequence
  SiRNA target sequence
agctgaagtaatgaaagact

SEQ ID NO: 128700 - DNA, 20 bp, Artificial sequence
  SiRNA target sequence
gctgaagtaatgaaagacta

SEQ ID NO: 128701 - DNA, 20 bp, Artificial sequence
  SiRNA target sequence
ctgaagtaatgaaagactat

SEQ ID NO: 128702 - DNA, 20 bp, Artificial sequence
  SiRNA target sequence
tgaagtaatgaaagactatt

SEQ ID NO: 128703 - DNA, 20 bp, Artificial sequence
  SiRNA target sequence
gaagtaatgaaagactatta

SEQ ID NO: 128704 - DNA, 20 bp, Artificial sequence
  SiRNA target sequence
aagtaatgaaagactattac

SEQ ID NO: 128705 - DNA, 20 bp, Artificial sequence
  SiRNA target sequence
agtaatgaaagactattacg

SEQ ID NO: 128706 - DNA, 20 bp, Artificial sequence
  SiRNA target sequence
gtaatgaaagactattacgg

SEQ ID NO: 128707 - DNA, 20 bp, Artificial sequence
  SiRNA target sequence
taatgaaagactattacgga

SEQ ID NO: 128708 - DNA, 20 bp, Artificial sequence
  SiRNA target sequence
aatgaaagactattacggat

SEQ ID NO: 128709 - DNA, 20 bp, Artificial sequence
  SiRNA target sequence
atgaaagactattacggatg

SEQ ID NO: 128710 - DNA, 20 bp, Artificial sequence
  SiRNA target sequence
tgaaagactattacggatgg

SEQ ID NO: 128711 - DNA, 20 bp, Artificial sequence
  SiRNA target sequence
gaaagactattacggatggg

SEQ ID NO: 128712 - DNA, 20 bp, Artificial sequence
  SiRNA target sequence
aaagactattacggatggga

SEQ ID NO: 128713 - DNA, 20 bp, Artificial sequence
  SiRNA target sequence
aagactattacggatgggat

SEQ ID NO: 128714 - DNA, 20 bp, Artificial sequence
  SiRNA target sequence
agactattacggatgggatc

SEQ ID NO: 128715 - DNA, 20 bp, Artificial sequence
  SiRNA target sequence
gactattacggatgggatca

SEQ ID NO: 128716 - DNA, 20 bp, Artificial sequence
  SiRNA target sequence
actattacggatgggatcag

SEQ ID NO: 128717 - DNA, 20 bp, Artificial sequence
  SiRNA target sequence
ctattacggatgggatcagc

SEQ ID NO: 128718 - DNA, 20 bp, Artificial sequence
  SiRNA target sequence
tattacggatgggatcagca

SEQ ID NO: 128719 - DNA, 20 bp, Artificial sequence
  SiRNA target sequence
attacggatgggatcagcaa

SEQ ID NO: 128720 - DNA, 20 bp, Artificial sequence
  SiRNA target sequence
ttacggatgggatcagcaaa

SEQ ID NO: 128721 - DNA, 20 bp, Artificial sequence
  SiRNA target sequence
tacggatgggatcagcaaag

SEQ ID NO: 128722 - DNA, 20 bp, Artificial sequence
  SiRNA target sequence
acggatgggatcagcaaaga

SEQ ID NO: 128723 - DNA, 20 bp, Artificial sequence
  SiRNA target sequence
cggatgggatcagcaaagat

SEQ ID NO: 128724 - DNA, 20 bp, Artificial sequence
  SiRNA target sequence
ggatgggatcagcaaagata

SEQ ID NO: 128725 - DNA, 20 bp, Artificial sequence
  SiRNA target sequence
gatgggatcagcaaagatat

SEQ ID NO: 128726 - DNA, 20 bp, Artificial sequence
  SiRNA target sequence
atgggatcagcaaagatata

SEQ ID NO: 128727 - DNA, 20 bp, Artificial sequence
  SiRNA target sequence
tgggatcagcaaagatataa

SEQ ID NO: 128728 - DNA, 20 bp, Artificial sequence
  SiRNA target sequence
gggatcagcaaagatataat

SEQ ID NO: 128729 - DNA, 20 bp, Artificial sequence
  SiRNA target sequence
ggatcagcaaagatataatg

SEQ ID NO: 128730 - DNA, 20 bp, Artificial sequence
  SiRNA target sequence
gatcagcaaagatataatga

SEQ ID NO: 128731 - DNA, 20 bp, Artificial sequence
  SiRNA target sequence
atcagcaaagatataatgaa

SEQ ID NO: 128732 - DNA, 20 bp, Artificial sequence
  SiRNA target sequence
tcagcaaagatataatgaag

SEQ ID NO: 128733 - DNA, 20 bp, Artificial sequence
  SiRNA target sequence
cagcaaagatataatgaaga

SEQ ID NO: 128734 - DNA, 20 bp, Artificial sequence
  SiRNA target sequence
agcaaagatataatgaagaa

SEQ ID NO: 128735 - DNA, 20 bp, Artificial sequence
  SiRNA target sequence
gcaaagatataatgaagaaa

SEQ ID NO: 128736 - DNA, 20 bp, Artificial sequence
  SiRNA target sequence
caaagatataatgaagaaac

SEQ ID NO: 128737 - DNA, 20 bp, Artificial sequence
  SiRNA target sequence
aaagatataatgaagaaaca

SEQ ID NO: 128738 - DNA, 20 bp, Artificial sequence
  SiRNA target sequence
aagatataatgaagaaacaa

SEQ ID NO: 128739 - DNA, 20 bp, Artificial sequence
  SiRNA target sequence
agatataatgaagaaacaaa

SEQ ID NO: 128740 - DNA, 20 bp, Artificial sequence
  SiRNA target sequence
gatataatgaagaaacaaaa

SEQ ID NO: 128741 - DNA, 20 bp, Artificial sequence
  SiRNA target sequence
atataatgaagaaacaaaat

SEQ ID NO: 128742 - DNA, 20 bp, Artificial sequence
  SiRNA target sequence
tataatgaagaaacaaaatt

SEQ ID NO: 128743 - DNA, 20 bp, Artificial sequence
  SiRNA target sequence
ataatgaagaaacaaaatta

SEQ ID NO: 128744 - DNA, 20 bp, Artificial sequence
  SiRNA target sequence
taatgaagaaacaaaattat

SEQ ID NO: 128745 - DNA, 20 bp, Artificial sequence
  SiRNA target sequence
aatgaagaaacaaaattatg

SEQ ID NO: 128746 - DNA, 20 bp, Artificial sequence
  SiRNA target sequence
atgaagaaacaaaattatgc

SEQ ID NO: 128747 - DNA, 20 bp, Artificial sequence
  SiRNA target sequence
tgaagaaacaaaattatgca

SEQ ID NO: 128748 - DNA, 20 bp, Artificial sequence
  SiRNA target sequence
gaagaaacaaaattatgcat

SEQ ID NO: 128749 - DNA, 20 bp, Artificial sequence
  SiRNA target sequence
aagaaacaaaattatgcatg

SEQ ID NO: 128750 - DNA, 20 bp, Artificial sequence
  SiRNA target sequence
agaaacaaaattatgcatgg

SEQ ID NO: 128751 - DNA, 20 bp, Artificial sequence
  SiRNA target sequence
gaaacaaaattatgcatgga

SEQ ID NO: 128752 - DNA, 20 bp, Artificial sequence
  SiRNA target sequence
aaacaaaattatgcatggaa

SEQ ID NO: 128753 - DNA, 20 bp, Artificial sequence
  SiRNA target sequence
aacaaaattatgcatggaaa

SEQ ID NO: 128754 - DNA, 20 bp, Artificial sequence
  SiRNA target sequence
acaaaattatgcatggaaat

SEQ ID NO: 128755 - DNA, 20 bp, Artificial sequence
  SiRNA target sequence
caaaattatgcatggaaatg

SEQ ID NO: 128756 - DNA, 20 bp, Artificial sequence
  SiRNA target sequence
aaaattatgcatggaaatga

SEQ ID NO: 128757 - DNA, 20 bp, Artificial sequence
  SiRNA target sequence
aaattatgcatggaaatgat

SEQ ID NO: 128758 - DNA, 20 bp, Artificial sequence
  SiRNA target sequence
aattatgcatggaaatgatg

SEQ ID NO: 128759 - DNA, 20 bp, Artificial sequence
  SiRNA target sequence
attatgcatggaaatgatgg

SEQ ID NO: 128760 - DNA, 20 bp, Artificial sequence
  SiRNA target sequence
ttatgcatggaaatgatgga

SEQ ID NO: 128761 - DNA, 20 bp, Artificial sequence
  SiRNA target sequence
tatgcatggaaatgatggaa

SEQ ID NO: 128762 - DNA, 20 bp, Artificial sequence
  SiRNA target sequence
atgcatggaaatgatggaaa

SEQ ID NO: 128763 - DNA, 20 bp, Artificial sequence
  SiRNA target sequence
tgcatggaaatgatggaaac

SEQ ID NO: 128764 - DNA, 20 bp, Artificial sequence
  SiRNA target sequence
gcatggaaatgatggaaact

SEQ ID NO: 128765 - DNA, 20 bp, Artificial sequence
  SiRNA target sequence
catggaaatgatggaaactt

SEQ ID NO: 128766 - DNA, 20 bp, Artificial sequence
  SiRNA target sequence
atggaaatgatggaaacttg

SEQ ID NO: 128767 - DNA, 20 bp, Artificial sequence
  SiRNA target sequence
tggaaatgatggaaacttgt

SEQ ID NO: 128768 - DNA, 20 bp, Artificial sequence
  SiRNA target sequence
ggaaatgatggaaacttgtg

SEQ ID NO: 128769 - DNA, 20 bp, Artificial sequence
  SiRNA target sequence
gaaatgatggaaacttgtgg

SEQ ID NO: 128770 - DNA, 20 bp, Artificial sequence
  SiRNA target sequence
aaatgatggaaacttgtggt

SEQ ID NO: 128771 - DNA, 20 bp, Artificial sequence
  SiRNA target sequence
aatgatggaaacttgtggtt

SEQ ID NO: 128772 - DNA, 20 bp, Artificial sequence
  SiRNA target sequence
atgatggaaacttgtggtta

SEQ ID NO: 128773 - DNA, 20 bp, Artificial sequence
  SiRNA target sequence
tgatggaaacttgtggttat

SEQ ID NO: 128774 - DNA, 20 bp, Artificial sequence
  SiRNA target sequence
gatggaaacttgtggttata

SEQ ID NO: 128775 - DNA, 20 bp, Artificial sequence
  SiRNA target sequence
atggaaacttgtggttatag

SEQ ID NO: 128776 - DNA, 20 bp, Artificial sequence
  SiRNA target sequence
tggaaacttgtggttatagt

SEQ ID NO: 128777 - DNA, 20 bp, Artificial sequence
  SiRNA target sequence
ggaaacttgtggttatagtt

SEQ ID NO: 128778 - DNA, 20 bp, Artificial sequence
  SiRNA target sequence
gaaacttgtggttatagttt

SEQ ID NO: 128779 - DNA, 20 bp, Artificial sequence
  SiRNA target sequence
aaacttgtggttatagttta

SEQ ID NO: 128780 - DNA, 20 bp, Artificial sequence
  SiRNA target sequence
aacttgtggttatagtttat

SEQ ID NO: 128781 - DNA, 20 bp, Artificial sequence
  SiRNA target sequence
acttgtggttatagtttatt

SEQ ID NO: 128782 - DNA, 20 bp, Artificial sequence
  SiRNA target sequence
cttgtggttatagtttatta

SEQ ID NO: 128783 - DNA, 20 bp, Artificial sequence
  SiRNA target sequence
ttgtggttatagtttattaa

SEQ ID NO: 128784 - DNA, 20 bp, Artificial sequence
  SiRNA target sequence
tgtggttatagtttattaaa

SEQ ID NO: 128785 - DNA, 20 bp, Artificial sequence
  SiRNA target sequence
gtggttatagtttattaaaa

SEQ ID NO: 128786 - DNA, 20 bp, Artificial sequence
  SiRNA target sequence
tggttatagtttattaaaaa

SEQ ID NO: 128787 - DNA, 20 bp, Artificial sequence
  SiRNA target sequence
ggttatagtttattaaaaaa

SEQ ID NO: 128788 - DNA, 20 bp, Artificial sequence
  SiRNA target sequence
gttatagtttattaaaaaat

SEQ ID NO: 128789 - DNA, 20 bp, Artificial sequence
  SiRNA target sequence
ttatagtttattaaaaaatt

SEQ ID NO: 128790 - DNA, 20 bp, Artificial sequence
  SiRNA target sequence
tatagtttattaaaaaatta

SEQ ID NO: 128791 - DNA, 20 bp, Artificial sequence
  SiRNA target sequence
atagtttattaaaaaattaa

SEQ ID NO: 128792 - DNA, 21 bp, Artificial sequence
  SiRNA target sequence
atggtgtataaggttttattt

SEQ ID NO: 128793 - DNA, 21 bp, Artificial sequence
  SiRNA target sequence
tggtgtataaggttttattta

SEQ ID NO: 128794 - DNA, 21 bp, Artificial sequence
  SiRNA target sequence
ggtgtataaggttttatttac

SEQ ID NO: 128795 - DNA, 21 bp, Artificial sequence
  SiRNA target sequence
gtgtataaggttttatttaca

SEQ ID NO: 128796 - DNA, 21 bp, Artificial sequence
  SiRNA target sequence
tgtataaggttttatttacag

SEQ ID NO: 128797 - DNA, 21 bp, Artificial sequence
  SiRNA target sequence
gtataaggttttatttacagt

SEQ ID NO: 128798 - DNA, 21 bp, Artificial sequence
  SiRNA target sequence
tataaggttttatttacagta

SEQ ID NO: 128799 - DNA, 21 bp, Artificial sequence
  SiRNA target sequence
ataaggttttatttacagtaa

SEQ ID NO: 128800 - DNA, 21 bp, Artificial sequence
  SiRNA target sequence
taaggttttatttacagtaat

SEQ ID NO: 128801 - DNA, 21 bp, Artificial sequence
  SiRNA target sequence
aaggttttatttacagtaata

SEQ ID NO: 128802 - DNA, 21 bp, Artificial sequence
  SiRNA target sequence
aggttttatttacagtaatag

SEQ ID NO: 128803 - DNA, 21 bp, Artificial sequence
  SiRNA target sequence
ggttttatttacagtaatagg

SEQ ID NO: 128804 - DNA, 21 bp, Artificial sequence
  SiRNA target sequence
gttttatttacagtaatagga

SEQ ID NO: 128805 - DNA, 21 bp, Artificial sequence
  SiRNA target sequence
ttttatttacagtaataggat

SEQ ID NO: 128806 - DNA, 21 bp, Artificial sequence
  SiRNA target sequence
tttatttacagtaataggatt

SEQ ID NO: 128807 - DNA, 21 bp, Artificial sequence
  SiRNA target sequence
ttatttacagtaataggatta

SEQ ID NO: 128808 - DNA, 21 bp, Artificial sequence
  SiRNA target sequence
tatttacagtaataggattaa

SEQ ID NO: 128809 - DNA, 21 bp, Artificial sequence
  SiRNA target sequence
atttacagtaataggattaat

SEQ ID NO: 128810 - DNA, 21 bp, Artificial sequence
  SiRNA target sequence
tttacagtaataggattaata

SEQ ID NO: 128811 - DNA, 21 bp, Artificial sequence
  SiRNA target sequence
ttacagtaataggattaatat

SEQ ID NO: 128812 - DNA, 21 bp, Artificial sequence
  SiRNA target sequence
tacagtaataggattaatatg

SEQ ID NO: 128813 - DNA, 21 bp, Artificial sequence
  SiRNA target sequence
acagtaataggattaatatgt

SEQ ID NO: 128814 - DNA, 21 bp, Artificial sequence
  SiRNA target sequence
cagtaataggattaatatgtg

SEQ ID NO: 128815 - DNA, 21 bp, Artificial sequence
  SiRNA target sequence
agtaataggattaatatgtgg

SEQ ID NO: 128816 - DNA, 21 bp, Artificial sequence
  SiRNA target sequence
gtaataggattaatatgtggt

SEQ ID NO: 128817 - DNA, 21 bp, Artificial sequence
  SiRNA target sequence
taataggattaatatgtggta

SEQ ID NO: 128818 - DNA, 21 bp, Artificial sequence
  SiRNA target sequence
aataggattaatatgtggtat

SEQ ID NO: 128819 - DNA, 21 bp, Artificial sequence
  SiRNA target sequence
ataggattaatatgtggtata

SEQ ID NO: 128820 - DNA, 21 bp, Artificial sequence
  SiRNA target sequence
taggattaatatgtggtatac

SEQ ID NO: 128821 - DNA, 21 bp, Artificial sequence
  SiRNA target sequence
aggattaatatgtggtatact

SEQ ID NO: 128822 - DNA, 21 bp, Artificial sequence
  SiRNA target sequence
ggattaatatgtggtatactt

SEQ ID NO: 128823 - DNA, 21 bp, Artificial sequence
  SiRNA target sequence
gattaatatgtggtatactta

SEQ ID NO: 128824 - DNA, 21 bp, Artificial sequence
  SiRNA target sequence
attaatatgtggtatacttac

SEQ ID NO: 128825 - DNA, 21 bp, Artificial sequence
  SiRNA target sequence
ttaatatgtggtatacttaca

SEQ ID NO: 128826 - DNA, 21 bp, Artificial sequence
  SiRNA target sequence
taatatgtggtatacttacaa

SEQ ID NO: 128827 - DNA, 21 bp, Artificial sequence
  SiRNA target sequence
aatatgtggtatacttacaat

SEQ ID NO: 128828 - DNA, 21 bp, Artificial sequence
  SiRNA target sequence
atatgtggtatacttacaata

SEQ ID NO: 128829 - DNA, 21 bp, Artificial sequence
  SiRNA target sequence
tatgtggtatacttacaataa

SEQ ID NO: 128830 - DNA, 21 bp, Artificial sequence
  SiRNA target sequence
atgtggtatacttacaataat

SEQ ID NO: 128831 - DNA, 21 bp, Artificial sequence
  SiRNA target sequence
tgtggtatacttacaataatt

SEQ ID NO: 128832 - DNA, 21 bp, Artificial sequence
  SiRNA target sequence
gtggtatacttacaataatta

SEQ ID NO: 128833 - DNA, 21 bp, Artificial sequence
  SiRNA target sequence
tggtatacttacaataattaa

SEQ ID NO: 128834 - DNA, 21 bp, Artificial sequence
  SiRNA target sequence
ggtatacttacaataattaaa

SEQ ID NO: 128835 - DNA, 21 bp, Artificial sequence
  SiRNA target sequence
gtatacttacaataattaaac

SEQ ID NO: 128836 - DNA, 21 bp, Artificial sequence
  SiRNA target sequence
tatacttacaataattaaacg

SEQ ID NO: 128837 - DNA, 21 bp, Artificial sequence
  SiRNA target sequence
atacttacaataattaaacga

SEQ ID NO: 128838 - DNA, 21 bp, Artificial sequence
  SiRNA target sequence
tacttacaataattaaacgat

SEQ ID NO: 128839 - DNA, 21 bp, Artificial sequence
  SiRNA target sequence
acttacaataattaaacgata

SEQ ID NO: 128840 - DNA, 21 bp, Artificial sequence
  SiRNA target sequence
cttacaataattaaacgatac

SEQ ID NO: 128841 - DNA, 21 bp, Artificial sequence
  SiRNA target sequence
ttacaataattaaacgataca

SEQ ID NO: 128842 - DNA, 21 bp, Artificial sequence
  SiRNA target sequence
tacaataattaaacgatacaa

SEQ ID NO: 128843 - DNA, 21 bp, Artificial sequence
  SiRNA target sequence
acaataattaaacgatacaag

SEQ ID NO: 128844 - DNA, 21 bp, Artificial sequence
  SiRNA target sequence
caataattaaacgatacaagt

SEQ ID NO: 128845 - DNA, 21 bp, Artificial sequence
  SiRNA target sequence
aataattaaacgatacaagta

SEQ ID NO: 128846 - DNA, 21 bp, Artificial sequence
  SiRNA target sequence
ataattaaacgatacaagtat

SEQ ID NO: 128847 - DNA, 21 bp, Artificial sequence
  SiRNA target sequence
taattaaacgatacaagtatt

SEQ ID NO: 128848 - DNA, 21 bp, Artificial sequence
  SiRNA target sequence
aattaaacgatacaagtattt

SEQ ID NO: 128849 - DNA, 21 bp, Artificial sequence
  SiRNA target sequence
attaaacgatacaagtatttt

SEQ ID NO: 128850 - DNA, 21 bp, Artificial sequence
  SiRNA target sequence
ttaaacgatacaagtatttta

SEQ ID NO: 128851 - DNA, 21 bp, Artificial sequence
  SiRNA target sequence
taaacgatacaagtattttaa

SEQ ID NO: 128852 - DNA, 21 bp, Artificial sequence
  SiRNA target sequence
aaacgatacaagtattttaag

SEQ ID NO: 128853 - DNA, 21 bp, Artificial sequence
  SiRNA target sequence
aacgatacaagtattttaaga

SEQ ID NO: 128854 - DNA, 21 bp, Artificial sequence
  SiRNA target sequence
acgatacaagtattttaagat

SEQ ID NO: 128855 - DNA, 21 bp, Artificial sequence
  SiRNA target sequence
cgatacaagtattttaagata

SEQ ID NO: 128856 - DNA, 21 bp, Artificial sequence
  SiRNA target sequence
gatacaagtattttaagataa

SEQ ID NO: 128857 - DNA, 21 bp, Artificial sequence
  SiRNA target sequence
atacaagtattttaagataaa

SEQ ID NO: 128858 - DNA, 21 bp, Artificial sequence
  SiRNA target sequence
tacaagtattttaagataaaa

SEQ ID NO: 128859 - DNA, 21 bp, Artificial sequence
  SiRNA target sequence
acaagtattttaagataaaaa

SEQ ID NO: 128860 - DNA, 21 bp, Artificial sequence
  SiRNA target sequence
caagtattttaagataaaaaa

SEQ ID NO: 128861 - DNA, 21 bp, Artificial sequence
  SiRNA target sequence
aagtattttaagataaaaaaa

SEQ ID NO: 128862 - DNA, 21 bp, Artificial sequence
  SiRNA target sequence
agtattttaagataaaaaaat

SEQ ID NO: 128863 - DNA, 21 bp, Artificial sequence
  SiRNA target sequence
gtattttaagataaaaaaatt

SEQ ID NO: 128864 - DNA, 21 bp, Artificial sequence
  SiRNA target sequence
tattttaagataaaaaaattg

SEQ ID NO: 128865 - DNA, 21 bp, Artificial sequence
  SiRNA target sequence
attttaagataaaaaaattgg

SEQ ID NO: 128866 - DNA, 21 bp, Artificial sequence
  SiRNA target sequence
ttttaagataaaaaaattggc

SEQ ID NO: 128867 - DNA, 21 bp, Artificial sequence
  SiRNA target sequence
tttaagataaaaaaattggcc

SEQ ID NO: 128868 - DNA, 21 bp, Artificial sequence
  SiRNA target sequence
ttaagataaaaaaattggcct

SEQ ID NO: 128869 - DNA, 21 bp, Artificial sequence
  SiRNA target sequence
taagataaaaaaattggcctt

SEQ ID NO: 128870 - DNA, 21 bp, Artificial sequence
  SiRNA target sequence
aagataaaaaaattggcctta

SEQ ID NO: 128871 - DNA, 21 bp, Artificial sequence
  SiRNA target sequence
agataaaaaaattggccttaa

SEQ ID NO: 128872 - DNA, 21 bp, Artificial sequence
  SiRNA target sequence
gataaaaaaattggccttaac

SEQ ID NO: 128873 - DNA, 21 bp, Artificial sequence
  SiRNA target sequence
ataaaaaaattggccttaact

SEQ ID NO: 128874 - DNA, 21 bp, Artificial sequence
  SiRNA target sequence
taaaaaaattggccttaactt

SEQ ID NO: 128875 - DNA, 21 bp, Artificial sequence
  SiRNA target sequence
aaaaaaattggccttaactta

SEQ ID NO: 128876 - DNA, 21 bp, Artificial sequence
  SiRNA target sequence
aaaaaattggccttaacttac

SEQ ID NO: 128877 - DNA, 21 bp, Artificial sequence
  SiRNA target sequence
aaaaattggccttaacttact

SEQ ID NO: 128878 - DNA, 21 bp, Artificial sequence
  SiRNA target sequence
aaaattggccttaacttactt

SEQ ID NO: 128879 - DNA, 21 bp, Artificial sequence
  SiRNA target sequence
aaattggccttaacttacttc

SEQ ID NO: 128880 - DNA, 21 bp, Artificial sequence
  SiRNA target sequence
aattggccttaacttacttcg

SEQ ID NO: 128881 - DNA, 21 bp, Artificial sequence
  SiRNA target sequence
attggccttaacttacttcgg

SEQ ID NO: 128882 - DNA, 21 bp, Artificial sequence
  SiRNA target sequence
ttggccttaacttacttcggg

SEQ ID NO: 128883 - DNA, 21 bp, Artificial sequence
  SiRNA target sequence
tggccttaacttacttcggga

SEQ ID NO: 128884 - DNA, 21 bp, Artificial sequence
  SiRNA target sequence
ggccttaacttacttcgggaa

SEQ ID NO: 128885 - DNA, 21 bp, Artificial sequence
  SiRNA target sequence
gccttaacttacttcgggaaa

SEQ ID NO: 128886 - DNA, 21 bp, Artificial sequence
  SiRNA target sequence
ccttaacttacttcgggaaac

SEQ ID NO: 128887 - DNA, 21 bp, Artificial sequence
  SiRNA target sequence
cttaacttacttcgggaaaca

SEQ ID NO: 128888 - DNA, 21 bp, Artificial sequence
  SiRNA target sequence
ttaacttacttcgggaaacaa

SEQ ID NO: 128889 - DNA, 21 bp, Artificial sequence
  SiRNA target sequence
taacttacttcgggaaacaag

SEQ ID NO: 128890 - DNA, 21 bp, Artificial sequence
  SiRNA target sequence
aacttacttcgggaaacaaga

SEQ ID NO: 128891 - DNA, 21 bp, Artificial sequence
  SiRNA target sequence
acttacttcgggaaacaagac

SEQ ID NO: 128892 - DNA, 21 bp, Artificial sequence
  SiRNA target sequence
cttacttcgggaaacaagact

SEQ ID NO: 128893 - DNA, 21 bp, Artificial sequence
  SiRNA target sequence
ttacttcgggaaacaagactt

SEQ ID NO: 128894 - DNA, 21 bp, Artificial sequence
  SiRNA target sequence
tacttcgggaaacaagacttg

SEQ ID NO: 128895 - DNA, 21 bp, Artificial sequence
  SiRNA target sequence
acttcgggaaacaagacttgc

SEQ ID NO: 128896 - DNA, 21 bp, Artificial sequence
  SiRNA target sequence
cttcgggaaacaagacttgca

SEQ ID NO: 128897 - DNA, 21 bp, Artificial sequence
  SiRNA target sequence
ttcgggaaacaagacttgcaa

SEQ ID NO: 128898 - DNA, 21 bp, Artificial sequence
  SiRNA target sequence
tcgggaaacaagacttgcaat

SEQ ID NO: 128899 - DNA, 21 bp, Artificial sequence
  SiRNA target sequence
cgggaaacaagacttgcaatg

SEQ ID NO: 128900 - DNA, 21 bp, Artificial sequence
  SiRNA target sequence
gggaaacaagacttgcaatgg

SEQ ID NO: 128901 - DNA, 21 bp, Artificial sequence
  SiRNA target sequence
ggaaacaagacttgcaatgga

SEQ ID NO: 128902 - DNA, 21 bp, Artificial sequence
  SiRNA target sequence
gaaacaagacttgcaatggaa

SEQ ID NO: 128903 - DNA, 21 bp, Artificial sequence
  SiRNA target sequence
aaacaagacttgcaatggaaa

SEQ ID NO: 128904 - DNA, 21 bp, Artificial sequence
  SiRNA target sequence
aacaagacttgcaatggaaac

SEQ ID NO: 128905 - DNA, 21 bp, Artificial sequence
  SiRNA target sequence
acaagacttgcaatggaaacc

SEQ ID NO: 128906 - DNA, 21 bp, Artificial sequence
  SiRNA target sequence
caagacttgcaatggaaacct

SEQ ID NO: 128907 - DNA, 21 bp, Artificial sequence
  SiRNA target sequence
aagacttgcaatggaaaccta

SEQ ID NO: 128908 - DNA, 21 bp, Artificial sequence
  SiRNA target sequence
agacttgcaatggaaacctaa

SEQ ID NO: 128909 - DNA, 21 bp, Artificial sequence
  SiRNA target sequence
gacttgcaatggaaacctaaa

SEQ ID NO: 128910 - DNA, 21 bp, Artificial sequence
  SiRNA target sequence
acttgcaatggaaacctaaaa

SEQ ID NO: 128911 - DNA, 21 bp, Artificial sequence
  SiRNA target sequence
cttgcaatggaaacctaaaag

SEQ ID NO: 128912 - DNA, 21 bp, Artificial sequence
  SiRNA target sequence
ttgcaatggaaacctaaaagt

SEQ ID NO: 128913 - DNA, 21 bp, Artificial sequence
  SiRNA target sequence
tgcaatggaaacctaaaagtc

SEQ ID NO: 128914 - DNA, 21 bp, Artificial sequence
  SiRNA target sequence
gcaatggaaacctaaaagtcg

SEQ ID NO: 128915 - DNA, 21 bp, Artificial sequence
  SiRNA target sequence
caatggaaacctaaaagtcgg

SEQ ID NO: 128916 - DNA, 21 bp, Artificial sequence
  SiRNA target sequence
aatggaaacctaaaagtcggt

SEQ ID NO: 128917 - DNA, 21 bp, Artificial sequence
  SiRNA target sequence
atggaaacctaaaagtcggtc

SEQ ID NO: 128918 - DNA, 21 bp, Artificial sequence
  SiRNA target sequence
tggaaacctaaaagtcggtca

SEQ ID NO: 128919 - DNA, 21 bp, Artificial sequence
  SiRNA target sequence
ggaaacctaaaagtcggtcag

SEQ ID NO: 128920 - DNA, 21 bp, Artificial sequence
  SiRNA target sequence
gaaacctaaaagtcggtcaga

SEQ ID NO: 128921 - DNA, 21 bp, Artificial sequence
  SiRNA target sequence
aaacctaaaagtcggtcagaa

SEQ ID NO: 128922 - DNA, 21 bp, Artificial sequence
  SiRNA target sequence
aacctaaaagtcggtcagaaa

SEQ ID NO: 128923 - DNA, 21 bp, Artificial sequence
  SiRNA target sequence
acctaaaagtcggtcagaaat

SEQ ID NO: 128924 - DNA, 21 bp, Artificial sequence
  SiRNA target sequence
cctaaaagtcggtcagaaatt

SEQ ID NO: 128925 - DNA, 21 bp, Artificial sequence
  SiRNA target sequence
ctaaaagtcggtcagaaatta

SEQ ID NO: 128926 - DNA, 21 bp, Artificial sequence
  SiRNA target sequence
taaaagtcggtcagaaattat

SEQ ID NO: 128927 - DNA, 21 bp, Artificial sequence
  SiRNA target sequence
aaaagtcggtcagaaattatt

SEQ ID NO: 128928 - DNA, 21 bp, Artificial sequence
  SiRNA target sequence
aaagtcggtcagaaattatta

SEQ ID NO: 128929 - DNA, 21 bp, Artificial sequence
  SiRNA target sequence
aagtcggtcagaaattattaa

SEQ ID NO: 128930 - DNA, 21 bp, Artificial sequence
  SiRNA target sequence
agtcggtcagaaattattaac

SEQ ID NO: 128931 - DNA, 21 bp, Artificial sequence
  SiRNA target sequence
gtcggtcagaaattattaacg

SEQ ID NO: 128932 - DNA, 21 bp, Artificial sequence
  SiRNA target sequence
tcggtcagaaattattaacga

SEQ ID NO: 128933 - DNA, 21 bp, Artificial sequence
  SiRNA target sequence
cggtcagaaattattaacgat

SEQ ID NO: 128934 - DNA, 21 bp, Artificial sequence
  SiRNA target sequence
ggtcagaaattattaacgatt

SEQ ID NO: 128935 - DNA, 21 bp, Artificial sequence
  SiRNA target sequence
gtcagaaattattaacgattt

SEQ ID NO: 128936 - DNA, 21 bp, Artificial sequence
  SiRNA target sequence
tcagaaattattaacgattta

SEQ ID NO: 128937 - DNA, 21 bp, Artificial sequence
  SiRNA target sequence
cagaaattattaacgatttaa

SEQ ID NO: 128938 - DNA, 21 bp, Artificial sequence
  SiRNA target sequence
agaaattattaacgatttaaa

SEQ ID NO: 128939 - DNA, 21 bp, Artificial sequence
  SiRNA target sequence
gaaattattaacgatttaaaa

SEQ ID NO: 128940 - DNA, 21 bp, Artificial sequence
  SiRNA target sequence
aaattattaacgatttaaaaa

SEQ ID NO: 128941 - DNA, 21 bp, Artificial sequence
  SiRNA target sequence
aattattaacgatttaaaaaa

SEQ ID NO: 128942 - DNA, 21 bp, Artificial sequence
  SiRNA target sequence
attattaacgatttaaaaaat

SEQ ID NO: 128943 - DNA, 21 bp, Artificial sequence
  SiRNA target sequence
ttattaacgatttaaaaaata

SEQ ID NO: 128944 - DNA, 21 bp, Artificial sequence
  SiRNA target sequence
tattaacgatttaaaaaatac

SEQ ID NO: 128945 - DNA, 21 bp, Artificial sequence
  SiRNA target sequence
attaacgatttaaaaaataca

SEQ ID NO: 128946 - DNA, 21 bp, Artificial sequence
  SiRNA target sequence
ttaacgatttaaaaaatacaa

SEQ ID NO: 128947 - DNA, 21 bp, Artificial sequence
  SiRNA target sequence
taacgatttaaaaaatacaaa

SEQ ID NO: 128948 - DNA, 21 bp, Artificial sequence
  SiRNA target sequence
aacgatttaaaaaatacaaac

SEQ ID NO: 128949 - DNA, 21 bp, Artificial sequence
  SiRNA target sequence
acgatttaaaaaatacaaact

SEQ ID NO: 128950 - DNA, 21 bp, Artificial sequence
  SiRNA target sequence
cgatttaaaaaatacaaactt

SEQ ID NO: 128951 - DNA, 21 bp, Artificial sequence
  SiRNA target sequence
gatttaaaaaatacaaacttt

SEQ ID NO: 128952 - DNA, 21 bp, Artificial sequence
  SiRNA target sequence
atttaaaaaatacaaactttg

SEQ ID NO: 128953 - DNA, 21 bp, Artificial sequence
  SiRNA target sequence
tttaaaaaatacaaactttga

SEQ ID NO: 128954 - DNA, 21 bp, Artificial sequence
  SiRNA target sequence
ttaaaaaatacaaactttgac

SEQ ID NO: 128955 - DNA, 21 bp, Artificial sequence
  SiRNA target sequence
taaaaaatacaaactttgaca

SEQ ID NO: 128956 - DNA, 21 bp, Artificial sequence
  SiRNA target sequence
aaaaaatacaaactttgacat

SEQ ID NO: 128957 - DNA, 21 bp, Artificial sequence
  SiRNA target sequence
aaaaatacaaactttgacata

SEQ ID NO: 128958 - DNA, 21 bp, Artificial sequence
  SiRNA target sequence
aaaatacaaactttgacatat

SEQ ID NO: 128959 - DNA, 21 bp, Artificial sequence
  SiRNA target sequence
aaatacaaactttgacatatt

SEQ ID NO: 128960 - DNA, 21 bp, Artificial sequence
  SiRNA target sequence
aatacaaactttgacatattg

SEQ ID NO: 128961 - DNA, 21 bp, Artificial sequence
  SiRNA target sequence
atacaaactttgacatattga

SEQ ID NO: 128962 - DNA, 21 bp, Artificial sequence
  SiRNA target sequence
tacaaactttgacatattgat

SEQ ID NO: 128963 - DNA, 21 bp, Artificial sequence
  SiRNA target sequence
acaaactttgacatattgatt

SEQ ID NO: 128964 - DNA, 21 bp, Artificial sequence
  SiRNA target sequence
caaactttgacatattgatta

SEQ ID NO: 128965 - DNA, 21 bp, Artificial sequence
  SiRNA target sequence
aaactttgacatattgattat

SEQ ID NO: 128966 - DNA, 21 bp, Artificial sequence
  SiRNA target sequence
aactttgacatattgattatt

SEQ ID NO: 128967 - DNA, 21 bp, Artificial sequence
  SiRNA target sequence
actttgacatattgattattg

SEQ ID NO: 128968 - DNA, 21 bp, Artificial sequence
  SiRNA target sequence
ctttgacatattgattattgg

SEQ ID NO: 128969 - DNA, 21 bp, Artificial sequence
  SiRNA target sequence
tttgacatattgattattggt

SEQ ID NO: 128970 - DNA, 21 bp, Artificial sequence
  SiRNA target sequence
ttgacatattgattattggtg

SEQ ID NO: 128971 - DNA, 21 bp, Artificial sequence
  SiRNA target sequence
tgacatattgattattggtgg

SEQ ID NO: 128972 - DNA, 21 bp, Artificial sequence
  SiRNA target sequence
gacatattgattattggtggc

SEQ ID NO: 128973 - DNA, 21 bp, Artificial sequence
  SiRNA target sequence
acatattgattattggtggcg

SEQ ID NO: 128974 - DNA, 21 bp, Artificial sequence
  SiRNA target sequence
catattgattattggtggcgg

SEQ ID NO: 128975 - DNA, 21 bp, Artificial sequence
  SiRNA target sequence
atattgattattggtggcggt

SEQ ID NO: 128976 - DNA, 21 bp, Artificial sequence
  SiRNA target sequence
tattgattattggtggcggtt

SEQ ID NO: 128977 - DNA, 21 bp, Artificial sequence
  SiRNA target sequence
attgattattggtggcggttc

SEQ ID NO: 128978 - DNA, 21 bp, Artificial sequence
  SiRNA target sequence
ttgattattggtggcggttca

SEQ ID NO: 128979 - DNA, 21 bp, Artificial sequence
  SiRNA target sequence
tgattattggtggcggttcaa

SEQ ID NO: 128980 - DNA, 21 bp, Artificial sequence
  SiRNA target sequence
gattattggtggcggttcaac

SEQ ID NO: 128981 - DNA, 21 bp, Artificial sequence
  SiRNA target sequence
attattggtggcggttcaacg

SEQ ID NO: 128982 - DNA, 21 bp, Artificial sequence
  SiRNA target sequence
ttattggtggcggttcaacgg

SEQ ID NO: 128983 - DNA, 21 bp, Artificial sequence
  SiRNA target sequence
tattggtggcggttcaacggg

SEQ ID NO: 128984 - DNA, 21 bp, Artificial sequence
  SiRNA target sequence
attggtggcggttcaacggga

SEQ ID NO: 128985 - DNA, 21 bp, Artificial sequence
  SiRNA target sequence
ttggtggcggttcaacgggaa

SEQ ID NO: 128986 - DNA, 21 bp, Artificial sequence
  SiRNA target sequence
tggtggcggttcaacgggaat

SEQ ID NO: 128987 - DNA, 21 bp, Artificial sequence
  SiRNA target sequence
ggtggcggttcaacgggaatg

SEQ ID NO: 128988 - DNA, 21 bp, Artificial sequence
  SiRNA target sequence
gtggcggttcaacgggaatgg

SEQ ID NO: 128989 - DNA, 21 bp, Artificial sequence
  SiRNA target sequence
tggcggttcaacgggaatggg

SEQ ID NO: 128990 - DNA, 21 bp, Artificial sequence
  SiRNA target sequence
ggcggttcaacgggaatggga

SEQ ID NO: 128991 - DNA, 21 bp, Artificial sequence
  SiRNA target sequence
gcggttcaacgggaatgggat

SEQ ID NO: 128992 - DNA, 21 bp, Artificial sequence
  SiRNA target sequence
cggttcaacgggaatgggatg

SEQ ID NO: 128993 - DNA, 21 bp, Artificial sequence
  SiRNA target sequence
ggttcaacgggaatgggatgt

SEQ ID NO: 128994 - DNA, 21 bp, Artificial sequence
  SiRNA target sequence
gttcaacgggaatgggatgtg

SEQ ID NO: 128995 - DNA, 21 bp, Artificial sequence
  SiRNA target sequence
ttcaacgggaatgggatgtgc

SEQ ID NO: 128996 - DNA, 21 bp, Artificial sequence
  SiRNA target sequence
tcaacgggaatgggatgtgca

SEQ ID NO: 128997 - DNA, 21 bp, Artificial sequence
  SiRNA target sequence
caacgggaatgggatgtgcaa

SEQ ID NO: 128998 - DNA, 21 bp, Artificial sequence
  SiRNA target sequence
aacgggaatgggatgtgcaat

SEQ ID NO: 128999 - DNA, 21 bp, Artificial sequence
  SiRNA target sequence
acgggaatgggatgtgcaatc

SEQ ID NO: 129000 - DNA, 21 bp, Artificial sequence
  SiRNA target sequence
cgggaatgggatgtgcaatcg

SEQ ID NO: 129001 - DNA, 21 bp, Artificial sequence
  SiRNA target sequence
gggaatgggatgtgcaatcga

SEQ ID NO: 129002 - DNA, 21 bp, Artificial sequence
  SiRNA target sequence
ggaatgggatgtgcaatcgaa

SEQ ID NO: 129003 - DNA, 21 bp, Artificial sequence
  SiRNA target sequence
gaatgggatgtgcaatcgaag

SEQ ID NO: 129004 - DNA, 21 bp, Artificial sequence
  SiRNA target sequence
aatgggatgtgcaatcgaagc

SEQ ID NO: 129005 - DNA, 21 bp, Artificial sequence
  SiRNA target sequence
atgggatgtgcaatcgaagca

SEQ ID NO: 129006 - DNA, 21 bp, Artificial sequence
  SiRNA target sequence
tgggatgtgcaatcgaagcag

SEQ ID NO: 129007 - DNA, 21 bp, Artificial sequence
  SiRNA target sequence
gggatgtgcaatcgaagcagc

SEQ ID NO: 129008 - DNA, 21 bp, Artificial sequence
  SiRNA target sequence
ggatgtgcaatcgaagcagct

SEQ ID NO: 129009 - DNA, 21 bp, Artificial sequence
  SiRNA target sequence
gatgtgcaatcgaagcagcta

SEQ ID NO: 129010 - DNA, 21 bp, Artificial sequence
  SiRNA target sequence
atgtgcaatcgaagcagctac

SEQ ID NO: 129011 - DNA, 21 bp, Artificial sequence
  SiRNA target sequence
tgtgcaatcgaagcagctaca

SEQ ID NO: 129012 - DNA, 21 bp, Artificial sequence
  SiRNA target sequence
gtgcaatcgaagcagctacac

SEQ ID NO: 129013 - DNA, 21 bp, Artificial sequence
  SiRNA target sequence
tgcaatcgaagcagctacacg

SEQ ID NO: 129014 - DNA, 21 bp, Artificial sequence
  SiRNA target sequence
gcaatcgaagcagctacacga

SEQ ID NO: 129015 - DNA, 21 bp, Artificial sequence
  SiRNA target sequence
caatcgaagcagctacacgag

SEQ ID NO: 129016 - DNA, 21 bp, Artificial sequence
  SiRNA target sequence
aatcgaagcagctacacgagg

SEQ ID NO: 129017 - DNA, 21 bp, Artificial sequence
  SiRNA target sequence
atcgaagcagctacacgaggt

SEQ ID NO: 129018 - DNA, 21 bp, Artificial sequence
  SiRNA target sequence
tcgaagcagctacacgaggta

SEQ ID NO: 129019 - DNA, 21 bp, Artificial sequence
  SiRNA target sequence
cgaagcagctacacgaggtat

SEQ ID NO: 129020 - DNA, 21 bp, Artificial sequence
  SiRNA target sequence
gaagcagctacacgaggtata

SEQ ID NO: 129021 - DNA, 21 bp, Artificial sequence
  SiRNA target sequence
aagcagctacacgaggtataa

SEQ ID NO: 129022 - DNA, 21 bp, Artificial sequence
  SiRNA target sequence
agcagctacacgaggtataag

SEQ ID NO: 129023 - DNA, 21 bp, Artificial sequence
  SiRNA target sequence
gcagctacacgaggtataagt

SEQ ID NO: 129024 - DNA, 21 bp, Artificial sequence
  SiRNA target sequence
cagctacacgaggtataagtg

SEQ ID NO: 129025 - DNA, 21 bp, Artificial sequence
  SiRNA target sequence
agctacacgaggtataagtgt

SEQ ID NO: 129026 - DNA, 21 bp, Artificial sequence
  SiRNA target sequence
gctacacgaggtataagtgtt

SEQ ID NO: 129027 - DNA, 21 bp, Artificial sequence
  SiRNA target sequence
ctacacgaggtataagtgttg

SEQ ID NO: 129028 - DNA, 21 bp, Artificial sequence
  SiRNA target sequence
tacacgaggtataagtgttgg

SEQ ID NO: 129029 - DNA, 21 bp, Artificial sequence
  SiRNA target sequence
acacgaggtataagtgttggc

SEQ ID NO: 129030 - DNA, 21 bp, Artificial sequence
  SiRNA target sequence
cacgaggtataagtgttggcc

SEQ ID NO: 129031 - DNA, 21 bp, Artificial sequence
  SiRNA target sequence
acgaggtataagtgttggcct

SEQ ID NO: 129032 - DNA, 21 bp, Artificial sequence
  SiRNA target sequence
cgaggtataagtgttggcctg

SEQ ID NO: 129033 - DNA, 21 bp, Artificial sequence
  SiRNA target sequence
gaggtataagtgttggcctga

SEQ ID NO: 129034 - DNA, 21 bp, Artificial sequence
  SiRNA target sequence
aggtataagtgttggcctgat

SEQ ID NO: 129035 - DNA, 21 bp, Artificial sequence
  SiRNA target sequence
ggtataagtgttggcctgata

SEQ ID NO: 129036 - DNA, 21 bp, Artificial sequence
  SiRNA target sequence
gtataagtgttggcctgatag

SEQ ID NO: 129037 - DNA, 21 bp, Artificial sequence
  SiRNA target sequence
tataagtgttggcctgataga

SEQ ID NO: 129038 - DNA, 21 bp, Artificial sequence
  SiRNA target sequence
ataagtgttggcctgatagaa

SEQ ID NO: 129039 - DNA, 21 bp, Artificial sequence
  SiRNA target sequence
taagtgttggcctgatagaag

SEQ ID NO: 129040 - DNA, 21 bp, Artificial sequence
  SiRNA target sequence
aagtgttggcctgatagaagc

SEQ ID NO: 129041 - DNA, 21 bp, Artificial sequence
  SiRNA target sequence
agtgttggcctgatagaagca

SEQ ID NO: 129042 - DNA, 21 bp, Artificial sequence
  SiRNA target sequence
gtgttggcctgatagaagcac

SEQ ID NO: 129043 - DNA, 21 bp, Artificial sequence
  SiRNA target sequence
tgttggcctgatagaagcaca

SEQ ID NO: 129044 - DNA, 21 bp, Artificial sequence
  SiRNA target sequence
gttggcctgatagaagcacat

SEQ ID NO: 129045 - DNA, 21 bp, Artificial sequence
  SiRNA target sequence
ttggcctgatagaagcacatg

SEQ ID NO: 129046 - DNA, 21 bp, Artificial sequence
  SiRNA target sequence
tggcctgatagaagcacatga

SEQ ID NO: 129047 - DNA, 21 bp, Artificial sequence
  SiRNA target sequence
ggcctgatagaagcacatgat

SEQ ID NO: 129048 - DNA, 21 bp, Artificial sequence
  SiRNA target sequence
gcctgatagaagcacatgatt

SEQ ID NO: 129049 - DNA, 21 bp, Artificial sequence
  SiRNA target sequence
cctgatagaagcacatgattt

SEQ ID NO: 129050 - DNA, 21 bp, Artificial sequence
  SiRNA target sequence
ctgatagaagcacatgatttt

SEQ ID NO: 129051 - DNA, 21 bp, Artificial sequence
  SiRNA target sequence
tgatagaagcacatgattttg

SEQ ID NO: 129052 - DNA, 21 bp, Artificial sequence
  SiRNA target sequence
gatagaagcacatgattttgg

SEQ ID NO: 129053 - DNA, 21 bp, Artificial sequence
  SiRNA target sequence
atagaagcacatgattttggt

SEQ ID NO: 129054 - DNA, 21 bp, Artificial sequence
  SiRNA target sequence
tagaagcacatgattttggtt

SEQ ID NO: 129055 - DNA, 21 bp, Artificial sequence
  SiRNA target sequence
agaagcacatgattttggttc

SEQ ID NO: 129056 - DNA, 21 bp, Artificial sequence
  SiRNA target sequence
gaagcacatgattttggttcg

SEQ ID NO: 129057 - DNA, 21 bp, Artificial sequence
  SiRNA target sequence
aagcacatgattttggttcgg

SEQ ID NO: 129058 - DNA, 21 bp, Artificial sequence
  SiRNA target sequence
agcacatgattttggttcggg

SEQ ID NO: 129059 - DNA, 21 bp, Artificial sequence
  SiRNA target sequence
gcacatgattttggttcgggc

SEQ ID NO: 129060 - DNA, 21 bp, Artificial sequence
  SiRNA target sequence
cacatgattttggttcgggca

SEQ ID NO: 129061 - DNA, 21 bp, Artificial sequence
  SiRNA target sequence
acatgattttggttcgggcac

SEQ ID NO: 129062 - DNA, 21 bp, Artificial sequence
  SiRNA target sequence
catgattttggttcgggcacg

SEQ ID NO: 129063 - DNA, 21 bp, Artificial sequence
  SiRNA target sequence
atgattttggttcgggcacga

SEQ ID NO: 129064 - DNA, 21 bp, Artificial sequence
  SiRNA target sequence
tgattttggttcgggcacgag

SEQ ID NO: 129065 - DNA, 21 bp, Artificial sequence
  SiRNA target sequence
gattttggttcgggcacgagt

SEQ ID NO: 129066 - DNA, 21 bp, Artificial sequence
  SiRNA target sequence
attttggttcgggcacgagtt

SEQ ID NO: 129067 - DNA, 21 bp, Artificial sequence
  SiRNA target sequence
ttttggttcgggcacgagttc

SEQ ID NO: 129068 - DNA, 21 bp, Artificial sequence
  SiRNA target sequence
tttggttcgggcacgagttca

SEQ ID NO: 129069 - DNA, 21 bp, Artificial sequence
  SiRNA target sequence
ttggttcgggcacgagttcaa

SEQ ID NO: 129070 - DNA, 21 bp, Artificial sequence
  SiRNA target sequence
tggttcgggcacgagttcaaa

SEQ ID NO: 129071 - DNA, 21 bp, Artificial sequence
  SiRNA target sequence
ggttcgggcacgagttcaaaa

SEQ ID NO: 129072 - DNA, 21 bp, Artificial sequence
  SiRNA target sequence
gttcgggcacgagttcaaaat

SEQ ID NO: 129073 - DNA, 21 bp, Artificial sequence
  SiRNA target sequence
ttcgggcacgagttcaaaatc

SEQ ID NO: 129074 - DNA, 21 bp, Artificial sequence
  SiRNA target sequence
tcgggcacgagttcaaaatct

SEQ ID NO: 129075 - DNA, 21 bp, Artificial sequence
  SiRNA target sequence
cgggcacgagttcaaaatcta

SEQ ID NO: 129076 - DNA, 21 bp, Artificial sequence
  SiRNA target sequence
gggcacgagttcaaaatctac

SEQ ID NO: 129077 - DNA, 21 bp, Artificial sequence
  SiRNA target sequence
ggcacgagttcaaaatctaca

SEQ ID NO: 129078 - DNA, 21 bp, Artificial sequence
  SiRNA target sequence
gcacgagttcaaaatctacaa

SEQ ID NO: 129079 - DNA, 21 bp, Artificial sequence
  SiRNA target sequence
cacgagttcaaaatctacaaa

SEQ ID NO: 129080 - DNA, 21 bp, Artificial sequence
  SiRNA target sequence
acgagttcaaaatctacaaaa

SEQ ID NO: 129081 - DNA, 21 bp, Artificial sequence
  SiRNA target sequence
cgagttcaaaatctacaaaac

SEQ ID NO: 129082 - DNA, 21 bp, Artificial sequence
  SiRNA target sequence
gagttcaaaatctacaaaact

SEQ ID NO: 129083 - DNA, 21 bp, Artificial sequence
  SiRNA target sequence
agttcaaaatctacaaaactt

SEQ ID NO: 129084 - DNA, 21 bp, Artificial sequence
  SiRNA target sequence
gttcaaaatctacaaaacttt

SEQ ID NO: 129085 - DNA, 21 bp, Artificial sequence
  SiRNA target sequence
ttcaaaatctacaaaactttt

SEQ ID NO: 129086 - DNA, 21 bp, Artificial sequence
  SiRNA target sequence
tcaaaatctacaaaacttttt

SEQ ID NO: 129087 - DNA, 21 bp, Artificial sequence
  SiRNA target sequence
caaaatctacaaaactttttc

SEQ ID NO: 129088 - DNA, 21 bp, Artificial sequence
  SiRNA target sequence
aaaatctacaaaactttttca

SEQ ID NO: 129089 - DNA, 21 bp, Artificial sequence
  SiRNA target sequence
aaatctacaaaactttttcat

SEQ ID NO: 129090 - DNA, 21 bp, Artificial sequence
  SiRNA target sequence
aatctacaaaactttttcatg

SEQ ID NO: 129091 - DNA, 21 bp, Artificial sequence
  SiRNA target sequence
atctacaaaactttttcatgg

SEQ ID NO: 129092 - DNA, 21 bp, Artificial sequence
  SiRNA target sequence
tctacaaaactttttcatggc

SEQ ID NO: 129093 - DNA, 21 bp, Artificial sequence
  SiRNA target sequence
ctacaaaactttttcatggcg

SEQ ID NO: 129094 - DNA, 21 bp, Artificial sequence
  SiRNA target sequence
tacaaaactttttcatggcgg

SEQ ID NO: 129095 - DNA, 21 bp, Artificial sequence
  SiRNA target sequence
acaaaactttttcatggcggt

SEQ ID NO: 129096 - DNA, 21 bp, Artificial sequence
  SiRNA target sequence
caaaactttttcatggcggtg

SEQ ID NO: 129097 - DNA, 21 bp, Artificial sequence
  SiRNA target sequence
aaaactttttcatggcggtgt

SEQ ID NO: 129098 - DNA, 21 bp, Artificial sequence
  SiRNA target sequence
aaactttttcatggcggtgta

SEQ ID NO: 129099 - DNA, 21 bp, Artificial sequence
  SiRNA target sequence
aactttttcatggcggtgtac

SEQ ID NO: 129100 - DNA, 21 bp, Artificial sequence
  SiRNA target sequence
actttttcatggcggtgtacg

SEQ ID NO: 129101 - DNA, 21 bp, Artificial sequence
  SiRNA target sequence
ctttttcatggcggtgtacgc

SEQ ID NO: 129102 - DNA, 21 bp, Artificial sequence
  SiRNA target sequence
tttttcatggcggtgtacgct

SEQ ID NO: 129103 - DNA, 21 bp, Artificial sequence
  SiRNA target sequence
ttttcatggcggtgtacgcta

SEQ ID NO: 129104 - DNA, 21 bp, Artificial sequence
  SiRNA target sequence
tttcatggcggtgtacgctac

SEQ ID NO: 129105 - DNA, 21 bp, Artificial sequence
  SiRNA target sequence
ttcatggcggtgtacgctacc

SEQ ID NO: 129106 - DNA, 21 bp, Artificial sequence
  SiRNA target sequence
tcatggcggtgtacgctacct

SEQ ID NO: 129107 - DNA, 21 bp, Artificial sequence
  SiRNA target sequence
catggcggtgtacgctacctt

SEQ ID NO: 129108 - DNA, 21 bp, Artificial sequence
  SiRNA target sequence
atggcggtgtacgctaccttg

SEQ ID NO: 129109 - DNA, 21 bp, Artificial sequence
  SiRNA target sequence
tggcggtgtacgctaccttga

SEQ ID NO: 129110 - DNA, 21 bp, Artificial sequence
  SiRNA target sequence
ggcggtgtacgctaccttgaa

SEQ ID NO: 129111 - DNA, 21 bp, Artificial sequence
  SiRNA target sequence
gcggtgtacgctaccttgaaa

SEQ ID NO: 129112 - DNA, 21 bp, Artificial sequence
  SiRNA target sequence
cggtgtacgctaccttgaaaa

SEQ ID NO: 129113 - DNA, 21 bp, Artificial sequence
  SiRNA target sequence
ggtgtacgctaccttgaaaaa

SEQ ID NO: 129114 - DNA, 21 bp, Artificial sequence
  SiRNA target sequence
gtgtacgctaccttgaaaaag

SEQ ID NO: 129115 - DNA, 21 bp, Artificial sequence
  SiRNA target sequence
tgtacgctaccttgaaaaagc

SEQ ID NO: 129116 - DNA, 21 bp, Artificial sequence
  SiRNA target sequence
gtacgctaccttgaaaaagct

SEQ ID NO: 129117 - DNA, 21 bp, Artificial sequence
  SiRNA target sequence
tacgctaccttgaaaaagctg

SEQ ID NO: 129118 - DNA, 21 bp, Artificial sequence
  SiRNA target sequence
acgctaccttgaaaaagctgt

SEQ ID NO: 129119 - DNA, 21 bp, Artificial sequence
  SiRNA target sequence
cgctaccttgaaaaagctgtt

SEQ ID NO: 129120 - DNA, 21 bp, Artificial sequence
  SiRNA target sequence
gctaccttgaaaaagctgtta

SEQ ID NO: 129121 - DNA, 21 bp, Artificial sequence
  SiRNA target sequence
ctaccttgaaaaagctgttaa

SEQ ID NO: 129122 - DNA, 21 bp, Artificial sequence
  SiRNA target sequence
taccttgaaaaagctgttaat

SEQ ID NO: 129123 - DNA, 21 bp, Artificial sequence
  SiRNA target sequence
accttgaaaaagctgttaatg

SEQ ID NO: 129124 - DNA, 21 bp, Artificial sequence
  SiRNA target sequence
ccttgaaaaagctgttaatga

SEQ ID NO: 129125 - DNA, 21 bp, Artificial sequence
  SiRNA target sequence
cttgaaaaagctgttaatgat

SEQ ID NO: 129126 - DNA, 21 bp, Artificial sequence
  SiRNA target sequence
ttgaaaaagctgttaatgatt

SEQ ID NO: 129127 - DNA, 21 bp, Artificial sequence
  SiRNA target sequence
tgaaaaagctgttaatgattt

SEQ ID NO: 129128 - DNA, 21 bp, Artificial sequence
  SiRNA target sequence
gaaaaagctgttaatgattta

SEQ ID NO: 129129 - DNA, 21 bp, Artificial sequence
  SiRNA target sequence
aaaaagctgttaatgatttag

SEQ ID NO: 129130 - DNA, 21 bp, Artificial sequence
  SiRNA target sequence
aaaagctgttaatgatttaga

SEQ ID NO: 129131 - DNA, 21 bp, Artificial sequence
  SiRNA target sequence
aaagctgttaatgatttagat

SEQ ID NO: 129132 - DNA, 21 bp, Artificial sequence
  SiRNA target sequence
aagctgttaatgatttagata

SEQ ID NO: 129133 - DNA, 21 bp, Artificial sequence
  SiRNA target sequence
agctgttaatgatttagatag

SEQ ID NO: 129134 - DNA, 21 bp, Artificial sequence
  SiRNA target sequence
gctgttaatgatttagataga

SEQ ID NO: 129135 - DNA, 21 bp, Artificial sequence
  SiRNA target sequence
ctgttaatgatttagatagat

SEQ ID NO: 129136 - DNA, 21 bp, Artificial sequence
  SiRNA target sequence
tgttaatgatttagatagatc

SEQ ID NO: 129137 - DNA, 21 bp, Artificial sequence
  SiRNA target sequence
gttaatgatttagatagatct

SEQ ID NO: 129138 - DNA, 21 bp, Artificial sequence
  SiRNA target sequence
ttaatgatttagatagatctc

SEQ ID NO: 129139 - DNA, 21 bp, Artificial sequence
  SiRNA target sequence
taatgatttagatagatctca

SEQ ID NO: 129140 - DNA, 21 bp, Artificial sequence
  SiRNA target sequence
aatgatttagatagatctcag

SEQ ID NO: 129141 - DNA, 21 bp, Artificial sequence
  SiRNA target sequence
atgatttagatagatctcagt

SEQ ID NO: 129142 - DNA, 21 bp, Artificial sequence
  SiRNA target sequence
tgatttagatagatctcagtt

SEQ ID NO: 129143 - DNA, 21 bp, Artificial sequence
  SiRNA target sequence
gatttagatagatctcagttt

SEQ ID NO: 129144 - DNA, 21 bp, Artificial sequence
  SiRNA target sequence
atttagatagatctcagtttg

SEQ ID NO: 129145 - DNA, 21 bp, Artificial sequence
  SiRNA target sequence
tttagatagatctcagtttga

SEQ ID NO: 129146 - DNA, 21 bp, Artificial sequence
  SiRNA target sequence
ttagatagatctcagtttgac

SEQ ID NO: 129147 - DNA, 21 bp, Artificial sequence
  SiRNA target sequence
tagatagatctcagtttgact

SEQ ID NO: 129148 - DNA, 21 bp, Artificial sequence
  SiRNA target sequence
agatagatctcagtttgactt

SEQ ID NO: 129149 - DNA, 21 bp, Artificial sequence
  SiRNA target sequence
gatagatctcagtttgacttg

SEQ ID NO: 129150 - DNA, 21 bp, Artificial sequence
  SiRNA target sequence
atagatctcagtttgacttgg

SEQ ID NO: 129151 - DNA, 21 bp, Artificial sequence
  SiRNA target sequence
tagatctcagtttgacttggt

SEQ ID NO: 129152 - DNA, 21 bp, Artificial sequence
  SiRNA target sequence
agatctcagtttgacttggta

SEQ ID NO: 129153 - DNA, 21 bp, Artificial sequence
  SiRNA target sequence
gatctcagtttgacttggtat

SEQ ID NO: 129154 - DNA, 21 bp, Artificial sequence
  SiRNA target sequence
atctcagtttgacttggtatc

SEQ ID NO: 129155 - DNA, 21 bp, Artificial sequence
  SiRNA target sequence
tctcagtttgacttggtatct

SEQ ID NO: 129156 - DNA, 21 bp, Artificial sequence
  SiRNA target sequence
ctcagtttgacttggtatctg

SEQ ID NO: 129157 - DNA, 21 bp, Artificial sequence
  SiRNA target sequence
tcagtttgacttggtatctga

SEQ ID NO: 129158 - DNA, 21 bp, Artificial sequence
  SiRNA target sequence
cagtttgacttggtatctgaa

SEQ ID NO: 129159 - DNA, 21 bp, Artificial sequence
  SiRNA target sequence
agtttgacttggtatctgaag

SEQ ID NO: 129160 - DNA, 21 bp, Artificial sequence
  SiRNA target sequence
gtttgacttggtatctgaagc

SEQ ID NO: 129161 - DNA, 21 bp, Artificial sequence
  SiRNA target sequence
tttgacttggtatctgaagca

SEQ ID NO: 129162 - DNA, 21 bp, Artificial sequence
  SiRNA target sequence
ttgacttggtatctgaagcat

SEQ ID NO: 129163 - DNA, 21 bp, Artificial sequence
  SiRNA target sequence
tgacttggtatctgaagcatt

SEQ ID NO: 129164 - DNA, 21 bp, Artificial sequence
  SiRNA target sequence
gacttggtatctgaagcatta

SEQ ID NO: 129165 - DNA, 21 bp, Artificial sequence
  SiRNA target sequence
acttggtatctgaagcattaa

SEQ ID NO: 129166 - DNA, 21 bp, Artificial sequence
  SiRNA target sequence
cttggtatctgaagcattaag

SEQ ID NO: 129167 - DNA, 21 bp, Artificial sequence
  SiRNA target sequence
ttggtatctgaagcattaagt

SEQ ID NO: 129168 - DNA, 21 bp, Artificial sequence
  SiRNA target sequence
tggtatctgaagcattaagtg

SEQ ID NO: 129169 - DNA, 21 bp, Artificial sequence
  SiRNA target sequence
ggtatctgaagcattaagtga

SEQ ID NO: 129170 - DNA, 21 bp, Artificial sequence
  SiRNA target sequence
gtatctgaagcattaagtgaa

SEQ ID NO: 129171 - DNA, 21 bp, Artificial sequence
  SiRNA target sequence
tatctgaagcattaagtgaac

SEQ ID NO: 129172 - DNA, 21 bp, Artificial sequence
  SiRNA target sequence
atctgaagcattaagtgaacg

SEQ ID NO: 129173 - DNA, 21 bp, Artificial sequence
  SiRNA target sequence
tctgaagcattaagtgaacga

SEQ ID NO: 129174 - DNA, 21 bp, Artificial sequence
  SiRNA target sequence
ctgaagcattaagtgaacgaa

SEQ ID NO: 129175 - DNA, 21 bp, Artificial sequence
  SiRNA target sequence
tgaagcattaagtgaacgaaa

SEQ ID NO: 129176 - DNA, 21 bp, Artificial sequence
  SiRNA target sequence
gaagcattaagtgaacgaaaa

SEQ ID NO: 129177 - DNA, 21 bp, Artificial sequence
  SiRNA target sequence
aagcattaagtgaacgaaaaa

SEQ ID NO: 129178 - DNA, 21 bp, Artificial sequence
  SiRNA target sequence
agcattaagtgaacgaaaaat

SEQ ID NO: 129179 - DNA, 21 bp, Artificial sequence
  SiRNA target sequence
gcattaagtgaacgaaaaatt

SEQ ID NO: 129180 - DNA, 21 bp, Artificial sequence
  SiRNA target sequence
cattaagtgaacgaaaaattg

SEQ ID NO: 129181 - DNA, 21 bp, Artificial sequence
  SiRNA target sequence
attaagtgaacgaaaaattgt

SEQ ID NO: 129182 - DNA, 21 bp, Artificial sequence
  SiRNA target sequence
ttaagtgaacgaaaaattgtt

SEQ ID NO: 129183 - DNA, 21 bp, Artificial sequence
  SiRNA target sequence
taagtgaacgaaaaattgtta

SEQ ID NO: 129184 - DNA, 21 bp, Artificial sequence
  SiRNA target sequence
aagtgaacgaaaaattgttat

SEQ ID NO: 129185 - DNA, 21 bp, Artificial sequence
  SiRNA target sequence
agtgaacgaaaaattgttatg

SEQ ID NO: 129186 - DNA, 21 bp, Artificial sequence
  SiRNA target sequence
gtgaacgaaaaattgttatga

SEQ ID NO: 129187 - DNA, 21 bp, Artificial sequence
  SiRNA target sequence
tgaacgaaaaattgttatgaa

SEQ ID NO: 129188 - DNA, 21 bp, Artificial sequence
  SiRNA target sequence
gaacgaaaaattgttatgaat

SEQ ID NO: 129189 - DNA, 21 bp, Artificial sequence
  SiRNA target sequence
aacgaaaaattgttatgaata

SEQ ID NO: 129190 - DNA, 21 bp, Artificial sequence
  SiRNA target sequence
acgaaaaattgttatgaatat

SEQ ID NO: 129191 - DNA, 21 bp, Artificial sequence
  SiRNA target sequence
cgaaaaattgttatgaatatg

SEQ ID NO: 129192 - DNA, 21 bp, Artificial sequence
  SiRNA target sequence
gaaaaattgttatgaatatgt

SEQ ID NO: 129193 - DNA, 21 bp, Artificial sequence
  SiRNA target sequence
aaaaattgttatgaatatgtg

SEQ ID NO: 129194 - DNA, 21 bp, Artificial sequence
  SiRNA target sequence
aaaattgttatgaatatgtgt

SEQ ID NO: 129195 - DNA, 21 bp, Artificial sequence
  SiRNA target sequence
aaattgttatgaatatgtgtc

SEQ ID NO: 129196 - DNA, 21 bp, Artificial sequence
  SiRNA target sequence
aattgttatgaatatgtgtcc

SEQ ID NO: 129197 - DNA, 21 bp, Artificial sequence
  SiRNA target sequence
attgttatgaatatgtgtcct

SEQ ID NO: 129198 - DNA, 21 bp, Artificial sequence
  SiRNA target sequence
ttgttatgaatatgtgtcctt

SEQ ID NO: 129199 - DNA, 21 bp, Artificial sequence
  SiRNA target sequence
tgttatgaatatgtgtccttt

SEQ ID NO: 129200 - DNA, 21 bp, Artificial sequence
  SiRNA target sequence
gttatgaatatgtgtcctttt

SEQ ID NO: 129201 - DNA, 21 bp, Artificial sequence
  SiRNA target sequence
ttatgaatatgtgtccttttc

SEQ ID NO: 129202 - DNA, 21 bp, Artificial sequence
  SiRNA target sequence
tatgaatatgtgtccttttct

SEQ ID NO: 129203 - DNA, 21 bp, Artificial sequence
  SiRNA target sequence
atgaatatgtgtccttttcta

SEQ ID NO: 129204 - DNA, 21 bp, Artificial sequence
  SiRNA target sequence
tgaatatgtgtccttttctag

SEQ ID NO: 129205 - DNA, 21 bp, Artificial sequence
  SiRNA target sequence
gaatatgtgtccttttctagt

SEQ ID NO: 129206 - DNA, 21 bp, Artificial sequence
  SiRNA target sequence
aatatgtgtccttttctagta

SEQ ID NO: 129207 - DNA, 21 bp, Artificial sequence
  SiRNA target sequence
atatgtgtccttttctagtaa

SEQ ID NO: 129208 - DNA, 21 bp, Artificial sequence
  SiRNA target sequence
tatgtgtccttttctagtaag

SEQ ID NO: 129209 - DNA, 21 bp, Artificial sequence
  SiRNA target sequence
atgtgtccttttctagtaagg

SEQ ID NO: 129210 - DNA, 21 bp, Artificial sequence
  SiRNA target sequence
tgtgtccttttctagtaaggt

SEQ ID NO: 129211 - DNA, 21 bp, Artificial sequence
  SiRNA target sequence
gtgtccttttctagtaaggtc

SEQ ID NO: 129212 - DNA, 21 bp, Artificial sequence
  SiRNA target sequence
tgtccttttctagtaaggtcg

SEQ ID NO: 129213 - DNA, 21 bp, Artificial sequence
  SiRNA target sequence
gtccttttctagtaaggtcga

SEQ ID NO: 129214 - DNA, 21 bp, Artificial sequence
  SiRNA target sequence
tccttttctagtaaggtcgat

SEQ ID NO: 129215 - DNA, 21 bp, Artificial sequence
  SiRNA target sequence
ccttttctagtaaggtcgatg

SEQ ID NO: 129216 - DNA, 21 bp, Artificial sequence
  SiRNA target sequence
cttttctagtaaggtcgatgg

SEQ ID NO: 129217 - DNA, 21 bp, Artificial sequence
  SiRNA target sequence
ttttctagtaaggtcgatgga

SEQ ID NO: 129218 - DNA, 21 bp, Artificial sequence
  SiRNA target sequence
tttctagtaaggtcgatggaa

SEQ ID NO: 129219 - DNA, 21 bp, Artificial sequence
  SiRNA target sequence
ttctagtaaggtcgatggaaa

SEQ ID NO: 129220 - DNA, 21 bp, Artificial sequence
  SiRNA target sequence
tctagtaaggtcgatggaaat

SEQ ID NO: 129221 - DNA, 21 bp, Artificial sequence
  SiRNA target sequence
ctagtaaggtcgatggaaata

SEQ ID NO: 129222 - DNA, 21 bp, Artificial sequence
  SiRNA target sequence
tagtaaggtcgatggaaatat

SEQ ID NO: 129223 - DNA, 21 bp, Artificial sequence
  SiRNA target sequence
agtaaggtcgatggaaatatt

SEQ ID NO: 129224 - DNA, 21 bp, Artificial sequence
  SiRNA target sequence
gtaaggtcgatggaaatatta

SEQ ID NO: 129225 - DNA, 21 bp, Artificial sequence
  SiRNA target sequence
taaggtcgatggaaatattat

SEQ ID NO: 129226 - DNA, 21 bp, Artificial sequence
  SiRNA target sequence
aaggtcgatggaaatattatt

SEQ ID NO: 129227 - DNA, 21 bp, Artificial sequence
  SiRNA target sequence
aggtcgatggaaatattattt

SEQ ID NO: 129228 - DNA, 21 bp, Artificial sequence
  SiRNA target sequence
ggtcgatggaaatattatttc

SEQ ID NO: 129229 - DNA, 21 bp, Artificial sequence
  SiRNA target sequence
gtcgatggaaatattatttcc

SEQ ID NO: 129230 - DNA, 21 bp, Artificial sequence
  SiRNA target sequence
tcgatggaaatattatttccg

SEQ ID NO: 129231 - DNA, 21 bp, Artificial sequence
  SiRNA target sequence
cgatggaaatattatttccgg

SEQ ID NO: 129232 - DNA, 21 bp, Artificial sequence
  SiRNA target sequence
gatggaaatattatttccggt

SEQ ID NO: 129233 - DNA, 21 bp, Artificial sequence
  SiRNA target sequence
atggaaatattatttccggtt

SEQ ID NO: 129234 - DNA, 21 bp, Artificial sequence
  SiRNA target sequence
tggaaatattatttccggttt

SEQ ID NO: 129235 - DNA, 21 bp, Artificial sequence
  SiRNA target sequence
ggaaatattatttccggttta

SEQ ID NO: 129236 - DNA, 21 bp, Artificial sequence
  SiRNA target sequence
gaaatattatttccggtttat

SEQ ID NO: 129237 - DNA, 21 bp, Artificial sequence
  SiRNA target sequence
aaatattatttccggtttata

SEQ ID NO: 129238 - DNA, 21 bp, Artificial sequence
  SiRNA target sequence
aatattatttccggtttataa

SEQ ID NO: 129239 - DNA, 21 bp, Artificial sequence
  SiRNA target sequence
atattatttccggtttataaa

SEQ ID NO: 129240 - DNA, 21 bp, Artificial sequence
  SiRNA target sequence
tattatttccggtttataaaa

SEQ ID NO: 129241 - DNA, 21 bp, Artificial sequence
  SiRNA target sequence
attatttccggtttataaaag

SEQ ID NO: 129242 - DNA, 21 bp, Artificial sequence
  SiRNA target sequence
ttatttccggtttataaaagg

SEQ ID NO: 129243 - DNA, 21 bp, Artificial sequence
  SiRNA target sequence
tatttccggtttataaaaggc

SEQ ID NO: 129244 - DNA, 21 bp, Artificial sequence
  SiRNA target sequence
atttccggtttataaaaggct

SEQ ID NO: 129245 - DNA, 21 bp, Artificial sequence
  SiRNA target sequence
tttccggtttataaaaggctt

SEQ ID NO: 129246 - DNA, 21 bp, Artificial sequence
  SiRNA target sequence
ttccggtttataaaaggcttt

SEQ ID NO: 129247 - DNA, 21 bp, Artificial sequence
  SiRNA target sequence
tccggtttataaaaggctttt

SEQ ID NO: 129248 - DNA, 21 bp, Artificial sequence
  SiRNA target sequence
ccggtttataaaaggctttta

SEQ ID NO: 129249 - DNA, 21 bp, Artificial sequence
  SiRNA target sequence
cggtttataaaaggcttttaa

SEQ ID NO: 129250 - DNA, 21 bp, Artificial sequence
  SiRNA target sequence
ggtttataaaaggcttttaat

SEQ ID NO: 129251 - DNA, 21 bp, Artificial sequence
  SiRNA target sequence
gtttataaaaggcttttaatt

SEQ ID NO: 129252 - DNA, 21 bp, Artificial sequence
  SiRNA target sequence
tttataaaaggcttttaattc

SEQ ID NO: 129253 - DNA, 21 bp, Artificial sequence
  SiRNA target sequence
ttataaaaggcttttaattcc

SEQ ID NO: 129254 - DNA, 21 bp, Artificial sequence
  SiRNA target sequence
tataaaaggcttttaattcct

SEQ ID NO: 129255 - DNA, 21 bp, Artificial sequence
  SiRNA target sequence
ataaaaggcttttaattcctt

SEQ ID NO: 129256 - DNA, 21 bp, Artificial sequence
  SiRNA target sequence
taaaaggcttttaattcctta

SEQ ID NO: 129257 - DNA, 21 bp, Artificial sequence
  SiRNA target sequence
aaaaggcttttaattccttac

SEQ ID NO: 129258 - DNA, 21 bp, Artificial sequence
  SiRNA target sequence
aaaggcttttaattccttact

SEQ ID NO: 129259 - DNA, 21 bp, Artificial sequence
  SiRNA target sequence
aaggcttttaattccttacta

SEQ ID NO: 129260 - DNA, 21 bp, Artificial sequence
  SiRNA target sequence
aggcttttaattccttactac

SEQ ID NO: 129261 - DNA, 21 bp, Artificial sequence
  SiRNA target sequence
ggcttttaattccttactact

SEQ ID NO: 129262 - DNA, 21 bp, Artificial sequence
  SiRNA target sequence
gcttttaattccttactacta

SEQ ID NO: 129263 - DNA, 21 bp, Artificial sequence
  SiRNA target sequence
cttttaattccttactactat

SEQ ID NO: 129264 - DNA, 21 bp, Artificial sequence
  SiRNA target sequence
ttttaattccttactactata

SEQ ID NO: 129265 - DNA, 21 bp, Artificial sequence
  SiRNA target sequence
tttaattccttactactatat

SEQ ID NO: 129266 - DNA, 21 bp, Artificial sequence
  SiRNA target sequence
ttaattccttactactatatt

SEQ ID NO: 129267 - DNA, 21 bp, Artificial sequence
  SiRNA target sequence
taattccttactactatattg

SEQ ID NO: 129268 - DNA, 21 bp, Artificial sequence
  SiRNA target sequence
aattccttactactatattgg

SEQ ID NO: 129269 - DNA, 21 bp, Artificial sequence
  SiRNA target sequence
attccttactactatattggc

SEQ ID NO: 129270 - DNA, 21 bp, Artificial sequence
  SiRNA target sequence
ttccttactactatattggcc

SEQ ID NO: 129271 - DNA, 21 bp, Artificial sequence
  SiRNA target sequence
tccttactactatattggcct

SEQ ID NO: 129272 - DNA, 21 bp, Artificial sequence
  SiRNA target sequence
ccttactactatattggcctt

SEQ ID NO: 129273 - DNA, 21 bp, Artificial sequence
  SiRNA target sequence
cttactactatattggcctta

SEQ ID NO: 129274 - DNA, 21 bp, Artificial sequence
  SiRNA target sequence
ttactactatattggccttaa

SEQ ID NO: 129275 - DNA, 21 bp, Artificial sequence
  SiRNA target sequence
tactactatattggccttaaa

SEQ ID NO: 129276 - DNA, 21 bp, Artificial sequence
  SiRNA target sequence
actactatattggccttaaat

SEQ ID NO: 129277 - DNA, 21 bp, Artificial sequence
  SiRNA target sequence
ctactatattggccttaaatt

SEQ ID NO: 129278 - DNA, 21 bp, Artificial sequence
  SiRNA target sequence
tactatattggccttaaattt

SEQ ID NO: 129279 - DNA, 21 bp, Artificial sequence
  SiRNA target sequence
actatattggccttaaatttt

SEQ ID NO: 129280 - DNA, 21 bp, Artificial sequence
  SiRNA target sequence
ctatattggccttaaatttta

SEQ ID NO: 129281 - DNA, 21 bp, Artificial sequence
  SiRNA target sequence
tatattggccttaaattttat

SEQ ID NO: 129282 - DNA, 21 bp, Artificial sequence
  SiRNA target sequence
atattggccttaaattttatg

SEQ ID NO: 129283 - DNA, 21 bp, Artificial sequence
  SiRNA target sequence
tattggccttaaattttatga

SEQ ID NO: 129284 - DNA, 21 bp, Artificial sequence
  SiRNA target sequence
attggccttaaattttatgat

SEQ ID NO: 129285 - DNA, 21 bp, Artificial sequence
  SiRNA target sequence
ttggccttaaattttatgatt

SEQ ID NO: 129286 - DNA, 21 bp, Artificial sequence
  SiRNA target sequence
tggccttaaattttatgattg

SEQ ID NO: 129287 - DNA, 21 bp, Artificial sequence
  SiRNA target sequence
ggccttaaattttatgattgg

SEQ ID NO: 129288 - DNA, 21 bp, Artificial sequence
  SiRNA target sequence
gccttaaattttatgattgga

SEQ ID NO: 129289 - DNA, 21 bp, Artificial sequence
  SiRNA target sequence
ccttaaattttatgattggat

SEQ ID NO: 129290 - DNA, 21 bp, Artificial sequence
  SiRNA target sequence
cttaaattttatgattggatt

SEQ ID NO: 129291 - DNA, 21 bp, Artificial sequence
  SiRNA target sequence
ttaaattttatgattggattt

SEQ ID NO: 129292 - DNA, 21 bp, Artificial sequence
  SiRNA target sequence
taaattttatgattggatttc

SEQ ID NO: 129293 - DNA, 21 bp, Artificial sequence
  SiRNA target sequence
aaattttatgattggatttct

SEQ ID NO: 129294 - DNA, 21 bp, Artificial sequence
  SiRNA target sequence
aattttatgattggatttctg

SEQ ID NO: 129295 - DNA, 21 bp, Artificial sequence
  SiRNA target sequence
attttatgattggatttctgg

SEQ ID NO: 129296 - DNA, 21 bp, Artificial sequence
  SiRNA target sequence
ttttatgattggatttctggg

SEQ ID NO: 129297 - DNA, 21 bp, Artificial sequence
  SiRNA target sequence
tttatgattggatttctgggc

SEQ ID NO: 129298 - DNA, 21 bp, Artificial sequence
  SiRNA target sequence
ttatgattggatttctgggca

SEQ ID NO: 129299 - DNA, 21 bp, Artificial sequence
  SiRNA target sequence
tatgattggatttctgggcaa

SEQ ID NO: 129300 - DNA, 21 bp, Artificial sequence
  SiRNA target sequence
atgattggatttctgggcaac

SEQ ID NO: 129301 - DNA, 21 bp, Artificial sequence
  SiRNA target sequence
tgattggatttctgggcaacg

SEQ ID NO: 129302 - DNA, 21 bp, Artificial sequence
  SiRNA target sequence
gattggatttctgggcaacgg

SEQ ID NO: 129303 - DNA, 21 bp, Artificial sequence
  SiRNA target sequence
attggatttctgggcaacggt

SEQ ID NO: 129304 - DNA, 21 bp, Artificial sequence
  SiRNA target sequence
ttggatttctgggcaacggtc

SEQ ID NO: 129305 - DNA, 21 bp, Artificial sequence
  SiRNA target sequence
tggatttctgggcaacggtcc

SEQ ID NO: 129306 - DNA, 21 bp, Artificial sequence
  SiRNA target sequence
ggatttctgggcaacggtccc

SEQ ID NO: 129307 - DNA, 21 bp, Artificial sequence
  SiRNA target sequence
gatttctgggcaacggtccct

SEQ ID NO: 129308 - DNA, 21 bp, Artificial sequence
  SiRNA target sequence
atttctgggcaacggtccctt

SEQ ID NO: 129309 - DNA, 21 bp, Artificial sequence
  SiRNA target sequence
tttctgggcaacggtcccttg

SEQ ID NO: 129310 - DNA, 21 bp, Artificial sequence
  SiRNA target sequence
ttctgggcaacggtcccttgg

SEQ ID NO: 129311 - DNA, 21 bp, Artificial sequence
  SiRNA target sequence
tctgggcaacggtcccttggg

SEQ ID NO: 129312 - DNA, 21 bp, Artificial sequence
  SiRNA target sequence
ctgggcaacggtcccttgggc

SEQ ID NO: 129313 - DNA, 21 bp, Artificial sequence
  SiRNA target sequence
tgggcaacggtcccttgggcg

SEQ ID NO: 129314 - DNA, 21 bp, Artificial sequence
  SiRNA target sequence
gggcaacggtcccttgggcga

SEQ ID NO: 129315 - DNA, 21 bp, Artificial sequence
  SiRNA target sequence
ggcaacggtcccttgggcgaa

SEQ ID NO: 129316 - DNA, 21 bp, Artificial sequence
  SiRNA target sequence
gcaacggtcccttgggcgaag

SEQ ID NO: 129317 - DNA, 21 bp, Artificial sequence
  SiRNA target sequence
caacggtcccttgggcgaagt

SEQ ID NO: 129318 - DNA, 21 bp, Artificial sequence
  SiRNA target sequence
aacggtcccttgggcgaagta

SEQ ID NO: 129319 - DNA, 21 bp, Artificial sequence
  SiRNA target sequence
acggtcccttgggcgaagtaa

SEQ ID NO: 129320 - DNA, 21 bp, Artificial sequence
  SiRNA target sequence
cggtcccttgggcgaagtaaa

SEQ ID NO: 129321 - DNA, 21 bp, Artificial sequence
  SiRNA target sequence
ggtcccttgggcgaagtaaat

SEQ ID NO: 129322 - DNA, 21 bp, Artificial sequence
  SiRNA target sequence
gtcccttgggcgaagtaaatt

SEQ ID NO: 129323 - DNA, 21 bp, Artificial sequence
  SiRNA target sequence
tcccttgggcgaagtaaattt

SEQ ID NO: 129324 - DNA, 21 bp, Artificial sequence
  SiRNA target sequence
cccttgggcgaagtaaatttt

SEQ ID NO: 129325 - DNA, 21 bp, Artificial sequence
  SiRNA target sequence
ccttgggcgaagtaaattttt

SEQ ID NO: 129326 - DNA, 21 bp, Artificial sequence
  SiRNA target sequence
cttgggcgaagtaaatttttg

SEQ ID NO: 129327 - DNA, 21 bp, Artificial sequence
  SiRNA target sequence
ttgggcgaagtaaatttttgt

SEQ ID NO: 129328 - DNA, 21 bp, Artificial sequence
  SiRNA target sequence
tgggcgaagtaaatttttgtc

SEQ ID NO: 129329 - DNA, 21 bp, Artificial sequence
  SiRNA target sequence
gggcgaagtaaatttttgtcg

SEQ ID NO: 129330 - DNA, 21 bp, Artificial sequence
  SiRNA target sequence
ggcgaagtaaatttttgtcgc

SEQ ID NO: 129331 - DNA, 21 bp, Artificial sequence
  SiRNA target sequence
gcgaagtaaatttttgtcgcg

SEQ ID NO: 129332 - DNA, 21 bp, Artificial sequence
  SiRNA target sequence
cgaagtaaatttttgtcgcgg

SEQ ID NO: 129333 - DNA, 21 bp, Artificial sequence
  SiRNA target sequence
gaagtaaatttttgtcgcggc

SEQ ID NO: 129334 - DNA, 21 bp, Artificial sequence
  SiRNA target sequence
aagtaaatttttgtcgcggca

SEQ ID NO: 129335 - DNA, 21 bp, Artificial sequence
  SiRNA target sequence
agtaaatttttgtcgcggcaa

SEQ ID NO: 129336 - DNA, 21 bp, Artificial sequence
  SiRNA target sequence
gtaaatttttgtcgcggcaac

SEQ ID NO: 129337 - DNA, 21 bp, Artificial sequence
  SiRNA target sequence
taaatttttgtcgcggcaaca

SEQ ID NO: 129338 - DNA, 21 bp, Artificial sequence
  SiRNA target sequence
aaatttttgtcgcggcaacaa

SEQ ID NO: 129339 - DNA, 21 bp, Artificial sequence
  SiRNA target sequence
aatttttgtcgcggcaacaaa

SEQ ID NO: 129340 - DNA, 21 bp, Artificial sequence
  SiRNA target sequence
atttttgtcgcggcaacaaac

SEQ ID NO: 129341 - DNA, 21 bp, Artificial sequence
  SiRNA target sequence
tttttgtcgcggcaacaaact

SEQ ID NO: 129342 - DNA, 21 bp, Artificial sequence
  SiRNA target sequence
ttttgtcgcggcaacaaacta

SEQ ID NO: 129343 - DNA, 21 bp, Artificial sequence
  SiRNA target sequence
tttgtcgcggcaacaaactat

SEQ ID NO: 129344 - DNA, 21 bp, Artificial sequence
  SiRNA target sequence
ttgtcgcggcaacaaactatt

SEQ ID NO: 129345 - DNA, 21 bp, Artificial sequence
  SiRNA target sequence
tgtcgcggcaacaaactatta

SEQ ID NO: 129346 - DNA, 21 bp, Artificial sequence
  SiRNA target sequence
gtcgcggcaacaaactattac

SEQ ID NO: 129347 - DNA, 21 bp, Artificial sequence
  SiRNA target sequence
tcgcggcaacaaactattaca

SEQ ID NO: 129348 - DNA, 21 bp, Artificial sequence
  SiRNA target sequence
cgcggcaacaaactattacaa

SEQ ID NO: 129349 - DNA, 21 bp, Artificial sequence
  SiRNA target sequence
gcggcaacaaactattacaaa

SEQ ID NO: 129350 - DNA, 21 bp, Artificial sequence
  SiRNA target sequence
cggcaacaaactattacaaaa

SEQ ID NO: 129351 - DNA, 21 bp, Artificial sequence
  SiRNA target sequence
ggcaacaaactattacaaaat

SEQ ID NO: 129352 - DNA, 21 bp, Artificial sequence
  SiRNA target sequence
gcaacaaactattacaaaatt

SEQ ID NO: 129353 - DNA, 21 bp, Artificial sequence
  SiRNA target sequence
caacaaactattacaaaattt

SEQ ID NO: 129354 - DNA, 21 bp, Artificial sequence
  SiRNA target sequence
aacaaactattacaaaatttc

SEQ ID NO: 129355 - DNA, 21 bp, Artificial sequence
  SiRNA target sequence
acaaactattacaaaatttcc

SEQ ID NO: 129356 - DNA, 21 bp, Artificial sequence
  SiRNA target sequence
caaactattacaaaatttcct

SEQ ID NO: 129357 - DNA, 21 bp, Artificial sequence
  SiRNA target sequence
aaactattacaaaatttccta

SEQ ID NO: 129358 - DNA, 21 bp, Artificial sequence
  SiRNA target sequence
aactattacaaaatttcctaa

SEQ ID NO: 129359 - DNA, 21 bp, Artificial sequence
  SiRNA target sequence
actattacaaaatttcctaat

SEQ ID NO: 129360 - DNA, 21 bp, Artificial sequence
  SiRNA target sequence
ctattacaaaatttcctaatg

SEQ ID NO: 129361 - DNA, 21 bp, Artificial sequence
  SiRNA target sequence
tattacaaaatttcctaatgt

SEQ ID NO: 129362 - DNA, 21 bp, Artificial sequence
  SiRNA target sequence
attacaaaatttcctaatgtg

SEQ ID NO: 129363 - DNA, 21 bp, Artificial sequence
  SiRNA target sequence
ttacaaaatttcctaatgtga

SEQ ID NO: 129364 - DNA, 21 bp, Artificial sequence
  SiRNA target sequence
tacaaaatttcctaatgtgag

SEQ ID NO: 129365 - DNA, 21 bp, Artificial sequence
  SiRNA target sequence
acaaaatttcctaatgtgaga

SEQ ID NO: 129366 - DNA, 21 bp, Artificial sequence
  SiRNA target sequence
caaaatttcctaatgtgagaa

SEQ ID NO: 129367 - DNA, 21 bp, Artificial sequence
  SiRNA target sequence
aaaatttcctaatgtgagaaa

SEQ ID NO: 129368 - DNA, 21 bp, Artificial sequence
  SiRNA target sequence
aaatttcctaatgtgagaaaa

SEQ ID NO: 129369 - DNA, 21 bp, Artificial sequence
  SiRNA target sequence
aatttcctaatgtgagaaaaa

SEQ ID NO: 129370 - DNA, 21 bp, Artificial sequence
  SiRNA target sequence
atttcctaatgtgagaaaaat

SEQ ID NO: 129371 - DNA, 21 bp, Artificial sequence
  SiRNA target sequence
tttcctaatgtgagaaaaatc

SEQ ID NO: 129372 - DNA, 21 bp, Artificial sequence
  SiRNA target sequence
ttcctaatgtgagaaaaatcg

SEQ ID NO: 129373 - DNA, 21 bp, Artificial sequence
  SiRNA target sequence
tcctaatgtgagaaaaatcga

SEQ ID NO: 129374 - DNA, 21 bp, Artificial sequence
  SiRNA target sequence
cctaatgtgagaaaaatcgac

SEQ ID NO: 129375 - DNA, 21 bp, Artificial sequence
  SiRNA target sequence
ctaatgtgagaaaaatcgacc

SEQ ID NO: 129376 - DNA, 21 bp, Artificial sequence
  SiRNA target sequence
taatgtgagaaaaatcgacct

SEQ ID NO: 129377 - DNA, 21 bp, Artificial sequence
  SiRNA target sequence
aatgtgagaaaaatcgacctt

SEQ ID NO: 129378 - DNA, 21 bp, Artificial sequence
  SiRNA target sequence
atgtgagaaaaatcgaccttg

SEQ ID NO: 129379 - DNA, 21 bp, Artificial sequence
  SiRNA target sequence
tgtgagaaaaatcgaccttgt

SEQ ID NO: 129380 - DNA, 21 bp, Artificial sequence
  SiRNA target sequence
gtgagaaaaatcgaccttgta

SEQ ID NO: 129381 - DNA, 21 bp, Artificial sequence
  SiRNA target sequence
tgagaaaaatcgaccttgtag

SEQ ID NO: 129382 - DNA, 21 bp, Artificial sequence
  SiRNA target sequence
gagaaaaatcgaccttgtagg

SEQ ID NO: 129383 - DNA, 21 bp, Artificial sequence
  SiRNA target sequence
agaaaaatcgaccttgtagga

SEQ ID NO: 129384 - DNA, 21 bp, Artificial sequence
  SiRNA target sequence
gaaaaatcgaccttgtaggat

SEQ ID NO: 129385 - DNA, 21 bp, Artificial sequence
  SiRNA target sequence
aaaaatcgaccttgtaggatc

SEQ ID NO: 129386 - DNA, 21 bp, Artificial sequence
  SiRNA target sequence
aaaatcgaccttgtaggatcc

SEQ ID NO: 129387 - DNA, 21 bp, Artificial sequence
  SiRNA target sequence
aaatcgaccttgtaggatccg

SEQ ID NO: 129388 - DNA, 21 bp, Artificial sequence
  SiRNA target sequence
aatcgaccttgtaggatccgt

SEQ ID NO: 129389 - DNA, 21 bp, Artificial sequence
  SiRNA target sequence
atcgaccttgtaggatccgtt

SEQ ID NO: 129390 - DNA, 21 bp, Artificial sequence
  SiRNA target sequence
tcgaccttgtaggatccgttt

SEQ ID NO: 129391 - DNA, 21 bp, Artificial sequence
  SiRNA target sequence
cgaccttgtaggatccgtttc

SEQ ID NO: 129392 - DNA, 21 bp, Artificial sequence
  SiRNA target sequence
gaccttgtaggatccgtttcg

SEQ ID NO: 129393 - DNA, 21 bp, Artificial sequence
  SiRNA target sequence
accttgtaggatccgtttcgt

SEQ ID NO: 129394 - DNA, 21 bp, Artificial sequence
  SiRNA target sequence
ccttgtaggatccgtttcgta

SEQ ID NO: 129395 - DNA, 21 bp, Artificial sequence
  SiRNA target sequence
cttgtaggatccgtttcgtat

SEQ ID NO: 129396 - DNA, 21 bp, Artificial sequence
  SiRNA target sequence
ttgtaggatccgtttcgtatc

SEQ ID NO: 129397 - DNA, 21 bp, Artificial sequence
  SiRNA target sequence
tgtaggatccgtttcgtatcg

SEQ ID NO: 129398 - DNA, 21 bp, Artificial sequence
  SiRNA target sequence
gtaggatccgtttcgtatcgt

SEQ ID NO: 129399 - DNA, 21 bp, Artificial sequence
  SiRNA target sequence
taggatccgtttcgtatcgtg

SEQ ID NO: 129400 - DNA, 21 bp, Artificial sequence
  SiRNA target sequence
aggatccgtttcgtatcgtga

SEQ ID NO: 129401 - DNA, 21 bp, Artificial sequence
  SiRNA target sequence
ggatccgtttcgtatcgtgat

SEQ ID NO: 129402 - DNA, 21 bp, Artificial sequence
  SiRNA target sequence
gatccgtttcgtatcgtgatg

SEQ ID NO: 129403 - DNA, 21 bp, Artificial sequence
  SiRNA target sequence
atccgtttcgtatcgtgatgg

SEQ ID NO: 129404 - DNA, 21 bp, Artificial sequence
  SiRNA target sequence
tccgtttcgtatcgtgatggc

SEQ ID NO: 129405 - DNA, 21 bp, Artificial sequence
  SiRNA target sequence
ccgtttcgtatcgtgatggcc

SEQ ID NO: 129406 - DNA, 21 bp, Artificial sequence
  SiRNA target sequence
cgtttcgtatcgtgatggcca

SEQ ID NO: 129407 - DNA, 21 bp, Artificial sequence
  SiRNA target sequence
gtttcgtatcgtgatggccaa

SEQ ID NO: 129408 - DNA, 21 bp, Artificial sequence
  SiRNA target sequence
tttcgtatcgtgatggccaat

SEQ ID NO: 129409 - DNA, 21 bp, Artificial sequence
  SiRNA target sequence
ttcgtatcgtgatggccaatt

SEQ ID NO: 129410 - DNA, 21 bp, Artificial sequence
  SiRNA target sequence
tcgtatcgtgatggccaattt

SEQ ID NO: 129411 - DNA, 21 bp, Artificial sequence
  SiRNA target sequence
cgtatcgtgatggccaatttt

SEQ ID NO: 129412 - DNA, 21 bp, Artificial sequence
  SiRNA target sequence
gtatcgtgatggccaatttta

SEQ ID NO: 129413 - DNA, 21 bp, Artificial sequence
  SiRNA target sequence
tatcgtgatggccaattttat

SEQ ID NO: 129414 - DNA, 21 bp, Artificial sequence
  SiRNA target sequence
atcgtgatggccaattttatg

SEQ ID NO: 129415 - DNA, 21 bp, Artificial sequence
  SiRNA target sequence
tcgtgatggccaattttatga

SEQ ID NO: 129416 - DNA, 21 bp, Artificial sequence
  SiRNA target sequence
cgtgatggccaattttatgat

SEQ ID NO: 129417 - DNA, 21 bp, Artificial sequence
  SiRNA target sequence
gtgatggccaattttatgatg

SEQ ID NO: 129418 - DNA, 21 bp, Artificial sequence
  SiRNA target sequence
tgatggccaattttatgatgc

SEQ ID NO: 129419 - DNA, 21 bp, Artificial sequence
  SiRNA target sequence
gatggccaattttatgatgct

SEQ ID NO: 129420 - DNA, 21 bp, Artificial sequence
  SiRNA target sequence
atggccaattttatgatgcta

SEQ ID NO: 129421 - DNA, 21 bp, Artificial sequence
  SiRNA target sequence
tggccaattttatgatgctaa

SEQ ID NO: 129422 - DNA, 21 bp, Artificial sequence
  SiRNA target sequence
ggccaattttatgatgctaaa

SEQ ID NO: 129423 - DNA, 21 bp, Artificial sequence
  SiRNA target sequence
gccaattttatgatgctaaat

SEQ ID NO: 129424 - DNA, 21 bp, Artificial sequence
  SiRNA target sequence
ccaattttatgatgctaaata

SEQ ID NO: 129425 - DNA, 21 bp, Artificial sequence
  SiRNA target sequence
caattttatgatgctaaatac

SEQ ID NO: 129426 - DNA, 21 bp, Artificial sequence
  SiRNA target sequence
aattttatgatgctaaataca

SEQ ID NO: 129427 - DNA, 21 bp, Artificial sequence
  SiRNA target sequence
attttatgatgctaaatacaa

SEQ ID NO: 129428 - DNA, 21 bp, Artificial sequence
  SiRNA target sequence
ttttatgatgctaaatacaat

SEQ ID NO: 129429 - DNA, 21 bp, Artificial sequence
  SiRNA target sequence
tttatgatgctaaatacaatg

SEQ ID NO: 129430 - DNA, 21 bp, Artificial sequence
  SiRNA target sequence
ttatgatgctaaatacaatgt

SEQ ID NO: 129431 - DNA, 21 bp, Artificial sequence
  SiRNA target sequence
tatgatgctaaatacaatgtt

SEQ ID NO: 129432 - DNA, 21 bp, Artificial sequence
  SiRNA target sequence
atgatgctaaatacaatgttc

SEQ ID NO: 129433 - DNA, 21 bp, Artificial sequence
  SiRNA target sequence
tgatgctaaatacaatgttct

SEQ ID NO: 129434 - DNA, 21 bp, Artificial sequence
  SiRNA target sequence
gatgctaaatacaatgttcta

SEQ ID NO: 129435 - DNA, 21 bp, Artificial sequence
  SiRNA target sequence
atgctaaatacaatgttctat

SEQ ID NO: 129436 - DNA, 21 bp, Artificial sequence
  SiRNA target sequence
tgctaaatacaatgttctatt

SEQ ID NO: 129437 - DNA, 21 bp, Artificial sequence
  SiRNA target sequence
gctaaatacaatgttctattg

SEQ ID NO: 129438 - DNA, 21 bp, Artificial sequence
  SiRNA target sequence
ctaaatacaatgttctattgg

SEQ ID NO: 129439 - DNA, 21 bp, Artificial sequence
  SiRNA target sequence
taaatacaatgttctattggg

SEQ ID NO: 129440 - DNA, 21 bp, Artificial sequence
  SiRNA target sequence
aaatacaatgttctattgggt

SEQ ID NO: 129441 - DNA, 21 bp, Artificial sequence
  SiRNA target sequence
aatacaatgttctattgggtg

SEQ ID NO: 129442 - DNA, 21 bp, Artificial sequence
  SiRNA target sequence
atacaatgttctattgggtgt

SEQ ID NO: 129443 - DNA, 21 bp, Artificial sequence
  SiRNA target sequence
tacaatgttctattgggtgtc

SEQ ID NO: 129444 - DNA, 21 bp, Artificial sequence
  SiRNA target sequence
acaatgttctattgggtgtca

SEQ ID NO: 129445 - DNA, 21 bp, Artificial sequence
  SiRNA target sequence
caatgttctattgggtgtcac

SEQ ID NO: 129446 - DNA, 21 bp, Artificial sequence
  SiRNA target sequence
aatgttctattgggtgtcaca

SEQ ID NO: 129447 - DNA, 21 bp, Artificial sequence
  SiRNA target sequence
atgttctattgggtgtcacag

SEQ ID NO: 129448 - DNA, 21 bp, Artificial sequence
  SiRNA target sequence
tgttctattgggtgtcacagc

SEQ ID NO: 129449 - DNA, 21 bp, Artificial sequence
  SiRNA target sequence
gttctattgggtgtcacagct

SEQ ID NO: 129450 - DNA, 21 bp, Artificial sequence
  SiRNA target sequence
ttctattgggtgtcacagcta

SEQ ID NO: 129451 - DNA, 21 bp, Artificial sequence
  SiRNA target sequence
tctattgggtgtcacagctac

SEQ ID NO: 129452 - DNA, 21 bp, Artificial sequence
  SiRNA target sequence
ctattgggtgtcacagctacc

SEQ ID NO: 129453 - DNA, 21 bp, Artificial sequence
  SiRNA target sequence
tattgggtgtcacagctacct

SEQ ID NO: 129454 - DNA, 21 bp, Artificial sequence
  SiRNA target sequence
attgggtgtcacagctaccta

SEQ ID NO: 129455 - DNA, 21 bp, Artificial sequence
  SiRNA target sequence
ttgggtgtcacagctacctac

SEQ ID NO: 129456 - DNA, 21 bp, Artificial sequence
  SiRNA target sequence
tgggtgtcacagctacctact

SEQ ID NO: 129457 - DNA, 21 bp, Artificial sequence
  SiRNA target sequence
gggtgtcacagctacctacta

SEQ ID NO: 129458 - DNA, 21 bp, Artificial sequence
  SiRNA target sequence
ggtgtcacagctacctactat

SEQ ID NO: 129459 - DNA, 21 bp, Artificial sequence
  SiRNA target sequence
gtgtcacagctacctactatg

SEQ ID NO: 129460 - DNA, 21 bp, Artificial sequence
  SiRNA target sequence
tgtcacagctacctactatgg

SEQ ID NO: 129461 - DNA, 21 bp, Artificial sequence
  SiRNA target sequence
gtcacagctacctactatgga

SEQ ID NO: 129462 - DNA, 21 bp, Artificial sequence
  SiRNA target sequence
tcacagctacctactatggag

SEQ ID NO: 129463 - DNA, 21 bp, Artificial sequence
  SiRNA target sequence
cacagctacctactatggagc

SEQ ID NO: 129464 - DNA, 21 bp, Artificial sequence
  SiRNA target sequence
acagctacctactatggagct

SEQ ID NO: 129465 - DNA, 21 bp, Artificial sequence
  SiRNA target sequence
cagctacctactatggagctg

SEQ ID NO: 129466 - DNA, 21 bp, Artificial sequence
  SiRNA target sequence
agctacctactatggagctgt

SEQ ID NO: 129467 - DNA, 21 bp, Artificial sequence
  SiRNA target sequence
gctacctactatggagctgtt

SEQ ID NO: 129468 - DNA, 21 bp, Artificial sequence
  SiRNA target sequence
ctacctactatggagctgttg

SEQ ID NO: 129469 - DNA, 21 bp, Artificial sequence
  SiRNA target sequence
tacctactatggagctgttgt

SEQ ID NO: 129470 - DNA, 21 bp, Artificial sequence
  SiRNA target sequence
acctactatggagctgttgta

SEQ ID NO: 129471 - DNA, 21 bp, Artificial sequence
  SiRNA target sequence
cctactatggagctgttgtat

SEQ ID NO: 129472 - DNA, 21 bp, Artificial sequence
  SiRNA target sequence
ctactatggagctgttgtatt

SEQ ID NO: 129473 - DNA, 21 bp, Artificial sequence
  SiRNA target sequence
tactatggagctgttgtatta

SEQ ID NO: 129474 - DNA, 21 bp, Artificial sequence
  SiRNA target sequence
actatggagctgttgtattaa

SEQ ID NO: 129475 - DNA, 21 bp, Artificial sequence
  SiRNA target sequence
ctatggagctgttgtattaaa

SEQ ID NO: 129476 - DNA, 21 bp, Artificial sequence
  SiRNA target sequence
tatggagctgttgtattaaat

SEQ ID NO: 129477 - DNA, 21 bp, Artificial sequence
  SiRNA target sequence
atggagctgttgtattaaatc

SEQ ID NO: 129478 - DNA, 21 bp, Artificial sequence
  SiRNA target sequence
tggagctgttgtattaaatca

SEQ ID NO: 129479 - DNA, 21 bp, Artificial sequence
  SiRNA target sequence
ggagctgttgtattaaatcat

SEQ ID NO: 129480 - DNA, 21 bp, Artificial sequence
  SiRNA target sequence
gagctgttgtattaaatcatg

SEQ ID NO: 129481 - DNA, 21 bp, Artificial sequence
  SiRNA target sequence
agctgttgtattaaatcatgc

SEQ ID NO: 129482 - DNA, 21 bp, Artificial sequence
  SiRNA target sequence
gctgttgtattaaatcatgca

SEQ ID NO: 129483 - DNA, 21 bp, Artificial sequence
  SiRNA target sequence
ctgttgtattaaatcatgcaa

SEQ ID NO: 129484 - DNA, 21 bp, Artificial sequence
  SiRNA target sequence
tgttgtattaaatcatgcaaa

SEQ ID NO: 129485 - DNA, 21 bp, Artificial sequence
  SiRNA target sequence
gttgtattaaatcatgcaaaa

SEQ ID NO: 129486 - DNA, 21 bp, Artificial sequence
  SiRNA target sequence
ttgtattaaatcatgcaaaat

SEQ ID NO: 129487 - DNA, 21 bp, Artificial sequence
  SiRNA target sequence
tgtattaaatcatgcaaaatt

SEQ ID NO: 129488 - DNA, 21 bp, Artificial sequence
  SiRNA target sequence
gtattaaatcatgcaaaattc

SEQ ID NO: 129489 - DNA, 21 bp, Artificial sequence
  SiRNA target sequence
tattaaatcatgcaaaattct

SEQ ID NO: 129490 - DNA, 21 bp, Artificial sequence
  SiRNA target sequence
attaaatcatgcaaaattctt

SEQ ID NO: 129491 - DNA, 21 bp, Artificial sequence
  SiRNA target sequence
ttaaatcatgcaaaattcttg

SEQ ID NO: 129492 - DNA, 21 bp, Artificial sequence
  SiRNA target sequence
taaatcatgcaaaattcttgt

SEQ ID NO: 129493 - DNA, 21 bp, Artificial sequence
  SiRNA target sequence
aaatcatgcaaaattcttgtc

SEQ ID NO: 129494 - DNA, 21 bp, Artificial sequence
  SiRNA target sequence
aatcatgcaaaattcttgtca

SEQ ID NO: 129495 - DNA, 21 bp, Artificial sequence
  SiRNA target sequence
atcatgcaaaattcttgtcag

SEQ ID NO: 129496 - DNA, 21 bp, Artificial sequence
  SiRNA target sequence
tcatgcaaaattcttgtcagt

SEQ ID NO: 129497 - DNA, 21 bp, Artificial sequence
  SiRNA target sequence
catgcaaaattcttgtcagta

SEQ ID NO: 129498 - DNA, 21 bp, Artificial sequence
  SiRNA target sequence
atgcaaaattcttgtcagtaa

SEQ ID NO: 129499 - DNA, 21 bp, Artificial sequence
  SiRNA target sequence
tgcaaaattcttgtcagtaac

SEQ ID NO: 129500 - DNA, 21 bp, Artificial sequence
  SiRNA target sequence
gcaaaattcttgtcagtaaca

SEQ ID NO: 129501 - DNA, 21 bp, Artificial sequence
  SiRNA target sequence
caaaattcttgtcagtaacaa

SEQ ID NO: 129502 - DNA, 21 bp, Artificial sequence
  SiRNA target sequence
aaaattcttgtcagtaacaaa

SEQ ID NO: 129503 - DNA, 21 bp, Artificial sequence
  SiRNA target sequence
aaattcttgtcagtaacaaaa

SEQ ID NO: 129504 - DNA, 21 bp, Artificial sequence
  SiRNA target sequence
aattcttgtcagtaacaaaag

SEQ ID NO: 129505 - DNA, 21 bp, Artificial sequence
  SiRNA target sequence
attcttgtcagtaacaaaaga

SEQ ID NO: 129506 - DNA, 21 bp, Artificial sequence
  SiRNA target sequence
ttcttgtcagtaacaaaagat

SEQ ID NO: 129507 - DNA, 21 bp, Artificial sequence
  SiRNA target sequence
tcttgtcagtaacaaaagatg

SEQ ID NO: 129508 - DNA, 21 bp, Artificial sequence
  SiRNA target sequence
cttgtcagtaacaaaagatgg

SEQ ID NO: 129509 - DNA, 21 bp, Artificial sequence
  SiRNA target sequence
ttgtcagtaacaaaagatggc

SEQ ID NO: 129510 - DNA, 21 bp, Artificial sequence
  SiRNA target sequence
tgtcagtaacaaaagatggcg

SEQ ID NO: 129511 - DNA, 21 bp, Artificial sequence
  SiRNA target sequence
gtcagtaacaaaagatggcga

SEQ ID NO: 129512 - DNA, 21 bp, Artificial sequence
  SiRNA target sequence
tcagtaacaaaagatggcgat

SEQ ID NO: 129513 - DNA, 21 bp, Artificial sequence
  SiRNA target sequence
cagtaacaaaagatggcgata

SEQ ID NO: 129514 - DNA, 21 bp, Artificial sequence
  SiRNA target sequence
agtaacaaaagatggcgataa

SEQ ID NO: 129515 - DNA, 21 bp, Artificial sequence
  SiRNA target sequence
gtaacaaaagatggcgataaa

SEQ ID NO: 129516 - DNA, 21 bp, Artificial sequence
  SiRNA target sequence
taacaaaagatggcgataaaa

SEQ ID NO: 129517 - DNA, 21 bp, Artificial sequence
  SiRNA target sequence
aacaaaagatggcgataaaat

SEQ ID NO: 129518 - DNA, 21 bp, Artificial sequence
  SiRNA target sequence
acaaaagatggcgataaaatt

SEQ ID NO: 129519 - DNA, 21 bp, Artificial sequence
  SiRNA target sequence
caaaagatggcgataaaatta

SEQ ID NO: 129520 - DNA, 21 bp, Artificial sequence
  SiRNA target sequence
aaaagatggcgataaaattaa

SEQ ID NO: 129521 - DNA, 21 bp, Artificial sequence
  SiRNA target sequence
aaagatggcgataaaattaat

SEQ ID NO: 129522 - DNA, 21 bp, Artificial sequence
  SiRNA target sequence
aagatggcgataaaattaatg

SEQ ID NO: 129523 - DNA, 21 bp, Artificial sequence
  SiRNA target sequence
agatggcgataaaattaatgg

SEQ ID NO: 129524 - DNA, 21 bp, Artificial sequence
  SiRNA target sequence
gatggcgataaaattaatgga

SEQ ID NO: 129525 - DNA, 21 bp, Artificial sequence
  SiRNA target sequence
atggcgataaaattaatggaa

SEQ ID NO: 129526 - DNA, 21 bp, Artificial sequence
  SiRNA target sequence
tggcgataaaattaatggaat

SEQ ID NO: 129527 - DNA, 21 bp, Artificial sequence
  SiRNA target sequence
ggcgataaaattaatggaatt

SEQ ID NO: 129528 - DNA, 21 bp, Artificial sequence
  SiRNA target sequence
gcgataaaattaatggaatta

SEQ ID NO: 129529 - DNA, 21 bp, Artificial sequence
  SiRNA target sequence
cgataaaattaatggaattaa

SEQ ID NO: 129530 - DNA, 21 bp, Artificial sequence
  SiRNA target sequence
gataaaattaatggaattaaa

SEQ ID NO: 129531 - DNA, 21 bp, Artificial sequence
  SiRNA target sequence
ataaaattaatggaattaaat

SEQ ID NO: 129532 - DNA, 21 bp, Artificial sequence
  SiRNA target sequence
taaaattaatggaattaaatg

SEQ ID NO: 129533 - DNA, 21 bp, Artificial sequence
  SiRNA target sequence
aaaattaatggaattaaatgt

SEQ ID NO: 129534 - DNA, 21 bp, Artificial sequence
  SiRNA target sequence
aaattaatggaattaaatgtc

SEQ ID NO: 129535 - DNA, 21 bp, Artificial sequence
  SiRNA target sequence
aattaatggaattaaatgtca

SEQ ID NO: 129536 - DNA, 21 bp, Artificial sequence
  SiRNA target sequence
attaatggaattaaatgtcaa

SEQ ID NO: 129537 - DNA, 21 bp, Artificial sequence
  SiRNA target sequence
ttaatggaattaaatgtcaag

SEQ ID NO: 129538 - DNA, 21 bp, Artificial sequence
  SiRNA target sequence
taatggaattaaatgtcaaga

SEQ ID NO: 129539 - DNA, 21 bp, Artificial sequence
  SiRNA target sequence
aatggaattaaatgtcaagat

SEQ ID NO: 129540 - DNA, 21 bp, Artificial sequence
  SiRNA target sequence
atggaattaaatgtcaagatt

SEQ ID NO: 129541 - DNA, 21 bp, Artificial sequence
  SiRNA target sequence
tggaattaaatgtcaagattc

SEQ ID NO: 129542 - DNA, 21 bp, Artificial sequence
  SiRNA target sequence
ggaattaaatgtcaagattca

SEQ ID NO: 129543 - DNA, 21 bp, Artificial sequence
  SiRNA target sequence
gaattaaatgtcaagattcaa

SEQ ID NO: 129544 - DNA, 21 bp, Artificial sequence
  SiRNA target sequence
aattaaatgtcaagattcaat

SEQ ID NO: 129545 - DNA, 21 bp, Artificial sequence
  SiRNA target sequence
attaaatgtcaagattcaata

SEQ ID NO: 129546 - DNA, 21 bp, Artificial sequence
  SiRNA target sequence
ttaaatgtcaagattcaataa

SEQ ID NO: 129547 - DNA, 21 bp, Artificial sequence
  SiRNA target sequence
taaatgtcaagattcaataaa

SEQ ID NO: 129548 - DNA, 21 bp, Artificial sequence
  SiRNA target sequence
aaatgtcaagattcaataaat

SEQ ID NO: 129549 - DNA, 21 bp, Artificial sequence
  SiRNA target sequence
aatgtcaagattcaataaata

SEQ ID NO: 129550 - DNA, 21 bp, Artificial sequence
  SiRNA target sequence
atgtcaagattcaataaataa

SEQ ID NO: 129551 - DNA, 21 bp, Artificial sequence
  SiRNA target sequence
tgtcaagattcaataaataat

SEQ ID NO: 129552 - DNA, 21 bp, Artificial sequence
  SiRNA target sequence
gtcaagattcaataaataatg

SEQ ID NO: 129553 - DNA, 21 bp, Artificial sequence
  SiRNA target sequence
tcaagattcaataaataatga

SEQ ID NO: 129554 - DNA, 21 bp, Artificial sequence
  SiRNA target sequence
caagattcaataaataatgaa

SEQ ID NO: 129555 - DNA, 21 bp, Artificial sequence
  SiRNA target sequence
aagattcaataaataatgaaa

SEQ ID NO: 129556 - DNA, 21 bp, Artificial sequence
  SiRNA target sequence
agattcaataaataatgaaaa

SEQ ID NO: 129557 - DNA, 21 bp, Artificial sequence
  SiRNA target sequence
gattcaataaataatgaaaaa

SEQ ID NO: 129558 - DNA, 21 bp, Artificial sequence
  SiRNA target sequence
attcaataaataatgaaaaat

SEQ ID NO: 129559 - DNA, 21 bp, Artificial sequence
  SiRNA target sequence
ttcaataaataatgaaaaatt

SEQ ID NO: 129560 - DNA, 21 bp, Artificial sequence
  SiRNA target sequence
tcaataaataatgaaaaattt

SEQ ID NO: 129561 - DNA, 21 bp, Artificial sequence
  SiRNA target sequence
caataaataatgaaaaatttt

SEQ ID NO: 129562 - DNA, 21 bp, Artificial sequence
  SiRNA target sequence
aataaataatgaaaaattttt

SEQ ID NO: 129563 - DNA, 21 bp, Artificial sequence
  SiRNA target sequence
ataaataatgaaaaattttta

SEQ ID NO: 129564 - DNA, 21 bp, Artificial sequence
  SiRNA target sequence
taaataatgaaaaatttttaa

SEQ ID NO: 129565 - DNA, 21 bp, Artificial sequence
  SiRNA target sequence
aaataatgaaaaatttttaat

SEQ ID NO: 129566 - DNA, 21 bp, Artificial sequence
  SiRNA target sequence
aataatgaaaaatttttaatt

SEQ ID NO: 129567 - DNA, 21 bp, Artificial sequence
  SiRNA target sequence
ataatgaaaaatttttaatta

SEQ ID NO: 129568 - DNA, 21 bp, Artificial sequence
  SiRNA target sequence
taatgaaaaatttttaattag

SEQ ID NO: 129569 - DNA, 21 bp, Artificial sequence
  SiRNA target sequence
aatgaaaaatttttaattagg

SEQ ID NO: 129570 - DNA, 21 bp, Artificial sequence
  SiRNA target sequence
atgaaaaatttttaattaggt

SEQ ID NO: 129571 - DNA, 21 bp, Artificial sequence
  SiRNA target sequence
tgaaaaatttttaattaggtg

SEQ ID NO: 129572 - DNA, 21 bp, Artificial sequence
  SiRNA target sequence
gaaaaatttttaattaggtgt

SEQ ID NO: 129573 - DNA, 21 bp, Artificial sequence
  SiRNA target sequence
aaaaatttttaattaggtgta

SEQ ID NO: 129574 - DNA, 21 bp, Artificial sequence
  SiRNA target sequence
aaaatttttaattaggtgtaa

SEQ ID NO: 129575 - DNA, 21 bp, Artificial sequence
  SiRNA target sequence
aaatttttaattaggtgtaaa

SEQ ID NO: 129576 - DNA, 21 bp, Artificial sequence
  SiRNA target sequence
aatttttaattaggtgtaaag

SEQ ID NO: 129577 - DNA, 21 bp, Artificial sequence
  SiRNA target sequence
atttttaattaggtgtaaagt

SEQ ID NO: 129578 - DNA, 21 bp, Artificial sequence
  SiRNA target sequence
tttttaattaggtgtaaagtt

SEQ ID NO: 129579 - DNA, 21 bp, Artificial sequence
  SiRNA target sequence
ttttaattaggtgtaaagttt

SEQ ID NO: 129580 - DNA, 21 bp, Artificial sequence
  SiRNA target sequence
tttaattaggtgtaaagtttt

SEQ ID NO: 129581 - DNA, 21 bp, Artificial sequence
  SiRNA target sequence
ttaattaggtgtaaagtttta

SEQ ID NO: 129582 - DNA, 21 bp, Artificial sequence
  SiRNA target sequence
taattaggtgtaaagttttaa

SEQ ID NO: 129583 - DNA, 21 bp, Artificial sequence
  SiRNA target sequence
aattaggtgtaaagttttaat

SEQ ID NO: 129584 - DNA, 21 bp, Artificial sequence
  SiRNA target sequence
attaggtgtaaagttttaata

SEQ ID NO: 129585 - DNA, 21 bp, Artificial sequence
  SiRNA target sequence
ttaggtgtaaagttttaataa

SEQ ID NO: 129586 - DNA, 21 bp, Artificial sequence
  SiRNA target sequence
taggtgtaaagttttaataaa

SEQ ID NO: 129587 - DNA, 21 bp, Artificial sequence
  SiRNA target sequence
aggtgtaaagttttaataaat

SEQ ID NO: 129588 - DNA, 21 bp, Artificial sequence
  SiRNA target sequence
ggtgtaaagttttaataaata

SEQ ID NO: 129589 - DNA, 21 bp, Artificial sequence
  SiRNA target sequence
gtgtaaagttttaataaatac

SEQ ID NO: 129590 - DNA, 21 bp, Artificial sequence
  SiRNA target sequence
tgtaaagttttaataaatact

SEQ ID NO: 129591 - DNA, 21 bp, Artificial sequence
  SiRNA target sequence
gtaaagttttaataaatactt

SEQ ID NO: 129592 - DNA, 21 bp, Artificial sequence
  SiRNA target sequence
taaagttttaataaatacttc

SEQ ID NO: 129593 - DNA, 21 bp, Artificial sequence
  SiRNA target sequence
aaagttttaataaatacttct

SEQ ID NO: 129594 - DNA, 21 bp, Artificial sequence
  SiRNA target sequence
aagttttaataaatacttctg

SEQ ID NO: 129595 - DNA, 21 bp, Artificial sequence
  SiRNA target sequence
agttttaataaatacttctgg

SEQ ID NO: 129596 - DNA, 21 bp, Artificial sequence
  SiRNA target sequence
gttttaataaatacttctggc

SEQ ID NO: 129597 - DNA, 21 bp, Artificial sequence
  SiRNA target sequence
ttttaataaatacttctggcc

SEQ ID NO: 129598 - DNA, 21 bp, Artificial sequence
  SiRNA target sequence
tttaataaatacttctggccc

SEQ ID NO: 129599 - DNA, 21 bp, Artificial sequence
  SiRNA target sequence
ttaataaatacttctggccct

SEQ ID NO: 129600 - DNA, 21 bp, Artificial sequence
  SiRNA target sequence
taataaatacttctggccctt

SEQ ID NO: 129601 - DNA, 21 bp, Artificial sequence
  SiRNA target sequence
aataaatacttctggcccttt

SEQ ID NO: 129602 - DNA, 21 bp, Artificial sequence
  SiRNA target sequence
ataaatacttctggccctttt

SEQ ID NO: 129603 - DNA, 21 bp, Artificial sequence
  SiRNA target sequence
taaatacttctggcccttttg

SEQ ID NO: 129604 - DNA, 21 bp, Artificial sequence
  SiRNA target sequence
aaatacttctggcccttttgc

SEQ ID NO: 129605 - DNA, 21 bp, Artificial sequence
  SiRNA target sequence
aatacttctggcccttttgct

SEQ ID NO: 129606 - DNA, 21 bp, Artificial sequence
  SiRNA target sequence
atacttctggcccttttgctg

SEQ ID NO: 129607 - DNA, 21 bp, Artificial sequence
  SiRNA target sequence
tacttctggcccttttgctga

SEQ ID NO: 129608 - DNA, 21 bp, Artificial sequence
  SiRNA target sequence
acttctggcccttttgctgac

SEQ ID NO: 129609 - DNA, 21 bp, Artificial sequence
  SiRNA target sequence
cttctggcccttttgctgacg

SEQ ID NO: 129610 - DNA, 21 bp, Artificial sequence
  SiRNA target sequence
ttctggcccttttgctgacga

SEQ ID NO: 129611 - DNA, 21 bp, Artificial sequence
  SiRNA target sequence
tctggcccttttgctgacgag

SEQ ID NO: 129612 - DNA, 21 bp, Artificial sequence
  SiRNA target sequence
ctggcccttttgctgacgagg

SEQ ID NO: 129613 - DNA, 21 bp, Artificial sequence
  SiRNA target sequence
tggcccttttgctgacgaggt

SEQ ID NO: 129614 - DNA, 21 bp, Artificial sequence
  SiRNA target sequence
ggcccttttgctgacgaggtt

SEQ ID NO: 129615 - DNA, 21 bp, Artificial sequence
  SiRNA target sequence
gcccttttgctgacgaggttc

SEQ ID NO: 129616 - DNA, 21 bp, Artificial sequence
  SiRNA target sequence
cccttttgctgacgaggttcg

SEQ ID NO: 129617 - DNA, 21 bp, Artificial sequence
  SiRNA target sequence
ccttttgctgacgaggttcga

SEQ ID NO: 129618 - DNA, 21 bp, Artificial sequence
  SiRNA target sequence
cttttgctgacgaggttcgaa

SEQ ID NO: 129619 - DNA, 21 bp, Artificial sequence
  SiRNA target sequence
ttttgctgacgaggttcgaaa

SEQ ID NO: 129620 - DNA, 21 bp, Artificial sequence
  SiRNA target sequence
tttgctgacgaggttcgaaat

SEQ ID NO: 129621 - DNA, 21 bp, Artificial sequence
  SiRNA target sequence
ttgctgacgaggttcgaaata

SEQ ID NO: 129622 - DNA, 21 bp, Artificial sequence
  SiRNA target sequence
tgctgacgaggttcgaaatac

SEQ ID NO: 129623 - DNA, 21 bp, Artificial sequence
  SiRNA target sequence
gctgacgaggttcgaaataca

SEQ ID NO: 129624 - DNA, 21 bp, Artificial sequence
  SiRNA target sequence
ctgacgaggttcgaaatacat

SEQ ID NO: 129625 - DNA, 21 bp, Artificial sequence
  SiRNA target sequence
tgacgaggttcgaaatacatc

SEQ ID NO: 129626 - DNA, 21 bp, Artificial sequence
  SiRNA target sequence
gacgaggttcgaaatacatca

SEQ ID NO: 129627 - DNA, 21 bp, Artificial sequence
  SiRNA target sequence
acgaggttcgaaatacatcaa

SEQ ID NO: 129628 - DNA, 21 bp, Artificial sequence
  SiRNA target sequence
cgaggttcgaaatacatcaat

SEQ ID NO: 129629 - DNA, 21 bp, Artificial sequence
  SiRNA target sequence
gaggttcgaaatacatcaatt

SEQ ID NO: 129630 - DNA, 21 bp, Artificial sequence
  SiRNA target sequence
aggttcgaaatacatcaattg

SEQ ID NO: 129631 - DNA, 21 bp, Artificial sequence
  SiRNA target sequence
ggttcgaaatacatcaattga

SEQ ID NO: 129632 - DNA, 21 bp, Artificial sequence
  SiRNA target sequence
gttcgaaatacatcaattgaa

SEQ ID NO: 129633 - DNA, 21 bp, Artificial sequence
  SiRNA target sequence
ttcgaaatacatcaattgaaa

SEQ ID NO: 129634 - DNA, 21 bp, Artificial sequence
  SiRNA target sequence
tcgaaatacatcaattgaaaa

SEQ ID NO: 129635 - DNA, 21 bp, Artificial sequence
  SiRNA target sequence
cgaaatacatcaattgaaaac

SEQ ID NO: 129636 - DNA, 21 bp, Artificial sequence
  SiRNA target sequence
gaaatacatcaattgaaaact

SEQ ID NO: 129637 - DNA, 21 bp, Artificial sequence
  SiRNA target sequence
aaatacatcaattgaaaactg

SEQ ID NO: 129638 - DNA, 21 bp, Artificial sequence
  SiRNA target sequence
aatacatcaattgaaaactgt

SEQ ID NO: 129639 - DNA, 21 bp, Artificial sequence
  SiRNA target sequence
atacatcaattgaaaactgtc

SEQ ID NO: 129640 - DNA, 21 bp, Artificial sequence
  SiRNA target sequence
tacatcaattgaaaactgtca

SEQ ID NO: 129641 - DNA, 21 bp, Artificial sequence
  SiRNA target sequence
acatcaattgaaaactgtcaa

SEQ ID NO: 129642 - DNA, 21 bp, Artificial sequence
  SiRNA target sequence
catcaattgaaaactgtcaac

SEQ ID NO: 129643 - DNA, 21 bp, Artificial sequence
  SiRNA target sequence
atcaattgaaaactgtcaacc

SEQ ID NO: 129644 - DNA, 21 bp, Artificial sequence
  SiRNA target sequence
tcaattgaaaactgtcaacca

SEQ ID NO: 129645 - DNA, 21 bp, Artificial sequence
  SiRNA target sequence
caattgaaaactgtcaaccaa

SEQ ID NO: 129646 - DNA, 21 bp, Artificial sequence
  SiRNA target sequence
aattgaaaactgtcaaccaat

SEQ ID NO: 129647 - DNA, 21 bp, Artificial sequence
  SiRNA target sequence
attgaaaactgtcaaccaata

SEQ ID NO: 129648 - DNA, 21 bp, Artificial sequence
  SiRNA target sequence
ttgaaaactgtcaaccaatac

SEQ ID NO: 129649 - DNA, 21 bp, Artificial sequence
  SiRNA target sequence
tgaaaactgtcaaccaatact

SEQ ID NO: 129650 - DNA, 21 bp, Artificial sequence
  SiRNA target sequence
gaaaactgtcaaccaatactc

SEQ ID NO: 129651 - DNA, 21 bp, Artificial sequence
  SiRNA target sequence
aaaactgtcaaccaatactcc

SEQ ID NO: 129652 - DNA, 21 bp, Artificial sequence
  SiRNA target sequence
aaactgtcaaccaatactcca

SEQ ID NO: 129653 - DNA, 21 bp, Artificial sequence
  SiRNA target sequence
aactgtcaaccaatactccaa

SEQ ID NO: 129654 - DNA, 21 bp, Artificial sequence
  SiRNA target sequence
actgtcaaccaatactccaac

SEQ ID NO: 129655 - DNA, 21 bp, Artificial sequence
  SiRNA target sequence
ctgtcaaccaatactccaaca

SEQ ID NO: 129656 - DNA, 21 bp, Artificial sequence
  SiRNA target sequence
tgtcaaccaatactccaacat

SEQ ID NO: 129657 - DNA, 21 bp, Artificial sequence
  SiRNA target sequence
gtcaaccaatactccaacata

SEQ ID NO: 129658 - DNA, 21 bp, Artificial sequence
  SiRNA target sequence
tcaaccaatactccaacatag

SEQ ID NO: 129659 - DNA, 21 bp, Artificial sequence
  SiRNA target sequence
caaccaatactccaacatagt

SEQ ID NO: 129660 - DNA, 21 bp, Artificial sequence
  SiRNA target sequence
aaccaatactccaacatagtt

SEQ ID NO: 129661 - DNA, 21 bp, Artificial sequence
  SiRNA target sequence
accaatactccaacatagtta

SEQ ID NO: 129662 - DNA, 21 bp, Artificial sequence
  SiRNA target sequence
ccaatactccaacatagttat

SEQ ID NO: 129663 - DNA, 21 bp, Artificial sequence
  SiRNA target sequence
caatactccaacatagttatg

SEQ ID NO: 129664 - DNA, 21 bp, Artificial sequence
  SiRNA target sequence
aatactccaacatagttatgg

SEQ ID NO: 129665 - DNA, 21 bp, Artificial sequence
  SiRNA target sequence
atactccaacatagttatggt

SEQ ID NO: 129666 - DNA, 21 bp, Artificial sequence
  SiRNA target sequence
tactccaacatagttatggta

SEQ ID NO: 129667 - DNA, 21 bp, Artificial sequence
  SiRNA target sequence
actccaacatagttatggtac

SEQ ID NO: 129668 - DNA, 21 bp, Artificial sequence
  SiRNA target sequence
ctccaacatagttatggtaca

SEQ ID NO: 129669 - DNA, 21 bp, Artificial sequence
  SiRNA target sequence
tccaacatagttatggtacac

SEQ ID NO: 129670 - DNA, 21 bp, Artificial sequence
  SiRNA target sequence
ccaacatagttatggtacaca

SEQ ID NO: 129671 - DNA, 21 bp, Artificial sequence
  SiRNA target sequence
caacatagttatggtacacat

SEQ ID NO: 129672 - DNA, 21 bp, Artificial sequence
  SiRNA target sequence
aacatagttatggtacacata

SEQ ID NO: 129673 - DNA, 21 bp, Artificial sequence
  SiRNA target sequence
acatagttatggtacacatat

SEQ ID NO: 129674 - DNA, 21 bp, Artificial sequence
  SiRNA target sequence
catagttatggtacacatatt

SEQ ID NO: 129675 - DNA, 21 bp, Artificial sequence
  SiRNA target sequence
atagttatggtacacatattg

SEQ ID NO: 129676 - DNA, 21 bp, Artificial sequence
  SiRNA target sequence
tagttatggtacacatattgt

SEQ ID NO: 129677 - DNA, 21 bp, Artificial sequence
  SiRNA target sequence
agttatggtacacatattgta

SEQ ID NO: 129678 - DNA, 21 bp, Artificial sequence
  SiRNA target sequence
gttatggtacacatattgtag

SEQ ID NO: 129679 - DNA, 21 bp, Artificial sequence
  SiRNA target sequence
ttatggtacacatattgtagt

SEQ ID NO: 129680 - DNA, 21 bp, Artificial sequence
  SiRNA target sequence
tatggtacacatattgtagtt

SEQ ID NO: 129681 - DNA, 21 bp, Artificial sequence
  SiRNA target sequence
atggtacacatattgtagttc

SEQ ID NO: 129682 - DNA, 21 bp, Artificial sequence
  SiRNA target sequence
tggtacacatattgtagttcc

SEQ ID NO: 129683 - DNA, 21 bp, Artificial sequence
  SiRNA target sequence
ggtacacatattgtagttcct

SEQ ID NO: 129684 - DNA, 21 bp, Artificial sequence
  SiRNA target sequence
gtacacatattgtagttcctg

SEQ ID NO: 129685 - DNA, 21 bp, Artificial sequence
  SiRNA target sequence
tacacatattgtagttcctgc

SEQ ID NO: 129686 - DNA, 21 bp, Artificial sequence
  SiRNA target sequence
acacatattgtagttcctgcg

SEQ ID NO: 129687 - DNA, 21 bp, Artificial sequence
  SiRNA target sequence
cacatattgtagttcctgcga

SEQ ID NO: 129688 - DNA, 21 bp, Artificial sequence
  SiRNA target sequence
acatattgtagttcctgcgat

SEQ ID NO: 129689 - DNA, 21 bp, Artificial sequence
  SiRNA target sequence
catattgtagttcctgcgata

SEQ ID NO: 129690 - DNA, 21 bp, Artificial sequence
  SiRNA target sequence
atattgtagttcctgcgatat

SEQ ID NO: 129691 - DNA, 21 bp, Artificial sequence
  SiRNA target sequence
tattgtagttcctgcgatatt

SEQ ID NO: 129692 - DNA, 21 bp, Artificial sequence
  SiRNA target sequence
attgtagttcctgcgatattt

SEQ ID NO: 129693 - DNA, 21 bp, Artificial sequence
  SiRNA target sequence
ttgtagttcctgcgatatttt

SEQ ID NO: 129694 - DNA, 21 bp, Artificial sequence
  SiRNA target sequence
tgtagttcctgcgatattttc

SEQ ID NO: 129695 - DNA, 21 bp, Artificial sequence
  SiRNA target sequence
gtagttcctgcgatattttcg

SEQ ID NO: 129696 - DNA, 21 bp, Artificial sequence
  SiRNA target sequence
tagttcctgcgatattttcgc

SEQ ID NO: 129697 - DNA, 21 bp, Artificial sequence
  SiRNA target sequence
agttcctgcgatattttcgcc

SEQ ID NO: 129698 - DNA, 21 bp, Artificial sequence
  SiRNA target sequence
gttcctgcgatattttcgcct

SEQ ID NO: 129699 - DNA, 21 bp, Artificial sequence
  SiRNA target sequence
ttcctgcgatattttcgccta

SEQ ID NO: 129700 - DNA, 21 bp, Artificial sequence
  SiRNA target sequence
tcctgcgatattttcgcctaa

SEQ ID NO: 129701 - DNA, 21 bp, Artificial sequence
  SiRNA target sequence
cctgcgatattttcgcctaaa

SEQ ID NO: 129702 - DNA, 21 bp, Artificial sequence
  SiRNA target sequence
ctgcgatattttcgcctaaaa

SEQ ID NO: 129703 - DNA, 21 bp, Artificial sequence
  SiRNA target sequence
tgcgatattttcgcctaaaaa

SEQ ID NO: 129704 - DNA, 21 bp, Artificial sequence
  SiRNA target sequence
gcgatattttcgcctaaaaat

SEQ ID NO: 129705 - DNA, 21 bp, Artificial sequence
  SiRNA target sequence
cgatattttcgcctaaaaata

SEQ ID NO: 129706 - DNA, 21 bp, Artificial sequence
  SiRNA target sequence
gatattttcgcctaaaaatat

SEQ ID NO: 129707 - DNA, 21 bp, Artificial sequence
  SiRNA target sequence
atattttcgcctaaaaatatg

SEQ ID NO: 129708 - DNA, 21 bp, Artificial sequence
  SiRNA target sequence
tattttcgcctaaaaatatgg

SEQ ID NO: 129709 - DNA, 21 bp, Artificial sequence
  SiRNA target sequence
attttcgcctaaaaatatggg

SEQ ID NO: 129710 - DNA, 21 bp, Artificial sequence
  SiRNA target sequence
ttttcgcctaaaaatatgggc

SEQ ID NO: 129711 - DNA, 21 bp, Artificial sequence
  SiRNA target sequence
tttcgcctaaaaatatgggct

SEQ ID NO: 129712 - DNA, 21 bp, Artificial sequence
  SiRNA target sequence
ttcgcctaaaaatatgggctt

SEQ ID NO: 129713 - DNA, 21 bp, Artificial sequence
  SiRNA target sequence
tcgcctaaaaatatgggcttt

SEQ ID NO: 129714 - DNA, 21 bp, Artificial sequence
  SiRNA target sequence
cgcctaaaaatatgggctttg

SEQ ID NO: 129715 - DNA, 21 bp, Artificial sequence
  SiRNA target sequence
gcctaaaaatatgggctttgt

SEQ ID NO: 129716 - DNA, 21 bp, Artificial sequence
  SiRNA target sequence
cctaaaaatatgggctttgtt

SEQ ID NO: 129717 - DNA, 21 bp, Artificial sequence
  SiRNA target sequence
ctaaaaatatgggctttgttg

SEQ ID NO: 129718 - DNA, 21 bp, Artificial sequence
  SiRNA target sequence
taaaaatatgggctttgttga

SEQ ID NO: 129719 - DNA, 21 bp, Artificial sequence
  SiRNA target sequence
aaaaatatgggctttgttgat

SEQ ID NO: 129720 - DNA, 21 bp, Artificial sequence
  SiRNA target sequence
aaaatatgggctttgttgatc

SEQ ID NO: 129721 - DNA, 21 bp, Artificial sequence
  SiRNA target sequence
aaatatgggctttgttgatcc

SEQ ID NO: 129722 - DNA, 21 bp, Artificial sequence
  SiRNA target sequence
aatatgggctttgttgatcca

SEQ ID NO: 129723 - DNA, 21 bp, Artificial sequence
  SiRNA target sequence
atatgggctttgttgatccaa

SEQ ID NO: 129724 - DNA, 21 bp, Artificial sequence
  SiRNA target sequence
tatgggctttgttgatccaag

SEQ ID NO: 129725 - DNA, 21 bp, Artificial sequence
  SiRNA target sequence
atgggctttgttgatccaagc

SEQ ID NO: 129726 - DNA, 21 bp, Artificial sequence
  SiRNA target sequence
tgggctttgttgatccaagca

SEQ ID NO: 129727 - DNA, 21 bp, Artificial sequence
  SiRNA target sequence
gggctttgttgatccaagcac

SEQ ID NO: 129728 - DNA, 21 bp, Artificial sequence
  SiRNA target sequence
ggctttgttgatccaagcacg

SEQ ID NO: 129729 - DNA, 21 bp, Artificial sequence
  SiRNA target sequence
gctttgttgatccaagcacga

SEQ ID NO: 129730 - DNA, 21 bp, Artificial sequence
  SiRNA target sequence
ctttgttgatccaagcacgag

SEQ ID NO: 129731 - DNA, 21 bp, Artificial sequence
  SiRNA target sequence
tttgttgatccaagcacgagt

SEQ ID NO: 129732 - DNA, 21 bp, Artificial sequence
  SiRNA target sequence
ttgttgatccaagcacgagtg

SEQ ID NO: 129733 - DNA, 21 bp, Artificial sequence
  SiRNA target sequence
tgttgatccaagcacgagtga

SEQ ID NO: 129734 - DNA, 21 bp, Artificial sequence
  SiRNA target sequence
gttgatccaagcacgagtgat

SEQ ID NO: 129735 - DNA, 21 bp, Artificial sequence
  SiRNA target sequence
ttgatccaagcacgagtgatg

SEQ ID NO: 129736 - DNA, 21 bp, Artificial sequence
  SiRNA target sequence
tgatccaagcacgagtgatgg

SEQ ID NO: 129737 - DNA, 21 bp, Artificial sequence
  SiRNA target sequence
gatccaagcacgagtgatgga

SEQ ID NO: 129738 - DNA, 21 bp, Artificial sequence
  SiRNA target sequence
atccaagcacgagtgatggaa

SEQ ID NO: 129739 - DNA, 21 bp, Artificial sequence
  SiRNA target sequence
tccaagcacgagtgatggaag

SEQ ID NO: 129740 - DNA, 21 bp, Artificial sequence
  SiRNA target sequence
ccaagcacgagtgatggaaga

SEQ ID NO: 129741 - DNA, 21 bp, Artificial sequence
  SiRNA target sequence
caagcacgagtgatggaagaa

SEQ ID NO: 129742 - DNA, 21 bp, Artificial sequence
  SiRNA target sequence
aagcacgagtgatggaagaat

SEQ ID NO: 129743 - DNA, 21 bp, Artificial sequence
  SiRNA target sequence
agcacgagtgatggaagaatc

SEQ ID NO: 129744 - DNA, 21 bp, Artificial sequence
  SiRNA target sequence
gcacgagtgatggaagaatcg

SEQ ID NO: 129745 - DNA, 21 bp, Artificial sequence
  SiRNA target sequence
cacgagtgatggaagaatcgc

SEQ ID NO: 129746 - DNA, 21 bp, Artificial sequence
  SiRNA target sequence
acgagtgatggaagaatcgca

SEQ ID NO: 129747 - DNA, 21 bp, Artificial sequence
  SiRNA target sequence
cgagtgatggaagaatcgcat

SEQ ID NO: 129748 - DNA, 21 bp, Artificial sequence
  SiRNA target sequence
gagtgatggaagaatcgcatt

SEQ ID NO: 129749 - DNA, 21 bp, Artificial sequence
  SiRNA target sequence
agtgatggaagaatcgcattt

SEQ ID NO: 129750 - DNA, 21 bp, Artificial sequence
  SiRNA target sequence
gtgatggaagaatcgcatttt

SEQ ID NO: 129751 - DNA, 21 bp, Artificial sequence
  SiRNA target sequence
tgatggaagaatcgcattttt

SEQ ID NO: 129752 - DNA, 21 bp, Artificial sequence
  SiRNA target sequence
gatggaagaatcgcatttttt

SEQ ID NO: 129753 - DNA, 21 bp, Artificial sequence
  SiRNA target sequence
atggaagaatcgcatttttta

SEQ ID NO: 129754 - DNA, 21 bp, Artificial sequence
  SiRNA target sequence
tggaagaatcgcattttttat

SEQ ID NO: 129755 - DNA, 21 bp, Artificial sequence
  SiRNA target sequence
ggaagaatcgcattttttatg

SEQ ID NO: 129756 - DNA, 21 bp, Artificial sequence
  SiRNA target sequence
gaagaatcgcattttttatga

SEQ ID NO: 129757 - DNA, 21 bp, Artificial sequence
  SiRNA target sequence
aagaatcgcattttttatgaa

SEQ ID NO: 129758 - DNA, 21 bp, Artificial sequence
  SiRNA target sequence
agaatcgcattttttatgaat

SEQ ID NO: 129759 - DNA, 21 bp, Artificial sequence
  SiRNA target sequence
gaatcgcattttttatgaatt

SEQ ID NO: 129760 - DNA, 21 bp, Artificial sequence
  SiRNA target sequence
aatcgcattttttatgaattt

SEQ ID NO: 129761 - DNA, 21 bp, Artificial sequence
  SiRNA target sequence
atcgcattttttatgaatttt

SEQ ID NO: 129762 - DNA, 21 bp, Artificial sequence
  SiRNA target sequence
tcgcattttttatgaatttta

SEQ ID NO: 129763 - DNA, 21 bp, Artificial sequence
  SiRNA target sequence
cgcattttttatgaattttaa

SEQ ID NO: 129764 - DNA, 21 bp, Artificial sequence
  SiRNA target sequence
gcattttttatgaattttaaa

SEQ ID NO: 129765 - DNA, 21 bp, Artificial sequence
  SiRNA target sequence
cattttttatgaattttaaag

SEQ ID NO: 129766 - DNA, 21 bp, Artificial sequence
  SiRNA target sequence
attttttatgaattttaaagg

SEQ ID NO: 129767 - DNA, 21 bp, Artificial sequence
  SiRNA target sequence
ttttttatgaattttaaaggt

SEQ ID NO: 129768 - DNA, 21 bp, Artificial sequence
  SiRNA target sequence
tttttatgaattttaaaggta

SEQ ID NO: 129769 - DNA, 21 bp, Artificial sequence
  SiRNA target sequence
ttttatgaattttaaaggtaa

SEQ ID NO: 129770 - DNA, 21 bp, Artificial sequence
  SiRNA target sequence
tttatgaattttaaaggtaaa

SEQ ID NO: 129771 - DNA, 21 bp, Artificial sequence
  SiRNA target sequence
ttatgaattttaaaggtaaaa

SEQ ID NO: 129772 - DNA, 21 bp, Artificial sequence
  SiRNA target sequence
tatgaattttaaaggtaaaac

SEQ ID NO: 129773 - DNA, 21 bp, Artificial sequence
  SiRNA target sequence
atgaattttaaaggtaaaaca

SEQ ID NO: 129774 - DNA, 21 bp, Artificial sequence
  SiRNA target sequence
tgaattttaaaggtaaaacat

SEQ ID NO: 129775 - DNA, 21 bp, Artificial sequence
  SiRNA target sequence
gaattttaaaggtaaaacatt

SEQ ID NO: 129776 - DNA, 21 bp, Artificial sequence
  SiRNA target sequence
aattttaaaggtaaaacattg

SEQ ID NO: 129777 - DNA, 21 bp, Artificial sequence
  SiRNA target sequence
attttaaaggtaaaacattga

SEQ ID NO: 129778 - DNA, 21 bp, Artificial sequence
  SiRNA target sequence
ttttaaaggtaaaacattgat

SEQ ID NO: 129779 - DNA, 21 bp, Artificial sequence
  SiRNA target sequence
tttaaaggtaaaacattgatt

SEQ ID NO: 129780 - DNA, 21 bp, Artificial sequence
  SiRNA target sequence
ttaaaggtaaaacattgattg

SEQ ID NO: 129781 - DNA, 21 bp, Artificial sequence
  SiRNA target sequence
taaaggtaaaacattgattgg

SEQ ID NO: 129782 - DNA, 21 bp, Artificial sequence
  SiRNA target sequence
aaaggtaaaacattgattgga

SEQ ID NO: 129783 - DNA, 21 bp, Artificial sequence
  SiRNA target sequence
aaggtaaaacattgattggag

SEQ ID NO: 129784 - DNA, 21 bp, Artificial sequence
  SiRNA target sequence
aggtaaaacattgattggagg

SEQ ID NO: 129785 - DNA, 21 bp, Artificial sequence
  SiRNA target sequence
ggtaaaacattgattggagga

SEQ ID NO: 129786 - DNA, 21 bp, Artificial sequence
  SiRNA target sequence
gtaaaacattgattggaggaa

SEQ ID NO: 129787 - DNA, 21 bp, Artificial sequence
  SiRNA target sequence
taaaacattgattggaggaac

SEQ ID NO: 129788 - DNA, 21 bp, Artificial sequence
  SiRNA target sequence
aaaacattgattggaggaaca

SEQ ID NO: 129789 - DNA, 21 bp, Artificial sequence
  SiRNA target sequence
aaacattgattggaggaacag

SEQ ID NO: 129790 - DNA, 21 bp, Artificial sequence
  SiRNA target sequence
aacattgattggaggaacaga

SEQ ID NO: 129791 - DNA, 21 bp, Artificial sequence
  SiRNA target sequence
acattgattggaggaacagat

SEQ ID NO: 129792 - DNA, 21 bp, Artificial sequence
  SiRNA target sequence
cattgattggaggaacagatg

SEQ ID NO: 129793 - DNA, 21 bp, Artificial sequence
  SiRNA target sequence
attgattggaggaacagatgt

SEQ ID NO: 129794 - DNA, 21 bp, Artificial sequence
  SiRNA target sequence
ttgattggaggaacagatgtt

SEQ ID NO: 129795 - DNA, 21 bp, Artificial sequence
  SiRNA target sequence
tgattggaggaacagatgtta

SEQ ID NO: 129796 - DNA, 21 bp, Artificial sequence
  SiRNA target sequence
gattggaggaacagatgttaa

SEQ ID NO: 129797 - DNA, 21 bp, Artificial sequence
  SiRNA target sequence
attggaggaacagatgttaag

SEQ ID NO: 129798 - DNA, 21 bp, Artificial sequence
  SiRNA target sequence
ttggaggaacagatgttaagt

SEQ ID NO: 129799 - DNA, 21 bp, Artificial sequence
  SiRNA target sequence
tggaggaacagatgttaagtg

SEQ ID NO: 129800 - DNA, 21 bp, Artificial sequence
  SiRNA target sequence
ggaggaacagatgttaagtgt

SEQ ID NO: 129801 - DNA, 21 bp, Artificial sequence
  SiRNA target sequence
gaggaacagatgttaagtgta

SEQ ID NO: 129802 - DNA, 21 bp, Artificial sequence
  SiRNA target sequence
aggaacagatgttaagtgtaa

SEQ ID NO: 129803 - DNA, 21 bp, Artificial sequence
  SiRNA target sequence
ggaacagatgttaagtgtaaa

SEQ ID NO: 129804 - DNA, 21 bp, Artificial sequence
  SiRNA target sequence
gaacagatgttaagtgtaaag

SEQ ID NO: 129805 - DNA, 21 bp, Artificial sequence
  SiRNA target sequence
aacagatgttaagtgtaaagt

SEQ ID NO: 129806 - DNA, 21 bp, Artificial sequence
  SiRNA target sequence
acagatgttaagtgtaaagtt

SEQ ID NO: 129807 - DNA, 21 bp, Artificial sequence
  SiRNA target sequence
cagatgttaagtgtaaagttg

SEQ ID NO: 129808 - DNA, 21 bp, Artificial sequence
  SiRNA target sequence
agatgttaagtgtaaagttga

SEQ ID NO: 129809 - DNA, 21 bp, Artificial sequence
  SiRNA target sequence
gatgttaagtgtaaagttgaa

SEQ ID NO: 129810 - DNA, 21 bp, Artificial sequence
  SiRNA target sequence
atgttaagtgtaaagttgaag

SEQ ID NO: 129811 - DNA, 21 bp, Artificial sequence
  SiRNA target sequence
tgttaagtgtaaagttgaaga

SEQ ID NO: 129812 - DNA, 21 bp, Artificial sequence
  SiRNA target sequence
gttaagtgtaaagttgaagat

SEQ ID NO: 129813 - DNA, 21 bp, Artificial sequence
  SiRNA target sequence
ttaagtgtaaagttgaagatt

SEQ ID NO: 129814 - DNA, 21 bp, Artificial sequence
  SiRNA target sequence
taagtgtaaagttgaagattt

SEQ ID NO: 129815 - DNA, 21 bp, Artificial sequence
  SiRNA target sequence
aagtgtaaagttgaagattta

SEQ ID NO: 129816 - DNA, 21 bp, Artificial sequence
  SiRNA target sequence
agtgtaaagttgaagatttaa

SEQ ID NO: 129817 - DNA, 21 bp, Artificial sequence
  SiRNA target sequence
gtgtaaagttgaagatttaat

SEQ ID NO: 129818 - DNA, 21 bp, Artificial sequence
  SiRNA target sequence
tgtaaagttgaagatttaata

SEQ ID NO: 129819 - DNA, 21 bp, Artificial sequence
  SiRNA target sequence
gtaaagttgaagatttaataa

SEQ ID NO: 129820 - DNA, 21 bp, Artificial sequence
  SiRNA target sequence
taaagttgaagatttaataaa

SEQ ID NO: 129821 - DNA, 21 bp, Artificial sequence
  SiRNA target sequence
aaagttgaagatttaataaaa

SEQ ID NO: 129822 - DNA, 21 bp, Artificial sequence
  SiRNA target sequence
aagttgaagatttaataaaac

SEQ ID NO: 129823 - DNA, 21 bp, Artificial sequence
  SiRNA target sequence
agttgaagatttaataaaacc

SEQ ID NO: 129824 - DNA, 21 bp, Artificial sequence
  SiRNA target sequence
gttgaagatttaataaaaccg

SEQ ID NO: 129825 - DNA, 21 bp, Artificial sequence
  SiRNA target sequence
ttgaagatttaataaaaccga

SEQ ID NO: 129826 - DNA, 21 bp, Artificial sequence
  SiRNA target sequence
tgaagatttaataaaaccgac

SEQ ID NO: 129827 - DNA, 21 bp, Artificial sequence
  SiRNA target sequence
gaagatttaataaaaccgact

SEQ ID NO: 129828 - DNA, 21 bp, Artificial sequence
  SiRNA target sequence
aagatttaataaaaccgactg

SEQ ID NO: 129829 - DNA, 21 bp, Artificial sequence
  SiRNA target sequence
agatttaataaaaccgactga

SEQ ID NO: 129830 - DNA, 21 bp, Artificial sequence
  SiRNA target sequence
gatttaataaaaccgactgaa

SEQ ID NO: 129831 - DNA, 21 bp, Artificial sequence
  SiRNA target sequence
atttaataaaaccgactgaag

SEQ ID NO: 129832 - DNA, 21 bp, Artificial sequence
  SiRNA target sequence
tttaataaaaccgactgaaga

SEQ ID NO: 129833 - DNA, 21 bp, Artificial sequence
  SiRNA target sequence
ttaataaaaccgactgaagaa

SEQ ID NO: 129834 - DNA, 21 bp, Artificial sequence
  SiRNA target sequence
taataaaaccgactgaagaag

SEQ ID NO: 129835 - DNA, 21 bp, Artificial sequence
  SiRNA target sequence
aataaaaccgactgaagaaga

SEQ ID NO: 129836 - DNA, 21 bp, Artificial sequence
  SiRNA target sequence
ataaaaccgactgaagaagat

SEQ ID NO: 129837 - DNA, 21 bp, Artificial sequence
  SiRNA target sequence
taaaaccgactgaagaagatc

SEQ ID NO: 129838 - DNA, 21 bp, Artificial sequence
  SiRNA target sequence
aaaaccgactgaagaagatct

SEQ ID NO: 129839 - DNA, 21 bp, Artificial sequence
  SiRNA target sequence
aaaccgactgaagaagatcta

SEQ ID NO: 129840 - DNA, 21 bp, Artificial sequence
  SiRNA target sequence
aaccgactgaagaagatctaa

SEQ ID NO: 129841 - DNA, 21 bp, Artificial sequence
  SiRNA target sequence
accgactgaagaagatctaaa

SEQ ID NO: 129842 - DNA, 21 bp, Artificial sequence
  SiRNA target sequence
ccgactgaagaagatctaaac

SEQ ID NO: 129843 - DNA, 21 bp, Artificial sequence
  SiRNA target sequence
cgactgaagaagatctaaact

SEQ ID NO: 129844 - DNA, 21 bp, Artificial sequence
  SiRNA target sequence
gactgaagaagatctaaactt

SEQ ID NO: 129845 - DNA, 21 bp, Artificial sequence
  SiRNA target sequence
actgaagaagatctaaacttt

SEQ ID NO: 129846 - DNA, 21 bp, Artificial sequence
  SiRNA target sequence
ctgaagaagatctaaactttc

SEQ ID NO: 129847 - DNA, 21 bp, Artificial sequence
  SiRNA target sequence
tgaagaagatctaaactttct

SEQ ID NO: 129848 - DNA, 21 bp, Artificial sequence
  SiRNA target sequence
gaagaagatctaaactttctt

SEQ ID NO: 129849 - DNA, 21 bp, Artificial sequence
  SiRNA target sequence
aagaagatctaaactttctta

SEQ ID NO: 129850 - DNA, 21 bp, Artificial sequence
  SiRNA target sequence
agaagatctaaactttcttat

SEQ ID NO: 129851 - DNA, 21 bp, Artificial sequence
  SiRNA target sequence
gaagatctaaactttcttatt

SEQ ID NO: 129852 - DNA, 21 bp, Artificial sequence
  SiRNA target sequence
aagatctaaactttcttattc

SEQ ID NO: 129853 - DNA, 21 bp, Artificial sequence
  SiRNA target sequence
agatctaaactttcttattca

SEQ ID NO: 129854 - DNA, 21 bp, Artificial sequence
  SiRNA target sequence
gatctaaactttcttattcac

SEQ ID NO: 129855 - DNA, 21 bp, Artificial sequence
  SiRNA target sequence
atctaaactttcttattcacg

SEQ ID NO: 129856 - DNA, 21 bp, Artificial sequence
  SiRNA target sequence
tctaaactttcttattcacga

SEQ ID NO: 129857 - DNA, 21 bp, Artificial sequence
  SiRNA target sequence
ctaaactttcttattcacgag

SEQ ID NO: 129858 - DNA, 21 bp, Artificial sequence
  SiRNA target sequence
taaactttcttattcacgagg

SEQ ID NO: 129859 - DNA, 21 bp, Artificial sequence
  SiRNA target sequence
aaactttcttattcacgaggc

SEQ ID NO: 129860 - DNA, 21 bp, Artificial sequence
  SiRNA target sequence
aactttcttattcacgaggcc

SEQ ID NO: 129861 - DNA, 21 bp, Artificial sequence
  SiRNA target sequence
actttcttattcacgaggcca

SEQ ID NO: 129862 - DNA, 21 bp, Artificial sequence
  SiRNA target sequence
ctttcttattcacgaggccaa

SEQ ID NO: 129863 - DNA, 21 bp, Artificial sequence
  SiRNA target sequence
tttcttattcacgaggccaat

SEQ ID NO: 129864 - DNA, 21 bp, Artificial sequence
  SiRNA target sequence
ttcttattcacgaggccaatt

SEQ ID NO: 129865 - DNA, 21 bp, Artificial sequence
  SiRNA target sequence
tcttattcacgaggccaatta

SEQ ID NO: 129866 - DNA, 21 bp, Artificial sequence
  SiRNA target sequence
cttattcacgaggccaattat

SEQ ID NO: 129867 - DNA, 21 bp, Artificial sequence
  SiRNA target sequence
ttattcacgaggccaattatt

SEQ ID NO: 129868 - DNA, 21 bp, Artificial sequence
  SiRNA target sequence
tattcacgaggccaattattt

SEQ ID NO: 129869 - DNA, 21 bp, Artificial sequence
  SiRNA target sequence
attcacgaggccaattatttt

SEQ ID NO: 129870 - DNA, 21 bp, Artificial sequence
  SiRNA target sequence
ttcacgaggccaattatttta

SEQ ID NO: 129871 - DNA, 21 bp, Artificial sequence
  SiRNA target sequence
tcacgaggccaattattttac

SEQ ID NO: 129872 - DNA, 21 bp, Artificial sequence
  SiRNA target sequence
cacgaggccaattattttaca

SEQ ID NO: 129873 - DNA, 21 bp, Artificial sequence
  SiRNA target sequence
acgaggccaattattttacag

SEQ ID NO: 129874 - DNA, 21 bp, Artificial sequence
  SiRNA target sequence
cgaggccaattattttacaga

SEQ ID NO: 129875 - DNA, 21 bp, Artificial sequence
  SiRNA target sequence
gaggccaattattttacagat

SEQ ID NO: 129876 - DNA, 21 bp, Artificial sequence
  SiRNA target sequence
aggccaattattttacagatc

SEQ ID NO: 129877 - DNA, 21 bp, Artificial sequence
  SiRNA target sequence
ggccaattattttacagatca

SEQ ID NO: 129878 - DNA, 21 bp, Artificial sequence
  SiRNA target sequence
gccaattattttacagatcac

SEQ ID NO: 129879 - DNA, 21 bp, Artificial sequence
  SiRNA target sequence
ccaattattttacagatcaca

SEQ ID NO: 129880 - DNA, 21 bp, Artificial sequence
  SiRNA target sequence
caattattttacagatcacaa

SEQ ID NO: 129881 - DNA, 21 bp, Artificial sequence
  SiRNA target sequence
aattattttacagatcacaat

SEQ ID NO: 129882 - DNA, 21 bp, Artificial sequence
  SiRNA target sequence
attattttacagatcacaatt

SEQ ID NO: 129883 - DNA, 21 bp, Artificial sequence
  SiRNA target sequence
ttattttacagatcacaattt

SEQ ID NO: 129884 - DNA, 21 bp, Artificial sequence
  SiRNA target sequence
tattttacagatcacaattta

SEQ ID NO: 129885 - DNA, 21 bp, Artificial sequence
  SiRNA target sequence
attttacagatcacaatttaa

SEQ ID NO: 129886 - DNA, 21 bp, Artificial sequence
  SiRNA target sequence
ttttacagatcacaatttaaa

SEQ ID NO: 129887 - DNA, 21 bp, Artificial sequence
  SiRNA target sequence
tttacagatcacaatttaaaa

SEQ ID NO: 129888 - DNA, 21 bp, Artificial sequence
  SiRNA target sequence
ttacagatcacaatttaaaat

SEQ ID NO: 129889 - DNA, 21 bp, Artificial sequence
  SiRNA target sequence
tacagatcacaatttaaaatt

SEQ ID NO: 129890 - DNA, 21 bp, Artificial sequence
  SiRNA target sequence
acagatcacaatttaaaatta

SEQ ID NO: 129891 - DNA, 21 bp, Artificial sequence
  SiRNA target sequence
cagatcacaatttaaaattaa

SEQ ID NO: 129892 - DNA, 21 bp, Artificial sequence
  SiRNA target sequence
agatcacaatttaaaattaac

SEQ ID NO: 129893 - DNA, 21 bp, Artificial sequence
  SiRNA target sequence
gatcacaatttaaaattaaca

SEQ ID NO: 129894 - DNA, 21 bp, Artificial sequence
  SiRNA target sequence
atcacaatttaaaattaacaa

SEQ ID NO: 129895 - DNA, 21 bp, Artificial sequence
  SiRNA target sequence
tcacaatttaaaattaacaaa

SEQ ID NO: 129896 - DNA, 21 bp, Artificial sequence
  SiRNA target sequence
cacaatttaaaattaacaaaa

SEQ ID NO: 129897 - DNA, 21 bp, Artificial sequence
  SiRNA target sequence
acaatttaaaattaacaaaaa

SEQ ID NO: 129898 - DNA, 21 bp, Artificial sequence
  SiRNA target sequence
caatttaaaattaacaaaaaa

SEQ ID NO: 129899 - DNA, 21 bp, Artificial sequence
  SiRNA target sequence
aatttaaaattaacaaaaaaa

SEQ ID NO: 129900 - DNA, 21 bp, Artificial sequence
  SiRNA target sequence
atttaaaattaacaaaaaaag

SEQ ID NO: 129901 - DNA, 21 bp, Artificial sequence
  SiRNA target sequence
tttaaaattaacaaaaaaaga

SEQ ID NO: 129902 - DNA, 21 bp, Artificial sequence
  SiRNA target sequence
ttaaaattaacaaaaaaagat

SEQ ID NO: 129903 - DNA, 21 bp, Artificial sequence
  SiRNA target sequence
taaaattaacaaaaaaagatg

SEQ ID NO: 129904 - DNA, 21 bp, Artificial sequence
  SiRNA target sequence
aaaattaacaaaaaaagatgt

SEQ ID NO: 129905 - DNA, 21 bp, Artificial sequence
  SiRNA target sequence
aaattaacaaaaaaagatgtt

SEQ ID NO: 129906 - DNA, 21 bp, Artificial sequence
  SiRNA target sequence
aattaacaaaaaaagatgttt

SEQ ID NO: 129907 - DNA, 21 bp, Artificial sequence
  SiRNA target sequence
attaacaaaaaaagatgtttt

SEQ ID NO: 129908 - DNA, 21 bp, Artificial sequence
  SiRNA target sequence
ttaacaaaaaaagatgttttg

SEQ ID NO: 129909 - DNA, 21 bp, Artificial sequence
  SiRNA target sequence
taacaaaaaaagatgttttgt

SEQ ID NO: 129910 - DNA, 21 bp, Artificial sequence
  SiRNA target sequence
aacaaaaaaagatgttttgtc

SEQ ID NO: 129911 - DNA, 21 bp, Artificial sequence
  SiRNA target sequence
acaaaaaaagatgttttgtct

SEQ ID NO: 129912 - DNA, 21 bp, Artificial sequence
  SiRNA target sequence
caaaaaaagatgttttgtctg

SEQ ID NO: 129913 - DNA, 21 bp, Artificial sequence
  SiRNA target sequence
aaaaaaagatgttttgtctgt

SEQ ID NO: 129914 - DNA, 21 bp, Artificial sequence
  SiRNA target sequence
aaaaaagatgttttgtctgtt

SEQ ID NO: 129915 - DNA, 21 bp, Artificial sequence
  SiRNA target sequence
aaaaagatgttttgtctgttt

SEQ ID NO: 129916 - DNA, 21 bp, Artificial sequence
  SiRNA target sequence
aaaagatgttttgtctgtttg

SEQ ID NO: 129917 - DNA, 21 bp, Artificial sequence
  SiRNA target sequence
aaagatgttttgtctgtttgg

SEQ ID NO: 129918 - DNA, 21 bp, Artificial sequence
  SiRNA target sequence
aagatgttttgtctgtttgga

SEQ ID NO: 129919 - DNA, 21 bp, Artificial sequence
  SiRNA target sequence
agatgttttgtctgtttggac

SEQ ID NO: 129920 - DNA, 21 bp, Artificial sequence
  SiRNA target sequence
gatgttttgtctgtttggaca

SEQ ID NO: 129921 - DNA, 21 bp, Artificial sequence
  SiRNA target sequence
atgttttgtctgtttggacag

SEQ ID NO: 129922 - DNA, 21 bp, Artificial sequence
  SiRNA target sequence
tgttttgtctgtttggacagg

SEQ ID NO: 129923 - DNA, 21 bp, Artificial sequence
  SiRNA target sequence
gttttgtctgtttggacaggt

SEQ ID NO: 129924 - DNA, 21 bp, Artificial sequence
  SiRNA target sequence
ttttgtctgtttggacaggta

SEQ ID NO: 129925 - DNA, 21 bp, Artificial sequence
  SiRNA target sequence
tttgtctgtttggacaggtat

SEQ ID NO: 129926 - DNA, 21 bp, Artificial sequence
  SiRNA target sequence
ttgtctgtttggacaggtatt

SEQ ID NO: 129927 - DNA, 21 bp, Artificial sequence
  SiRNA target sequence
tgtctgtttggacaggtatta

SEQ ID NO: 129928 - DNA, 21 bp, Artificial sequence
  SiRNA target sequence
gtctgtttggacaggtattag

SEQ ID NO: 129929 - DNA, 21 bp, Artificial sequence
  SiRNA target sequence
tctgtttggacaggtattaga

SEQ ID NO: 129930 - DNA, 21 bp, Artificial sequence
  SiRNA target sequence
ctgtttggacaggtattagac

SEQ ID NO: 129931 - DNA, 21 bp, Artificial sequence
  SiRNA target sequence
tgtttggacaggtattagacc

SEQ ID NO: 129932 - DNA, 21 bp, Artificial sequence
  SiRNA target sequence
gtttggacaggtattagaccg

SEQ ID NO: 129933 - DNA, 21 bp, Artificial sequence
  SiRNA target sequence
tttggacaggtattagaccgt

SEQ ID NO: 129934 - DNA, 21 bp, Artificial sequence
  SiRNA target sequence
ttggacaggtattagaccgtt

SEQ ID NO: 129935 - DNA, 21 bp, Artificial sequence
  SiRNA target sequence
tggacaggtattagaccgtta

SEQ ID NO: 129936 - DNA, 21 bp, Artificial sequence
  SiRNA target sequence
ggacaggtattagaccgttag

SEQ ID NO: 129937 - DNA, 21 bp, Artificial sequence
  SiRNA target sequence
gacaggtattagaccgttagt

SEQ ID NO: 129938 - DNA, 21 bp, Artificial sequence
  SiRNA target sequence
acaggtattagaccgttagtc

SEQ ID NO: 129939 - DNA, 21 bp, Artificial sequence
  SiRNA target sequence
caggtattagaccgttagtca

SEQ ID NO: 129940 - DNA, 21 bp, Artificial sequence
  SiRNA target sequence
aggtattagaccgttagtcaa

SEQ ID NO: 129941 - DNA, 21 bp, Artificial sequence
  SiRNA target sequence
ggtattagaccgttagtcaag

SEQ ID NO: 129942 - DNA, 21 bp, Artificial sequence
  SiRNA target sequence
gtattagaccgttagtcaagg

SEQ ID NO: 129943 - DNA, 21 bp, Artificial sequence
  SiRNA target sequence
tattagaccgttagtcaagga

SEQ ID NO: 129944 - DNA, 21 bp, Artificial sequence
  SiRNA target sequence
attagaccgttagtcaaggat

SEQ ID NO: 129945 - DNA, 21 bp, Artificial sequence
  SiRNA target sequence
ttagaccgttagtcaaggatt

SEQ ID NO: 129946 - DNA, 21 bp, Artificial sequence
  SiRNA target sequence
tagaccgttagtcaaggattt

SEQ ID NO: 129947 - DNA, 21 bp, Artificial sequence
  SiRNA target sequence
agaccgttagtcaaggattta

SEQ ID NO: 129948 - DNA, 21 bp, Artificial sequence
  SiRNA target sequence
gaccgttagtcaaggatttat

SEQ ID NO: 129949 - DNA, 21 bp, Artificial sequence
  SiRNA target sequence
accgttagtcaaggatttatc

SEQ ID NO: 129950 - DNA, 21 bp, Artificial sequence
  SiRNA target sequence
ccgttagtcaaggatttatcg

SEQ ID NO: 129951 - DNA, 21 bp, Artificial sequence
  SiRNA target sequence
cgttagtcaaggatttatcga

SEQ ID NO: 129952 - DNA, 21 bp, Artificial sequence
  SiRNA target sequence
gttagtcaaggatttatcgaa

SEQ ID NO: 129953 - DNA, 21 bp, Artificial sequence
  SiRNA target sequence
ttagtcaaggatttatcgaaa

SEQ ID NO: 129954 - DNA, 21 bp, Artificial sequence
  SiRNA target sequence
tagtcaaggatttatcgaaaa

SEQ ID NO: 129955 - DNA, 21 bp, Artificial sequence
  SiRNA target sequence
agtcaaggatttatcgaaaag

SEQ ID NO: 129956 - DNA, 21 bp, Artificial sequence
  SiRNA target sequence
gtcaaggatttatcgaaaagt

SEQ ID NO: 129957 - DNA, 21 bp, Artificial sequence
  SiRNA target sequence
tcaaggatttatcgaaaagtt

SEQ ID NO: 129958 - DNA, 21 bp, Artificial sequence
  SiRNA target sequence
caaggatttatcgaaaagttc

SEQ ID NO: 129959 - DNA, 21 bp, Artificial sequence
  SiRNA target sequence
aaggatttatcgaaaagttca

SEQ ID NO: 129960 - DNA, 21 bp, Artificial sequence
  SiRNA target sequence
aggatttatcgaaaagttcaa

SEQ ID NO: 129961 - DNA, 21 bp, Artificial sequence
  SiRNA target sequence
ggatttatcgaaaagttcaac

SEQ ID NO: 129962 - DNA, 21 bp, Artificial sequence
  SiRNA target sequence
gatttatcgaaaagttcaaca

SEQ ID NO: 129963 - DNA, 21 bp, Artificial sequence
  SiRNA target sequence
atttatcgaaaagttcaacag

SEQ ID NO: 129964 - DNA, 21 bp, Artificial sequence
  SiRNA target sequence
tttatcgaaaagttcaacaga

SEQ ID NO: 129965 - DNA, 21 bp, Artificial sequence
  SiRNA target sequence
ttatcgaaaagttcaacagaa

SEQ ID NO: 129966 - DNA, 21 bp, Artificial sequence
  SiRNA target sequence
tatcgaaaagttcaacagaaa

SEQ ID NO: 129967 - DNA, 21 bp, Artificial sequence
  SiRNA target sequence
atcgaaaagttcaacagaaaa

SEQ ID NO: 129968 - DNA, 21 bp, Artificial sequence
  SiRNA target sequence
tcgaaaagttcaacagaaaag

SEQ ID NO: 129969 - DNA, 21 bp, Artificial sequence
  SiRNA target sequence
cgaaaagttcaacagaaaaga

SEQ ID NO: 129970 - DNA, 21 bp, Artificial sequence
  SiRNA target sequence
gaaaagttcaacagaaaagat

SEQ ID NO: 129971 - DNA, 21 bp, Artificial sequence
  SiRNA target sequence
aaaagttcaacagaaaagata

SEQ ID NO: 129972 - DNA, 21 bp, Artificial sequence
  SiRNA target sequence
aaagttcaacagaaaagatat

SEQ ID NO: 129973 - DNA, 21 bp, Artificial sequence
  SiRNA target sequence
aagttcaacagaaaagatatg

SEQ ID NO: 129974 - DNA, 21 bp, Artificial sequence
  SiRNA target sequence
agttcaacagaaaagatatgt

SEQ ID NO: 129975 - DNA, 21 bp, Artificial sequence
  SiRNA target sequence
gttcaacagaaaagatatgta

SEQ ID NO: 129976 - DNA, 21 bp, Artificial sequence
  SiRNA target sequence
ttcaacagaaaagatatgtag

SEQ ID NO: 129977 - DNA, 21 bp, Artificial sequence
  SiRNA target sequence
tcaacagaaaagatatgtaga

SEQ ID NO: 129978 - DNA, 21 bp, Artificial sequence
  SiRNA target sequence
caacagaaaagatatgtagaa

SEQ ID NO: 129979 - DNA, 21 bp, Artificial sequence
  SiRNA target sequence
aacagaaaagatatgtagaaa

SEQ ID NO: 129980 - DNA, 21 bp, Artificial sequence
  SiRNA target sequence
acagaaaagatatgtagaaaa

SEQ ID NO: 129981 - DNA, 21 bp, Artificial sequence
  SiRNA target sequence
cagaaaagatatgtagaaaac

SEQ ID NO: 129982 - DNA, 21 bp, Artificial sequence
  SiRNA target sequence
agaaaagatatgtagaaaaca

SEQ ID NO: 129983 - DNA, 21 bp, Artificial sequence
  SiRNA target sequence
gaaaagatatgtagaaaacat

SEQ ID NO: 129984 - DNA, 21 bp, Artificial sequence
  SiRNA target sequence
aaaagatatgtagaaaacata

SEQ ID NO: 129985 - DNA, 21 bp, Artificial sequence
  SiRNA target sequence
aaagatatgtagaaaacatac

SEQ ID NO: 129986 - DNA, 21 bp, Artificial sequence
  SiRNA target sequence
aagatatgtagaaaacatact

SEQ ID NO: 129987 - DNA, 21 bp, Artificial sequence
  SiRNA target sequence
agatatgtagaaaacatacta

SEQ ID NO: 129988 - DNA, 21 bp, Artificial sequence
  SiRNA target sequence
gatatgtagaaaacatactat

SEQ ID NO: 129989 - DNA, 21 bp, Artificial sequence
  SiRNA target sequence
atatgtagaaaacatactata

SEQ ID NO: 129990 - DNA, 21 bp, Artificial sequence
  SiRNA target sequence
tatgtagaaaacatactataa

SEQ ID NO: 129991 - DNA, 21 bp, Artificial sequence
  SiRNA target sequence
atgtagaaaacatactataag

SEQ ID NO: 129992 - DNA, 21 bp, Artificial sequence
  SiRNA target sequence
tgtagaaaacatactataaga

SEQ ID NO: 129993 - DNA, 21 bp, Artificial sequence
  SiRNA target sequence
gtagaaaacatactataagaa

SEQ ID NO: 129994 - DNA, 21 bp, Artificial sequence
  SiRNA target sequence
tagaaaacatactataagaat

SEQ ID NO: 129995 - DNA, 21 bp, Artificial sequence
  SiRNA target sequence
agaaaacatactataagaata

SEQ ID NO: 129996 - DNA, 21 bp, Artificial sequence
  SiRNA target sequence
gaaaacatactataagaatag

SEQ ID NO: 129997 - DNA, 21 bp, Artificial sequence
  SiRNA target sequence
aaaacatactataagaataga

SEQ ID NO: 129998 - DNA, 21 bp, Artificial sequence
  SiRNA target sequence
aaacatactataagaatagat

SEQ ID NO: 129999 - DNA, 21 bp, Artificial sequence
  SiRNA target sequence
aacatactataagaatagata

SEQ ID NO: 130000 - DNA, 21 bp, Artificial sequence
  SiRNA target sequence
acatactataagaatagataa

SEQ ID NO: 130001 - DNA, 21 bp, Artificial sequence
  SiRNA target sequence
catactataagaatagataaa

SEQ ID NO: 130002 - DNA, 21 bp, Artificial sequence
  SiRNA target sequence
atactataagaatagataaag

SEQ ID NO: 130003 - DNA, 21 bp, Artificial sequence
  SiRNA target sequence
tactataagaatagataaaga

SEQ ID NO: 130004 - DNA, 21 bp, Artificial sequence
  SiRNA target sequence
actataagaatagataaagac

SEQ ID NO: 130005 - DNA, 21 bp, Artificial sequence
  SiRNA target sequence
ctataagaatagataaagaca

SEQ ID NO: 130006 - DNA, 21 bp, Artificial sequence
  SiRNA target sequence
tataagaatagataaagacaa

SEQ ID NO: 130007 - DNA, 21 bp, Artificial sequence
  SiRNA target sequence
ataagaatagataaagacaat

SEQ ID NO: 130008 - DNA, 21 bp, Artificial sequence
  SiRNA target sequence
taagaatagataaagacaata

SEQ ID NO: 130009 - DNA, 21 bp, Artificial sequence
  SiRNA target sequence
aagaatagataaagacaatat

SEQ ID NO: 130010 - DNA, 21 bp, Artificial sequence
  SiRNA target sequence
agaatagataaagacaatatg

SEQ ID NO: 130011 - DNA, 21 bp, Artificial sequence
  SiRNA target sequence
gaatagataaagacaatatgg

SEQ ID NO: 130012 - DNA, 21 bp, Artificial sequence
  SiRNA target sequence
aatagataaagacaatatggt

SEQ ID NO: 130013 - DNA, 21 bp, Artificial sequence
  SiRNA target sequence
atagataaagacaatatggta

SEQ ID NO: 130014 - DNA, 21 bp, Artificial sequence
  SiRNA target sequence
tagataaagacaatatggtaa

SEQ ID NO: 130015 - DNA, 21 bp, Artificial sequence
  SiRNA target sequence
agataaagacaatatggtaac

SEQ ID NO: 130016 - DNA, 21 bp, Artificial sequence
  SiRNA target sequence
gataaagacaatatggtaact

SEQ ID NO: 130017 - DNA, 21 bp, Artificial sequence
  SiRNA target sequence
ataaagacaatatggtaactg

SEQ ID NO: 130018 - DNA, 21 bp, Artificial sequence
  SiRNA target sequence
taaagacaatatggtaactgt

SEQ ID NO: 130019 - DNA, 21 bp, Artificial sequence
  SiRNA target sequence
aaagacaatatggtaactgta

SEQ ID NO: 130020 - DNA, 21 bp, Artificial sequence
  SiRNA target sequence
aagacaatatggtaactgtaa

SEQ ID NO: 130021 - DNA, 21 bp, Artificial sequence
  SiRNA target sequence
agacaatatggtaactgtaac

SEQ ID NO: 130022 - DNA, 21 bp, Artificial sequence
  SiRNA target sequence
gacaatatggtaactgtaaca

SEQ ID NO: 130023 - DNA, 21 bp, Artificial sequence
  SiRNA target sequence
acaatatggtaactgtaacag

SEQ ID NO: 130024 - DNA, 21 bp, Artificial sequence
  SiRNA target sequence
caatatggtaactgtaacagg

SEQ ID NO: 130025 - DNA, 21 bp, Artificial sequence
  SiRNA target sequence
aatatggtaactgtaacaggt

SEQ ID NO: 130026 - DNA, 21 bp, Artificial sequence
  SiRNA target sequence
atatggtaactgtaacaggtg

SEQ ID NO: 130027 - DNA, 21 bp, Artificial sequence
  SiRNA target sequence
tatggtaactgtaacaggtgg

SEQ ID NO: 130028 - DNA, 21 bp, Artificial sequence
  SiRNA target sequence
atggtaactgtaacaggtggt

SEQ ID NO: 130029 - DNA, 21 bp, Artificial sequence
  SiRNA target sequence
tggtaactgtaacaggtggta

SEQ ID NO: 130030 - DNA, 21 bp, Artificial sequence
  SiRNA target sequence
ggtaactgtaacaggtggtaa

SEQ ID NO: 130031 - DNA, 21 bp, Artificial sequence
  SiRNA target sequence
gtaactgtaacaggtggtaag

SEQ ID NO: 130032 - DNA, 21 bp, Artificial sequence
  SiRNA target sequence
taactgtaacaggtggtaagt

SEQ ID NO: 130033 - DNA, 21 bp, Artificial sequence
  SiRNA target sequence
aactgtaacaggtggtaagtg

SEQ ID NO: 130034 - DNA, 21 bp, Artificial sequence
  SiRNA target sequence
actgtaacaggtggtaagtgg

SEQ ID NO: 130035 - DNA, 21 bp, Artificial sequence
  SiRNA target sequence
ctgtaacaggtggtaagtgga

SEQ ID NO: 130036 - DNA, 21 bp, Artificial sequence
  SiRNA target sequence
tgtaacaggtggtaagtggac

SEQ ID NO: 130037 - DNA, 21 bp, Artificial sequence
  SiRNA target sequence
gtaacaggtggtaagtggaca

SEQ ID NO: 130038 - DNA, 21 bp, Artificial sequence
  SiRNA target sequence
taacaggtggtaagtggacaa

SEQ ID NO: 130039 - DNA, 21 bp, Artificial sequence
  SiRNA target sequence
aacaggtggtaagtggacaat

SEQ ID NO: 130040 - DNA, 21 bp, Artificial sequence
  SiRNA target sequence
acaggtggtaagtggacaatt

SEQ ID NO: 130041 - DNA, 21 bp, Artificial sequence
  SiRNA target sequence
caggtggtaagtggacaattt

SEQ ID NO: 130042 - DNA, 21 bp, Artificial sequence
  SiRNA target sequence
aggtggtaagtggacaatttt

SEQ ID NO: 130043 - DNA, 21 bp, Artificial sequence
  SiRNA target sequence
ggtggtaagtggacaattttt

SEQ ID NO: 130044 - DNA, 21 bp, Artificial sequence
  SiRNA target sequence
gtggtaagtggacaatttttc

SEQ ID NO: 130045 - DNA, 21 bp, Artificial sequence
  SiRNA target sequence
tggtaagtggacaatttttcg

SEQ ID NO: 130046 - DNA, 21 bp, Artificial sequence
  SiRNA target sequence
ggtaagtggacaatttttcga

SEQ ID NO: 130047 - DNA, 21 bp, Artificial sequence
  SiRNA target sequence
gtaagtggacaatttttcgac

SEQ ID NO: 130048 - DNA, 21 bp, Artificial sequence
  SiRNA target sequence
taagtggacaatttttcgact

SEQ ID NO: 130049 - DNA, 21 bp, Artificial sequence
  SiRNA target sequence
aagtggacaatttttcgactt

SEQ ID NO: 130050 - DNA, 21 bp, Artificial sequence
  SiRNA target sequence
agtggacaatttttcgactta

SEQ ID NO: 130051 - DNA, 21 bp, Artificial sequence
  SiRNA target sequence
gtggacaatttttcgacttat

SEQ ID NO: 130052 - DNA, 21 bp, Artificial sequence
  SiRNA target sequence
tggacaatttttcgacttatg

SEQ ID NO: 130053 - DNA, 21 bp, Artificial sequence
  SiRNA target sequence
ggacaatttttcgacttatgg

SEQ ID NO: 130054 - DNA, 21 bp, Artificial sequence
  SiRNA target sequence
gacaatttttcgacttatggg

SEQ ID NO: 130055 - DNA, 21 bp, Artificial sequence
  SiRNA target sequence
acaatttttcgacttatggga

SEQ ID NO: 130056 - DNA, 21 bp, Artificial sequence
  SiRNA target sequence
caatttttcgacttatgggag

SEQ ID NO: 130057 - DNA, 21 bp, Artificial sequence
  SiRNA target sequence
aatttttcgacttatgggaga

SEQ ID NO: 130058 - DNA, 21 bp, Artificial sequence
  SiRNA target sequence
atttttcgacttatgggagaa

SEQ ID NO: 130059 - DNA, 21 bp, Artificial sequence
  SiRNA target sequence
tttttcgacttatgggagaac

SEQ ID NO: 130060 - DNA, 21 bp, Artificial sequence
  SiRNA target sequence
ttttcgacttatgggagaaca

SEQ ID NO: 130061 - DNA, 21 bp, Artificial sequence
  SiRNA target sequence
tttcgacttatgggagaacag

SEQ ID NO: 130062 - DNA, 21 bp, Artificial sequence
  SiRNA target sequence
ttcgacttatgggagaacaga

SEQ ID NO: 130063 - DNA, 21 bp, Artificial sequence
  SiRNA target sequence
tcgacttatgggagaacagac

SEQ ID NO: 130064 - DNA, 21 bp, Artificial sequence
  SiRNA target sequence
cgacttatgggagaacagaca

SEQ ID NO: 130065 - DNA, 21 bp, Artificial sequence
  SiRNA target sequence
gacttatgggagaacagacaa

SEQ ID NO: 130066 - DNA, 21 bp, Artificial sequence
  SiRNA target sequence
acttatgggagaacagacaat

SEQ ID NO: 130067 - DNA, 21 bp, Artificial sequence
  SiRNA target sequence
cttatgggagaacagacaata

SEQ ID NO: 130068 - DNA, 21 bp, Artificial sequence
  SiRNA target sequence
ttatgggagaacagacaataa

SEQ ID NO: 130069 - DNA, 21 bp, Artificial sequence
  SiRNA target sequence
tatgggagaacagacaataaa

SEQ ID NO: 130070 - DNA, 21 bp, Artificial sequence
  SiRNA target sequence
atgggagaacagacaataaat

SEQ ID NO: 130071 - DNA, 21 bp, Artificial sequence
  SiRNA target sequence
tgggagaacagacaataaatc

SEQ ID NO: 130072 - DNA, 21 bp, Artificial sequence
  SiRNA target sequence
gggagaacagacaataaatca

SEQ ID NO: 130073 - DNA, 21 bp, Artificial sequence
  SiRNA target sequence
ggagaacagacaataaatcaa

SEQ ID NO: 130074 - DNA, 21 bp, Artificial sequence
  SiRNA target sequence
gagaacagacaataaatcaaa

SEQ ID NO: 130075 - DNA, 21 bp, Artificial sequence
  SiRNA target sequence
agaacagacaataaatcaaat

SEQ ID NO: 130076 - DNA, 21 bp, Artificial sequence
  SiRNA target sequence
gaacagacaataaatcaaatt

SEQ ID NO: 130077 - DNA, 21 bp, Artificial sequence
  SiRNA target sequence
aacagacaataaatcaaatta

SEQ ID NO: 130078 - DNA, 21 bp, Artificial sequence
  SiRNA target sequence
acagacaataaatcaaattat

SEQ ID NO: 130079 - DNA, 21 bp, Artificial sequence
  SiRNA target sequence
cagacaataaatcaaattata

SEQ ID NO: 130080 - DNA, 21 bp, Artificial sequence
  SiRNA target sequence
agacaataaatcaaattataa

SEQ ID NO: 130081 - DNA, 21 bp, Artificial sequence
  SiRNA target sequence
gacaataaatcaaattataaa

SEQ ID NO: 130082 - DNA, 21 bp, Artificial sequence
  SiRNA target sequence
acaataaatcaaattataaaa

SEQ ID NO: 130083 - DNA, 21 bp, Artificial sequence
  SiRNA target sequence
caataaatcaaattataaaag

SEQ ID NO: 130084 - DNA, 21 bp, Artificial sequence
  SiRNA target sequence
aataaatcaaattataaaagt

SEQ ID NO: 130085 - DNA, 21 bp, Artificial sequence
  SiRNA target sequence
ataaatcaaattataaaagtt

SEQ ID NO: 130086 - DNA, 21 bp, Artificial sequence
  SiRNA target sequence
taaatcaaattataaaagttt

SEQ ID NO: 130087 - DNA, 21 bp, Artificial sequence
  SiRNA target sequence
aaatcaaattataaaagtttt

SEQ ID NO: 130088 - DNA, 21 bp, Artificial sequence
  SiRNA target sequence
aatcaaattataaaagttttt

SEQ ID NO: 130089 - DNA, 21 bp, Artificial sequence
  SiRNA target sequence
atcaaattataaaagttttta

SEQ ID NO: 130090 - DNA, 21 bp, Artificial sequence
  SiRNA target sequence
tcaaattataaaagtttttaa

SEQ ID NO: 130091 - DNA, 21 bp, Artificial sequence
  SiRNA target sequence
caaattataaaagtttttaat

SEQ ID NO: 130092 - DNA, 21 bp, Artificial sequence
  SiRNA target sequence
aaattataaaagtttttaata

SEQ ID NO: 130093 - DNA, 21 bp, Artificial sequence
  SiRNA target sequence
aattataaaagtttttaatat

SEQ ID NO: 130094 - DNA, 21 bp, Artificial sequence
  SiRNA target sequence
attataaaagtttttaatata

SEQ ID NO: 130095 - DNA, 21 bp, Artificial sequence
  SiRNA target sequence
ttataaaagtttttaatataa

SEQ ID NO: 130096 - DNA, 21 bp, Artificial sequence
  SiRNA target sequence
tataaaagtttttaatataaa

SEQ ID NO: 130097 - DNA, 21 bp, Artificial sequence
  SiRNA target sequence
ataaaagtttttaatataaag

SEQ ID NO: 130098 - DNA, 21 bp, Artificial sequence
  SiRNA target sequence
taaaagtttttaatataaagt

SEQ ID NO: 130099 - DNA, 21 bp, Artificial sequence
  SiRNA target sequence
aaaagtttttaatataaagtc

SEQ ID NO: 130100 - DNA, 21 bp, Artificial sequence
  SiRNA target sequence
aaagtttttaatataaagtct

SEQ ID NO: 130101 - DNA, 21 bp, Artificial sequence
  SiRNA target sequence
aagtttttaatataaagtcta

SEQ ID NO: 130102 - DNA, 21 bp, Artificial sequence
  SiRNA target sequence
agtttttaatataaagtctaa

SEQ ID NO: 130103 - DNA, 21 bp, Artificial sequence
  SiRNA target sequence
gtttttaatataaagtctaat

SEQ ID NO: 130104 - DNA, 21 bp, Artificial sequence
  SiRNA target sequence
tttttaatataaagtctaata

SEQ ID NO: 130105 - DNA, 21 bp, Artificial sequence
  SiRNA target sequence
ttttaatataaagtctaataa

SEQ ID NO: 130106 - DNA, 21 bp, Artificial sequence
  SiRNA target sequence
tttaatataaagtctaataaa

SEQ ID NO: 130107 - DNA, 21 bp, Artificial sequence
  SiRNA target sequence
ttaatataaagtctaataaac

SEQ ID NO: 130108 - DNA, 21 bp, Artificial sequence
  SiRNA target sequence
taatataaagtctaataaacc

SEQ ID NO: 130109 - DNA, 21 bp, Artificial sequence
  SiRNA target sequence
aatataaagtctaataaacca

SEQ ID NO: 130110 - DNA, 21 bp, Artificial sequence
  SiRNA target sequence
atataaagtctaataaaccaa

SEQ ID NO: 130111 - DNA, 21 bp, Artificial sequence
  SiRNA target sequence
tataaagtctaataaaccaag

SEQ ID NO: 130112 - DNA, 21 bp, Artificial sequence
  SiRNA target sequence
ataaagtctaataaaccaagt

SEQ ID NO: 130113 - DNA, 21 bp, Artificial sequence
  SiRNA target sequence
taaagtctaataaaccaagta

SEQ ID NO: 130114 - DNA, 21 bp, Artificial sequence
  SiRNA target sequence
aaagtctaataaaccaagtat

SEQ ID NO: 130115 - DNA, 21 bp, Artificial sequence
  SiRNA target sequence
aagtctaataaaccaagtata

SEQ ID NO: 130116 - DNA, 21 bp, Artificial sequence
  SiRNA target sequence
agtctaataaaccaagtataa

SEQ ID NO: 130117 - DNA, 21 bp, Artificial sequence
  SiRNA target sequence
gtctaataaaccaagtataac

SEQ ID NO: 130118 - DNA, 21 bp, Artificial sequence
  SiRNA target sequence
tctaataaaccaagtataaca

SEQ ID NO: 130119 - DNA, 21 bp, Artificial sequence
  SiRNA target sequence
ctaataaaccaagtataacac

SEQ ID NO: 130120 - DNA, 21 bp, Artificial sequence
  SiRNA target sequence
taataaaccaagtataacaca

SEQ ID NO: 130121 - DNA, 21 bp, Artificial sequence
  SiRNA target sequence
aataaaccaagtataacacaa

SEQ ID NO: 130122 - DNA, 21 bp, Artificial sequence
  SiRNA target sequence
ataaaccaagtataacacaat

SEQ ID NO: 130123 - DNA, 21 bp, Artificial sequence
  SiRNA target sequence
taaaccaagtataacacaata

SEQ ID NO: 130124 - DNA, 21 bp, Artificial sequence
  SiRNA target sequence
aaaccaagtataacacaatat

SEQ ID NO: 130125 - DNA, 21 bp, Artificial sequence
  SiRNA target sequence
aaccaagtataacacaatatc

SEQ ID NO: 130126 - DNA, 21 bp, Artificial sequence
  SiRNA target sequence
accaagtataacacaatatct

SEQ ID NO: 130127 - DNA, 21 bp, Artificial sequence
  SiRNA target sequence
ccaagtataacacaatatctt

SEQ ID NO: 130128 - DNA, 21 bp, Artificial sequence
  SiRNA target sequence
caagtataacacaatatcttc

SEQ ID NO: 130129 - DNA, 21 bp, Artificial sequence
  SiRNA target sequence
aagtataacacaatatcttcc

SEQ ID NO: 130130 - DNA, 21 bp, Artificial sequence
  SiRNA target sequence
agtataacacaatatcttcct

SEQ ID NO: 130131 - DNA, 21 bp, Artificial sequence
  SiRNA target sequence
gtataacacaatatcttcctg

SEQ ID NO: 130132 - DNA, 21 bp, Artificial sequence
  SiRNA target sequence
tataacacaatatcttcctgt

SEQ ID NO: 130133 - DNA, 21 bp, Artificial sequence
  SiRNA target sequence
ataacacaatatcttcctgtt

SEQ ID NO: 130134 - DNA, 21 bp, Artificial sequence
  SiRNA target sequence
taacacaatatcttcctgttt

SEQ ID NO: 130135 - DNA, 21 bp, Artificial sequence
  SiRNA target sequence
aacacaatatcttcctgtttt

SEQ ID NO: 130136 - DNA, 21 bp, Artificial sequence
  SiRNA target sequence
acacaatatcttcctgttttg

SEQ ID NO: 130137 - DNA, 21 bp, Artificial sequence
  SiRNA target sequence
cacaatatcttcctgttttgg

SEQ ID NO: 130138 - DNA, 21 bp, Artificial sequence
  SiRNA target sequence
acaatatcttcctgttttggg

SEQ ID NO: 130139 - DNA, 21 bp, Artificial sequence
  SiRNA target sequence
caatatcttcctgttttggga

SEQ ID NO: 130140 - DNA, 21 bp, Artificial sequence
  SiRNA target sequence
aatatcttcctgttttgggat

SEQ ID NO: 130141 - DNA, 21 bp, Artificial sequence
  SiRNA target sequence
atatcttcctgttttgggatc

SEQ ID NO: 130142 - DNA, 21 bp, Artificial sequence
  SiRNA target sequence
tatcttcctgttttgggatca

SEQ ID NO: 130143 - DNA, 21 bp, Artificial sequence
  SiRNA target sequence
atcttcctgttttgggatcac

SEQ ID NO: 130144 - DNA, 21 bp, Artificial sequence
  SiRNA target sequence
tcttcctgttttgggatcaca

SEQ ID NO: 130145 - DNA, 21 bp, Artificial sequence
  SiRNA target sequence
cttcctgttttgggatcacag

SEQ ID NO: 130146 - DNA, 21 bp, Artificial sequence
  SiRNA target sequence
ttcctgttttgggatcacagg

SEQ ID NO: 130147 - DNA, 21 bp, Artificial sequence
  SiRNA target sequence
tcctgttttgggatcacaggg

SEQ ID NO: 130148 - DNA, 21 bp, Artificial sequence
  SiRNA target sequence
cctgttttgggatcacaggga

SEQ ID NO: 130149 - DNA, 21 bp, Artificial sequence
  SiRNA target sequence
ctgttttgggatcacagggat

SEQ ID NO: 130150 - DNA, 21 bp, Artificial sequence
  SiRNA target sequence
tgttttgggatcacagggata

SEQ ID NO: 130151 - DNA, 21 bp, Artificial sequence
  SiRNA target sequence
gttttgggatcacagggatat

SEQ ID NO: 130152 - DNA, 21 bp, Artificial sequence
  SiRNA target sequence
ttttgggatcacagggatata

SEQ ID NO: 130153 - DNA, 21 bp, Artificial sequence
  SiRNA target sequence
tttgggatcacagggatatac

SEQ ID NO: 130154 - DNA, 21 bp, Artificial sequence
  SiRNA target sequence
ttgggatcacagggatatact

SEQ ID NO: 130155 - DNA, 21 bp, Artificial sequence
  SiRNA target sequence
tgggatcacagggatatacta

SEQ ID NO: 130156 - DNA, 21 bp, Artificial sequence
  SiRNA target sequence
gggatcacagggatatactaa

SEQ ID NO: 130157 - DNA, 21 bp, Artificial sequence
  SiRNA target sequence
ggatcacagggatatactaaa

SEQ ID NO: 130158 - DNA, 21 bp, Artificial sequence
  SiRNA target sequence
gatcacagggatatactaaag

SEQ ID NO: 130159 - DNA, 21 bp, Artificial sequence
  SiRNA target sequence
atcacagggatatactaaagc

SEQ ID NO: 130160 - DNA, 21 bp, Artificial sequence
  SiRNA target sequence
tcacagggatatactaaagct

SEQ ID NO: 130161 - DNA, 21 bp, Artificial sequence
  SiRNA target sequence
cacagggatatactaaagcta

SEQ ID NO: 130162 - DNA, 21 bp, Artificial sequence
  SiRNA target sequence
acagggatatactaaagctac

SEQ ID NO: 130163 - DNA, 21 bp, Artificial sequence
  SiRNA target sequence
cagggatatactaaagctaca

SEQ ID NO: 130164 - DNA, 21 bp, Artificial sequence
  SiRNA target sequence
agggatatactaaagctacag

SEQ ID NO: 130165 - DNA, 21 bp, Artificial sequence
  SiRNA target sequence
gggatatactaaagctacaga

SEQ ID NO: 130166 - DNA, 21 bp, Artificial sequence
  SiRNA target sequence
ggatatactaaagctacagaa

SEQ ID NO: 130167 - DNA, 21 bp, Artificial sequence
  SiRNA target sequence
gatatactaaagctacagaat

SEQ ID NO: 130168 - DNA, 21 bp, Artificial sequence
  SiRNA target sequence
atatactaaagctacagaatt

SEQ ID NO: 130169 - DNA, 21 bp, Artificial sequence
  SiRNA target sequence
tatactaaagctacagaattt

SEQ ID NO: 130170 - DNA, 21 bp, Artificial sequence
  SiRNA target sequence
atactaaagctacagaatttg

SEQ ID NO: 130171 - DNA, 21 bp, Artificial sequence
  SiRNA target sequence
tactaaagctacagaatttga

SEQ ID NO: 130172 - DNA, 21 bp, Artificial sequence
  SiRNA target sequence
actaaagctacagaatttgat

SEQ ID NO: 130173 - DNA, 21 bp, Artificial sequence
  SiRNA target sequence
ctaaagctacagaatttgatt

SEQ ID NO: 130174 - DNA, 21 bp, Artificial sequence
  SiRNA target sequence
taaagctacagaatttgattt

SEQ ID NO: 130175 - DNA, 21 bp, Artificial sequence
  SiRNA target sequence
aaagctacagaatttgatttg

SEQ ID NO: 130176 - DNA, 21 bp, Artificial sequence
  SiRNA target sequence
aagctacagaatttgatttgg

SEQ ID NO: 130177 - DNA, 21 bp, Artificial sequence
  SiRNA target sequence
agctacagaatttgatttggc

SEQ ID NO: 130178 - DNA, 21 bp, Artificial sequence
  SiRNA target sequence
gctacagaatttgatttggca

SEQ ID NO: 130179 - DNA, 21 bp, Artificial sequence
  SiRNA target sequence
ctacagaatttgatttggcac

SEQ ID NO: 130180 - DNA, 21 bp, Artificial sequence
  SiRNA target sequence
tacagaatttgatttggcact

SEQ ID NO: 130181 - DNA, 21 bp, Artificial sequence
  SiRNA target sequence
acagaatttgatttggcactt

SEQ ID NO: 130182 - DNA, 21 bp, Artificial sequence
  SiRNA target sequence
cagaatttgatttggcactta

SEQ ID NO: 130183 - DNA, 21 bp, Artificial sequence
  SiRNA target sequence
agaatttgatttggcacttac

SEQ ID NO: 130184 - DNA, 21 bp, Artificial sequence
  SiRNA target sequence
gaatttgatttggcacttact

SEQ ID NO: 130185 - DNA, 21 bp, Artificial sequence
  SiRNA target sequence
aatttgatttggcacttactt

SEQ ID NO: 130186 - DNA, 21 bp, Artificial sequence
  SiRNA target sequence
atttgatttggcacttacttt

SEQ ID NO: 130187 - DNA, 21 bp, Artificial sequence
  SiRNA target sequence
tttgatttggcacttacttta

SEQ ID NO: 130188 - DNA, 21 bp, Artificial sequence
  SiRNA target sequence
ttgatttggcacttactttaa

SEQ ID NO: 130189 - DNA, 21 bp, Artificial sequence
  SiRNA target sequence
tgatttggcacttactttaaa

SEQ ID NO: 130190 - DNA, 21 bp, Artificial sequence
  SiRNA target sequence
gatttggcacttactttaaat

SEQ ID NO: 130191 - DNA, 21 bp, Artificial sequence
  SiRNA target sequence
atttggcacttactttaaata

SEQ ID NO: 130192 - DNA, 21 bp, Artificial sequence
  SiRNA target sequence
tttggcacttactttaaatat

SEQ ID NO: 130193 - DNA, 21 bp, Artificial sequence
  SiRNA target sequence
ttggcacttactttaaatatt

SEQ ID NO: 130194 - DNA, 21 bp, Artificial sequence
  SiRNA target sequence
tggcacttactttaaatattc

SEQ ID NO: 130195 - DNA, 21 bp, Artificial sequence
  SiRNA target sequence
ggcacttactttaaatattcc

SEQ ID NO: 130196 - DNA, 21 bp, Artificial sequence
  SiRNA target sequence
gcacttactttaaatattcca

SEQ ID NO: 130197 - DNA, 21 bp, Artificial sequence
  SiRNA target sequence
cacttactttaaatattccag

SEQ ID NO: 130198 - DNA, 21 bp, Artificial sequence
  SiRNA target sequence
acttactttaaatattccaga

SEQ ID NO: 130199 - DNA, 21 bp, Artificial sequence
  SiRNA target sequence
cttactttaaatattccagaa

SEQ ID NO: 130200 - DNA, 21 bp, Artificial sequence
  SiRNA target sequence
ttactttaaatattccagaag

SEQ ID NO: 130201 - DNA, 21 bp, Artificial sequence
  SiRNA target sequence
tactttaaatattccagaaga

SEQ ID NO: 130202 - DNA, 21 bp, Artificial sequence
  SiRNA target sequence
actttaaatattccagaagat

SEQ ID NO: 130203 - DNA, 21 bp, Artificial sequence
  SiRNA target sequence
ctttaaatattccagaagata

SEQ ID NO: 130204 - DNA, 21 bp, Artificial sequence
  SiRNA target sequence
tttaaatattccagaagatat

SEQ ID NO: 130205 - DNA, 21 bp, Artificial sequence
  SiRNA target sequence
ttaaatattccagaagatata

SEQ ID NO: 130206 - DNA, 21 bp, Artificial sequence
  SiRNA target sequence
taaatattccagaagatatag

SEQ ID NO: 130207 - DNA, 21 bp, Artificial sequence
  SiRNA target sequence
aaatattccagaagatatagc

SEQ ID NO: 130208 - DNA, 21 bp, Artificial sequence
  SiRNA target sequence
aatattccagaagatatagct

SEQ ID NO: 130209 - DNA, 21 bp, Artificial sequence
  SiRNA target sequence
atattccagaagatatagcta

SEQ ID NO: 130210 - DNA, 21 bp, Artificial sequence
  SiRNA target sequence
tattccagaagatatagctaa

SEQ ID NO: 130211 - DNA, 21 bp, Artificial sequence
  SiRNA target sequence
attccagaagatatagctaag

SEQ ID NO: 130212 - DNA, 21 bp, Artificial sequence
  SiRNA target sequence
ttccagaagatatagctaagc

SEQ ID NO: 130213 - DNA, 21 bp, Artificial sequence
  SiRNA target sequence
tccagaagatatagctaagca

SEQ ID NO: 130214 - DNA, 21 bp, Artificial sequence
  SiRNA target sequence
ccagaagatatagctaagcat

SEQ ID NO: 130215 - DNA, 21 bp, Artificial sequence
  SiRNA target sequence
cagaagatatagctaagcatt

SEQ ID NO: 130216 - DNA, 21 bp, Artificial sequence
  SiRNA target sequence
agaagatatagctaagcattt

SEQ ID NO: 130217 - DNA, 21 bp, Artificial sequence
  SiRNA target sequence
gaagatatagctaagcattta

SEQ ID NO: 130218 - DNA, 21 bp, Artificial sequence
  SiRNA target sequence
aagatatagctaagcatttag

SEQ ID NO: 130219 - DNA, 21 bp, Artificial sequence
  SiRNA target sequence
agatatagctaagcatttagc

SEQ ID NO: 130220 - DNA, 21 bp, Artificial sequence
  SiRNA target sequence
gatatagctaagcatttagct

SEQ ID NO: 130221 - DNA, 21 bp, Artificial sequence
  SiRNA target sequence
atatagctaagcatttagcta

SEQ ID NO: 130222 - DNA, 21 bp, Artificial sequence
  SiRNA target sequence
tatagctaagcatttagctac

SEQ ID NO: 130223 - DNA, 21 bp, Artificial sequence
  SiRNA target sequence
atagctaagcatttagctaca

SEQ ID NO: 130224 - DNA, 21 bp, Artificial sequence
  SiRNA target sequence
tagctaagcatttagctacaa

SEQ ID NO: 130225 - DNA, 21 bp, Artificial sequence
  SiRNA target sequence
agctaagcatttagctacaac

SEQ ID NO: 130226 - DNA, 21 bp, Artificial sequence
  SiRNA target sequence
gctaagcatttagctacaact

SEQ ID NO: 130227 - DNA, 21 bp, Artificial sequence
  SiRNA target sequence
ctaagcatttagctacaactt

SEQ ID NO: 130228 - DNA, 21 bp, Artificial sequence
  SiRNA target sequence
taagcatttagctacaactta

SEQ ID NO: 130229 - DNA, 21 bp, Artificial sequence
  SiRNA target sequence
aagcatttagctacaacttat

SEQ ID NO: 130230 - DNA, 21 bp, Artificial sequence
  SiRNA target sequence
agcatttagctacaacttatg

SEQ ID NO: 130231 - DNA, 21 bp, Artificial sequence
  SiRNA target sequence
gcatttagctacaacttatgg

SEQ ID NO: 130232 - DNA, 21 bp, Artificial sequence
  SiRNA target sequence
catttagctacaacttatggt

SEQ ID NO: 130233 - DNA, 21 bp, Artificial sequence
  SiRNA target sequence
atttagctacaacttatggta

SEQ ID NO: 130234 - DNA, 21 bp, Artificial sequence
  SiRNA target sequence
tttagctacaacttatggtac

SEQ ID NO: 130235 - DNA, 21 bp, Artificial sequence
  SiRNA target sequence
ttagctacaacttatggtacc

SEQ ID NO: 130236 - DNA, 21 bp, Artificial sequence
  SiRNA target sequence
tagctacaacttatggtacca

SEQ ID NO: 130237 - DNA, 21 bp, Artificial sequence
  SiRNA target sequence
agctacaacttatggtaccaa

SEQ ID NO: 130238 - DNA, 21 bp, Artificial sequence
  SiRNA target sequence
gctacaacttatggtaccaaa

SEQ ID NO: 130239 - DNA, 21 bp, Artificial sequence
  SiRNA target sequence
ctacaacttatggtaccaaag

SEQ ID NO: 130240 - DNA, 21 bp, Artificial sequence
  SiRNA target sequence
tacaacttatggtaccaaagc

SEQ ID NO: 130241 - DNA, 21 bp, Artificial sequence
  SiRNA target sequence
acaacttatggtaccaaagct

SEQ ID NO: 130242 - DNA, 21 bp, Artificial sequence
  SiRNA target sequence
caacttatggtaccaaagctt

SEQ ID NO: 130243 - DNA, 21 bp, Artificial sequence
  SiRNA target sequence
aacttatggtaccaaagctta

SEQ ID NO: 130244 - DNA, 21 bp, Artificial sequence
  SiRNA target sequence
acttatggtaccaaagcttac

SEQ ID NO: 130245 - DNA, 21 bp, Artificial sequence
  SiRNA target sequence
cttatggtaccaaagcttaca

SEQ ID NO: 130246 - DNA, 21 bp, Artificial sequence
  SiRNA target sequence
ttatggtaccaaagcttacaa

SEQ ID NO: 130247 - DNA, 21 bp, Artificial sequence
  SiRNA target sequence
tatggtaccaaagcttacaat

SEQ ID NO: 130248 - DNA, 21 bp, Artificial sequence
  SiRNA target sequence
atggtaccaaagcttacaatt

SEQ ID NO: 130249 - DNA, 21 bp, Artificial sequence
  SiRNA target sequence
tggtaccaaagcttacaattt

SEQ ID NO: 130250 - DNA, 21 bp, Artificial sequence
  SiRNA target sequence
ggtaccaaagcttacaatttc

SEQ ID NO: 130251 - DNA, 21 bp, Artificial sequence
  SiRNA target sequence
gtaccaaagcttacaatttct

SEQ ID NO: 130252 - DNA, 21 bp, Artificial sequence
  SiRNA target sequence
taccaaagcttacaatttctc

SEQ ID NO: 130253 - DNA, 21 bp, Artificial sequence
  SiRNA target sequence
accaaagcttacaatttctct

SEQ ID NO: 130254 - DNA, 21 bp, Artificial sequence
  SiRNA target sequence
ccaaagcttacaatttctctg

SEQ ID NO: 130255 - DNA, 21 bp, Artificial sequence
  SiRNA target sequence
caaagcttacaatttctctga

SEQ ID NO: 130256 - DNA, 21 bp, Artificial sequence
  SiRNA target sequence
aaagcttacaatttctctgaa

SEQ ID NO: 130257 - DNA, 21 bp, Artificial sequence
  SiRNA target sequence
aagcttacaatttctctgaat

SEQ ID NO: 130258 - DNA, 21 bp, Artificial sequence
  SiRNA target sequence
agcttacaatttctctgaata

SEQ ID NO: 130259 - DNA, 21 bp, Artificial sequence
  SiRNA target sequence
gcttacaatttctctgaatac

SEQ ID NO: 130260 - DNA, 21 bp, Artificial sequence
  SiRNA target sequence
cttacaatttctctgaatact

SEQ ID NO: 130261 - DNA, 21 bp, Artificial sequence
  SiRNA target sequence
ttacaatttctctgaatactt

SEQ ID NO: 130262 - DNA, 21 bp, Artificial sequence
  SiRNA target sequence
tacaatttctctgaatacttt

SEQ ID NO: 130263 - DNA, 21 bp, Artificial sequence
  SiRNA target sequence
acaatttctctgaatacttta

SEQ ID NO: 130264 - DNA, 21 bp, Artificial sequence
  SiRNA target sequence
caatttctctgaatactttaa

SEQ ID NO: 130265 - DNA, 21 bp, Artificial sequence
  SiRNA target sequence
aatttctctgaatactttaat

SEQ ID NO: 130266 - DNA, 21 bp, Artificial sequence
  SiRNA target sequence
atttctctgaatactttaatg

SEQ ID NO: 130267 - DNA, 21 bp, Artificial sequence
  SiRNA target sequence
tttctctgaatactttaatgg

SEQ ID NO: 130268 - DNA, 21 bp, Artificial sequence
  SiRNA target sequence
ttctctgaatactttaatggg

SEQ ID NO: 130269 - DNA, 21 bp, Artificial sequence
  SiRNA target sequence
tctctgaatactttaatgggt

SEQ ID NO: 130270 - DNA, 21 bp, Artificial sequence
  SiRNA target sequence
ctctgaatactttaatgggtc

SEQ ID NO: 130271 - DNA, 21 bp, Artificial sequence
  SiRNA target sequence
tctgaatactttaatgggtca

SEQ ID NO: 130272 - DNA, 21 bp, Artificial sequence
  SiRNA target sequence
ctgaatactttaatgggtcat

SEQ ID NO: 130273 - DNA, 21 bp, Artificial sequence
  SiRNA target sequence
tgaatactttaatgggtcata

SEQ ID NO: 130274 - DNA, 21 bp, Artificial sequence
  SiRNA target sequence
gaatactttaatgggtcatac

SEQ ID NO: 130275 - DNA, 21 bp, Artificial sequence
  SiRNA target sequence
aatactttaatgggtcataca

SEQ ID NO: 130276 - DNA, 21 bp, Artificial sequence
  SiRNA target sequence
atactttaatgggtcatacac

SEQ ID NO: 130277 - DNA, 21 bp, Artificial sequence
  SiRNA target sequence
tactttaatgggtcatacacc

SEQ ID NO: 130278 - DNA, 21 bp, Artificial sequence
  SiRNA target sequence
actttaatgggtcatacacca

SEQ ID NO: 130279 - DNA, 21 bp, Artificial sequence
  SiRNA target sequence
ctttaatgggtcatacaccag

SEQ ID NO: 130280 - DNA, 21 bp, Artificial sequence
  SiRNA target sequence
tttaatgggtcatacaccaga

SEQ ID NO: 130281 - DNA, 21 bp, Artificial sequence
  SiRNA target sequence
ttaatgggtcatacaccagac

SEQ ID NO: 130282 - DNA, 21 bp, Artificial sequence
  SiRNA target sequence
taatgggtcatacaccagact

SEQ ID NO: 130283 - DNA, 21 bp, Artificial sequence
  SiRNA target sequence
aatgggtcatacaccagactt

SEQ ID NO: 130284 - DNA, 21 bp, Artificial sequence
  SiRNA target sequence
atgggtcatacaccagactta

SEQ ID NO: 130285 - DNA, 21 bp, Artificial sequence
  SiRNA target sequence
tgggtcatacaccagacttac

SEQ ID NO: 130286 - DNA, 21 bp, Artificial sequence
  SiRNA target sequence
gggtcatacaccagacttaca

SEQ ID NO: 130287 - DNA, 21 bp, Artificial sequence
  SiRNA target sequence
ggtcatacaccagacttacag

SEQ ID NO: 130288 - DNA, 21 bp, Artificial sequence
  SiRNA target sequence
gtcatacaccagacttacaga

SEQ ID NO: 130289 - DNA, 21 bp, Artificial sequence
  SiRNA target sequence
tcatacaccagacttacagat

SEQ ID NO: 130290 - DNA, 21 bp, Artificial sequence
  SiRNA target sequence
catacaccagacttacagatg

SEQ ID NO: 130291 - DNA, 21 bp, Artificial sequence
  SiRNA target sequence
atacaccagacttacagatgg

SEQ ID NO: 130292 - DNA, 21 bp, Artificial sequence
  SiRNA target sequence
tacaccagacttacagatggt

SEQ ID NO: 130293 - DNA, 21 bp, Artificial sequence
  SiRNA target sequence
acaccagacttacagatggtt

SEQ ID NO: 130294 - DNA, 21 bp, Artificial sequence
  SiRNA target sequence
caccagacttacagatggtta

SEQ ID NO: 130295 - DNA, 21 bp, Artificial sequence
  SiRNA target sequence
accagacttacagatggttat

SEQ ID NO: 130296 - DNA, 21 bp, Artificial sequence
  SiRNA target sequence
ccagacttacagatggttatc

SEQ ID NO: 130297 - DNA, 21 bp, Artificial sequence
  SiRNA target sequence
cagacttacagatggttatcc

SEQ ID NO: 130298 - DNA, 21 bp, Artificial sequence
  SiRNA target sequence
agacttacagatggttatcct

SEQ ID NO: 130299 - DNA, 21 bp, Artificial sequence
  SiRNA target sequence
gacttacagatggttatcctt

SEQ ID NO: 130300 - DNA, 21 bp, Artificial sequence
  SiRNA target sequence
acttacagatggttatcctta

SEQ ID NO: 130301 - DNA, 21 bp, Artificial sequence
  SiRNA target sequence
cttacagatggttatccttat

SEQ ID NO: 130302 - DNA, 21 bp, Artificial sequence
  SiRNA target sequence
ttacagatggttatccttata

SEQ ID NO: 130303 - DNA, 21 bp, Artificial sequence
  SiRNA target sequence
tacagatggttatccttatac

SEQ ID NO: 130304 - DNA, 21 bp, Artificial sequence
  SiRNA target sequence
acagatggttatccttataca

SEQ ID NO: 130305 - DNA, 21 bp, Artificial sequence
  SiRNA target sequence
cagatggttatccttatacaa

SEQ ID NO: 130306 - DNA, 21 bp, Artificial sequence
  SiRNA target sequence
agatggttatccttatacaaa

SEQ ID NO: 130307 - DNA, 21 bp, Artificial sequence
  SiRNA target sequence
gatggttatccttatacaaaa

SEQ ID NO: 130308 - DNA, 21 bp, Artificial sequence
  SiRNA target sequence
atggttatccttatacaaaag

SEQ ID NO: 130309 - DNA, 21 bp, Artificial sequence
  SiRNA target sequence
tggttatccttatacaaaaga

SEQ ID NO: 130310 - DNA, 21 bp, Artificial sequence
  SiRNA target sequence
ggttatccttatacaaaagaa

SEQ ID NO: 130311 - DNA, 21 bp, Artificial sequence
  SiRNA target sequence
gttatccttatacaaaagaag

SEQ ID NO: 130312 - DNA, 21 bp, Artificial sequence
  SiRNA target sequence
ttatccttatacaaaagaaga

SEQ ID NO: 130313 - DNA, 21 bp, Artificial sequence
  SiRNA target sequence
tatccttatacaaaagaagaa

SEQ ID NO: 130314 - DNA, 21 bp, Artificial sequence
  SiRNA target sequence
atccttatacaaaagaagaaa

SEQ ID NO: 130315 - DNA, 21 bp, Artificial sequence
  SiRNA target sequence
tccttatacaaaagaagaaat

SEQ ID NO: 130316 - DNA, 21 bp, Artificial sequence
  SiRNA target sequence
ccttatacaaaagaagaaata

SEQ ID NO: 130317 - DNA, 21 bp, Artificial sequence
  SiRNA target sequence
cttatacaaaagaagaaatag

SEQ ID NO: 130318 - DNA, 21 bp, Artificial sequence
  SiRNA target sequence
ttatacaaaagaagaaatagt

SEQ ID NO: 130319 - DNA, 21 bp, Artificial sequence
  SiRNA target sequence
tatacaaaagaagaaatagta

SEQ ID NO: 130320 - DNA, 21 bp, Artificial sequence
  SiRNA target sequence
atacaaaagaagaaatagtat

SEQ ID NO: 130321 - DNA, 21 bp, Artificial sequence
  SiRNA target sequence
tacaaaagaagaaatagtata

SEQ ID NO: 130322 - DNA, 21 bp, Artificial sequence
  SiRNA target sequence
acaaaagaagaaatagtatat

SEQ ID NO: 130323 - DNA, 21 bp, Artificial sequence
  SiRNA target sequence
caaaagaagaaatagtatatt

SEQ ID NO: 130324 - DNA, 21 bp, Artificial sequence
  SiRNA target sequence
aaaagaagaaatagtatattg

SEQ ID NO: 130325 - DNA, 21 bp, Artificial sequence
  SiRNA target sequence
aaagaagaaatagtatattgt

SEQ ID NO: 130326 - DNA, 21 bp, Artificial sequence
  SiRNA target sequence
aagaagaaatagtatattgta

SEQ ID NO: 130327 - DNA, 21 bp, Artificial sequence
  SiRNA target sequence
agaagaaatagtatattgtat

SEQ ID NO: 130328 - DNA, 21 bp, Artificial sequence
  SiRNA target sequence
gaagaaatagtatattgtatc

SEQ ID NO: 130329 - DNA, 21 bp, Artificial sequence
  SiRNA target sequence
aagaaatagtatattgtatcg

SEQ ID NO: 130330 - DNA, 21 bp, Artificial sequence
  SiRNA target sequence
agaaatagtatattgtatcga

SEQ ID NO: 130331 - DNA, 21 bp, Artificial sequence
  SiRNA target sequence
gaaatagtatattgtatcgaa

SEQ ID NO: 130332 - DNA, 21 bp, Artificial sequence
  SiRNA target sequence
aaatagtatattgtatcgaac

SEQ ID NO: 130333 - DNA, 21 bp, Artificial sequence
  SiRNA target sequence
aatagtatattgtatcgaaca

SEQ ID NO: 130334 - DNA, 21 bp, Artificial sequence
  SiRNA target sequence
atagtatattgtatcgaacat

SEQ ID NO: 130335 - DNA, 21 bp, Artificial sequence
  SiRNA target sequence
tagtatattgtatcgaacatg

SEQ ID NO: 130336 - DNA, 21 bp, Artificial sequence
  SiRNA target sequence
agtatattgtatcgaacatga

SEQ ID NO: 130337 - DNA, 21 bp, Artificial sequence
  SiRNA target sequence
gtatattgtatcgaacatgaa

SEQ ID NO: 130338 - DNA, 21 bp, Artificial sequence
  SiRNA target sequence
tatattgtatcgaacatgaat

SEQ ID NO: 130339 - DNA, 21 bp, Artificial sequence
  SiRNA target sequence
atattgtatcgaacatgaatt

SEQ ID NO: 130340 - DNA, 21 bp, Artificial sequence
  SiRNA target sequence
tattgtatcgaacatgaattg

SEQ ID NO: 130341 - DNA, 21 bp, Artificial sequence
  SiRNA target sequence
attgtatcgaacatgaattgg

SEQ ID NO: 130342 - DNA, 21 bp, Artificial sequence
  SiRNA target sequence
ttgtatcgaacatgaattggc

SEQ ID NO: 130343 - DNA, 21 bp, Artificial sequence
  SiRNA target sequence
tgtatcgaacatgaattggct

SEQ ID NO: 130344 - DNA, 21 bp, Artificial sequence
  SiRNA target sequence
gtatcgaacatgaattggctt

SEQ ID NO: 130345 - DNA, 21 bp, Artificial sequence
  SiRNA target sequence
tatcgaacatgaattggctta

SEQ ID NO: 130346 - DNA, 21 bp, Artificial sequence
  SiRNA target sequence
atcgaacatgaattggcttat

SEQ ID NO: 130347 - DNA, 21 bp, Artificial sequence
  SiRNA target sequence
tcgaacatgaattggcttatc

SEQ ID NO: 130348 - DNA, 21 bp, Artificial sequence
  SiRNA target sequence
cgaacatgaattggcttatcg

SEQ ID NO: 130349 - DNA, 21 bp, Artificial sequence
  SiRNA target sequence
gaacatgaattggcttatcgc

SEQ ID NO: 130350 - DNA, 21 bp, Artificial sequence
  SiRNA target sequence
aacatgaattggcttatcgca

SEQ ID NO: 130351 - DNA, 21 bp, Artificial sequence
  SiRNA target sequence
acatgaattggcttatcgcat

SEQ ID NO: 130352 - DNA, 21 bp, Artificial sequence
  SiRNA target sequence
catgaattggcttatcgcatc

SEQ ID NO: 130353 - DNA, 21 bp, Artificial sequence
  SiRNA target sequence
atgaattggcttatcgcatca

SEQ ID NO: 130354 - DNA, 21 bp, Artificial sequence
  SiRNA target sequence
tgaattggcttatcgcatcag

SEQ ID NO: 130355 - DNA, 21 bp, Artificial sequence
  SiRNA target sequence
gaattggcttatcgcatcagt

SEQ ID NO: 130356 - DNA, 21 bp, Artificial sequence
  SiRNA target sequence
aattggcttatcgcatcagtg

SEQ ID NO: 130357 - DNA, 21 bp, Artificial sequence
  SiRNA target sequence
attggcttatcgcatcagtga

SEQ ID NO: 130358 - DNA, 21 bp, Artificial sequence
  SiRNA target sequence
ttggcttatcgcatcagtgat

SEQ ID NO: 130359 - DNA, 21 bp, Artificial sequence
  SiRNA target sequence
tggcttatcgcatcagtgata

SEQ ID NO: 130360 - DNA, 21 bp, Artificial sequence
  SiRNA target sequence
ggcttatcgcatcagtgatat

SEQ ID NO: 130361 - DNA, 21 bp, Artificial sequence
  SiRNA target sequence
gcttatcgcatcagtgatata

SEQ ID NO: 130362 - DNA, 21 bp, Artificial sequence
  SiRNA target sequence
cttatcgcatcagtgatatat

SEQ ID NO: 130363 - DNA, 21 bp, Artificial sequence
  SiRNA target sequence
ttatcgcatcagtgatatatt

SEQ ID NO: 130364 - DNA, 21 bp, Artificial sequence
  SiRNA target sequence
tatcgcatcagtgatatatta

SEQ ID NO: 130365 - DNA, 21 bp, Artificial sequence
  SiRNA target sequence
atcgcatcagtgatatattat

SEQ ID NO: 130366 - DNA, 21 bp, Artificial sequence
  SiRNA target sequence
tcgcatcagtgatatattatt

SEQ ID NO: 130367 - DNA, 21 bp, Artificial sequence
  SiRNA target sequence
cgcatcagtgatatattattt

SEQ ID NO: 130368 - DNA, 21 bp, Artificial sequence
  SiRNA target sequence
gcatcagtgatatattattta

SEQ ID NO: 130369 - DNA, 21 bp, Artificial sequence
  SiRNA target sequence
catcagtgatatattatttaa

SEQ ID NO: 130370 - DNA, 21 bp, Artificial sequence
  SiRNA target sequence
atcagtgatatattatttaat

SEQ ID NO: 130371 - DNA, 21 bp, Artificial sequence
  SiRNA target sequence
tcagtgatatattatttaata

SEQ ID NO: 130372 - DNA, 21 bp, Artificial sequence
  SiRNA target sequence
cagtgatatattatttaatag

SEQ ID NO: 130373 - DNA, 21 bp, Artificial sequence
  SiRNA target sequence
agtgatatattatttaatagg

SEQ ID NO: 130374 - DNA, 21 bp, Artificial sequence
  SiRNA target sequence
gtgatatattatttaatagga

SEQ ID NO: 130375 - DNA, 21 bp, Artificial sequence
  SiRNA target sequence
tgatatattatttaataggat

SEQ ID NO: 130376 - DNA, 21 bp, Artificial sequence
  SiRNA target sequence
gatatattatttaataggatg

SEQ ID NO: 130377 - DNA, 21 bp, Artificial sequence
  SiRNA target sequence
atatattatttaataggatga

SEQ ID NO: 130378 - DNA, 21 bp, Artificial sequence
  SiRNA target sequence
tatattatttaataggatgat

SEQ ID NO: 130379 - DNA, 21 bp, Artificial sequence
  SiRNA target sequence
atattatttaataggatgatg

SEQ ID NO: 130380 - DNA, 21 bp, Artificial sequence
  SiRNA target sequence
tattatttaataggatgatga

SEQ ID NO: 130381 - DNA, 21 bp, Artificial sequence
  SiRNA target sequence
attatttaataggatgatgat

SEQ ID NO: 130382 - DNA, 21 bp, Artificial sequence
  SiRNA target sequence
ttatttaataggatgatgata

SEQ ID NO: 130383 - DNA, 21 bp, Artificial sequence
  SiRNA target sequence
tatttaataggatgatgatag

SEQ ID NO: 130384 - DNA, 21 bp, Artificial sequence
  SiRNA target sequence
atttaataggatgatgatagg

SEQ ID NO: 130385 - DNA, 21 bp, Artificial sequence
  SiRNA target sequence
tttaataggatgatgatagga

SEQ ID NO: 130386 - DNA, 21 bp, Artificial sequence
  SiRNA target sequence
ttaataggatgatgataggat

SEQ ID NO: 130387 - DNA, 21 bp, Artificial sequence
  SiRNA target sequence
taataggatgatgataggata

SEQ ID NO: 130388 - DNA, 21 bp, Artificial sequence
  SiRNA target sequence
aataggatgatgataggatac

SEQ ID NO: 130389 - DNA, 21 bp, Artificial sequence
  SiRNA target sequence
ataggatgatgataggataca

SEQ ID NO: 130390 - DNA, 21 bp, Artificial sequence
  SiRNA target sequence
taggatgatgataggatacat

SEQ ID NO: 130391 - DNA, 21 bp, Artificial sequence
  SiRNA target sequence
aggatgatgataggatacatt

SEQ ID NO: 130392 - DNA, 21 bp, Artificial sequence
  SiRNA target sequence
ggatgatgataggatacattg

SEQ ID NO: 130393 - DNA, 21 bp, Artificial sequence
  SiRNA target sequence
gatgatgataggatacattga

SEQ ID NO: 130394 - DNA, 21 bp, Artificial sequence
  SiRNA target sequence
atgatgataggatacattgac

SEQ ID NO: 130395 - DNA, 21 bp, Artificial sequence
  SiRNA target sequence
tgatgataggatacattgacg

SEQ ID NO: 130396 - DNA, 21 bp, Artificial sequence
  SiRNA target sequence
gatgataggatacattgacgt

SEQ ID NO: 130397 - DNA, 21 bp, Artificial sequence
  SiRNA target sequence
atgataggatacattgacgtc

SEQ ID NO: 130398 - DNA, 21 bp, Artificial sequence
  SiRNA target sequence
tgataggatacattgacgtca

SEQ ID NO: 130399 - DNA, 21 bp, Artificial sequence
  SiRNA target sequence
gataggatacattgacgtcag

SEQ ID NO: 130400 - DNA, 21 bp, Artificial sequence
  SiRNA target sequence
ataggatacattgacgtcaga

SEQ ID NO: 130401 - DNA, 21 bp, Artificial sequence
  SiRNA target sequence
taggatacattgacgtcagaa

SEQ ID NO: 130402 - DNA, 21 bp, Artificial sequence
  SiRNA target sequence
aggatacattgacgtcagaag

SEQ ID NO: 130403 - DNA, 21 bp, Artificial sequence
  SiRNA target sequence
ggatacattgacgtcagaaga

SEQ ID NO: 130404 - DNA, 21 bp, Artificial sequence
  SiRNA target sequence
gatacattgacgtcagaagag

SEQ ID NO: 130405 - DNA, 21 bp, Artificial sequence
  SiRNA target sequence
atacattgacgtcagaagagc

SEQ ID NO: 130406 - DNA, 21 bp, Artificial sequence
  SiRNA target sequence
tacattgacgtcagaagagca

SEQ ID NO: 130407 - DNA, 21 bp, Artificial sequence
  SiRNA target sequence
acattgacgtcagaagagcat

SEQ ID NO: 130408 - DNA, 21 bp, Artificial sequence
  SiRNA target sequence
cattgacgtcagaagagcatt

SEQ ID NO: 130409 - DNA, 21 bp, Artificial sequence
  SiRNA target sequence
attgacgtcagaagagcattt

SEQ ID NO: 130410 - DNA, 21 bp, Artificial sequence
  SiRNA target sequence
ttgacgtcagaagagcatttg

SEQ ID NO: 130411 - DNA, 21 bp, Artificial sequence
  SiRNA target sequence
tgacgtcagaagagcatttga

SEQ ID NO: 130412 - DNA, 21 bp, Artificial sequence
  SiRNA target sequence
gacgtcagaagagcatttgat

SEQ ID NO: 130413 - DNA, 21 bp, Artificial sequence
  SiRNA target sequence
acgtcagaagagcatttgatt

SEQ ID NO: 130414 - DNA, 21 bp, Artificial sequence
  SiRNA target sequence
cgtcagaagagcatttgattt

SEQ ID NO: 130415 - DNA, 21 bp, Artificial sequence
  SiRNA target sequence
gtcagaagagcatttgattta

SEQ ID NO: 130416 - DNA, 21 bp, Artificial sequence
  SiRNA target sequence
tcagaagagcatttgatttaa

SEQ ID NO: 130417 - DNA, 21 bp, Artificial sequence
  SiRNA target sequence
cagaagagcatttgatttaat

SEQ ID NO: 130418 - DNA, 21 bp, Artificial sequence
  SiRNA target sequence
agaagagcatttgatttaatt

SEQ ID NO: 130419 - DNA, 21 bp, Artificial sequence
  SiRNA target sequence
gaagagcatttgatttaattg

SEQ ID NO: 130420 - DNA, 21 bp, Artificial sequence
  SiRNA target sequence
aagagcatttgatttaattgg

SEQ ID NO: 130421 - DNA, 21 bp, Artificial sequence
  SiRNA target sequence
agagcatttgatttaattggt

SEQ ID NO: 130422 - DNA, 21 bp, Artificial sequence
  SiRNA target sequence
gagcatttgatttaattggta

SEQ ID NO: 130423 - DNA, 21 bp, Artificial sequence
  SiRNA target sequence
agcatttgatttaattggtat

SEQ ID NO: 130424 - DNA, 21 bp, Artificial sequence
  SiRNA target sequence
gcatttgatttaattggtata

SEQ ID NO: 130425 - DNA, 21 bp, Artificial sequence
  SiRNA target sequence
catttgatttaattggtatag

SEQ ID NO: 130426 - DNA, 21 bp, Artificial sequence
  SiRNA target sequence
atttgatttaattggtatagt

SEQ ID NO: 130427 - DNA, 21 bp, Artificial sequence
  SiRNA target sequence
tttgatttaattggtatagta

SEQ ID NO: 130428 - DNA, 21 bp, Artificial sequence
  SiRNA target sequence
ttgatttaattggtatagtag

SEQ ID NO: 130429 - DNA, 21 bp, Artificial sequence
  SiRNA target sequence
tgatttaattggtatagtagc

SEQ ID NO: 130430 - DNA, 21 bp, Artificial sequence
  SiRNA target sequence
gatttaattggtatagtagct

SEQ ID NO: 130431 - DNA, 21 bp, Artificial sequence
  SiRNA target sequence
atttaattggtatagtagctg

SEQ ID NO: 130432 - DNA, 21 bp, Artificial sequence
  SiRNA target sequence
tttaattggtatagtagctga

SEQ ID NO: 130433 - DNA, 21 bp, Artificial sequence
  SiRNA target sequence
ttaattggtatagtagctgaa

SEQ ID NO: 130434 - DNA, 21 bp, Artificial sequence
  SiRNA target sequence
taattggtatagtagctgaag

SEQ ID NO: 130435 - DNA, 21 bp, Artificial sequence
  SiRNA target sequence
aattggtatagtagctgaagt

SEQ ID NO: 130436 - DNA, 21 bp, Artificial sequence
  SiRNA target sequence
attggtatagtagctgaagta

SEQ ID NO: 130437 - DNA, 21 bp, Artificial sequence
  SiRNA target sequence
ttggtatagtagctgaagtaa

SEQ ID NO: 130438 - DNA, 21 bp, Artificial sequence
  SiRNA target sequence
tggtatagtagctgaagtaat

SEQ ID NO: 130439 - DNA, 21 bp, Artificial sequence
  SiRNA target sequence
ggtatagtagctgaagtaatg

SEQ ID NO: 130440 - DNA, 21 bp, Artificial sequence
  SiRNA target sequence
gtatagtagctgaagtaatga

SEQ ID NO: 130441 - DNA, 21 bp, Artificial sequence
  SiRNA target sequence
tatagtagctgaagtaatgaa

SEQ ID NO: 130442 - DNA, 21 bp, Artificial sequence
  SiRNA target sequence
atagtagctgaagtaatgaaa

SEQ ID NO: 130443 - DNA, 21 bp, Artificial sequence
  SiRNA target sequence
tagtagctgaagtaatgaaag

SEQ ID NO: 130444 - DNA, 21 bp, Artificial sequence
  SiRNA target sequence
agtagctgaagtaatgaaaga

SEQ ID NO: 130445 - DNA, 21 bp, Artificial sequence
  SiRNA target sequence
gtagctgaagtaatgaaagac

SEQ ID NO: 130446 - DNA, 21 bp, Artificial sequence
  SiRNA target sequence
tagctgaagtaatgaaagact

SEQ ID NO: 130447 - DNA, 21 bp, Artificial sequence
  SiRNA target sequence
agctgaagtaatgaaagacta

SEQ ID NO: 130448 - DNA, 21 bp, Artificial sequence
  SiRNA target sequence
gctgaagtaatgaaagactat

SEQ ID NO: 130449 - DNA, 21 bp, Artificial sequence
  SiRNA target sequence
ctgaagtaatgaaagactatt

SEQ ID NO: 130450 - DNA, 21 bp, Artificial sequence
  SiRNA target sequence
tgaagtaatgaaagactatta

SEQ ID NO: 130451 - DNA, 21 bp, Artificial sequence
  SiRNA target sequence
gaagtaatgaaagactattac

SEQ ID NO: 130452 - DNA, 21 bp, Artificial sequence
  SiRNA target sequence
aagtaatgaaagactattacg

SEQ ID NO: 130453 - DNA, 21 bp, Artificial sequence
  SiRNA target sequence
agtaatgaaagactattacgg

SEQ ID NO: 130454 - DNA, 21 bp, Artificial sequence
  SiRNA target sequence
gtaatgaaagactattacgga

SEQ ID NO: 130455 - DNA, 21 bp, Artificial sequence
  SiRNA target sequence
taatgaaagactattacggat

SEQ ID NO: 130456 - DNA, 21 bp, Artificial sequence
  SiRNA target sequence
aatgaaagactattacggatg

SEQ ID NO: 130457 - DNA, 21 bp, Artificial sequence
  SiRNA target sequence
atgaaagactattacggatgg

SEQ ID NO: 130458 - DNA, 21 bp, Artificial sequence
  SiRNA target sequence
tgaaagactattacggatggg

SEQ ID NO: 130459 - DNA, 21 bp, Artificial sequence
  SiRNA target sequence
gaaagactattacggatggga

SEQ ID NO: 130460 - DNA, 21 bp, Artificial sequence
  SiRNA target sequence
aaagactattacggatgggat

SEQ ID NO: 130461 - DNA, 21 bp, Artificial sequence
  SiRNA target sequence
aagactattacggatgggatc

SEQ ID NO: 130462 - DNA, 21 bp, Artificial sequence
  SiRNA target sequence
agactattacggatgggatca

SEQ ID NO: 130463 - DNA, 21 bp, Artificial sequence
  SiRNA target sequence
gactattacggatgggatcag

SEQ ID NO: 130464 - DNA, 21 bp, Artificial sequence
  SiRNA target sequence
actattacggatgggatcagc

SEQ ID NO: 130465 - DNA, 21 bp, Artificial sequence
  SiRNA target sequence
ctattacggatgggatcagca

SEQ ID NO: 130466 - DNA, 21 bp, Artificial sequence
  SiRNA target sequence
tattacggatgggatcagcaa

SEQ ID NO: 130467 - DNA, 21 bp, Artificial sequence
  SiRNA target sequence
attacggatgggatcagcaaa

SEQ ID NO: 130468 - DNA, 21 bp, Artificial sequence
  SiRNA target sequence
ttacggatgggatcagcaaag

SEQ ID NO: 130469 - DNA, 21 bp, Artificial sequence
  SiRNA target sequence
tacggatgggatcagcaaaga

SEQ ID NO: 130470 - DNA, 21 bp, Artificial sequence
  SiRNA target sequence
acggatgggatcagcaaagat

SEQ ID NO: 130471 - DNA, 21 bp, Artificial sequence
  SiRNA target sequence
cggatgggatcagcaaagata

SEQ ID NO: 130472 - DNA, 21 bp, Artificial sequence
  SiRNA target sequence
ggatgggatcagcaaagatat

SEQ ID NO: 130473 - DNA, 21 bp, Artificial sequence
  SiRNA target sequence
gatgggatcagcaaagatata

SEQ ID NO: 130474 - DNA, 21 bp, Artificial sequence
  SiRNA target sequence
atgggatcagcaaagatataa

SEQ ID NO: 130475 - DNA, 21 bp, Artificial sequence
  SiRNA target sequence
tgggatcagcaaagatataat

SEQ ID NO: 130476 - DNA, 21 bp, Artificial sequence
  SiRNA target sequence
gggatcagcaaagatataatg

SEQ ID NO: 130477 - DNA, 21 bp, Artificial sequence
  SiRNA target sequence
ggatcagcaaagatataatga

SEQ ID NO: 130478 - DNA, 21 bp, Artificial sequence
  SiRNA target sequence
gatcagcaaagatataatgaa

SEQ ID NO: 130479 - DNA, 21 bp, Artificial sequence
  SiRNA target sequence
atcagcaaagatataatgaag

SEQ ID NO: 130480 - DNA, 21 bp, Artificial sequence
  SiRNA target sequence
tcagcaaagatataatgaaga

SEQ ID NO: 130481 - DNA, 21 bp, Artificial sequence
  SiRNA target sequence
cagcaaagatataatgaagaa

SEQ ID NO: 130482 - DNA, 21 bp, Artificial sequence
  SiRNA target sequence
agcaaagatataatgaagaaa

SEQ ID NO: 130483 - DNA, 21 bp, Artificial sequence
  SiRNA target sequence
gcaaagatataatgaagaaac

SEQ ID NO: 130484 - DNA, 21 bp, Artificial sequence
  SiRNA target sequence
caaagatataatgaagaaaca

SEQ ID NO: 130485 - DNA, 21 bp, Artificial sequence
  SiRNA target sequence
aaagatataatgaagaaacaa

SEQ ID NO: 130486 - DNA, 21 bp, Artificial sequence
  SiRNA target sequence
aagatataatgaagaaacaaa

SEQ ID NO: 130487 - DNA, 21 bp, Artificial sequence
  SiRNA target sequence
agatataatgaagaaacaaaa

SEQ ID NO: 130488 - DNA, 21 bp, Artificial sequence
  SiRNA target sequence
gatataatgaagaaacaaaat

SEQ ID NO: 130489 - DNA, 21 bp, Artificial sequence
  SiRNA target sequence
atataatgaagaaacaaaatt

SEQ ID NO: 130490 - DNA, 21 bp, Artificial sequence
  SiRNA target sequence
tataatgaagaaacaaaatta

SEQ ID NO: 130491 - DNA, 21 bp, Artificial sequence
  SiRNA target sequence
ataatgaagaaacaaaattat

SEQ ID NO: 130492 - DNA, 21 bp, Artificial sequence
  SiRNA target sequence
taatgaagaaacaaaattatg

SEQ ID NO: 130493 - DNA, 21 bp, Artificial sequence
  SiRNA target sequence
aatgaagaaacaaaattatgc

SEQ ID NO: 130494 - DNA, 21 bp, Artificial sequence
  SiRNA target sequence
atgaagaaacaaaattatgca

SEQ ID NO: 130495 - DNA, 21 bp, Artificial sequence
  SiRNA target sequence
tgaagaaacaaaattatgcat

SEQ ID NO: 130496 - DNA, 21 bp, Artificial sequence
  SiRNA target sequence
gaagaaacaaaattatgcatg

SEQ ID NO: 130497 - DNA, 21 bp, Artificial sequence
  SiRNA target sequence
aagaaacaaaattatgcatgg

SEQ ID NO: 130498 - DNA, 21 bp, Artificial sequence
  SiRNA target sequence
agaaacaaaattatgcatgga

SEQ ID NO: 130499 - DNA, 21 bp, Artificial sequence
  SiRNA target sequence
gaaacaaaattatgcatggaa

SEQ ID NO: 130500 - DNA, 21 bp, Artificial sequence
  SiRNA target sequence
aaacaaaattatgcatggaaa

SEQ ID NO: 130501 - DNA, 21 bp, Artificial sequence
  SiRNA target sequence
aacaaaattatgcatggaaat

SEQ ID NO: 130502 - DNA, 21 bp, Artificial sequence
  SiRNA target sequence
acaaaattatgcatggaaatg

SEQ ID NO: 130503 - DNA, 21 bp, Artificial sequence
  SiRNA target sequence
caaaattatgcatggaaatga

SEQ ID NO: 130504 - DNA, 21 bp, Artificial sequence
  SiRNA target sequence
aaaattatgcatggaaatgat

SEQ ID NO: 130505 - DNA, 21 bp, Artificial sequence
  SiRNA target sequence
aaattatgcatggaaatgatg

SEQ ID NO: 130506 - DNA, 21 bp, Artificial sequence
  SiRNA target sequence
aattatgcatggaaatgatgg

SEQ ID NO: 130507 - DNA, 21 bp, Artificial sequence
  SiRNA target sequence
attatgcatggaaatgatgga

SEQ ID NO: 130508 - DNA, 21 bp, Artificial sequence
  SiRNA target sequence
ttatgcatggaaatgatggaa

SEQ ID NO: 130509 - DNA, 21 bp, Artificial sequence
  SiRNA target sequence
tatgcatggaaatgatggaaa

SEQ ID NO: 130510 - DNA, 21 bp, Artificial sequence
  SiRNA target sequence
atgcatggaaatgatggaaac

SEQ ID NO: 130511 - DNA, 21 bp, Artificial sequence
  SiRNA target sequence
tgcatggaaatgatggaaact

SEQ ID NO: 130512 - DNA, 21 bp, Artificial sequence
  SiRNA target sequence
gcatggaaatgatggaaactt

SEQ ID NO: 130513 - DNA, 21 bp, Artificial sequence
  SiRNA target sequence
catggaaatgatggaaacttg

SEQ ID NO: 130514 - DNA, 21 bp, Artificial sequence
  SiRNA target sequence
atggaaatgatggaaacttgt

SEQ ID NO: 130515 - DNA, 21 bp, Artificial sequence
  SiRNA target sequence
tggaaatgatggaaacttgtg

SEQ ID NO: 130516 - DNA, 21 bp, Artificial sequence
  SiRNA target sequence
ggaaatgatggaaacttgtgg

SEQ ID NO: 130517 - DNA, 21 bp, Artificial sequence
  SiRNA target sequence
gaaatgatggaaacttgtggt

SEQ ID NO: 130518 - DNA, 21 bp, Artificial sequence
  SiRNA target sequence
aaatgatggaaacttgtggtt

SEQ ID NO: 130519 - DNA, 21 bp, Artificial sequence
  SiRNA target sequence
aatgatggaaacttgtggtta

SEQ ID NO: 130520 - DNA, 21 bp, Artificial sequence
  SiRNA target sequence
atgatggaaacttgtggttat

SEQ ID NO: 130521 - DNA, 21 bp, Artificial sequence
  SiRNA target sequence
tgatggaaacttgtggttata

SEQ ID NO: 130522 - DNA, 21 bp, Artificial sequence
  SiRNA target sequence
gatggaaacttgtggttatag

SEQ ID NO: 130523 - DNA, 21 bp, Artificial sequence
  SiRNA target sequence
atggaaacttgtggttatagt

SEQ ID NO: 130524 - DNA, 21 bp, Artificial sequence
  SiRNA target sequence
tggaaacttgtggttatagtt

SEQ ID NO: 130525 - DNA, 21 bp, Artificial sequence
  SiRNA target sequence
ggaaacttgtggttatagttt

SEQ ID NO: 130526 - DNA, 21 bp, Artificial sequence
  SiRNA target sequence
gaaacttgtggttatagttta

SEQ ID NO: 130527 - DNA, 21 bp, Artificial sequence
  SiRNA target sequence
aaacttgtggttatagtttat

SEQ ID NO: 130528 - DNA, 21 bp, Artificial sequence
  SiRNA target sequence
aacttgtggttatagtttatt

SEQ ID NO: 130529 - DNA, 21 bp, Artificial sequence
  SiRNA target sequence
acttgtggttatagtttatta

SEQ ID NO: 130530 - DNA, 21 bp, Artificial sequence
  SiRNA target sequence
cttgtggttatagtttattaa

SEQ ID NO: 130531 - DNA, 21 bp, Artificial sequence
  SiRNA target sequence
ttgtggttatagtttattaaa

SEQ ID NO: 130532 - DNA, 21 bp, Artificial sequence
  SiRNA target sequence
tgtggttatagtttattaaaa

SEQ ID NO: 130533 - DNA, 21 bp, Artificial sequence
  SiRNA target sequence
gtggttatagtttattaaaaa

SEQ ID NO: 130534 - DNA, 21 bp, Artificial sequence
  SiRNA target sequence
tggttatagtttattaaaaaa

SEQ ID NO: 130535 - DNA, 21 bp, Artificial sequence
  SiRNA target sequence
ggttatagtttattaaaaaat
